(19) United States
(12) Patent Application Publication
(10) Pub. No.: US 2009/0326051 A1
(43) Pub. Date: Dec. 31, 2009

(54) Modulation of gene expression through endogenous small RNA targeting of gene promoters

(75) Inventors: David R. Corey, Dallas, TX (US); Scott T. Younger, Dallas, TX (US)

Correspondence Address: FULBRIGHT & JAWORSKI L.L.P., 600 CONGRESS AVE., SUITE 2400, AUSTIN, TX, 78701, US

(73) Assignee: The Board of Regents of the University of Texas System

(21) Appl. No.: 12/455,588

(22) Filed: Jun. 3, 2009

Related U.S. Application Data
(60) Provisional application No. 61/058,909, filed on Jun. 4, 2008.
(60) Provisional application No. 61/172,556, filed on Apr. 24, 2009.

(51) Int. Cl. A61K 48/00; C12N 5/00; C12Q 1/68

(52) U.S. Cl. 514/44 R; 435/375; 435/6

(57) ABSTRACT

Gene expression can be selectively regulated by endogenous miRNAs that target promoters of genes. Altering of the activity of these promoter-targeting miRNAs with single-stranded complementary oligonucleotides that bind the miRNA causes modulation of expression of the target gene. Endogenous miRNAs that modulate expression of target genes can be identified by (a) evaluating an endogenous miRNA for complementarity to a target gene promoter; and (b) determining that the complementary miRNA modulates expression of the target gene.

### CROSS-REFERENCE TO RELATED APPLICATIONS

[0001] This application claims benefit of priority to U.S. Provisional Application Ser. No. 61/058,909, filed Jun. 4, 2008, and U.S. Provisional Application Ser. No. 61/172,556, filed Apr. 24, 2009, the entire contents of each application being hereby incorporated by reference.

### STATEMENT REGARDING FEDERALLY SPONSORED RESEARCH

[0002] This work was made with government support under grants NIGMS 60642, 77253, and 73042, R01CA 129632 and GM07062 from the National Institutes of Health. The government has certain rights in this invention.

### INCORPORATION BY REFERENCE OF SEQUENCE LISTING SUBMISSTED ON COMPACT DISC PURSUANT TO 37 C.F.R 1.52(e)

[0003] The Sequence Listing is submitted on one compact disc (Copy 1), together with a duplicate thereof (Copy 2), each created on Jun. 3, 2009, and each containing one 5,721 KB file entitled “UTSD:2088US.TXT.” The material contained on the compact disc is specifically incorporated herein by reference.

### INCORPORATION BY REFERENCE OF TABLE EXCEEDING 50 PAGES SUBMITTED ON COMPACT DISC PURSUANT TO 37 C.F.R. 1.52(e)

[0004] Table 1 is submitted on one compact disc (Copy 1), together with a duplicate thereof (Copy 2), each created on Jun. 3, 2009, and each containing one 3,964 KB file entitled “UTSD2088US_TABLE1.” The material contained on the compact disc is specifically incorporated herein by reference.

LENGTHY TABLES
The patent application contains a lengthy table section. A copy of the table is available in electronic form from the USPTO web site (http://seqdata.uspto.gov/?pageRequest=docDetail&DocID=US20090326051A1). An electronic copy of the table will also be available from the USPTO upon request and payment of the fee set forth in 37 CFR 1.19(b)(3).

[0005] I. Field of the Invention

[0006] The invention relates to modulating of gene expression using single-stranded oligonucleotides complementary to endogenous miRNAs complementary to promoter regions of target genes.

[0007] II. Background of the Invention

[0008] Synthetic small duplex RNAs complementary to gene promoters within chromosomal DNA are potent inhibitors or activators of target gene expression in mammalian cells (Morris et al., 2004; Ting et al., 2005; Janowski et al., 2005; Li et al., 2006; Janowski et al., 2007). These synthetic RNAs are called antigene RNAs (agRNAs) to distinguish them from small duplex RNAs that target mRNA. agRNAs recruit members of the argonaute (AGO) protein family to RNA transcripts that originate from the target gene promoter (Janowski et al., 2006; Kim et al., 2006; Han et al., 2007; Schwartz et al., 2008). Recognition of the target RNA occurs in close proximity to the chromosome, resulting in transcriptional modulation of the target gene.

[0009] One remarkable feature of the synthetic agRNAs that the inventors have examined is the potency and robustness of their activity when they are introduced into cells. This potency, coupled with the presence of protein machinery that facilitates their function, suggests that endogenous small RNAs may possess the ability to recognize gene promoters. If RNA could direct proteins to specific gene promoters, such RNA-mediated modulation of transcription might have evolutionary advantages relative to the development of gene-specific protein transcription factors.

[0010] Synthetic duplex RNAs that are complementary to mRNA (small interfering RNAs or siRNAs) are also potent and robust agents for modulating gene expression (Fire et al., 1998). siRNAs are known to have endogenous analogs that regulate gene expression called microRNAs (miRNAs) (Lagos-Quintana et al., 2001). miRNAs are processed inside the cell from RNA precursors that contain stem-loop structures. These stem-loop structures are processed by the double-stranded nucleases Drosha and Dicer to produce mature miRNAs.

[0011] As of the current release of the miRNA repository (miRBase v12.0), 866 human miRNAs have been annotated, but this number continues to increase. Several miRNAs that recognize sequences within the 3′-untranslated regions (3′UTR) of mRNA transcripts have been characterized. Many miRNAs, however, have no known targets (Lee et al., 1993; John et al., 2004) while some can recognize multiple mRNAs, suggesting that the determinants of miRNA interactions are complex and poorly understood.

[0012] Two reports based on computational analyses have suggested that miRNAs can modulate gene expression through promoter recognition. Dahiya and co-workers used publically available software (RegRNA) to search for potential miRNA target sites within the promoter of the E-cadherin gene (Place et al., 2008). They identified one potential binding site for miR-373 within the E-cadherin promoter and reported that introduction of a synthetic miR-373 mimic increased expression of the gene by 6-fold at the level of the mRNA. Rossi and co-workers searched for perfect complementarity between miRNAs and gene promoters (Kim et al., 2008). Their analysis suggested that miR-320 targets the genomic location from which it is transcribed and showed that expression of miR-320 and the adjacent gene, POLR3D, are anti-correlated.

[0013] The above-mentioned studies either analyzed a single gene promoter or used highly stringent sequence comparison criteria. These approaches were not intended to assess the broader potential for miRNAs to recognize gene promoters, warranting a more thorough evaluation of the relationship between miRNAs and promoter sequences.

[0014] A practical justification for more comprehensive studies is that validating natural gene targets of miRNAs is a complex and difficult process. The development of systematic and efficient methods for identifying promoter sequences that may be miRNA targets is essential for prioritizing predictions and efficiently allocating experimental resources towards validating the most promising targets.

### SUMMARY OF THE INVENTION

[0015] Thus, in accordance with the present invention, there is provided a method of modulating expression of a target gene in a cell comprising contacting an endogenous miRNA complementary to a portion of a promoter of the target gene with a single-stranded complementary oligonucleotide that hybridizes to the miRNA, thereby modulating expression of the target gene. The miRNA may target a non-coding RNA (ncRNA) transcribed from the promoter. The single-stranded complementary oligonucleotide may comprise at least one locked nucleic acid (LNA) base or at least one 2′-O-methyl (2′-O-me) base. The miRNA may be 80%, 85%, 90%, 95% or 100% complementary to the portion of the promoter. The single-stranded complementary oligonucleotide may be the same length as the miRNA or shorter than the miRNA. The complementary oligonucleotide may comprise of or consist of a sequence selected from SEQ ID NOS:20001-40000.

[0016] The target gene may be trophinin-associated protein (TROAP), proline-rich nuclear receptor coactivator 2 (PNRC2), protein phosphatase 2C, Mg-dependent catalytic subunit (PPM2C), pregnancy specific beta-1-glycoprotein 1 (PSG1), anterior pharynx defective 1 homolog B (C. elegans) (APH1B), U2AF homology motif (UHM) kinase 1 (UHMK1), ring finger protein 165 (RNF165), catechol O-methyltransferase (COMT), tyrosine protein kinse O 3 (TYRO3), γ-aminobutyric acid A receptor α2 (GABRA2) or calcium/calmodulin-dependent protein kinase II inhibitor 1 (CAMK2N1). The target gene also may be brain and reproductive organ-expressed (TNFRSF1A modulator) (BRE); caveolin 1 (caveolae protein, 22 kDa, CAV1); inhibin, alpha (INHA); ribonuclease/angiogenin inhibitor 1 (RNH1); Sp1 transcription factor (SP1); DEK oncogene (DNA binding) (DEK); hepatic leukemia factor (HLF); opioid receptor, kappa 1 (OPRK1); or glyceraldehyde-3-phosphate dehydrogenase, spermatogenic (GAPDHS). The target gene may also be any of the genes set for the Table 1, and the target sequence may be selected from SEQ ID NOS:1-20000.

[0017] The target gene may be a native gene, and in a particular, embodiment, the cell may be located in situ in a host, and the contacting step is effected by administering to the host an effective amount of the complementary oligonucleotide. In a particular embodiment, the target gene is Caveolin-1 in a metastatic cell, the contacting step is effected by contacting the cell an effective amount of the complementary oligonucleotide comprising locked nucleic acid (LNA) or 2′-O-methyl (2′-O-me) bases. In another particular embodiment, the target gene is MAPKAPK2 in situ in a host, the contacting step is effected by administering to the host an effective amount of the complementary oligonucleotide comprising locked nucleic acid (LNA) or 2′-O-methyl (2′-O-me) bases.

[0018] In various embodiments, the expression of the target gene may be increased or decreased. The method may further comprise detecting a change in the expression of the target gene, for example, by inferring a change in the expression of the target gene from a physiologic change in the cell, or by detecting comprises one or more of Northern blot, PCR, immunohistochemistry, Western blot or ELISA. The cell may be located in situ in a host and the detecting may comprise inferring a change in the expression of the target gene from a physiologic change in the host.

[0019] The portion may lie between −200 and −1 relative to a transcriptional start site of the target gene, between −500 and −201 relative to a transcriptional start site of the target gene, or between −2000 and −501 relative to a transcriptional start site of the target gene. The method may further comprise the step of identifying the endogenous miRNA, such as by identifying an miRNA seed region is the promoter, by calculating a minimum free energy for said seed region.

[0020] In another embodiment, there is provided method for identifying an endogenous miRNA that modulates expression of a target gene (a) identifying an endogenous miRNA exhibiting complementarity to a portion of a promoter of the target gene; and (b) assessing the ability of the complementary miRNA to modulate expression of the target gene.

[0021] The invention provides compositions such as reagents and formulations tailored to the subject methods. It is contemplated that any method or composition described herein can be implemented with respect to any other method or composition described herein.

[0022] The use of the word “a” or “an” when used in conjunction with the term “comprising” in the claims and/or the specification may mean “one,” but it is also consistent with the meaning of “one or more,” “at least one,” and “one or more than one.”

[0023] These and other embodiments of the invention will be better understood when considered in conjunction with the following description and the accompanying drawings. It should be understood that the following description, while indicating various embodiments of the invention and numerous specific details thereof, is given by way of illustration and not of limitation. Many substitutions, modifications, additions and/or rearrangements may be made within the scope of the invention without departing from the spirit thereof, and the invention includes all such substitutions, modifications, additions and/or rearrangements.

### BRIEF DESCRIPTION OF THE FIGURES

[0024] The following drawings form part of the present specification and are included to further demonstrate certain aspects of the present invention. The invention may be better understood by reference to one or more of these drawings in combination with the detailed description of specific embodiments presented herein

[0025] FIG. 1—Sequence comparison process.

[0026] FIG. 2—miRNAs and target gene promoters.

[0027] FIG. 3—Alignment of miRNAs and target gene promoters.

[0028] FIG. 4—siRNA, miRNA mimics and LNA-miRNA inhibitors.

[0029] FIG. 5—Primers for qPCR.

[0030] FIG. 6—Primers for RACE.

[0031] FIGS. 7A-B—(FIG. 7A) Diagram of sequences that are potential miRNA targets. (FIG. 7B) Schematic of algorithm used to predict miRNA targets within gene promoters.

[0032] FIGS. 8A-C—Gene promoters contain predicted miRNA target sites. (FIG. 8A) The frequency of seed sequence matches in promoter regions, 5′UTRs, coding sequences, and 3′UTRs. (FIG. 8B) Comparison of seed matches within promoter-overlapping transcripts vs. randomized promoter sequences. (FIG. 8C) Distribution of seed match locations within sense and antisense transcripts that overlap gene promoters from −1 to −200 relative to the +1 transcription start site.

[0033] FIGS. 9A-B—MFE properties of miRNA target predictions. (FIG. 9A) Distribution of MFE values for predictions within promoter-overlapping transcripts as compared to randomized promoter sequences. (FIG. 9B) Distribution of MFE values for predictions within promoter-overlapping transcripts as compared to 3′UTRs.

[0034] FIG. 10—Examples of predicted miRNA targets within sequences of promoter-overlapping transcripts.

[0035] FIG. 11—miR-423-5p mimic decreases expression of predicted target genes.

### DETAILED DESCRIPTION OF SPECIFIC EMBODIMENTS OF THE INVENTION

[0036] The invention provides a general method of selectively modulating (increasing or decreasing) expression (i.e., transcription) of a target gene by (a) identifying an endogenous miRNA complementary to a promoter of the target gene; (b) contacting the miRNA with a single-stranded complementary oligonucleotide that hybridizes to the miRNA, thereby modulating expression of the target gene. In a particular embodiment, the target gene is a native gene, may be located in a cell, which may be in situ in a host, the contacting step is effected by administering to the host an effective amount of the oligonucleotide, and/or the modulated expression is inferred from a correlated physiologic change in the host.

[0037] As disclosed and exemplified herein, by exploiting this hitherto unappreciated endogenous mechanism for selective regulation of gene expression, these methods are generally applicable across a wide variety of target genes, promoter regions, oligonucleotides, cell types and delivery conditions. While conditions whereby a given oligonucleotide selectively modulates expression of a given target gene may be confirmed empirically (e.g., pursuant to the protocols described herein), these data indicate that mammalian cells are generally amenable to target gene selective modulation of target gene expression using these methods.

[0038] Various aspects of the invention, as set forth above, are described in greater detail in the following paragraphs.

### I. miRNA and Oligonucleotide Antagonists Thereof

[0039] A. miRNAs

[0040] microRNAs (miRNA) are single-stranded RNA molecules of 21-23 nucleotides in length, which regulate gene expression. miRNAs are encoded by genes from whose DNA they are transcribed but miRNAs are not translated into protein (non-coding RNA); instead each primary transcript (a pri-miRNA) is processed into a short stem-loop structure called a pre-miRNA and finally into a functional miRNA. Mature miRNA molecules are partially complementary to one or more messenger RNA (mRNA) molecules, and their main function is to down-regulate gene expression.

[0041] The genes encoding miRNAs are much longer than the processed mature miRNA molecule; miRNAs are first transcribed as primary transcripts or pri-miRNA (up to about 100 bases in length) with a cap and poly-A tail, and then processed to short, 70-nucleotide stem-loop structures known as pre-miRNA in the cell nucleus. This processing is performed in animals by a protein complex known as the Microprocessor complex, consisting of the nuclease Drosha and the double-stranded RNA binding protein Pasha. These pre-miRNAs are then processed to mature miRNAs in the cytoplasm by interaction with the endonuclease Dicer, which also initiates the formation of the RNA-induced silencing complex (RISC). This complex is responsible for the gene silencing observed due to miRNA expression and RNA interference.

[0042] In general, perfect complementarity between the target sequences and bases 2-8 of the mature miRNA sequence is required for miRNA function. Although not necessarily a prerequisite for miRNA function, the minimum free energy (MFE) of hybridization between miRNAs and their predicted target sites have been successfully used to predict miRNA target sites within 3′UTRs (Stark et al., 2003). Another criterion used in miRNA target prediction is sequence complementarity. Sequence complementarity alone has been used successfully to predict miRNA target sites within 3′UTRs (Lai, 2002).

[0043] B. Antagonists

[0044] Oligonucleotides of the present invention are single-stranded nucleic acid segments of 12-30 bases in length that are designed to target miRNAs that bind to promoter encoded sequences in target cells. In particular, ranges of 12-23, 15-30, 15-23, 18-23, 19-23, 20-23 and 21-23 bases are contemplated, as are specific lengths of 12, 13, 14, 15, 16, 17, 18, 19, 20, 21, 22, 23, 24 and 25 bases. Such sequences have been termed “antagomirs” to indicate their ability to antagonize miRNAs.

[0045] In general, antagomirs are defined as single-stranded, double-stranded, partially double-stranded and hairpin structured oligonucleotides that target an miRNA. An antagomir generally is at least 12 or more contiguous nucleotides completely or substantially complementary to an endogenous miRNA or pre-miRNA nucleotide sequence. In particular, an antagomir includes a nucleotide sequence sufficiently complementary to hybridize to 12-23 nucleotides from an miRNA target sequence. Exemplary target sequences are provided in Table 1 and as SEQ ID NOS:1-20000, while corresponding antagomirs are listed there and as SEQ ID NOS:20001-40000.

[0046] Oligonucleotides are chemically synthesized using nucleoside phosphoramidites. A phosphoramidite is a derivative of natural or synthetic nucleoside with protection groups added to its reactive exocyclic amine and hydroxy groups. The naturally occurring nucleotides (nucleoside-3′-phosphates) are insufficiently reactive to afford the synthetic preparation of oligonucleotides. A dramatically more reactive (2-cyanoethyl) N,N-diisopropyl phosphoramidite group is therefore attached to the 3′-hydroxy group of a nucleoside to form nucleoside phosphoramidite. The protection groups prevent unwanted side reactions or facilitate the formation of the desired product during synthesis. The 5′-hydroxyl group is protected by DMT (dimethoxytrityl) group, the phosphite group by a diisopropylamino (iPr2N) group and a 2-cyanoethyl (OCH₂CH₂CN) group. The nucleic bases also have protecting groups on the exocyclic amine groups (benzoyl, acetyl, isobutyryl, or many other groups). In RNA synthesis, the 2′ group is protected with a TBDMS (t-butyldimethylsilyl) group or with a TOM (t-butyldimethylsilyloxymethyl) group. With the completion of the synthesis process, all the protection groups are removed.

[0047] Whereas enzymes synthesize DNA in a 5′ to 3′ direction, chemical DNA synthesis is done backwards in a 3′ to 5′ reaction. Based on the desired nucleotide sequence of the product, the phosphoramidites of nucleosides A, C, G, and T are added sequentially to react with the growing chain in a repeating cycle until the sequence is complete. In each cycle, the product's 5′-hydroxy group is deprotected and a new base is added for extension. In solid-phase synthesis, the oligonucleotide being assembled is bound, via its 3′-terminal hydroxy group, to a solid support material on which all reactions take place. The 3′ group of the first base is immobilized via a linker onto a solid support (most often, controlled pore glass particles or macroporouspolystyrene beads). This allows for easy addition and removal of reactants. In each cycle, several solutions containing reagents required for the elongation of the oligonucleotide chain by one nucleotide residue are sequentially pumped through the column from an attached reagent delivery system and removed by washing with an inert solvent.

[0048] Antagomirs can be synthesized to include a modification that imparts a desired characteristic. For example, the modification can improve stability, hybridization thermodynamics with a target nucleic acid, targeting to a particular tissue or cell-type, or cell permeability, e.g., by an endocytosis-dependent or -independent mechanism. Modifications can also increase sequence specificity, and consequently decrease off-site targeting. In one embodiment, the antagomir includes a non-nucleotide moiety, e.g., a cholesterol moiety. The non-nucleotide moiety can be attached to the 3′ or 5′ end of the oligonucleotide agent.

[0049] A wide variety of well-known, alternative oligonucleotide chemistries may be used (see, e.g., U.S. Patent Publications 2007/0213292, 2008/0032945, 2007/0287831, etc.), particularly single-stranded complementary oligonucleotides comprising 2′ methoxyethyl, 2′-fluoro, and morpholino bases (see e.g., Summerton and Weller, 1997). The oligonucleotide may include a 2′-modified nucleotide, e.g., a 2′-deoxy, 2′-deoxy-2′-fluoro, 2′-O-methyl, 2′-O-methoxyethyl (2′-O-MOE), 2′-O-aminopropyl (2′-O-AP), 2′-O-dimethylaminoethyl (2′-O-DMAOE), 2′-O-dimethylaminopropyl (2′-O-DMAP), 2′-O-dimethylaminoethyloxyethyl (2′-O-DMAEOE), or 2′-O—N-methylacetamido (2′-O—NMA). Also contemplated are locked nucleic acid (LNA) and peptide nucleic acids (PNA).

[0050] Peptide nucleic acids (PNAs) are nonionic DNA mimics that have outstanding potential for recognizing duplex DNA (Kaihatsu et al., 2004; Nielsen et al., 1991). PNAs can be readily synthesized and bind to complementary sequences by standard Watson-Crick base-pairing (Egholm et al., 1993), allowing them to target any sequence within the genome without the need for complex synthetic protocols or design considerations. Strand invasion of duplex DNA by PNAs is not hindered by phosphate-phosphate repulsion and is both rapid and stable (Kaihatsu et al., 2004; Nielsen et al., 1991). Applications for strand invasion by PNAs include creation of artificial primosomes (Demidov et al., 2001), inhibition of transcription (Larsen and Nielsen, 1996), activation of transcription (Mollegaard et al., 1994), and directed mutagenesis (Faruqi et al., 1998). PNAs would provide a general and potent strategy for probing the structure and function of chromosomal DNA in living systems if their remarkable strand invasion abilities could be efficiently applied inside cells.

[0051] Strand invasion by PNAs in cell-free systems is most potent at sequences that are partially single-stranded (Bentin and Nielsen, 1996; Zhang et al., 2000). Assembly of RNA polymerase and transcription factors into the pre-initiation complex on DNA induces the formation of a structure known as the open complex that contains several bases of single-stranded DNA (Holstege et al., 1997; Kahl et al., 2000). The exceptional ability of PNAs to recognize duplex DNA allows them to intercept the open complex of an actively transcribed gene without a requirement for preincubation. The open complex is formed during transcription of all genes and PNAs can be synthesized to target any transcription initiation site. Therefore, antigene PNAs that target an open complex at a promoter region within chromosomal DNA would have the potential to be general tools for controlling transcription initiation inside cells.

[0052] A locked nucleic acid (LNA), often referred to as inaccessible RNA, is a modified RNA nucleotide (Elmén et al., 2008). The ribose moiety of an LNA nucleotide is modified with an extra bridge connecting the 2′ and 4′ carbons. The bridge “locks” the ribose in the 3′-endo structural conformation, which is often found in the A-form of DNA or RNA. LNA nucleotides can be mixed with DNA or RNA bases in the oligonucleotide whenever desired. Such oligomers are commercially available. The locked ribose conformation enhances base stacking and backbone pre-organization. This significantly increases the thermal stability (melting temperature) of oligonucleotides (Kaur et al., 2006). LNA bases may be included in a DNA backbone, by they can also be in a backbone of LNA, 2′-O-methyl RNA, 2′-methoxyethyl RNA, or 2′-fluoro RNA. These molecules may utilize either a phosphodiester or phosphorothioate backbone.

[0053] Other oligonucleotide modifications can be made to produce oligonucleotides. For example, stability against nuclease degradation has been achieved by introducing a phosphorothioate (P═S) backbone linkage at the 3′ end for exonuclease resistance and 2′ modifications (2′-OMe, 2′-F and related) for endonuclease resistance (WO 2005115481; Li et al., 2005; Choung et al., 2006). A motif having entirely of 2′-O-methyl and 2′-fluoro nucleotides has shown enhanced plasma stability and increased in vitro potency (Allerson et al., 2005). The incorporation of 2′-O-Me and 2′-O-MOE does not have a notable effect on activity (Prakash et al., 2005).

[0054] Sequences containing a 4′-thioribose modification have been shown to have a stability 600 times greater than that of natural RNA (Hoshika et al, 2004). Crystal structure studies reveal that 4′-thioriboses adopt conformations very similar to the C3′-endo pucker observed for unmodified sugars in the native duplex (Haeberli et al., 2005). Stretches of 4′-thio-RNA were well tolerated in both the guide and nonguide strands. However, optimization of both the number and the placement of 4′-thioribonucleosides is necessary for maximal potency.

[0055] In the boranophosphate linkage, a non-bridging phosphodiester oxygen is replaced by an isoelectronic borane (BH3-) moiety. Boranophosphate siRNAs have been synthesized by enzymatic routes using T7 RNA polymerase and a boranophosphate ribonucleoside triphosphate in the transcription reaction. Boranophosphate siRNAs are more active than native siRNAs if the center of the guide strand is not modified, and they may be at least ten times more nuclease resistant than unmodified siRNAs (Hall et al., 2004; Hall et al., 2006).

[0056] Certain terminal conjugates have been reported to improve or direct cellular uptake. For example, NAAs conjugated with cholesterol improve in vitro and in vivo cell permeation in liver cells (Rand et al., 2005). Soutschek et al. (2004) have reported on the use of chemically-stabilized and cholesterol-conjugated siRNAs have markedly improved pharmacological properties in vitro and in vivo. Chemically-stabilized siRNAs with partial phosphorothioate backbone and 2′-O-methyl sugar modifications on the sense and antisense strands (discussed above) showed significantly enhanced resistance towards degradation by exo- and endonucleases in serum and in tissue homogenates, and the conjugation of cholesterol to the 3′ end of the sense strand of an oligonucleotides by means of a pyrrolidine linker does not result in a significant loss of gene-silencing activity in cell culture. These study demonstrates that cholesterol conjugation significantly improves in vivo pharmacological properties of oligonucleotides.

[0057] U.S. Patent Publication 2008/0015162, incorporated herein by reference, provide additional examples of nucleic acid analogs useful in the present invention. The following excerpts are derived from that document and are exemplary in nature only.

[0058] In certain embodiments, oligomeric compounds comprise one or more modified monomers, including 2′-modified sugars, such as BNA's and monomers (e.g., nucleosides and nucleotides) with 2′-substituents such as allyl, amino, azido, thio, O-allyl, O—C₁-C₁₀ alkyl, —OCF₃, O—(CH₂)₂—O—CH₃, 2′-O(CH₂)₂SCH₃, O—(CH₂)₂—0—N(Rₘ)(Rₙ), or O—CH₂—C(═O)—N(Rₘ)(Rₙ), where each Rₘ and Rₙ is, independently, H or substituted or unsubstituted C₁-C₁₀ alkyl.

[0059] In certain embodiments, the oligomeric compounds including, but no limited to short oligomers of the present invention, comprise one or more high affinity monomers provided that the oligomeric compound does not comprise a nucleotide comprising a 2′-O(CH₂)ₙH, wherein n is one to six. In certain embodiments, the oligomeric compounds including, but no limited to short oligomers of the present invention, comprise one or more high affinity monomer provided that the oligomeric compound does not comprise a nucleotide comprising a 2′-OCH₃ or a 2′-O(CH₂)₂OCH₃. In certain embodiments, the oligomeric compounds comprise one or more high affinity monomers provided that the oligomeric compound does not comprise a α-L-methyleneoxy (4′-CH₂—0-2′) BNA and/or a β-D-methyleneoxy (4′-CH₂—0-2′) BNA.

[0060] Certain BNA's have been prepared and disclosed in the patent literature as well as in scientific literature (Singh et al., 1998; Koshkin et al., 1998; Wahlestedt et al., 2000; Kumar et al., 1998; WO 94/14226; WO 2005/021570; Singh et al, 1998; examples of issued US patents and published applications that disclose BNA s include, for example, U.S. Pat. Nos. 7,053,207; 6,268,490; 6,770,748; 6,794,499; 7,034,133; and 6,525,191; and U.S. Patent Publication Nos. 2004/0171570; 2004/0219565; 2004/0014959; 2003/0207841; 2004/0143114; and 2003/0082807.

[0061] Also provided herein are BNAs in which the 2′-hydroxyl group of the ribosyl sugar ring is linked to the 4′ carbon atom of the sugar ring thereby forming a methyleneoxy (4′-CH₂—0-2′) linkage to form the bicyclic sugar moiety (reviewed in Elayadi et al., 2001; Braasch et al., 2001; see also U.S. Pat. Nos. 6,268,490 and 6,670,461). The linkage can be a methylene (—CH₂—) group bridging the 2′ oxygen atom and the 4′ carbon atom, for which the term methyleneoxy (4′-CH₂—O-2′) BNA is used for the bicyclic moiety; in the case of an ethylene group in this position, the term ethyleneoxy (4′-CH₂CH₂—0-2′) BNA is used (Singh et al., 1998; Morita et al., 2003). Methyleneoxy (4′-CH₂—O-2′) BNA and other bicyclic sugar analogs display very high duplex thermal stabilities with complementary DNA and RNA (Tm=+3 to +10° C.), stability towards 3′-exonucleolytic degradation and good solubility properties. Potent and nontoxic antisense oligonucleotides comprising BNAs have been described (Wahlestedt et al., 2000).

[0062] An isomer of methyleneoxy (4′-CH₂—O-2′) BNA that has also been discussed is α-L-methyleneoxy (4′-CH₂—O-2′) BNA which has been shown to have superior stability against a 3′-exonuclease. The α-L-methyleneoxy (4′-CH₂—O-2′) BNA's were incorporated into antisense gapmers and chimeras that showed potent antisense activity (Frieden et al., 2003).

[0063] The synthesis and preparation of the methyleneoxy (4′-CH₂—O-2′) BNA monomers adenine, cytosine, guanine, 5-methyl-cytosine, thymine and uracil, along with their oligomerization, and nucleic acid recognition properties have been described (Koshkin et al., 1998). BNAs and preparation thereof are also described in WO 98/39352 and WO 99/14226.

[0064] Analogs of methyleneoxy (4′-CH₂—O-2′) BNA, phosphorothioate-methyleneoxy (4′-CH₂—O-2′) BNA and 2′-thio-BNAs, have also been prepared (Kumar et al., 1998). Preparation of locked nucleoside analogs comprising oligodeoxyribonucleotide duplexes as substrates for nucleic acid polymerases has also been described (Wengel et al., WO 99/14226). Furthermore, synthesis of 2′-amino-BNA, a novel comformationally restricted high-affinity oligonucleotide analog has been described in the art (Singh et al., 1998). In addition, 2′-amino- and 2′-methylamino-BNA's have been prepared and the thermal stability of their duplexes with complementary RNA and DNA strands has been previously reported.

[0065] Modified sugar moieties are well known and can be used to alter, typically increase, the affinity of oligomers for targets and/or increase nuclease resistance. A representative list of modified sugars includes, but is not limited to, bicyclic modified sugars (BNA's), including methyleneoxy (4′-CH₂—O-2′) BNA and ethyleneoxy (4′-(CH₂)₂—O-2′ bridge) BNA; substituted sugars, especially 2′-substituted sugars having a 2′-F, 2′-OCH₃ or a 2′-O(CH₂)₂—OCH₃ substituent group; and 4′-thio modified sugars. Sugars can also be replaced with sugar mimetic groups among others. Methods for the preparations of modified sugars are well known to those skilled in the art. Some representative patents and publications that teach the preparation of such modified sugars include, but are not limited to, U.S. Pat. Nos. 4,981,957; 5,118,800; 5,319,080; 5,359,044; 5,393,878; 5,446,137; 5,466,786; 5,514,785; 5,519,134; 5,567,811; 5,576,427; 5,591,722; 5,597,909; 5,610,300; 5,627,053; 5,639,873; 5,646,265; 5,658,873; 5,670,633; 5,792,747; 5,700,920; 6,531,584; and 6,600,032; and WO 2005/121371.

[0066] The naturally-occurring base portion of a nucleoside is typically a heterocyclic base. The two most common classes of such heterocyclic bases are the purines and the pyrimidines. For those nucleosides that include a pentofuranosyl sugar, a phosphate group can be linked to the 2′, 3′ or 5′ hydroxyl moiety of the sugar. In forming oligonucleotides, those phosphate groups covalently link adjacent nucleosides to one another to form a linear polymeric compound. Within oligonucleotides, the phosphate groups are commonly referred to as forming the internucleotide backbone of the oligonucleotide. The naturally occurring linkage or backbone of RNA and of DNA is a 3′ to 5′ phosphodiester linkage.

[0067] In addition to “unmodified” or “natural” nucleobases such as the purine nucleobases adenine (A) and guanine (G), and the pyrimidine nucleobases thymine (T), cytosine (C) and uracil (U), many modified nucleobases or nucleobase mimetics known to those skilled in the art are amenable with the compounds described herein. In certain embodiments, a modified nucleobase is a nucleobase that is fairly similar in structure to the parent nucleobase, such as for example a 7-deaza purine, a 5-methyl cytosine, or a G-clamp. In certain embodiments, nucleobase mimetic include more complicated structures, such as for example a tricyclic phenoxazine nucleobase mimetic. Methods for preparation of the above noted modified nucleobases are well known to those skilled in the art.

[0068] Described herein are linking groups that link monomers (including, but not limited to, modified and unmodified nucleosides and nucleotides) together, thereby forming an oligomeric compound. The two main classes of linking groups are defined by the presence or absence of a phosphorus atom. Representative phosphorus containing linkages include, but are not limited to, phosphodiesters (P═O), phosphotriesters, methylphosphonates, phosphoramidate, and phosphorothioates (P═S). Representative non-phosphorus containing linking groups include, but are not limited to, methylenemethylimino (—CH₂—N(CH₃)—O—CH₂—), thiodiester (—O—C(O)—S—), thionocarbamate (—O—C(O)(NH)—S—); siloxane (—O—Si(H)₂—O—); and N,N′-dimethylhydrazine (—CH₂—N(CH₃)—N(CH₃)—). Oligomeric compounds having non-phosphorus linking groups are referred to as oligonucleosides. Modified linkages, compared to natural phosphodiester linkages, can be used to alter, typically increase, nuclease resistance of the oligomeric compound. In certain embodiments, linkages having a chiral atom can be prepared a racemic mixtures, as separate enantiomers. Representative chiral linkages include, but are not limited to, alkylphosphonates and phosphorothioates. Methods of preparation of phosphorous-containing and non-phosphorous-containing linkages are well known to those skilled in the art.

### II. Predicting Promoter Target Sites

[0069] In one aspect of the invention, there is provided an in silico a process for identifying a previously unknown miRNA-promoter pair (e.g., FIG. 1), or to select an established miRNA correlate/cognate. The inventors have demonstrated the ability of this process to identify a wide range of target gene promoters subject to endogenous miRNA regulation (e.g., FIGS. 2-4).

[0070] MFE values were calculated for miRNA hybridization to predicted target sites (based on seed sequence matches, hereafter simply referred to as predictions) within putative promoter-overlapping transcripts and within 10 randomizations of promoter sequences. The inventors found that predictions with lower MFE values occurred more frequently in actual promoter sequences than in randomized sequences. The difference between the distributions of MFE values demonstrates that predictions with low MFE values occur more often than would be expected at random, implying that these predictions are more likely to be biologically significant and that MFE values will be useful criteria for prioritizing target predictions.

[0071] The inventors used the Needleman-Wunsch algorithm (1970) to evaluate the degree of sequence complementarity between miRNAs and predicted target sites within gene promoters. They identified over 200 individual miRNAs with near perfect complementarity to their predicted target sites within gene promoters. The high degree of complementarity between miRNAs and gene promoters further demonstrates that gene promoters are promising candidates for miRNA targets. Table 1 illustrates 20,000 target sites (SEQ ID NOS:1-20000) and corresponding antagomirs (SEQ ID NOS:20001-40000)

### III. Target Genes/Cells/Hosts, Formulations and Delivery of Oligonucleotides

[0072] A. Targets

[0073] A target gene is generally native to a cell, such as a mammalian or human cell, and which may be in vitro (e.g., a cultured cell), or in situ in a host. Examples of cultured cells include primary cells, cancer cells (e.g., from cell lines), adult or embryonic stem cells, neural cells, fibroblasts, myocytes, etc. Cultured human cells commonly used to test putative therapeutics for human diseases or disorders can be used to screen subject oligonucleotides (complementary to endogenous miRNAs complementary to promoters of target genes) activity, especially therapeutic affect (e.g., induction of apoptosis, cessation of proliferation in cancer cells, etc.). When the cell is in situ, the host may be any mammal, such as a human, or an animal model used in the study of human diseases or disorders (e.g., rodent, canine, porcine, etc., animal models).

[0074] The mammalian cell may be determined to be in need of modulated expression of the target gene using routine methods. For example, reduced or increased levels of a target gene expression and/or protein relative to desired levels may be directly measured (see below). Alternatively, increased or decreased expression of a target gene may be inferred from a phenotype or physiologic status associated with reduced or increased levels of a target gene product.

[0075] The following is a list of exemplary genes with promoter targets according the present invention:
[0076] myelin oligodendrocyte glycoprotein, major histocompatibility complex, class II, DO αγ-aminobutyric acid (GABA) B receptor, lactase, tumor necrosis factor (TNF superfamily, member 2), complement factor B, paraoxonase 1, bradykinin receptor B1, apolipoprotein A-I, leptin receptor, glutamate receptor, metabotropic 2, myosin X cholesteryl ester transfer protein, plasma retinoid X receptor, β single-stranded DNA binding protein, ryanodine receptor, lens epithelial protein, Bone morphogenetic protein (osteogenic protein 1), perforin (pore forming protein), tubulin, β interleukin, arachidonate 5-lipoxygenase, apolipoprotein L, phospholipase C, β2 NAD(P)H dehydrogenase, quinone 2, tumor necrosis factor receptor superfamily, member 13C, lymphocyte-specific protein tyrosine kinase, apolipoprotein L, cystathionine-β-synthase ceruloplasmin (ferroxidase), vitamin D (1,25-dihydroxy vitamin D3) receptor angiotensin I converting enzyme (peptidyl-dipeptidase A) 2 immediate early response 3 lymphotoxin α (TNF superfamily, member 1), cholinergic receptor, nicotinic α5 angiotensin II receptor, type 1 fibroblast growth factor, lactoperoxidase, histone deacetylase 5, hyaluronoglucosaminidase, interferon regulatory factor, ADP-ribosyltransferase, thyroglobulin, orosomucoid, cyclin-dependent kinase inhibitor 1A (p21, Cip1), furin (paired basic amino acid cleaving enzyme), progesterone receptor, and gastrin brain-derived neurotrophic factor.

[0077] Additional targets are described in Table 1.

[0078] B. Cell Delivery

[0079] A variety of methods may be used to deliver oligonucleotides, including antagomirs, into a target cell. For cells in vitro embodiments, delivery can often be accomplished by direct injection into cells, and delivery can often be enhanced using hydrophobic or cationic carriers. Alternatively, the cells can be permeabilized with a permeabilization and then contacted with the oligonucleotide. The antagomir can be administered to the subject either as a naked oligonucleotide agent, in conjunction with a delivery reagent, or as a recombinant plasmid or viral vector which expresses the oligonucleotide agent.

[0080] For cells in situ, several applicable delivery methods are well-established, e.g., Elmen et al. (2008), Akinc et al. (2008); Esau et al. (2006), Krützfeldt et al. (2005). In particular, cationic lipids (see e.g., Hassani et al., 2004) and polymers such as polyethylenimine (see e.g., Urban-Klein, 2005) have been used to facilitate oligonucleotide delivery. Compositions consisting essentially of the oligomer (i.e., the oligomer in a carrier solution without any other active ingredients) can be directly injected into the host (see e.g., Tyler et al., 1999; McMahon et al., 2002). In vivo applications of duplex RNAs are reviewed in Paroo and Corey (2004).

[0081] When microinjection is not an option, delivery can be enhanced in some cases by using Lipofectamine™ (Invitrogen, Carlsbad, Calif.). PNA oligomers can be introduced into cells in vitro by complexing them with partially complementary DNA oligonucleotides and cationic lipid. The lipid promotes internalization of the DNA, while the PNA enters as cargo and is subsequently released. Peptides such as penetratin, transportan, Tat peptide, nuclear localization signal (NLS), and others, can be attached to the oligomer to promote cellular uptake (see e.g., Nielsen, 2004; Kaihatsu et al., 2003; Kaihatsu et al., 2004). Alternatively, the cells can be permeabilized with a permeabilization agent such as lysolecithin, and then contacted with the oligomer.

[0082] Alternatively, certain single-stranded oligonucleotide agents featured in the instant invention can be expressed within cells from eukaryotic promoters (e.g., Izant and Weintraub, 1985; McGarry and Lindquist, 1986; Scanlon et al., 1991; Kashani-Sabet et al, 1992; Propulic et al., 1992; Weerasinghe et al., 1991; Ojwang et al., 1992; Chen et al., 1992; Sarver et al., 1990; Thompson et al., 1995; Good et al., 1997). Those skilled in the art realize that any nucleic acid can be expressed in eukaryotic cells from the appropriate DNA/RNA vector. The activity of such nucleic acids can be augmented by their release from the primary transcript by a enzymatic nucleic acid (PCT WO 93/23569; PCT WO 94/02595; Ohkawa et al., 1992; Taira et al., 1991; Ventura et al., 1993; Chowrira et al., 1994).

[0083] The recombinant vectors can be DNA plasmids or viral vectors. Oligonucleotide agent-expressing viral vectors can be constructed based on, but not limited to, adeno-associated virus, retrovirus, adenovirus, or alphavirus. In another embodiment, pol III based constructs are used to express nucleic acid molecules of the invention (see for example Morris et al., 2004; U.S. Pat. Nos. 5,902,880 and 6,146,886). The recombinant vectors capable of expressing the oligonucleotide agents can be delivered as described above, and can persist in target cells. Alternatively, viral vectors can be used that provide for transient expression of nucleic acid molecules. Such vectors can be repeatedly administered as necessary. Once expressed, the antagomir interacts with the target RNA (e.g., miRNA or pre-miRNA) and inhibits miRNA activity. In a particular embodiment, the antagomir forms a duplex with the target miRNA, which prevents the miRNA from binding to its target mRNA, which results in increased translation of the target mRNA. Delivery of oligonucleotide agent-expressing vectors can be systemic, such as by intravenous or intra-muscular administration, by administration to target cells ex-planted from a subject followed by reintroduction into the subject, or by any other means that would allow for introduction into the desired target cell (see Couture et al., 1996).

[0084] Methods for the delivery of nucleic acid molecules are also described in Akhtar et al. (1992), Akhtar (1995), Maurer et al. (1999), Hofland and Huang (1999), Lee et al. (2000), all of which are incorporated herein by reference. U.S. Pat. No. 6,395,713 and PCT WO 94/02595 and WO 00/53722 further describe general methods for delivery of nucleic acid molecules.

[0085] C. Routes of Administration

[0086] A composition that includes an oligomer/antagomir can be delivered to a subject by a variety of routes. Exemplary routes include inhalation, parenchymal, subcutaneous, nasal, buccal and oral delivery. Also contemplated are delivery is through local administration directly to a disease site, or by systemic administration, e.g., parental administration. Parenteral administration includes intravenous (drip), subcutaneous, intraperitoneal or intramuscular injection, or intrathecal or intraventricular administration.

[0087] An antagomir featured in the invention can be administered to the subject by any means suitable for delivering the agent to the cells of the tissue at or near the area of unwanted target nucleic acid expression (e.g., target miRNA or pre-miRNA expression). Exemplary delivery methods include administration by gene gun, electroporation, or other suitable parenteral administration route.

[0088] Suitable parenteral administration routes include intravascular administration (e.g., intravenous bolus injection, intravenous infusion, intra-arterial bolus injection, intra-arterial infusion and catheter instillation into the vasculature); peri- and intra-tissue injection (e.g., intraocular injection); subcutaneous injection or deposition including subcutaneous infusion (such as by osmotic pumps); direct application to the area at or near the site of disease, for example by a catheter or other placement device.

[0089] D. Formulations

[0090] An antagomir can be incorporated into pharmaceutical compositions suitable for administration. For example, compositions can include one or more oligonucleotide agents and a pharmaceutically acceptable carrier. As used herein the language “pharmaceutically acceptable carrier” is intended to include any and all solvents, dispersion media, coatings, antibacterial and antifungal agents, isotonic and absorption delaying agents, and the like, compatible with pharmaceutical administration. The use of such media and agents for pharmaceutically active substances is well known in the art. Except insofar as any conventional media or agent is incompatible with the active compound, use thereof in the compositions is contemplated. Supplementary active compounds can also be incorporated into the compositions.

[0091] Formulations for direct injection and parenteral administration are well known in the art. Such formulations may include sterile aqueous solutions which may also contain buffers, diluents and other suitable additives. For intravenous use, the total concentration of solutes should be controlled to render the preparation isotonic. An antagomir featured in the invention may be provided in sustained release compositions, such as those described in, for example, U.S. Pat. Nos. 5,672,659 and 5,595,760. The use of immediate or sustained release compositions depends on the nature of the condition being treated. If the condition consists of an acute or over-acute disorder, treatment with an immediate release form will be utilized versus a prolonged release composition. Alternatively, for certain preventative or long-term treatments, a sustained release composition may be appropriate. An antagomir can include a delivery vehicle, such as liposomes, for administration to a subject, carriers and diluents and their salts, and/or can be present in pharmaceutically acceptable formulations.

[0092] The oligonucleotide agents featured by the invention may be formulated as pharmaceutical compositions prior to administering to a subject, according to techniques known in the art. Pharmaceutical compositions featured in the present invention are characterized as being at least sterile and pyrogen-free. As used herein, “pharmaceutical formulations” include formulations for human and veterinary use. Methods for preparing pharmaceutical compositions are within the skill in the art, for example as described in Remington's Pharmaceutical Science, 18th ed., Mack Publishing Company, Easton, Pa. (1990), and The Science and Practice of Pharmacy, 2003, Gennaro et al., the entire disclosures of which are herein incorporated by reference.

[0093] The present pharmaceutical formulations include an antagomir featured in the invention (e.g., 0.1 to 90% by weight), or a physiologically acceptable salt thereof, mixed with a physiologically acceptable carrier medium. Particular physiologically acceptable carrier media are water, buffered water, normal saline, 0.4% saline, 0.3% glycine, hyaluronic acid and the like.

[0094] Pharmaceutical compositions featured in the invention can also include conventional pharmaceutical excipients and/or additives. Suitable pharmaceutical excipients include stabilizers, antioxidants, osmolality adjusting agents, buffers, and pH adjusting agents. Suitable additives include physiologically biocompatible buffers (e.g., tromethamine hydrochloride), additions of chelants (such as, for example, DTPA or DTPA-bisamide) or calcium chelate complexes (as for example calcium DTPA, CaNaDTPA-bisamide), or, optionally, additions of calcium or sodium salts (for example, calcium chloride, calcium ascorbate, calcium gluconate or calcium lactate). Pharmaceutical compositions can be packaged for use in liquid form, or can be lyophilized.

[0095] For solid compositions, conventional non-toxic solid carriers can be used; for example, pharmaceutical grades of mannitol, lactose, starch, magnesium stearate, sodium saccharin, talcum, cellulose, glucose, sucrose, magnesium carbonate, and the like.

[0096] For example, a solid pharmaceutical composition for oral administration can include any of the carriers and excipients listed above and 10-95%, in particular 25%-75%, of one or more single-stranded oligonucleotide agents featured in the invention.

[0097] Non-limiting examples of agents suitable for formulation with the nucleic acid molecules of the instant invention include: P-glycoprotein inhibitors (such as PluronicP85), which can enhance entry of drugs into the CNS (Jolliet-Riant and Tillement, 1999); biodegradable polymers, such as poly(DL-lactide-coglycolide) microspheres for sustained release delivery. Other non-limiting examples of delivery strategies for the nucleic acid molecules featured in the instant invention include material described in Boado et al. (1998), Tyler et al. (1999a;b); Pardridge et al. (1995); Boado (1995); Aldrian-Herrada et al. (1998).

[0098] The invention also features the use of a composition that includes surface-modified liposomes containing poly(ethylene glycol) lipids (PEG-modified, or long-circulating liposomes or stealth liposomes). These formulations offer a method for increasing the accumulation of drugs in target tissues. This class of drug carriers resists opsonization and elimination by the mononuclear phagocytic system (MPS or RES), thereby enabling longer blood circulation times and enhanced tissue exposure for the encapsulated drug (Lasic et al., 1995; Ishiwata et al., 1995).

[0099] Such liposomes have been shown to accumulate selectively in tumors, presumably by extravasation and capture in the neovascularized target tissues (Lasic et al., 1995; Oku et al, 1995). The long-circulating liposomes enhance the pharmacokinetics and pharmacodynamics of DNA and RNA, particularly compared to conventional cationic liposomes which are known to accumulate in tissues of the MPS (Liu et al., 1995; PCT Publication No. WO 96/10391; PCT Publication No. WO 96/10390; PCT Publication No. WO 96/10392). Long-circulating liposomes are also likely to protect drugs from nuclease degradation to a greater extent compared to cationic liposomes, based on their ability to avoid accumulation in metabolically aggressive MPS tissues such as the liver and spleen.

[0100] The present invention also features compositions prepared for storage or administration that include a pharmaceutically effective amount of the desired oligonucleotides in a pharmaceutically acceptable carrier or diluent. Acceptable carriers or diluents for therapeutic use are well known in the pharmaceutical art, and are described, for example, in Remington's Pharmaceutical Sciences, Mack Publishing Co. (1985), hereby incorporated by reference herein. For example, preservatives, stabilizers, dyes and flavoring agents can be provided. These include sodium benzoate, sorbic acid and esters of p-hydroxybenzoic acid. In addition, antioxidants and suspending agents can be used.

[0101] The nucleic acid molecules of the present invention can also be administered to a subject in combination with other therapeutic compounds to increase the overall therapeutic effect. The use of multiple compounds to treat an indication can increase the beneficial effects while reducing the presence of side effects.

[0102] The types of pharmaceutical excipients that are useful as carrier include stabilizers such as human serum albumin (HSA), bulking agents such as carbohydrates, amino acids and polypeptides; pH adjusters or buffers; salts such as sodium chloride; and the like. These carriers may be in a crystalline or amorphous form or may be a mixture of the two.

[0103] Bulking agents that are particularly valuable include compatible carbohydrates, polypeptides, amino acids or combinations thereof. Suitable carbohydrates include monosaccharides such as galactose, D-mannose, sorbose, and the like; disaccharides, such as lactose, trehalose, and the like; cyclodextrins, such as 2-hydroxypropyl-β-cyclodextrin; and polysaccharides, such as raffinose, maltodextrins, dextrans, and the like; alditols, such as mannitol, xylitol, and the like. A particular group of carbohydrates includes lactose, threhalose, raffinose maltodextrins, and mannitol. Suitable polypeptides include aspartame. Amino acids include alanine and glycine, with glycine being specifically contemplated.

[0104] Suitable pH adjusters or buffers include organic salts prepared from organic acids and bases, such as sodium citrate, sodium ascorbate, and the like.

[0105] E. Dosage

[0106] An antagomir can be administered at a unit dose less than about 75 mg per kg of bodyweight, or less than about 70, 60, 50, 40, 30, 20, 10, 5, 2, 1, 0.5, 0.1, 0.05, 0.01, 0.005, 0.001, or 0.0005 mg per kg of bodyweight, and less than 200 nmol of antagomir (e.g., about 4.4×10¹⁶ copies) per kg of bodyweight, or less than 1500, 750, 300, 150, 75, 15, 7.5, 1.5, 0.75, 0.15, 0.075, 0.015, 0.0075, 0.0015, 0.00075, 0.00015 nmol of antagomir per kg of bodyweight. The unit dose, for example, can be administered by injection (e.g., intravenous or intramuscular, intrathecally, or directly into an organ), inhalation, or a topical application.

[0107] Delivery of an antagomir directly to an organ can be at a dosage on the order of about 0.00001 mg to about 3 mg per organ, or particularly about 0.0001-0.001 mg per organ, about 0.03-3.0 mg per organ, about 0.1-3.0 mg per organ or about 0.3-3.0 mg per organ.

[0108] Significant modulation of target gene expression may be achieved using nanomolar/submicromolar or picomolar/subnamomolar concentrations of the oligonucleotide, and it is typical to use the lowest concentration possible to achieve the desired resultant increased synthesis, e.g., oligonucleotide concentrations in the 1-100 nM range are contemplated; more particularly, the concentration is in the 1-50 nM, 1-25 nM, 1-10 nM, or picomolar range. In particular embodiments, the contacting step is implemented by contacting the cell with a composition consisting essentially of the oligonucleotide.

[0109] In one embodiment, the unit dose is administered once a day, e.g., or less frequently less than or at about every 2, 4, 8 or 30 days. In another embodiment, the unit dose is not administered with a frequency (e.g., not a regular frequency). For example, the unit dose may be administered a single time. Because oligonucleotide agent can persist for several days after administering, in many instances, it is possible to administer the composition with a frequency of less than once per day, or, for some instances, only once for the entire therapeutic regimen.

[0110] An antagomir featured in the invention can be administered in a single dose or in multiple doses. Where the administration of the antagomir is by infusion, the infusion can be a single sustained dose or can be delivered by multiple infusions. Injection of the agent can be directly into the tissue at or near the site of aberrant or unwanted target gene expression (e.g., aberrant or unwanted miRNA or pre-miRNA expression). Multiple injections of the agent can be made into the tissue at or near the site.

[0111] In a particular dosage regimen, the antagomir is injected at or near a site of unwanted target nucleic acid expression once a day for seven days. Where a dosage regimen comprises multiple administrations, it is understood that the effective amount of antagomir administered to the subject can include the total amount of antagomir administered over the entire dosage regimen. One skilled in the art will appreciate that the exact individual dosages may be adjusted somewhat depending on a variety of factors, including the specific antagomir being administered, the time of administration, the route of administration, the nature of the formulation, the rate of excretion, the particular disorder being treated, the severity of the disorder, the pharmacodynamics of the oligonucleotide agent, and the age, sex, weight, and general health of the patient. Wide variations in the necessary dosage level are to be expected in view of the differing efficiencies of the various routes of administration. Variations in these dosage levels can be adjusted using standard empirical routines of optimization, which are well-known in the art. The precise therapeutically effective dosage levels and patterns can be determined by the attending physician in consideration of the above-identified factors.

[0112] In one embodiment, a subject is administered an initial dose, and one or more maintenance doses of an antagomir. The maintenance dose or doses are generally lower than the initial dose, e.g., one-half less of the initial dose. The maintenance doses are generally administered no more than once every 5, 10, or 30 days. Further, the treatment regimen may last for a period of time which will vary depending upon the nature of the particular disease, its severity and the overall condition of the patient. Following treatment, the patient can be monitored for changes in his condition and for alleviation of the symptoms of the disease state. The dosage of the compound may either be increased in the event the patient does not respond significantly to current dosage levels, or the dose may be decreased if an alleviation of the symptoms of the disease state is observed, if the disease state has been ablated, or if undesired side-effects are observed.

[0113] The effective dose can be administered two or more doses, as desired or considered appropriate under the specific circumstances. If desired to facilitate repeated or frequent infusions, implantation of a delivery device, e.g., a pump, semi-permanent stent (e.g., intravenous, intraperitoneal, intracisternal or intracapsular), or reservoir may be advisable.

[0114] Certain factors may influence the dosage required to effectively treat a subject, including but not limited to the severity of the disease or disorder, previous treatments, the general health and/or age of the subject, and other diseases present. It will also be appreciated that the effective dosage of the antagomir used for treatment may increase or decrease over the course of a particular treatment. Changes in dosage may result and become apparent from the results of diagnostic assays. For example, the subject can be monitored after administering an antagomir composition. Based on information from the monitoring, an additional amount of the antagomir composition can be administered.

[0115] Dosing is dependent on severity and responsiveness of the disease condition to be treated, with the course of treatment lasting from several days to several months, or until a cure is effected or a diminution of disease state is achieved. Optimal dosing schedules can be calculated from measurements of drug accumulation in the body of the patient. Persons of ordinary skill can easily determine optimum dosages, dosing methodologies and repetition rates. Optimum dosages may vary depending on the relative potency of individual compounds, and can generally be estimated based on EC₅₀'s found to be effective in in vitro and in vivo animal models.

### IV. Detecting Expression

[0116] The detecting step is implemented by detecting a significant change in the expression of the target gene, for example, by detecting at least a 10%, 25%, 50%, 200% or 500% increase in expression of the target gene, or at least a 10%, 25%, 50%, 75%, or 90% decrease in expression of the target gene, relative to a negative control, such as basal expression levels.

[0117] Detection may be effected by a variety of routine methods, such as directly measuring a change in the level of the target gene mRNA transcript, or indirectly detecting increased or decreased levels of the corresponding encoded protein compared to a negative control. Alternatively, resultant selective modulation of target gene expression may be inferred from phenotypic or physiologic changes that are indicative of increased or decreased expression of the target gene.

[0118] A. Nucleic Acid Detection

[0119] Assessing expression may involve quantitating mRNA. Northern blotting techniques are well known to those of skill in the art. Northern blotting involves the use of RNA as a target. Briefly, a probe is used to target an RNA species that has been immobilized on a suitable matrix, often a filter of nitrocellulose. The different species should be spatially separated to facilitate analysis. This often is accomplished by gel electrophoresis of nucleic acid species followed by “blotting” on to the filter.

[0120] Subsequently, the blotted target is incubated with a probe (usually labeled) under conditions that promote denaturation and rehybridization. Because the probe is designed to base pair with the target, the probe will binding a portion of the target sequence under renaturing conditions. Unbound probe is then removed, and detection is accomplished.

[0121] Nucleic acids may be quantitated following gel separation and staining with ethidium bromide and visualization under UV light. Alternatively, if the nucleic acid results from a synthesis or amplification using integral radio- or fluorometrically-labeled nucleotides, the products can then be exposed to x-ray film or visualized under the appropriate stimulating spectra, following separation.

[0122] In one embodiment, visualization is achieved indirectly. Following separation of nucleic acids, a labeled nucleic acid is brought into contact with the target sequence. The probe is conjugated to a chromophore or a radiolabel. In another embodiment, the probe is conjugated to a binding partner, such as an antibody or biotin, and the other member of the binding pair carries a detectable moiety.

[0123] One example of the foregoing is described in U.S. Pat. No. 5,279,721, incorporated by reference herein, which discloses an apparatus and method for the automated electrophoresis and transfer of nucleic acids. The apparatus permits electrophoresis and blotting without external manipulation of the gel and is ideally suited to carrying out methods according to the present invention.

[0124] In addition, the amplification products described above may be subjected to sequence analysis to identify specific kinds of variations using standard sequence analysis techniques. Within certain methods, exhaustive analysis of genes is carried out by sequence analysis using primer sets designed for optimal sequencing (Pignon et al, 1994). The present invention provides methods by which any or all of these types of analyses may be used. Using the sequences disclosed herein, oligonucleotide primers may be designed to permit the amplification of sequences throughout the Killin gene that may then be analyzed by direct sequencing.

[0125] Reverse transcription (RT) of RNA to cDNA followed by relative quantitative PCR™ (RT-PCR™) can be used to determine the relative concentrations of specific mRNA species isolated from patients. By determining that the concentration of a specific mRNA species varies, it is shown that the gene encoding the specific mRNA species is differentially expressed.

[0126] In PCR™, the number of molecules of the amplified target DNA increase by a factor approaching two with every cycle of the reaction until some reagent becomes limiting. Thereafter, the rate of amplification becomes increasingly diminished until there is no increase in the amplified target between cycles. If a graph is plotted in which the cycle number is on the X axis and the log of the concentration of the amplified target DNA is on the Y axis, a curved line of characteristic shape is formed by connecting the plotted points. Beginning with the first cycle, the slope of the line is positive and constant. This is said to be the linear portion of the curve. After a reagent becomes limiting, the slope of the line begins to decrease and eventually becomes zero. At this point the concentration of the amplified target DNA becomes asymptotic to some fixed value. This is said to be the plateau portion of the curve.

[0127] The concentration of the target DNA in the linear portion of the PCR™ amplification is directly proportional to the starting concentration of the target before the reaction began. By determining the concentration of the amplified products of the target DNA in PCR™ reactions that have completed the same number of cycles and are in their linear ranges, it is possible to determine the relative concentrations of the specific target sequence in the original DNA mixture. If the DNA mixtures are cDNAs synthesized from RNAs isolated from different tissues or cells, the relative abundances of the specific mRNA from which the target sequence was derived can be determined for the respective tissues or cells. This direct proportionality between the concentration of the PCR™ products and the relative mRNA abundances is only true in the linear range of the PCR™ reaction.

[0128] The final concentration of the target DNA in the plateau portion of the curve is determined by the availability of reagents in the reaction mix and is independent of the original concentration of target DNA. Therefore, the first condition that must be met before the relative abundances of a mRNA species can be determined by RT-PCR™ for a collection of RNA populations is that the concentrations of the amplified PCR™ products must be sampled when the PCR™ reactions are in the linear portion of their curves.

[0129] The second condition that must be met for an RT-PCR™ experiment to successfully determine the relative abundances of a particular mRNA species is that relative concentrations of the amplifiable cDNAs must be normalized to some independent standard. The goal of an RT-PCR™ experiment is to determine the abundance of a particular mRNA species relative to the average abundance of all mRNA species in the sample. In the experiments described below, mRNAs for β-actin, asparagine synthetase and lipocortin II were used as external and internal standards to which the relative abundance of other mRNAs are compared.

[0130] Most protocols for competitive PCR™ utilize internal PCR™ standards that are approximately as abundant as the target. These strategies are effective if the products of the PCR™ amplifications are sampled during their linear phases. If the products are sampled when the reactions are approaching the plateau phase, then the less abundant product becomes relatively over represented. Comparisons of relative abundances made for many different RNA samples, such as is the case when examining RNA samples for differential expression, become distorted in such a way as to make differences in relative abundances of RNAs appear less than they actually are. This is not a significant problem if the internal standard is much more abundant than the target. If the internal standard is more abundant than the target, then direct linear comparisons can be made between RNA samples.

[0131] B. Protein Detection

[0132] Immunodetection. Antibodies can be used in characterizing protein expression in cells through techniques such as ELISAs and Western blotting. For example, antibodies may be immobilized onto a selected surface, such as a surface exhibiting a protein affinity such as the wells of a polystyrene microtiter plate. After washing to remove incompletely adsorbed material, it is desirable to bind or coat the assay plate wells with a non-specific protein that is known to be antigenically neutral with regard to the test antisera such as bovine serum albumin (BSA), casein or solutions of powdered milk. This allows for blocking of non-specific adsorption sites on the immobilizing surface and thus reduces the background caused by non-specific binding of antigen onto the surface.

[0133] After binding of antibody to the well, coating with a non-reactive material to reduce background, and washing to remove unbound material, the immobilizing surface is contacted with the sample to be tested in a manner conducive to immune complex (antigen/antibody) formation.

[0134] Following formation of specific immunocomplexes between the test sample and the bound antibody, and subsequent washing, the occurrence and even amount of immunocomplex formation may be determined by subjecting same to a second antibody having specificity for the target that differs the first antibody. Appropriate conditions include diluting the sample with diluents such as BSA, bovine gamma globulin (BGG) and phosphate buffered saline (PBS)/Tween®. These added agents also tend to assist in the reduction of nonspecific background. The layered antisera is then allowed to incubate for from about 2-4 hrs, at temperatures on the order of about 25°-27° C. Following incubation, the antisera-contacted surface is washed so as to remove non-immunocomplexed material. A particular washing procedure includes washing with a solution such as PBS/Tween®, or borate buffer.

[0135] To provide a detecting means, the second antibody may have an associated enzyme that will generate a color development upon incubating with an appropriate chromogenic substrate. Thus, for example, one will desire to contact and incubate the second antibody-bound surface with a urease or peroxidase-conjugated anti-human IgG for a period of time and under conditions which favor the development of immunocomplex formation (e.g., incubation for 2 hr at room temperature in a PBS-containing solution such as PBS/Tween®).

[0136] After incubation with the second enzyme-tagged antibody, and subsequent to washing to remove unbound material, the amount of label is quantified by incubation with a chromogenic substrate such as urea and bromocresol purple or 2,2′-azino-di-(3-ethyl-benzthiazoline)-6-sulfonic acid (ABTS) and H₂O₂, in the case of peroxidase as the enzyme label. Quantitation is then achieved by measuring the degree of color generation, e.g., using a visible spectrum spectrophotometer.

[0137] The preceding format may be altered by first binding the sample to the assay plate. Then, primary antibody is incubated with the assay plate, followed by detecting of bound primary antibody using a labeled second antibody with specificity for the primary antibody.

[0138] The antibody compositions of the present invention will also find use in immunoblot or Western blot analysis. The antibodies may be used as high-affinity primary reagents for the identification of proteins immobilized onto a solid support matrix, such as nitrocellulose, nylon or combinations thereof. In conjunction with immunoprecipitation, followed by gel electrophoresis, these may be used as a single step reagent for use in detecting antigens against which secondary reagents used in the detection of the antigen cause an adverse background. Immunologically-based detection methods for use in conjunction with Western blotting include enzymatically-, radiolabel- or fluorescently-tagged secondary antibodies against the toxin moiety are considered to be of particular use in this regard.

[0139] Mass Spectrometry. By exploiting the intrinsic properties of mass and charge, mass spectrometry (MS) can resolve and confidently identify a wide variety of complex compounds, including nucleic acids and proteins. Traditional quantitative MS has used electrospray ionization (ESI) followed by tandem MS (MS/MS) (Chen et al., 2001; Zhong et al., 2001; Wu et al., 2000) while newer quantitative methods are being developed using matrix assisted laser desorption/ionization (MALDI) followed by time of flight (TOF) MS (Bucknall et al., 2002; Mirgorodskaya et al., 2000; Gobom et al., 2000).

[0140] ESI is a convenient ionization technique developed by Fenn and colleagues (Fenn et al., 1989) that is used to produce gaseous ions from highly polar, mostly nonvolatile biomolecules, including lipids. The sample is injected as a liquid at low flow rates (1-10 μL/min) through a capillary tube to which a strong electric field is applied. The field generates additional charges to the liquid at the end of the capillary and produces a fine spray of highly charged droplets that are electrostatically attracted to the mass spectrometer inlet. The evaporation of the solvent from the surface of a droplet as it travels through the desolvation chamber increases its charge density substantially. When this increase exceeds the Rayleigh stability limit, ions are ejected and ready for MS analysis.

[0141] A typical conventional ESI source consists of a metal capillary of typically 0.1-0.3 mm in diameter, with a tip held approximately 0.5 to 5 cm (but more usually 1 to 3 cm) away from an electrically grounded circular interface having at its center the sampling orifice, such as described by Kabarle et al. (1993). A potential difference of between 1 to 5 kV (but more typically 2 to 3 kV) is applied to the capillary by power supply to generate a high electrostatic field (10⁶ to 10⁷ V/m) at the capillary tip. A sample liquid carrying the analyte to be analyzed by the mass spectrometer, is delivered to the tip through an internal passage from a suitable source (such as from a chromatograph or directly from a sample solution via a liquid flow controller). By applying pressure to the sample in the capillary, the liquid leaves the capillary tip as small highly electrically charged droplets and further undergoes desolvation and breakdown to form single or multicharged gas phase ions in the form of an ion beam. The ions are then collected by the grounded (or negatively charged) interface plate and led through an the orifice into an analyzer of the mass spectrometer. During this operation, the voltage applied to the capillary is held constant. Aspects of construction of ESI sources are described, for example, in U.S. Pat. Nos. 5,838,002; 5,788,166; 5,757,994; RE 35,413; and 5,986,258.

[0142] In ESI tandem mass spectroscopy (ESI/MS/MS), one is able to simultaneously analyze both precursor ions and product ions, thereby monitoring a single precursor product reaction and producing (through selective reaction monitoring (SRM)) a signal only when the desired precursor ion is present. When the internal standard is a stable isotope-labeled version of the analyte, this is known as quantification by the stable isotope dilution method. This approach has been used to accurately measure pharmaceuticals (Zweigenbaum et al., 2000; Zweigenbaum et al., 1999) and bioactive peptides (Desiderio et al., 1996; Lovelace et al., 1991). Newer methods are performed on widely available MALDI-TOF instruments, which can resolve a wider mass range and have been used to quantify metabolites, peptides, and proteins. Larger molecules such as peptides can be quantified using unlabeled homologous peptides as long as their chemistry is similar to the analyte peptide (Duncan et al., 1993; Bucknall et al., 2002). Protein quantification has been achieved by quantifying tryptic peptides (Mirgorodskaya et al., 2000). Complex mixtures such as crude extracts can be analyzed, but in some instances, sample clean up is required (Nelson et al., 1994; Gobom et al., 2000).

[0143] Secondary ion mass spectroscopy, or SIMS, is an analytical method that uses ionized particles emitted from a surface for mass spectroscopy at a sensitivity of detection of a few parts per billion. The sample surface is bombarded by primary energetic particles, such as electrons, ions (e.g., O, Cs), neutrals or even photons, forcing atomic and molecular particles to be ejected from the surface, a process called sputtering. Since some of these sputtered particles carry a charge, a mass spectrometer can be used to measure their mass and charge. Continued sputtering permits measuring of the exposed elements as material is removed. This in turn permits one to construct elemental depth profiles. Although the majority of secondary ionized particles are electrons, it is the secondary ions which are detected and analyzed by the mass spectrometer in this method.

[0144] Laser desorption mass spectroscopy (LD-MS) involves the use of a pulsed laser, which induces desorption of sample material from a sample site—effectively, this means vaporization of sample off of the sample substrate. This method is usually only used in conjunction with a mass spectrometer, and can be performed simultaneously with ionization if one uses the right laser radiation wavelength.

[0145] When coupled with Time-of-Flight (TOF) measurement, LD-MS is referred to as LDLPMS (Laser Desorption Laser Photoionization Mass Spectroscopy). The LDLPMS method of analysis gives instantaneous volatilization of the sample, and this form of sample fragmentation permits rapid analysis without any wet extraction chemistry. The LDLPMS instrumentation provides a profile of the species present while the retention time is low and the sample size is small. In LDLPMS, an impactor strip is loaded into a vacuum chamber. The pulsed laser is fired upon a certain spot of the sample site, and species present are desorbed and ionized by the laser radiation. This ionization also causes the molecules to break up into smaller fragment-ions. The positive or negative ions made are then accelerated into the flight tube, being detected at the end by a microchannel plate detector. Signal intensity, or peak height, is measured as a function of travel time. The applied voltage and charge of the particular ion determines the kinetic energy, and separation of fragments are due to different size causing different velocity. Each ion mass will thus have a different flight-time to the detector.

[0146] One can either form positive ions or negative ions for analysis. Positive ions are made from regular direct photoionization, but negative ion formation requires a higher powered laser and a secondary process to gain electrons. Most of the molecules that come off the sample site are neutrals, and thus can attract electrons based on their electron affinity. The negative ion formation process is less efficient than forming just positive ions. The sample constituents will also affect the outlook of a negative ion spectra.

[0147] Other advantages with the LDLPMS method include the possibility of constructing the system to give a quiet baseline of the spectra because one can prevent coevolved neutrals from entering the flight tube by operating the instrument in a linear mode.

[0148] Since its inception and commercial availability, the versatility of MALDI-TOF-MS has been demonstrated convincingly by its extensive use for qualitative analysis. For example, MALDI-TOF-MS has been employed for the characterization of synthetic polymers (Marie et al., 2000; Wu et al., 1998). peptide and protein analysis (Roepstorff, 2000; Nguyen et al, 1995), DNA and oligonucleotide sequencing (Miketova et al., 1997; Faulstich et al., 1997; Bentzley et al., 1996), and the characterization of recombinant proteins (Kanazawa et al, 1999; Villanueva et al., 1999). Recently, applications of MALDI-TOF-MS have been extended to include the direct analysis of biological tissues and single cell organisms with the aim of characterizing endogenous peptide and protein constituents (Lynn et al., 1999; Stoeckli et al., 2001; Caprioli et al., 1997; Chaurand et al., 1999; Jespersen et al., 1999).

[0149] The properties that make MALDI-TOF-MS a popular qualitative tool—its ability to analyze molecules across an extensive mass range, high sensitivity, minimal sample preparation and rapid analysis times—also make it a potentially useful quantitative tool. MALDI-TOF-MS also enables non-volatile and thermally labile molecules to be analyzed with relative ease. It is therefore prudent to explore the potential of MALDI-TOF-MS for quantitative analysis in clinical settings. While there have been reports of quantitative MALDI-TOF-MS applications, there are many problems inherent to the MALDI ionization process that have restricted its widespread use (Kazmaier et al., 1998; Horak et al., 2001; Gobom et al., 2000; Desiderio et al., 2000). These limitations primarily stem from factors such as the sample/matrix heterogeneity, which are believed to contribute to the large variability in observed signal intensities for analytes, the limited dynamic range due to detector saturation, and difficulties associated with coupling MALDI-TOF-MS to on-line separation techniques such as liquid chromatography. Combined, these factors are thought to compromise the accuracy, precision, and utility with which quantitative determinations can be made.

[0150] Because of these difficulties, practical examples of quantitative applications of MALDI-TOF-MS have been limited. Most of the studies to date have focused on the quantification of low mass analytes, in particular, alkaloids or active ingredients in agricultural or food products (Jiang et al., 2000; Yang et al., 2000; Wittmann et al., 2001), whereas other studies have demonstrated the potential of MALDI-TOF-MS for the quantification of biologically relevant analytes such as neuropeptides, proteins, antibiotics, or various metabolites in biological tissue or fluid (Muddiman et al., 1996; Nelson et al., 1994; Duncan et al., 1993; Gobom et al., 2000; Wu et al., 1997; Mirgorodskaya et al., 2000). In earlier work it was shown that linear calibration curves could be generated by MALDI-TOF-MS provided that an appropriate internal standard was employed (Duncan et al., 1993). This standard can “correct” for both sample-to-sample and shot-to-shot variability. Stable isotope labeled internal standards (isotopomers) give the best result.

[0151] With the marked improvement in resolution available on modern commercial instruments, primarily because of delayed extraction (Bahr et al., 1997; Takach et al., 1997), the opportunity to extend quantitative work to other examples is now possible; not only of low mass analytes, but also biopolymers.

### V. EXAMPLES

[0152] The following examples are included to further illustrate various aspects of the invention. It should be appreciated by those of skill in the art that the techniques disclosed in the examples that follow represent techniques and/or compositions discovered by the inventor to function well in the practice of the invention, and thus can be considered to constitute preferred modes for its practice. However, those of skill in the art should, in light of the present disclosure, appreciate that many changes can be made in the specific embodiments which are disclosed and still obtain a like or similar result without departing from the spirit and scope of the invention.

### Example 1

### Methods

[0153] Dataset acquisition. Promoter sequences were downloaded from the DBTSS (dbtss.hgcjp) (Wakaguri et al., 2008; Tsuritani et al., 2007; Ota et al, 2004; Suzuki and Sugano, 2003). miRNA sequences were downloaded from miRBase (microrna.sanger.ac.uk) (Griffiths-Jones, 2004; Griffiths-Jones et al., 2006).

[0154] Comparative Sequence Analysis. Gene promoters and miRNA sequences were compared using BLASTN with word size=7 and gap penalty=−1. miRNAs with perfect complementarity to gene promoters at bases 2-7 and 12-17 of the miRNA sequence were characterized as promoter-targeting miRNAs (FIG. 2). Alignments were also required to span from bases 2 through (n−2) of the miRNA sequence, where n=the total length of the miRNA sequence. Promoters corresponding to uncharacterized open reading frames or hypothetical genes were omitted from subsequent experiments. miRNAs that aligned with their own genomic origin were also dismissed.

[0155] Cell culture. T47D cells (America Type Cell Culture Collection, ATCC) were maintained in RPMI-1640 medium (ATCC) supplemented with 10% fetal bovine serum (FBS), 0.5% nonessential amino acids (NEAA), 1 mM sodium pyruvate, 10 mM HEPES, and 0.4 units/ml bovine insulin. Cells were cultured at 37° C. and 5% CO₂.

[0156] Lipid-mediated transfection. Cells were plated at 200,000 cells per well in six-well plates (Costar) two days before transfection. Transfection of oligonucleotides was performed with RNAi-max (Invitrogen) according to the manufacturer's instructions. Duplex RNAs were prepared as described (Janowski et al., 2005). All duplex RNAs and single stranded LNAs were introduced at 100 nM concentrations (FIG. 4). miR-mimics, LNAs, and siRNAs were harvested at 1, 3, and 5 days prior to transfection, respectively.

[0157] RNA analysis. Total RNA from treated T47D cells was extracted with TRIzol (Invitrogen). RNA was treated with DNase I to remove contaminating DNA and subsequently reverse-transcribed by random primers with a High Capacity cDNA Archive Kit (Applied Biosystems).

[0158] Quantitative PCR (qPCR). qPCR was performed on an ABI7900 real-time PCR (Applied Biosystems) using iTaq SYBR Green Supermix w/ROX (BIO-RAD). Primers were designed using primer3 software with the exception of primers for GAPDH which were supplied as a control (Applied Biosystems) (FIG. 5). Only those primer sets that show linear amplification over several orders of magnitude were used. RNA was treated with DNase prior to reverse transcription. Taqman miRNA assay kit for miR566 (Applied Biosystems) was used according to manufacturer's instructions to detect miR566 in T47D cells.

[0159] 5′-Rapid amplification of cDNA ends (5′-RACE). 5′-RACE and 3′-RACE was performed according to the manufacturer's protocol using the GeneRacer kit (Invitrogen). The inventors chose this kit because it includes purification steps designed to obtain full length RNA with intact 5′ caps rather than truncated products. 3′-RACE protocol selected for polyadenylated transcripts. Forty-six primers were used, blanketing the promoter from −20 to −1099 to maximize detection of transcripts and reduce the likelihood of bias from any one primer set (FIG. 6). Each primer was screened for either 5′ or 3′ products or both. PCR products were cloned into a PCR-4 Topo vector and sequenced. The inventors used the Platinum Taq High Fidelity kit (Invitrogen) to produce product for cloning. They sequenced multiple clones from at least two independent experiments to confirm results.

[0160] Biotin pulldown of small RNA:transcript complexes. T47D were grown in six-well dishes and transfected with biotinylated RNA heteroduplexes (a 3′-biotin on either the sense or antisense strand, supplied by Sigma-Proligo) at a concentration of 100 nM for 24 hours. Avidin-coated beads were prepared by pre-blocking with yeast tRNA and salmon sperm DNA. Cells were harvested at 24 hours to obtain nuclei. The nuclei were lysed and mixed with avidin-coated beads at 4° C. for two hours. The inventors washed the beads exhaustively prior to elution of RNA using buffer (1.5% Biotin, 4 M guanidine thiocyanate, 25 mM sodium citrate, 0.5% sodium N-lauroyl sarcosinate) for 2 hours at 45° C. with periodic gentle agitation. Samples were treated with DNase to remove any contaminating DNA and then amplified by PCR using a primer set capable of amplifying the target ncRNA transcript (FIG. 5).

[0161] RNA immunoprecipitation (RIP). RIP was performed essentially as described (Schwartz et al., 2008). The inventors grew T47D cells in 150 cm² dishes and transfected duplex RNAs using RNAiMax (Invitrogen). Cells were crosslinked using 1% formaldehyde solution and harvested. Cells were lysed and nuclei obtained. Antibody capable of binding to all 4 human isoforms of AGO was incubated with nuclei overnight (Nelson et al., 2007). The antibody-treated material was then mixed with Protein A/G agarose Plus (Santa Cruz) and washed five times as described (Schwartz et al., 2008). Complex was eluted and crosslinking reversed by adding 200 nM NaCl and heating to 65° C. for two hours. Samples were amplified using a primer set capable of amplifying the target ncRNA transcript (FIG. 5).

[0162] Chromatin immunoprecipitation (ChIP). ChIP was performed as described (Schwartz et al., 2008). Inhibition of TROAP was confirmed using qPCR. Anti-RNA Pol II and anti-H3K9me2 antibodies were supplied by Upstate. Primer sets targeting the TROAP gene and TROAP promoter were used for the Pol II and H3K9me2 ChIPs, respectively (FIG. 5).

### Example 2

### Modulating Expression of Target Genes with Antisense Oligonucleotides of Endogenous miRNA Complementary to Promoters of the Target Genes

[0163] To identify endogenous promoter-targeting RNAs, the inventors constructed a comparative database comprised of sequences from publically available datasets. Promoter sequences were acquired from the database of Transcriptional Start Sites (dbTSS), which houses experimentally determined transcription start sites and the flanking sequences for over 15,000 human genes (Wakaguri et al., 2008; Tsuritani et al., 2007; Ota et al, 2004; Suzuki and Sugano, 2003. Small RNA sequences were obtained from miRBase which contains sequences of computationally predicted and experimentally determined endogenous small RNAs (Griffiths-Jones, 2004; Griffiths-Jones et al., 2006).

[0164] To compare these data sets, the inventors derived a sequence comparison algorithm (FIG. 1) based on current guidelines for identifying potential mRNA targets for miRNAs (Grimson et al., 2007). Briefly, miRNAs with perfect complementarity to promoter sequences at bases 2-8 and 12-17 of the miRNA sequence were classified as predicted promoter-targeting miRNAs. The inventors dismissed alignments corresponding to uncharacterized open reading frames or hypothetical genes and those between miRNAs and their own genomic origin. Using these criteria in an initial screen, the inventors identified 63 alignments involving 35 unique miRNAs and 58 unique gene promoters (FIG. 2).

[0165] To identify candidate target genes that might be under control of miRNAs, the inventors inhibited expression of DICER, an enzyme required for miRNA biogenesis. Quantitative PCR (qPCR) revealed that mRNA expression of 6 out of 7 candidate target genes were significantly increased following siRNA knockdown of DICER in T47D breast cancer cells.

[0166] The inventors next examined the ability of specific miRNA-mimics to modulate the expression of their predicted target genes. The miRNA mimics used were synthetic duplex RNAs consisting of the miRNA sequence and a fully complementary carrier strand. In exemplary experiments, introduction of a miR566 mimic reduced expression of both TROAP and PNRC2, and the miR339-5p and miR545 mimics decreased expression of APHIB and UHMK1, respectively.

[0167] To determine if endogenous miRNAs were regulating the remaining candidate genes, the inventors used single-stranded antisense oligonucleotides containing 2′-O-methyl (2′-O-me) bases that were complementary to the predicted miRNAs. 2′-O-me oligomers are known to be able to bind to miRNAs and block their activity (25, 17, 18). For example, 2′-O-methyl RNA targeting miR566 increased TROAP by almost 3-fold.

[0168] To further elucidate the link between miRNA and target gene expression, the inventors targeted miRNA with complementary single-stranded antisense oligonucleotides containing locked nucleic acid (LNA) (Elmén et al., 2008; Ørom et al., 2006) bases and examined the effect on target gene expression. For example, LNA complementary to miR-566 increased TROAP mRNA expression by 5-fold as compared to an LNA that contained 4 mismatched bases or a scrambled sequence. The complementary antisense LNA also increased TROAP protein levels as compared to the same negative controls.

[0169] To further document the protocols, the inventors developed a panel of inhibitor oligonucleotides that target miRNAs with complementarity to promoters of additional therapeutically-relevant target genes. For example, in cell based experiments (supra), both 2′-O-me and LNA-modified versions of the inhibitor sequences shown in Tables 1-2 demonstrate significant transcriptional regulation for the targeted gene expression.

[0170] miRNAs have been understood to regulate gene expression at the post-transcriptional level through recognition of 3′-UTRs within mRNA transcripts. These studies extend miRNA function to recognition of gene promoters, particularly non-coding RNA transcripts at gene promoters, and reveal a novel mechanism for regulation of gene transcription. The inventors have demonstrated with diverse examples that they can with reasonable predictability modulate expression of a target gene by (a) identifying an endogenous miRNA complementary to a promoter of a target gene; and (b) contacting the miRNA with a single-stranded complementary oligonucleotide effective to bind the miRNA and thereby modulate expression of the target gene.

### Example 3

### Activating Caveolin-1 Expression Potently Inhibits Matrigel Invasion by Metastatic Mammary Tumor Cells

[0171] The inventors designed complementary single-stranded antisense oligonucleotides containing (i) 2′-O-methyl or (ii) LNA bases, and targeting hsa-miR-33a* (Table 2) to target caveolin-1 gene expression in metastatic mammary tumor cells, and demonstrate that increased expression of Cav-1 in Met-1 cells reduces their invasive potential. Invasion through Matrigel®-coated membranes is a widely accepted method for assessing the metastatic potential of virtually all types of tumor cells. In this example, Matrigel® invasion assays are used to measure the invasiveness of cells in response to chemoattractants (0.5 or 10% FBS in DMEM) over a 24 h incubation period. In pilot experiments, oligonucleotide-treated cells (2′-O-methyl and LNA base-containing) show a 5-fold reduction in Matrigel® invasion in response to 10% FBS.

### Example 4

### Activating Map Kinase_Activated Protein Kinase 2 Expression by Systemic Delivery of Specific Anti-miRNA Oligonucleotides Reduces Atherosclerosis in Hypercholesterolemic Mice

[0172] The inventors identified an endogenous miRNA (hsa-miR-297) complementary to the promoter of the therapeutically important target gene mitogen-activated protein kinase-activated protein kinase 2 (MAPKAPK2); see FIG. 2. The inventors then designed single-stranded oligonucleotide complements to hsa-miR-297 (antisense hsa-miR-297) incorporating (i) LNA- or (ii) 2′-O-methyl-modified bases to confirm their ability to bind the endogenous miRNA and thereby modulate MAPKAPK2 expression.

[0173] In a murine atherosclerosis model both LNA- and 2′-O-methyl-modified antisense hsa-miR-297 oligonucleotides markedly reduce indicia of atherosclerosis in LDLR-deficient mice fed an atherogenic diet for 8 or 16 weeks as indicated by a significantly reduced lipid-positive area (oil red O) in the aorta descendens (en face) and the aortic arch (longitudinal sections); see detailed methods below.

[0174] LDLR-deficient mice (C57B1/6, Jackson Laboratories, Bar Harbor, Me.) are fed a high-cholesterol diet (product #D12108, Research Diets; 1.25% Cholesterol without added cholate) for 8 and 16 weeks. Subsequently, mice are euthanized and the aortas removed and analyzed as described below. Aortic arches are frozen in OCT compound (Tissue-Tek) and the thoracic and abdominal parts of the aortas fixed in 10% buffered formalin (see, Jagavelu et al., 2007, Circ. Res.101; 1104-1112).

[0175] Saline-formulated compounds were administered into normal and hypercholesterolaemic C57BL/6J mice by intraperitoneal injections (two weekly intraperitoneal doses of 5 mg/kg LNA- or 2′-O-methyl modified anti-miR for six weeks). LNA-modified and 2′-O-methyl oligonucleotides are synthesized as described herein.

[0176] Immunohistochemistry/Immunofluorescence. Serial cryostat sections (6 μm) of mouse aortic arches are fixed in acetone (−20° C., 5 minutes), air dried, and stained by the avidinbiotin-peroxidase method. For immunfluorescence serial cryosections (6 μm) of mouse aortic arches are fixed in paraformaldehyde (4° C., 15 minutes) and permeabilized with 0.1% Triton X-100 for minutes. Sections are incubated with primary antibodies overnight at 4° C. followed by incubation with a fluorescence dye-conjugated secondary antibody (Molecular Probes/Invitrogen). Nuclei are stained with 4′-6-diamidino-2-phenyl indole-2HCl (DAPI, Santa Cruz Biotechnologies).

[0177] Oil Red 0 Staining for Lipids. Deposition of lipids in en face preparations of the aorta descendens (fixed with 10% formalin) and cryosections of the aortic arch is determined by oil red O staining.

[0178] Tissue Analysis. To quantify the extent and composition of the aortic lesions longitudinal sections of the aortic arch were analyzed microscopically in all mice. In the aortic arch, a 2-mm proximal segment of the inner curvature, starting at a perpendicular dropped from the left side of the left subclavian artery origin, is analyzed for the total wall area. The respective areas positively stains for lipids (oil red O), macrophages (MOMA-2), VCAM-1, and ICAM-1 are determined via computer-assisted image quantification (Leica Microscope DM 4000B, Leica Qwin software, Leica). En face analysis of lipid depositions of the pinned Aorta descendens use measurement of percentage of surface area (20 mm from the iliac bifurcation to the thoracic section of the aorta) stained by oil red O using computer-assisted image analysis (Axiovertmicroscope & Axioversion Rel. 4.4 software, Zeiss).

### Example 5

### Mechanistic Studies Using TROAP

### miR-566

[0179] For detailed mechanistic studies, the inventors selected an exemplary target gene—miRNA regulatory pair. TROAP has been implicated to function in cell adhesion (Fukuda et al., 1995), is involved in mitotic spindle assembly (Yang et al., 2008), and has been identified as a prostate cancer biomarker (Dhanasekaran et al., 2001). Sequence analysis revealed that miR-566 is complementary to the TROAP gene promoter at bases −405 to −386 relative to the RefSeq transcription start site. To verify the transcription start site (TSS) of TROAP in T47D cells the inventors used 5′-RACE. The inventors identified the TROAP TSS to be 57 bases downstream of the RefSeq start site and 443 bases downstream of the predicted miR-566 target sequence.

[0180] To verify that miR-566 is expressed in T47D cells, the inventors used quantitative RT-PCR. They detected miR-566 in whole cell RNA preparations. To verify that miR-566 is present in the nucleus of T47D cells, the inventors repeated the experiment on nuclear isolates. They also detected miR-566 in the nucleus.

[0181] The inventors have previously shown that noncoding RNAs (ncRNAs) transcribed from gene promoters are the molecular targets for synthetic agRNAs that inhibit or activate the progesterone receptor gene (Schwartz et al., 2008). The inventors reasoned that at least some miRNAs might also target ncRNAs originating from gene promoters. miR-566 would be a near perfect complement to a ncRNA transcribed in the sense direction relative to the TROAP gene. Using Reverse-Transcription PCR(RT-PCR), the inventors detected RNA species produced from the TROAP promoter both surrounding and overlapping the predicted miR-566 target sequence. Using RACE, they also identified a ncRNA transcript which initiates 1047 bases upstream of the RefSeq start. The ncRNA transcript is spliced, resulting in excision of the predicted miR-566 target sequence from the mature RNA. The transcript contains 5 exons, 3 of which overlap TROAP mRNA, but has no obvious protein coding potential. Mechanistically, miR-566 may bind to this ncRNA prior to RNA splicing, consistent with the miRNA binding to the target RNA in close proximity to the chromosome. Pre-mRNA transcripts are established targets for synthetic antisense oligonucleotides (Aartsma-Rus and van Ommun, 2007).

[0182] To investigate the potential for miR-566 to bind to an RNA originating from the TROAP promoter, the inventors synthesized a miR-566 mimic with a 3′-biotin label. Labeling of the miR-566 mimics did not affect their ability to repress TROAP expression after transfection into cells. Nuclei from cells transfected with labeled miR-566 mimic were isolated and biotinylated material was recovered using avidin beads. RT-PCR amplification and sequencing of purified material detected an RNA product that originated from the TROAP promoter and contained the recognition sequence for miR-566. The RNA product was not detected when the complementary strand (− strand) of the miR-566 mimic duplex was biotinylated, when cells were treated with unlabeled miR-566 mimic or mismatch duplexes, or under conditions that would only amplify DNA. These data indicate a physical association of miR-566 mimic with an RNA species produced from the TROAP promoter.

[0183] The inventors have previously observed that activating and inhibitory synthetic agRNAs recruit AGO proteins to target RNA transcripts at gene promoters (Schwartz et al., 2008). They reasoned that endogenous miR-566 might be recruiting AGO to an RNA transcript originating from the TROAP promoter. To test this hypothesis, the inventors used RNA immunoprecipitation (RIP) with a well-characterized anti-argonaute antibody that recognizes all 4 human AGO isoforms (Nelson et al., 2007). RT-PCR amplification and sequencing of purified material detected an RNA product that originated from the TROAP promoter. The association between AGO and the TROAP promoter RNA species is absent in cells treated with an siRNA targeting DICER. These results indicate that AGO association with TROAP promoter RNA is dependent on endogenous miR-566.

[0184] Synthetic agRNAs can silence gene expression by blocking transcription (Ting et al., 2005; Morris et al., 2004; Janowski et al., 2006). To determine the affects of miR-566 on TROAP gene transcription, the inventors performed ChIP using an anti-RNA Polymerase II (Pol II) antibody. Addition of the miR-566 mimic decreased Pol II occupancy on the TROAP gene by 77% as compared to mismatch duplex treated cells. This decrease in Pol II occupancy indicates that miR-566 silences TROAP expression at the level of transcription. To further examine changes at the level of the chromosome in response to miR-566, the inventors analyzed histone modifications. Specifically, dimethylation of histone 3 lysine 9 (H3K9me2) has been implicated in gene silencing by synthetic agRNAs (Ting et al., 2005; Kim et al., 2006). Consistent with these findings, addition of miR-566 mimic increased H3K9me2 occupancy at the TROAP promoter by nearly 7 fold as compared to mismatch duplex treated cells.

[0185] These studies demonstrate that miRNAs can recognize gene promoter sequences inside mammalian cells by binding non-coding RNA transcripts produced from the target promoter. The inventors identify i) multiple miRNAs with significant complementarity to gene promoters, ii) that inhibiting endogenous miRNA by complementary oligonucleotides results in increased target gene expression, iii) miRNAs bind to noncoding RNA species that originate from gene promoters. Recently, Place et al. reported that a miRNA mimic with complementarity to the promoters of E-cadherin and CSDC2 could activate gene expression when transiently introduced (Place et al., 2008). In this report, however, DICER knockdown had no effect on the predicted target genes and oligomers targeting the putative miRNA had no effect on gene expression. These data do not support the existence of an endogenous miRNA that regulates expression of either E-cadherin or CSDC2 9 Place et al., 2008).

### Example 6

### Predicting Potential miRNA Targets Sites within Gene Promoters

[0186] Sequence Acquisition. To identify putative promoter-targeting miRNAs the inventors constructed a database comprised of miRNA and gene promoter sequences from public sequence repositories. Promoter sequences were acquired from the UCSC genome browser (hg 18) and consisted of the 200 nucleotides immediately 5′ to the annotated transcription start site for each gene (Intl Human Genome Sequencing Consortium, 2001; Kent et al., 2002). The inventors chose 200 base sequences (−200 to −1) for initial evaluations, but larger promoter regions can also be examined. Mature miRNA sequences were obtained from miRBase (Build 12.0), which contains sequences of experimentally determined precursor and mature miRNAs (Grffiths-Jones et al., 2008; Griffiths-Jones et al., 2006; Griffiths-Jones, 2004).

[0187] Analysis of Seed Matches. Synthetic agRNAs target non-coding (ncRNA) transcripts that overlap gene promoters. The inventors used promoter DNA sequences to construct datasets representing potential ncRNA transcripts in both the sense and antisense direction for each gene promoter. For comparison, they also obtained the sequences of the 5′UTR, coding sequence (CDS), and 3′UTR for each gene (FIG. 7A).

[0188] A basic requirement for target recognition by miRNAs is perfect complementarity between the target sequences and bases 2-8 of the mature miRNA sequence, called the seed sequence. The inventors determined the number of seed matches within potential sense and antisense transcripts that overlap gene promoters and compared them to seed matches within the 3′UTR region of mRNAs (FIG. 7B). They found that seed matches within promoter-overlapping transcripts occur 80% as frequently as seed matches within 3′UTRs, indicating that gene promoter sequences have the potential to be miRNA targets (FIG. 8A).

[0189] To evaluate the statistical significance of seed matches within gene promoter sequences, the inventors tabulated the frequency of occurrences of seed matches in 100 randomizations of each promoter sequence. They found that seed matches occur 75% as frequently within randomized as opposed to actual promoter sequences (FIG. 8B). The excess of observed to expected seed sequence matches within promoter sequences was similar for both putative sense and antisense transcripts. This result implies that promoter sequences are enriched for potential targets for recognition by miRNAs. Matches are equally distributed throughout the 200 base gene promoter segments surveyed, suggesting that no particular region of a gene promoter is more likely than another to contain a predicted miRNA target site (FIG. 8C).

[0190] Ranking Matches. The inventors' analysis identified nearly 800,000 miRNA seed matches within 27,345 gene promoter sequences (FIG. 8B). This large number required investigation of additional factors to prioritize target predictions. Although not necessarily a prerequisite for miRNA function, the minimum free energy (MFE) of hybridization between miRNAs and their predicted target sites have been successfully used to predict miRNA target sites within 3′UTRs (Stark et al., 2003). The inventors reasoned that MFE values may also be useful for prioritizing miRNA target predictions within gene promoters.

[0191] The MFE values were calculated for miRNA hybridization to predicted target sites (based on seed sequence matches, hereafter simply referred to as predictions) within putative promoter-overlapping transcripts and within 10 randomizations of promoter sequences. The inventors found that predictions with lower MFE values occurred more frequently in actual promoter sequences than in randomized sequences (FIG. 9A). The difference between the distributions of MFE values demonstrates that predictions with low MFE values occur more often than would be expected at random, implying that these predictions are more likely to be biologically significant and that MFE values will be useful criteria for prioritizing target predictions.

[0192] During the course of the MFE analysis, the inventors identified several miRNA target predictions within gene promoters that had notably low MFE values. These observations prompted the inventors to compare the MFE values for target predictions within gene promoters to target predictions within 3′UTRs (FIG. 9B). The inventors calculated the mean MFE value for all predictions within gene promoters to be −24.27 kcal/mol and −24.32 kcal/mol for putative sense and antisense promoter-overlapping transcripts, respectively. The mean MFE for all predictions within 3′UTRs was −20.57 kcal/mol, more than 3.5 kcal/mol higher than predictions within promoters. The difference in mean MFE values suggests that, on average, miRNA recognition of sequences at gene promoters would be more energetically favorable than recognition of 3′UTR sequences.

[0193] To further evaluate the differences between target predictions within gene promoters and 3′UTRs, the inventors examined the distribution of MFE values for all predictions within the different sequence datasets. As previously indicated by the mean MFE values, roughly 50% of target predictions within gene promoters had MFE values below −24.3 kcal/mol. Interestingly, only 22% of predictions within 3′UTRs had MFE values below −24.3 kcal/mol (FIG. 9B). The difference in MFE value distributions demonstrates that gene promoters are enriched relative to 3′UTRs for predicted target sites with low free energies of hybridization and may actually represent more favorable miRNA targets than 3′UTRs.

[0194] Another criterion used in miRNA target prediction is sequence complementarity. Sequence complementarity alone has been used successfully to predict miRNA target sites within 3′UTRs (Lai, 2002). The inventors used the Needleman-Wunsch algorithm (Neddleman and Wunsch, 1970) to evaluate the degree of sequence complementarity between miRNAs and predicted target sites within gene promoters (FIG. 7B). They identified over 200 individual miRNAs with near perfect complementarity to their predicted target sites within gene promoters. A selected subset of these predictions is listed in FIG. 10. The high degree of complementarity between miRNAs and gene promoters further demonstrates that gene promoters contain promising candidates for miRNA target sequences.

[0195] Summary. Strong evidence that gene expression can be modulated using synthetic duplex RNAs that are complementary to gene promoters suggests that natural gene regulation may include recognition of gene promoters by miRNAs. Such recognition would have evolutionary advantages, given the large difference between protein transcription factors and miRNAs in their efficiency of generating new selectivity for gene promoters through mutation.

[0196] Here, the inventors describe a computational algorithm that can be used to identify promising miRNA target sites within gene promoters. They identified many seed sequence matches within promoters and demonstrate that they are almost as common as those within 3′UTRs. They also identified many miRNA/promoter pairs that have unusually strong complementarity. These results can be used to rank order miRNA/promoter pairs for the demanding studies necessary to validate whether the potential for these interactions is biologically significant. Recognition of gene promoters by miRNAs would have important implications for the development of synthetic agents that regulate gene expression.

[0197] The foregoing description and examples are offered by way of illustration and not by way of limitation. All publications and patent applications cited in this specification are herein incorporated by reference as if each individual publication or patent application were specifically and individually indicated to be incorporated by reference. Although the foregoing invention has been described in some detail by way of illustration and example for purposes of clarity of understanding, it will be readily apparent to those of ordinary skill in the art in light of the teachings of this invention that certain changes and modifications may be made thereto without departing from the spirit or scope of the appended claims.

### VI. REFERENCES

[0198] The following references, to the extent that they provide exemplary procedural or other details supplementary to those set forth herein, are specifically incorporated herein by reference:
[0199] U.S. Pat. No. 4,981,957
[0200] U.S. Pat. No. 5,118,800
[0201] U.S. Pat. No. 5,279,721
[0202] U.S. Pat. No. 5,319,080
[0203] U.S. Pat. No. 5,359,044
[0204] U.S. Pat. No. 5,393,878
[0205] U.S. Pat. No. 5,446,137
[0206] U.S. Pat. No. 5,466,786
[0207] U.S. Pat. No. 5,514,785
[0208] U.S. Pat. No. 5,519,134
[0209] U.S. Pat. No. 5,567,811
[0210] U.S. Pat. No. 5,576,427
[0211] U.S. Pat. No. 5,591,722
[0212] U.S. Pat. No. 5,595,760
[0213] U.S. Pat. No. 5,597,909
[0214] U.S. Pat. No. 5,610,300
[0215] U.S. Pat. No. 5,627,053
[0216] U.S. Pat. No. 5,639,873
[0217] U.S. Pat. No. 5,646,265
[0218] U.S. Pat. No. 5,658,873
[0219] U.S. Pat. No. 5,670,633
[0220] U.S. Pat. No. 5,672,659
[0221] U.S. Pat. No. 5,700,920
[0222] U.S. Pat. No. 5,792,747
[0223] U.S. Pat. No. 5,902,880
[0224] U.S. Pat. No. 6,146,886
[0225] U.S. Pat. No. 6,268,490
[0226] U.S. Pat. No. 6,268,490
[0227] U.S. Pat. No. 6,395,713
[0228] U.S. Pat. No. 6,525,191
[0229] U.S. Pat. No. 6,531,584
[0230] U.S. Pat. No. 6,600,032
[0231] U.S. Pat. No. 6,670,461
[0232] U.S. Pat. No. 6,770,748
[0233] U.S. Pat. No. 6,794,499
[0234] U.S. Pat. No. 7,034,133
[0235] U.S. Pat. No. 7,053,207
[0236] U.S. Patent Publn. 2003/0082807
[0237] U.S. Patent Publn. 2003/0207841
[0238] U.S. Patent Publn. 2004/0014959
[0239] U.S. Patent Publn. 2004/0143114
[0240] U.S. Patent Publn. 2004/0171570
[0241] U.S. Patent Publn. 2004/0219565
[0242] U.S. Patent Publn. 2007/0213292
[0243] U.S. Patent Publn. 2007/0287831
[0244] U.S. Patent Publn. 2008/0015162
[0245] U.S. Patent Publn. 2008/0032945
[0246] Aartsma-Rus and vanOmmen, RNA, 13:1609, 2007.
[0247] Akhtar et al., Trends in Cell Bio., 2:139, 1992.
[0248] Akhtar In: Delivery Strategies for Antisense Oligonucleotide Therapeutics, 1995.
[0249] Akinc et al., Nat. Biotechnol., 26(5):561-9, 2008.
[0250] Aldrian-Herrada et al., Nucleic Acids Res., 26:4910, 1998.
[0251] Allerson et al., J. Med. Chem., 48:901-904, 2005.
[0252] Bentin and Nielsen, Biochemistry, 35:8863-8869, 1996.
[0253] Boado et al., J. Pharm. Sci., 87:1308, 1998.
[0254] Boado, Adv. Drug Delivery Rev., 15:73, 1995.
[0255] Braasch et al., Methods, 23(2):97-107, 2001.
[0256] Chen et al., Nucleic Acids Res., 20:4581, 1992.
[0257] Choung et al., Biochem. Biophys. Res. Commun., 342:919-927, 2006.
[0258] Chowrira et al., J. Biol. Chem., 269:25856, 1994.
[0259] Couture et al., Trends in Genetics, 12:510, 1996.
[0260] Demidov et al., ChemBiochem., 2:133-139, 2001.
[0261] Dhanasekaran et al., Nature, 412:822, 2001.
[0262] Egholm et al., Nature, 365(6446):566-568, 1993.
[0263] Elayadi et al., Nucleic Acids Res., 29(8): 1683-9, 2001.
[0264] Elmen et al., Nature, 452(7189):896-9, 2008.
[0265] Esau et al. Cell Metab., 3(2):87-98, 2006.
[0266] Faruqi et al., Proc. Natl. Acad. Sci. USA, 95:1398-1403, 1998.
[0267] Fire et al., Nature, 391(6669):806-811, 1998.
[0268] Frieden et al., Nucle. Nucleo. Nucleic Acids, 22(5-8):1041-3, 2003.
[0269] Fukuda et al., Genes Dev., 15:1199, 1995.
[0270] Good et al., Gene Therapy, 4:45, 1997.
[0271] Griffiths-Jones et al., Nucleic Acids Res., 34:D140, 2006.
[0272] Griffiths-Jones et al., Nucleic Acids Res., 36:D154, 2008.
[0273] Griffiths-Jones, Nucleic Acids Res., 32:D109, 2004.
[0274] Grimson et al., Mol. Cell., 27:91, 2007.
[0275] Haeberli et al., Nucleic Acids Res., 33:3965-3975, 2005.
[0276] Hall et al., Clin. Cancer Res., 10(23):7852-7859, 2004.
[0277] Hall et al., Nucleic Acids Res., 34:2773-2781, 2006.
[0278] Hassani et al., J. Gene Med., 7:198-207, 2004.
[0279] Hofland and Huang, Handb. Exp. Pharmacol., 137:165, 1999.
[0280] Holstege et al, EMBO J., 16:7468-7480, 1997.
[0281] Hoshika et al., Nucleic Acids Res., 32:3815-3825, 2004.
[0282] International Human Genome Sequencing Consortium, Nature, 409:860, 2001.
[0283] Ishiwata et al., Chem. Phare. Bull., 43:1005, 1995.
[0284] Izant and Weintraub, Science, 229:345, 1985.
[0285] Janowski et al., Nat. Chem. Biol., 1:216, 2005.
[0286] Janowski et al., Nat. Chem. Biol., 3:166, 2007.
[0287] Janowski et al., Nat. Struct. Mol. Biol., 13:787, 2006.
[0288] John et al., PLoS Biol., 2:e363, 2004.
[0289] Jolliet-Riant and Tillement, Fundam. Clin. Pharmacol., 13:16, 1999.
[0290] Kahl et al., J. Mol. Biol., 299:75-89, 2000.
[0291] Kaihatsu et al, Chem. Biol., 11:749-758, 2004.
[0292] Kaihatsu et al, Biochem., 42(47):13996-4003, 2003.
[0293] Kashani-Sabet et al., Antisense Res. Dev., 2:3, 1992.
[0294] Kaur et al., Biochemistry, 45(23):7347-7355, 2006.
[0295] Kent et al., Genome Res., 12:996, 2002.
[0296] Kim et al., Nat. Struct. Mol. Biol., 13:793, 2006.
[0297] Kim et al., Proc. Natl. Acad. Sci. USA, 105:16230, 2008.
[0298] Koshkin et al., Tetrahedron, 54:3607-3630, 1998
[0299] Krützfeldt et al., Nature, 438:685-689, 2005.
[0300] Kumar et al, Bioorg. Med. Chem. Lett., 8:2219-2222, 1998
[0301] Lagos-Quintana et al., Science, 294:853-8, 2001.
[0302] Lai, Nat. Genet., 30:363, 2002.
[0303] Larsen and Nielsen, Nucl. Acids Res., 24:458-463, 1996.
[0304] Lasic et al., Chem. Rev. 95:2601, 1995.
[0305] Lasic et al., Science, 267:1275, 1995.
[0306] Lee et al., ACS Symp. Ser., 752:184, 2000.
[0307] Lee et al., Cell, 75:843, 1993.
[0308] Li et al., Proc. Natl. Acad. Sci. USA, 102:19231-19236, 2005.
[0309] Li et al., Proc. Natl. Acad. Sci. USA, 103:17337, 2006.
[0310] Liu et al., J. Biol. Chem., 42:24864, 1995.
[0311] Maurer et al., Mol. Membr. Biol., 16:129, 1999.
[0312] McGarry and Lindquist, Proc. Natl. Acad. Sci. USA, 83:399, 1986.
[0313] McMahon et al., Life Sci., 71(3):325-3, 2002.
[0314] Mollegaard et al., Proc. Natl. Acad. Sci. USA, 91:3892-3895, 1994.
[0315] Morita et al., Nucleic Acids Res. Suppl., (2):99-100, 2002
[0316] Morris et al., Science, 305:1289-1292, 2004.
[0317] Needleman and Wunsch, J. Mol. Biol., 48:443, 1970.
[0318] Nelson et al., RNA, 13:1787, 2007.
[0319] Nielsen et al, Science, 254:1497-1500, 1991.
[0320] Ohkawa et al., Nucleic Acids Symp. Ser., 27:156, 1992.
[0321] Ojwang et al., Proc. Natl. Acad. Sci. USA, 89:10802, 1992.
[0322] Oku et al., Biochim. Biophys. Acta, 1238:86, 1995.
[0323] Ørom et al., Gene, 372:137, 2006.
[0324] Ota et al., Nat. Genet., 36:40, 2004.
[0325] Pardridge et al., Proc. Natl. Acad. Sci. USA, 92:5592, 1995.
[0326] Paroo and Corey, Trends Biotechnol., 22(8):390-4, 2004.
[0327] PCT Appln. WO 2000/53722
[0328] PCT Appln. WO 2005/021570
[0329] PCT Appln. WO 2005/121371
[0330] PCT Appln. WO 2005115481
[0331] PCT Appln. WO 93/23569
[0332] PCT Appln. WO 94/02595
[0333] PCT Appln. WO 94/02595
[0334] PCT Appln. WO 94/14226
[0335] PCT Appln. WO 96/10390
[0336] PCT Appln. WO 96/10391
[0337] PCT Appln. WO 96/10392
[0338] PCT Appln. WO 98/39352
[0339] PCT Appln. WO 99/14226
[0340] Pignon et al., Hum. Mutat., 3: 126-132, 1994.
[0341] Place et al., Proc. Natl. Acad. Sci. USA, 105:1608, 2008.
[0342] Prakash et al., J. Med. Chem., 48:4247-4253, 2005.
[0343] Propulic et al., J. Virol., 66:1432, 1992.
[0344] Rand et al., Cell, 123:621-629, 2005.
[0345] Remington's Pharmaceutical Science, 18th ed., Mack Publishing Company, Easton, Pa. 1990.
[0346] Remington's Pharmaceutical Sciences, Mack Publishing Co., 1985.
[0347] Sarver et al., Science, 247:1222, 1990.
[0348] Scanlon et al., Proc. Natl. Acad. Sci. USA, 88:10591, 1991.
[0349] Schwartz et al., Nat. Struct. Mol. Biol., 15:842, 2008.
[0350] Singh et al., Chem. Commun., 4:455-456, 1998
[0351] Singh et al., J. Org. Chem., 63:10035-10039, 1998
[0352] Soutschek et al., Nature, 432(7014):173-178, 2004.
[0353] Stark et al., PLoS Biol., 1: 1, 2003.
[0354] Summerton and Weller, Antisense Nucleic Acid Drug Dev.; 7(3):187-95, 1997.
[0355] Suzuki and Sugano, Methods Mol. Biol., 221:73, 2003.
[0356] Taira et al., Nucleic Acids Res., 19:5125, 1991.
[0357] The Science and Practice of Pharmacy, 2003.
[0358] Thompson et al., Nucleic Acids Res., 23:2259, 1995.
[0359] Ting et al., Nat. Genet., 37:906, 2005.
[0360] Tsuritani et al., Genome Res., 17:1005, 2007.
[0361] Tyler et al., FEBS Lett., 421:280, 1999.
[0362] Tyler et al., Proc. Natl. Acad. Sci. USA, 96:7053-7058, 1999.
[0363] Urban-Klein, Gene Ther., 12:461-6, 2005.
[0364] Ventura et al., Nucleic Acids Res., 21:3249, 1993.
[0365] Wahlestedt et al., Proc. Natl. Acad. Sci. USA, 97:5633-5638, 2000
[0366] Wakaguri et al., Nucleic Acids Res., 36:D97, 2008.
[0367] Weerasinghe et al., J. Virol., 65:5531, 1991.
[0368] Yang et al., FASEB J., 22(6):1960-72, 2008.
[0369] Zhang et al., J. Biol. Chem., 275:24436-24443, 2000.

The application's sequence listing, which the Patent Office published only in electronic form, follows.

SEQUENCE LISTING (40000 sequences)

SEQ ID NO: 1 - RNA, 22 nt, Homo sapiens
uucuggaauucugugugaggga

SEQ ID NO: 2 - RNA, 22 nt, Homo sapiens
uuuagagacggggucuugcucu

SEQ ID NO: 3 - RNA, 22 nt, Homo sapiens
ugagaacugaauuccauggguu

SEQ ID NO: 4 - RNA, 20 nt, Homo sapiens
guguguggaaaugcuucugc

SEQ ID NO: 5 - RNA, 22 nt, Homo sapiens
uagcagcacauaaugguuugug

SEQ ID NO: 6 - RNA, 22 nt, Homo sapiens
aauugcacgguauccaucugua

SEQ ID NO: 7 - RNA, 23 nt, Homo sapiens
caaagcgcuucucuuuagagugu

SEQ ID NO: 8 - RNA, 21 nt, Homo sapiens
cuccagagggaaguacuuucu

SEQ ID NO: 9 - RNA, 21 nt, Homo sapiens
cuccagagggaugcacuuucu

SEQ ID NO: 10 - RNA, 22 nt, Homo sapiens
aaacauucgcggugcacuucuu

SEQ ID NO: 11 - RNA, 21 nt, Homo sapiens
ucuuguguucucuagaucagu

SEQ ID NO: 12 - RNA, 19 nt, Homo sapiens
ugucucugcugggguuucu

SEQ ID NO: 13 - RNA, 22 nt, Homo sapiens
agucauuggaggguuugagcag

SEQ ID NO: 14 - RNA, 22 nt, Homo sapiens
ugagaccucuggguucugagcu

SEQ ID NO: 15 - RNA, 21 nt, Homo sapiens
ccuggaaacacugagguugug

SEQ ID NO: 16 - RNA, 21 nt, Homo sapiens
aguuaggauuaggucguggaa

SEQ ID NO: 17 - RNA, 24 nt, Homo sapiens
ucccugagacccuuuaaccuguga

SEQ ID NO: 18 - RNA, 22 nt, Homo sapiens
ucccugagacccuaacuuguga

SEQ ID NO: 19 - RNA, 23 nt, Homo sapiens
ccucagggcuguagaacagggcu

SEQ ID NO: 20 - RNA, 24 nt, Homo sapiens
uggcccugacugaagaccagcagu

SEQ ID NO: 21 - RNA, 22 nt, Homo sapiens
aaaucucugcaggcaaauguga

SEQ ID NO: 22 - RNA, 20 nt, Homo sapiens
ccucugggcccuuccuccag

SEQ ID NO: 23 - RNA, 22 nt, Homo sapiens
ucucugggccugugucuuaggc

SEQ ID NO: 24 - RNA, 22 nt, Homo sapiens
uuuaggauaagcuugacuuuug

SEQ ID NO: 25 - RNA, 23 nt, Homo sapiens
aaggagcuuacaaucuagcuggg

SEQ ID NO: 26 - RNA, 22 nt, Homo sapiens
acccgucccguucguccccgga

SEQ ID NO: 27 - RNA, 23 nt, Homo sapiens
cuggagauauggaagagcugugu

SEQ ID NO: 28 - RNA, 17 nt, Homo sapiens
gugggggagaggcuguc

SEQ ID NO: 29 - RNA, 24 nt, Homo sapiens
uggcccugacugaagaccagcagu

SEQ ID NO: 30 - RNA, 23 nt, Homo sapiens
ucuuggaguaggucauugggugg

SEQ ID NO: 31 - RNA, 24 nt, Homo sapiens
uucuccaaaagaaagcacuuucug

SEQ ID NO: 32 - RNA, 22 nt, Homo sapiens
aagugccuccuuuuagaguguu

SEQ ID NO: 33 - RNA, 21 nt, Homo sapiens
gcuaguccugacucagccagu

SEQ ID NO: 34 - RNA, 20 nt, Homo sapiens
auggagauagauauagaaau

SEQ ID NO: 35 - RNA, 21 nt, Homo sapiens
cccggagccaggaugcagcuc

SEQ ID NO: 36 - RNA, 22 nt, Homo sapiens
ugagccccugugccgcccccag

SEQ ID NO: 37 - RNA, 22 nt, Homo sapiens
ucggccugaccacccaccccac

SEQ ID NO: 38 - RNA, 24 nt, Homo sapiens
agccuggaagcuggagccugcagu

SEQ ID NO: 39 - RNA, 17 nt, Homo sapiens
ucgccuccuccucuccc

SEQ ID NO: 40 - RNA, 25 nt, Homo sapiens
ugggaacggguuccggcagacgcug

SEQ ID NO: 41 - RNA, 21 nt, Homo sapiens
cggcggggacggcgauugguc

SEQ ID NO: 42 - RNA, 21 nt, Homo sapiens
agggcccccccucaauccugu

SEQ ID NO: 43 - RNA, 21 nt, Homo sapiens
agggcccccccucaauccugu

SEQ ID NO: 44 - RNA, 22 nt, Homo sapiens
aggcggggcgccgcgggaccgc

SEQ ID NO: 45 - RNA, 22 nt, Homo sapiens
ugcggggcuagggcuaacagca

SEQ ID NO: 46 - RNA, 22 nt, Homo sapiens
uauggcacugguagaauucacu

SEQ ID NO: 47 - RNA, 23 nt, Homo sapiens
uaaggugcaucuagugcagauag

SEQ ID NO: 48 - RNA, 22 nt, Homo sapiens
ugauauguuugauauauuaggu

SEQ ID NO: 49 - RNA, 20 nt, Homo sapiens
gugcauugcuguugcauugc

SEQ ID NO: 50 - RNA, 21 nt, Homo sapiens
ucacuccucuccucccgucuu

SEQ ID NO: 51 - RNA, 22 nt, Homo sapiens
gagugccuucuuuuggagcguu

SEQ ID NO: 52 - RNA, 22 nt, Homo sapiens
aagugccuccuuuuagaguguu

SEQ ID NO: 53 - RNA, 21 nt, Homo sapiens
uggaggagaaggaaggugaug

SEQ ID NO: 54 - RNA, 22 nt, Homo sapiens
ucugcccccuccgcugcugcca

SEQ ID NO: 55 - RNA, 22 nt, Homo sapiens
aagcugccaguugaagaacugu

SEQ ID NO: 56 - RNA, 22 nt, Homo sapiens
aagcugccaguugaagaacugu

SEQ ID NO: 57 - RNA, 20 nt, Homo sapiens
acugccccaggugcugcugg

SEQ ID NO: 58 - RNA, 23 nt, Homo sapiens
cgcauccccuagggcauuggugu

SEQ ID NO: 59 - RNA, 23 nt, Homo sapiens
ugaggggcagagagcgagacuuu

SEQ ID NO: 60 - RNA, 21 nt, Homo sapiens
cggggcagcucaguacaggau

SEQ ID NO: 61 - RNA, 22 nt, Homo sapiens
aguggggaacccuuccaugagg

SEQ ID NO: 62 - RNA, 24 nt, Homo sapiens
uucuccaaaagaaagcacuuucug

SEQ ID NO: 63 - RNA, 23 nt, Homo sapiens
caaagcgcuucucuuuagagugu

SEQ ID NO: 64 - RNA, 22 nt, Homo sapiens
aagugccuccuuuuagaguguu

SEQ ID NO: 65 - RNA, 21 nt, Homo sapiens
cuccagagggaaguacuuucu

SEQ ID NO: 66 - RNA, 21 nt, Homo sapiens
cuccagagggaugcacuuucu

SEQ ID NO: 67 - RNA, 21 nt, Homo sapiens
agggggaaaguucuauagucc

SEQ ID NO: 68 - RNA, 22 nt, Homo sapiens
ugagccccugugccgcccccag

SEQ ID NO: 69 - RNA, 22 nt, Homo sapiens
uggagugugacaaugguguuug

SEQ ID NO: 70 - RNA, 24 nt, Homo sapiens
agccuggaagcuggagccugcagu

SEQ ID NO: 71 - RNA, 18 nt, Homo sapiens
cgggcguggugguggggg

SEQ ID NO: 72 - RNA, 21 nt, Homo sapiens
cggcggggacggcgauugguc

SEQ ID NO: 73 - RNA, 22 nt, Homo sapiens
ucaggccaggcacaguggcuca

SEQ ID NO: 74 - RNA, 22 nt, Homo sapiens
aacacaccugguuaaccucuuu

SEQ ID NO: 75 - RNA, 23 nt, Homo sapiens
ucccccaggugugauucugauuu

SEQ ID NO: 76 - RNA, 22 nt, Homo sapiens
aacacaccuauucaaggauuca

SEQ ID NO: 77 - RNA, 20 nt, Homo sapiens
guccgcucggcgguggccca

SEQ ID NO: 78 - RNA, 24 nt, Homo sapiens
acugggggcuuucgggcucugcgu

SEQ ID NO: 79 - RNA, 25 nt, Homo sapiens
ggcggagggaaguagguccguuggu

SEQ ID NO: 80 - RNA, 22 nt, Homo sapiens
aggcggggcgccgcgggaccgc

SEQ ID NO: 81 - RNA, 22 nt, Homo sapiens
ugcggggcuagggcuaacagca

SEQ ID NO: 82 - RNA, 21 nt, Homo sapiens
uggaggagaaggaaggugaug

SEQ ID NO: 83 - RNA, 22 nt, Homo sapiens
acuccagccccacagccucagc

SEQ ID NO: 84 - RNA, 22 nt, Homo sapiens
ugcaacgaaccugagccacuga

SEQ ID NO: 85 - RNA, 22 nt, Homo sapiens
uggagugugacaaugguguuug

SEQ ID NO: 86 - RNA, 21 nt, Homo sapiens
cggcggggacggcgauugguc

SEQ ID NO: 87 - RNA, 22 nt, Homo sapiens
uagguaguuucauguuguuggg

SEQ ID NO: 88 - RNA, 23 nt, Homo sapiens
cgcauccccuagggcauuggugu

SEQ ID NO: 89 - RNA, 21 nt, Homo sapiens
gaacggcuucauacaggaguu

SEQ ID NO: 90 - RNA, 22 nt, Homo sapiens
aauugcacuuuagcaaugguga

SEQ ID NO: 91 - RNA, 22 nt, Homo sapiens
aggcggggcgccgcgggaccgc

SEQ ID NO: 92 - RNA, 22 nt, Homo sapiens
ugcggggcuagggcuaacagca

SEQ ID NO: 93 - RNA, 22 nt, Homo sapiens
ugcggggcuagggcuaacagca

SEQ ID NO: 94 - RNA, 26 nt, Homo sapiens
gaugaugauggcagcaaauucugaaa

SEQ ID NO: 95 - RNA, 18 nt, Homo sapiens
uugagaaggaggcugcug

SEQ ID NO: 96 - RNA, 18 nt, Homo sapiens
cagggaggugaaugugau

SEQ ID NO: 97 - RNA, 23 nt, Homo sapiens
ucuggcuccgugucuucacuccc

SEQ ID NO: 98 - RNA, 22 nt, Homo sapiens
aacuguuugcagaggaaacuga

SEQ ID NO: 99 - RNA, 21 nt, Homo sapiens
cugaccuaugaauugacagcc

SEQ ID NO: 100 - RNA, 21 nt, Homo sapiens
uagcagcacagaaauauuggc

SEQ ID NO: 101 - RNA, 21 nt, Homo sapiens
augaccuaugaauugacagac

SEQ ID NO: 102 - RNA, 23 nt, Homo sapiens
ccuaguagguguccaguaagugu

SEQ ID NO: 103 - RNA, 23 nt, Homo sapiens
ucuuugguuaucuagcuguauga

SEQ ID NO: 104 - RNA, 23 nt, Homo sapiens
uuuggcacuagcacauuuuugcu

SEQ ID NO: 105 - RNA, 21 nt, Homo sapiens
uugcucacuguucuucccuag

SEQ ID NO: 106 - RNA, 23 nt, Homo sapiens
gagggucuugggagggaugugac

SEQ ID NO: 107 - RNA, 23 nt, Homo sapiens
ccugcagcgacuugauggcuucc

SEQ ID NO: 108 - RNA, 17 nt, Homo sapiens
ucccuguucgggcgcca

SEQ ID NO: 109 - RNA, 24 nt, Homo sapiens
uggcccugacugaagaccagcagu

SEQ ID NO: 110 - RNA, 24 nt, Homo sapiens
uggcccugacugaagaccagcagu

SEQ ID NO: 111 - RNA, 22 nt, Homo sapiens
ugcccuguggacucaguucugg

SEQ ID NO: 112 - RNA, 22 nt, Homo sapiens
uagcagcacauaaugguuugug

SEQ ID NO: 113 - RNA, 22 nt, Homo sapiens
uagcagcacaucaugguuuaca

SEQ ID NO: 114 - RNA, 22 nt, Homo sapiens
uagcagcacguaaauauuggcg

SEQ ID NO: 115 - RNA, 22 nt, Homo sapiens
uggagagaaaggcaguuccuga

SEQ ID NO: 116 - RNA, 21 nt, Homo sapiens
uagcagcacagaaauauuggc

SEQ ID NO: 117 - RNA, 23 nt, Homo sapiens
agcuacauugucugcuggguuuc

SEQ ID NO: 118 - RNA, 21 nt, Homo sapiens
uucacaguggcuaaguuccgc

SEQ ID NO: 119 - RNA, 22 nt, Homo sapiens
uguaaacauccuacacucagcu

SEQ ID NO: 120 - RNA, 23 nt, Homo sapiens
ucaagagcaauaacgaaaaaugu

SEQ ID NO: 121 - RNA, 22 nt, Homo sapiens
aauugcacuuuagcaaugguga

SEQ ID NO: 122 - RNA, 22 nt, Homo sapiens
uuauaauacaaccugauaagug

SEQ ID NO: 123 - RNA, 22 nt, Homo sapiens
cagcagcaauucauguuuugaa

SEQ ID NO: 124 - RNA, 22 nt, Homo sapiens
agaggcuggccgugaugaauuc

SEQ ID NO: 125 - RNA, 21 nt, Homo sapiens
cagcagcacacugugguuugu

SEQ ID NO: 126 - RNA, 22 nt, Homo sapiens
agacccuggucugcacucuauc

SEQ ID NO: 127 - RNA, 19 nt, Homo sapiens
gugucugcuuccuguggga

SEQ ID NO: 128 - RNA, 21 nt, Homo sapiens
guggcugcacucacuuccuuc

SEQ ID NO: 129 - RNA, 22 nt, Homo sapiens
uaugucugcugaccaucaccuu

SEQ ID NO: 130 - RNA, 23 nt, Homo sapiens
ucugcucauaccccaugguuucu

SEQ ID NO: 131 - RNA, 19 nt, Homo sapiens
gugaggacucgggaggugg

SEQ ID NO: 132 - RNA, 22 nt, Homo sapiens
uggagugugacaaugguguuug

SEQ ID NO: 133 - RNA, 22 nt, Homo sapiens
acaggugagguucuugggagcc

SEQ ID NO: 134 - RNA, 23 nt, Homo sapiens
cuggagauauggaagagcugugu

SEQ ID NO: 135 - RNA, 23 nt, Homo sapiens
cuggagauauggaagagcugugu

SEQ ID NO: 136 - RNA, 22 nt, Homo sapiens
ucugggcaacaaagugagaccu

SEQ ID NO: 137 - RNA, 21 nt, Homo sapiens
ugagaugaagcacuguagcuc

SEQ ID NO: 138 - RNA, 21 nt, Homo sapiens
ugagaugaagcacuguagcuc

SEQ ID NO: 139 - RNA, 23 nt, Homo sapiens
uaaggugcaucuagugcagauag

SEQ ID NO: 140 - RNA, 20 nt, Homo sapiens
ccccagggcgacgcggcggg

SEQ ID NO: 141 - RNA, 20 nt, Homo sapiens
ccuccugcccuccuugcugu

SEQ ID NO: 142 - RNA, 22 nt, Homo sapiens
acagcaggcacagacaggcagu

SEQ ID NO: 143 - RNA, 22 nt, Homo sapiens
acagcaggcacagacaggcagu

SEQ ID NO: 144 - RNA, 20 nt, Homo sapiens
gugcauugcuguugcauugc

SEQ ID NO: 145 - RNA, 22 nt, Homo sapiens
gccugcugggguggaaccuggu

SEQ ID NO: 146 - RNA, 22 nt, Homo sapiens
gccugcugggguggaaccuggu

SEQ ID NO: 147 - RNA, 22 nt, Homo sapiens
gagugccuucuuuuggagcguu

SEQ ID NO: 148 - RNA, 22 nt, Homo sapiens
aagugccuccuuuuagaguguu

SEQ ID NO: 149 - RNA, 23 nt, Homo sapiens
agugccugagggaguaagagccc

SEQ ID NO: 150 - RNA, 25 nt, Homo sapiens
gcugggcagggcuucugagcuccuu

SEQ ID NO: 151 - RNA, 20 nt, Homo sapiens
auggagauagauauagaaau

SEQ ID NO: 152 - RNA, 20 nt, Homo sapiens
auggagauagauauagaaau

SEQ ID NO: 153 - RNA, 22 nt, Homo sapiens
augcugacauauuuacuagagg

SEQ ID NO: 154 - RNA, 22 nt, Homo sapiens
cugcccuggcccgagggaccga

SEQ ID NO: 155 - RNA, 22 nt, Homo sapiens
ugugcgcagggagaccucuccc

SEQ ID NO: 156 - RNA, 20 nt, Homo sapiens
ugagcccuguccucccgcag

SEQ ID NO: 157 - RNA, 17 nt, Homo sapiens
gugggggagaggcuguc

SEQ ID NO: 158 - RNA, 22 nt, Homo sapiens
ugugacugguugaccagagggg

SEQ ID NO: 159 - RNA, 23 nt, Homo sapiens
ucuggcuccgugucuucacuccc

SEQ ID NO: 160 - RNA, 22 nt, Homo sapiens
uggagagaaaggcaguuccuga

SEQ ID NO: 161 - RNA, 22 nt, Homo sapiens
ucugcccccuccgcugcugcca

SEQ ID NO: 162 - RNA, 20 nt, Homo sapiens
ccccagggcgacgcggcggg

SEQ ID NO: 163 - RNA, 21 nt, Homo sapiens
uucaaguaauucaggauaggu

SEQ ID NO: 164 - RNA, 20 nt, Homo sapiens
acugccccaggugcugcugg

SEQ ID NO: 165 - RNA, 23 nt, Homo sapiens
ucccuguccuccaggagcucacg

SEQ ID NO: 166 - RNA, 23 nt, Homo sapiens
ucccccaggugugauucugauuu

SEQ ID NO: 167 - RNA, 23 nt, Homo sapiens
uagugcaauauugcuuauagggu

SEQ ID NO: 168 - RNA, 22 nt, Homo sapiens
uggugggcacagaaucuggacu

SEQ ID NO: 169 - RNA, 21 nt, Homo sapiens
uggguuuacguugggagaacu

SEQ ID NO: 170 - RNA, 24 nt, Homo sapiens
acugggggcuuucgggcucugcgu

SEQ ID NO: 171 - RNA, 22 nt, Homo sapiens
uggugggccgcagaacaugugc

SEQ ID NO: 172 - RNA, 24 nt, Homo sapiens
uggggagcugaggcucugggggug

SEQ ID NO: 173 - RNA, 21 nt, Homo sapiens
cauaaaguagaaagcacuacu

SEQ ID NO: 174 - RNA, 21 nt, Homo sapiens
caagucacuagugguuccguu

SEQ ID NO: 175 - RNA, 23 nt, Homo sapiens
uaagugcuuccauguuuugguga

SEQ ID NO: 176 - RNA, 21 nt, Homo sapiens
gugcauuguaguugcauugca

SEQ ID NO: 177 - RNA, 22 nt, Homo sapiens
aucaugaugggcuccucggugu

SEQ ID NO: 178 - RNA, 22 nt, Homo sapiens
aucaugaugggcuccucggugu

SEQ ID NO: 179 - RNA, 22 nt, Homo sapiens
gaaagcgcuucccuuugcugga

SEQ ID NO: 180 - RNA, 22 nt, Homo sapiens
caaagcgcuccccuuuagaggu

SEQ ID NO: 181 - RNA, 23 nt, Homo sapiens
caaagcgcuucucuuuagagugu

SEQ ID NO: 182 - RNA, 21 nt, Homo sapiens
caaagcgcuucccuuuggagc

SEQ ID NO: 183 - RNA, 21 nt, Homo sapiens
aaagcgcuucccuucagagug

SEQ ID NO: 184 - RNA, 21 nt, Homo sapiens
aaagcgcuucccuucagagug

SEQ ID NO: 185 - RNA, 21 nt, Homo sapiens
gaaagcgcuucucuuuagagg

SEQ ID NO: 186 - RNA, 20 nt, Homo sapiens
cuacaaagggaagcccuuuc

SEQ ID NO: 187 - RNA, 22 nt, Homo sapiens
aaaaugguucccuuuagagugu

SEQ ID NO: 188 - RNA, 22 nt, Homo sapiens
cuacaaagggaagcacuuucuc

SEQ ID NO: 189 - RNA, 22 nt, Homo sapiens
aaaaguacuugcggauuuugcu

SEQ ID NO: 190 - RNA, 22 nt, Homo sapiens
aaaaguauuugcggguuuuguc

SEQ ID NO: 191 - RNA, 22 nt, Homo sapiens
caaaaguaauuguggauuuugu

SEQ ID NO: 192 - RNA, 21 nt, Homo sapiens
aguuaaugaauccuggaaagu

SEQ ID NO: 193 - RNA, 21 nt, Homo sapiens
uagauaaaauauugguaccug

SEQ ID NO: 194 - RNA, 21 nt, Homo sapiens
uagauaaaauauugguaccug

SEQ ID NO: 195 - RNA, 21 nt, Homo sapiens
guucaaauccagaucuauaac

SEQ ID NO: 196 - RNA, 18 nt, Homo sapiens
ucagcuggcccucauuuc

SEQ ID NO: 197 - RNA, 19 nt, Homo sapiens
gugaggacucgggaggugg

SEQ ID NO: 198 - RNA, 22 nt, Homo sapiens
uaacagucuacagccauggucg

SEQ ID NO: 199 - RNA, 23 nt, Homo sapiens
ucuggcuccgugucuucacuccc

SEQ ID NO: 200 - RNA, 22 nt, Homo sapiens
caaagaauucuccuuuugggcu

SEQ ID NO: 201 - RNA, 21 nt, Homo sapiens
uaacagucuccagucacggcc

SEQ ID NO: 202 - RNA, 22 nt, Homo sapiens
aauugcacgguauccaucugua

SEQ ID NO: 203 - RNA, 23 nt, Homo sapiens
aucaacagacauuaauugggcgc

SEQ ID NO: 204 - RNA, 22 nt, Homo sapiens
cgucaacacuugcugguuuccu

SEQ ID NO: 205 - RNA, 22 nt, Homo sapiens
cgucaacacuugcugguuuccu

SEQ ID NO: 206 - RNA, 21 nt, Homo sapiens
uagauaaaauauugguaccug

SEQ ID NO: 207 - RNA, 23 nt, Homo sapiens
ucuuugguuaucuagcuguauga

SEQ ID NO: 208 - RNA, 22 nt, Homo sapiens
ugagaacugaauuccauggguu

SEQ ID NO: 209 - RNA, 22 nt, Homo sapiens
uagcagcacauaaugguuugug

SEQ ID NO: 210 - RNA, 22 nt, Homo sapiens
uagcagcacaucaugguuuaca

SEQ ID NO: 211 - RNA, 22 nt, Homo sapiens
uagcagcacguaaauauuggcg

SEQ ID NO: 212 - RNA, 21 nt, Homo sapiens
uagcagcacagaaauauuggc

SEQ ID NO: 213 - RNA, 23 nt, Homo sapiens
cuguaauauaaauuuaauuuauu

SEQ ID NO: 214 - RNA, 22 nt, Homo sapiens
caaucacuaacuccacugccau

SEQ ID NO: 215 - RNA, 22 nt, Homo sapiens
aaucacuaaccacacggccagg

SEQ ID NO: 216 - RNA, 22 nt, Homo sapiens
cagcagcaauucauguuuugaa

SEQ ID NO: 217 - RNA, 21 nt, Homo sapiens
cagcagcacacugugguuugu

SEQ ID NO: 218 - RNA, 21 nt, Homo sapiens
ugaguuggccaucugagugag

SEQ ID NO: 219 - RNA, 23 nt, Homo sapiens
uauucauuuauccccagccuaca

SEQ ID NO: 220 - RNA, 22 nt, Homo sapiens
ugcaacuuaccugagucauuga

SEQ ID NO: 221 - RNA, 22 nt, Homo sapiens
aacccguagauccgaucuugug

SEQ ID NO: 222 - RNA, 22 nt, Homo sapiens
cacccguagaaccgaccuugcg

SEQ ID NO: 223 - RNA, 22 nt, Homo sapiens
aacccguagauccgaacuugug

SEQ ID NO: 224 - RNA, 20 nt, Homo sapiens
uacaguauagaugauguacu

SEQ ID NO: 225 - RNA, 22 nt, Homo sapiens
aucgugcauccuuuuagagugu

SEQ ID NO: 226 - RNA, 21 nt, Homo sapiens
cggcggggacggcgauugguc

SEQ ID NO: 227 - RNA, 22 nt, Homo sapiens
uaauacugccugguaaugauga

SEQ ID NO: 228 - RNA, 23 nt, Homo sapiens
uaauacugccggguaaugaugga

SEQ ID NO: 229 - RNA, 22 nt, Homo sapiens
uuggggaaacggccgcugagug

SEQ ID NO: 230 - RNA, 22 nt, Homo sapiens
uaauacugucugguaaaaccgu

SEQ ID NO: 231 - RNA, 18 nt, Homo sapiens
ugcuuccuuucagagggu

SEQ ID NO: 232 - RNA, 22 nt, Homo sapiens
aucuggagguaagaagcacuuu

SEQ ID NO: 233 - RNA, 21 nt, Homo sapiens
guggcugcacucacuuccuuc

SEQ ID NO: 234 - RNA, 22 nt, Homo sapiens
aggcggggcgccgcgggaccgc

SEQ ID NO: 235 - RNA, 23 nt, Homo sapiens
aggaagcccuggaggggcuggag

SEQ ID NO: 236 - RNA, 21 nt, Homo sapiens
ucguggccuggucuccauuau

SEQ ID NO: 237 - RNA, 22 nt, Homo sapiens
uggguggucuggagauuugugc

SEQ ID NO: 238 - RNA, 21 nt, Homo sapiens
ccaccaccgugucugacacuu

SEQ ID NO: 239 - RNA, 22 nt, Homo sapiens
ggagaaauuauccuuggugugu

SEQ ID NO: 240 - RNA, 22 nt, Homo sapiens
uggugggcacagaaucuggacu

SEQ ID NO: 241 - RNA, 21 nt, Homo sapiens
uuggccacaauggguuagaac

SEQ ID NO: 242 - RNA, 22 nt, Homo sapiens
agacuucccauuugaagguggc

SEQ ID NO: 243 - RNA, 19 nt, Homo sapiens
aguguggcuuucuuagagc

SEQ ID NO: 244 - RNA, 22 nt, Homo sapiens
uggugggccgcagaacaugugc

SEQ ID NO: 245 - RNA, 24 nt, Homo sapiens
ugccugggucucuggccugcgcgu

SEQ ID NO: 246 - RNA, 21 nt, Homo sapiens
uugcucacuguucuucccuag

SEQ ID NO: 247 - RNA, 18 nt, Homo sapiens
gcaugggugguucagugg

SEQ ID NO: 248 - RNA, 22 nt, Homo sapiens
aauugcacgguauccaucugua

SEQ ID NO: 249 - RNA, 23 nt, Homo sapiens
uaauccuugcuaccugggugaga

SEQ ID NO: 250 - RNA, 22 nt, Homo sapiens
aaugcacccgggcaaggauucu

SEQ ID NO: 251 - RNA, 22 nt, Homo sapiens
aaugcaccugggcaaggauuca

SEQ ID NO: 252 - RNA, 23 nt, Homo sapiens
ugcaccaugguugucugagcaug

SEQ ID NO: 253 - RNA, 22 nt, Homo sapiens
uggagagaaaggcaguuccuga

SEQ ID NO: 254 - RNA, 22 nt, Homo sapiens
uucuggaauucugugugaggga

SEQ ID NO: 255 - RNA, 22 nt, Homo sapiens
uacccagagcaugcagugugaa

SEQ ID NO: 256 - RNA, 22 nt, Homo sapiens
acaguagucugcacauugguua

SEQ ID NO: 257 - RNA, 22 nt, Homo sapiens
acaguagucugcacauugguua

SEQ ID NO: 258 - RNA, 21 nt, Homo sapiens
agcuacaucuggcuacugggu

SEQ ID NO: 259 - RNA, 22 nt, Homo sapiens
uguaaacauccucgacuggaag

SEQ ID NO: 260 - RNA, 22 nt, Homo sapiens
uguaaacauccccgacuggaag

SEQ ID NO: 261 - RNA, 22 nt, Homo sapiens
uguaaacauccuugacuggaag

SEQ ID NO: 262 - RNA, 20 nt, Homo sapiens
ccucugggcccuuccuccag

SEQ ID NO: 263 - RNA, 22 nt, Homo sapiens
ucucugggccugugucuuaggc

SEQ ID NO: 264 - RNA, 22 nt, Homo sapiens
uuuugcaauauguuccugaaua

SEQ ID NO: 265 - RNA, 22 nt, Homo sapiens
uuuugcaauauguuccugaaua

SEQ ID NO: 266 - RNA, 22 nt, Homo sapiens
ugauugguacgucuguggguag

SEQ ID NO: 267 - RNA, 20 nt, Homo sapiens
cugcaaagggaagcccuuuc

SEQ ID NO: 268 - RNA, 23 nt, Homo sapiens
caaagcgcuucucuuuagagugu

SEQ ID NO: 269 - RNA, 20 nt, Homo sapiens
cugcaaagggaagcccuuuc

SEQ ID NO: 270 - RNA, 23 nt, Homo sapiens
uucauuugguauaaaccgcgauu

SEQ ID NO: 271 - RNA, 20 nt, Homo sapiens
aggguguuucucucaucucu

SEQ ID NO: 272 - RNA, 21 nt, Homo sapiens
cggcggggacggcgauugguc

SEQ ID NO: 273 - RNA, 22 nt, Homo sapiens
cauugcacuugucucggucuga

SEQ ID NO: 274 - RNA, 25 nt, Homo sapiens
ggcggagggaaguagguccguuggu

SEQ ID NO: 275 - RNA, 22 nt, Homo sapiens
aggcggggcgccgcgggaccgc

SEQ ID NO: 276 - RNA, 22 nt, Homo sapiens
ugcggggcuagggcuaacagca

SEQ ID NO: 277 - RNA, 22 nt, Homo sapiens
ucggccugaccacccaccccac

SEQ ID NO: 278 - RNA, 21 nt, Homo sapiens
gcccuccgcccgugcaccccg

SEQ ID NO: 279 - RNA, 23 nt, Homo sapiens
cggcccgggcugcugcuguuccu

SEQ ID NO: 280 - RNA, 22 nt, Homo sapiens
uggagagaaaggcaguuccuga

SEQ ID NO: 281 - RNA, 22 nt, Homo sapiens
uuggggaaacggccgcugagug

SEQ ID NO: 282 - RNA, 21 nt, Homo sapiens
agggcccccccucaauccugu

SEQ ID NO: 283 - RNA, 23 nt, Homo sapiens
ucccccaggugugauucugauuu

SEQ ID NO: 284 - RNA, 22 nt, Homo sapiens
aauugcacgguauccaucugua

SEQ ID NO: 285 - RNA, 23 nt, Homo sapiens
ugaggggcagagagcgagacuuu

SEQ ID NO: 286 - RNA, 22 nt, Homo sapiens
aguggggaacccuuccaugagg

SEQ ID NO: 287 - RNA, 19 nt, Homo sapiens
aggcugcggaauucaggac

SEQ ID NO: 288 - RNA, 24 nt, Homo sapiens
acugggggcuuucgggcucugcgu

SEQ ID NO: 289 - RNA, 24 nt, Homo sapiens
ugccugggucucuggccugcgcgu

SEQ ID NO: 290 - RNA, 21 nt, Homo sapiens
uggaggagaaggaaggugaug

SEQ ID NO: 291 - RNA, 21 nt, Homo sapiens
cgcgggugcuuacugacccuu

SEQ ID NO: 292 - RNA, 20 nt, Homo sapiens
ggggagcuguggaagcagua

SEQ ID NO: 293 - RNA, 22 nt, Homo sapiens
ucugggcaacaaagugagaccu

SEQ ID NO: 294 - RNA, 18 nt, Homo sapiens
gcaugggugguucagugg

SEQ ID NO: 295 - RNA, 22 nt, Homo sapiens
cauugcacuugucucggucuga

SEQ ID NO: 296 - RNA, 22 nt, Homo sapiens
uguaaacauccuacacucagcu

SEQ ID NO: 297 - RNA, 23 nt, Homo sapiens
ugaggggcagagagcgagacuuu

SEQ ID NO: 298 - RNA, 25 nt, Homo sapiens
gcugggcagggcuucugagcuccuu

SEQ ID NO: 299 - RNA, 25 nt, Homo sapiens
ggcggagggaaguagguccguuggu

SEQ ID NO: 300 - RNA, 21 nt, Homo sapiens
uggaggagaaggaaggugaug

SEQ ID NO: 301 - RNA, 23 nt, Homo sapiens
gagggucuugggagggaugugac

SEQ ID NO: 302 - RNA, 22 nt, Homo sapiens
uggagugugacaaugguguuug

SEQ ID NO: 303 - RNA, 22 nt, Homo sapiens
ccucuuccccuugucucuccag

SEQ ID NO: 304 - RNA, 22 nt, Homo sapiens
ucugggcaacaaagugagaccu

SEQ ID NO: 305 - RNA, 22 nt, Homo sapiens
uggagagaaaggcaguuccuga

SEQ ID NO: 306 - RNA, 22 nt, Homo sapiens
cgcaggggccgggugcucaccg

SEQ ID NO: 307 - RNA, 22 nt, Homo sapiens
ugggucuuugcgggcgagauga

SEQ ID NO: 308 - RNA, 22 nt, Homo sapiens
acagcaggcacagacaggcagu

SEQ ID NO: 309 - RNA, 22 nt, Homo sapiens
aaaucucugcaggcaaauguga

SEQ ID NO: 310 - RNA, 20 nt, Homo sapiens
ccucugggcccuuccuccag

SEQ ID NO: 311 - RNA, 22 nt, Homo sapiens
ucucugggccugugucuuaggc

SEQ ID NO: 312 - RNA, 22 nt, Homo sapiens
gccugcugggguggaaccuggu

SEQ ID NO: 313 - RNA, 22 nt, Homo sapiens
agacccuggucugcacucuauc

SEQ ID NO: 314 - RNA, 20 nt, Homo sapiens
uaaggcacgcggugaaugcc

SEQ ID NO: 315 - RNA, 25 nt, Homo sapiens
gcugggcagggcuucugagcuccuu

SEQ ID NO: 316 - RNA, 23 nt, Homo sapiens
uggaagacuagugauuuuguugu

SEQ ID NO: 317 - RNA, 21 nt, Homo sapiens
uggcagggaggcugggagggg

SEQ ID NO: 318 - RNA, 18 nt, Homo sapiens
cagggaggugaaugugau

SEQ ID NO: 319 - RNA, 20 nt, Homo sapiens
uacaguauagaugauguacu

SEQ ID NO: 320 - RNA, 23 nt, Homo sapiens
cggcccgggcugcugcuguuccu

SEQ ID NO: 321 - RNA, 23 nt, Homo sapiens
cggcccgggcugcugcuguuccu

SEQ ID NO: 322 - RNA, 22 nt, Homo sapiens
ucugcccccuccgcugcugcca

SEQ ID NO: 323 - RNA, 22 nt, Homo sapiens
aagcugccaguugaagaacugu

SEQ ID NO: 324 - RNA, 21 nt, Homo sapiens
aucacauugccagggauuucc

SEQ ID NO: 325 - RNA, 21 nt, Homo sapiens
aucacauugccagggauuacc

SEQ ID NO: 326 - RNA, 21 nt, Homo sapiens
agggcccccccucaauccugu

SEQ ID NO: 327 - RNA, 20 nt, Homo sapiens
acugccccaggugcugcugg

SEQ ID NO: 328 - RNA, 23 nt, Homo sapiens
ugaggggcagagagcgagacuuu

SEQ ID NO: 329 - RNA, 21 nt, Homo sapiens
cggggcagcucaguacaggau

SEQ ID NO: 330 - RNA, 19 nt, Homo sapiens
ugagcugcuguaccaaaau

SEQ ID NO: 331 - RNA, 19 nt, Homo sapiens
aggcacggugucagcaggc

SEQ ID NO: 332 - RNA, 24 nt, Homo sapiens
uggggagcugaggcucugggggug

SEQ ID NO: 333 - RNA, 23 nt, Homo sapiens
ccugcagcgacuugauggcuucc

SEQ ID NO: 334 - RNA, 22 nt, Homo sapiens
acaggugagguucuugggagcc

SEQ ID NO: 335 - RNA, 22 nt, Homo sapiens
ugcccuguggacucaguucugg

SEQ ID NO: 336 - RNA, 22 nt, Homo sapiens
uggagagaaaggcaguuccuga

SEQ ID NO: 337 - RNA, 22 nt, Homo sapiens
cccugugcccggcccacuucug

SEQ ID NO: 338 - RNA, 20 nt, Homo sapiens
ccuccugcccuccuugcugu

SEQ ID NO: 339 - RNA, 22 nt, Homo sapiens
aaggagcucacagucuauugag

SEQ ID NO: 340 - RNA, 23 nt, Homo sapiens
gcaaagcacacggccugcagaga

SEQ ID NO: 341 - RNA, 21 nt, Homo sapiens
aacaggugacugguuagacaa

SEQ ID NO: 342 - RNA, 23 nt, Homo sapiens
aaggagcuuacaaucuagcuggg

SEQ ID NO: 343 - RNA, 22 nt, Homo sapiens
cugcccuggcccgagggaccga

SEQ ID NO: 344 - RNA, 22 nt, Homo sapiens
ugagguaguagguuguaugguu

SEQ ID NO: 345 - RNA, 20 nt, Homo sapiens
uaaggcacgcggugaaugcc

SEQ ID NO: 346 - RNA, 17 nt, Homo sapiens
ucauauugcuucuuucu

SEQ ID NO: 347 - RNA, 21 nt, Homo sapiens
ucacagugaaccggucucuuu

SEQ ID NO: 348 - RNA, 22 nt, Homo sapiens
ucgugucuuguguugcagccgg

SEQ ID NO: 349 - RNA, 23 nt, Homo sapiens
uaaggugcaucuagugcagauag

SEQ ID NO: 350 - RNA, 22 nt, Homo sapiens
uucccuuugucauccuaugccu

SEQ ID NO: 351 - RNA, 22 nt, Homo sapiens
uucccuuugucauccuucgccu

SEQ ID NO: 352 - RNA, 22 nt, Homo sapiens
aacaauauccuggugcugagug

SEQ ID NO: 353 - RNA, 21 nt, Homo sapiens
uaaggcacccuucugaguaga

SEQ ID NO: 354 - RNA, 23 nt, Homo sapiens
uauucauuuauccccagccuaca

SEQ ID NO: 355 - RNA, 20 nt, Homo sapiens
accaggaggcugaggccccu

SEQ ID NO: 356 - RNA, 23 nt, Homo sapiens
ucaaaugcucagacuccuguggu

SEQ ID NO: 357 - RNA, 21 nt, Homo sapiens
ucacagugaaccggucucuuu

SEQ ID NO: 358 - RNA, 22 nt, Homo sapiens
ucagugcacuacagaacuuugu

SEQ ID NO: 359 - RNA, 22 nt, Homo sapiens
ucagugcaucacagaacuuugu

SEQ ID NO: 360 - RNA, 21 nt, Homo sapiens
ucagugcaugacagaacuugg

SEQ ID NO: 361 - RNA, 22 nt, Homo sapiens
uagcaccaucugaaaucgguua

SEQ ID NO: 362 - RNA, 23 nt, Homo sapiens
uagcaccauuugaaaucaguguu

SEQ ID NO: 363 - RNA, 22 nt, Homo sapiens
uagcaccauuugaaaucgguua

SEQ ID NO: 364 - RNA, 22 nt, Homo sapiens
cuuaugcaagauucccuucuac

SEQ ID NO: 365 - RNA, 22 nt, Homo sapiens
ugaaggucuacugugugccagg

SEQ ID NO: 366 - RNA, 22 nt, Homo sapiens
ucagcaaacauuuauugugugc

SEQ ID NO: 367 - RNA, 21 nt, Homo sapiens
aaaacggugagauuuuguuuu

SEQ ID NO: 368 - RNA, 22 nt, Homo sapiens
agucauuggaggguuugagcag

SEQ ID NO: 369 - RNA, 23 nt, Homo sapiens
ugcaccaugguugucugagcaug

SEQ ID NO: 370 - RNA, 23 nt, Homo sapiens
caguaacaaagauucauccuugu

SEQ ID NO: 371 - RNA, 23 nt, Homo sapiens
uacccuguagauccgaauuugug

SEQ ID NO: 372 - RNA, 23 nt, Homo sapiens
uacccuguagaaccgaauuugug

SEQ ID NO: 373 - RNA, 23 nt, Homo sapiens
cuggagauauggaagagcugugu

SEQ ID NO: 374 - RNA, 22 nt, Homo sapiens
cagugcaauguuaaaagggcau

SEQ ID NO: 375 - RNA, 22 nt, Homo sapiens
uagguuauccguguugccuucg

SEQ ID NO: 376 - RNA, 22 nt, Homo sapiens
caaagaauucuccuuuugggcu

SEQ ID NO: 377 - RNA, 22 nt, Homo sapiens
uaaucucagcuggcaacuguga

SEQ ID NO: 378 - RNA, 21 nt, Homo sapiens
aucacauugccagggauuucc

SEQ ID NO: 379 - RNA, 21 nt, Homo sapiens
aucacauugccagggauuacc

SEQ ID NO: 380 - RNA, 23 nt, Homo sapiens
ucccuguccuccaggagcucacg

SEQ ID NO: 381 - RNA, 22 nt, Homo sapiens
aaucauacagggacauccaguu

SEQ ID NO: 382 - RNA, 23 nt, Homo sapiens
uucauuugguauaaaccgcgauu

SEQ ID NO: 383 - RNA, 20 nt, Homo sapiens
auggagauagauauagaaau

SEQ ID NO: 384 - RNA, 20 nt, Homo sapiens
agaccauggguucucauugu

SEQ ID NO: 385 - RNA, 22 nt, Homo sapiens
uggagugugacaaugguguuug

SEQ ID NO: 386 - RNA, 22 nt, Homo sapiens
acucggcguggcgucggucgug

SEQ ID NO: 387 - RNA, 21 nt, Homo sapiens
uccugcgcgucccagaugccc

SEQ ID NO: 388 - RNA, 24 nt, Homo sapiens
uuuggcaaugguagaacucacacu

SEQ ID NO: 389 - RNA, 23 nt, Homo sapiens
ugaguaccgccaugucuguuggg

SEQ ID NO: 390 - RNA, 22 nt, Homo sapiens
uagguaguuuccuguuguuggg

SEQ ID NO: 391 - RNA, 22 nt, Homo sapiens
ucaggcucaguccccucccgau

SEQ ID NO: 392 - RNA, 23 nt, Homo sapiens
uagcagcgggaacaguucugcag

SEQ ID NO: 393 - RNA, 23 nt, Homo sapiens
gaacgccuguucuugccaggugg

SEQ ID NO: 394 - RNA, 22 nt, Homo sapiens
uccgagccugggucucccucuu

SEQ ID NO: 395 - RNA, 21 nt, Homo sapiens
gcaggaacuugugagucuccu

SEQ ID NO: 396 - RNA, 21 nt, Homo sapiens
ugcaggaccaagaugagcccu

SEQ ID NO: 397 - RNA, 22 nt, Homo sapiens
uggagagaaaggcaguuccuga

SEQ ID NO: 398 - RNA, 21 nt, Homo sapiens
cggcggggacggcgauugguc

SEQ ID NO: 399 - RNA, 23 nt, Homo sapiens
ugaguaccgccaugucuguuggg

SEQ ID NO: 400 - RNA, 23 nt, Homo sapiens
agugccugagggaguaagagccc

SEQ ID NO: 401 - RNA, 19 nt, Homo sapiens
aggcacggugucagcaggc

SEQ ID NO: 402 - RNA, 19 nt, Homo sapiens
aggcugcggaauucaggac

SEQ ID NO: 403 - RNA, 19 nt, Homo sapiens
aggcugcggaauucaggac

SEQ ID NO: 404 - RNA, 22 nt, Homo sapiens
aggcggggcgccgcgggaccgc

SEQ ID NO: 405 - RNA, 22 nt, Homo sapiens
ugcggggcuagggcuaacagca

SEQ ID NO: 406 - RNA, 21 nt, Homo sapiens
gugccagcugcagugggggag

SEQ ID NO: 407 - RNA, 18 nt, Homo sapiens
ucagcuggcccucauuuc

SEQ ID NO: 408 - RNA, 21 nt, Homo sapiens
cggcggggacggcgauugguc

SEQ ID NO: 409 - RNA, 22 nt, Homo sapiens
aagcugccaguugaagaacugu

SEQ ID NO: 410 - RNA, 23 nt, Homo sapiens
ugaggggcagagagcgagacuuu

SEQ ID NO: 411 - RNA, 25 nt, Homo sapiens
aggggugguguugggacagcuccgu

SEQ ID NO: 412 - RNA, 22 nt, Homo sapiens
aggcggggcgccgcgggaccgc

SEQ ID NO: 413 - RNA, 17 nt, Homo sapiens
ucucgcuggggccucca

SEQ ID NO: 414 - RNA, 20 nt, Homo sapiens
ggggagcuguggaagcagua

SEQ ID NO: 415 - RNA, 21 nt, Homo sapiens
ugcaggaccaagaugagcccu

SEQ ID NO: 416 - RNA, 22 nt, Homo sapiens
ugugagguuggcauuguugucu

SEQ ID NO: 417 - RNA, 22 nt, Homo sapiens
ugcccuguggacucaguucugg

SEQ ID NO: 418 - RNA, 18 nt, Homo sapiens
ugaggcaguagauugaau

SEQ ID NO: 419 - RNA, 23 nt, Homo sapiens
uaaggugcaucuagugcagauag

SEQ ID NO: 420 - RNA, 21 nt, Homo sapiens
ugacaacuauggaugagcucu

SEQ ID NO: 421 - RNA, 22 nt, Homo sapiens
aagcugccaguugaagaacugu

SEQ ID NO: 422 - RNA, 22 nt, Homo sapiens
acacagggcuguugugaagacu

SEQ ID NO: 423 - RNA, 23 nt, Homo sapiens
agcuacauugucugcuggguuuc

SEQ ID NO: 424 - RNA, 21 nt, Homo sapiens
agcuacaucuggcuacugggu

SEQ ID NO: 425 - RNA, 21 nt, Homo sapiens
caagucacuagugguuccguu

SEQ ID NO: 426 - RNA, 22 nt, Homo sapiens
aaggagcucacagucuauugag

SEQ ID NO: 427 - RNA, 23 nt, Homo sapiens
ucuuggaguaggucauugggugg

SEQ ID NO: 428 - RNA, 22 nt, Homo sapiens
ugauugguacgucuguggguag

SEQ ID NO: 429 - RNA, 19 nt, Homo sapiens
ugagcugcuguaccaaaau

SEQ ID NO: 430 - RNA, 21 nt, Homo sapiens
aagccugcccggcuccucggg

SEQ ID NO: 431 - RNA, 23 nt, Homo sapiens
aaggagcuuacaaucuagcuggg

SEQ ID NO: 432 - RNA, 22 nt, Homo sapiens
cugcccuggcccgagggaccga

SEQ ID NO: 433 - RNA, 21 nt, Homo sapiens
uggcagggaggcugggagggg

SEQ ID NO: 434 - RNA, 18 nt, Homo sapiens
ugaggcaguagauugaau

SEQ ID NO: 435 - RNA, 21 nt, Homo sapiens
cggcggggacggcgauugguc

SEQ ID NO: 436 - RNA, 22 nt, Homo sapiens
cgcaggggccgggugcucaccg

SEQ ID NO: 437 - RNA, 21 nt, Homo sapiens
agggcccccccucaauccugu

SEQ ID NO: 438 - RNA, 20 nt, Homo sapiens
ccucugggcccuuccuccag

SEQ ID NO: 439 - RNA, 22 nt, Homo sapiens
ucucugggccugugucuuaggc

SEQ ID NO: 440 - RNA, 20 nt, Homo sapiens
gugcauugcuguugcauugc

SEQ ID NO: 441 - RNA, 23 nt, Homo sapiens
aaugacacgaucacucccguuga

SEQ ID NO: 442 - RNA, 21 nt, Homo sapiens
cggggcagcucaguacaggau

SEQ ID NO: 443 - RNA, 22 nt, Homo sapiens
aagugcugucauagcugagguc

SEQ ID NO: 444 - RNA, 23 nt, Homo sapiens
cacucagccuugagggcacuuuc

SEQ ID NO: 445 - RNA, 22 nt, Homo sapiens
gagugccuucuuuuggagcguu

SEQ ID NO: 446 - RNA, 22 nt, Homo sapiens
aagugccuccuuuuagaguguu

SEQ ID NO: 447 - RNA, 23 nt, Homo sapiens
ucggggaucaucaugucacgaga

SEQ ID NO: 448 - RNA, 23 nt, Homo sapiens
agugccugagggaguaagagccc

SEQ ID NO: 449 - RNA, 22 nt, Homo sapiens
uccgagccugggucucccucuu

SEQ ID NO: 450 - RNA, 21 nt, Homo sapiens
aggaggcagcgcucucaggac

SEQ ID NO: 451 - RNA, 24 nt, Homo sapiens
ugccugggucucuggccugcgcgu

SEQ ID NO: 452 - RNA, 22 nt, Homo sapiens
aggcggggcgccgcgggaccgc

SEQ ID NO: 453 - RNA, 22 nt, Homo sapiens
ugcggggcuagggcuaacagca

SEQ ID NO: 454 - RNA, 21 nt, Homo sapiens
uggaggagaaggaaggugaug

SEQ ID NO: 455 - RNA, 21 nt, Homo sapiens
aaggcagggcccccgcucccc

SEQ ID NO: 456 - RNA, 22 nt, Homo sapiens
uaguacugugcauaucaucuau

SEQ ID NO: 457 - RNA, 22 nt, Homo sapiens
uaacagucuacagccauggucg

SEQ ID NO: 458 - RNA, 23 nt, Homo sapiens
cggcccgggcugcugcuguuccu

SEQ ID NO: 459 - RNA, 23 nt, Homo sapiens
uaaggugcaucuagugcagauag

SEQ ID NO: 460 - RNA, 23 nt, Homo sapiens
uaaggugcaucuagugcaguuag

SEQ ID NO: 461 - RNA, 23 nt, Homo sapiens
caacggaaucccaaaagcagcug

SEQ ID NO: 462 - RNA, 22 nt, Homo sapiens
uagguaguuucauguuguuggg

SEQ ID NO: 463 - RNA, 21 nt, Homo sapiens
uaacagucuccagucacggcc

SEQ ID NO: 464 - RNA, 22 nt, Homo sapiens
aauugcacuuuagcaaugguga

SEQ ID NO: 465 - RNA, 22 nt, Homo sapiens
uugcauauguaggaugucccau

SEQ ID NO: 466 - RNA, 20 nt, Homo sapiens
cuacaaagggaagcccuuuc

SEQ ID NO: 467 - RNA, 22 nt, Homo sapiens
cuacaaagggaagcacuuucuc

SEQ ID NO: 468 - RNA, 22 nt, Homo sapiens
gaugagcucauuguaauaugag

SEQ ID NO: 469 - RNA, 22 nt, Homo sapiens
uaugcauuguauuuuuaggucc

SEQ ID NO: 470 - RNA, 22 nt, Homo sapiens
ugcggggcuagggcuaacagca

SEQ ID NO: 471 - RNA, 22 nt, Homo sapiens
acuccagccccacagccucagc

SEQ ID NO: 472 - RNA, 23 nt, Homo sapiens
uccaguaccacgugucagggcca

SEQ ID NO: 473 - RNA, 22 nt, Homo sapiens
cugcccuggcccgagggaccga

SEQ ID NO: 474 - RNA, 22 nt, Homo sapiens
acaggugagguucuugggagcc

SEQ ID NO: 475 - RNA, 24 nt, Homo sapiens
uugcagcugccugggagugacuuc

SEQ ID NO: 476 - RNA, 23 nt, Homo sapiens
uaaagugcuuauagugcagguag

SEQ ID NO: 477 - RNA, 22 nt, Homo sapiens
uaaucucagcuggcaacuguga

SEQ ID NO: 478 - RNA, 22 nt, Homo sapiens
aaaagcuggguugagagggcga

SEQ ID NO: 479 - RNA, 22 nt, Homo sapiens
aaaagcuggguugagagggcaa

SEQ ID NO: 480 - RNA, 20 nt, Homo sapiens
aaaagcuggguugagagggu

SEQ ID NO: 481 - RNA, 19 nt, Homo sapiens
aaaagcuggguugagagga

SEQ ID NO: 482 - RNA, 21 nt, Homo sapiens
aacaggugacugguuagacaa

SEQ ID NO: 483 - RNA, 22 nt, Homo sapiens
cgaaaacagcaauuaccuuugc

SEQ ID NO: 484 - RNA, 21 nt, Homo sapiens
gaagugugccguggugugucu

SEQ ID NO: 485 - RNA, 21 nt, Homo sapiens
uggcagggaggcugggagggg

SEQ ID NO: 486 - RNA, 23 nt, Homo sapiens
cucucaccacugcccucccacag

SEQ ID NO: 487 - RNA, 21 nt, Homo sapiens
gcccuccgcccgugcaccccg

SEQ ID NO: 488 - RNA, 23 nt, Homo sapiens
ucuggcuccgugucuucacuccc

SEQ ID NO: 489 - RNA, 22 nt, Homo sapiens
uagcagcacauaaugguuugug

SEQ ID NO: 490 - RNA, 22 nt, Homo sapiens
uagcagcacaucaugguuuaca

SEQ ID NO: 491 - RNA, 22 nt, Homo sapiens
uagcagcacguaaauauuggcg

SEQ ID NO: 492 - RNA, 22 nt, Homo sapiens
cgcaggggccgggugcucaccg

SEQ ID NO: 493 - RNA, 22 nt, Homo sapiens
aacuggcccucaaagucccgcu

SEQ ID NO: 494 - RNA, 21 nt, Homo sapiens
uagcagcacagaaauauuggc

SEQ ID NO: 495 - RNA, 22 nt, Homo sapiens
gauuagggugcuuagcuguuaa

SEQ ID NO: 496 - RNA, 21 nt, Homo sapiens
gguuugguccuagccuuucua

SEQ ID NO: 497 - RNA, 20 nt, Homo sapiens
agagguauagggcaugggaa

SEQ ID NO: 498 - RNA, 23 nt, Homo sapiens
agcuacauugucugcuggguuuc

SEQ ID NO: 499 - RNA, 22 nt, Homo sapiens
cagcagcaauucauguuuugaa

SEQ ID NO: 500 - RNA, 22 nt, Homo sapiens
agaggcuggccgugaugaauuc

SEQ ID NO: 501 - RNA, 21 nt, Homo sapiens
cagcagcacacugugguuugu

SEQ ID NO: 502 - RNA, 25 nt, Homo sapiens
ggcggagggaaguagguccguuggu

SEQ ID NO: 503 - RNA, 20 nt, Homo sapiens
ggggagcuguggaagcagua

SEQ ID NO: 504 - RNA, 21 nt, Homo sapiens
uaggacacauggucuacuucu

SEQ ID NO: 505 - RNA, 26 nt, Homo sapiens
aaguaguugguuuguaugagaugguu

SEQ ID NO: 506 - RNA, 17 nt, Homo sapiens
gugggggagaggcuguc

SEQ ID NO: 507 - RNA, 24 nt, Homo sapiens
uugcagcugccugggagugacuuc

SEQ ID NO: 508 - RNA, 22 nt, Homo sapiens
ugagaacugaauuccauggguu

SEQ ID NO: 509 - RNA, 22 nt, Homo sapiens
ugagaacugaauuccauggguu

SEQ ID NO: 510 - RNA, 22 nt, Homo sapiens
ugagaacugaauuccauaggcu

SEQ ID NO: 511 - RNA, 22 nt, Homo sapiens
ucagugcacuacagaacuuugu

SEQ ID NO: 512 - RNA, 23 nt, Homo sapiens
ucuggcuccgugucuucacuccc

SEQ ID NO: 513 - RNA, 18 nt, Homo sapiens
ugaggcaguagauugaau

SEQ ID NO: 514 - RNA, 23 nt, Homo sapiens
ucuuggaguaggucauugggugg

SEQ ID NO: 515 - RNA, 23 nt, Homo sapiens
uaauccuugcuaccugggugaga

SEQ ID NO: 516 - RNA, 22 nt, Homo sapiens
ugugacagauugauaacugaaa

SEQ ID NO: 517 - RNA, 19 nt, Homo sapiens
ugagcugcuguaccaaaau

SEQ ID NO: 518 - RNA, 20 nt, Homo sapiens
aggguguuucucucaucucu

SEQ ID NO: 519 - RNA, 22 nt, Homo sapiens
gucccucuccaaaugugucuug

SEQ ID NO: 520 - RNA, 21 nt, Homo sapiens
aggaggcagcgcucucaggac

SEQ ID NO: 521 - RNA, 21 nt, Homo sapiens
agugaaugauggguucugacc

SEQ ID NO: 522 - RNA, 18 nt, Homo sapiens
cagggaggugaaugugau

SEQ ID NO: 523 - RNA, 20 nt, Homo sapiens
ggggagcuguggaagcagua

SEQ ID NO: 524 - RNA, 22 nt, Homo sapiens
cucuagagggaagcacuuucug

SEQ ID NO: 525 - RNA, 22 nt, Homo sapiens
uguaacagcaacuccaugugga

SEQ ID NO: 526 - RNA, 22 nt, Homo sapiens
cucccacugcuucacuugacua

SEQ ID NO: 527 - RNA, 22 nt, Homo sapiens
uucccuuugucauccuaugccu

SEQ ID NO: 528 - RNA, 22 nt, Homo sapiens
uucccuuugucauccuucgccu

SEQ ID NO: 529 - RNA, 21 nt, Homo sapiens
agcuacaucuggcuacugggu

SEQ ID NO: 530 - RNA, 22 nt, Homo sapiens
uuauaauacaaccugauaagug

SEQ ID NO: 531 - RNA, 22 nt, Homo sapiens
auauaauacaaccugcuaagug

SEQ ID NO: 532 - RNA, 22 nt, Homo sapiens
aggcaguguauuguuagcuggc

SEQ ID NO: 533 - RNA, 22 nt, Homo sapiens
agaggcuggccgugaugaauuc

SEQ ID NO: 534 - RNA, 18 nt, Homo sapiens
ugcuuccuuucagagggu

SEQ ID NO: 535 - RNA, 22 nt, Homo sapiens
aucuggagguaagaagcacuuu

SEQ ID NO: 536 - RNA, 22 nt, Homo sapiens
uagcaaaaacugcaguuacuuu

SEQ ID NO: 537 - RNA, 20 nt, Homo sapiens
aaaguagcuguaccauuugc

SEQ ID NO: 538 - RNA, 21 nt, Homo sapiens
guggcugcacucacuuccuuc

SEQ ID NO: 539 - RNA, 22 nt, Homo sapiens
uacccauugcauaucggaguug

SEQ ID NO: 540 - RNA, 21 nt, Homo sapiens
ccccaccuccucucuccucag

SEQ ID NO: 541 - RNA, 17 nt, Homo sapiens
uucaaguaauucaggug

SEQ ID NO: 542 - RNA, 22 nt, Homo sapiens
uggagagaaaggcaguuccuga

SEQ ID NO: 543 - RNA, 22 nt, Homo sapiens
uuggggaaacggccgcugagug

SEQ ID NO: 544 - RNA, 21 nt, Homo sapiens
uucaaguaauucaggauaggu

SEQ ID NO: 545 - RNA, 23 nt, Homo sapiens
aaugacacgaucacucccguuga

SEQ ID NO: 546 - RNA, 22 nt, Homo sapiens
aguggggaacccuuccaugagg

SEQ ID NO: 547 - RNA, 22 nt, Homo sapiens
ggagaaauuauccuuggugugu

SEQ ID NO: 548 - RNA, 22 nt, Homo sapiens
aaaaguauuugcggguuuuguc

SEQ ID NO: 549 - RNA, 22 nt, Homo sapiens
caaaaguaauuguggauuuugu

SEQ ID NO: 550 - RNA, 20 nt, Homo sapiens
guagaggagauggcgcaggg

SEQ ID NO: 551 - RNA, 22 nt, Homo sapiens
auccgcgcucugacucucugcc

SEQ ID NO: 552 - RNA, 21 nt, Homo sapiens
ucguggccuggucuccauuau

SEQ ID NO: 553 - RNA, 21 nt, Homo sapiens
ccccaccuccucucuccucag

SEQ ID NO: 554 - RNA, 22 nt, Homo sapiens
uggagugugacaaugguguuug

SEQ ID NO: 555 - RNA, 19 nt, Homo sapiens
auggauaaggcuuuggcuu

SEQ ID NO: 556 - RNA, 21 nt, Homo sapiens
ccuguugaaguguaaucccca

SEQ ID NO: 557 - RNA, 17 nt, Homo sapiens
ucccaccgcugccaccc

SEQ ID NO: 558 - RNA, 17 nt, Homo sapiens
ucgccuccuccucuccc

SEQ ID NO: 559 - RNA, 21 nt, Homo sapiens
ugcaggaccaagaugagcccu

SEQ ID NO: 560 - RNA, 22 nt, Homo sapiens
aaaaccgucuaguuacaguugu

SEQ ID NO: 561 - RNA, 22 nt, Homo sapiens
ucugcccccuccgcugcugcca

SEQ ID NO: 562 - RNA, 21 nt, Homo sapiens
ccacaccguaucugacacuuu

SEQ ID NO: 563 - RNA, 20 nt, Homo sapiens
acugccccaggugcugcugg

SEQ ID NO: 564 - RNA, 23 nt, Homo sapiens
ucucacacagaaaucgcacccgu

SEQ ID NO: 565 - RNA, 23 nt, Homo sapiens
aucaacagacauuaauugggcgc

SEQ ID NO: 566 - RNA, 22 nt, Homo sapiens
aaaccguuaccauuacugaguu

SEQ ID NO: 567 - RNA, 23 nt, Homo sapiens
agguuguccguggugaguucgca

SEQ ID NO: 568 - RNA, 22 nt, Homo sapiens
agaggcuggccgugaugaauuc

SEQ ID NO: 569 - RNA, 21 nt, Homo sapiens
cggggcagcucaguacaggau

SEQ ID NO: 570 - RNA, 22 nt, Homo sapiens
uggugggcacagaaucuggacu

SEQ ID NO: 571 - RNA, 21 nt, Homo sapiens
aacaggugacugguuagacaa

SEQ ID NO: 572 - RNA, 20 nt, Homo sapiens
guccgcucggcgguggccca

SEQ ID NO: 573 - RNA, 21 nt, Homo sapiens
uuggccacaauggguuagaac

SEQ ID NO: 574 - RNA, 21 nt, Homo sapiens
uuggccacaauggguuagaac

SEQ ID NO: 575 - RNA, 22 nt, Homo sapiens
uggugggccgcagaacaugugc

SEQ ID NO: 576 - RNA, 25 nt, Homo sapiens
ggcggagggaaguagguccguuggu

SEQ ID NO: 577 - RNA, 20 nt, Homo sapiens
ggggagcuguggaagcagua

SEQ ID NO: 578 - RNA, 21 nt, Homo sapiens
agagaagaagaucagccugca

SEQ ID NO: 579 - RNA, 24 nt, Homo sapiens
agccuggaagcuggagccugcagu

SEQ ID NO: 580 - RNA, 18 nt, Homo sapiens
uugagaaggaggcugcug

SEQ ID NO: 581 - RNA, 22 nt, Homo sapiens
ugagaacugaauuccauggguu

SEQ ID NO: 582 - RNA, 22 nt, Homo sapiens
ugagaacugaauuccauaggcu

SEQ ID NO: 583 - RNA, 21 nt, Homo sapiens
caucccuugcaugguggaggg

SEQ ID NO: 584 - RNA, 21 nt, Homo sapiens
aggcaagaugcuggcauagcu

SEQ ID NO: 585 - RNA, 23 nt, Homo sapiens
cgcauccccuagggcauuggugu

SEQ ID NO: 586 - RNA, 22 nt, Homo sapiens
uucucaaggaggugucguuuau

SEQ ID NO: 587 - RNA, 22 nt, Homo sapiens
uaacugguugaacaacugaacc

SEQ ID NO: 588 - RNA, 23 nt, Homo sapiens
aucccuugcaggggcuguugggu

SEQ ID NO: 589 - RNA, 23 nt, Homo sapiens
caguaacaaagauucauccuugu

SEQ ID NO: 590 - RNA, 22 nt, Homo sapiens
ugcccuuaaaggugaacccagu

SEQ ID NO: 591 - RNA, 22 nt, Homo sapiens
uuuccggcucgcgugggugugu

SEQ ID NO: 592 - RNA, 18 nt, Homo sapiens
aucccaccucugccacca

SEQ ID NO: 593 - RNA, 23 nt, Homo sapiens
ugugcaaaucuaugcaaaacuga

SEQ ID NO: 594 - RNA, 23 nt, Homo sapiens
ugugcaaauccaugcaaaacuga

SEQ ID NO: 595 - RNA, 21 nt, Homo sapiens
uuuugcaccuuuuggagugaa

SEQ ID NO: 596 - RNA, 22 nt, Homo sapiens
ccucccacacccaaggcuugca

SEQ ID NO: 597 - RNA, 23 nt, Homo sapiens
guuugcacgggugggccuugucu

SEQ ID NO: 598 - RNA, 22 nt, Homo sapiens
caaaguuuaagauccuugaagu

SEQ ID NO: 599 - RNA, 25 nt, Homo sapiens
aggggugguguugggacagcuccgu

SEQ ID NO: 600 - RNA, 22 nt, Homo sapiens
uccgagccugggucucccucuu

SEQ ID NO: 601 - RNA, 22 nt, Homo sapiens
ugcggggcuagggcuaacagca

SEQ ID NO: 602 - RNA, 21 nt, Homo sapiens
ucguggccuggucuccauuau

SEQ ID NO: 603 - RNA, 22 nt, Homo sapiens
gcccgcguguggagccaggugu

SEQ ID NO: 604 - RNA, 22 nt, Homo sapiens
uagcagcacauaaugguuugug

SEQ ID NO: 605 - RNA, 22 nt, Homo sapiens
uagcagcacaucaugguuuaca

SEQ ID NO: 606 - RNA, 22 nt, Homo sapiens
uagcagcacguaaauauuggcg

SEQ ID NO: 607 - RNA, 21 nt, Homo sapiens
cggcggggacggcgauugguc

SEQ ID NO: 608 - RNA, 23 nt, Homo sapiens
ugaguaccgccaugucuguuggg

SEQ ID NO: 609 - RNA, 21 nt, Homo sapiens
uagcagcacagaaauauuggc

SEQ ID NO: 610 - RNA, 22 nt, Homo sapiens
uggcucaguucagcaggaacag

SEQ ID NO: 611 - RNA, 22 nt, Homo sapiens
cagcagcaauucauguuuugaa

SEQ ID NO: 612 - RNA, 21 nt, Homo sapiens
cagcagcacacugugguuugu

SEQ ID NO: 613 - RNA, 19 nt, Homo sapiens
ugucucugcugggguuucu

SEQ ID NO: 614 - RNA, 22 nt, Homo sapiens
ggggguccccggugcucggauc

SEQ ID NO: 615 - RNA, 22 nt, Homo sapiens
aggcggggcgccgcgggaccgc

SEQ ID NO: 616 - RNA, 22 nt, Homo sapiens
gguggcccggccgugccugagg

SEQ ID NO: 617 - RNA, 23 nt, Homo sapiens
ugcaccaugguugucugagcaug

SEQ ID NO: 618 - RNA, 22 nt, Homo sapiens
ugugcgcagggagaccucuccc

SEQ ID NO: 619 - RNA, 22 nt, Homo sapiens
acaggugagguucuugggagcc

SEQ ID NO: 620 - RNA, 18 nt, Homo sapiens
cgggcguggugguggggg

SEQ ID NO: 621 - RNA, 20 nt, Homo sapiens
uaaagagcccuguggagaca

SEQ ID NO: 622 - RNA, 17 nt, Homo sapiens
ucccaccgcugccaccc

SEQ ID NO: 623 - RNA, 20 nt, Homo sapiens
ucguuugccuuuuucugcuu

SEQ ID NO: 624 - RNA, 21 nt, Homo sapiens
cggcggggacggcgauugguc

SEQ ID NO: 625 - RNA, 21 nt, Homo sapiens
gccccugggccuauccuagaa

SEQ ID NO: 626 - RNA, 22 nt, Homo sapiens
uggcagugucuuagcugguugu

SEQ ID NO: 627 - RNA, 22 nt, Homo sapiens
uggugggcacagaaucuggacu

SEQ ID NO: 628 - RNA, 22 nt, Homo sapiens
ugugacagauugauaacugaaa

SEQ ID NO: 629 - RNA, 22 nt, Homo sapiens
ucagcaaacauuuauugugugc

SEQ ID NO: 630 - RNA, 25 nt, Homo sapiens
aggggugguguugggacagcuccgu

SEQ ID NO: 631 - RNA, 22 nt, Homo sapiens
uggugggccgcagaacaugugc

SEQ ID NO: 632 - RNA, 22 nt, Homo sapiens
aggcggggcgccgcgggaccgc

SEQ ID NO: 633 - RNA, 22 nt, Homo sapiens
ugcggggcuagggcuaacagca

SEQ ID NO: 634 - RNA, 20 nt, Homo sapiens
ggggagcuguggaagcagua

SEQ ID NO: 635 - RNA, 20 nt, Homo sapiens
ggggagcuguggaagcagua

SEQ ID NO: 636 - RNA, 22 nt, Homo sapiens
ugagguaguagguuguauaguu

SEQ ID NO: 637 - RNA, 22 nt, Homo sapiens
ugagguaguagguugugugguu

SEQ ID NO: 638 - RNA, 22 nt, Homo sapiens
ugagguaguagguuguaugguu

SEQ ID NO: 639 - RNA, 22 nt, Homo sapiens
agagguaguagguugcauaguu

SEQ ID NO: 640 - RNA, 22 nt, Homo sapiens
ugagguaggagguuguauaguu

SEQ ID NO: 641 - RNA, 22 nt, Homo sapiens
ugagguaguagauuguauaguu

SEQ ID NO: 642 - RNA, 22 nt, Homo sapiens
ugagguaguaguuuguacaguu

SEQ ID NO: 643 - RNA, 22 nt, Homo sapiens
ugagguaguaguuugugcuguu

SEQ ID NO: 644 - RNA, 22 nt, Homo sapiens
ccucuuccccuugucucuccag

SEQ ID NO: 645 - RNA, 22 nt, Homo sapiens
ugugacugguugaccagagggg

SEQ ID NO: 646 - RNA, 23 nt, Homo sapiens
uaauacugccggguaaugaugga

SEQ ID NO: 647 - RNA, 22 nt, Homo sapiens
auaagacgagcaaaaagcuugu

SEQ ID NO: 648 - RNA, 22 nt, Homo sapiens
auaagacgaacaaaagguuugu

SEQ ID NO: 649 - RNA, 20 nt, Homo sapiens
ccucugggcccuuccuccag

SEQ ID NO: 650 - RNA, 22 nt, Homo sapiens
ucucugggccugugucuuaggc

SEQ ID NO: 651 - RNA, 21 nt, Homo sapiens
ugguagacuauggaacguagg

SEQ ID NO: 652 - RNA, 22 nt, Homo sapiens
ugauugguacgucuguggguag

SEQ ID NO: 653 - RNA, 23 nt, Homo sapiens
agugccugagggaguaagagccc

SEQ ID NO: 654 - RNA, 20 nt, Homo sapiens
guagaggagauggcgcaggg

SEQ ID NO: 655 - RNA, 22 nt, Homo sapiens
uauugcacucgucccggccucc

SEQ ID NO: 656 - RNA, 22 nt, Homo sapiens
ugagguaguaaguuguauuguu

SEQ ID NO: 657 - RNA, 22 nt, Homo sapiens
agaaggaaauugaauucauuua

SEQ ID NO: 658 - RNA, 22 nt, Homo sapiens
ucagugcacuacagaacuuugu

SEQ ID NO: 659 - RNA, 22 nt, Homo sapiens
ucagugcaucacagaacuuugu

SEQ ID NO: 660 - RNA, 21 nt, Homo sapiens
ucagugcaugacagaacuugg

SEQ ID NO: 661 - RNA, 18 nt, Homo sapiens
uccagugcccuccucucc

SEQ ID NO: 662 - RNA, 23 nt, Homo sapiens
ucaagagcaauaacgaaaaaugu

SEQ ID NO: 663 - RNA, 23 nt, Homo sapiens
ucccccaggugugauucugauuu

SEQ ID NO: 664 - RNA, 23 nt, Homo sapiens
aaacucuacuuguccuucugagu

SEQ ID NO: 665 - RNA, 24 nt, Homo sapiens
acugggggcuuucgggcucugcgu

SEQ ID NO: 666 - RNA, 24 nt, Homo sapiens
ugccugggucucuggccugcgcgu

SEQ ID NO: 667 - RNA, 22 nt, Homo sapiens
ugagccccugugccgcccccag

SEQ ID NO: 668 - RNA, 22 nt, Homo sapiens
ucggccugaccacccaccccac

SEQ ID NO: 669 - RNA, 24 nt, Homo sapiens
ucccugagacccuuuaaccuguga

SEQ ID NO: 670 - RNA, 22 nt, Homo sapiens
ucccugagacccuaacuuguga

SEQ ID NO: 671 - RNA, 23 nt, Homo sapiens
ccucagggcuguagaacagggcu

SEQ ID NO: 672 - RNA, 23 nt, Homo sapiens
cggcccgggcugcugcuguuccu

SEQ ID NO: 673 - RNA, 21 nt, Homo sapiens
cggcggggacggcgauugguc

SEQ ID NO: 674 - RNA, 23 nt, Homo sapiens
caacggaaucccaaaagcagcug

SEQ ID NO: 675 - RNA, 22 nt, Homo sapiens
uggcucaguucagcaggaacag

SEQ ID NO: 676 - RNA, 19 nt, Homo sapiens
gggcgccugugaucccaac

SEQ ID NO: 677 - RNA, 25 nt, Homo sapiens
aggggugguguugggacagcuccgu

SEQ ID NO: 678 - RNA, 24 nt, Homo sapiens
ugccugggucucuggccugcgcgu

SEQ ID NO: 679 - RNA, 22 nt, Homo sapiens
aggcggggcgccgcgggaccgc

SEQ ID NO: 680 - RNA, 22 nt, Homo sapiens
ugcggggcuagggcuaacagca

SEQ ID NO: 681 - RNA, 23 nt, Homo sapiens
cgggucggaguuagcucaagcgg

SEQ ID NO: 682 - RNA, 20 nt, Homo sapiens
ggggagcuguggaagcagua

SEQ ID NO: 683 - RNA, 23 nt, Homo sapiens
cacccggcugugugcacaugugc

SEQ ID NO: 684 - RNA, 21 nt, Homo sapiens
uaaagugcugacagugcagau

SEQ ID NO: 685 - RNA, 20 nt, Homo sapiens
uaaagagcccuguggagaca

SEQ ID NO: 686 - RNA, 18 nt, Homo sapiens
uccagugcccuccucucc

SEQ ID NO: 687 - RNA, 21 nt, Homo sapiens
cggcggggacggcgauugguc

SEQ ID NO: 688 - RNA, 22 nt, Homo sapiens
ucugcccccuccgcugcugcca

SEQ ID NO: 689 - RNA, 20 nt, Homo sapiens
acugccccaggugcugcugg

SEQ ID NO: 690 - RNA, 21 nt, Homo sapiens
cggggcagcucaguacaggau

SEQ ID NO: 691 - RNA, 23 nt, Homo sapiens
cacucagccuugagggcacuuuc

SEQ ID NO: 692 - RNA, 21 nt, Homo sapiens
caaagguauuugugguuuuug

SEQ ID NO: 693 - RNA, 21 nt, Homo sapiens
gcgacccacucuugguuucca

SEQ ID NO: 694 - RNA, 21 nt, Homo sapiens
gcgacccauacuugguuucag

SEQ ID NO: 695 - RNA, 19 nt, Homo sapiens
ugucucugcugggguuucu

SEQ ID NO: 696 - RNA, 19 nt, Homo sapiens
ucuaggcugguacugcuga

SEQ ID NO: 697 - RNA, 22 nt, Homo sapiens
ugcggggcuagggcuaacagca

SEQ ID NO: 698 - RNA, 19 nt, Homo sapiens
gugaggacucgggaggugg

SEQ ID NO: 699 - RNA, 24 nt, Homo sapiens
agccuggaagcuggagccugcagu

SEQ ID NO: 700 - RNA, 23 nt, Homo sapiens
uauggcuuuuuauuccuauguga

SEQ ID NO: 701 - RNA, 23 nt, Homo sapiens
uauggcuuuucauuccuauguga

SEQ ID NO: 702 - RNA, 21 nt, Homo sapiens
cggcggggacggcgauugguc

SEQ ID NO: 703 - RNA, 22 nt, Homo sapiens
ugauauguuugauauauuaggu

SEQ ID NO: 704 - RNA, 23 nt, Homo sapiens
agcuacauugucugcuggguuuc

SEQ ID NO: 705 - RNA, 23 nt, Homo sapiens
ugaggggcagagagcgagacuuu

SEQ ID NO: 706 - RNA, 21 nt, Homo sapiens
aauggcgccacuaggguugug

SEQ ID NO: 707 - RNA, 22 nt, Homo sapiens
aggcggggcgccgcgggaccgc

SEQ ID NO: 708 - RNA, 22 nt, Homo sapiens
ugcggggcuagggcuaacagca

SEQ ID NO: 709 - RNA, 22 nt, Homo sapiens
aggcagcgggguguaguggaua

SEQ ID NO: 710 - RNA, 22 nt, Homo sapiens
auccgcgcucugacucucugcc

SEQ ID NO: 711 - RNA, 22 nt, Homo sapiens
acccgucccguucguccccgga

SEQ ID NO: 712 - RNA, 25 nt, Homo sapiens
gggcgacaaagcaagacucuuucuu

SEQ ID NO: 713 - RNA, 23 nt, Homo sapiens
cggcccgggcugcugcuguuccu

SEQ ID NO: 714 - RNA, 22 nt, Homo sapiens
uagguaguuuccuguuguuggg

SEQ ID NO: 715 - RNA, 21 nt, Homo sapiens
gccccugggccuauccuagaa

SEQ ID NO: 716 - RNA, 22 nt, Homo sapiens
ugugacagauugauaacugaaa

SEQ ID NO: 717 - RNA, 22 nt, Homo sapiens
uauugcacucgucccggccucc

SEQ ID NO: 718 - RNA, 22 nt, Homo sapiens
auccgcgcucugacucucugcc

SEQ ID NO: 719 - RNA, 22 nt, Homo sapiens
ucugggcaacaaagugagaccu

SEQ ID NO: 720 - RNA, 21 nt, Homo sapiens
uggacugcccugaucuggaga

SEQ ID NO: 721 - RNA, 22 nt, Homo sapiens
ugauauguuugauauauuaggu

SEQ ID NO: 722 - RNA, 21 nt, Homo sapiens
ugauauguuugauauuggguu

SEQ ID NO: 723 - RNA, 21 nt, Homo sapiens
ccaguccugugccugccgccu

SEQ ID NO: 724 - RNA, 22 nt, Homo sapiens
uagguaguuucauguuguuggg

SEQ ID NO: 725 - RNA, 22 nt, Homo sapiens
cucccacugcuucacuugacua

SEQ ID NO: 726 - RNA, 22 nt, Homo sapiens
ccucccacacccaaggcuugca

SEQ ID NO: 727 - RNA, 22 nt, Homo sapiens
ccaaaacugcaguuacuuuugc

SEQ ID NO: 728 - RNA, 25 nt, Homo sapiens
gcugggcagggcuucugagcuccuu

SEQ ID NO: 729 - RNA, 24 nt, Homo sapiens
ugccugggucucuggccugcgcgu

SEQ ID NO: 730 - RNA, 20 nt, Homo sapiens
accaggaggcugaggccccu

SEQ ID NO: 731 - RNA, 22 nt, Homo sapiens
ugcggggcuagggcuaacagca

SEQ ID NO: 732 - RNA, 18 nt, Homo sapiens
ucagcuggcccucauuuc

SEQ ID NO: 733 - RNA, 22 nt, Homo sapiens
uggagugugacaaugguguuug

SEQ ID NO: 734 - RNA, 22 nt, Homo sapiens
uggguggucuggagauuugugc

SEQ ID NO: 735 - RNA, 18 nt, Homo sapiens
cagggaggugaaugugau

SEQ ID NO: 736 - RNA, 23 nt, Homo sapiens
ucuggcuccgugucuucacuccc

SEQ ID NO: 737 - RNA, 22 nt, Homo sapiens
uuggggaaacggccgcugagug

SEQ ID NO: 738 - RNA, 22 nt, Homo sapiens
aggugguccguggcgcguucgc

SEQ ID NO: 739 - RNA, 20 nt, Homo sapiens
ccucugggcccuuccuccag

SEQ ID NO: 740 - RNA, 22 nt, Homo sapiens
ucucugggccugugucuuaggc

SEQ ID NO: 741 - RNA, 25 nt, Homo sapiens
aggggugguguugggacagcuccgu

SEQ ID NO: 742 - RNA, 22 nt, Homo sapiens
gucccucuccaaaugugucuug

SEQ ID NO: 743 - RNA, 22 nt, Homo sapiens
ugagccccugugccgcccccag

SEQ ID NO: 744 - RNA, 23 nt, Homo sapiens
ucuggcuccgugucuucacuccc

SEQ ID NO: 745 - RNA, 21 nt, Homo sapiens
cggcggggacggcgauugguc

SEQ ID NO: 746 - RNA, 22 nt, Homo sapiens
uagcuuaucagacugauguuga

SEQ ID NO: 747 - RNA, 21 nt, Homo sapiens
uucacaguggcuaaguucugc

SEQ ID NO: 748 - RNA, 23 nt, Homo sapiens
ugaggggcagagagcgagacuuu

SEQ ID NO: 749 - RNA, 22 nt, Homo sapiens
gagcuuauucauaaaagugcag

SEQ ID NO: 750 - RNA, 22 nt, Homo sapiens
aggcggggcgccgcgggaccgc

SEQ ID NO: 751 - RNA, 22 nt, Homo sapiens
ugcggggcuagggcuaacagca

SEQ ID NO: 752 - RNA, 24 nt, Homo sapiens
uggggagcugaggcucugggggug

SEQ ID NO: 753 - RNA, 22 nt, Homo sapiens
aacccguagauccgaucuugug

SEQ ID NO: 754 - RNA, 22 nt, Homo sapiens
cacccguagaaccgaccuugcg

SEQ ID NO: 755 - RNA, 23 nt, Homo sapiens
uagcagcgggaacaguucugcag

SEQ ID NO: 756 - RNA, 22 nt, Homo sapiens
aucuggagguaagaagcacuuu

SEQ ID NO: 757 - RNA, 22 nt, Homo sapiens
aucuggagguaagaagcacuuu

SEQ ID NO: 758 - RNA, 23 nt, Homo sapiens
caaagcgcuucucuuuagagugu

SEQ ID NO: 759 - RNA, 21 nt, Homo sapiens
cuccagagggaaguacuuucu

SEQ ID NO: 760 - RNA, 21 nt, Homo sapiens
cuccagagggaugcacuuucu

SEQ ID NO: 761 - RNA, 22 nt, Homo sapiens
aaaaguaauugcgaguuuuacc

SEQ ID NO: 762 - RNA, 22 nt, Homo sapiens
aaaaguaauugcgguuuuugcc

SEQ ID NO: 763 - RNA, 22 nt, Homo sapiens
aaaaguaauugugguuuuugcc

SEQ ID NO: 764 - RNA, 22 nt, Homo sapiens
aaaaguaaucgcgguuuuuguc

SEQ ID NO: 765 - RNA, 22 nt, Homo sapiens
aaaaguaauugcggauuuugcc

SEQ ID NO: 766 - RNA, 22 nt, Homo sapiens
aaaaguaauugcggucuuuggu

SEQ ID NO: 767 - RNA, 21 nt, Homo sapiens
uaaaguaaauaugcaccaaaa

SEQ ID NO: 768 - RNA, 20 nt, Homo sapiens
accaggaggcugaggccccu

SEQ ID NO: 769 - RNA, 20 nt, Homo sapiens
accaggaggcugaggccccu

SEQ ID NO: 770 - RNA, 22 nt, Homo sapiens
ugagaccucuggguucugagcu

SEQ ID NO: 771 - RNA, 22 nt, Homo sapiens
ugagguaguagguuguauaguu

SEQ ID NO: 772 - RNA, 22 nt, Homo sapiens
ugagguaguagguugugugguu

SEQ ID NO: 773 - RNA, 22 nt, Homo sapiens
ugagguaguagguuguaugguu

SEQ ID NO: 774 - RNA, 22 nt, Homo sapiens
agagguaguagguugcauaguu

SEQ ID NO: 775 - RNA, 22 nt, Homo sapiens
ugagguaggagguuguauaguu

SEQ ID NO: 776 - RNA, 22 nt, Homo sapiens
ugagguaguagauuguauaguu

SEQ ID NO: 777 - RNA, 22 nt, Homo sapiens
ugagguaguaguuuguacaguu

SEQ ID NO: 778 - RNA, 22 nt, Homo sapiens
ugagguaguaguuugugcuguu

SEQ ID NO: 779 - RNA, 21 nt, Homo sapiens
uggcagggaggcugggagggg

SEQ ID NO: 780 - RNA, 22 nt, Homo sapiens
uuagggcccuggcuccaucucc

SEQ ID NO: 781 - RNA, 23 nt, Homo sapiens
uaaggugcaucuagugcaguuag

SEQ ID NO: 782 - RNA, 22 nt, Homo sapiens
cgcaggggccgggugcucaccg

SEQ ID NO: 783 - RNA, 22 nt, Homo sapiens
gauuagggugcuuagcuguuaa

SEQ ID NO: 784 - RNA, 21 nt, Homo sapiens
agggcccccccucaauccugu

SEQ ID NO: 785 - RNA, 22 nt, Homo sapiens
uuauaaagcaaugagacugauu

SEQ ID NO: 786 - RNA, 25 nt, Homo sapiens
aggggugguguugggacagcuccgu

SEQ ID NO: 787 - RNA, 24 nt, Homo sapiens
ugccugggucucuggccugcgcgu

SEQ ID NO: 788 - RNA, 20 nt, Homo sapiens
cggcucugggucugugggga

SEQ ID NO: 789 - RNA, 23 nt, Homo sapiens
cgggucggaguuagcucaagcgg

SEQ ID NO: 790 - RNA, 20 nt, Homo sapiens
ggggagcuguggaagcagua

SEQ ID NO: 791 - RNA, 22 nt, Homo sapiens
ugagguaguaaguuguauuguu

SEQ ID NO: 792 - RNA, 21 nt, Homo sapiens
uggcagggaggcugggagggg

SEQ ID NO: 793 - RNA, 22 nt, Homo sapiens
acgcccuucccccccuucuuca

SEQ ID NO: 794 - RNA, 18 nt, Homo sapiens
cgggcguggugguggggg

SEQ ID NO: 795 - RNA, 22 nt, Homo sapiens
ucuacaaaggaaagcgcuuucu

SEQ ID NO: 796 - RNA, 23 nt, Homo sapiens
ucuggcuccgugucuucacuccc

SEQ ID NO: 797 - RNA, 22 nt, Homo sapiens
aucgugcauccuuuuagagugu

SEQ ID NO: 798 - RNA, 18 nt, Homo sapiens
ugaggcaguagauugaau

SEQ ID NO: 799 - RNA, 22 nt, Homo sapiens
uggagagaaaggcaguuccuga

SEQ ID NO: 800 - RNA, 22 nt, Homo sapiens
ucgugucuuguguugcagccgg

SEQ ID NO: 801 - RNA, 22 nt, Homo sapiens
cgcaggggccgggugcucaccg

SEQ ID NO: 802 - RNA, 22 nt, Homo sapiens
uaauacugccugguaaugauga

SEQ ID NO: 803 - RNA, 23 nt, Homo sapiens
uaauacugccggguaaugaugga

SEQ ID NO: 804 - RNA, 20 nt, Homo sapiens
ccucugggcccuuccuccag

SEQ ID NO: 805 - RNA, 22 nt, Homo sapiens
ucucugggccugugucuuaggc

SEQ ID NO: 806 - RNA, 22 nt, Homo sapiens
uaauacugucugguaaaaccgu

SEQ ID NO: 807 - RNA, 19 nt, Homo sapiens
aggcugcggaauucaggac

SEQ ID NO: 808 - RNA, 25 nt, Homo sapiens
ggcggagggaaguagguccguuggu

SEQ ID NO: 809 - RNA, 23 nt, Homo sapiens
ucuggcuccgugucuucacuccc

SEQ ID NO: 810 - RNA, 23 nt, Homo sapiens
cggcccgggcugcugcuguuccu

SEQ ID NO: 811 - RNA, 21 nt, Homo sapiens
cggcggggacggcgauugguc

SEQ ID NO: 812 - RNA, 23 nt, Homo sapiens
ugaggggcagagagcgagacuuu

SEQ ID NO: 813 - RNA, 22 nt, Homo sapiens
aguggggaacccuuccaugagg

SEQ ID NO: 814 - RNA, 21 nt, Homo sapiens
auccuugcuaucugggugcua

SEQ ID NO: 815 - RNA, 22 nt, Homo sapiens
aucuggagguaagaagcacuuu

SEQ ID NO: 816 - RNA, 23 nt, Homo sapiens
caaagcgcuucucuuuagagugu

SEQ ID NO: 817 - RNA, 21 nt, Homo sapiens
cuccagagggaaguacuuucu

SEQ ID NO: 818 - RNA, 21 nt, Homo sapiens
cuccagagggaugcacuuucu

SEQ ID NO: 819 - RNA, 23 nt, Homo sapiens
gcgaggaccccucggggucugac

SEQ ID NO: 820 - RNA, 23 nt, Homo sapiens
gaacgccuguucuugccaggugg

SEQ ID NO: 821 - RNA, 22 nt, Homo sapiens
aggcggggcgccgcgggaccgc

SEQ ID NO: 822 - RNA, 22 nt, Homo sapiens
ugcggggcuagggcuaacagca

SEQ ID NO: 823 - RNA, 20 nt, Homo sapiens
ggggagcuguggaagcagua

SEQ ID NO: 824 - RNA, 22 nt, Homo sapiens
ucaccagcccuguguucccuag

SEQ ID NO: 825 - RNA, 22 nt, Homo sapiens
agaaggaaauugaauucauuua

SEQ ID NO: 826 - RNA, 17 nt, Homo sapiens
ucgccuccuccucuccc

SEQ ID NO: 827 - RNA, 23 nt, Homo sapiens
agcugguguugugaaucaggccg

SEQ ID NO: 828 - RNA, 21 nt, Homo sapiens
uccugcgcgucccagaugccc

SEQ ID NO: 829 - RNA, 22 nt, Homo sapiens
ucugcccccuccgcugcugcca

SEQ ID NO: 830 - RNA, 20 nt, Homo sapiens
ccuccugcccuccuugcugu

SEQ ID NO: 831 - RNA, 23 nt, Homo sapiens
uaaagugcuuauagugcagguag

SEQ ID NO: 832 - RNA, 22 nt, Homo sapiens
aaggagcucacagucuauugag

SEQ ID NO: 833 - RNA, 20 nt, Homo sapiens
acugccccaggugcugcugg

SEQ ID NO: 834 - RNA, 22 nt, Homo sapiens
gcugacuccuaguccagggcuc

SEQ ID NO: 835 - RNA, 21 nt, Homo sapiens
cggggcagcucaguacaggau

SEQ ID NO: 836 - RNA, 21 nt, Homo sapiens
aacaggugacugguuagacaa

SEQ ID NO: 837 - RNA, 23 nt, Homo sapiens
aaggagcuuacaaucuagcuggg

SEQ ID NO: 838 - RNA, 21 nt, Homo sapiens
uggcagggaggcugggagggg

SEQ ID NO: 839 - RNA, 21 nt, Homo sapiens
ccccaccuccucucuccucag

SEQ ID NO: 840 - RNA, 22 nt, Homo sapiens
ccucuuccccuugucucuccag

SEQ ID NO: 841 - RNA, 22 nt, Homo sapiens
acaggugagguucuugggagcc

SEQ ID NO: 842 - RNA, 24 nt, Homo sapiens
ccagacagaauucuaugcacuuuc

SEQ ID NO: 843 - RNA, 23 nt, Homo sapiens
cggcccgggcugcugcuguuccu

SEQ ID NO: 844 - RNA, 18 nt, Homo sapiens
ugaggcaguagauugaau

SEQ ID NO: 845 - RNA, 23 nt, Homo sapiens
uaaggugcaucuagugcagauag

SEQ ID NO: 846 - RNA, 22 nt, Homo sapiens
cgcaggggccgggugcucaccg

SEQ ID NO: 847 - RNA, 21 nt, Homo sapiens
agggcccccccucaauccugu

SEQ ID NO: 848 - RNA, 21 nt, Homo sapiens
agggcccccccucaauccugu

SEQ ID NO: 849 - RNA, 22 nt, Homo sapiens
gcugacuccuaguccagggcuc

SEQ ID NO: 850 - RNA, 22 nt, Homo sapiens
uacucaggagaguggcaaucac

SEQ ID NO: 851 - RNA, 19 nt, Homo sapiens
agcugucugaaaaugucuu

SEQ ID NO: 852 - RNA, 19 nt, Homo sapiens
gugucugcuuccuguggga

SEQ ID NO: 853 - RNA, 23 nt, Homo sapiens
ucugcucauaccccaugguuucu

SEQ ID NO: 854 - RNA, 21 nt, Homo sapiens
gcaggaacuugugagucuccu

SEQ ID NO: 855 - RNA, 20 nt, Homo sapiens
guagaggagauggcgcaggg

SEQ ID NO: 856 - RNA, 21 nt, Homo sapiens
aaggcagggcccccgcucccc

SEQ ID NO: 857 - RNA, 23 nt, Homo sapiens
uacccuguagaaccgaauuugug

SEQ ID NO: 858 - RNA, 22 nt, Homo sapiens
cuccugagccauucugagccuc

SEQ ID NO: 859 - RNA, 21 nt, Homo sapiens
ccccaccuccucucuccucag

SEQ ID NO: 860 - RNA, 17 nt, Homo sapiens
ucccaccgcugccaccc

SEQ ID NO: 861 - RNA, 21 nt, Homo sapiens
ugagaugaagcacuguagcuc

SEQ ID NO: 862 - RNA, 23 nt, Homo sapiens
guccaguuuucccaggaaucccu

SEQ ID NO: 863 - RNA, 22 nt, Homo sapiens
uguaaacauccuacacucagcu

SEQ ID NO: 864 - RNA, 21 nt, Homo sapiens
aggggugcuaucugugauuga

SEQ ID NO: 865 - RNA, 20 nt, Homo sapiens
ggggagcuguggaagcagua

SEQ ID NO: 866 - RNA, 22 nt, Homo sapiens
ucggccugaccacccaccccac

SEQ ID NO: 867 - RNA, 22 nt, Homo sapiens
uuagggcccuggcuccaucucc

SEQ ID NO: 868 - RNA, 22 nt, Homo sapiens
uuagggcccuggcuccaucucc

SEQ ID NO: 869 - RNA, 23 nt, Homo sapiens
ucuggcuccgugucuucacuccc

SEQ ID NO: 870 - RNA, 18 nt, Homo sapiens
uccagugcccuccucucc

SEQ ID NO: 871 - RNA, 21 nt, Homo sapiens
cucccacaugcaggguuugca

SEQ ID NO: 872 - RNA, 22 nt, Homo sapiens
aacuggccuacaaagucccagu

SEQ ID NO: 873 - RNA, 22 nt, Homo sapiens
aacuggcccucaaagucccgcu

SEQ ID NO: 874 - RNA, 22 nt, Homo sapiens
uguaacagcaacuccaugugga

SEQ ID NO: 875 - RNA, 22 nt, Homo sapiens
cucccacugcuucacuugacua

SEQ ID NO: 876 - RNA, 21 nt, Homo sapiens
ccacaccguaucugacacuuu

SEQ ID NO: 877 - RNA, 23 nt, Homo sapiens
aucaacagacauuaauugggcgc

SEQ ID NO: 878 - RNA, 21 nt, Homo sapiens
agggcccccccucaauccugu

SEQ ID NO: 879 - RNA, 22 nt, Homo sapiens
uguaaacauccuacacucagcu

SEQ ID NO: 880 - RNA, 22 nt, Homo sapiens
cuggcccucucugcccuuccgu

SEQ ID NO: 881 - RNA, 23 nt, Homo sapiens
aagugccgccaucuuuugagugu

SEQ ID NO: 882 - RNA, 23 nt, Homo sapiens
ugaggggcagagagcgagacuuu

SEQ ID NO: 883 - RNA, 21 nt, Homo sapiens
uugaaaggcuauuucuugguc

SEQ ID NO: 884 - RNA, 22 nt, Homo sapiens
ccucccacacccaaggcuugca

SEQ ID NO: 885 - RNA, 22 nt, Homo sapiens
uauugcacucgucccggccucc

SEQ ID NO: 886 - RNA, 21 nt, Homo sapiens
uggcagggaggcugggagggg

SEQ ID NO: 887 - RNA, 20 nt, Homo sapiens
guguguggaaaugcuucugc

SEQ ID NO: 888 - RNA, 23 nt, Homo sapiens
ucuggcuccgugucuucacuccc

SEQ ID NO: 889 - RNA, 23 nt, Homo sapiens
uaaggugcaucuagugcagauag

SEQ ID NO: 890 - RNA, 22 nt, Homo sapiens
cgcaggggccgggugcucaccg

SEQ ID NO: 891 - RNA, 22 nt, Homo sapiens
aacacaccugguuaaccucuuu

SEQ ID NO: 892 - RNA, 21 nt, Homo sapiens
aggggugcuaucugugauuga

SEQ ID NO: 893 - RNA, 22 nt, Homo sapiens
aacacaccuauucaaggauuca

SEQ ID NO: 894 - RNA, 23 nt, Homo sapiens
cacucagccuugagggcacuuuc

SEQ ID NO: 895 - RNA, 22 nt, Homo sapiens
gugagucucuaagaaaagagga

SEQ ID NO: 896 - RNA, 21 nt, Homo sapiens
guggcugcacucacuuccuuc

SEQ ID NO: 897 - RNA, 23 nt, Homo sapiens
gagggucuugggagggaugugac

SEQ ID NO: 898 - RNA, 20 nt, Homo sapiens
ucacuguucagacaggcgga

SEQ ID NO: 899 - RNA, 22 nt, Homo sapiens
aggcauugacuucucacuagcu

SEQ ID NO: 900 - RNA, 22 nt, Homo sapiens
ucguaccgugaguaauaaugcg

SEQ ID NO: 901 - RNA, 19 nt, Homo sapiens
auggauaaggcuuuggcuu

SEQ ID NO: 902 - RNA, 22 nt, Homo sapiens
ucugcccccuccgcugcugcca

SEQ ID NO: 903 - RNA, 20 nt, Homo sapiens
acugccccaggugcugcugg

SEQ ID NO: 904 - RNA, 21 nt, Homo sapiens
cggggcagcucaguacaggau

SEQ ID NO: 905 - RNA, 22 nt, Homo sapiens
ucagcaaacauuuauugugugc

SEQ ID NO: 906 - RNA, 22 nt, Homo sapiens
aaaaguauuugcggguuuuguc

SEQ ID NO: 907 - RNA, 23 nt, Homo sapiens
uggaagacuagugauuuuguugu

SEQ ID NO: 908 - RNA, 22 nt, Homo sapiens
aaauuauuguacaucggaugag

SEQ ID NO: 909 - RNA, 21 nt, Homo sapiens
gguuugguccuagccuuucua

SEQ ID NO: 910 - RNA, 21 nt, Homo sapiens
aucacauugccagggauuucc

SEQ ID NO: 911 - RNA, 21 nt, Homo sapiens
aucacauugccagggauuacc

SEQ ID NO: 912 - RNA, 21 nt, Homo sapiens
agggcccccccucaauccugu

SEQ ID NO: 913 - RNA, 21 nt, Homo sapiens
agggcccccccucaauccugu

SEQ ID NO: 914 - RNA, 22 nt, Homo sapiens
ugguuuaccgucccacauacau

SEQ ID NO: 915 - RNA, 22 nt, Homo sapiens
uagcaccaucugaaaucgguua

SEQ ID NO: 916 - RNA, 23 nt, Homo sapiens
uagcaccauuugaaaucaguguu

SEQ ID NO: 917 - RNA, 22 nt, Homo sapiens
uagcaccauuugaaaucgguua

SEQ ID NO: 918 - RNA, 23 nt, Homo sapiens
ucccuguccuccaggagcucacg

SEQ ID NO: 919 - RNA, 22 nt, Homo sapiens
aaaccuguguuguucaagaguc

SEQ ID NO: 920 - RNA, 22 nt, Homo sapiens
ugagguaguagguuguaugguu

SEQ ID NO: 921 - RNA, 22 nt, Homo sapiens
ucugggcaacaaagugagaccu

SEQ ID NO: 922 - RNA, 22 nt, Homo sapiens
acucggcguggcgucggucgug

SEQ ID NO: 923 - RNA, 22 nt, Homo sapiens
cauugcacuugucucggucuga

SEQ ID NO: 924 - RNA, 22 nt, Homo sapiens
ugaaacauacacgggaaaccuc

SEQ ID NO: 925 - RNA, 25 nt, Homo sapiens
gcugggcagggcuucugagcuccuu

SEQ ID NO: 926 - RNA, 22 nt, Homo sapiens
ugcggggcuagggcuaacagca

SEQ ID NO: 927 - RNA, 21 nt, Homo sapiens
uacucaaaaagcugucaguca

SEQ ID NO: 928 - RNA, 20 nt, Homo sapiens
ggggagcuguggaagcagua

SEQ ID NO: 929 - RNA, 24 nt, Homo sapiens
uggggagcugaggcucugggggug

SEQ ID NO: 930 - RNA, 26 nt, Homo sapiens
gaugaugauggcagcaaauucugaaa

SEQ ID NO: 931 - RNA, 21 nt, Homo sapiens
uugcucacuguucuucccuag

SEQ ID NO: 932 - RNA, 20 nt, Homo sapiens
uaaggcacgcggugaaugcc

SEQ ID NO: 933 - RNA, 18 nt, Homo sapiens
aucccaccucugccacca

SEQ ID NO: 934 - RNA, 21 nt, Homo sapiens
aagugaucuaaaggccuacau

SEQ ID NO: 935 - RNA, 22 nt, Homo sapiens
cccugugcccggcccacuucug

SEQ ID NO: 936 - RNA, 21 nt, Homo sapiens
uaaggcacccuucugaguaga

SEQ ID NO: 937 - RNA, 23 nt, Homo sapiens
ggcagguucucacccucucuagg

SEQ ID NO: 938 - RNA, 21 nt, Homo sapiens
aaggcagggcccccgcucccc

SEQ ID NO: 939 - RNA, 22 nt, Homo sapiens
ucggccugaccacccaccccac

SEQ ID NO: 940 - RNA, 21 nt, Homo sapiens
uccuucugcuccgucccccag

SEQ ID NO: 941 - RNA, 20 nt, Homo sapiens
uaaggcacgcggugaaugcc

SEQ ID NO: 942 - RNA, 24 nt, Homo sapiens
ucccugagacccuuuaaccuguga

SEQ ID NO: 943 - RNA, 22 nt, Homo sapiens
ucccugagacccuaacuuguga

SEQ ID NO: 944 - RNA, 23 nt, Homo sapiens
ccucagggcuguagaacagggcu

SEQ ID NO: 945 - RNA, 22 nt, Homo sapiens
uucuggaauucugugugaggga

SEQ ID NO: 946 - RNA, 23 nt, Homo sapiens
ugaguaccgccaugucuguuggg

SEQ ID NO: 947 - RNA, 22 nt, Homo sapiens
cuggcccucucugcccuuccgu

SEQ ID NO: 948 - RNA, 20 nt, Homo sapiens
gugcauugcuguugcauugc

SEQ ID NO: 949 - RNA, 23 nt, Homo sapiens
aaugacacgaucacucccguuga

SEQ ID NO: 950 - RNA, 21 nt, Homo sapiens
uaaggcacccuucugaguaga

SEQ ID NO: 951 - RNA, 22 nt, Homo sapiens
uacucaggagaguggcaaucac

SEQ ID NO: 952 - RNA, 22 nt, Homo sapiens
gagugccuucuuuuggagcguu

SEQ ID NO: 953 - RNA, 18 nt, Homo sapiens
ugcuuccuuucagagggu

SEQ ID NO: 954 - RNA, 22 nt, Homo sapiens
aucuggagguaagaagcacuuu

SEQ ID NO: 955 - RNA, 22 nt, Homo sapiens
aagugccuccuuuuagaguguu

SEQ ID NO: 956 - RNA, 21 nt, Homo sapiens
ccuggaaacacugagguugug

SEQ ID NO: 957 - RNA, 21 nt, Homo sapiens
aaggcagggcccccgcucccc

SEQ ID NO: 958 - RNA, 21 nt, Homo sapiens
uggcagggaggcugggagggg

SEQ ID NO: 959 - RNA, 22 nt, Homo sapiens
acaggugagguucuugggagcc

SEQ ID NO: 960 - RNA, 21 nt, Homo sapiens
gcccuccgcccgugcaccccg

SEQ ID NO: 961 - RNA, 21 nt, Homo sapiens
cucccacaugcaggguuugca

SEQ ID NO: 962 - RNA, 23 nt, Homo sapiens
uaaggugcaucuagugcagauag

SEQ ID NO: 963 - RNA, 21 nt, Homo sapiens
cggcggggacggcgauugguc

SEQ ID NO: 964 - RNA, 22 nt, Homo sapiens
uggcucaguucagcaggaacag

SEQ ID NO: 965 - RNA, 22 nt, Homo sapiens
cauugcacuugucucggucuga

SEQ ID NO: 966 - RNA, 23 nt, Homo sapiens
cacucagccuugagggcacuuuc

SEQ ID NO: 967 - RNA, 25 nt, Homo sapiens
ggcggagggaaguagguccguuggu

SEQ ID NO: 968 - RNA, 22 nt, Homo sapiens
aggcggggcgccgcgggaccgc

SEQ ID NO: 969 - RNA, 22 nt, Homo sapiens
ugcggggcuagggcuaacagca

SEQ ID NO: 970 - RNA, 22 nt, Homo sapiens
cugcccuggcccgagggaccga

SEQ ID NO: 971 - RNA, 22 nt, Homo sapiens
aggcagcgggguguaguggaua

SEQ ID NO: 972 - RNA, 22 nt, Homo sapiens
ugagguaguagguuguauaguu

SEQ ID NO: 973 - RNA, 22 nt, Homo sapiens
ugagguaguagguugugugguu

SEQ ID NO: 974 - RNA, 22 nt, Homo sapiens
ugagguaguagguuguaugguu

SEQ ID NO: 975 - RNA, 22 nt, Homo sapiens
agagguaguagguugcauaguu

SEQ ID NO: 976 - RNA, 22 nt, Homo sapiens
ugagguaggagguuguauaguu

SEQ ID NO: 977 - RNA, 22 nt, Homo sapiens
ugagguaguagauuguauaguu

SEQ ID NO: 978 - RNA, 22 nt, Homo sapiens
ugagguaguaguuuguacaguu

SEQ ID NO: 979 - RNA, 22 nt, Homo sapiens
ugagguaguaguuugugcuguu

SEQ ID NO: 980 - RNA, 22 nt, Homo sapiens
ugugagguuggcauuguugucu

SEQ ID NO: 981 - RNA, 22 nt, Homo sapiens
cagugcaaugaugaaagggcau

SEQ ID NO: 982 - RNA, 23 nt, Homo sapiens
ugaguaccgccaugucuguuggg

SEQ ID NO: 983 - RNA, 23 nt, Homo sapiens
ucccccaggugugauucugauuu

SEQ ID NO: 984 - RNA, 22 nt, Homo sapiens
agaucagaaggugauuguggcu

SEQ ID NO: 985 - RNA, 22 nt, Homo sapiens
ugaaggucuacugugugccagg

SEQ ID NO: 986 - RNA, 22 nt, Homo sapiens
gaaagcgcuucccuuugcugga

SEQ ID NO: 987 - RNA, 22 nt, Homo sapiens
caaagcgcuccccuuuagaggu

SEQ ID NO: 988 - RNA, 23 nt, Homo sapiens
caaagcgcuucucuuuagagugu

SEQ ID NO: 989 - RNA, 21 nt, Homo sapiens
caaagcgcuucccuuuggagc

SEQ ID NO: 990 - RNA, 21 nt, Homo sapiens
gaaagcgcuucucuuuagagg

SEQ ID NO: 991 - RNA, 25 nt, Homo sapiens
aggggugguguugggacagcuccgu

SEQ ID NO: 992 - RNA, 21 nt, Homo sapiens
ugagcuaaaugugugcuggga

SEQ ID NO: 993 - RNA, 24 nt, Homo sapiens
acugggggcuuucgggcucugcgu

SEQ ID NO: 994 - RNA, 21 nt, Homo sapiens
uggaggagaaggaaggugaug

SEQ ID NO: 995 - RNA, 20 nt, Homo sapiens
guagaggagauggcgcaggg

SEQ ID NO: 996 - RNA, 20 nt, Homo sapiens
guagaggagauggcgcaggg

SEQ ID NO: 997 - RNA, 20 nt, Homo sapiens
ggggagcuguggaagcagua

SEQ ID NO: 998 - RNA, 22 nt, Homo sapiens
ugagguaguaaguuguauuguu

SEQ ID NO: 999 - RNA, 22 nt, Homo sapiens
uuuccggcucgcgugggugugu

SEQ ID NO: 1000 - RNA, 22 nt, Homo sapiens
ucggccugaccacccaccccac

SEQ ID NO: 1001 - RNA, 22 nt, Homo sapiens
acaggugagguucuugggagcc

SEQ ID NO: 1002 - RNA, 22 nt, Homo sapiens
acucggcguggcgucggucgug

SEQ ID NO: 1003 - RNA, 21 nt, Homo sapiens
ucgaggagcucacagucuagu

SEQ ID NO: 1004 - RNA, 22 nt, Homo sapiens
acagcaggcacagacaggcagu

SEQ ID NO: 1005 - RNA, 22 nt, Homo sapiens
aaggagcucacagucuauugag

SEQ ID NO: 1006 - RNA, 22 nt, Homo sapiens
uguaaacauccuacacucagcu

SEQ ID NO: 1007 - RNA, 23 nt, Homo sapiens
ugucugcccgcaugccugccucu

SEQ ID NO: 1008 - RNA, 22 nt, Homo sapiens
gccugcugggguggaaccuggu

SEQ ID NO: 1009 - RNA, 22 nt, Homo sapiens
ugauugguacgucuguggguag

SEQ ID NO: 1010 - RNA, 22 nt, Homo sapiens
ugauugguacgucuguggguag

SEQ ID NO: 1011 - RNA, 18 nt, Homo sapiens
uucacagggaggugucau

SEQ ID NO: 1012 - RNA, 22 nt, Homo sapiens
ccucccacacccaaggcuugca

SEQ ID NO: 1013 - RNA, 19 nt, Homo sapiens
aggcugcggaauucaggac

SEQ ID NO: 1014 - RNA, 23 nt, Homo sapiens
aaggagcuuacaaucuagcuggg

SEQ ID NO: 1015 - RNA, 23 nt, Homo sapiens
uggaguccaggaaucugcauuuu

SEQ ID NO: 1016 - RNA, 24 nt, Homo sapiens
uggcccugacugaagaccagcagu

SEQ ID NO: 1017 - RNA, 22 nt, Homo sapiens
ugcccuguggacucaguucugg

SEQ ID NO: 1018 - RNA, 22 nt, Homo sapiens
gcccgcguguggagccaggugu

SEQ ID NO: 1019 - RNA, 22 nt, Homo sapiens
uauggcacugguagaauucacu

SEQ ID NO: 1020 - RNA, 21 nt, Homo sapiens
caucccuugcaugguggaggg

SEQ ID NO: 1021 - RNA, 23 nt, Homo sapiens
caacggaaucccaaaagcagcug

SEQ ID NO: 1022 - RNA, 22 nt, Homo sapiens
gauuagggugcuuagcuguuaa

SEQ ID NO: 1023 - RNA, 22 nt, Homo sapiens
aacacaccugguuaaccucuuu

SEQ ID NO: 1024 - RNA, 23 nt, Homo sapiens
ucccuguccuccaggagcucacg

SEQ ID NO: 1025 - RNA, 22 nt, Homo sapiens
aacacaccuauucaaggauuca

SEQ ID NO: 1026 - RNA, 22 nt, Homo sapiens
caaccuggaggacuccaugcug

SEQ ID NO: 1027 - RNA, 23 nt, Homo sapiens
uacuccagagggcgucacucaug

SEQ ID NO: 1028 - RNA, 22 nt, Homo sapiens
uugugucaauaugcgaugaugu

SEQ ID NO: 1029 - RNA, 22 nt, Homo sapiens
ugugucacucgaugaccacugu

SEQ ID NO: 1030 - RNA, 23 nt, Homo sapiens
aucccuugcaggggcuguugggu

SEQ ID NO: 1031 - RNA, 22 nt, Homo sapiens
cugcccuggcccgagggaccga

SEQ ID NO: 1032 - RNA, 21 nt, Homo sapiens
uccuucugcuccgucccccag

SEQ ID NO: 1033 - RNA, 22 nt, Homo sapiens
uaacagucuacagccauggucg

SEQ ID NO: 1034 - RNA, 21 nt, Homo sapiens
uaacagucuccagucacggcc

SEQ ID NO: 1035 - RNA, 21 nt, Homo sapiens
uugugcuugaucuaaccaugu

SEQ ID NO: 1036 - RNA, 22 nt, Homo sapiens
uggcagugucuuagcugguugu

SEQ ID NO: 1037 - RNA, 22 nt, Homo sapiens
caaucacuaacuccacugccau

SEQ ID NO: 1038 - RNA, 23 nt, Homo sapiens
aggcaguguaguuagcugauugc

SEQ ID NO: 1039 - RNA, 21 nt, Homo sapiens
acuggacuuggagucagaagg

SEQ ID NO: 1040 - RNA, 22 nt, Homo sapiens
uggcaguguauuguuagcuggu

SEQ ID NO: 1041 - RNA, 22 nt, Homo sapiens
aggcaguguauuguuagcuggc

SEQ ID NO: 1042 - RNA, 22 nt, Homo sapiens
caaaaaucucaauuacuuuugc

SEQ ID NO: 1043 - RNA, 22 nt, Homo sapiens
cgaaaacagcaauuaccuuugc

SEQ ID NO: 1044 - RNA, 22 nt, Homo sapiens
uugagaaugaugaaucauuagg

SEQ ID NO: 1045 - RNA, 19 nt, Homo sapiens
aagugugcagggcacuggu

SEQ ID NO: 1046 - RNA, 21 nt, Homo sapiens
cugacuguugccguccuccag

SEQ ID NO: 1047 - RNA, 21 nt, Homo sapiens
gugccagcugcagugggggag

SEQ ID NO: 1048 - RNA, 21 nt, Homo sapiens
ccccaccuccucucuccucag

SEQ ID NO: 1049 - RNA, 18 nt, Homo sapiens
cagggaggugaaugugau

SEQ ID NO: 1050 - RNA, 23 nt, Homo sapiens
ucuggcuccgugucuucacuccc

SEQ ID NO: 1051 - RNA, 22 nt, Homo sapiens
aagcugccaguugaagaacugu

SEQ ID NO: 1052 - RNA, 20 nt, Homo sapiens
ccucugggcccuuccuccag

SEQ ID NO: 1053 - RNA, 22 nt, Homo sapiens
ucucugggccugugucuuaggc

SEQ ID NO: 1054 - RNA, 19 nt, Homo sapiens
ugagcugcuguaccaaaau

SEQ ID NO: 1055 - RNA, 21 nt, Homo sapiens
aaggcagggcccccgcucccc

SEQ ID NO: 1056 - RNA, 22 nt, Homo sapiens
ccucuuccccuugucucuccag

SEQ ID NO: 1057 - RNA, 22 nt, Homo sapiens
agaaggaaauugaauucauuua

SEQ ID NO: 1058 - RNA, 17 nt, Homo sapiens
ucgccuccuccucuccc

SEQ ID NO: 1059 - RNA, 20 nt, Homo sapiens
ccuccugcccuccuugcugu

SEQ ID NO: 1060 - RNA, 22 nt, Homo sapiens
cauugcacuugucucggucuga

SEQ ID NO: 1061 - RNA, 20 nt, Homo sapiens
ccucugggcccuuccuccag

SEQ ID NO: 1062 - RNA, 22 nt, Homo sapiens
ucucugggccugugucuuaggc

SEQ ID NO: 1063 - RNA, 23 nt, Homo sapiens
cacucagccuugagggcacuuuc

SEQ ID NO: 1064 - RNA, 21 nt, Homo sapiens
uggaggagaaggaaggugaug

SEQ ID NO: 1065 - RNA, 20 nt, Homo sapiens
guagaggagauggcgcaggg

SEQ ID NO: 1066 - RNA, 22 nt, Homo sapiens
aggcagcgggguguaguggaua

SEQ ID NO: 1067 - RNA, 22 nt, Homo sapiens
cucggcgcggggcgcgggcucc

SEQ ID NO: 1068 - RNA, 22 nt, Homo sapiens
acagcaggcacagacaggcagu

SEQ ID NO: 1069 - RNA, 22 nt, Homo sapiens
gccugcugggguggaaccuggu

SEQ ID NO: 1070 - RNA, 21 nt, Homo sapiens
uuggccacaauggguuagaac

SEQ ID NO: 1071 - RNA, 23 nt, Homo sapiens
ucugcucauaccccaugguuucu

SEQ ID NO: 1072 - RNA, 22 nt, Homo sapiens
aggcagcgggguguaguggaua

SEQ ID NO: 1073 - RNA, 25 nt, Homo sapiens
cuagugagggacagaaccaggauuc

SEQ ID NO: 1074 - RNA, 22 nt, Homo sapiens
ugugcgcagggagaccucuccc

SEQ ID NO: 1075 - RNA, 22 nt, Homo sapiens
acccgucccguucguccccgga

SEQ ID NO: 1076 - RNA, 21 nt, Homo sapiens
cggcggggacggcgauugguc

SEQ ID NO: 1077 - RNA, 21 nt, Homo sapiens
cggcggggacggcgauugguc

SEQ ID NO: 1078 - RNA, 22 nt, Homo sapiens
cauugcacuugucucggucuga

SEQ ID NO: 1079 - RNA, 21 nt, Homo sapiens
agggcccccccucaauccugu

SEQ ID NO: 1080 - RNA, 22 nt, Homo sapiens
ucaggcucaguccccucccgau

SEQ ID NO: 1081 - RNA, 21 nt, Homo sapiens
aagccugcccggcuccucggg

SEQ ID NO: 1082 - RNA, 22 nt, Homo sapiens
aggcggggcgccgcgggaccgc

SEQ ID NO: 1083 - RNA, 22 nt, Homo sapiens
aggcggggcgccgcgggaccgc

SEQ ID NO: 1084 - RNA, 22 nt, Homo sapiens
ugcggggcuagggcuaacagca

SEQ ID NO: 1085 - RNA, 22 nt, Homo sapiens
ugcggggcuagggcuaacagca

SEQ ID NO: 1086 - RNA, 21 nt, Homo sapiens
uggaggagaaggaaggugaug

SEQ ID NO: 1087 - RNA, 21 nt, Homo sapiens
cgcgggugcuuacugacccuu

SEQ ID NO: 1088 - RNA, 17 nt, Homo sapiens
ucgccuccuccucuccc

SEQ ID NO: 1089 - RNA, 18 nt, Homo sapiens
cagggaggugaaugugau

SEQ ID NO: 1090 - RNA, 22 nt, Homo sapiens
gcccgcguguggagccaggugu

SEQ ID NO: 1091 - RNA, 21 nt, Homo sapiens
cggcggggacggcgauugguc

SEQ ID NO: 1092 - RNA, 22 nt, Homo sapiens
gucccucuccaaaugugucuug

SEQ ID NO: 1093 - RNA, 24 nt, Homo sapiens
uggggagcugaggcucugggggug

SEQ ID NO: 1094 - RNA, 18 nt, Homo sapiens
gcaugggugguucagugg

SEQ ID NO: 1095 - RNA, 23 nt, Homo sapiens
ucuggcuccgugucuucacuccc

SEQ ID NO: 1096 - RNA, 22 nt, Homo sapiens
uagcagcacaucaugguuuaca

SEQ ID NO: 1097 - RNA, 22 nt, Homo sapiens
acagcaggcacagacaggcagu

SEQ ID NO: 1098 - RNA, 22 nt, Homo sapiens
uggcucaguucagcaggaacag

SEQ ID NO: 1099 - RNA, 22 nt, Homo sapiens
uggcaguguauuguuagcuggu

SEQ ID NO: 1100 - RNA, 21 nt, Homo sapiens
cacauuacacggucgaccucu

SEQ ID NO: 1101 - RNA, 21 nt, Homo sapiens
gugcauuguaguugcauugca

SEQ ID NO: 1102 - RNA, 22 nt, Homo sapiens
gccugcugggguggaaccuggu

SEQ ID NO: 1103 - RNA, 21 nt, Homo sapiens
uugaaaggcuauuucuugguc

SEQ ID NO: 1104 - RNA, 21 nt, Homo sapiens
aguuaaugaauccuggaaagu

SEQ ID NO: 1105 - RNA, 19 nt, Homo sapiens
gagccaguuggacaggagc

SEQ ID NO: 1106 - RNA, 19 nt, Homo sapiens
ugucucugcugggguuucu

SEQ ID NO: 1107 - RNA, 22 nt, Homo sapiens
cacuggcuccuuucuggguaga

SEQ ID NO: 1108 - RNA, 22 nt, Homo sapiens
ugugcgcagggagaccucuccc

SEQ ID NO: 1109 - RNA, 19 nt, Homo sapiens
gugaggacucgggaggugg

SEQ ID NO: 1110 - RNA, 24 nt, Homo sapiens
uggcccugacugaagaccagcagu

SEQ ID NO: 1111 - RNA, 21 nt, Homo sapiens
aagugaucuaaaggccuacau

SEQ ID NO: 1112 - RNA, 23 nt, Homo sapiens
cggcccgggcugcugcuguuccu

SEQ ID NO: 1113 - RNA, 20 nt, Homo sapiens
ccccagggcgacgcggcggg

SEQ ID NO: 1114 - RNA, 22 nt, Homo sapiens
uuggggaaacggccgcugagug

SEQ ID NO: 1115 - RNA, 22 nt, Homo sapiens
cauugcacuugucucggucuga

SEQ ID NO: 1116 - RNA, 22 nt, Homo sapiens
cuggcccucucugcccuuccgu

SEQ ID NO: 1117 - RNA, 21 nt, Homo sapiens
uugaaaggcuauuucuugguc

SEQ ID NO: 1118 - RNA, 25 nt, Homo sapiens
ggcggagggaaguagguccguuggu

SEQ ID NO: 1119 - RNA, 22 nt, Homo sapiens
uauugcacucgucccggccucc

SEQ ID NO: 1120 - RNA, 20 nt, Homo sapiens
ucacuguucagacaggcgga

SEQ ID NO: 1121 - RNA, 25 nt, Homo sapiens
ugggaacggguuccggcagacgcug

SEQ ID NO: 1122 - RNA, 22 nt, Homo sapiens
ugagaacugaauuccauggguu

SEQ ID NO: 1123 - RNA, 22 nt, Homo sapiens
ugagaacugaauuccauaggcu

SEQ ID NO: 1124 - RNA, 22 nt, Homo sapiens
uuggggaaacggccgcugagug

SEQ ID NO: 1125 - RNA, 22 nt, Homo sapiens
gaaguuguucgugguggauucg

SEQ ID NO: 1126 - RNA, 22 nt, Homo sapiens
aacuguuugcagaggaaacuga

SEQ ID NO: 1127 - RNA, 22 nt, Homo sapiens
aguggggaacccuuccaugagg

SEQ ID NO: 1128 - RNA, 21 nt, Homo sapiens
ugacaacuauggaugagcucu

SEQ ID NO: 1129 - RNA, 25 nt, Homo sapiens
aggggugguguugggacagcuccgu

SEQ ID NO: 1130 - RNA, 20 nt, Homo sapiens
ggggagcuguggaagcagua

SEQ ID NO: 1131 - RNA, 20 nt, Homo sapiens
uaaagagcccuguggagaca

SEQ ID NO: 1132 - RNA, 22 nt, Homo sapiens
ucucccaacccuuguaccagug

SEQ ID NO: 1133 - RNA, 22 nt, Homo sapiens
uagcagcacauaaugguuugug

SEQ ID NO: 1134 - RNA, 22 nt, Homo sapiens
uagcagcacaucaugguuuaca

SEQ ID NO: 1135 - RNA, 22 nt, Homo sapiens
uagcagcacguaaauauuggcg

SEQ ID NO: 1136 - RNA, 21 nt, Homo sapiens
uagcagcacagaaauauuggc

SEQ ID NO: 1137 - RNA, 24 nt, Homo sapiens
agcagaagcagggagguucuccca

SEQ ID NO: 1138 - RNA, 23 nt, Homo sapiens
gcaaagcacacggccugcagaga

SEQ ID NO: 1139 - RNA, 22 nt, Homo sapiens
cagcagcaauucauguuuugaa

SEQ ID NO: 1140 - RNA, 22 nt, Homo sapiens
aacuguuugcagaggaaacuga

SEQ ID NO: 1141 - RNA, 22 nt, Homo sapiens
gugacaucacauauacggcagc

SEQ ID NO: 1142 - RNA, 21 nt, Homo sapiens
cagcagcacacugugguuugu

SEQ ID NO: 1143 - RNA, 23 nt, Homo sapiens
caaagcgcuucucuuuagagugu

SEQ ID NO: 1144 - RNA, 21 nt, Homo sapiens
cuccagagggaaguacuuucu

SEQ ID NO: 1145 - RNA, 21 nt, Homo sapiens
cuccagagggaugcacuuucu

SEQ ID NO: 1146 - RNA, 21 nt, Homo sapiens
agggggaaaguucuauagucc

SEQ ID NO: 1147 - RNA, 23 nt, Homo sapiens
ugucacucggcucggcccacuac

SEQ ID NO: 1148 - RNA, 21 nt, Homo sapiens
uggcagggaggcugggagggg

SEQ ID NO: 1149 - RNA, 20 nt, Homo sapiens
cgugccacccuuuuccccag

SEQ ID NO: 1150 - RNA, 24 nt, Homo sapiens
uggcccugacugaagaccagcagu

SEQ ID NO: 1151 - RNA, 23 nt, Homo sapiens
cggcccgggcugcugcuguuccu

SEQ ID NO: 1152 - RNA, 22 nt, Homo sapiens
aucuggagguaagaagcacuuu

SEQ ID NO: 1153 - RNA, 25 nt, Homo sapiens
aggggugguguugggacagcuccgu

SEQ ID NO: 1154 - RNA, 20 nt, Homo sapiens
ggggagcuguggaagcagua

SEQ ID NO: 1155 - RNA, 24 nt, Homo sapiens
uggcccugacugaagaccagcagu

SEQ ID NO: 1156 - RNA, 18 nt, Homo sapiens
cagggaggugaaugugau

SEQ ID NO: 1157 - RNA, 22 nt, Homo sapiens
ugcccuguggacucaguucugg

SEQ ID NO: 1158 - RNA, 23 nt, Homo sapiens
ucuggcuccgugucuucacuccc

SEQ ID NO: 1159 - RNA, 22 nt, Homo sapiens
uggagagaaaggcaguuccuga

SEQ ID NO: 1160 - RNA, 21 nt, Homo sapiens
cggcggggacggcgauugguc

SEQ ID NO: 1161 - RNA, 22 nt, Homo sapiens
cgcaggggccgggugcucaccg

SEQ ID NO: 1162 - RNA, 25 nt, Homo sapiens
cccccacaaccgcgcuugacuagcu

SEQ ID NO: 1163 - RNA, 22 nt, Homo sapiens
cuggcccucucugcccuuccgu

SEQ ID NO: 1164 - RNA, 23 nt, Homo sapiens
ucccuguccuccaggagcucacg

SEQ ID NO: 1165 - RNA, 21 nt, Homo sapiens
cggggcagcucaguacaggau

SEQ ID NO: 1166 - RNA, 22 nt, Homo sapiens
aguggggaacccuuccaugagg

SEQ ID NO: 1167 - RNA, 22 nt, Homo sapiens
aggcggggcgccgcgggaccgc

SEQ ID NO: 1168 - RNA, 20 nt, Homo sapiens
ggggagcuguggaagcagua

SEQ ID NO: 1169 - RNA, 24 nt, Homo sapiens
uggggagcugaggcucugggggug

SEQ ID NO: 1170 - RNA, 22 nt, Homo sapiens
ucuucucuguuuuggccaugug

SEQ ID NO: 1171 - RNA, 21 nt, Homo sapiens
aguuaggauuaggucguggaa

SEQ ID NO: 1172 - RNA, 21 nt, Homo sapiens
aagugaucuaaaggccuacau

SEQ ID NO: 1173 - RNA, 22 nt, Homo sapiens
uccuucauuccaccggagucug

SEQ ID NO: 1174 - RNA, 23 nt, Homo sapiens
uuucaagccagggggcguuuuuc

SEQ ID NO: 1175 - RNA, 23 nt, Homo sapiens
cacucagccuugagggcacuuuc

SEQ ID NO: 1176 - RNA, 21 nt, Homo sapiens
ugacaacuauggaugagcucu

SEQ ID NO: 1177 - RNA, 22 nt, Homo sapiens
caaaguuuaagauccuugaagu

SEQ ID NO: 1178 - RNA, 21 nt, Homo sapiens
guggcugcacucacuuccuuc

SEQ ID NO: 1179 - RNA, 22 nt, Homo sapiens
uuuaggauaagcuugacuuuug

SEQ ID NO: 1180 - RNA, 22 nt, Homo sapiens
ugugcgcagggagaccucuccc

SEQ ID NO: 1181 - RNA, 21 nt, Homo sapiens
ccccaccuccucucuccucag

SEQ ID NO: 1182 - RNA, 17 nt, Homo sapiens
gugggggagaggcuguc

SEQ ID NO: 1183 - RNA, 22 nt, Homo sapiens
uacccagagcaugcagugugaa

SEQ ID NO: 1184 - RNA, 22 nt, Homo sapiens
uagcuuaucagacugauguuga

SEQ ID NO: 1185 - RNA, 20 nt, Homo sapiens
ccucugggcccuuccuccag

SEQ ID NO: 1186 - RNA, 22 nt, Homo sapiens
ucucugggccugugucuuaggc

SEQ ID NO: 1187 - RNA, 22 nt, Homo sapiens
uuauaaagcaaugagacugauu

SEQ ID NO: 1188 - RNA, 22 nt, Homo sapiens
agaggcuggccgugaugaauuc

SEQ ID NO: 1189 - RNA, 22 nt, Homo sapiens
gagcuuauucauaaaagugcag

SEQ ID NO: 1190 - RNA, 20 nt, Homo sapiens
ugagcccuguccucccgcag

SEQ ID NO: 1191 - RNA, 22 nt, Homo sapiens
agaaggaaauugaauucauuua

SEQ ID NO: 1192 - RNA, 18 nt, Homo sapiens
aucccaccucugccacca

SEQ ID NO: 1193 - RNA, 22 nt, Homo sapiens
uucuggaauucugugugaggga

SEQ ID NO: 1194 - RNA, 22 nt, Homo sapiens
aagcccuuaccccaaaaagcau

SEQ ID NO: 1195 - RNA, 18 nt, Homo sapiens
cagggaggugaaugugau

SEQ ID NO: 1196 - RNA, 23 nt, Homo sapiens
ucuggcuccgugucuucacuccc

SEQ ID NO: 1197 - RNA, 23 nt, Homo sapiens
ugaguaccgccaugucuguuggg

SEQ ID NO: 1198 - RNA, 20 nt, Homo sapiens
gugcauugcuguugcauugc

SEQ ID NO: 1199 - RNA, 23 nt, Homo sapiens
aaugacacgaucacucccguuga

SEQ ID NO: 1200 - RNA, 22 nt, Homo sapiens
gagugccuucuuuuggagcguu

SEQ ID NO: 1201 - RNA, 22 nt, Homo sapiens
aagugccuccuuuuagaguguu

SEQ ID NO: 1202 - RNA, 23 nt, Homo sapiens
agugccugagggaguaagagccc

SEQ ID NO: 1203 - RNA, 21 nt, Homo sapiens
cccggagccaggaugcagcuc

SEQ ID NO: 1204 - RNA, 22 nt, Homo sapiens
uggagugugacaaugguguuug

SEQ ID NO: 1205 - RNA, 20 nt, Homo sapiens
ugagcccuguccucccgcag

SEQ ID NO: 1206 - RNA, 17 nt, Homo sapiens
ucgccuccuccucuccc

SEQ ID NO: 1207 - RNA, 21 nt, Homo sapiens
ucgaggagcucacagucuagu

SEQ ID NO: 1208 - RNA, 22 nt, Homo sapiens
ucugcccccuccgcugcugcca

SEQ ID NO: 1209 - RNA, 22 nt, Homo sapiens
cauugcacuugucucggucuga

SEQ ID NO: 1210 - RNA, 20 nt, Homo sapiens
acugccccaggugcugcugg

SEQ ID NO: 1211 - RNA, 23 nt, Homo sapiens
ugagcgccucgacgacagagccg

SEQ ID NO: 1212 - RNA, 22 nt, Homo sapiens
uggcagugucuuagcugguugu

SEQ ID NO: 1213 - RNA, 23 nt, Homo sapiens
aggcaguguaguuagcugauugc

SEQ ID NO: 1214 - RNA, 22 nt, Homo sapiens
uggcaguguauuguuagcuggu

SEQ ID NO: 1215 - RNA, 22 nt, Homo sapiens
aggcaguguauuguuagcuggc

SEQ ID NO: 1216 - RNA, 25 nt, Homo sapiens
ggcggagggaaguagguccguuggu

SEQ ID NO: 1217 - RNA, 17 nt, Homo sapiens
ucgccuccuccucuccc

SEQ ID NO: 1218 - RNA, 22 nt, Homo sapiens
cagugcaaugaugaaagggcau

SEQ ID NO: 1219 - RNA, 21 nt, Homo sapiens
cggcggggacggcgauugguc

SEQ ID NO: 1220 - RNA, 22 nt, Homo sapiens
cauugcacuugucucggucuga

SEQ ID NO: 1221 - RNA, 21 nt, Homo sapiens
caaagaggaaggucccauuac

SEQ ID NO: 1222 - RNA, 25 nt, Homo sapiens
ggcggagggaaguagguccguuggu

SEQ ID NO: 1223 - RNA, 22 nt, Homo sapiens
aggcggggcgccgcgggaccgc

SEQ ID NO: 1224 - RNA, 21 nt, Homo sapiens
gcccuccgcccgugcaccccg

SEQ ID NO: 1225 - RNA, 22 nt, Homo sapiens
cauugcacuugucucggucuga

SEQ ID NO: 1226 - RNA, 22 nt, Homo sapiens
cuggcccucucugcccuuccgu

SEQ ID NO: 1227 - RNA, 25 nt, Homo sapiens
ggcggagggaaguagguccguuggu

SEQ ID NO: 1228 - RNA, 23 nt, Homo sapiens
uaagugcuuccauguuuugguga

SEQ ID NO: 1229 - RNA, 23 nt, Homo sapiens
uaagugcuuccauguuuuaguag

SEQ ID NO: 1230 - RNA, 23 nt, Homo sapiens
uaagugcuuccauguuucagugg

SEQ ID NO: 1231 - RNA, 23 nt, Homo sapiens
uaagugcuuccauguuugagugu

SEQ ID NO: 1232 - RNA, 17 nt, Homo sapiens
uaagugcuuccaugcuu

SEQ ID NO: 1233 - RNA, 20 nt, Homo sapiens
gugcauugcuguugcauugc

SEQ ID NO: 1234 - RNA, 23 nt, Homo sapiens
aaagugcugcgacauuugagcgu

SEQ ID NO: 1235 - RNA, 23 nt, Homo sapiens
gaagugcuucgauuuuggggugu

SEQ ID NO: 1236 - RNA, 22 nt, Homo sapiens
gagugccuucuuuuggagcguu

SEQ ID NO: 1237 - RNA, 22 nt, Homo sapiens
aagugccuccuuuuagaguguu

SEQ ID NO: 1238 - RNA, 22 nt, Homo sapiens
aaagugcuucccuuuggacugu

SEQ ID NO: 1239 - RNA, 21 nt, Homo sapiens
aaagugcuuccuuuuagaggg

SEQ ID NO: 1240 - RNA, 22 nt, Homo sapiens
aaagugcuuccuuuuagagggu

SEQ ID NO: 1241 - RNA, 22 nt, Homo sapiens
aaagugcuucucuuuggugggu

SEQ ID NO: 1242 - RNA, 21 nt, Homo sapiens
aaagugcuuccuuuuugaggg

SEQ ID NO: 1243 - RNA, 21 nt, Homo sapiens
caaagaggaaggucccauuac

SEQ ID NO: 1244 - RNA, 22 nt, Homo sapiens
uggagugugacaaugguguuug

SEQ ID NO: 1245 - RNA, 21 nt, Homo sapiens
gcccuccgcccgugcaccccg

SEQ ID NO: 1246 - RNA, 21 nt, Homo sapiens
cggcggggacggcgauugguc

SEQ ID NO: 1247 - RNA, 21 nt, Homo sapiens
ccaguccugugccugccgccu

SEQ ID NO: 1248 - RNA, 23 nt, Homo sapiens
agcuacauugucugcuggguuuc

SEQ ID NO: 1249 - RNA, 22 nt, Homo sapiens
cauugcacuugucucggucuga

SEQ ID NO: 1250 - RNA, 22 nt, Homo sapiens
aaggagcucacagucuauugag

SEQ ID NO: 1251 - RNA, 21 nt, Homo sapiens
aggcaagaugcuggcauagcu

SEQ ID NO: 1252 - RNA, 23 nt, Homo sapiens
ugaggggcagagagcgagacuuu

SEQ ID NO: 1253 - RNA, 23 nt, Homo sapiens
aggaccugcgggacaagauucuu

SEQ ID NO: 1254 - RNA, 25 nt, Homo sapiens
ggcggagggaaguagguccguuggu

SEQ ID NO: 1255 - RNA, 22 nt, Homo sapiens
aggcggggcgccgcgggaccgc

SEQ ID NO: 1256 - RNA, 20 nt, Homo sapiens
accaggaggcugaggccccu

SEQ ID NO: 1257 - RNA, 23 nt, Homo sapiens
aaggagcuuacaaucuagcuggg

SEQ ID NO: 1258 - RNA, 22 nt, Homo sapiens
ugcggggcuagggcuaacagca

SEQ ID NO: 1259 - RNA, 22 nt, Homo sapiens
uggagugugacaaugguguuug

SEQ ID NO: 1260 - RNA, 22 nt, Homo sapiens
ccucuuccccuugucucuccag

SEQ ID NO: 1261 - RNA, 21 nt, Homo sapiens
agugaaugauggguucugacc

SEQ ID NO: 1262 - RNA, 23 nt, Homo sapiens
acuccauuuguuuugaugaugga

SEQ ID NO: 1263 - RNA, 23 nt, Homo sapiens
ucuggcuccgugucuucacuccc

SEQ ID NO: 1264 - RNA, 22 nt, Homo sapiens
caaagaauucuccuuuugggcu

SEQ ID NO: 1265 - RNA, 23 nt, Homo sapiens
uaaggugcaucuagugcagauag

SEQ ID NO: 1266 - RNA, 23 nt, Homo sapiens
ugaggggcagagagcgagacuuu

SEQ ID NO: 1267 - RNA, 22 nt, Homo sapiens
cgucaacacuugcugguuuccu

SEQ ID NO: 1268 - RNA, 23 nt, Homo sapiens
cacucagccuugagggcacuuuc

SEQ ID NO: 1269 - RNA, 22 nt, Homo sapiens
uccgagccugggucucccucuu

SEQ ID NO: 1270 - RNA, 23 nt, Homo sapiens
acuugggcacugaaacaaugucc

SEQ ID NO: 1271 - RNA, 20 nt, Homo sapiens
accaggaggcugaggccccu

SEQ ID NO: 1272 - RNA, 21 nt, Homo sapiens
uggaggagaaggaaggugaug

SEQ ID NO: 1273 - RNA, 20 nt, Homo sapiens
guagaggagauggcgcaggg

SEQ ID NO: 1274 - RNA, 22 nt, Homo sapiens
ugugcgcagggagaccucuccc

SEQ ID NO: 1275 - RNA, 22 nt, Homo sapiens
cugaagcucagagggcucugau

SEQ ID NO: 1276 - RNA, 17 nt, Homo sapiens
ucgccuccuccucuccc

SEQ ID NO: 1277 - RNA, 23 nt, Homo sapiens
ucuggcuccgugucuucacuccc

SEQ ID NO: 1278 - RNA, 22 nt, Homo sapiens
ucucccaacccuuguaccagug

SEQ ID NO: 1279 - RNA, 24 nt, Homo sapiens
uuuggcaaugguagaacucacacu

SEQ ID NO: 1280 - RNA, 21 nt, Homo sapiens
ugacaacuauggaugagcucu

SEQ ID NO: 1281 - RNA, 22 nt, Homo sapiens
ugguuuaccgucccacauacau

SEQ ID NO: 1282 - RNA, 22 nt, Homo sapiens
uggcaguguauuguuagcuggu

SEQ ID NO: 1283 - RNA, 22 nt, Homo sapiens
uguaaacauccuacacucagcu

SEQ ID NO: 1284 - RNA, 22 nt, Homo sapiens
uguaaacauccuacacucagcu

SEQ ID NO: 1285 - RNA, 22 nt, Homo sapiens
cugcccuggcccgagggaccga

SEQ ID NO: 1286 - RNA, 17 nt, Homo sapiens
ucccaccgcugccaccc

SEQ ID NO: 1287 - RNA, 17 nt, Homo sapiens
ucgccuccuccucuccc

SEQ ID NO: 1288 - RNA, 22 nt, Homo sapiens
uuugaggcuacagugagaugug

SEQ ID NO: 1289 - RNA, 23 nt, Homo sapiens
ucuggcuccgugucuucacuccc

SEQ ID NO: 1290 - RNA, 23 nt, Homo sapiens
cggcccgggcugcugcuguuccu

SEQ ID NO: 1291 - RNA, 21 nt, Homo sapiens
cggcggggacggcgauugguc

SEQ ID NO: 1292 - RNA, 21 nt, Homo sapiens
agggcccccccucaauccugu

SEQ ID NO: 1293 - RNA, 22 nt, Homo sapiens
ucaggcucaguccccucccgau

SEQ ID NO: 1294 - RNA, 22 nt, Homo sapiens
uggugggcacagaaucuggacu

SEQ ID NO: 1295 - RNA, 21 nt, Homo sapiens
guggcugcacucacuuccuuc

SEQ ID NO: 1296 - RNA, 22 nt, Homo sapiens
uggugggccgcagaacaugugc

SEQ ID NO: 1297 - RNA, 24 nt, Homo sapiens
ugccugggucucuggccugcgcgu

SEQ ID NO: 1298 - RNA, 22 nt, Homo sapiens
aggcggggcgccgcgggaccgc

SEQ ID NO: 1299 - RNA, 20 nt, Homo sapiens
accaggaggcugaggccccu

SEQ ID NO: 1300 - RNA, 22 nt, Homo sapiens
ugcggggcuagggcuaacagca

SEQ ID NO: 1301 - RNA, 22 nt, Homo sapiens
ucaccagcccuguguucccuag

SEQ ID NO: 1302 - RNA, 20 nt, Homo sapiens
ugagcccuguccucccgcag

SEQ ID NO: 1303 - RNA, 27 nt, Homo sapiens
accuucuuguauaagcacugugcuaaa

SEQ ID NO: 1304 - RNA, 22 nt, Homo sapiens
uucuggaauucugugugaggga

SEQ ID NO: 1305 - RNA, 18 nt, Homo sapiens
cagggaggugaaugugau

SEQ ID NO: 1306 - RNA, 23 nt, Homo sapiens
uauggcuuuuuauuccuauguga

SEQ ID NO: 1307 - RNA, 23 nt, Homo sapiens
acuccauuuguuuugaugaugga

SEQ ID NO: 1308 - RNA, 23 nt, Homo sapiens
agcugguguugugaaucaggccg

SEQ ID NO: 1309 - RNA, 23 nt, Homo sapiens
ucuggcuccgugucuucacuccc

SEQ ID NO: 1310 - RNA, 21 nt, Homo sapiens
caucccuugcaugguggaggg

SEQ ID NO: 1311 - RNA, 22 nt, Homo sapiens
cgucaacacuugcugguuuccu

SEQ ID NO: 1312 - RNA, 23 nt, Homo sapiens
caaagcgcuucucuuuagagugu

SEQ ID NO: 1313 - RNA, 21 nt, Homo sapiens
cuccagagggaaguacuuucu

SEQ ID NO: 1314 - RNA, 21 nt, Homo sapiens
cuccagagggaugcacuuucu

SEQ ID NO: 1315 - RNA, 22 nt, Homo sapiens
ggagaaauuauccuuggugugu

SEQ ID NO: 1316 - RNA, 22 nt, Homo sapiens
gaugagcucauuguaauaugag

SEQ ID NO: 1317 - RNA, 23 nt, Homo sapiens
uaaaucccauggugccuucuccu

SEQ ID NO: 1318 - RNA, 22 nt, Homo sapiens
uccgagccugggucucccucuu

SEQ ID NO: 1319 - RNA, 22 nt, Homo sapiens
aaccagcaccccaacuuuggac

SEQ ID NO: 1320 - RNA, 21 nt, Homo sapiens
aggaggcagcgcucucaggac

SEQ ID NO: 1321 - RNA, 23 nt, Homo sapiens
ucugcucauaccccaugguuucu

SEQ ID NO: 1322 - RNA, 21 nt, Homo sapiens
ccuggaaacacugagguugug

SEQ ID NO: 1323 - RNA, 22 nt, Homo sapiens
uggauuucuuugugaaucacca

SEQ ID NO: 1324 - RNA, 23 nt, Homo sapiens
gcagcagagaauaggacuacguc

SEQ ID NO: 1325 - RNA, 23 nt, Homo sapiens
agcagcauuguacagggcuauga

SEQ ID NO: 1326 - RNA, 23 nt, Homo sapiens
agcagcauuguacagggcuauca

SEQ ID NO: 1327 - RNA, 22 nt, Homo sapiens
agaaggaaauugaauucauuua

SEQ ID NO: 1328 - RNA, 17 nt, Homo sapiens
ucgccuccuccucuccc

SEQ ID NO: 1329 - RNA, 18 nt, Homo sapiens
cagggaggugaaugugau

SEQ ID NO: 1330 - RNA, 22 nt, Homo sapiens
uaacacugucugguaaagaugg

SEQ ID NO: 1331 - RNA, 18 nt, Homo sapiens
ugaggcaguagauugaau

SEQ ID NO: 1332 - RNA, 21 nt, Homo sapiens
cggcggggacggcgauugguc

SEQ ID NO: 1333 - RNA, 22 nt, Homo sapiens
uaacacugucugguaacgaugu

SEQ ID NO: 1334 - RNA, 22 nt, Homo sapiens
uggcagugucuuagcugguugu

SEQ ID NO: 1335 - RNA, 22 nt, Homo sapiens
caaucacuaacuccacugccau

SEQ ID NO: 1336 - RNA, 23 nt, Homo sapiens
aggcaguguaguuagcugauugc

SEQ ID NO: 1337 - RNA, 22 nt, Homo sapiens
uggcaguguauuguuagcuggu

SEQ ID NO: 1338 - RNA, 22 nt, Homo sapiens
aggcaguguauuguuagcuggc

SEQ ID NO: 1339 - RNA, 23 nt, Homo sapiens
ucggggaucaucaugucacgaga

SEQ ID NO: 1340 - RNA, 21 nt, Homo sapiens
aggguaagcugaaccucugau

SEQ ID NO: 1341 - RNA, 21 nt, Homo sapiens
aggaggcagcgcucucaggac

SEQ ID NO: 1342 - RNA, 22 nt, Homo sapiens
aggcggggcgccgcgggaccgc

SEQ ID NO: 1343 - RNA, 23 nt, Homo sapiens
uggugcggagagggcccacagug

SEQ ID NO: 1344 - RNA, 21 nt, Homo sapiens
uggaggagaaggaaggugaug

SEQ ID NO: 1345 - RNA, 22 nt, Homo sapiens
ucuucucuguuuuggccaugug

SEQ ID NO: 1346 - RNA, 21 nt, Homo sapiens
cggcggggacggcgauugguc

SEQ ID NO: 1347 - RNA, 22 nt, Homo sapiens
cauugcacuugucucggucuga

SEQ ID NO: 1348 - RNA, 24 nt, Homo sapiens
agcagaagcagggagguucuccca

SEQ ID NO: 1349 - RNA, 23 nt, Homo sapiens
ugaggggcagagagcgagacuuu

SEQ ID NO: 1350 - RNA, 23 nt, Homo sapiens
ucggggaucaucaugucacgaga

SEQ ID NO: 1351 - RNA, 22 nt, Homo sapiens
aggcggggcgccgcgggaccgc

SEQ ID NO: 1352 - RNA, 22 nt, Homo sapiens
ugcggggcuagggcuaacagca

SEQ ID NO: 1353 - RNA, 22 nt, Homo sapiens
uuuccggcucgcgugggugugu

SEQ ID NO: 1354 - RNA, 24 nt, Homo sapiens
uugcagcugccugggagugacuuc

SEQ ID NO: 1355 - RNA, 21 nt, Homo sapiens
uccugcgcgucccagaugccc

SEQ ID NO: 1356 - RNA, 23 nt, Homo sapiens
ugaguaccgccaugucuguuggg

SEQ ID NO: 1357 - RNA, 23 nt, Homo sapiens
cgcauccccuagggcauuggugu

SEQ ID NO: 1358 - RNA, 23 nt, Homo sapiens
uagcagcgggaacaguucugcag

SEQ ID NO: 1359 - RNA, 19 nt, Homo sapiens
ugagcugcuguaccaaaau

SEQ ID NO: 1360 - RNA, 19 nt, Homo sapiens
aggcacggugucagcaggc

SEQ ID NO: 1361 - RNA, 22 nt, Homo sapiens
acuccagccccacagccucagc

SEQ ID NO: 1362 - RNA, 22 nt, Homo sapiens
aggcagcgggguguaguggaua

SEQ ID NO: 1363 - RNA, 22 nt, Homo sapiens
uggagagaaaggcaguuccuga

SEQ ID NO: 1364 - RNA, 21 nt, Homo sapiens
cggcggggacggcgauugguc

SEQ ID NO: 1365 - RNA, 23 nt, Homo sapiens
ugugcaaaucuaugcaaaacuga

SEQ ID NO: 1366 - RNA, 22 nt, Homo sapiens
aacaauauccuggugcugagug

SEQ ID NO: 1367 - RNA, 22 nt, Homo sapiens
agagguaguagguugcauaguu

SEQ ID NO: 1368 - RNA, 22 nt, Homo sapiens
agaggcuggccgugaugaauuc

SEQ ID NO: 1369 - RNA, 21 nt, Homo sapiens
uugaaaggcuauuucuugguc

SEQ ID NO: 1370 - RNA, 23 nt, Homo sapiens
uacuccagagggcgucacucaug

SEQ ID NO: 1371 - RNA, 19 nt, Homo sapiens
aggcugcggaauucaggac

SEQ ID NO: 1372 - RNA, 22 nt, Homo sapiens
uccgagccugggucucccucuu

SEQ ID NO: 1373 - RNA, 22 nt, Homo sapiens
aggcggggcgccgcgggaccgc

SEQ ID NO: 1374 - RNA, 22 nt, Homo sapiens
ugcggggcuagggcuaacagca

SEQ ID NO: 1375 - RNA, 21 nt, Homo sapiens
cgcgggugcuuacugacccuu

SEQ ID NO: 1376 - RNA, 20 nt, Homo sapiens
ggggagcuguggaagcagua

SEQ ID NO: 1377 - RNA, 20 nt, Homo sapiens
uaaagagcccuguggagaca

SEQ ID NO: 1378 - RNA, 19 nt, Homo sapiens
uggauuuuuggaucaggga

SEQ ID NO: 1379 - RNA, 22 nt, Homo sapiens
caaaaaucucaauuacuuuugc

SEQ ID NO: 1380 - RNA, 22 nt, Homo sapiens
uagcaaaaacugcaguuacuuu

SEQ ID NO: 1381 - RNA, 21 nt, Homo sapiens
uaauuuuauguauaagcuagu

SEQ ID NO: 1382 - RNA, 23 nt, Homo sapiens
uauucauuuauccccagccuaca

SEQ ID NO: 1383 - RNA, 21 nt, Homo sapiens
uccuucugcuccgucccccag

SEQ ID NO: 1384 - RNA, 22 nt, Homo sapiens
aacuggaucaauuauaggagug

SEQ ID NO: 1385 - RNA, 23 nt, Homo sapiens
uuaaugcuaaucgugauaggggu

SEQ ID NO: 1386 - RNA, 22 nt, Homo sapiens
uggagagaaaggcaguuccuga

SEQ ID NO: 1387 - RNA, 23 nt, Homo sapiens
cccaguguucagacuaccuguuc

SEQ ID NO: 1388 - RNA, 23 nt, Homo sapiens
cccaguguuuagacuaucuguuc

SEQ ID NO: 1389 - RNA, 22 nt, Homo sapiens
uuggggaaacggccgcugagug

SEQ ID NO: 1390 - RNA, 24 nt, Homo sapiens
agcagaagcagggagguucuccca

SEQ ID NO: 1391 - RNA, 22 nt, Homo sapiens
uucacaaggaggugucauuuau

SEQ ID NO: 1392 - RNA, 22 nt, Homo sapiens
caaaaaccacaguuucuuuugc

SEQ ID NO: 1393 - RNA, 20 nt, Homo sapiens
aaaguagcuguaccauuugc

SEQ ID NO: 1394 - RNA, 20 nt, Homo sapiens
aggguguuucucucaucucu

SEQ ID NO: 1395 - RNA, 21 nt, Homo sapiens
augauccaggaaccugccucu

SEQ ID NO: 1396 - RNA, 23 nt, Homo sapiens
gcagcagagaauaggacuacguc

SEQ ID NO: 1397 - RNA, 21 nt, Homo sapiens
cuuuuugcggucugggcuugc

SEQ ID NO: 1398 - RNA, 23 nt, Homo sapiens
ugaguaccgccaugucuguuggg

SEQ ID NO: 1399 - RNA, 22 nt, Homo sapiens
uguaacagcaacuccaugugga

SEQ ID NO: 1400 - RNA, 22 nt, Homo sapiens
ucaggccaggcacaguggcuca

SEQ ID NO: 1401 - RNA, 20 nt, Homo sapiens
aaaguagcuguaccauuugc

SEQ ID NO: 1402 - RNA, 19 nt, Homo sapiens
ugucucugcugggguuucu

SEQ ID NO: 1403 - RNA, 20 nt, Homo sapiens
accaggaggcugaggccccu

SEQ ID NO: 1404 - RNA, 24 nt, Homo sapiens
agccugauuaaacacaugcucuga

SEQ ID NO: 1405 - RNA, 20 nt, Homo sapiens
ucacaccugccucgcccccc

SEQ ID NO: 1406 - RNA, 22 nt, Homo sapiens
ugugagguuggcauuguugucu

SEQ ID NO: 1407 - RNA, 23 nt, Homo sapiens
uauggcuuuuuauuccuauguga

SEQ ID NO: 1408 - RNA, 22 nt, Homo sapiens
aagcugccaguugaagaacugu

SEQ ID NO: 1409 - RNA, 24 nt, Homo sapiens
agcagaagcagggagguucuccca

SEQ ID NO: 1410 - RNA, 23 nt, Homo sapiens
ucucacacagaaaucgcacccgu

SEQ ID NO: 1411 - RNA, 22 nt, Homo sapiens
gugacaucacauauacggcagc

SEQ ID NO: 1412 - RNA, 18 nt, Homo sapiens
uucacagggaggugucau

SEQ ID NO: 1413 - RNA, 22 nt, Homo sapiens
aaaaguacuugcggauuuugcu

SEQ ID NO: 1414 - RNA, 19 nt, Homo sapiens
ugagcugcuguaccaaaau

SEQ ID NO: 1415 - RNA, 23 nt, Homo sapiens
gcagcagagaauaggacuacguc

SEQ ID NO: 1416 - RNA, 26 nt, Homo sapiens
aaguaguugguuuguaugagaugguu

SEQ ID NO: 1417 - RNA, 21 nt, Homo sapiens
agagaagaagaucagccugca

SEQ ID NO: 1418 - RNA, 21 nt, Homo sapiens
ugagaugaagcacuguagcuc

SEQ ID NO: 1419 - RNA, 22 nt, Homo sapiens
cuccuauaugaugccuuucuuc

SEQ ID NO: 1420 - RNA, 22 nt, Homo sapiens
gcugacuccuaguccagggcuc

SEQ ID NO: 1421 - RNA, 22 nt, Homo sapiens
caaucacuaacuccacugccau

SEQ ID NO: 1422 - RNA, 21 nt, Homo sapiens
acuggacuuggagucagaagg

SEQ ID NO: 1423 - RNA, 22 nt, Homo sapiens
ucuucucuguuuuggccaugug

SEQ ID NO: 1424 - RNA, 23 nt, Homo sapiens
cggcccgggcugcugcuguuccu

SEQ ID NO: 1425 - RNA, 18 nt, Homo sapiens
ugcuuccuuucagagggu

SEQ ID NO: 1426 - RNA, 22 nt, Homo sapiens
aucuggagguaagaagcacuuu

SEQ ID NO: 1427 - RNA, 22 nt, Homo sapiens
aggcggggcgccgcgggaccgc

SEQ ID NO: 1428 - RNA, 23 nt, Homo sapiens
aggaagcccuggaggggcuggag

SEQ ID NO: 1429 - RNA, 22 nt, Homo sapiens
ugcggggcuagggcuaacagca

SEQ ID NO: 1430 - RNA, 22 nt, Homo sapiens
auccgcgcucugacucucugcc

SEQ ID NO: 1431 - RNA, 24 nt, Homo sapiens
uggggagcugaggcucugggggug

SEQ ID NO: 1432 - RNA, 22 nt, Homo sapiens
ccucuuccccuugucucuccag

SEQ ID NO: 1433 - RNA, 17 nt, Homo sapiens
gugggggagaggcuguc

SEQ ID NO: 1434 - RNA, 23 nt, Homo sapiens
caacggaaucccaaaagcagcug

SEQ ID NO: 1435 - RNA, 22 nt, Homo sapiens
uacccagagcaugcagugugaa

SEQ ID NO: 1436 - RNA, 21 nt, Homo sapiens
uucacaguggcuaaguuccgc

SEQ ID NO: 1437 - RNA, 21 nt, Homo sapiens
uaaagugcugacagugcagau

SEQ ID NO: 1438 - RNA, 23 nt, Homo sapiens
cagugcaaugauauugucaaagc

SEQ ID NO: 1439 - RNA, 23 nt, Homo sapiens
ucaagagcaauaacgaaaaaugu

SEQ ID NO: 1440 - RNA, 21 nt, Homo sapiens
aggguaagcugaaccucugau

SEQ ID NO: 1441 - RNA, 21 nt, Homo sapiens
agggggaaaguucuauagucc

SEQ ID NO: 1442 - RNA, 20 nt, Homo sapiens
ggggagcuguggaagcagua

SEQ ID NO: 1443 - RNA, 21 nt, Homo sapiens
uccuucugcuccgucccccag

SEQ ID NO: 1444 - RNA, 17 nt, Homo sapiens
ucccaccgcugccaccc

SEQ ID NO: 1445 - RNA, 23 nt, Homo sapiens
ucuggcuccgugucuucacuccc

SEQ ID NO: 1446 - RNA, 22 nt, Homo sapiens
uggagagaaaggcaguuccuga

SEQ ID NO: 1447 - RNA, 21 nt, Homo sapiens
cggcggggacggcgauugguc

SEQ ID NO: 1448 - RNA, 22 nt, Homo sapiens
aagcugccaguugaagaacugu

SEQ ID NO: 1449 - RNA, 22 nt, Homo sapiens
aaggagcucacagucuauugag

SEQ ID NO: 1450 - RNA, 23 nt, Homo sapiens
ugaggggcagagagcgagacuuu

SEQ ID NO: 1451 - RNA, 23 nt, Homo sapiens
uaauccuugcuaccugggugaga

SEQ ID NO: 1452 - RNA, 22 nt, Homo sapiens
aggcggggcgccgcgggaccgc

SEQ ID NO: 1453 - RNA, 23 nt, Homo sapiens
aaggagcuuacaaucuagcuggg

SEQ ID NO: 1454 - RNA, 22 nt, Homo sapiens
ugcggggcuagggcuaacagca

SEQ ID NO: 1455 - RNA, 23 nt, Homo sapiens
cgggucggaguuagcucaagcgg

SEQ ID NO: 1456 - RNA, 20 nt, Homo sapiens
ggggagcuguggaagcagua

SEQ ID NO: 1457 - RNA, 23 nt, Homo sapiens
cacccggcugugugcacaugugc

SEQ ID NO: 1458 - RNA, 23 nt, Homo sapiens
agcagcauuguacagggcuauga

SEQ ID NO: 1459 - RNA, 23 nt, Homo sapiens
agcagcauuguacagggcuauca

SEQ ID NO: 1460 - RNA, 17 nt, Homo sapiens
gugggggagaggcuguc

SEQ ID NO: 1461 - RNA, 22 nt, Homo sapiens
uagcagcacauaaugguuugug

SEQ ID NO: 1462 - RNA, 22 nt, Homo sapiens
uagcagcacaucaugguuuaca

SEQ ID NO: 1463 - RNA, 22 nt, Homo sapiens
uagcagcacguaaauauuggcg

SEQ ID NO: 1464 - RNA, 21 nt, Homo sapiens
uagcagcacagaaauauuggc

SEQ ID NO: 1465 - RNA, 22 nt, Homo sapiens
uuauaauacaaccugauaagug

SEQ ID NO: 1466 - RNA, 22 nt, Homo sapiens
cagcagcaauucauguuuugaa

SEQ ID NO: 1467 - RNA, 22 nt, Homo sapiens
agaggcuggccgugaugaauuc

SEQ ID NO: 1468 - RNA, 21 nt, Homo sapiens
cagcagcacacugugguuugu

SEQ ID NO: 1469 - RNA, 23 nt, Homo sapiens
uucauuugguauaaaccgcgauu

SEQ ID NO: 1470 - RNA, 22 nt, Homo sapiens
ugagaaccacgucugcucugag

SEQ ID NO: 1471 - RNA, 21 nt, Homo sapiens
guggcugcacucacuuccuuc

SEQ ID NO: 1472 - RNA, 20 nt, Homo sapiens
ggggagcuguggaagcagua

SEQ ID NO: 1473 - RNA, 22 nt, Homo sapiens
ugugcgcagggagaccucuccc

SEQ ID NO: 1474 - RNA, 20 nt, Homo sapiens
gugucugggcggacagcugc

SEQ ID NO: 1475 - RNA, 17 nt, Homo sapiens
ucccaccgcugccaccc

SEQ ID NO: 1476 - RNA, 22 nt, Homo sapiens
uagcagcacauaaugguuugug

SEQ ID NO: 1477 - RNA, 22 nt, Homo sapiens
uagcagcacaucaugguuuaca

SEQ ID NO: 1478 - RNA, 22 nt, Homo sapiens
uagcagcacguaaauauuggcg

SEQ ID NO: 1479 - RNA, 22 nt, Homo sapiens
uggagagaaaggcaguuccuga

SEQ ID NO: 1480 - RNA, 21 nt, Homo sapiens
uagcagcacagaaauauuggc

SEQ ID NO: 1481 - RNA, 23 nt, Homo sapiens
cccaguguucagacuaccuguuc

SEQ ID NO: 1482 - RNA, 23 nt, Homo sapiens
cccaguguuuagacuaucuguuc

SEQ ID NO: 1483 - RNA, 22 nt, Homo sapiens
acagcaggcacagacaggcagu

SEQ ID NO: 1484 - RNA, 24 nt, Homo sapiens
agcagaagcagggagguucuccca

SEQ ID NO: 1485 - RNA, 22 nt, Homo sapiens
gccugcugggguggaaccuggu

SEQ ID NO: 1486 - RNA, 23 nt, Homo sapiens
ugaggggcagagagcgagacuuu

SEQ ID NO: 1487 - RNA, 22 nt, Homo sapiens
cagcagcaauucauguuuugaa

SEQ ID NO: 1488 - RNA, 21 nt, Homo sapiens
cagcagcacacugugguuugu

SEQ ID NO: 1489 - RNA, 22 nt, Homo sapiens
cgucaacacuugcugguuuccu

SEQ ID NO: 1490 - RNA, 24 nt, Homo sapiens
ugccugggucucuggccugcgcgu

SEQ ID NO: 1491 - RNA, 22 nt, Homo sapiens
gguggcccggccgugccugagg

SEQ ID NO: 1492 - RNA, 20 nt, Homo sapiens
ggggagcuguggaagcagua

SEQ ID NO: 1493 - RNA, 22 nt, Homo sapiens
ucuucucuguuuuggccaugug

SEQ ID NO: 1494 - RNA, 22 nt, Homo sapiens
ucguaccgugaguaauaaugcg

SEQ ID NO: 1495 - RNA, 24 nt, Homo sapiens
uuuggcaaugguagaacucacacu

SEQ ID NO: 1496 - RNA, 23 nt, Homo sapiens
uaagugcuuccauguuuuaguag

SEQ ID NO: 1497 - RNA, 23 nt, Homo sapiens
uaagugcuuccauguuugagugu

SEQ ID NO: 1498 - RNA, 21 nt, Homo sapiens
aggcaagaugcuggcauagcu

SEQ ID NO: 1499 - RNA, 20 nt, Homo sapiens
cuacaaagggaagcccuuuc

SEQ ID NO: 1500 - RNA, 22 nt, Homo sapiens
cuacaaagggaagcacuuucuc

SEQ ID NO: 1501 - RNA, 22 nt, Homo sapiens
gugagucucuaagaaaagagga

SEQ ID NO: 1502 - RNA, 21 nt, Homo sapiens
guggcugcacucacuuccuuc

SEQ ID NO: 1503 - RNA, 21 nt, Homo sapiens
aauauuauacagucaaccucu

SEQ ID NO: 1504 - RNA, 23 nt, Homo sapiens
aaggagcuuacaaucuagcuggg

SEQ ID NO: 1505 - RNA, 22 nt, Homo sapiens
aaauuauuguacaucggaugag

SEQ ID NO: 1506 - RNA, 22 nt, Homo sapiens
uggagugugacaaugguguuug

SEQ ID NO: 1507 - RNA, 21 nt, Homo sapiens
cggcggggacggcgauugguc

SEQ ID NO: 1508 - RNA, 23 nt, Homo sapiens
ugaguaccgccaugucuguuggg

SEQ ID NO: 1509 - RNA, 21 nt, Homo sapiens
gguuugguccuagccuuucua

SEQ ID NO: 1510 - RNA, 22 nt, Homo sapiens
cucccacugcuucacuugacua

SEQ ID NO: 1511 - RNA, 21 nt, Homo sapiens
ugacaacuauggaugagcucu

SEQ ID NO: 1512 - RNA, 21 nt, Homo sapiens
agggcccccccucaauccugu

SEQ ID NO: 1513 - RNA, 22 nt, Homo sapiens
cuggcccucucugcccuuccgu

SEQ ID NO: 1514 - RNA, 23 nt, Homo sapiens
ucccccaggugugauucugauuu

SEQ ID NO: 1515 - RNA, 21 nt, Homo sapiens
ucacuccucuccucccgucuu

SEQ ID NO: 1516 - RNA, 19 nt, Homo sapiens
agcugucugaaaaugucuu

SEQ ID NO: 1517 - RNA, 24 nt, Homo sapiens
acugggggcuuucgggcucugcgu

SEQ ID NO: 1518 - RNA, 22 nt, Homo sapiens
aggcggggcgccgcgggaccgc

SEQ ID NO: 1519 - RNA, 23 nt, Homo sapiens
ugucacucggcucggcccacuac

SEQ ID NO: 1520 - RNA, 23 nt, Homo sapiens
aaggagcuuacaaucuagcuggg

SEQ ID NO: 1521 - RNA, 17 nt, Homo sapiens
gugggggagaggcuguc

SEQ ID NO: 1522 - RNA, 21 nt, Homo sapiens
gcccuccgcccgugcaccccg

SEQ ID NO: 1523 - RNA, 22 nt, Homo sapiens
ucagugcaucacagaacuuugu

SEQ ID NO: 1524 - RNA, 22 nt, Homo sapiens
acacagggcuguugugaagacu

SEQ ID NO: 1525 - RNA, 22 nt, Homo sapiens
aguggggaacccuuccaugagg

SEQ ID NO: 1526 - RNA, 22 nt, Homo sapiens
aauccuuugucccugggugaga

SEQ ID NO: 1527 - RNA, 18 nt, Homo sapiens
uucacagggaggugucau

SEQ ID NO: 1528 - RNA, 22 nt, Homo sapiens
uacgucaucguugucaucguca

SEQ ID NO: 1529 - RNA, 25 nt, Homo sapiens
aggggugguguugggacagcuccgu

SEQ ID NO: 1530 - RNA, 22 nt, Homo sapiens
agucauuggaggguuugagcag

SEQ ID NO: 1531 - RNA, 25 nt, Homo sapiens
ggcggagggaaguagguccguuggu

SEQ ID NO: 1532 - RNA, 20 nt, Homo sapiens
ggggagcuguggaagcagua

SEQ ID NO: 1533 - RNA, 22 nt, Homo sapiens
uuuccggcucgcgugggugugu

SEQ ID NO: 1534 - RNA, 21 nt, Homo sapiens
ccgucgccgccacccgagccg

SEQ ID NO: 1535 - RNA, 22 nt, Homo sapiens
acccgucccguucguccccgga

SEQ ID NO: 1536 - RNA, 22 nt, Homo sapiens
augggugaauuuguagaaggau

SEQ ID NO: 1537 - RNA, 21 nt, Homo sapiens
gcccuccgcccgugcaccccg

SEQ ID NO: 1538 - RNA, 21 nt, Homo sapiens
uccugcgcgucccagaugccc

SEQ ID NO: 1539 - RNA, 21 nt, Homo sapiens
cggcggggacggcgauugguc

SEQ ID NO: 1540 - RNA, 22 nt, Homo sapiens
cccugugcccggcccacuucug

SEQ ID NO: 1541 - RNA, 22 nt, Homo sapiens
cauugcacuugucucggucuga

SEQ ID NO: 1542 - RNA, 23 nt, Homo sapiens
cgcauccccuagggcauuggugu

SEQ ID NO: 1543 - RNA, 23 nt, Homo sapiens
ugaggggcagagagcgagacuuu

SEQ ID NO: 1544 - RNA, 22 nt, Homo sapiens
uccuguacugagcugccccgag

SEQ ID NO: 1545 - RNA, 23 nt, Homo sapiens
ucggggaucaucaugucacgaga

SEQ ID NO: 1546 - RNA, 25 nt, Homo sapiens
aggggugguguugggacagcuccgu

SEQ ID NO: 1547 - RNA, 22 nt, Homo sapiens
aggcggggcgccgcgggaccgc

SEQ ID NO: 1548 - RNA, 23 nt, Homo sapiens
aggaagcccuggaggggcuggag

SEQ ID NO: 1549 - RNA, 22 nt, Homo sapiens
ugcggggcuagggcuaacagca

SEQ ID NO: 1550 - RNA, 20 nt, Homo sapiens
ggggagcuguggaagcagua

SEQ ID NO: 1551 - RNA, 22 nt, Homo sapiens
uauugcacucgucccggccucc

SEQ ID NO: 1552 - RNA, 21 nt, Homo sapiens
cggcggggacggcgauugguc

SEQ ID NO: 1553 - RNA, 23 nt, Homo sapiens
ugaggggcagagagcgagacuuu

SEQ ID NO: 1554 - RNA, 22 nt, Homo sapiens
agaggcuggccgugaugaauuc

SEQ ID NO: 1555 - RNA, 22 nt, Homo sapiens
aggcggggcgccgcgggaccgc

SEQ ID NO: 1556 - RNA, 22 nt, Homo sapiens
ugcggggcuagggcuaacagca

SEQ ID NO: 1557 - RNA, 21 nt, Homo sapiens
agagaagaagaucagccugca

SEQ ID NO: 1558 - RNA, 17 nt, Homo sapiens
gugggggagaggcuguc

SEQ ID NO: 1559 - RNA, 23 nt, Homo sapiens
ucuggcuccgugucuucacuccc

SEQ ID NO: 1560 - RNA, 23 nt, Homo sapiens
uaaggugcaucuagugcagauag

SEQ ID NO: 1561 - RNA, 22 nt, Homo sapiens
gguccagaggggagauagguuc

SEQ ID NO: 1562 - RNA, 22 nt, Homo sapiens
aagcugccaguugaagaacugu

SEQ ID NO: 1563 - RNA, 20 nt, Homo sapiens
ccucugggcccuuccuccag

SEQ ID NO: 1564 - RNA, 22 nt, Homo sapiens
ucucugggccugugucuuaggc

SEQ ID NO: 1565 - RNA, 23 nt, Homo sapiens
ucccccaggugugauucugauuu

SEQ ID NO: 1566 - RNA, 22 nt, Homo sapiens
uaaugccccuaaaaauccuuau

SEQ ID NO: 1567 - RNA, 23 nt, Homo sapiens
caaagcgcuucucuuuagagugu

SEQ ID NO: 1568 - RNA, 21 nt, Homo sapiens
cuccagagggaaguacuuucu

SEQ ID NO: 1569 - RNA, 21 nt, Homo sapiens
cuccagagggaugcacuuucu

SEQ ID NO: 1570 - RNA, 19 nt, Homo sapiens
ugagcugcuguaccaaaau

SEQ ID NO: 1571 - RNA, 24 nt, Homo sapiens
acugggggcuuucgggcucugcgu

SEQ ID NO: 1572 - RNA, 22 nt, Homo sapiens
acuccagccccacagccucagc

SEQ ID NO: 1573 - RNA, 20 nt, Homo sapiens
ggggagcuguggaagcagua

SEQ ID NO: 1574 - RNA, 22 nt, Homo sapiens
ucuucucuguuuuggccaugug

SEQ ID NO: 1575 - RNA, 18 nt, Homo sapiens
ucagcuggcccucauuuc

SEQ ID NO: 1576 - RNA, 18 nt, Homo sapiens
ucagcuggcccucauuuc

SEQ ID NO: 1577 - RNA, 21 nt, Homo sapiens
uggcagggaggcugggagggg

SEQ ID NO: 1578 - RNA, 20 nt, Homo sapiens
gugucugggcggacagcugc

SEQ ID NO: 1579 - RNA, 18 nt, Homo sapiens
ugaggcaguagauugaau

SEQ ID NO: 1580 - RNA, 22 nt, Homo sapiens
cgcaggggccgggugcucaccg

SEQ ID NO: 1581 - RNA, 22 nt, Homo sapiens
acagcaggcacagacaggcagu

SEQ ID NO: 1582 - RNA, 22 nt, Homo sapiens
gccugcugggguggaaccuggu

SEQ ID NO: 1583 - RNA, 21 nt, Homo sapiens
guggcugcacucacuuccuuc

SEQ ID NO: 1584 - RNA, 23 nt, Homo sapiens
ugucacucggcucggcccacuac

SEQ ID NO: 1585 - RNA, 22 nt, Homo sapiens
ugagaccucuggguucugagcu

SEQ ID NO: 1586 - RNA, 21 nt, Homo sapiens
aaggcagggcccccgcucccc

SEQ ID NO: 1587 - RNA, 22 nt, Homo sapiens
cuccugagccauucugagccuc

SEQ ID NO: 1588 - RNA, 21 nt, Homo sapiens
aagugaucuaaaggccuacau

SEQ ID NO: 1589 - RNA, 23 nt, Homo sapiens
uaaggugcaucuagugcagauag

SEQ ID NO: 1590 - RNA, 23 nt, Homo sapiens
ugaguaccgccaugucuguuggg

SEQ ID NO: 1591 - RNA, 22 nt, Homo sapiens
cccugugcccggcccacuucug

SEQ ID NO: 1592 - RNA, 22 nt, Homo sapiens
aacuggccuacaaagucccagu

SEQ ID NO: 1593 - RNA, 22 nt, Homo sapiens
aacuggcccucaaagucccgcu

SEQ ID NO: 1594 - RNA, 22 nt, Homo sapiens
aaaucucugcaggcaaauguga

SEQ ID NO: 1595 - RNA, 22 nt, Homo sapiens
aagcugccaguugaagaacugu

SEQ ID NO: 1596 - RNA, 22 nt, Homo sapiens
uggcucaguucagcaggaacag

SEQ ID NO: 1597 - RNA, 22 nt, Homo sapiens
ucaggcucaguccccucccgau

SEQ ID NO: 1598 - RNA, 22 nt, Homo sapiens
ugauugguacgucuguggguag

SEQ ID NO: 1599 - RNA, 22 nt, Homo sapiens
ugcaacuuaccugagucauuga

SEQ ID NO: 1600 - RNA, 20 nt, Homo sapiens
ggggagcuguggaagcagua

SEQ ID NO: 1601 - RNA, 22 nt, Homo sapiens
acccgucccguucguccccgga

SEQ ID NO: 1602 - RNA, 24 nt, Homo sapiens
uggcccugacugaagaccagcagu

SEQ ID NO: 1603 - RNA, 22 nt, Homo sapiens
ugugagguuggcauuguugucu

SEQ ID NO: 1604 - RNA, 22 nt, Homo sapiens
uacccagagcaugcagugugaa

SEQ ID NO: 1605 - RNA, 22 nt, Homo sapiens
uagcaccaucugaaaucgguua

SEQ ID NO: 1606 - RNA, 20 nt, Homo sapiens
ccucugggcccuuccuccag

SEQ ID NO: 1607 - RNA, 22 nt, Homo sapiens
ucucugggccugugucuuaggc

SEQ ID NO: 1608 - RNA, 22 nt, Homo sapiens
uggcagugucuuagcugguugu

SEQ ID NO: 1609 - RNA, 22 nt, Homo sapiens
gaauguugcucggugaaccccu

SEQ ID NO: 1610 - RNA, 22 nt, Homo sapiens
aguggggaacccuuccaugagg

SEQ ID NO: 1611 - RNA, 21 nt, Homo sapiens
aguuaaugaauccuggaaagu

SEQ ID NO: 1612 - RNA, 21 nt, Homo sapiens
guguugaaacaaucucuacug

SEQ ID NO: 1613 - RNA, 22 nt, Homo sapiens
uauugcacucgucccggccucc

SEQ ID NO: 1614 - RNA, 21 nt, Homo sapiens
uggcagggaggcugggagggg

SEQ ID NO: 1615 - RNA, 25 nt, Homo sapiens
gggcgacaaagcaagacucuuucuu

SEQ ID NO: 1616 - RNA, 18 nt, Homo sapiens
cagggaggugaaugugau

SEQ ID NO: 1617 - RNA, 20 nt, Homo sapiens
guguguggaaaugcuucugc

SEQ ID NO: 1618 - RNA, 21 nt, Homo sapiens
gcccuccgcccgugcaccccg

SEQ ID NO: 1619 - RNA, 22 nt, Homo sapiens
ucucccaacccuuguaccagug

SEQ ID NO: 1620 - RNA, 21 nt, Homo sapiens
cggcggggacggcgauugguc

SEQ ID NO: 1621 - RNA, 22 nt, Homo sapiens
uagguaguuuccuguuguuggg

SEQ ID NO: 1622 - RNA, 25 nt, Homo sapiens
cccccacaaccgcgcuugacuagcu

SEQ ID NO: 1623 - RNA, 21 nt, Homo sapiens
uaaagugcugacagugcagau

SEQ ID NO: 1624 - RNA, 23 nt, Homo sapiens
cagugcaaugauauugucaaagc

SEQ ID NO: 1625 - RNA, 22 nt, Homo sapiens
aacacaccugguuaaccucuuu

SEQ ID NO: 1626 - RNA, 22 nt, Homo sapiens
aacacaccuauucaaggauuca

SEQ ID NO: 1627 - RNA, 23 nt, Homo sapiens
ucggggaucaucaugucacgaga

SEQ ID NO: 1628 - RNA, 21 nt, Homo sapiens
cacaagguauugguauuaccu

SEQ ID NO: 1629 - RNA, 22 nt, Homo sapiens
aggcggggcgccgcgggaccgc

SEQ ID NO: 1630 - RNA, 23 nt, Homo sapiens
uggaagacuagugauuuuguugu

SEQ ID NO: 1631 - RNA, 22 nt, Homo sapiens
caaagugccucccuuuagagug

SEQ ID NO: 1632 - RNA, 22 nt, Homo sapiens
uacguagauauauauguauuuu

SEQ ID NO: 1633 - RNA, 18 nt, Homo sapiens
cagggaggugaaugugau

SEQ ID NO: 1634 - RNA, 23 nt, Homo sapiens
ucuggcuccgugucuucacuccc

SEQ ID NO: 1635 - RNA, 21 nt, Homo sapiens
gguuugguccuagccuuucua

SEQ ID NO: 1636 - RNA, 22 nt, Homo sapiens
gaggguuggguggaggcucucc

SEQ ID NO: 1637 - RNA, 22 nt, Homo sapiens
uauguaauaugguccacaucuu

SEQ ID NO: 1638 - RNA, 21 nt, Homo sapiens
ucacuccucuccucccgucuu

SEQ ID NO: 1639 - RNA, 19 nt, Homo sapiens
agguugacauacguuuccc

SEQ ID NO: 1640 - RNA, 22 nt, Homo sapiens
gucccucuccaaaugugucuug

SEQ ID NO: 1641 - RNA, 21 nt, Homo sapiens
cugacuguugccguccuccag

SEQ ID NO: 1642 - RNA, 22 nt, Homo sapiens
ugagguaguagguuguauaguu

SEQ ID NO: 1643 - RNA, 22 nt, Homo sapiens
ugagguaguagguugugugguu

SEQ ID NO: 1644 - RNA, 19 nt, Homo sapiens
ugucucugcugggguuucu

SEQ ID NO: 1645 - RNA, 22 nt, Homo sapiens
aacccguagauccgaacuugug

SEQ ID NO: 1646 - RNA, 22 nt, Homo sapiens
cugaagcucagagggcucugau

SEQ ID NO: 1647 - RNA, 22 nt, Homo sapiens
uaaucucagcuggcaacuguga

SEQ ID NO: 1648 - RNA, 20 nt, Homo sapiens
auguauaaauguauacacac

SEQ ID NO: 1649 - RNA, 21 nt, Homo sapiens
ggcuagcaacagcgcuuaccu

SEQ ID NO: 1650 - RNA, 21 nt, Homo sapiens
cacaagguauugguauuaccu

SEQ ID NO: 1651 - RNA, 20 nt, Homo sapiens
agaccauggguucucauugu

SEQ ID NO: 1652 - RNA, 22 nt, Homo sapiens
uggagugugacaaugguguuug

SEQ ID NO: 1653 - RNA, 23 nt, Homo sapiens
uuuggcacuagcacauuuuugcu

SEQ ID NO: 1654 - RNA, 17 nt, Homo sapiens
ucccuguucgggcgcca

SEQ ID NO: 1655 - RNA, 23 nt, Homo sapiens
cggcccgggcugcugcuguuccu

SEQ ID NO: 1656 - RNA, 21 nt, Homo sapiens
agggcccccccucaauccugu

SEQ ID NO: 1657 - RNA, 21 nt, Homo sapiens
aggggugcuaucugugauuga

SEQ ID NO: 1658 - RNA, 23 nt, Homo sapiens
ucccccaggugugauucugauuu

SEQ ID NO: 1659 - RNA, 24 nt, Homo sapiens
acugggggcuuucgggcucugcgu

SEQ ID NO: 1660 - RNA, 23 nt, Homo sapiens
uggugcggagagggcccacagug

SEQ ID NO: 1661 - RNA, 20 nt, Homo sapiens
agagucuugugaugucuugc

SEQ ID NO: 1662 - RNA, 20 nt, Homo sapiens
ucacuguucagacaggcgga

SEQ ID NO: 1663 - RNA, 21 nt, Homo sapiens
ccccaccuccucucuccucag

SEQ ID NO: 1664 - RNA, 21 nt, Homo sapiens
ccuguugaaguguaaucccca

SEQ ID NO: 1665 - RNA, 22 nt, Homo sapiens
cucuagagggaagcacuuucug

SEQ ID NO: 1666 - RNA, 22 nt, Homo sapiens
uggagagaaaggcaguuccuga

SEQ ID NO: 1667 - RNA, 22 nt, Homo sapiens
uguaacagcaacuccaugugga

SEQ ID NO: 1668 - RNA, 22 nt, Homo sapiens
cucccacugcuucacuugacua

SEQ ID NO: 1669 - RNA, 21 nt, Homo sapiens
uaaagugcugacagugcagau

SEQ ID NO: 1670 - RNA, 23 nt, Homo sapiens
cagugcaaugauauugucaaagc

SEQ ID NO: 1671 - RNA, 23 nt, Homo sapiens
aucaacagacauuaauugggcgc

SEQ ID NO: 1672 - RNA, 22 nt, Homo sapiens
cuuaugcaagauucccuucuac

SEQ ID NO: 1673 - RNA, 22 nt, Homo sapiens
ugaaggucuacugugugccagg

SEQ ID NO: 1674 - RNA, 22 nt, Homo sapiens
cgucaacacuugcugguuuccu

SEQ ID NO: 1675 - RNA, 22 nt, Homo sapiens
ccucccacacccaaggcuugca

SEQ ID NO: 1676 - RNA, 21 nt, Homo sapiens
aacaggugacugguuagacaa

SEQ ID NO: 1677 - RNA, 22 nt, Homo sapiens
gguggcccggccgugccugagg

SEQ ID NO: 1678 - RNA, 20 nt, Homo sapiens
ggggagcuguggaagcagua

SEQ ID NO: 1679 - RNA, 22 nt, Homo sapiens
ucuucucuguuuuggccaugug

SEQ ID NO: 1680 - RNA, 22 nt, Homo sapiens
ucggccugaccacccaccccac

SEQ ID NO: 1681 - RNA, 24 nt, Homo sapiens
agccuggaagcuggagccugcagu

SEQ ID NO: 1682 - RNA, 18 nt, Homo sapiens
cgggcguggugguggggg

SEQ ID NO: 1683 - RNA, 23 nt, Homo sapiens
uggaguccaggaaucugcauuuu

SEQ ID NO: 1684 - RNA, 21 nt, Homo sapiens
uccugcgcgucccagaugccc

SEQ ID NO: 1685 - RNA, 21 nt, Homo sapiens
cggcggggacggcgauugguc

SEQ ID NO: 1686 - RNA, 22 nt, Homo sapiens
cgcaggggccgggugcucaccg

SEQ ID NO: 1687 - RNA, 23 nt, Homo sapiens
ugagcgccucgacgacagagccg

SEQ ID NO: 1688 - RNA, 22 nt, Homo sapiens
aggcggggcgccgcgggaccgc

SEQ ID NO: 1689 - RNA, 22 nt, Homo sapiens
ugcggggcuagggcuaacagca

SEQ ID NO: 1690 - RNA, 22 nt, Homo sapiens
auccgcgcucugacucucugcc

SEQ ID NO: 1691 - RNA, 22 nt, Homo sapiens
ucugggcaacaaagugagaccu

SEQ ID NO: 1692 - RNA, 23 nt, Homo sapiens
uuauugcuuaagaauacgcguag

SEQ ID NO: 1693 - RNA, 23 nt, Homo sapiens
ucuggcuccgugucuucacuccc

SEQ ID NO: 1694 - RNA, 23 nt, Homo sapiens
ucuggcuccgugucuucacuccc

SEQ ID NO: 1695 - RNA, 23 nt, Homo sapiens
uaaggugcaucuagugcagauag

SEQ ID NO: 1696 - RNA, 20 nt, Homo sapiens
ccuccugcccuccuugcugu

SEQ ID NO: 1697 - RNA, 22 nt, Homo sapiens
acacagggcuguugugaagacu

SEQ ID NO: 1698 - RNA, 22 nt, Homo sapiens
gaggguuggguggaggcucucc

SEQ ID NO: 1699 - RNA, 22 nt, Homo sapiens
aggcaguguauuguuagcuggc

SEQ ID NO: 1700 - RNA, 22 nt, Homo sapiens
cgucaacacuugcugguuuccu

SEQ ID NO: 1701 - RNA, 25 nt, Homo sapiens
gcugggcagggcuucugagcuccuu

SEQ ID NO: 1702 - RNA, 19 nt, Homo sapiens
aguguggcuuucuuagagc

SEQ ID NO: 1703 - RNA, 20 nt, Homo sapiens
accaggaggcugaggccccu

SEQ ID NO: 1704 - RNA, 20 nt, Homo sapiens
cggcucugggucugugggga

SEQ ID NO: 1705 - RNA, 22 nt, Homo sapiens
cugcccuggcccgagggaccga

SEQ ID NO: 1706 - RNA, 23 nt, Homo sapiens
uacccuguagauccgaauuugug

SEQ ID NO: 1707 - RNA, 23 nt, Homo sapiens
uacccuguagaaccgaauuugug

SEQ ID NO: 1708 - RNA, 17 nt, Homo sapiens
ucccuguucgggcgcca

SEQ ID NO: 1709 - RNA, 17 nt, Homo sapiens
ucccaccgcugccaccc

SEQ ID NO: 1710 - RNA, 22 nt, Homo sapiens
cagugcaaugaugaaagggcau

SEQ ID NO: 1711 - RNA, 22 nt, Homo sapiens
ugauauguuugauauauuaggu

SEQ ID NO: 1712 - RNA, 21 nt, Homo sapiens
ugauauguuugauauuggguu

SEQ ID NO: 1713 - RNA, 21 nt, Homo sapiens
uucaaguaauucaggauaggu

SEQ ID NO: 1714 - RNA, 22 nt, Homo sapiens
aguggggaacccuuccaugagg

SEQ ID NO: 1715 - RNA, 22 nt, Homo sapiens
ugagaaccacgucugcucugag

SEQ ID NO: 1716 - RNA, 20 nt, Homo sapiens
guagaggagauggcgcaggg

SEQ ID NO: 1717 - RNA, 20 nt, Homo sapiens
ggggagcuguggaagcagua

SEQ ID NO: 1718 - RNA, 22 nt, Homo sapiens
ugugcgcagggagaccucuccc

SEQ ID NO: 1719 - RNA, 22 nt, Homo sapiens
acgcccuucccccccuucuuca

SEQ ID NO: 1720 - RNA, 23 nt, Homo sapiens
ucuggcuccgugucuucacuccc

SEQ ID NO: 1721 - RNA, 21 nt, Homo sapiens
uccugcgcgucccagaugccc

SEQ ID NO: 1722 - RNA, 20 nt, Homo sapiens
ccccagggcgacgcggcggg

SEQ ID NO: 1723 - RNA, 22 nt, Homo sapiens
ugggucuuugcgggcgagauga

SEQ ID NO: 1724 - RNA, 21 nt, Homo sapiens
gccccugggccuauccuagaa

SEQ ID NO: 1725 - RNA, 23 nt, Homo sapiens
uagcagcgggaacaguucugcag

SEQ ID NO: 1726 - RNA, 20 nt, Homo sapiens
accaggaggcugaggccccu

SEQ ID NO: 1727 - RNA, 23 nt, Homo sapiens
uggaagacuagugauuuuguugu

SEQ ID NO: 1728 - RNA, 22 nt, Homo sapiens
uggaauguaaggaagugugugg

SEQ ID NO: 1729 - RNA, 22 nt, Homo sapiens
cugaagcucagagggcucugau

SEQ ID NO: 1730 - RNA, 22 nt, Homo sapiens
ugugagguuggcauuguugucu

SEQ ID NO: 1731 - RNA, 21 nt, Homo sapiens
ccaguccugugccugccgccu

SEQ ID NO: 1732 - RNA, 22 nt, Homo sapiens
cucccacugcuucacuugacua

SEQ ID NO: 1733 - RNA, 23 nt, Homo sapiens
acuucaccugguccacuagccgu

SEQ ID NO: 1734 - RNA, 22 nt, Homo sapiens
gugacaucacauauacggcagc

SEQ ID NO: 1735 - RNA, 23 nt, Homo sapiens
uacuccagagggcgucacucaug

SEQ ID NO: 1736 - RNA, 21 nt, Homo sapiens
uggaggagaaggaaggugaug

SEQ ID NO: 1737 - RNA, 20 nt, Homo sapiens
uacaguauagaugauguacu

SEQ ID NO: 1738 - RNA, 22 nt, Homo sapiens
ugucaguuugucaaauacccca

SEQ ID NO: 1739 - RNA, 23 nt, Homo sapiens
ucaagagcaauaacgaaaaaugu

SEQ ID NO: 1740 - RNA, 22 nt, Homo sapiens
gcugacuccuaguccagggcuc

SEQ ID NO: 1741 - RNA, 21 nt, Homo sapiens
acuggacuuggagucagaagg

SEQ ID NO: 1742 - RNA, 22 nt, Homo sapiens
ugaaggucuacugugugccagg

SEQ ID NO: 1743 - RNA, 22 nt, Homo sapiens
ugugacagauugauaacugaaa

SEQ ID NO: 1744 - RNA, 21 nt, Homo sapiens
gcgacccauacuugguuucag

SEQ ID NO: 1745 - RNA, 22 nt, Homo sapiens
uggauuucuuugugaaucacca

SEQ ID NO: 1746 - RNA, 23 nt, Homo sapiens
uacccuguagauccgaauuugug

SEQ ID NO: 1747 - RNA, 23 nt, Homo sapiens
uacccuguagaaccgaauuugug

SEQ ID NO: 1748 - RNA, 22 nt, Homo sapiens
cuccugagccauucugagccuc

SEQ ID NO: 1749 - RNA, 26 nt, Homo sapiens
aaguaguugguuuguaugagaugguu

SEQ ID NO: 1750 - RNA, 17 nt, Homo sapiens
ucccuguucgggcgcca

SEQ ID NO: 1751 - RNA, 22 nt, Homo sapiens
cagugcaaugaugaaagggcau

SEQ ID NO: 1752 - RNA, 22 nt, Homo sapiens
uaacacugucugguaaagaugg

SEQ ID NO: 1753 - RNA, 22 nt, Homo sapiens
uaacacugucugguaacgaugu

SEQ ID NO: 1754 - RNA, 22 nt, Homo sapiens
ugucaguuugucaaauacccca

SEQ ID NO: 1755 - RNA, 21 nt, Homo sapiens
uucacaguggcuaaguuccgc

SEQ ID NO: 1756 - RNA, 21 nt, Homo sapiens
uucacaguggcuaaguucugc

SEQ ID NO: 1757 - RNA, 23 nt, Homo sapiens
ccaguuaccgcuuccgcuaccgc

SEQ ID NO: 1758 - RNA, 21 nt, Homo sapiens
cugacuguugccguccuccag

SEQ ID NO: 1759 - RNA, 21 nt, Homo sapiens
uggcagggaggcugggagggg

SEQ ID NO: 1760 - RNA, 22 nt, Homo sapiens
uggagugugacaaugguguuug

SEQ ID NO: 1761 - RNA, 22 nt, Homo sapiens
uucuggaauucugugugaggga

SEQ ID NO: 1762 - RNA, 22 nt, Homo sapiens
aagcccuuaccccaaaaagcau

SEQ ID NO: 1763 - RNA, 23 nt, Homo sapiens
uaaggugcaucuagugcagauag

SEQ ID NO: 1764 - RNA, 20 nt, Homo sapiens
ccccagggcgacgcggcggg

SEQ ID NO: 1765 - RNA, 22 nt, Homo sapiens
uagcaccaucugaaaucgguua

SEQ ID NO: 1766 - RNA, 22 nt, Homo sapiens
cgucaacacuugcugguuuccu

SEQ ID NO: 1767 - RNA, 22 nt, Homo sapiens
auauuaccauuagcucaucuuu

SEQ ID NO: 1768 - RNA, 20 nt, Homo sapiens
auguauaaauguauacacac

SEQ ID NO: 1769 - RNA, 22 nt, Homo sapiens
cugcccuggcccgagggaccga

SEQ ID NO: 1770 - RNA, 22 nt, Homo sapiens
cugcccuggcccgagggaccga

SEQ ID NO: 1771 - RNA, 21 nt, Homo sapiens
cccggagccaggaugcagcuc

SEQ ID NO: 1772 - RNA, 20 nt, Homo sapiens
ugagcccuguccucccgcag

SEQ ID NO: 1773 - RNA, 23 nt, Homo sapiens
uggaguccaggaaucugcauuuu

SEQ ID NO: 1774 - RNA, 21 nt, Homo sapiens
ucgaggagcucacagucuagu

SEQ ID NO: 1775 - RNA, 23 nt, Homo sapiens
cggcccgggcugcugcuguuccu

SEQ ID NO: 1776 - RNA, 21 nt, Homo sapiens
cggcggggacggcgauugguc

SEQ ID NO: 1777 - RNA, 21 nt, Homo sapiens
agggcccccccucaauccugu

SEQ ID NO: 1778 - RNA, 22 nt, Homo sapiens
uguaaacauccuacacucagcu

SEQ ID NO: 1779 - RNA, 22 nt, Homo sapiens
uccagcaucagugauuuuguug

SEQ ID NO: 1780 - RNA, 22 nt, Homo sapiens
uaaugccccuaaaaauccuuau

SEQ ID NO: 1781 - RNA, 22 nt, Homo sapiens
agacuucccauuugaagguggc

SEQ ID NO: 1782 - RNA, 22 nt, Homo sapiens
aggcggggcgccgcgggaccgc

SEQ ID NO: 1783 - RNA, 21 nt, Homo sapiens
ccccaccuccucucuccucag

SEQ ID NO: 1784 - RNA, 21 nt, Homo sapiens
agcuacaucuggcuacugggu

SEQ ID NO: 1785 - RNA, 22 nt, Homo sapiens
ugucaguuugucaaauacccca

SEQ ID NO: 1786 - RNA, 22 nt, Homo sapiens
gcugacuccuaguccagggcuc

SEQ ID NO: 1787 - RNA, 22 nt, Homo sapiens
uaaugccccuaaaaauccuuau

SEQ ID NO: 1788 - RNA, 20 nt, Homo sapiens
auuccuagaaauuguucaua

SEQ ID NO: 1789 - RNA, 23 nt, Homo sapiens
agguuacccgagcaacuuugcau

SEQ ID NO: 1790 - RNA, 22 nt, Homo sapiens
aguggggaacccuuccaugagg

SEQ ID NO: 1791 - RNA, 22 nt, Homo sapiens
agacuucccauuugaagguggc

SEQ ID NO: 1792 - RNA, 19 nt, Homo sapiens
gugucugcuuccuguggga

SEQ ID NO: 1793 - RNA, 22 nt, Homo sapiens
uaugucugcugaccaucaccuu

SEQ ID NO: 1794 - RNA, 22 nt, Homo sapiens
auccgcgcucugacucucugcc

SEQ ID NO: 1795 - RNA, 22 nt, Homo sapiens
aggcauugacuucucacuagcu

SEQ ID NO: 1796 - RNA, 21 nt, Homo sapiens
gcccuccgcccgugcaccccg

SEQ ID NO: 1797 - RNA, 22 nt, Homo sapiens
ucagugcaucacagaacuuugu

SEQ ID NO: 1798 - RNA, 22 nt, Homo sapiens
ucucccaacccuuguaccagug

SEQ ID NO: 1799 - RNA, 25 nt, Homo sapiens
ggcggagggaaguagguccguuggu

SEQ ID NO: 1800 - RNA, 20 nt, Homo sapiens
ggggagcuguggaagcagua

SEQ ID NO: 1801 - RNA, 22 nt, Homo sapiens
auccgcgcucugacucucugcc

SEQ ID NO: 1802 - RNA, 22 nt, Homo sapiens
ugagguaguagguuguauaguu

SEQ ID NO: 1803 - RNA, 22 nt, Homo sapiens
ugagguaguagguugugugguu

SEQ ID NO: 1804 - RNA, 19 nt, Homo sapiens
ugucucugcugggguuucu

SEQ ID NO: 1805 - RNA, 23 nt, Homo sapiens
ucaaaugcucagacuccuguggu

SEQ ID NO: 1806 - RNA, 22 nt, Homo sapiens
agaucagaaggugauuguggcu

SEQ ID NO: 1807 - RNA, 22 nt, Homo sapiens
ucagcaaacauuuauugugugc

SEQ ID NO: 1808 - RNA, 21 nt, Homo sapiens
gcgacccauacuugguuucag

SEQ ID NO: 1809 - RNA, 20 nt, Homo sapiens
auguauaaauguauacacac

SEQ ID NO: 1810 - RNA, 21 nt, Homo sapiens
cuucuugugcucuaggauugu

SEQ ID NO: 1811 - RNA, 22 nt, Homo sapiens
gucccucuccaaaugugucuug

SEQ ID NO: 1812 - RNA, 23 nt, Homo sapiens
uacccuguagauccgaauuugug

SEQ ID NO: 1813 - RNA, 23 nt, Homo sapiens
uacccuguagaaccgaauuugug

SEQ ID NO: 1814 - RNA, 23 nt, Homo sapiens
gagggucuugggagggaugugac

SEQ ID NO: 1815 - RNA, 21 nt, Homo sapiens
gguuugguccuagccuuucua

SEQ ID NO: 1816 - RNA, 22 nt, Homo sapiens
uagcuuaucagacugauguuga

SEQ ID NO: 1817 - RNA, 23 nt, Homo sapiens
ucccuguccuccaggagcucacg

SEQ ID NO: 1818 - RNA, 23 nt, Homo sapiens
gaagugcuucgauuuuggggugu

SEQ ID NO: 1819 - RNA, 23 nt, Homo sapiens
ugaggggcagagagcgagacuuu

SEQ ID NO: 1820 - RNA, 22 nt, Homo sapiens
agacccuggucugcacucuauc

SEQ ID NO: 1821 - RNA, 21 nt, Homo sapiens
ugaguuggccaucugagugag

SEQ ID NO: 1822 - RNA, 21 nt, Homo sapiens
uaauuuuauguauaagcuagu

SEQ ID NO: 1823 - RNA, 22 nt, Homo sapiens
agucauuggaggguuugagcag

SEQ ID NO: 1824 - RNA, 17 nt, Homo sapiens
ucccuguucgggcgcca

SEQ ID NO: 1825 - RNA, 22 nt, Homo sapiens
ucuacaaaggaaagcgcuuucu

SEQ ID NO: 1826 - RNA, 21 nt, Homo sapiens
caagucacuagugguuccguu

SEQ ID NO: 1827 - RNA, 22 nt, Homo sapiens
uuauaauacaaccugauaagug

SEQ ID NO: 1828 - RNA, 23 nt, Homo sapiens
ucuuggaguaggucauugggugg

SEQ ID NO: 1829 - RNA, 21 nt, Homo sapiens
uugaaaggcuauuucuugguc

SEQ ID NO: 1830 - RNA, 20 nt, Homo sapiens
cuacaaagggaagcccuuuc

SEQ ID NO: 1831 - RNA, 22 nt, Homo sapiens
aaaaugguucccuuuagagugu

SEQ ID NO: 1832 - RNA, 22 nt, Homo sapiens
cuacaaagggaagcacuuucuc

SEQ ID NO: 1833 - RNA, 22 nt, Homo sapiens
auucuaauuucuccacgucuuu

SEQ ID NO: 1834 - RNA, 23 nt, Homo sapiens
aaacucuacuuguccuucugagu

SEQ ID NO: 1835 - RNA, 23 nt, Homo sapiens
ucuuugguuaucuagcuguauga

SEQ ID NO: 1836 - RNA, 21 nt, Homo sapiens
uaaagugcugacagugcagau

SEQ ID NO: 1837 - RNA, 23 nt, Homo sapiens
ccugcagcgacuugauggcuucc

SEQ ID NO: 1838 - RNA, 21 nt, Homo sapiens
cccggagccaggaugcagcuc

SEQ ID NO: 1839 - RNA, 21 nt, Homo sapiens
uggcagggaggcugggagggg

SEQ ID NO: 1840 - RNA, 17 nt, Homo sapiens
ucgccuccuccucuccc

SEQ ID NO: 1841 - RNA, 21 nt, Homo sapiens
cggcggggacggcgauugguc

SEQ ID NO: 1842 - RNA, 22 nt, Homo sapiens
cgcaggggccgggugcucaccg

SEQ ID NO: 1843 - RNA, 22 nt, Homo sapiens
ucugcccccuccgcugcugcca

SEQ ID NO: 1844 - RNA, 20 nt, Homo sapiens
acugccccaggugcugcugg

SEQ ID NO: 1845 - RNA, 22 nt, Homo sapiens
uggcagugucuuagcugguugu

SEQ ID NO: 1846 - RNA, 23 nt, Homo sapiens
aggcaguguaguuagcugauugc

SEQ ID NO: 1847 - RNA, 22 nt, Homo sapiens
uggcaguguauuguuagcuggu

SEQ ID NO: 1848 - RNA, 22 nt, Homo sapiens
aggcaguguauuguuagcuggc

SEQ ID NO: 1849 - RNA, 21 nt, Homo sapiens
cggggcagcucaguacaggau

SEQ ID NO: 1850 - RNA, 22 nt, Homo sapiens
uggugggcacagaaucuggacu

SEQ ID NO: 1851 - RNA, 19 nt, Homo sapiens
aggcugcggaauucaggac

SEQ ID NO: 1852 - RNA, 22 nt, Homo sapiens
uggugggccgcagaacaugugc

SEQ ID NO: 1853 - RNA, 22 nt, Homo sapiens
aggcggggcgccgcgggaccgc

SEQ ID NO: 1854 - RNA, 21 nt, Homo sapiens
uggaggagaaggaaggugaug

SEQ ID NO: 1855 - RNA, 23 nt, Homo sapiens
cggcccgggcugcugcuguuccu

SEQ ID NO: 1856 - RNA, 21 nt, Homo sapiens
uggguuuacguugggagaacu

SEQ ID NO: 1857 - RNA, 23 nt, Homo sapiens
cggcccgggcugcugcuguuccu

SEQ ID NO: 1858 - RNA, 22 nt, Homo sapiens
uggagagaaaggcaguuccuga

SEQ ID NO: 1859 - RNA, 21 nt, Homo sapiens
cggcggggacggcgauugguc

SEQ ID NO: 1860 - RNA, 23 nt, Homo sapiens
ugaggggcagagagcgagacuuu

SEQ ID NO: 1861 - RNA, 21 nt, Homo sapiens
uuaagacuugcagugauguuu

SEQ ID NO: 1862 - RNA, 22 nt, Homo sapiens
aucuggagguaagaagcacuuu

SEQ ID NO: 1863 - RNA, 21 nt, Homo sapiens
gaaggcgcuucccuuuggagu

SEQ ID NO: 1864 - RNA, 22 nt, Homo sapiens
gaaggcgcuucccuuuagagcg

SEQ ID NO: 1865 - RNA, 19 nt, Homo sapiens
gggcgccugugaucccaac

SEQ ID NO: 1866 - RNA, 19 nt, Homo sapiens
gggcgccugugaucccaac

SEQ ID NO: 1867 - RNA, 22 nt, Homo sapiens
agacuucccauuugaagguggc

SEQ ID NO: 1868 - RNA, 21 nt, Homo sapiens
aauggcgccacuaggguugug

SEQ ID NO: 1869 - RNA, 24 nt, Homo sapiens
ugccugggucucuggccugcgcgu

SEQ ID NO: 1870 - RNA, 22 nt, Homo sapiens
aggcggggcgccgcgggaccgc

SEQ ID NO: 1871 - RNA, 22 nt, Homo sapiens
aggcggggcgccgcgggaccgc

SEQ ID NO: 1872 - RNA, 20 nt, Homo sapiens
ugagcccuguccucccgcag

SEQ ID NO: 1873 - RNA, 22 nt, Homo sapiens
acgcccuucccccccuucuuca

SEQ ID NO: 1874 - RNA, 21 nt, Homo sapiens
ccuguugaaguguaaucccca

SEQ ID NO: 1875 - RNA, 22 nt, Homo sapiens
uucuggaauucugugugaggga

SEQ ID NO: 1876 - RNA, 22 nt, Homo sapiens
aagcccuuaccccaaaaagcau

SEQ ID NO: 1877 - RNA, 22 nt, Homo sapiens
ucaaaacugaggggcauuuucu

SEQ ID NO: 1878 - RNA, 22 nt, Homo sapiens
uguaacagcaacuccaugugga

SEQ ID NO: 1879 - RNA, 20 nt, Homo sapiens
uguuuugauaacaguaaugu

SEQ ID NO: 1880 - RNA, 22 nt, Homo sapiens
agaucagaaggugauuguggcu

SEQ ID NO: 1881 - RNA, 22 nt, Homo sapiens
uggcagugucuuagcugguugu

SEQ ID NO: 1882 - RNA, 23 nt, Homo sapiens
aggcaguguaguuagcugauugc

SEQ ID NO: 1883 - RNA, 23 nt, Homo sapiens
aucaacagacauuaauugggcgc

SEQ ID NO: 1884 - RNA, 22 nt, Homo sapiens
uggcaguguauuguuagcuggu

SEQ ID NO: 1885 - RNA, 22 nt, Homo sapiens
aggcaguguauuguuagcuggc

SEQ ID NO: 1886 - RNA, 22 nt, Homo sapiens
caaaaaucucaauuacuuuugc

SEQ ID NO: 1887 - RNA, 22 nt, Homo sapiens
ccaaaacugcaguuacuuuugc

SEQ ID NO: 1888 - RNA, 21 nt, Homo sapiens
gcgacccauacuugguuucag

SEQ ID NO: 1889 - RNA, 19 nt, Homo sapiens
ugggcguaucuguaugcua

SEQ ID NO: 1890 - RNA, 21 nt, Homo sapiens
uccgguucucagggcuccacc

SEQ ID NO: 1891 - RNA, 20 nt, Homo sapiens
cggcucugggucugugggga

SEQ ID NO: 1892 - RNA, 22 nt, Homo sapiens
gugaacgggcgccaucccgagg

SEQ ID NO: 1893 - RNA, 20 nt, Homo sapiens
ggggagcuguggaagcagua

SEQ ID NO: 1894 - RNA, 24 nt, Homo sapiens
ucccugagacccuuuaaccuguga

SEQ ID NO: 1895 - RNA, 22 nt, Homo sapiens
ucccugagacccuaacuuguga

SEQ ID NO: 1896 - RNA, 23 nt, Homo sapiens
ccucagggcuguagaacagggcu

SEQ ID NO: 1897 - RNA, 19 nt, Homo sapiens
uggauuuuuggaucaggga

SEQ ID NO: 1898 - RNA, 18 nt, Homo sapiens
cagggaggugaaugugau

SEQ ID NO: 1899 - RNA, 22 nt, Homo sapiens
cccugugcccggcccacuucug

SEQ ID NO: 1900 - RNA, 21 nt, Homo sapiens
uucacaguggcuaaguucugc

SEQ ID NO: 1901 - RNA, 22 nt, Homo sapiens
aacaauauccuggugcugagug

SEQ ID NO: 1902 - RNA, 23 nt, Homo sapiens
acuucaccugguccacuagccgu

SEQ ID NO: 1903 - RNA, 22 nt, Homo sapiens
aggcaguguauuguuagcuggc

SEQ ID NO: 1904 - RNA, 22 nt, Homo sapiens
ugaaggucuacugugugccagg

SEQ ID NO: 1905 - RNA, 22 nt, Homo sapiens
caaaaaucucaauuacuuuugc

SEQ ID NO: 1906 - RNA, 23 nt, Homo sapiens
uauucauuuauccccagccuaca

SEQ ID NO: 1907 - RNA, 20 nt, Homo sapiens
guagaggagauggcgcaggg

SEQ ID NO: 1908 - RNA, 22 nt, Homo sapiens
ucguaccgugaguaauaaugcg

SEQ ID NO: 1909 - RNA, 23 nt, Homo sapiens
aacauucaacgcugucggugagu

SEQ ID NO: 1910 - RNA, 23 nt, Homo sapiens
aacauucauugcugucggugggu

SEQ ID NO: 1911 - RNA, 22 nt, Homo sapiens
aacauucaaccugucggugagu

SEQ ID NO: 1912 - RNA, 23 nt, Homo sapiens
aacauucauuguugucggugggu

SEQ ID NO: 1913 - RNA, 22 nt, Homo sapiens
caaagaauucuccuuuugggcu

SEQ ID NO: 1914 - RNA, 22 nt, Homo sapiens
uagcuuaucagacugauguuga

SEQ ID NO: 1915 - RNA, 21 nt, Homo sapiens
aucacauugccagggauuucc

SEQ ID NO: 1916 - RNA, 21 nt, Homo sapiens
aucacauugccagggauuacc

SEQ ID NO: 1917 - RNA, 22 nt, Homo sapiens
aaaagcuggguugagagggcga

SEQ ID NO: 1918 - RNA, 22 nt, Homo sapiens
aaaagcuggguugagagggcaa

SEQ ID NO: 1919 - RNA, 20 nt, Homo sapiens
aaaagcuggguugagagggu

SEQ ID NO: 1920 - RNA, 19 nt, Homo sapiens
aaaagcuggguugagagga

SEQ ID NO: 1921 - RNA, 21 nt, Homo sapiens
gugcauuguaguugcauugca

SEQ ID NO: 1922 - RNA, 22 nt, Homo sapiens
ggagaaauuauccuuggugugu

SEQ ID NO: 1923 - RNA, 22 nt, Homo sapiens
aaacauucgcggugcacuucuu

SEQ ID NO: 1924 - RNA, 23 nt, Homo sapiens
uucauuugguauaaaccgcgauu

SEQ ID NO: 1925 - RNA, 21 nt, Homo sapiens
uuggccacaauggguuagaac

SEQ ID NO: 1926 - RNA, 23 nt, Homo sapiens
cuaauaguaucuaccacaauaaa

SEQ ID NO: 1927 - RNA, 19 nt, Homo sapiens
ucuaggcugguacugcuga

SEQ ID NO: 1928 - RNA, 23 nt, Homo sapiens
uauucauuuauccccagccuaca

SEQ ID NO: 1929 - RNA, 21 nt, Homo sapiens
ccuguugaaguguaaucccca

SEQ ID NO: 1930 - RNA, 23 nt, Homo sapiens
uauggcuuuuuauuccuauguga

SEQ ID NO: 1931 - RNA, 23 nt, Homo sapiens
uauggcuuuucauuccuauguga

SEQ ID NO: 1932 - RNA, 20 nt, Homo sapiens
ggggagcuguggaagcagua

SEQ ID NO: 1933 - RNA, 24 nt, Homo sapiens
agcagaagcagggagguucuccca

SEQ ID NO: 1934 - RNA, 22 nt, Homo sapiens
uagcaccaucugaaaucgguua

SEQ ID NO: 1935 - RNA, 23 nt, Homo sapiens
aucaacagacauuaauugggcgc

SEQ ID NO: 1936 - RNA, 22 nt, Homo sapiens
agaggcuggccgugaugaauuc

SEQ ID NO: 1937 - RNA, 23 nt, Homo sapiens
uaaauuucaccuuucugagaagg

SEQ ID NO: 1938 - RNA, 23 nt, Homo sapiens
uaaauuucaccuuucugagaagg

SEQ ID NO: 1939 - RNA, 22 nt, Homo sapiens
ggagaaauuauccuuggugugu

SEQ ID NO: 1940 - RNA, 22 nt, Homo sapiens
ggagaaauuauccuuggugugu

SEQ ID NO: 1941 - RNA, 21 nt, Homo sapiens
uggguuuacguugggagaacu

SEQ ID NO: 1942 - RNA, 21 nt, Homo sapiens
guguugaaacaaucucuacug

SEQ ID NO: 1943 - RNA, 17 nt, Homo sapiens
ucucgcuggggccucca

SEQ ID NO: 1944 - RNA, 22 nt, Homo sapiens
uucuggaauucugugugaggga

SEQ ID NO: 1945 - RNA, 20 nt, Homo sapiens
guguguggaaaugcuucugc

SEQ ID NO: 1946 - RNA, 23 nt, Homo sapiens
ucuggcuccgugucuucacuccc

SEQ ID NO: 1947 - RNA, 21 nt, Homo sapiens
cucccacaugcaggguuugca

SEQ ID NO: 1948 - RNA, 22 nt, Homo sapiens
gaggguuggguggaggcucucc

SEQ ID NO: 1949 - RNA, 22 nt, Homo sapiens
uguaaacauccuacacucagcu

SEQ ID NO: 1950 - RNA, 22 nt, Homo sapiens
uccagcaucagugauuuuguug

SEQ ID NO: 1951 - RNA, 22 nt, Homo sapiens
agaggcuggccgugaugaauuc

SEQ ID NO: 1952 - RNA, 23 nt, Homo sapiens
caaagcgcuucucuuuagagugu

SEQ ID NO: 1953 - RNA, 21 nt, Homo sapiens
cuccagagggaaguacuuucu

SEQ ID NO: 1954 - RNA, 21 nt, Homo sapiens
cuccagagggaugcacuuucu

SEQ ID NO: 1955 - RNA, 22 nt, Homo sapiens
ccucccacacccaaggcuugca

SEQ ID NO: 1956 - RNA, 23 nt, Homo sapiens
ugagugugugugugugagugugu

SEQ ID NO: 1957 - RNA, 22 nt, Homo sapiens
cacacacugcaauuacuuuugc

SEQ ID NO: 1958 - RNA, 21 nt, Homo sapiens
uggaggagaaggaaggugaug

SEQ ID NO: 1959 - RNA, 20 nt, Homo sapiens
uaaagagcccuguggagaca

SEQ ID NO: 1960 - RNA, 22 nt, Homo sapiens
cagugcaaugaugaaagggcau

SEQ ID NO: 1961 - RNA, 21 nt, Homo sapiens
gccccugggccuauccuagaa

SEQ ID NO: 1962 - RNA, 23 nt, Homo sapiens
ucccccaggugugauucugauuu

SEQ ID NO: 1963 - RNA, 25 nt, Homo sapiens
aggggugguguugggacagcuccgu

SEQ ID NO: 1964 - RNA, 24 nt, Homo sapiens
acugggggcuuucgggcucugcgu

SEQ ID NO: 1965 - RNA, 21 nt, Homo sapiens
cgcgggugcuuacugacccuu

SEQ ID NO: 1966 - RNA, 20 nt, Homo sapiens
ggggagcuguggaagcagua

SEQ ID NO: 1967 - RNA, 23 nt, Homo sapiens
caagucuuauuugagcaccuguu

SEQ ID NO: 1968 - RNA, 22 nt, Homo sapiens
uucuggaauucugugugaggga

SEQ ID NO: 1969 - RNA, 20 nt, Homo sapiens
uacaguauagaugauguacu

SEQ ID NO: 1970 - RNA, 23 nt, Homo sapiens
guguuaauuaaaccucuauuuac

SEQ ID NO: 1971 - RNA, 23 nt, Homo sapiens
cuguaauauaaauuuaauuuauu

SEQ ID NO: 1972 - RNA, 21 nt, Homo sapiens
gugcauuguaguugcauugca

SEQ ID NO: 1973 - RNA, 21 nt, Homo sapiens
auugacacuucugugaguaga

SEQ ID NO: 1974 - RNA, 21 nt, Homo sapiens
aauauuauacagucaaccucu

SEQ ID NO: 1975 - RNA, 21 nt, Homo sapiens
ccuggaaacacugagguugug

SEQ ID NO: 1976 - RNA, 22 nt, Homo sapiens
cuccugagccauucugagccuc

SEQ ID NO: 1977 - RNA, 21 nt, Homo sapiens
auauaugaugacuuagcuuuu

SEQ ID NO: 1978 - RNA, 22 nt, Homo sapiens
cuuggcaccuagcaagcacuca

SEQ ID NO: 1979 - RNA, 22 nt, Homo sapiens
ugauauguuugauauauuaggu

SEQ ID NO: 1980 - RNA, 22 nt, Homo sapiens
uagguaguuuccuguuguuggg

SEQ ID NO: 1981 - RNA, 22 nt, Homo sapiens
uaaucucagcuggcaacuguga

SEQ ID NO: 1982 - RNA, 22 nt, Homo sapiens
aaggagcucacagucuauugag

SEQ ID NO: 1983 - RNA, 23 nt, Homo sapiens
ucaagagcaauaacgaaaaaugu

SEQ ID NO: 1984 - RNA, 22 nt, Homo sapiens
ucaggcucaguccccucccgau

SEQ ID NO: 1985 - RNA, 24 nt, Homo sapiens
uucuccaaaagaaagcacuuucug

SEQ ID NO: 1986 - RNA, 20 nt, Homo sapiens
uaaggcacgcggugaaugcc

SEQ ID NO: 1987 - RNA, 22 nt, Homo sapiens
cucuagagggaagcacuuucug

SEQ ID NO: 1988 - RNA, 21 nt, Homo sapiens
aaagcgcuucccuucagagug

SEQ ID NO: 1989 - RNA, 21 nt, Homo sapiens
gaaagcgcuucucuuuagagg

SEQ ID NO: 1990 - RNA, 22 nt, Homo sapiens
aaagugcauccuuuuagagugu

SEQ ID NO: 1991 - RNA, 22 nt, Homo sapiens
cucuagagggaagcgcuuucug

SEQ ID NO: 1992 - RNA, 22 nt, Homo sapiens
cucuagagggaagcgcuuucug

SEQ ID NO: 1993 - RNA, 22 nt, Homo sapiens
aagugccuccuuuuagaguguu

SEQ ID NO: 1994 - RNA, 22 nt, Homo sapiens
cucuagagggaagcacuuucug

SEQ ID NO: 1995 - RNA, 22 nt, Homo sapiens
aaaaugguucccuuuagagugu

SEQ ID NO: 1996 - RNA, 23 nt, Homo sapiens
gaacgcgcuucccuauagagggu

SEQ ID NO: 1997 - RNA, 22 nt, Homo sapiens
cucuagagggaagcacuuucug

SEQ ID NO: 1998 - RNA, 21 nt, Homo sapiens
ugagcuaaaugugugcuggga

SEQ ID NO: 1999 - RNA, 23 nt, Homo sapiens
aaggagcuuacaaucuagcuggg

SEQ ID NO: 2000 - RNA, 22 nt, Homo sapiens
caaagugccucccuuuagagug

SEQ ID NO: 2001 - RNA, 23 nt, Homo sapiens
uuuggcacuagcacauuuuugcu

SEQ ID NO: 2002 - RNA, 26 nt, Homo sapiens
gaugaugauggcagcaaauucugaaa

SEQ ID NO: 2003 - RNA, 23 nt, Homo sapiens
uacccuguagauccgaauuugug

SEQ ID NO: 2004 - RNA, 21 nt, Homo sapiens
uggacugcccugaucuggaga

SEQ ID NO: 2005 - RNA, 17 nt, Homo sapiens
uucaaguaauucaggug

SEQ ID NO: 2006 - RNA, 21 nt, Homo sapiens
ccaguccugugccugccgccu

SEQ ID NO: 2007 - RNA, 23 nt, Homo sapiens
uaaagugcuuauagugcagguag

SEQ ID NO: 2008 - RNA, 22 nt, Homo sapiens
uuggggaaacggccgcugagug

SEQ ID NO: 2009 - RNA, 23 nt, Homo sapiens
uacugcaucaggaacugauugga

SEQ ID NO: 2010 - RNA, 22 nt, Homo sapiens
uucaaguaauccaggauaggcu

SEQ ID NO: 2011 - RNA, 21 nt, Homo sapiens
uucaaguaauucaggauaggu

SEQ ID NO: 2012 - RNA, 22 nt, Homo sapiens
caaccuggaggacuccaugcug

SEQ ID NO: 2013 - RNA, 22 nt, Homo sapiens
aaaaguauuugcggguuuuguc

SEQ ID NO: 2014 - RNA, 22 nt, Homo sapiens
caaaaguaauuguggauuuugu

SEQ ID NO: 2015 - RNA, 22 nt, Homo sapiens
caaaguuuaagauccuugaagu

SEQ ID NO: 2016 - RNA, 20 nt, Homo sapiens
accaggaggcugaggccccu

SEQ ID NO: 2017 - RNA, 20 nt, Homo sapiens
agaccauggguucucauugu

SEQ ID NO: 2018 - RNA, 22 nt, Homo sapiens
uggagugugacaaugguguuug

SEQ ID NO: 2019 - RNA, 21 nt, Homo sapiens
uuaauaucggacaaccauugu

SEQ ID NO: 2020 - RNA, 20 nt, Homo sapiens
uaaggcacgcggugaaugcc

SEQ ID NO: 2021 - RNA, 21 nt, Homo sapiens
cucccacaugcaggguuugca

SEQ ID NO: 2022 - RNA, 22 nt, Homo sapiens
aacuggccuacaaagucccagu

SEQ ID NO: 2023 - RNA, 22 nt, Homo sapiens
aacuggcccucaaagucccgcu

SEQ ID NO: 2024 - RNA, 20 nt, Homo sapiens
gugcauugcuguugcauugc

SEQ ID NO: 2025 - RNA, 22 nt, Homo sapiens
aauccuuugucccugggugaga

SEQ ID NO: 2026 - RNA, 21 nt, Homo sapiens
uaaggcacccuucugaguaga

SEQ ID NO: 2027 - RNA, 22 nt, Homo sapiens
gagugccuucuuuuggagcguu

SEQ ID NO: 2028 - RNA, 22 nt, Homo sapiens
aagugccuccuuuuagaguguu

SEQ ID NO: 2029 - RNA, 21 nt, Homo sapiens
cacaagguauugguauuaccu

SEQ ID NO: 2030 - RNA, 23 nt, Homo sapiens
uccaguaccacgugucagggcca

SEQ ID NO: 2031 - RNA, 22 nt, Homo sapiens
ucuucucuguuuuggccaugug

SEQ ID NO: 2032 - RNA, 22 nt, Homo sapiens
cuuggcaccuagcaagcacuca

SEQ ID NO: 2033 - RNA, 22 nt, Homo sapiens
uagcagcacaucaugguuuaca

SEQ ID NO: 2034 - RNA, 22 nt, Homo sapiens
caaagaauucuccuuuugggcu

SEQ ID NO: 2035 - RNA, 20 nt, Homo sapiens
ccccagggcgacgcggcggg

SEQ ID NO: 2036 - RNA, 22 nt, Homo sapiens
uuauaaagcaaugagacugauu

SEQ ID NO: 2037 - RNA, 22 nt, Homo sapiens
caaucacuaacuccacugccau

SEQ ID NO: 2038 - RNA, 23 nt, Homo sapiens
gcagcagagaauaggacuacguc

SEQ ID NO: 2039 - RNA, 23 nt, Homo sapiens
uuuggcacuagcacauuuuugcu

SEQ ID NO: 2040 - RNA, 22 nt, Homo sapiens
ugagccccugugccgcccccag

SEQ ID NO: 2041 - RNA, 22 nt, Homo sapiens
acaggugagguucuugggagcc

SEQ ID NO: 2042 - RNA, 20 nt, Homo sapiens
guguguggaaaugcuucugc

SEQ ID NO: 2043 - RNA, 22 nt, Homo sapiens
gugugcggaaaugcuucugcua

SEQ ID NO: 2044 - RNA, 23 nt, Homo sapiens
cggcccgggcugcugcuguuccu

SEQ ID NO: 2045 - RNA, 24 nt, Homo sapiens
uuuggcaaugguagaacucacacu

SEQ ID NO: 2046 - RNA, 20 nt, Homo sapiens
ccccagggcgacgcggcggg

SEQ ID NO: 2047 - RNA, 22 nt, Homo sapiens
uucccuuugucauccuaugccu

SEQ ID NO: 2048 - RNA, 22 nt, Homo sapiens
uucccuuugucauccuucgccu

SEQ ID NO: 2049 - RNA, 22 nt, Homo sapiens
acagcaggcacagacaggcagu

SEQ ID NO: 2050 - RNA, 21 nt, Homo sapiens
gccccugggccuauccuagaa

SEQ ID NO: 2051 - RNA, 22 nt, Homo sapiens
uuauaaagcaaugagacugauu

SEQ ID NO: 2052 - RNA, 22 nt, Homo sapiens
uggcagugucuuagcugguugu

SEQ ID NO: 2053 - RNA, 23 nt, Homo sapiens
aggcaguguaguuagcugauugc

SEQ ID NO: 2054 - RNA, 22 nt, Homo sapiens
gccugcugggguggaaccuggu

SEQ ID NO: 2055 - RNA, 22 nt, Homo sapiens
uggcaguguauuguuagcuggu

SEQ ID NO: 2056 - RNA, 22 nt, Homo sapiens
aggcaguguauuguuagcuggc

SEQ ID NO: 2057 - RNA, 23 nt, Homo sapiens
aggaccugcgggacaagauucuu

SEQ ID NO: 2058 - RNA, 18 nt, Homo sapiens
ugcuuccuuucagagggu

SEQ ID NO: 2059 - RNA, 22 nt, Homo sapiens
aucuggagguaagaagcacuuu

SEQ ID NO: 2060 - RNA, 22 nt, Homo sapiens
cacgcucaugcacacacccaca

SEQ ID NO: 2061 - RNA, 20 nt, Homo sapiens
guagaggagauggcgcaggg

SEQ ID NO: 2062 - RNA, 22 nt, Homo sapiens
aggcagcgggguguaguggaua

SEQ ID NO: 2063 - RNA, 22 nt, Homo sapiens
ucaccagcccuguguucccuag

SEQ ID NO: 2064 - RNA, 22 nt, Homo sapiens
uggagugugacaaugguguuug

SEQ ID NO: 2065 - RNA, 18 nt, Homo sapiens
aucccaccucugccacca

SEQ ID NO: 2066 - RNA, 22 nt, Homo sapiens
uuagggcccuggcuccaucucc

SEQ ID NO: 2067 - RNA, 23 nt, Homo sapiens
agcugguguugugaaucaggccg

SEQ ID NO: 2068 - RNA, 20 nt, Homo sapiens
uacaguauagaugauguacu

SEQ ID NO: 2069 - RNA, 23 nt, Homo sapiens
guccaguuuucccaggaaucccu

SEQ ID NO: 2070 - RNA, 22 nt, Homo sapiens
aaaaccgucuaguuacaguugu

SEQ ID NO: 2071 - RNA, 20 nt, Homo sapiens
uguuuugauaacaguaaugu

SEQ ID NO: 2072 - RNA, 23 nt, Homo sapiens
uaagugcuuccauguuuuaguag

SEQ ID NO: 2073 - RNA, 23 nt, Homo sapiens
uaagugcuuccauguuugagugu

SEQ ID NO: 2074 - RNA, 22 nt, Homo sapiens
aaaccguuaccauuacugaguu

SEQ ID NO: 2075 - RNA, 22 nt, Homo sapiens
aacuguuugcagaggaaacuga

SEQ ID NO: 2076 - RNA, 22 nt, Homo sapiens
ccucccacacccaaggcuugca

SEQ ID NO: 2077 - RNA, 21 nt, Homo sapiens
gcgacccauacuugguuucag

SEQ ID NO: 2078 - RNA, 21 nt, Homo sapiens
aaaacggugagauuuuguuuu

SEQ ID NO: 2079 - RNA, 21 nt, Homo sapiens
uggaggagaaggaaggugaug

SEQ ID NO: 2080 - RNA, 21 nt, Homo sapiens
uggcagggaggcugggagggg

SEQ ID NO: 2081 - RNA, 22 nt, Homo sapiens
uggagugugacaaugguguuug

SEQ ID NO: 2082 - RNA, 23 nt, Homo sapiens
ucuggcuccgugucuucacuccc

SEQ ID NO: 2083 - RNA, 21 nt, Homo sapiens
cggcggggacggcgauugguc

SEQ ID NO: 2084 - RNA, 22 nt, Homo sapiens
cgcaggggccgggugcucaccg

SEQ ID NO: 2085 - RNA, 24 nt, Homo sapiens
uucuccaaaagaaagcacuuucug

SEQ ID NO: 2086 - RNA, 22 nt, Homo sapiens
aagugccuccuuuuagaguguu

SEQ ID NO: 2087 - RNA, 21 nt, Homo sapiens
agggggaaaguucuauagucc

SEQ ID NO: 2088 - RNA, 21 nt, Homo sapiens
uggguuuacguugggagaacu

SEQ ID NO: 2089 - RNA, 22 nt, Homo sapiens
aggcggggcgccgcgggaccgc

SEQ ID NO: 2090 - RNA, 21 nt, Homo sapiens
aaggcagggcccccgcucccc

SEQ ID NO: 2091 - RNA, 21 nt, Homo sapiens
uaggacacauggucuacuucu

SEQ ID NO: 2092 - RNA, 18 nt, Homo sapiens
cgggcguggugguggggg

SEQ ID NO: 2093 - RNA, 22 nt, Homo sapiens
cucggcgcggggcgcgggcucc

SEQ ID NO: 2094 - RNA, 23 nt, Homo sapiens
ucuggcuccgugucuucacuccc

SEQ ID NO: 2095 - RNA, 22 nt, Homo sapiens
ucucccaacccuuguaccagug

SEQ ID NO: 2096 - RNA, 23 nt, Homo sapiens
cggcccgggcugcugcuguuccu

SEQ ID NO: 2097 - RNA, 22 nt, Homo sapiens
uguaaacauccuacacucagcu

SEQ ID NO: 2098 - RNA, 21 nt, Homo sapiens
ucacuccucuccucccgucuu

SEQ ID NO: 2099 - RNA, 25 nt, Homo sapiens
aggggugguguugggacagcuccgu

SEQ ID NO: 2100 - RNA, 22 nt, Homo sapiens
gguggcccggccgugccugagg

SEQ ID NO: 2101 - RNA, 20 nt, Homo sapiens
accaggaggcugaggccccu

SEQ ID NO: 2102 - RNA, 23 nt, Homo sapiens
cgggucggaguuagcucaagcgg

SEQ ID NO: 2103 - RNA, 22 nt, Homo sapiens
caaagugccucccuuuagagug

SEQ ID NO: 2104 - RNA, 23 nt, Homo sapiens
aaaagugcuuacagugcagguag

SEQ ID NO: 2105 - RNA, 19 nt, Homo sapiens
uggauuuuuggaucaggga

SEQ ID NO: 2106 - RNA, 22 nt, Homo sapiens
uggagagaaaggcaguuccuga

SEQ ID NO: 2107 - RNA, 21 nt, Homo sapiens
cucccacaugcaggguuugca

SEQ ID NO: 2108 - RNA, 22 nt, Homo sapiens
uaugugggaugguaaaccgcuu

SEQ ID NO: 2109 - RNA, 22 nt, Homo sapiens
uggcagugucuuagcugguugu

SEQ ID NO: 2110 - RNA, 23 nt, Homo sapiens
uaaaucccauggugccuucuccu

SEQ ID NO: 2111 - RNA, 22 nt, Homo sapiens
gugagucucuaagaaaagagga

SEQ ID NO: 2112 - RNA, 21 nt, Homo sapiens
cgcgggugcuuacugacccuu

SEQ ID NO: 2113 - RNA, 20 nt, Homo sapiens
ggggagcuguggaagcagua

SEQ ID NO: 2114 - RNA, 22 nt, Homo sapiens
cuccugagccauucugagccuc

SEQ ID NO: 2115 - RNA, 22 nt, Homo sapiens
acaggugagguucuugggagcc

SEQ ID NO: 2116 - RNA, 22 nt, Homo sapiens
uucaccaccuucuccacccagc

SEQ ID NO: 2117 - RNA, 21 nt, Homo sapiens
uucaaguaauucaggauaggu

SEQ ID NO: 2118 - RNA, 22 nt, Homo sapiens
uguaaacauccucgacuggaag

SEQ ID NO: 2119 - RNA, 22 nt, Homo sapiens
uguaaacauccuacacucagcu

SEQ ID NO: 2120 - RNA, 23 nt, Homo sapiens
uguaaacauccuacacucucagc

SEQ ID NO: 2121 - RNA, 22 nt, Homo sapiens
uguaaacauccccgacuggaag

SEQ ID NO: 2122 - RNA, 22 nt, Homo sapiens
uguaaacauccuugacuggaag

SEQ ID NO: 2123 - RNA, 22 nt, Homo sapiens
uacucaggagaguggcaaucac

SEQ ID NO: 2124 - RNA, 21 nt, Homo sapiens
aacaggugacugguuagacaa

SEQ ID NO: 2125 - RNA, 22 nt, Homo sapiens
ugagaaccacgucugcucugag

SEQ ID NO: 2126 - RNA, 23 nt, Homo sapiens
ucaaaugcucagacuccuguggu

SEQ ID NO: 2127 - RNA, 21 nt, Homo sapiens
cuuuuugcggucugggcuugc

SEQ ID NO: 2128 - RNA, 23 nt, Homo sapiens
uauggcuuuuuauuccuauguga

SEQ ID NO: 2129 - RNA, 20 nt, Homo sapiens
ggggagcuguggaagcagua

SEQ ID NO: 2130 - RNA, 21 nt, Homo sapiens
auuugugcuuggcucugucac

SEQ ID NO: 2131 - RNA, 22 nt, Homo sapiens
acacagggcuguugugaagacu

SEQ ID NO: 2132 - RNA, 23 nt, Homo sapiens
gcaaagcacacggccugcagaga

SEQ ID NO: 2133 - RNA, 22 nt, Homo sapiens
uaaugccccuaaaaauccuuau

SEQ ID NO: 2134 - RNA, 22 nt, Homo sapiens
cuuaugcaagauucccuucuac

SEQ ID NO: 2135 - RNA, 22 nt, Homo sapiens
aaaaguaauugcgaguuuuacc

SEQ ID NO: 2136 - RNA, 22 nt, Homo sapiens
aaaaguaauugugguuuuggcc

SEQ ID NO: 2137 - RNA, 22 nt, Homo sapiens
aaaaguaauugcgguuuuugcc

SEQ ID NO: 2138 - RNA, 22 nt, Homo sapiens
aaaaguaauugugguuuuugcc

SEQ ID NO: 2139 - RNA, 22 nt, Homo sapiens
aaaaguaaucgcgguuuuuguc

SEQ ID NO: 2140 - RNA, 22 nt, Homo sapiens
aaaaguaauugcggauuuugcc

SEQ ID NO: 2141 - RNA, 22 nt, Homo sapiens
aaaaguaauugcggucuuuggu

SEQ ID NO: 2142 - RNA, 22 nt, Homo sapiens
uagcaaaaacugcaguuacuuu

SEQ ID NO: 2143 - RNA, 21 nt, Homo sapiens
uaaaguaaauaugcaccaaaa

SEQ ID NO: 2144 - RNA, 23 nt, Homo sapiens
aguauguucuuccaggacagaac

SEQ ID NO: 2145 - RNA, 23 nt, Homo sapiens
caguaacaaagauucauccuugu

SEQ ID NO: 2146 - RNA, 22 nt, Homo sapiens
ucuucucuguuuuggccaugug

SEQ ID NO: 2147 - RNA, 21 nt, Homo sapiens
gugccagcugcagugggggag

SEQ ID NO: 2148 - RNA, 21 nt, Homo sapiens
acggugcuggauguggccuuu

SEQ ID NO: 2149 - RNA, 17 nt, Homo sapiens
gugggggagaggcuguc

SEQ ID NO: 2150 - RNA, 17 nt, Homo sapiens
ucgccuccuccucuccc

SEQ ID NO: 2151 - RNA, 22 nt, Homo sapiens
caaagaauucuccuuuugggcu

SEQ ID NO: 2152 - RNA, 21 nt, Homo sapiens
auuugugcuuggcucugucac

SEQ ID NO: 2153 - RNA, 23 nt, Homo sapiens
uaagugcuuccauguuuugguga

SEQ ID NO: 2154 - RNA, 23 nt, Homo sapiens
uaagugcuuccauguuuuaguag

SEQ ID NO: 2155 - RNA, 23 nt, Homo sapiens
uaagugcuuccauguuucagugg

SEQ ID NO: 2156 - RNA, 23 nt, Homo sapiens
uaagugcuuccauguuugagugu

SEQ ID NO: 2157 - RNA, 17 nt, Homo sapiens
uaagugcuuccaugcuu

SEQ ID NO: 2158 - RNA, 23 nt, Homo sapiens
aaagugcugcgacauuugagcgu

SEQ ID NO: 2159 - RNA, 23 nt, Homo sapiens
gaagugcuucgauuuuggggugu

SEQ ID NO: 2160 - RNA, 22 nt, Homo sapiens
aagugcugucauagcugagguc

SEQ ID NO: 2161 - RNA, 22 nt, Homo sapiens
aaagugcuucccuuuggacugu

SEQ ID NO: 2162 - RNA, 21 nt, Homo sapiens
aaagugcuuccuuuuagaggg

SEQ ID NO: 2163 - RNA, 22 nt, Homo sapiens
aaagugcuuccuuuuagagggu

SEQ ID NO: 2164 - RNA, 22 nt, Homo sapiens
aaagugcuucucuuuggugggu

SEQ ID NO: 2165 - RNA, 21 nt, Homo sapiens
aaagugcuuccuuuuugaggg

SEQ ID NO: 2166 - RNA, 22 nt, Homo sapiens
uugugucaauaugcgaugaugu

SEQ ID NO: 2167 - RNA, 22 nt, Homo sapiens
ugugucacucgaugaccacugu

SEQ ID NO: 2168 - RNA, 20 nt, Homo sapiens
guugugucaguuuaucaaac

SEQ ID NO: 2169 - RNA, 21 nt, Homo sapiens
agaccuggcccagaccucagc

SEQ ID NO: 2170 - RNA, 21 nt, Homo sapiens
cccggagccaggaugcagcuc

SEQ ID NO: 2171 - RNA, 23 nt, Homo sapiens
ucuggcuccgugucuucacuccc

SEQ ID NO: 2172 - RNA, 22 nt, Homo sapiens
agaggcuggccgugaugaauuc

SEQ ID NO: 2173 - RNA, 19 nt, Homo sapiens
aggcugcggaauucaggac

SEQ ID NO: 2174 - RNA, 22 nt, Homo sapiens
acuccagccccacagccucagc

SEQ ID NO: 2175 - RNA, 22 nt, Homo sapiens
auccgcgcucugacucucugcc

SEQ ID NO: 2176 - RNA, 24 nt, Homo sapiens
uggggagcugaggcucugggggug

SEQ ID NO: 2177 - RNA, 22 nt, Homo sapiens
uggaauguaaagaaguauguau

SEQ ID NO: 2178 - RNA, 23 nt, Homo sapiens
gagggucuugggagggaugugac

SEQ ID NO: 2179 - RNA, 21 nt, Homo sapiens
ccccaccuccucucuccucag

SEQ ID NO: 2180 - RNA, 22 nt, Homo sapiens
uggguggucuggagauuugugc

SEQ ID NO: 2181 - RNA, 22 nt, Homo sapiens
uagcagcacauaaugguuugug

SEQ ID NO: 2182 - RNA, 22 nt, Homo sapiens
uagcagcacaucaugguuuaca

SEQ ID NO: 2183 - RNA, 22 nt, Homo sapiens
uagcagcacguaaauauuggcg

SEQ ID NO: 2184 - RNA, 22 nt, Homo sapiens
aacuguuugcagaggaaacuga

SEQ ID NO: 2185 - RNA, 22 nt, Homo sapiens
aacuguuugcagaggaaacuga

SEQ ID NO: 2186 - RNA, 21 nt, Homo sapiens
uagcagcacagaaauauuggc

SEQ ID NO: 2187 - RNA, 21 nt, Homo sapiens
uagcagcacagaaauauuggc

SEQ ID NO: 2188 - RNA, 21 nt, Homo sapiens
uagcagcacagaaauauuggc

SEQ ID NO: 2189 - RNA, 22 nt, Homo sapiens
uggaauguaaggaagugugugg

SEQ ID NO: 2190 - RNA, 21 nt, Homo sapiens
ccaccaccgugucugacacuu

SEQ ID NO: 2191 - RNA, 22 nt, Homo sapiens
uagcaccaucugaaaucgguua

SEQ ID NO: 2192 - RNA, 23 nt, Homo sapiens
uagcaccauuugaaaucaguguu

SEQ ID NO: 2193 - RNA, 22 nt, Homo sapiens
uagcaccauuugaaaucgguua

SEQ ID NO: 2194 - RNA, 21 nt, Homo sapiens
uaaagugcugacagugcagau

SEQ ID NO: 2195 - RNA, 23 nt, Homo sapiens
cagugcaaugauauugucaaagc

SEQ ID NO: 2196 - RNA, 22 nt, Homo sapiens
uggcagugucuuagcugguugu

SEQ ID NO: 2197 - RNA, 22 nt, Homo sapiens
uauguaauaugguccacaucuu

SEQ ID NO: 2198 - RNA, 22 nt, Homo sapiens
cagcagcaauucauguuuugaa

SEQ ID NO: 2199 - RNA, 21 nt, Homo sapiens
cagcagcacacugugguuugu

SEQ ID NO: 2200 - RNA, 21 nt, Homo sapiens
ugaguuggccaucugagugag

SEQ ID NO: 2201 - RNA, 25 nt, Homo sapiens
aggggugguguugggacagcuccgu

SEQ ID NO: 2202 - RNA, 20 nt, Homo sapiens
aggaauguuccuucuuugcc

SEQ ID NO: 2203 - RNA, 23 nt, Homo sapiens
aaacucuacuuguccuucugagu

SEQ ID NO: 2204 - RNA, 19 nt, Homo sapiens
agcugucugaaaaugucuu

SEQ ID NO: 2205 - RNA, 20 nt, Homo sapiens
ggggagcuguggaagcagua

SEQ ID NO: 2206 - RNA, 22 nt, Homo sapiens
acaguagagggaggaaucgcag

SEQ ID NO: 2207 - RNA, 22 nt, Homo sapiens
ugagguaguagguuguauaguu

SEQ ID NO: 2208 - RNA, 22 nt, Homo sapiens
ugagguaguagguugugugguu

SEQ ID NO: 2209 - RNA, 22 nt, Homo sapiens
ugagguaguagguuguaugguu

SEQ ID NO: 2210 - RNA, 22 nt, Homo sapiens
agagguaguagguugcauaguu

SEQ ID NO: 2211 - RNA, 22 nt, Homo sapiens
ugagguaggagguuguauaguu

SEQ ID NO: 2212 - RNA, 22 nt, Homo sapiens
ugagguaguagauuguauaguu

SEQ ID NO: 2213 - RNA, 22 nt, Homo sapiens
ugagguaguaguuuguacaguu

SEQ ID NO: 2214 - RNA, 22 nt, Homo sapiens
ugagguaguaguuugugcuguu

SEQ ID NO: 2215 - RNA, 21 nt, Homo sapiens
uggcagggaggcugggagggg

SEQ ID NO: 2216 - RNA, 18 nt, Homo sapiens
cgggcguggugguggggg

SEQ ID NO: 2217 - RNA, 22 nt, Homo sapiens
ucugggcaacaaagugagaccu

SEQ ID NO: 2218 - RNA, 19 nt, Homo sapiens
uggauuuuuggaucaggga

SEQ ID NO: 2219 - RNA, 22 nt, Homo sapiens
uguaacagcaacuccaugugga

SEQ ID NO: 2220 - RNA, 21 nt, Homo sapiens
aggggugcuaucugugauuga

SEQ ID NO: 2221 - RNA, 22 nt, Homo sapiens
gcugacuccuaguccagggcuc

SEQ ID NO: 2222 - RNA, 22 nt, Homo sapiens
uaaugccccuaaaaauccuuau

SEQ ID NO: 2223 - RNA, 25 nt, Homo sapiens
aggggugguguugggacagcuccgu

SEQ ID NO: 2224 - RNA, 25 nt, Homo sapiens
gcugggcagggcuucugagcuccuu

SEQ ID NO: 2225 - RNA, 21 nt, Homo sapiens
uggguuuacguugggagaacu

SEQ ID NO: 2226 - RNA, 20 nt, Homo sapiens
ggggagcuguggaagcagua

SEQ ID NO: 2227 - RNA, 21 nt, Homo sapiens
aaggcagggcccccgcucccc

SEQ ID NO: 2228 - RNA, 22 nt, Homo sapiens
ugagguaguaaguuguauuguu

SEQ ID NO: 2229 - RNA, 22 nt, Homo sapiens
ucggccugaccacccaccccac

SEQ ID NO: 2230 - RNA, 24 nt, Homo sapiens
agccuggaagcuggagccugcagu

SEQ ID NO: 2231 - RNA, 18 nt, Homo sapiens
gucccuguucaggcgcca

SEQ ID NO: 2232 - RNA, 17 nt, Homo sapiens
gugggggagaggcuguc

SEQ ID NO: 2233 - RNA, 20 nt, Homo sapiens
uaaagagcccuguggagaca

SEQ ID NO: 2234 - RNA, 22 nt, Homo sapiens
cagugcaaugaugaaagggcau

SEQ ID NO: 2235 - RNA, 18 nt, Homo sapiens
cagggaggugaaugugau

SEQ ID NO: 2236 - RNA, 18 nt, Homo sapiens
ugaggcaguagauugaau

SEQ ID NO: 2237 - RNA, 23 nt, Homo sapiens
ugugcaaaucuaugcaaaacuga

SEQ ID NO: 2238 - RNA, 22 nt, Homo sapiens
aacaauauccuggugcugagug

SEQ ID NO: 2239 - RNA, 22 nt, Homo sapiens
agagguaguagguugcauaguu

SEQ ID NO: 2240 - RNA, 23 nt, Homo sapiens
ucccuguccuccaggagcucacg

SEQ ID NO: 2241 - RNA, 21 nt, Homo sapiens
aagccugcccggcuccucggg

SEQ ID NO: 2242 - RNA, 21 nt, Homo sapiens
aggaggcagcgcucucaggac

SEQ ID NO: 2243 - RNA, 23 nt, Homo sapiens
aggaagcccuggaggggcuggag

SEQ ID NO: 2244 - RNA, 24 nt, Homo sapiens
uggggagcugaggcucugggggug

SEQ ID NO: 2245 - RNA, 18 nt, Homo sapiens
ucagcuggcccucauuuc

SEQ ID NO: 2246 - RNA, 18 nt, Homo sapiens
ucagcuggcccucauuuc

SEQ ID NO: 2247 - RNA, 22 nt, Homo sapiens
ucaccagcccuguguucccuag

SEQ ID NO: 2248 - RNA, 24 nt, Homo sapiens
ucccugagacccuuuaaccuguga

SEQ ID NO: 2249 - RNA, 22 nt, Homo sapiens
ucccugagacccuaacuuguga

SEQ ID NO: 2250 - RNA, 23 nt, Homo sapiens
ccucagggcuguagaacagggcu

SEQ ID NO: 2251 - RNA, 23 nt, Homo sapiens
agcugguguugugaaucaggccg

SEQ ID NO: 2252 - RNA, 22 nt, Homo sapiens
uuggggaaacggccgcugagug

SEQ ID NO: 2253 - RNA, 21 nt, Homo sapiens
aucacauugccagggauuucc

SEQ ID NO: 2254 - RNA, 21 nt, Homo sapiens
aucacauugccagggauuacc

SEQ ID NO: 2255 - RNA, 23 nt, Homo sapiens
ucccccaggugugauucugauuu

SEQ ID NO: 2256 - RNA, 22 nt, Homo sapiens
ucaggcucaguccccucccgau

SEQ ID NO: 2257 - RNA, 22 nt, Homo sapiens
aguggggaacccuuccaugagg

SEQ ID NO: 2258 - RNA, 24 nt, Homo sapiens
acaaagugcuucccuuuagagugu

SEQ ID NO: 2259 - RNA, 22 nt, Homo sapiens
acaaagugcuucccuuuagagu

SEQ ID NO: 2260 - RNA, 25 nt, Homo sapiens
aggggugguguugggacagcuccgu

SEQ ID NO: 2261 - RNA, 23 nt, Homo sapiens
aucccuugcaggggcuguugggu

SEQ ID NO: 2262 - RNA, 24 nt, Homo sapiens
acugggggcuuucgggcucugcgu

SEQ ID NO: 2263 - RNA, 24 nt, Homo sapiens
ugccugggucucuggccugcgcgu

SEQ ID NO: 2264 - RNA, 22 nt, Homo sapiens
acuccagccccacagccucagc

SEQ ID NO: 2265 - RNA, 20 nt, Homo sapiens
ggggagcuguggaagcagua

SEQ ID NO: 2266 - RNA, 27 nt, Homo sapiens
cacuguaggugauggugagagugggca

SEQ ID NO: 2267 - RNA, 18 nt, Homo sapiens
ucagcuggcccucauuuc

SEQ ID NO: 2268 - RNA, 17 nt, Homo sapiens
gugggggagaggcuguc

SEQ ID NO: 2269 - RNA, 22 nt, Homo sapiens
ucuacagugcacgugucuccag

SEQ ID NO: 2270 - RNA, 22 nt, Homo sapiens
uggagagaaaggcaguuccuga

SEQ ID NO: 2271 - RNA, 23 nt, Homo sapiens
ucccccaggugugauucugauuu

SEQ ID NO: 2272 - RNA, 21 nt, Homo sapiens
agggggaaaguucuauagucc

SEQ ID NO: 2273 - RNA, 24 nt, Homo sapiens
acugggggcuuucgggcucugcgu

SEQ ID NO: 2274 - RNA, 22 nt, Homo sapiens
gucccucuccaaaugugucuug

SEQ ID NO: 2275 - RNA, 20 nt, Homo sapiens
guagaggagauggcgcaggg

SEQ ID NO: 2276 - RNA, 22 nt, Homo sapiens
ucuucucuguuuuggccaugug

SEQ ID NO: 2277 - RNA, 22 nt, Homo sapiens
cuccugagccauucugagccuc

SEQ ID NO: 2278 - RNA, 21 nt, Homo sapiens
uggcagggaggcugggagggg

SEQ ID NO: 2279 - RNA, 22 nt, Homo sapiens
uuugguccccuucaaccagcug

SEQ ID NO: 2280 - RNA, 22 nt, Homo sapiens
cuagguauggucccagggaucc

SEQ ID NO: 2281 - RNA, 23 nt, Homo sapiens
uaauccuugcuaccugggugaga

SEQ ID NO: 2282 - RNA, 22 nt, Homo sapiens
uucacaaggaggugucauuuau

SEQ ID NO: 2283 - RNA, 22 nt, Homo sapiens
ugugacagauugauaacugaaa

SEQ ID NO: 2284 - RNA, 22 nt, Homo sapiens
aaccagcaccccaacuuuggac

SEQ ID NO: 2285 - RNA, 21 nt, Homo sapiens
guggcugcacucacuuccuuc

SEQ ID NO: 2286 - RNA, 21 nt, Homo sapiens
aaggcagggcccccgcucccc

SEQ ID NO: 2287 - RNA, 22 nt, Homo sapiens
uagguuauccguguugccuucg

SEQ ID NO: 2288 - RNA, 21 nt, Homo sapiens
auguaugugugcaugugcaug

SEQ ID NO: 2289 - RNA, 23 nt, Homo sapiens
gcaaagcacacggccugcagaga

SEQ ID NO: 2290 - RNA, 21 nt, Homo sapiens
aauauaacacagauggccugu

SEQ ID NO: 2291 - RNA, 23 nt, Homo sapiens
uggugcggagagggcccacagug

SEQ ID NO: 2292 - RNA, 20 nt, Homo sapiens
ucacuguucagacaggcgga

SEQ ID NO: 2293 - RNA, 21 nt, Homo sapiens
agugaaugauggguucugacc

SEQ ID NO: 2294 - RNA, 22 nt, Homo sapiens
ucguaccgugaguaauaaugcg

SEQ ID NO: 2295 - RNA, 21 nt, Homo sapiens
uaccacaggguagaaccacgg

SEQ ID NO: 2296 - RNA, 21 nt, Homo sapiens
gguuugguccuagccuuucua

SEQ ID NO: 2297 - RNA, 23 nt, Homo sapiens
cuguaauauaaauuuaauuuauu

SEQ ID NO: 2298 - RNA, 23 nt, Homo sapiens
uaagugcuuccauguuuuaguag

SEQ ID NO: 2299 - RNA, 23 nt, Homo sapiens
uaagugcuuccauguuugagugu

SEQ ID NO: 2300 - RNA, 22 nt, Homo sapiens
aacuguuugcagaggaaacuga

SEQ ID NO: 2301 - RNA, 21 nt, Homo sapiens
uaauuuuauguauaagcuagu

SEQ ID NO: 2302 - RNA, 23 nt, Homo sapiens
acuuacagacaagagccuugcuc

SEQ ID NO: 2303 - RNA, 23 nt, Homo sapiens
uggaagacuagugauuuuguugu

SEQ ID NO: 2304 - RNA, 18 nt, Homo sapiens
ucagcuggcccucauuuc

SEQ ID NO: 2305 - RNA, 18 nt, Homo sapiens
ucagcuggcccucauuuc

SEQ ID NO: 2306 - RNA, 17 nt, Homo sapiens
ucgccuccuccucuccc

SEQ ID NO: 2307 - RNA, 22 nt, Homo sapiens
ucugggcaacaaagugagaccu

SEQ ID NO: 2308 - RNA, 22 nt, Homo sapiens
ucugggcaacaaagugagaccu

SEQ ID NO: 2309 - RNA, 21 nt, Homo sapiens
gcccuccgcccgugcaccccg

SEQ ID NO: 2310 - RNA, 23 nt, Homo sapiens
ucuggcuccgugucuucacuccc

SEQ ID NO: 2311 - RNA, 25 nt, Homo sapiens
cccccacaaccgcgcuugacuagcu

SEQ ID NO: 2312 - RNA, 20 nt, Homo sapiens
ccuccugcccuccuugcugu

SEQ ID NO: 2313 - RNA, 22 nt, Homo sapiens
cauugcacuugucucggucuga

SEQ ID NO: 2314 - RNA, 21 nt, Homo sapiens
ucacuccucuccucccgucuu

SEQ ID NO: 2315 - RNA, 22 nt, Homo sapiens
agaggcuggccgugaugaauuc

SEQ ID NO: 2316 - RNA, 22 nt, Homo sapiens
cgucaacacuugcugguuuccu

SEQ ID NO: 2317 - RNA, 19 nt, Homo sapiens
aggcugcggaauucaggac

SEQ ID NO: 2318 - RNA, 25 nt, Homo sapiens
gcugggcagggcuucugagcuccuu

SEQ ID NO: 2319 - RNA, 25 nt, Homo sapiens
gcugggcagggcuucugagcuccuu

SEQ ID NO: 2320 - RNA, 21 nt, Homo sapiens
agggggaaaguucuauagucc

SEQ ID NO: 2321 - RNA, 25 nt, Homo sapiens
ggcggagggaaguagguccguuggu

SEQ ID NO: 2322 - RNA, 20 nt, Homo sapiens
accaggaggcugaggccccu

SEQ ID NO: 2323 - RNA, 22 nt, Homo sapiens
acuccagccccacagccucagc

SEQ ID NO: 2324 - RNA, 22 nt, Homo sapiens
acuccagccccacagccucagc

SEQ ID NO: 2325 - RNA, 23 nt, Homo sapiens
guccaguuuucccaggaaucccu

SEQ ID NO: 2326 - RNA, 22 nt, Homo sapiens
uauggcacugguagaauucacu

SEQ ID NO: 2327 - RNA, 24 nt, Homo sapiens
agcagaagcagggagguucuccca

SEQ ID NO: 2328 - RNA, 23 nt, Homo sapiens
ucaagagcaauaacgaaaaaugu

SEQ ID NO: 2329 - RNA, 22 nt, Homo sapiens
aacuguuugcagaggaaacuga

SEQ ID NO: 2330 - RNA, 22 nt, Homo sapiens
uucucaaggaggugucguuuau

SEQ ID NO: 2331 - RNA, 23 nt, Homo sapiens
uucucgaggaaagaagcacuuuc

SEQ ID NO: 2332 - RNA, 23 nt, Homo sapiens
cucuugagggaagcacuuucugu

SEQ ID NO: 2333 - RNA, 22 nt, Homo sapiens
aggcagcgggguguaguggaua

SEQ ID NO: 2334 - RNA, 22 nt, Homo sapiens
caaagugccucccuuuagagug

SEQ ID NO: 2335 - RNA, 17 nt, Homo sapiens
ucgccuccuccucuccc

SEQ ID NO: 2336 - RNA, 22 nt, Homo sapiens
ucugggcaacaaagugagaccu

SEQ ID NO: 2337 - RNA, 21 nt, Homo sapiens
cggcggggacggcgauugguc

SEQ ID NO: 2338 - RNA, 21 nt, Homo sapiens
cggcggggacggcgauugguc

SEQ ID NO: 2339 - RNA, 22 nt, Homo sapiens
cccugugcccggcccacuucug

SEQ ID NO: 2340 - RNA, 22 nt, Homo sapiens
ugggucuuugcgggcgagauga

SEQ ID NO: 2341 - RNA, 22 nt, Homo sapiens
aacuggcccucaaagucccgcu

SEQ ID NO: 2342 - RNA, 22 nt, Homo sapiens
cauugcacuugucucggucuga

SEQ ID NO: 2343 - RNA, 22 nt, Homo sapiens
uguaaacauccuacacucagcu

SEQ ID NO: 2344 - RNA, 21 nt, Homo sapiens
aggcaagaugcuggcauagcu

SEQ ID NO: 2345 - RNA, 20 nt, Homo sapiens
ccucugggcccuuccuccag

SEQ ID NO: 2346 - RNA, 22 nt, Homo sapiens
ucucugggccugugucuuaggc

SEQ ID NO: 2347 - RNA, 21 nt, Homo sapiens
ugucuugcaggccgucaugca

SEQ ID NO: 2348 - RNA, 22 nt, Homo sapiens
ucaggcucaguccccucccgau

SEQ ID NO: 2349 - RNA, 25 nt, Homo sapiens
gcugggcagggcuucugagcuccuu

SEQ ID NO: 2350 - RNA, 22 nt, Homo sapiens
aggcggggcgccgcgggaccgc

SEQ ID NO: 2351 - RNA, 22 nt, Homo sapiens
aggcggggcgccgcgggaccgc

SEQ ID NO: 2352 - RNA, 20 nt, Homo sapiens
accaggaggcugaggccccu

SEQ ID NO: 2353 - RNA, 22 nt, Homo sapiens
ugcggggcuagggcuaacagca

SEQ ID NO: 2354 - RNA, 22 nt, Homo sapiens
uggaauguaaagaaguauguau

SEQ ID NO: 2355 - RNA, 23 nt, Homo sapiens
ccugcagcgacuugauggcuucc

SEQ ID NO: 2356 - RNA, 23 nt, Homo sapiens
ccugcagcgacuugauggcuucc

SEQ ID NO: 2357 - RNA, 22 nt, Homo sapiens
cagugcaauguuaaaagggcau

SEQ ID NO: 2358 - RNA, 22 nt, Homo sapiens
uaacacugucugguaaagaugg

SEQ ID NO: 2359 - RNA, 22 nt, Homo sapiens
ucugcccccuccgcugcugcca

SEQ ID NO: 2360 - RNA, 23 nt, Homo sapiens
cccaguguucagacuaccuguuc

SEQ ID NO: 2361 - RNA, 23 nt, Homo sapiens
cccaguguuuagacuaucuguuc

SEQ ID NO: 2362 - RNA, 22 nt, Homo sapiens
uaacacugucugguaacgaugu

SEQ ID NO: 2363 - RNA, 22 nt, Homo sapiens
uggaauguaaggaagugugugg

SEQ ID NO: 2364 - RNA, 21 nt, Homo sapiens
aucacauugccagggauuucc

SEQ ID NO: 2365 - RNA, 21 nt, Homo sapiens
aucacauugccagggauuacc

SEQ ID NO: 2366 - RNA, 21 nt, Homo sapiens
uaaagugcugacagugcagau

SEQ ID NO: 2367 - RNA, 23 nt, Homo sapiens
cagugcaaugauauugucaaagc

SEQ ID NO: 2368 - RNA, 20 nt, Homo sapiens
acugccccaggugcugcugg

SEQ ID NO: 2369 - RNA, 21 nt, Homo sapiens
cggggcagcucaguacaggau

SEQ ID NO: 2370 - RNA, 22 nt, Homo sapiens
ucagcaaacauuuauugugugc

SEQ ID NO: 2371 - RNA, 20 nt, Homo sapiens
aggaauguuccuucuuugcc

SEQ ID NO: 2372 - RNA, 24 nt, Homo sapiens
ugccugggucucuggccugcgcgu

SEQ ID NO: 2373 - RNA, 22 nt, Homo sapiens
acuccagccccacagccucagc

SEQ ID NO: 2374 - RNA, 26 nt, Homo sapiens
gaugaugauggcagcaaauucugaaa

SEQ ID NO: 2375 - RNA, 22 nt, Homo sapiens
cugaagcucagagggcucugau

SEQ ID NO: 2376 - RNA, 18 nt, Homo sapiens
uugagaaggaggcugcug

SEQ ID NO: 2377 - RNA, 18 nt, Homo sapiens
uugagaaggaggcugcug

SEQ ID NO: 2378 - RNA, 24 nt, Homo sapiens
uugcagcugccugggagugacuuc

SEQ ID NO: 2379 - RNA, 22 nt, Homo sapiens
uuugaggcuacagugagaugug

SEQ ID NO: 2380 - RNA, 22 nt, Homo sapiens
cagugcaaugaugaaagggcau

SEQ ID NO: 2381 - RNA, 21 nt, Homo sapiens
gugucuuuugcucugcaguca

SEQ ID NO: 2382 - RNA, 20 nt, Homo sapiens
cugcaaagggaagcccuuuc

SEQ ID NO: 2383 - RNA, 24 nt, Homo sapiens
acaaagugcuucccuuuagagugu

SEQ ID NO: 2384 - RNA, 22 nt, Homo sapiens
acaaagugcuucccuuuagagu

SEQ ID NO: 2385 - RNA, 23 nt, Homo sapiens
cucuugagggaagcacuuucugu

SEQ ID NO: 2386 - RNA, 20 nt, Homo sapiens
cugcaaagggaagcccuuuc

SEQ ID NO: 2387 - RNA, 20 nt, Homo sapiens
aggguguuucucucaucucu

SEQ ID NO: 2388 - RNA, 21 nt, Homo sapiens
uggcagggaggcugggagggg

SEQ ID NO: 2389 - RNA, 22 nt, Homo sapiens
uggagugugacaaugguguuug

SEQ ID NO: 2390 - RNA, 22 nt, Homo sapiens
ucggccugaccacccaccccac

SEQ ID NO: 2391 - RNA, 24 nt, Homo sapiens
uggcccugacugaagaccagcagu

SEQ ID NO: 2392 - RNA, 23 nt, Homo sapiens
ucuggcuccgugucuucacuccc

SEQ ID NO: 2393 - RNA, 22 nt, Homo sapiens
uggagagaaaggcaguuccuga

SEQ ID NO: 2394 - RNA, 21 nt, Homo sapiens
cggcggggacggcgauugguc

SEQ ID NO: 2395 - RNA, 22 nt, Homo sapiens
cgcaggggccgggugcucaccg

SEQ ID NO: 2396 - RNA, 22 nt, Homo sapiens
ucugcccccuccgcugcugcca

SEQ ID NO: 2397 - RNA, 20 nt, Homo sapiens
acugccccaggugcugcugg

SEQ ID NO: 2398 - RNA, 22 nt, Homo sapiens
uggcagugucuuagcugguugu

SEQ ID NO: 2399 - RNA, 23 nt, Homo sapiens
aggcaguguaguuagcugauugc

SEQ ID NO: 2400 - RNA, 23 nt, Homo sapiens
ucccccaggugugauucugauuu

SEQ ID NO: 2401 - RNA, 21 nt, Homo sapiens
aauauaacacagauggccugu

SEQ ID NO: 2402 - RNA, 22 nt, Homo sapiens
uggcaguguauuguuagcuggu

SEQ ID NO: 2403 - RNA, 22 nt, Homo sapiens
aggcaguguauuguuagcuggc

SEQ ID NO: 2404 - RNA, 21 nt, Homo sapiens
cggggcagcucaguacaggau

SEQ ID NO: 2405 - RNA, 23 nt, Homo sapiens
ugagugugugugugugagugugu

SEQ ID NO: 2406 - RNA, 24 nt, Homo sapiens
acugggggcuuucgggcucugcgu

SEQ ID NO: 2407 - RNA, 24 nt, Homo sapiens
ugccugggucucuggccugcgcgu

SEQ ID NO: 2408 - RNA, 22 nt, Homo sapiens
aggcggggcgccgcgggaccgc

SEQ ID NO: 2409 - RNA, 22 nt, Homo sapiens
cagugcaaugaugaaagggcau

SEQ ID NO: 2410 - RNA, 21 nt, Homo sapiens
cuagacugaagcuccuugagg

SEQ ID NO: 2411 - RNA, 22 nt, Homo sapiens
cucuagagggaagcacuuucug

SEQ ID NO: 2412 - RNA, 22 nt, Homo sapiens
aacuggccuacaaagucccagu

SEQ ID NO: 2413 - RNA, 22 nt, Homo sapiens
aacuggcccucaaagucccgcu

SEQ ID NO: 2414 - RNA, 22 nt, Homo sapiens
uguaacagcaacuccaugugga

SEQ ID NO: 2415 - RNA, 20 nt, Homo sapiens
ccuccugcccuccuugcugu

SEQ ID NO: 2416 - RNA, 22 nt, Homo sapiens
cucccacugcuucacuugacua

SEQ ID NO: 2417 - RNA, 22 nt, Homo sapiens
uuggggaaacggccgcugagug

SEQ ID NO: 2418 - RNA, 22 nt, Homo sapiens
cacuagauugugagcuccugga

SEQ ID NO: 2419 - RNA, 22 nt, Homo sapiens
uguaaacauccuacacucagcu

SEQ ID NO: 2420 - RNA, 22 nt, Homo sapiens
agaucagaaggugauuguggcu

SEQ ID NO: 2421 - RNA, 20 nt, Homo sapiens
auuccuagaaauuguucaua

SEQ ID NO: 2422 - RNA, 22 nt, Homo sapiens
aguggggaacccuuccaugagg

SEQ ID NO: 2423 - RNA, 22 nt, Homo sapiens
aaagugcauccuuuuagagugu

SEQ ID NO: 2424 - RNA, 22 nt, Homo sapiens
aaagugcauccuuuuagagguu

SEQ ID NO: 2425 - RNA, 22 nt, Homo sapiens
aaagugcaucuuuuuagaggau

SEQ ID NO: 2426 - RNA, 22 nt, Homo sapiens
ccucccacacccaaggcuugca

SEQ ID NO: 2427 - RNA, 22 nt, Homo sapiens
aaaaguaauugcgaguuuuacc

SEQ ID NO: 2428 - RNA, 22 nt, Homo sapiens
aaaaguaauugugguuuuggcc

SEQ ID NO: 2429 - RNA, 22 nt, Homo sapiens
aaaaguaauugcgguuuuugcc

SEQ ID NO: 2430 - RNA, 22 nt, Homo sapiens
aaaaguaauugugguuuuugcc

SEQ ID NO: 2431 - RNA, 22 nt, Homo sapiens
aaaaguaaucgcgguuuuuguc

SEQ ID NO: 2432 - RNA, 22 nt, Homo sapiens
aaaaguaauugcggauuuugcc

SEQ ID NO: 2433 - RNA, 22 nt, Homo sapiens
aaaaguaauugcggucuuuggu

SEQ ID NO: 2434 - RNA, 21 nt, Homo sapiens
uaaaguaaauaugcaccaaaa

SEQ ID NO: 2435 - RNA, 21 nt, Homo sapiens
caaagaggaaggucccauuac

SEQ ID NO: 2436 - RNA, 25 nt, Homo sapiens
aggggugguguugggacagcuccgu

SEQ ID NO: 2437 - RNA, 21 nt, Homo sapiens
aggaggcagcgcucucaggac

SEQ ID NO: 2438 - RNA, 20 nt, Homo sapiens
ggggagcuguggaagcagua

SEQ ID NO: 2439 - RNA, 22 nt, Homo sapiens
ugugcgcagggagaccucuccc

SEQ ID NO: 2440 - RNA, 22 nt, Homo sapiens
ucuucucuguuuuggccaugug

SEQ ID NO: 2441 - RNA, 21 nt, Homo sapiens
uggcagggaggcugggagggg

SEQ ID NO: 2442 - RNA, 23 nt, Homo sapiens
ucuggcuccgugucuucacuccc

SEQ ID NO: 2443 - RNA, 21 nt, Homo sapiens
cggcggggacggcgauugguc

SEQ ID NO: 2444 - RNA, 22 nt, Homo sapiens
cgcaggggccgggugcucaccg

SEQ ID NO: 2445 - RNA, 20 nt, Homo sapiens
ccccagggcgacgcggcggg

SEQ ID NO: 2446 - RNA, 22 nt, Homo sapiens
aacuggcccucaaagucccgcu

SEQ ID NO: 2447 - RNA, 20 nt, Homo sapiens
uguuuugauaacaguaaugu

SEQ ID NO: 2448 - RNA, 23 nt, Homo sapiens
ucccccaggugugauucugauuu

SEQ ID NO: 2449 - RNA, 18 nt, Homo sapiens
ugcuuccuuucagagggu

SEQ ID NO: 2450 - RNA, 22 nt, Homo sapiens
aucuggagguaagaagcacuuu

SEQ ID NO: 2451 - RNA, 21 nt, Homo sapiens
gcgacccacucuugguuucca

SEQ ID NO: 2452 - RNA, 21 nt, Homo sapiens
gcgacccauacuugguuucag

SEQ ID NO: 2453 - RNA, 24 nt, Homo sapiens
acugggggcuuucgggcucugcgu

SEQ ID NO: 2454 - RNA, 22 nt, Homo sapiens
aggcggggcgccgcgggaccgc

SEQ ID NO: 2455 - RNA, 23 nt, Homo sapiens
cgggucggaguuagcucaagcgg

SEQ ID NO: 2456 - RNA, 20 nt, Homo sapiens
ggggagcuguggaagcagua

SEQ ID NO: 2457 - RNA, 23 nt, Homo sapiens
agcagcauuguacagggcuauga

SEQ ID NO: 2458 - RNA, 23 nt, Homo sapiens
agcagcauuguacagggcuauca

SEQ ID NO: 2459 - RNA, 23 nt, Homo sapiens
ucuggcuccgugucuucacuccc

SEQ ID NO: 2460 - RNA, 22 nt, Homo sapiens
uagcagcacauaaugguuugug

SEQ ID NO: 2461 - RNA, 22 nt, Homo sapiens
uagcagcacaucaugguuuaca

SEQ ID NO: 2462 - RNA, 22 nt, Homo sapiens
uagcagcacguaaauauuggcg

SEQ ID NO: 2463 - RNA, 22 nt, Homo sapiens
uacccagagcaugcagugugaa

SEQ ID NO: 2464 - RNA, 22 nt, Homo sapiens
ucugcccccuccgcugcugcca

SEQ ID NO: 2465 - RNA, 23 nt, Homo sapiens
caacggaaucccaaaagcagcug

SEQ ID NO: 2466 - RNA, 21 nt, Homo sapiens
uagcagcacagaaauauuggc

SEQ ID NO: 2467 - RNA, 20 nt, Homo sapiens
acugccccaggugcugcugg

SEQ ID NO: 2468 - RNA, 22 nt, Homo sapiens
aauugcacgguauccaucugua

SEQ ID NO: 2469 - RNA, 22 nt, Homo sapiens
cagcagcaauucauguuuugaa

SEQ ID NO: 2470 - RNA, 22 nt, Homo sapiens
agaggcuggccgugaugaauuc

SEQ ID NO: 2471 - RNA, 21 nt, Homo sapiens
cggggcagcucaguacaggau

SEQ ID NO: 2472 - RNA, 21 nt, Homo sapiens
cagcagcacacugugguuugu

SEQ ID NO: 2473 - RNA, 25 nt, Homo sapiens
aggggugguguugggacagcuccgu

SEQ ID NO: 2474 - RNA, 21 nt, Homo sapiens
aggaggcagcgcucucaggac

SEQ ID NO: 2475 - RNA, 23 nt, Homo sapiens
ucugcucauaccccaugguuucu

SEQ ID NO: 2476 - RNA, 22 nt, Homo sapiens
caaagugccucccuuuagagug

SEQ ID NO: 2477 - RNA, 23 nt, Homo sapiens
ccaguuaccgcuuccgcuaccgc

SEQ ID NO: 2478 - RNA, 23 nt, Homo sapiens
aaaagugcuuacagugcagguag

SEQ ID NO: 2479 - RNA, 26 nt, Homo sapiens
aaguaguugguuuguaugagaugguu

SEQ ID NO: 2480 - RNA, 27 nt, Homo sapiens
auugaucaucgacacuucgaacgcaau

SEQ ID NO: 2481 - RNA, 22 nt, Homo sapiens
gaaguuguucgugguggauucg

SEQ ID NO: 2482 - RNA, 22 nt, Homo sapiens
uuuugcaauauguuccugaaua

SEQ ID NO: 2483 - RNA, 20 nt, Homo sapiens
cugcaaagggaagcccuuuc

SEQ ID NO: 2484 - RNA, 20 nt, Homo sapiens
cugcaaagggaagcccuuuc

SEQ ID NO: 2485 - RNA, 21 nt, Homo sapiens
aaacuacugaaaaucaaagau

SEQ ID NO: 2486 - RNA, 22 nt, Homo sapiens
uuugugaccugguccacuaacc

SEQ ID NO: 2487 - RNA, 23 nt, Homo sapiens
aggaugagcaaagaaaguagauu

SEQ ID NO: 2488 - RNA, 22 nt, Homo sapiens
cggaugagcaaagaaagugguu

SEQ ID NO: 2489 - RNA, 22 nt, Homo sapiens
augggugaauuuguagaaggau

SEQ ID NO: 2490 - RNA, 17 nt, Homo sapiens
gugggggagaggcuguc

SEQ ID NO: 2491 - RNA, 18 nt, Homo sapiens
cagggaggugaaugugau

SEQ ID NO: 2492 - RNA, 23 nt, Homo sapiens
ucuggcuccgugucuucacuccc

SEQ ID NO: 2493 - RNA, 23 nt, Homo sapiens
ucuggcuccgugucuucacuccc

SEQ ID NO: 2494 - RNA, 22 nt, Homo sapiens
uggagagaaaggcaguuccuga

SEQ ID NO: 2495 - RNA, 21 nt, Homo sapiens
cggcggggacggcgauugguc

SEQ ID NO: 2496 - RNA, 22 nt, Homo sapiens
uuauaaagcaaugagacugauu

SEQ ID NO: 2497 - RNA, 23 nt, Homo sapiens
ugaggggcagagagcgagacuuu

SEQ ID NO: 2498 - RNA, 25 nt, Homo sapiens
aggggugguguugggacagcuccgu

SEQ ID NO: 2499 - RNA, 22 nt, Homo sapiens
aggcggggcgccgcgggaccgc

SEQ ID NO: 2500 - RNA, 21 nt, Homo sapiens
uggaggagaaggaaggugaug

SEQ ID NO: 2501 - RNA, 21 nt, Homo sapiens
cgcgggugcuuacugacccuu

SEQ ID NO: 2502 - RNA, 20 nt, Homo sapiens
ggggagcuguggaagcagua

SEQ ID NO: 2503 - RNA, 22 nt, Homo sapiens
uggagugugacaaugguguuug

SEQ ID NO: 2504 - RNA, 22 nt, Homo sapiens
cuuggcaccuagcaagcacuca

SEQ ID NO: 2505 - RNA, 18 nt, Homo sapiens
cagggaggugaaugugau

SEQ ID NO: 2506 - RNA, 21 nt, Homo sapiens
cugaccuaugaauugacagcc

SEQ ID NO: 2507 - RNA, 22 nt, Homo sapiens
uagguaguuucauguuguuggg

SEQ ID NO: 2508 - RNA, 22 nt, Homo sapiens
aauugcacuuuagcaaugguga

SEQ ID NO: 2509 - RNA, 23 nt, Homo sapiens
uaauccuugcuaccugggugaga

SEQ ID NO: 2510 - RNA, 23 nt, Homo sapiens
uaauccuugcuaccugggugaga

SEQ ID NO: 2511 - RNA, 22 nt, Homo sapiens
uggugggcacagaaucuggacu

SEQ ID NO: 2512 - RNA, 23 nt, Homo sapiens
aucccuugcaggggcuguugggu

SEQ ID NO: 2513 - RNA, 22 nt, Homo sapiens
ugcggggcuagggcuaacagca

SEQ ID NO: 2514 - RNA, 23 nt, Homo sapiens
uuuggcacuagcacauuuuugcu

SEQ ID NO: 2515 - RNA, 20 nt, Homo sapiens
ucacaccugccucgcccccc

SEQ ID NO: 2516 - RNA, 21 nt, Homo sapiens
uccuucugcuccgucccccag

SEQ ID NO: 2517 - RNA, 21 nt, Homo sapiens
cuuuuugcggucugggcuugc

SEQ ID NO: 2518 - RNA, 18 nt, Homo sapiens
uugagaaggaggcugcug

SEQ ID NO: 2519 - RNA, 22 nt, Homo sapiens
cagugcaaugaugaaagggcau

SEQ ID NO: 2520 - RNA, 21 nt, Homo sapiens
caucccuugcaugguggaggg

SEQ ID NO: 2521 - RNA, 22 nt, Homo sapiens
uucccuuugucauccuaugccu

SEQ ID NO: 2522 - RNA, 22 nt, Homo sapiens
uucccuuugucauccuucgccu

SEQ ID NO: 2523 - RNA, 23 nt, Homo sapiens
cacucagccuugagggcacuuuc

SEQ ID NO: 2524 - RNA, 23 nt, Homo sapiens
ucugcucauaccccaugguuucu

SEQ ID NO: 2525 - RNA, 18 nt, Homo sapiens
cagggaggugaaugugau

SEQ ID NO: 2526 - RNA, 22 nt, Homo sapiens
uagcuuaucagacugauguuga

SEQ ID NO: 2527 - RNA, 22 nt, Homo sapiens
aagcugccaguugaagaacugu

SEQ ID NO: 2528 - RNA, 23 nt, Homo sapiens
ucuuggaguaggucauugggugg

SEQ ID NO: 2529 - RNA, 19 nt, Homo sapiens
ugagcugcuguaccaaaau

SEQ ID NO: 2530 - RNA, 22 nt, Homo sapiens
gucccucuccaaaugugucuug

SEQ ID NO: 2531 - RNA, 21 nt, Homo sapiens
uggaggagaaggaaggugaug

SEQ ID NO: 2532 - RNA, 21 nt, Homo sapiens
uacuuggaaaggcaucaguug

SEQ ID NO: 2533 - RNA, 21 nt, Homo sapiens
uggcagggaggcugggagggg

SEQ ID NO: 2534 - RNA, 22 nt, Homo sapiens
aacauucaaccugucggugagu

SEQ ID NO: 2535 - RNA, 23 nt, Homo sapiens
ugaguaccgccaugucuguuggg

SEQ ID NO: 2536 - RNA, 22 nt, Homo sapiens
uagcaccauuugaaaucgguua

SEQ ID NO: 2537 - RNA, 20 nt, Homo sapiens
acucaaacugugggggcacu

SEQ ID NO: 2538 - RNA, 23 nt, Homo sapiens
uacuccagagggcgucacucaug

SEQ ID NO: 2539 - RNA, 22 nt, Homo sapiens
cacgcucaugcacacacccaca

SEQ ID NO: 2540 - RNA, 22 nt, Homo sapiens
aaaccuguguuguucaagaguc

SEQ ID NO: 2541 - RNA, 22 nt, Homo sapiens
acuccagccccacagccucagc

SEQ ID NO: 2542 - RNA, 22 nt, Homo sapiens
caaagugccucccuuuagagug

SEQ ID NO: 2543 - RNA, 21 nt, Homo sapiens
aaggcagggcccccgcucccc

SEQ ID NO: 2544 - RNA, 23 nt, Homo sapiens
ucuggcuccgugucuucacuccc

SEQ ID NO: 2545 - RNA, 22 nt, Homo sapiens
uggagagaaaggcaguuccuga

SEQ ID NO: 2546 - RNA, 23 nt, Homo sapiens
ugaguaccgccaugucuguuggg

SEQ ID NO: 2547 - RNA, 21 nt, Homo sapiens
ucccacguuguggcccagcag

SEQ ID NO: 2548 - RNA, 21 nt, Homo sapiens
ucccacguuguggcccagcag

SEQ ID NO: 2549 - RNA, 23 nt, Homo sapiens
aggaagcccuggaggggcuggag

SEQ ID NO: 2550 - RNA, 23 nt, Homo sapiens
ucugcucauaccccaugguuucu

SEQ ID NO: 2551 - RNA, 23 nt, Homo sapiens
cgggucggaguuagcucaagcgg

SEQ ID NO: 2552 - RNA, 18 nt, Homo sapiens
cagggaggugaaugugau

SEQ ID NO: 2553 - RNA, 23 nt, Homo sapiens
uaaggugcaucuagugcagauag

SEQ ID NO: 2554 - RNA, 22 nt, Homo sapiens
uagguaguuuccuguuguuggg

SEQ ID NO: 2555 - RNA, 20 nt, Homo sapiens
ccuccugcccuccuugcugu

SEQ ID NO: 2556 - RNA, 21 nt, Homo sapiens
gaaggcgcuucccuuuggagu

SEQ ID NO: 2557 - RNA, 22 nt, Homo sapiens
gaaggcgcuucccuuuagagcg

SEQ ID NO: 2558 - RNA, 19 nt, Homo sapiens
gggcgccugugaucccaac

SEQ ID NO: 2559 - RNA, 23 nt, Homo sapiens
aucgcugcgguugcgagcgcugu

SEQ ID NO: 2560 - RNA, 22 nt, Homo sapiens
gucccucuccaaaugugucuug

SEQ ID NO: 2561 - RNA, 21 nt, Homo sapiens
aggaggcagcgcucucaggac

SEQ ID NO: 2562 - RNA, 22 nt, Homo sapiens
cugcccuggcccgagggaccga

SEQ ID NO: 2563 - RNA, 23 nt, Homo sapiens
cacccggcugugugcacaugugc

SEQ ID NO: 2564 - RNA, 26 nt, Homo sapiens
gaugaugauggcagcaaauucugaaa

SEQ ID NO: 2565 - RNA, 23 nt, Homo sapiens
gagggucuugggagggaugugac

SEQ ID NO: 2566 - RNA, 23 nt, Homo sapiens
ucuggcuccgugucuucacuccc

SEQ ID NO: 2567 - RNA, 22 nt, Homo sapiens
uagcagcacauaaugguuugug

SEQ ID NO: 2568 - RNA, 22 nt, Homo sapiens
uagcagcacaucaugguuuaca

SEQ ID NO: 2569 - RNA, 22 nt, Homo sapiens
uagcagcacguaaauauuggcg

SEQ ID NO: 2570 - RNA, 21 nt, Homo sapiens
uagcagcacagaaauauuggc

SEQ ID NO: 2571 - RNA, 23 nt, Homo sapiens
ugugcaaaucuaugcaaaacuga

SEQ ID NO: 2572 - RNA, 22 nt, Homo sapiens
aacaauauccuggugcugagug

SEQ ID NO: 2573 - RNA, 22 nt, Homo sapiens
agagguaguagguugcauaguu

SEQ ID NO: 2574 - RNA, 21 nt, Homo sapiens
aucacauugccagggauuucc

SEQ ID NO: 2575 - RNA, 21 nt, Homo sapiens
aucacauugccagggauuacc

SEQ ID NO: 2576 - RNA, 22 nt, Homo sapiens
cauugcacuugucucggucuga

SEQ ID NO: 2577 - RNA, 22 nt, Homo sapiens
aucacacaaaggcaacuuuugu

SEQ ID NO: 2578 - RNA, 23 nt, Homo sapiens
ugaggggcagagagcgagacuuu

SEQ ID NO: 2579 - RNA, 22 nt, Homo sapiens
cagcagcaauucauguuuugaa

SEQ ID NO: 2580 - RNA, 21 nt, Homo sapiens
cagcagcacacugugguuugu

SEQ ID NO: 2581 - RNA, 22 nt, Homo sapiens
gucccucuccaaaugugucuug

SEQ ID NO: 2582 - RNA, 25 nt, Homo sapiens
ggcggagggaaguagguccguuggu

SEQ ID NO: 2583 - RNA, 22 nt, Homo sapiens
ugcggggcuagggcuaacagca

SEQ ID NO: 2584 - RNA, 20 nt, Homo sapiens
cggcucugggucugugggga

SEQ ID NO: 2585 - RNA, 21 nt, Homo sapiens
uggaggagaaggaaggugaug

SEQ ID NO: 2586 - RNA, 22 nt, Homo sapiens
caaagugccucccuuuagagug

SEQ ID NO: 2587 - RNA, 21 nt, Homo sapiens
gugccagcugcagugggggag

SEQ ID NO: 2588 - RNA, 22 nt, Homo sapiens
uucuggaauucugugugaggga

SEQ ID NO: 2589 - RNA, 23 nt, Homo sapiens
caacggaaucccaaaagcagcug

SEQ ID NO: 2590 - RNA, 23 nt, Homo sapiens
ugugcaaaucuaugcaaaacuga

SEQ ID NO: 2591 - RNA, 22 nt, Homo sapiens
aacaauauccuggugcugagug

SEQ ID NO: 2592 - RNA, 22 nt, Homo sapiens
agagguaguagguugcauaguu

SEQ ID NO: 2593 - RNA, 22 nt, Homo sapiens
aaaagcuggguugagagggcga

SEQ ID NO: 2594 - RNA, 22 nt, Homo sapiens
aaaagcuggguugagagggcaa

SEQ ID NO: 2595 - RNA, 20 nt, Homo sapiens
aaaagcuggguugagagggu

SEQ ID NO: 2596 - RNA, 19 nt, Homo sapiens
aaaagcuggguugagagga

SEQ ID NO: 2597 - RNA, 21 nt, Homo sapiens
gugcauuguaguugcauugca

SEQ ID NO: 2598 - RNA, 23 nt, Homo sapiens
caaagcgcuucucuuuagagugu

SEQ ID NO: 2599 - RNA, 21 nt, Homo sapiens
cuccagagggaaguacuuucu

SEQ ID NO: 2600 - RNA, 21 nt, Homo sapiens
cuccagagggaugcacuuucu

SEQ ID NO: 2601 - RNA, 22 nt, Homo sapiens
caaaaaccacaguuucuuuugc

SEQ ID NO: 2602 - RNA, 19 nt, Homo sapiens
gugucugcuuccuguggga

SEQ ID NO: 2603 - RNA, 21 nt, Homo sapiens
ccuggaaacacugagguugug

SEQ ID NO: 2604 - RNA, 22 nt, Homo sapiens
uggagugugacaaugguguuug

SEQ ID NO: 2605 - RNA, 20 nt, Homo sapiens
cuuccucgucugucugcccc

SEQ ID NO: 2606 - RNA, 22 nt, Homo sapiens
acucggcguggcgucggucgug

SEQ ID NO: 2607 - RNA, 22 nt, Homo sapiens
uaacacugucugguaaagaugg

SEQ ID NO: 2608 - RNA, 22 nt, Homo sapiens
cucggcgcggggcgcgggcucc

SEQ ID NO: 2609 - RNA, 22 nt, Homo sapiens
uugcauauguaggaugucccau

SEQ ID NO: 2610 - RNA, 21 nt, Homo sapiens
gcaggaacuugugagucuccu

SEQ ID NO: 2611 - RNA, 22 nt, Homo sapiens
aggcagcgggguguaguggaua

SEQ ID NO: 2612 - RNA, 22 nt, Homo sapiens
uggagugugacaaugguguuug

SEQ ID NO: 2613 - RNA, 22 nt, Homo sapiens
ucucccaacccuuguaccagug

SEQ ID NO: 2614 - RNA, 21 nt, Homo sapiens
ucgaggagcucacagucuagu

SEQ ID NO: 2615 - RNA, 21 nt, Homo sapiens
cggcggggacggcgauugguc

SEQ ID NO: 2616 - RNA, 20 nt, Homo sapiens
ccccagggcgacgcggcggg

SEQ ID NO: 2617 - RNA, 23 nt, Homo sapiens
ugagcgccucgacgacagagccg

SEQ ID NO: 2618 - RNA, 22 nt, Homo sapiens
uaaugccccuaaaaauccuuau

SEQ ID NO: 2619 - RNA, 19 nt, Homo sapiens
gggcgccugugaucccaac

SEQ ID NO: 2620 - RNA, 22 nt, Homo sapiens
aggcggggcgccgcgggaccgc

SEQ ID NO: 2621 - RNA, 22 nt, Homo sapiens
gguggcccggccgugccugagg

SEQ ID NO: 2622 - RNA, 22 nt, Homo sapiens
ugcggggcuagggcuaacagca

SEQ ID NO: 2623 - RNA, 24 nt, Homo sapiens
agccuggaagcuggagccugcagu

SEQ ID NO: 2624 - RNA, 22 nt, Homo sapiens
uaguacugugcauaucaucuau

SEQ ID NO: 2625 - RNA, 23 nt, Homo sapiens
ucuggcuccgugucuucacuccc

SEQ ID NO: 2626 - RNA, 21 nt, Homo sapiens
cggcggggacggcgauugguc

SEQ ID NO: 2627 - RNA, 22 nt, Homo sapiens
ucugcccccuccgcugcugcca

SEQ ID NO: 2628 - RNA, 22 nt, Homo sapiens
cucccacugcuucacuugacua

SEQ ID NO: 2629 - RNA, 21 nt, Homo sapiens
uaaagugcugacagugcagau

SEQ ID NO: 2630 - RNA, 23 nt, Homo sapiens
cagugcaaugauauugucaaagc

SEQ ID NO: 2631 - RNA, 20 nt, Homo sapiens
acugccccaggugcugcugg

SEQ ID NO: 2632 - RNA, 22 nt, Homo sapiens
ucaggcucaguccccucccgau

SEQ ID NO: 2633 - RNA, 21 nt, Homo sapiens
cggggcagcucaguacaggau

SEQ ID NO: 2634 - RNA, 22 nt, Homo sapiens
cgucaacacuugcugguuuccu

SEQ ID NO: 2635 - RNA, 22 nt, Homo sapiens
ccucccacacccaaggcuugca

SEQ ID NO: 2636 - RNA, 22 nt, Homo sapiens
aggcggggcgccgcgggaccgc

SEQ ID NO: 2637 - RNA, 22 nt, Homo sapiens
ugcggggcuagggcuaacagca

SEQ ID NO: 2638 - RNA, 22 nt, Homo sapiens
ucuucucuguuuuggccaugug

SEQ ID NO: 2639 - RNA, 20 nt, Homo sapiens
ucacaccugccucgcccccc

SEQ ID NO: 2640 - RNA, 21 nt, Homo sapiens
uccuucugcuccgucccccag

SEQ ID NO: 2641 - RNA, 19 nt, Homo sapiens
uggauuuuuggaucaggga

SEQ ID NO: 2642 - RNA, 22 nt, Homo sapiens
uggcucaguucagcaggaacag

SEQ ID NO: 2643 - RNA, 22 nt, Homo sapiens
cuccuauaugaugccuuucuuc

SEQ ID NO: 2644 - RNA, 22 nt, Homo sapiens
uggcagugucuuagcugguugu

SEQ ID NO: 2645 - RNA, 23 nt, Homo sapiens
aggcaguguaguuagcugauugc

SEQ ID NO: 2646 - RNA, 22 nt, Homo sapiens
uggcaguguauuguuagcuggu

SEQ ID NO: 2647 - RNA, 22 nt, Homo sapiens
aggcaguguauuguuagcuggc

SEQ ID NO: 2648 - RNA, 22 nt, Homo sapiens
aggcaguguauuguuagcuggc

SEQ ID NO: 2649 - RNA, 18 nt, Homo sapiens
ugcuuccuuucagagggu

SEQ ID NO: 2650 - RNA, 22 nt, Homo sapiens
aucuggagguaagaagcacuuu

SEQ ID NO: 2651 - RNA, 23 nt, Homo sapiens
acuugggcacugaaacaaugucc

SEQ ID NO: 2652 - RNA, 19 nt, Homo sapiens
aguguggcuuucuuagagc

SEQ ID NO: 2653 - RNA, 21 nt, Homo sapiens
guggcugcacucacuuccuuc

SEQ ID NO: 2654 - RNA, 23 nt, Homo sapiens
aggaagcccuggaggggcuggag

SEQ ID NO: 2655 - RNA, 20 nt, Homo sapiens
gugucugggcggacagcugc

SEQ ID NO: 2656 - RNA, 22 nt, Homo sapiens
caaagaauucuccuuuugggcu

SEQ ID NO: 2657 - RNA, 21 nt, Homo sapiens
caagucacuagugguuccguu

SEQ ID NO: 2658 - RNA, 22 nt, Homo sapiens
gcugacuccuaguccagggcuc

SEQ ID NO: 2659 - RNA, 22 nt, Homo sapiens
gaauguugcucggugaaccccu

SEQ ID NO: 2660 - RNA, 22 nt, Homo sapiens
cgucaacacuugcugguuuccu

SEQ ID NO: 2661 - RNA, 22 nt, Homo sapiens
aaacauucgcggugcacuucuu

SEQ ID NO: 2662 - RNA, 23 nt, Homo sapiens
cuaauaguaucuaccacaauaaa

SEQ ID NO: 2663 - RNA, 23 nt, Homo sapiens
cuaauaguaucuaccacaauaaa

SEQ ID NO: 2664 - RNA, 22 nt, Homo sapiens
uuugugaccugguccacuaacc

SEQ ID NO: 2665 - RNA, 23 nt, Homo sapiens
aggaugagcaaagaaaguagauu

SEQ ID NO: 2666 - RNA, 22 nt, Homo sapiens
cggaugagcaaagaaagugguu

SEQ ID NO: 2667 - RNA, 22 nt, Homo sapiens
cagugcaauguuaaaagggcau

SEQ ID NO: 2668 - RNA, 18 nt, Homo sapiens
cagggaggugaaugugau

SEQ ID NO: 2669 - RNA, 22 nt, Homo sapiens
ugugacugguugaccagagggg

SEQ ID NO: 2670 - RNA, 22 nt, Homo sapiens
uaacacugucugguaaagaugg

SEQ ID NO: 2671 - RNA, 22 nt, Homo sapiens
cccugugcccggcccacuucug

SEQ ID NO: 2672 - RNA, 22 nt, Homo sapiens
uuggggaaacggccgcugagug

SEQ ID NO: 2673 - RNA, 22 nt, Homo sapiens
uaaucucagcuggcaacuguga

SEQ ID NO: 2674 - RNA, 21 nt, Homo sapiens
aucacauugccagggauuucc

SEQ ID NO: 2675 - RNA, 21 nt, Homo sapiens
aucacauugccagggauuacc

SEQ ID NO: 2676 - RNA, 22 nt, Homo sapiens
agaucgaccguguuauauucgc

SEQ ID NO: 2677 - RNA, 21 nt, Homo sapiens
acuggacuuggagucagaagg

SEQ ID NO: 2678 - RNA, 22 nt, Homo sapiens
uugggaucauuuugcauccaua

SEQ ID NO: 2679 - RNA, 21 nt, Homo sapiens
gcgacccacucuugguuucca

SEQ ID NO: 2680 - RNA, 21 nt, Homo sapiens
gcgacccauacuugguuucag

SEQ ID NO: 2681 - RNA, 21 nt, Homo sapiens
uggguuuacguugggagaacu

SEQ ID NO: 2682 - RNA, 25 nt, Homo sapiens
agggaucgcgggcggguggcggccu

SEQ ID NO: 2683 - RNA, 22 nt, Homo sapiens
gucccucuccaaaugugucuug

SEQ ID NO: 2684 - RNA, 20 nt, Homo sapiens
accaggaggcugaggccccu

SEQ ID NO: 2685 - RNA, 21 nt, Homo sapiens
uggaggagaaggaaggugaug

SEQ ID NO: 2686 - RNA, 23 nt, Homo sapiens
cugggaucuccggggucuugguu

SEQ ID NO: 2687 - RNA, 23 nt, Homo sapiens
cuggagauauggaagagcugugu

SEQ ID NO: 2688 - RNA, 22 nt, Homo sapiens
uagguuauccguguugccuucg

SEQ ID NO: 2689 - RNA, 25 nt, Homo sapiens
cccccacaaccgcgcuugacuagcu

SEQ ID NO: 2690 - RNA, 23 nt, Homo sapiens
uaagugcuuccauguuuugguga

SEQ ID NO: 2691 - RNA, 23 nt, Homo sapiens
uaagugcuuccauguuuuaguag

SEQ ID NO: 2692 - RNA, 23 nt, Homo sapiens
uaagugcuuccauguuucagugg

SEQ ID NO: 2693 - RNA, 23 nt, Homo sapiens
uaagugcuuccauguuugagugu

SEQ ID NO: 2694 - RNA, 17 nt, Homo sapiens
uaagugcuuccaugcuu

SEQ ID NO: 2695 - RNA, 23 nt, Homo sapiens
aaagugcugcgacauuugagcgu

SEQ ID NO: 2696 - RNA, 23 nt, Homo sapiens
gaagugcuucgauuuuggggugu

SEQ ID NO: 2697 - RNA, 21 nt, Homo sapiens
aauauaacacagauggccugu

SEQ ID NO: 2698 - RNA, 22 nt, Homo sapiens
gugacaucacauauacggcagc

SEQ ID NO: 2699 - RNA, 22 nt, Homo sapiens
aguggggaacccuuccaugagg

SEQ ID NO: 2700 - RNA, 22 nt, Homo sapiens
aacaucacagcaagucugugcu

SEQ ID NO: 2701 - RNA, 22 nt, Homo sapiens
aagugcugucauagcugagguc

SEQ ID NO: 2702 - RNA, 22 nt, Homo sapiens
aaagugcuucccuuuggacugu

SEQ ID NO: 2703 - RNA, 21 nt, Homo sapiens
aaagugcuuccuuuuagaggg

SEQ ID NO: 2704 - RNA, 22 nt, Homo sapiens
aaagugcuuccuuuuagagggu

SEQ ID NO: 2705 - RNA, 22 nt, Homo sapiens
aaagugcuucucuuuggugggu

SEQ ID NO: 2706 - RNA, 21 nt, Homo sapiens
aaagugcuuccuuuuugaggg

SEQ ID NO: 2707 - RNA, 20 nt, Homo sapiens
guccgcucggcgguggccca

SEQ ID NO: 2708 - RNA, 22 nt, Homo sapiens
aagauguggaaaaauuggaauc

SEQ ID NO: 2709 - RNA, 22 nt, Homo sapiens
agucauuggaggguuugagcag

SEQ ID NO: 2710 - RNA, 20 nt, Homo sapiens
auggagauagauauagaaau

SEQ ID NO: 2711 - RNA, 22 nt, Homo sapiens
gugagucucuaagaaaagagga

SEQ ID NO: 2712 - RNA, 25 nt, Homo sapiens
ggcggagggaaguagguccguuggu

SEQ ID NO: 2713 - RNA, 20 nt, Homo sapiens
agagucuugugaugucuugc

SEQ ID NO: 2714 - RNA, 23 nt, Homo sapiens
ucuggcuccgugucuucacuccc

SEQ ID NO: 2715 - RNA, 22 nt, Homo sapiens
uggagagaaaggcaguuccuga

SEQ ID NO: 2716 - RNA, 22 nt, Homo sapiens
uacccagagcaugcagugugaa

SEQ ID NO: 2717 - RNA, 22 nt, Homo sapiens
uguaaacauccuacacucagcu

SEQ ID NO: 2718 - RNA, 21 nt, Homo sapiens
uaaagugcugacagugcagau

SEQ ID NO: 2719 - RNA, 23 nt, Homo sapiens
cagugcaaugauauugucaaagc

SEQ ID NO: 2720 - RNA, 22 nt, Homo sapiens
aggugguccguggcgcguucgc

SEQ ID NO: 2721 - RNA, 20 nt, Homo sapiens
ccucugggcccuuccuccag

SEQ ID NO: 2722 - RNA, 22 nt, Homo sapiens
ucucugggccugugucuuaggc

SEQ ID NO: 2723 - RNA, 22 nt, Homo sapiens
aauugcacgguauccaucugua

SEQ ID NO: 2724 - RNA, 22 nt, Homo sapiens
ccucccacacccaaggcuugca

SEQ ID NO: 2725 - RNA, 22 nt, Homo sapiens
uggucuaggauuguuggaggag

SEQ ID NO: 2726 - RNA, 25 nt, Homo sapiens
aggggugguguugggacagcuccgu

SEQ ID NO: 2727 - RNA, 20 nt, Homo sapiens
accaggaggcugaggccccu

SEQ ID NO: 2728 - RNA, 23 nt, Homo sapiens
cacccggcugugugcacaugugc

SEQ ID NO: 2729 - RNA, 19 nt, Homo sapiens
gugaggacucgggaggugg

SEQ ID NO: 2730 - RNA, 22 nt, Homo sapiens
acaggugagguucuugggagcc

SEQ ID NO: 2731 - RNA, 21 nt, Homo sapiens
ccuguugaaguguaaucccca

SEQ ID NO: 2732 - RNA, 20 nt, Homo sapiens
ccccagggcgacgcggcggg

SEQ ID NO: 2733 - RNA, 21 nt, Homo sapiens
uucacaguggcuaaguuccgc

SEQ ID NO: 2734 - RNA, 23 nt, Homo sapiens
aucaacagacauuaauugggcgc

SEQ ID NO: 2735 - RNA, 23 nt, Homo sapiens
ucuuggaguaggucauugggugg

SEQ ID NO: 2736 - RNA, 22 nt, Homo sapiens
uugggaucauuuugcauccaua

SEQ ID NO: 2737 - RNA, 21 nt, Homo sapiens
aguuaaugaauccuggaaagu

SEQ ID NO: 2738 - RNA, 22 nt, Homo sapiens
aaccagcaccccaacuuuggac

SEQ ID NO: 2739 - RNA, 23 nt, Homo sapiens
cugggaucuccggggucuugguu

SEQ ID NO: 2740 - RNA, 23 nt, Homo sapiens
gcagcagagaauaggacuacguc

SEQ ID NO: 2741 - RNA, 22 nt, Homo sapiens
cuggacugagccgugcuacugg

SEQ ID NO: 2742 - RNA, 17 nt, Homo sapiens
uucaaguaauucaggug

SEQ ID NO: 2743 - RNA, 22 nt, Homo sapiens
uuugaggcuacagugagaugug

SEQ ID NO: 2744 - RNA, 22 nt, Homo sapiens
uuugaggcuacagugagaugug

SEQ ID NO: 2745 - RNA, 21 nt, Homo sapiens
uaccacaggguagaaccacgg

SEQ ID NO: 2746 - RNA, 22 nt, Homo sapiens
uucaaguaauccaggauaggcu

SEQ ID NO: 2747 - RNA, 21 nt, Homo sapiens
uucaaguaauucaggauaggu

SEQ ID NO: 2748 - RNA, 22 nt, Homo sapiens
gaggguuggguggaggcucucc

SEQ ID NO: 2749 - RNA, 22 nt, Homo sapiens
uguaaacauccuacacucagcu

SEQ ID NO: 2750 - RNA, 22 nt, Homo sapiens
aucacacaaaggcaacuuuugu

SEQ ID NO: 2751 - RNA, 23 nt, Homo sapiens
ugaggggcagagagcgagacuuu

SEQ ID NO: 2752 - RNA, 21 nt, Homo sapiens
gcaguccaugggcauauacac

SEQ ID NO: 2753 - RNA, 20 nt, Homo sapiens
accaggaggcugaggccccu

SEQ ID NO: 2754 - RNA, 20 nt, Homo sapiens
guagaggagauggcgcaggg

SEQ ID NO: 2755 - RNA, 22 nt, Homo sapiens
acccgucccguucguccccgga

SEQ ID NO: 2756 - RNA, 18 nt, Homo sapiens
gucccuguucaggcgcca

SEQ ID NO: 2757 - RNA, 18 nt, Homo sapiens
cagggaggugaaugugau

SEQ ID NO: 2758 - RNA, 22 nt, Homo sapiens
uggagagaaaggcaguuccuga

SEQ ID NO: 2759 - RNA, 22 nt, Homo sapiens
uaaugccccuaaaaauccuuau

SEQ ID NO: 2760 - RNA, 20 nt, Homo sapiens
aggguguuucucucaucucu

SEQ ID NO: 2761 - RNA, 21 nt, Homo sapiens
uggaggagaaggaaggugaug

SEQ ID NO: 2762 - RNA, 22 nt, Homo sapiens
ucuucucuguuuuggccaugug

SEQ ID NO: 2763 - RNA, 23 nt, Homo sapiens
caagucuuauuugagcaccuguu

SEQ ID NO: 2764 - RNA, 22 nt, Homo sapiens
cagugguuuuacccuaugguag

SEQ ID NO: 2765 - RNA, 21 nt, Homo sapiens
cuagacugaagcuccuugagg

SEQ ID NO: 2766 - RNA, 21 nt, Homo sapiens
cggcggggacggcgauugguc

SEQ ID NO: 2767 - RNA, 22 nt, Homo sapiens
ucugcccccuccgcugcugcca

SEQ ID NO: 2768 - RNA, 20 nt, Homo sapiens
acugccccaggugcugcugg

SEQ ID NO: 2769 - RNA, 21 nt, Homo sapiens
cggggcagcucaguacaggau

SEQ ID NO: 2770 - RNA, 22 nt, Homo sapiens
caaccuggaggacuccaugcug

SEQ ID NO: 2771 - RNA, 21 nt, Homo sapiens
cagcagcacacugugguuugu

SEQ ID NO: 2772 - RNA, 21 nt, Homo sapiens
cagcagcacacugugguuugu

SEQ ID NO: 2773 - RNA, 23 nt, Homo sapiens
uacuccagagggcgucacucaug

SEQ ID NO: 2774 - RNA, 22 nt, Homo sapiens
aggcggggcgccgcgggaccgc

SEQ ID NO: 2775 - RNA, 22 nt, Homo sapiens
aggcagcgggguguaguggaua

SEQ ID NO: 2776 - RNA, 21 nt, Homo sapiens
uggcagggaggcugggagggg

SEQ ID NO: 2777 - RNA, 21 nt, Homo sapiens
uaccacaggguagaaccacgg

SEQ ID NO: 2778 - RNA, 18 nt, Homo sapiens
ugaggcaguagauugaau

SEQ ID NO: 2779 - RNA, 22 nt, Homo sapiens
uguaaacauccucgacuggaag

SEQ ID NO: 2780 - RNA, 22 nt, Homo sapiens
uguaaacauccuacacucagcu

SEQ ID NO: 2781 - RNA, 23 nt, Homo sapiens
uguaaacauccuacacucucagc

SEQ ID NO: 2782 - RNA, 22 nt, Homo sapiens
uguaaacauccccgacuggaag

SEQ ID NO: 2783 - RNA, 22 nt, Homo sapiens
uguaaacauccuugacuggaag

SEQ ID NO: 2784 - RNA, 20 nt, Homo sapiens
ccucugggcccuuccuccag

SEQ ID NO: 2785 - RNA, 23 nt, Homo sapiens
gcaaagcacacggccugcagaga

SEQ ID NO: 2786 - RNA, 22 nt, Homo sapiens
ucucugggccugugucuuaggc

SEQ ID NO: 2787 - RNA, 22 nt, Homo sapiens
aauugcacgguauccaucugua

SEQ ID NO: 2788 - RNA, 21 nt, Homo sapiens
cggggcagcucaguacaggau

SEQ ID NO: 2789 - RNA, 18 nt, Homo sapiens
ugcuuccuuucagagggu

SEQ ID NO: 2790 - RNA, 22 nt, Homo sapiens
aucuggagguaagaagcacuuu

SEQ ID NO: 2791 - RNA, 22 nt, Homo sapiens
uggugggcacagaaucuggacu

SEQ ID NO: 2792 - RNA, 24 nt, Homo sapiens
acugggggcuuucgggcucugcgu

SEQ ID NO: 2793 - RNA, 21 nt, Homo sapiens
guggcugcacucacuuccuuc

SEQ ID NO: 2794 - RNA, 22 nt, Homo sapiens
uggugggccgcagaacaugugc

SEQ ID NO: 2795 - RNA, 21 nt, Homo sapiens
aaggcagggcccccgcucccc

SEQ ID NO: 2796 - RNA, 22 nt, Homo sapiens
aacccguagauccgaucuugug

SEQ ID NO: 2797 - RNA, 22 nt, Homo sapiens
cacccguagaaccgaccuugcg

SEQ ID NO: 2798 - RNA, 21 nt, Homo sapiens
uguucauguagauguuuaagc

SEQ ID NO: 2799 - RNA, 20 nt, Homo sapiens
gugucugggcggacagcugc

SEQ ID NO: 2800 - RNA, 22 nt, Homo sapiens
aacuggaucaauuauaggagug

SEQ ID NO: 2801 - RNA, 17 nt, Homo sapiens
gugggggagaggcuguc

SEQ ID NO: 2802 - RNA, 21 nt, Homo sapiens
uuaggccgcagaucuggguga

SEQ ID NO: 2803 - RNA, 22 nt, Homo sapiens
uggagagaaaggcaguuccuga

SEQ ID NO: 2804 - RNA, 22 nt, Homo sapiens
ucgugucuuguguugcagccgg

SEQ ID NO: 2805 - RNA, 23 nt, Homo sapiens
cccaguguucagacuaccuguuc

SEQ ID NO: 2806 - RNA, 23 nt, Homo sapiens
cccaguguuuagacuaucuguuc

SEQ ID NO: 2807 - RNA, 23 nt, Homo sapiens
caaagugcucauagugcagguag

SEQ ID NO: 2808 - RNA, 23 nt, Homo sapiens
agcuacauugucugcuggguuuc

SEQ ID NO: 2809 - RNA, 21 nt, Homo sapiens
gccccugggccuauccuagaa

SEQ ID NO: 2810 - RNA, 22 nt, Homo sapiens
aacuguuugcagaggaaacuga

SEQ ID NO: 2811 - RNA, 22 nt, Homo sapiens
aucuggagguaagaagcacuuu

SEQ ID NO: 2812 - RNA, 25 nt, Homo sapiens
aggggugguguugggacagcuccgu

SEQ ID NO: 2813 - RNA, 22 nt, Homo sapiens
ugagccccugugccgcccccag

SEQ ID NO: 2814 - RNA, 18 nt, Homo sapiens
cgggcguggugguggggg

SEQ ID NO: 2815 - RNA, 22 nt, Homo sapiens
cugaagcucagagggcucugau

SEQ ID NO: 2816 - RNA, 21 nt, Homo sapiens
cggcggggacggcgauugguc

SEQ ID NO: 2817 - RNA, 21 nt, Homo sapiens
ugacaacuauggaugagcucu

SEQ ID NO: 2818 - RNA, 22 nt, Homo sapiens
aaaaguaauugcggauuuugcc

SEQ ID NO: 2819 - RNA, 23 nt, Homo sapiens
aggaccugcgggacaagauucuu

SEQ ID NO: 2820 - RNA, 19 nt, Homo sapiens
ugggcguaucuguaugcua

SEQ ID NO: 2821 - RNA, 24 nt, Homo sapiens
gaccuggacauguuugugcccagu

SEQ ID NO: 2822 - RNA, 21 nt, Homo sapiens
agaccuggcccagaccucagc

SEQ ID NO: 2823 - RNA, 22 nt, Homo sapiens
aggcggggcgccgcgggaccgc

SEQ ID NO: 2824 - RNA, 22 nt, Homo sapiens
ugcggggcuagggcuaacagca

SEQ ID NO: 2825 - RNA, 21 nt, Homo sapiens
uggcagggaggcugggagggg

SEQ ID NO: 2826 - RNA, 24 nt, Homo sapiens
uggcccugacugaagaccagcagu

SEQ ID NO: 2827 - RNA, 25 nt, Homo sapiens
ugggaacggguuccggcagacgcug

SEQ ID NO: 2828 - RNA, 19 nt, Homo sapiens
gaugaugcugcugaugcug

SEQ ID NO: 2829 - RNA, 23 nt, Homo sapiens
ucuggcuccgugucuucacuccc

SEQ ID NO: 2830 - RNA, 21 nt, Homo sapiens
cggcggggacggcgauugguc

SEQ ID NO: 2831 - RNA, 22 nt, Homo sapiens
cgcaggggccgggugcucaccg

SEQ ID NO: 2832 - RNA, 22 nt, Homo sapiens
uguaaacauccuacacucagcu

SEQ ID NO: 2833 - RNA, 22 nt, Homo sapiens
aggcggggcgccgcgggaccgc

SEQ ID NO: 2834 - RNA, 22 nt, Homo sapiens
ugcggggcuagggcuaacagca

SEQ ID NO: 2835 - RNA, 21 nt, Homo sapiens
uggaggagaaggaaggugaug

SEQ ID NO: 2836 - RNA, 24 nt, Homo sapiens
uggggagcugaggcucugggggug

SEQ ID NO: 2837 - RNA, 22 nt, Homo sapiens
uggagugugacaaugguguuug

SEQ ID NO: 2838 - RNA, 21 nt, Homo sapiens
aagugaucuaaaggccuacau

SEQ ID NO: 2839 - RNA, 21 nt, Homo sapiens
cggcggggacggcgauugguc

SEQ ID NO: 2840 - RNA, 22 nt, Homo sapiens
agaggcuggccgugaugaauuc

SEQ ID NO: 2841 - RNA, 19 nt, Homo sapiens
gggcgccugugaucccaac

SEQ ID NO: 2842 - RNA, 22 nt, Homo sapiens
uccgagccugggucucccucuu

SEQ ID NO: 2843 - RNA, 22 nt, Homo sapiens
gucccucuccaaaugugucuug

SEQ ID NO: 2844 - RNA, 19 nt, Homo sapiens
ucuaggcugguacugcuga

SEQ ID NO: 2845 - RNA, 19 nt, Homo sapiens
aagcagcugccucugaggc

SEQ ID NO: 2846 - RNA, 22 nt, Homo sapiens
aggcggggcgccgcgggaccgc

SEQ ID NO: 2847 - RNA, 22 nt, Homo sapiens
ugcggggcuagggcuaacagca

SEQ ID NO: 2848 - RNA, 20 nt, Homo sapiens
ggggagcuguggaagcagua

SEQ ID NO: 2849 - RNA, 23 nt, Homo sapiens
aaaagugcuuacagugcagguag

SEQ ID NO: 2850 - RNA, 21 nt, Homo sapiens
uaaagugcugacagugcagau

SEQ ID NO: 2851 - RNA, 18 nt, Homo sapiens
uugagaaggaggcugcug

SEQ ID NO: 2852 - RNA, 22 nt, Homo sapiens
acucggcguggcgucggucgug

SEQ ID NO: 2853 - RNA, 23 nt, Homo sapiens
caaagugcuuacagugcagguag

SEQ ID NO: 2854 - RNA, 22 nt, Homo sapiens
cccugugcccggcccacuucug

SEQ ID NO: 2855 - RNA, 23 nt, Homo sapiens
uaaagugcuuauagugcagguag

SEQ ID NO: 2856 - RNA, 23 nt, Homo sapiens
caaagugcucauagugcagguag

SEQ ID NO: 2857 - RNA, 22 nt, Homo sapiens
uaaucucagcuggcaacuguga

SEQ ID NO: 2858 - RNA, 23 nt, Homo sapiens
uacuccagagggcgucacucaug

SEQ ID NO: 2859 - RNA, 22 nt, Homo sapiens
aaagugcauccuuuuagagugu

SEQ ID NO: 2860 - RNA, 22 nt, Homo sapiens
aaagugcauccuuuuagagugu

SEQ ID NO: 2861 - RNA, 22 nt, Homo sapiens
aaagugcauccuuuuagagguu

SEQ ID NO: 2862 - RNA, 22 nt, Homo sapiens
aaagugcauccuuuuagagguu

SEQ ID NO: 2863 - RNA, 22 nt, Homo sapiens
aaagugcaucuuuuuagaggau

SEQ ID NO: 2864 - RNA, 22 nt, Homo sapiens
aaagugcaucuuuuuagaggau

SEQ ID NO: 2865 - RNA, 22 nt, Homo sapiens
caaagugccucccuuuagagug

SEQ ID NO: 2866 - RNA, 24 nt, Homo sapiens
acaaagugcuucccuuuagagugu

SEQ ID NO: 2867 - RNA, 22 nt, Homo sapiens
acaaagugcuucccuuuagagu

SEQ ID NO: 2868 - RNA, 23 nt, Homo sapiens
cucuugagggaagcacuuucugu

SEQ ID NO: 2869 - RNA, 21 nt, Homo sapiens
gcgacccauacuugguuucag

SEQ ID NO: 2870 - RNA, 24 nt, Homo sapiens
cugaagugauguguaacugaucag

SEQ ID NO: 2871 - RNA, 23 nt, Homo sapiens
ugagugugugugugugagugugu

SEQ ID NO: 2872 - RNA, 19 nt, Homo sapiens
aagugugcagggcacuggu

SEQ ID NO: 2873 - RNA, 23 nt, Homo sapiens
caaagugcuguucgugcagguag

SEQ ID NO: 2874 - RNA, 22 nt, Homo sapiens
ugagccccugugccgcccccag

SEQ ID NO: 2875 - RNA, 22 nt, Homo sapiens
uggagugugacaaugguguuug

SEQ ID NO: 2876 - RNA, 24 nt, Homo sapiens
ucccugagacccuuuaaccuguga

SEQ ID NO: 2877 - RNA, 22 nt, Homo sapiens
ucccugagacccuaacuuguga

SEQ ID NO: 2878 - RNA, 23 nt, Homo sapiens
ccucagggcuguagaacagggcu

SEQ ID NO: 2879 - RNA, 22 nt, Homo sapiens
uggguggucuggagauuugugc

SEQ ID NO: 2880 - RNA, 22 nt, Homo sapiens
acucggcguggcgucggucgug

SEQ ID NO: 2881 - RNA, 21 nt, Homo sapiens
cggcggggacggcgauugguc

SEQ ID NO: 2882 - RNA, 20 nt, Homo sapiens
ccccagggcgacgcggcggg

SEQ ID NO: 2883 - RNA, 22 nt, Homo sapiens
cauugcacuugucucggucuga

SEQ ID NO: 2884 - RNA, 22 nt, Homo sapiens
aggugguccguggcgcguucgc

SEQ ID NO: 2885 - RNA, 21 nt, Homo sapiens
gccccugggccuauccuagaa

SEQ ID NO: 2886 - RNA, 23 nt, Homo sapiens
ugagcgccucgacgacagagccg

SEQ ID NO: 2887 - RNA, 23 nt, Homo sapiens
uagcagcgggaacaguucugcag

SEQ ID NO: 2888 - RNA, 22 nt, Homo sapiens
uacucaggagaguggcaaucac

SEQ ID NO: 2889 - RNA, 22 nt, Homo sapiens
uccgagccugggucucccucuu

SEQ ID NO: 2890 - RNA, 22 nt, Homo sapiens
aggcggggcgccgcgggaccgc

SEQ ID NO: 2891 - RNA, 22 nt, Homo sapiens
ugcggggcuagggcuaacagca

SEQ ID NO: 2892 - RNA, 23 nt, Homo sapiens
uccaguaccacgugucagggcca

SEQ ID NO: 2893 - RNA, 25 nt, Homo sapiens
cuagugagggacagaaccaggauuc

SEQ ID NO: 2894 - RNA, 21 nt, Homo sapiens
uaggacacauggucuacuucu

SEQ ID NO: 2895 - RNA, 21 nt, Homo sapiens
cggcggggacggcgauugguc

SEQ ID NO: 2896 - RNA, 22 nt, Homo sapiens
acagcaggcacagacaggcagu

SEQ ID NO: 2897 - RNA, 22 nt, Homo sapiens
gccugcugggguggaaccuggu

SEQ ID NO: 2898 - RNA, 23 nt, Homo sapiens
gcgaggaccccucggggucugac

SEQ ID NO: 2899 - RNA, 22 nt, Homo sapiens
aggcggggcgccgcgggaccgc

SEQ ID NO: 2900 - RNA, 23 nt, Homo sapiens
uggugcggagagggcccacagug

SEQ ID NO: 2901 - RNA, 22 nt, Homo sapiens
ugcggggcuagggcuaacagca

SEQ ID NO: 2902 - RNA, 23 nt, Homo sapiens
cgggucggaguuagcucaagcgg

SEQ ID NO: 2903 - RNA, 22 nt, Homo sapiens
auccgcgcucugacucucugcc

SEQ ID NO: 2904 - RNA, 23 nt, Homo sapiens
agcagcauuguacagggcuauga

SEQ ID NO: 2905 - RNA, 23 nt, Homo sapiens
ucaaaugcucagacuccuguggu

SEQ ID NO: 2906 - RNA, 23 nt, Homo sapiens
agcagcauuguacagggcuauca

SEQ ID NO: 2907 - RNA, 24 nt, Homo sapiens
agccuggaagcuggagccugcagu

SEQ ID NO: 2908 - RNA, 19 nt, Homo sapiens
uggauuuuuggaucaggga

SEQ ID NO: 2909 - RNA, 22 nt, Homo sapiens
cucccacugcuucacuugacua

SEQ ID NO: 2910 - RNA, 22 nt, Homo sapiens
uagcuuaucagacugauguuga

SEQ ID NO: 2911 - RNA, 22 nt, Homo sapiens
ucaggcucaguccccucccgau

SEQ ID NO: 2912 - RNA, 21 nt, Homo sapiens
cagcagcacacugugguuugu

SEQ ID NO: 2913 - RNA, 23 nt, Homo sapiens
uacuccagagggcgucacucaug

SEQ ID NO: 2914 - RNA, 23 nt, Homo sapiens
uacuccagagggcgucacucaug

SEQ ID NO: 2915 - RNA, 22 nt, Homo sapiens
aucuggagguaagaagcacuuu

SEQ ID NO: 2916 - RNA, 23 nt, Homo sapiens
caaagcgcuucucuuuagagugu

SEQ ID NO: 2917 - RNA, 21 nt, Homo sapiens
cuccagagggaaguacuuucu

SEQ ID NO: 2918 - RNA, 21 nt, Homo sapiens
cuccagagggaugcacuuucu

SEQ ID NO: 2919 - RNA, 22 nt, Homo sapiens
caaaaaccacaguuucuuuugc

SEQ ID NO: 2920 - RNA, 22 nt, Homo sapiens
gagcuuauucauaaaagugcag

SEQ ID NO: 2921 - RNA, 23 nt, Homo sapiens
uaaaucccauggugccuucuccu

SEQ ID NO: 2922 - RNA, 20 nt, Homo sapiens
cggcucugggucugugggga

SEQ ID NO: 2923 - RNA, 20 nt, Homo sapiens
guagaggagauggcgcaggg

SEQ ID NO: 2924 - RNA, 21 nt, Homo sapiens
uggcagggaggcugggagggg

SEQ ID NO: 2925 - RNA, 22 nt, Homo sapiens
agaaggaaauugaauucauuua

SEQ ID NO: 2926 - RNA, 24 nt, Homo sapiens
agccuggaagcuggagccugcagu

SEQ ID NO: 2927 - RNA, 20 nt, Homo sapiens
ucguuugccuuuuucugcuu

SEQ ID NO: 2928 - RNA, 22 nt, Homo sapiens
aguggggaacccuuccaugagg

SEQ ID NO: 2929 - RNA, 22 nt, Homo sapiens
ucagcaaacauuuauugugugc

SEQ ID NO: 2930 - RNA, 23 nt, Homo sapiens
cgggucggaguuagcucaagcgg

SEQ ID NO: 2931 - RNA, 20 nt, Homo sapiens
ggggagcuguggaagcagua

SEQ ID NO: 2932 - RNA, 22 nt, Homo sapiens
auccgcgcucugacucucugcc

SEQ ID NO: 2933 - RNA, 21 nt, Homo sapiens
aaggcagggcccccgcucccc

SEQ ID NO: 2934 - RNA, 20 nt, Homo sapiens
uaaagagcccuguggagaca

SEQ ID NO: 2935 - RNA, 17 nt, Homo sapiens
ucgccuccuccucuccc

SEQ ID NO: 2936 - RNA, 18 nt, Homo sapiens
cagggaggugaaugugau

SEQ ID NO: 2937 - RNA, 21 nt, Homo sapiens
cggcggggacggcgauugguc

SEQ ID NO: 2938 - RNA, 22 nt, Homo sapiens
uagguaguuucauguuguuggg

SEQ ID NO: 2939 - RNA, 22 nt, Homo sapiens
uagguaguuuccuguuguuggg

SEQ ID NO: 2940 - RNA, 23 nt, Homo sapiens
agcuacauugucugcuggguuuc

SEQ ID NO: 2941 - RNA, 22 nt, Homo sapiens
ugucaguuugucaaauacccca

SEQ ID NO: 2942 - RNA, 21 nt, Homo sapiens
agggggaaaguucuauagucc

SEQ ID NO: 2943 - RNA, 22 nt, Homo sapiens
aggcggggcgccgcgggaccgc

SEQ ID NO: 2944 - RNA, 21 nt, Homo sapiens
ucguggccuggucuccauuau

SEQ ID NO: 2945 - RNA, 22 nt, Homo sapiens
uguaaacauccuacacucagcu

SEQ ID NO: 2946 - RNA, 22 nt, Homo sapiens
uuauaaagcaaugagacugauu

SEQ ID NO: 2947 - RNA, 22 nt, Homo sapiens
cuuaugcaagauucccuucuac

SEQ ID NO: 2948 - RNA, 20 nt, Homo sapiens
auguauaaauguauacacac

SEQ ID NO: 2949 - RNA, 24 nt, Homo sapiens
ugccugggucucuggccugcgcgu

SEQ ID NO: 2950 - RNA, 22 nt, Homo sapiens
gguggcccggccgugccugagg

SEQ ID NO: 2951 - RNA, 18 nt, Homo sapiens
cagggaggugaaugugau

SEQ ID NO: 2952 - RNA, 23 nt, Homo sapiens
ucuggcuccgugucuucacuccc

SEQ ID NO: 2953 - RNA, 22 nt, Homo sapiens
uggagagaaaggcaguuccuga

SEQ ID NO: 2954 - RNA, 23 nt, Homo sapiens
uaaggugcaucuagugcagauag

SEQ ID NO: 2955 - RNA, 20 nt, Homo sapiens
ccuccugcccuccuugcugu

SEQ ID NO: 2956 - RNA, 22 nt, Homo sapiens
uagcuuaucagacugauguuga

SEQ ID NO: 2957 - RNA, 22 nt, Homo sapiens
uggcucaguucagcaggaacag

SEQ ID NO: 2958 - RNA, 22 nt, Homo sapiens
agaggcuggccgugaugaauuc

SEQ ID NO: 2959 - RNA, 21 nt, Homo sapiens
gaaggcgcuucccuuuggagu

SEQ ID NO: 2960 - RNA, 22 nt, Homo sapiens
gaaggcgcuucccuuuagagcg

SEQ ID NO: 2961 - RNA, 21 nt, Homo sapiens
aguuaaugaauccuggaaagu

SEQ ID NO: 2962 - RNA, 22 nt, Homo sapiens
uccgagccugggucucccucuu

SEQ ID NO: 2963 - RNA, 23 nt, Homo sapiens
aucccuugcaggggcuguugggu

SEQ ID NO: 2964 - RNA, 21 nt, Homo sapiens
aagugaucuaaaggccuacau

SEQ ID NO: 2965 - RNA, 22 nt, Homo sapiens
acaggugagguucuugggagcc

SEQ ID NO: 2966 - RNA, 22 nt, Homo sapiens
ugcuggaucagugguucgaguc

SEQ ID NO: 2967 - RNA, 23 nt, Homo sapiens
ugaguaccgccaugucuguuggg

SEQ ID NO: 2968 - RNA, 22 nt, Homo sapiens
ucaggccaggcacaguggcuca

SEQ ID NO: 2969 - RNA, 22 nt, Homo sapiens
aaaagcuggguugagagggcga

SEQ ID NO: 2970 - RNA, 22 nt, Homo sapiens
aaaagcuggguugagagggcaa

SEQ ID NO: 2971 - RNA, 20 nt, Homo sapiens
aaaagcuggguugagagggu

SEQ ID NO: 2972 - RNA, 19 nt, Homo sapiens
aaaagcuggguugagagga

SEQ ID NO: 2973 - RNA, 22 nt, Homo sapiens
uuaucagaaucuccagggguac

SEQ ID NO: 2974 - RNA, 23 nt, Homo sapiens
agguuguccguggugaguucgca

SEQ ID NO: 2975 - RNA, 23 nt, Homo sapiens
uagugcaauauugcuuauagggu

SEQ ID NO: 2976 - RNA, 21 nt, Homo sapiens
augauccaggaaccugccucu

SEQ ID NO: 2977 - RNA, 22 nt, Homo sapiens
aggcauugacuucucacuagcu

SEQ ID NO: 2978 - RNA, 18 nt, Homo sapiens
uugagaaggaggcugcug

SEQ ID NO: 2979 - RNA, 21 nt, Homo sapiens
cuccguuugccuguuucgcug

SEQ ID NO: 2980 - RNA, 23 nt, Homo sapiens
caacggaaucccaaaagcagcug

SEQ ID NO: 2981 - RNA, 22 nt, Homo sapiens
uggcaguguauuguuagcuggu

SEQ ID NO: 2982 - RNA, 22 nt, Homo sapiens
uaaugccccuaaaaauccuuau

SEQ ID NO: 2983 - RNA, 22 nt, Homo sapiens
caaaaaccacaguuucuuuugc

SEQ ID NO: 2984 - RNA, 22 nt, Homo sapiens
ugagaaccacgucugcucugag

SEQ ID NO: 2985 - RNA, 21 nt, Homo sapiens
uugugcuugaucuaaccaugu

SEQ ID NO: 2986 - RNA, 21 nt, Homo sapiens
uggaggagaaggaaggugaug

SEQ ID NO: 2987 - RNA, 21 nt, Homo sapiens
ccccaccuccucucuccucag

SEQ ID NO: 2988 - RNA, 24 nt, Homo sapiens
agccuggaagcuggagccugcagu

SEQ ID NO: 2989 - RNA, 18 nt, Homo sapiens
aucccaccucugccacca

SEQ ID NO: 2990 - RNA, 22 nt, Homo sapiens
cagugcaauguuaaaagggcau

SEQ ID NO: 2991 - RNA, 21 nt, Homo sapiens
aucacauugccagggauuucc

SEQ ID NO: 2992 - RNA, 21 nt, Homo sapiens
aucacauugccagggauuacc

SEQ ID NO: 2993 - RNA, 25 nt, Homo sapiens
aggggugguguugggacagcuccgu

SEQ ID NO: 2994 - RNA, 22 nt, Homo sapiens
cugcccuggcccgagggaccga

SEQ ID NO: 2995 - RNA, 21 nt, Homo sapiens
uggcagggaggcugggagggg

SEQ ID NO: 2996 - RNA, 22 nt, Homo sapiens
ccucuuccccuugucucuccag

SEQ ID NO: 2997 - RNA, 21 nt, Homo sapiens
cggcggggacggcgauugguc

SEQ ID NO: 2998 - RNA, 19 nt, Homo sapiens
gggcgccugugaucccaac

SEQ ID NO: 2999 - RNA, 21 nt, Homo sapiens
agaccuggcccagaccucagc

SEQ ID NO: 3000 - RNA, 19 nt, Homo sapiens
aguguggcuuucuuagagc

SEQ ID NO: 3001 - RNA, 21 nt, Homo sapiens
guggcugcacucacuuccuuc

SEQ ID NO: 3002 - RNA, 22 nt, Homo sapiens
aggcggggcgccgcgggaccgc

SEQ ID NO: 3003 - RNA, 22 nt, Homo sapiens
ugcggggcuagggcuaacagca

SEQ ID NO: 3004 - RNA, 20 nt, Homo sapiens
guagaggagauggcgcaggg

SEQ ID NO: 3005 - RNA, 22 nt, Homo sapiens
uggaauguaaggaagugugugg

SEQ ID NO: 3006 - RNA, 21 nt, Homo sapiens
uccugcgcgucccagaugccc

SEQ ID NO: 3007 - RNA, 21 nt, Homo sapiens
cggcggggacggcgauugguc

SEQ ID NO: 3008 - RNA, 22 nt, Homo sapiens
ucugcccccuccgcugcugcca

SEQ ID NO: 3009 - RNA, 20 nt, Homo sapiens
ccuccugcccuccuugcugu

SEQ ID NO: 3010 - RNA, 20 nt, Homo sapiens
acugccccaggugcugcugg

SEQ ID NO: 3011 - RNA, 22 nt, Homo sapiens
aacacaccugguuaaccucuuu

SEQ ID NO: 3012 - RNA, 22 nt, Homo sapiens
aacacaccuauucaaggauuca

SEQ ID NO: 3013 - RNA, 21 nt, Homo sapiens
cggggcagcucaguacaggau

SEQ ID NO: 3014 - RNA, 18 nt, Homo sapiens
ugcuuccuuucagagggu

SEQ ID NO: 3015 - RNA, 22 nt, Homo sapiens
aucuggagguaagaagcacuuu

SEQ ID NO: 3016 - RNA, 22 nt, Homo sapiens
aucuggagguaagaagcacuuu

SEQ ID NO: 3017 - RNA, 23 nt, Homo sapiens
caaagcgcuucucuuuagagugu

SEQ ID NO: 3018 - RNA, 21 nt, Homo sapiens
cuccagagggaaguacuuucu

SEQ ID NO: 3019 - RNA, 21 nt, Homo sapiens
cuccagagggaugcacuuucu

SEQ ID NO: 3020 - RNA, 20 nt, Homo sapiens
guccgcucggcgguggccca

SEQ ID NO: 3021 - RNA, 25 nt, Homo sapiens
ggcggagggaaguagguccguuggu

SEQ ID NO: 3022 - RNA, 22 nt, Homo sapiens
aggcggggcgccgcgggaccgc

SEQ ID NO: 3023 - RNA, 22 nt, Homo sapiens
ugcggggcuagggcuaacagca

SEQ ID NO: 3024 - RNA, 21 nt, Homo sapiens
uggaggagaaggaaggugaug

SEQ ID NO: 3025 - RNA, 23 nt, Homo sapiens
agcagcauuguacagggcuauga

SEQ ID NO: 3026 - RNA, 23 nt, Homo sapiens
agcagcauuguacagggcuauca

SEQ ID NO: 3027 - RNA, 22 nt, Homo sapiens
uagcagcacauaaugguuugug

SEQ ID NO: 3028 - RNA, 22 nt, Homo sapiens
uagcagcacaucaugguuuaca

SEQ ID NO: 3029 - RNA, 22 nt, Homo sapiens
uagcagcacguaaauauuggcg

SEQ ID NO: 3030 - RNA, 18 nt, Homo sapiens
ugaggcaguagauugaau

SEQ ID NO: 3031 - RNA, 21 nt, Homo sapiens
uagcagcacagaaauauuggc

SEQ ID NO: 3032 - RNA, 23 nt, Homo sapiens
uaaagugcuuauagugcagguag

SEQ ID NO: 3033 - RNA, 22 nt, Homo sapiens
aagcugccaguugaagaacugu

SEQ ID NO: 3034 - RNA, 23 nt, Homo sapiens
cgcauccccuagggcauuggugu

SEQ ID NO: 3035 - RNA, 23 nt, Homo sapiens
ugucugcccgcaugccugccucu

SEQ ID NO: 3036 - RNA, 22 nt, Homo sapiens
cagcagcaauucauguuuugaa

SEQ ID NO: 3037 - RNA, 21 nt, Homo sapiens
cagcagcacacugugguuugu

SEQ ID NO: 3038 - RNA, 22 nt, Homo sapiens
ucagcaaacauuuauugugugc

SEQ ID NO: 3039 - RNA, 19 nt, Homo sapiens
ugagcugcuguaccaaaau

SEQ ID NO: 3040 - RNA, 22 nt, Homo sapiens
aagauguggaaaaauuggaauc

SEQ ID NO: 3041 - RNA, 19 nt, Homo sapiens
gugucugcuuccuguggga

SEQ ID NO: 3042 - RNA, 21 nt, Homo sapiens
aggaggcagcgcucucaggac

SEQ ID NO: 3043 - RNA, 20 nt, Homo sapiens
cggcucugggucugugggga

SEQ ID NO: 3044 - RNA, 23 nt, Homo sapiens
ucugcucauaccccaugguuucu

SEQ ID NO: 3045 - RNA, 21 nt, Homo sapiens
uggcagggaggcugggagggg

SEQ ID NO: 3046 - RNA, 17 nt, Homo sapiens
ucgccuccuccucuccc

SEQ ID NO: 3047 - RNA, 22 nt, Homo sapiens
ucugggcaacaaagugagaccu

SEQ ID NO: 3048 - RNA, 24 nt, Homo sapiens
uggcccugacugaagaccagcagu

SEQ ID NO: 3049 - RNA, 23 nt, Homo sapiens
acuccauuuguuuugaugaugga

SEQ ID NO: 3050 - RNA, 21 nt, Homo sapiens
gcccuccgcccgugcaccccg

SEQ ID NO: 3051 - RNA, 22 nt, Homo sapiens
uggagagaaaggcaguuccuga

SEQ ID NO: 3052 - RNA, 21 nt, Homo sapiens
cggcggggacggcgauugguc

SEQ ID NO: 3053 - RNA, 22 nt, Homo sapiens
cauugcacuugucucggucuga

SEQ ID NO: 3054 - RNA, 22 nt, Homo sapiens
cauugcacuugucucggucuga

SEQ ID NO: 3055 - RNA, 22 nt, Homo sapiens
cuggcccucucugcccuuccgu

SEQ ID NO: 3056 - RNA, 23 nt, Homo sapiens
ucccccaggugugauucugauuu

SEQ ID NO: 3057 - RNA, 23 nt, Homo sapiens
uagugcaauauugcuuauagggu

SEQ ID NO: 3058 - RNA, 21 nt, Homo sapiens
aggguaagcugaaccucugau

SEQ ID NO: 3059 - RNA, 25 nt, Homo sapiens
gcugggcagggcuucugagcuccuu

SEQ ID NO: 3060 - RNA, 24 nt, Homo sapiens
acugggggcuuucgggcucugcgu

SEQ ID NO: 3061 - RNA, 25 nt, Homo sapiens
ggcggagggaaguagguccguuggu

SEQ ID NO: 3062 - RNA, 25 nt, Homo sapiens
ggcggagggaaguagguccguuggu

SEQ ID NO: 3063 - RNA, 22 nt, Homo sapiens
aggcggggcgccgcgggaccgc

SEQ ID NO: 3064 - RNA, 22 nt, Homo sapiens
ugcggggcuagggcuaacagca

SEQ ID NO: 3065 - RNA, 21 nt, Homo sapiens
uggaggagaaggaaggugaug

SEQ ID NO: 3066 - RNA, 22 nt, Homo sapiens
acuccagccccacagccucagc

SEQ ID NO: 3067 - RNA, 23 nt, Homo sapiens
ccugcagcgacuugauggcuucc

SEQ ID NO: 3068 - RNA, 23 nt, Homo sapiens
ccugcagcgacuugauggcuucc

SEQ ID NO: 3069 - RNA, 22 nt, Homo sapiens
uggagugugacaaugguguuug

SEQ ID NO: 3070 - RNA, 22 nt, Homo sapiens
uaacacugucugguaaagaugg

SEQ ID NO: 3071 - RNA, 23 nt, Homo sapiens
uaaggugcaucuagugcagauag

SEQ ID NO: 3072 - RNA, 23 nt, Homo sapiens
uaaggugcaucuagugcaguuag

SEQ ID NO: 3073 - RNA, 22 nt, Homo sapiens
uagguaguuucauguuguuggg

SEQ ID NO: 3074 - RNA, 23 nt, Homo sapiens
cccaguguucagacuaccuguuc

SEQ ID NO: 3075 - RNA, 23 nt, Homo sapiens
cccaguguuuagacuaucuguuc

SEQ ID NO: 3076 - RNA, 22 nt, Homo sapiens
uaacacugucugguaacgaugu

SEQ ID NO: 3077 - RNA, 22 nt, Homo sapiens
uccuucauuccaccggagucug

SEQ ID NO: 3078 - RNA, 22 nt, Homo sapiens
cauugcacuugucucggucuga

SEQ ID NO: 3079 - RNA, 22 nt, Homo sapiens
agaggcuggccgugaugaauuc

SEQ ID NO: 3080 - RNA, 21 nt, Homo sapiens
guggcugcacucacuuccuuc

SEQ ID NO: 3081 - RNA, 22 nt, Homo sapiens
ugcggggcuagggcuaacagca

SEQ ID NO: 3082 - RNA, 21 nt, Homo sapiens
gugccagcugcagugggggag

SEQ ID NO: 3083 - RNA, 21 nt, Homo sapiens
uggcagggaggcugggagggg

SEQ ID NO: 3084 - RNA, 22 nt, Homo sapiens
ucaccagcccuguguucccuag

SEQ ID NO: 3085 - RNA, 22 nt, Homo sapiens
ucggccugaccacccaccccac

SEQ ID NO: 3086 - RNA, 23 nt, Homo sapiens
agcugguguugugaaucaggccg

SEQ ID NO: 3087 - RNA, 23 nt, Homo sapiens
ucuggcuccgugucuucacuccc

SEQ ID NO: 3088 - RNA, 23 nt, Homo sapiens
uaaggugcaucuagugcagauag

SEQ ID NO: 3089 - RNA, 21 nt, Homo sapiens
cggcggggacggcgauugguc

SEQ ID NO: 3090 - RNA, 21 nt, Homo sapiens
cggcggggacggcgauugguc

SEQ ID NO: 3091 - RNA, 22 nt, Homo sapiens
cgcaggggccgggugcucaccg

SEQ ID NO: 3092 - RNA, 22 nt, Homo sapiens
cccugugcccggcccacuucug

SEQ ID NO: 3093 - RNA, 20 nt, Homo sapiens
ccccagggcgacgcggcggg

SEQ ID NO: 3094 - RNA, 21 nt, Homo sapiens
aucacauugccagggauuucc

SEQ ID NO: 3095 - RNA, 21 nt, Homo sapiens
aucacauugccagggauuacc

SEQ ID NO: 3096 - RNA, 23 nt, Homo sapiens
ucccccaggugugauucugauuu

SEQ ID NO: 3097 - RNA, 22 nt, Homo sapiens
uggugggcacagaaucuggacu

SEQ ID NO: 3098 - RNA, 19 nt, Homo sapiens
ugucucugcugggguuucu

SEQ ID NO: 3099 - RNA, 25 nt, Homo sapiens
aggggugguguugggacagcuccgu

SEQ ID NO: 3100 - RNA, 23 nt, Homo sapiens
gcgaggaccccucggggucugac

SEQ ID NO: 3101 - RNA, 22 nt, Homo sapiens
aaccagcaccccaacuuuggac

SEQ ID NO: 3102 - RNA, 24 nt, Homo sapiens
acugggggcuuucgggcucugcgu

SEQ ID NO: 3103 - RNA, 22 nt, Homo sapiens
uggugggccgcagaacaugugc

SEQ ID NO: 3104 - RNA, 22 nt, Homo sapiens
aggcggggcgccgcgggaccgc

SEQ ID NO: 3105 - RNA, 22 nt, Homo sapiens
aggcggggcgccgcgggaccgc

SEQ ID NO: 3106 - RNA, 22 nt, Homo sapiens
ugcggggcuagggcuaacagca

SEQ ID NO: 3107 - RNA, 22 nt, Homo sapiens
cugcccuggcccgagggaccga

SEQ ID NO: 3108 - RNA, 17 nt, Homo sapiens
ucgccuccuccucuccc

SEQ ID NO: 3109 - RNA, 21 nt, Homo sapiens
cggcggggacggcgauugguc

SEQ ID NO: 3110 - RNA, 20 nt, Homo sapiens
ccuccugcccuccuugcugu

SEQ ID NO: 3111 - RNA, 22 nt, Homo sapiens
cauugcacuugucucggucuga

SEQ ID NO: 3112 - RNA, 22 nt, Homo sapiens
agaggcuggccgugaugaauuc

SEQ ID NO: 3113 - RNA, 25 nt, Homo sapiens
ggcggagggaaguagguccguuggu

SEQ ID NO: 3114 - RNA, 22 nt, Homo sapiens
aggcggggcgccgcgggaccgc

SEQ ID NO: 3115 - RNA, 22 nt, Homo sapiens
ugcggggcuagggcuaacagca

SEQ ID NO: 3116 - RNA, 22 nt, Homo sapiens
uauugcacucgucccggccucc

SEQ ID NO: 3117 - RNA, 20 nt, Homo sapiens
ucacuguucagacaggcgga

SEQ ID NO: 3118 - RNA, 20 nt, Homo sapiens
uaaagagcccuguggagaca

SEQ ID NO: 3119 - RNA, 20 nt, Homo sapiens
uacaguauagaugauguacu

SEQ ID NO: 3120 - RNA, 21 nt, Homo sapiens
uugugcuugaucuaaccaugu

SEQ ID NO: 3121 - RNA, 22 nt, Homo sapiens
aacuguuugcagaggaaacuga

SEQ ID NO: 3122 - RNA, 21 nt, Homo sapiens
caaagguauuugugguuuuug

SEQ ID NO: 3123 - RNA, 21 nt, Homo sapiens
acggugcuggauguggccuuu

SEQ ID NO: 3124 - RNA, 18 nt, Homo sapiens
cgggcguggugguggggg

SEQ ID NO: 3125 - RNA, 23 nt, Homo sapiens
uggaguccaggaaucugcauuuu

SEQ ID NO: 3126 - RNA, 23 nt, Homo sapiens
ucuggcuccgugucuucacuccc

SEQ ID NO: 3127 - RNA, 22 nt, Homo sapiens
agacccuggucugcacucuauc

SEQ ID NO: 3128 - RNA, 23 nt, Homo sapiens
cacccggcugugugcacaugugc

SEQ ID NO: 3129 - RNA, 22 nt, Homo sapiens
uggagagaaaggcaguuccuga

SEQ ID NO: 3130 - RNA, 23 nt, Homo sapiens
ugaguaccgccaugucuguuggg

SEQ ID NO: 3131 - RNA, 20 nt, Homo sapiens
ccccagggcgacgcggcggg

SEQ ID NO: 3132 - RNA, 22 nt, Homo sapiens
cugugcgugugacagcggcuga

SEQ ID NO: 3133 - RNA, 25 nt, Homo sapiens
aggggugguguugggacagcuccgu

SEQ ID NO: 3134 - RNA, 23 nt, Homo sapiens
aucgcugcgguugcgagcgcugu

SEQ ID NO: 3135 - RNA, 22 nt, Homo sapiens
gguggcccggccgugccugagg

SEQ ID NO: 3136 - RNA, 23 nt, Homo sapiens
uggugcggagagggcccacagug

SEQ ID NO: 3137 - RNA, 17 nt, Homo sapiens
ucucgcuggggccucca

SEQ ID NO: 3138 - RNA, 20 nt, Homo sapiens
cggcucugggucugugggga

SEQ ID NO: 3139 - RNA, 21 nt, Homo sapiens
cgcgggugcuuacugacccuu

SEQ ID NO: 3140 - RNA, 23 nt, Homo sapiens
cgggucggaguuagcucaagcgg

SEQ ID NO: 3141 - RNA, 20 nt, Homo sapiens
ugagcccuguccucccgcag

SEQ ID NO: 3142 - RNA, 22 nt, Homo sapiens
acccgucccguucguccccgga

SEQ ID NO: 3143 - RNA, 22 nt, Homo sapiens
acccgucccguucguccccgga

SEQ ID NO: 3144 - RNA, 19 nt, Homo sapiens
gaugaugcugcugaugcug

SEQ ID NO: 3145 - RNA, 18 nt, Homo sapiens
ugaggcaguagauugaau

SEQ ID NO: 3146 - RNA, 22 nt, Homo sapiens
ucaggccaggcacaguggcuca

SEQ ID NO: 3147 - RNA, 21 nt, Homo sapiens
uugaaaggcuauuucuugguc

SEQ ID NO: 3148 - RNA, 22 nt, Homo sapiens
aguggggaacccuuccaugagg

SEQ ID NO: 3149 - RNA, 22 nt, Homo sapiens
aucuggagguaagaagcacuuu

SEQ ID NO: 3150 - RNA, 22 nt, Homo sapiens
gucccucuccaaaugugucuug

SEQ ID NO: 3151 - RNA, 21 nt, Homo sapiens
aggaggcagcgcucucaggac

SEQ ID NO: 3152 - RNA, 23 nt, Homo sapiens
uauucauuuauccccagccuaca

SEQ ID NO: 3153 - RNA, 20 nt, Homo sapiens
cggcucugggucugugggga

SEQ ID NO: 3154 - RNA, 22 nt, Homo sapiens
uauugcacucgucccggccucc

SEQ ID NO: 3155 - RNA, 22 nt, Homo sapiens
uauugcacucgucccggccucc

SEQ ID NO: 3156 - RNA, 22 nt, Homo sapiens
uggagugugacaaugguguuug

SEQ ID NO: 3157 - RNA, 24 nt, Homo sapiens
agccuggaagcuggagccugcagu

SEQ ID NO: 3158 - RNA, 23 nt, Homo sapiens
ucuggcuccgugucuucacuccc

SEQ ID NO: 3159 - RNA, 22 nt, Homo sapiens
ucucccaacccuuguaccagug

SEQ ID NO: 3160 - RNA, 23 nt, Homo sapiens
ugaguaccgccaugucuguuggg

SEQ ID NO: 3161 - RNA, 22 nt, Homo sapiens
uguaaacauccuacacucagcu

SEQ ID NO: 3162 - RNA, 22 nt, Homo sapiens
uuauaaagcaaugagacugauu

SEQ ID NO: 3163 - RNA, 19 nt, Homo sapiens
ugucucugcugggguuucu

SEQ ID NO: 3164 - RNA, 19 nt, Homo sapiens
ugucucugcugggguuucu

SEQ ID NO: 3165 - RNA, 25 nt, Homo sapiens
aggggugguguugggacagcuccgu

SEQ ID NO: 3166 - RNA, 22 nt, Homo sapiens
ugagaccucuggguucugagcu

SEQ ID NO: 3167 - RNA, 20 nt, Homo sapiens
ggggagcuguggaagcagua

SEQ ID NO: 3168 - RNA, 21 nt, Homo sapiens
aaggcagggcccccgcucccc

SEQ ID NO: 3169 - RNA, 22 nt, Homo sapiens
uuuucaacucuaaugggagaga

SEQ ID NO: 3170 - RNA, 18 nt, Homo sapiens
cagggaggugaaugugau

SEQ ID NO: 3171 - RNA, 23 nt, Homo sapiens
guccaguuuucccaggaaucccu

SEQ ID NO: 3172 - RNA, 23 nt, Homo sapiens
ucuggcuccgugucuucacuccc

SEQ ID NO: 3173 - RNA, 21 nt, Homo sapiens
cuagacugaagcuccuugagg

SEQ ID NO: 3174 - RNA, 22 nt, Homo sapiens
uauugcacauuacuaaguugca

SEQ ID NO: 3175 - RNA, 22 nt, Homo sapiens
aacacaccugguuaaccucuuu

SEQ ID NO: 3176 - RNA, 22 nt, Homo sapiens
aacacaccuauucaaggauuca

SEQ ID NO: 3177 - RNA, 22 nt, Homo sapiens
aauugcacgguauccaucugua

SEQ ID NO: 3178 - RNA, 20 nt, Homo sapiens
auuccuagaaauuguucaua

SEQ ID NO: 3179 - RNA, 23 nt, Homo sapiens
uaaauuucaccuuucugagaagg

SEQ ID NO: 3180 - RNA, 20 nt, Homo sapiens
auguauaaauguauacacac

SEQ ID NO: 3181 - RNA, 21 nt, Homo sapiens
guguugaaacaaucucuacug

SEQ ID NO: 3182 - RNA, 22 nt, Homo sapiens
aaauuauuguacaucggaugag

SEQ ID NO: 3183 - RNA, 22 nt, Homo sapiens
ugagccccugugccgcccccag

SEQ ID NO: 3184 - RNA, 24 nt, Homo sapiens
agccuggaagcuggagccugcagu

SEQ ID NO: 3185 - RNA, 17 nt, Homo sapiens
ucgccuccuccucuccc

SEQ ID NO: 3186 - RNA, 22 nt, Homo sapiens
gcccgcguguggagccaggugu

SEQ ID NO: 3187 - RNA, 22 nt, Homo sapiens
cauugcacuugucucggucuga

SEQ ID NO: 3188 - RNA, 22 nt, Homo sapiens
aaggagcucacagucuauugag

SEQ ID NO: 3189 - RNA, 21 nt, Homo sapiens
agggggaaaguucuauagucc

SEQ ID NO: 3190 - RNA, 25 nt, Homo sapiens
ggcggagggaaguagguccguuggu

SEQ ID NO: 3191 - RNA, 23 nt, Homo sapiens
aaggagcuuacaaucuagcuggg

SEQ ID NO: 3192 - RNA, 22 nt, Homo sapiens
ugcggggcuagggcuaacagca

SEQ ID NO: 3193 - RNA, 21 nt, Homo sapiens
uggaggagaaggaaggugaug

SEQ ID NO: 3194 - RNA, 18 nt, Homo sapiens
cagggaggugaaugugau

SEQ ID NO: 3195 - RNA, 23 nt, Homo sapiens
ucuggcuccgugucuucacuccc

SEQ ID NO: 3196 - RNA, 18 nt, Homo sapiens
ugaggcaguagauugaau

SEQ ID NO: 3197 - RNA, 22 nt, Homo sapiens
uucaccaccuucuccacccagc

SEQ ID NO: 3198 - RNA, 22 nt, Homo sapiens
ugucaguuugucaaauacccca

SEQ ID NO: 3199 - RNA, 22 nt, Homo sapiens
ucagcaaacauuuauugugugc

SEQ ID NO: 3200 - RNA, 21 nt, Homo sapiens
uggguuuacguugggagaacu

SEQ ID NO: 3201 - RNA, 22 nt, Homo sapiens
gucccucuccaaaugugucuug

SEQ ID NO: 3202 - RNA, 21 nt, Homo sapiens
aggaggcagcgcucucaggac

SEQ ID NO: 3203 - RNA, 21 nt, Homo sapiens
uggaggagaaggaaggugaug

SEQ ID NO: 3204 - RNA, 21 nt, Homo sapiens
uacucaaaaagcugucaguca

SEQ ID NO: 3205 - RNA, 20 nt, Homo sapiens
cuuccucgucugucugcccc

SEQ ID NO: 3206 - RNA, 18 nt, Homo sapiens
cgggcguggugguggggg

SEQ ID NO: 3207 - RNA, 17 nt, Homo sapiens
ucccaccgcugccaccc

SEQ ID NO: 3208 - RNA, 17 nt, Homo sapiens
ucgccuccuccucuccc

SEQ ID NO: 3209 - RNA, 19 nt, Homo sapiens
accgugcaaagguagcaua

SEQ ID NO: 3210 - RNA, 21 nt, Homo sapiens
auguaugugugcaugugcaug

SEQ ID NO: 3211 - RNA, 21 nt, Homo sapiens
gccccugggccuauccuagaa

SEQ ID NO: 3212 - RNA, 22 nt, Homo sapiens
uggugggcacagaaucuggacu

SEQ ID NO: 3213 - RNA, 22 nt, Homo sapiens
uggugggccgcagaacaugugc

SEQ ID NO: 3214 - RNA, 23 nt, Homo sapiens
ggcagguucucacccucucuagg

SEQ ID NO: 3215 - RNA, 21 nt, Homo sapiens
aaggcagggcccccgcucccc

SEQ ID NO: 3216 - RNA, 22 nt, Homo sapiens
agaaggaaauugaauucauuua

SEQ ID NO: 3217 - RNA, 24 nt, Homo sapiens
uggcccugacugaagaccagcagu

SEQ ID NO: 3218 - RNA, 24 nt, Homo sapiens
uggcccugacugaagaccagcagu

SEQ ID NO: 3219 - RNA, 22 nt, Homo sapiens
ucaaaacugaggggcauuuucu

SEQ ID NO: 3220 - RNA, 22 nt, Homo sapiens
ugcccuguggacucaguucugg

SEQ ID NO: 3221 - RNA, 22 nt, Homo sapiens
acacagggcuguugugaagacu

SEQ ID NO: 3222 - RNA, 22 nt, Homo sapiens
uggcagugucuuagcugguugu

SEQ ID NO: 3223 - RNA, 23 nt, Homo sapiens
aggcaguguaguuagcugauugc

SEQ ID NO: 3224 - RNA, 22 nt, Homo sapiens
auauaauacaaccugcuaagug

SEQ ID NO: 3225 - RNA, 22 nt, Homo sapiens
uggcaguguauuguuagcuggu

SEQ ID NO: 3226 - RNA, 22 nt, Homo sapiens
aggcaguguauuguuagcuggc

SEQ ID NO: 3227 - RNA, 22 nt, Homo sapiens
caaaacuggcaauuacuuuugc

SEQ ID NO: 3228 - RNA, 22 nt, Homo sapiens
aaaaacugagacuacuuuugca

SEQ ID NO: 3229 - RNA, 19 nt, Homo sapiens
aaaaacuguaauuacuuuu

SEQ ID NO: 3230 - RNA, 22 nt, Homo sapiens
ccaaaacugcaguuacuuuugc

SEQ ID NO: 3231 - RNA, 22 nt, Homo sapiens
auucuaauuucuccacgucuuu

SEQ ID NO: 3232 - RNA, 22 nt, Homo sapiens
uggauuucuuugugaaucacca

SEQ ID NO: 3233 - RNA, 23 nt, Homo sapiens
gagggucuugggagggaugugac

SEQ ID NO: 3234 - RNA, 22 nt, Homo sapiens
caggauguggucaaguguuguu

SEQ ID NO: 3235 - RNA, 18 nt, Homo sapiens
cagggaggugaaugugau

SEQ ID NO: 3236 - RNA, 21 nt, Homo sapiens
cugaccuaugaauugacagcc

SEQ ID NO: 3237 - RNA, 18 nt, Homo sapiens
uucacagggaggugucau

SEQ ID NO: 3238 - RNA, 22 nt, Homo sapiens
aucuggagguaagaagcacuuu

SEQ ID NO: 3239 - RNA, 23 nt, Homo sapiens
caaagcgcuucucuuuagagugu

SEQ ID NO: 3240 - RNA, 21 nt, Homo sapiens
cuccagagggaaguacuuucu

SEQ ID NO: 3241 - RNA, 21 nt, Homo sapiens
cuccagagggaugcacuuucu

SEQ ID NO: 3242 - RNA, 21 nt, Homo sapiens
uggaggagaaggaaggugaug

SEQ ID NO: 3243 - RNA, 21 nt, Homo sapiens
cugacuguugccguccuccag

SEQ ID NO: 3244 - RNA, 22 nt, Homo sapiens
aacccguagauccgaacuugug

SEQ ID NO: 3245 - RNA, 22 nt, Homo sapiens
aacccguagauccgaacuugug

SEQ ID NO: 3246 - RNA, 21 nt, Homo sapiens
ucguggccuggucuccauuau

SEQ ID NO: 3247 - RNA, 22 nt, Homo sapiens
ucggccugaccacccaccccac

SEQ ID NO: 3248 - RNA, 22 nt, Homo sapiens
ccucuuccccuugucucuccag

SEQ ID NO: 3249 - RNA, 22 nt, Homo sapiens
cugaagcucagagggcucugau

SEQ ID NO: 3250 - RNA, 19 nt, Homo sapiens
gaugaugcugcugaugcug

SEQ ID NO: 3251 - RNA, 18 nt, Homo sapiens
ugaggcaguagauugaau

SEQ ID NO: 3252 - RNA, 18 nt, Homo sapiens
ugaggcaguagauugaau

SEQ ID NO: 3253 - RNA, 22 nt, Homo sapiens
uacccagagcaugcagugugaa

SEQ ID NO: 3254 - RNA, 20 nt, Homo sapiens
ccucugggcccuuccuccag

SEQ ID NO: 3255 - RNA, 22 nt, Homo sapiens
ucucugggccugugucuuaggc

SEQ ID NO: 3256 - RNA, 22 nt, Homo sapiens
agaggcuggccgugaugaauuc

SEQ ID NO: 3257 - RNA, 22 nt, Homo sapiens
aguggggaacccuuccaugagg

SEQ ID NO: 3258 - RNA, 25 nt, Homo sapiens
aggggugguguugggacagcuccgu

SEQ ID NO: 3259 - RNA, 21 nt, Homo sapiens
aggaggcagcgcucucaggac

SEQ ID NO: 3260 - RNA, 21 nt, Homo sapiens
uggaggagaaggaaggugaug

SEQ ID NO: 3261 - RNA, 20 nt, Homo sapiens
guagaggagauggcgcaggg

SEQ ID NO: 3262 - RNA, 20 nt, Homo sapiens
ggggagcuguggaagcagua

SEQ ID NO: 3263 - RNA, 17 nt, Homo sapiens
ucgccuccuccucuccc

SEQ ID NO: 3264 - RNA, 18 nt, Homo sapiens
cagggaggugaaugugau

SEQ ID NO: 3265 - RNA, 23 nt, Homo sapiens
ucuggcuccgugucuucacuccc

SEQ ID NO: 3266 - RNA, 21 nt, Homo sapiens
cggcggggacggcgauugguc

SEQ ID NO: 3267 - RNA, 22 nt, Homo sapiens
cauugcacuugucucggucuga

SEQ ID NO: 3268 - RNA, 21 nt, Homo sapiens
uaaagugcugacagugcagau

SEQ ID NO: 3269 - RNA, 23 nt, Homo sapiens
cagugcaaugauauugucaaagc

SEQ ID NO: 3270 - RNA, 22 nt, Homo sapiens
aggcggggcgccgcgggaccgc

SEQ ID NO: 3271 - RNA, 22 nt, Homo sapiens
ugcggggcuagggcuaacagca

SEQ ID NO: 3272 - RNA, 21 nt, Homo sapiens
uggaggagaaggaaggugaug

SEQ ID NO: 3273 - RNA, 20 nt, Homo sapiens
ugagcccuguccucccgcag

SEQ ID NO: 3274 - RNA, 22 nt, Homo sapiens
ugcccuguggacucaguucugg

SEQ ID NO: 3275 - RNA, 22 nt, Homo sapiens
caaagaauucuccuuuugggcu

SEQ ID NO: 3276 - RNA, 22 nt, Homo sapiens
ucugcccccuccgcugcugcca

SEQ ID NO: 3277 - RNA, 20 nt, Homo sapiens
ccccagggcgacgcggcggg

SEQ ID NO: 3278 - RNA, 20 nt, Homo sapiens
uguuuugauaacaguaaugu

SEQ ID NO: 3279 - RNA, 22 nt, Homo sapiens
acacagggcuguugugaagacu

SEQ ID NO: 3280 - RNA, 22 nt, Homo sapiens
ugucaguuugucaaauacccca

SEQ ID NO: 3281 - RNA, 20 nt, Homo sapiens
acugccccaggugcugcugg

SEQ ID NO: 3282 - RNA, 22 nt, Homo sapiens
aacacaccugguuaaccucuuu

SEQ ID NO: 3283 - RNA, 21 nt, Homo sapiens
gccccugggccuauccuagaa

SEQ ID NO: 3284 - RNA, 22 nt, Homo sapiens
aacacaccuauucaaggauuca

SEQ ID NO: 3285 - RNA, 21 nt, Homo sapiens
cggggcagcucaguacaggau

SEQ ID NO: 3286 - RNA, 22 nt, Homo sapiens
aaacaaacauggugcacuucuu

SEQ ID NO: 3287 - RNA, 22 nt, Homo sapiens
caaaaaucucaauuacuuuugc

SEQ ID NO: 3288 - RNA, 21 nt, Homo sapiens
gcgacccauacuugguuucag

SEQ ID NO: 3289 - RNA, 21 nt, Homo sapiens
uggguuuacguugggagaacu

SEQ ID NO: 3290 - RNA, 20 nt, Homo sapiens
agaccauggguucucauugu

SEQ ID NO: 3291 - RNA, 22 nt, Homo sapiens
uggagugugacaaugguguuug

SEQ ID NO: 3292 - RNA, 20 nt, Homo sapiens
cggcucugggucugugggga

SEQ ID NO: 3293 - RNA, 22 nt, Homo sapiens
ccucuuccccuugucucuccag

SEQ ID NO: 3294 - RNA, 23 nt, Homo sapiens
ucuggcuccgugucuucacuccc

SEQ ID NO: 3295 - RNA, 21 nt, Homo sapiens
cggcggggacggcgauugguc

SEQ ID NO: 3296 - RNA, 22 nt, Homo sapiens
caaccuggaggacuccaugcug

SEQ ID NO: 3297 - RNA, 21 nt, Homo sapiens
agggggaaaguucuauagucc

SEQ ID NO: 3298 - RNA, 22 nt, Homo sapiens
aggcggggcgccgcgggaccgc

SEQ ID NO: 3299 - RNA, 20 nt, Homo sapiens
guagaggagauggcgcaggg

SEQ ID NO: 3300 - RNA, 17 nt, Homo sapiens
ucgccuccuccucuccc

SEQ ID NO: 3301 - RNA, 23 nt, Homo sapiens
ucuggcuccgugucuucacuccc

SEQ ID NO: 3302 - RNA, 20 nt, Homo sapiens
ccuccugcccuccuugcugu

SEQ ID NO: 3303 - RNA, 21 nt, Homo sapiens
uugugcuugaucuaaccaugu

SEQ ID NO: 3304 - RNA, 21 nt, Homo sapiens
ccaccaccgugucugacacuu

SEQ ID NO: 3305 - RNA, 21 nt, Homo sapiens
aggggugcuaucugugauuga

SEQ ID NO: 3306 - RNA, 23 nt, Homo sapiens
uggugcggagagggcccacagug

SEQ ID NO: 3307 - RNA, 21 nt, Homo sapiens
agaggauacccuuuguauguu

SEQ ID NO: 3308 - RNA, 17 nt, Homo sapiens
ucccaccgcugccaccc

SEQ ID NO: 3309 - RNA, 18 nt, Homo sapiens
cagggaggugaaugugau

SEQ ID NO: 3310 - RNA, 22 nt, Homo sapiens
uguaaacauccuacacucagcu

SEQ ID NO: 3311 - RNA, 23 nt, Homo sapiens
agcucggucugaggccccucagu

SEQ ID NO: 3312 - RNA, 23 nt, Homo sapiens
ucuuggaguaggucauugggugg

SEQ ID NO: 3313 - RNA, 21 nt, Homo sapiens
agggggaaaguucuauagucc

SEQ ID NO: 3314 - RNA, 22 nt, Homo sapiens
uggagugugacaaugguguuug

SEQ ID NO: 3315 - RNA, 21 nt, Homo sapiens
cggcggggacggcgauugguc

SEQ ID NO: 3316 - RNA, 22 nt, Homo sapiens
uaacacugucugguaacgaugu

SEQ ID NO: 3317 - RNA, 22 nt, Homo sapiens
uaauacugccugguaaugauga

SEQ ID NO: 3318 - RNA, 23 nt, Homo sapiens
ucccccaggugugauucugauuu

SEQ ID NO: 3319 - RNA, 22 nt, Homo sapiens
aagauguggaaaaauuggaauc

SEQ ID NO: 3320 - RNA, 24 nt, Homo sapiens
acugggggcuuucgggcucugcgu

SEQ ID NO: 3321 - RNA, 21 nt, Homo sapiens
guggcugcacucacuuccuuc

SEQ ID NO: 3322 - RNA, 22 nt, Homo sapiens
aggcggggcgccgcgggaccgc

SEQ ID NO: 3323 - RNA, 22 nt, Homo sapiens
ugcggggcuagggcuaacagca

SEQ ID NO: 3324 - RNA, 23 nt, Homo sapiens
ccugcagcgacuugauggcuucc

SEQ ID NO: 3325 - RNA, 17 nt, Homo sapiens
ucgccuccuccucuccc

SEQ ID NO: 3326 - RNA, 17 nt, Homo sapiens
ucgccuccuccucuccc

SEQ ID NO: 3327 - RNA, 24 nt, Homo sapiens
uugcagcugccugggagugacuuc

SEQ ID NO: 3328 - RNA, 18 nt, Homo sapiens
acguuggcucugguggug

SEQ ID NO: 3329 - RNA, 23 nt, Homo sapiens
ucuggcuccgugucuucacuccc

SEQ ID NO: 3330 - RNA, 22 nt, Homo sapiens
ucugcccccuccgcugcugcca

SEQ ID NO: 3331 - RNA, 20 nt, Homo sapiens
ccuccugcccuccuugcugu

SEQ ID NO: 3332 - RNA, 20 nt, Homo sapiens
acugccccaggugcugcugg

SEQ ID NO: 3333 - RNA, 23 nt, Homo sapiens
ugaggggcagagagcgagacuuu

SEQ ID NO: 3334 - RNA, 21 nt, Homo sapiens
cggggcagcucaguacaggau

SEQ ID NO: 3335 - RNA, 22 nt, Homo sapiens
auucugcauuuuuagcaaguuc

SEQ ID NO: 3336 - RNA, 19 nt, Homo sapiens
gggcgccugugaucccaac

SEQ ID NO: 3337 - RNA, 19 nt, Homo sapiens
aagcagcugccucugaggc

SEQ ID NO: 3338 - RNA, 22 nt, Homo sapiens
ugcggggcuagggcuaacagca

SEQ ID NO: 3339 - RNA, 22 nt, Homo sapiens
augggugaauuuguagaaggau

SEQ ID NO: 3340 - RNA, 18 nt, Homo sapiens
cagggaggugaaugugau

SEQ ID NO: 3341 - RNA, 23 nt, Homo sapiens
ucuggcuccgugucuucacuccc

SEQ ID NO: 3342 - RNA, 22 nt, Homo sapiens
uagcaccaucugaaaucgguua

SEQ ID NO: 3343 - RNA, 22 nt, Homo sapiens
caaaaaucucaauuacuuuugc

SEQ ID NO: 3344 - RNA, 20 nt, Homo sapiens
auguauaaauguauacacac

SEQ ID NO: 3345 - RNA, 21 nt, Homo sapiens
caaagaggaaggucccauuac

SEQ ID NO: 3346 - RNA, 23 nt, Homo sapiens
aucccuugcaggggcuguugggu

SEQ ID NO: 3347 - RNA, 22 nt, Homo sapiens
uggagagaaaggcaguuccuga

SEQ ID NO: 3348 - RNA, 21 nt, Homo sapiens
cggcggggacggcgauugguc

SEQ ID NO: 3349 - RNA, 20 nt, Homo sapiens
ccuccugcccuccuugcugu

SEQ ID NO: 3350 - RNA, 23 nt, Homo sapiens
ucccccaggugugauucugauuu

SEQ ID NO: 3351 - RNA, 23 nt, Homo sapiens
ugaggggcagagagcgagacuuu

SEQ ID NO: 3352 - RNA, 22 nt, Homo sapiens
aucuggagguaagaagcacuuu

SEQ ID NO: 3353 - RNA, 24 nt, Homo sapiens
acugggggcuuucgggcucugcgu

SEQ ID NO: 3354 - RNA, 22 nt, Homo sapiens
aggcggggcgccgcgggaccgc

SEQ ID NO: 3355 - RNA, 22 nt, Homo sapiens
ugcggggcuagggcuaacagca

SEQ ID NO: 3356 - RNA, 21 nt, Homo sapiens
uggaggagaaggaaggugaug

SEQ ID NO: 3357 - RNA, 22 nt, Homo sapiens
ugagccccugugccgcccccag

SEQ ID NO: 3358 - RNA, 22 nt, Homo sapiens
agaaggaaauugaauucauuua

SEQ ID NO: 3359 - RNA, 21 nt, Homo sapiens
agagaagaagaucagccugca

SEQ ID NO: 3360 - RNA, 22 nt, Homo sapiens
ugagaacugaauuccauggguu

SEQ ID NO: 3361 - RNA, 18 nt, Homo sapiens
ugaggcaguagauugaau

SEQ ID NO: 3362 - RNA, 22 nt, Homo sapiens
uacccagagcaugcagugugaa

SEQ ID NO: 3363 - RNA, 21 nt, Homo sapiens
auuugugcuuggcucugucac

SEQ ID NO: 3364 - RNA, 22 nt, Homo sapiens
aaaucucugcaggcaaauguga

SEQ ID NO: 3365 - RNA, 22 nt, Homo sapiens
gaggguuggguggaggcucucc

SEQ ID NO: 3366 - RNA, 20 nt, Homo sapiens
ccucugggcccuuccuccag

SEQ ID NO: 3367 - RNA, 22 nt, Homo sapiens
ucucugggccugugucuuaggc

SEQ ID NO: 3368 - RNA, 23 nt, Homo sapiens
ugucugcccgcaugccugccucu

SEQ ID NO: 3369 - RNA, 20 nt, Homo sapiens
auuccuagaaauuguucaua

SEQ ID NO: 3370 - RNA, 22 nt, Homo sapiens
auucugcauuuuuagcaaguuc

SEQ ID NO: 3371 - RNA, 22 nt, Homo sapiens
ugagaaccacgucugcucugag

SEQ ID NO: 3372 - RNA, 22 nt, Homo sapiens
gucccucuccaaaugugucuug

SEQ ID NO: 3373 - RNA, 21 nt, Homo sapiens
aggaggcagcgcucucaggac

SEQ ID NO: 3374 - RNA, 20 nt, Homo sapiens
ucugcaggguuugcuuugag

SEQ ID NO: 3375 - RNA, 20 nt, Homo sapiens
ucugcaggguuugcuuugag

SEQ ID NO: 3376 - RNA, 22 nt, Homo sapiens
acccgucccguucguccccgga

SEQ ID NO: 3377 - RNA, 24 nt, Homo sapiens
agccuggaagcuggagccugcagu

SEQ ID NO: 3378 - RNA, 22 nt, Homo sapiens
cuggacugagccgugcuacugg

SEQ ID NO: 3379 - RNA, 21 nt, Homo sapiens
ugcaggaccaagaugagcccu

SEQ ID NO: 3380 - RNA, 24 nt, Homo sapiens
ccagacagaauucuaugcacuuuc

SEQ ID NO: 3381 - RNA, 22 nt, Homo sapiens
gugugcggaaaugcuucugcua

SEQ ID NO: 3382 - RNA, 22 nt, Homo sapiens
acagcaggcacagacaggcagu

SEQ ID NO: 3383 - RNA, 21 nt, Homo sapiens
uugugcuugaucuaaccaugu

SEQ ID NO: 3384 - RNA, 21 nt, Homo sapiens
uucaaguaauucaggauaggu

SEQ ID NO: 3385 - RNA, 22 nt, Homo sapiens
uggcagugucuuagcugguugu

SEQ ID NO: 3386 - RNA, 22 nt, Homo sapiens
caaucacuaacuccacugccau

SEQ ID NO: 3387 - RNA, 23 nt, Homo sapiens
aggcaguguaguuagcugauugc

SEQ ID NO: 3388 - RNA, 24 nt, Homo sapiens
aauccuuggaaccuaggugugagu

SEQ ID NO: 3389 - RNA, 22 nt, Homo sapiens
gccugcugggguggaaccuggu

SEQ ID NO: 3390 - RNA, 21 nt, Homo sapiens
acuggacuuggagucagaagg

SEQ ID NO: 3391 - RNA, 22 nt, Homo sapiens
agaucagaaggugauuguggcu

SEQ ID NO: 3392 - RNA, 22 nt, Homo sapiens
acuggacuuagggucagaaggc

SEQ ID NO: 3393 - RNA, 22 nt, Homo sapiens
uggcaguguauuguuagcuggu

SEQ ID NO: 3394 - RNA, 22 nt, Homo sapiens
aggcaguguauuguuagcuggc

SEQ ID NO: 3395 - RNA, 21 nt, Homo sapiens
gcaguccaugggcauauacac

SEQ ID NO: 3396 - RNA, 19 nt, Homo sapiens
agcugucugaaaaugucuu

SEQ ID NO: 3397 - RNA, 23 nt, Homo sapiens
ugugcuugcucgucccgcccgca

SEQ ID NO: 3398 - RNA, 20 nt, Homo sapiens
cggcucugggucugugggga

SEQ ID NO: 3399 - RNA, 22 nt, Homo sapiens
uggguggucuggagauuugugc

SEQ ID NO: 3400 - RNA, 18 nt, Homo sapiens
cagggaggugaaugugau

SEQ ID NO: 3401 - RNA, 23 nt, Homo sapiens
ucuggcuccgugucuucacuccc

SEQ ID NO: 3402 - RNA, 22 nt, Homo sapiens
uggagagaaaggcaguuccuga

SEQ ID NO: 3403 - RNA, 22 nt, Homo sapiens
cccugugcccggcccacuucug

SEQ ID NO: 3404 - RNA, 21 nt, Homo sapiens
agcuacaucuggcuacugggu

SEQ ID NO: 3405 - RNA, 20 nt, Homo sapiens
guccgcucggcgguggccca

SEQ ID NO: 3406 - RNA, 25 nt, Homo sapiens
aggggugguguugggacagcuccgu

SEQ ID NO: 3407 - RNA, 21 nt, Homo sapiens
agggggaaaguucuauagucc

SEQ ID NO: 3408 - RNA, 25 nt, Homo sapiens
ggcggagggaaguagguccguuggu

SEQ ID NO: 3409 - RNA, 21 nt, Homo sapiens
uggaggagaaggaaggugaug

SEQ ID NO: 3410 - RNA, 23 nt, Homo sapiens
uacccuguagauccgaauuugug

SEQ ID NO: 3411 - RNA, 23 nt, Homo sapiens
uacccuguagaaccgaauuugug

SEQ ID NO: 3412 - RNA, 21 nt, Homo sapiens
uggcagggaggcugggagggg

SEQ ID NO: 3413 - RNA, 22 nt, Homo sapiens
ccucuuccccuugucucuccag

SEQ ID NO: 3414 - RNA, 20 nt, Homo sapiens
cuuccucgucugucugcccc

SEQ ID NO: 3415 - RNA, 25 nt, Homo sapiens
gggcgacaaagcaagacucuuucuu

SEQ ID NO: 3416 - RNA, 22 nt, Homo sapiens
cucggcgcggggcgcgggcucc

SEQ ID NO: 3417 - RNA, 18 nt, Homo sapiens
ugaggcaguagauugaau

SEQ ID NO: 3418 - RNA, 22 nt, Homo sapiens
cccugugcccggcccacuucug

SEQ ID NO: 3419 - RNA, 22 nt, Homo sapiens
uagguaguuuccuguuguuggg

SEQ ID NO: 3420 - RNA, 23 nt, Homo sapiens
ucccuguccuccaggagcucacg

SEQ ID NO: 3421 - RNA, 22 nt, Homo sapiens
uggcagugucuuagcugguugu

SEQ ID NO: 3422 - RNA, 22 nt, Homo sapiens
caaucacuaacuccacugccau

SEQ ID NO: 3423 - RNA, 23 nt, Homo sapiens
aggcaguguaguuagcugauugc

SEQ ID NO: 3424 - RNA, 22 nt, Homo sapiens
aauugcacgguauccaucugua

SEQ ID NO: 3425 - RNA, 23 nt, Homo sapiens
ugaggggcagagagcgagacuuu

SEQ ID NO: 3426 - RNA, 23 nt, Homo sapiens
aaugacacgaucacucccguuga

SEQ ID NO: 3427 - RNA, 22 nt, Homo sapiens
uggcaguguauuguuagcuggu

SEQ ID NO: 3428 - RNA, 22 nt, Homo sapiens
aggcaguguauuguuagcuggc

SEQ ID NO: 3429 - RNA, 25 nt, Homo sapiens
aggggugguguugggacagcuccgu

SEQ ID NO: 3430 - RNA, 21 nt, Homo sapiens
aggaggcagcgcucucaggac

SEQ ID NO: 3431 - RNA, 22 nt, Homo sapiens
acuccagccccacagccucagc

SEQ ID NO: 3432 - RNA, 20 nt, Homo sapiens
guagaggagauggcgcaggg

SEQ ID NO: 3433 - RNA, 21 nt, Homo sapiens
gugccagcugcagugggggag

SEQ ID NO: 3434 - RNA, 22 nt, Homo sapiens
uggaauguaaggaagugugugg

SEQ ID NO: 3435 - RNA, 22 nt, Homo sapiens
cccugugcccggcccacuucug

SEQ ID NO: 3436 - RNA, 19 nt, Homo sapiens
gggcgccugugaucccaac

SEQ ID NO: 3437 - RNA, 22 nt, Homo sapiens
ggggguccccggugcucggauc

SEQ ID NO: 3438 - RNA, 24 nt, Homo sapiens
ugccugggucucuggccugcgcgu

SEQ ID NO: 3439 - RNA, 22 nt, Homo sapiens
ccucuuccccuugucucuccag

SEQ ID NO: 3440 - RNA, 17 nt, Homo sapiens
ucccuguucgggcgcca

SEQ ID NO: 3441 - RNA, 19 nt, Homo sapiens
uggauuuuuggaucaggga

SEQ ID NO: 3442 - RNA, 22 nt, Homo sapiens
cagugcaauguuaaaagggcau

SEQ ID NO: 3443 - RNA, 22 nt, Homo sapiens
ugcccuguggacucaguucugg

SEQ ID NO: 3444 - RNA, 22 nt, Homo sapiens
cucuagagggaagcacuuucug

SEQ ID NO: 3445 - RNA, 22 nt, Homo sapiens
uguaacagcaacuccaugugga

SEQ ID NO: 3446 - RNA, 21 nt, Homo sapiens
aucacauugccagggauuucc

SEQ ID NO: 3447 - RNA, 21 nt, Homo sapiens
aucacauugccagggauuacc

SEQ ID NO: 3448 - RNA, 22 nt, Homo sapiens
uguaaacauccucgacuggaag

SEQ ID NO: 3449 - RNA, 22 nt, Homo sapiens
uguaaacauccuacacucagcu

SEQ ID NO: 3450 - RNA, 23 nt, Homo sapiens
uguaaacauccuacacucucagc

SEQ ID NO: 3451 - RNA, 22 nt, Homo sapiens
uguaaacauccccgacuggaag

SEQ ID NO: 3452 - RNA, 22 nt, Homo sapiens
uguaaacauccuugacuggaag

SEQ ID NO: 3453 - RNA, 22 nt, Homo sapiens
agaggcuggccgugaugaauuc

SEQ ID NO: 3454 - RNA, 22 nt, Homo sapiens
ugaaacauacacgggaaaccuc

SEQ ID NO: 3455 - RNA, 22 nt, Homo sapiens
caaaaaucucaauuacuuuugc

SEQ ID NO: 3456 - RNA, 23 nt, Homo sapiens
uaaaucccauggugccuucuccu

SEQ ID NO: 3457 - RNA, 20 nt, Homo sapiens
guagaggagauggcgcaggg

SEQ ID NO: 3458 - RNA, 22 nt, Homo sapiens
uuaucagaaucuccagggguac

SEQ ID NO: 3459 - RNA, 22 nt, Homo sapiens
uuauaauacaaccugauaagug

SEQ ID NO: 3460 - RNA, 22 nt, Homo sapiens
gguggcccggccgugccugagg

SEQ ID NO: 3461 - RNA, 22 nt, Homo sapiens
ccucuuccccuugucucuccag

SEQ ID NO: 3462 - RNA, 24 nt, Homo sapiens
ccagacagaauucuaugcacuuuc

SEQ ID NO: 3463 - RNA, 22 nt, Homo sapiens
acagcaggcacagacaggcagu

SEQ ID NO: 3464 - RNA, 22 nt, Homo sapiens
uguaaacauccucgacuggaag

SEQ ID NO: 3465 - RNA, 22 nt, Homo sapiens
uguaaacauccuacacucagcu

SEQ ID NO: 3466 - RNA, 23 nt, Homo sapiens
uguaaacauccuacacucucagc

SEQ ID NO: 3467 - RNA, 22 nt, Homo sapiens
uguaaacauccccgacuggaag

SEQ ID NO: 3468 - RNA, 22 nt, Homo sapiens
uguaaacauccuugacuggaag

SEQ ID NO: 3469 - RNA, 22 nt, Homo sapiens
gccugcugggguggaaccuggu

SEQ ID NO: 3470 - RNA, 21 nt, Homo sapiens
gaagugugccguggugugucu

SEQ ID NO: 3471 - RNA, 21 nt, Homo sapiens
agggggaaaguucuauagucc

SEQ ID NO: 3472 - RNA, 19 nt, Homo sapiens
agcugucugaaaaugucuu

SEQ ID NO: 3473 - RNA, 23 nt, Homo sapiens
aucgcugcgguugcgagcgcugu

SEQ ID NO: 3474 - RNA, 19 nt, Homo sapiens
aagugugcagggcacuggu

SEQ ID NO: 3475 - RNA, 22 nt, Homo sapiens
ugcggggcuagggcuaacagca

SEQ ID NO: 3476 - RNA, 20 nt, Homo sapiens
guagaggagauggcgcaggg

SEQ ID NO: 3477 - RNA, 22 nt, Homo sapiens
ugugcgcagggagaccucuccc

SEQ ID NO: 3478 - RNA, 22 nt, Homo sapiens
uggagugugacaaugguguuug

SEQ ID NO: 3479 - RNA, 18 nt, Homo sapiens
cgggcguggugguggggg

SEQ ID NO: 3480 - RNA, 21 nt, Homo sapiens
uugggacauacuuaugcuaaa

SEQ ID NO: 3481 - RNA, 22 nt, Homo sapiens
cgcaggggccgggugcucaccg

SEQ ID NO: 3482 - RNA, 21 nt, Homo sapiens
aggggugcuaucugugauuga

SEQ ID NO: 3483 - RNA, 19 nt, Homo sapiens
aggcacggugucagcaggc

SEQ ID NO: 3484 - RNA, 24 nt, Homo sapiens
ugccugggucucuggccugcgcgu

SEQ ID NO: 3485 - RNA, 22 nt, Homo sapiens
uggagugugacaaugguguuug

SEQ ID NO: 3486 - RNA, 17 nt, Homo sapiens
ucgccuccuccucuccc

SEQ ID NO: 3487 - RNA, 21 nt, Homo sapiens
uccugcgcgucccagaugccc

SEQ ID NO: 3488 - RNA, 21 nt, Homo sapiens
cggcggggacggcgauugguc

SEQ ID NO: 3489 - RNA, 23 nt, Homo sapiens
ugaguaccgccaugucuguuggg

SEQ ID NO: 3490 - RNA, 22 nt, Homo sapiens
ucugcccccuccgcugcugcca

SEQ ID NO: 3491 - RNA, 21 nt, Homo sapiens
agcuacaucuggcuacugggu

SEQ ID NO: 3492 - RNA, 20 nt, Homo sapiens
acugccccaggugcugcugg

SEQ ID NO: 3493 - RNA, 20 nt, Homo sapiens
gugcauugcuguugcauugc

SEQ ID NO: 3494 - RNA, 21 nt, Homo sapiens
cggggcagcucaguacaggau

SEQ ID NO: 3495 - RNA, 22 nt, Homo sapiens
gagugccuucuuuuggagcguu

SEQ ID NO: 3496 - RNA, 22 nt, Homo sapiens
aagugccuccuuuuagaguguu

SEQ ID NO: 3497 - RNA, 22 nt, Homo sapiens
uacgucaucguugucaucguca

SEQ ID NO: 3498 - RNA, 22 nt, Homo sapiens
aggcggggcgccgcgggaccgc

SEQ ID NO: 3499 - RNA, 22 nt, Homo sapiens
ugcggggcuagggcuaacagca

SEQ ID NO: 3500 - RNA, 20 nt, Homo sapiens
ucugcaggguuugcuuugag

SEQ ID NO: 3501 - RNA, 22 nt, Homo sapiens
uggagugugacaaugguguuug

SEQ ID NO: 3502 - RNA, 22 nt, Homo sapiens
ucggccugaccacccaccccac

SEQ ID NO: 3503 - RNA, 22 nt, Homo sapiens
uggagagaaaggcaguuccuga

SEQ ID NO: 3504 - RNA, 21 nt, Homo sapiens
ugauuguccaaacgcaauucu

SEQ ID NO: 3505 - RNA, 23 nt, Homo sapiens
ucccccaggugugauucugauuu

SEQ ID NO: 3506 - RNA, 24 nt, Homo sapiens
acugggggcuuucgggcucugcgu

SEQ ID NO: 3507 - RNA, 24 nt, Homo sapiens
ugccugggucucuggccugcgcgu

SEQ ID NO: 3508 - RNA, 26 nt, Homo sapiens
gaugaugauggcagcaaauucugaaa

SEQ ID NO: 3509 - RNA, 20 nt, Homo sapiens
gugucugggcggacagcugc

SEQ ID NO: 3510 - RNA, 21 nt, Homo sapiens
uccuucugcuccgucccccag

SEQ ID NO: 3511 - RNA, 22 nt, Homo sapiens
cagugcaauguuaaaagggcau

SEQ ID NO: 3512 - RNA, 22 nt, Homo sapiens
cagugcaaugaugaaagggcau

SEQ ID NO: 3513 - RNA, 19 nt, Homo sapiens
gaugaugcugcugaugcug

SEQ ID NO: 3514 - RNA, 24 nt, Homo sapiens
ccagacagaauucuaugcacuuuc

SEQ ID NO: 3515 - RNA, 23 nt, Homo sapiens
cagugcaauaguauugucaaagc

SEQ ID NO: 3516 - RNA, 23 nt, Homo sapiens
cagugcaaugauauugucaaagc

SEQ ID NO: 3517 - RNA, 21 nt, Homo sapiens
ugucuugcaggccgucaugca

SEQ ID NO: 3518 - RNA, 23 nt, Homo sapiens
uagugcaauauugcuuauagggu

SEQ ID NO: 3519 - RNA, 22 nt, Homo sapiens
caugccuugaguguaggaccgu

SEQ ID NO: 3520 - RNA, 21 nt, Homo sapiens
cccggagccaggaugcagcuc

SEQ ID NO: 3521 - RNA, 21 nt, Homo sapiens
cccggagccaggaugcagcuc

SEQ ID NO: 3522 - RNA, 19 nt, Homo sapiens
gaugaugcugcugaugcug

SEQ ID NO: 3523 - RNA, 21 nt, Homo sapiens
ucgaggagcucacagucuagu

SEQ ID NO: 3524 - RNA, 23 nt, Homo sapiens
ugaguaccgccaugucuguuggg

SEQ ID NO: 3525 - RNA, 23 nt, Homo sapiens
ucaagagcaauaacgaaaaaugu

SEQ ID NO: 3526 - RNA, 19 nt, Homo sapiens
ugagcugcuguaccaaaau

SEQ ID NO: 3527 - RNA, 20 nt, Homo sapiens
guccgcucggcgguggccca

SEQ ID NO: 3528 - RNA, 23 nt, Homo sapiens
acuugggcacugaaacaaugucc

SEQ ID NO: 3529 - RNA, 23 nt, Homo sapiens
ggcagguucucacccucucuagg

SEQ ID NO: 3530 - RNA, 22 nt, Homo sapiens
cuggacugagccgugcuacugg

SEQ ID NO: 3531 - RNA, 21 nt, Homo sapiens
uggacugcccugaucuggaga

SEQ ID NO: 3532 - RNA, 22 nt, Homo sapiens
ugagaacugaauuccauggguu

SEQ ID NO: 3533 - RNA, 22 nt, Homo sapiens
aaggagcucacagucuauugag

SEQ ID NO: 3534 - RNA, 21 nt, Homo sapiens
acuggacuuggagucagaagg

SEQ ID NO: 3535 - RNA, 22 nt, Homo sapiens
acuggacuuagggucagaaggc

SEQ ID NO: 3536 - RNA, 21 nt, Homo sapiens
gcaguccaugggcauauacac

SEQ ID NO: 3537 - RNA, 19 nt, Homo sapiens
ugagcugcuguaccaaaau

SEQ ID NO: 3538 - RNA, 20 nt, Homo sapiens
guugugucaguuuaucaaac

SEQ ID NO: 3539 - RNA, 22 nt, Homo sapiens
augcugacauauuuacuagagg

SEQ ID NO: 3540 - RNA, 19 nt, Homo sapiens
aagcagcugccucugaggc

SEQ ID NO: 3541 - RNA, 23 nt, Homo sapiens
aaggagcuuacaaucuagcuggg

SEQ ID NO: 3542 - RNA, 23 nt, Homo sapiens
aaggagcuuacaaucuagcuggg

SEQ ID NO: 3543 - RNA, 22 nt, Homo sapiens
ucuucucuguuuuggccaugug

SEQ ID NO: 3544 - RNA, 21 nt, Homo sapiens
ucguggccuggucuccauuau

SEQ ID NO: 3545 - RNA, 23 nt, Homo sapiens
aggaugagcaaagaaaguagauu

SEQ ID NO: 3546 - RNA, 22 nt, Homo sapiens
cggaugagcaaagaaagugguu

SEQ ID NO: 3547 - RNA, 23 nt, Homo sapiens
cggcccgggcugcugcuguuccu

SEQ ID NO: 3548 - RNA, 23 nt, Homo sapiens
uuaaugcuaaucgugauaggggu

SEQ ID NO: 3549 - RNA, 23 nt, Homo sapiens
ucaagagcaauaacgaaaaaugu

SEQ ID NO: 3550 - RNA, 23 nt, Homo sapiens
ucaagagcaauaacgaaaaaugu

SEQ ID NO: 3551 - RNA, 22 nt, Homo sapiens
uggcagugucuuagcugguugu

SEQ ID NO: 3552 - RNA, 22 nt, Homo sapiens
cgucaacacuugcugguuuccu

SEQ ID NO: 3553 - RNA, 22 nt, Homo sapiens
aagugcugucauagcugagguc

SEQ ID NO: 3554 - RNA, 23 nt, Homo sapiens
cacucagccuugagggcacuuuc

SEQ ID NO: 3555 - RNA, 23 nt, Homo sapiens
acuugggcacugaaacaaugucc

SEQ ID NO: 3556 - RNA, 21 nt, Homo sapiens
guggcugcacucacuuccuuc

SEQ ID NO: 3557 - RNA, 22 nt, Homo sapiens
gguggcccggccgugccugagg

SEQ ID NO: 3558 - RNA, 21 nt, Homo sapiens
uggaggagaaggaaggugaug

SEQ ID NO: 3559 - RNA, 21 nt, Homo sapiens
ugcaggaccaagaugagcccu

SEQ ID NO: 3560 - RNA, 21 nt, Homo sapiens
uccugcgcgucccagaugccc

SEQ ID NO: 3561 - RNA, 22 nt, Homo sapiens
uggagagaaaggcaguuccuga

SEQ ID NO: 3562 - RNA, 21 nt, Homo sapiens
gccccugggccuauccuagaa

SEQ ID NO: 3563 - RNA, 19 nt, Homo sapiens
aggcugcggaauucaggac

SEQ ID NO: 3564 - RNA, 22 nt, Homo sapiens
ggggguccccggugcucggauc

SEQ ID NO: 3565 - RNA, 23 nt, Homo sapiens
uggugcggagagggcccacagug

SEQ ID NO: 3566 - RNA, 22 nt, Homo sapiens
acuccagccccacagccucagc

SEQ ID NO: 3567 - RNA, 24 nt, Homo sapiens
uggggagcugaggcucugggggug

SEQ ID NO: 3568 - RNA, 21 nt, Homo sapiens
cccggagccaggaugcagcuc

SEQ ID NO: 3569 - RNA, 18 nt, Homo sapiens
ucagcuggcccucauuuc

SEQ ID NO: 3570 - RNA, 22 nt, Homo sapiens
augguacccuggcauacugagu

SEQ ID NO: 3571 - RNA, 18 nt, Homo sapiens
cgggcguggugguggggg

SEQ ID NO: 3572 - RNA, 17 nt, Homo sapiens
ucccaccgcugccaccc

SEQ ID NO: 3573 - RNA, 21 nt, Homo sapiens
cggcggggacggcgauugguc

SEQ ID NO: 3574 - RNA, 20 nt, Homo sapiens
ccccagggcgacgcggcggg

SEQ ID NO: 3575 - RNA, 25 nt, Homo sapiens
cccccacaaccgcgcuugacuagcu

SEQ ID NO: 3576 - RNA, 21 nt, Homo sapiens
gccccugggccuauccuagaa

SEQ ID NO: 3577 - RNA, 22 nt, Homo sapiens
ucaggcucaguccccucccgau

SEQ ID NO: 3578 - RNA, 22 nt, Homo sapiens
uggugggcacagaaucuggacu

SEQ ID NO: 3579 - RNA, 21 nt, Homo sapiens
aagccugcccggcuccucggg

SEQ ID NO: 3580 - RNA, 22 nt, Homo sapiens
uggugggccgcagaacaugugc

SEQ ID NO: 3581 - RNA, 25 nt, Homo sapiens
ggcggagggaaguagguccguuggu

SEQ ID NO: 3582 - RNA, 22 nt, Homo sapiens
aggcggggcgccgcgggaccgc

SEQ ID NO: 3583 - RNA, 22 nt, Homo sapiens
ugagaccucuggguucugagcu

SEQ ID NO: 3584 - RNA, 24 nt, Homo sapiens
uggggagcugaggcucugggggug

SEQ ID NO: 3585 - RNA, 21 nt, Homo sapiens
aaggcagggcccccgcucccc

SEQ ID NO: 3586 - RNA, 18 nt, Homo sapiens
gucccuguucaggcgcca

SEQ ID NO: 3587 - RNA, 18 nt, Homo sapiens
cagggaggugaaugugau

SEQ ID NO: 3588 - RNA, 21 nt, Homo sapiens
cggcggggacggcgauugguc

SEQ ID NO: 3589 - RNA, 21 nt, Homo sapiens
ccaguccugugccugccgccu

SEQ ID NO: 3590 - RNA, 22 nt, Homo sapiens
ucugcccccuccgcugcugcca

SEQ ID NO: 3591 - RNA, 22 nt, Homo sapiens
cccugugcccggcccacuucug

SEQ ID NO: 3592 - RNA, 22 nt, Homo sapiens
cccugugcccggcccacuucug

SEQ ID NO: 3593 - RNA, 22 nt, Homo sapiens
acagcaggcacagacaggcagu

SEQ ID NO: 3594 - RNA, 22 nt, Homo sapiens
acacagggcuguugugaagacu

SEQ ID NO: 3595 - RNA, 22 nt, Homo sapiens
acacagggcuguugugaagacu

SEQ ID NO: 3596 - RNA, 20 nt, Homo sapiens
acugccccaggugcugcugg

SEQ ID NO: 3597 - RNA, 22 nt, Homo sapiens
gcugacuccuaguccagggcuc

SEQ ID NO: 3598 - RNA, 22 nt, Homo sapiens
gcugacuccuaguccagggcuc

SEQ ID NO: 3599 - RNA, 22 nt, Homo sapiens
gccugcugggguggaaccuggu

SEQ ID NO: 3600 - RNA, 22 nt, Homo sapiens
gucauacacggcucuccucucu

SEQ ID NO: 3601 - RNA, 21 nt, Homo sapiens
cggggcagcucaguacaggau

SEQ ID NO: 3602 - RNA, 22 nt, Homo sapiens
augcugacauauuuacuagagg

SEQ ID NO: 3603 - RNA, 22 nt, Homo sapiens
uacccauugcauaucggaguug

SEQ ID NO: 3604 - RNA, 22 nt, Homo sapiens
aggcggggcgccgcgggaccgc

SEQ ID NO: 3605 - RNA, 22 nt, Homo sapiens
ugcggggcuagggcuaacagca

SEQ ID NO: 3606 - RNA, 22 nt, Homo sapiens
ugugcgcagggagaccucuccc

SEQ ID NO: 3607 - RNA, 22 nt, Homo sapiens
acgcccuucccccccuucuuca

SEQ ID NO: 3608 - RNA, 22 nt, Homo sapiens
agaaggaaauugaauucauuua

SEQ ID NO: 3609 - RNA, 20 nt, Homo sapiens
acucaaacugugggggcacu

SEQ ID NO: 3610 - RNA, 21 nt, Homo sapiens
uugaaaggcuauuucuugguc

SEQ ID NO: 3611 - RNA, 22 nt, Homo sapiens
ugaguauuacauggccaaucuc

SEQ ID NO: 3612 - RNA, 24 nt, Homo sapiens
uggggagcugaggcucugggggug

SEQ ID NO: 3613 - RNA, 21 nt, Homo sapiens
cggcggggacggcgauugguc

SEQ ID NO: 3614 - RNA, 22 nt, Homo sapiens
uagguaguuuccuguuguuggg

SEQ ID NO: 3615 - RNA, 22 nt, Homo sapiens
ugugacagauugauaacugaaa

SEQ ID NO: 3616 - RNA, 25 nt, Homo sapiens
aggggugguguugggacagcuccgu

SEQ ID NO: 3617 - RNA, 23 nt, Homo sapiens
aucccuugcaggggcuguugggu

SEQ ID NO: 3618 - RNA, 22 nt, Homo sapiens
aggcagcgggguguaguggaua

SEQ ID NO: 3619 - RNA, 20 nt, Homo sapiens
ggggagcuguggaagcagua

SEQ ID NO: 3620 - RNA, 20 nt, Homo sapiens
uaaggcacgcggugaaugcc

SEQ ID NO: 3621 - RNA, 22 nt, Homo sapiens
agaaggaaauugaauucauuua

SEQ ID NO: 3622 - RNA, 21 nt, Homo sapiens
agugaaugauggguucugacc

SEQ ID NO: 3623 - RNA, 22 nt, Homo sapiens
uuggggaaacggccgcugagug

SEQ ID NO: 3624 - RNA, 21 nt, Homo sapiens
agcuacaucuggcuacugggu

SEQ ID NO: 3625 - RNA, 17 nt, Homo sapiens
uaauugcuuccauguuu

SEQ ID NO: 3626 - RNA, 21 nt, Homo sapiens
uaaggcacccuucugaguaga

SEQ ID NO: 3627 - RNA, 22 nt, Homo sapiens
uucucaaggaggugucguuuau

SEQ ID NO: 3628 - RNA, 23 nt, Homo sapiens
cucuugagggaagcacuuucugu

SEQ ID NO: 3629 - RNA, 24 nt, Homo sapiens
cugaagugauguguaacugaucag

SEQ ID NO: 3630 - RNA, 19 nt, Homo sapiens
ugucucugcugggguuucu

SEQ ID NO: 3631 - RNA, 21 nt, Homo sapiens
gaagugugccguggugugucu

SEQ ID NO: 3632 - RNA, 22 nt, Homo sapiens
auaauacaugguuaaccucuuu

SEQ ID NO: 3633 - RNA, 20 nt, Homo sapiens
guagaggagauggcgcaggg

SEQ ID NO: 3634 - RNA, 21 nt, Homo sapiens
agaggauacccuuuguauguu

SEQ ID NO: 3635 - RNA, 23 nt, Homo sapiens
ucuggcuccgugucuucacuccc

SEQ ID NO: 3636 - RNA, 21 nt, Homo sapiens
cggcggggacggcgauugguc

SEQ ID NO: 3637 - RNA, 22 nt, Homo sapiens
cccugugcccggcccacuucug

SEQ ID NO: 3638 - RNA, 23 nt, Homo sapiens
caacggaaucccaaaagcagcug

SEQ ID NO: 3639 - RNA, 20 nt, Homo sapiens
ccucugggcccuuccuccag

SEQ ID NO: 3640 - RNA, 22 nt, Homo sapiens
ucucugggccugugucuuaggc

SEQ ID NO: 3641 - RNA, 22 nt, Homo sapiens
aauugcacgguauccaucugua

SEQ ID NO: 3642 - RNA, 23 nt, Homo sapiens
ugaggggcagagagcgagacuuu

SEQ ID NO: 3643 - RNA, 25 nt, Homo sapiens
aggggugguguugggacagcuccgu

SEQ ID NO: 3644 - RNA, 24 nt, Homo sapiens
ugccugggucucuggccugcgcgu

SEQ ID NO: 3645 - RNA, 22 nt, Homo sapiens
aggcggggcgccgcgggaccgc

SEQ ID NO: 3646 - RNA, 20 nt, Homo sapiens
cggcucugggucugugggga

SEQ ID NO: 3647 - RNA, 18 nt, Homo sapiens
cgggcguggugguggggg

SEQ ID NO: 3648 - RNA, 22 nt, Homo sapiens
uuuagagacggggucuugcucu

SEQ ID NO: 3649 - RNA, 22 nt, Homo sapiens
cagugcaaugaugaaagggcau

SEQ ID NO: 3650 - RNA, 22 nt, Homo sapiens
aucacacaaaggcaacuuuugu

SEQ ID NO: 3651 - RNA, 23 nt, Homo sapiens
caagucuuauuugagcaccuguu

SEQ ID NO: 3652 - RNA, 22 nt, Homo sapiens
uauggcacugguagaauucacu

SEQ ID NO: 3653 - RNA, 22 nt, Homo sapiens
uagcaccauuugaaaucgguua

SEQ ID NO: 3654 - RNA, 23 nt, Homo sapiens
uaagugcuuccauguuuuaguag

SEQ ID NO: 3655 - RNA, 23 nt, Homo sapiens
uaagugcuuccauguuugagugu

SEQ ID NO: 3656 - RNA, 23 nt, Homo sapiens
uauucauuuauccccagccuaca

SEQ ID NO: 3657 - RNA, 22 nt, Homo sapiens
uggagugugacaaugguguuug

SEQ ID NO: 3658 - RNA, 22 nt, Homo sapiens
uaacacugucugguaaagaugg

SEQ ID NO: 3659 - RNA, 22 nt, Homo sapiens
uagcagcacauaaugguuugug

SEQ ID NO: 3660 - RNA, 22 nt, Homo sapiens
uagcagcacaucaugguuuaca

SEQ ID NO: 3661 - RNA, 22 nt, Homo sapiens
uagcagcacguaaauauuggcg

SEQ ID NO: 3662 - RNA, 20 nt, Homo sapiens
ccccagggcgacgcggcggg

SEQ ID NO: 3663 - RNA, 21 nt, Homo sapiens
uagcagcacagaaauauuggc

SEQ ID NO: 3664 - RNA, 22 nt, Homo sapiens
uuggggaaacggccgcugagug

SEQ ID NO: 3665 - RNA, 21 nt, Homo sapiens
uaaagugcugacagugcagau

SEQ ID NO: 3666 - RNA, 23 nt, Homo sapiens
cagugcaaugauauugucaaagc

SEQ ID NO: 3667 - RNA, 22 nt, Homo sapiens
uuauaaagcaaugagacugauu

SEQ ID NO: 3668 - RNA, 22 nt, Homo sapiens
cagcagcaauucauguuuugaa

SEQ ID NO: 3669 - RNA, 22 nt, Homo sapiens
aguggggaacccuuccaugagg

SEQ ID NO: 3670 - RNA, 21 nt, Homo sapiens
cagcagcacacugugguuugu

SEQ ID NO: 3671 - RNA, 22 nt, Homo sapiens
ugugucacucgaugaccacugu

SEQ ID NO: 3672 - RNA, 20 nt, Homo sapiens
ggggagcuguggaagcagua

SEQ ID NO: 3673 - RNA, 22 nt, Homo sapiens
ugagguaguagguuguauaguu

SEQ ID NO: 3674 - RNA, 22 nt, Homo sapiens
ugagguaguagguugugugguu

SEQ ID NO: 3675 - RNA, 19 nt, Homo sapiens
ugucucugcugggguuucu

SEQ ID NO: 3676 - RNA, 23 nt, Homo sapiens
ucaaaugcucagacuccuguggu

SEQ ID NO: 3677 - RNA, 23 nt, Homo sapiens
aaaagugcuuacagugcagguag

SEQ ID NO: 3678 - RNA, 22 nt, Homo sapiens
acaggugagguucuugggagcc

SEQ ID NO: 3679 - RNA, 21 nt, Homo sapiens
ucacagugaaccggucucuuu

SEQ ID NO: 3680 - RNA, 22 nt, Homo sapiens
uaacacugucugguaaagaugg

SEQ ID NO: 3681 - RNA, 22 nt, Homo sapiens
ucagugcacuacagaacuuugu

SEQ ID NO: 3682 - RNA, 22 nt, Homo sapiens
ucagugcaucacagaacuuugu

SEQ ID NO: 3683 - RNA, 21 nt, Homo sapiens
ucagugcaugacagaacuugg

SEQ ID NO: 3684 - RNA, 23 nt, Homo sapiens
cccaguguucagacuaccuguuc

SEQ ID NO: 3685 - RNA, 23 nt, Homo sapiens
cccaguguuuagacuaucuguuc

SEQ ID NO: 3686 - RNA, 22 nt, Homo sapiens
uaacacugucugguaacgaugu

SEQ ID NO: 3687 - RNA, 22 nt, Homo sapiens
gaaguuguucgugguggauucg

SEQ ID NO: 3688 - RNA, 22 nt, Homo sapiens
uugcauauguaggaugucccau

SEQ ID NO: 3689 - RNA, 20 nt, Homo sapiens
auguauaaauguauacacac

SEQ ID NO: 3690 - RNA, 23 nt, Homo sapiens
uucauuugguauaaaccgcgauu

SEQ ID NO: 3691 - RNA, 21 nt, Homo sapiens
guucaaauccagaucuauaac

SEQ ID NO: 3692 - RNA, 24 nt, Homo sapiens
gaccuggacauguuugugcccagu

SEQ ID NO: 3693 - RNA, 23 nt, Homo sapiens
ggcagguucucacccucucuagg

SEQ ID NO: 3694 - RNA, 23 nt, Homo sapiens
ucugcucauaccccaugguuucu

SEQ ID NO: 3695 - RNA, 21 nt, Homo sapiens
ccuggaaacacugagguugug

SEQ ID NO: 3696 - RNA, 21 nt, Homo sapiens
uggcagggaggcugggagggg

SEQ ID NO: 3697 - RNA, 18 nt, Homo sapiens
ugaggcaguagauugaau

SEQ ID NO: 3698 - RNA, 22 nt, Homo sapiens
cgcaggggccgggugcucaccg

SEQ ID NO: 3699 - RNA, 23 nt, Homo sapiens
caacggaaucccaaaagcagcug

SEQ ID NO: 3700 - RNA, 25 nt, Homo sapiens
cccccacaaccgcgcuugacuagcu

SEQ ID NO: 3701 - RNA, 20 nt, Homo sapiens
agagguauagggcaugggaa

SEQ ID NO: 3702 - RNA, 22 nt, Homo sapiens
uccagcaucagugauuuuguug

SEQ ID NO: 3703 - RNA, 23 nt, Homo sapiens
agguuacccgagcaacuuugcau

SEQ ID NO: 3704 - RNA, 21 nt, Homo sapiens
uugaaaggcuauuucuugguc

SEQ ID NO: 3705 - RNA, 22 nt, Homo sapiens
caaccuggaggacuccaugcug

SEQ ID NO: 3706 - RNA, 24 nt, Homo sapiens
gaccuggacauguuugugcccagu

SEQ ID NO: 3707 - RNA, 23 nt, Homo sapiens
uauucauuuauccccagccuaca

SEQ ID NO: 3708 - RNA, 20 nt, Homo sapiens
accaggaggcugaggccccu

SEQ ID NO: 3709 - RNA, 22 nt, Homo sapiens
uauaccucaguuuuaucaggug

SEQ ID NO: 3710 - RNA, 21 nt, Homo sapiens
aaggcagggcccccgcucccc

SEQ ID NO: 3711 - RNA, 23 nt, Homo sapiens
ccugcagcgacuugauggcuucc

SEQ ID NO: 3712 - RNA, 22 nt, Homo sapiens
uggagugugacaaugguguuug

SEQ ID NO: 3713 - RNA, 22 nt, Homo sapiens
ucggccugaccacccaccccac

SEQ ID NO: 3714 - RNA, 24 nt, Homo sapiens
uggcccugacugaagaccagcagu

SEQ ID NO: 3715 - RNA, 23 nt, Homo sapiens
ucuggcuccgugucuucacuccc

SEQ ID NO: 3716 - RNA, 23 nt, Homo sapiens
cggcccgggcugcugcuguuccu

SEQ ID NO: 3717 - RNA, 21 nt, Homo sapiens
uccugcgcgucccagaugccc

SEQ ID NO: 3718 - RNA, 21 nt, Homo sapiens
cggcggggacggcgauugguc

SEQ ID NO: 3719 - RNA, 23 nt, Homo sapiens
ugaguaccgccaugucuguuggg

SEQ ID NO: 3720 - RNA, 22 nt, Homo sapiens
cuggcccucucugcccuuccgu

SEQ ID NO: 3721 - RNA, 23 nt, Homo sapiens
agugccugagggaguaagagccc

SEQ ID NO: 3722 - RNA, 19 nt, Homo sapiens
ugagcugcuguaccaaaau

SEQ ID NO: 3723 - RNA, 24 nt, Homo sapiens
ugccugggucucuggccugcgcgu

SEQ ID NO: 3724 - RNA, 24 nt, Homo sapiens
ugccugggucucuggccugcgcgu

SEQ ID NO: 3725 - RNA, 22 nt, Homo sapiens
aggcggggcgccgcgggaccgc

SEQ ID NO: 3726 - RNA, 22 nt, Homo sapiens
gguggcccggccgugccugagg

SEQ ID NO: 3727 - RNA, 22 nt, Homo sapiens
ugcggggcuagggcuaacagca

SEQ ID NO: 3728 - RNA, 21 nt, Homo sapiens
cgcgggugcuuacugacccuu

SEQ ID NO: 3729 - RNA, 21 nt, Homo sapiens
aaggcagggcccccgcucccc

SEQ ID NO: 3730 - RNA, 23 nt, Homo sapiens
cacccggcugugugcacaugugc

SEQ ID NO: 3731 - RNA, 21 nt, Homo sapiens
gaaggcgcuucccuuuggagu

SEQ ID NO: 3732 - RNA, 21 nt, Homo sapiens
cccggagccaggaugcagcuc

SEQ ID NO: 3733 - RNA, 21 nt, Homo sapiens
cccggagccaggaugcagcuc

SEQ ID NO: 3734 - RNA, 17 nt, Homo sapiens
ucgccuccuccucuccc

SEQ ID NO: 3735 - RNA, 22 nt, Homo sapiens
uggcucaguucagcaggaacag

SEQ ID NO: 3736 - RNA, 22 nt, Homo sapiens
gaaagcgcuucccuuugcugga

SEQ ID NO: 3737 - RNA, 22 nt, Homo sapiens
caaagcgcuccccuuuagaggu

SEQ ID NO: 3738 - RNA, 23 nt, Homo sapiens
caaagcgcuucucuuuagagugu

SEQ ID NO: 3739 - RNA, 21 nt, Homo sapiens
caaagcgcuucccuuuggagc

SEQ ID NO: 3740 - RNA, 21 nt, Homo sapiens
gaaagcgcuucucuuuagagg

SEQ ID NO: 3741 - RNA, 20 nt, Homo sapiens
auguauaaauguauacacac

SEQ ID NO: 3742 - RNA, 23 nt, Homo sapiens
uuacaguuguucaaccaguuacu

SEQ ID NO: 3743 - RNA, 22 nt, Homo sapiens
ugugcgcagggagaccucuccc

SEQ ID NO: 3744 - RNA, 23 nt, Homo sapiens
ccugcagcgacuugauggcuucc

SEQ ID NO: 3745 - RNA, 20 nt, Homo sapiens
ucugcaggguuugcuuugag

SEQ ID NO: 3746 - RNA, 22 nt, Homo sapiens
augggugaauuuguagaaggau

SEQ ID NO: 3747 - RNA, 21 nt, Homo sapiens
ugcaggaccaagaugagcccu

SEQ ID NO: 3748 - RNA, 22 nt, Homo sapiens
ucucccaacccuuguaccagug

SEQ ID NO: 3749 - RNA, 21 nt, Homo sapiens
cggcggggacggcgauugguc

SEQ ID NO: 3750 - RNA, 20 nt, Homo sapiens
ccccagggcgacgcggcggg

SEQ ID NO: 3751 - RNA, 21 nt, Homo sapiens
uaaagugcugacagugcagau

SEQ ID NO: 3752 - RNA, 23 nt, Homo sapiens
cagugcaaugauauugucaaagc

SEQ ID NO: 3753 - RNA, 22 nt, Homo sapiens
uggugggcacagaaucuggacu

SEQ ID NO: 3754 - RNA, 22 nt, Homo sapiens
uggugggccgcagaacaugugc

SEQ ID NO: 3755 - RNA, 22 nt, Homo sapiens
aggcggggcgccgcgggaccgc

SEQ ID NO: 3756 - RNA, 22 nt, Homo sapiens
ugagaccucuggguucugagcu

SEQ ID NO: 3757 - RNA, 23 nt, Homo sapiens
ccugcagcgacuugauggcuucc

SEQ ID NO: 3758 - RNA, 23 nt, Homo sapiens
ccugcagcgacuugauggcuucc

SEQ ID NO: 3759 - RNA, 22 nt, Homo sapiens
uggagugugacaaugguguuug

SEQ ID NO: 3760 - RNA, 23 nt, Homo sapiens
cucucaccacugcccucccacag

SEQ ID NO: 3761 - RNA, 17 nt, Homo sapiens
gugggggagaggcuguc

SEQ ID NO: 3762 - RNA, 24 nt, Homo sapiens
uugcagcugccugggagugacuuc

SEQ ID NO: 3763 - RNA, 18 nt, Homo sapiens
cagggaggugaaugugau

SEQ ID NO: 3764 - RNA, 23 nt, Homo sapiens
ucuggcuccgugucuucacuccc

SEQ ID NO: 3765 - RNA, 22 nt, Homo sapiens
uccuucauuccaccggagucug

SEQ ID NO: 3766 - RNA, 22 nt, Homo sapiens
cauugcacuugucucggucuga

SEQ ID NO: 3767 - RNA, 23 nt, Homo sapiens
ucccccaggugugauucugauuu

SEQ ID NO: 3768 - RNA, 23 nt, Homo sapiens
ugaggggcagagagcgagacuuu

SEQ ID NO: 3769 - RNA, 22 nt, Homo sapiens
ucaggcucaguccccucccgau

SEQ ID NO: 3770 - RNA, 22 nt, Homo sapiens
agaggcuggccgugaugaauuc

SEQ ID NO: 3771 - RNA, 19 nt, Homo sapiens
ugagcugcuguaccaaaau

SEQ ID NO: 3772 - RNA, 23 nt, Homo sapiens
gaacgccuguucuugccaggugg

SEQ ID NO: 3773 - RNA, 25 nt, Homo sapiens
ggcggagggaaguagguccguuggu

SEQ ID NO: 3774 - RNA, 24 nt, Homo sapiens
ugccugggucucuggccugcgcgu

SEQ ID NO: 3775 - RNA, 22 nt, Homo sapiens
ugagccccugugccgcccccag

SEQ ID NO: 3776 - RNA, 22 nt, Homo sapiens
uggagugugacaaugguguuug

SEQ ID NO: 3777 - RNA, 22 nt, Homo sapiens
acccgucccguucguccccgga

SEQ ID NO: 3778 - RNA, 21 nt, Homo sapiens
cggcggggacggcgauugguc

SEQ ID NO: 3779 - RNA, 22 nt, Homo sapiens
uccgagccugggucucccucuu

SEQ ID NO: 3780 - RNA, 23 nt, Homo sapiens
uggugcggagagggcccacagug

SEQ ID NO: 3781 - RNA, 22 nt, Homo sapiens
ugcggggcuagggcuaacagca

SEQ ID NO: 3782 - RNA, 21 nt, Homo sapiens
cgcgggugcuuacugacccuu

SEQ ID NO: 3783 - RNA, 22 nt, Homo sapiens
auccgcgcucugacucucugcc

SEQ ID NO: 3784 - RNA, 20 nt, Homo sapiens
cuuccucgucugucugcccc

SEQ ID NO: 3785 - RNA, 18 nt, Homo sapiens
aucccaccucugccacca

SEQ ID NO: 3786 - RNA, 22 nt, Homo sapiens
augggugaauuuguagaaggau

SEQ ID NO: 3787 - RNA, 22 nt, Homo sapiens
ugugacugguugaccagagggg

SEQ ID NO: 3788 - RNA, 22 nt, Homo sapiens
ugcccuguggacucaguucugg

SEQ ID NO: 3789 - RNA, 20 nt, Homo sapiens
ccuccugcccuccuugcugu

SEQ ID NO: 3790 - RNA, 23 nt, Homo sapiens
ucccuguccuccaggagcucacg

SEQ ID NO: 3791 - RNA, 23 nt, Homo sapiens
ugaggggcagagagcgagacuuu

SEQ ID NO: 3792 - RNA, 18 nt, Homo sapiens
ugcuuccuuucagagggu

SEQ ID NO: 3793 - RNA, 22 nt, Homo sapiens
aucuggagguaagaagcacuuu

SEQ ID NO: 3794 - RNA, 22 nt, Homo sapiens
ccucccacacccaaggcuugca

SEQ ID NO: 3795 - RNA, 21 nt, Homo sapiens
cgcgggugcuuacugacccuu

SEQ ID NO: 3796 - RNA, 22 nt, Homo sapiens
ccucuuccccuugucucuccag

SEQ ID NO: 3797 - RNA, 23 nt, Homo sapiens
aggaugagcaaagaaaguagauu

SEQ ID NO: 3798 - RNA, 22 nt, Homo sapiens
cggaugagcaaagaaagugguu

SEQ ID NO: 3799 - RNA, 17 nt, Homo sapiens
gugggggagaggcuguc

SEQ ID NO: 3800 - RNA, 22 nt, Homo sapiens
cugaagcucagagggcucugau

SEQ ID NO: 3801 - RNA, 17 nt, Homo sapiens
ucgccuccuccucuccc

SEQ ID NO: 3802 - RNA, 22 nt, Homo sapiens
ggagacgcggcccuguuggagu

SEQ ID NO: 3803 - RNA, 25 nt, Homo sapiens
cccccacaaccgcgcuugacuagcu

SEQ ID NO: 3804 - RNA, 20 nt, Homo sapiens
ggggagcuguggaagcagua

SEQ ID NO: 3805 - RNA, 22 nt, Homo sapiens
caaagugccucccuuuagagug

SEQ ID NO: 3806 - RNA, 24 nt, Homo sapiens
uggggagcugaggcucugggggug

SEQ ID NO: 3807 - RNA, 21 nt, Homo sapiens
ucguggccuggucuccauuau

SEQ ID NO: 3808 - RNA, 21 nt, Homo sapiens
uggcagggaggcugggagggg

SEQ ID NO: 3809 - RNA, 17 nt, Homo sapiens
ucgccuccuccucuccc

SEQ ID NO: 3810 - RNA, 22 nt, Homo sapiens
ucugggcaacaaagugagaccu

SEQ ID NO: 3811 - RNA, 23 nt, Homo sapiens
cggcccgggcugcugcuguuccu

SEQ ID NO: 3812 - RNA, 22 nt, Homo sapiens
cgcaggggccgggugcucaccg

SEQ ID NO: 3813 - RNA, 21 nt, Homo sapiens
ccaccaccgugucugacacuu

SEQ ID NO: 3814 - RNA, 25 nt, Homo sapiens
gcugggcagggcuucugagcuccuu

SEQ ID NO: 3815 - RNA, 22 nt, Homo sapiens
uccgagccugggucucccucuu

SEQ ID NO: 3816 - RNA, 21 nt, Homo sapiens
acagucugcugagguuggagc

SEQ ID NO: 3817 - RNA, 22 nt, Homo sapiens
gguggcccggccgugccugagg

SEQ ID NO: 3818 - RNA, 21 nt, Homo sapiens
cggcggggacggcgauugguc

SEQ ID NO: 3819 - RNA, 22 nt, Homo sapiens
cauugcacuugucucggucuga

SEQ ID NO: 3820 - RNA, 23 nt, Homo sapiens
ucccccaggugugauucugauuu

SEQ ID NO: 3821 - RNA, 19 nt, Homo sapiens
aggcugcggaauucaggac

SEQ ID NO: 3822 - RNA, 24 nt, Homo sapiens
acugggggcuuucgggcucugcgu

SEQ ID NO: 3823 - RNA, 22 nt, Homo sapiens
aggcggggcgccgcgggaccgc

SEQ ID NO: 3824 - RNA, 22 nt, Homo sapiens
ugcggggcuagggcuaacagca

SEQ ID NO: 3825 - RNA, 20 nt, Homo sapiens
cggcucugggucugugggga

SEQ ID NO: 3826 - RNA, 22 nt, Homo sapiens
ugagguaguaguuugugcuguu

SEQ ID NO: 3827 - RNA, 22 nt, Homo sapiens
ugagguaguaguuugugcuguu

SEQ ID NO: 3828 - RNA, 23 nt, Homo sapiens
ccugcagcgacuugauggcuucc

SEQ ID NO: 3829 - RNA, 20 nt, Homo sapiens
ucugcaggguuugcuuugag

SEQ ID NO: 3830 - RNA, 19 nt, Homo sapiens
uggauuuuuggaucaggga

SEQ ID NO: 3831 - RNA, 18 nt, Homo sapiens
cagggaggugaaugugau

SEQ ID NO: 3832 - RNA, 23 nt, Homo sapiens
ucuggcuccgugucuucacuccc

SEQ ID NO: 3833 - RNA, 22 nt, Homo sapiens
ucugcccccuccgcugcugcca

SEQ ID NO: 3834 - RNA, 20 nt, Homo sapiens
ccuccugcccuccuugcugu

SEQ ID NO: 3835 - RNA, 20 nt, Homo sapiens
acugccccaggugcugcugg

SEQ ID NO: 3836 - RNA, 22 nt, Homo sapiens
aauugcacgguauccaucugua

SEQ ID NO: 3837 - RNA, 22 nt, Homo sapiens
agaggcuggccgugaugaauuc

SEQ ID NO: 3838 - RNA, 21 nt, Homo sapiens
cggggcagcucaguacaggau

SEQ ID NO: 3839 - RNA, 25 nt, Homo sapiens
aggggugguguugggacagcuccgu

SEQ ID NO: 3840 - RNA, 23 nt, Homo sapiens
uggugcggagagggcccacagug

SEQ ID NO: 3841 - RNA, 22 nt, Homo sapiens
ugcggggcuagggcuaacagca

SEQ ID NO: 3842 - RNA, 21 nt, Homo sapiens
uggaggagaaggaaggugaug

SEQ ID NO: 3843 - RNA, 24 nt, Homo sapiens
uggggagcugaggcucugggggug

SEQ ID NO: 3844 - RNA, 22 nt, Homo sapiens
uggaauguaaggaagugugugg

SEQ ID NO: 3845 - RNA, 18 nt, Homo sapiens
cagggaggugaaugugau

SEQ ID NO: 3846 - RNA, 22 nt, Homo sapiens
cagugguuuuacccuaugguag

SEQ ID NO: 3847 - RNA, 23 nt, Homo sapiens
ucuggcuccgugucuucacuccc

SEQ ID NO: 3848 - RNA, 23 nt, Homo sapiens
ucaagagcaauaacgaaaaaugu

SEQ ID NO: 3849 - RNA, 21 nt, Homo sapiens
cagcagcacacugugguuugu

SEQ ID NO: 3850 - RNA, 22 nt, Homo sapiens
caaaacuggcaauuacuuuugc

SEQ ID NO: 3851 - RNA, 22 nt, Homo sapiens
aaaaacugagacuacuuuugca

SEQ ID NO: 3852 - RNA, 19 nt, Homo sapiens
aaaaacuguaauuacuuuu

SEQ ID NO: 3853 - RNA, 21 nt, Homo sapiens
uggguuuacguugggagaacu

SEQ ID NO: 3854 - RNA, 22 nt, Homo sapiens
gucccucuccaaaugugucuug

SEQ ID NO: 3855 - RNA, 23 nt, Homo sapiens
ccugcagcgacuugauggcuucc

SEQ ID NO: 3856 - RNA, 20 nt, Homo sapiens
gugucugggcggacagcugc

SEQ ID NO: 3857 - RNA, 21 nt, Homo sapiens
uggacugcccugaucuggaga

SEQ ID NO: 3858 - RNA, 24 nt, Homo sapiens
ccagacagaauucuaugcacuuuc

SEQ ID NO: 3859 - RNA, 23 nt, Homo sapiens
ucuggcuccgugucuucacuccc

SEQ ID NO: 3860 - RNA, 23 nt, Homo sapiens
caaagugcuuacagugcagguag

SEQ ID NO: 3861 - RNA, 21 nt, Homo sapiens
cggcggggacggcgauugguc

SEQ ID NO: 3862 - RNA, 22 nt, Homo sapiens
cccugugcccggcccacuucug

SEQ ID NO: 3863 - RNA, 19 nt, Homo sapiens
accgugcaaagguagcaua

SEQ ID NO: 3864 - RNA, 21 nt, Homo sapiens
uucaaguaauucaggauaggu

SEQ ID NO: 3865 - RNA, 22 nt, Homo sapiens
uggcagugucuuagcugguugu

SEQ ID NO: 3866 - RNA, 23 nt, Homo sapiens
aggcaguguaguuagcugauugc

SEQ ID NO: 3867 - RNA, 22 nt, Homo sapiens
uggcaguguauuguuagcuggu

SEQ ID NO: 3868 - RNA, 22 nt, Homo sapiens
aggcaguguauuguuagcuggc

SEQ ID NO: 3869 - RNA, 22 nt, Homo sapiens
uacugcagacguggcaaucaug

SEQ ID NO: 3870 - RNA, 21 nt, Homo sapiens
uacugcagacaguggcaauca

SEQ ID NO: 3871 - RNA, 22 nt, Homo sapiens
agacuucccauuugaagguggc

SEQ ID NO: 3872 - RNA, 19 nt, Homo sapiens
agcugucugaaaaugucuu

SEQ ID NO: 3873 - RNA, 22 nt, Homo sapiens
aggcggggcgccgcgggaccgc

SEQ ID NO: 3874 - RNA, 22 nt, Homo sapiens
ugcggggcuagggcuaacagca

SEQ ID NO: 3875 - RNA, 22 nt, Homo sapiens
caaagugccucccuuuagagug

SEQ ID NO: 3876 - RNA, 22 nt, Homo sapiens
uggagugugacaaugguguuug

SEQ ID NO: 3877 - RNA, 20 nt, Homo sapiens
gugucugggcggacagcugc

SEQ ID NO: 3878 - RNA, 17 nt, Homo sapiens
ucgccuccuccucuccc

SEQ ID NO: 3879 - RNA, 18 nt, Homo sapiens
cagggaggugaaugugau

SEQ ID NO: 3880 - RNA, 18 nt, Homo sapiens
cagggaggugaaugugau

SEQ ID NO: 3881 - RNA, 24 nt, Homo sapiens
ccagacagaauucuaugcacuuuc

SEQ ID NO: 3882 - RNA, 23 nt, Homo sapiens
ucuggcuccgugucuucacuccc

SEQ ID NO: 3883 - RNA, 22 nt, Homo sapiens
caaagaauucuccuuuugggcu

SEQ ID NO: 3884 - RNA, 21 nt, Homo sapiens
cggcggggacggcgauugguc

SEQ ID NO: 3885 - RNA, 22 nt, Homo sapiens
aaaagcuggguugagagggcga

SEQ ID NO: 3886 - RNA, 22 nt, Homo sapiens
aaaagcuggguugagagggcaa

SEQ ID NO: 3887 - RNA, 20 nt, Homo sapiens
aaaagcuggguugagagggu

SEQ ID NO: 3888 - RNA, 19 nt, Homo sapiens
aaaagcuggguugagagga

SEQ ID NO: 3889 - RNA, 23 nt, Homo sapiens
ugaggggcagagagcgagacuuu

SEQ ID NO: 3890 - RNA, 23 nt, Homo sapiens
uacuccagagggcgucacucaug

SEQ ID NO: 3891 - RNA, 22 nt, Homo sapiens
aucuggagguaagaagcacuuu

SEQ ID NO: 3892 - RNA, 23 nt, Homo sapiens
caaagcgcuucucuuuagagugu

SEQ ID NO: 3893 - RNA, 21 nt, Homo sapiens
cuccagagggaaguacuuucu

SEQ ID NO: 3894 - RNA, 21 nt, Homo sapiens
cuccagagggaugcacuuucu

SEQ ID NO: 3895 - RNA, 21 nt, Homo sapiens
ugaguuggccaucugagugag

SEQ ID NO: 3896 - RNA, 23 nt, Homo sapiens
gaacgccuguucuugccaggugg

SEQ ID NO: 3897 - RNA, 19 nt, Homo sapiens
agcugucugaaaaugucuu

SEQ ID NO: 3898 - RNA, 22 nt, Homo sapiens
aggcggggcgccgcgggaccgc

SEQ ID NO: 3899 - RNA, 22 nt, Homo sapiens
ugcggggcuagggcuaacagca

SEQ ID NO: 3900 - RNA, 21 nt, Homo sapiens
uggaggagaaggaaggugaug

SEQ ID NO: 3901 - RNA, 20 nt, Homo sapiens
guagaggagauggcgcaggg

SEQ ID NO: 3902 - RNA, 22 nt, Homo sapiens
uagcagcacauaaugguuugug

SEQ ID NO: 3903 - RNA, 22 nt, Homo sapiens
uagcagcacaucaugguuuaca

SEQ ID NO: 3904 - RNA, 22 nt, Homo sapiens
uagcagcacguaaauauuggcg

SEQ ID NO: 3905 - RNA, 18 nt, Homo sapiens
ugaggcaguagauugaau

SEQ ID NO: 3906 - RNA, 22 nt, Homo sapiens
cgcaggggccgggugcucaccg

SEQ ID NO: 3907 - RNA, 21 nt, Homo sapiens
uagcagcacagaaauauuggc

SEQ ID NO: 3908 - RNA, 22 nt, Homo sapiens
uuauaaagcaaugagacugauu

SEQ ID NO: 3909 - RNA, 22 nt, Homo sapiens
uggcagugucuuagcugguugu

SEQ ID NO: 3910 - RNA, 22 nt, Homo sapiens
cagcagcaauucauguuuugaa

SEQ ID NO: 3911 - RNA, 21 nt, Homo sapiens
cagcagcacacugugguuugu

SEQ ID NO: 3912 - RNA, 20 nt, Homo sapiens
ggggagcuguggaagcagua

SEQ ID NO: 3913 - RNA, 21 nt, Homo sapiens
aaggcagggcccccgcucccc

SEQ ID NO: 3914 - RNA, 22 nt, Homo sapiens
cagugcaauguuaaaagggcau

SEQ ID NO: 3915 - RNA, 22 nt, Homo sapiens
uagguaguuucauguuguuggg

SEQ ID NO: 3916 - RNA, 22 nt, Homo sapiens
uagguaguuuccuguuguuggg

SEQ ID NO: 3917 - RNA, 22 nt, Homo sapiens
uaacacugucugguaacgaugu

SEQ ID NO: 3918 - RNA, 22 nt, Homo sapiens
uaauacugccugguaaugauga

SEQ ID NO: 3919 - RNA, 21 nt, Homo sapiens
aucacauugccagggauuucc

SEQ ID NO: 3920 - RNA, 21 nt, Homo sapiens
aucacauugccagggauuacc

SEQ ID NO: 3921 - RNA, 23 nt, Homo sapiens
ccuaguagguguccaguaagugu

SEQ ID NO: 3922 - RNA, 22 nt, Homo sapiens
uuauaauacaaccugauaagug

SEQ ID NO: 3923 - RNA, 22 nt, Homo sapiens
auauaauacaaccugcuaagug

SEQ ID NO: 3924 - RNA, 21 nt, Homo sapiens
ucuaguaagaguggcagucga

SEQ ID NO: 3925 - RNA, 23 nt, Homo sapiens
caguaacaaagauucauccuugu

SEQ ID NO: 3926 - RNA, 22 nt, Homo sapiens
caggauguggucaaguguuguu

SEQ ID NO: 3927 - RNA, 22 nt, Homo sapiens
aaaaccgucuaguuacaguugu

SEQ ID NO: 3928 - RNA, 22 nt, Homo sapiens
uagcuuaucagacugauguuga

SEQ ID NO: 3929 - RNA, 24 nt, Homo sapiens
aauccuuggaaccuaggugugagu

SEQ ID NO: 3930 - RNA, 21 nt, Homo sapiens
aucauagaggaaaauccacgu

SEQ ID NO: 3931 - RNA, 22 nt, Homo sapiens
aucauagaggaaaauccauguu

SEQ ID NO: 3932 - RNA, 20 nt, Homo sapiens
cugcaaagggaagcccuuuc

SEQ ID NO: 3933 - RNA, 20 nt, Homo sapiens
cugcaaagggaagcccuuuc

SEQ ID NO: 3934 - RNA, 22 nt, Homo sapiens
auucuaauuucuccacgucuuu

SEQ ID NO: 3935 - RNA, 21 nt, Homo sapiens
uagauaaaauauugguaccug

SEQ ID NO: 3936 - RNA, 21 nt, Homo sapiens
uaauuuuauguauaagcuagu

SEQ ID NO: 3937 - RNA, 22 nt, Homo sapiens
gagcuuauucauaaaagugcag

SEQ ID NO: 3938 - RNA, 23 nt, Homo sapiens
acuugggcacugaaacaaugucc

SEQ ID NO: 3939 - RNA, 17 nt, Homo sapiens
ucgccuccuccucuccc

SEQ ID NO: 3940 - RNA, 22 nt, Homo sapiens
cucggcgcggggcgcgggcucc

SEQ ID NO: 3941 - RNA, 22 nt, Homo sapiens
gugugcggaaaugcuucugcua

SEQ ID NO: 3942 - RNA, 18 nt, Homo sapiens
ugaggcaguagauugaau

SEQ ID NO: 3943 - RNA, 21 nt, Homo sapiens
agggcccccccucaauccugu

SEQ ID NO: 3944 - RNA, 21 nt, Homo sapiens
gcaggaacuugugagucuccu

SEQ ID NO: 3945 - RNA, 21 nt, Homo sapiens
aaggcagggcccccgcucccc

SEQ ID NO: 3946 - RNA, 21 nt, Homo sapiens
cccggagccaggaugcagcuc

SEQ ID NO: 3947 - RNA, 21 nt, Homo sapiens
ucguggccuggucuccauuau

SEQ ID NO: 3948 - RNA, 22 nt, Homo sapiens
ugagccccugugccgcccccag

SEQ ID NO: 3949 - RNA, 22 nt, Homo sapiens
uggagugugacaaugguguuug

SEQ ID NO: 3950 - RNA, 18 nt, Homo sapiens
cgggcguggugguggggg

SEQ ID NO: 3951 - RNA, 21 nt, Homo sapiens
cggcggggacggcgauugguc

SEQ ID NO: 3952 - RNA, 22 nt, Homo sapiens
cgcaggggccgggugcucaccg

SEQ ID NO: 3953 - RNA, 22 nt, Homo sapiens
ucgugcaucccuuuagaguguu

SEQ ID NO: 3954 - RNA, 21 nt, Homo sapiens
uuggccacaauggguuagaac

SEQ ID NO: 3955 - RNA, 21 nt, Homo sapiens
agggggaaaguucuauagucc

SEQ ID NO: 3956 - RNA, 22 nt, Homo sapiens
aggcggggcgccgcgggaccgc

SEQ ID NO: 3957 - RNA, 22 nt, Homo sapiens
ugcggggcuagggcuaacagca

SEQ ID NO: 3958 - RNA, 20 nt, Homo sapiens
ggggagcuguggaagcagua

SEQ ID NO: 3959 - RNA, 22 nt, Homo sapiens
agaaggaaauugaauucauuua

SEQ ID NO: 3960 - RNA, 17 nt, Homo sapiens
ucccuguucgggcgcca

SEQ ID NO: 3961 - RNA, 19 nt, Homo sapiens
uggauuuuuggaucaggga

SEQ ID NO: 3962 - RNA, 22 nt, Homo sapiens
uguaacagcaacuccaugugga

SEQ ID NO: 3963 - RNA, 22 nt, Homo sapiens
uccuucauuccaccggagucug

SEQ ID NO: 3964 - RNA, 22 nt, Homo sapiens
ugucaguuugucaaauacccca

SEQ ID NO: 3965 - RNA, 22 nt, Homo sapiens
uagcaccaucugaaaucgguua

SEQ ID NO: 3966 - RNA, 22 nt, Homo sapiens
uguaaacauccucgacuggaag

SEQ ID NO: 3967 - RNA, 22 nt, Homo sapiens
uguaaacauccccgacuggaag

SEQ ID NO: 3968 - RNA, 22 nt, Homo sapiens
uguaaacauccuugacuggaag

SEQ ID NO: 3969 - RNA, 23 nt, Homo sapiens
uaaauuucaccuuucugagaagg

SEQ ID NO: 3970 - RNA, 22 nt, Homo sapiens
ggagaaauuauccuuggugugu

SEQ ID NO: 3971 - RNA, 21 nt, Homo sapiens
uagauaaaauauugguaccug

SEQ ID NO: 3972 - RNA, 22 nt, Homo sapiens
uuagggcccuggcuccaucucc

SEQ ID NO: 3973 - RNA, 22 nt, Homo sapiens
ucucccaacccuuguaccagug

SEQ ID NO: 3974 - RNA, 23 nt, Homo sapiens
uaaggugcaucuagugcaguuag

SEQ ID NO: 3975 - RNA, 22 nt, Homo sapiens
ugauauguuugauauauuaggu

SEQ ID NO: 3976 - RNA, 21 nt, Homo sapiens
ugauauguuugauauuggguu

SEQ ID NO: 3977 - RNA, 22 nt, Homo sapiens
gauuagggugcuuagcuguuaa

SEQ ID NO: 3978 - RNA, 22 nt, Homo sapiens
agaguugagucuggacgucccg

SEQ ID NO: 3979 - RNA, 22 nt, Homo sapiens
cuggcccucucugcccuuccgu

SEQ ID NO: 3980 - RNA, 22 nt, Homo sapiens
gguggcccggccgugccugagg

SEQ ID NO: 3981 - RNA, 25 nt, Homo sapiens
cuagugagggacagaaccaggauuc

SEQ ID NO: 3982 - RNA, 22 nt, Homo sapiens
augguacccuggcauacugagu

SEQ ID NO: 3983 - RNA, 22 nt, Homo sapiens
uuagggcccuggcuccaucucc

SEQ ID NO: 3984 - RNA, 22 nt, Homo sapiens
uuagggcccuggcuccaucucc

SEQ ID NO: 3985 - RNA, 21 nt, Homo sapiens
uaccacaggguagaaccacgg

SEQ ID NO: 3986 - RNA, 20 nt, Homo sapiens
ccccagggcgacgcggcggg

SEQ ID NO: 3987 - RNA, 21 nt, Homo sapiens
caagucacuagugguuccguu

SEQ ID NO: 3988 - RNA, 24 nt, Homo sapiens
agcagaagcagggagguucuccca

SEQ ID NO: 3989 - RNA, 22 nt, Homo sapiens
uguaaacauccuacacucagcu

SEQ ID NO: 3990 - RNA, 22 nt, Homo sapiens
cuggcccucucugcccuuccgu

SEQ ID NO: 3991 - RNA, 21 nt, Homo sapiens
gccccugggccuauccuagaa

SEQ ID NO: 3992 - RNA, 22 nt, Homo sapiens
aaucacuaaccacacggccagg

SEQ ID NO: 3993 - RNA, 22 nt, Homo sapiens
uucucaaggaggugucguuuau

SEQ ID NO: 3994 - RNA, 22 nt, Homo sapiens
auucugcauuuuuagcaaguuc

SEQ ID NO: 3995 - RNA, 22 nt, Homo sapiens
gguggcccggccgugccugagg

SEQ ID NO: 3996 - RNA, 21 nt, Homo sapiens
gcaggaacuugugagucuccu

SEQ ID NO: 3997 - RNA, 22 nt, Homo sapiens
uggagugugacaaugguguuug

SEQ ID NO: 3998 - RNA, 17 nt, Homo sapiens
gugggggagaggcuguc

SEQ ID NO: 3999 - RNA, 21 nt, Homo sapiens
gcccuccgcccgugcaccccg

SEQ ID NO: 4000 - RNA, 23 nt, Homo sapiens
ucuggcuccgugucuucacuccc

SEQ ID NO: 4001 - RNA, 22 nt, Homo sapiens
caaagaauucuccuuuugggcu

SEQ ID NO: 4002 - RNA, 21 nt, Homo sapiens
cggcggggacggcgauugguc

SEQ ID NO: 4003 - RNA, 21 nt, Homo sapiens
cggcggggacggcgauugguc

SEQ ID NO: 4004 - RNA, 22 nt, Homo sapiens
cucccacugcuucacuugacua

SEQ ID NO: 4005 - RNA, 22 nt, Homo sapiens
cauugcacuugucucggucuga

SEQ ID NO: 4006 - RNA, 21 nt, Homo sapiens
agggcccccccucaauccugu

SEQ ID NO: 4007 - RNA, 22 nt, Homo sapiens
uguaaacauccuacacucagcu

SEQ ID NO: 4008 - RNA, 23 nt, Homo sapiens
ugaggggcagagagcgagacuuu

SEQ ID NO: 4009 - RNA, 22 nt, Homo sapiens
ccucccacacccaaggcuugca

SEQ ID NO: 4010 - RNA, 22 nt, Homo sapiens
uggugggcacagaaucuggacu

SEQ ID NO: 4011 - RNA, 25 nt, Homo sapiens
aggggugguguugggacagcuccgu

SEQ ID NO: 4012 - RNA, 25 nt, Homo sapiens
aggggugguguugggacagcuccgu

SEQ ID NO: 4013 - RNA, 22 nt, Homo sapiens
uggugggccgcagaacaugugc

SEQ ID NO: 4014 - RNA, 22 nt, Homo sapiens
aggcggggcgccgcgggaccgc

SEQ ID NO: 4015 - RNA, 22 nt, Homo sapiens
aggcggggcgccgcgggaccgc

SEQ ID NO: 4016 - RNA, 20 nt, Homo sapiens
ggggagcuguggaagcagua

SEQ ID NO: 4017 - RNA, 20 nt, Homo sapiens
ggggagcuguggaagcagua

SEQ ID NO: 4018 - RNA, 23 nt, Homo sapiens
cacccggcugugugcacaugugc

SEQ ID NO: 4019 - RNA, 22 nt, Homo sapiens
augggugaauuuguagaaggau

SEQ ID NO: 4020 - RNA, 22 nt, Homo sapiens
ucugggcaacaaagugagaccu

SEQ ID NO: 4021 - RNA, 22 nt, Homo sapiens
uggagagaaaggcaguuccuga

SEQ ID NO: 4022 - RNA, 24 nt, Homo sapiens
aauccuuggaaccuaggugugagu

SEQ ID NO: 4023 - RNA, 22 nt, Homo sapiens
caugccuugaguguaggaccgu

SEQ ID NO: 4024 - RNA, 25 nt, Homo sapiens
gcugggcagggcuucugagcuccuu

SEQ ID NO: 4025 - RNA, 23 nt, Homo sapiens
uggugcggagagggcccacagug

SEQ ID NO: 4026 - RNA, 22 nt, Homo sapiens
uaacagucuacagccauggucg

SEQ ID NO: 4027 - RNA, 25 nt, Homo sapiens
cccccacaaccgcgcuugacuagcu

SEQ ID NO: 4028 - RNA, 21 nt, Homo sapiens
uaacagucuccagucacggcc

SEQ ID NO: 4029 - RNA, 22 nt, Homo sapiens
uguaaacauccucgacuggaag

SEQ ID NO: 4030 - RNA, 22 nt, Homo sapiens
uguaaacauccccgacuggaag

SEQ ID NO: 4031 - RNA, 22 nt, Homo sapiens
uguaaacauccuugacuggaag

SEQ ID NO: 4032 - RNA, 22 nt, Homo sapiens
aacuguuugcagaggaaacuga

SEQ ID NO: 4033 - RNA, 21 nt, Homo sapiens
uuaagacuugcagugauguuu

SEQ ID NO: 4034 - RNA, 22 nt, Homo sapiens
ugagaaccacgucugcucugag

SEQ ID NO: 4035 - RNA, 21 nt, Homo sapiens
cugacuguugccguccuccag

SEQ ID NO: 4036 - RNA, 22 nt, Homo sapiens
ucaccagcccuguguucccuag

SEQ ID NO: 4037 - RNA, 22 nt, Homo sapiens
ccucuuccccuugucucuccag

SEQ ID NO: 4038 - RNA, 23 nt, Homo sapiens
agcugguguugugaaucaggccg

SEQ ID NO: 4039 - RNA, 22 nt, Homo sapiens
uggagagaaaggcaguuccuga

SEQ ID NO: 4040 - RNA, 21 nt, Homo sapiens
cggcggggacggcgauugguc

SEQ ID NO: 4041 - RNA, 21 nt, Homo sapiens
aucacauugccagggauuucc

SEQ ID NO: 4042 - RNA, 21 nt, Homo sapiens
aucacauugccagggauuacc

SEQ ID NO: 4043 - RNA, 19 nt, Homo sapiens
aggcacggugucagcaggc

SEQ ID NO: 4044 - RNA, 22 nt, Homo sapiens
aggcggggcgccgcgggaccgc

SEQ ID NO: 4045 - RNA, 23 nt, Homo sapiens
aaggagcuuacaaucuagcuggg

SEQ ID NO: 4046 - RNA, 20 nt, Homo sapiens
guagaggagauggcgcaggg

SEQ ID NO: 4047 - RNA, 23 nt, Homo sapiens
gagggucuugggagggaugugac

SEQ ID NO: 4048 - RNA, 20 nt, Homo sapiens
ggggagcuguggaagcagua

SEQ ID NO: 4049 - RNA, 22 nt, Homo sapiens
ugagaacugaauuccauggguu

SEQ ID NO: 4050 - RNA, 24 nt, Homo sapiens
uuuggcaaugguagaacucacacu

SEQ ID NO: 4051 - RNA, 18 nt, Homo sapiens
ugaggcaguagauugaau

SEQ ID NO: 4052 - RNA, 22 nt, Homo sapiens
caaagaauucuccuuuugggcu

SEQ ID NO: 4053 - RNA, 20 nt, Homo sapiens
ccuccugcccuccuugcugu

SEQ ID NO: 4054 - RNA, 21 nt, Homo sapiens
ugagaugaagcacuguagcuc

SEQ ID NO: 4055 - RNA, 21 nt, Homo sapiens
uaguagaccguauagcguacg

SEQ ID NO: 4056 - RNA, 22 nt, Homo sapiens
aucacacaaaggcaacuuuugu

SEQ ID NO: 4057 - RNA, 22 nt, Homo sapiens
ugugacagauugauaacugaaa

SEQ ID NO: 4058 - RNA, 21 nt, Homo sapiens
agggggaaaguucuauagucc

SEQ ID NO: 4059 - RNA, 21 nt, Homo sapiens
aaggcagggcccccgcucccc

SEQ ID NO: 4060 - RNA, 21 nt, Homo sapiens
uggcagggaggcugggagggg

SEQ ID NO: 4061 - RNA, 18 nt, Homo sapiens
cagggaggugaaugugau

SEQ ID NO: 4062 - RNA, 23 nt, Homo sapiens
ucuggcuccgugucuucacuccc

SEQ ID NO: 4063 - RNA, 22 nt, Homo sapiens
uggagagaaaggcaguuccuga

SEQ ID NO: 4064 - RNA, 22 nt, Homo sapiens
cgcaggggccgggugcucaccg

SEQ ID NO: 4065 - RNA, 22 nt, Homo sapiens
ucugcccccuccgcugcugcca

SEQ ID NO: 4066 - RNA, 20 nt, Homo sapiens
ccccagggcgacgcggcggg

SEQ ID NO: 4067 - RNA, 22 nt, Homo sapiens
cauugcacuugucucggucuga

SEQ ID NO: 4068 - RNA, 20 nt, Homo sapiens
acugccccaggugcugcugg

SEQ ID NO: 4069 - RNA, 21 nt, Homo sapiens
cggggcagcucaguacaggau

SEQ ID NO: 4070 - RNA, 21 nt, Homo sapiens
ugaguuggccaucugagugag

SEQ ID NO: 4071 - RNA, 24 nt, Homo sapiens
acugggggcuuucgggcucugcgu

SEQ ID NO: 4072 - RNA, 21 nt, Homo sapiens
uggaggagaaggaaggugaug

SEQ ID NO: 4073 - RNA, 22 nt, Homo sapiens
cugcccuggcccgagggaccga

SEQ ID NO: 4074 - RNA, 21 nt, Homo sapiens
aaggcagggcccccgcucccc

SEQ ID NO: 4075 - RNA, 21 nt, Homo sapiens
aauaauacaugguugaucuuu

SEQ ID NO: 4076 - RNA, 22 nt, Homo sapiens
aucaugaugggcuccucggugu

SEQ ID NO: 4077 - RNA, 22 nt, Homo sapiens
cuuaugcaagauucccuucuac

SEQ ID NO: 4078 - RNA, 22 nt, Homo sapiens
ugaguauuacauggccaaucuc

SEQ ID NO: 4079 - RNA, 22 nt, Homo sapiens
aagauguggaaaaauuggaauc

SEQ ID NO: 4080 - RNA, 23 nt, Homo sapiens
acuuacagacaagagccuugcuc

SEQ ID NO: 4081 - RNA, 22 nt, Homo sapiens
caaucacuaacuccacugccau

SEQ ID NO: 4082 - RNA, 22 nt, Homo sapiens
aaucacuaaccacacggccagg

SEQ ID NO: 4083 - RNA, 22 nt, Homo sapiens
acccgucccguucguccccgga

SEQ ID NO: 4084 - RNA, 18 nt, Homo sapiens
acguuggcucugguggug

SEQ ID NO: 4085 - RNA, 23 nt, Homo sapiens
cggcccgggcugcugcuguuccu

SEQ ID NO: 4086 - RNA, 21 nt, Homo sapiens
cggcggggacggcgauugguc

SEQ ID NO: 4087 - RNA, 22 nt, Homo sapiens
cgcaggggccgggugcucaccg

SEQ ID NO: 4088 - RNA, 21 nt, Homo sapiens
aggggugcuaucugugauuga

SEQ ID NO: 4089 - RNA, 23 nt, Homo sapiens
gaacgcgcuucccuauagagggu

SEQ ID NO: 4090 - RNA, 21 nt, Homo sapiens
gcuaguccugacucagccagu

SEQ ID NO: 4091 - RNA, 19 nt, Homo sapiens
ucuaggcugguacugcuga

SEQ ID NO: 4092 - RNA, 22 nt, Homo sapiens
aggcggggcgccgcgggaccgc

SEQ ID NO: 4093 - RNA, 22 nt, Homo sapiens
uauugcacucgucccggccucc

SEQ ID NO: 4094 - RNA, 17 nt, Homo sapiens
ucgccuccuccucuccc

SEQ ID NO: 4095 - RNA, 24 nt, Homo sapiens
uuuggcaaugguagaacucacacu

SEQ ID NO: 4096 - RNA, 18 nt, Homo sapiens
ugaggcaguagauugaau

SEQ ID NO: 4097 - RNA, 21 nt, Homo sapiens
cggcggggacggcgauugguc

SEQ ID NO: 4098 - RNA, 22 nt, Homo sapiens
cauugcacuugucucggucuga

SEQ ID NO: 4099 - RNA, 19 nt, Homo sapiens
gggcgccugugaucccaac

SEQ ID NO: 4100 - RNA, 21 nt, Homo sapiens
aggaggcagcgcucucaggac

SEQ ID NO: 4101 - RNA, 25 nt, Homo sapiens
ggcggagggaaguagguccguuggu

SEQ ID NO: 4102 - RNA, 22 nt, Homo sapiens
aggcggggcgccgcgggaccgc

SEQ ID NO: 4103 - RNA, 21 nt, Homo sapiens
uccgguucucagggcuccacc

SEQ ID NO: 4104 - RNA, 21 nt, Homo sapiens
cgcgggugcuuacugacccuu

SEQ ID NO: 4105 - RNA, 20 nt, Homo sapiens
ggggagcuguggaagcagua

SEQ ID NO: 4106 - RNA, 26 nt, Homo sapiens
gaugaugauggcagcaaauucugaaa

SEQ ID NO: 4107 - RNA, 21 nt, Homo sapiens
agagaagaagaucagccugca

SEQ ID NO: 4108 - RNA, 17 nt, Homo sapiens
ucgccuccuccucuccc

SEQ ID NO: 4109 - RNA, 22 nt, Homo sapiens
uucuggaauucugugugaggga

SEQ ID NO: 4110 - RNA, 22 nt, Homo sapiens
ucaaaacugaggggcauuuucu

SEQ ID NO: 4111 - RNA, 22 nt, Homo sapiens
cagugguuuuacccuaugguag

SEQ ID NO: 4112 - RNA, 22 nt, Homo sapiens
uaacacugucugguaaagaugg

SEQ ID NO: 4113 - RNA, 21 nt, Homo sapiens
gccccugggccuauccuagaa

SEQ ID NO: 4114 - RNA, 22 nt, Homo sapiens
caaaacuggcaauuacuuuugc

SEQ ID NO: 4115 - RNA, 22 nt, Homo sapiens
aaaaacugagacuacuuuugca

SEQ ID NO: 4116 - RNA, 19 nt, Homo sapiens
aaaaacuguaauuacuuuu

SEQ ID NO: 4117 - RNA, 22 nt, Homo sapiens
ccaaaacugcaguuacuuuugc

SEQ ID NO: 4118 - RNA, 21 nt, Homo sapiens
acagucugcugagguuggagc

SEQ ID NO: 4119 - RNA, 22 nt, Homo sapiens
ggagacgcggcccuguuggagu

SEQ ID NO: 4120 - RNA, 21 nt, Homo sapiens
uaaagugcugacagugcagau

SEQ ID NO: 4121 - RNA, 21 nt, Homo sapiens
ccccaccuccucucuccucag

SEQ ID NO: 4122 - RNA, 22 nt, Homo sapiens
ccucuuccccuugucucuccag

SEQ ID NO: 4123 - RNA, 18 nt, Homo sapiens
aucccaccucugccacca

SEQ ID NO: 4124 - RNA, 20 nt, Homo sapiens
ccuccugcccuccuugcugu

SEQ ID NO: 4125 - RNA, 22 nt, Homo sapiens
aaggagcucacagucuauugag

SEQ ID NO: 4126 - RNA, 22 nt, Homo sapiens
uaaugccccuaaaaauccuuau

SEQ ID NO: 4127 - RNA, 22 nt, Homo sapiens
gguggcccggccgugccugagg

SEQ ID NO: 4128 - RNA, 23 nt, Homo sapiens
aaggagcuuacaaucuagcuggg

SEQ ID NO: 4129 - RNA, 21 nt, Homo sapiens
uggaggagaaggaaggugaug

SEQ ID NO: 4130 - RNA, 22 nt, Homo sapiens
uccauuacacuacccugccucu

SEQ ID NO: 4131 - RNA, 22 nt, Homo sapiens
acaguagagggaggaaucgcag

SEQ ID NO: 4132 - RNA, 22 nt, Homo sapiens
uggagugugacaaugguguuug

SEQ ID NO: 4133 - RNA, 22 nt, Homo sapiens
aggcaguguauuguuagcuggc

SEQ ID NO: 4134 - RNA, 20 nt, Homo sapiens
ccucugggcccuuccuccag

SEQ ID NO: 4135 - RNA, 22 nt, Homo sapiens
ucucugggccugugucuuaggc

SEQ ID NO: 4136 - RNA, 23 nt, Homo sapiens
uauucauuuauccccagccuaca

SEQ ID NO: 4137 - RNA, 21 nt, Homo sapiens
gaaggcgcuucccuuuggagu

SEQ ID NO: 4138 - RNA, 19 nt, Homo sapiens
aauggauuuuuggagcagg

SEQ ID NO: 4139 - RNA, 19 nt, Homo sapiens
auggauaaggcuuuggcuu

SEQ ID NO: 4140 - RNA, 21 nt, Homo sapiens
ucacagugaaccggucucuuu

SEQ ID NO: 4141 - RNA, 22 nt, Homo sapiens
ucuauacagacccuggcuuuuc

SEQ ID NO: 4142 - RNA, 19 nt, Homo sapiens
uggauuuuuggaucaggga

SEQ ID NO: 4143 - RNA, 22 nt, Homo sapiens
cagugcaauguuaaaagggcau

SEQ ID NO: 4144 - RNA, 22 nt, Homo sapiens
cagugcaaugaugaaagggcau

SEQ ID NO: 4145 - RNA, 23 nt, Homo sapiens
ugugcaaaucuaugcaaaacuga

SEQ ID NO: 4146 - RNA, 23 nt, Homo sapiens
ugugcaaauccaugcaaaacuga

SEQ ID NO: 4147 - RNA, 21 nt, Homo sapiens
uucacaguggcuaaguuccgc

SEQ ID NO: 4148 - RNA, 21 nt, Homo sapiens
uucacaguggcuaaguucugc

SEQ ID NO: 4149 - RNA, 23 nt, Homo sapiens
cagugcaauaguauugucaaagc

SEQ ID NO: 4150 - RNA, 23 nt, Homo sapiens
cagugcaaugauauugucaaagc

SEQ ID NO: 4151 - RNA, 23 nt, Homo sapiens
ccuaguagguguccaguaagugu

SEQ ID NO: 4152 - RNA, 21 nt, Homo sapiens
aauaauacaugguugaucuuu

SEQ ID NO: 4153 - RNA, 23 nt, Homo sapiens
uagugcaauauugcuuauagggu

SEQ ID NO: 4154 - RNA, 21 nt, Homo sapiens
uuuugcaccuuuuggagugaa

SEQ ID NO: 4155 - RNA, 22 nt, Homo sapiens
caaaaaucucaauuacuuuugc

SEQ ID NO: 4156 - RNA, 23 nt, Homo sapiens
guuugcacgggugggccuugucu

SEQ ID NO: 4157 - RNA, 23 nt, Homo sapiens
uauucauuuauccccagccuaca

SEQ ID NO: 4158 - RNA, 22 nt, Homo sapiens
uggagagaaaggcaguuccuga

SEQ ID NO: 4159 - RNA, 22 nt, Homo sapiens
uugagaaugaugaaucauuagg

SEQ ID NO: 4160 - RNA, 22 nt, Homo sapiens
caaaacuggcaauuacuuuugc

SEQ ID NO: 4161 - RNA, 22 nt, Homo sapiens
aaaaacugagacuacuuuugca

SEQ ID NO: 4162 - RNA, 19 nt, Homo sapiens
aaaaacuguaauuacuuuu

SEQ ID NO: 4163 - RNA, 21 nt, Homo sapiens
ccaguccugugccugccgccu

SEQ ID NO: 4164 - RNA, 22 nt, Homo sapiens
aggcagcgggguguaguggaua

SEQ ID NO: 4165 - RNA, 21 nt, Homo sapiens
auguaugugugcaugugcaug

SEQ ID NO: 4166 - RNA, 22 nt, Homo sapiens
cuuaugcaagauucccuucuac

SEQ ID NO: 4167 - RNA, 21 nt, Homo sapiens
auugacacuucugugaguaga

SEQ ID NO: 4168 - RNA, 22 nt, Homo sapiens
uugugucaauaugcgaugaugu

SEQ ID NO: 4169 - RNA, 23 nt, Homo sapiens
ugaggggcagagagcgagacuuu

SEQ ID NO: 4170 - RNA, 23 nt, Homo sapiens
uacuccagagggcgucacucaug

SEQ ID NO: 4171 - RNA, 22 nt, Homo sapiens
aaaacuguaauuacuuuuguac

SEQ ID NO: 4172 - RNA, 22 nt, Homo sapiens
aguauucuguaccagggaaggu

SEQ ID NO: 4173 - RNA, 22 nt, Homo sapiens
ugagaacugaauuccauggguu

SEQ ID NO: 4174 - RNA, 22 nt, Homo sapiens
ugagaacugaauuccauaggcu

SEQ ID NO: 4175 - RNA, 22 nt, Homo sapiens
uagcaaaaacugcaguuacuuu

SEQ ID NO: 4176 - RNA, 17 nt, Homo sapiens
uucaaguaauucaggug

SEQ ID NO: 4177 - RNA, 24 nt, Homo sapiens
ccagacagaauucuaugcacuuuc

SEQ ID NO: 4178 - RNA, 22 nt, Homo sapiens
caaagaauucuccuuuugggcu

SEQ ID NO: 4179 - RNA, 22 nt, Homo sapiens
uucaaguaauccaggauaggcu

SEQ ID NO: 4180 - RNA, 21 nt, Homo sapiens
uucaaguaauucaggauaggu

SEQ ID NO: 4181 - RNA, 22 nt, Homo sapiens
uguaacagcaacuccaugugga

SEQ ID NO: 4182 - RNA, 22 nt, Homo sapiens
agaaggaaauugaauucauuua

SEQ ID NO: 4183 - RNA, 21 nt, Homo sapiens
auccuugcuaucugggugcua

SEQ ID NO: 4184 - RNA, 22 nt, Homo sapiens
uggagugugacaaugguguuug

SEQ ID NO: 4185 - RNA, 22 nt, Homo sapiens
uggagugugacaaugguguuug

SEQ ID NO: 4186 - RNA, 23 nt, Homo sapiens
ucuggcuccgugucuucacuccc

SEQ ID NO: 4187 - RNA, 20 nt, Homo sapiens
ccccagggcgacgcggcggg

SEQ ID NO: 4188 - RNA, 22 nt, Homo sapiens
uagcuuaucagacugauguuga

SEQ ID NO: 4189 - RNA, 21 nt, Homo sapiens
gccccugggccuauccuagaa

SEQ ID NO: 4190 - RNA, 23 nt, Homo sapiens
ucccccaggugugauucugauuu

SEQ ID NO: 4191 - RNA, 23 nt, Homo sapiens
gcgaggaccccucggggucugac

SEQ ID NO: 4192 - RNA, 24 nt, Homo sapiens
acugggggcuuucgggcucugcgu

SEQ ID NO: 4193 - RNA, 24 nt, Homo sapiens
ugccugggucucuggccugcgcgu

SEQ ID NO: 4194 - RNA, 21 nt, Homo sapiens
uggcagggaggcugggagggg

SEQ ID NO: 4195 - RNA, 17 nt, Homo sapiens
ucgccuccuccucuccc

SEQ ID NO: 4196 - RNA, 21 nt, Homo sapiens
cggcggggacggcgauugguc

SEQ ID NO: 4197 - RNA, 22 nt, Homo sapiens
ucugcccccuccgcugcugcca

SEQ ID NO: 4198 - RNA, 22 nt, Homo sapiens
cauugcacuugucucggucuga

SEQ ID NO: 4199 - RNA, 20 nt, Homo sapiens
acugccccaggugcugcugg

SEQ ID NO: 4200 - RNA, 21 nt, Homo sapiens
cggggcagcucaguacaggau

SEQ ID NO: 4201 - RNA, 25 nt, Homo sapiens
ggcggagggaaguagguccguuggu

SEQ ID NO: 4202 - RNA, 22 nt, Homo sapiens
aggcggggcgccgcgggaccgc

SEQ ID NO: 4203 - RNA, 22 nt, Homo sapiens
ugcggggcuagggcuaacagca

SEQ ID NO: 4204 - RNA, 22 nt, Homo sapiens
aggcagcgggguguaguggaua

SEQ ID NO: 4205 - RNA, 22 nt, Homo sapiens
auccgcgcucugacucucugcc

SEQ ID NO: 4206 - RNA, 20 nt, Homo sapiens
cgugccacccuuuuccccag

SEQ ID NO: 4207 - RNA, 20 nt, Homo sapiens
cgugccacccuuuuccccag

SEQ ID NO: 4208 - RNA, 23 nt, Homo sapiens
aacauucaacgcugucggugagu

SEQ ID NO: 4209 - RNA, 22 nt, Homo sapiens
uggagagaaaggcaguuccuga

SEQ ID NO: 4210 - RNA, 22 nt, Homo sapiens
uagguaguuucauguuguuggg

SEQ ID NO: 4211 - RNA, 23 nt, Homo sapiens
caaagugcucauagugcagguag

SEQ ID NO: 4212 - RNA, 22 nt, Homo sapiens
aauugcacuuuagcaaugguga

SEQ ID NO: 4213 - RNA, 20 nt, Homo sapiens
ccauggaucuccaggugggu

SEQ ID NO: 4214 - RNA, 22 nt, Homo sapiens
cgucaacacuugcugguuuccu

SEQ ID NO: 4215 - RNA, 21 nt, Homo sapiens
aaaacggugagauuuuguuuu

SEQ ID NO: 4216 - RNA, 22 nt, Homo sapiens
cgaaaacagcaauuaccuuugc

SEQ ID NO: 4217 - RNA, 21 nt, Homo sapiens
uuggccacaauggguuagaac

SEQ ID NO: 4218 - RNA, 23 nt, Homo sapiens
gacacgggcgacagcugcggccc

SEQ ID NO: 4219 - RNA, 21 nt, Homo sapiens
acagucugcugagguuggagc

SEQ ID NO: 4220 - RNA, 19 nt, Homo sapiens
gugucugcuuccuguggga

SEQ ID NO: 4221 - RNA, 22 nt, Homo sapiens
ugcggggcuagggcuaacagca

SEQ ID NO: 4222 - RNA, 21 nt, Homo sapiens
cacuguguccuuucugcguag

SEQ ID NO: 4223 - RNA, 27 nt, Homo sapiens
accuucuuguauaagcacugugcuaaa

SEQ ID NO: 4224 - RNA, 18 nt, Homo sapiens
uugagaaggaggcugcug

SEQ ID NO: 4225 - RNA, 20 nt, Homo sapiens
auuccuagaaauuguucaua

SEQ ID NO: 4226 - RNA, 18 nt, Homo sapiens
ugcuuccuuucagagggu

SEQ ID NO: 4227 - RNA, 22 nt, Homo sapiens
aucuggagguaagaagcacuuu

SEQ ID NO: 4228 - RNA, 22 nt, Homo sapiens
ugaaggucuacugugugccagg

SEQ ID NO: 4229 - RNA, 23 nt, Homo sapiens
acuuacagacaagagccuugcuc

SEQ ID NO: 4230 - RNA, 21 nt, Homo sapiens
aggcaagaugcuggcauagcu

SEQ ID NO: 4231 - RNA, 22 nt, Homo sapiens
ucagcaaacauuuauugugugc

SEQ ID NO: 4232 - RNA, 24 nt, Homo sapiens
ccagacagaauucuaugcacuuuc

SEQ ID NO: 4233 - RNA, 22 nt, Homo sapiens
uaacacugucugguaaagaugg

SEQ ID NO: 4234 - RNA, 24 nt, Homo sapiens
uuuggcaaugguagaacucacacu

SEQ ID NO: 4235 - RNA, 22 nt, Homo sapiens
uaacacugucugguaacgaugu

SEQ ID NO: 4236 - RNA, 22 nt, Homo sapiens
aagcugccaguugaagaacugu

SEQ ID NO: 4237 - RNA, 23 nt, Homo sapiens
aaugacacgaucacucccguuga

SEQ ID NO: 4238 - RNA, 22 nt, Homo sapiens
ucaggcucaguccccucccgau

SEQ ID NO: 4239 - RNA, 19 nt, Homo sapiens
ugagcugcuguaccaaaau

SEQ ID NO: 4240 - RNA, 19 nt, Homo sapiens
agcugucugaaaaugucuu

SEQ ID NO: 4241 - RNA, 19 nt, Homo sapiens
gugucugcuuccuguggga

SEQ ID NO: 4242 - RNA, 21 nt, Homo sapiens
uggaggagaaggaaggugaug

SEQ ID NO: 4243 - RNA, 22 nt, Homo sapiens
ugcaacuuaccugagucauuga

SEQ ID NO: 4244 - RNA, 22 nt, Homo sapiens
auccgcgcucugacucucugcc

SEQ ID NO: 4245 - RNA, 18 nt, Homo sapiens
aucccaccucugccacca

SEQ ID NO: 4246 - RNA, 22 nt, Homo sapiens
caggauguggucaaguguuguu

SEQ ID NO: 4247 - RNA, 17 nt, Homo sapiens
ucgccuccuccucuccc

SEQ ID NO: 4248 - RNA, 18 nt, Homo sapiens
cagggaggugaaugugau

SEQ ID NO: 4249 - RNA, 21 nt, Homo sapiens
cggcggggacggcgauugguc

SEQ ID NO: 4250 - RNA, 22 nt, Homo sapiens
ucaggccaggcacaguggcuca

SEQ ID NO: 4251 - RNA, 22 nt, Homo sapiens
ccucccacacccaaggcuugca

SEQ ID NO: 4252 - RNA, 24 nt, Homo sapiens
ugccugggucucuggccugcgcgu

SEQ ID NO: 4253 - RNA, 22 nt, Homo sapiens
aggcggggcgccgcgggaccgc

SEQ ID NO: 4254 - RNA, 22 nt, Homo sapiens
ugcggggcuagggcuaacagca

SEQ ID NO: 4255 - RNA, 20 nt, Homo sapiens
ggggagcuguggaagcagua

SEQ ID NO: 4256 - RNA, 21 nt, Homo sapiens
guucaaauccagaucuauaac

SEQ ID NO: 4257 - RNA, 21 nt, Homo sapiens
ucacagugaaccggucucuuu

SEQ ID NO: 4258 - RNA, 23 nt, Homo sapiens
ucuuggaguaggucauugggugg

SEQ ID NO: 4259 - RNA, 24 nt, Homo sapiens
cugaagugauguguaacugaucag

SEQ ID NO: 4260 - RNA, 22 nt, Homo sapiens
aacuggcccucaaagucccgcu

SEQ ID NO: 4261 - RNA, 22 nt, Homo sapiens
gaaguuguucgugguggauucg

SEQ ID NO: 4262 - RNA, 20 nt, Homo sapiens
uaaagagcccuguggagaca

SEQ ID NO: 4263 - RNA, 22 nt, Homo sapiens
cgucaacacuugcugguuuccu

SEQ ID NO: 4264 - RNA, 22 nt, Homo sapiens
uuugugaccugguccacuaacc

SEQ ID NO: 4265 - RNA, 21 nt, Homo sapiens
uggaggagaaggaaggugaug

SEQ ID NO: 4266 - RNA, 21 nt, Homo sapiens
ucguggccuggucuccauuau

SEQ ID NO: 4267 - RNA, 22 nt, Homo sapiens
ugagccccugugccgcccccag

SEQ ID NO: 4268 - RNA, 20 nt, Homo sapiens
ucguuugccuuuuucugcuu

SEQ ID NO: 4269 - RNA, 22 nt, Homo sapiens
ucagugcaucacagaacuuugu

SEQ ID NO: 4270 - RNA, 22 nt, Homo sapiens
uagcagcacauaaugguuugug

SEQ ID NO: 4271 - RNA, 22 nt, Homo sapiens
uagcagcacaucaugguuuaca

SEQ ID NO: 4272 - RNA, 22 nt, Homo sapiens
uagcagcacguaaauauuggcg

SEQ ID NO: 4273 - RNA, 21 nt, Homo sapiens
cggcggggacggcgauugguc

SEQ ID NO: 4274 - RNA, 21 nt, Homo sapiens
uagcagcacagaaauauuggc

SEQ ID NO: 4275 - RNA, 22 nt, Homo sapiens
acagcaggcacagacaggcagu

SEQ ID NO: 4276 - RNA, 22 nt, Homo sapiens
gccugcugggguggaaccuggu

SEQ ID NO: 4277 - RNA, 22 nt, Homo sapiens
cagcagcaauucauguuuugaa

SEQ ID NO: 4278 - RNA, 22 nt, Homo sapiens
uuuugcgauguguuccuaauau

SEQ ID NO: 4279 - RNA, 21 nt, Homo sapiens
cagcagcacacugugguuugu

SEQ ID NO: 4280 - RNA, 22 nt, Homo sapiens
aucuggagguaagaagcacuuu

SEQ ID NO: 4281 - RNA, 22 nt, Homo sapiens
auucugcauuuuuagcaaguuc

SEQ ID NO: 4282 - RNA, 19 nt, Homo sapiens
gggcgccugugaucccaac

SEQ ID NO: 4283 - RNA, 21 nt, Homo sapiens
ugagcuaaaugugugcuggga

SEQ ID NO: 4284 - RNA, 22 nt, Homo sapiens
uccgagccugggucucccucuu

SEQ ID NO: 4285 - RNA, 22 nt, Homo sapiens
aggcggggcgccgcgggaccgc

SEQ ID NO: 4286 - RNA, 22 nt, Homo sapiens
ugcggggcuagggcuaacagca

SEQ ID NO: 4287 - RNA, 22 nt, Homo sapiens
ugagaaccacgucugcucugag

SEQ ID NO: 4288 - RNA, 22 nt, Homo sapiens
uuuagagacggggucuugcucu

SEQ ID NO: 4289 - RNA, 22 nt, Homo sapiens
cucccacugcuucacuugacua

SEQ ID NO: 4290 - RNA, 22 nt, Homo sapiens
cauugcacuugucucggucuga

SEQ ID NO: 4291 - RNA, 22 nt, Homo sapiens
ccucccacacccaaggcuugca

SEQ ID NO: 4292 - RNA, 22 nt, Homo sapiens
uugugucaauaugcgaugaugu

SEQ ID NO: 4293 - RNA, 22 nt, Homo sapiens
ugugucacucgaugaccacugu

SEQ ID NO: 4294 - RNA, 21 nt, Homo sapiens
ugagaugaagcacuguagcuc

SEQ ID NO: 4295 - RNA, 21 nt, Homo sapiens
uaguagaccguauagcguacg

SEQ ID NO: 4296 - RNA, 21 nt, Homo sapiens
auccuugcuaucugggugcua

SEQ ID NO: 4297 - RNA, 22 nt, Homo sapiens
uagcuuaucagacugauguuga

SEQ ID NO: 4298 - RNA, 22 nt, Homo sapiens
gagcuuauucauaaaagugcag

SEQ ID NO: 4299 - RNA, 23 nt, Homo sapiens
ucuggcuccgugucuucacuccc

SEQ ID NO: 4300 - RNA, 22 nt, Homo sapiens
caaagaauucuccuuuugggcu

SEQ ID NO: 4301 - RNA, 23 nt, Homo sapiens
ugaguaccgccaugucuguuggg

SEQ ID NO: 4302 - RNA, 22 nt, Homo sapiens
aacuggcccucaaagucccgcu

SEQ ID NO: 4303 - RNA, 23 nt, Homo sapiens
uaaagugcuuauagugcagguag

SEQ ID NO: 4304 - RNA, 23 nt, Homo sapiens
uacugcaucaggaacugauugga

SEQ ID NO: 4305 - RNA, 23 nt, Homo sapiens
cacucagccuugagggcacuuuc

SEQ ID NO: 4306 - RNA, 24 nt, Homo sapiens
uucuccaaaagaaagcacuuucug

SEQ ID NO: 4307 - RNA, 22 nt, Homo sapiens
aagugccuccuuuuagaguguu

SEQ ID NO: 4308 - RNA, 23 nt, Homo sapiens
uauggcuuuuuauuccuauguga

SEQ ID NO: 4309 - RNA, 21 nt, Homo sapiens
uugugcuugaucuaaccaugu

SEQ ID NO: 4310 - RNA, 22 nt, Homo sapiens
agacuucccauuugaagguggc

SEQ ID NO: 4311 - RNA, 27 nt, Homo sapiens
accuucuuguauaagcacugugcuaaa

SEQ ID NO: 4312 - RNA, 22 nt, Homo sapiens
cuccugagccauucugagccuc

SEQ ID NO: 4313 - RNA, 21 nt, Homo sapiens
ccaccaccgugucugacacuu

SEQ ID NO: 4314 - RNA, 23 nt, Homo sapiens
ucccuguccuccaggagcucacg

SEQ ID NO: 4315 - RNA, 21 nt, Homo sapiens
ccgucgccgccacccgagccg

SEQ ID NO: 4316 - RNA, 22 nt, Homo sapiens
uggagugugacaaugguguuug

SEQ ID NO: 4317 - RNA, 20 nt, Homo sapiens
ccccagggcgacgcggcggg

SEQ ID NO: 4318 - RNA, 22 nt, Homo sapiens
cucccacugcuucacuugacua

SEQ ID NO: 4319 - RNA, 22 nt, Homo sapiens
agacccuggucugcacucuauc

SEQ ID NO: 4320 - RNA, 24 nt, Homo sapiens
uggggagcugaggcucugggggug

SEQ ID NO: 4321 - RNA, 17 nt, Homo sapiens
ucccuguucgggcgcca

SEQ ID NO: 4322 - RNA, 22 nt, Homo sapiens
uauacaagggcagacucucucu

SEQ ID NO: 4323 - RNA, 22 nt, Homo sapiens
uauacaagggcaagcucucugu

SEQ ID NO: 4324 - RNA, 22 nt, Homo sapiens
acuuguaugcuagcucagguag

SEQ ID NO: 4325 - RNA, 21 nt, Homo sapiens
gcccuccgcccgugcaccccg

SEQ ID NO: 4326 - RNA, 21 nt, Homo sapiens
gccccugggccuauccuagaa

SEQ ID NO: 4327 - RNA, 21 nt, Homo sapiens
agggggaaaguucuauagucc

SEQ ID NO: 4328 - RNA, 22 nt, Homo sapiens
cugcccuggcccgagggaccga

SEQ ID NO: 4329 - RNA, 22 nt, Homo sapiens
uagguaguuuccuguuguuggg

SEQ ID NO: 4330 - RNA, 22 nt, Homo sapiens
cgcaggggccgggugcucaccg

SEQ ID NO: 4331 - RNA, 23 nt, Homo sapiens
ucccccaggugugauucugauuu

SEQ ID NO: 4332 - RNA, 24 nt, Homo sapiens
acugggggcuuucgggcucugcgu

SEQ ID NO: 4333 - RNA, 24 nt, Homo sapiens
uucuccaaaagaaagcacuuucug

SEQ ID NO: 4334 - RNA, 22 nt, Homo sapiens
aagugccuccuuuuagaguguu

SEQ ID NO: 4335 - RNA, 22 nt, Homo sapiens
uacguagauauauauguauuuu

SEQ ID NO: 4336 - RNA, 22 nt, Homo sapiens
uuuucaacucuaaugggagaga

SEQ ID NO: 4337 - RNA, 21 nt, Homo sapiens
uaccacaggguagaaccacgg

SEQ ID NO: 4338 - RNA, 22 nt, Homo sapiens
uagcagcacaucaugguuuaca

SEQ ID NO: 4339 - RNA, 20 nt, Homo sapiens
uguuuugauaacaguaaugu

SEQ ID NO: 4340 - RNA, 22 nt, Homo sapiens
cagcagcaauucauguuuugaa

SEQ ID NO: 4341 - RNA, 22 nt, Homo sapiens
cagcagcaauucauguuuugaa

SEQ ID NO: 4342 - RNA, 21 nt, Homo sapiens
cagcagcacacugugguuugu

SEQ ID NO: 4343 - RNA, 21 nt, Homo sapiens
gaagugugccguggugugucu

SEQ ID NO: 4344 - RNA, 22 nt, Homo sapiens
cacacacugcaauuacuuuugc

SEQ ID NO: 4345 - RNA, 22 nt, Homo sapiens
ggagaaauuauccuuggugugu

SEQ ID NO: 4346 - RNA, 20 nt, Homo sapiens
ugagcccuguccucccgcag

SEQ ID NO: 4347 - RNA, 22 nt, Homo sapiens
ugagaacugaauuccauggguu

SEQ ID NO: 4348 - RNA, 21 nt, Homo sapiens
gcccuccgcccgugcaccccg

SEQ ID NO: 4349 - RNA, 22 nt, Homo sapiens
ucagugcacuacagaacuuugu

SEQ ID NO: 4350 - RNA, 22 nt, Homo sapiens
ucagugcaucacagaacuuugu

SEQ ID NO: 4351 - RNA, 23 nt, Homo sapiens
ucuggcuccgugucuucacuccc

SEQ ID NO: 4352 - RNA, 21 nt, Homo sapiens
ucagugcaugacagaacuugg

SEQ ID NO: 4353 - RNA, 22 nt, Homo sapiens
cucccacugcuucacuugacua

SEQ ID NO: 4354 - RNA, 22 nt, Homo sapiens
uguaaacauccuacacucagcu

SEQ ID NO: 4355 - RNA, 23 nt, Homo sapiens
ugaggggcagagagcgagacuuu

SEQ ID NO: 4356 - RNA, 22 nt, Homo sapiens
ccucccacacccaaggcuugca

SEQ ID NO: 4357 - RNA, 20 nt, Homo sapiens
guccgcucggcgguggccca

SEQ ID NO: 4358 - RNA, 21 nt, Homo sapiens
aagccugcccggcuccucggg

SEQ ID NO: 4359 - RNA, 25 nt, Homo sapiens
ggcggagggaaguagguccguuggu

SEQ ID NO: 4360 - RNA, 22 nt, Homo sapiens
ugcggggcuagggcuaacagca

SEQ ID NO: 4361 - RNA, 22 nt, Homo sapiens
ugagaaccacgucugcucugag

SEQ ID NO: 4362 - RNA, 21 nt, Homo sapiens
cggcggggacggcgauugguc

SEQ ID NO: 4363 - RNA, 22 nt, Homo sapiens
aggcggggcgccgcgggaccgc

SEQ ID NO: 4364 - RNA, 21 nt, Homo sapiens
aagccugcccggcuccucggg

SEQ ID NO: 4365 - RNA, 22 nt, Homo sapiens
agaaggaaauugaauucauuua

SEQ ID NO: 4366 - RNA, 22 nt, Homo sapiens
uucuggaauucugugugaggga

SEQ ID NO: 4367 - RNA, 22 nt, Homo sapiens
aagcccuuaccccaaaaagcau

SEQ ID NO: 4368 - RNA, 21 nt, Homo sapiens
acagucugcugagguuggagc

SEQ ID NO: 4369 - RNA, 23 nt, Homo sapiens
aaaagugcuuacagugcagguag

SEQ ID NO: 4370 - RNA, 22 nt, Homo sapiens
uccauuacacuacccugccucu

SEQ ID NO: 4371 - RNA, 22 nt, Homo sapiens
ucgugcaucccuuuagaguguu

SEQ ID NO: 4372 - RNA, 22 nt, Homo sapiens
ucagcaaacauuuauugugugc

SEQ ID NO: 4373 - RNA, 25 nt, Homo sapiens
gggcgacaaagcaagacucuuucuu

SEQ ID NO: 4374 - RNA, 21 nt, Homo sapiens
aguuaggauuaggucguggaa

SEQ ID NO: 4375 - RNA, 22 nt, Homo sapiens
uucaccaccuucuccacccagc

SEQ ID NO: 4376 - RNA, 22 nt, Homo sapiens
gcugacuccuaguccagggcuc

SEQ ID NO: 4377 - RNA, 22 nt, Homo sapiens
caaaacuggcaauuacuuuugc

SEQ ID NO: 4378 - RNA, 22 nt, Homo sapiens
aaaaacugagacuacuuuugca

SEQ ID NO: 4379 - RNA, 19 nt, Homo sapiens
aaaaacuguaauuacuuuu

SEQ ID NO: 4380 - RNA, 20 nt, Homo sapiens
guagaggagauggcgcaggg

SEQ ID NO: 4381 - RNA, 24 nt, Homo sapiens
aauccuuggaaccuaggugugagu

SEQ ID NO: 4382 - RNA, 23 nt, Homo sapiens
cuggagauauggaagagcugugu

SEQ ID NO: 4383 - RNA, 20 nt, Homo sapiens
auggagauagauauagaaau

SEQ ID NO: 4384 - RNA, 21 nt, Homo sapiens
uucaaguaauucaggauaggu

SEQ ID NO: 4385 - RNA, 22 nt, Homo sapiens
auaauacaugguuaaccucuuu

SEQ ID NO: 4386 - RNA, 21 nt, Homo sapiens
auauaugaugacuuagcuuuu

SEQ ID NO: 4387 - RNA, 22 nt, Homo sapiens
uccuguacugagcugccccgag

SEQ ID NO: 4388 - RNA, 21 nt, Homo sapiens
uacucaaaaagcugucaguca

SEQ ID NO: 4389 - RNA, 21 nt, Homo sapiens
aauaauacaugguugaucuuu

SEQ ID NO: 4390 - RNA, 23 nt, Homo sapiens
ugcaccaugguugucugagcaug

SEQ ID NO: 4391 - RNA, 21 nt, Homo sapiens
uaccacaggguagaaccacgg

SEQ ID NO: 4392 - RNA, 21 nt, Homo sapiens
uuuccauaggugaugagucac

SEQ ID NO: 4393 - RNA, 22 nt, Homo sapiens
uauacaagggcagacucucucu

SEQ ID NO: 4394 - RNA, 22 nt, Homo sapiens
uauacaagggcaagcucucugu

SEQ ID NO: 4395 - RNA, 22 nt, Homo sapiens
acuuguaugcuagcucagguag

SEQ ID NO: 4396 - RNA, 22 nt, Homo sapiens
cacuagauugugagcuccugga

SEQ ID NO: 4397 - RNA, 23 nt, Homo sapiens
cuaauaguaucuaccacaauaaa

SEQ ID NO: 4398 - RNA, 21 nt, Homo sapiens
gugucuuuugcucugcaguca

SEQ ID NO: 4399 - RNA, 22 nt, Homo sapiens
cugcccuggcccgagggaccga

SEQ ID NO: 4400 - RNA, 21 nt, Homo sapiens
uuaauaucggacaaccauugu

SEQ ID NO: 4401 - RNA, 22 nt, Homo sapiens
gaggguuggguggaggcucucc

SEQ ID NO: 4402 - RNA, 21 nt, Homo sapiens
uacaguacugugauaacugaa

SEQ ID NO: 4403 - RNA, 20 nt, Homo sapiens
ugagcccuguccucccgcag

SEQ ID NO: 4404 - RNA, 21 nt, Homo sapiens
ucuuguguucucuagaucagu

SEQ ID NO: 4405 - RNA, 22 nt, Homo sapiens
agaucagaaggugauuguggcu

SEQ ID NO: 4406 - RNA, 22 nt, Homo sapiens
uuaugguuugccugggacugag

SEQ ID NO: 4407 - RNA, 20 nt, Homo sapiens
agaccauggguucucauugu

SEQ ID NO: 4408 - RNA, 22 nt, Homo sapiens
uggagugugacaaugguguuug

SEQ ID NO: 4409 - RNA, 22 nt, Homo sapiens
aaacauucgcggugcacuucuu

SEQ ID NO: 4410 - RNA, 20 nt, Homo sapiens
accaggaggcugaggccccu

SEQ ID NO: 4411 - RNA, 20 nt, Homo sapiens
guguguggaaaugcuucugc

SEQ ID NO: 4412 - RNA, 22 nt, Homo sapiens
ucaccagcccuguguucccuag

SEQ ID NO: 4413 - RNA, 23 nt, Homo sapiens
agcugguguugugaaucaggccg

SEQ ID NO: 4414 - RNA, 19 nt, Homo sapiens
aagcagcugccucugaggc

SEQ ID NO: 4415 - RNA, 21 nt, Homo sapiens
uggacugcccugaucuggaga

SEQ ID NO: 4416 - RNA, 21 nt, Homo sapiens
caaagaggaaggucccauuac

SEQ ID NO: 4417 - RNA, 22 nt, Homo sapiens
cuccugagccauucugagccuc

SEQ ID NO: 4418 - RNA, 22 nt, Homo sapiens
uccuguacugagcugccccgag

SEQ ID NO: 4419 - RNA, 17 nt, Homo sapiens
gugggggagaggcuguc

SEQ ID NO: 4420 - RNA, 20 nt, Homo sapiens
cgugccacccuuuuccccag

SEQ ID NO: 4421 - RNA, 24 nt, Homo sapiens
uuuggcaaugguagaacucacacu

SEQ ID NO: 4422 - RNA, 22 nt, Homo sapiens
ugagaaccacgucugcucugag

SEQ ID NO: 4423 - RNA, 20 nt, Homo sapiens
ucugcaggguuugcuuugag

SEQ ID NO: 4424 - RNA, 22 nt, Homo sapiens
ugugacugguugaccagagggg

SEQ ID NO: 4425 - RNA, 22 nt, Homo sapiens
aaccagcaccccaacuuuggac

SEQ ID NO: 4426 - RNA, 21 nt, Homo sapiens
cuagacugaagcuccuugagg

SEQ ID NO: 4427 - RNA, 22 nt, Homo sapiens
uucacaaggaggugucauuuau

SEQ ID NO: 4428 - RNA, 22 nt, Homo sapiens
uaacacugucugguaaagaugg

SEQ ID NO: 4429 - RNA, 22 nt, Homo sapiens
uaacacugucugguaacgaugu

SEQ ID NO: 4430 - RNA, 21 nt, Homo sapiens
aucauagaggaaaauccacgu

SEQ ID NO: 4431 - RNA, 22 nt, Homo sapiens
aucauagaggaaaauccauguu

SEQ ID NO: 4432 - RNA, 20 nt, Homo sapiens
ccuccugcccuccuugcugu

SEQ ID NO: 4433 - RNA, 22 nt, Homo sapiens
uagcuuaucagacugauguuga

SEQ ID NO: 4434 - RNA, 22 nt, Homo sapiens
aggugguccguggcgcguucgc

SEQ ID NO: 4435 - RNA, 23 nt, Homo sapiens
ugaguaccgccaugucuguuggg

SEQ ID NO: 4436 - RNA, 22 nt, Homo sapiens
ugggucuuugcgggcgagauga

SEQ ID NO: 4437 - RNA, 23 nt, Homo sapiens
uagugcaauauugcuuauagggu

SEQ ID NO: 4438 - RNA, 22 nt, Homo sapiens
caaucacuaacuccacugccau

SEQ ID NO: 4439 - RNA, 22 nt, Homo sapiens
aaauuauuguacaucggaugag

SEQ ID NO: 4440 - RNA, 22 nt, Homo sapiens
ugcccuguggacucaguucugg

SEQ ID NO: 4441 - RNA, 22 nt, Homo sapiens
acacagggcuguugugaagacu

SEQ ID NO: 4442 - RNA, 22 nt, Homo sapiens
ggagaaauuauccuuggugugu

SEQ ID NO: 4443 - RNA, 26 nt, Homo sapiens
gaugaugauggcagcaaauucugaaa

SEQ ID NO: 4444 - RNA, 22 nt, Homo sapiens
aacccguagauccgaacuugug

SEQ ID NO: 4445 - RNA, 21 nt, Homo sapiens
uaaagugcugacagugcagau

SEQ ID NO: 4446 - RNA, 21 nt, Homo sapiens
ccccaccuccucucuccucag

SEQ ID NO: 4447 - RNA, 17 nt, Homo sapiens
ucgccuccuccucuccc

SEQ ID NO: 4448 - RNA, 23 nt, Homo sapiens
ucuggcuccgugucuucacuccc

SEQ ID NO: 4449 - RNA, 21 nt, Homo sapiens
cggcggggacggcgauugguc

SEQ ID NO: 4450 - RNA, 21 nt, Homo sapiens
cggcggggacggcgauugguc

SEQ ID NO: 4451 - RNA, 22 nt, Homo sapiens
cauugcacuugucucggucuga

SEQ ID NO: 4452 - RNA, 22 nt, Homo sapiens
uguaaacauccuacacucagcu

SEQ ID NO: 4453 - RNA, 21 nt, Homo sapiens
uugaaaggcuauuucuugguc

SEQ ID NO: 4454 - RNA, 22 nt, Homo sapiens
uucucaaggaggugucguuuau

SEQ ID NO: 4455 - RNA, 23 nt, Homo sapiens
ucggggaucaucaugucacgaga

SEQ ID NO: 4456 - RNA, 22 nt, Homo sapiens
ggggguccccggugcucggauc

SEQ ID NO: 4457 - RNA, 25 nt, Homo sapiens
ggcggagggaaguagguccguuggu

SEQ ID NO: 4458 - RNA, 22 nt, Homo sapiens
aggcggggcgccgcgggaccgc

SEQ ID NO: 4459 - RNA, 22 nt, Homo sapiens
aggcggggcgccgcgggaccgc

SEQ ID NO: 4460 - RNA, 22 nt, Homo sapiens
ugcggggcuagggcuaacagca

SEQ ID NO: 4461 - RNA, 22 nt, Homo sapiens
ugcggggcuagggcuaacagca

SEQ ID NO: 4462 - RNA, 20 nt, Homo sapiens
ggggagcuguggaagcagua

SEQ ID NO: 4463 - RNA, 22 nt, Homo sapiens
caaaguuuaagauccuugaagu

SEQ ID NO: 4464 - RNA, 22 nt, Homo sapiens
ccucuuccccuugucucuccag

SEQ ID NO: 4465 - RNA, 21 nt, Homo sapiens
aguuaggauuaggucguggaa

SEQ ID NO: 4466 - RNA, 22 nt, Homo sapiens
ugagaacugaauuccauggguu

SEQ ID NO: 4467 - RNA, 22 nt, Homo sapiens
ugagaacugaauuccauaggcu

SEQ ID NO: 4468 - RNA, 23 nt, Homo sapiens
ugugcaaaucuaugcaaaacuga

SEQ ID NO: 4469 - RNA, 23 nt, Homo sapiens
ugugcaaauccaugcaaaacuga

SEQ ID NO: 4470 - RNA, 21 nt, Homo sapiens
uuuugcaccuuuuggagugaa

SEQ ID NO: 4471 - RNA, 23 nt, Homo sapiens
guuugcacgggugggccuugucu

SEQ ID NO: 4472 - RNA, 23 nt, Homo sapiens
uaaaucccauggugccuucuccu

SEQ ID NO: 4473 - RNA, 24 nt, Homo sapiens
ugccugggucucuggccugcgcgu

SEQ ID NO: 4474 - RNA, 21 nt, Homo sapiens
ucccacguuguggcccagcag

SEQ ID NO: 4475 - RNA, 21 nt, Homo sapiens
uugugcuugaucuaaccaugu

SEQ ID NO: 4476 - RNA, 17 nt, Homo sapiens
gugggggagaggcuguc

SEQ ID NO: 4477 - RNA, 21 nt, Homo sapiens
guucaaauccagaucuauaac

SEQ ID NO: 4478 - RNA, 23 nt, Homo sapiens
uacccuguagauccgaauuugug

SEQ ID NO: 4479 - RNA, 23 nt, Homo sapiens
uacccuguagaaccgaauuugug

SEQ ID NO: 4480 - RNA, 22 nt, Homo sapiens
acacagggcuguugugaagacu

SEQ ID NO: 4481 - RNA, 22 nt, Homo sapiens
caaaaguaauuguggauuuugu

SEQ ID NO: 4482 - RNA, 21 nt, Homo sapiens
aauauuauacagucaaccucu

SEQ ID NO: 4483 - RNA, 22 nt, Homo sapiens
uagcaaaaacugcaguuacuuu

SEQ ID NO: 4484 - RNA, 21 nt, Homo sapiens
ugagcuaaaugugugcuggga

SEQ ID NO: 4485 - RNA, 22 nt, Homo sapiens
aacuguuugcagaggaaacuga

SEQ ID NO: 4486 - RNA, 21 nt, Homo sapiens
uagcagcacagaaauauuggc

SEQ ID NO: 4487 - RNA, 22 nt, Homo sapiens
uaacacugucugguaacgaugu

SEQ ID NO: 4488 - RNA, 22 nt, Homo sapiens
uaauacugccugguaaugauga

SEQ ID NO: 4489 - RNA, 23 nt, Homo sapiens
ugaguaccgccaugucuguuggg

SEQ ID NO: 4490 - RNA, 21 nt, Homo sapiens
cucccacaugcaggguuugca

SEQ ID NO: 4491 - RNA, 21 nt, Homo sapiens
uucaaguaauucaggauaggu

SEQ ID NO: 4492 - RNA, 22 nt, Homo sapiens
uagcaccaucugaaaucgguua

SEQ ID NO: 4493 - RNA, 23 nt, Homo sapiens
uagcaccauuugaaaucaguguu

SEQ ID NO: 4494 - RNA, 22 nt, Homo sapiens
uagcaccauuugaaaucgguua

SEQ ID NO: 4495 - RNA, 21 nt, Homo sapiens
auugacacuucugugaguaga

SEQ ID NO: 4496 - RNA, 18 nt, Homo sapiens
ugcuuccuuucagagggu

SEQ ID NO: 4497 - RNA, 22 nt, Homo sapiens
aucuggagguaagaagcacuuu

SEQ ID NO: 4498 - RNA, 22 nt, Homo sapiens
auucugcauuuuuagcaaguuc

SEQ ID NO: 4499 - RNA, 22 nt, Homo sapiens
ugagaaccacgucugcucugag

SEQ ID NO: 4500 - RNA, 20 nt, Homo sapiens
agaccauggguucucauugu

SEQ ID NO: 4501 - RNA, 22 nt, Homo sapiens
uugugucaauaugcgaugaugu

SEQ ID NO: 4502 - RNA, 23 nt, Homo sapiens
aucgcugcgguugcgagcgcugu

SEQ ID NO: 4503 - RNA, 17 nt, Homo sapiens
ucucgcuggggccucca

SEQ ID NO: 4504 - RNA, 20 nt, Homo sapiens
cggcucugggucugugggga

SEQ ID NO: 4505 - RNA, 22 nt, Homo sapiens
uuauaaagcaaugagacugauu

SEQ ID NO: 4506 - RNA, 22 nt, Homo sapiens
ugagguaguaguuugugcuguu

SEQ ID NO: 4507 - RNA, 18 nt, Homo sapiens
cagggaggugaaugugau

SEQ ID NO: 4508 - RNA, 23 nt, Homo sapiens
ucuggcuccgugucuucacuccc

SEQ ID NO: 4509 - RNA, 21 nt, Homo sapiens
cggcggggacggcgauugguc

SEQ ID NO: 4510 - RNA, 20 nt, Homo sapiens
ccucugggcccuuccuccag

SEQ ID NO: 4511 - RNA, 22 nt, Homo sapiens
ucucugggccugugucuuaggc

SEQ ID NO: 4512 - RNA, 21 nt, Homo sapiens
auccuugcuaucugggugcua

SEQ ID NO: 4513 - RNA, 22 nt, Homo sapiens
aggcggggcgccgcgggaccgc

SEQ ID NO: 4514 - RNA, 22 nt, Homo sapiens
ugcggggcuagggcuaacagca

SEQ ID NO: 4515 - RNA, 22 nt, Homo sapiens
ugugcgcagggagaccucuccc

SEQ ID NO: 4516 - RNA, 25 nt, Homo sapiens
cccccacaaccgcgcuugacuagcu

SEQ ID NO: 4517 - RNA, 23 nt, Homo sapiens
ugagugugugugugugagugugu

SEQ ID NO: 4518 - RNA, 21 nt, Homo sapiens
ccuguugaaguguaaucccca

SEQ ID NO: 4519 - RNA, 22 nt, Homo sapiens
uggagagaaaggcaguuccuga

SEQ ID NO: 4520 - RNA, 22 nt, Homo sapiens
uagcaccaucugaaaucgguua

SEQ ID NO: 4521 - RNA, 22 nt, Homo sapiens
uguaaacauccucgacuggaag

SEQ ID NO: 4522 - RNA, 22 nt, Homo sapiens
uguaaacauccccgacuggaag

SEQ ID NO: 4523 - RNA, 22 nt, Homo sapiens
uguaaacauccuugacuggaag

SEQ ID NO: 4524 - RNA, 23 nt, Homo sapiens
ugagcgccucgacgacagagccg

SEQ ID NO: 4525 - RNA, 23 nt, Homo sapiens
aucaacagacauuaauugggcgc

SEQ ID NO: 4526 - RNA, 22 nt, Homo sapiens
aucuggagguaagaagcacuuu

SEQ ID NO: 4527 - RNA, 21 nt, Homo sapiens
gaaggcgcuucccuuuggagu

SEQ ID NO: 4528 - RNA, 22 nt, Homo sapiens
gaaggcgcuucccuuuagagcg

SEQ ID NO: 4529 - RNA, 21 nt, Homo sapiens
guguugaaacaaucucuacug

SEQ ID NO: 4530 - RNA, 21 nt, Homo sapiens
uggaggagaaggaaggugaug

SEQ ID NO: 4531 - RNA, 27 nt, Homo sapiens
cacuguaggugauggugagagugggca

SEQ ID NO: 4532 - RNA, 23 nt, Homo sapiens
uauggcuuuucauuccuauguga

SEQ ID NO: 4533 - RNA, 22 nt, Homo sapiens
ucuacagugcacgugucuccag

SEQ ID NO: 4534 - RNA, 22 nt, Homo sapiens
uggagagaaaggcaguuccuga

SEQ ID NO: 4535 - RNA, 19 nt, Homo sapiens
ugagcugcuguaccaaaau

SEQ ID NO: 4536 - RNA, 22 nt, Homo sapiens
ugagaaccacgucugcucugag

SEQ ID NO: 4537 - RNA, 25 nt, Homo sapiens
aggggugguguugggacagcuccgu

SEQ ID NO: 4538 - RNA, 22 nt, Homo sapiens
ugcggggcuagggcuaacagca

SEQ ID NO: 4539 - RNA, 20 nt, Homo sapiens
cggcucugggucugugggga

SEQ ID NO: 4540 - RNA, 23 nt, Homo sapiens
cgggucggaguuagcucaagcgg

SEQ ID NO: 4541 - RNA, 20 nt, Homo sapiens
ggggagcuguggaagcagua

SEQ ID NO: 4542 - RNA, 23 nt, Homo sapiens
caaagugcuuacagugcagguag

SEQ ID NO: 4543 - RNA, 21 nt, Homo sapiens
ccaccaccgugucugacacuu

SEQ ID NO: 4544 - RNA, 22 nt, Homo sapiens
uacugcagacguggcaaucaug

SEQ ID NO: 4545 - RNA, 21 nt, Homo sapiens
uacugcagacaguggcaauca

SEQ ID NO: 4546 - RNA, 18 nt, Homo sapiens
cgggcguggugguggggg

SEQ ID NO: 4547 - RNA, 21 nt, Homo sapiens
ugcaggaccaagaugagcccu

SEQ ID NO: 4548 - RNA, 21 nt, Homo sapiens
uggacugcccugaucuggaga

SEQ ID NO: 4549 - RNA, 23 nt, Homo sapiens
uggaguccaggaaucugcauuuu

SEQ ID NO: 4550 - RNA, 25 nt, Homo sapiens
ugggaacggguuccggcagacgcug

SEQ ID NO: 4551 - RNA, 21 nt, Homo sapiens
uccugcgcgucccagaugccc

SEQ ID NO: 4552 - RNA, 21 nt, Homo sapiens
ccaguccugugccugccgccu

SEQ ID NO: 4553 - RNA, 22 nt, Homo sapiens
ucugcccccuccgcugcugcca

SEQ ID NO: 4554 - RNA, 22 nt, Homo sapiens
uuggggaaacggccgcugagug

SEQ ID NO: 4555 - RNA, 20 nt, Homo sapiens
ccucugggcccuuccuccag

SEQ ID NO: 4556 - RNA, 22 nt, Homo sapiens
ucucugggccugugucuuaggc

SEQ ID NO: 4557 - RNA, 22 nt, Homo sapiens
caaucacuaacuccacugccau

SEQ ID NO: 4558 - RNA, 21 nt, Homo sapiens
cggggcagcucaguacaggau

SEQ ID NO: 4559 - RNA, 23 nt, Homo sapiens
ugagugugugugugugagugugu

SEQ ID NO: 4560 - RNA, 23 nt, Homo sapiens
gcgaggaccccucggggucugac

SEQ ID NO: 4561 - RNA, 24 nt, Homo sapiens
gaccuggacauguuugugcccagu

SEQ ID NO: 4562 - RNA, 19 nt, Homo sapiens
aagugugcagggcacuggu

SEQ ID NO: 4563 - RNA, 22 nt, Homo sapiens
ugugcgcagggagaccucuccc

SEQ ID NO: 4564 - RNA, 22 nt, Homo sapiens
caaaguuuaagauccuugaagu

SEQ ID NO: 4565 - RNA, 22 nt, Homo sapiens
aacuggccuacaaagucccagu

SEQ ID NO: 4566 - RNA, 22 nt, Homo sapiens
aacuggcccucaaagucccgcu

SEQ ID NO: 4567 - RNA, 25 nt, Homo sapiens
ggcggagggaaguagguccguuggu

SEQ ID NO: 4568 - RNA, 24 nt, Homo sapiens
uggggagcugaggcucugggggug

SEQ ID NO: 4569 - RNA, 23 nt, Homo sapiens
ucauagcccuguacaaugcugcu

SEQ ID NO: 4570 - RNA, 21 nt, Homo sapiens
gugccagcugcagugggggag

SEQ ID NO: 4571 - RNA, 21 nt, Homo sapiens
uggcagggaggcugggagggg

SEQ ID NO: 4572 - RNA, 21 nt, Homo sapiens
ccccaccuccucucuccucag

SEQ ID NO: 4573 - RNA, 18 nt, Homo sapiens
cgggcguggugguggggg

SEQ ID NO: 4574 - RNA, 23 nt, Homo sapiens
agcuacauugucugcuggguuuc

SEQ ID NO: 4575 - RNA, 21 nt, Homo sapiens
gaaggcgcuucccuuuggagu

SEQ ID NO: 4576 - RNA, 22 nt, Homo sapiens
gaaggcgcuucccuuuagagcg

SEQ ID NO: 4577 - RNA, 22 nt, Homo sapiens
uggugggcacagaaucuggacu

SEQ ID NO: 4578 - RNA, 19 nt, Homo sapiens
gggcgccugugaucccaac

SEQ ID NO: 4579 - RNA, 19 nt, Homo sapiens
gggcgccugugaucccaac

SEQ ID NO: 4580 - RNA, 25 nt, Homo sapiens
aggggugguguugggacagcuccgu

SEQ ID NO: 4581 - RNA, 21 nt, Homo sapiens
agaccuggcccagaccucagc

SEQ ID NO: 4582 - RNA, 22 nt, Homo sapiens
uggugggccgcagaacaugugc

SEQ ID NO: 4583 - RNA, 20 nt, Homo sapiens
ggggagcuguggaagcagua

SEQ ID NO: 4584 - RNA, 17 nt, Homo sapiens
ucccaccgcugccaccc

SEQ ID NO: 4585 - RNA, 21 nt, Homo sapiens
gcccuccgcccgugcaccccg

SEQ ID NO: 4586 - RNA, 23 nt, Homo sapiens
ucuggcuccgugucuucacuccc

SEQ ID NO: 4587 - RNA, 23 nt, Homo sapiens
ucuggcuccgugucuucacuccc

SEQ ID NO: 4588 - RNA, 23 nt, Homo sapiens
cggcccgggcugcugcuguuccu

SEQ ID NO: 4589 - RNA, 21 nt, Homo sapiens
cggcggggacggcgauugguc

SEQ ID NO: 4590 - RNA, 22 nt, Homo sapiens
cauugcacuugucucggucuga

SEQ ID NO: 4591 - RNA, 22 nt, Homo sapiens
cgucaacacuugcugguuuccu

SEQ ID NO: 4592 - RNA, 25 nt, Homo sapiens
aggggugguguugggacagcuccgu

SEQ ID NO: 4593 - RNA, 25 nt, Homo sapiens
ggcggagggaaguagguccguuggu

SEQ ID NO: 4594 - RNA, 22 nt, Homo sapiens
aggcggggcgccgcgggaccgc

SEQ ID NO: 4595 - RNA, 20 nt, Homo sapiens
ggggagcuguggaagcagua

SEQ ID NO: 4596 - RNA, 24 nt, Homo sapiens
uggggagcugaggcucugggggug

SEQ ID NO: 4597 - RNA, 22 nt, Homo sapiens
gucccucuccaaaugugucuug

SEQ ID NO: 4598 - RNA, 22 nt, Homo sapiens
uggagugugacaaugguguuug

SEQ ID NO: 4599 - RNA, 23 nt, Homo sapiens
cacucagccuugagggcacuuuc

SEQ ID NO: 4600 - RNA, 20 nt, Homo sapiens
accaggaggcugaggccccu

SEQ ID NO: 4601 - RNA, 22 nt, Homo sapiens
caaagugccucccuuuagagug

SEQ ID NO: 4602 - RNA, 24 nt, Homo sapiens
uggggagcugaggcucugggggug

SEQ ID NO: 4603 - RNA, 22 nt, Homo sapiens
ucugcccccuccgcugcugcca

SEQ ID NO: 4604 - RNA, 22 nt, Homo sapiens
cauugcacuugucucggucuga

SEQ ID NO: 4605 - RNA, 20 nt, Homo sapiens
acugccccaggugcugcugg

SEQ ID NO: 4606 - RNA, 21 nt, Homo sapiens
cggggcagcucaguacaggau

SEQ ID NO: 4607 - RNA, 22 nt, Homo sapiens
uucuggaauucugugugaggga

SEQ ID NO: 4608 - RNA, 22 nt, Homo sapiens
aagcccuuaccccaaaaagcau

SEQ ID NO: 4609 - RNA, 23 nt, Homo sapiens
acuccauuuguuuugaugaugga

SEQ ID NO: 4610 - RNA, 22 nt, Homo sapiens
ucucccaacccuuguaccagug

SEQ ID NO: 4611 - RNA, 22 nt, Homo sapiens
ugauauguuugauauauuaggu

SEQ ID NO: 4612 - RNA, 23 nt, Homo sapiens
caacggaaucccaaaagcagcug

SEQ ID NO: 4613 - RNA, 22 nt, Homo sapiens
uuggggaaacggccgcugagug

SEQ ID NO: 4614 - RNA, 23 nt, Homo sapiens
agcuacauugucugcuggguuuc

SEQ ID NO: 4615 - RNA, 20 nt, Homo sapiens
ccucugggcccuuccuccag

SEQ ID NO: 4616 - RNA, 22 nt, Homo sapiens
ucucugggccugugucuuaggc

SEQ ID NO: 4617 - RNA, 20 nt, Homo sapiens
gugcauugcuguugcauugc

SEQ ID NO: 4618 - RNA, 23 nt, Homo sapiens
ucucacacagaaaucgcacccgu

SEQ ID NO: 4619 - RNA, 23 nt, Homo sapiens
ucccccaggugugauucugauuu

SEQ ID NO: 4620 - RNA, 22 nt, Homo sapiens
aucacacaaaggcaacuuuugu

SEQ ID NO: 4621 - RNA, 22 nt, Homo sapiens
agaggcuggccgugaugaauuc

SEQ ID NO: 4622 - RNA, 22 nt, Homo sapiens
aguggggaacccuuccaugagg

SEQ ID NO: 4623 - RNA, 22 nt, Homo sapiens
gagugccuucuuuuggagcguu

SEQ ID NO: 4624 - RNA, 22 nt, Homo sapiens
aagugccuccuuuuagaguguu

SEQ ID NO: 4625 - RNA, 23 nt, Homo sapiens
agugccugagggaguaagagccc

SEQ ID NO: 4626 - RNA, 25 nt, Homo sapiens
aggggugguguugggacagcuccgu

SEQ ID NO: 4627 - RNA, 21 nt, Homo sapiens
acagucugcugagguuggagc

SEQ ID NO: 4628 - RNA, 24 nt, Homo sapiens
acugggggcuuucgggcucugcgu

SEQ ID NO: 4629 - RNA, 20 nt, Homo sapiens
ggggagcuguggaagcagua

SEQ ID NO: 4630 - RNA, 21 nt, Homo sapiens
gugccagcugcagugggggag

SEQ ID NO: 4631 - RNA, 22 nt, Homo sapiens
ucagugcaucacagaacuuugu

SEQ ID NO: 4632 - RNA, 22 nt, Homo sapiens
uggagagaaaggcaguuccuga

SEQ ID NO: 4633 - RNA, 22 nt, Homo sapiens
aaaucucugcaggcaaauguga

SEQ ID NO: 4634 - RNA, 22 nt, Homo sapiens
aacaauauccuggugcugagug

SEQ ID NO: 4635 - RNA, 22 nt, Homo sapiens
aauugcacgguauccaucugua

SEQ ID NO: 4636 - RNA, 22 nt, Homo sapiens
aucaugaugggcuccucggugu

SEQ ID NO: 4637 - RNA, 22 nt, Homo sapiens
uaugugccuuuggacuacaucg

SEQ ID NO: 4638 - RNA, 22 nt, Homo sapiens
cgaaaacagcaauuaccuuugc

SEQ ID NO: 4639 - RNA, 25 nt, Homo sapiens
aggggugguguugggacagcuccgu

SEQ ID NO: 4640 - RNA, 24 nt, Homo sapiens
ugccugggucucuggccugcgcgu

SEQ ID NO: 4641 - RNA, 23 nt, Homo sapiens
aaggagcuuacaaucuagcuggg

SEQ ID NO: 4642 - RNA, 21 nt, Homo sapiens
uggaggagaaggaaggugaug

SEQ ID NO: 4643 - RNA, 24 nt, Homo sapiens
agcagaagcagggagguucuccca

SEQ ID NO: 4644 - RNA, 22 nt, Homo sapiens
uggagugugacaaugguguuug

SEQ ID NO: 4645 - RNA, 21 nt, Homo sapiens
acucuagcugccaaaggcgcu

SEQ ID NO: 4646 - RNA, 24 nt, Homo sapiens
agccuggaagcuggagccugcagu

SEQ ID NO: 4647 - RNA, 22 nt, Homo sapiens
acucggcguggcgucggucgug

SEQ ID NO: 4648 - RNA, 23 nt, Homo sapiens
cggcccgggcugcugcuguuccu

SEQ ID NO: 4649 - RNA, 23 nt, Homo sapiens
cggcccgggcugcugcuguuccu

SEQ ID NO: 4650 - RNA, 21 nt, Homo sapiens
cggcggggacggcgauugguc

SEQ ID NO: 4651 - RNA, 21 nt, Homo sapiens
cggcggggacggcgauugguc

SEQ ID NO: 4652 - RNA, 24 nt, Homo sapiens
acugggggcuuucgggcucugcgu

SEQ ID NO: 4653 - RNA, 22 nt, Homo sapiens
aggcggggcgccgcgggaccgc

SEQ ID NO: 4654 - RNA, 22 nt, Homo sapiens
aggcggggcgccgcgggaccgc

SEQ ID NO: 4655 - RNA, 22 nt, Homo sapiens
ugcggggcuagggcuaacagca

SEQ ID NO: 4656 - RNA, 22 nt, Homo sapiens
ugcggggcuagggcuaacagca

SEQ ID NO: 4657 - RNA, 23 nt, Homo sapiens
ccugcagcgacuugauggcuucc

SEQ ID NO: 4658 - RNA, 23 nt, Homo sapiens
ccugcagcgacuugauggcuucc

SEQ ID NO: 4659 - RNA, 22 nt, Homo sapiens
ugagccccugugccgcccccag

SEQ ID NO: 4660 - RNA, 22 nt, Homo sapiens
acccgucccguucguccccgga

SEQ ID NO: 4661 - RNA, 23 nt, Homo sapiens
ucuggcuccgugucuucacuccc

SEQ ID NO: 4662 - RNA, 22 nt, Homo sapiens
uggacggagaacugauaagggu

SEQ ID NO: 4663 - RNA, 22 nt, Homo sapiens
ucugcccccuccgcugcugcca

SEQ ID NO: 4664 - RNA, 20 nt, Homo sapiens
acugccccaggugcugcugg

SEQ ID NO: 4665 - RNA, 23 nt, Homo sapiens
ugaggggcagagagcgagacuuu

SEQ ID NO: 4666 - RNA, 21 nt, Homo sapiens
cggggcagcucaguacaggau

SEQ ID NO: 4667 - RNA, 21 nt, Homo sapiens
aauggcgccacuaggguugug

SEQ ID NO: 4668 - RNA, 21 nt, Homo sapiens
uggaggagaaggaaggugaug

SEQ ID NO: 4669 - RNA, 22 nt, Homo sapiens
aggcagcgggguguaguggaua

SEQ ID NO: 4670 - RNA, 22 nt, Homo sapiens
uauugcacucgucccggccucc

SEQ ID NO: 4671 - RNA, 22 nt, Homo sapiens
ugagccccugugccgcccccag

SEQ ID NO: 4672 - RNA, 22 nt, Homo sapiens
aggcaguguauuguuagcuggc

SEQ ID NO: 4673 - RNA, 21 nt, Homo sapiens
aggguaagcugaaccucugau

SEQ ID NO: 4674 - RNA, 22 nt, Homo sapiens
uucuggaauucugugugaggga

SEQ ID NO: 4675 - RNA, 21 nt, Homo sapiens
aggcaagaugcuggcauagcu

SEQ ID NO: 4676 - RNA, 21 nt, Homo sapiens
gcaggaacuugugagucuccu

SEQ ID NO: 4677 - RNA, 23 nt, Homo sapiens
acuucaccugguccacuagccgu

SEQ ID NO: 4678 - RNA, 23 nt, Homo sapiens
uauggcuuuuuauuccuauguga

SEQ ID NO: 4679 - RNA, 23 nt, Homo sapiens
uauggcuuuucauuccuauguga

SEQ ID NO: 4680 - RNA, 21 nt, Homo sapiens
gugccagcugcagugggggag

SEQ ID NO: 4681 - RNA, 20 nt, Homo sapiens
ucacaccugccucgcccccc

SEQ ID NO: 4682 - RNA, 18 nt, Homo sapiens
uccagugcccuccucucc

SEQ ID NO: 4683 - RNA, 21 nt, Homo sapiens
cggcggggacggcgauugguc

SEQ ID NO: 4684 - RNA, 20 nt, Homo sapiens
ccccagggcgacgcggcggg

SEQ ID NO: 4685 - RNA, 22 nt, Homo sapiens
cauugcacuugucucggucuga

SEQ ID NO: 4686 - RNA, 21 nt, Homo sapiens
aggggugcuaucugugauuga

SEQ ID NO: 4687 - RNA, 21 nt, Homo sapiens
gaaggcgcuucccuuuggagu

SEQ ID NO: 4688 - RNA, 22 nt, Homo sapiens
gaaggcgcuucccuuuagagcg

SEQ ID NO: 4689 - RNA, 19 nt, Homo sapiens
gggcgccugugaucccaac

SEQ ID NO: 4690 - RNA, 19 nt, Homo sapiens
aguguggcuuucuuagagc

SEQ ID NO: 4691 - RNA, 22 nt, Homo sapiens
aggcggggcgccgcgggaccgc

SEQ ID NO: 4692 - RNA, 23 nt, Homo sapiens
uggugcggagagggcccacagug

SEQ ID NO: 4693 - RNA, 21 nt, Homo sapiens
uggaggagaaggaaggugaug

SEQ ID NO: 4694 - RNA, 20 nt, Homo sapiens
ggggagcuguggaagcagua

SEQ ID NO: 4695 - RNA, 22 nt, Homo sapiens
uggagugugacaaugguguuug

SEQ ID NO: 4696 - RNA, 22 nt, Homo sapiens
uuugguccccuucaaccagcug

SEQ ID NO: 4697 - RNA, 22 nt, Homo sapiens
uuugguccccuucaaccagcua

SEQ ID NO: 4698 - RNA, 21 nt, Homo sapiens
uugaaaggcuauuucuugguc

SEQ ID NO: 4699 - RNA, 19 nt, Homo sapiens
aggcugcggaauucaggac

SEQ ID NO: 4700 - RNA, 21 nt, Homo sapiens
uguucauguagauguuuaagc

SEQ ID NO: 4701 - RNA, 22 nt, Homo sapiens
uuugaggcuacagugagaugug

SEQ ID NO: 4702 - RNA, 22 nt, Homo sapiens
uagcagcacauaaugguuugug

SEQ ID NO: 4703 - RNA, 22 nt, Homo sapiens
uagcagcacaucaugguuuaca

SEQ ID NO: 4704 - RNA, 22 nt, Homo sapiens
uagcagcacguaaauauuggcg

SEQ ID NO: 4705 - RNA, 21 nt, Homo sapiens
uagcagcacagaaauauuggc

SEQ ID NO: 4706 - RNA, 17 nt, Homo sapiens
uaauugcuuccauguuu

SEQ ID NO: 4707 - RNA, 22 nt, Homo sapiens
cagcagcaauucauguuuugaa

SEQ ID NO: 4708 - RNA, 21 nt, Homo sapiens
cagcagcacacugugguuugu

SEQ ID NO: 4709 - RNA, 20 nt, Homo sapiens
agaccauggguucucauugu

SEQ ID NO: 4710 - RNA, 22 nt, Homo sapiens
uggagugugacaaugguguuug

SEQ ID NO: 4711 - RNA, 22 nt, Homo sapiens
auccgcgcucugacucucugcc

SEQ ID NO: 4712 - RNA, 22 nt, Homo sapiens
ccucuuccccuugucucuccag

SEQ ID NO: 4713 - RNA, 24 nt, Homo sapiens
ucccugagacccuuuaaccuguga

SEQ ID NO: 4714 - RNA, 22 nt, Homo sapiens
ucccugagacccuaacuuguga

SEQ ID NO: 4715 - RNA, 23 nt, Homo sapiens
ccucagggcuguagaacagggcu

SEQ ID NO: 4716 - RNA, 22 nt, Homo sapiens
uagcagcacauaaugguuugug

SEQ ID NO: 4717 - RNA, 22 nt, Homo sapiens
uagcagcacaucaugguuuaca

SEQ ID NO: 4718 - RNA, 22 nt, Homo sapiens
uagcagcacguaaauauuggcg

SEQ ID NO: 4719 - RNA, 21 nt, Homo sapiens
uagcagcacagaaauauuggc

SEQ ID NO: 4720 - RNA, 22 nt, Homo sapiens
gaggguuggguggaggcucucc

SEQ ID NO: 4721 - RNA, 20 nt, Homo sapiens
ccucugggcccuuccuccag

SEQ ID NO: 4722 - RNA, 22 nt, Homo sapiens
ucucugggccugugucuuaggc

SEQ ID NO: 4723 - RNA, 22 nt, Homo sapiens
aauugcacuuuagcaaugguga

SEQ ID NO: 4724 - RNA, 22 nt, Homo sapiens
cagcagcaauucauguuuugaa

SEQ ID NO: 4725 - RNA, 21 nt, Homo sapiens
cagcagcacacugugguuugu

SEQ ID NO: 4726 - RNA, 23 nt, Homo sapiens
uagcagcgggaacaguucugcag

SEQ ID NO: 4727 - RNA, 22 nt, Homo sapiens
uacucaggagaguggcaaucac

SEQ ID NO: 4728 - RNA, 22 nt, Homo sapiens
uucucaaggaggugucguuuau

SEQ ID NO: 4729 - RNA, 23 nt, Homo sapiens
aucgcugcgguugcgagcgcugu

SEQ ID NO: 4730 - RNA, 20 nt, Homo sapiens
ggggagcuguggaagcagua

SEQ ID NO: 4731 - RNA, 22 nt, Homo sapiens
caaagugccucccuuuagagug

SEQ ID NO: 4732 - RNA, 20 nt, Homo sapiens
aaaguagcuguaccauuugc

SEQ ID NO: 4733 - RNA, 21 nt, Homo sapiens
cccggagccaggaugcagcuc

SEQ ID NO: 4734 - RNA, 21 nt, Homo sapiens
cccggagccaggaugcagcuc

SEQ ID NO: 4735 - RNA, 17 nt, Homo sapiens
ucgccuccuccucuccc

SEQ ID NO: 4736 - RNA, 18 nt, Homo sapiens
cagggaggugaaugugau

SEQ ID NO: 4737 - RNA, 21 nt, Homo sapiens
gcccuccgcccgugcaccccg

SEQ ID NO: 4738 - RNA, 23 nt, Homo sapiens
ucuggcuccgugucuucacuccc

SEQ ID NO: 4739 - RNA, 19 nt, Homo sapiens
gggcgccugugaucccaac

SEQ ID NO: 4740 - RNA, 19 nt, Homo sapiens
aggcugcggaauucaggac

SEQ ID NO: 4741 - RNA, 22 nt, Homo sapiens
gucccucuccaaaugugucuug

SEQ ID NO: 4742 - RNA, 23 nt, Homo sapiens
ugucacucggcucggcccacuac

SEQ ID NO: 4743 - RNA, 22 nt, Homo sapiens
acuccagccccacagccucagc

SEQ ID NO: 4744 - RNA, 22 nt, Homo sapiens
cucggcgcggggcgcgggcucc

SEQ ID NO: 4745 - RNA, 22 nt, Homo sapiens
gcccgcguguggagccaggugu

SEQ ID NO: 4746 - RNA, 23 nt, Homo sapiens
ucuggcuccgugucuucacuccc

SEQ ID NO: 4747 - RNA, 23 nt, Homo sapiens
cggcccgggcugcugcuguuccu

SEQ ID NO: 4748 - RNA, 23 nt, Homo sapiens
cggcccgggcugcugcuguuccu

SEQ ID NO: 4749 - RNA, 22 nt, Homo sapiens
uguaaacauccuacacucagcu

SEQ ID NO: 4750 - RNA, 23 nt, Homo sapiens
ucuuggaguaggucauugggugg

SEQ ID NO: 4751 - RNA, 21 nt, Homo sapiens
uggcagggaggcugggagggg

SEQ ID NO: 4752 - RNA, 18 nt, Homo sapiens
aucccaccucugccacca

SEQ ID NO: 4753 - RNA, 22 nt, Homo sapiens
uguaaacauccuacacucagcu

SEQ ID NO: 4754 - RNA, 22 nt, Homo sapiens
ccucccacacccaaggcuugca

SEQ ID NO: 4755 - RNA, 21 nt, Homo sapiens
cccggagccaggaugcagcuc

SEQ ID NO: 4756 - RNA, 22 nt, Homo sapiens
ugugagguuggcauuguugucu

SEQ ID NO: 4757 - RNA, 22 nt, Homo sapiens
ugugacugguugaccagagggg

SEQ ID NO: 4758 - RNA, 19 nt, Homo sapiens
aggcugcggaauucaggac

SEQ ID NO: 4759 - RNA, 21 nt, Homo sapiens
guggcugcacucacuuccuuc

SEQ ID NO: 4760 - RNA, 21 nt, Homo sapiens
cggcggggacggcgauugguc

SEQ ID NO: 4761 - RNA, 23 nt, Homo sapiens
ugaggggcagagagcgagacuuu

SEQ ID NO: 4762 - RNA, 19 nt, Homo sapiens
aggcugcggaauucaggac

SEQ ID NO: 4763 - RNA, 22 nt, Homo sapiens
aggcggggcgccgcgggaccgc

SEQ ID NO: 4764 - RNA, 22 nt, Homo sapiens
ugcggggcuagggcuaacagca

SEQ ID NO: 4765 - RNA, 21 nt, Homo sapiens
cccggagccaggaugcagcuc

SEQ ID NO: 4766 - RNA, 21 nt, Homo sapiens
uccugcgcgucccagaugccc

SEQ ID NO: 4767 - RNA, 22 nt, Homo sapiens
uccgagccugggucucccucuu

SEQ ID NO: 4768 - RNA, 22 nt, Homo sapiens
aggcagcgggguguaguggaua

SEQ ID NO: 4769 - RNA, 21 nt, Homo sapiens
cagcagcacacugugguuugu

SEQ ID NO: 4770 - RNA, 22 nt, Homo sapiens
caaagugccucccuuuagagug

SEQ ID NO: 4771 - RNA, 22 nt, Homo sapiens
uggagugugacaaugguguuug

SEQ ID NO: 4772 - RNA, 22 nt, Homo sapiens
ccucuuccccuugucucuccag

SEQ ID NO: 4773 - RNA, 22 nt, Homo sapiens
uaacacugucugguaaagaugg

SEQ ID NO: 4774 - RNA, 22 nt, Homo sapiens
aacuggccuacaaagucccagu

SEQ ID NO: 4775 - RNA, 22 nt, Homo sapiens
aacuggcccucaaagucccgcu

SEQ ID NO: 4776 - RNA, 22 nt, Homo sapiens
cauugcacuugucucggucuga

SEQ ID NO: 4777 - RNA, 23 nt, Homo sapiens
aaugacacgaucacucccguuga

SEQ ID NO: 4778 - RNA, 22 nt, Homo sapiens
uugggaucauuuugcauccaua

SEQ ID NO: 4779 - RNA, 22 nt, Homo sapiens
gucccucuccaaaugugucuug

SEQ ID NO: 4780 - RNA, 23 nt, Homo sapiens
cugggaucuccggggucuugguu

SEQ ID NO: 4781 - RNA, 22 nt, Homo sapiens
uuuagagacggggucuugcucu

SEQ ID NO: 4782 - RNA, 22 nt, Homo sapiens
ugcccuuaaaggugaacccagu

SEQ ID NO: 4783 - RNA, 20 nt, Homo sapiens
ggggagcuguggaagcagua

SEQ ID NO: 4784 - RNA, 23 nt, Homo sapiens
gcagcagagaauaggacuacguc

SEQ ID NO: 4785 - RNA, 25 nt, Homo sapiens
aggggugguguugggacagcuccgu

SEQ ID NO: 4786 - RNA, 21 nt, Homo sapiens
gugccagcugcagugggggag

SEQ ID NO: 4787 - RNA, 18 nt, Homo sapiens
ucagcuggcccucauuuc

SEQ ID NO: 4788 - RNA, 22 nt, Homo sapiens
ugagccccugugccgcccccag

SEQ ID NO: 4789 - RNA, 18 nt, Homo sapiens
aucccaccucugccacca

SEQ ID NO: 4790 - RNA, 17 nt, Homo sapiens
ucccaccgcugccaccc

SEQ ID NO: 4791 - RNA, 23 nt, Homo sapiens
ucuggcuccgugucuucacuccc

SEQ ID NO: 4792 - RNA, 22 nt, Homo sapiens
uggagagaaaggcaguuccuga

SEQ ID NO: 4793 - RNA, 21 nt, Homo sapiens
uaaagugcugacagugcagau

SEQ ID NO: 4794 - RNA, 23 nt, Homo sapiens
cagugcaaugauauugucaaagc

SEQ ID NO: 4795 - RNA, 22 nt, Homo sapiens
ccucccacacccaaggcuugca

SEQ ID NO: 4796 - RNA, 20 nt, Homo sapiens
cggcucugggucugugggga

SEQ ID NO: 4797 - RNA, 20 nt, Homo sapiens
ggggagcuguggaagcagua

SEQ ID NO: 4798 - RNA, 21 nt, Homo sapiens
uacucaaaaagcugucaguca

SEQ ID NO: 4799 - RNA, 23 nt, Homo sapiens
gcagcagagaauaggacuacguc

SEQ ID NO: 4800 - RNA, 23 nt, Homo sapiens
ugaguaccgccaugucuguuggg

SEQ ID NO: 4801 - RNA, 27 nt, Homo sapiens
accuucuuguauaagcacugugcuaaa

SEQ ID NO: 4802 - RNA, 24 nt, Homo sapiens
agccuggaagcuggagccugcagu

SEQ ID NO: 4803 - RNA, 23 nt, Homo sapiens
acuccauuuguuuugaugaugga

SEQ ID NO: 4804 - RNA, 21 nt, Homo sapiens
gcccuccgcccgugcaccccg

SEQ ID NO: 4805 - RNA, 23 nt, Homo sapiens
ucuggcuccgugucuucacuccc

SEQ ID NO: 4806 - RNA, 22 nt, Homo sapiens
ucaggccaggcacaguggcuca

SEQ ID NO: 4807 - RNA, 21 nt, Homo sapiens
cacauuacacggucgaccucu

SEQ ID NO: 4808 - RNA, 22 nt, Homo sapiens
cuggcccucucugcccuuccgu

SEQ ID NO: 4809 - RNA, 22 nt, Homo sapiens
uauguaauaugguccacaucuu

SEQ ID NO: 4810 - RNA, 24 nt, Homo sapiens
uggcccugacugaagaccagcagu

SEQ ID NO: 4811 - RNA, 22 nt, Homo sapiens
cuggcccucucugcccuuccgu

SEQ ID NO: 4812 - RNA, 20 nt, Homo sapiens
gugcauugcuguugcauugc

SEQ ID NO: 4813 - RNA, 22 nt, Homo sapiens
gagugccuucuuuuggagcguu

SEQ ID NO: 4814 - RNA, 22 nt, Homo sapiens
aagugccuccuuuuagaguguu

SEQ ID NO: 4815 - RNA, 21 nt, Homo sapiens
ugcaggaccaagaugagcccu

SEQ ID NO: 4816 - RNA, 18 nt, Homo sapiens
cagggaggugaaugugau

SEQ ID NO: 4817 - RNA, 22 nt, Homo sapiens
aguggggaacccuuccaugagg

SEQ ID NO: 4818 - RNA, 25 nt, Homo sapiens
aggggugguguugggacagcuccgu

SEQ ID NO: 4819 - RNA, 24 nt, Homo sapiens
ugccugggucucuggccugcgcgu

SEQ ID NO: 4820 - RNA, 21 nt, Homo sapiens
uggaggagaaggaaggugaug

SEQ ID NO: 4821 - RNA, 20 nt, Homo sapiens
ggggagcuguggaagcagua

SEQ ID NO: 4822 - RNA, 22 nt, Homo sapiens
aacccguagauccgaucuugug

SEQ ID NO: 4823 - RNA, 22 nt, Homo sapiens
cacccguagaaccgaccuugcg

SEQ ID NO: 4824 - RNA, 21 nt, Homo sapiens
ugcaggaccaagaugagcccu

SEQ ID NO: 4825 - RNA, 22 nt, Homo sapiens
uagcagcacauaaugguuugug

SEQ ID NO: 4826 - RNA, 22 nt, Homo sapiens
uagcagcacaucaugguuuaca

SEQ ID NO: 4827 - RNA, 22 nt, Homo sapiens
uagcagcacguaaauauuggcg

SEQ ID NO: 4828 - RNA, 21 nt, Homo sapiens
uagcagcacagaaauauuggc

SEQ ID NO: 4829 - RNA, 22 nt, Homo sapiens
cagcagcaauucauguuuugaa

SEQ ID NO: 4830 - RNA, 21 nt, Homo sapiens
cagcagcacacugugguuugu

SEQ ID NO: 4831 - RNA, 23 nt, Homo sapiens
aaggagcuuacaaucuagcuggg

SEQ ID NO: 4832 - RNA, 25 nt, Homo sapiens
ggcggagggaaguagguccguuggu

SEQ ID NO: 4833 - RNA, 23 nt, Homo sapiens
ucaagagcaauaacgaaaaaugu

SEQ ID NO: 4834 - RNA, 23 nt, Homo sapiens
ucuggcuccgugucuucacuccc

SEQ ID NO: 4835 - RNA, 22 nt, Homo sapiens
uacucaggagaguggcaaucac

SEQ ID NO: 4836 - RNA, 20 nt, Homo sapiens
uaaggcacgcggugaaugcc

SEQ ID NO: 4837 - RNA, 22 nt, Homo sapiens
cucuagagggaagcacuuucug

SEQ ID NO: 4838 - RNA, 21 nt, Homo sapiens
aaagcgcuucccuucagagug

SEQ ID NO: 4839 - RNA, 21 nt, Homo sapiens
gaaagcgcuucucuuuagagg

SEQ ID NO: 4840 - RNA, 22 nt, Homo sapiens
aaagugcauccuuuuagagugu

SEQ ID NO: 4841 - RNA, 22 nt, Homo sapiens
cucuagagggaagcgcuuucug

SEQ ID NO: 4842 - RNA, 22 nt, Homo sapiens
cucuagagggaagcgcuuucug

SEQ ID NO: 4843 - RNA, 22 nt, Homo sapiens
cucuagagggaagcacuuucug

SEQ ID NO: 4844 - RNA, 22 nt, Homo sapiens
aaaaugguucccuuuagagugu

SEQ ID NO: 4845 - RNA, 23 nt, Homo sapiens
gaacgcgcuucccuauagagggu

SEQ ID NO: 4846 - RNA, 22 nt, Homo sapiens
cucuagagggaagcacuuucug

SEQ ID NO: 4847 - RNA, 22 nt, Homo sapiens
uggcucaguucagcaggaacag

SEQ ID NO: 4848 - RNA, 24 nt, Homo sapiens
ucccugagacccuuuaaccuguga

SEQ ID NO: 4849 - RNA, 22 nt, Homo sapiens
ucccugagacccuaacuuguga

SEQ ID NO: 4850 - RNA, 23 nt, Homo sapiens
ccucagggcuguagaacagggcu

SEQ ID NO: 4851 - RNA, 22 nt, Homo sapiens
gguccagaggggagauagguuc

SEQ ID NO: 4852 - RNA, 21 nt, Homo sapiens
cuccagagggaaguacuuucu

SEQ ID NO: 4853 - RNA, 21 nt, Homo sapiens
cuccagagggaugcacuuucu

SEQ ID NO: 4854 - RNA, 22 nt, Homo sapiens
ugagccccugugccgcccccag

SEQ ID NO: 4855 - RNA, 22 nt, Homo sapiens
uuagggcccuggcuccaucucc

SEQ ID NO: 4856 - RNA, 21 nt, Homo sapiens
cauaaaguagaaagcacuacu

SEQ ID NO: 4857 - RNA, 22 nt, Homo sapiens
uggagagaaaggcaguuccuga

SEQ ID NO: 4858 - RNA, 21 nt, Homo sapiens
cggcggggacggcgauugguc

SEQ ID NO: 4859 - RNA, 21 nt, Homo sapiens
agggcccccccucaauccugu

SEQ ID NO: 4860 - RNA, 22 nt, Homo sapiens
uuauaaagcaaugagacugauu

SEQ ID NO: 4861 - RNA, 23 nt, Homo sapiens
ucccccaggugugauucugauuu

SEQ ID NO: 4862 - RNA, 21 nt, Homo sapiens
uuuccauaggugaugagucac

SEQ ID NO: 4863 - RNA, 24 nt, Homo sapiens
acugggggcuuucgggcucugcgu

SEQ ID NO: 4864 - RNA, 22 nt, Homo sapiens
aggcggggcgccgcgggaccgc

SEQ ID NO: 4865 - RNA, 23 nt, Homo sapiens
aggaagcccuggaggggcuggag

SEQ ID NO: 4866 - RNA, 22 nt, Homo sapiens
acccgucccguucguccccgga

SEQ ID NO: 4867 - RNA, 23 nt, Homo sapiens
ucuggcuccgugucuucacuccc

SEQ ID NO: 4868 - RNA, 23 nt, Homo sapiens
ucuggcuccgugucuucacuccc

SEQ ID NO: 4869 - RNA, 21 nt, Homo sapiens
uccugcgcgucccagaugccc

SEQ ID NO: 4870 - RNA, 21 nt, Homo sapiens
cggcggggacggcgauugguc

SEQ ID NO: 4871 - RNA, 21 nt, Homo sapiens
agggcccccccucaauccugu

SEQ ID NO: 4872 - RNA, 21 nt, Homo sapiens
agggcccccccucaauccugu

SEQ ID NO: 4873 - RNA, 23 nt, Homo sapiens
ucccccaggugugauucugauuu

SEQ ID NO: 4874 - RNA, 25 nt, Homo sapiens
aggggugguguugggacagcuccgu

SEQ ID NO: 4875 - RNA, 24 nt, Homo sapiens
acugggggcuuucgggcucugcgu

SEQ ID NO: 4876 - RNA, 22 nt, Homo sapiens
aggcggggcgccgcgggaccgc

SEQ ID NO: 4877 - RNA, 22 nt, Homo sapiens
ugcggggcuagggcuaacagca

SEQ ID NO: 4878 - RNA, 20 nt, Homo sapiens
ggggagcuguggaagcagua

SEQ ID NO: 4879 - RNA, 22 nt, Homo sapiens
uauugcacucgucccggccucc

SEQ ID NO: 4880 - RNA, 23 nt, Homo sapiens
uacccuguagauccgaauuugug

SEQ ID NO: 4881 - RNA, 23 nt, Homo sapiens
uacccuguagaaccgaauuugug

SEQ ID NO: 4882 - RNA, 20 nt, Homo sapiens
ucacaccugccucgcccccc

SEQ ID NO: 4883 - RNA, 24 nt, Homo sapiens
ucccugagacccuuuaaccuguga

SEQ ID NO: 4884 - RNA, 22 nt, Homo sapiens
ucccugagacccuaacuuguga

SEQ ID NO: 4885 - RNA, 23 nt, Homo sapiens
ccucagggcuguagaacagggcu

SEQ ID NO: 4886 - RNA, 22 nt, Homo sapiens
cucccacugcuucacuugacua

SEQ ID NO: 4887 - RNA, 23 nt, Homo sapiens
ucccuguccuccaggagcucacg

SEQ ID NO: 4888 - RNA, 22 nt, Homo sapiens
uugggaucauuuugcauccaua

SEQ ID NO: 4889 - RNA, 22 nt, Homo sapiens
uccuguacugagcugccccgag

SEQ ID NO: 4890 - RNA, 21 nt, Homo sapiens
auccuugcuaucugggugcua

SEQ ID NO: 4891 - RNA, 22 nt, Homo sapiens
agacccuggucugcacucuauc

SEQ ID NO: 4892 - RNA, 22 nt, Homo sapiens
uacucaggagaguggcaaucac

SEQ ID NO: 4893 - RNA, 22 nt, Homo sapiens
aucuggagguaagaagcacuuu

SEQ ID NO: 4894 - RNA, 23 nt, Homo sapiens
caaagcgcuucucuuuagagugu

SEQ ID NO: 4895 - RNA, 21 nt, Homo sapiens
cuccagagggaaguacuuucu

SEQ ID NO: 4896 - RNA, 21 nt, Homo sapiens
cuccagagggaugcacuuucu

SEQ ID NO: 4897 - RNA, 23 nt, Homo sapiens
cugggaucuccggggucuugguu

SEQ ID NO: 4898 - RNA, 18 nt, Homo sapiens
ucagcuggcccucauuuc

SEQ ID NO: 4899 - RNA, 22 nt, Homo sapiens
uggagugugacaaugguguuug

SEQ ID NO: 4900 - RNA, 21 nt, Homo sapiens
uccuucugcuccgucccccag

SEQ ID NO: 4901 - RNA, 24 nt, Homo sapiens
ucccugagacccuuuaaccuguga

SEQ ID NO: 4902 - RNA, 22 nt, Homo sapiens
ucccugagacccuaacuuguga

SEQ ID NO: 4903 - RNA, 23 nt, Homo sapiens
ccucagggcuguagaacagggcu

SEQ ID NO: 4904 - RNA, 20 nt, Homo sapiens
ccuccugcccuccuugcugu

SEQ ID NO: 4905 - RNA, 22 nt, Homo sapiens
uuggggaaacggccgcugagug

SEQ ID NO: 4906 - RNA, 21 nt, Homo sapiens
auuugugcuuggcucugucac

SEQ ID NO: 4907 - RNA, 23 nt, Homo sapiens
agcuacauugucugcuggguuuc

SEQ ID NO: 4908 - RNA, 22 nt, Homo sapiens
cauugcacuugucucggucuga

SEQ ID NO: 4909 - RNA, 24 nt, Homo sapiens
agcagaagcagggagguucuccca

SEQ ID NO: 4910 - RNA, 22 nt, Homo sapiens
uggcaguguauuguuagcuggu

SEQ ID NO: 4911 - RNA, 22 nt, Homo sapiens
ugaguauuacauggccaaucuc

SEQ ID NO: 4912 - RNA, 23 nt, Homo sapiens
cacucagccuugagggcacuuuc

SEQ ID NO: 4913 - RNA, 22 nt, Homo sapiens
auucugcauuuuuagcaaguuc

SEQ ID NO: 4914 - RNA, 23 nt, Homo sapiens
uggaagacuagugauuuuguugu

SEQ ID NO: 4915 - RNA, 22 nt, Homo sapiens
cugcccuggcccgagggaccga

SEQ ID NO: 4916 - RNA, 21 nt, Homo sapiens
ccccaccuccucucuccucag

SEQ ID NO: 4917 - RNA, 19 nt, Homo sapiens
gugaggacucgggaggugg

SEQ ID NO: 4918 - RNA, 20 nt, Homo sapiens
cuuccucgucugucugcccc

SEQ ID NO: 4919 - RNA, 21 nt, Homo sapiens
ugagaugaagcacuguagcuc

SEQ ID NO: 4920 - RNA, 20 nt, Homo sapiens
ccucugggcccuuccuccag

SEQ ID NO: 4921 - RNA, 22 nt, Homo sapiens
ucucugggccugugucuuaggc

SEQ ID NO: 4922 - RNA, 23 nt, Homo sapiens
ucucacacagaaaucgcacccgu

SEQ ID NO: 4923 - RNA, 22 nt, Homo sapiens
aguggggaacccuuccaugagg

SEQ ID NO: 4924 - RNA, 21 nt, Homo sapiens
aacaggugacugguuagacaa

SEQ ID NO: 4925 - RNA, 21 nt, Homo sapiens
ugaguuggccaucugagugag

SEQ ID NO: 4926 - RNA, 22 nt, Homo sapiens
ggggguccccggugcucggauc

SEQ ID NO: 4927 - RNA, 21 nt, Homo sapiens
uggaggagaaggaaggugaug

SEQ ID NO: 4928 - RNA, 20 nt, Homo sapiens
ggggagcuguggaagcagua

SEQ ID NO: 4929 - RNA, 22 nt, Homo sapiens
ucuucucuguuuuggccaugug

SEQ ID NO: 4930 - RNA, 21 nt, Homo sapiens
uggaggagaaggaaggugaug

SEQ ID NO: 4931 - RNA, 21 nt, Homo sapiens
ugagcuaaaugugugcuggga

SEQ ID NO: 4932 - RNA, 18 nt, Homo sapiens
cagggaggugaaugugau

SEQ ID NO: 4933 - RNA, 23 nt, Homo sapiens
ucuggcuccgugucuucacuccc

SEQ ID NO: 4934 - RNA, 22 nt, Homo sapiens
uagguuauccguguugccuucg

SEQ ID NO: 4935 - RNA, 21 nt, Homo sapiens
cucccacaugcaggguuugca

SEQ ID NO: 4936 - RNA, 22 nt, Homo sapiens
uucccuuugucauccuaugccu

SEQ ID NO: 4937 - RNA, 22 nt, Homo sapiens
cugugcgugugacagcggcuga

SEQ ID NO: 4938 - RNA, 22 nt, Homo sapiens
uucccuuugucauccuucgccu

SEQ ID NO: 4939 - RNA, 22 nt, Homo sapiens
cuggcccucucugcccuuccgu

SEQ ID NO: 4940 - RNA, 22 nt, Homo sapiens
uaugugccuuuggacuacaucg

SEQ ID NO: 4941 - RNA, 23 nt, Homo sapiens
acuugggcacugaaacaaugucc

SEQ ID NO: 4942 - RNA, 21 nt, Homo sapiens
aggaggcagcgcucucaggac

SEQ ID NO: 4943 - RNA, 23 nt, Homo sapiens
ggcagguucucacccucucuagg

SEQ ID NO: 4944 - RNA, 23 nt, Homo sapiens
aaggagcuuacaaucuagcuggg

SEQ ID NO: 4945 - RNA, 18 nt, Homo sapiens
aucccaccucugccacca

SEQ ID NO: 4946 - RNA, 22 nt, Homo sapiens
ccucccacacccaaggcuugca

SEQ ID NO: 4947 - RNA, 20 nt, Homo sapiens
uaaggcacgcggugaaugcc

SEQ ID NO: 4948 - RNA, 21 nt, Homo sapiens
uaaggcacccuucugaguaga

SEQ ID NO: 4949 - RNA, 24 nt, Homo sapiens
ccagacagaauucuaugcacuuuc

SEQ ID NO: 4950 - RNA, 20 nt, Homo sapiens
guagaggagauggcgcaggg

SEQ ID NO: 4951 - RNA, 26 nt, Homo sapiens
aaguaguugguuuguaugagaugguu

SEQ ID NO: 4952 - RNA, 21 nt, Homo sapiens
agggcccccccucaauccugu

SEQ ID NO: 4953 - RNA, 23 nt, Homo sapiens
agcucggucugaggccccucagu

SEQ ID NO: 4954 - RNA, 22 nt, Homo sapiens
uucucaaggaggugucguuuau

SEQ ID NO: 4955 - RNA, 23 nt, Homo sapiens
cucuugagggaagcacuuucugu

SEQ ID NO: 4956 - RNA, 22 nt, Homo sapiens
uugagaaugaugaaucauuagg

SEQ ID NO: 4957 - RNA, 23 nt, Homo sapiens
acuugggcacugaaacaaugucc

SEQ ID NO: 4958 - RNA, 21 nt, Homo sapiens
gaaggcgcuucccuuuggagu

SEQ ID NO: 4959 - RNA, 22 nt, Homo sapiens
acaguagucugcacauugguua

SEQ ID NO: 4960 - RNA, 22 nt, Homo sapiens
acaguagucugcacauugguua

SEQ ID NO: 4961 - RNA, 17 nt, Homo sapiens
ucgccuccuccucuccc

SEQ ID NO: 4962 - RNA, 22 nt, Homo sapiens
aaggagcucacagucuauugag

SEQ ID NO: 4963 - RNA, 22 nt, Homo sapiens
gagcuuauucauaaaagugcag

SEQ ID NO: 4964 - RNA, 23 nt, Homo sapiens
aaggagcuuacaaucuagcuggg

SEQ ID NO: 4965 - RNA, 21 nt, Homo sapiens
cugaccuaugaauugacagcc

SEQ ID NO: 4966 - RNA, 23 nt, Homo sapiens
uauucauuuauccccagccuaca

SEQ ID NO: 4967 - RNA, 22 nt, Homo sapiens
cgucaacacuugcugguuuccu

SEQ ID NO: 4968 - RNA, 25 nt, Homo sapiens
aggggugguguugggacagcuccgu

SEQ ID NO: 4969 - RNA, 23 nt, Homo sapiens
ucuggcuccgugucuucacuccc

SEQ ID NO: 4970 - RNA, 21 nt, Homo sapiens
cggcggggacggcgauugguc

SEQ ID NO: 4971 - RNA, 23 nt, Homo sapiens
uacuccagagggcgucacucaug

SEQ ID NO: 4972 - RNA, 22 nt, Homo sapiens
aggcggggcgccgcgggaccgc

SEQ ID NO: 4973 - RNA, 24 nt, Homo sapiens
uggggagcugaggcucugggggug

SEQ ID NO: 4974 - RNA, 22 nt, Homo sapiens
aucacacaaaggcaacuuuugu

SEQ ID NO: 4975 - RNA, 23 nt, Homo sapiens
cacucagccuugagggcacuuuc

SEQ ID NO: 4976 - RNA, 24 nt, Homo sapiens
gaccuggacauguuugugcccagu

SEQ ID NO: 4977 - RNA, 23 nt, Homo sapiens
ucucacacagaaaucgcacccgu

SEQ ID NO: 4978 - RNA, 20 nt, Homo sapiens
accaggaggcugaggccccu

SEQ ID NO: 4979 - RNA, 22 nt, Homo sapiens
uucuggaauucugugugaggga

SEQ ID NO: 4980 - RNA, 22 nt, Homo sapiens
aagcccuuaccccaaaaagcau

SEQ ID NO: 4981 - RNA, 18 nt, Homo sapiens
ugaggcaguagauugaau

SEQ ID NO: 4982 - RNA, 21 nt, Homo sapiens
aggaggcagcgcucucaggac

SEQ ID NO: 4983 - RNA, 21 nt, Homo sapiens
aaggcagggcccccgcucccc

SEQ ID NO: 4984 - RNA, 23 nt, Homo sapiens
cgcauccccuagggcauuggugu

SEQ ID NO: 4985 - RNA, 21 nt, Homo sapiens
gugcauuguaguugcauugca

SEQ ID NO: 4986 - RNA, 22 nt, Homo sapiens
cucccacugcuucacuugacua

SEQ ID NO: 4987 - RNA, 20 nt, Homo sapiens
guguguggaaaugcuucugc

SEQ ID NO: 4988 - RNA, 20 nt, Homo sapiens
acucaaacugugggggcacu

SEQ ID NO: 4989 - RNA, 21 nt, Homo sapiens
cccggagccaggaugcagcuc

SEQ ID NO: 4990 - RNA, 22 nt, Homo sapiens
uggagagaaaggcaguuccuga

SEQ ID NO: 4991 - RNA, 22 nt, Homo sapiens
uacccagagcaugcagugugaa

SEQ ID NO: 4992 - RNA, 23 nt, Homo sapiens
caacggaaucccaaaagcagcug

SEQ ID NO: 4993 - RNA, 21 nt, Homo sapiens
ccaccaccgugucugacacuu

SEQ ID NO: 4994 - RNA, 23 nt, Homo sapiens
ucccccaggugugauucugauuu

SEQ ID NO: 4995 - RNA, 19 nt, Homo sapiens
aggcugcggaauucaggac

SEQ ID NO: 4996 - RNA, 21 nt, Homo sapiens
ugagcuaaaugugugcuggga

SEQ ID NO: 4997 - RNA, 24 nt, Homo sapiens
acugggggcuuucgggcucugcgu

SEQ ID NO: 4998 - RNA, 21 nt, Homo sapiens
guggcugcacucacuuccuuc

SEQ ID NO: 4999 - RNA, 23 nt, Homo sapiens
ugucacucggcucggcccacuac

SEQ ID NO: 5000 - RNA, 23 nt, Homo sapiens
cgggucggaguuagcucaagcgg

SEQ ID NO: 5001 - RNA, 22 nt, Homo sapiens
uggagugugacaaugguguuug

SEQ ID NO: 5002 - RNA, 27 nt, Homo sapiens
accuucuuguauaagcacugugcuaaa

SEQ ID NO: 5003 - RNA, 23 nt, Homo sapiens
ucuggcuccgugucuucacuccc

SEQ ID NO: 5004 - RNA, 22 nt, Homo sapiens
uccuucauuccaccggagucug

SEQ ID NO: 5005 - RNA, 21 nt, Homo sapiens
acuggacuuggagucagaagg

SEQ ID NO: 5006 - RNA, 22 nt, Homo sapiens
cgucaacacuugcugguuuccu

SEQ ID NO: 5007 - RNA, 19 nt, Homo sapiens
ugucucugcugggguuucu

SEQ ID NO: 5008 - RNA, 23 nt, Homo sapiens
cacccggcugugugcacaugugc

SEQ ID NO: 5009 - RNA, 18 nt, Homo sapiens
acguuggcucugguggug

SEQ ID NO: 5010 - RNA, 23 nt, Homo sapiens
ucuggcuccgugucuucacuccc

SEQ ID NO: 5011 - RNA, 21 nt, Homo sapiens
ucgaggagcucacagucuagu

SEQ ID NO: 5012 - RNA, 22 nt, Homo sapiens
uggagagaaaggcaguuccuga

SEQ ID NO: 5013 - RNA, 21 nt, Homo sapiens
cggcggggacggcgauugguc

SEQ ID NO: 5014 - RNA, 22 nt, Homo sapiens
cccugugcccggcccacuucug

SEQ ID NO: 5015 - RNA, 22 nt, Homo sapiens
aagcugccaguugaagaacugu

SEQ ID NO: 5016 - RNA, 19 nt, Homo sapiens
ugagcugcuguaccaaaau

SEQ ID NO: 5017 - RNA, 19 nt, Homo sapiens
gggcgccugugaucccaac

SEQ ID NO: 5018 - RNA, 22 nt, Homo sapiens
aggcggggcgccgcgggaccgc

SEQ ID NO: 5019 - RNA, 23 nt, Homo sapiens
cgggucggaguuagcucaagcgg

SEQ ID NO: 5020 - RNA, 20 nt, Homo sapiens
ggggagcuguggaagcagua

SEQ ID NO: 5021 - RNA, 22 nt, Homo sapiens
uggagugugacaaugguguuug

SEQ ID NO: 5022 - RNA, 21 nt, Homo sapiens
agugaaugauggguucugacc

SEQ ID NO: 5023 - RNA, 24 nt, Homo sapiens
ucccugagacccuuuaaccuguga

SEQ ID NO: 5024 - RNA, 22 nt, Homo sapiens
ucccugagacccuaacuuguga

SEQ ID NO: 5025 - RNA, 23 nt, Homo sapiens
ccucagggcuguagaacagggcu

SEQ ID NO: 5026 - RNA, 24 nt, Homo sapiens
uggcccugacugaagaccagcagu

SEQ ID NO: 5027 - RNA, 22 nt, Homo sapiens
uuugaggcuacagugagaugug

SEQ ID NO: 5028 - RNA, 22 nt, Homo sapiens
uggagagaaaggcaguuccuga

SEQ ID NO: 5029 - RNA, 22 nt, Homo sapiens
caaagaauucuccuuuugggcu

SEQ ID NO: 5030 - RNA, 21 nt, Homo sapiens
cggcggggacggcgauugguc

SEQ ID NO: 5031 - RNA, 22 nt, Homo sapiens
agaggcuggccgugaugaauuc

SEQ ID NO: 5032 - RNA, 24 nt, Homo sapiens
acaaagugcuucccuuuagagugu

SEQ ID NO: 5033 - RNA, 22 nt, Homo sapiens
acaaagugcuucccuuuagagu

SEQ ID NO: 5034 - RNA, 22 nt, Homo sapiens
uggucuaggauuguuggaggag

SEQ ID NO: 5035 - RNA, 22 nt, Homo sapiens
aaccagcaccccaacuuuggac

SEQ ID NO: 5036 - RNA, 22 nt, Homo sapiens
aggcggggcgccgcgggaccgc

SEQ ID NO: 5037 - RNA, 22 nt, Homo sapiens
ugcggggcuagggcuaacagca

SEQ ID NO: 5038 - RNA, 22 nt, Homo sapiens
agaggcuggccgugaugaauuc

SEQ ID NO: 5039 - RNA, 19 nt, Homo sapiens
aggcugcggaauucaggac

SEQ ID NO: 5040 - RNA, 23 nt, Homo sapiens
cuggagauauggaagagcugugu

SEQ ID NO: 5041 - RNA, 17 nt, Homo sapiens
ucauauugcuucuuucu

SEQ ID NO: 5042 - RNA, 22 nt, Homo sapiens
cugugcgugugacagcggcuga

SEQ ID NO: 5043 - RNA, 22 nt, Homo sapiens
uuggggaaacggccgcugagug

SEQ ID NO: 5044 - RNA, 22 nt, Homo sapiens
uaaucucagcuggcaacuguga

SEQ ID NO: 5045 - RNA, 23 nt, Homo sapiens
ucaagagcaauaacgaaaaaugu

SEQ ID NO: 5046 - RNA, 22 nt, Homo sapiens
cgaaaacagcaauuaccuuugc

SEQ ID NO: 5047 - RNA, 21 nt, Homo sapiens
uagauaaaauauugguaccug

SEQ ID NO: 5048 - RNA, 23 nt, Homo sapiens
uucauuugguauaaaccgcgauu

SEQ ID NO: 5049 - RNA, 20 nt, Homo sapiens
auggagauagauauagaaau

SEQ ID NO: 5050 - RNA, 21 nt, Homo sapiens
cugacuguugccguccuccag

SEQ ID NO: 5051 - RNA, 22 nt, Homo sapiens
cccugugcccggcccacuucug

SEQ ID NO: 5052 - RNA, 22 nt, Homo sapiens
uagcagcacauaaugguuugug

SEQ ID NO: 5053 - RNA, 22 nt, Homo sapiens
uagcagcacaucaugguuuaca

SEQ ID NO: 5054 - RNA, 22 nt, Homo sapiens
uagcagcacguaaauauuggcg

SEQ ID NO: 5055 - RNA, 21 nt, Homo sapiens
uagcagcacagaaauauuggc

SEQ ID NO: 5056 - RNA, 22 nt, Homo sapiens
acagcaggcacagacaggcagu

SEQ ID NO: 5057 - RNA, 22 nt, Homo sapiens
cagcagcaauucauguuuugaa

SEQ ID NO: 5058 - RNA, 21 nt, Homo sapiens
cagcagcacacugugguuugu

SEQ ID NO: 5059 - RNA, 22 nt, Homo sapiens
gcugacuccuaguccagggcuc

SEQ ID NO: 5060 - RNA, 21 nt, Homo sapiens
ucgaggagcucacagucuagu

SEQ ID NO: 5061 - RNA, 21 nt, Homo sapiens
cggcggggacggcgauugguc

SEQ ID NO: 5062 - RNA, 22 nt, Homo sapiens
ucugcccccuccgcugcugcca

SEQ ID NO: 5063 - RNA, 25 nt, Homo sapiens
cccccacaaccgcgcuugacuagcu

SEQ ID NO: 5064 - RNA, 21 nt, Homo sapiens
agggcccccccucaauccugu

SEQ ID NO: 5065 - RNA, 20 nt, Homo sapiens
acugccccaggugcugcugg

SEQ ID NO: 5066 - RNA, 21 nt, Homo sapiens
cggggcagcucaguacaggau

SEQ ID NO: 5067 - RNA, 19 nt, Homo sapiens
aggcacggugucagcaggc

SEQ ID NO: 5068 - RNA, 22 nt, Homo sapiens
aggcagcgggguguaguggaua

SEQ ID NO: 5069 - RNA, 21 nt, Homo sapiens
uugcucacuguucuucccuag

SEQ ID NO: 5070 - RNA, 18 nt, Homo sapiens
cgggcguggugguggggg

SEQ ID NO: 5071 - RNA, 17 nt, Homo sapiens
ucgccuccuccucuccc

SEQ ID NO: 5072 - RNA, 21 nt, Homo sapiens
gcccuccgcccgugcaccccg

SEQ ID NO: 5073 - RNA, 23 nt, Homo sapiens
ucuggcuccgugucuucacuccc

SEQ ID NO: 5074 - RNA, 23 nt, Homo sapiens
uagcagcgggaacaguucugcag

SEQ ID NO: 5075 - RNA, 23 nt, Homo sapiens
ucugcucauaccccaugguuucu

SEQ ID NO: 5076 - RNA, 22 nt, Homo sapiens
uucaacggguauuuauugagca

SEQ ID NO: 5077 - RNA, 22 nt, Homo sapiens
cagugcaaugaugaaagggcau

SEQ ID NO: 5078 - RNA, 23 nt, Homo sapiens
guccaguuuucccaggaaucccu

SEQ ID NO: 5079 - RNA, 22 nt, Homo sapiens
caaagaauucuccuuuugggcu

SEQ ID NO: 5080 - RNA, 23 nt, Homo sapiens
uaaggugcaucuagugcaguuag

SEQ ID NO: 5081 - RNA, 22 nt, Homo sapiens
gauuagggugcuuagcuguuaa

SEQ ID NO: 5082 - RNA, 22 nt, Homo sapiens
uaaugccccuaaaaauccuuau

SEQ ID NO: 5083 - RNA, 22 nt, Homo sapiens
aaaaguauuugcggguuuuguc

SEQ ID NO: 5084 - RNA, 23 nt, Homo sapiens
uauucauuuauccccagccuaca

SEQ ID NO: 5085 - RNA, 22 nt, Homo sapiens
ucuucucuguuuuggccaugug

SEQ ID NO: 5086 - RNA, 22 nt, Homo sapiens
uggagugugacaaugguguuug

SEQ ID NO: 5087 - RNA, 21 nt, Homo sapiens
uaccacaggguagaaccacgg

SEQ ID NO: 5088 - RNA, 21 nt, Homo sapiens
cggcggggacggcgauugguc

SEQ ID NO: 5089 - RNA, 21 nt, Homo sapiens
aaagcgcuucccuucagagug

SEQ ID NO: 5090 - RNA, 23 nt, Homo sapiens
aucgcugcgguugcgagcgcugu

SEQ ID NO: 5091 - RNA, 22 nt, Homo sapiens
aggcggggcgccgcgggaccgc

SEQ ID NO: 5092 - RNA, 17 nt, Homo sapiens
ucucgcuggggccucca

SEQ ID NO: 5093 - RNA, 22 nt, Homo sapiens
ugcggggcuagggcuaacagca

SEQ ID NO: 5094 - RNA, 22 nt, Homo sapiens
aggcagcgggguguaguggaua

SEQ ID NO: 5095 - RNA, 24 nt, Homo sapiens
uggggagcugaggcucugggggug

SEQ ID NO: 5096 - RNA, 21 nt, Homo sapiens
uaaagugcugacagugcagau

SEQ ID NO: 5097 - RNA, 21 nt, Homo sapiens
ccgucgccgccacccgagccg

SEQ ID NO: 5098 - RNA, 20 nt, Homo sapiens
ucugcaggguuugcuuugag

SEQ ID NO: 5099 - RNA, 20 nt, Homo sapiens
ucugcaggguuugcuuugag

SEQ ID NO: 5100 - RNA, 22 nt, Homo sapiens
ucguaccgugaguaauaaugcg

SEQ ID NO: 5101 - RNA, 22 nt, Homo sapiens
augguacccuggcauacugagu

SEQ ID NO: 5102 - RNA, 24 nt, Homo sapiens
uggcccugacugaagaccagcagu

SEQ ID NO: 5103 - RNA, 21 nt, Homo sapiens
ugagaugaagcacuguagcuc

SEQ ID NO: 5104 - RNA, 22 nt, Homo sapiens
ucagugcacuacagaacuuugu

SEQ ID NO: 5105 - RNA, 22 nt, Homo sapiens
ucagugcaucacagaacuuugu

SEQ ID NO: 5106 - RNA, 21 nt, Homo sapiens
ucagugcaugacagaacuugg

SEQ ID NO: 5107 - RNA, 21 nt, Homo sapiens
uccugcgcgucccagaugccc

SEQ ID NO: 5108 - RNA, 22 nt, Homo sapiens
cgcaggggccgggugcucaccg

SEQ ID NO: 5109 - RNA, 20 nt, Homo sapiens
ccuccugcccuccuugcugu

SEQ ID NO: 5110 - RNA, 23 nt, Homo sapiens
ugagcgccucgacgacagagccg

SEQ ID NO: 5111 - RNA, 22 nt, Homo sapiens
uuauaaagcaaugagacugauu

SEQ ID NO: 5112 - RNA, 22 nt, Homo sapiens
aggcagcgggguguaguggaua

SEQ ID NO: 5113 - RNA, 22 nt, Homo sapiens
ugugcgcagggagaccucuccc

SEQ ID NO: 5114 - RNA, 21 nt, Homo sapiens
ccccaccuccucucuccucag

SEQ ID NO: 5115 - RNA, 21 nt, Homo sapiens
ccccaccuccucucuccucag

SEQ ID NO: 5116 - RNA, 20 nt, Homo sapiens
ugagcccuguccucccgcag

SEQ ID NO: 5117 - RNA, 22 nt, Homo sapiens
cucuagagggaagcacuuucug

SEQ ID NO: 5118 - RNA, 22 nt, Homo sapiens
uguaacagcaacuccaugugga

SEQ ID NO: 5119 - RNA, 22 nt, Homo sapiens
cucccacugcuucacuugacua

SEQ ID NO: 5120 - RNA, 22 nt, Homo sapiens
caaucacuaacuccacugccau

SEQ ID NO: 5121 - RNA, 22 nt, Homo sapiens
aagugcugucauagcugagguc

SEQ ID NO: 5122 - RNA, 22 nt, Homo sapiens
ccucccacacccaaggcuugca

SEQ ID NO: 5123 - RNA, 22 nt, Homo sapiens
uggugggcacagaaucuggacu

SEQ ID NO: 5124 - RNA, 21 nt, Homo sapiens
ugacaacuauggaugagcucu

SEQ ID NO: 5125 - RNA, 22 nt, Homo sapiens
uggugggccgcagaacaugugc

SEQ ID NO: 5126 - RNA, 21 nt, Homo sapiens
uacucaaaaagcugucaguca

SEQ ID NO: 5127 - RNA, 20 nt, Homo sapiens
ggggagcuguggaagcagua

SEQ ID NO: 5128 - RNA, 18 nt, Homo sapiens
ugaggcaguagauugaau

SEQ ID NO: 5129 - RNA, 23 nt, Homo sapiens
ucaaaugcucagacuccuguggu

SEQ ID NO: 5130 - RNA, 24 nt, Homo sapiens
ucccugagacccuuuaaccuguga

SEQ ID NO: 5131 - RNA, 22 nt, Homo sapiens
ucccugagacccuaacuuguga

SEQ ID NO: 5132 - RNA, 23 nt, Homo sapiens
ccucagggcuguagaacagggcu

SEQ ID NO: 5133 - RNA, 23 nt, Homo sapiens
ucuggcuccgugucuucacuccc

SEQ ID NO: 5134 - RNA, 21 nt, Homo sapiens
gccccugggccuauccuagaa

SEQ ID NO: 5135 - RNA, 22 nt, Homo sapiens
uaaugccccuaaaaauccuuau

SEQ ID NO: 5136 - RNA, 22 nt, Homo sapiens
aggcaguguauuguuagcuggc

SEQ ID NO: 5137 - RNA, 22 nt, Homo sapiens
uacucaggagaguggcaaucac

SEQ ID NO: 5138 - RNA, 22 nt, Homo sapiens
guggguacggcccagugggggg

SEQ ID NO: 5139 - RNA, 22 nt, Homo sapiens
cagugcaauguuaaaagggcau

SEQ ID NO: 5140 - RNA, 22 nt, Homo sapiens
cagugcaaugaugaaagggcau

SEQ ID NO: 5141 - RNA, 23 nt, Homo sapiens
ucuggcuccgugucuucacuccc

SEQ ID NO: 5142 - RNA, 22 nt, Homo sapiens
caaagaauucuccuuuugggcu

SEQ ID NO: 5143 - RNA, 22 nt, Homo sapiens
ucugcccccuccgcugcugcca

SEQ ID NO: 5144 - RNA, 23 nt, Homo sapiens
cccaguguucagacuaccuguuc

SEQ ID NO: 5145 - RNA, 23 nt, Homo sapiens
cccaguguuuagacuaucuguuc

SEQ ID NO: 5146 - RNA, 23 nt, Homo sapiens
ugugcaaaucuaugcaaaacuga

SEQ ID NO: 5147 - RNA, 23 nt, Homo sapiens
ugugcaaauccaugcaaaacuga

SEQ ID NO: 5148 - RNA, 23 nt, Homo sapiens
cagugcaauaguauugucaaagc

SEQ ID NO: 5149 - RNA, 23 nt, Homo sapiens
cagugcaaugauauugucaaagc

SEQ ID NO: 5150 - RNA, 22 nt, Homo sapiens
uguaaacauccuacacucagcu

SEQ ID NO: 5151 - RNA, 20 nt, Homo sapiens
acugccccaggugcugcugg

SEQ ID NO: 5152 - RNA, 23 nt, Homo sapiens
ucucacacagaaaucgcacccgu

SEQ ID NO: 5153 - RNA, 23 nt, Homo sapiens
ugaggggcagagagcgagacuuu

SEQ ID NO: 5154 - RNA, 22 nt, Homo sapiens
uuuugcgauguguuccuaauau

SEQ ID NO: 5155 - RNA, 23 nt, Homo sapiens
uagugcaauauugcuuauagggu

SEQ ID NO: 5156 - RNA, 21 nt, Homo sapiens
cggggcagcucaguacaggau

SEQ ID NO: 5157 - RNA, 21 nt, Homo sapiens
cagcagcacacugugguuugu

SEQ ID NO: 5158 - RNA, 21 nt, Homo sapiens
uuuugcaccuuuuggagugaa

SEQ ID NO: 5159 - RNA, 20 nt, Homo sapiens
cugcaaagggaagcccuuuc

SEQ ID NO: 5160 - RNA, 22 nt, Homo sapiens
aaagugcauccuuuuagagugu

SEQ ID NO: 5161 - RNA, 22 nt, Homo sapiens
aaagugcauccuuuuagagguu

SEQ ID NO: 5162 - RNA, 22 nt, Homo sapiens
aaagugcaucuuuuuagaggau

SEQ ID NO: 5163 - RNA, 20 nt, Homo sapiens
cugcaaagggaagcccuuuc

SEQ ID NO: 5164 - RNA, 22 nt, Homo sapiens
ccucccacacccaaggcuugca

SEQ ID NO: 5165 - RNA, 22 nt, Homo sapiens
caaaaaccacaguuucuuuugc

SEQ ID NO: 5166 - RNA, 21 nt, Homo sapiens
gcgacccauacuugguuucag

SEQ ID NO: 5167 - RNA, 23 nt, Homo sapiens
guuugcacgggugggccuugucu

SEQ ID NO: 5168 - RNA, 23 nt, Homo sapiens
ugagugugugugugugagugugu

SEQ ID NO: 5169 - RNA, 22 nt, Homo sapiens
cacacacugcaauuacuuuugc

SEQ ID NO: 5170 - RNA, 22 nt, Homo sapiens
uggugguuuacaaaguaauuca

SEQ ID NO: 5171 - RNA, 22 nt, Homo sapiens
caaagugccucccuuuagagug

SEQ ID NO: 5172 - RNA, 23 nt, Homo sapiens
ucuggcuccgugucuucacuccc

SEQ ID NO: 5173 - RNA, 18 nt, Homo sapiens
uccagugcccuccucucc

SEQ ID NO: 5174 - RNA, 20 nt, Homo sapiens
gugcauugcuguugcauugc

SEQ ID NO: 5175 - RNA, 22 nt, Homo sapiens
gagugccuucuuuuggagcguu

SEQ ID NO: 5176 - RNA, 22 nt, Homo sapiens
aagugccuccuuuuagaguguu

SEQ ID NO: 5177 - RNA, 23 nt, Homo sapiens
agugccugagggaguaagagccc

SEQ ID NO: 5178 - RNA, 23 nt, Homo sapiens
ccugcagcgacuugauggcuucc

SEQ ID NO: 5179 - RNA, 23 nt, Homo sapiens
ccugcagcgacuugauggcuucc

SEQ ID NO: 5180 - RNA, 22 nt, Homo sapiens
uagcuuaucagacugauguuga

SEQ ID NO: 5181 - RNA, 21 nt, Homo sapiens
gccccugggccuauccuagaa

SEQ ID NO: 5182 - RNA, 21 nt, Homo sapiens
cggggcagcucaguacaggau

SEQ ID NO: 5183 - RNA, 23 nt, Homo sapiens
agugccugagggaguaagagccc

SEQ ID NO: 5184 - RNA, 22 nt, Homo sapiens
gucccucuccaaaugugucuug

SEQ ID NO: 5185 - RNA, 22 nt, Homo sapiens
uacccauugcauaucggaguug

SEQ ID NO: 5186 - RNA, 18 nt, Homo sapiens
cgggcguggugguggggg

SEQ ID NO: 5187 - RNA, 22 nt, Homo sapiens
uaacacugucugguaaagaugg

SEQ ID NO: 5188 - RNA, 21 nt, Homo sapiens
cggcggggacggcgauugguc

SEQ ID NO: 5189 - RNA, 22 nt, Homo sapiens
aggcggggcgccgcgggaccgc

SEQ ID NO: 5190 - RNA, 22 nt, Homo sapiens
ugcaacgaaccugagccacuga

SEQ ID NO: 5191 - RNA, 18 nt, Homo sapiens
ucagcuggcccucauuuc

SEQ ID NO: 5192 - RNA, 23 nt, Homo sapiens
ucuggcuccgugucuucacuccc

SEQ ID NO: 5193 - RNA, 20 nt, Homo sapiens
ccccagggcgacgcggcggg

SEQ ID NO: 5194 - RNA, 23 nt, Homo sapiens
agcuacauugucugcuggguuuc

SEQ ID NO: 5195 - RNA, 23 nt, Homo sapiens
aaugacacgaucacucccguuga

SEQ ID NO: 5196 - RNA, 22 nt, Homo sapiens
uggugggcacagaaucuggacu

SEQ ID NO: 5197 - RNA, 21 nt, Homo sapiens
caaagaggaaggucccauuac

SEQ ID NO: 5198 - RNA, 22 nt, Homo sapiens
uggugggccgcagaacaugugc

SEQ ID NO: 5199 - RNA, 25 nt, Homo sapiens
aggggugguguugggacagcuccgu

SEQ ID NO: 5200 - RNA, 21 nt, Homo sapiens
ccccaccuccucucuccucag

SEQ ID NO: 5201 - RNA, 22 nt, Homo sapiens
ucggccugaccacccaccccac

SEQ ID NO: 5202 - RNA, 17 nt, Homo sapiens
ucgccuccuccucuccc

SEQ ID NO: 5203 - RNA, 23 nt, Homo sapiens
ucuggcuccgugucuucacuccc

SEQ ID NO: 5204 - RNA, 21 nt, Homo sapiens
cggcggggacggcgauugguc

SEQ ID NO: 5205 - RNA, 22 nt, Homo sapiens
uguaaacauccucgacuggaag

SEQ ID NO: 5206 - RNA, 22 nt, Homo sapiens
uguaaacauccuacacucagcu

SEQ ID NO: 5207 - RNA, 23 nt, Homo sapiens
uguaaacauccuacacucucagc

SEQ ID NO: 5208 - RNA, 22 nt, Homo sapiens
uguaaacauccccgacuggaag

SEQ ID NO: 5209 - RNA, 22 nt, Homo sapiens
uguaaacauccuugacuggaag

SEQ ID NO: 5210 - RNA, 18 nt, Homo sapiens
ugcuuccuuucagagggu

SEQ ID NO: 5211 - RNA, 22 nt, Homo sapiens
aucuggagguaagaagcacuuu

SEQ ID NO: 5212 - RNA, 24 nt, Homo sapiens
gaccuggacauguuugugcccagu

SEQ ID NO: 5213 - RNA, 25 nt, Homo sapiens
agggaucgcgggcggguggcggccu

SEQ ID NO: 5214 - RNA, 22 nt, Homo sapiens
aggcggggcgccgcgggaccgc

SEQ ID NO: 5215 - RNA, 23 nt, Homo sapiens
aggaagcccuggaggggcuggag

SEQ ID NO: 5216 - RNA, 22 nt, Homo sapiens
ugcggggcuagggcuaacagca

SEQ ID NO: 5217 - RNA, 20 nt, Homo sapiens
ggggagcuguggaagcagua

SEQ ID NO: 5218 - RNA, 20 nt, Homo sapiens
ggggagcuguggaagcagua

SEQ ID NO: 5219 - RNA, 22 nt, Homo sapiens
cucccacugcuucacuugacua

SEQ ID NO: 5220 - RNA, 22 nt, Homo sapiens
aaaagcuggguugagagggcga

SEQ ID NO: 5221 - RNA, 22 nt, Homo sapiens
aaaagcuggguugagagggcaa

SEQ ID NO: 5222 - RNA, 20 nt, Homo sapiens
aaaagcuggguugagagggu

SEQ ID NO: 5223 - RNA, 19 nt, Homo sapiens
aaaagcuggguugagagga

SEQ ID NO: 5224 - RNA, 22 nt, Homo sapiens
uuuguucguucggcucgcguga

SEQ ID NO: 5225 - RNA, 22 nt, Homo sapiens
aaacaaacauggugcacuucuu

SEQ ID NO: 5226 - RNA, 23 nt, Homo sapiens
uuucaagccagggggcguuuuuc

SEQ ID NO: 5227 - RNA, 22 nt, Homo sapiens
aucuggagguaagaagcacuuu

SEQ ID NO: 5228 - RNA, 22 nt, Homo sapiens
aucuggagguaagaagcacuuu

SEQ ID NO: 5229 - RNA, 19 nt, Homo sapiens
agcugucugaaaaugucuu

SEQ ID NO: 5230 - RNA, 21 nt, Homo sapiens
uugcucacuguucuucccuag

SEQ ID NO: 5231 - RNA, 21 nt, Homo sapiens
cauaaaguagaaagcacuacu

SEQ ID NO: 5232 - RNA, 23 nt, Homo sapiens
uuaaugcuaaucgugauaggggu

SEQ ID NO: 5233 - RNA, 22 nt, Homo sapiens
uguaaacauccucgacuggaag

SEQ ID NO: 5234 - RNA, 22 nt, Homo sapiens
uguaaacauccuacacucagcu

SEQ ID NO: 5235 - RNA, 23 nt, Homo sapiens
uguaaacauccuacacucucagc

SEQ ID NO: 5236 - RNA, 22 nt, Homo sapiens
uguaaacauccccgacuggaag

SEQ ID NO: 5237 - RNA, 22 nt, Homo sapiens
uguaaacauccuugacuggaag

SEQ ID NO: 5238 - RNA, 25 nt, Homo sapiens
gggcgacaaagcaagacucuuucuu

SEQ ID NO: 5239 - RNA, 22 nt, Homo sapiens
ugcccuguggacucaguucugg

SEQ ID NO: 5240 - RNA, 21 nt, Homo sapiens
cggcggggacggcgauugguc

SEQ ID NO: 5241 - RNA, 21 nt, Homo sapiens
cggcggggacggcgauugguc

SEQ ID NO: 5242 - RNA, 22 nt, Homo sapiens
cauugcacuugucucggucuga

SEQ ID NO: 5243 - RNA, 22 nt, Homo sapiens
cgucaacacuugcugguuuccu

SEQ ID NO: 5244 - RNA, 22 nt, Homo sapiens
ggggguccccggugcucggauc

SEQ ID NO: 5245 - RNA, 22 nt, Homo sapiens
aggcggggcgccgcgggaccgc

SEQ ID NO: 5246 - RNA, 22 nt, Homo sapiens
aggcggggcgccgcgggaccgc

SEQ ID NO: 5247 - RNA, 22 nt, Homo sapiens
ugcggggcuagggcuaacagca

SEQ ID NO: 5248 - RNA, 22 nt, Homo sapiens
ugagguaguagguuguaugguu

SEQ ID NO: 5249 - RNA, 23 nt, Homo sapiens
guguuaauuaaaccucuauuuac

SEQ ID NO: 5250 - RNA, 18 nt, Homo sapiens
ugcuuccuuucagagggu

SEQ ID NO: 5251 - RNA, 22 nt, Homo sapiens
aucuggagguaagaagcacuuu

SEQ ID NO: 5252 - RNA, 21 nt, Homo sapiens
ucccacguuguggcccagcag

SEQ ID NO: 5253 - RNA, 22 nt, Homo sapiens
uauugcacucgucccggccucc

SEQ ID NO: 5254 - RNA, 22 nt, Homo sapiens
cucggcgcggggcgcgggcucc

SEQ ID NO: 5255 - RNA, 20 nt, Homo sapiens
agagguauagggcaugggaa

SEQ ID NO: 5256 - RNA, 23 nt, Homo sapiens
ucucacacagaaaucgcacccgu

SEQ ID NO: 5257 - RNA, 21 nt, Homo sapiens
agugaaugauggguucugacc

SEQ ID NO: 5258 - RNA, 22 nt, Homo sapiens
cagugcaaugaugaaagggcau

SEQ ID NO: 5259 - RNA, 23 nt, Homo sapiens
guccaguuuucccaggaaucccu

SEQ ID NO: 5260 - RNA, 23 nt, Homo sapiens
uuaaugcuaaucgugauaggggu

SEQ ID NO: 5261 - RNA, 23 nt, Homo sapiens
aacauucaacgcugucggugagu

SEQ ID NO: 5262 - RNA, 23 nt, Homo sapiens
aacauucauugcugucggugggu

SEQ ID NO: 5263 - RNA, 22 nt, Homo sapiens
aacauucaaccugucggugagu

SEQ ID NO: 5264 - RNA, 23 nt, Homo sapiens
aacauucauuguugucggugggu

SEQ ID NO: 5265 - RNA, 22 nt, Homo sapiens
acagcaggcacagacaggcagu

SEQ ID NO: 5266 - RNA, 22 nt, Homo sapiens
caaucacuaacuccacugccau

SEQ ID NO: 5267 - RNA, 22 nt, Homo sapiens
gccugcugggguggaaccuggu

SEQ ID NO: 5268 - RNA, 21 nt, Homo sapiens
caaagaggaaggucccauuac

SEQ ID NO: 5269 - RNA, 22 nt, Homo sapiens
cugcccuggcccgagggaccga

SEQ ID NO: 5270 - RNA, 20 nt, Homo sapiens
guagaggagauggcgcaggg

SEQ ID NO: 5271 - RNA, 22 nt, Homo sapiens
uggaauguaaagaaguauguau

SEQ ID NO: 5272 - RNA, 23 nt, Homo sapiens
ucaaaugcucagacuccuguggu

SEQ ID NO: 5273 - RNA, 21 nt, Homo sapiens
ccccaccuccucucuccucag

SEQ ID NO: 5274 - RNA, 18 nt, Homo sapiens
aucccaccucugccacca

SEQ ID NO: 5275 - RNA, 22 nt, Homo sapiens
uggguggucuggagauuugugc

SEQ ID NO: 5276 - RNA, 22 nt, Homo sapiens
cagugcaauguuaaaagggcau

SEQ ID NO: 5277 - RNA, 22 nt, Homo sapiens
ugagaacugaauuccauggguu

SEQ ID NO: 5278 - RNA, 22 nt, Homo sapiens
ugagaacugaauuccauaggcu

SEQ ID NO: 5279 - RNA, 23 nt, Homo sapiens
ucuggcuccgugucuucacuccc

SEQ ID NO: 5280 - RNA, 22 nt, Homo sapiens
uggaauguaaggaagugugugg

SEQ ID NO: 5281 - RNA, 21 nt, Homo sapiens
ccaccaccgugucugacacuu

SEQ ID NO: 5282 - RNA, 21 nt, Homo sapiens
aucacauugccagggauuucc

SEQ ID NO: 5283 - RNA, 21 nt, Homo sapiens
aucacauugccagggauuacc

SEQ ID NO: 5284 - RNA, 22 nt, Homo sapiens
aaggagcucacagucuauugag

SEQ ID NO: 5285 - RNA, 22 nt, Homo sapiens
agaucagaaggugauuguggcu

SEQ ID NO: 5286 - RNA, 22 nt, Homo sapiens
uguaaacauccuacacucagcu

SEQ ID NO: 5287 - RNA, 22 nt, Homo sapiens
ucaggcucaguccccucccgau

SEQ ID NO: 5288 - RNA, 21 nt, Homo sapiens
cagcagcacacugugguuugu

SEQ ID NO: 5289 - RNA, 20 nt, Homo sapiens
cugcaaagggaagcccuuuc

SEQ ID NO: 5290 - RNA, 20 nt, Homo sapiens
cugcaaagggaagcccuuuc

SEQ ID NO: 5291 - RNA, 22 nt, Homo sapiens
ccucccacacccaaggcuugca

SEQ ID NO: 5292 - RNA, 20 nt, Homo sapiens
aggaauguuccuucuuugcc

SEQ ID NO: 5293 - RNA, 20 nt, Homo sapiens
accaggaggcugaggccccu

SEQ ID NO: 5294 - RNA, 23 nt, Homo sapiens
aaggagcuuacaaucuagcuggg

SEQ ID NO: 5295 - RNA, 21 nt, Homo sapiens
uggaggagaaggaaggugaug

SEQ ID NO: 5296 - RNA, 22 nt, Homo sapiens
uggugguuuacaaaguaauuca

SEQ ID NO: 5297 - RNA, 22 nt, Homo sapiens
uggagagaaaggcaguuccuga

SEQ ID NO: 5298 - RNA, 22 nt, Homo sapiens
acucggcguggcgucggucgug

SEQ ID NO: 5299 - RNA, 21 nt, Homo sapiens
cggcggggacggcgauugguc

SEQ ID NO: 5300 - RNA, 22 nt, Homo sapiens
cauugcacuugucucggucuga

SEQ ID NO: 5301 - RNA, 21 nt, Homo sapiens
agggcccccccucaauccugu

SEQ ID NO: 5302 - RNA, 21 nt, Homo sapiens
agggcccccccucaauccugu

SEQ ID NO: 5303 - RNA, 22 nt, Homo sapiens
aucacacaaaggcaacuuuugu

SEQ ID NO: 5304 - RNA, 22 nt, Homo sapiens
aggcggggcgccgcgggaccgc

SEQ ID NO: 5305 - RNA, 22 nt, Homo sapiens
ugcggggcuagggcuaacagca

SEQ ID NO: 5306 - RNA, 22 nt, Homo sapiens
aacccguagauccgaucuugug

SEQ ID NO: 5307 - RNA, 22 nt, Homo sapiens
cacccguagaaccgaccuugcg

SEQ ID NO: 5308 - RNA, 22 nt, Homo sapiens
ucggccugaccacccaccccac

SEQ ID NO: 5309 - RNA, 17 nt, Homo sapiens
gugggggagaggcuguc

SEQ ID NO: 5310 - RNA, 25 nt, Homo sapiens
ugggaacggguuccggcagacgcug

SEQ ID NO: 5311 - RNA, 22 nt, Homo sapiens
cucggcgcggggcgcgggcucc

SEQ ID NO: 5312 - RNA, 23 nt, Homo sapiens
ucuggcuccgugucuucacuccc

SEQ ID NO: 5313 - RNA, 21 nt, Homo sapiens
uccugcgcgucccagaugccc

SEQ ID NO: 5314 - RNA, 21 nt, Homo sapiens
cggcggggacggcgauugguc

SEQ ID NO: 5315 - RNA, 22 nt, Homo sapiens
cauugcacuugucucggucuga

SEQ ID NO: 5316 - RNA, 23 nt, Homo sapiens
ucccccaggugugauucugauuu

SEQ ID NO: 5317 - RNA, 23 nt, Homo sapiens
ugaggggcagagagcgagacuuu

SEQ ID NO: 5318 - RNA, 19 nt, Homo sapiens
ugagcugcuguaccaaaau

SEQ ID NO: 5319 - RNA, 19 nt, Homo sapiens
aggcacggugucagcaggc

SEQ ID NO: 5320 - RNA, 24 nt, Homo sapiens
acugggggcuuucgggcucugcgu

SEQ ID NO: 5321 - RNA, 24 nt, Homo sapiens
ugccugggucucuggccugcgcgu

SEQ ID NO: 5322 - RNA, 22 nt, Homo sapiens
aggcggggcgccgcgggaccgc

SEQ ID NO: 5323 - RNA, 23 nt, Homo sapiens
cgggucggaguuagcucaagcgg

SEQ ID NO: 5324 - RNA, 20 nt, Homo sapiens
ggggagcuguggaagcagua

SEQ ID NO: 5325 - RNA, 25 nt, Homo sapiens
agggaucgcgggcggguggcggccu

SEQ ID NO: 5326 - RNA, 23 nt, Homo sapiens
gagggucuugggagggaugugac

SEQ ID NO: 5327 - RNA, 21 nt, Homo sapiens
gugccagcugcagugggggag

SEQ ID NO: 5328 - RNA, 18 nt, Homo sapiens
uugagaaggaggcugcug

SEQ ID NO: 5329 - RNA, 22 nt, Homo sapiens
uaacacugucugguaaagaugg

SEQ ID NO: 5330 - RNA, 22 nt, Homo sapiens
uaacacugucugguaacgaugu

SEQ ID NO: 5331 - RNA, 20 nt, Homo sapiens
accaggaggcugaggccccu

SEQ ID NO: 5332 - RNA, 22 nt, Homo sapiens
ugagccccugugccgcccccag

SEQ ID NO: 5333 - RNA, 22 nt, Homo sapiens
cagugcaaugaugaaagggcau

SEQ ID NO: 5334 - RNA, 18 nt, Homo sapiens
cagggaggugaaugugau

SEQ ID NO: 5335 - RNA, 22 nt, Homo sapiens
aguggggaacccuuccaugagg

SEQ ID NO: 5336 - RNA, 21 nt, Homo sapiens
caaagaggaaggucccauuac

SEQ ID NO: 5337 - RNA, 21 nt, Homo sapiens
gaagugugccguggugugucu

SEQ ID NO: 5338 - RNA, 20 nt, Homo sapiens
ggggagcuguggaagcagua

SEQ ID NO: 5339 - RNA, 22 nt, Homo sapiens
agaaggaaauugaauucauuua

SEQ ID NO: 5340 - RNA, 21 nt, Homo sapiens
cugaccuaugaauugacagcc

SEQ ID NO: 5341 - RNA, 21 nt, Homo sapiens
augaccuaugaauugacagac

SEQ ID NO: 5342 - RNA, 22 nt, Homo sapiens
gcugacuccuaguccagggcuc

SEQ ID NO: 5343 - RNA, 21 nt, Homo sapiens
caaagaggaaggucccauuac

SEQ ID NO: 5344 - RNA, 21 nt, Homo sapiens
ccgucgccgccacccgagccg

SEQ ID NO: 5345 - RNA, 18 nt, Homo sapiens
cgggcguggugguggggg

SEQ ID NO: 5346 - RNA, 17 nt, Homo sapiens
ucgccuccuccucuccc

SEQ ID NO: 5347 - RNA, 23 nt, Homo sapiens
uguaguguuuccuacuuuaugga

SEQ ID NO: 5348 - RNA, 20 nt, Homo sapiens
guguguggaaaugcuucugc

SEQ ID NO: 5349 - RNA, 20 nt, Homo sapiens
ccuccugcccuccuugcugu

SEQ ID NO: 5350 - RNA, 23 nt, Homo sapiens
caaagugcucauagugcagguag

SEQ ID NO: 5351 - RNA, 18 nt, Homo sapiens
ugcuuccuuucagagggu

SEQ ID NO: 5352 - RNA, 22 nt, Homo sapiens
aucuggagguaagaagcacuuu

SEQ ID NO: 5353 - RNA, 23 nt, Homo sapiens
gaacgcgcuucccuauagagggu

SEQ ID NO: 5354 - RNA, 21 nt, Homo sapiens
aagccugcccggcuccucggg

SEQ ID NO: 5355 - RNA, 22 nt, Homo sapiens
cacacacugcaauuacuuuugc

SEQ ID NO: 5356 - RNA, 21 nt, Homo sapiens
aaggcagggcccccgcucccc

SEQ ID NO: 5357 - RNA, 23 nt, Homo sapiens
uauucauuuauccccagccuaca

SEQ ID NO: 5358 - RNA, 21 nt, Homo sapiens
guggcugcacucacuuccuuc

SEQ ID NO: 5359 - RNA, 23 nt, Homo sapiens
cggcccgggcugcugcuguuccu

SEQ ID NO: 5360 - RNA, 23 nt, Homo sapiens
cggcccgggcugcugcuguuccu

SEQ ID NO: 5361 - RNA, 21 nt, Homo sapiens
agggcccccccucaauccugu

SEQ ID NO: 5362 - RNA, 22 nt, Homo sapiens
cgucaacacuugcugguuuccu

SEQ ID NO: 5363 - RNA, 20 nt, Homo sapiens
accaggaggcugaggccccu

SEQ ID NO: 5364 - RNA, 22 nt, Homo sapiens
ugcggggcuagggcuaacagca

SEQ ID NO: 5365 - RNA, 22 nt, Homo sapiens
cugcccuggcccgagggaccga

SEQ ID NO: 5366 - RNA, 22 nt, Homo sapiens
ucaccagcccuguguucccuag

SEQ ID NO: 5367 - RNA, 22 nt, Homo sapiens
acgcccuucccccccuucuuca

SEQ ID NO: 5368 - RNA, 22 nt, Homo sapiens
acgcccuucccccccuucuuca

SEQ ID NO: 5369 - RNA, 23 nt, Homo sapiens
agcugguguugugaaucaggccg

SEQ ID NO: 5370 - RNA, 21 nt, Homo sapiens
cggcggggacggcgauugguc

SEQ ID NO: 5371 - RNA, 20 nt, Homo sapiens
uguuuugauaacaguaaugu

SEQ ID NO: 5372 - RNA, 20 nt, Homo sapiens
ccucugggcccuuccuccag

SEQ ID NO: 5373 - RNA, 22 nt, Homo sapiens
ucucugggccugugucuuaggc

SEQ ID NO: 5374 - RNA, 21 nt, Homo sapiens
gccccugggccuauccuagaa

SEQ ID NO: 5375 - RNA, 22 nt, Homo sapiens
ucaggcucaguccccucccgau

SEQ ID NO: 5376 - RNA, 22 nt, Homo sapiens
aggcggggcgccgcgggaccgc

SEQ ID NO: 5377 - RNA, 20 nt, Homo sapiens
cggcucugggucugugggga

SEQ ID NO: 5378 - RNA, 20 nt, Homo sapiens
ggggagcuguggaagcagua

SEQ ID NO: 5379 - RNA, 24 nt, Homo sapiens
gaccuggacauguuugugcccagu

SEQ ID NO: 5380 - RNA, 21 nt, Homo sapiens
uggcagggaggcugggagggg

SEQ ID NO: 5381 - RNA, 22 nt, Homo sapiens
cuggacugagccgugcuacugg

SEQ ID NO: 5382 - RNA, 22 nt, Homo sapiens
gguccagaggggagauagguuc

SEQ ID NO: 5383 - RNA, 22 nt, Homo sapiens
aaggagcucacagucuauugag

SEQ ID NO: 5384 - RNA, 21 nt, Homo sapiens
acuggacuuggagucagaagg

SEQ ID NO: 5385 - RNA, 22 nt, Homo sapiens
acuggacuuagggucagaaggc

SEQ ID NO: 5386 - RNA, 21 nt, Homo sapiens
gcaguccaugggcauauacac

SEQ ID NO: 5387 - RNA, 20 nt, Homo sapiens
ccauggaucuccaggugggu

SEQ ID NO: 5388 - RNA, 18 nt, Homo sapiens
uucacagggaggugucau

SEQ ID NO: 5389 - RNA, 23 nt, Homo sapiens
caaagcgcuucucuuuagagugu

SEQ ID NO: 5390 - RNA, 21 nt, Homo sapiens
cuccagagggaaguacuuucu

SEQ ID NO: 5391 - RNA, 21 nt, Homo sapiens
cuccagagggaugcacuuucu

SEQ ID NO: 5392 - RNA, 22 nt, Homo sapiens
cgaaaacagcaauuaccuuugc

SEQ ID NO: 5393 - RNA, 21 nt, Homo sapiens
guggcugcacucacuuccuuc

SEQ ID NO: 5394 - RNA, 23 nt, Homo sapiens
aaggagcuuacaaucuagcuggg

SEQ ID NO: 5395 - RNA, 21 nt, Homo sapiens
aaggcagggcccccgcucccc

SEQ ID NO: 5396 - RNA, 22 nt, Homo sapiens
uggguggucuggagauuugugc

SEQ ID NO: 5397 - RNA, 18 nt, Homo sapiens
cagggaggugaaugugau

SEQ ID NO: 5398 - RNA, 22 nt, Homo sapiens
uggagagaaaggcaguuccuga

SEQ ID NO: 5399 - RNA, 23 nt, Homo sapiens
uaaggugcaucuagugcagauag

SEQ ID NO: 5400 - RNA, 22 nt, Homo sapiens
cccugugcccggcccacuucug

SEQ ID NO: 5401 - RNA, 20 nt, Homo sapiens
ccccagggcgacgcggcggg

SEQ ID NO: 5402 - RNA, 23 nt, Homo sapiens
cccaguguucagacuaccuguuc

SEQ ID NO: 5403 - RNA, 23 nt, Homo sapiens
cccaguguuuagacuaucuguuc

SEQ ID NO: 5404 - RNA, 21 nt, Homo sapiens
gccccugggccuauccuagaa

SEQ ID NO: 5405 - RNA, 22 nt, Homo sapiens
aauugcacgguauccaucugua

SEQ ID NO: 5406 - RNA, 22 nt, Homo sapiens
agaggcuggccgugaugaauuc

SEQ ID NO: 5407 - RNA, 22 nt, Homo sapiens
aguggggaacccuuccaugagg

SEQ ID NO: 5408 - RNA, 19 nt, Homo sapiens
gagccaguuggacaggagc

SEQ ID NO: 5409 - RNA, 25 nt, Homo sapiens
aggggugguguugggacagcuccgu

SEQ ID NO: 5410 - RNA, 22 nt, Homo sapiens
gucccucuccaaaugugucuug

SEQ ID NO: 5411 - RNA, 24 nt, Homo sapiens
ugccugggucucuggccugcgcgu

SEQ ID NO: 5412 - RNA, 23 nt, Homo sapiens
aggaagcccuggaggggcuggag

SEQ ID NO: 5413 - RNA, 21 nt, Homo sapiens
uggaggagaaggaaggugaug

SEQ ID NO: 5414 - RNA, 22 nt, Homo sapiens
cugcccuggcccgagggaccga

SEQ ID NO: 5415 - RNA, 22 nt, Homo sapiens
cacuggcuccuuucuggguaga

SEQ ID NO: 5416 - RNA, 20 nt, Homo sapiens
ggggagcuguggaagcagua

SEQ ID NO: 5417 - RNA, 21 nt, Homo sapiens
aaggcagggcccccgcucccc

SEQ ID NO: 5418 - RNA, 22 nt, Homo sapiens
ugagguaguagguuguauaguu

SEQ ID NO: 5419 - RNA, 22 nt, Homo sapiens
ugagguaguagguugugugguu

SEQ ID NO: 5420 - RNA, 19 nt, Homo sapiens
ugucucugcugggguuucu

SEQ ID NO: 5421 - RNA, 21 nt, Homo sapiens
auauaugaugacuuagcuuuu

SEQ ID NO: 5422 - RNA, 18 nt, Homo sapiens
cagggaggugaaugugau

SEQ ID NO: 5423 - RNA, 21 nt, Homo sapiens
uaccacaggguagaaccacgg

SEQ ID NO: 5424 - RNA, 23 nt, Homo sapiens
ucuggcuccgugucuucacuccc

SEQ ID NO: 5425 - RNA, 22 nt, Homo sapiens
uagcuuaucagacugauguuga

SEQ ID NO: 5426 - RNA, 22 nt, Homo sapiens
gaggguuggguggaggcucucc

SEQ ID NO: 5427 - RNA, 21 nt, Homo sapiens
auguaugugugcaugugcaug

SEQ ID NO: 5428 - RNA, 24 nt, Homo sapiens
agcagaagcagggagguucuccca

SEQ ID NO: 5429 - RNA, 22 nt, Homo sapiens
auucugcauuuuuagcaaguuc

SEQ ID NO: 5430 - RNA, 20 nt, Homo sapiens
auguauaaauguauacacac

SEQ ID NO: 5431 - RNA, 23 nt, Homo sapiens
ugagugugugugugugagugugu

SEQ ID NO: 5432 - RNA, 22 nt, Homo sapiens
ugugucacucgaugaccacugu

SEQ ID NO: 5433 - RNA, 22 nt, Homo sapiens
cacacacugcaauuacuuuugc

SEQ ID NO: 5434 - RNA, 22 nt, Homo sapiens
gucccucuccaaaugugucuug

SEQ ID NO: 5435 - RNA, 22 nt, Homo sapiens
ugagccccugugccgcccccag

SEQ ID NO: 5436 - RNA, 17 nt, Homo sapiens
gugggggagaggcuguc

SEQ ID NO: 5437 - RNA, 21 nt, Homo sapiens
cggcggggacggcgauugguc

SEQ ID NO: 5438 - RNA, 20 nt, Homo sapiens
ccccagggcgacgcggcggg

SEQ ID NO: 5439 - RNA, 23 nt, Homo sapiens
caacggaaucccaaaagcagcug

SEQ ID NO: 5440 - RNA, 23 nt, Homo sapiens
ucccccaggugugauucugauuu

SEQ ID NO: 5441 - RNA, 22 nt, Homo sapiens
uggugggcacagaaucuggacu

SEQ ID NO: 5442 - RNA, 25 nt, Homo sapiens
aggggugguguugggacagcuccgu

SEQ ID NO: 5443 - RNA, 24 nt, Homo sapiens
acugggggcuuucgggcucugcgu

SEQ ID NO: 5444 - RNA, 22 nt, Homo sapiens
uggugggccgcagaacaugugc

SEQ ID NO: 5445 - RNA, 22 nt, Homo sapiens
aggcggggcgccgcgggaccgc

SEQ ID NO: 5446 - RNA, 22 nt, Homo sapiens
ugcggggcuagggcuaacagca

SEQ ID NO: 5447 - RNA, 24 nt, Homo sapiens
uggggagcugaggcucugggggug

SEQ ID NO: 5448 - RNA, 22 nt, Homo sapiens
ucaccagcccuguguucccuag

SEQ ID NO: 5449 - RNA, 23 nt, Homo sapiens
agcugguguugugaaucaggccg

SEQ ID NO: 5450 - RNA, 22 nt, Homo sapiens
cauugcacuugucucggucuga

SEQ ID NO: 5451 - RNA, 23 nt, Homo sapiens
ucaagagcaauaacgaaaaaugu

SEQ ID NO: 5452 - RNA, 23 nt, Homo sapiens
ugagcgccucgacgacagagccg

SEQ ID NO: 5453 - RNA, 22 nt, Homo sapiens
ucaggcucaguccccucccgau

SEQ ID NO: 5454 - RNA, 23 nt, Homo sapiens
cacccggcugugugcacaugugc

SEQ ID NO: 5455 - RNA, 22 nt, Homo sapiens
uucauucggcuguccagaugua

SEQ ID NO: 5456 - RNA, 23 nt, Homo sapiens
uuaaugcuaaucgugauaggggu

SEQ ID NO: 5457 - RNA, 22 nt, Homo sapiens
aacuggccuacaaagucccagu

SEQ ID NO: 5458 - RNA, 22 nt, Homo sapiens
aacuggcccucaaagucccgcu

SEQ ID NO: 5459 - RNA, 23 nt, Homo sapiens
cucucaccacugcccucccacag

SEQ ID NO: 5460 - RNA, 22 nt, Homo sapiens
uuagggcccuggcuccaucucc

SEQ ID NO: 5461 - RNA, 22 nt, Homo sapiens
acucggcguggcgucggucgug

SEQ ID NO: 5462 - RNA, 18 nt, Homo sapiens
cagggaggugaaugugau

SEQ ID NO: 5463 - RNA, 23 nt, Homo sapiens
ucuggcuccgugucuucacuccc

SEQ ID NO: 5464 - RNA, 23 nt, Homo sapiens
ugaggggcagagagcgagacuuu

SEQ ID NO: 5465 - RNA, 19 nt, Homo sapiens
aagcagcugccucugaggc

SEQ ID NO: 5466 - RNA, 24 nt, Homo sapiens
ugccugggucucuggccugcgcgu

SEQ ID NO: 5467 - RNA, 22 nt, Homo sapiens
ugcggggcuagggcuaacagca

SEQ ID NO: 5468 - RNA, 20 nt, Homo sapiens
ggggagcuguggaagcagua

SEQ ID NO: 5469 - RNA, 22 nt, Homo sapiens
ugugcgcagggagaccucuccc

SEQ ID NO: 5470 - RNA, 22 nt, Homo sapiens
aacccguagauccgaucuugug

SEQ ID NO: 5471 - RNA, 22 nt, Homo sapiens
cacccguagaaccgaccuugcg

SEQ ID NO: 5472 - RNA, 20 nt, Homo sapiens
ucugcaggguuugcuuugag

SEQ ID NO: 5473 - RNA, 17 nt, Homo sapiens
ucgccuccuccucuccc

SEQ ID NO: 5474 - RNA, 22 nt, Homo sapiens
uggguggucuggagauuugugc

SEQ ID NO: 5475 - RNA, 18 nt, Homo sapiens
cagggaggugaaugugau

SEQ ID NO: 5476 - RNA, 21 nt, Homo sapiens
cggcggggacggcgauugguc

SEQ ID NO: 5477 - RNA, 22 nt, Homo sapiens
aggugguccguggcgcguucgc

SEQ ID NO: 5478 - RNA, 23 nt, Homo sapiens
ugagcgccucgacgacagagccg

SEQ ID NO: 5479 - RNA, 20 nt, Homo sapiens
guccgcucggcgguggccca

SEQ ID NO: 5480 - RNA, 25 nt, Homo sapiens
ggcggagggaaguagguccguuggu

SEQ ID NO: 5481 - RNA, 22 nt, Homo sapiens
aggcggggcgccgcgggaccgc

SEQ ID NO: 5482 - RNA, 22 nt, Homo sapiens
ugcggggcuagggcuaacagca

SEQ ID NO: 5483 - RNA, 21 nt, Homo sapiens
uggaggagaaggaaggugaug

SEQ ID NO: 5484 - RNA, 21 nt, Homo sapiens
cgcgggugcuuacugacccuu

SEQ ID NO: 5485 - RNA, 22 nt, Homo sapiens
auccgcgcucugacucucugcc

SEQ ID NO: 5486 - RNA, 23 nt, Homo sapiens
cacccggcugugugcacaugugc

SEQ ID NO: 5487 - RNA, 20 nt, Homo sapiens
uaaagagcccuguggagaca

SEQ ID NO: 5488 - RNA, 22 nt, Homo sapiens
cagugcaaugaugaaagggcau

SEQ ID NO: 5489 - RNA, 23 nt, Homo sapiens
ucuggcuccgugucuucacuccc

SEQ ID NO: 5490 - RNA, 22 nt, Homo sapiens
uagcagcacauaaugguuugug

SEQ ID NO: 5491 - RNA, 22 nt, Homo sapiens
uagcagcacaucaugguuuaca

SEQ ID NO: 5492 - RNA, 22 nt, Homo sapiens
uagcagcacguaaauauuggcg

SEQ ID NO: 5493 - RNA, 23 nt, Homo sapiens
ugaguaccgccaugucuguuggg

SEQ ID NO: 5494 - RNA, 21 nt, Homo sapiens
uagcagcacagaaauauuggc

SEQ ID NO: 5495 - RNA, 22 nt, Homo sapiens
uggcucaguucagcaggaacag

SEQ ID NO: 5496 - RNA, 22 nt, Homo sapiens
aaggagcucacagucuauugag

SEQ ID NO: 5497 - RNA, 22 nt, Homo sapiens
cagcagcaauucauguuuugaa

SEQ ID NO: 5498 - RNA, 22 nt, Homo sapiens
agaggcuggccgugaugaauuc

SEQ ID NO: 5499 - RNA, 21 nt, Homo sapiens
cagcagcacacugugguuugu

SEQ ID NO: 5500 - RNA, 23 nt, Homo sapiens
uagcagcgggaacaguucugcag

SEQ ID NO: 5501 - RNA, 23 nt, Homo sapiens
gcgaggaccccucggggucugac

SEQ ID NO: 5502 - RNA, 20 nt, Homo sapiens
accaggaggcugaggccccu

SEQ ID NO: 5503 - RNA, 23 nt, Homo sapiens
aaggagcuuacaaucuagcuggg

SEQ ID NO: 5504 - RNA, 21 nt, Homo sapiens
uggaggagaaggaaggugaug

SEQ ID NO: 5505 - RNA, 22 nt, Homo sapiens
acuccagccccacagccucagc

SEQ ID NO: 5506 - RNA, 22 nt, Homo sapiens
ugugcgcagggagaccucuccc

SEQ ID NO: 5507 - RNA, 21 nt, Homo sapiens
uggacugcccugaucuggaga

SEQ ID NO: 5508 - RNA, 21 nt, Homo sapiens
cggcggggacggcgauugguc

SEQ ID NO: 5509 - RNA, 22 nt, Homo sapiens
agaggcuggccgugaugaauuc

SEQ ID NO: 5510 - RNA, 22 nt, Homo sapiens
agacccuggucugcacucuauc

SEQ ID NO: 5511 - RNA, 20 nt, Homo sapiens
guccgcucggcgguggccca

SEQ ID NO: 5512 - RNA, 22 nt, Homo sapiens
uccgagccugggucucccucuu

SEQ ID NO: 5513 - RNA, 22 nt, Homo sapiens
aggcggggcgccgcgggaccgc

SEQ ID NO: 5514 - RNA, 22 nt, Homo sapiens
ugcggggcuagggcuaacagca

SEQ ID NO: 5515 - RNA, 20 nt, Homo sapiens
gugucugggcggacagcugc

SEQ ID NO: 5516 - RNA, 22 nt, Homo sapiens
ucguaccgugaguaauaaugcg

SEQ ID NO: 5517 - RNA, 23 nt, Homo sapiens
guccaguuuucccaggaaucccu

SEQ ID NO: 5518 - RNA, 21 nt, Homo sapiens
auguaugugugcaugugcaug

SEQ ID NO: 5519 - RNA, 22 nt, Homo sapiens
augcugacauauuuacuagagg

SEQ ID NO: 5520 - RNA, 22 nt, Homo sapiens
aaauuauuguacaucggaugag

SEQ ID NO: 5521 - RNA, 22 nt, Homo sapiens
ugagccccugugccgcccccag

SEQ ID NO: 5522 - RNA, 17 nt, Homo sapiens
gugggggagaggcuguc

SEQ ID NO: 5523 - RNA, 22 nt, Homo sapiens
acucggcguggcgucggucgug

SEQ ID NO: 5524 - RNA, 18 nt, Homo sapiens
cagggaggugaaugugau

SEQ ID NO: 5525 - RNA, 22 nt, Homo sapiens
cucggcgcggggcgcgggcucc

SEQ ID NO: 5526 - RNA, 23 nt, Homo sapiens
ucuggcuccgugucuucacuccc

SEQ ID NO: 5527 - RNA, 23 nt, Homo sapiens
uaaggugcaucuagugcagauag

SEQ ID NO: 5528 - RNA, 21 nt, Homo sapiens
cggcggggacggcgauugguc

SEQ ID NO: 5529 - RNA, 22 nt, Homo sapiens
aagcugccaguugaagaacugu

SEQ ID NO: 5530 - RNA, 22 nt, Homo sapiens
ucaggcucaguccccucccgau

SEQ ID NO: 5531 - RNA, 21 nt, Homo sapiens
aagccugcccggcuccucggg

SEQ ID NO: 5532 - RNA, 25 nt, Homo sapiens
aggggugguguugggacagcuccgu

SEQ ID NO: 5533 - RNA, 22 nt, Homo sapiens
gucccucuccaaaugugucuug

SEQ ID NO: 5534 - RNA, 22 nt, Homo sapiens
aggcggggcgccgcgggaccgc

SEQ ID NO: 5535 - RNA, 22 nt, Homo sapiens
ugcggggcuagggcuaacagca

SEQ ID NO: 5536 - RNA, 21 nt, Homo sapiens
uggaggagaaggaaggugaug

SEQ ID NO: 5537 - RNA, 22 nt, Homo sapiens
acuccagccccacagccucagc

SEQ ID NO: 5538 - RNA, 20 nt, Homo sapiens
ggggagcuguggaagcagua

SEQ ID NO: 5539 - RNA, 21 nt, Homo sapiens
ugacaacuauggaugagcucu

SEQ ID NO: 5540 - RNA, 22 nt, Homo sapiens
agaaggaaauugaauucauuua

SEQ ID NO: 5541 - RNA, 18 nt, Homo sapiens
cagggaggugaaugugau

SEQ ID NO: 5542 - RNA, 21 nt, Homo sapiens
uccugcgcgucccagaugccc

SEQ ID NO: 5543 - RNA, 22 nt, Homo sapiens
uagguaguuuccuguuguuggg

SEQ ID NO: 5544 - RNA, 22 nt, Homo sapiens
ugucaguuugucaaauacccca

SEQ ID NO: 5545 - RNA, 21 nt, Homo sapiens
ugagaugaagcacuguagcuc

SEQ ID NO: 5546 - RNA, 21 nt, Homo sapiens
uaguagaccguauagcguacg

SEQ ID NO: 5547 - RNA, 22 nt, Homo sapiens
gcugacuccuaguccagggcuc

SEQ ID NO: 5548 - RNA, 21 nt, Homo sapiens
acuggacuuggagucagaagg

SEQ ID NO: 5549 - RNA, 22 nt, Homo sapiens
ugugcgcagggagaccucuccc

SEQ ID NO: 5550 - RNA, 21 nt, Homo sapiens
ccaccaccgugucugacacuu

SEQ ID NO: 5551 - RNA, 22 nt, Homo sapiens
cagugcaaugaugaaagggcau

SEQ ID NO: 5552 - RNA, 21 nt, Homo sapiens
caaagaggaaggucccauuac

SEQ ID NO: 5553 - RNA, 22 nt, Homo sapiens
ugagguaguagguuguauaguu

SEQ ID NO: 5554 - RNA, 22 nt, Homo sapiens
ugagguaguagguugugugguu

SEQ ID NO: 5555 - RNA, 22 nt, Homo sapiens
ugagguaguagguuguaugguu

SEQ ID NO: 5556 - RNA, 22 nt, Homo sapiens
agagguaguagguugcauaguu

SEQ ID NO: 5557 - RNA, 22 nt, Homo sapiens
ugagguaggagguuguauaguu

SEQ ID NO: 5558 - RNA, 22 nt, Homo sapiens
ugagguaguagauuguauaguu

SEQ ID NO: 5559 - RNA, 22 nt, Homo sapiens
ugagguaguaguuuguacaguu

SEQ ID NO: 5560 - RNA, 22 nt, Homo sapiens
ugagguaguaguuugugcuguu

SEQ ID NO: 5561 - RNA, 22 nt, Homo sapiens
ugagguaguaguuugugcuguu

SEQ ID NO: 5562 - RNA, 21 nt, Homo sapiens
ccccaccuccucucuccucag

SEQ ID NO: 5563 - RNA, 22 nt, Homo sapiens
ucguaccgugaguaauaaugcg

SEQ ID NO: 5564 - RNA, 18 nt, Homo sapiens
aucccaccucugccacca

SEQ ID NO: 5565 - RNA, 17 nt, Homo sapiens
ucgccuccuccucuccc

SEQ ID NO: 5566 - RNA, 21 nt, Homo sapiens
ugcaggaccaagaugagcccu

SEQ ID NO: 5567 - RNA, 22 nt, Homo sapiens
uuuucaacucuaaugggagaga

SEQ ID NO: 5568 - RNA, 23 nt, Homo sapiens
ucuggcuccgugucuucacuccc

SEQ ID NO: 5569 - RNA, 21 nt, Homo sapiens
uccugcgcgucccagaugccc

SEQ ID NO: 5570 - RNA, 22 nt, Homo sapiens
uguaaacauccuacacucagcu

SEQ ID NO: 5571 - RNA, 21 nt, Homo sapiens
ucacuccucuccucccgucuu

SEQ ID NO: 5572 - RNA, 21 nt, Homo sapiens
aaagcgcuucccuucagagug

SEQ ID NO: 5573 - RNA, 22 nt, Homo sapiens
ccucccacacccaaggcuugca

SEQ ID NO: 5574 - RNA, 25 nt, Homo sapiens
aggggugguguugggacagcuccgu

SEQ ID NO: 5575 - RNA, 22 nt, Homo sapiens
auccgcgcucugacucucugcc

SEQ ID NO: 5576 - RNA, 22 nt, Homo sapiens
ugagguaguaaguuguauuguu

SEQ ID NO: 5577 - RNA, 22 nt, Homo sapiens
aacuggcccucaaagucccgcu

SEQ ID NO: 5578 - RNA, 22 nt, Homo sapiens
ugucaguuugucaaauacccca

SEQ ID NO: 5579 - RNA, 22 nt, Homo sapiens
aaaagcuggguugagagggcga

SEQ ID NO: 5580 - RNA, 22 nt, Homo sapiens
aaaagcuggguugagagggcaa

SEQ ID NO: 5581 - RNA, 20 nt, Homo sapiens
aaaagcuggguugagagggu

SEQ ID NO: 5582 - RNA, 19 nt, Homo sapiens
aaaagcuggguugagagga

SEQ ID NO: 5583 - RNA, 22 nt, Homo sapiens
aguauucuguaccagggaaggu

SEQ ID NO: 5584 - RNA, 23 nt, Homo sapiens
uauggcuuuucauuccuauguga

SEQ ID NO: 5585 - RNA, 22 nt, Homo sapiens
aacacaccugguuaaccucuuu

SEQ ID NO: 5586 - RNA, 22 nt, Homo sapiens
aacacaccuauucaaggauuca

SEQ ID NO: 5587 - RNA, 21 nt, Homo sapiens
ugaguuggccaucugagugag

SEQ ID NO: 5588 - RNA, 21 nt, Homo sapiens
cggcggggacggcgauugguc

SEQ ID NO: 5589 - RNA, 22 nt, Homo sapiens
aggcggggcgccgcgggaccgc

SEQ ID NO: 5590 - RNA, 21 nt, Homo sapiens
uccugcgcgucccagaugccc

SEQ ID NO: 5591 - RNA, 21 nt, Homo sapiens
cggcggggacggcgauugguc

SEQ ID NO: 5592 - RNA, 23 nt, Homo sapiens
ugaguaccgccaugucuguuggg

SEQ ID NO: 5593 - RNA, 22 nt, Homo sapiens
cauugcacuugucucggucuga

SEQ ID NO: 5594 - RNA, 23 nt, Homo sapiens
ucccccaggugugauucugauuu

SEQ ID NO: 5595 - RNA, 23 nt, Homo sapiens
ugaggggcagagagcgagacuuu

SEQ ID NO: 5596 - RNA, 23 nt, Homo sapiens
aggaccugcgggacaagauucuu

SEQ ID NO: 5597 - RNA, 19 nt, Homo sapiens
ugagcugcuguaccaaaau

SEQ ID NO: 5598 - RNA, 24 nt, Homo sapiens
acugggggcuuucgggcucugcgu

SEQ ID NO: 5599 - RNA, 19 nt, Homo sapiens
aagcagcugccucugaggc

SEQ ID NO: 5600 - RNA, 22 nt, Homo sapiens
aggcggggcgccgcgggaccgc

SEQ ID NO: 5601 - RNA, 22 nt, Homo sapiens
ugcggggcuagggcuaacagca

SEQ ID NO: 5602 - RNA, 21 nt, Homo sapiens
uggaggagaaggaaggugaug

SEQ ID NO: 5603 - RNA, 22 nt, Homo sapiens
ugagccccugugccgcccccag

SEQ ID NO: 5604 - RNA, 22 nt, Homo sapiens
uggagugugacaaugguguuug

SEQ ID NO: 5605 - RNA, 18 nt, Homo sapiens
aucccaccucugccacca

SEQ ID NO: 5606 - RNA, 22 nt, Homo sapiens
uacccagagcaugcagugugaa

SEQ ID NO: 5607 - RNA, 22 nt, Homo sapiens
ugggucuuugcgggcgagauga

SEQ ID NO: 5608 - RNA, 22 nt, Homo sapiens
uagguaguuucauguuguuggg

SEQ ID NO: 5609 - RNA, 22 nt, Homo sapiens
aauugcacuuuagcaaugguga

SEQ ID NO: 5610 - RNA, 23 nt, Homo sapiens
ugaggggcagagagcgagacuuu

SEQ ID NO: 5611 - RNA, 21 nt, Homo sapiens
uugaaaggcuauuucuugguc

SEQ ID NO: 5612 - RNA, 22 nt, Homo sapiens
aacaucacagcaagucugugcu

SEQ ID NO: 5613 - RNA, 24 nt, Homo sapiens
uucuccaaaagaaagcacuuucug

SEQ ID NO: 5614 - RNA, 22 nt, Homo sapiens
aagugccuccuuuuagaguguu

SEQ ID NO: 5615 - RNA, 22 nt, Homo sapiens
ccucccacacccaaggcuugca

SEQ ID NO: 5616 - RNA, 21 nt, Homo sapiens
ucuuguguucucuagaucagu

SEQ ID NO: 5617 - RNA, 22 nt, Homo sapiens
ugcggggcuagggcuaacagca

SEQ ID NO: 5618 - RNA, 22 nt, Homo sapiens
acagcaggcacagacaggcagu

SEQ ID NO: 5619 - RNA, 22 nt, Homo sapiens
uggcucaguucagcaggaacag

SEQ ID NO: 5620 - RNA, 22 nt, Homo sapiens
uggcagugucuuagcugguugu

SEQ ID NO: 5621 - RNA, 22 nt, Homo sapiens
caaucacuaacuccacugccau

SEQ ID NO: 5622 - RNA, 23 nt, Homo sapiens
aggcaguguaguuagcugauugc

SEQ ID NO: 5623 - RNA, 23 nt, Homo sapiens
ucccccaggugugauucugauuu

SEQ ID NO: 5624 - RNA, 22 nt, Homo sapiens
gccugcugggguggaaccuggu

SEQ ID NO: 5625 - RNA, 22 nt, Homo sapiens
uggcaguguauuguuagcuggu

SEQ ID NO: 5626 - RNA, 22 nt, Homo sapiens
aggcaguguauuguuagcuggc

SEQ ID NO: 5627 - RNA, 22 nt, Homo sapiens
ucaggcucaguccccucccgau

SEQ ID NO: 5628 - RNA, 21 nt, Homo sapiens
aagccugcccggcuccucggg

SEQ ID NO: 5629 - RNA, 24 nt, Homo sapiens
acugggggcuuucgggcucugcgu

SEQ ID NO: 5630 - RNA, 24 nt, Homo sapiens
ugccugggucucuggccugcgcgu

SEQ ID NO: 5631 - RNA, 20 nt, Homo sapiens
ggggagcuguggaagcagua

SEQ ID NO: 5632 - RNA, 22 nt, Homo sapiens
uuuccggcucgcgugggugugu

SEQ ID NO: 5633 - RNA, 22 nt, Homo sapiens
ucaccagcccuguguucccuag

SEQ ID NO: 5634 - RNA, 23 nt, Homo sapiens
agcugguguugugaaucaggccg

SEQ ID NO: 5635 - RNA, 23 nt, Homo sapiens
ucuggcuccgugucuucacuccc

SEQ ID NO: 5636 - RNA, 21 nt, Homo sapiens
cggcggggacggcgauugguc

SEQ ID NO: 5637 - RNA, 23 nt, Homo sapiens
ugaguaccgccaugucuguuggg

SEQ ID NO: 5638 - RNA, 22 nt, Homo sapiens
ucugcccccuccgcugcugcca

SEQ ID NO: 5639 - RNA, 23 nt, Homo sapiens
agcuacauugucugcuggguuuc

SEQ ID NO: 5640 - RNA, 20 nt, Homo sapiens
acugccccaggugcugcugg

SEQ ID NO: 5641 - RNA, 21 nt, Homo sapiens
gccccugggccuauccuagaa

SEQ ID NO: 5642 - RNA, 23 nt, Homo sapiens
ugaggggcagagagcgagacuuu

SEQ ID NO: 5643 - RNA, 21 nt, Homo sapiens
cggggcagcucaguacaggau

SEQ ID NO: 5644 - RNA, 19 nt, Homo sapiens
aggcugcggaauucaggac

SEQ ID NO: 5645 - RNA, 22 nt, Homo sapiens
aggcggggcgccgcgggaccgc

SEQ ID NO: 5646 - RNA, 23 nt, Homo sapiens
acuuacagacaagagccuugcuc

SEQ ID NO: 5647 - RNA, 22 nt, Homo sapiens
uggagugugacaaugguguuug

SEQ ID NO: 5648 - RNA, 17 nt, Homo sapiens
ucccuguucgggcgcca

SEQ ID NO: 5649 - RNA, 18 nt, Homo sapiens
ugaggcaguagauugaau

SEQ ID NO: 5650 - RNA, 23 nt, Homo sapiens
uaagugcuuccauguuuuaguag

SEQ ID NO: 5651 - RNA, 23 nt, Homo sapiens
uaagugcuuccauguuugagugu

SEQ ID NO: 5652 - RNA, 21 nt, Homo sapiens
uggaggagaaggaaggugaug

SEQ ID NO: 5653 - RNA, 21 nt, Homo sapiens
aaggcagggcccccgcucccc

SEQ ID NO: 5654 - RNA, 22 nt, Homo sapiens
cuuggcaccuagcaagcacuca

SEQ ID NO: 5655 - RNA, 22 nt, Homo sapiens
aacuguuugcagaggaaacuga

SEQ ID NO: 5656 - RNA, 21 nt, Homo sapiens
auccuugcuaucugggugcua

SEQ ID NO: 5657 - RNA, 19 nt, Homo sapiens
ugucucugcugggguuucu

SEQ ID NO: 5658 - RNA, 21 nt, Homo sapiens
agggggaaaguucuauagucc

SEQ ID NO: 5659 - RNA, 23 nt, Homo sapiens
uuuggcacuagcacauuuuugcu

SEQ ID NO: 5660 - RNA, 27 nt, Homo sapiens
accuucuuguauaagcacugugcuaaa

SEQ ID NO: 5661 - RNA, 22 nt, Homo sapiens
acgcccuucccccccuucuuca

SEQ ID NO: 5662 - RNA, 24 nt, Homo sapiens
agccuggaagcuggagccugcagu

SEQ ID NO: 5663 - RNA, 18 nt, Homo sapiens
gcaugggugguucagugg

SEQ ID NO: 5664 - RNA, 22 nt, Homo sapiens
gcccgcguguggagccaggugu

SEQ ID NO: 5665 - RNA, 21 nt, Homo sapiens
cggcggggacggcgauugguc

SEQ ID NO: 5666 - RNA, 23 nt, Homo sapiens
caacggaaucccaaaagcagcug

SEQ ID NO: 5667 - RNA, 21 nt, Homo sapiens
aggcaagaugcuggcauagcu

SEQ ID NO: 5668 - RNA, 22 nt, Homo sapiens
caaccuggaggacuccaugcug

SEQ ID NO: 5669 - RNA, 22 nt, Homo sapiens
ugugacagauugauaacugaaa

SEQ ID NO: 5670 - RNA, 22 nt, Homo sapiens
aggcggggcgccgcgggaccgc

SEQ ID NO: 5671 - RNA, 21 nt, Homo sapiens
ccccaccuccucucuccucag

SEQ ID NO: 5672 - RNA, 22 nt, Homo sapiens
uguaacagcaacuccaugugga

SEQ ID NO: 5673 - RNA, 22 nt, Homo sapiens
aguggggaacccuuccaugagg

SEQ ID NO: 5674 - RNA, 22 nt, Homo sapiens
uggagugugacaaugguguuug

SEQ ID NO: 5675 - RNA, 24 nt, Homo sapiens
agccuggaagcuggagccugcagu

SEQ ID NO: 5676 - RNA, 21 nt, Homo sapiens
uaccacaggguagaaccacgg

SEQ ID NO: 5677 - RNA, 22 nt, Homo sapiens
ucucccaacccuuguaccagug

SEQ ID NO: 5678 - RNA, 22 nt, Homo sapiens
caaagaauucuccuuuugggcu

SEQ ID NO: 5679 - RNA, 23 nt, Homo sapiens
uaaggugcaucuagugcagauag

SEQ ID NO: 5680 - RNA, 20 nt, Homo sapiens
ccccagggcgacgcggcggg

SEQ ID NO: 5681 - RNA, 20 nt, Homo sapiens
agagguauagggcaugggaa

SEQ ID NO: 5682 - RNA, 22 nt, Homo sapiens
aagcugccaguugaagaacugu

SEQ ID NO: 5683 - RNA, 22 nt, Homo sapiens
gaggguuggguggaggcucucc

SEQ ID NO: 5684 - RNA, 21 nt, Homo sapiens
agggcccccccucaauccugu

SEQ ID NO: 5685 - RNA, 22 nt, Homo sapiens
uguaaacauccuacacucagcu

SEQ ID NO: 5686 - RNA, 22 nt, Homo sapiens
aaaagcuggguugagagggcga

SEQ ID NO: 5687 - RNA, 22 nt, Homo sapiens
aaaagcuggguugagagggcaa

SEQ ID NO: 5688 - RNA, 20 nt, Homo sapiens
aaaagcuggguugagagggu

SEQ ID NO: 5689 - RNA, 19 nt, Homo sapiens
aaaagcuggguugagagga

SEQ ID NO: 5690 - RNA, 23 nt, Homo sapiens
ucuuggaguaggucauugggugg

SEQ ID NO: 5691 - RNA, 22 nt, Homo sapiens
ucaggcucaguccccucccgau

SEQ ID NO: 5692 - RNA, 22 nt, Homo sapiens
caagaaccucaguugcuuuugu

SEQ ID NO: 5693 - RNA, 19 nt, Homo sapiens
ugagcugcuguaccaaaau

SEQ ID NO: 5694 - RNA, 21 nt, Homo sapiens
aguuaaugaauccuggaaagu

SEQ ID NO: 5695 - RNA, 22 nt, Homo sapiens
uauaccucaguuuuaucaggug

SEQ ID NO: 5696 - RNA, 20 nt, Homo sapiens
ggggagcuguggaagcagua

SEQ ID NO: 5697 - RNA, 24 nt, Homo sapiens
uggggagcugaggcucugggggug

SEQ ID NO: 5698 - RNA, 22 nt, Homo sapiens
cuccugagccauucugagccuc

SEQ ID NO: 5699 - RNA, 23 nt, Homo sapiens
ucuggcuccgugucuucacuccc

SEQ ID NO: 5700 - RNA, 22 nt, Homo sapiens
cucccacugcuucacuugacua

SEQ ID NO: 5701 - RNA, 22 nt, Homo sapiens
uggcucaguucagcaggaacag

SEQ ID NO: 5702 - RNA, 20 nt, Homo sapiens
gugcauugcuguugcauugc

SEQ ID NO: 5703 - RNA, 23 nt, Homo sapiens
agcucggucugaggccccucagu

SEQ ID NO: 5704 - RNA, 22 nt, Homo sapiens
gagugccuucuuuuggagcguu

SEQ ID NO: 5705 - RNA, 22 nt, Homo sapiens
aagugccuccuuuuagaguguu

SEQ ID NO: 5706 - RNA, 23 nt, Homo sapiens
agugccugagggaguaagagccc

SEQ ID NO: 5707 - RNA, 22 nt, Homo sapiens
uccgagccugggucucccucuu

SEQ ID NO: 5708 - RNA, 21 nt, Homo sapiens
ucccacguuguggcccagcag

SEQ ID NO: 5709 - RNA, 21 nt, Homo sapiens
gcaggaacuugugagucuccu

SEQ ID NO: 5710 - RNA, 22 nt, Homo sapiens
acccgucccguucguccccgga

SEQ ID NO: 5711 - RNA, 18 nt, Homo sapiens
cagggaggugaaugugau

SEQ ID NO: 5712 - RNA, 20 nt, Homo sapiens
ccucugggcccuuccuccag

SEQ ID NO: 5713 - RNA, 22 nt, Homo sapiens
ucucugggccugugucuuaggc

SEQ ID NO: 5714 - RNA, 22 nt, Homo sapiens
auucugcauuuuuagcaaguuc

SEQ ID NO: 5715 - RNA, 22 nt, Homo sapiens
aaaacuguaauuacuuuuguac

SEQ ID NO: 5716 - RNA, 22 nt, Homo sapiens
uauugcacucgucccggccucc

SEQ ID NO: 5717 - RNA, 22 nt, Homo sapiens
uuuccggcucgcgugggugugu

SEQ ID NO: 5718 - RNA, 22 nt, Homo sapiens
acgcccuucccccccuucuuca

SEQ ID NO: 5719 - RNA, 22 nt, Homo sapiens
ucggauccgucugagcuuggcu

SEQ ID NO: 5720 - RNA, 21 nt, Homo sapiens
cucccacaugcaggguuugca

SEQ ID NO: 5721 - RNA, 21 nt, Homo sapiens
cggcggggacggcgauugguc

SEQ ID NO: 5722 - RNA, 23 nt, Homo sapiens
ugagcgccucgacgacagagccg

SEQ ID NO: 5723 - RNA, 22 nt, Homo sapiens
uaaugccccuaaaaauccuuau

SEQ ID NO: 5724 - RNA, 23 nt, Homo sapiens
aaugacacgaucacucccguuga

SEQ ID NO: 5725 - RNA, 22 nt, Homo sapiens
uugggaucauuuugcauccaua

SEQ ID NO: 5726 - RNA, 21 nt, Homo sapiens
ucuuguguucucuagaucagu

SEQ ID NO: 5727 - RNA, 22 nt, Homo sapiens
aggcggggcgccgcgggaccgc

SEQ ID NO: 5728 - RNA, 23 nt, Homo sapiens
aggaagcccuggaggggcuggag

SEQ ID NO: 5729 - RNA, 22 nt, Homo sapiens
ugcggggcuagggcuaacagca

SEQ ID NO: 5730 - RNA, 23 nt, Homo sapiens
cugggaucuccggggucuugguu

SEQ ID NO: 5731 - RNA, 22 nt, Homo sapiens
uuagggcccuggcuccaucucc

SEQ ID NO: 5732 - RNA, 25 nt, Homo sapiens
aggggugguguugggacagcuccgu

SEQ ID NO: 5733 - RNA, 23 nt, Homo sapiens
ccugcagcgacuugauggcuucc

SEQ ID NO: 5734 - RNA, 18 nt, Homo sapiens
ucagcuggcccucauuuc

SEQ ID NO: 5735 - RNA, 23 nt, Homo sapiens
cucucaccacugcccucccacag

SEQ ID NO: 5736 - RNA, 22 nt, Homo sapiens
acaggugagguucuugggagcc

SEQ ID NO: 5737 - RNA, 20 nt, Homo sapiens
uaaagagcccuguggagaca

SEQ ID NO: 5738 - RNA, 21 nt, Homo sapiens
uggacugcccugaucuggaga

SEQ ID NO: 5739 - RNA, 24 nt, Homo sapiens
uugcagcugccugggagugacuuc

SEQ ID NO: 5740 - RNA, 22 nt, Homo sapiens
gugugcggaaaugcuucugcua

SEQ ID NO: 5741 - RNA, 23 nt, Homo sapiens
caaagugcuuacagugcagguag

SEQ ID NO: 5742 - RNA, 22 nt, Homo sapiens
cauugcacuugucucggucuga

SEQ ID NO: 5743 - RNA, 22 nt, Homo sapiens
uacugcagacguggcaaucaug

SEQ ID NO: 5744 - RNA, 21 nt, Homo sapiens
uacugcagacaguggcaauca

SEQ ID NO: 5745 - RNA, 21 nt, Homo sapiens
agaccuggcccagaccucagc

SEQ ID NO: 5746 - RNA, 19 nt, Homo sapiens
gugaggacucgggaggugg

SEQ ID NO: 5747 - RNA, 22 nt, Homo sapiens
ugcccuguggacucaguucugg

SEQ ID NO: 5748 - RNA, 21 nt, Homo sapiens
gcccuccgcccgugcaccccg

SEQ ID NO: 5749 - RNA, 21 nt, Homo sapiens
gcccuccgcccgugcaccccg

SEQ ID NO: 5750 - RNA, 23 nt, Homo sapiens
uaaggugcaucuagugcagauag

SEQ ID NO: 5751 - RNA, 20 nt, Homo sapiens
ccuccugcccuccuugcugu

SEQ ID NO: 5752 - RNA, 22 nt, Homo sapiens
cauugcacuugucucggucuga

SEQ ID NO: 5753 - RNA, 22 nt, Homo sapiens
aagugcugucauagcugagguc

SEQ ID NO: 5754 - RNA, 20 nt, Homo sapiens
aggguguuucucucaucucu

SEQ ID NO: 5755 - RNA, 25 nt, Homo sapiens
ggcggagggaaguagguccguuggu

SEQ ID NO: 5756 - RNA, 25 nt, Homo sapiens
ggcggagggaaguagguccguuggu

SEQ ID NO: 5757 - RNA, 22 nt, Homo sapiens
cugcccuggcccgagggaccga

SEQ ID NO: 5758 - RNA, 21 nt, Homo sapiens
ccgucgccgccacccgagccg

SEQ ID NO: 5759 - RNA, 21 nt, Homo sapiens
uggcagggaggcugggagggg

SEQ ID NO: 5760 - RNA, 18 nt, Homo sapiens
cagggaggugaaugugau

SEQ ID NO: 5761 - RNA, 23 nt, Homo sapiens
ucuggcuccgugucuucacuccc

SEQ ID NO: 5762 - RNA, 21 nt, Homo sapiens
cggcggggacggcgauugguc

SEQ ID NO: 5763 - RNA, 22 nt, Homo sapiens
cgcaggggccgggugcucaccg

SEQ ID NO: 5764 - RNA, 23 nt, Homo sapiens
cgcauccccuagggcauuggugu

SEQ ID NO: 5765 - RNA, 22 nt, Homo sapiens
aguggggaacccuuccaugagg

SEQ ID NO: 5766 - RNA, 22 nt, Homo sapiens
aggcggggcgccgcgggaccgc

SEQ ID NO: 5767 - RNA, 22 nt, Homo sapiens
ugcggggcuagggcuaacagca

SEQ ID NO: 5768 - RNA, 24 nt, Homo sapiens
uggggagcugaggcucugggggug

SEQ ID NO: 5769 - RNA, 22 nt, Homo sapiens
ccucuuccccuugucucuccag

SEQ ID NO: 5770 - RNA, 22 nt, Homo sapiens
uagcagcacauaaugguuugug

SEQ ID NO: 5771 - RNA, 18 nt, Homo sapiens
ugaggcaguagauugaau

SEQ ID NO: 5772 - RNA, 22 nt, Homo sapiens
uugggaucauuuugcauccaua

SEQ ID NO: 5773 - RNA, 21 nt, Homo sapiens
uuuccauaggugaugagucac

SEQ ID NO: 5774 - RNA, 23 nt, Homo sapiens
cugggaucuccggggucuugguu

SEQ ID NO: 5775 - RNA, 20 nt, Homo sapiens
guagaggagauggcgcaggg

SEQ ID NO: 5776 - RNA, 20 nt, Homo sapiens
guagaggagauggcgcaggg

SEQ ID NO: 5777 - RNA, 21 nt, Homo sapiens
aaggcagggcccccgcucccc

SEQ ID NO: 5778 - RNA, 21 nt, Homo sapiens
uaggacacauggucuacuucu

SEQ ID NO: 5779 - RNA, 22 nt, Homo sapiens
augggugaauuuguagaaggau

SEQ ID NO: 5780 - RNA, 21 nt, Homo sapiens
ugcaggaccaagaugagcccu

SEQ ID NO: 5781 - RNA, 22 nt, Homo sapiens
uggagagaaaggcaguuccuga

SEQ ID NO: 5782 - RNA, 22 nt, Homo sapiens
acagcaggcacagacaggcagu

SEQ ID NO: 5783 - RNA, 20 nt, Homo sapiens
ccucugggcccuuccuccag

SEQ ID NO: 5784 - RNA, 22 nt, Homo sapiens
ucucugggccugugucuuaggc

SEQ ID NO: 5785 - RNA, 22 nt, Homo sapiens
gccugcugggguggaaccuggu

SEQ ID NO: 5786 - RNA, 23 nt, Homo sapiens
acuucaccugguccacuagccgu

SEQ ID NO: 5787 - RNA, 25 nt, Homo sapiens
aggggugguguugggacagcuccgu

SEQ ID NO: 5788 - RNA, 22 nt, Homo sapiens
ggggguccccggugcucggauc

SEQ ID NO: 5789 - RNA, 20 nt, Homo sapiens
cggcucugggucugugggga

SEQ ID NO: 5790 - RNA, 21 nt, Homo sapiens
ccuggaaacacugagguugug

SEQ ID NO: 5791 - RNA, 20 nt, Homo sapiens
ggggagcuguggaagcagua

SEQ ID NO: 5792 - RNA, 22 nt, Homo sapiens
ugugcgcagggagaccucuccc

SEQ ID NO: 5793 - RNA, 22 nt, Homo sapiens
gugugcggaaaugcuucugcua

SEQ ID NO: 5794 - RNA, 22 nt, Homo sapiens
uggacggagaacugauaagggu

SEQ ID NO: 5795 - RNA, 21 nt, Homo sapiens
cggcggggacggcgauugguc

SEQ ID NO: 5796 - RNA, 22 nt, Homo sapiens
ucaggccaggcacaguggcuca

SEQ ID NO: 5797 - RNA, 21 nt, Homo sapiens
gguuugguccuagccuuucua

SEQ ID NO: 5798 - RNA, 22 nt, Homo sapiens
uagcuuaucagacugauguuga

SEQ ID NO: 5799 - RNA, 21 nt, Homo sapiens
uucacaguggcuaaguuccgc

SEQ ID NO: 5800 - RNA, 23 nt, Homo sapiens
uaagugcuuccauguuuuaguag

SEQ ID NO: 5801 - RNA, 23 nt, Homo sapiens
uaagugcuuccauguuugagugu

SEQ ID NO: 5802 - RNA, 23 nt, Homo sapiens
acuucaccugguccacuagccgu

SEQ ID NO: 5803 - RNA, 22 nt, Homo sapiens
aaacaaacauggugcacuucuu

SEQ ID NO: 5804 - RNA, 21 nt, Homo sapiens
aaagcgcuucccuucagagug

SEQ ID NO: 5805 - RNA, 22 nt, Homo sapiens
ugugacagauugauaacugaaa

SEQ ID NO: 5806 - RNA, 22 nt, Homo sapiens
aggcggggcgccgcgggaccgc

SEQ ID NO: 5807 - RNA, 23 nt, Homo sapiens
ugucacucggcucggcccacuac

SEQ ID NO: 5808 - RNA, 22 nt, Homo sapiens
ugcggggcuagggcuaacagca

SEQ ID NO: 5809 - RNA, 22 nt, Homo sapiens
uauugcacucgucccggccucc

SEQ ID NO: 5810 - RNA, 22 nt, Homo sapiens
acucggcguggcgucggucgug

SEQ ID NO: 5811 - RNA, 23 nt, Homo sapiens
cggcccgggcugcugcuguuccu

SEQ ID NO: 5812 - RNA, 23 nt, Homo sapiens
cggcccgggcugcugcuguuccu

SEQ ID NO: 5813 - RNA, 22 nt, Homo sapiens
uauugcacucgucccggccucc

SEQ ID NO: 5814 - RNA, 22 nt, Homo sapiens
ugugcgcagggagaccucuccc

SEQ ID NO: 5815 - RNA, 22 nt, Homo sapiens
agaggcuggccgugaugaauuc

SEQ ID NO: 5816 - RNA, 24 nt, Homo sapiens
agccuggaagcuggagccugcagu

SEQ ID NO: 5817 - RNA, 21 nt, Homo sapiens
ugagaugaagcacuguagcuc

SEQ ID NO: 5818 - RNA, 22 nt, Homo sapiens
cccugugcccggcccacuucug

SEQ ID NO: 5819 - RNA, 22 nt, Homo sapiens
aaaagcuggguugagagggcga

SEQ ID NO: 5820 - RNA, 22 nt, Homo sapiens
aaaagcuggguugagagggcaa

SEQ ID NO: 5821 - RNA, 20 nt, Homo sapiens
aaaagcuggguugagagggu

SEQ ID NO: 5822 - RNA, 19 nt, Homo sapiens
aaaagcuggguugagagga

SEQ ID NO: 5823 - RNA, 23 nt, Homo sapiens
ucuuggaguaggucauugggugg

SEQ ID NO: 5824 - RNA, 24 nt, Homo sapiens
uucuccaaaagaaagcacuuucug

SEQ ID NO: 5825 - RNA, 22 nt, Homo sapiens
aagugccuccuuuuagaguguu

SEQ ID NO: 5826 - RNA, 25 nt, Homo sapiens
aggggugguguugggacagcuccgu

SEQ ID NO: 5827 - RNA, 20 nt, Homo sapiens
ggggagcuguggaagcagua

SEQ ID NO: 5828 - RNA, 17 nt, Homo sapiens
ucgccuccuccucuccc

SEQ ID NO: 5829 - RNA, 21 nt, Homo sapiens
uccugcgcgucccagaugccc

SEQ ID NO: 5830 - RNA, 23 nt, Homo sapiens
ucuuggaguaggucauugggugg

SEQ ID NO: 5831 - RNA, 23 nt, Homo sapiens
gaacgcgcuucccuauagagggu

SEQ ID NO: 5832 - RNA, 19 nt, Homo sapiens
gggcgccugugaucccaac

SEQ ID NO: 5833 - RNA, 20 nt, Homo sapiens
aggguguuucucucaucucu

SEQ ID NO: 5834 - RNA, 21 nt, Homo sapiens
aauggcgccacuaggguugug

SEQ ID NO: 5835 - RNA, 21 nt, Homo sapiens
uacuuggaaaggcaucaguug

SEQ ID NO: 5836 - RNA, 17 nt, Homo sapiens
ucgccuccuccucuccc

SEQ ID NO: 5837 - RNA, 18 nt, Homo sapiens
cagggaggugaaugugau

SEQ ID NO: 5838 - RNA, 18 nt, Homo sapiens
cagggaggugaaugugau

SEQ ID NO: 5839 - RNA, 22 nt, Homo sapiens
cccugugcccggcccacuucug

SEQ ID NO: 5840 - RNA, 22 nt, Homo sapiens
agaucagaaggugauuguggcu

SEQ ID NO: 5841 - RNA, 21 nt, Homo sapiens
uggguuuacguugggagaacu

SEQ ID NO: 5842 - RNA, 21 nt, Homo sapiens
uggaggagaaggaaggugaug

SEQ ID NO: 5843 - RNA, 21 nt, Homo sapiens
ccccaccuccucucuccucag

SEQ ID NO: 5844 - RNA, 20 nt, Homo sapiens
ugagcccuguccucccgcag

SEQ ID NO: 5845 - RNA, 24 nt, Homo sapiens
ucccugagacccuuuaaccuguga

SEQ ID NO: 5846 - RNA, 22 nt, Homo sapiens
ucccugagacccuaacuuguga

SEQ ID NO: 5847 - RNA, 18 nt, Homo sapiens
aucccaccucugccacca

SEQ ID NO: 5848 - RNA, 23 nt, Homo sapiens
ccucagggcuguagaacagggcu

SEQ ID NO: 5849 - RNA, 23 nt, Homo sapiens
ucuggcuccgugucuucacuccc

SEQ ID NO: 5850 - RNA, 18 nt, Homo sapiens
ugaggcaguagauugaau

SEQ ID NO: 5851 - RNA, 23 nt, Homo sapiens
uaaggugcaucuagugcagauag

SEQ ID NO: 5852 - RNA, 23 nt, Homo sapiens
uaaggugcaucuagugcaguuag

SEQ ID NO: 5853 - RNA, 22 nt, Homo sapiens
ucugcccccuccgcugcugcca

SEQ ID NO: 5854 - RNA, 22 nt, Homo sapiens
uggcucaguucagcaggaacag

SEQ ID NO: 5855 - RNA, 22 nt, Homo sapiens
uguaaacauccuacacucagcu

SEQ ID NO: 5856 - RNA, 20 nt, Homo sapiens
acugccccaggugcugcugg

SEQ ID NO: 5857 - RNA, 21 nt, Homo sapiens
cggggcagcucaguacaggau

SEQ ID NO: 5858 - RNA, 22 nt, Homo sapiens
ccucccacacccaaggcuugca

SEQ ID NO: 5859 - RNA, 23 nt, Homo sapiens
agugccugagggaguaagagccc

SEQ ID NO: 5860 - RNA, 22 nt, Homo sapiens
gucccucuccaaaugugucuug

SEQ ID NO: 5861 - RNA, 23 nt, Homo sapiens
aaggagcuuacaaucuagcuggg

SEQ ID NO: 5862 - RNA, 20 nt, Homo sapiens
ggggagcuguggaagcagua

SEQ ID NO: 5863 - RNA, 21 nt, Homo sapiens
aaggcagggcccccgcucccc

SEQ ID NO: 5864 - RNA, 21 nt, Homo sapiens
uggcagggaggcugggagggg

SEQ ID NO: 5865 - RNA, 18 nt, Homo sapiens
aucccaccucugccacca

SEQ ID NO: 5866 - RNA, 22 nt, Homo sapiens
cuggacugagccgugcuacugg

SEQ ID NO: 5867 - RNA, 17 nt, Homo sapiens
ucccaccgcugccaccc

SEQ ID NO: 5868 - RNA, 21 nt, Homo sapiens
uggacugcccugaucuggaga

SEQ ID NO: 5869 - RNA, 23 nt, Homo sapiens
ucuggcuccgugucuucacuccc

SEQ ID NO: 5870 - RNA, 22 nt, Homo sapiens
uguaaacauccuacacucagcu

SEQ ID NO: 5871 - RNA, 22 nt, Homo sapiens
caaucacuaacuccacugccau

SEQ ID NO: 5872 - RNA, 21 nt, Homo sapiens
gcaguccaugggcauauacac

SEQ ID NO: 5873 - RNA, 23 nt, Homo sapiens
uacuccagagggcgucacucaug

SEQ ID NO: 5874 - RNA, 22 nt, Homo sapiens
ccucccacacccaaggcuugca

SEQ ID NO: 5875 - RNA, 22 nt, Homo sapiens
gucccucuccaaaugugucuug

SEQ ID NO: 5876 - RNA, 21 nt, Homo sapiens
aaggcagggcccccgcucccc

SEQ ID NO: 5877 - RNA, 22 nt, Homo sapiens
acagcaggcacagacaggcagu

SEQ ID NO: 5878 - RNA, 22 nt, Homo sapiens
gccugcugggguggaaccuggu

SEQ ID NO: 5879 - RNA, 22 nt, Homo sapiens
ugugcgcagggagaccucuccc

SEQ ID NO: 5880 - RNA, 23 nt, Homo sapiens
cgcauccccuagggcauuggugu

SEQ ID NO: 5881 - RNA, 23 nt, Homo sapiens
uauucauuuauccccagccuaca

SEQ ID NO: 5882 - RNA, 22 nt, Homo sapiens
ucaccagcccuguguucccuag

SEQ ID NO: 5883 - RNA, 23 nt, Homo sapiens
cucucaccacugcccucccacag

SEQ ID NO: 5884 - RNA, 17 nt, Homo sapiens
ucgccuccuccucuccc

SEQ ID NO: 5885 - RNA, 22 nt, Homo sapiens
uucuggaauucugugugaggga

SEQ ID NO: 5886 - RNA, 22 nt, Homo sapiens
aagcccuuaccccaaaaagcau

SEQ ID NO: 5887 - RNA, 23 nt, Homo sapiens
agcugguguugugaaucaggccg

SEQ ID NO: 5888 - RNA, 23 nt, Homo sapiens
ucccccaggugugauucugauuu

SEQ ID NO: 5889 - RNA, 22 nt, Homo sapiens
uuuugcgauguguuccuaauau

SEQ ID NO: 5890 - RNA, 21 nt, Homo sapiens
gcgacccauacuugguuucag

SEQ ID NO: 5891 - RNA, 19 nt, Homo sapiens
gggcgccugugaucccaac

SEQ ID NO: 5892 - RNA, 24 nt, Homo sapiens
acugggggcuuucgggcucugcgu

SEQ ID NO: 5893 - RNA, 23 nt, Homo sapiens
ugcaccaugguugucugagcaug

SEQ ID NO: 5894 - RNA, 21 nt, Homo sapiens
uggcagggaggcugggagggg

SEQ ID NO: 5895 - RNA, 22 nt, Homo sapiens
ccucuuccccuugucucuccag

SEQ ID NO: 5896 - RNA, 22 nt, Homo sapiens
caggauguggucaaguguuguu

SEQ ID NO: 5897 - RNA, 25 nt, Homo sapiens
gggcgacaaagcaagacucuuucuu

SEQ ID NO: 5898 - RNA, 20 nt, Homo sapiens
uaaagagcccuguggagaca

SEQ ID NO: 5899 - RNA, 22 nt, Homo sapiens
cagugcaaugaugaaagggcau

SEQ ID NO: 5900 - RNA, 23 nt, Homo sapiens
ucuggcuccgugucuucacuccc

SEQ ID NO: 5901 - RNA, 20 nt, Homo sapiens
ccucugggcccuuccuccag

SEQ ID NO: 5902 - RNA, 22 nt, Homo sapiens
ucucugggccugugucuuaggc

SEQ ID NO: 5903 - RNA, 22 nt, Homo sapiens
gugacaucacauauacggcagc

SEQ ID NO: 5904 - RNA, 22 nt, Homo sapiens
ugugacagauugauaacugaaa

SEQ ID NO: 5905 - RNA, 21 nt, Homo sapiens
gcgacccauacuugguuucag

SEQ ID NO: 5906 - RNA, 20 nt, Homo sapiens
cggcucugggucugugggga

SEQ ID NO: 5907 - RNA, 21 nt, Homo sapiens
gcaggaacuugugagucuccu

SEQ ID NO: 5908 - RNA, 21 nt, Homo sapiens
uugcucacuguucuucccuag

SEQ ID NO: 5909 - RNA, 18 nt, Homo sapiens
aucccaccucugccacca

SEQ ID NO: 5910 - RNA, 24 nt, Homo sapiens
uggcccugacugaagaccagcagu

SEQ ID NO: 5911 - RNA, 22 nt, Homo sapiens
cgcaggggccgggugcucaccg

SEQ ID NO: 5912 - RNA, 22 nt, Homo sapiens
aacuggccuacaaagucccagu

SEQ ID NO: 5913 - RNA, 22 nt, Homo sapiens
aacuggcccucaaagucccgcu

SEQ ID NO: 5914 - RNA, 22 nt, Homo sapiens
uguaacagcaacuccaugugga

SEQ ID NO: 5915 - RNA, 22 nt, Homo sapiens
cuggcccucucugcccuuccgu

SEQ ID NO: 5916 - RNA, 21 nt, Homo sapiens
gccccugggccuauccuagaa

SEQ ID NO: 5917 - RNA, 21 nt, Homo sapiens
cggggcagcucaguacaggau

SEQ ID NO: 5918 - RNA, 22 nt, Homo sapiens
cgucaacacuugcugguuuccu

SEQ ID NO: 5919 - RNA, 25 nt, Homo sapiens
aggggugguguugggacagcuccgu

SEQ ID NO: 5920 - RNA, 23 nt, Homo sapiens
ucugcucauaccccaugguuucu

SEQ ID NO: 5921 - RNA, 20 nt, Homo sapiens
ucugcaggguuugcuuugag

SEQ ID NO: 5922 - RNA, 22 nt, Homo sapiens
cgcaggggccgggugcucaccg

SEQ ID NO: 5923 - RNA, 22 nt, Homo sapiens
ucugcccccuccgcugcugcca

SEQ ID NO: 5924 - RNA, 20 nt, Homo sapiens
acugccccaggugcugcugg

SEQ ID NO: 5925 - RNA, 21 nt, Homo sapiens
cggggcagcucaguacaggau

SEQ ID NO: 5926 - RNA, 19 nt, Homo sapiens
ugucucugcugggguuucu

SEQ ID NO: 5927 - RNA, 19 nt, Homo sapiens
aggcugcggaauucaggac

SEQ ID NO: 5928 - RNA, 22 nt, Homo sapiens
ugugcgcagggagaccucuccc

SEQ ID NO: 5929 - RNA, 22 nt, Homo sapiens
ugugcgcagggagaccucuccc

SEQ ID NO: 5930 - RNA, 23 nt, Homo sapiens
aaaagugcuuacagugcagguag

SEQ ID NO: 5931 - RNA, 21 nt, Homo sapiens
uaaagugcugacagugcagau

SEQ ID NO: 5932 - RNA, 18 nt, Homo sapiens
ucagcuggcccucauuuc

SEQ ID NO: 5933 - RNA, 24 nt, Homo sapiens
uugcagcugccugggagugacuuc

SEQ ID NO: 5934 - RNA, 24 nt, Homo sapiens
uugcagcugccugggagugacuuc

SEQ ID NO: 5935 - RNA, 23 nt, Homo sapiens
caaagugcuuacagugcagguag

SEQ ID NO: 5936 - RNA, 22 nt, Homo sapiens
caaagaauucuccuuuugggcu

SEQ ID NO: 5937 - RNA, 22 nt, Homo sapiens
uagguaguuucauguuguuggg

SEQ ID NO: 5938 - RNA, 23 nt, Homo sapiens
uaaagugcuuauagugcagguag

SEQ ID NO: 5939 - RNA, 23 nt, Homo sapiens
caaagugcucauagugcagguag

SEQ ID NO: 5940 - RNA, 22 nt, Homo sapiens
acagcaggcacagacaggcagu

SEQ ID NO: 5941 - RNA, 23 nt, Homo sapiens
cgcauccccuagggcauuggugu

SEQ ID NO: 5942 - RNA, 22 nt, Homo sapiens
aauugcacuuuagcaaugguga

SEQ ID NO: 5943 - RNA, 22 nt, Homo sapiens
gccugcugggguggaaccuggu

SEQ ID NO: 5944 - RNA, 22 nt, Homo sapiens
aaagugcauccuuuuagagugu

SEQ ID NO: 5945 - RNA, 22 nt, Homo sapiens
aaagugcauccuuuuagagguu

SEQ ID NO: 5946 - RNA, 22 nt, Homo sapiens
aaagugcaucuuuuuagaggau

SEQ ID NO: 5947 - RNA, 22 nt, Homo sapiens
caaagugccucccuuuagagug

SEQ ID NO: 5948 - RNA, 23 nt, Homo sapiens
cucuugagggaagcacuuucugu

SEQ ID NO: 5949 - RNA, 22 nt, Homo sapiens
aaccagcaccccaacuuuggac

SEQ ID NO: 5950 - RNA, 22 nt, Homo sapiens
ugcggggcuagggcuaacagca

SEQ ID NO: 5951 - RNA, 20 nt, Homo sapiens
cggcucugggucugugggga

SEQ ID NO: 5952 - RNA, 23 nt, Homo sapiens
caaagugcuguucgugcagguag

SEQ ID NO: 5953 - RNA, 18 nt, Homo sapiens
cgggcguggugguggggg

SEQ ID NO: 5954 - RNA, 20 nt, Homo sapiens
guguguggaaaugcuucugc

SEQ ID NO: 5955 - RNA, 20 nt, Homo sapiens
ccccagggcgacgcggcggg

SEQ ID NO: 5956 - RNA, 22 nt, Homo sapiens
uguaaacauccuacacucagcu

SEQ ID NO: 5957 - RNA, 21 nt, Homo sapiens
gccccugggccuauccuagaa

SEQ ID NO: 5958 - RNA, 22 nt, Homo sapiens
gcugacuccuaguccagggcuc

SEQ ID NO: 5959 - RNA, 21 nt, Homo sapiens
acagucugcugagguuggagc

SEQ ID NO: 5960 - RNA, 23 nt, Homo sapiens
gcagcagagaauaggacuacguc

SEQ ID NO: 5961 - RNA, 22 nt, Homo sapiens
uggagugugacaaugguguuug

SEQ ID NO: 5962 - RNA, 22 nt, Homo sapiens
ucggccugaccacccaccccac

SEQ ID NO: 5963 - RNA, 22 nt, Homo sapiens
gcccgcguguggagccaggugu

SEQ ID NO: 5964 - RNA, 22 nt, Homo sapiens
uucccuuugucauccuaugccu

SEQ ID NO: 5965 - RNA, 22 nt, Homo sapiens
uucccuuugucauccuucgccu

SEQ ID NO: 5966 - RNA, 21 nt, Homo sapiens
auuugugcuuggcucugucac

SEQ ID NO: 5967 - RNA, 23 nt, Homo sapiens
gacacgggcgacagcugcggccc

SEQ ID NO: 5968 - RNA, 24 nt, Homo sapiens
ugccugggucucuggccugcgcgu

SEQ ID NO: 5969 - RNA, 22 nt, Homo sapiens
ugcggggcuagggcuaacagca

SEQ ID NO: 5970 - RNA, 23 nt, Homo sapiens
cacccggcugugugcacaugugc

SEQ ID NO: 5971 - RNA, 22 nt, Homo sapiens
ccucuuccccuugucucuccag

SEQ ID NO: 5972 - RNA, 17 nt, Homo sapiens
ucgccuccuccucuccc

SEQ ID NO: 5973 - RNA, 22 nt, Homo sapiens
ucuacaaaggaaagcgcuuucu

SEQ ID NO: 5974 - RNA, 23 nt, Homo sapiens
uggaguccaggaaucugcauuuu

SEQ ID NO: 5975 - RNA, 22 nt, Homo sapiens
ugugacugguugaccagagggg

SEQ ID NO: 5976 - RNA, 22 nt, Homo sapiens
cccugugcccggcccacuucug

SEQ ID NO: 5977 - RNA, 21 nt, Homo sapiens
uugugcuugaucuaaccaugu

SEQ ID NO: 5978 - RNA, 23 nt, Homo sapiens
uaagugcuuccauguuuuaguag

SEQ ID NO: 5979 - RNA, 23 nt, Homo sapiens
uaagugcuuccauguuugagugu

SEQ ID NO: 5980 - RNA, 21 nt, Homo sapiens
acuggacuuggagucagaagg

SEQ ID NO: 5981 - RNA, 22 nt, Homo sapiens
acuggacuuagggucagaaggc

SEQ ID NO: 5982 - RNA, 22 nt, Homo sapiens
uucacaaggaggugucauuuau

SEQ ID NO: 5983 - RNA, 20 nt, Homo sapiens
cuacaaagggaagcccuuuc

SEQ ID NO: 5984 - RNA, 22 nt, Homo sapiens
cuacaaagggaagcacuuucuc

SEQ ID NO: 5985 - RNA, 23 nt, Homo sapiens
ugugcuugcucgucccgcccgca

SEQ ID NO: 5986 - RNA, 22 nt, Homo sapiens
uuugugaccugguccacuaacc

SEQ ID NO: 5987 - RNA, 21 nt, Homo sapiens
uggaggagaaggaaggugaug

SEQ ID NO: 5988 - RNA, 22 nt, Homo sapiens
acuccagccccacagccucagc

SEQ ID NO: 5989 - RNA, 17 nt, Homo sapiens
gugggggagaggcuguc

SEQ ID NO: 5990 - RNA, 21 nt, Homo sapiens
cggcggggacggcgauugguc

SEQ ID NO: 5991 - RNA, 22 nt, Homo sapiens
uguaaacauccucgacuggaag

SEQ ID NO: 5992 - RNA, 22 nt, Homo sapiens
uguaaacauccccgacuggaag

SEQ ID NO: 5993 - RNA, 22 nt, Homo sapiens
uguaaacauccuugacuggaag

SEQ ID NO: 5994 - RNA, 22 nt, Homo sapiens
aggcggggcgccgcgggaccgc

SEQ ID NO: 5995 - RNA, 22 nt, Homo sapiens
ugcggggcuagggcuaacagca

SEQ ID NO: 5996 - RNA, 20 nt, Homo sapiens
cgugccacccuuuuccccag

SEQ ID NO: 5997 - RNA, 22 nt, Homo sapiens
ccucuuccccuugucucuccag

SEQ ID NO: 5998 - RNA, 22 nt, Homo sapiens
acucggcguggcgucggucgug

SEQ ID NO: 5999 - RNA, 21 nt, Homo sapiens
cggcggggacggcgauugguc

SEQ ID NO: 6000 - RNA, 20 nt, Homo sapiens
ccccagggcgacgcggcggg

SEQ ID NO: 6001 - RNA, 20 nt, Homo sapiens
ccuccugcccuccuugcugu

SEQ ID NO: 6002 - RNA, 22 nt, Homo sapiens
cauugcacuugucucggucuga

SEQ ID NO: 6003 - RNA, 21 nt, Homo sapiens
gccccugggccuauccuagaa

SEQ ID NO: 6004 - RNA, 22 nt, Homo sapiens
cgucaacacuugcugguuuccu

SEQ ID NO: 6005 - RNA, 20 nt, Homo sapiens
uaaggcacgcggugaaugcc

SEQ ID NO: 6006 - RNA, 20 nt, Homo sapiens
uaaggcacgcggugaaugcc

SEQ ID NO: 6007 - RNA, 22 nt, Homo sapiens
cucuagagggaagcacuuucug

SEQ ID NO: 6008 - RNA, 22 nt, Homo sapiens
cucuagagggaagcacuuucug

SEQ ID NO: 6009 - RNA, 21 nt, Homo sapiens
aaagcgcuucccuucagagug

SEQ ID NO: 6010 - RNA, 21 nt, Homo sapiens
aaagcgcuucccuucagagug

SEQ ID NO: 6011 - RNA, 21 nt, Homo sapiens
gaaagcgcuucucuuuagagg

SEQ ID NO: 6012 - RNA, 21 nt, Homo sapiens
gaaagcgcuucucuuuagagg

SEQ ID NO: 6013 - RNA, 22 nt, Homo sapiens
aaagugcauccuuuuagagugu

SEQ ID NO: 6014 - RNA, 22 nt, Homo sapiens
aaagugcauccuuuuagagugu

SEQ ID NO: 6015 - RNA, 22 nt, Homo sapiens
cucuagagggaagcgcuuucug

SEQ ID NO: 6016 - RNA, 22 nt, Homo sapiens
cucuagagggaagcgcuuucug

SEQ ID NO: 6017 - RNA, 22 nt, Homo sapiens
cucuagagggaagcgcuuucug

SEQ ID NO: 6018 - RNA, 22 nt, Homo sapiens
cucuagagggaagcgcuuucug

SEQ ID NO: 6019 - RNA, 22 nt, Homo sapiens
cucuagagggaagcacuuucug

SEQ ID NO: 6020 - RNA, 22 nt, Homo sapiens
cucuagagggaagcacuuucug

SEQ ID NO: 6021 - RNA, 22 nt, Homo sapiens
aaaaugguucccuuuagagugu

SEQ ID NO: 6022 - RNA, 22 nt, Homo sapiens
aaaaugguucccuuuagagugu

SEQ ID NO: 6023 - RNA, 23 nt, Homo sapiens
gaacgcgcuucccuauagagggu

SEQ ID NO: 6024 - RNA, 23 nt, Homo sapiens
gaacgcgcuucccuauagagggu

SEQ ID NO: 6025 - RNA, 22 nt, Homo sapiens
cucuagagggaagcacuuucug

SEQ ID NO: 6026 - RNA, 22 nt, Homo sapiens
cucuagagggaagcacuuucug

SEQ ID NO: 6027 - RNA, 21 nt, Homo sapiens
agggggaaaguucuauagucc

SEQ ID NO: 6028 - RNA, 19 nt, Homo sapiens
aguguggcuuucuuagagc

SEQ ID NO: 6029 - RNA, 22 nt, Homo sapiens
aggcggggcgccgcgggaccgc

SEQ ID NO: 6030 - RNA, 20 nt, Homo sapiens
guagaggagauggcgcaggg

SEQ ID NO: 6031 - RNA, 22 nt, Homo sapiens
uggagugugacaaugguguuug

SEQ ID NO: 6032 - RNA, 18 nt, Homo sapiens
cgggcguggugguggggg

SEQ ID NO: 6033 - RNA, 21 nt, Homo sapiens
cggcggggacggcgauugguc

SEQ ID NO: 6034 - RNA, 21 nt, Homo sapiens
acuggacuuggagucagaagg

SEQ ID NO: 6035 - RNA, 22 nt, Homo sapiens
aggcggggcgccgcgggaccgc

SEQ ID NO: 6036 - RNA, 22 nt, Homo sapiens
ugcggggcuagggcuaacagca

SEQ ID NO: 6037 - RNA, 23 nt, Homo sapiens
ucaaaugcucagacuccuguggu

SEQ ID NO: 6038 - RNA, 23 nt, Homo sapiens
ccugcagcgacuugauggcuucc

SEQ ID NO: 6039 - RNA, 20 nt, Homo sapiens
ucugcaggguuugcuuugag

SEQ ID NO: 6040 - RNA, 24 nt, Homo sapiens
uugcagcugccugggagugacuuc

SEQ ID NO: 6041 - RNA, 22 nt, Homo sapiens
uguaacagcaacuccaugugga

SEQ ID NO: 6042 - RNA, 22 nt, Homo sapiens
gaaguuguucgugguggauucg

SEQ ID NO: 6043 - RNA, 23 nt, Homo sapiens
agugccugagggaguaagagccc

SEQ ID NO: 6044 - RNA, 23 nt, Homo sapiens
gcgaggaccccucggggucugac

SEQ ID NO: 6045 - RNA, 22 nt, Homo sapiens
ucggccugaccacccaccccac

SEQ ID NO: 6046 - RNA, 22 nt, Homo sapiens
augggugaauuuguagaaggau

SEQ ID NO: 6047 - RNA, 21 nt, Homo sapiens
cggcggggacggcgauugguc

SEQ ID NO: 6048 - RNA, 22 nt, Homo sapiens
cauugcacuugucucggucuga

SEQ ID NO: 6049 - RNA, 22 nt, Homo sapiens
aggcggggcgccgcgggaccgc

SEQ ID NO: 6050 - RNA, 22 nt, Homo sapiens
ugcggggcuagggcuaacagca

SEQ ID NO: 6051 - RNA, 21 nt, Homo sapiens
uggaggagaaggaaggugaug

SEQ ID NO: 6052 - RNA, 21 nt, Homo sapiens
cccggagccaggaugcagcuc

SEQ ID NO: 6053 - RNA, 21 nt, Homo sapiens
ccccaccuccucucuccucag

SEQ ID NO: 6054 - RNA, 22 nt, Homo sapiens
ugugagguuggcauuguugucu

SEQ ID NO: 6055 - RNA, 23 nt, Homo sapiens
ucuggcuccgugucuucacuccc

SEQ ID NO: 6056 - RNA, 23 nt, Homo sapiens
cggcccgggcugcugcuguuccu

SEQ ID NO: 6057 - RNA, 21 nt, Homo sapiens
gccccugggccuauccuagaa

SEQ ID NO: 6058 - RNA, 22 nt, Homo sapiens
aauugcacgguauccaucugua

SEQ ID NO: 6059 - RNA, 23 nt, Homo sapiens
ugaggggcagagagcgagacuuu

SEQ ID NO: 6060 - RNA, 22 nt, Homo sapiens
uggugggcacagaaucuggacu

SEQ ID NO: 6061 - RNA, 21 nt, Homo sapiens
aggguaagcugaaccucugau

SEQ ID NO: 6062 - RNA, 22 nt, Homo sapiens
ggggguccccggugcucggauc

SEQ ID NO: 6063 - RNA, 22 nt, Homo sapiens
uggugggccgcagaacaugugc

SEQ ID NO: 6064 - RNA, 21 nt, Homo sapiens
ucacagugaaccggucucuuu

SEQ ID NO: 6065 - RNA, 24 nt, Homo sapiens
uugcagcugccugggagugacuuc

SEQ ID NO: 6066 - RNA, 21 nt, Homo sapiens
uccugcgcgucccagaugccc

SEQ ID NO: 6067 - RNA, 23 nt, Homo sapiens
ugaguaccgccaugucuguuggg

SEQ ID NO: 6068 - RNA, 25 nt, Homo sapiens
cccccacaaccgcgcuugacuagcu

SEQ ID NO: 6069 - RNA, 22 nt, Homo sapiens
uggcucaguucagcaggaacag

SEQ ID NO: 6070 - RNA, 21 nt, Homo sapiens
aagccugcccggcuccucggg

SEQ ID NO: 6071 - RNA, 19 nt, Homo sapiens
aggcugcggaauucaggac

SEQ ID NO: 6072 - RNA, 22 nt, Homo sapiens
ugcggggcuagggcuaacagca

SEQ ID NO: 6073 - RNA, 23 nt, Homo sapiens
caagucuuauuugagcaccuguu

SEQ ID NO: 6074 - RNA, 23 nt, Homo sapiens
uggugcggagagggcccacagug

SEQ ID NO: 6075 - RNA, 23 nt, Homo sapiens
gagggucuugggagggaugugac

SEQ ID NO: 6076 - RNA, 21 nt, Homo sapiens
aagugaucuaaaggccuacau

SEQ ID NO: 6077 - RNA, 21 nt, Homo sapiens
gcccuccgcccgugcaccccg

SEQ ID NO: 6078 - RNA, 23 nt, Homo sapiens
ucuggcuccgugucuucacuccc

SEQ ID NO: 6079 - RNA, 21 nt, Homo sapiens
caucccuugcaugguggaggg

SEQ ID NO: 6080 - RNA, 23 nt, Homo sapiens
uaaggugcaucuagugcagauag

SEQ ID NO: 6081 - RNA, 20 nt, Homo sapiens
ccccagggcgacgcggcggg

SEQ ID NO: 6082 - RNA, 22 nt, Homo sapiens
ugggucuuugcgggcgagauga

SEQ ID NO: 6083 - RNA, 21 nt, Homo sapiens
uugugcuugaucuaaccaugu

SEQ ID NO: 6084 - RNA, 22 nt, Homo sapiens
cauugcacuugucucggucuga

SEQ ID NO: 6085 - RNA, 22 nt, Homo sapiens
uuauaaagcaaugagacugauu

SEQ ID NO: 6086 - RNA, 22 nt, Homo sapiens
uuauaaagcaaugagacugauu

SEQ ID NO: 6087 - RNA, 22 nt, Homo sapiens
caaaguuuaagauccuugaagu

SEQ ID NO: 6088 - RNA, 23 nt, Homo sapiens
uaaaucccauggugccuucuccu

SEQ ID NO: 6089 - RNA, 25 nt, Homo sapiens
ggcggagggaaguagguccguuggu

SEQ ID NO: 6090 - RNA, 20 nt, Homo sapiens
cggcucugggucugugggga

SEQ ID NO: 6091 - RNA, 22 nt, Homo sapiens
cugcccuggcccgagggaccga

SEQ ID NO: 6092 - RNA, 22 nt, Homo sapiens
uggauuucuuugugaaucacca

SEQ ID NO: 6093 - RNA, 24 nt, Homo sapiens
agccuggaagcuggagccugcagu

SEQ ID NO: 6094 - RNA, 22 nt, Homo sapiens
agacuucccauuugaagguggc

SEQ ID NO: 6095 - RNA, 21 nt, Homo sapiens
uggcagggaggcugggagggg

SEQ ID NO: 6096 - RNA, 22 nt, Homo sapiens
gcccgcguguggagccaggugu

SEQ ID NO: 6097 - RNA, 23 nt, Homo sapiens
uaaggugcaucuagugcagauag

SEQ ID NO: 6098 - RNA, 22 nt, Homo sapiens
uucccuuugucauccuaugccu

SEQ ID NO: 6099 - RNA, 22 nt, Homo sapiens
uucccuuugucauccuucgccu

SEQ ID NO: 6100 - RNA, 17 nt, Homo sapiens
uaauugcuuccauguuu

SEQ ID NO: 6101 - RNA, 22 nt, Homo sapiens
uucucaaggaggugucguuuau

SEQ ID NO: 6102 - RNA, 22 nt, Homo sapiens
ugcggggcuagggcuaacagca

SEQ ID NO: 6103 - RNA, 22 nt, Homo sapiens
cugcccuggcccgagggaccga

SEQ ID NO: 6104 - RNA, 24 nt, Homo sapiens
ccagacagaauucuaugcacuuuc

SEQ ID NO: 6105 - RNA, 18 nt, Homo sapiens
ugaggcaguagauugaau

SEQ ID NO: 6106 - RNA, 22 nt, Homo sapiens
uggagagaaaggcaguuccuga

SEQ ID NO: 6107 - RNA, 22 nt, Homo sapiens
ucgugucuuguguugcagccgg

SEQ ID NO: 6108 - RNA, 21 nt, Homo sapiens
cggcggggacggcgauugguc

SEQ ID NO: 6109 - RNA, 22 nt, Homo sapiens
cauugcacuugucucggucuga

SEQ ID NO: 6110 - RNA, 24 nt, Homo sapiens
agcagaagcagggagguucuccca

SEQ ID NO: 6111 - RNA, 23 nt, Homo sapiens
ugucugcccgcaugccugccucu

SEQ ID NO: 6112 - RNA, 21 nt, Homo sapiens
acagucugcugagguuggagc

SEQ ID NO: 6113 - RNA, 21 nt, Homo sapiens
agggggaaaguucuauagucc

SEQ ID NO: 6114 - RNA, 19 nt, Homo sapiens
gugucugcuuccuguggga

SEQ ID NO: 6115 - RNA, 22 nt, Homo sapiens
gucccucuccaaaugugucuug

SEQ ID NO: 6116 - RNA, 25 nt, Homo sapiens
ggcggagggaaguagguccguuggu

SEQ ID NO: 6117 - RNA, 22 nt, Homo sapiens
aggcggggcgccgcgggaccgc

SEQ ID NO: 6118 - RNA, 21 nt, Homo sapiens
uacucaaaaagcugucaguca

SEQ ID NO: 6119 - RNA, 24 nt, Homo sapiens
uggggagcugaggcucugggggug

SEQ ID NO: 6120 - RNA, 22 nt, Homo sapiens
cuccugagccauucugagccuc

SEQ ID NO: 6121 - RNA, 22 nt, Homo sapiens
ucaccagcccuguguucccuag

SEQ ID NO: 6122 - RNA, 23 nt, Homo sapiens
agcugguguugugaaucaggccg

SEQ ID NO: 6123 - RNA, 22 nt, Homo sapiens
ugggucuuugcgggcgagauga

SEQ ID NO: 6124 - RNA, 22 nt, Homo sapiens
aacuggcccucaaagucccgcu

SEQ ID NO: 6125 - RNA, 22 nt, Homo sapiens
uagcaccaucugaaaucgguua

SEQ ID NO: 6126 - RNA, 23 nt, Homo sapiens
uagcaccauuugaaaucaguguu

SEQ ID NO: 6127 - RNA, 22 nt, Homo sapiens
uagcaccauuugaaaucgguua

SEQ ID NO: 6128 - RNA, 23 nt, Homo sapiens
ucaagagcaauaacgaaaaaugu

SEQ ID NO: 6129 - RNA, 23 nt, Homo sapiens
gaagugcuucgauuuuggggugu

SEQ ID NO: 6130 - RNA, 22 nt, Homo sapiens
uuauaauacaaccugauaagug

SEQ ID NO: 6131 - RNA, 22 nt, Homo sapiens
ugaguauuacauggccaaucuc

SEQ ID NO: 6132 - RNA, 23 nt, Homo sapiens
uaauccuugcuaccugggugaga

SEQ ID NO: 6133 - RNA, 22 nt, Homo sapiens
aauccuuugucccugggugaga

SEQ ID NO: 6134 - RNA, 22 nt, Homo sapiens
uacucaggagaguggcaaucac

SEQ ID NO: 6135 - RNA, 22 nt, Homo sapiens
uggugggcacagaaucuggacu

SEQ ID NO: 6136 - RNA, 22 nt, Homo sapiens
agucauuggaggguuugagcag

SEQ ID NO: 6137 - RNA, 22 nt, Homo sapiens
gugagucucuaagaaaagagga

SEQ ID NO: 6138 - RNA, 21 nt, Homo sapiens
uacucaaaaagcugucaguca

SEQ ID NO: 6139 - RNA, 22 nt, Homo sapiens
aacccguagauccgaacuugug

SEQ ID NO: 6140 - RNA, 18 nt, Homo sapiens
ugcuuccuuucagagggu

SEQ ID NO: 6141 - RNA, 22 nt, Homo sapiens
aucuggagguaagaagcacuuu

SEQ ID NO: 6142 - RNA, 19 nt, Homo sapiens
uggauuuuuggaucaggga

SEQ ID NO: 6143 - RNA, 22 nt, Homo sapiens
caaagaauucuccuuuugggcu

SEQ ID NO: 6144 - RNA, 22 nt, Homo sapiens
caaaaaucucaauuacuuuugc

SEQ ID NO: 6145 - RNA, 21 nt, Homo sapiens
uuuccauaggugaugagucac

SEQ ID NO: 6146 - RNA, 22 nt, Homo sapiens
ugcaacuuaccugagucauuga

SEQ ID NO: 6147 - RNA, 23 nt, Homo sapiens
ccugcagcgacuugauggcuucc

SEQ ID NO: 6148 - RNA, 18 nt, Homo sapiens
gucccuguucaggcgcca

SEQ ID NO: 6149 - RNA, 18 nt, Homo sapiens
cagggaggugaaugugau

SEQ ID NO: 6150 - RNA, 23 nt, Homo sapiens
ucuggcuccgugucuucacuccc

SEQ ID NO: 6151 - RNA, 23 nt, Homo sapiens
caaagugcuuacagugcagguag

SEQ ID NO: 6152 - RNA, 22 nt, Homo sapiens
cccugugcccggcccacuucug

SEQ ID NO: 6153 - RNA, 20 nt, Homo sapiens
ccuccugcccuccuugcugu

SEQ ID NO: 6154 - RNA, 22 nt, Homo sapiens
acagcaggcacagacaggcagu

SEQ ID NO: 6155 - RNA, 22 nt, Homo sapiens
acacagggcuguugugaagacu

SEQ ID NO: 6156 - RNA, 23 nt, Homo sapiens
gcaaagcacacggccugcagaga

SEQ ID NO: 6157 - RNA, 22 nt, Homo sapiens
gccugcugggguggaaccuggu

SEQ ID NO: 6158 - RNA, 22 nt, Homo sapiens
gugacaucacauauacggcagc

SEQ ID NO: 6159 - RNA, 20 nt, Homo sapiens
cugcaaagggaagcccuuuc

SEQ ID NO: 6160 - RNA, 20 nt, Homo sapiens
cugcaaagggaagcccuuuc

SEQ ID NO: 6161 - RNA, 19 nt, Homo sapiens
aagcagcugccucugaggc

SEQ ID NO: 6162 - RNA, 21 nt, Homo sapiens
guggcugcacucacuuccuuc

SEQ ID NO: 6163 - RNA, 23 nt, Homo sapiens
uggaagacuagugauuuuguugu

SEQ ID NO: 6164 - RNA, 21 nt, Homo sapiens
uggaggagaaggaaggugaug

SEQ ID NO: 6165 - RNA, 23 nt, Homo sapiens
ucugcucauaccccaugguuucu

SEQ ID NO: 6166 - RNA, 21 nt, Homo sapiens
cugacuguugccguccuccag

SEQ ID NO: 6167 - RNA, 22 nt, Homo sapiens
uacucaggagaguggcaaucac

SEQ ID NO: 6168 - RNA, 21 nt, Homo sapiens
acucuagcugccaaaggcgcu

SEQ ID NO: 6169 - RNA, 22 nt, Homo sapiens
ugagaacugaauuccauggguu

SEQ ID NO: 6170 - RNA, 22 nt, Homo sapiens
ugagaacugaauuccauaggcu

SEQ ID NO: 6171 - RNA, 22 nt, Homo sapiens
ucaggcucaguccccucccgau

SEQ ID NO: 6172 - RNA, 22 nt, Homo sapiens
ugaaacauacacgggaaaccuc

SEQ ID NO: 6173 - RNA, 21 nt, Homo sapiens
aagccugcccggcuccucggg

SEQ ID NO: 6174 - RNA, 21 nt, Homo sapiens
uggguuuacguugggagaacu

SEQ ID NO: 6175 - RNA, 20 nt, Homo sapiens
accaggaggcugaggccccu

SEQ ID NO: 6176 - RNA, 26 nt, Homo sapiens
gaugaugauggcagcaaauucugaaa

SEQ ID NO: 6177 - RNA, 22 nt, Homo sapiens
uggagugugacaaugguguuug

SEQ ID NO: 6178 - RNA, 22 nt, Homo sapiens
cuuggcaccuagcaagcacuca

SEQ ID NO: 6179 - RNA, 22 nt, Homo sapiens
uaguacugugcauaucaucuau

SEQ ID NO: 6180 - RNA, 22 nt, Homo sapiens
ucugggcaacaaagugagaccu

SEQ ID NO: 6181 - RNA, 21 nt, Homo sapiens
aggcaagaugcuggcauagcu

SEQ ID NO: 6182 - RNA, 22 nt, Homo sapiens
aaacaaacauggugcacuucuu

SEQ ID NO: 6183 - RNA, 25 nt, Homo sapiens
gcugggcagggcuucugagcuccuu

SEQ ID NO: 6184 - RNA, 23 nt, Homo sapiens
uccaguaccacgugucagggcca

SEQ ID NO: 6185 - RNA, 23 nt, Homo sapiens
uuuggcacuagcacauuuuugcu

SEQ ID NO: 6186 - RNA, 20 nt, Homo sapiens
accaggaggcugaggccccu

SEQ ID NO: 6187 - RNA, 18 nt, Homo sapiens
cagggaggugaaugugau

SEQ ID NO: 6188 - RNA, 22 nt, Homo sapiens
aauugcacgguauccaucugua

SEQ ID NO: 6189 - RNA, 25 nt, Homo sapiens
aggggugguguugggacagcuccgu

SEQ ID NO: 6190 - RNA, 22 nt, Homo sapiens
uaacugguugaacaacugaacc

SEQ ID NO: 6191 - RNA, 21 nt, Homo sapiens
uaccacaggguagaaccacgg

SEQ ID NO: 6192 - RNA, 22 nt, Homo sapiens
caaagaauucuccuuuugggcu

SEQ ID NO: 6193 - RNA, 22 nt, Homo sapiens
acaguagagggaggaaucgcag

SEQ ID NO: 6194 - RNA, 22 nt, Homo sapiens
uguaacagcaacuccaugugga

SEQ ID NO: 6195 - RNA, 25 nt, Homo sapiens
agggaucgcgggcggguggcggccu

SEQ ID NO: 6196 - RNA, 17 nt, Homo sapiens
ucgccuccuccucuccc

SEQ ID NO: 6197 - RNA, 22 nt, Homo sapiens
ucucccaacccuuguaccagug

SEQ ID NO: 6198 - RNA, 22 nt, Homo sapiens
uuggggaaacggccgcugagug

SEQ ID NO: 6199 - RNA, 21 nt, Homo sapiens
uggcagggaggcugggagggg

SEQ ID NO: 6200 - RNA, 20 nt, Homo sapiens
accaggaggcugaggccccu

SEQ ID NO: 6201 - RNA, 22 nt, Homo sapiens
ucugggcaacaaagugagaccu

SEQ ID NO: 6202 - RNA, 23 nt, Homo sapiens
ucuggcuccgugucuucacuccc

SEQ ID NO: 6203 - RNA, 25 nt, Homo sapiens
gcugggcagggcuucugagcuccuu

SEQ ID NO: 6204 - RNA, 23 nt, Homo sapiens
uacccuguagauccgaauuugug

SEQ ID NO: 6205 - RNA, 23 nt, Homo sapiens
uacccuguagaaccgaauuugug

SEQ ID NO: 6206 - RNA, 22 nt, Homo sapiens
ucaccagcccuguguucccuag

SEQ ID NO: 6207 - RNA, 21 nt, Homo sapiens
ucacagugaaccggucucuuu

SEQ ID NO: 6208 - RNA, 23 nt, Homo sapiens
agcugguguugugaaucaggccg

SEQ ID NO: 6209 - RNA, 22 nt, Homo sapiens
gaaagcgcuucccuuugcugga

SEQ ID NO: 6210 - RNA, 22 nt, Homo sapiens
caaagcgcuccccuuuagaggu

SEQ ID NO: 6211 - RNA, 23 nt, Homo sapiens
caaagcgcuucucuuuagagugu

SEQ ID NO: 6212 - RNA, 21 nt, Homo sapiens
caaagcgcuucccuuuggagc

SEQ ID NO: 6213 - RNA, 21 nt, Homo sapiens
gaaagcgcuucucuuuagagg

SEQ ID NO: 6214 - RNA, 21 nt, Homo sapiens
aaggcagggcccccgcucccc

SEQ ID NO: 6215 - RNA, 23 nt, Homo sapiens
ucuuugguuaucuagcuguauga

SEQ ID NO: 6216 - RNA, 23 nt, Homo sapiens
uggugcggagagggcccacagug

SEQ ID NO: 6217 - RNA, 22 nt, Homo sapiens
uagcaaaaacugcaguuacuuu

SEQ ID NO: 6218 - RNA, 18 nt, Homo sapiens
cagggaggugaaugugau

SEQ ID NO: 6219 - RNA, 22 nt, Homo sapiens
ggagacgcggcccuguuggagu

SEQ ID NO: 6220 - RNA, 23 nt, Homo sapiens
ucuggcuccgugucuucacuccc

SEQ ID NO: 6221 - RNA, 21 nt, Homo sapiens
uccugcgcgucccagaugccc

SEQ ID NO: 6222 - RNA, 22 nt, Homo sapiens
uagcagcacauaaugguuugug

SEQ ID NO: 6223 - RNA, 22 nt, Homo sapiens
uagcagcacaucaugguuuaca

SEQ ID NO: 6224 - RNA, 22 nt, Homo sapiens
uagcagcacguaaauauuggcg

SEQ ID NO: 6225 - RNA, 22 nt, Homo sapiens
cccugugcccggcccacuucug

SEQ ID NO: 6226 - RNA, 22 nt, Homo sapiens
uagcuuaucagacugauguuga

SEQ ID NO: 6227 - RNA, 21 nt, Homo sapiens
cagcagcacacugugguuugu

SEQ ID NO: 6228 - RNA, 22 nt, Homo sapiens
augggugaauuuguagaaggau

SEQ ID NO: 6229 - RNA, 18 nt, Homo sapiens
gucccuguucaggcgcca

SEQ ID NO: 6230 - RNA, 17 nt, Homo sapiens
ucccuguucgggcgcca

SEQ ID NO: 6231 - RNA, 21 nt, Homo sapiens
cggcggggacggcgauugguc

SEQ ID NO: 6232 - RNA, 22 nt, Homo sapiens
aacuggcccucaaagucccgcu

SEQ ID NO: 6233 - RNA, 22 nt, Homo sapiens
uguaaacauccuacacucagcu

SEQ ID NO: 6234 - RNA, 22 nt, Homo sapiens
aauugcacuuuagcaaugguga

SEQ ID NO: 6235 - RNA, 22 nt, Homo sapiens
agaggcuggccgugaugaauuc

SEQ ID NO: 6236 - RNA, 22 nt, Homo sapiens
gugacaucacauauacggcagc

SEQ ID NO: 6237 - RNA, 22 nt, Homo sapiens
aacaucacagcaagucugugcu

SEQ ID NO: 6238 - RNA, 23 nt, Homo sapiens
uaauccuugcuaccugggugaga

SEQ ID NO: 6239 - RNA, 22 nt, Homo sapiens
uggugggcacagaaucuggacu

SEQ ID NO: 6240 - RNA, 22 nt, Homo sapiens
aggcggggcgccgcgggaccgc

SEQ ID NO: 6241 - RNA, 21 nt, Homo sapiens
uggaggagaaggaaggugaug

SEQ ID NO: 6242 - RNA, 22 nt, Homo sapiens
caaagugccucccuuuagagug

SEQ ID NO: 6243 - RNA, 20 nt, Homo sapiens
guguguggaaaugcuucugc

SEQ ID NO: 6244 - RNA, 19 nt, Homo sapiens
ugucucugcugggguuucu

SEQ ID NO: 6245 - RNA, 17 nt, Homo sapiens
ucccaccgcugccaccc

SEQ ID NO: 6246 - RNA, 22 nt, Homo sapiens
uccuucauuccaccggagucug

SEQ ID NO: 6247 - RNA, 23 nt, Homo sapiens
aggaagcccuggaggggcuggag

SEQ ID NO: 6248 - RNA, 22 nt, Homo sapiens
caaagaauucuccuuuugggcu

SEQ ID NO: 6249 - RNA, 21 nt, Homo sapiens
gugccagcugcagugggggag

SEQ ID NO: 6250 - RNA, 22 nt, Homo sapiens
ugagccccugugccgcccccag

SEQ ID NO: 6251 - RNA, 22 nt, Homo sapiens
uuuagagacggggucuugcucu

SEQ ID NO: 6252 - RNA, 23 nt, Homo sapiens
caacggaaucccaaaagcagcug

SEQ ID NO: 6253 - RNA, 22 nt, Homo sapiens
aauugcacgguauccaucugua

SEQ ID NO: 6254 - RNA, 21 nt, Homo sapiens
gaaggcgcuucccuuuggagu

SEQ ID NO: 6255 - RNA, 22 nt, Homo sapiens
gaaggcgcuucccuuuagagcg

SEQ ID NO: 6256 - RNA, 21 nt, Homo sapiens
uccgguucucagggcuccacc

SEQ ID NO: 6257 - RNA, 22 nt, Homo sapiens
ugugcgcagggagaccucuccc

SEQ ID NO: 6258 - RNA, 23 nt, Homo sapiens
cacccggcugugugcacaugugc

SEQ ID NO: 6259 - RNA, 23 nt, Homo sapiens
ccugcagcgacuugauggcuucc

SEQ ID NO: 6260 - RNA, 20 nt, Homo sapiens
ucugcaggguuugcuuugag

SEQ ID NO: 6261 - RNA, 21 nt, Homo sapiens
ucacagugaaccggucucuuu

SEQ ID NO: 6262 - RNA, 17 nt, Homo sapiens
ucgccuccuccucuccc

SEQ ID NO: 6263 - RNA, 24 nt, Homo sapiens
uugcagcugccugggagugacuuc

SEQ ID NO: 6264 - RNA, 20 nt, Homo sapiens
ccuccugcccuccuugcugu

SEQ ID NO: 6265 - RNA, 22 nt, Homo sapiens
uaugugggaugguaaaccgcuu

SEQ ID NO: 6266 - RNA, 22 nt, Homo sapiens
uguaaacauccuacacucagcu

SEQ ID NO: 6267 - RNA, 22 nt, Homo sapiens
aauugcacuuuagcaaugguga

SEQ ID NO: 6268 - RNA, 21 nt, Homo sapiens
aacaggugacugguuagacaa

SEQ ID NO: 6269 - RNA, 19 nt, Homo sapiens
gugucugcuuccuguggga

SEQ ID NO: 6270 - RNA, 22 nt, Homo sapiens
aaaccuguguuguucaagaguc

SEQ ID NO: 6271 - RNA, 22 nt, Homo sapiens
uggaauguaaagaaguauguau

SEQ ID NO: 6272 - RNA, 21 nt, Homo sapiens
uccuucugcuccgucccccag

SEQ ID NO: 6273 - RNA, 18 nt, Homo sapiens
gucccuguucaggcgcca

SEQ ID NO: 6274 - RNA, 17 nt, Homo sapiens
ucccuguucgggcgcca

SEQ ID NO: 6275 - RNA, 22 nt, Homo sapiens
uuuagagacggggucuugcucu

SEQ ID NO: 6276 - RNA, 22 nt, Homo sapiens
uggaauguaaggaagugugugg

SEQ ID NO: 6277 - RNA, 22 nt, Homo sapiens
gaggguuggguggaggcucucc

SEQ ID NO: 6278 - RNA, 24 nt, Homo sapiens
agcagaagcagggagguucuccca

SEQ ID NO: 6279 - RNA, 22 nt, Homo sapiens
aauugcacgguauccaucugua

SEQ ID NO: 6280 - RNA, 23 nt, Homo sapiens
ucuuggaguaggucauugggugg

SEQ ID NO: 6281 - RNA, 22 nt, Homo sapiens
aggcaguguauuguuagcuggc

SEQ ID NO: 6282 - RNA, 20 nt, Homo sapiens
aggaauguuccuucuuugcc

SEQ ID NO: 6283 - RNA, 23 nt, Homo sapiens
uacccuguagauccgaauuugug

SEQ ID NO: 6284 - RNA, 23 nt, Homo sapiens
uacccuguagaaccgaauuugug

SEQ ID NO: 6285 - RNA, 23 nt, Homo sapiens
ccugcagcgacuugauggcuucc

SEQ ID NO: 6286 - RNA, 21 nt, Homo sapiens
ccuguugaaguguaaucccca

SEQ ID NO: 6287 - RNA, 25 nt, Homo sapiens
ugggaacggguuccggcagacgcug

SEQ ID NO: 6288 - RNA, 22 nt, Homo sapiens
ucagugcaucacagaacuuugu

SEQ ID NO: 6289 - RNA, 23 nt, Homo sapiens
caaagugcuuacagugcagguag

SEQ ID NO: 6290 - RNA, 22 nt, Homo sapiens
cccugugcccggcccacuucug

SEQ ID NO: 6291 - RNA, 22 nt, Homo sapiens
uaaucucagcuggcaacuguga

SEQ ID NO: 6292 - RNA, 22 nt, Homo sapiens
acacagggcuguugugaagacu

SEQ ID NO: 6293 - RNA, 23 nt, Homo sapiens
aucaacagacauuaauugggcgc

SEQ ID NO: 6294 - RNA, 22 nt, Homo sapiens
uuuugcgauguguuccuaauau

SEQ ID NO: 6295 - RNA, 22 nt, Homo sapiens
uacugcagacguggcaaucaug

SEQ ID NO: 6296 - RNA, 21 nt, Homo sapiens
uacugcagacaguggcaauca

SEQ ID NO: 6297 - RNA, 21 nt, Homo sapiens
gugucuuuugcucugcaguca

SEQ ID NO: 6298 - RNA, 19 nt, Homo sapiens
gugucugcuuccuguggga

SEQ ID NO: 6299 - RNA, 23 nt, Homo sapiens
aucgcugcgguugcgagcgcugu

SEQ ID NO: 6300 - RNA, 22 nt, Homo sapiens
uggugguuuacaaaguaauuca

SEQ ID NO: 6301 - RNA, 26 nt, Homo sapiens
aaguaguugguuuguaugagaugguu

SEQ ID NO: 6302 - RNA, 21 nt, Homo sapiens
aguuaggauuaggucguggaa

SEQ ID NO: 6303 - RNA, 19 nt, Homo sapiens
auggauaaggcuuuggcuu

SEQ ID NO: 6304 - RNA, 19 nt, Homo sapiens
uggauuuuuggaucaggga

SEQ ID NO: 6305 - RNA, 23 nt, Homo sapiens
ugugcaaaucuaugcaaaacuga

SEQ ID NO: 6306 - RNA, 23 nt, Homo sapiens
ugugcaaauccaugcaaaacuga

SEQ ID NO: 6307 - RNA, 22 nt, Homo sapiens
aaacaaacauggugcacuucuu

SEQ ID NO: 6308 - RNA, 21 nt, Homo sapiens
uuuugcaccuuuuggagugaa

SEQ ID NO: 6309 - RNA, 23 nt, Homo sapiens
ucggggaucaucaugucacgaga

SEQ ID NO: 6310 - RNA, 22 nt, Homo sapiens
caaaaaucucaauuacuuuugc

SEQ ID NO: 6311 - RNA, 23 nt, Homo sapiens
guuugcacgggugggccuugucu

SEQ ID NO: 6312 - RNA, 23 nt, Homo sapiens
uaaaucccauggugccuucuccu

SEQ ID NO: 6313 - RNA, 22 nt, Homo sapiens
auccgcgcucugacucucugcc

SEQ ID NO: 6314 - RNA, 22 nt, Homo sapiens
cuccugagccauucugagccuc

SEQ ID NO: 6315 - RNA, 22 nt, Homo sapiens
uaacagucuacagccauggucg

SEQ ID NO: 6316 - RNA, 21 nt, Homo sapiens
aagugaucuaaaggccuacau

SEQ ID NO: 6317 - RNA, 21 nt, Homo sapiens
uaacagucuccagucacggcc

SEQ ID NO: 6318 - RNA, 20 nt, Homo sapiens
ccucugggcccuuccuccag

SEQ ID NO: 6319 - RNA, 22 nt, Homo sapiens
ucucugggccugugucuuaggc

SEQ ID NO: 6320 - RNA, 21 nt, Homo sapiens
gugcauuguaguugcauugca

SEQ ID NO: 6321 - RNA, 22 nt, Homo sapiens
aacuguuugcagaggaaacuga

SEQ ID NO: 6322 - RNA, 22 nt, Homo sapiens
uucucaaggaggugucguuuau

SEQ ID NO: 6323 - RNA, 23 nt, Homo sapiens
cucuugagggaagcacuuucugu

SEQ ID NO: 6324 - RNA, 22 nt, Homo sapiens
ggagaaauuauccuuggugugu

SEQ ID NO: 6325 - RNA, 23 nt, Homo sapiens
uacccuguagauccgaauuugug

SEQ ID NO: 6326 - RNA, 23 nt, Homo sapiens
uacccuguagaaccgaauuugug

SEQ ID NO: 6327 - RNA, 18 nt, Homo sapiens
ucagcuggcccucauuuc

SEQ ID NO: 6328 - RNA, 19 nt, Homo sapiens
gugaggacucgggaggugg

SEQ ID NO: 6329 - RNA, 23 nt, Homo sapiens
aggaugagcaaagaaaguagauu

SEQ ID NO: 6330 - RNA, 22 nt, Homo sapiens
cggaugagcaaagaaagugguu

SEQ ID NO: 6331 - RNA, 21 nt, Homo sapiens
uaccacaggguagaaccacgg

SEQ ID NO: 6332 - RNA, 23 nt, Homo sapiens
ucuggcuccgugucuucacuccc

SEQ ID NO: 6333 - RNA, 22 nt, Homo sapiens
cucuagagggaagcacuuucug

SEQ ID NO: 6334 - RNA, 21 nt, Homo sapiens
cucccacaugcaggguuugca

SEQ ID NO: 6335 - RNA, 21 nt, Homo sapiens
cggcggggacggcgauugguc

SEQ ID NO: 6336 - RNA, 22 nt, Homo sapiens
ucugcccccuccgcugcugcca

SEQ ID NO: 6337 - RNA, 22 nt, Homo sapiens
uguaacagcaacuccaugugga

SEQ ID NO: 6338 - RNA, 21 nt, Homo sapiens
auuugugcuuggcucugucac

SEQ ID NO: 6339 - RNA, 22 nt, Homo sapiens
uguaaacauccuacacucagcu

SEQ ID NO: 6340 - RNA, 20 nt, Homo sapiens
acugccccaggugcugcugg

SEQ ID NO: 6341 - RNA, 23 nt, Homo sapiens
ucccuguccuccaggagcucacg

SEQ ID NO: 6342 - RNA, 23 nt, Homo sapiens
ucccccaggugugauucugauuu

SEQ ID NO: 6343 - RNA, 21 nt, Homo sapiens
cggggcagcucaguacaggau

SEQ ID NO: 6344 - RNA, 22 nt, Homo sapiens
aguggggaacccuuccaugagg

SEQ ID NO: 6345 - RNA, 23 nt, Homo sapiens
aggaccugcgggacaagauucuu

SEQ ID NO: 6346 - RNA, 18 nt, Homo sapiens
uucacagggaggugucau

SEQ ID NO: 6347 - RNA, 22 nt, Homo sapiens
ccucccacacccaaggcuugca

SEQ ID NO: 6348 - RNA, 23 nt, Homo sapiens
ugugcuugcucgucccgcccgca

SEQ ID NO: 6349 - RNA, 24 nt, Homo sapiens
acugggggcuuucgggcucugcgu

SEQ ID NO: 6350 - RNA, 22 nt, Homo sapiens
aggcggggcgccgcgggaccgc

SEQ ID NO: 6351 - RNA, 22 nt, Homo sapiens
ugcggggcuagggcuaacagca

SEQ ID NO: 6352 - RNA, 21 nt, Homo sapiens
uacucaaaaagcugucaguca

SEQ ID NO: 6353 - RNA, 24 nt, Homo sapiens
uggggagcugaggcucugggggug

SEQ ID NO: 6354 - RNA, 21 nt, Homo sapiens
uggacugcccugaucuggaga

SEQ ID NO: 6355 - RNA, 22 nt, Homo sapiens
ucugcccccuccgcugcugcca

SEQ ID NO: 6356 - RNA, 22 nt, Homo sapiens
cugugcgugugacagcggcuga

SEQ ID NO: 6357 - RNA, 21 nt, Homo sapiens
caagucacuagugguuccguu

SEQ ID NO: 6358 - RNA, 21 nt, Homo sapiens
auguaugugugcaugugcaug

SEQ ID NO: 6359 - RNA, 20 nt, Homo sapiens
acugccccaggugcugcugg

SEQ ID NO: 6360 - RNA, 22 nt, Homo sapiens
caaucacuaacuccacugccau

SEQ ID NO: 6361 - RNA, 23 nt, Homo sapiens
ugaggggcagagagcgagacuuu

SEQ ID NO: 6362 - RNA, 21 nt, Homo sapiens
cggggcagcucaguacaggau

SEQ ID NO: 6363 - RNA, 18 nt, Homo sapiens
cagggaggugaaugugau

SEQ ID NO: 6364 - RNA, 22 nt, Homo sapiens
ggagacgcggcccuguuggagu

SEQ ID NO: 6365 - RNA, 23 nt, Homo sapiens
ucuggcuccgugucuucacuccc

SEQ ID NO: 6366 - RNA, 22 nt, Homo sapiens
uggagagaaaggcaguuccuga

SEQ ID NO: 6367 - RNA, 22 nt, Homo sapiens
cccugugcccggcccacuucug

SEQ ID NO: 6368 - RNA, 22 nt, Homo sapiens
uucccuuugucauccuaugccu

SEQ ID NO: 6369 - RNA, 22 nt, Homo sapiens
uucccuuugucauccuucgccu

SEQ ID NO: 6370 - RNA, 22 nt, Homo sapiens
caaccuggaggacuccaugcug

SEQ ID NO: 6371 - RNA, 24 nt, Homo sapiens
gaccuggacauguuugugcccagu

SEQ ID NO: 6372 - RNA, 22 nt, Homo sapiens
ugagaccucuggguucugagcu

SEQ ID NO: 6373 - RNA, 22 nt, Homo sapiens
cugcccuggcccgagggaccga

SEQ ID NO: 6374 - RNA, 23 nt, Homo sapiens
caagucuuauuugagcaccuguu

SEQ ID NO: 6375 - RNA, 21 nt, Homo sapiens
cuuuuugcggucugggcuugc

SEQ ID NO: 6376 - RNA, 22 nt, Homo sapiens
aacuguuugcagaggaaacuga

SEQ ID NO: 6377 - RNA, 24 nt, Homo sapiens
uuuggcaaugguagaacucacacu

SEQ ID NO: 6378 - RNA, 21 nt, Homo sapiens
uagcagcacagaaauauuggc

SEQ ID NO: 6379 - RNA, 22 nt, Homo sapiens
ugucaguuugucaaauacccca

SEQ ID NO: 6380 - RNA, 23 nt, Homo sapiens
gcaaagcacacggccugcagaga

SEQ ID NO: 6381 - RNA, 22 nt, Homo sapiens
aacaauauccuggugcugagug

SEQ ID NO: 6382 - RNA, 22 nt, Homo sapiens
aggcaguguauuguuagcuggc

SEQ ID NO: 6383 - RNA, 21 nt, Homo sapiens
gcgacccauacuugguuucag

SEQ ID NO: 6384 - RNA, 19 nt, Homo sapiens
ucuaggcugguacugcuga

SEQ ID NO: 6385 - RNA, 26 nt, Homo sapiens
gaugaugauggcagcaaauucugaaa

SEQ ID NO: 6386 - RNA, 21 nt, Homo sapiens
ucacagugaaccggucucuuu

SEQ ID NO: 6387 - RNA, 21 nt, Homo sapiens
cuuuuugcggucugggcuugc

SEQ ID NO: 6388 - RNA, 21 nt, Homo sapiens
uaccacaggguagaaccacgg

SEQ ID NO: 6389 - RNA, 22 nt, Homo sapiens
uaacacugucugguaaagaugg

SEQ ID NO: 6390 - RNA, 21 nt, Homo sapiens
ccaguccugugccugccgccu

SEQ ID NO: 6391 - RNA, 23 nt, Homo sapiens
ugaguaccgccaugucuguuggg

SEQ ID NO: 6392 - RNA, 22 nt, Homo sapiens
uaacacugucugguaacgaugu

SEQ ID NO: 6393 - RNA, 21 nt, Homo sapiens
uucaaguaauucaggauaggu

SEQ ID NO: 6394 - RNA, 21 nt, Homo sapiens
uucacaguggcuaaguuccgc

SEQ ID NO: 6395 - RNA, 21 nt, Homo sapiens
uucacaguggcuaaguucugc

SEQ ID NO: 6396 - RNA, 23 nt, Homo sapiens
gcaaagcacacggccugcagaga

SEQ ID NO: 6397 - RNA, 21 nt, Homo sapiens
cagcagcacacugugguuugu

SEQ ID NO: 6398 - RNA, 20 nt, Homo sapiens
cugcaaagggaagcccuuuc

SEQ ID NO: 6399 - RNA, 20 nt, Homo sapiens
cugcaaagggaagcccuuuc

SEQ ID NO: 6400 - RNA, 22 nt, Homo sapiens
caaaaaccacaguuucuuuugc

SEQ ID NO: 6401 - RNA, 22 nt, Homo sapiens
uagcaaaaacugcaguuacuuu

SEQ ID NO: 6402 - RNA, 19 nt, Homo sapiens
ugagcugcuguaccaaaau

SEQ ID NO: 6403 - RNA, 20 nt, Homo sapiens
guccgcucggcgguggccca

SEQ ID NO: 6404 - RNA, 21 nt, Homo sapiens
cuucuugugcucuaggauugu

SEQ ID NO: 6405 - RNA, 22 nt, Homo sapiens
ugagaaccacgucugcucugag

SEQ ID NO: 6406 - RNA, 21 nt, Homo sapiens
cacaagguauugguauuaccu

SEQ ID NO: 6407 - RNA, 19 nt, Homo sapiens
aagcagcugccucugaggc

SEQ ID NO: 6408 - RNA, 22 nt, Homo sapiens
agaguugagucuggacgucccg

SEQ ID NO: 6409 - RNA, 22 nt, Homo sapiens
cucuagagggaagcacuuucug

SEQ ID NO: 6410 - RNA, 22 nt, Homo sapiens
gcugacuccuaguccagggcuc

SEQ ID NO: 6411 - RNA, 22 nt, Homo sapiens
cacgcucaugcacacacccaca

SEQ ID NO: 6412 - RNA, 23 nt, Homo sapiens
ccugcagcgacuugauggcuucc

SEQ ID NO: 6413 - RNA, 20 nt, Homo sapiens
ucugcaggguuugcuuugag

SEQ ID NO: 6414 - RNA, 21 nt, Homo sapiens
agugaaugauggguucugacc

SEQ ID NO: 6415 - RNA, 22 nt, Homo sapiens
acaggugagguucuugggagcc

SEQ ID NO: 6416 - RNA, 23 nt, Homo sapiens
cggcccgggcugcugcuguuccu

SEQ ID NO: 6417 - RNA, 21 nt, Homo sapiens
ccaguccugugccugccgccu

SEQ ID NO: 6418 - RNA, 21 nt, Homo sapiens
agcuacaucuggcuacugggu

SEQ ID NO: 6419 - RNA, 22 nt, Homo sapiens
aauugcacgguauccaucugua

SEQ ID NO: 6420 - RNA, 23 nt, Homo sapiens
acuucaccugguccacuagccgu

SEQ ID NO: 6421 - RNA, 20 nt, Homo sapiens
cugcaaagggaagcccuuuc

SEQ ID NO: 6422 - RNA, 20 nt, Homo sapiens
cugcaaagggaagcccuuuc

SEQ ID NO: 6423 - RNA, 22 nt, Homo sapiens
aaccagcaccccaacuuuggac

SEQ ID NO: 6424 - RNA, 22 nt, Homo sapiens
gguggcccggccgugccugagg

SEQ ID NO: 6425 - RNA, 22 nt, Homo sapiens
uguaaacauccucgacuggaag

SEQ ID NO: 6426 - RNA, 22 nt, Homo sapiens
uguaaacauccccgacuggaag

SEQ ID NO: 6427 - RNA, 22 nt, Homo sapiens
uguaaacauccuugacuggaag

SEQ ID NO: 6428 - RNA, 20 nt, Homo sapiens
ugagcccuguccucccgcag

SEQ ID NO: 6429 - RNA, 25 nt, Homo sapiens
ugggaacggguuccggcagacgcug

SEQ ID NO: 6430 - RNA, 22 nt, Homo sapiens
ucucccaacccuuguaccagug

SEQ ID NO: 6431 - RNA, 22 nt, Homo sapiens
cauugcacuugucucggucuga

SEQ ID NO: 6432 - RNA, 21 nt, Homo sapiens
agggcccccccucaauccugu

SEQ ID NO: 6433 - RNA, 22 nt, Homo sapiens
uguaaacauccuacacucagcu

SEQ ID NO: 6434 - RNA, 23 nt, Homo sapiens
ugagcgccucgacgacagagccg

SEQ ID NO: 6435 - RNA, 23 nt, Homo sapiens
uagcagcgggaacaguucugcag

SEQ ID NO: 6436 - RNA, 22 nt, Homo sapiens
cgucaacacuugcugguuuccu

SEQ ID NO: 6437 - RNA, 21 nt, Homo sapiens
uuggccacaauggguuagaac

SEQ ID NO: 6438 - RNA, 23 nt, Homo sapiens
aucgcugcgguugcgagcgcugu

SEQ ID NO: 6439 - RNA, 19 nt, Homo sapiens
aguguggcuuucuuagagc

SEQ ID NO: 6440 - RNA, 22 nt, Homo sapiens
ugcggggcuagggcuaacagca

SEQ ID NO: 6441 - RNA, 21 nt, Homo sapiens
uggaggagaaggaaggugaug

SEQ ID NO: 6442 - RNA, 22 nt, Homo sapiens
ugagccccugugccgcccccag

SEQ ID NO: 6443 - RNA, 22 nt, Homo sapiens
ugugagguuggcauuguugucu

SEQ ID NO: 6444 - RNA, 19 nt, Homo sapiens
gaugaugcugcugaugcug

SEQ ID NO: 6445 - RNA, 22 nt, Homo sapiens
cgcaggggccgggugcucaccg

SEQ ID NO: 6446 - RNA, 22 nt, Homo sapiens
ucaggccaggcacaguggcuca

SEQ ID NO: 6447 - RNA, 22 nt, Homo sapiens
ucaggccaggcacaguggcuca

SEQ ID NO: 6448 - RNA, 22 nt, Homo sapiens
acagcaggcacagacaggcagu

SEQ ID NO: 6449 - RNA, 22 nt, Homo sapiens
uggcagugucuuagcugguugu

SEQ ID NO: 6450 - RNA, 23 nt, Homo sapiens
ucccccaggugugauucugauuu

SEQ ID NO: 6451 - RNA, 22 nt, Homo sapiens
gccugcugggguggaaccuggu

SEQ ID NO: 6452 - RNA, 25 nt, Homo sapiens
aggggugguguugggacagcuccgu

SEQ ID NO: 6453 - RNA, 24 nt, Homo sapiens
acugggggcuuucgggcucugcgu

SEQ ID NO: 6454 - RNA, 19 nt, Homo sapiens
ucuaggcugguacugcuga

SEQ ID NO: 6455 - RNA, 21 nt, Homo sapiens
guggcugcacucacuuccuuc

SEQ ID NO: 6456 - RNA, 20 nt, Homo sapiens
ggggagcuguggaagcagua

SEQ ID NO: 6457 - RNA, 22 nt, Homo sapiens
ugugcgcagggagaccucuccc

SEQ ID NO: 6458 - RNA, 20 nt, Homo sapiens
ccucugggcccuuccuccag

SEQ ID NO: 6459 - RNA, 22 nt, Homo sapiens
ucucugggccugugucuuaggc

SEQ ID NO: 6460 - RNA, 22 nt, Homo sapiens
gugacaucacauauacggcagc

SEQ ID NO: 6461 - RNA, 22 nt, Homo sapiens
caaucacuaacuccacugccau

SEQ ID NO: 6462 - RNA, 22 nt, Homo sapiens
uggagagaaaggcaguuccuga

SEQ ID NO: 6463 - RNA, 22 nt, Homo sapiens
ugugcgcagggagaccucuccc

SEQ ID NO: 6464 - RNA, 22 nt, Homo sapiens
uggagagaaaggcaguuccuga

SEQ ID NO: 6465 - RNA, 23 nt, Homo sapiens
aggaccugcgggacaagauucuu

SEQ ID NO: 6466 - RNA, 22 nt, Homo sapiens
cccugugcccggcccacuucug

SEQ ID NO: 6467 - RNA, 23 nt, Homo sapiens
ugugcuugcucgucccgcccgca

SEQ ID NO: 6468 - RNA, 21 nt, Homo sapiens
ucgaggagcucacagucuagu

SEQ ID NO: 6469 - RNA, 23 nt, Homo sapiens
cuggagauauggaagagcugugu

SEQ ID NO: 6470 - RNA, 20 nt, Homo sapiens
auggagauagauauagaaau

SEQ ID NO: 6471 - RNA, 22 nt, Homo sapiens
ugagccccugugccgcccccag

SEQ ID NO: 6472 - RNA, 20 nt, Homo sapiens
cggcucugggucugugggga

SEQ ID NO: 6473 - RNA, 20 nt, Homo sapiens
uaaggcacgcggugaaugcc

SEQ ID NO: 6474 - RNA, 21 nt, Homo sapiens
uaaggcacccuucugaguaga

SEQ ID NO: 6475 - RNA, 17 nt, Homo sapiens
gugggggagaggcuguc

SEQ ID NO: 6476 - RNA, 21 nt, Homo sapiens
gcccuccgcccgugcaccccg

SEQ ID NO: 6477 - RNA, 23 nt, Homo sapiens
ucuggcuccgugucuucacuccc

SEQ ID NO: 6478 - RNA, 23 nt, Homo sapiens
ucuggcuccgugucuucacuccc

SEQ ID NO: 6479 - RNA, 21 nt, Homo sapiens
cggcggggacggcgauugguc

SEQ ID NO: 6480 - RNA, 21 nt, Homo sapiens
cggcggggacggcgauugguc

SEQ ID NO: 6481 - RNA, 21 nt, Homo sapiens
gccccugggccuauccuagaa

SEQ ID NO: 6482 - RNA, 23 nt, Homo sapiens
ugaggggcagagagcgagacuuu

SEQ ID NO: 6483 - RNA, 19 nt, Homo sapiens
ugggcguaucuguaugcua

SEQ ID NO: 6484 - RNA, 25 nt, Homo sapiens
aggggugguguugggacagcuccgu

SEQ ID NO: 6485 - RNA, 22 nt, Homo sapiens
aggcggggcgccgcgggaccgc

SEQ ID NO: 6486 - RNA, 22 nt, Homo sapiens
aggcggggcgccgcgggaccgc

SEQ ID NO: 6487 - RNA, 22 nt, Homo sapiens
ugcggggcuagggcuaacagca

SEQ ID NO: 6488 - RNA, 20 nt, Homo sapiens
ggggagcuguggaagcagua

SEQ ID NO: 6489 - RNA, 24 nt, Homo sapiens
gaccuggacauguuugugcccagu

SEQ ID NO: 6490 - RNA, 22 nt, Homo sapiens
aaaagcuggguugagagggcga

SEQ ID NO: 6491 - RNA, 22 nt, Homo sapiens
aaaagcuggguugagagggcaa

SEQ ID NO: 6492 - RNA, 20 nt, Homo sapiens
aaaagcuggguugagagggu

SEQ ID NO: 6493 - RNA, 19 nt, Homo sapiens
aaaagcuggguugagagga

SEQ ID NO: 6494 - RNA, 22 nt, Homo sapiens
ccucccacacccaaggcuugca

SEQ ID NO: 6495 - RNA, 22 nt, Homo sapiens
ucagugcacuacagaacuuugu

SEQ ID NO: 6496 - RNA, 22 nt, Homo sapiens
ucagugcaucacagaacuuugu

SEQ ID NO: 6497 - RNA, 21 nt, Homo sapiens
ucagugcaugacagaacuugg

SEQ ID NO: 6498 - RNA, 22 nt, Homo sapiens
uacccauugcauaucggaguug

SEQ ID NO: 6499 - RNA, 20 nt, Homo sapiens
auuccuagaaauuguucaua

SEQ ID NO: 6500 - RNA, 22 nt, Homo sapiens
ggagacgcggcccuguuggagu

SEQ ID NO: 6501 - RNA, 18 nt, Homo sapiens
ugcuuccuuucagagggu

SEQ ID NO: 6502 - RNA, 22 nt, Homo sapiens
aucuggagguaagaagcacuuu

SEQ ID NO: 6503 - RNA, 23 nt, Homo sapiens
aggaagcccuggaggggcuggag

SEQ ID NO: 6504 - RNA, 22 nt, Homo sapiens
cccugugcccggcccacuucug

SEQ ID NO: 6505 - RNA, 17 nt, Homo sapiens
ucccuguucgggcgcca

SEQ ID NO: 6506 - RNA, 23 nt, Homo sapiens
aaugacacgaucacucccguuga

SEQ ID NO: 6507 - RNA, 20 nt, Homo sapiens
ccccagggcgacgcggcggg

SEQ ID NO: 6508 - RNA, 21 nt, Homo sapiens
uaaagugcugacagugcagau

SEQ ID NO: 6509 - RNA, 23 nt, Homo sapiens
cggcccgggcugcugcuguuccu

SEQ ID NO: 6510 - RNA, 21 nt, Homo sapiens
agggcccccccucaauccugu

SEQ ID NO: 6511 - RNA, 21 nt, Homo sapiens
cggcggggacggcgauugguc

SEQ ID NO: 6512 - RNA, 22 nt, Homo sapiens
aggcggggcgccgcgggaccgc

SEQ ID NO: 6513 - RNA, 21 nt, Homo sapiens
uaaagugcugacagugcagau

SEQ ID NO: 6514 - RNA, 21 nt, Homo sapiens
cccggagccaggaugcagcuc

SEQ ID NO: 6515 - RNA, 22 nt, Homo sapiens
ucugggcaacaaagugagaccu

SEQ ID NO: 6516 - RNA, 23 nt, Homo sapiens
cggcccgggcugcugcuguuccu

SEQ ID NO: 6517 - RNA, 22 nt, Homo sapiens
uagcagcacauaaugguuugug

SEQ ID NO: 6518 - RNA, 22 nt, Homo sapiens
uagcagcacaucaugguuuaca

SEQ ID NO: 6519 - RNA, 22 nt, Homo sapiens
uagcagcacguaaauauuggcg

SEQ ID NO: 6520 - RNA, 20 nt, Homo sapiens
ccccagggcgacgcggcggg

SEQ ID NO: 6521 - RNA, 21 nt, Homo sapiens
uagcagcacagaaauauuggc

SEQ ID NO: 6522 - RNA, 22 nt, Homo sapiens
aagcugccaguugaagaacugu

SEQ ID NO: 6523 - RNA, 21 nt, Homo sapiens
agggcccccccucaauccugu

SEQ ID NO: 6524 - RNA, 21 nt, Homo sapiens
gccccugggccuauccuagaa

SEQ ID NO: 6525 - RNA, 22 nt, Homo sapiens
uggcagugucuuagcugguugu

SEQ ID NO: 6526 - RNA, 23 nt, Homo sapiens
aggcaguguaguuagcugauugc

SEQ ID NO: 6527 - RNA, 22 nt, Homo sapiens
cagcagcaauucauguuuugaa

SEQ ID NO: 6528 - RNA, 21 nt, Homo sapiens
ugucuugcaggccgucaugca

SEQ ID NO: 6529 - RNA, 22 nt, Homo sapiens
uggcaguguauuguuagcuggu

SEQ ID NO: 6530 - RNA, 22 nt, Homo sapiens
aggcaguguauuguuagcuggc

SEQ ID NO: 6531 - RNA, 21 nt, Homo sapiens
cagcagcacacugugguuugu

SEQ ID NO: 6532 - RNA, 25 nt, Homo sapiens
gcugggcagggcuucugagcuccuu

SEQ ID NO: 6533 - RNA, 19 nt, Homo sapiens
aagcagcugccucugaggc

SEQ ID NO: 6534 - RNA, 22 nt, Homo sapiens
ugcggggcuagggcuaacagca

SEQ ID NO: 6535 - RNA, 22 nt, Homo sapiens
ugugcgcagggagaccucuccc

SEQ ID NO: 6536 - RNA, 21 nt, Homo sapiens
cuagacugaagcuccuugagg

SEQ ID NO: 6537 - RNA, 22 nt, Homo sapiens
ucugcccccuccgcugcugcca

SEQ ID NO: 6538 - RNA, 21 nt, Homo sapiens
agggcccccccucaauccugu

SEQ ID NO: 6539 - RNA, 20 nt, Homo sapiens
acugccccaggugcugcugg

SEQ ID NO: 6540 - RNA, 23 nt, Homo sapiens
ucccccaggugugauucugauuu

SEQ ID NO: 6541 - RNA, 21 nt, Homo sapiens
cggggcagcucaguacaggau

SEQ ID NO: 6542 - RNA, 23 nt, Homo sapiens
uacuccagagggcgucacucaug

SEQ ID NO: 6543 - RNA, 23 nt, Homo sapiens
agugccugagggaguaagagccc

SEQ ID NO: 6544 - RNA, 22 nt, Homo sapiens
ggggguccccggugcucggauc

SEQ ID NO: 6545 - RNA, 24 nt, Homo sapiens
acugggggcuuucgggcucugcgu

SEQ ID NO: 6546 - RNA, 24 nt, Homo sapiens
ugccugggucucuggccugcgcgu

SEQ ID NO: 6547 - RNA, 22 nt, Homo sapiens
ugcggggcuagggcuaacagca

SEQ ID NO: 6548 - RNA, 21 nt, Homo sapiens
uggcagggaggcugggagggg

SEQ ID NO: 6549 - RNA, 18 nt, Homo sapiens
cagggaggugaaugugau

SEQ ID NO: 6550 - RNA, 21 nt, Homo sapiens
uucacaguggcuaaguuccgc

SEQ ID NO: 6551 - RNA, 21 nt, Homo sapiens
uucacaguggcuaaguucugc

SEQ ID NO: 6552 - RNA, 22 nt, Homo sapiens
gucccucuccaaaugugucuug

SEQ ID NO: 6553 - RNA, 24 nt, Homo sapiens
uucuccaaaagaaagcacuuucug

SEQ ID NO: 6554 - RNA, 22 nt, Homo sapiens
aagugccuccuuuuagaguguu

SEQ ID NO: 6555 - RNA, 22 nt, Homo sapiens
ucugcccccuccgcugcugcca

SEQ ID NO: 6556 - RNA, 20 nt, Homo sapiens
acugccccaggugcugcugg

SEQ ID NO: 6557 - RNA, 21 nt, Homo sapiens
cggggcagcucaguacaggau

SEQ ID NO: 6558 - RNA, 21 nt, Homo sapiens
ccgucgccgccacccgagccg

SEQ ID NO: 6559 - RNA, 22 nt, Homo sapiens
ugggucuuugcgggcgagauga

SEQ ID NO: 6560 - RNA, 22 nt, Homo sapiens
uuuccggcucgcgugggugugu

SEQ ID NO: 6561 - RNA, 18 nt, Homo sapiens
cgggcguggugguggggg

SEQ ID NO: 6562 - RNA, 18 nt, Homo sapiens
uccagugcccuccucucc

SEQ ID NO: 6563 - RNA, 22 nt, Homo sapiens
aacuggcccucaaagucccgcu

SEQ ID NO: 6564 - RNA, 22 nt, Homo sapiens
cugugcgugugacagcggcuga

SEQ ID NO: 6565 - RNA, 21 nt, Homo sapiens
ugauuguccaaacgcaauucu

SEQ ID NO: 6566 - RNA, 25 nt, Homo sapiens
aggggugguguugggacagcuccgu

SEQ ID NO: 6567 - RNA, 20 nt, Homo sapiens
ggggagcuguggaagcagua

SEQ ID NO: 6568 - RNA, 23 nt, Homo sapiens
uucauuugguauaaaccgcgauu

SEQ ID NO: 6569 - RNA, 19 nt, Homo sapiens
gagccaguuggacaggagc

SEQ ID NO: 6570 - RNA, 22 nt, Homo sapiens
cacuggcuccuuucuggguaga

SEQ ID NO: 6571 - RNA, 21 nt, Homo sapiens
uccugcgcgucccagaugccc

SEQ ID NO: 6572 - RNA, 21 nt, Homo sapiens
cggcggggacggcgauugguc

SEQ ID NO: 6573 - RNA, 21 nt, Homo sapiens
aagccugcccggcuccucggg

SEQ ID NO: 6574 - RNA, 22 nt, Homo sapiens
aggcggggcgccgcgggaccgc

SEQ ID NO: 6575 - RNA, 22 nt, Homo sapiens
uggugggcacagaaucuggacu

SEQ ID NO: 6576 - RNA, 22 nt, Homo sapiens
uggugggccgcagaacaugugc

SEQ ID NO: 6577 - RNA, 22 nt, Homo sapiens
uagcaccaucugaaaucgguua

SEQ ID NO: 6578 - RNA, 22 nt, Homo sapiens
ugagccccugugccgcccccag

SEQ ID NO: 6579 - RNA, 21 nt, Homo sapiens
cugacuguugccguccuccag

SEQ ID NO: 6580 - RNA, 22 nt, Homo sapiens
acuccagccccacagccucagc

SEQ ID NO: 6581 - RNA, 19 nt, Homo sapiens
aggcugcggaauucaggac

SEQ ID NO: 6582 - RNA, 24 nt, Homo sapiens
uggggagcugaggcucugggggug

SEQ ID NO: 6583 - RNA, 21 nt, Homo sapiens
ccccaccuccucucuccucag

SEQ ID NO: 6584 - RNA, 23 nt, Homo sapiens
caaagugcucauagugcagguag

SEQ ID NO: 6585 - RNA, 22 nt, Homo sapiens
aaggagcucacagucuauugag

SEQ ID NO: 6586 - RNA, 22 nt, Homo sapiens
uccgagccugggucucccucuu

SEQ ID NO: 6587 - RNA, 23 nt, Homo sapiens
aaggagcuuacaaucuagcuggg

SEQ ID NO: 6588 - RNA, 22 nt, Homo sapiens
ugagaacugaauuccauggguu

SEQ ID NO: 6589 - RNA, 21 nt, Homo sapiens
ccaguccugugccugccgccu

SEQ ID NO: 6590 - RNA, 22 nt, Homo sapiens
uauggcacugguagaauucacu

SEQ ID NO: 6591 - RNA, 22 nt, Homo sapiens
uauugcacucgucccggccucc

SEQ ID NO: 6592 - RNA, 23 nt, Homo sapiens
uaaggugcaucuagugcagauag

SEQ ID NO: 6593 - RNA, 21 nt, Homo sapiens
gguuugguccuagccuuucua

SEQ ID NO: 6594 - RNA, 21 nt, Homo sapiens
uucacaguggcuaaguuccgc

SEQ ID NO: 6595 - RNA, 21 nt, Homo sapiens
uucacaguggcuaaguucugc

SEQ ID NO: 6596 - RNA, 23 nt, Homo sapiens
gaagugcuucgauuuuggggugu

SEQ ID NO: 6597 - RNA, 22 nt, Homo sapiens
aggcaguguauuguuagcuggc

SEQ ID NO: 6598 - RNA, 22 nt, Homo sapiens
cgucaacacuugcugguuuccu

SEQ ID NO: 6599 - RNA, 18 nt, Homo sapiens
ugcuuccuuucagagggu

SEQ ID NO: 6600 - RNA, 22 nt, Homo sapiens
aucuggagguaagaagcacuuu

SEQ ID NO: 6601 - RNA, 22 nt, Homo sapiens
caaaguuuaagauccuugaagu

SEQ ID NO: 6602 - RNA, 23 nt, Homo sapiens
ugagugugugugugugagugugu

SEQ ID NO: 6603 - RNA, 22 nt, Homo sapiens
agucauuggaggguuugagcag

SEQ ID NO: 6604 - RNA, 19 nt, Homo sapiens
aguguggcuuucuuagagc

SEQ ID NO: 6605 - RNA, 23 nt, Homo sapiens
ggcagguucucacccucucuagg

SEQ ID NO: 6606 - RNA, 21 nt, Homo sapiens
uggaggagaaggaaggugaug

SEQ ID NO: 6607 - RNA, 21 nt, Homo sapiens
ccuggaaacacugagguugug

SEQ ID NO: 6608 - RNA, 18 nt, Homo sapiens
cgggcguggugguggggg

SEQ ID NO: 6609 - RNA, 21 nt, Homo sapiens
uccuucugcuccgucccccag

SEQ ID NO: 6610 - RNA, 22 nt, Homo sapiens
aacuggcccucaaagucccgcu

SEQ ID NO: 6611 - RNA, 23 nt, Homo sapiens
agugccugagggaguaagagccc

SEQ ID NO: 6612 - RNA, 23 nt, Homo sapiens
ugaguaccgccaugucuguuggg

SEQ ID NO: 6613 - RNA, 22 nt, Homo sapiens
gguggcccggccgugccugagg

SEQ ID NO: 6614 - RNA, 23 nt, Homo sapiens
ugucacucggcucggcccacuac

SEQ ID NO: 6615 - RNA, 20 nt, Homo sapiens
uaaagagcccuguggagaca

SEQ ID NO: 6616 - RNA, 20 nt, Homo sapiens
guagaggagauggcgcaggg

SEQ ID NO: 6617 - RNA, 22 nt, Homo sapiens
aaaaccgucuaguuacaguugu

SEQ ID NO: 6618 - RNA, 23 nt, Homo sapiens
uuaaugcuaaucgugauaggggu

SEQ ID NO: 6619 - RNA, 22 nt, Homo sapiens
ugagccccugugccgcccccag

SEQ ID NO: 6620 - RNA, 21 nt, Homo sapiens
gccccugggccuauccuagaa

SEQ ID NO: 6621 - RNA, 22 nt, Homo sapiens
uucaccaccuucuccacccagc

SEQ ID NO: 6622 - RNA, 23 nt, Homo sapiens
acuugggcacugaaacaaugucc

SEQ ID NO: 6623 - RNA, 22 nt, Homo sapiens
ucaggccaggcacaguggcuca

SEQ ID NO: 6624 - RNA, 19 nt, Homo sapiens
ugggcguaucuguaugcua

SEQ ID NO: 6625 - RNA, 18 nt, Homo sapiens
cagggaggugaaugugau

SEQ ID NO: 6626 - RNA, 22 nt, Homo sapiens
uucccuuugucauccuaugccu

SEQ ID NO: 6627 - RNA, 22 nt, Homo sapiens
uucccuuugucauccuucgccu

SEQ ID NO: 6628 - RNA, 23 nt, Homo sapiens
uaagugcuuccauguuuuaguag

SEQ ID NO: 6629 - RNA, 23 nt, Homo sapiens
uaagugcuuccauguuugagugu

SEQ ID NO: 6630 - RNA, 23 nt, Homo sapiens
ucccuguccuccaggagcucacg

SEQ ID NO: 6631 - RNA, 21 nt, Homo sapiens
cccggagccaggaugcagcuc

SEQ ID NO: 6632 - RNA, 23 nt, Homo sapiens
aggaagcccuggaggggcuggag

SEQ ID NO: 6633 - RNA, 22 nt, Homo sapiens
ugagccccugugccgcccccag

SEQ ID NO: 6634 - RNA, 20 nt, Homo sapiens
ucugcaggguuugcuuugag

SEQ ID NO: 6635 - RNA, 17 nt, Homo sapiens
ucccaccgcugccaccc

SEQ ID NO: 6636 - RNA, 21 nt, Homo sapiens
uccugcgcgucccagaugccc

SEQ ID NO: 6637 - RNA, 22 nt, Homo sapiens
cgucaacacuugcugguuuccu

SEQ ID NO: 6638 - RNA, 21 nt, Homo sapiens
cggcggggacggcgauugguc

SEQ ID NO: 6639 - RNA, 22 nt, Homo sapiens
aggcggggcgccgcgggaccgc

SEQ ID NO: 6640 - RNA, 23 nt, Homo sapiens
ugaggggcagagagcgagacuuu

SEQ ID NO: 6641 - RNA, 21 nt, Homo sapiens
ucacagugaaccggucucuuu

SEQ ID NO: 6642 - RNA, 23 nt, Homo sapiens
ugucugcccgcaugccugccucu

SEQ ID NO: 6643 - RNA, 22 nt, Homo sapiens
uagcagcacauaaugguuugug

SEQ ID NO: 6644 - RNA, 22 nt, Homo sapiens
uggcaguguauuguuagcuggu

SEQ ID NO: 6645 - RNA, 23 nt, Homo sapiens
agguuacccgagcaacuuugcau

SEQ ID NO: 6646 - RNA, 22 nt, Homo sapiens
uacccagagcaugcagugugaa

SEQ ID NO: 6647 - RNA, 21 nt, Homo sapiens
cgcgggugcuuacugacccuu

SEQ ID NO: 6648 - RNA, 22 nt, Homo sapiens
aucacacaaaggcaacuuuugu

SEQ ID NO: 6649 - RNA, 23 nt, Homo sapiens
ucucacacagaaaucgcacccgu

SEQ ID NO: 6650 - RNA, 22 nt, Homo sapiens
aguggggaacccuuccaugagg

SEQ ID NO: 6651 - RNA, 22 nt, Homo sapiens
uggagugugacaaugguguuug

SEQ ID NO: 6652 - RNA, 21 nt, Homo sapiens
cccggagccaggaugcagcuc

SEQ ID NO: 6653 - RNA, 17 nt, Homo sapiens
ucgccuccuccucuccc

SEQ ID NO: 6654 - RNA, 21 nt, Homo sapiens
ugacaacuauggaugagcucu

SEQ ID NO: 6655 - RNA, 22 nt, Homo sapiens
uggagugugacaaugguguuug

SEQ ID NO: 6656 - RNA, 24 nt, Homo sapiens
ucccugagacccuuuaaccuguga

SEQ ID NO: 6657 - RNA, 22 nt, Homo sapiens
ucccugagacccuaacuuguga

SEQ ID NO: 6658 - RNA, 23 nt, Homo sapiens
ccucagggcuguagaacagggcu

SEQ ID NO: 6659 - RNA, 22 nt, Homo sapiens
acucggcguggcgucggucgug

SEQ ID NO: 6660 - RNA, 23 nt, Homo sapiens
ucuggcuccgugucuucacuccc

SEQ ID NO: 6661 - RNA, 21 nt, Homo sapiens
ucgaggagcucacagucuagu

SEQ ID NO: 6662 - RNA, 22 nt, Homo sapiens
aacuggcccucaaagucccgcu

SEQ ID NO: 6663 - RNA, 21 nt, Homo sapiens
aggggugcuaucugugauuga

SEQ ID NO: 6664 - RNA, 20 nt, Homo sapiens
ggggagcuguggaagcagua

SEQ ID NO: 6665 - RNA, 22 nt, Homo sapiens
aaggagcucacagucuauugag

SEQ ID NO: 6666 - RNA, 22 nt, Homo sapiens
caaaguuuaagauccuugaagu

SEQ ID NO: 6667 - RNA, 23 nt, Homo sapiens
aaggagcuuacaaucuagcuggg

SEQ ID NO: 6668 - RNA, 21 nt, Homo sapiens
cucccacaugcaggguuugca

SEQ ID NO: 6669 - RNA, 22 nt, Homo sapiens
uggcaguguauuguuagcuggu

SEQ ID NO: 6670 - RNA, 22 nt, Homo sapiens
ccucccacacccaaggcuugca

SEQ ID NO: 6671 - RNA, 22 nt, Homo sapiens
uaaugccccuaaaaauccuuau

SEQ ID NO: 6672 - RNA, 21 nt, Homo sapiens
guucaaauccagaucuauaac

SEQ ID NO: 6673 - RNA, 27 nt, Homo sapiens
auugaucaucgacacuucgaacgcaau

SEQ ID NO: 6674 - RNA, 27 nt, Homo sapiens
auugaucaucgacacuucgaacgcaau

SEQ ID NO: 6675 - RNA, 22 nt, Homo sapiens
caaaguuuaagauccuugaagu

SEQ ID NO: 6676 - RNA, 18 nt, Homo sapiens
ugaggcaguagauugaau

SEQ ID NO: 6677 - RNA, 21 nt, Homo sapiens
gcccuccgcccgugcaccccg

SEQ ID NO: 6678 - RNA, 25 nt, Homo sapiens
ggcggagggaaguagguccguuggu

SEQ ID NO: 6679 - RNA, 20 nt, Homo sapiens
guguguggaaaugcuucugc

SEQ ID NO: 6680 - RNA, 21 nt, Homo sapiens
uucacaguggcuaaguuccgc

SEQ ID NO: 6681 - RNA, 22 nt, Homo sapiens
aacuggaucaauuauaggagug

SEQ ID NO: 6682 - RNA, 18 nt, Homo sapiens
cagggaggugaaugugau

SEQ ID NO: 6683 - RNA, 21 nt, Homo sapiens
uggaggagaaggaaggugaug

SEQ ID NO: 6684 - RNA, 20 nt, Homo sapiens
guagaggagauggcgcaggg

SEQ ID NO: 6685 - RNA, 20 nt, Homo sapiens
ugagcccuguccucccgcag

SEQ ID NO: 6686 - RNA, 22 nt, Homo sapiens
uucuggaauucugugugaggga

SEQ ID NO: 6687 - RNA, 22 nt, Homo sapiens
aagcccuuaccccaaaaagcau

SEQ ID NO: 6688 - RNA, 22 nt, Homo sapiens
uacucaggagaguggcaaucac

SEQ ID NO: 6689 - RNA, 18 nt, Homo sapiens
cagggaggugaaugugau

SEQ ID NO: 6690 - RNA, 22 nt, Homo sapiens
gucccucuccaaaugugucuug

SEQ ID NO: 6691 - RNA, 21 nt, Homo sapiens
agagaagaagaucagccugca

SEQ ID NO: 6692 - RNA, 22 nt, Homo sapiens
ucuucucuguuuuggccaugug

SEQ ID NO: 6693 - RNA, 22 nt, Homo sapiens
uggagugugacaaugguguuug

SEQ ID NO: 6694 - RNA, 23 nt, Homo sapiens
ucuggcuccgugucuucacuccc

SEQ ID NO: 6695 - RNA, 22 nt, Homo sapiens
uagcuuaucagacugauguuga

SEQ ID NO: 6696 - RNA, 21 nt, Homo sapiens
ugagcuaaaugugugcuggga

SEQ ID NO: 6697 - RNA, 23 nt, Homo sapiens
ucuggcuccgugucuucacuccc

SEQ ID NO: 6698 - RNA, 22 nt, Homo sapiens
agaggcuggccgugaugaauuc

SEQ ID NO: 6699 - RNA, 23 nt, Homo sapiens
ucuggcuccgugucuucacuccc

SEQ ID NO: 6700 - RNA, 21 nt, Homo sapiens
cggcggggacggcgauugguc

SEQ ID NO: 6701 - RNA, 23 nt, Homo sapiens
ugaggggcagagagcgagacuuu

SEQ ID NO: 6702 - RNA, 22 nt, Homo sapiens
aggcggggcgccgcgggaccgc

SEQ ID NO: 6703 - RNA, 22 nt, Homo sapiens
ugcggggcuagggcuaacagca

SEQ ID NO: 6704 - RNA, 23 nt, Homo sapiens
acuuacagacaagagccuugcuc

SEQ ID NO: 6705 - RNA, 22 nt, Homo sapiens
aagcugccaguugaagaacugu

SEQ ID NO: 6706 - RNA, 23 nt, Homo sapiens
gaacgcgcuucccuauagagggu

SEQ ID NO: 6707 - RNA, 19 nt, Homo sapiens
aggcugcggaauucaggac

SEQ ID NO: 6708 - RNA, 21 nt, Homo sapiens
uucacaguggcuaaguuccgc

SEQ ID NO: 6709 - RNA, 21 nt, Homo sapiens
uucacaguggcuaaguucugc

SEQ ID NO: 6710 - RNA, 22 nt, Homo sapiens
augggugaauuuguagaaggau

SEQ ID NO: 6711 - RNA, 18 nt, Homo sapiens
cagggaggugaaugugau

SEQ ID NO: 6712 - RNA, 22 nt, Homo sapiens
gucauacacggcucuccucucu

SEQ ID NO: 6713 - RNA, 21 nt, Homo sapiens
uaggacacauggucuacuucu

SEQ ID NO: 6714 - RNA, 27 nt, Homo sapiens
accuucuuguauaagcacugugcuaaa

SEQ ID NO: 6715 - RNA, 21 nt, Homo sapiens
gcccuccgcccgugcaccccg

SEQ ID NO: 6716 - RNA, 19 nt, Homo sapiens
aggcugcggaauucaggac

SEQ ID NO: 6717 - RNA, 20 nt, Homo sapiens
ggggagcuguggaagcagua

SEQ ID NO: 6718 - RNA, 27 nt, Homo sapiens
accuucuuguauaagcacugugcuaaa

SEQ ID NO: 6719 - RNA, 22 nt, Homo sapiens
caggauguggucaaguguuguu

SEQ ID NO: 6720 - RNA, 22 nt, Homo sapiens
agaguugagucuggacgucccg

SEQ ID NO: 6721 - RNA, 21 nt, Homo sapiens
aauaauacaugguugaucuuu

SEQ ID NO: 6722 - RNA, 21 nt, Homo sapiens
cccggagccaggaugcagcuc

SEQ ID NO: 6723 - RNA, 22 nt, Homo sapiens
ucaccagcccuguguucccuag

SEQ ID NO: 6724 - RNA, 20 nt, Homo sapiens
cuuccucgucugucugcccc

SEQ ID NO: 6725 - RNA, 22 nt, Homo sapiens
ucggauccgucugagcuuggcu

SEQ ID NO: 6726 - RNA, 23 nt, Homo sapiens
agcugguguugugaaucaggccg

SEQ ID NO: 6727 - RNA, 23 nt, Homo sapiens
ucuggcuccgugucuucacuccc

SEQ ID NO: 6728 - RNA, 22 nt, Homo sapiens
uugggaucauuuugcauccaua

SEQ ID NO: 6729 - RNA, 19 nt, Homo sapiens
gagccaguuggacaggagc

SEQ ID NO: 6730 - RNA, 23 nt, Homo sapiens
acuugggcacugaaacaaugucc

SEQ ID NO: 6731 - RNA, 23 nt, Homo sapiens
aggaagcccuggaggggcuggag

SEQ ID NO: 6732 - RNA, 21 nt, Homo sapiens
uggaggagaaggaaggugaug

SEQ ID NO: 6733 - RNA, 23 nt, Homo sapiens
cugggaucuccggggucuugguu

SEQ ID NO: 6734 - RNA, 22 nt, Homo sapiens
cacuggcuccuuucuggguaga

SEQ ID NO: 6735 - RNA, 22 nt, Homo sapiens
caaagugccucccuuuagagug

SEQ ID NO: 6736 - RNA, 21 nt, Homo sapiens
ccaccaccgugucugacacuu

SEQ ID NO: 6737 - RNA, 22 nt, Homo sapiens
ucugggcaacaaagugagaccu

SEQ ID NO: 6738 - RNA, 21 nt, Homo sapiens
cugaccuaugaauugacagcc

SEQ ID NO: 6739 - RNA, 21 nt, Homo sapiens
augaccuaugaauugacagac

SEQ ID NO: 6740 - RNA, 25 nt, Homo sapiens
gcugggcagggcuucugagcuccuu

SEQ ID NO: 6741 - RNA, 24 nt, Homo sapiens
uucuccaaaagaaagcacuuucug

SEQ ID NO: 6742 - RNA, 22 nt, Homo sapiens
aagugccuccuuuuagaguguu

SEQ ID NO: 6743 - RNA, 24 nt, Homo sapiens
uggcccugacugaagaccagcagu

SEQ ID NO: 6744 - RNA, 22 nt, Homo sapiens
aggugguccguggcgcguucgc

SEQ ID NO: 6745 - RNA, 22 nt, Homo sapiens
uggcagugucuuagcugguugu

SEQ ID NO: 6746 - RNA, 22 nt, Homo sapiens
ugcggggcuagggcuaacagca

SEQ ID NO: 6747 - RNA, 22 nt, Homo sapiens
ugcaacuuaccugagucauuga

SEQ ID NO: 6748 - RNA, 22 nt, Homo sapiens
cucuagagggaagcacuuucug

SEQ ID NO: 6749 - RNA, 23 nt, Homo sapiens
ucccuguccuccaggagcucacg

SEQ ID NO: 6750 - RNA, 22 nt, Homo sapiens
cagugguuuuacccuaugguag

SEQ ID NO: 6751 - RNA, 20 nt, Homo sapiens
guguguggaaaugcuucugc

SEQ ID NO: 6752 - RNA, 21 nt, Homo sapiens
ucuuguguucucuagaucagu

SEQ ID NO: 6753 - RNA, 24 nt, Homo sapiens
ugccugggucucuggccugcgcgu

SEQ ID NO: 6754 - RNA, 21 nt, Homo sapiens
uaaagugcugacagugcagau

SEQ ID NO: 6755 - RNA, 23 nt, Homo sapiens
cagugcaaugauauugucaaagc

SEQ ID NO: 6756 - RNA, 22 nt, Homo sapiens
aggcaguguauuguuagcuggc

SEQ ID NO: 6757 - RNA, 18 nt, Homo sapiens
aucccaccucugccacca

SEQ ID NO: 6758 - RNA, 22 nt, Homo sapiens
ccucccacacccaaggcuugca

SEQ ID NO: 6759 - RNA, 23 nt, Homo sapiens
ugucacucggcucggcccacuac

SEQ ID NO: 6760 - RNA, 21 nt, Homo sapiens
uaaagugcugacagugcagau

SEQ ID NO: 6761 - RNA, 23 nt, Homo sapiens
cagugcaaugauauugucaaagc

SEQ ID NO: 6762 - RNA, 18 nt, Homo sapiens
gucccuguucaggcgcca

SEQ ID NO: 6763 - RNA, 20 nt, Homo sapiens
ccccagggcgacgcggcggg

SEQ ID NO: 6764 - RNA, 17 nt, Homo sapiens
gugggggagaggcuguc

SEQ ID NO: 6765 - RNA, 22 nt, Homo sapiens
uagguaguuuccuguuguuggg

SEQ ID NO: 6766 - RNA, 21 nt, Homo sapiens
cacaagguauugguauuaccu

SEQ ID NO: 6767 - RNA, 22 nt, Homo sapiens
ugagguaguaguuuguacaguu

SEQ ID NO: 6768 - RNA, 17 nt, Homo sapiens
ucgccuccuccucuccc

SEQ ID NO: 6769 - RNA, 22 nt, Homo sapiens
uacgucaucguugucaucguca

SEQ ID NO: 6770 - RNA, 21 nt, Homo sapiens
uccugcgcgucccagaugccc

SEQ ID NO: 6771 - RNA, 21 nt, Homo sapiens
gaaggcgcuucccuuuggagu

SEQ ID NO: 6772 - RNA, 22 nt, Homo sapiens
gaaggcgcuucccuuuagagcg

SEQ ID NO: 6773 - RNA, 20 nt, Homo sapiens
gugucugggcggacagcugc

SEQ ID NO: 6774 - RNA, 22 nt, Homo sapiens
ucggccugaccacccaccccac

SEQ ID NO: 6775 - RNA, 23 nt, Homo sapiens
acuccauuuguuuugaugaugga

SEQ ID NO: 6776 - RNA, 23 nt, Homo sapiens
agcuacauugucugcuggguuuc

SEQ ID NO: 6777 - RNA, 19 nt, Homo sapiens
aggcugcggaauucaggac

SEQ ID NO: 6778 - RNA, 22 nt, Homo sapiens
aaaagcuggguugagagggcga

SEQ ID NO: 6779 - RNA, 22 nt, Homo sapiens
aaaagcuggguugagagggcaa

SEQ ID NO: 6780 - RNA, 20 nt, Homo sapiens
aaaagcuggguugagagggu

SEQ ID NO: 6781 - RNA, 19 nt, Homo sapiens
aaaagcuggguugagagga

SEQ ID NO: 6782 - RNA, 20 nt, Homo sapiens
ggggagcuguggaagcagua

SEQ ID NO: 6783 - RNA, 23 nt, Homo sapiens
uggugcggagagggcccacagug

SEQ ID NO: 6784 - RNA, 22 nt, Homo sapiens
uauguaauaugguccacaucuu

SEQ ID NO: 6785 - RNA, 21 nt, Homo sapiens
uggguuuacguugggagaacu

SEQ ID NO: 6786 - RNA, 21 nt, Homo sapiens
cucccacaugcaggguuugca

SEQ ID NO: 6787 - RNA, 20 nt, Homo sapiens
ccucugggcccuuccuccag

SEQ ID NO: 6788 - RNA, 22 nt, Homo sapiens
ucucugggccugugucuuaggc

SEQ ID NO: 6789 - RNA, 23 nt, Homo sapiens
agcuacauugucugcuggguuuc

SEQ ID NO: 6790 - RNA, 21 nt, Homo sapiens
uaaagugcugacagugcagau

SEQ ID NO: 6791 - RNA, 23 nt, Homo sapiens
cagugcaaugauauugucaaagc

SEQ ID NO: 6792 - RNA, 18 nt, Homo sapiens
cagggaggugaaugugau

SEQ ID NO: 6793 - RNA, 20 nt, Homo sapiens
ugagcccuguccucccgcag

SEQ ID NO: 6794 - RNA, 21 nt, Homo sapiens
gaaggcgcuucccuuuggagu

SEQ ID NO: 6795 - RNA, 22 nt, Homo sapiens
gaaggcgcuucccuuuagagcg

SEQ ID NO: 6796 - RNA, 22 nt, Homo sapiens
uggagagaaaggcaguuccuga

SEQ ID NO: 6797 - RNA, 21 nt, Homo sapiens
cuuuuugcggucugggcuugc

SEQ ID NO: 6798 - RNA, 22 nt, Homo sapiens
uguaacagcaacuccaugugga

SEQ ID NO: 6799 - RNA, 23 nt, Homo sapiens
caacggaaucccaaaagcagcug

SEQ ID NO: 6800 - RNA, 22 nt, Homo sapiens
auccgcgcucugacucucugcc

SEQ ID NO: 6801 - RNA, 24 nt, Homo sapiens
uuuggcaaugguagaacucacacu

SEQ ID NO: 6802 - RNA, 21 nt, Homo sapiens
aaggcagggcccccgcucccc

SEQ ID NO: 6803 - RNA, 21 nt, Homo sapiens
ucguggccuggucuccauuau

SEQ ID NO: 6804 - RNA, 21 nt, Homo sapiens
ucguggccuggucuccauuau

SEQ ID NO: 6805 - RNA, 18 nt, Homo sapiens
cgggcguggugguggggg

SEQ ID NO: 6806 - RNA, 21 nt, Homo sapiens
cggcggggacggcgauugguc

SEQ ID NO: 6807 - RNA, 22 nt, Homo sapiens
aggcggggcgccgcgggaccgc

SEQ ID NO: 6808 - RNA, 22 nt, Homo sapiens
ugcggggcuagggcuaacagca

SEQ ID NO: 6809 - RNA, 17 nt, Homo sapiens
ucgccuccuccucuccc

SEQ ID NO: 6810 - RNA, 22 nt, Homo sapiens
gaugagcucauuguaauaugag

SEQ ID NO: 6811 - RNA, 20 nt, Homo sapiens
accaggaggcugaggccccu

SEQ ID NO: 6812 - RNA, 21 nt, Homo sapiens
uggaggagaaggaaggugaug

SEQ ID NO: 6813 - RNA, 22 nt, Homo sapiens
uguaaacauccuacacucagcu

SEQ ID NO: 6814 - RNA, 18 nt, Homo sapiens
cagggaggugaaugugau

SEQ ID NO: 6815 - RNA, 20 nt, Homo sapiens
ucugcaggguuugcuuugag

SEQ ID NO: 6816 - RNA, 22 nt, Homo sapiens
aaaucucugcaggcaaauguga

SEQ ID NO: 6817 - RNA, 17 nt, Homo sapiens
gugggggagaggcuguc

SEQ ID NO: 6818 - RNA, 22 nt, Homo sapiens
uuagggcccuggcuccaucucc

SEQ ID NO: 6819 - RNA, 18 nt, Homo sapiens
cagggaggugaaugugau

SEQ ID NO: 6820 - RNA, 23 nt, Homo sapiens
ucuggcuccgugucuucacuccc

SEQ ID NO: 6821 - RNA, 23 nt, Homo sapiens
cggcccgggcugcugcuguuccu

SEQ ID NO: 6822 - RNA, 22 nt, Homo sapiens
uggagagaaaggcaguuccuga

SEQ ID NO: 6823 - RNA, 21 nt, Homo sapiens
agggcccccccucaauccugu

SEQ ID NO: 6824 - RNA, 23 nt, Homo sapiens
ugaggggcagagagcgagacuuu

SEQ ID NO: 6825 - RNA, 20 nt, Homo sapiens
guccgcucggcgguggccca

SEQ ID NO: 6826 - RNA, 21 nt, Homo sapiens
uggaggagaaggaaggugaug

SEQ ID NO: 6827 - RNA, 22 nt, Homo sapiens
ugggucuuugcgggcgagauga

SEQ ID NO: 6828 - RNA, 21 nt, Homo sapiens
ugucuugcaggccgucaugca

SEQ ID NO: 6829 - RNA, 22 nt, Homo sapiens
ucagcaaacauuuauugugugc

SEQ ID NO: 6830 - RNA, 22 nt, Homo sapiens
caaucacuaacuccacugccau

SEQ ID NO: 6831 - RNA, 23 nt, Homo sapiens
aggaugagcaaagaaaguagauu

SEQ ID NO: 6832 - RNA, 22 nt, Homo sapiens
cggaugagcaaagaaagugguu

SEQ ID NO: 6833 - RNA, 17 nt, Homo sapiens
ucucgcuggggccucca

SEQ ID NO: 6834 - RNA, 21 nt, Homo sapiens
uggcagggaggcugggagggg

SEQ ID NO: 6835 - RNA, 22 nt, Homo sapiens
aauugcacgguauccaucugua

SEQ ID NO: 6836 - RNA, 21 nt, Homo sapiens
agggggaaaguucuauagucc

SEQ ID NO: 6837 - RNA, 22 nt, Homo sapiens
ugagccccugugccgcccccag

SEQ ID NO: 6838 - RNA, 20 nt, Homo sapiens
ugagcccuguccucccgcag

SEQ ID NO: 6839 - RNA, 22 nt, Homo sapiens
uucuggaauucugugugaggga

SEQ ID NO: 6840 - RNA, 22 nt, Homo sapiens
aagcccuuaccccaaaaagcau

SEQ ID NO: 6841 - RNA, 23 nt, Homo sapiens
ucuggcuccgugucuucacuccc

SEQ ID NO: 6842 - RNA, 22 nt, Homo sapiens
aaaagcuggguugagagggcga

SEQ ID NO: 6843 - RNA, 22 nt, Homo sapiens
aaaagcuggguugagagggcaa

SEQ ID NO: 6844 - RNA, 20 nt, Homo sapiens
aaaagcuggguugagagggu

SEQ ID NO: 6845 - RNA, 19 nt, Homo sapiens
aaaagcuggguugagagga

SEQ ID NO: 6846 - RNA, 23 nt, Homo sapiens
ugaggggcagagagcgagacuuu

SEQ ID NO: 6847 - RNA, 23 nt, Homo sapiens
ucuuggaguaggucauugggugg

SEQ ID NO: 6848 - RNA, 18 nt, Homo sapiens
ugcuuccuuucagagggu

SEQ ID NO: 6849 - RNA, 22 nt, Homo sapiens
aucuggagguaagaagcacuuu

SEQ ID NO: 6850 - RNA, 22 nt, Homo sapiens
aucuggagguaagaagcacuuu

SEQ ID NO: 6851 - RNA, 23 nt, Homo sapiens
uggaagacuagugauuuuguugu

SEQ ID NO: 6852 - RNA, 22 nt, Homo sapiens
uuugugaccugguccacuaacc

SEQ ID NO: 6853 - RNA, 21 nt, Homo sapiens
aggguaagcugaaccucugau

SEQ ID NO: 6854 - RNA, 23 nt, Homo sapiens
ugagcgccucgacgacagagccg

SEQ ID NO: 6855 - RNA, 23 nt, Homo sapiens
ucuggcuccgugucuucacuccc

SEQ ID NO: 6856 - RNA, 23 nt, Homo sapiens
cggcccgggcugcugcuguuccu

SEQ ID NO: 6857 - RNA, 20 nt, Homo sapiens
guagaggagauggcgcaggg

SEQ ID NO: 6858 - RNA, 21 nt, Homo sapiens
cugaccuaugaauugacagcc

SEQ ID NO: 6859 - RNA, 22 nt, Homo sapiens
gugaaauguuuaggaccacuag

SEQ ID NO: 6860 - RNA, 21 nt, Homo sapiens
augaccuaugaauugacagac

SEQ ID NO: 6861 - RNA, 21 nt, Homo sapiens
uagauaaaauauugguaccug

SEQ ID NO: 6862 - RNA, 21 nt, Homo sapiens
uggcagggaggcugggagggg

SEQ ID NO: 6863 - RNA, 22 nt, Homo sapiens
uuauaaagcaaugagacugauu

SEQ ID NO: 6864 - RNA, 22 nt, Homo sapiens
aagacgggaggaaagaagggag

SEQ ID NO: 6865 - RNA, 22 nt, Homo sapiens
gaaguuguucgugguggauucg

SEQ ID NO: 6866 - RNA, 22 nt, Homo sapiens
ccucccacacccaaggcuugca

SEQ ID NO: 6867 - RNA, 18 nt, Homo sapiens
ugcuuccuuucagagggu

SEQ ID NO: 6868 - RNA, 22 nt, Homo sapiens
aucuggagguaagaagcacuuu

SEQ ID NO: 6869 - RNA, 22 nt, Homo sapiens
auaauacaugguuaaccucuuu

SEQ ID NO: 6870 - RNA, 22 nt, Homo sapiens
uucacaaggaggugucauuuau

SEQ ID NO: 6871 - RNA, 22 nt, Homo sapiens
aggcauugacuucucacuagcu

SEQ ID NO: 6872 - RNA, 24 nt, Homo sapiens
aaagacauaggauagagucaccuc

SEQ ID NO: 6873 - RNA, 21 nt, Homo sapiens
auauaugaugacuuagcuuuu

SEQ ID NO: 6874 - RNA, 25 nt, Homo sapiens
cccccacaaccgcgcuugacuagcu

SEQ ID NO: 6875 - RNA, 22 nt, Homo sapiens
ggagacgcggcccuguuggagu

SEQ ID NO: 6876 - RNA, 22 nt, Homo sapiens
uuuugcaauauguuccugaaua

SEQ ID NO: 6877 - RNA, 20 nt, Homo sapiens
cugcaaagggaagcccuuuc

SEQ ID NO: 6878 - RNA, 20 nt, Homo sapiens
cugcaaagggaagcccuuuc

SEQ ID NO: 6879 - RNA, 20 nt, Homo sapiens
cugcaaagggaagcccuuuc

SEQ ID NO: 6880 - RNA, 20 nt, Homo sapiens
cugcaaagggaagcccuuuc

SEQ ID NO: 6881 - RNA, 23 nt, Homo sapiens
ucuggcuccgugucuucacuccc

SEQ ID NO: 6882 - RNA, 22 nt, Homo sapiens
caaagaauucuccuuuugggcu

SEQ ID NO: 6883 - RNA, 23 nt, Homo sapiens
cagugcaaugauauugucaaagc

SEQ ID NO: 6884 - RNA, 21 nt, Homo sapiens
ucuaguaagaguggcagucga

SEQ ID NO: 6885 - RNA, 23 nt, Homo sapiens
ccugcagcgacuugauggcuucc

SEQ ID NO: 6886 - RNA, 23 nt, Homo sapiens
ugaggggcagagagcgagacuuu

SEQ ID NO: 6887 - RNA, 25 nt, Homo sapiens
ggcggagggaaguagguccguuggu

SEQ ID NO: 6888 - RNA, 21 nt, Homo sapiens
uggaggagaaggaaggugaug

SEQ ID NO: 6889 - RNA, 22 nt, Homo sapiens
agaaggaaauugaauucauuua

SEQ ID NO: 6890 - RNA, 18 nt, Homo sapiens
ugcuuccuuucagagggu

SEQ ID NO: 6891 - RNA, 22 nt, Homo sapiens
aucuggagguaagaagcacuuu

SEQ ID NO: 6892 - RNA, 23 nt, Homo sapiens
ucaagagcaauaacgaaaaaugu

SEQ ID NO: 6893 - RNA, 23 nt, Homo sapiens
ugagugugugugugugagugugu

SEQ ID NO: 6894 - RNA, 25 nt, Homo sapiens
aggggugguguugggacagcuccgu

SEQ ID NO: 6895 - RNA, 22 nt, Homo sapiens
ugagccccugugccgcccccag

SEQ ID NO: 6896 - RNA, 23 nt, Homo sapiens
ucuggcuccgugucuucacuccc

SEQ ID NO: 6897 - RNA, 22 nt, Homo sapiens
cccugugcccggcccacuucug

SEQ ID NO: 6898 - RNA, 20 nt, Homo sapiens
ccucugggcccuuccuccag

SEQ ID NO: 6899 - RNA, 22 nt, Homo sapiens
ucucugggccugugucuuaggc

SEQ ID NO: 6900 - RNA, 21 nt, Homo sapiens
uugaaaggcuauuucuugguc

SEQ ID NO: 6901 - RNA, 22 nt, Homo sapiens
uccuucauuccaccggagucug

SEQ ID NO: 6902 - RNA, 24 nt, Homo sapiens
agccugauuaaacacaugcucuga

SEQ ID NO: 6903 - RNA, 21 nt, Homo sapiens
cggcggggacggcgauugguc

SEQ ID NO: 6904 - RNA, 22 nt, Homo sapiens
aggcggggcgccgcgggaccgc

SEQ ID NO: 6905 - RNA, 22 nt, Homo sapiens
ugcggggcuagggcuaacagca

SEQ ID NO: 6906 - RNA, 22 nt, Homo sapiens
acuccagccccacagccucagc

SEQ ID NO: 6907 - RNA, 21 nt, Homo sapiens
ccgucgccgccacccgagccg

SEQ ID NO: 6908 - RNA, 22 nt, Homo sapiens
uggguggucuggagauuugugc

SEQ ID NO: 6909 - RNA, 22 nt, Homo sapiens
caaucacuaacuccacugccau

SEQ ID NO: 6910 - RNA, 24 nt, Homo sapiens
agccuggaagcuggagccugcagu

SEQ ID NO: 6911 - RNA, 22 nt, Homo sapiens
uggagagaaaggcaguuccuga

SEQ ID NO: 6912 - RNA, 21 nt, Homo sapiens
uggcagggaggcugggagggg

SEQ ID NO: 6913 - RNA, 22 nt, Homo sapiens
acagcaggcacagacaggcagu

SEQ ID NO: 6914 - RNA, 22 nt, Homo sapiens
gccugcugggguggaaccuggu

SEQ ID NO: 6915 - RNA, 23 nt, Homo sapiens
caaagugcuuacagugcagguag

SEQ ID NO: 6916 - RNA, 23 nt, Homo sapiens
cccaguguucagacuaccuguuc

SEQ ID NO: 6917 - RNA, 23 nt, Homo sapiens
cccaguguuuagacuaucuguuc

SEQ ID NO: 6918 - RNA, 23 nt, Homo sapiens
ucuggcuccgugucuucacuccc

SEQ ID NO: 6919 - RNA, 21 nt, Homo sapiens
ugagaugaagcacuguagcuc

SEQ ID NO: 6920 - RNA, 23 nt, Homo sapiens
cgggucggaguuagcucaagcgg

SEQ ID NO: 6921 - RNA, 22 nt, Homo sapiens
caaucacuaacuccacugccau

SEQ ID NO: 6922 - RNA, 23 nt, Homo sapiens
cggcccgggcugcugcuguuccu

SEQ ID NO: 6923 - RNA, 20 nt, Homo sapiens
ggggagcuguggaagcagua

SEQ ID NO: 6924 - RNA, 17 nt, Homo sapiens
ucauauugcuucuuucu

SEQ ID NO: 6925 - RNA, 20 nt, Homo sapiens
ggggagcuguggaagcagua

SEQ ID NO: 6926 - RNA, 21 nt, Homo sapiens
gcccuccgcccgugcaccccg

SEQ ID NO: 6927 - RNA, 21 nt, Homo sapiens
aaaacggugagauuuuguuuu

SEQ ID NO: 6928 - RNA, 23 nt, Homo sapiens
ucccccaggugugauucugauuu

SEQ ID NO: 6929 - RNA, 24 nt, Homo sapiens
acugggggcuuucgggcucugcgu

SEQ ID NO: 6930 - RNA, 22 nt, Homo sapiens
cauugcacuugucucggucuga

SEQ ID NO: 6931 - RNA, 20 nt, Homo sapiens
cggcucugggucugugggga

SEQ ID NO: 6932 - RNA, 22 nt, Homo sapiens
ucugggcaacaaagugagaccu

SEQ ID NO: 6933 - RNA, 25 nt, Homo sapiens
gcugggcagggcuucugagcuccuu

SEQ ID NO: 6934 - RNA, 23 nt, Homo sapiens
aaggagcuuacaaucuagcuggg

SEQ ID NO: 6935 - RNA, 23 nt, Homo sapiens
cucuugagggaagcacuuucugu

SEQ ID NO: 6936 - RNA, 23 nt, Homo sapiens
ucuggcuccgugucuucacuccc

SEQ ID NO: 6937 - RNA, 21 nt, Homo sapiens
uccugcgcgucccagaugccc

SEQ ID NO: 6938 - RNA, 21 nt, Homo sapiens
cggcggggacggcgauugguc

SEQ ID NO: 6939 - RNA, 23 nt, Homo sapiens
aggaccugcgggacaagauucuu

SEQ ID NO: 6940 - RNA, 22 nt, Homo sapiens
aggcggggcgccgcgggaccgc

SEQ ID NO: 6941 - RNA, 24 nt, Homo sapiens
uggggagcugaggcucugggggug

SEQ ID NO: 6942 - RNA, 21 nt, Homo sapiens
guggcugcacucacuuccuuc

SEQ ID NO: 6943 - RNA, 21 nt, Homo sapiens
gcccuccgcccgugcaccccg

SEQ ID NO: 6944 - RNA, 20 nt, Homo sapiens
ggggagcuguggaagcagua

SEQ ID NO: 6945 - RNA, 21 nt, Homo sapiens
gcccuccgcccgugcaccccg

SEQ ID NO: 6946 - RNA, 22 nt, Homo sapiens
aauugcacuuuagcaaugguga

SEQ ID NO: 6947 - RNA, 22 nt, Homo sapiens
uagcaccaucugaaaucgguua

SEQ ID NO: 6948 - RNA, 23 nt, Homo sapiens
uagcaccauuugaaaucaguguu

SEQ ID NO: 6949 - RNA, 22 nt, Homo sapiens
uagcaccauuugaaaucgguua

SEQ ID NO: 6950 - RNA, 22 nt, Homo sapiens
gaauguugcucggugaaccccu

SEQ ID NO: 6951 - RNA, 18 nt, Homo sapiens
ucagcuggcccucauuuc

SEQ ID NO: 6952 - RNA, 25 nt, Homo sapiens
cccccacaaccgcgcuugacuagcu

SEQ ID NO: 6953 - RNA, 22 nt, Homo sapiens
uugugucaauaugcgaugaugu

SEQ ID NO: 6954 - RNA, 22 nt, Homo sapiens
ugugucacucgaugaccacugu

SEQ ID NO: 6955 - RNA, 21 nt, Homo sapiens
uggcagggaggcugggagggg

SEQ ID NO: 6956 - RNA, 21 nt, Homo sapiens
cggcggggacggcgauugguc

SEQ ID NO: 6957 - RNA, 23 nt, Homo sapiens
ugaggggcagagagcgagacuuu

SEQ ID NO: 6958 - RNA, 22 nt, Homo sapiens
aggcggggcgccgcgggaccgc

SEQ ID NO: 6959 - RNA, 22 nt, Homo sapiens
ugcggggcuagggcuaacagca

SEQ ID NO: 6960 - RNA, 24 nt, Homo sapiens
agccuggaagcuggagccugcagu

SEQ ID NO: 6961 - RNA, 22 nt, Homo sapiens
cccugugcccggcccacuucug

SEQ ID NO: 6962 - RNA, 22 nt, Homo sapiens
ugagccccugugccgcccccag

SEQ ID NO: 6963 - RNA, 22 nt, Homo sapiens
ucucccaacccuuguaccagug

SEQ ID NO: 6964 - RNA, 21 nt, Homo sapiens
cggcggggacggcgauugguc

SEQ ID NO: 6965 - RNA, 21 nt, Homo sapiens
uucacaguggcuaaguuccgc

SEQ ID NO: 6966 - RNA, 21 nt, Homo sapiens
uucacaguggcuaaguucugc

SEQ ID NO: 6967 - RNA, 21 nt, Homo sapiens
aggggugcuaucugugauuga

SEQ ID NO: 6968 - RNA, 22 nt, Homo sapiens
aggcggggcgccgcgggaccgc

SEQ ID NO: 6969 - RNA, 21 nt, Homo sapiens
gugcauuguaguugcauugca

SEQ ID NO: 6970 - RNA, 20 nt, Homo sapiens
gugcauugcuguugcauugc

SEQ ID NO: 6971 - RNA, 21 nt, Homo sapiens
uccuucugcuccgucccccag

SEQ ID NO: 6972 - RNA, 22 nt, Homo sapiens
cauugcacuugucucggucuga

SEQ ID NO: 6973 - RNA, 21 nt, Homo sapiens
uggcagggaggcugggagggg

SEQ ID NO: 6974 - RNA, 22 nt, Homo sapiens
agacccuggucugcacucuauc

SEQ ID NO: 6975 - RNA, 22 nt, Homo sapiens
acccgucccguucguccccgga

SEQ ID NO: 6976 - RNA, 21 nt, Homo sapiens
uaccacaggguagaaccacgg

SEQ ID NO: 6977 - RNA, 21 nt, Homo sapiens
agggcccccccucaauccugu

SEQ ID NO: 6978 - RNA, 20 nt, Homo sapiens
gugucugggcggacagcugc

SEQ ID NO: 6979 - RNA, 23 nt, Homo sapiens
cggcccgggcugcugcuguuccu

SEQ ID NO: 6980 - RNA, 23 nt, Homo sapiens
cggcccgggcugcugcuguuccu

SEQ ID NO: 6981 - RNA, 21 nt, Homo sapiens
agggcccccccucaauccugu

SEQ ID NO: 6982 - RNA, 22 nt, Homo sapiens
ugagccccugugccgcccccag

SEQ ID NO: 6983 - RNA, 23 nt, Homo sapiens
uaaggugcaucuagugcaguuag

SEQ ID NO: 6984 - RNA, 24 nt, Homo sapiens
ccagacagaauucuaugcacuuuc

SEQ ID NO: 6985 - RNA, 23 nt, Homo sapiens
ucuggcuccgugucuucacuccc

SEQ ID NO: 6986 - RNA, 21 nt, Homo sapiens
cugaccuaugaauugacagcc

SEQ ID NO: 6987 - RNA, 21 nt, Homo sapiens
augaccuaugaauugacagac

SEQ ID NO: 6988 - RNA, 21 nt, Homo sapiens
agggcccccccucaauccugu

SEQ ID NO: 6989 - RNA, 22 nt, Homo sapiens
uagcaccaucugaaaucgguua

SEQ ID NO: 6990 - RNA, 22 nt, Homo sapiens
uagcaccaucugaaaucgguua

SEQ ID NO: 6991 - RNA, 23 nt, Homo sapiens
uagcaccauuugaaaucaguguu

SEQ ID NO: 6992 - RNA, 22 nt, Homo sapiens
uagcaccauuugaaaucgguua

SEQ ID NO: 6993 - RNA, 21 nt, Homo sapiens
ggcuagcaacagcgcuuaccu

SEQ ID NO: 6994 - RNA, 19 nt, Homo sapiens
gugucugcuuccuguggga

SEQ ID NO: 6995 - RNA, 24 nt, Homo sapiens
ugccugggucucuggccugcgcgu

SEQ ID NO: 6996 - RNA, 22 nt, Homo sapiens
ugcggggcuagggcuaacagca

SEQ ID NO: 6997 - RNA, 21 nt, Homo sapiens
gcaggaacuugugagucuccu

SEQ ID NO: 6998 - RNA, 21 nt, Homo sapiens
uacuuggaaaggcaucaguug

SEQ ID NO: 6999 - RNA, 22 nt, Homo sapiens
aaauuauuguacaucggaugag

SEQ ID NO: 7000 - RNA, 24 nt, Homo sapiens
ugccugggucucuggccugcgcgu

SEQ ID NO: 7001 - RNA, 17 nt, Homo sapiens
gugggggagaggcuguc

SEQ ID NO: 7002 - RNA, 23 nt, Homo sapiens
gcaaagcacacggccugcagaga

SEQ ID NO: 7003 - RNA, 17 nt, Homo sapiens
ucgccuccuccucuccc

SEQ ID NO: 7004 - RNA, 23 nt, Homo sapiens
cggcccgggcugcugcuguuccu

SEQ ID NO: 7005 - RNA, 22 nt, Homo sapiens
cagugcaaugaugaaagggcau

SEQ ID NO: 7006 - RNA, 22 nt, Homo sapiens
aaaagcuggguugagagggcga

SEQ ID NO: 7007 - RNA, 22 nt, Homo sapiens
aaaagcuggguugagagggcaa

SEQ ID NO: 7008 - RNA, 20 nt, Homo sapiens
aaaagcuggguugagagggu

SEQ ID NO: 7009 - RNA, 19 nt, Homo sapiens
aaaagcuggguugagagga

SEQ ID NO: 7010 - RNA, 18 nt, Homo sapiens
cagggaggugaaugugau

SEQ ID NO: 7011 - RNA, 22 nt, Homo sapiens
aaggagcucacagucuauugag

SEQ ID NO: 7012 - RNA, 23 nt, Homo sapiens
aaggagcuuacaaucuagcuggg

SEQ ID NO: 7013 - RNA, 22 nt, Homo sapiens
aacacaccugguuaaccucuuu

SEQ ID NO: 7014 - RNA, 22 nt, Homo sapiens
aacacaccuauucaaggauuca

SEQ ID NO: 7015 - RNA, 22 nt, Homo sapiens
cgucaacacuugcugguuuccu

SEQ ID NO: 7016 - RNA, 22 nt, Homo sapiens
aggcauugacuucucacuagcu

SEQ ID NO: 7017 - RNA, 22 nt, Homo sapiens
uggagagaaaggcaguuccuga

SEQ ID NO: 7018 - RNA, 21 nt, Homo sapiens
ucacagugaaccggucucuuu

SEQ ID NO: 7019 - RNA, 23 nt, Homo sapiens
aucccuugcaggggcuguugggu

SEQ ID NO: 7020 - RNA, 22 nt, Homo sapiens
ugagccccugugccgcccccag

SEQ ID NO: 7021 - RNA, 23 nt, Homo sapiens
cggcccgggcugcugcuguuccu

SEQ ID NO: 7022 - RNA, 20 nt, Homo sapiens
agaccauggguucucauugu

SEQ ID NO: 7023 - RNA, 20 nt, Homo sapiens
accaggaggcugaggccccu

SEQ ID NO: 7024 - RNA, 22 nt, Homo sapiens
uggugguuuacaaaguaauuca

SEQ ID NO: 7025 - RNA, 26 nt, Homo sapiens
aaguaguugguuuguaugagaugguu

SEQ ID NO: 7026 - RNA, 21 nt, Homo sapiens
aaacuacugaaaaucaaagau

SEQ ID NO: 7027 - RNA, 22 nt, Homo sapiens
gaaagcgcuucccuuugcugga

SEQ ID NO: 7028 - RNA, 22 nt, Homo sapiens
caaagcgcuccccuuuagaggu

SEQ ID NO: 7029 - RNA, 23 nt, Homo sapiens
caaagcgcuucucuuuagagugu

SEQ ID NO: 7030 - RNA, 21 nt, Homo sapiens
caaagcgcuucccuuuggagc

SEQ ID NO: 7031 - RNA, 21 nt, Homo sapiens
gaaagcgcuucucuuuagagg

SEQ ID NO: 7032 - RNA, 22 nt, Homo sapiens
caaagugccucccuuuagagug

SEQ ID NO: 7033 - RNA, 22 nt, Homo sapiens
uuggggaaacggccgcugagug

SEQ ID NO: 7034 - RNA, 22 nt, Homo sapiens
uagcuuaucagacugauguuga

SEQ ID NO: 7035 - RNA, 22 nt, Homo sapiens
gagcuuauucauaaaagugcag

SEQ ID NO: 7036 - RNA, 23 nt, Homo sapiens
agcuacauugucugcuggguuuc

SEQ ID NO: 7037 - RNA, 23 nt, Homo sapiens
ucuggcuccgugucuucacuccc

SEQ ID NO: 7038 - RNA, 21 nt, Homo sapiens
cggcggggacggcgauugguc

SEQ ID NO: 7039 - RNA, 25 nt, Homo sapiens
aggggugguguugggacagcuccgu

SEQ ID NO: 7040 - RNA, 22 nt, Homo sapiens
aggcggggcgccgcgggaccgc

SEQ ID NO: 7041 - RNA, 21 nt, Homo sapiens
uucacaguggcuaaguucugc

SEQ ID NO: 7042 - RNA, 20 nt, Homo sapiens
agagguauagggcaugggaa

SEQ ID NO: 7043 - RNA, 22 nt, Homo sapiens
uauaccucaguuuuaucaggug

SEQ ID NO: 7044 - RNA, 22 nt, Homo sapiens
acccgucccguucguccccgga

SEQ ID NO: 7045 - RNA, 23 nt, Homo sapiens
ucuggcuccgugucuucacuccc

SEQ ID NO: 7046 - RNA, 25 nt, Homo sapiens
cccccacaaccgcgcuugacuagcu

SEQ ID NO: 7047 - RNA, 23 nt, Homo sapiens
ugagcgccucgacgacagagccg

SEQ ID NO: 7048 - RNA, 21 nt, Homo sapiens
aaagcgcuucccuucagagug

SEQ ID NO: 7049 - RNA, 21 nt, Homo sapiens
uggaggagaaggaaggugaug

SEQ ID NO: 7050 - RNA, 22 nt, Homo sapiens
cuccugagccauucugagccuc

SEQ ID NO: 7051 - RNA, 19 nt, Homo sapiens
gugaggacucgggaggugg

SEQ ID NO: 7052 - RNA, 22 nt, Homo sapiens
uggagagaaaggcaguuccuga

SEQ ID NO: 7053 - RNA, 22 nt, Homo sapiens
uggcucaguucagcaggaacag

SEQ ID NO: 7054 - RNA, 22 nt, Homo sapiens
uggcagugucuuagcugguugu

SEQ ID NO: 7055 - RNA, 23 nt, Homo sapiens
aggcaguguaguuagcugauugc

SEQ ID NO: 7056 - RNA, 22 nt, Homo sapiens
uggcaguguauuguuagcuggu

SEQ ID NO: 7057 - RNA, 22 nt, Homo sapiens
aggcaguguauuguuagcuggc

SEQ ID NO: 7058 - RNA, 22 nt, Homo sapiens
ucaggcucaguccccucccgau

SEQ ID NO: 7059 - RNA, 19 nt, Homo sapiens
ucuaggcugguacugcuga

SEQ ID NO: 7060 - RNA, 20 nt, Homo sapiens
gugucugggcggacagcugc

SEQ ID NO: 7061 - RNA, 22 nt, Homo sapiens
gcccgcguguggagccaggugu

SEQ ID NO: 7062 - RNA, 21 nt, Homo sapiens
ugacaacuauggaugagcucu

SEQ ID NO: 7063 - RNA, 21 nt, Homo sapiens
agggcccccccucaauccugu

SEQ ID NO: 7064 - RNA, 23 nt, Homo sapiens
agcucggucugaggccccucagu

SEQ ID NO: 7065 - RNA, 20 nt, Homo sapiens
cggcucugggucugugggga

SEQ ID NO: 7066 - RNA, 21 nt, Homo sapiens
uggcagggaggcugggagggg

SEQ ID NO: 7067 - RNA, 24 nt, Homo sapiens
ucccugagacccuuuaaccuguga

SEQ ID NO: 7068 - RNA, 22 nt, Homo sapiens
ucccugagacccuaacuuguga

SEQ ID NO: 7069 - RNA, 23 nt, Homo sapiens
ccucagggcuguagaacagggcu

SEQ ID NO: 7070 - RNA, 25 nt, Homo sapiens
gggcgacaaagcaagacucuuucuu

SEQ ID NO: 7071 - RNA, 22 nt, Homo sapiens
uggacggagaacugauaagggu

SEQ ID NO: 7072 - RNA, 22 nt, Homo sapiens
uagguaguuuccuguuguuggg

SEQ ID NO: 7073 - RNA, 22 nt, Homo sapiens
agaguugagucuggacgucccg

SEQ ID NO: 7074 - RNA, 23 nt, Homo sapiens
uaagugcuuccauguuuugguga

SEQ ID NO: 7075 - RNA, 23 nt, Homo sapiens
uaagugcuuccauguuuuaguag

SEQ ID NO: 7076 - RNA, 23 nt, Homo sapiens
uaagugcuuccauguuucagugg

SEQ ID NO: 7077 - RNA, 23 nt, Homo sapiens
uaagugcuuccauguuugagugu

SEQ ID NO: 7078 - RNA, 17 nt, Homo sapiens
uaagugcuuccaugcuu

SEQ ID NO: 7079 - RNA, 23 nt, Homo sapiens
aaagugcugcgacauuugagcgu

SEQ ID NO: 7080 - RNA, 23 nt, Homo sapiens
gaagugcuucgauuuuggggugu

SEQ ID NO: 7081 - RNA, 22 nt, Homo sapiens
uacucaggagaguggcaaucac

SEQ ID NO: 7082 - RNA, 22 nt, Homo sapiens
aagugcugucauagcugagguc

SEQ ID NO: 7083 - RNA, 22 nt, Homo sapiens
aaagugcuucccuuuggacugu

SEQ ID NO: 7084 - RNA, 21 nt, Homo sapiens
aaagugcuuccuuuuagaggg

SEQ ID NO: 7085 - RNA, 22 nt, Homo sapiens
aaagugcuuccuuuuagagggu

SEQ ID NO: 7086 - RNA, 22 nt, Homo sapiens
aaagugcuucucuuuggugggu

SEQ ID NO: 7087 - RNA, 21 nt, Homo sapiens
aaagugcuuccuuuuugaggg

SEQ ID NO: 7088 - RNA, 21 nt, Homo sapiens
agggggaaaguucuauagucc

SEQ ID NO: 7089 - RNA, 22 nt, Homo sapiens
uggagugugacaaugguguuug

SEQ ID NO: 7090 - RNA, 22 nt, Homo sapiens
acccgucccguucguccccgga

SEQ ID NO: 7091 - RNA, 17 nt, Homo sapiens
ucccaccgcugccaccc

SEQ ID NO: 7092 - RNA, 22 nt, Homo sapiens
uagguaguuuccuguuguuggg

SEQ ID NO: 7093 - RNA, 22 nt, Homo sapiens
uucccuuugucauccuaugccu

SEQ ID NO: 7094 - RNA, 22 nt, Homo sapiens
uucccuuugucauccuucgccu

SEQ ID NO: 7095 - RNA, 22 nt, Homo sapiens
aaggagcucacagucuauugag

SEQ ID NO: 7096 - RNA, 22 nt, Homo sapiens
uggugggcacagaaucuggacu

SEQ ID NO: 7097 - RNA, 21 nt, Homo sapiens
guucaaauccagaucuauaac

SEQ ID NO: 7098 - RNA, 19 nt, Homo sapiens
ucuaggcugguacugcuga

SEQ ID NO: 7099 - RNA, 22 nt, Homo sapiens
uggugggccgcagaacaugugc

SEQ ID NO: 7100 - RNA, 20 nt, Homo sapiens
accaggaggcugaggccccu

SEQ ID NO: 7101 - RNA, 23 nt, Homo sapiens
aaggagcuuacaaucuagcuggg

SEQ ID NO: 7102 - RNA, 21 nt, Homo sapiens
ccuggaaacacugagguugug

SEQ ID NO: 7103 - RNA, 22 nt, Homo sapiens
uauugcacucgucccggccucc

SEQ ID NO: 7104 - RNA, 21 nt, Homo sapiens
auauaugaugacuuagcuuuu

SEQ ID NO: 7105 - RNA, 22 nt, Homo sapiens
uaacacugucugguaaagaugg

SEQ ID NO: 7106 - RNA, 22 nt, Homo sapiens
cauugcacuugucucggucuga

SEQ ID NO: 7107 - RNA, 21 nt, Homo sapiens
gaacggcuucauacaggaguu

SEQ ID NO: 7108 - RNA, 21 nt, Homo sapiens
guggcugcacucacuuccuuc

SEQ ID NO: 7109 - RNA, 22 nt, Homo sapiens
uaugucugcugaccaucaccuu

SEQ ID NO: 7110 - RNA, 20 nt, Homo sapiens
accaggaggcugaggccccu

SEQ ID NO: 7111 - RNA, 23 nt, Homo sapiens
aaacucuacuuguccuucugagu

SEQ ID NO: 7112 - RNA, 21 nt, Homo sapiens
ucguggccuggucuccauuau

SEQ ID NO: 7113 - RNA, 22 nt, Homo sapiens
uucuggaauucugugugaggga

SEQ ID NO: 7114 - RNA, 18 nt, Homo sapiens
cagggaggugaaugugau

SEQ ID NO: 7115 - RNA, 22 nt, Homo sapiens
gcccgcguguggagccaggugu

SEQ ID NO: 7116 - RNA, 23 nt, Homo sapiens
ucuggcuccgugucuucacuccc

SEQ ID NO: 7117 - RNA, 21 nt, Homo sapiens
cggcggggacggcgauugguc

SEQ ID NO: 7118 - RNA, 22 nt, Homo sapiens
cccugugcccggcccacuucug

SEQ ID NO: 7119 - RNA, 22 nt, Homo sapiens
uguaacagcaacuccaugugga

SEQ ID NO: 7120 - RNA, 23 nt, Homo sapiens
agcuacauugucugcuggguuuc

SEQ ID NO: 7121 - RNA, 22 nt, Homo sapiens
uugcauauguaggaugucccau

SEQ ID NO: 7122 - RNA, 21 nt, Homo sapiens
uuggccacaauggguuagaac

SEQ ID NO: 7123 - RNA, 22 nt, Homo sapiens
ggggguccccggugcucggauc

SEQ ID NO: 7124 - RNA, 24 nt, Homo sapiens
ugccugggucucuggccugcgcgu

SEQ ID NO: 7125 - RNA, 22 nt, Homo sapiens
aggcggggcgccgcgggaccgc

SEQ ID NO: 7126 - RNA, 20 nt, Homo sapiens
accaggaggcugaggccccu

SEQ ID NO: 7127 - RNA, 22 nt, Homo sapiens
ugcggggcuagggcuaacagca

SEQ ID NO: 7128 - RNA, 20 nt, Homo sapiens
ccuccugcccuccuugcugu

SEQ ID NO: 7129 - RNA, 24 nt, Homo sapiens
acaaagugcuucccuuuagagugu

SEQ ID NO: 7130 - RNA, 22 nt, Homo sapiens
acaaagugcuucccuuuagagu

SEQ ID NO: 7131 - RNA, 22 nt, Homo sapiens
cagugcaaugaugaaagggcau

SEQ ID NO: 7132 - RNA, 23 nt, Homo sapiens
aaggagcuuacaaucuagcuggg

SEQ ID NO: 7133 - RNA, 20 nt, Homo sapiens
agagguauagggcaugggaa

SEQ ID NO: 7134 - RNA, 22 nt, Homo sapiens
augguacccuggcauacugagu

SEQ ID NO: 7135 - RNA, 23 nt, Homo sapiens
uaaggugcaucuagugcagauag

SEQ ID NO: 7136 - RNA, 22 nt, Homo sapiens
cugcccuggcccgagggaccga

SEQ ID NO: 7137 - RNA, 19 nt, Homo sapiens
aggcugcggaauucaggac

SEQ ID NO: 7138 - RNA, 23 nt, Homo sapiens
ugaggggcagagagcgagacuuu

SEQ ID NO: 7139 - RNA, 20 nt, Homo sapiens
ggggagcuguggaagcagua

SEQ ID NO: 7140 - RNA, 22 nt, Homo sapiens
gaaguuguucgugguggauucg

SEQ ID NO: 7141 - RNA, 22 nt, Homo sapiens
ugugacagauugauaacugaaa

SEQ ID NO: 7142 - RNA, 23 nt, Homo sapiens
ugucacucggcucggcccacuac

SEQ ID NO: 7143 - RNA, 22 nt, Homo sapiens
ucugcccccuccgcugcugcca

SEQ ID NO: 7144 - RNA, 20 nt, Homo sapiens
acugccccaggugcugcugg

SEQ ID NO: 7145 - RNA, 21 nt, Homo sapiens
cggggcagcucaguacaggau

SEQ ID NO: 7146 - RNA, 22 nt, Homo sapiens
cccugugcccggcccacuucug

SEQ ID NO: 7147 - RNA, 21 nt, Homo sapiens
gugccagcugcagugggggag

SEQ ID NO: 7148 - RNA, 23 nt, Homo sapiens
cuggagauauggaagagcugugu

SEQ ID NO: 7149 - RNA, 22 nt, Homo sapiens
uucuggaauucugugugaggga

SEQ ID NO: 7150 - RNA, 22 nt, Homo sapiens
aagcccuuaccccaaaaagcau

SEQ ID NO: 7151 - RNA, 21 nt, Homo sapiens
ugagaugaagcacuguagcuc

SEQ ID NO: 7152 - RNA, 22 nt, Homo sapiens
ucgugucuuguguugcagccgg

SEQ ID NO: 7153 - RNA, 22 nt, Homo sapiens
cauugcacuugucucggucuga

SEQ ID NO: 7154 - RNA, 20 nt, Homo sapiens
auggagauagauauagaaau

SEQ ID NO: 7155 - RNA, 22 nt, Homo sapiens
gguggcccggccgugccugagg

SEQ ID NO: 7156 - RNA, 22 nt, Homo sapiens
acuccagccccacagccucagc

SEQ ID NO: 7157 - RNA, 22 nt, Homo sapiens
ucggccugaccacccaccccac

SEQ ID NO: 7158 - RNA, 22 nt, Homo sapiens
acucggcguggcgucggucgug

SEQ ID NO: 7159 - RNA, 19 nt, Homo sapiens
gaugaugcugcugaugcug

SEQ ID NO: 7160 - RNA, 22 nt, Homo sapiens
ggagacgcggcccuguuggagu

SEQ ID NO: 7161 - RNA, 22 nt, Homo sapiens
cucggcgcggggcgcgggcucc

SEQ ID NO: 7162 - RNA, 23 nt, Homo sapiens
ucuggcuccgugucuucacuccc

SEQ ID NO: 7163 - RNA, 23 nt, Homo sapiens
uaaggugcaucuagugcagauag

SEQ ID NO: 7164 - RNA, 23 nt, Homo sapiens
gaacgcgcuucccuauagagggu

SEQ ID NO: 7165 - RNA, 22 nt, Homo sapiens
aggcagcgggguguaguggaua

SEQ ID NO: 7166 - RNA, 26 nt, Homo sapiens
gaugaugauggcagcaaauucugaaa

SEQ ID NO: 7167 - RNA, 21 nt, Homo sapiens
cccggagccaggaugcagcuc

SEQ ID NO: 7168 - RNA, 23 nt, Homo sapiens
ucuggcuccgugucuucacuccc

SEQ ID NO: 7169 - RNA, 23 nt, Homo sapiens
caacggaaucccaaaagcagcug

SEQ ID NO: 7170 - RNA, 21 nt, Homo sapiens
gugcauuguaguugcauugca

SEQ ID NO: 7171 - RNA, 22 nt, Homo sapiens
cauugcacuugucucggucuga

SEQ ID NO: 7172 - RNA, 24 nt, Homo sapiens
ugccugggucucuggccugcgcgu

SEQ ID NO: 7173 - RNA, 17 nt, Homo sapiens
gugggggagaggcuguc

SEQ ID NO: 7174 - RNA, 22 nt, Homo sapiens
cagugguuuuacccuaugguag

SEQ ID NO: 7175 - RNA, 22 nt, Homo sapiens
cucuagagggaagcacuuucug

SEQ ID NO: 7176 - RNA, 21 nt, Homo sapiens
cggcggggacggcgauugguc

SEQ ID NO: 7177 - RNA, 22 nt, Homo sapiens
cccugugcccggcccacuucug

SEQ ID NO: 7178 - RNA, 22 nt, Homo sapiens
uucccuuugucauccuaugccu

SEQ ID NO: 7179 - RNA, 22 nt, Homo sapiens
uucccuuugucauccuucgccu

SEQ ID NO: 7180 - RNA, 21 nt, Homo sapiens
ugacaacuauggaugagcucu

SEQ ID NO: 7181 - RNA, 22 nt, Homo sapiens
agaucagaaggugauuguggcu

SEQ ID NO: 7182 - RNA, 22 nt, Homo sapiens
uuauaaagcaaugagacugauu

SEQ ID NO: 7183 - RNA, 21 nt, Homo sapiens
cagcagcacacugugguuugu

SEQ ID NO: 7184 - RNA, 21 nt, Homo sapiens
uuggccacaauggguuagaac

SEQ ID NO: 7185 - RNA, 24 nt, Homo sapiens
ugccugggucucuggccugcgcgu

SEQ ID NO: 7186 - RNA, 22 nt, Homo sapiens
aggcggggcgccgcgggaccgc

SEQ ID NO: 7187 - RNA, 22 nt, Homo sapiens
ugcggggcuagggcuaacagca

SEQ ID NO: 7188 - RNA, 21 nt, Homo sapiens
gcaggaacuugugagucuccu

SEQ ID NO: 7189 - RNA, 20 nt, Homo sapiens
ggggagcuguggaagcagua

SEQ ID NO: 7190 - RNA, 24 nt, Homo sapiens
uggggagcugaggcucugggggug

SEQ ID NO: 7191 - RNA, 21 nt, Homo sapiens
acagucugcugagguuggagc

SEQ ID NO: 7192 - RNA, 17 nt, Homo sapiens
ucgccuccuccucuccc

SEQ ID NO: 7193 - RNA, 19 nt, Homo sapiens
gggcgccugugaucccaac

SEQ ID NO: 7194 - RNA, 24 nt, Homo sapiens
uggcccugacugaagaccagcagu

SEQ ID NO: 7195 - RNA, 22 nt, Homo sapiens
gguggcccggccgugccugagg

SEQ ID NO: 7196 - RNA, 18 nt, Homo sapiens
gucccuguucaggcgcca

SEQ ID NO: 7197 - RNA, 23 nt, Homo sapiens
ucccuguccuccaggagcucacg

SEQ ID NO: 7198 - RNA, 22 nt, Homo sapiens
acaggugagguucuugggagcc

SEQ ID NO: 7199 - RNA, 18 nt, Homo sapiens
gucccuguucaggcgcca

SEQ ID NO: 7200 - RNA, 22 nt, Homo sapiens
ugugacagauugauaacugaaa

SEQ ID NO: 7201 - RNA, 21 nt, Homo sapiens
aauauuauacagucaaccucu

SEQ ID NO: 7202 - RNA, 21 nt, Homo sapiens
augauccaggaaccugccucu

SEQ ID NO: 7203 - RNA, 21 nt, Homo sapiens
uugcucacuguucuucccuag

SEQ ID NO: 7204 - RNA, 21 nt, Homo sapiens
uggaggagaaggaaggugaug

SEQ ID NO: 7205 - RNA, 23 nt, Homo sapiens
ucugcucauaccccaugguuucu

SEQ ID NO: 7206 - RNA, 21 nt, Homo sapiens
gugccagcugcagugggggag

SEQ ID NO: 7207 - RNA, 22 nt, Homo sapiens
aagacgggaggaaagaagggag

SEQ ID NO: 7208 - RNA, 22 nt, Homo sapiens
ugcaacuuaccugagucauuga

SEQ ID NO: 7209 - RNA, 21 nt, Homo sapiens
uggcagggaggcugggagggg

SEQ ID NO: 7210 - RNA, 22 nt, Homo sapiens
ugagccccugugccgcccccag

SEQ ID NO: 7211 - RNA, 22 nt, Homo sapiens
uggagugugacaaugguguuug

SEQ ID NO: 7212 - RNA, 18 nt, Homo sapiens
cagggaggugaaugugau

SEQ ID NO: 7213 - RNA, 23 nt, Homo sapiens
ucuggcuccgugucuucacuccc

SEQ ID NO: 7214 - RNA, 27 nt, Homo sapiens
accuucuuguauaagcacugugcuaaa

SEQ ID NO: 7215 - RNA, 21 nt, Homo sapiens
agagaagaagaucagccugca

SEQ ID NO: 7216 - RNA, 21 nt, Homo sapiens
agugaaugauggguucugacc

SEQ ID NO: 7217 - RNA, 22 nt, Homo sapiens
cugaagcucagagggcucugau

SEQ ID NO: 7218 - RNA, 21 nt, Homo sapiens
ucgaggagcucacagucuagu

SEQ ID NO: 7219 - RNA, 21 nt, Homo sapiens
ucacuccucuccucccgucuu

SEQ ID NO: 7220 - RNA, 22 nt, Homo sapiens
ucaggcucaguccccucccgau

SEQ ID NO: 7221 - RNA, 23 nt, Homo sapiens
cacucagccuugagggcacuuuc

SEQ ID NO: 7222 - RNA, 18 nt, Homo sapiens
uucacagggaggugucau

SEQ ID NO: 7223 - RNA, 22 nt, Homo sapiens
gaaagcgcuucccuuugcugga

SEQ ID NO: 7224 - RNA, 22 nt, Homo sapiens
caaagcgcuccccuuuagaggu

SEQ ID NO: 7225 - RNA, 23 nt, Homo sapiens
caaagcgcuucucuuuagagugu

SEQ ID NO: 7226 - RNA, 21 nt, Homo sapiens
caaagcgcuucccuuuggagc

SEQ ID NO: 7227 - RNA, 21 nt, Homo sapiens
aaagcgcuucccuucagagug

SEQ ID NO: 7228 - RNA, 21 nt, Homo sapiens
gaaagcgcuucucuuuagagg

SEQ ID NO: 7229 - RNA, 22 nt, Homo sapiens
gugagucucuaagaaaagagga

SEQ ID NO: 7230 - RNA, 17 nt, Homo sapiens
ucucgcuggggccucca

SEQ ID NO: 7231 - RNA, 20 nt, Homo sapiens
cggcucugggucugugggga

SEQ ID NO: 7232 - RNA, 21 nt, Homo sapiens
uggaggagaaggaaggugaug

SEQ ID NO: 7233 - RNA, 22 nt, Homo sapiens
uucccuuugucauccuaugccu

SEQ ID NO: 7234 - RNA, 22 nt, Homo sapiens
uucccuuugucauccuucgccu

SEQ ID NO: 7235 - RNA, 22 nt, Homo sapiens
uggagagaaaggcaguuccuga

SEQ ID NO: 7236 - RNA, 23 nt, Homo sapiens
ugagcgccucgacgacagagccg

SEQ ID NO: 7237 - RNA, 22 nt, Homo sapiens
ugaaacauacacgggaaaccuc

SEQ ID NO: 7238 - RNA, 23 nt, Homo sapiens
aaacucuacuuguccuucugagu

SEQ ID NO: 7239 - RNA, 23 nt, Homo sapiens
agguuguccguggugaguucgca

SEQ ID NO: 7240 - RNA, 22 nt, Homo sapiens
uacccagagcaugcagugugaa

SEQ ID NO: 7241 - RNA, 20 nt, Homo sapiens
ccucugggcccuuccuccag

SEQ ID NO: 7242 - RNA, 22 nt, Homo sapiens
ucucugggccugugucuuaggc

SEQ ID NO: 7243 - RNA, 22 nt, Homo sapiens
acuccagccccacagccucagc

SEQ ID NO: 7244 - RNA, 22 nt, Homo sapiens
aagauguggaaaaauuggaauc

SEQ ID NO: 7245 - RNA, 21 nt, Homo sapiens
uggaggagaaggaaggugaug

SEQ ID NO: 7246 - RNA, 21 nt, Homo sapiens
cggcggggacggcgauugguc

SEQ ID NO: 7247 - RNA, 22 nt, Homo sapiens
aggcggggcgccgcgggaccgc

SEQ ID NO: 7248 - RNA, 23 nt, Homo sapiens
uggugcggagagggcccacagug

SEQ ID NO: 7249 - RNA, 21 nt, Homo sapiens
cggcggggacggcgauugguc

SEQ ID NO: 7250 - RNA, 22 nt, Homo sapiens
aggcggggcgccgcgggaccgc

SEQ ID NO: 7251 - RNA, 23 nt, Homo sapiens
uggugcggagagggcccacagug

SEQ ID NO: 7252 - RNA, 22 nt, Homo sapiens
ucuucucuguuuuggccaugug

SEQ ID NO: 7253 - RNA, 21 nt, Homo sapiens
ucacagugaaccggucucuuu

SEQ ID NO: 7254 - RNA, 22 nt, Homo sapiens
cucccacugcuucacuugacua

SEQ ID NO: 7255 - RNA, 22 nt, Homo sapiens
cugugcgugugacagcggcuga

SEQ ID NO: 7256 - RNA, 22 nt, Homo sapiens
uggcucaguucagcaggaacag

SEQ ID NO: 7257 - RNA, 22 nt, Homo sapiens
auucugcauuuuuagcaaguuc

SEQ ID NO: 7258 - RNA, 22 nt, Homo sapiens
ugagaaccacgucugcucugag

SEQ ID NO: 7259 - RNA, 25 nt, Homo sapiens
cccccacaaccgcgcuugacuagcu

SEQ ID NO: 7260 - RNA, 25 nt, Homo sapiens
ggcggagggaaguagguccguuggu

SEQ ID NO: 7261 - RNA, 22 nt, Homo sapiens
aauugcacgguauccaucugua

SEQ ID NO: 7262 - RNA, 25 nt, Homo sapiens
aggggugguguugggacagcuccgu

SEQ ID NO: 7263 - RNA, 22 nt, Homo sapiens
uguaacagcaacuccaugugga

SEQ ID NO: 7264 - RNA, 23 nt, Homo sapiens
ugagugugugugugugagugugu

SEQ ID NO: 7265 - RNA, 22 nt, Homo sapiens
aggcagcgggguguaguggaua

SEQ ID NO: 7266 - RNA, 20 nt, Homo sapiens
ccccagggcgacgcggcggg

SEQ ID NO: 7267 - RNA, 25 nt, Homo sapiens
cuagugagggacagaaccaggauuc

SEQ ID NO: 7268 - RNA, 22 nt, Homo sapiens
acucggcguggcgucggucgug

SEQ ID NO: 7269 - RNA, 23 nt, Homo sapiens
ugaguaccgccaugucuguuggg

SEQ ID NO: 7270 - RNA, 21 nt, Homo sapiens
agggcccccccucaauccugu

SEQ ID NO: 7271 - RNA, 22 nt, Homo sapiens
uccagcaucagugauuuuguug

SEQ ID NO: 7272 - RNA, 23 nt, Homo sapiens
ugagcgccucgacgacagagccg

SEQ ID NO: 7273 - RNA, 25 nt, Homo sapiens
aggggugguguugggacagcuccgu

SEQ ID NO: 7274 - RNA, 20 nt, Homo sapiens
ggggagcuguggaagcagua

SEQ ID NO: 7275 - RNA, 20 nt, Homo sapiens
uaaagagcccuguggagaca

SEQ ID NO: 7276 - RNA, 22 nt, Homo sapiens
ggagacgcggcccuguuggagu

SEQ ID NO: 7277 - RNA, 21 nt, Homo sapiens
cggcggggacggcgauugguc

SEQ ID NO: 7278 - RNA, 22 nt, Homo sapiens
aggcggggcgccgcgggaccgc

SEQ ID NO: 7279 - RNA, 22 nt, Homo sapiens
ucagugcacuacagaacuuugu

SEQ ID NO: 7280 - RNA, 22 nt, Homo sapiens
gugaaauguuuaggaccacuag

SEQ ID NO: 7281 - RNA, 23 nt, Homo sapiens
ucccccaggugugauucugauuu

SEQ ID NO: 7282 - RNA, 21 nt, Homo sapiens
aacauagaggaaauuccacgu

SEQ ID NO: 7283 - RNA, 22 nt, Homo sapiens
aggcaguguauuguuagcuggc

SEQ ID NO: 7284 - RNA, 24 nt, Homo sapiens
acugggggcuuucgggcucugcgu

SEQ ID NO: 7285 - RNA, 20 nt, Homo sapiens
cggcucugggucugugggga

SEQ ID NO: 7286 - RNA, 23 nt, Homo sapiens
cuguaauauaaauuuaauuuauu

SEQ ID NO: 7287 - RNA, 23 nt, Homo sapiens
ugaggggcagagagcgagacuuu

SEQ ID NO: 7288 - RNA, 18 nt, Homo sapiens
ucagcuggcccucauuuc

SEQ ID NO: 7289 - RNA, 23 nt, Homo sapiens
ucucacacagaaaucgcacccgu

SEQ ID NO: 7290 - RNA, 22 nt, Homo sapiens
uucccuuugucauccuaugccu

SEQ ID NO: 7291 - RNA, 22 nt, Homo sapiens
uucccuuugucauccuucgccu

SEQ ID NO: 7292 - RNA, 22 nt, Homo sapiens
ucugggcaacaaagugagaccu

SEQ ID NO: 7293 - RNA, 25 nt, Homo sapiens
gcugggcagggcuucugagcuccuu

SEQ ID NO: 7294 - RNA, 19 nt, Homo sapiens
gugaggacucgggaggugg

SEQ ID NO: 7295 - RNA, 21 nt, Homo sapiens
agugaaugauggguucugacc

SEQ ID NO: 7296 - RNA, 23 nt, Homo sapiens
cggcccgggcugcugcuguuccu

SEQ ID NO: 7297 - RNA, 22 nt, Homo sapiens
gccugcugggguggaaccuggu

SEQ ID NO: 7298 - RNA, 23 nt, Homo sapiens
aguauguucuuccaggacagaac

SEQ ID NO: 7299 - RNA, 22 nt, Homo sapiens
aagacgggaggaaagaagggag

SEQ ID NO: 7300 - RNA, 23 nt, Homo sapiens
acuccauuuguuuugaugaugga

SEQ ID NO: 7301 - RNA, 23 nt, Homo sapiens
aacauucaacgcugucggugagu

SEQ ID NO: 7302 - RNA, 23 nt, Homo sapiens
aacauucauugcugucggugggu

SEQ ID NO: 7303 - RNA, 22 nt, Homo sapiens
aacauucaaccugucggugagu

SEQ ID NO: 7304 - RNA, 23 nt, Homo sapiens
aacauucauuguugucggugggu

SEQ ID NO: 7305 - RNA, 22 nt, Homo sapiens
aaacauucgcggugcacuucuu

SEQ ID NO: 7306 - RNA, 21 nt, Homo sapiens
cggcggggacggcgauugguc

SEQ ID NO: 7307 - RNA, 22 nt, Homo sapiens
aggcggggcgccgcgggaccgc

SEQ ID NO: 7308 - RNA, 22 nt, Homo sapiens
ugcggggcuagggcuaacagca

SEQ ID NO: 7309 - RNA, 22 nt, Homo sapiens
ugagccccugugccgcccccag

SEQ ID NO: 7310 - RNA, 22 nt, Homo sapiens
cccugugcccggcccacuucug

SEQ ID NO: 7311 - RNA, 20 nt, Homo sapiens
ucacuguucagacaggcgga

SEQ ID NO: 7312 - RNA, 21 nt, Homo sapiens
ccuguugaaguguaaucccca

SEQ ID NO: 7313 - RNA, 22 nt, Homo sapiens
cagugcaauguuaaaagggcau

SEQ ID NO: 7314 - RNA, 22 nt, Homo sapiens
cagugcaaugaugaaagggcau

SEQ ID NO: 7315 - RNA, 22 nt, Homo sapiens
ucagugcacuacagaacuuugu

SEQ ID NO: 7316 - RNA, 22 nt, Homo sapiens
ucagugcaucacagaacuuugu

SEQ ID NO: 7317 - RNA, 21 nt, Homo sapiens
ucagugcaugacagaacuugg

SEQ ID NO: 7318 - RNA, 22 nt, Homo sapiens
uguaacagcaacuccaugugga

SEQ ID NO: 7319 - RNA, 22 nt, Homo sapiens
cucccacugcuucacuugacua

SEQ ID NO: 7320 - RNA, 23 nt, Homo sapiens
ugugcaaaucuaugcaaaacuga

SEQ ID NO: 7321 - RNA, 23 nt, Homo sapiens
ugugcaaauccaugcaaaacuga

SEQ ID NO: 7322 - RNA, 23 nt, Homo sapiens
cagugcaauaguauugucaaagc

SEQ ID NO: 7323 - RNA, 23 nt, Homo sapiens
cagugcaaugauauugucaaagc

SEQ ID NO: 7324 - RNA, 23 nt, Homo sapiens
aucaacagacauuaauugggcgc

SEQ ID NO: 7325 - RNA, 23 nt, Homo sapiens
agguuguccguggugaguucgca

SEQ ID NO: 7326 - RNA, 23 nt, Homo sapiens
uagugcaauauugcuuauagggu

SEQ ID NO: 7327 - RNA, 21 nt, Homo sapiens
uuaagacuugcagugauguuu

SEQ ID NO: 7328 - RNA, 21 nt, Homo sapiens
uuuugcaccuuuuggagugaa

SEQ ID NO: 7329 - RNA, 21 nt, Homo sapiens
gcgacccauacuugguuucag

SEQ ID NO: 7330 - RNA, 23 nt, Homo sapiens
guuugcacgggugggccuugucu

SEQ ID NO: 7331 - RNA, 22 nt, Homo sapiens
cuugguucagggagggucccca

SEQ ID NO: 7332 - RNA, 21 nt, Homo sapiens
ucccacguuguggcccagcag

SEQ ID NO: 7333 - RNA, 20 nt, Homo sapiens
agagucuugugaugucuugc

SEQ ID NO: 7334 - RNA, 22 nt, Homo sapiens
uggagugugacaaugguguuug

SEQ ID NO: 7335 - RNA, 22 nt, Homo sapiens
uucuggaauucugugugaggga

SEQ ID NO: 7336 - RNA, 23 nt, Homo sapiens
ugaguaccgccaugucuguuggg

SEQ ID NO: 7337 - RNA, 23 nt, Homo sapiens
caaagcgcuucucuuuagagugu

SEQ ID NO: 7338 - RNA, 23 nt, Homo sapiens
ucggggaucaucaugucacgaga

SEQ ID NO: 7339 - RNA, 21 nt, Homo sapiens
gcuaguccugacucagccagu

SEQ ID NO: 7340 - RNA, 19 nt, Homo sapiens
aggcugcggaauucaggac

SEQ ID NO: 7341 - RNA, 25 nt, Homo sapiens
aggggugguguugggacagcuccgu

SEQ ID NO: 7342 - RNA, 23 nt, Homo sapiens
aggaagcccuggaggggcuggag

SEQ ID NO: 7343 - RNA, 24 nt, Homo sapiens
uggggagcugaggcucugggggug

SEQ ID NO: 7344 - RNA, 22 nt, Homo sapiens
uggagugugacaaugguguuug

SEQ ID NO: 7345 - RNA, 23 nt, Homo sapiens
uggugcggagagggcccacagug

SEQ ID NO: 7346 - RNA, 21 nt, Homo sapiens
cggcggggacggcgauugguc

SEQ ID NO: 7347 - RNA, 22 nt, Homo sapiens
aggcggggcgccgcgggaccgc

SEQ ID NO: 7348 - RNA, 22 nt, Homo sapiens
uggguggucuggagauuugugc

SEQ ID NO: 7349 - RNA, 18 nt, Homo sapiens
cagggaggugaaugugau

SEQ ID NO: 7350 - RNA, 22 nt, Homo sapiens
cuccugagccauucugagccuc

SEQ ID NO: 7351 - RNA, 21 nt, Homo sapiens
agggcccccccucaauccugu

SEQ ID NO: 7352 - RNA, 22 nt, Homo sapiens
ugcggggcuagggcuaacagca

SEQ ID NO: 7353 - RNA, 22 nt, Homo sapiens
cgcaggggccgggugcucaccg

SEQ ID NO: 7354 - RNA, 22 nt, Homo sapiens
uccgagccugggucucccucuu

SEQ ID NO: 7355 - RNA, 22 nt, Homo sapiens
uuugguccccuucaaccagcug

SEQ ID NO: 7356 - RNA, 21 nt, Homo sapiens
cugacuguugccguccuccag

SEQ ID NO: 7357 - RNA, 20 nt, Homo sapiens
guagaggagauggcgcaggg

SEQ ID NO: 7358 - RNA, 21 nt, Homo sapiens
uucacaguggcuaaguucugc

SEQ ID NO: 7359 - RNA, 23 nt, Homo sapiens
ucuggcuccgugucuucacuccc

SEQ ID NO: 7360 - RNA, 22 nt, Homo sapiens
ugagaacugaauuccauggguu

SEQ ID NO: 7361 - RNA, 22 nt, Homo sapiens
uauggcacugguagaauucacu

SEQ ID NO: 7362 - RNA, 21 nt, Homo sapiens
ccaguccugugccugccgccu

SEQ ID NO: 7363 - RNA, 22 nt, Homo sapiens
cucccacugcuucacuugacua

SEQ ID NO: 7364 - RNA, 22 nt, Homo sapiens
cugugcgugugacagcggcuga

SEQ ID NO: 7365 - RNA, 22 nt, Homo sapiens
uguaaacauccuacacucagcu

SEQ ID NO: 7366 - RNA, 22 nt, Homo sapiens
ccucccacacccaaggcuugca

SEQ ID NO: 7367 - RNA, 22 nt, Homo sapiens
uaacugguugaacaacugaacc

SEQ ID NO: 7368 - RNA, 21 nt, Homo sapiens
caaagaggaaggucccauuac

SEQ ID NO: 7369 - RNA, 23 nt, Homo sapiens
uauucauuuauccccagccuaca

SEQ ID NO: 7370 - RNA, 22 nt, Homo sapiens
ucuucucuguuuuggccaugug

SEQ ID NO: 7371 - RNA, 22 nt, Homo sapiens
aaauuauuguacaucggaugag

SEQ ID NO: 7372 - RNA, 23 nt, Homo sapiens
uacccuguagaaccgaauuugug

SEQ ID NO: 7373 - RNA, 18 nt, Homo sapiens
ucagcuggcccucauuuc

SEQ ID NO: 7374 - RNA, 23 nt, Homo sapiens
uaauccuugcuaccugggugaga

SEQ ID NO: 7375 - RNA, 22 nt, Homo sapiens
uggugggcacagaaucuggacu

SEQ ID NO: 7376 - RNA, 22 nt, Homo sapiens
ccucuuccccuugucucuccag

SEQ ID NO: 7377 - RNA, 22 nt, Homo sapiens
uggguggucuggagauuugugc

SEQ ID NO: 7378 - RNA, 22 nt, Homo sapiens
uggugguuuacaaaguaauuca

SEQ ID NO: 7379 - RNA, 21 nt, Homo sapiens
gcgacccacucuugguuucca

SEQ ID NO: 7380 - RNA, 21 nt, Homo sapiens
gcgacccauacuugguuucag

SEQ ID NO: 7381 - RNA, 22 nt, Homo sapiens
ccucuuccccuugucucuccag

SEQ ID NO: 7382 - RNA, 20 nt, Homo sapiens
guagaggagauggcgcaggg

SEQ ID NO: 7383 - RNA, 21 nt, Homo sapiens
cggcggggacggcgauugguc

SEQ ID NO: 7384 - RNA, 23 nt, Homo sapiens
ugaggggcagagagcgagacuuu

SEQ ID NO: 7385 - RNA, 22 nt, Homo sapiens
aggcggggcgccgcgggaccgc

SEQ ID NO: 7386 - RNA, 22 nt, Homo sapiens
ugcggggcuagggcuaacagca

SEQ ID NO: 7387 - RNA, 22 nt, Homo sapiens
auccgcgcucugacucucugcc

SEQ ID NO: 7388 - RNA, 22 nt, Homo sapiens
cagugcaaugaugaaagggcau

SEQ ID NO: 7389 - RNA, 22 nt, Homo sapiens
agaaggaaauugaauucauuua

SEQ ID NO: 7390 - RNA, 23 nt, Homo sapiens
caaagcgcuucucuuuagagugu

SEQ ID NO: 7391 - RNA, 21 nt, Homo sapiens
cuccagagggaaguacuuucu

SEQ ID NO: 7392 - RNA, 21 nt, Homo sapiens
cuccagagggaugcacuuucu

SEQ ID NO: 7393 - RNA, 22 nt, Homo sapiens
uccagcaucagugauuuuguug

SEQ ID NO: 7394 - RNA, 22 nt, Homo sapiens
ugcggggcuagggcuaacagca

SEQ ID NO: 7395 - RNA, 22 nt, Homo sapiens
uggugguuuacaaaguaauuca

SEQ ID NO: 7396 - RNA, 23 nt, Homo sapiens
ugaggggcagagagcgagacuuu

SEQ ID NO: 7397 - RNA, 22 nt, Homo sapiens
cgucaacacuugcugguuuccu

SEQ ID NO: 7398 - RNA, 18 nt, Homo sapiens
ugcuuccuuucagagggu

SEQ ID NO: 7399 - RNA, 22 nt, Homo sapiens
aucuggagguaagaagcacuuu

SEQ ID NO: 7400 - RNA, 22 nt, Homo sapiens
ccucuuccccuugucucuccag

SEQ ID NO: 7401 - RNA, 22 nt, Homo sapiens
aucuggagguaagaagcacuuu

SEQ ID NO: 7402 - RNA, 24 nt, Homo sapiens
uugcagcugccugggagugacuuc

SEQ ID NO: 7403 - RNA, 18 nt, Homo sapiens
cagggaggugaaugugau

SEQ ID NO: 7404 - RNA, 22 nt, Homo sapiens
aaaacuguaauuacuuuuguac

SEQ ID NO: 7405 - RNA, 21 nt, Homo sapiens
cugaccuaugaauugacagcc

SEQ ID NO: 7406 - RNA, 21 nt, Homo sapiens
augaccuaugaauugacagac

SEQ ID NO: 7407 - RNA, 23 nt, Homo sapiens
uauucauuuauccccagccuaca

SEQ ID NO: 7408 - RNA, 21 nt, Homo sapiens
aggcaagaugcuggcauagcu

SEQ ID NO: 7409 - RNA, 23 nt, Homo sapiens
uaauccuugcuaccugggugaga

SEQ ID NO: 7410 - RNA, 23 nt, Homo sapiens
uggaguccaggaaucugcauuuu

SEQ ID NO: 7411 - RNA, 23 nt, Homo sapiens
caacggaaucccaaaagcagcug

SEQ ID NO: 7412 - RNA, 20 nt, Homo sapiens
ccuccugcccuccuugcugu

SEQ ID NO: 7413 - RNA, 23 nt, Homo sapiens
aggaagcccuggaggggcuggag

SEQ ID NO: 7414 - RNA, 21 nt, Homo sapiens
uaccacaggguagaaccacgg

SEQ ID NO: 7415 - RNA, 22 nt, Homo sapiens
uucaccaccuucuccacccagc

SEQ ID NO: 7416 - RNA, 22 nt, Homo sapiens
acucggcguggcgucggucgug

SEQ ID NO: 7417 - RNA, 22 nt, Homo sapiens
uagcaaaaacugcaguuacuuu

SEQ ID NO: 7418 - RNA, 22 nt, Homo sapiens
caaaguuuaagauccuugaagu

SEQ ID NO: 7419 - RNA, 22 nt, Homo sapiens
uccuucauuccaccggagucug

SEQ ID NO: 7420 - RNA, 22 nt, Homo sapiens
gguggcccggccgugccugagg

SEQ ID NO: 7421 - RNA, 24 nt, Homo sapiens
ccagacagaauucuaugcacuuuc

SEQ ID NO: 7422 - RNA, 22 nt, Homo sapiens
uuugguccccuucaaccagcug

SEQ ID NO: 7423 - RNA, 22 nt, Homo sapiens
uuugguccccuucaaccagcua

SEQ ID NO: 7424 - RNA, 22 nt, Homo sapiens
ucaggccaggcacaguggcuca

SEQ ID NO: 7425 - RNA, 21 nt, Homo sapiens
agcuacaucuggcuacugggu

SEQ ID NO: 7426 - RNA, 21 nt, Homo sapiens
cccggagccaggaugcagcuc

SEQ ID NO: 7427 - RNA, 22 nt, Homo sapiens
ccucuuccccuugucucuccag

SEQ ID NO: 7428 - RNA, 23 nt, Homo sapiens
cggcccgggcugcugcuguuccu

SEQ ID NO: 7429 - RNA, 21 nt, Homo sapiens
agggcccccccucaauccugu

SEQ ID NO: 7430 - RNA, 22 nt, Homo sapiens
aguggggaacccuuccaugagg

SEQ ID NO: 7431 - RNA, 24 nt, Homo sapiens
uucuccaaaagaaagcacuuucug

SEQ ID NO: 7432 - RNA, 22 nt, Homo sapiens
gaaagcgcuucccuuugcugga

SEQ ID NO: 7433 - RNA, 22 nt, Homo sapiens
caaagcgcuccccuuuagaggu

SEQ ID NO: 7434 - RNA, 23 nt, Homo sapiens
caaagcgcuucucuuuagagugu

SEQ ID NO: 7435 - RNA, 21 nt, Homo sapiens
caaagcgcuucccuuuggagc

SEQ ID NO: 7436 - RNA, 21 nt, Homo sapiens
aaagcgcuucccuucagagug

SEQ ID NO: 7437 - RNA, 21 nt, Homo sapiens
gaaagcgcuucucuuuagagg

SEQ ID NO: 7438 - RNA, 22 nt, Homo sapiens
aagugccuccuuuuagaguguu

SEQ ID NO: 7439 - RNA, 25 nt, Homo sapiens
aggggugguguugggacagcuccgu

SEQ ID NO: 7440 - RNA, 22 nt, Homo sapiens
aggcggggcgccgcgggaccgc

SEQ ID NO: 7441 - RNA, 23 nt, Homo sapiens
aggaagcccuggaggggcuggag

SEQ ID NO: 7442 - RNA, 22 nt, Homo sapiens
ugcggggcuagggcuaacagca

SEQ ID NO: 7443 - RNA, 21 nt, Homo sapiens
uggaggagaaggaaggugaug

SEQ ID NO: 7444 - RNA, 20 nt, Homo sapiens
ggggagcuguggaagcagua

SEQ ID NO: 7445 - RNA, 24 nt, Homo sapiens
uggggagcugaggcucugggggug

SEQ ID NO: 7446 - RNA, 22 nt, Homo sapiens
ucuucucuguuuuggccaugug

SEQ ID NO: 7447 - RNA, 23 nt, Homo sapiens
uauggcuuuucauuccuauguga

SEQ ID NO: 7448 - RNA, 23 nt, Homo sapiens
ccugcagcgacuugauggcuucc

SEQ ID NO: 7449 - RNA, 23 nt, Homo sapiens
ccugcagcgacuugauggcuucc

SEQ ID NO: 7450 - RNA, 22 nt, Homo sapiens
acgcccuucccccccuucuuca

SEQ ID NO: 7451 - RNA, 17 nt, Homo sapiens
gugggggagaggcuguc

SEQ ID NO: 7452 - RNA, 23 nt, Homo sapiens
uggaguccaggaaucugcauuuu

SEQ ID NO: 7453 - RNA, 23 nt, Homo sapiens
ucuggcuccgugucuucacuccc

SEQ ID NO: 7454 - RNA, 21 nt, Homo sapiens
ucgaggagcucacagucuagu

SEQ ID NO: 7455 - RNA, 25 nt, Homo sapiens
cccccacaaccgcgcuugacuagcu

SEQ ID NO: 7456 - RNA, 23 nt, Homo sapiens
ugagcgccucgacgacagagccg

SEQ ID NO: 7457 - RNA, 23 nt, Homo sapiens
ucccccaggugugauucugauuu

SEQ ID NO: 7458 - RNA, 22 nt, Homo sapiens
aauugcacgguauccaucugua

SEQ ID NO: 7459 - RNA, 25 nt, Homo sapiens
aggggugguguugggacagcuccgu

SEQ ID NO: 7460 - RNA, 23 nt, Homo sapiens
gcgaggaccccucggggucugac

SEQ ID NO: 7461 - RNA, 24 nt, Homo sapiens
acugggggcuuucgggcucugcgu

SEQ ID NO: 7462 - RNA, 21 nt, Homo sapiens
uggaggagaaggaaggugaug

SEQ ID NO: 7463 - RNA, 24 nt, Homo sapiens
agccuggaagcuggagccugcagu

SEQ ID NO: 7464 - RNA, 24 nt, Homo sapiens
uggcccugacugaagaccagcagu

SEQ ID NO: 7465 - RNA, 22 nt, Homo sapiens
ucucccaacccuuguaccagug

SEQ ID NO: 7466 - RNA, 21 nt, Homo sapiens
cucccacaugcaggguuugca

SEQ ID NO: 7467 - RNA, 23 nt, Homo sapiens
ugaguaccgccaugucuguuggg

SEQ ID NO: 7468 - RNA, 22 nt, Homo sapiens
ucaggccaggcacaguggcuca

SEQ ID NO: 7469 - RNA, 22 nt, Homo sapiens
uagcaccaucugaaaucgguua

SEQ ID NO: 7470 - RNA, 23 nt, Homo sapiens
uagcaccauuugaaaucaguguu

SEQ ID NO: 7471 - RNA, 22 nt, Homo sapiens
uagcaccauuugaaaucgguua

SEQ ID NO: 7472 - RNA, 22 nt, Homo sapiens
uguaaacauccuacacucagcu

SEQ ID NO: 7473 - RNA, 21 nt, Homo sapiens
uaaagugcugacagugcagau

SEQ ID NO: 7474 - RNA, 23 nt, Homo sapiens
cagugcaaugauauugucaaagc

SEQ ID NO: 7475 - RNA, 22 nt, Homo sapiens
cuggcccucucugcccuuccgu

SEQ ID NO: 7476 - RNA, 21 nt, Homo sapiens
gccccugggccuauccuagaa

SEQ ID NO: 7477 - RNA, 23 nt, Homo sapiens
ucccccaggugugauucugauuu

SEQ ID NO: 7478 - RNA, 23 nt, Homo sapiens
uacuccagagggcgucacucaug

SEQ ID NO: 7479 - RNA, 24 nt, Homo sapiens
acaaagugcuucccuuuagagugu

SEQ ID NO: 7480 - RNA, 22 nt, Homo sapiens
acaaagugcuucccuuuagagu

SEQ ID NO: 7481 - RNA, 24 nt, Homo sapiens
aaagacauaggauagagucaccuc

SEQ ID NO: 7482 - RNA, 23 nt, Homo sapiens
cugggaucuccggggucuugguu

SEQ ID NO: 7483 - RNA, 22 nt, Homo sapiens
aacuguuugcagaggaaacuga

SEQ ID NO: 7484 - RNA, 21 nt, Homo sapiens
uagcagcacagaaauauuggc

SEQ ID NO: 7485 - RNA, 22 nt, Homo sapiens
aacaauauccuggugcugagug

SEQ ID NO: 7486 - RNA, 22 nt, Homo sapiens
aacuguuugcagaggaaacuga

SEQ ID NO: 7487 - RNA, 21 nt, Homo sapiens
uugugcuugaucuaaccaugu

SEQ ID NO: 7488 - RNA, 22 nt, Homo sapiens
aucuggagguaagaagcacuuu

SEQ ID NO: 7489 - RNA, 21 nt, Homo sapiens
cagcagcacacugugguuugu

SEQ ID NO: 7490 - RNA, 23 nt, Homo sapiens
aaggagcuuacaaucuagcuggg

SEQ ID NO: 7491 - RNA, 22 nt, Homo sapiens
uuaucagaaucuccagggguac

SEQ ID NO: 7492 - RNA, 21 nt, Homo sapiens
uacucaaaaagcugucaguca

SEQ ID NO: 7493 - RNA, 22 nt, Homo sapiens
aacuguuugcagaggaaacuga

SEQ ID NO: 7494 - RNA, 22 nt, Homo sapiens
aucuggagguaagaagcacuuu

SEQ ID NO: 7495 - RNA, 24 nt, Homo sapiens
agcagaagcagggagguucuccca

SEQ ID NO: 7496 - RNA, 22 nt, Homo sapiens
aaacaaacauggugcacuucuu

SEQ ID NO: 7497 - RNA, 20 nt, Homo sapiens
cggcucugggucugugggga

SEQ ID NO: 7498 - RNA, 21 nt, Homo sapiens
ccuggaaacacugagguugug

SEQ ID NO: 7499 - RNA, 20 nt, Homo sapiens
guagaggagauggcgcaggg

SEQ ID NO: 7500 - RNA, 21 nt, Homo sapiens
gaaggcgcuucccuuuggagu

SEQ ID NO: 7501 - RNA, 22 nt, Homo sapiens
gaaggcgcuucccuuuagagcg

SEQ ID NO: 7502 - RNA, 19 nt, Homo sapiens
gggcgccugugaucccaac

SEQ ID NO: 7503 - RNA, 23 nt, Homo sapiens
aggaugagcaaagaaaguagauu

SEQ ID NO: 7504 - RNA, 22 nt, Homo sapiens
cggaugagcaaagaaagugguu

SEQ ID NO: 7505 - RNA, 22 nt, Homo sapiens
aacuggcccucaaagucccgcu

SEQ ID NO: 7506 - RNA, 21 nt, Homo sapiens
aagcauucuuucauugguugg

SEQ ID NO: 7507 - RNA, 20 nt, Homo sapiens
cgugccacccuuuuccccag

SEQ ID NO: 7508 - RNA, 22 nt, Homo sapiens
uuugguccccuucaaccagcug

SEQ ID NO: 7509 - RNA, 23 nt, Homo sapiens
uguaguguuuccuacuuuaugga

SEQ ID NO: 7510 - RNA, 25 nt, Homo sapiens
cccccacaaccgcgcuugacuagcu

SEQ ID NO: 7511 - RNA, 22 nt, Homo sapiens
uggcagugucuuagcugguugu

SEQ ID NO: 7512 - RNA, 23 nt, Homo sapiens
aggcaguguaguuagcugauugc

SEQ ID NO: 7513 - RNA, 23 nt, Homo sapiens
ucccccaggugugauucugauuu

SEQ ID NO: 7514 - RNA, 22 nt, Homo sapiens
uggcaguguauuguuagcuggu

SEQ ID NO: 7515 - RNA, 22 nt, Homo sapiens
aggcaguguauuguuagcuggc

SEQ ID NO: 7516 - RNA, 21 nt, Homo sapiens
uugaaaggcuauuucuugguc

SEQ ID NO: 7517 - RNA, 20 nt, Homo sapiens
aaaguagcuguaccauuugc

SEQ ID NO: 7518 - RNA, 21 nt, Homo sapiens
ucuuguguucucuagaucagu

SEQ ID NO: 7519 - RNA, 22 nt, Homo sapiens
ugagaaccacgucugcucugag

SEQ ID NO: 7520 - RNA, 20 nt, Homo sapiens
aggguguuucucucaucucu

SEQ ID NO: 7521 - RNA, 24 nt, Homo sapiens
acugggggcuuucgggcucugcgu

SEQ ID NO: 7522 - RNA, 19 nt, Homo sapiens
aagugugcagggcacuggu

SEQ ID NO: 7523 - RNA, 23 nt, Homo sapiens
uagugcaauauugcuuauagggu

SEQ ID NO: 7524 - RNA, 22 nt, Homo sapiens
uggagagaaaggcaguuccuga

SEQ ID NO: 7525 - RNA, 21 nt, Homo sapiens
gugcauuguaguugcauugca

SEQ ID NO: 7526 - RNA, 23 nt, Homo sapiens
uccaguaccacgugucagggcca

SEQ ID NO: 7527 - RNA, 22 nt, Homo sapiens
ucugggcaacaaagugagaccu

SEQ ID NO: 7528 - RNA, 25 nt, Homo sapiens
gcugggcagggcuucugagcuccuu

SEQ ID NO: 7529 - RNA, 22 nt, Homo sapiens
uuuccggcucgcgugggugugu

SEQ ID NO: 7530 - RNA, 27 nt, Homo sapiens
auugaucaucgacacuucgaacgcaau

SEQ ID NO: 7531 - RNA, 20 nt, Homo sapiens
ccuccugcccuccuugcugu

SEQ ID NO: 7532 - RNA, 23 nt, Homo sapiens
ugaggggcagagagcgagacuuu

SEQ ID NO: 7533 - RNA, 21 nt, Homo sapiens
gugccagcugcagugggggag

SEQ ID NO: 7534 - RNA, 21 nt, Homo sapiens
uggcagggaggcugggagggg

SEQ ID NO: 7535 - RNA, 17 nt, Homo sapiens
gugggggagaggcuguc

SEQ ID NO: 7536 - RNA, 23 nt, Homo sapiens
ucuggcuccgugucuucacuccc

SEQ ID NO: 7537 - RNA, 22 nt, Homo sapiens
uggagagaaaggcaguuccuga

SEQ ID NO: 7538 - RNA, 22 nt, Homo sapiens
cgcaggggccgggugcucaccg

SEQ ID NO: 7539 - RNA, 22 nt, Homo sapiens
gguccagaggggagauagguuc

SEQ ID NO: 7540 - RNA, 22 nt, Homo sapiens
uguaaacauccuacacucagcu

SEQ ID NO: 7541 - RNA, 22 nt, Homo sapiens
caaucacuaacuccacugccau

SEQ ID NO: 7542 - RNA, 23 nt, Homo sapiens
ucccccaggugugauucugauuu

SEQ ID NO: 7543 - RNA, 22 nt, Homo sapiens
agaggcuggccgugaugaauuc

SEQ ID NO: 7544 - RNA, 21 nt, Homo sapiens
agggggaaaguucuauagucc

SEQ ID NO: 7545 - RNA, 24 nt, Homo sapiens
acugggggcuuucgggcucugcgu

SEQ ID NO: 7546 - RNA, 22 nt, Homo sapiens
aucuggagguaagaagcacuuu

SEQ ID NO: 7547 - RNA, 22 nt, Homo sapiens
uggagugugacaaugguguuug

SEQ ID NO: 7548 - RNA, 23 nt, Homo sapiens
ucuggcuccgugucuucacuccc

SEQ ID NO: 7549 - RNA, 23 nt, Homo sapiens
ucuggcuccgugucuucacuccc

SEQ ID NO: 7550 - RNA, 23 nt, Homo sapiens
uaaggugcaucuagugcagauag

SEQ ID NO: 7551 - RNA, 21 nt, Homo sapiens
cggcggggacggcgauugguc

SEQ ID NO: 7552 - RNA, 23 nt, Homo sapiens
ugaguaccgccaugucuguuggg

SEQ ID NO: 7553 - RNA, 22 nt, Homo sapiens
cccugugcccggcccacuucug

SEQ ID NO: 7554 - RNA, 22 nt, Homo sapiens
cccugugcccggcccacuucug

SEQ ID NO: 7555 - RNA, 22 nt, Homo sapiens
ucaggccaggcacaguggcuca

SEQ ID NO: 7556 - RNA, 22 nt, Homo sapiens
cgucaacacuugcugguuuccu

SEQ ID NO: 7557 - RNA, 22 nt, Homo sapiens
aggcggggcgccgcgggaccgc

SEQ ID NO: 7558 - RNA, 22 nt, Homo sapiens
cugcccuggcccgagggaccga

SEQ ID NO: 7559 - RNA, 21 nt, Homo sapiens
aaggcagggcccccgcucccc

SEQ ID NO: 7560 - RNA, 23 nt, Homo sapiens
uggaguccaggaaucugcauuuu

SEQ ID NO: 7561 - RNA, 23 nt, Homo sapiens
uacuccagagggcgucacucaug

SEQ ID NO: 7562 - RNA, 22 nt, Homo sapiens
cauugcacuugucucggucuga

SEQ ID NO: 7563 - RNA, 21 nt, Homo sapiens
cauaaaguagaaagcacuacu

SEQ ID NO: 7564 - RNA, 22 nt, Homo sapiens
uccuucauuccaccggagucug

SEQ ID NO: 7565 - RNA, 21 nt, Homo sapiens
cggcggggacggcgauugguc

SEQ ID NO: 7566 - RNA, 23 nt, Homo sapiens
agcuacauugucugcuggguuuc

SEQ ID NO: 7567 - RNA, 23 nt, Homo sapiens
agcucggucugaggccccucagu

SEQ ID NO: 7568 - RNA, 19 nt, Homo sapiens
ugagcugcuguaccaaaau

SEQ ID NO: 7569 - RNA, 22 nt, Homo sapiens
ugugucacucgaugaccacugu

SEQ ID NO: 7570 - RNA, 19 nt, Homo sapiens
aagcagcugccucugaggc

SEQ ID NO: 7571 - RNA, 22 nt, Homo sapiens
aggcggggcgccgcgggaccgc

SEQ ID NO: 7572 - RNA, 22 nt, Homo sapiens
aggcagcgggguguaguggaua

SEQ ID NO: 7573 - RNA, 19 nt, Homo sapiens
ugagcugcuguaccaaaau

SEQ ID NO: 7574 - RNA, 22 nt, Homo sapiens
augggugaauuuguagaaggau

SEQ ID NO: 7575 - RNA, 22 nt, Homo sapiens
uauguaauaugguccacaucuu

SEQ ID NO: 7576 - RNA, 21 nt, Homo sapiens
cggggcagcucaguacaggau

SEQ ID NO: 7577 - RNA, 19 nt, Homo sapiens
agguugacauacguuuccc

SEQ ID NO: 7578 - RNA, 22 nt, Homo sapiens
cacgcucaugcacacacccaca

SEQ ID NO: 7579 - RNA, 21 nt, Homo sapiens
ccccaccuccucucuccucag

SEQ ID NO: 7580 - RNA, 22 nt, Homo sapiens
caaaacuggcaauuacuuuugc

SEQ ID NO: 7581 - RNA, 22 nt, Homo sapiens
aaaaacugagacuacuuuugca

SEQ ID NO: 7582 - RNA, 19 nt, Homo sapiens
aaaaacuguaauuacuuuu

SEQ ID NO: 7583 - RNA, 18 nt, Homo sapiens
cgggcguggugguggggg

SEQ ID NO: 7584 - RNA, 22 nt, Homo sapiens
uuugaggcuacagugagaugug

SEQ ID NO: 7585 - RNA, 22 nt, Homo sapiens
ugagaacugaauuccauggguu

SEQ ID NO: 7586 - RNA, 22 nt, Homo sapiens
ugagaacugaauuccauaggcu

SEQ ID NO: 7587 - RNA, 22 nt, Homo sapiens
gguccagaggggagauagguuc

SEQ ID NO: 7588 - RNA, 23 nt, Homo sapiens
guguuaauuaaaccucuauuuac

SEQ ID NO: 7589 - RNA, 22 nt, Homo sapiens
agaguugagucuggacgucccg

SEQ ID NO: 7590 - RNA, 22 nt, Homo sapiens
cuagguauggucccagggaucc

SEQ ID NO: 7591 - RNA, 23 nt, Homo sapiens
aaugacacgaucacucccguuga

SEQ ID NO: 7592 - RNA, 22 nt, Homo sapiens
agaggcuggccgugaugaauuc

SEQ ID NO: 7593 - RNA, 23 nt, Homo sapiens
caaagcgcuucucuuuagagugu

SEQ ID NO: 7594 - RNA, 21 nt, Homo sapiens
cuccagagggaaguacuuucu

SEQ ID NO: 7595 - RNA, 21 nt, Homo sapiens
cuccagagggaugcacuuucu

SEQ ID NO: 7596 - RNA, 21 nt, Homo sapiens
aguuaaugaauccuggaaagu

SEQ ID NO: 7597 - RNA, 22 nt, Homo sapiens
uugugucaauaugcgaugaugu

SEQ ID NO: 7598 - RNA, 19 nt, Homo sapiens
gugucugcuuccuguggga

SEQ ID NO: 7599 - RNA, 24 nt, Homo sapiens
agccuggaagcuggagccugcagu

SEQ ID NO: 7600 - RNA, 22 nt, Homo sapiens
auccgcgcucugacucucugcc

SEQ ID NO: 7601 - RNA, 21 nt, Homo sapiens
uggcagggaggcugggagggg

SEQ ID NO: 7602 - RNA, 21 nt, Homo sapiens
agggcccccccucaauccugu

SEQ ID NO: 7603 - RNA, 21 nt, Homo sapiens
uucacaguggcuaaguuccgc

SEQ ID NO: 7604 - RNA, 22 nt, Homo sapiens
uacccagagcaugcagugugaa

SEQ ID NO: 7605 - RNA, 19 nt, Homo sapiens
aggcugcggaauucaggac

SEQ ID NO: 7606 - RNA, 22 nt, Homo sapiens
caaaaguaauuguggauuuugu

SEQ ID NO: 7607 - RNA, 22 nt, Homo sapiens
ugagguaguaguuugugcuguu

SEQ ID NO: 7608 - RNA, 21 nt, Homo sapiens
ccccaccuccucucuccucag

SEQ ID NO: 7609 - RNA, 22 nt, Homo sapiens
ucugggcaacaaagugagaccu

SEQ ID NO: 7610 - RNA, 20 nt, Homo sapiens
ccccagggcgacgcggcggg

SEQ ID NO: 7611 - RNA, 22 nt, Homo sapiens
uguaacagcaacuccaugugga

SEQ ID NO: 7612 - RNA, 22 nt, Homo sapiens
aacacaccugguuaaccucuuu

SEQ ID NO: 7613 - RNA, 22 nt, Homo sapiens
aacacaccuauucaaggauuca

SEQ ID NO: 7614 - RNA, 22 nt, Homo sapiens
uggugggcacagaaucuggacu

SEQ ID NO: 7615 - RNA, 22 nt, Homo sapiens
ucagcaaacauuuauugugugc

SEQ ID NO: 7616 - RNA, 19 nt, Homo sapiens
aggcacggugucagcaggc

SEQ ID NO: 7617 - RNA, 25 nt, Homo sapiens
gcugggcagggcuucugagcuccuu

SEQ ID NO: 7618 - RNA, 22 nt, Homo sapiens
uggugggccgcagaacaugugc

SEQ ID NO: 7619 - RNA, 22 nt, Homo sapiens
agucauuggaggguuugagcag

SEQ ID NO: 7620 - RNA, 22 nt, Homo sapiens
ugugacagauugauaacugaaa

SEQ ID NO: 7621 - RNA, 18 nt, Homo sapiens
ugaggcaguagauugaau

SEQ ID NO: 7622 - RNA, 22 nt, Homo sapiens
ugcggggcuagggcuaacagca

SEQ ID NO: 7623 - RNA, 21 nt, Homo sapiens
ccccaccuccucucuccucag

SEQ ID NO: 7624 - RNA, 20 nt, Homo sapiens
ucugcaggguuugcuuugag

SEQ ID NO: 7625 - RNA, 20 nt, Homo sapiens
ucugcaggguuugcuuugag

SEQ ID NO: 7626 - RNA, 23 nt, Homo sapiens
ucuggcuccgugucuucacuccc

SEQ ID NO: 7627 - RNA, 22 nt, Homo sapiens
uguaaacauccuacacucagcu

SEQ ID NO: 7628 - RNA, 18 nt, Homo sapiens
cagggaggugaaugugau

SEQ ID NO: 7629 - RNA, 19 nt, Homo sapiens
aagugugcagggcacuggu

SEQ ID NO: 7630 - RNA, 23 nt, Homo sapiens
uacuccagagggcgucacucaug

SEQ ID NO: 7631 - RNA, 22 nt, Homo sapiens
uggagagaaaggcaguuccuga

SEQ ID NO: 7632 - RNA, 23 nt, Homo sapiens
cggcccgggcugcugcuguuccu

SEQ ID NO: 7633 - RNA, 22 nt, Homo sapiens
uggagugugacaaugguguuug

SEQ ID NO: 7634 - RNA, 22 nt, Homo sapiens
agaaggaaauugaauucauuua

SEQ ID NO: 7635 - RNA, 20 nt, Homo sapiens
ucguuugccuuuuucugcuu

SEQ ID NO: 7636 - RNA, 22 nt, Homo sapiens
ucuacaaaggaaagcgcuuucu

SEQ ID NO: 7637 - RNA, 18 nt, Homo sapiens
uugagaaggaggcugcug

SEQ ID NO: 7638 - RNA, 23 nt, Homo sapiens
uauggcuuuucauuccuauguga

SEQ ID NO: 7639 - RNA, 23 nt, Homo sapiens
gcaaagcacacggccugcagaga

SEQ ID NO: 7640 - RNA, 22 nt, Homo sapiens
uuauaaagcaaugagacugauu

SEQ ID NO: 7641 - RNA, 23 nt, Homo sapiens
ucucacacagaaaucgcacccgu

SEQ ID NO: 7642 - RNA, 22 nt, Homo sapiens
aagacgggaggaaagaagggag

SEQ ID NO: 7643 - RNA, 23 nt, Homo sapiens
cacucagccuugagggcacuuuc

SEQ ID NO: 7644 - RNA, 20 nt, Homo sapiens
cuacaaagggaagcccuuuc

SEQ ID NO: 7645 - RNA, 22 nt, Homo sapiens
cuacaaagggaagcacuuucuc

SEQ ID NO: 7646 - RNA, 21 nt, Homo sapiens
aguuaaugaauccuggaaagu

SEQ ID NO: 7647 - RNA, 23 nt, Homo sapiens
uaaaucccauggugccuucuccu

SEQ ID NO: 7648 - RNA, 22 nt, Homo sapiens
uggauuucuuugugaaucacca

SEQ ID NO: 7649 - RNA, 22 nt, Homo sapiens
uacccagagcaugcagugugaa

SEQ ID NO: 7650 - RNA, 23 nt, Homo sapiens
uggugcggagagggcccacagug

SEQ ID NO: 7651 - RNA, 23 nt, Homo sapiens
ucauagcccuguacaaugcugcu

SEQ ID NO: 7652 - RNA, 22 nt, Homo sapiens
cucuagagggaagcacuuucug

SEQ ID NO: 7653 - RNA, 22 nt, Homo sapiens
uagguaguuucauguuguuggg

SEQ ID NO: 7654 - RNA, 23 nt, Homo sapiens
agcuacauugucugcuggguuuc

SEQ ID NO: 7655 - RNA, 21 nt, Homo sapiens
aggcaagaugcuggcauagcu

SEQ ID NO: 7656 - RNA, 21 nt, Homo sapiens
gccccugggccuauccuagaa

SEQ ID NO: 7657 - RNA, 19 nt, Homo sapiens
aggcugcggaauucaggac

SEQ ID NO: 7658 - RNA, 25 nt, Homo sapiens
aggggugguguugggacagcuccgu

SEQ ID NO: 7659 - RNA, 20 nt, Homo sapiens
aggguguuucucucaucucu

SEQ ID NO: 7660 - RNA, 22 nt, Homo sapiens
ugcggggcuagggcuaacagca

SEQ ID NO: 7661 - RNA, 20 nt, Homo sapiens
ggggagcuguggaagcagua

SEQ ID NO: 7662 - RNA, 20 nt, Homo sapiens
ggggagcuguggaagcagua

SEQ ID NO: 7663 - RNA, 24 nt, Homo sapiens
uggggagcugaggcucugggggug

SEQ ID NO: 7664 - RNA, 21 nt, Homo sapiens
gccccugggccuauccuagaa

SEQ ID NO: 7665 - RNA, 23 nt, Homo sapiens
ucccuguccuccaggagcucacg

SEQ ID NO: 7666 - RNA, 22 nt, Homo sapiens
aauugcacgguauccaucugua

SEQ ID NO: 7667 - RNA, 18 nt, Homo sapiens
aucccaccucugccacca

SEQ ID NO: 7668 - RNA, 17 nt, Homo sapiens
ucccaccgcugccaccc

SEQ ID NO: 7669 - RNA, 22 nt, Homo sapiens
acagcaggcacagacaggcagu

SEQ ID NO: 7670 - RNA, 21 nt, Homo sapiens
aggggugcuaucugugauuga

SEQ ID NO: 7671 - RNA, 22 nt, Homo sapiens
gccugcugggguggaaccuggu

SEQ ID NO: 7672 - RNA, 23 nt, Homo sapiens
aggaccugcgggacaagauucuu

SEQ ID NO: 7673 - RNA, 21 nt, Homo sapiens
gaaggcgcuucccuuuggagu

SEQ ID NO: 7674 - RNA, 22 nt, Homo sapiens
gaaggcgcuucccuuuagagcg

SEQ ID NO: 7675 - RNA, 21 nt, Homo sapiens
agaccuggcccagaccucagc

SEQ ID NO: 7676 - RNA, 25 nt, Homo sapiens
ggcggagggaaguagguccguuggu

SEQ ID NO: 7677 - RNA, 23 nt, Homo sapiens
uggugcggagagggcccacagug

SEQ ID NO: 7678 - RNA, 21 nt, Homo sapiens
uggaggagaaggaaggugaug

SEQ ID NO: 7679 - RNA, 22 nt, Homo sapiens
aggcauugacuucucacuagcu

SEQ ID NO: 7680 - RNA, 21 nt, Homo sapiens
cauaaaguagaaagcacuacu

SEQ ID NO: 7681 - RNA, 22 nt, Homo sapiens
caaagaauucuccuuuugggcu

SEQ ID NO: 7682 - RNA, 22 nt, Homo sapiens
uguaacagcaacuccaugugga

SEQ ID NO: 7683 - RNA, 22 nt, Homo sapiens
uccuucauuccaccggagucug

SEQ ID NO: 7684 - RNA, 22 nt, Homo sapiens
aaaaguaauugcgaguuuuacc

SEQ ID NO: 7685 - RNA, 22 nt, Homo sapiens
aaaaguaauugugguuuuggcc

SEQ ID NO: 7686 - RNA, 22 nt, Homo sapiens
aaaaguaauugcgguuuuugcc

SEQ ID NO: 7687 - RNA, 22 nt, Homo sapiens
aaaaguaauugugguuuuugcc

SEQ ID NO: 7688 - RNA, 22 nt, Homo sapiens
aaaaguaaucgcgguuuuuguc

SEQ ID NO: 7689 - RNA, 22 nt, Homo sapiens
aaaaguaauugcggauuuugcc

SEQ ID NO: 7690 - RNA, 22 nt, Homo sapiens
aaaaguaauugcggucuuuggu

SEQ ID NO: 7691 - RNA, 21 nt, Homo sapiens
uaaaguaaauaugcaccaaaa

SEQ ID NO: 7692 - RNA, 21 nt, Homo sapiens
ucuaguaagaguggcagucga

SEQ ID NO: 7693 - RNA, 23 nt, Homo sapiens
caguaacaaagauucauccuugu

SEQ ID NO: 7694 - RNA, 23 nt, Homo sapiens
ucucacacagaaaucgcacccgu

SEQ ID NO: 7695 - RNA, 22 nt, Homo sapiens
ugagaccucuggguucugagcu

SEQ ID NO: 7696 - RNA, 20 nt, Homo sapiens
aggguguuucucucaucucu

SEQ ID NO: 7697 - RNA, 23 nt, Homo sapiens
uagcagcgggaacaguucugcag

SEQ ID NO: 7698 - RNA, 25 nt, Homo sapiens
aggggugguguugggacagcuccgu

SEQ ID NO: 7699 - RNA, 22 nt, Homo sapiens
ugcggggcuagggcuaacagca

SEQ ID NO: 7700 - RNA, 21 nt, Homo sapiens
gaagugugccguggugugucu

SEQ ID NO: 7701 - RNA, 23 nt, Homo sapiens
ugaguaccgccaugucuguuggg

SEQ ID NO: 7702 - RNA, 22 nt, Homo sapiens
gugagucucuaagaaaagagga

SEQ ID NO: 7703 - RNA, 22 nt, Homo sapiens
acccgucccguucguccccgga

SEQ ID NO: 7704 - RNA, 17 nt, Homo sapiens
ucgccuccuccucuccc

SEQ ID NO: 7705 - RNA, 21 nt, Homo sapiens
cggcggggacggcgauugguc

SEQ ID NO: 7706 - RNA, 22 nt, Homo sapiens
cauugcacuugucucggucuga

SEQ ID NO: 7707 - RNA, 25 nt, Homo sapiens
ggcggagggaaguagguccguuggu

SEQ ID NO: 7708 - RNA, 25 nt, Homo sapiens
ggcggagggaaguagguccguuggu

SEQ ID NO: 7709 - RNA, 22 nt, Homo sapiens
aggcggggcgccgcgggaccgc

SEQ ID NO: 7710 - RNA, 22 nt, Homo sapiens
ugcggggcuagggcuaacagca

SEQ ID NO: 7711 - RNA, 22 nt, Homo sapiens
uauugcacucgucccggccucc

SEQ ID NO: 7712 - RNA, 24 nt, Homo sapiens
aauccuuggaaccuaggugugagu

SEQ ID NO: 7713 - RNA, 23 nt, Homo sapiens
uacuccagagggcgucacucaug

SEQ ID NO: 7714 - RNA, 21 nt, Homo sapiens
gcgacccacucuugguuucca

SEQ ID NO: 7715 - RNA, 21 nt, Homo sapiens
gcgacccauacuugguuucag

SEQ ID NO: 7716 - RNA, 22 nt, Homo sapiens
auccgcgcucugacucucugcc

SEQ ID NO: 7717 - RNA, 23 nt, Homo sapiens
uauggcuuuuuauuccuauguga

SEQ ID NO: 7718 - RNA, 22 nt, Homo sapiens
uggagugugacaaugguguuug

SEQ ID NO: 7719 - RNA, 21 nt, Homo sapiens
acggugcuggauguggccuuu

SEQ ID NO: 7720 - RNA, 18 nt, Homo sapiens
cagggaggugaaugugau

SEQ ID NO: 7721 - RNA, 21 nt, Homo sapiens
cggcggggacggcgauugguc

SEQ ID NO: 7722 - RNA, 22 nt, Homo sapiens
uucccuuugucauccuaugccu

SEQ ID NO: 7723 - RNA, 22 nt, Homo sapiens
uucccuuugucauccuucgccu

SEQ ID NO: 7724 - RNA, 22 nt, Homo sapiens
aucacacaaaggcaacuuuugu

SEQ ID NO: 7725 - RNA, 19 nt, Homo sapiens
ugagcugcuguaccaaaau

SEQ ID NO: 7726 - RNA, 22 nt, Homo sapiens
ggggguccccggugcucggauc

SEQ ID NO: 7727 - RNA, 22 nt, Homo sapiens
aggcggggcgccgcgggaccgc

SEQ ID NO: 7728 - RNA, 22 nt, Homo sapiens
caaagugccucccuuuagagug

SEQ ID NO: 7729 - RNA, 22 nt, Homo sapiens
auccgcgcucugacucucugcc

SEQ ID NO: 7730 - RNA, 22 nt, Homo sapiens
augggugaauuuguagaaggau

SEQ ID NO: 7731 - RNA, 21 nt, Homo sapiens
acggugcuggauguggccuuu

SEQ ID NO: 7732 - RNA, 23 nt, Homo sapiens
acuugggcacugaaacaaugucc

SEQ ID NO: 7733 - RNA, 27 nt, Homo sapiens
cacuguaggugauggugagagugggca

SEQ ID NO: 7734 - RNA, 22 nt, Homo sapiens
ucuacagugcacgugucuccag

SEQ ID NO: 7735 - RNA, 19 nt, Homo sapiens
gaugaugcugcugaugcug

SEQ ID NO: 7736 - RNA, 23 nt, Homo sapiens
ucuggcuccgugucuucacuccc

SEQ ID NO: 7737 - RNA, 22 nt, Homo sapiens
uggagagaaaggcaguuccuga

SEQ ID NO: 7738 - RNA, 21 nt, Homo sapiens
auccuugcuaucugggugcua

SEQ ID NO: 7739 - RNA, 21 nt, Homo sapiens
aagccugcccggcuccucggg

SEQ ID NO: 7740 - RNA, 24 nt, Homo sapiens
uggggagcugaggcucugggggug

SEQ ID NO: 7741 - RNA, 22 nt, Homo sapiens
uucccuuugucauccuaugccu

SEQ ID NO: 7742 - RNA, 22 nt, Homo sapiens
uucccuuugucauccuucgccu

SEQ ID NO: 7743 - RNA, 23 nt, Homo sapiens
cgcauccccuagggcauuggugu

SEQ ID NO: 7744 - RNA, 23 nt, Homo sapiens
cgcauccccuagggcauuggugu

SEQ ID NO: 7745 - RNA, 22 nt, Homo sapiens
cgaaaacagcaauuaccuuugc

SEQ ID NO: 7746 - RNA, 27 nt, Homo sapiens
accuucuuguauaagcacugugcuaaa

SEQ ID NO: 7747 - RNA, 21 nt, Homo sapiens
aaggcagggcccccgcucccc

SEQ ID NO: 7748 - RNA, 22 nt, Homo sapiens
ucaccagcccuguguucccuag

SEQ ID NO: 7749 - RNA, 23 nt, Homo sapiens
agcugguguugugaaucaggccg

SEQ ID NO: 7750 - RNA, 21 nt, Homo sapiens
cagcagcacacugugguuugu

SEQ ID NO: 7751 - RNA, 22 nt, Homo sapiens
ccucccacacccaaggcuugca

SEQ ID NO: 7752 - RNA, 22 nt, Homo sapiens
uauggcacugguagaauucacu

SEQ ID NO: 7753 - RNA, 21 nt, Homo sapiens
agggcccccccucaauccugu

SEQ ID NO: 7754 - RNA, 21 nt, Homo sapiens
agggcccccccucaauccugu

SEQ ID NO: 7755 - RNA, 23 nt, Homo sapiens
ugaggggcagagagcgagacuuu

SEQ ID NO: 7756 - RNA, 21 nt, Homo sapiens
ccaccaccgugucugacacuu

SEQ ID NO: 7757 - RNA, 22 nt, Homo sapiens
uggagagaaaggcaguuccuga

SEQ ID NO: 7758 - RNA, 23 nt, Homo sapiens
ugaguaccgccaugucuguuggg

SEQ ID NO: 7759 - RNA, 20 nt, Homo sapiens
ccucugggcccuuccuccag

SEQ ID NO: 7760 - RNA, 22 nt, Homo sapiens
ucucugggccugugucuuaggc

SEQ ID NO: 7761 - RNA, 22 nt, Homo sapiens
cuccuauaugaugccuuucuuc

SEQ ID NO: 7762 - RNA, 23 nt, Homo sapiens
aggaccugcgggacaagauucuu

SEQ ID NO: 7763 - RNA, 22 nt, Homo sapiens
ugaaggucuacugugugccagg

SEQ ID NO: 7764 - RNA, 22 nt, Homo sapiens
aaacaaacauggugcacuucuu

SEQ ID NO: 7765 - RNA, 23 nt, Homo sapiens
agugccugagggaguaagagccc

SEQ ID NO: 7766 - RNA, 22 nt, Homo sapiens
aaccagcaccccaacuuuggac

SEQ ID NO: 7767 - RNA, 22 nt, Homo sapiens
aaaaguaauugcggauuuugcc

SEQ ID NO: 7768 - RNA, 22 nt, Homo sapiens
acccgucccguucguccccgga

SEQ ID NO: 7769 - RNA, 22 nt, Homo sapiens
cccugugcccggcccacuucug

SEQ ID NO: 7770 - RNA, 21 nt, Homo sapiens
auguaugugugcaugugcaug

SEQ ID NO: 7771 - RNA, 22 nt, Homo sapiens
uugugucaauaugcgaugaugu

SEQ ID NO: 7772 - RNA, 22 nt, Homo sapiens
ugugucacucgaugaccacugu

SEQ ID NO: 7773 - RNA, 21 nt, Homo sapiens
aauggcgccacuaggguugug

SEQ ID NO: 7774 - RNA, 20 nt, Homo sapiens
ggggagcuguggaagcagua

SEQ ID NO: 7775 - RNA, 22 nt, Homo sapiens
uauugcacucgucccggccucc

SEQ ID NO: 7776 - RNA, 17 nt, Homo sapiens
ucgccuccuccucuccc

SEQ ID NO: 7777 - RNA, 21 nt, Homo sapiens
ucgaggagcucacagucuagu

SEQ ID NO: 7778 - RNA, 21 nt, Homo sapiens
caagucacuagugguuccguu

SEQ ID NO: 7779 - RNA, 19 nt, Homo sapiens
aggcugcggaauucaggac

SEQ ID NO: 7780 - RNA, 20 nt, Homo sapiens
accaggaggcugaggccccu

SEQ ID NO: 7781 - RNA, 20 nt, Homo sapiens
guugugucaguuuaucaaac

SEQ ID NO: 7782 - RNA, 21 nt, Homo sapiens
guggcugcacucacuuccuuc

SEQ ID NO: 7783 - RNA, 21 nt, Homo sapiens
uggacugcccugaucuggaga

SEQ ID NO: 7784 - RNA, 19 nt, Homo sapiens
gggcgccugugaucccaac

SEQ ID NO: 7785 - RNA, 17 nt, Homo sapiens
ucgccuccuccucuccc

SEQ ID NO: 7786 - RNA, 21 nt, Homo sapiens
cccggagccaggaugcagcuc

SEQ ID NO: 7787 - RNA, 22 nt, Homo sapiens
uggagugugacaaugguguuug

SEQ ID NO: 7788 - RNA, 21 nt, Homo sapiens
cggcggggacggcgauugguc

SEQ ID NO: 7789 - RNA, 22 nt, Homo sapiens
acagcaggcacagacaggcagu

SEQ ID NO: 7790 - RNA, 22 nt, Homo sapiens
gccugcugggguggaaccuggu

SEQ ID NO: 7791 - RNA, 22 nt, Homo sapiens
augcugacauauuuacuagagg

SEQ ID NO: 7792 - RNA, 22 nt, Homo sapiens
aggcggggcgccgcgggaccgc

SEQ ID NO: 7793 - RNA, 22 nt, Homo sapiens
ugcggggcuagggcuaacagca

SEQ ID NO: 7794 - RNA, 22 nt, Homo sapiens
ugugcgcagggagaccucuccc

SEQ ID NO: 7795 - RNA, 21 nt, Homo sapiens
cggcggggacggcgauugguc

SEQ ID NO: 7796 - RNA, 21 nt, Homo sapiens
cggcggggacggcgauugguc

SEQ ID NO: 7797 - RNA, 22 nt, Homo sapiens
cgcaggggccgggugcucaccg

SEQ ID NO: 7798 - RNA, 22 nt, Homo sapiens
aggcggggcgccgcgggaccgc

SEQ ID NO: 7799 - RNA, 22 nt, Homo sapiens
aggcggggcgccgcgggaccgc

SEQ ID NO: 7800 - RNA, 22 nt, Homo sapiens
ugcggggcuagggcuaacagca

SEQ ID NO: 7801 - RNA, 22 nt, Homo sapiens
ugcggggcuagggcuaacagca

SEQ ID NO: 7802 - RNA, 21 nt, Homo sapiens
uggcagggaggcugggagggg

SEQ ID NO: 7803 - RNA, 18 nt, Homo sapiens
ugaggcaguagauugaau

SEQ ID NO: 7804 - RNA, 23 nt, Homo sapiens
ucccccaggugugauucugauuu

SEQ ID NO: 7805 - RNA, 24 nt, Homo sapiens
acugggggcuuucgggcucugcgu

SEQ ID NO: 7806 - RNA, 22 nt, Homo sapiens
acaggugagguucuugggagcc

SEQ ID NO: 7807 - RNA, 21 nt, Homo sapiens
caagucacuagugguuccguu

SEQ ID NO: 7808 - RNA, 20 nt, Homo sapiens
auguauaaauguauacacac

SEQ ID NO: 7809 - RNA, 22 nt, Homo sapiens
uggagugugacaaugguguuug

SEQ ID NO: 7810 - RNA, 24 nt, Homo sapiens
ccagacagaauucuaugcacuuuc

SEQ ID NO: 7811 - RNA, 19 nt, Homo sapiens
gugucugcuuccuguggga

SEQ ID NO: 7812 - RNA, 24 nt, Homo sapiens
aauccuuggaaccuaggugugagu

SEQ ID NO: 7813 - RNA, 19 nt, Homo sapiens
ugagcugcuguaccaaaau

SEQ ID NO: 7814 - RNA, 22 nt, Homo sapiens
cuccugagccauucugagccuc

SEQ ID NO: 7815 - RNA, 22 nt, Homo sapiens
uggagugugacaaugguguuug

SEQ ID NO: 7816 - RNA, 20 nt, Homo sapiens
cuuccucgucugucugcccc

SEQ ID NO: 7817 - RNA, 20 nt, Homo sapiens
ccccagggcgacgcggcggg

SEQ ID NO: 7818 - RNA, 21 nt, Homo sapiens
aggcaagaugcuggcauagcu

SEQ ID NO: 7819 - RNA, 20 nt, Homo sapiens
accaggaggcugaggccccu

SEQ ID NO: 7820 - RNA, 21 nt, Homo sapiens
uggaggagaaggaaggugaug

SEQ ID NO: 7821 - RNA, 23 nt, Homo sapiens
gcagcagagaauaggacuacguc

SEQ ID NO: 7822 - RNA, 22 nt, Homo sapiens
uauugcacucgucccggccucc

SEQ ID NO: 7823 - RNA, 21 nt, Homo sapiens
cggcggggacggcgauugguc

SEQ ID NO: 7824 - RNA, 22 nt, Homo sapiens
aggcggggcgccgcgggaccgc

SEQ ID NO: 7825 - RNA, 20 nt, Homo sapiens
ggggagcuguggaagcagua

SEQ ID NO: 7826 - RNA, 19 nt, Homo sapiens
aagcagcugccucugaggc

SEQ ID NO: 7827 - RNA, 23 nt, Homo sapiens
caguaacaaagauucauccuugu

SEQ ID NO: 7828 - RNA, 23 nt, Homo sapiens
ucccuguccuccaggagcucacg

SEQ ID NO: 7829 - RNA, 21 nt, Homo sapiens
cggcggggacggcgauugguc

SEQ ID NO: 7830 - RNA, 22 nt, Homo sapiens
aggcggggcgccgcgggaccgc

SEQ ID NO: 7831 - RNA, 22 nt, Homo sapiens
uggagugugacaaugguguuug

SEQ ID NO: 7832 - RNA, 21 nt, Homo sapiens
cggcggggacggcgauugguc

SEQ ID NO: 7833 - RNA, 22 nt, Homo sapiens
cauugcacuugucucggucuga

SEQ ID NO: 7834 - RNA, 23 nt, Homo sapiens
ugaggggcagagagcgagacuuu

SEQ ID NO: 7835 - RNA, 22 nt, Homo sapiens
ugauugguacgucuguggguag

SEQ ID NO: 7836 - RNA, 22 nt, Homo sapiens
aggcggggcgccgcgggaccgc

SEQ ID NO: 7837 - RNA, 23 nt, Homo sapiens
aggaagcccuggaggggcuggag

SEQ ID NO: 7838 - RNA, 22 nt, Homo sapiens
auccgcgcucugacucucugcc

SEQ ID NO: 7839 - RNA, 22 nt, Homo sapiens
ccucccacacccaaggcuugca

SEQ ID NO: 7840 - RNA, 23 nt, Homo sapiens
ucggggaucaucaugucacgaga

SEQ ID NO: 7841 - RNA, 19 nt, Homo sapiens
gugucugcuuccuguggga

SEQ ID NO: 7842 - RNA, 22 nt, Homo sapiens
uaugucugcugaccaucaccuu

SEQ ID NO: 7843 - RNA, 22 nt, Homo sapiens
cgcaggggccgggugcucaccg

SEQ ID NO: 7844 - RNA, 23 nt, Homo sapiens
ugagcgccucgacgacagagccg

SEQ ID NO: 7845 - RNA, 23 nt, Homo sapiens
ucccccaggugugauucugauuu

SEQ ID NO: 7846 - RNA, 23 nt, Homo sapiens
agcucggucugaggccccucagu

SEQ ID NO: 7847 - RNA, 22 nt, Homo sapiens
agaggcuggccgugaugaauuc

SEQ ID NO: 7848 - RNA, 24 nt, Homo sapiens
acugggggcuuucgggcucugcgu

SEQ ID NO: 7849 - RNA, 21 nt, Homo sapiens
uggaggagaaggaaggugaug

SEQ ID NO: 7850 - RNA, 22 nt, Homo sapiens
ugugcgcagggagaccucuccc

SEQ ID NO: 7851 - RNA, 21 nt, Homo sapiens
cccggagccaggaugcagcuc

SEQ ID NO: 7852 - RNA, 18 nt, Homo sapiens
ugaggcaguagauugaau

SEQ ID NO: 7853 - RNA, 22 nt, Homo sapiens
ugaaggucuacugugugccagg

SEQ ID NO: 7854 - RNA, 22 nt, Homo sapiens
agaggcuggccgugaugaauuc

SEQ ID NO: 7855 - RNA, 18 nt, Homo sapiens
ucagcuggcccucauuuc

SEQ ID NO: 7856 - RNA, 22 nt, Homo sapiens
cgaaaacagcaauuaccuuugc

SEQ ID NO: 7857 - RNA, 20 nt, Homo sapiens
ucguuugccuuuuucugcuu

SEQ ID NO: 7858 - RNA, 23 nt, Homo sapiens
uggugcggagagggcccacagug

SEQ ID NO: 7859 - RNA, 20 nt, Homo sapiens
ggggagcuguggaagcagua

SEQ ID NO: 7860 - RNA, 22 nt, Homo sapiens
uggagugugacaaugguguuug

SEQ ID NO: 7861 - RNA, 22 nt, Homo sapiens
ugcggggcuagggcuaacagca

SEQ ID NO: 7862 - RNA, 22 nt, Homo sapiens
ugaaggucuacugugugccagg

SEQ ID NO: 7863 - RNA, 18 nt, Homo sapiens
cgggcguggugguggggg

SEQ ID NO: 7864 - RNA, 23 nt, Homo sapiens
uggaguccaggaaucugcauuuu

SEQ ID NO: 7865 - RNA, 18 nt, Homo sapiens
cagggaggugaaugugau

SEQ ID NO: 7866 - RNA, 23 nt, Homo sapiens
ucuggcuccgugucuucacuccc

SEQ ID NO: 7867 - RNA, 24 nt, Homo sapiens
uuuggcaaugguagaacucacacu

SEQ ID NO: 7868 - RNA, 20 nt, Homo sapiens
ccccagggcgacgcggcggg

SEQ ID NO: 7869 - RNA, 22 nt, Homo sapiens
uucccuuugucauccuaugccu

SEQ ID NO: 7870 - RNA, 22 nt, Homo sapiens
uucccuuugucauccuucgccu

SEQ ID NO: 7871 - RNA, 22 nt, Homo sapiens
aguggggaacccuuccaugagg

SEQ ID NO: 7872 - RNA, 23 nt, Homo sapiens
aucgcugcgguugcgagcgcugu

SEQ ID NO: 7873 - RNA, 17 nt, Homo sapiens
ucucgcuggggccucca

SEQ ID NO: 7874 - RNA, 21 nt, Homo sapiens
uggaggagaaggaaggugaug

SEQ ID NO: 7875 - RNA, 22 nt, Homo sapiens
aggcagcgggguguaguggaua

SEQ ID NO: 7876 - RNA, 22 nt, Homo sapiens
acuccagccccacagccucagc

SEQ ID NO: 7877 - RNA, 21 nt, Homo sapiens
cggcggggacggcgauugguc

SEQ ID NO: 7878 - RNA, 22 nt, Homo sapiens
aggcggggcgccgcgggaccgc

SEQ ID NO: 7879 - RNA, 22 nt, Homo sapiens
ugcggggcuagggcuaacagca

SEQ ID NO: 7880 - RNA, 21 nt, Homo sapiens
uggcagggaggcugggagggg

SEQ ID NO: 7881 - RNA, 22 nt, Homo sapiens
aucacacaaaggcaacuuuugu

SEQ ID NO: 7882 - RNA, 21 nt, Homo sapiens
ccaccaccgugucugacacuu

SEQ ID NO: 7883 - RNA, 24 nt, Homo sapiens
agccuggaagcuggagccugcagu

SEQ ID NO: 7884 - RNA, 23 nt, Homo sapiens
guguuaauuaaaccucuauuuac

SEQ ID NO: 7885 - RNA, 18 nt, Homo sapiens
aucccaccucugccacca

SEQ ID NO: 7886 - RNA, 23 nt, Homo sapiens
ccucagggcuguagaacagggcu

SEQ ID NO: 7887 - RNA, 21 nt, Homo sapiens
ccaguccugugccugccgccu

SEQ ID NO: 7888 - RNA, 23 nt, Homo sapiens
uaaagugcuuauagugcagguag

SEQ ID NO: 7889 - RNA, 22 nt, Homo sapiens
agaucagaaggugauuguggcu

SEQ ID NO: 7890 - RNA, 21 nt, Homo sapiens
gugcauuguaguugcauugca

SEQ ID NO: 7891 - RNA, 20 nt, Homo sapiens
gugcauugcuguugcauugc

SEQ ID NO: 7892 - RNA, 20 nt, Homo sapiens
ugagcccuguccucccgcag

SEQ ID NO: 7893 - RNA, 17 nt, Homo sapiens
gugggggagaggcuguc

SEQ ID NO: 7894 - RNA, 21 nt, Homo sapiens
uccugcgcgucccagaugccc

SEQ ID NO: 7895 - RNA, 21 nt, Homo sapiens
cggcggggacggcgauugguc

SEQ ID NO: 7896 - RNA, 21 nt, Homo sapiens
aggggugcuaucugugauuga

SEQ ID NO: 7897 - RNA, 19 nt, Homo sapiens
aggcugcggaauucaggac

SEQ ID NO: 7898 - RNA, 22 nt, Homo sapiens
aggcggggcgccgcgggaccgc

SEQ ID NO: 7899 - RNA, 22 nt, Homo sapiens
ugcggggcuagggcuaacagca

SEQ ID NO: 7900 - RNA, 22 nt, Homo sapiens
acaggugagguucuugggagcc

SEQ ID NO: 7901 - RNA, 22 nt, Homo sapiens
ugugagguuggcauuguugucu

SEQ ID NO: 7902 - RNA, 21 nt, Homo sapiens
gugcauuguaguugcauugca

SEQ ID NO: 7903 - RNA, 20 nt, Homo sapiens
gugcauugcuguugcauugc

SEQ ID NO: 7904 - RNA, 22 nt, Homo sapiens
ucucccaacccuuguaccagug

SEQ ID NO: 7905 - RNA, 23 nt, Homo sapiens
aucccuugcaggggcuguugggu

SEQ ID NO: 7906 - RNA, 21 nt, Homo sapiens
cucccacaugcaggguuugca

SEQ ID NO: 7907 - RNA, 23 nt, Homo sapiens
cacucagccuugagggcacuuuc

SEQ ID NO: 7908 - RNA, 21 nt, Homo sapiens
gccccugggccuauccuagaa

SEQ ID NO: 7909 - RNA, 22 nt, Homo sapiens
uaacacugucugguaaagaugg

SEQ ID NO: 7910 - RNA, 22 nt, Homo sapiens
uaacacugucugguaacgaugu

SEQ ID NO: 7911 - RNA, 21 nt, Homo sapiens
cggcggggacggcgauugguc

SEQ ID NO: 7912 - RNA, 22 nt, Homo sapiens
aggcggggcgccgcgggaccgc

SEQ ID NO: 7913 - RNA, 22 nt, Homo sapiens
ugcggggcuagggcuaacagca

SEQ ID NO: 7914 - RNA, 22 nt, Homo sapiens
uuggggaaacggccgcugagug

SEQ ID NO: 7915 - RNA, 21 nt, Homo sapiens
agaccuggcccagaccucagc

SEQ ID NO: 7916 - RNA, 22 nt, Homo sapiens
uucuggaauucugugugaggga

SEQ ID NO: 7917 - RNA, 22 nt, Homo sapiens
aagcccuuaccccaaaaagcau

SEQ ID NO: 7918 - RNA, 22 nt, Homo sapiens
ugugacugguugaccagagggg

SEQ ID NO: 7919 - RNA, 22 nt, Homo sapiens
uggagugugacaaugguguuug

SEQ ID NO: 7920 - RNA, 22 nt, Homo sapiens
uagcuuaucagacugauguuga

SEQ ID NO: 7921 - RNA, 22 nt, Homo sapiens
caaaguuuaagauccuugaagu

SEQ ID NO: 7922 - RNA, 22 nt, Homo sapiens
uuugguccccuucaaccagcug

SEQ ID NO: 7923 - RNA, 20 nt, Homo sapiens
accaggaggcugaggccccu

SEQ ID NO: 7924 - RNA, 17 nt, Homo sapiens
gugggggagaggcuguc

SEQ ID NO: 7925 - RNA, 23 nt, Homo sapiens
ucuggcuccgugucuucacuccc

SEQ ID NO: 7926 - RNA, 21 nt, Homo sapiens
aagcauucuuucauugguugg

SEQ ID NO: 7927 - RNA, 22 nt, Homo sapiens
uggacggagaacugauaagggu

SEQ ID NO: 7928 - RNA, 22 nt, Homo sapiens
uggagagaaaggcaguuccuga

SEQ ID NO: 7929 - RNA, 23 nt, Homo sapiens
agcuacauugucugcuggguuuc

SEQ ID NO: 7930 - RNA, 21 nt, Homo sapiens
agcuacaucuggcuacugggu

SEQ ID NO: 7931 - RNA, 22 nt, Homo sapiens
gaggguuggguggaggcucucc

SEQ ID NO: 7932 - RNA, 23 nt, Homo sapiens
ugaggggcagagagcgagacuuu

SEQ ID NO: 7933 - RNA, 23 nt, Homo sapiens
ugaggggcagagagcgagacuuu

SEQ ID NO: 7934 - RNA, 19 nt, Homo sapiens
aggcugcggaauucaggac

SEQ ID NO: 7935 - RNA, 22 nt, Homo sapiens
uuauaaagcaaugagacugauu

SEQ ID NO: 7936 - RNA, 23 nt, Homo sapiens
ucuggcuccgugucuucacuccc

SEQ ID NO: 7937 - RNA, 21 nt, Homo sapiens
ugagaugaagcacuguagcuc

SEQ ID NO: 7938 - RNA, 20 nt, Homo sapiens
ccucugggcccuuccuccag

SEQ ID NO: 7939 - RNA, 22 nt, Homo sapiens
ucucugggccugugucuuaggc

SEQ ID NO: 7940 - RNA, 22 nt, Homo sapiens
caaagaauucuccuuuugggcu

SEQ ID NO: 7941 - RNA, 22 nt, Homo sapiens
aggcagcgggguguaguggaua

SEQ ID NO: 7942 - RNA, 22 nt, Homo sapiens
gccugcugggguggaaccuggu

SEQ ID NO: 7943 - RNA, 22 nt, Homo sapiens
ugugcgcagggagaccucuccc

SEQ ID NO: 7944 - RNA, 22 nt, Homo sapiens
aacuggccuacaaagucccagu

SEQ ID NO: 7945 - RNA, 22 nt, Homo sapiens
aacuggcccucaaagucccgcu

SEQ ID NO: 7946 - RNA, 20 nt, Homo sapiens
ucugcaggguuugcuuugag

SEQ ID NO: 7947 - RNA, 21 nt, Homo sapiens
cugaccuaugaauugacagcc

SEQ ID NO: 7948 - RNA, 22 nt, Homo sapiens
uguaaacauccuacacucagcu

SEQ ID NO: 7949 - RNA, 23 nt, Homo sapiens
gcgaggaccccucggggucugac

SEQ ID NO: 7950 - RNA, 21 nt, Homo sapiens
uggaggagaaggaaggugaug

SEQ ID NO: 7951 - RNA, 21 nt, Homo sapiens
agaccuggcccagaccucagc

SEQ ID NO: 7952 - RNA, 22 nt, Homo sapiens
caaagaauucuccuuuugggcu

SEQ ID NO: 7953 - RNA, 22 nt, Homo sapiens
cgcaggggccgggugcucaccg

SEQ ID NO: 7954 - RNA, 22 nt, Homo sapiens
ucaccagcccuguguucccuag

SEQ ID NO: 7955 - RNA, 23 nt, Homo sapiens
agcugguguugugaaucaggccg

SEQ ID NO: 7956 - RNA, 22 nt, Homo sapiens
uggagagaaaggcaguuccuga

SEQ ID NO: 7957 - RNA, 21 nt, Homo sapiens
cggcggggacggcgauugguc

SEQ ID NO: 7958 - RNA, 22 nt, Homo sapiens
cauugcacuugucucggucuga

SEQ ID NO: 7959 - RNA, 22 nt, Homo sapiens
aggcggggcgccgcgggaccgc

SEQ ID NO: 7960 - RNA, 23 nt, Homo sapiens
uggugcggagagggcccacagug

SEQ ID NO: 7961 - RNA, 23 nt, Homo sapiens
ugguuguaguccgugcgagaaua

SEQ ID NO: 7962 - RNA, 21 nt, Homo sapiens
uuggccacaauggguuagaac

SEQ ID NO: 7963 - RNA, 22 nt, Homo sapiens
aauugcacgguauccaucugua

SEQ ID NO: 7964 - RNA, 24 nt, Homo sapiens
uuuggcaaugguagaacucacacu

SEQ ID NO: 7965 - RNA, 23 nt, Homo sapiens
uagugcaauauugcuuauagggu

SEQ ID NO: 7966 - RNA, 21 nt, Homo sapiens
gcaggaacuugugagucuccu

SEQ ID NO: 7967 - RNA, 18 nt, Homo sapiens
uugagaaggaggcugcug

SEQ ID NO: 7968 - RNA, 22 nt, Homo sapiens
cuggacugagccgugcuacugg

SEQ ID NO: 7969 - RNA, 22 nt, Homo sapiens
uagcagcacauaaugguuugug

SEQ ID NO: 7970 - RNA, 22 nt, Homo sapiens
uagcagcacaucaugguuuaca

SEQ ID NO: 7971 - RNA, 22 nt, Homo sapiens
uagcagcacguaaauauuggcg

SEQ ID NO: 7972 - RNA, 22 nt, Homo sapiens
uggagagaaaggcaguuccuga

SEQ ID NO: 7973 - RNA, 23 nt, Homo sapiens
uaaggugcaucuagugcagauag

SEQ ID NO: 7974 - RNA, 21 nt, Homo sapiens
uagcagcacagaaauauuggc

SEQ ID NO: 7975 - RNA, 21 nt, Homo sapiens
uugugcuugaucuaaccaugu

SEQ ID NO: 7976 - RNA, 21 nt, Homo sapiens
acuggacuuggagucagaagg

SEQ ID NO: 7977 - RNA, 22 nt, Homo sapiens
acuggacuuagggucagaaggc

SEQ ID NO: 7978 - RNA, 22 nt, Homo sapiens
cagcagcaauucauguuuugaa

SEQ ID NO: 7979 - RNA, 21 nt, Homo sapiens
gcaguccaugggcauauacac

SEQ ID NO: 7980 - RNA, 21 nt, Homo sapiens
cagcagcacacugugguuugu

SEQ ID NO: 7981 - RNA, 21 nt, Homo sapiens
auccuugcuaucugggugcua

SEQ ID NO: 7982 - RNA, 22 nt, Homo sapiens
ucagcaaacauuuauugugugc

SEQ ID NO: 7983 - RNA, 22 nt, Homo sapiens
gaugagcucauuguaauaugag

SEQ ID NO: 7984 - RNA, 19 nt, Homo sapiens
ugagcugcuguaccaaaau

SEQ ID NO: 7985 - RNA, 23 nt, Homo sapiens
ugugcuugcucgucccgcccgca

SEQ ID NO: 7986 - RNA, 19 nt, Homo sapiens
aagcagcugccucugaggc

SEQ ID NO: 7987 - RNA, 20 nt, Homo sapiens
ggggagcuguggaagcagua

SEQ ID NO: 7988 - RNA, 22 nt, Homo sapiens
ugcccuuaaaggugaacccagu

SEQ ID NO: 7989 - RNA, 24 nt, Homo sapiens
uggggagcugaggcucugggggug

SEQ ID NO: 7990 - RNA, 21 nt, Homo sapiens
gugcauuguaguugcauugca

SEQ ID NO: 7991 - RNA, 20 nt, Homo sapiens
gugcauugcuguugcauugc

SEQ ID NO: 7992 - RNA, 21 nt, Homo sapiens
guggcugcacucacuuccuuc

SEQ ID NO: 7993 - RNA, 23 nt, Homo sapiens
ugaggggcagagagcgagacuuu

SEQ ID NO: 7994 - RNA, 22 nt, Homo sapiens
ugcggggcuagggcuaacagca

SEQ ID NO: 7995 - RNA, 22 nt, Homo sapiens
uauugcacucgucccggccucc

SEQ ID NO: 7996 - RNA, 21 nt, Homo sapiens
uggcagggaggcugggagggg

SEQ ID NO: 7997 - RNA, 22 nt, Homo sapiens
ugagccccugugccgcccccag

SEQ ID NO: 7998 - RNA, 24 nt, Homo sapiens
uggcccugacugaagaccagcagu

SEQ ID NO: 7999 - RNA, 25 nt, Homo sapiens
aggggugguguugggacagcuccgu

SEQ ID NO: 8000 - RNA, 23 nt, Homo sapiens
ugucacucggcucggcccacuac

SEQ ID NO: 8001 - RNA, 23 nt, Homo sapiens
uggugcggagagggcccacagug

SEQ ID NO: 8002 - RNA, 22 nt, Homo sapiens
ugcggggcuagggcuaacagca

SEQ ID NO: 8003 - RNA, 22 nt, Homo sapiens
acuccagccccacagccucagc

SEQ ID NO: 8004 - RNA, 20 nt, Homo sapiens
ggggagcuguggaagcagua

SEQ ID NO: 8005 - RNA, 22 nt, Homo sapiens
auccgcgcucugacucucugcc

SEQ ID NO: 8006 - RNA, 24 nt, Homo sapiens
uggggagcugaggcucugggggug

SEQ ID NO: 8007 - RNA, 20 nt, Homo sapiens
uacaguauagaugauguacu

SEQ ID NO: 8008 - RNA, 23 nt, Homo sapiens
cggcccgggcugcugcuguuccu

SEQ ID NO: 8009 - RNA, 19 nt, Homo sapiens
aggcugcggaauucaggac

SEQ ID NO: 8010 - RNA, 23 nt, Homo sapiens
cuggagauauggaagagcugugu

SEQ ID NO: 8011 - RNA, 17 nt, Homo sapiens
ucccaccgcugccaccc

SEQ ID NO: 8012 - RNA, 17 nt, Homo sapiens
ucgccuccuccucuccc

SEQ ID NO: 8013 - RNA, 22 nt, Homo sapiens
ugauauguuugauauauuaggu

SEQ ID NO: 8014 - RNA, 23 nt, Homo sapiens
agcuacauugucugcuggguuuc

SEQ ID NO: 8015 - RNA, 23 nt, Homo sapiens
gcaaagcacacggccugcagaga

SEQ ID NO: 8016 - RNA, 20 nt, Homo sapiens
gugcauugcuguugcauugc

SEQ ID NO: 8017 - RNA, 22 nt, Homo sapiens
uuaucagaaucuccagggguac

SEQ ID NO: 8018 - RNA, 22 nt, Homo sapiens
gagugccuucuuuuggagcguu

SEQ ID NO: 8019 - RNA, 22 nt, Homo sapiens
aagugccuccuuuuagaguguu

SEQ ID NO: 8020 - RNA, 22 nt, Homo sapiens
uggugggcacagaaucuggacu

SEQ ID NO: 8021 - RNA, 20 nt, Homo sapiens
auggagauagauauagaaau

SEQ ID NO: 8022 - RNA, 22 nt, Homo sapiens
uggugggccgcagaacaugugc

SEQ ID NO: 8023 - RNA, 22 nt, Homo sapiens
ugagaccucuggguucugagcu

SEQ ID NO: 8024 - RNA, 23 nt, Homo sapiens
uacccuguagaaccgaauuugug

SEQ ID NO: 8025 - RNA, 25 nt, Homo sapiens
aggggugguguugggacagcuccgu

SEQ ID NO: 8026 - RNA, 22 nt, Homo sapiens
aggcaguguauuguuagcuggc

SEQ ID NO: 8027 - RNA, 21 nt, Homo sapiens
uaccacaggguagaaccacgg

SEQ ID NO: 8028 - RNA, 22 nt, Homo sapiens
cuugguucagggagggucccca

SEQ ID NO: 8029 - RNA, 22 nt, Homo sapiens
uggaauguaaagaaguauguau

SEQ ID NO: 8030 - RNA, 21 nt, Homo sapiens
uccuucugcuccgucccccag

SEQ ID NO: 8031 - RNA, 21 nt, Homo sapiens
cggcggggacggcgauugguc

SEQ ID NO: 8032 - RNA, 22 nt, Homo sapiens
uggaauguaaggaagugugugg

SEQ ID NO: 8033 - RNA, 22 nt, Homo sapiens
uaugugggaugguaaaccgcuu

SEQ ID NO: 8034 - RNA, 22 nt, Homo sapiens
aauugcacgguauccaucugua

SEQ ID NO: 8035 - RNA, 24 nt, Homo sapiens
uucuccaaaagaaagcacuuucug

SEQ ID NO: 8036 - RNA, 22 nt, Homo sapiens
aagugccuccuuuuagaguguu

SEQ ID NO: 8037 - RNA, 21 nt, Homo sapiens
ugagcuaaaugugugcuggga

SEQ ID NO: 8038 - RNA, 20 nt, Homo sapiens
aggaauguuccuucuuugcc

SEQ ID NO: 8039 - RNA, 22 nt, Homo sapiens
aggcggggcgccgcgggaccgc

SEQ ID NO: 8040 - RNA, 23 nt, Homo sapiens
cgggucggaguuagcucaagcgg

SEQ ID NO: 8041 - RNA, 23 nt, Homo sapiens
uacugcaucaggaacugauugga

SEQ ID NO: 8042 - RNA, 23 nt, Homo sapiens
guccaguuuucccaggaaucccu

SEQ ID NO: 8043 - RNA, 22 nt, Homo sapiens
uccgagccugggucucccucuu

SEQ ID NO: 8044 - RNA, 22 nt, Homo sapiens
uuugguccccuucaaccagcug

SEQ ID NO: 8045 - RNA, 22 nt, Homo sapiens
uuugguccccuucaaccagcua

SEQ ID NO: 8046 - RNA, 22 nt, Homo sapiens
ugauugguacgucuguggguag

SEQ ID NO: 8047 - RNA, 22 nt, Homo sapiens
ugagccccugugccgcccccag

SEQ ID NO: 8048 - RNA, 22 nt, Homo sapiens
cucggcgcggggcgcgggcucc

SEQ ID NO: 8049 - RNA, 22 nt, Homo sapiens
uagcuuaucagacugauguuga

SEQ ID NO: 8050 - RNA, 22 nt, Homo sapiens
cauugcacuugucucggucuga

SEQ ID NO: 8051 - RNA, 20 nt, Homo sapiens
aggguguuucucucaucucu

SEQ ID NO: 8052 - RNA, 25 nt, Homo sapiens
ggcggagggaaguagguccguuggu

SEQ ID NO: 8053 - RNA, 22 nt, Homo sapiens
ugcggggcuagggcuaacagca

SEQ ID NO: 8054 - RNA, 20 nt, Homo sapiens
ccucugggcccuuccuccag

SEQ ID NO: 8055 - RNA, 22 nt, Homo sapiens
ucucugggccugugucuuaggc

SEQ ID NO: 8056 - RNA, 20 nt, Homo sapiens
cggcucugggucugugggga

SEQ ID NO: 8057 - RNA, 17 nt, Homo sapiens
ucccaccgcugccaccc

SEQ ID NO: 8058 - RNA, 21 nt, Homo sapiens
aaagcgcuucccuucagagug

SEQ ID NO: 8059 - RNA, 22 nt, Homo sapiens
uagcagcacauaaugguuugug

SEQ ID NO: 8060 - RNA, 22 nt, Homo sapiens
uagcagcacaucaugguuuaca

SEQ ID NO: 8061 - RNA, 22 nt, Homo sapiens
uagcagcacguaaauauuggcg

SEQ ID NO: 8062 - RNA, 21 nt, Homo sapiens
uagcagcacagaaauauuggc

SEQ ID NO: 8063 - RNA, 22 nt, Homo sapiens
cagcagcaauucauguuuugaa

SEQ ID NO: 8064 - RNA, 21 nt, Homo sapiens
cagcagcacacugugguuugu

SEQ ID NO: 8065 - RNA, 22 nt, Homo sapiens
ugugucacucgaugaccacugu

SEQ ID NO: 8066 - RNA, 22 nt, Homo sapiens
uggagagaaaggcaguuccuga

SEQ ID NO: 8067 - RNA, 22 nt, Homo sapiens
cauugcacuugucucggucuga

SEQ ID NO: 8068 - RNA, 20 nt, Homo sapiens
gugcauugcuguugcauugc

SEQ ID NO: 8069 - RNA, 22 nt, Homo sapiens
gagugccuucuuuuggagcguu

SEQ ID NO: 8070 - RNA, 22 nt, Homo sapiens
aagugccuccuuuuagaguguu

SEQ ID NO: 8071 - RNA, 22 nt, Homo sapiens
gugacaucacauauacggcagc

SEQ ID NO: 8072 - RNA, 22 nt, Homo sapiens
uggagugugacaaugguguuug

SEQ ID NO: 8073 - RNA, 22 nt, Homo sapiens
cuggcccucucugcccuuccgu

SEQ ID NO: 8074 - RNA, 23 nt, Homo sapiens
ccugcagcgacuugauggcuucc

SEQ ID NO: 8075 - RNA, 22 nt, Homo sapiens
aagacgggaggaaagaagggag

SEQ ID NO: 8076 - RNA, 21 nt, Homo sapiens
guggcugcacucacuuccuuc

SEQ ID NO: 8077 - RNA, 21 nt, Homo sapiens
ggcuagcaacagcgcuuaccu

SEQ ID NO: 8078 - RNA, 24 nt, Homo sapiens
uggggagcugaggcucugggggug

SEQ ID NO: 8079 - RNA, 22 nt, Homo sapiens
uggagagaaaggcaguuccuga

SEQ ID NO: 8080 - RNA, 22 nt, Homo sapiens
acuccagccccacagccucagc

SEQ ID NO: 8081 - RNA, 20 nt, Homo sapiens
cgugccacccuuuuccccag

SEQ ID NO: 8082 - RNA, 22 nt, Homo sapiens
aagauguggaaaaauuggaauc

SEQ ID NO: 8083 - RNA, 21 nt, Homo sapiens
acuggacuuggagucagaagg

SEQ ID NO: 8084 - RNA, 21 nt, Homo sapiens
cacaagguauugguauuaccu

SEQ ID NO: 8085 - RNA, 22 nt, Homo sapiens
ugagguaguaguuuguacaguu

SEQ ID NO: 8086 - RNA, 22 nt, Homo sapiens
agaaggaaauugaauucauuua

SEQ ID NO: 8087 - RNA, 22 nt, Homo sapiens
ccucuuccccuugucucuccag

SEQ ID NO: 8088 - RNA, 20 nt, Homo sapiens
guguguggaaaugcuucugc

SEQ ID NO: 8089 - RNA, 22 nt, Homo sapiens
uggacggagaacugauaagggu

SEQ ID NO: 8090 - RNA, 20 nt, Homo sapiens
ccucugggcccuuccuccag

SEQ ID NO: 8091 - RNA, 22 nt, Homo sapiens
ucucugggccugugucuuaggc

SEQ ID NO: 8092 - RNA, 21 nt, Homo sapiens
uggaggagaaggaaggugaug

SEQ ID NO: 8093 - RNA, 22 nt, Homo sapiens
uggagugugacaaugguguuug

SEQ ID NO: 8094 - RNA, 22 nt, Homo sapiens
aaggagcucacagucuauugag

SEQ ID NO: 8095 - RNA, 23 nt, Homo sapiens
aaggagcuuacaaucuagcuggg

SEQ ID NO: 8096 - RNA, 22 nt, Homo sapiens
aggcaguguauuguuagcuggc

SEQ ID NO: 8097 - RNA, 23 nt, Homo sapiens
uacuccagagggcgucacucaug

SEQ ID NO: 8098 - RNA, 23 nt, Homo sapiens
uaauccuugcuaccugggugaga

SEQ ID NO: 8099 - RNA, 19 nt, Homo sapiens
aguguggcuuucuuagagc

SEQ ID NO: 8100 - RNA, 22 nt, Homo sapiens
uggagugugacaaugguguuug

SEQ ID NO: 8101 - RNA, 22 nt, Homo sapiens
uucuggaauucugugugaggga

SEQ ID NO: 8102 - RNA, 21 nt, Homo sapiens
gcccuccgcccgugcaccccg

SEQ ID NO: 8103 - RNA, 22 nt, Homo sapiens
uggacggagaacugauaagggu

SEQ ID NO: 8104 - RNA, 21 nt, Homo sapiens
cggcggggacggcgauugguc

SEQ ID NO: 8105 - RNA, 21 nt, Homo sapiens
cggcggggacggcgauugguc

SEQ ID NO: 8106 - RNA, 22 nt, Homo sapiens
ugggucuuugcgggcgagauga

SEQ ID NO: 8107 - RNA, 23 nt, Homo sapiens
ugaggggcagagagcgagacuuu

SEQ ID NO: 8108 - RNA, 23 nt, Homo sapiens
agguuguccguggugaguucgca

SEQ ID NO: 8109 - RNA, 22 nt, Homo sapiens
aggcggggcgccgcgggaccgc

SEQ ID NO: 8110 - RNA, 22 nt, Homo sapiens
aggcggggcgccgcgggaccgc

SEQ ID NO: 8111 - RNA, 22 nt, Homo sapiens
ugcggggcuagggcuaacagca

SEQ ID NO: 8112 - RNA, 22 nt, Homo sapiens
ugcggggcuagggcuaacagca

SEQ ID NO: 8113 - RNA, 22 nt, Homo sapiens
uuugugaccugguccacuaacc

SEQ ID NO: 8114 - RNA, 23 nt, Homo sapiens
ugaggggcagagagcgagacuuu

SEQ ID NO: 8115 - RNA, 22 nt, Homo sapiens
ucaggcucaguccccucccgau

SEQ ID NO: 8116 - RNA, 22 nt, Homo sapiens
acuccagccccacagccucagc

SEQ ID NO: 8117 - RNA, 22 nt, Homo sapiens
ugagguaguagguuguauaguu

SEQ ID NO: 8118 - RNA, 22 nt, Homo sapiens
ugagguaguagguugugugguu

SEQ ID NO: 8119 - RNA, 22 nt, Homo sapiens
ugagguaguagguuguaugguu

SEQ ID NO: 8120 - RNA, 22 nt, Homo sapiens
agagguaguagguugcauaguu

SEQ ID NO: 8121 - RNA, 22 nt, Homo sapiens
ugagguaggagguuguauaguu

SEQ ID NO: 8122 - RNA, 22 nt, Homo sapiens
ugagguaguagauuguauaguu

SEQ ID NO: 8123 - RNA, 22 nt, Homo sapiens
ugagguaguaguuuguacaguu

SEQ ID NO: 8124 - RNA, 22 nt, Homo sapiens
ugagguaguaguuugugcuguu

SEQ ID NO: 8125 - RNA, 22 nt, Homo sapiens
ugagguaguaaguuguauuguu

SEQ ID NO: 8126 - RNA, 22 nt, Homo sapiens
uucccuuugucauccuaugccu

SEQ ID NO: 8127 - RNA, 22 nt, Homo sapiens
uucccuuugucauccuucgccu

SEQ ID NO: 8128 - RNA, 22 nt, Homo sapiens
aaagugcauccuuuuagagugu

SEQ ID NO: 8129 - RNA, 22 nt, Homo sapiens
aaagugcauccuuuuagagguu

SEQ ID NO: 8130 - RNA, 22 nt, Homo sapiens
aaagugcaucuuuuuagaggau

SEQ ID NO: 8131 - RNA, 22 nt, Homo sapiens
ucaaaacugaggggcauuuucu

SEQ ID NO: 8132 - RNA, 22 nt, Homo sapiens
ccaaaacugcaguuacuuuugc

SEQ ID NO: 8133 - RNA, 21 nt, Homo sapiens
cggcggggacggcgauugguc

SEQ ID NO: 8134 - RNA, 22 nt, Homo sapiens
aggcggggcgccgcgggaccgc

SEQ ID NO: 8135 - RNA, 23 nt, Homo sapiens
agugccugagggaguaagagccc

SEQ ID NO: 8136 - RNA, 22 nt, Homo sapiens
ucggccugaccacccaccccac

SEQ ID NO: 8137 - RNA, 17 nt, Homo sapiens
ucgccuccuccucuccc

SEQ ID NO: 8138 - RNA, 22 nt, Homo sapiens
acucggcguggcgucggucgug

SEQ ID NO: 8139 - RNA, 22 nt, Homo sapiens
cucggcgcggggcgcgggcucc

SEQ ID NO: 8140 - RNA, 23 nt, Homo sapiens
ucuggcuccgugucuucacuccc

SEQ ID NO: 8141 - RNA, 22 nt, Homo sapiens
uggcucaguucagcaggaacag

SEQ ID NO: 8142 - RNA, 22 nt, Homo sapiens
cauugcacuugucucggucuga

SEQ ID NO: 8143 - RNA, 22 nt, Homo sapiens
aauugcacgguauccaucugua

SEQ ID NO: 8144 - RNA, 22 nt, Homo sapiens
cgucaacacuugcugguuuccu

SEQ ID NO: 8145 - RNA, 25 nt, Homo sapiens
aggggugguguugggacagcuccgu

SEQ ID NO: 8146 - RNA, 22 nt, Homo sapiens
ugcggggcuagggcuaacagca

SEQ ID NO: 8147 - RNA, 23 nt, Homo sapiens
uaaaucccauggugccuucuccu

SEQ ID NO: 8148 - RNA, 21 nt, Homo sapiens
ugagcuaaaugugugcuggga

SEQ ID NO: 8149 - RNA, 21 nt, Homo sapiens
gcccuccgcccgugcaccccg

SEQ ID NO: 8150 - RNA, 22 nt, Homo sapiens
uuauaaagcaaugagacugauu

SEQ ID NO: 8151 - RNA, 25 nt, Homo sapiens
ggcggagggaaguagguccguuggu

SEQ ID NO: 8152 - RNA, 23 nt, Homo sapiens
uaaggugcaucuagugcagauag

SEQ ID NO: 8153 - RNA, 23 nt, Homo sapiens
cggcccgggcugcugcuguuccu

SEQ ID NO: 8154 - RNA, 24 nt, Homo sapiens
ugccugggucucuggccugcgcgu

SEQ ID NO: 8155 - RNA, 22 nt, Homo sapiens
ugcggggcuagggcuaacagca

SEQ ID NO: 8156 - RNA, 22 nt, Homo sapiens
uggagagaaaggcaguuccuga

SEQ ID NO: 8157 - RNA, 20 nt, Homo sapiens
ggggagcuguggaagcagua

SEQ ID NO: 8158 - RNA, 22 nt, Homo sapiens
ucaccagcccuguguucccuag

SEQ ID NO: 8159 - RNA, 23 nt, Homo sapiens
agcugguguugugaaucaggccg

SEQ ID NO: 8160 - RNA, 24 nt, Homo sapiens
ucccugagacccuuuaaccuguga

SEQ ID NO: 8161 - RNA, 22 nt, Homo sapiens
ucccugagacccuaacuuguga

SEQ ID NO: 8162 - RNA, 23 nt, Homo sapiens
ccucagggcuguagaacagggcu

SEQ ID NO: 8163 - RNA, 21 nt, Homo sapiens
uaccacaggguagaaccacgg

SEQ ID NO: 8164 - RNA, 21 nt, Homo sapiens
cgcgggugcuuacugacccuu

SEQ ID NO: 8165 - RNA, 21 nt, Homo sapiens
caucccuugcaugguggaggg

SEQ ID NO: 8166 - RNA, 18 nt, Homo sapiens
aucccaccucugccacca

SEQ ID NO: 8167 - RNA, 23 nt, Homo sapiens
uguaguguuuccuacuuuaugga

SEQ ID NO: 8168 - RNA, 22 nt, Homo sapiens
aucuggagguaagaagcacuuu

SEQ ID NO: 8169 - RNA, 23 nt, Homo sapiens
caaagcgcuucucuuuagagugu

SEQ ID NO: 8170 - RNA, 21 nt, Homo sapiens
cuccagagggaaguacuuucu

SEQ ID NO: 8171 - RNA, 21 nt, Homo sapiens
cuccagagggaugcacuuucu

SEQ ID NO: 8172 - RNA, 22 nt, Homo sapiens
aagauguggaaaaauuggaauc

SEQ ID NO: 8173 - RNA, 23 nt, Homo sapiens
aggaagcccuggaggggcuggag

SEQ ID NO: 8174 - RNA, 22 nt, Homo sapiens
aagcugccaguugaagaacugu

SEQ ID NO: 8175 - RNA, 23 nt, Homo sapiens
cacccggcugugugcacaugugc

SEQ ID NO: 8176 - RNA, 24 nt, Homo sapiens
uggggagcugaggcucugggggug

SEQ ID NO: 8177 - RNA, 21 nt, Homo sapiens
caaagaggaaggucccauuac

SEQ ID NO: 8178 - RNA, 21 nt, Homo sapiens
ucacuccucuccucccgucuu

SEQ ID NO: 8179 - RNA, 22 nt, Homo sapiens
ucaggccaggcacaguggcuca

SEQ ID NO: 8180 - RNA, 23 nt, Homo sapiens
aacauucaacgcugucggugagu

SEQ ID NO: 8181 - RNA, 22 nt, Homo sapiens
uggcucaguucagcaggaacag

SEQ ID NO: 8182 - RNA, 22 nt, Homo sapiens
acgcccuucccccccuucuuca

SEQ ID NO: 8183 - RNA, 22 nt, Homo sapiens
ugugacugguugaccagagggg

SEQ ID NO: 8184 - RNA, 22 nt, Homo sapiens
uagcagcacauaaugguuugug

SEQ ID NO: 8185 - RNA, 22 nt, Homo sapiens
uagcagcacaucaugguuuaca

SEQ ID NO: 8186 - RNA, 22 nt, Homo sapiens
uagcagcacguaaauauuggcg

SEQ ID NO: 8187 - RNA, 21 nt, Homo sapiens
uagcagcacagaaauauuggc

SEQ ID NO: 8188 - RNA, 22 nt, Homo sapiens
uuggggaaacggccgcugagug

SEQ ID NO: 8189 - RNA, 22 nt, Homo sapiens
gaggguuggguggaggcucucc

SEQ ID NO: 8190 - RNA, 21 nt, Homo sapiens
aggggugcuaucugugauuga

SEQ ID NO: 8191 - RNA, 22 nt, Homo sapiens
cagcagcaauucauguuuugaa

SEQ ID NO: 8192 - RNA, 21 nt, Homo sapiens
cagcagcacacugugguuugu

SEQ ID NO: 8193 - RNA, 19 nt, Homo sapiens
ugucucugcugggguuucu

SEQ ID NO: 8194 - RNA, 22 nt, Homo sapiens
agacuucccauuugaagguggc

SEQ ID NO: 8195 - RNA, 23 nt, Homo sapiens
aucgcugcgguugcgagcgcugu

SEQ ID NO: 8196 - RNA, 17 nt, Homo sapiens
ucucgcuggggccucca

SEQ ID NO: 8197 - RNA, 22 nt, Homo sapiens
aggcagcgggguguaguggaua

SEQ ID NO: 8198 - RNA, 22 nt, Homo sapiens
caaagugccucccuuuagagug

SEQ ID NO: 8199 - RNA, 22 nt, Homo sapiens
caaagugccucccuuuagagug

SEQ ID NO: 8200 - RNA, 22 nt, Homo sapiens
ugugcgcagggagaccucuccc

SEQ ID NO: 8201 - RNA, 24 nt, Homo sapiens
agccuggaagcuggagccugcagu

SEQ ID NO: 8202 - RNA, 17 nt, Homo sapiens
ucgccuccuccucuccc

SEQ ID NO: 8203 - RNA, 21 nt, Homo sapiens
agcuacaucuggcuacugggu

SEQ ID NO: 8204 - RNA, 21 nt, Homo sapiens
uaguagaccguauagcguacg

SEQ ID NO: 8205 - RNA, 22 nt, Homo sapiens
caaaaaccacaguuucuuuugc

SEQ ID NO: 8206 - RNA, 25 nt, Homo sapiens
aggggugguguugggacagcuccgu

SEQ ID NO: 8207 - RNA, 25 nt, Homo sapiens
ggcggagggaaguagguccguuggu

SEQ ID NO: 8208 - RNA, 21 nt, Homo sapiens
uggaggagaaggaaggugaug

SEQ ID NO: 8209 - RNA, 20 nt, Homo sapiens
ggggagcuguggaagcagua

SEQ ID NO: 8210 - RNA, 22 nt, Homo sapiens
ugucuacuacuggagacacugg

SEQ ID NO: 8211 - RNA, 21 nt, Homo sapiens
cccggagccaggaugcagcuc

SEQ ID NO: 8212 - RNA, 20 nt, Homo sapiens
ugagcccuguccucccgcag

SEQ ID NO: 8213 - RNA, 22 nt, Homo sapiens
ccucuuccccuugucucuccag

SEQ ID NO: 8214 - RNA, 24 nt, Homo sapiens
ccagacagaauucuaugcacuuuc

SEQ ID NO: 8215 - RNA, 23 nt, Homo sapiens
uauggcuuuucauuccuauguga

SEQ ID NO: 8216 - RNA, 21 nt, Homo sapiens
uccugcgcgucccagaugccc

SEQ ID NO: 8217 - RNA, 23 nt, Homo sapiens
ugucugcccgcaugccugccucu

SEQ ID NO: 8218 - RNA, 23 nt, Homo sapiens
cacucagccuugagggcacuuuc

SEQ ID NO: 8219 - RNA, 19 nt, Homo sapiens
agcugucugaaaaugucuu

SEQ ID NO: 8220 - RNA, 19 nt, Homo sapiens
gugucugcuuccuguggga

SEQ ID NO: 8221 - RNA, 20 nt, Homo sapiens
guagaggagauggcgcaggg

SEQ ID NO: 8222 - RNA, 22 nt, Homo sapiens
ugugagguuggcauuguugucu

SEQ ID NO: 8223 - RNA, 22 nt, Homo sapiens
aucacacaaaggcaacuuuugu

SEQ ID NO: 8224 - RNA, 23 nt, Homo sapiens
uauggcuuuucauuccuauguga

SEQ ID NO: 8225 - RNA, 19 nt, Homo sapiens
aagugugcagggcacuggu

SEQ ID NO: 8226 - RNA, 23 nt, Homo sapiens
cucucaccacugcccucccacag

SEQ ID NO: 8227 - RNA, 22 nt, Homo sapiens
uggagagaaaggcaguuccuga

SEQ ID NO: 8228 - RNA, 20 nt, Homo sapiens
ccccagggcgacgcggcggg

SEQ ID NO: 8229 - RNA, 22 nt, Homo sapiens
aaaagcuggguugagagggcga

SEQ ID NO: 8230 - RNA, 22 nt, Homo sapiens
aaaagcuggguugagagggcaa

SEQ ID NO: 8231 - RNA, 20 nt, Homo sapiens
aaaagcuggguugagagggu

SEQ ID NO: 8232 - RNA, 19 nt, Homo sapiens
aaaagcuggguugagagga

SEQ ID NO: 8233 - RNA, 21 nt, Homo sapiens
uggguuuacguugggagaacu

SEQ ID NO: 8234 - RNA, 23 nt, Homo sapiens
ccugcagcgacuugauggcuucc

SEQ ID NO: 8235 - RNA, 21 nt, Homo sapiens
ccccaccuccucucuccucag

SEQ ID NO: 8236 - RNA, 20 nt, Homo sapiens
ggggagcuguggaagcagua

SEQ ID NO: 8237 - RNA, 26 nt, Homo sapiens
gaugaugauggcagcaaauucugaaa

SEQ ID NO: 8238 - RNA, 18 nt, Homo sapiens
cagggaggugaaugugau

SEQ ID NO: 8239 - RNA, 23 nt, Homo sapiens
ucuggcuccgugucuucacuccc

SEQ ID NO: 8240 - RNA, 21 nt, Homo sapiens
cggcggggacggcgauugguc

SEQ ID NO: 8241 - RNA, 22 nt, Homo sapiens
ugauugguacgucuguggguag

SEQ ID NO: 8242 - RNA, 22 nt, Homo sapiens
aggcggggcgccgcgggaccgc

SEQ ID NO: 8243 - RNA, 24 nt, Homo sapiens
uggggagcugaggcucugggggug

SEQ ID NO: 8244 - RNA, 22 nt, Homo sapiens
aacccguagauccgaacuugug

SEQ ID NO: 8245 - RNA, 21 nt, Homo sapiens
cccggagccaggaugcagcuc

SEQ ID NO: 8246 - RNA, 22 nt, Homo sapiens
uggguggucuggagauuugugc

SEQ ID NO: 8247 - RNA, 22 nt, Homo sapiens
cucggcgcggggcgcgggcucc

SEQ ID NO: 8248 - RNA, 21 nt, Homo sapiens
caucccuugcaugguggaggg

SEQ ID NO: 8249 - RNA, 22 nt, Homo sapiens
uguaaacauccuacacucagcu

SEQ ID NO: 8250 - RNA, 23 nt, Homo sapiens
cgcauccccuagggcauuggugu

SEQ ID NO: 8251 - RNA, 21 nt, Homo sapiens
gccccugggccuauccuagaa

SEQ ID NO: 8252 - RNA, 23 nt, Homo sapiens
uaauccuugcuaccugggugaga

SEQ ID NO: 8253 - RNA, 21 nt, Homo sapiens
gaaggcgcuucccuuuggagu

SEQ ID NO: 8254 - RNA, 22 nt, Homo sapiens
gaaggcgcuucccuuuagagcg

SEQ ID NO: 8255 - RNA, 22 nt, Homo sapiens
ccucccacacccaaggcuugca

SEQ ID NO: 8256 - RNA, 22 nt, Homo sapiens
uggugggcacagaaucuggacu

SEQ ID NO: 8257 - RNA, 22 nt, Homo sapiens
aagcugccaguugaagaacugu

SEQ ID NO: 8258 - RNA, 22 nt, Homo sapiens
aaaagcuggguugagagggcga

SEQ ID NO: 8259 - RNA, 22 nt, Homo sapiens
aaaagcuggguugagagggcaa

SEQ ID NO: 8260 - RNA, 20 nt, Homo sapiens
aaaagcuggguugagagggu

SEQ ID NO: 8261 - RNA, 19 nt, Homo sapiens
aaaagcuggguugagagga

SEQ ID NO: 8262 - RNA, 23 nt, Homo sapiens
cacucagccuugagggcacuuuc

SEQ ID NO: 8263 - RNA, 22 nt, Homo sapiens
aagugcuuccuuuuagaggguu

SEQ ID NO: 8264 - RNA, 22 nt, Homo sapiens
ucugggcaacaaagugagaccu

SEQ ID NO: 8265 - RNA, 25 nt, Homo sapiens
gcugggcagggcuucugagcuccuu

SEQ ID NO: 8266 - RNA, 23 nt, Homo sapiens
uaaagugcuuauagugcagguag

SEQ ID NO: 8267 - RNA, 17 nt, Homo sapiens
gugggggagaggcuguc

SEQ ID NO: 8268 - RNA, 23 nt, Homo sapiens
cacucagccuugagggcacuuuc

SEQ ID NO: 8269 - RNA, 24 nt, Homo sapiens
ccagacagaauucuaugcacuuuc

SEQ ID NO: 8270 - RNA, 19 nt, Homo sapiens
agcugucugaaaaugucuu

SEQ ID NO: 8271 - RNA, 23 nt, Homo sapiens
uggaguccaggaaucugcauuuu

SEQ ID NO: 8272 - RNA, 22 nt, Homo sapiens
ggggguccccggugcucggauc

SEQ ID NO: 8273 - RNA, 19 nt, Homo sapiens
ucuaggcugguacugcuga

SEQ ID NO: 8274 - RNA, 20 nt, Homo sapiens
ucugcaggguuugcuuugag

SEQ ID NO: 8275 - RNA, 19 nt, Homo sapiens
gaugaugcugcugaugcug

SEQ ID NO: 8276 - RNA, 23 nt, Homo sapiens
ucccccaggugugauucugauuu

SEQ ID NO: 8277 - RNA, 24 nt, Homo sapiens
acugggggcuuucgggcucugcgu

SEQ ID NO: 8278 - RNA, 22 nt, Homo sapiens
cagugguuuuacccuaugguag

SEQ ID NO: 8279 - RNA, 23 nt, Homo sapiens
ugaggggcagagagcgagacuuu

SEQ ID NO: 8280 - RNA, 22 nt, Homo sapiens
cgcaggggccgggugcucaccg

SEQ ID NO: 8281 - RNA, 23 nt, Homo sapiens
guccaguuuucccaggaaucccu

SEQ ID NO: 8282 - RNA, 20 nt, Homo sapiens
auuccuagaaauuguucaua

SEQ ID NO: 8283 - RNA, 22 nt, Homo sapiens
gugaaauguuuaggaccacuag

SEQ ID NO: 8284 - RNA, 21 nt, Homo sapiens
uucacaguggcuaaguuccgc

SEQ ID NO: 8285 - RNA, 23 nt, Homo sapiens
uacuccagagggcgucacucaug

SEQ ID NO: 8286 - RNA, 26 nt, Homo sapiens
gaugaugauggcagcaaauucugaaa

SEQ ID NO: 8287 - RNA, 24 nt, Homo sapiens
uggggagcugaggcucugggggug

SEQ ID NO: 8288 - RNA, 21 nt, Homo sapiens
gaaggcgcuucccuuuggagu

SEQ ID NO: 8289 - RNA, 22 nt, Homo sapiens
gaaggcgcuucccuuuagagcg

SEQ ID NO: 8290 - RNA, 22 nt, Homo sapiens
ucugcccccuccgcugcugcca

SEQ ID NO: 8291 - RNA, 20 nt, Homo sapiens
acugccccaggugcugcugg

SEQ ID NO: 8292 - RNA, 21 nt, Homo sapiens
cggggcagcucaguacaggau

SEQ ID NO: 8293 - RNA, 25 nt, Homo sapiens
ugggaacggguuccggcagacgcug

SEQ ID NO: 8294 - RNA, 22 nt, Homo sapiens
caaucacuaacuccacugccau

SEQ ID NO: 8295 - RNA, 21 nt, Homo sapiens
aggaggcagcgcucucaggac

SEQ ID NO: 8296 - RNA, 25 nt, Homo sapiens
cccccacaaccgcgcuugacuagcu

SEQ ID NO: 8297 - RNA, 22 nt, Homo sapiens
ugagguaguaguuugugcuguu

SEQ ID NO: 8298 - RNA, 22 nt, Homo sapiens
cucccacugcuucacuugacua

SEQ ID NO: 8299 - RNA, 23 nt, Homo sapiens
cacucagccuugagggcacuuuc

SEQ ID NO: 8300 - RNA, 22 nt, Homo sapiens
uacgucaucguugucaucguca

SEQ ID NO: 8301 - RNA, 20 nt, Homo sapiens
aggguguuucucucaucucu

SEQ ID NO: 8302 - RNA, 21 nt, Homo sapiens
uuaggccgcagaucuggguga

SEQ ID NO: 8303 - RNA, 22 nt, Homo sapiens
ugauugguacgucuguggguag

SEQ ID NO: 8304 - RNA, 22 nt, Homo sapiens
ccucccacacccaaggcuugca

SEQ ID NO: 8305 - RNA, 23 nt, Homo sapiens
uaaagugcuuauagugcagguag

SEQ ID NO: 8306 - RNA, 21 nt, Homo sapiens
agagaagaagaucagccugca

SEQ ID NO: 8307 - RNA, 21 nt, Homo sapiens
caagucacuagugguuccguu

SEQ ID NO: 8308 - RNA, 22 nt, Homo sapiens
agaucagaaggugauuguggcu

SEQ ID NO: 8309 - RNA, 23 nt, Homo sapiens
ugagcgccucgacgacagagccg

SEQ ID NO: 8310 - RNA, 17 nt, Homo sapiens
gugggggagaggcuguc

SEQ ID NO: 8311 - RNA, 22 nt, Homo sapiens
uguaacagcaacuccaugugga

SEQ ID NO: 8312 - RNA, 20 nt, Homo sapiens
ggggagcuguggaagcagua

SEQ ID NO: 8313 - RNA, 22 nt, Homo sapiens
cgcaggggccgggugcucaccg

SEQ ID NO: 8314 - RNA, 22 nt, Homo sapiens
ucggccugaccacccaccccac

SEQ ID NO: 8315 - RNA, 22 nt, Homo sapiens
uucuggaauucugugugaggga

SEQ ID NO: 8316 - RNA, 19 nt, Homo sapiens
agcugucugaaaaugucuu

SEQ ID NO: 8317 - RNA, 22 nt, Homo sapiens
acccgucccguucguccccgga

SEQ ID NO: 8318 - RNA, 22 nt, Homo sapiens
caaagaauucuccuuuugggcu

SEQ ID NO: 8319 - RNA, 23 nt, Homo sapiens
uacuccagagggcgucacucaug

SEQ ID NO: 8320 - RNA, 22 nt, Homo sapiens
acuccagccccacagccucagc

SEQ ID NO: 8321 - RNA, 22 nt, Homo sapiens
caugccuugaguguaggaccgu

SEQ ID NO: 8322 - RNA, 23 nt, Homo sapiens
cggcccgggcugcugcuguuccu

SEQ ID NO: 8323 - RNA, 18 nt, Homo sapiens
cgggcguggugguggggg

SEQ ID NO: 8324 - RNA, 23 nt, Homo sapiens
ucuggcuccgugucuucacuccc

SEQ ID NO: 8325 - RNA, 21 nt, Homo sapiens
gaaggcgcuucccuuuggagu

SEQ ID NO: 8326 - RNA, 22 nt, Homo sapiens
gaaggcgcuucccuuuagagcg

SEQ ID NO: 8327 - RNA, 22 nt, Homo sapiens
gguggcccggccgugccugagg

SEQ ID NO: 8328 - RNA, 20 nt, Homo sapiens
agaccauggguucucauugu

SEQ ID NO: 8329 - RNA, 21 nt, Homo sapiens
uugaaaggcuauuucuugguc

SEQ ID NO: 8330 - RNA, 23 nt, Homo sapiens
uacuccagagggcgucacucaug

SEQ ID NO: 8331 - RNA, 22 nt, Homo sapiens
cacacacugcaauuacuuuugc

SEQ ID NO: 8332 - RNA, 24 nt, Homo sapiens
uucuccaaaagaaagcacuuucug

SEQ ID NO: 8333 - RNA, 22 nt, Homo sapiens
aagugccuccuuuuagaguguu

SEQ ID NO: 8334 - RNA, 22 nt, Homo sapiens
agaucagaaggugauuguggcu

SEQ ID NO: 8335 - RNA, 21 nt, Homo sapiens
gccccugggccuauccuagaa

SEQ ID NO: 8336 - RNA, 23 nt, Homo sapiens
agcuacauugucugcuggguuuc

SEQ ID NO: 8337 - RNA, 21 nt, Homo sapiens
uugaaaggcuauuucuugguc

SEQ ID NO: 8338 - RNA, 23 nt, Homo sapiens
agcuacauugucugcuggguuuc

SEQ ID NO: 8339 - RNA, 23 nt, Homo sapiens
gcgaggaccccucggggucugac

SEQ ID NO: 8340 - RNA, 22 nt, Homo sapiens
ucggccugaccacccaccccac

SEQ ID NO: 8341 - RNA, 23 nt, Homo sapiens
ugaguaccgccaugucuguuggg

SEQ ID NO: 8342 - RNA, 22 nt, Homo sapiens
gugugcggaaaugcuucugcua

SEQ ID NO: 8343 - RNA, 22 nt, Homo sapiens
uacgucaucguugucaucguca

SEQ ID NO: 8344 - RNA, 22 nt, Homo sapiens
agaucgaccguguuauauucgc

SEQ ID NO: 8345 - RNA, 21 nt, Homo sapiens
cgcgggugcuuacugacccuu

SEQ ID NO: 8346 - RNA, 21 nt, Homo sapiens
cccggagccaggaugcagcuc

SEQ ID NO: 8347 - RNA, 23 nt, Homo sapiens
ucuggcuccgugucuucacuccc

SEQ ID NO: 8348 - RNA, 21 nt, Homo sapiens
cggcggggacggcgauugguc

SEQ ID NO: 8349 - RNA, 23 nt, Homo sapiens
ugaggggcagagagcgagacuuu

SEQ ID NO: 8350 - RNA, 22 nt, Homo sapiens
aggcggggcgccgcgggaccgc

SEQ ID NO: 8351 - RNA, 17 nt, Homo sapiens
ucgccuccuccucuccc

SEQ ID NO: 8352 - RNA, 21 nt, Homo sapiens
cggcggggacggcgauugguc

SEQ ID NO: 8353 - RNA, 23 nt, Homo sapiens
ugaggggcagagagcgagacuuu

SEQ ID NO: 8354 - RNA, 22 nt, Homo sapiens
aagacgggaggaaagaagggag

SEQ ID NO: 8355 - RNA, 22 nt, Homo sapiens
uacucaggagaguggcaaucac

SEQ ID NO: 8356 - RNA, 24 nt, Homo sapiens
uucuccaaaagaaagcacuuucug

SEQ ID NO: 8357 - RNA, 22 nt, Homo sapiens
aagugccuccuuuuagaguguu

SEQ ID NO: 8358 - RNA, 22 nt, Homo sapiens
aggcggggcgccgcgggaccgc

SEQ ID NO: 8359 - RNA, 22 nt, Homo sapiens
ugcggggcuagggcuaacagca

SEQ ID NO: 8360 - RNA, 23 nt, Homo sapiens
ccugcagcgacuugauggcuucc

SEQ ID NO: 8361 - RNA, 21 nt, Homo sapiens
gugccagcugcagugggggag

SEQ ID NO: 8362 - RNA, 18 nt, Homo sapiens
cagggaggugaaugugau

SEQ ID NO: 8363 - RNA, 22 nt, Homo sapiens
gcccgcguguggagccaggugu

SEQ ID NO: 8364 - RNA, 23 nt, Homo sapiens
ucuggcuccgugucuucacuccc

SEQ ID NO: 8365 - RNA, 23 nt, Homo sapiens
ucccuguccuccaggagcucacg

SEQ ID NO: 8366 - RNA, 23 nt, Homo sapiens
ugaggggcagagagcgagacuuu

SEQ ID NO: 8367 - RNA, 21 nt, Homo sapiens
ugucuugcaggccgucaugca

SEQ ID NO: 8368 - RNA, 22 nt, Homo sapiens
cacgcucaugcacacacccaca

SEQ ID NO: 8369 - RNA, 22 nt, Homo sapiens
ggggguccccggugcucggauc

SEQ ID NO: 8370 - RNA, 22 nt, Homo sapiens
gucccucuccaaaugugucuug

SEQ ID NO: 8371 - RNA, 20 nt, Homo sapiens
guccgcucggcgguggccca

SEQ ID NO: 8372 - RNA, 23 nt, Homo sapiens
uucauuugguauaaaccgcgauu

SEQ ID NO: 8373 - RNA, 22 nt, Homo sapiens
uuugugaccugguccacuaacc

SEQ ID NO: 8374 - RNA, 22 nt, Homo sapiens
uccagcaucagugauuuuguug

SEQ ID NO: 8375 - RNA, 20 nt, Homo sapiens
guagaggagauggcgcaggg

SEQ ID NO: 8376 - RNA, 23 nt, Homo sapiens
agcuacauugucugcuggguuuc

SEQ ID NO: 8377 - RNA, 23 nt, Homo sapiens
uauucauuuauccccagccuaca

SEQ ID NO: 8378 - RNA, 18 nt, Homo sapiens
ugcuuccuuucagagggu

SEQ ID NO: 8379 - RNA, 22 nt, Homo sapiens
aucuggagguaagaagcacuuu

SEQ ID NO: 8380 - RNA, 25 nt, Homo sapiens
ggcggagggaaguagguccguuggu

SEQ ID NO: 8381 - RNA, 22 nt, Homo sapiens
aacgcacuucccuuuagagugu

SEQ ID NO: 8382 - RNA, 21 nt, Homo sapiens
ugacaacuauggaugagcucu

SEQ ID NO: 8383 - RNA, 22 nt, Homo sapiens
uucuggaauucugugugaggga

SEQ ID NO: 8384 - RNA, 22 nt, Homo sapiens
aagcccuuaccccaaaaagcau

SEQ ID NO: 8385 - RNA, 22 nt, Homo sapiens
uguaacagcaacuccaugugga

SEQ ID NO: 8386 - RNA, 23 nt, Homo sapiens
ucccccaggugugauucugauuu

SEQ ID NO: 8387 - RNA, 24 nt, Homo sapiens
acugggggcuuucgggcucugcgu

SEQ ID NO: 8388 - RNA, 23 nt, Homo sapiens
aggaagcccuggaggggcuggag

SEQ ID NO: 8389 - RNA, 22 nt, Homo sapiens
caaaaaccacaguuucuuuugc

SEQ ID NO: 8390 - RNA, 22 nt, Homo sapiens
augggugaauuuguagaaggau

SEQ ID NO: 8391 - RNA, 21 nt, Homo sapiens
uacucaaaaagcugucaguca

SEQ ID NO: 8392 - RNA, 20 nt, Homo sapiens
agagguauagggcaugggaa

SEQ ID NO: 8393 - RNA, 23 nt, Homo sapiens
cuggagauauggaagagcugugu

SEQ ID NO: 8394 - RNA, 20 nt, Homo sapiens
auggagauagauauagaaau

SEQ ID NO: 8395 - RNA, 19 nt, Homo sapiens
aagcagcugccucugaggc

SEQ ID NO: 8396 - RNA, 22 nt, Homo sapiens
ucugggcaacaaagugagaccu

SEQ ID NO: 8397 - RNA, 25 nt, Homo sapiens
gcugggcagggcuucugagcuccuu

SEQ ID NO: 8398 - RNA, 24 nt, Homo sapiens
uuuggcaaugguagaacucacacu

SEQ ID NO: 8399 - RNA, 22 nt, Homo sapiens
agacccuggucugcacucuauc

SEQ ID NO: 8400 - RNA, 26 nt, Homo sapiens
gaugaugauggcagcaaauucugaaa

SEQ ID NO: 8401 - RNA, 20 nt, Homo sapiens
ccucugggcccuuccuccag

SEQ ID NO: 8402 - RNA, 22 nt, Homo sapiens
ucucugggccugugucuuaggc

SEQ ID NO: 8403 - RNA, 22 nt, Homo sapiens
ccucuuccccuugucucuccag

SEQ ID NO: 8404 - RNA, 21 nt, Homo sapiens
agggcccccccucaauccugu

SEQ ID NO: 8405 - RNA, 21 nt, Homo sapiens
agggcccccccucaauccugu

SEQ ID NO: 8406 - RNA, 21 nt, Homo sapiens
gccccugggccuauccuagaa

SEQ ID NO: 8407 - RNA, 17 nt, Homo sapiens
gugggggagaggcuguc

SEQ ID NO: 8408 - RNA, 20 nt, Homo sapiens
cggcucugggucugugggga

SEQ ID NO: 8409 - RNA, 21 nt, Homo sapiens
cggcggggacggcgauugguc

SEQ ID NO: 8410 - RNA, 22 nt, Homo sapiens
aggcggggcgccgcgggaccgc

SEQ ID NO: 8411 - RNA, 22 nt, Homo sapiens
aaggagcucacagucuauugag

SEQ ID NO: 8412 - RNA, 23 nt, Homo sapiens
aaggagcuuacaaucuagcuggg

SEQ ID NO: 8413 - RNA, 18 nt, Homo sapiens
uccagugcccuccucucc

SEQ ID NO: 8414 - RNA, 24 nt, Homo sapiens
acaaagugcuucccuuuagagugu

SEQ ID NO: 8415 - RNA, 22 nt, Homo sapiens
acaaagugcuucccuuuagagu

SEQ ID NO: 8416 - RNA, 22 nt, Homo sapiens
ucucccaacccuuguaccagug

SEQ ID NO: 8417 - RNA, 17 nt, Homo sapiens
ucgccuccuccucuccc

SEQ ID NO: 8418 - RNA, 23 nt, Homo sapiens
ucuggcuccgugucuucacuccc

SEQ ID NO: 8419 - RNA, 23 nt, Homo sapiens
cacucagccuugagggcacuuuc

SEQ ID NO: 8420 - RNA, 18 nt, Homo sapiens
uccagugcccuccucucc

SEQ ID NO: 8421 - RNA, 21 nt, Homo sapiens
ucuuguguucucuagaucagu

SEQ ID NO: 8422 - RNA, 20 nt, Homo sapiens
guugugucaguuuaucaaac

SEQ ID NO: 8423 - RNA, 22 nt, Homo sapiens
gcccgcguguggagccaggugu

SEQ ID NO: 8424 - RNA, 22 nt, Homo sapiens
ugcggggcuagggcuaacagca

SEQ ID NO: 8425 - RNA, 21 nt, Homo sapiens
uuuugcaccuuuuggagugaa

SEQ ID NO: 8426 - RNA, 22 nt, Homo sapiens
auucugcauuuuuagcaaguuc

SEQ ID NO: 8427 - RNA, 23 nt, Homo sapiens
guuugcacgggugggccuugucu

SEQ ID NO: 8428 - RNA, 24 nt, Homo sapiens
acaaagugcuucccuuuagagugu

SEQ ID NO: 8429 - RNA, 22 nt, Homo sapiens
acaaagugcuucccuuuagagu

SEQ ID NO: 8430 - RNA, 21 nt, Homo sapiens
uaggacacauggucuacuucu

SEQ ID NO: 8431 - RNA, 23 nt, Homo sapiens
ucuggcuccgugucuucacuccc

SEQ ID NO: 8432 - RNA, 21 nt, Homo sapiens
cggcggggacggcgauugguc

SEQ ID NO: 8433 - RNA, 22 nt, Homo sapiens
aggcggggcgccgcgggaccgc

SEQ ID NO: 8434 - RNA, 21 nt, Homo sapiens
ugcaggaccaagaugagcccu

SEQ ID NO: 8435 - RNA, 21 nt, Homo sapiens
agaccuggcccagaccucagc

SEQ ID NO: 8436 - RNA, 25 nt, Homo sapiens
ggcggagggaaguagguccguuggu

SEQ ID NO: 8437 - RNA, 22 nt, Homo sapiens
gugaaauguuuaggaccacuag

SEQ ID NO: 8438 - RNA, 23 nt, Homo sapiens
uuuggcacuagcacauuuuugcu

SEQ ID NO: 8439 - RNA, 23 nt, Homo sapiens
ccugcagcgacuugauggcuucc

SEQ ID NO: 8440 - RNA, 22 nt, Homo sapiens
aaccagcaccccaacuuuggac

SEQ ID NO: 8441 - RNA, 22 nt, Homo sapiens
uagguaguuuccuguuguuggg

SEQ ID NO: 8442 - RNA, 22 nt, Homo sapiens
cacgcucaugcacacacccaca

SEQ ID NO: 8443 - RNA, 22 nt, Homo sapiens
agaggcuggccgugaugaauuc

SEQ ID NO: 8444 - RNA, 24 nt, Homo sapiens
ugccugggucucuggccugcgcgu

SEQ ID NO: 8445 - RNA, 22 nt, Homo sapiens
cugcccuggcccgagggaccga

SEQ ID NO: 8446 - RNA, 21 nt, Homo sapiens
aggguaagcugaaccucugau

SEQ ID NO: 8447 - RNA, 19 nt, Homo sapiens
gggcgccugugaucccaac

SEQ ID NO: 8448 - RNA, 20 nt, Homo sapiens
cuuccucgucugucugcccc

SEQ ID NO: 8449 - RNA, 22 nt, Homo sapiens
ugagaacugaauuccauggguu

SEQ ID NO: 8450 - RNA, 21 nt, Homo sapiens
uucacaguggcuaaguucugc

SEQ ID NO: 8451 - RNA, 25 nt, Homo sapiens
ggcggagggaaguagguccguuggu

SEQ ID NO: 8452 - RNA, 17 nt, Homo sapiens
ucgccuccuccucuccc

SEQ ID NO: 8453 - RNA, 22 nt, Homo sapiens
aggcagcgggguguaguggaua

SEQ ID NO: 8454 - RNA, 21 nt, Homo sapiens
uaauuuuauguauaagcuagu

SEQ ID NO: 8455 - RNA, 23 nt, Homo sapiens
ugaggggcagagagcgagacuuu

SEQ ID NO: 8456 - RNA, 21 nt, Homo sapiens
cugaccuaugaauugacagcc

SEQ ID NO: 8457 - RNA, 24 nt, Homo sapiens
agccuggaagcuggagccugcagu

SEQ ID NO: 8458 - RNA, 23 nt, Homo sapiens
uaauccuugcuaccugggugaga

SEQ ID NO: 8459 - RNA, 22 nt, Homo sapiens
uagcuuaucagacugauguuga

SEQ ID NO: 8460 - RNA, 20 nt, Homo sapiens
ggggagcuguggaagcagua

SEQ ID NO: 8461 - RNA, 19 nt, Homo sapiens
aggcugcggaauucaggac

SEQ ID NO: 8462 - RNA, 22 nt, Homo sapiens
ucugcccccuccgcugcugcca

SEQ ID NO: 8463 - RNA, 20 nt, Homo sapiens
acugccccaggugcugcugg

SEQ ID NO: 8464 - RNA, 22 nt, Homo sapiens
uggugggcacagaaucuggacu

SEQ ID NO: 8465 - RNA, 22 nt, Homo sapiens
uggugggccgcagaacaugugc

SEQ ID NO: 8466 - RNA, 23 nt, Homo sapiens
aagugccgccaucuuuugagugu

SEQ ID NO: 8467 - RNA, 22 nt, Homo sapiens
uguaacagcaacuccaugugga

SEQ ID NO: 8468 - RNA, 23 nt, Homo sapiens
ucucacacagaaaucgcacccgu

SEQ ID NO: 8469 - RNA, 22 nt, Homo sapiens
acuccagccccacagccucagc

SEQ ID NO: 8470 - RNA, 18 nt, Homo sapiens
ucagcuggcccucauuuc

SEQ ID NO: 8471 - RNA, 24 nt, Homo sapiens
uggggagcugaggcucugggggug

SEQ ID NO: 8472 - RNA, 22 nt, Homo sapiens
augguacccuggcauacugagu

SEQ ID NO: 8473 - RNA, 21 nt, Homo sapiens
cggcggggacggcgauugguc

SEQ ID NO: 8474 - RNA, 22 nt, Homo sapiens
aggcggggcgccgcgggaccgc

SEQ ID NO: 8475 - RNA, 22 nt, Homo sapiens
ugcggggcuagggcuaacagca

SEQ ID NO: 8476 - RNA, 20 nt, Homo sapiens
agaccauggguucucauugu

SEQ ID NO: 8477 - RNA, 22 nt, Homo sapiens
uggagugugacaaugguguuug

SEQ ID NO: 8478 - RNA, 23 nt, Homo sapiens
gaacgcgcuucccuauagagggu

SEQ ID NO: 8479 - RNA, 22 nt, Homo sapiens
gugacaucacauauacggcagc

SEQ ID NO: 8480 - RNA, 21 nt, Homo sapiens
uccuucugcuccgucccccag

SEQ ID NO: 8481 - RNA, 22 nt, Homo sapiens
cuuggcaccuagcaagcacuca

SEQ ID NO: 8482 - RNA, 22 nt, Homo sapiens
caaagaauucuccuuuugggcu

SEQ ID NO: 8483 - RNA, 23 nt, Homo sapiens
uuuggcacuagcacauuuuugcu

SEQ ID NO: 8484 - RNA, 22 nt, Homo sapiens
aggcauugacuucucacuagcu

SEQ ID NO: 8485 - RNA, 22 nt, Homo sapiens
uaaugccccuaaaaauccuuau

SEQ ID NO: 8486 - RNA, 23 nt, Homo sapiens
ugagcgccucgacgacagagccg

SEQ ID NO: 8487 - RNA, 22 nt, Homo sapiens
acccgucccguucguccccgga

SEQ ID NO: 8488 - RNA, 25 nt, Homo sapiens
aggggugguguugggacagcuccgu

SEQ ID NO: 8489 - RNA, 22 nt, Homo sapiens
ugcggggcuagggcuaacagca

SEQ ID NO: 8490 - RNA, 20 nt, Homo sapiens
ggggagcuguggaagcagua

SEQ ID NO: 8491 - RNA, 22 nt, Homo sapiens
uauugcacucgucccggccucc

SEQ ID NO: 8492 - RNA, 23 nt, Homo sapiens
aggaccugcgggacaagauucuu

SEQ ID NO: 8493 - RNA, 21 nt, Homo sapiens
aucacauugccagggauuucc

SEQ ID NO: 8494 - RNA, 21 nt, Homo sapiens
aucacauugccagggauuacc

SEQ ID NO: 8495 - RNA, 26 nt, Homo sapiens
gaugaugauggcagcaaauucugaaa

SEQ ID NO: 8496 - RNA, 22 nt, Homo sapiens
uaugucugcugaccaucaccuu

SEQ ID NO: 8497 - RNA, 22 nt, Homo sapiens
uggagagaaaggcaguuccuga

SEQ ID NO: 8498 - RNA, 22 nt, Homo sapiens
cucggcgcggggcgcgggcucc

SEQ ID NO: 8499 - RNA, 22 nt, Homo sapiens
uacccagagcaugcagugugaa

SEQ ID NO: 8500 - RNA, 20 nt, Homo sapiens
ccauggaucuccaggugggu

SEQ ID NO: 8501 - RNA, 19 nt, Homo sapiens
aguguggcuuucuuagagc

SEQ ID NO: 8502 - RNA, 20 nt, Homo sapiens
ucacuguucagacaggcgga

SEQ ID NO: 8503 - RNA, 22 nt, Homo sapiens
uguaaacauccuacacucagcu

SEQ ID NO: 8504 - RNA, 24 nt, Homo sapiens
ugccugggucucuggccugcgcgu

SEQ ID NO: 8505 - RNA, 20 nt, Homo sapiens
guugugucaguuuaucaaac

SEQ ID NO: 8506 - RNA, 22 nt, Homo sapiens
ugagccccugugccgcccccag

SEQ ID NO: 8507 - RNA, 21 nt, Homo sapiens
ucguggccuggucuccauuau

SEQ ID NO: 8508 - RNA, 25 nt, Homo sapiens
aggggugguguugggacagcuccgu

SEQ ID NO: 8509 - RNA, 23 nt, Homo sapiens
uaaggugcaucuagugcagauag

SEQ ID NO: 8510 - RNA, 22 nt, Homo sapiens
aaagugcauccuuuuagagugu

SEQ ID NO: 8511 - RNA, 22 nt, Homo sapiens
aaagugcauccuuuuagagguu

SEQ ID NO: 8512 - RNA, 22 nt, Homo sapiens
aaagugcaucuuuuuagaggau

SEQ ID NO: 8513 - RNA, 22 nt, Homo sapiens
ccucuuccccuugucucuccag

SEQ ID NO: 8514 - RNA, 20 nt, Homo sapiens
guagaggagauggcgcaggg

SEQ ID NO: 8515 - RNA, 23 nt, Homo sapiens
ucauagcccuguacaaugcugcu

SEQ ID NO: 8516 - RNA, 18 nt, Homo sapiens
aucccaccucugccacca

SEQ ID NO: 8517 - RNA, 24 nt, Homo sapiens
uugcagcugccugggagugacuuc

SEQ ID NO: 8518 - RNA, 22 nt, Homo sapiens
auccgcgcucugacucucugcc

SEQ ID NO: 8519 - RNA, 21 nt, Homo sapiens
ccccaccuccucucuccucag

SEQ ID NO: 8520 - RNA, 22 nt, Homo sapiens
ucugcccccuccgcugcugcca

SEQ ID NO: 8521 - RNA, 20 nt, Homo sapiens
ugagcccuguccucccgcag

SEQ ID NO: 8522 - RNA, 22 nt, Homo sapiens
aguggggaacccuuccaugagg

SEQ ID NO: 8523 - RNA, 22 nt, Homo sapiens
ucggccugaccacccaccccac

SEQ ID NO: 8524 - RNA, 22 nt, Homo sapiens
uuggggaaacggccgcugagug

SEQ ID NO: 8525 - RNA, 22 nt, Homo sapiens
acagcaggcacagacaggcagu

SEQ ID NO: 8526 - RNA, 19 nt, Homo sapiens
accgugcaaagguagcaua

SEQ ID NO: 8527 - RNA, 21 nt, Homo sapiens
cugaccuaugaauugacagcc

SEQ ID NO: 8528 - RNA, 22 nt, Homo sapiens
cagugcaauguuaaaagggcau

SEQ ID NO: 8529 - RNA, 21 nt, Homo sapiens
aucacauugccagggauuucc

SEQ ID NO: 8530 - RNA, 21 nt, Homo sapiens
aucacauugccagggauuacc

SEQ ID NO: 8531 - RNA, 21 nt, Homo sapiens
uggcagggaggcugggagggg

SEQ ID NO: 8532 - RNA, 22 nt, Homo sapiens
uguaaacauccuacacucagcu

SEQ ID NO: 8533 - RNA, 21 nt, Homo sapiens
agggcccccccucaauccugu

SEQ ID NO: 8534 - RNA, 18 nt, Homo sapiens
ucagcuggcccucauuuc

SEQ ID NO: 8535 - RNA, 21 nt, Homo sapiens
aagccugcccggcuccucggg

SEQ ID NO: 8536 - RNA, 22 nt, Homo sapiens
caaaaguaauuguggauuuugu

SEQ ID NO: 8537 - RNA, 23 nt, Homo sapiens
uauggcuuuuuauuccuauguga

SEQ ID NO: 8538 - RNA, 23 nt, Homo sapiens
uauggcuuuucauuccuauguga

SEQ ID NO: 8539 - RNA, 23 nt, Homo sapiens
ucuggcuccgugucuucacuccc

SEQ ID NO: 8540 - RNA, 23 nt, Homo sapiens
uaaggugcaucuagugcaguuag

SEQ ID NO: 8541 - RNA, 23 nt, Homo sapiens
uaauacugccggguaaugaugga

SEQ ID NO: 8542 - RNA, 22 nt, Homo sapiens
auaagacgagcaaaaagcuugu

SEQ ID NO: 8543 - RNA, 22 nt, Homo sapiens
auaagacgaacaaaagguuugu

SEQ ID NO: 8544 - RNA, 22 nt, Homo sapiens
cuggcccucucugcccuuccgu

SEQ ID NO: 8545 - RNA, 23 nt, Homo sapiens
uaauccuugcuaccugggugaga

SEQ ID NO: 8546 - RNA, 22 nt, Homo sapiens
uggugggcacagaaucuggacu

SEQ ID NO: 8547 - RNA, 23 nt, Homo sapiens
agugccugagggaguaagagccc

SEQ ID NO: 8548 - RNA, 25 nt, Homo sapiens
agggaucgcgggcggguggcggccu

SEQ ID NO: 8549 - RNA, 23 nt, Homo sapiens
cucucaccacugcccucccacag

SEQ ID NO: 8550 - RNA, 21 nt, Homo sapiens
uugaaaggcuauuucuugguc

SEQ ID NO: 8551 - RNA, 21 nt, Homo sapiens
uaaagugcugacagugcagau

SEQ ID NO: 8552 - RNA, 23 nt, Homo sapiens
cagugcaaugauauugucaaagc

SEQ ID NO: 8553 - RNA, 22 nt, Homo sapiens
ucaggcucaguccccucccgau

SEQ ID NO: 8554 - RNA, 22 nt, Homo sapiens
aucacacaaaggcaacuuuugu

SEQ ID NO: 8555 - RNA, 19 nt, Homo sapiens
ugucucugcugggguuucu

SEQ ID NO: 8556 - RNA, 24 nt, Homo sapiens
ucccugagacccuuuaaccuguga

SEQ ID NO: 8557 - RNA, 22 nt, Homo sapiens
ucccugagacccuaacuuguga

SEQ ID NO: 8558 - RNA, 23 nt, Homo sapiens
ccucagggcuguagaacagggcu

SEQ ID NO: 8559 - RNA, 25 nt, Homo sapiens
aggggugguguugggacagcuccgu

SEQ ID NO: 8560 - RNA, 20 nt, Homo sapiens
ggggagcuguggaagcagua

SEQ ID NO: 8561 - RNA, 22 nt, Homo sapiens
uaugugggaugguaaaccgcuu

SEQ ID NO: 8562 - RNA, 20 nt, Homo sapiens
ggggagcuguggaagcagua

SEQ ID NO: 8563 - RNA, 21 nt, Homo sapiens
acuggacuuggagucagaagg

SEQ ID NO: 8564 - RNA, 22 nt, Homo sapiens
acuggacuuagggucagaaggc

SEQ ID NO: 8565 - RNA, 22 nt, Homo sapiens
uuagggcccuggcuccaucucc

SEQ ID NO: 8566 - RNA, 23 nt, Homo sapiens
ucggggaucaucaugucacgaga

SEQ ID NO: 8567 - RNA, 22 nt, Homo sapiens
uggagugugacaaugguguuug

SEQ ID NO: 8568 - RNA, 23 nt, Homo sapiens
uauggcuuuucauuccuauguga

SEQ ID NO: 8569 - RNA, 22 nt, Homo sapiens
aucacacaaaggcaacuuuugu

SEQ ID NO: 8570 - RNA, 21 nt, Homo sapiens
ccaguccugugccugccgccu

SEQ ID NO: 8571 - RNA, 22 nt, Homo sapiens
uggcaguguauuguuagcuggu

SEQ ID NO: 8572 - RNA, 22 nt, Homo sapiens
cgucaacacuugcugguuuccu

SEQ ID NO: 8573 - RNA, 20 nt, Homo sapiens
ccucugggcccuuccuccag

SEQ ID NO: 8574 - RNA, 22 nt, Homo sapiens
ucucugggccugugucuuaggc

SEQ ID NO: 8575 - RNA, 22 nt, Homo sapiens
ccucccacacccaaggcuugca

SEQ ID NO: 8576 - RNA, 22 nt, Homo sapiens
gcugacuccuaguccagggcuc

SEQ ID NO: 8577 - RNA, 22 nt, Homo sapiens
acgcccuucccccccuucuuca

SEQ ID NO: 8578 - RNA, 19 nt, Homo sapiens
aggcugcggaauucaggac

SEQ ID NO: 8579 - RNA, 21 nt, Homo sapiens
ugacaacuauggaugagcucu

SEQ ID NO: 8580 - RNA, 22 nt, Homo sapiens
uagcagcacauaaugguuugug

SEQ ID NO: 8581 - RNA, 23 nt, Homo sapiens
ucuggcuccgugucuucacuccc

SEQ ID NO: 8582 - RNA, 23 nt, Homo sapiens
cggcccgggcugcugcuguuccu

SEQ ID NO: 8583 - RNA, 21 nt, Homo sapiens
agggcccccccucaauccugu

SEQ ID NO: 8584 - RNA, 23 nt, Homo sapiens
ugaggggcagagagcgagacuuu

SEQ ID NO: 8585 - RNA, 22 nt, Homo sapiens
ugcggggcuagggcuaacagca

SEQ ID NO: 8586 - RNA, 22 nt, Homo sapiens
cuuaugcaagauucccuucuac

SEQ ID NO: 8587 - RNA, 22 nt, Homo sapiens
uggugggcacagaaucuggacu

SEQ ID NO: 8588 - RNA, 22 nt, Homo sapiens
uggugggccgcagaacaugugc

SEQ ID NO: 8589 - RNA, 21 nt, Homo sapiens
gcgacccacucuugguuucca

SEQ ID NO: 8590 - RNA, 21 nt, Homo sapiens
gcgacccauacuugguuucag

SEQ ID NO: 8591 - RNA, 24 nt, Homo sapiens
gaccuggacauguuugugcccagu

SEQ ID NO: 8592 - RNA, 22 nt, Homo sapiens
aaggagcucacagucuauugag

SEQ ID NO: 8593 - RNA, 23 nt, Homo sapiens
aaggagcuuacaaucuagcuggg

SEQ ID NO: 8594 - RNA, 20 nt, Homo sapiens
uaaggcacgcggugaaugcc

SEQ ID NO: 8595 - RNA, 22 nt, Homo sapiens
cucuagagggaagcacuuucug

SEQ ID NO: 8596 - RNA, 21 nt, Homo sapiens
aaagcgcuucccuucagagug

SEQ ID NO: 8597 - RNA, 21 nt, Homo sapiens
gaaagcgcuucucuuuagagg

SEQ ID NO: 8598 - RNA, 22 nt, Homo sapiens
aaagugcauccuuuuagagugu

SEQ ID NO: 8599 - RNA, 22 nt, Homo sapiens
cucuagagggaagcgcuuucug

SEQ ID NO: 8600 - RNA, 22 nt, Homo sapiens
cucuagagggaagcgcuuucug

SEQ ID NO: 8601 - RNA, 22 nt, Homo sapiens
cucuagagggaagcacuuucug

SEQ ID NO: 8602 - RNA, 22 nt, Homo sapiens
aaaaugguucccuuuagagugu

SEQ ID NO: 8603 - RNA, 23 nt, Homo sapiens
gaacgcgcuucccuauagagggu

SEQ ID NO: 8604 - RNA, 22 nt, Homo sapiens
cucuagagggaagcacuuucug

SEQ ID NO: 8605 - RNA, 22 nt, Homo sapiens
uccuucauuccaccggagucug

SEQ ID NO: 8606 - RNA, 21 nt, Homo sapiens
agggcccccccucaauccugu

SEQ ID NO: 8607 - RNA, 22 nt, Homo sapiens
acuccagccccacagccucagc

SEQ ID NO: 8608 - RNA, 18 nt, Homo sapiens
aucccaccucugccacca

SEQ ID NO: 8609 - RNA, 22 nt, Homo sapiens
ccucccacacccaaggcuugca

SEQ ID NO: 8610 - RNA, 21 nt, Homo sapiens
gugcauuguaguugcauugca

SEQ ID NO: 8611 - RNA, 21 nt, Homo sapiens
cggcggggacggcgauugguc

SEQ ID NO: 8612 - RNA, 22 nt, Homo sapiens
aggcggggcgccgcgggaccgc

SEQ ID NO: 8613 - RNA, 24 nt, Homo sapiens
ugccugggucucuggccugcgcgu

SEQ ID NO: 8614 - RNA, 22 nt, Homo sapiens
agaggcuggccgugaugaauuc

SEQ ID NO: 8615 - RNA, 21 nt, Homo sapiens
uggcagggaggcugggagggg

SEQ ID NO: 8616 - RNA, 22 nt, Homo sapiens
ucggccugaccacccaccccac

SEQ ID NO: 8617 - RNA, 18 nt, Homo sapiens
aucccaccucugccacca

SEQ ID NO: 8618 - RNA, 24 nt, Homo sapiens
uggcccugacugaagaccagcagu

SEQ ID NO: 8619 - RNA, 24 nt, Homo sapiens
uggcccugacugaagaccagcagu

SEQ ID NO: 8620 - RNA, 23 nt, Homo sapiens
cggcccgggcugcugcuguuccu

SEQ ID NO: 8621 - RNA, 21 nt, Homo sapiens
cggcggggacggcgauugguc

SEQ ID NO: 8622 - RNA, 22 nt, Homo sapiens
ucugcccccuccgcugcugcca

SEQ ID NO: 8623 - RNA, 20 nt, Homo sapiens
acugccccaggugcugcugg

SEQ ID NO: 8624 - RNA, 22 nt, Homo sapiens
aggcggggcgccgcgggaccgc

SEQ ID NO: 8625 - RNA, 22 nt, Homo sapiens
caaagugccucccuuuagagug

SEQ ID NO: 8626 - RNA, 20 nt, Homo sapiens
ggggagcuguggaagcagua

SEQ ID NO: 8627 - RNA, 22 nt, Homo sapiens
uauugcacucgucccggccucc

SEQ ID NO: 8628 - RNA, 20 nt, Homo sapiens
ccuccugcccuccuugcugu

SEQ ID NO: 8629 - RNA, 22 nt, Homo sapiens
acagcaggcacagacaggcagu

SEQ ID NO: 8630 - RNA, 21 nt, Homo sapiens
aauaauacaugguugaucuuu

SEQ ID NO: 8631 - RNA, 22 nt, Homo sapiens
gccugcugggguggaaccuggu

SEQ ID NO: 8632 - RNA, 22 nt, Homo sapiens
auaauacaugguuaaccucuuu

SEQ ID NO: 8633 - RNA, 20 nt, Homo sapiens
ggggagcuguggaagcagua

SEQ ID NO: 8634 - RNA, 22 nt, Homo sapiens
uuuccggcucgcgugggugugu

SEQ ID NO: 8635 - RNA, 19 nt, Homo sapiens
gugaggacucgggaggugg

SEQ ID NO: 8636 - RNA, 22 nt, Homo sapiens
ucugggcaacaaagugagaccu

SEQ ID NO: 8637 - RNA, 18 nt, Homo sapiens
cagggaggugaaugugau

SEQ ID NO: 8638 - RNA, 23 nt, Homo sapiens
ucuggcuccgugucuucacuccc

SEQ ID NO: 8639 - RNA, 21 nt, Homo sapiens
ucgaggagcucacagucuagu

SEQ ID NO: 8640 - RNA, 21 nt, Homo sapiens
cggcggggacggcgauugguc

SEQ ID NO: 8641 - RNA, 19 nt, Homo sapiens
ugagcugcuguaccaaaau

SEQ ID NO: 8642 - RNA, 19 nt, Homo sapiens
aggcacggugucagcaggc

SEQ ID NO: 8643 - RNA, 19 nt, Homo sapiens
aggcugcggaauucaggac

SEQ ID NO: 8644 - RNA, 25 nt, Homo sapiens
gcugggcagggcuucugagcuccuu

SEQ ID NO: 8645 - RNA, 19 nt, Homo sapiens
aagcagcugccucugaggc

SEQ ID NO: 8646 - RNA, 22 nt, Homo sapiens
aggcggggcgccgcgggaccgc

SEQ ID NO: 8647 - RNA, 22 nt, Homo sapiens
cuccugagccauucugagccuc

SEQ ID NO: 8648 - RNA, 22 nt, Homo sapiens
ucaccagcccuguguucccuag

SEQ ID NO: 8649 - RNA, 22 nt, Homo sapiens
ccucuuccccuugucucuccag

SEQ ID NO: 8650 - RNA, 23 nt, Homo sapiens
agcuacauugucugcuggguuuc

SEQ ID NO: 8651 - RNA, 22 nt, Homo sapiens
aauugcacgguauccaucugua

SEQ ID NO: 8652 - RNA, 23 nt, Homo sapiens
ucuuggaguaggucauugggugg

SEQ ID NO: 8653 - RNA, 25 nt, Homo sapiens
aggggugguguugggacagcuccgu

SEQ ID NO: 8654 - RNA, 21 nt, Homo sapiens
gcaggaacuugugagucuccu

SEQ ID NO: 8655 - RNA, 21 nt, Homo sapiens
gcaggaacuugugagucuccu

SEQ ID NO: 8656 - RNA, 24 nt, Homo sapiens
uggcccugacugaagaccagcagu

SEQ ID NO: 8657 - RNA, 21 nt, Homo sapiens
uggcagggaggcugggagggg

SEQ ID NO: 8658 - RNA, 21 nt, Homo sapiens
ucacagugaaccggucucuuu

SEQ ID NO: 8659 - RNA, 20 nt, Homo sapiens
ucugcaggguuugcuuugag

SEQ ID NO: 8660 - RNA, 22 nt, Homo sapiens
cucuagagggaagcacuuucug

SEQ ID NO: 8661 - RNA, 20 nt, Homo sapiens
guugugucaguuuaucaaac

SEQ ID NO: 8662 - RNA, 22 nt, Homo sapiens
caaaaaccacaguuucuuuugc

SEQ ID NO: 8663 - RNA, 23 nt, Homo sapiens
ucuggcuccgugucuucacuccc

SEQ ID NO: 8664 - RNA, 22 nt, Homo sapiens
uggagagaaaggcaguuccuga

SEQ ID NO: 8665 - RNA, 22 nt, Homo sapiens
gcugacuccuaguccagggcuc

SEQ ID NO: 8666 - RNA, 22 nt, Homo sapiens
uguaaacauccuacacucagcu

SEQ ID NO: 8667 - RNA, 21 nt, Homo sapiens
uggcagggaggcugggagggg

SEQ ID NO: 8668 - RNA, 22 nt, Homo sapiens
ucaccagcccuguguucccuag

SEQ ID NO: 8669 - RNA, 23 nt, Homo sapiens
agcugguguugugaaucaggccg

SEQ ID NO: 8670 - RNA, 20 nt, Homo sapiens
ccccagggcgacgcggcggg

SEQ ID NO: 8671 - RNA, 22 nt, Homo sapiens
aacuggcccucaaagucccgcu

SEQ ID NO: 8672 - RNA, 20 nt, Homo sapiens
ccuccugcccuccuugcugu

SEQ ID NO: 8673 - RNA, 22 nt, Homo sapiens
gguccagaggggagauagguuc

SEQ ID NO: 8674 - RNA, 21 nt, Homo sapiens
uaaagugcugacagugcagau

SEQ ID NO: 8675 - RNA, 23 nt, Homo sapiens
cagugcaaugauauugucaaagc

SEQ ID NO: 8676 - RNA, 21 nt, Homo sapiens
gccccugggccuauccuagaa

SEQ ID NO: 8677 - RNA, 23 nt, Homo sapiens
uagcagcgggaacaguucugcag

SEQ ID NO: 8678 - RNA, 19 nt, Homo sapiens
ugucucugcugggguuucu

SEQ ID NO: 8679 - RNA, 22 nt, Homo sapiens
cuugguucagggagggucccca

SEQ ID NO: 8680 - RNA, 21 nt, Homo sapiens
uggaggagaaggaaggugaug

SEQ ID NO: 8681 - RNA, 21 nt, Homo sapiens
aaggcagggcccccgcucccc

SEQ ID NO: 8682 - RNA, 23 nt, Homo sapiens
cucucaccacugcccucccacag

SEQ ID NO: 8683 - RNA, 22 nt, Homo sapiens
augggugaauuuguagaaggau

SEQ ID NO: 8684 - RNA, 22 nt, Homo sapiens
gguccagaggggagauagguuc

SEQ ID NO: 8685 - RNA, 22 nt, Homo sapiens
aaaucucugcaggcaaauguga

SEQ ID NO: 8686 - RNA, 21 nt, Homo sapiens
acuggacuuggagucagaagg

SEQ ID NO: 8687 - RNA, 22 nt, Homo sapiens
acuggacuuagggucagaaggc

SEQ ID NO: 8688 - RNA, 22 nt, Homo sapiens
ugagaaccacgucugcucugag

SEQ ID NO: 8689 - RNA, 22 nt, Homo sapiens
ucuucucuguuuuggccaugug

SEQ ID NO: 8690 - RNA, 21 nt, Homo sapiens
uggcagggaggcugggagggg

SEQ ID NO: 8691 - RNA, 21 nt, Homo sapiens
ccccaccuccucucuccucag

SEQ ID NO: 8692 - RNA, 22 nt, Homo sapiens
uggagugugacaaugguguuug

SEQ ID NO: 8693 - RNA, 22 nt, Homo sapiens
ucggccugaccacccaccccac

SEQ ID NO: 8694 - RNA, 23 nt, Homo sapiens
uauggcuuuucauuccuauguga

SEQ ID NO: 8695 - RNA, 22 nt, Homo sapiens
uacccagagcaugcagugugaa

SEQ ID NO: 8696 - RNA, 22 nt, Homo sapiens
uagguaguuuccuguuguuggg

SEQ ID NO: 8697 - RNA, 22 nt, Homo sapiens
uuggggaaacggccgcugagug

SEQ ID NO: 8698 - RNA, 22 nt, Homo sapiens
uguaaacauccuacacucagcu

SEQ ID NO: 8699 - RNA, 22 nt, Homo sapiens
aguggggaacccuuccaugagg

SEQ ID NO: 8700 - RNA, 22 nt, Homo sapiens
uggugggcacagaaucuggacu

SEQ ID NO: 8701 - RNA, 25 nt, Homo sapiens
aggggugguguugggacagcuccgu

SEQ ID NO: 8702 - RNA, 22 nt, Homo sapiens
uggugggccgcagaacaugugc

SEQ ID NO: 8703 - RNA, 24 nt, Homo sapiens
ugccugggucucuggccugcgcgu

SEQ ID NO: 8704 - RNA, 20 nt, Homo sapiens
accaggaggcugaggccccu

SEQ ID NO: 8705 - RNA, 20 nt, Homo sapiens
ggggagcuguggaagcagua

SEQ ID NO: 8706 - RNA, 21 nt, Homo sapiens
aaggcagggcccccgcucccc

SEQ ID NO: 8707 - RNA, 23 nt, Homo sapiens
uacccuguagauccgaauuugug

SEQ ID NO: 8708 - RNA, 23 nt, Homo sapiens
uacccuguagaaccgaauuugug

SEQ ID NO: 8709 - RNA, 22 nt, Homo sapiens
acaggugagguucuugggagcc

SEQ ID NO: 8710 - RNA, 23 nt, Homo sapiens
uaaauuucaccuuucugagaagg

SEQ ID NO: 8711 - RNA, 23 nt, Homo sapiens
uaaauuucaccuuucugagaagg

SEQ ID NO: 8712 - RNA, 22 nt, Homo sapiens
ugugacagauugauaacugaaa

SEQ ID NO: 8713 - RNA, 21 nt, Homo sapiens
aggguaagcugaaccucugau

SEQ ID NO: 8714 - RNA, 18 nt, Homo sapiens
cgggcguggugguggggg

SEQ ID NO: 8715 - RNA, 23 nt, Homo sapiens
cggcccgggcugcugcuguuccu

SEQ ID NO: 8716 - RNA, 22 nt, Homo sapiens
uggagagaaaggcaguuccuga

SEQ ID NO: 8717 - RNA, 21 nt, Homo sapiens
cggcggggacggcgauugguc

SEQ ID NO: 8718 - RNA, 22 nt, Homo sapiens
aggcggggcgccgcgggaccgc

SEQ ID NO: 8719 - RNA, 22 nt, Homo sapiens
ugcggggcuagggcuaacagca

SEQ ID NO: 8720 - RNA, 24 nt, Homo sapiens
uggggagcugaggcucugggggug

SEQ ID NO: 8721 - RNA, 21 nt, Homo sapiens
cccggagccaggaugcagcuc

SEQ ID NO: 8722 - RNA, 20 nt, Homo sapiens
ucugcaggguuugcuuugag

SEQ ID NO: 8723 - RNA, 20 nt, Homo sapiens
ucacaccugccucgcccccc

SEQ ID NO: 8724 - RNA, 23 nt, Homo sapiens
uggaguccaggaaucugcauuuu

SEQ ID NO: 8725 - RNA, 23 nt, Homo sapiens
caaagugcuuacagugcagguag

SEQ ID NO: 8726 - RNA, 20 nt, Homo sapiens
ccuccugcccuccuugcugu

SEQ ID NO: 8727 - RNA, 22 nt, Homo sapiens
uacugcagacguggcaaucaug

SEQ ID NO: 8728 - RNA, 21 nt, Homo sapiens
uacugcagacaguggcaauca

SEQ ID NO: 8729 - RNA, 22 nt, Homo sapiens
ggggguccccggugcucggauc

SEQ ID NO: 8730 - RNA, 25 nt, Homo sapiens
agggaucgcgggcggguggcggccu

SEQ ID NO: 8731 - RNA, 24 nt, Homo sapiens
ugccugggucucuggccugcgcgu

SEQ ID NO: 8732 - RNA, 24 nt, Homo sapiens
ugccugggucucuggccugcgcgu

SEQ ID NO: 8733 - RNA, 22 nt, Homo sapiens
ugagccccugugccgcccccag

SEQ ID NO: 8734 - RNA, 22 nt, Homo sapiens
ccucuuccccuugucucuccag

SEQ ID NO: 8735 - RNA, 22 nt, Homo sapiens
agaaggaaauugaauucauuua

SEQ ID NO: 8736 - RNA, 17 nt, Homo sapiens
ucgccuccuccucuccc

SEQ ID NO: 8737 - RNA, 18 nt, Homo sapiens
cagggaggugaaugugau

SEQ ID NO: 8738 - RNA, 23 nt, Homo sapiens
ucuggcuccgugucuucacuccc

SEQ ID NO: 8739 - RNA, 22 nt, Homo sapiens
uucccuuugucauccuaugccu

SEQ ID NO: 8740 - RNA, 22 nt, Homo sapiens
uucccuuugucauccuucgccu

SEQ ID NO: 8741 - RNA, 23 nt, Homo sapiens
ugaggggcagagagcgagacuuu

SEQ ID NO: 8742 - RNA, 20 nt, Homo sapiens
guagaggagauggcgcaggg

SEQ ID NO: 8743 - RNA, 23 nt, Homo sapiens
uacccuguagaaccgaauuugug

SEQ ID NO: 8744 - RNA, 22 nt, Homo sapiens
acgcccuucccccccuucuuca

SEQ ID NO: 8745 - RNA, 22 nt, Homo sapiens
ucggauccgucugagcuuggcu

SEQ ID NO: 8746 - RNA, 24 nt, Homo sapiens
uuuggcaaugguagaacucacacu

SEQ ID NO: 8747 - RNA, 22 nt, Homo sapiens
uggcucaguucagcaggaacag

SEQ ID NO: 8748 - RNA, 22 nt, Homo sapiens
aucuggagguaagaagcacuuu

SEQ ID NO: 8749 - RNA, 20 nt, Homo sapiens
cggcucugggucugugggga

SEQ ID NO: 8750 - RNA, 22 nt, Homo sapiens
cuccugagccauucugagccuc

SEQ ID NO: 8751 - RNA, 20 nt, Homo sapiens
uaaggcacgcggugaaugcc

SEQ ID NO: 8752 - RNA, 17 nt, Homo sapiens
ucgccuccuccucuccc

SEQ ID NO: 8753 - RNA, 22 nt, Homo sapiens
ggagacgcggcccuguuggagu

SEQ ID NO: 8754 - RNA, 21 nt, Homo sapiens
ugagaugaagcacuguagcuc

SEQ ID NO: 8755 - RNA, 22 nt, Homo sapiens
ucgugucuuguguugcagccgg

SEQ ID NO: 8756 - RNA, 21 nt, Homo sapiens
ugacaacuauggaugagcucu

SEQ ID NO: 8757 - RNA, 23 nt, Homo sapiens
uagcagcgggaacaguucugcag

SEQ ID NO: 8758 - RNA, 21 nt, Homo sapiens
uaaggcacccuucugaguaga

SEQ ID NO: 8759 - RNA, 23 nt, Homo sapiens
aucgcugcgguugcgagcgcugu

SEQ ID NO: 8760 - RNA, 19 nt, Homo sapiens
aagugugcagggcacuggu

SEQ ID NO: 8761 - RNA, 22 nt, Homo sapiens
cuugguucagggagggucccca

SEQ ID NO: 8762 - RNA, 21 nt, Homo sapiens
gcaggaacuugugagucuccu

SEQ ID NO: 8763 - RNA, 23 nt, Homo sapiens
gagggucuugggagggaugugac

SEQ ID NO: 8764 - RNA, 24 nt, Homo sapiens
uggcccugacugaagaccagcagu

SEQ ID NO: 8765 - RNA, 21 nt, Homo sapiens
ccaguccugugccugccgccu

SEQ ID NO: 8766 - RNA, 20 nt, Homo sapiens
ccccagggcgacgcggcggg

SEQ ID NO: 8767 - RNA, 22 nt, Homo sapiens
ugggucuuugcgggcgagauga

SEQ ID NO: 8768 - RNA, 19 nt, Homo sapiens
accgugcaaagguagcaua

SEQ ID NO: 8769 - RNA, 22 nt, Homo sapiens
cuggcccucucugcccuuccgu

SEQ ID NO: 8770 - RNA, 23 nt, Homo sapiens
ucccccaggugugauucugauuu

SEQ ID NO: 8771 - RNA, 21 nt, Homo sapiens
acuggacuuggagucagaagg

SEQ ID NO: 8772 - RNA, 22 nt, Homo sapiens
aggcaguguauuguuagcuggc

SEQ ID NO: 8773 - RNA, 21 nt, Homo sapiens
cggggcagcucaguacaggau

SEQ ID NO: 8774 - RNA, 24 nt, Homo sapiens
acugggggcuuucgggcucugcgu

SEQ ID NO: 8775 - RNA, 22 nt, Homo sapiens
gguggcccggccgugccugagg

SEQ ID NO: 8776 - RNA, 21 nt, Homo sapiens
uggcagggaggcugggagggg

SEQ ID NO: 8777 - RNA, 22 nt, Homo sapiens
ucaccagcccuguguucccuag

SEQ ID NO: 8778 - RNA, 22 nt, Homo sapiens
uggagagaaaggcaguuccuga

SEQ ID NO: 8779 - RNA, 22 nt, Homo sapiens
cgcaggggccgggugcucaccg

SEQ ID NO: 8780 - RNA, 21 nt, Homo sapiens
aucacauugccagggauuucc

SEQ ID NO: 8781 - RNA, 21 nt, Homo sapiens
aucacauugccagggauuacc

SEQ ID NO: 8782 - RNA, 22 nt, Homo sapiens
aguggggaacccuuccaugagg

SEQ ID NO: 8783 - RNA, 19 nt, Homo sapiens
ugggcguaucuguaugcua

SEQ ID NO: 8784 - RNA, 19 nt, Homo sapiens
aggcugcggaauucaggac

SEQ ID NO: 8785 - RNA, 20 nt, Homo sapiens
ggggagcuguggaagcagua

SEQ ID NO: 8786 - RNA, 22 nt, Homo sapiens
ugagguaguagguuguauaguu

SEQ ID NO: 8787 - RNA, 22 nt, Homo sapiens
ugagguaguagguugugugguu

SEQ ID NO: 8788 - RNA, 22 nt, Homo sapiens
ugagguaguagguuguaugguu

SEQ ID NO: 8789 - RNA, 22 nt, Homo sapiens
agagguaguagguugcauaguu

SEQ ID NO: 8790 - RNA, 22 nt, Homo sapiens
ugagguaggagguuguauaguu

SEQ ID NO: 8791 - RNA, 22 nt, Homo sapiens
ugagguaguagauuguauaguu

SEQ ID NO: 8792 - RNA, 22 nt, Homo sapiens
ugagguaguaguuuguacaguu

SEQ ID NO: 8793 - RNA, 22 nt, Homo sapiens
ugagguaguaguuugugcuguu

SEQ ID NO: 8794 - RNA, 21 nt, Homo sapiens
ccccaccuccucucuccucag

SEQ ID NO: 8795 - RNA, 22 nt, Homo sapiens
ugugagguuggcauuguugucu

SEQ ID NO: 8796 - RNA, 22 nt, Homo sapiens
uuggggaaacggccgcugagug

SEQ ID NO: 8797 - RNA, 22 nt, Homo sapiens
aguggggaacccuuccaugagg

SEQ ID NO: 8798 - RNA, 20 nt, Homo sapiens
ggggagcuguggaagcagua

SEQ ID NO: 8799 - RNA, 22 nt, Homo sapiens
ugagguaguaaguuguauuguu

SEQ ID NO: 8800 - RNA, 22 nt, Homo sapiens
ucagugcacuacagaacuuugu

SEQ ID NO: 8801 - RNA, 20 nt, Homo sapiens
ccccagggcgacgcggcggg

SEQ ID NO: 8802 - RNA, 21 nt, Homo sapiens
uaaagugcugacagugcagau

SEQ ID NO: 8803 - RNA, 23 nt, Homo sapiens
cagugcaaugauauugucaaagc

SEQ ID NO: 8804 - RNA, 23 nt, Homo sapiens
agguuacccgagcaacuuugcau

SEQ ID NO: 8805 - RNA, 21 nt, Homo sapiens
uggguuuacguugggagaacu

SEQ ID NO: 8806 - RNA, 23 nt, Homo sapiens
uauucauuuauccccagccuaca

SEQ ID NO: 8807 - RNA, 23 nt, Homo sapiens
ccugcagcgacuugauggcuucc

SEQ ID NO: 8808 - RNA, 20 nt, Homo sapiens
uaaggcacgcggugaaugcc

SEQ ID NO: 8809 - RNA, 21 nt, Homo sapiens
ucacuccucuccucccgucuu

SEQ ID NO: 8810 - RNA, 22 nt, Homo sapiens
aagacgggaggaaagaagggag

SEQ ID NO: 8811 - RNA, 21 nt, Homo sapiens
uaaggcacccuucugaguaga

SEQ ID NO: 8812 - RNA, 19 nt, Homo sapiens
aggcacggugucagcaggc

SEQ ID NO: 8813 - RNA, 20 nt, Homo sapiens
accaggaggcugaggccccu

SEQ ID NO: 8814 - RNA, 22 nt, Homo sapiens
ugagaccucuggguucugagcu

SEQ ID NO: 8815 - RNA, 20 nt, Homo sapiens
ggggagcuguggaagcagua

SEQ ID NO: 8816 - RNA, 23 nt, Homo sapiens
uauggcuuuucauuccuauguga

SEQ ID NO: 8817 - RNA, 23 nt, Homo sapiens
ucuggcuccgugucuucacuccc

SEQ ID NO: 8818 - RNA, 21 nt, Homo sapiens
cucccacaugcaggguuugca

SEQ ID NO: 8819 - RNA, 21 nt, Homo sapiens
uaaagugcugacagugcagau

SEQ ID NO: 8820 - RNA, 23 nt, Homo sapiens
cagugcaaugauauugucaaagc

SEQ ID NO: 8821 - RNA, 22 nt, Homo sapiens
ccucccacacccaaggcuugca

SEQ ID NO: 8822 - RNA, 20 nt, Homo sapiens
aggguguuucucucaucucu

SEQ ID NO: 8823 - RNA, 21 nt, Homo sapiens
uggaggagaaggaaggugaug

SEQ ID NO: 8824 - RNA, 22 nt, Homo sapiens
aggcauugacuucucacuagcu

SEQ ID NO: 8825 - RNA, 22 nt, Homo sapiens
uucuggaauucugugugaggga

SEQ ID NO: 8826 - RNA, 22 nt, Homo sapiens
cccugugcccggcccacuucug

SEQ ID NO: 8827 - RNA, 22 nt, Homo sapiens
aacacaccugguuaaccucuuu

SEQ ID NO: 8828 - RNA, 22 nt, Homo sapiens
gcugacuccuaguccagggcuc

SEQ ID NO: 8829 - RNA, 22 nt, Homo sapiens
caaucacuaacuccacugccau

SEQ ID NO: 8830 - RNA, 22 nt, Homo sapiens
aacacaccuauucaaggauuca

SEQ ID NO: 8831 - RNA, 22 nt, Homo sapiens
cgucaacacuugcugguuuccu

SEQ ID NO: 8832 - RNA, 23 nt, Homo sapiens
caaagcgcuucucuuuagagugu

SEQ ID NO: 8833 - RNA, 21 nt, Homo sapiens
cuccagagggaaguacuuucu

SEQ ID NO: 8834 - RNA, 21 nt, Homo sapiens
cuccagagggaugcacuuucu

SEQ ID NO: 8835 - RNA, 20 nt, Homo sapiens
auguauaaauguauacacac

SEQ ID NO: 8836 - RNA, 20 nt, Homo sapiens
aggguguuucucucaucucu

SEQ ID NO: 8837 - RNA, 22 nt, Homo sapiens
augcugacauauuuacuagagg

SEQ ID NO: 8838 - RNA, 23 nt, Homo sapiens
uauucauuuauccccagccuaca

SEQ ID NO: 8839 - RNA, 21 nt, Homo sapiens
uggaggagaaggaaggugaug

SEQ ID NO: 8840 - RNA, 21 nt, Homo sapiens
ccuggaaacacugagguugug

SEQ ID NO: 8841 - RNA, 20 nt, Homo sapiens
ggggagcuguggaagcagua

SEQ ID NO: 8842 - RNA, 22 nt, Homo sapiens
acccgucccguucguccccgga

SEQ ID NO: 8843 - RNA, 22 nt, Homo sapiens
uggaauguaaggaagugugugg

SEQ ID NO: 8844 - RNA, 23 nt, Homo sapiens
ucccccaggugugauucugauuu

SEQ ID NO: 8845 - RNA, 22 nt, Homo sapiens
cgucaacacuugcugguuuccu

SEQ ID NO: 8846 - RNA, 24 nt, Homo sapiens
acugggggcuuucgggcucugcgu

SEQ ID NO: 8847 - RNA, 24 nt, Homo sapiens
ugccugggucucuggccugcgcgu

SEQ ID NO: 8848 - RNA, 22 nt, Homo sapiens
uauugcacucgucccggccucc

SEQ ID NO: 8849 - RNA, 22 nt, Homo sapiens
auccgcgcucugacucucugcc

SEQ ID NO: 8850 - RNA, 21 nt, Homo sapiens
ccccaccuccucucuccucag

SEQ ID NO: 8851 - RNA, 19 nt, Homo sapiens
auggauaaggcuuuggcuu

SEQ ID NO: 8852 - RNA, 20 nt, Homo sapiens
guguguggaaaugcuucugc

SEQ ID NO: 8853 - RNA, 22 nt, Homo sapiens
cucuagagggaagcacuuucug

SEQ ID NO: 8854 - RNA, 21 nt, Homo sapiens
cucccacaugcaggguuugca

SEQ ID NO: 8855 - RNA, 22 nt, Homo sapiens
aaggagcucacagucuauugag

SEQ ID NO: 8856 - RNA, 22 nt, Homo sapiens
uguaaacauccuacacucagcu

SEQ ID NO: 8857 - RNA, 22 nt, Homo sapiens
uauugcacauuacuaaguugca

SEQ ID NO: 8858 - RNA, 21 nt, Homo sapiens
gccccugggccuauccuagaa

SEQ ID NO: 8859 - RNA, 22 nt, Homo sapiens
uccagcaucagugauuuuguug

SEQ ID NO: 8860 - RNA, 22 nt, Homo sapiens
uugggaucauuuugcauccaua

SEQ ID NO: 8861 - RNA, 22 nt, Homo sapiens
cuuaugcaagauucccuucuac

SEQ ID NO: 8862 - RNA, 22 nt, Homo sapiens
ugaaggucuacugugugccagg

SEQ ID NO: 8863 - RNA, 22 nt, Homo sapiens
ccucccacacccaaggcuugca

SEQ ID NO: 8864 - RNA, 21 nt, Homo sapiens
aacaggugacugguuagacaa

SEQ ID NO: 8865 - RNA, 22 nt, Homo sapiens
gguggcccggccgugccugagg

SEQ ID NO: 8866 - RNA, 23 nt, Homo sapiens
aaggagcuuacaaucuagcuggg

SEQ ID NO: 8867 - RNA, 21 nt, Homo sapiens
uggaggagaaggaaggugaug

SEQ ID NO: 8868 - RNA, 23 nt, Homo sapiens
cugggaucuccggggucuugguu

SEQ ID NO: 8869 - RNA, 20 nt, Homo sapiens
ggggagcuguggaagcagua

SEQ ID NO: 8870 - RNA, 22 nt, Homo sapiens
ugugacugguugaccagagggg

SEQ ID NO: 8871 - RNA, 22 nt, Homo sapiens
uaaucucagcuggcaacuguga

SEQ ID NO: 8872 - RNA, 22 nt, Homo sapiens
aaggagcucacagucuauugag

SEQ ID NO: 8873 - RNA, 22 nt, Homo sapiens
uguaaacauccuacacucagcu

SEQ ID NO: 8874 - RNA, 23 nt, Homo sapiens
ugaggggcagagagcgagacuuu

SEQ ID NO: 8875 - RNA, 22 nt, Homo sapiens
ugagaaccacgucugcucugag

SEQ ID NO: 8876 - RNA, 24 nt, Homo sapiens
ugccugggucucuggccugcgcgu

SEQ ID NO: 8877 - RNA, 23 nt, Homo sapiens
aaggagcuuacaaucuagcuggg

SEQ ID NO: 8878 - RNA, 21 nt, Homo sapiens
uggaggagaaggaaggugaug

SEQ ID NO: 8879 - RNA, 22 nt, Homo sapiens
uggagugugacaaugguguuug

SEQ ID NO: 8880 - RNA, 22 nt, Homo sapiens
ucggccugaccacccaccccac

SEQ ID NO: 8881 - RNA, 21 nt, Homo sapiens
uugggacauacuuaugcuaaa

SEQ ID NO: 8882 - RNA, 22 nt, Homo sapiens
uggagagaaaggcaguuccuga

SEQ ID NO: 8883 - RNA, 21 nt, Homo sapiens
cggcggggacggcgauugguc

SEQ ID NO: 8884 - RNA, 22 nt, Homo sapiens
ucugcccccuccgcugcugcca

SEQ ID NO: 8885 - RNA, 20 nt, Homo sapiens
ccuccugcccuccuugcugu

SEQ ID NO: 8886 - RNA, 21 nt, Homo sapiens
agggcccccccucaauccugu

SEQ ID NO: 8887 - RNA, 20 nt, Homo sapiens
acugccccaggugcugcugg

SEQ ID NO: 8888 - RNA, 21 nt, Homo sapiens
cggggcagcucaguacaggau

SEQ ID NO: 8889 - RNA, 23 nt, Homo sapiens
uagcagcgggaacaguucugcag

SEQ ID NO: 8890 - RNA, 19 nt, Homo sapiens
aggcugcggaauucaggac

SEQ ID NO: 8891 - RNA, 23 nt, Homo sapiens
aucgcugcgguugcgagcgcugu

SEQ ID NO: 8892 - RNA, 22 nt, Homo sapiens
aggcggggcgccgcgggaccgc

SEQ ID NO: 8893 - RNA, 22 nt, Homo sapiens
aggcggggcgccgcgggaccgc

SEQ ID NO: 8894 - RNA, 22 nt, Homo sapiens
ugcggggcuagggcuaacagca

SEQ ID NO: 8895 - RNA, 22 nt, Homo sapiens
ugcggggcuagggcuaacagca

SEQ ID NO: 8896 - RNA, 22 nt, Homo sapiens
ugcccuuaaaggugaacccagu

SEQ ID NO: 8897 - RNA, 24 nt, Homo sapiens
agccugauuaaacacaugcucuga

SEQ ID NO: 8898 - RNA, 23 nt, Homo sapiens
cggcccgggcugcugcuguuccu

SEQ ID NO: 8899 - RNA, 22 nt, Homo sapiens
ugggucuuugcgggcgagauga

SEQ ID NO: 8900 - RNA, 22 nt, Homo sapiens
aucacacaaaggcaacuuuugu

SEQ ID NO: 8901 - RNA, 22 nt, Homo sapiens
caaagugccucccuuuagagug

SEQ ID NO: 8902 - RNA, 24 nt, Homo sapiens
uggcccugacugaagaccagcagu

SEQ ID NO: 8903 - RNA, 23 nt, Homo sapiens
ucuggcuccgugucuucacuccc

SEQ ID NO: 8904 - RNA, 23 nt, Homo sapiens
cggcccgggcugcugcuguuccu

SEQ ID NO: 8905 - RNA, 22 nt, Homo sapiens
cucccacugcuucacuugacua

SEQ ID NO: 8906 - RNA, 21 nt, Homo sapiens
agggcccccccucaauccugu

SEQ ID NO: 8907 - RNA, 22 nt, Homo sapiens
uguaaacauccuacacucagcu

SEQ ID NO: 8908 - RNA, 23 nt, Homo sapiens
ugaggggcagagagcgagacuuu

SEQ ID NO: 8909 - RNA, 22 nt, Homo sapiens
ccucccacacccaaggcuugca

SEQ ID NO: 8910 - RNA, 25 nt, Homo sapiens
agggaucgcgggcggguggcggccu

SEQ ID NO: 8911 - RNA, 20 nt, Homo sapiens
accaggaggcugaggccccu

SEQ ID NO: 8912 - RNA, 18 nt, Homo sapiens
ucagcuggcccucauuuc

SEQ ID NO: 8913 - RNA, 23 nt, Homo sapiens
ucuggcuccgugucuucacuccc

SEQ ID NO: 8914 - RNA, 22 nt, Homo sapiens
uggagagaaaggcaguuccuga

SEQ ID NO: 8915 - RNA, 22 nt, Homo sapiens
uguaacagcaacuccaugugga

SEQ ID NO: 8916 - RNA, 22 nt, Homo sapiens
cucccacugcuucacuugacua

SEQ ID NO: 8917 - RNA, 22 nt, Homo sapiens
uguaaacauccuacacucagcu

SEQ ID NO: 8918 - RNA, 21 nt, Homo sapiens
uggguuuacguugggagaacu

SEQ ID NO: 8919 - RNA, 24 nt, Homo sapiens
ugccugggucucuggccugcgcgu

SEQ ID NO: 8920 - RNA, 21 nt, Homo sapiens
uccgguucucagggcuccacc

SEQ ID NO: 8921 - RNA, 23 nt, Homo sapiens
uggugcggagagggcccacagug

SEQ ID NO: 8922 - RNA, 21 nt, Homo sapiens
uggaggagaaggaaggugaug

SEQ ID NO: 8923 - RNA, 27 nt, Homo sapiens
cacuguaggugauggugagagugggca

SEQ ID NO: 8924 - RNA, 22 nt, Homo sapiens
ugagccccugugccgcccccag

SEQ ID NO: 8925 - RNA, 21 nt, Homo sapiens
ccuguugaaguguaaucccca

SEQ ID NO: 8926 - RNA, 22 nt, Homo sapiens
ucuacagugcacgugucuccag

SEQ ID NO: 8927 - RNA, 23 nt, Homo sapiens
aucaacagacauuaauugggcgc

SEQ ID NO: 8928 - RNA, 21 nt, Homo sapiens
acagucugcugagguuggagc

SEQ ID NO: 8929 - RNA, 22 nt, Homo sapiens
augcugacauauuuacuagagg

SEQ ID NO: 8930 - RNA, 19 nt, Homo sapiens
aagcagcugccucugaggc

SEQ ID NO: 8931 - RNA, 22 nt, Homo sapiens
ugugcgcagggagaccucuccc

SEQ ID NO: 8932 - RNA, 22 nt, Homo sapiens
ugagccccugugccgcccccag

SEQ ID NO: 8933 - RNA, 22 nt, Homo sapiens
uggagugugacaaugguguuug

SEQ ID NO: 8934 - RNA, 22 nt, Homo sapiens
ucggauccgucugagcuuggcu

SEQ ID NO: 8935 - RNA, 17 nt, Homo sapiens
ucgccuccuccucuccc

SEQ ID NO: 8936 - RNA, 22 nt, Homo sapiens
uggagagaaaggcaguuccuga

SEQ ID NO: 8937 - RNA, 21 nt, Homo sapiens
cucccacaugcaggguuugca

SEQ ID NO: 8938 - RNA, 22 nt, Homo sapiens
uugggaucauuuugcauccaua

SEQ ID NO: 8939 - RNA, 19 nt, Homo sapiens
gggcgccugugaucccaac

SEQ ID NO: 8940 - RNA, 22 nt, Homo sapiens
uccgagccugggucucccucuu

SEQ ID NO: 8941 - RNA, 23 nt, Homo sapiens
cugggaucuccggggucuugguu

SEQ ID NO: 8942 - RNA, 20 nt, Homo sapiens
ggggagcuguggaagcagua

SEQ ID NO: 8943 - RNA, 17 nt, Homo sapiens
ucgccuccuccucuccc

SEQ ID NO: 8944 - RNA, 23 nt, Homo sapiens
ucuggcuccgugucuucacuccc

SEQ ID NO: 8945 - RNA, 21 nt, Homo sapiens
cggcggggacggcgauugguc

SEQ ID NO: 8946 - RNA, 21 nt, Homo sapiens
ugaguuggccaucugagugag

SEQ ID NO: 8947 - RNA, 25 nt, Homo sapiens
aggggugguguugggacagcuccgu

SEQ ID NO: 8948 - RNA, 22 nt, Homo sapiens
aggcggggcgccgcgggaccgc

SEQ ID NO: 8949 - RNA, 22 nt, Homo sapiens
acuccagccccacagccucagc

SEQ ID NO: 8950 - RNA, 24 nt, Homo sapiens
agccugauuaaacacaugcucuga

SEQ ID NO: 8951 - RNA, 22 nt, Homo sapiens
ccucuuccccuugucucuccag

SEQ ID NO: 8952 - RNA, 22 nt, Homo sapiens
uggguggucuggagauuugugc

SEQ ID NO: 8953 - RNA, 22 nt, Homo sapiens
ugagaacugaauuccauggguu

SEQ ID NO: 8954 - RNA, 22 nt, Homo sapiens
uucaccaccuucuccacccagc

SEQ ID NO: 8955 - RNA, 22 nt, Homo sapiens
aagcugccaguugaagaacugu

SEQ ID NO: 8956 - RNA, 21 nt, Homo sapiens
ccaccaccgugucugacacuu

SEQ ID NO: 8957 - RNA, 23 nt, Homo sapiens
ucccccaggugugauucugauuu

SEQ ID NO: 8958 - RNA, 22 nt, Homo sapiens
aauugcacgguauccaucugua

SEQ ID NO: 8959 - RNA, 23 nt, Homo sapiens
uacuccagagggcgucacucaug

SEQ ID NO: 8960 - RNA, 19 nt, Homo sapiens
ugagcugcuguaccaaaau

SEQ ID NO: 8961 - RNA, 25 nt, Homo sapiens
aggggugguguugggacagcuccgu

SEQ ID NO: 8962 - RNA, 24 nt, Homo sapiens
acugggggcuuucgggcucugcgu

SEQ ID NO: 8963 - RNA, 22 nt, Homo sapiens
ucuucucuguuuuggccaugug

SEQ ID NO: 8964 - RNA, 22 nt, Homo sapiens
uggagugugacaaugguguuug

SEQ ID NO: 8965 - RNA, 20 nt, Homo sapiens
cuuccucgucugucugcccc

SEQ ID NO: 8966 - RNA, 21 nt, Homo sapiens
uccugcgcgucccagaugccc

SEQ ID NO: 8967 - RNA, 23 nt, Homo sapiens
gaacgcgcuucccuauagagggu

SEQ ID NO: 8968 - RNA, 26 nt, Homo sapiens
aaguaguugguuuguaugagaugguu

SEQ ID NO: 8969 - RNA, 22 nt, Homo sapiens
aagcugccaguugaagaacugu

SEQ ID NO: 8970 - RNA, 22 nt, Homo sapiens
uaaugccccuaaaaauccuuau

SEQ ID NO: 8971 - RNA, 19 nt, Homo sapiens
ugagcugcuguaccaaaau

SEQ ID NO: 8972 - RNA, 21 nt, Homo sapiens
aaacuacugaaaaucaaagau

SEQ ID NO: 8973 - RNA, 21 nt, Homo sapiens
uggguuuacguugggagaacu

SEQ ID NO: 8974 - RNA, 23 nt, Homo sapiens
uggugcggagagggcccacagug

SEQ ID NO: 8975 - RNA, 22 nt, Homo sapiens
ugcggggcuagggcuaacagca

SEQ ID NO: 8976 - RNA, 20 nt, Homo sapiens
ucugcaggguuugcuuugag

SEQ ID NO: 8977 - RNA, 21 nt, Homo sapiens
ccccaccuccucucuccucag

SEQ ID NO: 8978 - RNA, 23 nt, Homo sapiens
ucuggcuccgugucuucacuccc

SEQ ID NO: 8979 - RNA, 23 nt, Homo sapiens
caaagugcuuacagugcagguag

SEQ ID NO: 8980 - RNA, 21 nt, Homo sapiens
cggcggggacggcgauugguc

SEQ ID NO: 8981 - RNA, 21 nt, Homo sapiens
ccaguccugugccugccgccu

SEQ ID NO: 8982 - RNA, 23 nt, Homo sapiens
agcuacauugucugcuggguuuc

SEQ ID NO: 8983 - RNA, 22 nt, Homo sapiens
uguaaacauccuacacucagcu

SEQ ID NO: 8984 - RNA, 23 nt, Homo sapiens
ugaggggcagagagcgagacuuu

SEQ ID NO: 8985 - RNA, 22 nt, Homo sapiens
uacugcagacguggcaaucaug

SEQ ID NO: 8986 - RNA, 21 nt, Homo sapiens
uacugcagacaguggcaauca

SEQ ID NO: 8987 - RNA, 22 nt, Homo sapiens
uggugggcacagaaucuggacu

SEQ ID NO: 8988 - RNA, 21 nt, Homo sapiens
ugaguuggccaucugagugag

SEQ ID NO: 8989 - RNA, 19 nt, Homo sapiens
ugggcguaucuguaugcua

SEQ ID NO: 8990 - RNA, 23 nt, Homo sapiens
uaaaucccauggugccuucuccu

SEQ ID NO: 8991 - RNA, 22 nt, Homo sapiens
uccgagccugggucucccucuu

SEQ ID NO: 8992 - RNA, 22 nt, Homo sapiens
uggugggccgcagaacaugugc

SEQ ID NO: 8993 - RNA, 22 nt, Homo sapiens
aggcggggcgccgcgggaccgc

SEQ ID NO: 8994 - RNA, 22 nt, Homo sapiens
uggauuucuuugugaaucacca

SEQ ID NO: 8995 - RNA, 20 nt, Homo sapiens
ggggagcuguggaagcagua

SEQ ID NO: 8996 - RNA, 24 nt, Homo sapiens
uggggagcugaggcucugggggug

SEQ ID NO: 8997 - RNA, 24 nt, Homo sapiens
uggggagcugaggcucugggggug

SEQ ID NO: 8998 - RNA, 22 nt, Homo sapiens
acccgucccguucguccccgga

SEQ ID NO: 8999 - RNA, 22 nt, Homo sapiens
cagugguuuuacccuaugguag

SEQ ID NO: 9000 - RNA, 21 nt, Homo sapiens
cggcggggacggcgauugguc

SEQ ID NO: 9001 - RNA, 21 nt, Homo sapiens
ugacaacuauggaugagcucu

SEQ ID NO: 9002 - RNA, 22 nt, Homo sapiens
aggcggggcgccgcgggaccgc

SEQ ID NO: 9003 - RNA, 22 nt, Homo sapiens
ugcggggcuagggcuaacagca

SEQ ID NO: 9004 - RNA, 22 nt, Homo sapiens
ugcggggcuagggcuaacagca

SEQ ID NO: 9005 - RNA, 21 nt, Homo sapiens
agaggauacccuuuguauguu

SEQ ID NO: 9006 - RNA, 27 nt, Homo sapiens
accuucuuguauaagcacugugcuaaa

SEQ ID NO: 9007 - RNA, 20 nt, Homo sapiens
uaaagagcccuguggagaca

SEQ ID NO: 9008 - RNA, 22 nt, Homo sapiens
cagugcaaugaugaaagggcau

SEQ ID NO: 9009 - RNA, 18 nt, Homo sapiens
cagggaggugaaugugau

SEQ ID NO: 9010 - RNA, 22 nt, Homo sapiens
ugauauguuugauauauuaggu

SEQ ID NO: 9011 - RNA, 22 nt, Homo sapiens
uagguaguuuccuguuguuggg

SEQ ID NO: 9012 - RNA, 23 nt, Homo sapiens
aagugccgccaucuuuugagugu

SEQ ID NO: 9013 - RNA, 21 nt, Homo sapiens
ucacuccucuccucccgucuu

SEQ ID NO: 9014 - RNA, 22 nt, Homo sapiens
ucaggcucaguccccucccgau

SEQ ID NO: 9015 - RNA, 22 nt, Homo sapiens
agacuucccauuugaagguggc

SEQ ID NO: 9016 - RNA, 23 nt, Homo sapiens
acuugggcacugaaacaaugucc

SEQ ID NO: 9017 - RNA, 21 nt, Homo sapiens
uggaggagaaggaaggugaug

SEQ ID NO: 9018 - RNA, 21 nt, Homo sapiens
uaaagugcugacagugcagau

SEQ ID NO: 9019 - RNA, 22 nt, Homo sapiens
acgcccuucccccccuucuuca

SEQ ID NO: 9020 - RNA, 18 nt, Homo sapiens
uccagugcccuccucucc

SEQ ID NO: 9021 - RNA, 22 nt, Homo sapiens
uccagcaucagugauuuuguug

SEQ ID NO: 9022 - RNA, 22 nt, Homo sapiens
cacgcucaugcacacacccaca

SEQ ID NO: 9023 - RNA, 22 nt, Homo sapiens
ugugcgcagggagaccucuccc

SEQ ID NO: 9024 - RNA, 23 nt, Homo sapiens
cacccggcugugugcacaugugc

SEQ ID NO: 9025 - RNA, 23 nt, Homo sapiens
agcagcauuguacagggcuauga

SEQ ID NO: 9026 - RNA, 23 nt, Homo sapiens
agcagcauuguacagggcuauca

SEQ ID NO: 9027 - RNA, 21 nt, Homo sapiens
aagcauucuuucauugguugg

SEQ ID NO: 9028 - RNA, 22 nt, Homo sapiens
ugagccccugugccgcccccag

SEQ ID NO: 9029 - RNA, 22 nt, Homo sapiens
caaagaauucuccuuuugggcu

SEQ ID NO: 9030 - RNA, 22 nt, Homo sapiens
uggcucaguucagcaggaacag

SEQ ID NO: 9031 - RNA, 22 nt, Homo sapiens
gaaagcgcuucccuuugcugga

SEQ ID NO: 9032 - RNA, 22 nt, Homo sapiens
caaagcgcuccccuuuagaggu

SEQ ID NO: 9033 - RNA, 23 nt, Homo sapiens
caaagcgcuucucuuuagagugu

SEQ ID NO: 9034 - RNA, 21 nt, Homo sapiens
caaagcgcuucccuuuggagc

SEQ ID NO: 9035 - RNA, 21 nt, Homo sapiens
aaagcgcuucccuucagagug

SEQ ID NO: 9036 - RNA, 21 nt, Homo sapiens
aaagcgcuucccuucagagug

SEQ ID NO: 9037 - RNA, 21 nt, Homo sapiens
gaaagcgcuucucuuuagagg

SEQ ID NO: 9038 - RNA, 19 nt, Homo sapiens
ugagcugcuguaccaaaau

SEQ ID NO: 9039 - RNA, 21 nt, Homo sapiens
cuucuugugcucuaggauugu

SEQ ID NO: 9040 - RNA, 19 nt, Homo sapiens
aagcagcugccucugaggc

SEQ ID NO: 9041 - RNA, 21 nt, Homo sapiens
uacucaaaaagcugucaguca

SEQ ID NO: 9042 - RNA, 20 nt, Homo sapiens
ugagcccuguccucccgcag

SEQ ID NO: 9043 - RNA, 18 nt, Homo sapiens
aucccaccucugccacca

SEQ ID NO: 9044 - RNA, 22 nt, Homo sapiens
ucugggcaacaaagugagaccu

SEQ ID NO: 9045 - RNA, 22 nt, Homo sapiens
uguaaacauccuacacucagcu

SEQ ID NO: 9046 - RNA, 21 nt, Homo sapiens
acuggacuuggagucagaagg

SEQ ID NO: 9047 - RNA, 22 nt, Homo sapiens
acuggacuuagggucagaaggc

SEQ ID NO: 9048 - RNA, 22 nt, Homo sapiens
ccucccacacccaaggcuugca

SEQ ID NO: 9049 - RNA, 23 nt, Homo sapiens
gacacgggcgacagcugcggccc

SEQ ID NO: 9050 - RNA, 25 nt, Homo sapiens
gcugggcagggcuucugagcuccuu

SEQ ID NO: 9051 - RNA, 22 nt, Homo sapiens
agacuucccauuugaagguggc

SEQ ID NO: 9052 - RNA, 20 nt, Homo sapiens
ggggagcuguggaagcagua

SEQ ID NO: 9053 - RNA, 21 nt, Homo sapiens
cauaaaguagaaagcacuacu

SEQ ID NO: 9054 - RNA, 23 nt, Homo sapiens
uaaggugcaucuagugcagauag

SEQ ID NO: 9055 - RNA, 23 nt, Homo sapiens
cuguaauauaaauuuaauuuauu

SEQ ID NO: 9056 - RNA, 23 nt, Homo sapiens
uagugcaauauugcuuauagggu

SEQ ID NO: 9057 - RNA, 21 nt, Homo sapiens
gugucuuuugcucugcaguca

SEQ ID NO: 9058 - RNA, 22 nt, Homo sapiens
aaaaguauuugcggguuuuguc

SEQ ID NO: 9059 - RNA, 22 nt, Homo sapiens
acaguagagggaggaaucgcag

SEQ ID NO: 9060 - RNA, 23 nt, Homo sapiens
cggcccgggcugcugcuguuccu

SEQ ID NO: 9061 - RNA, 22 nt, Homo sapiens
ugagaaccacgucugcucugag

SEQ ID NO: 9062 - RNA, 21 nt, Homo sapiens
ccgucgccgccacccgagccg

SEQ ID NO: 9063 - RNA, 21 nt, Homo sapiens
cccggagccaggaugcagcuc

SEQ ID NO: 9064 - RNA, 17 nt, Homo sapiens
ucgccuccuccucuccc

SEQ ID NO: 9065 - RNA, 21 nt, Homo sapiens
cggcggggacggcgauugguc

SEQ ID NO: 9066 - RNA, 21 nt, Homo sapiens
gccccugggccuauccuagaa

SEQ ID NO: 9067 - RNA, 23 nt, Homo sapiens
ugaggggcagagagcgagacuuu

SEQ ID NO: 9068 - RNA, 22 nt, Homo sapiens
uccgagccugggucucccucuu

SEQ ID NO: 9069 - RNA, 22 nt, Homo sapiens
aggcggggcgccgcgggaccgc

SEQ ID NO: 9070 - RNA, 17 nt, Homo sapiens
ucucgcuggggccucca

SEQ ID NO: 9071 - RNA, 22 nt, Homo sapiens
ugcggggcuagggcuaacagca

SEQ ID NO: 9072 - RNA, 23 nt, Homo sapiens
uggaguccaggaaucugcauuuu

SEQ ID NO: 9073 - RNA, 18 nt, Homo sapiens
ugaggcaguagauugaau

SEQ ID NO: 9074 - RNA, 22 nt, Homo sapiens
cccugugcccggcccacuucug

SEQ ID NO: 9075 - RNA, 20 nt, Homo sapiens
ccuccugcccuccuugcugu

SEQ ID NO: 9076 - RNA, 21 nt, Homo sapiens
aggggugcuaucugugauuga

SEQ ID NO: 9077 - RNA, 22 nt, Homo sapiens
uggcagugucuuagcugguugu

SEQ ID NO: 9078 - RNA, 22 nt, Homo sapiens
caaucacuaacuccacugccau

SEQ ID NO: 9079 - RNA, 23 nt, Homo sapiens
aggcaguguaguuagcugauugc

SEQ ID NO: 9080 - RNA, 22 nt, Homo sapiens
uggcaguguauuguuagcuggu

SEQ ID NO: 9081 - RNA, 22 nt, Homo sapiens
aggcaguguauuguuagcuggc

SEQ ID NO: 9082 - RNA, 21 nt, Homo sapiens
aggaggcagcgcucucaggac

SEQ ID NO: 9083 - RNA, 20 nt, Homo sapiens
ucugcaggguuugcuuugag

SEQ ID NO: 9084 - RNA, 22 nt, Homo sapiens
ucggauccgucugagcuuggcu

SEQ ID NO: 9085 - RNA, 18 nt, Homo sapiens
cagggaggugaaugugau

SEQ ID NO: 9086 - RNA, 23 nt, Homo sapiens
ucuggcuccgugucuucacuccc

SEQ ID NO: 9087 - RNA, 21 nt, Homo sapiens
cggcggggacggcgauugguc

SEQ ID NO: 9088 - RNA, 23 nt, Homo sapiens
gcaaagcacacggccugcagaga

SEQ ID NO: 9089 - RNA, 22 nt, Homo sapiens
uuauaaagcaaugagacugauu

SEQ ID NO: 9090 - RNA, 22 nt, Homo sapiens
aagacgggaggaaagaagggag

SEQ ID NO: 9091 - RNA, 22 nt, Homo sapiens
aguggggaacccuuccaugagg

SEQ ID NO: 9092 - RNA, 19 nt, Homo sapiens
aggcugcggaauucaggac

SEQ ID NO: 9093 - RNA, 19 nt, Homo sapiens
ucuaggcugguacugcuga

SEQ ID NO: 9094 - RNA, 22 nt, Homo sapiens
aggcggggcgccgcgggaccgc

SEQ ID NO: 9095 - RNA, 21 nt, Homo sapiens
uggaggagaaggaaggugaug

SEQ ID NO: 9096 - RNA, 22 nt, Homo sapiens
uggugguuuacaaaguaauuca

SEQ ID NO: 9097 - RNA, 22 nt, Homo sapiens
aacccguagauccgaacuugug

SEQ ID NO: 9098 - RNA, 22 nt, Homo sapiens
uggagugugacaaugguguuug

SEQ ID NO: 9099 - RNA, 23 nt, Homo sapiens
ucuggcuccgugucuucacuccc

SEQ ID NO: 9100 - RNA, 21 nt, Homo sapiens
cggcggggacggcgauugguc

SEQ ID NO: 9101 - RNA, 21 nt, Homo sapiens
ccaguccugugccugccgccu

SEQ ID NO: 9102 - RNA, 25 nt, Homo sapiens
cccccacaaccgcgcuugacuagcu

SEQ ID NO: 9103 - RNA, 21 nt, Homo sapiens
gccccugggccuauccuagaa

SEQ ID NO: 9104 - RNA, 22 nt, Homo sapiens
aguggggaacccuuccaugagg

SEQ ID NO: 9105 - RNA, 22 nt, Homo sapiens
aggcggggcgccgcgggaccgc

SEQ ID NO: 9106 - RNA, 22 nt, Homo sapiens
ccucuuccccuugucucuccag

SEQ ID NO: 9107 - RNA, 22 nt, Homo sapiens
augggugaauuuguagaaggau

SEQ ID NO: 9108 - RNA, 17 nt, Homo sapiens
gugggggagaggcuguc

SEQ ID NO: 9109 - RNA, 18 nt, Homo sapiens
ugaggcaguagauugaau

SEQ ID NO: 9110 - RNA, 23 nt, Homo sapiens
uaaggugcaucuagugcagauag

SEQ ID NO: 9111 - RNA, 23 nt, Homo sapiens
uaaggugcaucuagugcaguuag

SEQ ID NO: 9112 - RNA, 23 nt, Homo sapiens
ugucugcccgcaugccugccucu

SEQ ID NO: 9113 - RNA, 22 nt, Homo sapiens
caaucacuaacuccacugccau

SEQ ID NO: 9114 - RNA, 22 nt, Homo sapiens
uugcauauguaggaugucccau

SEQ ID NO: 9115 - RNA, 23 nt, Homo sapiens
uaauccuugcuaccugggugaga

SEQ ID NO: 9116 - RNA, 22 nt, Homo sapiens
aaugcacccgggcaaggauucu

SEQ ID NO: 9117 - RNA, 22 nt, Homo sapiens
aaugcaccugggcaaggauuca

SEQ ID NO: 9118 - RNA, 24 nt, Homo sapiens
gaccuggacauguuugugcccagu

SEQ ID NO: 9119 - RNA, 21 nt, Homo sapiens
agaccuggcccagaccucagc

SEQ ID NO: 9120 - RNA, 21 nt, Homo sapiens
ccuggaaacacugagguugug

SEQ ID NO: 9121 - RNA, 21 nt, Homo sapiens
agaggauacccuuuguauguu

SEQ ID NO: 9122 - RNA, 21 nt, Homo sapiens
uggcagggaggcugggagggg

SEQ ID NO: 9123 - RNA, 22 nt, Homo sapiens
acaggugagguucuugggagcc

SEQ ID NO: 9124 - RNA, 24 nt, Homo sapiens
ccagacagaauucuaugcacuuuc

SEQ ID NO: 9125 - RNA, 22 nt, Homo sapiens
ucugcccccuccgcugcugcca

SEQ ID NO: 9126 - RNA, 22 nt, Homo sapiens
uguaacagcaacuccaugugga

SEQ ID NO: 9127 - RNA, 22 nt, Homo sapiens
uguaaacauccucgacuggaag

SEQ ID NO: 9128 - RNA, 22 nt, Homo sapiens
uguaaacauccuacacucagcu

SEQ ID NO: 9129 - RNA, 23 nt, Homo sapiens
uguaaacauccuacacucucagc

SEQ ID NO: 9130 - RNA, 22 nt, Homo sapiens
uguaaacauccccgacuggaag

SEQ ID NO: 9131 - RNA, 22 nt, Homo sapiens
uguaaacauccuugacuggaag

SEQ ID NO: 9132 - RNA, 20 nt, Homo sapiens
acugccccaggugcugcugg

SEQ ID NO: 9133 - RNA, 23 nt, Homo sapiens
ucccuguccuccaggagcucacg

SEQ ID NO: 9134 - RNA, 23 nt, Homo sapiens
ucuuggaguaggucauugggugg

SEQ ID NO: 9135 - RNA, 21 nt, Homo sapiens
cggggcagcucaguacaggau

SEQ ID NO: 9136 - RNA, 25 nt, Homo sapiens
aggggugguguugggacagcuccgu

SEQ ID NO: 9137 - RNA, 22 nt, Homo sapiens
acuccagccccacagccucagc

SEQ ID NO: 9138 - RNA, 18 nt, Homo sapiens
aucccaccucugccacca

SEQ ID NO: 9139 - RNA, 22 nt, Homo sapiens
ugagaacugaauuccauggguu

SEQ ID NO: 9140 - RNA, 22 nt, Homo sapiens
ugagaacugaauuccauaggcu

SEQ ID NO: 9141 - RNA, 22 nt, Homo sapiens
gugugcggaaaugcuucugcua

SEQ ID NO: 9142 - RNA, 23 nt, Homo sapiens
ucccccaggugugauucugauuu

SEQ ID NO: 9143 - RNA, 25 nt, Homo sapiens
aggggugguguugggacagcuccgu

SEQ ID NO: 9144 - RNA, 24 nt, Homo sapiens
acugggggcuuucgggcucugcgu

SEQ ID NO: 9145 - RNA, 21 nt, Homo sapiens
ucguggccuggucuccauuau

SEQ ID NO: 9146 - RNA, 20 nt, Homo sapiens
ucugcaggguuugcuuugag

SEQ ID NO: 9147 - RNA, 20 nt, Homo sapiens
ucugcaggguuugcuuugag

SEQ ID NO: 9148 - RNA, 23 nt, Homo sapiens
ugaguaccgccaugucuguuggg

SEQ ID NO: 9149 - RNA, 22 nt, Homo sapiens
aacuggccuacaaagucccagu

SEQ ID NO: 9150 - RNA, 22 nt, Homo sapiens
aacuggcccucaaagucccgcu

SEQ ID NO: 9151 - RNA, 22 nt, Homo sapiens
gguggcccggccgugccugagg

SEQ ID NO: 9152 - RNA, 20 nt, Homo sapiens
accaggaggcugaggccccu

SEQ ID NO: 9153 - RNA, 22 nt, Homo sapiens
uagcagcacauaaugguuugug

SEQ ID NO: 9154 - RNA, 22 nt, Homo sapiens
uagcagcacaucaugguuuaca

SEQ ID NO: 9155 - RNA, 22 nt, Homo sapiens
uagcagcacguaaauauuggcg

SEQ ID NO: 9156 - RNA, 23 nt, Homo sapiens
uaaggugcaucuagugcagauag

SEQ ID NO: 9157 - RNA, 21 nt, Homo sapiens
uagcagcacagaaauauuggc

SEQ ID NO: 9158 - RNA, 20 nt, Homo sapiens
ccuccugcccuccuugcugu

SEQ ID NO: 9159 - RNA, 22 nt, Homo sapiens
acagcaggcacagacaggcagu

SEQ ID NO: 9160 - RNA, 22 nt, Homo sapiens
cauugcacuugucucggucuga

SEQ ID NO: 9161 - RNA, 22 nt, Homo sapiens
gccugcugggguggaaccuggu

SEQ ID NO: 9162 - RNA, 22 nt, Homo sapiens
cagcagcaauucauguuuugaa

SEQ ID NO: 9163 - RNA, 21 nt, Homo sapiens
cagcagcacacugugguuugu

SEQ ID NO: 9164 - RNA, 23 nt, Homo sapiens
aucgcugcgguugcgagcgcugu

SEQ ID NO: 9165 - RNA, 25 nt, Homo sapiens
ggcggagggaaguagguccguuggu

SEQ ID NO: 9166 - RNA, 21 nt, Homo sapiens
uggaggagaaggaaggugaug

SEQ ID NO: 9167 - RNA, 22 nt, Homo sapiens
aggcagcgggguguaguggaua

SEQ ID NO: 9168 - RNA, 22 nt, Homo sapiens
auccgcgcucugacucucugcc

SEQ ID NO: 9169 - RNA, 23 nt, Homo sapiens
aaaagugcuuacagugcagguag

SEQ ID NO: 9170 - RNA, 22 nt, Homo sapiens
cuccugagccauucugagccuc

SEQ ID NO: 9171 - RNA, 18 nt, Homo sapiens
cgggcguggugguggggg

SEQ ID NO: 9172 - RNA, 23 nt, Homo sapiens
uuauugcuuaagaauacgcguag

SEQ ID NO: 9173 - RNA, 23 nt, Homo sapiens
uaaggugcaucuagugcaguuag

SEQ ID NO: 9174 - RNA, 23 nt, Homo sapiens
ugugcaaaucuaugcaaaacuga

SEQ ID NO: 9175 - RNA, 22 nt, Homo sapiens
aacaauauccuggugcugagug

SEQ ID NO: 9176 - RNA, 22 nt, Homo sapiens
agagguaguagguugcauaguu

SEQ ID NO: 9177 - RNA, 21 nt, Homo sapiens
agaccuggcccagaccucagc

SEQ ID NO: 9178 - RNA, 22 nt, Homo sapiens
uggagagaaaggcaguuccuga

SEQ ID NO: 9179 - RNA, 21 nt, Homo sapiens
cggcggggacggcgauugguc

SEQ ID NO: 9180 - RNA, 21 nt, Homo sapiens
cggcggggacggcgauugguc

SEQ ID NO: 9181 - RNA, 22 nt, Homo sapiens
cgcaggggccgggugcucaccg

SEQ ID NO: 9182 - RNA, 21 nt, Homo sapiens
ccacaccguaucugacacuuu

SEQ ID NO: 9183 - RNA, 23 nt, Homo sapiens
aucaacagacauuaauugggcgc

SEQ ID NO: 9184 - RNA, 22 nt, Homo sapiens
cauugcacuugucucggucuga

SEQ ID NO: 9185 - RNA, 23 nt, Homo sapiens
cgcauccccuagggcauuggugu

SEQ ID NO: 9186 - RNA, 23 nt, Homo sapiens
ucccccaggugugauucugauuu

SEQ ID NO: 9187 - RNA, 22 nt, Homo sapiens
agaggcuggccgugaugaauuc

SEQ ID NO: 9188 - RNA, 22 nt, Homo sapiens
cgucaacacuugcugguuuccu

SEQ ID NO: 9189 - RNA, 24 nt, Homo sapiens
acugggggcuuucgggcucugcgu

SEQ ID NO: 9190 - RNA, 22 nt, Homo sapiens
aggcggggcgccgcgggaccgc

SEQ ID NO: 9191 - RNA, 22 nt, Homo sapiens
aggcggggcgccgcgggaccgc

SEQ ID NO: 9192 - RNA, 22 nt, Homo sapiens
ugugcgcagggagaccucuccc

SEQ ID NO: 9193 - RNA, 21 nt, Homo sapiens
uucacaguggcuaaguuccgc

SEQ ID NO: 9194 - RNA, 22 nt, Homo sapiens
aaggagcucacagucuauugag

SEQ ID NO: 9195 - RNA, 21 nt, Homo sapiens
cagcagcacacugugguuugu

SEQ ID NO: 9196 - RNA, 22 nt, Homo sapiens
ucagcaaacauuuauugugugc

SEQ ID NO: 9197 - RNA, 21 nt, Homo sapiens
ugagcuaaaugugugcuggga

SEQ ID NO: 9198 - RNA, 23 nt, Homo sapiens
aaggagcuuacaaucuagcuggg

SEQ ID NO: 9199 - RNA, 21 nt, Homo sapiens
uggaggagaaggaaggugaug

SEQ ID NO: 9200 - RNA, 22 nt, Homo sapiens
uggugguuuacaaaguaauuca

SEQ ID NO: 9201 - RNA, 21 nt, Homo sapiens
ccccaccuccucucuccucag

SEQ ID NO: 9202 - RNA, 22 nt, Homo sapiens
uggagugugacaaugguguuug

SEQ ID NO: 9203 - RNA, 22 nt, Homo sapiens
acccgucccguucguccccgga

SEQ ID NO: 9204 - RNA, 18 nt, Homo sapiens
aucccaccucugccacca

SEQ ID NO: 9205 - RNA, 23 nt, Homo sapiens
ucuggcuccgugucuucacuccc

SEQ ID NO: 9206 - RNA, 23 nt, Homo sapiens
uaaggugcaucuagugcagauag

SEQ ID NO: 9207 - RNA, 21 nt, Homo sapiens
cggcggggacggcgauugguc

SEQ ID NO: 9208 - RNA, 22 nt, Homo sapiens
cauugcacuugucucggucuga

SEQ ID NO: 9209 - RNA, 21 nt, Homo sapiens
agggcccccccucaauccugu

SEQ ID NO: 9210 - RNA, 21 nt, Homo sapiens
agggcccccccucaauccugu

SEQ ID NO: 9211 - RNA, 22 nt, Homo sapiens
uguaaacauccuacacucagcu

SEQ ID NO: 9212 - RNA, 23 nt, Homo sapiens
ucccccaggugugauucugauuu

SEQ ID NO: 9213 - RNA, 23 nt, Homo sapiens
ugaggggcagagagcgagacuuu

SEQ ID NO: 9214 - RNA, 23 nt, Homo sapiens
ugaggggcagagagcgagacuuu

SEQ ID NO: 9215 - RNA, 22 nt, Homo sapiens
ccucccacacccaaggcuugca

SEQ ID NO: 9216 - RNA, 24 nt, Homo sapiens
acugggggcuuucgggcucugcgu

SEQ ID NO: 9217 - RNA, 25 nt, Homo sapiens
ggcggagggaaguagguccguuggu

SEQ ID NO: 9218 - RNA, 24 nt, Homo sapiens
ugccugggucucuggccugcgcgu

SEQ ID NO: 9219 - RNA, 22 nt, Homo sapiens
aggcggggcgccgcgggaccgc

SEQ ID NO: 9220 - RNA, 22 nt, Homo sapiens
ugcggggcuagggcuaacagca

SEQ ID NO: 9221 - RNA, 21 nt, Homo sapiens
uggaggagaaggaaggugaug

SEQ ID NO: 9222 - RNA, 21 nt, Homo sapiens
agaggauacccuuuguauguu

SEQ ID NO: 9223 - RNA, 22 nt, Homo sapiens
ucguaccgugaguaauaaugcg

SEQ ID NO: 9224 - RNA, 22 nt, Homo sapiens
cucccacugcuucacuugacua

SEQ ID NO: 9225 - RNA, 23 nt, Homo sapiens
gaagugcuucgauuuuggggugu

SEQ ID NO: 9226 - RNA, 22 nt, Homo sapiens
agucauuggaggguuugagcag

SEQ ID NO: 9227 - RNA, 23 nt, Homo sapiens
aaggagcuuacaaucuagcuggg

SEQ ID NO: 9228 - RNA, 22 nt, Homo sapiens
guggguacggcccagugggggg

SEQ ID NO: 9229 - RNA, 17 nt, Homo sapiens
ucauauugcuucuuucu

SEQ ID NO: 9230 - RNA, 22 nt, Homo sapiens
ugagaacugaauuccauggguu

SEQ ID NO: 9231 - RNA, 22 nt, Homo sapiens
uagcagcacaucaugguuuaca

SEQ ID NO: 9232 - RNA, 22 nt, Homo sapiens
ucaggccaggcacaguggcuca

SEQ ID NO: 9233 - RNA, 23 nt, Homo sapiens
uaaagugcuuauagugcagguag

SEQ ID NO: 9234 - RNA, 19 nt, Homo sapiens
gugucugcuuccuguggga

SEQ ID NO: 9235 - RNA, 24 nt, Homo sapiens
ugccugggucucuggccugcgcgu

SEQ ID NO: 9236 - RNA, 23 nt, Homo sapiens
ucuuugguuaucuagcuguauga

SEQ ID NO: 9237 - RNA, 22 nt, Homo sapiens
ucaccagcccuguguucccuag

SEQ ID NO: 9238 - RNA, 23 nt, Homo sapiens
agcugguguugugaaucaggccg

SEQ ID NO: 9239 - RNA, 21 nt, Homo sapiens
ccaguccugugccugccgccu

SEQ ID NO: 9240 - RNA, 22 nt, Homo sapiens
uacccagagcaugcagugugaa

SEQ ID NO: 9241 - RNA, 20 nt, Homo sapiens
auuccuagaaauuguucaua

SEQ ID NO: 9242 - RNA, 22 nt, Homo sapiens
ugaaggucuacugugugccagg

SEQ ID NO: 9243 - RNA, 22 nt, Homo sapiens
uggugggcacagaaucuggacu

SEQ ID NO: 9244 - RNA, 22 nt, Homo sapiens
uggugggcacagaaucuggacu

SEQ ID NO: 9245 - RNA, 19 nt, Homo sapiens
aggcugcggaauucaggac

SEQ ID NO: 9246 - RNA, 22 nt, Homo sapiens
uggugggccgcagaacaugugc

SEQ ID NO: 9247 - RNA, 22 nt, Homo sapiens
uggugggccgcagaacaugugc

SEQ ID NO: 9248 - RNA, 21 nt, Homo sapiens
uggacugcccugaucuggaga

SEQ ID NO: 9249 - RNA, 22 nt, Homo sapiens
uggguggucuggagauuugugc

SEQ ID NO: 9250 - RNA, 22 nt, Homo sapiens
acucggcguggcgucggucgug

SEQ ID NO: 9251 - RNA, 19 nt, Homo sapiens
gaugaugcugcugaugcug

SEQ ID NO: 9252 - RNA, 22 nt, Homo sapiens
cucggcgcggggcgcgggcucc

SEQ ID NO: 9253 - RNA, 21 nt, Homo sapiens
ccaguccugugccugccgccu

SEQ ID NO: 9254 - RNA, 22 nt, Homo sapiens
ucaggccaggcacaguggcuca

SEQ ID NO: 9255 - RNA, 21 nt, Homo sapiens
ccaccaccgugucugacacuu

SEQ ID NO: 9256 - RNA, 22 nt, Homo sapiens
uggcucaguucagcaggaacag

SEQ ID NO: 9257 - RNA, 22 nt, Homo sapiens
uagcaccaucugaaaucgguua

SEQ ID NO: 9258 - RNA, 23 nt, Homo sapiens
uagcaccauuugaaaucaguguu

SEQ ID NO: 9259 - RNA, 22 nt, Homo sapiens
uagcaccauuugaaaucgguua

SEQ ID NO: 9260 - RNA, 22 nt, Homo sapiens
uggcagugucuuagcugguugu

SEQ ID NO: 9261 - RNA, 22 nt, Homo sapiens
caaucacuaacuccacugccau

SEQ ID NO: 9262 - RNA, 22 nt, Homo sapiens
ucaggcucaguccccucccgau

SEQ ID NO: 9263 - RNA, 25 nt, Homo sapiens
aggggugguguugggacagcuccgu

SEQ ID NO: 9264 - RNA, 21 nt, Homo sapiens
guggcugcacucacuuccuuc

SEQ ID NO: 9265 - RNA, 21 nt, Homo sapiens
aaggcagggcccccgcucccc

SEQ ID NO: 9266 - RNA, 22 nt, Homo sapiens
uggagugugacaaugguguuug

SEQ ID NO: 9267 - RNA, 23 nt, Homo sapiens
cucucaccacugcccucccacag

SEQ ID NO: 9268 - RNA, 17 nt, Homo sapiens
ucgccuccuccucuccc

SEQ ID NO: 9269 - RNA, 21 nt, Homo sapiens
ucgaggagcucacagucuagu

SEQ ID NO: 9270 - RNA, 21 nt, Homo sapiens
cggcggggacggcgauugguc

SEQ ID NO: 9271 - RNA, 22 nt, Homo sapiens
cccugugcccggcccacuucug

SEQ ID NO: 9272 - RNA, 22 nt, Homo sapiens
uggugggcacagaaucuggacu

SEQ ID NO: 9273 - RNA, 25 nt, Homo sapiens
aggggugguguugggacagcuccgu

SEQ ID NO: 9274 - RNA, 22 nt, Homo sapiens
uggugggccgcagaacaugugc

SEQ ID NO: 9275 - RNA, 22 nt, Homo sapiens
aggcggggcgccgcgggaccgc

SEQ ID NO: 9276 - RNA, 21 nt, Homo sapiens
uggaggagaaggaaggugaug

SEQ ID NO: 9277 - RNA, 20 nt, Homo sapiens
ggggagcuguggaagcagua

SEQ ID NO: 9278 - RNA, 17 nt, Homo sapiens
ucccaccgcugccaccc

SEQ ID NO: 9279 - RNA, 23 nt, Homo sapiens
ucuggcuccgugucuucacuccc

SEQ ID NO: 9280 - RNA, 22 nt, Homo sapiens
uggagagaaaggcaguuccuga

SEQ ID NO: 9281 - RNA, 21 nt, Homo sapiens
cggcggggacggcgauugguc

SEQ ID NO: 9282 - RNA, 21 nt, Homo sapiens
cggcggggacggcgauugguc

SEQ ID NO: 9283 - RNA, 22 nt, Homo sapiens
cccugugcccggcccacuucug

SEQ ID NO: 9284 - RNA, 22 nt, Homo sapiens
aaaaguaauugcggauuuugcc

SEQ ID NO: 9285 - RNA, 22 nt, Homo sapiens
cauugcacuugucucggucuga

SEQ ID NO: 9286 - RNA, 21 nt, Homo sapiens
aggggugcuaucugugauuga

SEQ ID NO: 9287 - RNA, 22 nt, Homo sapiens
aguggggaacccuuccaugagg

SEQ ID NO: 9288 - RNA, 22 nt, Homo sapiens
aggcggggcgccgcgggaccgc

SEQ ID NO: 9289 - RNA, 22 nt, Homo sapiens
aggcggggcgccgcgggaccgc

SEQ ID NO: 9290 - RNA, 23 nt, Homo sapiens
uggugcggagagggcccacagug

SEQ ID NO: 9291 - RNA, 22 nt, Homo sapiens
ugcggggcuagggcuaacagca

SEQ ID NO: 9292 - RNA, 22 nt, Homo sapiens
ugcggggcuagggcuaacagca

SEQ ID NO: 9293 - RNA, 20 nt, Homo sapiens
ggggagcuguggaagcagua

SEQ ID NO: 9294 - RNA, 22 nt, Homo sapiens
aaaucucugcaggcaaauguga

SEQ ID NO: 9295 - RNA, 21 nt, Homo sapiens
ugacaacuauggaugagcucu

SEQ ID NO: 9296 - RNA, 21 nt, Homo sapiens
uugaaaggcuauuucuugguc

SEQ ID NO: 9297 - RNA, 21 nt, Homo sapiens
ugagcuaaaugugugcuggga

SEQ ID NO: 9298 - RNA, 22 nt, Homo sapiens
gucccucuccaaaugugucuug

SEQ ID NO: 9299 - RNA, 21 nt, Homo sapiens
uggaggagaaggaaggugaug

SEQ ID NO: 9300 - RNA, 24 nt, Homo sapiens
uggggagcugaggcucugggggug

SEQ ID NO: 9301 - RNA, 22 nt, Homo sapiens
uggagugugacaaugguguuug

SEQ ID NO: 9302 - RNA, 22 nt, Homo sapiens
ugcccuguggacucaguucugg

SEQ ID NO: 9303 - RNA, 21 nt, Homo sapiens
cggcggggacggcgauugguc

SEQ ID NO: 9304 - RNA, 22 nt, Homo sapiens
cccugugcccggcccacuucug

SEQ ID NO: 9305 - RNA, 22 nt, Homo sapiens
ucaggccaggcacaguggcuca

SEQ ID NO: 9306 - RNA, 22 nt, Homo sapiens
uguaaacauccuacacucagcu

SEQ ID NO: 9307 - RNA, 22 nt, Homo sapiens
caaaacuggcaauuacuuuugc

SEQ ID NO: 9308 - RNA, 22 nt, Homo sapiens
aaaaacugagacuacuuuugca

SEQ ID NO: 9309 - RNA, 19 nt, Homo sapiens
aaaaacuguaauuacuuuu

SEQ ID NO: 9310 - RNA, 25 nt, Homo sapiens
aggggugguguugggacagcuccgu

SEQ ID NO: 9311 - RNA, 22 nt, Homo sapiens
aggcggggcgccgcgggaccgc

SEQ ID NO: 9312 - RNA, 22 nt, Homo sapiens
ugcggggcuagggcuaacagca

SEQ ID NO: 9313 - RNA, 23 nt, Homo sapiens
cacccggcugugugcacaugugc

SEQ ID NO: 9314 - RNA, 23 nt, Homo sapiens
uggaguccaggaaucugcauuuu

SEQ ID NO: 9315 - RNA, 24 nt, Homo sapiens
cugaagugauguguaacugaucag

SEQ ID NO: 9316 - RNA, 23 nt, Homo sapiens
caguaacaaagauucauccuugu

SEQ ID NO: 9317 - RNA, 21 nt, Homo sapiens
uggacugcccugaucuggaga

SEQ ID NO: 9318 - RNA, 18 nt, Homo sapiens
gcaugggugguucagugg

SEQ ID NO: 9319 - RNA, 22 nt, Homo sapiens
ugauauguuugauauauuaggu

SEQ ID NO: 9320 - RNA, 21 nt, Homo sapiens
aucacauugccagggauuucc

SEQ ID NO: 9321 - RNA, 21 nt, Homo sapiens
aucacauugccagggauuacc

SEQ ID NO: 9322 - RNA, 20 nt, Homo sapiens
ccucugggcccuuccuccag

SEQ ID NO: 9323 - RNA, 22 nt, Homo sapiens
ucucugggccugugucuuaggc

SEQ ID NO: 9324 - RNA, 22 nt, Homo sapiens
caaucacuaacuccacugccau

SEQ ID NO: 9325 - RNA, 23 nt, Homo sapiens
ucccccaggugugauucugauuu

SEQ ID NO: 9326 - RNA, 24 nt, Homo sapiens
acugggggcuuucgggcucugcgu

SEQ ID NO: 9327 - RNA, 18 nt, Homo sapiens
aucccaccucugccacca

SEQ ID NO: 9328 - RNA, 19 nt, Homo sapiens
gaugaugcugcugaugcug

SEQ ID NO: 9329 - RNA, 22 nt, Homo sapiens
cccugugcccggcccacuucug

SEQ ID NO: 9330 - RNA, 23 nt, Homo sapiens
caacggaaucccaaaagcagcug

SEQ ID NO: 9331 - RNA, 25 nt, Homo sapiens
aggggugguguugggacagcuccgu

SEQ ID NO: 9332 - RNA, 21 nt, Homo sapiens
agggggaaaguucuauagucc

SEQ ID NO: 9333 - RNA, 22 nt, Homo sapiens
caaagugccucccuuuagagug

SEQ ID NO: 9334 - RNA, 20 nt, Homo sapiens
ucacaccugccucgcccccc

SEQ ID NO: 9335 - RNA, 22 nt, Homo sapiens
cagugguuuuacccuaugguag

SEQ ID NO: 9336 - RNA, 21 nt, Homo sapiens
uugugcuugaucuaaccaugu

SEQ ID NO: 9337 - RNA, 20 nt, Homo sapiens
gugcauugcuguugcauugc

SEQ ID NO: 9338 - RNA, 23 nt, Homo sapiens
cacucagccuugagggcacuuuc

SEQ ID NO: 9339 - RNA, 22 nt, Homo sapiens
gagugccuucuuuuggagcguu

SEQ ID NO: 9340 - RNA, 22 nt, Homo sapiens
aagugccuccuuuuagaguguu

SEQ ID NO: 9341 - RNA, 23 nt, Homo sapiens
ugagugugugugugugagugugu

SEQ ID NO: 9342 - RNA, 22 nt, Homo sapiens
cacacacugcaauuacuuuugc

SEQ ID NO: 9343 - RNA, 25 nt, Homo sapiens
aggggugguguugggacagcuccgu

SEQ ID NO: 9344 - RNA, 22 nt, Homo sapiens
ugugcgcagggagaccucuccc

SEQ ID NO: 9345 - RNA, 23 nt, Homo sapiens
ucuggcuccgugucuucacuccc

SEQ ID NO: 9346 - RNA, 22 nt, Homo sapiens
cauugcacuugucucggucuga

SEQ ID NO: 9347 - RNA, 23 nt, Homo sapiens
ucccccaggugugauucugauuu

SEQ ID NO: 9348 - RNA, 22 nt, Homo sapiens
cgucaacacuugcugguuuccu

SEQ ID NO: 9349 - RNA, 23 nt, Homo sapiens
uucauuugguauaaaccgcgauu

SEQ ID NO: 9350 - RNA, 24 nt, Homo sapiens
acugggggcuuucgggcucugcgu

SEQ ID NO: 9351 - RNA, 22 nt, Homo sapiens
cuugguucagggagggucccca

SEQ ID NO: 9352 - RNA, 24 nt, Homo sapiens
ugccugggucucuggccugcgcgu

SEQ ID NO: 9353 - RNA, 20 nt, Homo sapiens
cggcucugggucugugggga

SEQ ID NO: 9354 - RNA, 21 nt, Homo sapiens
uggaggagaaggaaggugaug

SEQ ID NO: 9355 - RNA, 22 nt, Homo sapiens
uggguggucuggagauuugugc

SEQ ID NO: 9356 - RNA, 25 nt, Homo sapiens
aggggugguguugggacagcuccgu

SEQ ID NO: 9357 - RNA, 23 nt, Homo sapiens
uauucauuuauccccagccuaca

SEQ ID NO: 9358 - RNA, 22 nt, Homo sapiens
auccgcgcucugacucucugcc

SEQ ID NO: 9359 - RNA, 21 nt, Homo sapiens
ucguggccuggucuccauuau

SEQ ID NO: 9360 - RNA, 19 nt, Homo sapiens
gaugaugcugcugaugcug

SEQ ID NO: 9361 - RNA, 18 nt, Homo sapiens
cagggaggugaaugugau

SEQ ID NO: 9362 - RNA, 23 nt, Homo sapiens
ucuggcuccgugucuucacuccc

SEQ ID NO: 9363 - RNA, 23 nt, Homo sapiens
uaaggugcaucuagugcagauag

SEQ ID NO: 9364 - RNA, 22 nt, Homo sapiens
cccugugcccggcccacuucug

SEQ ID NO: 9365 - RNA, 20 nt, Homo sapiens
ccccagggcgacgcggcggg

SEQ ID NO: 9366 - RNA, 22 nt, Homo sapiens
aagcugccaguugaagaacugu

SEQ ID NO: 9367 - RNA, 22 nt, Homo sapiens
uguaaacauccuacacucagcu

SEQ ID NO: 9368 - RNA, 22 nt, Homo sapiens
cuggcccucucugcccuuccgu

SEQ ID NO: 9369 - RNA, 23 nt, Homo sapiens
agguuguccguggugaguucgca

SEQ ID NO: 9370 - RNA, 22 nt, Homo sapiens
aucuggagguaagaagcacuuu

SEQ ID NO: 9371 - RNA, 19 nt, Homo sapiens
ucuaggcugguacugcuga

SEQ ID NO: 9372 - RNA, 21 nt, Homo sapiens
uggaggagaaggaaggugaug

SEQ ID NO: 9373 - RNA, 21 nt, Homo sapiens
cccggagccaggaugcagcuc

SEQ ID NO: 9374 - RNA, 21 nt, Homo sapiens
cccggagccaggaugcagcuc

SEQ ID NO: 9375 - RNA, 21 nt, Homo sapiens
uggcagggaggcugggagggg

SEQ ID NO: 9376 - RNA, 22 nt, Homo sapiens
ugagccccugugccgcccccag

SEQ ID NO: 9377 - RNA, 17 nt, Homo sapiens
ucgccuccuccucuccc

SEQ ID NO: 9378 - RNA, 22 nt, Homo sapiens
ucugggcaacaaagugagaccu

SEQ ID NO: 9379 - RNA, 22 nt, Homo sapiens
uucauucggcuguccagaugua

SEQ ID NO: 9380 - RNA, 21 nt, Homo sapiens
cggcggggacggcgauugguc

SEQ ID NO: 9381 - RNA, 23 nt, Homo sapiens
ugaguaccgccaugucuguuggg

SEQ ID NO: 9382 - RNA, 23 nt, Homo sapiens
cccaguguucagacuaccuguuc

SEQ ID NO: 9383 - RNA, 23 nt, Homo sapiens
cccaguguuuagacuaucuguuc

SEQ ID NO: 9384 - RNA, 23 nt, Homo sapiens
aaugacacgaucacucccguuga

SEQ ID NO: 9385 - RNA, 22 nt, Homo sapiens
cgucaacacuugcugguuuccu

SEQ ID NO: 9386 - RNA, 23 nt, Homo sapiens
cacucagccuugagggcacuuuc

SEQ ID NO: 9387 - RNA, 19 nt, Homo sapiens
aggcacggugucagcaggc

SEQ ID NO: 9388 - RNA, 25 nt, Homo sapiens
gcugggcagggcuucugagcuccuu

SEQ ID NO: 9389 - RNA, 22 nt, Homo sapiens
aggcggggcgccgcgggaccgc

SEQ ID NO: 9390 - RNA, 22 nt, Homo sapiens
ugcggggcuagggcuaacagca

SEQ ID NO: 9391 - RNA, 21 nt, Homo sapiens
ccccaccuccucucuccucag

SEQ ID NO: 9392 - RNA, 21 nt, Homo sapiens
acggugcuggauguggccuuu

SEQ ID NO: 9393 - RNA, 22 nt, Homo sapiens
uucuggaauucugugugaggga

SEQ ID NO: 9394 - RNA, 19 nt, Homo sapiens
gaugaugcugcugaugcug

SEQ ID NO: 9395 - RNA, 23 nt, Homo sapiens
ucuggcuccgugucuucacuccc

SEQ ID NO: 9396 - RNA, 22 nt, Homo sapiens
uggagagaaaggcaguuccuga

SEQ ID NO: 9397 - RNA, 22 nt, Homo sapiens
uucaccaccuucuccacccagc

SEQ ID NO: 9398 - RNA, 23 nt, Homo sapiens
ucccccaggugugauucugauuu

SEQ ID NO: 9399 - RNA, 24 nt, Homo sapiens
acugggggcuuucgggcucugcgu

SEQ ID NO: 9400 - RNA, 20 nt, Homo sapiens
accaggaggcugaggccccu

SEQ ID NO: 9401 - RNA, 23 nt, Homo sapiens
aggaagcccuggaggggcuggag

SEQ ID NO: 9402 - RNA, 20 nt, Homo sapiens
ggggagcuguggaagcagua

SEQ ID NO: 9403 - RNA, 24 nt, Homo sapiens
uggggagcugaggcucugggggug

SEQ ID NO: 9404 - RNA, 22 nt, Homo sapiens
acucggcguggcgucggucgug

SEQ ID NO: 9405 - RNA, 18 nt, Homo sapiens
cagggaggugaaugugau

SEQ ID NO: 9406 - RNA, 21 nt, Homo sapiens
uggaggagaaggaaggugaug

SEQ ID NO: 9407 - RNA, 22 nt, Homo sapiens
ucuucucuguuuuggccaugug

SEQ ID NO: 9408 - RNA, 22 nt, Homo sapiens
uuugaggcuacagugagaugug

SEQ ID NO: 9409 - RNA, 23 nt, Homo sapiens
ucuggcuccgugucuucacuccc

SEQ ID NO: 9410 - RNA, 22 nt, Homo sapiens
ucugcccccuccgcugcugcca

SEQ ID NO: 9411 - RNA, 20 nt, Homo sapiens
acugccccaggugcugcugg

SEQ ID NO: 9412 - RNA, 21 nt, Homo sapiens
cggggcagcucaguacaggau

SEQ ID NO: 9413 - RNA, 19 nt, Homo sapiens
gggcgccugugaucccaac

SEQ ID NO: 9414 - RNA, 20 nt, Homo sapiens
agaccauggguucucauugu

SEQ ID NO: 9415 - RNA, 22 nt, Homo sapiens
uggagugugacaaugguguuug

SEQ ID NO: 9416 - RNA, 22 nt, Homo sapiens
ugagaccucuggguucugagcu

SEQ ID NO: 9417 - RNA, 22 nt, Homo sapiens
aggcagcgggguguaguggaua

SEQ ID NO: 9418 - RNA, 20 nt, Homo sapiens
ggggagcuguggaagcagua

SEQ ID NO: 9419 - RNA, 24 nt, Homo sapiens
uggggagcugaggcucugggggug

SEQ ID NO: 9420 - RNA, 22 nt, Homo sapiens
uuugaggcuacagugagaugug

SEQ ID NO: 9421 - RNA, 22 nt, Homo sapiens
ucugcccccuccgcugcugcca

SEQ ID NO: 9422 - RNA, 20 nt, Homo sapiens
acugccccaggugcugcugg

SEQ ID NO: 9423 - RNA, 21 nt, Homo sapiens
cggggcagcucaguacaggau

SEQ ID NO: 9424 - RNA, 22 nt, Homo sapiens
agacccuggucugcacucuauc

SEQ ID NO: 9425 - RNA, 21 nt, Homo sapiens
aggguaagcugaaccucugau

SEQ ID NO: 9426 - RNA, 19 nt, Homo sapiens
gggcgccugugaucccaac

SEQ ID NO: 9427 - RNA, 20 nt, Homo sapiens
agaccauggguucucauugu

SEQ ID NO: 9428 - RNA, 22 nt, Homo sapiens
uggagugugacaaugguguuug

SEQ ID NO: 9429 - RNA, 22 nt, Homo sapiens
aggcagcgggguguaguggaua

SEQ ID NO: 9430 - RNA, 23 nt, Homo sapiens
uacccuguagauccgaauuugug

SEQ ID NO: 9431 - RNA, 23 nt, Homo sapiens
uacccuguagaaccgaauuugug

SEQ ID NO: 9432 - RNA, 21 nt, Homo sapiens
uggcagggaggcugggagggg

SEQ ID NO: 9433 - RNA, 21 nt, Homo sapiens
ccccaccuccucucuccucag

SEQ ID NO: 9434 - RNA, 22 nt, Homo sapiens
ucugggcaacaaagugagaccu

SEQ ID NO: 9435 - RNA, 21 nt, Homo sapiens
cggcggggacggcgauugguc

SEQ ID NO: 9436 - RNA, 22 nt, Homo sapiens
cauugcacuugucucggucuga

SEQ ID NO: 9437 - RNA, 22 nt, Homo sapiens
aaaagcuggguugagagggcga

SEQ ID NO: 9438 - RNA, 22 nt, Homo sapiens
aaaagcuggguugagagggcaa

SEQ ID NO: 9439 - RNA, 20 nt, Homo sapiens
aaaagcuggguugagagggu

SEQ ID NO: 9440 - RNA, 19 nt, Homo sapiens
aaaagcuggguugagagga

SEQ ID NO: 9441 - RNA, 22 nt, Homo sapiens
uccuguacugagcugccccgag

SEQ ID NO: 9442 - RNA, 24 nt, Homo sapiens
cugaagugauguguaacugaucag

SEQ ID NO: 9443 - RNA, 25 nt, Homo sapiens
gcugggcagggcuucugagcuccuu

SEQ ID NO: 9444 - RNA, 22 nt, Homo sapiens
ugcggggcuagggcuaacagca

SEQ ID NO: 9445 - RNA, 20 nt, Homo sapiens
ggggagcuguggaagcagua

SEQ ID NO: 9446 - RNA, 22 nt, Homo sapiens
auccgcgcucugacucucugcc

SEQ ID NO: 9447 - RNA, 21 nt, Homo sapiens
ccccaccuccucucuccucag

SEQ ID NO: 9448 - RNA, 23 nt, Homo sapiens
ucuggcuccgugucuucacuccc

SEQ ID NO: 9449 - RNA, 22 nt, Homo sapiens
uggacggagaacugauaagggu

SEQ ID NO: 9450 - RNA, 21 nt, Homo sapiens
cggcggggacggcgauugguc

SEQ ID NO: 9451 - RNA, 23 nt, Homo sapiens
cgcauccccuagggcauuggugu

SEQ ID NO: 9452 - RNA, 23 nt, Homo sapiens
acuucaccugguccacuagccgu

SEQ ID NO: 9453 - RNA, 23 nt, Homo sapiens
ugaggggcagagagcgagacuuu

SEQ ID NO: 9454 - RNA, 23 nt, Homo sapiens
agguuguccguggugaguucgca

SEQ ID NO: 9455 - RNA, 22 nt, Homo sapiens
aguggggaacccuuccaugagg

SEQ ID NO: 9456 - RNA, 22 nt, Homo sapiens
aggcggggcgccgcgggaccgc

SEQ ID NO: 9457 - RNA, 23 nt, Homo sapiens
aggaagcccuggaggggcuggag

SEQ ID NO: 9458 - RNA, 22 nt, Homo sapiens
ugcggggcuagggcuaacagca

SEQ ID NO: 9459 - RNA, 21 nt, Homo sapiens
uacucaaaaagcugucaguca

SEQ ID NO: 9460 - RNA, 20 nt, Homo sapiens
ggggagcuguggaagcagua

SEQ ID NO: 9461 - RNA, 21 nt, Homo sapiens
uggcagggaggcugggagggg

SEQ ID NO: 9462 - RNA, 22 nt, Homo sapiens
ugagccccugugccgcccccag

SEQ ID NO: 9463 - RNA, 18 nt, Homo sapiens
uugagaaggaggcugcug

SEQ ID NO: 9464 - RNA, 23 nt, Homo sapiens
cggcccgggcugcugcuguuccu

SEQ ID NO: 9465 - RNA, 22 nt, Homo sapiens
uggagagaaaggcaguuccuga

SEQ ID NO: 9466 - RNA, 22 nt, Homo sapiens
caaagaauucuccuuuugggcu

SEQ ID NO: 9467 - RNA, 21 nt, Homo sapiens
cggcggggacggcgauugguc

SEQ ID NO: 9468 - RNA, 22 nt, Homo sapiens
uggcucaguucagcaggaacag

SEQ ID NO: 9469 - RNA, 22 nt, Homo sapiens
aauugcacgguauccaucugua

SEQ ID NO: 9470 - RNA, 23 nt, Homo sapiens
ugaggggcagagagcgagacuuu

SEQ ID NO: 9471 - RNA, 21 nt, Homo sapiens
guggcugcacucacuuccuuc

SEQ ID NO: 9472 - RNA, 22 nt, Homo sapiens
aggcggggcgccgcgggaccgc

SEQ ID NO: 9473 - RNA, 22 nt, Homo sapiens
ugcggggcuagggcuaacagca

SEQ ID NO: 9474 - RNA, 22 nt, Homo sapiens
acuccagccccacagccucagc

SEQ ID NO: 9475 - RNA, 21 nt, Homo sapiens
agugaaugauggguucugacc

SEQ ID NO: 9476 - RNA, 22 nt, Homo sapiens
uaacacugucugguaaagaugg

SEQ ID NO: 9477 - RNA, 23 nt, Homo sapiens
aacauucaacgcugucggugagu

SEQ ID NO: 9478 - RNA, 23 nt, Homo sapiens
aacauucauugcugucggugggu

SEQ ID NO: 9479 - RNA, 22 nt, Homo sapiens
aacauucaaccugucggugagu

SEQ ID NO: 9480 - RNA, 23 nt, Homo sapiens
aacauucauuguugucggugggu

SEQ ID NO: 9481 - RNA, 22 nt, Homo sapiens
ugauugguacgucuguggguag

SEQ ID NO: 9482 - RNA, 22 nt, Homo sapiens
aaaaguaauugcgaguuuuacc

SEQ ID NO: 9483 - RNA, 22 nt, Homo sapiens
aaaaguaauugugguuuuggcc

SEQ ID NO: 9484 - RNA, 22 nt, Homo sapiens
aaaaguaauugcgguuuuugcc

SEQ ID NO: 9485 - RNA, 22 nt, Homo sapiens
aaaaguaauugugguuuuugcc

SEQ ID NO: 9486 - RNA, 22 nt, Homo sapiens
aaaaguaaucgcgguuuuuguc

SEQ ID NO: 9487 - RNA, 22 nt, Homo sapiens
aaaaguaauugcggauuuugcc

SEQ ID NO: 9488 - RNA, 22 nt, Homo sapiens
aaaaguaauugcggucuuuggu

SEQ ID NO: 9489 - RNA, 22 nt, Homo sapiens
aaaaguauuugcggguuuuguc

SEQ ID NO: 9490 - RNA, 22 nt, Homo sapiens
caaaaguaauuguggauuuugu

SEQ ID NO: 9491 - RNA, 21 nt, Homo sapiens
uaaaguaaauaugcaccaaaa

SEQ ID NO: 9492 - RNA, 22 nt, Homo sapiens
uggaauguaaagaaguauguau

SEQ ID NO: 9493 - RNA, 21 nt, Homo sapiens
cccggagccaggaugcagcuc

SEQ ID NO: 9494 - RNA, 21 nt, Homo sapiens
ccccaccuccucucuccucag

SEQ ID NO: 9495 - RNA, 20 nt, Homo sapiens
cuuccucgucugucugcccc

SEQ ID NO: 9496 - RNA, 18 nt, Homo sapiens
gucccuguucaggcgcca

SEQ ID NO: 9497 - RNA, 23 nt, Homo sapiens
uggaguccaggaaucugcauuuu

SEQ ID NO: 9498 - RNA, 23 nt, Homo sapiens
acuccauuuguuuugaugaugga

SEQ ID NO: 9499 - RNA, 23 nt, Homo sapiens
uuaaugcuaaucgugauaggggu

SEQ ID NO: 9500 - RNA, 22 nt, Homo sapiens
uggaauguaaggaagugugugg

SEQ ID NO: 9501 - RNA, 22 nt, Homo sapiens
gaugagcucauuguaauaugag

SEQ ID NO: 9502 - RNA, 20 nt, Homo sapiens
aggaauguuccuucuuugcc

SEQ ID NO: 9503 - RNA, 18 nt, Homo sapiens
ucagcuggcccucauuuc

SEQ ID NO: 9504 - RNA, 21 nt, Homo sapiens
agagaagaagaucagccugca

SEQ ID NO: 9505 - RNA, 22 nt, Homo sapiens
ucucccaacccuuguaccagug

SEQ ID NO: 9506 - RNA, 22 nt, Homo sapiens
uggagagaaaggcaguuccuga

SEQ ID NO: 9507 - RNA, 22 nt, Homo sapiens
ugggucuuugcgggcgagauga

SEQ ID NO: 9508 - RNA, 22 nt, Homo sapiens
ucaggccaggcacaguggcuca

SEQ ID NO: 9509 - RNA, 22 nt, Homo sapiens
aucacacaaaggcaacuuuugu

SEQ ID NO: 9510 - RNA, 23 nt, Homo sapiens
cacucagccuugagggcacuuuc

SEQ ID NO: 9511 - RNA, 22 nt, Homo sapiens
ccucccacacccaaggcuugca

SEQ ID NO: 9512 - RNA, 21 nt, Homo sapiens
ugagcuaaaugugugcuggga

SEQ ID NO: 9513 - RNA, 23 nt, Homo sapiens
ucuuugguuaucuagcuguauga

SEQ ID NO: 9514 - RNA, 20 nt, Homo sapiens
ggggagcuguggaagcagua

SEQ ID NO: 9515 - RNA, 22 nt, Homo sapiens
caaagugccucccuuuagagug

SEQ ID NO: 9516 - RNA, 21 nt, Homo sapiens
acggugcuggauguggccuuu

SEQ ID NO: 9517 - RNA, 23 nt, Homo sapiens
ucuggcuccgugucuucacuccc

SEQ ID NO: 9518 - RNA, 22 nt, Homo sapiens
aggugguccguggcgcguucgc

SEQ ID NO: 9519 - RNA, 25 nt, Homo sapiens
aggggugguguugggacagcuccgu

SEQ ID NO: 9520 - RNA, 20 nt, Homo sapiens
ggggagcuguggaagcagua

SEQ ID NO: 9521 - RNA, 22 nt, Homo sapiens
uggagugugacaaugguguuug

SEQ ID NO: 9522 - RNA, 22 nt, Homo sapiens
uggguggucuggagauuugugc

SEQ ID NO: 9523 - RNA, 22 nt, Homo sapiens
acucggcguggcgucggucgug

SEQ ID NO: 9524 - RNA, 22 nt, Homo sapiens
cucggcgcggggcgcgggcucc

SEQ ID NO: 9525 - RNA, 21 nt, Homo sapiens
cggcggggacggcgauugguc

SEQ ID NO: 9526 - RNA, 22 nt, Homo sapiens
ucaggccaggcacaguggcuca

SEQ ID NO: 9527 - RNA, 21 nt, Homo sapiens
ccaccaccgugucugacacuu

SEQ ID NO: 9528 - RNA, 22 nt, Homo sapiens
cauugcacuugucucggucuga

SEQ ID NO: 9529 - RNA, 23 nt, Homo sapiens
uuacaguuguucaaccaguuacu

SEQ ID NO: 9530 - RNA, 22 nt, Homo sapiens
aggcggggcgccgcgggaccgc

SEQ ID NO: 9531 - RNA, 22 nt, Homo sapiens
ugcggggcuagggcuaacagca

SEQ ID NO: 9532 - RNA, 22 nt, Homo sapiens
agaaggaaauugaauucauuua

SEQ ID NO: 9533 - RNA, 24 nt, Homo sapiens
ucccugagacccuuuaaccuguga

SEQ ID NO: 9534 - RNA, 22 nt, Homo sapiens
ucccugagacccuaacuuguga

SEQ ID NO: 9535 - RNA, 23 nt, Homo sapiens
ccucagggcuguagaacagggcu

SEQ ID NO: 9536 - RNA, 24 nt, Homo sapiens
uggcccugacugaagaccagcagu

SEQ ID NO: 9537 - RNA, 20 nt, Homo sapiens
ccuccugcccuccuugcugu

SEQ ID NO: 9538 - RNA, 21 nt, Homo sapiens
uucacaguggcuaaguuccgc

SEQ ID NO: 9539 - RNA, 21 nt, Homo sapiens
uucacaguggcuaaguucugc

SEQ ID NO: 9540 - RNA, 23 nt, Homo sapiens
ucccuguccuccaggagcucacg

SEQ ID NO: 9541 - RNA, 22 nt, Homo sapiens
aguggggaacccuuccaugagg

SEQ ID NO: 9542 - RNA, 22 nt, Homo sapiens
uugagaaugaugaaucauuagg

SEQ ID NO: 9543 - RNA, 25 nt, Homo sapiens
aggggugguguugggacagcuccgu

SEQ ID NO: 9544 - RNA, 21 nt, Homo sapiens
uggaggagaaggaaggugaug

SEQ ID NO: 9545 - RNA, 20 nt, Homo sapiens
ggggagcuguggaagcagua

SEQ ID NO: 9546 - RNA, 18 nt, Homo sapiens
ucagcuggcccucauuuc

SEQ ID NO: 9547 - RNA, 22 nt, Homo sapiens
uggagugugacaaugguguuug

SEQ ID NO: 9548 - RNA, 21 nt, Homo sapiens
cggcggggacggcgauugguc

SEQ ID NO: 9549 - RNA, 23 nt, Homo sapiens
ugaguaccgccaugucuguuggg

SEQ ID NO: 9550 - RNA, 22 nt, Homo sapiens
uacccagagcaugcagugugaa

SEQ ID NO: 9551 - RNA, 22 nt, Homo sapiens
uguaaacauccucgacuggaag

SEQ ID NO: 9552 - RNA, 22 nt, Homo sapiens
uguaaacauccuacacucagcu

SEQ ID NO: 9553 - RNA, 23 nt, Homo sapiens
uguaaacauccuacacucucagc

SEQ ID NO: 9554 - RNA, 22 nt, Homo sapiens
uguaaacauccccgacuggaag

SEQ ID NO: 9555 - RNA, 22 nt, Homo sapiens
uguaaacauccuugacuggaag

SEQ ID NO: 9556 - RNA, 22 nt, Homo sapiens
agaucagaaggugauuguggcu

SEQ ID NO: 9557 - RNA, 22 nt, Homo sapiens
ucagcaaacauuuauugugugc

SEQ ID NO: 9558 - RNA, 19 nt, Homo sapiens
aggcugcggaauucaggac

SEQ ID NO: 9559 - RNA, 21 nt, Homo sapiens
guggcugcacucacuuccuuc

SEQ ID NO: 9560 - RNA, 22 nt, Homo sapiens
aggcggggcgccgcgggaccgc

SEQ ID NO: 9561 - RNA, 21 nt, Homo sapiens
cugacuguugccguccuccag

SEQ ID NO: 9562 - RNA, 22 nt, Homo sapiens
uggagugugacaaugguguuug

SEQ ID NO: 9563 - RNA, 21 nt, Homo sapiens
cggcggggacggcgauugguc

SEQ ID NO: 9564 - RNA, 20 nt, Homo sapiens
uguuuugauaacaguaaugu

SEQ ID NO: 9565 - RNA, 22 nt, Homo sapiens
uagcuuaucagacugauguuga

SEQ ID NO: 9566 - RNA, 22 nt, Homo sapiens
uggugggcacagaaucuggacu

SEQ ID NO: 9567 - RNA, 22 nt, Homo sapiens
uccgagccugggucucccucuu

SEQ ID NO: 9568 - RNA, 22 nt, Homo sapiens
uggugggccgcagaacaugugc

SEQ ID NO: 9569 - RNA, 22 nt, Homo sapiens
aggcggggcgccgcgggaccgc

SEQ ID NO: 9570 - RNA, 24 nt, Homo sapiens
uggggagcugaggcucugggggug

SEQ ID NO: 9571 - RNA, 22 nt, Homo sapiens
ugagccccugugccgcccccag

SEQ ID NO: 9572 - RNA, 21 nt, Homo sapiens
ugagaugaagcacuguagcuc

SEQ ID NO: 9573 - RNA, 22 nt, Homo sapiens
ugcccuguggacucaguucugg

SEQ ID NO: 9574 - RNA, 22 nt, Homo sapiens
ucagugcacuacagaacuuugu

SEQ ID NO: 9575 - RNA, 22 nt, Homo sapiens
ucagugcaucacagaacuuugu

SEQ ID NO: 9576 - RNA, 21 nt, Homo sapiens
ucagugcaugacagaacuugg

SEQ ID NO: 9577 - RNA, 23 nt, Homo sapiens
cggcccgggcugcugcuguuccu

SEQ ID NO: 9578 - RNA, 22 nt, Homo sapiens
cccugugcccggcccacuucug

SEQ ID NO: 9579 - RNA, 23 nt, Homo sapiens
ucccuguccuccaggagcucacg

SEQ ID NO: 9580 - RNA, 22 nt, Homo sapiens
uggcagugucuuagcugguugu

SEQ ID NO: 9581 - RNA, 23 nt, Homo sapiens
aggcaguguaguuagcugauugc

SEQ ID NO: 9582 - RNA, 23 nt, Homo sapiens
aagugccgccaucuuuugagugu

SEQ ID NO: 9583 - RNA, 22 nt, Homo sapiens
uggcaguguauuguuagcuggu

SEQ ID NO: 9584 - RNA, 22 nt, Homo sapiens
aggcaguguauuguuagcuggc

SEQ ID NO: 9585 - RNA, 19 nt, Homo sapiens
aggcacggugucagcaggc

SEQ ID NO: 9586 - RNA, 19 nt, Homo sapiens
ugucucugcugggguuucu

SEQ ID NO: 9587 - RNA, 25 nt, Homo sapiens
aggggugguguugggacagcuccgu

SEQ ID NO: 9588 - RNA, 22 nt, Homo sapiens
uccgagccugggucucccucuu

SEQ ID NO: 9589 - RNA, 24 nt, Homo sapiens
ugccugggucucuggccugcgcgu

SEQ ID NO: 9590 - RNA, 22 nt, Homo sapiens
ugagaccucuggguucugagcu

SEQ ID NO: 9591 - RNA, 22 nt, Homo sapiens
cugcccuggcccgagggaccga

SEQ ID NO: 9592 - RNA, 20 nt, Homo sapiens
ggggagcuguggaagcagua

SEQ ID NO: 9593 - RNA, 22 nt, Homo sapiens
gugaaauguuuaggaccacuag

SEQ ID NO: 9594 - RNA, 22 nt, Homo sapiens
uuggggaaacggccgcugagug

SEQ ID NO: 9595 - RNA, 22 nt, Homo sapiens
aacaauauccuggugcugagug

SEQ ID NO: 9596 - RNA, 22 nt, Homo sapiens
aauugcacgguauccaucugua

SEQ ID NO: 9597 - RNA, 22 nt, Homo sapiens
aguggggaacccuuccaugagg

SEQ ID NO: 9598 - RNA, 20 nt, Homo sapiens
aaaguagcuguaccauuugc

SEQ ID NO: 9599 - RNA, 25 nt, Homo sapiens
aggggugguguugggacagcuccgu

SEQ ID NO: 9600 - RNA, 20 nt, Homo sapiens
ggggagcuguggaagcagua

SEQ ID NO: 9601 - RNA, 17 nt, Homo sapiens
ucgccuccuccucuccc

SEQ ID NO: 9602 - RNA, 21 nt, Homo sapiens
ugcaggaccaagaugagcccu

SEQ ID NO: 9603 - RNA, 24 nt, Homo sapiens
uugcagcugccugggagugacuuc

SEQ ID NO: 9604 - RNA, 23 nt, Homo sapiens
ucuggcuccgugucuucacuccc

SEQ ID NO: 9605 - RNA, 22 nt, Homo sapiens
uggagagaaaggcaguuccuga

SEQ ID NO: 9606 - RNA, 21 nt, Homo sapiens
cggcggggacggcgauugguc

SEQ ID NO: 9607 - RNA, 23 nt, Homo sapiens
agcuacauugucugcuggguuuc

SEQ ID NO: 9608 - RNA, 21 nt, Homo sapiens
agggcccccccucaauccugu

SEQ ID NO: 9609 - RNA, 23 nt, Homo sapiens
ucccccaggugugauucugauuu

SEQ ID NO: 9610 - RNA, 23 nt, Homo sapiens
aagugccgccaucuuuugagugu

SEQ ID NO: 9611 - RNA, 21 nt, Homo sapiens
acuggacuuggagucagaagg

SEQ ID NO: 9612 - RNA, 22 nt, Homo sapiens
gugacaucacauauacggcagc

SEQ ID NO: 9613 - RNA, 24 nt, Homo sapiens
acugggggcuuucgggcucugcgu

SEQ ID NO: 9614 - RNA, 22 nt, Homo sapiens
aggcggggcgccgcgggaccgc

SEQ ID NO: 9615 - RNA, 17 nt, Homo sapiens
ucgccuccuccucuccc

SEQ ID NO: 9616 - RNA, 18 nt, Homo sapiens
cagggaggugaaugugau

SEQ ID NO: 9617 - RNA, 23 nt, Homo sapiens
ucuggcuccgugucuucacuccc

SEQ ID NO: 9618 - RNA, 21 nt, Homo sapiens
cggcggggacggcgauugguc

SEQ ID NO: 9619 - RNA, 22 nt, Homo sapiens
cauugcacuugucucggucuga

SEQ ID NO: 9620 - RNA, 22 nt, Homo sapiens
aggcggggcgccgcgggaccgc

SEQ ID NO: 9621 - RNA, 20 nt, Homo sapiens
accaggaggcugaggccccu

SEQ ID NO: 9622 - RNA, 22 nt, Homo sapiens
ugcggggcuagggcuaacagca

SEQ ID NO: 9623 - RNA, 21 nt, Homo sapiens
uggaggagaaggaaggugaug

SEQ ID NO: 9624 - RNA, 22 nt, Homo sapiens
aggcagcgggguguaguggaua

SEQ ID NO: 9625 - RNA, 22 nt, Homo sapiens
auccgcgcucugacucucugcc

SEQ ID NO: 9626 - RNA, 22 nt, Homo sapiens
aacccguagauccgaucuugug

SEQ ID NO: 9627 - RNA, 22 nt, Homo sapiens
cacccguagaaccgaccuugcg

SEQ ID NO: 9628 - RNA, 22 nt, Homo sapiens
aaaaccgucuaguuacaguugu

SEQ ID NO: 9629 - RNA, 22 nt, Homo sapiens
uagcagcacauaaugguuugug

SEQ ID NO: 9630 - RNA, 22 nt, Homo sapiens
uagcagcacaucaugguuuaca

SEQ ID NO: 9631 - RNA, 22 nt, Homo sapiens
uagcagcacguaaauauuggcg

SEQ ID NO: 9632 - RNA, 21 nt, Homo sapiens
caucccuugcaugguggaggg

SEQ ID NO: 9633 - RNA, 21 nt, Homo sapiens
uagcagcacagaaauauuggc

SEQ ID NO: 9634 - RNA, 22 nt, Homo sapiens
uccuucauuccaccggagucug

SEQ ID NO: 9635 - RNA, 22 nt, Homo sapiens
ugguuuaccgucccacauacau

SEQ ID NO: 9636 - RNA, 22 nt, Homo sapiens
cagcagcaauucauguuuugaa

SEQ ID NO: 9637 - RNA, 22 nt, Homo sapiens
uugcauauguaggaugucccau

SEQ ID NO: 9638 - RNA, 21 nt, Homo sapiens
cagcagcacacugugguuugu

SEQ ID NO: 9639 - RNA, 18 nt, Homo sapiens
ugcuuccuuucagagggu

SEQ ID NO: 9640 - RNA, 22 nt, Homo sapiens
aucuggagguaagaagcacuuu

SEQ ID NO: 9641 - RNA, 22 nt, Homo sapiens
uuaugguuugccugggacugag

SEQ ID NO: 9642 - RNA, 22 nt, Homo sapiens
augcugacauauuuacuagagg

SEQ ID NO: 9643 - RNA, 19 nt, Homo sapiens
aagcagcugccucugaggc

SEQ ID NO: 9644 - RNA, 23 nt, Homo sapiens
uauucauuuauccccagccuaca

SEQ ID NO: 9645 - RNA, 22 nt, Homo sapiens
uggauuucuuugugaaucacca

SEQ ID NO: 9646 - RNA, 22 nt, Homo sapiens
ugugcgcagggagaccucuccc

SEQ ID NO: 9647 - RNA, 23 nt, Homo sapiens
cggcccgggcugcugcuguuccu

SEQ ID NO: 9648 - RNA, 23 nt, Homo sapiens
cggcccgggcugcugcuguuccu

SEQ ID NO: 9649 - RNA, 21 nt, Homo sapiens
agggcccccccucaauccugu

SEQ ID NO: 9650 - RNA, 23 nt, Homo sapiens
aggaagcccuggaggggcuggag

SEQ ID NO: 9651 - RNA, 20 nt, Homo sapiens
gugucugggcggacagcugc

SEQ ID NO: 9652 - RNA, 21 nt, Homo sapiens
cauaaaguagaaagcacuacu

SEQ ID NO: 9653 - RNA, 22 nt, Homo sapiens
uggagagaaaggcaguuccuga

SEQ ID NO: 9654 - RNA, 22 nt, Homo sapiens
caaucacuaacuccacugccau

SEQ ID NO: 9655 - RNA, 21 nt, Homo sapiens
agagaagaagaucagccugca

SEQ ID NO: 9656 - RNA, 24 nt, Homo sapiens
uggcccugacugaagaccagcagu

SEQ ID NO: 9657 - RNA, 22 nt, Homo sapiens
uggguggucuggagauuugugc

SEQ ID NO: 9658 - RNA, 23 nt, Homo sapiens
guccaguuuucccaggaaucccu

SEQ ID NO: 9659 - RNA, 23 nt, Homo sapiens
ucuggcuccgugucuucacuccc

SEQ ID NO: 9660 - RNA, 22 nt, Homo sapiens
agaucagaaggugauuguggcu

SEQ ID NO: 9661 - RNA, 21 nt, Homo sapiens
cagcagcacacugugguuugu

SEQ ID NO: 9662 - RNA, 22 nt, Homo sapiens
gucccucuccaaaugugucuug

SEQ ID NO: 9663 - RNA, 23 nt, Homo sapiens
uggaagacuagugauuuuguugu

SEQ ID NO: 9664 - RNA, 20 nt, Homo sapiens
cggcucugggucugugggga

SEQ ID NO: 9665 - RNA, 22 nt, Homo sapiens
uaugugggaugguaaaccgcuu

SEQ ID NO: 9666 - RNA, 22 nt, Homo sapiens
aaaagcuggguugagagggcga

SEQ ID NO: 9667 - RNA, 22 nt, Homo sapiens
aaaagcuggguugagagggcaa

SEQ ID NO: 9668 - RNA, 20 nt, Homo sapiens
aaaagcuggguugagagggu

SEQ ID NO: 9669 - RNA, 19 nt, Homo sapiens
aaaagcuggguugagagga

SEQ ID NO: 9670 - RNA, 22 nt, Homo sapiens
uuuugcaauauguuccugaaua

SEQ ID NO: 9671 - RNA, 22 nt, Homo sapiens
uuuugcaauauguuccugaaua

SEQ ID NO: 9672 - RNA, 22 nt, Homo sapiens
ucaggcucaguccccucccgau

SEQ ID NO: 9673 - RNA, 23 nt, Homo sapiens
cacucagccuugagggcacuuuc

SEQ ID NO: 9674 - RNA, 22 nt, Homo sapiens
ugugucacucgaugaccacugu

SEQ ID NO: 9675 - RNA, 23 nt, Homo sapiens
ucuuugguuaucuagcuguauga

SEQ ID NO: 9676 - RNA, 23 nt, Homo sapiens
gagggucuugggagggaugugac

SEQ ID NO: 9677 - RNA, 22 nt, Homo sapiens
ucggauccgucugagcuuggcu

SEQ ID NO: 9678 - RNA, 22 nt, Homo sapiens
ucggauccgucugagcuuggcu

SEQ ID NO: 9679 - RNA, 17 nt, Homo sapiens
ucgccuccuccucuccc

SEQ ID NO: 9680 - RNA, 22 nt, Homo sapiens
uucuggaauucugugugaggga

SEQ ID NO: 9681 - RNA, 22 nt, Homo sapiens
uugggaucauuuugcauccaua

SEQ ID NO: 9682 - RNA, 19 nt, Homo sapiens
aggcacggugucagcaggc

SEQ ID NO: 9683 - RNA, 21 nt, Homo sapiens
guucaaauccagaucuauaac

SEQ ID NO: 9684 - RNA, 23 nt, Homo sapiens
cugggaucuccggggucuugguu

SEQ ID NO: 9685 - RNA, 21 nt, Homo sapiens
cccggagccaggaugcagcuc

SEQ ID NO: 9686 - RNA, 24 nt, Homo sapiens
uggcccugacugaagaccagcagu

SEQ ID NO: 9687 - RNA, 23 nt, Homo sapiens
ucuggcuccgugucuucacuccc

SEQ ID NO: 9688 - RNA, 22 nt, Homo sapiens
ucucccaacccuuguaccagug

SEQ ID NO: 9689 - RNA, 23 nt, Homo sapiens
cggcccgggcugcugcuguuccu

SEQ ID NO: 9690 - RNA, 22 nt, Homo sapiens
uggagagaaaggcaguuccuga

SEQ ID NO: 9691 - RNA, 22 nt, Homo sapiens
uguaaacauccuacacucagcu

SEQ ID NO: 9692 - RNA, 22 nt, Homo sapiens
uggcagugucuuagcugguugu

SEQ ID NO: 9693 - RNA, 23 nt, Homo sapiens
aggcaguguaguuagcugauugc

SEQ ID NO: 9694 - RNA, 22 nt, Homo sapiens
uggcaguguauuguuagcuggu

SEQ ID NO: 9695 - RNA, 22 nt, Homo sapiens
aggcaguguauuguuagcuggc

SEQ ID NO: 9696 - RNA, 22 nt, Homo sapiens
cgucaacacuugcugguuuccu

SEQ ID NO: 9697 - RNA, 22 nt, Homo sapiens
gguggcccggccgugccugagg

SEQ ID NO: 9698 - RNA, 23 nt, Homo sapiens
aggaagcccuggaggggcuggag

SEQ ID NO: 9699 - RNA, 22 nt, Homo sapiens
cuccugagccauucugagccuc

SEQ ID NO: 9700 - RNA, 21 nt, Homo sapiens
uccuucugcuccgucccccag

SEQ ID NO: 9701 - RNA, 17 nt, Homo sapiens
ucgccuccuccucuccc

SEQ ID NO: 9702 - RNA, 22 nt, Homo sapiens
agaguugagucuggacgucccg

SEQ ID NO: 9703 - RNA, 24 nt, Homo sapiens
agcagaagcagggagguucuccca

SEQ ID NO: 9704 - RNA, 18 nt, Homo sapiens
ugcuuccuuucagagggu

SEQ ID NO: 9705 - RNA, 22 nt, Homo sapiens
aucuggagguaagaagcacuuu

SEQ ID NO: 9706 - RNA, 22 nt, Homo sapiens
agucauuggaggguuugagcag

SEQ ID NO: 9707 - RNA, 22 nt, Homo sapiens
cuugguucagggagggucccca

SEQ ID NO: 9708 - RNA, 22 nt, Homo sapiens
auccgcgcucugacucucugcc

SEQ ID NO: 9709 - RNA, 21 nt, Homo sapiens
uggcagggaggcugggagggg

SEQ ID NO: 9710 - RNA, 22 nt, Homo sapiens
uuugguccccuucaaccagcug

SEQ ID NO: 9711 - RNA, 22 nt, Homo sapiens
uagcagcacauaaugguuugug

SEQ ID NO: 9712 - RNA, 22 nt, Homo sapiens
uagcagcacaucaugguuuaca

SEQ ID NO: 9713 - RNA, 22 nt, Homo sapiens
uagcagcacguaaauauuggcg

SEQ ID NO: 9714 - RNA, 24 nt, Homo sapiens
uuuggcaaugguagaacucacacu

SEQ ID NO: 9715 - RNA, 21 nt, Homo sapiens
uagcagcacagaaauauuggc

SEQ ID NO: 9716 - RNA, 21 nt, Homo sapiens
aggcaagaugcuggcauagcu

SEQ ID NO: 9717 - RNA, 22 nt, Homo sapiens
aaaagcuggguugagagggcga

SEQ ID NO: 9718 - RNA, 22 nt, Homo sapiens
aaaagcuggguugagagggcaa

SEQ ID NO: 9719 - RNA, 20 nt, Homo sapiens
aaaagcuggguugagagggu

SEQ ID NO: 9720 - RNA, 19 nt, Homo sapiens
aaaagcuggguugagagga

SEQ ID NO: 9721 - RNA, 22 nt, Homo sapiens
uuauaaagcaaugagacugauu

SEQ ID NO: 9722 - RNA, 22 nt, Homo sapiens
auauaauacaaccugcuaagug

SEQ ID NO: 9723 - RNA, 22 nt, Homo sapiens
cagcagcaauucauguuuugaa

SEQ ID NO: 9724 - RNA, 21 nt, Homo sapiens
cagcagcacacugugguuugu

SEQ ID NO: 9725 - RNA, 22 nt, Homo sapiens
uucacaaggaggugucauuuau

SEQ ID NO: 9726 - RNA, 22 nt, Homo sapiens
ucagcaaacauuuauugugugc

SEQ ID NO: 9727 - RNA, 21 nt, Homo sapiens
caaagaggaaggucccauuac

SEQ ID NO: 9728 - RNA, 21 nt, Homo sapiens
aaggcagggcccccgcucccc

SEQ ID NO: 9729 - RNA, 21 nt, Homo sapiens
cugacuguugccguccuccag

SEQ ID NO: 9730 - RNA, 21 nt, Homo sapiens
gcccuccgcccgugcaccccg

SEQ ID NO: 9731 - RNA, 23 nt, Homo sapiens
ucuggcuccgugucuucacuccc

SEQ ID NO: 9732 - RNA, 21 nt, Homo sapiens
cggcggggacggcgauugguc

SEQ ID NO: 9733 - RNA, 23 nt, Homo sapiens
ucccccaggugugauucugauuu

SEQ ID NO: 9734 - RNA, 23 nt, Homo sapiens
ugaggggcagagagcgagacuuu

SEQ ID NO: 9735 - RNA, 22 nt, Homo sapiens
gaaagcgcuucccuuugcugga

SEQ ID NO: 9736 - RNA, 22 nt, Homo sapiens
caaagcgcuccccuuuagaggu

SEQ ID NO: 9737 - RNA, 23 nt, Homo sapiens
caaagcgcuucucuuuagagugu

SEQ ID NO: 9738 - RNA, 21 nt, Homo sapiens
caaagcgcuucccuuuggagc

SEQ ID NO: 9739 - RNA, 21 nt, Homo sapiens
aaagcgcuucccuucagagug

SEQ ID NO: 9740 - RNA, 21 nt, Homo sapiens
gaaagcgcuucucuuuagagg

SEQ ID NO: 9741 - RNA, 24 nt, Homo sapiens
acugggggcuuucgggcucugcgu

SEQ ID NO: 9742 - RNA, 24 nt, Homo sapiens
ugccugggucucuggccugcgcgu

SEQ ID NO: 9743 - RNA, 22 nt, Homo sapiens
aggcggggcgccgcgggaccgc

SEQ ID NO: 9744 - RNA, 23 nt, Homo sapiens
uggugcggagagggcccacagug

SEQ ID NO: 9745 - RNA, 22 nt, Homo sapiens
ugcggggcuagggcuaacagca

SEQ ID NO: 9746 - RNA, 22 nt, Homo sapiens
ugcggggcuagggcuaacagca

SEQ ID NO: 9747 - RNA, 21 nt, Homo sapiens
ccuggaaacacugagguugug

SEQ ID NO: 9748 - RNA, 22 nt, Homo sapiens
uggagugugacaaugguguuug

SEQ ID NO: 9749 - RNA, 17 nt, Homo sapiens
ucccaccgcugccaccc

SEQ ID NO: 9750 - RNA, 21 nt, Homo sapiens
cggcggggacggcgauugguc

SEQ ID NO: 9751 - RNA, 22 nt, Homo sapiens
uggugggcacagaaucuggacu

SEQ ID NO: 9752 - RNA, 22 nt, Homo sapiens
uggugggccgcagaacaugugc

SEQ ID NO: 9753 - RNA, 22 nt, Homo sapiens
aggcggggcgccgcgggaccgc

SEQ ID NO: 9754 - RNA, 21 nt, Homo sapiens
uggaggagaaggaaggugaug

SEQ ID NO: 9755 - RNA, 21 nt, Homo sapiens
cggcggggacggcgauugguc

SEQ ID NO: 9756 - RNA, 23 nt, Homo sapiens
ugaggggcagagagcgagacuuu

SEQ ID NO: 9757 - RNA, 22 nt, Homo sapiens
aggcggggcgccgcgggaccgc

SEQ ID NO: 9758 - RNA, 24 nt, Homo sapiens
uggggagcugaggcucugggggug

SEQ ID NO: 9759 - RNA, 22 nt, Homo sapiens
ugagguaguagguuguauaguu

SEQ ID NO: 9760 - RNA, 22 nt, Homo sapiens
ugagguaguagguugugugguu

SEQ ID NO: 9761 - RNA, 19 nt, Homo sapiens
ugucucugcugggguuucu

SEQ ID NO: 9762 - RNA, 22 nt, Homo sapiens
ucuauacagacccuggcuuuuc

SEQ ID NO: 9763 - RNA, 22 nt, Homo sapiens
uauacaagggcagacucucucu

SEQ ID NO: 9764 - RNA, 22 nt, Homo sapiens
uauacaagggcaagcucucugu

SEQ ID NO: 9765 - RNA, 19 nt, Homo sapiens
gagccaguuggacaggagc

SEQ ID NO: 9766 - RNA, 22 nt, Homo sapiens
gucccucuccaaaugugucuug

SEQ ID NO: 9767 - RNA, 22 nt, Homo sapiens
acuuguaugcuagcucagguag

SEQ ID NO: 9768 - RNA, 17 nt, Homo sapiens
ucucgcuggggccucca

SEQ ID NO: 9769 - RNA, 22 nt, Homo sapiens
cacuggcuccuuucuggguaga

SEQ ID NO: 9770 - RNA, 20 nt, Homo sapiens
ggggagcuguggaagcagua

SEQ ID NO: 9771 - RNA, 22 nt, Homo sapiens
guggguacggcccagugggggg

SEQ ID NO: 9772 - RNA, 18 nt, Homo sapiens
cagggaggugaaugugau

SEQ ID NO: 9773 - RNA, 22 nt, Homo sapiens
acagcaggcacagacaggcagu

SEQ ID NO: 9774 - RNA, 22 nt, Homo sapiens
cuggcccucucugcccuuccgu

SEQ ID NO: 9775 - RNA, 22 nt, Homo sapiens
gccugcugggguggaaccuggu

SEQ ID NO: 9776 - RNA, 22 nt, Homo sapiens
ucaggcucaguccccucccgau

SEQ ID NO: 9777 - RNA, 22 nt, Homo sapiens
cgucaacacuugcugguuuccu

SEQ ID NO: 9778 - RNA, 21 nt, Homo sapiens
aagccugcccggcuccucggg

SEQ ID NO: 9779 - RNA, 21 nt, Homo sapiens
uggaggagaaggaaggugaug

SEQ ID NO: 9780 - RNA, 22 nt, Homo sapiens
uaacacugucugguaaagaugg

SEQ ID NO: 9781 - RNA, 21 nt, Homo sapiens
cuccguuugccuguuucgcug

SEQ ID NO: 9782 - RNA, 22 nt, Homo sapiens
uaacacugucugguaacgaugu

SEQ ID NO: 9783 - RNA, 22 nt, Homo sapiens
uguaaacauccucgacuggaag

SEQ ID NO: 9784 - RNA, 22 nt, Homo sapiens
uguaaacauccuacacucagcu

SEQ ID NO: 9785 - RNA, 23 nt, Homo sapiens
uguaaacauccuacacucucagc

SEQ ID NO: 9786 - RNA, 22 nt, Homo sapiens
uguaaacauccccgacuggaag

SEQ ID NO: 9787 - RNA, 22 nt, Homo sapiens
uguaaacauccuugacuggaag

SEQ ID NO: 9788 - RNA, 23 nt, Homo sapiens
ugagcgccucgacgacagagccg

SEQ ID NO: 9789 - RNA, 21 nt, Homo sapiens
cgcgggugcuuacugacccuu

SEQ ID NO: 9790 - RNA, 23 nt, Homo sapiens
ucuggcuccgugucuucacuccc

SEQ ID NO: 9791 - RNA, 22 nt, Homo sapiens
uggagagaaaggcaguuccuga

SEQ ID NO: 9792 - RNA, 21 nt, Homo sapiens
uucacaguggcuaaguuccgc

SEQ ID NO: 9793 - RNA, 23 nt, Homo sapiens
ugagcgccucgacgacagagccg

SEQ ID NO: 9794 - RNA, 23 nt, Homo sapiens
ugaggggcagagagcgagacuuu

SEQ ID NO: 9795 - RNA, 22 nt, Homo sapiens
aucuggagguaagaagcacuuu

SEQ ID NO: 9796 - RNA, 23 nt, Homo sapiens
caaagcgcuucucuuuagagugu

SEQ ID NO: 9797 - RNA, 21 nt, Homo sapiens
cuccagagggaaguacuuucu

SEQ ID NO: 9798 - RNA, 21 nt, Homo sapiens
cuccagagggaugcacuuucu

SEQ ID NO: 9799 - RNA, 21 nt, Homo sapiens
uggaggagaaggaaggugaug

SEQ ID NO: 9800 - RNA, 22 nt, Homo sapiens
uauugcacucgucccggccucc

SEQ ID NO: 9801 - RNA, 26 nt, Homo sapiens
gaugaugauggcagcaaauucugaaa

SEQ ID NO: 9802 - RNA, 18 nt, Homo sapiens
ucagcuggcccucauuuc

SEQ ID NO: 9803 - RNA, 22 nt, Homo sapiens
cccugugcccggcccacuucug

SEQ ID NO: 9804 - RNA, 23 nt, Homo sapiens
ugugcaaaucuaugcaaaacuga

SEQ ID NO: 9805 - RNA, 22 nt, Homo sapiens
aacaauauccuggugcugagug

SEQ ID NO: 9806 - RNA, 22 nt, Homo sapiens
agagguaguagguugcauaguu

SEQ ID NO: 9807 - RNA, 21 nt, Homo sapiens
auguaugugugcaugugcaug

SEQ ID NO: 9808 - RNA, 22 nt, Homo sapiens
uagcaccaucugaaaucgguua

SEQ ID NO: 9809 - RNA, 22 nt, Homo sapiens
uggcaguguauuguuagcuggu

SEQ ID NO: 9810 - RNA, 22 nt, Homo sapiens
ucagcaaacauuuauugugugc

SEQ ID NO: 9811 - RNA, 22 nt, Homo sapiens
caaaaaucucaauuacuuuugc

SEQ ID NO: 9812 - RNA, 22 nt, Homo sapiens
uagcaaaaacugcaguuacuuu

SEQ ID NO: 9813 - RNA, 23 nt, Homo sapiens
aguauguucuuccaggacagaac

SEQ ID NO: 9814 - RNA, 22 nt, Homo sapiens
agacuucccauuugaagguggc

SEQ ID NO: 9815 - RNA, 21 nt, Homo sapiens
uggaggagaaggaaggugaug

SEQ ID NO: 9816 - RNA, 17 nt, Homo sapiens
ucgccuccuccucuccc

SEQ ID NO: 9817 - RNA, 22 nt, Homo sapiens
uuugaggcuacagugagaugug

SEQ ID NO: 9818 - RNA, 21 nt, Homo sapiens
cggcggggacggcgauugguc

SEQ ID NO: 9819 - RNA, 22 nt, Homo sapiens
uggcucaguucagcaggaacag

SEQ ID NO: 9820 - RNA, 22 nt, Homo sapiens
ucaggcucaguccccucccgau

SEQ ID NO: 9821 - RNA, 23 nt, Homo sapiens
cucuugagggaagcacuuucugu

SEQ ID NO: 9822 - RNA, 19 nt, Homo sapiens
gagccaguuggacaggagc

SEQ ID NO: 9823 - RNA, 22 nt, Homo sapiens
ggggguccccggugcucggauc

SEQ ID NO: 9824 - RNA, 23 nt, Homo sapiens
acuugggcacugaaacaaugucc

SEQ ID NO: 9825 - RNA, 22 nt, Homo sapiens
aggcggggcgccgcgggaccgc

SEQ ID NO: 9826 - RNA, 22 nt, Homo sapiens
cacuggcuccuuucuggguaga

SEQ ID NO: 9827 - RNA, 22 nt, Homo sapiens
acgcccuucccccccuucuuca

SEQ ID NO: 9828 - RNA, 22 nt, Homo sapiens
uuagggcccuggcuccaucucc

SEQ ID NO: 9829 - RNA, 21 nt, Homo sapiens
cucccacaugcaggguuugca

SEQ ID NO: 9830 - RNA, 22 nt, Homo sapiens
ucaggccaggcacaguggcuca

SEQ ID NO: 9831 - RNA, 22 nt, Homo sapiens
ccucccacacccaaggcuugca

SEQ ID NO: 9832 - RNA, 22 nt, Homo sapiens
uccgagccugggucucccucuu

SEQ ID NO: 9833 - RNA, 21 nt, Homo sapiens
uaaagugcugacagugcagau

SEQ ID NO: 9834 - RNA, 24 nt, Homo sapiens
agcagaagcagggagguucuccca

SEQ ID NO: 9835 - RNA, 22 nt, Homo sapiens
aacaauauccuggugcugagug

SEQ ID NO: 9836 - RNA, 21 nt, Homo sapiens
gaaggcgcuucccuuuggagu

SEQ ID NO: 9837 - RNA, 22 nt, Homo sapiens
gaaggcgcuucccuuuagagcg

SEQ ID NO: 9838 - RNA, 22 nt, Homo sapiens
auucugcauuuuuagcaaguuc

SEQ ID NO: 9839 - RNA, 22 nt, Homo sapiens
acuccagccccacagccucagc

SEQ ID NO: 9840 - RNA, 21 nt, Homo sapiens
uuaauaucggacaaccauugu

SEQ ID NO: 9841 - RNA, 22 nt, Homo sapiens
acaggugagguucuugggagcc

SEQ ID NO: 9842 - RNA, 22 nt, Homo sapiens
cucuagagggaagcacuuucug

SEQ ID NO: 9843 - RNA, 23 nt, Homo sapiens
uagcagcgggaacaguucugcag

SEQ ID NO: 9844 - RNA, 21 nt, Homo sapiens
aacaggugacugguuagacaa

SEQ ID NO: 9845 - RNA, 23 nt, Homo sapiens
aucgcugcgguugcgagcgcugu

SEQ ID NO: 9846 - RNA, 24 nt, Homo sapiens
ugccugggucucuggccugcgcgu

SEQ ID NO: 9847 - RNA, 22 nt, Homo sapiens
gguggcccggccgugccugagg

SEQ ID NO: 9848 - RNA, 17 nt, Homo sapiens
ucucgcuggggccucca

SEQ ID NO: 9849 - RNA, 22 nt, Homo sapiens
ucuucucuguuuuggccaugug

SEQ ID NO: 9850 - RNA, 22 nt, Homo sapiens
acucggcguggcgucggucgug

SEQ ID NO: 9851 - RNA, 23 nt, Homo sapiens
ucuggcuccgugucuucacuccc

SEQ ID NO: 9852 - RNA, 18 nt, Homo sapiens
ugaggcaguagauugaau

SEQ ID NO: 9853 - RNA, 21 nt, Homo sapiens
cggcggggacggcgauugguc

SEQ ID NO: 9854 - RNA, 22 nt, Homo sapiens
aacacaccugguuaaccucuuu

SEQ ID NO: 9855 - RNA, 22 nt, Homo sapiens
aacacaccuauucaaggauuca

SEQ ID NO: 9856 - RNA, 22 nt, Homo sapiens
uccgagccugggucucccucuu

SEQ ID NO: 9857 - RNA, 22 nt, Homo sapiens
aggcggggcgccgcgggaccgc

SEQ ID NO: 9858 - RNA, 24 nt, Homo sapiens
uggggagcugaggcucugggggug

SEQ ID NO: 9859 - RNA, 21 nt, Homo sapiens
uggcagggaggcugggagggg

SEQ ID NO: 9860 - RNA, 22 nt, Homo sapiens
cgcaggggccgggugcucaccg

SEQ ID NO: 9861 - RNA, 22 nt, Homo sapiens
aacuggcccucaaagucccgcu

SEQ ID NO: 9862 - RNA, 22 nt, Homo sapiens
uucaccaccuucuccacccagc

SEQ ID NO: 9863 - RNA, 21 nt, Homo sapiens
agggcccccccucaauccugu

SEQ ID NO: 9864 - RNA, 22 nt, Homo sapiens
agaggcuggccgugaugaauuc

SEQ ID NO: 9865 - RNA, 19 nt, Homo sapiens
aggcugcggaauucaggac

SEQ ID NO: 9866 - RNA, 22 nt, Homo sapiens
cgcaggggccgggugcucaccg

SEQ ID NO: 9867 - RNA, 23 nt, Homo sapiens
caacggaaucccaaaagcagcug

SEQ ID NO: 9868 - RNA, 22 nt, Homo sapiens
agaggcuggccgugaugaauuc

SEQ ID NO: 9869 - RNA, 23 nt, Homo sapiens
uagcagcgggaacaguucugcag

SEQ ID NO: 9870 - RNA, 23 nt, Homo sapiens
uucucgaggaaagaagcacuuuc

SEQ ID NO: 9871 - RNA, 24 nt, Homo sapiens
ugccugggucucuggccugcgcgu

SEQ ID NO: 9872 - RNA, 22 nt, Homo sapiens
uggauuucuuugugaaucacca

SEQ ID NO: 9873 - RNA, 23 nt, Homo sapiens
aaaagugcuuacagugcagguag

SEQ ID NO: 9874 - RNA, 21 nt, Homo sapiens
uaaagugcugacagugcagau

SEQ ID NO: 9875 - RNA, 22 nt, Homo sapiens
ucugggcaacaaagugagaccu

SEQ ID NO: 9876 - RNA, 23 nt, Homo sapiens
caaagugcuuacagugcagguag

SEQ ID NO: 9877 - RNA, 18 nt, Homo sapiens
ugaggcaguagauugaau

SEQ ID NO: 9878 - RNA, 23 nt, Homo sapiens
uaaagugcuuauagugcagguag

SEQ ID NO: 9879 - RNA, 23 nt, Homo sapiens
caaagugcucauagugcagguag

SEQ ID NO: 9880 - RNA, 22 nt, Homo sapiens
acacagggcuguugugaagacu

SEQ ID NO: 9881 - RNA, 22 nt, Homo sapiens
uguaaacauccuacacucagcu

SEQ ID NO: 9882 - RNA, 23 nt, Homo sapiens
aggaccugcgggacaagauucuu

SEQ ID NO: 9883 - RNA, 22 nt, Homo sapiens
cgucaacacuugcugguuuccu

SEQ ID NO: 9884 - RNA, 22 nt, Homo sapiens
caaagugccucccuuuagagug

SEQ ID NO: 9885 - RNA, 24 nt, Homo sapiens
acaaagugcuucccuuuagagugu

SEQ ID NO: 9886 - RNA, 22 nt, Homo sapiens
acaaagugcuucccuuuagagu

SEQ ID NO: 9887 - RNA, 23 nt, Homo sapiens
cucuugagggaagcacuuucugu

SEQ ID NO: 9888 - RNA, 22 nt, Homo sapiens
ccucccacacccaaggcuugca

SEQ ID NO: 9889 - RNA, 21 nt, Homo sapiens
caaagaggaaggucccauuac

SEQ ID NO: 9890 - RNA, 25 nt, Homo sapiens
gcugggcagggcuucugagcuccuu

SEQ ID NO: 9891 - RNA, 21 nt, Homo sapiens
aggaggcagcgcucucaggac

SEQ ID NO: 9892 - RNA, 21 nt, Homo sapiens
ucccacguuguggcccagcag

SEQ ID NO: 9893 - RNA, 23 nt, Homo sapiens
caaagugcuguucgugcagguag

SEQ ID NO: 9894 - RNA, 23 nt, Homo sapiens
cggcccgggcugcugcuguuccu

SEQ ID NO: 9895 - RNA, 21 nt, Homo sapiens
cggcggggacggcgauugguc

SEQ ID NO: 9896 - RNA, 21 nt, Homo sapiens
agggcccccccucaauccugu

SEQ ID NO: 9897 - RNA, 20 nt, Homo sapiens
ccucugggcccuuccuccag

SEQ ID NO: 9898 - RNA, 22 nt, Homo sapiens
ucucugggccugugucuuaggc

SEQ ID NO: 9899 - RNA, 21 nt, Homo sapiens
aaagcgcuucccuucagagug

SEQ ID NO: 9900 - RNA, 22 nt, Homo sapiens
agacuucccauuugaagguggc

SEQ ID NO: 9901 - RNA, 21 nt, Homo sapiens
agggggaaaguucuauagucc

SEQ ID NO: 9902 - RNA, 22 nt, Homo sapiens
aggcggggcgccgcgggaccgc

SEQ ID NO: 9903 - RNA, 22 nt, Homo sapiens
ugcggggcuagggcuaacagca

SEQ ID NO: 9904 - RNA, 21 nt, Homo sapiens
uggaggagaaggaaggugaug

SEQ ID NO: 9905 - RNA, 20 nt, Homo sapiens
ucugcaggguuugcuuugag

SEQ ID NO: 9906 - RNA, 18 nt, Homo sapiens
aucccaccucugccacca

SEQ ID NO: 9907 - RNA, 22 nt, Homo sapiens
ugcuggaucagugguucgaguc

SEQ ID NO: 9908 - RNA, 22 nt, Homo sapiens
acagcaggcacagacaggcagu

SEQ ID NO: 9909 - RNA, 21 nt, Homo sapiens
aucacauugccagggauuucc

SEQ ID NO: 9910 - RNA, 21 nt, Homo sapiens
aucacauugccagggauuacc

SEQ ID NO: 9911 - RNA, 22 nt, Homo sapiens
aggugguccguggcgcguucgc

SEQ ID NO: 9912 - RNA, 23 nt, Homo sapiens
ucccccaggugugauucugauuu

SEQ ID NO: 9913 - RNA, 22 nt, Homo sapiens
gccugcugggguggaaccuggu

SEQ ID NO: 9914 - RNA, 23 nt, Homo sapiens
ucuuggaguaggucauugggugg

SEQ ID NO: 9915 - RNA, 23 nt, Homo sapiens
ucuuggaguaggucauugggugg

SEQ ID NO: 9916 - RNA, 25 nt, Homo sapiens
aggggugguguugggacagcuccgu

SEQ ID NO: 9917 - RNA, 24 nt, Homo sapiens
acugggggcuuucgggcucugcgu

SEQ ID NO: 9918 - RNA, 22 nt, Homo sapiens
cagugcaauguuaaaagggcau

SEQ ID NO: 9919 - RNA, 22 nt, Homo sapiens
cagugcaaugaugaaagggcau

SEQ ID NO: 9920 - RNA, 24 nt, Homo sapiens
ccagacagaauucuaugcacuuuc

SEQ ID NO: 9921 - RNA, 22 nt, Homo sapiens
uuggggaaacggccgcugagug

SEQ ID NO: 9922 - RNA, 22 nt, Homo sapiens
aaggagcucacagucuauugag

SEQ ID NO: 9923 - RNA, 23 nt, Homo sapiens
cagugcaauaguauugucaaagc

SEQ ID NO: 9924 - RNA, 23 nt, Homo sapiens
cagugcaaugauauugucaaagc

SEQ ID NO: 9925 - RNA, 23 nt, Homo sapiens
ucucacacagaaaucgcacccgu

SEQ ID NO: 9926 - RNA, 22 nt, Homo sapiens
aucacacaaaggcaacuuuugu

SEQ ID NO: 9927 - RNA, 21 nt, Homo sapiens
acuggacuuggagucagaagg

SEQ ID NO: 9928 - RNA, 23 nt, Homo sapiens
uagugcaauauugcuuauagggu

SEQ ID NO: 9929 - RNA, 21 nt, Homo sapiens
ucacuccucuccucccgucuu

SEQ ID NO: 9930 - RNA, 22 nt, Homo sapiens
aguggggaacccuuccaugagg

SEQ ID NO: 9931 - RNA, 22 nt, Homo sapiens
aaagugcauccuuuuagagugu

SEQ ID NO: 9932 - RNA, 22 nt, Homo sapiens
aaagugcauccuuuuagagguu

SEQ ID NO: 9933 - RNA, 22 nt, Homo sapiens
aaagugcaucuuuuuagaggau

SEQ ID NO: 9934 - RNA, 19 nt, Homo sapiens
ugagcugcuguaccaaaau

SEQ ID NO: 9935 - RNA, 19 nt, Homo sapiens
aggcugcggaauucaggac

SEQ ID NO: 9936 - RNA, 19 nt, Homo sapiens
agcugucugaaaaugucuu

SEQ ID NO: 9937 - RNA, 19 nt, Homo sapiens
gugucugcuuccuguggga

SEQ ID NO: 9938 - RNA, 19 nt, Homo sapiens
aagcagcugccucugaggc

SEQ ID NO: 9939 - RNA, 23 nt, Homo sapiens
aaggagcuuacaaucuagcuggg

SEQ ID NO: 9940 - RNA, 20 nt, Homo sapiens
ucugcaggguuugcuuugag

SEQ ID NO: 9941 - RNA, 17 nt, Homo sapiens
ucgccuccuccucuccc

SEQ ID NO: 9942 - RNA, 23 nt, Homo sapiens
caaagugcuuacagugcagguag

SEQ ID NO: 9943 - RNA, 22 nt, Homo sapiens
cgcaggggccgggugcucaccg

SEQ ID NO: 9944 - RNA, 22 nt, Homo sapiens
uguaacagcaacuccaugugga

SEQ ID NO: 9945 - RNA, 22 nt, Homo sapiens
uggcucaguucagcaggaacag

SEQ ID NO: 9946 - RNA, 23 nt, Homo sapiens
ucccccaggugugauucugauuu

SEQ ID NO: 9947 - RNA, 22 nt, Homo sapiens
uacugcagacguggcaaucaug

SEQ ID NO: 9948 - RNA, 21 nt, Homo sapiens
uacugcagacaguggcaauca

SEQ ID NO: 9949 - RNA, 19 nt, Homo sapiens
aggcugcggaauucaggac

SEQ ID NO: 9950 - RNA, 24 nt, Homo sapiens
acugggggcuuucgggcucugcgu

SEQ ID NO: 9951 - RNA, 21 nt, Homo sapiens
aauggcgccacuaggguugug

SEQ ID NO: 9952 - RNA, 20 nt, Homo sapiens
accaggaggcugaggccccu

SEQ ID NO: 9953 - RNA, 17 nt, Homo sapiens
ucgccuccuccucuccc

SEQ ID NO: 9954 - RNA, 21 nt, Homo sapiens
cggcggggacggcgauugguc

SEQ ID NO: 9955 - RNA, 22 nt, Homo sapiens
cauugcacuugucucggucuga

SEQ ID NO: 9956 - RNA, 22 nt, Homo sapiens
uccagcaucagugauuuuguug

SEQ ID NO: 9957 - RNA, 21 nt, Homo sapiens
gaaggcgcuucccuuuggagu

SEQ ID NO: 9958 - RNA, 22 nt, Homo sapiens
gaaggcgcuucccuuuagagcg

SEQ ID NO: 9959 - RNA, 19 nt, Homo sapiens
gggcgccugugaucccaac

SEQ ID NO: 9960 - RNA, 21 nt, Homo sapiens
aagccugcccggcuccucggg

SEQ ID NO: 9961 - RNA, 25 nt, Homo sapiens
ggcggagggaaguagguccguuggu

SEQ ID NO: 9962 - RNA, 22 nt, Homo sapiens
aggcggggcgccgcgggaccgc

SEQ ID NO: 9963 - RNA, 22 nt, Homo sapiens
gguggcccggccgugccugagg

SEQ ID NO: 9964 - RNA, 22 nt, Homo sapiens
ugcggggcuagggcuaacagca

SEQ ID NO: 9965 - RNA, 23 nt, Homo sapiens
cccaguguucagacuaccuguuc

SEQ ID NO: 9966 - RNA, 23 nt, Homo sapiens
cccaguguuuagacuaucuguuc

SEQ ID NO: 9967 - RNA, 22 nt, Homo sapiens
cauugcacuugucucggucuga

SEQ ID NO: 9968 - RNA, 22 nt, Homo sapiens
aauugcacgguauccaucugua

SEQ ID NO: 9969 - RNA, 22 nt, Homo sapiens
uaaugccccuaaaaauccuuau

SEQ ID NO: 9970 - RNA, 22 nt, Homo sapiens
caaccuggaggacuccaugcug

SEQ ID NO: 9971 - RNA, 22 nt, Homo sapiens
caagaaccucaguugcuuuugu

SEQ ID NO: 9972 - RNA, 19 nt, Homo sapiens
gagccaguuggacaggagc

SEQ ID NO: 9973 - RNA, 24 nt, Homo sapiens
gaccuggacauguuugugcccagu

SEQ ID NO: 9974 - RNA, 21 nt, Homo sapiens
guggcugcacucacuuccuuc

SEQ ID NO: 9975 - RNA, 22 nt, Homo sapiens
cacuggcuccuuucuggguaga

SEQ ID NO: 9976 - RNA, 23 nt, Homo sapiens
uacccuguagaaccgaauuugug

SEQ ID NO: 9977 - RNA, 21 nt, Homo sapiens
agugaaugauggguucugacc

SEQ ID NO: 9978 - RNA, 20 nt, Homo sapiens
uaaagagcccuguggagaca

SEQ ID NO: 9979 - RNA, 22 nt, Homo sapiens
cagugcaaugaugaaagggcau

SEQ ID NO: 9980 - RNA, 23 nt, Homo sapiens
aacauucaacgcugucggugagu

SEQ ID NO: 9981 - RNA, 23 nt, Homo sapiens
aacauucauugcugucggugggu

SEQ ID NO: 9982 - RNA, 22 nt, Homo sapiens
aacauucaaccugucggugagu

SEQ ID NO: 9983 - RNA, 23 nt, Homo sapiens
aacauucauuguugucggugggu

SEQ ID NO: 9984 - RNA, 22 nt, Homo sapiens
cgcaggggccgggugcucaccg

SEQ ID NO: 9985 - RNA, 22 nt, Homo sapiens
acagcaggcacagacaggcagu

SEQ ID NO: 9986 - RNA, 22 nt, Homo sapiens
aauugcacuuuagcaaugguga

SEQ ID NO: 9987 - RNA, 22 nt, Homo sapiens
gccugcugggguggaaccuggu

SEQ ID NO: 9988 - RNA, 21 nt, Homo sapiens
caaagaggaaggucccauuac

SEQ ID NO: 9989 - RNA, 22 nt, Homo sapiens
gucccucuccaaaugugucuug

SEQ ID NO: 9990 - RNA, 19 nt, Homo sapiens
gaugaugcugcugaugcug

SEQ ID NO: 9991 - RNA, 22 nt, Homo sapiens
ucaaaacugaggggcauuuucu

SEQ ID NO: 9992 - RNA, 23 nt, Homo sapiens
ugugcaaaucuaugcaaaacuga

SEQ ID NO: 9993 - RNA, 22 nt, Homo sapiens
aacaauauccuggugcugagug

SEQ ID NO: 9994 - RNA, 22 nt, Homo sapiens
agagguaguagguugcauaguu

SEQ ID NO: 9995 - RNA, 22 nt, Homo sapiens
uuggggaaacggccgcugagug

SEQ ID NO: 9996 - RNA, 23 nt, Homo sapiens
agguuguccguggugaguucgca

SEQ ID NO: 9997 - RNA, 22 nt, Homo sapiens
ugauugguacgucuguggguag

SEQ ID NO: 9998 - RNA, 22 nt, Homo sapiens
aaaaguauuugcggguuuuguc

SEQ ID NO: 9999 - RNA, 22 nt, Homo sapiens
ccaaaacugcaguuacuuuugc

SEQ ID NO: 10000 - RNA, 23 nt, Homo sapiens
aggaagcccuggaggggcuggag

SEQ ID NO: 10001 - RNA, 23 nt, Homo sapiens
uccaguaccacgugucagggcca

SEQ ID NO: 10002 - RNA, 21 nt, Homo sapiens
uaaagugcugacagugcagau

SEQ ID NO: 10003 - RNA, 26 nt, Homo sapiens
aaguaguugguuuguaugagaugguu

SEQ ID NO: 10004 - RNA, 22 nt, Homo sapiens
aggcauugacuucucacuagcu

SEQ ID NO: 10005 - RNA, 22 nt, Homo sapiens
ugugagguuggcauuguugucu

SEQ ID NO: 10006 - RNA, 22 nt, Homo sapiens
ugugacugguugaccagagggg

SEQ ID NO: 10007 - RNA, 21 nt, Homo sapiens
cauaaaguagaaagcacuacu

SEQ ID NO: 10008 - RNA, 23 nt, Homo sapiens
ucuggcuccgugucuucacuccc

SEQ ID NO: 10009 - RNA, 21 nt, Homo sapiens
auuugugcuuggcucugucac

SEQ ID NO: 10010 - RNA, 21 nt, Homo sapiens
uucacaguggcuaaguuccgc

SEQ ID NO: 10011 - RNA, 21 nt, Homo sapiens
uucacaguggcuaaguucugc

SEQ ID NO: 10012 - RNA, 22 nt, Homo sapiens
uaaugccccuaaaaauccuuau

SEQ ID NO: 10013 - RNA, 23 nt, Homo sapiens
ugaggggcagagagcgagacuuu

SEQ ID NO: 10014 - RNA, 22 nt, Homo sapiens
cgucaacacuugcugguuuccu

SEQ ID NO: 10015 - RNA, 22 nt, Homo sapiens
aacgcacuucccuuuagagugu

SEQ ID NO: 10016 - RNA, 22 nt, Homo sapiens
caaaguuuaagauccuugaagu

SEQ ID NO: 10017 - RNA, 20 nt, Homo sapiens
accaggaggcugaggccccu

SEQ ID NO: 10018 - RNA, 23 nt, Homo sapiens
caguaacaaagauucauccuugu

SEQ ID NO: 10019 - RNA, 25 nt, Homo sapiens
cuagugagggacagaaccaggauuc

SEQ ID NO: 10020 - RNA, 22 nt, Homo sapiens
ugagccccugugccgcccccag

SEQ ID NO: 10021 - RNA, 20 nt, Homo sapiens
ucguuugccuuuuucugcuu

SEQ ID NO: 10022 - RNA, 20 nt, Homo sapiens
agagguauagggcaugggaa

SEQ ID NO: 10023 - RNA, 22 nt, Homo sapiens
uguaaacauccuacacucagcu

SEQ ID NO: 10024 - RNA, 21 nt, Homo sapiens
acuggacuuggagucagaagg

SEQ ID NO: 10025 - RNA, 21 nt, Homo sapiens
ugaguuggccaucugagugag

SEQ ID NO: 10026 - RNA, 19 nt, Homo sapiens
agcugucugaaaaugucuu

SEQ ID NO: 10027 - RNA, 20 nt, Homo sapiens
cggcucugggucugugggga

SEQ ID NO: 10028 - RNA, 22 nt, Homo sapiens
uauaccucaguuuuaucaggug

SEQ ID NO: 10029 - RNA, 20 nt, Homo sapiens
uaaggcacgcggugaaugcc

SEQ ID NO: 10030 - RNA, 23 nt, Homo sapiens
ucuggcuccgugucuucacuccc

SEQ ID NO: 10031 - RNA, 22 nt, Homo sapiens
cgcaggggccgggugcucaccg

SEQ ID NO: 10032 - RNA, 23 nt, Homo sapiens
cccaguguucagacuaccuguuc

SEQ ID NO: 10033 - RNA, 23 nt, Homo sapiens
cccaguguuuagacuaucuguuc

SEQ ID NO: 10034 - RNA, 22 nt, Homo sapiens
uggcaguguauuguuagcuggu

SEQ ID NO: 10035 - RNA, 23 nt, Homo sapiens
ugaggggcagagagcgagacuuu

SEQ ID NO: 10036 - RNA, 22 nt, Homo sapiens
aguggggaacccuuccaugagg

SEQ ID NO: 10037 - RNA, 21 nt, Homo sapiens
uaaggcacccuucugaguaga

SEQ ID NO: 10038 - RNA, 22 nt, Homo sapiens
aaagugcauccuuuuagagugu

SEQ ID NO: 10039 - RNA, 22 nt, Homo sapiens
aaagugcauccuuuuagagguu

SEQ ID NO: 10040 - RNA, 22 nt, Homo sapiens
aaagugcaucuuuuuagaggau

SEQ ID NO: 10041 - RNA, 24 nt, Homo sapiens
cugaagugauguguaacugaucag

SEQ ID NO: 10042 - RNA, 25 nt, Homo sapiens
aggggugguguugggacagcuccgu

SEQ ID NO: 10043 - RNA, 19 nt, Homo sapiens
aagugugcagggcacuggu

SEQ ID NO: 10044 - RNA, 23 nt, Homo sapiens
uggugcggagagggcccacagug

SEQ ID NO: 10045 - RNA, 20 nt, Homo sapiens
ggggagcuguggaagcagua

SEQ ID NO: 10046 - RNA, 23 nt, Homo sapiens
uacccuguagauccgaauuugug

SEQ ID NO: 10047 - RNA, 23 nt, Homo sapiens
uacccuguagaaccgaauuugug

SEQ ID NO: 10048 - RNA, 20 nt, Homo sapiens
gugucugggcggacagcugc

SEQ ID NO: 10049 - RNA, 17 nt, Homo sapiens
ucccuguucgggcgcca

SEQ ID NO: 10050 - RNA, 23 nt, Homo sapiens
ucuggcuccgugucuucacuccc

SEQ ID NO: 10051 - RNA, 22 nt, Homo sapiens
cucccacugcuucacuugacua

SEQ ID NO: 10052 - RNA, 22 nt, Homo sapiens
uguaaacauccucgacuggaag

SEQ ID NO: 10053 - RNA, 22 nt, Homo sapiens
uguaaacauccuacacucagcu

SEQ ID NO: 10054 - RNA, 22 nt, Homo sapiens
uguaaacauccccgacuggaag

SEQ ID NO: 10055 - RNA, 22 nt, Homo sapiens
uguaaacauccuugacuggaag

SEQ ID NO: 10056 - RNA, 21 nt, Homo sapiens
ucacuccucuccucccgucuu

SEQ ID NO: 10057 - RNA, 22 nt, Homo sapiens
aauccuuugucccugggugaga

SEQ ID NO: 10058 - RNA, 22 nt, Homo sapiens
aucuggagguaagaagcacuuu

SEQ ID NO: 10059 - RNA, 22 nt, Homo sapiens
aacgcacuucccuuuagagugu

SEQ ID NO: 10060 - RNA, 22 nt, Homo sapiens
gaugagcucauuguaauaugag

SEQ ID NO: 10061 - RNA, 22 nt, Homo sapiens
uaugucugcugaccaucaccuu

SEQ ID NO: 10062 - RNA, 21 nt, Homo sapiens
ugagaugaagcacuguagcuc

SEQ ID NO: 10063 - RNA, 23 nt, Homo sapiens
uaaggugcaucuagugcagauag

SEQ ID NO: 10064 - RNA, 23 nt, Homo sapiens
uaaggugcaucuagugcaguuag

SEQ ID NO: 10065 - RNA, 23 nt, Homo sapiens
caacggaaucccaaaagcagcug

SEQ ID NO: 10066 - RNA, 22 nt, Homo sapiens
uguaacagcaacuccaugugga

SEQ ID NO: 10067 - RNA, 22 nt, Homo sapiens
cucccacugcuucacuugacua

SEQ ID NO: 10068 - RNA, 21 nt, Homo sapiens
uugugcuugaucuaaccaugu

SEQ ID NO: 10069 - RNA, 24 nt, Homo sapiens
agcagaagcagggagguucuccca

SEQ ID NO: 10070 - RNA, 22 nt, Homo sapiens
uguaaacauccuacacucagcu

SEQ ID NO: 10071 - RNA, 23 nt, Homo sapiens
cgcauccccuagggcauuggugu

SEQ ID NO: 10072 - RNA, 22 nt, Homo sapiens
cuggcccucucugcccuuccgu

SEQ ID NO: 10073 - RNA, 22 nt, Homo sapiens
aauugcacgguauccaucugua

SEQ ID NO: 10074 - RNA, 22 nt, Homo sapiens
ccucccacacccaaggcuugca

SEQ ID NO: 10075 - RNA, 22 nt, Homo sapiens
auucugcauuuuuagcaaguuc

SEQ ID NO: 10076 - RNA, 24 nt, Homo sapiens
ugccugggucucuggccugcgcgu

SEQ ID NO: 10077 - RNA, 23 nt, Homo sapiens
cuguaauauaaauuuaauuuauu

SEQ ID NO: 10078 - RNA, 23 nt, Homo sapiens
ucaagagcaauaacgaaaaaugu

SEQ ID NO: 10079 - RNA, 22 nt, Homo sapiens
ugaaggucuacugugugccagg

SEQ ID NO: 10080 - RNA, 21 nt, Homo sapiens
cagcagcacacugugguuugu

SEQ ID NO: 10081 - RNA, 21 nt, Homo sapiens
ccuguugaaguguaaucccca

SEQ ID NO: 10082 - RNA, 22 nt, Homo sapiens
ugagaacugaauuccauggguu

SEQ ID NO: 10083 - RNA, 21 nt, Homo sapiens
auuugugcuuggcucugucac

SEQ ID NO: 10084 - RNA, 22 nt, Homo sapiens
uaaucucagcuggcaacuguga

SEQ ID NO: 10085 - RNA, 22 nt, Homo sapiens
aucacacaaaggcaacuuuugu

SEQ ID NO: 10086 - RNA, 23 nt, Homo sapiens
aucaacagacauuaauugggcgc

SEQ ID NO: 10087 - RNA, 22 nt, Homo sapiens
agacccuggucugcacucuauc

SEQ ID NO: 10088 - RNA, 21 nt, Homo sapiens
cacaagguauugguauuaccu

SEQ ID NO: 10089 - RNA, 23 nt, Homo sapiens
acuugggcacugaaacaaugucc

SEQ ID NO: 10090 - RNA, 22 nt, Homo sapiens
ucuucucuguuuuggccaugug

SEQ ID NO: 10091 - RNA, 21 nt, Homo sapiens
aagcauucuuucauugguugg

SEQ ID NO: 10092 - RNA, 23 nt, Homo sapiens
caagucuuauuugagcaccuguu

SEQ ID NO: 10093 - RNA, 23 nt, Homo sapiens
uauggcuuuuuauuccuauguga

SEQ ID NO: 10094 - RNA, 22 nt, Homo sapiens
ugagaacugaauuccauggguu

SEQ ID NO: 10095 - RNA, 22 nt, Homo sapiens
caaccuggaggacuccaugcug

SEQ ID NO: 10096 - RNA, 19 nt, Homo sapiens
ugucucugcugggguuucu

SEQ ID NO: 10097 - RNA, 20 nt, Homo sapiens
agaccauggguucucauugu

SEQ ID NO: 10098 - RNA, 22 nt, Homo sapiens
uggagugugacaaugguguuug

SEQ ID NO: 10099 - RNA, 23 nt, Homo sapiens
ucuuugguuaucuagcuguauga

SEQ ID NO: 10100 - RNA, 23 nt, Homo sapiens
caagucuuauuugagcaccuguu

SEQ ID NO: 10101 - RNA, 22 nt, Homo sapiens
uugcauagucacaaaagugauc

SEQ ID NO: 10102 - RNA, 22 nt, Homo sapiens
uaaugccccuaaaaauccuuau

SEQ ID NO: 10103 - RNA, 22 nt, Homo sapiens
aaaaguaauugcgaguuuuacc

SEQ ID NO: 10104 - RNA, 22 nt, Homo sapiens
aaaaguaauugugguuuuggcc

SEQ ID NO: 10105 - RNA, 22 nt, Homo sapiens
aaaaguaauugcgguuuuugcc

SEQ ID NO: 10106 - RNA, 22 nt, Homo sapiens
aaaaguaauugugguuuuugcc

SEQ ID NO: 10107 - RNA, 22 nt, Homo sapiens
aaaaguaaucgcgguuuuuguc

SEQ ID NO: 10108 - RNA, 22 nt, Homo sapiens
aaaaguaauugcggauuuugcc

SEQ ID NO: 10109 - RNA, 22 nt, Homo sapiens
aaaaguaauugcggucuuuggu

SEQ ID NO: 10110 - RNA, 21 nt, Homo sapiens
uaaaguaaauaugcaccaaaa

SEQ ID NO: 10111 - RNA, 23 nt, Homo sapiens
aguauguucuuccaggacagaac

SEQ ID NO: 10112 - RNA, 22 nt, Homo sapiens
uugcauagucacaaaagugauc

SEQ ID NO: 10113 - RNA, 23 nt, Homo sapiens
ugguuguaguccgugcgagaaua

SEQ ID NO: 10114 - RNA, 23 nt, Homo sapiens
aguauguucuuccaggacagaac

SEQ ID NO: 10115 - RNA, 23 nt, Homo sapiens
caagucuuauuugagcaccuguu

SEQ ID NO: 10116 - RNA, 23 nt, Homo sapiens
cuggagauauggaagagcugugu

SEQ ID NO: 10117 - RNA, 23 nt, Homo sapiens
uuauugcuuaagaauacgcguag

SEQ ID NO: 10118 - RNA, 22 nt, Homo sapiens
uugcauagucacaaaagugauc

SEQ ID NO: 10119 - RNA, 22 nt, Homo sapiens
aacuguuugcagaggaaacuga

SEQ ID NO: 10120 - RNA, 21 nt, Homo sapiens
uagcagcacagaaauauuggc

SEQ ID NO: 10121 - RNA, 22 nt, Homo sapiens
uuuugcaauauguuccugaaua

SEQ ID NO: 10122 - RNA, 20 nt, Homo sapiens
auggagauagauauagaaau

SEQ ID NO: 10123 - RNA, 19 nt, Homo sapiens
ucuaggcugguacugcuga

SEQ ID NO: 10124 - RNA, 23 nt, Homo sapiens
caagucuuauuugagcaccuguu

SEQ ID NO: 10125 - RNA, 22 nt, Homo sapiens
cugugcgugugacagcggcuga

SEQ ID NO: 10126 - RNA, 22 nt, Homo sapiens
uaaugccccuaaaaauccuuau

SEQ ID NO: 10127 - RNA, 22 nt, Homo sapiens
aaaaguaauugcgaguuuuacc

SEQ ID NO: 10128 - RNA, 22 nt, Homo sapiens
aaaaguaauugugguuuuggcc

SEQ ID NO: 10129 - RNA, 22 nt, Homo sapiens
aaaaguaauugcgguuuuugcc

SEQ ID NO: 10130 - RNA, 22 nt, Homo sapiens
aaaaguaauugugguuuuugcc

SEQ ID NO: 10131 - RNA, 22 nt, Homo sapiens
aaaaguaaucgcgguuuuuguc

SEQ ID NO: 10132 - RNA, 22 nt, Homo sapiens
aaaaguaauugcggauuuugcc

SEQ ID NO: 10133 - RNA, 22 nt, Homo sapiens
aaaaguaauugcggucuuuggu

SEQ ID NO: 10134 - RNA, 21 nt, Homo sapiens
uaaaguaaauaugcaccaaaa

SEQ ID NO: 10135 - RNA, 23 nt, Homo sapiens
aguauguucuuccaggacagaac

SEQ ID NO: 10136 - RNA, 27 nt, Homo sapiens
accuucuuguauaagcacugugcuaaa

SEQ ID NO: 10137 - RNA, 22 nt, Homo sapiens
uucuggaauucugugugaggga

SEQ ID NO: 10138 - RNA, 21 nt, Homo sapiens
uaccacaggguagaaccacgg

SEQ ID NO: 10139 - RNA, 22 nt, Homo sapiens
uuauaaagcaaugagacugauu

SEQ ID NO: 10140 - RNA, 22 nt, Homo sapiens
ucagcaaacauuuauugugugc

SEQ ID NO: 10141 - RNA, 22 nt, Homo sapiens
agacuucccauuugaagguggc

SEQ ID NO: 10142 - RNA, 23 nt, Homo sapiens
aucccuugcaggggcuguugggu

SEQ ID NO: 10143 - RNA, 22 nt, Homo sapiens
uucaccaccuucuccacccagc

SEQ ID NO: 10144 - RNA, 22 nt, Homo sapiens
aagcugccaguugaagaacugu

SEQ ID NO: 10145 - RNA, 22 nt, Homo sapiens
agaucagaaggugauuguggcu

SEQ ID NO: 10146 - RNA, 22 nt, Homo sapiens
aaaagcuggguugagagggcga

SEQ ID NO: 10147 - RNA, 22 nt, Homo sapiens
aaaagcuggguugagagggcaa

SEQ ID NO: 10148 - RNA, 20 nt, Homo sapiens
aaaagcuggguugagagggu

SEQ ID NO: 10149 - RNA, 19 nt, Homo sapiens
aaaagcuggguugagagga

SEQ ID NO: 10150 - RNA, 20 nt, Homo sapiens
gugcauugcuguugcauugc

SEQ ID NO: 10151 - RNA, 22 nt, Homo sapiens
gagugccuucuuuuggagcguu

SEQ ID NO: 10152 - RNA, 22 nt, Homo sapiens
aagugccuccuuuuagaguguu

SEQ ID NO: 10153 - RNA, 23 nt, Homo sapiens
agugccugagggaguaagagccc

SEQ ID NO: 10154 - RNA, 22 nt, Homo sapiens
aagauguggaaaaauuggaauc

SEQ ID NO: 10155 - RNA, 19 nt, Homo sapiens
ugucucugcugggguuucu

SEQ ID NO: 10156 - RNA, 23 nt, Homo sapiens
acuugggcacugaaacaaugucc

SEQ ID NO: 10157 - RNA, 21 nt, Homo sapiens
uccuucugcuccgucccccag

SEQ ID NO: 10158 - RNA, 21 nt, Homo sapiens
uaccacaggguagaaccacgg

SEQ ID NO: 10159 - RNA, 22 nt, Homo sapiens
uguaacagcaacuccaugugga

SEQ ID NO: 10160 - RNA, 23 nt, Homo sapiens
agcuacauugucugcuggguuuc

SEQ ID NO: 10161 - RNA, 21 nt, Homo sapiens
agcuacaucuggcuacugggu

SEQ ID NO: 10162 - RNA, 21 nt, Homo sapiens
uggcagggaggcugggagggg

SEQ ID NO: 10163 - RNA, 22 nt, Homo sapiens
aggcauugacuucucacuagcu

SEQ ID NO: 10164 - RNA, 18 nt, Homo sapiens
cgggcguggugguggggg

SEQ ID NO: 10165 - RNA, 19 nt, Homo sapiens
gaugaugcugcugaugcug

SEQ ID NO: 10166 - RNA, 22 nt, Homo sapiens
cgcaggggccgggugcucaccg

SEQ ID NO: 10167 - RNA, 25 nt, Homo sapiens
cccccacaaccgcgcuugacuagcu

SEQ ID NO: 10168 - RNA, 22 nt, Homo sapiens
cucccacugcuucacuugacua

SEQ ID NO: 10169 - RNA, 21 nt, Homo sapiens
uaaagugcugacagugcagau

SEQ ID NO: 10170 - RNA, 23 nt, Homo sapiens
cagugcaaugauauugucaaagc

SEQ ID NO: 10171 - RNA, 22 nt, Homo sapiens
uaugucugcugaccaucaccuu

SEQ ID NO: 10172 - RNA, 22 nt, Homo sapiens
ugagaccucuggguucugagcu

SEQ ID NO: 10173 - RNA, 23 nt, Homo sapiens
uaaggugcaucuagugcagauag

SEQ ID NO: 10174 - RNA, 21 nt, Homo sapiens
cggcggggacggcgauugguc

SEQ ID NO: 10175 - RNA, 22 nt, Homo sapiens
uuggggaaacggccgcugagug

SEQ ID NO: 10176 - RNA, 23 nt, Homo sapiens
agcucggucugaggccccucagu

SEQ ID NO: 10177 - RNA, 19 nt, Homo sapiens
aggcugcggaauucaggac

SEQ ID NO: 10178 - RNA, 22 nt, Homo sapiens
aggcggggcgccgcgggaccgc

SEQ ID NO: 10179 - RNA, 22 nt, Homo sapiens
ugcggggcuagggcuaacagca

SEQ ID NO: 10180 - RNA, 22 nt, Homo sapiens
cugcccuggcccgagggaccga

SEQ ID NO: 10181 - RNA, 22 nt, Homo sapiens
aggcagcgggguguaguggaua

SEQ ID NO: 10182 - RNA, 24 nt, Homo sapiens
agccuggaagcuggagccugcagu

SEQ ID NO: 10183 - RNA, 21 nt, Homo sapiens
agggcccccccucaauccugu

SEQ ID NO: 10184 - RNA, 20 nt, Homo sapiens
ggggagcuguggaagcagua

SEQ ID NO: 10185 - RNA, 20 nt, Homo sapiens
ggggagcuguggaagcagua

SEQ ID NO: 10186 - RNA, 24 nt, Homo sapiens
uggggagcugaggcucugggggug

SEQ ID NO: 10187 - RNA, 22 nt, Homo sapiens
acucggcguggcgucggucgug

SEQ ID NO: 10188 - RNA, 22 nt, Homo sapiens
cucggcgcggggcgcgggcucc

SEQ ID NO: 10189 - RNA, 21 nt, Homo sapiens
gcccuccgcccgugcaccccg

SEQ ID NO: 10190 - RNA, 22 nt, Homo sapiens
ucugcccccuccgcugcugcca

SEQ ID NO: 10191 - RNA, 22 nt, Homo sapiens
cauugcacuugucucggucuga

SEQ ID NO: 10192 - RNA, 20 nt, Homo sapiens
acugccccaggugcugcugg

SEQ ID NO: 10193 - RNA, 21 nt, Homo sapiens
gccccugggccuauccuagaa

SEQ ID NO: 10194 - RNA, 21 nt, Homo sapiens
cggggcagcucaguacaggau

SEQ ID NO: 10195 - RNA, 23 nt, Homo sapiens
ugagugugugugugugagugugu

SEQ ID NO: 10196 - RNA, 23 nt, Homo sapiens
acuugggcacugaaacaaugucc

SEQ ID NO: 10197 - RNA, 19 nt, Homo sapiens
aagugugcagggcacuggu

SEQ ID NO: 10198 - RNA, 25 nt, Homo sapiens
ggcggagggaaguagguccguuggu

SEQ ID NO: 10199 - RNA, 21 nt, Homo sapiens
cccggagccaggaugcagcuc

SEQ ID NO: 10200 - RNA, 18 nt, Homo sapiens
cagggaggugaaugugau

SEQ ID NO: 10201 - RNA, 23 nt, Homo sapiens
ucuggcuccgugucuucacuccc

SEQ ID NO: 10202 - RNA, 21 nt, Homo sapiens
uccugcgcgucccagaugccc

SEQ ID NO: 10203 - RNA, 21 nt, Homo sapiens
cggcggggacggcgauugguc

SEQ ID NO: 10204 - RNA, 23 nt, Homo sapiens
ugaguaccgccaugucuguuggg

SEQ ID NO: 10205 - RNA, 20 nt, Homo sapiens
ccuccugcccuccuugcugu

SEQ ID NO: 10206 - RNA, 23 nt, Homo sapiens
agugccugagggaguaagagccc

SEQ ID NO: 10207 - RNA, 19 nt, Homo sapiens
aggcugcggaauucaggac

SEQ ID NO: 10208 - RNA, 21 nt, Homo sapiens
cgcgggugcuuacugacccuu

SEQ ID NO: 10209 - RNA, 21 nt, Homo sapiens
cccggagccaggaugcagcuc

SEQ ID NO: 10210 - RNA, 21 nt, Homo sapiens
uuaggccgcagaucuggguga

SEQ ID NO: 10211 - RNA, 20 nt, Homo sapiens
ccccagggcgacgcggcggg

SEQ ID NO: 10212 - RNA, 22 nt, Homo sapiens
agaggcuggccgugaugaauuc

SEQ ID NO: 10213 - RNA, 20 nt, Homo sapiens
aaaguagcuguaccauuugc

SEQ ID NO: 10214 - RNA, 19 nt, Homo sapiens
gggcgccugugaucccaac

SEQ ID NO: 10215 - RNA, 19 nt, Homo sapiens
aggcugcggaauucaggac

SEQ ID NO: 10216 - RNA, 21 nt, Homo sapiens
uacuuggaaaggcaucaguug

SEQ ID NO: 10217 - RNA, 20 nt, Homo sapiens
ggggagcuguggaagcagua

SEQ ID NO: 10218 - RNA, 21 nt, Homo sapiens
ccccaccuccucucuccucag

SEQ ID NO: 10219 - RNA, 22 nt, Homo sapiens
ugagccccugugccgcccccag

SEQ ID NO: 10220 - RNA, 20 nt, Homo sapiens
ugagcccuguccucccgcag

SEQ ID NO: 10221 - RNA, 24 nt, Homo sapiens
ucccugagacccuuuaaccuguga

SEQ ID NO: 10222 - RNA, 22 nt, Homo sapiens
ucccugagacccuaacuuguga

SEQ ID NO: 10223 - RNA, 23 nt, Homo sapiens
ccucagggcuguagaacagggcu

SEQ ID NO: 10224 - RNA, 21 nt, Homo sapiens
ucgaggagcucacagucuagu

SEQ ID NO: 10225 - RNA, 22 nt, Homo sapiens
uccgagccugggucucccucuu

SEQ ID NO: 10226 - RNA, 21 nt, Homo sapiens
uggaggagaaggaaggugaug

SEQ ID NO: 10227 - RNA, 20 nt, Homo sapiens
ggggagcuguggaagcagua

SEQ ID NO: 10228 - RNA, 23 nt, Homo sapiens
ccugcagcgacuugauggcuucc

SEQ ID NO: 10229 - RNA, 20 nt, Homo sapiens
ucugcaggguuugcuuugag

SEQ ID NO: 10230 - RNA, 20 nt, Homo sapiens
guguguggaaaugcuucugc

SEQ ID NO: 10231 - RNA, 21 nt, Homo sapiens
cggcggggacggcgauugguc

SEQ ID NO: 10232 - RNA, 23 nt, Homo sapiens
uaaaucccauggugccuucuccu

SEQ ID NO: 10233 - RNA, 22 nt, Homo sapiens
agacuucccauuugaagguggc

SEQ ID NO: 10234 - RNA, 22 nt, Homo sapiens
aggcggggcgccgcgggaccgc

SEQ ID NO: 10235 - RNA, 22 nt, Homo sapiens
gguggcccggccgugccugagg

SEQ ID NO: 10236 - RNA, 21 nt, Homo sapiens
agagaagaagaucagccugca

SEQ ID NO: 10237 - RNA, 24 nt, Homo sapiens
ucccugagacccuuuaaccuguga

SEQ ID NO: 10238 - RNA, 22 nt, Homo sapiens
ucccugagacccuaacuuguga

SEQ ID NO: 10239 - RNA, 23 nt, Homo sapiens
ccucagggcuguagaacagggcu

SEQ ID NO: 10240 - RNA, 20 nt, Homo sapiens
ccucugggcccuuccuccag

SEQ ID NO: 10241 - RNA, 22 nt, Homo sapiens
ucucugggccugugucuuaggc

SEQ ID NO: 10242 - RNA, 22 nt, Homo sapiens
aauugcacgguauccaucugua

SEQ ID NO: 10243 - RNA, 22 nt, Homo sapiens
ucuucucuguuuuggccaugug

SEQ ID NO: 10244 - RNA, 18 nt, Homo sapiens
cgggcguggugguggggg

SEQ ID NO: 10245 - RNA, 17 nt, Homo sapiens
gugggggagaggcuguc

SEQ ID NO: 10246 - RNA, 22 nt, Homo sapiens
ggagacgcggcccuguuggagu

SEQ ID NO: 10247 - RNA, 20 nt, Homo sapiens
ccccagggcgacgcggcggg

SEQ ID NO: 10248 - RNA, 22 nt, Homo sapiens
cauugcacuugucucggucuga

SEQ ID NO: 10249 - RNA, 21 nt, Homo sapiens
gccccugggccuauccuagaa

SEQ ID NO: 10250 - RNA, 23 nt, Homo sapiens
ucccccaggugugauucugauuu

SEQ ID NO: 10251 - RNA, 22 nt, Homo sapiens
uuuguucguucggcucgcguga

SEQ ID NO: 10252 - RNA, 23 nt, Homo sapiens
ugaggggcagagagcgagacuuu

SEQ ID NO: 10253 - RNA, 22 nt, Homo sapiens
uggugggcacagaaucuggacu

SEQ ID NO: 10254 - RNA, 24 nt, Homo sapiens
acugggggcuuucgggcucugcgu

SEQ ID NO: 10255 - RNA, 22 nt, Homo sapiens
uggugggccgcagaacaugugc

SEQ ID NO: 10256 - RNA, 22 nt, Homo sapiens
ugagaccucuggguucugagcu

SEQ ID NO: 10257 - RNA, 22 nt, Homo sapiens
cacuggcuccuuucuggguaga

SEQ ID NO: 10258 - RNA, 21 nt, Homo sapiens
gugccagcugcagugggggag

SEQ ID NO: 10259 - RNA, 21 nt, Homo sapiens
uggcagggaggcugggagggg

SEQ ID NO: 10260 - RNA, 22 nt, Homo sapiens
ugagccccugugccgcccccag

SEQ ID NO: 10261 - RNA, 17 nt, Homo sapiens
ucccuguucgggcgcca

SEQ ID NO: 10262 - RNA, 22 nt, Homo sapiens
uucuggaauucugugugaggga

SEQ ID NO: 10263 - RNA, 22 nt, Homo sapiens
aagcccuuaccccaaaaagcau

SEQ ID NO: 10264 - RNA, 18 nt, Homo sapiens
cagggaggugaaugugau

SEQ ID NO: 10265 - RNA, 23 nt, Homo sapiens
uaaggugcaucuagugcagauag

SEQ ID NO: 10266 - RNA, 22 nt, Homo sapiens
cgcaggggccgggugcucaccg

SEQ ID NO: 10267 - RNA, 22 nt, Homo sapiens
uacccagagcaugcagugugaa

SEQ ID NO: 10268 - RNA, 20 nt, Homo sapiens
ccccagggcgacgcggcggg

SEQ ID NO: 10269 - RNA, 22 nt, Homo sapiens
acagcaggcacagacaggcagu

SEQ ID NO: 10270 - RNA, 22 nt, Homo sapiens
aauugcacuuuagcaaugguga

SEQ ID NO: 10271 - RNA, 22 nt, Homo sapiens
gccugcugggguggaaccuggu

SEQ ID NO: 10272 - RNA, 25 nt, Homo sapiens
aggggugguguugggacagcuccgu

SEQ ID NO: 10273 - RNA, 22 nt, Homo sapiens
ugcggggcuagggcuaacagca

SEQ ID NO: 10274 - RNA, 20 nt, Homo sapiens
cggcucugggucugugggga

SEQ ID NO: 10275 - RNA, 22 nt, Homo sapiens
cugcccuggcccgagggaccga

SEQ ID NO: 10276 - RNA, 20 nt, Homo sapiens
ggggagcuguggaagcagua

SEQ ID NO: 10277 - RNA, 22 nt, Homo sapiens
ugcccuuaaaggugaacccagu

SEQ ID NO: 10278 - RNA, 24 nt, Homo sapiens
uuuggcaaugguagaacucacacu

SEQ ID NO: 10279 - RNA, 21 nt, Homo sapiens
cggcggggacggcgauugguc

SEQ ID NO: 10280 - RNA, 22 nt, Homo sapiens
uagguaguuuccuguuguuggg

SEQ ID NO: 10281 - RNA, 20 nt, Homo sapiens
auuccuagaaauuguucaua

SEQ ID NO: 10282 - RNA, 21 nt, Homo sapiens
gcgacccacucuugguuucca

SEQ ID NO: 10283 - RNA, 21 nt, Homo sapiens
gcgacccauacuugguuucag

SEQ ID NO: 10284 - RNA, 24 nt, Homo sapiens
ugccugggucucuggccugcgcgu

SEQ ID NO: 10285 - RNA, 22 nt, Homo sapiens
aggcggggcgccgcgggaccgc

SEQ ID NO: 10286 - RNA, 22 nt, Homo sapiens
ugcggggcuagggcuaacagca

SEQ ID NO: 10287 - RNA, 23 nt, Homo sapiens
cgggucggaguuagcucaagcgg

SEQ ID NO: 10288 - RNA, 20 nt, Homo sapiens
uacaguauagaugauguacu

SEQ ID NO: 10289 - RNA, 23 nt, Homo sapiens
caaagugcuuacagugcagguag

SEQ ID NO: 10290 - RNA, 22 nt, Homo sapiens
uguaacagcaacuccaugugga

SEQ ID NO: 10291 - RNA, 22 nt, Homo sapiens
cucccacugcuucacuugacua

SEQ ID NO: 10292 - RNA, 21 nt, Homo sapiens
cacauuacacggucgaccucu

SEQ ID NO: 10293 - RNA, 22 nt, Homo sapiens
uauguaauaugguccacaucuu

SEQ ID NO: 10294 - RNA, 22 nt, Homo sapiens
aggcaguguauuguuagcuggc

SEQ ID NO: 10295 - RNA, 22 nt, Homo sapiens
uacugcagacguggcaaucaug

SEQ ID NO: 10296 - RNA, 21 nt, Homo sapiens
uacugcagacaguggcaauca

SEQ ID NO: 10297 - RNA, 21 nt, Homo sapiens
gugucuuuugcucugcaguca

SEQ ID NO: 10298 - RNA, 24 nt, Homo sapiens
aaagacauaggauagagucaccuc

SEQ ID NO: 10299 - RNA, 22 nt, Homo sapiens
ugagccccugugccgcccccag

SEQ ID NO: 10300 - RNA, 26 nt, Homo sapiens
gaugaugauggcagcaaauucugaaa

SEQ ID NO: 10301 - RNA, 22 nt, Homo sapiens
uggguggucuggagauuugugc

SEQ ID NO: 10302 - RNA, 22 nt, Homo sapiens
uggagagaaaggcaguuccuga

SEQ ID NO: 10303 - RNA, 21 nt, Homo sapiens
ccaccaccgugucugacacuu

SEQ ID NO: 10304 - RNA, 20 nt, Homo sapiens
ccucugggcccuuccuccag

SEQ ID NO: 10305 - RNA, 22 nt, Homo sapiens
ucucugggccugugucuuaggc

SEQ ID NO: 10306 - RNA, 22 nt, Homo sapiens
aucaugaugggcuccucggugu

SEQ ID NO: 10307 - RNA, 18 nt, Homo sapiens
ugcuuccuuucagagggu

SEQ ID NO: 10308 - RNA, 22 nt, Homo sapiens
aucuggagguaagaagcacuuu

SEQ ID NO: 10309 - RNA, 19 nt, Homo sapiens
aagcagcugccucugaggc

SEQ ID NO: 10310 - RNA, 22 nt, Homo sapiens
aggcauugacuucucacuagcu

SEQ ID NO: 10311 - RNA, 22 nt, Homo sapiens
caaagaauucuccuuuugggcu

SEQ ID NO: 10312 - RNA, 22 nt, Homo sapiens
ucugcccccuccgcugcugcca

SEQ ID NO: 10313 - RNA, 22 nt, Homo sapiens
uagcuuaucagacugauguuga

SEQ ID NO: 10314 - RNA, 22 nt, Homo sapiens
aaggagcucacagucuauugag

SEQ ID NO: 10315 - RNA, 20 nt, Homo sapiens
acugccccaggugcugcugg

SEQ ID NO: 10316 - RNA, 23 nt, Homo sapiens
gcaaagcacacggccugcagaga

SEQ ID NO: 10317 - RNA, 22 nt, Homo sapiens
uaaugccccuaaaaauccuuau

SEQ ID NO: 10318 - RNA, 21 nt, Homo sapiens
cggggcagcucaguacaggau

SEQ ID NO: 10319 - RNA, 24 nt, Homo sapiens
acaaagugcuucccuuuagagugu

SEQ ID NO: 10320 - RNA, 22 nt, Homo sapiens
acaaagugcuucccuuuagagu

SEQ ID NO: 10321 - RNA, 21 nt, Homo sapiens
aggguaagcugaaccucugau

SEQ ID NO: 10322 - RNA, 19 nt, Homo sapiens
ugagcugcuguaccaaaau

SEQ ID NO: 10323 - RNA, 19 nt, Homo sapiens
aagcagcugccucugaggc

SEQ ID NO: 10324 - RNA, 23 nt, Homo sapiens
aaggagcuuacaaucuagcuggg

SEQ ID NO: 10325 - RNA, 22 nt, Homo sapiens
ucuucucuguuuuggccaugug

SEQ ID NO: 10326 - RNA, 20 nt, Homo sapiens
ccccagggcgacgcggcggg

SEQ ID NO: 10327 - RNA, 22 nt, Homo sapiens
uuggggaaacggccgcugagug

SEQ ID NO: 10328 - RNA, 21 nt, Homo sapiens
uucacaguggcuaaguuccgc

SEQ ID NO: 10329 - RNA, 21 nt, Homo sapiens
aggggugcuaucugugauuga

SEQ ID NO: 10330 - RNA, 23 nt, Homo sapiens
uggugcggagagggcccacagug

SEQ ID NO: 10331 - RNA, 21 nt, Homo sapiens
uggaggagaaggaaggugaug

SEQ ID NO: 10332 - RNA, 22 nt, Homo sapiens
ugagccccugugccgcccccag

SEQ ID NO: 10333 - RNA, 22 nt, Homo sapiens
ccucuuccccuugucucuccag

SEQ ID NO: 10334 - RNA, 24 nt, Homo sapiens
ucccugagacccuuuaaccuguga

SEQ ID NO: 10335 - RNA, 22 nt, Homo sapiens
ucccugagacccuaacuuguga

SEQ ID NO: 10336 - RNA, 22 nt, Homo sapiens
augguacccuggcauacugagu

SEQ ID NO: 10337 - RNA, 22 nt, Homo sapiens
augguacccuggcauacugagu

SEQ ID NO: 10338 - RNA, 23 nt, Homo sapiens
ccucagggcuguagaacagggcu

SEQ ID NO: 10339 - RNA, 23 nt, Homo sapiens
uauggcuuuucauuccuauguga

SEQ ID NO: 10340 - RNA, 20 nt, Homo sapiens
auuccuagaaauuguucaua

SEQ ID NO: 10341 - RNA, 22 nt, Homo sapiens
auucugcauuuuuagcaaguuc

SEQ ID NO: 10342 - RNA, 21 nt, Homo sapiens
ccccaccuccucucuccucag

SEQ ID NO: 10343 - RNA, 22 nt, Homo sapiens
ggagacgcggcccuguuggagu

SEQ ID NO: 10344 - RNA, 21 nt, Homo sapiens
cggcggggacggcgauugguc

SEQ ID NO: 10345 - RNA, 21 nt, Homo sapiens
aggggugcuaucugugauuga

SEQ ID NO: 10346 - RNA, 22 nt, Homo sapiens
aggcggggcgccgcgggaccgc

SEQ ID NO: 10347 - RNA, 17 nt, Homo sapiens
ucucgcuggggccucca

SEQ ID NO: 10348 - RNA, 22 nt, Homo sapiens
ugcggggcuagggcuaacagca

SEQ ID NO: 10349 - RNA, 21 nt, Homo sapiens
aguuaggauuaggucguggaa

SEQ ID NO: 10350 - RNA, 23 nt, Homo sapiens
caagucuuauuugagcaccuguu

SEQ ID NO: 10351 - RNA, 21 nt, Homo sapiens
cauaaaguagaaagcacuacu

SEQ ID NO: 10352 - RNA, 23 nt, Homo sapiens
ugguuguaguccgugcgagaaua

SEQ ID NO: 10353 - RNA, 21 nt, Homo sapiens
aucacauugccagggauuucc

SEQ ID NO: 10354 - RNA, 21 nt, Homo sapiens
aucacauugccagggauuacc

SEQ ID NO: 10355 - RNA, 22 nt, Homo sapiens
uuauaaagcaaugagacugauu

SEQ ID NO: 10356 - RNA, 21 nt, Homo sapiens
aucauagaggaaaauccacgu

SEQ ID NO: 10357 - RNA, 22 nt, Homo sapiens
aucauagaggaaaauccauguu

SEQ ID NO: 10358 - RNA, 22 nt, Homo sapiens
aucacacaaaggcaacuuuugu

SEQ ID NO: 10359 - RNA, 21 nt, Homo sapiens
uuaagacuugcagugauguuu

SEQ ID NO: 10360 - RNA, 22 nt, Homo sapiens
aaaaguaauugcgaguuuuacc

SEQ ID NO: 10361 - RNA, 22 nt, Homo sapiens
aaaaguaauugugguuuuggcc

SEQ ID NO: 10362 - RNA, 22 nt, Homo sapiens
aaaaguaauugcgguuuuugcc

SEQ ID NO: 10363 - RNA, 22 nt, Homo sapiens
aaaaguaauugugguuuuugcc

SEQ ID NO: 10364 - RNA, 22 nt, Homo sapiens
aaaaguaaucgcgguuuuuguc

SEQ ID NO: 10365 - RNA, 22 nt, Homo sapiens
aaaaguaauugcggauuuugcc

SEQ ID NO: 10366 - RNA, 22 nt, Homo sapiens
aaaaguaauugcggucuuuggu

SEQ ID NO: 10367 - RNA, 21 nt, Homo sapiens
uaaaguaaauaugcaccaaaa

SEQ ID NO: 10368 - RNA, 22 nt, Homo sapiens
cuggacugagccgugcuacugg

SEQ ID NO: 10369 - RNA, 19 nt, Homo sapiens
gaugaugcugcugaugcug

SEQ ID NO: 10370 - RNA, 20 nt, Homo sapiens
agagguauagggcaugggaa

SEQ ID NO: 10371 - RNA, 21 nt, Homo sapiens
acuggacuuggagucagaagg

SEQ ID NO: 10372 - RNA, 22 nt, Homo sapiens
gaaguuguucgugguggauucg

SEQ ID NO: 10373 - RNA, 22 nt, Homo sapiens
acuggacuuagggucagaaggc

SEQ ID NO: 10374 - RNA, 21 nt, Homo sapiens
gcaguccaugggcauauacac

SEQ ID NO: 10375 - RNA, 23 nt, Homo sapiens
uaauccuugcuaccugggugaga

SEQ ID NO: 10376 - RNA, 22 nt, Homo sapiens
aaugcacccgggcaaggauucu

SEQ ID NO: 10377 - RNA, 22 nt, Homo sapiens
aaugcaccugggcaaggauuca

SEQ ID NO: 10378 - RNA, 22 nt, Homo sapiens
agaaggaaauugaauucauuua

SEQ ID NO: 10379 - RNA, 22 nt, Homo sapiens
aggcauugacuucucacuagcu

SEQ ID NO: 10380 - RNA, 22 nt, Homo sapiens
ucugggcaacaaagugagaccu

SEQ ID NO: 10381 - RNA, 22 nt, Homo sapiens
cagugcaaugaugaaagggcau

SEQ ID NO: 10382 - RNA, 20 nt, Homo sapiens
guguguggaaaugcuucugc

SEQ ID NO: 10383 - RNA, 20 nt, Homo sapiens
ccccagggcgacgcggcggg

SEQ ID NO: 10384 - RNA, 21 nt, Homo sapiens
caaagaggaaggucccauuac

SEQ ID NO: 10385 - RNA, 22 nt, Homo sapiens
uaugcauuguauuuuuaggucc

SEQ ID NO: 10386 - RNA, 25 nt, Homo sapiens
gcugggcagggcuucugagcuccuu

SEQ ID NO: 10387 - RNA, 22 nt, Homo sapiens
agucauuggaggguuugagcag

SEQ ID NO: 10388 - RNA, 19 nt, Homo sapiens
aguguggcuuucuuagagc

SEQ ID NO: 10389 - RNA, 24 nt, Homo sapiens
uggcccugacugaagaccagcagu

SEQ ID NO: 10390 - RNA, 25 nt, Homo sapiens
ugggaacggguuccggcagacgcug

SEQ ID NO: 10391 - RNA, 21 nt, Homo sapiens
gcccuccgcccgugcaccccg

SEQ ID NO: 10392 - RNA, 21 nt, Homo sapiens
uccugcgcgucccagaugccc

SEQ ID NO: 10393 - RNA, 21 nt, Homo sapiens
cggcggggacggcgauugguc

SEQ ID NO: 10394 - RNA, 23 nt, Homo sapiens
ugaggggcagagagcgagacuuu

SEQ ID NO: 10395 - RNA, 19 nt, Homo sapiens
ugagcugcuguaccaaaau

SEQ ID NO: 10396 - RNA, 19 nt, Homo sapiens
aggcacggugucagcaggc

SEQ ID NO: 10397 - RNA, 20 nt, Homo sapiens
guccgcucggcgguggccca

SEQ ID NO: 10398 - RNA, 25 nt, Homo sapiens
ggcggagggaaguagguccguuggu

SEQ ID NO: 10399 - RNA, 22 nt, Homo sapiens
aggcggggcgccgcgggaccgc

SEQ ID NO: 10400 - RNA, 22 nt, Homo sapiens
ugcggggcuagggcuaacagca

SEQ ID NO: 10401 - RNA, 21 nt, Homo sapiens
uggcagggaggcugggagggg

SEQ ID NO: 10402 - RNA, 20 nt, Homo sapiens
gugucugggcggacagcugc

SEQ ID NO: 10403 - RNA, 22 nt, Homo sapiens
acccgucccguucguccccgga

SEQ ID NO: 10404 - RNA, 18 nt, Homo sapiens
gucccuguucaggcgcca

SEQ ID NO: 10405 - RNA, 18 nt, Homo sapiens
cagggaggugaaugugau

SEQ ID NO: 10406 - RNA, 21 nt, Homo sapiens
ucgaggagcucacagucuagu

SEQ ID NO: 10407 - RNA, 22 nt, Homo sapiens
ucgugucuuguguugcagccgg

SEQ ID NO: 10408 - RNA, 23 nt, Homo sapiens
uaaggugcaucuagugcagauag

SEQ ID NO: 10409 - RNA, 22 nt, Homo sapiens
ucugcccccuccgcugcugcca

SEQ ID NO: 10410 - RNA, 22 nt, Homo sapiens
acacagggcuguugugaagacu

SEQ ID NO: 10411 - RNA, 22 nt, Homo sapiens
aaggagcucacagucuauugag

SEQ ID NO: 10412 - RNA, 20 nt, Homo sapiens
acugccccaggugcugcugg

SEQ ID NO: 10413 - RNA, 23 nt, Homo sapiens
ucccccaggugugauucugauuu

SEQ ID NO: 10414 - RNA, 23 nt, Homo sapiens
ugaggggcagagagcgagacuuu

SEQ ID NO: 10415 - RNA, 21 nt, Homo sapiens
cggggcagcucaguacaggau

SEQ ID NO: 10416 - RNA, 24 nt, Homo sapiens
acugggggcuuucgggcucugcgu

SEQ ID NO: 10417 - RNA, 22 nt, Homo sapiens
gucccucuccaaaugugucuug

SEQ ID NO: 10418 - RNA, 23 nt, Homo sapiens
aaggagcuuacaaucuagcuggg

SEQ ID NO: 10419 - RNA, 21 nt, Homo sapiens
uggaggagaaggaaggugaug

SEQ ID NO: 10420 - RNA, 22 nt, Homo sapiens
uauugcacucgucccggccucc

SEQ ID NO: 10421 - RNA, 21 nt, Homo sapiens
cccggagccaggaugcagcuc

SEQ ID NO: 10422 - RNA, 20 nt, Homo sapiens
ugagcccuguccucccgcag

SEQ ID NO: 10423 - RNA, 22 nt, Homo sapiens
gugugcggaaaugcuucugcua

SEQ ID NO: 10424 - RNA, 23 nt, Homo sapiens
cggcccgggcugcugcuguuccu

SEQ ID NO: 10425 - RNA, 21 nt, Homo sapiens
auuugugcuuggcucugucac

SEQ ID NO: 10426 - RNA, 22 nt, Homo sapiens
uccgagccugggucucccucuu

SEQ ID NO: 10427 - RNA, 21 nt, Homo sapiens
guggcugcacucacuuccuuc

SEQ ID NO: 10428 - RNA, 22 nt, Homo sapiens
ggagacgcggcccuguuggagu

SEQ ID NO: 10429 - RNA, 21 nt, Homo sapiens
ucgaggagcucacagucuagu

SEQ ID NO: 10430 - RNA, 21 nt, Homo sapiens
cggcggggacggcgauugguc

SEQ ID NO: 10431 - RNA, 22 nt, Homo sapiens
ucugcccccuccgcugcugcca

SEQ ID NO: 10432 - RNA, 22 nt, Homo sapiens
cauugcacuugucucggucuga

SEQ ID NO: 10433 - RNA, 20 nt, Homo sapiens
acugccccaggugcugcugg

SEQ ID NO: 10434 - RNA, 20 nt, Homo sapiens
ccucugggcccuuccuccag

SEQ ID NO: 10435 - RNA, 22 nt, Homo sapiens
ucucugggccugugucuuaggc

SEQ ID NO: 10436 - RNA, 23 nt, Homo sapiens
ucccccaggugugauucugauuu

SEQ ID NO: 10437 - RNA, 21 nt, Homo sapiens
cggggcagcucaguacaggau

SEQ ID NO: 10438 - RNA, 24 nt, Homo sapiens
acugggggcuuucgggcucugcgu

SEQ ID NO: 10439 - RNA, 22 nt, Homo sapiens
aggcggggcgccgcgggaccgc

SEQ ID NO: 10440 - RNA, 23 nt, Homo sapiens
uggugcggagagggcccacagug

SEQ ID NO: 10441 - RNA, 22 nt, Homo sapiens
ugcggggcuagggcuaacagca

SEQ ID NO: 10442 - RNA, 22 nt, Homo sapiens
ucaccagcccuguguucccuag

SEQ ID NO: 10443 - RNA, 20 nt, Homo sapiens
gugucugggcggacagcugc

SEQ ID NO: 10444 - RNA, 21 nt, Homo sapiens
acucuagcugccaaaggcgcu

SEQ ID NO: 10445 - RNA, 24 nt, Homo sapiens
uugcagcugccugggagugacuuc

SEQ ID NO: 10446 - RNA, 24 nt, Homo sapiens
ccagacagaauucuaugcacuuuc

SEQ ID NO: 10447 - RNA, 23 nt, Homo sapiens
agcugguguugugaaucaggccg

SEQ ID NO: 10448 - RNA, 23 nt, Homo sapiens
ucuggcuccgugucuucacuccc

SEQ ID NO: 10449 - RNA, 22 nt, Homo sapiens
ucgugucuuguguugcagccgg

SEQ ID NO: 10450 - RNA, 22 nt, Homo sapiens
uucccuuugucauccuaugccu

SEQ ID NO: 10451 - RNA, 22 nt, Homo sapiens
uucccuuugucauccuucgccu

SEQ ID NO: 10452 - RNA, 22 nt, Homo sapiens
aucuggagguaagaagcacuuu

SEQ ID NO: 10453 - RNA, 21 nt, Homo sapiens
acagucugcugagguuggagc

SEQ ID NO: 10454 - RNA, 21 nt, Homo sapiens
cggcggggacggcgauugguc

SEQ ID NO: 10455 - RNA, 22 nt, Homo sapiens
cauugcacuugucucggucuga

SEQ ID NO: 10456 - RNA, 23 nt, Homo sapiens
aggaccugcgggacaagauucuu

SEQ ID NO: 10457 - RNA, 20 nt, Homo sapiens
uaaggcacgcggugaaugcc

SEQ ID NO: 10458 - RNA, 22 nt, Homo sapiens
cucuagagggaagcacuuucug

SEQ ID NO: 10459 - RNA, 21 nt, Homo sapiens
aaagcgcuucccuucagagug

SEQ ID NO: 10460 - RNA, 21 nt, Homo sapiens
gaaagcgcuucucuuuagagg

SEQ ID NO: 10461 - RNA, 22 nt, Homo sapiens
aaagugcauccuuuuagagugu

SEQ ID NO: 10462 - RNA, 22 nt, Homo sapiens
cucuagagggaagcgcuuucug

SEQ ID NO: 10463 - RNA, 22 nt, Homo sapiens
cucuagagggaagcgcuuucug

SEQ ID NO: 10464 - RNA, 22 nt, Homo sapiens
cucuagagggaagcacuuucug

SEQ ID NO: 10465 - RNA, 22 nt, Homo sapiens
aaaaugguucccuuuagagugu

SEQ ID NO: 10466 - RNA, 23 nt, Homo sapiens
gaacgcgcuucccuauagagggu

SEQ ID NO: 10467 - RNA, 22 nt, Homo sapiens
cucuagagggaagcacuuucug

SEQ ID NO: 10468 - RNA, 23 nt, Homo sapiens
ucggggaucaucaugucacgaga

SEQ ID NO: 10469 - RNA, 22 nt, Homo sapiens
uggucuaggauuguuggaggag

SEQ ID NO: 10470 - RNA, 23 nt, Homo sapiens
gcgaggaccccucggggucugac

SEQ ID NO: 10471 - RNA, 22 nt, Homo sapiens
aggcggggcgccgcgggaccgc

SEQ ID NO: 10472 - RNA, 22 nt, Homo sapiens
ugcggggcuagggcuaacagca

SEQ ID NO: 10473 - RNA, 20 nt, Homo sapiens
ucugcaggguuugcuuugag

SEQ ID NO: 10474 - RNA, 22 nt, Homo sapiens
ucggccugaccacccaccccac

SEQ ID NO: 10475 - RNA, 22 nt, Homo sapiens
gugugcggaaaugcuucugcua

SEQ ID NO: 10476 - RNA, 23 nt, Homo sapiens
cggcccgggcugcugcuguuccu

SEQ ID NO: 10477 - RNA, 23 nt, Homo sapiens
caaagugcuuacagugcagguag

SEQ ID NO: 10478 - RNA, 22 nt, Homo sapiens
aacacaccugguuaaccucuuu

SEQ ID NO: 10479 - RNA, 21 nt, Homo sapiens
aggggugcuaucugugauuga

SEQ ID NO: 10480 - RNA, 22 nt, Homo sapiens
aacacaccuauucaaggauuca

SEQ ID NO: 10481 - RNA, 23 nt, Homo sapiens
uagcagcgggaacaguucugcag

SEQ ID NO: 10482 - RNA, 22 nt, Homo sapiens
uacugcagacguggcaaucaug

SEQ ID NO: 10483 - RNA, 21 nt, Homo sapiens
uacugcagacaguggcaauca

SEQ ID NO: 10484 - RNA, 19 nt, Homo sapiens
aggcugcggaauucaggac

SEQ ID NO: 10485 - RNA, 23 nt, Homo sapiens
aucgcugcgguugcgagcgcugu

SEQ ID NO: 10486 - RNA, 21 nt, Homo sapiens
aguuaggauuaggucguggaa

SEQ ID NO: 10487 - RNA, 22 nt, Homo sapiens
uagcagcacauaaugguuugug

SEQ ID NO: 10488 - RNA, 23 nt, Homo sapiens
ugauuguagccuuuuggaguaga

SEQ ID NO: 10489 - RNA, 23 nt, Homo sapiens
aaggagcuuacaaucuagcuggg

SEQ ID NO: 10490 - RNA, 23 nt, Homo sapiens
cucucaccacugcccucccacag

SEQ ID NO: 10491 - RNA, 24 nt, Homo sapiens
agccuggaagcuggagccugcagu

SEQ ID NO: 10492 - RNA, 24 nt, Homo sapiens
uugcagcugccugggagugacuuc

SEQ ID NO: 10493 - RNA, 22 nt, Homo sapiens
aaaagcuggguugagagggcga

SEQ ID NO: 10494 - RNA, 22 nt, Homo sapiens
aaaagcuggguugagagggcaa

SEQ ID NO: 10495 - RNA, 20 nt, Homo sapiens
aaaagcuggguugagagggu

SEQ ID NO: 10496 - RNA, 19 nt, Homo sapiens
aaaagcuggguugagagga

SEQ ID NO: 10497 - RNA, 22 nt, Homo sapiens
caaaguuuaagauccuugaagu

SEQ ID NO: 10498 - RNA, 17 nt, Homo sapiens
ucgccuccuccucuccc

SEQ ID NO: 10499 - RNA, 23 nt, Homo sapiens
cggcccgggcugcugcuguuccu

SEQ ID NO: 10500 - RNA, 23 nt, Homo sapiens
caacggaaucccaaaagcagcug

SEQ ID NO: 10501 - RNA, 23 nt, Homo sapiens
aggaagcccuggaggggcuggag

SEQ ID NO: 10502 - RNA, 22 nt, Homo sapiens
auccgcgcucugacucucugcc

SEQ ID NO: 10503 - RNA, 21 nt, Homo sapiens
uacaguacugugauaacugaa

SEQ ID NO: 10504 - RNA, 21 nt, Homo sapiens
uuaggccgcagaucuggguga

SEQ ID NO: 10505 - RNA, 22 nt, Homo sapiens
uuuucaacucuaaugggagaga

SEQ ID NO: 10506 - RNA, 21 nt, Homo sapiens
uugugcuugaucuaaccaugu

SEQ ID NO: 10507 - RNA, 22 nt, Homo sapiens
gaggguuggguggaggcucucc

SEQ ID NO: 10508 - RNA, 23 nt, Homo sapiens
acuucaccugguccacuagccgu

SEQ ID NO: 10509 - RNA, 21 nt, Homo sapiens
guguugaaacaaucucuacug

SEQ ID NO: 10510 - RNA, 22 nt, Homo sapiens
ucuucucuguuuuggccaugug

SEQ ID NO: 10511 - RNA, 17 nt, Homo sapiens
gugggggagaggcuguc

SEQ ID NO: 10512 - RNA, 17 nt, Homo sapiens
ucccaccgcugccaccc

SEQ ID NO: 10513 - RNA, 21 nt, Homo sapiens
uggacugcccugaucuggaga

SEQ ID NO: 10514 - RNA, 25 nt, Homo sapiens
ugggaacggguuccggcagacgcug

SEQ ID NO: 10515 - RNA, 22 nt, Homo sapiens
caaucacuaacuccacugccau

SEQ ID NO: 10516 - RNA, 22 nt, Homo sapiens
uaaugccccuaaaaauccuuau

SEQ ID NO: 10517 - RNA, 19 nt, Homo sapiens
ugagcugcuguaccaaaau

SEQ ID NO: 10518 - RNA, 22 nt, Homo sapiens
ggggguccccggugcucggauc

SEQ ID NO: 10519 - RNA, 20 nt, Homo sapiens
ggggagcuguggaagcagua

SEQ ID NO: 10520 - RNA, 21 nt, Homo sapiens
cccggagccaggaugcagcuc

SEQ ID NO: 10521 - RNA, 18 nt, Homo sapiens
ucagcuggcccucauuuc

SEQ ID NO: 10522 - RNA, 17 nt, Homo sapiens
gugggggagaggcuguc

SEQ ID NO: 10523 - RNA, 23 nt, Homo sapiens
uggaguccaggaaucugcauuuu

SEQ ID NO: 10524 - RNA, 22 nt, Homo sapiens
uaacacugucugguaaagaugg

SEQ ID NO: 10525 - RNA, 23 nt, Homo sapiens
ucuggcuccgugucuucacuccc

SEQ ID NO: 10526 - RNA, 21 nt, Homo sapiens
cggcggggacggcgauugguc

SEQ ID NO: 10527 - RNA, 22 nt, Homo sapiens
uaacacugucugguaacgaugu

SEQ ID NO: 10528 - RNA, 22 nt, Homo sapiens
aagcugccaguugaagaacugu

SEQ ID NO: 10529 - RNA, 23 nt, Homo sapiens
ucccccaggugugauucugauuu

SEQ ID NO: 10530 - RNA, 19 nt, Homo sapiens
gggcgccugugaucccaac

SEQ ID NO: 10531 - RNA, 24 nt, Homo sapiens
acugggggcuuucgggcucugcgu

SEQ ID NO: 10532 - RNA, 24 nt, Homo sapiens
ugccugggucucuggccugcgcgu

SEQ ID NO: 10533 - RNA, 22 nt, Homo sapiens
aggcggggcgccgcgggaccgc

SEQ ID NO: 10534 - RNA, 22 nt, Homo sapiens
cuccugagccauucugagccuc

SEQ ID NO: 10535 - RNA, 21 nt, Homo sapiens
cccggagccaggaugcagcuc

SEQ ID NO: 10536 - RNA, 22 nt, Homo sapiens
acucggcguggcgucggucgug

SEQ ID NO: 10537 - RNA, 22 nt, Homo sapiens
cucggcgcggggcgcgggcucc

SEQ ID NO: 10538 - RNA, 23 nt, Homo sapiens
ugagcgccucgacgacagagccg

SEQ ID NO: 10539 - RNA, 23 nt, Homo sapiens
ucucacacagaaaucgcacccgu

SEQ ID NO: 10540 - RNA, 22 nt, Homo sapiens
aucacacaaaggcaacuuuugu

SEQ ID NO: 10541 - RNA, 23 nt, Homo sapiens
ugaggggcagagagcgagacuuu

SEQ ID NO: 10542 - RNA, 19 nt, Homo sapiens
ugagcugcuguaccaaaau

SEQ ID NO: 10543 - RNA, 19 nt, Homo sapiens
aagcagcugccucugaggc

SEQ ID NO: 10544 - RNA, 21 nt, Homo sapiens
uggaggagaaggaaggugaug

SEQ ID NO: 10545 - RNA, 22 nt, Homo sapiens
ugagguaguagguuguaugguu

SEQ ID NO: 10546 - RNA, 21 nt, Homo sapiens
cccggagccaggaugcagcuc

SEQ ID NO: 10547 - RNA, 22 nt, Homo sapiens
ugagaacugaauuccauggguu

SEQ ID NO: 10548 - RNA, 20 nt, Homo sapiens
guguguggaaaugcuucugc

SEQ ID NO: 10549 - RNA, 23 nt, Homo sapiens
ugagcgccucgacgacagagccg

SEQ ID NO: 10550 - RNA, 23 nt, Homo sapiens
aggaccugcgggacaagauucuu

SEQ ID NO: 10551 - RNA, 22 nt, Homo sapiens
cgucaacacuugcugguuuccu

SEQ ID NO: 10552 - RNA, 23 nt, Homo sapiens
ugagugugugugugugagugugu

SEQ ID NO: 10553 - RNA, 22 nt, Homo sapiens
cacacacugcaauuacuuuugc

SEQ ID NO: 10554 - RNA, 21 nt, Homo sapiens
agaccuggcccagaccucagc

SEQ ID NO: 10555 - RNA, 22 nt, Homo sapiens
uggagugugacaaugguguuug

SEQ ID NO: 10556 - RNA, 22 nt, Homo sapiens
acacagggcuguugugaagacu

SEQ ID NO: 10557 - RNA, 23 nt, Homo sapiens
ucccccaggugugauucugauuu

SEQ ID NO: 10558 - RNA, 22 nt, Homo sapiens
agaggcuggccgugaugaauuc

SEQ ID NO: 10559 - RNA, 23 nt, Homo sapiens
cacucagccuugagggcacuuuc

SEQ ID NO: 10560 - RNA, 18 nt, Homo sapiens
uucacagggaggugucau

SEQ ID NO: 10561 - RNA, 23 nt, Homo sapiens
caaagcgcuucucuuuagagugu

SEQ ID NO: 10562 - RNA, 21 nt, Homo sapiens
cuccagagggaaguacuuucu

SEQ ID NO: 10563 - RNA, 21 nt, Homo sapiens
cuccagagggaugcacuuucu

SEQ ID NO: 10564 - RNA, 24 nt, Homo sapiens
acugggggcuuucgggcucugcgu

SEQ ID NO: 10565 - RNA, 20 nt, Homo sapiens
guagaggagauggcgcaggg

SEQ ID NO: 10566 - RNA, 22 nt, Homo sapiens
uuuccggcucgcgugggugugu

SEQ ID NO: 10567 - RNA, 22 nt, Homo sapiens
ucaccagcccuguguucccuag

SEQ ID NO: 10568 - RNA, 21 nt, Homo sapiens
acggugcuggauguggccuuu

SEQ ID NO: 10569 - RNA, 23 nt, Homo sapiens
agcugguguugugaaucaggccg

SEQ ID NO: 10570 - RNA, 22 nt, Homo sapiens
ggagacgcggcccuguuggagu

SEQ ID NO: 10571 - RNA, 22 nt, Homo sapiens
uggcaguguauuguuagcuggu

SEQ ID NO: 10572 - RNA, 20 nt, Homo sapiens
acucaaacugugggggcacu

SEQ ID NO: 10573 - RNA, 22 nt, Homo sapiens
uagcaccaucugaaaucgguua

SEQ ID NO: 10574 - RNA, 21 nt, Homo sapiens
aggcaagaugcuggcauagcu

SEQ ID NO: 10575 - RNA, 22 nt, Homo sapiens
cuccuauaugaugccuuucuuc

SEQ ID NO: 10576 - RNA, 22 nt, Homo sapiens
cuuaugcaagauucccuucuac

SEQ ID NO: 10577 - RNA, 23 nt, Homo sapiens
uaauccuugcuaccugggugaga

SEQ ID NO: 10578 - RNA, 22 nt, Homo sapiens
ugagccccugugccgcccccag

SEQ ID NO: 10579 - RNA, 23 nt, Homo sapiens
agcuacauugucugcuggguuuc

SEQ ID NO: 10580 - RNA, 22 nt, Homo sapiens
agaggcuggccgugaugaauuc

SEQ ID NO: 10581 - RNA, 19 nt, Homo sapiens
agcugucugaaaaugucuu

SEQ ID NO: 10582 - RNA, 20 nt, Homo sapiens
accaggaggcugaggccccu

SEQ ID NO: 10583 - RNA, 22 nt, Homo sapiens
ugcggggcuagggcuaacagca

SEQ ID NO: 10584 - RNA, 20 nt, Homo sapiens
cggcucugggucugugggga

SEQ ID NO: 10585 - RNA, 23 nt, Homo sapiens
ccugcagcgacuugauggcuucc

SEQ ID NO: 10586 - RNA, 27 nt, Homo sapiens
accuucuuguauaagcacugugcuaaa

SEQ ID NO: 10587 - RNA, 24 nt, Homo sapiens
uugcagcugccugggagugacuuc

SEQ ID NO: 10588 - RNA, 24 nt, Homo sapiens
uugcagcugccugggagugacuuc

SEQ ID NO: 10589 - RNA, 22 nt, Homo sapiens
uaacagucuacagccauggucg

SEQ ID NO: 10590 - RNA, 23 nt, Homo sapiens
guccaguuuucccaggaaucccu

SEQ ID NO: 10591 - RNA, 22 nt, Homo sapiens
ugcccuguggacucaguucugg

SEQ ID NO: 10592 - RNA, 22 nt, Homo sapiens
caaagaauucuccuuuugggcu

SEQ ID NO: 10593 - RNA, 21 nt, Homo sapiens
caucccuugcaugguggaggg

SEQ ID NO: 10594 - RNA, 21 nt, Homo sapiens
cggcggggacggcgauugguc

SEQ ID NO: 10595 - RNA, 21 nt, Homo sapiens
uaacagucuccagucacggcc

SEQ ID NO: 10596 - RNA, 22 nt, Homo sapiens
acacagggcuguugugaagacu

SEQ ID NO: 10597 - RNA, 21 nt, Homo sapiens
agggcccccccucaauccugu

SEQ ID NO: 10598 - RNA, 22 nt, Homo sapiens
uuauaaagcaaugagacugauu

SEQ ID NO: 10599 - RNA, 22 nt, Homo sapiens
ucaggcucaguccccucccgau

SEQ ID NO: 10600 - RNA, 21 nt, Homo sapiens
cagcagcacacugugguuugu

SEQ ID NO: 10601 - RNA, 18 nt, Homo sapiens
uucacagggaggugucau

SEQ ID NO: 10602 - RNA, 22 nt, Homo sapiens
aggcggggcgccgcgggaccgc

SEQ ID NO: 10603 - RNA, 22 nt, Homo sapiens
ugcggggcuagggcuaacagca

SEQ ID NO: 10604 - RNA, 22 nt, Homo sapiens
uuuccggcucgcgugggugugu

SEQ ID NO: 10605 - RNA, 22 nt, Homo sapiens
ugagccccugugccgcccccag

SEQ ID NO: 10606 - RNA, 22 nt, Homo sapiens
acucggcguggcgucggucgug

SEQ ID NO: 10607 - RNA, 22 nt, Homo sapiens
cucggcgcggggcgcgggcucc

SEQ ID NO: 10608 - RNA, 22 nt, Homo sapiens
uggagagaaaggcaguuccuga

SEQ ID NO: 10609 - RNA, 21 nt, Homo sapiens
cggcggggacggcgauugguc

SEQ ID NO: 10610 - RNA, 21 nt, Homo sapiens
aggggugcuaucugugauuga

SEQ ID NO: 10611 - RNA, 22 nt, Homo sapiens
gaaagcgcuucccuuugcugga

SEQ ID NO: 10612 - RNA, 22 nt, Homo sapiens
caaagcgcuccccuuuagaggu

SEQ ID NO: 10613 - RNA, 23 nt, Homo sapiens
caaagcgcuucucuuuagagugu

SEQ ID NO: 10614 - RNA, 21 nt, Homo sapiens
caaagcgcuucccuuuggagc

SEQ ID NO: 10615 - RNA, 21 nt, Homo sapiens
gaaagcgcuucucuuuagagg

SEQ ID NO: 10616 - RNA, 22 nt, Homo sapiens
uccgagccugggucucccucuu

SEQ ID NO: 10617 - RNA, 22 nt, Homo sapiens
aggcggggcgccgcgggaccgc

SEQ ID NO: 10618 - RNA, 22 nt, Homo sapiens
gguggcccggccgugccugagg

SEQ ID NO: 10619 - RNA, 22 nt, Homo sapiens
ugcggggcuagggcuaacagca

SEQ ID NO: 10620 - RNA, 21 nt, Homo sapiens
cccggagccaggaugcagcuc

SEQ ID NO: 10621 - RNA, 23 nt, Homo sapiens
ucuggcuccgugucuucacuccc

SEQ ID NO: 10622 - RNA, 21 nt, Homo sapiens
cggcggggacggcgauugguc

SEQ ID NO: 10623 - RNA, 22 nt, Homo sapiens
uacccagagcaugcagugugaa

SEQ ID NO: 10624 - RNA, 22 nt, Homo sapiens
cccugugcccggcccacuucug

SEQ ID NO: 10625 - RNA, 22 nt, Homo sapiens
cauugcacuugucucggucuga

SEQ ID NO: 10626 - RNA, 22 nt, Homo sapiens
uguaaacauccuacacucagcu

SEQ ID NO: 10627 - RNA, 22 nt, Homo sapiens
aggcggggcgccgcgggaccgc

SEQ ID NO: 10628 - RNA, 22 nt, Homo sapiens
ugcggggcuagggcuaacagca

SEQ ID NO: 10629 - RNA, 20 nt, Homo sapiens
ggggagcuguggaagcagua

SEQ ID NO: 10630 - RNA, 24 nt, Homo sapiens
uggggagcugaggcucugggggug

SEQ ID NO: 10631 - RNA, 24 nt, Homo sapiens
uggggagcugaggcucugggggug

SEQ ID NO: 10632 - RNA, 22 nt, Homo sapiens
uguaaacauccucgacuggaag

SEQ ID NO: 10633 - RNA, 22 nt, Homo sapiens
uguaaacauccccgacuggaag

SEQ ID NO: 10634 - RNA, 22 nt, Homo sapiens
uguaaacauccuugacuggaag

SEQ ID NO: 10635 - RNA, 19 nt, Homo sapiens
aagugugcagggcacuggu

SEQ ID NO: 10636 - RNA, 22 nt, Homo sapiens
aggcagcgggguguaguggaua

SEQ ID NO: 10637 - RNA, 20 nt, Homo sapiens
ggggagcuguggaagcagua

SEQ ID NO: 10638 - RNA, 20 nt, Homo sapiens
ggggagcuguggaagcagua

SEQ ID NO: 10639 - RNA, 21 nt, Homo sapiens
ugcaggaccaagaugagcccu

SEQ ID NO: 10640 - RNA, 25 nt, Homo sapiens
ugggaacggguuccggcagacgcug

SEQ ID NO: 10641 - RNA, 22 nt, Homo sapiens
uuugguccccuucaaccagcug

SEQ ID NO: 10642 - RNA, 22 nt, Homo sapiens
uuugguccccuucaaccagcua

SEQ ID NO: 10643 - RNA, 23 nt, Homo sapiens
uaaggugcaucuagugcagauag

SEQ ID NO: 10644 - RNA, 23 nt, Homo sapiens
uaaggugcaucuagugcaguuag

SEQ ID NO: 10645 - RNA, 22 nt, Homo sapiens
ucugcccccuccgcugcugcca

SEQ ID NO: 10646 - RNA, 20 nt, Homo sapiens
acugccccaggugcugcugg

SEQ ID NO: 10647 - RNA, 21 nt, Homo sapiens
cggggcagcucaguacaggau

SEQ ID NO: 10648 - RNA, 17 nt, Homo sapiens
ucgccuccuccucuccc

SEQ ID NO: 10649 - RNA, 23 nt, Homo sapiens
ucuggcuccgugucuucacuccc

SEQ ID NO: 10650 - RNA, 21 nt, Homo sapiens
cggcggggacggcgauugguc

SEQ ID NO: 10651 - RNA, 21 nt, Homo sapiens
cggcggggacggcgauugguc

SEQ ID NO: 10652 - RNA, 23 nt, Homo sapiens
ugaggggcagagagcgagacuuu

SEQ ID NO: 10653 - RNA, 22 nt, Homo sapiens
aggcggggcgccgcgggaccgc

SEQ ID NO: 10654 - RNA, 22 nt, Homo sapiens
aggcggggcgccgcgggaccgc

SEQ ID NO: 10655 - RNA, 20 nt, Homo sapiens
ucugcaggguuugcuuugag

SEQ ID NO: 10656 - RNA, 18 nt, Homo sapiens
ucagcuggcccucauuuc

SEQ ID NO: 10657 - RNA, 17 nt, Homo sapiens
gugggggagaggcuguc

SEQ ID NO: 10658 - RNA, 22 nt, Homo sapiens
caaagaauucuccuuuugggcu

SEQ ID NO: 10659 - RNA, 21 nt, Homo sapiens
uaaagugcugacagugcagau

SEQ ID NO: 10660 - RNA, 23 nt, Homo sapiens
cagugcaaugauauugucaaagc

SEQ ID NO: 10661 - RNA, 23 nt, Homo sapiens
ucucacacagaaaucgcacccgu

SEQ ID NO: 10662 - RNA, 24 nt, Homo sapiens
acaaagugcuucccuuuagagugu

SEQ ID NO: 10663 - RNA, 22 nt, Homo sapiens
acaaagugcuucccuuuagagu

SEQ ID NO: 10664 - RNA, 21 nt, Homo sapiens
agggggaaaguucuauagucc

SEQ ID NO: 10665 - RNA, 21 nt, Homo sapiens
uggguuuacguugggagaacu

SEQ ID NO: 10666 - RNA, 23 nt, Homo sapiens
aggaagcccuggaggggcuggag

SEQ ID NO: 10667 - RNA, 17 nt, Homo sapiens
ucgccuccuccucuccc

SEQ ID NO: 10668 - RNA, 21 nt, Homo sapiens
ugcaggaccaagaugagcccu

SEQ ID NO: 10669 - RNA, 21 nt, Homo sapiens
ucgaggagcucacagucuagu

SEQ ID NO: 10670 - RNA, 23 nt, Homo sapiens
cggcccgggcugcugcuguuccu

SEQ ID NO: 10671 - RNA, 21 nt, Homo sapiens
uccugcgcgucccagaugccc

SEQ ID NO: 10672 - RNA, 22 nt, Homo sapiens
uggacggagaacugauaagggu

SEQ ID NO: 10673 - RNA, 21 nt, Homo sapiens
cggcggggacggcgauugguc

SEQ ID NO: 10674 - RNA, 22 nt, Homo sapiens
agacccuggucugcacucuauc

SEQ ID NO: 10675 - RNA, 21 nt, Homo sapiens
gaaggcgcuucccuuuggagu

SEQ ID NO: 10676 - RNA, 22 nt, Homo sapiens
gaaggcgcuucccuuuagagcg

SEQ ID NO: 10677 - RNA, 19 nt, Homo sapiens
gggcgccugugaucccaac

SEQ ID NO: 10678 - RNA, 22 nt, Homo sapiens
aggcggggcgccgcgggaccgc

SEQ ID NO: 10679 - RNA, 22 nt, Homo sapiens
ugcggggcuagggcuaacagca

SEQ ID NO: 10680 - RNA, 17 nt, Homo sapiens
ucgccuccuccucuccc

SEQ ID NO: 10681 - RNA, 22 nt, Homo sapiens
gcccgcguguggagccaggugu

SEQ ID NO: 10682 - RNA, 23 nt, Homo sapiens
ucuggcuccgugucuucacuccc

SEQ ID NO: 10683 - RNA, 21 nt, Homo sapiens
ucgaggagcucacagucuagu

SEQ ID NO: 10684 - RNA, 21 nt, Homo sapiens
uccugcgcgucccagaugccc

SEQ ID NO: 10685 - RNA, 21 nt, Homo sapiens
cggcggggacggcgauugguc

SEQ ID NO: 10686 - RNA, 22 nt, Homo sapiens
aaggagcucacagucuauugag

SEQ ID NO: 10687 - RNA, 23 nt, Homo sapiens
agugccugagggaguaagagccc

SEQ ID NO: 10688 - RNA, 22 nt, Homo sapiens
aggcggggcgccgcgggaccgc

SEQ ID NO: 10689 - RNA, 23 nt, Homo sapiens
aaggagcuuacaaucuagcuggg

SEQ ID NO: 10690 - RNA, 20 nt, Homo sapiens
cggcucugggucugugggga

SEQ ID NO: 10691 - RNA, 21 nt, Homo sapiens
uggaggagaaggaaggugaug

SEQ ID NO: 10692 - RNA, 18 nt, Homo sapiens
cgggcguggugguggggg

SEQ ID NO: 10693 - RNA, 22 nt, Homo sapiens
cucggcgcggggcgcgggcucc

SEQ ID NO: 10694 - RNA, 22 nt, Homo sapiens
aauugcacgguauccaucugua

SEQ ID NO: 10695 - RNA, 22 nt, Homo sapiens
aggcaguguauuguuagcuggc

SEQ ID NO: 10696 - RNA, 22 nt, Homo sapiens
cgucaacacuugcugguuuccu

SEQ ID NO: 10697 - RNA, 25 nt, Homo sapiens
aggggugguguugggacagcuccgu

SEQ ID NO: 10698 - RNA, 22 nt, Homo sapiens
gugaaauguuuaggaccacuag

SEQ ID NO: 10699 - RNA, 22 nt, Homo sapiens
uagcaccaucugaaaucgguua

SEQ ID NO: 10700 - RNA, 23 nt, Homo sapiens
ugagcgccucgacgacagagccg

SEQ ID NO: 10701 - RNA, 18 nt, Homo sapiens
uucacagggaggugucau

SEQ ID NO: 10702 - RNA, 21 nt, Homo sapiens
caaagaggaaggucccauuac

SEQ ID NO: 10703 - RNA, 22 nt, Homo sapiens
uacccauugcauaucggaguug

SEQ ID NO: 10704 - RNA, 20 nt, Homo sapiens
uaaagagcccuguggagaca

SEQ ID NO: 10705 - RNA, 17 nt, Homo sapiens
ucgccuccuccucuccc

SEQ ID NO: 10706 - RNA, 21 nt, Homo sapiens
cuuuuugcggucugggcuugc

SEQ ID NO: 10707 - RNA, 19 nt, Homo sapiens
gaugaugcugcugaugcug

SEQ ID NO: 10708 - RNA, 23 nt, Homo sapiens
acuccauuuguuuugaugaugga

SEQ ID NO: 10709 - RNA, 23 nt, Homo sapiens
uuauugcuuaagaauacgcguag

SEQ ID NO: 10710 - RNA, 22 nt, Homo sapiens
gcugacuccuaguccagggcuc

SEQ ID NO: 10711 - RNA, 22 nt, Homo sapiens
uuauaauacaaccugauaagug

SEQ ID NO: 10712 - RNA, 23 nt, Homo sapiens
uagcagcgggaacaguucugcag

SEQ ID NO: 10713 - RNA, 22 nt, Homo sapiens
uagcaaaaacugcaguuacuuu

SEQ ID NO: 10714 - RNA, 23 nt, Homo sapiens
uucauuugguauaaaccgcgauu

SEQ ID NO: 10715 - RNA, 25 nt, Homo sapiens
ggcggagggaaguagguccguuggu

SEQ ID NO: 10716 - RNA, 23 nt, Homo sapiens
uacccuguagaaccgaauuugug

SEQ ID NO: 10717 - RNA, 21 nt, Homo sapiens
uaggacacauggucuacuucu

SEQ ID NO: 10718 - RNA, 18 nt, Homo sapiens
aucccaccucugccacca

SEQ ID NO: 10719 - RNA, 17 nt, Homo sapiens
ucccaccgcugccaccc

SEQ ID NO: 10720 - RNA, 22 nt, Homo sapiens
ugagaacugaauuccauggguu

SEQ ID NO: 10721 - RNA, 22 nt, Homo sapiens
uauugcacauuacuaaguugca

SEQ ID NO: 10722 - RNA, 23 nt, Homo sapiens
gaacgcgcuucccuauagagggu

SEQ ID NO: 10723 - RNA, 23 nt, Homo sapiens
ggcagguucucacccucucuagg

SEQ ID NO: 10724 - RNA, 20 nt, Homo sapiens
ucugcaggguuugcuuugag

SEQ ID NO: 10725 - RNA, 24 nt, Homo sapiens
ucccugagacccuuuaaccuguga

SEQ ID NO: 10726 - RNA, 22 nt, Homo sapiens
ucccugagacccuaacuuguga

SEQ ID NO: 10727 - RNA, 23 nt, Homo sapiens
ccucagggcuguagaacagggcu

SEQ ID NO: 10728 - RNA, 22 nt, Homo sapiens
cucggcgcggggcgcgggcucc

SEQ ID NO: 10729 - RNA, 22 nt, Homo sapiens
uggagagaaaggcaguuccuga

SEQ ID NO: 10730 - RNA, 23 nt, Homo sapiens
uaaggugcaucuagugcagauag

SEQ ID NO: 10731 - RNA, 22 nt, Homo sapiens
aguggggaacccuuccaugagg

SEQ ID NO: 10732 - RNA, 21 nt, Homo sapiens
gaaggcgcuucccuuuggagu

SEQ ID NO: 10733 - RNA, 22 nt, Homo sapiens
gaaggcgcuucccuuuagagcg

SEQ ID NO: 10734 - RNA, 19 nt, Homo sapiens
gggcgccugugaucccaac

SEQ ID NO: 10735 - RNA, 23 nt, Homo sapiens
gacacgggcgacagcugcggccc

SEQ ID NO: 10736 - RNA, 25 nt, Homo sapiens
aggggugguguugggacagcuccgu

SEQ ID NO: 10737 - RNA, 22 nt, Homo sapiens
aggcggggcgccgcgggaccgc

SEQ ID NO: 10738 - RNA, 22 nt, Homo sapiens
ugcggggcuagggcuaacagca

SEQ ID NO: 10739 - RNA, 22 nt, Homo sapiens
cugcccuggcccgagggaccga

SEQ ID NO: 10740 - RNA, 20 nt, Homo sapiens
ggggagcuguggaagcagua

SEQ ID NO: 10741 - RNA, 22 nt, Homo sapiens
uggguggucuggagauuugugc

SEQ ID NO: 10742 - RNA, 21 nt, Homo sapiens
uaccacaggguagaaccacgg

SEQ ID NO: 10743 - RNA, 23 nt, Homo sapiens
uuaaugcuaaucgugauaggggu

SEQ ID NO: 10744 - RNA, 23 nt, Homo sapiens
caaagugcuuacagugcagguag

SEQ ID NO: 10745 - RNA, 22 nt, Homo sapiens
ugguuuaccgucccacauacau

SEQ ID NO: 10746 - RNA, 22 nt, Homo sapiens
uccagcaucagugauuuuguug

SEQ ID NO: 10747 - RNA, 22 nt, Homo sapiens
agaucagaaggugauuguggcu

SEQ ID NO: 10748 - RNA, 21 nt, Homo sapiens
cagcagcacacugugguuugu

SEQ ID NO: 10749 - RNA, 21 nt, Homo sapiens
auccuugcuaucugggugcua

SEQ ID NO: 10750 - RNA, 22 nt, Homo sapiens
uacugcagacguggcaaucaug

SEQ ID NO: 10751 - RNA, 21 nt, Homo sapiens
uacugcagacaguggcaauca

SEQ ID NO: 10752 - RNA, 22 nt, Homo sapiens
uacccauugcauaucggaguug

SEQ ID NO: 10753 - RNA, 22 nt, Homo sapiens
acuccagccccacagccucagc

SEQ ID NO: 10754 - RNA, 18 nt, Homo sapiens
cagggaggugaaugugau

SEQ ID NO: 10755 - RNA, 22 nt, Homo sapiens
gugacaucacauauacggcagc

SEQ ID NO: 10756 - RNA, 21 nt, Homo sapiens
uuaagacuugcagugauguuu

SEQ ID NO: 10757 - RNA, 22 nt, Homo sapiens
ugauugguacgucuguggguag

SEQ ID NO: 10758 - RNA, 21 nt, Homo sapiens
uggaggagaaggaaggugaug

SEQ ID NO: 10759 - RNA, 24 nt, Homo sapiens
uuuggcaaugguagaacucacacu

SEQ ID NO: 10760 - RNA, 22 nt, Homo sapiens
ucugcccccuccgcugcugcca

SEQ ID NO: 10761 - RNA, 20 nt, Homo sapiens
ccucugggcccuuccuccag

SEQ ID NO: 10762 - RNA, 22 nt, Homo sapiens
ucucugggccugugucuuaggc

SEQ ID NO: 10763 - RNA, 23 nt, Homo sapiens
ucccccaggugugauucugauuu

SEQ ID NO: 10764 - RNA, 21 nt, Homo sapiens
gugucuuuugcucugcaguca

SEQ ID NO: 10765 - RNA, 19 nt, Homo sapiens
ugagcugcuguaccaaaau

SEQ ID NO: 10766 - RNA, 24 nt, Homo sapiens
acugggggcuuucgggcucugcgu

SEQ ID NO: 10767 - RNA, 21 nt, Homo sapiens
uggaggagaaggaaggugaug

SEQ ID NO: 10768 - RNA, 18 nt, Homo sapiens
ucagcuggcccucauuuc

SEQ ID NO: 10769 - RNA, 25 nt, Homo sapiens
cccccacaaccgcgcuugacuagcu

SEQ ID NO: 10770 - RNA, 22 nt, Homo sapiens
uuggggaaacggccgcugagug

SEQ ID NO: 10771 - RNA, 22 nt, Homo sapiens
uggcagugucuuagcugguugu

SEQ ID NO: 10772 - RNA, 23 nt, Homo sapiens
aggcaguguaguuagcugauugc

SEQ ID NO: 10773 - RNA, 22 nt, Homo sapiens
uggcaguguauuguuagcuggu

SEQ ID NO: 10774 - RNA, 22 nt, Homo sapiens
aggcaguguauuguuagcuggc

SEQ ID NO: 10775 - RNA, 19 nt, Homo sapiens
ugucucugcugggguuucu

SEQ ID NO: 10776 - RNA, 23 nt, Homo sapiens
uauucauuuauccccagccuaca

SEQ ID NO: 10777 - RNA, 21 nt, Homo sapiens
gcccuccgcccgugcaccccg

SEQ ID NO: 10778 - RNA, 21 nt, Homo sapiens
cggcggggacggcgauugguc

SEQ ID NO: 10779 - RNA, 22 nt, Homo sapiens
ucugcccccuccgcugcugcca

SEQ ID NO: 10780 - RNA, 22 nt, Homo sapiens
cauugcacuugucucggucuga

SEQ ID NO: 10781 - RNA, 20 nt, Homo sapiens
acugccccaggugcugcugg

SEQ ID NO: 10782 - RNA, 20 nt, Homo sapiens
ccucugggcccuuccuccag

SEQ ID NO: 10783 - RNA, 22 nt, Homo sapiens
ucucugggccugugucuuaggc

SEQ ID NO: 10784 - RNA, 21 nt, Homo sapiens
cggggcagcucaguacaggau

SEQ ID NO: 10785 - RNA, 19 nt, Homo sapiens
aggcugcggaauucaggac

SEQ ID NO: 10786 - RNA, 22 nt, Homo sapiens
aggcggggcgccgcgggaccgc

SEQ ID NO: 10787 - RNA, 22 nt, Homo sapiens
ugcggggcuagggcuaacagca

SEQ ID NO: 10788 - RNA, 20 nt, Homo sapiens
ggggagcuguggaagcagua

SEQ ID NO: 10789 - RNA, 22 nt, Homo sapiens
uggagugugacaaugguguuug

SEQ ID NO: 10790 - RNA, 21 nt, Homo sapiens
acucuagcugccaaaggcgcu

SEQ ID NO: 10791 - RNA, 21 nt, Homo sapiens
cggcggggacggcgauugguc

SEQ ID NO: 10792 - RNA, 23 nt, Homo sapiens
ugaggggcagagagcgagacuuu

SEQ ID NO: 10793 - RNA, 22 nt, Homo sapiens
aggcggggcgccgcgggaccgc

SEQ ID NO: 10794 - RNA, 22 nt, Homo sapiens
uuugugaccugguccacuaacc

SEQ ID NO: 10795 - RNA, 21 nt, Homo sapiens
uaaagugcugacagugcagau

SEQ ID NO: 10796 - RNA, 18 nt, Homo sapiens
uccagugcccuccucucc

SEQ ID NO: 10797 - RNA, 19 nt, Homo sapiens
ugagcugcuguaccaaaau

SEQ ID NO: 10798 - RNA, 21 nt, Homo sapiens
uggguuuacguugggagaacu

SEQ ID NO: 10799 - RNA, 22 nt, Homo sapiens
auccgcgcucugacucucugcc

SEQ ID NO: 10800 - RNA, 24 nt, Homo sapiens
uggggagcugaggcucugggggug

SEQ ID NO: 10801 - RNA, 22 nt, Homo sapiens
uggagugugacaaugguguuug

SEQ ID NO: 10802 - RNA, 23 nt, Homo sapiens
ucuggcuccgugucuucacuccc

SEQ ID NO: 10803 - RNA, 23 nt, Homo sapiens
cggcccgggcugcugcuguuccu

SEQ ID NO: 10804 - RNA, 21 nt, Homo sapiens
cggcggggacggcgauugguc

SEQ ID NO: 10805 - RNA, 21 nt, Homo sapiens
agggcccccccucaauccugu

SEQ ID NO: 10806 - RNA, 22 nt, Homo sapiens
uaaugccccuaaaaauccuuau

SEQ ID NO: 10807 - RNA, 22 nt, Homo sapiens
aggcggggcgccgcgggaccgc

SEQ ID NO: 10808 - RNA, 22 nt, Homo sapiens
ugcggggcuagggcuaacagca

SEQ ID NO: 10809 - RNA, 21 nt, Homo sapiens
uggcagggaggcugggagggg

SEQ ID NO: 10810 - RNA, 19 nt, Homo sapiens
gugaggacucgggaggugg

SEQ ID NO: 10811 - RNA, 17 nt, Homo sapiens
ucgccuccuccucuccc

SEQ ID NO: 10812 - RNA, 22 nt, Homo sapiens
uggagagaaaggcaguuccuga

SEQ ID NO: 10813 - RNA, 21 nt, Homo sapiens
cggcggggacggcgauugguc

SEQ ID NO: 10814 - RNA, 22 nt, Homo sapiens
cgcaggggccgggugcucaccg

SEQ ID NO: 10815 - RNA, 21 nt, Homo sapiens
agggcccccccucaauccugu

SEQ ID NO: 10816 - RNA, 20 nt, Homo sapiens
ccucugggcccuuccuccag

SEQ ID NO: 10817 - RNA, 22 nt, Homo sapiens
ucucugggccugugucuuaggc

SEQ ID NO: 10818 - RNA, 22 nt, Homo sapiens
uuauaaagcaaugagacugauu

SEQ ID NO: 10819 - RNA, 23 nt, Homo sapiens
ucccccaggugugauucugauuu

SEQ ID NO: 10820 - RNA, 22 nt, Homo sapiens
agaggcuggccgugaugaauuc

SEQ ID NO: 10821 - RNA, 24 nt, Homo sapiens
acugggggcuuucgggcucugcgu

SEQ ID NO: 10822 - RNA, 22 nt, Homo sapiens
aggcggggcgccgcgggaccgc

SEQ ID NO: 10823 - RNA, 22 nt, Homo sapiens
uggagugugacaaugguguuug

SEQ ID NO: 10824 - RNA, 21 nt, Homo sapiens
gcccuccgcccgugcaccccg

SEQ ID NO: 10825 - RNA, 21 nt, Homo sapiens
cggcggggacggcgauugguc

SEQ ID NO: 10826 - RNA, 22 nt, Homo sapiens
uggugggcacagaaucuggacu

SEQ ID NO: 10827 - RNA, 22 nt, Homo sapiens
uggugggccgcagaacaugugc

SEQ ID NO: 10828 - RNA, 25 nt, Homo sapiens
ggcggagggaaguagguccguuggu

SEQ ID NO: 10829 - RNA, 23 nt, Homo sapiens
uggugcggagagggcccacagug

SEQ ID NO: 10830 - RNA, 22 nt, Homo sapiens
ugcggggcuagggcuaacagca

SEQ ID NO: 10831 - RNA, 23 nt, Homo sapiens
cacccggcugugugcacaugugc

SEQ ID NO: 10832 - RNA, 21 nt, Homo sapiens
gugccagcugcagugggggag

SEQ ID NO: 10833 - RNA, 22 nt, Homo sapiens
ugagccccugugccgcccccag

SEQ ID NO: 10834 - RNA, 22 nt, Homo sapiens
uggagugugacaaugguguuug

SEQ ID NO: 10835 - RNA, 22 nt, Homo sapiens
cuuggcaccuagcaagcacuca

SEQ ID NO: 10836 - RNA, 17 nt, Homo sapiens
ucgccuccuccucuccc

SEQ ID NO: 10837 - RNA, 18 nt, Homo sapiens
cagggaggugaaugugau

SEQ ID NO: 10838 - RNA, 23 nt, Homo sapiens
ucuggcuccgugucuucacuccc

SEQ ID NO: 10839 - RNA, 23 nt, Homo sapiens
cggcccgggcugcugcuguuccu

SEQ ID NO: 10840 - RNA, 22 nt, Homo sapiens
uggagagaaaggcaguuccuga

SEQ ID NO: 10841 - RNA, 21 nt, Homo sapiens
cggcggggacggcgauugguc

SEQ ID NO: 10842 - RNA, 22 nt, Homo sapiens
cauugcacuugucucggucuga

SEQ ID NO: 10843 - RNA, 23 nt, Homo sapiens
uucauuugguauaaaccgcgauu

SEQ ID NO: 10844 - RNA, 24 nt, Homo sapiens
ugccugggucucuggccugcgcgu

SEQ ID NO: 10845 - RNA, 22 nt, Homo sapiens
aggcggggcgccgcgggaccgc

SEQ ID NO: 10846 - RNA, 22 nt, Homo sapiens
ugcggggcuagggcuaacagca

SEQ ID NO: 10847 - RNA, 23 nt, Homo sapiens
uuuggcacuagcacauuuuugcu

SEQ ID NO: 10848 - RNA, 22 nt, Homo sapiens
ugagccccugugccgcccccag

SEQ ID NO: 10849 - RNA, 17 nt, Homo sapiens
gugggggagaggcuguc

SEQ ID NO: 10850 - RNA, 17 nt, Homo sapiens
ucgccuccuccucuccc

SEQ ID NO: 10851 - RNA, 21 nt, Homo sapiens
cucccacaugcaggguuugca

SEQ ID NO: 10852 - RNA, 21 nt, Homo sapiens
cggcggggacggcgauugguc

SEQ ID NO: 10853 - RNA, 22 nt, Homo sapiens
aacuggcccucaaagucccgcu

SEQ ID NO: 10854 - RNA, 22 nt, Homo sapiens
gugaaauguuuaggaccacuag

SEQ ID NO: 10855 - RNA, 22 nt, Homo sapiens
uccuucauuccaccggagucug

SEQ ID NO: 10856 - RNA, 22 nt, Homo sapiens
acagcaggcacagacaggcagu

SEQ ID NO: 10857 - RNA, 23 nt, Homo sapiens
agcuacauugucugcuggguuuc

SEQ ID NO: 10858 - RNA, 23 nt, Homo sapiens
ugagcgccucgacgacagagccg

SEQ ID NO: 10859 - RNA, 22 nt, Homo sapiens
gccugcugggguggaaccuggu

SEQ ID NO: 10860 - RNA, 21 nt, Homo sapiens
gaaggcgcuucccuuuggagu

SEQ ID NO: 10861 - RNA, 22 nt, Homo sapiens
gaaggcgcuucccuuuagagcg

SEQ ID NO: 10862 - RNA, 22 nt, Homo sapiens
ccucccacacccaaggcuugca

SEQ ID NO: 10863 - RNA, 23 nt, Homo sapiens
gaacgccuguucuugccaggugg

SEQ ID NO: 10864 - RNA, 22 nt, Homo sapiens
aggcggggcgccgcgggaccgc

SEQ ID NO: 10865 - RNA, 22 nt, Homo sapiens
caaagugccucccuuuagagug

SEQ ID NO: 10866 - RNA, 22 nt, Homo sapiens
ugugcgcagggagaccucuccc

SEQ ID NO: 10867 - RNA, 23 nt, Homo sapiens
cggcccgggcugcugcuguuccu

SEQ ID NO: 10868 - RNA, 18 nt, Homo sapiens
uccagugcccuccucucc

SEQ ID NO: 10869 - RNA, 23 nt, Homo sapiens
aagugccgccaucuuuugagugu

SEQ ID NO: 10870 - RNA, 22 nt, Homo sapiens
uccgagccugggucucccucuu

SEQ ID NO: 10871 - RNA, 21 nt, Homo sapiens
uggaggagaaggaaggugaug

SEQ ID NO: 10872 - RNA, 23 nt, Homo sapiens
ucuggcuccgugucuucacuccc

SEQ ID NO: 10873 - RNA, 22 nt, Homo sapiens
cgucaacacuugcugguuuccu

SEQ ID NO: 10874 - RNA, 20 nt, Homo sapiens
cuuccucgucugucugcccc

SEQ ID NO: 10875 - RNA, 22 nt, Homo sapiens
acucggcguggcgucggucgug

SEQ ID NO: 10876 - RNA, 22 nt, Homo sapiens
cucggcgcggggcgcgggcucc

SEQ ID NO: 10877 - RNA, 21 nt, Homo sapiens
ucgaggagcucacagucuagu

SEQ ID NO: 10878 - RNA, 21 nt, Homo sapiens
cggcggggacggcgauugguc

SEQ ID NO: 10879 - RNA, 21 nt, Homo sapiens
ugacaacuauggaugagcucu

SEQ ID NO: 10880 - RNA, 23 nt, Homo sapiens
ucccccaggugugauucugauuu

SEQ ID NO: 10881 - RNA, 22 nt, Homo sapiens
ugauugguacgucuguggguag

SEQ ID NO: 10882 - RNA, 21 nt, Homo sapiens
gaagugugccguggugugucu

SEQ ID NO: 10883 - RNA, 24 nt, Homo sapiens
acugggggcuuucgggcucugcgu

SEQ ID NO: 10884 - RNA, 19 nt, Homo sapiens
aagugugcagggcacuggu

SEQ ID NO: 10885 - RNA, 22 nt, Homo sapiens
cuugguucagggagggucccca

SEQ ID NO: 10886 - RNA, 22 nt, Homo sapiens
aggcggggcgccgcgggaccgc

SEQ ID NO: 10887 - RNA, 22 nt, Homo sapiens
ugcggggcuagggcuaacagca

SEQ ID NO: 10888 - RNA, 26 nt, Homo sapiens
gaugaugauggcagcaaauucugaaa

SEQ ID NO: 10889 - RNA, 24 nt, Homo sapiens
uugcagcugccugggagugacuuc

SEQ ID NO: 10890 - RNA, 23 nt, Homo sapiens
uauggcuuuuuauuccuauguga

SEQ ID NO: 10891 - RNA, 23 nt, Homo sapiens
uauggcuuuucauuccuauguga

SEQ ID NO: 10892 - RNA, 23 nt, Homo sapiens
uaagugcuuccauguuucagugg

SEQ ID NO: 10893 - RNA, 22 nt, Homo sapiens
aacuguuugcagaggaaacuga

SEQ ID NO: 10894 - RNA, 21 nt, Homo sapiens
uaauuuuauguauaagcuagu

SEQ ID NO: 10895 - RNA, 22 nt, Homo sapiens
acucggcguggcgucggucgug

SEQ ID NO: 10896 - RNA, 22 nt, Homo sapiens
cucccacugcuucacuugacua

SEQ ID NO: 10897 - RNA, 22 nt, Homo sapiens
cauugcacuugucucggucuga

SEQ ID NO: 10898 - RNA, 23 nt, Homo sapiens
cgcauccccuagggcauuggugu

SEQ ID NO: 10899 - RNA, 22 nt, Homo sapiens
aacuguuugcagaggaaacuga

SEQ ID NO: 10900 - RNA, 23 nt, Homo sapiens
agguuguccguggugaguucgca

SEQ ID NO: 10901 - RNA, 22 nt, Homo sapiens
gaaagcgcuucccuuugcugga

SEQ ID NO: 10902 - RNA, 22 nt, Homo sapiens
caaagcgcuccccuuuagaggu

SEQ ID NO: 10903 - RNA, 23 nt, Homo sapiens
caaagcgcuucucuuuagagugu

SEQ ID NO: 10904 - RNA, 21 nt, Homo sapiens
caaagcgcuucccuuuggagc

SEQ ID NO: 10905 - RNA, 21 nt, Homo sapiens
gaaagcgcuucucuuuagagg

SEQ ID NO: 10906 - RNA, 19 nt, Homo sapiens
gugucugcuuccuguggga

SEQ ID NO: 10907 - RNA, 22 nt, Homo sapiens
ucggccugaccacccaccccac

SEQ ID NO: 10908 - RNA, 22 nt, Homo sapiens
ugugagguuggcauuguugucu

SEQ ID NO: 10909 - RNA, 22 nt, Homo sapiens
uggagagaaaggcaguuccuga

SEQ ID NO: 10910 - RNA, 22 nt, Homo sapiens
ucaggccaggcacaguggcuca

SEQ ID NO: 10911 - RNA, 23 nt, Homo sapiens
agcuacauugucugcuggguuuc

SEQ ID NO: 10912 - RNA, 21 nt, Homo sapiens
gccccugggccuauccuagaa

SEQ ID NO: 10913 - RNA, 22 nt, Homo sapiens
agucauuggaggguuugagcag

SEQ ID NO: 10914 - RNA, 23 nt, Homo sapiens
uuuggcacuagcacauuuuugcu

SEQ ID NO: 10915 - RNA, 23 nt, Homo sapiens
ccugcagcgacuugauggcuucc

SEQ ID NO: 10916 - RNA, 20 nt, Homo sapiens
ucugcaggguuugcuuugag

SEQ ID NO: 10917 - RNA, 24 nt, Homo sapiens
uugcagcugccugggagugacuuc

SEQ ID NO: 10918 - RNA, 23 nt, Homo sapiens
uguaguguuuccuacuuuaugga

SEQ ID NO: 10919 - RNA, 22 nt, Homo sapiens
ugagaacugaauuccauggguu

SEQ ID NO: 10920 - RNA, 22 nt, Homo sapiens
uugcauagucacaaaagugauc

SEQ ID NO: 10921 - RNA, 21 nt, Homo sapiens
auguaugugugcaugugcaug

SEQ ID NO: 10922 - RNA, 21 nt, Homo sapiens
uugaaaggcuauuucuugguc

SEQ ID NO: 10923 - RNA, 19 nt, Homo sapiens
ugagcugcuguaccaaaau

SEQ ID NO: 10924 - RNA, 23 nt, Homo sapiens
gacacgggcgacagcugcggccc

SEQ ID NO: 10925 - RNA, 23 nt, Homo sapiens
uaaggugcaucuagugcaguuag

SEQ ID NO: 10926 - RNA, 22 nt, Homo sapiens
gauuagggugcuuagcuguuaa

SEQ ID NO: 10927 - RNA, 22 nt, Homo sapiens
uauguaauaugguccacaucuu

SEQ ID NO: 10928 - RNA, 23 nt, Homo sapiens
uucauuugguauaaaccgcgauu

SEQ ID NO: 10929 - RNA, 21 nt, Homo sapiens
uccuucugcuccgucccccag

SEQ ID NO: 10930 - RNA, 21 nt, Homo sapiens
acggugcuggauguggccuuu

SEQ ID NO: 10931 - RNA, 22 nt, Homo sapiens
uuugguccccuucaaccagcug

SEQ ID NO: 10932 - RNA, 22 nt, Homo sapiens
uuugguccccuucaaccagcua

SEQ ID NO: 10933 - RNA, 23 nt, Homo sapiens
agcuacauugucugcuggguuuc

SEQ ID NO: 10934 - RNA, 22 nt, Homo sapiens
cauugcacuugucucggucuga

SEQ ID NO: 10935 - RNA, 24 nt, Homo sapiens
agcagaagcagggagguucuccca

SEQ ID NO: 10936 - RNA, 23 nt, Homo sapiens
uaagugcuuccauguuuugguga

SEQ ID NO: 10937 - RNA, 23 nt, Homo sapiens
uaagugcuuccauguuuuaguag

SEQ ID NO: 10938 - RNA, 23 nt, Homo sapiens
uaagugcuuccauguuucagugg

SEQ ID NO: 10939 - RNA, 23 nt, Homo sapiens
uaagugcuuccauguuugagugu

SEQ ID NO: 10940 - RNA, 17 nt, Homo sapiens
uaagugcuuccaugcuu

SEQ ID NO: 10941 - RNA, 21 nt, Homo sapiens
gccccugggccuauccuagaa

SEQ ID NO: 10942 - RNA, 22 nt, Homo sapiens
uggcagugucuuagcugguugu

SEQ ID NO: 10943 - RNA, 23 nt, Homo sapiens
aaagugcugcgacauuugagcgu

SEQ ID NO: 10944 - RNA, 23 nt, Homo sapiens
gaagugcuucgauuuuggggugu

SEQ ID NO: 10945 - RNA, 22 nt, Homo sapiens
ugauugguacgucuguggguag

SEQ ID NO: 10946 - RNA, 22 nt, Homo sapiens
aaagugcuucccuuuggacugu

SEQ ID NO: 10947 - RNA, 21 nt, Homo sapiens
aaagugcuuccuuuuagaggg

SEQ ID NO: 10948 - RNA, 22 nt, Homo sapiens
aaagugcuuccuuuuagagggu

SEQ ID NO: 10949 - RNA, 22 nt, Homo sapiens
aaagugcuucucuuuggugggu

SEQ ID NO: 10950 - RNA, 21 nt, Homo sapiens
aaagugcuuccuuuuugaggg

SEQ ID NO: 10951 - RNA, 22 nt, Homo sapiens
aagugcuuccuuuuagaggguu

SEQ ID NO: 10952 - RNA, 23 nt, Homo sapiens
ugugcuugcucgucccgcccgca

SEQ ID NO: 10953 - RNA, 22 nt, Homo sapiens
gguggcccggccgugccugagg

SEQ ID NO: 10954 - RNA, 21 nt, Homo sapiens
uggaggagaaggaaggugaug

SEQ ID NO: 10955 - RNA, 22 nt, Homo sapiens
cuccugagccauucugagccuc

SEQ ID NO: 10956 - RNA, 20 nt, Homo sapiens
cgugccacccuuuuccccag

SEQ ID NO: 10957 - RNA, 22 nt, Homo sapiens
ccucuuccccuugucucuccag

SEQ ID NO: 10958 - RNA, 22 nt, Homo sapiens
acccgucccguucguccccgga

SEQ ID NO: 10959 - RNA, 22 nt, Homo sapiens
aggcauugacuucucacuagcu

SEQ ID NO: 10960 - RNA, 21 nt, Homo sapiens
cucccacaugcaggguuugca

SEQ ID NO: 10961 - RNA, 22 nt, Homo sapiens
uggcucaguucagcaggaacag

SEQ ID NO: 10962 - RNA, 22 nt, Homo sapiens
cauugcacuugucucggucuga

SEQ ID NO: 10963 - RNA, 22 nt, Homo sapiens
uauugcacauuacuaaguugca

SEQ ID NO: 10964 - RNA, 22 nt, Homo sapiens
aauugcacgguauccaucugua

SEQ ID NO: 10965 - RNA, 22 nt, Homo sapiens
aauugcacuuuagcaaugguga

SEQ ID NO: 10966 - RNA, 22 nt, Homo sapiens
aguggggaacccuuccaugagg

SEQ ID NO: 10967 - RNA, 25 nt, Homo sapiens
aggggugguguugggacagcuccgu

SEQ ID NO: 10968 - RNA, 22 nt, Homo sapiens
uauugcacuugucccggccugu

SEQ ID NO: 10969 - RNA, 20 nt, Homo sapiens
ggggagcuguggaagcagua

SEQ ID NO: 10970 - RNA, 22 nt, Homo sapiens
uauugcacucgucccggccucc

SEQ ID NO: 10971 - RNA, 22 nt, Homo sapiens
uauugcacucgucccggccucc

SEQ ID NO: 10972 - RNA, 22 nt, Homo sapiens
ucuucucuguuuuggccaugug

SEQ ID NO: 10973 - RNA, 21 nt, Homo sapiens
gugccagcugcagugggggag

SEQ ID NO: 10974 - RNA, 23 nt, Homo sapiens
cucucaccacugcccucccacag

SEQ ID NO: 10975 - RNA, 20 nt, Homo sapiens
uaaggcacgcggugaaugcc

SEQ ID NO: 10976 - RNA, 22 nt, Homo sapiens
agaaggaaauugaauucauuua

SEQ ID NO: 10977 - RNA, 22 nt, Homo sapiens
ucugggcaacaaagugagaccu

SEQ ID NO: 10978 - RNA, 24 nt, Homo sapiens
uggcccugacugaagaccagcagu

SEQ ID NO: 10979 - RNA, 22 nt, Homo sapiens
ugugagguuggcauuguugucu

SEQ ID NO: 10980 - RNA, 18 nt, Homo sapiens
uugagaaggaggcugcug

SEQ ID NO: 10981 - RNA, 22 nt, Homo sapiens
aaggagcucacagucuauugag

SEQ ID NO: 10982 - RNA, 21 nt, Homo sapiens
agggcccccccucaauccugu

SEQ ID NO: 10983 - RNA, 21 nt, Homo sapiens
uaaggcacccuucugaguaga

SEQ ID NO: 10984 - RNA, 23 nt, Homo sapiens
uacuccagagggcgucacucaug

SEQ ID NO: 10985 - RNA, 25 nt, Homo sapiens
gcugggcagggcuucugagcuccuu

SEQ ID NO: 10986 - RNA, 19 nt, Homo sapiens
aagcagcugccucugaggc

SEQ ID NO: 10987 - RNA, 23 nt, Homo sapiens
aaggagcuuacaaucuagcuggg

SEQ ID NO: 10988 - RNA, 22 nt, Homo sapiens
acuccagccccacagccucagc

SEQ ID NO: 10989 - RNA, 22 nt, Homo sapiens
ucuucucuguuuuggccaugug

SEQ ID NO: 10990 - RNA, 23 nt, Homo sapiens
aaaagugcuuacagugcagguag

SEQ ID NO: 10991 - RNA, 22 nt, Homo sapiens
aggcauugacuucucacuagcu

SEQ ID NO: 10992 - RNA, 17 nt, Homo sapiens
uucaaguaauucaggug

SEQ ID NO: 10993 - RNA, 22 nt, Homo sapiens
uauggcacugguagaauucacu

SEQ ID NO: 10994 - RNA, 21 nt, Homo sapiens
agcuacaucuggcuacugggu

SEQ ID NO: 10995 - RNA, 22 nt, Homo sapiens
cauugcacuugucucggucuga

SEQ ID NO: 10996 - RNA, 21 nt, Homo sapiens
uucaaguaauucaggauaggu

SEQ ID NO: 10997 - RNA, 22 nt, Homo sapiens
uauugcacauuacuaaguugca

SEQ ID NO: 10998 - RNA, 22 nt, Homo sapiens
aauugcacgguauccaucugua

SEQ ID NO: 10999 - RNA, 22 nt, Homo sapiens
aauugcacuuuagcaaugguga

SEQ ID NO: 11000 - RNA, 20 nt, Homo sapiens
cugcaaagggaagcccuuuc

SEQ ID NO: 11001 - RNA, 20 nt, Homo sapiens
cugcaaagggaagcccuuuc

SEQ ID NO: 11002 - RNA, 21 nt, Homo sapiens
caaagaggaaggucccauuac

SEQ ID NO: 11003 - RNA, 22 nt, Homo sapiens
agacuucccauuugaagguggc

SEQ ID NO: 11004 - RNA, 22 nt, Homo sapiens
uauugcacuugucccggccugu

SEQ ID NO: 11005 - RNA, 22 nt, Homo sapiens
uauugcacucgucccggccucc

SEQ ID NO: 11006 - RNA, 22 nt, Homo sapiens
acaguagagggaggaaucgcag

SEQ ID NO: 11007 - RNA, 21 nt, Homo sapiens
ccccaccuccucucuccucag

SEQ ID NO: 11008 - RNA, 20 nt, Homo sapiens
cgugccacccuuuuccccag

SEQ ID NO: 11009 - RNA, 24 nt, Homo sapiens
agccuggaagcuggagccugcagu

SEQ ID NO: 11010 - RNA, 18 nt, Homo sapiens
aucccaccucugccacca

SEQ ID NO: 11011 - RNA, 23 nt, Homo sapiens
agcugguguugugaaucaggccg

SEQ ID NO: 11012 - RNA, 22 nt, Homo sapiens
ucucccaacccuuguaccagug

SEQ ID NO: 11013 - RNA, 22 nt, Homo sapiens
ugauauguuugauauauuaggu

SEQ ID NO: 11014 - RNA, 24 nt, Homo sapiens
agcagaagcagggagguucuccca

SEQ ID NO: 11015 - RNA, 22 nt, Homo sapiens
uguaaacauccuacacucagcu

SEQ ID NO: 11016 - RNA, 23 nt, Homo sapiens
aaugacacgaucacucccguuga

SEQ ID NO: 11017 - RNA, 22 nt, Homo sapiens
ucaggcucaguccccucccgau

SEQ ID NO: 11018 - RNA, 21 nt, Homo sapiens
uuggccacaauggguuagaac

SEQ ID NO: 11019 - RNA, 22 nt, Homo sapiens
agacuucccauuugaagguggc

SEQ ID NO: 11020 - RNA, 23 nt, Homo sapiens
uauucauuuauccccagccuaca

SEQ ID NO: 11021 - RNA, 21 nt, Homo sapiens
uccugcgcgucccagaugccc

SEQ ID NO: 11022 - RNA, 22 nt, Homo sapiens
cgcaggggccgggugcucaccg

SEQ ID NO: 11023 - RNA, 22 nt, Homo sapiens
cccugugcccggcccacuucug

SEQ ID NO: 11024 - RNA, 22 nt, Homo sapiens
acacagggcuguugugaagacu

SEQ ID NO: 11025 - RNA, 22 nt, Homo sapiens
ugcggggcuagggcuaacagca

SEQ ID NO: 11026 - RNA, 22 nt, Homo sapiens
ugugcgcagggagaccucuccc

SEQ ID NO: 11027 - RNA, 22 nt, Homo sapiens
aacccguagauccgaucuugug

SEQ ID NO: 11028 - RNA, 22 nt, Homo sapiens
cacccguagaaccgaccuugcg

SEQ ID NO: 11029 - RNA, 22 nt, Homo sapiens
ccucuuccccuugucucuccag

SEQ ID NO: 11030 - RNA, 25 nt, Homo sapiens
ugggaacggguuccggcagacgcug

SEQ ID NO: 11031 - RNA, 23 nt, Homo sapiens
agguuacccgagcaacuuugcau

SEQ ID NO: 11032 - RNA, 22 nt, Homo sapiens
ugauugguacgucuguggguag

SEQ ID NO: 11033 - RNA, 22 nt, Homo sapiens
aaaaguaauugcgaguuuuacc

SEQ ID NO: 11034 - RNA, 22 nt, Homo sapiens
aaaaguaauugugguuuuggcc

SEQ ID NO: 11035 - RNA, 22 nt, Homo sapiens
aaaaguaauugcgguuuuugcc

SEQ ID NO: 11036 - RNA, 22 nt, Homo sapiens
aaaaguaauugugguuuuugcc

SEQ ID NO: 11037 - RNA, 22 nt, Homo sapiens
aaaaguaaucgcgguuuuuguc

SEQ ID NO: 11038 - RNA, 22 nt, Homo sapiens
aaaaguaauugcggauuuugcc

SEQ ID NO: 11039 - RNA, 22 nt, Homo sapiens
aaaaguaauugcggucuuuggu

SEQ ID NO: 11040 - RNA, 21 nt, Homo sapiens
uaaaguaaauaugcaccaaaa

SEQ ID NO: 11041 - RNA, 21 nt, Homo sapiens
uuggccacaauggguuagaac

SEQ ID NO: 11042 - RNA, 20 nt, Homo sapiens
guagaggagauggcgcaggg

SEQ ID NO: 11043 - RNA, 23 nt, Homo sapiens
gagggucuugggagggaugugac

SEQ ID NO: 11044 - RNA, 23 nt, Homo sapiens
aggaugagcaaagaaaguagauu

SEQ ID NO: 11045 - RNA, 22 nt, Homo sapiens
cggaugagcaaagaaagugguu

SEQ ID NO: 11046 - RNA, 18 nt, Homo sapiens
aucccaccucugccacca

SEQ ID NO: 11047 - RNA, 24 nt, Homo sapiens
uggcccugacugaagaccagcagu

SEQ ID NO: 11048 - RNA, 25 nt, Homo sapiens
ugggaacggguuccggcagacgcug

SEQ ID NO: 11049 - RNA, 21 nt, Homo sapiens
gcccuccgcccgugcaccccg

SEQ ID NO: 11050 - RNA, 22 nt, Homo sapiens
cgcaggggccgggugcucaccg

SEQ ID NO: 11051 - RNA, 22 nt, Homo sapiens
aacuggccuacaaagucccagu

SEQ ID NO: 11052 - RNA, 22 nt, Homo sapiens
aacuggcccucaaagucccgcu

SEQ ID NO: 11053 - RNA, 22 nt, Homo sapiens
acagcaggcacagacaggcagu

SEQ ID NO: 11054 - RNA, 21 nt, Homo sapiens
agggcccccccucaauccugu

SEQ ID NO: 11055 - RNA, 22 nt, Homo sapiens
aaaagcuggguugagagggcga

SEQ ID NO: 11056 - RNA, 22 nt, Homo sapiens
aaaagcuggguugagagggcaa

SEQ ID NO: 11057 - RNA, 20 nt, Homo sapiens
aaaagcuggguugagagggu

SEQ ID NO: 11058 - RNA, 19 nt, Homo sapiens
aaaagcuggguugagagga

SEQ ID NO: 11059 - RNA, 22 nt, Homo sapiens
gccugcugggguggaaccuggu

SEQ ID NO: 11060 - RNA, 22 nt, Homo sapiens
uucucaaggaggugucguuuau

SEQ ID NO: 11061 - RNA, 23 nt, Homo sapiens
cucuugagggaagcacuuucugu

SEQ ID NO: 11062 - RNA, 21 nt, Homo sapiens
agggggaaaguucuauagucc

SEQ ID NO: 11063 - RNA, 20 nt, Homo sapiens
ggggagcuguggaagcagua

SEQ ID NO: 11064 - RNA, 21 nt, Homo sapiens
uaccacaggguagaaccacgg

SEQ ID NO: 11065 - RNA, 23 nt, Homo sapiens
cccaguguucagacuaccuguuc

SEQ ID NO: 11066 - RNA, 23 nt, Homo sapiens
cccaguguuuagacuaucuguuc

SEQ ID NO: 11067 - RNA, 22 nt, Homo sapiens
acccgucccguucguccccgga

SEQ ID NO: 11068 - RNA, 22 nt, Homo sapiens
augggugaauuuguagaaggau

SEQ ID NO: 11069 - RNA, 22 nt, Homo sapiens
uuagggcccuggcuccaucucc

SEQ ID NO: 11070 - RNA, 21 nt, Homo sapiens
cggcggggacggcgauugguc

SEQ ID NO: 11071 - RNA, 22 nt, Homo sapiens
cauugcacuugucucggucuga

SEQ ID NO: 11072 - RNA, 25 nt, Homo sapiens
ggcggagggaaguagguccguuggu

SEQ ID NO: 11073 - RNA, 22 nt, Homo sapiens
aggcggggcgccgcgggaccgc

SEQ ID NO: 11074 - RNA, 21 nt, Homo sapiens
uggaggagaaggaaggugaug

SEQ ID NO: 11075 - RNA, 21 nt, Homo sapiens
cgcgggugcuuacugacccuu

SEQ ID NO: 11076 - RNA, 21 nt, Homo sapiens
cgcgggugcuuacugacccuu

SEQ ID NO: 11077 - RNA, 22 nt, Homo sapiens
uauugcacucgucccggccucc

SEQ ID NO: 11078 - RNA, 24 nt, Homo sapiens
uggggagcugaggcucugggggug

SEQ ID NO: 11079 - RNA, 19 nt, Homo sapiens
gugucugcuuccuguggga

SEQ ID NO: 11080 - RNA, 22 nt, Homo sapiens
aggcggggcgccgcgggaccgc

SEQ ID NO: 11081 - RNA, 24 nt, Homo sapiens
ucccugagacccuuuaaccuguga

SEQ ID NO: 11082 - RNA, 22 nt, Homo sapiens
ucccugagacccuaacuuguga

SEQ ID NO: 11083 - RNA, 18 nt, Homo sapiens
aucccaccucugccacca

SEQ ID NO: 11084 - RNA, 23 nt, Homo sapiens
ccucagggcuguagaacagggcu

SEQ ID NO: 11085 - RNA, 23 nt, Homo sapiens
cuggagauauggaagagcugugu

SEQ ID NO: 11086 - RNA, 22 nt, Homo sapiens
uuugguccccuucaaccagcug

SEQ ID NO: 11087 - RNA, 22 nt, Homo sapiens
uuugguccccuucaaccagcua

SEQ ID NO: 11088 - RNA, 23 nt, Homo sapiens
acuccauuuguuuugaugaugga

SEQ ID NO: 11089 - RNA, 23 nt, Homo sapiens
ucuggcuccgugucuucacuccc

SEQ ID NO: 11090 - RNA, 21 nt, Homo sapiens
uccugcgcgucccagaugccc

SEQ ID NO: 11091 - RNA, 21 nt, Homo sapiens
cggcggggacggcgauugguc

SEQ ID NO: 11092 - RNA, 22 nt, Homo sapiens
uagguaguuuccuguuguuggg

SEQ ID NO: 11093 - RNA, 22 nt, Homo sapiens
gguccagaggggagauagguuc

SEQ ID NO: 11094 - RNA, 22 nt, Homo sapiens
uguaaacauccuacacucagcu

SEQ ID NO: 11095 - RNA, 23 nt, Homo sapiens
caaagcgcuucucuuuagagugu

SEQ ID NO: 11096 - RNA, 21 nt, Homo sapiens
cuccagagggaaguacuuucu

SEQ ID NO: 11097 - RNA, 21 nt, Homo sapiens
cuccagagggaugcacuuucu

SEQ ID NO: 11098 - RNA, 22 nt, Homo sapiens
ccucccacacccaaggcuugca

SEQ ID NO: 11099 - RNA, 20 nt, Homo sapiens
auggagauagauauagaaau

SEQ ID NO: 11100 - RNA, 22 nt, Homo sapiens
aggcggggcgccgcgggaccgc

SEQ ID NO: 11101 - RNA, 22 nt, Homo sapiens
ugcggggcuagggcuaacagca

SEQ ID NO: 11102 - RNA, 22 nt, Homo sapiens
cuggacugagccgugcuacugg

SEQ ID NO: 11103 - RNA, 23 nt, Homo sapiens
ucuggcuccgugucuucacuccc

SEQ ID NO: 11104 - RNA, 21 nt, Homo sapiens
cggcggggacggcgauugguc

SEQ ID NO: 11105 - RNA, 22 nt, Homo sapiens
cccugugcccggcccacuucug

SEQ ID NO: 11106 - RNA, 21 nt, Homo sapiens
aggcaagaugcuggcauagcu

SEQ ID NO: 11107 - RNA, 23 nt, Homo sapiens
ucccccaggugugauucugauuu

SEQ ID NO: 11108 - RNA, 21 nt, Homo sapiens
gcaguccaugggcauauacac

SEQ ID NO: 11109 - RNA, 22 nt, Homo sapiens
caagaaccucaguugcuuuugu

SEQ ID NO: 11110 - RNA, 25 nt, Homo sapiens
aggggugguguugggacagcuccgu

SEQ ID NO: 11111 - RNA, 22 nt, Homo sapiens
ggggguccccggugcucggauc

SEQ ID NO: 11112 - RNA, 24 nt, Homo sapiens
acugggggcuuucgggcucugcgu

SEQ ID NO: 11113 - RNA, 22 nt, Homo sapiens
aggcggggcgccgcgggaccgc

SEQ ID NO: 11114 - RNA, 20 nt, Homo sapiens
ggggagcuguggaagcagua

SEQ ID NO: 11115 - RNA, 22 nt, Homo sapiens
uggagugugacaaugguguuug

SEQ ID NO: 11116 - RNA, 18 nt, Homo sapiens
cagggaggugaaugugau

SEQ ID NO: 11117 - RNA, 23 nt, Homo sapiens
ucuggcuccgugucuucacuccc

SEQ ID NO: 11118 - RNA, 21 nt, Homo sapiens
cggcggggacggcgauugguc

SEQ ID NO: 11119 - RNA, 19 nt, Homo sapiens
accgugcaaagguagcaua

SEQ ID NO: 11120 - RNA, 23 nt, Homo sapiens
ucccccaggugugauucugauuu

SEQ ID NO: 11121 - RNA, 20 nt, Homo sapiens
guccgcucggcgguggccca

SEQ ID NO: 11122 - RNA, 22 nt, Homo sapiens
aggcggggcgccgcgggaccgc

SEQ ID NO: 11123 - RNA, 20 nt, Homo sapiens
accaggaggcugaggccccu

SEQ ID NO: 11124 - RNA, 21 nt, Homo sapiens
uggcagggaggcugggagggg

SEQ ID NO: 11125 - RNA, 24 nt, Homo sapiens
uggcccugacugaagaccagcagu

SEQ ID NO: 11126 - RNA, 22 nt, Homo sapiens
uggguggucuggagauuugugc

SEQ ID NO: 11127 - RNA, 22 nt, Homo sapiens
cuggcccucucugcccuuccgu

SEQ ID NO: 11128 - RNA, 21 nt, Homo sapiens
gugucuuuugcucugcaguca

SEQ ID NO: 11129 - RNA, 18 nt, Homo sapiens
ugcuuccuuucagagggu

SEQ ID NO: 11130 - RNA, 22 nt, Homo sapiens
aucuggagguaagaagcacuuu

SEQ ID NO: 11131 - RNA, 22 nt, Homo sapiens
ugugacagauugauaacugaaa

SEQ ID NO: 11132 - RNA, 22 nt, Homo sapiens
uuugugaccugguccacuaacc

SEQ ID NO: 11133 - RNA, 23 nt, Homo sapiens
ucuuugguuaucuagcuguauga

SEQ ID NO: 11134 - RNA, 21 nt, Homo sapiens
aaggcagggcccccgcucccc

SEQ ID NO: 11135 - RNA, 18 nt, Homo sapiens
cgggcguggugguggggg

SEQ ID NO: 11136 - RNA, 17 nt, Homo sapiens
ucgccuccuccucuccc

SEQ ID NO: 11137 - RNA, 23 nt, Homo sapiens
cggcccgggcugcugcuguuccu

SEQ ID NO: 11138 - RNA, 21 nt, Homo sapiens
cggcggggacggcgauugguc

SEQ ID NO: 11139 - RNA, 21 nt, Homo sapiens
acuggacuuggagucagaagg

SEQ ID NO: 11140 - RNA, 23 nt, Homo sapiens
ugaggggcagagagcgagacuuu

SEQ ID NO: 11141 - RNA, 21 nt, Homo sapiens
aggguaagcugaaccucugau

SEQ ID NO: 11142 - RNA, 22 nt, Homo sapiens
aggcggggcgccgcgggaccgc

SEQ ID NO: 11143 - RNA, 20 nt, Homo sapiens
cggcucugggucugugggga

SEQ ID NO: 11144 - RNA, 21 nt, Homo sapiens
uggcagggaggcugggagggg

SEQ ID NO: 11145 - RNA, 22 nt, Homo sapiens
ucaccagcccuguguucccuag

SEQ ID NO: 11146 - RNA, 21 nt, Homo sapiens
uccuucugcuccgucccccag

SEQ ID NO: 11147 - RNA, 22 nt, Homo sapiens
ucugggcaacaaagugagaccu

SEQ ID NO: 11148 - RNA, 21 nt, Homo sapiens
ugcaggaccaagaugagcccu

SEQ ID NO: 11149 - RNA, 18 nt, Homo sapiens
cagggaggugaaugugau

SEQ ID NO: 11150 - RNA, 23 nt, Homo sapiens
agcugguguugugaaucaggccg

SEQ ID NO: 11151 - RNA, 21 nt, Homo sapiens
uaccacaggguagaaccacgg

SEQ ID NO: 11152 - RNA, 23 nt, Homo sapiens
ucuggcuccgugucuucacuccc

SEQ ID NO: 11153 - RNA, 22 nt, Homo sapiens
uggagagaaaggcaguuccuga

SEQ ID NO: 11154 - RNA, 22 nt, Homo sapiens
caaagaauucuccuuuugggcu

SEQ ID NO: 11155 - RNA, 22 nt, Homo sapiens
cccugugcccggcccacuucug

SEQ ID NO: 11156 - RNA, 22 nt, Homo sapiens
ucaggccaggcacaguggcuca

SEQ ID NO: 11157 - RNA, 22 nt, Homo sapiens
aaggagcucacagucuauugag

SEQ ID NO: 11158 - RNA, 20 nt, Homo sapiens
ccucugggcccuuccuccag

SEQ ID NO: 11159 - RNA, 22 nt, Homo sapiens
ucucugggccugugucuuaggc

SEQ ID NO: 11160 - RNA, 23 nt, Homo sapiens
ugaggggcagagagcgagacuuu

SEQ ID NO: 11161 - RNA, 21 nt, Homo sapiens
gugucuuuugcucugcaguca

SEQ ID NO: 11162 - RNA, 22 nt, Homo sapiens
auucugcauuuuuagcaaguuc

SEQ ID NO: 11163 - RNA, 25 nt, Homo sapiens
gcugggcagggcuucugagcuccuu

SEQ ID NO: 11164 - RNA, 22 nt, Homo sapiens
ggggguccccggugcucggauc

SEQ ID NO: 11165 - RNA, 19 nt, Homo sapiens
agcugucugaaaaugucuu

SEQ ID NO: 11166 - RNA, 23 nt, Homo sapiens
aaggagcuuacaaucuagcuggg

SEQ ID NO: 11167 - RNA, 22 nt, Homo sapiens
caaagugccucccuuuagagug

SEQ ID NO: 11168 - RNA, 20 nt, Homo sapiens
ggggagcuguggaagcagua

SEQ ID NO: 11169 - RNA, 22 nt, Homo sapiens
ucggccugaccacccaccccac

SEQ ID NO: 11170 - RNA, 17 nt, Homo sapiens
ucgccuccuccucuccc

SEQ ID NO: 11171 - RNA, 22 nt, Homo sapiens
acucggcguggcgucggucgug

SEQ ID NO: 11172 - RNA, 22 nt, Homo sapiens
uagcaccaucugaaaucgguua

SEQ ID NO: 11173 - RNA, 23 nt, Homo sapiens
uagcaccauuugaaaucaguguu

SEQ ID NO: 11174 - RNA, 22 nt, Homo sapiens
uagcaccauuugaaaucgguua

SEQ ID NO: 11175 - RNA, 22 nt, Homo sapiens
ugauugguacgucuguggguag

SEQ ID NO: 11176 - RNA, 19 nt, Homo sapiens
ugagcugcuguaccaaaau

SEQ ID NO: 11177 - RNA, 19 nt, Homo sapiens
aggcugcggaauucaggac

SEQ ID NO: 11178 - RNA, 21 nt, Homo sapiens
gugccagcugcagugggggag

SEQ ID NO: 11179 - RNA, 22 nt, Homo sapiens
cucggcgcggggcgcgggcucc

SEQ ID NO: 11180 - RNA, 23 nt, Homo sapiens
uaaggugcaucuagugcagauag

SEQ ID NO: 11181 - RNA, 22 nt, Homo sapiens
aaaucucugcaggcaaauguga

SEQ ID NO: 11182 - RNA, 23 nt, Homo sapiens
ugagcgccucgacgacagagccg

SEQ ID NO: 11183 - RNA, 23 nt, Homo sapiens
ugucugcccgcaugccugccucu

SEQ ID NO: 11184 - RNA, 19 nt, Homo sapiens
ugucucugcugggguuucu

SEQ ID NO: 11185 - RNA, 21 nt, Homo sapiens
guggcugcacucacuuccuuc

SEQ ID NO: 11186 - RNA, 20 nt, Homo sapiens
cggcucugggucugugggga

SEQ ID NO: 11187 - RNA, 22 nt, Homo sapiens
cugcccuggcccgagggaccga

SEQ ID NO: 11188 - RNA, 22 nt, Homo sapiens
uggagugugacaaugguguuug

SEQ ID NO: 11189 - RNA, 21 nt, Homo sapiens
acucuagcugccaaaggcgcu

SEQ ID NO: 11190 - RNA, 21 nt, Homo sapiens
caagucacuagugguuccguu

SEQ ID NO: 11191 - RNA, 22 nt, Homo sapiens
uaaugccccuaaaaauccuuau

SEQ ID NO: 11192 - RNA, 23 nt, Homo sapiens
ugaggggcagagagcgagacuuu

SEQ ID NO: 11193 - RNA, 22 nt, Homo sapiens
ugaaggucuacugugugccagg

SEQ ID NO: 11194 - RNA, 23 nt, Homo sapiens
aucgcugcgguugcgagcgcugu

SEQ ID NO: 11195 - RNA, 20 nt, Homo sapiens
accaggaggcugaggccccu

SEQ ID NO: 11196 - RNA, 21 nt, Homo sapiens
uccgguucucagggcuccacc

SEQ ID NO: 11197 - RNA, 18 nt, Homo sapiens
ugaggcaguagauugaau

SEQ ID NO: 11198 - RNA, 22 nt, Homo sapiens
uggcagugucuuagcugguugu

SEQ ID NO: 11199 - RNA, 23 nt, Homo sapiens
uagcagcgggaacaguucugcag

SEQ ID NO: 11200 - RNA, 21 nt, Homo sapiens
caaagaggaaggucccauuac

SEQ ID NO: 11201 - RNA, 21 nt, Homo sapiens
uggaggagaaggaaggugaug

SEQ ID NO: 11202 - RNA, 21 nt, Homo sapiens
aaggcagggcccccgcucccc

SEQ ID NO: 11203 - RNA, 21 nt, Homo sapiens
gugccagcugcagugggggag

SEQ ID NO: 11204 - RNA, 22 nt, Homo sapiens
uggagugugacaaugguguuug

SEQ ID NO: 11205 - RNA, 17 nt, Homo sapiens
ucgccuccuccucuccc

SEQ ID NO: 11206 - RNA, 23 nt, Homo sapiens
ucuggcuccgugucuucacuccc

SEQ ID NO: 11207 - RNA, 22 nt, Homo sapiens
uggagagaaaggcaguuccuga

SEQ ID NO: 11208 - RNA, 21 nt, Homo sapiens
cggcggggacggcgauugguc

SEQ ID NO: 11209 - RNA, 21 nt, Homo sapiens
auuugugcuuggcucugucac

SEQ ID NO: 11210 - RNA, 23 nt, Homo sapiens
ugaggggcagagagcgagacuuu

SEQ ID NO: 11211 - RNA, 22 nt, Homo sapiens
agaggcuggccgugaugaauuc

SEQ ID NO: 11212 - RNA, 24 nt, Homo sapiens
ugccugggucucuggccugcgcgu

SEQ ID NO: 11213 - RNA, 22 nt, Homo sapiens
aggcggggcgccgcgggaccgc

SEQ ID NO: 11214 - RNA, 23 nt, Homo sapiens
aggaagcccuggaggggcuggag

SEQ ID NO: 11215 - RNA, 22 nt, Homo sapiens
ugcggggcuagggcuaacagca

SEQ ID NO: 11216 - RNA, 21 nt, Homo sapiens
uggaggagaaggaaggugaug

SEQ ID NO: 11217 - RNA, 21 nt, Homo sapiens
aggguaagcugaaccucugau

SEQ ID NO: 11218 - RNA, 21 nt, Homo sapiens
uggaggagaaggaaggugaug

SEQ ID NO: 11219 - RNA, 22 nt, Homo sapiens
ccucuuccccuugucucuccag

SEQ ID NO: 11220 - RNA, 20 nt, Homo sapiens
uaaagagcccuguggagaca

SEQ ID NO: 11221 - RNA, 22 nt, Homo sapiens
uucauucggcuguccagaugua

SEQ ID NO: 11222 - RNA, 23 nt, Homo sapiens
ugaggggcagagagcgagacuuu

SEQ ID NO: 11223 - RNA, 22 nt, Homo sapiens
ugugacagauugauaacugaaa

SEQ ID NO: 11224 - RNA, 21 nt, Homo sapiens
agggggaaaguucuauagucc

SEQ ID NO: 11225 - RNA, 22 nt, Homo sapiens
acuccagccccacagccucagc

SEQ ID NO: 11226 - RNA, 20 nt, Homo sapiens
guagaggagauggcgcaggg

SEQ ID NO: 11227 - RNA, 20 nt, Homo sapiens
guagaggagauggcgcaggg

SEQ ID NO: 11228 - RNA, 24 nt, Homo sapiens
uggcccugacugaagaccagcagu

SEQ ID NO: 11229 - RNA, 24 nt, Homo sapiens
uggcccugacugaagaccagcagu

SEQ ID NO: 11230 - RNA, 22 nt, Homo sapiens
ugcccuguggacucaguucugg

SEQ ID NO: 11231 - RNA, 23 nt, Homo sapiens
ucuggcuccgugucuucacuccc

SEQ ID NO: 11232 - RNA, 22 nt, Homo sapiens
ucugcccccuccgcugcugcca

SEQ ID NO: 11233 - RNA, 21 nt, Homo sapiens
agggcccccccucaauccugu

SEQ ID NO: 11234 - RNA, 20 nt, Homo sapiens
acugccccaggugcugcugg

SEQ ID NO: 11235 - RNA, 23 nt, Homo sapiens
ucccuguccuccaggagcucacg

SEQ ID NO: 11236 - RNA, 22 nt, Homo sapiens
aauugcacgguauccaucugua

SEQ ID NO: 11237 - RNA, 21 nt, Homo sapiens
cggggcagcucaguacaggau

SEQ ID NO: 11238 - RNA, 22 nt, Homo sapiens
cgucaacacuugcugguuuccu

SEQ ID NO: 11239 - RNA, 22 nt, Homo sapiens
ccucccacacccaaggcuugca

SEQ ID NO: 11240 - RNA, 25 nt, Homo sapiens
aggggugguguugggacagcuccgu

SEQ ID NO: 11241 - RNA, 21 nt, Homo sapiens
cgcgggugcuuacugacccuu

SEQ ID NO: 11242 - RNA, 20 nt, Homo sapiens
ggggagcuguggaagcagua

SEQ ID NO: 11243 - RNA, 22 nt, Homo sapiens
uuuccggcucgcgugggugugu

SEQ ID NO: 11244 - RNA, 21 nt, Homo sapiens
aagugaucuaaaggccuacau

SEQ ID NO: 11245 - RNA, 22 nt, Homo sapiens
aucgugcauccuuuuagagugu

SEQ ID NO: 11246 - RNA, 22 nt, Homo sapiens
cccugugcccggcccacuucug

SEQ ID NO: 11247 - RNA, 22 nt, Homo sapiens
uaauacugccugguaaugauga

SEQ ID NO: 11248 - RNA, 23 nt, Homo sapiens
uaauacugccggguaaugaugga

SEQ ID NO: 11249 - RNA, 22 nt, Homo sapiens
acacagggcuguugugaagacu

SEQ ID NO: 11250 - RNA, 22 nt, Homo sapiens
uaauacugucugguaaaaccgu

SEQ ID NO: 11251 - RNA, 21 nt, Homo sapiens
gaaggcgcuucccuuuggagu

SEQ ID NO: 11252 - RNA, 22 nt, Homo sapiens
gaaggcgcuucccuuuagagcg

SEQ ID NO: 11253 - RNA, 22 nt, Homo sapiens
ugcaacuuaccugagucauuga

SEQ ID NO: 11254 - RNA, 22 nt, Homo sapiens
aacccguagauccgaucuugug

SEQ ID NO: 11255 - RNA, 22 nt, Homo sapiens
cacccguagaaccgaccuugcg

SEQ ID NO: 11256 - RNA, 21 nt, Homo sapiens
acucuagcugccaaaggcgcu

SEQ ID NO: 11257 - RNA, 22 nt, Homo sapiens
uggguggucuggagauuugugc

SEQ ID NO: 11258 - RNA, 22 nt, Homo sapiens
ggagacgcggcccuguuggagu

SEQ ID NO: 11259 - RNA, 22 nt, Homo sapiens
ucaggccaggcacaguggcuca

SEQ ID NO: 11260 - RNA, 23 nt, Homo sapiens
aggaccugcgggacaagauucuu

SEQ ID NO: 11261 - RNA, 22 nt, Homo sapiens
gaugagcucauuguaauaugag

SEQ ID NO: 11262 - RNA, 22 nt, Homo sapiens
uggugguuuacaaaguaauuca

SEQ ID NO: 11263 - RNA, 22 nt, Homo sapiens
uauggcacugguagaauucacu

SEQ ID NO: 11264 - RNA, 22 nt, Homo sapiens
uauggcacugguagaauucacu

SEQ ID NO: 11265 - RNA, 22 nt, Homo sapiens
uggagagaaaggcaguuccuga

SEQ ID NO: 11266 - RNA, 22 nt, Homo sapiens
uacccagagcaugcagugugaa

SEQ ID NO: 11267 - RNA, 22 nt, Homo sapiens
cuuaugcaagauucccuucuac

SEQ ID NO: 11268 - RNA, 22 nt, Homo sapiens
ucugggcaacaaagugagaccu

SEQ ID NO: 11269 - RNA, 22 nt, Homo sapiens
aacuggcccucaaagucccgcu

SEQ ID NO: 11270 - RNA, 21 nt, Homo sapiens
gguuugguccuagccuuucua

SEQ ID NO: 11271 - RNA, 23 nt, Homo sapiens
ucuuggaguaggucauugggugg

SEQ ID NO: 11272 - RNA, 24 nt, Homo sapiens
uucuccaaaagaaagcacuuucug

SEQ ID NO: 11273 - RNA, 22 nt, Homo sapiens
aagugccuccuuuuagaguguu

SEQ ID NO: 11274 - RNA, 25 nt, Homo sapiens
gcugggcagggcuucugagcuccuu

SEQ ID NO: 11275 - RNA, 23 nt, Homo sapiens
acuugggcacugaaacaaugucc

SEQ ID NO: 11276 - RNA, 22 nt, Homo sapiens
gucccucuccaaaugugucuug

SEQ ID NO: 11277 - RNA, 22 nt, Homo sapiens
ucgugucuuguguugcagccgg

SEQ ID NO: 11278 - RNA, 25 nt, Homo sapiens
cccccacaaccgcgcuugacuagcu

SEQ ID NO: 11279 - RNA, 22 nt, Homo sapiens
uguaaacauccuacacucagcu

SEQ ID NO: 11280 - RNA, 23 nt, Homo sapiens
ucaagagcaauaacgaaaaaugu

SEQ ID NO: 11281 - RNA, 23 nt, Homo sapiens
uuucaagccagggggcguuuuuc

SEQ ID NO: 11282 - RNA, 21 nt, Homo sapiens
gugucuuuugcucugcaguca

SEQ ID NO: 11283 - RNA, 21 nt, Homo sapiens
gaaggcgcuucccuuuggagu

SEQ ID NO: 11284 - RNA, 22 nt, Homo sapiens
gaaggcgcuucccuuuagagcg

SEQ ID NO: 11285 - RNA, 25 nt, Homo sapiens
agggaucgcgggcggguggcggccu

SEQ ID NO: 11286 - RNA, 21 nt, Homo sapiens
uggcagggaggcugggagggg

SEQ ID NO: 11287 - RNA, 21 nt, Homo sapiens
cggcggggacggcgauugguc

SEQ ID NO: 11288 - RNA, 22 nt, Homo sapiens
cgcaggggccgggugcucaccg

SEQ ID NO: 11289 - RNA, 22 nt, Homo sapiens
ucugcccccuccgcugcugcca

SEQ ID NO: 11290 - RNA, 20 nt, Homo sapiens
acugccccaggugcugcugg

SEQ ID NO: 11291 - RNA, 21 nt, Homo sapiens
cggggcagcucaguacaggau

SEQ ID NO: 11292 - RNA, 22 nt, Homo sapiens
gucccucuccaaaugugucuug

SEQ ID NO: 11293 - RNA, 22 nt, Homo sapiens
aggcggggcgccgcgggaccgc

SEQ ID NO: 11294 - RNA, 22 nt, Homo sapiens
ugcggggcuagggcuaacagca

SEQ ID NO: 11295 - RNA, 23 nt, Homo sapiens
ccugcagcgacuugauggcuucc

SEQ ID NO: 11296 - RNA, 23 nt, Homo sapiens
ccugcagcgacuugauggcuucc

SEQ ID NO: 11297 - RNA, 22 nt, Homo sapiens
acgcccuucccccccuucuuca

SEQ ID NO: 11298 - RNA, 21 nt, Homo sapiens
cggcggggacggcgauugguc

SEQ ID NO: 11299 - RNA, 23 nt, Homo sapiens
caacggaaucccaaaagcagcug

SEQ ID NO: 11300 - RNA, 23 nt, Homo sapiens
ugaggggcagagagcgagacuuu

SEQ ID NO: 11301 - RNA, 21 nt, Homo sapiens
auccuugcuaucugggugcua

SEQ ID NO: 11302 - RNA, 21 nt, Homo sapiens
ggcuagcaacagcgcuuaccu

SEQ ID NO: 11303 - RNA, 24 nt, Homo sapiens
ugccugggucucuggccugcgcgu

SEQ ID NO: 11304 - RNA, 22 nt, Homo sapiens
aggcggggcgccgcgggaccgc

SEQ ID NO: 11305 - RNA, 22 nt, Homo sapiens
ugcggggcuagggcuaacagca

SEQ ID NO: 11306 - RNA, 21 nt, Homo sapiens
uggcagggaggcugggagggg

SEQ ID NO: 11307 - RNA, 17 nt, Homo sapiens
ucgccuccuccucuccc

SEQ ID NO: 11308 - RNA, 18 nt, Homo sapiens
acguuggcucugguggug

SEQ ID NO: 11309 - RNA, 21 nt, Homo sapiens
cggcggggacggcgauugguc

SEQ ID NO: 11310 - RNA, 22 nt, Homo sapiens
ucugcccccuccgcugcugcca

SEQ ID NO: 11311 - RNA, 22 nt, Homo sapiens
uagcaccaucugaaaucgguua

SEQ ID NO: 11312 - RNA, 23 nt, Homo sapiens
uagcaccauuugaaaucaguguu

SEQ ID NO: 11313 - RNA, 22 nt, Homo sapiens
uagcaccauuugaaaucgguua

SEQ ID NO: 11314 - RNA, 20 nt, Homo sapiens
acugccccaggugcugcugg

SEQ ID NO: 11315 - RNA, 22 nt, Homo sapiens
aauugcacgguauccaucugua

SEQ ID NO: 11316 - RNA, 23 nt, Homo sapiens
ugaggggcagagagcgagacuuu

SEQ ID NO: 11317 - RNA, 21 nt, Homo sapiens
cggggcagcucaguacaggau

SEQ ID NO: 11318 - RNA, 22 nt, Homo sapiens
aggcggggcgccgcgggaccgc

SEQ ID NO: 11319 - RNA, 22 nt, Homo sapiens
ugcggggcuagggcuaacagca

SEQ ID NO: 11320 - RNA, 21 nt, Homo sapiens
ccccaccuccucucuccucag

SEQ ID NO: 11321 - RNA, 22 nt, Homo sapiens
uggagugugacaaugguguuug

SEQ ID NO: 11322 - RNA, 17 nt, Homo sapiens
ucccaccgcugccaccc

SEQ ID NO: 11323 - RNA, 21 nt, Homo sapiens
uugggacauacuuaugcuaaa

SEQ ID NO: 11324 - RNA, 22 nt, Homo sapiens
cauugcacuugucucggucuga

SEQ ID NO: 11325 - RNA, 22 nt, Homo sapiens
uaaugccccuaaaaauccuuau

SEQ ID NO: 11326 - RNA, 23 nt, Homo sapiens
ucuuggaguaggucauugggugg

SEQ ID NO: 11327 - RNA, 25 nt, Homo sapiens
ggcggagggaaguagguccguuggu

SEQ ID NO: 11328 - RNA, 20 nt, Homo sapiens
ggggagcuguggaagcagua

SEQ ID NO: 11329 - RNA, 22 nt, Homo sapiens
ugugagguuggcauuguugucu

SEQ ID NO: 11330 - RNA, 18 nt, Homo sapiens
uugagaaggaggcugcug

SEQ ID NO: 11331 - RNA, 22 nt, Homo sapiens
ucagugcaucacagaacuuugu

SEQ ID NO: 11332 - RNA, 22 nt, Homo sapiens
uagcagcacauaaugguuugug

SEQ ID NO: 11333 - RNA, 23 nt, Homo sapiens
uaaggugcaucuagugcagauag

SEQ ID NO: 11334 - RNA, 22 nt, Homo sapiens
cucccacugcuucacuugacua

SEQ ID NO: 11335 - RNA, 21 nt, Homo sapiens
gccccugggccuauccuagaa

SEQ ID NO: 11336 - RNA, 23 nt, Homo sapiens
gaacgcgcuucccuauagagggu

SEQ ID NO: 11337 - RNA, 22 nt, Homo sapiens
ccucccacacccaaggcuugca

SEQ ID NO: 11338 - RNA, 17 nt, Homo sapiens
ucucgcuggggccucca

SEQ ID NO: 11339 - RNA, 23 nt, Homo sapiens
ucaaaugcucagacuccuguggu

SEQ ID NO: 11340 - RNA, 22 nt, Homo sapiens
uggagugugacaaugguguuug

SEQ ID NO: 11341 - RNA, 17 nt, Homo sapiens
ucccaccgcugccaccc

SEQ ID NO: 11342 - RNA, 21 nt, Homo sapiens
uccugcgcgucccagaugccc

SEQ ID NO: 11343 - RNA, 21 nt, Homo sapiens
cggcggggacggcgauugguc

SEQ ID NO: 11344 - RNA, 22 nt, Homo sapiens
auauaauacaaccugcuaagug

SEQ ID NO: 11345 - RNA, 22 nt, Homo sapiens
uggugggcacagaaucuggacu

SEQ ID NO: 11346 - RNA, 22 nt, Homo sapiens
uggugggccgcagaacaugugc

SEQ ID NO: 11347 - RNA, 22 nt, Homo sapiens
aggcggggcgccgcgggaccgc

SEQ ID NO: 11348 - RNA, 22 nt, Homo sapiens
ugcggggcuagggcuaacagca

SEQ ID NO: 11349 - RNA, 22 nt, Homo sapiens
ucggauccgucugagcuuggcu

SEQ ID NO: 11350 - RNA, 23 nt, Homo sapiens
ucuggcuccgugucuucacuccc

SEQ ID NO: 11351 - RNA, 20 nt, Homo sapiens
ccccagggcgacgcggcggg

SEQ ID NO: 11352 - RNA, 22 nt, Homo sapiens
uuggggaaacggccgcugagug

SEQ ID NO: 11353 - RNA, 23 nt, Homo sapiens
agcuacauugucugcuggguuuc

SEQ ID NO: 11354 - RNA, 24 nt, Homo sapiens
aauccuuggaaccuaggugugagu

SEQ ID NO: 11355 - RNA, 21 nt, Homo sapiens
uugaaaggcuauuucuugguc

SEQ ID NO: 11356 - RNA, 22 nt, Homo sapiens
gaaagcgcuucccuuugcugga

SEQ ID NO: 11357 - RNA, 22 nt, Homo sapiens
caaagcgcuccccuuuagaggu

SEQ ID NO: 11358 - RNA, 23 nt, Homo sapiens
caaagcgcuucucuuuagagugu

SEQ ID NO: 11359 - RNA, 21 nt, Homo sapiens
caaagcgcuucccuuuggagc

SEQ ID NO: 11360 - RNA, 21 nt, Homo sapiens
aaagcgcuucccuucagagug

SEQ ID NO: 11361 - RNA, 21 nt, Homo sapiens
gaaagcgcuucucuuuagagg

SEQ ID NO: 11362 - RNA, 22 nt, Homo sapiens
ucagcaaacauuuauugugugc

SEQ ID NO: 11363 - RNA, 21 nt, Homo sapiens
uagauaaaauauugguaccug

SEQ ID NO: 11364 - RNA, 20 nt, Homo sapiens
uaaagagcccuguggagaca

SEQ ID NO: 11365 - RNA, 22 nt, Homo sapiens
uucccuuugucauccuaugccu

SEQ ID NO: 11366 - RNA, 22 nt, Homo sapiens
uucccuuugucauccuucgccu

SEQ ID NO: 11367 - RNA, 17 nt, Homo sapiens
uaauugcuuccauguuu

SEQ ID NO: 11368 - RNA, 22 nt, Homo sapiens
caaaguuuaagauccuugaagu

SEQ ID NO: 11369 - RNA, 22 nt, Homo sapiens
gucccucuccaaaugugucuug

SEQ ID NO: 11370 - RNA, 21 nt, Homo sapiens
ccuggaaacacugagguugug

SEQ ID NO: 11371 - RNA, 22 nt, Homo sapiens
agaaggaaauugaauucauuua

SEQ ID NO: 11372 - RNA, 18 nt, Homo sapiens
uugagaaggaggcugcug

SEQ ID NO: 11373 - RNA, 21 nt, Homo sapiens
cggcggggacggcgauugguc

SEQ ID NO: 11374 - RNA, 23 nt, Homo sapiens
ugagcgccucgacgacagagccg

SEQ ID NO: 11375 - RNA, 23 nt, Homo sapiens
ucccccaggugugauucugauuu

SEQ ID NO: 11376 - RNA, 21 nt, Homo sapiens
gaaggcgcuucccuuuggagu

SEQ ID NO: 11377 - RNA, 22 nt, Homo sapiens
gaaggcgcuucccuuuagagcg

SEQ ID NO: 11378 - RNA, 19 nt, Homo sapiens
gggcgccugugaucccaac

SEQ ID NO: 11379 - RNA, 19 nt, Homo sapiens
gagccaguuggacaggagc

SEQ ID NO: 11380 - RNA, 25 nt, Homo sapiens
ggcggagggaaguagguccguuggu

SEQ ID NO: 11381 - RNA, 24 nt, Homo sapiens
ugccugggucucuggccugcgcgu

SEQ ID NO: 11382 - RNA, 22 nt, Homo sapiens
aggcggggcgccgcgggaccgc

SEQ ID NO: 11383 - RNA, 22 nt, Homo sapiens
ugcggggcuagggcuaacagca

SEQ ID NO: 11384 - RNA, 21 nt, Homo sapiens
uggaggagaaggaaggugaug

SEQ ID NO: 11385 - RNA, 20 nt, Homo sapiens
ugagcccuguccucccgcag

SEQ ID NO: 11386 - RNA, 22 nt, Homo sapiens
uggguggucuggagauuugugc

SEQ ID NO: 11387 - RNA, 22 nt, Homo sapiens
aaaaccgucuaguuacaguugu

SEQ ID NO: 11388 - RNA, 21 nt, Homo sapiens
cucccacaugcaggguuugca

SEQ ID NO: 11389 - RNA, 22 nt, Homo sapiens
uucaccaccuucuccacccagc

SEQ ID NO: 11390 - RNA, 21 nt, Homo sapiens
ccaccaccgugucugacacuu

SEQ ID NO: 11391 - RNA, 21 nt, Homo sapiens
agggcccccccucaauccugu

SEQ ID NO: 11392 - RNA, 22 nt, Homo sapiens
uuauaauacaaccugauaagug

SEQ ID NO: 11393 - RNA, 22 nt, Homo sapiens
aaaccguuaccauuacugaguu

SEQ ID NO: 11394 - RNA, 25 nt, Homo sapiens
aggggugguguugggacagcuccgu

SEQ ID NO: 11395 - RNA, 22 nt, Homo sapiens
cuugguucagggagggucccca

SEQ ID NO: 11396 - RNA, 20 nt, Homo sapiens
ggggagcuguggaagcagua

SEQ ID NO: 11397 - RNA, 23 nt, Homo sapiens
aaaagugcuuacagugcagguag

SEQ ID NO: 11398 - RNA, 21 nt, Homo sapiens
uaaagugcugacagugcagau

SEQ ID NO: 11399 - RNA, 19 nt, Homo sapiens
gugaggacucgggaggugg

SEQ ID NO: 11400 - RNA, 22 nt, Homo sapiens
agaaggaaauugaauucauuua

SEQ ID NO: 11401 - RNA, 18 nt, Homo sapiens
aucccaccucugccacca

SEQ ID NO: 11402 - RNA, 22 nt, Homo sapiens
cuuggcaccuagcaagcacuca

SEQ ID NO: 11403 - RNA, 18 nt, Homo sapiens
acguuggcucugguggug

SEQ ID NO: 11404 - RNA, 23 nt, Homo sapiens
caaagugcuuacagugcagguag

SEQ ID NO: 11405 - RNA, 18 nt, Homo sapiens
ugaggcaguagauugaau

SEQ ID NO: 11406 - RNA, 23 nt, Homo sapiens
uaaagugcuuauagugcagguag

SEQ ID NO: 11407 - RNA, 23 nt, Homo sapiens
caaagugcucauagugcagguag

SEQ ID NO: 11408 - RNA, 22 nt, Homo sapiens
aagcugccaguugaagaacugu

SEQ ID NO: 11409 - RNA, 21 nt, Homo sapiens
gccccugggccuauccuagaa

SEQ ID NO: 11410 - RNA, 22 nt, Homo sapiens
uggcagugucuuagcugguugu

SEQ ID NO: 11411 - RNA, 22 nt, Homo sapiens
caaucacuaacuccacugccau

SEQ ID NO: 11412 - RNA, 23 nt, Homo sapiens
aggcaguguaguuagcugauugc

SEQ ID NO: 11413 - RNA, 23 nt, Homo sapiens
ucccccaggugugauucugauuu

SEQ ID NO: 11414 - RNA, 22 nt, Homo sapiens
uggcaguguauuguuagcuggu

SEQ ID NO: 11415 - RNA, 22 nt, Homo sapiens
aggcaguguauuguuagcuggc

SEQ ID NO: 11416 - RNA, 23 nt, Homo sapiens
aggaccugcgggacaagauucuu

SEQ ID NO: 11417 - RNA, 22 nt, Homo sapiens
caaagugccucccuuuagagug

SEQ ID NO: 11418 - RNA, 23 nt, Homo sapiens
cucuugagggaagcacuuucugu

SEQ ID NO: 11419 - RNA, 19 nt, Homo sapiens
ugagcugcuguaccaaaau

SEQ ID NO: 11420 - RNA, 25 nt, Homo sapiens
aggggugguguugggacagcuccgu

SEQ ID NO: 11421 - RNA, 21 nt, Homo sapiens
agaccuggcccagaccucagc

SEQ ID NO: 11422 - RNA, 24 nt, Homo sapiens
acugggggcuuucgggcucugcgu

SEQ ID NO: 11423 - RNA, 20 nt, Homo sapiens
ggggagcuguggaagcagua

SEQ ID NO: 11424 - RNA, 23 nt, Homo sapiens
caaagugcuguucgugcagguag

SEQ ID NO: 11425 - RNA, 23 nt, Homo sapiens
uuuggcacuagcacauuuuugcu

SEQ ID NO: 11426 - RNA, 21 nt, Homo sapiens
cccggagccaggaugcagcuc

SEQ ID NO: 11427 - RNA, 22 nt, Homo sapiens
agaaggaaauugaauucauuua

SEQ ID NO: 11428 - RNA, 19 nt, Homo sapiens
gagccaguuggacaggagc

SEQ ID NO: 11429 - RNA, 22 nt, Homo sapiens
cacuggcuccuuucuggguaga

SEQ ID NO: 11430 - RNA, 22 nt, Homo sapiens
ucuucucuguuuuggccaugug

SEQ ID NO: 11431 - RNA, 22 nt, Homo sapiens
uggagugugacaaugguguuug

SEQ ID NO: 11432 - RNA, 23 nt, Homo sapiens
guccaguuuucccaggaaucccu

SEQ ID NO: 11433 - RNA, 22 nt, Homo sapiens
cauugcacuugucucggucuga

SEQ ID NO: 11434 - RNA, 23 nt, Homo sapiens
ugagcgccucgacgacagagccg

SEQ ID NO: 11435 - RNA, 22 nt, Homo sapiens
gaaagcgcuucccuuugcugga

SEQ ID NO: 11436 - RNA, 22 nt, Homo sapiens
caaagcgcuccccuuuagaggu

SEQ ID NO: 11437 - RNA, 23 nt, Homo sapiens
caaagcgcuucucuuuagagugu

SEQ ID NO: 11438 - RNA, 21 nt, Homo sapiens
caaagcgcuucccuuuggagc

SEQ ID NO: 11439 - RNA, 21 nt, Homo sapiens
gaaagcgcuucucuuuagagg

SEQ ID NO: 11440 - RNA, 21 nt, Homo sapiens
acagucugcugagguuggagc

SEQ ID NO: 11441 - RNA, 25 nt, Homo sapiens
ggcggagggaaguagguccguuggu

SEQ ID NO: 11442 - RNA, 21 nt, Homo sapiens
uggaggagaaggaaggugaug

SEQ ID NO: 11443 - RNA, 20 nt, Homo sapiens
ggggagcuguggaagcagua

SEQ ID NO: 11444 - RNA, 21 nt, Homo sapiens
ucgaggagcucacagucuagu

SEQ ID NO: 11445 - RNA, 21 nt, Homo sapiens
cggcggggacggcgauugguc

SEQ ID NO: 11446 - RNA, 21 nt, Homo sapiens
gccccugggccuauccuagaa

SEQ ID NO: 11447 - RNA, 22 nt, Homo sapiens
uauguaauaugguccacaucuu

SEQ ID NO: 11448 - RNA, 23 nt, Homo sapiens
gaacgcgcuucccuauagagggu

SEQ ID NO: 11449 - RNA, 22 nt, Homo sapiens
aggcggggcgccgcgggaccgc

SEQ ID NO: 11450 - RNA, 22 nt, Homo sapiens
ugcggggcuagggcuaacagca

SEQ ID NO: 11451 - RNA, 22 nt, Homo sapiens
ucggccugaccacccaccccac

SEQ ID NO: 11452 - RNA, 21 nt, Homo sapiens
uccuucugcuccgucccccag

SEQ ID NO: 11453 - RNA, 22 nt, Homo sapiens
uucccuuugucauccuaugccu

SEQ ID NO: 11454 - RNA, 22 nt, Homo sapiens
uucccuuugucauccuucgccu

SEQ ID NO: 11455 - RNA, 21 nt, Homo sapiens
aggggugcuaucugugauuga

SEQ ID NO: 11456 - RNA, 20 nt, Homo sapiens
auuccuagaaauuguucaua

SEQ ID NO: 11457 - RNA, 22 nt, Homo sapiens
uagcaaaaacugcaguuacuuu

SEQ ID NO: 11458 - RNA, 21 nt, Homo sapiens
gcuaguccugacucagccagu

SEQ ID NO: 11459 - RNA, 23 nt, Homo sapiens
uggugcggagagggcccacagug

SEQ ID NO: 11460 - RNA, 22 nt, Homo sapiens
auccgcgcucugacucucugcc

SEQ ID NO: 11461 - RNA, 22 nt, Homo sapiens
aacccguagauccgaucuugug

SEQ ID NO: 11462 - RNA, 22 nt, Homo sapiens
cacccguagaaccgaccuugcg

SEQ ID NO: 11463 - RNA, 21 nt, Homo sapiens
ccgucgccgccacccgagccg

SEQ ID NO: 11464 - RNA, 22 nt, Homo sapiens
cagugcaaugaugaaagggcau

SEQ ID NO: 11465 - RNA, 21 nt, Homo sapiens
uccugcgcgucccagaugccc

SEQ ID NO: 11466 - RNA, 18 nt, Homo sapiens
ugaggcaguagauugaau

SEQ ID NO: 11467 - RNA, 22 nt, Homo sapiens
gaggguuggguggaggcucucc

SEQ ID NO: 11468 - RNA, 21 nt, Homo sapiens
caaagaggaaggucccauuac

SEQ ID NO: 11469 - RNA, 17 nt, Homo sapiens
ucucgcuggggccucca

SEQ ID NO: 11470 - RNA, 22 nt, Homo sapiens
ccucuuccccuugucucuccag

SEQ ID NO: 11471 - RNA, 17 nt, Homo sapiens
ucgccuccuccucuccc

SEQ ID NO: 11472 - RNA, 21 nt, Homo sapiens
cggcggggacggcgauugguc

SEQ ID NO: 11473 - RNA, 22 nt, Homo sapiens
cgcaggggccgggugcucaccg

SEQ ID NO: 11474 - RNA, 22 nt, Homo sapiens
uguaaacauccuacacucagcu

SEQ ID NO: 11475 - RNA, 22 nt, Homo sapiens
uaaugccccuaaaaauccuuau

SEQ ID NO: 11476 - RNA, 24 nt, Homo sapiens
uucuccaaaagaaagcacuuucug

SEQ ID NO: 11477 - RNA, 22 nt, Homo sapiens
gaaagcgcuucccuuugcugga

SEQ ID NO: 11478 - RNA, 22 nt, Homo sapiens
caaagcgcuccccuuuagaggu

SEQ ID NO: 11479 - RNA, 23 nt, Homo sapiens
caaagcgcuucucuuuagagugu

SEQ ID NO: 11480 - RNA, 21 nt, Homo sapiens
caaagcgcuucccuuuggagc

SEQ ID NO: 11481 - RNA, 21 nt, Homo sapiens
aaagcgcuucccuucagagug

SEQ ID NO: 11482 - RNA, 21 nt, Homo sapiens
gaaagcgcuucucuuuagagg

SEQ ID NO: 11483 - RNA, 22 nt, Homo sapiens
aagugccuccuuuuagaguguu

SEQ ID NO: 11484 - RNA, 19 nt, Homo sapiens
gggcgccugugaucccaac

SEQ ID NO: 11485 - RNA, 22 nt, Homo sapiens
aggcggggcgccgcgggaccgc

SEQ ID NO: 11486 - RNA, 21 nt, Homo sapiens
uggaggagaaggaaggugaug

SEQ ID NO: 11487 - RNA, 20 nt, Homo sapiens
guagaggagauggcgcaggg

SEQ ID NO: 11488 - RNA, 21 nt, Homo sapiens
ccccaccuccucucuccucag

SEQ ID NO: 11489 - RNA, 18 nt, Homo sapiens
uugagaaggaggcugcug

SEQ ID NO: 11490 - RNA, 22 nt, Homo sapiens
uaacacugucugguaaagaugg

SEQ ID NO: 11491 - RNA, 22 nt, Homo sapiens
uaacacugucugguaacgaugu

SEQ ID NO: 11492 - RNA, 20 nt, Homo sapiens
uguuuugauaacaguaaugu

SEQ ID NO: 11493 - RNA, 22 nt, Homo sapiens
acacagggcuguugugaagacu

SEQ ID NO: 11494 - RNA, 23 nt, Homo sapiens
gaagugcuucgauuuuggggugu

SEQ ID NO: 11495 - RNA, 18 nt, Homo sapiens
uucacagggaggugucau

SEQ ID NO: 11496 - RNA, 22 nt, Homo sapiens
uggugggcacagaaucuggacu

SEQ ID NO: 11497 - RNA, 22 nt, Homo sapiens
agucauuggaggguuugagcag

SEQ ID NO: 11498 - RNA, 22 nt, Homo sapiens
uggugggccgcagaacaugugc

SEQ ID NO: 11499 - RNA, 21 nt, Homo sapiens
ccuggaaacacugagguugug

SEQ ID NO: 11500 - RNA, 19 nt, Homo sapiens
uggauuuuuggaucaggga

SEQ ID NO: 11501 - RNA, 18 nt, Homo sapiens
cagggaggugaaugugau

SEQ ID NO: 11502 - RNA, 23 nt, Homo sapiens
ucuggcuccgugucuucacuccc

SEQ ID NO: 11503 - RNA, 18 nt, Homo sapiens
ugaggcaguagauugaau

SEQ ID NO: 11504 - RNA, 22 nt, Homo sapiens
caaagaauucuccuuuugggcu

SEQ ID NO: 11505 - RNA, 23 nt, Homo sapiens
gcaaagcacacggccugcagaga

SEQ ID NO: 11506 - RNA, 21 nt, Homo sapiens
acuggacuuggagucagaagg

SEQ ID NO: 11507 - RNA, 22 nt, Homo sapiens
caaaaaucucaauuacuuuugc

SEQ ID NO: 11508 - RNA, 19 nt, Homo sapiens
ugucucugcugggguuucu

SEQ ID NO: 11509 - RNA, 25 nt, Homo sapiens
aggggugguguugggacagcuccgu

SEQ ID NO: 11510 - RNA, 23 nt, Homo sapiens
aucccuugcaggggcuguugggu

SEQ ID NO: 11511 - RNA, 22 nt, Homo sapiens
ugagaccucuggguucugagcu

SEQ ID NO: 11512 - RNA, 20 nt, Homo sapiens
ggggagcuguggaagcagua

SEQ ID NO: 11513 - RNA, 23 nt, Homo sapiens
gagggucuugggagggaugugac

SEQ ID NO: 11514 - RNA, 22 nt, Homo sapiens
augggugaauuuguagaaggau

SEQ ID NO: 11515 - RNA, 22 nt, Homo sapiens
caggauguggucaaguguuguu

SEQ ID NO: 11516 - RNA, 24 nt, Homo sapiens
uggcccugacugaagaccagcagu

SEQ ID NO: 11517 - RNA, 24 nt, Homo sapiens
uggcccugacugaagaccagcagu

SEQ ID NO: 11518 - RNA, 23 nt, Homo sapiens
ucuggcuccgugucuucacuccc

SEQ ID NO: 11519 - RNA, 23 nt, Homo sapiens
uaaggugcaucuagugcagauag

SEQ ID NO: 11520 - RNA, 20 nt, Homo sapiens
ccccagggcgacgcggcggg

SEQ ID NO: 11521 - RNA, 25 nt, Homo sapiens
cccccacaaccgcgcuugacuagcu

SEQ ID NO: 11522 - RNA, 21 nt, Homo sapiens
uaaagugcugacagugcagau

SEQ ID NO: 11523 - RNA, 23 nt, Homo sapiens
cagugcaaugauauugucaaagc

SEQ ID NO: 11524 - RNA, 22 nt, Homo sapiens
agacccuggucugcacucuauc

SEQ ID NO: 11525 - RNA, 19 nt, Homo sapiens
agcugucugaaaaugucuu

SEQ ID NO: 11526 - RNA, 22 nt, Homo sapiens
augcugacauauuuacuagagg

SEQ ID NO: 11527 - RNA, 23 nt, Homo sapiens
gcagcagagaauaggacuacguc

SEQ ID NO: 11528 - RNA, 22 nt, Homo sapiens
ugugcgcagggagaccucuccc

SEQ ID NO: 11529 - RNA, 22 nt, Homo sapiens
ugcccuuaaaggugaacccagu

SEQ ID NO: 11530 - RNA, 21 nt, Homo sapiens
aaggcagggcccccgcucccc

SEQ ID NO: 11531 - RNA, 22 nt, Homo sapiens
cugaagcucagagggcucugau

SEQ ID NO: 11532 - RNA, 22 nt, Homo sapiens
uggagagaaaggcaguuccuga

SEQ ID NO: 11533 - RNA, 21 nt, Homo sapiens
cggcggggacggcgauugguc

SEQ ID NO: 11534 - RNA, 22 nt, Homo sapiens
uucccuuugucauccuaugccu

SEQ ID NO: 11535 - RNA, 22 nt, Homo sapiens
uucccuuugucauccuucgccu

SEQ ID NO: 11536 - RNA, 22 nt, Homo sapiens
uuauaaagcaaugagacugauu

SEQ ID NO: 11537 - RNA, 23 nt, Homo sapiens
uagcagcgggaacaguucugcag

SEQ ID NO: 11538 - RNA, 23 nt, Homo sapiens
aucgcugcgguugcgagcgcugu

SEQ ID NO: 11539 - RNA, 19 nt, Homo sapiens
aguguggcuuucuuagagc

SEQ ID NO: 11540 - RNA, 25 nt, Homo sapiens
ggcggagggaaguagguccguuggu

SEQ ID NO: 11541 - RNA, 22 nt, Homo sapiens
aggcggggcgccgcgggaccgc

SEQ ID NO: 11542 - RNA, 17 nt, Homo sapiens
ucucgcuggggccucca

SEQ ID NO: 11543 - RNA, 20 nt, Homo sapiens
agagucuugugaugucuugc

SEQ ID NO: 11544 - RNA, 22 nt, Homo sapiens
auccgcgcucugacucucugcc

SEQ ID NO: 11545 - RNA, 18 nt, Homo sapiens
cgggcguggugguggggg

SEQ ID NO: 11546 - RNA, 19 nt, Homo sapiens
uggauuuuuggaucaggga

SEQ ID NO: 11547 - RNA, 21 nt, Homo sapiens
cuuuuugcggucugggcuugc

SEQ ID NO: 11548 - RNA, 22 nt, Homo sapiens
acucggcguggcgucggucgug

SEQ ID NO: 11549 - RNA, 22 nt, Homo sapiens
ggagacgcggcccuguuggagu

SEQ ID NO: 11550 - RNA, 22 nt, Homo sapiens
aagcugccaguugaagaacugu

SEQ ID NO: 11551 - RNA, 21 nt, Homo sapiens
uucaaguaauucaggauaggu

SEQ ID NO: 11552 - RNA, 22 nt, Homo sapiens
uguaaacauccuacacucagcu

SEQ ID NO: 11553 - RNA, 22 nt, Homo sapiens
caaaaaucucaauuacuuuugc

SEQ ID NO: 11554 - RNA, 21 nt, Homo sapiens
uggguuuacguugggagaacu

SEQ ID NO: 11555 - RNA, 19 nt, Homo sapiens
aagcagcugccucugaggc

SEQ ID NO: 11556 - RNA, 22 nt, Homo sapiens
ucagugcacuacagaacuuugu

SEQ ID NO: 11557 - RNA, 22 nt, Homo sapiens
ucagugcaucacagaacuuugu

SEQ ID NO: 11558 - RNA, 21 nt, Homo sapiens
ucagugcaugacagaacuugg

SEQ ID NO: 11559 - RNA, 21 nt, Homo sapiens
agcuacaucuggcuacugggu

SEQ ID NO: 11560 - RNA, 23 nt, Homo sapiens
agcuacauugucugcuggguuuc

SEQ ID NO: 11561 - RNA, 23 nt, Homo sapiens
ugauuguagccuuuuggaguaga

SEQ ID NO: 11562 - RNA, 22 nt, Homo sapiens
agucauuggaggguuugagcag

SEQ ID NO: 11563 - RNA, 17 nt, Homo sapiens
ucccaccgcugccaccc

SEQ ID NO: 11564 - RNA, 21 nt, Homo sapiens
cuuuuugcggucugggcuugc

SEQ ID NO: 11565 - RNA, 22 nt, Homo sapiens
ugugacugguugaccagagggg

SEQ ID NO: 11566 - RNA, 21 nt, Homo sapiens
cggcggggacggcgauugguc

SEQ ID NO: 11567 - RNA, 21 nt, Homo sapiens
aucacauugccagggauuucc

SEQ ID NO: 11568 - RNA, 21 nt, Homo sapiens
aucacauugccagggauuacc

SEQ ID NO: 11569 - RNA, 20 nt, Homo sapiens
ccucugggcccuuccuccag

SEQ ID NO: 11570 - RNA, 22 nt, Homo sapiens
ucucugggccugugucuuaggc

SEQ ID NO: 11571 - RNA, 22 nt, Homo sapiens
aguggggaacccuuccaugagg

SEQ ID NO: 11572 - RNA, 22 nt, Homo sapiens
caaaaaccacaguuucuuuugc

SEQ ID NO: 11573 - RNA, 22 nt, Homo sapiens
gucccucuccaaaugugucuug

SEQ ID NO: 11574 - RNA, 21 nt, Homo sapiens
ucccacguuguggcccagcag

SEQ ID NO: 11575 - RNA, 22 nt, Homo sapiens
aggcggggcgccgcgggaccgc

SEQ ID NO: 11576 - RNA, 22 nt, Homo sapiens
ugcggggcuagggcuaacagca

SEQ ID NO: 11577 - RNA, 20 nt, Homo sapiens
ggggagcuguggaagcagua

SEQ ID NO: 11578 - RNA, 22 nt, Homo sapiens
acucggcguggcgucggucgug

SEQ ID NO: 11579 - RNA, 23 nt, Homo sapiens
ugaguaccgccaugucuguuggg

SEQ ID NO: 11580 - RNA, 21 nt, Homo sapiens
ucacuccucuccucccgucuu

SEQ ID NO: 11581 - RNA, 22 nt, Homo sapiens
agaggcuggccgugaugaauuc

SEQ ID NO: 11582 - RNA, 19 nt, Homo sapiens
ugagcugcuguaccaaaau

SEQ ID NO: 11583 - RNA, 21 nt, Homo sapiens
agaccuggcccagaccucagc

SEQ ID NO: 11584 - RNA, 22 nt, Homo sapiens
aggcagcgggguguaguggaua

SEQ ID NO: 11585 - RNA, 24 nt, Homo sapiens
uggggagcugaggcucugggggug

SEQ ID NO: 11586 - RNA, 17 nt, Homo sapiens
ucgccuccuccucuccc

SEQ ID NO: 11587 - RNA, 23 nt, Homo sapiens
ucuggcuccgugucuucacuccc

SEQ ID NO: 11588 - RNA, 21 nt, Homo sapiens
ucgaggagcucacagucuagu

SEQ ID NO: 11589 - RNA, 21 nt, Homo sapiens
cggcggggacggcgauugguc

SEQ ID NO: 11590 - RNA, 22 nt, Homo sapiens
ucugcccccuccgcugcugcca

SEQ ID NO: 11591 - RNA, 21 nt, Homo sapiens
agggcccccccucaauccugu

SEQ ID NO: 11592 - RNA, 20 nt, Homo sapiens
acugccccaggugcugcugg

SEQ ID NO: 11593 - RNA, 21 nt, Homo sapiens
cggggcagcucaguacaggau

SEQ ID NO: 11594 - RNA, 19 nt, Homo sapiens
aggcacggugucagcaggc

SEQ ID NO: 11595 - RNA, 19 nt, Homo sapiens
gggcgccugugaucccaac

SEQ ID NO: 11596 - RNA, 23 nt, Homo sapiens
acuugggcacugaaacaaugucc

SEQ ID NO: 11597 - RNA, 22 nt, Homo sapiens
aggcggggcgccgcgggaccgc

SEQ ID NO: 11598 - RNA, 22 nt, Homo sapiens
ugcggggcuagggcuaacagca

SEQ ID NO: 11599 - RNA, 21 nt, Homo sapiens
aguuaggauuaggucguggaa

SEQ ID NO: 11600 - RNA, 22 nt, Homo sapiens
acucggcguggcgucggucgug

SEQ ID NO: 11601 - RNA, 22 nt, Homo sapiens
cagugcaaugaugaaagggcau

SEQ ID NO: 11602 - RNA, 23 nt, Homo sapiens
ucuggcuccgugucuucacuccc

SEQ ID NO: 11603 - RNA, 21 nt, Homo sapiens
cggcggggacggcgauugguc

SEQ ID NO: 11604 - RNA, 21 nt, Homo sapiens
ccaguccugugccugccgccu

SEQ ID NO: 11605 - RNA, 22 nt, Homo sapiens
uguaacagcaacuccaugugga

SEQ ID NO: 11606 - RNA, 22 nt, Homo sapiens
cucccacugcuucacuugacua

SEQ ID NO: 11607 - RNA, 22 nt, Homo sapiens
uguaaacauccuacacucagcu

SEQ ID NO: 11608 - RNA, 22 nt, Homo sapiens
uggcagugucuuagcugguugu

SEQ ID NO: 11609 - RNA, 23 nt, Homo sapiens
aggcaguguaguuagcugauugc

SEQ ID NO: 11610 - RNA, 22 nt, Homo sapiens
uggcaguguauuguuagcuggu

SEQ ID NO: 11611 - RNA, 22 nt, Homo sapiens
aggcaguguauuguuagcuggc

SEQ ID NO: 11612 - RNA, 22 nt, Homo sapiens
ccucccacacccaaggcuugca

SEQ ID NO: 11613 - RNA, 21 nt, Homo sapiens
caaagaggaaggucccauuac

SEQ ID NO: 11614 - RNA, 22 nt, Homo sapiens
ggggguccccggugcucggauc

SEQ ID NO: 11615 - RNA, 22 nt, Homo sapiens
aggcggggcgccgcgggaccgc

SEQ ID NO: 11616 - RNA, 23 nt, Homo sapiens
aaaagugcuuacagugcagguag

SEQ ID NO: 11617 - RNA, 21 nt, Homo sapiens
uaaagugcugacagugcagau

SEQ ID NO: 11618 - RNA, 22 nt, Homo sapiens
ugagaacugaauuccauggguu

SEQ ID NO: 11619 - RNA, 23 nt, Homo sapiens
caaagugcuuacagugcagguag

SEQ ID NO: 11620 - RNA, 21 nt, Homo sapiens
ccaguccugugccugccgccu

SEQ ID NO: 11621 - RNA, 23 nt, Homo sapiens
uaaagugcuuauagugcagguag

SEQ ID NO: 11622 - RNA, 23 nt, Homo sapiens
caaagugcucauagugcagguag

SEQ ID NO: 11623 - RNA, 21 nt, Homo sapiens
uucacaguggcuaaguuccgc

SEQ ID NO: 11624 - RNA, 21 nt, Homo sapiens
uucacaguggcuaaguucugc

SEQ ID NO: 11625 - RNA, 23 nt, Homo sapiens
uaagugcuuccauguuuugguga

SEQ ID NO: 11626 - RNA, 23 nt, Homo sapiens
uaagugcuuccauguuuuaguag

SEQ ID NO: 11627 - RNA, 23 nt, Homo sapiens
uaagugcuuccauguuucagugg

SEQ ID NO: 11628 - RNA, 23 nt, Homo sapiens
uaagugcuuccauguuugagugu

SEQ ID NO: 11629 - RNA, 17 nt, Homo sapiens
uaagugcuuccaugcuu

SEQ ID NO: 11630 - RNA, 23 nt, Homo sapiens
aaagugcugcgacauuugagcgu

SEQ ID NO: 11631 - RNA, 23 nt, Homo sapiens
gaagugcuucgauuuuggggugu

SEQ ID NO: 11632 - RNA, 22 nt, Homo sapiens
caaagugccucccuuuagagug

SEQ ID NO: 11633 - RNA, 22 nt, Homo sapiens
aaagugcuucccuuuggacugu

SEQ ID NO: 11634 - RNA, 21 nt, Homo sapiens
aaagugcuuccuuuuagaggg

SEQ ID NO: 11635 - RNA, 22 nt, Homo sapiens
aaagugcuuccuuuuagagggu

SEQ ID NO: 11636 - RNA, 22 nt, Homo sapiens
aaagugcuucucuuuggugggu

SEQ ID NO: 11637 - RNA, 21 nt, Homo sapiens
aaagugcuuccuuuuugaggg

SEQ ID NO: 11638 - RNA, 24 nt, Homo sapiens
acaaagugcuucccuuuagagugu

SEQ ID NO: 11639 - RNA, 22 nt, Homo sapiens
acaaagugcuucccuuuagagu

SEQ ID NO: 11640 - RNA, 23 nt, Homo sapiens
cucuugagggaagcacuuucugu

SEQ ID NO: 11641 - RNA, 22 nt, Homo sapiens
aaccagcaccccaacuuuggac

SEQ ID NO: 11642 - RNA, 23 nt, Homo sapiens
caaagugcuguucgugcagguag

SEQ ID NO: 11643 - RNA, 20 nt, Homo sapiens
ucugcaggguuugcuuugag

SEQ ID NO: 11644 - RNA, 23 nt, Homo sapiens
caaagugcuuacagugcagguag

SEQ ID NO: 11645 - RNA, 22 nt, Homo sapiens
ucugcccccuccgcugcugcca

SEQ ID NO: 11646 - RNA, 22 nt, Homo sapiens
uguaacagcaacuccaugugga

SEQ ID NO: 11647 - RNA, 20 nt, Homo sapiens
acugccccaggugcugcugg

SEQ ID NO: 11648 - RNA, 22 nt, Homo sapiens
aauugcacgguauccaucugua

SEQ ID NO: 11649 - RNA, 21 nt, Homo sapiens
ugucuugcaggccgucaugca

SEQ ID NO: 11650 - RNA, 21 nt, Homo sapiens
cggggcagcucaguacaggau

SEQ ID NO: 11651 - RNA, 22 nt, Homo sapiens
uacugcagacguggcaaucaug

SEQ ID NO: 11652 - RNA, 21 nt, Homo sapiens
uacugcagacaguggcaauca

SEQ ID NO: 11653 - RNA, 22 nt, Homo sapiens
gaaagcgcuucccuuugcugga

SEQ ID NO: 11654 - RNA, 22 nt, Homo sapiens
caaagcgcuccccuuuagaggu

SEQ ID NO: 11655 - RNA, 23 nt, Homo sapiens
caaagcgcuucucuuuagagugu

SEQ ID NO: 11656 - RNA, 21 nt, Homo sapiens
caaagcgcuucccuuuggagc

SEQ ID NO: 11657 - RNA, 21 nt, Homo sapiens
aaagcgcuucccuucagagug

SEQ ID NO: 11658 - RNA, 21 nt, Homo sapiens
gaaagcgcuucucuuuagagg

SEQ ID NO: 11659 - RNA, 25 nt, Homo sapiens
aggggugguguugggacagcuccgu

SEQ ID NO: 11660 - RNA, 20 nt, Homo sapiens
agaccauggguucucauugu

SEQ ID NO: 11661 - RNA, 22 nt, Homo sapiens
uggagugugacaaugguguuug

SEQ ID NO: 11662 - RNA, 22 nt, Homo sapiens
ugagccccugugccgcccccag

SEQ ID NO: 11663 - RNA, 23 nt, Homo sapiens
cuggagauauggaagagcugugu

SEQ ID NO: 11664 - RNA, 17 nt, Homo sapiens
ucgccuccuccucuccc

SEQ ID NO: 11665 - RNA, 23 nt, Homo sapiens
acuccauuuguuuugaugaugga

SEQ ID NO: 11666 - RNA, 22 nt, Homo sapiens
cgcaggggccgggugcucaccg

SEQ ID NO: 11667 - RNA, 22 nt, Homo sapiens
acagcaggcacagacaggcagu

SEQ ID NO: 11668 - RNA, 22 nt, Homo sapiens
uggcucaguucagcaggaacag

SEQ ID NO: 11669 - RNA, 22 nt, Homo sapiens
gccugcugggguggaaccuggu

SEQ ID NO: 11670 - RNA, 23 nt, Homo sapiens
ugaggggcagagagcgagacuuu

SEQ ID NO: 11671 - RNA, 22 nt, Homo sapiens
aguggggaacccuuccaugagg

SEQ ID NO: 11672 - RNA, 21 nt, Homo sapiens
auccuugcuaucugggugcua

SEQ ID NO: 11673 - RNA, 25 nt, Homo sapiens
aggggugguguugggacagcuccgu

SEQ ID NO: 11674 - RNA, 20 nt, Homo sapiens
auggagauagauauagaaau

SEQ ID NO: 11675 - RNA, 21 nt, Homo sapiens
uggaggagaaggaaggugaug

SEQ ID NO: 11676 - RNA, 21 nt, Homo sapiens
uacucaaaaagcugucaguca

SEQ ID NO: 11677 - RNA, 20 nt, Homo sapiens
ggggagcuguggaagcagua

SEQ ID NO: 11678 - RNA, 22 nt, Homo sapiens
ugugcgcagggagaccucuccc

SEQ ID NO: 11679 - RNA, 22 nt, Homo sapiens
uacguagauauauauguauuuu

SEQ ID NO: 11680 - RNA, 21 nt, Homo sapiens
gcccuccgcccgugcaccccg

SEQ ID NO: 11681 - RNA, 21 nt, Homo sapiens
uucaaguaauucaggauaggu

SEQ ID NO: 11682 - RNA, 23 nt, Homo sapiens
ugaggggcagagagcgagacuuu

SEQ ID NO: 11683 - RNA, 22 nt, Homo sapiens
ucagcaaacauuuauugugugc

SEQ ID NO: 11684 - RNA, 22 nt, Homo sapiens
uagcaaaaacugcaguuacuuu

SEQ ID NO: 11685 - RNA, 21 nt, Homo sapiens
aagccugcccggcuccucggg

SEQ ID NO: 11686 - RNA, 23 nt, Homo sapiens
gaacgccuguucuugccaggugg

SEQ ID NO: 11687 - RNA, 21 nt, Homo sapiens
uccgguucucagggcuccacc

SEQ ID NO: 11688 - RNA, 20 nt, Homo sapiens
ggggagcuguggaagcagua

SEQ ID NO: 11689 - RNA, 22 nt, Homo sapiens
acgcccuucccccccuucuuca

SEQ ID NO: 11690 - RNA, 21 nt, Homo sapiens
uccugcgcgucccagaugccc

SEQ ID NO: 11691 - RNA, 21 nt, Homo sapiens
ccacaccguaucugacacuuu

SEQ ID NO: 11692 - RNA, 23 nt, Homo sapiens
uaagugcuuccauguuuugguga

SEQ ID NO: 11693 - RNA, 22 nt, Homo sapiens
uauguaauaugguccacaucuu

SEQ ID NO: 11694 - RNA, 22 nt, Homo sapiens
aaacaaacauggugcacuucuu

SEQ ID NO: 11695 - RNA, 22 nt, Homo sapiens
cgucaacacuugcugguuuccu

SEQ ID NO: 11696 - RNA, 22 nt, Homo sapiens
ugauugguacgucuguggguag

SEQ ID NO: 11697 - RNA, 22 nt, Homo sapiens
caagaaccucaguugcuuuugu

SEQ ID NO: 11698 - RNA, 19 nt, Homo sapiens
agguugacauacguuuccc

SEQ ID NO: 11699 - RNA, 22 nt, Homo sapiens
ugcccuuaaaggugaacccagu

SEQ ID NO: 11700 - RNA, 22 nt, Homo sapiens
uggagugugacaaugguguuug

SEQ ID NO: 11701 - RNA, 17 nt, Homo sapiens
gugggggagaggcuguc

SEQ ID NO: 11702 - RNA, 18 nt, Homo sapiens
cagggaggugaaugugau

SEQ ID NO: 11703 - RNA, 23 nt, Homo sapiens
ucuggcuccgugucuucacuccc

SEQ ID NO: 11704 - RNA, 22 nt, Homo sapiens
uggagagaaaggcaguuccuga

SEQ ID NO: 11705 - RNA, 21 nt, Homo sapiens
cggcggggacggcgauugguc

SEQ ID NO: 11706 - RNA, 20 nt, Homo sapiens
ccuccugcccuccuugcugu

SEQ ID NO: 11707 - RNA, 22 nt, Homo sapiens
gaggguuggguggaggcucucc

SEQ ID NO: 11708 - RNA, 23 nt, Homo sapiens
ugucugcccgcaugccugccucu

SEQ ID NO: 11709 - RNA, 21 nt, Homo sapiens
ugguagacuauggaacguagg

SEQ ID NO: 11710 - RNA, 22 nt, Homo sapiens
agaggcuggccgugaugaauuc

SEQ ID NO: 11711 - RNA, 19 nt, Homo sapiens
agcugucugaaaaugucuu

SEQ ID NO: 11712 - RNA, 22 nt, Homo sapiens
aggcggggcgccgcgggaccgc

SEQ ID NO: 11713 - RNA, 22 nt, Homo sapiens
caaagugccucccuuuagagug

SEQ ID NO: 11714 - RNA, 21 nt, Homo sapiens
aaggcagggcccccgcucccc

SEQ ID NO: 11715 - RNA, 24 nt, Homo sapiens
uggggagcugaggcucugggggug

SEQ ID NO: 11716 - RNA, 23 nt, Homo sapiens
cacccggcugugugcacaugugc

SEQ ID NO: 11717 - RNA, 22 nt, Homo sapiens
ugagccccugugccgcccccag

SEQ ID NO: 11718 - RNA, 21 nt, Homo sapiens
cauaaaguagaaagcacuacu

SEQ ID NO: 11719 - RNA, 23 nt, Homo sapiens
ucuggcuccgugucuucacuccc

SEQ ID NO: 11720 - RNA, 22 nt, Homo sapiens
ucugcccccuccgcugcugcca

SEQ ID NO: 11721 - RNA, 25 nt, Homo sapiens
cccccacaaccgcgcuugacuagcu

SEQ ID NO: 11722 - RNA, 22 nt, Homo sapiens
aagcugccaguugaagaacugu

SEQ ID NO: 11723 - RNA, 22 nt, Homo sapiens
uguaaacauccuacacucagcu

SEQ ID NO: 11724 - RNA, 20 nt, Homo sapiens
acugccccaggugcugcugg

SEQ ID NO: 11725 - RNA, 22 nt, Homo sapiens
aguggggaacccuuccaugagg

SEQ ID NO: 11726 - RNA, 22 nt, Homo sapiens
cgaaaacagcaauuaccuuugc

SEQ ID NO: 11727 - RNA, 21 nt, Homo sapiens
uggaggagaaggaaggugaug

SEQ ID NO: 11728 - RNA, 20 nt, Homo sapiens
ggggagcuguggaagcagua

SEQ ID NO: 11729 - RNA, 23 nt, Homo sapiens
uacccuguagaaccgaauuugug

SEQ ID NO: 11730 - RNA, 18 nt, Homo sapiens
ucagcuggcccucauuuc

SEQ ID NO: 11731 - RNA, 22 nt, Homo sapiens
ucaccagcccuguguucccuag

SEQ ID NO: 11732 - RNA, 17 nt, Homo sapiens
ucccaccgcugccaccc

SEQ ID NO: 11733 - RNA, 23 nt, Homo sapiens
agcugguguugugaaucaggccg

SEQ ID NO: 11734 - RNA, 21 nt, Homo sapiens
gcccuccgcccgugcaccccg

SEQ ID NO: 11735 - RNA, 22 nt, Homo sapiens
cgcaggggccgggugcucaccg

SEQ ID NO: 11736 - RNA, 23 nt, Homo sapiens
caacggaaucccaaaagcagcug

SEQ ID NO: 11737 - RNA, 22 nt, Homo sapiens
aagcugccaguugaagaacugu

SEQ ID NO: 11738 - RNA, 22 nt, Homo sapiens
cauugcacuugucucggucuga

SEQ ID NO: 11739 - RNA, 23 nt, Homo sapiens
gcgaggaccccucggggucugac

SEQ ID NO: 11740 - RNA, 22 nt, Homo sapiens
ggggguccccggugcucggauc

SEQ ID NO: 11741 - RNA, 21 nt, Homo sapiens
guggcugcacucacuuccuuc

SEQ ID NO: 11742 - RNA, 25 nt, Homo sapiens
ggcggagggaaguagguccguuggu

SEQ ID NO: 11743 - RNA, 20 nt, Homo sapiens
accaggaggcugaggccccu

SEQ ID NO: 11744 - RNA, 22 nt, Homo sapiens
ugcggggcuagggcuaacagca

SEQ ID NO: 11745 - RNA, 21 nt, Homo sapiens
gcccuccgcccgugcaccccg

SEQ ID NO: 11746 - RNA, 22 nt, Homo sapiens
ucucccaacccuuguaccagug

SEQ ID NO: 11747 - RNA, 22 nt, Homo sapiens
cucuagagggaagcacuuucug

SEQ ID NO: 11748 - RNA, 22 nt, Homo sapiens
uuggggaaacggccgcugagug

SEQ ID NO: 11749 - RNA, 22 nt, Homo sapiens
cauugcacuugucucggucuga

SEQ ID NO: 11750 - RNA, 22 nt, Homo sapiens
uguaaacauccuacacucagcu

SEQ ID NO: 11751 - RNA, 22 nt, Homo sapiens
aauugcacgguauccaucugua

SEQ ID NO: 11752 - RNA, 23 nt, Homo sapiens
ucuuggaguaggucauugggugg

SEQ ID NO: 11753 - RNA, 19 nt, Homo sapiens
aggcacggugucagcaggc

SEQ ID NO: 11754 - RNA, 21 nt, Homo sapiens
aagccugcccggcuccucggg

SEQ ID NO: 11755 - RNA, 25 nt, Homo sapiens
ggcggagggaaguagguccguuggu

SEQ ID NO: 11756 - RNA, 20 nt, Homo sapiens
cggcucugggucugugggga

SEQ ID NO: 11757 - RNA, 21 nt, Homo sapiens
ccgucgccgccacccgagccg

SEQ ID NO: 11758 - RNA, 21 nt, Homo sapiens
uggcagggaggcugggagggg

SEQ ID NO: 11759 - RNA, 22 nt, Homo sapiens
cucggcgcggggcgcgggcucc

SEQ ID NO: 11760 - RNA, 21 nt, Homo sapiens
uccugcgcgucccagaugccc

SEQ ID NO: 11761 - RNA, 22 nt, Homo sapiens
uggagagaaaggcaguuccuga

SEQ ID NO: 11762 - RNA, 22 nt, Homo sapiens
cgcaggggccgggugcucaccg

SEQ ID NO: 11763 - RNA, 19 nt, Homo sapiens
ugagcugcuguaccaaaau

SEQ ID NO: 11764 - RNA, 22 nt, Homo sapiens
uccgagccugggucucccucuu

SEQ ID NO: 11765 - RNA, 22 nt, Homo sapiens
ugcggggcuagggcuaacagca

SEQ ID NO: 11766 - RNA, 21 nt, Homo sapiens
ucacagugaaccggucucuuu

SEQ ID NO: 11767 - RNA, 22 nt, Homo sapiens
acucggcguggcgucggucgug

SEQ ID NO: 11768 - RNA, 22 nt, Homo sapiens
ugugacugguugaccagagggg

SEQ ID NO: 11769 - RNA, 23 nt, Homo sapiens
ugugcaaaucuaugcaaaacuga

SEQ ID NO: 11770 - RNA, 22 nt, Homo sapiens
aacaauauccuggugcugagug

SEQ ID NO: 11771 - RNA, 22 nt, Homo sapiens
agagguaguagguugcauaguu

SEQ ID NO: 11772 - RNA, 23 nt, Homo sapiens
agugccugagggaguaagagccc

SEQ ID NO: 11773 - RNA, 23 nt, Homo sapiens
ugucacucggcucggcccacuac

SEQ ID NO: 11774 - RNA, 23 nt, Homo sapiens
caguaacaaagauucauccuugu

SEQ ID NO: 11775 - RNA, 20 nt, Homo sapiens
ugagcccuguccucccgcag

SEQ ID NO: 11776 - RNA, 22 nt, Homo sapiens
ucggccugaccacccaccccac

SEQ ID NO: 11777 - RNA, 20 nt, Homo sapiens
cuuccucgucugucugcccc

SEQ ID NO: 11778 - RNA, 22 nt, Homo sapiens
acucggcguggcgucggucgug

SEQ ID NO: 11779 - RNA, 22 nt, Homo sapiens
acucggcguggcgucggucgug

SEQ ID NO: 11780 - RNA, 21 nt, Homo sapiens
gcccuccgcccgugcaccccg

SEQ ID NO: 11781 - RNA, 22 nt, Homo sapiens
cauugcacuugucucggucuga

SEQ ID NO: 11782 - RNA, 19 nt, Homo sapiens
aggcacggugucagcaggc

SEQ ID NO: 11783 - RNA, 22 nt, Homo sapiens
uccgagccugggucucccucuu

SEQ ID NO: 11784 - RNA, 22 nt, Homo sapiens
agacuucccauuugaagguggc

SEQ ID NO: 11785 - RNA, 25 nt, Homo sapiens
ggcggagggaaguagguccguuggu

SEQ ID NO: 11786 - RNA, 22 nt, Homo sapiens
cugcccuggcccgagggaccga

SEQ ID NO: 11787 - RNA, 18 nt, Homo sapiens
ucagcuggcccucauuuc

SEQ ID NO: 11788 - RNA, 21 nt, Homo sapiens
uaccacaggguagaaccacgg

SEQ ID NO: 11789 - RNA, 21 nt, Homo sapiens
cggcggggacggcgauugguc

SEQ ID NO: 11790 - RNA, 23 nt, Homo sapiens
ugaguaccgccaugucuguuggg

SEQ ID NO: 11791 - RNA, 22 nt, Homo sapiens
uggcucaguucagcaggaacag

SEQ ID NO: 11792 - RNA, 18 nt, Homo sapiens
ugcuuccuuucagagggu

SEQ ID NO: 11793 - RNA, 22 nt, Homo sapiens
aucuggagguaagaagcacuuu

SEQ ID NO: 11794 - RNA, 22 nt, Homo sapiens
aggcggggcgccgcgggaccgc

SEQ ID NO: 11795 - RNA, 22 nt, Homo sapiens
ugcggggcuagggcuaacagca

SEQ ID NO: 11796 - RNA, 22 nt, Homo sapiens
ucggccugaccacccaccccac

SEQ ID NO: 11797 - RNA, 23 nt, Homo sapiens
ucuggcuccgugucuucacuccc

SEQ ID NO: 11798 - RNA, 22 nt, Homo sapiens
ucucccaacccuuguaccagug

SEQ ID NO: 11799 - RNA, 21 nt, Homo sapiens
ucgaggagcucacagucuagu

SEQ ID NO: 11800 - RNA, 21 nt, Homo sapiens
cggcggggacggcgauugguc

SEQ ID NO: 11801 - RNA, 22 nt, Homo sapiens
uguaaacauccuacacucagcu

SEQ ID NO: 11802 - RNA, 23 nt, Homo sapiens
ucccccaggugugauucugauuu

SEQ ID NO: 11803 - RNA, 23 nt, Homo sapiens
gaacgcgcuucccuauagagggu

SEQ ID NO: 11804 - RNA, 25 nt, Homo sapiens
aggggugguguugggacagcuccgu

SEQ ID NO: 11805 - RNA, 21 nt, Homo sapiens
agggggaaaguucuauagucc

SEQ ID NO: 11806 - RNA, 24 nt, Homo sapiens
acugggggcuuucgggcucugcgu

SEQ ID NO: 11807 - RNA, 24 nt, Homo sapiens
ugccugggucucuggccugcgcgu

SEQ ID NO: 11808 - RNA, 22 nt, Homo sapiens
aggcggggcgccgcgggaccgc

SEQ ID NO: 11809 - RNA, 22 nt, Homo sapiens
caaagugccucccuuuagagug

SEQ ID NO: 11810 - RNA, 22 nt, Homo sapiens
uggagugugacaaugguguuug

SEQ ID NO: 11811 - RNA, 22 nt, Homo sapiens
ucucccaacccuuguaccagug

SEQ ID NO: 11812 - RNA, 22 nt, Homo sapiens
cucuagagggaagcacuuucug

SEQ ID NO: 11813 - RNA, 18 nt, Homo sapiens
uccagugcccuccucucc

SEQ ID NO: 11814 - RNA, 20 nt, Homo sapiens
ccuccugcccuccuugcugu

SEQ ID NO: 11815 - RNA, 22 nt, Homo sapiens
gaggguuggguggaggcucucc

SEQ ID NO: 11816 - RNA, 22 nt, Homo sapiens
uguaaacauccuacacucagcu

SEQ ID NO: 11817 - RNA, 23 nt, Homo sapiens
gcaaagcacacggccugcagaga

SEQ ID NO: 11818 - RNA, 22 nt, Homo sapiens
cgucaacacuugcugguuuccu

SEQ ID NO: 11819 - RNA, 22 nt, Homo sapiens
aagugcuuccuuuuagaggguu

SEQ ID NO: 11820 - RNA, 20 nt, Homo sapiens
aggguguuucucucaucucu

SEQ ID NO: 11821 - RNA, 21 nt, Homo sapiens
uggaggagaaggaaggugaug

SEQ ID NO: 11822 - RNA, 21 nt, Homo sapiens
cgcgggugcuuacugacccuu

SEQ ID NO: 11823 - RNA, 22 nt, Homo sapiens
caaagugccucccuuuagagug

SEQ ID NO: 11824 - RNA, 21 nt, Homo sapiens
aaggcagggcccccgcucccc

SEQ ID NO: 11825 - RNA, 23 nt, Homo sapiens
uacccuguagauccgaauuugug

SEQ ID NO: 11826 - RNA, 23 nt, Homo sapiens
uacccuguagaaccgaauuugug

SEQ ID NO: 11827 - RNA, 17 nt, Homo sapiens
ucccuguucgggcgcca

SEQ ID NO: 11828 - RNA, 23 nt, Homo sapiens
ucuggcuccgugucuucacuccc

SEQ ID NO: 11829 - RNA, 23 nt, Homo sapiens
uaaggugcaucuagugcagauag

SEQ ID NO: 11830 - RNA, 22 nt, Homo sapiens
acagcaggcacagacaggcagu

SEQ ID NO: 11831 - RNA, 22 nt, Homo sapiens
uaaugccccuaaaaauccuuau

SEQ ID NO: 11832 - RNA, 23 nt, Homo sapiens
aaugacacgaucacucccguuga

SEQ ID NO: 11833 - RNA, 22 nt, Homo sapiens
aguggggaacccuuccaugagg

SEQ ID NO: 11834 - RNA, 22 nt, Homo sapiens
agacccuggucugcacucuauc

SEQ ID NO: 11835 - RNA, 22 nt, Homo sapiens
aucuggagguaagaagcacuuu

SEQ ID NO: 11836 - RNA, 21 nt, Homo sapiens
guggcugcacucacuuccuuc

SEQ ID NO: 11837 - RNA, 21 nt, Homo sapiens
uggaggagaaggaaggugaug

SEQ ID NO: 11838 - RNA, 21 nt, Homo sapiens
gcaggaacuugugagucuccu

SEQ ID NO: 11839 - RNA, 22 nt, Homo sapiens
cugcccuggcccgagggaccga

SEQ ID NO: 11840 - RNA, 20 nt, Homo sapiens
ggggagcuguggaagcagua

SEQ ID NO: 11841 - RNA, 20 nt, Homo sapiens
ccucugggcccuuccuccag

SEQ ID NO: 11842 - RNA, 22 nt, Homo sapiens
ucucugggccugugucuuaggc

SEQ ID NO: 11843 - RNA, 22 nt, Homo sapiens
cagcagcaauucauguuuugaa

SEQ ID NO: 11844 - RNA, 22 nt, Homo sapiens
uuugugaccugguccacuaacc

SEQ ID NO: 11845 - RNA, 21 nt, Homo sapiens
uugggacauacuuaugcuaaa

SEQ ID NO: 11846 - RNA, 21 nt, Homo sapiens
ccaccaccgugucugacacuu

SEQ ID NO: 11847 - RNA, 22 nt, Homo sapiens
uauacaagggcagacucucucu

SEQ ID NO: 11848 - RNA, 22 nt, Homo sapiens
uauacaagggcaagcucucugu

SEQ ID NO: 11849 - RNA, 21 nt, Homo sapiens
agggggaaaguucuauagucc

SEQ ID NO: 11850 - RNA, 22 nt, Homo sapiens
acuuguaugcuagcucagguag

SEQ ID NO: 11851 - RNA, 21 nt, Homo sapiens
uggcagggaggcugggagggg

SEQ ID NO: 11852 - RNA, 24 nt, Homo sapiens
uggcccugacugaagaccagcagu

SEQ ID NO: 11853 - RNA, 22 nt, Homo sapiens
uuuagagacggggucuugcucu

SEQ ID NO: 11854 - RNA, 23 nt, Homo sapiens
agcuacauugucugcuggguuuc

SEQ ID NO: 11855 - RNA, 21 nt, Homo sapiens
agggcccccccucaauccugu

SEQ ID NO: 11856 - RNA, 22 nt, Homo sapiens
cuggcccucucugcccuuccgu

SEQ ID NO: 11857 - RNA, 20 nt, Homo sapiens
acucaaacugugggggcacu

SEQ ID NO: 11858 - RNA, 23 nt, Homo sapiens
aggaagcccuggaggggcuggag

SEQ ID NO: 11859 - RNA, 21 nt, Homo sapiens
uacucaaaaagcugucaguca

SEQ ID NO: 11860 - RNA, 21 nt, Homo sapiens
uaccacaggguagaaccacgg

SEQ ID NO: 11861 - RNA, 22 nt, Homo sapiens
uacccagagcaugcagugugaa

SEQ ID NO: 11862 - RNA, 22 nt, Homo sapiens
uagcuuaucagacugauguuga

SEQ ID NO: 11863 - RNA, 22 nt, Homo sapiens
aaacaaacauggugcacuucuu

SEQ ID NO: 11864 - RNA, 21 nt, Homo sapiens
cagcagcacacugugguuugu

SEQ ID NO: 11865 - RNA, 23 nt, Homo sapiens
agugccugagggaguaagagccc

SEQ ID NO: 11866 - RNA, 19 nt, Homo sapiens
aggcugcggaauucaggac

SEQ ID NO: 11867 - RNA, 22 nt, Homo sapiens
auccgcgcucugacucucugcc

SEQ ID NO: 11868 - RNA, 22 nt, Homo sapiens
acgcccuucccccccuucuuca

SEQ ID NO: 11869 - RNA, 22 nt, Homo sapiens
agaaggaaauugaauucauuua

SEQ ID NO: 11870 - RNA, 21 nt, Homo sapiens
cggcggggacggcgauugguc

SEQ ID NO: 11871 - RNA, 23 nt, Homo sapiens
caacggaaucccaaaagcagcug

SEQ ID NO: 11872 - RNA, 21 nt, Homo sapiens
aggggugcuaucugugauuga

SEQ ID NO: 11873 - RNA, 22 nt, Homo sapiens
aggcggggcgccgcgggaccgc

SEQ ID NO: 11874 - RNA, 22 nt, Homo sapiens
cugcccuggcccgagggaccga

SEQ ID NO: 11875 - RNA, 22 nt, Homo sapiens
cuccugagccauucugagccuc

SEQ ID NO: 11876 - RNA, 21 nt, Homo sapiens
gcccuccgcccgugcaccccg

SEQ ID NO: 11877 - RNA, 22 nt, Homo sapiens
uggagagaaaggcaguuccuga

SEQ ID NO: 11878 - RNA, 22 nt, Homo sapiens
cauugcacuugucucggucuga

SEQ ID NO: 11879 - RNA, 23 nt, Homo sapiens
gaagugcuucgauuuuggggugu

SEQ ID NO: 11880 - RNA, 21 nt, Homo sapiens
caaagaggaaggucccauuac

SEQ ID NO: 11881 - RNA, 22 nt, Homo sapiens
uacgucaucguugucaucguca

SEQ ID NO: 11882 - RNA, 22 nt, Homo sapiens
agucauuggaggguuugagcag

SEQ ID NO: 11883 - RNA, 22 nt, Homo sapiens
cuccugagccauucugagccuc

SEQ ID NO: 11884 - RNA, 22 nt, Homo sapiens
uggagagaaaggcaguuccuga

SEQ ID NO: 11885 - RNA, 21 nt, Homo sapiens
cucccacaugcaggguuugca

SEQ ID NO: 11886 - RNA, 22 nt, Homo sapiens
cgcaggggccgggugcucaccg

SEQ ID NO: 11887 - RNA, 22 nt, Homo sapiens
ucugcccccuccgcugcugcca

SEQ ID NO: 11888 - RNA, 20 nt, Homo sapiens
ccccagggcgacgcggcggg

SEQ ID NO: 11889 - RNA, 20 nt, Homo sapiens
acugccccaggugcugcugg

SEQ ID NO: 11890 - RNA, 20 nt, Homo sapiens
ccucugggcccuuccuccag

SEQ ID NO: 11891 - RNA, 22 nt, Homo sapiens
ucucugggccugugucuuaggc

SEQ ID NO: 11892 - RNA, 21 nt, Homo sapiens
gccccugggccuauccuagaa

SEQ ID NO: 11893 - RNA, 22 nt, Homo sapiens
uaaugccccuaaaaauccuuau

SEQ ID NO: 11894 - RNA, 22 nt, Homo sapiens
aggcaguguauuguuagcuggc

SEQ ID NO: 11895 - RNA, 21 nt, Homo sapiens
cggggcagcucaguacaggau

SEQ ID NO: 11896 - RNA, 22 nt, Homo sapiens
aagauguggaaaaauuggaauc

SEQ ID NO: 11897 - RNA, 22 nt, Homo sapiens
uccgagccugggucucccucuu

SEQ ID NO: 11898 - RNA, 22 nt, Homo sapiens
agacuucccauuugaagguggc

SEQ ID NO: 11899 - RNA, 22 nt, Homo sapiens
ugagaccucuggguucugagcu

SEQ ID NO: 11900 - RNA, 22 nt, Homo sapiens
ucuucucuguuuuggccaugug

SEQ ID NO: 11901 - RNA, 26 nt, Homo sapiens
aaguaguugguuuguaugagaugguu

SEQ ID NO: 11902 - RNA, 21 nt, Homo sapiens
cuuuuugcggucugggcuugc

SEQ ID NO: 11903 - RNA, 23 nt, Homo sapiens
guccaguuuucccaggaaucccu

SEQ ID NO: 11904 - RNA, 22 nt, Homo sapiens
ugcccuguggacucaguucugg

SEQ ID NO: 11905 - RNA, 22 nt, Homo sapiens
aaaagcuggguugagagggcga

SEQ ID NO: 11906 - RNA, 22 nt, Homo sapiens
aaaagcuggguugagagggcaa

SEQ ID NO: 11907 - RNA, 20 nt, Homo sapiens
aaaagcuggguugagagggu

SEQ ID NO: 11908 - RNA, 19 nt, Homo sapiens
aaaagcuggguugagagga

SEQ ID NO: 11909 - RNA, 22 nt, Homo sapiens
uccagcaucagugauuuuguug

SEQ ID NO: 11910 - RNA, 22 nt, Homo sapiens
gaugagcucauuguaauaugag

SEQ ID NO: 11911 - RNA, 23 nt, Homo sapiens
uucauuugguauaaaccgcgauu

SEQ ID NO: 11912 - RNA, 22 nt, Homo sapiens
aaccagcaccccaacuuuggac

SEQ ID NO: 11913 - RNA, 22 nt, Homo sapiens
uccauuacacuacccugccucu

SEQ ID NO: 11914 - RNA, 21 nt, Homo sapiens
uggcagggaggcugggagggg

SEQ ID NO: 11915 - RNA, 20 nt, Homo sapiens
cuuccucgucugucugcccc

SEQ ID NO: 11916 - RNA, 18 nt, Homo sapiens
aucccaccucugccacca

SEQ ID NO: 11917 - RNA, 17 nt, Homo sapiens
ucgccuccuccucuccc

SEQ ID NO: 11918 - RNA, 18 nt, Homo sapiens
cagggaggugaaugugau

SEQ ID NO: 11919 - RNA, 22 nt, Homo sapiens
cgcaggggccgggugcucaccg

SEQ ID NO: 11920 - RNA, 23 nt, Homo sapiens
ugaguaccgccaugucuguuggg

SEQ ID NO: 11921 - RNA, 22 nt, Homo sapiens
cccugugcccggcccacuucug

SEQ ID NO: 11922 - RNA, 22 nt, Homo sapiens
uguaaacauccuacacucagcu

SEQ ID NO: 11923 - RNA, 20 nt, Homo sapiens
ccucugggcccuuccuccag

SEQ ID NO: 11924 - RNA, 22 nt, Homo sapiens
ucucugggccugugucuuaggc

SEQ ID NO: 11925 - RNA, 21 nt, Homo sapiens
ugucuugcaggccgucaugca

SEQ ID NO: 11926 - RNA, 22 nt, Homo sapiens
uuuugcaauauguuccugaaua

SEQ ID NO: 11927 - RNA, 22 nt, Homo sapiens
caaaguuuaagauccuugaagu

SEQ ID NO: 11928 - RNA, 19 nt, Homo sapiens
ugucucugcugggguuucu

SEQ ID NO: 11929 - RNA, 25 nt, Homo sapiens
aggggugguguugggacagcuccgu

SEQ ID NO: 11930 - RNA, 20 nt, Homo sapiens
cggcucugggucugugggga

SEQ ID NO: 11931 - RNA, 23 nt, Homo sapiens
cuggagauauggaagagcugugu

SEQ ID NO: 11932 - RNA, 22 nt, Homo sapiens
ucagugcacuacagaacuuugu

SEQ ID NO: 11933 - RNA, 22 nt, Homo sapiens
ucagugcaucacagaacuuugu

SEQ ID NO: 11934 - RNA, 21 nt, Homo sapiens
ucagugcaugacagaacuugg

SEQ ID NO: 11935 - RNA, 21 nt, Homo sapiens
ccacaccguaucugacacuuu

SEQ ID NO: 11936 - RNA, 23 nt, Homo sapiens
aucaacagacauuaauugggcgc

SEQ ID NO: 11937 - RNA, 21 nt, Homo sapiens
acuggacuuggagucagaagg

SEQ ID NO: 11938 - RNA, 22 nt, Homo sapiens
acuggacuuagggucagaaggc

SEQ ID NO: 11939 - RNA, 23 nt, Homo sapiens
ucuuggaguaggucauugggugg

SEQ ID NO: 11940 - RNA, 23 nt, Homo sapiens
uacuccagagggcgucacucaug

SEQ ID NO: 11941 - RNA, 24 nt, Homo sapiens
uucuccaaaagaaagcacuuucug

SEQ ID NO: 11942 - RNA, 22 nt, Homo sapiens
aagugccuccuuuuagaguguu

SEQ ID NO: 11943 - RNA, 22 nt, Homo sapiens
caugccuugaguguaggaccgu

SEQ ID NO: 11944 - RNA, 22 nt, Homo sapiens
auucugcauuuuuagcaaguuc

SEQ ID NO: 11945 - RNA, 20 nt, Homo sapiens
auggagauagauauagaaau

SEQ ID NO: 11946 - RNA, 22 nt, Homo sapiens
acuccagccccacagccucagc

SEQ ID NO: 11947 - RNA, 21 nt, Homo sapiens
uacucaaaaagcugucaguca

SEQ ID NO: 11948 - RNA, 21 nt, Homo sapiens
uacuuggaaaggcaucaguug

SEQ ID NO: 11949 - RNA, 21 nt, Homo sapiens
uccuucugcuccgucccccag

SEQ ID NO: 11950 - RNA, 22 nt, Homo sapiens
ucugggcaacaaagugagaccu

SEQ ID NO: 11951 - RNA, 24 nt, Homo sapiens
agcagaagcagggagguucuccca

SEQ ID NO: 11952 - RNA, 22 nt, Homo sapiens
cuggcccucucugcccuuccgu

SEQ ID NO: 11953 - RNA, 21 nt, Homo sapiens
aucauagaggaaaauccacgu

SEQ ID NO: 11954 - RNA, 22 nt, Homo sapiens
aucauagaggaaaauccauguu

SEQ ID NO: 11955 - RNA, 22 nt, Homo sapiens
aauccuuugucccugggugaga

SEQ ID NO: 11956 - RNA, 20 nt, Homo sapiens
agaccauggguucucauugu

SEQ ID NO: 11957 - RNA, 25 nt, Homo sapiens
gcugggcagggcuucugagcuccuu

SEQ ID NO: 11958 - RNA, 21 nt, Homo sapiens
augauccaggaaccugccucu

SEQ ID NO: 11959 - RNA, 22 nt, Homo sapiens
gguggcccggccgugccugagg

SEQ ID NO: 11960 - RNA, 22 nt, Homo sapiens
acuccagccccacagccucagc

SEQ ID NO: 11961 - RNA, 23 nt, Homo sapiens
gcagcagagaauaggacuacguc

SEQ ID NO: 11962 - RNA, 18 nt, Homo sapiens
ucagcuggcccucauuuc

SEQ ID NO: 11963 - RNA, 22 nt, Homo sapiens
uggagugugacaaugguguuug

SEQ ID NO: 11964 - RNA, 23 nt, Homo sapiens
uagcagcgggaacaguucugcag

SEQ ID NO: 11965 - RNA, 21 nt, Homo sapiens
uggaggagaaggaaggugaug

SEQ ID NO: 11966 - RNA, 21 nt, Homo sapiens
ccuggaaacacugagguugug

SEQ ID NO: 11967 - RNA, 24 nt, Homo sapiens
uggggagcugaggcucugggggug

SEQ ID NO: 11968 - RNA, 21 nt, Homo sapiens
caucccuugcaugguggaggg

SEQ ID NO: 11969 - RNA, 22 nt, Homo sapiens
uggcaguguauuguuagcuggu

SEQ ID NO: 11970 - RNA, 21 nt, Homo sapiens
cacauuacacggucgaccucu

SEQ ID NO: 11971 - RNA, 21 nt, Homo sapiens
ugguagacuauggaacguagg

SEQ ID NO: 11972 - RNA, 21 nt, Homo sapiens
uaguagaccguauagcguacg

SEQ ID NO: 11973 - RNA, 22 nt, Homo sapiens
aggcaguguauuguuagcuggc

SEQ ID NO: 11974 - RNA, 22 nt, Homo sapiens
cgucaacacuugcugguuuccu

SEQ ID NO: 11975 - RNA, 21 nt, Homo sapiens
auugacacuucugugaguaga

SEQ ID NO: 11976 - RNA, 22 nt, Homo sapiens
caaaaaccacaguuucuuuugc

SEQ ID NO: 11977 - RNA, 22 nt, Homo sapiens
uugugucaauaugcgaugaugu

SEQ ID NO: 11978 - RNA, 23 nt, Homo sapiens
aucccuugcaggggcuguugggu

SEQ ID NO: 11979 - RNA, 20 nt, Homo sapiens
cggcucugggucugugggga

SEQ ID NO: 11980 - RNA, 21 nt, Homo sapiens
ucguggccuggucuccauuau

SEQ ID NO: 11981 - RNA, 22 nt, Homo sapiens
cauugcacuugucucggucuga

SEQ ID NO: 11982 - RNA, 22 nt, Homo sapiens
agaggcuggccgugaugaauuc

SEQ ID NO: 11983 - RNA, 22 nt, Homo sapiens
gguggcccggccgugccugagg

SEQ ID NO: 11984 - RNA, 27 nt, Homo sapiens
accuucuuguauaagcacugugcuaaa

SEQ ID NO: 11985 - RNA, 23 nt, Homo sapiens
guccaguuuucccaggaaucccu

SEQ ID NO: 11986 - RNA, 21 nt, Homo sapiens
cggcggggacggcgauugguc

SEQ ID NO: 11987 - RNA, 21 nt, Homo sapiens
cacauuacacggucgaccucu

SEQ ID NO: 11988 - RNA, 21 nt, Homo sapiens
gugcauuguaguugcauugca

SEQ ID NO: 11989 - RNA, 21 nt, Homo sapiens
cuucuugugcucuaggauugu

SEQ ID NO: 11990 - RNA, 22 nt, Homo sapiens
aggcggggcgccgcgggaccgc

SEQ ID NO: 11991 - RNA, 22 nt, Homo sapiens
ugcggggcuagggcuaacagca

SEQ ID NO: 11992 - RNA, 20 nt, Homo sapiens
uaaagagcccuguggagaca

SEQ ID NO: 11993 - RNA, 23 nt, Homo sapiens
uuauugcuuaagaauacgcguag

SEQ ID NO: 11994 - RNA, 21 nt, Homo sapiens
cuagacugaagcuccuugagg

SEQ ID NO: 11995 - RNA, 23 nt, Homo sapiens
aacauucaacgcugucggugagu

SEQ ID NO: 11996 - RNA, 23 nt, Homo sapiens
aacauucauugcugucggugggu

SEQ ID NO: 11997 - RNA, 22 nt, Homo sapiens
aacauucaaccugucggugagu

SEQ ID NO: 11998 - RNA, 23 nt, Homo sapiens
aacauucauuguugucggugggu

SEQ ID NO: 11999 - RNA, 21 nt, Homo sapiens
gguuugguccuagccuuucua

SEQ ID NO: 12000 - RNA, 23 nt, Homo sapiens
cccaguguucagacuaccuguuc

SEQ ID NO: 12001 - RNA, 23 nt, Homo sapiens
cccaguguuuagacuaucuguuc

SEQ ID NO: 12002 - RNA, 22 nt, Homo sapiens
acagcaggcacagacaggcagu

SEQ ID NO: 12003 - RNA, 22 nt, Homo sapiens
gaggguuggguggaggcucucc

SEQ ID NO: 12004 - RNA, 21 nt, Homo sapiens
gugcauuguaguugcauugca

SEQ ID NO: 12005 - RNA, 22 nt, Homo sapiens
caaucacuaacuccacugccau

SEQ ID NO: 12006 - RNA, 22 nt, Homo sapiens
gccugcugggguggaaccuggu

SEQ ID NO: 12007 - RNA, 21 nt, Homo sapiens
uaguagaccguauagcguacg

SEQ ID NO: 12008 - RNA, 22 nt, Homo sapiens
cgucaacacuugcugguuuccu

SEQ ID NO: 12009 - RNA, 22 nt, Homo sapiens
aaacauucgcggugcacuucuu

SEQ ID NO: 12010 - RNA, 19 nt, Homo sapiens
aagugugcagggcacuggu

SEQ ID NO: 12011 - RNA, 22 nt, Homo sapiens
ugucuacuacuggagacacugg

SEQ ID NO: 12012 - RNA, 21 nt, Homo sapiens
aaggcagggcccccgcucccc

SEQ ID NO: 12013 - RNA, 21 nt, Homo sapiens
cccggagccaggaugcagcuc

SEQ ID NO: 12014 - RNA, 18 nt, Homo sapiens
ucagcuggcccucauuuc

SEQ ID NO: 12015 - RNA, 20 nt, Homo sapiens
ugagcccuguccucccgcag

SEQ ID NO: 12016 - RNA, 17 nt, Homo sapiens
ucgccuccuccucuccc

SEQ ID NO: 12017 - RNA, 23 nt, Homo sapiens
ugaguaccgccaugucuguuggg

SEQ ID NO: 12018 - RNA, 19 nt, Homo sapiens
gggcgccugugaucccaac

SEQ ID NO: 12019 - RNA, 20 nt, Homo sapiens
accaggaggcugaggccccu

SEQ ID NO: 12020 - RNA, 17 nt, Homo sapiens
ucucgcuggggccucca

SEQ ID NO: 12021 - RNA, 21 nt, Homo sapiens
uugggacauacuuaugcuaaa

SEQ ID NO: 12022 - RNA, 21 nt, Homo sapiens
gcccuccgcccgugcaccccg

SEQ ID NO: 12023 - RNA, 21 nt, Homo sapiens
cggcggggacggcgauugguc

SEQ ID NO: 12024 - RNA, 20 nt, Homo sapiens
ccccagggcgacgcggcggg

SEQ ID NO: 12025 - RNA, 21 nt, Homo sapiens
aggggugcuaucugugauuga

SEQ ID NO: 12026 - RNA, 23 nt, Homo sapiens
aggaccugcgggacaagauucuu

SEQ ID NO: 12027 - RNA, 23 nt, Homo sapiens
uaaaucccauggugccuucuccu

SEQ ID NO: 12028 - RNA, 21 nt, Homo sapiens
cacaagguauugguauuaccu

SEQ ID NO: 12029 - RNA, 21 nt, Homo sapiens
agaccuggcccagaccucagc

SEQ ID NO: 12030 - RNA, 25 nt, Homo sapiens
ggcggagggaaguagguccguuggu

SEQ ID NO: 12031 - RNA, 22 nt, Homo sapiens
aggcggggcgccgcgggaccgc

SEQ ID NO: 12032 - RNA, 23 nt, Homo sapiens
uggugcggagagggcccacagug

SEQ ID NO: 12033 - RNA, 22 nt, Homo sapiens
ccucuuccccuugucucuccag

SEQ ID NO: 12034 - RNA, 22 nt, Homo sapiens
aggcauugacuucucacuagcu

SEQ ID NO: 12035 - RNA, 22 nt, Homo sapiens
ucucccaacccuuguaccagug

SEQ ID NO: 12036 - RNA, 23 nt, Homo sapiens
uaaggugcaucuagugcaguuag

SEQ ID NO: 12037 - RNA, 22 nt, Homo sapiens
uuggggaaacggccgcugagug

SEQ ID NO: 12038 - RNA, 23 nt, Homo sapiens
ucaagagcaauaacgaaaaaugu

SEQ ID NO: 12039 - RNA, 22 nt, Homo sapiens
uaaugccccuaaaaauccuuau

SEQ ID NO: 12040 - RNA, 23 nt, Homo sapiens
cacucagccuugagggcacuuuc

SEQ ID NO: 12041 - RNA, 20 nt, Homo sapiens
guagaggagauggcgcaggg

SEQ ID NO: 12042 - RNA, 23 nt, Homo sapiens
gcagcagagaauaggacuacguc

SEQ ID NO: 12043 - RNA, 22 nt, Homo sapiens
ucugggcaacaaagugagaccu

SEQ ID NO: 12044 - RNA, 22 nt, Homo sapiens
uuuagagacggggucuugcucu

SEQ ID NO: 12045 - RNA, 23 nt, Homo sapiens
agcuacauugucugcuggguuuc

SEQ ID NO: 12046 - RNA, 22 nt, Homo sapiens
uguaaacauccucgacuggaag

SEQ ID NO: 12047 - RNA, 22 nt, Homo sapiens
uguaaacauccccgacuggaag

SEQ ID NO: 12048 - RNA, 22 nt, Homo sapiens
uguaaacauccuugacuggaag

SEQ ID NO: 12049 - RNA, 22 nt, Homo sapiens
uaaugccccuaaaaauccuuau

SEQ ID NO: 12050 - RNA, 23 nt, Homo sapiens
ucuuggaguaggucauugggugg

SEQ ID NO: 12051 - RNA, 22 nt, Homo sapiens
caaccuggaggacuccaugcug

SEQ ID NO: 12052 - RNA, 24 nt, Homo sapiens
uucuccaaaagaaagcacuuucug

SEQ ID NO: 12053 - RNA, 22 nt, Homo sapiens
aagugccuccuuuuagaguguu

SEQ ID NO: 12054 - RNA, 21 nt, Homo sapiens
aacaggugacugguuagacaa

SEQ ID NO: 12055 - RNA, 25 nt, Homo sapiens
gcugggcagggcuucugagcuccuu

SEQ ID NO: 12056 - RNA, 22 nt, Homo sapiens
gucccucuccaaaugugucuug

SEQ ID NO: 12057 - RNA, 18 nt, Homo sapiens
ucagcuggcccucauuuc

SEQ ID NO: 12058 - RNA, 18 nt, Homo sapiens
ucagcuggcccucauuuc

SEQ ID NO: 12059 - RNA, 22 nt, Homo sapiens
uggagugugacaaugguguuug

SEQ ID NO: 12060 - RNA, 17 nt, Homo sapiens
ucgccuccuccucuccc

SEQ ID NO: 12061 - RNA, 23 nt, Homo sapiens
cggcccgggcugcugcuguuccu

SEQ ID NO: 12062 - RNA, 21 nt, Homo sapiens
cggcggggacggcgauugguc

SEQ ID NO: 12063 - RNA, 21 nt, Homo sapiens
cggcggggacggcgauugguc

SEQ ID NO: 12064 - RNA, 22 nt, Homo sapiens
cauugcacuugucucggucuga

SEQ ID NO: 12065 - RNA, 25 nt, Homo sapiens
aggggugguguugggacagcuccgu

SEQ ID NO: 12066 - RNA, 25 nt, Homo sapiens
ggcggagggaaguagguccguuggu

SEQ ID NO: 12067 - RNA, 22 nt, Homo sapiens
aggcggggcgccgcgggaccgc

SEQ ID NO: 12068 - RNA, 22 nt, Homo sapiens
aggcggggcgccgcgggaccgc

SEQ ID NO: 12069 - RNA, 22 nt, Homo sapiens
ugcggggcuagggcuaacagca

SEQ ID NO: 12070 - RNA, 22 nt, Homo sapiens
ucguaccgugaguaauaaugcg

SEQ ID NO: 12071 - RNA, 22 nt, Homo sapiens
uagcagcacaucaugguuuaca

SEQ ID NO: 12072 - RNA, 23 nt, Homo sapiens
ucaagagcaauaacgaaaaaugu

SEQ ID NO: 12073 - RNA, 23 nt, Homo sapiens
aaugacacgaucacucccguuga

SEQ ID NO: 12074 - RNA, 22 nt, Homo sapiens
aucaugaugggcuccucggugu

SEQ ID NO: 12075 - RNA, 23 nt, Homo sapiens
uaaauuucaccuuucugagaagg

SEQ ID NO: 12076 - RNA, 23 nt, Homo sapiens
ucugcucauaccccaugguuucu

SEQ ID NO: 12077 - RNA, 22 nt, Homo sapiens
aaauuauuguacaucggaugag

SEQ ID NO: 12078 - RNA, 22 nt, Homo sapiens
acucggcguggcgucggucgug

SEQ ID NO: 12079 - RNA, 21 nt, Homo sapiens
cggcggggacggcgauugguc

SEQ ID NO: 12080 - RNA, 22 nt, Homo sapiens
agaggcuggccgugaugaauuc

SEQ ID NO: 12081 - RNA, 21 nt, Homo sapiens
auugacacuucugugaguaga

SEQ ID NO: 12082 - RNA, 22 nt, Homo sapiens
aggcggggcgccgcgggaccgc

SEQ ID NO: 12083 - RNA, 22 nt, Homo sapiens
ugcggggcuagggcuaacagca

SEQ ID NO: 12084 - RNA, 21 nt, Homo sapiens
uggaggagaaggaaggugaug

SEQ ID NO: 12085 - RNA, 22 nt, Homo sapiens
uuuccggcucgcgugggugugu

SEQ ID NO: 12086 - RNA, 22 nt, Homo sapiens
uucuggaauucugugugaggga

SEQ ID NO: 12087 - RNA, 22 nt, Homo sapiens
aagcccuuaccccaaaaagcau

SEQ ID NO: 12088 - RNA, 22 nt, Homo sapiens
uuugguccccuucaaccagcug

SEQ ID NO: 12089 - RNA, 22 nt, Homo sapiens
uuugguccccuucaaccagcua

SEQ ID NO: 12090 - RNA, 23 nt, Homo sapiens
cggcccgggcugcugcuguuccu

SEQ ID NO: 12091 - RNA, 23 nt, Homo sapiens
cggcccgggcugcugcuguuccu

SEQ ID NO: 12092 - RNA, 21 nt, Homo sapiens
aucacauugccagggauuucc

SEQ ID NO: 12093 - RNA, 21 nt, Homo sapiens
aucacauugccagggauuacc

SEQ ID NO: 12094 - RNA, 23 nt, Homo sapiens
ugaggggcagagagcgagacuuu

SEQ ID NO: 12095 - RNA, 22 nt, Homo sapiens
uucucaaggaggugucguuuau

SEQ ID NO: 12096 - RNA, 21 nt, Homo sapiens
uuuccauaggugaugagucac

SEQ ID NO: 12097 - RNA, 22 nt, Homo sapiens
uccgagccugggucucccucuu

SEQ ID NO: 12098 - RNA, 23 nt, Homo sapiens
aucccuugcaggggcuguugggu

SEQ ID NO: 12099 - RNA, 22 nt, Homo sapiens
ugcggggcuagggcuaacagca

SEQ ID NO: 12100 - RNA, 22 nt, Homo sapiens
uuugugaccugguccacuaacc

SEQ ID NO: 12101 - RNA, 21 nt, Homo sapiens
ucguggccuggucuccauuau

SEQ ID NO: 12102 - RNA, 22 nt, Homo sapiens
uggagugugacaaugguguuug

SEQ ID NO: 12103 - RNA, 21 nt, Homo sapiens
uuaggccgcagaucuggguga

SEQ ID NO: 12104 - RNA, 22 nt, Homo sapiens
cucggcgcggggcgcgggcucc

SEQ ID NO: 12105 - RNA, 22 nt, Homo sapiens
ucaggccaggcacaguggcuca

SEQ ID NO: 12106 - RNA, 23 nt, Homo sapiens
ucggggaucaucaugucacgaga

SEQ ID NO: 12107 - RNA, 19 nt, Homo sapiens
aggcugcggaauucaggac

SEQ ID NO: 12108 - RNA, 22 nt, Homo sapiens
gucccucuccaaaugugucuug

SEQ ID NO: 12109 - RNA, 21 nt, Homo sapiens
guggcugcacucacuuccuuc

SEQ ID NO: 12110 - RNA, 24 nt, Homo sapiens
ugccugggucucuggccugcgcgu

SEQ ID NO: 12111 - RNA, 22 nt, Homo sapiens
ugcuggaucagugguucgaguc

SEQ ID NO: 12112 - RNA, 21 nt, Homo sapiens
uccugcgcgucccagaugccc

SEQ ID NO: 12113 - RNA, 21 nt, Homo sapiens
cggcggggacggcgauugguc

SEQ ID NO: 12114 - RNA, 22 nt, Homo sapiens
cgcaggggccgggugcucaccg

SEQ ID NO: 12115 - RNA, 23 nt, Homo sapiens
caacggaaucccaaaagcagcug

SEQ ID NO: 12116 - RNA, 23 nt, Homo sapiens
ugaguaccgccaugucuguuggg

SEQ ID NO: 12117 - RNA, 19 nt, Homo sapiens
accgugcaaagguagcaua

SEQ ID NO: 12118 - RNA, 22 nt, Homo sapiens
gaggguuggguggaggcucucc

SEQ ID NO: 12119 - RNA, 22 nt, Homo sapiens
caaccuggaggacuccaugcug

SEQ ID NO: 12120 - RNA, 22 nt, Homo sapiens
auucugcauuuuuagcaaguuc

SEQ ID NO: 12121 - RNA, 24 nt, Homo sapiens
gaccuggacauguuugugcccagu

SEQ ID NO: 12122 - RNA, 22 nt, Homo sapiens
aggcggggcgccgcgggaccgc

SEQ ID NO: 12123 - RNA, 22 nt, Homo sapiens
ugcggggcuagggcuaacagca

SEQ ID NO: 12124 - RNA, 22 nt, Homo sapiens
ugcaacuuaccugagucauuga

SEQ ID NO: 12125 - RNA, 21 nt, Homo sapiens
cccggagccaggaugcagcuc

SEQ ID NO: 12126 - RNA, 22 nt, Homo sapiens
acgcccuucccccccuucuuca

SEQ ID NO: 12127 - RNA, 21 nt, Homo sapiens
uccugcgcgucccagaugccc

SEQ ID NO: 12128 - RNA, 22 nt, Homo sapiens
cgcaggggccgggugcucaccg

SEQ ID NO: 12129 - RNA, 23 nt, Homo sapiens
ugaguaccgccaugucuguuggg

SEQ ID NO: 12130 - RNA, 22 nt, Homo sapiens
aacuggcccucaaagucccgcu

SEQ ID NO: 12131 - RNA, 22 nt, Homo sapiens
aauugcacgguauccaucugua

SEQ ID NO: 12132 - RNA, 25 nt, Homo sapiens
aggggugguguugggacagcuccgu

SEQ ID NO: 12133 - RNA, 22 nt, Homo sapiens
ugcccuuaaaggugaacccagu

SEQ ID NO: 12134 - RNA, 19 nt, Homo sapiens
gugaggacucgggaggugg

SEQ ID NO: 12135 - RNA, 22 nt, Homo sapiens
caaagaauucuccuuuugggcu

SEQ ID NO: 12136 - RNA, 22 nt, Homo sapiens
ugggucuuugcgggcgagauga

SEQ ID NO: 12137 - RNA, 23 nt, Homo sapiens
cccaguguucagacuaccuguuc

SEQ ID NO: 12138 - RNA, 23 nt, Homo sapiens
cccaguguuuagacuaucuguuc

SEQ ID NO: 12139 - RNA, 23 nt, Homo sapiens
ugugcaaaucuaugcaaaacuga

SEQ ID NO: 12140 - RNA, 22 nt, Homo sapiens
aacaauauccuggugcugagug

SEQ ID NO: 12141 - RNA, 22 nt, Homo sapiens
agagguaguagguugcauaguu

SEQ ID NO: 12142 - RNA, 22 nt, Homo sapiens
uauugcacauuacuaaguugca

SEQ ID NO: 12143 - RNA, 23 nt, Homo sapiens
acuucaccugguccacuagccgu

SEQ ID NO: 12144 - RNA, 22 nt, Homo sapiens
cagcagcaauucauguuuugaa

SEQ ID NO: 12145 - RNA, 23 nt, Homo sapiens
uaaauuucaccuuucugagaagg

SEQ ID NO: 12146 - RNA, 24 nt, Homo sapiens
cugaagugauguguaacugaucag

SEQ ID NO: 12147 - RNA, 21 nt, Homo sapiens
aggaggcagcgcucucaggac

SEQ ID NO: 12148 - RNA, 21 nt, Homo sapiens
uacaguacugugauaacugaa

SEQ ID NO: 12149 - RNA, 18 nt, Homo sapiens
ucagcuggcccucauuuc

SEQ ID NO: 12150 - RNA, 19 nt, Homo sapiens
gugaggacucgggaggugg

SEQ ID NO: 12151 - RNA, 17 nt, Homo sapiens
ucgccuccuccucuccc

SEQ ID NO: 12152 - RNA, 18 nt, Homo sapiens
cagggaggugaaugugau

SEQ ID NO: 12153 - RNA, 23 nt, Homo sapiens
ucuggcuccgugucuucacuccc

SEQ ID NO: 12154 - RNA, 21 nt, Homo sapiens
uccugcgcgucccagaugccc

SEQ ID NO: 12155 - RNA, 21 nt, Homo sapiens
cggcggggacggcgauugguc

SEQ ID NO: 12156 - RNA, 22 nt, Homo sapiens
aaggagcucacagucuauugag

SEQ ID NO: 12157 - RNA, 22 nt, Homo sapiens
aggcggggcgccgcgggaccgc

SEQ ID NO: 12158 - RNA, 23 nt, Homo sapiens
aaggagcuuacaaucuagcuggg

SEQ ID NO: 12159 - RNA, 24 nt, Homo sapiens
uggggagcugaggcucugggggug

SEQ ID NO: 12160 - RNA, 22 nt, Homo sapiens
ugugacugguugaccagagggg

SEQ ID NO: 12161 - RNA, 23 nt, Homo sapiens
ucuggcuccgugucuucacuccc

SEQ ID NO: 12162 - RNA, 23 nt, Homo sapiens
ucuggcuccgugucuucacuccc

SEQ ID NO: 12163 - RNA, 21 nt, Homo sapiens
ucgaggagcucacagucuagu

SEQ ID NO: 12164 - RNA, 23 nt, Homo sapiens
ugaguaccgccaugucuguuggg

SEQ ID NO: 12165 - RNA, 22 nt, Homo sapiens
uggcucaguucagcaggaacag

SEQ ID NO: 12166 - RNA, 22 nt, Homo sapiens
uguaaacauccuacacucagcu

SEQ ID NO: 12167 - RNA, 20 nt, Homo sapiens
ccucugggcccuuccuccag

SEQ ID NO: 12168 - RNA, 22 nt, Homo sapiens
ucucugggccugugucuuaggc

SEQ ID NO: 12169 - RNA, 23 nt, Homo sapiens
agcucggucugaggccccucagu

SEQ ID NO: 12170 - RNA, 22 nt, Homo sapiens
ucaggcucaguccccucccgau

SEQ ID NO: 12171 - RNA, 22 nt, Homo sapiens
agaggcuggccgugaugaauuc

SEQ ID NO: 12172 - RNA, 22 nt, Homo sapiens
cgucaacacuugcugguuuccu

SEQ ID NO: 12173 - RNA, 20 nt, Homo sapiens
cggcucugggucugugggga

SEQ ID NO: 12174 - RNA, 21 nt, Homo sapiens
uggaggagaaggaaggugaug

SEQ ID NO: 12175 - RNA, 20 nt, Homo sapiens
ccuccugcccuccuugcugu

SEQ ID NO: 12176 - RNA, 22 nt, Homo sapiens
acagcaggcacagacaggcagu

SEQ ID NO: 12177 - RNA, 21 nt, Homo sapiens
uucacaguggcuaaguuccgc

SEQ ID NO: 12178 - RNA, 22 nt, Homo sapiens
aaggagcucacagucuauugag

SEQ ID NO: 12179 - RNA, 22 nt, Homo sapiens
uuauaaagcaaugagacugauu

SEQ ID NO: 12180 - RNA, 22 nt, Homo sapiens
uggcagugucuuagcugguugu

SEQ ID NO: 12181 - RNA, 22 nt, Homo sapiens
gccugcugggguggaaccuggu

SEQ ID NO: 12182 - RNA, 22 nt, Homo sapiens
uucucaaggaggugucguuuau

SEQ ID NO: 12183 - RNA, 23 nt, Homo sapiens
cucuugagggaagcacuuucugu

SEQ ID NO: 12184 - RNA, 23 nt, Homo sapiens
aaggagcuuacaaucuagcuggg

SEQ ID NO: 12185 - RNA, 22 nt, Homo sapiens
ugugcgcagggagaccucuccc

SEQ ID NO: 12186 - RNA, 22 nt, Homo sapiens
ucguaccgugaguaauaaugcg

SEQ ID NO: 12187 - RNA, 22 nt, Homo sapiens
uggagagaaaggcaguuccuga

SEQ ID NO: 12188 - RNA, 22 nt, Homo sapiens
caaagaauucuccuuuugggcu

SEQ ID NO: 12189 - RNA, 23 nt, Homo sapiens
ugugcaaaucuaugcaaaacuga

SEQ ID NO: 12190 - RNA, 22 nt, Homo sapiens
aacaauauccuggugcugagug

SEQ ID NO: 12191 - RNA, 22 nt, Homo sapiens
agagguaguagguugcauaguu

SEQ ID NO: 12192 - RNA, 21 nt, Homo sapiens
gugcauuguaguugcauugca

SEQ ID NO: 12193 - RNA, 22 nt, Homo sapiens
uuuugcaauauguuccugaaua

SEQ ID NO: 12194 - RNA, 22 nt, Homo sapiens
uuuugcaauauguuccugaaua

SEQ ID NO: 12195 - RNA, 22 nt, Homo sapiens
aacuguuugcagaggaaacuga

SEQ ID NO: 12196 - RNA, 20 nt, Homo sapiens
agaccauggguucucauugu

SEQ ID NO: 12197 - RNA, 22 nt, Homo sapiens
uggagugugacaaugguguuug

SEQ ID NO: 12198 - RNA, 22 nt, Homo sapiens
ugcaacuuaccugagucauuga

SEQ ID NO: 12199 - RNA, 22 nt, Homo sapiens
aaauuauuguacaucggaugag

SEQ ID NO: 12200 - RNA, 22 nt, Homo sapiens
cuccugagccauucugagccuc

SEQ ID NO: 12201 - RNA, 22 nt, Homo sapiens
ugcuggaucagugguucgaguc

SEQ ID NO: 12202 - RNA, 23 nt, Homo sapiens
aacauucaacgcugucggugagu

SEQ ID NO: 12203 - RNA, 22 nt, Homo sapiens
ucugcccccuccgcugcugcca

SEQ ID NO: 12204 - RNA, 22 nt, Homo sapiens
acacagggcuguugugaagacu

SEQ ID NO: 12205 - RNA, 21 nt, Homo sapiens
aucacauugccagggauuucc

SEQ ID NO: 12206 - RNA, 21 nt, Homo sapiens
aucacauugccagggauuacc

SEQ ID NO: 12207 - RNA, 20 nt, Homo sapiens
acugccccaggugcugcugg

SEQ ID NO: 12208 - RNA, 23 nt, Homo sapiens
ucccccaggugugauucugauuu

SEQ ID NO: 12209 - RNA, 23 nt, Homo sapiens
ucuuggaguaggucauugggugg

SEQ ID NO: 12210 - RNA, 22 nt, Homo sapiens
agaggcuggccgugaugaauuc

SEQ ID NO: 12211 - RNA, 21 nt, Homo sapiens
cggggcagcucaguacaggau

SEQ ID NO: 12212 - RNA, 23 nt, Homo sapiens
aggaccugcgggacaagauucuu

SEQ ID NO: 12213 - RNA, 21 nt, Homo sapiens
agaccuggcccagaccucagc

SEQ ID NO: 12214 - RNA, 24 nt, Homo sapiens
acugggggcuuucgggcucugcgu

SEQ ID NO: 12215 - RNA, 21 nt, Homo sapiens
aggaggcagcgcucucaggac

SEQ ID NO: 12216 - RNA, 21 nt, Homo sapiens
gcaggaacuugugagucuccu

SEQ ID NO: 12217 - RNA, 22 nt, Homo sapiens
uagcagcacauaaugguuugug

SEQ ID NO: 12218 - RNA, 22 nt, Homo sapiens
uacccagagcaugcagugugaa

SEQ ID NO: 12219 - RNA, 22 nt, Homo sapiens
ucaggccaggcacaguggcuca

SEQ ID NO: 12220 - RNA, 20 nt, Homo sapiens
ccucugggcccuuccuccag

SEQ ID NO: 12221 - RNA, 22 nt, Homo sapiens
ucucugggccugugucuuaggc

SEQ ID NO: 12222 - RNA, 22 nt, Homo sapiens
gcugacuccuaguccagggcuc

SEQ ID NO: 12223 - RNA, 20 nt, Homo sapiens
acucaaacugugggggcacu

SEQ ID NO: 12224 - RNA, 22 nt, Homo sapiens
ggggguccccggugcucggauc

SEQ ID NO: 12225 - RNA, 19 nt, Homo sapiens
ucuaggcugguacugcuga

SEQ ID NO: 12226 - RNA, 22 nt, Homo sapiens
aggcggggcgccgcgggaccgc

SEQ ID NO: 12227 - RNA, 22 nt, Homo sapiens
gguggcccggccgugccugagg

SEQ ID NO: 12228 - RNA, 24 nt, Homo sapiens
uggggagcugaggcucugggggug

SEQ ID NO: 12229 - RNA, 26 nt, Homo sapiens
gaugaugauggcagcaaauucugaaa

SEQ ID NO: 12230 - RNA, 20 nt, Homo sapiens
ucugcaggguuugcuuugag

SEQ ID NO: 12231 - RNA, 23 nt, Homo sapiens
uaaggugcaucuagugcagauag

SEQ ID NO: 12232 - RNA, 23 nt, Homo sapiens
cccaguguucagacuaccuguuc

SEQ ID NO: 12233 - RNA, 23 nt, Homo sapiens
cccaguguuuagacuaucuguuc

SEQ ID NO: 12234 - RNA, 21 nt, Homo sapiens
uugugcuugaucuaaccaugu

SEQ ID NO: 12235 - RNA, 22 nt, Homo sapiens
ugucaguuugucaaauacccca

SEQ ID NO: 12236 - RNA, 24 nt, Homo sapiens
agcagaagcagggagguucuccca

SEQ ID NO: 12237 - RNA, 23 nt, Homo sapiens
gaagugcuucgauuuuggggugu

SEQ ID NO: 12238 - RNA, 22 nt, Homo sapiens
caaccuggaggacuccaugcug

SEQ ID NO: 12239 - RNA, 22 nt, Homo sapiens
gaugagcucauuguaauaugag

SEQ ID NO: 12240 - RNA, 22 nt, Homo sapiens
agucauuggaggguuugagcag

SEQ ID NO: 12241 - RNA, 21 nt, Homo sapiens
uggguuuacguugggagaacu

SEQ ID NO: 12242 - RNA, 22 nt, Homo sapiens
aguauucuguaccagggaaggu

SEQ ID NO: 12243 - RNA, 19 nt, Homo sapiens
ucuaggcugguacugcuga

SEQ ID NO: 12244 - RNA, 22 nt, Homo sapiens
uuugugaccugguccacuaacc

SEQ ID NO: 12245 - RNA, 21 nt, Homo sapiens
uacucaaaaagcugucaguca

SEQ ID NO: 12246 - RNA, 24 nt, Homo sapiens
ucccugagacccuuuaaccuguga

SEQ ID NO: 12247 - RNA, 22 nt, Homo sapiens
ucccugagacccuaacuuguga

SEQ ID NO: 12248 - RNA, 23 nt, Homo sapiens
ccucagggcuguagaacagggcu

SEQ ID NO: 12249 - RNA, 24 nt, Homo sapiens
uggcccugacugaagaccagcagu

SEQ ID NO: 12250 - RNA, 21 nt, Homo sapiens
cauaaaguagaaagcacuacu

SEQ ID NO: 12251 - RNA, 21 nt, Homo sapiens
agggcccccccucaauccugu

SEQ ID NO: 12252 - RNA, 22 nt, Homo sapiens
cuagguauggucccagggaucc

SEQ ID NO: 12253 - RNA, 21 nt, Homo sapiens
uugaaaggcuauuucuugguc

SEQ ID NO: 12254 - RNA, 22 nt, Homo sapiens
uacucaggagaguggcaaucac

SEQ ID NO: 12255 - RNA, 23 nt, Homo sapiens
uucauuugguauaaaccgcgauu

SEQ ID NO: 12256 - RNA, 20 nt, Homo sapiens
agaccauggguucucauugu

SEQ ID NO: 12257 - RNA, 22 nt, Homo sapiens
uggagugugacaaugguguuug

SEQ ID NO: 12258 - RNA, 17 nt, Homo sapiens
ucccaccgcugccaccc

SEQ ID NO: 12259 - RNA, 21 nt, Homo sapiens
gcccuccgcccgugcaccccg

SEQ ID NO: 12260 - RNA, 23 nt, Homo sapiens
cggcccgggcugcugcuguuccu

SEQ ID NO: 12261 - RNA, 22 nt, Homo sapiens
cauugcacuugucucggucuga

SEQ ID NO: 12262 - RNA, 19 nt, Homo sapiens
gggcgccugugaucccaac

SEQ ID NO: 12263 - RNA, 25 nt, Homo sapiens
ggcggagggaaguagguccguuggu

SEQ ID NO: 12264 - RNA, 20 nt, Homo sapiens
ggggagcuguggaagcagua

SEQ ID NO: 12265 - RNA, 20 nt, Homo sapiens
ugagcccuguccucccgcag

SEQ ID NO: 12266 - RNA, 22 nt, Homo sapiens
cugaagcucagagggcucugau

SEQ ID NO: 12267 - RNA, 22 nt, Homo sapiens
uucuggaauucugugugaggga

SEQ ID NO: 12268 - RNA, 22 nt, Homo sapiens
aagcccuuaccccaaaaagcau

SEQ ID NO: 12269 - RNA, 22 nt, Homo sapiens
aacuguuugcagaggaaacuga

SEQ ID NO: 12270 - RNA, 21 nt, Homo sapiens
uagcagcacagaaauauuggc

SEQ ID NO: 12271 - RNA, 22 nt, Homo sapiens
aaggagcucacagucuauugag

SEQ ID NO: 12272 - RNA, 23 nt, Homo sapiens
ucaagagcaauaacgaaaaaugu

SEQ ID NO: 12273 - RNA, 22 nt, Homo sapiens
aacaauauccuggugcugagug

SEQ ID NO: 12274 - RNA, 22 nt, Homo sapiens
aaaaguauuugcggguuuuguc

SEQ ID NO: 12275 - RNA, 22 nt, Homo sapiens
cgaaaacagcaauuaccuuugc

SEQ ID NO: 12276 - RNA, 19 nt, Homo sapiens
gugucugcuuccuguggga

SEQ ID NO: 12277 - RNA, 23 nt, Homo sapiens
aaggagcuuacaaucuagcuggg

SEQ ID NO: 12278 - RNA, 22 nt, Homo sapiens
ugcaacuuaccugagucauuga

SEQ ID NO: 12279 - RNA, 22 nt, Homo sapiens
ugcccuuaaaggugaacccagu

SEQ ID NO: 12280 - RNA, 21 nt, Homo sapiens
uugcucacuguucuucccuag

SEQ ID NO: 12281 - RNA, 26 nt, Homo sapiens
aaguaguugguuuguaugagaugguu

SEQ ID NO: 12282 - RNA, 22 nt, Homo sapiens
ucaaaacugaggggcauuuucu

SEQ ID NO: 12283 - RNA, 22 nt, Homo sapiens
aacuguuugcagaggaaacuga

SEQ ID NO: 12284 - RNA, 21 nt, Homo sapiens
uagcagcacagaaauauuggc

SEQ ID NO: 12285 - RNA, 23 nt, Homo sapiens
uaagugcuuccauguuucagugg

SEQ ID NO: 12286 - RNA, 21 nt, Homo sapiens
aauaauacaugguugaucuuu

SEQ ID NO: 12287 - RNA, 21 nt, Homo sapiens
gugucuuuugcucugcaguca

SEQ ID NO: 12288 - RNA, 22 nt, Homo sapiens
ccaaaacugcaguuacuuuugc

SEQ ID NO: 12289 - RNA, 21 nt, Homo sapiens
agagaagaagaucagccugca

SEQ ID NO: 12290 - RNA, 20 nt, Homo sapiens
uaaagagcccuguggagaca

SEQ ID NO: 12291 - RNA, 18 nt, Homo sapiens
uugagaaggaggcugcug

SEQ ID NO: 12292 - RNA, 22 nt, Homo sapiens
uguaacagcaacuccaugugga

SEQ ID NO: 12293 - RNA, 20 nt, Homo sapiens
uguuuugauaacaguaaugu

SEQ ID NO: 12294 - RNA, 22 nt, Homo sapiens
uaaugccccuaaaaauccuuau

SEQ ID NO: 12295 - RNA, 22 nt, Homo sapiens
gugacaucacauauacggcagc

SEQ ID NO: 12296 - RNA, 21 nt, Homo sapiens
gcgacccauacuugguuucag

SEQ ID NO: 12297 - RNA, 21 nt, Homo sapiens
gcccuccgcccgugcaccccg

SEQ ID NO: 12298 - RNA, 22 nt, Homo sapiens
cauugcacuugucucggucuga

SEQ ID NO: 12299 - RNA, 23 nt, Homo sapiens
uagcagcgggaacaguucugcag

SEQ ID NO: 12300 - RNA, 21 nt, Homo sapiens
uccgguucucagggcuccacc

SEQ ID NO: 12301 - RNA, 20 nt, Homo sapiens
cggcucugggucugugggga

SEQ ID NO: 12302 - RNA, 23 nt, Homo sapiens
uacccuguagaaccgaauuugug

SEQ ID NO: 12303 - RNA, 21 nt, Homo sapiens
ccgucgccgccacccgagccg

SEQ ID NO: 12304 - RNA, 21 nt, Homo sapiens
guucaaauccagaucuauaac

SEQ ID NO: 12305 - RNA, 22 nt, Homo sapiens
aacccguagauccgaucuugug

SEQ ID NO: 12306 - RNA, 22 nt, Homo sapiens
cacccguagaaccgaccuugcg

SEQ ID NO: 12307 - RNA, 23 nt, Homo sapiens
ucuggcuccgugucuucacuccc

SEQ ID NO: 12308 - RNA, 21 nt, Homo sapiens
uccugcgcgucccagaugccc

SEQ ID NO: 12309 - RNA, 21 nt, Homo sapiens
cggcggggacggcgauugguc

SEQ ID NO: 12310 - RNA, 21 nt, Homo sapiens
aucacauugccagggauuucc

SEQ ID NO: 12311 - RNA, 21 nt, Homo sapiens
aucacauugccagggauuacc

SEQ ID NO: 12312 - RNA, 23 nt, Homo sapiens
ugaggggcagagagcgagacuuu

SEQ ID NO: 12313 - RNA, 22 nt, Homo sapiens
aggcggggcgccgcgggaccgc

SEQ ID NO: 12314 - RNA, 22 nt, Homo sapiens
ugcggggcuagggcuaacagca

SEQ ID NO: 12315 - RNA, 26 nt, Homo sapiens
gaugaugauggcagcaaauucugaaa

SEQ ID NO: 12316 - RNA, 17 nt, Homo sapiens
ucgccuccuccucuccc

SEQ ID NO: 12317 - RNA, 22 nt, Homo sapiens
uguaacagcaacuccaugugga

SEQ ID NO: 12318 - RNA, 22 nt, Homo sapiens
cauugcacuugucucggucuga

SEQ ID NO: 12319 - RNA, 23 nt, Homo sapiens
ugagcgccucgacgacagagccg

SEQ ID NO: 12320 - RNA, 22 nt, Homo sapiens
aauugcacgguauccaucugua

SEQ ID NO: 12321 - RNA, 25 nt, Homo sapiens
aggggugguguugggacagcuccgu

SEQ ID NO: 12322 - RNA, 21 nt, Homo sapiens
ggcuagcaacagcgcuuaccu

SEQ ID NO: 12323 - RNA, 22 nt, Homo sapiens
gucccucuccaaaugugucuug

SEQ ID NO: 12324 - RNA, 22 nt, Homo sapiens
acuccagccccacagccucagc

SEQ ID NO: 12325 - RNA, 20 nt, Homo sapiens
ggggagcuguggaagcagua

SEQ ID NO: 12326 - RNA, 21 nt, Homo sapiens
gcccuccgcccgugcaccccg

SEQ ID NO: 12327 - RNA, 23 nt, Homo sapiens
ugaguaccgccaugucuguuggg

SEQ ID NO: 12328 - RNA, 22 nt, Homo sapiens
cauugcacuugucucggucuga

SEQ ID NO: 12329 - RNA, 19 nt, Homo sapiens
aggcugcggaauucaggac

SEQ ID NO: 12330 - RNA, 25 nt, Homo sapiens
ggcggagggaaguagguccguuggu

SEQ ID NO: 12331 - RNA, 21 nt, Homo sapiens
ucccacguuguggcccagcag

SEQ ID NO: 12332 - RNA, 20 nt, Homo sapiens
accaggaggcugaggccccu

SEQ ID NO: 12333 - RNA, 23 nt, Homo sapiens
cgggucggaguuagcucaagcgg

SEQ ID NO: 12334 - RNA, 22 nt, Homo sapiens
auccgcgcucugacucucugcc

SEQ ID NO: 12335 - RNA, 21 nt, Homo sapiens
uggcagggaggcugggagggg

SEQ ID NO: 12336 - RNA, 22 nt, Homo sapiens
uggagugugacaaugguguuug

SEQ ID NO: 12337 - RNA, 21 nt, Homo sapiens
uccugcgcgucccagaugccc

SEQ ID NO: 12338 - RNA, 18 nt, Homo sapiens
uccagugcccuccucucc

SEQ ID NO: 12339 - RNA, 23 nt, Homo sapiens
ugaguaccgccaugucuguuggg

SEQ ID NO: 12340 - RNA, 22 nt, Homo sapiens
cauugcacuugucucggucuga

SEQ ID NO: 12341 - RNA, 22 nt, Homo sapiens
cauugcacuugucucggucuga

SEQ ID NO: 12342 - RNA, 23 nt, Homo sapiens
ucccccaggugugauucugauuu

SEQ ID NO: 12343 - RNA, 25 nt, Homo sapiens
ggcggagggaaguagguccguuggu

SEQ ID NO: 12344 - RNA, 25 nt, Homo sapiens
ggcggagggaaguagguccguuggu

SEQ ID NO: 12345 - RNA, 23 nt, Homo sapiens
aggaagcccuggaggggcuggag

SEQ ID NO: 12346 - RNA, 21 nt, Homo sapiens
aaggcagggcccccgcucccc

SEQ ID NO: 12347 - RNA, 18 nt, Homo sapiens
uugagaaggaggcugcug

SEQ ID NO: 12348 - RNA, 21 nt, Homo sapiens
uaccacaggguagaaccacgg

SEQ ID NO: 12349 - RNA, 21 nt, Homo sapiens
ugacaacuauggaugagcucu

SEQ ID NO: 12350 - RNA, 22 nt, Homo sapiens
caaucacuaacuccacugccau

SEQ ID NO: 12351 - RNA, 21 nt, Homo sapiens
uaauuuuauguauaagcuagu

SEQ ID NO: 12352 - RNA, 21 nt, Homo sapiens
uaauuuuauguauaagcuagu

SEQ ID NO: 12353 - RNA, 17 nt, Homo sapiens
ucucgcuggggccucca

SEQ ID NO: 12354 - RNA, 23 nt, Homo sapiens
ucaaaugcucagacuccuguggu

SEQ ID NO: 12355 - RNA, 20 nt, Homo sapiens
ugagcccuguccucccgcag

SEQ ID NO: 12356 - RNA, 18 nt, Homo sapiens
cagggaggugaaugugau

SEQ ID NO: 12357 - RNA, 21 nt, Homo sapiens
gcccuccgcccgugcaccccg

SEQ ID NO: 12358 - RNA, 22 nt, Homo sapiens
uggacggagaacugauaagggu

SEQ ID NO: 12359 - RNA, 21 nt, Homo sapiens
agcuacaucuggcuacugggu

SEQ ID NO: 12360 - RNA, 23 nt, Homo sapiens
ugucugcccgcaugccugccucu

SEQ ID NO: 12361 - RNA, 19 nt, Homo sapiens
ugucucugcugggguuucu

SEQ ID NO: 12362 - RNA, 20 nt, Homo sapiens
ucugcaggguuugcuuugag

SEQ ID NO: 12363 - RNA, 17 nt, Homo sapiens
uucaaguaauucaggug

SEQ ID NO: 12364 - RNA, 22 nt, Homo sapiens
uucaaguaauccaggauaggcu

SEQ ID NO: 12365 - RNA, 21 nt, Homo sapiens
uucaaguaauucaggauaggu

SEQ ID NO: 12366 - RNA, 22 nt, Homo sapiens
ugauugguacgucuguggguag

SEQ ID NO: 12367 - RNA, 23 nt, Homo sapiens
uaaaucccauggugccuucuccu

SEQ ID NO: 12368 - RNA, 22 nt, Homo sapiens
uaugucugcugaccaucaccuu

SEQ ID NO: 12369 - RNA, 23 nt, Homo sapiens
uauucauuuauccccagccuaca

SEQ ID NO: 12370 - RNA, 20 nt, Homo sapiens
agaccauggguucucauugu

SEQ ID NO: 12371 - RNA, 22 nt, Homo sapiens
uggagugugacaaugguguuug

SEQ ID NO: 12372 - RNA, 22 nt, Homo sapiens
aaauuauuguacaucggaugag

SEQ ID NO: 12373 - RNA, 23 nt, Homo sapiens
ccugcagcgacuugauggcuucc

SEQ ID NO: 12374 - RNA, 20 nt, Homo sapiens
ucugcaggguuugcuuugag

SEQ ID NO: 12375 - RNA, 21 nt, Homo sapiens
uccuucugcuccgucccccag

SEQ ID NO: 12376 - RNA, 17 nt, Homo sapiens
ucgccuccuccucuccc

SEQ ID NO: 12377 - RNA, 20 nt, Homo sapiens
ccuccugcccuccuugcugu

SEQ ID NO: 12378 - RNA, 22 nt, Homo sapiens
cauugcacuugucucggucuga

SEQ ID NO: 12379 - RNA, 21 nt, Homo sapiens
acuggacuuggagucagaagg

SEQ ID NO: 12380 - RNA, 22 nt, Homo sapiens
acuggacuuagggucagaaggc

SEQ ID NO: 12381 - RNA, 22 nt, Homo sapiens
aggcaguguauuguuagcuggc

SEQ ID NO: 12382 - RNA, 23 nt, Homo sapiens
ggcagguucucacccucucuagg

SEQ ID NO: 12383 - RNA, 21 nt, Homo sapiens
uggaggagaaggaaggugaug

SEQ ID NO: 12384 - RNA, 23 nt, Homo sapiens
gcagcagagaauaggacuacguc

SEQ ID NO: 12385 - RNA, 22 nt, Homo sapiens
uggagugugacaaugguguuug

SEQ ID NO: 12386 - RNA, 22 nt, Homo sapiens
uucuggaauucugugugaggga

SEQ ID NO: 12387 - RNA, 22 nt, Homo sapiens
aagcccuuaccccaaaaagcau

SEQ ID NO: 12388 - RNA, 23 nt, Homo sapiens
ucuggcuccgugucuucacuccc

SEQ ID NO: 12389 - RNA, 21 nt, Homo sapiens
cggcggggacggcgauugguc

SEQ ID NO: 12390 - RNA, 23 nt, Homo sapiens
ugaguaccgccaugucuguuggg

SEQ ID NO: 12391 - RNA, 22 nt, Homo sapiens
cucccacugcuucacuugacua

SEQ ID NO: 12392 - RNA, 22 nt, Homo sapiens
cauugcacuugucucggucuga

SEQ ID NO: 12393 - RNA, 23 nt, Homo sapiens
ucccccaggugugauucugauuu

SEQ ID NO: 12394 - RNA, 21 nt, Homo sapiens
ucacuccucuccucccgucuu

SEQ ID NO: 12395 - RNA, 22 nt, Homo sapiens
cgucaacacuugcugguuuccu

SEQ ID NO: 12396 - RNA, 24 nt, Homo sapiens
acugggggcuuucgggcucugcgu

SEQ ID NO: 12397 - RNA, 22 nt, Homo sapiens
aggcggggcgccgcgggaccgc

SEQ ID NO: 12398 - RNA, 22 nt, Homo sapiens
ugcggggcuagggcuaacagca

SEQ ID NO: 12399 - RNA, 21 nt, Homo sapiens
uggaggagaaggaaggugaug

SEQ ID NO: 12400 - RNA, 20 nt, Homo sapiens
ggggagcuguggaagcagua

SEQ ID NO: 12401 - RNA, 18 nt, Homo sapiens
cgggcguggugguggggg

SEQ ID NO: 12402 - RNA, 21 nt, Homo sapiens
aagugaucuaaaggccuacau

SEQ ID NO: 12403 - RNA, 25 nt, Homo sapiens
cccccacaaccgcgcuugacuagcu

SEQ ID NO: 12404 - RNA, 22 nt, Homo sapiens
aguggggaacccuuccaugagg

SEQ ID NO: 12405 - RNA, 22 nt, Homo sapiens
ugugucacucgaugaccacugu

SEQ ID NO: 12406 - RNA, 25 nt, Homo sapiens
aggggugguguugggacagcuccgu

SEQ ID NO: 12407 - RNA, 23 nt, Homo sapiens
ucugcucauaccccaugguuucu

SEQ ID NO: 12408 - RNA, 20 nt, Homo sapiens
ggggagcuguggaagcagua

SEQ ID NO: 12409 - RNA, 23 nt, Homo sapiens
cggcccgggcugcugcuguuccu

SEQ ID NO: 12410 - RNA, 22 nt, Homo sapiens
gguccagaggggagauagguuc

SEQ ID NO: 12411 - RNA, 22 nt, Homo sapiens
uauguaauaugguccacaucuu

SEQ ID NO: 12412 - RNA, 23 nt, Homo sapiens
caaagcgcuucucuuuagagugu

SEQ ID NO: 12413 - RNA, 21 nt, Homo sapiens
cuccagagggaaguacuuucu

SEQ ID NO: 12414 - RNA, 21 nt, Homo sapiens
cuccagagggaugcacuuucu

SEQ ID NO: 12415 - RNA, 19 nt, Homo sapiens
agguugacauacguuuccc

SEQ ID NO: 12416 - RNA, 21 nt, Homo sapiens
agaccuggcccagaccucagc

SEQ ID NO: 12417 - RNA, 23 nt, Homo sapiens
acuugggcacugaaacaaugucc

SEQ ID NO: 12418 - RNA, 22 nt, Homo sapiens
aggcggggcgccgcgggaccgc

SEQ ID NO: 12419 - RNA, 23 nt, Homo sapiens
ugucacucggcucggcccacuac

SEQ ID NO: 12420 - RNA, 23 nt, Homo sapiens
cacccggcugugugcacaugugc

SEQ ID NO: 12421 - RNA, 21 nt, Homo sapiens
ucguggccuggucuccauuau

SEQ ID NO: 12422 - RNA, 22 nt, Homo sapiens
ugagccccugugccgcccccag

SEQ ID NO: 12423 - RNA, 18 nt, Homo sapiens
ugaggcaguagauugaau

SEQ ID NO: 12424 - RNA, 22 nt, Homo sapiens
ucugcccccuccgcugcugcca

SEQ ID NO: 12425 - RNA, 20 nt, Homo sapiens
acugccccaggugcugcugg

SEQ ID NO: 12426 - RNA, 21 nt, Homo sapiens
cggggcagcucaguacaggau

SEQ ID NO: 12427 - RNA, 23 nt, Homo sapiens
uggugcggagagggcccacagug

SEQ ID NO: 12428 - RNA, 22 nt, Homo sapiens
ugcggggcuagggcuaacagca

SEQ ID NO: 12429 - RNA, 22 nt, Homo sapiens
aggcagcgggguguaguggaua

SEQ ID NO: 12430 - RNA, 21 nt, Homo sapiens
aaggcagggcccccgcucccc

SEQ ID NO: 12431 - RNA, 23 nt, Homo sapiens
cacccggcugugugcacaugugc

SEQ ID NO: 12432 - RNA, 24 nt, Homo sapiens
agccuggaagcuggagccugcagu

SEQ ID NO: 12433 - RNA, 23 nt, Homo sapiens
ucuggcuccgugucuucacuccc

SEQ ID NO: 12434 - RNA, 22 nt, Homo sapiens
ucaggccaggcacaguggcuca

SEQ ID NO: 12435 - RNA, 21 nt, Homo sapiens
acuggacuuggagucagaagg

SEQ ID NO: 12436 - RNA, 23 nt, Homo sapiens
uacuccagagggcgucacucaug

SEQ ID NO: 12437 - RNA, 25 nt, Homo sapiens
aggggugguguugggacagcuccgu

SEQ ID NO: 12438 - RNA, 22 nt, Homo sapiens
gguggcccggccgugccugagg

SEQ ID NO: 12439 - RNA, 22 nt, Homo sapiens
ugagaacugaauuccauggguu

SEQ ID NO: 12440 - RNA, 22 nt, Homo sapiens
uggcaguguauuguuagcuggu

SEQ ID NO: 12441 - RNA, 22 nt, Homo sapiens
auauaauacaaccugcuaagug

SEQ ID NO: 12442 - RNA, 21 nt, Homo sapiens
aagccugcccggcuccucggg

SEQ ID NO: 12443 - RNA, 22 nt, Homo sapiens
aggcagcgggguguaguggaua

SEQ ID NO: 12444 - RNA, 21 nt, Homo sapiens
uggcagggaggcugggagggg

SEQ ID NO: 12445 - RNA, 22 nt, Homo sapiens
uucuggaauucugugugaggga

SEQ ID NO: 12446 - RNA, 22 nt, Homo sapiens
aagcccuuaccccaaaaagcau

SEQ ID NO: 12447 - RNA, 22 nt, Homo sapiens
cgcaggggccgggugcucaccg

SEQ ID NO: 12448 - RNA, 22 nt, Homo sapiens
agucauuggaggguuugagcag

SEQ ID NO: 12449 - RNA, 21 nt, Homo sapiens
cgcgggugcuuacugacccuu

SEQ ID NO: 12450 - RNA, 21 nt, Homo sapiens
gcccuccgcccgugcaccccg

SEQ ID NO: 12451 - RNA, 21 nt, Homo sapiens
cggcggggacggcgauugguc

SEQ ID NO: 12452 - RNA, 22 nt, Homo sapiens
aagcugccaguugaagaacugu

SEQ ID NO: 12453 - RNA, 22 nt, Homo sapiens
uuauaaagcaaugagacugauu

SEQ ID NO: 12454 - RNA, 23 nt, Homo sapiens
uucucgaggaaagaagcacuuuc

SEQ ID NO: 12455 - RNA, 25 nt, Homo sapiens
ggcggagggaaguagguccguuggu

SEQ ID NO: 12456 - RNA, 22 nt, Homo sapiens
aggcggggcgccgcgggaccgc

SEQ ID NO: 12457 - RNA, 22 nt, Homo sapiens
ugcggggcuagggcuaacagca

SEQ ID NO: 12458 - RNA, 21 nt, Homo sapiens
uaggacacauggucuacuucu

SEQ ID NO: 12459 - RNA, 18 nt, Homo sapiens
uugagaaggaggcugcug

SEQ ID NO: 12460 - RNA, 18 nt, Homo sapiens
gcaugggugguucagugg

SEQ ID NO: 12461 - RNA, 23 nt, Homo sapiens
ucuggcuccgugucuucacuccc

SEQ ID NO: 12462 - RNA, 18 nt, Homo sapiens
ugaggcaguagauugaau

SEQ ID NO: 12463 - RNA, 23 nt, Homo sapiens
uaaggugcaucuagugcagauag

SEQ ID NO: 12464 - RNA, 20 nt, Homo sapiens
ccuccugcccuccuugcugu

SEQ ID NO: 12465 - RNA, 21 nt, Homo sapiens
ucccacguuguggcccagcag

SEQ ID NO: 12466 - RNA, 21 nt, Homo sapiens
ccgucgccgccacccgagccg

SEQ ID NO: 12467 - RNA, 22 nt, Homo sapiens
ucggccugaccacccaccccac

SEQ ID NO: 12468 - RNA, 23 nt, Homo sapiens
cggcccgggcugcugcuguuccu

SEQ ID NO: 12469 - RNA, 22 nt, Homo sapiens
aaaagcuggguugagagggcga

SEQ ID NO: 12470 - RNA, 22 nt, Homo sapiens
aaaagcuggguugagagggcaa

SEQ ID NO: 12471 - RNA, 20 nt, Homo sapiens
aaaagcuggguugagagggu

SEQ ID NO: 12472 - RNA, 19 nt, Homo sapiens
aaaagcuggguugagagga

SEQ ID NO: 12473 - RNA, 19 nt, Homo sapiens
aggcugcggaauucaggac

SEQ ID NO: 12474 - RNA, 23 nt, Homo sapiens
cacccggcugugugcacaugugc

SEQ ID NO: 12475 - RNA, 23 nt, Homo sapiens
ucuggcuccgugucuucacuccc

SEQ ID NO: 12476 - RNA, 22 nt, Homo sapiens
cauugcacuugucucggucuga

SEQ ID NO: 12477 - RNA, 21 nt, Homo sapiens
agggcccccccucaauccugu

SEQ ID NO: 12478 - RNA, 22 nt, Homo sapiens
agaggcuggccgugaugaauuc

SEQ ID NO: 12479 - RNA, 23 nt, Homo sapiens
uagcagcgggaacaguucugcag

SEQ ID NO: 12480 - RNA, 19 nt, Homo sapiens
aggcugcggaauucaggac

SEQ ID NO: 12481 - RNA, 21 nt, Homo sapiens
uggcagggaggcugggagggg

SEQ ID NO: 12482 - RNA, 22 nt, Homo sapiens
uggagagaaaggcaguuccuga

SEQ ID NO: 12483 - RNA, 21 nt, Homo sapiens
cggcggggacggcgauugguc

SEQ ID NO: 12484 - RNA, 23 nt, Homo sapiens
ugagcgccucgacgacagagccg

SEQ ID NO: 12485 - RNA, 19 nt, Homo sapiens
aggcugcggaauucaggac

SEQ ID NO: 12486 - RNA, 22 nt, Homo sapiens
aggcggggcgccgcgggaccgc

SEQ ID NO: 12487 - RNA, 22 nt, Homo sapiens
ugcggggcuagggcuaacagca

SEQ ID NO: 12488 - RNA, 22 nt, Homo sapiens
caaagugccucccuuuagagug

SEQ ID NO: 12489 - RNA, 24 nt, Homo sapiens
uggggagcugaggcucugggggug

SEQ ID NO: 12490 - RNA, 21 nt, Homo sapiens
ccgucgccgccacccgagccg

SEQ ID NO: 12491 - RNA, 22 nt, Homo sapiens
uggacggagaacugauaagggu

SEQ ID NO: 12492 - RNA, 21 nt, Homo sapiens
aucacauugccagggauuucc

SEQ ID NO: 12493 - RNA, 21 nt, Homo sapiens
aucacauugccagggauuacc

SEQ ID NO: 12494 - RNA, 22 nt, Homo sapiens
ugaaggucuacugugugccagg

SEQ ID NO: 12495 - RNA, 19 nt, Homo sapiens
ugagcugcuguaccaaaau

SEQ ID NO: 12496 - RNA, 19 nt, Homo sapiens
aagcagcugccucugaggc

SEQ ID NO: 12497 - RNA, 22 nt, Homo sapiens
uauugcacucgucccggccucc

SEQ ID NO: 12498 - RNA, 17 nt, Homo sapiens
gugggggagaggcuguc

SEQ ID NO: 12499 - RNA, 18 nt, Homo sapiens
cagggaggugaaugugau

SEQ ID NO: 12500 - RNA, 21 nt, Homo sapiens
gcccuccgcccgugcaccccg

SEQ ID NO: 12501 - RNA, 21 nt, Homo sapiens
cggcggggacggcgauugguc

SEQ ID NO: 12502 - RNA, 20 nt, Homo sapiens
guccgcucggcgguggccca

SEQ ID NO: 12503 - RNA, 22 nt, Homo sapiens
gucccucuccaaaugugucuug

SEQ ID NO: 12504 - RNA, 22 nt, Homo sapiens
aggcggggcgccgcgggaccgc

SEQ ID NO: 12505 - RNA, 24 nt, Homo sapiens
uggggagcugaggcucugggggug

SEQ ID NO: 12506 - RNA, 18 nt, Homo sapiens
cgggcguggugguggggg

SEQ ID NO: 12507 - RNA, 21 nt, Homo sapiens
uccugcgcgucccagaugccc

SEQ ID NO: 12508 - RNA, 21 nt, Homo sapiens
cggcggggacggcgauugguc

SEQ ID NO: 12509 - RNA, 22 nt, Homo sapiens
cgcaggggccgggugcucaccg

SEQ ID NO: 12510 - RNA, 22 nt, Homo sapiens
cauugcacuugucucggucuga

SEQ ID NO: 12511 - RNA, 22 nt, Homo sapiens
aggcggggcgccgcgggaccgc

SEQ ID NO: 12512 - RNA, 22 nt, Homo sapiens
ugcggggcuagggcuaacagca

SEQ ID NO: 12513 - RNA, 22 nt, Homo sapiens
aggcagcgggguguaguggaua

SEQ ID NO: 12514 - RNA, 23 nt, Homo sapiens
uaaggugcaucuagugcaguuag

SEQ ID NO: 12515 - RNA, 21 nt, Homo sapiens
cggcggggacggcgauugguc

SEQ ID NO: 12516 - RNA, 21 nt, Homo sapiens
caagucacuagugguuccguu

SEQ ID NO: 12517 - RNA, 22 nt, Homo sapiens
aggcggggcgccgcgggaccgc

SEQ ID NO: 12518 - RNA, 23 nt, Homo sapiens
uggugcggagagggcccacagug

SEQ ID NO: 12519 - RNA, 22 nt, Homo sapiens
ugcggggcuagggcuaacagca

SEQ ID NO: 12520 - RNA, 23 nt, Homo sapiens
ucugcucauaccccaugguuucu

SEQ ID NO: 12521 - RNA, 21 nt, Homo sapiens
cgcgggugcuuacugacccuu

SEQ ID NO: 12522 - RNA, 21 nt, Homo sapiens
uaaagugcugacagugcagau

SEQ ID NO: 12523 - RNA, 17 nt, Homo sapiens
ucccaccgcugccaccc

SEQ ID NO: 12524 - RNA, 22 nt, Homo sapiens
acagcaggcacagacaggcagu

SEQ ID NO: 12525 - RNA, 22 nt, Homo sapiens
gccugcugggguggaaccuggu

SEQ ID NO: 12526 - RNA, 19 nt, Homo sapiens
aggcugcggaauucaggac

SEQ ID NO: 12527 - RNA, 22 nt, Homo sapiens
ugugcgcagggagaccucuccc

SEQ ID NO: 12528 - RNA, 22 nt, Homo sapiens
ugugcgcagggagaccucuccc

SEQ ID NO: 12529 - RNA, 18 nt, Homo sapiens
ucagcuggcccucauuuc

SEQ ID NO: 12530 - RNA, 22 nt, Homo sapiens
uggagugugacaaugguguuug

SEQ ID NO: 12531 - RNA, 20 nt, Homo sapiens
ccccagggcgacgcggcggg

SEQ ID NO: 12532 - RNA, 23 nt, Homo sapiens
ucucacacagaaaucgcacccgu

SEQ ID NO: 12533 - RNA, 22 nt, Homo sapiens
aucacacaaaggcaacuuuugu

SEQ ID NO: 12534 - RNA, 22 nt, Homo sapiens
caagaaccucaguugcuuuugu

SEQ ID NO: 12535 - RNA, 21 nt, Homo sapiens
cuucuugugcucuaggauugu

SEQ ID NO: 12536 - RNA, 21 nt, Homo sapiens
agagaagaagaucagccugca

SEQ ID NO: 12537 - RNA, 18 nt, Homo sapiens
uugagaaggaggcugcug

SEQ ID NO: 12538 - RNA, 22 nt, Homo sapiens
ucucccaacccuuguaccagug

SEQ ID NO: 12539 - RNA, 22 nt, Homo sapiens
caaagaauucuccuuuugggcu

SEQ ID NO: 12540 - RNA, 21 nt, Homo sapiens
caagucacuagugguuccguu

SEQ ID NO: 12541 - RNA, 22 nt, Homo sapiens
uguaaacauccuacacucagcu

SEQ ID NO: 12542 - RNA, 21 nt, Homo sapiens
ucacuccucuccucccgucuu

SEQ ID NO: 12543 - RNA, 22 nt, Homo sapiens
aaacauucgcggugcacuucuu

SEQ ID NO: 12544 - RNA, 23 nt, Homo sapiens
aggaagcccuggaggggcuggag

SEQ ID NO: 12545 - RNA, 21 nt, Homo sapiens
uggaggagaaggaaggugaug

SEQ ID NO: 12546 - RNA, 20 nt, Homo sapiens
guagaggagauggcgcaggg

SEQ ID NO: 12547 - RNA, 22 nt, Homo sapiens
ucgugucuuguguugcagccgg

SEQ ID NO: 12548 - RNA, 21 nt, Homo sapiens
cggcggggacggcgauugguc

SEQ ID NO: 12549 - RNA, 22 nt, Homo sapiens
aggcggggcgccgcgggaccgc

SEQ ID NO: 12550 - RNA, 22 nt, Homo sapiens
uggagugugacaaugguguuug

SEQ ID NO: 12551 - RNA, 18 nt, Homo sapiens
uugagaaggaggcugcug

SEQ ID NO: 12552 - RNA, 21 nt, Homo sapiens
auguaugugugcaugugcaug

SEQ ID NO: 12553 - RNA, 24 nt, Homo sapiens
aauccuuggaaccuaggugugagu

SEQ ID NO: 12554 - RNA, 23 nt, Homo sapiens
uucauuugguauaaaccgcgauu

SEQ ID NO: 12555 - RNA, 23 nt, Homo sapiens
aucccuugcaggggcuguugggu

SEQ ID NO: 12556 - RNA, 23 nt, Homo sapiens
ugucacucggcucggcccacuac

SEQ ID NO: 12557 - RNA, 21 nt, Homo sapiens
uccuucugcuccgucccccag

SEQ ID NO: 12558 - RNA, 22 nt, Homo sapiens
agaaggaaauugaauucauuua

SEQ ID NO: 12559 - RNA, 18 nt, Homo sapiens
uccagugcccuccucucc

SEQ ID NO: 12560 - RNA, 22 nt, Homo sapiens
uggagagaaaggcaguuccuga

SEQ ID NO: 12561 - RNA, 23 nt, Homo sapiens
caacggaaucccaaaagcagcug

SEQ ID NO: 12562 - RNA, 22 nt, Homo sapiens
ugggucuuugcgggcgagauga

SEQ ID NO: 12563 - RNA, 23 nt, Homo sapiens
uaauacugccggguaaugaugga

SEQ ID NO: 12564 - RNA, 21 nt, Homo sapiens
ccaccaccgugucugacacuu

SEQ ID NO: 12565 - RNA, 22 nt, Homo sapiens
uguaaacauccucgacuggaag

SEQ ID NO: 12566 - RNA, 22 nt, Homo sapiens
uguaaacauccccgacuggaag

SEQ ID NO: 12567 - RNA, 22 nt, Homo sapiens
uguaaacauccuugacuggaag

SEQ ID NO: 12568 - RNA, 23 nt, Homo sapiens
aagugccgccaucuuuugagugu

SEQ ID NO: 12569 - RNA, 21 nt, Homo sapiens
auccuugcuaucugggugcua

SEQ ID NO: 12570 - RNA, 23 nt, Homo sapiens
agugccugagggaguaagagccc

SEQ ID NO: 12571 - RNA, 21 nt, Homo sapiens
aggguaagcugaaccucugau

SEQ ID NO: 12572 - RNA, 23 nt, Homo sapiens
aguauguucuuccaggacagaac

SEQ ID NO: 12573 - RNA, 21 nt, Homo sapiens
guggcugcacucacuuccuuc

SEQ ID NO: 12574 - RNA, 21 nt, Homo sapiens
ccuggaaacacugagguugug

SEQ ID NO: 12575 - RNA, 22 nt, Homo sapiens
ccucuuccccuugucucuccag

SEQ ID NO: 12576 - RNA, 23 nt, Homo sapiens
cuggagauauggaagagcugugu

SEQ ID NO: 12577 - RNA, 22 nt, Homo sapiens
caaucacuaacuccacugccau

SEQ ID NO: 12578 - RNA, 22 nt, Homo sapiens
aaucacuaaccacacggccagg

SEQ ID NO: 12579 - RNA, 22 nt, Homo sapiens
aacuguuugcagaggaaacuga

SEQ ID NO: 12580 - RNA, 21 nt, Homo sapiens
uugaaaggcuauuucuugguc

SEQ ID NO: 12581 - RNA, 20 nt, Homo sapiens
auggagauagauauagaaau

SEQ ID NO: 12582 - RNA, 22 nt, Homo sapiens
acuccagccccacagccucagc

SEQ ID NO: 12583 - RNA, 20 nt, Homo sapiens
guagaggagauggcgcaggg

SEQ ID NO: 12584 - RNA, 21 nt, Homo sapiens
agaggauacccuuuguauguu

SEQ ID NO: 12585 - RNA, 22 nt, Homo sapiens
ccucuuccccuugucucuccag

SEQ ID NO: 12586 - RNA, 23 nt, Homo sapiens
caagucuuauuugagcaccuguu

SEQ ID NO: 12587 - RNA, 22 nt, Homo sapiens
uggguggucuggagauuugugc

SEQ ID NO: 12588 - RNA, 21 nt, Homo sapiens
cugaccuaugaauugacagcc

SEQ ID NO: 12589 - RNA, 21 nt, Homo sapiens
augaccuaugaauugacagac

SEQ ID NO: 12590 - RNA, 24 nt, Homo sapiens
aauccuuggaaccuaggugugagu

SEQ ID NO: 12591 - RNA, 21 nt, Homo sapiens
acuggacuuggagucagaagg

SEQ ID NO: 12592 - RNA, 21 nt, Homo sapiens
auccuugcuaucugggugcua

SEQ ID NO: 12593 - RNA, 20 nt, Homo sapiens
guagaggagauggcgcaggg

SEQ ID NO: 12594 - RNA, 22 nt, Homo sapiens
ccucuuccccuugucucuccag

SEQ ID NO: 12595 - RNA, 22 nt, Homo sapiens
acucggcguggcgucggucgug

SEQ ID NO: 12596 - RNA, 18 nt, Homo sapiens
cagggaggugaaugugau

SEQ ID NO: 12597 - RNA, 22 nt, Homo sapiens
cucggcgcggggcgcgggcucc

SEQ ID NO: 12598 - RNA, 23 nt, Homo sapiens
ucuggcuccgugucuucacuccc

SEQ ID NO: 12599 - RNA, 22 nt, Homo sapiens
uuggggaaacggccgcugagug

SEQ ID NO: 12600 - RNA, 21 nt, Homo sapiens
gccccugggccuauccuagaa

SEQ ID NO: 12601 - RNA, 22 nt, Homo sapiens
ucaggcucaguccccucccgau

SEQ ID NO: 12602 - RNA, 22 nt, Homo sapiens
aguggggaacccuuccaugagg

SEQ ID NO: 12603 - RNA, 25 nt, Homo sapiens
aggggugguguugggacagcuccgu

SEQ ID NO: 12604 - RNA, 22 nt, Homo sapiens
uccgagccugggucucccucuu

SEQ ID NO: 12605 - RNA, 22 nt, Homo sapiens
gucccucuccaaaugugucuug

SEQ ID NO: 12606 - RNA, 24 nt, Homo sapiens
ugccugggucucuggccugcgcgu

SEQ ID NO: 12607 - RNA, 21 nt, Homo sapiens
uggaggagaaggaaggugaug

SEQ ID NO: 12608 - RNA, 20 nt, Homo sapiens
ggggagcuguggaagcagua

SEQ ID NO: 12609 - RNA, 21 nt, Homo sapiens
ucguggccuggucuccauuau

SEQ ID NO: 12610 - RNA, 22 nt, Homo sapiens
ugagccccugugccgcccccag

SEQ ID NO: 12611 - RNA, 18 nt, Homo sapiens
cgggcguggugguggggg

SEQ ID NO: 12612 - RNA, 24 nt, Homo sapiens
uuuggcaaugguagaacucacacu

SEQ ID NO: 12613 - RNA, 21 nt, Homo sapiens
cggcggggacggcgauugguc

SEQ ID NO: 12614 - RNA, 21 nt, Homo sapiens
cggcggggacggcgauugguc

SEQ ID NO: 12615 - RNA, 19 nt, Homo sapiens
agcugucugaaaaugucuu

SEQ ID NO: 12616 - RNA, 22 nt, Homo sapiens
aggcggggcgccgcgggaccgc

SEQ ID NO: 12617 - RNA, 22 nt, Homo sapiens
aggcggggcgccgcgggaccgc

SEQ ID NO: 12618 - RNA, 20 nt, Homo sapiens
accaggaggcugaggccccu

SEQ ID NO: 12619 - RNA, 22 nt, Homo sapiens
ugcggggcuagggcuaacagca

SEQ ID NO: 12620 - RNA, 22 nt, Homo sapiens
ugcggggcuagggcuaacagca

SEQ ID NO: 12621 - RNA, 22 nt, Homo sapiens
ugcaacuuaccugagucauuga

SEQ ID NO: 12622 - RNA, 22 nt, Homo sapiens
ccucuuccccuugucucuccag

SEQ ID NO: 12623 - RNA, 21 nt, Homo sapiens
gcccuccgcccgugcaccccg

SEQ ID NO: 12624 - RNA, 23 nt, Homo sapiens
ucuggcuccgugucuucacuccc

SEQ ID NO: 12625 - RNA, 21 nt, Homo sapiens
cggcggggacggcgauugguc

SEQ ID NO: 12626 - RNA, 19 nt, Homo sapiens
accgugcaaagguagcaua

SEQ ID NO: 12627 - RNA, 25 nt, Homo sapiens
ggcggagggaaguagguccguuggu

SEQ ID NO: 12628 - RNA, 22 nt, Homo sapiens
aggcggggcgccgcgggaccgc

SEQ ID NO: 12629 - RNA, 22 nt, Homo sapiens
auccgcgcucugacucucugcc

SEQ ID NO: 12630 - RNA, 21 nt, Homo sapiens
uugcucacuguucuucccuag

SEQ ID NO: 12631 - RNA, 22 nt, Homo sapiens
agaaggaaauugaauucauuua

SEQ ID NO: 12632 - RNA, 22 nt, Homo sapiens
uggagagaaaggcaguuccuga

SEQ ID NO: 12633 - RNA, 21 nt, Homo sapiens
cggcggggacggcgauugguc

SEQ ID NO: 12634 - RNA, 22 nt, Homo sapiens
cccugugcccggcccacuucug

SEQ ID NO: 12635 - RNA, 23 nt, Homo sapiens
uaagugcuuccauguuuugguga

SEQ ID NO: 12636 - RNA, 23 nt, Homo sapiens
uaagugcuuccauguuuuaguag

SEQ ID NO: 12637 - RNA, 23 nt, Homo sapiens
uaagugcuuccauguuucagugg

SEQ ID NO: 12638 - RNA, 23 nt, Homo sapiens
uaagugcuuccauguuugagugu

SEQ ID NO: 12639 - RNA, 17 nt, Homo sapiens
uaagugcuuccaugcuu

SEQ ID NO: 12640 - RNA, 20 nt, Homo sapiens
ccucugggcccuuccuccag

SEQ ID NO: 12641 - RNA, 22 nt, Homo sapiens
ucucugggccugugucuuaggc

SEQ ID NO: 12642 - RNA, 23 nt, Homo sapiens
ucccccaggugugauucugauuu

SEQ ID NO: 12643 - RNA, 23 nt, Homo sapiens
aaagugcugcgacauuugagcgu

SEQ ID NO: 12644 - RNA, 23 nt, Homo sapiens
gaagugcuucgauuuuggggugu

SEQ ID NO: 12645 - RNA, 23 nt, Homo sapiens
uagcagcgggaacaguucugcag

SEQ ID NO: 12646 - RNA, 22 nt, Homo sapiens
aagugcugucauagcugagguc

SEQ ID NO: 12647 - RNA, 22 nt, Homo sapiens
aaagugcuucccuuuggacugu

SEQ ID NO: 12648 - RNA, 21 nt, Homo sapiens
aaagugcuuccuuuuagaggg

SEQ ID NO: 12649 - RNA, 22 nt, Homo sapiens
aaagugcuuccuuuuagagggu

SEQ ID NO: 12650 - RNA, 22 nt, Homo sapiens
aaagugcuucucuuuggugggu

SEQ ID NO: 12651 - RNA, 21 nt, Homo sapiens
aaagugcuuccuuuuugaggg

SEQ ID NO: 12652 - RNA, 25 nt, Homo sapiens
aggggugguguugggacagcuccgu

SEQ ID NO: 12653 - RNA, 24 nt, Homo sapiens
acugggggcuuucgggcucugcgu

SEQ ID NO: 12654 - RNA, 22 nt, Homo sapiens
aggcggggcgccgcgggaccgc

SEQ ID NO: 12655 - RNA, 23 nt, Homo sapiens
aggaagcccuggaggggcuggag

SEQ ID NO: 12656 - RNA, 23 nt, Homo sapiens
ucugcucauaccccaugguuucu

SEQ ID NO: 12657 - RNA, 20 nt, Homo sapiens
ggggagcuguggaagcagua

SEQ ID NO: 12658 - RNA, 22 nt, Homo sapiens
ucuucucuguuuuggccaugug

SEQ ID NO: 12659 - RNA, 22 nt, Homo sapiens
acccgucccguucguccccgga

SEQ ID NO: 12660 - RNA, 17 nt, Homo sapiens
ucccaccgcugccaccc

SEQ ID NO: 12661 - RNA, 17 nt, Homo sapiens
ucgccuccuccucuccc

SEQ ID NO: 12662 - RNA, 22 nt, Homo sapiens
acucggcguggcgucggucgug

SEQ ID NO: 12663 - RNA, 23 nt, Homo sapiens
cggcccgggcugcugcuguuccu

SEQ ID NO: 12664 - RNA, 22 nt, Homo sapiens
uggagagaaaggcaguuccuga

SEQ ID NO: 12665 - RNA, 21 nt, Homo sapiens
cggcggggacggcgauugguc

SEQ ID NO: 12666 - RNA, 23 nt, Homo sapiens
ucggggaucaucaugucacgaga

SEQ ID NO: 12667 - RNA, 19 nt, Homo sapiens
gggcgccugugaucccaac

SEQ ID NO: 12668 - RNA, 22 nt, Homo sapiens
aggcggggcgccgcgggaccgc

SEQ ID NO: 12669 - RNA, 22 nt, Homo sapiens
ugcggggcuagggcuaacagca

SEQ ID NO: 12670 - RNA, 21 nt, Homo sapiens
uggaggagaaggaaggugaug

SEQ ID NO: 12671 - RNA, 20 nt, Homo sapiens
ggggagcuguggaagcagua

SEQ ID NO: 12672 - RNA, 22 nt, Homo sapiens
uauugcacucgucccggccucc

SEQ ID NO: 12673 - RNA, 21 nt, Homo sapiens
gugccagcugcagugggggag

SEQ ID NO: 12674 - RNA, 22 nt, Homo sapiens
uggagagaaaggcaguuccuga

SEQ ID NO: 12675 - RNA, 22 nt, Homo sapiens
uggcucaguucagcaggaacag

SEQ ID NO: 12676 - RNA, 22 nt, Homo sapiens
aauugcacuuuagcaaugguga

SEQ ID NO: 12677 - RNA, 22 nt, Homo sapiens
ugauugguacgucuguggguag

SEQ ID NO: 12678 - RNA, 20 nt, Homo sapiens
accaggaggcugaggccccu

SEQ ID NO: 12679 - RNA, 22 nt, Homo sapiens
ugcggggcuagggcuaacagca

SEQ ID NO: 12680 - RNA, 22 nt, Homo sapiens
ugcggggcuagggcuaacagca

SEQ ID NO: 12681 - RNA, 22 nt, Homo sapiens
auccgcgcucugacucucugcc

SEQ ID NO: 12682 - RNA, 23 nt, Homo sapiens
ucaaaugcucagacuccuguggu

SEQ ID NO: 12683 - RNA, 21 nt, Homo sapiens
aagugaucuaaaggccuacau

SEQ ID NO: 12684 - RNA, 21 nt, Homo sapiens
ucgaggagcucacagucuagu

SEQ ID NO: 12685 - RNA, 22 nt, Homo sapiens
uaaugccccuaaaaauccuuau

SEQ ID NO: 12686 - RNA, 20 nt, Homo sapiens
guccgcucggcgguggccca

SEQ ID NO: 12687 - RNA, 23 nt, Homo sapiens
uacccuguagauccgaauuugug

SEQ ID NO: 12688 - RNA, 22 nt, Homo sapiens
ccucuuccccuugucucuccag

SEQ ID NO: 12689 - RNA, 21 nt, Homo sapiens
gcccuccgcccgugcaccccg

SEQ ID NO: 12690 - RNA, 22 nt, Homo sapiens
uggagagaaaggcaguuccuga

SEQ ID NO: 12691 - RNA, 21 nt, Homo sapiens
cggcggggacggcgauugguc

SEQ ID NO: 12692 - RNA, 23 nt, Homo sapiens
caacggaaucccaaaagcagcug

SEQ ID NO: 12693 - RNA, 23 nt, Homo sapiens
ugaggggcagagagcgagacuuu

SEQ ID NO: 12694 - RNA, 22 nt, Homo sapiens
agaggcuggccgugaugaauuc

SEQ ID NO: 12695 - RNA, 22 nt, Homo sapiens
agaggcuggccgugaugaauuc

SEQ ID NO: 12696 - RNA, 21 nt, Homo sapiens
auccuugcuaucugggugcua

SEQ ID NO: 12697 - RNA, 20 nt, Homo sapiens
agaccauggguucucauugu

SEQ ID NO: 12698 - RNA, 19 nt, Homo sapiens
aggcugcggaauucaggac

SEQ ID NO: 12699 - RNA, 22 nt, Homo sapiens
aggcggggcgccgcgggaccgc

SEQ ID NO: 12700 - RNA, 22 nt, Homo sapiens
ugcggggcuagggcuaacagca

SEQ ID NO: 12701 - RNA, 22 nt, Homo sapiens
acuccagccccacagccucagc

SEQ ID NO: 12702 - RNA, 20 nt, Homo sapiens
ggggagcuguggaagcagua

SEQ ID NO: 12703 - RNA, 22 nt, Homo sapiens
ugugcgcagggagaccucuccc

SEQ ID NO: 12704 - RNA, 22 nt, Homo sapiens
gguccagaggggagauagguuc

SEQ ID NO: 12705 - RNA, 21 nt, Homo sapiens
ccaccaccgugucugacacuu

SEQ ID NO: 12706 - RNA, 21 nt, Homo sapiens
aucauagaggaaaauccacgu

SEQ ID NO: 12707 - RNA, 22 nt, Homo sapiens
aucauagaggaaaauccauguu

SEQ ID NO: 12708 - RNA, 19 nt, Homo sapiens
aggcugcggaauucaggac

SEQ ID NO: 12709 - RNA, 25 nt, Homo sapiens
aggggugguguugggacagcuccgu

SEQ ID NO: 12710 - RNA, 23 nt, Homo sapiens
aaacucuacuuguccuucugagu

SEQ ID NO: 12711 - RNA, 21 nt, Homo sapiens
guggcugcacucacuuccuuc

SEQ ID NO: 12712 - RNA, 20 nt, Homo sapiens
ggggagcuguggaagcagua

SEQ ID NO: 12713 - RNA, 21 nt, Homo sapiens
uuaggccgcagaucuggguga

SEQ ID NO: 12714 - RNA, 23 nt, Homo sapiens
ugaggggcagagagcgagacuuu

SEQ ID NO: 12715 - RNA, 23 nt, Homo sapiens
gaacgcgcuucccuauagagggu

SEQ ID NO: 12716 - RNA, 19 nt, Homo sapiens
aggcugcggaauucaggac

SEQ ID NO: 12717 - RNA, 22 nt, Homo sapiens
uggugguuuacaaaguaauuca

SEQ ID NO: 12718 - RNA, 22 nt, Homo sapiens
augggugaauuuguagaaggau

SEQ ID NO: 12719 - RNA, 23 nt, Homo sapiens
uauggcuuuuuauuccuauguga

SEQ ID NO: 12720 - RNA, 23 nt, Homo sapiens
caaagugcuuacagugcagguag

SEQ ID NO: 12721 - RNA, 22 nt, Homo sapiens
uacccagagcaugcagugugaa

SEQ ID NO: 12722 - RNA, 22 nt, Homo sapiens
uuggggaaacggccgcugagug

SEQ ID NO: 12723 - RNA, 21 nt, Homo sapiens
aggggugcuaucugugauuga

SEQ ID NO: 12724 - RNA, 23 nt, Homo sapiens
ucccccaggugugauucugauuu

SEQ ID NO: 12725 - RNA, 22 nt, Homo sapiens
uacugcagacguggcaaucaug

SEQ ID NO: 12726 - RNA, 21 nt, Homo sapiens
uacugcagacaguggcaauca

SEQ ID NO: 12727 - RNA, 22 nt, Homo sapiens
aagugcugucauagcugagguc

SEQ ID NO: 12728 - RNA, 21 nt, Homo sapiens
uuggccacaauggguuagaac

SEQ ID NO: 12729 - RNA, 24 nt, Homo sapiens
acugggggcuuucgggcucugcgu

SEQ ID NO: 12730 - RNA, 24 nt, Homo sapiens
ugccugggucucuggccugcgcgu

SEQ ID NO: 12731 - RNA, 23 nt, Homo sapiens
uuuggcacuagcacauuuuugcu

SEQ ID NO: 12732 - RNA, 21 nt, Homo sapiens
ugcaggaccaagaugagcccu

SEQ ID NO: 12733 - RNA, 21 nt, Homo sapiens
uggacugcccugaucuggaga

SEQ ID NO: 12734 - RNA, 22 nt, Homo sapiens
cgcaggggccgggugcucaccg

SEQ ID NO: 12735 - RNA, 22 nt, Homo sapiens
cucccacugcuucacuugacua

SEQ ID NO: 12736 - RNA, 23 nt, Homo sapiens
agcuacauugucugcuggguuuc

SEQ ID NO: 12737 - RNA, 21 nt, Homo sapiens
aggggugcuaucugugauuga

SEQ ID NO: 12738 - RNA, 22 nt, Homo sapiens
uugggaucauuuugcauccaua

SEQ ID NO: 12739 - RNA, 22 nt, Homo sapiens
ggagaaauuauccuuggugugu

SEQ ID NO: 12740 - RNA, 21 nt, Homo sapiens
cacaagguauugguauuaccu

SEQ ID NO: 12741 - RNA, 23 nt, Homo sapiens
ggcagguucucacccucucuagg

SEQ ID NO: 12742 - RNA, 20 nt, Homo sapiens
accaggaggcugaggccccu

SEQ ID NO: 12743 - RNA, 23 nt, Homo sapiens
cugggaucuccggggucuugguu

SEQ ID NO: 12744 - RNA, 22 nt, Homo sapiens
ugagaccucuggguucugagcu

SEQ ID NO: 12745 - RNA, 21 nt, Homo sapiens
aaggcagggcccccgcucccc

SEQ ID NO: 12746 - RNA, 23 nt, Homo sapiens
ucaaaugcucagacuccuguggu

SEQ ID NO: 12747 - RNA, 22 nt, Homo sapiens
cuggacugagccgugcuacugg

SEQ ID NO: 12748 - RNA, 23 nt, Homo sapiens
uauggcuuuuuauuccuauguga

SEQ ID NO: 12749 - RNA, 23 nt, Homo sapiens
uauggcuuuucauuccuauguga

SEQ ID NO: 12750 - RNA, 23 nt, Homo sapiens
guguuaauuaaaccucuauuuac

SEQ ID NO: 12751 - RNA, 23 nt, Homo sapiens
uaagugcuuccauguuucagugg

SEQ ID NO: 12752 - RNA, 23 nt, Homo sapiens
gcaaagcacacggccugcagaga

SEQ ID NO: 12753 - RNA, 21 nt, Homo sapiens
gcaguccaugggcauauacac

SEQ ID NO: 12754 - RNA, 21 nt, Homo sapiens
aguuaaugaauccuggaaagu

SEQ ID NO: 12755 - RNA, 18 nt, Homo sapiens
gucccuguucaggcgcca

SEQ ID NO: 12756 - RNA, 22 nt, Homo sapiens
cugaagcucagagggcucugau

SEQ ID NO: 12757 - RNA, 20 nt, Homo sapiens
uaaagagcccuguggagaca

SEQ ID NO: 12758 - RNA, 18 nt, Homo sapiens
cagggaggugaaugugau

SEQ ID NO: 12759 - RNA, 23 nt, Homo sapiens
ucuggcuccgugucuucacuccc

SEQ ID NO: 12760 - RNA, 21 nt, Homo sapiens
cggcggggacggcgauugguc

SEQ ID NO: 12761 - RNA, 22 nt, Homo sapiens
cccugugcccggcccacuucug

SEQ ID NO: 12762 - RNA, 22 nt, Homo sapiens
aagcugccaguugaagaacugu

SEQ ID NO: 12763 - RNA, 22 nt, Homo sapiens
acacagggcuguugugaagacu

SEQ ID NO: 12764 - RNA, 21 nt, Homo sapiens
agggcccccccucaauccugu

SEQ ID NO: 12765 - RNA, 23 nt, Homo sapiens
ugaggggcagagagcgagacuuu

SEQ ID NO: 12766 - RNA, 22 nt, Homo sapiens
aacuguuugcagaggaaacuga

SEQ ID NO: 12767 - RNA, 23 nt, Homo sapiens
aggaccugcgggacaagauucuu

SEQ ID NO: 12768 - RNA, 22 nt, Homo sapiens
cgucaacacuugcugguuuccu

SEQ ID NO: 12769 - RNA, 22 nt, Homo sapiens
aggcggggcgccgcgggaccgc

SEQ ID NO: 12770 - RNA, 22 nt, Homo sapiens
ugcggggcuagggcuaacagca

SEQ ID NO: 12771 - RNA, 24 nt, Homo sapiens
uggggagcugaggcucugggggug

SEQ ID NO: 12772 - RNA, 18 nt, Homo sapiens
uugagaaggaggcugcug

SEQ ID NO: 12773 - RNA, 18 nt, Homo sapiens
acguuggcucugguggug

SEQ ID NO: 12774 - RNA, 23 nt, Homo sapiens
uaaggugcaucuagugcagauag

SEQ ID NO: 12775 - RNA, 22 nt, Homo sapiens
aagcugccaguugaagaacugu

SEQ ID NO: 12776 - RNA, 23 nt, Homo sapiens
ugagcgccucgacgacagagccg

SEQ ID NO: 12777 - RNA, 21 nt, Homo sapiens
acuggacuuggagucagaagg

SEQ ID NO: 12778 - RNA, 22 nt, Homo sapiens
acuggacuuagggucagaaggc

SEQ ID NO: 12779 - RNA, 22 nt, Homo sapiens
uucucaaggaggugucguuuau

SEQ ID NO: 12780 - RNA, 19 nt, Homo sapiens
ugagcugcuguaccaaaau

SEQ ID NO: 12781 - RNA, 22 nt, Homo sapiens
uccgagccugggucucccucuu

SEQ ID NO: 12782 - RNA, 23 nt, Homo sapiens
aucccuugcaggggcuguugggu

SEQ ID NO: 12783 - RNA, 20 nt, Homo sapiens
cggcucugggucugugggga

SEQ ID NO: 12784 - RNA, 22 nt, Homo sapiens
cugcccuggcccgagggaccga

SEQ ID NO: 12785 - RNA, 22 nt, Homo sapiens
ccucuuccccuugucucuccag

SEQ ID NO: 12786 - RNA, 17 nt, Homo sapiens
ucccaccgcugccaccc

SEQ ID NO: 12787 - RNA, 23 nt, Homo sapiens
ucuggcuccgugucuucacuccc

SEQ ID NO: 12788 - RNA, 21 nt, Homo sapiens
cggcggggacggcgauugguc

SEQ ID NO: 12789 - RNA, 22 nt, Homo sapiens
uggugggcacagaaucuggacu

SEQ ID NO: 12790 - RNA, 22 nt, Homo sapiens
uggugggccgcagaacaugugc

SEQ ID NO: 12791 - RNA, 22 nt, Homo sapiens
aggcggggcgccgcgggaccgc

SEQ ID NO: 12792 - RNA, 21 nt, Homo sapiens
uggaggagaaggaaggugaug

SEQ ID NO: 12793 - RNA, 20 nt, Homo sapiens
guagaggagauggcgcaggg

SEQ ID NO: 12794 - RNA, 23 nt, Homo sapiens
cgggucggaguuagcucaagcgg

SEQ ID NO: 12795 - RNA, 21 nt, Homo sapiens
cccggagccaggaugcagcuc

SEQ ID NO: 12796 - RNA, 18 nt, Homo sapiens
cgggcguggugguggggg

SEQ ID NO: 12797 - RNA, 22 nt, Homo sapiens
ugcuggaucagugguucgaguc

SEQ ID NO: 12798 - RNA, 22 nt, Homo sapiens
uccuucauuccaccggagucug

SEQ ID NO: 12799 - RNA, 21 nt, Homo sapiens
agggcccccccucaauccugu

SEQ ID NO: 12800 - RNA, 23 nt, Homo sapiens
ugagcgccucgacgacagagccg

SEQ ID NO: 12801 - RNA, 22 nt, Homo sapiens
ugauugguacgucuguggguag

SEQ ID NO: 12802 - RNA, 19 nt, Homo sapiens
gggcgccugugaucccaac

SEQ ID NO: 12803 - RNA, 24 nt, Homo sapiens
ugccugggucucuggccugcgcgu

SEQ ID NO: 12804 - RNA, 22 nt, Homo sapiens
ugcggggcuagggcuaacagca

SEQ ID NO: 12805 - RNA, 22 nt, Homo sapiens
ugcggggcuagggcuaacagca

SEQ ID NO: 12806 - RNA, 22 nt, Homo sapiens
aggcagcgggguguaguggaua

SEQ ID NO: 12807 - RNA, 21 nt, Homo sapiens
uaccacaggguagaaccacgg

SEQ ID NO: 12808 - RNA, 22 nt, Homo sapiens
gugugcggaaaugcuucugcua

SEQ ID NO: 12809 - RNA, 22 nt, Homo sapiens
gguccagaggggagauagguuc

SEQ ID NO: 12810 - RNA, 21 nt, Homo sapiens
ccacaccguaucugacacuuu

SEQ ID NO: 12811 - RNA, 23 nt, Homo sapiens
aucaacagacauuaauugggcgc

SEQ ID NO: 12812 - RNA, 22 nt, Homo sapiens
uggcaguguauuguuagcuggu

SEQ ID NO: 12813 - RNA, 22 nt, Homo sapiens
aacacaccugguuaaccucuuu

SEQ ID NO: 12814 - RNA, 23 nt, Homo sapiens
ucaagagcaauaacgaaaaaugu

SEQ ID NO: 12815 - RNA, 22 nt, Homo sapiens
aacacaccuauucaaggauuca

SEQ ID NO: 12816 - RNA, 23 nt, Homo sapiens
ugaggggcagagagcgagacuuu

SEQ ID NO: 12817 - RNA, 23 nt, Homo sapiens
aaugacacgaucacucccguuga

SEQ ID NO: 12818 - RNA, 23 nt, Homo sapiens
caaagcgcuucucuuuagagugu

SEQ ID NO: 12819 - RNA, 21 nt, Homo sapiens
cuccagagggaaguacuuucu

SEQ ID NO: 12820 - RNA, 21 nt, Homo sapiens
cuccagagggaugcacuuucu

SEQ ID NO: 12821 - RNA, 21 nt, Homo sapiens
caaagaggaaggucccauuac

SEQ ID NO: 12822 - RNA, 22 nt, Homo sapiens
uugugucaauaugcgaugaugu

SEQ ID NO: 12823 - RNA, 22 nt, Homo sapiens
uuuaggauaagcuugacuuuug

SEQ ID NO: 12824 - RNA, 21 nt, Homo sapiens
agagaagaagaucagccugca

SEQ ID NO: 12825 - RNA, 17 nt, Homo sapiens
ucgccuccuccucuccc

SEQ ID NO: 12826 - RNA, 22 nt, Homo sapiens
ucagugcacuacagaacuuugu

SEQ ID NO: 12827 - RNA, 22 nt, Homo sapiens
ucagugcaucacagaacuuugu

SEQ ID NO: 12828 - RNA, 21 nt, Homo sapiens
ucagugcaugacagaacuugg

SEQ ID NO: 12829 - RNA, 21 nt, Homo sapiens
uccugcgcgucccagaugccc

SEQ ID NO: 12830 - RNA, 20 nt, Homo sapiens
ccuccugcccuccuugcugu

SEQ ID NO: 12831 - RNA, 21 nt, Homo sapiens
agcuacaucuggcuacugggu

SEQ ID NO: 12832 - RNA, 22 nt, Homo sapiens
aggcagcgggguguaguggaua

SEQ ID NO: 12833 - RNA, 22 nt, Homo sapiens
ucuucucuguuuuggccaugug

SEQ ID NO: 12834 - RNA, 21 nt, Homo sapiens
uggacugcccugaucuggaga

SEQ ID NO: 12835 - RNA, 21 nt, Homo sapiens
uccugcgcgucccagaugccc

SEQ ID NO: 12836 - RNA, 21 nt, Homo sapiens
ccaguccugugccugccgccu

SEQ ID NO: 12837 - RNA, 22 nt, Homo sapiens
ugggucuuugcgggcgagauga

SEQ ID NO: 12838 - RNA, 21 nt, Homo sapiens
acuggacuuggagucagaagg

SEQ ID NO: 12839 - RNA, 23 nt, Homo sapiens
ucuuggaguaggucauugggugg

SEQ ID NO: 12840 - RNA, 21 nt, Homo sapiens
uccgguucucagggcuccacc

SEQ ID NO: 12841 - RNA, 23 nt, Homo sapiens
aggaagcccuggaggggcuggag

SEQ ID NO: 12842 - RNA, 21 nt, Homo sapiens
ucgaggagcucacagucuagu

SEQ ID NO: 12843 - RNA, 23 nt, Homo sapiens
cggcccgggcugcugcuguuccu

SEQ ID NO: 12844 - RNA, 23 nt, Homo sapiens
ugaguaccgccaugucuguuggg

SEQ ID NO: 12845 - RNA, 23 nt, Homo sapiens
ugaguaccgccaugucuguuggg

SEQ ID NO: 12846 - RNA, 19 nt, Homo sapiens
aggcugcggaauucaggac

SEQ ID NO: 12847 - RNA, 22 nt, Homo sapiens
uccgagccugggucucccucuu

SEQ ID NO: 12848 - RNA, 21 nt, Homo sapiens
uacaguacugugauaacugaa

SEQ ID NO: 12849 - RNA, 18 nt, Homo sapiens
aucccaccucugccacca

SEQ ID NO: 12850 - RNA, 22 nt, Homo sapiens
cgcaggggccgggugcucaccg

SEQ ID NO: 12851 - RNA, 21 nt, Homo sapiens
uucacaguggcuaaguucugc

SEQ ID NO: 12852 - RNA, 23 nt, Homo sapiens
gcaaagcacacggccugcagaga

SEQ ID NO: 12853 - RNA, 22 nt, Homo sapiens
auauaauacaaccugcuaagug

SEQ ID NO: 12854 - RNA, 22 nt, Homo sapiens
ccucccacacccaaggcuugca

SEQ ID NO: 12855 - RNA, 21 nt, Homo sapiens
uaauuuuauguauaagcuagu

SEQ ID NO: 12856 - RNA, 24 nt, Homo sapiens
uggggagcugaggcucugggggug

SEQ ID NO: 12857 - RNA, 23 nt, Homo sapiens
ucaaaugcucagacuccuguggu

SEQ ID NO: 12858 - RNA, 24 nt, Homo sapiens
uuuggcaaugguagaacucacacu

SEQ ID NO: 12859 - RNA, 22 nt, Homo sapiens
aacuggcccucaaagucccgcu

SEQ ID NO: 12860 - RNA, 21 nt, Homo sapiens
gugcauuguaguugcauugca

SEQ ID NO: 12861 - RNA, 22 nt, Homo sapiens
caaaaaccacaguuucuuuugc

SEQ ID NO: 12862 - RNA, 22 nt, Homo sapiens
agaaggaaauugaauucauuua

SEQ ID NO: 12863 - RNA, 22 nt, Homo sapiens
ucgugucuuguguugcagccgg

SEQ ID NO: 12864 - RNA, 22 nt, Homo sapiens
ucaggccaggcacaguggcuca

SEQ ID NO: 12865 - RNA, 22 nt, Homo sapiens
acagcaggcacagacaggcagu

SEQ ID NO: 12866 - RNA, 22 nt, Homo sapiens
gccugcugggguggaaccuggu

SEQ ID NO: 12867 - RNA, 21 nt, Homo sapiens
gugucuuuugcucugcaguca

SEQ ID NO: 12868 - RNA, 18 nt, Homo sapiens
ugcuuccuuucagagggu

SEQ ID NO: 12869 - RNA, 22 nt, Homo sapiens
aucuggagguaagaagcacuuu

SEQ ID NO: 12870 - RNA, 21 nt, Homo sapiens
aagccugcccggcuccucggg

SEQ ID NO: 12871 - RNA, 23 nt, Homo sapiens
aggaagcccuggaggggcuggag

SEQ ID NO: 12872 - RNA, 22 nt, Homo sapiens
ugcaacuuaccugagucauuga

SEQ ID NO: 12873 - RNA, 22 nt, Homo sapiens
aacccguagauccgaacuugug

SEQ ID NO: 12874 - RNA, 20 nt, Homo sapiens
ucugcaggguuugcuuugag

SEQ ID NO: 12875 - RNA, 22 nt, Homo sapiens
uggagugugacaaugguguuug

SEQ ID NO: 12876 - RNA, 21 nt, Homo sapiens
uggacugcccugaucuggaga

SEQ ID NO: 12877 - RNA, 22 nt, Homo sapiens
ucugcccccuccgcugcugcca

SEQ ID NO: 12878 - RNA, 24 nt, Homo sapiens
agcagaagcagggagguucuccca

SEQ ID NO: 12879 - RNA, 20 nt, Homo sapiens
acugccccaggugcugcugg

SEQ ID NO: 12880 - RNA, 21 nt, Homo sapiens
cggggcagcucaguacaggau

SEQ ID NO: 12881 - RNA, 22 nt, Homo sapiens
auucugcauuuuuagcaaguuc

SEQ ID NO: 12882 - RNA, 25 nt, Homo sapiens
ggcggagggaaguagguccguuggu

SEQ ID NO: 12883 - RNA, 22 nt, Homo sapiens
uggagugugacaaugguguuug

SEQ ID NO: 12884 - RNA, 24 nt, Homo sapiens
uugcagcugccugggagugacuuc

SEQ ID NO: 12885 - RNA, 19 nt, Homo sapiens
gaugaugcugcugaugcug

SEQ ID NO: 12886 - RNA, 21 nt, Homo sapiens
aauauaacacagauggccugu

SEQ ID NO: 12887 - RNA, 22 nt, Homo sapiens
uuuugcaauauguuccugaaua

SEQ ID NO: 12888 - RNA, 22 nt, Homo sapiens
uuuugcaauauguuccugaaua

SEQ ID NO: 12889 - RNA, 22 nt, Homo sapiens
agaggcuggccgugaugaauuc

SEQ ID NO: 12890 - RNA, 22 nt, Homo sapiens
ugaaacauacacgggaaaccuc

SEQ ID NO: 12891 - RNA, 20 nt, Homo sapiens
cugcaaagggaagcccuuuc

SEQ ID NO: 12892 - RNA, 20 nt, Homo sapiens
cugcaaagggaagcccuuuc

SEQ ID NO: 12893 - RNA, 20 nt, Homo sapiens
gugucugggcggacagcugc

SEQ ID NO: 12894 - RNA, 24 nt, Homo sapiens
ccagacagaauucuaugcacuuuc

SEQ ID NO: 12895 - RNA, 22 nt, Homo sapiens
ucagugcaucacagaacuuugu

SEQ ID NO: 12896 - RNA, 18 nt, Homo sapiens
ugaggcaguagauugaau

SEQ ID NO: 12897 - RNA, 22 nt, Homo sapiens
aagcugccaguugaagaacugu

SEQ ID NO: 12898 - RNA, 21 nt, Homo sapiens
uccuucugcuccgucccccag

SEQ ID NO: 12899 - RNA, 17 nt, Homo sapiens
ucgccuccuccucuccc

SEQ ID NO: 12900 - RNA, 21 nt, Homo sapiens
uccugcgcgucccagaugccc

SEQ ID NO: 12901 - RNA, 21 nt, Homo sapiens
cggcggggacggcgauugguc

SEQ ID NO: 12902 - RNA, 22 nt, Homo sapiens
uggcucaguucagcaggaacag

SEQ ID NO: 12903 - RNA, 23 nt, Homo sapiens
ugucugcccgcaugccugccucu

SEQ ID NO: 12904 - RNA, 22 nt, Homo sapiens
uaaugccccuaaaaauccuuau

SEQ ID NO: 12905 - RNA, 22 nt, Homo sapiens
aagacgggaggaaagaagggag

SEQ ID NO: 12906 - RNA, 22 nt, Homo sapiens
aggcggggcgccgcgggaccgc

SEQ ID NO: 12907 - RNA, 22 nt, Homo sapiens
ugcggggcuagggcuaacagca

SEQ ID NO: 12908 - RNA, 22 nt, Homo sapiens
ugagaccucuggguucugagcu

SEQ ID NO: 12909 - RNA, 22 nt, Homo sapiens
acccgucccguucguccccgga

SEQ ID NO: 12910 - RNA, 23 nt, Homo sapiens
ucuggcuccgugucuucacuccc

SEQ ID NO: 12911 - RNA, 21 nt, Homo sapiens
cggcggggacggcgauugguc

SEQ ID NO: 12912 - RNA, 20 nt, Homo sapiens
ccccagggcgacgcggcggg

SEQ ID NO: 12913 - RNA, 21 nt, Homo sapiens
gccccugggccuauccuagaa

SEQ ID NO: 12914 - RNA, 22 nt, Homo sapiens
uggcagugucuuagcugguugu

SEQ ID NO: 12915 - RNA, 21 nt, Homo sapiens
gcgacccacucuugguuucca

SEQ ID NO: 12916 - RNA, 21 nt, Homo sapiens
gcgacccauacuugguuucag

SEQ ID NO: 12917 - RNA, 19 nt, Homo sapiens
aggcugcggaauucaggac

SEQ ID NO: 12918 - RNA, 22 nt, Homo sapiens
aggcggggcgccgcgggaccgc

SEQ ID NO: 12919 - RNA, 22 nt, Homo sapiens
ugcggggcuagggcuaacagca

SEQ ID NO: 12920 - RNA, 22 nt, Homo sapiens
acuccagccccacagccucagc

SEQ ID NO: 12921 - RNA, 23 nt, Homo sapiens
cgggucggaguuagcucaagcgg

SEQ ID NO: 12922 - RNA, 22 nt, Homo sapiens
uauugcacucgucccggccucc

SEQ ID NO: 12923 - RNA, 18 nt, Homo sapiens
ucagcuggcccucauuuc

SEQ ID NO: 12924 - RNA, 24 nt, Homo sapiens
agccuggaagcuggagccugcagu

SEQ ID NO: 12925 - RNA, 20 nt, Homo sapiens
ucguuugccuuuuucugcuu

SEQ ID NO: 12926 - RNA, 21 nt, Homo sapiens
uugggacauacuuaugcuaaa

SEQ ID NO: 12927 - RNA, 22 nt, Homo sapiens
uggagagaaaggcaguuccuga

SEQ ID NO: 12928 - RNA, 22 nt, Homo sapiens
ucugcccccuccgcugcugcca

SEQ ID NO: 12929 - RNA, 20 nt, Homo sapiens
acugccccaggugcugcugg

SEQ ID NO: 12930 - RNA, 23 nt, Homo sapiens
ucccccaggugugauucugauuu

SEQ ID NO: 12931 - RNA, 21 nt, Homo sapiens
cggggcagcucaguacaggau

SEQ ID NO: 12932 - RNA, 25 nt, Homo sapiens
aggggugguguugggacagcuccgu

SEQ ID NO: 12933 - RNA, 24 nt, Homo sapiens
acugggggcuuucgggcucugcgu

SEQ ID NO: 12934 - RNA, 24 nt, Homo sapiens
ugccugggucucuggccugcgcgu

SEQ ID NO: 12935 - RNA, 20 nt, Homo sapiens
ggggagcuguggaagcagua

SEQ ID NO: 12936 - RNA, 17 nt, Homo sapiens
gugggggagaggcuguc

SEQ ID NO: 12937 - RNA, 18 nt, Homo sapiens
cagggaggugaaugugau

SEQ ID NO: 12938 - RNA, 18 nt, Homo sapiens
ugaggcaguagauugaau

SEQ ID NO: 12939 - RNA, 22 nt, Homo sapiens
cccugugcccggcccacuucug

SEQ ID NO: 12940 - RNA, 22 nt, Homo sapiens
uggcagugucuuagcugguugu

SEQ ID NO: 12941 - RNA, 23 nt, Homo sapiens
aggcaguguaguuagcugauugc

SEQ ID NO: 12942 - RNA, 23 nt, Homo sapiens
ucccccaggugugauucugauuu

SEQ ID NO: 12943 - RNA, 22 nt, Homo sapiens
uggcaguguauuguuagcuggu

SEQ ID NO: 12944 - RNA, 22 nt, Homo sapiens
aggcaguguauuguuagcuggc

SEQ ID NO: 12945 - RNA, 22 nt, Homo sapiens
aagugcugucauagcugagguc

SEQ ID NO: 12946 - RNA, 22 nt, Homo sapiens
ugugacagauugauaacugaaa

SEQ ID NO: 12947 - RNA, 24 nt, Homo sapiens
acugggggcuuucgggcucugcgu

SEQ ID NO: 12948 - RNA, 21 nt, Homo sapiens
ucccacguuguggcccagcag

SEQ ID NO: 12949 - RNA, 21 nt, Homo sapiens
uggaggagaaggaaggugaug

SEQ ID NO: 12950 - RNA, 20 nt, Homo sapiens
guagaggagauggcgcaggg

SEQ ID NO: 12951 - RNA, 21 nt, Homo sapiens
cggcggggacggcgauugguc

SEQ ID NO: 12952 - RNA, 21 nt, Homo sapiens
cggcggggacggcgauugguc

SEQ ID NO: 12953 - RNA, 21 nt, Homo sapiens
ccacaccguaucugacacuuu

SEQ ID NO: 12954 - RNA, 23 nt, Homo sapiens
aucaacagacauuaauugggcgc

SEQ ID NO: 12955 - RNA, 22 nt, Homo sapiens
caaaaaucucaauuacuuuugc

SEQ ID NO: 12956 - RNA, 22 nt, Homo sapiens
aggcggggcgccgcgggaccgc

SEQ ID NO: 12957 - RNA, 22 nt, Homo sapiens
aggcggggcgccgcgggaccgc

SEQ ID NO: 12958 - RNA, 22 nt, Homo sapiens
ugcggggcuagggcuaacagca

SEQ ID NO: 12959 - RNA, 22 nt, Homo sapiens
ugcggggcuagggcuaacagca

SEQ ID NO: 12960 - RNA, 21 nt, Homo sapiens
uggaggagaaggaaggugaug

SEQ ID NO: 12961 - RNA, 23 nt, Homo sapiens
ucuggcuccgugucuucacuccc

SEQ ID NO: 12962 - RNA, 23 nt, Homo sapiens
cggcccgggcugcugcuguuccu

SEQ ID NO: 12963 - RNA, 22 nt, Homo sapiens
uguaaacauccuacacucagcu

SEQ ID NO: 12964 - RNA, 23 nt, Homo sapiens
ucccccaggugugauucugauuu

SEQ ID NO: 12965 - RNA, 22 nt, Homo sapiens
uccgagccugggucucccucuu

SEQ ID NO: 12966 - RNA, 24 nt, Homo sapiens
acugggggcuuucgggcucugcgu

SEQ ID NO: 12967 - RNA, 20 nt, Homo sapiens
ggggagcuguggaagcagua

SEQ ID NO: 12968 - RNA, 21 nt, Homo sapiens
ccgucgccgccacccgagccg

SEQ ID NO: 12969 - RNA, 22 nt, Homo sapiens
uggagagaaaggcaguuccuga

SEQ ID NO: 12970 - RNA, 23 nt, Homo sapiens
uaaggugcaucuagugcaguuag

SEQ ID NO: 12971 - RNA, 21 nt, Homo sapiens
cggcggggacggcgauugguc

SEQ ID NO: 12972 - RNA, 23 nt, Homo sapiens
ucccccaggugugauucugauuu

SEQ ID NO: 12973 - RNA, 24 nt, Homo sapiens
acugggggcuuucgggcucugcgu

SEQ ID NO: 12974 - RNA, 24 nt, Homo sapiens
ugccugggucucuggccugcgcgu

SEQ ID NO: 12975 - RNA, 23 nt, Homo sapiens
aggaagcccuggaggggcuggag

SEQ ID NO: 12976 - RNA, 22 nt, Homo sapiens
ugcggggcuagggcuaacagca

SEQ ID NO: 12977 - RNA, 23 nt, Homo sapiens
cacccggcugugugcacaugugc

SEQ ID NO: 12978 - RNA, 17 nt, Homo sapiens
ucgccuccuccucuccc

SEQ ID NO: 12979 - RNA, 22 nt, Homo sapiens
acucggcguggcgucggucgug

SEQ ID NO: 12980 - RNA, 22 nt, Homo sapiens
cucggcgcggggcgcgggcucc

SEQ ID NO: 12981 - RNA, 22 nt, Homo sapiens
ucucccaacccuuguaccagug

SEQ ID NO: 12982 - RNA, 22 nt, Homo sapiens
uggagagaaaggcaguuccuga

SEQ ID NO: 12983 - RNA, 22 nt, Homo sapiens
caaagaauucuccuuuugggcu

SEQ ID NO: 12984 - RNA, 22 nt, Homo sapiens
caaagaauucuccuuuugggcu

SEQ ID NO: 12985 - RNA, 22 nt, Homo sapiens
uuauaaagcaaugagacugauu

SEQ ID NO: 12986 - RNA, 23 nt, Homo sapiens
ugucugcccgcaugccugccucu

SEQ ID NO: 12987 - RNA, 22 nt, Homo sapiens
aaaaguaauugcgaguuuuacc

SEQ ID NO: 12988 - RNA, 22 nt, Homo sapiens
aaaaguaauugugguuuuggcc

SEQ ID NO: 12989 - RNA, 22 nt, Homo sapiens
aaaaguaauugcgguuuuugcc

SEQ ID NO: 12990 - RNA, 22 nt, Homo sapiens
aaaaguaauugugguuuuugcc

SEQ ID NO: 12991 - RNA, 22 nt, Homo sapiens
aaaaguaaucgcgguuuuuguc

SEQ ID NO: 12992 - RNA, 22 nt, Homo sapiens
aaaaguaauugcggauuuugcc

SEQ ID NO: 12993 - RNA, 22 nt, Homo sapiens
aaaaguaauugcggucuuuggu

SEQ ID NO: 12994 - RNA, 21 nt, Homo sapiens
uaaaguaaauaugcaccaaaa

SEQ ID NO: 12995 - RNA, 19 nt, Homo sapiens
aggcugcggaauucaggac

SEQ ID NO: 12996 - RNA, 21 nt, Homo sapiens
ccccaccuccucucuccucag

SEQ ID NO: 12997 - RNA, 21 nt, Homo sapiens
cggcggggacggcgauugguc

SEQ ID NO: 12998 - RNA, 22 nt, Homo sapiens
uuuguucguucggcucgcguga

SEQ ID NO: 12999 - RNA, 22 nt, Homo sapiens
uggugggcacagaaucuggacu

SEQ ID NO: 13000 - RNA, 21 nt, Homo sapiens
agggggaaaguucuauagucc

SEQ ID NO: 13001 - RNA, 22 nt, Homo sapiens
uggugggccgcagaacaugugc

SEQ ID NO: 13002 - RNA, 22 nt, Homo sapiens
aggcggggcgccgcgggaccgc

SEQ ID NO: 13003 - RNA, 23 nt, Homo sapiens
aggaagcccuggaggggcuggag

SEQ ID NO: 13004 - RNA, 23 nt, Homo sapiens
uggugcggagagggcccacagug

SEQ ID NO: 13005 - RNA, 22 nt, Homo sapiens
ugcggggcuagggcuaacagca

SEQ ID NO: 13006 - RNA, 23 nt, Homo sapiens
ccugcagcgacuugauggcuucc

SEQ ID NO: 13007 - RNA, 20 nt, Homo sapiens
ucacaccugccucgcccccc

SEQ ID NO: 13008 - RNA, 21 nt, Homo sapiens
uggacugcccugaucuggaga

SEQ ID NO: 13009 - RNA, 24 nt, Homo sapiens
uugcagcugccugggagugacuuc

SEQ ID NO: 13010 - RNA, 23 nt, Homo sapiens
caaagugcuuacagugcagguag

SEQ ID NO: 13011 - RNA, 22 nt, Homo sapiens
uggagagaaaggcaguuccuga

SEQ ID NO: 13012 - RNA, 21 nt, Homo sapiens
ccaguccugugccugccgccu

SEQ ID NO: 13013 - RNA, 22 nt, Homo sapiens
uagcuuaucagacugauguuga

SEQ ID NO: 13014 - RNA, 22 nt, Homo sapiens
aacacaccugguuaaccucuuu

SEQ ID NO: 13015 - RNA, 22 nt, Homo sapiens
aacacaccuauucaaggauuca

SEQ ID NO: 13016 - RNA, 21 nt, Homo sapiens
uugaaaggcuauuucuugguc

SEQ ID NO: 13017 - RNA, 22 nt, Homo sapiens
uacugcagacguggcaaucaug

SEQ ID NO: 13018 - RNA, 21 nt, Homo sapiens
uacugcagacaguggcaauca

SEQ ID NO: 13019 - RNA, 19 nt, Homo sapiens
aagcagcugccucugaggc

SEQ ID NO: 13020 - RNA, 20 nt, Homo sapiens
accaggaggcugaggccccu

SEQ ID NO: 13021 - RNA, 22 nt, Homo sapiens
ccucuuccccuugucucuccag

SEQ ID NO: 13022 - RNA, 18 nt, Homo sapiens
uugagaaggaggcugcug

SEQ ID NO: 13023 - RNA, 22 nt, Homo sapiens
acucggcguggcgucggucgug

SEQ ID NO: 13024 - RNA, 22 nt, Homo sapiens
cucggcgcggggcgcgggcucc

SEQ ID NO: 13025 - RNA, 23 nt, Homo sapiens
ucuggcuccgugucuucacuccc

SEQ ID NO: 13026 - RNA, 21 nt, Homo sapiens
ucgaggagcucacagucuagu

SEQ ID NO: 13027 - RNA, 22 nt, Homo sapiens
aaggagcucacagucuauugag

SEQ ID NO: 13028 - RNA, 22 nt, Homo sapiens
aauugcacgguauccaucugua

SEQ ID NO: 13029 - RNA, 22 nt, Homo sapiens
uccgagccugggucucccucuu

SEQ ID NO: 13030 - RNA, 22 nt, Homo sapiens
gucccucuccaaaugugucuug

SEQ ID NO: 13031 - RNA, 23 nt, Homo sapiens
aaggagcuuacaaucuagcuggg

SEQ ID NO: 13032 - RNA, 21 nt, Homo sapiens
cgcgggugcuuacugacccuu

SEQ ID NO: 13033 - RNA, 23 nt, Homo sapiens
gcagcagagaauaggacuacguc

SEQ ID NO: 13034 - RNA, 22 nt, Homo sapiens
ucuucucuguuuuggccaugug

SEQ ID NO: 13035 - RNA, 22 nt, Homo sapiens
aacccguagauccgaacuugug

SEQ ID NO: 13036 - RNA, 22 nt, Homo sapiens
aacccguagauccgaacuugug

SEQ ID NO: 13037 - RNA, 22 nt, Homo sapiens
uuuccggcucgcgugggugugu

SEQ ID NO: 13038 - RNA, 21 nt, Homo sapiens
agcuacaucuggcuacugggu

SEQ ID NO: 13039 - RNA, 18 nt, Homo sapiens
ugcuuccuuucagagggu

SEQ ID NO: 13040 - RNA, 22 nt, Homo sapiens
aucuggagguaagaagcacuuu

SEQ ID NO: 13041 - RNA, 22 nt, Homo sapiens
gaaagcgcuucccuuugcugga

SEQ ID NO: 13042 - RNA, 22 nt, Homo sapiens
caaagcgcuccccuuuagaggu

SEQ ID NO: 13043 - RNA, 23 nt, Homo sapiens
caaagcgcuucucuuuagagugu

SEQ ID NO: 13044 - RNA, 21 nt, Homo sapiens
caaagcgcuucccuuuggagc

SEQ ID NO: 13045 - RNA, 21 nt, Homo sapiens
gaaagcgcuucucuuuagagg

SEQ ID NO: 13046 - RNA, 23 nt, Homo sapiens
aggaagcccuggaggggcuggag

SEQ ID NO: 13047 - RNA, 23 nt, Homo sapiens
ucuuugguuaucuagcuguauga

SEQ ID NO: 13048 - RNA, 24 nt, Homo sapiens
uggggagcugaggcucugggggug

SEQ ID NO: 13049 - RNA, 17 nt, Homo sapiens
gugggggagaggcuguc

SEQ ID NO: 13050 - RNA, 22 nt, Homo sapiens
acucggcguggcgucggucgug

SEQ ID NO: 13051 - RNA, 21 nt, Homo sapiens
cggcggggacggcgauugguc

SEQ ID NO: 13052 - RNA, 21 nt, Homo sapiens
agggcccccccucaauccugu

SEQ ID NO: 13053 - RNA, 23 nt, Homo sapiens
ucccccaggugugauucugauuu

SEQ ID NO: 13054 - RNA, 22 nt, Homo sapiens
ucaggcucaguccccucccgau

SEQ ID NO: 13055 - RNA, 20 nt, Homo sapiens
cuacaaagggaagcccuuuc

SEQ ID NO: 13056 - RNA, 22 nt, Homo sapiens
cuacaaagggaagcacuuucuc

SEQ ID NO: 13057 - RNA, 21 nt, Homo sapiens
ugacaacuauggaugagcucu

SEQ ID NO: 13058 - RNA, 21 nt, Homo sapiens
agggggaaaguucuauagucc

SEQ ID NO: 13059 - RNA, 24 nt, Homo sapiens
acugggggcuuucgggcucugcgu

SEQ ID NO: 13060 - RNA, 24 nt, Homo sapiens
ugccugggucucuggccugcgcgu

SEQ ID NO: 13061 - RNA, 22 nt, Homo sapiens
aggcggggcgccgcgggaccgc

SEQ ID NO: 13062 - RNA, 21 nt, Homo sapiens
gcaggaacuugugagucuccu

SEQ ID NO: 13063 - RNA, 21 nt, Homo sapiens
cccggagccaggaugcagcuc

SEQ ID NO: 13064 - RNA, 23 nt, Homo sapiens
cuggagauauggaagagcugugu

SEQ ID NO: 13065 - RNA, 21 nt, Homo sapiens
ucgaggagcucacagucuagu

SEQ ID NO: 13066 - RNA, 21 nt, Homo sapiens
cggcggggacggcgauugguc

SEQ ID NO: 13067 - RNA, 22 nt, Homo sapiens
uugugucaauaugcgaugaugu

SEQ ID NO: 13068 - RNA, 22 nt, Homo sapiens
ugugucacucgaugaccacugu

SEQ ID NO: 13069 - RNA, 25 nt, Homo sapiens
aggggugguguugggacagcuccgu

SEQ ID NO: 13070 - RNA, 22 nt, Homo sapiens
ggggguccccggugcucggauc

SEQ ID NO: 13071 - RNA, 20 nt, Homo sapiens
auggagauagauauagaaau

SEQ ID NO: 13072 - RNA, 22 nt, Homo sapiens
aggcggggcgccgcgggaccgc

SEQ ID NO: 13073 - RNA, 20 nt, Homo sapiens
cgugccacccuuuuccccag

SEQ ID NO: 13074 - RNA, 18 nt, Homo sapiens
cgggcguggugguggggg

SEQ ID NO: 13075 - RNA, 21 nt, Homo sapiens
ucacagugaaccggucucuuu

SEQ ID NO: 13076 - RNA, 22 nt, Homo sapiens
uaacacugucugguaaagaugg

SEQ ID NO: 13077 - RNA, 21 nt, Homo sapiens
gcccuccgcccgugcaccccg

SEQ ID NO: 13078 - RNA, 23 nt, Homo sapiens
ucuggcuccgugucuucacuccc

SEQ ID NO: 13079 - RNA, 22 nt, Homo sapiens
uaacacugucugguaacgaugu

SEQ ID NO: 13080 - RNA, 22 nt, Homo sapiens
aaggagcucacagucuauugag

SEQ ID NO: 13081 - RNA, 22 nt, Homo sapiens
uguaaacauccuacacucagcu

SEQ ID NO: 13082 - RNA, 23 nt, Homo sapiens
ugaggggcagagagcgagacuuu

SEQ ID NO: 13083 - RNA, 22 nt, Homo sapiens
cgucaacacuugcugguuuccu

SEQ ID NO: 13084 - RNA, 22 nt, Homo sapiens
caaaaaccacaguuucuuuugc

SEQ ID NO: 13085 - RNA, 23 nt, Homo sapiens
aaggagcuuacaaucuagcuggg

SEQ ID NO: 13086 - RNA, 21 nt, Homo sapiens
uggaggagaaggaaggugaug

SEQ ID NO: 13087 - RNA, 22 nt, Homo sapiens
uaacacugucugguaaagaugg

SEQ ID NO: 13088 - RNA, 22 nt, Homo sapiens
uaacacugucugguaacgaugu

SEQ ID NO: 13089 - RNA, 22 nt, Homo sapiens
aaaaguaauugcggauuuugcc

SEQ ID NO: 13090 - RNA, 21 nt, Homo sapiens
caagucacuagugguuccguu

SEQ ID NO: 13091 - RNA, 21 nt, Homo sapiens
caagucacuagugguuccguu

SEQ ID NO: 13092 - RNA, 20 nt, Homo sapiens
auuccuagaaauuguucaua

SEQ ID NO: 13093 - RNA, 23 nt, Homo sapiens
agguuacccgagcaacuuugcau

SEQ ID NO: 13094 - RNA, 22 nt, Homo sapiens
aaaaugguucccuuuagagugu

SEQ ID NO: 13095 - RNA, 22 nt, Homo sapiens
aaaaugguucccuuuagagugu

SEQ ID NO: 13096 - RNA, 21 nt, Homo sapiens
caaagguauuugugguuuuug

SEQ ID NO: 13097 - RNA, 22 nt, Homo sapiens
cuugguucagggagggucccca

SEQ ID NO: 13098 - RNA, 22 nt, Homo sapiens
uuuccggcucgcgugggugugu

SEQ ID NO: 13099 - RNA, 22 nt, Homo sapiens
cccugugcccggcccacuucug

SEQ ID NO: 13100 - RNA, 21 nt, Homo sapiens
aucacauugccagggauuucc

SEQ ID NO: 13101 - RNA, 21 nt, Homo sapiens
aucacauugccagggauuacc

SEQ ID NO: 13102 - RNA, 22 nt, Homo sapiens
uggcucaguucagcaggaacag

SEQ ID NO: 13103 - RNA, 21 nt, Homo sapiens
uaaagugcugacagugcagau

SEQ ID NO: 13104 - RNA, 23 nt, Homo sapiens
cagugcaaugauauugucaaagc

SEQ ID NO: 13105 - RNA, 23 nt, Homo sapiens
agcucggucugaggccccucagu

SEQ ID NO: 13106 - RNA, 22 nt, Homo sapiens
uccgagccugggucucccucuu

SEQ ID NO: 13107 - RNA, 21 nt, Homo sapiens
uggcagggaggcugggagggg

SEQ ID NO: 13108 - RNA, 22 nt, Homo sapiens
ugagccccugugccgcccccag

SEQ ID NO: 13109 - RNA, 23 nt, Homo sapiens
uauggcuuuuuauuccuauguga

SEQ ID NO: 13110 - RNA, 23 nt, Homo sapiens
ucuggcuccgugucuucacuccc

SEQ ID NO: 13111 - RNA, 22 nt, Homo sapiens
cgcaggggccgggugcucaccg

SEQ ID NO: 13112 - RNA, 22 nt, Homo sapiens
ucugcccccuccgcugcugcca

SEQ ID NO: 13113 - RNA, 20 nt, Homo sapiens
acugccccaggugcugcugg

SEQ ID NO: 13114 - RNA, 23 nt, Homo sapiens
ucccccaggugugauucugauuu

SEQ ID NO: 13115 - RNA, 23 nt, Homo sapiens
ugaggggcagagagcgagacuuu

SEQ ID NO: 13116 - RNA, 21 nt, Homo sapiens
cggggcagcucaguacaggau

SEQ ID NO: 13117 - RNA, 20 nt, Homo sapiens
agaccauggguucucauugu

SEQ ID NO: 13118 - RNA, 24 nt, Homo sapiens
acugggggcuuucgggcucugcgu

SEQ ID NO: 13119 - RNA, 23 nt, Homo sapiens
uggaagacuagugauuuuguugu

SEQ ID NO: 13120 - RNA, 20 nt, Homo sapiens
ggggagcuguggaagcagua

SEQ ID NO: 13121 - RNA, 17 nt, Homo sapiens
ucgccuccuccucuccc

SEQ ID NO: 13122 - RNA, 22 nt, Homo sapiens
cauugcacuugucucggucuga

SEQ ID NO: 13123 - RNA, 21 nt, Homo sapiens
aagccugcccggcuccucggg

SEQ ID NO: 13124 - RNA, 21 nt, Homo sapiens
ucguggccuggucuccauuau

SEQ ID NO: 13125 - RNA, 22 nt, Homo sapiens
uggagugugacaaugguguuug

SEQ ID NO: 13126 - RNA, 18 nt, Homo sapiens
cgggcguggugguggggg

SEQ ID NO: 13127 - RNA, 18 nt, Homo sapiens
cgggcguggugguggggg

SEQ ID NO: 13128 - RNA, 23 nt, Homo sapiens
ucuggcuccgugucuucacuccc

SEQ ID NO: 13129 - RNA, 21 nt, Homo sapiens
cggcggggacggcgauugguc

SEQ ID NO: 13130 - RNA, 21 nt, Homo sapiens
ccaguccugugccugccgccu

SEQ ID NO: 13131 - RNA, 22 nt, Homo sapiens
ucaggccaggcacaguggcuca

SEQ ID NO: 13132 - RNA, 21 nt, Homo sapiens
aggcaagaugcuggcauagcu

SEQ ID NO: 13133 - RNA, 23 nt, Homo sapiens
ugagcgccucgacgacagagccg

SEQ ID NO: 13134 - RNA, 21 nt, Homo sapiens
ugucuugcaggccgucaugca

SEQ ID NO: 13135 - RNA, 22 nt, Homo sapiens
aggcggggcgccgcgggaccgc

SEQ ID NO: 13136 - RNA, 22 nt, Homo sapiens
ugcggggcuagggcuaacagca

SEQ ID NO: 13137 - RNA, 18 nt, Homo sapiens
ugaggcaguagauugaau

SEQ ID NO: 13138 - RNA, 22 nt, Homo sapiens
uuauaaagcaaugagacugauu

SEQ ID NO: 13139 - RNA, 21 nt, Homo sapiens
aggaggcagcgcucucaggac

SEQ ID NO: 13140 - RNA, 21 nt, Homo sapiens
uggaggagaaggaaggugaug

SEQ ID NO: 13141 - RNA, 20 nt, Homo sapiens
guagaggagauggcgcaggg

SEQ ID NO: 13142 - RNA, 22 nt, Homo sapiens
aacccguagauccgaacuugug

SEQ ID NO: 13143 - RNA, 23 nt, Homo sapiens
ccugcagcgacuugauggcuucc

SEQ ID NO: 13144 - RNA, 17 nt, Homo sapiens
ucgccuccuccucuccc

SEQ ID NO: 13145 - RNA, 21 nt, Homo sapiens
cggcggggacggcgauugguc

SEQ ID NO: 13146 - RNA, 22 nt, Homo sapiens
cgcaggggccgggugcucaccg

SEQ ID NO: 13147 - RNA, 22 nt, Homo sapiens
uaaugccccuaaaaauccuuau

SEQ ID NO: 13148 - RNA, 22 nt, Homo sapiens
agacuucccauuugaagguggc

SEQ ID NO: 13149 - RNA, 22 nt, Homo sapiens
gguggcccggccgugccugagg

SEQ ID NO: 13150 - RNA, 22 nt, Homo sapiens
aacccguagauccgaucuugug

SEQ ID NO: 13151 - RNA, 22 nt, Homo sapiens
cacccguagaaccgaccuugcg

SEQ ID NO: 13152 - RNA, 23 nt, Homo sapiens
uacccuguagauccgaauuugug

SEQ ID NO: 13153 - RNA, 23 nt, Homo sapiens
uacccuguagaaccgaauuugug

SEQ ID NO: 13154 - RNA, 22 nt, Homo sapiens
ucuacaaaggaaagcgcuuucu

SEQ ID NO: 13155 - RNA, 23 nt, Homo sapiens
agcuacauugucugcuggguuuc

SEQ ID NO: 13156 - RNA, 23 nt, Homo sapiens
ucccuguccuccaggagcucacg

SEQ ID NO: 13157 - RNA, 22 nt, Homo sapiens
aucacacaaaggcaacuuuugu

SEQ ID NO: 13158 - RNA, 22 nt, Homo sapiens
aggcaguguauuguuagcuggc

SEQ ID NO: 13159 - RNA, 21 nt, Homo sapiens
ugaguuggccaucugagugag

SEQ ID NO: 13160 - RNA, 20 nt, Homo sapiens
aggguguuucucucaucucu

SEQ ID NO: 13161 - RNA, 20 nt, Homo sapiens
accaggaggcugaggccccu

SEQ ID NO: 13162 - RNA, 23 nt, Homo sapiens
aaggagcuuacaaucuagcuggg

SEQ ID NO: 13163 - RNA, 23 nt, Homo sapiens
gcagcagagaauaggacuacguc

SEQ ID NO: 13164 - RNA, 21 nt, Homo sapiens
uaggacacauggucuacuucu

SEQ ID NO: 13165 - RNA, 22 nt, Homo sapiens
cuccugagccauucugagccuc

SEQ ID NO: 13166 - RNA, 22 nt, Homo sapiens
acgcccuucccccccuucuuca

SEQ ID NO: 13167 - RNA, 23 nt, Homo sapiens
ucuggcuccgugucuucacuccc

SEQ ID NO: 13168 - RNA, 22 nt, Homo sapiens
uggcucaguucagcaggaacag

SEQ ID NO: 13169 - RNA, 23 nt, Homo sapiens
ugaggggcagagagcgagacuuu

SEQ ID NO: 13170 - RNA, 22 nt, Homo sapiens
caaaguuuaagauccuugaagu

SEQ ID NO: 13171 - RNA, 22 nt, Homo sapiens
ugcccuuaaaggugaacccagu

SEQ ID NO: 13172 - RNA, 22 nt, Homo sapiens
uggagugugacaaugguguuug

SEQ ID NO: 13173 - RNA, 18 nt, Homo sapiens
aucccaccucugccacca

SEQ ID NO: 13174 - RNA, 18 nt, Homo sapiens
aucccaccucugccacca

SEQ ID NO: 13175 - RNA, 21 nt, Homo sapiens
uugggacauacuuaugcuaaa

SEQ ID NO: 13176 - RNA, 22 nt, Homo sapiens
uacccagagcaugcagugugaa

SEQ ID NO: 13177 - RNA, 22 nt, Homo sapiens
ucugcccccuccgcugcugcca

SEQ ID NO: 13178 - RNA, 20 nt, Homo sapiens
acugccccaggugcugcugg

SEQ ID NO: 13179 - RNA, 21 nt, Homo sapiens
aauauaacacagauggccugu

SEQ ID NO: 13180 - RNA, 23 nt, Homo sapiens
aaugacacgaucacucccguuga

SEQ ID NO: 13181 - RNA, 21 nt, Homo sapiens
cggggcagcucaguacaggau

SEQ ID NO: 13182 - RNA, 22 nt, Homo sapiens
ccucccacacccaaggcuugca

SEQ ID NO: 13183 - RNA, 25 nt, Homo sapiens
aggggugguguugggacagcuccgu

SEQ ID NO: 13184 - RNA, 25 nt, Homo sapiens
aggggugguguugggacagcuccgu

SEQ ID NO: 13185 - RNA, 21 nt, Homo sapiens
aagugaucuaaaggccuacau

SEQ ID NO: 13186 - RNA, 22 nt, Homo sapiens
ugggucuuugcgggcgagauga

SEQ ID NO: 13187 - RNA, 21 nt, Homo sapiens
ugagaugaagcacuguagcuc

SEQ ID NO: 13188 - RNA, 21 nt, Homo sapiens
uaguagaccguauagcguacg

SEQ ID NO: 13189 - RNA, 22 nt, Homo sapiens
caaaaguaauuguggauuuugu

SEQ ID NO: 13190 - RNA, 22 nt, Homo sapiens
ucuucucuguuuuggccaugug

SEQ ID NO: 13191 - RNA, 22 nt, Homo sapiens
ugcuggaucagugguucgaguc

SEQ ID NO: 13192 - RNA, 22 nt, Homo sapiens
ugugacugguugaccagagggg

SEQ ID NO: 13193 - RNA, 22 nt, Homo sapiens
uauggcacugguagaauucacu

SEQ ID NO: 13194 - RNA, 21 nt, Homo sapiens
gccccugggccuauccuagaa

SEQ ID NO: 13195 - RNA, 23 nt, Homo sapiens
aaugacacgaucacucccguuga

SEQ ID NO: 13196 - RNA, 22 nt, Homo sapiens
uaugugccuuuggacuacaucg

SEQ ID NO: 13197 - RNA, 22 nt, Homo sapiens
auucuaauuucuccacgucuuu

SEQ ID NO: 13198 - RNA, 23 nt, Homo sapiens
uucauuugguauaaaccgcgauu

SEQ ID NO: 13199 - RNA, 22 nt, Homo sapiens
augcugacauauuuacuagagg

SEQ ID NO: 13200 - RNA, 21 nt, Homo sapiens
guggcugcacucacuuccuuc

SEQ ID NO: 13201 - RNA, 23 nt, Homo sapiens
ucugcucauaccccaugguuucu

SEQ ID NO: 13202 - RNA, 22 nt, Homo sapiens
cugcccuggcccgagggaccga

SEQ ID NO: 13203 - RNA, 22 nt, Homo sapiens
ugugcgcagggagaccucuccc

SEQ ID NO: 13204 - RNA, 21 nt, Homo sapiens
cugacuguugccguccuccag

SEQ ID NO: 13205 - RNA, 20 nt, Homo sapiens
ucugcaggguuugcuuugag

SEQ ID NO: 13206 - RNA, 24 nt, Homo sapiens
agccuggaagcuggagccugcagu

SEQ ID NO: 13207 - RNA, 24 nt, Homo sapiens
agccuggaagcuggagccugcagu

SEQ ID NO: 13208 - RNA, 17 nt, Homo sapiens
gugggggagaggcuguc

SEQ ID NO: 13209 - RNA, 21 nt, Homo sapiens
uaccacaggguagaaccacgg

SEQ ID NO: 13210 - RNA, 22 nt, Homo sapiens
ugagaacugaauuccauggguu

SEQ ID NO: 13211 - RNA, 22 nt, Homo sapiens
ugagaacugaauuccauaggcu

SEQ ID NO: 13212 - RNA, 23 nt, Homo sapiens
caaagugcuuacagugcagguag

SEQ ID NO: 13213 - RNA, 20 nt, Homo sapiens
ccccagggcgacgcggcggg

SEQ ID NO: 13214 - RNA, 21 nt, Homo sapiens
gccccugggccuauccuagaa

SEQ ID NO: 13215 - RNA, 23 nt, Homo sapiens
ucccccaggugugauucugauuu

SEQ ID NO: 13216 - RNA, 21 nt, Homo sapiens
acuggacuuggagucagaagg

SEQ ID NO: 13217 - RNA, 22 nt, Homo sapiens
acuggacuuagggucagaaggc

SEQ ID NO: 13218 - RNA, 22 nt, Homo sapiens
uacugcagacguggcaaucaug

SEQ ID NO: 13219 - RNA, 21 nt, Homo sapiens
uacugcagacaguggcaauca

SEQ ID NO: 13220 - RNA, 24 nt, Homo sapiens
acugggggcuuucgggcucugcgu

SEQ ID NO: 13221 - RNA, 23 nt, Homo sapiens
uauucauuuauccccagccuaca

SEQ ID NO: 13222 - RNA, 20 nt, Homo sapiens
uaaagagcccuguggagaca

SEQ ID NO: 13223 - RNA, 21 nt, Homo sapiens
cuuuuugcggucugggcuugc

SEQ ID NO: 13224 - RNA, 22 nt, Homo sapiens
acucggcguggcgucggucgug

SEQ ID NO: 13225 - RNA, 22 nt, Homo sapiens
cagugcaaugaugaaagggcau

SEQ ID NO: 13226 - RNA, 22 nt, Homo sapiens
ucugcccccuccgcugcugcca

SEQ ID NO: 13227 - RNA, 23 nt, Homo sapiens
uaagugcuuccauguuuuaguag

SEQ ID NO: 13228 - RNA, 23 nt, Homo sapiens
uaagugcuuccauguuugagugu

SEQ ID NO: 13229 - RNA, 20 nt, Homo sapiens
acugccccaggugcugcugg

SEQ ID NO: 13230 - RNA, 23 nt, Homo sapiens
ugagcgccucgacgacagagccg

SEQ ID NO: 13231 - RNA, 21 nt, Homo sapiens
cggggcagcucaguacaggau

SEQ ID NO: 13232 - RNA, 22 nt, Homo sapiens
aauccuuugucccugggugaga

SEQ ID NO: 13233 - RNA, 23 nt, Homo sapiens
gaacgcgcuucccuauagagggu

SEQ ID NO: 13234 - RNA, 21 nt, Homo sapiens
guggcugcacucacuuccuuc

SEQ ID NO: 13235 - RNA, 22 nt, Homo sapiens
cccugugcccggcccacuucug

SEQ ID NO: 13236 - RNA, 25 nt, Homo sapiens
aggggugguguugggacagcuccgu

SEQ ID NO: 13237 - RNA, 21 nt, Homo sapiens
guggcugcacucacuuccuuc

SEQ ID NO: 13238 - RNA, 24 nt, Homo sapiens
uugcagcugccugggagugacuuc

SEQ ID NO: 13239 - RNA, 21 nt, Homo sapiens
uccugcgcgucccagaugccc

SEQ ID NO: 13240 - RNA, 22 nt, Homo sapiens
ucugcccccuccgcugcugcca

SEQ ID NO: 13241 - RNA, 22 nt, Homo sapiens
aggugguccguggcgcguucgc

SEQ ID NO: 13242 - RNA, 20 nt, Homo sapiens
acugccccaggugcugcugg

SEQ ID NO: 13243 - RNA, 21 nt, Homo sapiens
cggggcagcucaguacaggau

SEQ ID NO: 13244 - RNA, 19 nt, Homo sapiens
ugagcugcuguaccaaaau

SEQ ID NO: 13245 - RNA, 20 nt, Homo sapiens
guccgcucggcgguggccca

SEQ ID NO: 13246 - RNA, 22 nt, Homo sapiens
aggcagcgggguguaguggaua

SEQ ID NO: 13247 - RNA, 22 nt, Homo sapiens
auccgcgcucugacucucugcc

SEQ ID NO: 13248 - RNA, 20 nt, Homo sapiens
gugucugggcggacagcugc

SEQ ID NO: 13249 - RNA, 21 nt, Homo sapiens
cgcgggugcuuacugacccuu

SEQ ID NO: 13250 - RNA, 22 nt, Homo sapiens
uggagugugacaaugguguuug

SEQ ID NO: 13251 - RNA, 22 nt, Homo sapiens
ugcccuguggacucaguucugg

SEQ ID NO: 13252 - RNA, 23 nt, Homo sapiens
ucuggcuccgugucuucacuccc

SEQ ID NO: 13253 - RNA, 22 nt, Homo sapiens
uggacggagaacugauaagggu

SEQ ID NO: 13254 - RNA, 20 nt, Homo sapiens
ccccagggcgacgcggcggg

SEQ ID NO: 13255 - RNA, 23 nt, Homo sapiens
ugagcgccucgacgacagagccg

SEQ ID NO: 13256 - RNA, 23 nt, Homo sapiens
ucccuguccuccaggagcucacg

SEQ ID NO: 13257 - RNA, 18 nt, Homo sapiens
ugcuuccuuucagagggu

SEQ ID NO: 13258 - RNA, 22 nt, Homo sapiens
aucuggagguaagaagcacuuu

SEQ ID NO: 13259 - RNA, 17 nt, Homo sapiens
gugggggagaggcuguc

SEQ ID NO: 13260 - RNA, 17 nt, Homo sapiens
ucccaccgcugccaccc

SEQ ID NO: 13261 - RNA, 18 nt, Homo sapiens
ugaggcaguagauugaau

SEQ ID NO: 13262 - RNA, 22 nt, Homo sapiens
aacuggcccucaaagucccgcu

SEQ ID NO: 13263 - RNA, 22 nt, Homo sapiens
caaucacuaacuccacugccau

SEQ ID NO: 13264 - RNA, 21 nt, Homo sapiens
agggggaaaguucuauagucc

SEQ ID NO: 13265 - RNA, 20 nt, Homo sapiens
accaggaggcugaggccccu

SEQ ID NO: 13266 - RNA, 23 nt, Homo sapiens
aggaagcccuggaggggcuggag

SEQ ID NO: 13267 - RNA, 20 nt, Homo sapiens
ggggagcuguggaagcagua

SEQ ID NO: 13268 - RNA, 23 nt, Homo sapiens
cacccggcugugugcacaugugc

SEQ ID NO: 13269 - RNA, 22 nt, Homo sapiens
augggugaauuuguagaaggau

SEQ ID NO: 13270 - RNA, 22 nt, Homo sapiens
gugugcggaaaugcuucugcua

SEQ ID NO: 13271 - RNA, 22 nt, Homo sapiens
ucgugucuuguguugcagccgg

SEQ ID NO: 13272 - RNA, 21 nt, Homo sapiens
cggcggggacggcgauugguc

SEQ ID NO: 13273 - RNA, 22 nt, Homo sapiens
aaggagcucacagucuauugag

SEQ ID NO: 13274 - RNA, 22 nt, Homo sapiens
uccuguacugagcugccccgag

SEQ ID NO: 13275 - RNA, 22 nt, Homo sapiens
aggcggggcgccgcgggaccgc

SEQ ID NO: 13276 - RNA, 23 nt, Homo sapiens
aaggagcuuacaaucuagcuggg

SEQ ID NO: 13277 - RNA, 23 nt, Homo sapiens
cacccggcugugugcacaugugc

SEQ ID NO: 13278 - RNA, 19 nt, Homo sapiens
gugaggacucgggaggugg

SEQ ID NO: 13279 - RNA, 22 nt, Homo sapiens
ugagccccugugccgcccccag

SEQ ID NO: 13280 - RNA, 21 nt, Homo sapiens
aagugaucuaaaggccuacau

SEQ ID NO: 13281 - RNA, 22 nt, Homo sapiens
ugcccuguggacucaguucugg

SEQ ID NO: 13282 - RNA, 20 nt, Homo sapiens
guguguggaaaugcuucugc

SEQ ID NO: 13283 - RNA, 23 nt, Homo sapiens
ucuggcuccgugucuucacuccc

SEQ ID NO: 13284 - RNA, 22 nt, Homo sapiens
ucaggccaggcacaguggcuca

SEQ ID NO: 13285 - RNA, 21 nt, Homo sapiens
aucacauugccagggauuucc

SEQ ID NO: 13286 - RNA, 21 nt, Homo sapiens
aucacauugccagggauuacc

SEQ ID NO: 13287 - RNA, 21 nt, Homo sapiens
agggcccccccucaauccugu

SEQ ID NO: 13288 - RNA, 21 nt, Homo sapiens
agggcccccccucaauccugu

SEQ ID NO: 13289 - RNA, 23 nt, Homo sapiens
ugaggggcagagagcgagacuuu

SEQ ID NO: 13290 - RNA, 22 nt, Homo sapiens
uugggaucauuuugcauccaua

SEQ ID NO: 13291 - RNA, 22 nt, Homo sapiens
caaccuggaggacuccaugcug

SEQ ID NO: 13292 - RNA, 22 nt, Homo sapiens
cgucaacacuugcugguuuccu

SEQ ID NO: 13293 - RNA, 20 nt, Homo sapiens
accaggaggcugaggccccu

SEQ ID NO: 13294 - RNA, 23 nt, Homo sapiens
cugggaucuccggggucuugguu

SEQ ID NO: 13295 - RNA, 22 nt, Homo sapiens
acgcccuucccccccuucuuca

SEQ ID NO: 13296 - RNA, 22 nt, Homo sapiens
caggauguggucaaguguuguu

SEQ ID NO: 13297 - RNA, 18 nt, Homo sapiens
cagggaggugaaugugau

SEQ ID NO: 13298 - RNA, 21 nt, Homo sapiens
cggcggggacggcgauugguc

SEQ ID NO: 13299 - RNA, 19 nt, Homo sapiens
aggcugcggaauucaggac

SEQ ID NO: 13300 - RNA, 21 nt, Homo sapiens
guggcugcacucacuuccuuc

SEQ ID NO: 13301 - RNA, 22 nt, Homo sapiens
aggcggggcgccgcgggaccgc

SEQ ID NO: 13302 - RNA, 22 nt, Homo sapiens
ugagaccucuggguucugagcu

SEQ ID NO: 13303 - RNA, 22 nt, Homo sapiens
ugugagguuggcauuguugucu

SEQ ID NO: 13304 - RNA, 18 nt, Homo sapiens
ugaggcaguagauugaau

SEQ ID NO: 13305 - RNA, 21 nt, Homo sapiens
cggcggggacggcgauugguc

SEQ ID NO: 13306 - RNA, 22 nt, Homo sapiens
ucugcccccuccgcugcugcca

SEQ ID NO: 13307 - RNA, 20 nt, Homo sapiens
ccccagggcgacgcggcggg

SEQ ID NO: 13308 - RNA, 23 nt, Homo sapiens
caacggaaucccaaaagcagcug

SEQ ID NO: 13309 - RNA, 20 nt, Homo sapiens
acugccccaggugcugcugg

SEQ ID NO: 13310 - RNA, 22 nt, Homo sapiens
uggcagugucuuagcugguugu

SEQ ID NO: 13311 - RNA, 22 nt, Homo sapiens
caaucacuaacuccacugccau

SEQ ID NO: 13312 - RNA, 23 nt, Homo sapiens
aggcaguguaguuagcugauugc

SEQ ID NO: 13313 - RNA, 22 nt, Homo sapiens
uggcaguguauuguuagcuggu

SEQ ID NO: 13314 - RNA, 22 nt, Homo sapiens
aggcaguguauuguuagcuggc

SEQ ID NO: 13315 - RNA, 21 nt, Homo sapiens
cggggcagcucaguacaggau

SEQ ID NO: 13316 - RNA, 22 nt, Homo sapiens
aguggggaacccuuccaugagg

SEQ ID NO: 13317 - RNA, 21 nt, Homo sapiens
aggaggcagcgcucucaggac

SEQ ID NO: 13318 - RNA, 22 nt, Homo sapiens
aggcggggcgccgcgggaccgc

SEQ ID NO: 13319 - RNA, 22 nt, Homo sapiens
ugcggggcuagggcuaacagca

SEQ ID NO: 13320 - RNA, 21 nt, Homo sapiens
aaggcagggcccccgcucccc

SEQ ID NO: 13321 - RNA, 21 nt, Homo sapiens
aagcauucuuucauugguugg

SEQ ID NO: 13322 - RNA, 20 nt, Homo sapiens
uaaggcacgcggugaaugcc

SEQ ID NO: 13323 - RNA, 18 nt, Homo sapiens
uugagaaggaggcugcug

SEQ ID NO: 13324 - RNA, 21 nt, Homo sapiens
uugugcuugaucuaaccaugu

SEQ ID NO: 13325 - RNA, 22 nt, Homo sapiens
uguaaacauccucgacuggaag

SEQ ID NO: 13326 - RNA, 22 nt, Homo sapiens
uguaaacauccccgacuggaag

SEQ ID NO: 13327 - RNA, 22 nt, Homo sapiens
uguaaacauccuugacuggaag

SEQ ID NO: 13328 - RNA, 22 nt, Homo sapiens
cuagguauggucccagggaucc

SEQ ID NO: 13329 - RNA, 20 nt, Homo sapiens
gugcauugcuguugcauugc

SEQ ID NO: 13330 - RNA, 22 nt, Homo sapiens
gaauguugcucggugaaccccu

SEQ ID NO: 13331 - RNA, 21 nt, Homo sapiens
uaaggcacccuucugaguaga

SEQ ID NO: 13332 - RNA, 22 nt, Homo sapiens
gagugccuucuuuuggagcguu

SEQ ID NO: 13333 - RNA, 20 nt, Homo sapiens
cugcaaagggaagcccuuuc

SEQ ID NO: 13334 - RNA, 22 nt, Homo sapiens
aagugccuccuuuuagaguguu

SEQ ID NO: 13335 - RNA, 20 nt, Homo sapiens
cugcaaagggaagcccuuuc

SEQ ID NO: 13336 - RNA, 22 nt, Homo sapiens
auucugcauuuuuagcaaguuc

SEQ ID NO: 13337 - RNA, 21 nt, Homo sapiens
ggcuagcaacagcgcuuaccu

SEQ ID NO: 13338 - RNA, 21 nt, Homo sapiens
uugcucacuguucuucccuag

SEQ ID NO: 13339 - RNA, 18 nt, Homo sapiens
cgggcguggugguggggg

SEQ ID NO: 13340 - RNA, 21 nt, Homo sapiens
ucacagugaaccggucucuuu

SEQ ID NO: 13341 - RNA, 20 nt, Homo sapiens
guguguggaaaugcuucugc

SEQ ID NO: 13342 - RNA, 23 nt, Homo sapiens
ucuggcuccgugucuucacuccc

SEQ ID NO: 13343 - RNA, 22 nt, Homo sapiens
uagcagcacaucaugguuuaca

SEQ ID NO: 13344 - RNA, 20 nt, Homo sapiens
ccccagggcgacgcggcggg

SEQ ID NO: 13345 - RNA, 22 nt, Homo sapiens
uguaacagcaacuccaugugga

SEQ ID NO: 13346 - RNA, 22 nt, Homo sapiens
acagcaggcacagacaggcagu

SEQ ID NO: 13347 - RNA, 22 nt, Homo sapiens
uguaaacauccuacacucagcu

SEQ ID NO: 13348 - RNA, 21 nt, Homo sapiens
gccccugggccuauccuagaa

SEQ ID NO: 13349 - RNA, 22 nt, Homo sapiens
gccugcugggguggaaccuggu

SEQ ID NO: 13350 - RNA, 23 nt, Homo sapiens
ugaggggcagagagcgagacuuu

SEQ ID NO: 13351 - RNA, 22 nt, Homo sapiens
aacccguagauccgaacuugug

SEQ ID NO: 13352 - RNA, 21 nt, Homo sapiens
uggcagggaggcugggagggg

SEQ ID NO: 13353 - RNA, 20 nt, Homo sapiens
ugagcccuguccucccgcag

SEQ ID NO: 13354 - RNA, 21 nt, Homo sapiens
acucuagcugccaaaggcgcu

SEQ ID NO: 13355 - RNA, 21 nt, Homo sapiens
gcccuccgcccgugcaccccg

SEQ ID NO: 13356 - RNA, 23 nt, Homo sapiens
cggcccgggcugcugcuguuccu

SEQ ID NO: 13357 - RNA, 22 nt, Homo sapiens
cgcaggggccgggugcucaccg

SEQ ID NO: 13358 - RNA, 22 nt, Homo sapiens
gaggguuggguggaggcucucc

SEQ ID NO: 13359 - RNA, 21 nt, Homo sapiens
agggcccccccucaauccugu

SEQ ID NO: 13360 - RNA, 18 nt, Homo sapiens
ugcuuccuuucagagggu

SEQ ID NO: 13361 - RNA, 22 nt, Homo sapiens
aucuggagguaagaagcacuuu

SEQ ID NO: 13362 - RNA, 19 nt, Homo sapiens
aggcugcggaauucaggac

SEQ ID NO: 13363 - RNA, 21 nt, Homo sapiens
guggcugcacucacuuccuuc

SEQ ID NO: 13364 - RNA, 21 nt, Homo sapiens
aggaggcagcgcucucaggac

SEQ ID NO: 13365 - RNA, 21 nt, Homo sapiens
uggaggagaaggaaggugaug

SEQ ID NO: 13366 - RNA, 22 nt, Homo sapiens
caaagugccucccuuuagagug

SEQ ID NO: 13367 - RNA, 21 nt, Homo sapiens
agagaagaagaucagccugca

SEQ ID NO: 13368 - RNA, 22 nt, Homo sapiens
uuagggcccuggcuccaucucc

SEQ ID NO: 13369 - RNA, 18 nt, Homo sapiens
uugagaaggaggcugcug

SEQ ID NO: 13370 - RNA, 21 nt, Homo sapiens
agggcccccccucaauccugu

SEQ ID NO: 13371 - RNA, 22 nt, Homo sapiens
uauugcacauuacuaaguugca

SEQ ID NO: 13372 - RNA, 23 nt, Homo sapiens
cgcauccccuagggcauuggugu

SEQ ID NO: 13373 - RNA, 21 nt, Homo sapiens
gugcauuguaguugcauugca

SEQ ID NO: 13374 - RNA, 23 nt, Homo sapiens
ugaggggcagagagcgagacuuu

SEQ ID NO: 13375 - RNA, 22 nt, Homo sapiens
ugaaacauacacgggaaaccuc

SEQ ID NO: 13376 - RNA, 22 nt, Homo sapiens
uugugucaauaugcgaugaugu

SEQ ID NO: 13377 - RNA, 20 nt, Homo sapiens
guugugucaguuuaucaaac

SEQ ID NO: 13378 - RNA, 25 nt, Homo sapiens
aggggugguguugggacagcuccgu

SEQ ID NO: 13379 - RNA, 20 nt, Homo sapiens
ggggagcuguggaagcagua

SEQ ID NO: 13380 - RNA, 21 nt, Homo sapiens
uggcagggaggcugggagggg

SEQ ID NO: 13381 - RNA, 21 nt, Homo sapiens
uccuucugcuccgucccccag

SEQ ID NO: 13382 - RNA, 22 nt, Homo sapiens
acgcccuucccccccuucuuca

SEQ ID NO: 13383 - RNA, 23 nt, Homo sapiens
ucuggcuccgugucuucacuccc

SEQ ID NO: 13384 - RNA, 23 nt, Homo sapiens
uaaggugcaucuagugcagauag

SEQ ID NO: 13385 - RNA, 22 nt, Homo sapiens
cgcaggggccgggugcucaccg

SEQ ID NO: 13386 - RNA, 23 nt, Homo sapiens
cgcauccccuagggcauuggugu

SEQ ID NO: 13387 - RNA, 17 nt, Homo sapiens
ucucgcuggggccucca

SEQ ID NO: 13388 - RNA, 18 nt, Homo sapiens
ucagcuggcccucauuuc

SEQ ID NO: 13389 - RNA, 22 nt, Homo sapiens
ucaccagcccuguguucccuag

SEQ ID NO: 13390 - RNA, 21 nt, Homo sapiens
agagaagaagaucagccugca

SEQ ID NO: 13391 - RNA, 18 nt, Homo sapiens
gucccuguucaggcgcca

SEQ ID NO: 13392 - RNA, 17 nt, Homo sapiens
ucccuguucgggcgcca

SEQ ID NO: 13393 - RNA, 24 nt, Homo sapiens
uugcagcugccugggagugacuuc

SEQ ID NO: 13394 - RNA, 18 nt, Homo sapiens
cagggaggugaaugugau

SEQ ID NO: 13395 - RNA, 23 nt, Homo sapiens
agcugguguugugaaucaggccg

SEQ ID NO: 13396 - RNA, 23 nt, Homo sapiens
ucuggcuccgugucuucacuccc

SEQ ID NO: 13397 - RNA, 22 nt, Homo sapiens
uggagagaaaggcaguuccuga

SEQ ID NO: 13398 - RNA, 23 nt, Homo sapiens
caacggaaucccaaaagcagcug

SEQ ID NO: 13399 - RNA, 22 nt, Homo sapiens
aggugguccguggcgcguucgc

SEQ ID NO: 13400 - RNA, 23 nt, Homo sapiens
ucccccaggugugauucugauuu

SEQ ID NO: 13401 - RNA, 23 nt, Homo sapiens
uaauccuugcuaccugggugaga

SEQ ID NO: 13402 - RNA, 22 nt, Homo sapiens
aucuggagguaagaagcacuuu

SEQ ID NO: 13403 - RNA, 22 nt, Homo sapiens
cgaaaacagcaauuaccuuugc

SEQ ID NO: 13404 - RNA, 24 nt, Homo sapiens
acugggggcuuucgggcucugcgu

SEQ ID NO: 13405 - RNA, 22 nt, Homo sapiens
ucuucucuguuuuggccaugug

SEQ ID NO: 13406 - RNA, 24 nt, Homo sapiens
agccugauuaaacacaugcucuga

SEQ ID NO: 13407 - RNA, 22 nt, Homo sapiens
ugauugguacgucuguggguag

SEQ ID NO: 13408 - RNA, 22 nt, Homo sapiens
caagaaccucaguugcuuuugu

SEQ ID NO: 13409 - RNA, 23 nt, Homo sapiens
uauucauuuauccccagccuaca

SEQ ID NO: 13410 - RNA, 21 nt, Homo sapiens
uggcagggaggcugggagggg

SEQ ID NO: 13411 - RNA, 22 nt, Homo sapiens
uggaauguaaggaagugugugg

SEQ ID NO: 13412 - RNA, 17 nt, Homo sapiens
ucgccuccuccucuccc

SEQ ID NO: 13413 - RNA, 23 nt, Homo sapiens
ucuggcuccgugucuucacuccc

SEQ ID NO: 13414 - RNA, 21 nt, Homo sapiens
cggcggggacggcgauugguc

SEQ ID NO: 13415 - RNA, 21 nt, Homo sapiens
aauauaacacagauggccugu

SEQ ID NO: 13416 - RNA, 21 nt, Homo sapiens
aggaggcagcgcucucaggac

SEQ ID NO: 13417 - RNA, 22 nt, Homo sapiens
aggcggggcgccgcgggaccgc

SEQ ID NO: 13418 - RNA, 21 nt, Homo sapiens
cgcgggugcuuacugacccuu

SEQ ID NO: 13419 - RNA, 21 nt, Homo sapiens
aaggcagggcccccgcucccc

SEQ ID NO: 13420 - RNA, 23 nt, Homo sapiens
cggcccgggcugcugcuguuccu

SEQ ID NO: 13421 - RNA, 23 nt, Homo sapiens
cggcccgggcugcugcuguuccu

SEQ ID NO: 13422 - RNA, 21 nt, Homo sapiens
cggcggggacggcgauugguc

SEQ ID NO: 13423 - RNA, 21 nt, Homo sapiens
agggcccccccucaauccugu

SEQ ID NO: 13424 - RNA, 23 nt, Homo sapiens
ugagcgccucgacgacagagccg

SEQ ID NO: 13425 - RNA, 22 nt, Homo sapiens
aggcggggcgccgcgggaccgc

SEQ ID NO: 13426 - RNA, 22 nt, Homo sapiens
ugcggggcuagggcuaacagca

SEQ ID NO: 13427 - RNA, 21 nt, Homo sapiens
uggaggagaaggaaggugaug

SEQ ID NO: 13428 - RNA, 22 nt, Homo sapiens
uggagugugacaaugguguuug

SEQ ID NO: 13429 - RNA, 22 nt, Homo sapiens
acgcccuucccccccuucuuca

SEQ ID NO: 13430 - RNA, 23 nt, Homo sapiens
cggcccgggcugcugcuguuccu

SEQ ID NO: 13431 - RNA, 21 nt, Homo sapiens
cggcggggacggcgauugguc

SEQ ID NO: 13432 - RNA, 22 nt, Homo sapiens
cauugcacuugucucggucuga

SEQ ID NO: 13433 - RNA, 19 nt, Homo sapiens
gagccaguuggacaggagc

SEQ ID NO: 13434 - RNA, 22 nt, Homo sapiens
aggcggggcgccgcgggaccgc

SEQ ID NO: 13435 - RNA, 22 nt, Homo sapiens
gguggcccggccgugccugagg

SEQ ID NO: 13436 - RNA, 21 nt, Homo sapiens
uggaggagaaggaaggugaug

SEQ ID NO: 13437 - RNA, 22 nt, Homo sapiens
acuccagccccacagccucagc

SEQ ID NO: 13438 - RNA, 22 nt, Homo sapiens
cugcccuggcccgagggaccga

SEQ ID NO: 13439 - RNA, 22 nt, Homo sapiens
cacuggcuccuuucuggguaga

SEQ ID NO: 13440 - RNA, 23 nt, Homo sapiens
ccugcagcgacuugauggcuucc

SEQ ID NO: 13441 - RNA, 20 nt, Homo sapiens
ucugcaggguuugcuuugag

SEQ ID NO: 13442 - RNA, 22 nt, Homo sapiens
ucguaccgugaguaauaaugcg

SEQ ID NO: 13443 - RNA, 23 nt, Homo sapiens
cggcccgggcugcugcuguuccu

SEQ ID NO: 13444 - RNA, 18 nt, Homo sapiens
uccagugcccuccucucc

SEQ ID NO: 13445 - RNA, 22 nt, Homo sapiens
uggcucaguucagcaggaacag

SEQ ID NO: 13446 - RNA, 22 nt, Homo sapiens
agacccuggucugcacucuauc

SEQ ID NO: 13447 - RNA, 22 nt, Homo sapiens
uccgagccugggucucccucuu

SEQ ID NO: 13448 - RNA, 22 nt, Homo sapiens
ugagccccugugccgcccccag

SEQ ID NO: 13449 - RNA, 18 nt, Homo sapiens
aucccaccucugccacca

SEQ ID NO: 13450 - RNA, 22 nt, Homo sapiens
acucggcguggcgucggucgug

SEQ ID NO: 13451 - RNA, 22 nt, Homo sapiens
cucggcgcggggcgcgggcucc

SEQ ID NO: 13452 - RNA, 21 nt, Homo sapiens
gcccuccgcccgugcaccccg

SEQ ID NO: 13453 - RNA, 21 nt, Homo sapiens
cggcggggacggcgauugguc

SEQ ID NO: 13454 - RNA, 22 nt, Homo sapiens
cauugcacuugucucggucuga

SEQ ID NO: 13455 - RNA, 22 nt, Homo sapiens
uguaaacauccuacacucagcu

SEQ ID NO: 13456 - RNA, 23 nt, Homo sapiens
ucccccaggugugauucugauuu

SEQ ID NO: 13457 - RNA, 23 nt, Homo sapiens
ugaggggcagagagcgagacuuu

SEQ ID NO: 13458 - RNA, 22 nt, Homo sapiens
ccucccacacccaaggcuugca

SEQ ID NO: 13459 - RNA, 25 nt, Homo sapiens
aggggugguguugggacagcuccgu

SEQ ID NO: 13460 - RNA, 22 nt, Homo sapiens
uccgagccugggucucccucuu

SEQ ID NO: 13461 - RNA, 24 nt, Homo sapiens
acugggggcuuucgggcucugcgu

SEQ ID NO: 13462 - RNA, 25 nt, Homo sapiens
ggcggagggaaguagguccguuggu

SEQ ID NO: 13463 - RNA, 22 nt, Homo sapiens
aggcggggcgccgcgggaccgc

SEQ ID NO: 13464 - RNA, 22 nt, Homo sapiens
ugcggggcuagggcuaacagca

SEQ ID NO: 13465 - RNA, 21 nt, Homo sapiens
uggaggagaaggaaggugaug

SEQ ID NO: 13466 - RNA, 23 nt, Homo sapiens
aaaagugcuuacagugcagguag

SEQ ID NO: 13467 - RNA, 21 nt, Homo sapiens
uaaagugcugacagugcagau

SEQ ID NO: 13468 - RNA, 22 nt, Homo sapiens
acucggcguggcgucggucgug

SEQ ID NO: 13469 - RNA, 22 nt, Homo sapiens
cagugguuuuacccuaugguag

SEQ ID NO: 13470 - RNA, 23 nt, Homo sapiens
ucuggcuccgugucuucacuccc

SEQ ID NO: 13471 - RNA, 23 nt, Homo sapiens
caaagugcuuacagugcagguag

SEQ ID NO: 13472 - RNA, 23 nt, Homo sapiens
uaaagugcuuauagugcagguag

SEQ ID NO: 13473 - RNA, 23 nt, Homo sapiens
caaagugcucauagugcagguag

SEQ ID NO: 13474 - RNA, 22 nt, Homo sapiens
agaucagaaggugauuguggcu

SEQ ID NO: 13475 - RNA, 21 nt, Homo sapiens
cagcagcacacugugguuugu

SEQ ID NO: 13476 - RNA, 22 nt, Homo sapiens
agacccuggucugcacucuauc

SEQ ID NO: 13477 - RNA, 23 nt, Homo sapiens
uaaauuucaccuuucugagaagg

SEQ ID NO: 13478 - RNA, 22 nt, Homo sapiens
aaagugcauccuuuuagagugu

SEQ ID NO: 13479 - RNA, 22 nt, Homo sapiens
aaagugcauccuuuuagagguu

SEQ ID NO: 13480 - RNA, 22 nt, Homo sapiens
aaagugcaucuuuuuagaggau

SEQ ID NO: 13481 - RNA, 22 nt, Homo sapiens
caaagugccucccuuuagagug

SEQ ID NO: 13482 - RNA, 23 nt, Homo sapiens
cucuugagggaagcacuuucugu

SEQ ID NO: 13483 - RNA, 23 nt, Homo sapiens
caaagugcuguucgugcagguag

SEQ ID NO: 13484 - RNA, 18 nt, Homo sapiens
aucccaccucugccacca

SEQ ID NO: 13485 - RNA, 17 nt, Homo sapiens
ucgccuccuccucuccc

SEQ ID NO: 13486 - RNA, 21 nt, Homo sapiens
cggcggggacggcgauugguc

SEQ ID NO: 13487 - RNA, 20 nt, Homo sapiens
guccgcucggcgguggccca

SEQ ID NO: 13488 - RNA, 25 nt, Homo sapiens
aggggugguguugggacagcuccgu

SEQ ID NO: 13489 - RNA, 22 nt, Homo sapiens
aggcggggcgccgcgggaccgc

SEQ ID NO: 13490 - RNA, 22 nt, Homo sapiens
aggcagcgggguguaguggaua

SEQ ID NO: 13491 - RNA, 24 nt, Homo sapiens
uggggagcugaggcucugggggug

SEQ ID NO: 13492 - RNA, 22 nt, Homo sapiens
ugugacugguugaccagagggg

SEQ ID NO: 13493 - RNA, 22 nt, Homo sapiens
aacuguuugcagaggaaacuga

SEQ ID NO: 13494 - RNA, 21 nt, Homo sapiens
uagcagcacagaaauauuggc

SEQ ID NO: 13495 - RNA, 22 nt, Homo sapiens
gugaaauguuuaggaccacuag

SEQ ID NO: 13496 - RNA, 22 nt, Homo sapiens
aacaauauccuggugcugagug

SEQ ID NO: 13497 - RNA, 21 nt, Homo sapiens
acuggacuuggagucagaagg

SEQ ID NO: 13498 - RNA, 23 nt, Homo sapiens
uacuccagagggcgucacucaug

SEQ ID NO: 13499 - RNA, 22 nt, Homo sapiens
aucuggagguaagaagcacuuu

SEQ ID NO: 13500 - RNA, 22 nt, Homo sapiens
ugugacagauugauaacugaaa

SEQ ID NO: 13501 - RNA, 21 nt, Homo sapiens
gcgacccauacuugguuucag

SEQ ID NO: 13502 - RNA, 23 nt, Homo sapiens
ugucacucggcucggcccacuac

SEQ ID NO: 13503 - RNA, 23 nt, Homo sapiens
ugucacucggcucggcccacuac

SEQ ID NO: 13504 - RNA, 21 nt, Homo sapiens
cugacuguugccguccuccag

SEQ ID NO: 13505 - RNA, 23 nt, Homo sapiens
ucuggcuccgugucuucacuccc

SEQ ID NO: 13506 - RNA, 20 nt, Homo sapiens
uguuuugauaacaguaaugu

SEQ ID NO: 13507 - RNA, 22 nt, Homo sapiens
uggcaguguauuguuagcuggu

SEQ ID NO: 13508 - RNA, 23 nt, Homo sapiens
gaagugcuucgauuuuggggugu

SEQ ID NO: 13509 - RNA, 22 nt, Homo sapiens
gucauacacggcucuccucucu

SEQ ID NO: 13510 - RNA, 22 nt, Homo sapiens
agucauuggaggguuugagcag

SEQ ID NO: 13511 - RNA, 21 nt, Homo sapiens
uggguuuacguugggagaacu

SEQ ID NO: 13512 - RNA, 21 nt, Homo sapiens
uacucaaaaagcugucaguca

SEQ ID NO: 13513 - RNA, 22 nt, Homo sapiens
ucuucucuguuuuggccaugug

SEQ ID NO: 13514 - RNA, 22 nt, Homo sapiens
acccgucccguucguccccgga

SEQ ID NO: 13515 - RNA, 18 nt, Homo sapiens
aucccaccucugccacca

SEQ ID NO: 13516 - RNA, 18 nt, Homo sapiens
gucccuguucaggcgcca

SEQ ID NO: 13517 - RNA, 22 nt, Homo sapiens
caaagaauucuccuuuugggcu

SEQ ID NO: 13518 - RNA, 23 nt, Homo sapiens
agcuacauugucugcuggguuuc

SEQ ID NO: 13519 - RNA, 23 nt, Homo sapiens
ucccuguccuccaggagcucacg

SEQ ID NO: 13520 - RNA, 22 nt, Homo sapiens
uggcagugucuuagcugguugu

SEQ ID NO: 13521 - RNA, 22 nt, Homo sapiens
caaucacuaacuccacugccau

SEQ ID NO: 13522 - RNA, 23 nt, Homo sapiens
aggcaguguaguuagcugauugc

SEQ ID NO: 13523 - RNA, 22 nt, Homo sapiens
uggcaguguauuguuagcuggu

SEQ ID NO: 13524 - RNA, 22 nt, Homo sapiens
aggcaguguauuguuagcuggc

SEQ ID NO: 13525 - RNA, 22 nt, Homo sapiens
uugggaucauuuugcauccaua

SEQ ID NO: 13526 - RNA, 22 nt, Homo sapiens
uugggaucauuuugcauccaua

SEQ ID NO: 13527 - RNA, 22 nt, Homo sapiens
agaggcuggccgugaugaauuc

SEQ ID NO: 13528 - RNA, 23 nt, Homo sapiens
uagcagcgggaacaguucugcag

SEQ ID NO: 13529 - RNA, 23 nt, Homo sapiens
uacuccagagggcgucacucaug

SEQ ID NO: 13530 - RNA, 21 nt, Homo sapiens
ggcuagcaacagcgcuuaccu

SEQ ID NO: 13531 - RNA, 23 nt, Homo sapiens
aucgcugcgguugcgagcgcugu

SEQ ID NO: 13532 - RNA, 23 nt, Homo sapiens
cugggaucuccggggucuugguu

SEQ ID NO: 13533 - RNA, 23 nt, Homo sapiens
cugggaucuccggggucuugguu

SEQ ID NO: 13534 - RNA, 22 nt, Homo sapiens
uauugcacucgucccggccucc

SEQ ID NO: 13535 - RNA, 22 nt, Homo sapiens
aguggggaacccuuccaugagg

SEQ ID NO: 13536 - RNA, 22 nt, Homo sapiens
auccgcgcucugacucucugcc

SEQ ID NO: 13537 - RNA, 21 nt, Homo sapiens
ucguggccuggucuccauuau

SEQ ID NO: 13538 - RNA, 22 nt, Homo sapiens
uggagugugacaaugguguuug

SEQ ID NO: 13539 - RNA, 22 nt, Homo sapiens
acccgucccguucguccccgga

SEQ ID NO: 13540 - RNA, 18 nt, Homo sapiens
cgggcguggugguggggg

SEQ ID NO: 13541 - RNA, 17 nt, Homo sapiens
ucccaccgcugccaccc

SEQ ID NO: 13542 - RNA, 21 nt, Homo sapiens
uuaggccgcagaucuggguga

SEQ ID NO: 13543 - RNA, 21 nt, Homo sapiens
cggcggggacggcgauugguc

SEQ ID NO: 13544 - RNA, 20 nt, Homo sapiens
ccccagggcgacgcggcggg

SEQ ID NO: 13545 - RNA, 22 nt, Homo sapiens
ucaggccaggcacaguggcuca

SEQ ID NO: 13546 - RNA, 21 nt, Homo sapiens
gccccugggccuauccuagaa

SEQ ID NO: 13547 - RNA, 22 nt, Homo sapiens
ucaggcucaguccccucccgau

SEQ ID NO: 13548 - RNA, 21 nt, Homo sapiens
aagccugcccggcuccucggg

SEQ ID NO: 13549 - RNA, 22 nt, Homo sapiens
aggcggggcgccgcgggaccgc

SEQ ID NO: 13550 - RNA, 22 nt, Homo sapiens
ugcggggcuagggcuaacagca

SEQ ID NO: 13551 - RNA, 17 nt, Homo sapiens
ucccuguucgggcgcca

SEQ ID NO: 13552 - RNA, 22 nt, Homo sapiens
ugagaacugaauuccauggguu

SEQ ID NO: 13553 - RNA, 22 nt, Homo sapiens
ugcccuguggacucaguucugg

SEQ ID NO: 13554 - RNA, 23 nt, Homo sapiens
ucuggcuccgugucuucacuccc

SEQ ID NO: 13555 - RNA, 21 nt, Homo sapiens
ucgaggagcucacagucuagu

SEQ ID NO: 13556 - RNA, 23 nt, Homo sapiens
cggcccgggcugcugcuguuccu

SEQ ID NO: 13557 - RNA, 22 nt, Homo sapiens
aacuggcccucaaagucccgcu

SEQ ID NO: 13558 - RNA, 22 nt, Homo sapiens
uccuucauuccaccggagucug

SEQ ID NO: 13559 - RNA, 22 nt, Homo sapiens
cauugcacuugucucggucuga

SEQ ID NO: 13560 - RNA, 22 nt, Homo sapiens
uaugugccuuuggacuacaucg

SEQ ID NO: 13561 - RNA, 21 nt, Homo sapiens
aggaggcagcgcucucaggac

SEQ ID NO: 13562 - RNA, 25 nt, Homo sapiens
ggcggagggaaguagguccguuggu

SEQ ID NO: 13563 - RNA, 22 nt, Homo sapiens
acuccagccccacagccucagc

SEQ ID NO: 13564 - RNA, 22 nt, Homo sapiens
uggauuucuuugugaaucacca

SEQ ID NO: 13565 - RNA, 23 nt, Homo sapiens
gcagcagagaauaggacuacguc

SEQ ID NO: 13566 - RNA, 20 nt, Homo sapiens
ggggagcuguggaagcagua

SEQ ID NO: 13567 - RNA, 18 nt, Homo sapiens
cagggaggugaaugugau

SEQ ID NO: 13568 - RNA, 22 nt, Homo sapiens
ugauauguuugauauauuaggu

SEQ ID NO: 13569 - RNA, 20 nt, Homo sapiens
ccuccugcccuccuugcugu

SEQ ID NO: 13570 - RNA, 22 nt, Homo sapiens
uuauaaagcaaugagacugauu

SEQ ID NO: 13571 - RNA, 22 nt, Homo sapiens
gcugacuccuaguccagggcuc

SEQ ID NO: 13572 - RNA, 22 nt, Homo sapiens
caaccuggaggacuccaugcug

SEQ ID NO: 13573 - RNA, 22 nt, Homo sapiens
aagugcugucauagcugagguc

SEQ ID NO: 13574 - RNA, 22 nt, Homo sapiens
aaaccuguguuguucaagaguc

SEQ ID NO: 13575 - RNA, 23 nt, Homo sapiens
ucugcucauaccccaugguuucu

SEQ ID NO: 13576 - RNA, 22 nt, Homo sapiens
cugcccuggcccgagggaccga

SEQ ID NO: 13577 - RNA, 23 nt, Homo sapiens
ucuuugguuaucuagcuguauga

SEQ ID NO: 13578 - RNA, 22 nt, Homo sapiens
acccgucccguucguccccgga

SEQ ID NO: 13579 - RNA, 21 nt, Homo sapiens
ugcaggaccaagaugagcccu

SEQ ID NO: 13580 - RNA, 23 nt, Homo sapiens
ucuggcuccgugucuucacuccc

SEQ ID NO: 13581 - RNA, 21 nt, Homo sapiens
cggcggggacggcgauugguc

SEQ ID NO: 13582 - RNA, 22 nt, Homo sapiens
uacccagagcaugcagugugaa

SEQ ID NO: 13583 - RNA, 22 nt, Homo sapiens
cccugugcccggcccacuucug

SEQ ID NO: 13584 - RNA, 22 nt, Homo sapiens
aacacaccugguuaaccucuuu

SEQ ID NO: 13585 - RNA, 22 nt, Homo sapiens
aacacaccuauucaaggauuca

SEQ ID NO: 13586 - RNA, 23 nt, Homo sapiens
ugaggggcagagagcgagacuuu

SEQ ID NO: 13587 - RNA, 19 nt, Homo sapiens
aggcugcggaauucaggac

SEQ ID NO: 13588 - RNA, 22 nt, Homo sapiens
aggcggggcgccgcgggaccgc

SEQ ID NO: 13589 - RNA, 20 nt, Homo sapiens
accaggaggcugaggccccu

SEQ ID NO: 13590 - RNA, 22 nt, Homo sapiens
ugcggggcuagggcuaacagca

SEQ ID NO: 13591 - RNA, 22 nt, Homo sapiens
acuccagccccacagccucagc

SEQ ID NO: 13592 - RNA, 22 nt, Homo sapiens
uauugcacucgucccggccucc

SEQ ID NO: 13593 - RNA, 21 nt, Homo sapiens
uggcagggaggcugggagggg

SEQ ID NO: 13594 - RNA, 22 nt, Homo sapiens
ugagccccugugccgcccccag

SEQ ID NO: 13595 - RNA, 20 nt, Homo sapiens
ugagcccuguccucccgcag

SEQ ID NO: 13596 - RNA, 21 nt, Homo sapiens
cggcggggacggcgauugguc

SEQ ID NO: 13597 - RNA, 22 nt, Homo sapiens
cauugcacuugucucggucuga

SEQ ID NO: 13598 - RNA, 23 nt, Homo sapiens
ugagcgccucgacgacagagccg

SEQ ID NO: 13599 - RNA, 22 nt, Homo sapiens
uccgagccugggucucccucuu

SEQ ID NO: 13600 - RNA, 22 nt, Homo sapiens
aggcggggcgccgcgggaccgc

SEQ ID NO: 13601 - RNA, 22 nt, Homo sapiens
ugcggggcuagggcuaacagca

SEQ ID NO: 13602 - RNA, 22 nt, Homo sapiens
ugagccccugugccgcccccag

SEQ ID NO: 13603 - RNA, 17 nt, Homo sapiens
ucccuguucgggcgcca

SEQ ID NO: 13604 - RNA, 18 nt, Homo sapiens
cagggaggugaaugugau

SEQ ID NO: 13605 - RNA, 22 nt, Homo sapiens
ugcccuguggacucaguucugg

SEQ ID NO: 13606 - RNA, 23 nt, Homo sapiens
ucuggcuccgugucuucacuccc

SEQ ID NO: 13607 - RNA, 23 nt, Homo sapiens
caacggaaucccaaaagcagcug

SEQ ID NO: 13608 - RNA, 21 nt, Homo sapiens
cugaccuaugaauugacagcc

SEQ ID NO: 13609 - RNA, 23 nt, Homo sapiens
ugagcgccucgacgacagagccg

SEQ ID NO: 13610 - RNA, 22 nt, Homo sapiens
uggcagugucuuagcugguugu

SEQ ID NO: 13611 - RNA, 23 nt, Homo sapiens
ugaggggcagagagcgagacuuu

SEQ ID NO: 13612 - RNA, 19 nt, Homo sapiens
aggcugcggaauucaggac

SEQ ID NO: 13613 - RNA, 22 nt, Homo sapiens
ggggguccccggugcucggauc

SEQ ID NO: 13614 - RNA, 21 nt, Homo sapiens
guggcugcacucacuuccuuc

SEQ ID NO: 13615 - RNA, 17 nt, Homo sapiens
ucucgcuggggccucca

SEQ ID NO: 13616 - RNA, 20 nt, Homo sapiens
cggcucugggucugugggga

SEQ ID NO: 13617 - RNA, 22 nt, Homo sapiens
auccgcgcucugacucucugcc

SEQ ID NO: 13618 - RNA, 21 nt, Homo sapiens
uggacugcccugaucuggaga

SEQ ID NO: 13619 - RNA, 18 nt, Homo sapiens
cagggaggugaaugugau

SEQ ID NO: 13620 - RNA, 22 nt, Homo sapiens
ucugcccccuccgcugcugcca

SEQ ID NO: 13621 - RNA, 22 nt, Homo sapiens
cauugcacuugucucggucuga

SEQ ID NO: 13622 - RNA, 20 nt, Homo sapiens
acugccccaggugcugcugg

SEQ ID NO: 13623 - RNA, 23 nt, Homo sapiens
ugaggggcagagagcgagacuuu

SEQ ID NO: 13624 - RNA, 21 nt, Homo sapiens
cggggcagcucaguacaggau

SEQ ID NO: 13625 - RNA, 25 nt, Homo sapiens
aggggugguguugggacagcuccgu

SEQ ID NO: 13626 - RNA, 21 nt, Homo sapiens
agggggaaaguucuauagucc

SEQ ID NO: 13627 - RNA, 19 nt, Homo sapiens
aguguggcuuucuuagagc

SEQ ID NO: 13628 - RNA, 22 nt, Homo sapiens
gguggcccggccgugccugagg

SEQ ID NO: 13629 - RNA, 21 nt, Homo sapiens
uggaggagaaggaaggugaug

SEQ ID NO: 13630 - RNA, 20 nt, Homo sapiens
ggggagcuguggaagcagua

SEQ ID NO: 13631 - RNA, 23 nt, Homo sapiens
aaaagugcuuacagugcagguag

SEQ ID NO: 13632 - RNA, 18 nt, Homo sapiens
ucagcuggcccucauuuc

SEQ ID NO: 13633 - RNA, 22 nt, Homo sapiens
ucaccagcccuguguucccuag

SEQ ID NO: 13634 - RNA, 22 nt, Homo sapiens
uaacagucuacagccauggucg

SEQ ID NO: 13635 - RNA, 23 nt, Homo sapiens
agcugguguugugaaucaggccg

SEQ ID NO: 13636 - RNA, 21 nt, Homo sapiens
uaacagucuccagucacggcc

SEQ ID NO: 13637 - RNA, 22 nt, Homo sapiens
auauaauacaaccugcuaagug

SEQ ID NO: 13638 - RNA, 22 nt, Homo sapiens
aacuguuugcagaggaaacuga

SEQ ID NO: 13639 - RNA, 22 nt, Homo sapiens
ucaggcucaguccccucccgau

SEQ ID NO: 13640 - RNA, 19 nt, Homo sapiens
ugagcugcuguaccaaaau

SEQ ID NO: 13641 - RNA, 22 nt, Homo sapiens
uugugucaauaugcgaugaugu

SEQ ID NO: 13642 - RNA, 22 nt, Homo sapiens
augcugacauauuuacuagagg

SEQ ID NO: 13643 - RNA, 19 nt, Homo sapiens
gugucugcuuccuguggga

SEQ ID NO: 13644 - RNA, 19 nt, Homo sapiens
aagcagcugccucugaggc

SEQ ID NO: 13645 - RNA, 21 nt, Homo sapiens
guggcugcacucacuuccuuc

SEQ ID NO: 13646 - RNA, 22 nt, Homo sapiens
ugugcgcagggagaccucuccc

SEQ ID NO: 13647 - RNA, 22 nt, Homo sapiens
cucggcgcggggcgcgggcucc

SEQ ID NO: 13648 - RNA, 26 nt, Homo sapiens
gaugaugauggcagcaaauucugaaa

SEQ ID NO: 13649 - RNA, 18 nt, Homo sapiens
uugagaaggaggcugcug

SEQ ID NO: 13650 - RNA, 22 nt, Homo sapiens
ucucccaacccuuguaccagug

SEQ ID NO: 13651 - RNA, 22 nt, Homo sapiens
aagcugccaguugaagaacugu

SEQ ID NO: 13652 - RNA, 23 nt, Homo sapiens
agcuacauugucugcuggguuuc

SEQ ID NO: 13653 - RNA, 21 nt, Homo sapiens
agcuacaucuggcuacugggu

SEQ ID NO: 13654 - RNA, 22 nt, Homo sapiens
uggcagugucuuagcugguugu

SEQ ID NO: 13655 - RNA, 21 nt, Homo sapiens
cuucuugugcucuaggauugu

SEQ ID NO: 13656 - RNA, 18 nt, Homo sapiens
ugaggcaguagauugaau

SEQ ID NO: 13657 - RNA, 22 nt, Homo sapiens
gucccucuccaaaugugucuug

SEQ ID NO: 13658 - RNA, 21 nt, Homo sapiens
aggaggcagcgcucucaggac

SEQ ID NO: 13659 - RNA, 22 nt, Homo sapiens
ugcaacgaaccugagccacuga

SEQ ID NO: 13660 - RNA, 24 nt, Homo sapiens
uuuggcaaugguagaacucacacu

SEQ ID NO: 13661 - RNA, 21 nt, Homo sapiens
cugaccuaugaauugacagcc

SEQ ID NO: 13662 - RNA, 22 nt, Homo sapiens
ugauugguacgucuguggguag

SEQ ID NO: 13663 - RNA, 18 nt, Homo sapiens
ugcuuccuuucagagggu

SEQ ID NO: 13664 - RNA, 22 nt, Homo sapiens
aucuggagguaagaagcacuuu

SEQ ID NO: 13665 - RNA, 21 nt, Homo sapiens
uuggccacaauggguuagaac

SEQ ID NO: 13666 - RNA, 21 nt, Homo sapiens
cggcggggacggcgauugguc

SEQ ID NO: 13667 - RNA, 22 nt, Homo sapiens
ggggguccccggugcucggauc

SEQ ID NO: 13668 - RNA, 22 nt, Homo sapiens
aggcggggcgccgcgggaccgc

SEQ ID NO: 13669 - RNA, 20 nt, Homo sapiens
cggcucugggucugugggga

SEQ ID NO: 13670 - RNA, 22 nt, Homo sapiens
aacccguagauccgaucuugug

SEQ ID NO: 13671 - RNA, 22 nt, Homo sapiens
cacccguagaaccgaccuugcg

SEQ ID NO: 13672 - RNA, 21 nt, Homo sapiens
cccggagccaggaugcagcuc

SEQ ID NO: 13673 - RNA, 22 nt, Homo sapiens
acucggcguggcgucggucgug

SEQ ID NO: 13674 - RNA, 22 nt, Homo sapiens
cucggcgcggggcgcgggcucc

SEQ ID NO: 13675 - RNA, 23 nt, Homo sapiens
cggcccgggcugcugcuguuccu

SEQ ID NO: 13676 - RNA, 22 nt, Homo sapiens
gguccagaggggagauagguuc

SEQ ID NO: 13677 - RNA, 23 nt, Homo sapiens
ugagcgccucgacgacagagccg

SEQ ID NO: 13678 - RNA, 22 nt, Homo sapiens
gccugcugggguggaaccuggu

SEQ ID NO: 13679 - RNA, 23 nt, Homo sapiens
caaagcgcuucucuuuagagugu

SEQ ID NO: 13680 - RNA, 21 nt, Homo sapiens
cuccagagggaaguacuuucu

SEQ ID NO: 13681 - RNA, 21 nt, Homo sapiens
cuccagagggaugcacuuucu

SEQ ID NO: 13682 - RNA, 21 nt, Homo sapiens
uuggccacaauggguuagaac

SEQ ID NO: 13683 - RNA, 22 nt, Homo sapiens
ugcggggcuagggcuaacagca

SEQ ID NO: 13684 - RNA, 21 nt, Homo sapiens
uccuucugcuccgucccccag

SEQ ID NO: 13685 - RNA, 21 nt, Homo sapiens
gcccuccgcccgugcaccccg

SEQ ID NO: 13686 - RNA, 22 nt, Homo sapiens
uggcucaguucagcaggaacag

SEQ ID NO: 13687 - RNA, 22 nt, Homo sapiens
cuuaugcaagauucccuucuac

SEQ ID NO: 13688 - RNA, 21 nt, Homo sapiens
ugagaugaagcacuguagcuc

SEQ ID NO: 13689 - RNA, 22 nt, Homo sapiens
aagcugccaguugaagaacugu

SEQ ID NO: 13690 - RNA, 21 nt, Homo sapiens
uaaagugcugacagugcagau

SEQ ID NO: 13691 - RNA, 23 nt, Homo sapiens
cagugcaaugauauugucaaagc

SEQ ID NO: 13692 - RNA, 21 nt, Homo sapiens
gaaggcgcuucccuuuggagu

SEQ ID NO: 13693 - RNA, 22 nt, Homo sapiens
gaaggcgcuucccuuuagagcg

SEQ ID NO: 13694 - RNA, 19 nt, Homo sapiens
gggcgccugugaucccaac

SEQ ID NO: 13695 - RNA, 25 nt, Homo sapiens
ggcggagggaaguagguccguuggu

SEQ ID NO: 13696 - RNA, 22 nt, Homo sapiens
gguggcccggccgugccugagg

SEQ ID NO: 13697 - RNA, 22 nt, Homo sapiens
ugcggggcuagggcuaacagca

SEQ ID NO: 13698 - RNA, 22 nt, Homo sapiens
aggcagcgggguguaguggaua

SEQ ID NO: 13699 - RNA, 22 nt, Homo sapiens
auccgcgcucugacucucugcc

SEQ ID NO: 13700 - RNA, 21 nt, Homo sapiens
uacaguacugugauaacugaa

SEQ ID NO: 13701 - RNA, 22 nt, Homo sapiens
ucggccugaccacccaccccac

SEQ ID NO: 13702 - RNA, 17 nt, Homo sapiens
ucgccuccuccucuccc

SEQ ID NO: 13703 - RNA, 22 nt, Homo sapiens
ugugagguuggcauuguugucu

SEQ ID NO: 13704 - RNA, 23 nt, Homo sapiens
ucuggcuccgugucuucacuccc

SEQ ID NO: 13705 - RNA, 23 nt, Homo sapiens
ucccuguccuccaggagcucacg

SEQ ID NO: 13706 - RNA, 21 nt, Homo sapiens
cgcgggugcuuacugacccuu

SEQ ID NO: 13707 - RNA, 23 nt, Homo sapiens
ccugcagcgacuugauggcuucc

SEQ ID NO: 13708 - RNA, 23 nt, Homo sapiens
ucuggcuccgugucuucacuccc

SEQ ID NO: 13709 - RNA, 23 nt, Homo sapiens
cggcccgggcugcugcuguuccu

SEQ ID NO: 13710 - RNA, 23 nt, Homo sapiens
ugaguaccgccaugucuguuggg

SEQ ID NO: 13711 - RNA, 20 nt, Homo sapiens
ccuccugcccuccuugcugu

SEQ ID NO: 13712 - RNA, 21 nt, Homo sapiens
aggggugcuaucugugauuga

SEQ ID NO: 13713 - RNA, 22 nt, Homo sapiens
agaggcuggccgugaugaauuc

SEQ ID NO: 13714 - RNA, 21 nt, Homo sapiens
uccgguucucagggcuccacc

SEQ ID NO: 13715 - RNA, 24 nt, Homo sapiens
uggggagcugaggcucugggggug

SEQ ID NO: 13716 - RNA, 23 nt, Homo sapiens
ucuggcuccgugucuucacuccc

SEQ ID NO: 13717 - RNA, 21 nt, Homo sapiens
cggcggggacggcgauugguc

SEQ ID NO: 13718 - RNA, 22 nt, Homo sapiens
acacagggcuguugugaagacu

SEQ ID NO: 13719 - RNA, 21 nt, Homo sapiens
ugucuugcaggccgucaugca

SEQ ID NO: 13720 - RNA, 23 nt, Homo sapiens
cacucagccuugagggcacuuuc

SEQ ID NO: 13721 - RNA, 22 nt, Homo sapiens
aggcggggcgccgcgggaccgc

SEQ ID NO: 13722 - RNA, 22 nt, Homo sapiens
ugcggggcuagggcuaacagca

SEQ ID NO: 13723 - RNA, 22 nt, Homo sapiens
ugugcgcagggagaccucuccc

SEQ ID NO: 13724 - RNA, 22 nt, Homo sapiens
uuuccggcucgcgugggugugu

SEQ ID NO: 13725 - RNA, 21 nt, Homo sapiens
uggcagggaggcugggagggg

SEQ ID NO: 13726 - RNA, 18 nt, Homo sapiens
aucccaccucugccacca

SEQ ID NO: 13727 - RNA, 17 nt, Homo sapiens
ucccaccgcugccaccc

SEQ ID NO: 13728 - RNA, 21 nt, Homo sapiens
uggacugcccugaucuggaga

SEQ ID NO: 13729 - RNA, 22 nt, Homo sapiens
acucggcguggcgucggucgug

SEQ ID NO: 13730 - RNA, 22 nt, Homo sapiens
ggagacgcggcccuguuggagu

SEQ ID NO: 13731 - RNA, 22 nt, Homo sapiens
agaauuguggcuggacaucugu

SEQ ID NO: 13732 - RNA, 21 nt, Homo sapiens
uaaagugcugacagugcagau

SEQ ID NO: 13733 - RNA, 23 nt, Homo sapiens
cagugcaaugauauugucaaagc

SEQ ID NO: 13734 - RNA, 20 nt, Homo sapiens
ccucugggcccuuccuccag

SEQ ID NO: 13735 - RNA, 22 nt, Homo sapiens
ucucugggccugugucuuaggc

SEQ ID NO: 13736 - RNA, 22 nt, Homo sapiens
ugcggggcuagggcuaacagca

SEQ ID NO: 13737 - RNA, 21 nt, Homo sapiens
aaggcagggcccccgcucccc

SEQ ID NO: 13738 - RNA, 22 nt, Homo sapiens
uggagugugacaaugguguuug

SEQ ID NO: 13739 - RNA, 23 nt, Homo sapiens
uaaggugcaucuagugcagauag

SEQ ID NO: 13740 - RNA, 21 nt, Homo sapiens
acuggacuuggagucagaagg

SEQ ID NO: 13741 - RNA, 21 nt, Homo sapiens
aauauaacacagauggccugu

SEQ ID NO: 13742 - RNA, 24 nt, Homo sapiens
ugccugggucucuggccugcgcgu

SEQ ID NO: 13743 - RNA, 22 nt, Homo sapiens
aggcagcgggguguaguggaua

SEQ ID NO: 13744 - RNA, 20 nt, Homo sapiens
ggggagcuguggaagcagua

SEQ ID NO: 13745 - RNA, 22 nt, Homo sapiens
ggagacgcggcccuguuggagu

SEQ ID NO: 13746 - RNA, 21 nt, Homo sapiens
cggcggggacggcgauugguc

SEQ ID NO: 13747 - RNA, 22 nt, Homo sapiens
aggcggggcgccgcgggaccgc

SEQ ID NO: 13748 - RNA, 23 nt, Homo sapiens
uggugcggagagggcccacagug

SEQ ID NO: 13749 - RNA, 24 nt, Homo sapiens
uggggagcugaggcucugggggug

SEQ ID NO: 13750 - RNA, 23 nt, Homo sapiens
cacccggcugugugcacaugugc

SEQ ID NO: 13751 - RNA, 18 nt, Homo sapiens
cagggaggugaaugugau

SEQ ID NO: 13752 - RNA, 23 nt, Homo sapiens
ucuggcuccgugucuucacuccc

SEQ ID NO: 13753 - RNA, 22 nt, Homo sapiens
uggagagaaaggcaguuccuga

SEQ ID NO: 13754 - RNA, 22 nt, Homo sapiens
cauugcacuugucucggucuga

SEQ ID NO: 13755 - RNA, 21 nt, Homo sapiens
uggaggagaaggaaggugaug

SEQ ID NO: 13756 - RNA, 21 nt, Homo sapiens
gcccuccgcccgugcaccccg

SEQ ID NO: 13757 - RNA, 21 nt, Homo sapiens
aggggugcuaucugugauuga

SEQ ID NO: 13758 - RNA, 25 nt, Homo sapiens
aggggugguguugggacagcuccgu

SEQ ID NO: 13759 - RNA, 22 nt, Homo sapiens
agacuucccauuugaagguggc

SEQ ID NO: 13760 - RNA, 23 nt, Homo sapiens
uggugcggagagggcccacagug

SEQ ID NO: 13761 - RNA, 20 nt, Homo sapiens
ggggagcuguggaagcagua

SEQ ID NO: 13762 - RNA, 21 nt, Homo sapiens
uugcucacuguucuucccuag

SEQ ID NO: 13763 - RNA, 23 nt, Homo sapiens
ucuggcuccgugucuucacuccc

SEQ ID NO: 13764 - RNA, 22 nt, Homo sapiens
cgcaggggccgggugcucaccg

SEQ ID NO: 13765 - RNA, 22 nt, Homo sapiens
uggcagugucuuagcugguugu

SEQ ID NO: 13766 - RNA, 22 nt, Homo sapiens
caaucacuaacuccacugccau

SEQ ID NO: 13767 - RNA, 23 nt, Homo sapiens
aggcaguguaguuagcugauugc

SEQ ID NO: 13768 - RNA, 22 nt, Homo sapiens
uggcaguguauuguuagcuggu

SEQ ID NO: 13769 - RNA, 22 nt, Homo sapiens
aggcaguguauuguuagcuggc

SEQ ID NO: 13770 - RNA, 22 nt, Homo sapiens
augcugacauauuuacuagagg

SEQ ID NO: 13771 - RNA, 20 nt, Homo sapiens
ggggagcuguggaagcagua

SEQ ID NO: 13772 - RNA, 23 nt, Homo sapiens
gcagcagagaauaggacuacguc

SEQ ID NO: 13773 - RNA, 22 nt, Homo sapiens
uauugcacucgucccggccucc

SEQ ID NO: 13774 - RNA, 22 nt, Homo sapiens
acgcccuucccccccuucuuca

SEQ ID NO: 13775 - RNA, 22 nt, Homo sapiens
cuuggcaccuagcaagcacuca

SEQ ID NO: 13776 - RNA, 23 nt, Homo sapiens
cggcccgggcugcugcuguuccu

SEQ ID NO: 13777 - RNA, 23 nt, Homo sapiens
uaaggugcaucuagugcagauag

SEQ ID NO: 13778 - RNA, 23 nt, Homo sapiens
uaaggugcaucuagugcaguuag

SEQ ID NO: 13779 - RNA, 21 nt, Homo sapiens
cggcggggacggcgauugguc

SEQ ID NO: 13780 - RNA, 22 nt, Homo sapiens
ugauugguacgucuguggguag

SEQ ID NO: 13781 - RNA, 21 nt, Homo sapiens
aaagcgcuucccuucagagug

SEQ ID NO: 13782 - RNA, 22 nt, Homo sapiens
aggcggggcgccgcgggaccgc

SEQ ID NO: 13783 - RNA, 24 nt, Homo sapiens
uggggagcugaggcucugggggug

SEQ ID NO: 13784 - RNA, 23 nt, Homo sapiens
uuuggcacuagcacauuuuugcu

SEQ ID NO: 13785 - RNA, 22 nt, Homo sapiens
uuuccggcucgcgugggugugu

SEQ ID NO: 13786 - RNA, 22 nt, Homo sapiens
ucaaaacugaggggcauuuucu

SEQ ID NO: 13787 - RNA, 21 nt, Homo sapiens
cggcggggacggcgauugguc

SEQ ID NO: 13788 - RNA, 22 nt, Homo sapiens
ccaaaacugcaguuacuuuugc

SEQ ID NO: 13789 - RNA, 22 nt, Homo sapiens
agacuucccauuugaagguggc

SEQ ID NO: 13790 - RNA, 22 nt, Homo sapiens
aggcggggcgccgcgggaccgc

SEQ ID NO: 13791 - RNA, 22 nt, Homo sapiens
ugcggggcuagggcuaacagca

SEQ ID NO: 13792 - RNA, 22 nt, Homo sapiens
ccucuuccccuugucucuccag

SEQ ID NO: 13793 - RNA, 23 nt, Homo sapiens
ugaggggcagagagcgagacuuu

SEQ ID NO: 13794 - RNA, 23 nt, Homo sapiens
gaacgccuguucuugccaggugg

SEQ ID NO: 13795 - RNA, 21 nt, Homo sapiens
uggguuuacguugggagaacu

SEQ ID NO: 13796 - RNA, 20 nt, Homo sapiens
guagaggagauggcgcaggg

SEQ ID NO: 13797 - RNA, 18 nt, Homo sapiens
ucagcuggcccucauuuc

SEQ ID NO: 13798 - RNA, 21 nt, Homo sapiens
uccuucugcuccgucccccag

SEQ ID NO: 13799 - RNA, 22 nt, Homo sapiens
agaaggaaauugaauucauuua

SEQ ID NO: 13800 - RNA, 20 nt, Homo sapiens
guguguggaaaugcuucugc

SEQ ID NO: 13801 - RNA, 22 nt, Homo sapiens
uggagagaaaggcaguuccuga

SEQ ID NO: 13802 - RNA, 22 nt, Homo sapiens
uggagagaaaggcaguuccuga

SEQ ID NO: 13803 - RNA, 22 nt, Homo sapiens
uagcaccaucugaaaucgguua

SEQ ID NO: 13804 - RNA, 22 nt, Homo sapiens
uggcagugucuuagcugguugu

SEQ ID NO: 13805 - RNA, 18 nt, Homo sapiens
ugcuuccuuucagagggu

SEQ ID NO: 13806 - RNA, 22 nt, Homo sapiens
aucuggagguaagaagcacuuu

SEQ ID NO: 13807 - RNA, 22 nt, Homo sapiens
caaaaaucucaauuacuuuugc

SEQ ID NO: 13808 - RNA, 19 nt, Homo sapiens
gggcgccugugaucccaac

SEQ ID NO: 13809 - RNA, 19 nt, Homo sapiens
aagcagcugccucugaggc

SEQ ID NO: 13810 - RNA, 21 nt, Homo sapiens
uggaggagaaggaaggugaug

SEQ ID NO: 13811 - RNA, 22 nt, Homo sapiens
ugugcgcagggagaccucuccc

SEQ ID NO: 13812 - RNA, 21 nt, Homo sapiens
aggggugcuaucugugauuga

SEQ ID NO: 13813 - RNA, 21 nt, Homo sapiens
guggcugcacucacuuccuuc

SEQ ID NO: 13814 - RNA, 22 nt, Homo sapiens
ugugcgcagggagaccucuccc

SEQ ID NO: 13815 - RNA, 21 nt, Homo sapiens
uaaagugcugacagugcagau

SEQ ID NO: 13816 - RNA, 21 nt, Homo sapiens
gugccagcugcagugggggag

SEQ ID NO: 13817 - RNA, 18 nt, Homo sapiens
aucccaccucugccacca

SEQ ID NO: 13818 - RNA, 18 nt, Homo sapiens
cgggcguggugguggggg

SEQ ID NO: 13819 - RNA, 22 nt, Homo sapiens
gcccgcguguggagccaggugu

SEQ ID NO: 13820 - RNA, 22 nt, Homo sapiens
uggcagugucuuagcugguugu

SEQ ID NO: 13821 - RNA, 23 nt, Homo sapiens
aggcaguguaguuagcugauugc

SEQ ID NO: 13822 - RNA, 22 nt, Homo sapiens
uggcaguguauuguuagcuggu

SEQ ID NO: 13823 - RNA, 22 nt, Homo sapiens
aggcaguguauuguuagcuggc

SEQ ID NO: 13824 - RNA, 22 nt, Homo sapiens
aucgugcaucccuuuagagugu

SEQ ID NO: 13825 - RNA, 22 nt, Homo sapiens
aucgugcauccuuuuagagugu

SEQ ID NO: 13826 - RNA, 22 nt, Homo sapiens
ccucccacacccaaggcuugca

SEQ ID NO: 13827 - RNA, 21 nt, Homo sapiens
gcgacccacucuugguuucca

SEQ ID NO: 13828 - RNA, 21 nt, Homo sapiens
gcgacccauacuugguuucag

SEQ ID NO: 13829 - RNA, 25 nt, Homo sapiens
aggggugguguugggacagcuccgu

SEQ ID NO: 13830 - RNA, 18 nt, Homo sapiens
aucccaccucugccacca

SEQ ID NO: 13831 - RNA, 21 nt, Homo sapiens
ugcaggaccaagaugagcccu

SEQ ID NO: 13832 - RNA, 21 nt, Homo sapiens
uugggacauacuuaugcuaaa

SEQ ID NO: 13833 - RNA, 22 nt, Homo sapiens
ucagugcaucacagaacuuugu

SEQ ID NO: 13834 - RNA, 23 nt, Homo sapiens
aacauucaacgcugucggugagu

SEQ ID NO: 13835 - RNA, 23 nt, Homo sapiens
aacauucauugcugucggugggu

SEQ ID NO: 13836 - RNA, 22 nt, Homo sapiens
aacauucaaccugucggugagu

SEQ ID NO: 13837 - RNA, 23 nt, Homo sapiens
aacauucauuguugucggugggu

SEQ ID NO: 13838 - RNA, 22 nt, Homo sapiens
uguaacagcaacuccaugugga

SEQ ID NO: 13839 - RNA, 22 nt, Homo sapiens
gugaaauguuuaggaccacuag

SEQ ID NO: 13840 - RNA, 23 nt, Homo sapiens
ugaggggcagagagcgagacuuu

SEQ ID NO: 13841 - RNA, 21 nt, Homo sapiens
auugacacuucugugaguaga

SEQ ID NO: 13842 - RNA, 22 nt, Homo sapiens
uaugcauuguauuuuuaggucc

SEQ ID NO: 13843 - RNA, 22 nt, Homo sapiens
uugugucaauaugcgaugaugu

SEQ ID NO: 13844 - RNA, 22 nt, Homo sapiens
agacuucccauuugaagguggc

SEQ ID NO: 13845 - RNA, 22 nt, Homo sapiens
caaagugccucccuuuagagug

SEQ ID NO: 13846 - RNA, 22 nt, Homo sapiens
ugagccccugugccgcccccag

SEQ ID NO: 13847 - RNA, 22 nt, Homo sapiens
uggagugugacaaugguguuug

SEQ ID NO: 13848 - RNA, 17 nt, Homo sapiens
ucccaccgcugccaccc

SEQ ID NO: 13849 - RNA, 23 nt, Homo sapiens
cggcccgggcugcugcuguuccu

SEQ ID NO: 13850 - RNA, 22 nt, Homo sapiens
gauuagggugcuuagcuguuaa

SEQ ID NO: 13851 - RNA, 21 nt, Homo sapiens
gccccugggccuauccuagaa

SEQ ID NO: 13852 - RNA, 22 nt, Homo sapiens
aauugcacgguauccaucugua

SEQ ID NO: 13853 - RNA, 22 nt, Homo sapiens
uggugggcacagaaucuggacu

SEQ ID NO: 13854 - RNA, 19 nt, Homo sapiens
aggcugcggaauucaggac

SEQ ID NO: 13855 - RNA, 22 nt, Homo sapiens
ggggguccccggugcucggauc

SEQ ID NO: 13856 - RNA, 21 nt, Homo sapiens
guggcugcacucacuuccuuc

SEQ ID NO: 13857 - RNA, 22 nt, Homo sapiens
uggugggccgcagaacaugugc

SEQ ID NO: 13858 - RNA, 20 nt, Homo sapiens
cggcucugggucugugggga

SEQ ID NO: 13859 - RNA, 21 nt, Homo sapiens
cgcgggugcuuacugacccuu

SEQ ID NO: 13860 - RNA, 23 nt, Homo sapiens
gagggucuugggagggaugugac

SEQ ID NO: 13861 - RNA, 23 nt, Homo sapiens
ccucagggcuguagaacagggcu

SEQ ID NO: 13862 - RNA, 23 nt, Homo sapiens
guccaguuuucccaggaaucccu

SEQ ID NO: 13863 - RNA, 22 nt, Homo sapiens
agacccuggucugcacucuauc

SEQ ID NO: 13864 - RNA, 21 nt, Homo sapiens
augauccaggaaccugccucu

SEQ ID NO: 13865 - RNA, 21 nt, Homo sapiens
cgcgggugcuuacugacccuu

SEQ ID NO: 13866 - RNA, 20 nt, Homo sapiens
ggggagcuguggaagcagua

SEQ ID NO: 13867 - RNA, 21 nt, Homo sapiens
ccccaccuccucucuccucag

SEQ ID NO: 13868 - RNA, 27 nt, Homo sapiens
accuucuuguauaagcacugugcuaaa

SEQ ID NO: 13869 - RNA, 22 nt, Homo sapiens
uuagggcccuggcuccaucucc

SEQ ID NO: 13870 - RNA, 18 nt, Homo sapiens
cagggaggugaaugugau

SEQ ID NO: 13871 - RNA, 23 nt, Homo sapiens
uauggcuuuucauuccuauguga

SEQ ID NO: 13872 - RNA, 23 nt, Homo sapiens
ucuggcuccgugucuucacuccc

SEQ ID NO: 13873 - RNA, 21 nt, Homo sapiens
agggcccccccucaauccugu

SEQ ID NO: 13874 - RNA, 20 nt, Homo sapiens
ggggagcuguggaagcagua

SEQ ID NO: 13875 - RNA, 22 nt, Homo sapiens
ugagguaguagguuguauaguu

SEQ ID NO: 13876 - RNA, 22 nt, Homo sapiens
ugagguaguagguugugugguu

SEQ ID NO: 13877 - RNA, 22 nt, Homo sapiens
ugagguaguagguuguaugguu

SEQ ID NO: 13878 - RNA, 22 nt, Homo sapiens
agagguaguagguugcauaguu

SEQ ID NO: 13879 - RNA, 22 nt, Homo sapiens
ugagguaggagguuguauaguu

SEQ ID NO: 13880 - RNA, 22 nt, Homo sapiens
ugagguaguagauuguauaguu

SEQ ID NO: 13881 - RNA, 22 nt, Homo sapiens
ugagguaguaguuuguacaguu

SEQ ID NO: 13882 - RNA, 22 nt, Homo sapiens
ugagguaguaguuugugcuguu

SEQ ID NO: 13883 - RNA, 22 nt, Homo sapiens
uagguaguuucauguuguuggg

SEQ ID NO: 13884 - RNA, 22 nt, Homo sapiens
uagguaguuuccuguuguuggg

SEQ ID NO: 13885 - RNA, 20 nt, Homo sapiens
ccucugggcccuuccuccag

SEQ ID NO: 13886 - RNA, 22 nt, Homo sapiens
ucucugggccugugucuuaggc

SEQ ID NO: 13887 - RNA, 22 nt, Homo sapiens
cuccuauaugaugccuuucuuc

SEQ ID NO: 13888 - RNA, 22 nt, Homo sapiens
uuauaaagcaaugagacugauu

SEQ ID NO: 13889 - RNA, 22 nt, Homo sapiens
aacuguuugcagaggaaacuga

SEQ ID NO: 13890 - RNA, 22 nt, Homo sapiens
cuuaugcaagauucccuucuac

SEQ ID NO: 13891 - RNA, 22 nt, Homo sapiens
ugauugguacgucuguggguag

SEQ ID NO: 13892 - RNA, 22 nt, Homo sapiens
aaaaguauuugcggguuuuguc

SEQ ID NO: 13893 - RNA, 22 nt, Homo sapiens
caaaaguaauuguggauuuugu

SEQ ID NO: 13894 - RNA, 20 nt, Homo sapiens
cggcucugggucugugggga

SEQ ID NO: 13895 - RNA, 22 nt, Homo sapiens
ugagguaguaaguuguauuguu

SEQ ID NO: 13896 - RNA, 21 nt, Homo sapiens
agugaaugauggguucugacc

SEQ ID NO: 13897 - RNA, 18 nt, Homo sapiens
cgggcguggugguggggg

SEQ ID NO: 13898 - RNA, 19 nt, Homo sapiens
gaugaugcugcugaugcug

SEQ ID NO: 13899 - RNA, 23 nt, Homo sapiens
ucuggcuccgugucuucacuccc

SEQ ID NO: 13900 - RNA, 22 nt, Homo sapiens
aguggggaacccuuccaugagg

SEQ ID NO: 13901 - RNA, 23 nt, Homo sapiens
uacuccagagggcgucacucaug

SEQ ID NO: 13902 - RNA, 25 nt, Homo sapiens
aggggugguguugggacagcuccgu

SEQ ID NO: 13903 - RNA, 21 nt, Homo sapiens
uggguuuacguugggagaacu

SEQ ID NO: 13904 - RNA, 21 nt, Homo sapiens
cccggagccaggaugcagcuc

SEQ ID NO: 13905 - RNA, 23 nt, Homo sapiens
ucuggcuccgugucuucacuccc

SEQ ID NO: 13906 - RNA, 22 nt, Homo sapiens
uacccagagcaugcagugugaa

SEQ ID NO: 13907 - RNA, 23 nt, Homo sapiens
ugguuguaguccgugcgagaaua

SEQ ID NO: 13908 - RNA, 22 nt, Homo sapiens
gugacaucacauauacggcagc

SEQ ID NO: 13909 - RNA, 22 nt, Homo sapiens
cgucaacacuugcugguuuccu

SEQ ID NO: 13910 - RNA, 19 nt, Homo sapiens
aggcugcggaauucaggac

SEQ ID NO: 13911 - RNA, 21 nt, Homo sapiens
uggcagggaggcugggagggg

SEQ ID NO: 13912 - RNA, 22 nt, Homo sapiens
agaaggaaauugaauucauuua

SEQ ID NO: 13913 - RNA, 22 nt, Homo sapiens
ucugggcaacaaagugagaccu

SEQ ID NO: 13914 - RNA, 22 nt, Homo sapiens
cgcaggggccgggugcucaccg

SEQ ID NO: 13915 - RNA, 22 nt, Homo sapiens
cauugcacuugucucggucuga

SEQ ID NO: 13916 - RNA, 22 nt, Homo sapiens
aauugcacgguauccaucugua

SEQ ID NO: 13917 - RNA, 19 nt, Homo sapiens
gagccaguuggacaggagc

SEQ ID NO: 13918 - RNA, 25 nt, Homo sapiens
aggggugguguugggacagcuccgu

SEQ ID NO: 13919 - RNA, 25 nt, Homo sapiens
gcugggcagggcuucugagcuccuu

SEQ ID NO: 13920 - RNA, 20 nt, Homo sapiens
guagaggagauggcgcaggg

SEQ ID NO: 13921 - RNA, 22 nt, Homo sapiens
cacuggcuccuuucuggguaga

SEQ ID NO: 13922 - RNA, 22 nt, Homo sapiens
ugagccccugugccgcccccag

SEQ ID NO: 13923 - RNA, 22 nt, Homo sapiens
acgcccuucccccccuucuuca

SEQ ID NO: 13924 - RNA, 17 nt, Homo sapiens
ucgccuccuccucuccc

SEQ ID NO: 13925 - RNA, 19 nt, Homo sapiens
gggcgccugugaucccaac

SEQ ID NO: 13926 - RNA, 21 nt, Homo sapiens
uuggccacaauggguuagaac

SEQ ID NO: 13927 - RNA, 22 nt, Homo sapiens
ugcggggcuagggcuaacagca

SEQ ID NO: 13928 - RNA, 20 nt, Homo sapiens
cggcucugggucugugggga

SEQ ID NO: 13929 - RNA, 21 nt, Homo sapiens
cgcgggugcuuacugacccuu

SEQ ID NO: 13930 - RNA, 21 nt, Homo sapiens
auauaugaugacuuagcuuuu

SEQ ID NO: 13931 - RNA, 22 nt, Homo sapiens
uuugguccccuucaaccagcug

SEQ ID NO: 13932 - RNA, 22 nt, Homo sapiens
uuugguccccuucaaccagcua

SEQ ID NO: 13933 - RNA, 23 nt, Homo sapiens
ucuggcuccgugucuucacuccc

SEQ ID NO: 13934 - RNA, 21 nt, Homo sapiens
cggcggggacggcgauugguc

SEQ ID NO: 13935 - RNA, 22 nt, Homo sapiens
cauugcacuugucucggucuga

SEQ ID NO: 13936 - RNA, 25 nt, Homo sapiens
aggggugguguugggacagcuccgu

SEQ ID NO: 13937 - RNA, 22 nt, Homo sapiens
aggcggggcgccgcgggaccgc

SEQ ID NO: 13938 - RNA, 22 nt, Homo sapiens
ugcggggcuagggcuaacagca

SEQ ID NO: 13939 - RNA, 20 nt, Homo sapiens
ggggagcuguggaagcagua

SEQ ID NO: 13940 - RNA, 22 nt, Homo sapiens
ccucuuccccuugucucuccag

SEQ ID NO: 13941 - RNA, 22 nt, Homo sapiens
cucccacugcuucacuugacua

SEQ ID NO: 13942 - RNA, 22 nt, Homo sapiens
uuggggaaacggccgcugagug

SEQ ID NO: 13943 - RNA, 22 nt, Homo sapiens
uuauaaagcaaugagacugauu

SEQ ID NO: 13944 - RNA, 20 nt, Homo sapiens
guagaggagauggcgcaggg

SEQ ID NO: 13945 - RNA, 17 nt, Homo sapiens
ucgccuccuccucuccc

SEQ ID NO: 13946 - RNA, 22 nt, Homo sapiens
cccugugcccggcccacuucug

SEQ ID NO: 13947 - RNA, 22 nt, Homo sapiens
aacuggcccucaaagucccgcu

SEQ ID NO: 13948 - RNA, 22 nt, Homo sapiens
ugguuuaccgucccacauacau

SEQ ID NO: 13949 - RNA, 21 nt, Homo sapiens
uggguuuacguugggagaacu

SEQ ID NO: 13950 - RNA, 25 nt, Homo sapiens
ggcggagggaaguagguccguuggu

SEQ ID NO: 13951 - RNA, 20 nt, Homo sapiens
uacaguauagaugauguacu

SEQ ID NO: 13952 - RNA, 22 nt, Homo sapiens
caaagaauucuccuuuugggcu

SEQ ID NO: 13953 - RNA, 21 nt, Homo sapiens
uucacaguggcuaaguuccgc

SEQ ID NO: 13954 - RNA, 22 nt, Homo sapiens
aaauuauuguacaucggaugag

SEQ ID NO: 13955 - RNA, 23 nt, Homo sapiens
uuuggcacuagcacauuuuugcu

SEQ ID NO: 13956 - RNA, 21 nt, Homo sapiens
ucguggccuggucuccauuau

SEQ ID NO: 13957 - RNA, 20 nt, Homo sapiens
ucacaccugccucgcccccc

SEQ ID NO: 13958 - RNA, 18 nt, Homo sapiens
cgggcguggugguggggg

SEQ ID NO: 13959 - RNA, 17 nt, Homo sapiens
ucgccuccuccucuccc

SEQ ID NO: 13960 - RNA, 22 nt, Homo sapiens
uguaaacauccuacacucagcu

SEQ ID NO: 13961 - RNA, 21 nt, Homo sapiens
uuggccacaauggguuagaac

SEQ ID NO: 13962 - RNA, 19 nt, Homo sapiens
aggcugcggaauucaggac

SEQ ID NO: 13963 - RNA, 19 nt, Homo sapiens
aguguggcuuucuuagagc

SEQ ID NO: 13964 - RNA, 22 nt, Homo sapiens
ucggauccgucugagcuuggcu

SEQ ID NO: 13965 - RNA, 21 nt, Homo sapiens
cuuuuugcggucugggcuugc

SEQ ID NO: 13966 - RNA, 22 nt, Homo sapiens
uucccuuugucauccuaugccu

SEQ ID NO: 13967 - RNA, 22 nt, Homo sapiens
uucccuuugucauccuucgccu

SEQ ID NO: 13968 - RNA, 23 nt, Homo sapiens
uacugcaucaggaacugauugga

SEQ ID NO: 13969 - RNA, 21 nt, Homo sapiens
uucacaguggcuaaguucugc

SEQ ID NO: 13970 - RNA, 22 nt, Homo sapiens
cacuagauugugagcuccugga

SEQ ID NO: 13971 - RNA, 22 nt, Homo sapiens
aaggagcucacagucuauugag

SEQ ID NO: 13972 - RNA, 22 nt, Homo sapiens
uugggaucauuuugcauccaua

SEQ ID NO: 13973 - RNA, 22 nt, Homo sapiens
caaaacuggcaauuacuuuugc

SEQ ID NO: 13974 - RNA, 22 nt, Homo sapiens
aaaaacugagacuacuuuugca

SEQ ID NO: 13975 - RNA, 19 nt, Homo sapiens
aaaaacuguaauuacuuuu

SEQ ID NO: 13976 - RNA, 22 nt, Homo sapiens
uaugcauuguauuuuuaggucc

SEQ ID NO: 13977 - RNA, 23 nt, Homo sapiens
aaggagcuuacaaucuagcuggg

SEQ ID NO: 13978 - RNA, 23 nt, Homo sapiens
aaggagcuuacaaucuagcuggg

SEQ ID NO: 13979 - RNA, 23 nt, Homo sapiens
cugggaucuccggggucuugguu

SEQ ID NO: 13980 - RNA, 22 nt, Homo sapiens
cugcccuggcccgagggaccga

SEQ ID NO: 13981 - RNA, 21 nt, Homo sapiens
aagcauucuuucauugguugg

SEQ ID NO: 13982 - RNA, 21 nt, Homo sapiens
aagcauucuuucauugguugg

SEQ ID NO: 13983 - RNA, 27 nt, Homo sapiens
cacuguaggugauggugagagugggca

SEQ ID NO: 13984 - RNA, 22 nt, Homo sapiens
ccucuuccccuugucucuccag

SEQ ID NO: 13985 - RNA, 23 nt, Homo sapiens
caagucuuauuugagcaccuguu

SEQ ID NO: 13986 - RNA, 20 nt, Homo sapiens
uaaagagcccuguggagaca

SEQ ID NO: 13987 - RNA, 18 nt, Homo sapiens
cagggaggugaaugugau

SEQ ID NO: 13988 - RNA, 22 nt, Homo sapiens
ucuacagugcacgugucuccag

SEQ ID NO: 13989 - RNA, 21 nt, Homo sapiens
uaccacaggguagaaccacgg

SEQ ID NO: 13990 - RNA, 23 nt, Homo sapiens
ucuggcuccgugucuucacuccc

SEQ ID NO: 13991 - RNA, 23 nt, Homo sapiens
uuaaugcuaaucgugauaggggu

SEQ ID NO: 13992 - RNA, 22 nt, Homo sapiens
uguaacagcaacuccaugugga

SEQ ID NO: 13993 - RNA, 22 nt, Homo sapiens
uucaccaccuucuccacccagc

SEQ ID NO: 13994 - RNA, 22 nt, Homo sapiens
cucccacugcuucacuugacua

SEQ ID NO: 13995 - RNA, 23 nt, Homo sapiens
uaauacugccggguaaugaugga

SEQ ID NO: 13996 - RNA, 22 nt, Homo sapiens
uucccuuugucauccuaugccu

SEQ ID NO: 13997 - RNA, 22 nt, Homo sapiens
uucccuuugucauccuucgccu

SEQ ID NO: 13998 - RNA, 22 nt, Homo sapiens
uauugcacauuacuaaguugca

SEQ ID NO: 13999 - RNA, 21 nt, Homo sapiens
uugaaaggcuauuucuugguc

SEQ ID NO: 14000 - RNA, 21 nt, Homo sapiens
uuaagacuugcagugauguuu

SEQ ID NO: 14001 - RNA, 23 nt, Homo sapiens
agugccugagggaguaagagccc

SEQ ID NO: 14002 - RNA, 24 nt, Homo sapiens
gaccuggacauguuugugcccagu

SEQ ID NO: 14003 - RNA, 21 nt, Homo sapiens
uggaggagaaggaaggugaug

SEQ ID NO: 14004 - RNA, 19 nt, Homo sapiens
gugaggacucgggaggugg

SEQ ID NO: 14005 - RNA, 22 nt, Homo sapiens
acucggcguggcgucggucgug

SEQ ID NO: 14006 - RNA, 22 nt, Homo sapiens
ugcccuguggacucaguucugg

SEQ ID NO: 14007 - RNA, 22 nt, Homo sapiens
acacagggcuguugugaagacu

SEQ ID NO: 14008 - RNA, 21 nt, Homo sapiens
aggggugcuaucugugauuga

SEQ ID NO: 14009 - RNA, 22 nt, Homo sapiens
uggugggcacagaaucuggacu

SEQ ID NO: 14010 - RNA, 23 nt, Homo sapiens
gcgaggaccccucggggucugac

SEQ ID NO: 14011 - RNA, 22 nt, Homo sapiens
uccgagccugggucucccucuu

SEQ ID NO: 14012 - RNA, 22 nt, Homo sapiens
uggugggccgcagaacaugugc

SEQ ID NO: 14013 - RNA, 24 nt, Homo sapiens
ugccugggucucuggccugcgcgu

SEQ ID NO: 14014 - RNA, 21 nt, Homo sapiens
cacaagguauugguauuaccu

SEQ ID NO: 14015 - RNA, 22 nt, Homo sapiens
ugagguaguaguuuguacaguu

SEQ ID NO: 14016 - RNA, 22 nt, Homo sapiens
caggauguggucaaguguuguu

SEQ ID NO: 14017 - RNA, 23 nt, Homo sapiens
acuucaccugguccacuagccgu

SEQ ID NO: 14018 - RNA, 22 nt, Homo sapiens
uaugugccuuuggacuacaucg

SEQ ID NO: 14019 - RNA, 23 nt, Homo sapiens
ugauuguagccuuuuggaguaga

SEQ ID NO: 14020 - RNA, 20 nt, Homo sapiens
cugcaaagggaagcccuuuc

SEQ ID NO: 14021 - RNA, 20 nt, Homo sapiens
cugcaaagggaagcccuuuc

SEQ ID NO: 14022 - RNA, 21 nt, Homo sapiens
uaggacacauggucuacuucu

SEQ ID NO: 14023 - RNA, 22 nt, Homo sapiens
ugugacugguugaccagagggg

SEQ ID NO: 14024 - RNA, 22 nt, Homo sapiens
ggagacgcggcccuguuggagu

SEQ ID NO: 14025 - RNA, 23 nt, Homo sapiens
ucuggcuccgugucuucacuccc

SEQ ID NO: 14026 - RNA, 21 nt, Homo sapiens
cggcggggacggcgauugguc

SEQ ID NO: 14027 - RNA, 21 nt, Homo sapiens
ugacaacuauggaugagcucu

SEQ ID NO: 14028 - RNA, 22 nt, Homo sapiens
aagcugccaguugaagaacugu

SEQ ID NO: 14029 - RNA, 22 nt, Homo sapiens
gaugagcucauuguaauaugag

SEQ ID NO: 14030 - RNA, 19 nt, Homo sapiens
ugagcugcuguaccaaaau

SEQ ID NO: 14031 - RNA, 21 nt, Homo sapiens
ugaguuggccaucugagugag

SEQ ID NO: 14032 - RNA, 22 nt, Homo sapiens
cuugguucagggagggucccca

SEQ ID NO: 14033 - RNA, 22 nt, Homo sapiens
aggcggggcgccgcgggaccgc

SEQ ID NO: 14034 - RNA, 21 nt, Homo sapiens
agugaaugauggguucugacc

SEQ ID NO: 14035 - RNA, 20 nt, Homo sapiens
uaaagagcccuguggagaca

SEQ ID NO: 14036 - RNA, 18 nt, Homo sapiens
cagggaggugaaugugau

SEQ ID NO: 14037 - RNA, 19 nt, Homo sapiens
gaugaugcugcugaugcug

SEQ ID NO: 14038 - RNA, 22 nt, Homo sapiens
aagcugccaguugaagaacugu

SEQ ID NO: 14039 - RNA, 22 nt, Homo sapiens
uagcaccaucugaaaucgguua

SEQ ID NO: 14040 - RNA, 23 nt, Homo sapiens
uagcaccauuugaaaucaguguu

SEQ ID NO: 14041 - RNA, 22 nt, Homo sapiens
uagcaccauuugaaaucgguua

SEQ ID NO: 14042 - RNA, 22 nt, Homo sapiens
cgucaacacuugcugguuuccu

SEQ ID NO: 14043 - RNA, 21 nt, Homo sapiens
aacaggugacugguuagacaa

SEQ ID NO: 14044 - RNA, 19 nt, Homo sapiens
ugagcugcuguaccaaaau

SEQ ID NO: 14045 - RNA, 22 nt, Homo sapiens
uaugcauuguauuuuuaggucc

SEQ ID NO: 14046 - RNA, 21 nt, Homo sapiens
aggaggcagcgcucucaggac

SEQ ID NO: 14047 - RNA, 22 nt, Homo sapiens
uggguggucuggagauuugugc

SEQ ID NO: 14048 - RNA, 21 nt, Homo sapiens
cggcggggacggcgauugguc

SEQ ID NO: 14049 - RNA, 21 nt, Homo sapiens
ccaccaccgugucugacacuu

SEQ ID NO: 14050 - RNA, 23 nt, Homo sapiens
ucccccaggugugauucugauuu

SEQ ID NO: 14051 - RNA, 23 nt, Homo sapiens
ucccccaggugugauucugauuu

SEQ ID NO: 14052 - RNA, 25 nt, Homo sapiens
aggggugguguugggacagcuccgu

SEQ ID NO: 14053 - RNA, 22 nt, Homo sapiens
ggggguccccggugcucggauc

SEQ ID NO: 14054 - RNA, 21 nt, Homo sapiens
uggguuuacguugggagaacu

SEQ ID NO: 14055 - RNA, 24 nt, Homo sapiens
acugggggcuuucgggcucugcgu

SEQ ID NO: 14056 - RNA, 24 nt, Homo sapiens
acugggggcuuucgggcucugcgu

SEQ ID NO: 14057 - RNA, 22 nt, Homo sapiens
aggcggggcgccgcgggaccgc

SEQ ID NO: 14058 - RNA, 22 nt, Homo sapiens
caaagugccucccuuuagagug

SEQ ID NO: 14059 - RNA, 21 nt, Homo sapiens
aagcauucuuucauugguugg

SEQ ID NO: 14060 - RNA, 17 nt, Homo sapiens
ucgccuccuccucuccc

SEQ ID NO: 14061 - RNA, 23 nt, Homo sapiens
ucuggcuccgugucuucacuccc

SEQ ID NO: 14062 - RNA, 22 nt, Homo sapiens
cgcaggggccgggugcucaccg

SEQ ID NO: 14063 - RNA, 22 nt, Homo sapiens
uagguaguuuccuguuguuggg

SEQ ID NO: 14064 - RNA, 22 nt, Homo sapiens
acagcaggcacagacaggcagu

SEQ ID NO: 14065 - RNA, 21 nt, Homo sapiens
agggcccccccucaauccugu

SEQ ID NO: 14066 - RNA, 21 nt, Homo sapiens
agggcccccccucaauccugu

SEQ ID NO: 14067 - RNA, 22 nt, Homo sapiens
aaaagcuggguugagagggcga

SEQ ID NO: 14068 - RNA, 22 nt, Homo sapiens
aaaagcuggguugagagggcaa

SEQ ID NO: 14069 - RNA, 20 nt, Homo sapiens
aaaagcuggguugagagggu

SEQ ID NO: 14070 - RNA, 19 nt, Homo sapiens
aaaagcuggguugagagga

SEQ ID NO: 14071 - RNA, 21 nt, Homo sapiens
ugguagacuauggaacguagg

SEQ ID NO: 14072 - RNA, 22 nt, Homo sapiens
uagcaaaaacugcaguuacuuu

SEQ ID NO: 14073 - RNA, 25 nt, Homo sapiens
agggaucgcgggcggguggcggccu

SEQ ID NO: 14074 - RNA, 23 nt, Homo sapiens
ccugcagcgacuugauggcuucc

SEQ ID NO: 14075 - RNA, 21 nt, Homo sapiens
uggcagggaggcugggagggg

SEQ ID NO: 14076 - RNA, 24 nt, Homo sapiens
uugcagcugccugggagugacuuc

SEQ ID NO: 14077 - RNA, 18 nt, Homo sapiens
cagggaggugaaugugau

SEQ ID NO: 14078 - RNA, 23 nt, Homo sapiens
ucuggcuccgugucuucacuccc

SEQ ID NO: 14079 - RNA, 22 nt, Homo sapiens
uggagagaaaggcaguuccuga

SEQ ID NO: 14080 - RNA, 22 nt, Homo sapiens
gaggguuggguggaggcucucc

SEQ ID NO: 14081 - RNA, 22 nt, Homo sapiens
uuauaaagcaaugagacugauu

SEQ ID NO: 14082 - RNA, 19 nt, Homo sapiens
ugagcugcuguaccaaaau

SEQ ID NO: 14083 - RNA, 23 nt, Homo sapiens
aucccuugcaggggcuguugggu

SEQ ID NO: 14084 - RNA, 21 nt, Homo sapiens
uggaggagaaggaaggugaug

SEQ ID NO: 14085 - RNA, 23 nt, Homo sapiens
cgggucggaguuagcucaagcgg

SEQ ID NO: 14086 - RNA, 22 nt, Homo sapiens
uauugcacucgucccggccucc

SEQ ID NO: 14087 - RNA, 18 nt, Homo sapiens
cgggcguggugguggggg

SEQ ID NO: 14088 - RNA, 17 nt, Homo sapiens
ucgccuccuccucuccc

SEQ ID NO: 14089 - RNA, 23 nt, Homo sapiens
ucuggcuccgugucuucacuccc

SEQ ID NO: 14090 - RNA, 23 nt, Homo sapiens
cggcccgggcugcugcuguuccu

SEQ ID NO: 14091 - RNA, 22 nt, Homo sapiens
aguggggaacccuuccaugagg

SEQ ID NO: 14092 - RNA, 23 nt, Homo sapiens
uagcagcgggaacaguucugcag

SEQ ID NO: 14093 - RNA, 17 nt, Homo sapiens
ucucgcuggggccucca

SEQ ID NO: 14094 - RNA, 22 nt, Homo sapiens
ugcggggcuagggcuaacagca

SEQ ID NO: 14095 - RNA, 21 nt, Homo sapiens
uggcagggaggcugggagggg

SEQ ID NO: 14096 - RNA, 22 nt, Homo sapiens
augggugaauuuguagaaggau

SEQ ID NO: 14097 - RNA, 22 nt, Homo sapiens
ugugagguuggcauuguugucu

SEQ ID NO: 14098 - RNA, 23 nt, Homo sapiens
agcuacauugucugcuggguuuc

SEQ ID NO: 14099 - RNA, 24 nt, Homo sapiens
agccugauuaaacacaugcucuga

SEQ ID NO: 14100 - RNA, 24 nt, Homo sapiens
ucccugagacccuuuaaccuguga

SEQ ID NO: 14101 - RNA, 22 nt, Homo sapiens
ucccugagacccuaacuuguga

SEQ ID NO: 14102 - RNA, 23 nt, Homo sapiens
ccucagggcuguagaacagggcu

SEQ ID NO: 14103 - RNA, 23 nt, Homo sapiens
ucuggcuccgugucuucacuccc

SEQ ID NO: 14104 - RNA, 22 nt, Homo sapiens
aacuggccuacaaagucccagu

SEQ ID NO: 14105 - RNA, 22 nt, Homo sapiens
aacuggcccucaaagucccgcu

SEQ ID NO: 14106 - RNA, 22 nt, Homo sapiens
ucaggccaggcacaguggcuca

SEQ ID NO: 14107 - RNA, 23 nt, Homo sapiens
ugguuguaguccgugcgagaaua

SEQ ID NO: 14108 - RNA, 22 nt, Homo sapiens
cucccacugcuucacuugacua

SEQ ID NO: 14109 - RNA, 22 nt, Homo sapiens
aagcugccaguugaagaacugu

SEQ ID NO: 14110 - RNA, 22 nt, Homo sapiens
aaggagcucacagucuauugag

SEQ ID NO: 14111 - RNA, 23 nt, Homo sapiens
cgcauccccuagggcauuggugu

SEQ ID NO: 14112 - RNA, 22 nt, Homo sapiens
uuauaaagcaaugagacugauu

SEQ ID NO: 14113 - RNA, 22 nt, Homo sapiens
ccucccacacccaaggcuugca

SEQ ID NO: 14114 - RNA, 19 nt, Homo sapiens
ugagcugcuguaccaaaau

SEQ ID NO: 14115 - RNA, 19 nt, Homo sapiens
aggcacggugucagcaggc

SEQ ID NO: 14116 - RNA, 23 nt, Homo sapiens
aaggagcuuacaaucuagcuggg

SEQ ID NO: 14117 - RNA, 21 nt, Homo sapiens
uggaggagaaggaaggugaug

SEQ ID NO: 14118 - RNA, 22 nt, Homo sapiens
acuccagccccacagccucagc

SEQ ID NO: 14119 - RNA, 18 nt, Homo sapiens
cgggcguggugguggggg

SEQ ID NO: 14120 - RNA, 17 nt, Homo sapiens
ucccaccgcugccaccc

SEQ ID NO: 14121 - RNA, 24 nt, Homo sapiens
uggcccugacugaagaccagcagu

SEQ ID NO: 14122 - RNA, 19 nt, Homo sapiens
gaugaugcugcugaugcug

SEQ ID NO: 14123 - RNA, 22 nt, Homo sapiens
cauugcacuugucucggucuga

SEQ ID NO: 14124 - RNA, 22 nt, Homo sapiens
cgucaacacuugcugguuuccu

SEQ ID NO: 14125 - RNA, 22 nt, Homo sapiens
gugagucucuaagaaaagagga

SEQ ID NO: 14126 - RNA, 22 nt, Homo sapiens
ugcggggcuagggcuaacagca

SEQ ID NO: 14127 - RNA, 20 nt, Homo sapiens
agagucuugugaugucuugc

SEQ ID NO: 14128 - RNA, 20 nt, Homo sapiens
ggggagcuguggaagcagua

SEQ ID NO: 14129 - RNA, 21 nt, Homo sapiens
cccggagccaggaugcagcuc

SEQ ID NO: 14130 - RNA, 18 nt, Homo sapiens
ucagcuggcccucauuuc

SEQ ID NO: 14131 - RNA, 21 nt, Homo sapiens
ccccaccuccucucuccucag

SEQ ID NO: 14132 - RNA, 22 nt, Homo sapiens
ucggccugaccacccaccccac

SEQ ID NO: 14133 - RNA, 17 nt, Homo sapiens
ucgccuccuccucuccc

SEQ ID NO: 14134 - RNA, 23 nt, Homo sapiens
ugagcgccucgacgacagagccg

SEQ ID NO: 14135 - RNA, 23 nt, Homo sapiens
uaauccuugcuaccugggugaga

SEQ ID NO: 14136 - RNA, 21 nt, Homo sapiens
uggaggagaaggaaggugaug

SEQ ID NO: 14137 - RNA, 22 nt, Homo sapiens
acuccagccccacagccucagc

SEQ ID NO: 14138 - RNA, 21 nt, Homo sapiens
ccgucgccgccacccgagccg

SEQ ID NO: 14139 - RNA, 21 nt, Homo sapiens
gugccagcugcagugggggag

SEQ ID NO: 14140 - RNA, 21 nt, Homo sapiens
uggcagggaggcugggagggg

SEQ ID NO: 14141 - RNA, 17 nt, Homo sapiens
ucgccuccuccucuccc

SEQ ID NO: 14142 - RNA, 21 nt, Homo sapiens
cggcggggacggcgauugguc

SEQ ID NO: 14143 - RNA, 22 nt, Homo sapiens
ucugcccccuccgcugcugcca

SEQ ID NO: 14144 - RNA, 22 nt, Homo sapiens
cauugcacuugucucggucuga

SEQ ID NO: 14145 - RNA, 20 nt, Homo sapiens
acugccccaggugcugcugg

SEQ ID NO: 14146 - RNA, 21 nt, Homo sapiens
cggggcagcucaguacaggau

SEQ ID NO: 14147 - RNA, 22 nt, Homo sapiens
agacccuggucugcacucuauc

SEQ ID NO: 14148 - RNA, 24 nt, Homo sapiens
acugggggcuuucgggcucugcgu

SEQ ID NO: 14149 - RNA, 24 nt, Homo sapiens
ugccugggucucuggccugcgcgu

SEQ ID NO: 14150 - RNA, 22 nt, Homo sapiens
aggcggggcgccgcgggaccgc

SEQ ID NO: 14151 - RNA, 17 nt, Homo sapiens
ucucgcuggggccucca

SEQ ID NO: 14152 - RNA, 23 nt, Homo sapiens
cgggucggaguuagcucaagcgg

SEQ ID NO: 14153 - RNA, 20 nt, Homo sapiens
ucugcaggguuugcuuugag

SEQ ID NO: 14154 - RNA, 20 nt, Homo sapiens
ucugcaggguuugcuuugag

SEQ ID NO: 14155 - RNA, 24 nt, Homo sapiens
uggcccugacugaagaccagcagu

SEQ ID NO: 14156 - RNA, 23 nt, Homo sapiens
ucuggcuccgugucuucacuccc

SEQ ID NO: 14157 - RNA, 22 nt, Homo sapiens
cucuagagggaagcacuuucug

SEQ ID NO: 14158 - RNA, 20 nt, Homo sapiens
ccuccugcccuccuugcugu

SEQ ID NO: 14159 - RNA, 21 nt, Homo sapiens
gugcauuguaguugcauugca

SEQ ID NO: 14160 - RNA, 20 nt, Homo sapiens
gugcauugcuguugcauugc

SEQ ID NO: 14161 - RNA, 23 nt, Homo sapiens
acuucaccugguccacuagccgu

SEQ ID NO: 14162 - RNA, 22 nt, Homo sapiens
ucaggcucaguccccucccgau

SEQ ID NO: 14163 - RNA, 22 nt, Homo sapiens
cgucaacacuugcugguuuccu

SEQ ID NO: 14164 - RNA, 22 nt, Homo sapiens
caugccuugaguguaggaccgu

SEQ ID NO: 14165 - RNA, 21 nt, Homo sapiens
aagccugcccggcuccucggg

SEQ ID NO: 14166 - RNA, 25 nt, Homo sapiens
aggggugguguugggacagcuccgu

SEQ ID NO: 14167 - RNA, 21 nt, Homo sapiens
guggcugcacucacuuccuuc

SEQ ID NO: 14168 - RNA, 24 nt, Homo sapiens
ugccugggucucuggccugcgcgu

SEQ ID NO: 14169 - RNA, 20 nt, Homo sapiens
ggggagcuguggaagcagua

SEQ ID NO: 14170 - RNA, 23 nt, Homo sapiens
acuccauuuguuuugaugaugga

SEQ ID NO: 14171 - RNA, 22 nt, Homo sapiens
ucagugcaucacagaacuuugu

SEQ ID NO: 14172 - RNA, 21 nt, Homo sapiens
uccugcgcgucccagaugccc

SEQ ID NO: 14173 - RNA, 21 nt, Homo sapiens
cggcggggacggcgauugguc

SEQ ID NO: 14174 - RNA, 23 nt, Homo sapiens
agcuacauugucugcuggguuuc

SEQ ID NO: 14175 - RNA, 21 nt, Homo sapiens
agcuacaucuggcuacugggu

SEQ ID NO: 14176 - RNA, 21 nt, Homo sapiens
ccacaccguaucugacacuuu

SEQ ID NO: 14177 - RNA, 23 nt, Homo sapiens
aucaacagacauuaauugggcgc

SEQ ID NO: 14178 - RNA, 22 nt, Homo sapiens
uaaugccccuaaaaauccuuau

SEQ ID NO: 14179 - RNA, 22 nt, Homo sapiens
aggcggggcgccgcgggaccgc

SEQ ID NO: 14180 - RNA, 22 nt, Homo sapiens
ugcggggcuagggcuaacagca

SEQ ID NO: 14181 - RNA, 22 nt, Homo sapiens
gugaacgggcgccaucccgagg

SEQ ID NO: 14182 - RNA, 22 nt, Homo sapiens
uuuccggcucgcgugggugugu

SEQ ID NO: 14183 - RNA, 21 nt, Homo sapiens
aggaggcagcgcucucaggac

SEQ ID NO: 14184 - RNA, 17 nt, Homo sapiens
ucucgcuggggccucca

SEQ ID NO: 14185 - RNA, 22 nt, Homo sapiens
ugugagguuggcauuguugucu

SEQ ID NO: 14186 - RNA, 18 nt, Homo sapiens
cagggaggugaaugugau

SEQ ID NO: 14187 - RNA, 21 nt, Homo sapiens
gcccuccgcccgugcaccccg

SEQ ID NO: 14188 - RNA, 23 nt, Homo sapiens
ucuggcuccgugucuucacuccc

SEQ ID NO: 14189 - RNA, 21 nt, Homo sapiens
uccugcgcgucccagaugccc

SEQ ID NO: 14190 - RNA, 23 nt, Homo sapiens
ugaguaccgccaugucuguuggg

SEQ ID NO: 14191 - RNA, 23 nt, Homo sapiens
aggaccugcgggacaagauucuu

SEQ ID NO: 14192 - RNA, 22 nt, Homo sapiens
gaaagcgcuucccuuugcugga

SEQ ID NO: 14193 - RNA, 22 nt, Homo sapiens
caaagcgcuccccuuuagaggu

SEQ ID NO: 14194 - RNA, 23 nt, Homo sapiens
caaagcgcuucucuuuagagugu

SEQ ID NO: 14195 - RNA, 21 nt, Homo sapiens
caaagcgcuucccuuuggagc

SEQ ID NO: 14196 - RNA, 21 nt, Homo sapiens
gaaagcgcuucucuuuagagg

SEQ ID NO: 14197 - RNA, 21 nt, Homo sapiens
aagccugcccggcuccucggg

SEQ ID NO: 14198 - RNA, 19 nt, Homo sapiens
aguguggcuuucuuagagc

SEQ ID NO: 14199 - RNA, 21 nt, Homo sapiens
guggcugcacucacuuccuuc

SEQ ID NO: 14200 - RNA, 22 nt, Homo sapiens
aggcagcgggguguaguggaua

SEQ ID NO: 14201 - RNA, 22 nt, Homo sapiens
ugagguaguagguuguaugguu

SEQ ID NO: 14202 - RNA, 21 nt, Homo sapiens
agagaagaagaucagccugca

SEQ ID NO: 14203 - RNA, 18 nt, Homo sapiens
cgggcguggugguggggg

SEQ ID NO: 14204 - RNA, 23 nt, Homo sapiens
acuccauuuguuuugaugaugga

SEQ ID NO: 14205 - RNA, 21 nt, Homo sapiens
cggcggggacggcgauugguc

SEQ ID NO: 14206 - RNA, 22 nt, Homo sapiens
cgcaggggccgggugcucaccg

SEQ ID NO: 14207 - RNA, 22 nt, Homo sapiens
uaaucucagcuggcaacuguga

SEQ ID NO: 14208 - RNA, 23 nt, Homo sapiens
gaagugcuucgauuuuggggugu

SEQ ID NO: 14209 - RNA, 23 nt, Homo sapiens
aaugacacgaucacucccguuga

SEQ ID NO: 14210 - RNA, 23 nt, Homo sapiens
uagcagcgggaacaguucugcag

SEQ ID NO: 14211 - RNA, 24 nt, Homo sapiens
uucuccaaaagaaagcacuuucug

SEQ ID NO: 14212 - RNA, 22 nt, Homo sapiens
aagugccuccuuuuagaguguu

SEQ ID NO: 14213 - RNA, 22 nt, Homo sapiens
agucauuggaggguuugagcag

SEQ ID NO: 14214 - RNA, 22 nt, Homo sapiens
aggcggggcgccgcgggaccgc

SEQ ID NO: 14215 - RNA, 21 nt, Homo sapiens
uacucaaaaagcugucaguca

SEQ ID NO: 14216 - RNA, 21 nt, Homo sapiens
gcccuccgcccgugcaccccg

SEQ ID NO: 14217 - RNA, 22 nt, Homo sapiens
cauugcacuugucucggucuga

SEQ ID NO: 14218 - RNA, 22 nt, Homo sapiens
uccgagccugggucucccucuu

SEQ ID NO: 14219 - RNA, 25 nt, Homo sapiens
agggaucgcgggcggguggcggccu

SEQ ID NO: 14220 - RNA, 23 nt, Homo sapiens
aucgcugcgguugcgagcgcugu

SEQ ID NO: 14221 - RNA, 25 nt, Homo sapiens
ggcggagggaaguagguccguuggu

SEQ ID NO: 14222 - RNA, 21 nt, Homo sapiens
cgcgggugcuuacugacccuu

SEQ ID NO: 14223 - RNA, 24 nt, Homo sapiens
uggggagcugaggcucugggggug

SEQ ID NO: 14224 - RNA, 22 nt, Homo sapiens
uggagagaaaggcaguuccuga

SEQ ID NO: 14225 - RNA, 22 nt, Homo sapiens
ucugcccccuccgcugcugcca

SEQ ID NO: 14226 - RNA, 20 nt, Homo sapiens
ccccagggcgacgcggcggg

SEQ ID NO: 14227 - RNA, 20 nt, Homo sapiens
acugccccaggugcugcugg

SEQ ID NO: 14228 - RNA, 23 nt, Homo sapiens
ugaggggcagagagcgagacuuu

SEQ ID NO: 14229 - RNA, 21 nt, Homo sapiens
cggggcagcucaguacaggau

SEQ ID NO: 14230 - RNA, 18 nt, Homo sapiens
ugcuuccuuucagagggu

SEQ ID NO: 14231 - RNA, 22 nt, Homo sapiens
aucuggagguaagaagcacuuu

SEQ ID NO: 14232 - RNA, 19 nt, Homo sapiens
aagcagcugccucugaggc

SEQ ID NO: 14233 - RNA, 21 nt, Homo sapiens
aaggcagggcccccgcucccc

SEQ ID NO: 14234 - RNA, 21 nt, Homo sapiens
uaaagugcugacagugcagau

SEQ ID NO: 14235 - RNA, 21 nt, Homo sapiens
gugccagcugcagugggggag

SEQ ID NO: 14236 - RNA, 18 nt, Homo sapiens
ucagcuggcccucauuuc

SEQ ID NO: 14237 - RNA, 22 nt, Homo sapiens
acccgucccguucguccccgga

SEQ ID NO: 14238 - RNA, 23 nt, Homo sapiens
ucuggcuccgugucuucacuccc

SEQ ID NO: 14239 - RNA, 22 nt, Homo sapiens
aagcugccaguugaagaacugu

SEQ ID NO: 14240 - RNA, 23 nt, Homo sapiens
ugaggggcagagagcgagacuuu

SEQ ID NO: 14241 - RNA, 21 nt, Homo sapiens
gaaggcgcuucccuuuggagu

SEQ ID NO: 14242 - RNA, 22 nt, Homo sapiens
gaaggcgcuucccuuuagagcg

SEQ ID NO: 14243 - RNA, 20 nt, Homo sapiens
ggggagcuguggaagcagua

SEQ ID NO: 14244 - RNA, 22 nt, Homo sapiens
ugugcgcagggagaccucuccc

SEQ ID NO: 14245 - RNA, 22 nt, Homo sapiens
uuagggcccuggcuccaucucc

SEQ ID NO: 14246 - RNA, 18 nt, Homo sapiens
ugaggcaguagauugaau

SEQ ID NO: 14247 - RNA, 21 nt, Homo sapiens
gaacggcuucauacaggaguu

SEQ ID NO: 14248 - RNA, 21 nt, Homo sapiens
aggaggcagcgcucucaggac

SEQ ID NO: 14249 - RNA, 21 nt, Homo sapiens
aaggcagggcccccgcucccc

SEQ ID NO: 14250 - RNA, 22 nt, Homo sapiens
cuccugagccauucugagccuc

SEQ ID NO: 14251 - RNA, 21 nt, Homo sapiens
ccuguugaaguguaaucccca

SEQ ID NO: 14252 - RNA, 22 nt, Homo sapiens
uuuucaacucuaaugggagaga

SEQ ID NO: 14253 - RNA, 22 nt, Homo sapiens
uucccuuugucauccuaugccu

SEQ ID NO: 14254 - RNA, 22 nt, Homo sapiens
uucccuuugucauccuucgccu

SEQ ID NO: 14255 - RNA, 23 nt, Homo sapiens
aucaacagacauuaauugggcgc

SEQ ID NO: 14256 - RNA, 22 nt, Homo sapiens
uuuugcaauauguuccugaaua

SEQ ID NO: 14257 - RNA, 22 nt, Homo sapiens
uuuugcaauauguuccugaaua

SEQ ID NO: 14258 - RNA, 22 nt, Homo sapiens
caaaguuuaagauccuugaagu

SEQ ID NO: 14259 - RNA, 24 nt, Homo sapiens
gaccuggacauguuugugcccagu

SEQ ID NO: 14260 - RNA, 21 nt, Homo sapiens
guguugaaacaaucucuacug

SEQ ID NO: 14261 - RNA, 23 nt, Homo sapiens
ugguuguaguccgugcgagaaua

SEQ ID NO: 14262 - RNA, 22 nt, Homo sapiens
aagcugccaguugaagaacugu

SEQ ID NO: 14263 - RNA, 22 nt, Homo sapiens
aaggagcucacagucuauugag

SEQ ID NO: 14264 - RNA, 23 nt, Homo sapiens
uagugcaauauugcuuauagggu

SEQ ID NO: 14265 - RNA, 22 nt, Homo sapiens
aucgugcaucccuuuagagugu

SEQ ID NO: 14266 - RNA, 22 nt, Homo sapiens
aucgugcauccuuuuagagugu

SEQ ID NO: 14267 - RNA, 23 nt, Homo sapiens
aaggagcuuacaaucuagcuggg

SEQ ID NO: 14268 - RNA, 21 nt, Homo sapiens
uggaggagaaggaaggugaug

SEQ ID NO: 14269 - RNA, 21 nt, Homo sapiens
uaaagugcugacagugcagau

SEQ ID NO: 14270 - RNA, 22 nt, Homo sapiens
ugugagguuggcauuguugucu

SEQ ID NO: 14271 - RNA, 22 nt, Homo sapiens
aacauucaaccugucggugagu

SEQ ID NO: 14272 - RNA, 18 nt, Homo sapiens
uccagugcccuccucucc

SEQ ID NO: 14273 - RNA, 22 nt, Homo sapiens
ucugcccccuccgcugcugcca

SEQ ID NO: 14274 - RNA, 22 nt, Homo sapiens
aacuggccuacaaagucccagu

SEQ ID NO: 14275 - RNA, 22 nt, Homo sapiens
aacuggcccucaaagucccgcu

SEQ ID NO: 14276 - RNA, 21 nt, Homo sapiens
uugugcuugaucuaaccaugu

SEQ ID NO: 14277 - RNA, 21 nt, Homo sapiens
ccaccaccgugucugacacuu

SEQ ID NO: 14278 - RNA, 20 nt, Homo sapiens
acugccccaggugcugcugg

SEQ ID NO: 14279 - RNA, 22 nt, Homo sapiens
ucaggcucaguccccucccgau

SEQ ID NO: 14280 - RNA, 21 nt, Homo sapiens
cggggcagcucaguacaggau

SEQ ID NO: 14281 - RNA, 21 nt, Homo sapiens
uuggccacaauggguuagaac

SEQ ID NO: 14282 - RNA, 21 nt, Homo sapiens
aagccugcccggcuccucggg

SEQ ID NO: 14283 - RNA, 23 nt, Homo sapiens
ugugcuugcucgucccgcccgca

SEQ ID NO: 14284 - RNA, 22 nt, Homo sapiens
acuccagccccacagccucagc

SEQ ID NO: 14285 - RNA, 20 nt, Homo sapiens
ggggagcuguggaagcagua

SEQ ID NO: 14286 - RNA, 21 nt, Homo sapiens
cccggagccaggaugcagcuc

SEQ ID NO: 14287 - RNA, 23 nt, Homo sapiens
ucuggcuccgugucuucacuccc

SEQ ID NO: 14288 - RNA, 23 nt, Homo sapiens
cggcccgggcugcugcuguuccu

SEQ ID NO: 14289 - RNA, 23 nt, Homo sapiens
cggcccgggcugcugcuguuccu

SEQ ID NO: 14290 - RNA, 22 nt, Homo sapiens
uggagagaaaggcaguuccuga

SEQ ID NO: 14291 - RNA, 22 nt, Homo sapiens
uggagagaaaggcaguuccuga

SEQ ID NO: 14292 - RNA, 21 nt, Homo sapiens
cggcggggacggcgauugguc

SEQ ID NO: 14293 - RNA, 21 nt, Homo sapiens
cggcggggacggcgauugguc

SEQ ID NO: 14294 - RNA, 21 nt, Homo sapiens
agggcccccccucaauccugu

SEQ ID NO: 14295 - RNA, 23 nt, Homo sapiens
ugagcgccucgacgacagagccg

SEQ ID NO: 14296 - RNA, 23 nt, Homo sapiens
ucccccaggugugauucugauuu

SEQ ID NO: 14297 - RNA, 22 nt, Homo sapiens
agaggcuggccgugaugaauuc

SEQ ID NO: 14298 - RNA, 19 nt, Homo sapiens
ugagcugcuguaccaaaau

SEQ ID NO: 14299 - RNA, 24 nt, Homo sapiens
acugggggcuuucgggcucugcgu

SEQ ID NO: 14300 - RNA, 19 nt, Homo sapiens
aagcagcugccucugaggc

SEQ ID NO: 14301 - RNA, 22 nt, Homo sapiens
aggcggggcgccgcgggaccgc

SEQ ID NO: 14302 - RNA, 22 nt, Homo sapiens
aggcggggcgccgcgggaccgc

SEQ ID NO: 14303 - RNA, 22 nt, Homo sapiens
ugcggggcuagggcuaacagca

SEQ ID NO: 14304 - RNA, 22 nt, Homo sapiens
uaacagucuacagccauggucg

SEQ ID NO: 14305 - RNA, 22 nt, Homo sapiens
ggagacgcggcccuguuggagu

SEQ ID NO: 14306 - RNA, 21 nt, Homo sapiens
gguuugguccuagccuuucua

SEQ ID NO: 14307 - RNA, 23 nt, Homo sapiens
uaaagugcuuauagugcagguag

SEQ ID NO: 14308 - RNA, 21 nt, Homo sapiens
uaacagucuccagucacggcc

SEQ ID NO: 14309 - RNA, 21 nt, Homo sapiens
ccacaccguaucugacacuuu

SEQ ID NO: 14310 - RNA, 21 nt, Homo sapiens
uuggccacaauggguuagaac

SEQ ID NO: 14311 - RNA, 19 nt, Homo sapiens
aguguggcuuucuuagagc

SEQ ID NO: 14312 - RNA, 22 nt, Homo sapiens
gugaaauguuuaggaccacuag

SEQ ID NO: 14313 - RNA, 22 nt, Homo sapiens
aaaaguaauugcggauuuugcc

SEQ ID NO: 14314 - RNA, 21 nt, Homo sapiens
caagucacuagugguuccguu

SEQ ID NO: 14315 - RNA, 21 nt, Homo sapiens
uucacaguggcuaaguuccgc

SEQ ID NO: 14316 - RNA, 22 nt, Homo sapiens
uggcaguguauuguuagcuggu

SEQ ID NO: 14317 - RNA, 22 nt, Homo sapiens
agaucagaaggugauuguggcu

SEQ ID NO: 14318 - RNA, 23 nt, Homo sapiens
gcaaagcacacggccugcagaga

SEQ ID NO: 14319 - RNA, 24 nt, Homo sapiens
aauccuuggaaccuaggugugagu

SEQ ID NO: 14320 - RNA, 22 nt, Homo sapiens
gaaguuguucgugguggauucg

SEQ ID NO: 14321 - RNA, 23 nt, Homo sapiens
uagugcaauauugcuuauagggu

SEQ ID NO: 14322 - RNA, 21 nt, Homo sapiens
uugaaaggcuauuucuugguc

SEQ ID NO: 14323 - RNA, 22 nt, Homo sapiens
aaaaugguucccuuuagagugu

SEQ ID NO: 14324 - RNA, 22 nt, Homo sapiens
ugugacagauugauaacugaaa

SEQ ID NO: 14325 - RNA, 23 nt, Homo sapiens
acuuacagacaagagccuugcuc

SEQ ID NO: 14326 - RNA, 23 nt, Homo sapiens
acuugggcacugaaacaaugucc

SEQ ID NO: 14327 - RNA, 19 nt, Homo sapiens
aagcagcugccucugaggc

SEQ ID NO: 14328 - RNA, 21 nt, Homo sapiens
ccgucgccgccacccgagccg

SEQ ID NO: 14329 - RNA, 18 nt, Homo sapiens
ucagcuggcccucauuuc

SEQ ID NO: 14330 - RNA, 18 nt, Homo sapiens
ucagcuggcccucauuuc

SEQ ID NO: 14331 - RNA, 23 nt, Homo sapiens
ucuggcuccgugucuucacuccc

SEQ ID NO: 14332 - RNA, 23 nt, Homo sapiens
ucuggcuccgugucuucacuccc

SEQ ID NO: 14333 - RNA, 22 nt, Homo sapiens
ucucccaacccuuguaccagug

SEQ ID NO: 14334 - RNA, 23 nt, Homo sapiens
uaauacugccggguaaugaugga

SEQ ID NO: 14335 - RNA, 22 nt, Homo sapiens
acagcaggcacagacaggcagu

SEQ ID NO: 14336 - RNA, 22 nt, Homo sapiens
uguaaacauccuacacucagcu

SEQ ID NO: 14337 - RNA, 22 nt, Homo sapiens
gccugcugggguggaaccuggu

SEQ ID NO: 14338 - RNA, 23 nt, Homo sapiens
agugccugagggaguaagagccc

SEQ ID NO: 14339 - RNA, 21 nt, Homo sapiens
uuuccauaggugaugagucac

SEQ ID NO: 14340 - RNA, 23 nt, Homo sapiens
uaaaucccauggugccuucuccu

SEQ ID NO: 14341 - RNA, 22 nt, Homo sapiens
acaguagagggaggaaucgcag

SEQ ID NO: 14342 - RNA, 22 nt, Homo sapiens
auccgcgcucugacucucugcc

SEQ ID NO: 14343 - RNA, 20 nt, Homo sapiens
ucugcaggguuugcuuugag

SEQ ID NO: 14344 - RNA, 20 nt, Homo sapiens
ucugcaggguuugcuuugag

SEQ ID NO: 14345 - RNA, 23 nt, Homo sapiens
acuccauuuguuuugaugaugga

SEQ ID NO: 14346 - RNA, 22 nt, Homo sapiens
uggagagaaaggcaguuccuga

SEQ ID NO: 14347 - RNA, 22 nt, Homo sapiens
uucaccaccuucuccacccagc

SEQ ID NO: 14348 - RNA, 22 nt, Homo sapiens
ugugacagauugauaacugaaa

SEQ ID NO: 14349 - RNA, 20 nt, Homo sapiens
guccgcucggcgguggccca

SEQ ID NO: 14350 - RNA, 20 nt, Homo sapiens
ggggagcuguggaagcagua

SEQ ID NO: 14351 - RNA, 21 nt, Homo sapiens
cccggagccaggaugcagcuc

SEQ ID NO: 14352 - RNA, 17 nt, Homo sapiens
ucgccuccuccucuccc

SEQ ID NO: 14353 - RNA, 17 nt, Homo sapiens
ucgccuccuccucuccc

SEQ ID NO: 14354 - RNA, 21 nt, Homo sapiens
gcccuccgcccgugcaccccg

SEQ ID NO: 14355 - RNA, 23 nt, Homo sapiens
cggcccgggcugcugcuguuccu

SEQ ID NO: 14356 - RNA, 18 nt, Homo sapiens
ugaggcaguagauugaau

SEQ ID NO: 14357 - RNA, 22 nt, Homo sapiens
cauugcacuugucucggucuga

SEQ ID NO: 14358 - RNA, 23 nt, Homo sapiens
ugaggggcagagagcgagacuuu

SEQ ID NO: 14359 - RNA, 21 nt, Homo sapiens
aggaggcagcgcucucaggac

SEQ ID NO: 14360 - RNA, 22 nt, Homo sapiens
gguggcccggccgugccugagg

SEQ ID NO: 14361 - RNA, 22 nt, Homo sapiens
aggcagcgggguguaguggaua

SEQ ID NO: 14362 - RNA, 24 nt, Homo sapiens
ucccugagacccuuuaaccuguga

SEQ ID NO: 14363 - RNA, 22 nt, Homo sapiens
ucccugagacccuaacuuguga

SEQ ID NO: 14364 - RNA, 23 nt, Homo sapiens
ccucagggcuguagaacagggcu

SEQ ID NO: 14365 - RNA, 22 nt, Homo sapiens
ugauauguuugauauauuaggu

SEQ ID NO: 14366 - RNA, 22 nt, Homo sapiens
acagcaggcacagacaggcagu

SEQ ID NO: 14367 - RNA, 22 nt, Homo sapiens
gccugcugggguggaaccuggu

SEQ ID NO: 14368 - RNA, 23 nt, Homo sapiens
aagugccgccaucuuuugagugu

SEQ ID NO: 14369 - RNA, 20 nt, Homo sapiens
aggguguuucucucaucucu

SEQ ID NO: 14370 - RNA, 22 nt, Homo sapiens
ugugcgcagggagaccucuccc

SEQ ID NO: 14371 - RNA, 22 nt, Homo sapiens
ugagccccugugccgcccccag

SEQ ID NO: 14372 - RNA, 21 nt, Homo sapiens
acggugcuggauguggccuuu

SEQ ID NO: 14373 - RNA, 21 nt, Homo sapiens
gcccuccgcccgugcaccccg

SEQ ID NO: 14374 - RNA, 23 nt, Homo sapiens
cggcccgggcugcugcuguuccu

SEQ ID NO: 14375 - RNA, 21 nt, Homo sapiens
cggcggggacggcgauugguc

SEQ ID NO: 14376 - RNA, 22 nt, Homo sapiens
ugggucuuugcgggcgagauga

SEQ ID NO: 14377 - RNA, 22 nt, Homo sapiens
uggcucaguucagcaggaacag

SEQ ID NO: 14378 - RNA, 19 nt, Homo sapiens
aagcagcugccucugaggc

SEQ ID NO: 14379 - RNA, 25 nt, Homo sapiens
ggcggagggaaguagguccguuggu

SEQ ID NO: 14380 - RNA, 22 nt, Homo sapiens
aggcggggcgccgcgggaccgc

SEQ ID NO: 14381 - RNA, 23 nt, Homo sapiens
uggugcggagagggcccacagug

SEQ ID NO: 14382 - RNA, 22 nt, Homo sapiens
ugcggggcuagggcuaacagca

SEQ ID NO: 14383 - RNA, 22 nt, Homo sapiens
ugagguaguagguuguauaguu

SEQ ID NO: 14384 - RNA, 22 nt, Homo sapiens
ugagguaguagguugugugguu

SEQ ID NO: 14385 - RNA, 19 nt, Homo sapiens
ugucucugcugggguuucu

SEQ ID NO: 14386 - RNA, 21 nt, Homo sapiens
agagaagaagaucagccugca

SEQ ID NO: 14387 - RNA, 18 nt, Homo sapiens
uugagaaggaggcugcug

SEQ ID NO: 14388 - RNA, 23 nt, Homo sapiens
ucuggcuccgugucuucacuccc

SEQ ID NO: 14389 - RNA, 22 nt, Homo sapiens
ugucaguuugucaaauacccca

SEQ ID NO: 14390 - RNA, 22 nt, Homo sapiens
aacaauauccuggugcugagug

SEQ ID NO: 14391 - RNA, 22 nt, Homo sapiens
cgucaacacuugcugguuuccu

SEQ ID NO: 14392 - RNA, 21 nt, Homo sapiens
uagauaaaauauugguaccug

SEQ ID NO: 14393 - RNA, 22 nt, Homo sapiens
ccucuuccccuugucucuccag

SEQ ID NO: 14394 - RNA, 23 nt, Homo sapiens
ugaggggcagagagcgagacuuu

SEQ ID NO: 14395 - RNA, 24 nt, Homo sapiens
ugccugggucucuggccugcgcgu

SEQ ID NO: 14396 - RNA, 21 nt, Homo sapiens
uugcucacuguucuucccuag

SEQ ID NO: 14397 - RNA, 21 nt, Homo sapiens
agaggauacccuuuguauguu

SEQ ID NO: 14398 - RNA, 22 nt, Homo sapiens
uugcauauguaggaugucccau

SEQ ID NO: 14399 - RNA, 22 nt, Homo sapiens
ggagaaauuauccuuggugugu

SEQ ID NO: 14400 - RNA, 21 nt, Homo sapiens
cccggagccaggaugcagcuc

SEQ ID NO: 14401 - RNA, 21 nt, Homo sapiens
ucguggccuggucuccauuau

SEQ ID NO: 14402 - RNA, 22 nt, Homo sapiens
ugagccccugugccgcccccag

SEQ ID NO: 14403 - RNA, 22 nt, Homo sapiens
acccgucccguucguccccgga

SEQ ID NO: 14404 - RNA, 18 nt, Homo sapiens
cgggcguggugguggggg

SEQ ID NO: 14405 - RNA, 17 nt, Homo sapiens
ucgccuccuccucuccc

SEQ ID NO: 14406 - RNA, 23 nt, Homo sapiens
ucuggcuccgugucuucacuccc

SEQ ID NO: 14407 - RNA, 21 nt, Homo sapiens
cggcggggacggcgauugguc

SEQ ID NO: 14408 - RNA, 22 nt, Homo sapiens
uggcucaguucagcaggaacag

SEQ ID NO: 14409 - RNA, 23 nt, Homo sapiens
aagugccgccaucuuuugagugu

SEQ ID NO: 14410 - RNA, 22 nt, Homo sapiens
aggcggggcgccgcgggaccgc

SEQ ID NO: 14411 - RNA, 20 nt, Homo sapiens
ugagcccuguccucccgcag

SEQ ID NO: 14412 - RNA, 22 nt, Homo sapiens
acccgucccguucguccccgga

SEQ ID NO: 14413 - RNA, 18 nt, Homo sapiens
acguuggcucugguggug

SEQ ID NO: 14414 - RNA, 22 nt, Homo sapiens
acucggcguggcgucggucgug

SEQ ID NO: 14415 - RNA, 18 nt, Homo sapiens
cagggaggugaaugugau

SEQ ID NO: 14416 - RNA, 22 nt, Homo sapiens
cucggcgcggggcgcgggcucc

SEQ ID NO: 14417 - RNA, 23 nt, Homo sapiens
ucuggcuccgugucuucacuccc

SEQ ID NO: 14418 - RNA, 21 nt, Homo sapiens
uccugcgcgucccagaugccc

SEQ ID NO: 14419 - RNA, 22 nt, Homo sapiens
ucugcccccuccgcugcugcca

SEQ ID NO: 14420 - RNA, 23 nt, Homo sapiens
caaagugcucauagugcagguag

SEQ ID NO: 14421 - RNA, 21 nt, Homo sapiens
ccacaccguaucugacacuuu

SEQ ID NO: 14422 - RNA, 23 nt, Homo sapiens
aucaacagacauuaauugggcgc

SEQ ID NO: 14423 - RNA, 20 nt, Homo sapiens
acugccccaggugcugcugg

SEQ ID NO: 14424 - RNA, 23 nt, Homo sapiens
ugaggggcagagagcgagacuuu

SEQ ID NO: 14425 - RNA, 22 nt, Homo sapiens
aaaccguuaccauuacugaguu

SEQ ID NO: 14426 - RNA, 21 nt, Homo sapiens
cggggcagcucaguacaggau

SEQ ID NO: 14427 - RNA, 22 nt, Homo sapiens
aggcagcgggguguaguggaua

SEQ ID NO: 14428 - RNA, 22 nt, Homo sapiens
uauugcacucgucccggccucc

SEQ ID NO: 14429 - RNA, 18 nt, Homo sapiens
ucagcuggcccucauuuc

SEQ ID NO: 14430 - RNA, 23 nt, Homo sapiens
ucuggcuccgugucuucacuccc

SEQ ID NO: 14431 - RNA, 22 nt, Homo sapiens
ucucccaacccuuguaccagug

SEQ ID NO: 14432 - RNA, 22 nt, Homo sapiens
uggagagaaaggcaguuccuga

SEQ ID NO: 14433 - RNA, 21 nt, Homo sapiens
cggcggggacggcgauugguc

SEQ ID NO: 14434 - RNA, 21 nt, Homo sapiens
ccaguccugugccugccgccu

SEQ ID NO: 14435 - RNA, 22 nt, Homo sapiens
uguaaacauccuacacucagcu

SEQ ID NO: 14436 - RNA, 22 nt, Homo sapiens
cuggcccucucugcccuuccgu

SEQ ID NO: 14437 - RNA, 21 nt, Homo sapiens
gccccugggccuauccuagaa

SEQ ID NO: 14438 - RNA, 21 nt, Homo sapiens
aggggugcuaucugugauuga

SEQ ID NO: 14439 - RNA, 23 nt, Homo sapiens
aaugacacgaucacucccguuga

SEQ ID NO: 14440 - RNA, 22 nt, Homo sapiens
caaaaaccacaguuucuuuugc

SEQ ID NO: 14441 - RNA, 25 nt, Homo sapiens
ggcggagggaaguagguccguuggu

SEQ ID NO: 14442 - RNA, 22 nt, Homo sapiens
aggcggggcgccgcgggaccgc

SEQ ID NO: 14443 - RNA, 22 nt, Homo sapiens
caaagugccucccuuuagagug

SEQ ID NO: 14444 - RNA, 24 nt, Homo sapiens
agccugauuaaacacaugcucuga

SEQ ID NO: 14445 - RNA, 22 nt, Homo sapiens
ugagccccugugccgcccccag

SEQ ID NO: 14446 - RNA, 23 nt, Homo sapiens
aggaugagcaaagaaaguagauu

SEQ ID NO: 14447 - RNA, 22 nt, Homo sapiens
cggaugagcaaagaaagugguu

SEQ ID NO: 14448 - RNA, 20 nt, Homo sapiens
ucguuugccuuuuucugcuu

SEQ ID NO: 14449 - RNA, 21 nt, Homo sapiens
ugguagacuauggaacguagg

SEQ ID NO: 14450 - RNA, 22 nt, Homo sapiens
uugggaucauuuugcauccaua

SEQ ID NO: 14451 - RNA, 22 nt, Homo sapiens
uucacaaggaggugucauuuau

SEQ ID NO: 14452 - RNA, 23 nt, Homo sapiens
gcgaggaccccucggggucugac

SEQ ID NO: 14453 - RNA, 21 nt, Homo sapiens
cacaagguauugguauuaccu

SEQ ID NO: 14454 - RNA, 19 nt, Homo sapiens
agcugucugaaaaugucuu

SEQ ID NO: 14455 - RNA, 25 nt, Homo sapiens
agggaucgcgggcggguggcggccu

SEQ ID NO: 14456 - RNA, 23 nt, Homo sapiens
cugggaucuccggggucuugguu

SEQ ID NO: 14457 - RNA, 17 nt, Homo sapiens
ucgccuccuccucuccc

SEQ ID NO: 14458 - RNA, 22 nt, Homo sapiens
ucucccaacccuuguaccagug

SEQ ID NO: 14459 - RNA, 22 nt, Homo sapiens
uggcagugucuuagcugguugu

SEQ ID NO: 14460 - RNA, 22 nt, Homo sapiens
aauugcacgguauccaucugua

SEQ ID NO: 14461 - RNA, 22 nt, Homo sapiens
agacuucccauuugaagguggc

SEQ ID NO: 14462 - RNA, 23 nt, Homo sapiens
aucgcugcgguugcgagcgcugu

SEQ ID NO: 14463 - RNA, 23 nt, Homo sapiens
gcagcagagaauaggacuacguc

SEQ ID NO: 14464 - RNA, 22 nt, Homo sapiens
ugugcgcagggagaccucuccc

SEQ ID NO: 14465 - RNA, 22 nt, Homo sapiens
auccgcgcucugacucucugcc

SEQ ID NO: 14466 - RNA, 21 nt, Homo sapiens
agagaagaagaucagccugca

SEQ ID NO: 14467 - RNA, 23 nt, Homo sapiens
ugaggggcagagagcgagacuuu

SEQ ID NO: 14468 - RNA, 22 nt, Homo sapiens
aucuggagguaagaagcacuuu

SEQ ID NO: 14469 - RNA, 19 nt, Homo sapiens
ugucucugcugggguuucu

SEQ ID NO: 14470 - RNA, 23 nt, Homo sapiens
uaaaucccauggugccuucuccu

SEQ ID NO: 14471 - RNA, 23 nt, Homo sapiens
cuggagauauggaagagcugugu

SEQ ID NO: 14472 - RNA, 23 nt, Homo sapiens
agcuacauugucugcuggguuuc

SEQ ID NO: 14473 - RNA, 21 nt, Homo sapiens
agcuacaucuggcuacugggu

SEQ ID NO: 14474 - RNA, 22 nt, Homo sapiens
ugucaguuugucaaauacccca

SEQ ID NO: 14475 - RNA, 22 nt, Homo sapiens
uguaaacauccucgacuggaag

SEQ ID NO: 14476 - RNA, 22 nt, Homo sapiens
uguaaacauccuacacucagcu

SEQ ID NO: 14477 - RNA, 23 nt, Homo sapiens
uguaaacauccuacacucucagc

SEQ ID NO: 14478 - RNA, 22 nt, Homo sapiens
uguaaacauccccgacuggaag

SEQ ID NO: 14479 - RNA, 22 nt, Homo sapiens
uguaaacauccuugacuggaag

SEQ ID NO: 14480 - RNA, 21 nt, Homo sapiens
aauaauacaugguugaucuuu

SEQ ID NO: 14481 - RNA, 22 nt, Homo sapiens
aacaucacagcaagucugugcu

SEQ ID NO: 14482 - RNA, 22 nt, Homo sapiens
aaaaguaauugcgaguuuuacc

SEQ ID NO: 14483 - RNA, 22 nt, Homo sapiens
aaaaguaauugugguuuuggcc

SEQ ID NO: 14484 - RNA, 22 nt, Homo sapiens
aaaaguaauugcgguuuuugcc

SEQ ID NO: 14485 - RNA, 22 nt, Homo sapiens
aaaaguaauugugguuuuugcc

SEQ ID NO: 14486 - RNA, 22 nt, Homo sapiens
aaaaguaaucgcgguuuuuguc

SEQ ID NO: 14487 - RNA, 22 nt, Homo sapiens
aaaaguaauugcggauuuugcc

SEQ ID NO: 14488 - RNA, 22 nt, Homo sapiens
aaaaguaauugcggucuuuggu

SEQ ID NO: 14489 - RNA, 22 nt, Homo sapiens
caaaaguaauuguggauuuugu

SEQ ID NO: 14490 - RNA, 21 nt, Homo sapiens
uaaaguaaauaugcaccaaaa

SEQ ID NO: 14491 - RNA, 20 nt, Homo sapiens
auggagauagauauagaaau

SEQ ID NO: 14492 - RNA, 22 nt, Homo sapiens
auaauacaugguuaaccucuuu

SEQ ID NO: 14493 - RNA, 23 nt, Homo sapiens
uauucauuuauccccagccuaca

SEQ ID NO: 14494 - RNA, 21 nt, Homo sapiens
cacuguguccuuucugcguag

SEQ ID NO: 14495 - RNA, 23 nt, Homo sapiens
cgggucggaguuagcucaagcgg

SEQ ID NO: 14496 - RNA, 17 nt, Homo sapiens
ucgccuccuccucuccc

SEQ ID NO: 14497 - RNA, 23 nt, Homo sapiens
ucuggcuccgugucuucacuccc

SEQ ID NO: 14498 - RNA, 23 nt, Homo sapiens
uagcagcgggaacaguucugcag

SEQ ID NO: 14499 - RNA, 22 nt, Homo sapiens
gaaagcgcuucccuuugcugga

SEQ ID NO: 14500 - RNA, 22 nt, Homo sapiens
caaagcgcuccccuuuagaggu

SEQ ID NO: 14501 - RNA, 23 nt, Homo sapiens
caaagcgcuucucuuuagagugu

SEQ ID NO: 14502 - RNA, 21 nt, Homo sapiens
caaagcgcuucccuuuggagc

SEQ ID NO: 14503 - RNA, 21 nt, Homo sapiens
gaaagcgcuucucuuuagagg

SEQ ID NO: 14504 - RNA, 19 nt, Homo sapiens
gggcgccugugaucccaac

SEQ ID NO: 14505 - RNA, 22 nt, Homo sapiens
ugcggggcuagggcuaacagca

SEQ ID NO: 14506 - RNA, 21 nt, Homo sapiens
cccggagccaggaugcagcuc

SEQ ID NO: 14507 - RNA, 22 nt, Homo sapiens
ucugcccccuccgcugcugcca

SEQ ID NO: 14508 - RNA, 20 nt, Homo sapiens
acugccccaggugcugcugg

SEQ ID NO: 14509 - RNA, 21 nt, Homo sapiens
cggggcagcucaguacaggau

SEQ ID NO: 14510 - RNA, 21 nt, Homo sapiens
uggcagggaggcugggagggg

SEQ ID NO: 14511 - RNA, 22 nt, Homo sapiens
ccucuuccccuugucucuccag

SEQ ID NO: 14512 - RNA, 22 nt, Homo sapiens
augggugaauuuguagaaggau

SEQ ID NO: 14513 - RNA, 21 nt, Homo sapiens
ugcaggaccaagaugagcccu

SEQ ID NO: 14514 - RNA, 21 nt, Homo sapiens
uccugcgcgucccagaugccc

SEQ ID NO: 14515 - RNA, 22 nt, Homo sapiens
cgcaggggccgggugcucaccg

SEQ ID NO: 14516 - RNA, 22 nt, Homo sapiens
uguaacagcaacuccaugugga

SEQ ID NO: 14517 - RNA, 22 nt, Homo sapiens
ugguuuaccgucccacauacau

SEQ ID NO: 14518 - RNA, 23 nt, Homo sapiens
gaagugcuucgauuuuggggugu

SEQ ID NO: 14519 - RNA, 22 nt, Homo sapiens
agucauuggaggguuugagcag

SEQ ID NO: 14520 - RNA, 23 nt, Homo sapiens
gagggucuugggagggaugugac

SEQ ID NO: 14521 - RNA, 22 nt, Homo sapiens
ucaccagcccuguguucccuag

SEQ ID NO: 14522 - RNA, 24 nt, Homo sapiens
ucccugagacccuuuaaccuguga

SEQ ID NO: 14523 - RNA, 22 nt, Homo sapiens
ucccugagacccuaacuuguga

SEQ ID NO: 14524 - RNA, 23 nt, Homo sapiens
ccucagggcuguagaacagggcu

SEQ ID NO: 14525 - RNA, 17 nt, Homo sapiens
ucgccuccuccucuccc

SEQ ID NO: 14526 - RNA, 22 nt, Homo sapiens
uggguggucuggagauuugugc

SEQ ID NO: 14527 - RNA, 23 nt, Homo sapiens
agcugguguugugaaucaggccg

SEQ ID NO: 14528 - RNA, 21 nt, Homo sapiens
cggcggggacggcgauugguc

SEQ ID NO: 14529 - RNA, 21 nt, Homo sapiens
cggcggggacggcgauugguc

SEQ ID NO: 14530 - RNA, 22 nt, Homo sapiens
uucaccaccuucuccacccagc

SEQ ID NO: 14531 - RNA, 22 nt, Homo sapiens
uucccuuugucauccuaugccu

SEQ ID NO: 14532 - RNA, 22 nt, Homo sapiens
uucccuuugucauccuucgccu

SEQ ID NO: 14533 - RNA, 21 nt, Homo sapiens
ccaccaccgugucugacacuu

SEQ ID NO: 14534 - RNA, 22 nt, Homo sapiens
agacccuggucugcacucuauc

SEQ ID NO: 14535 - RNA, 22 nt, Homo sapiens
cgucaacacuugcugguuuccu

SEQ ID NO: 14536 - RNA, 25 nt, Homo sapiens
aggggugguguugggacagcuccgu

SEQ ID NO: 14537 - RNA, 21 nt, Homo sapiens
uggguuuacguugggagaacu

SEQ ID NO: 14538 - RNA, 22 nt, Homo sapiens
aaccagcaccccaacuuuggac

SEQ ID NO: 14539 - RNA, 22 nt, Homo sapiens
aggcggggcgccgcgggaccgc

SEQ ID NO: 14540 - RNA, 22 nt, Homo sapiens
aggcggggcgccgcgggaccgc

SEQ ID NO: 14541 - RNA, 20 nt, Homo sapiens
accaggaggcugaggccccu

SEQ ID NO: 14542 - RNA, 22 nt, Homo sapiens
ugcggggcuagggcuaacagca

SEQ ID NO: 14543 - RNA, 21 nt, Homo sapiens
uggaggagaaggaaggugaug

SEQ ID NO: 14544 - RNA, 23 nt, Homo sapiens
gcagcagagaauaggacuacguc

SEQ ID NO: 14545 - RNA, 20 nt, Homo sapiens
ggggagcuguggaagcagua

SEQ ID NO: 14546 - RNA, 22 nt, Homo sapiens
ugugacugguugaccagagggg

SEQ ID NO: 14547 - RNA, 23 nt, Homo sapiens
ucaagagcaauaacgaaaaaugu

SEQ ID NO: 14548 - RNA, 22 nt, Homo sapiens
gucccucuccaaaugugucuug

SEQ ID NO: 14549 - RNA, 18 nt, Homo sapiens
ucagcuggcccucauuuc

SEQ ID NO: 14550 - RNA, 21 nt, Homo sapiens
cggcggggacggcgauugguc

SEQ ID NO: 14551 - RNA, 23 nt, Homo sapiens
ucccuguccuccaggagcucacg

SEQ ID NO: 14552 - RNA, 22 nt, Homo sapiens
agacccuggucugcacucuauc

SEQ ID NO: 14553 - RNA, 22 nt, Homo sapiens
aggcggggcgccgcgggaccgc

SEQ ID NO: 14554 - RNA, 23 nt, Homo sapiens
cacccggcugugugcacaugugc

SEQ ID NO: 14555 - RNA, 22 nt, Homo sapiens
ucugggcaacaaagugagaccu

SEQ ID NO: 14556 - RNA, 24 nt, Homo sapiens
uggcccugacugaagaccagcagu

SEQ ID NO: 14557 - RNA, 18 nt, Homo sapiens
cagggaggugaaugugau

SEQ ID NO: 14558 - RNA, 22 nt, Homo sapiens
uuugguccccuucaaccagcug

SEQ ID NO: 14559 - RNA, 22 nt, Homo sapiens
uuugguccccuucaaccagcua

SEQ ID NO: 14560 - RNA, 23 nt, Homo sapiens
ucuggcuccgugucuucacuccc

SEQ ID NO: 14561 - RNA, 22 nt, Homo sapiens
uggagagaaaggcaguuccuga

SEQ ID NO: 14562 - RNA, 20 nt, Homo sapiens
ccccagggcgacgcggcggg

SEQ ID NO: 14563 - RNA, 20 nt, Homo sapiens
ccuccugcccuccuugcugu

SEQ ID NO: 14564 - RNA, 23 nt, Homo sapiens
agcuacauugucugcuggguuuc

SEQ ID NO: 14565 - RNA, 21 nt, Homo sapiens
agggcccccccucaauccugu

SEQ ID NO: 14566 - RNA, 20 nt, Homo sapiens
ccucugggcccuuccuccag

SEQ ID NO: 14567 - RNA, 22 nt, Homo sapiens
ucucugggccugugucuuaggc

SEQ ID NO: 14568 - RNA, 20 nt, Homo sapiens
aaaguagcuguaccauuugc

SEQ ID NO: 14569 - RNA, 25 nt, Homo sapiens
gcugggcagggcuucugagcuccuu

SEQ ID NO: 14570 - RNA, 21 nt, Homo sapiens
guggcugcacucacuuccuuc

SEQ ID NO: 14571 - RNA, 23 nt, Homo sapiens
uauucauuuauccccagccuaca

SEQ ID NO: 14572 - RNA, 21 nt, Homo sapiens
cccggagccaggaugcagcuc

SEQ ID NO: 14573 - RNA, 21 nt, Homo sapiens
uggcagggaggcugggagggg

SEQ ID NO: 14574 - RNA, 22 nt, Homo sapiens
ugagccccugugccgcccccag

SEQ ID NO: 14575 - RNA, 27 nt, Homo sapiens
accuucuuguauaagcacugugcuaaa

SEQ ID NO: 14576 - RNA, 22 nt, Homo sapiens
acgcccuucccccccuucuuca

SEQ ID NO: 14577 - RNA, 22 nt, Homo sapiens
uggagagaaaggcaguuccuga

SEQ ID NO: 14578 - RNA, 21 nt, Homo sapiens
cggcggggacggcgauugguc

SEQ ID NO: 14579 - RNA, 21 nt, Homo sapiens
uucacaguggcuaaguuccgc

SEQ ID NO: 14580 - RNA, 21 nt, Homo sapiens
ugaguuggccaucugagugag

SEQ ID NO: 14581 - RNA, 21 nt, Homo sapiens
agggggaaaguucuauagucc

SEQ ID NO: 14582 - RNA, 22 nt, Homo sapiens
aggcggggcgccgcgggaccgc

SEQ ID NO: 14583 - RNA, 21 nt, Homo sapiens
uaccacaggguagaaccacgg

SEQ ID NO: 14584 - RNA, 21 nt, Homo sapiens
ccaguccugugccugccgccu

SEQ ID NO: 14585 - RNA, 21 nt, Homo sapiens
ugacaacuauggaugagcucu

SEQ ID NO: 14586 - RNA, 23 nt, Homo sapiens
agcuacauugucugcuggguuuc

SEQ ID NO: 14587 - RNA, 23 nt, Homo sapiens
ucaagagcaauaacgaaaaaugu

SEQ ID NO: 14588 - RNA, 22 nt, Homo sapiens
ggagaaauuauccuuggugugu

SEQ ID NO: 14589 - RNA, 22 nt, Homo sapiens
cuugguucagggagggucccca

SEQ ID NO: 14590 - RNA, 21 nt, Homo sapiens
uacucaaaaagcugucaguca

SEQ ID NO: 14591 - RNA, 27 nt, Homo sapiens
accuucuuguauaagcacugugcuaaa

SEQ ID NO: 14592 - RNA, 21 nt, Homo sapiens
cuuuuugcggucugggcuugc

SEQ ID NO: 14593 - RNA, 23 nt, Homo sapiens
uauggcuuuuuauuccuauguga

SEQ ID NO: 14594 - RNA, 23 nt, Homo sapiens
uuaaugcuaaucgugauaggggu

SEQ ID NO: 14595 - RNA, 22 nt, Homo sapiens
gguccagaggggagauagguuc

SEQ ID NO: 14596 - RNA, 22 nt, Homo sapiens
uagcaccaucugaaaucgguua

SEQ ID NO: 14597 - RNA, 18 nt, Homo sapiens
ugcuuccuuucagagggu

SEQ ID NO: 14598 - RNA, 22 nt, Homo sapiens
aucuggagguaagaagcacuuu

SEQ ID NO: 14599 - RNA, 22 nt, Homo sapiens
caugccuugaguguaggaccgu

SEQ ID NO: 14600 - RNA, 22 nt, Homo sapiens
uagcaaaaacugcaguuacuuu

SEQ ID NO: 14601 - RNA, 23 nt, Homo sapiens
aguauguucuuccaggacagaac

SEQ ID NO: 14602 - RNA, 21 nt, Homo sapiens
uaggacacauggucuacuucu

SEQ ID NO: 14603 - RNA, 21 nt, Homo sapiens
uccuucugcuccgucccccag

SEQ ID NO: 14604 - RNA, 21 nt, Homo sapiens
ugcaggaccaagaugagcccu

SEQ ID NO: 14605 - RNA, 22 nt, Homo sapiens
uuuagagacggggucuugcucu

SEQ ID NO: 14606 - RNA, 18 nt, Homo sapiens
ugaggcaguagauugaau

SEQ ID NO: 14607 - RNA, 21 nt, Homo sapiens
aggaggcagcgcucucaggac

SEQ ID NO: 14608 - RNA, 21 nt, Homo sapiens
aaggcagggcccccgcucccc

SEQ ID NO: 14609 - RNA, 22 nt, Homo sapiens
uggagagaaaggcaguuccuga

SEQ ID NO: 14610 - RNA, 21 nt, Homo sapiens
cggcggggacggcgauugguc

SEQ ID NO: 14611 - RNA, 22 nt, Homo sapiens
uguaacagcaacuccaugugga

SEQ ID NO: 14612 - RNA, 19 nt, Homo sapiens
accgugcaaagguagcaua

SEQ ID NO: 14613 - RNA, 22 nt, Homo sapiens
cauugcacuugucucggucuga

SEQ ID NO: 14614 - RNA, 22 nt, Homo sapiens
uauugcacauuacuaaguugca

SEQ ID NO: 14615 - RNA, 22 nt, Homo sapiens
aauugcacgguauccaucugua

SEQ ID NO: 14616 - RNA, 22 nt, Homo sapiens
aauugcacuuuagcaaugguga

SEQ ID NO: 14617 - RNA, 22 nt, Homo sapiens
aggcggggcgccgcgggaccgc

SEQ ID NO: 14618 - RNA, 22 nt, Homo sapiens
ugcggggcuagggcuaacagca

SEQ ID NO: 14619 - RNA, 22 nt, Homo sapiens
uauugcacuugucccggccugu

SEQ ID NO: 14620 - RNA, 22 nt, Homo sapiens
uauugcacucgucccggccucc

SEQ ID NO: 14621 - RNA, 21 nt, Homo sapiens
gugccagcugcagugggggag

SEQ ID NO: 14622 - RNA, 22 nt, Homo sapiens
cccugugcccggcccacuucug

SEQ ID NO: 14623 - RNA, 23 nt, Homo sapiens
caacggaaucccaaaagcagcug

SEQ ID NO: 14624 - RNA, 22 nt, Homo sapiens
aaaagcuggguugagagggcga

SEQ ID NO: 14625 - RNA, 22 nt, Homo sapiens
aaaagcuggguugagagggcaa

SEQ ID NO: 14626 - RNA, 20 nt, Homo sapiens
aaaagcuggguugagagggu

SEQ ID NO: 14627 - RNA, 19 nt, Homo sapiens
aaaagcuggguugagagga

SEQ ID NO: 14628 - RNA, 23 nt, Homo sapiens
ucaagagcaauaacgaaaaaugu

SEQ ID NO: 14629 - RNA, 22 nt, Homo sapiens
aauugcacgguauccaucugua

SEQ ID NO: 14630 - RNA, 25 nt, Homo sapiens
aggggugguguugggacagcuccgu

SEQ ID NO: 14631 - RNA, 22 nt, Homo sapiens
uuuccggcucgcgugggugugu

SEQ ID NO: 14632 - RNA, 22 nt, Homo sapiens
ccucuuccccuugucucuccag

SEQ ID NO: 14633 - RNA, 22 nt, Homo sapiens
acucggcguggcgucggucgug

SEQ ID NO: 14634 - RNA, 21 nt, Homo sapiens
ucgaggagcucacagucuagu

SEQ ID NO: 14635 - RNA, 23 nt, Homo sapiens
ugaguaccgccaugucuguuggg

SEQ ID NO: 14636 - RNA, 21 nt, Homo sapiens
gccccugggccuauccuagaa

SEQ ID NO: 14637 - RNA, 22 nt, Homo sapiens
agaggcuggccgugaugaauuc

SEQ ID NO: 14638 - RNA, 19 nt, Homo sapiens
aggcugcggaauucaggac

SEQ ID NO: 14639 - RNA, 22 nt, Homo sapiens
acuccagccccacagccucagc

SEQ ID NO: 14640 - RNA, 18 nt, Homo sapiens
ugaggcaguagauugaau

SEQ ID NO: 14641 - RNA, 23 nt, Homo sapiens
ugaguaccgccaugucuguuggg

SEQ ID NO: 14642 - RNA, 23 nt, Homo sapiens
uagugcaauauugcuuauagggu

SEQ ID NO: 14643 - RNA, 23 nt, Homo sapiens
cacucagccuugagggcacuuuc

SEQ ID NO: 14644 - RNA, 19 nt, Homo sapiens
aggcacggugucagcaggc

SEQ ID NO: 14645 - RNA, 23 nt, Homo sapiens
uggugcggagagggcccacagug

SEQ ID NO: 14646 - RNA, 22 nt, Homo sapiens
aggcagcgggguguaguggaua

SEQ ID NO: 14647 - RNA, 22 nt, Homo sapiens
uggagugugacaaugguguuug

SEQ ID NO: 14648 - RNA, 24 nt, Homo sapiens
uggcccugacugaagaccagcagu

SEQ ID NO: 14649 - RNA, 21 nt, Homo sapiens
cggcggggacggcgauugguc

SEQ ID NO: 14650 - RNA, 22 nt, Homo sapiens
ucugcccccuccgcugcugcca

SEQ ID NO: 14651 - RNA, 20 nt, Homo sapiens
ccccagggcgacgcggcggg

SEQ ID NO: 14652 - RNA, 20 nt, Homo sapiens
acugccccaggugcugcugg

SEQ ID NO: 14653 - RNA, 22 nt, Homo sapiens
cuggcccucucugcccuuccgu

SEQ ID NO: 14654 - RNA, 22 nt, Homo sapiens
uggcagugucuuagcugguugu

SEQ ID NO: 14655 - RNA, 23 nt, Homo sapiens
aggcaguguaguuagcugauugc

SEQ ID NO: 14656 - RNA, 22 nt, Homo sapiens
uaaugccccuaaaaauccuuau

SEQ ID NO: 14657 - RNA, 22 nt, Homo sapiens
uggcaguguauuguuagcuggu

SEQ ID NO: 14658 - RNA, 22 nt, Homo sapiens
aggcaguguauuguuagcuggc

SEQ ID NO: 14659 - RNA, 22 nt, Homo sapiens
aggcaguguauuguuagcuggc

SEQ ID NO: 14660 - RNA, 21 nt, Homo sapiens
cggggcagcucaguacaggau

SEQ ID NO: 14661 - RNA, 22 nt, Homo sapiens
uacucaggagaguggcaaucac

SEQ ID NO: 14662 - RNA, 19 nt, Homo sapiens
aguguggcuuucuuagagc

SEQ ID NO: 14663 - RNA, 21 nt, Homo sapiens
guggcugcacucacuuccuuc

SEQ ID NO: 14664 - RNA, 22 nt, Homo sapiens
aggcggggcgccgcgggaccgc

SEQ ID NO: 14665 - RNA, 20 nt, Homo sapiens
ggggagcuguggaagcagua

SEQ ID NO: 14666 - RNA, 22 nt, Homo sapiens
uuuccggcucgcgugggugugu

SEQ ID NO: 14667 - RNA, 22 nt, Homo sapiens
uuugaggcuacagugagaugug

SEQ ID NO: 14668 - RNA, 22 nt, Homo sapiens
uagguaguuucauguuguuggg

SEQ ID NO: 14669 - RNA, 22 nt, Homo sapiens
uagguaguuuccuguuguuggg

SEQ ID NO: 14670 - RNA, 22 nt, Homo sapiens
acagcaggcacagacaggcagu

SEQ ID NO: 14671 - RNA, 22 nt, Homo sapiens
uagcaccaucugaaaucgguua

SEQ ID NO: 14672 - RNA, 23 nt, Homo sapiens
uagcaccauuugaaaucaguguu

SEQ ID NO: 14673 - RNA, 22 nt, Homo sapiens
uagcaccauuugaaaucgguua

SEQ ID NO: 14674 - RNA, 22 nt, Homo sapiens
aauugcacgguauccaucugua

SEQ ID NO: 14675 - RNA, 22 nt, Homo sapiens
gccugcugggguggaaccuggu

SEQ ID NO: 14676 - RNA, 22 nt, Homo sapiens
uaacugguugaacaacugaacc

SEQ ID NO: 14677 - RNA, 24 nt, Homo sapiens
uggggagcugaggcucugggggug

SEQ ID NO: 14678 - RNA, 22 nt, Homo sapiens
ugagccccugugccgcccccag

SEQ ID NO: 14679 - RNA, 18 nt, Homo sapiens
acguuggcucugguggug

SEQ ID NO: 14680 - RNA, 22 nt, Homo sapiens
gcccgcguguggagccaggugu

SEQ ID NO: 14681 - RNA, 21 nt, Homo sapiens
cggcggggacggcgauugguc

SEQ ID NO: 14682 - RNA, 19 nt, Homo sapiens
aggcugcggaauucaggac

SEQ ID NO: 14683 - RNA, 23 nt, Homo sapiens
ggcagguucucacccucucuagg

SEQ ID NO: 14684 - RNA, 22 nt, Homo sapiens
aggcggggcgccgcgggaccgc

SEQ ID NO: 14685 - RNA, 22 nt, Homo sapiens
ugcggggcuagggcuaacagca

SEQ ID NO: 14686 - RNA, 22 nt, Homo sapiens
uuuccggcucgcgugggugugu

SEQ ID NO: 14687 - RNA, 23 nt, Homo sapiens
ccugcagcgacuugauggcuucc

SEQ ID NO: 14688 - RNA, 21 nt, Homo sapiens
ccccaccuccucucuccucag

SEQ ID NO: 14689 - RNA, 22 nt, Homo sapiens
uggguggucuggagauuugugc

SEQ ID NO: 14690 - RNA, 22 nt, Homo sapiens
cucccacugcuucacuugacua

SEQ ID NO: 14691 - RNA, 22 nt, Homo sapiens
cauugcacuugucucggucuga

SEQ ID NO: 14692 - RNA, 21 nt, Homo sapiens
ugguagacuauggaacguagg

SEQ ID NO: 14693 - RNA, 21 nt, Homo sapiens
ugucuugcaggccgucaugca

SEQ ID NO: 14694 - RNA, 23 nt, Homo sapiens
aggaccugcgggacaagauucuu

SEQ ID NO: 14695 - RNA, 23 nt, Homo sapiens
gaacgcgcuucccuauagagggu

SEQ ID NO: 14696 - RNA, 22 nt, Homo sapiens
ccucccacacccaaggcuugca

SEQ ID NO: 14697 - RNA, 22 nt, Homo sapiens
uggugggcacagaaucuggacu

SEQ ID NO: 14698 - RNA, 25 nt, Homo sapiens
aggggugguguugggacagcuccgu

SEQ ID NO: 14699 - RNA, 22 nt, Homo sapiens
uggugggccgcagaacaugugc

SEQ ID NO: 14700 - RNA, 25 nt, Homo sapiens
ggcggagggaaguagguccguuggu

SEQ ID NO: 14701 - RNA, 22 nt, Homo sapiens
uggagugugacaaugguguuug

SEQ ID NO: 14702 - RNA, 20 nt, Homo sapiens
ucguuugccuuuuucugcuu

SEQ ID NO: 14703 - RNA, 22 nt, Homo sapiens
ucugggcaacaaagugagaccu

SEQ ID NO: 14704 - RNA, 22 nt, Homo sapiens
ugagaaccacgucugcucugag

SEQ ID NO: 14705 - RNA, 25 nt, Homo sapiens
gcugggcagggcuucugagcuccuu

SEQ ID NO: 14706 - RNA, 22 nt, Homo sapiens
acuccagccccacagccucagc

SEQ ID NO: 14707 - RNA, 22 nt, Homo sapiens
uggagugugacaaugguguuug

SEQ ID NO: 14708 - RNA, 21 nt, Homo sapiens
aguuaggauuaggucguggaa

SEQ ID NO: 14709 - RNA, 21 nt, Homo sapiens
cggcggggacggcgauugguc

SEQ ID NO: 14710 - RNA, 22 nt, Homo sapiens
aggcggggcgccgcgggaccgc

SEQ ID NO: 14711 - RNA, 22 nt, Homo sapiens
ugagccccugugccgcccccag

SEQ ID NO: 14712 - RNA, 22 nt, Homo sapiens
uggagugugacaaugguguuug

SEQ ID NO: 14713 - RNA, 21 nt, Homo sapiens
ucccacguuguggcccagcag

SEQ ID NO: 14714 - RNA, 22 nt, Homo sapiens
auccgcgcucugacucucugcc

SEQ ID NO: 14715 - RNA, 22 nt, Homo sapiens
ugagguaguagguuguaugguu

SEQ ID NO: 14716 - RNA, 22 nt, Homo sapiens
uuuucaacucuaaugggagaga

SEQ ID NO: 14717 - RNA, 21 nt, Homo sapiens
uucacaguggcuaaguuccgc

SEQ ID NO: 14718 - RNA, 21 nt, Homo sapiens
uucacaguggcuaaguucugc

SEQ ID NO: 14719 - RNA, 22 nt, Homo sapiens
uggcaguguauuguuagcuggu

SEQ ID NO: 14720 - RNA, 22 nt, Homo sapiens
agaucagaaggugauuguggcu

SEQ ID NO: 14721 - RNA, 24 nt, Homo sapiens
uucuccaaaagaaagcacuuucug

SEQ ID NO: 14722 - RNA, 22 nt, Homo sapiens
aagugccuccuuuuagaguguu

SEQ ID NO: 14723 - RNA, 22 nt, Homo sapiens
augcugacauauuuacuagagg

SEQ ID NO: 14724 - RNA, 22 nt, Homo sapiens
cagugcaaugaugaaagggcau

SEQ ID NO: 14725 - RNA, 22 nt, Homo sapiens
cucccacugcuucacuugacua

SEQ ID NO: 14726 - RNA, 22 nt, Homo sapiens
uugggaucauuuugcauccaua

SEQ ID NO: 14727 - RNA, 22 nt, Homo sapiens
ccucccacacccaaggcuugca

SEQ ID NO: 14728 - RNA, 22 nt, Homo sapiens
caaaaguaauuguggauuuugu

SEQ ID NO: 14729 - RNA, 20 nt, Homo sapiens
guccgcucggcgguggccca

SEQ ID NO: 14730 - RNA, 23 nt, Homo sapiens
cugggaucuccggggucuugguu

SEQ ID NO: 14731 - RNA, 22 nt, Homo sapiens
ucugcccccuccgcugcugcca

SEQ ID NO: 14732 - RNA, 20 nt, Homo sapiens
acugccccaggugcugcugg

SEQ ID NO: 14733 - RNA, 22 nt, Homo sapiens
uaaugccccuaaaaauccuuau

SEQ ID NO: 14734 - RNA, 21 nt, Homo sapiens
cggggcagcucaguacaggau

SEQ ID NO: 14735 - RNA, 22 nt, Homo sapiens
uggagugugacaaugguguuug

SEQ ID NO: 14736 - RNA, 22 nt, Homo sapiens
ucagugcaucacagaacuuugu

SEQ ID NO: 14737 - RNA, 21 nt, Homo sapiens
cggcggggacggcgauugguc

SEQ ID NO: 14738 - RNA, 22 nt, Homo sapiens
ucugcccccuccgcugcugcca

SEQ ID NO: 14739 - RNA, 22 nt, Homo sapiens
uagcuuaucagacugauguuga

SEQ ID NO: 14740 - RNA, 20 nt, Homo sapiens
acugccccaggugcugcugg

SEQ ID NO: 14741 - RNA, 20 nt, Homo sapiens
acucaaacugugggggcacu

SEQ ID NO: 14742 - RNA, 23 nt, Homo sapiens
ugaggggcagagagcgagacuuu

SEQ ID NO: 14743 - RNA, 21 nt, Homo sapiens
cggggcagcucaguacaggau

SEQ ID NO: 14744 - RNA, 21 nt, Homo sapiens
ugaguuggccaucugagugag

SEQ ID NO: 14745 - RNA, 22 nt, Homo sapiens
aggcggggcgccgcgggaccgc

SEQ ID NO: 14746 - RNA, 22 nt, Homo sapiens
ugcggggcuagggcuaacagca

SEQ ID NO: 14747 - RNA, 21 nt, Homo sapiens
uacucaaaaagcugucaguca

SEQ ID NO: 14748 - RNA, 21 nt, Homo sapiens
agagaagaagaucagccugca

SEQ ID NO: 14749 - RNA, 22 nt, Homo sapiens
cuggacugagccgugcuacugg

SEQ ID NO: 14750 - RNA, 22 nt, Homo sapiens
aagcugccaguugaagaacugu

SEQ ID NO: 14751 - RNA, 22 nt, Homo sapiens
uguaaacauccucgacuggaag

SEQ ID NO: 14752 - RNA, 22 nt, Homo sapiens
uguaaacauccccgacuggaag

SEQ ID NO: 14753 - RNA, 22 nt, Homo sapiens
uguaaacauccuugacuggaag

SEQ ID NO: 14754 - RNA, 22 nt, Homo sapiens
aaaagcuggguugagagggcga

SEQ ID NO: 14755 - RNA, 22 nt, Homo sapiens
aaaagcuggguugagagggcaa

SEQ ID NO: 14756 - RNA, 20 nt, Homo sapiens
aaaagcuggguugagagggu

SEQ ID NO: 14757 - RNA, 19 nt, Homo sapiens
aaaagcuggguugagagga

SEQ ID NO: 14758 - RNA, 20 nt, Homo sapiens
ccucugggcccuuccuccag

SEQ ID NO: 14759 - RNA, 22 nt, Homo sapiens
ucucugggccugugucuuaggc

SEQ ID NO: 14760 - RNA, 22 nt, Homo sapiens
uaaugccccuaaaaauccuuau

SEQ ID NO: 14761 - RNA, 20 nt, Homo sapiens
acucaaacugugggggcacu

SEQ ID NO: 14762 - RNA, 21 nt, Homo sapiens
gcaguccaugggcauauacac

SEQ ID NO: 14763 - RNA, 22 nt, Homo sapiens
ucuucucuguuuuggccaugug

SEQ ID NO: 14764 - RNA, 21 nt, Homo sapiens
cccggagccaggaugcagcuc

SEQ ID NO: 14765 - RNA, 21 nt, Homo sapiens
ugagaugaagcacuguagcuc

SEQ ID NO: 14766 - RNA, 23 nt, Homo sapiens
ucuggcuccgugucuucacuccc

SEQ ID NO: 14767 - RNA, 22 nt, Homo sapiens
uguaacagcaacuccaugugga

SEQ ID NO: 14768 - RNA, 20 nt, Homo sapiens
ccucugggcccuuccuccag

SEQ ID NO: 14769 - RNA, 22 nt, Homo sapiens
ucucugggccugugucuuaggc

SEQ ID NO: 14770 - RNA, 19 nt, Homo sapiens
aggcacggugucagcaggc

SEQ ID NO: 14771 - RNA, 23 nt, Homo sapiens
aaaagugcuuacagugcagguag

SEQ ID NO: 14772 - RNA, 22 nt, Homo sapiens
ucggccugaccacccaccccac

SEQ ID NO: 14773 - RNA, 18 nt, Homo sapiens
gucccuguucaggcgcca

SEQ ID NO: 14774 - RNA, 24 nt, Homo sapiens
ccagacagaauucuaugcacuuuc

SEQ ID NO: 14775 - RNA, 22 nt, Homo sapiens
uaacacugucugguaaagaugg

SEQ ID NO: 14776 - RNA, 21 nt, Homo sapiens
uccugcgcgucccagaugccc

SEQ ID NO: 14777 - RNA, 22 nt, Homo sapiens
uaacacugucugguaacgaugu

SEQ ID NO: 14778 - RNA, 21 nt, Homo sapiens
auuugugcuuggcucugucac

SEQ ID NO: 14779 - RNA, 22 nt, Homo sapiens
cauugcacuugucucggucuga

SEQ ID NO: 14780 - RNA, 22 nt, Homo sapiens
uauugcacauuacuaaguugca

SEQ ID NO: 14781 - RNA, 23 nt, Homo sapiens
ucccuguccuccaggagcucacg

SEQ ID NO: 14782 - RNA, 22 nt, Homo sapiens
aauugcacgguauccaucugua

SEQ ID NO: 14783 - RNA, 22 nt, Homo sapiens
aauugcacuuuagcaaugguga

SEQ ID NO: 14784 - RNA, 22 nt, Homo sapiens
agacccuggucugcacucuauc

SEQ ID NO: 14785 - RNA, 25 nt, Homo sapiens
ggcggagggaaguagguccguuggu

SEQ ID NO: 14786 - RNA, 22 nt, Homo sapiens
uauugcacuugucccggccugu

SEQ ID NO: 14787 - RNA, 22 nt, Homo sapiens
uauugcacucgucccggccucc

SEQ ID NO: 14788 - RNA, 22 nt, Homo sapiens
uuuccggcucgcgugggugugu

SEQ ID NO: 14789 - RNA, 21 nt, Homo sapiens
ccgucgccgccacccgagccg

SEQ ID NO: 14790 - RNA, 21 nt, Homo sapiens
ccccaccuccucucuccucag

SEQ ID NO: 14791 - RNA, 18 nt, Homo sapiens
aucccaccucugccacca

SEQ ID NO: 14792 - RNA, 23 nt, Homo sapiens
ugaguaccgccaugucuguuggg

SEQ ID NO: 14793 - RNA, 22 nt, Homo sapiens
agaguugagucuggacgucccg

SEQ ID NO: 14794 - RNA, 20 nt, Homo sapiens
gugcauugcuguugcauugc

SEQ ID NO: 14795 - RNA, 22 nt, Homo sapiens
gagugccuucuuuuggagcguu

SEQ ID NO: 14796 - RNA, 22 nt, Homo sapiens
aagugccuccuuuuagaguguu

SEQ ID NO: 14797 - RNA, 20 nt, Homo sapiens
guagaggagauggcgcaggg

SEQ ID NO: 14798 - RNA, 17 nt, Homo sapiens
ucccaccgcugccaccc

SEQ ID NO: 14799 - RNA, 23 nt, Homo sapiens
ucuggcuccgugucuucacuccc

SEQ ID NO: 14800 - RNA, 22 nt, Homo sapiens
uggugggcacagaaucuggacu

SEQ ID NO: 14801 - RNA, 22 nt, Homo sapiens
uggugggccgcagaacaugugc

SEQ ID NO: 14802 - RNA, 22 nt, Homo sapiens
aggcggggcgccgcgggaccgc

SEQ ID NO: 14803 - RNA, 22 nt, Homo sapiens
ugcggggcuagggcuaacagca

SEQ ID NO: 14804 - RNA, 22 nt, Homo sapiens
acgcccuucccccccuucuuca

SEQ ID NO: 14805 - RNA, 22 nt, Homo sapiens
ucugggcaacaaagugagaccu

SEQ ID NO: 14806 - RNA, 23 nt, Homo sapiens
cgcauccccuagggcauuggugu

SEQ ID NO: 14807 - RNA, 22 nt, Homo sapiens
uccagcaucagugauuuuguug

SEQ ID NO: 14808 - RNA, 22 nt, Homo sapiens
aauugcacuuuagcaaugguga

SEQ ID NO: 14809 - RNA, 25 nt, Homo sapiens
gcugggcagggcuucugagcuccuu

SEQ ID NO: 14810 - RNA, 22 nt, Homo sapiens
aggcagcgggguguaguggaua

SEQ ID NO: 14811 - RNA, 22 nt, Homo sapiens
ugcccuuaaaggugaacccagu

SEQ ID NO: 14812 - RNA, 24 nt, Homo sapiens
agccuggaagcuggagccugcagu

SEQ ID NO: 14813 - RNA, 17 nt, Homo sapiens
gugggggagaggcuguc

SEQ ID NO: 14814 - RNA, 17 nt, Homo sapiens
ucgccuccuccucuccc

SEQ ID NO: 14815 - RNA, 19 nt, Homo sapiens
accgugcaaagguagcaua

SEQ ID NO: 14816 - RNA, 22 nt, Homo sapiens
cauugcacuugucucggucuga

SEQ ID NO: 14817 - RNA, 22 nt, Homo sapiens
ucgugcaucccuuuagaguguu

SEQ ID NO: 14818 - RNA, 21 nt, Homo sapiens
gaaggcgcuucccuuuggagu

SEQ ID NO: 14819 - RNA, 22 nt, Homo sapiens
gaaggcgcuucccuuuagagcg

SEQ ID NO: 14820 - RNA, 23 nt, Homo sapiens
acuugggcacugaaacaaugucc

SEQ ID NO: 14821 - RNA, 22 nt, Homo sapiens
acccgucccguucguccccgga

SEQ ID NO: 14822 - RNA, 23 nt, Homo sapiens
ucuggcuccgugucuucacuccc

SEQ ID NO: 14823 - RNA, 23 nt, Homo sapiens
uaaggugcaucuagugcagauag

SEQ ID NO: 14824 - RNA, 22 nt, Homo sapiens
agacccuggucugcacucuauc

SEQ ID NO: 14825 - RNA, 19 nt, Homo sapiens
aggcacggugucagcaggc

SEQ ID NO: 14826 - RNA, 20 nt, Homo sapiens
cggcucugggucugugggga

SEQ ID NO: 14827 - RNA, 23 nt, Homo sapiens
ucugcucauaccccaugguuucu

SEQ ID NO: 14828 - RNA, 22 nt, Homo sapiens
uauugcacucgucccggccucc

SEQ ID NO: 14829 - RNA, 20 nt, Homo sapiens
ugagcccuguccucccgcag

SEQ ID NO: 14830 - RNA, 22 nt, Homo sapiens
uucuggaauucugugugaggga

SEQ ID NO: 14831 - RNA, 21 nt, Homo sapiens
agggcccccccucaauccugu

SEQ ID NO: 14832 - RNA, 23 nt, Homo sapiens
ugaggggcagagagcgagacuuu

SEQ ID NO: 14833 - RNA, 23 nt, Homo sapiens
aggaccugcgggacaagauucuu

SEQ ID NO: 14834 - RNA, 23 nt, Homo sapiens
caaagcgcuucucuuuagagugu

SEQ ID NO: 14835 - RNA, 21 nt, Homo sapiens
cuccagagggaaguacuuucu

SEQ ID NO: 14836 - RNA, 21 nt, Homo sapiens
cuccagagggaugcacuuucu

SEQ ID NO: 14837 - RNA, 22 nt, Homo sapiens
agacuucccauuugaagguggc

SEQ ID NO: 14838 - RNA, 24 nt, Homo sapiens
gaccuggacauguuugugcccagu

SEQ ID NO: 14839 - RNA, 20 nt, Homo sapiens
cggcucugggucugugggga

SEQ ID NO: 14840 - RNA, 22 nt, Homo sapiens
cugcccuggcccgagggaccga

SEQ ID NO: 14841 - RNA, 22 nt, Homo sapiens
ugagccccugugccgcccccag

SEQ ID NO: 14842 - RNA, 22 nt, Homo sapiens
ggagacgcggcccuguuggagu

SEQ ID NO: 14843 - RNA, 23 nt, Homo sapiens
ucuggcuccgugucuucacuccc

SEQ ID NO: 14844 - RNA, 22 nt, Homo sapiens
ucugcccccuccgcugcugcca

SEQ ID NO: 14845 - RNA, 22 nt, Homo sapiens
uguaaacauccuacacucagcu

SEQ ID NO: 14846 - RNA, 20 nt, Homo sapiens
acugccccaggugcugcugg

SEQ ID NO: 14847 - RNA, 23 nt, Homo sapiens
ugucugcccgcaugccugccucu

SEQ ID NO: 14848 - RNA, 22 nt, Homo sapiens
agaggcuggccgugaugaauuc

SEQ ID NO: 14849 - RNA, 23 nt, Homo sapiens
caaagcgcuucucuuuagagugu

SEQ ID NO: 14850 - RNA, 21 nt, Homo sapiens
cuccagagggaaguacuuucu

SEQ ID NO: 14851 - RNA, 21 nt, Homo sapiens
cuccagagggaugcacuuucu

SEQ ID NO: 14852 - RNA, 21 nt, Homo sapiens
gcgacccauacuugguuucag

SEQ ID NO: 14853 - RNA, 21 nt, Homo sapiens
uuggccacaauggguuagaac

SEQ ID NO: 14854 - RNA, 21 nt, Homo sapiens
acagucugcugagguuggagc

SEQ ID NO: 14855 - RNA, 22 nt, Homo sapiens
aguauucuguaccagggaaggu

SEQ ID NO: 14856 - RNA, 20 nt, Homo sapiens
cggcucugggucugugggga

SEQ ID NO: 14857 - RNA, 23 nt, Homo sapiens
ucuggcuccgugucuucacuccc

SEQ ID NO: 14858 - RNA, 22 nt, Homo sapiens
caaagaauucuccuuuugggcu

SEQ ID NO: 14859 - RNA, 20 nt, Homo sapiens
ccccagggcgacgcggcggg

SEQ ID NO: 14860 - RNA, 21 nt, Homo sapiens
uaaagugcugacagugcagau

SEQ ID NO: 14861 - RNA, 23 nt, Homo sapiens
cagugcaaugauauugucaaagc

SEQ ID NO: 14862 - RNA, 22 nt, Homo sapiens
ccucccacacccaaggcuugca

SEQ ID NO: 14863 - RNA, 23 nt, Homo sapiens
gaacgccuguucuugccaggugg

SEQ ID NO: 14864 - RNA, 23 nt, Homo sapiens
uccaguaccacgugucagggcca

SEQ ID NO: 14865 - RNA, 22 nt, Homo sapiens
uggauuucuuugugaaucacca

SEQ ID NO: 14866 - RNA, 23 nt, Homo sapiens
ccugcagcgacuugauggcuucc

SEQ ID NO: 14867 - RNA, 20 nt, Homo sapiens
ucugcaggguuugcuuugag

SEQ ID NO: 14868 - RNA, 20 nt, Homo sapiens
ucugcaggguuugcuuugag

SEQ ID NO: 14869 - RNA, 20 nt, Homo sapiens
cgugccacccuuuuccccag

SEQ ID NO: 14870 - RNA, 18 nt, Homo sapiens
cgggcguggugguggggg

SEQ ID NO: 14871 - RNA, 23 nt, Homo sapiens
ucuggcuccgugucuucacuccc

SEQ ID NO: 14872 - RNA, 22 nt, Homo sapiens
aacauucaaccugucggugagu

SEQ ID NO: 14873 - RNA, 18 nt, Homo sapiens
uccagugcccuccucucc

SEQ ID NO: 14874 - RNA, 22 nt, Homo sapiens
ugauauguuugauauauuaggu

SEQ ID NO: 14875 - RNA, 23 nt, Homo sapiens
ucuuggaguaggucauugggugg

SEQ ID NO: 14876 - RNA, 21 nt, Homo sapiens
uggaggagaaggaaggugaug

SEQ ID NO: 14877 - RNA, 22 nt, Homo sapiens
ucuacaaaggaaagcgcuuucu

SEQ ID NO: 14878 - RNA, 23 nt, Homo sapiens
uauggcuuuucauuccuauguga

SEQ ID NO: 14879 - RNA, 22 nt, Homo sapiens
ucaggccaggcacaguggcuca

SEQ ID NO: 14880 - RNA, 21 nt, Homo sapiens
gccccugggccuauccuagaa

SEQ ID NO: 14881 - RNA, 23 nt, Homo sapiens
uagcagcgggaacaguucugcag

SEQ ID NO: 14882 - RNA, 24 nt, Homo sapiens
ugccugggucucuggccugcgcgu

SEQ ID NO: 14883 - RNA, 21 nt, Homo sapiens
ccuggaaacacugagguugug

SEQ ID NO: 14884 - RNA, 20 nt, Homo sapiens
ggggagcuguggaagcagua

SEQ ID NO: 14885 - RNA, 26 nt, Homo sapiens
gaugaugauggcagcaaauucugaaa

SEQ ID NO: 14886 - RNA, 22 nt, Homo sapiens
uaacacugucugguaaagaugg

SEQ ID NO: 14887 - RNA, 22 nt, Homo sapiens
uacccagagcaugcagugugaa

SEQ ID NO: 14888 - RNA, 22 nt, Homo sapiens
uccuucauuccaccggagucug

SEQ ID NO: 14889 - RNA, 23 nt, Homo sapiens
gcaaagcacacggccugcagaga

SEQ ID NO: 14890 - RNA, 23 nt, Homo sapiens
uagugcaauauugcuuauagggu

SEQ ID NO: 14891 - RNA, 23 nt, Homo sapiens
uaaauuucaccuuucugagaagg

SEQ ID NO: 14892 - RNA, 23 nt, Homo sapiens
gacacgggcgacagcugcggccc

SEQ ID NO: 14893 - RNA, 20 nt, Homo sapiens
agaccauggguucucauugu

SEQ ID NO: 14894 - RNA, 22 nt, Homo sapiens
uggagugugacaaugguguuug

SEQ ID NO: 14895 - RNA, 22 nt, Homo sapiens
ucuucucuguuuuggccaugug

SEQ ID NO: 14896 - RNA, 20 nt, Homo sapiens
ugagcccuguccucccgcag

SEQ ID NO: 14897 - RNA, 22 nt, Homo sapiens
uucuggaauucugugugaggga

SEQ ID NO: 14898 - RNA, 22 nt, Homo sapiens
aagcccuuaccccaaaaagcau

SEQ ID NO: 14899 - RNA, 21 nt, Homo sapiens
gcccuccgcccgugcaccccg

SEQ ID NO: 14900 - RNA, 23 nt, Homo sapiens
cggcccgggcugcugcuguuccu

SEQ ID NO: 14901 - RNA, 22 nt, Homo sapiens
cauugcacuugucucggucuga

SEQ ID NO: 14902 - RNA, 23 nt, Homo sapiens
ugaggggcagagagcgagacuuu

SEQ ID NO: 14903 - RNA, 25 nt, Homo sapiens
ggcggagggaaguagguccguuggu

SEQ ID NO: 14904 - RNA, 20 nt, Homo sapiens
ucacaccugccucgcccccc

SEQ ID NO: 14905 - RNA, 23 nt, Homo sapiens
ucuggcuccgugucuucacuccc

SEQ ID NO: 14906 - RNA, 20 nt, Homo sapiens
agagguauagggcaugggaa

SEQ ID NO: 14907 - RNA, 22 nt, Homo sapiens
uagcuuaucagacugauguuga

SEQ ID NO: 14908 - RNA, 22 nt, Homo sapiens
aacacaccugguuaaccucuuu

SEQ ID NO: 14909 - RNA, 21 nt, Homo sapiens
gugcauuguaguugcauugca

SEQ ID NO: 14910 - RNA, 21 nt, Homo sapiens
gugucuuuugcucugcaguca

SEQ ID NO: 14911 - RNA, 22 nt, Homo sapiens
caaaaguaauuguggauuuugu

SEQ ID NO: 14912 - RNA, 19 nt, Homo sapiens
gagccaguuggacaggagc

SEQ ID NO: 14913 - RNA, 21 nt, Homo sapiens
uggguuuacguugggagaacu

SEQ ID NO: 14914 - RNA, 22 nt, Homo sapiens
uauaccucaguuuuaucaggug

SEQ ID NO: 14915 - RNA, 22 nt, Homo sapiens
cacuggcuccuuucuggguaga

SEQ ID NO: 14916 - RNA, 20 nt, Homo sapiens
uaaggcacgcggugaaugcc

SEQ ID NO: 14917 - RNA, 17 nt, Homo sapiens
ucccaccgcugccaccc

SEQ ID NO: 14918 - RNA, 20 nt, Homo sapiens
ccccagggcgacgcggcggg

SEQ ID NO: 14919 - RNA, 22 nt, Homo sapiens
gguccagaggggagauagguuc

SEQ ID NO: 14920 - RNA, 22 nt, Homo sapiens
uagcuuaucagacugauguuga

SEQ ID NO: 14921 - RNA, 21 nt, Homo sapiens
uaaagugcugacagugcagau

SEQ ID NO: 14922 - RNA, 23 nt, Homo sapiens
cagugcaaugauauugucaaagc

SEQ ID NO: 14923 - RNA, 23 nt, Homo sapiens
uuucaagccagggggcguuuuuc

SEQ ID NO: 14924 - RNA, 21 nt, Homo sapiens
uaaggcacccuucugaguaga

SEQ ID NO: 14925 - RNA, 23 nt, Homo sapiens
caaagcgcuucucuuuagagugu

SEQ ID NO: 14926 - RNA, 21 nt, Homo sapiens
cuccagagggaaguacuuucu

SEQ ID NO: 14927 - RNA, 21 nt, Homo sapiens
cuccagagggaugcacuuucu

SEQ ID NO: 14928 - RNA, 21 nt, Homo sapiens
aggaggcagcgcucucaggac

SEQ ID NO: 14929 - RNA, 20 nt, Homo sapiens
accaggaggcugaggccccu

SEQ ID NO: 14930 - RNA, 21 nt, Homo sapiens
ccuggaaacacugagguugug

SEQ ID NO: 14931 - RNA, 23 nt, Homo sapiens
uauggcuuuuuauuccuauguga

SEQ ID NO: 14932 - RNA, 22 nt, Homo sapiens
ugagaacugaauuccauggguu

SEQ ID NO: 14933 - RNA, 22 nt, Homo sapiens
ugagaacugaauuccauaggcu

SEQ ID NO: 14934 - RNA, 22 nt, Homo sapiens
ucagugcacuacagaacuuugu

SEQ ID NO: 14935 - RNA, 22 nt, Homo sapiens
ucucccaacccuuguaccagug

SEQ ID NO: 14936 - RNA, 22 nt, Homo sapiens
uagcagcacauaaugguuugug

SEQ ID NO: 14937 - RNA, 23 nt, Homo sapiens
agcuacauugucugcuggguuuc

SEQ ID NO: 14938 - RNA, 21 nt, Homo sapiens
uaaagugcugacagugcagau

SEQ ID NO: 14939 - RNA, 23 nt, Homo sapiens
cagugcaaugauauugucaaagc

SEQ ID NO: 14940 - RNA, 23 nt, Homo sapiens
uagugcaauauugcuuauagggu

SEQ ID NO: 14941 - RNA, 22 nt, Homo sapiens
caaaaaucucaauuacuuuugc

SEQ ID NO: 14942 - RNA, 21 nt, Homo sapiens
gcgacccauacuugguuucag

SEQ ID NO: 14943 - RNA, 23 nt, Homo sapiens
ucuggcuccgugucuucacuccc

SEQ ID NO: 14944 - RNA, 22 nt, Homo sapiens
uggacggagaacugauaagggu

SEQ ID NO: 14945 - RNA, 22 nt, Homo sapiens
caaagaauucuccuuuugggcu

SEQ ID NO: 14946 - RNA, 21 nt, Homo sapiens
cggggcagcucaguacaggau

SEQ ID NO: 14947 - RNA, 18 nt, Homo sapiens
ugcuuccuuucagagggu

SEQ ID NO: 14948 - RNA, 22 nt, Homo sapiens
aucuggagguaagaagcacuuu

SEQ ID NO: 14949 - RNA, 23 nt, Homo sapiens
acuugggcacugaaacaaugucc

SEQ ID NO: 14950 - RNA, 21 nt, Homo sapiens
aaggcagggcccccgcucccc

SEQ ID NO: 14951 - RNA, 20 nt, Homo sapiens
ucguuugccuuuuucugcuu

SEQ ID NO: 14952 - RNA, 22 nt, Homo sapiens
ucuacaaaggaaagcgcuuucu

SEQ ID NO: 14953 - RNA, 22 nt, Homo sapiens
cagugcaauguuaaaagggcau

SEQ ID NO: 14954 - RNA, 22 nt, Homo sapiens
cagugcaaugaugaaagggcau

SEQ ID NO: 14955 - RNA, 22 nt, Homo sapiens
ucagugcacuacagaacuuugu

SEQ ID NO: 14956 - RNA, 22 nt, Homo sapiens
ucagugcaucacagaacuuugu

SEQ ID NO: 14957 - RNA, 21 nt, Homo sapiens
ucagugcaugacagaacuugg

SEQ ID NO: 14958 - RNA, 23 nt, Homo sapiens
ugugcaaaucuaugcaaaacuga

SEQ ID NO: 14959 - RNA, 23 nt, Homo sapiens
ugugcaaauccaugcaaaacuga

SEQ ID NO: 14960 - RNA, 22 nt, Homo sapiens
cauugcacuugucucggucuga

SEQ ID NO: 14961 - RNA, 21 nt, Homo sapiens
uucaaguaauucaggauaggu

SEQ ID NO: 14962 - RNA, 23 nt, Homo sapiens
cagugcaauaguauugucaaagc

SEQ ID NO: 14963 - RNA, 23 nt, Homo sapiens
cagugcaaugauauugucaaagc

SEQ ID NO: 14964 - RNA, 23 nt, Homo sapiens
uagugcaauauugcuuauagggu

SEQ ID NO: 14965 - RNA, 21 nt, Homo sapiens
uuuugcaccuuuuggagugaa

SEQ ID NO: 14966 - RNA, 23 nt, Homo sapiens
guuugcacgggugggccuugucu

SEQ ID NO: 14967 - RNA, 21 nt, Homo sapiens
cgcgggugcuuacugacccuu

SEQ ID NO: 14968 - RNA, 23 nt, Homo sapiens
uacccuguagauccgaauuugug

SEQ ID NO: 14969 - RNA, 23 nt, Homo sapiens
uacccuguagaaccgaauuugug

SEQ ID NO: 14970 - RNA, 21 nt, Homo sapiens
ccccaccuccucucuccucag

SEQ ID NO: 14971 - RNA, 22 nt, Homo sapiens
uggagugugacaaugguguuug

SEQ ID NO: 14972 - RNA, 22 nt, Homo sapiens
ucugggcaacaaagugagaccu

SEQ ID NO: 14973 - RNA, 22 nt, Homo sapiens
acucggcguggcgucggucgug

SEQ ID NO: 14974 - RNA, 22 nt, Homo sapiens
uggagagaaaggcaguuccuga

SEQ ID NO: 14975 - RNA, 22 nt, Homo sapiens
cauugcacuugucucggucuga

SEQ ID NO: 14976 - RNA, 21 nt, Homo sapiens
uucacaguggcuaaguuccgc

SEQ ID NO: 14977 - RNA, 23 nt, Homo sapiens
ucccuguccuccaggagcucacg

SEQ ID NO: 14978 - RNA, 23 nt, Homo sapiens
ugaggggcagagagcgagacuuu

SEQ ID NO: 14979 - RNA, 22 nt, Homo sapiens
uggugggcacagaaucuggacu

SEQ ID NO: 14980 - RNA, 21 nt, Homo sapiens
aggguaagcugaaccucugau

SEQ ID NO: 14981 - RNA, 20 nt, Homo sapiens
guccgcucggcgguggccca

SEQ ID NO: 14982 - RNA, 25 nt, Homo sapiens
gcugggcagggcuucugagcuccuu

SEQ ID NO: 14983 - RNA, 22 nt, Homo sapiens
uggugggccgcagaacaugugc

SEQ ID NO: 14984 - RNA, 17 nt, Homo sapiens
ucucgcuggggccucca

SEQ ID NO: 14985 - RNA, 23 nt, Homo sapiens
ucaaaugcucagacuccuguggu

SEQ ID NO: 14986 - RNA, 21 nt, Homo sapiens
aagcauucuuucauugguugg

SEQ ID NO: 14987 - RNA, 22 nt, Homo sapiens
ugagaacugaauuccauggguu

SEQ ID NO: 14988 - RNA, 22 nt, Homo sapiens
ugagaacugaauuccauaggcu

SEQ ID NO: 14989 - RNA, 22 nt, Homo sapiens
ucagugcacuacagaacuuugu

SEQ ID NO: 14990 - RNA, 22 nt, Homo sapiens
ucagugcacuacagaacuuugu

SEQ ID NO: 14991 - RNA, 22 nt, Homo sapiens
ucagugcaucacagaacuuugu

SEQ ID NO: 14992 - RNA, 21 nt, Homo sapiens
gccccugggccuauccuagaa

SEQ ID NO: 14993 - RNA, 22 nt, Homo sapiens
cuccuauaugaugccuuucuuc

SEQ ID NO: 14994 - RNA, 22 nt, Homo sapiens
uugcauauguaggaugucccau

SEQ ID NO: 14995 - RNA, 22 nt, Homo sapiens
ggagaaauuauccuuggugugu

SEQ ID NO: 14996 - RNA, 22 nt, Homo sapiens
uaugcauuguauuuuuaggucc

SEQ ID NO: 14997 - RNA, 23 nt, Homo sapiens
uauucauuuauccccagccuaca

SEQ ID NO: 14998 - RNA, 21 nt, Homo sapiens
ccuggaaacacugagguugug

SEQ ID NO: 14999 - RNA, 22 nt, Homo sapiens
uggauuucuuugugaaucacca

SEQ ID NO: 15000 - RNA, 23 nt, Homo sapiens
ucaaaugcucagacuccuguggu

SEQ ID NO: 15001 - RNA, 23 nt, Homo sapiens
ccugcagcgacuugauggcuucc

SEQ ID NO: 15002 - RNA, 21 nt, Homo sapiens
ugcaggaccaagaugagcccu

SEQ ID NO: 15003 - RNA, 23 nt, Homo sapiens
uggaguccaggaaucugcauuuu

SEQ ID NO: 15004 - RNA, 18 nt, Homo sapiens
acguuggcucugguggug

SEQ ID NO: 15005 - RNA, 19 nt, Homo sapiens
gaugaugcugcugaugcug

SEQ ID NO: 15006 - RNA, 21 nt, Homo sapiens
ucgaggagcucacagucuagu

SEQ ID NO: 15007 - RNA, 23 nt, Homo sapiens
ucccccaggugugauucugauuu

SEQ ID NO: 15008 - RNA, 22 nt, Homo sapiens
auucugcauuuuuagcaaguuc

SEQ ID NO: 15009 - RNA, 24 nt, Homo sapiens
acugggggcuuucgggcucugcgu

SEQ ID NO: 15010 - RNA, 23 nt, Homo sapiens
uggugcggagagggcccacagug

SEQ ID NO: 15011 - RNA, 21 nt, Homo sapiens
ucacuccucuccucccgucuu

SEQ ID NO: 15012 - RNA, 23 nt, Homo sapiens
aaaagugcuuacagugcagguag

SEQ ID NO: 15013 - RNA, 17 nt, Homo sapiens
gugggggagaggcuguc

SEQ ID NO: 15014 - RNA, 17 nt, Homo sapiens
gugggggagaggcuguc

SEQ ID NO: 15015 - RNA, 23 nt, Homo sapiens
ucuggcuccgugucuucacuccc

SEQ ID NO: 15016 - RNA, 21 nt, Homo sapiens
uccugcgcgucccagaugccc

SEQ ID NO: 15017 - RNA, 22 nt, Homo sapiens
ucugcccccuccgcugcugcca

SEQ ID NO: 15018 - RNA, 22 nt, Homo sapiens
uguaacagcaacuccaugugga

SEQ ID NO: 15019 - RNA, 22 nt, Homo sapiens
uguaacagcaacuccaugugga

SEQ ID NO: 15020 - RNA, 22 nt, Homo sapiens
aagcugccaguugaagaacugu

SEQ ID NO: 15021 - RNA, 20 nt, Homo sapiens
acugccccaggugcugcugg

SEQ ID NO: 15022 - RNA, 20 nt, Homo sapiens
ccucugggcccuuccuccag

SEQ ID NO: 15023 - RNA, 22 nt, Homo sapiens
ucucugggccugugucuuaggc

SEQ ID NO: 15024 - RNA, 22 nt, Homo sapiens
gcugacuccuaguccagggcuc

SEQ ID NO: 15025 - RNA, 22 nt, Homo sapiens
uggcagugucuuagcugguugu

SEQ ID NO: 15026 - RNA, 22 nt, Homo sapiens
caaucacuaacuccacugccau

SEQ ID NO: 15027 - RNA, 23 nt, Homo sapiens
aggcaguguaguuagcugauugc

SEQ ID NO: 15028 - RNA, 21 nt, Homo sapiens
acuggacuuggagucagaagg

SEQ ID NO: 15029 - RNA, 23 nt, Homo sapiens
ugaggggcagagagcgagacuuu

SEQ ID NO: 15030 - RNA, 22 nt, Homo sapiens
uggcaguguauuguuagcuggu

SEQ ID NO: 15031 - RNA, 22 nt, Homo sapiens
aggcaguguauuguuagcuggc

SEQ ID NO: 15032 - RNA, 21 nt, Homo sapiens
cggggcagcucaguacaggau

SEQ ID NO: 15033 - RNA, 19 nt, Homo sapiens
ucuaggcugguacugcuga

SEQ ID NO: 15034 - RNA, 22 nt, Homo sapiens
ugugcgcagggagaccucuccc

SEQ ID NO: 15035 - RNA, 24 nt, Homo sapiens
uggggagcugaggcucugggggug

SEQ ID NO: 15036 - RNA, 18 nt, Homo sapiens
ucagcuggcccucauuuc

SEQ ID NO: 15037 - RNA, 22 nt, Homo sapiens
ugagccccugugccgcccccag

SEQ ID NO: 15038 - RNA, 22 nt, Homo sapiens
uggaauguaaggaagugugugg

SEQ ID NO: 15039 - RNA, 17 nt, Homo sapiens
ucccaccgcugccaccc

SEQ ID NO: 15040 - RNA, 23 nt, Homo sapiens
ucccuguccuccaggagcucacg

SEQ ID NO: 15041 - RNA, 22 nt, Homo sapiens
uggcagugucuuagcugguugu

SEQ ID NO: 15042 - RNA, 23 nt, Homo sapiens
uggaagacuagugauuuuguugu

SEQ ID NO: 15043 - RNA, 20 nt, Homo sapiens
ggggagcuguggaagcagua

SEQ ID NO: 15044 - RNA, 22 nt, Homo sapiens
uaacacugucugguaaagaugg

SEQ ID NO: 15045 - RNA, 23 nt, Homo sapiens
guccaguuuucccaggaaucccu

SEQ ID NO: 15046 - RNA, 23 nt, Homo sapiens
uaaagugcuuauagugcagguag

SEQ ID NO: 15047 - RNA, 24 nt, Homo sapiens
agcagaagcagggagguucuccca

SEQ ID NO: 15048 - RNA, 22 nt, Homo sapiens
uccagcaucagugauuuuguug

SEQ ID NO: 15049 - RNA, 22 nt, Homo sapiens
agaucgaccguguuauauucgc

SEQ ID NO: 15050 - RNA, 22 nt, Homo sapiens
aagacgggaggaaagaagggag

SEQ ID NO: 15051 - RNA, 22 nt, Homo sapiens
auucugcauuuuuagcaaguuc

SEQ ID NO: 15052 - RNA, 21 nt, Homo sapiens
acagucugcugagguuggagc

SEQ ID NO: 15053 - RNA, 22 nt, Homo sapiens
aagugcuuccuuuuagaggguu

SEQ ID NO: 15054 - RNA, 22 nt, Homo sapiens
uggagugugacaaugguguuug

SEQ ID NO: 15055 - RNA, 22 nt, Homo sapiens
acucggcguggcgucggucgug

SEQ ID NO: 15056 - RNA, 22 nt, Homo sapiens
cucggcgcggggcgcgggcucc

SEQ ID NO: 15057 - RNA, 22 nt, Homo sapiens
uggagagaaaggcaguuccuga

SEQ ID NO: 15058 - RNA, 22 nt, Homo sapiens
cauugcacuugucucggucuga

SEQ ID NO: 15059 - RNA, 19 nt, Homo sapiens
aggcugcggaauucaggac

SEQ ID NO: 15060 - RNA, 25 nt, Homo sapiens
ggcggagggaaguagguccguuggu

SEQ ID NO: 15061 - RNA, 22 nt, Homo sapiens
aggcggggcgccgcgggaccgc

SEQ ID NO: 15062 - RNA, 21 nt, Homo sapiens
gugccagcugcagugggggag

SEQ ID NO: 15063 - RNA, 21 nt, Homo sapiens
cccggagccaggaugcagcuc

SEQ ID NO: 15064 - RNA, 22 nt, Homo sapiens
uggcagugucuuagcugguugu

SEQ ID NO: 15065 - RNA, 22 nt, Homo sapiens
cgucaacacuugcugguuuccu

SEQ ID NO: 15066 - RNA, 22 nt, Homo sapiens
acucggcguggcgucggucgug

SEQ ID NO: 15067 - RNA, 21 nt, Homo sapiens
uccugcgcgucccagaugccc

SEQ ID NO: 15068 - RNA, 22 nt, Homo sapiens
ucaggccaggcacaguggcuca

SEQ ID NO: 15069 - RNA, 23 nt, Homo sapiens
cgcauccccuagggcauuggugu

SEQ ID NO: 15070 - RNA, 23 nt, Homo sapiens
ucaagagcaauaacgaaaaaugu

SEQ ID NO: 15071 - RNA, 22 nt, Homo sapiens
uuuugcaauauguuccugaaua

SEQ ID NO: 15072 - RNA, 21 nt, Homo sapiens
cagcagcacacugugguuugu

SEQ ID NO: 15073 - RNA, 22 nt, Homo sapiens
cgaaaacagcaauuaccuuugc

SEQ ID NO: 15074 - RNA, 25 nt, Homo sapiens
agggaucgcgggcggguggcggccu

SEQ ID NO: 15075 - RNA, 19 nt, Homo sapiens
aguguggcuuucuuagagc

SEQ ID NO: 15076 - RNA, 22 nt, Homo sapiens
uggugguuuacaaaguaauuca

SEQ ID NO: 15077 - RNA, 22 nt, Homo sapiens
ugugcgcagggagaccucuccc

SEQ ID NO: 15078 - RNA, 23 nt, Homo sapiens
ucuggcuccgugucuucacuccc

SEQ ID NO: 15079 - RNA, 21 nt, Homo sapiens
cggcggggacggcgauugguc

SEQ ID NO: 15080 - RNA, 23 nt, Homo sapiens
caaagugcucauagugcagguag

SEQ ID NO: 15081 - RNA, 22 nt, Homo sapiens
aaggagcucacagucuauugag

SEQ ID NO: 15082 - RNA, 23 nt, Homo sapiens
ucccccaggugugauucugauuu

SEQ ID NO: 15083 - RNA, 19 nt, Homo sapiens
aggcugcggaauucaggac

SEQ ID NO: 15084 - RNA, 20 nt, Homo sapiens
accaggaggcugaggccccu

SEQ ID NO: 15085 - RNA, 23 nt, Homo sapiens
aaggagcuuacaaucuagcuggg

SEQ ID NO: 15086 - RNA, 22 nt, Homo sapiens
ugcggggcuagggcuaacagca

SEQ ID NO: 15087 - RNA, 17 nt, Homo sapiens
gugggggagaggcuguc

SEQ ID NO: 15088 - RNA, 23 nt, Homo sapiens
uggaguccaggaaucugcauuuu

SEQ ID NO: 15089 - RNA, 18 nt, Homo sapiens
uugagaaggaggcugcug

SEQ ID NO: 15090 - RNA, 23 nt, Homo sapiens
ucuggcuccgugucuucacuccc

SEQ ID NO: 15091 - RNA, 22 nt, Homo sapiens
uagcagcacauaaugguuugug

SEQ ID NO: 15092 - RNA, 22 nt, Homo sapiens
uggagagaaaggcaguuccuga

SEQ ID NO: 15093 - RNA, 21 nt, Homo sapiens
cggcggggacggcgauugguc

SEQ ID NO: 15094 - RNA, 23 nt, Homo sapiens
ugaggggcagagagcgagacuuu

SEQ ID NO: 15095 - RNA, 22 nt, Homo sapiens
aggcggggcgccgcgggaccgc

SEQ ID NO: 15096 - RNA, 24 nt, Homo sapiens
uggggagcugaggcucugggggug

SEQ ID NO: 15097 - RNA, 23 nt, Homo sapiens
ucuuggaguaggucauugggugg

SEQ ID NO: 15098 - RNA, 22 nt, Homo sapiens
gaaagcgcuucccuuugcugga

SEQ ID NO: 15099 - RNA, 22 nt, Homo sapiens
caaagcgcuccccuuuagaggu

SEQ ID NO: 15100 - RNA, 23 nt, Homo sapiens
caaagcgcuucucuuuagagugu

SEQ ID NO: 15101 - RNA, 21 nt, Homo sapiens
caaagcgcuucccuuuggagc

SEQ ID NO: 15102 - RNA, 21 nt, Homo sapiens
gaaagcgcuucucuuuagagg

SEQ ID NO: 15103 - RNA, 22 nt, Homo sapiens
ugagaaccacgucugcucugag

SEQ ID NO: 15104 - RNA, 21 nt, Homo sapiens
cgcgggugcuuacugacccuu

SEQ ID NO: 15105 - RNA, 20 nt, Homo sapiens
ggggagcuguggaagcagua

SEQ ID NO: 15106 - RNA, 21 nt, Homo sapiens
uaggacacauggucuacuucu

SEQ ID NO: 15107 - RNA, 21 nt, Homo sapiens
gugccagcugcagugggggag

SEQ ID NO: 15108 - RNA, 21 nt, Homo sapiens
agagaagaagaucagccugca

SEQ ID NO: 15109 - RNA, 24 nt, Homo sapiens
ucccugagacccuuuaaccuguga

SEQ ID NO: 15110 - RNA, 22 nt, Homo sapiens
ucccugagacccuaacuuguga

SEQ ID NO: 15111 - RNA, 23 nt, Homo sapiens
ccucagggcuguagaacagggcu

SEQ ID NO: 15112 - RNA, 18 nt, Homo sapiens
acguuggcucugguggug

SEQ ID NO: 15113 - RNA, 22 nt, Homo sapiens
ugauauguuugauauauuaggu

SEQ ID NO: 15114 - RNA, 22 nt, Homo sapiens
uggcucaguucagcaggaacag

SEQ ID NO: 15115 - RNA, 22 nt, Homo sapiens
uguaaacauccuacacucagcu

SEQ ID NO: 15116 - RNA, 20 nt, Homo sapiens
ccucugggcccuuccuccag

SEQ ID NO: 15117 - RNA, 22 nt, Homo sapiens
ucucugggccugugucuuaggc

SEQ ID NO: 15118 - RNA, 20 nt, Homo sapiens
uaaggcacgcggugaaugcc

SEQ ID NO: 15119 - RNA, 22 nt, Homo sapiens
cucuagagggaagcacuuucug

SEQ ID NO: 15120 - RNA, 21 nt, Homo sapiens
aaagcgcuucccuucagagug

SEQ ID NO: 15121 - RNA, 21 nt, Homo sapiens
gaaagcgcuucucuuuagagg

SEQ ID NO: 15122 - RNA, 22 nt, Homo sapiens
aaagugcauccuuuuagagugu

SEQ ID NO: 15123 - RNA, 22 nt, Homo sapiens
cucuagagggaagcgcuuucug

SEQ ID NO: 15124 - RNA, 22 nt, Homo sapiens
cucuagagggaagcgcuuucug

SEQ ID NO: 15125 - RNA, 22 nt, Homo sapiens
cucuagagggaagcacuuucug

SEQ ID NO: 15126 - RNA, 22 nt, Homo sapiens
aaaaugguucccuuuagagugu

SEQ ID NO: 15127 - RNA, 23 nt, Homo sapiens
gaacgcgcuucccuauagagggu

SEQ ID NO: 15128 - RNA, 22 nt, Homo sapiens
cucuagagggaagcacuuucug

SEQ ID NO: 15129 - RNA, 21 nt, Homo sapiens
ucccacguuguggcccagcag

SEQ ID NO: 15130 - RNA, 22 nt, Homo sapiens
ucuucucuguuuuggccaugug

SEQ ID NO: 15131 - RNA, 21 nt, Homo sapiens
uccuucugcuccgucccccag

SEQ ID NO: 15132 - RNA, 21 nt, Homo sapiens
gugccagcugcagugggggag

SEQ ID NO: 15133 - RNA, 22 nt, Homo sapiens
ucugggcaacaaagugagaccu

SEQ ID NO: 15134 - RNA, 21 nt, Homo sapiens
uggacugcccugaucuggaga

SEQ ID NO: 15135 - RNA, 18 nt, Homo sapiens
cagggaggugaaugugau

SEQ ID NO: 15136 - RNA, 23 nt, Homo sapiens
ucuggcuccgugucuucacuccc

SEQ ID NO: 15137 - RNA, 22 nt, Homo sapiens
uggagagaaaggcaguuccuga

SEQ ID NO: 15138 - RNA, 22 nt, Homo sapiens
ucugcccccuccgcugcugcca

SEQ ID NO: 15139 - RNA, 23 nt, Homo sapiens
caacggaaucccaaaagcagcug

SEQ ID NO: 15140 - RNA, 22 nt, Homo sapiens
uucccuuugucauccuaugccu

SEQ ID NO: 15141 - RNA, 22 nt, Homo sapiens
uucccuuugucauccuucgccu

SEQ ID NO: 15142 - RNA, 22 nt, Homo sapiens
uguaaacauccuacacucagcu

SEQ ID NO: 15143 - RNA, 20 nt, Homo sapiens
acugccccaggugcugcugg

SEQ ID NO: 15144 - RNA, 22 nt, Homo sapiens
uccagcaucagugauuuuguug

SEQ ID NO: 15145 - RNA, 21 nt, Homo sapiens
aggggugcuaucugugauuga

SEQ ID NO: 15146 - RNA, 22 nt, Homo sapiens
uuaucagaaucuccagggguac

SEQ ID NO: 15147 - RNA, 21 nt, Homo sapiens
cggggcagcucaguacaggau

SEQ ID NO: 15148 - RNA, 22 nt, Homo sapiens
aaugcacccgggcaaggauucu

SEQ ID NO: 15149 - RNA, 22 nt, Homo sapiens
aaugcaccugggcaaggauuca

SEQ ID NO: 15150 - RNA, 21 nt, Homo sapiens
aagccugcccggcuccucggg

SEQ ID NO: 15151 - RNA, 25 nt, Homo sapiens
gcugggcagggcuucugagcuccuu

SEQ ID NO: 15152 - RNA, 20 nt, Homo sapiens
ggggagcuguggaagcagua

SEQ ID NO: 15153 - RNA, 22 nt, Homo sapiens
uucacaaggaggugucauuuau

SEQ ID NO: 15154 - RNA, 20 nt, Homo sapiens
ggggagcuguggaagcagua

SEQ ID NO: 15155 - RNA, 21 nt, Homo sapiens
gugccagcugcagugggggag

SEQ ID NO: 15156 - RNA, 22 nt, Homo sapiens
acgcccuucccccccuucuuca

SEQ ID NO: 15157 - RNA, 18 nt, Homo sapiens
cgggcguggugguggggg

SEQ ID NO: 15158 - RNA, 24 nt, Homo sapiens
uggcccugacugaagaccagcagu

SEQ ID NO: 15159 - RNA, 22 nt, Homo sapiens
ucgugucuuguguugcagccgg

SEQ ID NO: 15160 - RNA, 22 nt, Homo sapiens
cauugcacuugucucggucuga

SEQ ID NO: 15161 - RNA, 21 nt, Homo sapiens
uucaaguaauucaggauaggu

SEQ ID NO: 15162 - RNA, 22 nt, Homo sapiens
cuggcccucucugcccuuccgu

SEQ ID NO: 15163 - RNA, 22 nt, Homo sapiens
ucaggcucaguccccucccgau

SEQ ID NO: 15164 - RNA, 22 nt, Homo sapiens
agaggcuggccgugaugaauuc

SEQ ID NO: 15165 - RNA, 22 nt, Homo sapiens
aucuggagguaagaagcacuuu

SEQ ID NO: 15166 - RNA, 23 nt, Homo sapiens
uauucauuuauccccagccuaca

SEQ ID NO: 15167 - RNA, 22 nt, Homo sapiens
aggcagcgggguguaguggaua

SEQ ID NO: 15168 - RNA, 23 nt, Homo sapiens
cgggucggaguuagcucaagcgg

SEQ ID NO: 15169 - RNA, 18 nt, Homo sapiens
cagggaggugaaugugau

SEQ ID NO: 15170 - RNA, 21 nt, Homo sapiens
gcccuccgcccgugcaccccg

SEQ ID NO: 15171 - RNA, 23 nt, Homo sapiens
ucuggcuccgugucuucacuccc

SEQ ID NO: 15172 - RNA, 22 nt, Homo sapiens
aauugcacgguauccaucugua

SEQ ID NO: 15173 - RNA, 20 nt, Homo sapiens
guccgcucggcgguggccca

SEQ ID NO: 15174 - RNA, 21 nt, Homo sapiens
agggggaaaguucuauagucc

SEQ ID NO: 15175 - RNA, 22 nt, Homo sapiens
gucccucuccaaaugugucuug

SEQ ID NO: 15176 - RNA, 21 nt, Homo sapiens
uggaggagaaggaaggugaug

SEQ ID NO: 15177 - RNA, 21 nt, Homo sapiens
cgcgggugcuuacugacccuu

SEQ ID NO: 15178 - RNA, 22 nt, Homo sapiens
ugagguaguaguuugugcuguu

SEQ ID NO: 15179 - RNA, 24 nt, Homo sapiens
uggcccugacugaagaccagcagu

SEQ ID NO: 15180 - RNA, 22 nt, Homo sapiens
ucgugucuuguguugcagccgg

SEQ ID NO: 15181 - RNA, 20 nt, Homo sapiens
ccccagggcgacgcggcggg

SEQ ID NO: 15182 - RNA, 22 nt, Homo sapiens
aacuggccuacaaagucccagu

SEQ ID NO: 15183 - RNA, 22 nt, Homo sapiens
aacuggcccucaaagucccgcu

SEQ ID NO: 15184 - RNA, 22 nt, Homo sapiens
cuggcccucucugcccuuccgu

SEQ ID NO: 15185 - RNA, 21 nt, Homo sapiens
gaacggcuucauacaggaguu

SEQ ID NO: 15186 - RNA, 19 nt, Homo sapiens
aagugugcagggcacuggu

SEQ ID NO: 15187 - RNA, 22 nt, Homo sapiens
ugugcgcagggagaccucuccc

SEQ ID NO: 15188 - RNA, 21 nt, Homo sapiens
gugccagcugcagugggggag

SEQ ID NO: 15189 - RNA, 21 nt, Homo sapiens
cccggagccaggaugcagcuc

SEQ ID NO: 15190 - RNA, 20 nt, Homo sapiens
ccccagggcgacgcggcggg

SEQ ID NO: 15191 - RNA, 21 nt, Homo sapiens
ugacaacuauggaugagcucu

SEQ ID NO: 15192 - RNA, 18 nt, Homo sapiens
ugcuuccuuucagagggu

SEQ ID NO: 15193 - RNA, 22 nt, Homo sapiens
aucuggagguaagaagcacuuu

SEQ ID NO: 15194 - RNA, 25 nt, Homo sapiens
ggcggagggaaguagguccguuggu

SEQ ID NO: 15195 - RNA, 22 nt, Homo sapiens
ugcggggcuagggcuaacagca

SEQ ID NO: 15196 - RNA, 22 nt, Homo sapiens
auccgcgcucugacucucugcc

SEQ ID NO: 15197 - RNA, 22 nt, Homo sapiens
uggagugugacaaugguguuug

SEQ ID NO: 15198 - RNA, 20 nt, Homo sapiens
uaaggcacgcggugaaugcc

SEQ ID NO: 15199 - RNA, 22 nt, Homo sapiens
uaacagucuacagccauggucg

SEQ ID NO: 15200 - RNA, 22 nt, Homo sapiens
ucgugucuuguguugcagccgg

SEQ ID NO: 15201 - RNA, 21 nt, Homo sapiens
uaacagucuccagucacggcc

SEQ ID NO: 15202 - RNA, 23 nt, Homo sapiens
gaagugcuucgauuuuggggugu

SEQ ID NO: 15203 - RNA, 22 nt, Homo sapiens
aacuguuugcagaggaaacuga

SEQ ID NO: 15204 - RNA, 21 nt, Homo sapiens
uaaggcacccuucugaguaga

SEQ ID NO: 15205 - RNA, 21 nt, Homo sapiens
gugucuuuugcucugcaguca

SEQ ID NO: 15206 - RNA, 24 nt, Homo sapiens
uucuccaaaagaaagcacuuucug

SEQ ID NO: 15207 - RNA, 22 nt, Homo sapiens
aagugccuccuuuuagaguguu

SEQ ID NO: 15208 - RNA, 22 nt, Homo sapiens
caaaaguaauuguggauuuugu

SEQ ID NO: 15209 - RNA, 22 nt, Homo sapiens
agucauuggaggguuugagcag

SEQ ID NO: 15210 - RNA, 22 nt, Homo sapiens
ccucuuccccuugucucuccag

SEQ ID NO: 15211 - RNA, 23 nt, Homo sapiens
ucuggcuccgugucuucacuccc

SEQ ID NO: 15212 - RNA, 23 nt, Homo sapiens
gaagugcuucgauuuuggggugu

SEQ ID NO: 15213 - RNA, 22 nt, Homo sapiens
uccuguacugagcugccccgag

SEQ ID NO: 15214 - RNA, 24 nt, Homo sapiens
uucuccaaaagaaagcacuuucug

SEQ ID NO: 15215 - RNA, 22 nt, Homo sapiens
aagugccuccuuuuagaguguu

SEQ ID NO: 15216 - RNA, 22 nt, Homo sapiens
agucauuggaggguuugagcag

SEQ ID NO: 15217 - RNA, 22 nt, Homo sapiens
gucccucuccaaaugugucuug

SEQ ID NO: 15218 - RNA, 21 nt, Homo sapiens
aaggcagggcccccgcucccc

SEQ ID NO: 15219 - RNA, 22 nt, Homo sapiens
uagcagcacauaaugguuugug

SEQ ID NO: 15220 - RNA, 22 nt, Homo sapiens
uagcagcacaucaugguuuaca

SEQ ID NO: 15221 - RNA, 22 nt, Homo sapiens
uagcagcacguaaauauuggcg

SEQ ID NO: 15222 - RNA, 21 nt, Homo sapiens
uagcagcacagaaauauuggc

SEQ ID NO: 15223 - RNA, 22 nt, Homo sapiens
ugguuuaccgucccacauacau

SEQ ID NO: 15224 - RNA, 22 nt, Homo sapiens
cagcagcaauucauguuuugaa

SEQ ID NO: 15225 - RNA, 21 nt, Homo sapiens
cagcagcacacugugguuugu

SEQ ID NO: 15226 - RNA, 23 nt, Homo sapiens
uagcagcgggaacaguucugcag

SEQ ID NO: 15227 - RNA, 22 nt, Homo sapiens
aggcagcgggguguaguggaua

SEQ ID NO: 15228 - RNA, 22 nt, Homo sapiens
uuuccggcucgcgugggugugu

SEQ ID NO: 15229 - RNA, 17 nt, Homo sapiens
gugggggagaggcuguc

SEQ ID NO: 15230 - RNA, 21 nt, Homo sapiens
ucgaggagcucacagucuagu

SEQ ID NO: 15231 - RNA, 21 nt, Homo sapiens
cucccacaugcaggguuugca

SEQ ID NO: 15232 - RNA, 23 nt, Homo sapiens
agcuacauugucugcuggguuuc

SEQ ID NO: 15233 - RNA, 23 nt, Homo sapiens
ucccccaggugugauucugauuu

SEQ ID NO: 15234 - RNA, 23 nt, Homo sapiens
uaauccuugcuaccugggugaga

SEQ ID NO: 15235 - RNA, 23 nt, Homo sapiens
uaauccuugcuaccugggugaga

SEQ ID NO: 15236 - RNA, 22 nt, Homo sapiens
aaugcacccgggcaaggauucu

SEQ ID NO: 15237 - RNA, 22 nt, Homo sapiens
aaugcaccugggcaaggauuca

SEQ ID NO: 15238 - RNA, 21 nt, Homo sapiens
aacaggugacugguuagacaa

SEQ ID NO: 15239 - RNA, 21 nt, Homo sapiens
agggggaaaguucuauagucc

SEQ ID NO: 15240 - RNA, 24 nt, Homo sapiens
acugggggcuuucgggcucugcgu

SEQ ID NO: 15241 - RNA, 19 nt, Homo sapiens
aguguggcuuucuuagagc

SEQ ID NO: 15242 - RNA, 22 nt, Homo sapiens
acgcccuucccccccuucuuca

SEQ ID NO: 15243 - RNA, 17 nt, Homo sapiens
ucgccuccuccucuccc

SEQ ID NO: 15244 - RNA, 23 nt, Homo sapiens
uggaguccaggaaucugcauuuu

SEQ ID NO: 15245 - RNA, 22 nt, Homo sapiens
ugagaacugaauuccauggguu

SEQ ID NO: 15246 - RNA, 22 nt, Homo sapiens
ugagaacugaauuccauaggcu

SEQ ID NO: 15247 - RNA, 21 nt, Homo sapiens
uccugcgcgucccagaugccc

SEQ ID NO: 15248 - RNA, 22 nt, Homo sapiens
uggagagaaaggcaguuccuga

SEQ ID NO: 15249 - RNA, 21 nt, Homo sapiens
cggcggggacggcgauugguc

SEQ ID NO: 15250 - RNA, 20 nt, Homo sapiens
ccuccugcccuccuugcugu

SEQ ID NO: 15251 - RNA, 20 nt, Homo sapiens
ccucugggcccuuccuccag

SEQ ID NO: 15252 - RNA, 22 nt, Homo sapiens
ucucugggccugugucuuaggc

SEQ ID NO: 15253 - RNA, 25 nt, Homo sapiens
aggggugguguugggacagcuccgu

SEQ ID NO: 15254 - RNA, 22 nt, Homo sapiens
aggcggggcgccgcgggaccgc

SEQ ID NO: 15255 - RNA, 22 nt, Homo sapiens
ugcggggcuagggcuaacagca

SEQ ID NO: 15256 - RNA, 20 nt, Homo sapiens
cggcucugggucugugggga

SEQ ID NO: 15257 - RNA, 20 nt, Homo sapiens
ggggagcuguggaagcagua

SEQ ID NO: 15258 - RNA, 23 nt, Homo sapiens
uacccuguagauccgaauuugug

SEQ ID NO: 15259 - RNA, 23 nt, Homo sapiens
uacccuguagaaccgaauuugug

SEQ ID NO: 15260 - RNA, 23 nt, Homo sapiens
gagggucuugggagggaugugac

SEQ ID NO: 15261 - RNA, 22 nt, Homo sapiens
ucugggcaacaaagugagaccu

SEQ ID NO: 15262 - RNA, 22 nt, Homo sapiens
uuuagagacggggucuugcucu

SEQ ID NO: 15263 - RNA, 22 nt, Homo sapiens
cagugcaaugaugaaagggcau

SEQ ID NO: 15264 - RNA, 24 nt, Homo sapiens
ccagacagaauucuaugcacuuuc

SEQ ID NO: 15265 - RNA, 22 nt, Homo sapiens
uagguaguuucauguuguuggg

SEQ ID NO: 15266 - RNA, 23 nt, Homo sapiens
ucccuguccuccaggagcucacg

SEQ ID NO: 15267 - RNA, 22 nt, Homo sapiens
aauugcacuuuagcaaugguga

SEQ ID NO: 15268 - RNA, 22 nt, Homo sapiens
agacccuggucugcacucuauc

SEQ ID NO: 15269 - RNA, 22 nt, Homo sapiens
ggagaaauuauccuuggugugu

SEQ ID NO: 15270 - RNA, 22 nt, Homo sapiens
aaaaguaauugcgaguuuuacc

SEQ ID NO: 15271 - RNA, 22 nt, Homo sapiens
aaaaguaauugugguuuuggcc

SEQ ID NO: 15272 - RNA, 22 nt, Homo sapiens
aaaaguaauugcgguuuuugcc

SEQ ID NO: 15273 - RNA, 22 nt, Homo sapiens
aaaaguaauugugguuuuugcc

SEQ ID NO: 15274 - RNA, 22 nt, Homo sapiens
aaaaguaaucgcgguuuuuguc

SEQ ID NO: 15275 - RNA, 22 nt, Homo sapiens
aaaaguaauugcggauuuugcc

SEQ ID NO: 15276 - RNA, 22 nt, Homo sapiens
aaaaguaauugcggucuuuggu

SEQ ID NO: 15277 - RNA, 22 nt, Homo sapiens
caaaaguaauuguggauuuugu

SEQ ID NO: 15278 - RNA, 21 nt, Homo sapiens
uaaaguaaauaugcaccaaaa

SEQ ID NO: 15279 - RNA, 25 nt, Homo sapiens
gcugggcagggcuucugagcuccuu

SEQ ID NO: 15280 - RNA, 19 nt, Homo sapiens
gugucugcuuccuguggga

SEQ ID NO: 15281 - RNA, 22 nt, Homo sapiens
ugcggggcuagggcuaacagca

SEQ ID NO: 15282 - RNA, 22 nt, Homo sapiens
ucggccugaccacccaccccac

SEQ ID NO: 15283 - RNA, 20 nt, Homo sapiens
uaaggcacgcggugaaugcc

SEQ ID NO: 15284 - RNA, 23 nt, Homo sapiens
caacggaaucccaaaagcagcug

SEQ ID NO: 15285 - RNA, 22 nt, Homo sapiens
uucaccaccuucuccacccagc

SEQ ID NO: 15286 - RNA, 23 nt, Homo sapiens
ugugcaaaucuaugcaaaacuga

SEQ ID NO: 15287 - RNA, 22 nt, Homo sapiens
aacaauauccuggugcugagug

SEQ ID NO: 15288 - RNA, 22 nt, Homo sapiens
agagguaguagguugcauaguu

SEQ ID NO: 15289 - RNA, 21 nt, Homo sapiens
ccaccaccgugucugacacuu

SEQ ID NO: 15290 - RNA, 22 nt, Homo sapiens
ugucaguuugucaaauacccca

SEQ ID NO: 15291 - RNA, 21 nt, Homo sapiens
uugaaaggcuauuucuugguc

SEQ ID NO: 15292 - RNA, 21 nt, Homo sapiens
uaaggcacccuucugaguaga

SEQ ID NO: 15293 - RNA, 23 nt, Homo sapiens
uucauuugguauaaaccgcgauu

SEQ ID NO: 15294 - RNA, 22 nt, Homo sapiens
uggagugugacaaugguguuug

SEQ ID NO: 15295 - RNA, 22 nt, Homo sapiens
augggugaauuuguagaaggau

SEQ ID NO: 15296 - RNA, 22 nt, Homo sapiens
uuugguccccuucaaccagcug

SEQ ID NO: 15297 - RNA, 22 nt, Homo sapiens
uuugguccccuucaaccagcua

SEQ ID NO: 15298 - RNA, 23 nt, Homo sapiens
cggcccgggcugcugcuguuccu

SEQ ID NO: 15299 - RNA, 21 nt, Homo sapiens
cggcggggacggcgauugguc

SEQ ID NO: 15300 - RNA, 22 nt, Homo sapiens
uacccagagcaugcagugugaa

SEQ ID NO: 15301 - RNA, 21 nt, Homo sapiens
agggcccccccucaauccugu

SEQ ID NO: 15302 - RNA, 22 nt, Homo sapiens
uggugggcacagaaucuggacu

SEQ ID NO: 15303 - RNA, 25 nt, Homo sapiens
aggggugguguugggacagcuccgu

SEQ ID NO: 15304 - RNA, 22 nt, Homo sapiens
uggugggccgcagaacaugugc

SEQ ID NO: 15305 - RNA, 22 nt, Homo sapiens
aggcggggcgccgcgggaccgc

SEQ ID NO: 15306 - RNA, 23 nt, Homo sapiens
uggugcggagagggcccacagug

SEQ ID NO: 15307 - RNA, 23 nt, Homo sapiens
ccugcagcgacuugauggcuucc

SEQ ID NO: 15308 - RNA, 20 nt, Homo sapiens
ucugcaggguuugcuuugag

SEQ ID NO: 15309 - RNA, 21 nt, Homo sapiens
agugaaugauggguucugacc

SEQ ID NO: 15310 - RNA, 24 nt, Homo sapiens
uggcccugacugaagaccagcagu

SEQ ID NO: 15311 - RNA, 18 nt, Homo sapiens
acguuggcucugguggug

SEQ ID NO: 15312 - RNA, 24 nt, Homo sapiens
uuuggcaaugguagaacucacacu

SEQ ID NO: 15313 - RNA, 20 nt, Homo sapiens
ccccagggcgacgcggcggg

SEQ ID NO: 15314 - RNA, 20 nt, Homo sapiens
ccccagggcgacgcggcggg

SEQ ID NO: 15315 - RNA, 20 nt, Homo sapiens
ccuccugcccuccuugcugu

SEQ ID NO: 15316 - RNA, 21 nt, Homo sapiens
gccccugggccuauccuagaa

SEQ ID NO: 15317 - RNA, 22 nt, Homo sapiens
cgucaacacuugcugguuuccu

SEQ ID NO: 15318 - RNA, 23 nt, Homo sapiens
uggugcggagagggcccacagug

SEQ ID NO: 15319 - RNA, 22 nt, Homo sapiens
ugcggggcuagggcuaacagca

SEQ ID NO: 15320 - RNA, 21 nt, Homo sapiens
cccggagccaggaugcagcuc

SEQ ID NO: 15321 - RNA, 21 nt, Homo sapiens
cccggagccaggaugcagcuc

SEQ ID NO: 15322 - RNA, 21 nt, Homo sapiens
ucguggccuggucuccauuau

SEQ ID NO: 15323 - RNA, 18 nt, Homo sapiens
ucagcuggcccucauuuc

SEQ ID NO: 15324 - RNA, 18 nt, Homo sapiens
cgggcguggugguggggg

SEQ ID NO: 15325 - RNA, 21 nt, Homo sapiens
gcccuccgcccgugcaccccg

SEQ ID NO: 15326 - RNA, 25 nt, Homo sapiens
cccccacaaccgcgcuugacuagcu

SEQ ID NO: 15327 - RNA, 20 nt, Homo sapiens
ccuccugcccuccuugcugu

SEQ ID NO: 15328 - RNA, 22 nt, Homo sapiens
cauugcacuugucucggucuga

SEQ ID NO: 15329 - RNA, 25 nt, Homo sapiens
ggcggagggaaguagguccguuggu

SEQ ID NO: 15330 - RNA, 22 nt, Homo sapiens
acccgucccguucguccccgga

SEQ ID NO: 15331 - RNA, 27 nt, Homo sapiens
accuucuuguauaagcacugugcuaaa

SEQ ID NO: 15332 - RNA, 21 nt, Homo sapiens
agagaagaagaucagccugca

SEQ ID NO: 15333 - RNA, 21 nt, Homo sapiens
agugaaugauggguucugacc

SEQ ID NO: 15334 - RNA, 22 nt, Homo sapiens
cagugcaaugaugaaagggcau

SEQ ID NO: 15335 - RNA, 22 nt, Homo sapiens
uggagagaaaggcaguuccuga

SEQ ID NO: 15336 - RNA, 22 nt, Homo sapiens
ucuucucuguuuuggccaugug

SEQ ID NO: 15337 - RNA, 20 nt, Homo sapiens
ugagcccuguccucccgcag

SEQ ID NO: 15338 - RNA, 18 nt, Homo sapiens
gucccuguucaggcgcca

SEQ ID NO: 15339 - RNA, 21 nt, Homo sapiens
cuuuuugcggucugggcuugc

SEQ ID NO: 15340 - RNA, 22 nt, Homo sapiens
gccugcugggguggaaccuggu

SEQ ID NO: 15341 - RNA, 23 nt, Homo sapiens
aggaccugcgggacaagauucuu

SEQ ID NO: 15342 - RNA, 22 nt, Homo sapiens
ugugacagauugauaacugaaa

SEQ ID NO: 15343 - RNA, 22 nt, Homo sapiens
caaaaaccacaguuucuuuugc

SEQ ID NO: 15344 - RNA, 22 nt, Homo sapiens
uccgagccugggucucccucuu

SEQ ID NO: 15345 - RNA, 23 nt, Homo sapiens
ugucacucggcucggcccacuac

SEQ ID NO: 15346 - RNA, 22 nt, Homo sapiens
aggcagcgggguguaguggaua

SEQ ID NO: 15347 - RNA, 23 nt, Homo sapiens
ccaguuaccgcuuccgcuaccgc

SEQ ID NO: 15348 - RNA, 21 nt, Homo sapiens
ccccaccuccucucuccucag

SEQ ID NO: 15349 - RNA, 18 nt, Homo sapiens
aucccaccucugccacca

SEQ ID NO: 15350 - RNA, 23 nt, Homo sapiens
ucuggcuccgugucuucacuccc

SEQ ID NO: 15351 - RNA, 22 nt, Homo sapiens
uggagagaaaggcaguuccuga

SEQ ID NO: 15352 - RNA, 22 nt, Homo sapiens
uucccuuugucauccuaugccu

SEQ ID NO: 15353 - RNA, 22 nt, Homo sapiens
uucccuuugucauccuucgccu

SEQ ID NO: 15354 - RNA, 22 nt, Homo sapiens
aagcugccaguugaagaacugu

SEQ ID NO: 15355 - RNA, 21 nt, Homo sapiens
uaaagugcugacagugcagau

SEQ ID NO: 15356 - RNA, 23 nt, Homo sapiens
cagugcaaugauauugucaaagc

SEQ ID NO: 15357 - RNA, 22 nt, Homo sapiens
cgucaacacuugcugguuuccu

SEQ ID NO: 15358 - RNA, 22 nt, Homo sapiens
ccucccacacccaaggcuugca

SEQ ID NO: 15359 - RNA, 19 nt, Homo sapiens
gagccaguuggacaggagc

SEQ ID NO: 15360 - RNA, 21 nt, Homo sapiens
ucccacguuguggcccagcag

SEQ ID NO: 15361 - RNA, 21 nt, Homo sapiens
uggaggagaaggaaggugaug

SEQ ID NO: 15362 - RNA, 22 nt, Homo sapiens
cacuggcuccuuucuggguaga

SEQ ID NO: 15363 - RNA, 22 nt, Homo sapiens
uuuccggcucgcgugggugugu

SEQ ID NO: 15364 - RNA, 18 nt, Homo sapiens
ucagcuggcccucauuuc

SEQ ID NO: 15365 - RNA, 20 nt, Homo sapiens
ugagcccuguccucccgcag

SEQ ID NO: 15366 - RNA, 24 nt, Homo sapiens
agccuggaagcuggagccugcagu

SEQ ID NO: 15367 - RNA, 18 nt, Homo sapiens
cgggcguggugguggggg

SEQ ID NO: 15368 - RNA, 23 nt, Homo sapiens
cuggagauauggaagagcugugu

SEQ ID NO: 15369 - RNA, 22 nt, Homo sapiens
cagugcaaugaugaaagggcau

SEQ ID NO: 15370 - RNA, 21 nt, Homo sapiens
uccugcgcgucccagaugccc

SEQ ID NO: 15371 - RNA, 21 nt, Homo sapiens
cggcggggacggcgauugguc

SEQ ID NO: 15372 - RNA, 19 nt, Homo sapiens
gggcgccugugaucccaac

SEQ ID NO: 15373 - RNA, 19 nt, Homo sapiens
gggcgccugugaucccaac

SEQ ID NO: 15374 - RNA, 20 nt, Homo sapiens
auggagauagauauagaaau

SEQ ID NO: 15375 - RNA, 22 nt, Homo sapiens
aggcggggcgccgcgggaccgc

SEQ ID NO: 15376 - RNA, 22 nt, Homo sapiens
ugcggggcuagggcuaacagca

SEQ ID NO: 15377 - RNA, 21 nt, Homo sapiens
uugcucacuguucuucccuag

SEQ ID NO: 15378 - RNA, 20 nt, Homo sapiens
ugagcccuguccucccgcag

SEQ ID NO: 15379 - RNA, 21 nt, Homo sapiens
uugggacauacuuaugcuaaa

SEQ ID NO: 15380 - RNA, 22 nt, Homo sapiens
uggagagaaaggcaguuccuga

SEQ ID NO: 15381 - RNA, 20 nt, Homo sapiens
ccccagggcgacgcggcggg

SEQ ID NO: 15382 - RNA, 20 nt, Homo sapiens
ccuccugcccuccuugcugu

SEQ ID NO: 15383 - RNA, 23 nt, Homo sapiens
cccaguguucagacuaccuguuc

SEQ ID NO: 15384 - RNA, 23 nt, Homo sapiens
cccaguguuuagacuaucuguuc

SEQ ID NO: 15385 - RNA, 23 nt, Homo sapiens
ugugcaaaucuaugcaaaacuga

SEQ ID NO: 15386 - RNA, 23 nt, Homo sapiens
ugugcaaauccaugcaaaacuga

SEQ ID NO: 15387 - RNA, 21 nt, Homo sapiens
agggcccccccucaauccugu

SEQ ID NO: 15388 - RNA, 21 nt, Homo sapiens
gccccugggccuauccuagaa

SEQ ID NO: 15389 - RNA, 23 nt, Homo sapiens
ucucacacagaaaucgcacccgu

SEQ ID NO: 15390 - RNA, 22 nt, Homo sapiens
aucacacaaaggcaacuuuugu

SEQ ID NO: 15391 - RNA, 21 nt, Homo sapiens
uuuugcaccuuuuggagugaa

SEQ ID NO: 15392 - RNA, 23 nt, Homo sapiens
guuugcacgggugggccuugucu

SEQ ID NO: 15393 - RNA, 20 nt, Homo sapiens
guagaggagauggcgcaggg

SEQ ID NO: 15394 - RNA, 20 nt, Homo sapiens
ggggagcuguggaagcagua

SEQ ID NO: 15395 - RNA, 22 nt, Homo sapiens
ugcccuuaaaggugaacccagu

SEQ ID NO: 15396 - RNA, 22 nt, Homo sapiens
acccgucccguucguccccgga

SEQ ID NO: 15397 - RNA, 24 nt, Homo sapiens
ucccugagacccuuuaaccuguga

SEQ ID NO: 15398 - RNA, 22 nt, Homo sapiens
ucccugagacccuaacuuguga

SEQ ID NO: 15399 - RNA, 18 nt, Homo sapiens
aucccaccucugccacca

SEQ ID NO: 15400 - RNA, 23 nt, Homo sapiens
ccucagggcuguagaacagggcu

SEQ ID NO: 15401 - RNA, 17 nt, Homo sapiens
ucccuguucgggcgcca

SEQ ID NO: 15402 - RNA, 18 nt, Homo sapiens
gcaugggugguucagugg

SEQ ID NO: 15403 - RNA, 23 nt, Homo sapiens
ucuggcuccgugucuucacuccc

SEQ ID NO: 15404 - RNA, 22 nt, Homo sapiens
ucugcccccuccgcugcugcca

SEQ ID NO: 15405 - RNA, 22 nt, Homo sapiens
cccugugcccggcccacuucug

SEQ ID NO: 15406 - RNA, 23 nt, Homo sapiens
ugugcaaaucuaugcaaaacuga

SEQ ID NO: 15407 - RNA, 22 nt, Homo sapiens
aacaauauccuggugcugagug

SEQ ID NO: 15408 - RNA, 22 nt, Homo sapiens
agagguaguagguugcauaguu

SEQ ID NO: 15409 - RNA, 20 nt, Homo sapiens
acugccccaggugcugcugg

SEQ ID NO: 15410 - RNA, 22 nt, Homo sapiens
caaucacuaacuccacugccau

SEQ ID NO: 15411 - RNA, 22 nt, Homo sapiens
uggcaguguauuguuagcuggu

SEQ ID NO: 15412 - RNA, 22 nt, Homo sapiens
aggcaguguauuguuagcuggc

SEQ ID NO: 15413 - RNA, 21 nt, Homo sapiens
cagcagcacacugugguuugu

SEQ ID NO: 15414 - RNA, 25 nt, Homo sapiens
aggggugguguugggacagcuccgu

SEQ ID NO: 15415 - RNA, 20 nt, Homo sapiens
accaggaggcugaggccccu

SEQ ID NO: 15416 - RNA, 22 nt, Homo sapiens
uggugguuuacaaaguaauuca

SEQ ID NO: 15417 - RNA, 22 nt, Homo sapiens
uauugcacucgucccggccucc

SEQ ID NO: 15418 - RNA, 24 nt, Homo sapiens
uggggagcugaggcucugggggug

SEQ ID NO: 15419 - RNA, 22 nt, Homo sapiens
uggagugugacaaugguguuug

SEQ ID NO: 15420 - RNA, 22 nt, Homo sapiens
acccgucccguucguccccgga

SEQ ID NO: 15421 - RNA, 20 nt, Homo sapiens
uacaguauagaugauguacu

SEQ ID NO: 15422 - RNA, 22 nt, Homo sapiens
ucagugcacuacagaacuuugu

SEQ ID NO: 15423 - RNA, 22 nt, Homo sapiens
ucagugcaucacagaacuuugu

SEQ ID NO: 15424 - RNA, 21 nt, Homo sapiens
ucagugcaugacagaacuugg

SEQ ID NO: 15425 - RNA, 22 nt, Homo sapiens
aucgugcauccuuuuagagugu

SEQ ID NO: 15426 - RNA, 23 nt, Homo sapiens
ugugcaaaucuaugcaaaacuga

SEQ ID NO: 15427 - RNA, 23 nt, Homo sapiens
ugugcaaauccaugcaaaacuga

SEQ ID NO: 15428 - RNA, 22 nt, Homo sapiens
uaauacugccugguaaugauga

SEQ ID NO: 15429 - RNA, 23 nt, Homo sapiens
uaauacugccggguaaugaugga

SEQ ID NO: 15430 - RNA, 22 nt, Homo sapiens
uaauacugucugguaaaaccgu

SEQ ID NO: 15431 - RNA, 21 nt, Homo sapiens
uuuugcaccuuuuggagugaa

SEQ ID NO: 15432 - RNA, 23 nt, Homo sapiens
guuugcacgggugggccuugucu

SEQ ID NO: 15433 - RNA, 23 nt, Homo sapiens
uaaaucccauggugccuucuccu

SEQ ID NO: 15434 - RNA, 25 nt, Homo sapiens
ggcggagggaaguagguccguuggu

SEQ ID NO: 15435 - RNA, 22 nt, Homo sapiens
ugcggggcuagggcuaacagca

SEQ ID NO: 15436 - RNA, 22 nt, Homo sapiens
uauugcacucgucccggccucc

SEQ ID NO: 15437 - RNA, 22 nt, Homo sapiens
ugugcgcagggagaccucuccc

SEQ ID NO: 15438 - RNA, 20 nt, Homo sapiens
gugucugggcggacagcugc

SEQ ID NO: 15439 - RNA, 24 nt, Homo sapiens
agccuggaagcuggagccugcagu

SEQ ID NO: 15440 - RNA, 24 nt, Homo sapiens
ccagacagaauucuaugcacuuuc

SEQ ID NO: 15441 - RNA, 19 nt, Homo sapiens
gagccaguuggacaggagc

SEQ ID NO: 15442 - RNA, 19 nt, Homo sapiens
agcugucugaaaaugucuu

SEQ ID NO: 15443 - RNA, 21 nt, Homo sapiens
cgcgggugcuuacugacccuu

SEQ ID NO: 15444 - RNA, 22 nt, Homo sapiens
cacuggcuccuuucuggguaga

SEQ ID NO: 15445 - RNA, 21 nt, Homo sapiens
uugcucacuguucuucccuag

SEQ ID NO: 15446 - RNA, 22 nt, Homo sapiens
cuccugagccauucugagccuc

SEQ ID NO: 15447 - RNA, 22 nt, Homo sapiens
uggagugugacaaugguguuug

SEQ ID NO: 15448 - RNA, 22 nt, Homo sapiens
ucucccaacccuuguaccagug

SEQ ID NO: 15449 - RNA, 21 nt, Homo sapiens
cggcggggacggcgauugguc

SEQ ID NO: 15450 - RNA, 22 nt, Homo sapiens
acacagggcuguugugaagacu

SEQ ID NO: 15451 - RNA, 22 nt, Homo sapiens
uacucaggagaguggcaaucac

SEQ ID NO: 15452 - RNA, 18 nt, Homo sapiens
uucacagggaggugucau

SEQ ID NO: 15453 - RNA, 22 nt, Homo sapiens
aggcggggcgccgcgggaccgc

SEQ ID NO: 15454 - RNA, 22 nt, Homo sapiens
ugcggggcuagggcuaacagca

SEQ ID NO: 15455 - RNA, 23 nt, Homo sapiens
ucugcucauaccccaugguuucu

SEQ ID NO: 15456 - RNA, 22 nt, Homo sapiens
ugcaacuuaccugagucauuga

SEQ ID NO: 15457 - RNA, 17 nt, Homo sapiens
ucgccuccuccucuccc

SEQ ID NO: 15458 - RNA, 19 nt, Homo sapiens
ugucucugcugggguuucu

SEQ ID NO: 15459 - RNA, 25 nt, Homo sapiens
ggcggagggaaguagguccguuggu

SEQ ID NO: 15460 - RNA, 22 nt, Homo sapiens
ugugcgcagggagaccucuccc

SEQ ID NO: 15461 - RNA, 22 nt, Homo sapiens
uggagugugacaaugguguuug

SEQ ID NO: 15462 - RNA, 22 nt, Homo sapiens
uggagugugacaaugguguuug

SEQ ID NO: 15463 - RNA, 21 nt, Homo sapiens
uggacugcccugaucuggaga

SEQ ID NO: 15464 - RNA, 22 nt, Homo sapiens
acucggcguggcgucggucgug

SEQ ID NO: 15465 - RNA, 21 nt, Homo sapiens
cggcggggacggcgauugguc

SEQ ID NO: 15466 - RNA, 22 nt, Homo sapiens
aaggagcucacagucuauugag

SEQ ID NO: 15467 - RNA, 22 nt, Homo sapiens
cuggcccucucugcccuuccgu

SEQ ID NO: 15468 - RNA, 22 nt, Homo sapiens
ucaggcucaguccccucccgau

SEQ ID NO: 15469 - RNA, 19 nt, Homo sapiens
aggcugcggaauucaggac

SEQ ID NO: 15470 - RNA, 22 nt, Homo sapiens
aggcggggcgccgcgggaccgc

SEQ ID NO: 15471 - RNA, 23 nt, Homo sapiens
aaggagcuuacaaucuagcuggg

SEQ ID NO: 15472 - RNA, 22 nt, Homo sapiens
ugcggggcuagggcuaacagca

SEQ ID NO: 15473 - RNA, 27 nt, Homo sapiens
accuucuuguauaagcacugugcuaaa

SEQ ID NO: 15474 - RNA, 22 nt, Homo sapiens
cucuagagggaagcacuuucug

SEQ ID NO: 15475 - RNA, 18 nt, Homo sapiens
ugaggcaguagauugaau

SEQ ID NO: 15476 - RNA, 22 nt, Homo sapiens
uggagagaaaggcaguuccuga

SEQ ID NO: 15477 - RNA, 22 nt, Homo sapiens
aacuggcccucaaagucccgcu

SEQ ID NO: 15478 - RNA, 22 nt, Homo sapiens
gaggguuggguggaggcucucc

SEQ ID NO: 15479 - RNA, 22 nt, Homo sapiens
uguaaacauccuacacucagcu

SEQ ID NO: 15480 - RNA, 23 nt, Homo sapiens
ucaagagcaauaacgaaaaaugu

SEQ ID NO: 15481 - RNA, 22 nt, Homo sapiens
ucagcaaacauuuauugugugc

SEQ ID NO: 15482 - RNA, 21 nt, Homo sapiens
aggaggcagcgcucucaggac

SEQ ID NO: 15483 - RNA, 22 nt, Homo sapiens
caaagugccucccuuuagagug

SEQ ID NO: 15484 - RNA, 21 nt, Homo sapiens
aaggcagggcccccgcucccc

SEQ ID NO: 15485 - RNA, 21 nt, Homo sapiens
cccggagccaggaugcagcuc

SEQ ID NO: 15486 - RNA, 18 nt, Homo sapiens
ucagcuggcccucauuuc

SEQ ID NO: 15487 - RNA, 17 nt, Homo sapiens
ucgccuccuccucuccc

SEQ ID NO: 15488 - RNA, 23 nt, Homo sapiens
uggaguccaggaaucugcauuuu

SEQ ID NO: 15489 - RNA, 23 nt, Homo sapiens
ucuggcuccgugucuucacuccc

SEQ ID NO: 15490 - RNA, 22 nt, Homo sapiens
uggagagaaaggcaguuccuga

SEQ ID NO: 15491 - RNA, 22 nt, Homo sapiens
uccgagccugggucucccucuu

SEQ ID NO: 15492 - RNA, 21 nt, Homo sapiens
agaccuggcccagaccucagc

SEQ ID NO: 15493 - RNA, 25 nt, Homo sapiens
ggcggagggaaguagguccguuggu

SEQ ID NO: 15494 - RNA, 23 nt, Homo sapiens
gagggucuugggagggaugugac

SEQ ID NO: 15495 - RNA, 22 nt, Homo sapiens
uaguacugugcauaucaucuau

SEQ ID NO: 15496 - RNA, 22 nt, Homo sapiens
uucuggaauucugugugaggga

SEQ ID NO: 15497 - RNA, 19 nt, Homo sapiens
uggauuuuuggaucaggga

SEQ ID NO: 15498 - RNA, 22 nt, Homo sapiens
aagcccuuaccccaaaaagcau

SEQ ID NO: 15499 - RNA, 22 nt, Homo sapiens
uagcagcacaucaugguuuaca

SEQ ID NO: 15500 - RNA, 22 nt, Homo sapiens
aaaaguacuugcggauuuugcu

SEQ ID NO: 15501 - RNA, 21 nt, Homo sapiens
uacuuggaaaggcaucaguug

SEQ ID NO: 15502 - RNA, 20 nt, Homo sapiens
ccccagggcgacgcggcggg

SEQ ID NO: 15503 - RNA, 23 nt, Homo sapiens
gaagugcuucgauuuuggggugu

SEQ ID NO: 15504 - RNA, 21 nt, Homo sapiens
aaaacggugagauuuuguuuu

SEQ ID NO: 15505 - RNA, 20 nt, Homo sapiens
guccgcucggcgguggccca

SEQ ID NO: 15506 - RNA, 22 nt, Homo sapiens
agucauuggaggguuugagcag

SEQ ID NO: 15507 - RNA, 25 nt, Homo sapiens
ggcggagggaaguagguccguuggu

SEQ ID NO: 15508 - RNA, 21 nt, Homo sapiens
uggaggagaaggaaggugaug

SEQ ID NO: 15509 - RNA, 22 nt, Homo sapiens
aggcagcgggguguaguggaua

SEQ ID NO: 15510 - RNA, 18 nt, Homo sapiens
ucagcuggcccucauuuc

SEQ ID NO: 15511 - RNA, 17 nt, Homo sapiens
gugggggagaggcuguc

SEQ ID NO: 15512 - RNA, 22 nt, Homo sapiens
acucggcguggcgucggucgug

SEQ ID NO: 15513 - RNA, 17 nt, Homo sapiens
uaauugcuuccauguuu

SEQ ID NO: 15514 - RNA, 23 nt, Homo sapiens
ucccccaggugugauucugauuu

SEQ ID NO: 15515 - RNA, 22 nt, Homo sapiens
aauugcacuuuagcaaugguga

SEQ ID NO: 15516 - RNA, 22 nt, Homo sapiens
uggugggcacagaaucuggacu

SEQ ID NO: 15517 - RNA, 24 nt, Homo sapiens
acugggggcuuucgggcucugcgu

SEQ ID NO: 15518 - RNA, 22 nt, Homo sapiens
uggugggccgcagaacaugugc

SEQ ID NO: 15519 - RNA, 22 nt, Homo sapiens
caaagaauucuccuuuugggcu

SEQ ID NO: 15520 - RNA, 21 nt, Homo sapiens
auguaugugugcaugugcaug

SEQ ID NO: 15521 - RNA, 21 nt, Homo sapiens
gugcauuguaguugcauugca

SEQ ID NO: 15522 - RNA, 23 nt, Homo sapiens
aguauguucuuccaggacagaac

SEQ ID NO: 15523 - RNA, 21 nt, Homo sapiens
agggggaaaguucuauagucc

SEQ ID NO: 15524 - RNA, 21 nt, Homo sapiens
ccccaccuccucucuccucag

SEQ ID NO: 15525 - RNA, 24 nt, Homo sapiens
ucccugagacccuuuaaccuguga

SEQ ID NO: 15526 - RNA, 22 nt, Homo sapiens
ucccugagacccuaacuuguga

SEQ ID NO: 15527 - RNA, 18 nt, Homo sapiens
aucccaccucugccacca

SEQ ID NO: 15528 - RNA, 23 nt, Homo sapiens
ccucagggcuguagaacagggcu

SEQ ID NO: 15529 - RNA, 17 nt, Homo sapiens
ucgccuccuccucuccc

SEQ ID NO: 15530 - RNA, 22 nt, Homo sapiens
uguaacagcaacuccaugugga

SEQ ID NO: 15531 - RNA, 22 nt, Homo sapiens
uggcucaguucagcaggaacag

SEQ ID NO: 15532 - RNA, 22 nt, Homo sapiens
uucacaaggaggugucauuuau

SEQ ID NO: 15533 - RNA, 19 nt, Homo sapiens
ugggcguaucuguaugcua

SEQ ID NO: 15534 - RNA, 21 nt, Homo sapiens
uggaggagaaggaaggugaug

SEQ ID NO: 15535 - RNA, 22 nt, Homo sapiens
acuccagccccacagccucagc

SEQ ID NO: 15536 - RNA, 22 nt, Homo sapiens
uuugguccccuucaaccagcug

SEQ ID NO: 15537 - RNA, 19 nt, Homo sapiens
auggauaaggcuuuggcuu

SEQ ID NO: 15538 - RNA, 19 nt, Homo sapiens
uggauuuuuggaucaggga

SEQ ID NO: 15539 - RNA, 23 nt, Homo sapiens
uaaaucccauggugccuucuccu

SEQ ID NO: 15540 - RNA, 20 nt, Homo sapiens
agaccauggguucucauugu

SEQ ID NO: 15541 - RNA, 22 nt, Homo sapiens
uggagugugacaaugguguuug

SEQ ID NO: 15542 - RNA, 21 nt, Homo sapiens
cccggagccaggaugcagcuc

SEQ ID NO: 15543 - RNA, 22 nt, Homo sapiens
uggagugugacaaugguguuug

SEQ ID NO: 15544 - RNA, 22 nt, Homo sapiens
uggguggucuggagauuugugc

SEQ ID NO: 15545 - RNA, 22 nt, Homo sapiens
aggugguccguggcgcguucgc

SEQ ID NO: 15546 - RNA, 25 nt, Homo sapiens
ggcggagggaaguagguccguuggu

SEQ ID NO: 15547 - RNA, 24 nt, Homo sapiens
ugccugggucucuggccugcgcgu

SEQ ID NO: 15548 - RNA, 22 nt, Homo sapiens
aggcggggcgccgcgggaccgc

SEQ ID NO: 15549 - RNA, 24 nt, Homo sapiens
ucccugagacccuuuaaccuguga

SEQ ID NO: 15550 - RNA, 22 nt, Homo sapiens
ucccugagacccuaacuuguga

SEQ ID NO: 15551 - RNA, 22 nt, Homo sapiens
uggaauguaaggaagugugugg

SEQ ID NO: 15552 - RNA, 23 nt, Homo sapiens
ccucagggcuguagaacagggcu

SEQ ID NO: 15553 - RNA, 18 nt, Homo sapiens
gucccuguucaggcgcca

SEQ ID NO: 15554 - RNA, 22 nt, Homo sapiens
ucugggcaacaaagugagaccu

SEQ ID NO: 15555 - RNA, 22 nt, Homo sapiens
ugauauguuugauauauuaggu

SEQ ID NO: 15556 - RNA, 23 nt, Homo sapiens
ucccuguccuccaggagcucacg

SEQ ID NO: 15557 - RNA, 22 nt, Homo sapiens
agaucagaaggugauuguggcu

SEQ ID NO: 15558 - RNA, 23 nt, Homo sapiens
aggaccugcgggacaagauucuu

SEQ ID NO: 15559 - RNA, 21 nt, Homo sapiens
aguuaaugaauccuggaaagu

SEQ ID NO: 15560 - RNA, 25 nt, Homo sapiens
gcugggcagggcuucugagcuccuu

SEQ ID NO: 15561 - RNA, 22 nt, Homo sapiens
gguggcccggccgugccugagg

SEQ ID NO: 15562 - RNA, 22 nt, Homo sapiens
ugcaacgaaccugagccacuga

SEQ ID NO: 15563 - RNA, 22 nt, Homo sapiens
ugagguaguagguuguaugguu

SEQ ID NO: 15564 - RNA, 22 nt, Homo sapiens
ucugggcaacaaagugagaccu

SEQ ID NO: 15565 - RNA, 22 nt, Homo sapiens
cgcaggggccgggugcucaccg

SEQ ID NO: 15566 - RNA, 22 nt, Homo sapiens
ucugcccccuccgcugcugcca

SEQ ID NO: 15567 - RNA, 22 nt, Homo sapiens
ucaggccaggcacaguggcuca

SEQ ID NO: 15568 - RNA, 22 nt, Homo sapiens
acagcaggcacagacaggcagu

SEQ ID NO: 15569 - RNA, 22 nt, Homo sapiens
aagcugccaguugaagaacugu

SEQ ID NO: 15570 - RNA, 20 nt, Homo sapiens
acugccccaggugcugcugg

SEQ ID NO: 15571 - RNA, 22 nt, Homo sapiens
gccugcugggguggaaccuggu

SEQ ID NO: 15572 - RNA, 22 nt, Homo sapiens
ucaggcucaguccccucccgau

SEQ ID NO: 15573 - RNA, 25 nt, Homo sapiens
gcugggcagggcuucugagcuccuu

SEQ ID NO: 15574 - RNA, 24 nt, Homo sapiens
ugccugggucucuggccugcgcgu

SEQ ID NO: 15575 - RNA, 22 nt, Homo sapiens
acuccagccccacagccucagc

SEQ ID NO: 15576 - RNA, 20 nt, Homo sapiens
ucugcaggguuugcuuugag

SEQ ID NO: 15577 - RNA, 22 nt, Homo sapiens
ucaccagcccuguguucccuag

SEQ ID NO: 15578 - RNA, 22 nt, Homo sapiens
uggagugugacaaugguguuug

SEQ ID NO: 15579 - RNA, 21 nt, Homo sapiens
uccuucugcuccgucccccag

SEQ ID NO: 15580 - RNA, 23 nt, Homo sapiens
agcugguguugugaaucaggccg

SEQ ID NO: 15581 - RNA, 23 nt, Homo sapiens
caaagugcuuacagugcagguag

SEQ ID NO: 15582 - RNA, 22 nt, Homo sapiens
uggacggagaacugauaagggu

SEQ ID NO: 15583 - RNA, 21 nt, Homo sapiens
cggcggggacggcgauugguc

SEQ ID NO: 15584 - RNA, 21 nt, Homo sapiens
ccaccaccgugucugacacuu

SEQ ID NO: 15585 - RNA, 22 nt, Homo sapiens
cauugcacuugucucggucuga

SEQ ID NO: 15586 - RNA, 24 nt, Homo sapiens
agcagaagcagggagguucuccca

SEQ ID NO: 15587 - RNA, 22 nt, Homo sapiens
uacugcagacguggcaaucaug

SEQ ID NO: 15588 - RNA, 21 nt, Homo sapiens
uacugcagacaguggcaauca

SEQ ID NO: 15589 - RNA, 21 nt, Homo sapiens
aaagcgcuucccuucagagug

SEQ ID NO: 15590 - RNA, 22 nt, Homo sapiens
uggugggcacagaaucuggacu

SEQ ID NO: 15591 - RNA, 22 nt, Homo sapiens
auucugcauuuuuagcaaguuc

SEQ ID NO: 15592 - RNA, 22 nt, Homo sapiens
uggugggccgcagaacaugugc

SEQ ID NO: 15593 - RNA, 22 nt, Homo sapiens
aggcggggcgccgcgggaccgc

SEQ ID NO: 15594 - RNA, 22 nt, Homo sapiens
ugcggggcuagggcuaacagca

SEQ ID NO: 15595 - RNA, 21 nt, Homo sapiens
aaggcagggcccccgcucccc

SEQ ID NO: 15596 - RNA, 19 nt, Homo sapiens
aauggauuuuuggagcagg

SEQ ID NO: 15597 - RNA, 21 nt, Homo sapiens
aagugaucuaaaggccuacau

SEQ ID NO: 15598 - RNA, 22 nt, Homo sapiens
uugcauauguaggaugucccau

SEQ ID NO: 15599 - RNA, 23 nt, Homo sapiens
agugccugagggaguaagagccc

SEQ ID NO: 15600 - RNA, 17 nt, Homo sapiens
ucgccuccuccucuccc

SEQ ID NO: 15601 - RNA, 21 nt, Homo sapiens
gcccuccgcccgugcaccccg

SEQ ID NO: 15602 - RNA, 22 nt, Homo sapiens
gcccgcguguggagccaggugu

SEQ ID NO: 15603 - RNA, 22 nt, Homo sapiens
uggagagaaaggcaguuccuga

SEQ ID NO: 15604 - RNA, 21 nt, Homo sapiens
cggcggggacggcgauugguc

SEQ ID NO: 15605 - RNA, 23 nt, Homo sapiens
ugaggggcagagagcgagacuuu

SEQ ID NO: 15606 - RNA, 19 nt, Homo sapiens
aggcacggugucagcaggc

SEQ ID NO: 15607 - RNA, 25 nt, Homo sapiens
ggcggagggaaguagguccguuggu

SEQ ID NO: 15608 - RNA, 22 nt, Homo sapiens
aggcggggcgccgcgggaccgc

SEQ ID NO: 15609 - RNA, 22 nt, Homo sapiens
ugcggggcuagggcuaacagca

SEQ ID NO: 15610 - RNA, 21 nt, Homo sapiens
acucuagcugccaaaggcgcu

SEQ ID NO: 15611 - RNA, 23 nt, Homo sapiens
ucuggcuccgugucuucacuccc

SEQ ID NO: 15612 - RNA, 21 nt, Homo sapiens
uccugcgcgucccagaugccc

SEQ ID NO: 15613 - RNA, 22 nt, Homo sapiens
cgcaggggccgggugcucaccg

SEQ ID NO: 15614 - RNA, 23 nt, Homo sapiens
ugaguaccgccaugucuguuggg

SEQ ID NO: 15615 - RNA, 22 nt, Homo sapiens
ugaaggucuacugugugccagg

SEQ ID NO: 15616 - RNA, 22 nt, Homo sapiens
ugagaccucuggguucugagcu

SEQ ID NO: 15617 - RNA, 17 nt, Homo sapiens
ucgccuccuccucuccc

SEQ ID NO: 15618 - RNA, 23 nt, Homo sapiens
uggaguccaggaaucugcauuuu

SEQ ID NO: 15619 - RNA, 20 nt, Homo sapiens
ccuccugcccuccuugcugu

SEQ ID NO: 15620 - RNA, 22 nt, Homo sapiens
acagcaggcacagacaggcagu

SEQ ID NO: 15621 - RNA, 22 nt, Homo sapiens
gccugcugggguggaaccuggu

SEQ ID NO: 15622 - RNA, 22 nt, Homo sapiens
cgucaacacuugcugguuuccu

SEQ ID NO: 15623 - RNA, 21 nt, Homo sapiens
caaagguauuugugguuuuug

SEQ ID NO: 15624 - RNA, 22 nt, Homo sapiens
acuccagccccacagccucagc

SEQ ID NO: 15625 - RNA, 22 nt, Homo sapiens
uggagugugacaaugguguuug

SEQ ID NO: 15626 - RNA, 22 nt, Homo sapiens
acgcccuucccccccuucuuca

SEQ ID NO: 15627 - RNA, 22 nt, Homo sapiens
cuggacugagccgugcuacugg

SEQ ID NO: 15628 - RNA, 22 nt, Homo sapiens
cagugcaauguuaaaagggcau

SEQ ID NO: 15629 - RNA, 22 nt, Homo sapiens
cagugcaaugaugaaagggcau

SEQ ID NO: 15630 - RNA, 20 nt, Homo sapiens
ggggagcuguggaagcagua

SEQ ID NO: 15631 - RNA, 23 nt, Homo sapiens
guccaguuuucccaggaaucccu

SEQ ID NO: 15632 - RNA, 22 nt, Homo sapiens
ucagugcacuacagaacuuugu

SEQ ID NO: 15633 - RNA, 22 nt, Homo sapiens
ucagugcaucacagaacuuugu

SEQ ID NO: 15634 - RNA, 21 nt, Homo sapiens
ucagugcaugacagaacuugg

SEQ ID NO: 15635 - RNA, 18 nt, Homo sapiens
uccagugcccuccucucc

SEQ ID NO: 15636 - RNA, 23 nt, Homo sapiens
caacggaaucccaaaagcagcug

SEQ ID NO: 15637 - RNA, 21 nt, Homo sapiens
cugaccuaugaauugacagcc

SEQ ID NO: 15638 - RNA, 21 nt, Homo sapiens
augaccuaugaauugacagac

SEQ ID NO: 15639 - RNA, 22 nt, Homo sapiens
cauugcacuugucucggucuga

SEQ ID NO: 15640 - RNA, 23 nt, Homo sapiens
cagugcaauaguauugucaaagc

SEQ ID NO: 15641 - RNA, 23 nt, Homo sapiens
cagugcaaugauauugucaaagc

SEQ ID NO: 15642 - RNA, 22 nt, Homo sapiens
uauugcacauuacuaaguugca

SEQ ID NO: 15643 - RNA, 22 nt, Homo sapiens
aauugcacgguauccaucugua

SEQ ID NO: 15644 - RNA, 22 nt, Homo sapiens
aauugcacuuuagcaaugguga

SEQ ID NO: 15645 - RNA, 21 nt, Homo sapiens
acuggacuuggagucagaagg

SEQ ID NO: 15646 - RNA, 22 nt, Homo sapiens
acuggacuuagggucagaaggc

SEQ ID NO: 15647 - RNA, 23 nt, Homo sapiens
uagugcaauauugcuuauagggu

SEQ ID NO: 15648 - RNA, 21 nt, Homo sapiens
gcaguccaugggcauauacac

SEQ ID NO: 15649 - RNA, 21 nt, Homo sapiens
gaagugugccguggugugucu

SEQ ID NO: 15650 - RNA, 20 nt, Homo sapiens
aggguguuucucucaucucu

SEQ ID NO: 15651 - RNA, 25 nt, Homo sapiens
ggcggagggaaguagguccguuggu

SEQ ID NO: 15652 - RNA, 22 nt, Homo sapiens
uauugcacuugucccggccugu

SEQ ID NO: 15653 - RNA, 22 nt, Homo sapiens
uauugcacucgucccggccucc

SEQ ID NO: 15654 - RNA, 21 nt, Homo sapiens
agaccuggcccagaccucagc

SEQ ID NO: 15655 - RNA, 22 nt, Homo sapiens
ucggccugaccacccaccccac

SEQ ID NO: 15656 - RNA, 22 nt, Homo sapiens
uucuggaauucugugugaggga

SEQ ID NO: 15657 - RNA, 23 nt, Homo sapiens
caaagugcucauagugcagguag

SEQ ID NO: 15658 - RNA, 22 nt, Homo sapiens
cauugcacuugucucggucuga

SEQ ID NO: 15659 - RNA, 22 nt, Homo sapiens
ugguuuaccgucccacauacau

SEQ ID NO: 15660 - RNA, 23 nt, Homo sapiens
ugaggggcagagagcgagacuuu

SEQ ID NO: 15661 - RNA, 22 nt, Homo sapiens
cgucaacacuugcugguuuccu

SEQ ID NO: 15662 - RNA, 18 nt, Homo sapiens
ugcuuccuuucagagggu

SEQ ID NO: 15663 - RNA, 22 nt, Homo sapiens
aucuggagguaagaagcacuuu

SEQ ID NO: 15664 - RNA, 23 nt, Homo sapiens
caaagcgcuucucuuuagagugu

SEQ ID NO: 15665 - RNA, 21 nt, Homo sapiens
aaagcgcuucccuucagagug

SEQ ID NO: 15666 - RNA, 21 nt, Homo sapiens
cuccagagggaaguacuuucu

SEQ ID NO: 15667 - RNA, 21 nt, Homo sapiens
cuccagagggaugcacuuucu

SEQ ID NO: 15668 - RNA, 21 nt, Homo sapiens
ucgaggagcucacagucuagu

SEQ ID NO: 15669 - RNA, 22 nt, Homo sapiens
aagcugccaguugaagaacugu

SEQ ID NO: 15670 - RNA, 21 nt, Homo sapiens
ccaccaccgugucugacacuu

SEQ ID NO: 15671 - RNA, 21 nt, Homo sapiens
ucacuccucuccucccgucuu

SEQ ID NO: 15672 - RNA, 23 nt, Homo sapiens
uuuggcacuagcacauuuuugcu

SEQ ID NO: 15673 - RNA, 17 nt, Homo sapiens
ucgccuccuccucuccc

SEQ ID NO: 15674 - RNA, 21 nt, Homo sapiens
cggcggggacggcgauugguc

SEQ ID NO: 15675 - RNA, 23 nt, Homo sapiens
ucucacacagaaaucgcacccgu

SEQ ID NO: 15676 - RNA, 22 nt, Homo sapiens
gcugacuccuaguccagggcuc

SEQ ID NO: 15677 - RNA, 22 nt, Homo sapiens
agaucgaccguguuauauucgc

SEQ ID NO: 15678 - RNA, 23 nt, Homo sapiens
gacacgggcgacagcugcggccc

SEQ ID NO: 15679 - RNA, 25 nt, Homo sapiens
agggaucgcgggcggguggcggccu

SEQ ID NO: 15680 - RNA, 22 nt, Homo sapiens
aggcggggcgccgcgggaccgc

SEQ ID NO: 15681 - RNA, 23 nt, Homo sapiens
aggaagcccuggaggggcuggag

SEQ ID NO: 15682 - RNA, 22 nt, Homo sapiens
ugcggggcuagggcuaacagca

SEQ ID NO: 15683 - RNA, 22 nt, Homo sapiens
auccgcgcucugacucucugcc

SEQ ID NO: 15684 - RNA, 22 nt, Homo sapiens
aagugcugucauagcugagguc

SEQ ID NO: 15685 - RNA, 22 nt, Homo sapiens
uggagagaaaggcaguuccuga

SEQ ID NO: 15686 - RNA, 21 nt, Homo sapiens
cccggagccaggaugcagcuc

SEQ ID NO: 15687 - RNA, 22 nt, Homo sapiens
uggagugugacaaugguguuug

SEQ ID NO: 15688 - RNA, 22 nt, Homo sapiens
uggagugugacaaugguguuug

SEQ ID NO: 15689 - RNA, 21 nt, Homo sapiens
cggcggggacggcgauugguc

SEQ ID NO: 15690 - RNA, 21 nt, Homo sapiens
cggcggggacggcgauugguc

SEQ ID NO: 15691 - RNA, 23 nt, Homo sapiens
uaaaucccauggugccuucuccu

SEQ ID NO: 15692 - RNA, 21 nt, Homo sapiens
ucccacguuguggcccagcag

SEQ ID NO: 15693 - RNA, 22 nt, Homo sapiens
aggcggggcgccgcgggaccgc

SEQ ID NO: 15694 - RNA, 22 nt, Homo sapiens
aggcggggcgccgcgggaccgc

SEQ ID NO: 15695 - RNA, 22 nt, Homo sapiens
ugcggggcuagggcuaacagca

SEQ ID NO: 15696 - RNA, 23 nt, Homo sapiens
ccugcagcgacuugauggcuucc

SEQ ID NO: 15697 - RNA, 23 nt, Homo sapiens
ccugcagcgacuugauggcuucc

SEQ ID NO: 15698 - RNA, 24 nt, Homo sapiens
uugcagcugccugggagugacuuc

SEQ ID NO: 15699 - RNA, 21 nt, Homo sapiens
uccugcgcgucccagaugccc

SEQ ID NO: 15700 - RNA, 21 nt, Homo sapiens
cggcggggacggcgauugguc

SEQ ID NO: 15701 - RNA, 22 nt, Homo sapiens
ucugcccccuccgcugcugcca

SEQ ID NO: 15702 - RNA, 22 nt, Homo sapiens
aagcugccaguugaagaacugu

SEQ ID NO: 15703 - RNA, 22 nt, Homo sapiens
uguaaacauccuacacucagcu

SEQ ID NO: 15704 - RNA, 20 nt, Homo sapiens
acugccccaggugcugcugg

SEQ ID NO: 15705 - RNA, 23 nt, Homo sapiens
ugagcgccucgacgacagagccg

SEQ ID NO: 15706 - RNA, 21 nt, Homo sapiens
cggggcagcucaguacaggau

SEQ ID NO: 15707 - RNA, 21 nt, Homo sapiens
aagccugcccggcuccucggg

SEQ ID NO: 15708 - RNA, 22 nt, Homo sapiens
aggcggggcgccgcgggaccgc

SEQ ID NO: 15709 - RNA, 22 nt, Homo sapiens
ugcggggcuagggcuaacagca

SEQ ID NO: 15710 - RNA, 21 nt, Homo sapiens
uggaggagaaggaaggugaug

SEQ ID NO: 15711 - RNA, 22 nt, Homo sapiens
uauugcacucgucccggccucc

SEQ ID NO: 15712 - RNA, 17 nt, Homo sapiens
ucgccuccuccucuccc

SEQ ID NO: 15713 - RNA, 18 nt, Homo sapiens
cagggaggugaaugugau

SEQ ID NO: 15714 - RNA, 22 nt, Homo sapiens
uggagagaaaggcaguuccuga

SEQ ID NO: 15715 - RNA, 22 nt, Homo sapiens
uggagagaaaggcaguuccuga

SEQ ID NO: 15716 - RNA, 20 nt, Homo sapiens
ccuccugcccuccuugcugu

SEQ ID NO: 15717 - RNA, 22 nt, Homo sapiens
cauugcacuugucucggucuga

SEQ ID NO: 15718 - RNA, 22 nt, Homo sapiens
aaaagcuggguugagagggcga

SEQ ID NO: 15719 - RNA, 22 nt, Homo sapiens
aaaagcuggguugagagggcaa

SEQ ID NO: 15720 - RNA, 20 nt, Homo sapiens
aaaagcuggguugagagggu

SEQ ID NO: 15721 - RNA, 19 nt, Homo sapiens
aaaagcuggguugagagga

SEQ ID NO: 15722 - RNA, 22 nt, Homo sapiens
agaggcuggccgugaugaauuc

SEQ ID NO: 15723 - RNA, 22 nt, Homo sapiens
cgucaacacuugcugguuuccu

SEQ ID NO: 15724 - RNA, 25 nt, Homo sapiens
ggcggagggaaguagguccguuggu

SEQ ID NO: 15725 - RNA, 22 nt, Homo sapiens
ugcggggcuagggcuaacagca

SEQ ID NO: 15726 - RNA, 21 nt, Homo sapiens
uggaggagaaggaaggugaug

SEQ ID NO: 15727 - RNA, 22 nt, Homo sapiens
uggagugugacaaugguguuug

SEQ ID NO: 15728 - RNA, 21 nt, Homo sapiens
cggcggggacggcgauugguc

SEQ ID NO: 15729 - RNA, 22 nt, Homo sapiens
uguaacagcaacuccaugugga

SEQ ID NO: 15730 - RNA, 23 nt, Homo sapiens
ugguuguaguccgugcgagaaua

SEQ ID NO: 15731 - RNA, 22 nt, Homo sapiens
ugaaggucuacugugugccagg

SEQ ID NO: 15732 - RNA, 22 nt, Homo sapiens
ggagaaauuauccuuggugugu

SEQ ID NO: 15733 - RNA, 21 nt, Homo sapiens
gcgacccauacuugguuucag

SEQ ID NO: 15734 - RNA, 22 nt, Homo sapiens
aggcggggcgccgcgggaccgc

SEQ ID NO: 15735 - RNA, 20 nt, Homo sapiens
ggggagcuguggaagcagua

SEQ ID NO: 15736 - RNA, 24 nt, Homo sapiens
uggggagcugaggcucugggggug

SEQ ID NO: 15737 - RNA, 23 nt, Homo sapiens
uacccuguagaaccgaauuugug

SEQ ID NO: 15738 - RNA, 21 nt, Homo sapiens
aagcauucuuucauugguugg

SEQ ID NO: 15739 - RNA, 22 nt, Homo sapiens
ucagugcacuacagaacuuugu

SEQ ID NO: 15740 - RNA, 22 nt, Homo sapiens
ucagugcaucacagaacuuugu

SEQ ID NO: 15741 - RNA, 21 nt, Homo sapiens
ucagugcaugacagaacuugg

SEQ ID NO: 15742 - RNA, 22 nt, Homo sapiens
uggagagaaaggcaguuccuga

SEQ ID NO: 15743 - RNA, 21 nt, Homo sapiens
cggcggggacggcgauugguc

SEQ ID NO: 15744 - RNA, 19 nt, Homo sapiens
aggcugcggaauucaggac

SEQ ID NO: 15745 - RNA, 22 nt, Homo sapiens
aggcggggcgccgcgggaccgc

SEQ ID NO: 15746 - RNA, 22 nt, Homo sapiens
ugcggggcuagggcuaacagca

SEQ ID NO: 15747 - RNA, 21 nt, Homo sapiens
uggcagggaggcugggagggg

SEQ ID NO: 15748 - RNA, 23 nt, Homo sapiens
gcgaggaccccucggggucugac

SEQ ID NO: 15749 - RNA, 18 nt, Homo sapiens
aucccaccucugccacca

SEQ ID NO: 15750 - RNA, 19 nt, Homo sapiens
uggauuuuuggaucaggga

SEQ ID NO: 15751 - RNA, 23 nt, Homo sapiens
ucuggcuccgugucuucacuccc

SEQ ID NO: 15752 - RNA, 22 nt, Homo sapiens
caaaaaucucaauuacuuuugc

SEQ ID NO: 15753 - RNA, 21 nt, Homo sapiens
aggguaagcugaaccucugau

SEQ ID NO: 15754 - RNA, 25 nt, Homo sapiens
aggggugguguugggacagcuccgu

SEQ ID NO: 15755 - RNA, 21 nt, Homo sapiens
aaggcagggcccccgcucccc

SEQ ID NO: 15756 - RNA, 22 nt, Homo sapiens
uuuccggcucgcgugggugugu

SEQ ID NO: 15757 - RNA, 21 nt, Homo sapiens
ccgucgccgccacccgagccg

SEQ ID NO: 15758 - RNA, 21 nt, Homo sapiens
ucguggccuggucuccauuau

SEQ ID NO: 15759 - RNA, 19 nt, Homo sapiens
gugaggacucgggaggugg

SEQ ID NO: 15760 - RNA, 18 nt, Homo sapiens
cgggcguggugguggggg

SEQ ID NO: 15761 - RNA, 24 nt, Homo sapiens
uggcccugacugaagaccagcagu

SEQ ID NO: 15762 - RNA, 21 nt, Homo sapiens
gccccugggccuauccuagaa

SEQ ID NO: 15763 - RNA, 23 nt, Homo sapiens
acuugggcacugaaacaaugucc

SEQ ID NO: 15764 - RNA, 22 nt, Homo sapiens
gguggcccggccgugccugagg

SEQ ID NO: 15765 - RNA, 23 nt, Homo sapiens
aggaagcccuggaggggcuggag

SEQ ID NO: 15766 - RNA, 21 nt, Homo sapiens
uaaagugcugacagugcagau

SEQ ID NO: 15767 - RNA, 21 nt, Homo sapiens
cccggagccaggaugcagcuc

SEQ ID NO: 15768 - RNA, 22 nt, Homo sapiens
ucugggcaacaaagugagaccu

SEQ ID NO: 15769 - RNA, 21 nt, Homo sapiens
uccugcgcgucccagaugccc

SEQ ID NO: 15770 - RNA, 23 nt, Homo sapiens
uaauccuugcuaccugggugaga

SEQ ID NO: 15771 - RNA, 22 nt, Homo sapiens
cgucaacacuugcugguuuccu

SEQ ID NO: 15772 - RNA, 22 nt, Homo sapiens
auucugcauuuuuagcaaguuc

SEQ ID NO: 15773 - RNA, 22 nt, Homo sapiens
cgaaaacagcaauuaccuuugc

SEQ ID NO: 15774 - RNA, 25 nt, Homo sapiens
gcugggcagggcuucugagcuccuu

SEQ ID NO: 15775 - RNA, 23 nt, Homo sapiens
acuugggcacugaaacaaugucc

SEQ ID NO: 15776 - RNA, 23 nt, Homo sapiens
aggaagcccuggaggggcuggag

SEQ ID NO: 15777 - RNA, 22 nt, Homo sapiens
ugugcgcagggagaccucuccc

SEQ ID NO: 15778 - RNA, 17 nt, Homo sapiens
ucgccuccuccucuccc

SEQ ID NO: 15779 - RNA, 21 nt, Homo sapiens
ugcaggaccaagaugagcccu

SEQ ID NO: 15780 - RNA, 25 nt, Homo sapiens
ugggaacggguuccggcagacgcug

SEQ ID NO: 15781 - RNA, 21 nt, Homo sapiens
cggcggggacggcgauugguc

SEQ ID NO: 15782 - RNA, 25 nt, Homo sapiens
ggcggagggaaguagguccguuggu

SEQ ID NO: 15783 - RNA, 22 nt, Homo sapiens
aggcggggcgccgcgggaccgc

SEQ ID NO: 15784 - RNA, 20 nt, Homo sapiens
cggcucugggucugugggga

SEQ ID NO: 15785 - RNA, 21 nt, Homo sapiens
uggaggagaaggaaggugaug

SEQ ID NO: 15786 - RNA, 21 nt, Homo sapiens
ucguggccuggucuccauuau

SEQ ID NO: 15787 - RNA, 21 nt, Homo sapiens
gcccuccgcccgugcaccccg

SEQ ID NO: 15788 - RNA, 20 nt, Homo sapiens
ccuccugcccuccuugcugu

SEQ ID NO: 15789 - RNA, 23 nt, Homo sapiens
agcuacauugucugcuggguuuc

SEQ ID NO: 15790 - RNA, 21 nt, Homo sapiens
aucacauugccagggauuucc

SEQ ID NO: 15791 - RNA, 21 nt, Homo sapiens
aucacauugccagggauuacc

SEQ ID NO: 15792 - RNA, 22 nt, Homo sapiens
aauugcacgguauccaucugua

SEQ ID NO: 15793 - RNA, 23 nt, Homo sapiens
aggaccugcgggacaagauucuu

SEQ ID NO: 15794 - RNA, 21 nt, Homo sapiens
uuggccacaauggguuagaac

SEQ ID NO: 15795 - RNA, 21 nt, Homo sapiens
uuggccacaauggguuagaac

SEQ ID NO: 15796 - RNA, 25 nt, Homo sapiens
aggggugguguugggacagcuccgu

SEQ ID NO: 15797 - RNA, 21 nt, Homo sapiens
agaccuggcccagaccucagc

SEQ ID NO: 15798 - RNA, 20 nt, Homo sapiens
guagaggagauggcgcaggg

SEQ ID NO: 15799 - RNA, 21 nt, Homo sapiens
cacuguguccuuucugcguag

SEQ ID NO: 15800 - RNA, 23 nt, Homo sapiens
cacccggcugugugcacaugugc

SEQ ID NO: 15801 - RNA, 20 nt, Homo sapiens
ucugcaggguuugcuuugag

SEQ ID NO: 15802 - RNA, 20 nt, Homo sapiens
ucugcaggguuugcuuugag

SEQ ID NO: 15803 - RNA, 20 nt, Homo sapiens
cuuccucgucugucugcccc

SEQ ID NO: 15804 - RNA, 20 nt, Homo sapiens
uaaggcacgcggugaaugcc

SEQ ID NO: 15805 - RNA, 22 nt, Homo sapiens
uucaccaccuucuccacccagc

SEQ ID NO: 15806 - RNA, 21 nt, Homo sapiens
aggcaagaugcuggcauagcu

SEQ ID NO: 15807 - RNA, 22 nt, Homo sapiens
uaugugccuuuggacuacaucg

SEQ ID NO: 15808 - RNA, 21 nt, Homo sapiens
uaaggcacccuucugaguaga

SEQ ID NO: 15809 - RNA, 18 nt, Homo sapiens
ugcuuccuuucagagggu

SEQ ID NO: 15810 - RNA, 23 nt, Homo sapiens
uucucgaggaaagaagcacuuuc

SEQ ID NO: 15811 - RNA, 22 nt, Homo sapiens
aucuggagguaagaagcacuuu

SEQ ID NO: 15812 - RNA, 19 nt, Homo sapiens
ugagcugcuguaccaaaau

SEQ ID NO: 15813 - RNA, 21 nt, Homo sapiens
agaccuggcccagaccucagc

SEQ ID NO: 15814 - RNA, 19 nt, Homo sapiens
aagcagcugccucugaggc

SEQ ID NO: 15815 - RNA, 21 nt, Homo sapiens
uacucaaaaagcugucaguca

SEQ ID NO: 15816 - RNA, 21 nt, Homo sapiens
ccuggaaacacugagguugug

SEQ ID NO: 15817 - RNA, 18 nt, Homo sapiens
gcaugggugguucagugg

SEQ ID NO: 15818 - RNA, 22 nt, Homo sapiens
ucucccaacccuuguaccagug

SEQ ID NO: 15819 - RNA, 22 nt, Homo sapiens
uggagagaaaggcaguuccuga

SEQ ID NO: 15820 - RNA, 21 nt, Homo sapiens
ccaguccugugccugccgccu

SEQ ID NO: 15821 - RNA, 22 nt, Homo sapiens
uguaacagcaacuccaugugga

SEQ ID NO: 15822 - RNA, 22 nt, Homo sapiens
ugucaguuugucaaauacccca

SEQ ID NO: 15823 - RNA, 21 nt, Homo sapiens
uaaagugcugacagugcagau

SEQ ID NO: 15824 - RNA, 23 nt, Homo sapiens
cagugcaaugauauugucaaagc

SEQ ID NO: 15825 - RNA, 23 nt, Homo sapiens
uuucaagccagggggcguuuuuc

SEQ ID NO: 15826 - RNA, 24 nt, Homo sapiens
aaagacauaggauagagucaccuc

SEQ ID NO: 15827 - RNA, 23 nt, Homo sapiens
gagggucuugggagggaugugac

SEQ ID NO: 15828 - RNA, 21 nt, Homo sapiens
acucuagcugccaaaggcgcu

SEQ ID NO: 15829 - RNA, 23 nt, Homo sapiens
ucuggcuccgugucuucacuccc

SEQ ID NO: 15830 - RNA, 23 nt, Homo sapiens
uaaggugcaucuagugcagauag

SEQ ID NO: 15831 - RNA, 22 nt, Homo sapiens
aacuggcccucaaagucccgcu

SEQ ID NO: 15832 - RNA, 22 nt, Homo sapiens
gguccagaggggagauagguuc

SEQ ID NO: 15833 - RNA, 21 nt, Homo sapiens
uucacaguggcuaaguuccgc

SEQ ID NO: 15834 - RNA, 21 nt, Homo sapiens
uucacaguggcuaaguucugc

SEQ ID NO: 15835 - RNA, 22 nt, Homo sapiens
aaaagcuggguugagagggcga

SEQ ID NO: 15836 - RNA, 22 nt, Homo sapiens
aaaagcuggguugagagggcaa

SEQ ID NO: 15837 - RNA, 20 nt, Homo sapiens
aaaagcuggguugagagggu

SEQ ID NO: 15838 - RNA, 19 nt, Homo sapiens
aaaagcuggguugagagga

SEQ ID NO: 15839 - RNA, 22 nt, Homo sapiens
uuuugcaauauguuccugaaua

SEQ ID NO: 15840 - RNA, 22 nt, Homo sapiens
aaaacuguaauuacuuuuguac

SEQ ID NO: 15841 - RNA, 21 nt, Homo sapiens
gcgacccauacuugguuucag

SEQ ID NO: 15842 - RNA, 19 nt, Homo sapiens
aagcagcugccucugaggc

SEQ ID NO: 15843 - RNA, 23 nt, Homo sapiens
uauucauuuauccccagccuaca

SEQ ID NO: 15844 - RNA, 20 nt, Homo sapiens
guagaggagauggcgcaggg

SEQ ID NO: 15845 - RNA, 21 nt, Homo sapiens
uaggacacauggucuacuucu

SEQ ID NO: 15846 - RNA, 22 nt, Homo sapiens
ucggccugaccacccaccccac

SEQ ID NO: 15847 - RNA, 17 nt, Homo sapiens
gugggggagaggcuguc

SEQ ID NO: 15848 - RNA, 21 nt, Homo sapiens
ucgaggagcucacagucuagu

SEQ ID NO: 15849 - RNA, 22 nt, Homo sapiens
ucugcccccuccgcugcugcca

SEQ ID NO: 15850 - RNA, 20 nt, Homo sapiens
ccuccugcccuccuugcugu

SEQ ID NO: 15851 - RNA, 20 nt, Homo sapiens
acugccccaggugcugcugg

SEQ ID NO: 15852 - RNA, 23 nt, Homo sapiens
ucccccaggugugauucugauuu

SEQ ID NO: 15853 - RNA, 22 nt, Homo sapiens
aucacacaaaggcaacuuuugu

SEQ ID NO: 15854 - RNA, 21 nt, Homo sapiens
cggggcagcucaguacaggau

SEQ ID NO: 15855 - RNA, 23 nt, Homo sapiens
uagcagcgggaacaguucugcag

SEQ ID NO: 15856 - RNA, 23 nt, Homo sapiens
uucauuugguauaaaccgcgauu

SEQ ID NO: 15857 - RNA, 21 nt, Homo sapiens
uggguuuacguugggagaacu

SEQ ID NO: 15858 - RNA, 24 nt, Homo sapiens
acugggggcuuucgggcucugcgu

SEQ ID NO: 15859 - RNA, 24 nt, Homo sapiens
ugccugggucucuggccugcgcgu

SEQ ID NO: 15860 - RNA, 21 nt, Homo sapiens
uggaggagaaggaaggugaug

SEQ ID NO: 15861 - RNA, 22 nt, Homo sapiens
acuccagccccacagccucagc

SEQ ID NO: 15862 - RNA, 22 nt, Homo sapiens
uugggaucauuuugcauccaua

SEQ ID NO: 15863 - RNA, 23 nt, Homo sapiens
cugggaucuccggggucuugguu

SEQ ID NO: 15864 - RNA, 21 nt, Homo sapiens
ccgucgccgccacccgagccg

SEQ ID NO: 15865 - RNA, 17 nt, Homo sapiens
ucgccuccuccucuccc

SEQ ID NO: 15866 - RNA, 22 nt, Homo sapiens
acucggcguggcgucggucgug

SEQ ID NO: 15867 - RNA, 20 nt, Homo sapiens
ccuccugcccuccuugcugu

SEQ ID NO: 15868 - RNA, 22 nt, Homo sapiens
uccgagccugggucucccucuu

SEQ ID NO: 15869 - RNA, 23 nt, Homo sapiens
ugucacucggcucggcccacuac

SEQ ID NO: 15870 - RNA, 20 nt, Homo sapiens
ucacaccugccucgcccccc

SEQ ID NO: 15871 - RNA, 23 nt, Homo sapiens
uggaguccaggaaucugcauuuu

SEQ ID NO: 15872 - RNA, 23 nt, Homo sapiens
cggcccgggcugcugcuguuccu

SEQ ID NO: 15873 - RNA, 22 nt, Homo sapiens
ucugcccccuccgcugcugcca

SEQ ID NO: 15874 - RNA, 22 nt, Homo sapiens
acagcaggcacagacaggcagu

SEQ ID NO: 15875 - RNA, 21 nt, Homo sapiens
agggcccccccucaauccugu

SEQ ID NO: 15876 - RNA, 20 nt, Homo sapiens
acugccccaggugcugcugg

SEQ ID NO: 15877 - RNA, 22 nt, Homo sapiens
gccugcugggguggaaccuggu

SEQ ID NO: 15878 - RNA, 21 nt, Homo sapiens
cggggcagcucaguacaggau

SEQ ID NO: 15879 - RNA, 18 nt, Homo sapiens
uucacagggaggugucau

SEQ ID NO: 15880 - RNA, 19 nt, Homo sapiens
aguguggcuuucuuagagc

SEQ ID NO: 15881 - RNA, 22 nt, Homo sapiens
aggcggggcgccgcgggaccgc

SEQ ID NO: 15882 - RNA, 22 nt, Homo sapiens
ugcggggcuagggcuaacagca

SEQ ID NO: 15883 - RNA, 22 nt, Homo sapiens
ucggauccgucugagcuuggcu

SEQ ID NO: 15884 - RNA, 21 nt, Homo sapiens
uuaggccgcagaucuggguga

SEQ ID NO: 15885 - RNA, 18 nt, Homo sapiens
cagggaggugaaugugau

SEQ ID NO: 15886 - RNA, 23 nt, Homo sapiens
ucuggcuccgugucuucacuccc

SEQ ID NO: 15887 - RNA, 21 nt, Homo sapiens
cggcggggacggcgauugguc

SEQ ID NO: 15888 - RNA, 22 nt, Homo sapiens
aagcugccaguugaagaacugu

SEQ ID NO: 15889 - RNA, 23 nt, Homo sapiens
aaugacacgaucacucccguuga

SEQ ID NO: 15890 - RNA, 23 nt, Homo sapiens
ucggggaucaucaugucacgaga

SEQ ID NO: 15891 - RNA, 22 nt, Homo sapiens
ugugucacucgaugaccacugu

SEQ ID NO: 15892 - RNA, 25 nt, Homo sapiens
aggggugguguugggacagcuccgu

SEQ ID NO: 15893 - RNA, 22 nt, Homo sapiens
aggcggggcgccgcgggaccgc

SEQ ID NO: 15894 - RNA, 21 nt, Homo sapiens
uacaguacugugauaacugaa

SEQ ID NO: 15895 - RNA, 23 nt, Homo sapiens
cucucaccacugcccucccacag

SEQ ID NO: 15896 - RNA, 22 nt, Homo sapiens
cgaaaacagcaauuaccuuugc

SEQ ID NO: 15897 - RNA, 20 nt, Homo sapiens
agaccauggguucucauugu

SEQ ID NO: 15898 - RNA, 22 nt, Homo sapiens
uggagugugacaaugguguuug

SEQ ID NO: 15899 - RNA, 21 nt, Homo sapiens
ucguggccuggucuccauuau

SEQ ID NO: 15900 - RNA, 19 nt, Homo sapiens
gugaggacucgggaggugg

SEQ ID NO: 15901 - RNA, 21 nt, Homo sapiens
agugaaugauggguucugacc

SEQ ID NO: 15902 - RNA, 18 nt, Homo sapiens
cagggaggugaaugugau

SEQ ID NO: 15903 - RNA, 23 nt, Homo sapiens
ucuggcuccgugucuucacuccc

SEQ ID NO: 15904 - RNA, 22 nt, Homo sapiens
uguaacagcaacuccaugugga

SEQ ID NO: 15905 - RNA, 21 nt, Homo sapiens
ugucuugcaggccgucaugca

SEQ ID NO: 15906 - RNA, 22 nt, Homo sapiens
caaccuggaggacuccaugcug

SEQ ID NO: 15907 - RNA, 23 nt, Homo sapiens
aggaagcccuggaggggcuggag

SEQ ID NO: 15908 - RNA, 22 nt, Homo sapiens
uuugugaccugguccacuaacc

SEQ ID NO: 15909 - RNA, 22 nt, Homo sapiens
ucugggcaacaaagugagaccu

SEQ ID NO: 15910 - RNA, 22 nt, Homo sapiens
uagcagcacauaaugguuugug

SEQ ID NO: 15911 - RNA, 22 nt, Homo sapiens
uagcagcacaucaugguuuaca

SEQ ID NO: 15912 - RNA, 22 nt, Homo sapiens
uagcagcacguaaauauuggcg

SEQ ID NO: 15913 - RNA, 22 nt, Homo sapiens
uggagagaaaggcaguuccuga

SEQ ID NO: 15914 - RNA, 21 nt, Homo sapiens
uagcagcacagaaauauuggc

SEQ ID NO: 15915 - RNA, 22 nt, Homo sapiens
uagguaguuuccuguuguuggg

SEQ ID NO: 15916 - RNA, 23 nt, Homo sapiens
agcuacauugucugcuggguuuc

SEQ ID NO: 15917 - RNA, 23 nt, Homo sapiens
gcaaagcacacggccugcagaga

SEQ ID NO: 15918 - RNA, 22 nt, Homo sapiens
cagcagcaauucauguuuugaa

SEQ ID NO: 15919 - RNA, 21 nt, Homo sapiens
cagcagcacacugugguuugu

SEQ ID NO: 15920 - RNA, 18 nt, Homo sapiens
ugcuuccuuucagagggu

SEQ ID NO: 15921 - RNA, 22 nt, Homo sapiens
aucuggagguaagaagcacuuu

SEQ ID NO: 15922 - RNA, 22 nt, Homo sapiens
ucagcaaacauuuauugugugc

SEQ ID NO: 15923 - RNA, 23 nt, Homo sapiens
acuuacagacaagagccuugcuc

SEQ ID NO: 15924 - RNA, 25 nt, Homo sapiens
gcugggcagggcuucugagcuccuu

SEQ ID NO: 15925 - RNA, 21 nt, Homo sapiens
agaccuggcccagaccucagc

SEQ ID NO: 15926 - RNA, 19 nt, Homo sapiens
aagcagcugccucugaggc

SEQ ID NO: 15927 - RNA, 22 nt, Homo sapiens
ugcaacgaaccugagccacuga

SEQ ID NO: 15928 - RNA, 21 nt, Homo sapiens
uaaagugcugacagugcagau

SEQ ID NO: 15929 - RNA, 17 nt, Homo sapiens
ucgccuccuccucuccc

SEQ ID NO: 15930 - RNA, 21 nt, Homo sapiens
uccugcgcgucccagaugccc

SEQ ID NO: 15931 - RNA, 22 nt, Homo sapiens
cccugugcccggcccacuucug

SEQ ID NO: 15932 - RNA, 23 nt, Homo sapiens
caaagugcucauagugcagguag

SEQ ID NO: 15933 - RNA, 20 nt, Homo sapiens
ggggagcuguggaagcagua

SEQ ID NO: 15934 - RNA, 18 nt, Homo sapiens
acguuggcucugguggug

SEQ ID NO: 15935 - RNA, 22 nt, Homo sapiens
gugugcggaaaugcuucugcua

SEQ ID NO: 15936 - RNA, 21 nt, Homo sapiens
uccugcgcgucccagaugccc

SEQ ID NO: 15937 - RNA, 22 nt, Homo sapiens
ucugcccccuccgcugcugcca

SEQ ID NO: 15938 - RNA, 22 nt, Homo sapiens
cccugugcccggcccacuucug

SEQ ID NO: 15939 - RNA, 22 nt, Homo sapiens
auaagacgagcaaaaagcuugu

SEQ ID NO: 15940 - RNA, 22 nt, Homo sapiens
auaagacgaacaaaagguuugu

SEQ ID NO: 15941 - RNA, 22 nt, Homo sapiens
acagcaggcacagacaggcagu

SEQ ID NO: 15942 - RNA, 22 nt, Homo sapiens
cauugcacuugucucggucuga

SEQ ID NO: 15943 - RNA, 24 nt, Homo sapiens
agcagaagcagggagguucuccca

SEQ ID NO: 15944 - RNA, 20 nt, Homo sapiens
acugccccaggugcugcugg

SEQ ID NO: 15945 - RNA, 22 nt, Homo sapiens
gccugcugggguggaaccuggu

SEQ ID NO: 15946 - RNA, 21 nt, Homo sapiens
cggggcagcucaguacaggau

SEQ ID NO: 15947 - RNA, 23 nt, Homo sapiens
aggaccugcgggacaagauucuu

SEQ ID NO: 15948 - RNA, 21 nt, Homo sapiens
uccgguucucagggcuccacc

SEQ ID NO: 15949 - RNA, 21 nt, Homo sapiens
gcaggaacuugugagucuccu

SEQ ID NO: 15950 - RNA, 22 nt, Homo sapiens
uacccagagcaugcagugugaa

SEQ ID NO: 15951 - RNA, 22 nt, Homo sapiens
uggcucaguucagcaggaacag

SEQ ID NO: 15952 - RNA, 20 nt, Homo sapiens
ccucugggcccuuccuccag

SEQ ID NO: 15953 - RNA, 22 nt, Homo sapiens
ucucugggccugugucuuaggc

SEQ ID NO: 15954 - RNA, 23 nt, Homo sapiens
ugaggggcagagagcgagacuuu

SEQ ID NO: 15955 - RNA, 21 nt, Homo sapiens
ucguggccuggucuccauuau

SEQ ID NO: 15956 - RNA, 22 nt, Homo sapiens
ugagccccugugccgcccccag

SEQ ID NO: 15957 - RNA, 22 nt, Homo sapiens
acucggcguggcgucggucgug

SEQ ID NO: 15958 - RNA, 22 nt, Homo sapiens
aucacacaaaggcaacuuuugu

SEQ ID NO: 15959 - RNA, 22 nt, Homo sapiens
uauguaauaugguccacaucuu

SEQ ID NO: 15960 - RNA, 19 nt, Homo sapiens
agguugacauacguuuccc

SEQ ID NO: 15961 - RNA, 22 nt, Homo sapiens
uccgagccugggucucccucuu

SEQ ID NO: 15962 - RNA, 22 nt, Homo sapiens
agucauuggaggguuugagcag

SEQ ID NO: 15963 - RNA, 22 nt, Homo sapiens
agaaggaaauugaauucauuua

SEQ ID NO: 15964 - RNA, 21 nt, Homo sapiens
agagaagaagaucagccugca

SEQ ID NO: 15965 - RNA, 22 nt, Homo sapiens
uagcagcacauaaugguuugug

SEQ ID NO: 15966 - RNA, 22 nt, Homo sapiens
uagcagcacaucaugguuuaca

SEQ ID NO: 15967 - RNA, 22 nt, Homo sapiens
uagcagcacguaaauauuggcg

SEQ ID NO: 15968 - RNA, 22 nt, Homo sapiens
uguaacagcaacuccaugugga

SEQ ID NO: 15969 - RNA, 21 nt, Homo sapiens
uagcagcacagaaauauuggc

SEQ ID NO: 15970 - RNA, 22 nt, Homo sapiens
cucccacugcuucacuugacua

SEQ ID NO: 15971 - RNA, 21 nt, Homo sapiens
uaaagugcugacagugcagau

SEQ ID NO: 15972 - RNA, 23 nt, Homo sapiens
cagugcaaugauauugucaaagc

SEQ ID NO: 15973 - RNA, 22 nt, Homo sapiens
cagcagcaauucauguuuugaa

SEQ ID NO: 15974 - RNA, 21 nt, Homo sapiens
cagcagcacacugugguuugu

SEQ ID NO: 15975 - RNA, 23 nt, Homo sapiens
uacuccagagggcgucacucaug

SEQ ID NO: 15976 - RNA, 22 nt, Homo sapiens
aagugcugucauagcugagguc

SEQ ID NO: 15977 - RNA, 18 nt, Homo sapiens
ugcuuccuuucagagggu

SEQ ID NO: 15978 - RNA, 22 nt, Homo sapiens
aucuggagguaagaagcacuuu

SEQ ID NO: 15979 - RNA, 22 nt, Homo sapiens
aucuggagguaagaagcacuuu

SEQ ID NO: 15980 - RNA, 23 nt, Homo sapiens
caaagcgcuucucuuuagagugu

SEQ ID NO: 15981 - RNA, 21 nt, Homo sapiens
cuccagagggaaguacuuucu

SEQ ID NO: 15982 - RNA, 21 nt, Homo sapiens
cuccagagggaugcacuuucu

SEQ ID NO: 15983 - RNA, 22 nt, Homo sapiens
ccucccacacccaaggcuugca

SEQ ID NO: 15984 - RNA, 19 nt, Homo sapiens
gagccaguuggacaggagc

SEQ ID NO: 15985 - RNA, 23 nt, Homo sapiens
ucugcucauaccccaugguuucu

SEQ ID NO: 15986 - RNA, 22 nt, Homo sapiens
cacuggcuccuuucuggguaga

SEQ ID NO: 15987 - RNA, 22 nt, Homo sapiens
ucuucucuguuuuggccaugug

SEQ ID NO: 15988 - RNA, 21 nt, Homo sapiens
uaaagugcugacagugcagau

SEQ ID NO: 15989 - RNA, 22 nt, Homo sapiens
gguccagaggggagauagguuc

SEQ ID NO: 15990 - RNA, 22 nt, Homo sapiens
cauugcacuugucucggucuga

SEQ ID NO: 15991 - RNA, 23 nt, Homo sapiens
caaagcgcuucucuuuagagugu

SEQ ID NO: 15992 - RNA, 21 nt, Homo sapiens
cuccagagggaaguacuuucu

SEQ ID NO: 15993 - RNA, 21 nt, Homo sapiens
cuccagagggaugcacuuucu

SEQ ID NO: 15994 - RNA, 22 nt, Homo sapiens
cugcccuggcccgagggaccga

SEQ ID NO: 15995 - RNA, 21 nt, Homo sapiens
ccuggaaacacugagguugug

SEQ ID NO: 15996 - RNA, 20 nt, Homo sapiens
ggggagcuguggaagcagua

SEQ ID NO: 15997 - RNA, 22 nt, Homo sapiens
uuuccggcucgcgugggugugu

SEQ ID NO: 15998 - RNA, 21 nt, Homo sapiens
acucuagcugccaaaggcgcu

SEQ ID NO: 15999 - RNA, 22 nt, Homo sapiens
agaaggaaauugaauucauuua

SEQ ID NO: 16000 - RNA, 22 nt, Homo sapiens
cagugcaaugaugaaagggcau

SEQ ID NO: 16001 - RNA, 22 nt, Homo sapiens
ugaguauuacauggccaaucuc

SEQ ID NO: 16002 - RNA, 21 nt, Homo sapiens
caaagaggaaggucccauuac

SEQ ID NO: 16003 - RNA, 25 nt, Homo sapiens
ggcggagggaaguagguccguuggu

SEQ ID NO: 16004 - RNA, 22 nt, Homo sapiens
uauugcacucgucccggccucc

SEQ ID NO: 16005 - RNA, 22 nt, Homo sapiens
auccgcgcucugacucucugcc

SEQ ID NO: 16006 - RNA, 22 nt, Homo sapiens
ugagccccugugccgcccccag

SEQ ID NO: 16007 - RNA, 22 nt, Homo sapiens
ugucaguuugucaaauacccca

SEQ ID NO: 16008 - RNA, 22 nt, Homo sapiens
uggcagugucuuagcugguugu

SEQ ID NO: 16009 - RNA, 23 nt, Homo sapiens
aggcaguguaguuagcugauugc

SEQ ID NO: 16010 - RNA, 22 nt, Homo sapiens
uuaucagaaucuccagggguac

SEQ ID NO: 16011 - RNA, 22 nt, Homo sapiens
uuauaauacaaccugauaagug

SEQ ID NO: 16012 - RNA, 22 nt, Homo sapiens
uggcaguguauuguuagcuggu

SEQ ID NO: 16013 - RNA, 22 nt, Homo sapiens
aggcaguguauuguuagcuggc

SEQ ID NO: 16014 - RNA, 23 nt, Homo sapiens
ugagugugugugugugagugugu

SEQ ID NO: 16015 - RNA, 22 nt, Homo sapiens
cacacacugcaauuacuuuugc

SEQ ID NO: 16016 - RNA, 20 nt, Homo sapiens
cggcucugggucugugggga

SEQ ID NO: 16017 - RNA, 23 nt, Homo sapiens
gcagcagagaauaggacuacguc

SEQ ID NO: 16018 - RNA, 22 nt, Homo sapiens
ugugcgcagggagaccucuccc

SEQ ID NO: 16019 - RNA, 22 nt, Homo sapiens
ucggccugaccacccaccccac

SEQ ID NO: 16020 - RNA, 17 nt, Homo sapiens
ucgccuccuccucuccc

SEQ ID NO: 16021 - RNA, 21 nt, Homo sapiens
ugcaggaccaagaugagcccu

SEQ ID NO: 16022 - RNA, 18 nt, Homo sapiens
ugaggcaguagauugaau

SEQ ID NO: 16023 - RNA, 22 nt, Homo sapiens
ucugcccccuccgcugcugcca

SEQ ID NO: 16024 - RNA, 20 nt, Homo sapiens
ccuccugcccuccuugcugu

SEQ ID NO: 16025 - RNA, 20 nt, Homo sapiens
acugccccaggugcugcugg

SEQ ID NO: 16026 - RNA, 23 nt, Homo sapiens
ucccccaggugugauucugauuu

SEQ ID NO: 16027 - RNA, 21 nt, Homo sapiens
cggggcagcucaguacaggau

SEQ ID NO: 16028 - RNA, 24 nt, Homo sapiens
acugggggcuuucgggcucugcgu

SEQ ID NO: 16029 - RNA, 21 nt, Homo sapiens
aggaggcagcgcucucaggac

SEQ ID NO: 16030 - RNA, 22 nt, Homo sapiens
aggcggggcgccgcgggaccgc

SEQ ID NO: 16031 - RNA, 21 nt, Homo sapiens
aaggcagggcccccgcucccc

SEQ ID NO: 16032 - RNA, 21 nt, Homo sapiens
uccuucugcuccgucccccag

SEQ ID NO: 16033 - RNA, 22 nt, Homo sapiens
cuggacugagccgugcuacugg

SEQ ID NO: 16034 - RNA, 21 nt, Homo sapiens
acuggacuuggagucagaagg

SEQ ID NO: 16035 - RNA, 22 nt, Homo sapiens
acuggacuuagggucagaaggc

SEQ ID NO: 16036 - RNA, 22 nt, Homo sapiens
aaagugcauccuuuuagagugu

SEQ ID NO: 16037 - RNA, 22 nt, Homo sapiens
aaagugcauccuuuuagagugu

SEQ ID NO: 16038 - RNA, 22 nt, Homo sapiens
aaagugcauccuuuuagagguu

SEQ ID NO: 16039 - RNA, 22 nt, Homo sapiens
aaagugcauccuuuuagagguu

SEQ ID NO: 16040 - RNA, 22 nt, Homo sapiens
aaagugcaucuuuuuagaggau

SEQ ID NO: 16041 - RNA, 22 nt, Homo sapiens
aaagugcaucuuuuuagaggau

SEQ ID NO: 16042 - RNA, 22 nt, Homo sapiens
ugugucacucgaugaccacugu

SEQ ID NO: 16043 - RNA, 20 nt, Homo sapiens
gugucugggcggacagcugc

SEQ ID NO: 16044 - RNA, 22 nt, Homo sapiens
uggagagaaaggcaguuccuga

SEQ ID NO: 16045 - RNA, 21 nt, Homo sapiens
cggcggggacggcgauugguc

SEQ ID NO: 16046 - RNA, 20 nt, Homo sapiens
ccccagggcgacgcggcggg

SEQ ID NO: 16047 - RNA, 22 nt, Homo sapiens
uagguaguuuccuguuguuggg

SEQ ID NO: 16048 - RNA, 21 nt, Homo sapiens
gccccugggccuauccuagaa

SEQ ID NO: 16049 - RNA, 23 nt, Homo sapiens
ugagcgccucgacgacagagccg

SEQ ID NO: 16050 - RNA, 22 nt, Homo sapiens
aauugcacuuuagcaaugguga

SEQ ID NO: 16051 - RNA, 23 nt, Homo sapiens
agcucggucugaggccccucagu

SEQ ID NO: 16052 - RNA, 22 nt, Homo sapiens
ggggguccccggugcucggauc

SEQ ID NO: 16053 - RNA, 19 nt, Homo sapiens
agcugucugaaaaugucuu

SEQ ID NO: 16054 - RNA, 22 nt, Homo sapiens
aggcggggcgccgcgggaccgc

SEQ ID NO: 16055 - RNA, 24 nt, Homo sapiens
ucccugagacccuuuaaccuguga

SEQ ID NO: 16056 - RNA, 22 nt, Homo sapiens
ucccugagacccuaacuuguga

SEQ ID NO: 16057 - RNA, 23 nt, Homo sapiens
ccucagggcuguagaacagggcu

SEQ ID NO: 16058 - RNA, 22 nt, Homo sapiens
acucggcguggcgucggucgug

SEQ ID NO: 16059 - RNA, 21 nt, Homo sapiens
ccacaccguaucugacacuuu

SEQ ID NO: 16060 - RNA, 23 nt, Homo sapiens
aucaacagacauuaauugggcgc

SEQ ID NO: 16061 - RNA, 22 nt, Homo sapiens
uacucaggagaguggcaaucac

SEQ ID NO: 16062 - RNA, 23 nt, Homo sapiens
gcgaggaccccucggggucugac

SEQ ID NO: 16063 - RNA, 23 nt, Homo sapiens
ucaaaugcucagacuccuguggu

SEQ ID NO: 16064 - RNA, 22 nt, Homo sapiens
uuugguccccuucaaccagcug

SEQ ID NO: 16065 - RNA, 22 nt, Homo sapiens
uuugguccccuucaaccagcua

SEQ ID NO: 16066 - RNA, 23 nt, Homo sapiens
cggcccgggcugcugcuguuccu

SEQ ID NO: 16067 - RNA, 21 nt, Homo sapiens
cggcggggacggcgauugguc

SEQ ID NO: 16068 - RNA, 20 nt, Homo sapiens
ccucugggcccuuccuccag

SEQ ID NO: 16069 - RNA, 22 nt, Homo sapiens
ucucugggccugugucuuaggc

SEQ ID NO: 16070 - RNA, 21 nt, Homo sapiens
acuggacuuggagucagaagg

SEQ ID NO: 16071 - RNA, 23 nt, Homo sapiens
agcucggucugaggccccucagu

SEQ ID NO: 16072 - RNA, 21 nt, Homo sapiens
gaagugugccguggugugucu

SEQ ID NO: 16073 - RNA, 19 nt, Homo sapiens
aagugugcagggcacuggu

SEQ ID NO: 16074 - RNA, 22 nt, Homo sapiens
aggcggggcgccgcgggaccgc

SEQ ID NO: 16075 - RNA, 22 nt, Homo sapiens
ugcggggcuagggcuaacagca

SEQ ID NO: 16076 - RNA, 23 nt, Homo sapiens
ucauagcccuguacaaugcugcu

SEQ ID NO: 16077 - RNA, 22 nt, Homo sapiens
uggguggucuggagauuugugc

SEQ ID NO: 16078 - RNA, 22 nt, Homo sapiens
ucucccaacccuuguaccagug

SEQ ID NO: 16079 - RNA, 20 nt, Homo sapiens
ccuccugcccuccuugcugu

SEQ ID NO: 16080 - RNA, 25 nt, Homo sapiens
aggggugguguugggacagcuccgu

SEQ ID NO: 16081 - RNA, 25 nt, Homo sapiens
aggggugguguugggacagcuccgu

SEQ ID NO: 16082 - RNA, 21 nt, Homo sapiens
uggaggagaaggaaggugaug

SEQ ID NO: 16083 - RNA, 23 nt, Homo sapiens
ugagcgccucgacgacagagccg

SEQ ID NO: 16084 - RNA, 21 nt, Homo sapiens
ccgucgccgccacccgagccg

SEQ ID NO: 16085 - RNA, 21 nt, Homo sapiens
uggcagggaggcugggagggg

SEQ ID NO: 16086 - RNA, 17 nt, Homo sapiens
ucgccuccuccucuccc

SEQ ID NO: 16087 - RNA, 18 nt, Homo sapiens
cagggaggugaaugugau

SEQ ID NO: 16088 - RNA, 21 nt, Homo sapiens
ucgaggagcucacagucuagu

SEQ ID NO: 16089 - RNA, 22 nt, Homo sapiens
gguccagaggggagauagguuc

SEQ ID NO: 16090 - RNA, 18 nt, Homo sapiens
ugcuuccuuucagagggu

SEQ ID NO: 16091 - RNA, 22 nt, Homo sapiens
aucuggagguaagaagcacuuu

SEQ ID NO: 16092 - RNA, 23 nt, Homo sapiens
caaagcgcuucucuuuagagugu

SEQ ID NO: 16093 - RNA, 21 nt, Homo sapiens
cuccagagggaaguacuuucu

SEQ ID NO: 16094 - RNA, 21 nt, Homo sapiens
cuccagagggaugcacuuucu

SEQ ID NO: 16095 - RNA, 19 nt, Homo sapiens
ugagcugcuguaccaaaau

SEQ ID NO: 16096 - RNA, 19 nt, Homo sapiens
aggcugcggaauucaggac

SEQ ID NO: 16097 - RNA, 19 nt, Homo sapiens
aagcagcugccucugaggc

SEQ ID NO: 16098 - RNA, 21 nt, Homo sapiens
cgcgggugcuuacugacccuu

SEQ ID NO: 16099 - RNA, 22 nt, Homo sapiens
auccgcgcucugacucucugcc

SEQ ID NO: 16100 - RNA, 18 nt, Homo sapiens
cgggcguggugguggggg

SEQ ID NO: 16101 - RNA, 22 nt, Homo sapiens
uuugguccccuucaaccagcug

SEQ ID NO: 16102 - RNA, 22 nt, Homo sapiens
uuugguccccuucaaccagcua

SEQ ID NO: 16103 - RNA, 22 nt, Homo sapiens
uagguaguuucauguuguuggg

SEQ ID NO: 16104 - RNA, 22 nt, Homo sapiens
aaggagcucacagucuauugag

SEQ ID NO: 16105 - RNA, 22 nt, Homo sapiens
uguaaacauccuacacucagcu

SEQ ID NO: 16106 - RNA, 22 nt, Homo sapiens
uacgucaucguugucaucguca

SEQ ID NO: 16107 - RNA, 21 nt, Homo sapiens
aauggcgccacuaggguugug

SEQ ID NO: 16108 - RNA, 23 nt, Homo sapiens
aaggagcuuacaaucuagcuggg

SEQ ID NO: 16109 - RNA, 21 nt, Homo sapiens
uggaggagaaggaaggugaug

SEQ ID NO: 16110 - RNA, 22 nt, Homo sapiens
uuuccggcucgcgugggugugu

SEQ ID NO: 16111 - RNA, 21 nt, Homo sapiens
acggugcuggauguggccuuu

SEQ ID NO: 16112 - RNA, 21 nt, Homo sapiens
agugaaugauggguucugacc

SEQ ID NO: 16113 - RNA, 23 nt, Homo sapiens
uauggcuuuuuauuccuauguga

SEQ ID NO: 16114 - RNA, 23 nt, Homo sapiens
uauggcuuuucauuccuauguga

SEQ ID NO: 16115 - RNA, 23 nt, Homo sapiens
ugaguaccgccaugucuguuggg

SEQ ID NO: 16116 - RNA, 22 nt, Homo sapiens
aacuguuugcagaggaaacuga

SEQ ID NO: 16117 - RNA, 22 nt, Homo sapiens
aguggggaacccuuccaugagg

SEQ ID NO: 16118 - RNA, 23 nt, Homo sapiens
uucucgaggaaagaagcacuuuc

SEQ ID NO: 16119 - RNA, 22 nt, Homo sapiens
cuugguucagggagggucccca

SEQ ID NO: 16120 - RNA, 22 nt, Homo sapiens
uauugcacucgucccggccucc

SEQ ID NO: 16121 - RNA, 22 nt, Homo sapiens
uggagugugacaaugguguuug

SEQ ID NO: 16122 - RNA, 22 nt, Homo sapiens
ucugcccccuccgcugcugcca

SEQ ID NO: 16123 - RNA, 23 nt, Homo sapiens
uaagugcuuccauguuuuaguag

SEQ ID NO: 16124 - RNA, 23 nt, Homo sapiens
uaagugcuuccauguuugagugu

SEQ ID NO: 16125 - RNA, 20 nt, Homo sapiens
acugccccaggugcugcugg

SEQ ID NO: 16126 - RNA, 23 nt, Homo sapiens
ugagcgccucgacgacagagccg

SEQ ID NO: 16127 - RNA, 21 nt, Homo sapiens
cggggcagcucaguacaggau

SEQ ID NO: 16128 - RNA, 22 nt, Homo sapiens
aggcagcgggguguaguggaua

SEQ ID NO: 16129 - RNA, 18 nt, Homo sapiens
acguuggcucugguggug

SEQ ID NO: 16130 - RNA, 21 nt, Homo sapiens
uccugcgcgucccagaugccc

SEQ ID NO: 16131 - RNA, 21 nt, Homo sapiens
cggcggggacggcgauugguc

SEQ ID NO: 16132 - RNA, 23 nt, Homo sapiens
ugagcgccucgacgacagagccg

SEQ ID NO: 16133 - RNA, 23 nt, Homo sapiens
aaugacacgaucacucccguuga

SEQ ID NO: 16134 - RNA, 23 nt, Homo sapiens
uagcagcgggaacaguucugcag

SEQ ID NO: 16135 - RNA, 23 nt, Homo sapiens
gaacgcgcuucccuauagagggu

SEQ ID NO: 16136 - RNA, 22 nt, Homo sapiens
caaaacuggcaauuacuuuugc

SEQ ID NO: 16137 - RNA, 22 nt, Homo sapiens
aaaaacugagacuacuuuugca

SEQ ID NO: 16138 - RNA, 19 nt, Homo sapiens
aaaaacuguaauuacuuuu

SEQ ID NO: 16139 - RNA, 19 nt, Homo sapiens
gggcgccugugaucccaac

SEQ ID NO: 16140 - RNA, 19 nt, Homo sapiens
gggcgccugugaucccaac

SEQ ID NO: 16141 - RNA, 22 nt, Homo sapiens
uaacugguugaacaacugaacc

SEQ ID NO: 16142 - RNA, 22 nt, Homo sapiens
uugugucaauaugcgaugaugu

SEQ ID NO: 16143 - RNA, 21 nt, Homo sapiens
aauggcgccacuaggguugug

SEQ ID NO: 16144 - RNA, 22 nt, Homo sapiens
aggcggggcgccgcgggaccgc

SEQ ID NO: 16145 - RNA, 20 nt, Homo sapiens
cggcucugggucugugggga

SEQ ID NO: 16146 - RNA, 21 nt, Homo sapiens
agagaagaagaucagccugca

SEQ ID NO: 16147 - RNA, 18 nt, Homo sapiens
cagggaggugaaugugau

SEQ ID NO: 16148 - RNA, 21 nt, Homo sapiens
cugaccuaugaauugacagcc

SEQ ID NO: 16149 - RNA, 21 nt, Homo sapiens
augaccuaugaauugacagac

SEQ ID NO: 16150 - RNA, 23 nt, Homo sapiens
ccugcagcgacuugauggcuucc

SEQ ID NO: 16151 - RNA, 20 nt, Homo sapiens
ucugcaggguuugcuuugag

SEQ ID NO: 16152 - RNA, 18 nt, Homo sapiens
acguuggcucugguggug

SEQ ID NO: 16153 - RNA, 21 nt, Homo sapiens
cggcggggacggcgauugguc

SEQ ID NO: 16154 - RNA, 22 nt, Homo sapiens
aagcugccaguugaagaacugu

SEQ ID NO: 16155 - RNA, 23 nt, Homo sapiens
gaacgcgcuucccuauagagggu

SEQ ID NO: 16156 - RNA, 19 nt, Homo sapiens
ugagcugcuguaccaaaau

SEQ ID NO: 16157 - RNA, 24 nt, Homo sapiens
ugccugggucucuggccugcgcgu

SEQ ID NO: 16158 - RNA, 22 nt, Homo sapiens
aggcggggcgccgcgggaccgc

SEQ ID NO: 16159 - RNA, 22 nt, Homo sapiens
uuuccggcucgcgugggugugu

SEQ ID NO: 16160 - RNA, 21 nt, Homo sapiens
ccgucgccgccacccgagccg

SEQ ID NO: 16161 - RNA, 21 nt, Homo sapiens
agagaagaagaucagccugca

SEQ ID NO: 16162 - RNA, 17 nt, Homo sapiens
ucgccuccuccucuccc

SEQ ID NO: 16163 - RNA, 21 nt, Homo sapiens
ugcaggaccaagaugagcccu

SEQ ID NO: 16164 - RNA, 21 nt, Homo sapiens
uccugcgcgucccagaugccc

SEQ ID NO: 16165 - RNA, 22 nt, Homo sapiens
ucugcccccuccgcugcugcca

SEQ ID NO: 16166 - RNA, 25 nt, Homo sapiens
cccccacaaccgcgcuugacuagcu

SEQ ID NO: 16167 - RNA, 20 nt, Homo sapiens
acugccccaggugcugcugg

SEQ ID NO: 16168 - RNA, 21 nt, Homo sapiens
cggggcagcucaguacaggau

SEQ ID NO: 16169 - RNA, 22 nt, Homo sapiens
ucugggcaacaaagugagaccu

SEQ ID NO: 16170 - RNA, 22 nt, Homo sapiens
cauugcacuugucucggucuga

SEQ ID NO: 16171 - RNA, 22 nt, Homo sapiens
ucaggcucaguccccucccgau

SEQ ID NO: 16172 - RNA, 25 nt, Homo sapiens
gcugggcagggcuucugagcuccuu

SEQ ID NO: 16173 - RNA, 21 nt, Homo sapiens
acagucugcugagguuggagc

SEQ ID NO: 16174 - RNA, 21 nt, Homo sapiens
guggcugcacucacuuccuuc

SEQ ID NO: 16175 - RNA, 24 nt, Homo sapiens
ugccugggucucuggccugcgcgu

SEQ ID NO: 16176 - RNA, 22 nt, Homo sapiens
uuuccggcucgcgugggugugu

SEQ ID NO: 16177 - RNA, 22 nt, Homo sapiens
uuuccggcucgcgugggugugu

SEQ ID NO: 16178 - RNA, 22 nt, Homo sapiens
cucuagagggaagcacuuucug

SEQ ID NO: 16179 - RNA, 22 nt, Homo sapiens
uagcuuaucagacugauguuga

SEQ ID NO: 16180 - RNA, 22 nt, Homo sapiens
uggcagugucuuagcugguugu

SEQ ID NO: 16181 - RNA, 22 nt, Homo sapiens
caaaacuggcaauuacuuuugc

SEQ ID NO: 16182 - RNA, 22 nt, Homo sapiens
aaaaacugagacuacuuuugca

SEQ ID NO: 16183 - RNA, 19 nt, Homo sapiens
aaaaacuguaauuacuuuu

SEQ ID NO: 16184 - RNA, 19 nt, Homo sapiens
gggcgccugugaucccaac

SEQ ID NO: 16185 - RNA, 19 nt, Homo sapiens
aggcugcggaauucaggac

SEQ ID NO: 16186 - RNA, 22 nt, Homo sapiens
uccgagccugggucucccucuu

SEQ ID NO: 16187 - RNA, 22 nt, Homo sapiens
agacuucccauuugaagguggc

SEQ ID NO: 16188 - RNA, 20 nt, Homo sapiens
uaaggcacgcggugaaugcc

SEQ ID NO: 16189 - RNA, 22 nt, Homo sapiens
acccgucccguucguccccgga

SEQ ID NO: 16190 - RNA, 22 nt, Homo sapiens
uggagagaaaggcaguuccuga

SEQ ID NO: 16191 - RNA, 21 nt, Homo sapiens
cggcggggacggcgauugguc

SEQ ID NO: 16192 - RNA, 22 nt, Homo sapiens
uguaacagcaacuccaugugga

SEQ ID NO: 16193 - RNA, 22 nt, Homo sapiens
uggcucaguucagcaggaacag

SEQ ID NO: 16194 - RNA, 23 nt, Homo sapiens
ucccccaggugugauucugauuu

SEQ ID NO: 16195 - RNA, 21 nt, Homo sapiens
uaaggcacccuucugaguaga

SEQ ID NO: 16196 - RNA, 19 nt, Homo sapiens
aggcacggugucagcaggc

SEQ ID NO: 16197 - RNA, 19 nt, Homo sapiens
gggcgccugugaucccaac

SEQ ID NO: 16198 - RNA, 22 nt, Homo sapiens
uccgagccugggucucccucuu

SEQ ID NO: 16199 - RNA, 24 nt, Homo sapiens
acugggggcuuucgggcucugcgu

SEQ ID NO: 16200 - RNA, 24 nt, Homo sapiens
ugccugggucucuggccugcgcgu

SEQ ID NO: 16201 - RNA, 22 nt, Homo sapiens
aggcggggcgccgcgggaccgc

SEQ ID NO: 16202 - RNA, 22 nt, Homo sapiens
ugcggggcuagggcuaacagca

SEQ ID NO: 16203 - RNA, 22 nt, Homo sapiens
uauugcacucgucccggccucc

SEQ ID NO: 16204 - RNA, 22 nt, Homo sapiens
uggaauguaaagaaguauguau

SEQ ID NO: 16205 - RNA, 22 nt, Homo sapiens
ugagccccugugccgcccccag

SEQ ID NO: 16206 - RNA, 22 nt, Homo sapiens
ugagccccugugccgcccccag

SEQ ID NO: 16207 - RNA, 20 nt, Homo sapiens
ucacaccugccucgcccccc

SEQ ID NO: 16208 - RNA, 20 nt, Homo sapiens
ccccagggcgacgcggcggg

SEQ ID NO: 16209 - RNA, 22 nt, Homo sapiens
uggaauguaaggaagugugugg

SEQ ID NO: 16210 - RNA, 22 nt, Homo sapiens
acagcaggcacagacaggcagu

SEQ ID NO: 16211 - RNA, 21 nt, Homo sapiens
agggcccccccucaauccugu

SEQ ID NO: 16212 - RNA, 20 nt, Homo sapiens
ccucugggcccuuccuccag

SEQ ID NO: 16213 - RNA, 22 nt, Homo sapiens
aacacaccugguuaaccucuuu

SEQ ID NO: 16214 - RNA, 22 nt, Homo sapiens
ucucugggccugugucuuaggc

SEQ ID NO: 16215 - RNA, 21 nt, Homo sapiens
gccccugggccuauccuagaa

SEQ ID NO: 16216 - RNA, 22 nt, Homo sapiens
aacacaccuauucaaggauuca

SEQ ID NO: 16217 - RNA, 22 nt, Homo sapiens
gccugcugggguggaaccuggu

SEQ ID NO: 16218 - RNA, 20 nt, Homo sapiens
aggaauguuccuucuuugcc

SEQ ID NO: 16219 - RNA, 20 nt, Homo sapiens
cggcucugggucugugggga

SEQ ID NO: 16220 - RNA, 22 nt, Homo sapiens
cagugcaaugaugaaagggcau

SEQ ID NO: 16221 - RNA, 22 nt, Homo sapiens
aaaaccgucuaguuacaguugu

SEQ ID NO: 16222 - RNA, 24 nt, Homo sapiens
uuuggcaaugguagaacucacacu

SEQ ID NO: 16223 - RNA, 23 nt, Homo sapiens
ugugcaaaucuaugcaaaacuga

SEQ ID NO: 16224 - RNA, 22 nt, Homo sapiens
aacaauauccuggugcugagug

SEQ ID NO: 16225 - RNA, 22 nt, Homo sapiens
agagguaguagguugcauaguu

SEQ ID NO: 16226 - RNA, 22 nt, Homo sapiens
auucugcauuuuuagcaaguuc

SEQ ID NO: 16227 - RNA, 21 nt, Homo sapiens
caaagaggaaggucccauuac

SEQ ID NO: 16228 - RNA, 21 nt, Homo sapiens
guggcugcacucacuuccuuc

SEQ ID NO: 16229 - RNA, 22 nt, Homo sapiens
uggagugugacaaugguguuug

SEQ ID NO: 16230 - RNA, 17 nt, Homo sapiens
gugggggagaggcuguc

SEQ ID NO: 16231 - RNA, 22 nt, Homo sapiens
uuauaaagcaaugagacugauu

SEQ ID NO: 16232 - RNA, 22 nt, Homo sapiens
aagacgggaggaaagaagggag

SEQ ID NO: 16233 - RNA, 22 nt, Homo sapiens
agaggcuggccgugaugaauuc

SEQ ID NO: 16234 - RNA, 22 nt, Homo sapiens
gaaagcgcuucccuuugcugga

SEQ ID NO: 16235 - RNA, 22 nt, Homo sapiens
caaagcgcuccccuuuagaggu

SEQ ID NO: 16236 - RNA, 23 nt, Homo sapiens
caaagcgcuucucuuuagagugu

SEQ ID NO: 16237 - RNA, 21 nt, Homo sapiens
caaagcgcuucccuuuggagc

SEQ ID NO: 16238 - RNA, 21 nt, Homo sapiens
aaagcgcuucccuucagagug

SEQ ID NO: 16239 - RNA, 21 nt, Homo sapiens
gaaagcgcuucucuuuagagg

SEQ ID NO: 16240 - RNA, 21 nt, Homo sapiens
uggaggagaaggaaggugaug

SEQ ID NO: 16241 - RNA, 21 nt, Homo sapiens
cgcgggugcuuacugacccuu

SEQ ID NO: 16242 - RNA, 20 nt, Homo sapiens
ggggagcuguggaagcagua

SEQ ID NO: 16243 - RNA, 21 nt, Homo sapiens
uugcucacuguucuucccuag

SEQ ID NO: 16244 - RNA, 19 nt, Homo sapiens
gugaggacucgggaggugg

SEQ ID NO: 16245 - RNA, 24 nt, Homo sapiens
uggcccugacugaagaccagcagu

SEQ ID NO: 16246 - RNA, 18 nt, Homo sapiens
cagggaggugaaugugau

SEQ ID NO: 16247 - RNA, 22 nt, Homo sapiens
ggagacgcggcccuguuggagu

SEQ ID NO: 16248 - RNA, 23 nt, Homo sapiens
ucuggcuccgugucuucacuccc

SEQ ID NO: 16249 - RNA, 21 nt, Homo sapiens
agggcccccccucaauccugu

SEQ ID NO: 16250 - RNA, 22 nt, Homo sapiens
uagcaccaucugaaaucgguua

SEQ ID NO: 16251 - RNA, 23 nt, Homo sapiens
ugaggggcagagagcgagacuuu

SEQ ID NO: 16252 - RNA, 19 nt, Homo sapiens
aggcugcggaauucaggac

SEQ ID NO: 16253 - RNA, 22 nt, Homo sapiens
uggaauguaaagaaguauguau

SEQ ID NO: 16254 - RNA, 23 nt, Homo sapiens
gagggucuugggagggaugugac

SEQ ID NO: 16255 - RNA, 22 nt, Homo sapiens
agaaggaaauugaauucauuua

SEQ ID NO: 16256 - RNA, 21 nt, Homo sapiens
gcccuccgcccgugcaccccg

SEQ ID NO: 16257 - RNA, 23 nt, Homo sapiens
ucuggcuccgugucuucacuccc

SEQ ID NO: 16258 - RNA, 22 nt, Homo sapiens
ugggucuuugcgggcgagauga

SEQ ID NO: 16259 - RNA, 22 nt, Homo sapiens
uggaauguaaggaagugugugg

SEQ ID NO: 16260 - RNA, 21 nt, Homo sapiens
gugcauuguaguugcauugca

SEQ ID NO: 16261 - RNA, 22 nt, Homo sapiens
aauugcacgguauccaucugua

SEQ ID NO: 16262 - RNA, 22 nt, Homo sapiens
agacccuggucugcacucuauc

SEQ ID NO: 16263 - RNA, 22 nt, Homo sapiens
aaacauucgcggugcacuucuu

SEQ ID NO: 16264 - RNA, 22 nt, Homo sapiens
auauuaccauuagcucaucuuu

SEQ ID NO: 16265 - RNA, 22 nt, Homo sapiens
cgaaaacagcaauuaccuuugc

SEQ ID NO: 16266 - RNA, 21 nt, Homo sapiens
uuggccacaauggguuagaac

SEQ ID NO: 16267 - RNA, 25 nt, Homo sapiens
aggggugguguugggacagcuccgu

SEQ ID NO: 16268 - RNA, 20 nt, Homo sapiens
aggaauguuccuucuuugcc

SEQ ID NO: 16269 - RNA, 22 nt, Homo sapiens
uccgagccugggucucccucuu

SEQ ID NO: 16270 - RNA, 19 nt, Homo sapiens
aguguggcuuucuuagagc

SEQ ID NO: 16271 - RNA, 23 nt, Homo sapiens
ucaaaugcucagacuccuguggu

SEQ ID NO: 16272 - RNA, 21 nt, Homo sapiens
uggcagggaggcugggagggg

SEQ ID NO: 16273 - RNA, 22 nt, Homo sapiens
ucggccugaccacccaccccac

SEQ ID NO: 16274 - RNA, 24 nt, Homo sapiens
uggcccugacugaagaccagcagu

SEQ ID NO: 16275 - RNA, 21 nt, Homo sapiens
cggcggggacggcgauugguc

SEQ ID NO: 16276 - RNA, 22 nt, Homo sapiens
cccugugcccggcccacuucug

SEQ ID NO: 16277 - RNA, 22 nt, Homo sapiens
gaggguuggguggaggcucucc

SEQ ID NO: 16278 - RNA, 21 nt, Homo sapiens
agggcccccccucaauccugu

SEQ ID NO: 16279 - RNA, 23 nt, Homo sapiens
ucccccaggugugauucugauuu

SEQ ID NO: 16280 - RNA, 23 nt, Homo sapiens
ucccccaggugugauucugauuu

SEQ ID NO: 16281 - RNA, 22 nt, Homo sapiens
uggugggcacagaaucuggacu

SEQ ID NO: 16282 - RNA, 21 nt, Homo sapiens
aacaggugacugguuagacaa

SEQ ID NO: 16283 - RNA, 24 nt, Homo sapiens
acugggggcuuucgggcucugcgu

SEQ ID NO: 16284 - RNA, 24 nt, Homo sapiens
acugggggcuuucgggcucugcgu

SEQ ID NO: 16285 - RNA, 22 nt, Homo sapiens
uggugggccgcagaacaugugc

SEQ ID NO: 16286 - RNA, 22 nt, Homo sapiens
aggcggggcgccgcgggaccgc

SEQ ID NO: 16287 - RNA, 22 nt, Homo sapiens
ugcggggcuagggcuaacagca

SEQ ID NO: 16288 - RNA, 22 nt, Homo sapiens
caaagugccucccuuuagagug

SEQ ID NO: 16289 - RNA, 22 nt, Homo sapiens
ugugcgcagggagaccucuccc

SEQ ID NO: 16290 - RNA, 22 nt, Homo sapiens
acucggcguggcgucggucgug

SEQ ID NO: 16291 - RNA, 21 nt, Homo sapiens
cggcggggacggcgauugguc

SEQ ID NO: 16292 - RNA, 22 nt, Homo sapiens
uggcagugucuuagcugguugu

SEQ ID NO: 16293 - RNA, 19 nt, Homo sapiens
ugggcguaucuguaugcua

SEQ ID NO: 16294 - RNA, 21 nt, Homo sapiens
uuggccacaauggguuagaac

SEQ ID NO: 16295 - RNA, 22 nt, Homo sapiens
aggcggggcgccgcgggaccgc

SEQ ID NO: 16296 - RNA, 22 nt, Homo sapiens
ugcggggcuagggcuaacagca

SEQ ID NO: 16297 - RNA, 22 nt, Homo sapiens
auccgcgcucugacucucugcc

SEQ ID NO: 16298 - RNA, 22 nt, Homo sapiens
uggagugugacaaugguguuug

SEQ ID NO: 16299 - RNA, 23 nt, Homo sapiens
cggcccgggcugcugcuguuccu

SEQ ID NO: 16300 - RNA, 21 nt, Homo sapiens
cggcggggacggcgauugguc

SEQ ID NO: 16301 - RNA, 25 nt, Homo sapiens
aggggugguguugggacagcuccgu

SEQ ID NO: 16302 - RNA, 22 nt, Homo sapiens
aggcggggcgccgcgggaccgc

SEQ ID NO: 16303 - RNA, 22 nt, Homo sapiens
ugcggggcuagggcuaacagca

SEQ ID NO: 16304 - RNA, 21 nt, Homo sapiens
acggugcuggauguggccuuu

SEQ ID NO: 16305 - RNA, 21 nt, Homo sapiens
uccugcgcgucccagaugccc

SEQ ID NO: 16306 - RNA, 22 nt, Homo sapiens
cauugcacuugucucggucuga

SEQ ID NO: 16307 - RNA, 21 nt, Homo sapiens
uaguagaccguauagcguacg

SEQ ID NO: 16308 - RNA, 23 nt, Homo sapiens
ucuuggaguaggucauugggugg

SEQ ID NO: 16309 - RNA, 21 nt, Homo sapiens
uacuuggaaaggcaucaguug

SEQ ID NO: 16310 - RNA, 22 nt, Homo sapiens
ugucuacuacuggagacacugg

SEQ ID NO: 16311 - RNA, 23 nt, Homo sapiens
gagggucuugggagggaugugac

SEQ ID NO: 16312 - RNA, 22 nt, Homo sapiens
uggagugugacaaugguguuug

SEQ ID NO: 16313 - RNA, 22 nt, Homo sapiens
uucauucggcuguccagaugua

SEQ ID NO: 16314 - RNA, 21 nt, Homo sapiens
cucccacaugcaggguuugca

SEQ ID NO: 16315 - RNA, 22 nt, Homo sapiens
ugggucuuugcgggcgagauga

SEQ ID NO: 16316 - RNA, 18 nt, Homo sapiens
uucacagggaggugucau

SEQ ID NO: 16317 - RNA, 23 nt, Homo sapiens
uggaagacuagugauuuuguugu

SEQ ID NO: 16318 - RNA, 21 nt, Homo sapiens
gcaggaacuugugagucuccu

SEQ ID NO: 16319 - RNA, 22 nt, Homo sapiens
uauugcacucgucccggccucc

SEQ ID NO: 16320 - RNA, 21 nt, Homo sapiens
cccggagccaggaugcagcuc

SEQ ID NO: 16321 - RNA, 21 nt, Homo sapiens
uggcagggaggcugggagggg

SEQ ID NO: 16322 - RNA, 23 nt, Homo sapiens
uggaguccaggaaucugcauuuu

SEQ ID NO: 16323 - RNA, 21 nt, Homo sapiens
gcccuccgcccgugcaccccg

SEQ ID NO: 16324 - RNA, 21 nt, Homo sapiens
cggcggggacggcgauugguc

SEQ ID NO: 16325 - RNA, 22 nt, Homo sapiens
cgcaggggccgggugcucaccg

SEQ ID NO: 16326 - RNA, 22 nt, Homo sapiens
ucugcccccuccgcugcugcca

SEQ ID NO: 16327 - RNA, 22 nt, Homo sapiens
cauugcacuugucucggucuga

SEQ ID NO: 16328 - RNA, 20 nt, Homo sapiens
acugccccaggugcugcugg

SEQ ID NO: 16329 - RNA, 21 nt, Homo sapiens
cggggcagcucaguacaggau

SEQ ID NO: 16330 - RNA, 20 nt, Homo sapiens
guccgcucggcgguggccca

SEQ ID NO: 16331 - RNA, 21 nt, Homo sapiens
agaccuggcccagaccucagc

SEQ ID NO: 16332 - RNA, 25 nt, Homo sapiens
ggcggagggaaguagguccguuggu

SEQ ID NO: 16333 - RNA, 22 nt, Homo sapiens
aggcggggcgccgcgggaccgc

SEQ ID NO: 16334 - RNA, 22 nt, Homo sapiens
ugcggggcuagggcuaacagca

SEQ ID NO: 16335 - RNA, 24 nt, Homo sapiens
uggggagcugaggcucugggggug

SEQ ID NO: 16336 - RNA, 22 nt, Homo sapiens
aacccguagauccgaacuugug

SEQ ID NO: 16337 - RNA, 22 nt, Homo sapiens
ucaccagcccuguguucccuag

SEQ ID NO: 16338 - RNA, 22 nt, Homo sapiens
cugaagcucagagggcucugau

SEQ ID NO: 16339 - RNA, 22 nt, Homo sapiens
cagugcaauguuaaaagggcau

SEQ ID NO: 16340 - RNA, 23 nt, Homo sapiens
agcugguguugugaaucaggccg

SEQ ID NO: 16341 - RNA, 22 nt, Homo sapiens
uagguaguuuccuguuguuggg

SEQ ID NO: 16342 - RNA, 22 nt, Homo sapiens
uagcuuaucagacugauguuga

SEQ ID NO: 16343 - RNA, 21 nt, Homo sapiens
aucacauugccagggauuucc

SEQ ID NO: 16344 - RNA, 21 nt, Homo sapiens
aucacauugccagggauuacc

SEQ ID NO: 16345 - RNA, 20 nt, Homo sapiens
ggggagcuguggaagcagua

SEQ ID NO: 16346 - RNA, 22 nt, Homo sapiens
ccucuuccccuugucucuccag

SEQ ID NO: 16347 - RNA, 19 nt, Homo sapiens
gagccaguuggacaggagc

SEQ ID NO: 16348 - RNA, 22 nt, Homo sapiens
aagauguggaaaaauuggaauc

SEQ ID NO: 16349 - RNA, 20 nt, Homo sapiens
guagaggagauggcgcaggg

SEQ ID NO: 16350 - RNA, 22 nt, Homo sapiens
cacuggcuccuuucuggguaga

SEQ ID NO: 16351 - RNA, 24 nt, Homo sapiens
uggggagcugaggcucugggggug

SEQ ID NO: 16352 - RNA, 23 nt, Homo sapiens
ccuaguagguguccaguaagugu

SEQ ID NO: 16353 - RNA, 22 nt, Homo sapiens
caaaguuuaagauccuugaagu

SEQ ID NO: 16354 - RNA, 22 nt, Homo sapiens
uuaugguuugccugggacugag

SEQ ID NO: 16355 - RNA, 21 nt, Homo sapiens
uggguuuacguugggagaacu

SEQ ID NO: 16356 - RNA, 17 nt, Homo sapiens
ucgccuccuccucuccc

SEQ ID NO: 16357 - RNA, 17 nt, Homo sapiens
ucgccuccuccucuccc

SEQ ID NO: 16358 - RNA, 20 nt, Homo sapiens
ucguuugccuuuuucugcuu

SEQ ID NO: 16359 - RNA, 23 nt, Homo sapiens
ucuggcuccgugucuucacuccc

SEQ ID NO: 16360 - RNA, 21 nt, Homo sapiens
cggcggggacggcgauugguc

SEQ ID NO: 16361 - RNA, 23 nt, Homo sapiens
caacggaaucccaaaagcagcug

SEQ ID NO: 16362 - RNA, 22 nt, Homo sapiens
cauugcacuugucucggucuga

SEQ ID NO: 16363 - RNA, 22 nt, Homo sapiens
cgucaacacuugcugguuuccu

SEQ ID NO: 16364 - RNA, 19 nt, Homo sapiens
gagccaguuggacaggagc

SEQ ID NO: 16365 - RNA, 21 nt, Homo sapiens
agggggaaaguucuauagucc

SEQ ID NO: 16366 - RNA, 25 nt, Homo sapiens
ggcggagggaaguagguccguuggu

SEQ ID NO: 16367 - RNA, 22 nt, Homo sapiens
aggcggggcgccgcgggaccgc

SEQ ID NO: 16368 - RNA, 21 nt, Homo sapiens
cgcgggugcuuacugacccuu

SEQ ID NO: 16369 - RNA, 22 nt, Homo sapiens
cacuggcuccuuucuggguaga

SEQ ID NO: 16370 - RNA, 22 nt, Homo sapiens
cgcaggggccgggugcucaccg

SEQ ID NO: 16371 - RNA, 22 nt, Homo sapiens
ugggucuuugcgggcgagauga

SEQ ID NO: 16372 - RNA, 22 nt, Homo sapiens
ggggguccccggugcucggauc

SEQ ID NO: 16373 - RNA, 22 nt, Homo sapiens
ugagccccugugccgcccccag

SEQ ID NO: 16374 - RNA, 21 nt, Homo sapiens
gcccuccgcccgugcaccccg

SEQ ID NO: 16375 - RNA, 23 nt, Homo sapiens
ucuggcuccgugucuucacuccc

SEQ ID NO: 16376 - RNA, 22 nt, Homo sapiens
ucugcccccuccgcugcugcca

SEQ ID NO: 16377 - RNA, 22 nt, Homo sapiens
acagcaggcacagacaggcagu

SEQ ID NO: 16378 - RNA, 22 nt, Homo sapiens
uguaaacauccuacacucagcu

SEQ ID NO: 16379 - RNA, 20 nt, Homo sapiens
acugccccaggugcugcugg

SEQ ID NO: 16380 - RNA, 22 nt, Homo sapiens
gccugcugggguggaaccuggu

SEQ ID NO: 16381 - RNA, 21 nt, Homo sapiens
cggggcagcucaguacaggau

SEQ ID NO: 16382 - RNA, 22 nt, Homo sapiens
uccgagccugggucucccucuu

SEQ ID NO: 16383 - RNA, 22 nt, Homo sapiens
uacccauugcauaucggaguug

SEQ ID NO: 16384 - RNA, 24 nt, Homo sapiens
ugccugggucucuggccugcgcgu

SEQ ID NO: 16385 - RNA, 23 nt, Homo sapiens
cgggucggaguuagcucaagcgg

SEQ ID NO: 16386 - RNA, 21 nt, Homo sapiens
agaggauacccuuuguauguu

SEQ ID NO: 16387 - RNA, 22 nt, Homo sapiens
uggagugugacaaugguguuug

SEQ ID NO: 16388 - RNA, 22 nt, Homo sapiens
cuggacugagccgugcuacugg

SEQ ID NO: 16389 - RNA, 22 nt, Homo sapiens
uagguuauccguguugccuucg

SEQ ID NO: 16390 - RNA, 23 nt, Homo sapiens
agcuacauugucugcuggguuuc

SEQ ID NO: 16391 - RNA, 21 nt, Homo sapiens
agcuacaucuggcuacugggu

SEQ ID NO: 16392 - RNA, 21 nt, Homo sapiens
gcaguccaugggcauauacac

SEQ ID NO: 16393 - RNA, 23 nt, Homo sapiens
uuacaguuguucaaccaguuacu

SEQ ID NO: 16394 - RNA, 23 nt, Homo sapiens
acuugggcacugaaacaaugucc

SEQ ID NO: 16395 - RNA, 22 nt, Homo sapiens
ucggccugaccacccaccccac

SEQ ID NO: 16396 - RNA, 17 nt, Homo sapiens
ucgccuccuccucuccc

SEQ ID NO: 16397 - RNA, 22 nt, Homo sapiens
ugcuggaucagugguucgaguc

SEQ ID NO: 16398 - RNA, 23 nt, Homo sapiens
agcuacauugucugcuggguuuc

SEQ ID NO: 16399 - RNA, 23 nt, Homo sapiens
ugagcgccucgacgacagagccg

SEQ ID NO: 16400 - RNA, 22 nt, Homo sapiens
gcugacuccuaguccagggcuc

SEQ ID NO: 16401 - RNA, 22 nt, Homo sapiens
agaggcuggccgugaugaauuc

SEQ ID NO: 16402 - RNA, 20 nt, Homo sapiens
accaggaggcugaggccccu

SEQ ID NO: 16403 - RNA, 22 nt, Homo sapiens
acuccagccccacagccucagc

SEQ ID NO: 16404 - RNA, 21 nt, Homo sapiens
ucguggccuggucuccauuau

SEQ ID NO: 16405 - RNA, 22 nt, Homo sapiens
ucggccugaccacccaccccac

SEQ ID NO: 16406 - RNA, 18 nt, Homo sapiens
cgggcguggugguggggg

SEQ ID NO: 16407 - RNA, 21 nt, Homo sapiens
cggcggggacggcgauugguc

SEQ ID NO: 16408 - RNA, 21 nt, Homo sapiens
cggcggggacggcgauugguc

SEQ ID NO: 16409 - RNA, 22 nt, Homo sapiens
cgcaggggccgggugcucaccg

SEQ ID NO: 16410 - RNA, 23 nt, Homo sapiens
ugaggggcagagagcgagacuuu

SEQ ID NO: 16411 - RNA, 22 nt, Homo sapiens
ggagaaauuauccuuggugugu

SEQ ID NO: 16412 - RNA, 22 nt, Homo sapiens
aggcggggcgccgcgggaccgc

SEQ ID NO: 16413 - RNA, 22 nt, Homo sapiens
aggcggggcgccgcgggaccgc

SEQ ID NO: 16414 - RNA, 23 nt, Homo sapiens
cgggucggaguuagcucaagcgg

SEQ ID NO: 16415 - RNA, 22 nt, Homo sapiens
ccucuuccccuugucucuccag

SEQ ID NO: 16416 - RNA, 22 nt, Homo sapiens
ugagaacugaauuccauggguu

SEQ ID NO: 16417 - RNA, 21 nt, Homo sapiens
ccaccaccgugucugacacuu

SEQ ID NO: 16418 - RNA, 22 nt, Homo sapiens
gcugacuccuaguccagggcuc

SEQ ID NO: 16419 - RNA, 22 nt, Homo sapiens
aggcaguguauuguuagcuggc

SEQ ID NO: 16420 - RNA, 22 nt, Homo sapiens
cgucaacacuugcugguuuccu

SEQ ID NO: 16421 - RNA, 25 nt, Homo sapiens
aggggugguguugggacagcuccgu

SEQ ID NO: 16422 - RNA, 19 nt, Homo sapiens
ucuaggcugguacugcuga

SEQ ID NO: 16423 - RNA, 21 nt, Homo sapiens
uggaggagaaggaaggugaug

SEQ ID NO: 16424 - RNA, 20 nt, Homo sapiens
guagaggagauggcgcaggg

SEQ ID NO: 16425 - RNA, 22 nt, Homo sapiens
caaagugccucccuuuagagug

SEQ ID NO: 16426 - RNA, 20 nt, Homo sapiens
ucguuugccuuuuucugcuu

SEQ ID NO: 16427 - RNA, 23 nt, Homo sapiens
guccaguuuucccaggaaucccu

SEQ ID NO: 16428 - RNA, 21 nt, Homo sapiens
cggcggggacggcgauugguc

SEQ ID NO: 16429 - RNA, 22 nt, Homo sapiens
cauugcacuugucucggucuga

SEQ ID NO: 16430 - RNA, 22 nt, Homo sapiens
aggcggggcgccgcgggaccgc

SEQ ID NO: 16431 - RNA, 22 nt, Homo sapiens
ugcggggcuagggcuaacagca

SEQ ID NO: 16432 - RNA, 22 nt, Homo sapiens
caaagugccucccuuuagagug

SEQ ID NO: 16433 - RNA, 22 nt, Homo sapiens
uggaauguaaagaaguauguau

SEQ ID NO: 16434 - RNA, 21 nt, Homo sapiens
acggugcuggauguggccuuu

SEQ ID NO: 16435 - RNA, 23 nt, Homo sapiens
guccaguuuucccaggaaucccu

SEQ ID NO: 16436 - RNA, 22 nt, Homo sapiens
uggaauguaaggaagugugugg

SEQ ID NO: 16437 - RNA, 21 nt, Homo sapiens
aucacauugccagggauuucc

SEQ ID NO: 16438 - RNA, 21 nt, Homo sapiens
aucacauugccagggauuacc

SEQ ID NO: 16439 - RNA, 21 nt, Homo sapiens
ugagaugaagcacuguagcuc

SEQ ID NO: 16440 - RNA, 21 nt, Homo sapiens
uaguagaccguauagcguacg

SEQ ID NO: 16441 - RNA, 22 nt, Homo sapiens
agaucagaaggugauuguggcu

SEQ ID NO: 16442 - RNA, 22 nt, Homo sapiens
gaauguugcucggugaaccccu

SEQ ID NO: 16443 - RNA, 22 nt, Homo sapiens
uucucaaggaggugucguuuau

SEQ ID NO: 16444 - RNA, 23 nt, Homo sapiens
cucuugagggaagcacuuucugu

SEQ ID NO: 16445 - RNA, 22 nt, Homo sapiens
aaacauucgcggugcacuucuu

SEQ ID NO: 16446 - RNA, 20 nt, Homo sapiens
aggaauguuccuucuuugcc

SEQ ID NO: 16447 - RNA, 21 nt, Homo sapiens
gcaggaacuugugagucuccu

SEQ ID NO: 16448 - RNA, 23 nt, Homo sapiens
gagggucuugggagggaugugac

SEQ ID NO: 16449 - RNA, 22 nt, Homo sapiens
uaacacugucugguaaagaugg

SEQ ID NO: 16450 - RNA, 24 nt, Homo sapiens
uuuggcaaugguagaacucacacu

SEQ ID NO: 16451 - RNA, 18 nt, Homo sapiens
ugaggcaguagauugaau

SEQ ID NO: 16452 - RNA, 21 nt, Homo sapiens
cucccacaugcaggguuugca

SEQ ID NO: 16453 - RNA, 22 nt, Homo sapiens
uaacacugucugguaacgaugu

SEQ ID NO: 16454 - RNA, 22 nt, Homo sapiens
uucccuuugucauccuaugccu

SEQ ID NO: 16455 - RNA, 23 nt, Homo sapiens
caaagugcucauagugcagguag

SEQ ID NO: 16456 - RNA, 22 nt, Homo sapiens
uucccuuugucauccuucgccu

SEQ ID NO: 16457 - RNA, 22 nt, Homo sapiens
aagcugccaguugaagaacugu

SEQ ID NO: 16458 - RNA, 20 nt, Homo sapiens
gugcauugcuguugcauugc

SEQ ID NO: 16459 - RNA, 22 nt, Homo sapiens
agaggcuggccgugaugaauuc

SEQ ID NO: 16460 - RNA, 22 nt, Homo sapiens
aguggggaacccuuccaugagg

SEQ ID NO: 16461 - RNA, 22 nt, Homo sapiens
aauccuuugucccugggugaga

SEQ ID NO: 16462 - RNA, 22 nt, Homo sapiens
agacccuggucugcacucuauc

SEQ ID NO: 16463 - RNA, 22 nt, Homo sapiens
gagugccuucuuuuggagcguu

SEQ ID NO: 16464 - RNA, 22 nt, Homo sapiens
aagugccuccuuuuagaguguu

SEQ ID NO: 16465 - RNA, 19 nt, Homo sapiens
ugagcugcuguaccaaaau

SEQ ID NO: 16466 - RNA, 19 nt, Homo sapiens
ugucucugcugggguuucu

SEQ ID NO: 16467 - RNA, 22 nt, Homo sapiens
uggucuaggauuguuggaggag

SEQ ID NO: 16468 - RNA, 25 nt, Homo sapiens
aggggugguguugggacagcuccgu

SEQ ID NO: 16469 - RNA, 20 nt, Homo sapiens
ggggagcuguggaagcagua

SEQ ID NO: 16470 - RNA, 22 nt, Homo sapiens
ccucuuccccuugucucuccag

SEQ ID NO: 16471 - RNA, 22 nt, Homo sapiens
agaaggaaauugaauucauuua

SEQ ID NO: 16472 - RNA, 22 nt, Homo sapiens
ucaaaacugaggggcauuuucu

SEQ ID NO: 16473 - RNA, 20 nt, Homo sapiens
guguguggaaaugcuucugc

SEQ ID NO: 16474 - RNA, 23 nt, Homo sapiens
ucuggcuccgugucuucacuccc

SEQ ID NO: 16475 - RNA, 23 nt, Homo sapiens
cccaguguucagacuaccuguuc

SEQ ID NO: 16476 - RNA, 23 nt, Homo sapiens
cccaguguuuagacuaucuguuc

SEQ ID NO: 16477 - RNA, 23 nt, Homo sapiens
ugugcaaaucuaugcaaaacuga

SEQ ID NO: 16478 - RNA, 22 nt, Homo sapiens
aacaauauccuggugcugagug

SEQ ID NO: 16479 - RNA, 22 nt, Homo sapiens
agagguaguagguugcauaguu

SEQ ID NO: 16480 - RNA, 23 nt, Homo sapiens
ucccccaggugugauucugauuu

SEQ ID NO: 16481 - RNA, 22 nt, Homo sapiens
ccaaaacugcaguuacuuuugc

SEQ ID NO: 16482 - RNA, 24 nt, Homo sapiens
acugggggcuuucgggcucugcgu

SEQ ID NO: 16483 - RNA, 22 nt, Homo sapiens
aaaccuguguuguucaagaguc

SEQ ID NO: 16484 - RNA, 22 nt, Homo sapiens
ucuucucuguuuuggccaugug

SEQ ID NO: 16485 - RNA, 21 nt, Homo sapiens
agagaagaagaucagccugca

SEQ ID NO: 16486 - RNA, 18 nt, Homo sapiens
cagggaggugaaugugau

SEQ ID NO: 16487 - RNA, 23 nt, Homo sapiens
uauggcuuuuuauuccuauguga

SEQ ID NO: 16488 - RNA, 25 nt, Homo sapiens
cccccacaaccgcgcuugacuagcu

SEQ ID NO: 16489 - RNA, 21 nt, Homo sapiens
agggcccccccucaauccugu

SEQ ID NO: 16490 - RNA, 21 nt, Homo sapiens
agggcccccccucaauccugu

SEQ ID NO: 16491 - RNA, 22 nt, Homo sapiens
aagacgggaggaaagaagggag

SEQ ID NO: 16492 - RNA, 18 nt, Homo sapiens
ugcuuccuuucagagggu

SEQ ID NO: 16493 - RNA, 22 nt, Homo sapiens
aucuggagguaagaagcacuuu

SEQ ID NO: 16494 - RNA, 21 nt, Homo sapiens
cacaagguauugguauuaccu

SEQ ID NO: 16495 - RNA, 23 nt, Homo sapiens
uggaagacuagugauuuuguugu

SEQ ID NO: 16496 - RNA, 20 nt, Homo sapiens
guagaggagauggcgcaggg

SEQ ID NO: 16497 - RNA, 22 nt, Homo sapiens
uuuucaacucuaaugggagaga

SEQ ID NO: 16498 - RNA, 22 nt, Homo sapiens
acucggcguggcgucggucgug

SEQ ID NO: 16499 - RNA, 18 nt, Homo sapiens
cagggaggugaaugugau

SEQ ID NO: 16500 - RNA, 23 nt, Homo sapiens
ucuggcuccgugucuucacuccc

SEQ ID NO: 16501 - RNA, 23 nt, Homo sapiens
ucuggcuccgugucuucacuccc

SEQ ID NO: 16502 - RNA, 21 nt, Homo sapiens
cucccacaugcaggguuugca

SEQ ID NO: 16503 - RNA, 22 nt, Homo sapiens
cugugcgugugacagcggcuga

SEQ ID NO: 16504 - RNA, 22 nt, Homo sapiens
agaguugagucuggacgucccg

SEQ ID NO: 16505 - RNA, 22 nt, Homo sapiens
cauugcacuugucucggucuga

SEQ ID NO: 16506 - RNA, 22 nt, Homo sapiens
aaggagcucacagucuauugag

SEQ ID NO: 16507 - RNA, 22 nt, Homo sapiens
uaugugggaugguaaaccgcuu

SEQ ID NO: 16508 - RNA, 22 nt, Homo sapiens
aagauguggaaaaauuggaauc

SEQ ID NO: 16509 - RNA, 21 nt, Homo sapiens
ucuuguguucucuagaucagu

SEQ ID NO: 16510 - RNA, 20 nt, Homo sapiens
accaggaggcugaggccccu

SEQ ID NO: 16511 - RNA, 23 nt, Homo sapiens
aaggagcuuacaaucuagcuggg

SEQ ID NO: 16512 - RNA, 20 nt, Homo sapiens
cggcucugggucugugggga

SEQ ID NO: 16513 - RNA, 22 nt, Homo sapiens
cauugcacuugucucggucuga

SEQ ID NO: 16514 - RNA, 23 nt, Homo sapiens
ucaagagcaauaacgaaaaaugu

SEQ ID NO: 16515 - RNA, 23 nt, Homo sapiens
ucccccaggugugauucugauuu

SEQ ID NO: 16516 - RNA, 21 nt, Homo sapiens
ucacuccucuccucccgucuu

SEQ ID NO: 16517 - RNA, 24 nt, Homo sapiens
uucuccaaaagaaagcacuuucug

SEQ ID NO: 16518 - RNA, 18 nt, Homo sapiens
ugcuuccuuucagagggu

SEQ ID NO: 16519 - RNA, 22 nt, Homo sapiens
aucuggagguaagaagcacuuu

SEQ ID NO: 16520 - RNA, 22 nt, Homo sapiens
aagugccuccuuuuagaguguu

SEQ ID NO: 16521 - RNA, 21 nt, Homo sapiens
agaccuggcccagaccucagc

SEQ ID NO: 16522 - RNA, 24 nt, Homo sapiens
acugggggcuuucgggcucugcgu

SEQ ID NO: 16523 - RNA, 23 nt, Homo sapiens
ugucacucggcucggcccacuac

SEQ ID NO: 16524 - RNA, 21 nt, Homo sapiens
uggaggagaaggaaggugaug

SEQ ID NO: 16525 - RNA, 19 nt, Homo sapiens
auggauaaggcuuuggcuu

SEQ ID NO: 16526 - RNA, 18 nt, Homo sapiens
gucccuguucaggcgcca

SEQ ID NO: 16527 - RNA, 17 nt, Homo sapiens
ucccuguucgggcgcca

SEQ ID NO: 16528 - RNA, 22 nt, Homo sapiens
ucaaaacugaggggcauuuucu

SEQ ID NO: 16529 - RNA, 22 nt, Homo sapiens
uguaacagcaacuccaugugga

SEQ ID NO: 16530 - RNA, 22 nt, Homo sapiens
uuauaaagcaaugagacugauu

SEQ ID NO: 16531 - RNA, 22 nt, Homo sapiens
ugugacagauugauaacugaaa

SEQ ID NO: 16532 - RNA, 22 nt, Homo sapiens
caaaacuggcaauuacuuuugc

SEQ ID NO: 16533 - RNA, 22 nt, Homo sapiens
aaaaacugagacuacuuuugca

SEQ ID NO: 16534 - RNA, 19 nt, Homo sapiens
aaaaacuguaauuacuuuu

SEQ ID NO: 16535 - RNA, 22 nt, Homo sapiens
aaaacuguaauuacuuuuguac

SEQ ID NO: 16536 - RNA, 22 nt, Homo sapiens
ccaaaacugcaguuacuuuugc

SEQ ID NO: 16537 - RNA, 21 nt, Homo sapiens
gaagugugccguggugugucu

SEQ ID NO: 16538 - RNA, 20 nt, Homo sapiens
aggguguuucucucaucucu

SEQ ID NO: 16539 - RNA, 22 nt, Homo sapiens
guggguacggcccagugggggg

SEQ ID NO: 16540 - RNA, 22 nt, Homo sapiens
augguacccuggcauacugagu

SEQ ID NO: 16541 - RNA, 18 nt, Homo sapiens
cgggcguggugguggggg

SEQ ID NO: 16542 - RNA, 17 nt, Homo sapiens
ucccuguucgggcgcca

SEQ ID NO: 16543 - RNA, 24 nt, Homo sapiens
uggcccugacugaagaccagcagu

SEQ ID NO: 16544 - RNA, 22 nt, Homo sapiens
ugcccuguggacucaguucugg

SEQ ID NO: 16545 - RNA, 21 nt, Homo sapiens
cggcggggacggcgauugguc

SEQ ID NO: 16546 - RNA, 22 nt, Homo sapiens
uagguaguuucauguuguuggg

SEQ ID NO: 16547 - RNA, 22 nt, Homo sapiens
uagcuuaucagacugauguuga

SEQ ID NO: 16548 - RNA, 23 nt, Homo sapiens
ucccccaggugugauucugauuu

SEQ ID NO: 16549 - RNA, 22 nt, Homo sapiens
aauugcacuuuagcaaugguga

SEQ ID NO: 16550 - RNA, 21 nt, Homo sapiens
aaaacggugagauuuuguuuu

SEQ ID NO: 16551 - RNA, 21 nt, Homo sapiens
uagauaaaauauugguaccug

SEQ ID NO: 16552 - RNA, 24 nt, Homo sapiens
acugggggcuuucgggcucugcgu

SEQ ID NO: 16553 - RNA, 22 nt, Homo sapiens
aggcggggcgccgcgggaccgc

SEQ ID NO: 16554 - RNA, 22 nt, Homo sapiens
ugcggggcuagggcuaacagca

SEQ ID NO: 16555 - RNA, 21 nt, Homo sapiens
aaggcagggcccccgcucccc

SEQ ID NO: 16556 - RNA, 21 nt, Homo sapiens
ccgucgccgccacccgagccg

SEQ ID NO: 16557 - RNA, 21 nt, Homo sapiens
ccccaccuccucucuccucag

SEQ ID NO: 16558 - RNA, 22 nt, Homo sapiens
ugagccccugugccgcccccag

SEQ ID NO: 16559 - RNA, 22 nt, Homo sapiens
ucggccugaccacccaccccac

SEQ ID NO: 16560 - RNA, 22 nt, Homo sapiens
acgcccuucccccccuucuuca

SEQ ID NO: 16561 - RNA, 22 nt, Homo sapiens
uggcagugucuuagcugguugu

SEQ ID NO: 16562 - RNA, 23 nt, Homo sapiens
aggcaguguaguuagcugauugc

SEQ ID NO: 16563 - RNA, 22 nt, Homo sapiens
uggcaguguauuguuagcuggu

SEQ ID NO: 16564 - RNA, 22 nt, Homo sapiens
aggcaguguauuguuagcuggc

SEQ ID NO: 16565 - RNA, 19 nt, Homo sapiens
ugggcguaucuguaugcua

SEQ ID NO: 16566 - RNA, 25 nt, Homo sapiens
aggggugguguugggacagcuccgu

SEQ ID NO: 16567 - RNA, 20 nt, Homo sapiens
cggcucugggucugugggga

SEQ ID NO: 16568 - RNA, 23 nt, Homo sapiens
ucugcucauaccccaugguuucu

SEQ ID NO: 16569 - RNA, 20 nt, Homo sapiens
ggggagcuguggaagcagua

SEQ ID NO: 16570 - RNA, 20 nt, Homo sapiens
ggggagcuguggaagcagua

SEQ ID NO: 16571 - RNA, 22 nt, Homo sapiens
acaggugagguucuugggagcc

SEQ ID NO: 16572 - RNA, 22 nt, Homo sapiens
uaaugccccuaaaaauccuuau

SEQ ID NO: 16573 - RNA, 22 nt, Homo sapiens
auauaauacaaccugcuaagug

SEQ ID NO: 16574 - RNA, 21 nt, Homo sapiens
uugaaaggcuauuucuugguc

SEQ ID NO: 16575 - RNA, 22 nt, Homo sapiens
caaccuggaggacuccaugcug

SEQ ID NO: 16576 - RNA, 22 nt, Homo sapiens
cgaaaacagcaauuaccuuugc

SEQ ID NO: 16577 - RNA, 22 nt, Homo sapiens
agacuucccauuugaagguggc

SEQ ID NO: 16578 - RNA, 24 nt, Homo sapiens
gaccuggacauguuugugcccagu

SEQ ID NO: 16579 - RNA, 23 nt, Homo sapiens
aucccuugcaggggcuguugggu

SEQ ID NO: 16580 - RNA, 21 nt, Homo sapiens
cacaagguauugguauuaccu

SEQ ID NO: 16581 - RNA, 20 nt, Homo sapiens
ggggagcuguggaagcagua

SEQ ID NO: 16582 - RNA, 20 nt, Homo sapiens
ucugcaggguuugcuuugag

SEQ ID NO: 16583 - RNA, 22 nt, Homo sapiens
uaacacugucugguaaagaugg

SEQ ID NO: 16584 - RNA, 22 nt, Homo sapiens
ugcccuguggacucaguucugg

SEQ ID NO: 16585 - RNA, 22 nt, Homo sapiens
cgcaggggccgggugcucaccg

SEQ ID NO: 16586 - RNA, 22 nt, Homo sapiens
aacuggccuacaaagucccagu

SEQ ID NO: 16587 - RNA, 22 nt, Homo sapiens
aacuggcccucaaagucccgcu

SEQ ID NO: 16588 - RNA, 22 nt, Homo sapiens
uagguaguuucauguuguuggg

SEQ ID NO: 16589 - RNA, 22 nt, Homo sapiens
uaacacugucugguaacgaugu

SEQ ID NO: 16590 - RNA, 22 nt, Homo sapiens
acacagggcuguugugaagacu

SEQ ID NO: 16591 - RNA, 22 nt, Homo sapiens
uguaaacauccucgacuggaag

SEQ ID NO: 16592 - RNA, 22 nt, Homo sapiens
uguaaacauccccgacuggaag

SEQ ID NO: 16593 - RNA, 22 nt, Homo sapiens
uguaaacauccuugacuggaag

SEQ ID NO: 16594 - RNA, 18 nt, Homo sapiens
uucacagggaggugucau

SEQ ID NO: 16595 - RNA, 21 nt, Homo sapiens
aagccugcccggcuccucggg

SEQ ID NO: 16596 - RNA, 23 nt, Homo sapiens
acuugggcacugaaacaaugucc

SEQ ID NO: 16597 - RNA, 22 nt, Homo sapiens
ugcggggcuagggcuaacagca

SEQ ID NO: 16598 - RNA, 20 nt, Homo sapiens
cggcucugggucugugggga

SEQ ID NO: 16599 - RNA, 22 nt, Homo sapiens
cugcccuggcccgagggaccga

SEQ ID NO: 16600 - RNA, 21 nt, Homo sapiens
ccccaccuccucucuccucag

SEQ ID NO: 16601 - RNA, 18 nt, Homo sapiens
aucccaccucugccacca

SEQ ID NO: 16602 - RNA, 21 nt, Homo sapiens
gcccuccgcccgugcaccccg

SEQ ID NO: 16603 - RNA, 22 nt, Homo sapiens
ucagugcacuacagaacuuugu

SEQ ID NO: 16604 - RNA, 22 nt, Homo sapiens
ucagugcaucacagaacuuugu

SEQ ID NO: 16605 - RNA, 23 nt, Homo sapiens
ucuggcuccgugucuucacuccc

SEQ ID NO: 16606 - RNA, 21 nt, Homo sapiens
ucagugcaugacagaacuugg

SEQ ID NO: 16607 - RNA, 22 nt, Homo sapiens
uggagagaaaggcaguuccuga

SEQ ID NO: 16608 - RNA, 22 nt, Homo sapiens
gugaaauguuuaggaccacuag

SEQ ID NO: 16609 - RNA, 22 nt, Homo sapiens
uccuucauuccaccggagucug

SEQ ID NO: 16610 - RNA, 22 nt, Homo sapiens
uguaaacauccucgacuggaag

SEQ ID NO: 16611 - RNA, 22 nt, Homo sapiens
uguaaacauccccgacuggaag

SEQ ID NO: 16612 - RNA, 22 nt, Homo sapiens
uguaaacauccuugacuggaag

SEQ ID NO: 16613 - RNA, 22 nt, Homo sapiens
uaaugccccuaaaaauccuuau

SEQ ID NO: 16614 - RNA, 23 nt, Homo sapiens
ucuuggaguaggucauugggugg

SEQ ID NO: 16615 - RNA, 20 nt, Homo sapiens
cugcaaagggaagcccuuuc

SEQ ID NO: 16616 - RNA, 20 nt, Homo sapiens
cugcaaagggaagcccuuuc

SEQ ID NO: 16617 - RNA, 22 nt, Homo sapiens
ccucccacacccaaggcuugca

SEQ ID NO: 16618 - RNA, 20 nt, Homo sapiens
cggcucugggucugugggga

SEQ ID NO: 16619 - RNA, 21 nt, Homo sapiens
ccgucgccgccacccgagccg

SEQ ID NO: 16620 - RNA, 23 nt, Homo sapiens
ccugcagcgacuugauggcuucc

SEQ ID NO: 16621 - RNA, 20 nt, Homo sapiens
ucugcaggguuugcuuugag

SEQ ID NO: 16622 - RNA, 18 nt, Homo sapiens
ucagcuggcccucauuuc

SEQ ID NO: 16623 - RNA, 21 nt, Homo sapiens
cggcggggacggcgauugguc

SEQ ID NO: 16624 - RNA, 23 nt, Homo sapiens
aaugacacgaucacucccguuga

SEQ ID NO: 16625 - RNA, 23 nt, Homo sapiens
ugugcuugcucgucccgcccgca

SEQ ID NO: 16626 - RNA, 24 nt, Homo sapiens
ugccugggucucuggccugcgcgu

SEQ ID NO: 16627 - RNA, 22 nt, Homo sapiens
aggcggggcgccgcgggaccgc

SEQ ID NO: 16628 - RNA, 22 nt, Homo sapiens
ugcggggcuagggcuaacagca

SEQ ID NO: 16629 - RNA, 22 nt, Homo sapiens
aggcagcgggguguaguggaua

SEQ ID NO: 16630 - RNA, 20 nt, Homo sapiens
uaaggcacgcggugaaugcc

SEQ ID NO: 16631 - RNA, 22 nt, Homo sapiens
agaaggaaauugaauucauuua

SEQ ID NO: 16632 - RNA, 22 nt, Homo sapiens
uucauucggcuguccagaugua

SEQ ID NO: 16633 - RNA, 20 nt, Homo sapiens
ccuccugcccuccuugcugu

SEQ ID NO: 16634 - RNA, 22 nt, Homo sapiens
uccuucauuccaccggagucug

SEQ ID NO: 16635 - RNA, 20 nt, Homo sapiens
uguuuugauaacaguaaugu

SEQ ID NO: 16636 - RNA, 22 nt, Homo sapiens
acagcaggcacagacaggcagu

SEQ ID NO: 16637 - RNA, 21 nt, Homo sapiens
uucacaguggcuaaguuccgc

SEQ ID NO: 16638 - RNA, 21 nt, Homo sapiens
uucacaguggcuaaguucugc

SEQ ID NO: 16639 - RNA, 22 nt, Homo sapiens
uuauaaagcaaugagacugauu

SEQ ID NO: 16640 - RNA, 22 nt, Homo sapiens
gccugcugggguggaaccuggu

SEQ ID NO: 16641 - RNA, 23 nt, Homo sapiens
gaagugcuucgauuuuggggugu

SEQ ID NO: 16642 - RNA, 22 nt, Homo sapiens
uaugugccuuuggacuacaucg

SEQ ID NO: 16643 - RNA, 21 nt, Homo sapiens
uaaggcacccuucugaguaga

SEQ ID NO: 16644 - RNA, 22 nt, Homo sapiens
agucauuggaggguuugagcag

SEQ ID NO: 16645 - RNA, 21 nt, Homo sapiens
uggaggagaaggaaggugaug

SEQ ID NO: 16646 - RNA, 21 nt, Homo sapiens
uacucaaaaagcugucaguca

SEQ ID NO: 16647 - RNA, 22 nt, Homo sapiens
ugugcgcagggagaccucuccc

SEQ ID NO: 16648 - RNA, 21 nt, Homo sapiens
ccccaccuccucucuccucag

SEQ ID NO: 16649 - RNA, 22 nt, Homo sapiens
acaggugagguucuugggagcc

SEQ ID NO: 16650 - RNA, 23 nt, Homo sapiens
ucuggcuccgugucuucacuccc

SEQ ID NO: 16651 - RNA, 21 nt, Homo sapiens
aacaggugacugguuagacaa

SEQ ID NO: 16652 - RNA, 20 nt, Homo sapiens
uaaagagcccuguggagaca

SEQ ID NO: 16653 - RNA, 22 nt, Homo sapiens
uauggcacugguagaauucacu

SEQ ID NO: 16654 - RNA, 23 nt, Homo sapiens
aggaccugcgggacaagauucuu

SEQ ID NO: 16655 - RNA, 22 nt, Homo sapiens
ugauugguacgucuguggguag

SEQ ID NO: 16656 - RNA, 19 nt, Homo sapiens
aggcacggugucagcaggc

SEQ ID NO: 16657 - RNA, 20 nt, Homo sapiens
cggcucugggucugugggga

SEQ ID NO: 16658 - RNA, 21 nt, Homo sapiens
uggaggagaaggaaggugaug

SEQ ID NO: 16659 - RNA, 17 nt, Homo sapiens
ucgccuccuccucuccc

SEQ ID NO: 16660 - RNA, 21 nt, Homo sapiens
ugcaggaccaagaugagcccu

SEQ ID NO: 16661 - RNA, 22 nt, Homo sapiens
acucggcguggcgucggucgug

SEQ ID NO: 16662 - RNA, 22 nt, Homo sapiens
cucggcgcggggcgcgggcucc

SEQ ID NO: 16663 - RNA, 21 nt, Homo sapiens
gcccuccgcccgugcaccccg

SEQ ID NO: 16664 - RNA, 23 nt, Homo sapiens
ucuggcuccgugucuucacuccc

SEQ ID NO: 16665 - RNA, 21 nt, Homo sapiens
cggcggggacggcgauugguc

SEQ ID NO: 16666 - RNA, 22 nt, Homo sapiens
cccugugcccggcccacuucug

SEQ ID NO: 16667 - RNA, 22 nt, Homo sapiens
cauugcacuugucucggucuga

SEQ ID NO: 16668 - RNA, 22 nt, Homo sapiens
ggggguccccggugcucggauc

SEQ ID NO: 16669 - RNA, 25 nt, Homo sapiens
ggcggagggaaguagguccguuggu

SEQ ID NO: 16670 - RNA, 22 nt, Homo sapiens
aggcggggcgccgcgggaccgc

SEQ ID NO: 16671 - RNA, 22 nt, Homo sapiens
ugcggggcuagggcuaacagca

SEQ ID NO: 16672 - RNA, 21 nt, Homo sapiens
cgcgggugcuuacugacccuu

SEQ ID NO: 16673 - RNA, 23 nt, Homo sapiens
guccaguuuucccaggaaucccu

SEQ ID NO: 16674 - RNA, 23 nt, Homo sapiens
ucuggcuccgugucuucacuccc

SEQ ID NO: 16675 - RNA, 22 nt, Homo sapiens
uguaaacauccuacacucagcu

SEQ ID NO: 16676 - RNA, 23 nt, Homo sapiens
ugaggggcagagagcgagacuuu

SEQ ID NO: 16677 - RNA, 22 nt, Homo sapiens
ccucccacacccaaggcuugca

SEQ ID NO: 16678 - RNA, 21 nt, Homo sapiens
ucccacguuguggcccagcag

SEQ ID NO: 16679 - RNA, 23 nt, Homo sapiens
cgggucggaguuagcucaagcgg

SEQ ID NO: 16680 - RNA, 22 nt, Homo sapiens
caaagugccucccuuuagagug

SEQ ID NO: 16681 - RNA, 27 nt, Homo sapiens
accuucuuguauaagcacugugcuaaa

SEQ ID NO: 16682 - RNA, 23 nt, Homo sapiens
uggaguccaggaaucugcauuuu

SEQ ID NO: 16683 - RNA, 22 nt, Homo sapiens
uucuggaauucugugugaggga

SEQ ID NO: 16684 - RNA, 22 nt, Homo sapiens
aagcccuuaccccaaaaagcau

SEQ ID NO: 16685 - RNA, 23 nt, Homo sapiens
ucuggcuccgugucuucacuccc

SEQ ID NO: 16686 - RNA, 22 nt, Homo sapiens
uuuugcaauauguuccugaaua

SEQ ID NO: 16687 - RNA, 21 nt, Homo sapiens
cuucuugugcucuaggauugu

SEQ ID NO: 16688 - RNA, 22 nt, Homo sapiens
gucccucuccaaaugugucuug

SEQ ID NO: 16689 - RNA, 22 nt, Homo sapiens
ugcggggcuagggcuaacagca

SEQ ID NO: 16690 - RNA, 18 nt, Homo sapiens
ucagcuggcccucauuuc

SEQ ID NO: 16691 - RNA, 23 nt, Homo sapiens
uaaggugcaucuagugcagauag

SEQ ID NO: 16692 - RNA, 21 nt, Homo sapiens
cggcggggacggcgauugguc

SEQ ID NO: 16693 - RNA, 22 nt, Homo sapiens
aagcugccaguugaagaacugu

SEQ ID NO: 16694 - RNA, 21 nt, Homo sapiens
aggggugcuaucugugauuga

SEQ ID NO: 16695 - RNA, 22 nt, Homo sapiens
ugagaaccacgucugcucugag

SEQ ID NO: 16696 - RNA, 22 nt, Homo sapiens
aggcggggcgccgcgggaccgc

SEQ ID NO: 16697 - RNA, 23 nt, Homo sapiens
uggugcggagagggcccacagug

SEQ ID NO: 16698 - RNA, 22 nt, Homo sapiens
cugaagcucagagggcucugau

SEQ ID NO: 16699 - RNA, 23 nt, Homo sapiens
uuauugcuuaagaauacgcguag

SEQ ID NO: 16700 - RNA, 22 nt, Homo sapiens
ucagugcacuacagaacuuugu

SEQ ID NO: 16701 - RNA, 22 nt, Homo sapiens
uauacaagggcagacucucucu

SEQ ID NO: 16702 - RNA, 21 nt, Homo sapiens
aucauagaggaaaauccacgu

SEQ ID NO: 16703 - RNA, 22 nt, Homo sapiens
uauacaagggcaagcucucugu

SEQ ID NO: 16704 - RNA, 20 nt, Homo sapiens
auuccuagaaauuguucaua

SEQ ID NO: 16705 - RNA, 23 nt, Homo sapiens
caaagcgcuucucuuuagagugu

SEQ ID NO: 16706 - RNA, 21 nt, Homo sapiens
cuccagagggaaguacuuucu

SEQ ID NO: 16707 - RNA, 21 nt, Homo sapiens
cuccagagggaugcacuuucu

SEQ ID NO: 16708 - RNA, 22 nt, Homo sapiens
acuuguaugcuagcucagguag

SEQ ID NO: 16709 - RNA, 22 nt, Homo sapiens
aaauuauuguacaucggaugag

SEQ ID NO: 16710 - RNA, 22 nt, Homo sapiens
uggagugugacaaugguguuug

SEQ ID NO: 16711 - RNA, 17 nt, Homo sapiens
ucgccuccuccucuccc

SEQ ID NO: 16712 - RNA, 20 nt, Homo sapiens
ucguuugccuuuuucugcuu

SEQ ID NO: 16713 - RNA, 21 nt, Homo sapiens
cggcggggacggcgauugguc

SEQ ID NO: 16714 - RNA, 22 nt, Homo sapiens
cauugcacuugucucggucuga

SEQ ID NO: 16715 - RNA, 22 nt, Homo sapiens
uccgagccugggucucccucuu

SEQ ID NO: 16716 - RNA, 22 nt, Homo sapiens
ggggguccccggugcucggauc

SEQ ID NO: 16717 - RNA, 25 nt, Homo sapiens
ggcggagggaaguagguccguuggu

SEQ ID NO: 16718 - RNA, 22 nt, Homo sapiens
aggcggggcgccgcgggaccgc

SEQ ID NO: 16719 - RNA, 20 nt, Homo sapiens
accaggaggcugaggccccu

SEQ ID NO: 16720 - RNA, 22 nt, Homo sapiens
ugcggggcuagggcuaacagca

SEQ ID NO: 16721 - RNA, 23 nt, Homo sapiens
cgggucggaguuagcucaagcgg

SEQ ID NO: 16722 - RNA, 17 nt, Homo sapiens
ucccaccgcugccaccc

SEQ ID NO: 16723 - RNA, 21 nt, Homo sapiens
aggggugcuaucugugauuga

SEQ ID NO: 16724 - RNA, 23 nt, Homo sapiens
uagcagcgggaacaguucugcag

SEQ ID NO: 16725 - RNA, 23 nt, Homo sapiens
aucgcugcgguugcgagcgcugu

SEQ ID NO: 16726 - RNA, 23 nt, Homo sapiens
uggugcggagagggcccacagug

SEQ ID NO: 16727 - RNA, 17 nt, Homo sapiens
ucucgcuggggccucca

SEQ ID NO: 16728 - RNA, 22 nt, Homo sapiens
ugcggggcuagggcuaacagca

SEQ ID NO: 16729 - RNA, 21 nt, Homo sapiens
uggaggagaaggaaggugaug

SEQ ID NO: 16730 - RNA, 20 nt, Homo sapiens
ggggagcuguggaagcagua

SEQ ID NO: 16731 - RNA, 21 nt, Homo sapiens
uacaguacugugauaacugaa

SEQ ID NO: 16732 - RNA, 23 nt, Homo sapiens
ccugcagcgacuugauggcuucc

SEQ ID NO: 16733 - RNA, 21 nt, Homo sapiens
gugccagcugcagugggggag

SEQ ID NO: 16734 - RNA, 20 nt, Homo sapiens
ucugcaggguuugcuuugag

SEQ ID NO: 16735 - RNA, 18 nt, Homo sapiens
ucagcuggcccucauuuc

SEQ ID NO: 16736 - RNA, 18 nt, Homo sapiens
ucagcuggcccucauuuc

SEQ ID NO: 16737 - RNA, 20 nt, Homo sapiens
ugagcccuguccucccgcag

SEQ ID NO: 16738 - RNA, 22 nt, Homo sapiens
uggagagaaaggcaguuccuga

SEQ ID NO: 16739 - RNA, 23 nt, Homo sapiens
caacggaaucccaaaagcagcug

SEQ ID NO: 16740 - RNA, 23 nt, Homo sapiens
uaauacugccggguaaugaugga

SEQ ID NO: 16741 - RNA, 24 nt, Homo sapiens
aauccuuggaaccuaggugugagu

SEQ ID NO: 16742 - RNA, 21 nt, Homo sapiens
auccuugcuaucugggugcua

SEQ ID NO: 16743 - RNA, 23 nt, Homo sapiens
agugccugagggaguaagagccc

SEQ ID NO: 16744 - RNA, 17 nt, Homo sapiens
ucucgcuggggccucca

SEQ ID NO: 16745 - RNA, 22 nt, Homo sapiens
acuccagccccacagccucagc

SEQ ID NO: 16746 - RNA, 20 nt, Homo sapiens
uaaagagcccuguggagaca

SEQ ID NO: 16747 - RNA, 22 nt, Homo sapiens
uuugaggcuacagugagaugug

SEQ ID NO: 16748 - RNA, 22 nt, Homo sapiens
cagugcaaugaugaaagggcau

SEQ ID NO: 16749 - RNA, 21 nt, Homo sapiens
gcccuccgcccgugcaccccg

SEQ ID NO: 16750 - RNA, 21 nt, Homo sapiens
cucccacaugcaggguuugca

SEQ ID NO: 16751 - RNA, 20 nt, Homo sapiens
ccccagggcgacgcggcggg

SEQ ID NO: 16752 - RNA, 22 nt, Homo sapiens
gaggguuggguggaggcucucc

SEQ ID NO: 16753 - RNA, 21 nt, Homo sapiens
agggcccccccucaauccugu

SEQ ID NO: 16754 - RNA, 22 nt, Homo sapiens
uaugugggaugguaaaccgcuu

SEQ ID NO: 16755 - RNA, 22 nt, Homo sapiens
uaaugccccuaaaaauccuuau

SEQ ID NO: 16756 - RNA, 18 nt, Homo sapiens
ugcuuccuuucagagggu

SEQ ID NO: 16757 - RNA, 22 nt, Homo sapiens
aucuggagguaagaagcacuuu

SEQ ID NO: 16758 - RNA, 19 nt, Homo sapiens
ugagcugcuguaccaaaau

SEQ ID NO: 16759 - RNA, 25 nt, Homo sapiens
aggggugguguugggacagcuccgu

SEQ ID NO: 16760 - RNA, 23 nt, Homo sapiens
aggaagcccuggaggggcuggag

SEQ ID NO: 16761 - RNA, 22 nt, Homo sapiens
caaagugccucccuuuagagug

SEQ ID NO: 16762 - RNA, 20 nt, Homo sapiens
ggggagcuguggaagcagua

SEQ ID NO: 16763 - RNA, 21 nt, Homo sapiens
gugccagcugcagugggggag

SEQ ID NO: 16764 - RNA, 20 nt, Homo sapiens
ucugcaggguuugcuuugag

SEQ ID NO: 16765 - RNA, 20 nt, Homo sapiens
ucugcaggguuugcuuugag

SEQ ID NO: 16766 - RNA, 21 nt, Homo sapiens
ccccaccuccucucuccucag

SEQ ID NO: 16767 - RNA, 20 nt, Homo sapiens
ugagcccuguccucccgcag

SEQ ID NO: 16768 - RNA, 21 nt, Homo sapiens
uccuucugcuccgucccccag

SEQ ID NO: 16769 - RNA, 21 nt, Homo sapiens
cauaaaguagaaagcacuacu

SEQ ID NO: 16770 - RNA, 23 nt, Homo sapiens
ucuggcuccgugucuucacuccc

SEQ ID NO: 16771 - RNA, 23 nt, Homo sapiens
uaaggugcaucuagugcagauag

SEQ ID NO: 16772 - RNA, 22 nt, Homo sapiens
aguggggaacccuuccaugagg

SEQ ID NO: 16773 - RNA, 21 nt, Homo sapiens
aagccugcccggcuccucggg

SEQ ID NO: 16774 - RNA, 21 nt, Homo sapiens
guggcugcacucacuuccuuc

SEQ ID NO: 16775 - RNA, 20 nt, Homo sapiens
ggggagcuguggaagcagua

SEQ ID NO: 16776 - RNA, 21 nt, Homo sapiens
cccggagccaggaugcagcuc

SEQ ID NO: 16777 - RNA, 18 nt, Homo sapiens
aucccaccucugccacca

SEQ ID NO: 16778 - RNA, 22 nt, Homo sapiens
acucggcguggcgucggucgug

SEQ ID NO: 16779 - RNA, 22 nt, Homo sapiens
cucggcgcggggcgcgggcucc

SEQ ID NO: 16780 - RNA, 23 nt, Homo sapiens
cggcccgggcugcugcuguuccu

SEQ ID NO: 16781 - RNA, 21 nt, Homo sapiens
uccugcgcgucccagaugccc

SEQ ID NO: 16782 - RNA, 22 nt, Homo sapiens
cgcaggggccgggugcucaccg

SEQ ID NO: 16783 - RNA, 22 nt, Homo sapiens
cauugcacuugucucggucuga

SEQ ID NO: 16784 - RNA, 19 nt, Homo sapiens
ugagcugcuguaccaaaau

SEQ ID NO: 16785 - RNA, 25 nt, Homo sapiens
aggggugguguugggacagcuccgu

SEQ ID NO: 16786 - RNA, 23 nt, Homo sapiens
cucucaccacugcccucccacag

SEQ ID NO: 16787 - RNA, 22 nt, Homo sapiens
ccucuuccccuugucucuccag

SEQ ID NO: 16788 - RNA, 22 nt, Homo sapiens
uucuggaauucugugugaggga

SEQ ID NO: 16789 - RNA, 22 nt, Homo sapiens
aagcccuuaccccaaaaagcau

SEQ ID NO: 16790 - RNA, 18 nt, Homo sapiens
uugagaaggaggcugcug

SEQ ID NO: 16791 - RNA, 22 nt, Homo sapiens
uauguaauaugguccacaucuu

SEQ ID NO: 16792 - RNA, 23 nt, Homo sapiens
uaauccuugcuaccugggugaga

SEQ ID NO: 16793 - RNA, 21 nt, Homo sapiens
auccuugcuaucugggugcua

SEQ ID NO: 16794 - RNA, 22 nt, Homo sapiens
uggugggcacagaaucuggacu

SEQ ID NO: 16795 - RNA, 19 nt, Homo sapiens
agguugacauacguuuccc

SEQ ID NO: 16796 - RNA, 22 nt, Homo sapiens
cugcccuggcccgagggaccga

SEQ ID NO: 16797 - RNA, 22 nt, Homo sapiens
uggugguuuacaaaguaauuca

SEQ ID NO: 16798 - RNA, 17 nt, Homo sapiens
ucgccuccuccucuccc

SEQ ID NO: 16799 - RNA, 21 nt, Homo sapiens
cggcggggacggcgauugguc

SEQ ID NO: 16800 - RNA, 21 nt, Homo sapiens
gccccugggccuauccuagaa

SEQ ID NO: 16801 - RNA, 22 nt, Homo sapiens
uggugggcacagaaucuggacu

SEQ ID NO: 16802 - RNA, 19 nt, Homo sapiens
aggcugcggaauucaggac

SEQ ID NO: 16803 - RNA, 25 nt, Homo sapiens
aggggugguguugggacagcuccgu

SEQ ID NO: 16804 - RNA, 22 nt, Homo sapiens
uggugggccgcagaacaugugc

SEQ ID NO: 16805 - RNA, 22 nt, Homo sapiens
aggcggggcgccgcgggaccgc

SEQ ID NO: 16806 - RNA, 23 nt, Homo sapiens
uggugcggagagggcccacagug

SEQ ID NO: 16807 - RNA, 22 nt, Homo sapiens
ugcggggcuagggcuaacagca

SEQ ID NO: 16808 - RNA, 21 nt, Homo sapiens
uggaggagaaggaaggugaug

SEQ ID NO: 16809 - RNA, 21 nt, Homo sapiens
cgcgggugcuuacugacccuu

SEQ ID NO: 16810 - RNA, 19 nt, Homo sapiens
gggcgccugugaucccaac

SEQ ID NO: 16811 - RNA, 23 nt, Homo sapiens
aucgcugcgguugcgagcgcugu

SEQ ID NO: 16812 - RNA, 22 nt, Homo sapiens
ugcggggcuagggcuaacagca

SEQ ID NO: 16813 - RNA, 20 nt, Homo sapiens
cggcucugggucugugggga

SEQ ID NO: 16814 - RNA, 21 nt, Homo sapiens
uaaagugcugacagugcagau

SEQ ID NO: 16815 - RNA, 21 nt, Homo sapiens
uugcucacuguucuucccuag

SEQ ID NO: 16816 - RNA, 18 nt, Homo sapiens
cgggcguggugguggggg

SEQ ID NO: 16817 - RNA, 22 nt, Homo sapiens
gcccgcguguggagccaggugu

SEQ ID NO: 16818 - RNA, 18 nt, Homo sapiens
uccagugcccuccucucc

SEQ ID NO: 16819 - RNA, 21 nt, Homo sapiens
cggcggggacggcgauugguc

SEQ ID NO: 16820 - RNA, 22 nt, Homo sapiens
cgcaggggccgggugcucaccg

SEQ ID NO: 16821 - RNA, 19 nt, Homo sapiens
gagccaguuggacaggagc

SEQ ID NO: 16822 - RNA, 21 nt, Homo sapiens
guggcugcacucacuuccuuc

SEQ ID NO: 16823 - RNA, 22 nt, Homo sapiens
aggcggggcgccgcgggaccgc

SEQ ID NO: 16824 - RNA, 22 nt, Homo sapiens
ugcggggcuagggcuaacagca

SEQ ID NO: 16825 - RNA, 22 nt, Homo sapiens
ugcggggcuagggcuaacagca

SEQ ID NO: 16826 - RNA, 23 nt, Homo sapiens
ucugcucauaccccaugguuucu

SEQ ID NO: 16827 - RNA, 22 nt, Homo sapiens
cacuggcuccuuucuggguaga

SEQ ID NO: 16828 - RNA, 22 nt, Homo sapiens
cagugcaauguuaaaagggcau

SEQ ID NO: 16829 - RNA, 22 nt, Homo sapiens
ucagugcacuacagaacuuugu

SEQ ID NO: 16830 - RNA, 22 nt, Homo sapiens
ucagugcaucacagaacuuugu

SEQ ID NO: 16831 - RNA, 21 nt, Homo sapiens
ucagugcaugacagaacuugg

SEQ ID NO: 16832 - RNA, 23 nt, Homo sapiens
aacauucaacgcugucggugagu

SEQ ID NO: 16833 - RNA, 23 nt, Homo sapiens
aacauucauugcugucggugggu

SEQ ID NO: 16834 - RNA, 22 nt, Homo sapiens
aacauucaaccugucggugagu

SEQ ID NO: 16835 - RNA, 23 nt, Homo sapiens
aacauucauuguugucggugggu

SEQ ID NO: 16836 - RNA, 21 nt, Homo sapiens
aucacauugccagggauuucc

SEQ ID NO: 16837 - RNA, 21 nt, Homo sapiens
aucacauugccagggauuacc

SEQ ID NO: 16838 - RNA, 22 nt, Homo sapiens
cuggcccucucugcccuuccgu

SEQ ID NO: 16839 - RNA, 21 nt, Homo sapiens
gugcauuguaguugcauugca

SEQ ID NO: 16840 - RNA, 20 nt, Homo sapiens
gugcauugcuguugcauugc

SEQ ID NO: 16841 - RNA, 21 nt, Homo sapiens
guucaaauccagaucuauaac

SEQ ID NO: 16842 - RNA, 21 nt, Homo sapiens
uggaggagaaggaaggugaug

SEQ ID NO: 16843 - RNA, 20 nt, Homo sapiens
ggggagcuguggaagcagua

SEQ ID NO: 16844 - RNA, 22 nt, Homo sapiens
acucggcguggcgucggucgug

SEQ ID NO: 16845 - RNA, 19 nt, Homo sapiens
gaugaugcugcugaugcug

SEQ ID NO: 16846 - RNA, 22 nt, Homo sapiens
cauugcacuugucucggucuga

SEQ ID NO: 16847 - RNA, 22 nt, Homo sapiens
uggcagugucuuagcugguugu

SEQ ID NO: 16848 - RNA, 22 nt, Homo sapiens
uacccauugcauaucggaguug

SEQ ID NO: 16849 - RNA, 22 nt, Homo sapiens
gguggcccggccgugccugagg

SEQ ID NO: 16850 - RNA, 20 nt, Homo sapiens
accaggaggcugaggccccu

SEQ ID NO: 16851 - RNA, 20 nt, Homo sapiens
guccgcucggcgguggccca

SEQ ID NO: 16852 - RNA, 26 nt, Homo sapiens
aaguaguugguuuguaugagaugguu

SEQ ID NO: 16853 - RNA, 22 nt, Homo sapiens
cagugguuuuacccuaugguag

SEQ ID NO: 16854 - RNA, 21 nt, Homo sapiens
gugcauuguaguugcauugca

SEQ ID NO: 16855 - RNA, 20 nt, Homo sapiens
gugcauugcuguugcauugc

SEQ ID NO: 16856 - RNA, 22 nt, Homo sapiens
ugaaacauacacgggaaaccuc

SEQ ID NO: 16857 - RNA, 22 nt, Homo sapiens
gagugccuucuuuuggagcguu

SEQ ID NO: 16858 - RNA, 22 nt, Homo sapiens
aagugccuccuuuuagaguguu

SEQ ID NO: 16859 - RNA, 22 nt, Homo sapiens
ugagaaccacgucugcucugag

SEQ ID NO: 16860 - RNA, 21 nt, Homo sapiens
aaacuacugaaaaucaaagau

SEQ ID NO: 16861 - RNA, 23 nt, Homo sapiens
ucuuugguuaucuagcuguauga

SEQ ID NO: 16862 - RNA, 21 nt, Homo sapiens
ucguggccuggucuccauuau

SEQ ID NO: 16863 - RNA, 22 nt, Homo sapiens
cagugcaaugaugaaagggcau

SEQ ID NO: 16864 - RNA, 22 nt, Homo sapiens
uggagagaaaggcaguuccuga

SEQ ID NO: 16865 - RNA, 21 nt, Homo sapiens
cggcggggacggcgauugguc

SEQ ID NO: 16866 - RNA, 21 nt, Homo sapiens
gguuugguccuagccuuucua

SEQ ID NO: 16867 - RNA, 22 nt, Homo sapiens
uccagcaucagugauuuuguug

SEQ ID NO: 16868 - RNA, 23 nt, Homo sapiens
agguuacccgagcaacuuugcau

SEQ ID NO: 16869 - RNA, 23 nt, Homo sapiens
aucgcugcgguugcgagcgcugu

SEQ ID NO: 16870 - RNA, 22 nt, Homo sapiens
aggcggggcgccgcgggaccgc

SEQ ID NO: 16871 - RNA, 23 nt, Homo sapiens
cgggucggaguuagcucaagcgg

SEQ ID NO: 16872 - RNA, 22 nt, Homo sapiens
ugagccccugugccgcccccag

SEQ ID NO: 16873 - RNA, 18 nt, Homo sapiens
gucccuguucaggcgcca

SEQ ID NO: 16874 - RNA, 25 nt, Homo sapiens
cccccacaaccgcgcuugacuagcu

SEQ ID NO: 16875 - RNA, 22 nt, Homo sapiens
aaaucucugcaggcaaauguga

SEQ ID NO: 16876 - RNA, 22 nt, Homo sapiens
ugucaguuugucaaauacccca

SEQ ID NO: 16877 - RNA, 22 nt, Homo sapiens
uggcucaguucagcaggaacag

SEQ ID NO: 16878 - RNA, 21 nt, Homo sapiens
uucacaguggcuaaguuccgc

SEQ ID NO: 16879 - RNA, 23 nt, Homo sapiens
ucccuguccuccaggagcucacg

SEQ ID NO: 16880 - RNA, 22 nt, Homo sapiens
ucagcaaacauuuauugugugc

SEQ ID NO: 16881 - RNA, 21 nt, Homo sapiens
uacucaaaaagcugucaguca

SEQ ID NO: 16882 - RNA, 18 nt, Homo sapiens
cagggaggugaaugugau

SEQ ID NO: 16883 - RNA, 23 nt, Homo sapiens
ucuggcuccgugucuucacuccc

SEQ ID NO: 16884 - RNA, 22 nt, Homo sapiens
uauguaauaugguccacaucuu

SEQ ID NO: 16885 - RNA, 22 nt, Homo sapiens
agaggcuggccgugaugaauuc

SEQ ID NO: 16886 - RNA, 19 nt, Homo sapiens
agguugacauacguuuccc

SEQ ID NO: 16887 - RNA, 19 nt, Homo sapiens
aggcugcggaauucaggac

SEQ ID NO: 16888 - RNA, 23 nt, Homo sapiens
gcgaggaccccucggggucugac

SEQ ID NO: 16889 - RNA, 22 nt, Homo sapiens
ggggguccccggugcucggauc

SEQ ID NO: 16890 - RNA, 21 nt, Homo sapiens
guggcugcacucacuuccuuc

SEQ ID NO: 16891 - RNA, 21 nt, Homo sapiens
ccccaccuccucucuccucag

SEQ ID NO: 16892 - RNA, 22 nt, Homo sapiens
uggagugugacaaugguguuug

SEQ ID NO: 16893 - RNA, 22 nt, Homo sapiens
uauggcacugguagaauucacu

SEQ ID NO: 16894 - RNA, 22 nt, Homo sapiens
uguaacagcaacuccaugugga

SEQ ID NO: 16895 - RNA, 22 nt, Homo sapiens
aucacacaaaggcaacuuuugu

SEQ ID NO: 16896 - RNA, 23 nt, Homo sapiens
ucuuggaguaggucauugggugg

SEQ ID NO: 16897 - RNA, 22 nt, Homo sapiens
uaugugccuuuggacuacaucg

SEQ ID NO: 16898 - RNA, 22 nt, Homo sapiens
aguggggaacccuuccaugagg

SEQ ID NO: 16899 - RNA, 23 nt, Homo sapiens
gacacgggcgacagcugcggccc

SEQ ID NO: 16900 - RNA, 20 nt, Homo sapiens
ggggagcuguggaagcagua

SEQ ID NO: 16901 - RNA, 22 nt, Homo sapiens
ucaccagcccuguguucccuag

SEQ ID NO: 16902 - RNA, 22 nt, Homo sapiens
acgcccuucccccccuucuuca

SEQ ID NO: 16903 - RNA, 18 nt, Homo sapiens
cgggcguggugguggggg

SEQ ID NO: 16904 - RNA, 23 nt, Homo sapiens
agcugguguugugaaucaggccg

SEQ ID NO: 16905 - RNA, 21 nt, Homo sapiens
cggcggggacggcgauugguc

SEQ ID NO: 16906 - RNA, 25 nt, Homo sapiens
cccccacaaccgcgcuugacuagcu

SEQ ID NO: 16907 - RNA, 22 nt, Homo sapiens
agaggcuggccgugaugaauuc

SEQ ID NO: 16908 - RNA, 23 nt, Homo sapiens
agugccugagggaguaagagccc

SEQ ID NO: 16909 - RNA, 24 nt, Homo sapiens
ugccugggucucuggccugcgcgu

SEQ ID NO: 16910 - RNA, 22 nt, Homo sapiens
aggcggggcgccgcgggaccgc

SEQ ID NO: 16911 - RNA, 22 nt, Homo sapiens
ugcggggcuagggcuaacagca

SEQ ID NO: 16912 - RNA, 22 nt, Homo sapiens
acuccagccccacagccucagc

SEQ ID NO: 16913 - RNA, 21 nt, Homo sapiens
ccccaccuccucucuccucag

SEQ ID NO: 16914 - RNA, 19 nt, Homo sapiens
auggauaaggcuuuggcuu

SEQ ID NO: 16915 - RNA, 20 nt, Homo sapiens
guguguggaaaugcuucugc

SEQ ID NO: 16916 - RNA, 22 nt, Homo sapiens
cucuagagggaagcacuuucug

SEQ ID NO: 16917 - RNA, 21 nt, Homo sapiens
cucccacaugcaggguuugca

SEQ ID NO: 16918 - RNA, 22 nt, Homo sapiens
aaggagcucacagucuauugag

SEQ ID NO: 16919 - RNA, 22 nt, Homo sapiens
uguaaacauccuacacucagcu

SEQ ID NO: 16920 - RNA, 22 nt, Homo sapiens
uccagcaucagugauuuuguug

SEQ ID NO: 16921 - RNA, 22 nt, Homo sapiens
uugggaucauuuugcauccaua

SEQ ID NO: 16922 - RNA, 22 nt, Homo sapiens
cuuaugcaagauucccuucuac

SEQ ID NO: 16923 - RNA, 22 nt, Homo sapiens
ugaaggucuacugugugccagg

SEQ ID NO: 16924 - RNA, 22 nt, Homo sapiens
ccucccacacccaaggcuugca

SEQ ID NO: 16925 - RNA, 21 nt, Homo sapiens
aacaggugacugguuagacaa

SEQ ID NO: 16926 - RNA, 22 nt, Homo sapiens
gguggcccggccgugccugagg

SEQ ID NO: 16927 - RNA, 23 nt, Homo sapiens
aaggagcuuacaaucuagcuggg

SEQ ID NO: 16928 - RNA, 21 nt, Homo sapiens
uggaggagaaggaaggugaug

SEQ ID NO: 16929 - RNA, 23 nt, Homo sapiens
cugggaucuccggggucuugguu

SEQ ID NO: 16930 - RNA, 20 nt, Homo sapiens
ggggagcuguggaagcagua

SEQ ID NO: 16931 - RNA, 22 nt, Homo sapiens
augggugaauuuguagaaggau

SEQ ID NO: 16932 - RNA, 23 nt, Homo sapiens
uauggcuuuuuauuccuauguga

SEQ ID NO: 16933 - RNA, 22 nt, Homo sapiens
ugagaacugaauuccauggguu

SEQ ID NO: 16934 - RNA, 22 nt, Homo sapiens
ugagaaccacgucugcucugag

SEQ ID NO: 16935 - RNA, 23 nt, Homo sapiens
ugaguaccgccaugucuguuggg

SEQ ID NO: 16936 - RNA, 22 nt, Homo sapiens
uagcuuaucagacugauguuga

SEQ ID NO: 16937 - RNA, 22 nt, Homo sapiens
ucaggcucaguccccucccgau

SEQ ID NO: 16938 - RNA, 24 nt, Homo sapiens
uucuccaaaagaaagcacuuucug

SEQ ID NO: 16939 - RNA, 22 nt, Homo sapiens
aagugccuccuuuuagaguguu

SEQ ID NO: 16940 - RNA, 21 nt, Homo sapiens
uaauuuuauguauaagcuagu

SEQ ID NO: 16941 - RNA, 22 nt, Homo sapiens
gagcuuauucauaaaagugcag

SEQ ID NO: 16942 - RNA, 22 nt, Homo sapiens
aaauuauuguacaucggaugag

SEQ ID NO: 16943 - RNA, 17 nt, Homo sapiens
ucgccuccuccucuccc

SEQ ID NO: 16944 - RNA, 18 nt, Homo sapiens
cagggaggugaaugugau

SEQ ID NO: 16945 - RNA, 23 nt, Homo sapiens
ucuggcuccgugucuucacuccc

SEQ ID NO: 16946 - RNA, 22 nt, Homo sapiens
cccugugcccggcccacuucug

SEQ ID NO: 16947 - RNA, 22 nt, Homo sapiens
uggcaguguauuguuagcuggu

SEQ ID NO: 16948 - RNA, 22 nt, Homo sapiens
cuggcccucucugcccuuccgu

SEQ ID NO: 16949 - RNA, 21 nt, Homo sapiens
uggguuuacguugggagaacu

SEQ ID NO: 16950 - RNA, 17 nt, Homo sapiens
ucucgcuggggccucca

SEQ ID NO: 16951 - RNA, 21 nt, Homo sapiens
ucguggccuggucuccauuau

SEQ ID NO: 16952 - RNA, 19 nt, Homo sapiens
gaugaugcugcugaugcug

SEQ ID NO: 16953 - RNA, 22 nt, Homo sapiens
uugcauagucacaaaagugauc

SEQ ID NO: 16954 - RNA, 22 nt, Homo sapiens
uaaugccccuaaaaauccuuau

SEQ ID NO: 16955 - RNA, 22 nt, Homo sapiens
aucuggagguaagaagcacuuu

SEQ ID NO: 16956 - RNA, 23 nt, Homo sapiens
aguauguucuuccaggacagaac

SEQ ID NO: 16957 - RNA, 23 nt, Homo sapiens
caagucuuauuugagcaccuguu

SEQ ID NO: 16958 - RNA, 21 nt, Homo sapiens
cuuuuugcggucugggcuugc

SEQ ID NO: 16959 - RNA, 22 nt, Homo sapiens
uugcauagucacaaaagugauc

SEQ ID NO: 16960 - RNA, 22 nt, Homo sapiens
cuuaugcaagauucccuucuac

SEQ ID NO: 16961 - RNA, 22 nt, Homo sapiens
aaaaguacuugcggauuuugcu

SEQ ID NO: 16962 - RNA, 22 nt, Homo sapiens
uagcaaaaacugcaguuacuuu

SEQ ID NO: 16963 - RNA, 23 nt, Homo sapiens
aguauguucuuccaggacagaac

SEQ ID NO: 16964 - RNA, 20 nt, Homo sapiens
ucugcaggguuugcuuugag

SEQ ID NO: 16965 - RNA, 20 nt, Homo sapiens
cgugccacccuuuuccccag

SEQ ID NO: 16966 - RNA, 22 nt, Homo sapiens
uagcagcacauaaugguuugug

SEQ ID NO: 16967 - RNA, 20 nt, Homo sapiens
ccccagggcgacgcggcggg

SEQ ID NO: 16968 - RNA, 22 nt, Homo sapiens
aacuggccuacaaagucccagu

SEQ ID NO: 16969 - RNA, 22 nt, Homo sapiens
aacuggcccucaaagucccgcu

SEQ ID NO: 16970 - RNA, 23 nt, Homo sapiens
acuucaccugguccacuagccgu

SEQ ID NO: 16971 - RNA, 22 nt, Homo sapiens
aggcaguguauuguuagcuggc

SEQ ID NO: 16972 - RNA, 22 nt, Homo sapiens
ugaaggucuacugugugccagg

SEQ ID NO: 16973 - RNA, 22 nt, Homo sapiens
ugugacagauugauaacugaaa

SEQ ID NO: 16974 - RNA, 25 nt, Homo sapiens
aggggugguguugggacagcuccgu

SEQ ID NO: 16975 - RNA, 23 nt, Homo sapiens
ugucacucggcucggcccacuac

SEQ ID NO: 16976 - RNA, 18 nt, Homo sapiens
ucagcuggcccucauuuc

SEQ ID NO: 16977 - RNA, 23 nt, Homo sapiens
uggaguccaggaaucugcauuuu

SEQ ID NO: 16978 - RNA, 23 nt, Homo sapiens
guccaguuuucccaggaaucccu

SEQ ID NO: 16979 - RNA, 21 nt, Homo sapiens
ccuggaaacacugagguugug

SEQ ID NO: 16980 - RNA, 23 nt, Homo sapiens
cggcccgggcugcugcuguuccu

SEQ ID NO: 16981 - RNA, 23 nt, Homo sapiens
ugaggggcagagagcgagacuuu

SEQ ID NO: 16982 - RNA, 19 nt, Homo sapiens
gggcgccugugaucccaac

SEQ ID NO: 16983 - RNA, 22 nt, Homo sapiens
ugcggggcuagggcuaacagca

SEQ ID NO: 16984 - RNA, 22 nt, Homo sapiens
guggguacggcccagugggggg

SEQ ID NO: 16985 - RNA, 19 nt, Homo sapiens
gaugaugcugcugaugcug

SEQ ID NO: 16986 - RNA, 22 nt, Homo sapiens
uggagagaaaggcaguuccuga

SEQ ID NO: 16987 - RNA, 22 nt, Homo sapiens
uagguaguuucauguuguuggg

SEQ ID NO: 16988 - RNA, 22 nt, Homo sapiens
uagguaguuuccuguuguuggg

SEQ ID NO: 16989 - RNA, 23 nt, Homo sapiens
uaagugcuuccauguuuugguga

SEQ ID NO: 16990 - RNA, 23 nt, Homo sapiens
uaagugcuuccauguuuuaguag

SEQ ID NO: 16991 - RNA, 23 nt, Homo sapiens
uaagugcuuccauguuucagugg

SEQ ID NO: 16992 - RNA, 23 nt, Homo sapiens
uaagugcuuccauguuugagugu

SEQ ID NO: 16993 - RNA, 17 nt, Homo sapiens
uaagugcuuccaugcuu

SEQ ID NO: 16994 - RNA, 22 nt, Homo sapiens
gcugacuccuaguccagggcuc

SEQ ID NO: 16995 - RNA, 23 nt, Homo sapiens
aaagugcugcgacauuugagcgu

SEQ ID NO: 16996 - RNA, 23 nt, Homo sapiens
gaagugcuucgauuuuggggugu

SEQ ID NO: 16997 - RNA, 21 nt, Homo sapiens
acuggacuuggagucagaagg

SEQ ID NO: 16998 - RNA, 22 nt, Homo sapiens
ucaggcucaguccccucccgau

SEQ ID NO: 16999 - RNA, 22 nt, Homo sapiens
aaagugcuucccuuuggacugu

SEQ ID NO: 17000 - RNA, 21 nt, Homo sapiens
aaagugcuuccuuuuagaggg

SEQ ID NO: 17001 - RNA, 22 nt, Homo sapiens
aaagugcuuccuuuuagagggu

SEQ ID NO: 17002 - RNA, 22 nt, Homo sapiens
aaagugcuucucuuuggugggu

SEQ ID NO: 17003 - RNA, 21 nt, Homo sapiens
aaagugcuuccuuuuugaggg

SEQ ID NO: 17004 - RNA, 22 nt, Homo sapiens
aagugcuuccuuuuagaggguu

SEQ ID NO: 17005 - RNA, 22 nt, Homo sapiens
uacgucaucguugucaucguca

SEQ ID NO: 17006 - RNA, 23 nt, Homo sapiens
acuuacagacaagagccuugcuc

SEQ ID NO: 17007 - RNA, 20 nt, Homo sapiens
cggcucugggucugugggga

SEQ ID NO: 17008 - RNA, 22 nt, Homo sapiens
aggcagcgggguguaguggaua

SEQ ID NO: 17009 - RNA, 22 nt, Homo sapiens
uuuccggcucgcgugggugugu

SEQ ID NO: 17010 - RNA, 24 nt, Homo sapiens
ucccugagacccuuuaaccuguga

SEQ ID NO: 17011 - RNA, 22 nt, Homo sapiens
ucccugagacccuaacuuguga

SEQ ID NO: 17012 - RNA, 23 nt, Homo sapiens
ccucagggcuguagaacagggcu

SEQ ID NO: 17013 - RNA, 17 nt, Homo sapiens
ucgccuccuccucuccc

SEQ ID NO: 17014 - RNA, 22 nt, Homo sapiens
cagugguuuuacccuaugguag

SEQ ID NO: 17015 - RNA, 21 nt, Homo sapiens
uccugcgcgucccagaugccc

SEQ ID NO: 17016 - RNA, 22 nt, Homo sapiens
uggcucaguucagcaggaacag

SEQ ID NO: 17017 - RNA, 20 nt, Homo sapiens
ccucugggcccuuccuccag

SEQ ID NO: 17018 - RNA, 22 nt, Homo sapiens
ucucugggccugugucuuaggc

SEQ ID NO: 17019 - RNA, 25 nt, Homo sapiens
ggcggagggaaguagguccguuggu

SEQ ID NO: 17020 - RNA, 22 nt, Homo sapiens
acuccagccccacagccucagc

SEQ ID NO: 17021 - RNA, 22 nt, Homo sapiens
aggcagcgggguguaguggaua

SEQ ID NO: 17022 - RNA, 24 nt, Homo sapiens
uggggagcugaggcucugggggug

SEQ ID NO: 17023 - RNA, 22 nt, Homo sapiens
uggagagaaaggcaguuccuga

SEQ ID NO: 17024 - RNA, 21 nt, Homo sapiens
cggcggggacggcgauugguc

SEQ ID NO: 17025 - RNA, 22 nt, Homo sapiens
aacuggcccucaaagucccgcu

SEQ ID NO: 17026 - RNA, 25 nt, Homo sapiens
cccccacaaccgcgcuugacuagcu

SEQ ID NO: 17027 - RNA, 22 nt, Homo sapiens
uuggggaaacggccgcugagug

SEQ ID NO: 17028 - RNA, 21 nt, Homo sapiens
caagucacuagugguuccguu

SEQ ID NO: 17029 - RNA, 23 nt, Homo sapiens
ugagcgccucgacgacagagccg

SEQ ID NO: 17030 - RNA, 22 nt, Homo sapiens
aaaaugguucccuuuagagugu

SEQ ID NO: 17031 - RNA, 22 nt, Homo sapiens
aggcggggcgccgcgggaccgc

SEQ ID NO: 17032 - RNA, 22 nt, Homo sapiens
ucggccugaccacccaccccac

SEQ ID NO: 17033 - RNA, 24 nt, Homo sapiens
uggcccugacugaagaccagcagu

SEQ ID NO: 17034 - RNA, 22 nt, Homo sapiens
uggagagaaaggcaguuccuga

SEQ ID NO: 17035 - RNA, 21 nt, Homo sapiens
cggcggggacggcgauugguc

SEQ ID NO: 17036 - RNA, 21 nt, Homo sapiens
cugaccuaugaauugacagcc

SEQ ID NO: 17037 - RNA, 21 nt, Homo sapiens
agggcccccccucaauccugu

SEQ ID NO: 17038 - RNA, 23 nt, Homo sapiens
ugaggggcagagagcgagacuuu

SEQ ID NO: 17039 - RNA, 22 nt, Homo sapiens
aggcggggcgccgcgggaccgc

SEQ ID NO: 17040 - RNA, 22 nt, Homo sapiens
ugcggggcuagggcuaacagca

SEQ ID NO: 17041 - RNA, 21 nt, Homo sapiens
uggaggagaaggaaggugaug

SEQ ID NO: 17042 - RNA, 20 nt, Homo sapiens
ggggagcuguggaagcagua

SEQ ID NO: 17043 - RNA, 22 nt, Homo sapiens
augggugaauuuguagaaggau

SEQ ID NO: 17044 - RNA, 22 nt, Homo sapiens
uacguagauauauauguauuuu

SEQ ID NO: 17045 - RNA, 17 nt, Homo sapiens
ucccaccgcugccaccc

SEQ ID NO: 17046 - RNA, 22 nt, Homo sapiens
ucugggcaacaaagugagaccu

SEQ ID NO: 17047 - RNA, 22 nt, Homo sapiens
ucugcccccuccgcugcugcca

SEQ ID NO: 17048 - RNA, 23 nt, Homo sapiens
caacggaaucccaaaagcagcug

SEQ ID NO: 17049 - RNA, 22 nt, Homo sapiens
uucccuuugucauccuaugccu

SEQ ID NO: 17050 - RNA, 22 nt, Homo sapiens
uucccuuugucauccuucgccu

SEQ ID NO: 17051 - RNA, 22 nt, Homo sapiens
uagcuuaucagacugauguuga

SEQ ID NO: 17052 - RNA, 20 nt, Homo sapiens
acugccccaggugcugcugg

SEQ ID NO: 17053 - RNA, 20 nt, Homo sapiens
ccucugggcccuuccuccag

SEQ ID NO: 17054 - RNA, 22 nt, Homo sapiens
ucucugggccugugucuuaggc

SEQ ID NO: 17055 - RNA, 23 nt, Homo sapiens
acuucaccugguccacuagccgu

SEQ ID NO: 17056 - RNA, 21 nt, Homo sapiens
cggggcagcucaguacaggau

SEQ ID NO: 17057 - RNA, 22 nt, Homo sapiens
gugacaucacauauacggcagc

SEQ ID NO: 17058 - RNA, 22 nt, Homo sapiens
aacaucacagcaagucugugcu

SEQ ID NO: 17059 - RNA, 21 nt, Homo sapiens
auccuugcuaucugggugcua

SEQ ID NO: 17060 - RNA, 19 nt, Homo sapiens
aggcugcggaauucaggac

SEQ ID NO: 17061 - RNA, 25 nt, Homo sapiens
gcugggcagggcuucugagcuccuu

SEQ ID NO: 17062 - RNA, 22 nt, Homo sapiens
augcugacauauuuacuagagg

SEQ ID NO: 17063 - RNA, 23 nt, Homo sapiens
caagucuuauuugagcaccuguu

SEQ ID NO: 17064 - RNA, 22 nt, Homo sapiens
uugcauagucacaaaagugauc

SEQ ID NO: 17065 - RNA, 22 nt, Homo sapiens
uaaugccccuaaaaauccuuau

SEQ ID NO: 17066 - RNA, 22 nt, Homo sapiens
aaaaguaauugcgaguuuuacc

SEQ ID NO: 17067 - RNA, 22 nt, Homo sapiens
aaaaguaauugugguuuuggcc

SEQ ID NO: 17068 - RNA, 22 nt, Homo sapiens
aaaaguaauugcgguuuuugcc

SEQ ID NO: 17069 - RNA, 22 nt, Homo sapiens
aaaaguaauugugguuuuugcc

SEQ ID NO: 17070 - RNA, 22 nt, Homo sapiens
aaaaguaaucgcgguuuuuguc

SEQ ID NO: 17071 - RNA, 22 nt, Homo sapiens
aaaaguaauugcggauuuugcc

SEQ ID NO: 17072 - RNA, 22 nt, Homo sapiens
aaaaguaauugcggucuuuggu

SEQ ID NO: 17073 - RNA, 21 nt, Homo sapiens
uaaaguaaauaugcaccaaaa

SEQ ID NO: 17074 - RNA, 23 nt, Homo sapiens
aguauguucuuccaggacagaac

SEQ ID NO: 17075 - RNA, 22 nt, Homo sapiens
uaugucugcugaccaucaccuu

SEQ ID NO: 17076 - RNA, 23 nt, Homo sapiens
gagggucuugggagggaugugac

SEQ ID NO: 17077 - RNA, 21 nt, Homo sapiens
cggcggggacggcgauugguc

SEQ ID NO: 17078 - RNA, 24 nt, Homo sapiens
agcagaagcagggagguucuccca

SEQ ID NO: 17079 - RNA, 18 nt, Homo sapiens
ugcuuccuuucagagggu

SEQ ID NO: 17080 - RNA, 22 nt, Homo sapiens
aucuggagguaagaagcacuuu

SEQ ID NO: 17081 - RNA, 19 nt, Homo sapiens
aggcugcggaauucaggac

SEQ ID NO: 17082 - RNA, 22 nt, Homo sapiens
aggcggggcgccgcgggaccgc

SEQ ID NO: 17083 - RNA, 20 nt, Homo sapiens
cgugccacccuuuuccccag

SEQ ID NO: 17084 - RNA, 24 nt, Homo sapiens
agccuggaagcuggagccugcagu

SEQ ID NO: 17085 - RNA, 17 nt, Homo sapiens
gugggggagaggcuguc

SEQ ID NO: 17086 - RNA, 18 nt, Homo sapiens
cagggaggugaaugugau

SEQ ID NO: 17087 - RNA, 21 nt, Homo sapiens
ugagaugaagcacuguagcuc

SEQ ID NO: 17088 - RNA, 22 nt, Homo sapiens
ugagaacugaauuccauggguu

SEQ ID NO: 17089 - RNA, 23 nt, Homo sapiens
ucuggcuccgugucuucacuccc

SEQ ID NO: 17090 - RNA, 22 nt, Homo sapiens
uggagagaaaggcaguuccuga

SEQ ID NO: 17091 - RNA, 25 nt, Homo sapiens
cccccacaaccgcgcuugacuagcu

SEQ ID NO: 17092 - RNA, 22 nt, Homo sapiens
uccuucauuccaccggagucug

SEQ ID NO: 17093 - RNA, 22 nt, Homo sapiens
uagcuuaucagacugauguuga

SEQ ID NO: 17094 - RNA, 24 nt, Homo sapiens
agcagaagcagggagguucuccca

SEQ ID NO: 17095 - RNA, 22 nt, Homo sapiens
auauaauacaaccugcuaagug

SEQ ID NO: 17096 - RNA, 21 nt, Homo sapiens
ucacuccucuccucccgucuu

SEQ ID NO: 17097 - RNA, 23 nt, Homo sapiens
uacuccagagggcgucacucaug

SEQ ID NO: 17098 - RNA, 21 nt, Homo sapiens
guggcugcacucacuuccuuc

SEQ ID NO: 17099 - RNA, 21 nt, Homo sapiens
uccugcgcgucccagaugccc

SEQ ID NO: 17100 - RNA, 21 nt, Homo sapiens
cggcggggacggcgauugguc

SEQ ID NO: 17101 - RNA, 22 nt, Homo sapiens
ucugcccccuccgcugcugcca

SEQ ID NO: 17102 - RNA, 20 nt, Homo sapiens
acugccccaggugcugcugg

SEQ ID NO: 17103 - RNA, 21 nt, Homo sapiens
cggggcagcucaguacaggau

SEQ ID NO: 17104 - RNA, 22 nt, Homo sapiens
aggcggggcgccgcgggaccgc

SEQ ID NO: 17105 - RNA, 22 nt, Homo sapiens
auccgcgcucugacucucugcc

SEQ ID NO: 17106 - RNA, 18 nt, Homo sapiens
aucccaccucugccacca

SEQ ID NO: 17107 - RNA, 17 nt, Homo sapiens
gugggggagaggcuguc

SEQ ID NO: 17108 - RNA, 17 nt, Homo sapiens
ucgccuccuccucuccc

SEQ ID NO: 17109 - RNA, 21 nt, Homo sapiens
ucgaggagcucacagucuagu

SEQ ID NO: 17110 - RNA, 21 nt, Homo sapiens
cggcggggacggcgauugguc

SEQ ID NO: 17111 - RNA, 20 nt, Homo sapiens
ccuccugcccuccuugcugu

SEQ ID NO: 17112 - RNA, 22 nt, Homo sapiens
cauugcacuugucucggucuga

SEQ ID NO: 17113 - RNA, 22 nt, Homo sapiens
uguaaacauccuacacucagcu

SEQ ID NO: 17114 - RNA, 22 nt, Homo sapiens
ccucccacacccaaggcuugca

SEQ ID NO: 17115 - RNA, 25 nt, Homo sapiens
ggcggagggaaguagguccguuggu

SEQ ID NO: 17116 - RNA, 21 nt, Homo sapiens
uggaggagaaggaaggugaug

SEQ ID NO: 17117 - RNA, 24 nt, Homo sapiens
uggggagcugaggcucugggggug

SEQ ID NO: 17118 - RNA, 21 nt, Homo sapiens
uaggacacauggucuacuucu

SEQ ID NO: 17119 - RNA, 19 nt, Homo sapiens
gugaggacucgggaggugg

SEQ ID NO: 17120 - RNA, 20 nt, Homo sapiens
cgugccacccuuuuccccag

SEQ ID NO: 17121 - RNA, 22 nt, Homo sapiens
cagugguuuuacccuaugguag

SEQ ID NO: 17122 - RNA, 22 nt, Homo sapiens
ugauauguuugauauauuaggu

SEQ ID NO: 17123 - RNA, 22 nt, Homo sapiens
uccuucauuccaccggagucug

SEQ ID NO: 17124 - RNA, 22 nt, Homo sapiens
aaaucucugcaggcaaauguga

SEQ ID NO: 17125 - RNA, 21 nt, Homo sapiens
auguaugugugcaugugcaug

SEQ ID NO: 17126 - RNA, 22 nt, Homo sapiens
gucauacacggcucuccucucu

SEQ ID NO: 17127 - RNA, 23 nt, Homo sapiens
uaaauuucaccuuucugagaagg

SEQ ID NO: 17128 - RNA, 18 nt, Homo sapiens
gucccuguucaggcgcca

SEQ ID NO: 17129 - RNA, 18 nt, Homo sapiens
cagggaggugaaugugau

SEQ ID NO: 17130 - RNA, 23 nt, Homo sapiens
cggcccgggcugcugcuguuccu

SEQ ID NO: 17131 - RNA, 22 nt, Homo sapiens
uggagagaaaggcaguuccuga

SEQ ID NO: 17132 - RNA, 23 nt, Homo sapiens
ucccccaggugugauucugauuu

SEQ ID NO: 17133 - RNA, 23 nt, Homo sapiens
agcucggucugaggccccucagu

SEQ ID NO: 17134 - RNA, 22 nt, Homo sapiens
aguggggaacccuuccaugagg

SEQ ID NO: 17135 - RNA, 22 nt, Homo sapiens
ggagaaauuauccuuggugugu

SEQ ID NO: 17136 - RNA, 22 nt, Homo sapiens
uccgagccugggucucccucuu

SEQ ID NO: 17137 - RNA, 24 nt, Homo sapiens
acugggggcuuucgggcucugcgu

SEQ ID NO: 17138 - RNA, 24 nt, Homo sapiens
ugccugggucucuggccugcgcgu

SEQ ID NO: 17139 - RNA, 21 nt, Homo sapiens
ucccacguuguggcccagcag

SEQ ID NO: 17140 - RNA, 22 nt, Homo sapiens
uggagugugacaaugguguuug

SEQ ID NO: 17141 - RNA, 22 nt, Homo sapiens
acccgucccguucguccccgga

SEQ ID NO: 17142 - RNA, 18 nt, Homo sapiens
cgggcguggugguggggg

SEQ ID NO: 17143 - RNA, 21 nt, Homo sapiens
gcccuccgcccgugcaccccg

SEQ ID NO: 17144 - RNA, 23 nt, Homo sapiens
ucuggcuccgugucuucacuccc

SEQ ID NO: 17145 - RNA, 21 nt, Homo sapiens
cggcggggacggcgauugguc

SEQ ID NO: 17146 - RNA, 23 nt, Homo sapiens
agcuacauugucugcuggguuuc

SEQ ID NO: 17147 - RNA, 22 nt, Homo sapiens
cauugcacuugucucggucuga

SEQ ID NO: 17148 - RNA, 22 nt, Homo sapiens
agaggcuggccgugaugaauuc

SEQ ID NO: 17149 - RNA, 22 nt, Homo sapiens
ggagaaauuauccuuggugugu

SEQ ID NO: 17150 - RNA, 22 nt, Homo sapiens
uggugggcacagaaucuggacu

SEQ ID NO: 17151 - RNA, 21 nt, Homo sapiens
caaagaggaaggucccauuac

SEQ ID NO: 17152 - RNA, 25 nt, Homo sapiens
aggggugguguugggacagcuccgu

SEQ ID NO: 17153 - RNA, 22 nt, Homo sapiens
uggugggccgcagaacaugugc

SEQ ID NO: 17154 - RNA, 25 nt, Homo sapiens
ggcggagggaaguagguccguuggu

SEQ ID NO: 17155 - RNA, 22 nt, Homo sapiens
aggcggggcgccgcgggaccgc

SEQ ID NO: 17156 - RNA, 20 nt, Homo sapiens
accaggaggcugaggccccu

SEQ ID NO: 17157 - RNA, 21 nt, Homo sapiens
uggaggagaaggaaggugaug

SEQ ID NO: 17158 - RNA, 21 nt, Homo sapiens
ccgucgccgccacccgagccg

SEQ ID NO: 17159 - RNA, 22 nt, Homo sapiens
uuagggcccuggcuccaucucc

SEQ ID NO: 17160 - RNA, 19 nt, Homo sapiens
gaugaugcugcugaugcug

SEQ ID NO: 17161 - RNA, 21 nt, Homo sapiens
cggcggggacggcgauugguc

SEQ ID NO: 17162 - RNA, 23 nt, Homo sapiens
ucaagagcaauaacgaaaaaugu

SEQ ID NO: 17163 - RNA, 23 nt, Homo sapiens
ucccccaggugugauucugauuu

SEQ ID NO: 17164 - RNA, 22 nt, Homo sapiens
aagacgggaggaaagaagggag

SEQ ID NO: 17165 - RNA, 25 nt, Homo sapiens
aggggugguguugggacagcuccgu

SEQ ID NO: 17166 - RNA, 24 nt, Homo sapiens
acugggggcuuucgggcucugcgu

SEQ ID NO: 17167 - RNA, 24 nt, Homo sapiens
ugccugggucucuggccugcgcgu

SEQ ID NO: 17168 - RNA, 22 nt, Homo sapiens
aggcggggcgccgcgggaccgc

SEQ ID NO: 17169 - RNA, 23 nt, Homo sapiens
uggaagacuagugauuuuguugu

SEQ ID NO: 17170 - RNA, 20 nt, Homo sapiens
ggggagcuguggaagcagua

SEQ ID NO: 17171 - RNA, 21 nt, Homo sapiens
ucguggccuggucuccauuau

SEQ ID NO: 17172 - RNA, 24 nt, Homo sapiens
uggcccugacugaagaccagcagu

SEQ ID NO: 17173 - RNA, 19 nt, Homo sapiens
gaugaugcugcugaugcug

SEQ ID NO: 17174 - RNA, 23 nt, Homo sapiens
cggcccgggcugcugcuguuccu

SEQ ID NO: 17175 - RNA, 21 nt, Homo sapiens
agggcccccccucaauccugu

SEQ ID NO: 17176 - RNA, 23 nt, Homo sapiens
ucccccaggugugauucugauuu

SEQ ID NO: 17177 - RNA, 25 nt, Homo sapiens
agggaucgcgggcggguggcggccu

SEQ ID NO: 17178 - RNA, 22 nt, Homo sapiens
uauugcacucgucccggccucc

SEQ ID NO: 17179 - RNA, 22 nt, Homo sapiens
ugcuggaucagugguucgaguc

SEQ ID NO: 17180 - RNA, 22 nt, Homo sapiens
cugugcgugugacagcggcuga

SEQ ID NO: 17181 - RNA, 21 nt, Homo sapiens
agcuacaucuggcuacugggu

SEQ ID NO: 17182 - RNA, 22 nt, Homo sapiens
uagcaccaucugaaaucgguua

SEQ ID NO: 17183 - RNA, 22 nt, Homo sapiens
ucaggcucaguccccucccgau

SEQ ID NO: 17184 - RNA, 18 nt, Homo sapiens
uucacagggaggugucau

SEQ ID NO: 17185 - RNA, 22 nt, Homo sapiens
ggagaaauuauccuuggugugu

SEQ ID NO: 17186 - RNA, 21 nt, Homo sapiens
uggaggagaaggaaggugaug

SEQ ID NO: 17187 - RNA, 22 nt, Homo sapiens
uggauuucuuugugaaucacca

SEQ ID NO: 17188 - RNA, 21 nt, Homo sapiens
uggcagggaggcugggagggg

SEQ ID NO: 17189 - RNA, 21 nt, Homo sapiens
ccuguugaaguguaaucccca

SEQ ID NO: 17190 - RNA, 22 nt, Homo sapiens
uucuggaauucugugugaggga

SEQ ID NO: 17191 - RNA, 22 nt, Homo sapiens
aagcccuuaccccaaaaagcau

SEQ ID NO: 17192 - RNA, 23 nt, Homo sapiens
uaagugcuuccauguuuugguga

SEQ ID NO: 17193 - RNA, 23 nt, Homo sapiens
uaagugcuuccauguuuuaguag

SEQ ID NO: 17194 - RNA, 23 nt, Homo sapiens
uaagugcuuccauguuucagugg

SEQ ID NO: 17195 - RNA, 23 nt, Homo sapiens
uaagugcuuccauguuugagugu

SEQ ID NO: 17196 - RNA, 17 nt, Homo sapiens
uaagugcuuccaugcuu

SEQ ID NO: 17197 - RNA, 23 nt, Homo sapiens
aaagugcugcgacauuugagcgu

SEQ ID NO: 17198 - RNA, 23 nt, Homo sapiens
gaagugcuucgauuuuggggugu

SEQ ID NO: 17199 - RNA, 23 nt, Homo sapiens
aucaacagacauuaauugggcgc

SEQ ID NO: 17200 - RNA, 22 nt, Homo sapiens
cgucaacacuugcugguuuccu

SEQ ID NO: 17201 - RNA, 23 nt, Homo sapiens
caaagcgcuucucuuuagagugu

SEQ ID NO: 17202 - RNA, 22 nt, Homo sapiens
aaagugcuucccuuuggacugu

SEQ ID NO: 17203 - RNA, 21 nt, Homo sapiens
cuccagagggaaguacuuucu

SEQ ID NO: 17204 - RNA, 21 nt, Homo sapiens
aaagugcuuccuuuuagaggg

SEQ ID NO: 17205 - RNA, 22 nt, Homo sapiens
aaagugcuuccuuuuagagggu

SEQ ID NO: 17206 - RNA, 22 nt, Homo sapiens
aaagugcuucucuuuggugggu

SEQ ID NO: 17207 - RNA, 21 nt, Homo sapiens
aaagugcuuccuuuuugaggg

SEQ ID NO: 17208 - RNA, 22 nt, Homo sapiens
aagugcuuccuuuuagaggguu

SEQ ID NO: 17209 - RNA, 21 nt, Homo sapiens
cuccagagggaugcacuuucu

SEQ ID NO: 17210 - RNA, 22 nt, Homo sapiens
cugcccuggcccgagggaccga

SEQ ID NO: 17211 - RNA, 21 nt, Homo sapiens
aaggcagggcccccgcucccc

SEQ ID NO: 17212 - RNA, 22 nt, Homo sapiens
ucggccugaccacccaccccac

SEQ ID NO: 17213 - RNA, 17 nt, Homo sapiens
ucgccuccuccucuccc

SEQ ID NO: 17214 - RNA, 22 nt, Homo sapiens
acucggcguggcgucggucgug

SEQ ID NO: 17215 - RNA, 22 nt, Homo sapiens
cucggcgcggggcgcgggcucc

SEQ ID NO: 17216 - RNA, 21 nt, Homo sapiens
ucgaggagcucacagucuagu

SEQ ID NO: 17217 - RNA, 22 nt, Homo sapiens
aagacgggaggaaagaagggag

SEQ ID NO: 17218 - RNA, 22 nt, Homo sapiens
uggugggcacagaaucuggacu

SEQ ID NO: 17219 - RNA, 22 nt, Homo sapiens
agacuucccauuugaagguggc

SEQ ID NO: 17220 - RNA, 22 nt, Homo sapiens
uggugggccgcagaacaugugc

SEQ ID NO: 17221 - RNA, 23 nt, Homo sapiens
aaggagcuuacaaucuagcuggg

SEQ ID NO: 17222 - RNA, 21 nt, Homo sapiens
uggaggagaaggaaggugaug

SEQ ID NO: 17223 - RNA, 18 nt, Homo sapiens
ucagcuggcccucauuuc

SEQ ID NO: 17224 - RNA, 21 nt, Homo sapiens
uggcagggaggcugggagggg

SEQ ID NO: 17225 - RNA, 22 nt, Homo sapiens
ucggauccgucugagcuuggcu

SEQ ID NO: 17226 - RNA, 23 nt, Homo sapiens
uaaggugcaucuagugcagauag

SEQ ID NO: 17227 - RNA, 21 nt, Homo sapiens
cggcggggacggcgauugguc

SEQ ID NO: 17228 - RNA, 21 nt, Homo sapiens
aggggugcuaucugugauuga

SEQ ID NO: 17229 - RNA, 22 nt, Homo sapiens
agacccuggucugcacucuauc

SEQ ID NO: 17230 - RNA, 25 nt, Homo sapiens
aggggugguguugggacagcuccgu

SEQ ID NO: 17231 - RNA, 22 nt, Homo sapiens
aggcggggcgccgcgggaccgc

SEQ ID NO: 17232 - RNA, 22 nt, Homo sapiens
ugcggggcuagggcuaacagca

SEQ ID NO: 17233 - RNA, 22 nt, Homo sapiens
ugcggggcuagggcuaacagca

SEQ ID NO: 17234 - RNA, 20 nt, Homo sapiens
ggggagcuguggaagcagua

SEQ ID NO: 17235 - RNA, 23 nt, Homo sapiens
guccaguuuucccaggaaucccu

SEQ ID NO: 17236 - RNA, 22 nt, Homo sapiens
ugcccuguggacucaguucugg

SEQ ID NO: 17237 - RNA, 21 nt, Homo sapiens
cucccacaugcaggguuugca

SEQ ID NO: 17238 - RNA, 21 nt, Homo sapiens
ccaguccugugccugccgccu

SEQ ID NO: 17239 - RNA, 21 nt, Homo sapiens
ccaguccugugccugccgccu

SEQ ID NO: 17240 - RNA, 23 nt, Homo sapiens
ucuuggaguaggucauugggugg

SEQ ID NO: 17241 - RNA, 22 nt, Homo sapiens
uugggaucauuuugcauccaua

SEQ ID NO: 17242 - RNA, 23 nt, Homo sapiens
cugggaucuccggggucuugguu

SEQ ID NO: 17243 - RNA, 20 nt, Homo sapiens
ggggagcuguggaagcagua

SEQ ID NO: 17244 - RNA, 20 nt, Homo sapiens
ucugcaggguuugcuuugag

SEQ ID NO: 17245 - RNA, 17 nt, Homo sapiens
ucgccuccuccucuccc

SEQ ID NO: 17246 - RNA, 22 nt, Homo sapiens
ucugggcaacaaagugagaccu

SEQ ID NO: 17247 - RNA, 22 nt, Homo sapiens
uguaaacauccuacacucagcu

SEQ ID NO: 17248 - RNA, 22 nt, Homo sapiens
caaccuggaggacuccaugcug

SEQ ID NO: 17249 - RNA, 22 nt, Homo sapiens
cgucaacacuugcugguuuccu

SEQ ID NO: 17250 - RNA, 25 nt, Homo sapiens
aggggugguguugggacagcuccgu

SEQ ID NO: 17251 - RNA, 25 nt, Homo sapiens
gcugggcagggcuucugagcuccuu

SEQ ID NO: 17252 - RNA, 21 nt, Homo sapiens
gugccagcugcagugggggag

SEQ ID NO: 17253 - RNA, 20 nt, Homo sapiens
ugagcccuguccucccgcag

SEQ ID NO: 17254 - RNA, 23 nt, Homo sapiens
ugaguaccgccaugucuguuggg

SEQ ID NO: 17255 - RNA, 20 nt, Homo sapiens
gugcauugcuguugcauugc

SEQ ID NO: 17256 - RNA, 22 nt, Homo sapiens
uuaucagaaucuccagggguac

SEQ ID NO: 17257 - RNA, 20 nt, Homo sapiens
auuccuagaaauuguucaua

SEQ ID NO: 17258 - RNA, 22 nt, Homo sapiens
ugaaggucuacugugugccagg

SEQ ID NO: 17259 - RNA, 22 nt, Homo sapiens
gagugccuucuuuuggagcguu

SEQ ID NO: 17260 - RNA, 22 nt, Homo sapiens
aucuggagguaagaagcacuuu

SEQ ID NO: 17261 - RNA, 23 nt, Homo sapiens
caaagcgcuucucuuuagagugu

SEQ ID NO: 17262 - RNA, 22 nt, Homo sapiens
aagugccuccuuuuagaguguu

SEQ ID NO: 17263 - RNA, 21 nt, Homo sapiens
cuccagagggaaguacuuucu

SEQ ID NO: 17264 - RNA, 21 nt, Homo sapiens
cuccagagggaugcacuuucu

SEQ ID NO: 17265 - RNA, 19 nt, Homo sapiens
gggcgccugugaucccaac

SEQ ID NO: 17266 - RNA, 19 nt, Homo sapiens
agcugucugaaaaugucuu

SEQ ID NO: 17267 - RNA, 19 nt, Homo sapiens
gugucugcuuccuguggga

SEQ ID NO: 17268 - RNA, 21 nt, Homo sapiens
guguugaaacaaucucuacug

SEQ ID NO: 17269 - RNA, 20 nt, Homo sapiens
cggcucugggucugugggga

SEQ ID NO: 17270 - RNA, 22 nt, Homo sapiens
ucuucucuguuuuggccaugug

SEQ ID NO: 17271 - RNA, 22 nt, Homo sapiens
uucuggaauucugugugaggga

SEQ ID NO: 17272 - RNA, 22 nt, Homo sapiens
ucagugcaucacagaacuuugu

SEQ ID NO: 17273 - RNA, 22 nt, Homo sapiens
acagcaggcacagacaggcagu

SEQ ID NO: 17274 - RNA, 23 nt, Homo sapiens
ucccuguccuccaggagcucacg

SEQ ID NO: 17275 - RNA, 22 nt, Homo sapiens
gccugcugggguggaaccuggu

SEQ ID NO: 17276 - RNA, 22 nt, Homo sapiens
agucauuggaggguuugagcag

SEQ ID NO: 17277 - RNA, 20 nt, Homo sapiens
accaggaggcugaggccccu

SEQ ID NO: 17278 - RNA, 21 nt, Homo sapiens
ccuggaaacacugagguugug

SEQ ID NO: 17279 - RNA, 24 nt, Homo sapiens
agccuggaagcuggagccugcagu

SEQ ID NO: 17280 - RNA, 23 nt, Homo sapiens
cuggagauauggaagagcugugu

SEQ ID NO: 17281 - RNA, 22 nt, Homo sapiens
agaguugagucuggacgucccg

SEQ ID NO: 17282 - RNA, 21 nt, Homo sapiens
aucacauugccagggauuucc

SEQ ID NO: 17283 - RNA, 21 nt, Homo sapiens
aucacauugccagggauuacc

SEQ ID NO: 17284 - RNA, 23 nt, Homo sapiens
ucaagagcaauaacgaaaaaugu

SEQ ID NO: 17285 - RNA, 22 nt, Homo sapiens
ucaggcucaguccccucccgau

SEQ ID NO: 17286 - RNA, 22 nt, Homo sapiens
auucugcauuuuuagcaaguuc

SEQ ID NO: 17287 - RNA, 23 nt, Homo sapiens
ugagugugugugugugagugugu

SEQ ID NO: 17288 - RNA, 22 nt, Homo sapiens
cacacacugcaauuacuuuugc

SEQ ID NO: 17289 - RNA, 20 nt, Homo sapiens
auggagauagauauagaaau

SEQ ID NO: 17290 - RNA, 24 nt, Homo sapiens
ugccugggucucuggccugcgcgu

SEQ ID NO: 17291 - RNA, 17 nt, Homo sapiens
ucgccuccuccucuccc

SEQ ID NO: 17292 - RNA, 21 nt, Homo sapiens
gcccuccgcccgugcaccccg

SEQ ID NO: 17293 - RNA, 23 nt, Homo sapiens
gaacgcgcuucccuauagagggu

SEQ ID NO: 17294 - RNA, 23 nt, Homo sapiens
ucggggaucaucaugucacgaga

SEQ ID NO: 17295 - RNA, 21 nt, Homo sapiens
ugaguuggccaucugagugag

SEQ ID NO: 17296 - RNA, 25 nt, Homo sapiens
ggcggagggaaguagguccguuggu

SEQ ID NO: 17297 - RNA, 20 nt, Homo sapiens
cggcucugggucugugggga

SEQ ID NO: 17298 - RNA, 21 nt, Homo sapiens
uggaggagaaggaaggugaug

SEQ ID NO: 17299 - RNA, 22 nt, Homo sapiens
auccgcgcucugacucucugcc

SEQ ID NO: 17300 - RNA, 24 nt, Homo sapiens
uggggagcugaggcucugggggug

SEQ ID NO: 17301 - RNA, 21 nt, Homo sapiens
agaggauacccuuuguauguu

SEQ ID NO: 17302 - RNA, 22 nt, Homo sapiens
augggugaauuuguagaaggau

SEQ ID NO: 17303 - RNA, 22 nt, Homo sapiens
ugugagguuggcauuguugucu

SEQ ID NO: 17304 - RNA, 23 nt, Homo sapiens
uauggcuuuuuauuccuauguga

SEQ ID NO: 17305 - RNA, 23 nt, Homo sapiens
uauggcuuuucauuccuauguga

SEQ ID NO: 17306 - RNA, 23 nt, Homo sapiens
ucuggcuccgugucuucacuccc

SEQ ID NO: 17307 - RNA, 22 nt, Homo sapiens
caaagaauucuccuuuugggcu

SEQ ID NO: 17308 - RNA, 22 nt, Homo sapiens
cgcaggggccgggugcucaccg

SEQ ID NO: 17309 - RNA, 22 nt, Homo sapiens
cacacacugcaauuacuuuugc

SEQ ID NO: 17310 - RNA, 20 nt, Homo sapiens
accaggaggcugaggccccu

SEQ ID NO: 17311 - RNA, 22 nt, Homo sapiens
uuuccggcucgcgugggugugu

SEQ ID NO: 17312 - RNA, 22 nt, Homo sapiens
uuuccggcucgcgugggugugu

SEQ ID NO: 17313 - RNA, 21 nt, Homo sapiens
uggcagggaggcugggagggg

SEQ ID NO: 17314 - RNA, 21 nt, Homo sapiens
uggcagggaggcugggagggg

SEQ ID NO: 17315 - RNA, 22 nt, Homo sapiens
acccgucccguucguccccgga

SEQ ID NO: 17316 - RNA, 18 nt, Homo sapiens
cgggcguggugguggggg

SEQ ID NO: 17317 - RNA, 21 nt, Homo sapiens
cggcggggacggcgauugguc

SEQ ID NO: 17318 - RNA, 22 nt, Homo sapiens
cgcaggggccgggugcucaccg

SEQ ID NO: 17319 - RNA, 22 nt, Homo sapiens
aacgcacuucccuuuagagugu

SEQ ID NO: 17320 - RNA, 22 nt, Homo sapiens
aggcggggcgccgcgggaccgc

SEQ ID NO: 17321 - RNA, 22 nt, Homo sapiens
uauugcacucgucccggccucc

SEQ ID NO: 17322 - RNA, 21 nt, Homo sapiens
aaggcagggcccccgcucccc

SEQ ID NO: 17323 - RNA, 23 nt, Homo sapiens
ucuggcuccgugucuucacuccc

SEQ ID NO: 17324 - RNA, 22 nt, Homo sapiens
uagguaguuuccuguuguuggg

SEQ ID NO: 17325 - RNA, 21 nt, Homo sapiens
agggcccccccucaauccugu

SEQ ID NO: 17326 - RNA, 23 nt, Homo sapiens
ugaggggcagagagcgagacuuu

SEQ ID NO: 17327 - RNA, 22 nt, Homo sapiens
aguggggaacccuuccaugagg

SEQ ID NO: 17328 - RNA, 20 nt, Homo sapiens
accaggaggcugaggccccu

SEQ ID NO: 17329 - RNA, 20 nt, Homo sapiens
ggggagcuguggaagcagua

SEQ ID NO: 17330 - RNA, 20 nt, Homo sapiens
ggggagcuguggaagcagua

SEQ ID NO: 17331 - RNA, 22 nt, Homo sapiens
ugagguaguagguuguaugguu

SEQ ID NO: 17332 - RNA, 21 nt, Homo sapiens
caucccuugcaugguggaggg

SEQ ID NO: 17333 - RNA, 21 nt, Homo sapiens
ccaguccugugccugccgccu

SEQ ID NO: 17334 - RNA, 22 nt, Homo sapiens
uucccuuugucauccuaugccu

SEQ ID NO: 17335 - RNA, 22 nt, Homo sapiens
uucccuuugucauccuucgccu

SEQ ID NO: 17336 - RNA, 23 nt, Homo sapiens
gcaaagcacacggccugcagaga

SEQ ID NO: 17337 - RNA, 21 nt, Homo sapiens
acuggacuuggagucagaagg

SEQ ID NO: 17338 - RNA, 22 nt, Homo sapiens
ucagcaaacauuuauugugugc

SEQ ID NO: 17339 - RNA, 22 nt, Homo sapiens
aaaaguaauugcgaguuuuacc

SEQ ID NO: 17340 - RNA, 22 nt, Homo sapiens
aaaaguaauugugguuuuggcc

SEQ ID NO: 17341 - RNA, 22 nt, Homo sapiens
aaaaguaauugcgguuuuugcc

SEQ ID NO: 17342 - RNA, 22 nt, Homo sapiens
aaaaguaauugugguuuuugcc

SEQ ID NO: 17343 - RNA, 22 nt, Homo sapiens
aaaaguaaucgcgguuuuuguc

SEQ ID NO: 17344 - RNA, 22 nt, Homo sapiens
aaaaguaauugcggauuuugcc

SEQ ID NO: 17345 - RNA, 22 nt, Homo sapiens
aaaaguaauugcggucuuuggu

SEQ ID NO: 17346 - RNA, 22 nt, Homo sapiens
caaaaguaauuguggauuuugu

SEQ ID NO: 17347 - RNA, 21 nt, Homo sapiens
uaaaguaaauaugcaccaaaa

SEQ ID NO: 17348 - RNA, 21 nt, Homo sapiens
uggaggagaaggaaggugaug

SEQ ID NO: 17349 - RNA, 21 nt, Homo sapiens
cacuguguccuuucugcguag

SEQ ID NO: 17350 - RNA, 26 nt, Homo sapiens
gaugaugauggcagcaaauucugaaa

SEQ ID NO: 17351 - RNA, 22 nt, Homo sapiens
uaacagucuacagccauggucg

SEQ ID NO: 17352 - RNA, 21 nt, Homo sapiens
uaacagucuccagucacggcc

SEQ ID NO: 17353 - RNA, 22 nt, Homo sapiens
ugaaacauacacgggaaaccuc

SEQ ID NO: 17354 - RNA, 22 nt, Homo sapiens
aaaaguauuugcggguuuuguc

SEQ ID NO: 17355 - RNA, 21 nt, Homo sapiens
aggguaagcugaaccucugau

SEQ ID NO: 17356 - RNA, 21 nt, Homo sapiens
cuucuugugcucuaggauugu

SEQ ID NO: 17357 - RNA, 21 nt, Homo sapiens
cugacuguugccguccuccag

SEQ ID NO: 17358 - RNA, 22 nt, Homo sapiens
ugagaacugaauuccauggguu

SEQ ID NO: 17359 - RNA, 23 nt, Homo sapiens
ugaguaccgccaugucuguuggg

SEQ ID NO: 17360 - RNA, 22 nt, Homo sapiens
gaaguuguucgugguggauucg

SEQ ID NO: 17361 - RNA, 22 nt, Homo sapiens
ugaguauuacauggccaaucuc

SEQ ID NO: 17362 - RNA, 22 nt, Homo sapiens
aaaaguauuugcggguuuuguc

SEQ ID NO: 17363 - RNA, 21 nt, Homo sapiens
uggcagggaggcugggagggg

SEQ ID NO: 17364 - RNA, 22 nt, Homo sapiens
acaggugagguucuugggagcc

SEQ ID NO: 17365 - RNA, 17 nt, Homo sapiens
ucccaccgcugccaccc

SEQ ID NO: 17366 - RNA, 18 nt, Homo sapiens
cagggaggugaaugugau

SEQ ID NO: 17367 - RNA, 22 nt, Homo sapiens
ucucccaacccuuguaccagug

SEQ ID NO: 17368 - RNA, 22 nt, Homo sapiens
cgcaggggccgggugcucaccg

SEQ ID NO: 17369 - RNA, 22 nt, Homo sapiens
uggagugugacaaugguguuug

SEQ ID NO: 17370 - RNA, 24 nt, Homo sapiens
uggcccugacugaagaccagcagu

SEQ ID NO: 17371 - RNA, 22 nt, Homo sapiens
cagugcaaugaugaaagggcau

SEQ ID NO: 17372 - RNA, 21 nt, Homo sapiens
cggcggggacggcgauugguc

SEQ ID NO: 17373 - RNA, 20 nt, Homo sapiens
ccccagggcgacgcggcggg

SEQ ID NO: 17374 - RNA, 23 nt, Homo sapiens
guguuaauuaaaccucuauuuac

SEQ ID NO: 17375 - RNA, 21 nt, Homo sapiens
agggcccccccucaauccugu

SEQ ID NO: 17376 - RNA, 22 nt, Homo sapiens
aaaaguacuugcggauuuugcu

SEQ ID NO: 17377 - RNA, 21 nt, Homo sapiens
caaagaggaaggucccauuac

SEQ ID NO: 17378 - RNA, 22 nt, Homo sapiens
aggcggggcgccgcgggaccgc

SEQ ID NO: 17379 - RNA, 22 nt, Homo sapiens
ugcggggcuagggcuaacagca

SEQ ID NO: 17380 - RNA, 20 nt, Homo sapiens
ggggagcuguggaagcagua

SEQ ID NO: 17381 - RNA, 22 nt, Homo sapiens
ugagccccugugccgcccccag

SEQ ID NO: 17382 - RNA, 22 nt, Homo sapiens
acucggcguggcgucggucgug

SEQ ID NO: 17383 - RNA, 22 nt, Homo sapiens
uggagagaaaggcaguuccuga

SEQ ID NO: 17384 - RNA, 23 nt, Homo sapiens
gaacgcgcuucccuauagagggu

SEQ ID NO: 17385 - RNA, 19 nt, Homo sapiens
aggcugcggaauucaggac

SEQ ID NO: 17386 - RNA, 22 nt, Homo sapiens
uccgagccugggucucccucuu

SEQ ID NO: 17387 - RNA, 23 nt, Homo sapiens
aucgcugcgguugcgagcgcugu

SEQ ID NO: 17388 - RNA, 22 nt, Homo sapiens
ugagccccugugccgcccccag

SEQ ID NO: 17389 - RNA, 17 nt, Homo sapiens
gugggggagaggcuguc

SEQ ID NO: 17390 - RNA, 17 nt, Homo sapiens
ucccaccgcugccaccc

SEQ ID NO: 17391 - RNA, 18 nt, Homo sapiens
cagggaggugaaugugau

SEQ ID NO: 17392 - RNA, 23 nt, Homo sapiens
ucuggcuccgugucuucacuccc

SEQ ID NO: 17393 - RNA, 22 nt, Homo sapiens
aauugcacgguauccaucugua

SEQ ID NO: 17394 - RNA, 21 nt, Homo sapiens
agggggaaaguucuauagucc

SEQ ID NO: 17395 - RNA, 22 nt, Homo sapiens
gucccucuccaaaugugucuug

SEQ ID NO: 17396 - RNA, 21 nt, Homo sapiens
cuuuuugcggucugggcuugc

SEQ ID NO: 17397 - RNA, 22 nt, Homo sapiens
uggagagaaaggcaguuccuga

SEQ ID NO: 17398 - RNA, 23 nt, Homo sapiens
ugaggggcagagagcgagacuuu

SEQ ID NO: 17399 - RNA, 18 nt, Homo sapiens
uucacagggaggugucau

SEQ ID NO: 17400 - RNA, 22 nt, Homo sapiens
caaaaaucucaauuacuuuugc

SEQ ID NO: 17401 - RNA, 22 nt, Homo sapiens
uagcaaaaacugcaguuacuuu

SEQ ID NO: 17402 - RNA, 22 nt, Homo sapiens
acuccagccccacagccucagc

SEQ ID NO: 17403 - RNA, 23 nt, Homo sapiens
ucaaaugcucagacuccuguggu

SEQ ID NO: 17404 - RNA, 21 nt, Homo sapiens
cuuuuugcggucugggcuugc

SEQ ID NO: 17405 - RNA, 23 nt, Homo sapiens
uauggcuuuuuauuccuauguga

SEQ ID NO: 17406 - RNA, 23 nt, Homo sapiens
uuaaugcuaaucgugauaggggu

SEQ ID NO: 17407 - RNA, 22 nt, Homo sapiens
uccuucauuccaccggagucug

SEQ ID NO: 17408 - RNA, 18 nt, Homo sapiens
ugcuuccuuucagagggu

SEQ ID NO: 17409 - RNA, 22 nt, Homo sapiens
aucuggagguaagaagcacuuu

SEQ ID NO: 17410 - RNA, 22 nt, Homo sapiens
caugccuugaguguaggaccgu

SEQ ID NO: 17411 - RNA, 22 nt, Homo sapiens
uagcaaaaacugcaguuacuuu

SEQ ID NO: 17412 - RNA, 23 nt, Homo sapiens
aguauguucuuccaggacagaac

SEQ ID NO: 17413 - RNA, 22 nt, Homo sapiens
ucguaccgugaguaauaaugcg

SEQ ID NO: 17414 - RNA, 18 nt, Homo sapiens
cagggaggugaaugugau

SEQ ID NO: 17415 - RNA, 21 nt, Homo sapiens
ucgaggagcucacagucuagu

SEQ ID NO: 17416 - RNA, 21 nt, Homo sapiens
uccugcgcgucccagaugccc

SEQ ID NO: 17417 - RNA, 21 nt, Homo sapiens
cggcggggacggcgauugguc

SEQ ID NO: 17418 - RNA, 22 nt, Homo sapiens
cgcaggggccgggugcucaccg

SEQ ID NO: 17419 - RNA, 22 nt, Homo sapiens
aacuggcccucaaagucccgcu

SEQ ID NO: 17420 - RNA, 22 nt, Homo sapiens
cauugcacuugucucggucuga

SEQ ID NO: 17421 - RNA, 21 nt, Homo sapiens
aggcaagaugcuggcauagcu

SEQ ID NO: 17422 - RNA, 22 nt, Homo sapiens
gaaagcgcuucccuuugcugga

SEQ ID NO: 17423 - RNA, 22 nt, Homo sapiens
caaagcgcuccccuuuagaggu

SEQ ID NO: 17424 - RNA, 23 nt, Homo sapiens
caaagcgcuucucuuuagagugu

SEQ ID NO: 17425 - RNA, 21 nt, Homo sapiens
caaagcgcuucccuuuggagc

SEQ ID NO: 17426 - RNA, 21 nt, Homo sapiens
gaaagcgcuucucuuuagagg

SEQ ID NO: 17427 - RNA, 25 nt, Homo sapiens
ggcggagggaaguagguccguuggu

SEQ ID NO: 17428 - RNA, 22 nt, Homo sapiens
aggcggggcgccgcgggaccgc

SEQ ID NO: 17429 - RNA, 20 nt, Homo sapiens
accaggaggcugaggccccu

SEQ ID NO: 17430 - RNA, 20 nt, Homo sapiens
cggcucugggucugugggga

SEQ ID NO: 17431 - RNA, 22 nt, Homo sapiens
aucacacaaaggcaacuuuugu

SEQ ID NO: 17432 - RNA, 22 nt, Homo sapiens
ccucuuccccuugucucuccag

SEQ ID NO: 17433 - RNA, 22 nt, Homo sapiens
uucuggaauucugugugaggga

SEQ ID NO: 17434 - RNA, 22 nt, Homo sapiens
aagcccuuaccccaaaaagcau

SEQ ID NO: 17435 - RNA, 22 nt, Homo sapiens
ucagugcaucacagaacuuugu

SEQ ID NO: 17436 - RNA, 22 nt, Homo sapiens
cccugugcccggcccacuucug

SEQ ID NO: 17437 - RNA, 22 nt, Homo sapiens
uuggggaaacggccgcugagug

SEQ ID NO: 17438 - RNA, 23 nt, Homo sapiens
ucccuguccuccaggagcucacg

SEQ ID NO: 17439 - RNA, 22 nt, Homo sapiens
cgucaacacuugcugguuuccu

SEQ ID NO: 17440 - RNA, 19 nt, Homo sapiens
ugucucugcugggguuucu

SEQ ID NO: 17441 - RNA, 21 nt, Homo sapiens
agggggaaaguucuauagucc

SEQ ID NO: 17442 - RNA, 20 nt, Homo sapiens
guagaggagauggcgcaggg

SEQ ID NO: 17443 - RNA, 17 nt, Homo sapiens
ucccaccgcugccaccc

SEQ ID NO: 17444 - RNA, 18 nt, Homo sapiens
ugcuuccuuucagagggu

SEQ ID NO: 17445 - RNA, 22 nt, Homo sapiens
aucuggagguaagaagcacuuu

SEQ ID NO: 17446 - RNA, 20 nt, Homo sapiens
ggggagcuguggaagcagua

SEQ ID NO: 17447 - RNA, 21 nt, Homo sapiens
ccgucgccgccacccgagccg

SEQ ID NO: 17448 - RNA, 22 nt, Homo sapiens
ggagacgcggcccuguuggagu

SEQ ID NO: 17449 - RNA, 21 nt, Homo sapiens
cggcggggacggcgauugguc

SEQ ID NO: 17450 - RNA, 22 nt, Homo sapiens
uagguaguuuccuguuguuggg

SEQ ID NO: 17451 - RNA, 22 nt, Homo sapiens
aggcggggcgccgcgggaccgc

SEQ ID NO: 17452 - RNA, 22 nt, Homo sapiens
uucuggaauucugugugaggga

SEQ ID NO: 17453 - RNA, 22 nt, Homo sapiens
aagcccuuaccccaaaaagcau

SEQ ID NO: 17454 - RNA, 23 nt, Homo sapiens
uauggcuuuuuauuccuauguga

SEQ ID NO: 17455 - RNA, 22 nt, Homo sapiens
ugagaacugaauuccauggguu

SEQ ID NO: 17456 - RNA, 22 nt, Homo sapiens
ugagaacugaauuccauaggcu

SEQ ID NO: 17457 - RNA, 23 nt, Homo sapiens
ucuggcuccgugucuucacuccc

SEQ ID NO: 17458 - RNA, 22 nt, Homo sapiens
uggagagaaaggcaguuccuga

SEQ ID NO: 17459 - RNA, 22 nt, Homo sapiens
uggagagaaaggcaguuccuga

SEQ ID NO: 17460 - RNA, 20 nt, Homo sapiens
uguuuugauaacaguaaugu

SEQ ID NO: 17461 - RNA, 22 nt, Homo sapiens
cauugcacuugucucggucuga

SEQ ID NO: 17462 - RNA, 23 nt, Homo sapiens
cacucagccuugagggcacuuuc

SEQ ID NO: 17463 - RNA, 17 nt, Homo sapiens
ucucgcuggggccucca

SEQ ID NO: 17464 - RNA, 23 nt, Homo sapiens
uccaguaccacgugucagggcca

SEQ ID NO: 17465 - RNA, 22 nt, Homo sapiens
ucggccugaccacccaccccac

SEQ ID NO: 17466 - RNA, 22 nt, Homo sapiens
augguacccuggcauacugagu

SEQ ID NO: 17467 - RNA, 22 nt, Homo sapiens
uggguggucuggagauuugugc

SEQ ID NO: 17468 - RNA, 21 nt, Homo sapiens
cggcggggacggcgauugguc

SEQ ID NO: 17469 - RNA, 22 nt, Homo sapiens
uagcuuaucagacugauguuga

SEQ ID NO: 17470 - RNA, 22 nt, Homo sapiens
cauugcacuugucucggucuga

SEQ ID NO: 17471 - RNA, 23 nt, Homo sapiens
ucccccaggugugauucugauuu

SEQ ID NO: 17472 - RNA, 19 nt, Homo sapiens
gggcgccugugaucccaac

SEQ ID NO: 17473 - RNA, 25 nt, Homo sapiens
aggggugguguugggacagcuccgu

SEQ ID NO: 17474 - RNA, 24 nt, Homo sapiens
acugggggcuuucgggcucugcgu

SEQ ID NO: 17475 - RNA, 22 nt, Homo sapiens
aggcggggcgccgcgggaccgc

SEQ ID NO: 17476 - RNA, 25 nt, Homo sapiens
gggcgacaaagcaagacucuuucuu

SEQ ID NO: 17477 - RNA, 23 nt, Homo sapiens
gaagugcuucgauuuuggggugu

SEQ ID NO: 17478 - RNA, 22 nt, Homo sapiens
aucacacaaaggcaacuuuugu

SEQ ID NO: 17479 - RNA, 22 nt, Homo sapiens
agucauuggaggguuugagcag

SEQ ID NO: 17480 - RNA, 24 nt, Homo sapiens
ugccugggucucuggccugcgcgu

SEQ ID NO: 17481 - RNA, 21 nt, Homo sapiens
uggcagggaggcugggagggg

SEQ ID NO: 17482 - RNA, 22 nt, Homo sapiens
uggagugugacaaugguguuug

SEQ ID NO: 17483 - RNA, 17 nt, Homo sapiens
ucgccuccuccucuccc

SEQ ID NO: 17484 - RNA, 21 nt, Homo sapiens
uccugcgcgucccagaugccc

SEQ ID NO: 17485 - RNA, 21 nt, Homo sapiens
cggcggggacggcgauugguc

SEQ ID NO: 17486 - RNA, 22 nt, Homo sapiens
cgcaggggccgggugcucaccg

SEQ ID NO: 17487 - RNA, 23 nt, Homo sapiens
ugagcgccucgacgacagagccg

SEQ ID NO: 17488 - RNA, 19 nt, Homo sapiens
ugucucugcugggguuucu

SEQ ID NO: 17489 - RNA, 21 nt, Homo sapiens
ucccacguuguggcccagcag

SEQ ID NO: 17490 - RNA, 22 nt, Homo sapiens
aggcggggcgccgcgggaccgc

SEQ ID NO: 17491 - RNA, 23 nt, Homo sapiens
aggaagcccuggaggggcuggag

SEQ ID NO: 17492 - RNA, 22 nt, Homo sapiens
ugcggggcuagggcuaacagca

SEQ ID NO: 17493 - RNA, 22 nt, Homo sapiens
acccgucccguucguccccgga

SEQ ID NO: 17494 - RNA, 22 nt, Homo sapiens
uauggcacugguagaauucacu

SEQ ID NO: 17495 - RNA, 19 nt, Homo sapiens
accgugcaaagguagcaua

SEQ ID NO: 17496 - RNA, 22 nt, Homo sapiens
cauugcacuugucucggucuga

SEQ ID NO: 17497 - RNA, 23 nt, Homo sapiens
ugaggggcagagagcgagacuuu

SEQ ID NO: 17498 - RNA, 22 nt, Homo sapiens
ucgugcaucccuuuagaguguu

SEQ ID NO: 17499 - RNA, 22 nt, Homo sapiens
aggcggggcgccgcgggaccgc

SEQ ID NO: 17500 - RNA, 22 nt, Homo sapiens
ugcggggcuagggcuaacagca

SEQ ID NO: 17501 - RNA, 21 nt, Homo sapiens
uggaggagaaggaaggugaug

SEQ ID NO: 17502 - RNA, 21 nt, Homo sapiens
ccuggaaacacugagguugug

SEQ ID NO: 17503 - RNA, 21 nt, Homo sapiens
uggcagggaggcugggagggg

SEQ ID NO: 17504 - RNA, 22 nt, Homo sapiens
uggagugugacaaugguguuug

SEQ ID NO: 17505 - RNA, 22 nt, Homo sapiens
acccgucccguucguccccgga

SEQ ID NO: 17506 - RNA, 21 nt, Homo sapiens
acucuagcugccaaaggcgcu

SEQ ID NO: 17507 - RNA, 24 nt, Homo sapiens
uggcccugacugaagaccagcagu

SEQ ID NO: 17508 - RNA, 23 nt, Homo sapiens
ucuggcuccgugucuucacuccc

SEQ ID NO: 17509 - RNA, 18 nt, Homo sapiens
ugaggcaguagauugaau

SEQ ID NO: 17510 - RNA, 20 nt, Homo sapiens
ccccagggcgacgcggcggg

SEQ ID NO: 17511 - RNA, 22 nt, Homo sapiens
aagcugccaguugaagaacugu

SEQ ID NO: 17512 - RNA, 22 nt, Homo sapiens
cuggcccucucugcccuuccgu

SEQ ID NO: 17513 - RNA, 22 nt, Homo sapiens
aauugcacgguauccaucugua

SEQ ID NO: 17514 - RNA, 23 nt, Homo sapiens
ugaggggcagagagcgagacuuu

SEQ ID NO: 17515 - RNA, 21 nt, Homo sapiens
ugaguuggccaucugagugag

SEQ ID NO: 17516 - RNA, 21 nt, Homo sapiens
aggaggcagcgcucucaggac

SEQ ID NO: 17517 - RNA, 22 nt, Homo sapiens
uauugcacucgucccggccucc

SEQ ID NO: 17518 - RNA, 22 nt, Homo sapiens
ugugcgcagggagaccucuccc

SEQ ID NO: 17519 - RNA, 21 nt, Homo sapiens
aaggcagggcccccgcucccc

SEQ ID NO: 17520 - RNA, 22 nt, Homo sapiens
ucuucucuguuuuggccaugug

SEQ ID NO: 17521 - RNA, 22 nt, Homo sapiens
uuuccggcucgcgugggugugu

SEQ ID NO: 17522 - RNA, 22 nt, Homo sapiens
ccucuuccccuugucucuccag

SEQ ID NO: 17523 - RNA, 22 nt, Homo sapiens
gcccgcguguggagccaggugu

SEQ ID NO: 17524 - RNA, 21 nt, Homo sapiens
uggguuuacguugggagaacu

SEQ ID NO: 17525 - RNA, 22 nt, Homo sapiens
gucccucuccaaaugugucuug

SEQ ID NO: 17526 - RNA, 20 nt, Homo sapiens
cggcucugggucugugggga

SEQ ID NO: 17527 - RNA, 20 nt, Homo sapiens
guagaggagauggcgcaggg

SEQ ID NO: 17528 - RNA, 25 nt, Homo sapiens
cuagugagggacagaaccaggauuc

SEQ ID NO: 17529 - RNA, 23 nt, Homo sapiens
cacccggcugugugcacaugugc

SEQ ID NO: 17530 - RNA, 22 nt, Homo sapiens
cuccugagccauucugagccuc

SEQ ID NO: 17531 - RNA, 21 nt, Homo sapiens
ugacaacuauggaugagcucu

SEQ ID NO: 17532 - RNA, 22 nt, Homo sapiens
aaaaguaauugcggauuuugcc

SEQ ID NO: 17533 - RNA, 23 nt, Homo sapiens
ucaagagcaauaacgaaaaaugu

SEQ ID NO: 17534 - RNA, 22 nt, Homo sapiens
aacuguuugcagaggaaacuga

SEQ ID NO: 17535 - RNA, 22 nt, Homo sapiens
ugaaacauacacgggaaaccuc

SEQ ID NO: 17536 - RNA, 20 nt, Homo sapiens
guugugucaguuuaucaaac

SEQ ID NO: 17537 - RNA, 21 nt, Homo sapiens
gcaggaacuugugagucuccu

SEQ ID NO: 17538 - RNA, 21 nt, Homo sapiens
agcuacaucuggcuacugggu

SEQ ID NO: 17539 - RNA, 22 nt, Homo sapiens
ucggccugaccacccaccccac

SEQ ID NO: 17540 - RNA, 23 nt, Homo sapiens
cggcccgggcugcugcuguuccu

SEQ ID NO: 17541 - RNA, 22 nt, Homo sapiens
cucuagagggaagcacuuucug

SEQ ID NO: 17542 - RNA, 22 nt, Homo sapiens
uggcucaguucagcaggaacag

SEQ ID NO: 17543 - RNA, 23 nt, Homo sapiens
ggcagguucucacccucucuagg

SEQ ID NO: 17544 - RNA, 24 nt, Homo sapiens
ugccugggucucuggccugcgcgu

SEQ ID NO: 17545 - RNA, 20 nt, Homo sapiens
ggggagcuguggaagcagua

SEQ ID NO: 17546 - RNA, 24 nt, Homo sapiens
uggggagcugaggcucugggggug

SEQ ID NO: 17547 - RNA, 23 nt, Homo sapiens
uuucaagccagggggcguuuuuc

SEQ ID NO: 17548 - RNA, 17 nt, Homo sapiens
ucgccuccuccucuccc

SEQ ID NO: 17549 - RNA, 18 nt, Homo sapiens
cagggaggugaaugugau

SEQ ID NO: 17550 - RNA, 21 nt, Homo sapiens
gcccuccgcccgugcaccccg

SEQ ID NO: 17551 - RNA, 21 nt, Homo sapiens
cggcggggacggcgauugguc

SEQ ID NO: 17552 - RNA, 22 nt, Homo sapiens
uaugugccuuuggacuacaucg

SEQ ID NO: 17553 - RNA, 22 nt, Homo sapiens
aggcggggcgccgcgggaccgc

SEQ ID NO: 17554 - RNA, 22 nt, Homo sapiens
ugcggggcuagggcuaacagca

SEQ ID NO: 17555 - RNA, 21 nt, Homo sapiens
agugaaugauggguucugacc

SEQ ID NO: 17556 - RNA, 22 nt, Homo sapiens
ucaaaacugaggggcauuuucu

SEQ ID NO: 17557 - RNA, 22 nt, Homo sapiens
ucagugcaucacagaacuuugu

SEQ ID NO: 17558 - RNA, 22 nt, Homo sapiens
ucagugcaucacagaacuuugu

SEQ ID NO: 17559 - RNA, 23 nt, Homo sapiens
ugugcaaaucuaugcaaaacuga

SEQ ID NO: 17560 - RNA, 22 nt, Homo sapiens
aacaauauccuggugcugagug

SEQ ID NO: 17561 - RNA, 22 nt, Homo sapiens
agagguaguagguugcauaguu

SEQ ID NO: 17562 - RNA, 22 nt, Homo sapiens
ugucaguuugucaaauacccca

SEQ ID NO: 17563 - RNA, 22 nt, Homo sapiens
uggcaguguauuguuagcuggu

SEQ ID NO: 17564 - RNA, 22 nt, Homo sapiens
auauaauacaaccugcuaagug

SEQ ID NO: 17565 - RNA, 22 nt, Homo sapiens
ccaaaacugcaguuacuuuugc

SEQ ID NO: 17566 - RNA, 22 nt, Homo sapiens
uagcaaaaacugcaguuacuuu

SEQ ID NO: 17567 - RNA, 22 nt, Homo sapiens
caaaguuuaagauccuugaagu

SEQ ID NO: 17568 - RNA, 21 nt, Homo sapiens
uggcagggaggcugggagggg

SEQ ID NO: 17569 - RNA, 24 nt, Homo sapiens
agccuggaagcuggagccugcagu

SEQ ID NO: 17570 - RNA, 22 nt, Homo sapiens
gcccgcguguggagccaggugu

SEQ ID NO: 17571 - RNA, 21 nt, Homo sapiens
ugacaacuauggaugagcucu

SEQ ID NO: 17572 - RNA, 22 nt, Homo sapiens
uaaugccccuaaaaauccuuau

SEQ ID NO: 17573 - RNA, 22 nt, Homo sapiens
caaccuggaggacuccaugcug

SEQ ID NO: 17574 - RNA, 22 nt, Homo sapiens
ugaaggucuacugugugccagg

SEQ ID NO: 17575 - RNA, 22 nt, Homo sapiens
aaaaguacuugcggauuuugcu

SEQ ID NO: 17576 - RNA, 22 nt, Homo sapiens
caaaaguaauuguggauuuugu

SEQ ID NO: 17577 - RNA, 21 nt, Homo sapiens
aagccugcccggcuccucggg

SEQ ID NO: 17578 - RNA, 22 nt, Homo sapiens
agacuucccauuugaagguggc

SEQ ID NO: 17579 - RNA, 21 nt, Homo sapiens
aaggcagggcccccgcucccc

SEQ ID NO: 17580 - RNA, 21 nt, Homo sapiens
ccccaccuccucucuccucag

SEQ ID NO: 17581 - RNA, 24 nt, Homo sapiens
agccuggaagcuggagccugcagu

SEQ ID NO: 17582 - RNA, 23 nt, Homo sapiens
ucuggcuccgugucuucacuccc

SEQ ID NO: 17583 - RNA, 23 nt, Homo sapiens
ucuggcuccgugucuucacuccc

SEQ ID NO: 17584 - RNA, 23 nt, Homo sapiens
uaaggugcaucuagugcagauag

SEQ ID NO: 17585 - RNA, 22 nt, Homo sapiens
cccugugcccggcccacuucug

SEQ ID NO: 17586 - RNA, 20 nt, Homo sapiens
ccuccugcccuccuugcugu

SEQ ID NO: 17587 - RNA, 22 nt, Homo sapiens
acacagggcuguugugaagacu

SEQ ID NO: 17588 - RNA, 22 nt, Homo sapiens
ucaggcucaguccccucccgau

SEQ ID NO: 17589 - RNA, 22 nt, Homo sapiens
agaggcuggccgugaugaauuc

SEQ ID NO: 17590 - RNA, 21 nt, Homo sapiens
aagccugcccggcuccucggg

SEQ ID NO: 17591 - RNA, 23 nt, Homo sapiens
uauucauuuauccccagccuaca

SEQ ID NO: 17592 - RNA, 20 nt, Homo sapiens
ggggagcuguggaagcagua

SEQ ID NO: 17593 - RNA, 20 nt, Homo sapiens
uaaagagcccuguggagaca

SEQ ID NO: 17594 - RNA, 21 nt, Homo sapiens
cuuuuugcggucugggcuugc

SEQ ID NO: 17595 - RNA, 22 nt, Homo sapiens
uuuagagacggggucuugcucu

SEQ ID NO: 17596 - RNA, 22 nt, Homo sapiens
cagugcaaugaugaaagggcau

SEQ ID NO: 17597 - RNA, 22 nt, Homo sapiens
uguaaacauccucgacuggaag

SEQ ID NO: 17598 - RNA, 22 nt, Homo sapiens
uguaaacauccccgacuggaag

SEQ ID NO: 17599 - RNA, 22 nt, Homo sapiens
uguaaacauccuugacuggaag

SEQ ID NO: 17600 - RNA, 21 nt, Homo sapiens
acuggacuuggagucagaagg

SEQ ID NO: 17601 - RNA, 22 nt, Homo sapiens
uacucaggagaguggcaaucac

SEQ ID NO: 17602 - RNA, 22 nt, Homo sapiens
ugugacagauugauaacugaaa

SEQ ID NO: 17603 - RNA, 19 nt, Homo sapiens
ugucucugcugggguuucu

SEQ ID NO: 17604 - RNA, 22 nt, Homo sapiens
gugagucucuaagaaaagagga

SEQ ID NO: 17605 - RNA, 21 nt, Homo sapiens
uacuuggaaaggcaucaguug

SEQ ID NO: 17606 - RNA, 19 nt, Homo sapiens
gugaggacucgggaggugg

SEQ ID NO: 17607 - RNA, 22 nt, Homo sapiens
uggagagaaaggcaguuccuga

SEQ ID NO: 17608 - RNA, 21 nt, Homo sapiens
ccaguccugugccugccgccu

SEQ ID NO: 17609 - RNA, 22 nt, Homo sapiens
uagcuuaucagacugauguuga

SEQ ID NO: 17610 - RNA, 21 nt, Homo sapiens
uaaagugcugacagugcagau

SEQ ID NO: 17611 - RNA, 23 nt, Homo sapiens
cagugcaaugauauugucaaagc

SEQ ID NO: 17612 - RNA, 22 nt, Homo sapiens
uuauaauacaaccugauaagug

SEQ ID NO: 17613 - RNA, 22 nt, Homo sapiens
auauaauacaaccugcuaagug

SEQ ID NO: 17614 - RNA, 22 nt, Homo sapiens
caaaaaucucaauuacuuuugc

SEQ ID NO: 17615 - RNA, 21 nt, Homo sapiens
uaauuuuauguauaagcuagu

SEQ ID NO: 17616 - RNA, 22 nt, Homo sapiens
gagcuuauucauaaaagugcag

SEQ ID NO: 17617 - RNA, 22 nt, Homo sapiens
aaaccuguguuguucaagaguc

SEQ ID NO: 17618 - RNA, 21 nt, Homo sapiens
aauauuauacagucaaccucu

SEQ ID NO: 17619 - RNA, 21 nt, Homo sapiens
ccccaccuccucucuccucag

SEQ ID NO: 17620 - RNA, 22 nt, Homo sapiens
cuggacugagccgugcuacugg

SEQ ID NO: 17621 - RNA, 21 nt, Homo sapiens
uggacugcccugaucuggaga

SEQ ID NO: 17622 - RNA, 22 nt, Homo sapiens
cagugcaaugaugaaagggcau

SEQ ID NO: 17623 - RNA, 22 nt, Homo sapiens
uagcagcacauaaugguuugug

SEQ ID NO: 17624 - RNA, 22 nt, Homo sapiens
uagcagcacaucaugguuuaca

SEQ ID NO: 17625 - RNA, 22 nt, Homo sapiens
uagcagcacguaaauauuggcg

SEQ ID NO: 17626 - RNA, 23 nt, Homo sapiens
caaagugcuuacagugcagguag

SEQ ID NO: 17627 - RNA, 22 nt, Homo sapiens
uggagagaaaggcaguuccuga

SEQ ID NO: 17628 - RNA, 23 nt, Homo sapiens
ugaguaccgccaugucuguuggg

SEQ ID NO: 17629 - RNA, 21 nt, Homo sapiens
uagcagcacagaaauauuggc

SEQ ID NO: 17630 - RNA, 23 nt, Homo sapiens
agcuacauugucugcuggguuuc

SEQ ID NO: 17631 - RNA, 21 nt, Homo sapiens
acuggacuuggagucagaagg

SEQ ID NO: 17632 - RNA, 22 nt, Homo sapiens
acuggacuuagggucagaaggc

SEQ ID NO: 17633 - RNA, 22 nt, Homo sapiens
cagcagcaauucauguuuugaa

SEQ ID NO: 17634 - RNA, 21 nt, Homo sapiens
gcaguccaugggcauauacac

SEQ ID NO: 17635 - RNA, 21 nt, Homo sapiens
cagcagcacacugugguuugu

SEQ ID NO: 17636 - RNA, 21 nt, Homo sapiens
auccuugcuaucugggugcua

SEQ ID NO: 17637 - RNA, 24 nt, Homo sapiens
gaccuggacauguuugugcccagu

SEQ ID NO: 17638 - RNA, 21 nt, Homo sapiens
agaccuggcccagaccucagc

SEQ ID NO: 17639 - RNA, 22 nt, Homo sapiens
ugagaccucuggguucugagcu

SEQ ID NO: 17640 - RNA, 20 nt, Homo sapiens
guagaggagauggcgcaggg

SEQ ID NO: 17641 - RNA, 20 nt, Homo sapiens
ggggagcuguggaagcagua

SEQ ID NO: 17642 - RNA, 21 nt, Homo sapiens
aaggcagggcccccgcucccc

SEQ ID NO: 17643 - RNA, 18 nt, Homo sapiens
cagggaggugaaugugau

SEQ ID NO: 17644 - RNA, 21 nt, Homo sapiens
gcccuccgcccgugcaccccg

SEQ ID NO: 17645 - RNA, 23 nt, Homo sapiens
ucuggcuccgugucuucacuccc

SEQ ID NO: 17646 - RNA, 21 nt, Homo sapiens
cggcggggacggcgauugguc

SEQ ID NO: 17647 - RNA, 22 nt, Homo sapiens
uucccuuugucauccuaugccu

SEQ ID NO: 17648 - RNA, 22 nt, Homo sapiens
uucccuuugucauccuucgccu

SEQ ID NO: 17649 - RNA, 22 nt, Homo sapiens
cauugcacuugucucggucuga

SEQ ID NO: 17650 - RNA, 21 nt, Homo sapiens
uucacaguggcuaaguucugc

SEQ ID NO: 17651 - RNA, 21 nt, Homo sapiens
aaagcgcuucccuucagagug

SEQ ID NO: 17652 - RNA, 25 nt, Homo sapiens
ggcggagggaaguagguccguuggu

SEQ ID NO: 17653 - RNA, 22 nt, Homo sapiens
aggcggggcgccgcgggaccgc

SEQ ID NO: 17654 - RNA, 24 nt, Homo sapiens
uggggagcugaggcucugggggug

SEQ ID NO: 17655 - RNA, 21 nt, Homo sapiens
ccgucgccgccacccgagccg

SEQ ID NO: 17656 - RNA, 22 nt, Homo sapiens
ccucuuccccuugucucuccag

SEQ ID NO: 17657 - RNA, 22 nt, Homo sapiens
gugugcggaaaugcuucugcua

SEQ ID NO: 17658 - RNA, 22 nt, Homo sapiens
cccugugcccggcccacuucug

SEQ ID NO: 17659 - RNA, 23 nt, Homo sapiens
ucaagagcaauaacgaaaaaugu

SEQ ID NO: 17660 - RNA, 25 nt, Homo sapiens
agggaucgcgggcggguggcggccu

SEQ ID NO: 17661 - RNA, 25 nt, Homo sapiens
ggcggagggaaguagguccguuggu

SEQ ID NO: 17662 - RNA, 18 nt, Homo sapiens
ucagcuggcccucauuuc

SEQ ID NO: 17663 - RNA, 21 nt, Homo sapiens
ccccaccuccucucuccucag

SEQ ID NO: 17664 - RNA, 19 nt, Homo sapiens
gugaggacucgggaggugg

SEQ ID NO: 17665 - RNA, 18 nt, Homo sapiens
aucccaccucugccacca

SEQ ID NO: 17666 - RNA, 21 nt, Homo sapiens
cggcggggacggcgauugguc

SEQ ID NO: 17667 - RNA, 20 nt, Homo sapiens
ccccagggcgacgcggcggg

SEQ ID NO: 17668 - RNA, 22 nt, Homo sapiens
uguaacagcaacuccaugugga

SEQ ID NO: 17669 - RNA, 22 nt, Homo sapiens
uagcuuaucagacugauguuga

SEQ ID NO: 17670 - RNA, 21 nt, Homo sapiens
agggcccccccucaauccugu

SEQ ID NO: 17671 - RNA, 22 nt, Homo sapiens
uggcagugucuuagcugguugu

SEQ ID NO: 17672 - RNA, 22 nt, Homo sapiens
caaucacuaacuccacugccau

SEQ ID NO: 17673 - RNA, 23 nt, Homo sapiens
aggcaguguaguuagcugauugc

SEQ ID NO: 17674 - RNA, 22 nt, Homo sapiens
uggcaguguauuguuagcuggu

SEQ ID NO: 17675 - RNA, 22 nt, Homo sapiens
aggcaguguauuguuagcuggc

SEQ ID NO: 17676 - RNA, 22 nt, Homo sapiens
aggcggggcgccgcgggaccgc

SEQ ID NO: 17677 - RNA, 22 nt, Homo sapiens
ugcggggcuagggcuaacagca

SEQ ID NO: 17678 - RNA, 20 nt, Homo sapiens
ggggagcuguggaagcagua

SEQ ID NO: 17679 - RNA, 21 nt, Homo sapiens
gugccagcugcagugggggag

SEQ ID NO: 17680 - RNA, 20 nt, Homo sapiens
ucacuguucagacaggcgga

SEQ ID NO: 17681 - RNA, 24 nt, Homo sapiens
agccuggaagcuggagccugcagu

SEQ ID NO: 17682 - RNA, 24 nt, Homo sapiens
uggcccugacugaagaccagcagu

SEQ ID NO: 17683 - RNA, 22 nt, Homo sapiens
cagugcaauguuaaaagggcau

SEQ ID NO: 17684 - RNA, 22 nt, Homo sapiens
cagugcaaugaugaaagggcau

SEQ ID NO: 17685 - RNA, 22 nt, Homo sapiens
ugcccuguggacucaguucugg

SEQ ID NO: 17686 - RNA, 22 nt, Homo sapiens
cccugugcccggcccacuucug

SEQ ID NO: 17687 - RNA, 22 nt, Homo sapiens
acacagggcuguugugaagacu

SEQ ID NO: 17688 - RNA, 23 nt, Homo sapiens
cagugcaauaguauugucaaagc

SEQ ID NO: 17689 - RNA, 23 nt, Homo sapiens
cagugcaaugauauugucaaagc

SEQ ID NO: 17690 - RNA, 22 nt, Homo sapiens
cuggcccucucugcccuuccgu

SEQ ID NO: 17691 - RNA, 22 nt, Homo sapiens
uccagcaucagugauuuuguug

SEQ ID NO: 17692 - RNA, 20 nt, Homo sapiens
auuccuagaaauuguucaua

SEQ ID NO: 17693 - RNA, 22 nt, Homo sapiens
aacuguuugcagaggaaacuga

SEQ ID NO: 17694 - RNA, 23 nt, Homo sapiens
uagugcaauauugcuuauagggu

SEQ ID NO: 17695 - RNA, 22 nt, Homo sapiens
agaggcuggccgugaugaauuc

SEQ ID NO: 17696 - RNA, 20 nt, Homo sapiens
agaccauggguucucauugu

SEQ ID NO: 17697 - RNA, 21 nt, Homo sapiens
aagccugcccggcuccucggg

SEQ ID NO: 17698 - RNA, 23 nt, Homo sapiens
ucaaaugcucagacuccuguggu

SEQ ID NO: 17699 - RNA, 20 nt, Homo sapiens
ucugcaggguuugcuuugag

SEQ ID NO: 17700 - RNA, 21 nt, Homo sapiens
ccccaccuccucucuccucag

SEQ ID NO: 17701 - RNA, 20 nt, Homo sapiens
gugucugggcggacagcugc

SEQ ID NO: 17702 - RNA, 24 nt, Homo sapiens
agccuggaagcuggagccugcagu

SEQ ID NO: 17703 - RNA, 23 nt, Homo sapiens
aggaugagcaaagaaaguagauu

SEQ ID NO: 17704 - RNA, 22 nt, Homo sapiens
cggaugagcaaagaaagugguu

SEQ ID NO: 17705 - RNA, 22 nt, Homo sapiens
cuggacugagccgugcuacugg

SEQ ID NO: 17706 - RNA, 21 nt, Homo sapiens
uggacugcccugaucuggaga

SEQ ID NO: 17707 - RNA, 22 nt, Homo sapiens
uagcagcacauaaugguuugug

SEQ ID NO: 17708 - RNA, 22 nt, Homo sapiens
uagcagcacaucaugguuuaca

SEQ ID NO: 17709 - RNA, 22 nt, Homo sapiens
uagcagcacguaaauauuggcg

SEQ ID NO: 17710 - RNA, 23 nt, Homo sapiens
caaagugcuuacagugcagguag

SEQ ID NO: 17711 - RNA, 18 nt, Homo sapiens
ugaggcaguagauugaau

SEQ ID NO: 17712 - RNA, 21 nt, Homo sapiens
uagcagcacagaaauauuggc

SEQ ID NO: 17713 - RNA, 21 nt, Homo sapiens
acuggacuuggagucagaagg

SEQ ID NO: 17714 - RNA, 22 nt, Homo sapiens
acuggacuuagggucagaaggc

SEQ ID NO: 17715 - RNA, 22 nt, Homo sapiens
cagcagcaauucauguuuugaa

SEQ ID NO: 17716 - RNA, 21 nt, Homo sapiens
gcaguccaugggcauauacac

SEQ ID NO: 17717 - RNA, 22 nt, Homo sapiens
agaggcuggccgugaugaauuc

SEQ ID NO: 17718 - RNA, 21 nt, Homo sapiens
cagcagcacacugugguuugu

SEQ ID NO: 17719 - RNA, 21 nt, Homo sapiens
auccuugcuaucugggugcua

SEQ ID NO: 17720 - RNA, 22 nt, Homo sapiens
uacugcagacguggcaaucaug

SEQ ID NO: 17721 - RNA, 21 nt, Homo sapiens
uacugcagacaguggcaauca

SEQ ID NO: 17722 - RNA, 22 nt, Homo sapiens
aaagugcauccuuuuagagugu

SEQ ID NO: 17723 - RNA, 22 nt, Homo sapiens
aaagugcauccuuuuagagguu

SEQ ID NO: 17724 - RNA, 22 nt, Homo sapiens
aaagugcaucuuuuuagaggau

SEQ ID NO: 17725 - RNA, 22 nt, Homo sapiens
gucccucuccaaaugugucuug

SEQ ID NO: 17726 - RNA, 22 nt, Homo sapiens
uaugucugcugaccaucaccuu

SEQ ID NO: 17727 - RNA, 20 nt, Homo sapiens
guagaggagauggcgcaggg

SEQ ID NO: 17728 - RNA, 21 nt, Homo sapiens
aaggcagggcccccgcucccc

SEQ ID NO: 17729 - RNA, 21 nt, Homo sapiens
ccccaccuccucucuccucag

SEQ ID NO: 17730 - RNA, 21 nt, Homo sapiens
cggcggggacggcgauugguc

SEQ ID NO: 17731 - RNA, 23 nt, Homo sapiens
ugaguaccgccaugucuguuggg

SEQ ID NO: 17732 - RNA, 22 nt, Homo sapiens
ucugcccccuccgcugcugcca

SEQ ID NO: 17733 - RNA, 20 nt, Homo sapiens
acugccccaggugcugcugg

SEQ ID NO: 17734 - RNA, 21 nt, Homo sapiens
cggggcagcucaguacaggau

SEQ ID NO: 17735 - RNA, 22 nt, Homo sapiens
uggugggcacagaaucuggacu

SEQ ID NO: 17736 - RNA, 19 nt, Homo sapiens
gggcgccugugaucccaac

SEQ ID NO: 17737 - RNA, 22 nt, Homo sapiens
uggugggccgcagaacaugugc

SEQ ID NO: 17738 - RNA, 22 nt, Homo sapiens
aggcggggcgccgcgggaccgc

SEQ ID NO: 17739 - RNA, 21 nt, Homo sapiens
uggaggagaaggaaggugaug

SEQ ID NO: 17740 - RNA, 21 nt, Homo sapiens
cgcgggugcuuacugacccuu

SEQ ID NO: 17741 - RNA, 20 nt, Homo sapiens
ggggagcuguggaagcagua

SEQ ID NO: 17742 - RNA, 17 nt, Homo sapiens
uucaaguaauucaggug

SEQ ID NO: 17743 - RNA, 22 nt, Homo sapiens
uuuagagacggggucuugcucu

SEQ ID NO: 17744 - RNA, 24 nt, Homo sapiens
ccagacagaauucuaugcacuuuc

SEQ ID NO: 17745 - RNA, 22 nt, Homo sapiens
uagcagcacaucaugguuuaca

SEQ ID NO: 17746 - RNA, 22 nt, Homo sapiens
uucaaguaauccaggauaggcu

SEQ ID NO: 17747 - RNA, 21 nt, Homo sapiens
uucaaguaauucaggauaggu

SEQ ID NO: 17748 - RNA, 21 nt, Homo sapiens
auguaugugugcaugugcaug

SEQ ID NO: 17749 - RNA, 22 nt, Homo sapiens
auauaauacaaccugcuaagug

SEQ ID NO: 17750 - RNA, 22 nt, Homo sapiens
aaaacuguaauuacuuuuguac

SEQ ID NO: 17751 - RNA, 23 nt, Homo sapiens
aguauguucuuccaggacagaac

SEQ ID NO: 17752 - RNA, 22 nt, Homo sapiens
uaugucugcugaccaucaccuu

SEQ ID NO: 17753 - RNA, 23 nt, Homo sapiens
uuuggcacuagcacauuuuugcu

SEQ ID NO: 17754 - RNA, 22 nt, Homo sapiens
uggagagaaaggcaguuccuga

SEQ ID NO: 17755 - RNA, 22 nt, Homo sapiens
uguaaacauccuacacucagcu

SEQ ID NO: 17756 - RNA, 22 nt, Homo sapiens
ugcaacgaaccugagccacuga

SEQ ID NO: 17757 - RNA, 22 nt, Homo sapiens
uauugcacucgucccggccucc

SEQ ID NO: 17758 - RNA, 21 nt, Homo sapiens
ccccaccuccucucuccucag

SEQ ID NO: 17759 - RNA, 18 nt, Homo sapiens
aucccaccucugccacca

SEQ ID NO: 17760 - RNA, 22 nt, Homo sapiens
uggagagaaaggcaguuccuga

SEQ ID NO: 17761 - RNA, 22 nt, Homo sapiens
cgcaggggccgggugcucaccg

SEQ ID NO: 17762 - RNA, 22 nt, Homo sapiens
ugggucuuugcgggcgagauga

SEQ ID NO: 17763 - RNA, 21 nt, Homo sapiens
ccaccaccgugucugacacuu

SEQ ID NO: 17764 - RNA, 21 nt, Homo sapiens
uaaagugcugacagugcagau

SEQ ID NO: 17765 - RNA, 23 nt, Homo sapiens
cagugcaaugauauugucaaagc

SEQ ID NO: 17766 - RNA, 21 nt, Homo sapiens
aggggugcuaucugugauuga

SEQ ID NO: 17767 - RNA, 22 nt, Homo sapiens
aauugcacgguauccaucugua

SEQ ID NO: 17768 - RNA, 22 nt, Homo sapiens
aucgugcaucccuuuagagugu

SEQ ID NO: 17769 - RNA, 22 nt, Homo sapiens
aucgugcauccuuuuagagugu

SEQ ID NO: 17770 - RNA, 22 nt, Homo sapiens
ugugacagauugauaacugaaa

SEQ ID NO: 17771 - RNA, 25 nt, Homo sapiens
aggggugguguugggacagcuccgu

SEQ ID NO: 17772 - RNA, 18 nt, Homo sapiens
ucagcuggcccucauuuc

SEQ ID NO: 17773 - RNA, 22 nt, Homo sapiens
ucguaccgugaguaauaaugcg

SEQ ID NO: 17774 - RNA, 18 nt, Homo sapiens
gucccuguucaggcgcca

SEQ ID NO: 17775 - RNA, 24 nt, Homo sapiens
uggcccugacugaagaccagcagu

SEQ ID NO: 17776 - RNA, 24 nt, Homo sapiens
uuuggcaaugguagaacucacacu

SEQ ID NO: 17777 - RNA, 21 nt, Homo sapiens
cugaccuaugaauugacagcc

SEQ ID NO: 17778 - RNA, 21 nt, Homo sapiens
uaaagugcugacagugcagau

SEQ ID NO: 17779 - RNA, 23 nt, Homo sapiens
cagugcaaugauauugucaaagc

SEQ ID NO: 17780 - RNA, 22 nt, Homo sapiens
uaaugccccuaaaaauccuuau

SEQ ID NO: 17781 - RNA, 22 nt, Homo sapiens
ugagaaccacgucugcucugag

SEQ ID NO: 17782 - RNA, 23 nt, Homo sapiens
acuuacagacaagagccuugcuc

SEQ ID NO: 17783 - RNA, 23 nt, Homo sapiens
gacacgggcgacagcugcggccc

SEQ ID NO: 17784 - RNA, 22 nt, Homo sapiens
aaauuauuguacaucggaugag

SEQ ID NO: 17785 - RNA, 21 nt, Homo sapiens
uggcagggaggcugggagggg

SEQ ID NO: 17786 - RNA, 23 nt, Homo sapiens
uaaggugcaucuagugcagauag

SEQ ID NO: 17787 - RNA, 22 nt, Homo sapiens
cgcaggggccgggugcucaccg

SEQ ID NO: 17788 - RNA, 22 nt, Homo sapiens
ugggucuuugcgggcgagauga

SEQ ID NO: 17789 - RNA, 23 nt, Homo sapiens
uaauacugccggguaaugaugga

SEQ ID NO: 17790 - RNA, 22 nt, Homo sapiens
uggcucaguucagcaggaacag

SEQ ID NO: 17791 - RNA, 21 nt, Homo sapiens
uaaagugcugacagugcagau

SEQ ID NO: 17792 - RNA, 23 nt, Homo sapiens
cagugcaaugauauugucaaagc

SEQ ID NO: 17793 - RNA, 18 nt, Homo sapiens
ugcuuccuuucagagggu

SEQ ID NO: 17794 - RNA, 22 nt, Homo sapiens
aucuggagguaagaagcacuuu

SEQ ID NO: 17795 - RNA, 23 nt, Homo sapiens
agugccugagggaguaagagccc

SEQ ID NO: 17796 - RNA, 22 nt, Homo sapiens
cugcccuggcccgagggaccga

SEQ ID NO: 17797 - RNA, 23 nt, Homo sapiens
ucuggcuccgugucuucacuccc

SEQ ID NO: 17798 - RNA, 23 nt, Homo sapiens
cggcccgggcugcugcuguuccu

SEQ ID NO: 17799 - RNA, 21 nt, Homo sapiens
cggcggggacggcgauugguc

SEQ ID NO: 17800 - RNA, 22 nt, Homo sapiens
cgcaggggccgggugcucaccg

SEQ ID NO: 17801 - RNA, 23 nt, Homo sapiens
ugaguaccgccaugucuguuggg

SEQ ID NO: 17802 - RNA, 22 nt, Homo sapiens
cgucaacacuugcugguuuccu

SEQ ID NO: 17803 - RNA, 22 nt, Homo sapiens
aagugcuuccuuuuagaggguu

SEQ ID NO: 17804 - RNA, 22 nt, Homo sapiens
aggcggggcgccgcgggaccgc

SEQ ID NO: 17805 - RNA, 17 nt, Homo sapiens
ucgccuccuccucuccc

SEQ ID NO: 17806 - RNA, 24 nt, Homo sapiens
uggcccugacugaagaccagcagu

SEQ ID NO: 17807 - RNA, 23 nt, Homo sapiens
ugagcgccucgacgacagagccg

SEQ ID NO: 17808 - RNA, 22 nt, Homo sapiens
ugcggggcuagggcuaacagca

SEQ ID NO: 17809 - RNA, 21 nt, Homo sapiens
cggcggggacggcgauugguc

SEQ ID NO: 17810 - RNA, 22 nt, Homo sapiens
aggcggggcgccgcgggaccgc

SEQ ID NO: 17811 - RNA, 18 nt, Homo sapiens
ucagcuggcccucauuuc

SEQ ID NO: 17812 - RNA, 21 nt, Homo sapiens
uggcagggaggcugggagggg

SEQ ID NO: 17813 - RNA, 24 nt, Homo sapiens
uggcccugacugaagaccagcagu

SEQ ID NO: 17814 - RNA, 18 nt, Homo sapiens
cagggaggugaaugugau

SEQ ID NO: 17815 - RNA, 23 nt, Homo sapiens
ucuggcuccgugucuucacuccc

SEQ ID NO: 17816 - RNA, 21 nt, Homo sapiens
ccaguccugugccugccgccu

SEQ ID NO: 17817 - RNA, 22 nt, Homo sapiens
gaggguuggguggaggcucucc

SEQ ID NO: 17818 - RNA, 23 nt, Homo sapiens
ucuuggaguaggucauugggugg

SEQ ID NO: 17819 - RNA, 19 nt, Homo sapiens
ugggcguaucuguaugcua

SEQ ID NO: 17820 - RNA, 22 nt, Homo sapiens
ggggguccccggugcucggauc

SEQ ID NO: 17821 - RNA, 22 nt, Homo sapiens
gucccucuccaaaugugucuug

SEQ ID NO: 17822 - RNA, 22 nt, Homo sapiens
uggagugugacaaugguguuug

SEQ ID NO: 17823 - RNA, 21 nt, Homo sapiens
uggaggagaaggaaggugaug

SEQ ID NO: 17824 - RNA, 22 nt, Homo sapiens
aggcagcgggguguaguggaua

SEQ ID NO: 17825 - RNA, 22 nt, Homo sapiens
acccgucccguucguccccgga

SEQ ID NO: 17826 - RNA, 21 nt, Homo sapiens
uggacugcccugaucuggaga

SEQ ID NO: 17827 - RNA, 23 nt, Homo sapiens
cggcccgggcugcugcuguuccu

SEQ ID NO: 17828 - RNA, 22 nt, Homo sapiens
cgcaggggccgggugcucaccg

SEQ ID NO: 17829 - RNA, 23 nt, Homo sapiens
ugaggggcagagagcgagacuuu

SEQ ID NO: 17830 - RNA, 21 nt, Homo sapiens
cggggcagcucaguacaggau

SEQ ID NO: 17831 - RNA, 24 nt, Homo sapiens
ugccugggucucuggccugcgcgu

SEQ ID NO: 17832 - RNA, 20 nt, Homo sapiens
cggcucugggucugugggga

SEQ ID NO: 17833 - RNA, 21 nt, Homo sapiens
ucguggccuggucuccauuau

SEQ ID NO: 17834 - RNA, 22 nt, Homo sapiens
uggagugugacaaugguguuug

SEQ ID NO: 17835 - RNA, 22 nt, Homo sapiens
acgcccuucccccccuucuuca

SEQ ID NO: 17836 - RNA, 21 nt, Homo sapiens
cggcggggacggcgauugguc

SEQ ID NO: 17837 - RNA, 22 nt, Homo sapiens
uuggggaaacggccgcugagug

SEQ ID NO: 17838 - RNA, 23 nt, Homo sapiens
ucccuguccuccaggagcucacg

SEQ ID NO: 17839 - RNA, 19 nt, Homo sapiens
ugucucugcugggguuucu

SEQ ID NO: 17840 - RNA, 25 nt, Homo sapiens
aggggugguguugggacagcuccgu

SEQ ID NO: 17841 - RNA, 21 nt, Homo sapiens
ggcuagcaacagcgcuuaccu

SEQ ID NO: 17842 - RNA, 22 nt, Homo sapiens
aggcggggcgccgcgggaccgc

SEQ ID NO: 17843 - RNA, 22 nt, Homo sapiens
ugcggggcuagggcuaacagca

SEQ ID NO: 17844 - RNA, 20 nt, Homo sapiens
ggggagcuguggaagcagua

SEQ ID NO: 17845 - RNA, 22 nt, Homo sapiens
ugagccccugugccgcccccag

SEQ ID NO: 17846 - RNA, 20 nt, Homo sapiens
gugucugggcggacagcugc

SEQ ID NO: 17847 - RNA, 21 nt, Homo sapiens
ugcaggaccaagaugagcccu

SEQ ID NO: 17848 - RNA, 21 nt, Homo sapiens
uugggacauacuuaugcuaaa

SEQ ID NO: 17849 - RNA, 21 nt, Homo sapiens
uaccacaggguagaaccacgg

SEQ ID NO: 17850 - RNA, 21 nt, Homo sapiens
cggcggggacggcgauugguc

SEQ ID NO: 17851 - RNA, 21 nt, Homo sapiens
gccccugggccuauccuagaa

SEQ ID NO: 17852 - RNA, 21 nt, Homo sapiens
ugucuugcaggccgucaugca

SEQ ID NO: 17853 - RNA, 23 nt, Homo sapiens
aggaccugcgggacaagauucuu

SEQ ID NO: 17854 - RNA, 21 nt, Homo sapiens
gugucuuuugcucugcaguca

SEQ ID NO: 17855 - RNA, 22 nt, Homo sapiens
uccgagccugggucucccucuu

SEQ ID NO: 17856 - RNA, 19 nt, Homo sapiens
agcugucugaaaaugucuu

SEQ ID NO: 17857 - RNA, 21 nt, Homo sapiens
aauggcgccacuaggguugug

SEQ ID NO: 17858 - RNA, 22 nt, Homo sapiens
uaugucugcugaccaucaccuu

SEQ ID NO: 17859 - RNA, 22 nt, Homo sapiens
aggcggggcgccgcgggaccgc

SEQ ID NO: 17860 - RNA, 22 nt, Homo sapiens
gguggcccggccgugccugagg

SEQ ID NO: 17861 - RNA, 21 nt, Homo sapiens
ccuggaaacacugagguugug

SEQ ID NO: 17862 - RNA, 22 nt, Homo sapiens
cuccugagccauucugagccuc

SEQ ID NO: 17863 - RNA, 25 nt, Homo sapiens
gggcgacaaagcaagacucuuucuu

SEQ ID NO: 17864 - RNA, 23 nt, Homo sapiens
uauggcuuuuuauuccuauguga

SEQ ID NO: 17865 - RNA, 23 nt, Homo sapiens
uauggcuuuucauuccuauguga

SEQ ID NO: 17866 - RNA, 20 nt, Homo sapiens
ccuccugcccuccuugcugu

SEQ ID NO: 17867 - RNA, 21 nt, Homo sapiens
uaaagugcugacagugcagau

SEQ ID NO: 17868 - RNA, 23 nt, Homo sapiens
cagugcaaugauauugucaaagc

SEQ ID NO: 17869 - RNA, 22 nt, Homo sapiens
uuauaaagcaaugagacugauu

SEQ ID NO: 17870 - RNA, 22 nt, Homo sapiens
agaggcuggccgugaugaauuc

SEQ ID NO: 17871 - RNA, 22 nt, Homo sapiens
caaccuggaggacuccaugcug

SEQ ID NO: 17872 - RNA, 23 nt, Homo sapiens
uuucaagccagggggcguuuuuc

SEQ ID NO: 17873 - RNA, 22 nt, Homo sapiens
uacucaggagaguggcaaucac

SEQ ID NO: 17874 - RNA, 24 nt, Homo sapiens
ugccugggucucuggccugcgcgu

SEQ ID NO: 17875 - RNA, 22 nt, Homo sapiens
acuccagccccacagccucagc

SEQ ID NO: 17876 - RNA, 22 nt, Homo sapiens
uggagugugacaaugguguuug

SEQ ID NO: 17877 - RNA, 22 nt, Homo sapiens
caggauguggucaaguguuguu

SEQ ID NO: 17878 - RNA, 24 nt, Homo sapiens
uuuggcaaugguagaacucacacu

SEQ ID NO: 17879 - RNA, 22 nt, Homo sapiens
ucgugucuuguguugcagccgg

SEQ ID NO: 17880 - RNA, 23 nt, Homo sapiens
ugugcaaaucuaugcaaaacuga

SEQ ID NO: 17881 - RNA, 22 nt, Homo sapiens
aacaauauccuggugcugagug

SEQ ID NO: 17882 - RNA, 22 nt, Homo sapiens
agagguaguagguugcauaguu

SEQ ID NO: 17883 - RNA, 21 nt, Homo sapiens
gccccugggccuauccuagaa

SEQ ID NO: 17884 - RNA, 22 nt, Homo sapiens
ugaaacauacacgggaaaccuc

SEQ ID NO: 17885 - RNA, 22 nt, Homo sapiens
ucagcaaacauuuauugugugc

SEQ ID NO: 17886 - RNA, 23 nt, Homo sapiens
uucauuugguauaaaccgcgauu

SEQ ID NO: 17887 - RNA, 21 nt, Homo sapiens
guggcugcacucacuuccuuc

SEQ ID NO: 17888 - RNA, 20 nt, Homo sapiens
ggggagcuguggaagcagua

SEQ ID NO: 17889 - RNA, 21 nt, Homo sapiens
uuaggccgcagaucuggguga

SEQ ID NO: 17890 - RNA, 21 nt, Homo sapiens
cggcggggacggcgauugguc

SEQ ID NO: 17891 - RNA, 23 nt, Homo sapiens
ugaggggcagagagcgagacuuu

SEQ ID NO: 17892 - RNA, 23 nt, Homo sapiens
gaacgccuguucuugccaggugg

SEQ ID NO: 17893 - RNA, 22 nt, Homo sapiens
aggcggggcgccgcgggaccgc

SEQ ID NO: 17894 - RNA, 22 nt, Homo sapiens
gguggcccggccgugccugagg

SEQ ID NO: 17895 - RNA, 22 nt, Homo sapiens
ugcggggcuagggcuaacagca

SEQ ID NO: 17896 - RNA, 21 nt, Homo sapiens
ucguggccuggucuccauuau

SEQ ID NO: 17897 - RNA, 17 nt, Homo sapiens
ucgccuccuccucuccc

SEQ ID NO: 17898 - RNA, 19 nt, Homo sapiens
gaugaugcugcugaugcug

SEQ ID NO: 17899 - RNA, 21 nt, Homo sapiens
cggcggggacggcgauugguc

SEQ ID NO: 17900 - RNA, 21 nt, Homo sapiens
cggcggggacggcgauugguc

SEQ ID NO: 17901 - RNA, 23 nt, Homo sapiens
ugaggggcagagagcgagacuuu

SEQ ID NO: 17902 - RNA, 23 nt, Homo sapiens
ucuuggaguaggucauugggugg

SEQ ID NO: 17903 - RNA, 19 nt, Homo sapiens
aggcugcggaauucaggac

SEQ ID NO: 17904 - RNA, 22 nt, Homo sapiens
ggggguccccggugcucggauc

SEQ ID NO: 17905 - RNA, 25 nt, Homo sapiens
agggaucgcgggcggguggcggccu

SEQ ID NO: 17906 - RNA, 22 nt, Homo sapiens
aggcggggcgccgcgggaccgc

SEQ ID NO: 17907 - RNA, 22 nt, Homo sapiens
aggcggggcgccgcgggaccgc

SEQ ID NO: 17908 - RNA, 22 nt, Homo sapiens
ugcggggcuagggcuaacagca

SEQ ID NO: 17909 - RNA, 22 nt, Homo sapiens
ucguaccgugaguaauaaugcg

SEQ ID NO: 17910 - RNA, 20 nt, Homo sapiens
ggggagcuguggaagcagua

SEQ ID NO: 17911 - RNA, 23 nt, Homo sapiens
guccaguuuucccaggaaucccu

SEQ ID NO: 17912 - RNA, 21 nt, Homo sapiens
gguuugguccuagccuuucua

SEQ ID NO: 17913 - RNA, 23 nt, Homo sapiens
ugugcaaaucuaugcaaaacuga

SEQ ID NO: 17914 - RNA, 23 nt, Homo sapiens
ugugcaaaucuaugcaaaacuga

SEQ ID NO: 17915 - RNA, 23 nt, Homo sapiens
ugugcaaauccaugcaaaacuga

SEQ ID NO: 17916 - RNA, 22 nt, Homo sapiens
aacaauauccuggugcugagug

SEQ ID NO: 17917 - RNA, 22 nt, Homo sapiens
agagguaguagguugcauaguu

SEQ ID NO: 17918 - RNA, 21 nt, Homo sapiens
uuuugcaccuuuuggagugaa

SEQ ID NO: 17919 - RNA, 23 nt, Homo sapiens
guuugcacgggugggccuugucu

SEQ ID NO: 17920 - RNA, 20 nt, Homo sapiens
aaaguagcuguaccauuugc

SEQ ID NO: 17921 - RNA, 21 nt, Homo sapiens
ccuggaaacacugagguugug

SEQ ID NO: 17922 - RNA, 20 nt, Homo sapiens
uaaagagcccuguggagaca

SEQ ID NO: 17923 - RNA, 22 nt, Homo sapiens
ucuacaaaggaaagcgcuuucu

SEQ ID NO: 17924 - RNA, 22 nt, Homo sapiens
ucagugcacuacagaacuuugu

SEQ ID NO: 17925 - RNA, 21 nt, Homo sapiens
uaggacacauggucuacuucu

SEQ ID NO: 17926 - RNA, 18 nt, Homo sapiens
ucagcuggcccucauuuc

SEQ ID NO: 17927 - RNA, 18 nt, Homo sapiens
uugagaaggaggcugcug

SEQ ID NO: 17928 - RNA, 24 nt, Homo sapiens
ccagacagaauucuaugcacuuuc

SEQ ID NO: 17929 - RNA, 21 nt, Homo sapiens
auguaugugugcaugugcaug

SEQ ID NO: 17930 - RNA, 21 nt, Homo sapiens
aaagcgcuucccuucagagug

SEQ ID NO: 17931 - RNA, 22 nt, Homo sapiens
uugugucaauaugcgaugaugu

SEQ ID NO: 17932 - RNA, 22 nt, Homo sapiens
ugugucacucgaugaccacugu

SEQ ID NO: 17933 - RNA, 21 nt, Homo sapiens
acagucugcugagguuggagc

SEQ ID NO: 17934 - RNA, 22 nt, Homo sapiens
uuugugaccugguccacuaacc

SEQ ID NO: 17935 - RNA, 22 nt, Homo sapiens
acuccagccccacagccucagc

SEQ ID NO: 17936 - RNA, 22 nt, Homo sapiens
cuccugagccauucugagccuc

SEQ ID NO: 17937 - RNA, 23 nt, Homo sapiens
ucuggcuccgugucuucacuccc

SEQ ID NO: 17938 - RNA, 23 nt, Homo sapiens
cccaguguucagacuaccuguuc

SEQ ID NO: 17939 - RNA, 23 nt, Homo sapiens
cccaguguuuagacuaucuguuc

SEQ ID NO: 17940 - RNA, 19 nt, Homo sapiens
gagccaguuggacaggagc

SEQ ID NO: 17941 - RNA, 20 nt, Homo sapiens
accaggaggcugaggccccu

SEQ ID NO: 17942 - RNA, 22 nt, Homo sapiens
ugcaacgaaccugagccacuga

SEQ ID NO: 17943 - RNA, 22 nt, Homo sapiens
cacuggcuccuuucuggguaga

SEQ ID NO: 17944 - RNA, 22 nt, Homo sapiens
uagguaguuuccuguuguuggg

SEQ ID NO: 17945 - RNA, 21 nt, Homo sapiens
agggcccccccucaauccugu

SEQ ID NO: 17946 - RNA, 19 nt, Homo sapiens
aggcugcggaauucaggac

SEQ ID NO: 17947 - RNA, 25 nt, Homo sapiens
ggcggagggaaguagguccguuggu

SEQ ID NO: 17948 - RNA, 22 nt, Homo sapiens
aggcggggcgccgcgggaccgc

SEQ ID NO: 17949 - RNA, 23 nt, Homo sapiens
cgggucggaguuagcucaagcgg

SEQ ID NO: 17950 - RNA, 22 nt, Homo sapiens
auccgcgcucugacucucugcc

SEQ ID NO: 17951 - RNA, 22 nt, Homo sapiens
ucaccagcccuguguucccuag

SEQ ID NO: 17952 - RNA, 23 nt, Homo sapiens
agcugguguugugaaucaggccg

SEQ ID NO: 17953 - RNA, 23 nt, Homo sapiens
cggcccgggcugcugcuguuccu

SEQ ID NO: 17954 - RNA, 21 nt, Homo sapiens
uccugcgcgucccagaugccc

SEQ ID NO: 17955 - RNA, 22 nt, Homo sapiens
augcugacauauuuacuagagg

SEQ ID NO: 17956 - RNA, 22 nt, Homo sapiens
ugugcgcagggagaccucuccc

SEQ ID NO: 17957 - RNA, 22 nt, Homo sapiens
ugugcgcagggagaccucuccc

SEQ ID NO: 17958 - RNA, 21 nt, Homo sapiens
ccgucgccgccacccgagccg

SEQ ID NO: 17959 - RNA, 20 nt, Homo sapiens
ucacaccugccucgcccccc

SEQ ID NO: 17960 - RNA, 22 nt, Homo sapiens
ccucuuccccuugucucuccag

SEQ ID NO: 17961 - RNA, 22 nt, Homo sapiens
ccucuuccccuugucucuccag

SEQ ID NO: 17962 - RNA, 21 nt, Homo sapiens
cggcggggacggcgauugguc

SEQ ID NO: 17963 - RNA, 22 nt, Homo sapiens
uacgucaucguugucaucguca

SEQ ID NO: 17964 - RNA, 19 nt, Homo sapiens
aguguggcuuucuuagagc

SEQ ID NO: 17965 - RNA, 22 nt, Homo sapiens
aggcggggcgccgcgggaccgc

SEQ ID NO: 17966 - RNA, 20 nt, Homo sapiens
ggggagcuguggaagcagua

SEQ ID NO: 17967 - RNA, 24 nt, Homo sapiens
uggggagcugaggcucugggggug

SEQ ID NO: 17968 - RNA, 18 nt, Homo sapiens
ucagcuggcccucauuuc

SEQ ID NO: 17969 - RNA, 22 nt, Homo sapiens
uggguggucuggagauuugugc

SEQ ID NO: 17970 - RNA, 22 nt, Homo sapiens
ucugcccccuccgcugcugcca

SEQ ID NO: 17971 - RNA, 22 nt, Homo sapiens
aggugguccguggcgcguucgc

SEQ ID NO: 17972 - RNA, 20 nt, Homo sapiens
acugccccaggugcugcugg

SEQ ID NO: 17973 - RNA, 22 nt, Homo sapiens
uggcagugucuuagcugguugu

SEQ ID NO: 17974 - RNA, 23 nt, Homo sapiens
aggcaguguaguuagcugauugc

SEQ ID NO: 17975 - RNA, 23 nt, Homo sapiens
ucccccaggugugauucugauuu

SEQ ID NO: 17976 - RNA, 22 nt, Homo sapiens
uggcaguguauuguuagcuggu

SEQ ID NO: 17977 - RNA, 22 nt, Homo sapiens
aggcaguguauuguuagcuggc

SEQ ID NO: 17978 - RNA, 21 nt, Homo sapiens
cggggcagcucaguacaggau

SEQ ID NO: 17979 - RNA, 22 nt, Homo sapiens
aagugcugucauagcugagguc

SEQ ID NO: 17980 - RNA, 22 nt, Homo sapiens
cacacacugcaauuacuuuugc

SEQ ID NO: 17981 - RNA, 24 nt, Homo sapiens
acugggggcuuucgggcucugcgu

SEQ ID NO: 17982 - RNA, 23 nt, Homo sapiens
gagggucuugggagggaugugac

SEQ ID NO: 17983 - RNA, 21 nt, Homo sapiens
gugccagcugcagugggggag

SEQ ID NO: 17984 - RNA, 21 nt, Homo sapiens
uggcagggaggcugggagggg

SEQ ID NO: 17985 - RNA, 21 nt, Homo sapiens
uggcagggaggcugggagggg

SEQ ID NO: 17986 - RNA, 21 nt, Homo sapiens
gcccuccgcccgugcaccccg

SEQ ID NO: 17987 - RNA, 23 nt, Homo sapiens
uaaggugcaucuagugcagauag

SEQ ID NO: 17988 - RNA, 22 nt, Homo sapiens
cgcaggggccgggugcucaccg

SEQ ID NO: 17989 - RNA, 22 nt, Homo sapiens
cauugcacuugucucggucuga

SEQ ID NO: 17990 - RNA, 23 nt, Homo sapiens
ugagcgccucgacgacagagccg

SEQ ID NO: 17991 - RNA, 22 nt, Homo sapiens
aguggggaacccuuccaugagg

SEQ ID NO: 17992 - RNA, 25 nt, Homo sapiens
ggcggagggaaguagguccguuggu

SEQ ID NO: 17993 - RNA, 23 nt, Homo sapiens
ccugcagcgacuugauggcuucc

SEQ ID NO: 17994 - RNA, 21 nt, Homo sapiens
ccccaccuccucucuccucag

SEQ ID NO: 17995 - RNA, 24 nt, Homo sapiens
uugcagcugccugggagugacuuc

SEQ ID NO: 17996 - RNA, 22 nt, Homo sapiens
caugccuugaguguaggaccgu

SEQ ID NO: 17997 - RNA, 19 nt, Homo sapiens
ugagcugcuguaccaaaau

SEQ ID NO: 17998 - RNA, 21 nt, Homo sapiens
ugaguuggccaucugagugag

SEQ ID NO: 17999 - RNA, 23 nt, Homo sapiens
acuugggcacugaaacaaugucc

SEQ ID NO: 18000 - RNA, 20 nt, Homo sapiens
ggggagcuguggaagcagua

SEQ ID NO: 18001 - RNA, 24 nt, Homo sapiens
agcagaagcagggagguucuccca

SEQ ID NO: 18002 - RNA, 17 nt, Homo sapiens
ucccaccgcugccaccc

SEQ ID NO: 18003 - RNA, 18 nt, Homo sapiens
cagggaggugaaugugau

SEQ ID NO: 18004 - RNA, 21 nt, Homo sapiens
ugacaacuauggaugagcucu

SEQ ID NO: 18005 - RNA, 21 nt, Homo sapiens
acuggacuuggagucagaagg

SEQ ID NO: 18006 - RNA, 22 nt, Homo sapiens
agaggcuggccgugaugaauuc

SEQ ID NO: 18007 - RNA, 21 nt, Homo sapiens
aaaacggugagauuuuguuuu

SEQ ID NO: 18008 - RNA, 17 nt, Homo sapiens
ucucgcuggggccucca

SEQ ID NO: 18009 - RNA, 21 nt, Homo sapiens
uggaggagaaggaaggugaug

SEQ ID NO: 18010 - RNA, 22 nt, Homo sapiens
uuugaggcuacagugagaugug

SEQ ID NO: 18011 - RNA, 22 nt, Homo sapiens
acagcaggcacagacaggcagu

SEQ ID NO: 18012 - RNA, 22 nt, Homo sapiens
gcugacuccuaguccagggcuc

SEQ ID NO: 18013 - RNA, 22 nt, Homo sapiens
gccugcugggguggaaccuggu

SEQ ID NO: 18014 - RNA, 23 nt, Homo sapiens
gaagugcuucgauuuuggggugu

SEQ ID NO: 18015 - RNA, 21 nt, Homo sapiens
ugucuugcaggccgucaugca

SEQ ID NO: 18016 - RNA, 23 nt, Homo sapiens
uacuccagagggcgucacucaug

SEQ ID NO: 18017 - RNA, 22 nt, Homo sapiens
uacucaggagaguggcaaucac

SEQ ID NO: 18018 - RNA, 22 nt, Homo sapiens
aucuggagguaagaagcacuuu

SEQ ID NO: 18019 - RNA, 23 nt, Homo sapiens
caaagcgcuucucuuuagagugu

SEQ ID NO: 18020 - RNA, 21 nt, Homo sapiens
cuccagagggaaguacuuucu

SEQ ID NO: 18021 - RNA, 21 nt, Homo sapiens
cuccagagggaugcacuuucu

SEQ ID NO: 18022 - RNA, 22 nt, Homo sapiens
uccgagccugggucucccucuu

SEQ ID NO: 18023 - RNA, 22 nt, Homo sapiens
agucauuggaggguuugagcag

SEQ ID NO: 18024 - RNA, 23 nt, Homo sapiens
ucugcucauaccccaugguuucu

SEQ ID NO: 18025 - RNA, 23 nt, Homo sapiens
aaaagugcuuacagugcagguag

SEQ ID NO: 18026 - RNA, 21 nt, Homo sapiens
uaaagugcugacagugcagau

SEQ ID NO: 18027 - RNA, 23 nt, Homo sapiens
caaagugcuuacagugcagguag

SEQ ID NO: 18028 - RNA, 22 nt, Homo sapiens
cccugugcccggcccacuucug

SEQ ID NO: 18029 - RNA, 23 nt, Homo sapiens
uaaagugcuuauagugcagguag

SEQ ID NO: 18030 - RNA, 23 nt, Homo sapiens
caaagugcucauagugcagguag

SEQ ID NO: 18031 - RNA, 23 nt, Homo sapiens
caaagugcucauagugcagguag

SEQ ID NO: 18032 - RNA, 21 nt, Homo sapiens
auuugugcuuggcucugucac

SEQ ID NO: 18033 - RNA, 22 nt, Homo sapiens
acacagggcuguugugaagacu

SEQ ID NO: 18034 - RNA, 21 nt, Homo sapiens
aucacauugccagggauuucc

SEQ ID NO: 18035 - RNA, 21 nt, Homo sapiens
aucacauugccagggauuacc

SEQ ID NO: 18036 - RNA, 22 nt, Homo sapiens
aaacaaacauggugcacuucuu

SEQ ID NO: 18037 - RNA, 22 nt, Homo sapiens
aaagugcauccuuuuagagugu

SEQ ID NO: 18038 - RNA, 22 nt, Homo sapiens
aaagugcauccuuuuagagguu

SEQ ID NO: 18039 - RNA, 22 nt, Homo sapiens
aaagugcaucuuuuuagaggau

SEQ ID NO: 18040 - RNA, 22 nt, Homo sapiens
caaagugccucccuuuagagug

SEQ ID NO: 18041 - RNA, 24 nt, Homo sapiens
acaaagugcuucccuuuagagugu

SEQ ID NO: 18042 - RNA, 22 nt, Homo sapiens
acaaagugcuucccuuuagagu

SEQ ID NO: 18043 - RNA, 23 nt, Homo sapiens
cucuugagggaagcacuuucugu

SEQ ID NO: 18044 - RNA, 22 nt, Homo sapiens
caagaaccucaguugcuuuugu

SEQ ID NO: 18045 - RNA, 22 nt, Homo sapiens
aaaccuguguuguucaagaguc

SEQ ID NO: 18046 - RNA, 22 nt, Homo sapiens
cugcccuggcccgagggaccga

SEQ ID NO: 18047 - RNA, 25 nt, Homo sapiens
cuagugagggacagaaccaggauuc

SEQ ID NO: 18048 - RNA, 23 nt, Homo sapiens
caaagugcuguucgugcagguag

SEQ ID NO: 18049 - RNA, 25 nt, Homo sapiens
ugggaacggguuccggcagacgcug

SEQ ID NO: 18050 - RNA, 22 nt, Homo sapiens
uggcagugucuuagcugguugu

SEQ ID NO: 18051 - RNA, 22 nt, Homo sapiens
agaucagaaggugauuguggcu

SEQ ID NO: 18052 - RNA, 18 nt, Homo sapiens
uucacagggaggugucau

SEQ ID NO: 18053 - RNA, 22 nt, Homo sapiens
ucagcaaacauuuauugugugc

SEQ ID NO: 18054 - RNA, 23 nt, Homo sapiens
uuuggcacuagcacauuuuugcu

SEQ ID NO: 18055 - RNA, 21 nt, Homo sapiens
uguucauguagauguuuaagc

SEQ ID NO: 18056 - RNA, 17 nt, Homo sapiens
ucgccuccuccucuccc

SEQ ID NO: 18057 - RNA, 20 nt, Homo sapiens
ccuccugcccuccuugcugu

SEQ ID NO: 18058 - RNA, 22 nt, Homo sapiens
uguaaacauccuacacucagcu

SEQ ID NO: 18059 - RNA, 22 nt, Homo sapiens
ggggguccccggugcucggauc

SEQ ID NO: 18060 - RNA, 25 nt, Homo sapiens
ggcggagggaaguagguccguuggu

SEQ ID NO: 18061 - RNA, 23 nt, Homo sapiens
uggugcggagagggcccacagug

SEQ ID NO: 18062 - RNA, 22 nt, Homo sapiens
ugcggggcuagggcuaacagca

SEQ ID NO: 18063 - RNA, 23 nt, Homo sapiens
gagggucuugggagggaugugac

SEQ ID NO: 18064 - RNA, 22 nt, Homo sapiens
ucugggcaacaaagugagaccu

SEQ ID NO: 18065 - RNA, 25 nt, Homo sapiens
gcugggcagggcuucugagcuccuu

SEQ ID NO: 18066 - RNA, 21 nt, Homo sapiens
ucguggccuggucuccauuau

SEQ ID NO: 18067 - RNA, 22 nt, Homo sapiens
ugagccccugugccgcccccag

SEQ ID NO: 18068 - RNA, 20 nt, Homo sapiens
ucacaccugccucgcccccc

SEQ ID NO: 18069 - RNA, 22 nt, Homo sapiens
acccgucccguucguccccgga

SEQ ID NO: 18070 - RNA, 23 nt, Homo sapiens
aggaccugcgggacaagauucuu

SEQ ID NO: 18071 - RNA, 21 nt, Homo sapiens
agaccuggcccagaccucagc

SEQ ID NO: 18072 - RNA, 22 nt, Homo sapiens
gucccucuccaaaugugucuug

SEQ ID NO: 18073 - RNA, 21 nt, Homo sapiens
ucguggccuggucuccauuau

SEQ ID NO: 18074 - RNA, 21 nt, Homo sapiens
uggcagggaggcugggagggg

SEQ ID NO: 18075 - RNA, 19 nt, Homo sapiens
gaugaugcugcugaugcug

SEQ ID NO: 18076 - RNA, 21 nt, Homo sapiens
uccugcgcgucccagaugccc

SEQ ID NO: 18077 - RNA, 23 nt, Homo sapiens
ugaguaccgccaugucuguuggg

SEQ ID NO: 18078 - RNA, 22 nt, Homo sapiens
ucugcccccuccgcugcugcca

SEQ ID NO: 18079 - RNA, 22 nt, Homo sapiens
ucaggccaggcacaguggcuca

SEQ ID NO: 18080 - RNA, 20 nt, Homo sapiens
acugccccaggugcugcugg

SEQ ID NO: 18081 - RNA, 20 nt, Homo sapiens
ccucugggcccuuccuccag

SEQ ID NO: 18082 - RNA, 22 nt, Homo sapiens
ucucugggccugugucuuaggc

SEQ ID NO: 18083 - RNA, 21 nt, Homo sapiens
acuggacuuggagucagaagg

SEQ ID NO: 18084 - RNA, 21 nt, Homo sapiens
cggggcagcucaguacaggau

SEQ ID NO: 18085 - RNA, 21 nt, Homo sapiens
gaaggcgcuucccuuuggagu

SEQ ID NO: 18086 - RNA, 22 nt, Homo sapiens
gaaggcgcuucccuuuagagcg

SEQ ID NO: 18087 - RNA, 21 nt, Homo sapiens
aaaacggugagauuuuguuuu

SEQ ID NO: 18088 - RNA, 19 nt, Homo sapiens
ugagcugcuguaccaaaau

SEQ ID NO: 18089 - RNA, 19 nt, Homo sapiens
gagccaguuggacaggagc

SEQ ID NO: 18090 - RNA, 19 nt, Homo sapiens
aggcugcggaauucaggac

SEQ ID NO: 18091 - RNA, 19 nt, Homo sapiens
aagcagcugccucugaggc

SEQ ID NO: 18092 - RNA, 21 nt, Homo sapiens
guggcugcacucacuuccuuc

SEQ ID NO: 18093 - RNA, 22 nt, Homo sapiens
cacuggcuccuuucuggguaga

SEQ ID NO: 18094 - RNA, 23 nt, Homo sapiens
cccaguguucagacuaccuguuc

SEQ ID NO: 18095 - RNA, 23 nt, Homo sapiens
cccaguguuuagacuaucuguuc

SEQ ID NO: 18096 - RNA, 22 nt, Homo sapiens
cugugcgugugacagcggcuga

SEQ ID NO: 18097 - RNA, 23 nt, Homo sapiens
gacacgggcgacagcugcggccc

SEQ ID NO: 18098 - RNA, 19 nt, Homo sapiens
aagugugcagggcacuggu

SEQ ID NO: 18099 - RNA, 20 nt, Homo sapiens
ggggagcuguggaagcagua

SEQ ID NO: 18100 - RNA, 22 nt, Homo sapiens
auccgcgcucugacucucugcc

SEQ ID NO: 18101 - RNA, 21 nt, Homo sapiens
ccccaccuccucucuccucag

SEQ ID NO: 18102 - RNA, 21 nt, Homo sapiens
cggcggggacggcgauugguc

SEQ ID NO: 18103 - RNA, 22 nt, Homo sapiens
uuuaggauaagcuugacuuuug

SEQ ID NO: 18104 - RNA, 22 nt, Homo sapiens
aggcggggcgccgcgggaccgc

SEQ ID NO: 18105 - RNA, 20 nt, Homo sapiens
ggggagcuguggaagcagua

SEQ ID NO: 18106 - RNA, 21 nt, Homo sapiens
cuccguuugccuguuucgcug

SEQ ID NO: 18107 - RNA, 23 nt, Homo sapiens
caacggaaucccaaaagcagcug

SEQ ID NO: 18108 - RNA, 22 nt, Homo sapiens
uuauaauacaaccugauaagug

SEQ ID NO: 18109 - RNA, 22 nt, Homo sapiens
auauaauacaaccugcuaagug

SEQ ID NO: 18110 - RNA, 22 nt, Homo sapiens
aggcaguguauuguuagcuggc

SEQ ID NO: 18111 - RNA, 22 nt, Homo sapiens
aaacaaacauggugcacuucuu

SEQ ID NO: 18112 - RNA, 23 nt, Homo sapiens
uucauuugguauaaaccgcgauu

SEQ ID NO: 18113 - RNA, 22 nt, Homo sapiens
uuaugguuugccugggacugag

SEQ ID NO: 18114 - RNA, 21 nt, Homo sapiens
aauauuauacagucaaccucu

SEQ ID NO: 18115 - RNA, 25 nt, Homo sapiens
cuagugagggacagaaccaggauuc

SEQ ID NO: 18116 - RNA, 18 nt, Homo sapiens
aucccaccucugccacca

SEQ ID NO: 18117 - RNA, 22 nt, Homo sapiens
ucugggcaacaaagugagaccu

SEQ ID NO: 18118 - RNA, 22 nt, Homo sapiens
uaacacugucugguaaagaugg

SEQ ID NO: 18119 - RNA, 18 nt, Homo sapiens
uccagugcccuccucucc

SEQ ID NO: 18120 - RNA, 22 nt, Homo sapiens
cccugugcccggcccacuucug

SEQ ID NO: 18121 - RNA, 22 nt, Homo sapiens
uaacacugucugguaacgaugu

SEQ ID NO: 18122 - RNA, 23 nt, Homo sapiens
uacuccagagggcgucacucaug

SEQ ID NO: 18123 - RNA, 21 nt, Homo sapiens
gcuaguccugacucagccagu

SEQ ID NO: 18124 - RNA, 19 nt, Homo sapiens
gagccaguuggacaggagc

SEQ ID NO: 18125 - RNA, 25 nt, Homo sapiens
aggggugguguugggacagcuccgu

SEQ ID NO: 18126 - RNA, 25 nt, Homo sapiens
gcugggcagggcuucugagcuccuu

SEQ ID NO: 18127 - RNA, 19 nt, Homo sapiens
ucuaggcugguacugcuga

SEQ ID NO: 18128 - RNA, 22 nt, Homo sapiens
acuccagccccacagccucagc

SEQ ID NO: 18129 - RNA, 23 nt, Homo sapiens
caguaacaaagauucauccuugu

SEQ ID NO: 18130 - RNA, 22 nt, Homo sapiens
cacuggcuccuuucuggguaga

SEQ ID NO: 18131 - RNA, 22 nt, Homo sapiens
caaagugccucccuuuagagug

SEQ ID NO: 18132 - RNA, 22 nt, Homo sapiens
aacccguagauccgaacuugug

SEQ ID NO: 18133 - RNA, 22 nt, Homo sapiens
aacccguagauccgaacuugug

SEQ ID NO: 18134 - RNA, 19 nt, Homo sapiens
gaugaugcugcugaugcug

SEQ ID NO: 18135 - RNA, 22 nt, Homo sapiens
ucagugcaucacagaacuuugu

SEQ ID NO: 18136 - RNA, 24 nt, Homo sapiens
aauccuuggaaccuaggugugagu

SEQ ID NO: 18137 - RNA, 21 nt, Homo sapiens
aucauagaggaaaauccacgu

SEQ ID NO: 18138 - RNA, 22 nt, Homo sapiens
aucauagaggaaaauccauguu

SEQ ID NO: 18139 - RNA, 23 nt, Homo sapiens
uaauccuugcuaccugggugaga

SEQ ID NO: 18140 - RNA, 23 nt, Homo sapiens
uacuccagagggcgucacucaug

SEQ ID NO: 18141 - RNA, 22 nt, Homo sapiens
aucuggagguaagaagcacuuu

SEQ ID NO: 18142 - RNA, 23 nt, Homo sapiens
caaagcgcuucucuuuagagugu

SEQ ID NO: 18143 - RNA, 21 nt, Homo sapiens
cuccagagggaaguacuuucu

SEQ ID NO: 18144 - RNA, 21 nt, Homo sapiens
cuccagagggaugcacuuucu

SEQ ID NO: 18145 - RNA, 22 nt, Homo sapiens
uggugggcacagaaucuggacu

SEQ ID NO: 18146 - RNA, 22 nt, Homo sapiens
caagaaccucaguugcuuuugu

SEQ ID NO: 18147 - RNA, 21 nt, Homo sapiens
cuucuugugcucuaggauugu

SEQ ID NO: 18148 - RNA, 20 nt, Homo sapiens
guugugucaguuuaucaaac

SEQ ID NO: 18149 - RNA, 21 nt, Homo sapiens
cacaagguauugguauuaccu

SEQ ID NO: 18150 - RNA, 22 nt, Homo sapiens
augggugaauuuguagaaggau

SEQ ID NO: 18151 - RNA, 25 nt, Homo sapiens
ugggaacggguuccggcagacgcug

SEQ ID NO: 18152 - RNA, 22 nt, Homo sapiens
aaggagcucacagucuauugag

SEQ ID NO: 18153 - RNA, 22 nt, Homo sapiens
aaaccguuaccauuacugaguu

SEQ ID NO: 18154 - RNA, 20 nt, Homo sapiens
guccgcucggcgguggccca

SEQ ID NO: 18155 - RNA, 25 nt, Homo sapiens
aggggugguguugggacagcuccgu

SEQ ID NO: 18156 - RNA, 22 nt, Homo sapiens
uacccauugcauaucggaguug

SEQ ID NO: 18157 - RNA, 23 nt, Homo sapiens
aaggagcuuacaaucuagcuggg

SEQ ID NO: 18158 - RNA, 22 nt, Homo sapiens
uccauuacacuacccugccucu

SEQ ID NO: 18159 - RNA, 24 nt, Homo sapiens
uggggagcugaggcucugggggug

SEQ ID NO: 18160 - RNA, 22 nt, Homo sapiens
ugagguaguaguuugugcuguu

SEQ ID NO: 18161 - RNA, 22 nt, Homo sapiens
uggagugugacaaugguguuug

SEQ ID NO: 18162 - RNA, 22 nt, Homo sapiens
acccgucccguucguccccgga

SEQ ID NO: 18163 - RNA, 23 nt, Homo sapiens
aacauucaacgcugucggugagu

SEQ ID NO: 18164 - RNA, 21 nt, Homo sapiens
cggcggggacggcgauugguc

SEQ ID NO: 18165 - RNA, 23 nt, Homo sapiens
ugaguaccgccaugucuguuggg

SEQ ID NO: 18166 - RNA, 19 nt, Homo sapiens
aggcugcggaauucaggac

SEQ ID NO: 18167 - RNA, 21 nt, Homo sapiens
uggguuuacguugggagaacu

SEQ ID NO: 18168 - RNA, 22 nt, Homo sapiens
aggcggggcgccgcgggaccgc

SEQ ID NO: 18169 - RNA, 22 nt, Homo sapiens
ugugcgcagggagaccucuccc

SEQ ID NO: 18170 - RNA, 25 nt, Homo sapiens
ugggaacggguuccggcagacgcug

SEQ ID NO: 18171 - RNA, 22 nt, Homo sapiens
uagcagcacauaaugguuugug

SEQ ID NO: 18172 - RNA, 23 nt, Homo sapiens
uacugcaucaggaacugauugga

SEQ ID NO: 18173 - RNA, 23 nt, Homo sapiens
acuuacagacaagagccuugcuc

SEQ ID NO: 18174 - RNA, 23 nt, Homo sapiens
uauucauuuauccccagccuaca

SEQ ID NO: 18175 - RNA, 21 nt, Homo sapiens
cccggagccaggaugcagcuc

SEQ ID NO: 18176 - RNA, 22 nt, Homo sapiens
ugagccccugugccgcccccag

SEQ ID NO: 18177 - RNA, 24 nt, Homo sapiens
uggcccugacugaagaccagcagu

SEQ ID NO: 18178 - RNA, 19 nt, Homo sapiens
aggcugcggaauucaggac

SEQ ID NO: 18179 - RNA, 22 nt, Homo sapiens
aggcggggcgccgcgggaccgc

SEQ ID NO: 18180 - RNA, 22 nt, Homo sapiens
ugcggggcuagggcuaacagca

SEQ ID NO: 18181 - RNA, 22 nt, Homo sapiens
aggcagcgggguguaguggaua

SEQ ID NO: 18182 - RNA, 22 nt, Homo sapiens
aucuggagguaagaagcacuuu

SEQ ID NO: 18183 - RNA, 17 nt, Homo sapiens
ucccuguucgggcgcca

SEQ ID NO: 18184 - RNA, 23 nt, Homo sapiens
ugaguaccgccaugucuguuggg

SEQ ID NO: 18185 - RNA, 22 nt, Homo sapiens
uauguaauaugguccacaucuu

SEQ ID NO: 18186 - RNA, 22 nt, Homo sapiens
gaaguuguucgugguggauucg

SEQ ID NO: 18187 - RNA, 21 nt, Homo sapiens
gugucuuuugcucugcaguca

SEQ ID NO: 18188 - RNA, 19 nt, Homo sapiens
agguugacauacguuuccc

SEQ ID NO: 18189 - RNA, 23 nt, Homo sapiens
aaaagugcuuacagugcagguag

SEQ ID NO: 18190 - RNA, 23 nt, Homo sapiens
aaaagugcuuacagugcagguag

SEQ ID NO: 18191 - RNA, 21 nt, Homo sapiens
uaaagugcugacagugcagau

SEQ ID NO: 18192 - RNA, 21 nt, Homo sapiens
uaaagugcugacagugcagau

SEQ ID NO: 18193 - RNA, 19 nt, Homo sapiens
uggauuuuuggaucaggga

SEQ ID NO: 18194 - RNA, 22 nt, Homo sapiens
uaacagucuacagccauggucg

SEQ ID NO: 18195 - RNA, 23 nt, Homo sapiens
caaagugcuuacagugcagguag

SEQ ID NO: 18196 - RNA, 23 nt, Homo sapiens
caaagugcuuacagugcagguag

SEQ ID NO: 18197 - RNA, 25 nt, Homo sapiens
cccccacaaccgcgcuugacuagcu

SEQ ID NO: 18198 - RNA, 23 nt, Homo sapiens
uaaagugcuuauagugcagguag

SEQ ID NO: 18199 - RNA, 23 nt, Homo sapiens
uaaagugcuuauagugcagguag

SEQ ID NO: 18200 - RNA, 23 nt, Homo sapiens
caaagugcucauagugcagguag

SEQ ID NO: 18201 - RNA, 23 nt, Homo sapiens
caaagugcucauagugcagguag

SEQ ID NO: 18202 - RNA, 21 nt, Homo sapiens
uaacagucuccagucacggcc

SEQ ID NO: 18203 - RNA, 21 nt, Homo sapiens
ugacaacuauggaugagcucu

SEQ ID NO: 18204 - RNA, 22 nt, Homo sapiens
agaguugagucuggacgucccg

SEQ ID NO: 18205 - RNA, 22 nt, Homo sapiens
aaggagcucacagucuauugag

SEQ ID NO: 18206 - RNA, 23 nt, Homo sapiens
uaagugcuuccauguuuugguga

SEQ ID NO: 18207 - RNA, 23 nt, Homo sapiens
uaagugcuuccauguuuuaguag

SEQ ID NO: 18208 - RNA, 23 nt, Homo sapiens
uaagugcuuccauguuucagugg

SEQ ID NO: 18209 - RNA, 23 nt, Homo sapiens
uaagugcuuccauguuugagugu

SEQ ID NO: 18210 - RNA, 17 nt, Homo sapiens
uaagugcuuccaugcuu

SEQ ID NO: 18211 - RNA, 23 nt, Homo sapiens
aaagugcugcgacauuugagcgu

SEQ ID NO: 18212 - RNA, 23 nt, Homo sapiens
gaagugcuucgauuuuggggugu

SEQ ID NO: 18213 - RNA, 22 nt, Homo sapiens
aguggggaacccuuccaugagg

SEQ ID NO: 18214 - RNA, 23 nt, Homo sapiens
uuucaagccagggggcguuuuuc

SEQ ID NO: 18215 - RNA, 22 nt, Homo sapiens
aaagugcauccuuuuagagugu

SEQ ID NO: 18216 - RNA, 22 nt, Homo sapiens
aaagugcauccuuuuagagguu

SEQ ID NO: 18217 - RNA, 22 nt, Homo sapiens
aaagugcaucuuuuuagaggau

SEQ ID NO: 18218 - RNA, 22 nt, Homo sapiens
caaagugccucccuuuagagug

SEQ ID NO: 18219 - RNA, 22 nt, Homo sapiens
caaagugccucccuuuagagug

SEQ ID NO: 18220 - RNA, 22 nt, Homo sapiens
aaagugcuucccuuuggacugu

SEQ ID NO: 18221 - RNA, 21 nt, Homo sapiens
aaagugcuuccuuuuagaggg

SEQ ID NO: 18222 - RNA, 22 nt, Homo sapiens
aaagugcuuccuuuuagagggu

SEQ ID NO: 18223 - RNA, 22 nt, Homo sapiens
aaagugcuucucuuuggugggu

SEQ ID NO: 18224 - RNA, 21 nt, Homo sapiens
aaagugcuuccuuuuugaggg

SEQ ID NO: 18225 - RNA, 23 nt, Homo sapiens
cucuugagggaagcacuuucugu

SEQ ID NO: 18226 - RNA, 23 nt, Homo sapiens
cucuugagggaagcacuuucugu

SEQ ID NO: 18227 - RNA, 23 nt, Homo sapiens
uaaaucccauggugccuucuccu

SEQ ID NO: 18228 - RNA, 22 nt, Homo sapiens
aaccagcaccccaacuuuggac

SEQ ID NO: 18229 - RNA, 23 nt, Homo sapiens
aaggagcuuacaaucuagcuggg

SEQ ID NO: 18230 - RNA, 23 nt, Homo sapiens
caaagugcuguucgugcagguag

SEQ ID NO: 18231 - RNA, 23 nt, Homo sapiens
caaagugcuguucgugcagguag

SEQ ID NO: 18232 - RNA, 21 nt, Homo sapiens
cugacuguugccguccuccag

SEQ ID NO: 18233 - RNA, 22 nt, Homo sapiens
caggauguggucaaguguuguu

SEQ ID NO: 18234 - RNA, 22 nt, Homo sapiens
uuugguccccuucaaccagcug

SEQ ID NO: 18235 - RNA, 22 nt, Homo sapiens
uuugguccccuucaaccagcua

SEQ ID NO: 18236 - RNA, 20 nt, Homo sapiens
ggggagcuguggaagcagua

SEQ ID NO: 18237 - RNA, 22 nt, Homo sapiens
uaugugggaugguaaaccgcuu

SEQ ID NO: 18238 - RNA, 20 nt, Homo sapiens
aaaguagcuguaccauuugc

SEQ ID NO: 18239 - RNA, 23 nt, Homo sapiens
uauucauuuauccccagccuaca

SEQ ID NO: 18240 - RNA, 20 nt, Homo sapiens
ggggagcuguggaagcagua

SEQ ID NO: 18241 - RNA, 22 nt, Homo sapiens
ugugcgcagggagaccucuccc

SEQ ID NO: 18242 - RNA, 22 nt, Homo sapiens
ucuucucuguuuuggccaugug

SEQ ID NO: 18243 - RNA, 21 nt, Homo sapiens
cccggagccaggaugcagcuc

SEQ ID NO: 18244 - RNA, 18 nt, Homo sapiens
aucccaccucugccacca

SEQ ID NO: 18245 - RNA, 23 nt, Homo sapiens
uaaggugcaucuagugcagauag

SEQ ID NO: 18246 - RNA, 21 nt, Homo sapiens
cggcggggacggcgauugguc

SEQ ID NO: 18247 - RNA, 21 nt, Homo sapiens
cggcggggacggcgauugguc

SEQ ID NO: 18248 - RNA, 22 nt, Homo sapiens
ucugcccccuccgcugcugcca

SEQ ID NO: 18249 - RNA, 22 nt, Homo sapiens
acagcaggcacagacaggcagu

SEQ ID NO: 18250 - RNA, 21 nt, Homo sapiens
agggcccccccucaauccugu

SEQ ID NO: 18251 - RNA, 21 nt, Homo sapiens
agggcccccccucaauccugu

SEQ ID NO: 18252 - RNA, 20 nt, Homo sapiens
acugccccaggugcugcugg

SEQ ID NO: 18253 - RNA, 22 nt, Homo sapiens
gccugcugggguggaaccuggu

SEQ ID NO: 18254 - RNA, 23 nt, Homo sapiens
agcucggucugaggccccucagu

SEQ ID NO: 18255 - RNA, 21 nt, Homo sapiens
cggggcagcucaguacaggau

SEQ ID NO: 18256 - RNA, 18 nt, Homo sapiens
ugcuuccuuucagagggu

SEQ ID NO: 18257 - RNA, 22 nt, Homo sapiens
aucuggagguaagaagcacuuu

SEQ ID NO: 18258 - RNA, 24 nt, Homo sapiens
ugccugggucucuggccugcgcgu

SEQ ID NO: 18259 - RNA, 22 nt, Homo sapiens
aggcggggcgccgcgggaccgc

SEQ ID NO: 18260 - RNA, 22 nt, Homo sapiens
aggcggggcgccgcgggaccgc

SEQ ID NO: 18261 - RNA, 22 nt, Homo sapiens
ugcggggcuagggcuaacagca

SEQ ID NO: 18262 - RNA, 22 nt, Homo sapiens
cugcccuggcccgagggaccga

SEQ ID NO: 18263 - RNA, 24 nt, Homo sapiens
uggggagcugaggcucugggggug

SEQ ID NO: 18264 - RNA, 22 nt, Homo sapiens
ugugacugguugaccagagggg

SEQ ID NO: 18265 - RNA, 23 nt, Homo sapiens
ccuaguagguguccaguaagugu

SEQ ID NO: 18266 - RNA, 22 nt, Homo sapiens
aaucguacagggucauccacuu

SEQ ID NO: 18267 - RNA, 23 nt, Homo sapiens
cucuugagggaagcacuuucugu

SEQ ID NO: 18268 - RNA, 22 nt, Homo sapiens
ugagaccucuggguucugagcu

SEQ ID NO: 18269 - RNA, 23 nt, Homo sapiens
uccaguaccacgugucagggcca

SEQ ID NO: 18270 - RNA, 21 nt, Homo sapiens
cugacuguugccguccuccag

SEQ ID NO: 18271 - RNA, 22 nt, Homo sapiens
acccgucccguucguccccgga

SEQ ID NO: 18272 - RNA, 23 nt, Homo sapiens
guccaguuuucccaggaaucccu

SEQ ID NO: 18273 - RNA, 22 nt, Homo sapiens
ugagaacugaauuccauggguu

SEQ ID NO: 18274 - RNA, 22 nt, Homo sapiens
ugagaacugaauuccauaggcu

SEQ ID NO: 18275 - RNA, 21 nt, Homo sapiens
cggcggggacggcgauugguc

SEQ ID NO: 18276 - RNA, 22 nt, Homo sapiens
cgcaggggccgggugcucaccg

SEQ ID NO: 18277 - RNA, 23 nt, Homo sapiens
ugaggggcagagagcgagacuuu

SEQ ID NO: 18278 - RNA, 22 nt, Homo sapiens
aggcggggcgccgcgggaccgc

SEQ ID NO: 18279 - RNA, 22 nt, Homo sapiens
ugcggggcuagggcuaacagca

SEQ ID NO: 18280 - RNA, 22 nt, Homo sapiens
uggaauguaaggaagugugugg

SEQ ID NO: 18281 - RNA, 23 nt, Homo sapiens
agguuacccgagcaacuuugcau

SEQ ID NO: 18282 - RNA, 23 nt, Homo sapiens
uucucgaggaaagaagcacuuuc

SEQ ID NO: 18283 - RNA, 23 nt, Homo sapiens
uuacaguuguucaaccaguuacu

SEQ ID NO: 18284 - RNA, 22 nt, Homo sapiens
ugagaaccacgucugcucugag

SEQ ID NO: 18285 - RNA, 21 nt, Homo sapiens
uggcagggaggcugggagggg

SEQ ID NO: 18286 - RNA, 22 nt, Homo sapiens
ucugggcaacaaagugagaccu

SEQ ID NO: 18287 - RNA, 21 nt, Homo sapiens
cggcggggacggcgauugguc

SEQ ID NO: 18288 - RNA, 25 nt, Homo sapiens
gcugggcagggcuucugagcuccuu

SEQ ID NO: 18289 - RNA, 22 nt, Homo sapiens
aggcggggcgccgcgggaccgc

SEQ ID NO: 18290 - RNA, 21 nt, Homo sapiens
uccgguucucagggcuccacc

SEQ ID NO: 18291 - RNA, 22 nt, Homo sapiens
ugcggggcuagggcuaacagca

SEQ ID NO: 18292 - RNA, 24 nt, Homo sapiens
uggggagcugaggcucugggggug

SEQ ID NO: 18293 - RNA, 22 nt, Homo sapiens
aggcauugacuucucacuagcu

SEQ ID NO: 18294 - RNA, 23 nt, Homo sapiens
uuauugcuuaagaauacgcguag

SEQ ID NO: 18295 - RNA, 21 nt, Homo sapiens
aagugaucuaaaggccuacau

SEQ ID NO: 18296 - RNA, 21 nt, Homo sapiens
cucccacaugcaggguuugca

SEQ ID NO: 18297 - RNA, 21 nt, Homo sapiens
ugagaugaagcacuguagcuc

SEQ ID NO: 18298 - RNA, 21 nt, Homo sapiens
uaguagaccguauagcguacg

SEQ ID NO: 18299 - RNA, 22 nt, Homo sapiens
uugggaucauuuugcauccaua

SEQ ID NO: 18300 - RNA, 22 nt, Homo sapiens
aacaucacagcaagucugugcu

SEQ ID NO: 18301 - RNA, 22 nt, Homo sapiens
ggagaaauuauccuuggugugu

SEQ ID NO: 18302 - RNA, 22 nt, Homo sapiens
augcugacauauuuacuagagg

SEQ ID NO: 18303 - RNA, 23 nt, Homo sapiens
cugggaucuccggggucuugguu

SEQ ID NO: 18304 - RNA, 21 nt, Homo sapiens
cggcggggacggcgauugguc

SEQ ID NO: 18305 - RNA, 21 nt, Homo sapiens
gugcauuguaguugcauugca

SEQ ID NO: 18306 - RNA, 22 nt, Homo sapiens
gaaagcgcuucccuuugcugga

SEQ ID NO: 18307 - RNA, 20 nt, Homo sapiens
cugcaaagggaagcccuuuc

SEQ ID NO: 18308 - RNA, 22 nt, Homo sapiens
caaagcgcuccccuuuagaggu

SEQ ID NO: 18309 - RNA, 23 nt, Homo sapiens
caaagcgcuucucuuuagagugu

SEQ ID NO: 18310 - RNA, 21 nt, Homo sapiens
caaagcgcuucccuuuggagc

SEQ ID NO: 18311 - RNA, 21 nt, Homo sapiens
gaaagcgcuucucuuuagagg

SEQ ID NO: 18312 - RNA, 21 nt, Homo sapiens
gaaggcgcuucccuuuggagu

SEQ ID NO: 18313 - RNA, 22 nt, Homo sapiens
gaaggcgcuucccuuuagagcg

SEQ ID NO: 18314 - RNA, 20 nt, Homo sapiens
cugcaaagggaagcccuuuc

SEQ ID NO: 18315 - RNA, 22 nt, Homo sapiens
aggcggggcgccgcgggaccgc

SEQ ID NO: 18316 - RNA, 23 nt, Homo sapiens
ucuggcuccgugucuucacuccc

SEQ ID NO: 18317 - RNA, 21 nt, Homo sapiens
uccugcgcgucccagaugccc

SEQ ID NO: 18318 - RNA, 21 nt, Homo sapiens
cggcggggacggcgauugguc

SEQ ID NO: 18319 - RNA, 22 nt, Homo sapiens
cgcaggggccgggugcucaccg

SEQ ID NO: 18320 - RNA, 22 nt, Homo sapiens
aggcggggcgccgcgggaccgc

SEQ ID NO: 18321 - RNA, 21 nt, Homo sapiens
uagcagcacagaaauauuggc

SEQ ID NO: 18322 - RNA, 22 nt, Homo sapiens
uggcagugucuuagcugguugu

SEQ ID NO: 18323 - RNA, 22 nt, Homo sapiens
caaucacuaacuccacugccau

SEQ ID NO: 18324 - RNA, 23 nt, Homo sapiens
aggcaguguaguuagcugauugc

SEQ ID NO: 18325 - RNA, 22 nt, Homo sapiens
uggcaguguauuguuagcuggu

SEQ ID NO: 18326 - RNA, 22 nt, Homo sapiens
aggcaguguauuguuagcuggc

SEQ ID NO: 18327 - RNA, 22 nt, Homo sapiens
caaccuggaggacuccaugcug

SEQ ID NO: 18328 - RNA, 19 nt, Homo sapiens
aagugugcagggcacuggu

SEQ ID NO: 18329 - RNA, 22 nt, Homo sapiens
acaguagagggaggaaucgcag

SEQ ID NO: 18330 - RNA, 18 nt, Homo sapiens
cgggcguggugguggggg

SEQ ID NO: 18331 - RNA, 18 nt, Homo sapiens
gucccuguucaggcgcca

SEQ ID NO: 18332 - RNA, 22 nt, Homo sapiens
ucugggcaacaaagugagaccu

SEQ ID NO: 18333 - RNA, 23 nt, Homo sapiens
caacggaaucccaaaagcagcug

SEQ ID NO: 18334 - RNA, 21 nt, Homo sapiens
agggcccccccucaauccugu

SEQ ID NO: 18335 - RNA, 23 nt, Homo sapiens
ucccuguccuccaggagcucacg

SEQ ID NO: 18336 - RNA, 23 nt, Homo sapiens
uagcagcgggaacaguucugcag

SEQ ID NO: 18337 - RNA, 25 nt, Homo sapiens
gcugggcagggcuucugagcuccuu

SEQ ID NO: 18338 - RNA, 23 nt, Homo sapiens
cgggucggaguuagcucaagcgg

SEQ ID NO: 18339 - RNA, 21 nt, Homo sapiens
ccccaccuccucucuccucag

SEQ ID NO: 18340 - RNA, 21 nt, Homo sapiens
aguuaggauuaggucguggaa

SEQ ID NO: 18341 - RNA, 18 nt, Homo sapiens
aucccaccucugccacca

SEQ ID NO: 18342 - RNA, 21 nt, Homo sapiens
gcccuccgcccgugcaccccg

SEQ ID NO: 18343 - RNA, 18 nt, Homo sapiens
ugaggcaguagauugaau

SEQ ID NO: 18344 - RNA, 20 nt, Homo sapiens
ccucugggcccuuccuccag

SEQ ID NO: 18345 - RNA, 22 nt, Homo sapiens
ucucugggccugugucuuaggc

SEQ ID NO: 18346 - RNA, 22 nt, Homo sapiens
aguggggaacccuuccaugagg

SEQ ID NO: 18347 - RNA, 18 nt, Homo sapiens
ugcuuccuuucagagggu

SEQ ID NO: 18348 - RNA, 22 nt, Homo sapiens
aucuggagguaagaagcacuuu

SEQ ID NO: 18349 - RNA, 21 nt, Homo sapiens
guggcugcacucacuuccuuc

SEQ ID NO: 18350 - RNA, 25 nt, Homo sapiens
ggcggagggaaguagguccguuggu

SEQ ID NO: 18351 - RNA, 23 nt, Homo sapiens
agcagcauuguacagggcuauga

SEQ ID NO: 18352 - RNA, 23 nt, Homo sapiens
agcagcauuguacagggcuauca

SEQ ID NO: 18353 - RNA, 23 nt, Homo sapiens
ccugcagcgacuugauggcuucc

SEQ ID NO: 18354 - RNA, 22 nt, Homo sapiens
ugugacugguugaccagagggg

SEQ ID NO: 18355 - RNA, 22 nt, Homo sapiens
ucagugcacuacagaacuuugu

SEQ ID NO: 18356 - RNA, 22 nt, Homo sapiens
ucagugcaucacagaacuuugu

SEQ ID NO: 18357 - RNA, 21 nt, Homo sapiens
ucagugcaugacagaacuugg

SEQ ID NO: 18358 - RNA, 23 nt, Homo sapiens
aacauucaacgcugucggugagu

SEQ ID NO: 18359 - RNA, 23 nt, Homo sapiens
aacauucauugcugucggugggu

SEQ ID NO: 18360 - RNA, 22 nt, Homo sapiens
aacauucaaccugucggugagu

SEQ ID NO: 18361 - RNA, 23 nt, Homo sapiens
aacauucauuguugucggugggu

SEQ ID NO: 18362 - RNA, 23 nt, Homo sapiens
agcuacauugucugcuggguuuc

SEQ ID NO: 18363 - RNA, 21 nt, Homo sapiens
agcuacaucuggcuacugggu

SEQ ID NO: 18364 - RNA, 21 nt, Homo sapiens
gugcauuguaguugcauugca

SEQ ID NO: 18365 - RNA, 22 nt, Homo sapiens
ugaaacauacacgggaaaccuc

SEQ ID NO: 18366 - RNA, 22 nt, Homo sapiens
aaacauucgcggugcacuucuu

SEQ ID NO: 18367 - RNA, 19 nt, Homo sapiens
gugucugcuuccuguggga

SEQ ID NO: 18368 - RNA, 23 nt, Homo sapiens
ugucacucggcucggcccacuac

SEQ ID NO: 18369 - RNA, 22 nt, Homo sapiens
ugagguaguagguuguauaguu

SEQ ID NO: 18370 - RNA, 22 nt, Homo sapiens
ugagguaguagguugugugguu

SEQ ID NO: 18371 - RNA, 19 nt, Homo sapiens
ugucucugcugggguuucu

SEQ ID NO: 18372 - RNA, 24 nt, Homo sapiens
uggcccugacugaagaccagcagu

SEQ ID NO: 18373 - RNA, 23 nt, Homo sapiens
ugguuguaguccgugcgagaaua

SEQ ID NO: 18374 - RNA, 19 nt, Homo sapiens
ugagcugcuguaccaaaau

SEQ ID NO: 18375 - RNA, 21 nt, Homo sapiens
ugagaugaagcacuguagcuc

SEQ ID NO: 18376 - RNA, 18 nt, Homo sapiens
ugaggcaguagauugaau

SEQ ID NO: 18377 - RNA, 22 nt, Homo sapiens
ucgugucuuguguugcagccgg

SEQ ID NO: 18378 - RNA, 22 nt, Homo sapiens
caaucacuaacuccacugccau

SEQ ID NO: 18379 - RNA, 22 nt, Homo sapiens
ugugacagauugauaacugaaa

SEQ ID NO: 18380 - RNA, 22 nt, Homo sapiens
ucagcaaacauuuauugugugc

SEQ ID NO: 18381 - RNA, 19 nt, Homo sapiens
aagcagcugccucugaggc

SEQ ID NO: 18382 - RNA, 19 nt, Homo sapiens
aagugugcagggcacuggu

SEQ ID NO: 18383 - RNA, 21 nt, Homo sapiens
aggaggcagcgcucucaggac

SEQ ID NO: 18384 - RNA, 21 nt, Homo sapiens
gcaggaacuugugagucuccu

SEQ ID NO: 18385 - RNA, 21 nt, Homo sapiens
aaggcagggcccccgcucccc

SEQ ID NO: 18386 - RNA, 23 nt, Homo sapiens
ccugcagcgacuugauggcuucc

SEQ ID NO: 18387 - RNA, 20 nt, Homo sapiens
ucugcaggguuugcuuugag

SEQ ID NO: 18388 - RNA, 20 nt, Homo sapiens
ucugcaggguuugcuuugag

SEQ ID NO: 18389 - RNA, 21 nt, Homo sapiens
ccccaccuccucucuccucag

SEQ ID NO: 18390 - RNA, 22 nt, Homo sapiens
uggagugugacaaugguguuug

SEQ ID NO: 18391 - RNA, 23 nt, Homo sapiens
caaagugcuuacagugcagguag

SEQ ID NO: 18392 - RNA, 22 nt, Homo sapiens
uggagagaaaggcaguuccuga

SEQ ID NO: 18393 - RNA, 21 nt, Homo sapiens
cggcggggacggcgauugguc

SEQ ID NO: 18394 - RNA, 21 nt, Homo sapiens
acuggacuuggagucagaagg

SEQ ID NO: 18395 - RNA, 22 nt, Homo sapiens
acuggacuuagggucagaaggc

SEQ ID NO: 18396 - RNA, 22 nt, Homo sapiens
uacugcagacguggcaaucaug

SEQ ID NO: 18397 - RNA, 21 nt, Homo sapiens
uacugcagacaguggcaauca

SEQ ID NO: 18398 - RNA, 21 nt, Homo sapiens
aacaggugacugguuagacaa

SEQ ID NO: 18399 - RNA, 23 nt, Homo sapiens
cuaauaguaucuaccacaauaaa

SEQ ID NO: 18400 - RNA, 22 nt, Homo sapiens
aggcggggcgccgcgggaccgc

SEQ ID NO: 18401 - RNA, 21 nt, Homo sapiens
ucguggccuggucuccauuau

SEQ ID NO: 18402 - RNA, 22 nt, Homo sapiens
uggagugugacaaugguguuug

SEQ ID NO: 18403 - RNA, 22 nt, Homo sapiens
ccucuuccccuugucucuccag

SEQ ID NO: 18404 - RNA, 17 nt, Homo sapiens
ucgccuccuccucuccc

SEQ ID NO: 18405 - RNA, 20 nt, Homo sapiens
ccccagggcgacgcggcggg

SEQ ID NO: 18406 - RNA, 22 nt, Homo sapiens
aagacgggaggaaagaagggag

SEQ ID NO: 18407 - RNA, 25 nt, Homo sapiens
ggcggagggaaguagguccguuggu

SEQ ID NO: 18408 - RNA, 22 nt, Homo sapiens
gguggcccggccgugccugagg

SEQ ID NO: 18409 - RNA, 23 nt, Homo sapiens
uggugcggagagggcccacagug

SEQ ID NO: 18410 - RNA, 22 nt, Homo sapiens
aggcagcgggguguaguggaua

SEQ ID NO: 18411 - RNA, 20 nt, Homo sapiens
ucugcaggguuugcuuugag

SEQ ID NO: 18412 - RNA, 24 nt, Homo sapiens
ucccugagacccuuuaaccuguga

SEQ ID NO: 18413 - RNA, 22 nt, Homo sapiens
ucccugagacccuaacuuguga

SEQ ID NO: 18414 - RNA, 23 nt, Homo sapiens
ccucagggcuguagaacagggcu

SEQ ID NO: 18415 - RNA, 24 nt, Homo sapiens
uggcccugacugaagaccagcagu

SEQ ID NO: 18416 - RNA, 23 nt, Homo sapiens
ucuggcuccgugucuucacuccc

SEQ ID NO: 18417 - RNA, 23 nt, Homo sapiens
uaaggugcaucuagugcagauag

SEQ ID NO: 18418 - RNA, 22 nt, Homo sapiens
cccugugcccggcccacuucug

SEQ ID NO: 18419 - RNA, 20 nt, Homo sapiens
ccccagggcgacgcggcggg

SEQ ID NO: 18420 - RNA, 22 nt, Homo sapiens
ucaggccaggcacaguggcuca

SEQ ID NO: 18421 - RNA, 22 nt, Homo sapiens
aagcugccaguugaagaacugu

SEQ ID NO: 18422 - RNA, 23 nt, Homo sapiens
agcuacauugucugcuggguuuc

SEQ ID NO: 18423 - RNA, 21 nt, Homo sapiens
aggggugcuaucugugauuga

SEQ ID NO: 18424 - RNA, 20 nt, Homo sapiens
accaggaggcugaggccccu

SEQ ID NO: 18425 - RNA, 22 nt, Homo sapiens
cugcccuggcccgagggaccga

SEQ ID NO: 18426 - RNA, 23 nt, Homo sapiens
cacccggcugugugcacaugugc

SEQ ID NO: 18427 - RNA, 22 nt, Homo sapiens
ucucccaacccuuguaccagug

SEQ ID NO: 18428 - RNA, 22 nt, Homo sapiens
ggagacgcggcccuguuggagu

SEQ ID NO: 18429 - RNA, 22 nt, Homo sapiens
uagguaguuuccuguuguuggg

SEQ ID NO: 18430 - RNA, 23 nt, Homo sapiens
uaauacugccggguaaugaugga

SEQ ID NO: 18431 - RNA, 22 nt, Homo sapiens
auaagacgagcaaaaagcuugu

SEQ ID NO: 18432 - RNA, 22 nt, Homo sapiens
auaagacgaacaaaagguuugu

SEQ ID NO: 18433 - RNA, 22 nt, Homo sapiens
uagcuuaucagacugauguuga

SEQ ID NO: 18434 - RNA, 21 nt, Homo sapiens
agggcccccccucaauccugu

SEQ ID NO: 18435 - RNA, 23 nt, Homo sapiens
agugccugagggaguaagagccc

SEQ ID NO: 18436 - RNA, 19 nt, Homo sapiens
ugucucugcugggguuucu

SEQ ID NO: 18437 - RNA, 23 nt, Homo sapiens
cgggucggaguuagcucaagcgg

SEQ ID NO: 18438 - RNA, 23 nt, Homo sapiens
cacccggcugugugcacaugugc

SEQ ID NO: 18439 - RNA, 22 nt, Homo sapiens
ugagguaguagguuguauaguu

SEQ ID NO: 18440 - RNA, 22 nt, Homo sapiens
ugagguaguagguugugugguu

SEQ ID NO: 18441 - RNA, 19 nt, Homo sapiens
ugucucugcugggguuucu

SEQ ID NO: 18442 - RNA, 24 nt, Homo sapiens
ucccugagacccuuuaaccuguga

SEQ ID NO: 18443 - RNA, 22 nt, Homo sapiens
ucccugagacccuaacuuguga

SEQ ID NO: 18444 - RNA, 23 nt, Homo sapiens
ccucagggcuguagaacagggcu

SEQ ID NO: 18445 - RNA, 22 nt, Homo sapiens
uagguaguuucauguuguuggg

SEQ ID NO: 18446 - RNA, 21 nt, Homo sapiens
caaagguauuugugguuuuug

SEQ ID NO: 18447 - RNA, 23 nt, Homo sapiens
uaaaucccauggugccuucuccu

SEQ ID NO: 18448 - RNA, 19 nt, Homo sapiens
ucuaggcugguacugcuga

SEQ ID NO: 18449 - RNA, 22 nt, Homo sapiens
ugcggggcuagggcuaacagca

SEQ ID NO: 18450 - RNA, 23 nt, Homo sapiens
ucugcucauaccccaugguuucu

SEQ ID NO: 18451 - RNA, 17 nt, Homo sapiens
gugggggagaggcuguc

SEQ ID NO: 18452 - RNA, 18 nt, Homo sapiens
ugaggcaguagauugaau

SEQ ID NO: 18453 - RNA, 22 nt, Homo sapiens
uggacggagaacugauaagggu

SEQ ID NO: 18454 - RNA, 22 nt, Homo sapiens
aacuggccuacaaagucccagu

SEQ ID NO: 18455 - RNA, 22 nt, Homo sapiens
aacuggcccucaaagucccgcu

SEQ ID NO: 18456 - RNA, 25 nt, Homo sapiens
cccccacaaccgcgcuugacuagcu

SEQ ID NO: 18457 - RNA, 23 nt, Homo sapiens
cccaguguucagacuaccuguuc

SEQ ID NO: 18458 - RNA, 23 nt, Homo sapiens
cccaguguuuagacuaucuguuc

SEQ ID NO: 18459 - RNA, 23 nt, Homo sapiens
gcaaagcacacggccugcagaga

SEQ ID NO: 18460 - RNA, 22 nt, Homo sapiens
cgucaacacuugcugguuuccu

SEQ ID NO: 18461 - RNA, 23 nt, Homo sapiens
ugagugugugugugugagugugu

SEQ ID NO: 18462 - RNA, 19 nt, Homo sapiens
ugucucugcugggguuucu

SEQ ID NO: 18463 - RNA, 23 nt, Homo sapiens
gcagcagagaauaggacuacguc

SEQ ID NO: 18464 - RNA, 24 nt, Homo sapiens
uggggagcugaggcucugggggug

SEQ ID NO: 18465 - RNA, 22 nt, Homo sapiens
uggagugugacaaugguguuug

SEQ ID NO: 18466 - RNA, 18 nt, Homo sapiens
cgggcguggugguggggg

SEQ ID NO: 18467 - RNA, 22 nt, Homo sapiens
cucggcgcggggcgcgggcucc

SEQ ID NO: 18468 - RNA, 21 nt, Homo sapiens
uccugcgcgucccagaugccc

SEQ ID NO: 18469 - RNA, 22 nt, Homo sapiens
cucuagagggaagcacuuucug

SEQ ID NO: 18470 - RNA, 22 nt, Homo sapiens
uucaccaccuucuccacccagc

SEQ ID NO: 18471 - RNA, 22 nt, Homo sapiens
cauugcacuugucucggucuga

SEQ ID NO: 18472 - RNA, 23 nt, Homo sapiens
ucaagagcaauaacgaaaaaugu

SEQ ID NO: 18473 - RNA, 23 nt, Homo sapiens
agcucggucugaggccccucagu

SEQ ID NO: 18474 - RNA, 19 nt, Homo sapiens
ugagcugcuguaccaaaau

SEQ ID NO: 18475 - RNA, 22 nt, Homo sapiens
uccgagccugggucucccucuu

SEQ ID NO: 18476 - RNA, 19 nt, Homo sapiens
aagcagcugccucugaggc

SEQ ID NO: 18477 - RNA, 25 nt, Homo sapiens
ggcggagggaaguagguccguuggu

SEQ ID NO: 18478 - RNA, 23 nt, Homo sapiens
cgggucggaguuagcucaagcgg

SEQ ID NO: 18479 - RNA, 21 nt, Homo sapiens
uaaagugcugacagugcagau

SEQ ID NO: 18480 - RNA, 22 nt, Homo sapiens
gugugcggaaaugcuucugcua

SEQ ID NO: 18481 - RNA, 23 nt, Homo sapiens
ucuggcuccgugucuucacuccc

SEQ ID NO: 18482 - RNA, 18 nt, Homo sapiens
uccagugcccuccucucc

SEQ ID NO: 18483 - RNA, 22 nt, Homo sapiens
uggagagaaaggcaguuccuga

SEQ ID NO: 18484 - RNA, 21 nt, Homo sapiens
cggcggggacggcgauugguc

SEQ ID NO: 18485 - RNA, 17 nt, Homo sapiens
uaauugcuuccauguuu

SEQ ID NO: 18486 - RNA, 23 nt, Homo sapiens
ucccccaggugugauucugauuu

SEQ ID NO: 18487 - RNA, 23 nt, Homo sapiens
ugaggggcagagagcgagacuuu

SEQ ID NO: 18488 - RNA, 22 nt, Homo sapiens
augcugacauauuuacuagagg

SEQ ID NO: 18489 - RNA, 24 nt, Homo sapiens
acugggggcuuucgggcucugcgu

SEQ ID NO: 18490 - RNA, 22 nt, Homo sapiens
aggcggggcgccgcgggaccgc

SEQ ID NO: 18491 - RNA, 22 nt, Homo sapiens
ugugcgcagggagaccucuccc

SEQ ID NO: 18492 - RNA, 23 nt, Homo sapiens
ccugcagcgacuugauggcuucc

SEQ ID NO: 18493 - RNA, 23 nt, Homo sapiens
ccugcagcgacuugauggcuucc

SEQ ID NO: 18494 - RNA, 21 nt, Homo sapiens
uggcagggaggcugggagggg

SEQ ID NO: 18495 - RNA, 21 nt, Homo sapiens
cggcggggacggcgauugguc

SEQ ID NO: 18496 - RNA, 22 nt, Homo sapiens
cgcaggggccgggugcucaccg

SEQ ID NO: 18497 - RNA, 22 nt, Homo sapiens
uguaaacauccuacacucagcu

SEQ ID NO: 18498 - RNA, 22 nt, Homo sapiens
aggcggggcgccgcgggaccgc

SEQ ID NO: 18499 - RNA, 21 nt, Homo sapiens
cgcgggugcuuacugacccuu

SEQ ID NO: 18500 - RNA, 21 nt, Homo sapiens
gugccagcugcagugggggag

SEQ ID NO: 18501 - RNA, 21 nt, Homo sapiens
uggcagggaggcugggagggg

SEQ ID NO: 18502 - RNA, 24 nt, Homo sapiens
agccuggaagcuggagccugcagu

SEQ ID NO: 18503 - RNA, 18 nt, Homo sapiens
cgggcguggugguggggg

SEQ ID NO: 18504 - RNA, 23 nt, Homo sapiens
cuggagauauggaagagcugugu

SEQ ID NO: 18505 - RNA, 23 nt, Homo sapiens
ucuggcuccgugucuucacuccc

SEQ ID NO: 18506 - RNA, 22 nt, Homo sapiens
cgcaggggccgggugcucaccg

SEQ ID NO: 18507 - RNA, 22 nt, Homo sapiens
uagcaccaucugaaaucgguua

SEQ ID NO: 18508 - RNA, 23 nt, Homo sapiens
uagcaccauuugaaaucaguguu

SEQ ID NO: 18509 - RNA, 22 nt, Homo sapiens
uggcaguguauuguuagcuggu

SEQ ID NO: 18510 - RNA, 22 nt, Homo sapiens
uagcaccauuugaaaucgguua

SEQ ID NO: 18511 - RNA, 23 nt, Homo sapiens
ucuuggaguaggucauugggugg

SEQ ID NO: 18512 - RNA, 22 nt, Homo sapiens
agaggcuggccgugaugaauuc

SEQ ID NO: 18513 - RNA, 22 nt, Homo sapiens
cgucaacacuugcugguuuccu

SEQ ID NO: 18514 - RNA, 24 nt, Homo sapiens
uucuccaaaagaaagcacuuucug

SEQ ID NO: 18515 - RNA, 22 nt, Homo sapiens
aagugccuccuuuuagaguguu

SEQ ID NO: 18516 - RNA, 20 nt, Homo sapiens
auggagauagauauagaaau

SEQ ID NO: 18517 - RNA, 22 nt, Homo sapiens
acuccagccccacagccucagc

SEQ ID NO: 18518 - RNA, 21 nt, Homo sapiens
aaggcagggcccccgcucccc

SEQ ID NO: 18519 - RNA, 21 nt, Homo sapiens
uccuucugcuccgucccccag

SEQ ID NO: 18520 - RNA, 21 nt, Homo sapiens
uggcagggaggcugggagggg

SEQ ID NO: 18521 - RNA, 24 nt, Homo sapiens
agccuggaagcuggagccugcagu

SEQ ID NO: 18522 - RNA, 21 nt, Homo sapiens
uugggacauacuuaugcuaaa

SEQ ID NO: 18523 - RNA, 21 nt, Homo sapiens
aagugaucuaaaggccuacau

SEQ ID NO: 18524 - RNA, 22 nt, Homo sapiens
cgcaggggccgggugcucaccg

SEQ ID NO: 18525 - RNA, 22 nt, Homo sapiens
ucugcccccuccgcugcugcca

SEQ ID NO: 18526 - RNA, 22 nt, Homo sapiens
uggcucaguucagcaggaacag

SEQ ID NO: 18527 - RNA, 20 nt, Homo sapiens
acugccccaggugcugcugg

SEQ ID NO: 18528 - RNA, 22 nt, Homo sapiens
uaaugccccuaaaaauccuuau

SEQ ID NO: 18529 - RNA, 22 nt, Homo sapiens
ucaggcucaguccccucccgau

SEQ ID NO: 18530 - RNA, 21 nt, Homo sapiens
cggggcagcucaguacaggau

SEQ ID NO: 18531 - RNA, 22 nt, Homo sapiens
uggugggcacagaaucuggacu

SEQ ID NO: 18532 - RNA, 25 nt, Homo sapiens
aggggugguguugggacagcuccgu

SEQ ID NO: 18533 - RNA, 22 nt, Homo sapiens
uggugggccgcagaacaugugc

SEQ ID NO: 18534 - RNA, 22 nt, Homo sapiens
ugcggggcuagggcuaacagca

SEQ ID NO: 18535 - RNA, 21 nt, Homo sapiens
cuuuuugcggucugggcuugc

SEQ ID NO: 18536 - RNA, 21 nt, Homo sapiens
aauauaacacagauggccugu

SEQ ID NO: 18537 - RNA, 27 nt, Homo sapiens
cacuguaggugauggugagagugggca

SEQ ID NO: 18538 - RNA, 22 nt, Homo sapiens
ucaccagcccuguguucccuag

SEQ ID NO: 18539 - RNA, 23 nt, Homo sapiens
agcugguguugugaaucaggccg

SEQ ID NO: 18540 - RNA, 22 nt, Homo sapiens
ucuacagugcacgugucuccag

SEQ ID NO: 18541 - RNA, 22 nt, Homo sapiens
uagcagcacauaaugguuugug

SEQ ID NO: 18542 - RNA, 22 nt, Homo sapiens
uagcagcacaucaugguuuaca

SEQ ID NO: 18543 - RNA, 22 nt, Homo sapiens
uagcagcacguaaauauuggcg

SEQ ID NO: 18544 - RNA, 21 nt, Homo sapiens
uagcagcacagaaauauuggc

SEQ ID NO: 18545 - RNA, 21 nt, Homo sapiens
acuggacuuggagucagaagg

SEQ ID NO: 18546 - RNA, 22 nt, Homo sapiens
cagcagcaauucauguuuugaa

SEQ ID NO: 18547 - RNA, 22 nt, Homo sapiens
ugaguauuacauggccaaucuc

SEQ ID NO: 18548 - RNA, 21 nt, Homo sapiens
cagcagcacacugugguuugu

SEQ ID NO: 18549 - RNA, 23 nt, Homo sapiens
uuucaagccagggggcguuuuuc

SEQ ID NO: 18550 - RNA, 22 nt, Homo sapiens
ucagcaaacauuuauugugugc

SEQ ID NO: 18551 - RNA, 23 nt, Homo sapiens
uuacaguuguucaaccaguuacu

SEQ ID NO: 18552 - RNA, 21 nt, Homo sapiens
uaauuuuauguauaagcuagu

SEQ ID NO: 18553 - RNA, 25 nt, Homo sapiens
aggggugguguugggacagcuccgu

SEQ ID NO: 18554 - RNA, 22 nt, Homo sapiens
aaccagcaccccaacuuuggac

SEQ ID NO: 18555 - RNA, 23 nt, Homo sapiens
gcagcagagaauaggacuacguc

SEQ ID NO: 18556 - RNA, 23 nt, Homo sapiens
ccaguuaccgcuuccgcuaccgc

SEQ ID NO: 18557 - RNA, 24 nt, Homo sapiens
uggcccugacugaagaccagcagu

SEQ ID NO: 18558 - RNA, 22 nt, Homo sapiens
ugcccuguggacucaguucugg

SEQ ID NO: 18559 - RNA, 21 nt, Homo sapiens
uccugcgcgucccagaugccc

SEQ ID NO: 18560 - RNA, 18 nt, Homo sapiens
ugaggcaguagauugaau

SEQ ID NO: 18561 - RNA, 22 nt, Homo sapiens
cgcaggggccgggugcucaccg

SEQ ID NO: 18562 - RNA, 23 nt, Homo sapiens
ugaguaccgccaugucuguuggg

SEQ ID NO: 18563 - RNA, 22 nt, Homo sapiens
cccugugcccggcccacuucug

SEQ ID NO: 18564 - RNA, 21 nt, Homo sapiens
ccaccaccgugucugacacuu

SEQ ID NO: 18565 - RNA, 23 nt, Homo sapiens
cgcauccccuagggcauuggugu

SEQ ID NO: 18566 - RNA, 21 nt, Homo sapiens
aggaggcagcgcucucaggac

SEQ ID NO: 18567 - RNA, 22 nt, Homo sapiens
aggcagcgggguguaguggaua

SEQ ID NO: 18568 - RNA, 23 nt, Homo sapiens
cggcccgggcugcugcuguuccu

SEQ ID NO: 18569 - RNA, 22 nt, Homo sapiens
aacuguuugcagaggaaacuga

SEQ ID NO: 18570 - RNA, 21 nt, Homo sapiens
uagcagcacagaaauauuggc

SEQ ID NO: 18571 - RNA, 23 nt, Homo sapiens
ugugcaaaucuaugcaaaacuga

SEQ ID NO: 18572 - RNA, 23 nt, Homo sapiens
ugugcaaauccaugcaaaacuga

SEQ ID NO: 18573 - RNA, 21 nt, Homo sapiens
uuuugcaccuuuuggagugaa

SEQ ID NO: 18574 - RNA, 23 nt, Homo sapiens
guuugcacgggugggccuugucu

SEQ ID NO: 18575 - RNA, 23 nt, Homo sapiens
uucauuugguauaaaccgcgauu

SEQ ID NO: 18576 - RNA, 22 nt, Homo sapiens
ugagaaccacgucugcucugag

SEQ ID NO: 18577 - RNA, 21 nt, Homo sapiens
acagucugcugagguuggagc

SEQ ID NO: 18578 - RNA, 20 nt, Homo sapiens
agaccauggguucucauugu

SEQ ID NO: 18579 - RNA, 22 nt, Homo sapiens
uggagugugacaaugguguuug

SEQ ID NO: 18580 - RNA, 22 nt, Homo sapiens
aaaucucugcaggcaaauguga

SEQ ID NO: 18581 - RNA, 22 nt, Homo sapiens
uggcagugucuuagcugguugu

SEQ ID NO: 18582 - RNA, 22 nt, Homo sapiens
caaucacuaacuccacugccau

SEQ ID NO: 18583 - RNA, 23 nt, Homo sapiens
aggcaguguaguuagcugauugc

SEQ ID NO: 18584 - RNA, 22 nt, Homo sapiens
uuauaauacaaccugauaagug

SEQ ID NO: 18585 - RNA, 22 nt, Homo sapiens
auauaauacaaccugcuaagug

SEQ ID NO: 18586 - RNA, 20 nt, Homo sapiens
auuccuagaaauuguucaua

SEQ ID NO: 18587 - RNA, 22 nt, Homo sapiens
uggcaguguauuguuagcuggu

SEQ ID NO: 18588 - RNA, 22 nt, Homo sapiens
aggcaguguauuguuagcuggc

SEQ ID NO: 18589 - RNA, 21 nt, Homo sapiens
uagauaaaauauugguaccug

SEQ ID NO: 18590 - RNA, 20 nt, Homo sapiens
agaccauggguucucauugu

SEQ ID NO: 18591 - RNA, 22 nt, Homo sapiens
uggagugugacaaugguguuug

SEQ ID NO: 18592 - RNA, 23 nt, Homo sapiens
uacccuguagaaccgaauuugug

SEQ ID NO: 18593 - RNA, 21 nt, Homo sapiens
ccgucgccgccacccgagccg

SEQ ID NO: 18594 - RNA, 21 nt, Homo sapiens
agagaagaagaucagccugca

SEQ ID NO: 18595 - RNA, 22 nt, Homo sapiens
acucggcguggcgucggucgug

SEQ ID NO: 18596 - RNA, 22 nt, Homo sapiens
cucggcgcggggcgcgggcucc

SEQ ID NO: 18597 - RNA, 18 nt, Homo sapiens
uccagugcccuccucucc

SEQ ID NO: 18598 - RNA, 23 nt, Homo sapiens
ucaagagcaauaacgaaaaaugu

SEQ ID NO: 18599 - RNA, 22 nt, Homo sapiens
gaaagcgcuucccuuugcugga

SEQ ID NO: 18600 - RNA, 22 nt, Homo sapiens
gaaagcgcuucccuuugcugga

SEQ ID NO: 18601 - RNA, 22 nt, Homo sapiens
caaagcgcuccccuuuagaggu

SEQ ID NO: 18602 - RNA, 22 nt, Homo sapiens
caaagcgcuccccuuuagaggu

SEQ ID NO: 18603 - RNA, 23 nt, Homo sapiens
caaagcgcuucucuuuagagugu

SEQ ID NO: 18604 - RNA, 23 nt, Homo sapiens
caaagcgcuucucuuuagagugu

SEQ ID NO: 18605 - RNA, 21 nt, Homo sapiens
caaagcgcuucccuuuggagc

SEQ ID NO: 18606 - RNA, 21 nt, Homo sapiens
caaagcgcuucccuuuggagc

SEQ ID NO: 18607 - RNA, 21 nt, Homo sapiens
aaagcgcuucccuucagagug

SEQ ID NO: 18608 - RNA, 21 nt, Homo sapiens
gaaagcgcuucucuuuagagg

SEQ ID NO: 18609 - RNA, 21 nt, Homo sapiens
gaaagcgcuucucuuuagagg

SEQ ID NO: 18610 - RNA, 23 nt, Homo sapiens
cucuugagggaagcacuuucugu

SEQ ID NO: 18611 - RNA, 21 nt, Homo sapiens
uggguuuacguugggagaacu

SEQ ID NO: 18612 - RNA, 22 nt, Homo sapiens
ucagugcacuacagaacuuugu

SEQ ID NO: 18613 - RNA, 22 nt, Homo sapiens
ugauauguuugauauauuaggu

SEQ ID NO: 18614 - RNA, 22 nt, Homo sapiens
cuggcccucucugcccuuccgu

SEQ ID NO: 18615 - RNA, 20 nt, Homo sapiens
auguauaaauguauacacac

SEQ ID NO: 18616 - RNA, 25 nt, Homo sapiens
aggggugguguugggacagcuccgu

SEQ ID NO: 18617 - RNA, 22 nt, Homo sapiens
caaagugccucccuuuagagug

SEQ ID NO: 18618 - RNA, 20 nt, Homo sapiens
ggggagcuguggaagcagua

SEQ ID NO: 18619 - RNA, 22 nt, Homo sapiens
uggagugugacaaugguguuug

SEQ ID NO: 18620 - RNA, 18 nt, Homo sapiens
gucccuguucaggcgcca

SEQ ID NO: 18621 - RNA, 18 nt, Homo sapiens
cagggaggugaaugugau

SEQ ID NO: 18622 - RNA, 23 nt, Homo sapiens
ucuggcuccgugucuucacuccc

SEQ ID NO: 18623 - RNA, 23 nt, Homo sapiens
ucccuguccuccaggagcucacg

SEQ ID NO: 18624 - RNA, 23 nt, Homo sapiens
uagcagcgggaacaguucugcag

SEQ ID NO: 18625 - RNA, 21 nt, Homo sapiens
agggggaaaguucuauagucc

SEQ ID NO: 18626 - RNA, 23 nt, Homo sapiens
gcagcagagaauaggacuacguc

SEQ ID NO: 18627 - RNA, 22 nt, Homo sapiens
caaagugccucccuuuagagug

SEQ ID NO: 18628 - RNA, 22 nt, Homo sapiens
ucuucucuguuuuggccaugug

SEQ ID NO: 18629 - RNA, 22 nt, Homo sapiens
ucggccugaccacccaccccac

SEQ ID NO: 18630 - RNA, 22 nt, Homo sapiens
cgcaggggccgggugcucaccg

SEQ ID NO: 18631 - RNA, 22 nt, Homo sapiens
uagcaccaucugaaaucgguua

SEQ ID NO: 18632 - RNA, 23 nt, Homo sapiens
uagcaccauuugaaaucaguguu

SEQ ID NO: 18633 - RNA, 22 nt, Homo sapiens
uagcaccauuugaaaucgguua

SEQ ID NO: 18634 - RNA, 21 nt, Homo sapiens
gcuaguccugacucagccagu

SEQ ID NO: 18635 - RNA, 19 nt, Homo sapiens
gggcgccugugaucccaac

SEQ ID NO: 18636 - RNA, 22 nt, Homo sapiens
cuugguucagggagggucccca

SEQ ID NO: 18637 - RNA, 21 nt, Homo sapiens
ucccacguuguggcccagcag

SEQ ID NO: 18638 - RNA, 22 nt, Homo sapiens
cugcccuggcccgagggaccga

SEQ ID NO: 18639 - RNA, 24 nt, Homo sapiens
uuuggcaaugguagaacucacacu

SEQ ID NO: 18640 - RNA, 22 nt, Homo sapiens
uauugcacauuacuaaguugca

SEQ ID NO: 18641 - RNA, 22 nt, Homo sapiens
aacuguuugcagaggaaacuga

SEQ ID NO: 18642 - RNA, 24 nt, Homo sapiens
ugccugggucucuggccugcgcgu

SEQ ID NO: 18643 - RNA, 22 nt, Homo sapiens
uggaauguaaagaaguauguau

SEQ ID NO: 18644 - RNA, 18 nt, Homo sapiens
ucagcuggcccucauuuc

SEQ ID NO: 18645 - RNA, 21 nt, Homo sapiens
uggcagggaggcugggagggg

SEQ ID NO: 18646 - RNA, 24 nt, Homo sapiens
uggcccugacugaagaccagcagu

SEQ ID NO: 18647 - RNA, 20 nt, Homo sapiens
guguguggaaaugcuucugc

SEQ ID NO: 18648 - RNA, 22 nt, Homo sapiens
uccuucauuccaccggagucug

SEQ ID NO: 18649 - RNA, 22 nt, Homo sapiens
uggaauguaaggaagugugugg

SEQ ID NO: 18650 - RNA, 21 nt, Homo sapiens
ccaccaccgugucugacacuu

SEQ ID NO: 18651 - RNA, 23 nt, Homo sapiens
cacucagccuugagggcacuuuc

SEQ ID NO: 18652 - RNA, 22 nt, Homo sapiens
ugagaaccacgucugcucugag

SEQ ID NO: 18653 - RNA, 22 nt, Homo sapiens
cacacacugcaauuacuuuugc

SEQ ID NO: 18654 - RNA, 20 nt, Homo sapiens
aggaauguuccuucuuugcc

SEQ ID NO: 18655 - RNA, 18 nt, Homo sapiens
ugaggcaguagauugaau

SEQ ID NO: 18656 - RNA, 20 nt, Homo sapiens
ccuccugcccuccuugcugu

SEQ ID NO: 18657 - RNA, 22 nt, Homo sapiens
uaaucucagcuggcaacuguga

SEQ ID NO: 18658 - RNA, 23 nt, Homo sapiens
gcaaagcacacggccugcagaga

SEQ ID NO: 18659 - RNA, 21 nt, Homo sapiens
ucacuccucuccucccgucuu

SEQ ID NO: 18660 - RNA, 23 nt, Homo sapiens
aggaccugcgggacaagauucuu

SEQ ID NO: 18661 - RNA, 20 nt, Homo sapiens
accaggaggcugaggccccu

SEQ ID NO: 18662 - RNA, 21 nt, Homo sapiens
uggaggagaaggaaggugaug

SEQ ID NO: 18663 - RNA, 23 nt, Homo sapiens
gcagcagagaauaggacuacguc

SEQ ID NO: 18664 - RNA, 21 nt, Homo sapiens
uugcucacuguucuucccuag

SEQ ID NO: 18665 - RNA, 22 nt, Homo sapiens
cuccugagccauucugagccuc

SEQ ID NO: 18666 - RNA, 23 nt, Homo sapiens
ucuggcuccgugucuucacuccc

SEQ ID NO: 18667 - RNA, 23 nt, Homo sapiens
cccaguguucagacuaccuguuc

SEQ ID NO: 18668 - RNA, 23 nt, Homo sapiens
cccaguguuuagacuaucuguuc

SEQ ID NO: 18669 - RNA, 23 nt, Homo sapiens
agcuacauugucugcuggguuuc

SEQ ID NO: 18670 - RNA, 22 nt, Homo sapiens
cgucaacacuugcugguuuccu

SEQ ID NO: 18671 - RNA, 22 nt, Homo sapiens
uggugggcacagaaucuggacu

SEQ ID NO: 18672 - RNA, 19 nt, Homo sapiens
gagccaguuggacaggagc

SEQ ID NO: 18673 - RNA, 22 nt, Homo sapiens
uggugggccgcagaacaugugc

SEQ ID NO: 18674 - RNA, 23 nt, Homo sapiens
ucugcucauaccccaugguuucu

SEQ ID NO: 18675 - RNA, 22 nt, Homo sapiens
ugcaacgaaccugagccacuga

SEQ ID NO: 18676 - RNA, 22 nt, Homo sapiens
cacuggcuccuuucuggguaga

SEQ ID NO: 18677 - RNA, 21 nt, Homo sapiens
cggcggggacggcgauugguc

SEQ ID NO: 18678 - RNA, 22 nt, Homo sapiens
cauugcacuugucucggucuga

SEQ ID NO: 18679 - RNA, 23 nt, Homo sapiens
ucccccaggugugauucugauuu

SEQ ID NO: 18680 - RNA, 22 nt, Homo sapiens
uaaugccccuaaaaauccuuau

SEQ ID NO: 18681 - RNA, 22 nt, Homo sapiens
ggggguccccggugcucggauc

SEQ ID NO: 18682 - RNA, 24 nt, Homo sapiens
acugggggcuuucgggcucugcgu

SEQ ID NO: 18683 - RNA, 22 nt, Homo sapiens
aggcggggcgccgcgggaccgc

SEQ ID NO: 18684 - RNA, 22 nt, Homo sapiens
auccgcgcucugacucucugcc

SEQ ID NO: 18685 - RNA, 21 nt, Homo sapiens
cuuuuugcggucugggcuugc

SEQ ID NO: 18686 - RNA, 22 nt, Homo sapiens
uauggcacugguagaauucacu

SEQ ID NO: 18687 - RNA, 23 nt, Homo sapiens
ucaagagcaauaacgaaaaaugu

SEQ ID NO: 18688 - RNA, 22 nt, Homo sapiens
uccagcaucagugauuuuguug

SEQ ID NO: 18689 - RNA, 22 nt, Homo sapiens
caaucacuaacuccacugccau

SEQ ID NO: 18690 - RNA, 22 nt, Homo sapiens
uaaugccccuaaaaauccuuau

SEQ ID NO: 18691 - RNA, 22 nt, Homo sapiens
uuuugcaauauguuccugaaua

SEQ ID NO: 18692 - RNA, 21 nt, Homo sapiens
gugucuuuugcucugcaguca

SEQ ID NO: 18693 - RNA, 22 nt, Homo sapiens
ucagcaaacauuuauugugugc

SEQ ID NO: 18694 - RNA, 22 nt, Homo sapiens
uagcaaaaacugcaguuacuuu

SEQ ID NO: 18695 - RNA, 20 nt, Homo sapiens
agaccauggguucucauugu

SEQ ID NO: 18696 - RNA, 22 nt, Homo sapiens
aaccagcaccccaacuuuggac

SEQ ID NO: 18697 - RNA, 23 nt, Homo sapiens
ucuggcuccgugucuucacuccc

SEQ ID NO: 18698 - RNA, 22 nt, Homo sapiens
ucucccaacccuuguaccagug

SEQ ID NO: 18699 - RNA, 23 nt, Homo sapiens
cggcccgggcugcugcuguuccu

SEQ ID NO: 18700 - RNA, 21 nt, Homo sapiens
cggcggggacggcgauugguc

SEQ ID NO: 18701 - RNA, 22 nt, Homo sapiens
uguaacagcaacuccaugugga

SEQ ID NO: 18702 - RNA, 22 nt, Homo sapiens
cauugcacuugucucggucuga

SEQ ID NO: 18703 - RNA, 22 nt, Homo sapiens
uguaaacauccuacacucagcu

SEQ ID NO: 18704 - RNA, 23 nt, Homo sapiens
ugaggggcagagagcgagacuuu

SEQ ID NO: 18705 - RNA, 22 nt, Homo sapiens
ugcggggcuagggcuaacagca

SEQ ID NO: 18706 - RNA, 21 nt, Homo sapiens
ccccaccuccucucuccucag

SEQ ID NO: 18707 - RNA, 22 nt, Homo sapiens
ugagccccugugccgcccccag

SEQ ID NO: 18708 - RNA, 23 nt, Homo sapiens
cucucaccacugcccucccacag

SEQ ID NO: 18709 - RNA, 22 nt, Homo sapiens
uggaauguaaggaagugugugg

SEQ ID NO: 18710 - RNA, 22 nt, Homo sapiens
uuagggcccuggcuccaucucc

SEQ ID NO: 18711 - RNA, 23 nt, Homo sapiens
cggcccgggcugcugcuguuccu

SEQ ID NO: 18712 - RNA, 22 nt, Homo sapiens
uggagagaaaggcaguuccuga

SEQ ID NO: 18713 - RNA, 22 nt, Homo sapiens
uggagagaaaggcaguuccuga

SEQ ID NO: 18714 - RNA, 21 nt, Homo sapiens
agggcccccccucaauccugu

SEQ ID NO: 18715 - RNA, 23 nt, Homo sapiens
agguuacccgagcaacuuugcau

SEQ ID NO: 18716 - RNA, 22 nt, Homo sapiens
uccgagccugggucucccucuu

SEQ ID NO: 18717 - RNA, 23 nt, Homo sapiens
uauucauuuauccccagccuaca

SEQ ID NO: 18718 - RNA, 21 nt, Homo sapiens
cgcgggugcuuacugacccuu

SEQ ID NO: 18719 - RNA, 20 nt, Homo sapiens
ggggagcuguggaagcagua

SEQ ID NO: 18720 - RNA, 23 nt, Homo sapiens
cacccggcugugugcacaugugc

SEQ ID NO: 18721 - RNA, 22 nt, Homo sapiens
uuuccggcucgcgugggugugu

SEQ ID NO: 18722 - RNA, 24 nt, Homo sapiens
agccugauuaaacacaugcucuga

SEQ ID NO: 18723 - RNA, 22 nt, Homo sapiens
ucggccugaccacccaccccac

SEQ ID NO: 18724 - RNA, 18 nt, Homo sapiens
cagggaggugaaugugau

SEQ ID NO: 18725 - RNA, 21 nt, Homo sapiens
cggcggggacggcgauugguc

SEQ ID NO: 18726 - RNA, 22 nt, Homo sapiens
uacgucaucguugucaucguca

SEQ ID NO: 18727 - RNA, 22 nt, Homo sapiens
aggcggggcgccgcgggaccgc

SEQ ID NO: 18728 - RNA, 22 nt, Homo sapiens
ugcggggcuagggcuaacagca

SEQ ID NO: 18729 - RNA, 22 nt, Homo sapiens
acuccagccccacagccucagc

SEQ ID NO: 18730 - RNA, 17 nt, Homo sapiens
ucccaccgcugccaccc

SEQ ID NO: 18731 - RNA, 22 nt, Homo sapiens
uaacacugucugguaaagaugg

SEQ ID NO: 18732 - RNA, 21 nt, Homo sapiens
ucgaggagcucacagucuagu

SEQ ID NO: 18733 - RNA, 23 nt, Homo sapiens
cggcccgggcugcugcuguuccu

SEQ ID NO: 18734 - RNA, 22 nt, Homo sapiens
uaacacugucugguaacgaugu

SEQ ID NO: 18735 - RNA, 21 nt, Homo sapiens
ccaccaccgugucugacacuu

SEQ ID NO: 18736 - RNA, 22 nt, Homo sapiens
uggcucaguucagcaggaacag

SEQ ID NO: 18737 - RNA, 21 nt, Homo sapiens
aggggugcuaucugugauuga

SEQ ID NO: 18738 - RNA, 23 nt, Homo sapiens
uggugcggagagggcccacagug

SEQ ID NO: 18739 - RNA, 20 nt, Homo sapiens
ggggagcuguggaagcagua

SEQ ID NO: 18740 - RNA, 22 nt, Homo sapiens
ugagguaguaguuugugcuguu

SEQ ID NO: 18741 - RNA, 18 nt, Homo sapiens
cagggaggugaaugugau

SEQ ID NO: 18742 - RNA, 22 nt, Homo sapiens
aaaagcuggguugagagggcga

SEQ ID NO: 18743 - RNA, 22 nt, Homo sapiens
aaaagcuggguugagagggcaa

SEQ ID NO: 18744 - RNA, 20 nt, Homo sapiens
aaaagcuggguugagagggu

SEQ ID NO: 18745 - RNA, 19 nt, Homo sapiens
aaaagcuggguugagagga

SEQ ID NO: 18746 - RNA, 19 nt, Homo sapiens
aggcugcggaauucaggac

SEQ ID NO: 18747 - RNA, 22 nt, Homo sapiens
ggggguccccggugcucggauc

SEQ ID NO: 18748 - RNA, 19 nt, Homo sapiens
aguguggcuuucuuagagc

SEQ ID NO: 18749 - RNA, 21 nt, Homo sapiens
guggcugcacucacuuccuuc

SEQ ID NO: 18750 - RNA, 21 nt, Homo sapiens
aggaggcagcgcucucaggac

SEQ ID NO: 18751 - RNA, 22 nt, Homo sapiens
ugcggggcuagggcuaacagca

SEQ ID NO: 18752 - RNA, 23 nt, Homo sapiens
cacccggcugugugcacaugugc

SEQ ID NO: 18753 - RNA, 22 nt, Homo sapiens
uucuggaauucugugugaggga

SEQ ID NO: 18754 - RNA, 22 nt, Homo sapiens
aagcccuuaccccaaaaagcau

SEQ ID NO: 18755 - RNA, 23 nt, Homo sapiens
cggcccgggcugcugcuguuccu

SEQ ID NO: 18756 - RNA, 21 nt, Homo sapiens
cggcggggacggcgauugguc

SEQ ID NO: 18757 - RNA, 23 nt, Homo sapiens
acuugggcacugaaacaaugucc

SEQ ID NO: 18758 - RNA, 22 nt, Homo sapiens
aggcggggcgccgcgggaccgc

SEQ ID NO: 18759 - RNA, 23 nt, Homo sapiens
aggaagcccuggaggggcuggag

SEQ ID NO: 18760 - RNA, 22 nt, Homo sapiens
ugcggggcuagggcuaacagca

SEQ ID NO: 18761 - RNA, 22 nt, Homo sapiens
acuccagccccacagccucagc

SEQ ID NO: 18762 - RNA, 20 nt, Homo sapiens
guagaggagauggcgcaggg

SEQ ID NO: 18763 - RNA, 20 nt, Homo sapiens
agagucuugugaugucuugc

SEQ ID NO: 18764 - RNA, 22 nt, Homo sapiens
auccgcgcucugacucucugcc

SEQ ID NO: 18765 - RNA, 22 nt, Homo sapiens
ugagaacugaauuccauggguu

SEQ ID NO: 18766 - RNA, 23 nt, Homo sapiens
ucuggcuccgugucuucacuccc

SEQ ID NO: 18767 - RNA, 23 nt, Homo sapiens
uaaggugcaucuagugcagauag

SEQ ID NO: 18768 - RNA, 22 nt, Homo sapiens
cgcaggggccgggugcucaccg

SEQ ID NO: 18769 - RNA, 20 nt, Homo sapiens
agagguauagggcaugggaa

SEQ ID NO: 18770 - RNA, 22 nt, Homo sapiens
uauaccucaguuuuaucaggug

SEQ ID NO: 18771 - RNA, 20 nt, Homo sapiens
ggggagcuguggaagcagua

SEQ ID NO: 18772 - RNA, 18 nt, Homo sapiens
ucagcuggcccucauuuc

SEQ ID NO: 18773 - RNA, 21 nt, Homo sapiens
uccuucugcuccgucccccag

SEQ ID NO: 18774 - RNA, 23 nt, Homo sapiens
ucuggcuccgugucuucacuccc

SEQ ID NO: 18775 - RNA, 23 nt, Homo sapiens
ucuggcuccgugucuucacuccc

SEQ ID NO: 18776 - RNA, 22 nt, Homo sapiens
cauugcacuugucucggucuga

SEQ ID NO: 18777 - RNA, 22 nt, Homo sapiens
cgucaacacuugcugguuuccu

SEQ ID NO: 18778 - RNA, 22 nt, Homo sapiens
uacucaggagaguggcaaucac

SEQ ID NO: 18779 - RNA, 21 nt, Homo sapiens
ugaguuggccaucugagugag

SEQ ID NO: 18780 - RNA, 21 nt, Homo sapiens
uggaggagaaggaaggugaug

SEQ ID NO: 18781 - RNA, 22 nt, Homo sapiens
acuccagccccacagccucagc

SEQ ID NO: 18782 - RNA, 23 nt, Homo sapiens
ucaaaugcucagacuccuguggu

SEQ ID NO: 18783 - RNA, 22 nt, Homo sapiens
ccucuuccccuugucucuccag

SEQ ID NO: 18784 - RNA, 22 nt, Homo sapiens
uucccuuugucauccuaugccu

SEQ ID NO: 18785 - RNA, 22 nt, Homo sapiens
uucccuuugucauccuucgccu

SEQ ID NO: 18786 - RNA, 22 nt, Homo sapiens
uaugcauuguauuuuuaggucc

SEQ ID NO: 18787 - RNA, 22 nt, Homo sapiens
gucccucuccaaaugugucuug

SEQ ID NO: 18788 - RNA, 21 nt, Homo sapiens
guggcugcacucacuuccuuc

SEQ ID NO: 18789 - RNA, 22 nt, Homo sapiens
uuagggcccuggcuccaucucc

SEQ ID NO: 18790 - RNA, 18 nt, Homo sapiens
ugaggcaguagauugaau

SEQ ID NO: 18791 - RNA, 23 nt, Homo sapiens
uaaggugcaucuagugcaguuag

SEQ ID NO: 18792 - RNA, 21 nt, Homo sapiens
ccaguccugugccugccgccu

SEQ ID NO: 18793 - RNA, 22 nt, Homo sapiens
ucugcccccuccgcugcugcca

SEQ ID NO: 18794 - RNA, 20 nt, Homo sapiens
ccccagggcgacgcggcggg

SEQ ID NO: 18795 - RNA, 22 nt, Homo sapiens
gauuagggugcuuagcuguuaa

SEQ ID NO: 18796 - RNA, 22 nt, Homo sapiens
gauuagggugcuuagcuguuaa

SEQ ID NO: 18797 - RNA, 20 nt, Homo sapiens
acugccccaggugcugcugg

SEQ ID NO: 18798 - RNA, 22 nt, Homo sapiens
cuggcccucucugcccuuccgu

SEQ ID NO: 18799 - RNA, 21 nt, Homo sapiens
cggggcagcucaguacaggau

SEQ ID NO: 18800 - RNA, 19 nt, Homo sapiens
ucuaggcugguacugcuga

SEQ ID NO: 18801 - RNA, 20 nt, Homo sapiens
cggcucugggucugugggga

SEQ ID NO: 18802 - RNA, 21 nt, Homo sapiens
aaggcagggcccccgcucccc

SEQ ID NO: 18803 - RNA, 21 nt, Homo sapiens
uggcagggaggcugggagggg

SEQ ID NO: 18804 - RNA, 27 nt, Homo sapiens
accuucuuguauaagcacugugcuaaa

SEQ ID NO: 18805 - RNA, 17 nt, Homo sapiens
ucgccuccuccucuccc

SEQ ID NO: 18806 - RNA, 18 nt, Homo sapiens
uugagaaggaggcugcug

SEQ ID NO: 18807 - RNA, 18 nt, Homo sapiens
cagggaggugaaugugau

SEQ ID NO: 18808 - RNA, 23 nt, Homo sapiens
ucuggcuccgugucuucacuccc

SEQ ID NO: 18809 - RNA, 22 nt, Homo sapiens
ucugcccccuccgcugcugcca

SEQ ID NO: 18810 - RNA, 20 nt, Homo sapiens
acugccccaggugcugcugg

SEQ ID NO: 18811 - RNA, 22 nt, Homo sapiens
uaaugccccuaaaaauccuuau

SEQ ID NO: 18812 - RNA, 23 nt, Homo sapiens
ugaggggcagagagcgagacuuu

SEQ ID NO: 18813 - RNA, 21 nt, Homo sapiens
cggggcagcucaguacaggau

SEQ ID NO: 18814 - RNA, 20 nt, Homo sapiens
accaggaggcugaggccccu

SEQ ID NO: 18815 - RNA, 21 nt, Homo sapiens
uggcagggaggcugggagggg

SEQ ID NO: 18816 - RNA, 22 nt, Homo sapiens
acucggcguggcgucggucgug

SEQ ID NO: 18817 - RNA, 22 nt, Homo sapiens
cucggcgcggggcgcgggcucc

SEQ ID NO: 18818 - RNA, 21 nt, Homo sapiens
cggcggggacggcgauugguc

SEQ ID NO: 18819 - RNA, 21 nt, Homo sapiens
cggcggggacggcgauugguc

SEQ ID NO: 18820 - RNA, 22 nt, Homo sapiens
aggcggggcgccgcgggaccgc

SEQ ID NO: 18821 - RNA, 22 nt, Homo sapiens
aggcggggcgccgcgggaccgc

SEQ ID NO: 18822 - RNA, 22 nt, Homo sapiens
ugcggggcuagggcuaacagca

SEQ ID NO: 18823 - RNA, 22 nt, Homo sapiens
ugcggggcuagggcuaacagca

SEQ ID NO: 18824 - RNA, 21 nt, Homo sapiens
uggaggagaaggaaggugaug

SEQ ID NO: 18825 - RNA, 21 nt, Homo sapiens
gugccagcugcagugggggag

SEQ ID NO: 18826 - RNA, 18 nt, Homo sapiens
cagggaggugaaugugau

SEQ ID NO: 18827 - RNA, 23 nt, Homo sapiens
ucuggcuccgugucuucacuccc

SEQ ID NO: 18828 - RNA, 21 nt, Homo sapiens
cggcggggacggcgauugguc

SEQ ID NO: 18829 - RNA, 23 nt, Homo sapiens
caacggaaucccaaaagcagcug

SEQ ID NO: 18830 - RNA, 22 nt, Homo sapiens
uguaacagcaacuccaugugga

SEQ ID NO: 18831 - RNA, 22 nt, Homo sapiens
cucccacugcuucacuugacua

SEQ ID NO: 18832 - RNA, 23 nt, Homo sapiens
uacugcaucaggaacugauugga

SEQ ID NO: 18833 - RNA, 22 nt, Homo sapiens
aagcugccaguugaagaacugu

SEQ ID NO: 18834 - RNA, 22 nt, Homo sapiens
uguaaacauccuacacucagcu

SEQ ID NO: 18835 - RNA, 22 nt, Homo sapiens
uccagcaucagugauuuuguug

SEQ ID NO: 18836 - RNA, 22 nt, Homo sapiens
uggcagugucuuagcugguugu

SEQ ID NO: 18837 - RNA, 23 nt, Homo sapiens
aggcaguguaguuagcugauugc

SEQ ID NO: 18838 - RNA, 22 nt, Homo sapiens
uggcaguguauuguuagcuggu

SEQ ID NO: 18839 - RNA, 22 nt, Homo sapiens
aggcaguguauuguuagcuggc

SEQ ID NO: 18840 - RNA, 22 nt, Homo sapiens
ccucccacacccaaggcuugca

SEQ ID NO: 18841 - RNA, 19 nt, Homo sapiens
ugagcugcuguaccaaaau

SEQ ID NO: 18842 - RNA, 25 nt, Homo sapiens
aggggugguguugggacagcuccgu

SEQ ID NO: 18843 - RNA, 21 nt, Homo sapiens
acagucugcugagguuggagc

SEQ ID NO: 18844 - RNA, 22 nt, Homo sapiens
aggcggggcgccgcgggaccgc

SEQ ID NO: 18845 - RNA, 22 nt, Homo sapiens
aggcagcgggguguaguggaua

SEQ ID NO: 18846 - RNA, 20 nt, Homo sapiens
ggggagcuguggaagcagua

SEQ ID NO: 18847 - RNA, 22 nt, Homo sapiens
ugagccccugugccgcccccag

SEQ ID NO: 18848 - RNA, 22 nt, Homo sapiens
acccgucccguucguccccgga

SEQ ID NO: 18849 - RNA, 25 nt, Homo sapiens
ugggaacggguuccggcagacgcug

SEQ ID NO: 18850 - RNA, 22 nt, Homo sapiens
cucuagagggaagcacuuucug

SEQ ID NO: 18851 - RNA, 25 nt, Homo sapiens
cccccacaaccgcgcuugacuagcu

SEQ ID NO: 18852 - RNA, 22 nt, Homo sapiens
uaugugggaugguaaaccgcuu

SEQ ID NO: 18853 - RNA, 22 nt, Homo sapiens
aucuggagguaagaagcacuuu

SEQ ID NO: 18854 - RNA, 23 nt, Homo sapiens
cucuugagggaagcacuuucugu

SEQ ID NO: 18855 - RNA, 21 nt, Homo sapiens
agggggaaaguucuauagucc

SEQ ID NO: 18856 - RNA, 21 nt, Homo sapiens
gaaggcgcuucccuuuggagu

SEQ ID NO: 18857 - RNA, 21 nt, Homo sapiens
cugaccuaugaauugacagcc

SEQ ID NO: 18858 - RNA, 22 nt, Homo sapiens
uguaacagcaacuccaugugga

SEQ ID NO: 18859 - RNA, 21 nt, Homo sapiens
aauauaacacagauggccugu

SEQ ID NO: 18860 - RNA, 22 nt, Homo sapiens
gugacaucacauauacggcagc

SEQ ID NO: 18861 - RNA, 20 nt, Homo sapiens
auguauaaauguauacacac

SEQ ID NO: 18862 - RNA, 23 nt, Homo sapiens
uucauuugguauaaaccgcgauu

SEQ ID NO: 18863 - RNA, 21 nt, Homo sapiens
uaauuuuauguauaagcuagu

SEQ ID NO: 18864 - RNA, 23 nt, Homo sapiens
caguaacaaagauucauccuugu

SEQ ID NO: 18865 - RNA, 21 nt, Homo sapiens
ugcaggaccaagaugagcccu

SEQ ID NO: 18866 - RNA, 22 nt, Homo sapiens
uggacggagaacugauaagggu

SEQ ID NO: 18867 - RNA, 22 nt, Homo sapiens
uggagagaaaggcaguuccuga

SEQ ID NO: 18868 - RNA, 22 nt, Homo sapiens
ugggucuuugcgggcgagauga

SEQ ID NO: 18869 - RNA, 22 nt, Homo sapiens
aaaagcuggguugagagggcga

SEQ ID NO: 18870 - RNA, 22 nt, Homo sapiens
aaaagcuggguugagagggcaa

SEQ ID NO: 18871 - RNA, 20 nt, Homo sapiens
aaaagcuggguugagagggu

SEQ ID NO: 18872 - RNA, 19 nt, Homo sapiens
aaaagcuggguugagagga

SEQ ID NO: 18873 - RNA, 23 nt, Homo sapiens
ucccccaggugugauucugauuu

SEQ ID NO: 18874 - RNA, 22 nt, Homo sapiens
aaaaguacuugcggauuuugcu

SEQ ID NO: 18875 - RNA, 24 nt, Homo sapiens
acugggggcuuucgggcucugcgu

SEQ ID NO: 18876 - RNA, 22 nt, Homo sapiens
gucccucuccaaaugugucuug

SEQ ID NO: 18877 - RNA, 20 nt, Homo sapiens
accaggaggcugaggccccu

SEQ ID NO: 18878 - RNA, 23 nt, Homo sapiens
ugaguaccgccaugucuguuggg

SEQ ID NO: 18879 - RNA, 21 nt, Homo sapiens
ccacaccguaucugacacuuu

SEQ ID NO: 18880 - RNA, 23 nt, Homo sapiens
aucaacagacauuaauugggcgc

SEQ ID NO: 18881 - RNA, 22 nt, Homo sapiens
aacuguuugcagaggaaacuga

SEQ ID NO: 18882 - RNA, 23 nt, Homo sapiens
uaaauuucaccuuucugagaagg

SEQ ID NO: 18883 - RNA, 19 nt, Homo sapiens
ugucucugcugggguuucu

SEQ ID NO: 18884 - RNA, 21 nt, Homo sapiens
uggcagggaggcugggagggg

SEQ ID NO: 18885 - RNA, 18 nt, Homo sapiens
cagggaggugaaugugau

SEQ ID NO: 18886 - RNA, 21 nt, Homo sapiens
ucgaggagcucacagucuagu

SEQ ID NO: 18887 - RNA, 22 nt, Homo sapiens
uagcagcacauaaugguuugug

SEQ ID NO: 18888 - RNA, 22 nt, Homo sapiens
uagcagcacaucaugguuuaca

SEQ ID NO: 18889 - RNA, 22 nt, Homo sapiens
uagcagcacguaaauauuggcg

SEQ ID NO: 18890 - RNA, 21 nt, Homo sapiens
uagcagcacagaaauauuggc

SEQ ID NO: 18891 - RNA, 22 nt, Homo sapiens
uagcuuaucagacugauguuga

SEQ ID NO: 18892 - RNA, 22 nt, Homo sapiens
cuggcccucucugcccuuccgu

SEQ ID NO: 18893 - RNA, 22 nt, Homo sapiens
cagcagcaauucauguuuugaa

SEQ ID NO: 18894 - RNA, 21 nt, Homo sapiens
cagcagcacacugugguuugu

SEQ ID NO: 18895 - RNA, 18 nt, Homo sapiens
ugcuuccuuucagagggu

SEQ ID NO: 18896 - RNA, 22 nt, Homo sapiens
aucuggagguaagaagcacuuu

SEQ ID NO: 18897 - RNA, 21 nt, Homo sapiens
uggguuuacguugggagaacu

SEQ ID NO: 18898 - RNA, 21 nt, Homo sapiens
uggaggagaaggaaggugaug

SEQ ID NO: 18899 - RNA, 23 nt, Homo sapiens
uccaguaccacgugucagggcca

SEQ ID NO: 18900 - RNA, 21 nt, Homo sapiens
aaggcagggcccccgcucccc

SEQ ID NO: 18901 - RNA, 22 nt, Homo sapiens
aacuggaucaauuauaggagug

SEQ ID NO: 18902 - RNA, 18 nt, Homo sapiens
gucccuguucaggcgcca

SEQ ID NO: 18903 - RNA, 18 nt, Homo sapiens
cagggaggugaaugugau

SEQ ID NO: 18904 - RNA, 22 nt, Homo sapiens
gguccagaggggagauagguuc

SEQ ID NO: 18905 - RNA, 22 nt, Homo sapiens
uggcagugucuuagcugguugu

SEQ ID NO: 18906 - RNA, 22 nt, Homo sapiens
gaugagcucauuguaauaugag

SEQ ID NO: 18907 - RNA, 22 nt, Homo sapiens
cacacacugcaauuacuuuugc

SEQ ID NO: 18908 - RNA, 21 nt, Homo sapiens
aggaggcagcgcucucaggac

SEQ ID NO: 18909 - RNA, 23 nt, Homo sapiens
uccaguaccacgugucagggcca

SEQ ID NO: 18910 - RNA, 20 nt, Homo sapiens
guagaggagauggcgcaggg

SEQ ID NO: 18911 - RNA, 19 nt, Homo sapiens
gugaggacucgggaggugg

SEQ ID NO: 18912 - RNA, 25 nt, Homo sapiens
ugggaacggguuccggcagacgcug

SEQ ID NO: 18913 - RNA, 23 nt, Homo sapiens
ucuggcuccgugucuucacuccc

SEQ ID NO: 18914 - RNA, 22 nt, Homo sapiens
caaagaauucuccuuuugggcu

SEQ ID NO: 18915 - RNA, 25 nt, Homo sapiens
cccccacaaccgcgcuugacuagcu

SEQ ID NO: 18916 - RNA, 22 nt, Homo sapiens
uuggggaaacggccgcugagug

SEQ ID NO: 18917 - RNA, 23 nt, Homo sapiens
ugagcgccucgacgacagagccg

SEQ ID NO: 18918 - RNA, 25 nt, Homo sapiens
aggggugguguugggacagcuccgu

SEQ ID NO: 18919 - RNA, 20 nt, Homo sapiens
ggggagcuguggaagcagua

SEQ ID NO: 18920 - RNA, 23 nt, Homo sapiens
uacccuguagauccgaauuugug

SEQ ID NO: 18921 - RNA, 23 nt, Homo sapiens
uacccuguagaaccgaauuugug

SEQ ID NO: 18922 - RNA, 22 nt, Homo sapiens
ggagacgcggcccuguuggagu

SEQ ID NO: 18923 - RNA, 22 nt, Homo sapiens
acacagggcuguugugaagacu

SEQ ID NO: 18924 - RNA, 23 nt, Homo sapiens
ucccccaggugugauucugauuu

SEQ ID NO: 18925 - RNA, 21 nt, Homo sapiens
agggggaaaguucuauagucc

SEQ ID NO: 18926 - RNA, 24 nt, Homo sapiens
acugggggcuuucgggcucugcgu

SEQ ID NO: 18927 - RNA, 20 nt, Homo sapiens
accaggaggcugaggccccu

SEQ ID NO: 18928 - RNA, 21 nt, Homo sapiens
ccuggaaacacugagguugug

SEQ ID NO: 18929 - RNA, 20 nt, Homo sapiens
ggggagcuguggaagcagua

SEQ ID NO: 18930 - RNA, 22 nt, Homo sapiens
ccucuuccccuugucucuccag

SEQ ID NO: 18931 - RNA, 22 nt, Homo sapiens
cauugcacuugucucggucuga

SEQ ID NO: 18932 - RNA, 18 nt, Homo sapiens
ugcuuccuuucagagggu

SEQ ID NO: 18933 - RNA, 22 nt, Homo sapiens
aucuggagguaagaagcacuuu

SEQ ID NO: 18934 - RNA, 23 nt, Homo sapiens
gcgaggaccccucggggucugac

SEQ ID NO: 18935 - RNA, 22 nt, Homo sapiens
agacuucccauuugaagguggc

SEQ ID NO: 18936 - RNA, 20 nt, Homo sapiens
guagaggagauggcgcaggg

SEQ ID NO: 18937 - RNA, 20 nt, Homo sapiens
agagucuugugaugucuugc

SEQ ID NO: 18938 - RNA, 17 nt, Homo sapiens
ucgccuccuccucuccc

SEQ ID NO: 18939 - RNA, 18 nt, Homo sapiens
cagggaggugaaugugau

SEQ ID NO: 18940 - RNA, 23 nt, Homo sapiens
cggcccgggcugcugcuguuccu

SEQ ID NO: 18941 - RNA, 23 nt, Homo sapiens
cggcccgggcugcugcuguuccu

SEQ ID NO: 18942 - RNA, 21 nt, Homo sapiens
cggcggggacggcgauugguc

SEQ ID NO: 18943 - RNA, 21 nt, Homo sapiens
agggcccccccucaauccugu

SEQ ID NO: 18944 - RNA, 23 nt, Homo sapiens
ucccccaggugugauucugauuu

SEQ ID NO: 18945 - RNA, 23 nt, Homo sapiens
ugaggggcagagagcgagacuuu

SEQ ID NO: 18946 - RNA, 22 nt, Homo sapiens
cgucaacacuugcugguuuccu

SEQ ID NO: 18947 - RNA, 22 nt, Homo sapiens
ugagaaccacgucugcucugag

SEQ ID NO: 18948 - RNA, 24 nt, Homo sapiens
acugggggcuuucgggcucugcgu

SEQ ID NO: 18949 - RNA, 23 nt, Homo sapiens
ggcagguucucacccucucuagg

SEQ ID NO: 18950 - RNA, 22 nt, Homo sapiens
ugcggggcuagggcuaacagca

SEQ ID NO: 18951 - RNA, 23 nt, Homo sapiens
aaaagugcuuacagugcagguag

SEQ ID NO: 18952 - RNA, 26 nt, Homo sapiens
aaguaguugguuuguaugagaugguu

SEQ ID NO: 18953 - RNA, 25 nt, Homo sapiens
gggcgacaaagcaagacucuuucuu

SEQ ID NO: 18954 - RNA, 22 nt, Homo sapiens
uagguuauccguguugccuucg

SEQ ID NO: 18955 - RNA, 22 nt, Homo sapiens
cucccacugcuucacuugacua

SEQ ID NO: 18956 - RNA, 22 nt, Homo sapiens
acaguagucugcacauugguua

SEQ ID NO: 18957 - RNA, 22 nt, Homo sapiens
acaguagucugcacauugguua

SEQ ID NO: 18958 - RNA, 21 nt, Homo sapiens
agcuacaucuggcuacugggu

SEQ ID NO: 18959 - RNA, 22 nt, Homo sapiens
agaucagaaggugauuguggcu

SEQ ID NO: 18960 - RNA, 22 nt, Homo sapiens
gucauacacggcucuccucucu

SEQ ID NO: 18961 - RNA, 22 nt, Homo sapiens
aaucauacagggacauccaguu

SEQ ID NO: 18962 - RNA, 21 nt, Homo sapiens
aaacuacugaaaaucaaagau

SEQ ID NO: 18963 - RNA, 27 nt, Homo sapiens
accuucuuguauaagcacugugcuaaa

SEQ ID NO: 18964 - RNA, 23 nt, Homo sapiens
ucuggcuccgugucuucacuccc

SEQ ID NO: 18965 - RNA, 22 nt, Homo sapiens
uggagagaaaggcaguuccuga

SEQ ID NO: 18966 - RNA, 23 nt, Homo sapiens
cccaguguucagacuaccuguuc

SEQ ID NO: 18967 - RNA, 23 nt, Homo sapiens
cccaguguuuagacuaucuguuc

SEQ ID NO: 18968 - RNA, 21 nt, Homo sapiens
uaaagugcugacagugcagau

SEQ ID NO: 18969 - RNA, 23 nt, Homo sapiens
cagugcaaugauauugucaaagc

SEQ ID NO: 18970 - RNA, 23 nt, Homo sapiens
ucucacacagaaaucgcacccgu

SEQ ID NO: 18971 - RNA, 22 nt, Homo sapiens
ggagaaauuauccuuggugugu

SEQ ID NO: 18972 - RNA, 22 nt, Homo sapiens
gucccucuccaaaugugucuug

SEQ ID NO: 18973 - RNA, 20 nt, Homo sapiens
guagaggagauggcgcaggg

SEQ ID NO: 18974 - RNA, 22 nt, Homo sapiens
ucuucucuguuuuggccaugug

SEQ ID NO: 18975 - RNA, 21 nt, Homo sapiens
acucuagcugccaaaggcgcu

SEQ ID NO: 18976 - RNA, 23 nt, Homo sapiens
aggaugagcaaagaaaguagauu

SEQ ID NO: 18977 - RNA, 22 nt, Homo sapiens
cggaugagcaaagaaagugguu

SEQ ID NO: 18978 - RNA, 22 nt, Homo sapiens
ucaaaacugaggggcauuuucu

SEQ ID NO: 18979 - RNA, 23 nt, Homo sapiens
caacggaaucccaaaagcagcug

SEQ ID NO: 18980 - RNA, 22 nt, Homo sapiens
aagcugccaguugaagaacugu

SEQ ID NO: 18981 - RNA, 21 nt, Homo sapiens
gugcauuguaguugcauugca

SEQ ID NO: 18982 - RNA, 22 nt, Homo sapiens
ugaaacauacacgggaaaccuc

SEQ ID NO: 18983 - RNA, 22 nt, Homo sapiens
ccaaaacugcaguuacuuuugc

SEQ ID NO: 18984 - RNA, 21 nt, Homo sapiens
cuucuugugcucuaggauugu

SEQ ID NO: 18985 - RNA, 24 nt, Homo sapiens
ugccugggucucuggccugcgcgu

SEQ ID NO: 18986 - RNA, 23 nt, Homo sapiens
aggaagcccuggaggggcuggag

SEQ ID NO: 18987 - RNA, 22 nt, Homo sapiens
uucaacggguauuuauugagca

SEQ ID NO: 18988 - RNA, 23 nt, Homo sapiens
agcagcauuguacagggcuauga

SEQ ID NO: 18989 - RNA, 23 nt, Homo sapiens
agcagcauuguacagggcuauca

SEQ ID NO: 18990 - RNA, 21 nt, Homo sapiens
ccccaccuccucucuccucag

SEQ ID NO: 18991 - RNA, 17 nt, Homo sapiens
ucgccuccuccucuccc

SEQ ID NO: 18992 - RNA, 22 nt, Homo sapiens
cauugcacuugucucggucuga

SEQ ID NO: 18993 - RNA, 23 nt, Homo sapiens
uaagugcuuccauguuuuaguag

SEQ ID NO: 18994 - RNA, 23 nt, Homo sapiens
uaagugcuuccauguuugagugu

SEQ ID NO: 18995 - RNA, 22 nt, Homo sapiens
uguaaacauccuacacucagcu

SEQ ID NO: 18996 - RNA, 22 nt, Homo sapiens
gaaagcgcuucccuuugcugga

SEQ ID NO: 18997 - RNA, 22 nt, Homo sapiens
caaagcgcuccccuuuagaggu

SEQ ID NO: 18998 - RNA, 23 nt, Homo sapiens
caaagcgcuucucuuuagagugu

SEQ ID NO: 18999 - RNA, 21 nt, Homo sapiens
caaagcgcuucccuuuggagc

SEQ ID NO: 19000 - RNA, 21 nt, Homo sapiens
aaagcgcuucccuucagagug

SEQ ID NO: 19001 - RNA, 21 nt, Homo sapiens
gaaagcgcuucucuuuagagg

SEQ ID NO: 19002 - RNA, 22 nt, Homo sapiens
gugagucucuaagaaaagagga

SEQ ID NO: 19003 - RNA, 22 nt, Homo sapiens
ucuucucuguuuuggccaugug

SEQ ID NO: 19004 - RNA, 24 nt, Homo sapiens
uggcccugacugaagaccagcagu

SEQ ID NO: 19005 - RNA, 22 nt, Homo sapiens
acucggcguggcgucggucgug

SEQ ID NO: 19006 - RNA, 17 nt, Homo sapiens
ucccuguucgggcgcca

SEQ ID NO: 19007 - RNA, 22 nt, Homo sapiens
aagcugccaguugaagaacugu

SEQ ID NO: 19008 - RNA, 21 nt, Homo sapiens
gugcauuguaguugcauugca

SEQ ID NO: 19009 - RNA, 22 nt, Homo sapiens
agacccuggucugcacucuauc

SEQ ID NO: 19010 - RNA, 22 nt, Homo sapiens
uugugucaauaugcgaugaugu

SEQ ID NO: 19011 - RNA, 22 nt, Homo sapiens
ugugucacucgaugaccacugu

SEQ ID NO: 19012 - RNA, 17 nt, Homo sapiens
ucgccuccuccucuccc

SEQ ID NO: 19013 - RNA, 21 nt, Homo sapiens
gcccuccgcccgugcaccccg

SEQ ID NO: 19014 - RNA, 23 nt, Homo sapiens
cggcccgggcugcugcuguuccu

SEQ ID NO: 19015 - RNA, 21 nt, Homo sapiens
cggcggggacggcgauugguc

SEQ ID NO: 19016 - RNA, 22 nt, Homo sapiens
cauugcacuugucucggucuga

SEQ ID NO: 19017 - RNA, 23 nt, Homo sapiens
ugagcgccucgacgacagagccg

SEQ ID NO: 19018 - RNA, 25 nt, Homo sapiens
ggcggagggaaguagguccguuggu

SEQ ID NO: 19019 - RNA, 22 nt, Homo sapiens
aggcggggcgccgcgggaccgc

SEQ ID NO: 19020 - RNA, 18 nt, Homo sapiens
cagggaggugaaugugau

SEQ ID NO: 19021 - RNA, 22 nt, Homo sapiens
ugagaacugaauuccauggguu

SEQ ID NO: 19022 - RNA, 23 nt, Homo sapiens
ucuggcuccgugucuucacuccc

SEQ ID NO: 19023 - RNA, 22 nt, Homo sapiens
uucccuuugucauccuaugccu

SEQ ID NO: 19024 - RNA, 22 nt, Homo sapiens
uucccuuugucauccuucgccu

SEQ ID NO: 19025 - RNA, 22 nt, Homo sapiens
aaaucucugcaggcaaauguga

SEQ ID NO: 19026 - RNA, 23 nt, Homo sapiens
agcuacauugucugcuggguuuc

SEQ ID NO: 19027 - RNA, 21 nt, Homo sapiens
uucacaguggcuaaguucugc

SEQ ID NO: 19028 - RNA, 23 nt, Homo sapiens
uacuccagagggcgucacucaug

SEQ ID NO: 19029 - RNA, 21 nt, Homo sapiens
uggguuuacguugggagaacu

SEQ ID NO: 19030 - RNA, 21 nt, Homo sapiens
uggguuuacguugggagaacu

SEQ ID NO: 19031 - RNA, 21 nt, Homo sapiens
uggaggagaaggaaggugaug

SEQ ID NO: 19032 - RNA, 22 nt, Homo sapiens
aacccguagauccgaacuugug

SEQ ID NO: 19033 - RNA, 21 nt, Homo sapiens
uggcagggaggcugggagggg

SEQ ID NO: 19034 - RNA, 21 nt, Homo sapiens
cuccguuugccuguuucgcug

SEQ ID NO: 19035 - RNA, 22 nt, Homo sapiens
cucggcgcggggcgcgggcucc

SEQ ID NO: 19036 - RNA, 21 nt, Homo sapiens
uccugcgcgucccagaugccc

SEQ ID NO: 19037 - RNA, 18 nt, Homo sapiens
ugaggcaguagauugaau

SEQ ID NO: 19038 - RNA, 23 nt, Homo sapiens
agcuacauugucugcuggguuuc

SEQ ID NO: 19039 - RNA, 22 nt, Homo sapiens
ugaaggucuacugugugccagg

SEQ ID NO: 19040 - RNA, 19 nt, Homo sapiens
gggcgccugugaucccaac

SEQ ID NO: 19041 - RNA, 21 nt, Homo sapiens
aggaggcagcgcucucaggac

SEQ ID NO: 19042 - RNA, 22 nt, Homo sapiens
ugcaacgaaccugagccacuga

SEQ ID NO: 19043 - RNA, 20 nt, Homo sapiens
ggggagcuguggaagcagua

SEQ ID NO: 19044 - RNA, 21 nt, Homo sapiens
aaggcagggcccccgcucccc

SEQ ID NO: 19045 - RNA, 22 nt, Homo sapiens
aacccguagauccgaucuugug

SEQ ID NO: 19046 - RNA, 22 nt, Homo sapiens
cacccguagaaccgaccuugcg

SEQ ID NO: 19047 - RNA, 18 nt, Homo sapiens
cagggaggugaaugugau

SEQ ID NO: 19048 - RNA, 18 nt, Homo sapiens
cagggaggugaaugugau

SEQ ID NO: 19049 - RNA, 23 nt, Homo sapiens
ucuggcuccgugucuucacuccc

SEQ ID NO: 19050 - RNA, 22 nt, Homo sapiens
uggagagaaaggcaguuccuga

SEQ ID NO: 19051 - RNA, 22 nt, Homo sapiens
acagcaggcacagacaggcagu

SEQ ID NO: 19052 - RNA, 22 nt, Homo sapiens
uguaaacauccuacacucagcu

SEQ ID NO: 19053 - RNA, 22 nt, Homo sapiens
gccugcugggguggaaccuggu

SEQ ID NO: 19054 - RNA, 22 nt, Homo sapiens
ugagccccugugccgcccccag

SEQ ID NO: 19055 - RNA, 20 nt, Homo sapiens
cgugccacccuuuuccccag

SEQ ID NO: 19056 - RNA, 22 nt, Homo sapiens
aaggagcucacagucuauugag

SEQ ID NO: 19057 - RNA, 22 nt, Homo sapiens
aguggggaacccuuccaugagg

SEQ ID NO: 19058 - RNA, 23 nt, Homo sapiens
aaggagcuuacaaucuagcuggg

SEQ ID NO: 19059 - RNA, 21 nt, Homo sapiens
uggaggagaaggaaggugaug

SEQ ID NO: 19060 - RNA, 22 nt, Homo sapiens
uggagugugacaaugguguuug

SEQ ID NO: 19061 - RNA, 17 nt, Homo sapiens
gugggggagaggcuguc

SEQ ID NO: 19062 - RNA, 22 nt, Homo sapiens
ugugagguuggcauuguugucu

SEQ ID NO: 19063 - RNA, 22 nt, Homo sapiens
uucuggaauucugugugaggga

SEQ ID NO: 19064 - RNA, 21 nt, Homo sapiens
agggcccccccucaauccugu

SEQ ID NO: 19065 - RNA, 22 nt, Homo sapiens
uccagcaucagugauuuuguug

SEQ ID NO: 19066 - RNA, 23 nt, Homo sapiens
ucccccaggugugauucugauuu

SEQ ID NO: 19067 - RNA, 23 nt, Homo sapiens
caaagcgcuucucuuuagagugu

SEQ ID NO: 19068 - RNA, 21 nt, Homo sapiens
cuccagagggaaguacuuucu

SEQ ID NO: 19069 - RNA, 21 nt, Homo sapiens
cuccagagggaugcacuuucu

SEQ ID NO: 19070 - RNA, 21 nt, Homo sapiens
ucuuguguucucuagaucagu

SEQ ID NO: 19071 - RNA, 20 nt, Homo sapiens
guugugucaguuuaucaaac

SEQ ID NO: 19072 - RNA, 21 nt, Homo sapiens
agggggaaaguucuauagucc

SEQ ID NO: 19073 - RNA, 24 nt, Homo sapiens
acugggggcuuucgggcucugcgu

SEQ ID NO: 19074 - RNA, 24 nt, Homo sapiens
aaagacauaggauagagucaccuc

SEQ ID NO: 19075 - RNA, 23 nt, Homo sapiens
aggaagcccuggaggggcuggag

SEQ ID NO: 19076 - RNA, 20 nt, Homo sapiens
cggcucugggucugugggga

SEQ ID NO: 19077 - RNA, 21 nt, Homo sapiens
gaaggcgcuucccuuuggagu

SEQ ID NO: 19078 - RNA, 22 nt, Homo sapiens
ucugggcaacaaagugagaccu

SEQ ID NO: 19079 - RNA, 24 nt, Homo sapiens
uggcccugacugaagaccagcagu

SEQ ID NO: 19080 - RNA, 22 nt, Homo sapiens
uggguggucuggagauuugugc

SEQ ID NO: 19081 - RNA, 22 nt, Homo sapiens
uacccagagcaugcagugugaa

SEQ ID NO: 19082 - RNA, 20 nt, Homo sapiens
ccccagggcgacgcggcggg

SEQ ID NO: 19083 - RNA, 22 nt, Homo sapiens
gguccagaggggagauagguuc

SEQ ID NO: 19084 - RNA, 21 nt, Homo sapiens
ccaccaccgugucugacacuu

SEQ ID NO: 19085 - RNA, 24 nt, Homo sapiens
aauccuuggaaccuaggugugagu

SEQ ID NO: 19086 - RNA, 21 nt, Homo sapiens
acuggacuuggagucagaagg

SEQ ID NO: 19087 - RNA, 22 nt, Homo sapiens
acuggacuuagggucagaaggc

SEQ ID NO: 19088 - RNA, 21 nt, Homo sapiens
uugaaaggcuauuucuugguc

SEQ ID NO: 19089 - RNA, 25 nt, Homo sapiens
gcugggcagggcuucugagcuccuu

SEQ ID NO: 19090 - RNA, 24 nt, Homo sapiens
ugccugggucucuggccugcgcgu

SEQ ID NO: 19091 - RNA, 22 nt, Homo sapiens
gguggcccggccgugccugagg

SEQ ID NO: 19092 - RNA, 22 nt, Homo sapiens
ugagccccugugccgcccccag

SEQ ID NO: 19093 - RNA, 22 nt, Homo sapiens
uggagugugacaaugguguuug

SEQ ID NO: 19094 - RNA, 22 nt, Homo sapiens
uggagagaaaggcaguuccuga

SEQ ID NO: 19095 - RNA, 21 nt, Homo sapiens
cggcggggacggcgauugguc

SEQ ID NO: 19096 - RNA, 22 nt, Homo sapiens
cccugugcccggcccacuucug

SEQ ID NO: 19097 - RNA, 22 nt, Homo sapiens
aacuggccuacaaagucccagu

SEQ ID NO: 19098 - RNA, 22 nt, Homo sapiens
aacuggcccucaaagucccgcu

SEQ ID NO: 19099 - RNA, 22 nt, Homo sapiens
uggcaguguauuguuagcuggu

SEQ ID NO: 19100 - RNA, 22 nt, Homo sapiens
agaucagaaggugauuguggcu

SEQ ID NO: 19101 - RNA, 23 nt, Homo sapiens
uaagugcuuccauguuuugguga

SEQ ID NO: 19102 - RNA, 22 nt, Homo sapiens
cuggcccucucugcccuuccgu

SEQ ID NO: 19103 - RNA, 22 nt, Homo sapiens
uggugggcacagaaucuggacu

SEQ ID NO: 19104 - RNA, 19 nt, Homo sapiens
ugagcugcuguaccaaaau

SEQ ID NO: 19105 - RNA, 22 nt, Homo sapiens
uaacugguugaacaacugaacc

SEQ ID NO: 19106 - RNA, 25 nt, Homo sapiens
aggggugguguugggacagcuccgu

SEQ ID NO: 19107 - RNA, 22 nt, Homo sapiens
uggugggccgcagaacaugugc

SEQ ID NO: 19108 - RNA, 22 nt, Homo sapiens
aggcggggcgccgcgggaccgc

SEQ ID NO: 19109 - RNA, 22 nt, Homo sapiens
ugcggggcuagggcuaacagca

SEQ ID NO: 19110 - RNA, 20 nt, Homo sapiens
cggcucugggucugugggga

SEQ ID NO: 19111 - RNA, 21 nt, Homo sapiens
uugggacauacuuaugcuaaa

SEQ ID NO: 19112 - RNA, 22 nt, Homo sapiens
uggagagaaaggcaguuccuga

SEQ ID NO: 19113 - RNA, 23 nt, Homo sapiens
aggaccugcgggacaagauucuu

SEQ ID NO: 19114 - RNA, 22 nt, Homo sapiens
agacuucccauuugaagguggc

SEQ ID NO: 19115 - RNA, 23 nt, Homo sapiens
uacccuguagaaccgaauuugug

SEQ ID NO: 19116 - RNA, 21 nt, Homo sapiens
ccuguugaaguguaaucccca

SEQ ID NO: 19117 - RNA, 23 nt, Homo sapiens
uuauugcuuaagaauacgcguag

SEQ ID NO: 19118 - RNA, 27 nt, Homo sapiens
auugaucaucgacacuucgaacgcaau

SEQ ID NO: 19119 - RNA, 23 nt, Homo sapiens
aucaacagacauuaauugggcgc

SEQ ID NO: 19120 - RNA, 22 nt, Homo sapiens
aucaugaugggcuccucggugu

SEQ ID NO: 19121 - RNA, 21 nt, Homo sapiens
ucuaguaagaguggcagucga

SEQ ID NO: 19122 - RNA, 21 nt, Homo sapiens
uuaauaucggacaaccauugu

SEQ ID NO: 19123 - RNA, 20 nt, Homo sapiens
cgugccacccuuuuccccag

SEQ ID NO: 19124 - RNA, 22 nt, Homo sapiens
uuuagagacggggucuugcucu

SEQ ID NO: 19125 - RNA, 22 nt, Homo sapiens
uggacggagaacugauaagggu

SEQ ID NO: 19126 - RNA, 20 nt, Homo sapiens
ccccagggcgacgcggcggg

SEQ ID NO: 19127 - RNA, 22 nt, Homo sapiens
gguccagaggggagauagguuc

SEQ ID NO: 19128 - RNA, 22 nt, Homo sapiens
acaguagucugcacauugguua

SEQ ID NO: 19129 - RNA, 22 nt, Homo sapiens
acaguagucugcacauugguua

SEQ ID NO: 19130 - RNA, 21 nt, Homo sapiens
agcuacaucuggcuacugggu

SEQ ID NO: 19131 - RNA, 24 nt, Homo sapiens
uucuccaaaagaaagcacuuucug

SEQ ID NO: 19132 - RNA, 22 nt, Homo sapiens
aagugccuccuuuuagaguguu

SEQ ID NO: 19133 - RNA, 22 nt, Homo sapiens
caaaacuggcaauuacuuuugc

SEQ ID NO: 19134 - RNA, 22 nt, Homo sapiens
aaaaacugagacuacuuuugca

SEQ ID NO: 19135 - RNA, 19 nt, Homo sapiens
aaaaacuguaauuacuuuu

SEQ ID NO: 19136 - RNA, 20 nt, Homo sapiens
guccgcucggcgguggccca

SEQ ID NO: 19137 - RNA, 17 nt, Homo sapiens
ucccaccgcugccaccc

SEQ ID NO: 19138 - RNA, 17 nt, Homo sapiens
ucgccuccuccucuccc

SEQ ID NO: 19139 - RNA, 18 nt, Homo sapiens
cagggaggugaaugugau

SEQ ID NO: 19140 - RNA, 22 nt, Homo sapiens
ucaaaacugaggggcauuuucu

SEQ ID NO: 19141 - RNA, 23 nt, Homo sapiens
ucuggcuccgugucuucacuccc

SEQ ID NO: 19142 - RNA, 22 nt, Homo sapiens
ucucccaacccuuguaccagug

SEQ ID NO: 19143 - RNA, 22 nt, Homo sapiens
uggagagaaaggcaguuccuga

SEQ ID NO: 19144 - RNA, 22 nt, Homo sapiens
cauugcacuugucucggucuga

SEQ ID NO: 19145 - RNA, 22 nt, Homo sapiens
aguggggaacccuuccaugagg

SEQ ID NO: 19146 - RNA, 22 nt, Homo sapiens
ccaaaacugcaguuacuuuugc

SEQ ID NO: 19147 - RNA, 22 nt, Homo sapiens
gucccucuccaaaugugucuug

SEQ ID NO: 19148 - RNA, 21 nt, Homo sapiens
uggaggagaaggaaggugaug

SEQ ID NO: 19149 - RNA, 20 nt, Homo sapiens
ggggagcuguggaagcagua

SEQ ID NO: 19150 - RNA, 21 nt, Homo sapiens
uugcucacuguucuucccuag

SEQ ID NO: 19151 - RNA, 22 nt, Homo sapiens
ccucuuccccuugucucuccag

SEQ ID NO: 19152 - RNA, 22 nt, Homo sapiens
ucugggcaacaaagugagaccu

SEQ ID NO: 19153 - RNA, 20 nt, Homo sapiens
auuccuagaaauuguucaua

SEQ ID NO: 19154 - RNA, 20 nt, Homo sapiens
guagaggagauggcgcaggg

SEQ ID NO: 19155 - RNA, 21 nt, Homo sapiens
gcccuccgcccgugcaccccg

SEQ ID NO: 19156 - RNA, 23 nt, Homo sapiens
ucuggcuccgugucuucacuccc

SEQ ID NO: 19157 - RNA, 22 nt, Homo sapiens
cucuagagggaagcacuuucug

SEQ ID NO: 19158 - RNA, 22 nt, Homo sapiens
uggagagaaaggcaguuccuga

SEQ ID NO: 19159 - RNA, 22 nt, Homo sapiens
uguaaacauccuacacucagcu

SEQ ID NO: 19160 - RNA, 23 nt, Homo sapiens
ugaggggcagagagcgagacuuu

SEQ ID NO: 19161 - RNA, 19 nt, Homo sapiens
ugagcugcuguaccaaaau

SEQ ID NO: 19162 - RNA, 25 nt, Homo sapiens
ggcggagggaaguagguccguuggu

SEQ ID NO: 19163 - RNA, 23 nt, Homo sapiens
uggugcggagagggcccacagug

SEQ ID NO: 19164 - RNA, 23 nt, Homo sapiens
gagggucuugggagggaugugac

SEQ ID NO: 19165 - RNA, 21 nt, Homo sapiens
ucacagugaaccggucucuuu

SEQ ID NO: 19166 - RNA, 21 nt, Homo sapiens
uaccacaggguagaaccacgg

SEQ ID NO: 19167 - RNA, 22 nt, Homo sapiens
uguaacagcaacuccaugugga

SEQ ID NO: 19168 - RNA, 22 nt, Homo sapiens
agaucagaaggugauuguggcu

SEQ ID NO: 19169 - RNA, 21 nt, Homo sapiens
aggcaagaugcuggcauagcu

SEQ ID NO: 19170 - RNA, 21 nt, Homo sapiens
ucacuccucuccucccgucuu

SEQ ID NO: 19171 - RNA, 21 nt, Homo sapiens
uugaaaggcuauuucuugguc

SEQ ID NO: 19172 - RNA, 21 nt, Homo sapiens
cagcagcacacugugguuugu

SEQ ID NO: 19173 - RNA, 18 nt, Homo sapiens
ugcuuccuuucagagggu

SEQ ID NO: 19174 - RNA, 22 nt, Homo sapiens
aucuggagguaagaagcacuuu

SEQ ID NO: 19175 - RNA, 21 nt, Homo sapiens
guguugaaacaaucucuacug

SEQ ID NO: 19176 - RNA, 21 nt, Homo sapiens
cacuguguccuuucugcguag

SEQ ID NO: 19177 - RNA, 22 nt, Homo sapiens
uagcagcacauaaugguuugug

SEQ ID NO: 19178 - RNA, 22 nt, Homo sapiens
uagcagcacaucaugguuuaca

SEQ ID NO: 19179 - RNA, 22 nt, Homo sapiens
uagcagcacguaaauauuggcg

SEQ ID NO: 19180 - RNA, 21 nt, Homo sapiens
uagcagcacagaaauauuggc

SEQ ID NO: 19181 - RNA, 22 nt, Homo sapiens
cuggcccucucugcccuuccgu

SEQ ID NO: 19182 - RNA, 21 nt, Homo sapiens
gccccugggccuauccuagaa

SEQ ID NO: 19183 - RNA, 22 nt, Homo sapiens
cagcagcaauucauguuuugaa

SEQ ID NO: 19184 - RNA, 21 nt, Homo sapiens
cagcagcacacugugguuugu

SEQ ID NO: 19185 - RNA, 19 nt, Homo sapiens
aggcacggugucagcaggc

SEQ ID NO: 19186 - RNA, 19 nt, Homo sapiens
aagcagcugccucugaggc

SEQ ID NO: 19187 - RNA, 22 nt, Homo sapiens
gguggcccggccgugccugagg

SEQ ID NO: 19188 - RNA, 20 nt, Homo sapiens
ggggagcuguggaagcagua

SEQ ID NO: 19189 - RNA, 17 nt, Homo sapiens
ucgccuccuccucuccc

SEQ ID NO: 19190 - RNA, 18 nt, Homo sapiens
cagggaggugaaugugau

SEQ ID NO: 19191 - RNA, 21 nt, Homo sapiens
ucgaggagcucacagucuagu

SEQ ID NO: 19192 - RNA, 21 nt, Homo sapiens
cggcggggacggcgauugguc

SEQ ID NO: 19193 - RNA, 21 nt, Homo sapiens
agggcccccccucaauccugu

SEQ ID NO: 19194 - RNA, 23 nt, Homo sapiens
gaacgccuguucuugccaggugg

SEQ ID NO: 19195 - RNA, 22 nt, Homo sapiens
aggcggggcgccgcgggaccgc

SEQ ID NO: 19196 - RNA, 21 nt, Homo sapiens
uggaggagaaggaaggugaug

SEQ ID NO: 19197 - RNA, 21 nt, Homo sapiens
uggcagggaggcugggagggg

SEQ ID NO: 19198 - RNA, 22 nt, Homo sapiens
ugagccccugugccgcccccag

SEQ ID NO: 19199 - RNA, 23 nt, Homo sapiens
uaaggugcaucuagugcagauag

SEQ ID NO: 19200 - RNA, 22 nt, Homo sapiens
cgcaggggccgggugcucaccg

SEQ ID NO: 19201 - RNA, 22 nt, Homo sapiens
ucugcccccuccgcugcugcca

SEQ ID NO: 19202 - RNA, 21 nt, Homo sapiens
aucacauugccagggauuucc

SEQ ID NO: 19203 - RNA, 21 nt, Homo sapiens
aucacauugccagggauuacc

SEQ ID NO: 19204 - RNA, 20 nt, Homo sapiens
acugccccaggugcugcugg

SEQ ID NO: 19205 - RNA, 21 nt, Homo sapiens
cggggcagcucaguacaggau

SEQ ID NO: 19206 - RNA, 22 nt, Homo sapiens
caaaguuuaagauccuugaagu

SEQ ID NO: 19207 - RNA, 22 nt, Homo sapiens
uccgagccugggucucccucuu

SEQ ID NO: 19208 - RNA, 22 nt, Homo sapiens
ugcggggcuagggcuaacagca

SEQ ID NO: 19209 - RNA, 23 nt, Homo sapiens
aaaagugcuuacagugcagguag

SEQ ID NO: 19210 - RNA, 21 nt, Homo sapiens
uaaagugcugacagugcagau

SEQ ID NO: 19211 - RNA, 21 nt, Homo sapiens
uccuucugcuccgucccccag

SEQ ID NO: 19212 - RNA, 26 nt, Homo sapiens
gaugaugauggcagcaaauucugaaa

SEQ ID NO: 19213 - RNA, 23 nt, Homo sapiens
caaagugcuuacagugcagguag

SEQ ID NO: 19214 - RNA, 23 nt, Homo sapiens
uaaagugcuuauagugcagguag

SEQ ID NO: 19215 - RNA, 23 nt, Homo sapiens
caaagugcucauagugcagguag

SEQ ID NO: 19216 - RNA, 21 nt, Homo sapiens
aucauagaggaaaauccacgu

SEQ ID NO: 19217 - RNA, 22 nt, Homo sapiens
aucauagaggaaaauccauguu

SEQ ID NO: 19218 - RNA, 23 nt, Homo sapiens
cacucagccuugagggcacuuuc

SEQ ID NO: 19219 - RNA, 22 nt, Homo sapiens
aaagugcauccuuuuagagugu

SEQ ID NO: 19220 - RNA, 22 nt, Homo sapiens
aaagugcauccuuuuagagguu

SEQ ID NO: 19221 - RNA, 22 nt, Homo sapiens
aaagugcaucuuuuuagaggau

SEQ ID NO: 19222 - RNA, 22 nt, Homo sapiens
caaagugccucccuuuagagug

SEQ ID NO: 19223 - RNA, 23 nt, Homo sapiens
cucuugagggaagcacuuucugu

SEQ ID NO: 19224 - RNA, 21 nt, Homo sapiens
caaagguauuugugguuuuug

SEQ ID NO: 19225 - RNA, 23 nt, Homo sapiens
caaagugcuguucgugcagguag

SEQ ID NO: 19226 - RNA, 22 nt, Homo sapiens
acaggugagguucuugggagcc

SEQ ID NO: 19227 - RNA, 22 nt, Homo sapiens
ucugggcaacaaagugagaccu

SEQ ID NO: 19228 - RNA, 23 nt, Homo sapiens
caacggaaucccaaaagcagcug

SEQ ID NO: 19229 - RNA, 21 nt, Homo sapiens
uucacaguggcuaaguuccgc

SEQ ID NO: 19230 - RNA, 21 nt, Homo sapiens
agggcccccccucaauccugu

SEQ ID NO: 19231 - RNA, 22 nt, Homo sapiens
auauaauacaaccugcuaagug

SEQ ID NO: 19232 - RNA, 22 nt, Homo sapiens
uggugggcacagaaucuggacu

SEQ ID NO: 19233 - RNA, 22 nt, Homo sapiens
ugugucacucgaugaccacugu

SEQ ID NO: 19234 - RNA, 25 nt, Homo sapiens
gcugggcagggcuucugagcuccuu

SEQ ID NO: 19235 - RNA, 22 nt, Homo sapiens
uggugggccgcagaacaugugc

SEQ ID NO: 19236 - RNA, 21 nt, Homo sapiens
ccgucgccgccacccgagccg

SEQ ID NO: 19237 - RNA, 23 nt, Homo sapiens
ugaguaccgccaugucuguuggg

SEQ ID NO: 19238 - RNA, 22 nt, Homo sapiens
uacccagagcaugcagugugaa

SEQ ID NO: 19239 - RNA, 22 nt, Homo sapiens
acagcaggcacagacaggcagu

SEQ ID NO: 19240 - RNA, 21 nt, Homo sapiens
uucacaguggcuaaguuccgc

SEQ ID NO: 19241 - RNA, 21 nt, Homo sapiens
uucacaguggcuaaguucugc

SEQ ID NO: 19242 - RNA, 22 nt, Homo sapiens
uguaaacauccucgacuggaag

SEQ ID NO: 19243 - RNA, 22 nt, Homo sapiens
uguaaacauccuacacucagcu

SEQ ID NO: 19244 - RNA, 23 nt, Homo sapiens
uguaaacauccuacacucucagc

SEQ ID NO: 19245 - RNA, 22 nt, Homo sapiens
uguaaacauccccgacuggaag

SEQ ID NO: 19246 - RNA, 22 nt, Homo sapiens
uguaaacauccuugacuggaag

SEQ ID NO: 19247 - RNA, 22 nt, Homo sapiens
gccugcugggguggaaccuggu

SEQ ID NO: 19248 - RNA, 25 nt, Homo sapiens
aggggugguguugggacagcuccgu

SEQ ID NO: 19249 - RNA, 17 nt, Homo sapiens
ucucgcuggggccucca

SEQ ID NO: 19250 - RNA, 20 nt, Homo sapiens
ggggagcuguggaagcagua

SEQ ID NO: 19251 - RNA, 23 nt, Homo sapiens
uauggcuuuuuauuccuauguga

SEQ ID NO: 19252 - RNA, 23 nt, Homo sapiens
uauggcuuuucauuccuauguga

SEQ ID NO: 19253 - RNA, 22 nt, Homo sapiens
aaaaccgucuaguuacaguugu

SEQ ID NO: 19254 - RNA, 24 nt, Homo sapiens
uuuggcaaugguagaacucacacu

SEQ ID NO: 19255 - RNA, 20 nt, Homo sapiens
ugagcccuguccucccgcag

SEQ ID NO: 19256 - RNA, 20 nt, Homo sapiens
uaaggcacgcggugaaugcc

SEQ ID NO: 19257 - RNA, 23 nt, Homo sapiens
uggaguccaggaaucugcauuuu

SEQ ID NO: 19258 - RNA, 21 nt, Homo sapiens
aagugaucuaaaggccuacau

SEQ ID NO: 19259 - RNA, 18 nt, Homo sapiens
ugaggcaguagauugaau

SEQ ID NO: 19260 - RNA, 20 nt, Homo sapiens
agagguauagggcaugggaa

SEQ ID NO: 19261 - RNA, 21 nt, Homo sapiens
uaaggcacccuucugaguaga

SEQ ID NO: 19262 - RNA, 22 nt, Homo sapiens
aucgugcaucccuuuagagugu

SEQ ID NO: 19263 - RNA, 22 nt, Homo sapiens
aucgugcauccuuuuagagugu

SEQ ID NO: 19264 - RNA, 25 nt, Homo sapiens
ggcggagggaaguagguccguuggu

SEQ ID NO: 19265 - RNA, 22 nt, Homo sapiens
uauaccucaguuuuaucaggug

SEQ ID NO: 19266 - RNA, 22 nt, Homo sapiens
aggcagcgggguguaguggaua

SEQ ID NO: 19267 - RNA, 24 nt, Homo sapiens
agccugauuaaacacaugcucuga

SEQ ID NO: 19268 - RNA, 21 nt, Homo sapiens
cccggagccaggaugcagcuc

SEQ ID NO: 19269 - RNA, 17 nt, Homo sapiens
ucccuguucgggcgcca

SEQ ID NO: 19270 - RNA, 22 nt, Homo sapiens
ugcccuguggacucaguucugg

SEQ ID NO: 19271 - RNA, 21 nt, Homo sapiens
cucccacaugcaggguuugca

SEQ ID NO: 19272 - RNA, 21 nt, Homo sapiens
uaaagugcugacagugcagau

SEQ ID NO: 19273 - RNA, 23 nt, Homo sapiens
cagugcaaugauauugucaaagc

SEQ ID NO: 19274 - RNA, 19 nt, Homo sapiens
aagugugcagggcacuggu

SEQ ID NO: 19275 - RNA, 22 nt, Homo sapiens
ccucuuccccuugucucuccag

SEQ ID NO: 19276 - RNA, 18 nt, Homo sapiens
cagggaggugaaugugau

SEQ ID NO: 19277 - RNA, 20 nt, Homo sapiens
ccccagggcgacgcggcggg

SEQ ID NO: 19278 - RNA, 22 nt, Homo sapiens
cugugcgugugacagcggcuga

SEQ ID NO: 19279 - RNA, 22 nt, Homo sapiens
uggcucaguucagcaggaacag

SEQ ID NO: 19280 - RNA, 22 nt, Homo sapiens
ucaggcucaguccccucccgau

SEQ ID NO: 19281 - RNA, 22 nt, Homo sapiens
agaggcuggccgugaugaauuc

SEQ ID NO: 19282 - RNA, 22 nt, Homo sapiens
gucccucuccaaaugugucuug

SEQ ID NO: 19283 - RNA, 20 nt, Homo sapiens
guagaggagauggcgcaggg

SEQ ID NO: 19284 - RNA, 22 nt, Homo sapiens
ugugcgcagggagaccucuccc

SEQ ID NO: 19285 - RNA, 22 nt, Homo sapiens
ugugcgcagggagaccucuccc

SEQ ID NO: 19286 - RNA, 21 nt, Homo sapiens
uaaagugcugacagugcagau

SEQ ID NO: 19287 - RNA, 18 nt, Homo sapiens
aucccaccucugccacca

SEQ ID NO: 19288 - RNA, 17 nt, Homo sapiens
ucccaccgcugccaccc

SEQ ID NO: 19289 - RNA, 20 nt, Homo sapiens
ggggagcuguggaagcagua

SEQ ID NO: 19290 - RNA, 23 nt, Homo sapiens
cggcccgggcugcugcuguuccu

SEQ ID NO: 19291 - RNA, 21 nt, Homo sapiens
uccugcgcgucccagaugccc

SEQ ID NO: 19292 - RNA, 18 nt, Homo sapiens
uccagugcccuccucucc

SEQ ID NO: 19293 - RNA, 24 nt, Homo sapiens
agcagaagcagggagguucuccca

SEQ ID NO: 19294 - RNA, 21 nt, Homo sapiens
uaaagugcugacagugcagau

SEQ ID NO: 19295 - RNA, 23 nt, Homo sapiens
cagugcaaugauauugucaaagc

SEQ ID NO: 19296 - RNA, 21 nt, Homo sapiens
gaaggcgcuucccuuuggagu

SEQ ID NO: 19297 - RNA, 22 nt, Homo sapiens
gaaggcgcuucccuuuagagcg

SEQ ID NO: 19298 - RNA, 22 nt, Homo sapiens
ccucccacacccaaggcuugca

SEQ ID NO: 19299 - RNA, 22 nt, Homo sapiens
uggugggcacagaaucuggacu

SEQ ID NO: 19300 - RNA, 19 nt, Homo sapiens
aggcugcggaauucaggac

SEQ ID NO: 19301 - RNA, 22 nt, Homo sapiens
uggugggccgcagaacaugugc

SEQ ID NO: 19302 - RNA, 22 nt, Homo sapiens
ugugcgcagggagaccucuccc

SEQ ID NO: 19303 - RNA, 23 nt, Homo sapiens
cacccggcugugugcacaugugc

SEQ ID NO: 19304 - RNA, 21 nt, Homo sapiens
gugccagcugcagugggggag

SEQ ID NO: 19305 - RNA, 21 nt, Homo sapiens
ccccaccuccucucuccucag

SEQ ID NO: 19306 - RNA, 22 nt, Homo sapiens
aggcauugacuucucacuagcu

SEQ ID NO: 19307 - RNA, 22 nt, Homo sapiens
aggcauugacuucucacuagcu

SEQ ID NO: 19308 - RNA, 21 nt, Homo sapiens
aggggugcuaucugugauuga

SEQ ID NO: 19309 - RNA, 23 nt, Homo sapiens
ucccccaggugugauucugauuu

SEQ ID NO: 19310 - RNA, 22 nt, Homo sapiens
uaaugccccuaaaaauccuuau

SEQ ID NO: 19311 - RNA, 22 nt, Homo sapiens
uugggaucauuuugcauccaua

SEQ ID NO: 19312 - RNA, 22 nt, Homo sapiens
ugugacagauugauaacugaaa

SEQ ID NO: 19313 - RNA, 21 nt, Homo sapiens
caaagguauuugugguuuuug

SEQ ID NO: 19314 - RNA, 24 nt, Homo sapiens
acugggggcuuucgggcucugcgu

SEQ ID NO: 19315 - RNA, 24 nt, Homo sapiens
ugccugggucucuggccugcgcgu

SEQ ID NO: 19316 - RNA, 20 nt, Homo sapiens
accaggaggcugaggccccu

SEQ ID NO: 19317 - RNA, 22 nt, Homo sapiens
uuugugaccugguccacuaacc

SEQ ID NO: 19318 - RNA, 23 nt, Homo sapiens
cugggaucuccggggucuugguu

SEQ ID NO: 19319 - RNA, 20 nt, Homo sapiens
ggggagcuguggaagcagua

SEQ ID NO: 19320 - RNA, 20 nt, Homo sapiens
cgugccacccuuuuccccag

SEQ ID NO: 19321 - RNA, 22 nt, Homo sapiens
cagugcaauguuaaaagggcau

SEQ ID NO: 19322 - RNA, 18 nt, Homo sapiens
cagggaggugaaugugau

SEQ ID NO: 19323 - RNA, 22 nt, Homo sapiens
ugugacugguugaccagagggg

SEQ ID NO: 19324 - RNA, 23 nt, Homo sapiens
aacauucaacgcugucggugagu

SEQ ID NO: 19325 - RNA, 23 nt, Homo sapiens
aacauucauugcugucggugggu

SEQ ID NO: 19326 - RNA, 22 nt, Homo sapiens
aacauucaaccugucggugagu

SEQ ID NO: 19327 - RNA, 23 nt, Homo sapiens
aacauucauuguugucggugggu

SEQ ID NO: 19328 - RNA, 22 nt, Homo sapiens
ucaggccaggcacaguggcuca

SEQ ID NO: 19329 - RNA, 21 nt, Homo sapiens
aucacauugccagggauuucc

SEQ ID NO: 19330 - RNA, 21 nt, Homo sapiens
aucacauugccagggauuacc

SEQ ID NO: 19331 - RNA, 22 nt, Homo sapiens
uaugugggaugguaaaccgcuu

SEQ ID NO: 19332 - RNA, 23 nt, Homo sapiens
aucccuugcaggggcuguugggu

SEQ ID NO: 19333 - RNA, 21 nt, Homo sapiens
cugacuguugccguccuccag

SEQ ID NO: 19334 - RNA, 22 nt, Homo sapiens
uguaaacauccuacacucagcu

SEQ ID NO: 19335 - RNA, 22 nt, Homo sapiens
uuauaaagcaaugagacugauu

SEQ ID NO: 19336 - RNA, 21 nt, Homo sapiens
ugucuugcaggccgucaugca

SEQ ID NO: 19337 - RNA, 23 nt, Homo sapiens
ucggggaucaucaugucacgaga

SEQ ID NO: 19338 - RNA, 22 nt, Homo sapiens
auucuaauuucuccacgucuuu

SEQ ID NO: 19339 - RNA, 21 nt, Homo sapiens
uuggccacaauggguuagaac

SEQ ID NO: 19340 - RNA, 23 nt, Homo sapiens
uacccuguagaaccgaauuugug

SEQ ID NO: 19341 - RNA, 22 nt, Homo sapiens
ucugggcaacaaagugagaccu

SEQ ID NO: 19342 - RNA, 18 nt, Homo sapiens
cagggaggugaaugugau

SEQ ID NO: 19343 - RNA, 23 nt, Homo sapiens
ucuggcuccgugucuucacuccc

SEQ ID NO: 19344 - RNA, 22 nt, Homo sapiens
uggagagaaaggcaguuccuga

SEQ ID NO: 19345 - RNA, 22 nt, Homo sapiens
uggagagaaaggcaguuccuga

SEQ ID NO: 19346 - RNA, 22 nt, Homo sapiens
ucugcccccuccgcugcugcca

SEQ ID NO: 19347 - RNA, 20 nt, Homo sapiens
ccccagggcgacgcggcggg

SEQ ID NO: 19348 - RNA, 20 nt, Homo sapiens
acugccccaggugcugcugg

SEQ ID NO: 19349 - RNA, 21 nt, Homo sapiens
gccccugggccuauccuagaa

SEQ ID NO: 19350 - RNA, 21 nt, Homo sapiens
cggggcagcucaguacaggau

SEQ ID NO: 19351 - RNA, 25 nt, Homo sapiens
gcugggcagggcuucugagcuccuu

SEQ ID NO: 19352 - RNA, 21 nt, Homo sapiens
agggggaaaguucuauagucc

SEQ ID NO: 19353 - RNA, 24 nt, Homo sapiens
ugccugggucucuggccugcgcgu

SEQ ID NO: 19354 - RNA, 22 nt, Homo sapiens
acuccagccccacagccucagc

SEQ ID NO: 19355 - RNA, 20 nt, Homo sapiens
ggggagcuguggaagcagua

SEQ ID NO: 19356 - RNA, 24 nt, Homo sapiens
agccugauuaaacacaugcucuga

SEQ ID NO: 19357 - RNA, 22 nt, Homo sapiens
ucggccugaccacccaccccac

SEQ ID NO: 19358 - RNA, 17 nt, Homo sapiens
ucgccuccuccucuccc

SEQ ID NO: 19359 - RNA, 21 nt, Homo sapiens
cggcggggacggcgauugguc

SEQ ID NO: 19360 - RNA, 22 nt, Homo sapiens
agaguugagucuggacgucccg

SEQ ID NO: 19361 - RNA, 21 nt, Homo sapiens
agcuacaucuggcuacugggu

SEQ ID NO: 19362 - RNA, 23 nt, Homo sapiens
ccuaguagguguccaguaagugu

SEQ ID NO: 19363 - RNA, 22 nt, Homo sapiens
cgucaacacuugcugguuuccu

SEQ ID NO: 19364 - RNA, 22 nt, Homo sapiens
ugagaaccacgucugcucugag

SEQ ID NO: 19365 - RNA, 22 nt, Homo sapiens
aggcggggcgccgcgggaccgc

SEQ ID NO: 19366 - RNA, 21 nt, Homo sapiens
uggcagggaggcugggagggg

SEQ ID NO: 19367 - RNA, 25 nt, Homo sapiens
gggcgacaaagcaagacucuuucuu

SEQ ID NO: 19368 - RNA, 24 nt, Homo sapiens
uggcccugacugaagaccagcagu

SEQ ID NO: 19369 - RNA, 24 nt, Homo sapiens
uggcccugacugaagaccagcagu

SEQ ID NO: 19370 - RNA, 21 nt, Homo sapiens
cggcggggacggcgauugguc

SEQ ID NO: 19371 - RNA, 20 nt, Homo sapiens
ccccagggcgacgcggcggg

SEQ ID NO: 19372 - RNA, 23 nt, Homo sapiens
uacuccagagggcgucacucaug

SEQ ID NO: 19373 - RNA, 22 nt, Homo sapiens
aggcggggcgccgcgggaccgc

SEQ ID NO: 19374 - RNA, 20 nt, Homo sapiens
accaggaggcugaggccccu

SEQ ID NO: 19375 - RNA, 22 nt, Homo sapiens
ugcggggcuagggcuaacagca

SEQ ID NO: 19376 - RNA, 22 nt, Homo sapiens
uggaauguaaagaaguauguau

SEQ ID NO: 19377 - RNA, 21 nt, Homo sapiens
ugcaggaccaagaugagcccu

SEQ ID NO: 19378 - RNA, 23 nt, Homo sapiens
ucuggcuccgugucuucacuccc

SEQ ID NO: 19379 - RNA, 21 nt, Homo sapiens
uccugcgcgucccagaugccc

SEQ ID NO: 19380 - RNA, 23 nt, Homo sapiens
ugaguaccgccaugucuguuggg

SEQ ID NO: 19381 - RNA, 25 nt, Homo sapiens
cccccacaaccgcgcuugacuagcu

SEQ ID NO: 19382 - RNA, 22 nt, Homo sapiens
uggaauguaaggaagugugugg

SEQ ID NO: 19383 - RNA, 22 nt, Homo sapiens
uaugugggaugguaaaccgcuu

SEQ ID NO: 19384 - RNA, 22 nt, Homo sapiens
uaaugccccuaaaaauccuuau

SEQ ID NO: 19385 - RNA, 22 nt, Homo sapiens
aguggggaacccuuccaugagg

SEQ ID NO: 19386 - RNA, 22 nt, Homo sapiens
ugaaggucuacugugugccagg

SEQ ID NO: 19387 - RNA, 20 nt, Homo sapiens
aggaauguuccuucuuugcc

SEQ ID NO: 19388 - RNA, 22 nt, Homo sapiens
ugcggggcuagggcuaacagca

SEQ ID NO: 19389 - RNA, 22 nt, Homo sapiens
augggugaauuuguagaaggau

SEQ ID NO: 19390 - RNA, 22 nt, Homo sapiens
uuuucaacucuaaugggagaga

SEQ ID NO: 19391 - RNA, 21 nt, Homo sapiens
ucgaggagcucacagucuagu

SEQ ID NO: 19392 - RNA, 22 nt, Homo sapiens
ucugcccccuccgcugcugcca

SEQ ID NO: 19393 - RNA, 22 nt, Homo sapiens
uguaacagcaacuccaugugga

SEQ ID NO: 19394 - RNA, 20 nt, Homo sapiens
acugccccaggugcugcugg

SEQ ID NO: 19395 - RNA, 23 nt, Homo sapiens
ugucugcccgcaugccugccucu

SEQ ID NO: 19396 - RNA, 21 nt, Homo sapiens
cggggcagcucaguacaggau

SEQ ID NO: 19397 - RNA, 23 nt, Homo sapiens
ugucacucggcucggcccacuac

SEQ ID NO: 19398 - RNA, 21 nt, Homo sapiens
ccccaccuccucucuccucag

SEQ ID NO: 19399 - RNA, 18 nt, Homo sapiens
aucccaccucugccacca

SEQ ID NO: 19400 - RNA, 17 nt, Homo sapiens
ucgccuccuccucuccc

SEQ ID NO: 19401 - RNA, 24 nt, Homo sapiens
uggcccugacugaagaccagcagu

SEQ ID NO: 19402 - RNA, 23 nt, Homo sapiens
ucuggcuccgugucuucacuccc

SEQ ID NO: 19403 - RNA, 23 nt, Homo sapiens
cggcccgggcugcugcuguuccu

SEQ ID NO: 19404 - RNA, 23 nt, Homo sapiens
cggcccgggcugcugcuguuccu

SEQ ID NO: 19405 - RNA, 22 nt, Homo sapiens
uggacggagaacugauaagggu

SEQ ID NO: 19406 - RNA, 21 nt, Homo sapiens
cggcggggacggcgauugguc

SEQ ID NO: 19407 - RNA, 22 nt, Homo sapiens
cauugcacuugucucggucuga

SEQ ID NO: 19408 - RNA, 21 nt, Homo sapiens
agggcccccccucaauccugu

SEQ ID NO: 19409 - RNA, 22 nt, Homo sapiens
uguaaacauccuacacucagcu

SEQ ID NO: 19410 - RNA, 22 nt, Homo sapiens
caaccuggaggacuccaugcug

SEQ ID NO: 19411 - RNA, 22 nt, Homo sapiens
ccucccacacccaaggcuugca

SEQ ID NO: 19412 - RNA, 22 nt, Homo sapiens
aggcggggcgccgcgggaccgc

SEQ ID NO: 19413 - RNA, 22 nt, Homo sapiens
ugcggggcuagggcuaacagca

SEQ ID NO: 19414 - RNA, 22 nt, Homo sapiens
caaagugccucccuuuagagug

SEQ ID NO: 19415 - RNA, 22 nt, Homo sapiens
uauugcacucgucccggccucc

SEQ ID NO: 19416 - RNA, 23 nt, Homo sapiens
agcagcauuguacagggcuauga

SEQ ID NO: 19417 - RNA, 23 nt, Homo sapiens
agcagcauuguacagggcuauca

SEQ ID NO: 19418 - RNA, 20 nt, Homo sapiens
ucacaccugccucgcccccc

SEQ ID NO: 19419 - RNA, 22 nt, Homo sapiens
ucugggcaacaaagugagaccu

SEQ ID NO: 19420 - RNA, 22 nt, Homo sapiens
uagcagcacauaaugguuugug

SEQ ID NO: 19421 - RNA, 22 nt, Homo sapiens
uagcagcacaucaugguuuaca

SEQ ID NO: 19422 - RNA, 22 nt, Homo sapiens
uagcagcacguaaauauuggcg

SEQ ID NO: 19423 - RNA, 20 nt, Homo sapiens
ccccagggcgacgcggcggg

SEQ ID NO: 19424 - RNA, 21 nt, Homo sapiens
uagcagcacagaaauauuggc

SEQ ID NO: 19425 - RNA, 25 nt, Homo sapiens
cccccacaaccgcgcuugacuagcu

SEQ ID NO: 19426 - RNA, 23 nt, Homo sapiens
cgcauccccuagggcauuggugu

SEQ ID NO: 19427 - RNA, 22 nt, Homo sapiens
cagcagcaauucauguuuugaa

SEQ ID NO: 19428 - RNA, 22 nt, Homo sapiens
gugacaucacauauacggcagc

SEQ ID NO: 19429 - RNA, 21 nt, Homo sapiens
cagcagcacacugugguuugu

SEQ ID NO: 19430 - RNA, 22 nt, Homo sapiens
aacaucacagcaagucugugcu

SEQ ID NO: 19431 - RNA, 25 nt, Homo sapiens
gcugggcagggcuucugagcuccuu

SEQ ID NO: 19432 - RNA, 22 nt, Homo sapiens
ggggguccccggugcucggauc

SEQ ID NO: 19433 - RNA, 22 nt, Homo sapiens
agucauuggaggguuugagcag

SEQ ID NO: 19434 - RNA, 17 nt, Homo sapiens
ucucgcuggggccucca

SEQ ID NO: 19435 - RNA, 22 nt, Homo sapiens
uuugugaccugguccacuaacc

SEQ ID NO: 19436 - RNA, 23 nt, Homo sapiens
ucugcucauaccccaugguuucu

SEQ ID NO: 19437 - RNA, 22 nt, Homo sapiens
gugugcggaaaugcuucugcua

SEQ ID NO: 19438 - RNA, 21 nt, Homo sapiens
cggcggggacggcgauugguc

SEQ ID NO: 19439 - RNA, 22 nt, Homo sapiens
uguaaacauccuacacucagcu

SEQ ID NO: 19440 - RNA, 22 nt, Homo sapiens
aucacacaaaggcaacuuuugu

SEQ ID NO: 19441 - RNA, 21 nt, Homo sapiens
agggggaaaguucuauagucc

SEQ ID NO: 19442 - RNA, 22 nt, Homo sapiens
aggcggggcgccgcgggaccgc

SEQ ID NO: 19443 - RNA, 21 nt, Homo sapiens
uggaggagaaggaaggugaug

SEQ ID NO: 19444 - RNA, 22 nt, Homo sapiens
caaagugccucccuuuagagug

SEQ ID NO: 19445 - RNA, 22 nt, Homo sapiens
auccgcgcucugacucucugcc

SEQ ID NO: 19446 - RNA, 22 nt, Homo sapiens
gugugcggaaaugcuucugcua

SEQ ID NO: 19447 - RNA, 23 nt, Homo sapiens
ucuggcuccgugucuucacuccc

SEQ ID NO: 19448 - RNA, 21 nt, Homo sapiens
ucgaggagcucacagucuagu

SEQ ID NO: 19449 - RNA, 21 nt, Homo sapiens
cggcggggacggcgauugguc

SEQ ID NO: 19450 - RNA, 22 nt, Homo sapiens
cauugcacuugucucggucuga

SEQ ID NO: 19451 - RNA, 20 nt, Homo sapiens
ccucugggcccuuccuccag

SEQ ID NO: 19452 - RNA, 22 nt, Homo sapiens
ucucugggccugugucuuaggc

SEQ ID NO: 19453 - RNA, 23 nt, Homo sapiens
ugagcgccucgacgacagagccg

SEQ ID NO: 19454 - RNA, 22 nt, Homo sapiens
aggcggggcgccgcgggaccgc

SEQ ID NO: 19455 - RNA, 22 nt, Homo sapiens
ugcggggcuagggcuaacagca

SEQ ID NO: 19456 - RNA, 17 nt, Homo sapiens
gugggggagaggcuguc

SEQ ID NO: 19457 - RNA, 23 nt, Homo sapiens
ucuggcuccgugucuucacuccc

SEQ ID NO: 19458 - RNA, 24 nt, Homo sapiens
uuuggcaaugguagaacucacacu

SEQ ID NO: 19459 - RNA, 22 nt, Homo sapiens
uggcaguguauuguuagcuggu

SEQ ID NO: 19460 - RNA, 22 nt, Homo sapiens
aguggggaacccuuccaugagg

SEQ ID NO: 19461 - RNA, 22 nt, Homo sapiens
caaaaaccacaguuucuuuugc

SEQ ID NO: 19462 - RNA, 21 nt, Homo sapiens
ucuaguaagaguggcagucga

SEQ ID NO: 19463 - RNA, 22 nt, Homo sapiens
gucccucuccaaaugugucuug

SEQ ID NO: 19464 - RNA, 23 nt, Homo sapiens
gcagcagagaauaggacuacguc

SEQ ID NO: 19465 - RNA, 20 nt, Homo sapiens
ggggagcuguggaagcagua

SEQ ID NO: 19466 - RNA, 21 nt, Homo sapiens
gaaggcgcuucccuuuggagu

SEQ ID NO: 19467 - RNA, 22 nt, Homo sapiens
cuagguauggucccagggaucc

SEQ ID NO: 19468 - RNA, 23 nt, Homo sapiens
uaaauuucaccuuucugagaagg

SEQ ID NO: 19469 - RNA, 21 nt, Homo sapiens
caaagaggaaggucccauuac

SEQ ID NO: 19470 - RNA, 21 nt, Homo sapiens
gaagugugccguggugugucu

SEQ ID NO: 19471 - RNA, 22 nt, Homo sapiens
ucuucucuguuuuggccaugug

SEQ ID NO: 19472 - RNA, 21 nt, Homo sapiens
cugacuguugccguccuccag

SEQ ID NO: 19473 - RNA, 24 nt, Homo sapiens
agccuggaagcuggagccugcagu

SEQ ID NO: 19474 - RNA, 22 nt, Homo sapiens
acaggugagguucuugggagcc

SEQ ID NO: 19475 - RNA, 18 nt, Homo sapiens
gucccuguucaggcgcca

SEQ ID NO: 19476 - RNA, 18 nt, Homo sapiens
cagggaggugaaugugau

SEQ ID NO: 19477 - RNA, 22 nt, Homo sapiens
ugugacugguugaccagagggg

SEQ ID NO: 19478 - RNA, 21 nt, Homo sapiens
gcccuccgcccgugcaccccg

SEQ ID NO: 19479 - RNA, 22 nt, Homo sapiens
ucagugcaucacagaacuuugu

SEQ ID NO: 19480 - RNA, 23 nt, Homo sapiens
ucuggcuccgugucuucacuccc

SEQ ID NO: 19481 - RNA, 22 nt, Homo sapiens
ucugcccccuccgcugcugcca

SEQ ID NO: 19482 - RNA, 22 nt, Homo sapiens
cccugugcccggcccacuucug

SEQ ID NO: 19483 - RNA, 22 nt, Homo sapiens
acacagggcuguugugaagacu

SEQ ID NO: 19484 - RNA, 22 nt, Homo sapiens
cauugcacuugucucggucuga

SEQ ID NO: 19485 - RNA, 20 nt, Homo sapiens
acugccccaggugcugcugg

SEQ ID NO: 19486 - RNA, 21 nt, Homo sapiens
aggggugcuaucugugauuga

SEQ ID NO: 19487 - RNA, 23 nt, Homo sapiens
ugaggggcagagagcgagacuuu

SEQ ID NO: 19488 - RNA, 22 nt, Homo sapiens
ucaggcucaguccccucccgau

SEQ ID NO: 19489 - RNA, 21 nt, Homo sapiens
cggggcagcucaguacaggau

SEQ ID NO: 19490 - RNA, 22 nt, Homo sapiens
uccgagccugggucucccucuu

SEQ ID NO: 19491 - RNA, 25 nt, Homo sapiens
ggcggagggaaguagguccguuggu

SEQ ID NO: 19492 - RNA, 21 nt, Homo sapiens
cugacuguugccguccuccag

SEQ ID NO: 19493 - RNA, 20 nt, Homo sapiens
ucugcaggguuugcuuugag

SEQ ID NO: 19494 - RNA, 25 nt, Homo sapiens
gggcgacaaagcaagacucuuucuu

SEQ ID NO: 19495 - RNA, 17 nt, Homo sapiens
ucgccuccuccucuccc

SEQ ID NO: 19496 - RNA, 21 nt, Homo sapiens
ucgaggagcucacagucuagu

SEQ ID NO: 19497 - RNA, 21 nt, Homo sapiens
uccugcgcgucccagaugccc

SEQ ID NO: 19498 - RNA, 23 nt, Homo sapiens
caaagugcuuacagugcagguag

SEQ ID NO: 19499 - RNA, 22 nt, Homo sapiens
cgcaggggccgggugcucaccg

SEQ ID NO: 19500 - RNA, 22 nt, Homo sapiens
uacugcagacguggcaaucaug

SEQ ID NO: 19501 - RNA, 21 nt, Homo sapiens
uacugcagacaguggcaauca

SEQ ID NO: 19502 - RNA, 25 nt, Homo sapiens
aggggugguguugggacagcuccgu

SEQ ID NO: 19503 - RNA, 22 nt, Homo sapiens
ucugggcaacaaagugagaccu

SEQ ID NO: 19504 - RNA, 23 nt, Homo sapiens
acuccauuuguuuugaugaugga

SEQ ID NO: 19505 - RNA, 20 nt, Homo sapiens
ccucugggcccuuccuccag

SEQ ID NO: 19506 - RNA, 22 nt, Homo sapiens
ucucugggccugugucuuaggc

SEQ ID NO: 19507 - RNA, 22 nt, Homo sapiens
uaaugccccuaaaaauccuuau

SEQ ID NO: 19508 - RNA, 25 nt, Homo sapiens
gcugggcagggcuucugagcuccuu

SEQ ID NO: 19509 - RNA, 19 nt, Homo sapiens
aguguggcuuucuuagagc

SEQ ID NO: 19510 - RNA, 20 nt, Homo sapiens
cggcucugggucugugggga

SEQ ID NO: 19511 - RNA, 22 nt, Homo sapiens
uggagugugacaaugguguuug

SEQ ID NO: 19512 - RNA, 21 nt, Homo sapiens
gcccuccgcccgugcaccccg

SEQ ID NO: 19513 - RNA, 23 nt, Homo sapiens
ucuggcuccgugucuucacuccc

SEQ ID NO: 19514 - RNA, 22 nt, Homo sapiens
uggagagaaaggcaguuccuga

SEQ ID NO: 19515 - RNA, 21 nt, Homo sapiens
cggcggggacggcgauugguc

SEQ ID NO: 19516 - RNA, 22 nt, Homo sapiens
uguaaacauccuacacucagcu

SEQ ID NO: 19517 - RNA, 21 nt, Homo sapiens
aagccugcccggcuccucggg

SEQ ID NO: 19518 - RNA, 22 nt, Homo sapiens
gucccucuccaaaugugucuug

SEQ ID NO: 19519 - RNA, 25 nt, Homo sapiens
ggcggagggaaguagguccguuggu

SEQ ID NO: 19520 - RNA, 22 nt, Homo sapiens
aggcggggcgccgcgggaccgc

SEQ ID NO: 19521 - RNA, 22 nt, Homo sapiens
ugcggggcuagggcuaacagca

SEQ ID NO: 19522 - RNA, 22 nt, Homo sapiens
auccgcgcucugacucucugcc

SEQ ID NO: 19523 - RNA, 24 nt, Homo sapiens
uggcccugacugaagaccagcagu

SEQ ID NO: 19524 - RNA, 22 nt, Homo sapiens
cagugcaaugaugaaagggcau

SEQ ID NO: 19525 - RNA, 21 nt, Homo sapiens
gcccuccgcccgugcaccccg

SEQ ID NO: 19526 - RNA, 22 nt, Homo sapiens
ucagugcacuacagaacuuugu

SEQ ID NO: 19527 - RNA, 22 nt, Homo sapiens
ucagugcaucacagaacuuugu

SEQ ID NO: 19528 - RNA, 21 nt, Homo sapiens
ucagugcaugacagaacuugg

SEQ ID NO: 19529 - RNA, 18 nt, Homo sapiens
uccagugcccuccucucc

SEQ ID NO: 19530 - RNA, 22 nt, Homo sapiens
aacuggccuacaaagucccagu

SEQ ID NO: 19531 - RNA, 22 nt, Homo sapiens
aacuggcccucaaagucccgcu

SEQ ID NO: 19532 - RNA, 22 nt, Homo sapiens
cuggcccucucugcccuuccgu

SEQ ID NO: 19533 - RNA, 23 nt, Homo sapiens
uaauccuugcuaccugggugaga

SEQ ID NO: 19534 - RNA, 22 nt, Homo sapiens
aaugcacccgggcaaggauucu

SEQ ID NO: 19535 - RNA, 22 nt, Homo sapiens
aaugcaccugggcaaggauuca

SEQ ID NO: 19536 - RNA, 19 nt, Homo sapiens
ugagcugcuguaccaaaau

SEQ ID NO: 19537 - RNA, 20 nt, Homo sapiens
guccgcucggcgguggccca

SEQ ID NO: 19538 - RNA, 21 nt, Homo sapiens
caaagaggaaggucccauuac

SEQ ID NO: 19539 - RNA, 25 nt, Homo sapiens
ggcggagggaaguagguccguuggu

SEQ ID NO: 19540 - RNA, 21 nt, Homo sapiens
uggaggagaaggaaggugaug

SEQ ID NO: 19541 - RNA, 22 nt, Homo sapiens
auccgcgcucugacucucugcc

SEQ ID NO: 19542 - RNA, 22 nt, Homo sapiens
uauugcacucgucccggccucc

SEQ ID NO: 19543 - RNA, 21 nt, Homo sapiens
uggcagggaggcugggagggg

SEQ ID NO: 19544 - RNA, 22 nt, Homo sapiens
ccucuuccccuugucucuccag

SEQ ID NO: 19545 - RNA, 24 nt, Homo sapiens
ccagacagaauucuaugcacuuuc

SEQ ID NO: 19546 - RNA, 23 nt, Homo sapiens
uaaggugcaucuagugcagauag

SEQ ID NO: 19547 - RNA, 22 nt, Homo sapiens
cgcaggggccgggugcucaccg

SEQ ID NO: 19548 - RNA, 23 nt, Homo sapiens
ucaagagcaauaacgaaaaaugu

SEQ ID NO: 19549 - RNA, 22 nt, Homo sapiens
ugaaggucuacugugugccagg

SEQ ID NO: 19550 - RNA, 23 nt, Homo sapiens
cucuugagggaagcacuuucugu

SEQ ID NO: 19551 - RNA, 22 nt, Homo sapiens
ucagcaaacauuuauugugugc

SEQ ID NO: 19552 - RNA, 19 nt, Homo sapiens
gagccaguuggacaggagc

SEQ ID NO: 19553 - RNA, 22 nt, Homo sapiens
ggggguccccggugcucggauc

SEQ ID NO: 19554 - RNA, 22 nt, Homo sapiens
acuccagccccacagccucagc

SEQ ID NO: 19555 - RNA, 22 nt, Homo sapiens
cacuggcuccuuucuggguaga

SEQ ID NO: 19556 - RNA, 21 nt, Homo sapiens
cugacuguugccguccuccag

SEQ ID NO: 19557 - RNA, 22 nt, Homo sapiens
ucagugcacuacagaacuuugu

SEQ ID NO: 19558 - RNA, 22 nt, Homo sapiens
ucagugcaucacagaacuuugu

SEQ ID NO: 19559 - RNA, 22 nt, Homo sapiens
agaucagaaggugauuguggcu

SEQ ID NO: 19560 - RNA, 21 nt, Homo sapiens
cagcagcacacugugguuugu

SEQ ID NO: 19561 - RNA, 24 nt, Homo sapiens
uggggagcugaggcucugggggug

SEQ ID NO: 19562 - RNA, 21 nt, Homo sapiens
uggcagggaggcugggagggg

SEQ ID NO: 19563 - RNA, 22 nt, Homo sapiens
ucggccugaccacccaccccac

SEQ ID NO: 19564 - RNA, 23 nt, Homo sapiens
cggcccgggcugcugcuguuccu

SEQ ID NO: 19565 - RNA, 23 nt, Homo sapiens
uaaggugcaucuagugcagauag

SEQ ID NO: 19566 - RNA, 21 nt, Homo sapiens
ugucuugcaggccgucaugca

SEQ ID NO: 19567 - RNA, 22 nt, Homo sapiens
aaccagcaccccaacuuuggac

SEQ ID NO: 19568 - RNA, 20 nt, Homo sapiens
guagaggagauggcgcaggg

SEQ ID NO: 19569 - RNA, 23 nt, Homo sapiens
uauggcuuuuuauuccuauguga

SEQ ID NO: 19570 - RNA, 23 nt, Homo sapiens
uauggcuuuucauuccuauguga

SEQ ID NO: 19571 - RNA, 21 nt, Homo sapiens
gguuugguccuagccuuucua

SEQ ID NO: 19572 - RNA, 22 nt, Homo sapiens
uaaugccccuaaaaauccuuau

SEQ ID NO: 19573 - RNA, 22 nt, Homo sapiens
ugagaaccacgucugcucugag

SEQ ID NO: 19574 - RNA, 21 nt, Homo sapiens
gaagugugccguggugugucu

SEQ ID NO: 19575 - RNA, 22 nt, Homo sapiens
cacacacugcaauuacuuuugc

SEQ ID NO: 19576 - RNA, 23 nt, Homo sapiens
ucauagcccuguacaaugcugcu

SEQ ID NO: 19577 - RNA, 21 nt, Homo sapiens
gugccagcugcagugggggag

SEQ ID NO: 19578 - RNA, 22 nt, Homo sapiens
ucguaccgugaguaauaaugcg

SEQ ID NO: 19579 - RNA, 21 nt, Homo sapiens
uuaggccgcagaucuggguga

SEQ ID NO: 19580 - RNA, 22 nt, Homo sapiens
gauuagggugcuuagcuguuaa

SEQ ID NO: 19581 - RNA, 21 nt, Homo sapiens
ccacaccguaucugacacuuu

SEQ ID NO: 19582 - RNA, 23 nt, Homo sapiens
aucaacagacauuaauugggcgc

SEQ ID NO: 19583 - RNA, 22 nt, Homo sapiens
uuauaaagcaaugagacugauu

SEQ ID NO: 19584 - RNA, 23 nt, Homo sapiens
uucauuugguauaaaccgcgauu

SEQ ID NO: 19585 - RNA, 20 nt, Homo sapiens
aggguguuucucucaucucu

SEQ ID NO: 19586 - RNA, 22 nt, Homo sapiens
gugaacgggcgccaucccgagg

SEQ ID NO: 19587 - RNA, 21 nt, Homo sapiens
uacucaaaaagcugucaguca

SEQ ID NO: 19588 - RNA, 22 nt, Homo sapiens
ucaaaacugaggggcauuuucu

SEQ ID NO: 19589 - RNA, 20 nt, Homo sapiens
ccccagggcgacgcggcggg

SEQ ID NO: 19590 - RNA, 20 nt, Homo sapiens
uguuuugauaacaguaaugu

SEQ ID NO: 19591 - RNA, 22 nt, Homo sapiens
acagcaggcacagacaggcagu

SEQ ID NO: 19592 - RNA, 21 nt, Homo sapiens
uucaaguaauucaggauaggu

SEQ ID NO: 19593 - RNA, 22 nt, Homo sapiens
gccugcugggguggaaccuggu

SEQ ID NO: 19594 - RNA, 22 nt, Homo sapiens
agacccuggucugcacucuauc

SEQ ID NO: 19595 - RNA, 18 nt, Homo sapiens
uucacagggaggugucau

SEQ ID NO: 19596 - RNA, 22 nt, Homo sapiens
caaaacuggcaauuacuuuugc

SEQ ID NO: 19597 - RNA, 22 nt, Homo sapiens
aaaaacugagacuacuuuugca

SEQ ID NO: 19598 - RNA, 19 nt, Homo sapiens
aaaaacuguaauuacuuuu

SEQ ID NO: 19599 - RNA, 22 nt, Homo sapiens
ccaaaacugcaguuacuuuugc

SEQ ID NO: 19600 - RNA, 22 nt, Homo sapiens
uagcaaaaacugcaguuacuuu

SEQ ID NO: 19601 - RNA, 21 nt, Homo sapiens
aacaggugacugguuagacaa

SEQ ID NO: 19602 - RNA, 23 nt, Homo sapiens
agcagcauuguacagggcuauga

SEQ ID NO: 19603 - RNA, 23 nt, Homo sapiens
agcagcauuguacagggcuauca

SEQ ID NO: 19604 - RNA, 22 nt, Homo sapiens
uggacggagaacugauaagggu

SEQ ID NO: 19605 - RNA, 22 nt, Homo sapiens
uggagagaaaggcaguuccuga

SEQ ID NO: 19606 - RNA, 21 nt, Homo sapiens
cggcggggacggcgauugguc

SEQ ID NO: 19607 - RNA, 22 nt, Homo sapiens
uucccuuugucauccuaugccu

SEQ ID NO: 19608 - RNA, 23 nt, Homo sapiens
caaagugcucauagugcagguag

SEQ ID NO: 19609 - RNA, 22 nt, Homo sapiens
uucccuuugucauccuucgccu

SEQ ID NO: 19610 - RNA, 22 nt, Homo sapiens
aacuguuugcagaggaaacuga

SEQ ID NO: 19611 - RNA, 22 nt, Homo sapiens
aggcggggcgccgcgggaccgc

SEQ ID NO: 19612 - RNA, 22 nt, Homo sapiens
ugcggggcuagggcuaacagca

SEQ ID NO: 19613 - RNA, 21 nt, Homo sapiens
uggaggagaaggaaggugaug

SEQ ID NO: 19614 - RNA, 21 nt, Homo sapiens
uggaggagaaggaaggugaug

SEQ ID NO: 19615 - RNA, 21 nt, Homo sapiens
ccuggaaacacugagguugug

SEQ ID NO: 19616 - RNA, 22 nt, Homo sapiens
ucugcccccuccgcugcugcca

SEQ ID NO: 19617 - RNA, 20 nt, Homo sapiens
ccccagggcgacgcggcggg

SEQ ID NO: 19618 - RNA, 22 nt, Homo sapiens
cauugcacuugucucggucuga

SEQ ID NO: 19619 - RNA, 20 nt, Homo sapiens
acugccccaggugcugcugg

SEQ ID NO: 19620 - RNA, 21 nt, Homo sapiens
gccccugggccuauccuagaa

SEQ ID NO: 19621 - RNA, 21 nt, Homo sapiens
cggggcagcucaguacaggau

SEQ ID NO: 19622 - RNA, 19 nt, Homo sapiens
gggcgccugugaucccaac

SEQ ID NO: 19623 - RNA, 22 nt, Homo sapiens
ugcggggcuagggcuaacagca

SEQ ID NO: 19624 - RNA, 23 nt, Homo sapiens
cacccggcugugugcacaugugc

SEQ ID NO: 19625 - RNA, 22 nt, Homo sapiens
aaaaguaauugcggauuuugcc

SEQ ID NO: 19626 - RNA, 21 nt, Homo sapiens
caagucacuagugguuccguu

SEQ ID NO: 19627 - RNA, 22 nt, Homo sapiens
uggcaguguauuguuagcuggu

SEQ ID NO: 19628 - RNA, 23 nt, Homo sapiens
uuucaagccagggggcguuuuuc

SEQ ID NO: 19629 - RNA, 22 nt, Homo sapiens
cgucaacacuugcugguuuccu

SEQ ID NO: 19630 - RNA, 22 nt, Homo sapiens
aaaaugguucccuuuagagugu

SEQ ID NO: 19631 - RNA, 23 nt, Homo sapiens
gcagcagagaauaggacuacguc

SEQ ID NO: 19632 - RNA, 22 nt, Homo sapiens
ccucuuccccuugucucuccag

SEQ ID NO: 19633 - RNA, 21 nt, Homo sapiens
uccuucugcuccgucccccag

SEQ ID NO: 19634 - RNA, 22 nt, Homo sapiens
agaaggaaauugaauucauuua

SEQ ID NO: 19635 - RNA, 21 nt, Homo sapiens
ugagaugaagcacuguagcuc

SEQ ID NO: 19636 - RNA, 22 nt, Homo sapiens
ucugcccccuccgcugcugcca

SEQ ID NO: 19637 - RNA, 22 nt, Homo sapiens
cucccacugcuucacuugacua

SEQ ID NO: 19638 - RNA, 22 nt, Homo sapiens
agaucagaaggugauuguggcu

SEQ ID NO: 19639 - RNA, 22 nt, Homo sapiens
uguaaacauccuacacucagcu

SEQ ID NO: 19640 - RNA, 20 nt, Homo sapiens
acugccccaggugcugcugg

SEQ ID NO: 19641 - RNA, 21 nt, Homo sapiens
cggggcagcucaguacaggau

SEQ ID NO: 19642 - RNA, 21 nt, Homo sapiens
uggaggagaaggaaggugaug

SEQ ID NO: 19643 - RNA, 23 nt, Homo sapiens
ucugcucauaccccaugguuucu

SEQ ID NO: 19644 - RNA, 22 nt, Homo sapiens
ucucccaacccuuguaccagug

SEQ ID NO: 19645 - RNA, 22 nt, Homo sapiens
cagugcaauguuaaaagggcau

SEQ ID NO: 19646 - RNA, 21 nt, Homo sapiens
aucacauugccagggauuucc

SEQ ID NO: 19647 - RNA, 21 nt, Homo sapiens
aucacauugccagggauuacc

SEQ ID NO: 19648 - RNA, 20 nt, Homo sapiens
uaaggcacgcggugaaugcc

SEQ ID NO: 19649 - RNA, 18 nt, Homo sapiens
aucccaccucugccacca

SEQ ID NO: 19650 - RNA, 23 nt, Homo sapiens
uauggcuuuucauuccuauguga

SEQ ID NO: 19651 - RNA, 22 nt, Homo sapiens
cccugugcccggcccacuucug

SEQ ID NO: 19652 - RNA, 22 nt, Homo sapiens
ucaggccaggcacaguggcuca

SEQ ID NO: 19653 - RNA, 21 nt, Homo sapiens
agcuacaucuggcuacugggu

SEQ ID NO: 19654 - RNA, 22 nt, Homo sapiens
uagcaccaucugaaaucgguua

SEQ ID NO: 19655 - RNA, 23 nt, Homo sapiens
uagcaccauuugaaaucaguguu

SEQ ID NO: 19656 - RNA, 22 nt, Homo sapiens
uagcaccauuugaaaucgguua

SEQ ID NO: 19657 - RNA, 21 nt, Homo sapiens
uaaagugcugacagugcagau

SEQ ID NO: 19658 - RNA, 23 nt, Homo sapiens
cagugcaaugauauugucaaagc

SEQ ID NO: 19659 - RNA, 23 nt, Homo sapiens
ucucacacagaaaucgcacccgu

SEQ ID NO: 19660 - RNA, 22 nt, Homo sapiens
aucacacaaaggcaacuuuugu

SEQ ID NO: 19661 - RNA, 22 nt, Homo sapiens
caaccuggaggacuccaugcug

SEQ ID NO: 19662 - RNA, 21 nt, Homo sapiens
uaaggcacccuucugaguaga

SEQ ID NO: 19663 - RNA, 22 nt, Homo sapiens
ccucccacacccaaggcuugca

SEQ ID NO: 19664 - RNA, 22 nt, Homo sapiens
caagaaccucaguugcuuuugu

SEQ ID NO: 19665 - RNA, 23 nt, Homo sapiens
gacacgggcgacagcugcggccc

SEQ ID NO: 19666 - RNA, 24 nt, Homo sapiens
ugccugggucucuggccugcgcgu

SEQ ID NO: 19667 - RNA, 20 nt, Homo sapiens
guguguggaaaugcuucugc

SEQ ID NO: 19668 - RNA, 22 nt, Homo sapiens
aacuguuugcagaggaaacuga

SEQ ID NO: 19669 - RNA, 21 nt, Homo sapiens
uagcagcacagaaauauuggc

SEQ ID NO: 19670 - RNA, 22 nt, Homo sapiens
uuauaauacaaccugauaagug

SEQ ID NO: 19671 - RNA, 21 nt, Homo sapiens
ugguagacuauggaacguagg

SEQ ID NO: 19672 - RNA, 21 nt, Homo sapiens
uaguagaccguauagcguacg

SEQ ID NO: 19673 - RNA, 22 nt, Homo sapiens
ugaaggucuacugugugccagg

SEQ ID NO: 19674 - RNA, 21 nt, Homo sapiens
ugagcuaaaugugugcuggga

SEQ ID NO: 19675 - RNA, 21 nt, Homo sapiens
cacaagguauugguauuaccu

SEQ ID NO: 19676 - RNA, 20 nt, Homo sapiens
guagaggagauggcgcaggg

SEQ ID NO: 19677 - RNA, 21 nt, Homo sapiens
gcccuccgcccgugcaccccg

SEQ ID NO: 19678 - RNA, 21 nt, Homo sapiens
gcccuccgcccgugcaccccg

SEQ ID NO: 19679 - RNA, 21 nt, Homo sapiens
cggcggggacggcgauugguc

SEQ ID NO: 19680 - RNA, 23 nt, Homo sapiens
ugaggggcagagagcgagacuuu

SEQ ID NO: 19681 - RNA, 25 nt, Homo sapiens
ggcggagggaaguagguccguuggu

SEQ ID NO: 19682 - RNA, 22 nt, Homo sapiens
aggcggggcgccgcgggaccgc

SEQ ID NO: 19683 - RNA, 22 nt, Homo sapiens
ugcggggcuagggcuaacagca

SEQ ID NO: 19684 - RNA, 22 nt, Homo sapiens
acuccagccccacagccucagc

SEQ ID NO: 19685 - RNA, 23 nt, Homo sapiens
caagucuuauuugagcaccuguu

SEQ ID NO: 19686 - RNA, 22 nt, Homo sapiens
uuagggcccuggcuccaucucc

SEQ ID NO: 19687 - RNA, 23 nt, Homo sapiens
uaaggugcaucuagugcaguuag

SEQ ID NO: 19688 - RNA, 22 nt, Homo sapiens
cuggcccucucugcccuuccgu

SEQ ID NO: 19689 - RNA, 23 nt, Homo sapiens
uggugcggagagggcccacagug

SEQ ID NO: 19690 - RNA, 23 nt, Homo sapiens
uggaagacuagugauuuuguugu

SEQ ID NO: 19691 - RNA, 24 nt, Homo sapiens
uggggagcugaggcucugggggug

SEQ ID NO: 19692 - RNA, 21 nt, Homo sapiens
uaaagugcugacagugcagau

SEQ ID NO: 19693 - RNA, 20 nt, Homo sapiens
ucacuguucagacaggcgga

SEQ ID NO: 19694 - RNA, 24 nt, Homo sapiens
uugcagcugccugggagugacuuc

SEQ ID NO: 19695 - RNA, 21 nt, Homo sapiens
uccugcgcgucccagaugccc

SEQ ID NO: 19696 - RNA, 23 nt, Homo sapiens
ugaguaccgccaugucuguuggg

SEQ ID NO: 19697 - RNA, 20 nt, Homo sapiens
ccuccugcccuccuugcugu

SEQ ID NO: 19698 - RNA, 22 nt, Homo sapiens
uagcuuaucagacugauguuga

SEQ ID NO: 19699 - RNA, 22 nt, Homo sapiens
cacuagauugugagcuccugga

SEQ ID NO: 19700 - RNA, 19 nt, Homo sapiens
aagcagcugccucugaggc

SEQ ID NO: 19701 - RNA, 21 nt, Homo sapiens
aauggcgccacuaggguugug

SEQ ID NO: 19702 - RNA, 23 nt, Homo sapiens
aaggagcuuacaaucuagcuggg

SEQ ID NO: 19703 - RNA, 23 nt, Homo sapiens
guccaguuuucccaggaaucccu

SEQ ID NO: 19704 - RNA, 22 nt, Homo sapiens
cuccuauaugaugccuuucuuc

SEQ ID NO: 19705 - RNA, 21 nt, Homo sapiens
uugaaaggcuauuucuugguc

SEQ ID NO: 19706 - RNA, 22 nt, Homo sapiens
ugaguauuacauggccaaucuc

SEQ ID NO: 19707 - RNA, 23 nt, Homo sapiens
uacuccagagggcgucacucaug

SEQ ID NO: 19708 - RNA, 23 nt, Homo sapiens
ugagugugugugugugagugugu

SEQ ID NO: 19709 - RNA, 23 nt, Homo sapiens
aggaagcccuggaggggcuggag

SEQ ID NO: 19710 - RNA, 22 nt, Homo sapiens
aaaucucugcaggcaaauguga

SEQ ID NO: 19711 - RNA, 22 nt, Homo sapiens
agaggcuggccgugaugaauuc

SEQ ID NO: 19712 - RNA, 22 nt, Homo sapiens
uccgagccugggucucccucuu

SEQ ID NO: 19713 - RNA, 24 nt, Homo sapiens
gaccuggacauguuugugcccagu

SEQ ID NO: 19714 - RNA, 21 nt, Homo sapiens
ucuaguaagaguggcagucga

SEQ ID NO: 19715 - RNA, 20 nt, Homo sapiens
uaaagagcccuguggagaca

SEQ ID NO: 19716 - RNA, 22 nt, Homo sapiens
ucuacaaaggaaagcgcuuucu

SEQ ID NO: 19717 - RNA, 21 nt, Homo sapiens
gguuugguccuagccuuucua

SEQ ID NO: 19718 - RNA, 22 nt, Homo sapiens
caaaguuuaagauccuugaagu

SEQ ID NO: 19719 - RNA, 19 nt, Homo sapiens
aguguggcuuucuuagagc

SEQ ID NO: 19720 - RNA, 23 nt, Homo sapiens
ucaaaugcucagacuccuguggu

SEQ ID NO: 19721 - RNA, 22 nt, Homo sapiens
cccugugcccggcccacuucug

SEQ ID NO: 19722 - RNA, 23 nt, Homo sapiens
uaaagugcuuauagugcagguag

SEQ ID NO: 19723 - RNA, 21 nt, Homo sapiens
aggggugcuaucugugauuga

SEQ ID NO: 19724 - RNA, 25 nt, Homo sapiens
agggaucgcgggcggguggcggccu

SEQ ID NO: 19725 - RNA, 22 nt, Homo sapiens
cccugugcccggcccacuucug

SEQ ID NO: 19726 - RNA, 23 nt, Homo sapiens
ugugcaaaucuaugcaaaacuga

SEQ ID NO: 19727 - RNA, 23 nt, Homo sapiens
ugugcaaauccaugcaaaacuga

SEQ ID NO: 19728 - RNA, 20 nt, Homo sapiens
uguuuugauaacaguaaugu

SEQ ID NO: 19729 - RNA, 23 nt, Homo sapiens
uaaagugcuuauagugcagguag

SEQ ID NO: 19730 - RNA, 21 nt, Homo sapiens
caagucacuagugguuccguu

SEQ ID NO: 19731 - RNA, 22 nt, Homo sapiens
uggcaguguauuguuagcuggu

SEQ ID NO: 19732 - RNA, 22 nt, Homo sapiens
uuauaauacaaccugauaagug

SEQ ID NO: 19733 - RNA, 22 nt, Homo sapiens
auauaauacaaccugcuaagug

SEQ ID NO: 19734 - RNA, 21 nt, Homo sapiens
uuuugcaccuuuuggagugaa

SEQ ID NO: 19735 - RNA, 22 nt, Homo sapiens
aaaaguacuugcggauuuugcu

SEQ ID NO: 19736 - RNA, 23 nt, Homo sapiens
guuugcacgggugggccuugucu

SEQ ID NO: 19737 - RNA, 22 nt, Homo sapiens
aagauguggaaaaauuggaauc

SEQ ID NO: 19738 - RNA, 23 nt, Homo sapiens
ucuggcuccgugucuucacuccc

SEQ ID NO: 19739 - RNA, 23 nt, Homo sapiens
cggcccgggcugcugcuguuccu

SEQ ID NO: 19740 - RNA, 22 nt, Homo sapiens
cgcaggggccgggugcucaccg

SEQ ID NO: 19741 - RNA, 23 nt, Homo sapiens
ugaguaccgccaugucuguuggg

SEQ ID NO: 19742 - RNA, 23 nt, Homo sapiens
ucuuggaguaggucauugggugg

SEQ ID NO: 19743 - RNA, 24 nt, Homo sapiens
uucuccaaaagaaagcacuuucug

SEQ ID NO: 19744 - RNA, 22 nt, Homo sapiens
aagugccuccuuuuagaguguu

SEQ ID NO: 19745 - RNA, 23 nt, Homo sapiens
aggaagcccuggaggggcuggag

SEQ ID NO: 19746 - RNA, 21 nt, Homo sapiens
uggaggagaaggaaggugaug

SEQ ID NO: 19747 - RNA, 21 nt, Homo sapiens
ccgucgccgccacccgagccg

SEQ ID NO: 19748 - RNA, 21 nt, Homo sapiens
gcccuccgcccgugcaccccg

SEQ ID NO: 19749 - RNA, 21 nt, Homo sapiens
ucgaggagcucacagucuagu

SEQ ID NO: 19750 - RNA, 22 nt, Homo sapiens
cauugcacuugucucggucuga

SEQ ID NO: 19751 - RNA, 19 nt, Homo sapiens
aggcugcggaauucaggac

SEQ ID NO: 19752 - RNA, 25 nt, Homo sapiens
ggcggagggaaguagguccguuggu

SEQ ID NO: 19753 - RNA, 22 nt, Homo sapiens
aacccguagauccgaucuugug

SEQ ID NO: 19754 - RNA, 22 nt, Homo sapiens
cacccguagaaccgaccuugcg

SEQ ID NO: 19755 - RNA, 22 nt, Homo sapiens
uuugaggcuacagugagaugug

SEQ ID NO: 19756 - RNA, 22 nt, Homo sapiens
uggacggagaacugauaagggu

SEQ ID NO: 19757 - RNA, 23 nt, Homo sapiens
ugaguaccgccaugucuguuggg

SEQ ID NO: 19758 - RNA, 21 nt, Homo sapiens
aggggugcuaucugugauuga

SEQ ID NO: 19759 - RNA, 23 nt, Homo sapiens
ugagugugugugugugagugugu

SEQ ID NO: 19760 - RNA, 23 nt, Homo sapiens
ucauagcccuguacaaugcugcu

SEQ ID NO: 19761 - RNA, 21 nt, Homo sapiens
uggcagggaggcugggagggg

SEQ ID NO: 19762 - RNA, 18 nt, Homo sapiens
aucccaccucugccacca

SEQ ID NO: 19763 - RNA, 22 nt, Homo sapiens
cagugguuuuacccuaugguag

SEQ ID NO: 19764 - RNA, 22 nt, Homo sapiens
uggagagaaaggcaguuccuga

SEQ ID NO: 19765 - RNA, 22 nt, Homo sapiens
cgcaggggccgggugcucaccg

SEQ ID NO: 19766 - RNA, 22 nt, Homo sapiens
aagcugccaguugaagaacugu

SEQ ID NO: 19767 - RNA, 21 nt, Homo sapiens
uaaagugcugacagugcagau

SEQ ID NO: 19768 - RNA, 23 nt, Homo sapiens
cagugcaaugauauugucaaagc

SEQ ID NO: 19769 - RNA, 22 nt, Homo sapiens
ugaguauuacauggccaaucuc

SEQ ID NO: 19770 - RNA, 22 nt, Homo sapiens
ccucccacacccaaggcuugca

SEQ ID NO: 19771 - RNA, 22 nt, Homo sapiens
uggugggcacagaaucuggacu

SEQ ID NO: 19772 - RNA, 21 nt, Homo sapiens
uagauaaaauauugguaccug

SEQ ID NO: 19773 - RNA, 19 nt, Homo sapiens
ugucucugcugggguuucu

SEQ ID NO: 19774 - RNA, 19 nt, Homo sapiens
aagcagcugccucugaggc

SEQ ID NO: 19775 - RNA, 22 nt, Homo sapiens
uggugggccgcagaacaugugc

SEQ ID NO: 19776 - RNA, 23 nt, Homo sapiens
uauucauuuauccccagccuaca

SEQ ID NO: 19777 - RNA, 21 nt, Homo sapiens
cgcgggugcuuacugacccuu

SEQ ID NO: 19778 - RNA, 20 nt, Homo sapiens
ggggagcuguggaagcagua

SEQ ID NO: 19779 - RNA, 21 nt, Homo sapiens
uaggacacauggucuacuucu

SEQ ID NO: 19780 - RNA, 21 nt, Homo sapiens
ucguggccuggucuccauuau

SEQ ID NO: 19781 - RNA, 17 nt, Homo sapiens
ucgccuccuccucuccc

SEQ ID NO: 19782 - RNA, 23 nt, Homo sapiens
ucuggcuccgugucuucacuccc

SEQ ID NO: 19783 - RNA, 22 nt, Homo sapiens
ucaggccaggcacaguggcuca

SEQ ID NO: 19784 - RNA, 21 nt, Homo sapiens
aggggugcuaucugugauuga

SEQ ID NO: 19785 - RNA, 23 nt, Homo sapiens
ugaggggcagagagcgagacuuu

SEQ ID NO: 19786 - RNA, 20 nt, Homo sapiens
guugugucaguuuaucaaac

SEQ ID NO: 19787 - RNA, 24 nt, Homo sapiens
ugccugggucucuggccugcgcgu

SEQ ID NO: 19788 - RNA, 23 nt, Homo sapiens
uggugcggagagggcccacagug

SEQ ID NO: 19789 - RNA, 22 nt, Homo sapiens
ugcggggcuagggcuaacagca

SEQ ID NO: 19790 - RNA, 20 nt, Homo sapiens
uacaguauagaugauguacu

SEQ ID NO: 19791 - RNA, 21 nt, Homo sapiens
gcccuccgcccgugcaccccg

SEQ ID NO: 19792 - RNA, 21 nt, Homo sapiens
ucgaggagcucacagucuagu

SEQ ID NO: 19793 - RNA, 23 nt, Homo sapiens
cggcccgggcugcugcuguuccu

SEQ ID NO: 19794 - RNA, 22 nt, Homo sapiens
ugcggggcuagggcuaacagca

SEQ ID NO: 19795 - RNA, 23 nt, Homo sapiens
cgggucggaguuagcucaagcgg

SEQ ID NO: 19796 - RNA, 23 nt, Homo sapiens
ccugcagcgacuugauggcuucc

SEQ ID NO: 19797 - RNA, 23 nt, Homo sapiens
uacccuguagaaccgaauuugug

SEQ ID NO: 19798 - RNA, 21 nt, Homo sapiens
aagcauucuuucauugguugg

SEQ ID NO: 19799 - RNA, 22 nt, Homo sapiens
uguaacagcaacuccaugugga

SEQ ID NO: 19800 - RNA, 22 nt, Homo sapiens
uguaacagcaacuccaugugga

SEQ ID NO: 19801 - RNA, 21 nt, Homo sapiens
uugugcuugaucuaaccaugu

SEQ ID NO: 19802 - RNA, 21 nt, Homo sapiens
ugucuugcaggccgucaugca

SEQ ID NO: 19803 - RNA, 21 nt, Homo sapiens
aacaggugacugguuagacaa

SEQ ID NO: 19804 - RNA, 22 nt, Homo sapiens
uaacugguugaacaacugaacc

SEQ ID NO: 19805 - RNA, 22 nt, Homo sapiens
uaacacugucugguaaagaugg

SEQ ID NO: 19806 - RNA, 22 nt, Homo sapiens
cucccacugcuucacuugacua

SEQ ID NO: 19807 - RNA, 23 nt, Homo sapiens
agguuacccgagcaacuuugcau

SEQ ID NO: 19808 - RNA, 21 nt, Homo sapiens
aggaggcagcgcucucaggac

SEQ ID NO: 19809 - RNA, 22 nt, Homo sapiens
ugcaacgaaccugagccacuga

SEQ ID NO: 19810 - RNA, 21 nt, Homo sapiens
cccggagccaggaugcagcuc

SEQ ID NO: 19811 - RNA, 22 nt, Homo sapiens
acccgucccguucguccccgga

SEQ ID NO: 19812 - RNA, 17 nt, Homo sapiens
ucgccuccuccucuccc

SEQ ID NO: 19813 - RNA, 22 nt, Homo sapiens
uggagagaaaggcaguuccuga

SEQ ID NO: 19814 - RNA, 21 nt, Homo sapiens
cggcggggacggcgauugguc

SEQ ID NO: 19815 - RNA, 22 nt, Homo sapiens
cauugcacuugucucggucuga

SEQ ID NO: 19816 - RNA, 23 nt, Homo sapiens
ugaggggcagagagcgagacuuu

SEQ ID NO: 19817 - RNA, 19 nt, Homo sapiens
ugagcugcuguaccaaaau

SEQ ID NO: 19818 - RNA, 22 nt, Homo sapiens
aggcggggcgccgcgggaccgc

SEQ ID NO: 19819 - RNA, 22 nt, Homo sapiens
ugcggggcuagggcuaacagca

SEQ ID NO: 19820 - RNA, 22 nt, Homo sapiens
ugagguaguagguuguauaguu

SEQ ID NO: 19821 - RNA, 22 nt, Homo sapiens
ugagguaguagguugugugguu

SEQ ID NO: 19822 - RNA, 22 nt, Homo sapiens
ugagguaguagguuguaugguu

SEQ ID NO: 19823 - RNA, 22 nt, Homo sapiens
agagguaguagguugcauaguu

SEQ ID NO: 19824 - RNA, 22 nt, Homo sapiens
ugagguaggagguuguauaguu

SEQ ID NO: 19825 - RNA, 22 nt, Homo sapiens
ugagguaguagauuguauaguu

SEQ ID NO: 19826 - RNA, 22 nt, Homo sapiens
ugagguaguaguuuguacaguu

SEQ ID NO: 19827 - RNA, 22 nt, Homo sapiens
ugagguaguaguuugugcuguu

SEQ ID NO: 19828 - RNA, 22 nt, Homo sapiens
ucgugucuuguguugcagccgg

SEQ ID NO: 19829 - RNA, 22 nt, Homo sapiens
uaugugggaugguaaaccgcuu

SEQ ID NO: 19830 - RNA, 21 nt, Homo sapiens
ugguagacuauggaacguagg

SEQ ID NO: 19831 - RNA, 22 nt, Homo sapiens
uggugggcacagaaucuggacu

SEQ ID NO: 19832 - RNA, 22 nt, Homo sapiens
uggugggccgcagaacaugugc

SEQ ID NO: 19833 - RNA, 20 nt, Homo sapiens
cggcucugggucugugggga

SEQ ID NO: 19834 - RNA, 22 nt, Homo sapiens
ugagguaguaaguuguauuguu

SEQ ID NO: 19835 - RNA, 21 nt, Homo sapiens
ucguggccuggucuccauuau

SEQ ID NO: 19836 - RNA, 22 nt, Homo sapiens
uggagugugacaaugguguuug

SEQ ID NO: 19837 - RNA, 17 nt, Homo sapiens
ucgccuccuccucuccc

SEQ ID NO: 19838 - RNA, 21 nt, Homo sapiens
uugggacauacuuaugcuaaa

SEQ ID NO: 19839 - RNA, 22 nt, Homo sapiens
cuggcccucucugcccuuccgu

SEQ ID NO: 19840 - RNA, 21 nt, Homo sapiens
ucacuccucuccucccgucuu

SEQ ID NO: 19841 - RNA, 21 nt, Homo sapiens
caaagaggaaggucccauuac

SEQ ID NO: 19842 - RNA, 21 nt, Homo sapiens
uaauuuuauguauaagcuagu

SEQ ID NO: 19843 - RNA, 21 nt, Homo sapiens
guggcugcacucacuuccuuc

SEQ ID NO: 19844 - RNA, 22 nt, Homo sapiens
gguggcccggccgugccugagg

SEQ ID NO: 19845 - RNA, 21 nt, Homo sapiens
aaggcagggcccccgcucccc

SEQ ID NO: 19846 - RNA, 21 nt, Homo sapiens
ccccaccuccucucuccucag

SEQ ID NO: 19847 - RNA, 21 nt, Homo sapiens
acucuagcugccaaaggcgcu

SEQ ID NO: 19848 - RNA, 18 nt, Homo sapiens
aucccaccucugccacca

SEQ ID NO: 19849 - RNA, 22 nt, Homo sapiens
caaagaauucuccuuuugggcu

SEQ ID NO: 19850 - RNA, 22 nt, Homo sapiens
uggcaguguauuguuagcuggu

SEQ ID NO: 19851 - RNA, 23 nt, Homo sapiens
uaagugcuuccauguuuugguga

SEQ ID NO: 19852 - RNA, 22 nt, Homo sapiens
uguaaacauccuacacucagcu

SEQ ID NO: 19853 - RNA, 23 nt, Homo sapiens
gcaaagcacacggccugcagaga

SEQ ID NO: 19854 - RNA, 21 nt, Homo sapiens
uugaaaggcuauuucuugguc

SEQ ID NO: 19855 - RNA, 22 nt, Homo sapiens
ugaguauuacauggccaaucuc

SEQ ID NO: 19856 - RNA, 22 nt, Homo sapiens
aagugcuuccuuuuagaggguu

SEQ ID NO: 19857 - RNA, 22 nt, Homo sapiens
ccucccacacccaaggcuugca

SEQ ID NO: 19858 - RNA, 21 nt, Homo sapiens
uggaggagaaggaaggugaug

SEQ ID NO: 19859 - RNA, 21 nt, Homo sapiens
ccccaccuccucucuccucag

SEQ ID NO: 19860 - RNA, 22 nt, Homo sapiens
acccgucccguucguccccgga

SEQ ID NO: 19861 - RNA, 21 nt, Homo sapiens
uccugcgcgucccagaugccc

SEQ ID NO: 19862 - RNA, 22 nt, Homo sapiens
uggagagaaaggcaguuccuga

SEQ ID NO: 19863 - RNA, 22 nt, Homo sapiens
ucgugcaucccuuuagaguguu

SEQ ID NO: 19864 - RNA, 22 nt, Homo sapiens
ugagaaccacgucugcucugag

SEQ ID NO: 19865 - RNA, 24 nt, Homo sapiens
ugccugggucucuggccugcgcgu

SEQ ID NO: 19866 - RNA, 22 nt, Homo sapiens
uggagugugacaaugguguuug

SEQ ID NO: 19867 - RNA, 22 nt, Homo sapiens
uaacacugucugguaaagaugg

SEQ ID NO: 19868 - RNA, 22 nt, Homo sapiens
uaacacugucugguaacgaugu

SEQ ID NO: 19869 - RNA, 22 nt, Homo sapiens
uccuucauuccaccggagucug

SEQ ID NO: 19870 - RNA, 21 nt, Homo sapiens
gcgacccacucuugguuucca

SEQ ID NO: 19871 - RNA, 21 nt, Homo sapiens
gcgacccauacuugguuucag

SEQ ID NO: 19872 - RNA, 23 nt, Homo sapiens
uaaaucccauggugccuucuccu

SEQ ID NO: 19873 - RNA, 23 nt, Homo sapiens
ggcagguucucacccucucuagg

SEQ ID NO: 19874 - RNA, 21 nt, Homo sapiens
uacucaaaaagcugucaguca

SEQ ID NO: 19875 - RNA, 21 nt, Homo sapiens
uacucaaaaagcugucaguca

SEQ ID NO: 19876 - RNA, 23 nt, Homo sapiens
ucauagcccuguacaaugcugcu

SEQ ID NO: 19877 - RNA, 19 nt, Homo sapiens
gaugaugcugcugaugcug

SEQ ID NO: 19878 - RNA, 22 nt, Homo sapiens
uagcagcacauaaugguuugug

SEQ ID NO: 19879 - RNA, 23 nt, Homo sapiens
uaaggugcaucuagugcagauag

SEQ ID NO: 19880 - RNA, 22 nt, Homo sapiens
cccugugcccggcccacuucug

SEQ ID NO: 19881 - RNA, 22 nt, Homo sapiens
ucaggccaggcacaguggcuca

SEQ ID NO: 19882 - RNA, 23 nt, Homo sapiens
cccaguguucagacuaccuguuc

SEQ ID NO: 19883 - RNA, 23 nt, Homo sapiens
cccaguguuuagacuaucuguuc

SEQ ID NO: 19884 - RNA, 23 nt, Homo sapiens
uaauacugccggguaaugaugga

SEQ ID NO: 19885 - RNA, 22 nt, Homo sapiens
uggcucaguucagcaggaacag

SEQ ID NO: 19886 - RNA, 22 nt, Homo sapiens
agaggcuggccgugaugaauuc

SEQ ID NO: 19887 - RNA, 23 nt, Homo sapiens
agugccugagggaguaagagccc

SEQ ID NO: 19888 - RNA, 21 nt, Homo sapiens
guggcugcacucacuuccuuc

SEQ ID NO: 19889 - RNA, 21 nt, Homo sapiens
gcaggaacuugugagucuccu

SEQ ID NO: 19890 - RNA, 22 nt, Homo sapiens
cugcccuggcccgagggaccga

SEQ ID NO: 19891 - RNA, 22 nt, Homo sapiens
ucugggcaacaaagugagaccu

SEQ ID NO: 19892 - RNA, 20 nt, Homo sapiens
ccccagggcgacgcggcggg

SEQ ID NO: 19893 - RNA, 23 nt, Homo sapiens
caacggaaucccaaaagcagcug

SEQ ID NO: 19894 - RNA, 23 nt, Homo sapiens
ugucugcccgcaugccugccucu

SEQ ID NO: 19895 - RNA, 21 nt, Homo sapiens
gugucuuuugcucugcaguca

SEQ ID NO: 19896 - RNA, 25 nt, Homo sapiens
gcugggcagggcuucugagcuccuu

SEQ ID NO: 19897 - RNA, 22 nt, Homo sapiens
gugagucucuaagaaaagagga

SEQ ID NO: 19898 - RNA, 21 nt, Homo sapiens
aggaggcagcgcucucaggac

SEQ ID NO: 19899 - RNA, 22 nt, Homo sapiens
acuccagccccacagccucagc

SEQ ID NO: 19900 - RNA, 23 nt, Homo sapiens
ucauagcccuguacaaugcugcu

SEQ ID NO: 19901 - RNA, 20 nt, Homo sapiens
gugucugggcggacagcugc

SEQ ID NO: 19902 - RNA, 27 nt, Homo sapiens
accuucuuguauaagcacugugcuaaa

SEQ ID NO: 19903 - RNA, 22 nt, Homo sapiens
uggguggucuggagauuugugc

SEQ ID NO: 19904 - RNA, 22 nt, Homo sapiens
gguccagaggggagauagguuc

SEQ ID NO: 19905 - RNA, 22 nt, Homo sapiens
cugugcgugugacagcggcuga

SEQ ID NO: 19906 - RNA, 22 nt, Homo sapiens
aucacacaaaggcaacuuuugu

SEQ ID NO: 19907 - RNA, 21 nt, Homo sapiens
acuggacuuggagucagaagg

SEQ ID NO: 19908 - RNA, 22 nt, Homo sapiens
acuggacuuagggucagaaggc

SEQ ID NO: 19909 - RNA, 21 nt, Homo sapiens
uggaggagaaggaaggugaug

SEQ ID NO: 19910 - RNA, 22 nt, Homo sapiens
uggugguuuacaaaguaauuca

SEQ ID NO: 19911 - RNA, 22 nt, Homo sapiens
caaagugccucccuuuagagug

SEQ ID NO: 19912 - RNA, 20 nt, Homo sapiens
ggggagcuguggaagcagua

SEQ ID NO: 19913 - RNA, 19 nt, Homo sapiens
gugaggacucgggaggugg

SEQ ID NO: 19914 - RNA, 22 nt, Homo sapiens
cuggacugagccgugcuacugg

SEQ ID NO: 19915 - RNA, 22 nt, Homo sapiens
ugugacugguugaccagagggg

SEQ ID NO: 19916 - RNA, 20 nt, Homo sapiens
guguguggaaaugcuucugc

SEQ ID NO: 19917 - RNA, 25 nt, Homo sapiens
cccccacaaccgcgcuugacuagcu

SEQ ID NO: 19918 - RNA, 21 nt, Homo sapiens
uucacaguggcuaaguuccgc

SEQ ID NO: 19919 - RNA, 21 nt, Homo sapiens
uucacaguggcuaaguucugc

SEQ ID NO: 19920 - RNA, 22 nt, Homo sapiens
uuuugcaauauguuccugaaua

SEQ ID NO: 19921 - RNA, 22 nt, Homo sapiens
uuuugcaauauguuccugaaua

SEQ ID NO: 19922 - RNA, 21 nt, Homo sapiens
gcaguccaugggcauauacac

SEQ ID NO: 19923 - RNA, 20 nt, Homo sapiens
cugcaaagggaagcccuuuc

SEQ ID NO: 19924 - RNA, 20 nt, Homo sapiens
cugcaaagggaagcccuuuc

SEQ ID NO: 19925 - RNA, 20 nt, Homo sapiens
cugcaaagggaagcccuuuc

SEQ ID NO: 19926 - RNA, 20 nt, Homo sapiens
cugcaaagggaagcccuuuc

SEQ ID NO: 19927 - RNA, 22 nt, Homo sapiens
aaaaguauuugcggguuuuguc

SEQ ID NO: 19928 - RNA, 22 nt, Homo sapiens
caaaaguaauuguggauuuugu

SEQ ID NO: 19929 - RNA, 20 nt, Homo sapiens
aggguguuucucucaucucu

SEQ ID NO: 19930 - RNA, 23 nt, Homo sapiens
ucuuugguuaucuagcuguauga

SEQ ID NO: 19931 - RNA, 21 nt, Homo sapiens
cugacuguugccguccuccag

SEQ ID NO: 19932 - RNA, 23 nt, Homo sapiens
ccugcagcgacuugauggcuucc

SEQ ID NO: 19933 - RNA, 20 nt, Homo sapiens
ucugcaggguuugcuuugag

SEQ ID NO: 19934 - RNA, 18 nt, Homo sapiens
ucagcuggcccucauuuc

SEQ ID NO: 19935 - RNA, 18 nt, Homo sapiens
cagggaggugaaugugau

SEQ ID NO: 19936 - RNA, 23 nt, Homo sapiens
ucuggcuccgugucuucacuccc

SEQ ID NO: 19937 - RNA, 21 nt, Homo sapiens
cggcggggacggcgauugguc

SEQ ID NO: 19938 - RNA, 22 nt, Homo sapiens
cgcaggggccgggugcucaccg

SEQ ID NO: 19939 - RNA, 22 nt, Homo sapiens
ugggucuuugcgggcgagauga

SEQ ID NO: 19940 - RNA, 22 nt, Homo sapiens
aagcugccaguugaagaacugu

SEQ ID NO: 19941 - RNA, 22 nt, Homo sapiens
caaucacuaacuccacugccau

SEQ ID NO: 19942 - RNA, 23 nt, Homo sapiens
ugaggggcagagagcgagacuuu

SEQ ID NO: 19943 - RNA, 22 nt, Homo sapiens
agacccuggucugcacucuauc

SEQ ID NO: 19944 - RNA, 20 nt, Homo sapiens
guccgcucggcgguggccca

SEQ ID NO: 19945 - RNA, 22 nt, Homo sapiens
aggcggggcgccgcgggaccgc

SEQ ID NO: 19946 - RNA, 21 nt, Homo sapiens
gaaggcgcuucccuuuggagu

SEQ ID NO: 19947 - RNA, 21 nt, Homo sapiens
cccggagccaggaugcagcuc

SEQ ID NO: 19948 - RNA, 22 nt, Homo sapiens
ucuauacagacccuggcuuuuc

SEQ ID NO: 19949 - RNA, 22 nt, Homo sapiens
cucggcgcggggcgcgggcucc

SEQ ID NO: 19950 - RNA, 21 nt, Homo sapiens
uccugcgcgucccagaugccc

SEQ ID NO: 19951 - RNA, 22 nt, Homo sapiens
uaaugccccuaaaaauccuuau

SEQ ID NO: 19952 - RNA, 23 nt, Homo sapiens
ugaggggcagagagcgagacuuu

SEQ ID NO: 19953 - RNA, 23 nt, Homo sapiens
ucuuggaguaggucauugggugg

SEQ ID NO: 19954 - RNA, 20 nt, Homo sapiens
guccgcucggcgguggccca

SEQ ID NO: 19955 - RNA, 22 nt, Homo sapiens
agacuucccauuugaagguggc

SEQ ID NO: 19956 - RNA, 21 nt, Homo sapiens
aauggcgccacuaggguugug

SEQ ID NO: 19957 - RNA, 24 nt, Homo sapiens
agccuggaagcuggagccugcagu

SEQ ID NO: 19958 - RNA, 21 nt, Homo sapiens
gcccuccgcccgugcaccccg

SEQ ID NO: 19959 - RNA, 22 nt, Homo sapiens
uggcucaguucagcaggaacag

SEQ ID NO: 19960 - RNA, 22 nt, Homo sapiens
aaaagcuggguugagagggcga

SEQ ID NO: 19961 - RNA, 22 nt, Homo sapiens
aaaagcuggguugagagggcaa

SEQ ID NO: 19962 - RNA, 20 nt, Homo sapiens
aaaagcuggguugagagggu

SEQ ID NO: 19963 - RNA, 19 nt, Homo sapiens
aaaagcuggguugagagga

SEQ ID NO: 19964 - RNA, 22 nt, Homo sapiens
aauugcacgguauccaucugua

SEQ ID NO: 19965 - RNA, 20 nt, Homo sapiens
guccgcucggcgguggccca

SEQ ID NO: 19966 - RNA, 25 nt, Homo sapiens
ggcggagggaaguagguccguuggu

SEQ ID NO: 19967 - RNA, 22 nt, Homo sapiens
aggcagcgggguguaguggaua

SEQ ID NO: 19968 - RNA, 21 nt, Homo sapiens
cacuguguccuuucugcguag

SEQ ID NO: 19969 - RNA, 21 nt, Homo sapiens
gugccagcugcagugggggag

SEQ ID NO: 19970 - RNA, 22 nt, Homo sapiens
ccucuuccccuugucucuccag

SEQ ID NO: 19971 - RNA, 18 nt, Homo sapiens
gucccuguucaggcgcca

SEQ ID NO: 19972 - RNA, 21 nt, Homo sapiens
ccaguccugugccugccgccu

SEQ ID NO: 19973 - RNA, 23 nt, Homo sapiens
ugaguaccgccaugucuguuggg

SEQ ID NO: 19974 - RNA, 23 nt, Homo sapiens
ucccuguccuccaggagcucacg

SEQ ID NO: 19975 - RNA, 23 nt, Homo sapiens
agguuacccgagcaacuuugcau

SEQ ID NO: 19976 - RNA, 23 nt, Homo sapiens
ugaggggcagagagcgagacuuu

SEQ ID NO: 19977 - RNA, 22 nt, Homo sapiens
ucaggcucaguccccucccgau

SEQ ID NO: 19978 - RNA, 21 nt, Homo sapiens
aaagcgcuucccuucagagug

SEQ ID NO: 19979 - RNA, 22 nt, Homo sapiens
aggcagcgggguguaguggaua

SEQ ID NO: 19980 - RNA, 22 nt, Homo sapiens
ucggauccgucugagcuuggcu

SEQ ID NO: 19981 - RNA, 23 nt, Homo sapiens
ucuggcuccgugucuucacuccc

SEQ ID NO: 19982 - RNA, 21 nt, Homo sapiens
aucacauugccagggauuucc

SEQ ID NO: 19983 - RNA, 21 nt, Homo sapiens
aucacauugccagggauuacc

SEQ ID NO: 19984 - RNA, 22 nt, Homo sapiens
uguaaacauccuacacucagcu

SEQ ID NO: 19985 - RNA, 21 nt, Homo sapiens
aggggugcuaucugugauuga

SEQ ID NO: 19986 - RNA, 23 nt, Homo sapiens
agugccugagggaguaagagccc

SEQ ID NO: 19987 - RNA, 19 nt, Homo sapiens
aggcugcggaauucaggac

SEQ ID NO: 19988 - RNA, 21 nt, Homo sapiens
acagucugcugagguuggagc

SEQ ID NO: 19989 - RNA, 22 nt, Homo sapiens
caaagugccucccuuuagagug

SEQ ID NO: 19990 - RNA, 24 nt, Homo sapiens
uggggagcugaggcucugggggug

SEQ ID NO: 19991 - RNA, 21 nt, Homo sapiens
gcaguccaugggcauauacac

SEQ ID NO: 19992 - RNA, 23 nt, Homo sapiens
cggcccgggcugcugcuguuccu

SEQ ID NO: 19993 - RNA, 20 nt, Homo sapiens
ggggagcuguggaagcagua

SEQ ID NO: 19994 - RNA, 23 nt, Homo sapiens
acuugggcacugaaacaaugucc

SEQ ID NO: 19995 - RNA, 24 nt, Homo sapiens
gaccuggacauguuugugcccagu

SEQ ID NO: 19996 - RNA, 20 nt, Homo sapiens
auggagauagauauagaaau

SEQ ID NO: 19997 - RNA, 17 nt, Homo sapiens
ucgccuccuccucuccc

SEQ ID NO: 19998 - RNA, 22 nt, Homo sapiens
ucaccagcccuguguucccuag

SEQ ID NO: 19999 - RNA, 22 nt, Homo sapiens
gcugacuccuaguccagggcuc

SEQ ID NO: 20000 - RNA, 23 nt, Homo sapiens
ucuuugguuaucuagcuguauga

SEQ ID NO: 20001 - RNA, 22 nt, Homo sapiens
ucccucacacagaauuccagaa

SEQ ID NO: 20002 - RNA, 22 nt, Homo sapiens
agagcaagaccccgucucuaaa

SEQ ID NO: 20003 - RNA, 22 nt, Homo sapiens
aacccauggaauucaguucuca

SEQ ID NO: 20004 - RNA, 20 nt, Homo sapiens
gcagaagcauuuccacacac

SEQ ID NO: 20005 - RNA, 22 nt, Homo sapiens
cacaaaccauuaugugcugcua

SEQ ID NO: 20006 - RNA, 22 nt, Homo sapiens
uacagauggauaccgugcaauu

SEQ ID NO: 20007 - RNA, 23 nt, Homo sapiens
acacucuaaagagaagcgcuuug

SEQ ID NO: 20008 - RNA, 21 nt, Homo sapiens
agaaaguacuucccucuggag

SEQ ID NO: 20009 - RNA, 21 nt, Homo sapiens
agaaagugcaucccucuggag

SEQ ID NO: 20010 - RNA, 22 nt, Homo sapiens
aagaagugcaccgcgaauguuu

SEQ ID NO: 20011 - RNA, 21 nt, Homo sapiens
acugaucuagagaacacaaga

SEQ ID NO: 20012 - RNA, 19 nt, Homo sapiens
agaaaccccagcagagaca

SEQ ID NO: 20013 - RNA, 22 nt, Homo sapiens
cugcucaaacccuccaaugacu

SEQ ID NO: 20014 - RNA, 22 nt, Homo sapiens
agcucagaacccagaggucuca

SEQ ID NO: 20015 - RNA, 21 nt, Homo sapiens
cacaaccucaguguuuccagg

SEQ ID NO: 20016 - RNA, 21 nt, Homo sapiens
uuccacgaccuaauccuaacu

SEQ ID NO: 20017 - RNA, 24 nt, Homo sapiens
ucacagguuaaagggucucaggga

SEQ ID NO: 20018 - RNA, 22 nt, Homo sapiens
ucacaaguuagggucucaggga

SEQ ID NO: 20019 - RNA, 23 nt, Homo sapiens
agcccuguucuacagcccugagg

SEQ ID NO: 20020 - RNA, 24 nt, Homo sapiens
acugcuggucuucagucagggcca

SEQ ID NO: 20021 - RNA, 22 nt, Homo sapiens
ucacauuugccugcagagauuu

SEQ ID NO: 20022 - RNA, 20 nt, Homo sapiens
cuggaggaagggcccagagg

SEQ ID NO: 20023 - RNA, 22 nt, Homo sapiens
gccuaagacacaggcccagaga

SEQ ID NO: 20024 - RNA, 22 nt, Homo sapiens
caaaagucaagcuuauccuaaa

SEQ ID NO: 20025 - RNA, 23 nt, Homo sapiens
cccagcuagauuguaagcuccuu

SEQ ID NO: 20026 - RNA, 22 nt, Homo sapiens
uccggggacgaacgggacgggu

SEQ ID NO: 20027 - RNA, 23 nt, Homo sapiens
acacagcucuuccauaucuccag

SEQ ID NO: 20028 - RNA, 17 nt, Homo sapiens
gacagccucucccccac

SEQ ID NO: 20029 - RNA, 24 nt, Homo sapiens
acugcuggucuucagucagggcca

SEQ ID NO: 20030 - RNA, 23 nt, Homo sapiens
ccacccaaugaccuacuccaaga

SEQ ID NO: 20031 - RNA, 24 nt, Homo sapiens
cagaaagugcuuucuuuuggagaa

SEQ ID NO: 20032 - RNA, 22 nt, Homo sapiens
aacacucuaaaaggaggcacuu

SEQ ID NO: 20033 - RNA, 21 nt, Homo sapiens
acuggcugagucaggacuagc

SEQ ID NO: 20034 - RNA, 20 nt, Homo sapiens
auuucuauaucuaucuccau

SEQ ID NO: 20035 - RNA, 21 nt, Homo sapiens
gagcugcauccuggcuccggg

SEQ ID NO: 20036 - RNA, 22 nt, Homo sapiens
cugggggcggcacaggggcuca

SEQ ID NO: 20037 - RNA, 22 nt, Homo sapiens
gugggguggguggucaggccga

SEQ ID NO: 20038 - RNA, 24 nt, Homo sapiens
acugcaggcuccagcuuccaggcu

SEQ ID NO: 20039 - RNA, 17 nt, Homo sapiens
gggagaggaggaggcga

SEQ ID NO: 20040 - RNA, 25 nt, Homo sapiens
cagcgucugccggaacccguuccca

SEQ ID NO: 20041 - RNA, 21 nt, Homo sapiens
gaccaaucgccguccccgccg

SEQ ID NO: 20042 - RNA, 21 nt, Homo sapiens
acaggauugagggggggcccu

SEQ ID NO: 20043 - RNA, 21 nt, Homo sapiens
acaggauugagggggggcccu

SEQ ID NO: 20044 - RNA, 22 nt, Homo sapiens
gcggucccgcggcgccccgccu

SEQ ID NO: 20045 - RNA, 22 nt, Homo sapiens
ugcuguuagcccuagccccgca

SEQ ID NO: 20046 - RNA, 22 nt, Homo sapiens
agugaauucuaccagugccaua

SEQ ID NO: 20047 - RNA, 23 nt, Homo sapiens
cuaucugcacuagaugcaccuua

SEQ ID NO: 20048 - RNA, 22 nt, Homo sapiens
accuaauauaucaaacauauca

SEQ ID NO: 20049 - RNA, 20 nt, Homo sapiens
gcaaugcaacagcaaugcac

SEQ ID NO: 20050 - RNA, 21 nt, Homo sapiens
aagacgggaggagaggaguga

SEQ ID NO: 20051 - RNA, 22 nt, Homo sapiens
aacgcuccaaaagaaggcacuc

SEQ ID NO: 20052 - RNA, 22 nt, Homo sapiens
aacacucuaaaaggaggcacuu

SEQ ID NO: 20053 - RNA, 21 nt, Homo sapiens
caucaccuuccuucuccucca

SEQ ID NO: 20054 - RNA, 22 nt, Homo sapiens
uggcagcagcggagggggcaga

SEQ ID NO: 20055 - RNA, 22 nt, Homo sapiens
acaguucuucaacuggcagcuu

SEQ ID NO: 20056 - RNA, 22 nt, Homo sapiens
acaguucuucaacuggcagcuu

SEQ ID NO: 20057 - RNA, 20 nt, Homo sapiens
ccagcagcaccuggggcagu

SEQ ID NO: 20058 - RNA, 23 nt, Homo sapiens
acaccaaugcccuaggggaugcg

SEQ ID NO: 20059 - RNA, 23 nt, Homo sapiens
aaagucucgcucucugccccuca

SEQ ID NO: 20060 - RNA, 21 nt, Homo sapiens
auccuguacugagcugccccg

SEQ ID NO: 20061 - RNA, 22 nt, Homo sapiens
ccucauggaaggguuccccacu

SEQ ID NO: 20062 - RNA, 24 nt, Homo sapiens
cagaaagugcuuucuuuuggagaa

SEQ ID NO: 20063 - RNA, 23 nt, Homo sapiens
acacucuaaagagaagcgcuuug

SEQ ID NO: 20064 - RNA, 22 nt, Homo sapiens
aacacucuaaaaggaggcacuu

SEQ ID NO: 20065 - RNA, 21 nt, Homo sapiens
agaaaguacuucccucuggag

SEQ ID NO: 20066 - RNA, 21 nt, Homo sapiens
agaaagugcaucccucuggag

SEQ ID NO: 20067 - RNA, 21 nt, Homo sapiens
ggacuauagaacuuucccccu

SEQ ID NO: 20068 - RNA, 22 nt, Homo sapiens
cugggggcggcacaggggcuca

SEQ ID NO: 20069 - RNA, 22 nt, Homo sapiens
caaacaccauugucacacucca

SEQ ID NO: 20070 - RNA, 24 nt, Homo sapiens
acugcaggcuccagcuuccaggcu

SEQ ID NO: 20071 - RNA, 18 nt, Homo sapiens
cccccaccaccacgcccg

SEQ ID NO: 20072 - RNA, 21 nt, Homo sapiens
gaccaaucgccguccccgccg

SEQ ID NO: 20073 - RNA, 22 nt, Homo sapiens
ugagccacugugccuggccuga

SEQ ID NO: 20074 - RNA, 22 nt, Homo sapiens
aaagagguuaaccagguguguu

SEQ ID NO: 20075 - RNA, 23 nt, Homo sapiens
aaaucagaaucacaccuggggga

SEQ ID NO: 20076 - RNA, 22 nt, Homo sapiens
ugaauccuugaauagguguguu

SEQ ID NO: 20077 - RNA, 20 nt, Homo sapiens
ugggccaccgccgagcggac

SEQ ID NO: 20078 - RNA, 24 nt, Homo sapiens
acgcagagcccgaaagcccccagu

SEQ ID NO: 20079 - RNA, 25 nt, Homo sapiens
accaacggaccuacuucccuccgcc

SEQ ID NO: 20080 - RNA, 22 nt, Homo sapiens
gcggucccgcggcgccccgccu

SEQ ID NO: 20081 - RNA, 22 nt, Homo sapiens
ugcuguuagcccuagccccgca

SEQ ID NO: 20082 - RNA, 21 nt, Homo sapiens
caucaccuuccuucuccucca

SEQ ID NO: 20083 - RNA, 22 nt, Homo sapiens
gcugaggcuguggggcuggagu

SEQ ID NO: 20084 - RNA, 22 nt, Homo sapiens
ucaguggcucagguucguugca

SEQ ID NO: 20085 - RNA, 22 nt, Homo sapiens
caaacaccauugucacacucca

SEQ ID NO: 20086 - RNA, 21 nt, Homo sapiens
gaccaaucgccguccccgccg

SEQ ID NO: 20087 - RNA, 22 nt, Homo sapiens
cccaacaacaugaaacuaccua

SEQ ID NO: 20088 - RNA, 23 nt, Homo sapiens
acaccaaugcccuaggggaugcg

SEQ ID NO: 20089 - RNA, 21 nt, Homo sapiens
aacuccuguaugaagccguuc

SEQ ID NO: 20090 - RNA, 22 nt, Homo sapiens
ucaccauugcuaaagugcaauu

SEQ ID NO: 20091 - RNA, 22 nt, Homo sapiens
gcggucccgcggcgccccgccu

SEQ ID NO: 20092 - RNA, 22 nt, Homo sapiens
ugcuguuagcccuagccccgca

SEQ ID NO: 20093 - RNA, 22 nt, Homo sapiens
ugcuguuagcccuagccccgca

SEQ ID NO: 20094 - RNA, 26 nt, Homo sapiens
uuucagaauuugcugccaucaucauc

SEQ ID NO: 20095 - RNA, 18 nt, Homo sapiens
cagcagccuccuucucaa

SEQ ID NO: 20096 - RNA, 18 nt, Homo sapiens
aucacauucaccucccug

SEQ ID NO: 20097 - RNA, 23 nt, Homo sapiens
gggagugaagacacggagccaga

SEQ ID NO: 20098 - RNA, 22 nt, Homo sapiens
ucaguuuccucugcaaacaguu

SEQ ID NO: 20099 - RNA, 21 nt, Homo sapiens
ggcugucaauucauaggucag

SEQ ID NO: 20100 - RNA, 21 nt, Homo sapiens
gccaauauuucugugcugcua

SEQ ID NO: 20101 - RNA, 21 nt, Homo sapiens
gucugucaauucauaggucau

SEQ ID NO: 20102 - RNA, 23 nt, Homo sapiens
acacuuacuggacaccuacuagg

SEQ ID NO: 20103 - RNA, 23 nt, Homo sapiens
ucauacagcuagauaaccaaaga

SEQ ID NO: 20104 - RNA, 23 nt, Homo sapiens
agcaaaaaugugcuagugccaaa

SEQ ID NO: 20105 - RNA, 21 nt, Homo sapiens
cuagggaagaacagugagcaa

SEQ ID NO: 20106 - RNA, 23 nt, Homo sapiens
gucacaucccucccaagacccuc

SEQ ID NO: 20107 - RNA, 23 nt, Homo sapiens
ggaagccaucaagucgcugcagg

SEQ ID NO: 20108 - RNA, 17 nt, Homo sapiens
uggcgcccgaacaggga

SEQ ID NO: 20109 - RNA, 24 nt, Homo sapiens
acugcuggucuucagucagggcca

SEQ ID NO: 20110 - RNA, 24 nt, Homo sapiens
acugcuggucuucagucagggcca

SEQ ID NO: 20111 - RNA, 22 nt, Homo sapiens
ccagaacugaguccacagggca

SEQ ID NO: 20112 - RNA, 22 nt, Homo sapiens
cacaaaccauuaugugcugcua

SEQ ID NO: 20113 - RNA, 22 nt, Homo sapiens
uguaaaccaugaugugcugcua

SEQ ID NO: 20114 - RNA, 22 nt, Homo sapiens
cgccaauauuuacgugcugcua

SEQ ID NO: 20115 - RNA, 22 nt, Homo sapiens
ucaggaacugccuuucucucca

SEQ ID NO: 20116 - RNA, 21 nt, Homo sapiens
gccaauauuucugugcugcua

SEQ ID NO: 20117 - RNA, 23 nt, Homo sapiens
gaaacccagcagacaauguagcu

SEQ ID NO: 20118 - RNA, 21 nt, Homo sapiens
gcggaacuuagccacugugaa

SEQ ID NO: 20119 - RNA, 22 nt, Homo sapiens
agcugaguguaggauguuuaca

SEQ ID NO: 20120 - RNA, 23 nt, Homo sapiens
acauuuuucguuauugcucuuga

SEQ ID NO: 20121 - RNA, 22 nt, Homo sapiens
ucaccauugcuaaagugcaauu

SEQ ID NO: 20122 - RNA, 22 nt, Homo sapiens
cacuuaucagguuguauuauaa

SEQ ID NO: 20123 - RNA, 22 nt, Homo sapiens
uucaaaacaugaauugcugcug

SEQ ID NO: 20124 - RNA, 22 nt, Homo sapiens
gaauucaucacggccagccucu

SEQ ID NO: 20125 - RNA, 21 nt, Homo sapiens
acaaaccacagugugcugcug

SEQ ID NO: 20126 - RNA, 22 nt, Homo sapiens
gauagagugcagaccagggucu

SEQ ID NO: 20127 - RNA, 19 nt, Homo sapiens
ucccacaggaagcagacac

SEQ ID NO: 20128 - RNA, 21 nt, Homo sapiens
gaaggaagugagugcagccac

SEQ ID NO: 20129 - RNA, 22 nt, Homo sapiens
aaggugauggucagcagacaua

SEQ ID NO: 20130 - RNA, 23 nt, Homo sapiens
agaaaccaugggguaugagcaga

SEQ ID NO: 20131 - RNA, 19 nt, Homo sapiens
ccaccucccgaguccucac

SEQ ID NO: 20132 - RNA, 22 nt, Homo sapiens
caaacaccauugucacacucca

SEQ ID NO: 20133 - RNA, 22 nt, Homo sapiens
ggcucccaagaaccucaccugu

SEQ ID NO: 20134 - RNA, 23 nt, Homo sapiens
acacagcucuuccauaucuccag

SEQ ID NO: 20135 - RNA, 23 nt, Homo sapiens
acacagcucuuccauaucuccag

SEQ ID NO: 20136 - RNA, 22 nt, Homo sapiens
aggucucacuuuguugcccaga

SEQ ID NO: 20137 - RNA, 21 nt, Homo sapiens
gagcuacagugcuucaucuca

SEQ ID NO: 20138 - RNA, 21 nt, Homo sapiens
gagcuacagugcuucaucuca

SEQ ID NO: 20139 - RNA, 23 nt, Homo sapiens
cuaucugcacuagaugcaccuua

SEQ ID NO: 20140 - RNA, 20 nt, Homo sapiens
cccgccgcgucgcccugggg

SEQ ID NO: 20141 - RNA, 20 nt, Homo sapiens
acagcaaggagggcaggagg

SEQ ID NO: 20142 - RNA, 22 nt, Homo sapiens
acugccugucugugccugcugu

SEQ ID NO: 20143 - RNA, 22 nt, Homo sapiens
acugccugucugugccugcugu

SEQ ID NO: 20144 - RNA, 20 nt, Homo sapiens
gcaaugcaacagcaaugcac

SEQ ID NO: 20145 - RNA, 22 nt, Homo sapiens
accagguuccaccccagcaggc

SEQ ID NO: 20146 - RNA, 22 nt, Homo sapiens
accagguuccaccccagcaggc

SEQ ID NO: 20147 - RNA, 22 nt, Homo sapiens
aacgcuccaaaagaaggcacuc

SEQ ID NO: 20148 - RNA, 22 nt, Homo sapiens
aacacucuaaaaggaggcacuu

SEQ ID NO: 20149 - RNA, 23 nt, Homo sapiens
gggcucuuacucccucaggcacu

SEQ ID NO: 20150 - RNA, 25 nt, Homo sapiens
aaggagcucagaagcccugcccagc

SEQ ID NO: 20151 - RNA, 20 nt, Homo sapiens
auuucuauaucuaucuccau

SEQ ID NO: 20152 - RNA, 20 nt, Homo sapiens
auuucuauaucuaucuccau

SEQ ID NO: 20153 - RNA, 22 nt, Homo sapiens
ccucuaguaaauaugucagcau

SEQ ID NO: 20154 - RNA, 22 nt, Homo sapiens
ucggucccucgggccagggcag

SEQ ID NO: 20155 - RNA, 22 nt, Homo sapiens
gggagaggucucccugcgcaca

SEQ ID NO: 20156 - RNA, 20 nt, Homo sapiens
cugcgggaggacagggcuca

SEQ ID NO: 20157 - RNA, 17 nt, Homo sapiens
gacagccucucccccac

SEQ ID NO: 20158 - RNA, 22 nt, Homo sapiens
ccccucuggucaaccagucaca

SEQ ID NO: 20159 - RNA, 23 nt, Homo sapiens
gggagugaagacacggagccaga

SEQ ID NO: 20160 - RNA, 22 nt, Homo sapiens
ucaggaacugccuuucucucca

SEQ ID NO: 20161 - RNA, 22 nt, Homo sapiens
uggcagcagcggagggggcaga

SEQ ID NO: 20162 - RNA, 20 nt, Homo sapiens
cccgccgcgucgcccugggg

SEQ ID NO: 20163 - RNA, 21 nt, Homo sapiens
accuauccugaauuacuugaa

SEQ ID NO: 20164 - RNA, 20 nt, Homo sapiens
ccagcagcaccuggggcagu

SEQ ID NO: 20165 - RNA, 23 nt, Homo sapiens
cgugagcuccuggaggacaggga

SEQ ID NO: 20166 - RNA, 23 nt, Homo sapiens
aaaucagaaucacaccuggggga

SEQ ID NO: 20167 - RNA, 23 nt, Homo sapiens
acccuauaagcaauauugcacua

SEQ ID NO: 20168 - RNA, 22 nt, Homo sapiens
aguccagauucugugcccacca

SEQ ID NO: 20169 - RNA, 21 nt, Homo sapiens
aguucucccaacguaaaccca

SEQ ID NO: 20170 - RNA, 24 nt, Homo sapiens
acgcagagcccgaaagcccccagu

SEQ ID NO: 20171 - RNA, 22 nt, Homo sapiens
gcacauguucugcggcccacca

SEQ ID NO: 20172 - RNA, 24 nt, Homo sapiens
cacccccagagccucagcucccca

SEQ ID NO: 20173 - RNA, 21 nt, Homo sapiens
aguagugcuuucuacuuuaug

SEQ ID NO: 20174 - RNA, 21 nt, Homo sapiens
aacggaaccacuagugacuug

SEQ ID NO: 20175 - RNA, 23 nt, Homo sapiens
ucaccaaaacauggaagcacuua

SEQ ID NO: 20176 - RNA, 21 nt, Homo sapiens
ugcaaugcaacuacaaugcac

SEQ ID NO: 20177 - RNA, 22 nt, Homo sapiens
acaccgaggagcccaucaugau

SEQ ID NO: 20178 - RNA, 22 nt, Homo sapiens
acaccgaggagcccaucaugau

SEQ ID NO: 20179 - RNA, 22 nt, Homo sapiens
uccagcaaagggaagcgcuuuc

SEQ ID NO: 20180 - RNA, 22 nt, Homo sapiens
accucuaaaggggagcgcuuug

SEQ ID NO: 20181 - RNA, 23 nt, Homo sapiens
acacucuaaagagaagcgcuuug

SEQ ID NO: 20182 - RNA, 21 nt, Homo sapiens
gcuccaaagggaagcgcuuug

SEQ ID NO: 20183 - RNA, 21 nt, Homo sapiens
cacucugaagggaagcgcuuu

SEQ ID NO: 20184 - RNA, 21 nt, Homo sapiens
cacucugaagggaagcgcuuu

SEQ ID NO: 20185 - RNA, 21 nt, Homo sapiens
ccucuaaagagaagcgcuuuc

SEQ ID NO: 20186 - RNA, 20 nt, Homo sapiens
gaaagggcuucccuuuguag

SEQ ID NO: 20187 - RNA, 22 nt, Homo sapiens
acacucuaaagggaaccauuuu

SEQ ID NO: 20188 - RNA, 22 nt, Homo sapiens
gagaaagugcuucccuuuguag

SEQ ID NO: 20189 - RNA, 22 nt, Homo sapiens
agcaaaauccgcaaguacuuuu

SEQ ID NO: 20190 - RNA, 22 nt, Homo sapiens
gacaaaacccgcaaauacuuuu

SEQ ID NO: 20191 - RNA, 22 nt, Homo sapiens
acaaaauccacaauuacuuuug

SEQ ID NO: 20192 - RNA, 21 nt, Homo sapiens
acuuuccaggauucauuaacu

SEQ ID NO: 20193 - RNA, 21 nt, Homo sapiens
cagguaccaauauuuuaucua

SEQ ID NO: 20194 - RNA, 21 nt, Homo sapiens
cagguaccaauauuuuaucua

SEQ ID NO: 20195 - RNA, 21 nt, Homo sapiens
guuauagaucuggauuugaac

SEQ ID NO: 20196 - RNA, 18 nt, Homo sapiens
gaaaugagggccagcuga

SEQ ID NO: 20197 - RNA, 19 nt, Homo sapiens
ccaccucccgaguccucac

SEQ ID NO: 20198 - RNA, 22 nt, Homo sapiens
cgaccauggcuguagacuguua

SEQ ID NO: 20199 - RNA, 23 nt, Homo sapiens
gggagugaagacacggagccaga

SEQ ID NO: 20200 - RNA, 22 nt, Homo sapiens
agcccaaaaggagaauucuuug

SEQ ID NO: 20201 - RNA, 21 nt, Homo sapiens
ggccgugacuggagacuguua

SEQ ID NO: 20202 - RNA, 22 nt, Homo sapiens
uacagauggauaccgugcaauu

SEQ ID NO: 20203 - RNA, 23 nt, Homo sapiens
gcgcccaauuaaugucuguugau

SEQ ID NO: 20204 - RNA, 22 nt, Homo sapiens
aggaaaccagcaaguguugacg

SEQ ID NO: 20205 - RNA, 22 nt, Homo sapiens
aggaaaccagcaaguguugacg

SEQ ID NO: 20206 - RNA, 21 nt, Homo sapiens
cagguaccaauauuuuaucua

SEQ ID NO: 20207 - RNA, 23 nt, Homo sapiens
ucauacagcuagauaaccaaaga

SEQ ID NO: 20208 - RNA, 22 nt, Homo sapiens
aacccauggaauucaguucuca

SEQ ID NO: 20209 - RNA, 22 nt, Homo sapiens
cacaaaccauuaugugcugcua

SEQ ID NO: 20210 - RNA, 22 nt, Homo sapiens
uguaaaccaugaugugcugcua

SEQ ID NO: 20211 - RNA, 22 nt, Homo sapiens
cgccaauauuuacgugcugcua

SEQ ID NO: 20212 - RNA, 21 nt, Homo sapiens
gccaauauuucugugcugcua

SEQ ID NO: 20213 - RNA, 23 nt, Homo sapiens
aauaaauuaaauuuauauuacag

SEQ ID NO: 20214 - RNA, 22 nt, Homo sapiens
auggcaguggaguuagugauug

SEQ ID NO: 20215 - RNA, 22 nt, Homo sapiens
ccuggccgugugguuagugauu

SEQ ID NO: 20216 - RNA, 22 nt, Homo sapiens
uucaaaacaugaauugcugcug

SEQ ID NO: 20217 - RNA, 21 nt, Homo sapiens
acaaaccacagugugcugcug

SEQ ID NO: 20218 - RNA, 21 nt, Homo sapiens
cucacucagauggccaacuca

SEQ ID NO: 20219 - RNA, 23 nt, Homo sapiens
uguaggcuggggauaaaugaaua

SEQ ID NO: 20220 - RNA, 22 nt, Homo sapiens
ucaaugacucagguaaguugca

SEQ ID NO: 20221 - RNA, 22 nt, Homo sapiens
cacaagaucggaucuacggguu

SEQ ID NO: 20222 - RNA, 22 nt, Homo sapiens
cgcaaggucgguucuacgggug

SEQ ID NO: 20223 - RNA, 22 nt, Homo sapiens
cacaaguucggaucuacggguu

SEQ ID NO: 20224 - RNA, 20 nt, Homo sapiens
aguacaucaucuauacugua

SEQ ID NO: 20225 - RNA, 22 nt, Homo sapiens
acacucuaaaaggaugcacgau

SEQ ID NO: 20226 - RNA, 21 nt, Homo sapiens
gaccaaucgccguccccgccg

SEQ ID NO: 20227 - RNA, 22 nt, Homo sapiens
ucaucauuaccaggcaguauua

SEQ ID NO: 20228 - RNA, 23 nt, Homo sapiens
uccaucauuacccggcaguauua

SEQ ID NO: 20229 - RNA, 22 nt, Homo sapiens
cacucagcggccguuuccccaa

SEQ ID NO: 20230 - RNA, 22 nt, Homo sapiens
acgguuuuaccagacaguauua

SEQ ID NO: 20231 - RNA, 18 nt, Homo sapiens
acccucugaaaggaagca

SEQ ID NO: 20232 - RNA, 22 nt, Homo sapiens
aaagugcuucuuaccuccagau

SEQ ID NO: 20233 - RNA, 21 nt, Homo sapiens
gaaggaagugagugcagccac

SEQ ID NO: 20234 - RNA, 22 nt, Homo sapiens
gcggucccgcggcgccccgccu

SEQ ID NO: 20235 - RNA, 23 nt, Homo sapiens
cuccagccccuccagggcuuccu

SEQ ID NO: 20236 - RNA, 21 nt, Homo sapiens
auaauggagaccaggccacga

SEQ ID NO: 20237 - RNA, 22 nt, Homo sapiens
gcacaaaucuccagaccaccca

SEQ ID NO: 20238 - RNA, 21 nt, Homo sapiens
aagugucagacacgguggugg

SEQ ID NO: 20239 - RNA, 22 nt, Homo sapiens
acacaccaaggauaauuucucc

SEQ ID NO: 20240 - RNA, 22 nt, Homo sapiens
aguccagauucugugcccacca

SEQ ID NO: 20241 - RNA, 21 nt, Homo sapiens
guucuaacccauuguggccaa

SEQ ID NO: 20242 - RNA, 22 nt, Homo sapiens
gccaccuucaaaugggaagucu

SEQ ID NO: 20243 - RNA, 19 nt, Homo sapiens
gcucuaagaaagccacacu

SEQ ID NO: 20244 - RNA, 22 nt, Homo sapiens
gcacauguucugcggcccacca

SEQ ID NO: 20245 - RNA, 24 nt, Homo sapiens
acgcgcaggccagagacccaggca

SEQ ID NO: 20246 - RNA, 21 nt, Homo sapiens
cuagggaagaacagugagcaa

SEQ ID NO: 20247 - RNA, 18 nt, Homo sapiens
ccacugaaccacccaugc

SEQ ID NO: 20248 - RNA, 22 nt, Homo sapiens
uacagauggauaccgugcaauu

SEQ ID NO: 20249 - RNA, 23 nt, Homo sapiens
ucucacccagguagcaaggauua

SEQ ID NO: 20250 - RNA, 22 nt, Homo sapiens
agaauccuugcccgggugcauu

SEQ ID NO: 20251 - RNA, 22 nt, Homo sapiens
ugaauccuugcccaggugcauu

SEQ ID NO: 20252 - RNA, 23 nt, Homo sapiens
caugcucagacaaccauggugca

SEQ ID NO: 20253 - RNA, 22 nt, Homo sapiens
ucaggaacugccuuucucucca

SEQ ID NO: 20254 - RNA, 22 nt, Homo sapiens
ucccucacacagaauuccagaa

SEQ ID NO: 20255 - RNA, 22 nt, Homo sapiens
uucacacugcaugcucugggua

SEQ ID NO: 20256 - RNA, 22 nt, Homo sapiens
uaaccaaugugcagacuacugu

SEQ ID NO: 20257 - RNA, 22 nt, Homo sapiens
uaaccaaugugcagacuacugu

SEQ ID NO: 20258 - RNA, 21 nt, Homo sapiens
acccaguagccagauguagcu

SEQ ID NO: 20259 - RNA, 22 nt, Homo sapiens
cuuccagucgaggauguuuaca

SEQ ID NO: 20260 - RNA, 22 nt, Homo sapiens
cuuccagucggggauguuuaca

SEQ ID NO: 20261 - RNA, 22 nt, Homo sapiens
cuuccagucaaggauguuuaca

SEQ ID NO: 20262 - RNA, 20 nt, Homo sapiens
cuggaggaagggcccagagg

SEQ ID NO: 20263 - RNA, 22 nt, Homo sapiens
gccuaagacacaggcccagaga

SEQ ID NO: 20264 - RNA, 22 nt, Homo sapiens
uauucaggaacauauugcaaaa

SEQ ID NO: 20265 - RNA, 22 nt, Homo sapiens
uauucaggaacauauugcaaaa

SEQ ID NO: 20266 - RNA, 22 nt, Homo sapiens
cuacccacagacguaccaauca

SEQ ID NO: 20267 - RNA, 20 nt, Homo sapiens
gaaagggcuucccuuugcag

SEQ ID NO: 20268 - RNA, 23 nt, Homo sapiens
acacucuaaagagaagcgcuuug

SEQ ID NO: 20269 - RNA, 20 nt, Homo sapiens
gaaagggcuucccuuugcag

SEQ ID NO: 20270 - RNA, 23 nt, Homo sapiens
aaucgcgguuuauaccaaaugaa

SEQ ID NO: 20271 - RNA, 20 nt, Homo sapiens
agagaugagagaaacacccu

SEQ ID NO: 20272 - RNA, 21 nt, Homo sapiens
gaccaaucgccguccccgccg

SEQ ID NO: 20273 - RNA, 22 nt, Homo sapiens
ucagaccgagacaagugcaaug

SEQ ID NO: 20274 - RNA, 25 nt, Homo sapiens
accaacggaccuacuucccuccgcc

SEQ ID NO: 20275 - RNA, 22 nt, Homo sapiens
gcggucccgcggcgccccgccu

SEQ ID NO: 20276 - RNA, 22 nt, Homo sapiens
ugcuguuagcccuagccccgca

SEQ ID NO: 20277 - RNA, 22 nt, Homo sapiens
gugggguggguggucaggccga

SEQ ID NO: 20278 - RNA, 21 nt, Homo sapiens
cggggugcacgggcggagggc

SEQ ID NO: 20279 - RNA, 23 nt, Homo sapiens
aggaacagcagcagcccgggccg

SEQ ID NO: 20280 - RNA, 22 nt, Homo sapiens
ucaggaacugccuuucucucca

SEQ ID NO: 20281 - RNA, 22 nt, Homo sapiens
cacucagcggccguuuccccaa

SEQ ID NO: 20282 - RNA, 21 nt, Homo sapiens
acaggauugagggggggcccu

SEQ ID NO: 20283 - RNA, 23 nt, Homo sapiens
aaaucagaaucacaccuggggga

SEQ ID NO: 20284 - RNA, 22 nt, Homo sapiens
uacagauggauaccgugcaauu

SEQ ID NO: 20285 - RNA, 23 nt, Homo sapiens
aaagucucgcucucugccccuca

SEQ ID NO: 20286 - RNA, 22 nt, Homo sapiens
ccucauggaaggguuccccacu

SEQ ID NO: 20287 - RNA, 19 nt, Homo sapiens
guccugaauuccgcagccu

SEQ ID NO: 20288 - RNA, 24 nt, Homo sapiens
acgcagagcccgaaagcccccagu

SEQ ID NO: 20289 - RNA, 24 nt, Homo sapiens
acgcgcaggccagagacccaggca

SEQ ID NO: 20290 - RNA, 21 nt, Homo sapiens
caucaccuuccuucuccucca

SEQ ID NO: 20291 - RNA, 21 nt, Homo sapiens
aagggucaguaagcacccgcg

SEQ ID NO: 20292 - RNA, 20 nt, Homo sapiens
uacugcuuccacagcucccc

SEQ ID NO: 20293 - RNA, 22 nt, Homo sapiens
aggucucacuuuguugcccaga

SEQ ID NO: 20294 - RNA, 18 nt, Homo sapiens
ccacugaaccacccaugc

SEQ ID NO: 20295 - RNA, 22 nt, Homo sapiens
ucagaccgagacaagugcaaug

SEQ ID NO: 20296 - RNA, 22 nt, Homo sapiens
agcugaguguaggauguuuaca

SEQ ID NO: 20297 - RNA, 23 nt, Homo sapiens
aaagucucgcucucugccccuca

SEQ ID NO: 20298 - RNA, 25 nt, Homo sapiens
aaggagcucagaagcccugcccagc

SEQ ID NO: 20299 - RNA, 25 nt, Homo sapiens
accaacggaccuacuucccuccgcc

SEQ ID NO: 20300 - RNA, 21 nt, Homo sapiens
caucaccuuccuucuccucca

SEQ ID NO: 20301 - RNA, 23 nt, Homo sapiens
gucacaucccucccaagacccuc

SEQ ID NO: 20302 - RNA, 22 nt, Homo sapiens
caaacaccauugucacacucca

SEQ ID NO: 20303 - RNA, 22 nt, Homo sapiens
cuggagagacaaggggaagagg

SEQ ID NO: 20304 - RNA, 22 nt, Homo sapiens
aggucucacuuuguugcccaga

SEQ ID NO: 20305 - RNA, 22 nt, Homo sapiens
ucaggaacugccuuucucucca

SEQ ID NO: 20306 - RNA, 22 nt, Homo sapiens
cggugagcacccggccccugcg

SEQ ID NO: 20307 - RNA, 22 nt, Homo sapiens
ucaucucgcccgcaaagaccca

SEQ ID NO: 20308 - RNA, 22 nt, Homo sapiens
acugccugucugugccugcugu

SEQ ID NO: 20309 - RNA, 22 nt, Homo sapiens
ucacauuugccugcagagauuu

SEQ ID NO: 20310 - RNA, 20 nt, Homo sapiens
cuggaggaagggcccagagg

SEQ ID NO: 20311 - RNA, 22 nt, Homo sapiens
gccuaagacacaggcccagaga

SEQ ID NO: 20312 - RNA, 22 nt, Homo sapiens
accagguuccaccccagcaggc

SEQ ID NO: 20313 - RNA, 22 nt, Homo sapiens
gauagagugcagaccagggucu

SEQ ID NO: 20314 - RNA, 20 nt, Homo sapiens
ggcauucaccgcgugccuua

SEQ ID NO: 20315 - RNA, 25 nt, Homo sapiens
aaggagcucagaagcccugcccagc

SEQ ID NO: 20316 - RNA, 23 nt, Homo sapiens
acaacaaaaucacuagucuucca

SEQ ID NO: 20317 - RNA, 21 nt, Homo sapiens
ccccucccagccucccugcca

SEQ ID NO: 20318 - RNA, 18 nt, Homo sapiens
aucacauucaccucccug

SEQ ID NO: 20319 - RNA, 20 nt, Homo sapiens
aguacaucaucuauacugua

SEQ ID NO: 20320 - RNA, 23 nt, Homo sapiens
aggaacagcagcagcccgggccg

SEQ ID NO: 20321 - RNA, 23 nt, Homo sapiens
aggaacagcagcagcccgggccg

SEQ ID NO: 20322 - RNA, 22 nt, Homo sapiens
uggcagcagcggagggggcaga

SEQ ID NO: 20323 - RNA, 22 nt, Homo sapiens
acaguucuucaacuggcagcuu

SEQ ID NO: 20324 - RNA, 21 nt, Homo sapiens
ggaaaucccuggcaaugugau

SEQ ID NO: 20325 - RNA, 21 nt, Homo sapiens
gguaaucccuggcaaugugau

SEQ ID NO: 20326 - RNA, 21 nt, Homo sapiens
acaggauugagggggggcccu

SEQ ID NO: 20327 - RNA, 20 nt, Homo sapiens
ccagcagcaccuggggcagu

SEQ ID NO: 20328 - RNA, 23 nt, Homo sapiens
aaagucucgcucucugccccuca

SEQ ID NO: 20329 - RNA, 21 nt, Homo sapiens
auccuguacugagcugccccg

SEQ ID NO: 20330 - RNA, 19 nt, Homo sapiens
auuuugguacagcagcuca

SEQ ID NO: 20331 - RNA, 19 nt, Homo sapiens
gccugcugacaccgugccu

SEQ ID NO: 20332 - RNA, 24 nt, Homo sapiens
cacccccagagccucagcucccca

SEQ ID NO: 20333 - RNA, 23 nt, Homo sapiens
ggaagccaucaagucgcugcagg

SEQ ID NO: 20334 - RNA, 22 nt, Homo sapiens
ggcucccaagaaccucaccugu

SEQ ID NO: 20335 - RNA, 22 nt, Homo sapiens
ccagaacugaguccacagggca

SEQ ID NO: 20336 - RNA, 22 nt, Homo sapiens
ucaggaacugccuuucucucca

SEQ ID NO: 20337 - RNA, 22 nt, Homo sapiens
cagaagugggccgggcacaggg

SEQ ID NO: 20338 - RNA, 20 nt, Homo sapiens
acagcaaggagggcaggagg

SEQ ID NO: 20339 - RNA, 22 nt, Homo sapiens
cucaauagacugugagcuccuu

SEQ ID NO: 20340 - RNA, 23 nt, Homo sapiens
ucucugcaggccgugugcuuugc

SEQ ID NO: 20341 - RNA, 21 nt, Homo sapiens
uugucuaaccagucaccuguu

SEQ ID NO: 20342 - RNA, 23 nt, Homo sapiens
cccagcuagauuguaagcuccuu

SEQ ID NO: 20343 - RNA, 22 nt, Homo sapiens
ucggucccucgggccagggcag

SEQ ID NO: 20344 - RNA, 22 nt, Homo sapiens
aaccauacaaccuacuaccuca

SEQ ID NO: 20345 - RNA, 20 nt, Homo sapiens
ggcauucaccgcgugccuua

SEQ ID NO: 20346 - RNA, 17 nt, Homo sapiens
agaaagaagcaauauga

SEQ ID NO: 20347 - RNA, 21 nt, Homo sapiens
aaagagaccgguucacuguga

SEQ ID NO: 20348 - RNA, 22 nt, Homo sapiens
ccggcugcaacacaagacacga

SEQ ID NO: 20349 - RNA, 23 nt, Homo sapiens
cuaucugcacuagaugcaccuua

SEQ ID NO: 20350 - RNA, 22 nt, Homo sapiens
aggcauaggaugacaaagggaa

SEQ ID NO: 20351 - RNA, 22 nt, Homo sapiens
aggcgaaggaugacaaagggaa

SEQ ID NO: 20352 - RNA, 22 nt, Homo sapiens
cacucagcaccaggauauuguu

SEQ ID NO: 20353 - RNA, 21 nt, Homo sapiens
ucuacucagaagggugccuua

SEQ ID NO: 20354 - RNA, 23 nt, Homo sapiens
uguaggcuggggauaaaugaaua

SEQ ID NO: 20355 - RNA, 20 nt, Homo sapiens
aggggccucagccuccuggu

SEQ ID NO: 20356 - RNA, 23 nt, Homo sapiens
accacaggagucugagcauuuga

SEQ ID NO: 20357 - RNA, 21 nt, Homo sapiens
aaagagaccgguucacuguga

SEQ ID NO: 20358 - RNA, 22 nt, Homo sapiens
acaaaguucuguagugcacuga

SEQ ID NO: 20359 - RNA, 22 nt, Homo sapiens
acaaaguucugugaugcacuga

SEQ ID NO: 20360 - RNA, 21 nt, Homo sapiens
ccaaguucugucaugcacuga

SEQ ID NO: 20361 - RNA, 22 nt, Homo sapiens
uaaccgauuucagauggugcua

SEQ ID NO: 20362 - RNA, 23 nt, Homo sapiens
aacacugauuucaaauggugcua

SEQ ID NO: 20363 - RNA, 22 nt, Homo sapiens
uaaccgauuucaaauggugcua

SEQ ID NO: 20364 - RNA, 22 nt, Homo sapiens
guagaagggaaucuugcauaag

SEQ ID NO: 20365 - RNA, 22 nt, Homo sapiens
ccuggcacacaguagaccuuca

SEQ ID NO: 20366 - RNA, 22 nt, Homo sapiens
gcacacaauaaauguuugcuga

SEQ ID NO: 20367 - RNA, 21 nt, Homo sapiens
aaaacaaaaucucaccguuuu

SEQ ID NO: 20368 - RNA, 22 nt, Homo sapiens
cugcucaaacccuccaaugacu

SEQ ID NO: 20369 - RNA, 23 nt, Homo sapiens
caugcucagacaaccauggugca

SEQ ID NO: 20370 - RNA, 23 nt, Homo sapiens
acaaggaugaaucuuuguuacug

SEQ ID NO: 20371 - RNA, 23 nt, Homo sapiens
cacaaauucggaucuacagggua

SEQ ID NO: 20372 - RNA, 23 nt, Homo sapiens
cacaaauucgguucuacagggua

SEQ ID NO: 20373 - RNA, 23 nt, Homo sapiens
acacagcucuuccauaucuccag

SEQ ID NO: 20374 - RNA, 22 nt, Homo sapiens
augcccuuuuaacauugcacug

SEQ ID NO: 20375 - RNA, 22 nt, Homo sapiens
cgaaggcaacacggauaaccua

SEQ ID NO: 20376 - RNA, 22 nt, Homo sapiens
agcccaaaaggagaauucuuug

SEQ ID NO: 20377 - RNA, 22 nt, Homo sapiens
ucacaguugccagcugagauua

SEQ ID NO: 20378 - RNA, 21 nt, Homo sapiens
ggaaaucccuggcaaugugau

SEQ ID NO: 20379 - RNA, 21 nt, Homo sapiens
gguaaucccuggcaaugugau

SEQ ID NO: 20380 - RNA, 23 nt, Homo sapiens
cgugagcuccuggaggacaggga

SEQ ID NO: 20381 - RNA, 22 nt, Homo sapiens
aacuggaugucccuguaugauu

SEQ ID NO: 20382 - RNA, 23 nt, Homo sapiens
aaucgcgguuuauaccaaaugaa

SEQ ID NO: 20383 - RNA, 20 nt, Homo sapiens
auuucuauaucuaucuccau

SEQ ID NO: 20384 - RNA, 20 nt, Homo sapiens
acaaugagaacccauggucu

SEQ ID NO: 20385 - RNA, 22 nt, Homo sapiens
caaacaccauugucacacucca

SEQ ID NO: 20386 - RNA, 22 nt, Homo sapiens
cacgaccgacgccacgccgagu

SEQ ID NO: 20387 - RNA, 21 nt, Homo sapiens
gggcaucugggacgcgcagga

SEQ ID NO: 20388 - RNA, 24 nt, Homo sapiens
agugugaguucuaccauugccaaa

SEQ ID NO: 20389 - RNA, 23 nt, Homo sapiens
cccaacagacauggcgguacuca

SEQ ID NO: 20390 - RNA, 22 nt, Homo sapiens
cccaacaacaggaaacuaccua

SEQ ID NO: 20391 - RNA, 22 nt, Homo sapiens
aucgggaggggacugagccuga

SEQ ID NO: 20392 - RNA, 23 nt, Homo sapiens
cugcagaacuguucccgcugcua

SEQ ID NO: 20393 - RNA, 23 nt, Homo sapiens
ccaccuggcaagaacaggcguuc

SEQ ID NO: 20394 - RNA, 22 nt, Homo sapiens
aagagggagacccaggcucgga

SEQ ID NO: 20395 - RNA, 21 nt, Homo sapiens
aggagacucacaaguuccugc

SEQ ID NO: 20396 - RNA, 21 nt, Homo sapiens
agggcucaucuugguccugca

SEQ ID NO: 20397 - RNA, 22 nt, Homo sapiens
ucaggaacugccuuucucucca

SEQ ID NO: 20398 - RNA, 21 nt, Homo sapiens
gaccaaucgccguccccgccg

SEQ ID NO: 20399 - RNA, 23 nt, Homo sapiens
cccaacagacauggcgguacuca

SEQ ID NO: 20400 - RNA, 23 nt, Homo sapiens
gggcucuuacucccucaggcacu

SEQ ID NO: 20401 - RNA, 19 nt, Homo sapiens
gccugcugacaccgugccu

SEQ ID NO: 20402 - RNA, 19 nt, Homo sapiens
guccugaauuccgcagccu

SEQ ID NO: 20403 - RNA, 19 nt, Homo sapiens
guccugaauuccgcagccu

SEQ ID NO: 20404 - RNA, 22 nt, Homo sapiens
gcggucccgcggcgccccgccu

SEQ ID NO: 20405 - RNA, 22 nt, Homo sapiens
ugcuguuagcccuagccccgca

SEQ ID NO: 20406 - RNA, 21 nt, Homo sapiens
cucccccacugcagcuggcac

SEQ ID NO: 20407 - RNA, 18 nt, Homo sapiens
gaaaugagggccagcuga

SEQ ID NO: 20408 - RNA, 21 nt, Homo sapiens
gaccaaucgccguccccgccg

SEQ ID NO: 20409 - RNA, 22 nt, Homo sapiens
acaguucuucaacuggcagcuu

SEQ ID NO: 20410 - RNA, 23 nt, Homo sapiens
aaagucucgcucucugccccuca

SEQ ID NO: 20411 - RNA, 25 nt, Homo sapiens
acggagcugucccaacaccaccccu

SEQ ID NO: 20412 - RNA, 22 nt, Homo sapiens
gcggucccgcggcgccccgccu

SEQ ID NO: 20413 - RNA, 17 nt, Homo sapiens
uggaggccccagcgaga

SEQ ID NO: 20414 - RNA, 20 nt, Homo sapiens
uacugcuuccacagcucccc

SEQ ID NO: 20415 - RNA, 21 nt, Homo sapiens
agggcucaucuugguccugca

SEQ ID NO: 20416 - RNA, 22 nt, Homo sapiens
agacaacaaugccaaccucaca

SEQ ID NO: 20417 - RNA, 22 nt, Homo sapiens
ccagaacugaguccacagggca

SEQ ID NO: 20418 - RNA, 18 nt, Homo sapiens
auucaaucuacugccuca

SEQ ID NO: 20419 - RNA, 23 nt, Homo sapiens
cuaucugcacuagaugcaccuua

SEQ ID NO: 20420 - RNA, 21 nt, Homo sapiens
agagcucauccauaguuguca

SEQ ID NO: 20421 - RNA, 22 nt, Homo sapiens
acaguucuucaacuggcagcuu

SEQ ID NO: 20422 - RNA, 22 nt, Homo sapiens
agucuucacaacagcccugugu

SEQ ID NO: 20423 - RNA, 23 nt, Homo sapiens
gaaacccagcagacaauguagcu

SEQ ID NO: 20424 - RNA, 21 nt, Homo sapiens
acccaguagccagauguagcu

SEQ ID NO: 20425 - RNA, 21 nt, Homo sapiens
aacggaaccacuagugacuug

SEQ ID NO: 20426 - RNA, 22 nt, Homo sapiens
cucaauagacugugagcuccuu

SEQ ID NO: 20427 - RNA, 23 nt, Homo sapiens
ccacccaaugaccuacuccaaga

SEQ ID NO: 20428 - RNA, 22 nt, Homo sapiens
cuacccacagacguaccaauca

SEQ ID NO: 20429 - RNA, 19 nt, Homo sapiens
auuuugguacagcagcuca

SEQ ID NO: 20430 - RNA, 21 nt, Homo sapiens
cccgaggagccgggcaggcuu

SEQ ID NO: 20431 - RNA, 23 nt, Homo sapiens
cccagcuagauuguaagcuccuu

SEQ ID NO: 20432 - RNA, 22 nt, Homo sapiens
ucggucccucgggccagggcag

SEQ ID NO: 20433 - RNA, 21 nt, Homo sapiens
ccccucccagccucccugcca

SEQ ID NO: 20434 - RNA, 18 nt, Homo sapiens
auucaaucuacugccuca

SEQ ID NO: 20435 - RNA, 21 nt, Homo sapiens
gaccaaucgccguccccgccg

SEQ ID NO: 20436 - RNA, 22 nt, Homo sapiens
cggugagcacccggccccugcg

SEQ ID NO: 20437 - RNA, 21 nt, Homo sapiens
acaggauugagggggggcccu

SEQ ID NO: 20438 - RNA, 20 nt, Homo sapiens
cuggaggaagggcccagagg

SEQ ID NO: 20439 - RNA, 22 nt, Homo sapiens
gccuaagacacaggcccagaga

SEQ ID NO: 20440 - RNA, 20 nt, Homo sapiens
gcaaugcaacagcaaugcac

SEQ ID NO: 20441 - RNA, 23 nt, Homo sapiens
ucaacgggagugaucgugucauu

SEQ ID NO: 20442 - RNA, 21 nt, Homo sapiens
auccuguacugagcugccccg

SEQ ID NO: 20443 - RNA, 22 nt, Homo sapiens
gaccucagcuaugacagcacuu

SEQ ID NO: 20444 - RNA, 23 nt, Homo sapiens
gaaagugcccucaaggcugagug

SEQ ID NO: 20445 - RNA, 22 nt, Homo sapiens
aacgcuccaaaagaaggcacuc

SEQ ID NO: 20446 - RNA, 22 nt, Homo sapiens
aacacucuaaaaggaggcacuu

SEQ ID NO: 20447 - RNA, 23 nt, Homo sapiens
ucucgugacaugaugauccccga

SEQ ID NO: 20448 - RNA, 23 nt, Homo sapiens
gggcucuuacucccucaggcacu

SEQ ID NO: 20449 - RNA, 22 nt, Homo sapiens
aagagggagacccaggcucgga

SEQ ID NO: 20450 - RNA, 21 nt, Homo sapiens
guccugagagcgcugccuccu

SEQ ID NO: 20451 - RNA, 24 nt, Homo sapiens
acgcgcaggccagagacccaggca

SEQ ID NO: 20452 - RNA, 22 nt, Homo sapiens
gcggucccgcggcgccccgccu

SEQ ID NO: 20453 - RNA, 22 nt, Homo sapiens
ugcuguuagcccuagccccgca

SEQ ID NO: 20454 - RNA, 21 nt, Homo sapiens
caucaccuuccuucuccucca

SEQ ID NO: 20455 - RNA, 21 nt, Homo sapiens
ggggagcgggggcccugccuu

SEQ ID NO: 20456 - RNA, 22 nt, Homo sapiens
auagaugauaugcacaguacua

SEQ ID NO: 20457 - RNA, 22 nt, Homo sapiens
cgaccauggcuguagacuguua

SEQ ID NO: 20458 - RNA, 23 nt, Homo sapiens
aggaacagcagcagcccgggccg

SEQ ID NO: 20459 - RNA, 23 nt, Homo sapiens
cuaucugcacuagaugcaccuua

SEQ ID NO: 20460 - RNA, 23 nt, Homo sapiens
cuaacugcacuagaugcaccuua

SEQ ID NO: 20461 - RNA, 23 nt, Homo sapiens
cagcugcuuuugggauuccguug

SEQ ID NO: 20462 - RNA, 22 nt, Homo sapiens
cccaacaacaugaaacuaccua

SEQ ID NO: 20463 - RNA, 21 nt, Homo sapiens
ggccgugacuggagacuguua

SEQ ID NO: 20464 - RNA, 22 nt, Homo sapiens
ucaccauugcuaaagugcaauu

SEQ ID NO: 20465 - RNA, 22 nt, Homo sapiens
augggacauccuacauaugcaa

SEQ ID NO: 20466 - RNA, 20 nt, Homo sapiens
gaaagggcuucccuuuguag

SEQ ID NO: 20467 - RNA, 22 nt, Homo sapiens
gagaaagugcuucccuuuguag

SEQ ID NO: 20468 - RNA, 22 nt, Homo sapiens
cucauauuacaaugagcucauc

SEQ ID NO: 20469 - RNA, 22 nt, Homo sapiens
ggaccuaaaaauacaaugcaua

SEQ ID NO: 20470 - RNA, 22 nt, Homo sapiens
ugcuguuagcccuagccccgca

SEQ ID NO: 20471 - RNA, 22 nt, Homo sapiens
gcugaggcuguggggcuggagu

SEQ ID NO: 20472 - RNA, 23 nt, Homo sapiens
uggcccugacacgugguacugga

SEQ ID NO: 20473 - RNA, 22 nt, Homo sapiens
ucggucccucgggccagggcag

SEQ ID NO: 20474 - RNA, 22 nt, Homo sapiens
ggcucccaagaaccucaccugu

SEQ ID NO: 20475 - RNA, 24 nt, Homo sapiens
gaagucacucccaggcagcugcaa

SEQ ID NO: 20476 - RNA, 23 nt, Homo sapiens
cuaccugcacuauaagcacuuua

SEQ ID NO: 20477 - RNA, 22 nt, Homo sapiens
ucacaguugccagcugagauua

SEQ ID NO: 20478 - RNA, 22 nt, Homo sapiens
ucgcccucucaacccagcuuuu

SEQ ID NO: 20479 - RNA, 22 nt, Homo sapiens
uugcccucucaacccagcuuuu

SEQ ID NO: 20480 - RNA, 20 nt, Homo sapiens
acccucucaacccagcuuuu

SEQ ID NO: 20481 - RNA, 19 nt, Homo sapiens
uccucucaacccagcuuuu

SEQ ID NO: 20482 - RNA, 21 nt, Homo sapiens
uugucuaaccagucaccuguu

SEQ ID NO: 20483 - RNA, 22 nt, Homo sapiens
gcaaagguaauugcuguuuucg

SEQ ID NO: 20484 - RNA, 21 nt, Homo sapiens
agacacaccacggcacacuuc

SEQ ID NO: 20485 - RNA, 21 nt, Homo sapiens
ccccucccagccucccugcca

SEQ ID NO: 20486 - RNA, 23 nt, Homo sapiens
cugugggagggcaguggugagag

SEQ ID NO: 20487 - RNA, 21 nt, Homo sapiens
cggggugcacgggcggagggc

SEQ ID NO: 20488 - RNA, 23 nt, Homo sapiens
gggagugaagacacggagccaga

SEQ ID NO: 20489 - RNA, 22 nt, Homo sapiens
cacaaaccauuaugugcugcua

SEQ ID NO: 20490 - RNA, 22 nt, Homo sapiens
uguaaaccaugaugugcugcua

SEQ ID NO: 20491 - RNA, 22 nt, Homo sapiens
cgccaauauuuacgugcugcua

SEQ ID NO: 20492 - RNA, 22 nt, Homo sapiens
cggugagcacccggccccugcg

SEQ ID NO: 20493 - RNA, 22 nt, Homo sapiens
agcgggacuuugagggccaguu

SEQ ID NO: 20494 - RNA, 21 nt, Homo sapiens
gccaauauuucugugcugcua

SEQ ID NO: 20495 - RNA, 22 nt, Homo sapiens
uuaacagcuaagcacccuaauc

SEQ ID NO: 20496 - RNA, 21 nt, Homo sapiens
uagaaaggcuaggaccaaacc

SEQ ID NO: 20497 - RNA, 20 nt, Homo sapiens
uucccaugcccuauaccucu

SEQ ID NO: 20498 - RNA, 23 nt, Homo sapiens
gaaacccagcagacaauguagcu

SEQ ID NO: 20499 - RNA, 22 nt, Homo sapiens
uucaaaacaugaauugcugcug

SEQ ID NO: 20500 - RNA, 22 nt, Homo sapiens
gaauucaucacggccagccucu

SEQ ID NO: 20501 - RNA, 21 nt, Homo sapiens
acaaaccacagugugcugcug

SEQ ID NO: 20502 - RNA, 25 nt, Homo sapiens
accaacggaccuacuucccuccgcc

SEQ ID NO: 20503 - RNA, 20 nt, Homo sapiens
uacugcuuccacagcucccc

SEQ ID NO: 20504 - RNA, 21 nt, Homo sapiens
agaaguagaccauguguccua

SEQ ID NO: 20505 - RNA, 26 nt, Homo sapiens
aaccaucucauacaaaccaacuacuu

SEQ ID NO: 20506 - RNA, 17 nt, Homo sapiens
gacagccucucccccac

SEQ ID NO: 20507 - RNA, 24 nt, Homo sapiens
gaagucacucccaggcagcugcaa

SEQ ID NO: 20508 - RNA, 22 nt, Homo sapiens
aacccauggaauucaguucuca

SEQ ID NO: 20509 - RNA, 22 nt, Homo sapiens
aacccauggaauucaguucuca

SEQ ID NO: 20510 - RNA, 22 nt, Homo sapiens
agccuauggaauucaguucuca

SEQ ID NO: 20511 - RNA, 22 nt, Homo sapiens
acaaaguucuguagugcacuga

SEQ ID NO: 20512 - RNA, 23 nt, Homo sapiens
gggagugaagacacggagccaga

SEQ ID NO: 20513 - RNA, 18 nt, Homo sapiens
auucaaucuacugccuca

SEQ ID NO: 20514 - RNA, 23 nt, Homo sapiens
ccacccaaugaccuacuccaaga

SEQ ID NO: 20515 - RNA, 23 nt, Homo sapiens
ucucacccagguagcaaggauua

SEQ ID NO: 20516 - RNA, 22 nt, Homo sapiens
uuucaguuaucaaucugucaca

SEQ ID NO: 20517 - RNA, 19 nt, Homo sapiens
auuuugguacagcagcuca

SEQ ID NO: 20518 - RNA, 20 nt, Homo sapiens
agagaugagagaaacacccu

SEQ ID NO: 20519 - RNA, 22 nt, Homo sapiens
caagacacauuuggagagggac

SEQ ID NO: 20520 - RNA, 21 nt, Homo sapiens
guccugagagcgcugccuccu

SEQ ID NO: 20521 - RNA, 21 nt, Homo sapiens
ggucagaacccaucauucacu

SEQ ID NO: 20522 - RNA, 18 nt, Homo sapiens
aucacauucaccucccug

SEQ ID NO: 20523 - RNA, 20 nt, Homo sapiens
uacugcuuccacagcucccc

SEQ ID NO: 20524 - RNA, 22 nt, Homo sapiens
cagaaagugcuucccucuagag

SEQ ID NO: 20525 - RNA, 22 nt, Homo sapiens
uccacauggaguugcuguuaca

SEQ ID NO: 20526 - RNA, 22 nt, Homo sapiens
uagucaagugaagcagugggag

SEQ ID NO: 20527 - RNA, 22 nt, Homo sapiens
aggcauaggaugacaaagggaa

SEQ ID NO: 20528 - RNA, 22 nt, Homo sapiens
aggcgaaggaugacaaagggaa

SEQ ID NO: 20529 - RNA, 21 nt, Homo sapiens
acccaguagccagauguagcu

SEQ ID NO: 20530 - RNA, 22 nt, Homo sapiens
cacuuaucagguuguauuauaa

SEQ ID NO: 20531 - RNA, 22 nt, Homo sapiens
cacuuagcagguuguauuauau

SEQ ID NO: 20532 - RNA, 22 nt, Homo sapiens
gccagcuaacaauacacugccu

SEQ ID NO: 20533 - RNA, 22 nt, Homo sapiens
gaauucaucacggccagccucu

SEQ ID NO: 20534 - RNA, 18 nt, Homo sapiens
acccucugaaaggaagca

SEQ ID NO: 20535 - RNA, 22 nt, Homo sapiens
aaagugcuucuuaccuccagau

SEQ ID NO: 20536 - RNA, 22 nt, Homo sapiens
aaaguaacugcaguuuuugcua

SEQ ID NO: 20537 - RNA, 20 nt, Homo sapiens
gcaaaugguacagcuacuuu

SEQ ID NO: 20538 - RNA, 21 nt, Homo sapiens
gaaggaagugagugcagccac

SEQ ID NO: 20539 - RNA, 22 nt, Homo sapiens
caacuccgauaugcaaugggua

SEQ ID NO: 20540 - RNA, 21 nt, Homo sapiens
cugaggagagaggaggugggg

SEQ ID NO: 20541 - RNA, 17 nt, Homo sapiens
caccugaauuacuugaa

SEQ ID NO: 20542 - RNA, 22 nt, Homo sapiens
ucaggaacugccuuucucucca

SEQ ID NO: 20543 - RNA, 22 nt, Homo sapiens
cacucagcggccguuuccccaa

SEQ ID NO: 20544 - RNA, 21 nt, Homo sapiens
accuauccugaauuacuugaa

SEQ ID NO: 20545 - RNA, 23 nt, Homo sapiens
ucaacgggagugaucgugucauu

SEQ ID NO: 20546 - RNA, 22 nt, Homo sapiens
ccucauggaaggguuccccacu

SEQ ID NO: 20547 - RNA, 22 nt, Homo sapiens
acacaccaaggauaauuucucc

SEQ ID NO: 20548 - RNA, 22 nt, Homo sapiens
gacaaaacccgcaaauacuuuu

SEQ ID NO: 20549 - RNA, 22 nt, Homo sapiens
acaaaauccacaauuacuuuug

SEQ ID NO: 20550 - RNA, 20 nt, Homo sapiens
cccugcgccaucuccucuac

SEQ ID NO: 20551 - RNA, 22 nt, Homo sapiens
ggcagagagucagagcgcggau

SEQ ID NO: 20552 - RNA, 21 nt, Homo sapiens
auaauggagaccaggccacga

SEQ ID NO: 20553 - RNA, 21 nt, Homo sapiens
cugaggagagaggaggugggg

SEQ ID NO: 20554 - RNA, 22 nt, Homo sapiens
caaacaccauugucacacucca

SEQ ID NO: 20555 - RNA, 19 nt, Homo sapiens
aagccaaagccuuauccau

SEQ ID NO: 20556 - RNA, 21 nt, Homo sapiens
uggggauuacacuucaacagg

SEQ ID NO: 20557 - RNA, 17 nt, Homo sapiens
ggguggcagcgguggga

SEQ ID NO: 20558 - RNA, 17 nt, Homo sapiens
gggagaggaggaggcga

SEQ ID NO: 20559 - RNA, 21 nt, Homo sapiens
agggcucaucuugguccugca

SEQ ID NO: 20560 - RNA, 22 nt, Homo sapiens
acaacuguaacuagacgguuuu

SEQ ID NO: 20561 - RNA, 22 nt, Homo sapiens
uggcagcagcggagggggcaga

SEQ ID NO: 20562 - RNA, 21 nt, Homo sapiens
aaagugucagauacggugugg

SEQ ID NO: 20563 - RNA, 20 nt, Homo sapiens
ccagcagcaccuggggcagu

SEQ ID NO: 20564 - RNA, 23 nt, Homo sapiens
acgggugcgauuucugugugaga

SEQ ID NO: 20565 - RNA, 23 nt, Homo sapiens
gcgcccaauuaaugucuguugau

SEQ ID NO: 20566 - RNA, 22 nt, Homo sapiens
aacucaguaaugguaacgguuu

SEQ ID NO: 20567 - RNA, 23 nt, Homo sapiens
ugcgaacucaccacggacaaccu

SEQ ID NO: 20568 - RNA, 22 nt, Homo sapiens
gaauucaucacggccagccucu

SEQ ID NO: 20569 - RNA, 21 nt, Homo sapiens
auccuguacugagcugccccg

SEQ ID NO: 20570 - RNA, 22 nt, Homo sapiens
aguccagauucugugcccacca

SEQ ID NO: 20571 - RNA, 21 nt, Homo sapiens
uugucuaaccagucaccuguu

SEQ ID NO: 20572 - RNA, 20 nt, Homo sapiens
ugggccaccgccgagcggac

SEQ ID NO: 20573 - RNA, 21 nt, Homo sapiens
guucuaacccauuguggccaa

SEQ ID NO: 20574 - RNA, 21 nt, Homo sapiens
guucuaacccauuguggccaa

SEQ ID NO: 20575 - RNA, 22 nt, Homo sapiens
gcacauguucugcggcccacca

SEQ ID NO: 20576 - RNA, 25 nt, Homo sapiens
accaacggaccuacuucccuccgcc

SEQ ID NO: 20577 - RNA, 20 nt, Homo sapiens
uacugcuuccacagcucccc

SEQ ID NO: 20578 - RNA, 21 nt, Homo sapiens
ugcaggcugaucuucuucucu

SEQ ID NO: 20579 - RNA, 24 nt, Homo sapiens
acugcaggcuccagcuuccaggcu

SEQ ID NO: 20580 - RNA, 18 nt, Homo sapiens
cagcagccuccuucucaa

SEQ ID NO: 20581 - RNA, 22 nt, Homo sapiens
aacccauggaauucaguucuca

SEQ ID NO: 20582 - RNA, 22 nt, Homo sapiens
agccuauggaauucaguucuca

SEQ ID NO: 20583 - RNA, 21 nt, Homo sapiens
cccuccaccaugcaagggaug

SEQ ID NO: 20584 - RNA, 21 nt, Homo sapiens
agcuaugccagcaucuugccu

SEQ ID NO: 20585 - RNA, 23 nt, Homo sapiens
acaccaaugcccuaggggaugcg

SEQ ID NO: 20586 - RNA, 22 nt, Homo sapiens
auaaacgacaccuccuugagaa

SEQ ID NO: 20587 - RNA, 22 nt, Homo sapiens
gguucaguuguucaaccaguua

SEQ ID NO: 20588 - RNA, 23 nt, Homo sapiens
acccaacagccccugcaagggau

SEQ ID NO: 20589 - RNA, 23 nt, Homo sapiens
acaaggaugaaucuuuguuacug

SEQ ID NO: 20590 - RNA, 22 nt, Homo sapiens
acuggguucaccuuuaagggca

SEQ ID NO: 20591 - RNA, 22 nt, Homo sapiens
acacacccacgcgagccggaaa

SEQ ID NO: 20592 - RNA, 18 nt, Homo sapiens
ugguggcagaggugggau

SEQ ID NO: 20593 - RNA, 23 nt, Homo sapiens
ucaguuuugcauagauuugcaca

SEQ ID NO: 20594 - RNA, 23 nt, Homo sapiens
ucaguuuugcauggauuugcaca

SEQ ID NO: 20595 - RNA, 21 nt, Homo sapiens
uucacuccaaaaggugcaaaa

SEQ ID NO: 20596 - RNA, 22 nt, Homo sapiens
ugcaagccuugggugugggagg

SEQ ID NO: 20597 - RNA, 23 nt, Homo sapiens
agacaaggcccacccgugcaaac

SEQ ID NO: 20598 - RNA, 22 nt, Homo sapiens
acuucaaggaucuuaaacuuug

SEQ ID NO: 20599 - RNA, 25 nt, Homo sapiens
acggagcugucccaacaccaccccu

SEQ ID NO: 20600 - RNA, 22 nt, Homo sapiens
aagagggagacccaggcucgga

SEQ ID NO: 20601 - RNA, 22 nt, Homo sapiens
ugcuguuagcccuagccccgca

SEQ ID NO: 20602 - RNA, 21 nt, Homo sapiens
auaauggagaccaggccacga

SEQ ID NO: 20603 - RNA, 22 nt, Homo sapiens
acaccuggcuccacacgcgggc

SEQ ID NO: 20604 - RNA, 22 nt, Homo sapiens
cacaaaccauuaugugcugcua

SEQ ID NO: 20605 - RNA, 22 nt, Homo sapiens
uguaaaccaugaugugcugcua

SEQ ID NO: 20606 - RNA, 22 nt, Homo sapiens
cgccaauauuuacgugcugcua

SEQ ID NO: 20607 - RNA, 21 nt, Homo sapiens
gaccaaucgccguccccgccg

SEQ ID NO: 20608 - RNA, 23 nt, Homo sapiens
cccaacagacauggcgguacuca

SEQ ID NO: 20609 - RNA, 21 nt, Homo sapiens
gccaauauuucugugcugcua

SEQ ID NO: 20610 - RNA, 22 nt, Homo sapiens
cuguuccugcugaacugagcca

SEQ ID NO: 20611 - RNA, 22 nt, Homo sapiens
uucaaaacaugaauugcugcug

SEQ ID NO: 20612 - RNA, 21 nt, Homo sapiens
acaaaccacagugugcugcug

SEQ ID NO: 20613 - RNA, 19 nt, Homo sapiens
agaaaccccagcagagaca

SEQ ID NO: 20614 - RNA, 22 nt, Homo sapiens
gauccgagcaccggggaccccc

SEQ ID NO: 20615 - RNA, 22 nt, Homo sapiens
gcggucccgcggcgccccgccu

SEQ ID NO: 20616 - RNA, 22 nt, Homo sapiens
ccucaggcacggccgggccacc

SEQ ID NO: 20617 - RNA, 23 nt, Homo sapiens
caugcucagacaaccauggugca

SEQ ID NO: 20618 - RNA, 22 nt, Homo sapiens
gggagaggucucccugcgcaca

SEQ ID NO: 20619 - RNA, 22 nt, Homo sapiens
ggcucccaagaaccucaccugu

SEQ ID NO: 20620 - RNA, 18 nt, Homo sapiens
cccccaccaccacgcccg

SEQ ID NO: 20621 - RNA, 20 nt, Homo sapiens
ugucuccacagggcucuuua

SEQ ID NO: 20622 - RNA, 17 nt, Homo sapiens
ggguggcagcgguggga

SEQ ID NO: 20623 - RNA, 20 nt, Homo sapiens
aagcagaaaaaggcaaacga

SEQ ID NO: 20624 - RNA, 21 nt, Homo sapiens
gaccaaucgccguccccgccg

SEQ ID NO: 20625 - RNA, 21 nt, Homo sapiens
uucuaggauaggcccaggggc

SEQ ID NO: 20626 - RNA, 22 nt, Homo sapiens
acaaccagcuaagacacugcca

SEQ ID NO: 20627 - RNA, 22 nt, Homo sapiens
aguccagauucugugcccacca

SEQ ID NO: 20628 - RNA, 22 nt, Homo sapiens
uuucaguuaucaaucugucaca

SEQ ID NO: 20629 - RNA, 22 nt, Homo sapiens
gcacacaauaaauguuugcuga

SEQ ID NO: 20630 - RNA, 25 nt, Homo sapiens
acggagcugucccaacaccaccccu

SEQ ID NO: 20631 - RNA, 22 nt, Homo sapiens
gcacauguucugcggcccacca

SEQ ID NO: 20632 - RNA, 22 nt, Homo sapiens
gcggucccgcggcgccccgccu

SEQ ID NO: 20633 - RNA, 22 nt, Homo sapiens
ugcuguuagcccuagccccgca

SEQ ID NO: 20634 - RNA, 20 nt, Homo sapiens
uacugcuuccacagcucccc

SEQ ID NO: 20635 - RNA, 20 nt, Homo sapiens
uacugcuuccacagcucccc

SEQ ID NO: 20636 - RNA, 22 nt, Homo sapiens
aacuauacaaccuacuaccuca

SEQ ID NO: 20637 - RNA, 22 nt, Homo sapiens
aaccacacaaccuacuaccuca

SEQ ID NO: 20638 - RNA, 22 nt, Homo sapiens
aaccauacaaccuacuaccuca

SEQ ID NO: 20639 - RNA, 22 nt, Homo sapiens
aacuaugcaaccuacuaccucu

SEQ ID NO: 20640 - RNA, 22 nt, Homo sapiens
aacuauacaaccuccuaccuca

SEQ ID NO: 20641 - RNA, 22 nt, Homo sapiens
aacuauacaaucuacuaccuca

SEQ ID NO: 20642 - RNA, 22 nt, Homo sapiens
aacuguacaaacuacuaccuca

SEQ ID NO: 20643 - RNA, 22 nt, Homo sapiens
aacagcacaaacuacuaccuca

SEQ ID NO: 20644 - RNA, 22 nt, Homo sapiens
cuggagagacaaggggaagagg

SEQ ID NO: 20645 - RNA, 22 nt, Homo sapiens
ccccucuggucaaccagucaca

SEQ ID NO: 20646 - RNA, 23 nt, Homo sapiens
uccaucauuacccggcaguauua

SEQ ID NO: 20647 - RNA, 22 nt, Homo sapiens
acaagcuuuuugcucgucuuau

SEQ ID NO: 20648 - RNA, 22 nt, Homo sapiens
acaaaccuuuuguucgucuuau

SEQ ID NO: 20649 - RNA, 20 nt, Homo sapiens
cuggaggaagggcccagagg

SEQ ID NO: 20650 - RNA, 22 nt, Homo sapiens
gccuaagacacaggcccagaga

SEQ ID NO: 20651 - RNA, 21 nt, Homo sapiens
ccuacguuccauagucuacca

SEQ ID NO: 20652 - RNA, 22 nt, Homo sapiens
cuacccacagacguaccaauca

SEQ ID NO: 20653 - RNA, 23 nt, Homo sapiens
gggcucuuacucccucaggcacu

SEQ ID NO: 20654 - RNA, 20 nt, Homo sapiens
cccugcgccaucuccucuac

SEQ ID NO: 20655 - RNA, 22 nt, Homo sapiens
ggaggccgggacgagugcaaua

SEQ ID NO: 20656 - RNA, 22 nt, Homo sapiens
aacaauacaacuuacuaccuca

SEQ ID NO: 20657 - RNA, 22 nt, Homo sapiens
uaaaugaauucaauuuccuucu

SEQ ID NO: 20658 - RNA, 22 nt, Homo sapiens
acaaaguucuguagugcacuga

SEQ ID NO: 20659 - RNA, 22 nt, Homo sapiens
acaaaguucugugaugcacuga

SEQ ID NO: 20660 - RNA, 21 nt, Homo sapiens
ccaaguucugucaugcacuga

SEQ ID NO: 20661 - RNA, 18 nt, Homo sapiens
ggagaggagggcacugga

SEQ ID NO: 20662 - RNA, 23 nt, Homo sapiens
acauuuuucguuauugcucuuga

SEQ ID NO: 20663 - RNA, 23 nt, Homo sapiens
aaaucagaaucacaccuggggga

SEQ ID NO: 20664 - RNA, 23 nt, Homo sapiens
acucagaaggacaaguagaguuu

SEQ ID NO: 20665 - RNA, 24 nt, Homo sapiens
acgcagagcccgaaagcccccagu

SEQ ID NO: 20666 - RNA, 24 nt, Homo sapiens
acgcgcaggccagagacccaggca

SEQ ID NO: 20667 - RNA, 22 nt, Homo sapiens
cugggggcggcacaggggcuca

SEQ ID NO: 20668 - RNA, 22 nt, Homo sapiens
gugggguggguggucaggccga

SEQ ID NO: 20669 - RNA, 24 nt, Homo sapiens
ucacagguuaaagggucucaggga

SEQ ID NO: 20670 - RNA, 22 nt, Homo sapiens
ucacaaguuagggucucaggga

SEQ ID NO: 20671 - RNA, 23 nt, Homo sapiens
agcccuguucuacagcccugagg

SEQ ID NO: 20672 - RNA, 23 nt, Homo sapiens
aggaacagcagcagcccgggccg

SEQ ID NO: 20673 - RNA, 21 nt, Homo sapiens
gaccaaucgccguccccgccg

SEQ ID NO: 20674 - RNA, 23 nt, Homo sapiens
cagcugcuuuugggauuccguug

SEQ ID NO: 20675 - RNA, 22 nt, Homo sapiens
cuguuccugcugaacugagcca

SEQ ID NO: 20676 - RNA, 19 nt, Homo sapiens
guugggaucacaggcgccc

SEQ ID NO: 20677 - RNA, 25 nt, Homo sapiens
acggagcugucccaacaccaccccu

SEQ ID NO: 20678 - RNA, 24 nt, Homo sapiens
acgcgcaggccagagacccaggca

SEQ ID NO: 20679 - RNA, 22 nt, Homo sapiens
gcggucccgcggcgccccgccu

SEQ ID NO: 20680 - RNA, 22 nt, Homo sapiens
ugcuguuagcccuagccccgca

SEQ ID NO: 20681 - RNA, 23 nt, Homo sapiens
ccgcuugagcuaacuccgacccg

SEQ ID NO: 20682 - RNA, 20 nt, Homo sapiens
uacugcuuccacagcucccc

SEQ ID NO: 20683 - RNA, 23 nt, Homo sapiens
gcacaugugcacacagccgggug

SEQ ID NO: 20684 - RNA, 21 nt, Homo sapiens
aucugcacugucagcacuuua

SEQ ID NO: 20685 - RNA, 20 nt, Homo sapiens
ugucuccacagggcucuuua

SEQ ID NO: 20686 - RNA, 18 nt, Homo sapiens
ggagaggagggcacugga

SEQ ID NO: 20687 - RNA, 21 nt, Homo sapiens
gaccaaucgccguccccgccg

SEQ ID NO: 20688 - RNA, 22 nt, Homo sapiens
uggcagcagcggagggggcaga

SEQ ID NO: 20689 - RNA, 20 nt, Homo sapiens
ccagcagcaccuggggcagu

SEQ ID NO: 20690 - RNA, 21 nt, Homo sapiens
auccuguacugagcugccccg

SEQ ID NO: 20691 - RNA, 23 nt, Homo sapiens
gaaagugcccucaaggcugagug

SEQ ID NO: 20692 - RNA, 21 nt, Homo sapiens
caaaaaccacaaauaccuuug

SEQ ID NO: 20693 - RNA, 21 nt, Homo sapiens
uggaaaccaagagugggucgc

SEQ ID NO: 20694 - RNA, 21 nt, Homo sapiens
cugaaaccaaguaugggucgc

SEQ ID NO: 20695 - RNA, 19 nt, Homo sapiens
agaaaccccagcagagaca

SEQ ID NO: 20696 - RNA, 19 nt, Homo sapiens
ucagcaguaccagccuaga

SEQ ID NO: 20697 - RNA, 22 nt, Homo sapiens
ugcuguuagcccuagccccgca

SEQ ID NO: 20698 - RNA, 19 nt, Homo sapiens
ccaccucccgaguccucac

SEQ ID NO: 20699 - RNA, 24 nt, Homo sapiens
acugcaggcuccagcuuccaggcu

SEQ ID NO: 20700 - RNA, 23 nt, Homo sapiens
ucacauaggaauaaaaagccaua

SEQ ID NO: 20701 - RNA, 23 nt, Homo sapiens
ucacauaggaaugaaaagccaua

SEQ ID NO: 20702 - RNA, 21 nt, Homo sapiens
gaccaaucgccguccccgccg

SEQ ID NO: 20703 - RNA, 22 nt, Homo sapiens
accuaauauaucaaacauauca

SEQ ID NO: 20704 - RNA, 23 nt, Homo sapiens
gaaacccagcagacaauguagcu

SEQ ID NO: 20705 - RNA, 23 nt, Homo sapiens
aaagucucgcucucugccccuca

SEQ ID NO: 20706 - RNA, 21 nt, Homo sapiens
cacaacccuaguggcgccauu

SEQ ID NO: 20707 - RNA, 22 nt, Homo sapiens
gcggucccgcggcgccccgccu

SEQ ID NO: 20708 - RNA, 22 nt, Homo sapiens
ugcuguuagcccuagccccgca

SEQ ID NO: 20709 - RNA, 22 nt, Homo sapiens
uauccacuacaccccgcugccu

SEQ ID NO: 20710 - RNA, 22 nt, Homo sapiens
ggcagagagucagagcgcggau

SEQ ID NO: 20711 - RNA, 22 nt, Homo sapiens
uccggggacgaacgggacgggu

SEQ ID NO: 20712 - RNA, 25 nt, Homo sapiens
aagaaagagucuugcuuugucgccc

SEQ ID NO: 20713 - RNA, 23 nt, Homo sapiens
aggaacagcagcagcccgggccg

SEQ ID NO: 20714 - RNA, 22 nt, Homo sapiens
cccaacaacaggaaacuaccua

SEQ ID NO: 20715 - RNA, 21 nt, Homo sapiens
uucuaggauaggcccaggggc

SEQ ID NO: 20716 - RNA, 22 nt, Homo sapiens
uuucaguuaucaaucugucaca

SEQ ID NO: 20717 - RNA, 22 nt, Homo sapiens
ggaggccgggacgagugcaaua

SEQ ID NO: 20718 - RNA, 22 nt, Homo sapiens
ggcagagagucagagcgcggau

SEQ ID NO: 20719 - RNA, 22 nt, Homo sapiens
aggucucacuuuguugcccaga

SEQ ID NO: 20720 - RNA, 21 nt, Homo sapiens
ucuccagaucagggcagucca

SEQ ID NO: 20721 - RNA, 22 nt, Homo sapiens
accuaauauaucaaacauauca

SEQ ID NO: 20722 - RNA, 21 nt, Homo sapiens
aacccaauaucaaacauauca

SEQ ID NO: 20723 - RNA, 21 nt, Homo sapiens
aggcggcaggcacaggacugg

SEQ ID NO: 20724 - RNA, 22 nt, Homo sapiens
cccaacaacaugaaacuaccua

SEQ ID NO: 20725 - RNA, 22 nt, Homo sapiens
uagucaagugaagcagugggag

SEQ ID NO: 20726 - RNA, 22 nt, Homo sapiens
ugcaagccuugggugugggagg

SEQ ID NO: 20727 - RNA, 22 nt, Homo sapiens
gcaaaaguaacugcaguuuugg

SEQ ID NO: 20728 - RNA, 25 nt, Homo sapiens
aaggagcucagaagcccugcccagc

SEQ ID NO: 20729 - RNA, 24 nt, Homo sapiens
acgcgcaggccagagacccaggca

SEQ ID NO: 20730 - RNA, 20 nt, Homo sapiens
aggggccucagccuccuggu

SEQ ID NO: 20731 - RNA, 22 nt, Homo sapiens
ugcuguuagcccuagccccgca

SEQ ID NO: 20732 - RNA, 18 nt, Homo sapiens
gaaaugagggccagcuga

SEQ ID NO: 20733 - RNA, 22 nt, Homo sapiens
caaacaccauugucacacucca

SEQ ID NO: 20734 - RNA, 22 nt, Homo sapiens
gcacaaaucuccagaccaccca

SEQ ID NO: 20735 - RNA, 18 nt, Homo sapiens
aucacauucaccucccug

SEQ ID NO: 20736 - RNA, 23 nt, Homo sapiens
gggagugaagacacggagccaga

SEQ ID NO: 20737 - RNA, 22 nt, Homo sapiens
cacucagcggccguuuccccaa

SEQ ID NO: 20738 - RNA, 22 nt, Homo sapiens
gcgaacgcgccacggaccaccu

SEQ ID NO: 20739 - RNA, 20 nt, Homo sapiens
cuggaggaagggcccagagg

SEQ ID NO: 20740 - RNA, 22 nt, Homo sapiens
gccuaagacacaggcccagaga

SEQ ID NO: 20741 - RNA, 25 nt, Homo sapiens
acggagcugucccaacaccaccccu

SEQ ID NO: 20742 - RNA, 22 nt, Homo sapiens
caagacacauuuggagagggac

SEQ ID NO: 20743 - RNA, 22 nt, Homo sapiens
cugggggcggcacaggggcuca

SEQ ID NO: 20744 - RNA, 23 nt, Homo sapiens
gggagugaagacacggagccaga

SEQ ID NO: 20745 - RNA, 21 nt, Homo sapiens
gaccaaucgccguccccgccg

SEQ ID NO: 20746 - RNA, 22 nt, Homo sapiens
ucaacaucagucugauaagcua

SEQ ID NO: 20747 - RNA, 21 nt, Homo sapiens
gcagaacuuagccacugugaa

SEQ ID NO: 20748 - RNA, 23 nt, Homo sapiens
aaagucucgcucucugccccuca

SEQ ID NO: 20749 - RNA, 22 nt, Homo sapiens
cugcacuuuuaugaauaagcuc

SEQ ID NO: 20750 - RNA, 22 nt, Homo sapiens
gcggucccgcggcgccccgccu

SEQ ID NO: 20751 - RNA, 22 nt, Homo sapiens
ugcuguuagcccuagccccgca

SEQ ID NO: 20752 - RNA, 24 nt, Homo sapiens
cacccccagagccucagcucccca

SEQ ID NO: 20753 - RNA, 22 nt, Homo sapiens
cacaagaucggaucuacggguu

SEQ ID NO: 20754 - RNA, 22 nt, Homo sapiens
cgcaaggucgguucuacgggug

SEQ ID NO: 20755 - RNA, 23 nt, Homo sapiens
cugcagaacuguucccgcugcua

SEQ ID NO: 20756 - RNA, 22 nt, Homo sapiens
aaagugcuucuuaccuccagau

SEQ ID NO: 20757 - RNA, 22 nt, Homo sapiens
aaagugcuucuuaccuccagau

SEQ ID NO: 20758 - RNA, 23 nt, Homo sapiens
acacucuaaagagaagcgcuuug

SEQ ID NO: 20759 - RNA, 21 nt, Homo sapiens
agaaaguacuucccucuggag

SEQ ID NO: 20760 - RNA, 21 nt, Homo sapiens
agaaagugcaucccucuggag

SEQ ID NO: 20761 - RNA, 22 nt, Homo sapiens
gguaaaacucgcaauuacuuuu

SEQ ID NO: 20762 - RNA, 22 nt, Homo sapiens
ggcaaaaaccgcaauuacuuuu

SEQ ID NO: 20763 - RNA, 22 nt, Homo sapiens
ggcaaaaaccacaauuacuuuu

SEQ ID NO: 20764 - RNA, 22 nt, Homo sapiens
gacaaaaaccgcgauuacuuuu

SEQ ID NO: 20765 - RNA, 22 nt, Homo sapiens
ggcaaaauccgcaauuacuuuu

SEQ ID NO: 20766 - RNA, 22 nt, Homo sapiens
accaaagaccgcaauuacuuuu

SEQ ID NO: 20767 - RNA, 21 nt, Homo sapiens
uuuuggugcauauuuacuuua

SEQ ID NO: 20768 - RNA, 20 nt, Homo sapiens
aggggccucagccuccuggu

SEQ ID NO: 20769 - RNA, 20 nt, Homo sapiens
aggggccucagccuccuggu

SEQ ID NO: 20770 - RNA, 22 nt, Homo sapiens
agcucagaacccagaggucuca

SEQ ID NO: 20771 - RNA, 22 nt, Homo sapiens
aacuauacaaccuacuaccuca

SEQ ID NO: 20772 - RNA, 22 nt, Homo sapiens
aaccacacaaccuacuaccuca

SEQ ID NO: 20773 - RNA, 22 nt, Homo sapiens
aaccauacaaccuacuaccuca

SEQ ID NO: 20774 - RNA, 22 nt, Homo sapiens
aacuaugcaaccuacuaccucu

SEQ ID NO: 20775 - RNA, 22 nt, Homo sapiens
aacuauacaaccuccuaccuca

SEQ ID NO: 20776 - RNA, 22 nt, Homo sapiens
aacuauacaaucuacuaccuca

SEQ ID NO: 20777 - RNA, 22 nt, Homo sapiens
aacuguacaaacuacuaccuca

SEQ ID NO: 20778 - RNA, 22 nt, Homo sapiens
aacagcacaaacuacuaccuca

SEQ ID NO: 20779 - RNA, 21 nt, Homo sapiens
ccccucccagccucccugcca

SEQ ID NO: 20780 - RNA, 22 nt, Homo sapiens
ggagauggagccagggcccuaa

SEQ ID NO: 20781 - RNA, 23 nt, Homo sapiens
cuaacugcacuagaugcaccuua

SEQ ID NO: 20782 - RNA, 22 nt, Homo sapiens
cggugagcacccggccccugcg

SEQ ID NO: 20783 - RNA, 22 nt, Homo sapiens
uuaacagcuaagcacccuaauc

SEQ ID NO: 20784 - RNA, 21 nt, Homo sapiens
acaggauugagggggggcccu

SEQ ID NO: 20785 - RNA, 22 nt, Homo sapiens
aaucagucucauugcuuuauaa

SEQ ID NO: 20786 - RNA, 25 nt, Homo sapiens
acggagcugucccaacaccaccccu

SEQ ID NO: 20787 - RNA, 24 nt, Homo sapiens
acgcgcaggccagagacccaggca

SEQ ID NO: 20788 - RNA, 20 nt, Homo sapiens
uccccacagacccagagccg

SEQ ID NO: 20789 - RNA, 23 nt, Homo sapiens
ccgcuugagcuaacuccgacccg

SEQ ID NO: 20790 - RNA, 20 nt, Homo sapiens
uacugcuuccacagcucccc

SEQ ID NO: 20791 - RNA, 22 nt, Homo sapiens
aacaauacaacuuacuaccuca

SEQ ID NO: 20792 - RNA, 21 nt, Homo sapiens
ccccucccagccucccugcca

SEQ ID NO: 20793 - RNA, 22 nt, Homo sapiens
ugaagaagggggggaagggcgu

SEQ ID NO: 20794 - RNA, 18 nt, Homo sapiens
cccccaccaccacgcccg

SEQ ID NO: 20795 - RNA, 22 nt, Homo sapiens
agaaagcgcuuuccuuuguaga

SEQ ID NO: 20796 - RNA, 23 nt, Homo sapiens
gggagugaagacacggagccaga

SEQ ID NO: 20797 - RNA, 22 nt, Homo sapiens
acacucuaaaaggaugcacgau

SEQ ID NO: 20798 - RNA, 18 nt, Homo sapiens
auucaaucuacugccuca

SEQ ID NO: 20799 - RNA, 22 nt, Homo sapiens
ucaggaacugccuuucucucca

SEQ ID NO: 20800 - RNA, 22 nt, Homo sapiens
ccggcugcaacacaagacacga

SEQ ID NO: 20801 - RNA, 22 nt, Homo sapiens
cggugagcacccggccccugcg

SEQ ID NO: 20802 - RNA, 22 nt, Homo sapiens
ucaucauuaccaggcaguauua

SEQ ID NO: 20803 - RNA, 23 nt, Homo sapiens
uccaucauuacccggcaguauua

SEQ ID NO: 20804 - RNA, 20 nt, Homo sapiens
cuggaggaagggcccagagg

SEQ ID NO: 20805 - RNA, 22 nt, Homo sapiens
gccuaagacacaggcccagaga

SEQ ID NO: 20806 - RNA, 22 nt, Homo sapiens
acgguuuuaccagacaguauua

SEQ ID NO: 20807 - RNA, 19 nt, Homo sapiens
guccugaauuccgcagccu

SEQ ID NO: 20808 - RNA, 25 nt, Homo sapiens
accaacggaccuacuucccuccgcc

SEQ ID NO: 20809 - RNA, 23 nt, Homo sapiens
gggagugaagacacggagccaga

SEQ ID NO: 20810 - RNA, 23 nt, Homo sapiens
aggaacagcagcagcccgggccg

SEQ ID NO: 20811 - RNA, 21 nt, Homo sapiens
gaccaaucgccguccccgccg

SEQ ID NO: 20812 - RNA, 23 nt, Homo sapiens
aaagucucgcucucugccccuca

SEQ ID NO: 20813 - RNA, 22 nt, Homo sapiens
ccucauggaaggguuccccacu

SEQ ID NO: 20814 - RNA, 21 nt, Homo sapiens
uagcacccagauagcaaggau

SEQ ID NO: 20815 - RNA, 22 nt, Homo sapiens
aaagugcuucuuaccuccagau

SEQ ID NO: 20816 - RNA, 23 nt, Homo sapiens
acacucuaaagagaagcgcuuug

SEQ ID NO: 20817 - RNA, 21 nt, Homo sapiens
agaaaguacuucccucuggag

SEQ ID NO: 20818 - RNA, 21 nt, Homo sapiens
agaaagugcaucccucuggag

SEQ ID NO: 20819 - RNA, 23 nt, Homo sapiens
gucagaccccgagggguccucgc

SEQ ID NO: 20820 - RNA, 23 nt, Homo sapiens
ccaccuggcaagaacaggcguuc

SEQ ID NO: 20821 - RNA, 22 nt, Homo sapiens
gcggucccgcggcgccccgccu

SEQ ID NO: 20822 - RNA, 22 nt, Homo sapiens
ugcuguuagcccuagccccgca

SEQ ID NO: 20823 - RNA, 20 nt, Homo sapiens
uacugcuuccacagcucccc

SEQ ID NO: 20824 - RNA, 22 nt, Homo sapiens
cuagggaacacagggcugguga

SEQ ID NO: 20825 - RNA, 22 nt, Homo sapiens
uaaaugaauucaauuuccuucu

SEQ ID NO: 20826 - RNA, 17 nt, Homo sapiens
gggagaggaggaggcga

SEQ ID NO: 20827 - RNA, 23 nt, Homo sapiens
cggccugauucacaacaccagcu

SEQ ID NO: 20828 - RNA, 21 nt, Homo sapiens
gggcaucugggacgcgcagga

SEQ ID NO: 20829 - RNA, 22 nt, Homo sapiens
uggcagcagcggagggggcaga

SEQ ID NO: 20830 - RNA, 20 nt, Homo sapiens
acagcaaggagggcaggagg

SEQ ID NO: 20831 - RNA, 23 nt, Homo sapiens
cuaccugcacuauaagcacuuua

SEQ ID NO: 20832 - RNA, 22 nt, Homo sapiens
cucaauagacugugagcuccuu

SEQ ID NO: 20833 - RNA, 20 nt, Homo sapiens
ccagcagcaccuggggcagu

SEQ ID NO: 20834 - RNA, 22 nt, Homo sapiens
gagcccuggacuaggagucagc

SEQ ID NO: 20835 - RNA, 21 nt, Homo sapiens
auccuguacugagcugccccg

SEQ ID NO: 20836 - RNA, 21 nt, Homo sapiens
uugucuaaccagucaccuguu

SEQ ID NO: 20837 - RNA, 23 nt, Homo sapiens
cccagcuagauuguaagcuccuu

SEQ ID NO: 20838 - RNA, 21 nt, Homo sapiens
ccccucccagccucccugcca

SEQ ID NO: 20839 - RNA, 21 nt, Homo sapiens
cugaggagagaggaggugggg

SEQ ID NO: 20840 - RNA, 22 nt, Homo sapiens
cuggagagacaaggggaagagg

SEQ ID NO: 20841 - RNA, 22 nt, Homo sapiens
ggcucccaagaaccucaccugu

SEQ ID NO: 20842 - RNA, 24 nt, Homo sapiens
gaaagugcauagaauucugucugg

SEQ ID NO: 20843 - RNA, 23 nt, Homo sapiens
aggaacagcagcagcccgggccg

SEQ ID NO: 20844 - RNA, 18 nt, Homo sapiens
auucaaucuacugccuca

SEQ ID NO: 20845 - RNA, 23 nt, Homo sapiens
cuaucugcacuagaugcaccuua

SEQ ID NO: 20846 - RNA, 22 nt, Homo sapiens
cggugagcacccggccccugcg

SEQ ID NO: 20847 - RNA, 21 nt, Homo sapiens
acaggauugagggggggcccu

SEQ ID NO: 20848 - RNA, 21 nt, Homo sapiens
acaggauugagggggggcccu

SEQ ID NO: 20849 - RNA, 22 nt, Homo sapiens
gagcccuggacuaggagucagc

SEQ ID NO: 20850 - RNA, 22 nt, Homo sapiens
gugauugccacucuccugagua

SEQ ID NO: 20851 - RNA, 19 nt, Homo sapiens
aagacauuuucagacagcu

SEQ ID NO: 20852 - RNA, 19 nt, Homo sapiens
ucccacaggaagcagacac

SEQ ID NO: 20853 - RNA, 23 nt, Homo sapiens
agaaaccaugggguaugagcaga

SEQ ID NO: 20854 - RNA, 21 nt, Homo sapiens
aggagacucacaaguuccugc

SEQ ID NO: 20855 - RNA, 20 nt, Homo sapiens
cccugcgccaucuccucuac

SEQ ID NO: 20856 - RNA, 21 nt, Homo sapiens
ggggagcgggggcccugccuu

SEQ ID NO: 20857 - RNA, 23 nt, Homo sapiens
cacaaauucgguucuacagggua

SEQ ID NO: 20858 - RNA, 22 nt, Homo sapiens
gaggcucagaauggcucaggag

SEQ ID NO: 20859 - RNA, 21 nt, Homo sapiens
cugaggagagaggaggugggg

SEQ ID NO: 20860 - RNA, 17 nt, Homo sapiens
ggguggcagcgguggga

SEQ ID NO: 20861 - RNA, 21 nt, Homo sapiens
gagcuacagugcuucaucuca

SEQ ID NO: 20862 - RNA, 23 nt, Homo sapiens
agggauuccugggaaaacuggac

SEQ ID NO: 20863 - RNA, 22 nt, Homo sapiens
agcugaguguaggauguuuaca

SEQ ID NO: 20864 - RNA, 21 nt, Homo sapiens
ucaaucacagauagcaccccu

SEQ ID NO: 20865 - RNA, 20 nt, Homo sapiens
uacugcuuccacagcucccc

SEQ ID NO: 20866 - RNA, 22 nt, Homo sapiens
gugggguggguggucaggccga

SEQ ID NO: 20867 - RNA, 22 nt, Homo sapiens
ggagauggagccagggcccuaa

SEQ ID NO: 20868 - RNA, 22 nt, Homo sapiens
ggagauggagccagggcccuaa

SEQ ID NO: 20869 - RNA, 23 nt, Homo sapiens
gggagugaagacacggagccaga

SEQ ID NO: 20870 - RNA, 18 nt, Homo sapiens
ggagaggagggcacugga

SEQ ID NO: 20871 - RNA, 21 nt, Homo sapiens
ugcaaacccugcaugugggag

SEQ ID NO: 20872 - RNA, 22 nt, Homo sapiens
acugggacuuuguaggccaguu

SEQ ID NO: 20873 - RNA, 22 nt, Homo sapiens
agcgggacuuugagggccaguu

SEQ ID NO: 20874 - RNA, 22 nt, Homo sapiens
uccacauggaguugcuguuaca

SEQ ID NO: 20875 - RNA, 22 nt, Homo sapiens
uagucaagugaagcagugggag

SEQ ID NO: 20876 - RNA, 21 nt, Homo sapiens
aaagugucagauacggugugg

SEQ ID NO: 20877 - RNA, 23 nt, Homo sapiens
gcgcccaauuaaugucuguugau

SEQ ID NO: 20878 - RNA, 21 nt, Homo sapiens
acaggauugagggggggcccu

SEQ ID NO: 20879 - RNA, 22 nt, Homo sapiens
agcugaguguaggauguuuaca

SEQ ID NO: 20880 - RNA, 22 nt, Homo sapiens
acggaagggcagagagggccag

SEQ ID NO: 20881 - RNA, 23 nt, Homo sapiens
acacucaaaagauggcggcacuu

SEQ ID NO: 20882 - RNA, 23 nt, Homo sapiens
aaagucucgcucucugccccuca

SEQ ID NO: 20883 - RNA, 21 nt, Homo sapiens
gaccaagaaauagccuuucaa

SEQ ID NO: 20884 - RNA, 22 nt, Homo sapiens
ugcaagccuugggugugggagg

SEQ ID NO: 20885 - RNA, 22 nt, Homo sapiens
ggaggccgggacgagugcaaua

SEQ ID NO: 20886 - RNA, 21 nt, Homo sapiens
ccccucccagccucccugcca

SEQ ID NO: 20887 - RNA, 20 nt, Homo sapiens
gcagaagcauuuccacacac

SEQ ID NO: 20888 - RNA, 23 nt, Homo sapiens
gggagugaagacacggagccaga

SEQ ID NO: 20889 - RNA, 23 nt, Homo sapiens
cuaucugcacuagaugcaccuua

SEQ ID NO: 20890 - RNA, 22 nt, Homo sapiens
cggugagcacccggccccugcg

SEQ ID NO: 20891 - RNA, 22 nt, Homo sapiens
aaagagguuaaccagguguguu

SEQ ID NO: 20892 - RNA, 21 nt, Homo sapiens
ucaaucacagauagcaccccu

SEQ ID NO: 20893 - RNA, 22 nt, Homo sapiens
ugaauccuugaauagguguguu

SEQ ID NO: 20894 - RNA, 23 nt, Homo sapiens
gaaagugcccucaaggcugagug

SEQ ID NO: 20895 - RNA, 22 nt, Homo sapiens
uccucuuuucuuagagacucac

SEQ ID NO: 20896 - RNA, 21 nt, Homo sapiens
gaaggaagugagugcagccac

SEQ ID NO: 20897 - RNA, 23 nt, Homo sapiens
gucacaucccucccaagacccuc

SEQ ID NO: 20898 - RNA, 20 nt, Homo sapiens
uccgccugucugaacaguga

SEQ ID NO: 20899 - RNA, 22 nt, Homo sapiens
agcuagugagaagucaaugccu

SEQ ID NO: 20900 - RNA, 22 nt, Homo sapiens
cgcauuauuacucacgguacga

SEQ ID NO: 20901 - RNA, 19 nt, Homo sapiens
aagccaaagccuuauccau

SEQ ID NO: 20902 - RNA, 22 nt, Homo sapiens
uggcagcagcggagggggcaga

SEQ ID NO: 20903 - RNA, 20 nt, Homo sapiens
ccagcagcaccuggggcagu

SEQ ID NO: 20904 - RNA, 21 nt, Homo sapiens
auccuguacugagcugccccg

SEQ ID NO: 20905 - RNA, 22 nt, Homo sapiens
gcacacaauaaauguuugcuga

SEQ ID NO: 20906 - RNA, 22 nt, Homo sapiens
gacaaaacccgcaaauacuuuu

SEQ ID NO: 20907 - RNA, 23 nt, Homo sapiens
acaacaaaaucacuagucuucca

SEQ ID NO: 20908 - RNA, 22 nt, Homo sapiens
cucauccgauguacaauaauuu

SEQ ID NO: 20909 - RNA, 21 nt, Homo sapiens
uagaaaggcuaggaccaaacc

SEQ ID NO: 20910 - RNA, 21 nt, Homo sapiens
ggaaaucccuggcaaugugau

SEQ ID NO: 20911 - RNA, 21 nt, Homo sapiens
gguaaucccuggcaaugugau

SEQ ID NO: 20912 - RNA, 21 nt, Homo sapiens
acaggauugagggggggcccu

SEQ ID NO: 20913 - RNA, 21 nt, Homo sapiens
acaggauugagggggggcccu

SEQ ID NO: 20914 - RNA, 22 nt, Homo sapiens
auguaugugggacgguaaacca

SEQ ID NO: 20915 - RNA, 22 nt, Homo sapiens
uaaccgauuucagauggugcua

SEQ ID NO: 20916 - RNA, 23 nt, Homo sapiens
aacacugauuucaaauggugcua

SEQ ID NO: 20917 - RNA, 22 nt, Homo sapiens
uaaccgauuucaaauggugcua

SEQ ID NO: 20918 - RNA, 23 nt, Homo sapiens
cgugagcuccuggaggacaggga

SEQ ID NO: 20919 - RNA, 22 nt, Homo sapiens
gacucuugaacaacacagguuu

SEQ ID NO: 20920 - RNA, 22 nt, Homo sapiens
aaccauacaaccuacuaccuca

SEQ ID NO: 20921 - RNA, 22 nt, Homo sapiens
aggucucacuuuguugcccaga

SEQ ID NO: 20922 - RNA, 22 nt, Homo sapiens
cacgaccgacgccacgccgagu

SEQ ID NO: 20923 - RNA, 22 nt, Homo sapiens
ucagaccgagacaagugcaaug

SEQ ID NO: 20924 - RNA, 22 nt, Homo sapiens
gagguuucccguguauguuuca

SEQ ID NO: 20925 - RNA, 25 nt, Homo sapiens
aaggagcucagaagcccugcccagc

SEQ ID NO: 20926 - RNA, 22 nt, Homo sapiens
ugcuguuagcccuagccccgca

SEQ ID NO: 20927 - RNA, 21 nt, Homo sapiens
ugacugacagcuuuuugagua

SEQ ID NO: 20928 - RNA, 20 nt, Homo sapiens
uacugcuuccacagcucccc

SEQ ID NO: 20929 - RNA, 24 nt, Homo sapiens
cacccccagagccucagcucccca

SEQ ID NO: 20930 - RNA, 26 nt, Homo sapiens
uuucagaauuugcugccaucaucauc

SEQ ID NO: 20931 - RNA, 21 nt, Homo sapiens
cuagggaagaacagugagcaa

SEQ ID NO: 20932 - RNA, 20 nt, Homo sapiens
ggcauucaccgcgugccuua

SEQ ID NO: 20933 - RNA, 18 nt, Homo sapiens
ugguggcagaggugggau

SEQ ID NO: 20934 - RNA, 21 nt, Homo sapiens
auguaggccuuuagaucacuu

SEQ ID NO: 20935 - RNA, 22 nt, Homo sapiens
cagaagugggccgggcacaggg

SEQ ID NO: 20936 - RNA, 21 nt, Homo sapiens
ucuacucagaagggugccuua

SEQ ID NO: 20937 - RNA, 23 nt, Homo sapiens
ccuagagagggugagaaccugcc

SEQ ID NO: 20938 - RNA, 21 nt, Homo sapiens
ggggagcgggggcccugccuu

SEQ ID NO: 20939 - RNA, 22 nt, Homo sapiens
gugggguggguggucaggccga

SEQ ID NO: 20940 - RNA, 21 nt, Homo sapiens
cugggggacggagcagaagga

SEQ ID NO: 20941 - RNA, 20 nt, Homo sapiens
ggcauucaccgcgugccuua

SEQ ID NO: 20942 - RNA, 24 nt, Homo sapiens
ucacagguuaaagggucucaggga

SEQ ID NO: 20943 - RNA, 22 nt, Homo sapiens
ucacaaguuagggucucaggga

SEQ ID NO: 20944 - RNA, 23 nt, Homo sapiens
agcccuguucuacagcccugagg

SEQ ID NO: 20945 - RNA, 22 nt, Homo sapiens
ucccucacacagaauuccagaa

SEQ ID NO: 20946 - RNA, 23 nt, Homo sapiens
cccaacagacauggcgguacuca

SEQ ID NO: 20947 - RNA, 22 nt, Homo sapiens
acggaagggcagagagggccag

SEQ ID NO: 20948 - RNA, 20 nt, Homo sapiens
gcaaugcaacagcaaugcac

SEQ ID NO: 20949 - RNA, 23 nt, Homo sapiens
ucaacgggagugaucgugucauu

SEQ ID NO: 20950 - RNA, 21 nt, Homo sapiens
ucuacucagaagggugccuua

SEQ ID NO: 20951 - RNA, 22 nt, Homo sapiens
gugauugccacucuccugagua

SEQ ID NO: 20952 - RNA, 22 nt, Homo sapiens
aacgcuccaaaagaaggcacuc

SEQ ID NO: 20953 - RNA, 18 nt, Homo sapiens
acccucugaaaggaagca

SEQ ID NO: 20954 - RNA, 22 nt, Homo sapiens
aaagugcuucuuaccuccagau

SEQ ID NO: 20955 - RNA, 22 nt, Homo sapiens
aacacucuaaaaggaggcacuu

SEQ ID NO: 20956 - RNA, 21 nt, Homo sapiens
cacaaccucaguguuuccagg

SEQ ID NO: 20957 - RNA, 21 nt, Homo sapiens
ggggagcgggggcccugccuu

SEQ ID NO: 20958 - RNA, 21 nt, Homo sapiens
ccccucccagccucccugcca

SEQ ID NO: 20959 - RNA, 22 nt, Homo sapiens
ggcucccaagaaccucaccugu

SEQ ID NO: 20960 - RNA, 21 nt, Homo sapiens
cggggugcacgggcggagggc

SEQ ID NO: 20961 - RNA, 21 nt, Homo sapiens
ugcaaacccugcaugugggag

SEQ ID NO: 20962 - RNA, 23 nt, Homo sapiens
cuaucugcacuagaugcaccuua

SEQ ID NO: 20963 - RNA, 21 nt, Homo sapiens
gaccaaucgccguccccgccg

SEQ ID NO: 20964 - RNA, 22 nt, Homo sapiens
cuguuccugcugaacugagcca

SEQ ID NO: 20965 - RNA, 22 nt, Homo sapiens
ucagaccgagacaagugcaaug

SEQ ID NO: 20966 - RNA, 23 nt, Homo sapiens
gaaagugcccucaaggcugagug

SEQ ID NO: 20967 - RNA, 25 nt, Homo sapiens
accaacggaccuacuucccuccgcc

SEQ ID NO: 20968 - RNA, 22 nt, Homo sapiens
gcggucccgcggcgccccgccu

SEQ ID NO: 20969 - RNA, 22 nt, Homo sapiens
ugcuguuagcccuagccccgca

SEQ ID NO: 20970 - RNA, 22 nt, Homo sapiens
ucggucccucgggccagggcag

SEQ ID NO: 20971 - RNA, 22 nt, Homo sapiens
uauccacuacaccccgcugccu

SEQ ID NO: 20972 - RNA, 22 nt, Homo sapiens
aacuauacaaccuacuaccuca

SEQ ID NO: 20973 - RNA, 22 nt, Homo sapiens
aaccacacaaccuacuaccuca

SEQ ID NO: 20974 - RNA, 22 nt, Homo sapiens
aaccauacaaccuacuaccuca

SEQ ID NO: 20975 - RNA, 22 nt, Homo sapiens
aacuaugcaaccuacuaccucu

SEQ ID NO: 20976 - RNA, 22 nt, Homo sapiens
aacuauacaaccuccuaccuca

SEQ ID NO: 20977 - RNA, 22 nt, Homo sapiens
aacuauacaaucuacuaccuca

SEQ ID NO: 20978 - RNA, 22 nt, Homo sapiens
aacuguacaaacuacuaccuca

SEQ ID NO: 20979 - RNA, 22 nt, Homo sapiens
aacagcacaaacuacuaccuca

SEQ ID NO: 20980 - RNA, 22 nt, Homo sapiens
agacaacaaugccaaccucaca

SEQ ID NO: 20981 - RNA, 22 nt, Homo sapiens
augcccuuucaucauugcacug

SEQ ID NO: 20982 - RNA, 23 nt, Homo sapiens
cccaacagacauggcgguacuca

SEQ ID NO: 20983 - RNA, 23 nt, Homo sapiens
aaaucagaaucacaccuggggga

SEQ ID NO: 20984 - RNA, 22 nt, Homo sapiens
agccacaaucaccuucugaucu

SEQ ID NO: 20985 - RNA, 22 nt, Homo sapiens
ccuggcacacaguagaccuuca

SEQ ID NO: 20986 - RNA, 22 nt, Homo sapiens
uccagcaaagggaagcgcuuuc

SEQ ID NO: 20987 - RNA, 22 nt, Homo sapiens
accucuaaaggggagcgcuuug

SEQ ID NO: 20988 - RNA, 23 nt, Homo sapiens
acacucuaaagagaagcgcuuug

SEQ ID NO: 20989 - RNA, 21 nt, Homo sapiens
gcuccaaagggaagcgcuuug

SEQ ID NO: 20990 - RNA, 21 nt, Homo sapiens
ccucuaaagagaagcgcuuuc

SEQ ID NO: 20991 - RNA, 25 nt, Homo sapiens
acggagcugucccaacaccaccccu

SEQ ID NO: 20992 - RNA, 21 nt, Homo sapiens
ucccagcacacauuuagcuca

SEQ ID NO: 20993 - RNA, 24 nt, Homo sapiens
acgcagagcccgaaagcccccagu

SEQ ID NO: 20994 - RNA, 21 nt, Homo sapiens
caucaccuuccuucuccucca

SEQ ID NO: 20995 - RNA, 20 nt, Homo sapiens
cccugcgccaucuccucuac

SEQ ID NO: 20996 - RNA, 20 nt, Homo sapiens
cccugcgccaucuccucuac

SEQ ID NO: 20997 - RNA, 20 nt, Homo sapiens
uacugcuuccacagcucccc

SEQ ID NO: 20998 - RNA, 22 nt, Homo sapiens
aacaauacaacuuacuaccuca

SEQ ID NO: 20999 - RNA, 22 nt, Homo sapiens
acacacccacgcgagccggaaa

SEQ ID NO: 21000 - RNA, 22 nt, Homo sapiens
gugggguggguggucaggccga

SEQ ID NO: 21001 - RNA, 22 nt, Homo sapiens
ggcucccaagaaccucaccugu

SEQ ID NO: 21002 - RNA, 22 nt, Homo sapiens
cacgaccgacgccacgccgagu

SEQ ID NO: 21003 - RNA, 21 nt, Homo sapiens
acuagacugugagcuccucga

SEQ ID NO: 21004 - RNA, 22 nt, Homo sapiens
acugccugucugugccugcugu

SEQ ID NO: 21005 - RNA, 22 nt, Homo sapiens
cucaauagacugugagcuccuu

SEQ ID NO: 21006 - RNA, 22 nt, Homo sapiens
agcugaguguaggauguuuaca

SEQ ID NO: 21007 - RNA, 23 nt, Homo sapiens
agaggcaggcaugcgggcagaca

SEQ ID NO: 21008 - RNA, 22 nt, Homo sapiens
accagguuccaccccagcaggc

SEQ ID NO: 21009 - RNA, 22 nt, Homo sapiens
cuacccacagacguaccaauca

SEQ ID NO: 21010 - RNA, 22 nt, Homo sapiens
cuacccacagacguaccaauca

SEQ ID NO: 21011 - RNA, 18 nt, Homo sapiens
augacaccucccugugaa

SEQ ID NO: 21012 - RNA, 22 nt, Homo sapiens
ugcaagccuugggugugggagg

SEQ ID NO: 21013 - RNA, 19 nt, Homo sapiens
guccugaauuccgcagccu

SEQ ID NO: 21014 - RNA, 23 nt, Homo sapiens
cccagcuagauuguaagcuccuu

SEQ ID NO: 21015 - RNA, 23 nt, Homo sapiens
aaaaugcagauuccuggacucca

SEQ ID NO: 21016 - RNA, 24 nt, Homo sapiens
acugcuggucuucagucagggcca

SEQ ID NO: 21017 - RNA, 22 nt, Homo sapiens
ccagaacugaguccacagggca

SEQ ID NO: 21018 - RNA, 22 nt, Homo sapiens
acaccuggcuccacacgcgggc

SEQ ID NO: 21019 - RNA, 22 nt, Homo sapiens
agugaauucuaccagugccaua

SEQ ID NO: 21020 - RNA, 21 nt, Homo sapiens
cccuccaccaugcaagggaug

SEQ ID NO: 21021 - RNA, 23 nt, Homo sapiens
cagcugcuuuugggauuccguug

SEQ ID NO: 21022 - RNA, 22 nt, Homo sapiens
uuaacagcuaagcacccuaauc

SEQ ID NO: 21023 - RNA, 22 nt, Homo sapiens
aaagagguuaaccagguguguu

SEQ ID NO: 21024 - RNA, 23 nt, Homo sapiens
cgugagcuccuggaggacaggga

SEQ ID NO: 21025 - RNA, 22 nt, Homo sapiens
ugaauccuugaauagguguguu

SEQ ID NO: 21026 - RNA, 22 nt, Homo sapiens
cagcauggaguccuccagguug

SEQ ID NO: 21027 - RNA, 23 nt, Homo sapiens
caugagugacgcccucuggagua

SEQ ID NO: 21028 - RNA, 22 nt, Homo sapiens
acaucaucgcauauugacacaa

SEQ ID NO: 21029 - RNA, 22 nt, Homo sapiens
acaguggucaucgagugacaca

SEQ ID NO: 21030 - RNA, 23 nt, Homo sapiens
acccaacagccccugcaagggau

SEQ ID NO: 21031 - RNA, 22 nt, Homo sapiens
ucggucccucgggccagggcag

SEQ ID NO: 21032 - RNA, 21 nt, Homo sapiens
cugggggacggagcagaagga

SEQ ID NO: 21033 - RNA, 22 nt, Homo sapiens
cgaccauggcuguagacuguua

SEQ ID NO: 21034 - RNA, 21 nt, Homo sapiens
ggccgugacuggagacuguua

SEQ ID NO: 21035 - RNA, 21 nt, Homo sapiens
acaugguuagaucaagcacaa

SEQ ID NO: 21036 - RNA, 22 nt, Homo sapiens
acaaccagcuaagacacugcca

SEQ ID NO: 21037 - RNA, 22 nt, Homo sapiens
auggcaguggaguuagugauug

SEQ ID NO: 21038 - RNA, 23 nt, Homo sapiens
gcaaucagcuaacuacacugccu

SEQ ID NO: 21039 - RNA, 21 nt, Homo sapiens
ccuucugacuccaaguccagu

SEQ ID NO: 21040 - RNA, 22 nt, Homo sapiens
accagcuaacaauacacugcca

SEQ ID NO: 21041 - RNA, 22 nt, Homo sapiens
gccagcuaacaauacacugccu

SEQ ID NO: 21042 - RNA, 22 nt, Homo sapiens
gcaaaaguaauugagauuuuug

SEQ ID NO: 21043 - RNA, 22 nt, Homo sapiens
gcaaagguaauugcuguuuucg

SEQ ID NO: 21044 - RNA, 22 nt, Homo sapiens
ccuaaugauucaucauucucaa

SEQ ID NO: 21045 - RNA, 19 nt, Homo sapiens
accagugcccugcacacuu

SEQ ID NO: 21046 - RNA, 21 nt, Homo sapiens
cuggaggacggcaacagucag

SEQ ID NO: 21047 - RNA, 21 nt, Homo sapiens
cucccccacugcagcuggcac

SEQ ID NO: 21048 - RNA, 21 nt, Homo sapiens
cugaggagagaggaggugggg

SEQ ID NO: 21049 - RNA, 18 nt, Homo sapiens
aucacauucaccucccug

SEQ ID NO: 21050 - RNA, 23 nt, Homo sapiens
gggagugaagacacggagccaga

SEQ ID NO: 21051 - RNA, 22 nt, Homo sapiens
acaguucuucaacuggcagcuu

SEQ ID NO: 21052 - RNA, 20 nt, Homo sapiens
cuggaggaagggcccagagg

SEQ ID NO: 21053 - RNA, 22 nt, Homo sapiens
gccuaagacacaggcccagaga

SEQ ID NO: 21054 - RNA, 19 nt, Homo sapiens
auuuugguacagcagcuca

SEQ ID NO: 21055 - RNA, 21 nt, Homo sapiens
ggggagcgggggcccugccuu

SEQ ID NO: 21056 - RNA, 22 nt, Homo sapiens
cuggagagacaaggggaagagg

SEQ ID NO: 21057 - RNA, 22 nt, Homo sapiens
uaaaugaauucaauuuccuucu

SEQ ID NO: 21058 - RNA, 17 nt, Homo sapiens
gggagaggaggaggcga

SEQ ID NO: 21059 - RNA, 20 nt, Homo sapiens
acagcaaggagggcaggagg

SEQ ID NO: 21060 - RNA, 22 nt, Homo sapiens
ucagaccgagacaagugcaaug

SEQ ID NO: 21061 - RNA, 20 nt, Homo sapiens
cuggaggaagggcccagagg

SEQ ID NO: 21062 - RNA, 22 nt, Homo sapiens
gccuaagacacaggcccagaga

SEQ ID NO: 21063 - RNA, 23 nt, Homo sapiens
gaaagugcccucaaggcugagug

SEQ ID NO: 21064 - RNA, 21 nt, Homo sapiens
caucaccuuccuucuccucca

SEQ ID NO: 21065 - RNA, 20 nt, Homo sapiens
cccugcgccaucuccucuac

SEQ ID NO: 21066 - RNA, 22 nt, Homo sapiens
uauccacuacaccccgcugccu

SEQ ID NO: 21067 - RNA, 22 nt, Homo sapiens
ggagcccgcgccccgcgccgag

SEQ ID NO: 21068 - RNA, 22 nt, Homo sapiens
acugccugucugugccugcugu

SEQ ID NO: 21069 - RNA, 22 nt, Homo sapiens
accagguuccaccccagcaggc

SEQ ID NO: 21070 - RNA, 21 nt, Homo sapiens
guucuaacccauuguggccaa

SEQ ID NO: 21071 - RNA, 23 nt, Homo sapiens
agaaaccaugggguaugagcaga

SEQ ID NO: 21072 - RNA, 22 nt, Homo sapiens
uauccacuacaccccgcugccu

SEQ ID NO: 21073 - RNA, 25 nt, Homo sapiens
gaauccugguucugucccucacuag

SEQ ID NO: 21074 - RNA, 22 nt, Homo sapiens
gggagaggucucccugcgcaca

SEQ ID NO: 21075 - RNA, 22 nt, Homo sapiens
uccggggacgaacgggacgggu

SEQ ID NO: 21076 - RNA, 21 nt, Homo sapiens
gaccaaucgccguccccgccg

SEQ ID NO: 21077 - RNA, 21 nt, Homo sapiens
gaccaaucgccguccccgccg

SEQ ID NO: 21078 - RNA, 22 nt, Homo sapiens
ucagaccgagacaagugcaaug

SEQ ID NO: 21079 - RNA, 21 nt, Homo sapiens
acaggauugagggggggcccu

SEQ ID NO: 21080 - RNA, 22 nt, Homo sapiens
aucgggaggggacugagccuga

SEQ ID NO: 21081 - RNA, 21 nt, Homo sapiens
cccgaggagccgggcaggcuu

SEQ ID NO: 21082 - RNA, 22 nt, Homo sapiens
gcggucccgcggcgccccgccu

SEQ ID NO: 21083 - RNA, 22 nt, Homo sapiens
gcggucccgcggcgccccgccu

SEQ ID NO: 21084 - RNA, 22 nt, Homo sapiens
ugcuguuagcccuagccccgca

SEQ ID NO: 21085 - RNA, 22 nt, Homo sapiens
ugcuguuagcccuagccccgca

SEQ ID NO: 21086 - RNA, 21 nt, Homo sapiens
caucaccuuccuucuccucca

SEQ ID NO: 21087 - RNA, 21 nt, Homo sapiens
aagggucaguaagcacccgcg

SEQ ID NO: 21088 - RNA, 17 nt, Homo sapiens
gggagaggaggaggcga

SEQ ID NO: 21089 - RNA, 18 nt, Homo sapiens
aucacauucaccucccug

SEQ ID NO: 21090 - RNA, 22 nt, Homo sapiens
acaccuggcuccacacgcgggc

SEQ ID NO: 21091 - RNA, 21 nt, Homo sapiens
gaccaaucgccguccccgccg

SEQ ID NO: 21092 - RNA, 22 nt, Homo sapiens
caagacacauuuggagagggac

SEQ ID NO: 21093 - RNA, 24 nt, Homo sapiens
cacccccagagccucagcucccca

SEQ ID NO: 21094 - RNA, 18 nt, Homo sapiens
ccacugaaccacccaugc

SEQ ID NO: 21095 - RNA, 23 nt, Homo sapiens
gggagugaagacacggagccaga

SEQ ID NO: 21096 - RNA, 22 nt, Homo sapiens
uguaaaccaugaugugcugcua

SEQ ID NO: 21097 - RNA, 22 nt, Homo sapiens
acugccugucugugccugcugu

SEQ ID NO: 21098 - RNA, 22 nt, Homo sapiens
cuguuccugcugaacugagcca

SEQ ID NO: 21099 - RNA, 22 nt, Homo sapiens
accagcuaacaauacacugcca

SEQ ID NO: 21100 - RNA, 21 nt, Homo sapiens
agaggucgaccguguaaugug

SEQ ID NO: 21101 - RNA, 21 nt, Homo sapiens
ugcaaugcaacuacaaugcac

SEQ ID NO: 21102 - RNA, 22 nt, Homo sapiens
accagguuccaccccagcaggc

SEQ ID NO: 21103 - RNA, 21 nt, Homo sapiens
gaccaagaaauagccuuucaa

SEQ ID NO: 21104 - RNA, 21 nt, Homo sapiens
acuuuccaggauucauuaacu

SEQ ID NO: 21105 - RNA, 19 nt, Homo sapiens
gcuccuguccaacuggcuc

SEQ ID NO: 21106 - RNA, 19 nt, Homo sapiens
agaaaccccagcagagaca

SEQ ID NO: 21107 - RNA, 22 nt, Homo sapiens
ucuacccagaaaggagccagug

SEQ ID NO: 21108 - RNA, 22 nt, Homo sapiens
gggagaggucucccugcgcaca

SEQ ID NO: 21109 - RNA, 19 nt, Homo sapiens
ccaccucccgaguccucac

SEQ ID NO: 21110 - RNA, 24 nt, Homo sapiens
acugcuggucuucagucagggcca

SEQ ID NO: 21111 - RNA, 21 nt, Homo sapiens
auguaggccuuuagaucacuu

SEQ ID NO: 21112 - RNA, 23 nt, Homo sapiens
aggaacagcagcagcccgggccg

SEQ ID NO: 21113 - RNA, 20 nt, Homo sapiens
cccgccgcgucgcccugggg

SEQ ID NO: 21114 - RNA, 22 nt, Homo sapiens
cacucagcggccguuuccccaa

SEQ ID NO: 21115 - RNA, 22 nt, Homo sapiens
ucagaccgagacaagugcaaug

SEQ ID NO: 21116 - RNA, 22 nt, Homo sapiens
acggaagggcagagagggccag

SEQ ID NO: 21117 - RNA, 21 nt, Homo sapiens
gaccaagaaauagccuuucaa

SEQ ID NO: 21118 - RNA, 25 nt, Homo sapiens
accaacggaccuacuucccuccgcc

SEQ ID NO: 21119 - RNA, 22 nt, Homo sapiens
ggaggccgggacgagugcaaua

SEQ ID NO: 21120 - RNA, 20 nt, Homo sapiens
uccgccugucugaacaguga

SEQ ID NO: 21121 - RNA, 25 nt, Homo sapiens
cagcgucugccggaacccguuccca

SEQ ID NO: 21122 - RNA, 22 nt, Homo sapiens
aacccauggaauucaguucuca

SEQ ID NO: 21123 - RNA, 22 nt, Homo sapiens
agccuauggaauucaguucuca

SEQ ID NO: 21124 - RNA, 22 nt, Homo sapiens
cacucagcggccguuuccccaa

SEQ ID NO: 21125 - RNA, 22 nt, Homo sapiens
cgaauccaccacgaacaacuuc

SEQ ID NO: 21126 - RNA, 22 nt, Homo sapiens
ucaguuuccucugcaaacaguu

SEQ ID NO: 21127 - RNA, 22 nt, Homo sapiens
ccucauggaaggguuccccacu

SEQ ID NO: 21128 - RNA, 21 nt, Homo sapiens
agagcucauccauaguuguca

SEQ ID NO: 21129 - RNA, 25 nt, Homo sapiens
acggagcugucccaacaccaccccu

SEQ ID NO: 21130 - RNA, 20 nt, Homo sapiens
uacugcuuccacagcucccc

SEQ ID NO: 21131 - RNA, 20 nt, Homo sapiens
ugucuccacagggcucuuua

SEQ ID NO: 21132 - RNA, 22 nt, Homo sapiens
cacugguacaaggguugggaga

SEQ ID NO: 21133 - RNA, 22 nt, Homo sapiens
cacaaaccauuaugugcugcua

SEQ ID NO: 21134 - RNA, 22 nt, Homo sapiens
uguaaaccaugaugugcugcua

SEQ ID NO: 21135 - RNA, 22 nt, Homo sapiens
cgccaauauuuacgugcugcua

SEQ ID NO: 21136 - RNA, 21 nt, Homo sapiens
gccaauauuucugugcugcua

SEQ ID NO: 21137 - RNA, 24 nt, Homo sapiens
ugggagaaccucccugcuucugcu

SEQ ID NO: 21138 - RNA, 23 nt, Homo sapiens
ucucugcaggccgugugcuuugc

SEQ ID NO: 21139 - RNA, 22 nt, Homo sapiens
uucaaaacaugaauugcugcug

SEQ ID NO: 21140 - RNA, 22 nt, Homo sapiens
ucaguuuccucugcaaacaguu

SEQ ID NO: 21141 - RNA, 22 nt, Homo sapiens
gcugccguauaugugaugucac

SEQ ID NO: 21142 - RNA, 21 nt, Homo sapiens
acaaaccacagugugcugcug

SEQ ID NO: 21143 - RNA, 23 nt, Homo sapiens
acacucuaaagagaagcgcuuug

SEQ ID NO: 21144 - RNA, 21 nt, Homo sapiens
agaaaguacuucccucuggag

SEQ ID NO: 21145 - RNA, 21 nt, Homo sapiens
agaaagugcaucccucuggag

SEQ ID NO: 21146 - RNA, 21 nt, Homo sapiens
ggacuauagaacuuucccccu

SEQ ID NO: 21147 - RNA, 23 nt, Homo sapiens
guagugggccgagccgagugaca

SEQ ID NO: 21148 - RNA, 21 nt, Homo sapiens
ccccucccagccucccugcca

SEQ ID NO: 21149 - RNA, 20 nt, Homo sapiens
cuggggaaaaggguggcacg

SEQ ID NO: 21150 - RNA, 24 nt, Homo sapiens
acugcuggucuucagucagggcca

SEQ ID NO: 21151 - RNA, 23 nt, Homo sapiens
aggaacagcagcagcccgggccg

SEQ ID NO: 21152 - RNA, 22 nt, Homo sapiens
aaagugcuucuuaccuccagau

SEQ ID NO: 21153 - RNA, 25 nt, Homo sapiens
acggagcugucccaacaccaccccu

SEQ ID NO: 21154 - RNA, 20 nt, Homo sapiens
uacugcuuccacagcucccc

SEQ ID NO: 21155 - RNA, 24 nt, Homo sapiens
acugcuggucuucagucagggcca

SEQ ID NO: 21156 - RNA, 18 nt, Homo sapiens
aucacauucaccucccug

SEQ ID NO: 21157 - RNA, 22 nt, Homo sapiens
ccagaacugaguccacagggca

SEQ ID NO: 21158 - RNA, 23 nt, Homo sapiens
gggagugaagacacggagccaga

SEQ ID NO: 21159 - RNA, 22 nt, Homo sapiens
ucaggaacugccuuucucucca

SEQ ID NO: 21160 - RNA, 21 nt, Homo sapiens
gaccaaucgccguccccgccg

SEQ ID NO: 21161 - RNA, 22 nt, Homo sapiens
cggugagcacccggccccugcg

SEQ ID NO: 21162 - RNA, 25 nt, Homo sapiens
agcuagucaagcgcgguuguggggg

SEQ ID NO: 21163 - RNA, 22 nt, Homo sapiens
acggaagggcagagagggccag

SEQ ID NO: 21164 - RNA, 23 nt, Homo sapiens
cgugagcuccuggaggacaggga

SEQ ID NO: 21165 - RNA, 21 nt, Homo sapiens
auccuguacugagcugccccg

SEQ ID NO: 21166 - RNA, 22 nt, Homo sapiens
ccucauggaaggguuccccacu

SEQ ID NO: 21167 - RNA, 22 nt, Homo sapiens
gcggucccgcggcgccccgccu

SEQ ID NO: 21168 - RNA, 20 nt, Homo sapiens
uacugcuuccacagcucccc

SEQ ID NO: 21169 - RNA, 24 nt, Homo sapiens
cacccccagagccucagcucccca

SEQ ID NO: 21170 - RNA, 22 nt, Homo sapiens
cacauggccaaaacagagaaga

SEQ ID NO: 21171 - RNA, 21 nt, Homo sapiens
uuccacgaccuaauccuaacu

SEQ ID NO: 21172 - RNA, 21 nt, Homo sapiens
auguaggccuuuagaucacuu

SEQ ID NO: 21173 - RNA, 22 nt, Homo sapiens
cagacuccgguggaaugaagga

SEQ ID NO: 21174 - RNA, 23 nt, Homo sapiens
gaaaaacgcccccuggcuugaaa

SEQ ID NO: 21175 - RNA, 23 nt, Homo sapiens
gaaagugcccucaaggcugagug

SEQ ID NO: 21176 - RNA, 21 nt, Homo sapiens
agagcucauccauaguuguca

SEQ ID NO: 21177 - RNA, 22 nt, Homo sapiens
acuucaaggaucuuaaacuuug

SEQ ID NO: 21178 - RNA, 21 nt, Homo sapiens
gaaggaagugagugcagccac

SEQ ID NO: 21179 - RNA, 22 nt, Homo sapiens
caaaagucaagcuuauccuaaa

SEQ ID NO: 21180 - RNA, 22 nt, Homo sapiens
gggagaggucucccugcgcaca

SEQ ID NO: 21181 - RNA, 21 nt, Homo sapiens
cugaggagagaggaggugggg

SEQ ID NO: 21182 - RNA, 17 nt, Homo sapiens
gacagccucucccccac

SEQ ID NO: 21183 - RNA, 22 nt, Homo sapiens
uucacacugcaugcucugggua

SEQ ID NO: 21184 - RNA, 22 nt, Homo sapiens
ucaacaucagucugauaagcua

SEQ ID NO: 21185 - RNA, 20 nt, Homo sapiens
cuggaggaagggcccagagg

SEQ ID NO: 21186 - RNA, 22 nt, Homo sapiens
gccuaagacacaggcccagaga

SEQ ID NO: 21187 - RNA, 22 nt, Homo sapiens
aaucagucucauugcuuuauaa

SEQ ID NO: 21188 - RNA, 22 nt, Homo sapiens
gaauucaucacggccagccucu

SEQ ID NO: 21189 - RNA, 22 nt, Homo sapiens
cugcacuuuuaugaauaagcuc

SEQ ID NO: 21190 - RNA, 20 nt, Homo sapiens
cugcgggaggacagggcuca

SEQ ID NO: 21191 - RNA, 22 nt, Homo sapiens
uaaaugaauucaauuuccuucu

SEQ ID NO: 21192 - RNA, 18 nt, Homo sapiens
ugguggcagaggugggau

SEQ ID NO: 21193 - RNA, 22 nt, Homo sapiens
ucccucacacagaauuccagaa

SEQ ID NO: 21194 - RNA, 22 nt, Homo sapiens
augcuuuuugggguaagggcuu

SEQ ID NO: 21195 - RNA, 18 nt, Homo sapiens
aucacauucaccucccug

SEQ ID NO: 21196 - RNA, 23 nt, Homo sapiens
gggagugaagacacggagccaga

SEQ ID NO: 21197 - RNA, 23 nt, Homo sapiens
cccaacagacauggcgguacuca

SEQ ID NO: 21198 - RNA, 20 nt, Homo sapiens
gcaaugcaacagcaaugcac

SEQ ID NO: 21199 - RNA, 23 nt, Homo sapiens
ucaacgggagugaucgugucauu

SEQ ID NO: 21200 - RNA, 22 nt, Homo sapiens
aacgcuccaaaagaaggcacuc

SEQ ID NO: 21201 - RNA, 22 nt, Homo sapiens
aacacucuaaaaggaggcacuu

SEQ ID NO: 21202 - RNA, 23 nt, Homo sapiens
gggcucuuacucccucaggcacu

SEQ ID NO: 21203 - RNA, 21 nt, Homo sapiens
gagcugcauccuggcuccggg

SEQ ID NO: 21204 - RNA, 22 nt, Homo sapiens
caaacaccauugucacacucca

SEQ ID NO: 21205 - RNA, 20 nt, Homo sapiens
cugcgggaggacagggcuca

SEQ ID NO: 21206 - RNA, 17 nt, Homo sapiens
gggagaggaggaggcga

SEQ ID NO: 21207 - RNA, 21 nt, Homo sapiens
acuagacugugagcuccucga

SEQ ID NO: 21208 - RNA, 22 nt, Homo sapiens
uggcagcagcggagggggcaga

SEQ ID NO: 21209 - RNA, 22 nt, Homo sapiens
ucagaccgagacaagugcaaug

SEQ ID NO: 21210 - RNA, 20 nt, Homo sapiens
ccagcagcaccuggggcagu

SEQ ID NO: 21211 - RNA, 23 nt, Homo sapiens
cggcucugucgucgaggcgcuca

SEQ ID NO: 21212 - RNA, 22 nt, Homo sapiens
acaaccagcuaagacacugcca

SEQ ID NO: 21213 - RNA, 23 nt, Homo sapiens
gcaaucagcuaacuacacugccu

SEQ ID NO: 21214 - RNA, 22 nt, Homo sapiens
accagcuaacaauacacugcca

SEQ ID NO: 21215 - RNA, 22 nt, Homo sapiens
gccagcuaacaauacacugccu

SEQ ID NO: 21216 - RNA, 25 nt, Homo sapiens
accaacggaccuacuucccuccgcc

SEQ ID NO: 21217 - RNA, 17 nt, Homo sapiens
gggagaggaggaggcga

SEQ ID NO: 21218 - RNA, 22 nt, Homo sapiens
augcccuuucaucauugcacug

SEQ ID NO: 21219 - RNA, 21 nt, Homo sapiens
gaccaaucgccguccccgccg

SEQ ID NO: 21220 - RNA, 22 nt, Homo sapiens
ucagaccgagacaagugcaaug

SEQ ID NO: 21221 - RNA, 21 nt, Homo sapiens
guaaugggaccuuccucuuug

SEQ ID NO: 21222 - RNA, 25 nt, Homo sapiens
accaacggaccuacuucccuccgcc

SEQ ID NO: 21223 - RNA, 22 nt, Homo sapiens
gcggucccgcggcgccccgccu

SEQ ID NO: 21224 - RNA, 21 nt, Homo sapiens
cggggugcacgggcggagggc

SEQ ID NO: 21225 - RNA, 22 nt, Homo sapiens
ucagaccgagacaagugcaaug

SEQ ID NO: 21226 - RNA, 22 nt, Homo sapiens
acggaagggcagagagggccag

SEQ ID NO: 21227 - RNA, 25 nt, Homo sapiens
accaacggaccuacuucccuccgcc

SEQ ID NO: 21228 - RNA, 23 nt, Homo sapiens
ucaccaaaacauggaagcacuua

SEQ ID NO: 21229 - RNA, 23 nt, Homo sapiens
cuacuaaaacauggaagcacuua

SEQ ID NO: 21230 - RNA, 23 nt, Homo sapiens
ccacugaaacauggaagcacuua

SEQ ID NO: 21231 - RNA, 23 nt, Homo sapiens
acacucaaacauggaagcacuua

SEQ ID NO: 21232 - RNA, 17 nt, Homo sapiens
aagcauggaagcacuua

SEQ ID NO: 21233 - RNA, 20 nt, Homo sapiens
gcaaugcaacagcaaugcac

SEQ ID NO: 21234 - RNA, 23 nt, Homo sapiens
acgcucaaaugucgcagcacuuu

SEQ ID NO: 21235 - RNA, 23 nt, Homo sapiens
acaccccaaaaucgaagcacuuc

SEQ ID NO: 21236 - RNA, 22 nt, Homo sapiens
aacgcuccaaaagaaggcacuc

SEQ ID NO: 21237 - RNA, 22 nt, Homo sapiens
aacacucuaaaaggaggcacuu

SEQ ID NO: 21238 - RNA, 22 nt, Homo sapiens
acaguccaaagggaagcacuuu

SEQ ID NO: 21239 - RNA, 21 nt, Homo sapiens
cccucuaaaaggaagcacuuu

SEQ ID NO: 21240 - RNA, 22 nt, Homo sapiens
acccucuaaaaggaagcacuuu

SEQ ID NO: 21241 - RNA, 22 nt, Homo sapiens
acccaccaaagagaagcacuuu

SEQ ID NO: 21242 - RNA, 21 nt, Homo sapiens
cccucaaaaaggaagcacuuu

SEQ ID NO: 21243 - RNA, 21 nt, Homo sapiens
guaaugggaccuuccucuuug

SEQ ID NO: 21244 - RNA, 22 nt, Homo sapiens
caaacaccauugucacacucca

SEQ ID NO: 21245 - RNA, 21 nt, Homo sapiens
cggggugcacgggcggagggc

SEQ ID NO: 21246 - RNA, 21 nt, Homo sapiens
gaccaaucgccguccccgccg

SEQ ID NO: 21247 - RNA, 21 nt, Homo sapiens
aggcggcaggcacaggacugg

SEQ ID NO: 21248 - RNA, 23 nt, Homo sapiens
gaaacccagcagacaauguagcu

SEQ ID NO: 21249 - RNA, 22 nt, Homo sapiens
ucagaccgagacaagugcaaug

SEQ ID NO: 21250 - RNA, 22 nt, Homo sapiens
cucaauagacugugagcuccuu

SEQ ID NO: 21251 - RNA, 21 nt, Homo sapiens
agcuaugccagcaucuugccu

SEQ ID NO: 21252 - RNA, 23 nt, Homo sapiens
aaagucucgcucucugccccuca

SEQ ID NO: 21253 - RNA, 23 nt, Homo sapiens
aagaaucuugucccgcagguccu

SEQ ID NO: 21254 - RNA, 25 nt, Homo sapiens
accaacggaccuacuucccuccgcc

SEQ ID NO: 21255 - RNA, 22 nt, Homo sapiens
gcggucccgcggcgccccgccu

SEQ ID NO: 21256 - RNA, 20 nt, Homo sapiens
aggggccucagccuccuggu

SEQ ID NO: 21257 - RNA, 23 nt, Homo sapiens
cccagcuagauuguaagcuccuu

SEQ ID NO: 21258 - RNA, 22 nt, Homo sapiens
ugcuguuagcccuagccccgca

SEQ ID NO: 21259 - RNA, 22 nt, Homo sapiens
caaacaccauugucacacucca

SEQ ID NO: 21260 - RNA, 22 nt, Homo sapiens
cuggagagacaaggggaagagg

SEQ ID NO: 21261 - RNA, 21 nt, Homo sapiens
ggucagaacccaucauucacu

SEQ ID NO: 21262 - RNA, 23 nt, Homo sapiens
uccaucaucaaaacaaauggagu

SEQ ID NO: 21263 - RNA, 23 nt, Homo sapiens
gggagugaagacacggagccaga

SEQ ID NO: 21264 - RNA, 22 nt, Homo sapiens
agcccaaaaggagaauucuuug

SEQ ID NO: 21265 - RNA, 23 nt, Homo sapiens
cuaucugcacuagaugcaccuua

SEQ ID NO: 21266 - RNA, 23 nt, Homo sapiens
aaagucucgcucucugccccuca

SEQ ID NO: 21267 - RNA, 22 nt, Homo sapiens
aggaaaccagcaaguguugacg

SEQ ID NO: 21268 - RNA, 23 nt, Homo sapiens
gaaagugcccucaaggcugagug

SEQ ID NO: 21269 - RNA, 22 nt, Homo sapiens
aagagggagacccaggcucgga

SEQ ID NO: 21270 - RNA, 23 nt, Homo sapiens
ggacauuguuucagugcccaagu

SEQ ID NO: 21271 - RNA, 20 nt, Homo sapiens
aggggccucagccuccuggu

SEQ ID NO: 21272 - RNA, 21 nt, Homo sapiens
caucaccuuccuucuccucca

SEQ ID NO: 21273 - RNA, 20 nt, Homo sapiens
cccugcgccaucuccucuac

SEQ ID NO: 21274 - RNA, 22 nt, Homo sapiens
gggagaggucucccugcgcaca

SEQ ID NO: 21275 - RNA, 22 nt, Homo sapiens
aucagagcccucugagcuucag

SEQ ID NO: 21276 - RNA, 17 nt, Homo sapiens
gggagaggaggaggcga

SEQ ID NO: 21277 - RNA, 23 nt, Homo sapiens
gggagugaagacacggagccaga

SEQ ID NO: 21278 - RNA, 22 nt, Homo sapiens
cacugguacaaggguugggaga

SEQ ID NO: 21279 - RNA, 24 nt, Homo sapiens
agugugaguucuaccauugccaaa

SEQ ID NO: 21280 - RNA, 21 nt, Homo sapiens
agagcucauccauaguuguca

SEQ ID NO: 21281 - RNA, 22 nt, Homo sapiens
auguaugugggacgguaaacca

SEQ ID NO: 21282 - RNA, 22 nt, Homo sapiens
accagcuaacaauacacugcca

SEQ ID NO: 21283 - RNA, 22 nt, Homo sapiens
agcugaguguaggauguuuaca

SEQ ID NO: 21284 - RNA, 22 nt, Homo sapiens
agcugaguguaggauguuuaca

SEQ ID NO: 21285 - RNA, 22 nt, Homo sapiens
ucggucccucgggccagggcag

SEQ ID NO: 21286 - RNA, 17 nt, Homo sapiens
ggguggcagcgguggga

SEQ ID NO: 21287 - RNA, 17 nt, Homo sapiens
gggagaggaggaggcga

SEQ ID NO: 21288 - RNA, 22 nt, Homo sapiens
cacaucucacuguagccucaaa

SEQ ID NO: 21289 - RNA, 23 nt, Homo sapiens
gggagugaagacacggagccaga

SEQ ID NO: 21290 - RNA, 23 nt, Homo sapiens
aggaacagcagcagcccgggccg

SEQ ID NO: 21291 - RNA, 21 nt, Homo sapiens
gaccaaucgccguccccgccg

SEQ ID NO: 21292 - RNA, 21 nt, Homo sapiens
acaggauugagggggggcccu

SEQ ID NO: 21293 - RNA, 22 nt, Homo sapiens
aucgggaggggacugagccuga

SEQ ID NO: 21294 - RNA, 22 nt, Homo sapiens
aguccagauucugugcccacca

SEQ ID NO: 21295 - RNA, 21 nt, Homo sapiens
gaaggaagugagugcagccac

SEQ ID NO: 21296 - RNA, 22 nt, Homo sapiens
gcacauguucugcggcccacca

SEQ ID NO: 21297 - RNA, 24 nt, Homo sapiens
acgcgcaggccagagacccaggca

SEQ ID NO: 21298 - RNA, 22 nt, Homo sapiens
gcggucccgcggcgccccgccu

SEQ ID NO: 21299 - RNA, 20 nt, Homo sapiens
aggggccucagccuccuggu

SEQ ID NO: 21300 - RNA, 22 nt, Homo sapiens
ugcuguuagcccuagccccgca

SEQ ID NO: 21301 - RNA, 22 nt, Homo sapiens
cuagggaacacagggcugguga

SEQ ID NO: 21302 - RNA, 20 nt, Homo sapiens
cugcgggaggacagggcuca

SEQ ID NO: 21303 - RNA, 27 nt, Homo sapiens
uuuagcacagugcuuauacaagaaggu

SEQ ID NO: 21304 - RNA, 22 nt, Homo sapiens
ucccucacacagaauuccagaa

SEQ ID NO: 21305 - RNA, 18 nt, Homo sapiens
aucacauucaccucccug

SEQ ID NO: 21306 - RNA, 23 nt, Homo sapiens
ucacauaggaauaaaaagccaua

SEQ ID NO: 21307 - RNA, 23 nt, Homo sapiens
uccaucaucaaaacaaauggagu

SEQ ID NO: 21308 - RNA, 23 nt, Homo sapiens
cggccugauucacaacaccagcu

SEQ ID NO: 21309 - RNA, 23 nt, Homo sapiens
gggagugaagacacggagccaga

SEQ ID NO: 21310 - RNA, 21 nt, Homo sapiens
cccuccaccaugcaagggaug

SEQ ID NO: 21311 - RNA, 22 nt, Homo sapiens
aggaaaccagcaaguguugacg

SEQ ID NO: 21312 - RNA, 23 nt, Homo sapiens
acacucuaaagagaagcgcuuug

SEQ ID NO: 21313 - RNA, 21 nt, Homo sapiens
agaaaguacuucccucuggag

SEQ ID NO: 21314 - RNA, 21 nt, Homo sapiens
agaaagugcaucccucuggag

SEQ ID NO: 21315 - RNA, 22 nt, Homo sapiens
acacaccaaggauaauuucucc

SEQ ID NO: 21316 - RNA, 22 nt, Homo sapiens
cucauauuacaaugagcucauc

SEQ ID NO: 21317 - RNA, 23 nt, Homo sapiens
aggagaaggcaccaugggauuua

SEQ ID NO: 21318 - RNA, 22 nt, Homo sapiens
aagagggagacccaggcucgga

SEQ ID NO: 21319 - RNA, 22 nt, Homo sapiens
guccaaaguuggggugcugguu

SEQ ID NO: 21320 - RNA, 21 nt, Homo sapiens
guccugagagcgcugccuccu

SEQ ID NO: 21321 - RNA, 23 nt, Homo sapiens
agaaaccaugggguaugagcaga

SEQ ID NO: 21322 - RNA, 21 nt, Homo sapiens
cacaaccucaguguuuccagg

SEQ ID NO: 21323 - RNA, 22 nt, Homo sapiens
uggugauucacaaagaaaucca

SEQ ID NO: 21324 - RNA, 23 nt, Homo sapiens
gacguaguccuauucucugcugc

SEQ ID NO: 21325 - RNA, 23 nt, Homo sapiens
ucauagcccuguacaaugcugcu

SEQ ID NO: 21326 - RNA, 23 nt, Homo sapiens
ugauagcccuguacaaugcugcu

SEQ ID NO: 21327 - RNA, 22 nt, Homo sapiens
uaaaugaauucaauuuccuucu

SEQ ID NO: 21328 - RNA, 17 nt, Homo sapiens
gggagaggaggaggcga

SEQ ID NO: 21329 - RNA, 18 nt, Homo sapiens
aucacauucaccucccug

SEQ ID NO: 21330 - RNA, 22 nt, Homo sapiens
ccaucuuuaccagacaguguua

SEQ ID NO: 21331 - RNA, 18 nt, Homo sapiens
auucaaucuacugccuca

SEQ ID NO: 21332 - RNA, 21 nt, Homo sapiens
gaccaaucgccguccccgccg

SEQ ID NO: 21333 - RNA, 22 nt, Homo sapiens
acaucguuaccagacaguguua

SEQ ID NO: 21334 - RNA, 22 nt, Homo sapiens
acaaccagcuaagacacugcca

SEQ ID NO: 21335 - RNA, 22 nt, Homo sapiens
auggcaguggaguuagugauug

SEQ ID NO: 21336 - RNA, 23 nt, Homo sapiens
gcaaucagcuaacuacacugccu

SEQ ID NO: 21337 - RNA, 22 nt, Homo sapiens
accagcuaacaauacacugcca

SEQ ID NO: 21338 - RNA, 22 nt, Homo sapiens
gccagcuaacaauacacugccu

SEQ ID NO: 21339 - RNA, 23 nt, Homo sapiens
ucucgugacaugaugauccccga

SEQ ID NO: 21340 - RNA, 21 nt, Homo sapiens
aucagagguucagcuuacccu

SEQ ID NO: 21341 - RNA, 21 nt, Homo sapiens
guccugagagcgcugccuccu

SEQ ID NO: 21342 - RNA, 22 nt, Homo sapiens
gcggucccgcggcgccccgccu

SEQ ID NO: 21343 - RNA, 23 nt, Homo sapiens
cacugugggcccucuccgcacca

SEQ ID NO: 21344 - RNA, 21 nt, Homo sapiens
caucaccuuccuucuccucca

SEQ ID NO: 21345 - RNA, 22 nt, Homo sapiens
cacauggccaaaacagagaaga

SEQ ID NO: 21346 - RNA, 21 nt, Homo sapiens
gaccaaucgccguccccgccg

SEQ ID NO: 21347 - RNA, 22 nt, Homo sapiens
ucagaccgagacaagugcaaug

SEQ ID NO: 21348 - RNA, 24 nt, Homo sapiens
ugggagaaccucccugcuucugcu

SEQ ID NO: 21349 - RNA, 23 nt, Homo sapiens
aaagucucgcucucugccccuca

SEQ ID NO: 21350 - RNA, 23 nt, Homo sapiens
ucucgugacaugaugauccccga

SEQ ID NO: 21351 - RNA, 22 nt, Homo sapiens
gcggucccgcggcgccccgccu

SEQ ID NO: 21352 - RNA, 22 nt, Homo sapiens
ugcuguuagcccuagccccgca

SEQ ID NO: 21353 - RNA, 22 nt, Homo sapiens
acacacccacgcgagccggaaa

SEQ ID NO: 21354 - RNA, 24 nt, Homo sapiens
gaagucacucccaggcagcugcaa

SEQ ID NO: 21355 - RNA, 21 nt, Homo sapiens
gggcaucugggacgcgcagga

SEQ ID NO: 21356 - RNA, 23 nt, Homo sapiens
cccaacagacauggcgguacuca

SEQ ID NO: 21357 - RNA, 23 nt, Homo sapiens
acaccaaugcccuaggggaugcg

SEQ ID NO: 21358 - RNA, 23 nt, Homo sapiens
cugcagaacuguucccgcugcua

SEQ ID NO: 21359 - RNA, 19 nt, Homo sapiens
auuuugguacagcagcuca

SEQ ID NO: 21360 - RNA, 19 nt, Homo sapiens
gccugcugacaccgugccu

SEQ ID NO: 21361 - RNA, 22 nt, Homo sapiens
gcugaggcuguggggcuggagu

SEQ ID NO: 21362 - RNA, 22 nt, Homo sapiens
uauccacuacaccccgcugccu

SEQ ID NO: 21363 - RNA, 22 nt, Homo sapiens
ucaggaacugccuuucucucca

SEQ ID NO: 21364 - RNA, 21 nt, Homo sapiens
gaccaaucgccguccccgccg

SEQ ID NO: 21365 - RNA, 23 nt, Homo sapiens
ucaguuuugcauagauuugcaca

SEQ ID NO: 21366 - RNA, 22 nt, Homo sapiens
cacucagcaccaggauauuguu

SEQ ID NO: 21367 - RNA, 22 nt, Homo sapiens
aacuaugcaaccuacuaccucu

SEQ ID NO: 21368 - RNA, 22 nt, Homo sapiens
gaauucaucacggccagccucu

SEQ ID NO: 21369 - RNA, 21 nt, Homo sapiens
gaccaagaaauagccuuucaa

SEQ ID NO: 21370 - RNA, 23 nt, Homo sapiens
caugagugacgcccucuggagua

SEQ ID NO: 21371 - RNA, 19 nt, Homo sapiens
guccugaauuccgcagccu

SEQ ID NO: 21372 - RNA, 22 nt, Homo sapiens
aagagggagacccaggcucgga

SEQ ID NO: 21373 - RNA, 22 nt, Homo sapiens
gcggucccgcggcgccccgccu

SEQ ID NO: 21374 - RNA, 22 nt, Homo sapiens
ugcuguuagcccuagccccgca

SEQ ID NO: 21375 - RNA, 21 nt, Homo sapiens
aagggucaguaagcacccgcg

SEQ ID NO: 21376 - RNA, 20 nt, Homo sapiens
uacugcuuccacagcucccc

SEQ ID NO: 21377 - RNA, 20 nt, Homo sapiens
ugucuccacagggcucuuua

SEQ ID NO: 21378 - RNA, 19 nt, Homo sapiens
ucccugauccaaaaaucca

SEQ ID NO: 21379 - RNA, 22 nt, Homo sapiens
gcaaaaguaauugagauuuuug

SEQ ID NO: 21380 - RNA, 22 nt, Homo sapiens
aaaguaacugcaguuuuugcua

SEQ ID NO: 21381 - RNA, 21 nt, Homo sapiens
acuagcuuauacauaaaauua

SEQ ID NO: 21382 - RNA, 23 nt, Homo sapiens
uguaggcuggggauaaaugaaua

SEQ ID NO: 21383 - RNA, 21 nt, Homo sapiens
cugggggacggagcagaagga

SEQ ID NO: 21384 - RNA, 22 nt, Homo sapiens
cacuccuauaauugauccaguu

SEQ ID NO: 21385 - RNA, 23 nt, Homo sapiens
accccuaucacgauuagcauuaa

SEQ ID NO: 21386 - RNA, 22 nt, Homo sapiens
ucaggaacugccuuucucucca

SEQ ID NO: 21387 - RNA, 23 nt, Homo sapiens
gaacagguagucugaacacuggg

SEQ ID NO: 21388 - RNA, 23 nt, Homo sapiens
gaacagauagucuaaacacuggg

SEQ ID NO: 21389 - RNA, 22 nt, Homo sapiens
cacucagcggccguuuccccaa

SEQ ID NO: 21390 - RNA, 24 nt, Homo sapiens
ugggagaaccucccugcuucugcu

SEQ ID NO: 21391 - RNA, 22 nt, Homo sapiens
auaaaugacaccuccuugugaa

SEQ ID NO: 21392 - RNA, 22 nt, Homo sapiens
gcaaaagaaacugugguuuuug

SEQ ID NO: 21393 - RNA, 20 nt, Homo sapiens
gcaaaugguacagcuacuuu

SEQ ID NO: 21394 - RNA, 20 nt, Homo sapiens
agagaugagagaaacacccu

SEQ ID NO: 21395 - RNA, 21 nt, Homo sapiens
agaggcagguuccuggaucau

SEQ ID NO: 21396 - RNA, 23 nt, Homo sapiens
gacguaguccuauucucugcugc

SEQ ID NO: 21397 - RNA, 21 nt, Homo sapiens
gcaagcccagaccgcaaaaag

SEQ ID NO: 21398 - RNA, 23 nt, Homo sapiens
cccaacagacauggcgguacuca

SEQ ID NO: 21399 - RNA, 22 nt, Homo sapiens
uccacauggaguugcuguuaca

SEQ ID NO: 21400 - RNA, 22 nt, Homo sapiens
ugagccacugugccuggccuga

SEQ ID NO: 21401 - RNA, 20 nt, Homo sapiens
gcaaaugguacagcuacuuu

SEQ ID NO: 21402 - RNA, 19 nt, Homo sapiens
agaaaccccagcagagaca

SEQ ID NO: 21403 - RNA, 20 nt, Homo sapiens
aggggccucagccuccuggu

SEQ ID NO: 21404 - RNA, 24 nt, Homo sapiens
ucagagcauguguuuaaucaggcu

SEQ ID NO: 21405 - RNA, 20 nt, Homo sapiens
ggggggcgaggcagguguga

SEQ ID NO: 21406 - RNA, 22 nt, Homo sapiens
agacaacaaugccaaccucaca

SEQ ID NO: 21407 - RNA, 23 nt, Homo sapiens
ucacauaggaauaaaaagccaua

SEQ ID NO: 21408 - RNA, 22 nt, Homo sapiens
acaguucuucaacuggcagcuu

SEQ ID NO: 21409 - RNA, 24 nt, Homo sapiens
ugggagaaccucccugcuucugcu

SEQ ID NO: 21410 - RNA, 23 nt, Homo sapiens
acgggugcgauuucugugugaga

SEQ ID NO: 21411 - RNA, 22 nt, Homo sapiens
gcugccguauaugugaugucac

SEQ ID NO: 21412 - RNA, 18 nt, Homo sapiens
augacaccucccugugaa

SEQ ID NO: 21413 - RNA, 22 nt, Homo sapiens
agcaaaauccgcaaguacuuuu

SEQ ID NO: 21414 - RNA, 19 nt, Homo sapiens
auuuugguacagcagcuca

SEQ ID NO: 21415 - RNA, 23 nt, Homo sapiens
gacguaguccuauucucugcugc

SEQ ID NO: 21416 - RNA, 26 nt, Homo sapiens
aaccaucucauacaaaccaacuacuu

SEQ ID NO: 21417 - RNA, 21 nt, Homo sapiens
ugcaggcugaucuucuucucu

SEQ ID NO: 21418 - RNA, 21 nt, Homo sapiens
gagcuacagugcuucaucuca

SEQ ID NO: 21419 - RNA, 22 nt, Homo sapiens
gaagaaaggcaucauauaggag

SEQ ID NO: 21420 - RNA, 22 nt, Homo sapiens
gagcccuggacuaggagucagc

SEQ ID NO: 21421 - RNA, 22 nt, Homo sapiens
auggcaguggaguuagugauug

SEQ ID NO: 21422 - RNA, 21 nt, Homo sapiens
ccuucugacuccaaguccagu

SEQ ID NO: 21423 - RNA, 22 nt, Homo sapiens
cacauggccaaaacagagaaga

SEQ ID NO: 21424 - RNA, 23 nt, Homo sapiens
aggaacagcagcagcccgggccg

SEQ ID NO: 21425 - RNA, 18 nt, Homo sapiens
acccucugaaaggaagca

SEQ ID NO: 21426 - RNA, 22 nt, Homo sapiens
aaagugcuucuuaccuccagau

SEQ ID NO: 21427 - RNA, 22 nt, Homo sapiens
gcggucccgcggcgccccgccu

SEQ ID NO: 21428 - RNA, 23 nt, Homo sapiens
cuccagccccuccagggcuuccu

SEQ ID NO: 21429 - RNA, 22 nt, Homo sapiens
ugcuguuagcccuagccccgca

SEQ ID NO: 21430 - RNA, 22 nt, Homo sapiens
ggcagagagucagagcgcggau

SEQ ID NO: 21431 - RNA, 24 nt, Homo sapiens
cacccccagagccucagcucccca

SEQ ID NO: 21432 - RNA, 22 nt, Homo sapiens
cuggagagacaaggggaagagg

SEQ ID NO: 21433 - RNA, 17 nt, Homo sapiens
gacagccucucccccac

SEQ ID NO: 21434 - RNA, 23 nt, Homo sapiens
cagcugcuuuugggauuccguug

SEQ ID NO: 21435 - RNA, 22 nt, Homo sapiens
uucacacugcaugcucugggua

SEQ ID NO: 21436 - RNA, 21 nt, Homo sapiens
gcggaacuuagccacugugaa

SEQ ID NO: 21437 - RNA, 21 nt, Homo sapiens
aucugcacugucagcacuuua

SEQ ID NO: 21438 - RNA, 23 nt, Homo sapiens
gcuuugacaauaucauugcacug

SEQ ID NO: 21439 - RNA, 23 nt, Homo sapiens
acauuuuucguuauugcucuuga

SEQ ID NO: 21440 - RNA, 21 nt, Homo sapiens
aucagagguucagcuuacccu

SEQ ID NO: 21441 - RNA, 21 nt, Homo sapiens
ggacuauagaacuuucccccu

SEQ ID NO: 21442 - RNA, 20 nt, Homo sapiens
uacugcuuccacagcucccc

SEQ ID NO: 21443 - RNA, 21 nt, Homo sapiens
cugggggacggagcagaagga

SEQ ID NO: 21444 - RNA, 17 nt, Homo sapiens
ggguggcagcgguggga

SEQ ID NO: 21445 - RNA, 23 nt, Homo sapiens
gggagugaagacacggagccaga

SEQ ID NO: 21446 - RNA, 22 nt, Homo sapiens
ucaggaacugccuuucucucca

SEQ ID NO: 21447 - RNA, 21 nt, Homo sapiens
gaccaaucgccguccccgccg

SEQ ID NO: 21448 - RNA, 22 nt, Homo sapiens
acaguucuucaacuggcagcuu

SEQ ID NO: 21449 - RNA, 22 nt, Homo sapiens
cucaauagacugugagcuccuu

SEQ ID NO: 21450 - RNA, 23 nt, Homo sapiens
aaagucucgcucucugccccuca

SEQ ID NO: 21451 - RNA, 23 nt, Homo sapiens
ucucacccagguagcaaggauua

SEQ ID NO: 21452 - RNA, 22 nt, Homo sapiens
gcggucccgcggcgccccgccu

SEQ ID NO: 21453 - RNA, 23 nt, Homo sapiens
cccagcuagauuguaagcuccuu

SEQ ID NO: 21454 - RNA, 22 nt, Homo sapiens
ugcuguuagcccuagccccgca

SEQ ID NO: 21455 - RNA, 23 nt, Homo sapiens
ccgcuugagcuaacuccgacccg

SEQ ID NO: 21456 - RNA, 20 nt, Homo sapiens
uacugcuuccacagcucccc

SEQ ID NO: 21457 - RNA, 23 nt, Homo sapiens
gcacaugugcacacagccgggug

SEQ ID NO: 21458 - RNA, 23 nt, Homo sapiens
ucauagcccuguacaaugcugcu

SEQ ID NO: 21459 - RNA, 23 nt, Homo sapiens
ugauagcccuguacaaugcugcu

SEQ ID NO: 21460 - RNA, 17 nt, Homo sapiens
gacagccucucccccac

SEQ ID NO: 21461 - RNA, 22 nt, Homo sapiens
cacaaaccauuaugugcugcua

SEQ ID NO: 21462 - RNA, 22 nt, Homo sapiens
uguaaaccaugaugugcugcua

SEQ ID NO: 21463 - RNA, 22 nt, Homo sapiens
cgccaauauuuacgugcugcua

SEQ ID NO: 21464 - RNA, 21 nt, Homo sapiens
gccaauauuucugugcugcua

SEQ ID NO: 21465 - RNA, 22 nt, Homo sapiens
cacuuaucagguuguauuauaa

SEQ ID NO: 21466 - RNA, 22 nt, Homo sapiens
uucaaaacaugaauugcugcug

SEQ ID NO: 21467 - RNA, 22 nt, Homo sapiens
gaauucaucacggccagccucu

SEQ ID NO: 21468 - RNA, 21 nt, Homo sapiens
acaaaccacagugugcugcug

SEQ ID NO: 21469 - RNA, 23 nt, Homo sapiens
aaucgcgguuuauaccaaaugaa

SEQ ID NO: 21470 - RNA, 22 nt, Homo sapiens
cucagagcagacgugguucuca

SEQ ID NO: 21471 - RNA, 21 nt, Homo sapiens
gaaggaagugagugcagccac

SEQ ID NO: 21472 - RNA, 20 nt, Homo sapiens
uacugcuuccacagcucccc

SEQ ID NO: 21473 - RNA, 22 nt, Homo sapiens
gggagaggucucccugcgcaca

SEQ ID NO: 21474 - RNA, 20 nt, Homo sapiens
gcagcuguccgcccagacac

SEQ ID NO: 21475 - RNA, 17 nt, Homo sapiens
ggguggcagcgguggga

SEQ ID NO: 21476 - RNA, 22 nt, Homo sapiens
cacaaaccauuaugugcugcua

SEQ ID NO: 21477 - RNA, 22 nt, Homo sapiens
uguaaaccaugaugugcugcua

SEQ ID NO: 21478 - RNA, 22 nt, Homo sapiens
cgccaauauuuacgugcugcua

SEQ ID NO: 21479 - RNA, 22 nt, Homo sapiens
ucaggaacugccuuucucucca

SEQ ID NO: 21480 - RNA, 21 nt, Homo sapiens
gccaauauuucugugcugcua

SEQ ID NO: 21481 - RNA, 23 nt, Homo sapiens
gaacagguagucugaacacuggg

SEQ ID NO: 21482 - RNA, 23 nt, Homo sapiens
gaacagauagucuaaacacuggg

SEQ ID NO: 21483 - RNA, 22 nt, Homo sapiens
acugccugucugugccugcugu

SEQ ID NO: 21484 - RNA, 24 nt, Homo sapiens
ugggagaaccucccugcuucugcu

SEQ ID NO: 21485 - RNA, 22 nt, Homo sapiens
accagguuccaccccagcaggc

SEQ ID NO: 21486 - RNA, 23 nt, Homo sapiens
aaagucucgcucucugccccuca

SEQ ID NO: 21487 - RNA, 22 nt, Homo sapiens
uucaaaacaugaauugcugcug

SEQ ID NO: 21488 - RNA, 21 nt, Homo sapiens
acaaaccacagugugcugcug

SEQ ID NO: 21489 - RNA, 22 nt, Homo sapiens
aggaaaccagcaaguguugacg

SEQ ID NO: 21490 - RNA, 24 nt, Homo sapiens
acgcgcaggccagagacccaggca

SEQ ID NO: 21491 - RNA, 22 nt, Homo sapiens
ccucaggcacggccgggccacc

SEQ ID NO: 21492 - RNA, 20 nt, Homo sapiens
uacugcuuccacagcucccc

SEQ ID NO: 21493 - RNA, 22 nt, Homo sapiens
cacauggccaaaacagagaaga

SEQ ID NO: 21494 - RNA, 22 nt, Homo sapiens
cgcauuauuacucacgguacga

SEQ ID NO: 21495 - RNA, 24 nt, Homo sapiens
agugugaguucuaccauugccaaa

SEQ ID NO: 21496 - RNA, 23 nt, Homo sapiens
cuacuaaaacauggaagcacuua

SEQ ID NO: 21497 - RNA, 23 nt, Homo sapiens
acacucaaacauggaagcacuua

SEQ ID NO: 21498 - RNA, 21 nt, Homo sapiens
agcuaugccagcaucuugccu

SEQ ID NO: 21499 - RNA, 20 nt, Homo sapiens
gaaagggcuucccuuuguag

SEQ ID NO: 21500 - RNA, 22 nt, Homo sapiens
gagaaagugcuucccuuuguag

SEQ ID NO: 21501 - RNA, 22 nt, Homo sapiens
uccucuuuucuuagagacucac

SEQ ID NO: 21502 - RNA, 21 nt, Homo sapiens
gaaggaagugagugcagccac

SEQ ID NO: 21503 - RNA, 21 nt, Homo sapiens
agagguugacuguauaauauu

SEQ ID NO: 21504 - RNA, 23 nt, Homo sapiens
cccagcuagauuguaagcuccuu

SEQ ID NO: 21505 - RNA, 22 nt, Homo sapiens
cucauccgauguacaauaauuu

SEQ ID NO: 21506 - RNA, 22 nt, Homo sapiens
caaacaccauugucacacucca

SEQ ID NO: 21507 - RNA, 21 nt, Homo sapiens
gaccaaucgccguccccgccg

SEQ ID NO: 21508 - RNA, 23 nt, Homo sapiens
cccaacagacauggcgguacuca

SEQ ID NO: 21509 - RNA, 21 nt, Homo sapiens
uagaaaggcuaggaccaaacc

SEQ ID NO: 21510 - RNA, 22 nt, Homo sapiens
uagucaagugaagcagugggag

SEQ ID NO: 21511 - RNA, 21 nt, Homo sapiens
agagcucauccauaguuguca

SEQ ID NO: 21512 - RNA, 21 nt, Homo sapiens
acaggauugagggggggcccu

SEQ ID NO: 21513 - RNA, 22 nt, Homo sapiens
acggaagggcagagagggccag

SEQ ID NO: 21514 - RNA, 23 nt, Homo sapiens
aaaucagaaucacaccuggggga

SEQ ID NO: 21515 - RNA, 21 nt, Homo sapiens
aagacgggaggagaggaguga

SEQ ID NO: 21516 - RNA, 19 nt, Homo sapiens
aagacauuuucagacagcu

SEQ ID NO: 21517 - RNA, 24 nt, Homo sapiens
acgcagagcccgaaagcccccagu

SEQ ID NO: 21518 - RNA, 22 nt, Homo sapiens
gcggucccgcggcgccccgccu

SEQ ID NO: 21519 - RNA, 23 nt, Homo sapiens
guagugggccgagccgagugaca

SEQ ID NO: 21520 - RNA, 23 nt, Homo sapiens
cccagcuagauuguaagcuccuu

SEQ ID NO: 21521 - RNA, 17 nt, Homo sapiens
gacagccucucccccac

SEQ ID NO: 21522 - RNA, 21 nt, Homo sapiens
cggggugcacgggcggagggc

SEQ ID NO: 21523 - RNA, 22 nt, Homo sapiens
acaaaguucugugaugcacuga

SEQ ID NO: 21524 - RNA, 22 nt, Homo sapiens
agucuucacaacagcccugugu

SEQ ID NO: 21525 - RNA, 22 nt, Homo sapiens
ccucauggaaggguuccccacu

SEQ ID NO: 21526 - RNA, 22 nt, Homo sapiens
ucucacccagggacaaaggauu

SEQ ID NO: 21527 - RNA, 18 nt, Homo sapiens
augacaccucccugugaa

SEQ ID NO: 21528 - RNA, 22 nt, Homo sapiens
ugacgaugacaacgaugacgua

SEQ ID NO: 21529 - RNA, 25 nt, Homo sapiens
acggagcugucccaacaccaccccu

SEQ ID NO: 21530 - RNA, 22 nt, Homo sapiens
cugcucaaacccuccaaugacu

SEQ ID NO: 21531 - RNA, 25 nt, Homo sapiens
accaacggaccuacuucccuccgcc

SEQ ID NO: 21532 - RNA, 20 nt, Homo sapiens
uacugcuuccacagcucccc

SEQ ID NO: 21533 - RNA, 22 nt, Homo sapiens
acacacccacgcgagccggaaa

SEQ ID NO: 21534 - RNA, 21 nt, Homo sapiens
cggcucggguggcggcgacgg

SEQ ID NO: 21535 - RNA, 22 nt, Homo sapiens
uccggggacgaacgggacgggu

SEQ ID NO: 21536 - RNA, 22 nt, Homo sapiens
auccuucuacaaauucacccau

SEQ ID NO: 21537 - RNA, 21 nt, Homo sapiens
cggggugcacgggcggagggc

SEQ ID NO: 21538 - RNA, 21 nt, Homo sapiens
gggcaucugggacgcgcagga

SEQ ID NO: 21539 - RNA, 21 nt, Homo sapiens
gaccaaucgccguccccgccg

SEQ ID NO: 21540 - RNA, 22 nt, Homo sapiens
cagaagugggccgggcacaggg

SEQ ID NO: 21541 - RNA, 22 nt, Homo sapiens
ucagaccgagacaagugcaaug

SEQ ID NO: 21542 - RNA, 23 nt, Homo sapiens
acaccaaugcccuaggggaugcg

SEQ ID NO: 21543 - RNA, 23 nt, Homo sapiens
aaagucucgcucucugccccuca

SEQ ID NO: 21544 - RNA, 22 nt, Homo sapiens
cucggggcagcucaguacagga

SEQ ID NO: 21545 - RNA, 23 nt, Homo sapiens
ucucgugacaugaugauccccga

SEQ ID NO: 21546 - RNA, 25 nt, Homo sapiens
acggagcugucccaacaccaccccu

SEQ ID NO: 21547 - RNA, 22 nt, Homo sapiens
gcggucccgcggcgccccgccu

SEQ ID NO: 21548 - RNA, 23 nt, Homo sapiens
cuccagccccuccagggcuuccu

SEQ ID NO: 21549 - RNA, 22 nt, Homo sapiens
ugcuguuagcccuagccccgca

SEQ ID NO: 21550 - RNA, 20 nt, Homo sapiens
uacugcuuccacagcucccc

SEQ ID NO: 21551 - RNA, 22 nt, Homo sapiens
ggaggccgggacgagugcaaua

SEQ ID NO: 21552 - RNA, 21 nt, Homo sapiens
gaccaaucgccguccccgccg

SEQ ID NO: 21553 - RNA, 23 nt, Homo sapiens
aaagucucgcucucugccccuca

SEQ ID NO: 21554 - RNA, 22 nt, Homo sapiens
gaauucaucacggccagccucu

SEQ ID NO: 21555 - RNA, 22 nt, Homo sapiens
gcggucccgcggcgccccgccu

SEQ ID NO: 21556 - RNA, 22 nt, Homo sapiens
ugcuguuagcccuagccccgca

SEQ ID NO: 21557 - RNA, 21 nt, Homo sapiens
ugcaggcugaucuucuucucu

SEQ ID NO: 21558 - RNA, 17 nt, Homo sapiens
gacagccucucccccac

SEQ ID NO: 21559 - RNA, 23 nt, Homo sapiens
gggagugaagacacggagccaga

SEQ ID NO: 21560 - RNA, 23 nt, Homo sapiens
cuaucugcacuagaugcaccuua

SEQ ID NO: 21561 - RNA, 22 nt, Homo sapiens
gaaccuaucuccccucuggacc

SEQ ID NO: 21562 - RNA, 22 nt, Homo sapiens
acaguucuucaacuggcagcuu

SEQ ID NO: 21563 - RNA, 20 nt, Homo sapiens
cuggaggaagggcccagagg

SEQ ID NO: 21564 - RNA, 22 nt, Homo sapiens
gccuaagacacaggcccagaga

SEQ ID NO: 21565 - RNA, 23 nt, Homo sapiens
aaaucagaaucacaccuggggga

SEQ ID NO: 21566 - RNA, 22 nt, Homo sapiens
auaaggauuuuuaggggcauua

SEQ ID NO: 21567 - RNA, 23 nt, Homo sapiens
acacucuaaagagaagcgcuuug

SEQ ID NO: 21568 - RNA, 21 nt, Homo sapiens
agaaaguacuucccucuggag

SEQ ID NO: 21569 - RNA, 21 nt, Homo sapiens
agaaagugcaucccucuggag

SEQ ID NO: 21570 - RNA, 19 nt, Homo sapiens
auuuugguacagcagcuca

SEQ ID NO: 21571 - RNA, 24 nt, Homo sapiens
acgcagagcccgaaagcccccagu

SEQ ID NO: 21572 - RNA, 22 nt, Homo sapiens
gcugaggcuguggggcuggagu

SEQ ID NO: 21573 - RNA, 20 nt, Homo sapiens
uacugcuuccacagcucccc

SEQ ID NO: 21574 - RNA, 22 nt, Homo sapiens
cacauggccaaaacagagaaga

SEQ ID NO: 21575 - RNA, 18 nt, Homo sapiens
gaaaugagggccagcuga

SEQ ID NO: 21576 - RNA, 18 nt, Homo sapiens
gaaaugagggccagcuga

SEQ ID NO: 21577 - RNA, 21 nt, Homo sapiens
ccccucccagccucccugcca

SEQ ID NO: 21578 - RNA, 20 nt, Homo sapiens
gcagcuguccgcccagacac

SEQ ID NO: 21579 - RNA, 18 nt, Homo sapiens
auucaaucuacugccuca

SEQ ID NO: 21580 - RNA, 22 nt, Homo sapiens
cggugagcacccggccccugcg

SEQ ID NO: 21581 - RNA, 22 nt, Homo sapiens
acugccugucugugccugcugu

SEQ ID NO: 21582 - RNA, 22 nt, Homo sapiens
accagguuccaccccagcaggc

SEQ ID NO: 21583 - RNA, 21 nt, Homo sapiens
gaaggaagugagugcagccac

SEQ ID NO: 21584 - RNA, 23 nt, Homo sapiens
guagugggccgagccgagugaca

SEQ ID NO: 21585 - RNA, 22 nt, Homo sapiens
agcucagaacccagaggucuca

SEQ ID NO: 21586 - RNA, 21 nt, Homo sapiens
ggggagcgggggcccugccuu

SEQ ID NO: 21587 - RNA, 22 nt, Homo sapiens
gaggcucagaauggcucaggag

SEQ ID NO: 21588 - RNA, 21 nt, Homo sapiens
auguaggccuuuagaucacuu

SEQ ID NO: 21589 - RNA, 23 nt, Homo sapiens
cuaucugcacuagaugcaccuua

SEQ ID NO: 21590 - RNA, 23 nt, Homo sapiens
cccaacagacauggcgguacuca

SEQ ID NO: 21591 - RNA, 22 nt, Homo sapiens
cagaagugggccgggcacaggg

SEQ ID NO: 21592 - RNA, 22 nt, Homo sapiens
acugggacuuuguaggccaguu

SEQ ID NO: 21593 - RNA, 22 nt, Homo sapiens
agcgggacuuugagggccaguu

SEQ ID NO: 21594 - RNA, 22 nt, Homo sapiens
ucacauuugccugcagagauuu

SEQ ID NO: 21595 - RNA, 22 nt, Homo sapiens
acaguucuucaacuggcagcuu

SEQ ID NO: 21596 - RNA, 22 nt, Homo sapiens
cuguuccugcugaacugagcca

SEQ ID NO: 21597 - RNA, 22 nt, Homo sapiens
aucgggaggggacugagccuga

SEQ ID NO: 21598 - RNA, 22 nt, Homo sapiens
cuacccacagacguaccaauca

SEQ ID NO: 21599 - RNA, 22 nt, Homo sapiens
ucaaugacucagguaaguugca

SEQ ID NO: 21600 - RNA, 20 nt, Homo sapiens
uacugcuuccacagcucccc

SEQ ID NO: 21601 - RNA, 22 nt, Homo sapiens
uccggggacgaacgggacgggu

SEQ ID NO: 21602 - RNA, 24 nt, Homo sapiens
acugcuggucuucagucagggcca

SEQ ID NO: 21603 - RNA, 22 nt, Homo sapiens
agacaacaaugccaaccucaca

SEQ ID NO: 21604 - RNA, 22 nt, Homo sapiens
uucacacugcaugcucugggua

SEQ ID NO: 21605 - RNA, 22 nt, Homo sapiens
uaaccgauuucagauggugcua

SEQ ID NO: 21606 - RNA, 20 nt, Homo sapiens
cuggaggaagggcccagagg

SEQ ID NO: 21607 - RNA, 22 nt, Homo sapiens
gccuaagacacaggcccagaga

SEQ ID NO: 21608 - RNA, 22 nt, Homo sapiens
acaaccagcuaagacacugcca

SEQ ID NO: 21609 - RNA, 22 nt, Homo sapiens
agggguucaccgagcaacauuc

SEQ ID NO: 21610 - RNA, 22 nt, Homo sapiens
ccucauggaaggguuccccacu

SEQ ID NO: 21611 - RNA, 21 nt, Homo sapiens
acuuuccaggauucauuaacu

SEQ ID NO: 21612 - RNA, 21 nt, Homo sapiens
caguagagauuguuucaacac

SEQ ID NO: 21613 - RNA, 22 nt, Homo sapiens
ggaggccgggacgagugcaaua

SEQ ID NO: 21614 - RNA, 21 nt, Homo sapiens
ccccucccagccucccugcca

SEQ ID NO: 21615 - RNA, 25 nt, Homo sapiens
aagaaagagucuugcuuugucgccc

SEQ ID NO: 21616 - RNA, 18 nt, Homo sapiens
aucacauucaccucccug

SEQ ID NO: 21617 - RNA, 20 nt, Homo sapiens
gcagaagcauuuccacacac

SEQ ID NO: 21618 - RNA, 21 nt, Homo sapiens
cggggugcacgggcggagggc

SEQ ID NO: 21619 - RNA, 22 nt, Homo sapiens
cacugguacaaggguugggaga

SEQ ID NO: 21620 - RNA, 21 nt, Homo sapiens
gaccaaucgccguccccgccg

SEQ ID NO: 21621 - RNA, 22 nt, Homo sapiens
cccaacaacaggaaacuaccua

SEQ ID NO: 21622 - RNA, 25 nt, Homo sapiens
agcuagucaagcgcgguuguggggg

SEQ ID NO: 21623 - RNA, 21 nt, Homo sapiens
aucugcacugucagcacuuua

SEQ ID NO: 21624 - RNA, 23 nt, Homo sapiens
gcuuugacaauaucauugcacug

SEQ ID NO: 21625 - RNA, 22 nt, Homo sapiens
aaagagguuaaccagguguguu

SEQ ID NO: 21626 - RNA, 22 nt, Homo sapiens
ugaauccuugaauagguguguu

SEQ ID NO: 21627 - RNA, 23 nt, Homo sapiens
ucucgugacaugaugauccccga

SEQ ID NO: 21628 - RNA, 21 nt, Homo sapiens
agguaauaccaauaccuugug

SEQ ID NO: 21629 - RNA, 22 nt, Homo sapiens
gcggucccgcggcgccccgccu

SEQ ID NO: 21630 - RNA, 23 nt, Homo sapiens
acaacaaaaucacuagucuucca

SEQ ID NO: 21631 - RNA, 22 nt, Homo sapiens
cacucuaaagggaggcacuuug

SEQ ID NO: 21632 - RNA, 22 nt, Homo sapiens
aaaauacauauauaucuacgua

SEQ ID NO: 21633 - RNA, 18 nt, Homo sapiens
aucacauucaccucccug

SEQ ID NO: 21634 - RNA, 23 nt, Homo sapiens
gggagugaagacacggagccaga

SEQ ID NO: 21635 - RNA, 21 nt, Homo sapiens
uagaaaggcuaggaccaaacc

SEQ ID NO: 21636 - RNA, 22 nt, Homo sapiens
ggagagccuccacccaacccuc

SEQ ID NO: 21637 - RNA, 22 nt, Homo sapiens
aagauguggaccauauuacaua

SEQ ID NO: 21638 - RNA, 21 nt, Homo sapiens
aagacgggaggagaggaguga

SEQ ID NO: 21639 - RNA, 19 nt, Homo sapiens
gggaaacguaugucaaccu

SEQ ID NO: 21640 - RNA, 22 nt, Homo sapiens
caagacacauuuggagagggac

SEQ ID NO: 21641 - RNA, 21 nt, Homo sapiens
cuggaggacggcaacagucag

SEQ ID NO: 21642 - RNA, 22 nt, Homo sapiens
aacuauacaaccuacuaccuca

SEQ ID NO: 21643 - RNA, 22 nt, Homo sapiens
aaccacacaaccuacuaccuca

SEQ ID NO: 21644 - RNA, 19 nt, Homo sapiens
agaaaccccagcagagaca

SEQ ID NO: 21645 - RNA, 22 nt, Homo sapiens
cacaaguucggaucuacggguu

SEQ ID NO: 21646 - RNA, 22 nt, Homo sapiens
aucagagcccucugagcuucag

SEQ ID NO: 21647 - RNA, 22 nt, Homo sapiens
ucacaguugccagcugagauua

SEQ ID NO: 21648 - RNA, 20 nt, Homo sapiens
guguguauacauuuauacau

SEQ ID NO: 21649 - RNA, 21 nt, Homo sapiens
agguaagcgcuguugcuagcc

SEQ ID NO: 21650 - RNA, 21 nt, Homo sapiens
agguaauaccaauaccuugug

SEQ ID NO: 21651 - RNA, 20 nt, Homo sapiens
acaaugagaacccauggucu

SEQ ID NO: 21652 - RNA, 22 nt, Homo sapiens
caaacaccauugucacacucca

SEQ ID NO: 21653 - RNA, 23 nt, Homo sapiens
agcaaaaaugugcuagugccaaa

SEQ ID NO: 21654 - RNA, 17 nt, Homo sapiens
uggcgcccgaacaggga

SEQ ID NO: 21655 - RNA, 23 nt, Homo sapiens
aggaacagcagcagcccgggccg

SEQ ID NO: 21656 - RNA, 21 nt, Homo sapiens
acaggauugagggggggcccu

SEQ ID NO: 21657 - RNA, 21 nt, Homo sapiens
ucaaucacagauagcaccccu

SEQ ID NO: 21658 - RNA, 23 nt, Homo sapiens
aaaucagaaucacaccuggggga

SEQ ID NO: 21659 - RNA, 24 nt, Homo sapiens
acgcagagcccgaaagcccccagu

SEQ ID NO: 21660 - RNA, 23 nt, Homo sapiens
cacugugggcccucuccgcacca

SEQ ID NO: 21661 - RNA, 20 nt, Homo sapiens
gcaagacaucacaagacucu

SEQ ID NO: 21662 - RNA, 20 nt, Homo sapiens
uccgccugucugaacaguga

SEQ ID NO: 21663 - RNA, 21 nt, Homo sapiens
cugaggagagaggaggugggg

SEQ ID NO: 21664 - RNA, 21 nt, Homo sapiens
uggggauuacacuucaacagg

SEQ ID NO: 21665 - RNA, 22 nt, Homo sapiens
cagaaagugcuucccucuagag

SEQ ID NO: 21666 - RNA, 22 nt, Homo sapiens
ucaggaacugccuuucucucca

SEQ ID NO: 21667 - RNA, 22 nt, Homo sapiens
uccacauggaguugcuguuaca

SEQ ID NO: 21668 - RNA, 22 nt, Homo sapiens
uagucaagugaagcagugggag

SEQ ID NO: 21669 - RNA, 21 nt, Homo sapiens
aucugcacugucagcacuuua

SEQ ID NO: 21670 - RNA, 23 nt, Homo sapiens
gcuuugacaauaucauugcacug

SEQ ID NO: 21671 - RNA, 23 nt, Homo sapiens
gcgcccaauuaaugucuguugau

SEQ ID NO: 21672 - RNA, 22 nt, Homo sapiens
guagaagggaaucuugcauaag

SEQ ID NO: 21673 - RNA, 22 nt, Homo sapiens
ccuggcacacaguagaccuuca

SEQ ID NO: 21674 - RNA, 22 nt, Homo sapiens
aggaaaccagcaaguguugacg

SEQ ID NO: 21675 - RNA, 22 nt, Homo sapiens
ugcaagccuugggugugggagg

SEQ ID NO: 21676 - RNA, 21 nt, Homo sapiens
uugucuaaccagucaccuguu

SEQ ID NO: 21677 - RNA, 22 nt, Homo sapiens
ccucaggcacggccgggccacc

SEQ ID NO: 21678 - RNA, 20 nt, Homo sapiens
uacugcuuccacagcucccc

SEQ ID NO: 21679 - RNA, 22 nt, Homo sapiens
cacauggccaaaacagagaaga

SEQ ID NO: 21680 - RNA, 22 nt, Homo sapiens
gugggguggguggucaggccga

SEQ ID NO: 21681 - RNA, 24 nt, Homo sapiens
acugcaggcuccagcuuccaggcu

SEQ ID NO: 21682 - RNA, 18 nt, Homo sapiens
cccccaccaccacgcccg

SEQ ID NO: 21683 - RNA, 23 nt, Homo sapiens
aaaaugcagauuccuggacucca

SEQ ID NO: 21684 - RNA, 21 nt, Homo sapiens
gggcaucugggacgcgcagga

SEQ ID NO: 21685 - RNA, 21 nt, Homo sapiens
gaccaaucgccguccccgccg

SEQ ID NO: 21686 - RNA, 22 nt, Homo sapiens
cggugagcacccggccccugcg

SEQ ID NO: 21687 - RNA, 23 nt, Homo sapiens
cggcucugucgucgaggcgcuca

SEQ ID NO: 21688 - RNA, 22 nt, Homo sapiens
gcggucccgcggcgccccgccu

SEQ ID NO: 21689 - RNA, 22 nt, Homo sapiens
ugcuguuagcccuagccccgca

SEQ ID NO: 21690 - RNA, 22 nt, Homo sapiens
ggcagagagucagagcgcggau

SEQ ID NO: 21691 - RNA, 22 nt, Homo sapiens
aggucucacuuuguugcccaga

SEQ ID NO: 21692 - RNA, 23 nt, Homo sapiens
cuacgcguauucuuaagcaauaa

SEQ ID NO: 21693 - RNA, 23 nt, Homo sapiens
gggagugaagacacggagccaga

SEQ ID NO: 21694 - RNA, 23 nt, Homo sapiens
gggagugaagacacggagccaga

SEQ ID NO: 21695 - RNA, 23 nt, Homo sapiens
cuaucugcacuagaugcaccuua

SEQ ID NO: 21696 - RNA, 20 nt, Homo sapiens
acagcaaggagggcaggagg

SEQ ID NO: 21697 - RNA, 22 nt, Homo sapiens
agucuucacaacagcccugugu

SEQ ID NO: 21698 - RNA, 22 nt, Homo sapiens
ggagagccuccacccaacccuc

SEQ ID NO: 21699 - RNA, 22 nt, Homo sapiens
gccagcuaacaauacacugccu

SEQ ID NO: 21700 - RNA, 22 nt, Homo sapiens
aggaaaccagcaaguguugacg

SEQ ID NO: 21701 - RNA, 25 nt, Homo sapiens
aaggagcucagaagcccugcccagc

SEQ ID NO: 21702 - RNA, 19 nt, Homo sapiens
gcucuaagaaagccacacu

SEQ ID NO: 21703 - RNA, 20 nt, Homo sapiens
aggggccucagccuccuggu

SEQ ID NO: 21704 - RNA, 20 nt, Homo sapiens
uccccacagacccagagccg

SEQ ID NO: 21705 - RNA, 22 nt, Homo sapiens
ucggucccucgggccagggcag

SEQ ID NO: 21706 - RNA, 23 nt, Homo sapiens
cacaaauucggaucuacagggua

SEQ ID NO: 21707 - RNA, 23 nt, Homo sapiens
cacaaauucgguucuacagggua

SEQ ID NO: 21708 - RNA, 17 nt, Homo sapiens
uggcgcccgaacaggga

SEQ ID NO: 21709 - RNA, 17 nt, Homo sapiens
ggguggcagcgguggga

SEQ ID NO: 21710 - RNA, 22 nt, Homo sapiens
augcccuuucaucauugcacug

SEQ ID NO: 21711 - RNA, 22 nt, Homo sapiens
accuaauauaucaaacauauca

SEQ ID NO: 21712 - RNA, 21 nt, Homo sapiens
aacccaauaucaaacauauca

SEQ ID NO: 21713 - RNA, 21 nt, Homo sapiens
accuauccugaauuacuugaa

SEQ ID NO: 21714 - RNA, 22 nt, Homo sapiens
ccucauggaaggguuccccacu

SEQ ID NO: 21715 - RNA, 22 nt, Homo sapiens
cucagagcagacgugguucuca

SEQ ID NO: 21716 - RNA, 20 nt, Homo sapiens
cccugcgccaucuccucuac

SEQ ID NO: 21717 - RNA, 20 nt, Homo sapiens
uacugcuuccacagcucccc

SEQ ID NO: 21718 - RNA, 22 nt, Homo sapiens
gggagaggucucccugcgcaca

SEQ ID NO: 21719 - RNA, 22 nt, Homo sapiens
ugaagaagggggggaagggcgu

SEQ ID NO: 21720 - RNA, 23 nt, Homo sapiens
gggagugaagacacggagccaga

SEQ ID NO: 21721 - RNA, 21 nt, Homo sapiens
gggcaucugggacgcgcagga

SEQ ID NO: 21722 - RNA, 20 nt, Homo sapiens
cccgccgcgucgcccugggg

SEQ ID NO: 21723 - RNA, 22 nt, Homo sapiens
ucaucucgcccgcaaagaccca

SEQ ID NO: 21724 - RNA, 21 nt, Homo sapiens
uucuaggauaggcccaggggc

SEQ ID NO: 21725 - RNA, 23 nt, Homo sapiens
cugcagaacuguucccgcugcua

SEQ ID NO: 21726 - RNA, 20 nt, Homo sapiens
aggggccucagccuccuggu

SEQ ID NO: 21727 - RNA, 23 nt, Homo sapiens
acaacaaaaucacuagucuucca

SEQ ID NO: 21728 - RNA, 22 nt, Homo sapiens
ccacacacuuccuuacauucca

SEQ ID NO: 21729 - RNA, 22 nt, Homo sapiens
aucagagcccucugagcuucag

SEQ ID NO: 21730 - RNA, 22 nt, Homo sapiens
agacaacaaugccaaccucaca

SEQ ID NO: 21731 - RNA, 21 nt, Homo sapiens
aggcggcaggcacaggacugg

SEQ ID NO: 21732 - RNA, 22 nt, Homo sapiens
uagucaagugaagcagugggag

SEQ ID NO: 21733 - RNA, 23 nt, Homo sapiens
acggcuaguggaccaggugaagu

SEQ ID NO: 21734 - RNA, 22 nt, Homo sapiens
gcugccguauaugugaugucac

SEQ ID NO: 21735 - RNA, 23 nt, Homo sapiens
caugagugacgcccucuggagua

SEQ ID NO: 21736 - RNA, 21 nt, Homo sapiens
caucaccuuccuucuccucca

SEQ ID NO: 21737 - RNA, 20 nt, Homo sapiens
aguacaucaucuauacugua

SEQ ID NO: 21738 - RNA, 22 nt, Homo sapiens
ugggguauuugacaaacugaca

SEQ ID NO: 21739 - RNA, 23 nt, Homo sapiens
acauuuuucguuauugcucuuga

SEQ ID NO: 21740 - RNA, 22 nt, Homo sapiens
gagcccuggacuaggagucagc

SEQ ID NO: 21741 - RNA, 21 nt, Homo sapiens
ccuucugacuccaaguccagu

SEQ ID NO: 21742 - RNA, 22 nt, Homo sapiens
ccuggcacacaguagaccuuca

SEQ ID NO: 21743 - RNA, 22 nt, Homo sapiens
uuucaguuaucaaucugucaca

SEQ ID NO: 21744 - RNA, 21 nt, Homo sapiens
cugaaaccaaguaugggucgc

SEQ ID NO: 21745 - RNA, 22 nt, Homo sapiens
uggugauucacaaagaaaucca

SEQ ID NO: 21746 - RNA, 23 nt, Homo sapiens
cacaaauucggaucuacagggua

SEQ ID NO: 21747 - RNA, 23 nt, Homo sapiens
cacaaauucgguucuacagggua

SEQ ID NO: 21748 - RNA, 22 nt, Homo sapiens
gaggcucagaauggcucaggag

SEQ ID NO: 21749 - RNA, 26 nt, Homo sapiens
aaccaucucauacaaaccaacuacuu

SEQ ID NO: 21750 - RNA, 17 nt, Homo sapiens
uggcgcccgaacaggga

SEQ ID NO: 21751 - RNA, 22 nt, Homo sapiens
augcccuuucaucauugcacug

SEQ ID NO: 21752 - RNA, 22 nt, Homo sapiens
ccaucuuuaccagacaguguua

SEQ ID NO: 21753 - RNA, 22 nt, Homo sapiens
acaucguuaccagacaguguua

SEQ ID NO: 21754 - RNA, 22 nt, Homo sapiens
ugggguauuugacaaacugaca

SEQ ID NO: 21755 - RNA, 21 nt, Homo sapiens
gcggaacuuagccacugugaa

SEQ ID NO: 21756 - RNA, 21 nt, Homo sapiens
gcagaacuuagccacugugaa

SEQ ID NO: 21757 - RNA, 23 nt, Homo sapiens
gcgguagcggaagcgguaacugg

SEQ ID NO: 21758 - RNA, 21 nt, Homo sapiens
cuggaggacggcaacagucag

SEQ ID NO: 21759 - RNA, 21 nt, Homo sapiens
ccccucccagccucccugcca

SEQ ID NO: 21760 - RNA, 22 nt, Homo sapiens
caaacaccauugucacacucca

SEQ ID NO: 21761 - RNA, 22 nt, Homo sapiens
ucccucacacagaauuccagaa

SEQ ID NO: 21762 - RNA, 22 nt, Homo sapiens
augcuuuuugggguaagggcuu

SEQ ID NO: 21763 - RNA, 23 nt, Homo sapiens
cuaucugcacuagaugcaccuua

SEQ ID NO: 21764 - RNA, 20 nt, Homo sapiens
cccgccgcgucgcccugggg

SEQ ID NO: 21765 - RNA, 22 nt, Homo sapiens
uaaccgauuucagauggugcua

SEQ ID NO: 21766 - RNA, 22 nt, Homo sapiens
aggaaaccagcaaguguugacg

SEQ ID NO: 21767 - RNA, 22 nt, Homo sapiens
aaagaugagcuaaugguaauau

SEQ ID NO: 21768 - RNA, 20 nt, Homo sapiens
guguguauacauuuauacau

SEQ ID NO: 21769 - RNA, 22 nt, Homo sapiens
ucggucccucgggccagggcag

SEQ ID NO: 21770 - RNA, 22 nt, Homo sapiens
ucggucccucgggccagggcag

SEQ ID NO: 21771 - RNA, 21 nt, Homo sapiens
gagcugcauccuggcuccggg

SEQ ID NO: 21772 - RNA, 20 nt, Homo sapiens
cugcgggaggacagggcuca

SEQ ID NO: 21773 - RNA, 23 nt, Homo sapiens
aaaaugcagauuccuggacucca

SEQ ID NO: 21774 - RNA, 21 nt, Homo sapiens
acuagacugugagcuccucga

SEQ ID NO: 21775 - RNA, 23 nt, Homo sapiens
aggaacagcagcagcccgggccg

SEQ ID NO: 21776 - RNA, 21 nt, Homo sapiens
gaccaaucgccguccccgccg

SEQ ID NO: 21777 - RNA, 21 nt, Homo sapiens
acaggauugagggggggcccu

SEQ ID NO: 21778 - RNA, 22 nt, Homo sapiens
agcugaguguaggauguuuaca

SEQ ID NO: 21779 - RNA, 22 nt, Homo sapiens
caacaaaaucacugaugcugga

SEQ ID NO: 21780 - RNA, 22 nt, Homo sapiens
auaaggauuuuuaggggcauua

SEQ ID NO: 21781 - RNA, 22 nt, Homo sapiens
gccaccuucaaaugggaagucu

SEQ ID NO: 21782 - RNA, 22 nt, Homo sapiens
gcggucccgcggcgccccgccu

SEQ ID NO: 21783 - RNA, 21 nt, Homo sapiens
cugaggagagaggaggugggg

SEQ ID NO: 21784 - RNA, 21 nt, Homo sapiens
acccaguagccagauguagcu

SEQ ID NO: 21785 - RNA, 22 nt, Homo sapiens
ugggguauuugacaaacugaca

SEQ ID NO: 21786 - RNA, 22 nt, Homo sapiens
gagcccuggacuaggagucagc

SEQ ID NO: 21787 - RNA, 22 nt, Homo sapiens
auaaggauuuuuaggggcauua

SEQ ID NO: 21788 - RNA, 20 nt, Homo sapiens
uaugaacaauuucuaggaau

SEQ ID NO: 21789 - RNA, 23 nt, Homo sapiens
augcaaaguugcucggguaaccu

SEQ ID NO: 21790 - RNA, 22 nt, Homo sapiens
ccucauggaaggguuccccacu

SEQ ID NO: 21791 - RNA, 22 nt, Homo sapiens
gccaccuucaaaugggaagucu

SEQ ID NO: 21792 - RNA, 19 nt, Homo sapiens
ucccacaggaagcagacac

SEQ ID NO: 21793 - RNA, 22 nt, Homo sapiens
aaggugauggucagcagacaua

SEQ ID NO: 21794 - RNA, 22 nt, Homo sapiens
ggcagagagucagagcgcggau

SEQ ID NO: 21795 - RNA, 22 nt, Homo sapiens
agcuagugagaagucaaugccu

SEQ ID NO: 21796 - RNA, 21 nt, Homo sapiens
cggggugcacgggcggagggc

SEQ ID NO: 21797 - RNA, 22 nt, Homo sapiens
acaaaguucugugaugcacuga

SEQ ID NO: 21798 - RNA, 22 nt, Homo sapiens
cacugguacaaggguugggaga

SEQ ID NO: 21799 - RNA, 25 nt, Homo sapiens
accaacggaccuacuucccuccgcc

SEQ ID NO: 21800 - RNA, 20 nt, Homo sapiens
uacugcuuccacagcucccc

SEQ ID NO: 21801 - RNA, 22 nt, Homo sapiens
ggcagagagucagagcgcggau

SEQ ID NO: 21802 - RNA, 22 nt, Homo sapiens
aacuauacaaccuacuaccuca

SEQ ID NO: 21803 - RNA, 22 nt, Homo sapiens
aaccacacaaccuacuaccuca

SEQ ID NO: 21804 - RNA, 19 nt, Homo sapiens
agaaaccccagcagagaca

SEQ ID NO: 21805 - RNA, 23 nt, Homo sapiens
accacaggagucugagcauuuga

SEQ ID NO: 21806 - RNA, 22 nt, Homo sapiens
agccacaaucaccuucugaucu

SEQ ID NO: 21807 - RNA, 22 nt, Homo sapiens
gcacacaauaaauguuugcuga

SEQ ID NO: 21808 - RNA, 21 nt, Homo sapiens
cugaaaccaaguaugggucgc

SEQ ID NO: 21809 - RNA, 20 nt, Homo sapiens
guguguauacauuuauacau

SEQ ID NO: 21810 - RNA, 21 nt, Homo sapiens
acaauccuagagcacaagaag

SEQ ID NO: 21811 - RNA, 22 nt, Homo sapiens
caagacacauuuggagagggac

SEQ ID NO: 21812 - RNA, 23 nt, Homo sapiens
cacaaauucggaucuacagggua

SEQ ID NO: 21813 - RNA, 23 nt, Homo sapiens
cacaaauucgguucuacagggua

SEQ ID NO: 21814 - RNA, 23 nt, Homo sapiens
gucacaucccucccaagacccuc

SEQ ID NO: 21815 - RNA, 21 nt, Homo sapiens
uagaaaggcuaggaccaaacc

SEQ ID NO: 21816 - RNA, 22 nt, Homo sapiens
ucaacaucagucugauaagcua

SEQ ID NO: 21817 - RNA, 23 nt, Homo sapiens
cgugagcuccuggaggacaggga

SEQ ID NO: 21818 - RNA, 23 nt, Homo sapiens
acaccccaaaaucgaagcacuuc

SEQ ID NO: 21819 - RNA, 23 nt, Homo sapiens
aaagucucgcucucugccccuca

SEQ ID NO: 21820 - RNA, 22 nt, Homo sapiens
gauagagugcagaccagggucu

SEQ ID NO: 21821 - RNA, 21 nt, Homo sapiens
cucacucagauggccaacuca

SEQ ID NO: 21822 - RNA, 21 nt, Homo sapiens
acuagcuuauacauaaaauua

SEQ ID NO: 21823 - RNA, 22 nt, Homo sapiens
cugcucaaacccuccaaugacu

SEQ ID NO: 21824 - RNA, 17 nt, Homo sapiens
uggcgcccgaacaggga

SEQ ID NO: 21825 - RNA, 22 nt, Homo sapiens
agaaagcgcuuuccuuuguaga

SEQ ID NO: 21826 - RNA, 21 nt, Homo sapiens
aacggaaccacuagugacuug

SEQ ID NO: 21827 - RNA, 22 nt, Homo sapiens
cacuuaucagguuguauuauaa

SEQ ID NO: 21828 - RNA, 23 nt, Homo sapiens
ccacccaaugaccuacuccaaga

SEQ ID NO: 21829 - RNA, 21 nt, Homo sapiens
gaccaagaaauagccuuucaa

SEQ ID NO: 21830 - RNA, 20 nt, Homo sapiens
gaaagggcuucccuuuguag

SEQ ID NO: 21831 - RNA, 22 nt, Homo sapiens
acacucuaaagggaaccauuuu

SEQ ID NO: 21832 - RNA, 22 nt, Homo sapiens
gagaaagugcuucccuuuguag

SEQ ID NO: 21833 - RNA, 22 nt, Homo sapiens
aaagacguggagaaauuagaau

SEQ ID NO: 21834 - RNA, 23 nt, Homo sapiens
acucagaaggacaaguagaguuu

SEQ ID NO: 21835 - RNA, 23 nt, Homo sapiens
ucauacagcuagauaaccaaaga

SEQ ID NO: 21836 - RNA, 21 nt, Homo sapiens
aucugcacugucagcacuuua

SEQ ID NO: 21837 - RNA, 23 nt, Homo sapiens
ggaagccaucaagucgcugcagg

SEQ ID NO: 21838 - RNA, 21 nt, Homo sapiens
gagcugcauccuggcuccggg

SEQ ID NO: 21839 - RNA, 21 nt, Homo sapiens
ccccucccagccucccugcca

SEQ ID NO: 21840 - RNA, 17 nt, Homo sapiens
gggagaggaggaggcga

SEQ ID NO: 21841 - RNA, 21 nt, Homo sapiens
gaccaaucgccguccccgccg

SEQ ID NO: 21842 - RNA, 22 nt, Homo sapiens
cggugagcacccggccccugcg

SEQ ID NO: 21843 - RNA, 22 nt, Homo sapiens
uggcagcagcggagggggcaga

SEQ ID NO: 21844 - RNA, 20 nt, Homo sapiens
ccagcagcaccuggggcagu

SEQ ID NO: 21845 - RNA, 22 nt, Homo sapiens
acaaccagcuaagacacugcca

SEQ ID NO: 21846 - RNA, 23 nt, Homo sapiens
gcaaucagcuaacuacacugccu

SEQ ID NO: 21847 - RNA, 22 nt, Homo sapiens
accagcuaacaauacacugcca

SEQ ID NO: 21848 - RNA, 22 nt, Homo sapiens
gccagcuaacaauacacugccu

SEQ ID NO: 21849 - RNA, 21 nt, Homo sapiens
auccuguacugagcugccccg

SEQ ID NO: 21850 - RNA, 22 nt, Homo sapiens
aguccagauucugugcccacca

SEQ ID NO: 21851 - RNA, 19 nt, Homo sapiens
guccugaauuccgcagccu

SEQ ID NO: 21852 - RNA, 22 nt, Homo sapiens
gcacauguucugcggcccacca

SEQ ID NO: 21853 - RNA, 22 nt, Homo sapiens
gcggucccgcggcgccccgccu

SEQ ID NO: 21854 - RNA, 21 nt, Homo sapiens
caucaccuuccuucuccucca

SEQ ID NO: 21855 - RNA, 23 nt, Homo sapiens
aggaacagcagcagcccgggccg

SEQ ID NO: 21856 - RNA, 21 nt, Homo sapiens
aguucucccaacguaaaccca

SEQ ID NO: 21857 - RNA, 23 nt, Homo sapiens
aggaacagcagcagcccgggccg

SEQ ID NO: 21858 - RNA, 22 nt, Homo sapiens
ucaggaacugccuuucucucca

SEQ ID NO: 21859 - RNA, 21 nt, Homo sapiens
gaccaaucgccguccccgccg

SEQ ID NO: 21860 - RNA, 23 nt, Homo sapiens
aaagucucgcucucugccccuca

SEQ ID NO: 21861 - RNA, 21 nt, Homo sapiens
aaacaucacugcaagucuuaa

SEQ ID NO: 21862 - RNA, 22 nt, Homo sapiens
aaagugcuucuuaccuccagau

SEQ ID NO: 21863 - RNA, 21 nt, Homo sapiens
acuccaaagggaagcgccuuc

SEQ ID NO: 21864 - RNA, 22 nt, Homo sapiens
cgcucuaaagggaagcgccuuc

SEQ ID NO: 21865 - RNA, 19 nt, Homo sapiens
guugggaucacaggcgccc

SEQ ID NO: 21866 - RNA, 19 nt, Homo sapiens
guugggaucacaggcgccc

SEQ ID NO: 21867 - RNA, 22 nt, Homo sapiens
gccaccuucaaaugggaagucu

SEQ ID NO: 21868 - RNA, 21 nt, Homo sapiens
cacaacccuaguggcgccauu

SEQ ID NO: 21869 - RNA, 24 nt, Homo sapiens
acgcgcaggccagagacccaggca

SEQ ID NO: 21870 - RNA, 22 nt, Homo sapiens
gcggucccgcggcgccccgccu

SEQ ID NO: 21871 - RNA, 22 nt, Homo sapiens
gcggucccgcggcgccccgccu

SEQ ID NO: 21872 - RNA, 20 nt, Homo sapiens
cugcgggaggacagggcuca

SEQ ID NO: 21873 - RNA, 22 nt, Homo sapiens
ugaagaagggggggaagggcgu

SEQ ID NO: 21874 - RNA, 21 nt, Homo sapiens
uggggauuacacuucaacagg

SEQ ID NO: 21875 - RNA, 22 nt, Homo sapiens
ucccucacacagaauuccagaa

SEQ ID NO: 21876 - RNA, 22 nt, Homo sapiens
augcuuuuugggguaagggcuu

SEQ ID NO: 21877 - RNA, 22 nt, Homo sapiens
agaaaaugccccucaguuuuga

SEQ ID NO: 21878 - RNA, 22 nt, Homo sapiens
uccacauggaguugcuguuaca

SEQ ID NO: 21879 - RNA, 20 nt, Homo sapiens
acauuacuguuaucaaaaca

SEQ ID NO: 21880 - RNA, 22 nt, Homo sapiens
agccacaaucaccuucugaucu

SEQ ID NO: 21881 - RNA, 22 nt, Homo sapiens
acaaccagcuaagacacugcca

SEQ ID NO: 21882 - RNA, 23 nt, Homo sapiens
gcaaucagcuaacuacacugccu

SEQ ID NO: 21883 - RNA, 23 nt, Homo sapiens
gcgcccaauuaaugucuguugau

SEQ ID NO: 21884 - RNA, 22 nt, Homo sapiens
accagcuaacaauacacugcca

SEQ ID NO: 21885 - RNA, 22 nt, Homo sapiens
gccagcuaacaauacacugccu

SEQ ID NO: 21886 - RNA, 22 nt, Homo sapiens
gcaaaaguaauugagauuuuug

SEQ ID NO: 21887 - RNA, 22 nt, Homo sapiens
gcaaaaguaacugcaguuuugg

SEQ ID NO: 21888 - RNA, 21 nt, Homo sapiens
cugaaaccaaguaugggucgc

SEQ ID NO: 21889 - RNA, 19 nt, Homo sapiens
uagcauacagauacgccca

SEQ ID NO: 21890 - RNA, 21 nt, Homo sapiens
gguggagcccugagaaccgga

SEQ ID NO: 21891 - RNA, 20 nt, Homo sapiens
uccccacagacccagagccg

SEQ ID NO: 21892 - RNA, 22 nt, Homo sapiens
ccucgggauggcgcccguucac

SEQ ID NO: 21893 - RNA, 20 nt, Homo sapiens
uacugcuuccacagcucccc

SEQ ID NO: 21894 - RNA, 24 nt, Homo sapiens
ucacagguuaaagggucucaggga

SEQ ID NO: 21895 - RNA, 22 nt, Homo sapiens
ucacaaguuagggucucaggga

SEQ ID NO: 21896 - RNA, 23 nt, Homo sapiens
agcccuguucuacagcccugagg

SEQ ID NO: 21897 - RNA, 19 nt, Homo sapiens
ucccugauccaaaaaucca

SEQ ID NO: 21898 - RNA, 18 nt, Homo sapiens
aucacauucaccucccug

SEQ ID NO: 21899 - RNA, 22 nt, Homo sapiens
cagaagugggccgggcacaggg

SEQ ID NO: 21900 - RNA, 21 nt, Homo sapiens
gcagaacuuagccacugugaa

SEQ ID NO: 21901 - RNA, 22 nt, Homo sapiens
cacucagcaccaggauauuguu

SEQ ID NO: 21902 - RNA, 23 nt, Homo sapiens
acggcuaguggaccaggugaagu

SEQ ID NO: 21903 - RNA, 22 nt, Homo sapiens
gccagcuaacaauacacugccu

SEQ ID NO: 21904 - RNA, 22 nt, Homo sapiens
ccuggcacacaguagaccuuca

SEQ ID NO: 21905 - RNA, 22 nt, Homo sapiens
gcaaaaguaauugagauuuuug

SEQ ID NO: 21906 - RNA, 23 nt, Homo sapiens
uguaggcuggggauaaaugaaua

SEQ ID NO: 21907 - RNA, 20 nt, Homo sapiens
cccugcgccaucuccucuac

SEQ ID NO: 21908 - RNA, 22 nt, Homo sapiens
cgcauuauuacucacgguacga

SEQ ID NO: 21909 - RNA, 23 nt, Homo sapiens
acucaccgacagcguugaauguu

SEQ ID NO: 21910 - RNA, 23 nt, Homo sapiens
acccaccgacagcaaugaauguu

SEQ ID NO: 21911 - RNA, 22 nt, Homo sapiens
acucaccgacagguugaauguu

SEQ ID NO: 21912 - RNA, 23 nt, Homo sapiens
acccaccgacaacaaugaauguu

SEQ ID NO: 21913 - RNA, 22 nt, Homo sapiens
agcccaaaaggagaauucuuug

SEQ ID NO: 21914 - RNA, 22 nt, Homo sapiens
ucaacaucagucugauaagcua

SEQ ID NO: 21915 - RNA, 21 nt, Homo sapiens
ggaaaucccuggcaaugugau

SEQ ID NO: 21916 - RNA, 21 nt, Homo sapiens
gguaaucccuggcaaugugau

SEQ ID NO: 21917 - RNA, 22 nt, Homo sapiens
ucgcccucucaacccagcuuuu

SEQ ID NO: 21918 - RNA, 22 nt, Homo sapiens
uugcccucucaacccagcuuuu

SEQ ID NO: 21919 - RNA, 20 nt, Homo sapiens
acccucucaacccagcuuuu

SEQ ID NO: 21920 - RNA, 19 nt, Homo sapiens
uccucucaacccagcuuuu

SEQ ID NO: 21921 - RNA, 21 nt, Homo sapiens
ugcaaugcaacuacaaugcac

SEQ ID NO: 21922 - RNA, 22 nt, Homo sapiens
acacaccaaggauaauuucucc

SEQ ID NO: 21923 - RNA, 22 nt, Homo sapiens
aagaagugcaccgcgaauguuu

SEQ ID NO: 21924 - RNA, 23 nt, Homo sapiens
aaucgcgguuuauaccaaaugaa

SEQ ID NO: 21925 - RNA, 21 nt, Homo sapiens
guucuaacccauuguggccaa

SEQ ID NO: 21926 - RNA, 23 nt, Homo sapiens
uuuauugugguagauacuauuag

SEQ ID NO: 21927 - RNA, 19 nt, Homo sapiens
ucagcaguaccagccuaga

SEQ ID NO: 21928 - RNA, 23 nt, Homo sapiens
uguaggcuggggauaaaugaaua

SEQ ID NO: 21929 - RNA, 21 nt, Homo sapiens
uggggauuacacuucaacagg

SEQ ID NO: 21930 - RNA, 23 nt, Homo sapiens
ucacauaggaauaaaaagccaua

SEQ ID NO: 21931 - RNA, 23 nt, Homo sapiens
ucacauaggaaugaaaagccaua

SEQ ID NO: 21932 - RNA, 20 nt, Homo sapiens
uacugcuuccacagcucccc

SEQ ID NO: 21933 - RNA, 24 nt, Homo sapiens
ugggagaaccucccugcuucugcu

SEQ ID NO: 21934 - RNA, 22 nt, Homo sapiens
uaaccgauuucagauggugcua

SEQ ID NO: 21935 - RNA, 23 nt, Homo sapiens
gcgcccaauuaaugucuguugau

SEQ ID NO: 21936 - RNA, 22 nt, Homo sapiens
gaauucaucacggccagccucu

SEQ ID NO: 21937 - RNA, 23 nt, Homo sapiens
ccuucucagaaaggugaaauuua

SEQ ID NO: 21938 - RNA, 23 nt, Homo sapiens
ccuucucagaaaggugaaauuua

SEQ ID NO: 21939 - RNA, 22 nt, Homo sapiens
acacaccaaggauaauuucucc

SEQ ID NO: 21940 - RNA, 22 nt, Homo sapiens
acacaccaaggauaauuucucc

SEQ ID NO: 21941 - RNA, 21 nt, Homo sapiens
aguucucccaacguaaaccca

SEQ ID NO: 21942 - RNA, 21 nt, Homo sapiens
caguagagauuguuucaacac

SEQ ID NO: 21943 - RNA, 17 nt, Homo sapiens
uggaggccccagcgaga

SEQ ID NO: 21944 - RNA, 22 nt, Homo sapiens
ucccucacacagaauuccagaa

SEQ ID NO: 21945 - RNA, 20 nt, Homo sapiens
gcagaagcauuuccacacac

SEQ ID NO: 21946 - RNA, 23 nt, Homo sapiens
gggagugaagacacggagccaga

SEQ ID NO: 21947 - RNA, 21 nt, Homo sapiens
ugcaaacccugcaugugggag

SEQ ID NO: 21948 - RNA, 22 nt, Homo sapiens
ggagagccuccacccaacccuc

SEQ ID NO: 21949 - RNA, 22 nt, Homo sapiens
agcugaguguaggauguuuaca

SEQ ID NO: 21950 - RNA, 22 nt, Homo sapiens
caacaaaaucacugaugcugga

SEQ ID NO: 21951 - RNA, 22 nt, Homo sapiens
gaauucaucacggccagccucu

SEQ ID NO: 21952 - RNA, 23 nt, Homo sapiens
acacucuaaagagaagcgcuuug

SEQ ID NO: 21953 - RNA, 21 nt, Homo sapiens
agaaaguacuucccucuggag

SEQ ID NO: 21954 - RNA, 21 nt, Homo sapiens
agaaagugcaucccucuggag

SEQ ID NO: 21955 - RNA, 22 nt, Homo sapiens
ugcaagccuugggugugggagg

SEQ ID NO: 21956 - RNA, 23 nt, Homo sapiens
acacacucacacacacacacuca

SEQ ID NO: 21957 - RNA, 22 nt, Homo sapiens
gcaaaaguaauugcagugugug

SEQ ID NO: 21958 - RNA, 21 nt, Homo sapiens
caucaccuuccuucuccucca

SEQ ID NO: 21959 - RNA, 20 nt, Homo sapiens
ugucuccacagggcucuuua

SEQ ID NO: 21960 - RNA, 22 nt, Homo sapiens
augcccuuucaucauugcacug

SEQ ID NO: 21961 - RNA, 21 nt, Homo sapiens
uucuaggauaggcccaggggc

SEQ ID NO: 21962 - RNA, 23 nt, Homo sapiens
aaaucagaaucacaccuggggga

SEQ ID NO: 21963 - RNA, 25 nt, Homo sapiens
acggagcugucccaacaccaccccu

SEQ ID NO: 21964 - RNA, 24 nt, Homo sapiens
acgcagagcccgaaagcccccagu

SEQ ID NO: 21965 - RNA, 21 nt, Homo sapiens
aagggucaguaagcacccgcg

SEQ ID NO: 21966 - RNA, 20 nt, Homo sapiens
uacugcuuccacagcucccc

SEQ ID NO: 21967 - RNA, 23 nt, Homo sapiens
aacaggugcucaaauaagacuug

SEQ ID NO: 21968 - RNA, 22 nt, Homo sapiens
ucccucacacagaauuccagaa

SEQ ID NO: 21969 - RNA, 20 nt, Homo sapiens
aguacaucaucuauacugua

SEQ ID NO: 21970 - RNA, 23 nt, Homo sapiens
guaaauagagguuuaauuaacac

SEQ ID NO: 21971 - RNA, 23 nt, Homo sapiens
aauaaauuaaauuuauauuacag

SEQ ID NO: 21972 - RNA, 21 nt, Homo sapiens
ugcaaugcaacuacaaugcac

SEQ ID NO: 21973 - RNA, 21 nt, Homo sapiens
ucuacucacagaagugucaau

SEQ ID NO: 21974 - RNA, 21 nt, Homo sapiens
agagguugacuguauaauauu

SEQ ID NO: 21975 - RNA, 21 nt, Homo sapiens
cacaaccucaguguuuccagg

SEQ ID NO: 21976 - RNA, 22 nt, Homo sapiens
gaggcucagaauggcucaggag

SEQ ID NO: 21977 - RNA, 21 nt, Homo sapiens
aaaagcuaagucaucauauau

SEQ ID NO: 21978 - RNA, 22 nt, Homo sapiens
ugagugcuugcuaggugccaag

SEQ ID NO: 21979 - RNA, 22 nt, Homo sapiens
accuaauauaucaaacauauca

SEQ ID NO: 21980 - RNA, 22 nt, Homo sapiens
cccaacaacaggaaacuaccua

SEQ ID NO: 21981 - RNA, 22 nt, Homo sapiens
ucacaguugccagcugagauua

SEQ ID NO: 21982 - RNA, 22 nt, Homo sapiens
cucaauagacugugagcuccuu

SEQ ID NO: 21983 - RNA, 23 nt, Homo sapiens
acauuuuucguuauugcucuuga

SEQ ID NO: 21984 - RNA, 22 nt, Homo sapiens
aucgggaggggacugagccuga

SEQ ID NO: 21985 - RNA, 24 nt, Homo sapiens
cagaaagugcuuucuuuuggagaa

SEQ ID NO: 21986 - RNA, 20 nt, Homo sapiens
ggcauucaccgcgugccuua

SEQ ID NO: 21987 - RNA, 22 nt, Homo sapiens
cagaaagugcuucccucuagag

SEQ ID NO: 21988 - RNA, 21 nt, Homo sapiens
cacucugaagggaagcgcuuu

SEQ ID NO: 21989 - RNA, 21 nt, Homo sapiens
ccucuaaagagaagcgcuuuc

SEQ ID NO: 21990 - RNA, 22 nt, Homo sapiens
acacucuaaaaggaugcacuuu

SEQ ID NO: 21991 - RNA, 22 nt, Homo sapiens
cagaaagcgcuucccucuagag

SEQ ID NO: 21992 - RNA, 22 nt, Homo sapiens
cagaaagcgcuucccucuagag

SEQ ID NO: 21993 - RNA, 22 nt, Homo sapiens
aacacucuaaaaggaggcacuu

SEQ ID NO: 21994 - RNA, 22 nt, Homo sapiens
cagaaagugcuucccucuagag

SEQ ID NO: 21995 - RNA, 22 nt, Homo sapiens
acacucuaaagggaaccauuuu

SEQ ID NO: 21996 - RNA, 23 nt, Homo sapiens
acccucuauagggaagcgcguuc

SEQ ID NO: 21997 - RNA, 22 nt, Homo sapiens
cagaaagugcuucccucuagag

SEQ ID NO: 21998 - RNA, 21 nt, Homo sapiens
ucccagcacacauuuagcuca

SEQ ID NO: 21999 - RNA, 23 nt, Homo sapiens
cccagcuagauuguaagcuccuu

SEQ ID NO: 22000 - RNA, 22 nt, Homo sapiens
cacucuaaagggaggcacuuug

SEQ ID NO: 22001 - RNA, 23 nt, Homo sapiens
agcaaaaaugugcuagugccaaa

SEQ ID NO: 22002 - RNA, 26 nt, Homo sapiens
uuucagaauuugcugccaucaucauc

SEQ ID NO: 22003 - RNA, 23 nt, Homo sapiens
cacaaauucggaucuacagggua

SEQ ID NO: 22004 - RNA, 21 nt, Homo sapiens
ucuccagaucagggcagucca

SEQ ID NO: 22005 - RNA, 17 nt, Homo sapiens
caccugaauuacuugaa

SEQ ID NO: 22006 - RNA, 21 nt, Homo sapiens
aggcggcaggcacaggacugg

SEQ ID NO: 22007 - RNA, 23 nt, Homo sapiens
cuaccugcacuauaagcacuuua

SEQ ID NO: 22008 - RNA, 22 nt, Homo sapiens
cacucagcggccguuuccccaa

SEQ ID NO: 22009 - RNA, 23 nt, Homo sapiens
uccaaucaguuccugaugcagua

SEQ ID NO: 22010 - RNA, 22 nt, Homo sapiens
agccuauccuggauuacuugaa

SEQ ID NO: 22011 - RNA, 21 nt, Homo sapiens
accuauccugaauuacuugaa

SEQ ID NO: 22012 - RNA, 22 nt, Homo sapiens
cagcauggaguccuccagguug

SEQ ID NO: 22013 - RNA, 22 nt, Homo sapiens
gacaaaacccgcaaauacuuuu

SEQ ID NO: 22014 - RNA, 22 nt, Homo sapiens
acaaaauccacaauuacuuuug

SEQ ID NO: 22015 - RNA, 22 nt, Homo sapiens
acuucaaggaucuuaaacuuug

SEQ ID NO: 22016 - RNA, 20 nt, Homo sapiens
aggggccucagccuccuggu

SEQ ID NO: 22017 - RNA, 20 nt, Homo sapiens
acaaugagaacccauggucu

SEQ ID NO: 22018 - RNA, 22 nt, Homo sapiens
caaacaccauugucacacucca

SEQ ID NO: 22019 - RNA, 21 nt, Homo sapiens
acaaugguuguccgauauuaa

SEQ ID NO: 22020 - RNA, 20 nt, Homo sapiens
ggcauucaccgcgugccuua

SEQ ID NO: 22021 - RNA, 21 nt, Homo sapiens
ugcaaacccugcaugugggag

SEQ ID NO: 22022 - RNA, 22 nt, Homo sapiens
acugggacuuuguaggccaguu

SEQ ID NO: 22023 - RNA, 22 nt, Homo sapiens
agcgggacuuugagggccaguu

SEQ ID NO: 22024 - RNA, 20 nt, Homo sapiens
gcaaugcaacagcaaugcac

SEQ ID NO: 22025 - RNA, 22 nt, Homo sapiens
ucucacccagggacaaaggauu

SEQ ID NO: 22026 - RNA, 21 nt, Homo sapiens
ucuacucagaagggugccuua

SEQ ID NO: 22027 - RNA, 22 nt, Homo sapiens
aacgcuccaaaagaaggcacuc

SEQ ID NO: 22028 - RNA, 22 nt, Homo sapiens
aacacucuaaaaggaggcacuu

SEQ ID NO: 22029 - RNA, 21 nt, Homo sapiens
agguaauaccaauaccuugug

SEQ ID NO: 22030 - RNA, 23 nt, Homo sapiens
uggcccugacacgugguacugga

SEQ ID NO: 22031 - RNA, 22 nt, Homo sapiens
cacauggccaaaacagagaaga

SEQ ID NO: 22032 - RNA, 22 nt, Homo sapiens
ugagugcuugcuaggugccaag

SEQ ID NO: 22033 - RNA, 22 nt, Homo sapiens
uguaaaccaugaugugcugcua

SEQ ID NO: 22034 - RNA, 22 nt, Homo sapiens
agcccaaaaggagaauucuuug

SEQ ID NO: 22035 - RNA, 20 nt, Homo sapiens
cccgccgcgucgcccugggg

SEQ ID NO: 22036 - RNA, 22 nt, Homo sapiens
aaucagucucauugcuuuauaa

SEQ ID NO: 22037 - RNA, 22 nt, Homo sapiens
auggcaguggaguuagugauug

SEQ ID NO: 22038 - RNA, 23 nt, Homo sapiens
gacguaguccuauucucugcugc

SEQ ID NO: 22039 - RNA, 23 nt, Homo sapiens
agcaaaaaugugcuagugccaaa

SEQ ID NO: 22040 - RNA, 22 nt, Homo sapiens
cugggggcggcacaggggcuca

SEQ ID NO: 22041 - RNA, 22 nt, Homo sapiens
ggcucccaagaaccucaccugu

SEQ ID NO: 22042 - RNA, 20 nt, Homo sapiens
gcagaagcauuuccacacac

SEQ ID NO: 22043 - RNA, 22 nt, Homo sapiens
uagcagaagcauuuccgcacac

SEQ ID NO: 22044 - RNA, 23 nt, Homo sapiens
aggaacagcagcagcccgggccg

SEQ ID NO: 22045 - RNA, 24 nt, Homo sapiens
agugugaguucuaccauugccaaa

SEQ ID NO: 22046 - RNA, 20 nt, Homo sapiens
cccgccgcgucgcccugggg

SEQ ID NO: 22047 - RNA, 22 nt, Homo sapiens
aggcauaggaugacaaagggaa

SEQ ID NO: 22048 - RNA, 22 nt, Homo sapiens
aggcgaaggaugacaaagggaa

SEQ ID NO: 22049 - RNA, 22 nt, Homo sapiens
acugccugucugugccugcugu

SEQ ID NO: 22050 - RNA, 21 nt, Homo sapiens
uucuaggauaggcccaggggc

SEQ ID NO: 22051 - RNA, 22 nt, Homo sapiens
aaucagucucauugcuuuauaa

SEQ ID NO: 22052 - RNA, 22 nt, Homo sapiens
acaaccagcuaagacacugcca

SEQ ID NO: 22053 - RNA, 23 nt, Homo sapiens
gcaaucagcuaacuacacugccu

SEQ ID NO: 22054 - RNA, 22 nt, Homo sapiens
accagguuccaccccagcaggc

SEQ ID NO: 22055 - RNA, 22 nt, Homo sapiens
accagcuaacaauacacugcca

SEQ ID NO: 22056 - RNA, 22 nt, Homo sapiens
gccagcuaacaauacacugccu

SEQ ID NO: 22057 - RNA, 23 nt, Homo sapiens
aagaaucuugucccgcagguccu

SEQ ID NO: 22058 - RNA, 18 nt, Homo sapiens
acccucugaaaggaagca

SEQ ID NO: 22059 - RNA, 22 nt, Homo sapiens
aaagugcuucuuaccuccagau

SEQ ID NO: 22060 - RNA, 22 nt, Homo sapiens
ugugggugugugcaugagcgug

SEQ ID NO: 22061 - RNA, 20 nt, Homo sapiens
cccugcgccaucuccucuac

SEQ ID NO: 22062 - RNA, 22 nt, Homo sapiens
uauccacuacaccccgcugccu

SEQ ID NO: 22063 - RNA, 22 nt, Homo sapiens
cuagggaacacagggcugguga

SEQ ID NO: 22064 - RNA, 22 nt, Homo sapiens
caaacaccauugucacacucca

SEQ ID NO: 22065 - RNA, 18 nt, Homo sapiens
ugguggcagaggugggau

SEQ ID NO: 22066 - RNA, 22 nt, Homo sapiens
ggagauggagccagggcccuaa

SEQ ID NO: 22067 - RNA, 23 nt, Homo sapiens
cggccugauucacaacaccagcu

SEQ ID NO: 22068 - RNA, 20 nt, Homo sapiens
aguacaucaucuauacugua

SEQ ID NO: 22069 - RNA, 23 nt, Homo sapiens
agggauuccugggaaaacuggac

SEQ ID NO: 22070 - RNA, 22 nt, Homo sapiens
acaacuguaacuagacgguuuu

SEQ ID NO: 22071 - RNA, 20 nt, Homo sapiens
acauuacuguuaucaaaaca

SEQ ID NO: 22072 - RNA, 23 nt, Homo sapiens
cuacuaaaacauggaagcacuua

SEQ ID NO: 22073 - RNA, 23 nt, Homo sapiens
acacucaaacauggaagcacuua

SEQ ID NO: 22074 - RNA, 22 nt, Homo sapiens
aacucaguaaugguaacgguuu

SEQ ID NO: 22075 - RNA, 22 nt, Homo sapiens
ucaguuuccucugcaaacaguu

SEQ ID NO: 22076 - RNA, 22 nt, Homo sapiens
ugcaagccuugggugugggagg

SEQ ID NO: 22077 - RNA, 21 nt, Homo sapiens
cugaaaccaaguaugggucgc

SEQ ID NO: 22078 - RNA, 21 nt, Homo sapiens
aaaacaaaaucucaccguuuu

SEQ ID NO: 22079 - RNA, 21 nt, Homo sapiens
caucaccuuccuucuccucca

SEQ ID NO: 22080 - RNA, 21 nt, Homo sapiens
ccccucccagccucccugcca

SEQ ID NO: 22081 - RNA, 22 nt, Homo sapiens
caaacaccauugucacacucca

SEQ ID NO: 22082 - RNA, 23 nt, Homo sapiens
gggagugaagacacggagccaga

SEQ ID NO: 22083 - RNA, 21 nt, Homo sapiens
gaccaaucgccguccccgccg

SEQ ID NO: 22084 - RNA, 22 nt, Homo sapiens
cggugagcacccggccccugcg

SEQ ID NO: 22085 - RNA, 24 nt, Homo sapiens
cagaaagugcuuucuuuuggagaa

SEQ ID NO: 22086 - RNA, 22 nt, Homo sapiens
aacacucuaaaaggaggcacuu

SEQ ID NO: 22087 - RNA, 21 nt, Homo sapiens
ggacuauagaacuuucccccu

SEQ ID NO: 22088 - RNA, 21 nt, Homo sapiens
aguucucccaacguaaaccca

SEQ ID NO: 22089 - RNA, 22 nt, Homo sapiens
gcggucccgcggcgccccgccu

SEQ ID NO: 22090 - RNA, 21 nt, Homo sapiens
ggggagcgggggcccugccuu

SEQ ID NO: 22091 - RNA, 21 nt, Homo sapiens
agaaguagaccauguguccua

SEQ ID NO: 22092 - RNA, 18 nt, Homo sapiens
cccccaccaccacgcccg

SEQ ID NO: 22093 - RNA, 22 nt, Homo sapiens
ggagcccgcgccccgcgccgag

SEQ ID NO: 22094 - RNA, 23 nt, Homo sapiens
gggagugaagacacggagccaga

SEQ ID NO: 22095 - RNA, 22 nt, Homo sapiens
cacugguacaaggguugggaga

SEQ ID NO: 22096 - RNA, 23 nt, Homo sapiens
aggaacagcagcagcccgggccg

SEQ ID NO: 22097 - RNA, 22 nt, Homo sapiens
agcugaguguaggauguuuaca

SEQ ID NO: 22098 - RNA, 21 nt, Homo sapiens
aagacgggaggagaggaguga

SEQ ID NO: 22099 - RNA, 25 nt, Homo sapiens
acggagcugucccaacaccaccccu

SEQ ID NO: 22100 - RNA, 22 nt, Homo sapiens
ccucaggcacggccgggccacc

SEQ ID NO: 22101 - RNA, 20 nt, Homo sapiens
aggggccucagccuccuggu

SEQ ID NO: 22102 - RNA, 23 nt, Homo sapiens
ccgcuugagcuaacuccgacccg

SEQ ID NO: 22103 - RNA, 22 nt, Homo sapiens
cacucuaaagggaggcacuuug

SEQ ID NO: 22104 - RNA, 23 nt, Homo sapiens
cuaccugcacuguaagcacuuuu

SEQ ID NO: 22105 - RNA, 19 nt, Homo sapiens
ucccugauccaaaaaucca

SEQ ID NO: 22106 - RNA, 22 nt, Homo sapiens
ucaggaacugccuuucucucca

SEQ ID NO: 22107 - RNA, 21 nt, Homo sapiens
ugcaaacccugcaugugggag

SEQ ID NO: 22108 - RNA, 22 nt, Homo sapiens
aagcgguuuaccaucccacaua

SEQ ID NO: 22109 - RNA, 22 nt, Homo sapiens
acaaccagcuaagacacugcca

SEQ ID NO: 22110 - RNA, 23 nt, Homo sapiens
aggagaaggcaccaugggauuua

SEQ ID NO: 22111 - RNA, 22 nt, Homo sapiens
uccucuuuucuuagagacucac

SEQ ID NO: 22112 - RNA, 21 nt, Homo sapiens
aagggucaguaagcacccgcg

SEQ ID NO: 22113 - RNA, 20 nt, Homo sapiens
uacugcuuccacagcucccc

SEQ ID NO: 22114 - RNA, 22 nt, Homo sapiens
gaggcucagaauggcucaggag

SEQ ID NO: 22115 - RNA, 22 nt, Homo sapiens
ggcucccaagaaccucaccugu

SEQ ID NO: 22116 - RNA, 22 nt, Homo sapiens
gcuggguggagaagguggugaa

SEQ ID NO: 22117 - RNA, 21 nt, Homo sapiens
accuauccugaauuacuugaa

SEQ ID NO: 22118 - RNA, 22 nt, Homo sapiens
cuuccagucgaggauguuuaca

SEQ ID NO: 22119 - RNA, 22 nt, Homo sapiens
agcugaguguaggauguuuaca

SEQ ID NO: 22120 - RNA, 23 nt, Homo sapiens
gcugagaguguaggauguuuaca

SEQ ID NO: 22121 - RNA, 22 nt, Homo sapiens
cuuccagucggggauguuuaca

SEQ ID NO: 22122 - RNA, 22 nt, Homo sapiens
cuuccagucaaggauguuuaca

SEQ ID NO: 22123 - RNA, 22 nt, Homo sapiens
gugauugccacucuccugagua

SEQ ID NO: 22124 - RNA, 21 nt, Homo sapiens
uugucuaaccagucaccuguu

SEQ ID NO: 22125 - RNA, 22 nt, Homo sapiens
cucagagcagacgugguucuca

SEQ ID NO: 22126 - RNA, 23 nt, Homo sapiens
accacaggagucugagcauuuga

SEQ ID NO: 22127 - RNA, 21 nt, Homo sapiens
gcaagcccagaccgcaaaaag

SEQ ID NO: 22128 - RNA, 23 nt, Homo sapiens
ucacauaggaauaaaaagccaua

SEQ ID NO: 22129 - RNA, 20 nt, Homo sapiens
uacugcuuccacagcucccc

SEQ ID NO: 22130 - RNA, 21 nt, Homo sapiens
gugacagagccaagcacaaau

SEQ ID NO: 22131 - RNA, 22 nt, Homo sapiens
agucuucacaacagcccugugu

SEQ ID NO: 22132 - RNA, 23 nt, Homo sapiens
ucucugcaggccgugugcuuugc

SEQ ID NO: 22133 - RNA, 22 nt, Homo sapiens
auaaggauuuuuaggggcauua

SEQ ID NO: 22134 - RNA, 22 nt, Homo sapiens
guagaagggaaucuugcauaag

SEQ ID NO: 22135 - RNA, 22 nt, Homo sapiens
gguaaaacucgcaauuacuuuu

SEQ ID NO: 22136 - RNA, 22 nt, Homo sapiens
ggccaaaaccacaauuacuuuu

SEQ ID NO: 22137 - RNA, 22 nt, Homo sapiens
ggcaaaaaccgcaauuacuuuu

SEQ ID NO: 22138 - RNA, 22 nt, Homo sapiens
ggcaaaaaccacaauuacuuuu

SEQ ID NO: 22139 - RNA, 22 nt, Homo sapiens
gacaaaaaccgcgauuacuuuu

SEQ ID NO: 22140 - RNA, 22 nt, Homo sapiens
ggcaaaauccgcaauuacuuuu

SEQ ID NO: 22141 - RNA, 22 nt, Homo sapiens
accaaagaccgcaauuacuuuu

SEQ ID NO: 22142 - RNA, 22 nt, Homo sapiens
aaaguaacugcaguuuuugcua

SEQ ID NO: 22143 - RNA, 21 nt, Homo sapiens
uuuuggugcauauuuacuuua

SEQ ID NO: 22144 - RNA, 23 nt, Homo sapiens
guucuguccuggaagaacauacu

SEQ ID NO: 22145 - RNA, 23 nt, Homo sapiens
acaaggaugaaucuuuguuacug

SEQ ID NO: 22146 - RNA, 22 nt, Homo sapiens
cacauggccaaaacagagaaga

SEQ ID NO: 22147 - RNA, 21 nt, Homo sapiens
cucccccacugcagcuggcac

SEQ ID NO: 22148 - RNA, 21 nt, Homo sapiens
aaaggccacauccagcaccgu

SEQ ID NO: 22149 - RNA, 17 nt, Homo sapiens
gacagccucucccccac

SEQ ID NO: 22150 - RNA, 17 nt, Homo sapiens
gggagaggaggaggcga

SEQ ID NO: 22151 - RNA, 22 nt, Homo sapiens
agcccaaaaggagaauucuuug

SEQ ID NO: 22152 - RNA, 21 nt, Homo sapiens
gugacagagccaagcacaaau

SEQ ID NO: 22153 - RNA, 23 nt, Homo sapiens
ucaccaaaacauggaagcacuua

SEQ ID NO: 22154 - RNA, 23 nt, Homo sapiens
cuacuaaaacauggaagcacuua

SEQ ID NO: 22155 - RNA, 23 nt, Homo sapiens
ccacugaaacauggaagcacuua

SEQ ID NO: 22156 - RNA, 23 nt, Homo sapiens
acacucaaacauggaagcacuua

SEQ ID NO: 22157 - RNA, 17 nt, Homo sapiens
aagcauggaagcacuua

SEQ ID NO: 22158 - RNA, 23 nt, Homo sapiens
acgcucaaaugucgcagcacuuu

SEQ ID NO: 22159 - RNA, 23 nt, Homo sapiens
acaccccaaaaucgaagcacuuc

SEQ ID NO: 22160 - RNA, 22 nt, Homo sapiens
gaccucagcuaugacagcacuu

SEQ ID NO: 22161 - RNA, 22 nt, Homo sapiens
acaguccaaagggaagcacuuu

SEQ ID NO: 22162 - RNA, 21 nt, Homo sapiens
cccucuaaaaggaagcacuuu

SEQ ID NO: 22163 - RNA, 22 nt, Homo sapiens
acccucuaaaaggaagcacuuu

SEQ ID NO: 22164 - RNA, 22 nt, Homo sapiens
acccaccaaagagaagcacuuu

SEQ ID NO: 22165 - RNA, 21 nt, Homo sapiens
cccucaaaaaggaagcacuuu

SEQ ID NO: 22166 - RNA, 22 nt, Homo sapiens
acaucaucgcauauugacacaa

SEQ ID NO: 22167 - RNA, 22 nt, Homo sapiens
acaguggucaucgagugacaca

SEQ ID NO: 22168 - RNA, 20 nt, Homo sapiens
guuugauaaacugacacaac

SEQ ID NO: 22169 - RNA, 21 nt, Homo sapiens
gcugaggucugggccaggucu

SEQ ID NO: 22170 - RNA, 21 nt, Homo sapiens
gagcugcauccuggcuccggg

SEQ ID NO: 22171 - RNA, 23 nt, Homo sapiens
gggagugaagacacggagccaga

SEQ ID NO: 22172 - RNA, 22 nt, Homo sapiens
gaauucaucacggccagccucu

SEQ ID NO: 22173 - RNA, 19 nt, Homo sapiens
guccugaauuccgcagccu

SEQ ID NO: 22174 - RNA, 22 nt, Homo sapiens
gcugaggcuguggggcuggagu

SEQ ID NO: 22175 - RNA, 22 nt, Homo sapiens
ggcagagagucagagcgcggau

SEQ ID NO: 22176 - RNA, 24 nt, Homo sapiens
cacccccagagccucagcucccca

SEQ ID NO: 22177 - RNA, 22 nt, Homo sapiens
auacauacuucuuuacauucca

SEQ ID NO: 22178 - RNA, 23 nt, Homo sapiens
gucacaucccucccaagacccuc

SEQ ID NO: 22179 - RNA, 21 nt, Homo sapiens
cugaggagagaggaggugggg

SEQ ID NO: 22180 - RNA, 22 nt, Homo sapiens
gcacaaaucuccagaccaccca

SEQ ID NO: 22181 - RNA, 22 nt, Homo sapiens
cacaaaccauuaugugcugcua

SEQ ID NO: 22182 - RNA, 22 nt, Homo sapiens
uguaaaccaugaugugcugcua

SEQ ID NO: 22183 - RNA, 22 nt, Homo sapiens
cgccaauauuuacgugcugcua

SEQ ID NO: 22184 - RNA, 22 nt, Homo sapiens
ucaguuuccucugcaaacaguu

SEQ ID NO: 22185 - RNA, 22 nt, Homo sapiens
ucaguuuccucugcaaacaguu

SEQ ID NO: 22186 - RNA, 21 nt, Homo sapiens
gccaauauuucugugcugcua

SEQ ID NO: 22187 - RNA, 21 nt, Homo sapiens
gccaauauuucugugcugcua

SEQ ID NO: 22188 - RNA, 21 nt, Homo sapiens
gccaauauuucugugcugcua

SEQ ID NO: 22189 - RNA, 22 nt, Homo sapiens
ccacacacuuccuuacauucca

SEQ ID NO: 22190 - RNA, 21 nt, Homo sapiens
aagugucagacacgguggugg

SEQ ID NO: 22191 - RNA, 22 nt, Homo sapiens
uaaccgauuucagauggugcua

SEQ ID NO: 22192 - RNA, 23 nt, Homo sapiens
aacacugauuucaaauggugcua

SEQ ID NO: 22193 - RNA, 22 nt, Homo sapiens
uaaccgauuucaaauggugcua

SEQ ID NO: 22194 - RNA, 21 nt, Homo sapiens
aucugcacugucagcacuuua

SEQ ID NO: 22195 - RNA, 23 nt, Homo sapiens
gcuuugacaauaucauugcacug

SEQ ID NO: 22196 - RNA, 22 nt, Homo sapiens
acaaccagcuaagacacugcca

SEQ ID NO: 22197 - RNA, 22 nt, Homo sapiens
aagauguggaccauauuacaua

SEQ ID NO: 22198 - RNA, 22 nt, Homo sapiens
uucaaaacaugaauugcugcug

SEQ ID NO: 22199 - RNA, 21 nt, Homo sapiens
acaaaccacagugugcugcug

SEQ ID NO: 22200 - RNA, 21 nt, Homo sapiens
cucacucagauggccaacuca

SEQ ID NO: 22201 - RNA, 25 nt, Homo sapiens
acggagcugucccaacaccaccccu

SEQ ID NO: 22202 - RNA, 20 nt, Homo sapiens
ggcaaagaaggaacauuccu

SEQ ID NO: 22203 - RNA, 23 nt, Homo sapiens
acucagaaggacaaguagaguuu

SEQ ID NO: 22204 - RNA, 19 nt, Homo sapiens
aagacauuuucagacagcu

SEQ ID NO: 22205 - RNA, 20 nt, Homo sapiens
uacugcuuccacagcucccc

SEQ ID NO: 22206 - RNA, 22 nt, Homo sapiens
cugcgauuccucccucuacugu

SEQ ID NO: 22207 - RNA, 22 nt, Homo sapiens
aacuauacaaccuacuaccuca

SEQ ID NO: 22208 - RNA, 22 nt, Homo sapiens
aaccacacaaccuacuaccuca

SEQ ID NO: 22209 - RNA, 22 nt, Homo sapiens
aaccauacaaccuacuaccuca

SEQ ID NO: 22210 - RNA, 22 nt, Homo sapiens
aacuaugcaaccuacuaccucu

SEQ ID NO: 22211 - RNA, 22 nt, Homo sapiens
aacuauacaaccuccuaccuca

SEQ ID NO: 22212 - RNA, 22 nt, Homo sapiens
aacuauacaaucuacuaccuca

SEQ ID NO: 22213 - RNA, 22 nt, Homo sapiens
aacuguacaaacuacuaccuca

SEQ ID NO: 22214 - RNA, 22 nt, Homo sapiens
aacagcacaaacuacuaccuca

SEQ ID NO: 22215 - RNA, 21 nt, Homo sapiens
ccccucccagccucccugcca

SEQ ID NO: 22216 - RNA, 18 nt, Homo sapiens
cccccaccaccacgcccg

SEQ ID NO: 22217 - RNA, 22 nt, Homo sapiens
aggucucacuuuguugcccaga

SEQ ID NO: 22218 - RNA, 19 nt, Homo sapiens
ucccugauccaaaaaucca

SEQ ID NO: 22219 - RNA, 22 nt, Homo sapiens
uccacauggaguugcuguuaca

SEQ ID NO: 22220 - RNA, 21 nt, Homo sapiens
ucaaucacagauagcaccccu

SEQ ID NO: 22221 - RNA, 22 nt, Homo sapiens
gagcccuggacuaggagucagc

SEQ ID NO: 22222 - RNA, 22 nt, Homo sapiens
auaaggauuuuuaggggcauua

SEQ ID NO: 22223 - RNA, 25 nt, Homo sapiens
acggagcugucccaacaccaccccu

SEQ ID NO: 22224 - RNA, 25 nt, Homo sapiens
aaggagcucagaagcccugcccagc

SEQ ID NO: 22225 - RNA, 21 nt, Homo sapiens
aguucucccaacguaaaccca

SEQ ID NO: 22226 - RNA, 20 nt, Homo sapiens
uacugcuuccacagcucccc

SEQ ID NO: 22227 - RNA, 21 nt, Homo sapiens
ggggagcgggggcccugccuu

SEQ ID NO: 22228 - RNA, 22 nt, Homo sapiens
aacaauacaacuuacuaccuca

SEQ ID NO: 22229 - RNA, 22 nt, Homo sapiens
gugggguggguggucaggccga

SEQ ID NO: 22230 - RNA, 24 nt, Homo sapiens
acugcaggcuccagcuuccaggcu

SEQ ID NO: 22231 - RNA, 18 nt, Homo sapiens
uggcgccugaacagggac

SEQ ID NO: 22232 - RNA, 17 nt, Homo sapiens
gacagccucucccccac

SEQ ID NO: 22233 - RNA, 20 nt, Homo sapiens
ugucuccacagggcucuuua

SEQ ID NO: 22234 - RNA, 22 nt, Homo sapiens
augcccuuucaucauugcacug

SEQ ID NO: 22235 - RNA, 18 nt, Homo sapiens
aucacauucaccucccug

SEQ ID NO: 22236 - RNA, 18 nt, Homo sapiens
auucaaucuacugccuca

SEQ ID NO: 22237 - RNA, 23 nt, Homo sapiens
ucaguuuugcauagauuugcaca

SEQ ID NO: 22238 - RNA, 22 nt, Homo sapiens
cacucagcaccaggauauuguu

SEQ ID NO: 22239 - RNA, 22 nt, Homo sapiens
aacuaugcaaccuacuaccucu

SEQ ID NO: 22240 - RNA, 23 nt, Homo sapiens
cgugagcuccuggaggacaggga

SEQ ID NO: 22241 - RNA, 21 nt, Homo sapiens
cccgaggagccgggcaggcuu

SEQ ID NO: 22242 - RNA, 21 nt, Homo sapiens
guccugagagcgcugccuccu

SEQ ID NO: 22243 - RNA, 23 nt, Homo sapiens
cuccagccccuccagggcuuccu

SEQ ID NO: 22244 - RNA, 24 nt, Homo sapiens
cacccccagagccucagcucccca

SEQ ID NO: 22245 - RNA, 18 nt, Homo sapiens
gaaaugagggccagcuga

SEQ ID NO: 22246 - RNA, 18 nt, Homo sapiens
gaaaugagggccagcuga

SEQ ID NO: 22247 - RNA, 22 nt, Homo sapiens
cuagggaacacagggcugguga

SEQ ID NO: 22248 - RNA, 24 nt, Homo sapiens
ucacagguuaaagggucucaggga

SEQ ID NO: 22249 - RNA, 22 nt, Homo sapiens
ucacaaguuagggucucaggga

SEQ ID NO: 22250 - RNA, 23 nt, Homo sapiens
agcccuguucuacagcccugagg

SEQ ID NO: 22251 - RNA, 23 nt, Homo sapiens
cggccugauucacaacaccagcu

SEQ ID NO: 22252 - RNA, 22 nt, Homo sapiens
cacucagcggccguuuccccaa

SEQ ID NO: 22253 - RNA, 21 nt, Homo sapiens
ggaaaucccuggcaaugugau

SEQ ID NO: 22254 - RNA, 21 nt, Homo sapiens
gguaaucccuggcaaugugau

SEQ ID NO: 22255 - RNA, 23 nt, Homo sapiens
aaaucagaaucacaccuggggga

SEQ ID NO: 22256 - RNA, 22 nt, Homo sapiens
aucgggaggggacugagccuga

SEQ ID NO: 22257 - RNA, 22 nt, Homo sapiens
ccucauggaaggguuccccacu

SEQ ID NO: 22258 - RNA, 24 nt, Homo sapiens
acacucuaaagggaagcacuuugu

SEQ ID NO: 22259 - RNA, 22 nt, Homo sapiens
acucuaaagggaagcacuuugu

SEQ ID NO: 22260 - RNA, 25 nt, Homo sapiens
acggagcugucccaacaccaccccu

SEQ ID NO: 22261 - RNA, 23 nt, Homo sapiens
acccaacagccccugcaagggau

SEQ ID NO: 22262 - RNA, 24 nt, Homo sapiens
acgcagagcccgaaagcccccagu

SEQ ID NO: 22263 - RNA, 24 nt, Homo sapiens
acgcgcaggccagagacccaggca

SEQ ID NO: 22264 - RNA, 22 nt, Homo sapiens
gcugaggcuguggggcuggagu

SEQ ID NO: 22265 - RNA, 20 nt, Homo sapiens
uacugcuuccacagcucccc

SEQ ID NO: 22266 - RNA, 27 nt, Homo sapiens
ugcccacucucaccaucaccuacagug

SEQ ID NO: 22267 - RNA, 18 nt, Homo sapiens
gaaaugagggccagcuga

SEQ ID NO: 22268 - RNA, 17 nt, Homo sapiens
gacagccucucccccac

SEQ ID NO: 22269 - RNA, 22 nt, Homo sapiens
cuggagacacgugcacuguaga

SEQ ID NO: 22270 - RNA, 22 nt, Homo sapiens
ucaggaacugccuuucucucca

SEQ ID NO: 22271 - RNA, 23 nt, Homo sapiens
aaaucagaaucacaccuggggga

SEQ ID NO: 22272 - RNA, 21 nt, Homo sapiens
ggacuauagaacuuucccccu

SEQ ID NO: 22273 - RNA, 24 nt, Homo sapiens
acgcagagcccgaaagcccccagu

SEQ ID NO: 22274 - RNA, 22 nt, Homo sapiens
caagacacauuuggagagggac

SEQ ID NO: 22275 - RNA, 20 nt, Homo sapiens
cccugcgccaucuccucuac

SEQ ID NO: 22276 - RNA, 22 nt, Homo sapiens
cacauggccaaaacagagaaga

SEQ ID NO: 22277 - RNA, 22 nt, Homo sapiens
gaggcucagaauggcucaggag

SEQ ID NO: 22278 - RNA, 21 nt, Homo sapiens
ccccucccagccucccugcca

SEQ ID NO: 22279 - RNA, 22 nt, Homo sapiens
cagcugguugaaggggaccaaa

SEQ ID NO: 22280 - RNA, 22 nt, Homo sapiens
ggaucccugggaccauaccuag

SEQ ID NO: 22281 - RNA, 23 nt, Homo sapiens
ucucacccagguagcaaggauua

SEQ ID NO: 22282 - RNA, 22 nt, Homo sapiens
auaaaugacaccuccuugugaa

SEQ ID NO: 22283 - RNA, 22 nt, Homo sapiens
uuucaguuaucaaucugucaca

SEQ ID NO: 22284 - RNA, 22 nt, Homo sapiens
guccaaaguuggggugcugguu

SEQ ID NO: 22285 - RNA, 21 nt, Homo sapiens
gaaggaagugagugcagccac

SEQ ID NO: 22286 - RNA, 21 nt, Homo sapiens
ggggagcgggggcccugccuu

SEQ ID NO: 22287 - RNA, 22 nt, Homo sapiens
cgaaggcaacacggauaaccua

SEQ ID NO: 22288 - RNA, 21 nt, Homo sapiens
caugcacaugcacacauacau

SEQ ID NO: 22289 - RNA, 23 nt, Homo sapiens
ucucugcaggccgugugcuuugc

SEQ ID NO: 22290 - RNA, 21 nt, Homo sapiens
acaggccaucuguguuauauu

SEQ ID NO: 22291 - RNA, 23 nt, Homo sapiens
cacugugggcccucuccgcacca

SEQ ID NO: 22292 - RNA, 20 nt, Homo sapiens
uccgccugucugaacaguga

SEQ ID NO: 22293 - RNA, 21 nt, Homo sapiens
ggucagaacccaucauucacu

SEQ ID NO: 22294 - RNA, 22 nt, Homo sapiens
cgcauuauuacucacgguacga

SEQ ID NO: 22295 - RNA, 21 nt, Homo sapiens
ccgugguucuacccuguggua

SEQ ID NO: 22296 - RNA, 21 nt, Homo sapiens
uagaaaggcuaggaccaaacc

SEQ ID NO: 22297 - RNA, 23 nt, Homo sapiens
aauaaauuaaauuuauauuacag

SEQ ID NO: 22298 - RNA, 23 nt, Homo sapiens
cuacuaaaacauggaagcacuua

SEQ ID NO: 22299 - RNA, 23 nt, Homo sapiens
acacucaaacauggaagcacuua

SEQ ID NO: 22300 - RNA, 22 nt, Homo sapiens
ucaguuuccucugcaaacaguu

SEQ ID NO: 22301 - RNA, 21 nt, Homo sapiens
acuagcuuauacauaaaauua

SEQ ID NO: 22302 - RNA, 23 nt, Homo sapiens
gagcaaggcucuugucuguaagu

SEQ ID NO: 22303 - RNA, 23 nt, Homo sapiens
acaacaaaaucacuagucuucca

SEQ ID NO: 22304 - RNA, 18 nt, Homo sapiens
gaaaugagggccagcuga

SEQ ID NO: 22305 - RNA, 18 nt, Homo sapiens
gaaaugagggccagcuga

SEQ ID NO: 22306 - RNA, 17 nt, Homo sapiens
gggagaggaggaggcga

SEQ ID NO: 22307 - RNA, 22 nt, Homo sapiens
aggucucacuuuguugcccaga

SEQ ID NO: 22308 - RNA, 22 nt, Homo sapiens
aggucucacuuuguugcccaga

SEQ ID NO: 22309 - RNA, 21 nt, Homo sapiens
cggggugcacgggcggagggc

SEQ ID NO: 22310 - RNA, 23 nt, Homo sapiens
gggagugaagacacggagccaga

SEQ ID NO: 22311 - RNA, 25 nt, Homo sapiens
agcuagucaagcgcgguuguggggg

SEQ ID NO: 22312 - RNA, 20 nt, Homo sapiens
acagcaaggagggcaggagg

SEQ ID NO: 22313 - RNA, 22 nt, Homo sapiens
ucagaccgagacaagugcaaug

SEQ ID NO: 22314 - RNA, 21 nt, Homo sapiens
aagacgggaggagaggaguga

SEQ ID NO: 22315 - RNA, 22 nt, Homo sapiens
gaauucaucacggccagccucu

SEQ ID NO: 22316 - RNA, 22 nt, Homo sapiens
aggaaaccagcaaguguugacg

SEQ ID NO: 22317 - RNA, 19 nt, Homo sapiens
guccugaauuccgcagccu

SEQ ID NO: 22318 - RNA, 25 nt, Homo sapiens
aaggagcucagaagcccugcccagc

SEQ ID NO: 22319 - RNA, 25 nt, Homo sapiens
aaggagcucagaagcccugcccagc

SEQ ID NO: 22320 - RNA, 21 nt, Homo sapiens
ggacuauagaacuuucccccu

SEQ ID NO: 22321 - RNA, 25 nt, Homo sapiens
accaacggaccuacuucccuccgcc

SEQ ID NO: 22322 - RNA, 20 nt, Homo sapiens
aggggccucagccuccuggu

SEQ ID NO: 22323 - RNA, 22 nt, Homo sapiens
gcugaggcuguggggcuggagu

SEQ ID NO: 22324 - RNA, 22 nt, Homo sapiens
gcugaggcuguggggcuggagu

SEQ ID NO: 22325 - RNA, 23 nt, Homo sapiens
agggauuccugggaaaacuggac

SEQ ID NO: 22326 - RNA, 22 nt, Homo sapiens
agugaauucuaccagugccaua

SEQ ID NO: 22327 - RNA, 24 nt, Homo sapiens
ugggagaaccucccugcuucugcu

SEQ ID NO: 22328 - RNA, 23 nt, Homo sapiens
acauuuuucguuauugcucuuga

SEQ ID NO: 22329 - RNA, 22 nt, Homo sapiens
ucaguuuccucugcaaacaguu

SEQ ID NO: 22330 - RNA, 22 nt, Homo sapiens
auaaacgacaccuccuugagaa

SEQ ID NO: 22331 - RNA, 23 nt, Homo sapiens
gaaagugcuucuuuccucgagaa

SEQ ID NO: 22332 - RNA, 23 nt, Homo sapiens
acagaaagugcuucccucaagag

SEQ ID NO: 22333 - RNA, 22 nt, Homo sapiens
uauccacuacaccccgcugccu

SEQ ID NO: 22334 - RNA, 22 nt, Homo sapiens
cacucuaaagggaggcacuuug

SEQ ID NO: 22335 - RNA, 17 nt, Homo sapiens
gggagaggaggaggcga

SEQ ID NO: 22336 - RNA, 22 nt, Homo sapiens
aggucucacuuuguugcccaga

SEQ ID NO: 22337 - RNA, 21 nt, Homo sapiens
gaccaaucgccguccccgccg

SEQ ID NO: 22338 - RNA, 21 nt, Homo sapiens
gaccaaucgccguccccgccg

SEQ ID NO: 22339 - RNA, 22 nt, Homo sapiens
cagaagugggccgggcacaggg

SEQ ID NO: 22340 - RNA, 22 nt, Homo sapiens
ucaucucgcccgcaaagaccca

SEQ ID NO: 22341 - RNA, 22 nt, Homo sapiens
agcgggacuuugagggccaguu

SEQ ID NO: 22342 - RNA, 22 nt, Homo sapiens
ucagaccgagacaagugcaaug

SEQ ID NO: 22343 - RNA, 22 nt, Homo sapiens
agcugaguguaggauguuuaca

SEQ ID NO: 22344 - RNA, 21 nt, Homo sapiens
agcuaugccagcaucuugccu

SEQ ID NO: 22345 - RNA, 20 nt, Homo sapiens
cuggaggaagggcccagagg

SEQ ID NO: 22346 - RNA, 22 nt, Homo sapiens
gccuaagacacaggcccagaga

SEQ ID NO: 22347 - RNA, 21 nt, Homo sapiens
ugcaugacggccugcaagaca

SEQ ID NO: 22348 - RNA, 22 nt, Homo sapiens
aucgggaggggacugagccuga

SEQ ID NO: 22349 - RNA, 25 nt, Homo sapiens
aaggagcucagaagcccugcccagc

SEQ ID NO: 22350 - RNA, 22 nt, Homo sapiens
gcggucccgcggcgccccgccu

SEQ ID NO: 22351 - RNA, 22 nt, Homo sapiens
gcggucccgcggcgccccgccu

SEQ ID NO: 22352 - RNA, 20 nt, Homo sapiens
aggggccucagccuccuggu

SEQ ID NO: 22353 - RNA, 22 nt, Homo sapiens
ugcuguuagcccuagccccgca

SEQ ID NO: 22354 - RNA, 22 nt, Homo sapiens
auacauacuucuuuacauucca

SEQ ID NO: 22355 - RNA, 23 nt, Homo sapiens
ggaagccaucaagucgcugcagg

SEQ ID NO: 22356 - RNA, 23 nt, Homo sapiens
ggaagccaucaagucgcugcagg

SEQ ID NO: 22357 - RNA, 22 nt, Homo sapiens
augcccuuuuaacauugcacug

SEQ ID NO: 22358 - RNA, 22 nt, Homo sapiens
ccaucuuuaccagacaguguua

SEQ ID NO: 22359 - RNA, 22 nt, Homo sapiens
uggcagcagcggagggggcaga

SEQ ID NO: 22360 - RNA, 23 nt, Homo sapiens
gaacagguagucugaacacuggg

SEQ ID NO: 22361 - RNA, 23 nt, Homo sapiens
gaacagauagucuaaacacuggg

SEQ ID NO: 22362 - RNA, 22 nt, Homo sapiens
acaucguuaccagacaguguua

SEQ ID NO: 22363 - RNA, 22 nt, Homo sapiens
ccacacacuuccuuacauucca

SEQ ID NO: 22364 - RNA, 21 nt, Homo sapiens
ggaaaucccuggcaaugugau

SEQ ID NO: 22365 - RNA, 21 nt, Homo sapiens
gguaaucccuggcaaugugau

SEQ ID NO: 22366 - RNA, 21 nt, Homo sapiens
aucugcacugucagcacuuua

SEQ ID NO: 22367 - RNA, 23 nt, Homo sapiens
gcuuugacaauaucauugcacug

SEQ ID NO: 22368 - RNA, 20 nt, Homo sapiens
ccagcagcaccuggggcagu

SEQ ID NO: 22369 - RNA, 21 nt, Homo sapiens
auccuguacugagcugccccg

SEQ ID NO: 22370 - RNA, 22 nt, Homo sapiens
gcacacaauaaauguuugcuga

SEQ ID NO: 22371 - RNA, 20 nt, Homo sapiens
ggcaaagaaggaacauuccu

SEQ ID NO: 22372 - RNA, 24 nt, Homo sapiens
acgcgcaggccagagacccaggca

SEQ ID NO: 22373 - RNA, 22 nt, Homo sapiens
gcugaggcuguggggcuggagu

SEQ ID NO: 22374 - RNA, 26 nt, Homo sapiens
uuucagaauuugcugccaucaucauc

SEQ ID NO: 22375 - RNA, 22 nt, Homo sapiens
aucagagcccucugagcuucag

SEQ ID NO: 22376 - RNA, 18 nt, Homo sapiens
cagcagccuccuucucaa

SEQ ID NO: 22377 - RNA, 18 nt, Homo sapiens
cagcagccuccuucucaa

SEQ ID NO: 22378 - RNA, 24 nt, Homo sapiens
gaagucacucccaggcagcugcaa

SEQ ID NO: 22379 - RNA, 22 nt, Homo sapiens
cacaucucacuguagccucaaa

SEQ ID NO: 22380 - RNA, 22 nt, Homo sapiens
augcccuuucaucauugcacug

SEQ ID NO: 22381 - RNA, 21 nt, Homo sapiens
ugacugcagagcaaaagacac

SEQ ID NO: 22382 - RNA, 20 nt, Homo sapiens
gaaagggcuucccuuugcag

SEQ ID NO: 22383 - RNA, 24 nt, Homo sapiens
acacucuaaagggaagcacuuugu

SEQ ID NO: 22384 - RNA, 22 nt, Homo sapiens
acucuaaagggaagcacuuugu

SEQ ID NO: 22385 - RNA, 23 nt, Homo sapiens
acagaaagugcuucccucaagag

SEQ ID NO: 22386 - RNA, 20 nt, Homo sapiens
gaaagggcuucccuuugcag

SEQ ID NO: 22387 - RNA, 20 nt, Homo sapiens
agagaugagagaaacacccu

SEQ ID NO: 22388 - RNA, 21 nt, Homo sapiens
ccccucccagccucccugcca

SEQ ID NO: 22389 - RNA, 22 nt, Homo sapiens
caaacaccauugucacacucca

SEQ ID NO: 22390 - RNA, 22 nt, Homo sapiens
gugggguggguggucaggccga

SEQ ID NO: 22391 - RNA, 24 nt, Homo sapiens
acugcuggucuucagucagggcca

SEQ ID NO: 22392 - RNA, 23 nt, Homo sapiens
gggagugaagacacggagccaga

SEQ ID NO: 22393 - RNA, 22 nt, Homo sapiens
ucaggaacugccuuucucucca

SEQ ID NO: 22394 - RNA, 21 nt, Homo sapiens
gaccaaucgccguccccgccg

SEQ ID NO: 22395 - RNA, 22 nt, Homo sapiens
cggugagcacccggccccugcg

SEQ ID NO: 22396 - RNA, 22 nt, Homo sapiens
uggcagcagcggagggggcaga

SEQ ID NO: 22397 - RNA, 20 nt, Homo sapiens
ccagcagcaccuggggcagu

SEQ ID NO: 22398 - RNA, 22 nt, Homo sapiens
acaaccagcuaagacacugcca

SEQ ID NO: 22399 - RNA, 23 nt, Homo sapiens
gcaaucagcuaacuacacugccu

SEQ ID NO: 22400 - RNA, 23 nt, Homo sapiens
aaaucagaaucacaccuggggga

SEQ ID NO: 22401 - RNA, 21 nt, Homo sapiens
acaggccaucuguguuauauu

SEQ ID NO: 22402 - RNA, 22 nt, Homo sapiens
accagcuaacaauacacugcca

SEQ ID NO: 22403 - RNA, 22 nt, Homo sapiens
gccagcuaacaauacacugccu

SEQ ID NO: 22404 - RNA, 21 nt, Homo sapiens
auccuguacugagcugccccg

SEQ ID NO: 22405 - RNA, 23 nt, Homo sapiens
acacacucacacacacacacuca

SEQ ID NO: 22406 - RNA, 24 nt, Homo sapiens
acgcagagcccgaaagcccccagu

SEQ ID NO: 22407 - RNA, 24 nt, Homo sapiens
acgcgcaggccagagacccaggca

SEQ ID NO: 22408 - RNA, 22 nt, Homo sapiens
gcggucccgcggcgccccgccu

SEQ ID NO: 22409 - RNA, 22 nt, Homo sapiens
augcccuuucaucauugcacug

SEQ ID NO: 22410 - RNA, 21 nt, Homo sapiens
ccucaaggagcuucagucuag

SEQ ID NO: 22411 - RNA, 22 nt, Homo sapiens
cagaaagugcuucccucuagag

SEQ ID NO: 22412 - RNA, 22 nt, Homo sapiens
acugggacuuuguaggccaguu

SEQ ID NO: 22413 - RNA, 22 nt, Homo sapiens
agcgggacuuugagggccaguu

SEQ ID NO: 22414 - RNA, 22 nt, Homo sapiens
uccacauggaguugcuguuaca

SEQ ID NO: 22415 - RNA, 20 nt, Homo sapiens
acagcaaggagggcaggagg

SEQ ID NO: 22416 - RNA, 22 nt, Homo sapiens
uagucaagugaagcagugggag

SEQ ID NO: 22417 - RNA, 22 nt, Homo sapiens
cacucagcggccguuuccccaa

SEQ ID NO: 22418 - RNA, 22 nt, Homo sapiens
uccaggagcucacaaucuagug

SEQ ID NO: 22419 - RNA, 22 nt, Homo sapiens
agcugaguguaggauguuuaca

SEQ ID NO: 22420 - RNA, 22 nt, Homo sapiens
agccacaaucaccuucugaucu

SEQ ID NO: 22421 - RNA, 20 nt, Homo sapiens
uaugaacaauuucuaggaau

SEQ ID NO: 22422 - RNA, 22 nt, Homo sapiens
ccucauggaaggguuccccacu

SEQ ID NO: 22423 - RNA, 22 nt, Homo sapiens
acacucuaaaaggaugcacuuu

SEQ ID NO: 22424 - RNA, 22 nt, Homo sapiens
aaccucuaaaaggaugcacuuu

SEQ ID NO: 22425 - RNA, 22 nt, Homo sapiens
auccucuaaaaagaugcacuuu

SEQ ID NO: 22426 - RNA, 22 nt, Homo sapiens
ugcaagccuugggugugggagg

SEQ ID NO: 22427 - RNA, 22 nt, Homo sapiens
gguaaaacucgcaauuacuuuu

SEQ ID NO: 22428 - RNA, 22 nt, Homo sapiens
ggccaaaaccacaauuacuuuu

SEQ ID NO: 22429 - RNA, 22 nt, Homo sapiens
ggcaaaaaccgcaauuacuuuu

SEQ ID NO: 22430 - RNA, 22 nt, Homo sapiens
ggcaaaaaccacaauuacuuuu

SEQ ID NO: 22431 - RNA, 22 nt, Homo sapiens
gacaaaaaccgcgauuacuuuu

SEQ ID NO: 22432 - RNA, 22 nt, Homo sapiens
ggcaaaauccgcaauuacuuuu

SEQ ID NO: 22433 - RNA, 22 nt, Homo sapiens
accaaagaccgcaauuacuuuu

SEQ ID NO: 22434 - RNA, 21 nt, Homo sapiens
uuuuggugcauauuuacuuua

SEQ ID NO: 22435 - RNA, 21 nt, Homo sapiens
guaaugggaccuuccucuuug

SEQ ID NO: 22436 - RNA, 25 nt, Homo sapiens
acggagcugucccaacaccaccccu

SEQ ID NO: 22437 - RNA, 21 nt, Homo sapiens
guccugagagcgcugccuccu

SEQ ID NO: 22438 - RNA, 20 nt, Homo sapiens
uacugcuuccacagcucccc

SEQ ID NO: 22439 - RNA, 22 nt, Homo sapiens
gggagaggucucccugcgcaca

SEQ ID NO: 22440 - RNA, 22 nt, Homo sapiens
cacauggccaaaacagagaaga

SEQ ID NO: 22441 - RNA, 21 nt, Homo sapiens
ccccucccagccucccugcca

SEQ ID NO: 22442 - RNA, 23 nt, Homo sapiens
gggagugaagacacggagccaga

SEQ ID NO: 22443 - RNA, 21 nt, Homo sapiens
gaccaaucgccguccccgccg

SEQ ID NO: 22444 - RNA, 22 nt, Homo sapiens
cggugagcacccggccccugcg

SEQ ID NO: 22445 - RNA, 20 nt, Homo sapiens
cccgccgcgucgcccugggg

SEQ ID NO: 22446 - RNA, 22 nt, Homo sapiens
agcgggacuuugagggccaguu

SEQ ID NO: 22447 - RNA, 20 nt, Homo sapiens
acauuacuguuaucaaaaca

SEQ ID NO: 22448 - RNA, 23 nt, Homo sapiens
aaaucagaaucacaccuggggga

SEQ ID NO: 22449 - RNA, 18 nt, Homo sapiens
acccucugaaaggaagca

SEQ ID NO: 22450 - RNA, 22 nt, Homo sapiens
aaagugcuucuuaccuccagau

SEQ ID NO: 22451 - RNA, 21 nt, Homo sapiens
uggaaaccaagagugggucgc

SEQ ID NO: 22452 - RNA, 21 nt, Homo sapiens
cugaaaccaaguaugggucgc

SEQ ID NO: 22453 - RNA, 24 nt, Homo sapiens
acgcagagcccgaaagcccccagu

SEQ ID NO: 22454 - RNA, 22 nt, Homo sapiens
gcggucccgcggcgccccgccu

SEQ ID NO: 22455 - RNA, 23 nt, Homo sapiens
ccgcuugagcuaacuccgacccg

SEQ ID NO: 22456 - RNA, 20 nt, Homo sapiens
uacugcuuccacagcucccc

SEQ ID NO: 22457 - RNA, 23 nt, Homo sapiens
ucauagcccuguacaaugcugcu

SEQ ID NO: 22458 - RNA, 23 nt, Homo sapiens
ugauagcccuguacaaugcugcu

SEQ ID NO: 22459 - RNA, 23 nt, Homo sapiens
gggagugaagacacggagccaga

SEQ ID NO: 22460 - RNA, 22 nt, Homo sapiens
cacaaaccauuaugugcugcua

SEQ ID NO: 22461 - RNA, 22 nt, Homo sapiens
uguaaaccaugaugugcugcua

SEQ ID NO: 22462 - RNA, 22 nt, Homo sapiens
cgccaauauuuacgugcugcua

SEQ ID NO: 22463 - RNA, 22 nt, Homo sapiens
uucacacugcaugcucugggua

SEQ ID NO: 22464 - RNA, 22 nt, Homo sapiens
uggcagcagcggagggggcaga

SEQ ID NO: 22465 - RNA, 23 nt, Homo sapiens
cagcugcuuuugggauuccguug

SEQ ID NO: 22466 - RNA, 21 nt, Homo sapiens
gccaauauuucugugcugcua

SEQ ID NO: 22467 - RNA, 20 nt, Homo sapiens
ccagcagcaccuggggcagu

SEQ ID NO: 22468 - RNA, 22 nt, Homo sapiens
uacagauggauaccgugcaauu

SEQ ID NO: 22469 - RNA, 22 nt, Homo sapiens
uucaaaacaugaauugcugcug

SEQ ID NO: 22470 - RNA, 22 nt, Homo sapiens
gaauucaucacggccagccucu

SEQ ID NO: 22471 - RNA, 21 nt, Homo sapiens
auccuguacugagcugccccg

SEQ ID NO: 22472 - RNA, 21 nt, Homo sapiens
acaaaccacagugugcugcug

SEQ ID NO: 22473 - RNA, 25 nt, Homo sapiens
acggagcugucccaacaccaccccu

SEQ ID NO: 22474 - RNA, 21 nt, Homo sapiens
guccugagagcgcugccuccu

SEQ ID NO: 22475 - RNA, 23 nt, Homo sapiens
agaaaccaugggguaugagcaga

SEQ ID NO: 22476 - RNA, 22 nt, Homo sapiens
cacucuaaagggaggcacuuug

SEQ ID NO: 22477 - RNA, 23 nt, Homo sapiens
gcgguagcggaagcgguaacugg

SEQ ID NO: 22478 - RNA, 23 nt, Homo sapiens
cuaccugcacuguaagcacuuuu

SEQ ID NO: 22479 - RNA, 26 nt, Homo sapiens
aaccaucucauacaaaccaacuacuu

SEQ ID NO: 22480 - RNA, 27 nt, Homo sapiens
auugcguucgaagugucgaugaucaau

SEQ ID NO: 22481 - RNA, 22 nt, Homo sapiens
cgaauccaccacgaacaacuuc

SEQ ID NO: 22482 - RNA, 22 nt, Homo sapiens
uauucaggaacauauugcaaaa

SEQ ID NO: 22483 - RNA, 20 nt, Homo sapiens
gaaagggcuucccuuugcag

SEQ ID NO: 22484 - RNA, 20 nt, Homo sapiens
gaaagggcuucccuuugcag

SEQ ID NO: 22485 - RNA, 21 nt, Homo sapiens
aucuuugauuuucaguaguuu

SEQ ID NO: 22486 - RNA, 22 nt, Homo sapiens
gguuaguggaccaggucacaaa

SEQ ID NO: 22487 - RNA, 23 nt, Homo sapiens
aaucuacuuucuuugcucauccu

SEQ ID NO: 22488 - RNA, 22 nt, Homo sapiens
aaccacuuucuuugcucauccg

SEQ ID NO: 22489 - RNA, 22 nt, Homo sapiens
auccuucuacaaauucacccau

SEQ ID NO: 22490 - RNA, 17 nt, Homo sapiens
gacagccucucccccac

SEQ ID NO: 22491 - RNA, 18 nt, Homo sapiens
aucacauucaccucccug

SEQ ID NO: 22492 - RNA, 23 nt, Homo sapiens
gggagugaagacacggagccaga

SEQ ID NO: 22493 - RNA, 23 nt, Homo sapiens
gggagugaagacacggagccaga

SEQ ID NO: 22494 - RNA, 22 nt, Homo sapiens
ucaggaacugccuuucucucca

SEQ ID NO: 22495 - RNA, 21 nt, Homo sapiens
gaccaaucgccguccccgccg

SEQ ID NO: 22496 - RNA, 22 nt, Homo sapiens
aaucagucucauugcuuuauaa

SEQ ID NO: 22497 - RNA, 23 nt, Homo sapiens
aaagucucgcucucugccccuca

SEQ ID NO: 22498 - RNA, 25 nt, Homo sapiens
acggagcugucccaacaccaccccu

SEQ ID NO: 22499 - RNA, 22 nt, Homo sapiens
gcggucccgcggcgccccgccu

SEQ ID NO: 22500 - RNA, 21 nt, Homo sapiens
caucaccuuccuucuccucca

SEQ ID NO: 22501 - RNA, 21 nt, Homo sapiens
aagggucaguaagcacccgcg

SEQ ID NO: 22502 - RNA, 20 nt, Homo sapiens
uacugcuuccacagcucccc

SEQ ID NO: 22503 - RNA, 22 nt, Homo sapiens
caaacaccauugucacacucca

SEQ ID NO: 22504 - RNA, 22 nt, Homo sapiens
ugagugcuugcuaggugccaag

SEQ ID NO: 22505 - RNA, 18 nt, Homo sapiens
aucacauucaccucccug

SEQ ID NO: 22506 - RNA, 21 nt, Homo sapiens
ggcugucaauucauaggucag

SEQ ID NO: 22507 - RNA, 22 nt, Homo sapiens
cccaacaacaugaaacuaccua

SEQ ID NO: 22508 - RNA, 22 nt, Homo sapiens
ucaccauugcuaaagugcaauu

SEQ ID NO: 22509 - RNA, 23 nt, Homo sapiens
ucucacccagguagcaaggauua

SEQ ID NO: 22510 - RNA, 23 nt, Homo sapiens
ucucacccagguagcaaggauua

SEQ ID NO: 22511 - RNA, 22 nt, Homo sapiens
aguccagauucugugcccacca

SEQ ID NO: 22512 - RNA, 23 nt, Homo sapiens
acccaacagccccugcaagggau

SEQ ID NO: 22513 - RNA, 22 nt, Homo sapiens
ugcuguuagcccuagccccgca

SEQ ID NO: 22514 - RNA, 23 nt, Homo sapiens
agcaaaaaugugcuagugccaaa

SEQ ID NO: 22515 - RNA, 20 nt, Homo sapiens
ggggggcgaggcagguguga

SEQ ID NO: 22516 - RNA, 21 nt, Homo sapiens
cugggggacggagcagaagga

SEQ ID NO: 22517 - RNA, 21 nt, Homo sapiens
gcaagcccagaccgcaaaaag

SEQ ID NO: 22518 - RNA, 18 nt, Homo sapiens
cagcagccuccuucucaa

SEQ ID NO: 22519 - RNA, 22 nt, Homo sapiens
augcccuuucaucauugcacug

SEQ ID NO: 22520 - RNA, 21 nt, Homo sapiens
cccuccaccaugcaagggaug

SEQ ID NO: 22521 - RNA, 22 nt, Homo sapiens
aggcauaggaugacaaagggaa

SEQ ID NO: 22522 - RNA, 22 nt, Homo sapiens
aggcgaaggaugacaaagggaa

SEQ ID NO: 22523 - RNA, 23 nt, Homo sapiens
gaaagugcccucaaggcugagug

SEQ ID NO: 22524 - RNA, 23 nt, Homo sapiens
agaaaccaugggguaugagcaga

SEQ ID NO: 22525 - RNA, 18 nt, Homo sapiens
aucacauucaccucccug

SEQ ID NO: 22526 - RNA, 22 nt, Homo sapiens
ucaacaucagucugauaagcua

SEQ ID NO: 22527 - RNA, 22 nt, Homo sapiens
acaguucuucaacuggcagcuu

SEQ ID NO: 22528 - RNA, 23 nt, Homo sapiens
ccacccaaugaccuacuccaaga

SEQ ID NO: 22529 - RNA, 19 nt, Homo sapiens
auuuugguacagcagcuca

SEQ ID NO: 22530 - RNA, 22 nt, Homo sapiens
caagacacauuuggagagggac

SEQ ID NO: 22531 - RNA, 21 nt, Homo sapiens
caucaccuuccuucuccucca

SEQ ID NO: 22532 - RNA, 21 nt, Homo sapiens
caacugaugccuuuccaagua

SEQ ID NO: 22533 - RNA, 21 nt, Homo sapiens
ccccucccagccucccugcca

SEQ ID NO: 22534 - RNA, 22 nt, Homo sapiens
acucaccgacagguugaauguu

SEQ ID NO: 22535 - RNA, 23 nt, Homo sapiens
cccaacagacauggcgguacuca

SEQ ID NO: 22536 - RNA, 22 nt, Homo sapiens
uaaccgauuucaaauggugcua

SEQ ID NO: 22537 - RNA, 20 nt, Homo sapiens
agugcccccacaguuugagu

SEQ ID NO: 22538 - RNA, 23 nt, Homo sapiens
caugagugacgcccucuggagua

SEQ ID NO: 22539 - RNA, 22 nt, Homo sapiens
ugugggugugugcaugagcgug

SEQ ID NO: 22540 - RNA, 22 nt, Homo sapiens
gacucuugaacaacacagguuu

SEQ ID NO: 22541 - RNA, 22 nt, Homo sapiens
gcugaggcuguggggcuggagu

SEQ ID NO: 22542 - RNA, 22 nt, Homo sapiens
cacucuaaagggaggcacuuug

SEQ ID NO: 22543 - RNA, 21 nt, Homo sapiens
ggggagcgggggcccugccuu

SEQ ID NO: 22544 - RNA, 23 nt, Homo sapiens
gggagugaagacacggagccaga

SEQ ID NO: 22545 - RNA, 22 nt, Homo sapiens
ucaggaacugccuuucucucca

SEQ ID NO: 22546 - RNA, 23 nt, Homo sapiens
cccaacagacauggcgguacuca

SEQ ID NO: 22547 - RNA, 21 nt, Homo sapiens
cugcugggccacaacguggga

SEQ ID NO: 22548 - RNA, 21 nt, Homo sapiens
cugcugggccacaacguggga

SEQ ID NO: 22549 - RNA, 23 nt, Homo sapiens
cuccagccccuccagggcuuccu

SEQ ID NO: 22550 - RNA, 23 nt, Homo sapiens
agaaaccaugggguaugagcaga

SEQ ID NO: 22551 - RNA, 23 nt, Homo sapiens
ccgcuugagcuaacuccgacccg

SEQ ID NO: 22552 - RNA, 18 nt, Homo sapiens
aucacauucaccucccug

SEQ ID NO: 22553 - RNA, 23 nt, Homo sapiens
cuaucugcacuagaugcaccuua

SEQ ID NO: 22554 - RNA, 22 nt, Homo sapiens
cccaacaacaggaaacuaccua

SEQ ID NO: 22555 - RNA, 20 nt, Homo sapiens
acagcaaggagggcaggagg

SEQ ID NO: 22556 - RNA, 21 nt, Homo sapiens
acuccaaagggaagcgccuuc

SEQ ID NO: 22557 - RNA, 22 nt, Homo sapiens
cgcucuaaagggaagcgccuuc

SEQ ID NO: 22558 - RNA, 19 nt, Homo sapiens
guugggaucacaggcgccc

SEQ ID NO: 22559 - RNA, 23 nt, Homo sapiens
acagcgcucgcaaccgcagcgau

SEQ ID NO: 22560 - RNA, 22 nt, Homo sapiens
caagacacauuuggagagggac

SEQ ID NO: 22561 - RNA, 21 nt, Homo sapiens
guccugagagcgcugccuccu

SEQ ID NO: 22562 - RNA, 22 nt, Homo sapiens
ucggucccucgggccagggcag

SEQ ID NO: 22563 - RNA, 23 nt, Homo sapiens
gcacaugugcacacagccgggug

SEQ ID NO: 22564 - RNA, 26 nt, Homo sapiens
uuucagaauuugcugccaucaucauc

SEQ ID NO: 22565 - RNA, 23 nt, Homo sapiens
gucacaucccucccaagacccuc

SEQ ID NO: 22566 - RNA, 23 nt, Homo sapiens
gggagugaagacacggagccaga

SEQ ID NO: 22567 - RNA, 22 nt, Homo sapiens
cacaaaccauuaugugcugcua

SEQ ID NO: 22568 - RNA, 22 nt, Homo sapiens
uguaaaccaugaugugcugcua

SEQ ID NO: 22569 - RNA, 22 nt, Homo sapiens
cgccaauauuuacgugcugcua

SEQ ID NO: 22570 - RNA, 21 nt, Homo sapiens
gccaauauuucugugcugcua

SEQ ID NO: 22571 - RNA, 23 nt, Homo sapiens
ucaguuuugcauagauuugcaca

SEQ ID NO: 22572 - RNA, 22 nt, Homo sapiens
cacucagcaccaggauauuguu

SEQ ID NO: 22573 - RNA, 22 nt, Homo sapiens
aacuaugcaaccuacuaccucu

SEQ ID NO: 22574 - RNA, 21 nt, Homo sapiens
ggaaaucccuggcaaugugau

SEQ ID NO: 22575 - RNA, 21 nt, Homo sapiens
gguaaucccuggcaaugugau

SEQ ID NO: 22576 - RNA, 22 nt, Homo sapiens
ucagaccgagacaagugcaaug

SEQ ID NO: 22577 - RNA, 22 nt, Homo sapiens
acaaaaguugccuuugugugau

SEQ ID NO: 22578 - RNA, 23 nt, Homo sapiens
aaagucucgcucucugccccuca

SEQ ID NO: 22579 - RNA, 22 nt, Homo sapiens
uucaaaacaugaauugcugcug

SEQ ID NO: 22580 - RNA, 21 nt, Homo sapiens
acaaaccacagugugcugcug

SEQ ID NO: 22581 - RNA, 22 nt, Homo sapiens
caagacacauuuggagagggac

SEQ ID NO: 22582 - RNA, 25 nt, Homo sapiens
accaacggaccuacuucccuccgcc

SEQ ID NO: 22583 - RNA, 22 nt, Homo sapiens
ugcuguuagcccuagccccgca

SEQ ID NO: 22584 - RNA, 20 nt, Homo sapiens
uccccacagacccagagccg

SEQ ID NO: 22585 - RNA, 21 nt, Homo sapiens
caucaccuuccuucuccucca

SEQ ID NO: 22586 - RNA, 22 nt, Homo sapiens
cacucuaaagggaggcacuuug

SEQ ID NO: 22587 - RNA, 21 nt, Homo sapiens
cucccccacugcagcuggcac

SEQ ID NO: 22588 - RNA, 22 nt, Homo sapiens
ucccucacacagaauuccagaa

SEQ ID NO: 22589 - RNA, 23 nt, Homo sapiens
cagcugcuuuugggauuccguug

SEQ ID NO: 22590 - RNA, 23 nt, Homo sapiens
ucaguuuugcauagauuugcaca

SEQ ID NO: 22591 - RNA, 22 nt, Homo sapiens
cacucagcaccaggauauuguu

SEQ ID NO: 22592 - RNA, 22 nt, Homo sapiens
aacuaugcaaccuacuaccucu

SEQ ID NO: 22593 - RNA, 22 nt, Homo sapiens
ucgcccucucaacccagcuuuu

SEQ ID NO: 22594 - RNA, 22 nt, Homo sapiens
uugcccucucaacccagcuuuu

SEQ ID NO: 22595 - RNA, 20 nt, Homo sapiens
acccucucaacccagcuuuu

SEQ ID NO: 22596 - RNA, 19 nt, Homo sapiens
uccucucaacccagcuuuu

SEQ ID NO: 22597 - RNA, 21 nt, Homo sapiens
ugcaaugcaacuacaaugcac

SEQ ID NO: 22598 - RNA, 23 nt, Homo sapiens
acacucuaaagagaagcgcuuug

SEQ ID NO: 22599 - RNA, 21 nt, Homo sapiens
agaaaguacuucccucuggag

SEQ ID NO: 22600 - RNA, 21 nt, Homo sapiens
agaaagugcaucccucuggag

SEQ ID NO: 22601 - RNA, 22 nt, Homo sapiens
gcaaaagaaacugugguuuuug

SEQ ID NO: 22602 - RNA, 19 nt, Homo sapiens
ucccacaggaagcagacac

SEQ ID NO: 22603 - RNA, 21 nt, Homo sapiens
cacaaccucaguguuuccagg

SEQ ID NO: 22604 - RNA, 22 nt, Homo sapiens
caaacaccauugucacacucca

SEQ ID NO: 22605 - RNA, 20 nt, Homo sapiens
ggggcagacagacgaggaag

SEQ ID NO: 22606 - RNA, 22 nt, Homo sapiens
cacgaccgacgccacgccgagu

SEQ ID NO: 22607 - RNA, 22 nt, Homo sapiens
ccaucuuuaccagacaguguua

SEQ ID NO: 22608 - RNA, 22 nt, Homo sapiens
ggagcccgcgccccgcgccgag

SEQ ID NO: 22609 - RNA, 22 nt, Homo sapiens
augggacauccuacauaugcaa

SEQ ID NO: 22610 - RNA, 21 nt, Homo sapiens
aggagacucacaaguuccugc

SEQ ID NO: 22611 - RNA, 22 nt, Homo sapiens
uauccacuacaccccgcugccu

SEQ ID NO: 22612 - RNA, 22 nt, Homo sapiens
caaacaccauugucacacucca

SEQ ID NO: 22613 - RNA, 22 nt, Homo sapiens
cacugguacaaggguugggaga

SEQ ID NO: 22614 - RNA, 21 nt, Homo sapiens
acuagacugugagcuccucga

SEQ ID NO: 22615 - RNA, 21 nt, Homo sapiens
gaccaaucgccguccccgccg

SEQ ID NO: 22616 - RNA, 20 nt, Homo sapiens
cccgccgcgucgcccugggg

SEQ ID NO: 22617 - RNA, 23 nt, Homo sapiens
cggcucugucgucgaggcgcuca

SEQ ID NO: 22618 - RNA, 22 nt, Homo sapiens
auaaggauuuuuaggggcauua

SEQ ID NO: 22619 - RNA, 19 nt, Homo sapiens
guugggaucacaggcgccc

SEQ ID NO: 22620 - RNA, 22 nt, Homo sapiens
gcggucccgcggcgccccgccu

SEQ ID NO: 22621 - RNA, 22 nt, Homo sapiens
ccucaggcacggccgggccacc

SEQ ID NO: 22622 - RNA, 22 nt, Homo sapiens
ugcuguuagcccuagccccgca

SEQ ID NO: 22623 - RNA, 24 nt, Homo sapiens
acugcaggcuccagcuuccaggcu

SEQ ID NO: 22624 - RNA, 22 nt, Homo sapiens
auagaugauaugcacaguacua

SEQ ID NO: 22625 - RNA, 23 nt, Homo sapiens
gggagugaagacacggagccaga

SEQ ID NO: 22626 - RNA, 21 nt, Homo sapiens
gaccaaucgccguccccgccg

SEQ ID NO: 22627 - RNA, 22 nt, Homo sapiens
uggcagcagcggagggggcaga

SEQ ID NO: 22628 - RNA, 22 nt, Homo sapiens
uagucaagugaagcagugggag

SEQ ID NO: 22629 - RNA, 21 nt, Homo sapiens
aucugcacugucagcacuuua

SEQ ID NO: 22630 - RNA, 23 nt, Homo sapiens
gcuuugacaauaucauugcacug

SEQ ID NO: 22631 - RNA, 20 nt, Homo sapiens
ccagcagcaccuggggcagu

SEQ ID NO: 22632 - RNA, 22 nt, Homo sapiens
aucgggaggggacugagccuga

SEQ ID NO: 22633 - RNA, 21 nt, Homo sapiens
auccuguacugagcugccccg

SEQ ID NO: 22634 - RNA, 22 nt, Homo sapiens
aggaaaccagcaaguguugacg

SEQ ID NO: 22635 - RNA, 22 nt, Homo sapiens
ugcaagccuugggugugggagg

SEQ ID NO: 22636 - RNA, 22 nt, Homo sapiens
gcggucccgcggcgccccgccu

SEQ ID NO: 22637 - RNA, 22 nt, Homo sapiens
ugcuguuagcccuagccccgca

SEQ ID NO: 22638 - RNA, 22 nt, Homo sapiens
cacauggccaaaacagagaaga

SEQ ID NO: 22639 - RNA, 20 nt, Homo sapiens
ggggggcgaggcagguguga

SEQ ID NO: 22640 - RNA, 21 nt, Homo sapiens
cugggggacggagcagaagga

SEQ ID NO: 22641 - RNA, 19 nt, Homo sapiens
ucccugauccaaaaaucca

SEQ ID NO: 22642 - RNA, 22 nt, Homo sapiens
cuguuccugcugaacugagcca

SEQ ID NO: 22643 - RNA, 22 nt, Homo sapiens
gaagaaaggcaucauauaggag

SEQ ID NO: 22644 - RNA, 22 nt, Homo sapiens
acaaccagcuaagacacugcca

SEQ ID NO: 22645 - RNA, 23 nt, Homo sapiens
gcaaucagcuaacuacacugccu

SEQ ID NO: 22646 - RNA, 22 nt, Homo sapiens
accagcuaacaauacacugcca

SEQ ID NO: 22647 - RNA, 22 nt, Homo sapiens
gccagcuaacaauacacugccu

SEQ ID NO: 22648 - RNA, 22 nt, Homo sapiens
gccagcuaacaauacacugccu

SEQ ID NO: 22649 - RNA, 18 nt, Homo sapiens
acccucugaaaggaagca

SEQ ID NO: 22650 - RNA, 22 nt, Homo sapiens
aaagugcuucuuaccuccagau

SEQ ID NO: 22651 - RNA, 23 nt, Homo sapiens
ggacauuguuucagugcccaagu

SEQ ID NO: 22652 - RNA, 19 nt, Homo sapiens
gcucuaagaaagccacacu

SEQ ID NO: 22653 - RNA, 21 nt, Homo sapiens
gaaggaagugagugcagccac

SEQ ID NO: 22654 - RNA, 23 nt, Homo sapiens
cuccagccccuccagggcuuccu

SEQ ID NO: 22655 - RNA, 20 nt, Homo sapiens
gcagcuguccgcccagacac

SEQ ID NO: 22656 - RNA, 22 nt, Homo sapiens
agcccaaaaggagaauucuuug

SEQ ID NO: 22657 - RNA, 21 nt, Homo sapiens
aacggaaccacuagugacuug

SEQ ID NO: 22658 - RNA, 22 nt, Homo sapiens
gagcccuggacuaggagucagc

SEQ ID NO: 22659 - RNA, 22 nt, Homo sapiens
agggguucaccgagcaacauuc

SEQ ID NO: 22660 - RNA, 22 nt, Homo sapiens
aggaaaccagcaaguguugacg

SEQ ID NO: 22661 - RNA, 22 nt, Homo sapiens
aagaagugcaccgcgaauguuu

SEQ ID NO: 22662 - RNA, 23 nt, Homo sapiens
uuuauugugguagauacuauuag

SEQ ID NO: 22663 - RNA, 23 nt, Homo sapiens
uuuauugugguagauacuauuag

SEQ ID NO: 22664 - RNA, 22 nt, Homo sapiens
gguuaguggaccaggucacaaa

SEQ ID NO: 22665 - RNA, 23 nt, Homo sapiens
aaucuacuuucuuugcucauccu

SEQ ID NO: 22666 - RNA, 22 nt, Homo sapiens
aaccacuuucuuugcucauccg

SEQ ID NO: 22667 - RNA, 22 nt, Homo sapiens
augcccuuuuaacauugcacug

SEQ ID NO: 22668 - RNA, 18 nt, Homo sapiens
aucacauucaccucccug

SEQ ID NO: 22669 - RNA, 22 nt, Homo sapiens
ccccucuggucaaccagucaca

SEQ ID NO: 22670 - RNA, 22 nt, Homo sapiens
ccaucuuuaccagacaguguua

SEQ ID NO: 22671 - RNA, 22 nt, Homo sapiens
cagaagugggccgggcacaggg

SEQ ID NO: 22672 - RNA, 22 nt, Homo sapiens
cacucagcggccguuuccccaa

SEQ ID NO: 22673 - RNA, 22 nt, Homo sapiens
ucacaguugccagcugagauua

SEQ ID NO: 22674 - RNA, 21 nt, Homo sapiens
ggaaaucccuggcaaugugau

SEQ ID NO: 22675 - RNA, 21 nt, Homo sapiens
gguaaucccuggcaaugugau

SEQ ID NO: 22676 - RNA, 22 nt, Homo sapiens
gcgaauauaacacggucgaucu

SEQ ID NO: 22677 - RNA, 21 nt, Homo sapiens
ccuucugacuccaaguccagu

SEQ ID NO: 22678 - RNA, 22 nt, Homo sapiens
uauggaugcaaaaugaucccaa

SEQ ID NO: 22679 - RNA, 21 nt, Homo sapiens
uggaaaccaagagugggucgc

SEQ ID NO: 22680 - RNA, 21 nt, Homo sapiens
cugaaaccaaguaugggucgc

SEQ ID NO: 22681 - RNA, 21 nt, Homo sapiens
aguucucccaacguaaaccca

SEQ ID NO: 22682 - RNA, 25 nt, Homo sapiens
aggccgccacccgcccgcgaucccu

SEQ ID NO: 22683 - RNA, 22 nt, Homo sapiens
caagacacauuuggagagggac

SEQ ID NO: 22684 - RNA, 20 nt, Homo sapiens
aggggccucagccuccuggu

SEQ ID NO: 22685 - RNA, 21 nt, Homo sapiens
caucaccuuccuucuccucca

SEQ ID NO: 22686 - RNA, 23 nt, Homo sapiens
aaccaagaccccggagaucccag

SEQ ID NO: 22687 - RNA, 23 nt, Homo sapiens
acacagcucuuccauaucuccag

SEQ ID NO: 22688 - RNA, 22 nt, Homo sapiens
cgaaggcaacacggauaaccua

SEQ ID NO: 22689 - RNA, 25 nt, Homo sapiens
agcuagucaagcgcgguuguggggg

SEQ ID NO: 22690 - RNA, 23 nt, Homo sapiens
ucaccaaaacauggaagcacuua

SEQ ID NO: 22691 - RNA, 23 nt, Homo sapiens
cuacuaaaacauggaagcacuua

SEQ ID NO: 22692 - RNA, 23 nt, Homo sapiens
ccacugaaacauggaagcacuua

SEQ ID NO: 22693 - RNA, 23 nt, Homo sapiens
acacucaaacauggaagcacuua

SEQ ID NO: 22694 - RNA, 17 nt, Homo sapiens
aagcauggaagcacuua

SEQ ID NO: 22695 - RNA, 23 nt, Homo sapiens
acgcucaaaugucgcagcacuuu

SEQ ID NO: 22696 - RNA, 23 nt, Homo sapiens
acaccccaaaaucgaagcacuuc

SEQ ID NO: 22697 - RNA, 21 nt, Homo sapiens
acaggccaucuguguuauauu

SEQ ID NO: 22698 - RNA, 22 nt, Homo sapiens
gcugccguauaugugaugucac

SEQ ID NO: 22699 - RNA, 22 nt, Homo sapiens
ccucauggaaggguuccccacu

SEQ ID NO: 22700 - RNA, 22 nt, Homo sapiens
agcacagacuugcugugauguu

SEQ ID NO: 22701 - RNA, 22 nt, Homo sapiens
gaccucagcuaugacagcacuu

SEQ ID NO: 22702 - RNA, 22 nt, Homo sapiens
acaguccaaagggaagcacuuu

SEQ ID NO: 22703 - RNA, 21 nt, Homo sapiens
cccucuaaaaggaagcacuuu

SEQ ID NO: 22704 - RNA, 22 nt, Homo sapiens
acccucuaaaaggaagcacuuu

SEQ ID NO: 22705 - RNA, 22 nt, Homo sapiens
acccaccaaagagaagcacuuu

SEQ ID NO: 22706 - RNA, 21 nt, Homo sapiens
cccucaaaaaggaagcacuuu

SEQ ID NO: 22707 - RNA, 20 nt, Homo sapiens
ugggccaccgccgagcggac

SEQ ID NO: 22708 - RNA, 22 nt, Homo sapiens
gauuccaauuuuuccacaucuu

SEQ ID NO: 22709 - RNA, 22 nt, Homo sapiens
cugcucaaacccuccaaugacu

SEQ ID NO: 22710 - RNA, 20 nt, Homo sapiens
auuucuauaucuaucuccau

SEQ ID NO: 22711 - RNA, 22 nt, Homo sapiens
uccucuuuucuuagagacucac

SEQ ID NO: 22712 - RNA, 25 nt, Homo sapiens
accaacggaccuacuucccuccgcc

SEQ ID NO: 22713 - RNA, 20 nt, Homo sapiens
gcaagacaucacaagacucu

SEQ ID NO: 22714 - RNA, 23 nt, Homo sapiens
gggagugaagacacggagccaga

SEQ ID NO: 22715 - RNA, 22 nt, Homo sapiens
ucaggaacugccuuucucucca

SEQ ID NO: 22716 - RNA, 22 nt, Homo sapiens
uucacacugcaugcucugggua

SEQ ID NO: 22717 - RNA, 22 nt, Homo sapiens
agcugaguguaggauguuuaca

SEQ ID NO: 22718 - RNA, 21 nt, Homo sapiens
aucugcacugucagcacuuua

SEQ ID NO: 22719 - RNA, 23 nt, Homo sapiens
gcuuugacaauaucauugcacug

SEQ ID NO: 22720 - RNA, 22 nt, Homo sapiens
gcgaacgcgccacggaccaccu

SEQ ID NO: 22721 - RNA, 20 nt, Homo sapiens
cuggaggaagggcccagagg

SEQ ID NO: 22722 - RNA, 22 nt, Homo sapiens
gccuaagacacaggcccagaga

SEQ ID NO: 22723 - RNA, 22 nt, Homo sapiens
uacagauggauaccgugcaauu

SEQ ID NO: 22724 - RNA, 22 nt, Homo sapiens
ugcaagccuugggugugggagg

SEQ ID NO: 22725 - RNA, 22 nt, Homo sapiens
cuccuccaacaauccuagacca

SEQ ID NO: 22726 - RNA, 25 nt, Homo sapiens
acggagcugucccaacaccaccccu

SEQ ID NO: 22727 - RNA, 20 nt, Homo sapiens
aggggccucagccuccuggu

SEQ ID NO: 22728 - RNA, 23 nt, Homo sapiens
gcacaugugcacacagccgggug

SEQ ID NO: 22729 - RNA, 19 nt, Homo sapiens
ccaccucccgaguccucac

SEQ ID NO: 22730 - RNA, 22 nt, Homo sapiens
ggcucccaagaaccucaccugu

SEQ ID NO: 22731 - RNA, 21 nt, Homo sapiens
uggggauuacacuucaacagg

SEQ ID NO: 22732 - RNA, 20 nt, Homo sapiens
cccgccgcgucgcccugggg

SEQ ID NO: 22733 - RNA, 21 nt, Homo sapiens
gcggaacuuagccacugugaa

SEQ ID NO: 22734 - RNA, 23 nt, Homo sapiens
gcgcccaauuaaugucuguugau

SEQ ID NO: 22735 - RNA, 23 nt, Homo sapiens
ccacccaaugaccuacuccaaga

SEQ ID NO: 22736 - RNA, 22 nt, Homo sapiens
uauggaugcaaaaugaucccaa

SEQ ID NO: 22737 - RNA, 21 nt, Homo sapiens
acuuuccaggauucauuaacu

SEQ ID NO: 22738 - RNA, 22 nt, Homo sapiens
guccaaaguuggggugcugguu

SEQ ID NO: 22739 - RNA, 23 nt, Homo sapiens
aaccaagaccccggagaucccag

SEQ ID NO: 22740 - RNA, 23 nt, Homo sapiens
gacguaguccuauucucugcugc

SEQ ID NO: 22741 - RNA, 22 nt, Homo sapiens
ccaguagcacggcucaguccag

SEQ ID NO: 22742 - RNA, 17 nt, Homo sapiens
caccugaauuacuugaa

SEQ ID NO: 22743 - RNA, 22 nt, Homo sapiens
cacaucucacuguagccucaaa

SEQ ID NO: 22744 - RNA, 22 nt, Homo sapiens
cacaucucacuguagccucaaa

SEQ ID NO: 22745 - RNA, 21 nt, Homo sapiens
ccgugguucuacccuguggua

SEQ ID NO: 22746 - RNA, 22 nt, Homo sapiens
agccuauccuggauuacuugaa

SEQ ID NO: 22747 - RNA, 21 nt, Homo sapiens
accuauccugaauuacuugaa

SEQ ID NO: 22748 - RNA, 22 nt, Homo sapiens
ggagagccuccacccaacccuc

SEQ ID NO: 22749 - RNA, 22 nt, Homo sapiens
agcugaguguaggauguuuaca

SEQ ID NO: 22750 - RNA, 22 nt, Homo sapiens
acaaaaguugccuuugugugau

SEQ ID NO: 22751 - RNA, 23 nt, Homo sapiens
aaagucucgcucucugccccuca

SEQ ID NO: 22752 - RNA, 21 nt, Homo sapiens
guguauaugcccauggacugc

SEQ ID NO: 22753 - RNA, 20 nt, Homo sapiens
aggggccucagccuccuggu

SEQ ID NO: 22754 - RNA, 20 nt, Homo sapiens
cccugcgccaucuccucuac

SEQ ID NO: 22755 - RNA, 22 nt, Homo sapiens
uccggggacgaacgggacgggu

SEQ ID NO: 22756 - RNA, 18 nt, Homo sapiens
uggcgccugaacagggac

SEQ ID NO: 22757 - RNA, 18 nt, Homo sapiens
aucacauucaccucccug

SEQ ID NO: 22758 - RNA, 22 nt, Homo sapiens
ucaggaacugccuuucucucca

SEQ ID NO: 22759 - RNA, 22 nt, Homo sapiens
auaaggauuuuuaggggcauua

SEQ ID NO: 22760 - RNA, 20 nt, Homo sapiens
agagaugagagaaacacccu

SEQ ID NO: 22761 - RNA, 21 nt, Homo sapiens
caucaccuuccuucuccucca

SEQ ID NO: 22762 - RNA, 22 nt, Homo sapiens
cacauggccaaaacagagaaga

SEQ ID NO: 22763 - RNA, 23 nt, Homo sapiens
aacaggugcucaaauaagacuug

SEQ ID NO: 22764 - RNA, 22 nt, Homo sapiens
cuaccauaggguaaaaccacug

SEQ ID NO: 22765 - RNA, 21 nt, Homo sapiens
ccucaaggagcuucagucuag

SEQ ID NO: 22766 - RNA, 21 nt, Homo sapiens
gaccaaucgccguccccgccg

SEQ ID NO: 22767 - RNA, 22 nt, Homo sapiens
uggcagcagcggagggggcaga

SEQ ID NO: 22768 - RNA, 20 nt, Homo sapiens
ccagcagcaccuggggcagu

SEQ ID NO: 22769 - RNA, 21 nt, Homo sapiens
auccuguacugagcugccccg

SEQ ID NO: 22770 - RNA, 22 nt, Homo sapiens
cagcauggaguccuccagguug

SEQ ID NO: 22771 - RNA, 21 nt, Homo sapiens
acaaaccacagugugcugcug

SEQ ID NO: 22772 - RNA, 21 nt, Homo sapiens
acaaaccacagugugcugcug

SEQ ID NO: 22773 - RNA, 23 nt, Homo sapiens
caugagugacgcccucuggagua

SEQ ID NO: 22774 - RNA, 22 nt, Homo sapiens
gcggucccgcggcgccccgccu

SEQ ID NO: 22775 - RNA, 22 nt, Homo sapiens
uauccacuacaccccgcugccu

SEQ ID NO: 22776 - RNA, 21 nt, Homo sapiens
ccccucccagccucccugcca

SEQ ID NO: 22777 - RNA, 21 nt, Homo sapiens
ccgugguucuacccuguggua

SEQ ID NO: 22778 - RNA, 18 nt, Homo sapiens
auucaaucuacugccuca

SEQ ID NO: 22779 - RNA, 22 nt, Homo sapiens
cuuccagucgaggauguuuaca

SEQ ID NO: 22780 - RNA, 22 nt, Homo sapiens
agcugaguguaggauguuuaca

SEQ ID NO: 22781 - RNA, 23 nt, Homo sapiens
gcugagaguguaggauguuuaca

SEQ ID NO: 22782 - RNA, 22 nt, Homo sapiens
cuuccagucggggauguuuaca

SEQ ID NO: 22783 - RNA, 22 nt, Homo sapiens
cuuccagucaaggauguuuaca

SEQ ID NO: 22784 - RNA, 20 nt, Homo sapiens
cuggaggaagggcccagagg

SEQ ID NO: 22785 - RNA, 23 nt, Homo sapiens
ucucugcaggccgugugcuuugc

SEQ ID NO: 22786 - RNA, 22 nt, Homo sapiens
gccuaagacacaggcccagaga

SEQ ID NO: 22787 - RNA, 22 nt, Homo sapiens
uacagauggauaccgugcaauu

SEQ ID NO: 22788 - RNA, 21 nt, Homo sapiens
auccuguacugagcugccccg

SEQ ID NO: 22789 - RNA, 18 nt, Homo sapiens
acccucugaaaggaagca

SEQ ID NO: 22790 - RNA, 22 nt, Homo sapiens
aaagugcuucuuaccuccagau

SEQ ID NO: 22791 - RNA, 22 nt, Homo sapiens
aguccagauucugugcccacca

SEQ ID NO: 22792 - RNA, 24 nt, Homo sapiens
acgcagagcccgaaagcccccagu

SEQ ID NO: 22793 - RNA, 21 nt, Homo sapiens
gaaggaagugagugcagccac

SEQ ID NO: 22794 - RNA, 22 nt, Homo sapiens
gcacauguucugcggcccacca

SEQ ID NO: 22795 - RNA, 21 nt, Homo sapiens
ggggagcgggggcccugccuu

SEQ ID NO: 22796 - RNA, 22 nt, Homo sapiens
cacaagaucggaucuacggguu

SEQ ID NO: 22797 - RNA, 22 nt, Homo sapiens
cgcaaggucgguucuacgggug

SEQ ID NO: 22798 - RNA, 21 nt, Homo sapiens
gcuuaaacaucuacaugaaca

SEQ ID NO: 22799 - RNA, 20 nt, Homo sapiens
gcagcuguccgcccagacac

SEQ ID NO: 22800 - RNA, 22 nt, Homo sapiens
cacuccuauaauugauccaguu

SEQ ID NO: 22801 - RNA, 17 nt, Homo sapiens
gacagccucucccccac

SEQ ID NO: 22802 - RNA, 21 nt, Homo sapiens
ucacccagaucugcggccuaa

SEQ ID NO: 22803 - RNA, 22 nt, Homo sapiens
ucaggaacugccuuucucucca

SEQ ID NO: 22804 - RNA, 22 nt, Homo sapiens
ccggcugcaacacaagacacga

SEQ ID NO: 22805 - RNA, 23 nt, Homo sapiens
gaacagguagucugaacacuggg

SEQ ID NO: 22806 - RNA, 23 nt, Homo sapiens
gaacagauagucuaaacacuggg

SEQ ID NO: 22807 - RNA, 23 nt, Homo sapiens
cuaccugcacuaugagcacuuug

SEQ ID NO: 22808 - RNA, 23 nt, Homo sapiens
gaaacccagcagacaauguagcu

SEQ ID NO: 22809 - RNA, 21 nt, Homo sapiens
uucuaggauaggcccaggggc

SEQ ID NO: 22810 - RNA, 22 nt, Homo sapiens
ucaguuuccucugcaaacaguu

SEQ ID NO: 22811 - RNA, 22 nt, Homo sapiens
aaagugcuucuuaccuccagau

SEQ ID NO: 22812 - RNA, 25 nt, Homo sapiens
acggagcugucccaacaccaccccu

SEQ ID NO: 22813 - RNA, 22 nt, Homo sapiens
cugggggcggcacaggggcuca

SEQ ID NO: 22814 - RNA, 18 nt, Homo sapiens
cccccaccaccacgcccg

SEQ ID NO: 22815 - RNA, 22 nt, Homo sapiens
aucagagcccucugagcuucag

SEQ ID NO: 22816 - RNA, 21 nt, Homo sapiens
gaccaaucgccguccccgccg

SEQ ID NO: 22817 - RNA, 21 nt, Homo sapiens
agagcucauccauaguuguca

SEQ ID NO: 22818 - RNA, 22 nt, Homo sapiens
ggcaaaauccgcaauuacuuuu

SEQ ID NO: 22819 - RNA, 23 nt, Homo sapiens
aagaaucuugucccgcagguccu

SEQ ID NO: 22820 - RNA, 19 nt, Homo sapiens
uagcauacagauacgccca

SEQ ID NO: 22821 - RNA, 24 nt, Homo sapiens
acugggcacaaacauguccagguc

SEQ ID NO: 22822 - RNA, 21 nt, Homo sapiens
gcugaggucugggccaggucu

SEQ ID NO: 22823 - RNA, 22 nt, Homo sapiens
gcggucccgcggcgccccgccu

SEQ ID NO: 22824 - RNA, 22 nt, Homo sapiens
ugcuguuagcccuagccccgca

SEQ ID NO: 22825 - RNA, 21 nt, Homo sapiens
ccccucccagccucccugcca

SEQ ID NO: 22826 - RNA, 24 nt, Homo sapiens
acugcuggucuucagucagggcca

SEQ ID NO: 22827 - RNA, 25 nt, Homo sapiens
cagcgucugccggaacccguuccca

SEQ ID NO: 22828 - RNA, 19 nt, Homo sapiens
cagcaucagcagcaucauc

SEQ ID NO: 22829 - RNA, 23 nt, Homo sapiens
gggagugaagacacggagccaga

SEQ ID NO: 22830 - RNA, 21 nt, Homo sapiens
gaccaaucgccguccccgccg

SEQ ID NO: 22831 - RNA, 22 nt, Homo sapiens
cggugagcacccggccccugcg

SEQ ID NO: 22832 - RNA, 22 nt, Homo sapiens
agcugaguguaggauguuuaca

SEQ ID NO: 22833 - RNA, 22 nt, Homo sapiens
gcggucccgcggcgccccgccu

SEQ ID NO: 22834 - RNA, 22 nt, Homo sapiens
ugcuguuagcccuagccccgca

SEQ ID NO: 22835 - RNA, 21 nt, Homo sapiens
caucaccuuccuucuccucca

SEQ ID NO: 22836 - RNA, 24 nt, Homo sapiens
cacccccagagccucagcucccca

SEQ ID NO: 22837 - RNA, 22 nt, Homo sapiens
caaacaccauugucacacucca

SEQ ID NO: 22838 - RNA, 21 nt, Homo sapiens
auguaggccuuuagaucacuu

SEQ ID NO: 22839 - RNA, 21 nt, Homo sapiens
gaccaaucgccguccccgccg

SEQ ID NO: 22840 - RNA, 22 nt, Homo sapiens
gaauucaucacggccagccucu

SEQ ID NO: 22841 - RNA, 19 nt, Homo sapiens
guugggaucacaggcgccc

SEQ ID NO: 22842 - RNA, 22 nt, Homo sapiens
aagagggagacccaggcucgga

SEQ ID NO: 22843 - RNA, 22 nt, Homo sapiens
caagacacauuuggagagggac

SEQ ID NO: 22844 - RNA, 19 nt, Homo sapiens
ucagcaguaccagccuaga

SEQ ID NO: 22845 - RNA, 19 nt, Homo sapiens
gccucagaggcagcugcuu

SEQ ID NO: 22846 - RNA, 22 nt, Homo sapiens
gcggucccgcggcgccccgccu

SEQ ID NO: 22847 - RNA, 22 nt, Homo sapiens
ugcuguuagcccuagccccgca

SEQ ID NO: 22848 - RNA, 20 nt, Homo sapiens
uacugcuuccacagcucccc

SEQ ID NO: 22849 - RNA, 23 nt, Homo sapiens
cuaccugcacuguaagcacuuuu

SEQ ID NO: 22850 - RNA, 21 nt, Homo sapiens
aucugcacugucagcacuuua

SEQ ID NO: 22851 - RNA, 18 nt, Homo sapiens
cagcagccuccuucucaa

SEQ ID NO: 22852 - RNA, 22 nt, Homo sapiens
cacgaccgacgccacgccgagu

SEQ ID NO: 22853 - RNA, 23 nt, Homo sapiens
cuaccugcacuguaagcacuuug

SEQ ID NO: 22854 - RNA, 22 nt, Homo sapiens
cagaagugggccgggcacaggg

SEQ ID NO: 22855 - RNA, 23 nt, Homo sapiens
cuaccugcacuauaagcacuuua

SEQ ID NO: 22856 - RNA, 23 nt, Homo sapiens
cuaccugcacuaugagcacuuug

SEQ ID NO: 22857 - RNA, 22 nt, Homo sapiens
ucacaguugccagcugagauua

SEQ ID NO: 22858 - RNA, 23 nt, Homo sapiens
caugagugacgcccucuggagua

SEQ ID NO: 22859 - RNA, 22 nt, Homo sapiens
acacucuaaaaggaugcacuuu

SEQ ID NO: 22860 - RNA, 22 nt, Homo sapiens
acacucuaaaaggaugcacuuu

SEQ ID NO: 22861 - RNA, 22 nt, Homo sapiens
aaccucuaaaaggaugcacuuu

SEQ ID NO: 22862 - RNA, 22 nt, Homo sapiens
aaccucuaaaaggaugcacuuu

SEQ ID NO: 22863 - RNA, 22 nt, Homo sapiens
auccucuaaaaagaugcacuuu

SEQ ID NO: 22864 - RNA, 22 nt, Homo sapiens
auccucuaaaaagaugcacuuu

SEQ ID NO: 22865 - RNA, 22 nt, Homo sapiens
cacucuaaagggaggcacuuug

SEQ ID NO: 22866 - RNA, 24 nt, Homo sapiens
acacucuaaagggaagcacuuugu

SEQ ID NO: 22867 - RNA, 22 nt, Homo sapiens
acucuaaagggaagcacuuugu

SEQ ID NO: 22868 - RNA, 23 nt, Homo sapiens
acagaaagugcuucccucaagag

SEQ ID NO: 22869 - RNA, 21 nt, Homo sapiens
cugaaaccaaguaugggucgc

SEQ ID NO: 22870 - RNA, 24 nt, Homo sapiens
cugaucaguuacacaucacuucag

SEQ ID NO: 22871 - RNA, 23 nt, Homo sapiens
acacacucacacacacacacuca

SEQ ID NO: 22872 - RNA, 19 nt, Homo sapiens
accagugcccugcacacuu

SEQ ID NO: 22873 - RNA, 23 nt, Homo sapiens
cuaccugcacgaacagcacuuug

SEQ ID NO: 22874 - RNA, 22 nt, Homo sapiens
cugggggcggcacaggggcuca

SEQ ID NO: 22875 - RNA, 22 nt, Homo sapiens
caaacaccauugucacacucca

SEQ ID NO: 22876 - RNA, 24 nt, Homo sapiens
ucacagguuaaagggucucaggga

SEQ ID NO: 22877 - RNA, 22 nt, Homo sapiens
ucacaaguuagggucucaggga

SEQ ID NO: 22878 - RNA, 23 nt, Homo sapiens
agcccuguucuacagcccugagg

SEQ ID NO: 22879 - RNA, 22 nt, Homo sapiens
gcacaaaucuccagaccaccca

SEQ ID NO: 22880 - RNA, 22 nt, Homo sapiens
cacgaccgacgccacgccgagu

SEQ ID NO: 22881 - RNA, 21 nt, Homo sapiens
gaccaaucgccguccccgccg

SEQ ID NO: 22882 - RNA, 20 nt, Homo sapiens
cccgccgcgucgcccugggg

SEQ ID NO: 22883 - RNA, 22 nt, Homo sapiens
ucagaccgagacaagugcaaug

SEQ ID NO: 22884 - RNA, 22 nt, Homo sapiens
gcgaacgcgccacggaccaccu

SEQ ID NO: 22885 - RNA, 21 nt, Homo sapiens
uucuaggauaggcccaggggc

SEQ ID NO: 22886 - RNA, 23 nt, Homo sapiens
cggcucugucgucgaggcgcuca

SEQ ID NO: 22887 - RNA, 23 nt, Homo sapiens
cugcagaacuguucccgcugcua

SEQ ID NO: 22888 - RNA, 22 nt, Homo sapiens
gugauugccacucuccugagua

SEQ ID NO: 22889 - RNA, 22 nt, Homo sapiens
aagagggagacccaggcucgga

SEQ ID NO: 22890 - RNA, 22 nt, Homo sapiens
gcggucccgcggcgccccgccu

SEQ ID NO: 22891 - RNA, 22 nt, Homo sapiens
ugcuguuagcccuagccccgca

SEQ ID NO: 22892 - RNA, 23 nt, Homo sapiens
uggcccugacacgugguacugga

SEQ ID NO: 22893 - RNA, 25 nt, Homo sapiens
gaauccugguucugucccucacuag

SEQ ID NO: 22894 - RNA, 21 nt, Homo sapiens
agaaguagaccauguguccua

SEQ ID NO: 22895 - RNA, 21 nt, Homo sapiens
gaccaaucgccguccccgccg

SEQ ID NO: 22896 - RNA, 22 nt, Homo sapiens
acugccugucugugccugcugu

SEQ ID NO: 22897 - RNA, 22 nt, Homo sapiens
accagguuccaccccagcaggc

SEQ ID NO: 22898 - RNA, 23 nt, Homo sapiens
gucagaccccgagggguccucgc

SEQ ID NO: 22899 - RNA, 22 nt, Homo sapiens
gcggucccgcggcgccccgccu

SEQ ID NO: 22900 - RNA, 23 nt, Homo sapiens
cacugugggcccucuccgcacca

SEQ ID NO: 22901 - RNA, 22 nt, Homo sapiens
ugcuguuagcccuagccccgca

SEQ ID NO: 22902 - RNA, 23 nt, Homo sapiens
ccgcuugagcuaacuccgacccg

SEQ ID NO: 22903 - RNA, 22 nt, Homo sapiens
ggcagagagucagagcgcggau

SEQ ID NO: 22904 - RNA, 23 nt, Homo sapiens
ucauagcccuguacaaugcugcu

SEQ ID NO: 22905 - RNA, 23 nt, Homo sapiens
accacaggagucugagcauuuga

SEQ ID NO: 22906 - RNA, 23 nt, Homo sapiens
ugauagcccuguacaaugcugcu

SEQ ID NO: 22907 - RNA, 24 nt, Homo sapiens
acugcaggcuccagcuuccaggcu

SEQ ID NO: 22908 - RNA, 19 nt, Homo sapiens
ucccugauccaaaaaucca

SEQ ID NO: 22909 - RNA, 22 nt, Homo sapiens
uagucaagugaagcagugggag

SEQ ID NO: 22910 - RNA, 22 nt, Homo sapiens
ucaacaucagucugauaagcua

SEQ ID NO: 22911 - RNA, 22 nt, Homo sapiens
aucgggaggggacugagccuga

SEQ ID NO: 22912 - RNA, 21 nt, Homo sapiens
acaaaccacagugugcugcug

SEQ ID NO: 22913 - RNA, 23 nt, Homo sapiens
caugagugacgcccucuggagua

SEQ ID NO: 22914 - RNA, 23 nt, Homo sapiens
caugagugacgcccucuggagua

SEQ ID NO: 22915 - RNA, 22 nt, Homo sapiens
aaagugcuucuuaccuccagau

SEQ ID NO: 22916 - RNA, 23 nt, Homo sapiens
acacucuaaagagaagcgcuuug

SEQ ID NO: 22917 - RNA, 21 nt, Homo sapiens
agaaaguacuucccucuggag

SEQ ID NO: 22918 - RNA, 21 nt, Homo sapiens
agaaagugcaucccucuggag

SEQ ID NO: 22919 - RNA, 22 nt, Homo sapiens
gcaaaagaaacugugguuuuug

SEQ ID NO: 22920 - RNA, 22 nt, Homo sapiens
cugcacuuuuaugaauaagcuc

SEQ ID NO: 22921 - RNA, 23 nt, Homo sapiens
aggagaaggcaccaugggauuua

SEQ ID NO: 22922 - RNA, 20 nt, Homo sapiens
uccccacagacccagagccg

SEQ ID NO: 22923 - RNA, 20 nt, Homo sapiens
cccugcgccaucuccucuac

SEQ ID NO: 22924 - RNA, 21 nt, Homo sapiens
ccccucccagccucccugcca

SEQ ID NO: 22925 - RNA, 22 nt, Homo sapiens
uaaaugaauucaauuuccuucu

SEQ ID NO: 22926 - RNA, 24 nt, Homo sapiens
acugcaggcuccagcuuccaggcu

SEQ ID NO: 22927 - RNA, 20 nt, Homo sapiens
aagcagaaaaaggcaaacga

SEQ ID NO: 22928 - RNA, 22 nt, Homo sapiens
ccucauggaaggguuccccacu

SEQ ID NO: 22929 - RNA, 22 nt, Homo sapiens
gcacacaauaaauguuugcuga

SEQ ID NO: 22930 - RNA, 23 nt, Homo sapiens
ccgcuugagcuaacuccgacccg

SEQ ID NO: 22931 - RNA, 20 nt, Homo sapiens
uacugcuuccacagcucccc

SEQ ID NO: 22932 - RNA, 22 nt, Homo sapiens
ggcagagagucagagcgcggau

SEQ ID NO: 22933 - RNA, 21 nt, Homo sapiens
ggggagcgggggcccugccuu

SEQ ID NO: 22934 - RNA, 20 nt, Homo sapiens
ugucuccacagggcucuuua

SEQ ID NO: 22935 - RNA, 17 nt, Homo sapiens
gggagaggaggaggcga

SEQ ID NO: 22936 - RNA, 18 nt, Homo sapiens
aucacauucaccucccug

SEQ ID NO: 22937 - RNA, 21 nt, Homo sapiens
gaccaaucgccguccccgccg

SEQ ID NO: 22938 - RNA, 22 nt, Homo sapiens
cccaacaacaugaaacuaccua

SEQ ID NO: 22939 - RNA, 22 nt, Homo sapiens
cccaacaacaggaaacuaccua

SEQ ID NO: 22940 - RNA, 23 nt, Homo sapiens
gaaacccagcagacaauguagcu

SEQ ID NO: 22941 - RNA, 22 nt, Homo sapiens
ugggguauuugacaaacugaca

SEQ ID NO: 22942 - RNA, 21 nt, Homo sapiens
ggacuauagaacuuucccccu

SEQ ID NO: 22943 - RNA, 22 nt, Homo sapiens
gcggucccgcggcgccccgccu

SEQ ID NO: 22944 - RNA, 21 nt, Homo sapiens
auaauggagaccaggccacga

SEQ ID NO: 22945 - RNA, 22 nt, Homo sapiens
agcugaguguaggauguuuaca

SEQ ID NO: 22946 - RNA, 22 nt, Homo sapiens
aaucagucucauugcuuuauaa

SEQ ID NO: 22947 - RNA, 22 nt, Homo sapiens
guagaagggaaucuugcauaag

SEQ ID NO: 22948 - RNA, 20 nt, Homo sapiens
guguguauacauuuauacau

SEQ ID NO: 22949 - RNA, 24 nt, Homo sapiens
acgcgcaggccagagacccaggca

SEQ ID NO: 22950 - RNA, 22 nt, Homo sapiens
ccucaggcacggccgggccacc

SEQ ID NO: 22951 - RNA, 18 nt, Homo sapiens
aucacauucaccucccug

SEQ ID NO: 22952 - RNA, 23 nt, Homo sapiens
gggagugaagacacggagccaga

SEQ ID NO: 22953 - RNA, 22 nt, Homo sapiens
ucaggaacugccuuucucucca

SEQ ID NO: 22954 - RNA, 23 nt, Homo sapiens
cuaucugcacuagaugcaccuua

SEQ ID NO: 22955 - RNA, 20 nt, Homo sapiens
acagcaaggagggcaggagg

SEQ ID NO: 22956 - RNA, 22 nt, Homo sapiens
ucaacaucagucugauaagcua

SEQ ID NO: 22957 - RNA, 22 nt, Homo sapiens
cuguuccugcugaacugagcca

SEQ ID NO: 22958 - RNA, 22 nt, Homo sapiens
gaauucaucacggccagccucu

SEQ ID NO: 22959 - RNA, 21 nt, Homo sapiens
acuccaaagggaagcgccuuc

SEQ ID NO: 22960 - RNA, 22 nt, Homo sapiens
cgcucuaaagggaagcgccuuc

SEQ ID NO: 22961 - RNA, 21 nt, Homo sapiens
acuuuccaggauucauuaacu

SEQ ID NO: 22962 - RNA, 22 nt, Homo sapiens
aagagggagacccaggcucgga

SEQ ID NO: 22963 - RNA, 23 nt, Homo sapiens
acccaacagccccugcaagggau

SEQ ID NO: 22964 - RNA, 21 nt, Homo sapiens
auguaggccuuuagaucacuu

SEQ ID NO: 22965 - RNA, 22 nt, Homo sapiens
ggcucccaagaaccucaccugu

SEQ ID NO: 22966 - RNA, 22 nt, Homo sapiens
gacucgaaccacugauccagca

SEQ ID NO: 22967 - RNA, 23 nt, Homo sapiens
cccaacagacauggcgguacuca

SEQ ID NO: 22968 - RNA, 22 nt, Homo sapiens
ugagccacugugccuggccuga

SEQ ID NO: 22969 - RNA, 22 nt, Homo sapiens
ucgcccucucaacccagcuuuu

SEQ ID NO: 22970 - RNA, 22 nt, Homo sapiens
uugcccucucaacccagcuuuu

SEQ ID NO: 22971 - RNA, 20 nt, Homo sapiens
acccucucaacccagcuuuu

SEQ ID NO: 22972 - RNA, 19 nt, Homo sapiens
uccucucaacccagcuuuu

SEQ ID NO: 22973 - RNA, 22 nt, Homo sapiens
guaccccuggagauucugauaa

SEQ ID NO: 22974 - RNA, 23 nt, Homo sapiens
ugcgaacucaccacggacaaccu

SEQ ID NO: 22975 - RNA, 23 nt, Homo sapiens
acccuauaagcaauauugcacua

SEQ ID NO: 22976 - RNA, 21 nt, Homo sapiens
agaggcagguuccuggaucau

SEQ ID NO: 22977 - RNA, 22 nt, Homo sapiens
agcuagugagaagucaaugccu

SEQ ID NO: 22978 - RNA, 18 nt, Homo sapiens
cagcagccuccuucucaa

SEQ ID NO: 22979 - RNA, 21 nt, Homo sapiens
cagcgaaacaggcaaacggag

SEQ ID NO: 22980 - RNA, 23 nt, Homo sapiens
cagcugcuuuugggauuccguug

SEQ ID NO: 22981 - RNA, 22 nt, Homo sapiens
accagcuaacaauacacugcca

SEQ ID NO: 22982 - RNA, 22 nt, Homo sapiens
auaaggauuuuuaggggcauua

SEQ ID NO: 22983 - RNA, 22 nt, Homo sapiens
gcaaaagaaacugugguuuuug

SEQ ID NO: 22984 - RNA, 22 nt, Homo sapiens
cucagagcagacgugguucuca

SEQ ID NO: 22985 - RNA, 21 nt, Homo sapiens
acaugguuagaucaagcacaa

SEQ ID NO: 22986 - RNA, 21 nt, Homo sapiens
caucaccuuccuucuccucca

SEQ ID NO: 22987 - RNA, 21 nt, Homo sapiens
cugaggagagaggaggugggg

SEQ ID NO: 22988 - RNA, 24 nt, Homo sapiens
acugcaggcuccagcuuccaggcu

SEQ ID NO: 22989 - RNA, 18 nt, Homo sapiens
ugguggcagaggugggau

SEQ ID NO: 22990 - RNA, 22 nt, Homo sapiens
augcccuuuuaacauugcacug

SEQ ID NO: 22991 - RNA, 21 nt, Homo sapiens
ggaaaucccuggcaaugugau

SEQ ID NO: 22992 - RNA, 21 nt, Homo sapiens
gguaaucccuggcaaugugau

SEQ ID NO: 22993 - RNA, 25 nt, Homo sapiens
acggagcugucccaacaccaccccu

SEQ ID NO: 22994 - RNA, 22 nt, Homo sapiens
ucggucccucgggccagggcag

SEQ ID NO: 22995 - RNA, 21 nt, Homo sapiens
ccccucccagccucccugcca

SEQ ID NO: 22996 - RNA, 22 nt, Homo sapiens
cuggagagacaaggggaagagg

SEQ ID NO: 22997 - RNA, 21 nt, Homo sapiens
gaccaaucgccguccccgccg

SEQ ID NO: 22998 - RNA, 19 nt, Homo sapiens
guugggaucacaggcgccc

SEQ ID NO: 22999 - RNA, 21 nt, Homo sapiens
gcugaggucugggccaggucu

SEQ ID NO: 23000 - RNA, 19 nt, Homo sapiens
gcucuaagaaagccacacu

SEQ ID NO: 23001 - RNA, 21 nt, Homo sapiens
gaaggaagugagugcagccac

SEQ ID NO: 23002 - RNA, 22 nt, Homo sapiens
gcggucccgcggcgccccgccu

SEQ ID NO: 23003 - RNA, 22 nt, Homo sapiens
ugcuguuagcccuagccccgca

SEQ ID NO: 23004 - RNA, 20 nt, Homo sapiens
cccugcgccaucuccucuac

SEQ ID NO: 23005 - RNA, 22 nt, Homo sapiens
ccacacacuuccuuacauucca

SEQ ID NO: 23006 - RNA, 21 nt, Homo sapiens
gggcaucugggacgcgcagga

SEQ ID NO: 23007 - RNA, 21 nt, Homo sapiens
gaccaaucgccguccccgccg

SEQ ID NO: 23008 - RNA, 22 nt, Homo sapiens
uggcagcagcggagggggcaga

SEQ ID NO: 23009 - RNA, 20 nt, Homo sapiens
acagcaaggagggcaggagg

SEQ ID NO: 23010 - RNA, 20 nt, Homo sapiens
ccagcagcaccuggggcagu

SEQ ID NO: 23011 - RNA, 22 nt, Homo sapiens
aaagagguuaaccagguguguu

SEQ ID NO: 23012 - RNA, 22 nt, Homo sapiens
ugaauccuugaauagguguguu

SEQ ID NO: 23013 - RNA, 21 nt, Homo sapiens
auccuguacugagcugccccg

SEQ ID NO: 23014 - RNA, 18 nt, Homo sapiens
acccucugaaaggaagca

SEQ ID NO: 23015 - RNA, 22 nt, Homo sapiens
aaagugcuucuuaccuccagau

SEQ ID NO: 23016 - RNA, 22 nt, Homo sapiens
aaagugcuucuuaccuccagau

SEQ ID NO: 23017 - RNA, 23 nt, Homo sapiens
acacucuaaagagaagcgcuuug

SEQ ID NO: 23018 - RNA, 21 nt, Homo sapiens
agaaaguacuucccucuggag

SEQ ID NO: 23019 - RNA, 21 nt, Homo sapiens
agaaagugcaucccucuggag

SEQ ID NO: 23020 - RNA, 20 nt, Homo sapiens
ugggccaccgccgagcggac

SEQ ID NO: 23021 - RNA, 25 nt, Homo sapiens
accaacggaccuacuucccuccgcc

SEQ ID NO: 23022 - RNA, 22 nt, Homo sapiens
gcggucccgcggcgccccgccu

SEQ ID NO: 23023 - RNA, 22 nt, Homo sapiens
ugcuguuagcccuagccccgca

SEQ ID NO: 23024 - RNA, 21 nt, Homo sapiens
caucaccuuccuucuccucca

SEQ ID NO: 23025 - RNA, 23 nt, Homo sapiens
ucauagcccuguacaaugcugcu

SEQ ID NO: 23026 - RNA, 23 nt, Homo sapiens
ugauagcccuguacaaugcugcu

SEQ ID NO: 23027 - RNA, 22 nt, Homo sapiens
cacaaaccauuaugugcugcua

SEQ ID NO: 23028 - RNA, 22 nt, Homo sapiens
uguaaaccaugaugugcugcua

SEQ ID NO: 23029 - RNA, 22 nt, Homo sapiens
cgccaauauuuacgugcugcua

SEQ ID NO: 23030 - RNA, 18 nt, Homo sapiens
auucaaucuacugccuca

SEQ ID NO: 23031 - RNA, 21 nt, Homo sapiens
gccaauauuucugugcugcua

SEQ ID NO: 23032 - RNA, 23 nt, Homo sapiens
cuaccugcacuauaagcacuuua

SEQ ID NO: 23033 - RNA, 22 nt, Homo sapiens
acaguucuucaacuggcagcuu

SEQ ID NO: 23034 - RNA, 23 nt, Homo sapiens
acaccaaugcccuaggggaugcg

SEQ ID NO: 23035 - RNA, 23 nt, Homo sapiens
agaggcaggcaugcgggcagaca

SEQ ID NO: 23036 - RNA, 22 nt, Homo sapiens
uucaaaacaugaauugcugcug

SEQ ID NO: 23037 - RNA, 21 nt, Homo sapiens
acaaaccacagugugcugcug

SEQ ID NO: 23038 - RNA, 22 nt, Homo sapiens
gcacacaauaaauguuugcuga

SEQ ID NO: 23039 - RNA, 19 nt, Homo sapiens
auuuugguacagcagcuca

SEQ ID NO: 23040 - RNA, 22 nt, Homo sapiens
gauuccaauuuuuccacaucuu

SEQ ID NO: 23041 - RNA, 19 nt, Homo sapiens
ucccacaggaagcagacac

SEQ ID NO: 23042 - RNA, 21 nt, Homo sapiens
guccugagagcgcugccuccu

SEQ ID NO: 23043 - RNA, 20 nt, Homo sapiens
uccccacagacccagagccg

SEQ ID NO: 23044 - RNA, 23 nt, Homo sapiens
agaaaccaugggguaugagcaga

SEQ ID NO: 23045 - RNA, 21 nt, Homo sapiens
ccccucccagccucccugcca

SEQ ID NO: 23046 - RNA, 17 nt, Homo sapiens
gggagaggaggaggcga

SEQ ID NO: 23047 - RNA, 22 nt, Homo sapiens
aggucucacuuuguugcccaga

SEQ ID NO: 23048 - RNA, 24 nt, Homo sapiens
acugcuggucuucagucagggcca

SEQ ID NO: 23049 - RNA, 23 nt, Homo sapiens
uccaucaucaaaacaaauggagu

SEQ ID NO: 23050 - RNA, 21 nt, Homo sapiens
cggggugcacgggcggagggc

SEQ ID NO: 23051 - RNA, 22 nt, Homo sapiens
ucaggaacugccuuucucucca

SEQ ID NO: 23052 - RNA, 21 nt, Homo sapiens
gaccaaucgccguccccgccg

SEQ ID NO: 23053 - RNA, 22 nt, Homo sapiens
ucagaccgagacaagugcaaug

SEQ ID NO: 23054 - RNA, 22 nt, Homo sapiens
ucagaccgagacaagugcaaug

SEQ ID NO: 23055 - RNA, 22 nt, Homo sapiens
acggaagggcagagagggccag

SEQ ID NO: 23056 - RNA, 23 nt, Homo sapiens
aaaucagaaucacaccuggggga

SEQ ID NO: 23057 - RNA, 23 nt, Homo sapiens
acccuauaagcaauauugcacua

SEQ ID NO: 23058 - RNA, 21 nt, Homo sapiens
aucagagguucagcuuacccu

SEQ ID NO: 23059 - RNA, 25 nt, Homo sapiens
aaggagcucagaagcccugcccagc

SEQ ID NO: 23060 - RNA, 24 nt, Homo sapiens
acgcagagcccgaaagcccccagu

SEQ ID NO: 23061 - RNA, 25 nt, Homo sapiens
accaacggaccuacuucccuccgcc

SEQ ID NO: 23062 - RNA, 25 nt, Homo sapiens
accaacggaccuacuucccuccgcc

SEQ ID NO: 23063 - RNA, 22 nt, Homo sapiens
gcggucccgcggcgccccgccu

SEQ ID NO: 23064 - RNA, 22 nt, Homo sapiens
ugcuguuagcccuagccccgca

SEQ ID NO: 23065 - RNA, 21 nt, Homo sapiens
caucaccuuccuucuccucca

SEQ ID NO: 23066 - RNA, 22 nt, Homo sapiens
gcugaggcuguggggcuggagu

SEQ ID NO: 23067 - RNA, 23 nt, Homo sapiens
ggaagccaucaagucgcugcagg

SEQ ID NO: 23068 - RNA, 23 nt, Homo sapiens
ggaagccaucaagucgcugcagg

SEQ ID NO: 23069 - RNA, 22 nt, Homo sapiens
caaacaccauugucacacucca

SEQ ID NO: 23070 - RNA, 22 nt, Homo sapiens
ccaucuuuaccagacaguguua

SEQ ID NO: 23071 - RNA, 23 nt, Homo sapiens
cuaucugcacuagaugcaccuua

SEQ ID NO: 23072 - RNA, 23 nt, Homo sapiens
cuaacugcacuagaugcaccuua

SEQ ID NO: 23073 - RNA, 22 nt, Homo sapiens
cccaacaacaugaaacuaccua

SEQ ID NO: 23074 - RNA, 23 nt, Homo sapiens
gaacagguagucugaacacuggg

SEQ ID NO: 23075 - RNA, 23 nt, Homo sapiens
gaacagauagucuaaacacuggg

SEQ ID NO: 23076 - RNA, 22 nt, Homo sapiens
acaucguuaccagacaguguua

SEQ ID NO: 23077 - RNA, 22 nt, Homo sapiens
cagacuccgguggaaugaagga

SEQ ID NO: 23078 - RNA, 22 nt, Homo sapiens
ucagaccgagacaagugcaaug

SEQ ID NO: 23079 - RNA, 22 nt, Homo sapiens
gaauucaucacggccagccucu

SEQ ID NO: 23080 - RNA, 21 nt, Homo sapiens
gaaggaagugagugcagccac

SEQ ID NO: 23081 - RNA, 22 nt, Homo sapiens
ugcuguuagcccuagccccgca

SEQ ID NO: 23082 - RNA, 21 nt, Homo sapiens
cucccccacugcagcuggcac

SEQ ID NO: 23083 - RNA, 21 nt, Homo sapiens
ccccucccagccucccugcca

SEQ ID NO: 23084 - RNA, 22 nt, Homo sapiens
cuagggaacacagggcugguga

SEQ ID NO: 23085 - RNA, 22 nt, Homo sapiens
gugggguggguggucaggccga

SEQ ID NO: 23086 - RNA, 23 nt, Homo sapiens
cggccugauucacaacaccagcu

SEQ ID NO: 23087 - RNA, 23 nt, Homo sapiens
gggagugaagacacggagccaga

SEQ ID NO: 23088 - RNA, 23 nt, Homo sapiens
cuaucugcacuagaugcaccuua

SEQ ID NO: 23089 - RNA, 21 nt, Homo sapiens
gaccaaucgccguccccgccg

SEQ ID NO: 23090 - RNA, 21 nt, Homo sapiens
gaccaaucgccguccccgccg

SEQ ID NO: 23091 - RNA, 22 nt, Homo sapiens
cggugagcacccggccccugcg

SEQ ID NO: 23092 - RNA, 22 nt, Homo sapiens
cagaagugggccgggcacaggg

SEQ ID NO: 23093 - RNA, 20 nt, Homo sapiens
cccgccgcgucgcccugggg

SEQ ID NO: 23094 - RNA, 21 nt, Homo sapiens
ggaaaucccuggcaaugugau

SEQ ID NO: 23095 - RNA, 21 nt, Homo sapiens
gguaaucccuggcaaugugau

SEQ ID NO: 23096 - RNA, 23 nt, Homo sapiens
aaaucagaaucacaccuggggga

SEQ ID NO: 23097 - RNA, 22 nt, Homo sapiens
aguccagauucugugcccacca

SEQ ID NO: 23098 - RNA, 19 nt, Homo sapiens
agaaaccccagcagagaca

SEQ ID NO: 23099 - RNA, 25 nt, Homo sapiens
acggagcugucccaacaccaccccu

SEQ ID NO: 23100 - RNA, 23 nt, Homo sapiens
gucagaccccgagggguccucgc

SEQ ID NO: 23101 - RNA, 22 nt, Homo sapiens
guccaaaguuggggugcugguu

SEQ ID NO: 23102 - RNA, 24 nt, Homo sapiens
acgcagagcccgaaagcccccagu

SEQ ID NO: 23103 - RNA, 22 nt, Homo sapiens
gcacauguucugcggcccacca

SEQ ID NO: 23104 - RNA, 22 nt, Homo sapiens
gcggucccgcggcgccccgccu

SEQ ID NO: 23105 - RNA, 22 nt, Homo sapiens
gcggucccgcggcgccccgccu

SEQ ID NO: 23106 - RNA, 22 nt, Homo sapiens
ugcuguuagcccuagccccgca

SEQ ID NO: 23107 - RNA, 22 nt, Homo sapiens
ucggucccucgggccagggcag

SEQ ID NO: 23108 - RNA, 17 nt, Homo sapiens
gggagaggaggaggcga

SEQ ID NO: 23109 - RNA, 21 nt, Homo sapiens
gaccaaucgccguccccgccg

SEQ ID NO: 23110 - RNA, 20 nt, Homo sapiens
acagcaaggagggcaggagg

SEQ ID NO: 23111 - RNA, 22 nt, Homo sapiens
ucagaccgagacaagugcaaug

SEQ ID NO: 23112 - RNA, 22 nt, Homo sapiens
gaauucaucacggccagccucu

SEQ ID NO: 23113 - RNA, 25 nt, Homo sapiens
accaacggaccuacuucccuccgcc

SEQ ID NO: 23114 - RNA, 22 nt, Homo sapiens
gcggucccgcggcgccccgccu

SEQ ID NO: 23115 - RNA, 22 nt, Homo sapiens
ugcuguuagcccuagccccgca

SEQ ID NO: 23116 - RNA, 22 nt, Homo sapiens
ggaggccgggacgagugcaaua

SEQ ID NO: 23117 - RNA, 20 nt, Homo sapiens
uccgccugucugaacaguga

SEQ ID NO: 23118 - RNA, 20 nt, Homo sapiens
ugucuccacagggcucuuua

SEQ ID NO: 23119 - RNA, 20 nt, Homo sapiens
aguacaucaucuauacugua

SEQ ID NO: 23120 - RNA, 21 nt, Homo sapiens
acaugguuagaucaagcacaa

SEQ ID NO: 23121 - RNA, 22 nt, Homo sapiens
ucaguuuccucugcaaacaguu

SEQ ID NO: 23122 - RNA, 21 nt, Homo sapiens
caaaaaccacaaauaccuuug

SEQ ID NO: 23123 - RNA, 21 nt, Homo sapiens
aaaggccacauccagcaccgu

SEQ ID NO: 23124 - RNA, 18 nt, Homo sapiens
cccccaccaccacgcccg

SEQ ID NO: 23125 - RNA, 23 nt, Homo sapiens
aaaaugcagauuccuggacucca

SEQ ID NO: 23126 - RNA, 23 nt, Homo sapiens
gggagugaagacacggagccaga

SEQ ID NO: 23127 - RNA, 22 nt, Homo sapiens
gauagagugcagaccagggucu

SEQ ID NO: 23128 - RNA, 23 nt, Homo sapiens
gcacaugugcacacagccgggug

SEQ ID NO: 23129 - RNA, 22 nt, Homo sapiens
ucaggaacugccuuucucucca

SEQ ID NO: 23130 - RNA, 23 nt, Homo sapiens
cccaacagacauggcgguacuca

SEQ ID NO: 23131 - RNA, 20 nt, Homo sapiens
cccgccgcgucgcccugggg

SEQ ID NO: 23132 - RNA, 22 nt, Homo sapiens
ucagccgcugucacacgcacag

SEQ ID NO: 23133 - RNA, 25 nt, Homo sapiens
acggagcugucccaacaccaccccu

SEQ ID NO: 23134 - RNA, 23 nt, Homo sapiens
acagcgcucgcaaccgcagcgau

SEQ ID NO: 23135 - RNA, 22 nt, Homo sapiens
ccucaggcacggccgggccacc

SEQ ID NO: 23136 - RNA, 23 nt, Homo sapiens
cacugugggcccucuccgcacca

SEQ ID NO: 23137 - RNA, 17 nt, Homo sapiens
uggaggccccagcgaga

SEQ ID NO: 23138 - RNA, 20 nt, Homo sapiens
uccccacagacccagagccg

SEQ ID NO: 23139 - RNA, 21 nt, Homo sapiens
aagggucaguaagcacccgcg

SEQ ID NO: 23140 - RNA, 23 nt, Homo sapiens
ccgcuugagcuaacuccgacccg

SEQ ID NO: 23141 - RNA, 20 nt, Homo sapiens
cugcgggaggacagggcuca

SEQ ID NO: 23142 - RNA, 22 nt, Homo sapiens
uccggggacgaacgggacgggu

SEQ ID NO: 23143 - RNA, 22 nt, Homo sapiens
uccggggacgaacgggacgggu

SEQ ID NO: 23144 - RNA, 19 nt, Homo sapiens
cagcaucagcagcaucauc

SEQ ID NO: 23145 - RNA, 18 nt, Homo sapiens
auucaaucuacugccuca

SEQ ID NO: 23146 - RNA, 22 nt, Homo sapiens
ugagccacugugccuggccuga

SEQ ID NO: 23147 - RNA, 21 nt, Homo sapiens
gaccaagaaauagccuuucaa

SEQ ID NO: 23148 - RNA, 22 nt, Homo sapiens
ccucauggaaggguuccccacu

SEQ ID NO: 23149 - RNA, 22 nt, Homo sapiens
aaagugcuucuuaccuccagau

SEQ ID NO: 23150 - RNA, 22 nt, Homo sapiens
caagacacauuuggagagggac

SEQ ID NO: 23151 - RNA, 21 nt, Homo sapiens
guccugagagcgcugccuccu

SEQ ID NO: 23152 - RNA, 23 nt, Homo sapiens
uguaggcuggggauaaaugaaua

SEQ ID NO: 23153 - RNA, 20 nt, Homo sapiens
uccccacagacccagagccg

SEQ ID NO: 23154 - RNA, 22 nt, Homo sapiens
ggaggccgggacgagugcaaua

SEQ ID NO: 23155 - RNA, 22 nt, Homo sapiens
ggaggccgggacgagugcaaua

SEQ ID NO: 23156 - RNA, 22 nt, Homo sapiens
caaacaccauugucacacucca

SEQ ID NO: 23157 - RNA, 24 nt, Homo sapiens
acugcaggcuccagcuuccaggcu

SEQ ID NO: 23158 - RNA, 23 nt, Homo sapiens
gggagugaagacacggagccaga

SEQ ID NO: 23159 - RNA, 22 nt, Homo sapiens
cacugguacaaggguugggaga

SEQ ID NO: 23160 - RNA, 23 nt, Homo sapiens
cccaacagacauggcgguacuca

SEQ ID NO: 23161 - RNA, 22 nt, Homo sapiens
agcugaguguaggauguuuaca

SEQ ID NO: 23162 - RNA, 22 nt, Homo sapiens
aaucagucucauugcuuuauaa

SEQ ID NO: 23163 - RNA, 19 nt, Homo sapiens
agaaaccccagcagagaca

SEQ ID NO: 23164 - RNA, 19 nt, Homo sapiens
agaaaccccagcagagaca

SEQ ID NO: 23165 - RNA, 25 nt, Homo sapiens
acggagcugucccaacaccaccccu

SEQ ID NO: 23166 - RNA, 22 nt, Homo sapiens
agcucagaacccagaggucuca

SEQ ID NO: 23167 - RNA, 20 nt, Homo sapiens
uacugcuuccacagcucccc

SEQ ID NO: 23168 - RNA, 21 nt, Homo sapiens
ggggagcgggggcccugccuu

SEQ ID NO: 23169 - RNA, 22 nt, Homo sapiens
ucucucccauuagaguugaaaa

SEQ ID NO: 23170 - RNA, 18 nt, Homo sapiens
aucacauucaccucccug

SEQ ID NO: 23171 - RNA, 23 nt, Homo sapiens
agggauuccugggaaaacuggac

SEQ ID NO: 23172 - RNA, 23 nt, Homo sapiens
gggagugaagacacggagccaga

SEQ ID NO: 23173 - RNA, 21 nt, Homo sapiens
ccucaaggagcuucagucuag

SEQ ID NO: 23174 - RNA, 22 nt, Homo sapiens
ugcaacuuaguaaugugcaaua

SEQ ID NO: 23175 - RNA, 22 nt, Homo sapiens
aaagagguuaaccagguguguu

SEQ ID NO: 23176 - RNA, 22 nt, Homo sapiens
ugaauccuugaauagguguguu

SEQ ID NO: 23177 - RNA, 22 nt, Homo sapiens
uacagauggauaccgugcaauu

SEQ ID NO: 23178 - RNA, 20 nt, Homo sapiens
uaugaacaauuucuaggaau

SEQ ID NO: 23179 - RNA, 23 nt, Homo sapiens
ccuucucagaaaggugaaauuua

SEQ ID NO: 23180 - RNA, 20 nt, Homo sapiens
guguguauacauuuauacau

SEQ ID NO: 23181 - RNA, 21 nt, Homo sapiens
caguagagauuguuucaacac

SEQ ID NO: 23182 - RNA, 22 nt, Homo sapiens
cucauccgauguacaauaauuu

SEQ ID NO: 23183 - RNA, 22 nt, Homo sapiens
cugggggcggcacaggggcuca

SEQ ID NO: 23184 - RNA, 24 nt, Homo sapiens
acugcaggcuccagcuuccaggcu

SEQ ID NO: 23185 - RNA, 17 nt, Homo sapiens
gggagaggaggaggcga

SEQ ID NO: 23186 - RNA, 22 nt, Homo sapiens
acaccuggcuccacacgcgggc

SEQ ID NO: 23187 - RNA, 22 nt, Homo sapiens
ucagaccgagacaagugcaaug

SEQ ID NO: 23188 - RNA, 22 nt, Homo sapiens
cucaauagacugugagcuccuu

SEQ ID NO: 23189 - RNA, 21 nt, Homo sapiens
ggacuauagaacuuucccccu

SEQ ID NO: 23190 - RNA, 25 nt, Homo sapiens
accaacggaccuacuucccuccgcc

SEQ ID NO: 23191 - RNA, 23 nt, Homo sapiens
cccagcuagauuguaagcuccuu

SEQ ID NO: 23192 - RNA, 22 nt, Homo sapiens
ugcuguuagcccuagccccgca

SEQ ID NO: 23193 - RNA, 21 nt, Homo sapiens
caucaccuuccuucuccucca

SEQ ID NO: 23194 - RNA, 18 nt, Homo sapiens
aucacauucaccucccug

SEQ ID NO: 23195 - RNA, 23 nt, Homo sapiens
gggagugaagacacggagccaga

SEQ ID NO: 23196 - RNA, 18 nt, Homo sapiens
auucaaucuacugccuca

SEQ ID NO: 23197 - RNA, 22 nt, Homo sapiens
gcuggguggagaagguggugaa

SEQ ID NO: 23198 - RNA, 22 nt, Homo sapiens
ugggguauuugacaaacugaca

SEQ ID NO: 23199 - RNA, 22 nt, Homo sapiens
gcacacaauaaauguuugcuga

SEQ ID NO: 23200 - RNA, 21 nt, Homo sapiens
aguucucccaacguaaaccca

SEQ ID NO: 23201 - RNA, 22 nt, Homo sapiens
caagacacauuuggagagggac

SEQ ID NO: 23202 - RNA, 21 nt, Homo sapiens
guccugagagcgcugccuccu

SEQ ID NO: 23203 - RNA, 21 nt, Homo sapiens
caucaccuuccuucuccucca

SEQ ID NO: 23204 - RNA, 21 nt, Homo sapiens
ugacugacagcuuuuugagua

SEQ ID NO: 23205 - RNA, 20 nt, Homo sapiens
ggggcagacagacgaggaag

SEQ ID NO: 23206 - RNA, 18 nt, Homo sapiens
cccccaccaccacgcccg

SEQ ID NO: 23207 - RNA, 17 nt, Homo sapiens
ggguggcagcgguggga

SEQ ID NO: 23208 - RNA, 17 nt, Homo sapiens
gggagaggaggaggcga

SEQ ID NO: 23209 - RNA, 19 nt, Homo sapiens
uaugcuaccuuugcacggu

SEQ ID NO: 23210 - RNA, 21 nt, Homo sapiens
caugcacaugcacacauacau

SEQ ID NO: 23211 - RNA, 21 nt, Homo sapiens
uucuaggauaggcccaggggc

SEQ ID NO: 23212 - RNA, 22 nt, Homo sapiens
aguccagauucugugcccacca

SEQ ID NO: 23213 - RNA, 22 nt, Homo sapiens
gcacauguucugcggcccacca

SEQ ID NO: 23214 - RNA, 23 nt, Homo sapiens
ccuagagagggugagaaccugcc

SEQ ID NO: 23215 - RNA, 21 nt, Homo sapiens
ggggagcgggggcccugccuu

SEQ ID NO: 23216 - RNA, 22 nt, Homo sapiens
uaaaugaauucaauuuccuucu

SEQ ID NO: 23217 - RNA, 24 nt, Homo sapiens
acugcuggucuucagucagggcca

SEQ ID NO: 23218 - RNA, 24 nt, Homo sapiens
acugcuggucuucagucagggcca

SEQ ID NO: 23219 - RNA, 22 nt, Homo sapiens
agaaaaugccccucaguuuuga

SEQ ID NO: 23220 - RNA, 22 nt, Homo sapiens
ccagaacugaguccacagggca

SEQ ID NO: 23221 - RNA, 22 nt, Homo sapiens
agucuucacaacagcccugugu

SEQ ID NO: 23222 - RNA, 22 nt, Homo sapiens
acaaccagcuaagacacugcca

SEQ ID NO: 23223 - RNA, 23 nt, Homo sapiens
gcaaucagcuaacuacacugccu

SEQ ID NO: 23224 - RNA, 22 nt, Homo sapiens
cacuuagcagguuguauuauau

SEQ ID NO: 23225 - RNA, 22 nt, Homo sapiens
accagcuaacaauacacugcca

SEQ ID NO: 23226 - RNA, 22 nt, Homo sapiens
gccagcuaacaauacacugccu

SEQ ID NO: 23227 - RNA, 22 nt, Homo sapiens
gcaaaaguaauugccaguuuug

SEQ ID NO: 23228 - RNA, 22 nt, Homo sapiens
ugcaaaaguagucucaguuuuu

SEQ ID NO: 23229 - RNA, 19 nt, Homo sapiens
aaaaguaauuacaguuuuu

SEQ ID NO: 23230 - RNA, 22 nt, Homo sapiens
gcaaaaguaacugcaguuuugg

SEQ ID NO: 23231 - RNA, 22 nt, Homo sapiens
aaagacguggagaaauuagaau

SEQ ID NO: 23232 - RNA, 22 nt, Homo sapiens
uggugauucacaaagaaaucca

SEQ ID NO: 23233 - RNA, 23 nt, Homo sapiens
gucacaucccucccaagacccuc

SEQ ID NO: 23234 - RNA, 22 nt, Homo sapiens
aacaacacuugaccacauccug

SEQ ID NO: 23235 - RNA, 18 nt, Homo sapiens
aucacauucaccucccug

SEQ ID NO: 23236 - RNA, 21 nt, Homo sapiens
ggcugucaauucauaggucag

SEQ ID NO: 23237 - RNA, 18 nt, Homo sapiens
augacaccucccugugaa

SEQ ID NO: 23238 - RNA, 22 nt, Homo sapiens
aaagugcuucuuaccuccagau

SEQ ID NO: 23239 - RNA, 23 nt, Homo sapiens
acacucuaaagagaagcgcuuug

SEQ ID NO: 23240 - RNA, 21 nt, Homo sapiens
agaaaguacuucccucuggag

SEQ ID NO: 23241 - RNA, 21 nt, Homo sapiens
agaaagugcaucccucuggag

SEQ ID NO: 23242 - RNA, 21 nt, Homo sapiens
caucaccuuccuucuccucca

SEQ ID NO: 23243 - RNA, 21 nt, Homo sapiens
cuggaggacggcaacagucag

SEQ ID NO: 23244 - RNA, 22 nt, Homo sapiens
cacaaguucggaucuacggguu

SEQ ID NO: 23245 - RNA, 22 nt, Homo sapiens
cacaaguucggaucuacggguu

SEQ ID NO: 23246 - RNA, 21 nt, Homo sapiens
auaauggagaccaggccacga

SEQ ID NO: 23247 - RNA, 22 nt, Homo sapiens
gugggguggguggucaggccga

SEQ ID NO: 23248 - RNA, 22 nt, Homo sapiens
cuggagagacaaggggaagagg

SEQ ID NO: 23249 - RNA, 22 nt, Homo sapiens
aucagagcccucugagcuucag

SEQ ID NO: 23250 - RNA, 19 nt, Homo sapiens
cagcaucagcagcaucauc

SEQ ID NO: 23251 - RNA, 18 nt, Homo sapiens
auucaaucuacugccuca

SEQ ID NO: 23252 - RNA, 18 nt, Homo sapiens
auucaaucuacugccuca

SEQ ID NO: 23253 - RNA, 22 nt, Homo sapiens
uucacacugcaugcucugggua

SEQ ID NO: 23254 - RNA, 20 nt, Homo sapiens
cuggaggaagggcccagagg

SEQ ID NO: 23255 - RNA, 22 nt, Homo sapiens
gccuaagacacaggcccagaga

SEQ ID NO: 23256 - RNA, 22 nt, Homo sapiens
gaauucaucacggccagccucu

SEQ ID NO: 23257 - RNA, 22 nt, Homo sapiens
ccucauggaaggguuccccacu

SEQ ID NO: 23258 - RNA, 25 nt, Homo sapiens
acggagcugucccaacaccaccccu

SEQ ID NO: 23259 - RNA, 21 nt, Homo sapiens
guccugagagcgcugccuccu

SEQ ID NO: 23260 - RNA, 21 nt, Homo sapiens
caucaccuuccuucuccucca

SEQ ID NO: 23261 - RNA, 20 nt, Homo sapiens
cccugcgccaucuccucuac

SEQ ID NO: 23262 - RNA, 20 nt, Homo sapiens
uacugcuuccacagcucccc

SEQ ID NO: 23263 - RNA, 17 nt, Homo sapiens
gggagaggaggaggcga

SEQ ID NO: 23264 - RNA, 18 nt, Homo sapiens
aucacauucaccucccug

SEQ ID NO: 23265 - RNA, 23 nt, Homo sapiens
gggagugaagacacggagccaga

SEQ ID NO: 23266 - RNA, 21 nt, Homo sapiens
gaccaaucgccguccccgccg

SEQ ID NO: 23267 - RNA, 22 nt, Homo sapiens
ucagaccgagacaagugcaaug

SEQ ID NO: 23268 - RNA, 21 nt, Homo sapiens
aucugcacugucagcacuuua

SEQ ID NO: 23269 - RNA, 23 nt, Homo sapiens
gcuuugacaauaucauugcacug

SEQ ID NO: 23270 - RNA, 22 nt, Homo sapiens
gcggucccgcggcgccccgccu

SEQ ID NO: 23271 - RNA, 22 nt, Homo sapiens
ugcuguuagcccuagccccgca

SEQ ID NO: 23272 - RNA, 21 nt, Homo sapiens
caucaccuuccuucuccucca

SEQ ID NO: 23273 - RNA, 20 nt, Homo sapiens
cugcgggaggacagggcuca

SEQ ID NO: 23274 - RNA, 22 nt, Homo sapiens
ccagaacugaguccacagggca

SEQ ID NO: 23275 - RNA, 22 nt, Homo sapiens
agcccaaaaggagaauucuuug

SEQ ID NO: 23276 - RNA, 22 nt, Homo sapiens
uggcagcagcggagggggcaga

SEQ ID NO: 23277 - RNA, 20 nt, Homo sapiens
cccgccgcgucgcccugggg

SEQ ID NO: 23278 - RNA, 20 nt, Homo sapiens
acauuacuguuaucaaaaca

SEQ ID NO: 23279 - RNA, 22 nt, Homo sapiens
agucuucacaacagcccugugu

SEQ ID NO: 23280 - RNA, 22 nt, Homo sapiens
ugggguauuugacaaacugaca

SEQ ID NO: 23281 - RNA, 20 nt, Homo sapiens
ccagcagcaccuggggcagu

SEQ ID NO: 23282 - RNA, 22 nt, Homo sapiens
aaagagguuaaccagguguguu

SEQ ID NO: 23283 - RNA, 21 nt, Homo sapiens
uucuaggauaggcccaggggc

SEQ ID NO: 23284 - RNA, 22 nt, Homo sapiens
ugaauccuugaauagguguguu

SEQ ID NO: 23285 - RNA, 21 nt, Homo sapiens
auccuguacugagcugccccg

SEQ ID NO: 23286 - RNA, 22 nt, Homo sapiens
aagaagugcaccauguuuguuu

SEQ ID NO: 23287 - RNA, 22 nt, Homo sapiens
gcaaaaguaauugagauuuuug

SEQ ID NO: 23288 - RNA, 21 nt, Homo sapiens
cugaaaccaaguaugggucgc

SEQ ID NO: 23289 - RNA, 21 nt, Homo sapiens
aguucucccaacguaaaccca

SEQ ID NO: 23290 - RNA, 20 nt, Homo sapiens
acaaugagaacccauggucu

SEQ ID NO: 23291 - RNA, 22 nt, Homo sapiens
caaacaccauugucacacucca

SEQ ID NO: 23292 - RNA, 20 nt, Homo sapiens
uccccacagacccagagccg

SEQ ID NO: 23293 - RNA, 22 nt, Homo sapiens
cuggagagacaaggggaagagg

SEQ ID NO: 23294 - RNA, 23 nt, Homo sapiens
gggagugaagacacggagccaga

SEQ ID NO: 23295 - RNA, 21 nt, Homo sapiens
gaccaaucgccguccccgccg

SEQ ID NO: 23296 - RNA, 22 nt, Homo sapiens
cagcauggaguccuccagguug

SEQ ID NO: 23297 - RNA, 21 nt, Homo sapiens
ggacuauagaacuuucccccu

SEQ ID NO: 23298 - RNA, 22 nt, Homo sapiens
gcggucccgcggcgccccgccu

SEQ ID NO: 23299 - RNA, 20 nt, Homo sapiens
cccugcgccaucuccucuac

SEQ ID NO: 23300 - RNA, 17 nt, Homo sapiens
gggagaggaggaggcga

SEQ ID NO: 23301 - RNA, 23 nt, Homo sapiens
gggagugaagacacggagccaga

SEQ ID NO: 23302 - RNA, 20 nt, Homo sapiens
acagcaaggagggcaggagg

SEQ ID NO: 23303 - RNA, 21 nt, Homo sapiens
acaugguuagaucaagcacaa

SEQ ID NO: 23304 - RNA, 21 nt, Homo sapiens
aagugucagacacgguggugg

SEQ ID NO: 23305 - RNA, 21 nt, Homo sapiens
ucaaucacagauagcaccccu

SEQ ID NO: 23306 - RNA, 23 nt, Homo sapiens
cacugugggcccucuccgcacca

SEQ ID NO: 23307 - RNA, 21 nt, Homo sapiens
aacauacaaaggguauccucu

SEQ ID NO: 23308 - RNA, 17 nt, Homo sapiens
ggguggcagcgguggga

SEQ ID NO: 23309 - RNA, 18 nt, Homo sapiens
aucacauucaccucccug

SEQ ID NO: 23310 - RNA, 22 nt, Homo sapiens
agcugaguguaggauguuuaca

SEQ ID NO: 23311 - RNA, 23 nt, Homo sapiens
acugaggggccucagaccgagcu

SEQ ID NO: 23312 - RNA, 23 nt, Homo sapiens
ccacccaaugaccuacuccaaga

SEQ ID NO: 23313 - RNA, 21 nt, Homo sapiens
ggacuauagaacuuucccccu

SEQ ID NO: 23314 - RNA, 22 nt, Homo sapiens
caaacaccauugucacacucca

SEQ ID NO: 23315 - RNA, 21 nt, Homo sapiens
gaccaaucgccguccccgccg

SEQ ID NO: 23316 - RNA, 22 nt, Homo sapiens
acaucguuaccagacaguguua

SEQ ID NO: 23317 - RNA, 22 nt, Homo sapiens
ucaucauuaccaggcaguauua

SEQ ID NO: 23318 - RNA, 23 nt, Homo sapiens
aaaucagaaucacaccuggggga

SEQ ID NO: 23319 - RNA, 22 nt, Homo sapiens
gauuccaauuuuuccacaucuu

SEQ ID NO: 23320 - RNA, 24 nt, Homo sapiens
acgcagagcccgaaagcccccagu

SEQ ID NO: 23321 - RNA, 21 nt, Homo sapiens
gaaggaagugagugcagccac

SEQ ID NO: 23322 - RNA, 22 nt, Homo sapiens
gcggucccgcggcgccccgccu

SEQ ID NO: 23323 - RNA, 22 nt, Homo sapiens
ugcuguuagcccuagccccgca

SEQ ID NO: 23324 - RNA, 23 nt, Homo sapiens
ggaagccaucaagucgcugcagg

SEQ ID NO: 23325 - RNA, 17 nt, Homo sapiens
gggagaggaggaggcga

SEQ ID NO: 23326 - RNA, 17 nt, Homo sapiens
gggagaggaggaggcga

SEQ ID NO: 23327 - RNA, 24 nt, Homo sapiens
gaagucacucccaggcagcugcaa

SEQ ID NO: 23328 - RNA, 18 nt, Homo sapiens
caccaccagagccaacgu

SEQ ID NO: 23329 - RNA, 23 nt, Homo sapiens
gggagugaagacacggagccaga

SEQ ID NO: 23330 - RNA, 22 nt, Homo sapiens
uggcagcagcggagggggcaga

SEQ ID NO: 23331 - RNA, 20 nt, Homo sapiens
acagcaaggagggcaggagg

SEQ ID NO: 23332 - RNA, 20 nt, Homo sapiens
ccagcagcaccuggggcagu

SEQ ID NO: 23333 - RNA, 23 nt, Homo sapiens
aaagucucgcucucugccccuca

SEQ ID NO: 23334 - RNA, 21 nt, Homo sapiens
auccuguacugagcugccccg

SEQ ID NO: 23335 - RNA, 22 nt, Homo sapiens
gaacuugcuaaaaaugcagaau

SEQ ID NO: 23336 - RNA, 19 nt, Homo sapiens
guugggaucacaggcgccc

SEQ ID NO: 23337 - RNA, 19 nt, Homo sapiens
gccucagaggcagcugcuu

SEQ ID NO: 23338 - RNA, 22 nt, Homo sapiens
ugcuguuagcccuagccccgca

SEQ ID NO: 23339 - RNA, 22 nt, Homo sapiens
auccuucuacaaauucacccau

SEQ ID NO: 23340 - RNA, 18 nt, Homo sapiens
aucacauucaccucccug

SEQ ID NO: 23341 - RNA, 23 nt, Homo sapiens
gggagugaagacacggagccaga

SEQ ID NO: 23342 - RNA, 22 nt, Homo sapiens
uaaccgauuucagauggugcua

SEQ ID NO: 23343 - RNA, 22 nt, Homo sapiens
gcaaaaguaauugagauuuuug

SEQ ID NO: 23344 - RNA, 20 nt, Homo sapiens
guguguauacauuuauacau

SEQ ID NO: 23345 - RNA, 21 nt, Homo sapiens
guaaugggaccuuccucuuug

SEQ ID NO: 23346 - RNA, 23 nt, Homo sapiens
acccaacagccccugcaagggau

SEQ ID NO: 23347 - RNA, 22 nt, Homo sapiens
ucaggaacugccuuucucucca

SEQ ID NO: 23348 - RNA, 21 nt, Homo sapiens
gaccaaucgccguccccgccg

SEQ ID NO: 23349 - RNA, 20 nt, Homo sapiens
acagcaaggagggcaggagg

SEQ ID NO: 23350 - RNA, 23 nt, Homo sapiens
aaaucagaaucacaccuggggga

SEQ ID NO: 23351 - RNA, 23 nt, Homo sapiens
aaagucucgcucucugccccuca

SEQ ID NO: 23352 - RNA, 22 nt, Homo sapiens
aaagugcuucuuaccuccagau

SEQ ID NO: 23353 - RNA, 24 nt, Homo sapiens
acgcagagcccgaaagcccccagu

SEQ ID NO: 23354 - RNA, 22 nt, Homo sapiens
gcggucccgcggcgccccgccu

SEQ ID NO: 23355 - RNA, 22 nt, Homo sapiens
ugcuguuagcccuagccccgca

SEQ ID NO: 23356 - RNA, 21 nt, Homo sapiens
caucaccuuccuucuccucca

SEQ ID NO: 23357 - RNA, 22 nt, Homo sapiens
cugggggcggcacaggggcuca

SEQ ID NO: 23358 - RNA, 22 nt, Homo sapiens
uaaaugaauucaauuuccuucu

SEQ ID NO: 23359 - RNA, 21 nt, Homo sapiens
ugcaggcugaucuucuucucu

SEQ ID NO: 23360 - RNA, 22 nt, Homo sapiens
aacccauggaauucaguucuca

SEQ ID NO: 23361 - RNA, 18 nt, Homo sapiens
auucaaucuacugccuca

SEQ ID NO: 23362 - RNA, 22 nt, Homo sapiens
uucacacugcaugcucugggua

SEQ ID NO: 23363 - RNA, 21 nt, Homo sapiens
gugacagagccaagcacaaau

SEQ ID NO: 23364 - RNA, 22 nt, Homo sapiens
ucacauuugccugcagagauuu

SEQ ID NO: 23365 - RNA, 22 nt, Homo sapiens
ggagagccuccacccaacccuc

SEQ ID NO: 23366 - RNA, 20 nt, Homo sapiens
cuggaggaagggcccagagg

SEQ ID NO: 23367 - RNA, 22 nt, Homo sapiens
gccuaagacacaggcccagaga

SEQ ID NO: 23368 - RNA, 23 nt, Homo sapiens
agaggcaggcaugcgggcagaca

SEQ ID NO: 23369 - RNA, 20 nt, Homo sapiens
uaugaacaauuucuaggaau

SEQ ID NO: 23370 - RNA, 22 nt, Homo sapiens
gaacuugcuaaaaaugcagaau

SEQ ID NO: 23371 - RNA, 22 nt, Homo sapiens
cucagagcagacgugguucuca

SEQ ID NO: 23372 - RNA, 22 nt, Homo sapiens
caagacacauuuggagagggac

SEQ ID NO: 23373 - RNA, 21 nt, Homo sapiens
guccugagagcgcugccuccu

SEQ ID NO: 23374 - RNA, 20 nt, Homo sapiens
cucaaagcaaacccugcaga

SEQ ID NO: 23375 - RNA, 20 nt, Homo sapiens
cucaaagcaaacccugcaga

SEQ ID NO: 23376 - RNA, 22 nt, Homo sapiens
uccggggacgaacgggacgggu

SEQ ID NO: 23377 - RNA, 24 nt, Homo sapiens
acugcaggcuccagcuuccaggcu

SEQ ID NO: 23378 - RNA, 22 nt, Homo sapiens
ccaguagcacggcucaguccag

SEQ ID NO: 23379 - RNA, 21 nt, Homo sapiens
agggcucaucuugguccugca

SEQ ID NO: 23380 - RNA, 24 nt, Homo sapiens
gaaagugcauagaauucugucugg

SEQ ID NO: 23381 - RNA, 22 nt, Homo sapiens
uagcagaagcauuuccgcacac

SEQ ID NO: 23382 - RNA, 22 nt, Homo sapiens
acugccugucugugccugcugu

SEQ ID NO: 23383 - RNA, 21 nt, Homo sapiens
acaugguuagaucaagcacaa

SEQ ID NO: 23384 - RNA, 21 nt, Homo sapiens
accuauccugaauuacuugaa

SEQ ID NO: 23385 - RNA, 22 nt, Homo sapiens
acaaccagcuaagacacugcca

SEQ ID NO: 23386 - RNA, 22 nt, Homo sapiens
auggcaguggaguuagugauug

SEQ ID NO: 23387 - RNA, 23 nt, Homo sapiens
gcaaucagcuaacuacacugccu

SEQ ID NO: 23388 - RNA, 24 nt, Homo sapiens
acucacaccuagguuccaaggauu

SEQ ID NO: 23389 - RNA, 22 nt, Homo sapiens
accagguuccaccccagcaggc

SEQ ID NO: 23390 - RNA, 21 nt, Homo sapiens
ccuucugacuccaaguccagu

SEQ ID NO: 23391 - RNA, 22 nt, Homo sapiens
agccacaaucaccuucugaucu

SEQ ID NO: 23392 - RNA, 22 nt, Homo sapiens
gccuucugacccuaaguccagu

SEQ ID NO: 23393 - RNA, 22 nt, Homo sapiens
accagcuaacaauacacugcca

SEQ ID NO: 23394 - RNA, 22 nt, Homo sapiens
gccagcuaacaauacacugccu

SEQ ID NO: 23395 - RNA, 21 nt, Homo sapiens
guguauaugcccauggacugc

SEQ ID NO: 23396 - RNA, 19 nt, Homo sapiens
aagacauuuucagacagcu

SEQ ID NO: 23397 - RNA, 23 nt, Homo sapiens
ugcgggcgggacgagcaagcaca

SEQ ID NO: 23398 - RNA, 20 nt, Homo sapiens
uccccacagacccagagccg

SEQ ID NO: 23399 - RNA, 22 nt, Homo sapiens
gcacaaaucuccagaccaccca

SEQ ID NO: 23400 - RNA, 18 nt, Homo sapiens
aucacauucaccucccug

SEQ ID NO: 23401 - RNA, 23 nt, Homo sapiens
gggagugaagacacggagccaga

SEQ ID NO: 23402 - RNA, 22 nt, Homo sapiens
ucaggaacugccuuucucucca

SEQ ID NO: 23403 - RNA, 22 nt, Homo sapiens
cagaagugggccgggcacaggg

SEQ ID NO: 23404 - RNA, 21 nt, Homo sapiens
acccaguagccagauguagcu

SEQ ID NO: 23405 - RNA, 20 nt, Homo sapiens
ugggccaccgccgagcggac

SEQ ID NO: 23406 - RNA, 25 nt, Homo sapiens
acggagcugucccaacaccaccccu

SEQ ID NO: 23407 - RNA, 21 nt, Homo sapiens
ggacuauagaacuuucccccu

SEQ ID NO: 23408 - RNA, 25 nt, Homo sapiens
accaacggaccuacuucccuccgcc

SEQ ID NO: 23409 - RNA, 21 nt, Homo sapiens
caucaccuuccuucuccucca

SEQ ID NO: 23410 - RNA, 23 nt, Homo sapiens
cacaaauucggaucuacagggua

SEQ ID NO: 23411 - RNA, 23 nt, Homo sapiens
cacaaauucgguucuacagggua

SEQ ID NO: 23412 - RNA, 21 nt, Homo sapiens
ccccucccagccucccugcca

SEQ ID NO: 23413 - RNA, 22 nt, Homo sapiens
cuggagagacaaggggaagagg

SEQ ID NO: 23414 - RNA, 20 nt, Homo sapiens
ggggcagacagacgaggaag

SEQ ID NO: 23415 - RNA, 25 nt, Homo sapiens
aagaaagagucuugcuuugucgccc

SEQ ID NO: 23416 - RNA, 22 nt, Homo sapiens
ggagcccgcgccccgcgccgag

SEQ ID NO: 23417 - RNA, 18 nt, Homo sapiens
auucaaucuacugccuca

SEQ ID NO: 23418 - RNA, 22 nt, Homo sapiens
cagaagugggccgggcacaggg

SEQ ID NO: 23419 - RNA, 22 nt, Homo sapiens
cccaacaacaggaaacuaccua

SEQ ID NO: 23420 - RNA, 23 nt, Homo sapiens
cgugagcuccuggaggacaggga

SEQ ID NO: 23421 - RNA, 22 nt, Homo sapiens
acaaccagcuaagacacugcca

SEQ ID NO: 23422 - RNA, 22 nt, Homo sapiens
auggcaguggaguuagugauug

SEQ ID NO: 23423 - RNA, 23 nt, Homo sapiens
gcaaucagcuaacuacacugccu

SEQ ID NO: 23424 - RNA, 22 nt, Homo sapiens
uacagauggauaccgugcaauu

SEQ ID NO: 23425 - RNA, 23 nt, Homo sapiens
aaagucucgcucucugccccuca

SEQ ID NO: 23426 - RNA, 23 nt, Homo sapiens
ucaacgggagugaucgugucauu

SEQ ID NO: 23427 - RNA, 22 nt, Homo sapiens
accagcuaacaauacacugcca

SEQ ID NO: 23428 - RNA, 22 nt, Homo sapiens
gccagcuaacaauacacugccu

SEQ ID NO: 23429 - RNA, 25 nt, Homo sapiens
acggagcugucccaacaccaccccu

SEQ ID NO: 23430 - RNA, 21 nt, Homo sapiens
guccugagagcgcugccuccu

SEQ ID NO: 23431 - RNA, 22 nt, Homo sapiens
gcugaggcuguggggcuggagu

SEQ ID NO: 23432 - RNA, 20 nt, Homo sapiens
cccugcgccaucuccucuac

SEQ ID NO: 23433 - RNA, 21 nt, Homo sapiens
cucccccacugcagcuggcac

SEQ ID NO: 23434 - RNA, 22 nt, Homo sapiens
ccacacacuuccuuacauucca

SEQ ID NO: 23435 - RNA, 22 nt, Homo sapiens
cagaagugggccgggcacaggg

SEQ ID NO: 23436 - RNA, 19 nt, Homo sapiens
guugggaucacaggcgccc

SEQ ID NO: 23437 - RNA, 22 nt, Homo sapiens
gauccgagcaccggggaccccc

SEQ ID NO: 23438 - RNA, 24 nt, Homo sapiens
acgcgcaggccagagacccaggca

SEQ ID NO: 23439 - RNA, 22 nt, Homo sapiens
cuggagagacaaggggaagagg

SEQ ID NO: 23440 - RNA, 17 nt, Homo sapiens
uggcgcccgaacaggga

SEQ ID NO: 23441 - RNA, 19 nt, Homo sapiens
ucccugauccaaaaaucca

SEQ ID NO: 23442 - RNA, 22 nt, Homo sapiens
augcccuuuuaacauugcacug

SEQ ID NO: 23443 - RNA, 22 nt, Homo sapiens
ccagaacugaguccacagggca

SEQ ID NO: 23444 - RNA, 22 nt, Homo sapiens
cagaaagugcuucccucuagag

SEQ ID NO: 23445 - RNA, 22 nt, Homo sapiens
uccacauggaguugcuguuaca

SEQ ID NO: 23446 - RNA, 21 nt, Homo sapiens
ggaaaucccuggcaaugugau

SEQ ID NO: 23447 - RNA, 21 nt, Homo sapiens
gguaaucccuggcaaugugau

SEQ ID NO: 23448 - RNA, 22 nt, Homo sapiens
cuuccagucgaggauguuuaca

SEQ ID NO: 23449 - RNA, 22 nt, Homo sapiens
agcugaguguaggauguuuaca

SEQ ID NO: 23450 - RNA, 23 nt, Homo sapiens
gcugagaguguaggauguuuaca

SEQ ID NO: 23451 - RNA, 22 nt, Homo sapiens
cuuccagucggggauguuuaca

SEQ ID NO: 23452 - RNA, 22 nt, Homo sapiens
cuuccagucaaggauguuuaca

SEQ ID NO: 23453 - RNA, 22 nt, Homo sapiens
gaauucaucacggccagccucu

SEQ ID NO: 23454 - RNA, 22 nt, Homo sapiens
gagguuucccguguauguuuca

SEQ ID NO: 23455 - RNA, 22 nt, Homo sapiens
gcaaaaguaauugagauuuuug

SEQ ID NO: 23456 - RNA, 23 nt, Homo sapiens
aggagaaggcaccaugggauuua

SEQ ID NO: 23457 - RNA, 20 nt, Homo sapiens
cccugcgccaucuccucuac

SEQ ID NO: 23458 - RNA, 22 nt, Homo sapiens
guaccccuggagauucugauaa

SEQ ID NO: 23459 - RNA, 22 nt, Homo sapiens
cacuuaucagguuguauuauaa

SEQ ID NO: 23460 - RNA, 22 nt, Homo sapiens
ccucaggcacggccgggccacc

SEQ ID NO: 23461 - RNA, 22 nt, Homo sapiens
cuggagagacaaggggaagagg

SEQ ID NO: 23462 - RNA, 24 nt, Homo sapiens
gaaagugcauagaauucugucugg

SEQ ID NO: 23463 - RNA, 22 nt, Homo sapiens
acugccugucugugccugcugu

SEQ ID NO: 23464 - RNA, 22 nt, Homo sapiens
cuuccagucgaggauguuuaca

SEQ ID NO: 23465 - RNA, 22 nt, Homo sapiens
agcugaguguaggauguuuaca

SEQ ID NO: 23466 - RNA, 23 nt, Homo sapiens
gcugagaguguaggauguuuaca

SEQ ID NO: 23467 - RNA, 22 nt, Homo sapiens
cuuccagucggggauguuuaca

SEQ ID NO: 23468 - RNA, 22 nt, Homo sapiens
cuuccagucaaggauguuuaca

SEQ ID NO: 23469 - RNA, 22 nt, Homo sapiens
accagguuccaccccagcaggc

SEQ ID NO: 23470 - RNA, 21 nt, Homo sapiens
agacacaccacggcacacuuc

SEQ ID NO: 23471 - RNA, 21 nt, Homo sapiens
ggacuauagaacuuucccccu

SEQ ID NO: 23472 - RNA, 19 nt, Homo sapiens
aagacauuuucagacagcu

SEQ ID NO: 23473 - RNA, 23 nt, Homo sapiens
acagcgcucgcaaccgcagcgau

SEQ ID NO: 23474 - RNA, 19 nt, Homo sapiens
accagugcccugcacacuu

SEQ ID NO: 23475 - RNA, 22 nt, Homo sapiens
ugcuguuagcccuagccccgca

SEQ ID NO: 23476 - RNA, 20 nt, Homo sapiens
cccugcgccaucuccucuac

SEQ ID NO: 23477 - RNA, 22 nt, Homo sapiens
gggagaggucucccugcgcaca

SEQ ID NO: 23478 - RNA, 22 nt, Homo sapiens
caaacaccauugucacacucca

SEQ ID NO: 23479 - RNA, 18 nt, Homo sapiens
cccccaccaccacgcccg

SEQ ID NO: 23480 - RNA, 21 nt, Homo sapiens
uuuagcauaaguaugucccaa

SEQ ID NO: 23481 - RNA, 22 nt, Homo sapiens
cggugagcacccggccccugcg

SEQ ID NO: 23482 - RNA, 21 nt, Homo sapiens
ucaaucacagauagcaccccu

SEQ ID NO: 23483 - RNA, 19 nt, Homo sapiens
gccugcugacaccgugccu

SEQ ID NO: 23484 - RNA, 24 nt, Homo sapiens
acgcgcaggccagagacccaggca

SEQ ID NO: 23485 - RNA, 22 nt, Homo sapiens
caaacaccauugucacacucca

SEQ ID NO: 23486 - RNA, 17 nt, Homo sapiens
gggagaggaggaggcga

SEQ ID NO: 23487 - RNA, 21 nt, Homo sapiens
gggcaucugggacgcgcagga

SEQ ID NO: 23488 - RNA, 21 nt, Homo sapiens
gaccaaucgccguccccgccg

SEQ ID NO: 23489 - RNA, 23 nt, Homo sapiens
cccaacagacauggcgguacuca

SEQ ID NO: 23490 - RNA, 22 nt, Homo sapiens
uggcagcagcggagggggcaga

SEQ ID NO: 23491 - RNA, 21 nt, Homo sapiens
acccaguagccagauguagcu

SEQ ID NO: 23492 - RNA, 20 nt, Homo sapiens
ccagcagcaccuggggcagu

SEQ ID NO: 23493 - RNA, 20 nt, Homo sapiens
gcaaugcaacagcaaugcac

SEQ ID NO: 23494 - RNA, 21 nt, Homo sapiens
auccuguacugagcugccccg

SEQ ID NO: 23495 - RNA, 22 nt, Homo sapiens
aacgcuccaaaagaaggcacuc

SEQ ID NO: 23496 - RNA, 22 nt, Homo sapiens
aacacucuaaaaggaggcacuu

SEQ ID NO: 23497 - RNA, 22 nt, Homo sapiens
ugacgaugacaacgaugacgua

SEQ ID NO: 23498 - RNA, 22 nt, Homo sapiens
gcggucccgcggcgccccgccu

SEQ ID NO: 23499 - RNA, 22 nt, Homo sapiens
ugcuguuagcccuagccccgca

SEQ ID NO: 23500 - RNA, 20 nt, Homo sapiens
cucaaagcaaacccugcaga

SEQ ID NO: 23501 - RNA, 22 nt, Homo sapiens
caaacaccauugucacacucca

SEQ ID NO: 23502 - RNA, 22 nt, Homo sapiens
gugggguggguggucaggccga

SEQ ID NO: 23503 - RNA, 22 nt, Homo sapiens
ucaggaacugccuuucucucca

SEQ ID NO: 23504 - RNA, 21 nt, Homo sapiens
agaauugcguuuggacaauca

SEQ ID NO: 23505 - RNA, 23 nt, Homo sapiens
aaaucagaaucacaccuggggga

SEQ ID NO: 23506 - RNA, 24 nt, Homo sapiens
acgcagagcccgaaagcccccagu

SEQ ID NO: 23507 - RNA, 24 nt, Homo sapiens
acgcgcaggccagagacccaggca

SEQ ID NO: 23508 - RNA, 26 nt, Homo sapiens
uuucagaauuugcugccaucaucauc

SEQ ID NO: 23509 - RNA, 20 nt, Homo sapiens
gcagcuguccgcccagacac

SEQ ID NO: 23510 - RNA, 21 nt, Homo sapiens
cugggggacggagcagaagga

SEQ ID NO: 23511 - RNA, 22 nt, Homo sapiens
augcccuuuuaacauugcacug

SEQ ID NO: 23512 - RNA, 22 nt, Homo sapiens
augcccuuucaucauugcacug

SEQ ID NO: 23513 - RNA, 19 nt, Homo sapiens
cagcaucagcagcaucauc

SEQ ID NO: 23514 - RNA, 24 nt, Homo sapiens
gaaagugcauagaauucugucugg

SEQ ID NO: 23515 - RNA, 23 nt, Homo sapiens
gcuuugacaauacuauugcacug

SEQ ID NO: 23516 - RNA, 23 nt, Homo sapiens
gcuuugacaauaucauugcacug

SEQ ID NO: 23517 - RNA, 21 nt, Homo sapiens
ugcaugacggccugcaagaca

SEQ ID NO: 23518 - RNA, 23 nt, Homo sapiens
acccuauaagcaauauugcacua

SEQ ID NO: 23519 - RNA, 22 nt, Homo sapiens
acgguccuacacucaaggcaug

SEQ ID NO: 23520 - RNA, 21 nt, Homo sapiens
gagcugcauccuggcuccggg

SEQ ID NO: 23521 - RNA, 21 nt, Homo sapiens
gagcugcauccuggcuccggg

SEQ ID NO: 23522 - RNA, 19 nt, Homo sapiens
cagcaucagcagcaucauc

SEQ ID NO: 23523 - RNA, 21 nt, Homo sapiens
acuagacugugagcuccucga

SEQ ID NO: 23524 - RNA, 23 nt, Homo sapiens
cccaacagacauggcgguacuca

SEQ ID NO: 23525 - RNA, 23 nt, Homo sapiens
acauuuuucguuauugcucuuga

SEQ ID NO: 23526 - RNA, 19 nt, Homo sapiens
auuuugguacagcagcuca

SEQ ID NO: 23527 - RNA, 20 nt, Homo sapiens
ugggccaccgccgagcggac

SEQ ID NO: 23528 - RNA, 23 nt, Homo sapiens
ggacauuguuucagugcccaagu

SEQ ID NO: 23529 - RNA, 23 nt, Homo sapiens
ccuagagagggugagaaccugcc

SEQ ID NO: 23530 - RNA, 22 nt, Homo sapiens
ccaguagcacggcucaguccag

SEQ ID NO: 23531 - RNA, 21 nt, Homo sapiens
ucuccagaucagggcagucca

SEQ ID NO: 23532 - RNA, 22 nt, Homo sapiens
aacccauggaauucaguucuca

SEQ ID NO: 23533 - RNA, 22 nt, Homo sapiens
cucaauagacugugagcuccuu

SEQ ID NO: 23534 - RNA, 21 nt, Homo sapiens
ccuucugacuccaaguccagu

SEQ ID NO: 23535 - RNA, 22 nt, Homo sapiens
gccuucugacccuaaguccagu

SEQ ID NO: 23536 - RNA, 21 nt, Homo sapiens
guguauaugcccauggacugc

SEQ ID NO: 23537 - RNA, 19 nt, Homo sapiens
auuuugguacagcagcuca

SEQ ID NO: 23538 - RNA, 20 nt, Homo sapiens
guuugauaaacugacacaac

SEQ ID NO: 23539 - RNA, 22 nt, Homo sapiens
ccucuaguaaauaugucagcau

SEQ ID NO: 23540 - RNA, 19 nt, Homo sapiens
gccucagaggcagcugcuu

SEQ ID NO: 23541 - RNA, 23 nt, Homo sapiens
cccagcuagauuguaagcuccuu

SEQ ID NO: 23542 - RNA, 23 nt, Homo sapiens
cccagcuagauuguaagcuccuu

SEQ ID NO: 23543 - RNA, 22 nt, Homo sapiens
cacauggccaaaacagagaaga

SEQ ID NO: 23544 - RNA, 21 nt, Homo sapiens
auaauggagaccaggccacga

SEQ ID NO: 23545 - RNA, 23 nt, Homo sapiens
aaucuacuuucuuugcucauccu

SEQ ID NO: 23546 - RNA, 22 nt, Homo sapiens
aaccacuuucuuugcucauccg

SEQ ID NO: 23547 - RNA, 23 nt, Homo sapiens
aggaacagcagcagcccgggccg

SEQ ID NO: 23548 - RNA, 23 nt, Homo sapiens
accccuaucacgauuagcauuaa

SEQ ID NO: 23549 - RNA, 23 nt, Homo sapiens
acauuuuucguuauugcucuuga

SEQ ID NO: 23550 - RNA, 23 nt, Homo sapiens
acauuuuucguuauugcucuuga

SEQ ID NO: 23551 - RNA, 22 nt, Homo sapiens
acaaccagcuaagacacugcca

SEQ ID NO: 23552 - RNA, 22 nt, Homo sapiens
aggaaaccagcaaguguugacg

SEQ ID NO: 23553 - RNA, 22 nt, Homo sapiens
gaccucagcuaugacagcacuu

SEQ ID NO: 23554 - RNA, 23 nt, Homo sapiens
gaaagugcccucaaggcugagug

SEQ ID NO: 23555 - RNA, 23 nt, Homo sapiens
ggacauuguuucagugcccaagu

SEQ ID NO: 23556 - RNA, 21 nt, Homo sapiens
gaaggaagugagugcagccac

SEQ ID NO: 23557 - RNA, 22 nt, Homo sapiens
ccucaggcacggccgggccacc

SEQ ID NO: 23558 - RNA, 21 nt, Homo sapiens
caucaccuuccuucuccucca

SEQ ID NO: 23559 - RNA, 21 nt, Homo sapiens
agggcucaucuugguccugca

SEQ ID NO: 23560 - RNA, 21 nt, Homo sapiens
gggcaucugggacgcgcagga

SEQ ID NO: 23561 - RNA, 22 nt, Homo sapiens
ucaggaacugccuuucucucca

SEQ ID NO: 23562 - RNA, 21 nt, Homo sapiens
uucuaggauaggcccaggggc

SEQ ID NO: 23563 - RNA, 19 nt, Homo sapiens
guccugaauuccgcagccu

SEQ ID NO: 23564 - RNA, 22 nt, Homo sapiens
gauccgagcaccggggaccccc

SEQ ID NO: 23565 - RNA, 23 nt, Homo sapiens
cacugugggcccucuccgcacca

SEQ ID NO: 23566 - RNA, 22 nt, Homo sapiens
gcugaggcuguggggcuggagu

SEQ ID NO: 23567 - RNA, 24 nt, Homo sapiens
cacccccagagccucagcucccca

SEQ ID NO: 23568 - RNA, 21 nt, Homo sapiens
gagcugcauccuggcuccggg

SEQ ID NO: 23569 - RNA, 18 nt, Homo sapiens
gaaaugagggccagcuga

SEQ ID NO: 23570 - RNA, 22 nt, Homo sapiens
acucaguaugccaggguaccau

SEQ ID NO: 23571 - RNA, 18 nt, Homo sapiens
cccccaccaccacgcccg

SEQ ID NO: 23572 - RNA, 17 nt, Homo sapiens
ggguggcagcgguggga

SEQ ID NO: 23573 - RNA, 21 nt, Homo sapiens
gaccaaucgccguccccgccg

SEQ ID NO: 23574 - RNA, 20 nt, Homo sapiens
cccgccgcgucgcccugggg

SEQ ID NO: 23575 - RNA, 25 nt, Homo sapiens
agcuagucaagcgcgguuguggggg

SEQ ID NO: 23576 - RNA, 21 nt, Homo sapiens
uucuaggauaggcccaggggc

SEQ ID NO: 23577 - RNA, 22 nt, Homo sapiens
aucgggaggggacugagccuga

SEQ ID NO: 23578 - RNA, 22 nt, Homo sapiens
aguccagauucugugcccacca

SEQ ID NO: 23579 - RNA, 21 nt, Homo sapiens
cccgaggagccgggcaggcuu

SEQ ID NO: 23580 - RNA, 22 nt, Homo sapiens
gcacauguucugcggcccacca

SEQ ID NO: 23581 - RNA, 25 nt, Homo sapiens
accaacggaccuacuucccuccgcc

SEQ ID NO: 23582 - RNA, 22 nt, Homo sapiens
gcggucccgcggcgccccgccu

SEQ ID NO: 23583 - RNA, 22 nt, Homo sapiens
agcucagaacccagaggucuca

SEQ ID NO: 23584 - RNA, 24 nt, Homo sapiens
cacccccagagccucagcucccca

SEQ ID NO: 23585 - RNA, 21 nt, Homo sapiens
ggggagcgggggcccugccuu

SEQ ID NO: 23586 - RNA, 18 nt, Homo sapiens
uggcgccugaacagggac

SEQ ID NO: 23587 - RNA, 18 nt, Homo sapiens
aucacauucaccucccug

SEQ ID NO: 23588 - RNA, 21 nt, Homo sapiens
gaccaaucgccguccccgccg

SEQ ID NO: 23589 - RNA, 21 nt, Homo sapiens
aggcggcaggcacaggacugg

SEQ ID NO: 23590 - RNA, 22 nt, Homo sapiens
uggcagcagcggagggggcaga

SEQ ID NO: 23591 - RNA, 22 nt, Homo sapiens
cagaagugggccgggcacaggg

SEQ ID NO: 23592 - RNA, 22 nt, Homo sapiens
cagaagugggccgggcacaggg

SEQ ID NO: 23593 - RNA, 22 nt, Homo sapiens
acugccugucugugccugcugu

SEQ ID NO: 23594 - RNA, 22 nt, Homo sapiens
agucuucacaacagcccugugu

SEQ ID NO: 23595 - RNA, 22 nt, Homo sapiens
agucuucacaacagcccugugu

SEQ ID NO: 23596 - RNA, 20 nt, Homo sapiens
ccagcagcaccuggggcagu

SEQ ID NO: 23597 - RNA, 22 nt, Homo sapiens
gagcccuggacuaggagucagc

SEQ ID NO: 23598 - RNA, 22 nt, Homo sapiens
gagcccuggacuaggagucagc

SEQ ID NO: 23599 - RNA, 22 nt, Homo sapiens
accagguuccaccccagcaggc

SEQ ID NO: 23600 - RNA, 22 nt, Homo sapiens
agagaggagagccguguaugac

SEQ ID NO: 23601 - RNA, 21 nt, Homo sapiens
auccuguacugagcugccccg

SEQ ID NO: 23602 - RNA, 22 nt, Homo sapiens
ccucuaguaaauaugucagcau

SEQ ID NO: 23603 - RNA, 22 nt, Homo sapiens
caacuccgauaugcaaugggua

SEQ ID NO: 23604 - RNA, 22 nt, Homo sapiens
gcggucccgcggcgccccgccu

SEQ ID NO: 23605 - RNA, 22 nt, Homo sapiens
ugcuguuagcccuagccccgca

SEQ ID NO: 23606 - RNA, 22 nt, Homo sapiens
gggagaggucucccugcgcaca

SEQ ID NO: 23607 - RNA, 22 nt, Homo sapiens
ugaagaagggggggaagggcgu

SEQ ID NO: 23608 - RNA, 22 nt, Homo sapiens
uaaaugaauucaauuuccuucu

SEQ ID NO: 23609 - RNA, 20 nt, Homo sapiens
agugcccccacaguuugagu

SEQ ID NO: 23610 - RNA, 21 nt, Homo sapiens
gaccaagaaauagccuuucaa

SEQ ID NO: 23611 - RNA, 22 nt, Homo sapiens
gagauuggccauguaauacuca

SEQ ID NO: 23612 - RNA, 24 nt, Homo sapiens
cacccccagagccucagcucccca

SEQ ID NO: 23613 - RNA, 21 nt, Homo sapiens
gaccaaucgccguccccgccg

SEQ ID NO: 23614 - RNA, 22 nt, Homo sapiens
cccaacaacaggaaacuaccua

SEQ ID NO: 23615 - RNA, 22 nt, Homo sapiens
uuucaguuaucaaucugucaca

SEQ ID NO: 23616 - RNA, 25 nt, Homo sapiens
acggagcugucccaacaccaccccu

SEQ ID NO: 23617 - RNA, 23 nt, Homo sapiens
acccaacagccccugcaagggau

SEQ ID NO: 23618 - RNA, 22 nt, Homo sapiens
uauccacuacaccccgcugccu

SEQ ID NO: 23619 - RNA, 20 nt, Homo sapiens
uacugcuuccacagcucccc

SEQ ID NO: 23620 - RNA, 20 nt, Homo sapiens
ggcauucaccgcgugccuua

SEQ ID NO: 23621 - RNA, 22 nt, Homo sapiens
uaaaugaauucaauuuccuucu

SEQ ID NO: 23622 - RNA, 21 nt, Homo sapiens
ggucagaacccaucauucacu

SEQ ID NO: 23623 - RNA, 22 nt, Homo sapiens
cacucagcggccguuuccccaa

SEQ ID NO: 23624 - RNA, 21 nt, Homo sapiens
acccaguagccagauguagcu

SEQ ID NO: 23625 - RNA, 17 nt, Homo sapiens
aaacauggaagcaauua

SEQ ID NO: 23626 - RNA, 21 nt, Homo sapiens
ucuacucagaagggugccuua

SEQ ID NO: 23627 - RNA, 22 nt, Homo sapiens
auaaacgacaccuccuugagaa

SEQ ID NO: 23628 - RNA, 23 nt, Homo sapiens
acagaaagugcuucccucaagag

SEQ ID NO: 23629 - RNA, 24 nt, Homo sapiens
cugaucaguuacacaucacuucag

SEQ ID NO: 23630 - RNA, 19 nt, Homo sapiens
agaaaccccagcagagaca

SEQ ID NO: 23631 - RNA, 21 nt, Homo sapiens
agacacaccacggcacacuuc

SEQ ID NO: 23632 - RNA, 22 nt, Homo sapiens
aaagagguuaaccauguauuau

SEQ ID NO: 23633 - RNA, 20 nt, Homo sapiens
cccugcgccaucuccucuac

SEQ ID NO: 23634 - RNA, 21 nt, Homo sapiens
aacauacaaaggguauccucu

SEQ ID NO: 23635 - RNA, 23 nt, Homo sapiens
gggagugaagacacggagccaga

SEQ ID NO: 23636 - RNA, 21 nt, Homo sapiens
gaccaaucgccguccccgccg

SEQ ID NO: 23637 - RNA, 22 nt, Homo sapiens
cagaagugggccgggcacaggg

SEQ ID NO: 23638 - RNA, 23 nt, Homo sapiens
cagcugcuuuugggauuccguug

SEQ ID NO: 23639 - RNA, 20 nt, Homo sapiens
cuggaggaagggcccagagg

SEQ ID NO: 23640 - RNA, 22 nt, Homo sapiens
gccuaagacacaggcccagaga

SEQ ID NO: 23641 - RNA, 22 nt, Homo sapiens
uacagauggauaccgugcaauu

SEQ ID NO: 23642 - RNA, 23 nt, Homo sapiens
aaagucucgcucucugccccuca

SEQ ID NO: 23643 - RNA, 25 nt, Homo sapiens
acggagcugucccaacaccaccccu

SEQ ID NO: 23644 - RNA, 24 nt, Homo sapiens
acgcgcaggccagagacccaggca

SEQ ID NO: 23645 - RNA, 22 nt, Homo sapiens
gcggucccgcggcgccccgccu

SEQ ID NO: 23646 - RNA, 20 nt, Homo sapiens
uccccacagacccagagccg

SEQ ID NO: 23647 - RNA, 18 nt, Homo sapiens
cccccaccaccacgcccg

SEQ ID NO: 23648 - RNA, 22 nt, Homo sapiens
agagcaagaccccgucucuaaa

SEQ ID NO: 23649 - RNA, 22 nt, Homo sapiens
augcccuuucaucauugcacug

SEQ ID NO: 23650 - RNA, 22 nt, Homo sapiens
acaaaaguugccuuugugugau

SEQ ID NO: 23651 - RNA, 23 nt, Homo sapiens
aacaggugcucaaauaagacuug

SEQ ID NO: 23652 - RNA, 22 nt, Homo sapiens
agugaauucuaccagugccaua

SEQ ID NO: 23653 - RNA, 22 nt, Homo sapiens
uaaccgauuucaaauggugcua

SEQ ID NO: 23654 - RNA, 23 nt, Homo sapiens
cuacuaaaacauggaagcacuua

SEQ ID NO: 23655 - RNA, 23 nt, Homo sapiens
acacucaaacauggaagcacuua

SEQ ID NO: 23656 - RNA, 23 nt, Homo sapiens
uguaggcuggggauaaaugaaua

SEQ ID NO: 23657 - RNA, 22 nt, Homo sapiens
caaacaccauugucacacucca

SEQ ID NO: 23658 - RNA, 22 nt, Homo sapiens
ccaucuuuaccagacaguguua

SEQ ID NO: 23659 - RNA, 22 nt, Homo sapiens
cacaaaccauuaugugcugcua

SEQ ID NO: 23660 - RNA, 22 nt, Homo sapiens
uguaaaccaugaugugcugcua

SEQ ID NO: 23661 - RNA, 22 nt, Homo sapiens
cgccaauauuuacgugcugcua

SEQ ID NO: 23662 - RNA, 20 nt, Homo sapiens
cccgccgcgucgcccugggg

SEQ ID NO: 23663 - RNA, 21 nt, Homo sapiens
gccaauauuucugugcugcua

SEQ ID NO: 23664 - RNA, 22 nt, Homo sapiens
cacucagcggccguuuccccaa

SEQ ID NO: 23665 - RNA, 21 nt, Homo sapiens
aucugcacugucagcacuuua

SEQ ID NO: 23666 - RNA, 23 nt, Homo sapiens
gcuuugacaauaucauugcacug

SEQ ID NO: 23667 - RNA, 22 nt, Homo sapiens
aaucagucucauugcuuuauaa

SEQ ID NO: 23668 - RNA, 22 nt, Homo sapiens
uucaaaacaugaauugcugcug

SEQ ID NO: 23669 - RNA, 22 nt, Homo sapiens
ccucauggaaggguuccccacu

SEQ ID NO: 23670 - RNA, 21 nt, Homo sapiens
acaaaccacagugugcugcug

SEQ ID NO: 23671 - RNA, 22 nt, Homo sapiens
acaguggucaucgagugacaca

SEQ ID NO: 23672 - RNA, 20 nt, Homo sapiens
uacugcuuccacagcucccc

SEQ ID NO: 23673 - RNA, 22 nt, Homo sapiens
aacuauacaaccuacuaccuca

SEQ ID NO: 23674 - RNA, 22 nt, Homo sapiens
aaccacacaaccuacuaccuca

SEQ ID NO: 23675 - RNA, 19 nt, Homo sapiens
agaaaccccagcagagaca

SEQ ID NO: 23676 - RNA, 23 nt, Homo sapiens
accacaggagucugagcauuuga

SEQ ID NO: 23677 - RNA, 23 nt, Homo sapiens
cuaccugcacuguaagcacuuuu

SEQ ID NO: 23678 - RNA, 22 nt, Homo sapiens
ggcucccaagaaccucaccugu

SEQ ID NO: 23679 - RNA, 21 nt, Homo sapiens
aaagagaccgguucacuguga

SEQ ID NO: 23680 - RNA, 22 nt, Homo sapiens
ccaucuuuaccagacaguguua

SEQ ID NO: 23681 - RNA, 22 nt, Homo sapiens
acaaaguucuguagugcacuga

SEQ ID NO: 23682 - RNA, 22 nt, Homo sapiens
acaaaguucugugaugcacuga

SEQ ID NO: 23683 - RNA, 21 nt, Homo sapiens
ccaaguucugucaugcacuga

SEQ ID NO: 23684 - RNA, 23 nt, Homo sapiens
gaacagguagucugaacacuggg

SEQ ID NO: 23685 - RNA, 23 nt, Homo sapiens
gaacagauagucuaaacacuggg

SEQ ID NO: 23686 - RNA, 22 nt, Homo sapiens
acaucguuaccagacaguguua

SEQ ID NO: 23687 - RNA, 22 nt, Homo sapiens
cgaauccaccacgaacaacuuc

SEQ ID NO: 23688 - RNA, 22 nt, Homo sapiens
augggacauccuacauaugcaa

SEQ ID NO: 23689 - RNA, 20 nt, Homo sapiens
guguguauacauuuauacau

SEQ ID NO: 23690 - RNA, 23 nt, Homo sapiens
aaucgcgguuuauaccaaaugaa

SEQ ID NO: 23691 - RNA, 21 nt, Homo sapiens
guuauagaucuggauuugaac

SEQ ID NO: 23692 - RNA, 24 nt, Homo sapiens
acugggcacaaacauguccagguc

SEQ ID NO: 23693 - RNA, 23 nt, Homo sapiens
ccuagagagggugagaaccugcc

SEQ ID NO: 23694 - RNA, 23 nt, Homo sapiens
agaaaccaugggguaugagcaga

SEQ ID NO: 23695 - RNA, 21 nt, Homo sapiens
cacaaccucaguguuuccagg

SEQ ID NO: 23696 - RNA, 21 nt, Homo sapiens
ccccucccagccucccugcca

SEQ ID NO: 23697 - RNA, 18 nt, Homo sapiens
auucaaucuacugccuca

SEQ ID NO: 23698 - RNA, 22 nt, Homo sapiens
cggugagcacccggccccugcg

SEQ ID NO: 23699 - RNA, 23 nt, Homo sapiens
cagcugcuuuugggauuccguug

SEQ ID NO: 23700 - RNA, 25 nt, Homo sapiens
agcuagucaagcgcgguuguggggg

SEQ ID NO: 23701 - RNA, 20 nt, Homo sapiens
uucccaugcccuauaccucu

SEQ ID NO: 23702 - RNA, 22 nt, Homo sapiens
caacaaaaucacugaugcugga

SEQ ID NO: 23703 - RNA, 23 nt, Homo sapiens
augcaaaguugcucggguaaccu

SEQ ID NO: 23704 - RNA, 21 nt, Homo sapiens
gaccaagaaauagccuuucaa

SEQ ID NO: 23705 - RNA, 22 nt, Homo sapiens
cagcauggaguccuccagguug

SEQ ID NO: 23706 - RNA, 24 nt, Homo sapiens
acugggcacaaacauguccagguc

SEQ ID NO: 23707 - RNA, 23 nt, Homo sapiens
uguaggcuggggauaaaugaaua

SEQ ID NO: 23708 - RNA, 20 nt, Homo sapiens
aggggccucagccuccuggu

SEQ ID NO: 23709 - RNA, 22 nt, Homo sapiens
caccugauaaaacugagguaua

SEQ ID NO: 23710 - RNA, 21 nt, Homo sapiens
ggggagcgggggcccugccuu

SEQ ID NO: 23711 - RNA, 23 nt, Homo sapiens
ggaagccaucaagucgcugcagg

SEQ ID NO: 23712 - RNA, 22 nt, Homo sapiens
caaacaccauugucacacucca

SEQ ID NO: 23713 - RNA, 22 nt, Homo sapiens
gugggguggguggucaggccga

SEQ ID NO: 23714 - RNA, 24 nt, Homo sapiens
acugcuggucuucagucagggcca

SEQ ID NO: 23715 - RNA, 23 nt, Homo sapiens
gggagugaagacacggagccaga

SEQ ID NO: 23716 - RNA, 23 nt, Homo sapiens
aggaacagcagcagcccgggccg

SEQ ID NO: 23717 - RNA, 21 nt, Homo sapiens
gggcaucugggacgcgcagga

SEQ ID NO: 23718 - RNA, 21 nt, Homo sapiens
gaccaaucgccguccccgccg

SEQ ID NO: 23719 - RNA, 23 nt, Homo sapiens
cccaacagacauggcgguacuca

SEQ ID NO: 23720 - RNA, 22 nt, Homo sapiens
acggaagggcagagagggccag

SEQ ID NO: 23721 - RNA, 23 nt, Homo sapiens
gggcucuuacucccucaggcacu

SEQ ID NO: 23722 - RNA, 19 nt, Homo sapiens
auuuugguacagcagcuca

SEQ ID NO: 23723 - RNA, 24 nt, Homo sapiens
acgcgcaggccagagacccaggca

SEQ ID NO: 23724 - RNA, 24 nt, Homo sapiens
acgcgcaggccagagacccaggca

SEQ ID NO: 23725 - RNA, 22 nt, Homo sapiens
gcggucccgcggcgccccgccu

SEQ ID NO: 23726 - RNA, 22 nt, Homo sapiens
ccucaggcacggccgggccacc

SEQ ID NO: 23727 - RNA, 22 nt, Homo sapiens
ugcuguuagcccuagccccgca

SEQ ID NO: 23728 - RNA, 21 nt, Homo sapiens
aagggucaguaagcacccgcg

SEQ ID NO: 23729 - RNA, 21 nt, Homo sapiens
ggggagcgggggcccugccuu

SEQ ID NO: 23730 - RNA, 23 nt, Homo sapiens
gcacaugugcacacagccgggug

SEQ ID NO: 23731 - RNA, 21 nt, Homo sapiens
acuccaaagggaagcgccuuc

SEQ ID NO: 23732 - RNA, 21 nt, Homo sapiens
gagcugcauccuggcuccggg

SEQ ID NO: 23733 - RNA, 21 nt, Homo sapiens
gagcugcauccuggcuccggg

SEQ ID NO: 23734 - RNA, 17 nt, Homo sapiens
gggagaggaggaggcga

SEQ ID NO: 23735 - RNA, 22 nt, Homo sapiens
cuguuccugcugaacugagcca

SEQ ID NO: 23736 - RNA, 22 nt, Homo sapiens
uccagcaaagggaagcgcuuuc

SEQ ID NO: 23737 - RNA, 22 nt, Homo sapiens
accucuaaaggggagcgcuuug

SEQ ID NO: 23738 - RNA, 23 nt, Homo sapiens
acacucuaaagagaagcgcuuug

SEQ ID NO: 23739 - RNA, 21 nt, Homo sapiens
gcuccaaagggaagcgcuuug

SEQ ID NO: 23740 - RNA, 21 nt, Homo sapiens
ccucuaaagagaagcgcuuuc

SEQ ID NO: 23741 - RNA, 20 nt, Homo sapiens
guguguauacauuuauacau

SEQ ID NO: 23742 - RNA, 23 nt, Homo sapiens
aguaacugguugaacaacuguaa

SEQ ID NO: 23743 - RNA, 22 nt, Homo sapiens
gggagaggucucccugcgcaca

SEQ ID NO: 23744 - RNA, 23 nt, Homo sapiens
ggaagccaucaagucgcugcagg

SEQ ID NO: 23745 - RNA, 20 nt, Homo sapiens
cucaaagcaaacccugcaga

SEQ ID NO: 23746 - RNA, 22 nt, Homo sapiens
auccuucuacaaauucacccau

SEQ ID NO: 23747 - RNA, 21 nt, Homo sapiens
agggcucaucuugguccugca

SEQ ID NO: 23748 - RNA, 22 nt, Homo sapiens
cacugguacaaggguugggaga

SEQ ID NO: 23749 - RNA, 21 nt, Homo sapiens
gaccaaucgccguccccgccg

SEQ ID NO: 23750 - RNA, 20 nt, Homo sapiens
cccgccgcgucgcccugggg

SEQ ID NO: 23751 - RNA, 21 nt, Homo sapiens
aucugcacugucagcacuuua

SEQ ID NO: 23752 - RNA, 23 nt, Homo sapiens
gcuuugacaauaucauugcacug

SEQ ID NO: 23753 - RNA, 22 nt, Homo sapiens
aguccagauucugugcccacca

SEQ ID NO: 23754 - RNA, 22 nt, Homo sapiens
gcacauguucugcggcccacca

SEQ ID NO: 23755 - RNA, 22 nt, Homo sapiens
gcggucccgcggcgccccgccu

SEQ ID NO: 23756 - RNA, 22 nt, Homo sapiens
agcucagaacccagaggucuca

SEQ ID NO: 23757 - RNA, 23 nt, Homo sapiens
ggaagccaucaagucgcugcagg

SEQ ID NO: 23758 - RNA, 23 nt, Homo sapiens
ggaagccaucaagucgcugcagg

SEQ ID NO: 23759 - RNA, 22 nt, Homo sapiens
caaacaccauugucacacucca

SEQ ID NO: 23760 - RNA, 23 nt, Homo sapiens
cugugggagggcaguggugagag

SEQ ID NO: 23761 - RNA, 17 nt, Homo sapiens
gacagccucucccccac

SEQ ID NO: 23762 - RNA, 24 nt, Homo sapiens
gaagucacucccaggcagcugcaa

SEQ ID NO: 23763 - RNA, 18 nt, Homo sapiens
aucacauucaccucccug

SEQ ID NO: 23764 - RNA, 23 nt, Homo sapiens
gggagugaagacacggagccaga

SEQ ID NO: 23765 - RNA, 22 nt, Homo sapiens
cagacuccgguggaaugaagga

SEQ ID NO: 23766 - RNA, 22 nt, Homo sapiens
ucagaccgagacaagugcaaug

SEQ ID NO: 23767 - RNA, 23 nt, Homo sapiens
aaaucagaaucacaccuggggga

SEQ ID NO: 23768 - RNA, 23 nt, Homo sapiens
aaagucucgcucucugccccuca

SEQ ID NO: 23769 - RNA, 22 nt, Homo sapiens
aucgggaggggacugagccuga

SEQ ID NO: 23770 - RNA, 22 nt, Homo sapiens
gaauucaucacggccagccucu

SEQ ID NO: 23771 - RNA, 19 nt, Homo sapiens
auuuugguacagcagcuca

SEQ ID NO: 23772 - RNA, 23 nt, Homo sapiens
ccaccuggcaagaacaggcguuc

SEQ ID NO: 23773 - RNA, 25 nt, Homo sapiens
accaacggaccuacuucccuccgcc

SEQ ID NO: 23774 - RNA, 24 nt, Homo sapiens
acgcgcaggccagagacccaggca

SEQ ID NO: 23775 - RNA, 22 nt, Homo sapiens
cugggggcggcacaggggcuca

SEQ ID NO: 23776 - RNA, 22 nt, Homo sapiens
caaacaccauugucacacucca

SEQ ID NO: 23777 - RNA, 22 nt, Homo sapiens
uccggggacgaacgggacgggu

SEQ ID NO: 23778 - RNA, 21 nt, Homo sapiens
gaccaaucgccguccccgccg

SEQ ID NO: 23779 - RNA, 22 nt, Homo sapiens
aagagggagacccaggcucgga

SEQ ID NO: 23780 - RNA, 23 nt, Homo sapiens
cacugugggcccucuccgcacca

SEQ ID NO: 23781 - RNA, 22 nt, Homo sapiens
ugcuguuagcccuagccccgca

SEQ ID NO: 23782 - RNA, 21 nt, Homo sapiens
aagggucaguaagcacccgcg

SEQ ID NO: 23783 - RNA, 22 nt, Homo sapiens
ggcagagagucagagcgcggau

SEQ ID NO: 23784 - RNA, 20 nt, Homo sapiens
ggggcagacagacgaggaag

SEQ ID NO: 23785 - RNA, 18 nt, Homo sapiens
ugguggcagaggugggau

SEQ ID NO: 23786 - RNA, 22 nt, Homo sapiens
auccuucuacaaauucacccau

SEQ ID NO: 23787 - RNA, 22 nt, Homo sapiens
ccccucuggucaaccagucaca

SEQ ID NO: 23788 - RNA, 22 nt, Homo sapiens
ccagaacugaguccacagggca

SEQ ID NO: 23789 - RNA, 20 nt, Homo sapiens
acagcaaggagggcaggagg

SEQ ID NO: 23790 - RNA, 23 nt, Homo sapiens
cgugagcuccuggaggacaggga

SEQ ID NO: 23791 - RNA, 23 nt, Homo sapiens
aaagucucgcucucugccccuca

SEQ ID NO: 23792 - RNA, 18 nt, Homo sapiens
acccucugaaaggaagca

SEQ ID NO: 23793 - RNA, 22 nt, Homo sapiens
aaagugcuucuuaccuccagau

SEQ ID NO: 23794 - RNA, 22 nt, Homo sapiens
ugcaagccuugggugugggagg

SEQ ID NO: 23795 - RNA, 21 nt, Homo sapiens
aagggucaguaagcacccgcg

SEQ ID NO: 23796 - RNA, 22 nt, Homo sapiens
cuggagagacaaggggaagagg

SEQ ID NO: 23797 - RNA, 23 nt, Homo sapiens
aaucuacuuucuuugcucauccu

SEQ ID NO: 23798 - RNA, 22 nt, Homo sapiens
aaccacuuucuuugcucauccg

SEQ ID NO: 23799 - RNA, 17 nt, Homo sapiens
gacagccucucccccac

SEQ ID NO: 23800 - RNA, 22 nt, Homo sapiens
aucagagcccucugagcuucag

SEQ ID NO: 23801 - RNA, 17 nt, Homo sapiens
gggagaggaggaggcga

SEQ ID NO: 23802 - RNA, 22 nt, Homo sapiens
acuccaacagggccgcgucucc

SEQ ID NO: 23803 - RNA, 25 nt, Homo sapiens
agcuagucaagcgcgguuguggggg

SEQ ID NO: 23804 - RNA, 20 nt, Homo sapiens
uacugcuuccacagcucccc

SEQ ID NO: 23805 - RNA, 22 nt, Homo sapiens
cacucuaaagggaggcacuuug

SEQ ID NO: 23806 - RNA, 24 nt, Homo sapiens
cacccccagagccucagcucccca

SEQ ID NO: 23807 - RNA, 21 nt, Homo sapiens
auaauggagaccaggccacga

SEQ ID NO: 23808 - RNA, 21 nt, Homo sapiens
ccccucccagccucccugcca

SEQ ID NO: 23809 - RNA, 17 nt, Homo sapiens
gggagaggaggaggcga

SEQ ID NO: 23810 - RNA, 22 nt, Homo sapiens
aggucucacuuuguugcccaga

SEQ ID NO: 23811 - RNA, 23 nt, Homo sapiens
aggaacagcagcagcccgggccg

SEQ ID NO: 23812 - RNA, 22 nt, Homo sapiens
cggugagcacccggccccugcg

SEQ ID NO: 23813 - RNA, 21 nt, Homo sapiens
aagugucagacacgguggugg

SEQ ID NO: 23814 - RNA, 25 nt, Homo sapiens
aaggagcucagaagcccugcccagc

SEQ ID NO: 23815 - RNA, 22 nt, Homo sapiens
aagagggagacccaggcucgga

SEQ ID NO: 23816 - RNA, 21 nt, Homo sapiens
gcuccaaccucagcagacugu

SEQ ID NO: 23817 - RNA, 22 nt, Homo sapiens
ccucaggcacggccgggccacc

SEQ ID NO: 23818 - RNA, 21 nt, Homo sapiens
gaccaaucgccguccccgccg

SEQ ID NO: 23819 - RNA, 22 nt, Homo sapiens
ucagaccgagacaagugcaaug

SEQ ID NO: 23820 - RNA, 23 nt, Homo sapiens
aaaucagaaucacaccuggggga

SEQ ID NO: 23821 - RNA, 19 nt, Homo sapiens
guccugaauuccgcagccu

SEQ ID NO: 23822 - RNA, 24 nt, Homo sapiens
acgcagagcccgaaagcccccagu

SEQ ID NO: 23823 - RNA, 22 nt, Homo sapiens
gcggucccgcggcgccccgccu

SEQ ID NO: 23824 - RNA, 22 nt, Homo sapiens
ugcuguuagcccuagccccgca

SEQ ID NO: 23825 - RNA, 20 nt, Homo sapiens
uccccacagacccagagccg

SEQ ID NO: 23826 - RNA, 22 nt, Homo sapiens
aacagcacaaacuacuaccuca

SEQ ID NO: 23827 - RNA, 22 nt, Homo sapiens
aacagcacaaacuacuaccuca

SEQ ID NO: 23828 - RNA, 23 nt, Homo sapiens
ggaagccaucaagucgcugcagg

SEQ ID NO: 23829 - RNA, 20 nt, Homo sapiens
cucaaagcaaacccugcaga

SEQ ID NO: 23830 - RNA, 19 nt, Homo sapiens
ucccugauccaaaaaucca

SEQ ID NO: 23831 - RNA, 18 nt, Homo sapiens
aucacauucaccucccug

SEQ ID NO: 23832 - RNA, 23 nt, Homo sapiens
gggagugaagacacggagccaga

SEQ ID NO: 23833 - RNA, 22 nt, Homo sapiens
uggcagcagcggagggggcaga

SEQ ID NO: 23834 - RNA, 20 nt, Homo sapiens
acagcaaggagggcaggagg

SEQ ID NO: 23835 - RNA, 20 nt, Homo sapiens
ccagcagcaccuggggcagu

SEQ ID NO: 23836 - RNA, 22 nt, Homo sapiens
uacagauggauaccgugcaauu

SEQ ID NO: 23837 - RNA, 22 nt, Homo sapiens
gaauucaucacggccagccucu

SEQ ID NO: 23838 - RNA, 21 nt, Homo sapiens
auccuguacugagcugccccg

SEQ ID NO: 23839 - RNA, 25 nt, Homo sapiens
acggagcugucccaacaccaccccu

SEQ ID NO: 23840 - RNA, 23 nt, Homo sapiens
cacugugggcccucuccgcacca

SEQ ID NO: 23841 - RNA, 22 nt, Homo sapiens
ugcuguuagcccuagccccgca

SEQ ID NO: 23842 - RNA, 21 nt, Homo sapiens
caucaccuuccuucuccucca

SEQ ID NO: 23843 - RNA, 24 nt, Homo sapiens
cacccccagagccucagcucccca

SEQ ID NO: 23844 - RNA, 22 nt, Homo sapiens
ccacacacuuccuuacauucca

SEQ ID NO: 23845 - RNA, 18 nt, Homo sapiens
aucacauucaccucccug

SEQ ID NO: 23846 - RNA, 22 nt, Homo sapiens
cuaccauaggguaaaaccacug

SEQ ID NO: 23847 - RNA, 23 nt, Homo sapiens
gggagugaagacacggagccaga

SEQ ID NO: 23848 - RNA, 23 nt, Homo sapiens
acauuuuucguuauugcucuuga

SEQ ID NO: 23849 - RNA, 21 nt, Homo sapiens
acaaaccacagugugcugcug

SEQ ID NO: 23850 - RNA, 22 nt, Homo sapiens
gcaaaaguaauugccaguuuug

SEQ ID NO: 23851 - RNA, 22 nt, Homo sapiens
ugcaaaaguagucucaguuuuu

SEQ ID NO: 23852 - RNA, 19 nt, Homo sapiens
aaaaguaauuacaguuuuu

SEQ ID NO: 23853 - RNA, 21 nt, Homo sapiens
aguucucccaacguaaaccca

SEQ ID NO: 23854 - RNA, 22 nt, Homo sapiens
caagacacauuuggagagggac

SEQ ID NO: 23855 - RNA, 23 nt, Homo sapiens
ggaagccaucaagucgcugcagg

SEQ ID NO: 23856 - RNA, 20 nt, Homo sapiens
gcagcuguccgcccagacac

SEQ ID NO: 23857 - RNA, 21 nt, Homo sapiens
ucuccagaucagggcagucca

SEQ ID NO: 23858 - RNA, 24 nt, Homo sapiens
gaaagugcauagaauucugucugg

SEQ ID NO: 23859 - RNA, 23 nt, Homo sapiens
gggagugaagacacggagccaga

SEQ ID NO: 23860 - RNA, 23 nt, Homo sapiens
cuaccugcacuguaagcacuuug

SEQ ID NO: 23861 - RNA, 21 nt, Homo sapiens
gaccaaucgccguccccgccg

SEQ ID NO: 23862 - RNA, 22 nt, Homo sapiens
cagaagugggccgggcacaggg

SEQ ID NO: 23863 - RNA, 19 nt, Homo sapiens
uaugcuaccuuugcacggu

SEQ ID NO: 23864 - RNA, 21 nt, Homo sapiens
accuauccugaauuacuugaa

SEQ ID NO: 23865 - RNA, 22 nt, Homo sapiens
acaaccagcuaagacacugcca

SEQ ID NO: 23866 - RNA, 23 nt, Homo sapiens
gcaaucagcuaacuacacugccu

SEQ ID NO: 23867 - RNA, 22 nt, Homo sapiens
accagcuaacaauacacugcca

SEQ ID NO: 23868 - RNA, 22 nt, Homo sapiens
gccagcuaacaauacacugccu

SEQ ID NO: 23869 - RNA, 22 nt, Homo sapiens
caugauugccacgucugcagua

SEQ ID NO: 23870 - RNA, 21 nt, Homo sapiens
ugauugccacugucugcagua

SEQ ID NO: 23871 - RNA, 22 nt, Homo sapiens
gccaccuucaaaugggaagucu

SEQ ID NO: 23872 - RNA, 19 nt, Homo sapiens
aagacauuuucagacagcu

SEQ ID NO: 23873 - RNA, 22 nt, Homo sapiens
gcggucccgcggcgccccgccu

SEQ ID NO: 23874 - RNA, 22 nt, Homo sapiens
ugcuguuagcccuagccccgca

SEQ ID NO: 23875 - RNA, 22 nt, Homo sapiens
cacucuaaagggaggcacuuug

SEQ ID NO: 23876 - RNA, 22 nt, Homo sapiens
caaacaccauugucacacucca

SEQ ID NO: 23877 - RNA, 20 nt, Homo sapiens
gcagcuguccgcccagacac

SEQ ID NO: 23878 - RNA, 17 nt, Homo sapiens
gggagaggaggaggcga

SEQ ID NO: 23879 - RNA, 18 nt, Homo sapiens
aucacauucaccucccug

SEQ ID NO: 23880 - RNA, 18 nt, Homo sapiens
aucacauucaccucccug

SEQ ID NO: 23881 - RNA, 24 nt, Homo sapiens
gaaagugcauagaauucugucugg

SEQ ID NO: 23882 - RNA, 23 nt, Homo sapiens
gggagugaagacacggagccaga

SEQ ID NO: 23883 - RNA, 22 nt, Homo sapiens
agcccaaaaggagaauucuuug

SEQ ID NO: 23884 - RNA, 21 nt, Homo sapiens
gaccaaucgccguccccgccg

SEQ ID NO: 23885 - RNA, 22 nt, Homo sapiens
ucgcccucucaacccagcuuuu

SEQ ID NO: 23886 - RNA, 22 nt, Homo sapiens
uugcccucucaacccagcuuuu

SEQ ID NO: 23887 - RNA, 20 nt, Homo sapiens
acccucucaacccagcuuuu

SEQ ID NO: 23888 - RNA, 19 nt, Homo sapiens
uccucucaacccagcuuuu

SEQ ID NO: 23889 - RNA, 23 nt, Homo sapiens
aaagucucgcucucugccccuca

SEQ ID NO: 23890 - RNA, 23 nt, Homo sapiens
caugagugacgcccucuggagua

SEQ ID NO: 23891 - RNA, 22 nt, Homo sapiens
aaagugcuucuuaccuccagau

SEQ ID NO: 23892 - RNA, 23 nt, Homo sapiens
acacucuaaagagaagcgcuuug

SEQ ID NO: 23893 - RNA, 21 nt, Homo sapiens
agaaaguacuucccucuggag

SEQ ID NO: 23894 - RNA, 21 nt, Homo sapiens
agaaagugcaucccucuggag

SEQ ID NO: 23895 - RNA, 21 nt, Homo sapiens
cucacucagauggccaacuca

SEQ ID NO: 23896 - RNA, 23 nt, Homo sapiens
ccaccuggcaagaacaggcguuc

SEQ ID NO: 23897 - RNA, 19 nt, Homo sapiens
aagacauuuucagacagcu

SEQ ID NO: 23898 - RNA, 22 nt, Homo sapiens
gcggucccgcggcgccccgccu

SEQ ID NO: 23899 - RNA, 22 nt, Homo sapiens
ugcuguuagcccuagccccgca

SEQ ID NO: 23900 - RNA, 21 nt, Homo sapiens
caucaccuuccuucuccucca

SEQ ID NO: 23901 - RNA, 20 nt, Homo sapiens
cccugcgccaucuccucuac

SEQ ID NO: 23902 - RNA, 22 nt, Homo sapiens
cacaaaccauuaugugcugcua

SEQ ID NO: 23903 - RNA, 22 nt, Homo sapiens
uguaaaccaugaugugcugcua

SEQ ID NO: 23904 - RNA, 22 nt, Homo sapiens
cgccaauauuuacgugcugcua

SEQ ID NO: 23905 - RNA, 18 nt, Homo sapiens
auucaaucuacugccuca

SEQ ID NO: 23906 - RNA, 22 nt, Homo sapiens
cggugagcacccggccccugcg

SEQ ID NO: 23907 - RNA, 21 nt, Homo sapiens
gccaauauuucugugcugcua

SEQ ID NO: 23908 - RNA, 22 nt, Homo sapiens
aaucagucucauugcuuuauaa

SEQ ID NO: 23909 - RNA, 22 nt, Homo sapiens
acaaccagcuaagacacugcca

SEQ ID NO: 23910 - RNA, 22 nt, Homo sapiens
uucaaaacaugaauugcugcug

SEQ ID NO: 23911 - RNA, 21 nt, Homo sapiens
acaaaccacagugugcugcug

SEQ ID NO: 23912 - RNA, 20 nt, Homo sapiens
uacugcuuccacagcucccc

SEQ ID NO: 23913 - RNA, 21 nt, Homo sapiens
ggggagcgggggcccugccuu

SEQ ID NO: 23914 - RNA, 22 nt, Homo sapiens
augcccuuuuaacauugcacug

SEQ ID NO: 23915 - RNA, 22 nt, Homo sapiens
cccaacaacaugaaacuaccua

SEQ ID NO: 23916 - RNA, 22 nt, Homo sapiens
cccaacaacaggaaacuaccua

SEQ ID NO: 23917 - RNA, 22 nt, Homo sapiens
acaucguuaccagacaguguua

SEQ ID NO: 23918 - RNA, 22 nt, Homo sapiens
ucaucauuaccaggcaguauua

SEQ ID NO: 23919 - RNA, 21 nt, Homo sapiens
ggaaaucccuggcaaugugau

SEQ ID NO: 23920 - RNA, 21 nt, Homo sapiens
gguaaucccuggcaaugugau

SEQ ID NO: 23921 - RNA, 23 nt, Homo sapiens
acacuuacuggacaccuacuagg

SEQ ID NO: 23922 - RNA, 22 nt, Homo sapiens
cacuuaucagguuguauuauaa

SEQ ID NO: 23923 - RNA, 22 nt, Homo sapiens
cacuuagcagguuguauuauau

SEQ ID NO: 23924 - RNA, 21 nt, Homo sapiens
ucgacugccacucuuacuaga

SEQ ID NO: 23925 - RNA, 23 nt, Homo sapiens
acaaggaugaaucuuuguuacug

SEQ ID NO: 23926 - RNA, 22 nt, Homo sapiens
aacaacacuugaccacauccug

SEQ ID NO: 23927 - RNA, 22 nt, Homo sapiens
acaacuguaacuagacgguuuu

SEQ ID NO: 23928 - RNA, 22 nt, Homo sapiens
ucaacaucagucugauaagcua

SEQ ID NO: 23929 - RNA, 24 nt, Homo sapiens
acucacaccuagguuccaaggauu

SEQ ID NO: 23930 - RNA, 21 nt, Homo sapiens
acguggauuuuccucuaugau

SEQ ID NO: 23931 - RNA, 22 nt, Homo sapiens
aacauggauuuuccucuaugau

SEQ ID NO: 23932 - RNA, 20 nt, Homo sapiens
gaaagggcuucccuuugcag

SEQ ID NO: 23933 - RNA, 20 nt, Homo sapiens
gaaagggcuucccuuugcag

SEQ ID NO: 23934 - RNA, 22 nt, Homo sapiens
aaagacguggagaaauuagaau

SEQ ID NO: 23935 - RNA, 21 nt, Homo sapiens
cagguaccaauauuuuaucua

SEQ ID NO: 23936 - RNA, 21 nt, Homo sapiens
acuagcuuauacauaaaauua

SEQ ID NO: 23937 - RNA, 22 nt, Homo sapiens
cugcacuuuuaugaauaagcuc

SEQ ID NO: 23938 - RNA, 23 nt, Homo sapiens
ggacauuguuucagugcccaagu

SEQ ID NO: 23939 - RNA, 17 nt, Homo sapiens
gggagaggaggaggcga

SEQ ID NO: 23940 - RNA, 22 nt, Homo sapiens
ggagcccgcgccccgcgccgag

SEQ ID NO: 23941 - RNA, 22 nt, Homo sapiens
uagcagaagcauuuccgcacac

SEQ ID NO: 23942 - RNA, 18 nt, Homo sapiens
auucaaucuacugccuca

SEQ ID NO: 23943 - RNA, 21 nt, Homo sapiens
acaggauugagggggggcccu

SEQ ID NO: 23944 - RNA, 21 nt, Homo sapiens
aggagacucacaaguuccugc

SEQ ID NO: 23945 - RNA, 21 nt, Homo sapiens
ggggagcgggggcccugccuu

SEQ ID NO: 23946 - RNA, 21 nt, Homo sapiens
gagcugcauccuggcuccggg

SEQ ID NO: 23947 - RNA, 21 nt, Homo sapiens
auaauggagaccaggccacga

SEQ ID NO: 23948 - RNA, 22 nt, Homo sapiens
cugggggcggcacaggggcuca

SEQ ID NO: 23949 - RNA, 22 nt, Homo sapiens
caaacaccauugucacacucca

SEQ ID NO: 23950 - RNA, 18 nt, Homo sapiens
cccccaccaccacgcccg

SEQ ID NO: 23951 - RNA, 21 nt, Homo sapiens
gaccaaucgccguccccgccg

SEQ ID NO: 23952 - RNA, 22 nt, Homo sapiens
cggugagcacccggccccugcg

SEQ ID NO: 23953 - RNA, 22 nt, Homo sapiens
aacacucuaaagggaugcacga

SEQ ID NO: 23954 - RNA, 21 nt, Homo sapiens
guucuaacccauuguggccaa

SEQ ID NO: 23955 - RNA, 21 nt, Homo sapiens
ggacuauagaacuuucccccu

SEQ ID NO: 23956 - RNA, 22 nt, Homo sapiens
gcggucccgcggcgccccgccu

SEQ ID NO: 23957 - RNA, 22 nt, Homo sapiens
ugcuguuagcccuagccccgca

SEQ ID NO: 23958 - RNA, 20 nt, Homo sapiens
uacugcuuccacagcucccc

SEQ ID NO: 23959 - RNA, 22 nt, Homo sapiens
uaaaugaauucaauuuccuucu

SEQ ID NO: 23960 - RNA, 17 nt, Homo sapiens
uggcgcccgaacaggga

SEQ ID NO: 23961 - RNA, 19 nt, Homo sapiens
ucccugauccaaaaaucca

SEQ ID NO: 23962 - RNA, 22 nt, Homo sapiens
uccacauggaguugcuguuaca

SEQ ID NO: 23963 - RNA, 22 nt, Homo sapiens
cagacuccgguggaaugaagga

SEQ ID NO: 23964 - RNA, 22 nt, Homo sapiens
ugggguauuugacaaacugaca

SEQ ID NO: 23965 - RNA, 22 nt, Homo sapiens
uaaccgauuucagauggugcua

SEQ ID NO: 23966 - RNA, 22 nt, Homo sapiens
cuuccagucgaggauguuuaca

SEQ ID NO: 23967 - RNA, 22 nt, Homo sapiens
cuuccagucggggauguuuaca

SEQ ID NO: 23968 - RNA, 22 nt, Homo sapiens
cuuccagucaaggauguuuaca

SEQ ID NO: 23969 - RNA, 23 nt, Homo sapiens
ccuucucagaaaggugaaauuua

SEQ ID NO: 23970 - RNA, 22 nt, Homo sapiens
acacaccaaggauaauuucucc

SEQ ID NO: 23971 - RNA, 21 nt, Homo sapiens
cagguaccaauauuuuaucua

SEQ ID NO: 23972 - RNA, 22 nt, Homo sapiens
ggagauggagccagggcccuaa

SEQ ID NO: 23973 - RNA, 22 nt, Homo sapiens
cacugguacaaggguugggaga

SEQ ID NO: 23974 - RNA, 23 nt, Homo sapiens
cuaacugcacuagaugcaccuua

SEQ ID NO: 23975 - RNA, 22 nt, Homo sapiens
accuaauauaucaaacauauca

SEQ ID NO: 23976 - RNA, 21 nt, Homo sapiens
aacccaauaucaaacauauca

SEQ ID NO: 23977 - RNA, 22 nt, Homo sapiens
uuaacagcuaagcacccuaauc

SEQ ID NO: 23978 - RNA, 22 nt, Homo sapiens
cgggacguccagacucaacucu

SEQ ID NO: 23979 - RNA, 22 nt, Homo sapiens
acggaagggcagagagggccag

SEQ ID NO: 23980 - RNA, 22 nt, Homo sapiens
ccucaggcacggccgggccacc

SEQ ID NO: 23981 - RNA, 25 nt, Homo sapiens
gaauccugguucugucccucacuag

SEQ ID NO: 23982 - RNA, 22 nt, Homo sapiens
acucaguaugccaggguaccau

SEQ ID NO: 23983 - RNA, 22 nt, Homo sapiens
ggagauggagccagggcccuaa

SEQ ID NO: 23984 - RNA, 22 nt, Homo sapiens
ggagauggagccagggcccuaa

SEQ ID NO: 23985 - RNA, 21 nt, Homo sapiens
ccgugguucuacccuguggua

SEQ ID NO: 23986 - RNA, 20 nt, Homo sapiens
cccgccgcgucgcccugggg

SEQ ID NO: 23987 - RNA, 21 nt, Homo sapiens
aacggaaccacuagugacuug

SEQ ID NO: 23988 - RNA, 24 nt, Homo sapiens
ugggagaaccucccugcuucugcu

SEQ ID NO: 23989 - RNA, 22 nt, Homo sapiens
agcugaguguaggauguuuaca

SEQ ID NO: 23990 - RNA, 22 nt, Homo sapiens
acggaagggcagagagggccag

SEQ ID NO: 23991 - RNA, 21 nt, Homo sapiens
uucuaggauaggcccaggggc

SEQ ID NO: 23992 - RNA, 22 nt, Homo sapiens
ccuggccgugugguuagugauu

SEQ ID NO: 23993 - RNA, 22 nt, Homo sapiens
auaaacgacaccuccuugagaa

SEQ ID NO: 23994 - RNA, 22 nt, Homo sapiens
gaacuugcuaaaaaugcagaau

SEQ ID NO: 23995 - RNA, 22 nt, Homo sapiens
ccucaggcacggccgggccacc

SEQ ID NO: 23996 - RNA, 21 nt, Homo sapiens
aggagacucacaaguuccugc

SEQ ID NO: 23997 - RNA, 22 nt, Homo sapiens
caaacaccauugucacacucca

SEQ ID NO: 23998 - RNA, 17 nt, Homo sapiens
gacagccucucccccac

SEQ ID NO: 23999 - RNA, 21 nt, Homo sapiens
cggggugcacgggcggagggc

SEQ ID NO: 24000 - RNA, 23 nt, Homo sapiens
gggagugaagacacggagccaga

SEQ ID NO: 24001 - RNA, 22 nt, Homo sapiens
agcccaaaaggagaauucuuug

SEQ ID NO: 24002 - RNA, 21 nt, Homo sapiens
gaccaaucgccguccccgccg

SEQ ID NO: 24003 - RNA, 21 nt, Homo sapiens
gaccaaucgccguccccgccg

SEQ ID NO: 24004 - RNA, 22 nt, Homo sapiens
uagucaagugaagcagugggag

SEQ ID NO: 24005 - RNA, 22 nt, Homo sapiens
ucagaccgagacaagugcaaug

SEQ ID NO: 24006 - RNA, 21 nt, Homo sapiens
acaggauugagggggggcccu

SEQ ID NO: 24007 - RNA, 22 nt, Homo sapiens
agcugaguguaggauguuuaca

SEQ ID NO: 24008 - RNA, 23 nt, Homo sapiens
aaagucucgcucucugccccuca

SEQ ID NO: 24009 - RNA, 22 nt, Homo sapiens
ugcaagccuugggugugggagg

SEQ ID NO: 24010 - RNA, 22 nt, Homo sapiens
aguccagauucugugcccacca

SEQ ID NO: 24011 - RNA, 25 nt, Homo sapiens
acggagcugucccaacaccaccccu

SEQ ID NO: 24012 - RNA, 25 nt, Homo sapiens
acggagcugucccaacaccaccccu

SEQ ID NO: 24013 - RNA, 22 nt, Homo sapiens
gcacauguucugcggcccacca

SEQ ID NO: 24014 - RNA, 22 nt, Homo sapiens
gcggucccgcggcgccccgccu

SEQ ID NO: 24015 - RNA, 22 nt, Homo sapiens
gcggucccgcggcgccccgccu

SEQ ID NO: 24016 - RNA, 20 nt, Homo sapiens
uacugcuuccacagcucccc

SEQ ID NO: 24017 - RNA, 20 nt, Homo sapiens
uacugcuuccacagcucccc

SEQ ID NO: 24018 - RNA, 23 nt, Homo sapiens
gcacaugugcacacagccgggug

SEQ ID NO: 24019 - RNA, 22 nt, Homo sapiens
auccuucuacaaauucacccau

SEQ ID NO: 24020 - RNA, 22 nt, Homo sapiens
aggucucacuuuguugcccaga

SEQ ID NO: 24021 - RNA, 22 nt, Homo sapiens
ucaggaacugccuuucucucca

SEQ ID NO: 24022 - RNA, 24 nt, Homo sapiens
acucacaccuagguuccaaggauu

SEQ ID NO: 24023 - RNA, 22 nt, Homo sapiens
acgguccuacacucaaggcaug

SEQ ID NO: 24024 - RNA, 25 nt, Homo sapiens
aaggagcucagaagcccugcccagc

SEQ ID NO: 24025 - RNA, 23 nt, Homo sapiens
cacugugggcccucuccgcacca

SEQ ID NO: 24026 - RNA, 22 nt, Homo sapiens
cgaccauggcuguagacuguua

SEQ ID NO: 24027 - RNA, 25 nt, Homo sapiens
agcuagucaagcgcgguuguggggg

SEQ ID NO: 24028 - RNA, 21 nt, Homo sapiens
ggccgugacuggagacuguua

SEQ ID NO: 24029 - RNA, 22 nt, Homo sapiens
cuuccagucgaggauguuuaca

SEQ ID NO: 24030 - RNA, 22 nt, Homo sapiens
cuuccagucggggauguuuaca

SEQ ID NO: 24031 - RNA, 22 nt, Homo sapiens
cuuccagucaaggauguuuaca

SEQ ID NO: 24032 - RNA, 22 nt, Homo sapiens
ucaguuuccucugcaaacaguu

SEQ ID NO: 24033 - RNA, 21 nt, Homo sapiens
aaacaucacugcaagucuuaa

SEQ ID NO: 24034 - RNA, 22 nt, Homo sapiens
cucagagcagacgugguucuca

SEQ ID NO: 24035 - RNA, 21 nt, Homo sapiens
cuggaggacggcaacagucag

SEQ ID NO: 24036 - RNA, 22 nt, Homo sapiens
cuagggaacacagggcugguga

SEQ ID NO: 24037 - RNA, 22 nt, Homo sapiens
cuggagagacaaggggaagagg

SEQ ID NO: 24038 - RNA, 23 nt, Homo sapiens
cggccugauucacaacaccagcu

SEQ ID NO: 24039 - RNA, 22 nt, Homo sapiens
ucaggaacugccuuucucucca

SEQ ID NO: 24040 - RNA, 21 nt, Homo sapiens
gaccaaucgccguccccgccg

SEQ ID NO: 24041 - RNA, 21 nt, Homo sapiens
ggaaaucccuggcaaugugau

SEQ ID NO: 24042 - RNA, 21 nt, Homo sapiens
gguaaucccuggcaaugugau

SEQ ID NO: 24043 - RNA, 19 nt, Homo sapiens
gccugcugacaccgugccu

SEQ ID NO: 24044 - RNA, 22 nt, Homo sapiens
gcggucccgcggcgccccgccu

SEQ ID NO: 24045 - RNA, 23 nt, Homo sapiens
cccagcuagauuguaagcuccuu

SEQ ID NO: 24046 - RNA, 20 nt, Homo sapiens
cccugcgccaucuccucuac

SEQ ID NO: 24047 - RNA, 23 nt, Homo sapiens
gucacaucccucccaagacccuc

SEQ ID NO: 24048 - RNA, 20 nt, Homo sapiens
uacugcuuccacagcucccc

SEQ ID NO: 24049 - RNA, 22 nt, Homo sapiens
aacccauggaauucaguucuca

SEQ ID NO: 24050 - RNA, 24 nt, Homo sapiens
agugugaguucuaccauugccaaa

SEQ ID NO: 24051 - RNA, 18 nt, Homo sapiens
auucaaucuacugccuca

SEQ ID NO: 24052 - RNA, 22 nt, Homo sapiens
agcccaaaaggagaauucuuug

SEQ ID NO: 24053 - RNA, 20 nt, Homo sapiens
acagcaaggagggcaggagg

SEQ ID NO: 24054 - RNA, 21 nt, Homo sapiens
gagcuacagugcuucaucuca

SEQ ID NO: 24055 - RNA, 21 nt, Homo sapiens
cguacgcuauacggucuacua

SEQ ID NO: 24056 - RNA, 22 nt, Homo sapiens
acaaaaguugccuuugugugau

SEQ ID NO: 24057 - RNA, 22 nt, Homo sapiens
uuucaguuaucaaucugucaca

SEQ ID NO: 24058 - RNA, 21 nt, Homo sapiens
ggacuauagaacuuucccccu

SEQ ID NO: 24059 - RNA, 21 nt, Homo sapiens
ggggagcgggggcccugccuu

SEQ ID NO: 24060 - RNA, 21 nt, Homo sapiens
ccccucccagccucccugcca

SEQ ID NO: 24061 - RNA, 18 nt, Homo sapiens
aucacauucaccucccug

SEQ ID NO: 24062 - RNA, 23 nt, Homo sapiens
gggagugaagacacggagccaga

SEQ ID NO: 24063 - RNA, 22 nt, Homo sapiens
ucaggaacugccuuucucucca

SEQ ID NO: 24064 - RNA, 22 nt, Homo sapiens
cggugagcacccggccccugcg

SEQ ID NO: 24065 - RNA, 22 nt, Homo sapiens
uggcagcagcggagggggcaga

SEQ ID NO: 24066 - RNA, 20 nt, Homo sapiens
cccgccgcgucgcccugggg

SEQ ID NO: 24067 - RNA, 22 nt, Homo sapiens
ucagaccgagacaagugcaaug

SEQ ID NO: 24068 - RNA, 20 nt, Homo sapiens
ccagcagcaccuggggcagu

SEQ ID NO: 24069 - RNA, 21 nt, Homo sapiens
auccuguacugagcugccccg

SEQ ID NO: 24070 - RNA, 21 nt, Homo sapiens
cucacucagauggccaacuca

SEQ ID NO: 24071 - RNA, 24 nt, Homo sapiens
acgcagagcccgaaagcccccagu

SEQ ID NO: 24072 - RNA, 21 nt, Homo sapiens
caucaccuuccuucuccucca

SEQ ID NO: 24073 - RNA, 22 nt, Homo sapiens
ucggucccucgggccagggcag

SEQ ID NO: 24074 - RNA, 21 nt, Homo sapiens
ggggagcgggggcccugccuu

SEQ ID NO: 24075 - RNA, 21 nt, Homo sapiens
aaagaucaaccauguauuauu

SEQ ID NO: 24076 - RNA, 22 nt, Homo sapiens
acaccgaggagcccaucaugau

SEQ ID NO: 24077 - RNA, 22 nt, Homo sapiens
guagaagggaaucuugcauaag

SEQ ID NO: 24078 - RNA, 22 nt, Homo sapiens
gagauuggccauguaauacuca

SEQ ID NO: 24079 - RNA, 22 nt, Homo sapiens
gauuccaauuuuuccacaucuu

SEQ ID NO: 24080 - RNA, 23 nt, Homo sapiens
gagcaaggcucuugucuguaagu

SEQ ID NO: 24081 - RNA, 22 nt, Homo sapiens
auggcaguggaguuagugauug

SEQ ID NO: 24082 - RNA, 22 nt, Homo sapiens
ccuggccgugugguuagugauu

SEQ ID NO: 24083 - RNA, 22 nt, Homo sapiens
uccggggacgaacgggacgggu

SEQ ID NO: 24084 - RNA, 18 nt, Homo sapiens
caccaccagagccaacgu

SEQ ID NO: 24085 - RNA, 23 nt, Homo sapiens
aggaacagcagcagcccgggccg

SEQ ID NO: 24086 - RNA, 21 nt, Homo sapiens
gaccaaucgccguccccgccg

SEQ ID NO: 24087 - RNA, 22 nt, Homo sapiens
cggugagcacccggccccugcg

SEQ ID NO: 24088 - RNA, 21 nt, Homo sapiens
ucaaucacagauagcaccccu

SEQ ID NO: 24089 - RNA, 23 nt, Homo sapiens
acccucuauagggaagcgcguuc

SEQ ID NO: 24090 - RNA, 21 nt, Homo sapiens
acuggcugagucaggacuagc

SEQ ID NO: 24091 - RNA, 19 nt, Homo sapiens
ucagcaguaccagccuaga

SEQ ID NO: 24092 - RNA, 22 nt, Homo sapiens
gcggucccgcggcgccccgccu

SEQ ID NO: 24093 - RNA, 22 nt, Homo sapiens
ggaggccgggacgagugcaaua

SEQ ID NO: 24094 - RNA, 17 nt, Homo sapiens
gggagaggaggaggcga

SEQ ID NO: 24095 - RNA, 24 nt, Homo sapiens
agugugaguucuaccauugccaaa

SEQ ID NO: 24096 - RNA, 18 nt, Homo sapiens
auucaaucuacugccuca

SEQ ID NO: 24097 - RNA, 21 nt, Homo sapiens
gaccaaucgccguccccgccg

SEQ ID NO: 24098 - RNA, 22 nt, Homo sapiens
ucagaccgagacaagugcaaug

SEQ ID NO: 24099 - RNA, 19 nt, Homo sapiens
guugggaucacaggcgccc

SEQ ID NO: 24100 - RNA, 21 nt, Homo sapiens
guccugagagcgcugccuccu

SEQ ID NO: 24101 - RNA, 25 nt, Homo sapiens
accaacggaccuacuucccuccgcc

SEQ ID NO: 24102 - RNA, 22 nt, Homo sapiens
gcggucccgcggcgccccgccu

SEQ ID NO: 24103 - RNA, 21 nt, Homo sapiens
gguggagcccugagaaccgga

SEQ ID NO: 24104 - RNA, 21 nt, Homo sapiens
aagggucaguaagcacccgcg

SEQ ID NO: 24105 - RNA, 20 nt, Homo sapiens
uacugcuuccacagcucccc

SEQ ID NO: 24106 - RNA, 26 nt, Homo sapiens
uuucagaauuugcugccaucaucauc

SEQ ID NO: 24107 - RNA, 21 nt, Homo sapiens
ugcaggcugaucuucuucucu

SEQ ID NO: 24108 - RNA, 17 nt, Homo sapiens
gggagaggaggaggcga

SEQ ID NO: 24109 - RNA, 22 nt, Homo sapiens
ucccucacacagaauuccagaa

SEQ ID NO: 24110 - RNA, 22 nt, Homo sapiens
agaaaaugccccucaguuuuga

SEQ ID NO: 24111 - RNA, 22 nt, Homo sapiens
cuaccauaggguaaaaccacug

SEQ ID NO: 24112 - RNA, 22 nt, Homo sapiens
ccaucuuuaccagacaguguua

SEQ ID NO: 24113 - RNA, 21 nt, Homo sapiens
uucuaggauaggcccaggggc

SEQ ID NO: 24114 - RNA, 22 nt, Homo sapiens
gcaaaaguaauugccaguuuug

SEQ ID NO: 24115 - RNA, 22 nt, Homo sapiens
ugcaaaaguagucucaguuuuu

SEQ ID NO: 24116 - RNA, 19 nt, Homo sapiens
aaaaguaauuacaguuuuu

SEQ ID NO: 24117 - RNA, 22 nt, Homo sapiens
gcaaaaguaacugcaguuuugg

SEQ ID NO: 24118 - RNA, 21 nt, Homo sapiens
gcuccaaccucagcagacugu

SEQ ID NO: 24119 - RNA, 22 nt, Homo sapiens
acuccaacagggccgcgucucc

SEQ ID NO: 24120 - RNA, 21 nt, Homo sapiens
aucugcacugucagcacuuua

SEQ ID NO: 24121 - RNA, 21 nt, Homo sapiens
cugaggagagaggaggugggg

SEQ ID NO: 24122 - RNA, 22 nt, Homo sapiens
cuggagagacaaggggaagagg

SEQ ID NO: 24123 - RNA, 18 nt, Homo sapiens
ugguggcagaggugggau

SEQ ID NO: 24124 - RNA, 20 nt, Homo sapiens
acagcaaggagggcaggagg

SEQ ID NO: 24125 - RNA, 22 nt, Homo sapiens
cucaauagacugugagcuccuu

SEQ ID NO: 24126 - RNA, 22 nt, Homo sapiens
auaaggauuuuuaggggcauua

SEQ ID NO: 24127 - RNA, 22 nt, Homo sapiens
ccucaggcacggccgggccacc

SEQ ID NO: 24128 - RNA, 23 nt, Homo sapiens
cccagcuagauuguaagcuccuu

SEQ ID NO: 24129 - RNA, 21 nt, Homo sapiens
caucaccuuccuucuccucca

SEQ ID NO: 24130 - RNA, 22 nt, Homo sapiens
agaggcaggguaguguaaugga

SEQ ID NO: 24131 - RNA, 22 nt, Homo sapiens
cugcgauuccucccucuacugu

SEQ ID NO: 24132 - RNA, 22 nt, Homo sapiens
caaacaccauugucacacucca

SEQ ID NO: 24133 - RNA, 22 nt, Homo sapiens
gccagcuaacaauacacugccu

SEQ ID NO: 24134 - RNA, 20 nt, Homo sapiens
cuggaggaagggcccagagg

SEQ ID NO: 24135 - RNA, 22 nt, Homo sapiens
gccuaagacacaggcccagaga

SEQ ID NO: 24136 - RNA, 23 nt, Homo sapiens
uguaggcuggggauaaaugaaua

SEQ ID NO: 24137 - RNA, 21 nt, Homo sapiens
acuccaaagggaagcgccuuc

SEQ ID NO: 24138 - RNA, 19 nt, Homo sapiens
ccugcuccaaaaauccauu

SEQ ID NO: 24139 - RNA, 19 nt, Homo sapiens
aagccaaagccuuauccau

SEQ ID NO: 24140 - RNA, 21 nt, Homo sapiens
aaagagaccgguucacuguga

SEQ ID NO: 24141 - RNA, 22 nt, Homo sapiens
gaaaagccagggucuguauaga

SEQ ID NO: 24142 - RNA, 19 nt, Homo sapiens
ucccugauccaaaaaucca

SEQ ID NO: 24143 - RNA, 22 nt, Homo sapiens
augcccuuuuaacauugcacug

SEQ ID NO: 24144 - RNA, 22 nt, Homo sapiens
augcccuuucaucauugcacug

SEQ ID NO: 24145 - RNA, 23 nt, Homo sapiens
ucaguuuugcauagauuugcaca

SEQ ID NO: 24146 - RNA, 23 nt, Homo sapiens
ucaguuuugcauggauuugcaca

SEQ ID NO: 24147 - RNA, 21 nt, Homo sapiens
gcggaacuuagccacugugaa

SEQ ID NO: 24148 - RNA, 21 nt, Homo sapiens
gcagaacuuagccacugugaa

SEQ ID NO: 24149 - RNA, 23 nt, Homo sapiens
gcuuugacaauacuauugcacug

SEQ ID NO: 24150 - RNA, 23 nt, Homo sapiens
gcuuugacaauaucauugcacug

SEQ ID NO: 24151 - RNA, 23 nt, Homo sapiens
acacuuacuggacaccuacuagg

SEQ ID NO: 24152 - RNA, 21 nt, Homo sapiens
aaagaucaaccauguauuauu

SEQ ID NO: 24153 - RNA, 23 nt, Homo sapiens
acccuauaagcaauauugcacua

SEQ ID NO: 24154 - RNA, 21 nt, Homo sapiens
uucacuccaaaaggugcaaaa

SEQ ID NO: 24155 - RNA, 22 nt, Homo sapiens
gcaaaaguaauugagauuuuug

SEQ ID NO: 24156 - RNA, 23 nt, Homo sapiens
agacaaggcccacccgugcaaac

SEQ ID NO: 24157 - RNA, 23 nt, Homo sapiens
uguaggcuggggauaaaugaaua

SEQ ID NO: 24158 - RNA, 22 nt, Homo sapiens
ucaggaacugccuuucucucca

SEQ ID NO: 24159 - RNA, 22 nt, Homo sapiens
ccuaaugauucaucauucucaa

SEQ ID NO: 24160 - RNA, 22 nt, Homo sapiens
gcaaaaguaauugccaguuuug

SEQ ID NO: 24161 - RNA, 22 nt, Homo sapiens
ugcaaaaguagucucaguuuuu

SEQ ID NO: 24162 - RNA, 19 nt, Homo sapiens
aaaaguaauuacaguuuuu

SEQ ID NO: 24163 - RNA, 21 nt, Homo sapiens
aggcggcaggcacaggacugg

SEQ ID NO: 24164 - RNA, 22 nt, Homo sapiens
uauccacuacaccccgcugccu

SEQ ID NO: 24165 - RNA, 21 nt, Homo sapiens
caugcacaugcacacauacau

SEQ ID NO: 24166 - RNA, 22 nt, Homo sapiens
guagaagggaaucuugcauaag

SEQ ID NO: 24167 - RNA, 21 nt, Homo sapiens
ucuacucacagaagugucaau

SEQ ID NO: 24168 - RNA, 22 nt, Homo sapiens
acaucaucgcauauugacacaa

SEQ ID NO: 24169 - RNA, 23 nt, Homo sapiens
aaagucucgcucucugccccuca

SEQ ID NO: 24170 - RNA, 23 nt, Homo sapiens
caugagugacgcccucuggagua

SEQ ID NO: 24171 - RNA, 22 nt, Homo sapiens
guacaaaaguaauuacaguuuu

SEQ ID NO: 24172 - RNA, 22 nt, Homo sapiens
accuucccugguacagaauacu

SEQ ID NO: 24173 - RNA, 22 nt, Homo sapiens
aacccauggaauucaguucuca

SEQ ID NO: 24174 - RNA, 22 nt, Homo sapiens
agccuauggaauucaguucuca

SEQ ID NO: 24175 - RNA, 22 nt, Homo sapiens
aaaguaacugcaguuuuugcua

SEQ ID NO: 24176 - RNA, 17 nt, Homo sapiens
caccugaauuacuugaa

SEQ ID NO: 24177 - RNA, 24 nt, Homo sapiens
gaaagugcauagaauucugucugg

SEQ ID NO: 24178 - RNA, 22 nt, Homo sapiens
agcccaaaaggagaauucuuug

SEQ ID NO: 24179 - RNA, 22 nt, Homo sapiens
agccuauccuggauuacuugaa

SEQ ID NO: 24180 - RNA, 21 nt, Homo sapiens
accuauccugaauuacuugaa

SEQ ID NO: 24181 - RNA, 22 nt, Homo sapiens
uccacauggaguugcuguuaca

SEQ ID NO: 24182 - RNA, 22 nt, Homo sapiens
uaaaugaauucaauuuccuucu

SEQ ID NO: 24183 - RNA, 21 nt, Homo sapiens
uagcacccagauagcaaggau

SEQ ID NO: 24184 - RNA, 22 nt, Homo sapiens
caaacaccauugucacacucca

SEQ ID NO: 24185 - RNA, 22 nt, Homo sapiens
caaacaccauugucacacucca

SEQ ID NO: 24186 - RNA, 23 nt, Homo sapiens
gggagugaagacacggagccaga

SEQ ID NO: 24187 - RNA, 20 nt, Homo sapiens
cccgccgcgucgcccugggg

SEQ ID NO: 24188 - RNA, 22 nt, Homo sapiens
ucaacaucagucugauaagcua

SEQ ID NO: 24189 - RNA, 21 nt, Homo sapiens
uucuaggauaggcccaggggc

SEQ ID NO: 24190 - RNA, 23 nt, Homo sapiens
aaaucagaaucacaccuggggga

SEQ ID NO: 24191 - RNA, 23 nt, Homo sapiens
gucagaccccgagggguccucgc

SEQ ID NO: 24192 - RNA, 24 nt, Homo sapiens
acgcagagcccgaaagcccccagu

SEQ ID NO: 24193 - RNA, 24 nt, Homo sapiens
acgcgcaggccagagacccaggca

SEQ ID NO: 24194 - RNA, 21 nt, Homo sapiens
ccccucccagccucccugcca

SEQ ID NO: 24195 - RNA, 17 nt, Homo sapiens
gggagaggaggaggcga

SEQ ID NO: 24196 - RNA, 21 nt, Homo sapiens
gaccaaucgccguccccgccg

SEQ ID NO: 24197 - RNA, 22 nt, Homo sapiens
uggcagcagcggagggggcaga

SEQ ID NO: 24198 - RNA, 22 nt, Homo sapiens
ucagaccgagacaagugcaaug

SEQ ID NO: 24199 - RNA, 20 nt, Homo sapiens
ccagcagcaccuggggcagu

SEQ ID NO: 24200 - RNA, 21 nt, Homo sapiens
auccuguacugagcugccccg

SEQ ID NO: 24201 - RNA, 25 nt, Homo sapiens
accaacggaccuacuucccuccgcc

SEQ ID NO: 24202 - RNA, 22 nt, Homo sapiens
gcggucccgcggcgccccgccu

SEQ ID NO: 24203 - RNA, 22 nt, Homo sapiens
ugcuguuagcccuagccccgca

SEQ ID NO: 24204 - RNA, 22 nt, Homo sapiens
uauccacuacaccccgcugccu

SEQ ID NO: 24205 - RNA, 22 nt, Homo sapiens
ggcagagagucagagcgcggau

SEQ ID NO: 24206 - RNA, 20 nt, Homo sapiens
cuggggaaaaggguggcacg

SEQ ID NO: 24207 - RNA, 20 nt, Homo sapiens
cuggggaaaaggguggcacg

SEQ ID NO: 24208 - RNA, 23 nt, Homo sapiens
acucaccgacagcguugaauguu

SEQ ID NO: 24209 - RNA, 22 nt, Homo sapiens
ucaggaacugccuuucucucca

SEQ ID NO: 24210 - RNA, 22 nt, Homo sapiens
cccaacaacaugaaacuaccua

SEQ ID NO: 24211 - RNA, 23 nt, Homo sapiens
cuaccugcacuaugagcacuuug

SEQ ID NO: 24212 - RNA, 22 nt, Homo sapiens
ucaccauugcuaaagugcaauu

SEQ ID NO: 24213 - RNA, 20 nt, Homo sapiens
acccaccuggagauccaugg

SEQ ID NO: 24214 - RNA, 22 nt, Homo sapiens
aggaaaccagcaaguguugacg

SEQ ID NO: 24215 - RNA, 21 nt, Homo sapiens
aaaacaaaaucucaccguuuu

SEQ ID NO: 24216 - RNA, 22 nt, Homo sapiens
gcaaagguaauugcuguuuucg

SEQ ID NO: 24217 - RNA, 21 nt, Homo sapiens
guucuaacccauuguggccaa

SEQ ID NO: 24218 - RNA, 23 nt, Homo sapiens
gggccgcagcugucgcccguguc

SEQ ID NO: 24219 - RNA, 21 nt, Homo sapiens
gcuccaaccucagcagacugu

SEQ ID NO: 24220 - RNA, 19 nt, Homo sapiens
ucccacaggaagcagacac

SEQ ID NO: 24221 - RNA, 22 nt, Homo sapiens
ugcuguuagcccuagccccgca

SEQ ID NO: 24222 - RNA, 21 nt, Homo sapiens
cuacgcagaaaggacacagug

SEQ ID NO: 24223 - RNA, 27 nt, Homo sapiens
uuuagcacagugcuuauacaagaaggu

SEQ ID NO: 24224 - RNA, 18 nt, Homo sapiens
cagcagccuccuucucaa

SEQ ID NO: 24225 - RNA, 20 nt, Homo sapiens
uaugaacaauuucuaggaau

SEQ ID NO: 24226 - RNA, 18 nt, Homo sapiens
acccucugaaaggaagca

SEQ ID NO: 24227 - RNA, 22 nt, Homo sapiens
aaagugcuucuuaccuccagau

SEQ ID NO: 24228 - RNA, 22 nt, Homo sapiens
ccuggcacacaguagaccuuca

SEQ ID NO: 24229 - RNA, 23 nt, Homo sapiens
gagcaaggcucuugucuguaagu

SEQ ID NO: 24230 - RNA, 21 nt, Homo sapiens
agcuaugccagcaucuugccu

SEQ ID NO: 24231 - RNA, 22 nt, Homo sapiens
gcacacaauaaauguuugcuga

SEQ ID NO: 24232 - RNA, 24 nt, Homo sapiens
gaaagugcauagaauucugucugg

SEQ ID NO: 24233 - RNA, 22 nt, Homo sapiens
ccaucuuuaccagacaguguua

SEQ ID NO: 24234 - RNA, 24 nt, Homo sapiens
agugugaguucuaccauugccaaa

SEQ ID NO: 24235 - RNA, 22 nt, Homo sapiens
acaucguuaccagacaguguua

SEQ ID NO: 24236 - RNA, 22 nt, Homo sapiens
acaguucuucaacuggcagcuu

SEQ ID NO: 24237 - RNA, 23 nt, Homo sapiens
ucaacgggagugaucgugucauu

SEQ ID NO: 24238 - RNA, 22 nt, Homo sapiens
aucgggaggggacugagccuga

SEQ ID NO: 24239 - RNA, 19 nt, Homo sapiens
auuuugguacagcagcuca

SEQ ID NO: 24240 - RNA, 19 nt, Homo sapiens
aagacauuuucagacagcu

SEQ ID NO: 24241 - RNA, 19 nt, Homo sapiens
ucccacaggaagcagacac

SEQ ID NO: 24242 - RNA, 21 nt, Homo sapiens
caucaccuuccuucuccucca

SEQ ID NO: 24243 - RNA, 22 nt, Homo sapiens
ucaaugacucagguaaguugca

SEQ ID NO: 24244 - RNA, 22 nt, Homo sapiens
ggcagagagucagagcgcggau

SEQ ID NO: 24245 - RNA, 18 nt, Homo sapiens
ugguggcagaggugggau

SEQ ID NO: 24246 - RNA, 22 nt, Homo sapiens
aacaacacuugaccacauccug

SEQ ID NO: 24247 - RNA, 17 nt, Homo sapiens
gggagaggaggaggcga

SEQ ID NO: 24248 - RNA, 18 nt, Homo sapiens
aucacauucaccucccug

SEQ ID NO: 24249 - RNA, 21 nt, Homo sapiens
gaccaaucgccguccccgccg

SEQ ID NO: 24250 - RNA, 22 nt, Homo sapiens
ugagccacugugccuggccuga

SEQ ID NO: 24251 - RNA, 22 nt, Homo sapiens
ugcaagccuugggugugggagg

SEQ ID NO: 24252 - RNA, 24 nt, Homo sapiens
acgcgcaggccagagacccaggca

SEQ ID NO: 24253 - RNA, 22 nt, Homo sapiens
gcggucccgcggcgccccgccu

SEQ ID NO: 24254 - RNA, 22 nt, Homo sapiens
ugcuguuagcccuagccccgca

SEQ ID NO: 24255 - RNA, 20 nt, Homo sapiens
uacugcuuccacagcucccc

SEQ ID NO: 24256 - RNA, 21 nt, Homo sapiens
guuauagaucuggauuugaac

SEQ ID NO: 24257 - RNA, 21 nt, Homo sapiens
aaagagaccgguucacuguga

SEQ ID NO: 24258 - RNA, 23 nt, Homo sapiens
ccacccaaugaccuacuccaaga

SEQ ID NO: 24259 - RNA, 24 nt, Homo sapiens
cugaucaguuacacaucacuucag

SEQ ID NO: 24260 - RNA, 22 nt, Homo sapiens
agcgggacuuugagggccaguu

SEQ ID NO: 24261 - RNA, 22 nt, Homo sapiens
cgaauccaccacgaacaacuuc

SEQ ID NO: 24262 - RNA, 20 nt, Homo sapiens
ugucuccacagggcucuuua

SEQ ID NO: 24263 - RNA, 22 nt, Homo sapiens
aggaaaccagcaaguguugacg

SEQ ID NO: 24264 - RNA, 22 nt, Homo sapiens
gguuaguggaccaggucacaaa

SEQ ID NO: 24265 - RNA, 21 nt, Homo sapiens
caucaccuuccuucuccucca

SEQ ID NO: 24266 - RNA, 21 nt, Homo sapiens
auaauggagaccaggccacga

SEQ ID NO: 24267 - RNA, 22 nt, Homo sapiens
cugggggcggcacaggggcuca

SEQ ID NO: 24268 - RNA, 20 nt, Homo sapiens
aagcagaaaaaggcaaacga

SEQ ID NO: 24269 - RNA, 22 nt, Homo sapiens
acaaaguucugugaugcacuga

SEQ ID NO: 24270 - RNA, 22 nt, Homo sapiens
cacaaaccauuaugugcugcua

SEQ ID NO: 24271 - RNA, 22 nt, Homo sapiens
uguaaaccaugaugugcugcua

SEQ ID NO: 24272 - RNA, 22 nt, Homo sapiens
cgccaauauuuacgugcugcua

SEQ ID NO: 24273 - RNA, 21 nt, Homo sapiens
gaccaaucgccguccccgccg

SEQ ID NO: 24274 - RNA, 21 nt, Homo sapiens
gccaauauuucugugcugcua

SEQ ID NO: 24275 - RNA, 22 nt, Homo sapiens
acugccugucugugccugcugu

SEQ ID NO: 24276 - RNA, 22 nt, Homo sapiens
accagguuccaccccagcaggc

SEQ ID NO: 24277 - RNA, 22 nt, Homo sapiens
uucaaaacaugaauugcugcug

SEQ ID NO: 24278 - RNA, 22 nt, Homo sapiens
auauuaggaacacaucgcaaaa

SEQ ID NO: 24279 - RNA, 21 nt, Homo sapiens
acaaaccacagugugcugcug

SEQ ID NO: 24280 - RNA, 22 nt, Homo sapiens
aaagugcuucuuaccuccagau

SEQ ID NO: 24281 - RNA, 22 nt, Homo sapiens
gaacuugcuaaaaaugcagaau

SEQ ID NO: 24282 - RNA, 19 nt, Homo sapiens
guugggaucacaggcgccc

SEQ ID NO: 24283 - RNA, 21 nt, Homo sapiens
ucccagcacacauuuagcuca

SEQ ID NO: 24284 - RNA, 22 nt, Homo sapiens
aagagggagacccaggcucgga

SEQ ID NO: 24285 - RNA, 22 nt, Homo sapiens
gcggucccgcggcgccccgccu

SEQ ID NO: 24286 - RNA, 22 nt, Homo sapiens
ugcuguuagcccuagccccgca

SEQ ID NO: 24287 - RNA, 22 nt, Homo sapiens
cucagagcagacgugguucuca

SEQ ID NO: 24288 - RNA, 22 nt, Homo sapiens
agagcaagaccccgucucuaaa

SEQ ID NO: 24289 - RNA, 22 nt, Homo sapiens
uagucaagugaagcagugggag

SEQ ID NO: 24290 - RNA, 22 nt, Homo sapiens
ucagaccgagacaagugcaaug

SEQ ID NO: 24291 - RNA, 22 nt, Homo sapiens
ugcaagccuugggugugggagg

SEQ ID NO: 24292 - RNA, 22 nt, Homo sapiens
acaucaucgcauauugacacaa

SEQ ID NO: 24293 - RNA, 22 nt, Homo sapiens
acaguggucaucgagugacaca

SEQ ID NO: 24294 - RNA, 21 nt, Homo sapiens
gagcuacagugcuucaucuca

SEQ ID NO: 24295 - RNA, 21 nt, Homo sapiens
cguacgcuauacggucuacua

SEQ ID NO: 24296 - RNA, 21 nt, Homo sapiens
uagcacccagauagcaaggau

SEQ ID NO: 24297 - RNA, 22 nt, Homo sapiens
ucaacaucagucugauaagcua

SEQ ID NO: 24298 - RNA, 22 nt, Homo sapiens
cugcacuuuuaugaauaagcuc

SEQ ID NO: 24299 - RNA, 23 nt, Homo sapiens
gggagugaagacacggagccaga

SEQ ID NO: 24300 - RNA, 22 nt, Homo sapiens
agcccaaaaggagaauucuuug

SEQ ID NO: 24301 - RNA, 23 nt, Homo sapiens
cccaacagacauggcgguacuca

SEQ ID NO: 24302 - RNA, 22 nt, Homo sapiens
agcgggacuuugagggccaguu

SEQ ID NO: 24303 - RNA, 23 nt, Homo sapiens
cuaccugcacuauaagcacuuua

SEQ ID NO: 24304 - RNA, 23 nt, Homo sapiens
uccaaucaguuccugaugcagua

SEQ ID NO: 24305 - RNA, 23 nt, Homo sapiens
gaaagugcccucaaggcugagug

SEQ ID NO: 24306 - RNA, 24 nt, Homo sapiens
cagaaagugcuuucuuuuggagaa

SEQ ID NO: 24307 - RNA, 22 nt, Homo sapiens
aacacucuaaaaggaggcacuu

SEQ ID NO: 24308 - RNA, 23 nt, Homo sapiens
ucacauaggaauaaaaagccaua

SEQ ID NO: 24309 - RNA, 21 nt, Homo sapiens
acaugguuagaucaagcacaa

SEQ ID NO: 24310 - RNA, 22 nt, Homo sapiens
gccaccuucaaaugggaagucu

SEQ ID NO: 24311 - RNA, 27 nt, Homo sapiens
uuuagcacagugcuuauacaagaaggu

SEQ ID NO: 24312 - RNA, 22 nt, Homo sapiens
gaggcucagaauggcucaggag

SEQ ID NO: 24313 - RNA, 21 nt, Homo sapiens
aagugucagacacgguggugg

SEQ ID NO: 24314 - RNA, 23 nt, Homo sapiens
cgugagcuccuggaggacaggga

SEQ ID NO: 24315 - RNA, 21 nt, Homo sapiens
cggcucggguggcggcgacgg

SEQ ID NO: 24316 - RNA, 22 nt, Homo sapiens
caaacaccauugucacacucca

SEQ ID NO: 24317 - RNA, 20 nt, Homo sapiens
cccgccgcgucgcccugggg

SEQ ID NO: 24318 - RNA, 22 nt, Homo sapiens
uagucaagugaagcagugggag

SEQ ID NO: 24319 - RNA, 22 nt, Homo sapiens
gauagagugcagaccagggucu

SEQ ID NO: 24320 - RNA, 24 nt, Homo sapiens
cacccccagagccucagcucccca

SEQ ID NO: 24321 - RNA, 17 nt, Homo sapiens
uggcgcccgaacaggga

SEQ ID NO: 24322 - RNA, 22 nt, Homo sapiens
agagagagucugcccuuguaua

SEQ ID NO: 24323 - RNA, 22 nt, Homo sapiens
acagagagcuugcccuuguaua

SEQ ID NO: 24324 - RNA, 22 nt, Homo sapiens
cuaccugagcuagcauacaagu

SEQ ID NO: 24325 - RNA, 21 nt, Homo sapiens
cggggugcacgggcggagggc

SEQ ID NO: 24326 - RNA, 21 nt, Homo sapiens
uucuaggauaggcccaggggc

SEQ ID NO: 24327 - RNA, 21 nt, Homo sapiens
ggacuauagaacuuucccccu

SEQ ID NO: 24328 - RNA, 22 nt, Homo sapiens
ucggucccucgggccagggcag

SEQ ID NO: 24329 - RNA, 22 nt, Homo sapiens
cccaacaacaggaaacuaccua

SEQ ID NO: 24330 - RNA, 22 nt, Homo sapiens
cggugagcacccggccccugcg

SEQ ID NO: 24331 - RNA, 23 nt, Homo sapiens
aaaucagaaucacaccuggggga

SEQ ID NO: 24332 - RNA, 24 nt, Homo sapiens
acgcagagcccgaaagcccccagu

SEQ ID NO: 24333 - RNA, 24 nt, Homo sapiens
cagaaagugcuuucuuuuggagaa

SEQ ID NO: 24334 - RNA, 22 nt, Homo sapiens
aacacucuaaaaggaggcacuu

SEQ ID NO: 24335 - RNA, 22 nt, Homo sapiens
aaaauacauauauaucuacgua

SEQ ID NO: 24336 - RNA, 22 nt, Homo sapiens
ucucucccauuagaguugaaaa

SEQ ID NO: 24337 - RNA, 21 nt, Homo sapiens
ccgugguucuacccuguggua

SEQ ID NO: 24338 - RNA, 22 nt, Homo sapiens
uguaaaccaugaugugcugcua

SEQ ID NO: 24339 - RNA, 20 nt, Homo sapiens
acauuacuguuaucaaaaca

SEQ ID NO: 24340 - RNA, 22 nt, Homo sapiens
uucaaaacaugaauugcugcug

SEQ ID NO: 24341 - RNA, 22 nt, Homo sapiens
uucaaaacaugaauugcugcug

SEQ ID NO: 24342 - RNA, 21 nt, Homo sapiens
acaaaccacagugugcugcug

SEQ ID NO: 24343 - RNA, 21 nt, Homo sapiens
agacacaccacggcacacuuc

SEQ ID NO: 24344 - RNA, 22 nt, Homo sapiens
gcaaaaguaauugcagugugug

SEQ ID NO: 24345 - RNA, 22 nt, Homo sapiens
acacaccaaggauaauuucucc

SEQ ID NO: 24346 - RNA, 20 nt, Homo sapiens
cugcgggaggacagggcuca

SEQ ID NO: 24347 - RNA, 22 nt, Homo sapiens
aacccauggaauucaguucuca

SEQ ID NO: 24348 - RNA, 21 nt, Homo sapiens
cggggugcacgggcggagggc

SEQ ID NO: 24349 - RNA, 22 nt, Homo sapiens
acaaaguucuguagugcacuga

SEQ ID NO: 24350 - RNA, 22 nt, Homo sapiens
acaaaguucugugaugcacuga

SEQ ID NO: 24351 - RNA, 23 nt, Homo sapiens
gggagugaagacacggagccaga

SEQ ID NO: 24352 - RNA, 21 nt, Homo sapiens
ccaaguucugucaugcacuga

SEQ ID NO: 24353 - RNA, 22 nt, Homo sapiens
uagucaagugaagcagugggag

SEQ ID NO: 24354 - RNA, 22 nt, Homo sapiens
agcugaguguaggauguuuaca

SEQ ID NO: 24355 - RNA, 23 nt, Homo sapiens
aaagucucgcucucugccccuca

SEQ ID NO: 24356 - RNA, 22 nt, Homo sapiens
ugcaagccuugggugugggagg

SEQ ID NO: 24357 - RNA, 20 nt, Homo sapiens
ugggccaccgccgagcggac

SEQ ID NO: 24358 - RNA, 21 nt, Homo sapiens
cccgaggagccgggcaggcuu

SEQ ID NO: 24359 - RNA, 25 nt, Homo sapiens
accaacggaccuacuucccuccgcc

SEQ ID NO: 24360 - RNA, 22 nt, Homo sapiens
ugcuguuagcccuagccccgca

SEQ ID NO: 24361 - RNA, 22 nt, Homo sapiens
cucagagcagacgugguucuca

SEQ ID NO: 24362 - RNA, 21 nt, Homo sapiens
gaccaaucgccguccccgccg

SEQ ID NO: 24363 - RNA, 22 nt, Homo sapiens
gcggucccgcggcgccccgccu

SEQ ID NO: 24364 - RNA, 21 nt, Homo sapiens
cccgaggagccgggcaggcuu

SEQ ID NO: 24365 - RNA, 22 nt, Homo sapiens
uaaaugaauucaauuuccuucu

SEQ ID NO: 24366 - RNA, 22 nt, Homo sapiens
ucccucacacagaauuccagaa

SEQ ID NO: 24367 - RNA, 22 nt, Homo sapiens
augcuuuuugggguaagggcuu

SEQ ID NO: 24368 - RNA, 21 nt, Homo sapiens
gcuccaaccucagcagacugu

SEQ ID NO: 24369 - RNA, 23 nt, Homo sapiens
cuaccugcacuguaagcacuuuu

SEQ ID NO: 24370 - RNA, 22 nt, Homo sapiens
agaggcaggguaguguaaugga

SEQ ID NO: 24371 - RNA, 22 nt, Homo sapiens
aacacucuaaagggaugcacga

SEQ ID NO: 24372 - RNA, 22 nt, Homo sapiens
gcacacaauaaauguuugcuga

SEQ ID NO: 24373 - RNA, 25 nt, Homo sapiens
aagaaagagucuugcuuugucgccc

SEQ ID NO: 24374 - RNA, 21 nt, Homo sapiens
uuccacgaccuaauccuaacu

SEQ ID NO: 24375 - RNA, 22 nt, Homo sapiens
gcuggguggagaagguggugaa

SEQ ID NO: 24376 - RNA, 22 nt, Homo sapiens
gagcccuggacuaggagucagc

SEQ ID NO: 24377 - RNA, 22 nt, Homo sapiens
gcaaaaguaauugccaguuuug

SEQ ID NO: 24378 - RNA, 22 nt, Homo sapiens
ugcaaaaguagucucaguuuuu

SEQ ID NO: 24379 - RNA, 19 nt, Homo sapiens
aaaaguaauuacaguuuuu

SEQ ID NO: 24380 - RNA, 20 nt, Homo sapiens
cccugcgccaucuccucuac

SEQ ID NO: 24381 - RNA, 24 nt, Homo sapiens
acucacaccuagguuccaaggauu

SEQ ID NO: 24382 - RNA, 23 nt, Homo sapiens
acacagcucuuccauaucuccag

SEQ ID NO: 24383 - RNA, 20 nt, Homo sapiens
auuucuauaucuaucuccau

SEQ ID NO: 24384 - RNA, 21 nt, Homo sapiens
accuauccugaauuacuugaa

SEQ ID NO: 24385 - RNA, 22 nt, Homo sapiens
aaagagguuaaccauguauuau

SEQ ID NO: 24386 - RNA, 21 nt, Homo sapiens
aaaagcuaagucaucauauau

SEQ ID NO: 24387 - RNA, 22 nt, Homo sapiens
cucggggcagcucaguacagga

SEQ ID NO: 24388 - RNA, 21 nt, Homo sapiens
ugacugacagcuuuuugagua

SEQ ID NO: 24389 - RNA, 21 nt, Homo sapiens
aaagaucaaccauguauuauu

SEQ ID NO: 24390 - RNA, 23 nt, Homo sapiens
caugcucagacaaccauggugca

SEQ ID NO: 24391 - RNA, 21 nt, Homo sapiens
ccgugguucuacccuguggua

SEQ ID NO: 24392 - RNA, 21 nt, Homo sapiens
gugacucaucaccuauggaaa

SEQ ID NO: 24393 - RNA, 22 nt, Homo sapiens
agagagagucugcccuuguaua

SEQ ID NO: 24394 - RNA, 22 nt, Homo sapiens
acagagagcuugcccuuguaua

SEQ ID NO: 24395 - RNA, 22 nt, Homo sapiens
cuaccugagcuagcauacaagu

SEQ ID NO: 24396 - RNA, 22 nt, Homo sapiens
uccaggagcucacaaucuagug

SEQ ID NO: 24397 - RNA, 23 nt, Homo sapiens
uuuauugugguagauacuauuag

SEQ ID NO: 24398 - RNA, 21 nt, Homo sapiens
ugacugcagagcaaaagacac

SEQ ID NO: 24399 - RNA, 22 nt, Homo sapiens
ucggucccucgggccagggcag

SEQ ID NO: 24400 - RNA, 21 nt, Homo sapiens
acaaugguuguccgauauuaa

SEQ ID NO: 24401 - RNA, 22 nt, Homo sapiens
ggagagccuccacccaacccuc

SEQ ID NO: 24402 - RNA, 21 nt, Homo sapiens
uucaguuaucacaguacugua

SEQ ID NO: 24403 - RNA, 20 nt, Homo sapiens
cugcgggaggacagggcuca

SEQ ID NO: 24404 - RNA, 21 nt, Homo sapiens
acugaucuagagaacacaaga

SEQ ID NO: 24405 - RNA, 22 nt, Homo sapiens
agccacaaucaccuucugaucu

SEQ ID NO: 24406 - RNA, 22 nt, Homo sapiens
cucagucccaggcaaaccauaa

SEQ ID NO: 24407 - RNA, 20 nt, Homo sapiens
acaaugagaacccauggucu

SEQ ID NO: 24408 - RNA, 22 nt, Homo sapiens
caaacaccauugucacacucca

SEQ ID NO: 24409 - RNA, 22 nt, Homo sapiens
aagaagugcaccgcgaauguuu

SEQ ID NO: 24410 - RNA, 20 nt, Homo sapiens
aggggccucagccuccuggu

SEQ ID NO: 24411 - RNA, 20 nt, Homo sapiens
gcagaagcauuuccacacac

SEQ ID NO: 24412 - RNA, 22 nt, Homo sapiens
cuagggaacacagggcugguga

SEQ ID NO: 24413 - RNA, 23 nt, Homo sapiens
cggccugauucacaacaccagcu

SEQ ID NO: 24414 - RNA, 19 nt, Homo sapiens
gccucagaggcagcugcuu

SEQ ID NO: 24415 - RNA, 21 nt, Homo sapiens
ucuccagaucagggcagucca

SEQ ID NO: 24416 - RNA, 21 nt, Homo sapiens
guaaugggaccuuccucuuug

SEQ ID NO: 24417 - RNA, 22 nt, Homo sapiens
gaggcucagaauggcucaggag

SEQ ID NO: 24418 - RNA, 22 nt, Homo sapiens
cucggggcagcucaguacagga

SEQ ID NO: 24419 - RNA, 17 nt, Homo sapiens
gacagccucucccccac

SEQ ID NO: 24420 - RNA, 20 nt, Homo sapiens
cuggggaaaaggguggcacg

SEQ ID NO: 24421 - RNA, 24 nt, Homo sapiens
agugugaguucuaccauugccaaa

SEQ ID NO: 24422 - RNA, 22 nt, Homo sapiens
cucagagcagacgugguucuca

SEQ ID NO: 24423 - RNA, 20 nt, Homo sapiens
cucaaagcaaacccugcaga

SEQ ID NO: 24424 - RNA, 22 nt, Homo sapiens
ccccucuggucaaccagucaca

SEQ ID NO: 24425 - RNA, 22 nt, Homo sapiens
guccaaaguuggggugcugguu

SEQ ID NO: 24426 - RNA, 21 nt, Homo sapiens
ccucaaggagcuucagucuag

SEQ ID NO: 24427 - RNA, 22 nt, Homo sapiens
auaaaugacaccuccuugugaa

SEQ ID NO: 24428 - RNA, 22 nt, Homo sapiens
ccaucuuuaccagacaguguua

SEQ ID NO: 24429 - RNA, 22 nt, Homo sapiens
acaucguuaccagacaguguua

SEQ ID NO: 24430 - RNA, 21 nt, Homo sapiens
acguggauuuuccucuaugau

SEQ ID NO: 24431 - RNA, 22 nt, Homo sapiens
aacauggauuuuccucuaugau

SEQ ID NO: 24432 - RNA, 20 nt, Homo sapiens
acagcaaggagggcaggagg

SEQ ID NO: 24433 - RNA, 22 nt, Homo sapiens
ucaacaucagucugauaagcua

SEQ ID NO: 24434 - RNA, 22 nt, Homo sapiens
gcgaacgcgccacggaccaccu

SEQ ID NO: 24435 - RNA, 23 nt, Homo sapiens
cccaacagacauggcgguacuca

SEQ ID NO: 24436 - RNA, 22 nt, Homo sapiens
ucaucucgcccgcaaagaccca

SEQ ID NO: 24437 - RNA, 23 nt, Homo sapiens
acccuauaagcaauauugcacua

SEQ ID NO: 24438 - RNA, 22 nt, Homo sapiens
auggcaguggaguuagugauug

SEQ ID NO: 24439 - RNA, 22 nt, Homo sapiens
cucauccgauguacaauaauuu

SEQ ID NO: 24440 - RNA, 22 nt, Homo sapiens
ccagaacugaguccacagggca

SEQ ID NO: 24441 - RNA, 22 nt, Homo sapiens
agucuucacaacagcccugugu

SEQ ID NO: 24442 - RNA, 22 nt, Homo sapiens
acacaccaaggauaauuucucc

SEQ ID NO: 24443 - RNA, 26 nt, Homo sapiens
uuucagaauuugcugccaucaucauc

SEQ ID NO: 24444 - RNA, 22 nt, Homo sapiens
cacaaguucggaucuacggguu

SEQ ID NO: 24445 - RNA, 21 nt, Homo sapiens
aucugcacugucagcacuuua

SEQ ID NO: 24446 - RNA, 21 nt, Homo sapiens
cugaggagagaggaggugggg

SEQ ID NO: 24447 - RNA, 17 nt, Homo sapiens
gggagaggaggaggcga

SEQ ID NO: 24448 - RNA, 23 nt, Homo sapiens
gggagugaagacacggagccaga

SEQ ID NO: 24449 - RNA, 21 nt, Homo sapiens
gaccaaucgccguccccgccg

SEQ ID NO: 24450 - RNA, 21 nt, Homo sapiens
gaccaaucgccguccccgccg

SEQ ID NO: 24451 - RNA, 22 nt, Homo sapiens
ucagaccgagacaagugcaaug

SEQ ID NO: 24452 - RNA, 22 nt, Homo sapiens
agcugaguguaggauguuuaca

SEQ ID NO: 24453 - RNA, 21 nt, Homo sapiens
gaccaagaaauagccuuucaa

SEQ ID NO: 24454 - RNA, 22 nt, Homo sapiens
auaaacgacaccuccuugagaa

SEQ ID NO: 24455 - RNA, 23 nt, Homo sapiens
ucucgugacaugaugauccccga

SEQ ID NO: 24456 - RNA, 22 nt, Homo sapiens
gauccgagcaccggggaccccc

SEQ ID NO: 24457 - RNA, 25 nt, Homo sapiens
accaacggaccuacuucccuccgcc

SEQ ID NO: 24458 - RNA, 22 nt, Homo sapiens
gcggucccgcggcgccccgccu

SEQ ID NO: 24459 - RNA, 22 nt, Homo sapiens
gcggucccgcggcgccccgccu

SEQ ID NO: 24460 - RNA, 22 nt, Homo sapiens
ugcuguuagcccuagccccgca

SEQ ID NO: 24461 - RNA, 22 nt, Homo sapiens
ugcuguuagcccuagccccgca

SEQ ID NO: 24462 - RNA, 20 nt, Homo sapiens
uacugcuuccacagcucccc

SEQ ID NO: 24463 - RNA, 22 nt, Homo sapiens
acuucaaggaucuuaaacuuug

SEQ ID NO: 24464 - RNA, 22 nt, Homo sapiens
cuggagagacaaggggaagagg

SEQ ID NO: 24465 - RNA, 21 nt, Homo sapiens
uuccacgaccuaauccuaacu

SEQ ID NO: 24466 - RNA, 22 nt, Homo sapiens
aacccauggaauucaguucuca

SEQ ID NO: 24467 - RNA, 22 nt, Homo sapiens
agccuauggaauucaguucuca

SEQ ID NO: 24468 - RNA, 23 nt, Homo sapiens
ucaguuuugcauagauuugcaca

SEQ ID NO: 24469 - RNA, 23 nt, Homo sapiens
ucaguuuugcauggauuugcaca

SEQ ID NO: 24470 - RNA, 21 nt, Homo sapiens
uucacuccaaaaggugcaaaa

SEQ ID NO: 24471 - RNA, 23 nt, Homo sapiens
agacaaggcccacccgugcaaac

SEQ ID NO: 24472 - RNA, 23 nt, Homo sapiens
aggagaaggcaccaugggauuua

SEQ ID NO: 24473 - RNA, 24 nt, Homo sapiens
acgcgcaggccagagacccaggca

SEQ ID NO: 24474 - RNA, 21 nt, Homo sapiens
cugcugggccacaacguggga

SEQ ID NO: 24475 - RNA, 21 nt, Homo sapiens
acaugguuagaucaagcacaa

SEQ ID NO: 24476 - RNA, 17 nt, Homo sapiens
gacagccucucccccac

SEQ ID NO: 24477 - RNA, 21 nt, Homo sapiens
guuauagaucuggauuugaac

SEQ ID NO: 24478 - RNA, 23 nt, Homo sapiens
cacaaauucggaucuacagggua

SEQ ID NO: 24479 - RNA, 23 nt, Homo sapiens
cacaaauucgguucuacagggua

SEQ ID NO: 24480 - RNA, 22 nt, Homo sapiens
agucuucacaacagcccugugu

SEQ ID NO: 24481 - RNA, 22 nt, Homo sapiens
acaaaauccacaauuacuuuug

SEQ ID NO: 24482 - RNA, 21 nt, Homo sapiens
agagguugacuguauaauauu

SEQ ID NO: 24483 - RNA, 22 nt, Homo sapiens
aaaguaacugcaguuuuugcua

SEQ ID NO: 24484 - RNA, 21 nt, Homo sapiens
ucccagcacacauuuagcuca

SEQ ID NO: 24485 - RNA, 22 nt, Homo sapiens
ucaguuuccucugcaaacaguu

SEQ ID NO: 24486 - RNA, 21 nt, Homo sapiens
gccaauauuucugugcugcua

SEQ ID NO: 24487 - RNA, 22 nt, Homo sapiens
acaucguuaccagacaguguua

SEQ ID NO: 24488 - RNA, 22 nt, Homo sapiens
ucaucauuaccaggcaguauua

SEQ ID NO: 24489 - RNA, 23 nt, Homo sapiens
cccaacagacauggcgguacuca

SEQ ID NO: 24490 - RNA, 21 nt, Homo sapiens
ugcaaacccugcaugugggag

SEQ ID NO: 24491 - RNA, 21 nt, Homo sapiens
accuauccugaauuacuugaa

SEQ ID NO: 24492 - RNA, 22 nt, Homo sapiens
uaaccgauuucagauggugcua

SEQ ID NO: 24493 - RNA, 23 nt, Homo sapiens
aacacugauuucaaauggugcua

SEQ ID NO: 24494 - RNA, 22 nt, Homo sapiens
uaaccgauuucaaauggugcua

SEQ ID NO: 24495 - RNA, 21 nt, Homo sapiens
ucuacucacagaagugucaau

SEQ ID NO: 24496 - RNA, 18 nt, Homo sapiens
acccucugaaaggaagca

SEQ ID NO: 24497 - RNA, 22 nt, Homo sapiens
aaagugcuucuuaccuccagau

SEQ ID NO: 24498 - RNA, 22 nt, Homo sapiens
gaacuugcuaaaaaugcagaau

SEQ ID NO: 24499 - RNA, 22 nt, Homo sapiens
cucagagcagacgugguucuca

SEQ ID NO: 24500 - RNA, 20 nt, Homo sapiens
acaaugagaacccauggucu

SEQ ID NO: 24501 - RNA, 22 nt, Homo sapiens
acaucaucgcauauugacacaa

SEQ ID NO: 24502 - RNA, 23 nt, Homo sapiens
acagcgcucgcaaccgcagcgau

SEQ ID NO: 24503 - RNA, 17 nt, Homo sapiens
uggaggccccagcgaga

SEQ ID NO: 24504 - RNA, 20 nt, Homo sapiens
uccccacagacccagagccg

SEQ ID NO: 24505 - RNA, 22 nt, Homo sapiens
aaucagucucauugcuuuauaa

SEQ ID NO: 24506 - RNA, 22 nt, Homo sapiens
aacagcacaaacuacuaccuca

SEQ ID NO: 24507 - RNA, 18 nt, Homo sapiens
aucacauucaccucccug

SEQ ID NO: 24508 - RNA, 23 nt, Homo sapiens
gggagugaagacacggagccaga

SEQ ID NO: 24509 - RNA, 21 nt, Homo sapiens
gaccaaucgccguccccgccg

SEQ ID NO: 24510 - RNA, 20 nt, Homo sapiens
cuggaggaagggcccagagg

SEQ ID NO: 24511 - RNA, 22 nt, Homo sapiens
gccuaagacacaggcccagaga

SEQ ID NO: 24512 - RNA, 21 nt, Homo sapiens
uagcacccagauagcaaggau

SEQ ID NO: 24513 - RNA, 22 nt, Homo sapiens
gcggucccgcggcgccccgccu

SEQ ID NO: 24514 - RNA, 22 nt, Homo sapiens
ugcuguuagcccuagccccgca

SEQ ID NO: 24515 - RNA, 22 nt, Homo sapiens
gggagaggucucccugcgcaca

SEQ ID NO: 24516 - RNA, 25 nt, Homo sapiens
agcuagucaagcgcgguuguggggg

SEQ ID NO: 24517 - RNA, 23 nt, Homo sapiens
acacacucacacacacacacuca

SEQ ID NO: 24518 - RNA, 21 nt, Homo sapiens
uggggauuacacuucaacagg

SEQ ID NO: 24519 - RNA, 22 nt, Homo sapiens
ucaggaacugccuuucucucca

SEQ ID NO: 24520 - RNA, 22 nt, Homo sapiens
uaaccgauuucagauggugcua

SEQ ID NO: 24521 - RNA, 22 nt, Homo sapiens
cuuccagucgaggauguuuaca

SEQ ID NO: 24522 - RNA, 22 nt, Homo sapiens
cuuccagucggggauguuuaca

SEQ ID NO: 24523 - RNA, 22 nt, Homo sapiens
cuuccagucaaggauguuuaca

SEQ ID NO: 24524 - RNA, 23 nt, Homo sapiens
cggcucugucgucgaggcgcuca

SEQ ID NO: 24525 - RNA, 23 nt, Homo sapiens
gcgcccaauuaaugucuguugau

SEQ ID NO: 24526 - RNA, 22 nt, Homo sapiens
aaagugcuucuuaccuccagau

SEQ ID NO: 24527 - RNA, 21 nt, Homo sapiens
acuccaaagggaagcgccuuc

SEQ ID NO: 24528 - RNA, 22 nt, Homo sapiens
cgcucuaaagggaagcgccuuc

SEQ ID NO: 24529 - RNA, 21 nt, Homo sapiens
caguagagauuguuucaacac

SEQ ID NO: 24530 - RNA, 21 nt, Homo sapiens
caucaccuuccuucuccucca

SEQ ID NO: 24531 - RNA, 27 nt, Homo sapiens
ugcccacucucaccaucaccuacagug

SEQ ID NO: 24532 - RNA, 23 nt, Homo sapiens
ucacauaggaaugaaaagccaua

SEQ ID NO: 24533 - RNA, 22 nt, Homo sapiens
cuggagacacgugcacuguaga

SEQ ID NO: 24534 - RNA, 22 nt, Homo sapiens
ucaggaacugccuuucucucca

SEQ ID NO: 24535 - RNA, 19 nt, Homo sapiens
auuuugguacagcagcuca

SEQ ID NO: 24536 - RNA, 22 nt, Homo sapiens
cucagagcagacgugguucuca

SEQ ID NO: 24537 - RNA, 25 nt, Homo sapiens
acggagcugucccaacaccaccccu

SEQ ID NO: 24538 - RNA, 22 nt, Homo sapiens
ugcuguuagcccuagccccgca

SEQ ID NO: 24539 - RNA, 20 nt, Homo sapiens
uccccacagacccagagccg

SEQ ID NO: 24540 - RNA, 23 nt, Homo sapiens
ccgcuugagcuaacuccgacccg

SEQ ID NO: 24541 - RNA, 20 nt, Homo sapiens
uacugcuuccacagcucccc

SEQ ID NO: 24542 - RNA, 23 nt, Homo sapiens
cuaccugcacuguaagcacuuug

SEQ ID NO: 24543 - RNA, 21 nt, Homo sapiens
aagugucagacacgguggugg

SEQ ID NO: 24544 - RNA, 22 nt, Homo sapiens
caugauugccacgucugcagua

SEQ ID NO: 24545 - RNA, 21 nt, Homo sapiens
ugauugccacugucugcagua

SEQ ID NO: 24546 - RNA, 18 nt, Homo sapiens
cccccaccaccacgcccg

SEQ ID NO: 24547 - RNA, 21 nt, Homo sapiens
agggcucaucuugguccugca

SEQ ID NO: 24548 - RNA, 21 nt, Homo sapiens
ucuccagaucagggcagucca

SEQ ID NO: 24549 - RNA, 23 nt, Homo sapiens
aaaaugcagauuccuggacucca

SEQ ID NO: 24550 - RNA, 25 nt, Homo sapiens
cagcgucugccggaacccguuccca

SEQ ID NO: 24551 - RNA, 21 nt, Homo sapiens
gggcaucugggacgcgcagga

SEQ ID NO: 24552 - RNA, 21 nt, Homo sapiens
aggcggcaggcacaggacugg

SEQ ID NO: 24553 - RNA, 22 nt, Homo sapiens
uggcagcagcggagggggcaga

SEQ ID NO: 24554 - RNA, 22 nt, Homo sapiens
cacucagcggccguuuccccaa

SEQ ID NO: 24555 - RNA, 20 nt, Homo sapiens
cuggaggaagggcccagagg

SEQ ID NO: 24556 - RNA, 22 nt, Homo sapiens
gccuaagacacaggcccagaga

SEQ ID NO: 24557 - RNA, 22 nt, Homo sapiens
auggcaguggaguuagugauug

SEQ ID NO: 24558 - RNA, 21 nt, Homo sapiens
auccuguacugagcugccccg

SEQ ID NO: 24559 - RNA, 23 nt, Homo sapiens
acacacucacacacacacacuca

SEQ ID NO: 24560 - RNA, 23 nt, Homo sapiens
gucagaccccgagggguccucgc

SEQ ID NO: 24561 - RNA, 24 nt, Homo sapiens
acugggcacaaacauguccagguc

SEQ ID NO: 24562 - RNA, 19 nt, Homo sapiens
accagugcccugcacacuu

SEQ ID NO: 24563 - RNA, 22 nt, Homo sapiens
gggagaggucucccugcgcaca

SEQ ID NO: 24564 - RNA, 22 nt, Homo sapiens
acuucaaggaucuuaaacuuug

SEQ ID NO: 24565 - RNA, 22 nt, Homo sapiens
acugggacuuuguaggccaguu

SEQ ID NO: 24566 - RNA, 22 nt, Homo sapiens
agcgggacuuugagggccaguu

SEQ ID NO: 24567 - RNA, 25 nt, Homo sapiens
accaacggaccuacuucccuccgcc

SEQ ID NO: 24568 - RNA, 24 nt, Homo sapiens
cacccccagagccucagcucccca

SEQ ID NO: 24569 - RNA, 23 nt, Homo sapiens
agcagcauuguacagggcuauga

SEQ ID NO: 24570 - RNA, 21 nt, Homo sapiens
cucccccacugcagcuggcac

SEQ ID NO: 24571 - RNA, 21 nt, Homo sapiens
ccccucccagccucccugcca

SEQ ID NO: 24572 - RNA, 21 nt, Homo sapiens
cugaggagagaggaggugggg

SEQ ID NO: 24573 - RNA, 18 nt, Homo sapiens
cccccaccaccacgcccg

SEQ ID NO: 24574 - RNA, 23 nt, Homo sapiens
gaaacccagcagacaauguagcu

SEQ ID NO: 24575 - RNA, 21 nt, Homo sapiens
acuccaaagggaagcgccuuc

SEQ ID NO: 24576 - RNA, 22 nt, Homo sapiens
cgcucuaaagggaagcgccuuc

SEQ ID NO: 24577 - RNA, 22 nt, Homo sapiens
aguccagauucugugcccacca

SEQ ID NO: 24578 - RNA, 19 nt, Homo sapiens
guugggaucacaggcgccc

SEQ ID NO: 24579 - RNA, 19 nt, Homo sapiens
guugggaucacaggcgccc

SEQ ID NO: 24580 - RNA, 25 nt, Homo sapiens
acggagcugucccaacaccaccccu

SEQ ID NO: 24581 - RNA, 21 nt, Homo sapiens
gcugaggucugggccaggucu

SEQ ID NO: 24582 - RNA, 22 nt, Homo sapiens
gcacauguucugcggcccacca

SEQ ID NO: 24583 - RNA, 20 nt, Homo sapiens
uacugcuuccacagcucccc

SEQ ID NO: 24584 - RNA, 17 nt, Homo sapiens
ggguggcagcgguggga

SEQ ID NO: 24585 - RNA, 21 nt, Homo sapiens
cggggugcacgggcggagggc

SEQ ID NO: 24586 - RNA, 23 nt, Homo sapiens
gggagugaagacacggagccaga

SEQ ID NO: 24587 - RNA, 23 nt, Homo sapiens
gggagugaagacacggagccaga

SEQ ID NO: 24588 - RNA, 23 nt, Homo sapiens
aggaacagcagcagcccgggccg

SEQ ID NO: 24589 - RNA, 21 nt, Homo sapiens
gaccaaucgccguccccgccg

SEQ ID NO: 24590 - RNA, 22 nt, Homo sapiens
ucagaccgagacaagugcaaug

SEQ ID NO: 24591 - RNA, 22 nt, Homo sapiens
aggaaaccagcaaguguugacg

SEQ ID NO: 24592 - RNA, 25 nt, Homo sapiens
acggagcugucccaacaccaccccu

SEQ ID NO: 24593 - RNA, 25 nt, Homo sapiens
accaacggaccuacuucccuccgcc

SEQ ID NO: 24594 - RNA, 22 nt, Homo sapiens
gcggucccgcggcgccccgccu

SEQ ID NO: 24595 - RNA, 20 nt, Homo sapiens
uacugcuuccacagcucccc

SEQ ID NO: 24596 - RNA, 24 nt, Homo sapiens
cacccccagagccucagcucccca

SEQ ID NO: 24597 - RNA, 22 nt, Homo sapiens
caagacacauuuggagagggac

SEQ ID NO: 24598 - RNA, 22 nt, Homo sapiens
caaacaccauugucacacucca

SEQ ID NO: 24599 - RNA, 23 nt, Homo sapiens
gaaagugcccucaaggcugagug

SEQ ID NO: 24600 - RNA, 20 nt, Homo sapiens
aggggccucagccuccuggu

SEQ ID NO: 24601 - RNA, 22 nt, Homo sapiens
cacucuaaagggaggcacuuug

SEQ ID NO: 24602 - RNA, 24 nt, Homo sapiens
cacccccagagccucagcucccca

SEQ ID NO: 24603 - RNA, 22 nt, Homo sapiens
uggcagcagcggagggggcaga

SEQ ID NO: 24604 - RNA, 22 nt, Homo sapiens
ucagaccgagacaagugcaaug

SEQ ID NO: 24605 - RNA, 20 nt, Homo sapiens
ccagcagcaccuggggcagu

SEQ ID NO: 24606 - RNA, 21 nt, Homo sapiens
auccuguacugagcugccccg

SEQ ID NO: 24607 - RNA, 22 nt, Homo sapiens
ucccucacacagaauuccagaa

SEQ ID NO: 24608 - RNA, 22 nt, Homo sapiens
augcuuuuugggguaagggcuu

SEQ ID NO: 24609 - RNA, 23 nt, Homo sapiens
uccaucaucaaaacaaauggagu

SEQ ID NO: 24610 - RNA, 22 nt, Homo sapiens
cacugguacaaggguugggaga

SEQ ID NO: 24611 - RNA, 22 nt, Homo sapiens
accuaauauaucaaacauauca

SEQ ID NO: 24612 - RNA, 23 nt, Homo sapiens
cagcugcuuuugggauuccguug

SEQ ID NO: 24613 - RNA, 22 nt, Homo sapiens
cacucagcggccguuuccccaa

SEQ ID NO: 24614 - RNA, 23 nt, Homo sapiens
gaaacccagcagacaauguagcu

SEQ ID NO: 24615 - RNA, 20 nt, Homo sapiens
cuggaggaagggcccagagg

SEQ ID NO: 24616 - RNA, 22 nt, Homo sapiens
gccuaagacacaggcccagaga

SEQ ID NO: 24617 - RNA, 20 nt, Homo sapiens
gcaaugcaacagcaaugcac

SEQ ID NO: 24618 - RNA, 23 nt, Homo sapiens
acgggugcgauuucugugugaga

SEQ ID NO: 24619 - RNA, 23 nt, Homo sapiens
aaaucagaaucacaccuggggga

SEQ ID NO: 24620 - RNA, 22 nt, Homo sapiens
acaaaaguugccuuugugugau

SEQ ID NO: 24621 - RNA, 22 nt, Homo sapiens
gaauucaucacggccagccucu

SEQ ID NO: 24622 - RNA, 22 nt, Homo sapiens
ccucauggaaggguuccccacu

SEQ ID NO: 24623 - RNA, 22 nt, Homo sapiens
aacgcuccaaaagaaggcacuc

SEQ ID NO: 24624 - RNA, 22 nt, Homo sapiens
aacacucuaaaaggaggcacuu

SEQ ID NO: 24625 - RNA, 23 nt, Homo sapiens
gggcucuuacucccucaggcacu

SEQ ID NO: 24626 - RNA, 25 nt, Homo sapiens
acggagcugucccaacaccaccccu

SEQ ID NO: 24627 - RNA, 21 nt, Homo sapiens
gcuccaaccucagcagacugu

SEQ ID NO: 24628 - RNA, 24 nt, Homo sapiens
acgcagagcccgaaagcccccagu

SEQ ID NO: 24629 - RNA, 20 nt, Homo sapiens
uacugcuuccacagcucccc

SEQ ID NO: 24630 - RNA, 21 nt, Homo sapiens
cucccccacugcagcuggcac

SEQ ID NO: 24631 - RNA, 22 nt, Homo sapiens
acaaaguucugugaugcacuga

SEQ ID NO: 24632 - RNA, 22 nt, Homo sapiens
ucaggaacugccuuucucucca

SEQ ID NO: 24633 - RNA, 22 nt, Homo sapiens
ucacauuugccugcagagauuu

SEQ ID NO: 24634 - RNA, 22 nt, Homo sapiens
cacucagcaccaggauauuguu

SEQ ID NO: 24635 - RNA, 22 nt, Homo sapiens
uacagauggauaccgugcaauu

SEQ ID NO: 24636 - RNA, 22 nt, Homo sapiens
acaccgaggagcccaucaugau

SEQ ID NO: 24637 - RNA, 22 nt, Homo sapiens
cgauguaguccaaaggcacaua

SEQ ID NO: 24638 - RNA, 22 nt, Homo sapiens
gcaaagguaauugcuguuuucg

SEQ ID NO: 24639 - RNA, 25 nt, Homo sapiens
acggagcugucccaacaccaccccu

SEQ ID NO: 24640 - RNA, 24 nt, Homo sapiens
acgcgcaggccagagacccaggca

SEQ ID NO: 24641 - RNA, 23 nt, Homo sapiens
cccagcuagauuguaagcuccuu

SEQ ID NO: 24642 - RNA, 21 nt, Homo sapiens
caucaccuuccuucuccucca

SEQ ID NO: 24643 - RNA, 24 nt, Homo sapiens
ugggagaaccucccugcuucugcu

SEQ ID NO: 24644 - RNA, 22 nt, Homo sapiens
caaacaccauugucacacucca

SEQ ID NO: 24645 - RNA, 21 nt, Homo sapiens
agcgccuuuggcagcuagagu

SEQ ID NO: 24646 - RNA, 24 nt, Homo sapiens
acugcaggcuccagcuuccaggcu

SEQ ID NO: 24647 - RNA, 22 nt, Homo sapiens
cacgaccgacgccacgccgagu

SEQ ID NO: 24648 - RNA, 23 nt, Homo sapiens
aggaacagcagcagcccgggccg

SEQ ID NO: 24649 - RNA, 23 nt, Homo sapiens
aggaacagcagcagcccgggccg

SEQ ID NO: 24650 - RNA, 21 nt, Homo sapiens
gaccaaucgccguccccgccg

SEQ ID NO: 24651 - RNA, 21 nt, Homo sapiens
gaccaaucgccguccccgccg

SEQ ID NO: 24652 - RNA, 24 nt, Homo sapiens
acgcagagcccgaaagcccccagu

SEQ ID NO: 24653 - RNA, 22 nt, Homo sapiens
gcggucccgcggcgccccgccu

SEQ ID NO: 24654 - RNA, 22 nt, Homo sapiens
gcggucccgcggcgccccgccu

SEQ ID NO: 24655 - RNA, 22 nt, Homo sapiens
ugcuguuagcccuagccccgca

SEQ ID NO: 24656 - RNA, 22 nt, Homo sapiens
ugcuguuagcccuagccccgca

SEQ ID NO: 24657 - RNA, 23 nt, Homo sapiens
ggaagccaucaagucgcugcagg

SEQ ID NO: 24658 - RNA, 23 nt, Homo sapiens
ggaagccaucaagucgcugcagg

SEQ ID NO: 24659 - RNA, 22 nt, Homo sapiens
cugggggcggcacaggggcuca

SEQ ID NO: 24660 - RNA, 22 nt, Homo sapiens
uccggggacgaacgggacgggu

SEQ ID NO: 24661 - RNA, 23 nt, Homo sapiens
gggagugaagacacggagccaga

SEQ ID NO: 24662 - RNA, 22 nt, Homo sapiens
acccuuaucaguucuccgucca

SEQ ID NO: 24663 - RNA, 22 nt, Homo sapiens
uggcagcagcggagggggcaga

SEQ ID NO: 24664 - RNA, 20 nt, Homo sapiens
ccagcagcaccuggggcagu

SEQ ID NO: 24665 - RNA, 23 nt, Homo sapiens
aaagucucgcucucugccccuca

SEQ ID NO: 24666 - RNA, 21 nt, Homo sapiens
auccuguacugagcugccccg

SEQ ID NO: 24667 - RNA, 21 nt, Homo sapiens
cacaacccuaguggcgccauu

SEQ ID NO: 24668 - RNA, 21 nt, Homo sapiens
caucaccuuccuucuccucca

SEQ ID NO: 24669 - RNA, 22 nt, Homo sapiens
uauccacuacaccccgcugccu

SEQ ID NO: 24670 - RNA, 22 nt, Homo sapiens
ggaggccgggacgagugcaaua

SEQ ID NO: 24671 - RNA, 22 nt, Homo sapiens
cugggggcggcacaggggcuca

SEQ ID NO: 24672 - RNA, 22 nt, Homo sapiens
gccagcuaacaauacacugccu

SEQ ID NO: 24673 - RNA, 21 nt, Homo sapiens
aucagagguucagcuuacccu

SEQ ID NO: 24674 - RNA, 22 nt, Homo sapiens
ucccucacacagaauuccagaa

SEQ ID NO: 24675 - RNA, 21 nt, Homo sapiens
agcuaugccagcaucuugccu

SEQ ID NO: 24676 - RNA, 21 nt, Homo sapiens
aggagacucacaaguuccugc

SEQ ID NO: 24677 - RNA, 23 nt, Homo sapiens
acggcuaguggaccaggugaagu

SEQ ID NO: 24678 - RNA, 23 nt, Homo sapiens
ucacauaggaauaaaaagccaua

SEQ ID NO: 24679 - RNA, 23 nt, Homo sapiens
ucacauaggaaugaaaagccaua

SEQ ID NO: 24680 - RNA, 21 nt, Homo sapiens
cucccccacugcagcuggcac

SEQ ID NO: 24681 - RNA, 20 nt, Homo sapiens
ggggggcgaggcagguguga

SEQ ID NO: 24682 - RNA, 18 nt, Homo sapiens
ggagaggagggcacugga

SEQ ID NO: 24683 - RNA, 21 nt, Homo sapiens
gaccaaucgccguccccgccg

SEQ ID NO: 24684 - RNA, 20 nt, Homo sapiens
cccgccgcgucgcccugggg

SEQ ID NO: 24685 - RNA, 22 nt, Homo sapiens
ucagaccgagacaagugcaaug

SEQ ID NO: 24686 - RNA, 21 nt, Homo sapiens
ucaaucacagauagcaccccu

SEQ ID NO: 24687 - RNA, 21 nt, Homo sapiens
acuccaaagggaagcgccuuc

SEQ ID NO: 24688 - RNA, 22 nt, Homo sapiens
cgcucuaaagggaagcgccuuc

SEQ ID NO: 24689 - RNA, 19 nt, Homo sapiens
guugggaucacaggcgccc

SEQ ID NO: 24690 - RNA, 19 nt, Homo sapiens
gcucuaagaaagccacacu

SEQ ID NO: 24691 - RNA, 22 nt, Homo sapiens
gcggucccgcggcgccccgccu

SEQ ID NO: 24692 - RNA, 23 nt, Homo sapiens
cacugugggcccucuccgcacca

SEQ ID NO: 24693 - RNA, 21 nt, Homo sapiens
caucaccuuccuucuccucca

SEQ ID NO: 24694 - RNA, 20 nt, Homo sapiens
uacugcuuccacagcucccc

SEQ ID NO: 24695 - RNA, 22 nt, Homo sapiens
caaacaccauugucacacucca

SEQ ID NO: 24696 - RNA, 22 nt, Homo sapiens
cagcugguugaaggggaccaaa

SEQ ID NO: 24697 - RNA, 22 nt, Homo sapiens
uagcugguugaaggggaccaaa

SEQ ID NO: 24698 - RNA, 21 nt, Homo sapiens
gaccaagaaauagccuuucaa

SEQ ID NO: 24699 - RNA, 19 nt, Homo sapiens
guccugaauuccgcagccu

SEQ ID NO: 24700 - RNA, 21 nt, Homo sapiens
gcuuaaacaucuacaugaaca

SEQ ID NO: 24701 - RNA, 22 nt, Homo sapiens
cacaucucacuguagccucaaa

SEQ ID NO: 24702 - RNA, 22 nt, Homo sapiens
cacaaaccauuaugugcugcua

SEQ ID NO: 24703 - RNA, 22 nt, Homo sapiens
uguaaaccaugaugugcugcua

SEQ ID NO: 24704 - RNA, 22 nt, Homo sapiens
cgccaauauuuacgugcugcua

SEQ ID NO: 24705 - RNA, 21 nt, Homo sapiens
gccaauauuucugugcugcua

SEQ ID NO: 24706 - RNA, 17 nt, Homo sapiens
aaacauggaagcaauua

SEQ ID NO: 24707 - RNA, 22 nt, Homo sapiens
uucaaaacaugaauugcugcug

SEQ ID NO: 24708 - RNA, 21 nt, Homo sapiens
acaaaccacagugugcugcug

SEQ ID NO: 24709 - RNA, 20 nt, Homo sapiens
acaaugagaacccauggucu

SEQ ID NO: 24710 - RNA, 22 nt, Homo sapiens
caaacaccauugucacacucca

SEQ ID NO: 24711 - RNA, 22 nt, Homo sapiens
ggcagagagucagagcgcggau

SEQ ID NO: 24712 - RNA, 22 nt, Homo sapiens
cuggagagacaaggggaagagg

SEQ ID NO: 24713 - RNA, 24 nt, Homo sapiens
ucacagguuaaagggucucaggga

SEQ ID NO: 24714 - RNA, 22 nt, Homo sapiens
ucacaaguuagggucucaggga

SEQ ID NO: 24715 - RNA, 23 nt, Homo sapiens
agcccuguucuacagcccugagg

SEQ ID NO: 24716 - RNA, 22 nt, Homo sapiens
cacaaaccauuaugugcugcua

SEQ ID NO: 24717 - RNA, 22 nt, Homo sapiens
uguaaaccaugaugugcugcua

SEQ ID NO: 24718 - RNA, 22 nt, Homo sapiens
cgccaauauuuacgugcugcua

SEQ ID NO: 24719 - RNA, 21 nt, Homo sapiens
gccaauauuucugugcugcua

SEQ ID NO: 24720 - RNA, 22 nt, Homo sapiens
ggagagccuccacccaacccuc

SEQ ID NO: 24721 - RNA, 20 nt, Homo sapiens
cuggaggaagggcccagagg

SEQ ID NO: 24722 - RNA, 22 nt, Homo sapiens
gccuaagacacaggcccagaga

SEQ ID NO: 24723 - RNA, 22 nt, Homo sapiens
ucaccauugcuaaagugcaauu

SEQ ID NO: 24724 - RNA, 22 nt, Homo sapiens
uucaaaacaugaauugcugcug

SEQ ID NO: 24725 - RNA, 21 nt, Homo sapiens
acaaaccacagugugcugcug

SEQ ID NO: 24726 - RNA, 23 nt, Homo sapiens
cugcagaacuguucccgcugcua

SEQ ID NO: 24727 - RNA, 22 nt, Homo sapiens
gugauugccacucuccugagua

SEQ ID NO: 24728 - RNA, 22 nt, Homo sapiens
auaaacgacaccuccuugagaa

SEQ ID NO: 24729 - RNA, 23 nt, Homo sapiens
acagcgcucgcaaccgcagcgau

SEQ ID NO: 24730 - RNA, 20 nt, Homo sapiens
uacugcuuccacagcucccc

SEQ ID NO: 24731 - RNA, 22 nt, Homo sapiens
cacucuaaagggaggcacuuug

SEQ ID NO: 24732 - RNA, 20 nt, Homo sapiens
gcaaaugguacagcuacuuu

SEQ ID NO: 24733 - RNA, 21 nt, Homo sapiens
gagcugcauccuggcuccggg

SEQ ID NO: 24734 - RNA, 21 nt, Homo sapiens
gagcugcauccuggcuccggg

SEQ ID NO: 24735 - RNA, 17 nt, Homo sapiens
gggagaggaggaggcga

SEQ ID NO: 24736 - RNA, 18 nt, Homo sapiens
aucacauucaccucccug

SEQ ID NO: 24737 - RNA, 21 nt, Homo sapiens
cggggugcacgggcggagggc

SEQ ID NO: 24738 - RNA, 23 nt, Homo sapiens
gggagugaagacacggagccaga

SEQ ID NO: 24739 - RNA, 19 nt, Homo sapiens
guugggaucacaggcgccc

SEQ ID NO: 24740 - RNA, 19 nt, Homo sapiens
guccugaauuccgcagccu

SEQ ID NO: 24741 - RNA, 22 nt, Homo sapiens
caagacacauuuggagagggac

SEQ ID NO: 24742 - RNA, 23 nt, Homo sapiens
guagugggccgagccgagugaca

SEQ ID NO: 24743 - RNA, 22 nt, Homo sapiens
gcugaggcuguggggcuggagu

SEQ ID NO: 24744 - RNA, 22 nt, Homo sapiens
ggagcccgcgccccgcgccgag

SEQ ID NO: 24745 - RNA, 22 nt, Homo sapiens
acaccuggcuccacacgcgggc

SEQ ID NO: 24746 - RNA, 23 nt, Homo sapiens
gggagugaagacacggagccaga

SEQ ID NO: 24747 - RNA, 23 nt, Homo sapiens
aggaacagcagcagcccgggccg

SEQ ID NO: 24748 - RNA, 23 nt, Homo sapiens
aggaacagcagcagcccgggccg

SEQ ID NO: 24749 - RNA, 22 nt, Homo sapiens
agcugaguguaggauguuuaca

SEQ ID NO: 24750 - RNA, 23 nt, Homo sapiens
ccacccaaugaccuacuccaaga

SEQ ID NO: 24751 - RNA, 21 nt, Homo sapiens
ccccucccagccucccugcca

SEQ ID NO: 24752 - RNA, 18 nt, Homo sapiens
ugguggcagaggugggau

SEQ ID NO: 24753 - RNA, 22 nt, Homo sapiens
agcugaguguaggauguuuaca

SEQ ID NO: 24754 - RNA, 22 nt, Homo sapiens
ugcaagccuugggugugggagg

SEQ ID NO: 24755 - RNA, 21 nt, Homo sapiens
gagcugcauccuggcuccggg

SEQ ID NO: 24756 - RNA, 22 nt, Homo sapiens
agacaacaaugccaaccucaca

SEQ ID NO: 24757 - RNA, 22 nt, Homo sapiens
ccccucuggucaaccagucaca

SEQ ID NO: 24758 - RNA, 19 nt, Homo sapiens
guccugaauuccgcagccu

SEQ ID NO: 24759 - RNA, 21 nt, Homo sapiens
gaaggaagugagugcagccac

SEQ ID NO: 24760 - RNA, 21 nt, Homo sapiens
gaccaaucgccguccccgccg

SEQ ID NO: 24761 - RNA, 23 nt, Homo sapiens
aaagucucgcucucugccccuca

SEQ ID NO: 24762 - RNA, 19 nt, Homo sapiens
guccugaauuccgcagccu

SEQ ID NO: 24763 - RNA, 22 nt, Homo sapiens
gcggucccgcggcgccccgccu

SEQ ID NO: 24764 - RNA, 22 nt, Homo sapiens
ugcuguuagcccuagccccgca

SEQ ID NO: 24765 - RNA, 21 nt, Homo sapiens
gagcugcauccuggcuccggg

SEQ ID NO: 24766 - RNA, 21 nt, Homo sapiens
gggcaucugggacgcgcagga

SEQ ID NO: 24767 - RNA, 22 nt, Homo sapiens
aagagggagacccaggcucgga

SEQ ID NO: 24768 - RNA, 22 nt, Homo sapiens
uauccacuacaccccgcugccu

SEQ ID NO: 24769 - RNA, 21 nt, Homo sapiens
acaaaccacagugugcugcug

SEQ ID NO: 24770 - RNA, 22 nt, Homo sapiens
cacucuaaagggaggcacuuug

SEQ ID NO: 24771 - RNA, 22 nt, Homo sapiens
caaacaccauugucacacucca

SEQ ID NO: 24772 - RNA, 22 nt, Homo sapiens
cuggagagacaaggggaagagg

SEQ ID NO: 24773 - RNA, 22 nt, Homo sapiens
ccaucuuuaccagacaguguua

SEQ ID NO: 24774 - RNA, 22 nt, Homo sapiens
acugggacuuuguaggccaguu

SEQ ID NO: 24775 - RNA, 22 nt, Homo sapiens
agcgggacuuugagggccaguu

SEQ ID NO: 24776 - RNA, 22 nt, Homo sapiens
ucagaccgagacaagugcaaug

SEQ ID NO: 24777 - RNA, 23 nt, Homo sapiens
ucaacgggagugaucgugucauu

SEQ ID NO: 24778 - RNA, 22 nt, Homo sapiens
uauggaugcaaaaugaucccaa

SEQ ID NO: 24779 - RNA, 22 nt, Homo sapiens
caagacacauuuggagagggac

SEQ ID NO: 24780 - RNA, 23 nt, Homo sapiens
aaccaagaccccggagaucccag

SEQ ID NO: 24781 - RNA, 22 nt, Homo sapiens
agagcaagaccccgucucuaaa

SEQ ID NO: 24782 - RNA, 22 nt, Homo sapiens
acuggguucaccuuuaagggca

SEQ ID NO: 24783 - RNA, 20 nt, Homo sapiens
uacugcuuccacagcucccc

SEQ ID NO: 24784 - RNA, 23 nt, Homo sapiens
gacguaguccuauucucugcugc

SEQ ID NO: 24785 - RNA, 25 nt, Homo sapiens
acggagcugucccaacaccaccccu

SEQ ID NO: 24786 - RNA, 21 nt, Homo sapiens
cucccccacugcagcuggcac

SEQ ID NO: 24787 - RNA, 18 nt, Homo sapiens
gaaaugagggccagcuga

SEQ ID NO: 24788 - RNA, 22 nt, Homo sapiens
cugggggcggcacaggggcuca

SEQ ID NO: 24789 - RNA, 18 nt, Homo sapiens
ugguggcagaggugggau

SEQ ID NO: 24790 - RNA, 17 nt, Homo sapiens
ggguggcagcgguggga

SEQ ID NO: 24791 - RNA, 23 nt, Homo sapiens
gggagugaagacacggagccaga

SEQ ID NO: 24792 - RNA, 22 nt, Homo sapiens
ucaggaacugccuuucucucca

SEQ ID NO: 24793 - RNA, 21 nt, Homo sapiens
aucugcacugucagcacuuua

SEQ ID NO: 24794 - RNA, 23 nt, Homo sapiens
gcuuugacaauaucauugcacug

SEQ ID NO: 24795 - RNA, 22 nt, Homo sapiens
ugcaagccuugggugugggagg

SEQ ID NO: 24796 - RNA, 20 nt, Homo sapiens
uccccacagacccagagccg

SEQ ID NO: 24797 - RNA, 20 nt, Homo sapiens
uacugcuuccacagcucccc

SEQ ID NO: 24798 - RNA, 21 nt, Homo sapiens
ugacugacagcuuuuugagua

SEQ ID NO: 24799 - RNA, 23 nt, Homo sapiens
gacguaguccuauucucugcugc

SEQ ID NO: 24800 - RNA, 23 nt, Homo sapiens
cccaacagacauggcgguacuca

SEQ ID NO: 24801 - RNA, 27 nt, Homo sapiens
uuuagcacagugcuuauacaagaaggu

SEQ ID NO: 24802 - RNA, 24 nt, Homo sapiens
acugcaggcuccagcuuccaggcu

SEQ ID NO: 24803 - RNA, 23 nt, Homo sapiens
uccaucaucaaaacaaauggagu

SEQ ID NO: 24804 - RNA, 21 nt, Homo sapiens
cggggugcacgggcggagggc

SEQ ID NO: 24805 - RNA, 23 nt, Homo sapiens
gggagugaagacacggagccaga

SEQ ID NO: 24806 - RNA, 22 nt, Homo sapiens
ugagccacugugccuggccuga

SEQ ID NO: 24807 - RNA, 21 nt, Homo sapiens
agaggucgaccguguaaugug

SEQ ID NO: 24808 - RNA, 22 nt, Homo sapiens
acggaagggcagagagggccag

SEQ ID NO: 24809 - RNA, 22 nt, Homo sapiens
aagauguggaccauauuacaua

SEQ ID NO: 24810 - RNA, 24 nt, Homo sapiens
acugcuggucuucagucagggcca

SEQ ID NO: 24811 - RNA, 22 nt, Homo sapiens
acggaagggcagagagggccag

SEQ ID NO: 24812 - RNA, 20 nt, Homo sapiens
gcaaugcaacagcaaugcac

SEQ ID NO: 24813 - RNA, 22 nt, Homo sapiens
aacgcuccaaaagaaggcacuc

SEQ ID NO: 24814 - RNA, 22 nt, Homo sapiens
aacacucuaaaaggaggcacuu

SEQ ID NO: 24815 - RNA, 21 nt, Homo sapiens
agggcucaucuugguccugca

SEQ ID NO: 24816 - RNA, 18 nt, Homo sapiens
aucacauucaccucccug

SEQ ID NO: 24817 - RNA, 22 nt, Homo sapiens
ccucauggaaggguuccccacu

SEQ ID NO: 24818 - RNA, 25 nt, Homo sapiens
acggagcugucccaacaccaccccu

SEQ ID NO: 24819 - RNA, 24 nt, Homo sapiens
acgcgcaggccagagacccaggca

SEQ ID NO: 24820 - RNA, 21 nt, Homo sapiens
caucaccuuccuucuccucca

SEQ ID NO: 24821 - RNA, 20 nt, Homo sapiens
uacugcuuccacagcucccc

SEQ ID NO: 24822 - RNA, 22 nt, Homo sapiens
cacaagaucggaucuacggguu

SEQ ID NO: 24823 - RNA, 22 nt, Homo sapiens
cgcaaggucgguucuacgggug

SEQ ID NO: 24824 - RNA, 21 nt, Homo sapiens
agggcucaucuugguccugca

SEQ ID NO: 24825 - RNA, 22 nt, Homo sapiens
cacaaaccauuaugugcugcua

SEQ ID NO: 24826 - RNA, 22 nt, Homo sapiens
uguaaaccaugaugugcugcua

SEQ ID NO: 24827 - RNA, 22 nt, Homo sapiens
cgccaauauuuacgugcugcua

SEQ ID NO: 24828 - RNA, 21 nt, Homo sapiens
gccaauauuucugugcugcua

SEQ ID NO: 24829 - RNA, 22 nt, Homo sapiens
uucaaaacaugaauugcugcug

SEQ ID NO: 24830 - RNA, 21 nt, Homo sapiens
acaaaccacagugugcugcug

SEQ ID NO: 24831 - RNA, 23 nt, Homo sapiens
cccagcuagauuguaagcuccuu

SEQ ID NO: 24832 - RNA, 25 nt, Homo sapiens
accaacggaccuacuucccuccgcc

SEQ ID NO: 24833 - RNA, 23 nt, Homo sapiens
acauuuuucguuauugcucuuga

SEQ ID NO: 24834 - RNA, 23 nt, Homo sapiens
gggagugaagacacggagccaga

SEQ ID NO: 24835 - RNA, 22 nt, Homo sapiens
gugauugccacucuccugagua

SEQ ID NO: 24836 - RNA, 20 nt, Homo sapiens
ggcauucaccgcgugccuua

SEQ ID NO: 24837 - RNA, 22 nt, Homo sapiens
cagaaagugcuucccucuagag

SEQ ID NO: 24838 - RNA, 21 nt, Homo sapiens
cacucugaagggaagcgcuuu

SEQ ID NO: 24839 - RNA, 21 nt, Homo sapiens
ccucuaaagagaagcgcuuuc

SEQ ID NO: 24840 - RNA, 22 nt, Homo sapiens
acacucuaaaaggaugcacuuu

SEQ ID NO: 24841 - RNA, 22 nt, Homo sapiens
cagaaagcgcuucccucuagag

SEQ ID NO: 24842 - RNA, 22 nt, Homo sapiens
cagaaagcgcuucccucuagag

SEQ ID NO: 24843 - RNA, 22 nt, Homo sapiens
cagaaagugcuucccucuagag

SEQ ID NO: 24844 - RNA, 22 nt, Homo sapiens
acacucuaaagggaaccauuuu

SEQ ID NO: 24845 - RNA, 23 nt, Homo sapiens
acccucuauagggaagcgcguuc

SEQ ID NO: 24846 - RNA, 22 nt, Homo sapiens
cagaaagugcuucccucuagag

SEQ ID NO: 24847 - RNA, 22 nt, Homo sapiens
cuguuccugcugaacugagcca

SEQ ID NO: 24848 - RNA, 24 nt, Homo sapiens
ucacagguuaaagggucucaggga

SEQ ID NO: 24849 - RNA, 22 nt, Homo sapiens
ucacaaguuagggucucaggga

SEQ ID NO: 24850 - RNA, 23 nt, Homo sapiens
agcccuguucuacagcccugagg

SEQ ID NO: 24851 - RNA, 22 nt, Homo sapiens
gaaccuaucuccccucuggacc

SEQ ID NO: 24852 - RNA, 21 nt, Homo sapiens
agaaaguacuucccucuggag

SEQ ID NO: 24853 - RNA, 21 nt, Homo sapiens
agaaagugcaucccucuggag

SEQ ID NO: 24854 - RNA, 22 nt, Homo sapiens
cugggggcggcacaggggcuca

SEQ ID NO: 24855 - RNA, 22 nt, Homo sapiens
ggagauggagccagggcccuaa

SEQ ID NO: 24856 - RNA, 21 nt, Homo sapiens
aguagugcuuucuacuuuaug

SEQ ID NO: 24857 - RNA, 22 nt, Homo sapiens
ucaggaacugccuuucucucca

SEQ ID NO: 24858 - RNA, 21 nt, Homo sapiens
gaccaaucgccguccccgccg

SEQ ID NO: 24859 - RNA, 21 nt, Homo sapiens
acaggauugagggggggcccu

SEQ ID NO: 24860 - RNA, 22 nt, Homo sapiens
aaucagucucauugcuuuauaa

SEQ ID NO: 24861 - RNA, 23 nt, Homo sapiens
aaaucagaaucacaccuggggga

SEQ ID NO: 24862 - RNA, 21 nt, Homo sapiens
gugacucaucaccuauggaaa

SEQ ID NO: 24863 - RNA, 24 nt, Homo sapiens
acgcagagcccgaaagcccccagu

SEQ ID NO: 24864 - RNA, 22 nt, Homo sapiens
gcggucccgcggcgccccgccu

SEQ ID NO: 24865 - RNA, 23 nt, Homo sapiens
cuccagccccuccagggcuuccu

SEQ ID NO: 24866 - RNA, 22 nt, Homo sapiens
uccggggacgaacgggacgggu

SEQ ID NO: 24867 - RNA, 23 nt, Homo sapiens
gggagugaagacacggagccaga

SEQ ID NO: 24868 - RNA, 23 nt, Homo sapiens
gggagugaagacacggagccaga

SEQ ID NO: 24869 - RNA, 21 nt, Homo sapiens
gggcaucugggacgcgcagga

SEQ ID NO: 24870 - RNA, 21 nt, Homo sapiens
gaccaaucgccguccccgccg

SEQ ID NO: 24871 - RNA, 21 nt, Homo sapiens
acaggauugagggggggcccu

SEQ ID NO: 24872 - RNA, 21 nt, Homo sapiens
acaggauugagggggggcccu

SEQ ID NO: 24873 - RNA, 23 nt, Homo sapiens
aaaucagaaucacaccuggggga

SEQ ID NO: 24874 - RNA, 25 nt, Homo sapiens
acggagcugucccaacaccaccccu

SEQ ID NO: 24875 - RNA, 24 nt, Homo sapiens
acgcagagcccgaaagcccccagu

SEQ ID NO: 24876 - RNA, 22 nt, Homo sapiens
gcggucccgcggcgccccgccu

SEQ ID NO: 24877 - RNA, 22 nt, Homo sapiens
ugcuguuagcccuagccccgca

SEQ ID NO: 24878 - RNA, 20 nt, Homo sapiens
uacugcuuccacagcucccc

SEQ ID NO: 24879 - RNA, 22 nt, Homo sapiens
ggaggccgggacgagugcaaua

SEQ ID NO: 24880 - RNA, 23 nt, Homo sapiens
cacaaauucggaucuacagggua

SEQ ID NO: 24881 - RNA, 23 nt, Homo sapiens
cacaaauucgguucuacagggua

SEQ ID NO: 24882 - RNA, 20 nt, Homo sapiens
ggggggcgaggcagguguga

SEQ ID NO: 24883 - RNA, 24 nt, Homo sapiens
ucacagguuaaagggucucaggga

SEQ ID NO: 24884 - RNA, 22 nt, Homo sapiens
ucacaaguuagggucucaggga

SEQ ID NO: 24885 - RNA, 23 nt, Homo sapiens
agcccuguucuacagcccugagg

SEQ ID NO: 24886 - RNA, 22 nt, Homo sapiens
uagucaagugaagcagugggag

SEQ ID NO: 24887 - RNA, 23 nt, Homo sapiens
cgugagcuccuggaggacaggga

SEQ ID NO: 24888 - RNA, 22 nt, Homo sapiens
uauggaugcaaaaugaucccaa

SEQ ID NO: 24889 - RNA, 22 nt, Homo sapiens
cucggggcagcucaguacagga

SEQ ID NO: 24890 - RNA, 21 nt, Homo sapiens
uagcacccagauagcaaggau

SEQ ID NO: 24891 - RNA, 22 nt, Homo sapiens
gauagagugcagaccagggucu

SEQ ID NO: 24892 - RNA, 22 nt, Homo sapiens
gugauugccacucuccugagua

SEQ ID NO: 24893 - RNA, 22 nt, Homo sapiens
aaagugcuucuuaccuccagau

SEQ ID NO: 24894 - RNA, 23 nt, Homo sapiens
acacucuaaagagaagcgcuuug

SEQ ID NO: 24895 - RNA, 21 nt, Homo sapiens
agaaaguacuucccucuggag

SEQ ID NO: 24896 - RNA, 21 nt, Homo sapiens
agaaagugcaucccucuggag

SEQ ID NO: 24897 - RNA, 23 nt, Homo sapiens
aaccaagaccccggagaucccag

SEQ ID NO: 24898 - RNA, 18 nt, Homo sapiens
gaaaugagggccagcuga

SEQ ID NO: 24899 - RNA, 22 nt, Homo sapiens
caaacaccauugucacacucca

SEQ ID NO: 24900 - RNA, 21 nt, Homo sapiens
cugggggacggagcagaagga

SEQ ID NO: 24901 - RNA, 24 nt, Homo sapiens
ucacagguuaaagggucucaggga

SEQ ID NO: 24902 - RNA, 22 nt, Homo sapiens
ucacaaguuagggucucaggga

SEQ ID NO: 24903 - RNA, 23 nt, Homo sapiens
agcccuguucuacagcccugagg

SEQ ID NO: 24904 - RNA, 20 nt, Homo sapiens
acagcaaggagggcaggagg

SEQ ID NO: 24905 - RNA, 22 nt, Homo sapiens
cacucagcggccguuuccccaa

SEQ ID NO: 24906 - RNA, 21 nt, Homo sapiens
gugacagagccaagcacaaau

SEQ ID NO: 24907 - RNA, 23 nt, Homo sapiens
gaaacccagcagacaauguagcu

SEQ ID NO: 24908 - RNA, 22 nt, Homo sapiens
ucagaccgagacaagugcaaug

SEQ ID NO: 24909 - RNA, 24 nt, Homo sapiens
ugggagaaccucccugcuucugcu

SEQ ID NO: 24910 - RNA, 22 nt, Homo sapiens
accagcuaacaauacacugcca

SEQ ID NO: 24911 - RNA, 22 nt, Homo sapiens
gagauuggccauguaauacuca

SEQ ID NO: 24912 - RNA, 23 nt, Homo sapiens
gaaagugcccucaaggcugagug

SEQ ID NO: 24913 - RNA, 22 nt, Homo sapiens
gaacuugcuaaaaaugcagaau

SEQ ID NO: 24914 - RNA, 23 nt, Homo sapiens
acaacaaaaucacuagucuucca

SEQ ID NO: 24915 - RNA, 22 nt, Homo sapiens
ucggucccucgggccagggcag

SEQ ID NO: 24916 - RNA, 21 nt, Homo sapiens
cugaggagagaggaggugggg

SEQ ID NO: 24917 - RNA, 19 nt, Homo sapiens
ccaccucccgaguccucac

SEQ ID NO: 24918 - RNA, 20 nt, Homo sapiens
ggggcagacagacgaggaag

SEQ ID NO: 24919 - RNA, 21 nt, Homo sapiens
gagcuacagugcuucaucuca

SEQ ID NO: 24920 - RNA, 20 nt, Homo sapiens
cuggaggaagggcccagagg

SEQ ID NO: 24921 - RNA, 22 nt, Homo sapiens
gccuaagacacaggcccagaga

SEQ ID NO: 24922 - RNA, 23 nt, Homo sapiens
acgggugcgauuucugugugaga

SEQ ID NO: 24923 - RNA, 22 nt, Homo sapiens
ccucauggaaggguuccccacu

SEQ ID NO: 24924 - RNA, 21 nt, Homo sapiens
uugucuaaccagucaccuguu

SEQ ID NO: 24925 - RNA, 21 nt, Homo sapiens
cucacucagauggccaacuca

SEQ ID NO: 24926 - RNA, 22 nt, Homo sapiens
gauccgagcaccggggaccccc

SEQ ID NO: 24927 - RNA, 21 nt, Homo sapiens
caucaccuuccuucuccucca

SEQ ID NO: 24928 - RNA, 20 nt, Homo sapiens
uacugcuuccacagcucccc

SEQ ID NO: 24929 - RNA, 22 nt, Homo sapiens
cacauggccaaaacagagaaga

SEQ ID NO: 24930 - RNA, 21 nt, Homo sapiens
caucaccuuccuucuccucca

SEQ ID NO: 24931 - RNA, 21 nt, Homo sapiens
ucccagcacacauuuagcuca

SEQ ID NO: 24932 - RNA, 18 nt, Homo sapiens
aucacauucaccucccug

SEQ ID NO: 24933 - RNA, 23 nt, Homo sapiens
gggagugaagacacggagccaga

SEQ ID NO: 24934 - RNA, 22 nt, Homo sapiens
cgaaggcaacacggauaaccua

SEQ ID NO: 24935 - RNA, 21 nt, Homo sapiens
ugcaaacccugcaugugggag

SEQ ID NO: 24936 - RNA, 22 nt, Homo sapiens
aggcauaggaugacaaagggaa

SEQ ID NO: 24937 - RNA, 22 nt, Homo sapiens
ucagccgcugucacacgcacag

SEQ ID NO: 24938 - RNA, 22 nt, Homo sapiens
aggcgaaggaugacaaagggaa

SEQ ID NO: 24939 - RNA, 22 nt, Homo sapiens
acggaagggcagagagggccag

SEQ ID NO: 24940 - RNA, 22 nt, Homo sapiens
cgauguaguccaaaggcacaua

SEQ ID NO: 24941 - RNA, 23 nt, Homo sapiens
ggacauuguuucagugcccaagu

SEQ ID NO: 24942 - RNA, 21 nt, Homo sapiens
guccugagagcgcugccuccu

SEQ ID NO: 24943 - RNA, 23 nt, Homo sapiens
ccuagagagggugagaaccugcc

SEQ ID NO: 24944 - RNA, 23 nt, Homo sapiens
cccagcuagauuguaagcuccuu

SEQ ID NO: 24945 - RNA, 18 nt, Homo sapiens
ugguggcagaggugggau

SEQ ID NO: 24946 - RNA, 22 nt, Homo sapiens
ugcaagccuugggugugggagg

SEQ ID NO: 24947 - RNA, 20 nt, Homo sapiens
ggcauucaccgcgugccuua

SEQ ID NO: 24948 - RNA, 21 nt, Homo sapiens
ucuacucagaagggugccuua

SEQ ID NO: 24949 - RNA, 24 nt, Homo sapiens
gaaagugcauagaauucugucugg

SEQ ID NO: 24950 - RNA, 20 nt, Homo sapiens
cccugcgccaucuccucuac

SEQ ID NO: 24951 - RNA, 26 nt, Homo sapiens
aaccaucucauacaaaccaacuacuu

SEQ ID NO: 24952 - RNA, 21 nt, Homo sapiens
acaggauugagggggggcccu

SEQ ID NO: 24953 - RNA, 23 nt, Homo sapiens
acugaggggccucagaccgagcu

SEQ ID NO: 24954 - RNA, 22 nt, Homo sapiens
auaaacgacaccuccuugagaa

SEQ ID NO: 24955 - RNA, 23 nt, Homo sapiens
acagaaagugcuucccucaagag

SEQ ID NO: 24956 - RNA, 22 nt, Homo sapiens
ccuaaugauucaucauucucaa

SEQ ID NO: 24957 - RNA, 23 nt, Homo sapiens
ggacauuguuucagugcccaagu

SEQ ID NO: 24958 - RNA, 21 nt, Homo sapiens
acuccaaagggaagcgccuuc

SEQ ID NO: 24959 - RNA, 22 nt, Homo sapiens
uaaccaaugugcagacuacugu

SEQ ID NO: 24960 - RNA, 22 nt, Homo sapiens
uaaccaaugugcagacuacugu

SEQ ID NO: 24961 - RNA, 17 nt, Homo sapiens
gggagaggaggaggcga

SEQ ID NO: 24962 - RNA, 22 nt, Homo sapiens
cucaauagacugugagcuccuu

SEQ ID NO: 24963 - RNA, 22 nt, Homo sapiens
cugcacuuuuaugaauaagcuc

SEQ ID NO: 24964 - RNA, 23 nt, Homo sapiens
cccagcuagauuguaagcuccuu

SEQ ID NO: 24965 - RNA, 21 nt, Homo sapiens
ggcugucaauucauaggucag

SEQ ID NO: 24966 - RNA, 23 nt, Homo sapiens
uguaggcuggggauaaaugaaua

SEQ ID NO: 24967 - RNA, 22 nt, Homo sapiens
aggaaaccagcaaguguugacg

SEQ ID NO: 24968 - RNA, 25 nt, Homo sapiens
acggagcugucccaacaccaccccu

SEQ ID NO: 24969 - RNA, 23 nt, Homo sapiens
gggagugaagacacggagccaga

SEQ ID NO: 24970 - RNA, 21 nt, Homo sapiens
gaccaaucgccguccccgccg

SEQ ID NO: 24971 - RNA, 23 nt, Homo sapiens
caugagugacgcccucuggagua

SEQ ID NO: 24972 - RNA, 22 nt, Homo sapiens
gcggucccgcggcgccccgccu

SEQ ID NO: 24973 - RNA, 24 nt, Homo sapiens
cacccccagagccucagcucccca

SEQ ID NO: 24974 - RNA, 22 nt, Homo sapiens
acaaaaguugccuuugugugau

SEQ ID NO: 24975 - RNA, 23 nt, Homo sapiens
gaaagugcccucaaggcugagug

SEQ ID NO: 24976 - RNA, 24 nt, Homo sapiens
acugggcacaaacauguccagguc

SEQ ID NO: 24977 - RNA, 23 nt, Homo sapiens
acgggugcgauuucugugugaga

SEQ ID NO: 24978 - RNA, 20 nt, Homo sapiens
aggggccucagccuccuggu

SEQ ID NO: 24979 - RNA, 22 nt, Homo sapiens
ucccucacacagaauuccagaa

SEQ ID NO: 24980 - RNA, 22 nt, Homo sapiens
augcuuuuugggguaagggcuu

SEQ ID NO: 24981 - RNA, 18 nt, Homo sapiens
auucaaucuacugccuca

SEQ ID NO: 24982 - RNA, 21 nt, Homo sapiens
guccugagagcgcugccuccu

SEQ ID NO: 24983 - RNA, 21 nt, Homo sapiens
ggggagcgggggcccugccuu

SEQ ID NO: 24984 - RNA, 23 nt, Homo sapiens
acaccaaugcccuaggggaugcg

SEQ ID NO: 24985 - RNA, 21 nt, Homo sapiens
ugcaaugcaacuacaaugcac

SEQ ID NO: 24986 - RNA, 22 nt, Homo sapiens
uagucaagugaagcagugggag

SEQ ID NO: 24987 - RNA, 20 nt, Homo sapiens
gcagaagcauuuccacacac

SEQ ID NO: 24988 - RNA, 20 nt, Homo sapiens
agugcccccacaguuugagu

SEQ ID NO: 24989 - RNA, 21 nt, Homo sapiens
gagcugcauccuggcuccggg

SEQ ID NO: 24990 - RNA, 22 nt, Homo sapiens
ucaggaacugccuuucucucca

SEQ ID NO: 24991 - RNA, 22 nt, Homo sapiens
uucacacugcaugcucugggua

SEQ ID NO: 24992 - RNA, 23 nt, Homo sapiens
cagcugcuuuugggauuccguug

SEQ ID NO: 24993 - RNA, 21 nt, Homo sapiens
aagugucagacacgguggugg

SEQ ID NO: 24994 - RNA, 23 nt, Homo sapiens
aaaucagaaucacaccuggggga

SEQ ID NO: 24995 - RNA, 19 nt, Homo sapiens
guccugaauuccgcagccu

SEQ ID NO: 24996 - RNA, 21 nt, Homo sapiens
ucccagcacacauuuagcuca

SEQ ID NO: 24997 - RNA, 24 nt, Homo sapiens
acgcagagcccgaaagcccccagu

SEQ ID NO: 24998 - RNA, 21 nt, Homo sapiens
gaaggaagugagugcagccac

SEQ ID NO: 24999 - RNA, 23 nt, Homo sapiens
guagugggccgagccgagugaca

SEQ ID NO: 25000 - RNA, 23 nt, Homo sapiens
ccgcuugagcuaacuccgacccg

SEQ ID NO: 25001 - RNA, 22 nt, Homo sapiens
caaacaccauugucacacucca

SEQ ID NO: 25002 - RNA, 27 nt, Homo sapiens
uuuagcacagugcuuauacaagaaggu

SEQ ID NO: 25003 - RNA, 23 nt, Homo sapiens
gggagugaagacacggagccaga

SEQ ID NO: 25004 - RNA, 22 nt, Homo sapiens
cagacuccgguggaaugaagga

SEQ ID NO: 25005 - RNA, 21 nt, Homo sapiens
ccuucugacuccaaguccagu

SEQ ID NO: 25006 - RNA, 22 nt, Homo sapiens
aggaaaccagcaaguguugacg

SEQ ID NO: 25007 - RNA, 19 nt, Homo sapiens
agaaaccccagcagagaca

SEQ ID NO: 25008 - RNA, 23 nt, Homo sapiens
gcacaugugcacacagccgggug

SEQ ID NO: 25009 - RNA, 18 nt, Homo sapiens
caccaccagagccaacgu

SEQ ID NO: 25010 - RNA, 23 nt, Homo sapiens
gggagugaagacacggagccaga

SEQ ID NO: 25011 - RNA, 21 nt, Homo sapiens
acuagacugugagcuccucga

SEQ ID NO: 25012 - RNA, 22 nt, Homo sapiens
ucaggaacugccuuucucucca

SEQ ID NO: 25013 - RNA, 21 nt, Homo sapiens
gaccaaucgccguccccgccg

SEQ ID NO: 25014 - RNA, 22 nt, Homo sapiens
cagaagugggccgggcacaggg

SEQ ID NO: 25015 - RNA, 22 nt, Homo sapiens
acaguucuucaacuggcagcuu

SEQ ID NO: 25016 - RNA, 19 nt, Homo sapiens
auuuugguacagcagcuca

SEQ ID NO: 25017 - RNA, 19 nt, Homo sapiens
guugggaucacaggcgccc

SEQ ID NO: 25018 - RNA, 22 nt, Homo sapiens
gcggucccgcggcgccccgccu

SEQ ID NO: 25019 - RNA, 23 nt, Homo sapiens
ccgcuugagcuaacuccgacccg

SEQ ID NO: 25020 - RNA, 20 nt, Homo sapiens
uacugcuuccacagcucccc

SEQ ID NO: 25021 - RNA, 22 nt, Homo sapiens
caaacaccauugucacacucca

SEQ ID NO: 25022 - RNA, 21 nt, Homo sapiens
ggucagaacccaucauucacu

SEQ ID NO: 25023 - RNA, 24 nt, Homo sapiens
ucacagguuaaagggucucaggga

SEQ ID NO: 25024 - RNA, 22 nt, Homo sapiens
ucacaaguuagggucucaggga

SEQ ID NO: 25025 - RNA, 23 nt, Homo sapiens
agcccuguucuacagcccugagg

SEQ ID NO: 25026 - RNA, 24 nt, Homo sapiens
acugcuggucuucagucagggcca

SEQ ID NO: 25027 - RNA, 22 nt, Homo sapiens
cacaucucacuguagccucaaa

SEQ ID NO: 25028 - RNA, 22 nt, Homo sapiens
ucaggaacugccuuucucucca

SEQ ID NO: 25029 - RNA, 22 nt, Homo sapiens
agcccaaaaggagaauucuuug

SEQ ID NO: 25030 - RNA, 21 nt, Homo sapiens
gaccaaucgccguccccgccg

SEQ ID NO: 25031 - RNA, 22 nt, Homo sapiens
gaauucaucacggccagccucu

SEQ ID NO: 25032 - RNA, 24 nt, Homo sapiens
acacucuaaagggaagcacuuugu

SEQ ID NO: 25033 - RNA, 22 nt, Homo sapiens
acucuaaagggaagcacuuugu

SEQ ID NO: 25034 - RNA, 22 nt, Homo sapiens
cuccuccaacaauccuagacca

SEQ ID NO: 25035 - RNA, 22 nt, Homo sapiens
guccaaaguuggggugcugguu

SEQ ID NO: 25036 - RNA, 22 nt, Homo sapiens
gcggucccgcggcgccccgccu

SEQ ID NO: 25037 - RNA, 22 nt, Homo sapiens
ugcuguuagcccuagccccgca

SEQ ID NO: 25038 - RNA, 22 nt, Homo sapiens
gaauucaucacggccagccucu

SEQ ID NO: 25039 - RNA, 19 nt, Homo sapiens
guccugaauuccgcagccu

SEQ ID NO: 25040 - RNA, 23 nt, Homo sapiens
acacagcucuuccauaucuccag

SEQ ID NO: 25041 - RNA, 17 nt, Homo sapiens
agaaagaagcaauauga

SEQ ID NO: 25042 - RNA, 22 nt, Homo sapiens
ucagccgcugucacacgcacag

SEQ ID NO: 25043 - RNA, 22 nt, Homo sapiens
cacucagcggccguuuccccaa

SEQ ID NO: 25044 - RNA, 22 nt, Homo sapiens
ucacaguugccagcugagauua

SEQ ID NO: 25045 - RNA, 23 nt, Homo sapiens
acauuuuucguuauugcucuuga

SEQ ID NO: 25046 - RNA, 22 nt, Homo sapiens
gcaaagguaauugcuguuuucg

SEQ ID NO: 25047 - RNA, 21 nt, Homo sapiens
cagguaccaauauuuuaucua

SEQ ID NO: 25048 - RNA, 23 nt, Homo sapiens
aaucgcgguuuauaccaaaugaa

SEQ ID NO: 25049 - RNA, 20 nt, Homo sapiens
auuucuauaucuaucuccau

SEQ ID NO: 25050 - RNA, 21 nt, Homo sapiens
cuggaggacggcaacagucag

SEQ ID NO: 25051 - RNA, 22 nt, Homo sapiens
cagaagugggccgggcacaggg

SEQ ID NO: 25052 - RNA, 22 nt, Homo sapiens
cacaaaccauuaugugcugcua

SEQ ID NO: 25053 - RNA, 22 nt, Homo sapiens
uguaaaccaugaugugcugcua

SEQ ID NO: 25054 - RNA, 22 nt, Homo sapiens
cgccaauauuuacgugcugcua

SEQ ID NO: 25055 - RNA, 21 nt, Homo sapiens
gccaauauuucugugcugcua

SEQ ID NO: 25056 - RNA, 22 nt, Homo sapiens
acugccugucugugccugcugu

SEQ ID NO: 25057 - RNA, 22 nt, Homo sapiens
uucaaaacaugaauugcugcug

SEQ ID NO: 25058 - RNA, 21 nt, Homo sapiens
acaaaccacagugugcugcug

SEQ ID NO: 25059 - RNA, 22 nt, Homo sapiens
gagcccuggacuaggagucagc

SEQ ID NO: 25060 - RNA, 21 nt, Homo sapiens
acuagacugugagcuccucga

SEQ ID NO: 25061 - RNA, 21 nt, Homo sapiens
gaccaaucgccguccccgccg

SEQ ID NO: 25062 - RNA, 22 nt, Homo sapiens
uggcagcagcggagggggcaga

SEQ ID NO: 25063 - RNA, 25 nt, Homo sapiens
agcuagucaagcgcgguuguggggg

SEQ ID NO: 25064 - RNA, 21 nt, Homo sapiens
acaggauugagggggggcccu

SEQ ID NO: 25065 - RNA, 20 nt, Homo sapiens
ccagcagcaccuggggcagu

SEQ ID NO: 25066 - RNA, 21 nt, Homo sapiens
auccuguacugagcugccccg

SEQ ID NO: 25067 - RNA, 19 nt, Homo sapiens
gccugcugacaccgugccu

SEQ ID NO: 25068 - RNA, 22 nt, Homo sapiens
uauccacuacaccccgcugccu

SEQ ID NO: 25069 - RNA, 21 nt, Homo sapiens
cuagggaagaacagugagcaa

SEQ ID NO: 25070 - RNA, 18 nt, Homo sapiens
cccccaccaccacgcccg

SEQ ID NO: 25071 - RNA, 17 nt, Homo sapiens
gggagaggaggaggcga

SEQ ID NO: 25072 - RNA, 21 nt, Homo sapiens
cggggugcacgggcggagggc

SEQ ID NO: 25073 - RNA, 23 nt, Homo sapiens
gggagugaagacacggagccaga

SEQ ID NO: 25074 - RNA, 23 nt, Homo sapiens
cugcagaacuguucccgcugcua

SEQ ID NO: 25075 - RNA, 23 nt, Homo sapiens
agaaaccaugggguaugagcaga

SEQ ID NO: 25076 - RNA, 22 nt, Homo sapiens
ugcucaauaaauacccguugaa

SEQ ID NO: 25077 - RNA, 22 nt, Homo sapiens
augcccuuucaucauugcacug

SEQ ID NO: 25078 - RNA, 23 nt, Homo sapiens
agggauuccugggaaaacuggac

SEQ ID NO: 25079 - RNA, 22 nt, Homo sapiens
agcccaaaaggagaauucuuug

SEQ ID NO: 25080 - RNA, 23 nt, Homo sapiens
cuaacugcacuagaugcaccuua

SEQ ID NO: 25081 - RNA, 22 nt, Homo sapiens
uuaacagcuaagcacccuaauc

SEQ ID NO: 25082 - RNA, 22 nt, Homo sapiens
auaaggauuuuuaggggcauua

SEQ ID NO: 25083 - RNA, 22 nt, Homo sapiens
gacaaaacccgcaaauacuuuu

SEQ ID NO: 25084 - RNA, 23 nt, Homo sapiens
uguaggcuggggauaaaugaaua

SEQ ID NO: 25085 - RNA, 22 nt, Homo sapiens
cacauggccaaaacagagaaga

SEQ ID NO: 25086 - RNA, 22 nt, Homo sapiens
caaacaccauugucacacucca

SEQ ID NO: 25087 - RNA, 21 nt, Homo sapiens
ccgugguucuacccuguggua

SEQ ID NO: 25088 - RNA, 21 nt, Homo sapiens
gaccaaucgccguccccgccg

SEQ ID NO: 25089 - RNA, 21 nt, Homo sapiens
cacucugaagggaagcgcuuu

SEQ ID NO: 25090 - RNA, 23 nt, Homo sapiens
acagcgcucgcaaccgcagcgau

SEQ ID NO: 25091 - RNA, 22 nt, Homo sapiens
gcggucccgcggcgccccgccu

SEQ ID NO: 25092 - RNA, 17 nt, Homo sapiens
uggaggccccagcgaga

SEQ ID NO: 25093 - RNA, 22 nt, Homo sapiens
ugcuguuagcccuagccccgca

SEQ ID NO: 25094 - RNA, 22 nt, Homo sapiens
uauccacuacaccccgcugccu

SEQ ID NO: 25095 - RNA, 24 nt, Homo sapiens
cacccccagagccucagcucccca

SEQ ID NO: 25096 - RNA, 21 nt, Homo sapiens
aucugcacugucagcacuuua

SEQ ID NO: 25097 - RNA, 21 nt, Homo sapiens
cggcucggguggcggcgacgg

SEQ ID NO: 25098 - RNA, 20 nt, Homo sapiens
cucaaagcaaacccugcaga

SEQ ID NO: 25099 - RNA, 20 nt, Homo sapiens
cucaaagcaaacccugcaga

SEQ ID NO: 25100 - RNA, 22 nt, Homo sapiens
cgcauuauuacucacgguacga

SEQ ID NO: 25101 - RNA, 22 nt, Homo sapiens
acucaguaugccaggguaccau

SEQ ID NO: 25102 - RNA, 24 nt, Homo sapiens
acugcuggucuucagucagggcca

SEQ ID NO: 25103 - RNA, 21 nt, Homo sapiens
gagcuacagugcuucaucuca

SEQ ID NO: 25104 - RNA, 22 nt, Homo sapiens
acaaaguucuguagugcacuga

SEQ ID NO: 25105 - RNA, 22 nt, Homo sapiens
acaaaguucugugaugcacuga

SEQ ID NO: 25106 - RNA, 21 nt, Homo sapiens
ccaaguucugucaugcacuga

SEQ ID NO: 25107 - RNA, 21 nt, Homo sapiens
gggcaucugggacgcgcagga

SEQ ID NO: 25108 - RNA, 22 nt, Homo sapiens
cggugagcacccggccccugcg

SEQ ID NO: 25109 - RNA, 20 nt, Homo sapiens
acagcaaggagggcaggagg

SEQ ID NO: 25110 - RNA, 23 nt, Homo sapiens
cggcucugucgucgaggcgcuca

SEQ ID NO: 25111 - RNA, 22 nt, Homo sapiens
aaucagucucauugcuuuauaa

SEQ ID NO: 25112 - RNA, 22 nt, Homo sapiens
uauccacuacaccccgcugccu

SEQ ID NO: 25113 - RNA, 22 nt, Homo sapiens
gggagaggucucccugcgcaca

SEQ ID NO: 25114 - RNA, 21 nt, Homo sapiens
cugaggagagaggaggugggg

SEQ ID NO: 25115 - RNA, 21 nt, Homo sapiens
cugaggagagaggaggugggg

SEQ ID NO: 25116 - RNA, 20 nt, Homo sapiens
cugcgggaggacagggcuca

SEQ ID NO: 25117 - RNA, 22 nt, Homo sapiens
cagaaagugcuucccucuagag

SEQ ID NO: 25118 - RNA, 22 nt, Homo sapiens
uccacauggaguugcuguuaca

SEQ ID NO: 25119 - RNA, 22 nt, Homo sapiens
uagucaagugaagcagugggag

SEQ ID NO: 25120 - RNA, 22 nt, Homo sapiens
auggcaguggaguuagugauug

SEQ ID NO: 25121 - RNA, 22 nt, Homo sapiens
gaccucagcuaugacagcacuu

SEQ ID NO: 25122 - RNA, 22 nt, Homo sapiens
ugcaagccuugggugugggagg

SEQ ID NO: 25123 - RNA, 22 nt, Homo sapiens
aguccagauucugugcccacca

SEQ ID NO: 25124 - RNA, 21 nt, Homo sapiens
agagcucauccauaguuguca

SEQ ID NO: 25125 - RNA, 22 nt, Homo sapiens
gcacauguucugcggcccacca

SEQ ID NO: 25126 - RNA, 21 nt, Homo sapiens
ugacugacagcuuuuugagua

SEQ ID NO: 25127 - RNA, 20 nt, Homo sapiens
uacugcuuccacagcucccc

SEQ ID NO: 25128 - RNA, 18 nt, Homo sapiens
auucaaucuacugccuca

SEQ ID NO: 25129 - RNA, 23 nt, Homo sapiens
accacaggagucugagcauuuga

SEQ ID NO: 25130 - RNA, 24 nt, Homo sapiens
ucacagguuaaagggucucaggga

SEQ ID NO: 25131 - RNA, 22 nt, Homo sapiens
ucacaaguuagggucucaggga

SEQ ID NO: 25132 - RNA, 23 nt, Homo sapiens
agcccuguucuacagcccugagg

SEQ ID NO: 25133 - RNA, 23 nt, Homo sapiens
gggagugaagacacggagccaga

SEQ ID NO: 25134 - RNA, 21 nt, Homo sapiens
uucuaggauaggcccaggggc

SEQ ID NO: 25135 - RNA, 22 nt, Homo sapiens
auaaggauuuuuaggggcauua

SEQ ID NO: 25136 - RNA, 22 nt, Homo sapiens
gccagcuaacaauacacugccu

SEQ ID NO: 25137 - RNA, 22 nt, Homo sapiens
gugauugccacucuccugagua

SEQ ID NO: 25138 - RNA, 22 nt, Homo sapiens
ccccccacugggccguacccac

SEQ ID NO: 25139 - RNA, 22 nt, Homo sapiens
augcccuuuuaacauugcacug

SEQ ID NO: 25140 - RNA, 22 nt, Homo sapiens
augcccuuucaucauugcacug

SEQ ID NO: 25141 - RNA, 23 nt, Homo sapiens
gggagugaagacacggagccaga

SEQ ID NO: 25142 - RNA, 22 nt, Homo sapiens
agcccaaaaggagaauucuuug

SEQ ID NO: 25143 - RNA, 22 nt, Homo sapiens
uggcagcagcggagggggcaga

SEQ ID NO: 25144 - RNA, 23 nt, Homo sapiens
gaacagguagucugaacacuggg

SEQ ID NO: 25145 - RNA, 23 nt, Homo sapiens
gaacagauagucuaaacacuggg

SEQ ID NO: 25146 - RNA, 23 nt, Homo sapiens
ucaguuuugcauagauuugcaca

SEQ ID NO: 25147 - RNA, 23 nt, Homo sapiens
ucaguuuugcauggauuugcaca

SEQ ID NO: 25148 - RNA, 23 nt, Homo sapiens
gcuuugacaauacuauugcacug

SEQ ID NO: 25149 - RNA, 23 nt, Homo sapiens
gcuuugacaauaucauugcacug

SEQ ID NO: 25150 - RNA, 22 nt, Homo sapiens
agcugaguguaggauguuuaca

SEQ ID NO: 25151 - RNA, 20 nt, Homo sapiens
ccagcagcaccuggggcagu

SEQ ID NO: 25152 - RNA, 23 nt, Homo sapiens
acgggugcgauuucugugugaga

SEQ ID NO: 25153 - RNA, 23 nt, Homo sapiens
aaagucucgcucucugccccuca

SEQ ID NO: 25154 - RNA, 22 nt, Homo sapiens
auauuaggaacacaucgcaaaa

SEQ ID NO: 25155 - RNA, 23 nt, Homo sapiens
acccuauaagcaauauugcacua

SEQ ID NO: 25156 - RNA, 21 nt, Homo sapiens
auccuguacugagcugccccg

SEQ ID NO: 25157 - RNA, 21 nt, Homo sapiens
acaaaccacagugugcugcug

SEQ ID NO: 25158 - RNA, 21 nt, Homo sapiens
uucacuccaaaaggugcaaaa

SEQ ID NO: 25159 - RNA, 20 nt, Homo sapiens
gaaagggcuucccuuugcag

SEQ ID NO: 25160 - RNA, 22 nt, Homo sapiens
acacucuaaaaggaugcacuuu

SEQ ID NO: 25161 - RNA, 22 nt, Homo sapiens
aaccucuaaaaggaugcacuuu

SEQ ID NO: 25162 - RNA, 22 nt, Homo sapiens
auccucuaaaaagaugcacuuu

SEQ ID NO: 25163 - RNA, 20 nt, Homo sapiens
gaaagggcuucccuuugcag

SEQ ID NO: 25164 - RNA, 22 nt, Homo sapiens
ugcaagccuugggugugggagg

SEQ ID NO: 25165 - RNA, 22 nt, Homo sapiens
gcaaaagaaacugugguuuuug

SEQ ID NO: 25166 - RNA, 21 nt, Homo sapiens
cugaaaccaaguaugggucgc

SEQ ID NO: 25167 - RNA, 23 nt, Homo sapiens
agacaaggcccacccgugcaaac

SEQ ID NO: 25168 - RNA, 23 nt, Homo sapiens
acacacucacacacacacacuca

SEQ ID NO: 25169 - RNA, 22 nt, Homo sapiens
gcaaaaguaauugcagugugug

SEQ ID NO: 25170 - RNA, 22 nt, Homo sapiens
ugaauuacuuuguaaaccacca

SEQ ID NO: 25171 - RNA, 22 nt, Homo sapiens
cacucuaaagggaggcacuuug

SEQ ID NO: 25172 - RNA, 23 nt, Homo sapiens
gggagugaagacacggagccaga

SEQ ID NO: 25173 - RNA, 18 nt, Homo sapiens
ggagaggagggcacugga

SEQ ID NO: 25174 - RNA, 20 nt, Homo sapiens
gcaaugcaacagcaaugcac

SEQ ID NO: 25175 - RNA, 22 nt, Homo sapiens
aacgcuccaaaagaaggcacuc

SEQ ID NO: 25176 - RNA, 22 nt, Homo sapiens
aacacucuaaaaggaggcacuu

SEQ ID NO: 25177 - RNA, 23 nt, Homo sapiens
gggcucuuacucccucaggcacu

SEQ ID NO: 25178 - RNA, 23 nt, Homo sapiens
ggaagccaucaagucgcugcagg

SEQ ID NO: 25179 - RNA, 23 nt, Homo sapiens
ggaagccaucaagucgcugcagg

SEQ ID NO: 25180 - RNA, 22 nt, Homo sapiens
ucaacaucagucugauaagcua

SEQ ID NO: 25181 - RNA, 21 nt, Homo sapiens
uucuaggauaggcccaggggc

SEQ ID NO: 25182 - RNA, 21 nt, Homo sapiens
auccuguacugagcugccccg

SEQ ID NO: 25183 - RNA, 23 nt, Homo sapiens
gggcucuuacucccucaggcacu

SEQ ID NO: 25184 - RNA, 22 nt, Homo sapiens
caagacacauuuggagagggac

SEQ ID NO: 25185 - RNA, 22 nt, Homo sapiens
caacuccgauaugcaaugggua

SEQ ID NO: 25186 - RNA, 18 nt, Homo sapiens
cccccaccaccacgcccg

SEQ ID NO: 25187 - RNA, 22 nt, Homo sapiens
ccaucuuuaccagacaguguua

SEQ ID NO: 25188 - RNA, 21 nt, Homo sapiens
gaccaaucgccguccccgccg

SEQ ID NO: 25189 - RNA, 22 nt, Homo sapiens
gcggucccgcggcgccccgccu

SEQ ID NO: 25190 - RNA, 22 nt, Homo sapiens
ucaguggcucagguucguugca

SEQ ID NO: 25191 - RNA, 18 nt, Homo sapiens
gaaaugagggccagcuga

SEQ ID NO: 25192 - RNA, 23 nt, Homo sapiens
gggagugaagacacggagccaga

SEQ ID NO: 25193 - RNA, 20 nt, Homo sapiens
cccgccgcgucgcccugggg

SEQ ID NO: 25194 - RNA, 23 nt, Homo sapiens
gaaacccagcagacaauguagcu

SEQ ID NO: 25195 - RNA, 23 nt, Homo sapiens
ucaacgggagugaucgugucauu

SEQ ID NO: 25196 - RNA, 22 nt, Homo sapiens
aguccagauucugugcccacca

SEQ ID NO: 25197 - RNA, 21 nt, Homo sapiens
guaaugggaccuuccucuuug

SEQ ID NO: 25198 - RNA, 22 nt, Homo sapiens
gcacauguucugcggcccacca

SEQ ID NO: 25199 - RNA, 25 nt, Homo sapiens
acggagcugucccaacaccaccccu

SEQ ID NO: 25200 - RNA, 21 nt, Homo sapiens
cugaggagagaggaggugggg

SEQ ID NO: 25201 - RNA, 22 nt, Homo sapiens
gugggguggguggucaggccga

SEQ ID NO: 25202 - RNA, 17 nt, Homo sapiens
gggagaggaggaggcga

SEQ ID NO: 25203 - RNA, 23 nt, Homo sapiens
gggagugaagacacggagccaga

SEQ ID NO: 25204 - RNA, 21 nt, Homo sapiens
gaccaaucgccguccccgccg

SEQ ID NO: 25205 - RNA, 22 nt, Homo sapiens
cuuccagucgaggauguuuaca

SEQ ID NO: 25206 - RNA, 22 nt, Homo sapiens
agcugaguguaggauguuuaca

SEQ ID NO: 25207 - RNA, 23 nt, Homo sapiens
gcugagaguguaggauguuuaca

SEQ ID NO: 25208 - RNA, 22 nt, Homo sapiens
cuuccagucggggauguuuaca

SEQ ID NO: 25209 - RNA, 22 nt, Homo sapiens
cuuccagucaaggauguuuaca

SEQ ID NO: 25210 - RNA, 18 nt, Homo sapiens
acccucugaaaggaagca

SEQ ID NO: 25211 - RNA, 22 nt, Homo sapiens
aaagugcuucuuaccuccagau

SEQ ID NO: 25212 - RNA, 24 nt, Homo sapiens
acugggcacaaacauguccagguc

SEQ ID NO: 25213 - RNA, 25 nt, Homo sapiens
aggccgccacccgcccgcgaucccu

SEQ ID NO: 25214 - RNA, 22 nt, Homo sapiens
gcggucccgcggcgccccgccu

SEQ ID NO: 25215 - RNA, 23 nt, Homo sapiens
cuccagccccuccagggcuuccu

SEQ ID NO: 25216 - RNA, 22 nt, Homo sapiens
ugcuguuagcccuagccccgca

SEQ ID NO: 25217 - RNA, 20 nt, Homo sapiens
uacugcuuccacagcucccc

SEQ ID NO: 25218 - RNA, 20 nt, Homo sapiens
uacugcuuccacagcucccc

SEQ ID NO: 25219 - RNA, 22 nt, Homo sapiens
uagucaagugaagcagugggag

SEQ ID NO: 25220 - RNA, 22 nt, Homo sapiens
ucgcccucucaacccagcuuuu

SEQ ID NO: 25221 - RNA, 22 nt, Homo sapiens
uugcccucucaacccagcuuuu

SEQ ID NO: 25222 - RNA, 20 nt, Homo sapiens
acccucucaacccagcuuuu

SEQ ID NO: 25223 - RNA, 19 nt, Homo sapiens
uccucucaacccagcuuuu

SEQ ID NO: 25224 - RNA, 22 nt, Homo sapiens
ucacgcgagccgaacgaacaaa

SEQ ID NO: 25225 - RNA, 22 nt, Homo sapiens
aagaagugcaccauguuuguuu

SEQ ID NO: 25226 - RNA, 23 nt, Homo sapiens
gaaaaacgcccccuggcuugaaa

SEQ ID NO: 25227 - RNA, 22 nt, Homo sapiens
aaagugcuucuuaccuccagau

SEQ ID NO: 25228 - RNA, 22 nt, Homo sapiens
aaagugcuucuuaccuccagau

SEQ ID NO: 25229 - RNA, 19 nt, Homo sapiens
aagacauuuucagacagcu

SEQ ID NO: 25230 - RNA, 21 nt, Homo sapiens
cuagggaagaacagugagcaa

SEQ ID NO: 25231 - RNA, 21 nt, Homo sapiens
aguagugcuuucuacuuuaug

SEQ ID NO: 25232 - RNA, 23 nt, Homo sapiens
accccuaucacgauuagcauuaa

SEQ ID NO: 25233 - RNA, 22 nt, Homo sapiens
cuuccagucgaggauguuuaca

SEQ ID NO: 25234 - RNA, 22 nt, Homo sapiens
agcugaguguaggauguuuaca

SEQ ID NO: 25235 - RNA, 23 nt, Homo sapiens
gcugagaguguaggauguuuaca

SEQ ID NO: 25236 - RNA, 22 nt, Homo sapiens
cuuccagucggggauguuuaca

SEQ ID NO: 25237 - RNA, 22 nt, Homo sapiens
cuuccagucaaggauguuuaca

SEQ ID NO: 25238 - RNA, 25 nt, Homo sapiens
aagaaagagucuugcuuugucgccc

SEQ ID NO: 25239 - RNA, 22 nt, Homo sapiens
ccagaacugaguccacagggca

SEQ ID NO: 25240 - RNA, 21 nt, Homo sapiens
gaccaaucgccguccccgccg

SEQ ID NO: 25241 - RNA, 21 nt, Homo sapiens
gaccaaucgccguccccgccg

SEQ ID NO: 25242 - RNA, 22 nt, Homo sapiens
ucagaccgagacaagugcaaug

SEQ ID NO: 25243 - RNA, 22 nt, Homo sapiens
aggaaaccagcaaguguugacg

SEQ ID NO: 25244 - RNA, 22 nt, Homo sapiens
gauccgagcaccggggaccccc

SEQ ID NO: 25245 - RNA, 22 nt, Homo sapiens
gcggucccgcggcgccccgccu

SEQ ID NO: 25246 - RNA, 22 nt, Homo sapiens
gcggucccgcggcgccccgccu

SEQ ID NO: 25247 - RNA, 22 nt, Homo sapiens
ugcuguuagcccuagccccgca

SEQ ID NO: 25248 - RNA, 22 nt, Homo sapiens
aaccauacaaccuacuaccuca

SEQ ID NO: 25249 - RNA, 23 nt, Homo sapiens
guaaauagagguuuaauuaacac

SEQ ID NO: 25250 - RNA, 18 nt, Homo sapiens
acccucugaaaggaagca

SEQ ID NO: 25251 - RNA, 22 nt, Homo sapiens
aaagugcuucuuaccuccagau

SEQ ID NO: 25252 - RNA, 21 nt, Homo sapiens
cugcugggccacaacguggga

SEQ ID NO: 25253 - RNA, 22 nt, Homo sapiens
ggaggccgggacgagugcaaua

SEQ ID NO: 25254 - RNA, 22 nt, Homo sapiens
ggagcccgcgccccgcgccgag

SEQ ID NO: 25255 - RNA, 20 nt, Homo sapiens
uucccaugcccuauaccucu

SEQ ID NO: 25256 - RNA, 23 nt, Homo sapiens
acgggugcgauuucugugugaga

SEQ ID NO: 25257 - RNA, 21 nt, Homo sapiens
ggucagaacccaucauucacu

SEQ ID NO: 25258 - RNA, 22 nt, Homo sapiens
augcccuuucaucauugcacug

SEQ ID NO: 25259 - RNA, 23 nt, Homo sapiens
agggauuccugggaaaacuggac

SEQ ID NO: 25260 - RNA, 23 nt, Homo sapiens
accccuaucacgauuagcauuaa

SEQ ID NO: 25261 - RNA, 23 nt, Homo sapiens
acucaccgacagcguugaauguu

SEQ ID NO: 25262 - RNA, 23 nt, Homo sapiens
acccaccgacagcaaugaauguu

SEQ ID NO: 25263 - RNA, 22 nt, Homo sapiens
acucaccgacagguugaauguu

SEQ ID NO: 25264 - RNA, 23 nt, Homo sapiens
acccaccgacaacaaugaauguu

SEQ ID NO: 25265 - RNA, 22 nt, Homo sapiens
acugccugucugugccugcugu

SEQ ID NO: 25266 - RNA, 22 nt, Homo sapiens
auggcaguggaguuagugauug

SEQ ID NO: 25267 - RNA, 22 nt, Homo sapiens
accagguuccaccccagcaggc

SEQ ID NO: 25268 - RNA, 21 nt, Homo sapiens
guaaugggaccuuccucuuug

SEQ ID NO: 25269 - RNA, 22 nt, Homo sapiens
ucggucccucgggccagggcag

SEQ ID NO: 25270 - RNA, 20 nt, Homo sapiens
cccugcgccaucuccucuac

SEQ ID NO: 25271 - RNA, 22 nt, Homo sapiens
auacauacuucuuuacauucca

SEQ ID NO: 25272 - RNA, 23 nt, Homo sapiens
accacaggagucugagcauuuga

SEQ ID NO: 25273 - RNA, 21 nt, Homo sapiens
cugaggagagaggaggugggg

SEQ ID NO: 25274 - RNA, 18 nt, Homo sapiens
ugguggcagaggugggau

SEQ ID NO: 25275 - RNA, 22 nt, Homo sapiens
gcacaaaucuccagaccaccca

SEQ ID NO: 25276 - RNA, 22 nt, Homo sapiens
augcccuuuuaacauugcacug

SEQ ID NO: 25277 - RNA, 22 nt, Homo sapiens
aacccauggaauucaguucuca

SEQ ID NO: 25278 - RNA, 22 nt, Homo sapiens
agccuauggaauucaguucuca

SEQ ID NO: 25279 - RNA, 23 nt, Homo sapiens
gggagugaagacacggagccaga

SEQ ID NO: 25280 - RNA, 22 nt, Homo sapiens
ccacacacuuccuuacauucca

SEQ ID NO: 25281 - RNA, 21 nt, Homo sapiens
aagugucagacacgguggugg

SEQ ID NO: 25282 - RNA, 21 nt, Homo sapiens
ggaaaucccuggcaaugugau

SEQ ID NO: 25283 - RNA, 21 nt, Homo sapiens
gguaaucccuggcaaugugau

SEQ ID NO: 25284 - RNA, 22 nt, Homo sapiens
cucaauagacugugagcuccuu

SEQ ID NO: 25285 - RNA, 22 nt, Homo sapiens
agccacaaucaccuucugaucu

SEQ ID NO: 25286 - RNA, 22 nt, Homo sapiens
agcugaguguaggauguuuaca

SEQ ID NO: 25287 - RNA, 22 nt, Homo sapiens
aucgggaggggacugagccuga

SEQ ID NO: 25288 - RNA, 21 nt, Homo sapiens
acaaaccacagugugcugcug

SEQ ID NO: 25289 - RNA, 20 nt, Homo sapiens
gaaagggcuucccuuugcag

SEQ ID NO: 25290 - RNA, 20 nt, Homo sapiens
gaaagggcuucccuuugcag

SEQ ID NO: 25291 - RNA, 22 nt, Homo sapiens
ugcaagccuugggugugggagg

SEQ ID NO: 25292 - RNA, 20 nt, Homo sapiens
ggcaaagaaggaacauuccu

SEQ ID NO: 25293 - RNA, 20 nt, Homo sapiens
aggggccucagccuccuggu

SEQ ID NO: 25294 - RNA, 23 nt, Homo sapiens
cccagcuagauuguaagcuccuu

SEQ ID NO: 25295 - RNA, 21 nt, Homo sapiens
caucaccuuccuucuccucca

SEQ ID NO: 25296 - RNA, 22 nt, Homo sapiens
ugaauuacuuuguaaaccacca

SEQ ID NO: 25297 - RNA, 22 nt, Homo sapiens
ucaggaacugccuuucucucca

SEQ ID NO: 25298 - RNA, 22 nt, Homo sapiens
cacgaccgacgccacgccgagu

SEQ ID NO: 25299 - RNA, 21 nt, Homo sapiens
gaccaaucgccguccccgccg

SEQ ID NO: 25300 - RNA, 22 nt, Homo sapiens
ucagaccgagacaagugcaaug

SEQ ID NO: 25301 - RNA, 21 nt, Homo sapiens
acaggauugagggggggcccu

SEQ ID NO: 25302 - RNA, 21 nt, Homo sapiens
acaggauugagggggggcccu

SEQ ID NO: 25303 - RNA, 22 nt, Homo sapiens
acaaaaguugccuuugugugau

SEQ ID NO: 25304 - RNA, 22 nt, Homo sapiens
gcggucccgcggcgccccgccu

SEQ ID NO: 25305 - RNA, 22 nt, Homo sapiens
ugcuguuagcccuagccccgca

SEQ ID NO: 25306 - RNA, 22 nt, Homo sapiens
cacaagaucggaucuacggguu

SEQ ID NO: 25307 - RNA, 22 nt, Homo sapiens
cgcaaggucgguucuacgggug

SEQ ID NO: 25308 - RNA, 22 nt, Homo sapiens
gugggguggguggucaggccga

SEQ ID NO: 25309 - RNA, 17 nt, Homo sapiens
gacagccucucccccac

SEQ ID NO: 25310 - RNA, 25 nt, Homo sapiens
cagcgucugccggaacccguuccca

SEQ ID NO: 25311 - RNA, 22 nt, Homo sapiens
ggagcccgcgccccgcgccgag

SEQ ID NO: 25312 - RNA, 23 nt, Homo sapiens
gggagugaagacacggagccaga

SEQ ID NO: 25313 - RNA, 21 nt, Homo sapiens
gggcaucugggacgcgcagga

SEQ ID NO: 25314 - RNA, 21 nt, Homo sapiens
gaccaaucgccguccccgccg

SEQ ID NO: 25315 - RNA, 22 nt, Homo sapiens
ucagaccgagacaagugcaaug

SEQ ID NO: 25316 - RNA, 23 nt, Homo sapiens
aaaucagaaucacaccuggggga

SEQ ID NO: 25317 - RNA, 23 nt, Homo sapiens
aaagucucgcucucugccccuca

SEQ ID NO: 25318 - RNA, 19 nt, Homo sapiens
auuuugguacagcagcuca

SEQ ID NO: 25319 - RNA, 19 nt, Homo sapiens
gccugcugacaccgugccu

SEQ ID NO: 25320 - RNA, 24 nt, Homo sapiens
acgcagagcccgaaagcccccagu

SEQ ID NO: 25321 - RNA, 24 nt, Homo sapiens
acgcgcaggccagagacccaggca

SEQ ID NO: 25322 - RNA, 22 nt, Homo sapiens
gcggucccgcggcgccccgccu

SEQ ID NO: 25323 - RNA, 23 nt, Homo sapiens
ccgcuugagcuaacuccgacccg

SEQ ID NO: 25324 - RNA, 20 nt, Homo sapiens
uacugcuuccacagcucccc

SEQ ID NO: 25325 - RNA, 25 nt, Homo sapiens
aggccgccacccgcccgcgaucccu

SEQ ID NO: 25326 - RNA, 23 nt, Homo sapiens
gucacaucccucccaagacccuc

SEQ ID NO: 25327 - RNA, 21 nt, Homo sapiens
cucccccacugcagcuggcac

SEQ ID NO: 25328 - RNA, 18 nt, Homo sapiens
cagcagccuccuucucaa

SEQ ID NO: 25329 - RNA, 22 nt, Homo sapiens
ccaucuuuaccagacaguguua

SEQ ID NO: 25330 - RNA, 22 nt, Homo sapiens
acaucguuaccagacaguguua

SEQ ID NO: 25331 - RNA, 20 nt, Homo sapiens
aggggccucagccuccuggu

SEQ ID NO: 25332 - RNA, 22 nt, Homo sapiens
cugggggcggcacaggggcuca

SEQ ID NO: 25333 - RNA, 22 nt, Homo sapiens
augcccuuucaucauugcacug

SEQ ID NO: 25334 - RNA, 18 nt, Homo sapiens
aucacauucaccucccug

SEQ ID NO: 25335 - RNA, 22 nt, Homo sapiens
ccucauggaaggguuccccacu

SEQ ID NO: 25336 - RNA, 21 nt, Homo sapiens
guaaugggaccuuccucuuug

SEQ ID NO: 25337 - RNA, 21 nt, Homo sapiens
agacacaccacggcacacuuc

SEQ ID NO: 25338 - RNA, 20 nt, Homo sapiens
uacugcuuccacagcucccc

SEQ ID NO: 25339 - RNA, 22 nt, Homo sapiens
uaaaugaauucaauuuccuucu

SEQ ID NO: 25340 - RNA, 21 nt, Homo sapiens
ggcugucaauucauaggucag

SEQ ID NO: 25341 - RNA, 21 nt, Homo sapiens
gucugucaauucauaggucau

SEQ ID NO: 25342 - RNA, 22 nt, Homo sapiens
gagcccuggacuaggagucagc

SEQ ID NO: 25343 - RNA, 21 nt, Homo sapiens
guaaugggaccuuccucuuug

SEQ ID NO: 25344 - RNA, 21 nt, Homo sapiens
cggcucggguggcggcgacgg

SEQ ID NO: 25345 - RNA, 18 nt, Homo sapiens
cccccaccaccacgcccg

SEQ ID NO: 25346 - RNA, 17 nt, Homo sapiens
gggagaggaggaggcga

SEQ ID NO: 25347 - RNA, 23 nt, Homo sapiens
uccauaaaguaggaaacacuaca

SEQ ID NO: 25348 - RNA, 20 nt, Homo sapiens
gcagaagcauuuccacacac

SEQ ID NO: 25349 - RNA, 20 nt, Homo sapiens
acagcaaggagggcaggagg

SEQ ID NO: 25350 - RNA, 23 nt, Homo sapiens
cuaccugcacuaugagcacuuug

SEQ ID NO: 25351 - RNA, 18 nt, Homo sapiens
acccucugaaaggaagca

SEQ ID NO: 25352 - RNA, 22 nt, Homo sapiens
aaagugcuucuuaccuccagau

SEQ ID NO: 25353 - RNA, 23 nt, Homo sapiens
acccucuauagggaagcgcguuc

SEQ ID NO: 25354 - RNA, 21 nt, Homo sapiens
cccgaggagccgggcaggcuu

SEQ ID NO: 25355 - RNA, 22 nt, Homo sapiens
gcaaaaguaauugcagugugug

SEQ ID NO: 25356 - RNA, 21 nt, Homo sapiens
ggggagcgggggcccugccuu

SEQ ID NO: 25357 - RNA, 23 nt, Homo sapiens
uguaggcuggggauaaaugaaua

SEQ ID NO: 25358 - RNA, 21 nt, Homo sapiens
gaaggaagugagugcagccac

SEQ ID NO: 25359 - RNA, 23 nt, Homo sapiens
aggaacagcagcagcccgggccg

SEQ ID NO: 25360 - RNA, 23 nt, Homo sapiens
aggaacagcagcagcccgggccg

SEQ ID NO: 25361 - RNA, 21 nt, Homo sapiens
acaggauugagggggggcccu

SEQ ID NO: 25362 - RNA, 22 nt, Homo sapiens
aggaaaccagcaaguguugacg

SEQ ID NO: 25363 - RNA, 20 nt, Homo sapiens
aggggccucagccuccuggu

SEQ ID NO: 25364 - RNA, 22 nt, Homo sapiens
ugcuguuagcccuagccccgca

SEQ ID NO: 25365 - RNA, 22 nt, Homo sapiens
ucggucccucgggccagggcag

SEQ ID NO: 25366 - RNA, 22 nt, Homo sapiens
cuagggaacacagggcugguga

SEQ ID NO: 25367 - RNA, 22 nt, Homo sapiens
ugaagaagggggggaagggcgu

SEQ ID NO: 25368 - RNA, 22 nt, Homo sapiens
ugaagaagggggggaagggcgu

SEQ ID NO: 25369 - RNA, 23 nt, Homo sapiens
cggccugauucacaacaccagcu

SEQ ID NO: 25370 - RNA, 21 nt, Homo sapiens
gaccaaucgccguccccgccg

SEQ ID NO: 25371 - RNA, 20 nt, Homo sapiens
acauuacuguuaucaaaaca

SEQ ID NO: 25372 - RNA, 20 nt, Homo sapiens
cuggaggaagggcccagagg

SEQ ID NO: 25373 - RNA, 22 nt, Homo sapiens
gccuaagacacaggcccagaga

SEQ ID NO: 25374 - RNA, 21 nt, Homo sapiens
uucuaggauaggcccaggggc

SEQ ID NO: 25375 - RNA, 22 nt, Homo sapiens
aucgggaggggacugagccuga

SEQ ID NO: 25376 - RNA, 22 nt, Homo sapiens
gcggucccgcggcgccccgccu

SEQ ID NO: 25377 - RNA, 20 nt, Homo sapiens
uccccacagacccagagccg

SEQ ID NO: 25378 - RNA, 20 nt, Homo sapiens
uacugcuuccacagcucccc

SEQ ID NO: 25379 - RNA, 24 nt, Homo sapiens
acugggcacaaacauguccagguc

SEQ ID NO: 25380 - RNA, 21 nt, Homo sapiens
ccccucccagccucccugcca

SEQ ID NO: 25381 - RNA, 22 nt, Homo sapiens
ccaguagcacggcucaguccag

SEQ ID NO: 25382 - RNA, 22 nt, Homo sapiens
gaaccuaucuccccucuggacc

SEQ ID NO: 25383 - RNA, 22 nt, Homo sapiens
cucaauagacugugagcuccuu

SEQ ID NO: 25384 - RNA, 21 nt, Homo sapiens
ccuucugacuccaaguccagu

SEQ ID NO: 25385 - RNA, 22 nt, Homo sapiens
gccuucugacccuaaguccagu

SEQ ID NO: 25386 - RNA, 21 nt, Homo sapiens
guguauaugcccauggacugc

SEQ ID NO: 25387 - RNA, 20 nt, Homo sapiens
acccaccuggagauccaugg

SEQ ID NO: 25388 - RNA, 18 nt, Homo sapiens
augacaccucccugugaa

SEQ ID NO: 25389 - RNA, 23 nt, Homo sapiens
acacucuaaagagaagcgcuuug

SEQ ID NO: 25390 - RNA, 21 nt, Homo sapiens
agaaaguacuucccucuggag

SEQ ID NO: 25391 - RNA, 21 nt, Homo sapiens
agaaagugcaucccucuggag

SEQ ID NO: 25392 - RNA, 22 nt, Homo sapiens
gcaaagguaauugcuguuuucg

SEQ ID NO: 25393 - RNA, 21 nt, Homo sapiens
gaaggaagugagugcagccac

SEQ ID NO: 25394 - RNA, 23 nt, Homo sapiens
cccagcuagauuguaagcuccuu

SEQ ID NO: 25395 - RNA, 21 nt, Homo sapiens
ggggagcgggggcccugccuu

SEQ ID NO: 25396 - RNA, 22 nt, Homo sapiens
gcacaaaucuccagaccaccca

SEQ ID NO: 25397 - RNA, 18 nt, Homo sapiens
aucacauucaccucccug

SEQ ID NO: 25398 - RNA, 22 nt, Homo sapiens
ucaggaacugccuuucucucca

SEQ ID NO: 25399 - RNA, 23 nt, Homo sapiens
cuaucugcacuagaugcaccuua

SEQ ID NO: 25400 - RNA, 22 nt, Homo sapiens
cagaagugggccgggcacaggg

SEQ ID NO: 25401 - RNA, 20 nt, Homo sapiens
cccgccgcgucgcccugggg

SEQ ID NO: 25402 - RNA, 23 nt, Homo sapiens
gaacagguagucugaacacuggg

SEQ ID NO: 25403 - RNA, 23 nt, Homo sapiens
gaacagauagucuaaacacuggg

SEQ ID NO: 25404 - RNA, 21 nt, Homo sapiens
uucuaggauaggcccaggggc

SEQ ID NO: 25405 - RNA, 22 nt, Homo sapiens
uacagauggauaccgugcaauu

SEQ ID NO: 25406 - RNA, 22 nt, Homo sapiens
gaauucaucacggccagccucu

SEQ ID NO: 25407 - RNA, 22 nt, Homo sapiens
ccucauggaaggguuccccacu

SEQ ID NO: 25408 - RNA, 19 nt, Homo sapiens
gcuccuguccaacuggcuc

SEQ ID NO: 25409 - RNA, 25 nt, Homo sapiens
acggagcugucccaacaccaccccu

SEQ ID NO: 25410 - RNA, 22 nt, Homo sapiens
caagacacauuuggagagggac

SEQ ID NO: 25411 - RNA, 24 nt, Homo sapiens
acgcgcaggccagagacccaggca

SEQ ID NO: 25412 - RNA, 23 nt, Homo sapiens
cuccagccccuccagggcuuccu

SEQ ID NO: 25413 - RNA, 21 nt, Homo sapiens
caucaccuuccuucuccucca

SEQ ID NO: 25414 - RNA, 22 nt, Homo sapiens
ucggucccucgggccagggcag

SEQ ID NO: 25415 - RNA, 22 nt, Homo sapiens
ucuacccagaaaggagccagug

SEQ ID NO: 25416 - RNA, 20 nt, Homo sapiens
uacugcuuccacagcucccc

SEQ ID NO: 25417 - RNA, 21 nt, Homo sapiens
ggggagcgggggcccugccuu

SEQ ID NO: 25418 - RNA, 22 nt, Homo sapiens
aacuauacaaccuacuaccuca

SEQ ID NO: 25419 - RNA, 22 nt, Homo sapiens
aaccacacaaccuacuaccuca

SEQ ID NO: 25420 - RNA, 19 nt, Homo sapiens
agaaaccccagcagagaca

SEQ ID NO: 25421 - RNA, 21 nt, Homo sapiens
aaaagcuaagucaucauauau

SEQ ID NO: 25422 - RNA, 18 nt, Homo sapiens
aucacauucaccucccug

SEQ ID NO: 25423 - RNA, 21 nt, Homo sapiens
ccgugguucuacccuguggua

SEQ ID NO: 25424 - RNA, 23 nt, Homo sapiens
gggagugaagacacggagccaga

SEQ ID NO: 25425 - RNA, 22 nt, Homo sapiens
ucaacaucagucugauaagcua

SEQ ID NO: 25426 - RNA, 22 nt, Homo sapiens
ggagagccuccacccaacccuc

SEQ ID NO: 25427 - RNA, 21 nt, Homo sapiens
caugcacaugcacacauacau

SEQ ID NO: 25428 - RNA, 24 nt, Homo sapiens
ugggagaaccucccugcuucugcu

SEQ ID NO: 25429 - RNA, 22 nt, Homo sapiens
gaacuugcuaaaaaugcagaau

SEQ ID NO: 25430 - RNA, 20 nt, Homo sapiens
guguguauacauuuauacau

SEQ ID NO: 25431 - RNA, 23 nt, Homo sapiens
acacacucacacacacacacuca

SEQ ID NO: 25432 - RNA, 22 nt, Homo sapiens
acaguggucaucgagugacaca

SEQ ID NO: 25433 - RNA, 22 nt, Homo sapiens
gcaaaaguaauugcagugugug

SEQ ID NO: 25434 - RNA, 22 nt, Homo sapiens
caagacacauuuggagagggac

SEQ ID NO: 25435 - RNA, 22 nt, Homo sapiens
cugggggcggcacaggggcuca

SEQ ID NO: 25436 - RNA, 17 nt, Homo sapiens
gacagccucucccccac

SEQ ID NO: 25437 - RNA, 21 nt, Homo sapiens
gaccaaucgccguccccgccg

SEQ ID NO: 25438 - RNA, 20 nt, Homo sapiens
cccgccgcgucgcccugggg

SEQ ID NO: 25439 - RNA, 23 nt, Homo sapiens
cagcugcuuuugggauuccguug

SEQ ID NO: 25440 - RNA, 23 nt, Homo sapiens
aaaucagaaucacaccuggggga

SEQ ID NO: 25441 - RNA, 22 nt, Homo sapiens
aguccagauucugugcccacca

SEQ ID NO: 25442 - RNA, 25 nt, Homo sapiens
acggagcugucccaacaccaccccu

SEQ ID NO: 25443 - RNA, 24 nt, Homo sapiens
acgcagagcccgaaagcccccagu

SEQ ID NO: 25444 - RNA, 22 nt, Homo sapiens
gcacauguucugcggcccacca

SEQ ID NO: 25445 - RNA, 22 nt, Homo sapiens
gcggucccgcggcgccccgccu

SEQ ID NO: 25446 - RNA, 22 nt, Homo sapiens
ugcuguuagcccuagccccgca

SEQ ID NO: 25447 - RNA, 24 nt, Homo sapiens
cacccccagagccucagcucccca

SEQ ID NO: 25448 - RNA, 22 nt, Homo sapiens
cuagggaacacagggcugguga

SEQ ID NO: 25449 - RNA, 23 nt, Homo sapiens
cggccugauucacaacaccagcu

SEQ ID NO: 25450 - RNA, 22 nt, Homo sapiens
ucagaccgagacaagugcaaug

SEQ ID NO: 25451 - RNA, 23 nt, Homo sapiens
acauuuuucguuauugcucuuga

SEQ ID NO: 25452 - RNA, 23 nt, Homo sapiens
cggcucugucgucgaggcgcuca

SEQ ID NO: 25453 - RNA, 22 nt, Homo sapiens
aucgggaggggacugagccuga

SEQ ID NO: 25454 - RNA, 23 nt, Homo sapiens
gcacaugugcacacagccgggug

SEQ ID NO: 25455 - RNA, 22 nt, Homo sapiens
uacaucuggacagccgaaugaa

SEQ ID NO: 25456 - RNA, 23 nt, Homo sapiens
accccuaucacgauuagcauuaa

SEQ ID NO: 25457 - RNA, 22 nt, Homo sapiens
acugggacuuuguaggccaguu

SEQ ID NO: 25458 - RNA, 22 nt, Homo sapiens
agcgggacuuugagggccaguu

SEQ ID NO: 25459 - RNA, 23 nt, Homo sapiens
cugugggagggcaguggugagag

SEQ ID NO: 25460 - RNA, 22 nt, Homo sapiens
ggagauggagccagggcccuaa

SEQ ID NO: 25461 - RNA, 22 nt, Homo sapiens
cacgaccgacgccacgccgagu

SEQ ID NO: 25462 - RNA, 18 nt, Homo sapiens
aucacauucaccucccug

SEQ ID NO: 25463 - RNA, 23 nt, Homo sapiens
gggagugaagacacggagccaga

SEQ ID NO: 25464 - RNA, 23 nt, Homo sapiens
aaagucucgcucucugccccuca

SEQ ID NO: 25465 - RNA, 19 nt, Homo sapiens
gccucagaggcagcugcuu

SEQ ID NO: 25466 - RNA, 24 nt, Homo sapiens
acgcgcaggccagagacccaggca

SEQ ID NO: 25467 - RNA, 22 nt, Homo sapiens
ugcuguuagcccuagccccgca

SEQ ID NO: 25468 - RNA, 20 nt, Homo sapiens
uacugcuuccacagcucccc

SEQ ID NO: 25469 - RNA, 22 nt, Homo sapiens
gggagaggucucccugcgcaca

SEQ ID NO: 25470 - RNA, 22 nt, Homo sapiens
cacaagaucggaucuacggguu

SEQ ID NO: 25471 - RNA, 22 nt, Homo sapiens
cgcaaggucgguucuacgggug

SEQ ID NO: 25472 - RNA, 20 nt, Homo sapiens
cucaaagcaaacccugcaga

SEQ ID NO: 25473 - RNA, 17 nt, Homo sapiens
gggagaggaggaggcga

SEQ ID NO: 25474 - RNA, 22 nt, Homo sapiens
gcacaaaucuccagaccaccca

SEQ ID NO: 25475 - RNA, 18 nt, Homo sapiens
aucacauucaccucccug

SEQ ID NO: 25476 - RNA, 21 nt, Homo sapiens
gaccaaucgccguccccgccg

SEQ ID NO: 25477 - RNA, 22 nt, Homo sapiens
gcgaacgcgccacggaccaccu

SEQ ID NO: 25478 - RNA, 23 nt, Homo sapiens
cggcucugucgucgaggcgcuca

SEQ ID NO: 25479 - RNA, 20 nt, Homo sapiens
ugggccaccgccgagcggac

SEQ ID NO: 25480 - RNA, 25 nt, Homo sapiens
accaacggaccuacuucccuccgcc

SEQ ID NO: 25481 - RNA, 22 nt, Homo sapiens
gcggucccgcggcgccccgccu

SEQ ID NO: 25482 - RNA, 22 nt, Homo sapiens
ugcuguuagcccuagccccgca

SEQ ID NO: 25483 - RNA, 21 nt, Homo sapiens
caucaccuuccuucuccucca

SEQ ID NO: 25484 - RNA, 21 nt, Homo sapiens
aagggucaguaagcacccgcg

SEQ ID NO: 25485 - RNA, 22 nt, Homo sapiens
ggcagagagucagagcgcggau

SEQ ID NO: 25486 - RNA, 23 nt, Homo sapiens
gcacaugugcacacagccgggug

SEQ ID NO: 25487 - RNA, 20 nt, Homo sapiens
ugucuccacagggcucuuua

SEQ ID NO: 25488 - RNA, 22 nt, Homo sapiens
augcccuuucaucauugcacug

SEQ ID NO: 25489 - RNA, 23 nt, Homo sapiens
gggagugaagacacggagccaga

SEQ ID NO: 25490 - RNA, 22 nt, Homo sapiens
cacaaaccauuaugugcugcua

SEQ ID NO: 25491 - RNA, 22 nt, Homo sapiens
uguaaaccaugaugugcugcua

SEQ ID NO: 25492 - RNA, 22 nt, Homo sapiens
cgccaauauuuacgugcugcua

SEQ ID NO: 25493 - RNA, 23 nt, Homo sapiens
cccaacagacauggcgguacuca

SEQ ID NO: 25494 - RNA, 21 nt, Homo sapiens
gccaauauuucugugcugcua

SEQ ID NO: 25495 - RNA, 22 nt, Homo sapiens
cuguuccugcugaacugagcca

SEQ ID NO: 25496 - RNA, 22 nt, Homo sapiens
cucaauagacugugagcuccuu

SEQ ID NO: 25497 - RNA, 22 nt, Homo sapiens
uucaaaacaugaauugcugcug

SEQ ID NO: 25498 - RNA, 22 nt, Homo sapiens
gaauucaucacggccagccucu

SEQ ID NO: 25499 - RNA, 21 nt, Homo sapiens
acaaaccacagugugcugcug

SEQ ID NO: 25500 - RNA, 23 nt, Homo sapiens
cugcagaacuguucccgcugcua

SEQ ID NO: 25501 - RNA, 23 nt, Homo sapiens
gucagaccccgagggguccucgc

SEQ ID NO: 25502 - RNA, 20 nt, Homo sapiens
aggggccucagccuccuggu

SEQ ID NO: 25503 - RNA, 23 nt, Homo sapiens
cccagcuagauuguaagcuccuu

SEQ ID NO: 25504 - RNA, 21 nt, Homo sapiens
caucaccuuccuucuccucca

SEQ ID NO: 25505 - RNA, 22 nt, Homo sapiens
gcugaggcuguggggcuggagu

SEQ ID NO: 25506 - RNA, 22 nt, Homo sapiens
gggagaggucucccugcgcaca

SEQ ID NO: 25507 - RNA, 21 nt, Homo sapiens
ucuccagaucagggcagucca

SEQ ID NO: 25508 - RNA, 21 nt, Homo sapiens
gaccaaucgccguccccgccg

SEQ ID NO: 25509 - RNA, 22 nt, Homo sapiens
gaauucaucacggccagccucu

SEQ ID NO: 25510 - RNA, 22 nt, Homo sapiens
gauagagugcagaccagggucu

SEQ ID NO: 25511 - RNA, 20 nt, Homo sapiens
ugggccaccgccgagcggac

SEQ ID NO: 25512 - RNA, 22 nt, Homo sapiens
aagagggagacccaggcucgga

SEQ ID NO: 25513 - RNA, 22 nt, Homo sapiens
gcggucccgcggcgccccgccu

SEQ ID NO: 25514 - RNA, 22 nt, Homo sapiens
ugcuguuagcccuagccccgca

SEQ ID NO: 25515 - RNA, 20 nt, Homo sapiens
gcagcuguccgcccagacac

SEQ ID NO: 25516 - RNA, 22 nt, Homo sapiens
cgcauuauuacucacgguacga

SEQ ID NO: 25517 - RNA, 23 nt, Homo sapiens
agggauuccugggaaaacuggac

SEQ ID NO: 25518 - RNA, 21 nt, Homo sapiens
caugcacaugcacacauacau

SEQ ID NO: 25519 - RNA, 22 nt, Homo sapiens
ccucuaguaaauaugucagcau

SEQ ID NO: 25520 - RNA, 22 nt, Homo sapiens
cucauccgauguacaauaauuu

SEQ ID NO: 25521 - RNA, 22 nt, Homo sapiens
cugggggcggcacaggggcuca

SEQ ID NO: 25522 - RNA, 17 nt, Homo sapiens
gacagccucucccccac

SEQ ID NO: 25523 - RNA, 22 nt, Homo sapiens
cacgaccgacgccacgccgagu

SEQ ID NO: 25524 - RNA, 18 nt, Homo sapiens
aucacauucaccucccug

SEQ ID NO: 25525 - RNA, 22 nt, Homo sapiens
ggagcccgcgccccgcgccgag

SEQ ID NO: 25526 - RNA, 23 nt, Homo sapiens
gggagugaagacacggagccaga

SEQ ID NO: 25527 - RNA, 23 nt, Homo sapiens
cuaucugcacuagaugcaccuua

SEQ ID NO: 25528 - RNA, 21 nt, Homo sapiens
gaccaaucgccguccccgccg

SEQ ID NO: 25529 - RNA, 22 nt, Homo sapiens
acaguucuucaacuggcagcuu

SEQ ID NO: 25530 - RNA, 22 nt, Homo sapiens
aucgggaggggacugagccuga

SEQ ID NO: 25531 - RNA, 21 nt, Homo sapiens
cccgaggagccgggcaggcuu

SEQ ID NO: 25532 - RNA, 25 nt, Homo sapiens
acggagcugucccaacaccaccccu

SEQ ID NO: 25533 - RNA, 22 nt, Homo sapiens
caagacacauuuggagagggac

SEQ ID NO: 25534 - RNA, 22 nt, Homo sapiens
gcggucccgcggcgccccgccu

SEQ ID NO: 25535 - RNA, 22 nt, Homo sapiens
ugcuguuagcccuagccccgca

SEQ ID NO: 25536 - RNA, 21 nt, Homo sapiens
caucaccuuccuucuccucca

SEQ ID NO: 25537 - RNA, 22 nt, Homo sapiens
gcugaggcuguggggcuggagu

SEQ ID NO: 25538 - RNA, 20 nt, Homo sapiens
uacugcuuccacagcucccc

SEQ ID NO: 25539 - RNA, 21 nt, Homo sapiens
agagcucauccauaguuguca

SEQ ID NO: 25540 - RNA, 22 nt, Homo sapiens
uaaaugaauucaauuuccuucu

SEQ ID NO: 25541 - RNA, 18 nt, Homo sapiens
aucacauucaccucccug

SEQ ID NO: 25542 - RNA, 21 nt, Homo sapiens
gggcaucugggacgcgcagga

SEQ ID NO: 25543 - RNA, 22 nt, Homo sapiens
cccaacaacaggaaacuaccua

SEQ ID NO: 25544 - RNA, 22 nt, Homo sapiens
ugggguauuugacaaacugaca

SEQ ID NO: 25545 - RNA, 21 nt, Homo sapiens
gagcuacagugcuucaucuca

SEQ ID NO: 25546 - RNA, 21 nt, Homo sapiens
cguacgcuauacggucuacua

SEQ ID NO: 25547 - RNA, 22 nt, Homo sapiens
gagcccuggacuaggagucagc

SEQ ID NO: 25548 - RNA, 21 nt, Homo sapiens
ccuucugacuccaaguccagu

SEQ ID NO: 25549 - RNA, 22 nt, Homo sapiens
gggagaggucucccugcgcaca

SEQ ID NO: 25550 - RNA, 21 nt, Homo sapiens
aagugucagacacgguggugg

SEQ ID NO: 25551 - RNA, 22 nt, Homo sapiens
augcccuuucaucauugcacug

SEQ ID NO: 25552 - RNA, 21 nt, Homo sapiens
guaaugggaccuuccucuuug

SEQ ID NO: 25553 - RNA, 22 nt, Homo sapiens
aacuauacaaccuacuaccuca

SEQ ID NO: 25554 - RNA, 22 nt, Homo sapiens
aaccacacaaccuacuaccuca

SEQ ID NO: 25555 - RNA, 22 nt, Homo sapiens
aaccauacaaccuacuaccuca

SEQ ID NO: 25556 - RNA, 22 nt, Homo sapiens
aacuaugcaaccuacuaccucu

SEQ ID NO: 25557 - RNA, 22 nt, Homo sapiens
aacuauacaaccuccuaccuca

SEQ ID NO: 25558 - RNA, 22 nt, Homo sapiens
aacuauacaaucuacuaccuca

SEQ ID NO: 25559 - RNA, 22 nt, Homo sapiens
aacuguacaaacuacuaccuca

SEQ ID NO: 25560 - RNA, 22 nt, Homo sapiens
aacagcacaaacuacuaccuca

SEQ ID NO: 25561 - RNA, 22 nt, Homo sapiens
aacagcacaaacuacuaccuca

SEQ ID NO: 25562 - RNA, 21 nt, Homo sapiens
cugaggagagaggaggugggg

SEQ ID NO: 25563 - RNA, 22 nt, Homo sapiens
cgcauuauuacucacgguacga

SEQ ID NO: 25564 - RNA, 18 nt, Homo sapiens
ugguggcagaggugggau

SEQ ID NO: 25565 - RNA, 17 nt, Homo sapiens
gggagaggaggaggcga

SEQ ID NO: 25566 - RNA, 21 nt, Homo sapiens
agggcucaucuugguccugca

SEQ ID NO: 25567 - RNA, 22 nt, Homo sapiens
ucucucccauuagaguugaaaa

SEQ ID NO: 25568 - RNA, 23 nt, Homo sapiens
gggagugaagacacggagccaga

SEQ ID NO: 25569 - RNA, 21 nt, Homo sapiens
gggcaucugggacgcgcagga

SEQ ID NO: 25570 - RNA, 22 nt, Homo sapiens
agcugaguguaggauguuuaca

SEQ ID NO: 25571 - RNA, 21 nt, Homo sapiens
aagacgggaggagaggaguga

SEQ ID NO: 25572 - RNA, 21 nt, Homo sapiens
cacucugaagggaagcgcuuu

SEQ ID NO: 25573 - RNA, 22 nt, Homo sapiens
ugcaagccuugggugugggagg

SEQ ID NO: 25574 - RNA, 25 nt, Homo sapiens
acggagcugucccaacaccaccccu

SEQ ID NO: 25575 - RNA, 22 nt, Homo sapiens
ggcagagagucagagcgcggau

SEQ ID NO: 25576 - RNA, 22 nt, Homo sapiens
aacaauacaacuuacuaccuca

SEQ ID NO: 25577 - RNA, 22 nt, Homo sapiens
agcgggacuuugagggccaguu

SEQ ID NO: 25578 - RNA, 22 nt, Homo sapiens
ugggguauuugacaaacugaca

SEQ ID NO: 25579 - RNA, 22 nt, Homo sapiens
ucgcccucucaacccagcuuuu

SEQ ID NO: 25580 - RNA, 22 nt, Homo sapiens
uugcccucucaacccagcuuuu

SEQ ID NO: 25581 - RNA, 20 nt, Homo sapiens
acccucucaacccagcuuuu

SEQ ID NO: 25582 - RNA, 19 nt, Homo sapiens
uccucucaacccagcuuuu

SEQ ID NO: 25583 - RNA, 22 nt, Homo sapiens
accuucccugguacagaauacu

SEQ ID NO: 25584 - RNA, 23 nt, Homo sapiens
ucacauaggaaugaaaagccaua

SEQ ID NO: 25585 - RNA, 22 nt, Homo sapiens
aaagagguuaaccagguguguu

SEQ ID NO: 25586 - RNA, 22 nt, Homo sapiens
ugaauccuugaauagguguguu

SEQ ID NO: 25587 - RNA, 21 nt, Homo sapiens
cucacucagauggccaacuca

SEQ ID NO: 25588 - RNA, 21 nt, Homo sapiens
gaccaaucgccguccccgccg

SEQ ID NO: 25589 - RNA, 22 nt, Homo sapiens
gcggucccgcggcgccccgccu

SEQ ID NO: 25590 - RNA, 21 nt, Homo sapiens
gggcaucugggacgcgcagga

SEQ ID NO: 25591 - RNA, 21 nt, Homo sapiens
gaccaaucgccguccccgccg

SEQ ID NO: 25592 - RNA, 23 nt, Homo sapiens
cccaacagacauggcgguacuca

SEQ ID NO: 25593 - RNA, 22 nt, Homo sapiens
ucagaccgagacaagugcaaug

SEQ ID NO: 25594 - RNA, 23 nt, Homo sapiens
aaaucagaaucacaccuggggga

SEQ ID NO: 25595 - RNA, 23 nt, Homo sapiens
aaagucucgcucucugccccuca

SEQ ID NO: 25596 - RNA, 23 nt, Homo sapiens
aagaaucuugucccgcagguccu

SEQ ID NO: 25597 - RNA, 19 nt, Homo sapiens
auuuugguacagcagcuca

SEQ ID NO: 25598 - RNA, 24 nt, Homo sapiens
acgcagagcccgaaagcccccagu

SEQ ID NO: 25599 - RNA, 19 nt, Homo sapiens
gccucagaggcagcugcuu

SEQ ID NO: 25600 - RNA, 22 nt, Homo sapiens
gcggucccgcggcgccccgccu

SEQ ID NO: 25601 - RNA, 22 nt, Homo sapiens
ugcuguuagcccuagccccgca

SEQ ID NO: 25602 - RNA, 21 nt, Homo sapiens
caucaccuuccuucuccucca

SEQ ID NO: 25603 - RNA, 22 nt, Homo sapiens
cugggggcggcacaggggcuca

SEQ ID NO: 25604 - RNA, 22 nt, Homo sapiens
caaacaccauugucacacucca

SEQ ID NO: 25605 - RNA, 18 nt, Homo sapiens
ugguggcagaggugggau

SEQ ID NO: 25606 - RNA, 22 nt, Homo sapiens
uucacacugcaugcucugggua

SEQ ID NO: 25607 - RNA, 22 nt, Homo sapiens
ucaucucgcccgcaaagaccca

SEQ ID NO: 25608 - RNA, 22 nt, Homo sapiens
cccaacaacaugaaacuaccua

SEQ ID NO: 25609 - RNA, 22 nt, Homo sapiens
ucaccauugcuaaagugcaauu

SEQ ID NO: 25610 - RNA, 23 nt, Homo sapiens
aaagucucgcucucugccccuca

SEQ ID NO: 25611 - RNA, 21 nt, Homo sapiens
gaccaagaaauagccuuucaa

SEQ ID NO: 25612 - RNA, 22 nt, Homo sapiens
agcacagacuugcugugauguu

SEQ ID NO: 25613 - RNA, 24 nt, Homo sapiens
cagaaagugcuuucuuuuggagaa

SEQ ID NO: 25614 - RNA, 22 nt, Homo sapiens
aacacucuaaaaggaggcacuu

SEQ ID NO: 25615 - RNA, 22 nt, Homo sapiens
ugcaagccuugggugugggagg

SEQ ID NO: 25616 - RNA, 21 nt, Homo sapiens
acugaucuagagaacacaaga

SEQ ID NO: 25617 - RNA, 22 nt, Homo sapiens
ugcuguuagcccuagccccgca

SEQ ID NO: 25618 - RNA, 22 nt, Homo sapiens
acugccugucugugccugcugu

SEQ ID NO: 25619 - RNA, 22 nt, Homo sapiens
cuguuccugcugaacugagcca

SEQ ID NO: 25620 - RNA, 22 nt, Homo sapiens
acaaccagcuaagacacugcca

SEQ ID NO: 25621 - RNA, 22 nt, Homo sapiens
auggcaguggaguuagugauug

SEQ ID NO: 25622 - RNA, 23 nt, Homo sapiens
gcaaucagcuaacuacacugccu

SEQ ID NO: 25623 - RNA, 23 nt, Homo sapiens
aaaucagaaucacaccuggggga

SEQ ID NO: 25624 - RNA, 22 nt, Homo sapiens
accagguuccaccccagcaggc

SEQ ID NO: 25625 - RNA, 22 nt, Homo sapiens
accagcuaacaauacacugcca

SEQ ID NO: 25626 - RNA, 22 nt, Homo sapiens
gccagcuaacaauacacugccu

SEQ ID NO: 25627 - RNA, 22 nt, Homo sapiens
aucgggaggggacugagccuga

SEQ ID NO: 25628 - RNA, 21 nt, Homo sapiens
cccgaggagccgggcaggcuu

SEQ ID NO: 25629 - RNA, 24 nt, Homo sapiens
acgcagagcccgaaagcccccagu

SEQ ID NO: 25630 - RNA, 24 nt, Homo sapiens
acgcgcaggccagagacccaggca

SEQ ID NO: 25631 - RNA, 20 nt, Homo sapiens
uacugcuuccacagcucccc

SEQ ID NO: 25632 - RNA, 22 nt, Homo sapiens
acacacccacgcgagccggaaa

SEQ ID NO: 25633 - RNA, 22 nt, Homo sapiens
cuagggaacacagggcugguga

SEQ ID NO: 25634 - RNA, 23 nt, Homo sapiens
cggccugauucacaacaccagcu

SEQ ID NO: 25635 - RNA, 23 nt, Homo sapiens
gggagugaagacacggagccaga

SEQ ID NO: 25636 - RNA, 21 nt, Homo sapiens
gaccaaucgccguccccgccg

SEQ ID NO: 25637 - RNA, 23 nt, Homo sapiens
cccaacagacauggcgguacuca

SEQ ID NO: 25638 - RNA, 22 nt, Homo sapiens
uggcagcagcggagggggcaga

SEQ ID NO: 25639 - RNA, 23 nt, Homo sapiens
gaaacccagcagacaauguagcu

SEQ ID NO: 25640 - RNA, 20 nt, Homo sapiens
ccagcagcaccuggggcagu

SEQ ID NO: 25641 - RNA, 21 nt, Homo sapiens
uucuaggauaggcccaggggc

SEQ ID NO: 25642 - RNA, 23 nt, Homo sapiens
aaagucucgcucucugccccuca

SEQ ID NO: 25643 - RNA, 21 nt, Homo sapiens
auccuguacugagcugccccg

SEQ ID NO: 25644 - RNA, 19 nt, Homo sapiens
guccugaauuccgcagccu

SEQ ID NO: 25645 - RNA, 22 nt, Homo sapiens
gcggucccgcggcgccccgccu

SEQ ID NO: 25646 - RNA, 23 nt, Homo sapiens
gagcaaggcucuugucuguaagu

SEQ ID NO: 25647 - RNA, 22 nt, Homo sapiens
caaacaccauugucacacucca

SEQ ID NO: 25648 - RNA, 17 nt, Homo sapiens
uggcgcccgaacaggga

SEQ ID NO: 25649 - RNA, 18 nt, Homo sapiens
auucaaucuacugccuca

SEQ ID NO: 25650 - RNA, 23 nt, Homo sapiens
cuacuaaaacauggaagcacuua

SEQ ID NO: 25651 - RNA, 23 nt, Homo sapiens
acacucaaacauggaagcacuua

SEQ ID NO: 25652 - RNA, 21 nt, Homo sapiens
caucaccuuccuucuccucca

SEQ ID NO: 25653 - RNA, 21 nt, Homo sapiens
ggggagcgggggcccugccuu

SEQ ID NO: 25654 - RNA, 22 nt, Homo sapiens
ugagugcuugcuaggugccaag

SEQ ID NO: 25655 - RNA, 22 nt, Homo sapiens
ucaguuuccucugcaaacaguu

SEQ ID NO: 25656 - RNA, 21 nt, Homo sapiens
uagcacccagauagcaaggau

SEQ ID NO: 25657 - RNA, 19 nt, Homo sapiens
agaaaccccagcagagaca

SEQ ID NO: 25658 - RNA, 21 nt, Homo sapiens
ggacuauagaacuuucccccu

SEQ ID NO: 25659 - RNA, 23 nt, Homo sapiens
agcaaaaaugugcuagugccaaa

SEQ ID NO: 25660 - RNA, 27 nt, Homo sapiens
uuuagcacagugcuuauacaagaaggu

SEQ ID NO: 25661 - RNA, 22 nt, Homo sapiens
ugaagaagggggggaagggcgu

SEQ ID NO: 25662 - RNA, 24 nt, Homo sapiens
acugcaggcuccagcuuccaggcu

SEQ ID NO: 25663 - RNA, 18 nt, Homo sapiens
ccacugaaccacccaugc

SEQ ID NO: 25664 - RNA, 22 nt, Homo sapiens
acaccuggcuccacacgcgggc

SEQ ID NO: 25665 - RNA, 21 nt, Homo sapiens
gaccaaucgccguccccgccg

SEQ ID NO: 25666 - RNA, 23 nt, Homo sapiens
cagcugcuuuugggauuccguug

SEQ ID NO: 25667 - RNA, 21 nt, Homo sapiens
agcuaugccagcaucuugccu

SEQ ID NO: 25668 - RNA, 22 nt, Homo sapiens
cagcauggaguccuccagguug

SEQ ID NO: 25669 - RNA, 22 nt, Homo sapiens
uuucaguuaucaaucugucaca

SEQ ID NO: 25670 - RNA, 22 nt, Homo sapiens
gcggucccgcggcgccccgccu

SEQ ID NO: 25671 - RNA, 21 nt, Homo sapiens
cugaggagagaggaggugggg

SEQ ID NO: 25672 - RNA, 22 nt, Homo sapiens
uccacauggaguugcuguuaca

SEQ ID NO: 25673 - RNA, 22 nt, Homo sapiens
ccucauggaaggguuccccacu

SEQ ID NO: 25674 - RNA, 22 nt, Homo sapiens
caaacaccauugucacacucca

SEQ ID NO: 25675 - RNA, 24 nt, Homo sapiens
acugcaggcuccagcuuccaggcu

SEQ ID NO: 25676 - RNA, 21 nt, Homo sapiens
ccgugguucuacccuguggua

SEQ ID NO: 25677 - RNA, 22 nt, Homo sapiens
cacugguacaaggguugggaga

SEQ ID NO: 25678 - RNA, 22 nt, Homo sapiens
agcccaaaaggagaauucuuug

SEQ ID NO: 25679 - RNA, 23 nt, Homo sapiens
cuaucugcacuagaugcaccuua

SEQ ID NO: 25680 - RNA, 20 nt, Homo sapiens
cccgccgcgucgcccugggg

SEQ ID NO: 25681 - RNA, 20 nt, Homo sapiens
uucccaugcccuauaccucu

SEQ ID NO: 25682 - RNA, 22 nt, Homo sapiens
acaguucuucaacuggcagcuu

SEQ ID NO: 25683 - RNA, 22 nt, Homo sapiens
ggagagccuccacccaacccuc

SEQ ID NO: 25684 - RNA, 21 nt, Homo sapiens
acaggauugagggggggcccu

SEQ ID NO: 25685 - RNA, 22 nt, Homo sapiens
agcugaguguaggauguuuaca

SEQ ID NO: 25686 - RNA, 22 nt, Homo sapiens
ucgcccucucaacccagcuuuu

SEQ ID NO: 25687 - RNA, 22 nt, Homo sapiens
uugcccucucaacccagcuuuu

SEQ ID NO: 25688 - RNA, 20 nt, Homo sapiens
acccucucaacccagcuuuu

SEQ ID NO: 25689 - RNA, 19 nt, Homo sapiens
uccucucaacccagcuuuu

SEQ ID NO: 25690 - RNA, 23 nt, Homo sapiens
ccacccaaugaccuacuccaaga

SEQ ID NO: 25691 - RNA, 22 nt, Homo sapiens
aucgggaggggacugagccuga

SEQ ID NO: 25692 - RNA, 22 nt, Homo sapiens
acaaaagcaacugagguucuug

SEQ ID NO: 25693 - RNA, 19 nt, Homo sapiens
auuuugguacagcagcuca

SEQ ID NO: 25694 - RNA, 21 nt, Homo sapiens
acuuuccaggauucauuaacu

SEQ ID NO: 25695 - RNA, 22 nt, Homo sapiens
caccugauaaaacugagguaua

SEQ ID NO: 25696 - RNA, 20 nt, Homo sapiens
uacugcuuccacagcucccc

SEQ ID NO: 25697 - RNA, 24 nt, Homo sapiens
cacccccagagccucagcucccca

SEQ ID NO: 25698 - RNA, 22 nt, Homo sapiens
gaggcucagaauggcucaggag

SEQ ID NO: 25699 - RNA, 23 nt, Homo sapiens
gggagugaagacacggagccaga

SEQ ID NO: 25700 - RNA, 22 nt, Homo sapiens
uagucaagugaagcagugggag

SEQ ID NO: 25701 - RNA, 22 nt, Homo sapiens
cuguuccugcugaacugagcca

SEQ ID NO: 25702 - RNA, 20 nt, Homo sapiens
gcaaugcaacagcaaugcac

SEQ ID NO: 25703 - RNA, 23 nt, Homo sapiens
acugaggggccucagaccgagcu

SEQ ID NO: 25704 - RNA, 22 nt, Homo sapiens
aacgcuccaaaagaaggcacuc

SEQ ID NO: 25705 - RNA, 22 nt, Homo sapiens
aacacucuaaaaggaggcacuu

SEQ ID NO: 25706 - RNA, 23 nt, Homo sapiens
gggcucuuacucccucaggcacu

SEQ ID NO: 25707 - RNA, 22 nt, Homo sapiens
aagagggagacccaggcucgga

SEQ ID NO: 25708 - RNA, 21 nt, Homo sapiens
cugcugggccacaacguggga

SEQ ID NO: 25709 - RNA, 21 nt, Homo sapiens
aggagacucacaaguuccugc

SEQ ID NO: 25710 - RNA, 22 nt, Homo sapiens
uccggggacgaacgggacgggu

SEQ ID NO: 25711 - RNA, 18 nt, Homo sapiens
aucacauucaccucccug

SEQ ID NO: 25712 - RNA, 20 nt, Homo sapiens
cuggaggaagggcccagagg

SEQ ID NO: 25713 - RNA, 22 nt, Homo sapiens
gccuaagacacaggcccagaga

SEQ ID NO: 25714 - RNA, 22 nt, Homo sapiens
gaacuugcuaaaaaugcagaau

SEQ ID NO: 25715 - RNA, 22 nt, Homo sapiens
guacaaaaguaauuacaguuuu

SEQ ID NO: 25716 - RNA, 22 nt, Homo sapiens
ggaggccgggacgagugcaaua

SEQ ID NO: 25717 - RNA, 22 nt, Homo sapiens
acacacccacgcgagccggaaa

SEQ ID NO: 25718 - RNA, 22 nt, Homo sapiens
ugaagaagggggggaagggcgu

SEQ ID NO: 25719 - RNA, 22 nt, Homo sapiens
agccaagcucagacggauccga

SEQ ID NO: 25720 - RNA, 21 nt, Homo sapiens
ugcaaacccugcaugugggag

SEQ ID NO: 25721 - RNA, 21 nt, Homo sapiens
gaccaaucgccguccccgccg

SEQ ID NO: 25722 - RNA, 23 nt, Homo sapiens
cggcucugucgucgaggcgcuca

SEQ ID NO: 25723 - RNA, 22 nt, Homo sapiens
auaaggauuuuuaggggcauua

SEQ ID NO: 25724 - RNA, 23 nt, Homo sapiens
ucaacgggagugaucgugucauu

SEQ ID NO: 25725 - RNA, 22 nt, Homo sapiens
uauggaugcaaaaugaucccaa

SEQ ID NO: 25726 - RNA, 21 nt, Homo sapiens
acugaucuagagaacacaaga

SEQ ID NO: 25727 - RNA, 22 nt, Homo sapiens
gcggucccgcggcgccccgccu

SEQ ID NO: 25728 - RNA, 23 nt, Homo sapiens
cuccagccccuccagggcuuccu

SEQ ID NO: 25729 - RNA, 22 nt, Homo sapiens
ugcuguuagcccuagccccgca

SEQ ID NO: 25730 - RNA, 23 nt, Homo sapiens
aaccaagaccccggagaucccag

SEQ ID NO: 25731 - RNA, 22 nt, Homo sapiens
ggagauggagccagggcccuaa

SEQ ID NO: 25732 - RNA, 25 nt, Homo sapiens
acggagcugucccaacaccaccccu

SEQ ID NO: 25733 - RNA, 23 nt, Homo sapiens
ggaagccaucaagucgcugcagg

SEQ ID NO: 25734 - RNA, 18 nt, Homo sapiens
gaaaugagggccagcuga

SEQ ID NO: 25735 - RNA, 23 nt, Homo sapiens
cugugggagggcaguggugagag

SEQ ID NO: 25736 - RNA, 22 nt, Homo sapiens
ggcucccaagaaccucaccugu

SEQ ID NO: 25737 - RNA, 20 nt, Homo sapiens
ugucuccacagggcucuuua

SEQ ID NO: 25738 - RNA, 21 nt, Homo sapiens
ucuccagaucagggcagucca

SEQ ID NO: 25739 - RNA, 24 nt, Homo sapiens
gaagucacucccaggcagcugcaa

SEQ ID NO: 25740 - RNA, 22 nt, Homo sapiens
uagcagaagcauuuccgcacac

SEQ ID NO: 25741 - RNA, 23 nt, Homo sapiens
cuaccugcacuguaagcacuuug

SEQ ID NO: 25742 - RNA, 22 nt, Homo sapiens
ucagaccgagacaagugcaaug

SEQ ID NO: 25743 - RNA, 22 nt, Homo sapiens
caugauugccacgucugcagua

SEQ ID NO: 25744 - RNA, 21 nt, Homo sapiens
ugauugccacugucugcagua

SEQ ID NO: 25745 - RNA, 21 nt, Homo sapiens
gcugaggucugggccaggucu

SEQ ID NO: 25746 - RNA, 19 nt, Homo sapiens
ccaccucccgaguccucac

SEQ ID NO: 25747 - RNA, 22 nt, Homo sapiens
ccagaacugaguccacagggca

SEQ ID NO: 25748 - RNA, 21 nt, Homo sapiens
cggggugcacgggcggagggc

SEQ ID NO: 25749 - RNA, 21 nt, Homo sapiens
cggggugcacgggcggagggc

SEQ ID NO: 25750 - RNA, 23 nt, Homo sapiens
cuaucugcacuagaugcaccuua

SEQ ID NO: 25751 - RNA, 20 nt, Homo sapiens
acagcaaggagggcaggagg

SEQ ID NO: 25752 - RNA, 22 nt, Homo sapiens
ucagaccgagacaagugcaaug

SEQ ID NO: 25753 - RNA, 22 nt, Homo sapiens
gaccucagcuaugacagcacuu

SEQ ID NO: 25754 - RNA, 20 nt, Homo sapiens
agagaugagagaaacacccu

SEQ ID NO: 25755 - RNA, 25 nt, Homo sapiens
accaacggaccuacuucccuccgcc

SEQ ID NO: 25756 - RNA, 25 nt, Homo sapiens
accaacggaccuacuucccuccgcc

SEQ ID NO: 25757 - RNA, 22 nt, Homo sapiens
ucggucccucgggccagggcag

SEQ ID NO: 25758 - RNA, 21 nt, Homo sapiens
cggcucggguggcggcgacgg

SEQ ID NO: 25759 - RNA, 21 nt, Homo sapiens
ccccucccagccucccugcca

SEQ ID NO: 25760 - RNA, 18 nt, Homo sapiens
aucacauucaccucccug

SEQ ID NO: 25761 - RNA, 23 nt, Homo sapiens
gggagugaagacacggagccaga

SEQ ID NO: 25762 - RNA, 21 nt, Homo sapiens
gaccaaucgccguccccgccg

SEQ ID NO: 25763 - RNA, 22 nt, Homo sapiens
cggugagcacccggccccugcg

SEQ ID NO: 25764 - RNA, 23 nt, Homo sapiens
acaccaaugcccuaggggaugcg

SEQ ID NO: 25765 - RNA, 22 nt, Homo sapiens
ccucauggaaggguuccccacu

SEQ ID NO: 25766 - RNA, 22 nt, Homo sapiens
gcggucccgcggcgccccgccu

SEQ ID NO: 25767 - RNA, 22 nt, Homo sapiens
ugcuguuagcccuagccccgca

SEQ ID NO: 25768 - RNA, 24 nt, Homo sapiens
cacccccagagccucagcucccca

SEQ ID NO: 25769 - RNA, 22 nt, Homo sapiens
cuggagagacaaggggaagagg

SEQ ID NO: 25770 - RNA, 22 nt, Homo sapiens
cacaaaccauuaugugcugcua

SEQ ID NO: 25771 - RNA, 18 nt, Homo sapiens
auucaaucuacugccuca

SEQ ID NO: 25772 - RNA, 22 nt, Homo sapiens
uauggaugcaaaaugaucccaa

SEQ ID NO: 25773 - RNA, 21 nt, Homo sapiens
gugacucaucaccuauggaaa

SEQ ID NO: 25774 - RNA, 23 nt, Homo sapiens
aaccaagaccccggagaucccag

SEQ ID NO: 25775 - RNA, 20 nt, Homo sapiens
cccugcgccaucuccucuac

SEQ ID NO: 25776 - RNA, 20 nt, Homo sapiens
cccugcgccaucuccucuac

SEQ ID NO: 25777 - RNA, 21 nt, Homo sapiens
ggggagcgggggcccugccuu

SEQ ID NO: 25778 - RNA, 21 nt, Homo sapiens
agaaguagaccauguguccua

SEQ ID NO: 25779 - RNA, 22 nt, Homo sapiens
auccuucuacaaauucacccau

SEQ ID NO: 25780 - RNA, 21 nt, Homo sapiens
agggcucaucuugguccugca

SEQ ID NO: 25781 - RNA, 22 nt, Homo sapiens
ucaggaacugccuuucucucca

SEQ ID NO: 25782 - RNA, 22 nt, Homo sapiens
acugccugucugugccugcugu

SEQ ID NO: 25783 - RNA, 20 nt, Homo sapiens
cuggaggaagggcccagagg

SEQ ID NO: 25784 - RNA, 22 nt, Homo sapiens
gccuaagacacaggcccagaga

SEQ ID NO: 25785 - RNA, 22 nt, Homo sapiens
accagguuccaccccagcaggc

SEQ ID NO: 25786 - RNA, 23 nt, Homo sapiens
acggcuaguggaccaggugaagu

SEQ ID NO: 25787 - RNA, 25 nt, Homo sapiens
acggagcugucccaacaccaccccu

SEQ ID NO: 25788 - RNA, 22 nt, Homo sapiens
gauccgagcaccggggaccccc

SEQ ID NO: 25789 - RNA, 20 nt, Homo sapiens
uccccacagacccagagccg

SEQ ID NO: 25790 - RNA, 21 nt, Homo sapiens
cacaaccucaguguuuccagg

SEQ ID NO: 25791 - RNA, 20 nt, Homo sapiens
uacugcuuccacagcucccc

SEQ ID NO: 25792 - RNA, 22 nt, Homo sapiens
gggagaggucucccugcgcaca

SEQ ID NO: 25793 - RNA, 22 nt, Homo sapiens
uagcagaagcauuuccgcacac

SEQ ID NO: 25794 - RNA, 22 nt, Homo sapiens
acccuuaucaguucuccgucca

SEQ ID NO: 25795 - RNA, 21 nt, Homo sapiens
gaccaaucgccguccccgccg

SEQ ID NO: 25796 - RNA, 22 nt, Homo sapiens
ugagccacugugccuggccuga

SEQ ID NO: 25797 - RNA, 21 nt, Homo sapiens
uagaaaggcuaggaccaaacc

SEQ ID NO: 25798 - RNA, 22 nt, Homo sapiens
ucaacaucagucugauaagcua

SEQ ID NO: 25799 - RNA, 21 nt, Homo sapiens
gcggaacuuagccacugugaa

SEQ ID NO: 25800 - RNA, 23 nt, Homo sapiens
cuacuaaaacauggaagcacuua

SEQ ID NO: 25801 - RNA, 23 nt, Homo sapiens
acacucaaacauggaagcacuua

SEQ ID NO: 25802 - RNA, 23 nt, Homo sapiens
acggcuaguggaccaggugaagu

SEQ ID NO: 25803 - RNA, 22 nt, Homo sapiens
aagaagugcaccauguuuguuu

SEQ ID NO: 25804 - RNA, 21 nt, Homo sapiens
cacucugaagggaagcgcuuu

SEQ ID NO: 25805 - RNA, 22 nt, Homo sapiens
uuucaguuaucaaucugucaca

SEQ ID NO: 25806 - RNA, 22 nt, Homo sapiens
gcggucccgcggcgccccgccu

SEQ ID NO: 25807 - RNA, 23 nt, Homo sapiens
guagugggccgagccgagugaca

SEQ ID NO: 25808 - RNA, 22 nt, Homo sapiens
ugcuguuagcccuagccccgca

SEQ ID NO: 25809 - RNA, 22 nt, Homo sapiens
ggaggccgggacgagugcaaua

SEQ ID NO: 25810 - RNA, 22 nt, Homo sapiens
cacgaccgacgccacgccgagu

SEQ ID NO: 25811 - RNA, 23 nt, Homo sapiens
aggaacagcagcagcccgggccg

SEQ ID NO: 25812 - RNA, 23 nt, Homo sapiens
aggaacagcagcagcccgggccg

SEQ ID NO: 25813 - RNA, 22 nt, Homo sapiens
ggaggccgggacgagugcaaua

SEQ ID NO: 25814 - RNA, 22 nt, Homo sapiens
gggagaggucucccugcgcaca

SEQ ID NO: 25815 - RNA, 22 nt, Homo sapiens
gaauucaucacggccagccucu

SEQ ID NO: 25816 - RNA, 24 nt, Homo sapiens
acugcaggcuccagcuuccaggcu

SEQ ID NO: 25817 - RNA, 21 nt, Homo sapiens
gagcuacagugcuucaucuca

SEQ ID NO: 25818 - RNA, 22 nt, Homo sapiens
cagaagugggccgggcacaggg

SEQ ID NO: 25819 - RNA, 22 nt, Homo sapiens
ucgcccucucaacccagcuuuu

SEQ ID NO: 25820 - RNA, 22 nt, Homo sapiens
uugcccucucaacccagcuuuu

SEQ ID NO: 25821 - RNA, 20 nt, Homo sapiens
acccucucaacccagcuuuu

SEQ ID NO: 25822 - RNA, 19 nt, Homo sapiens
uccucucaacccagcuuuu

SEQ ID NO: 25823 - RNA, 23 nt, Homo sapiens
ccacccaaugaccuacuccaaga

SEQ ID NO: 25824 - RNA, 24 nt, Homo sapiens
cagaaagugcuuucuuuuggagaa

SEQ ID NO: 25825 - RNA, 22 nt, Homo sapiens
aacacucuaaaaggaggcacuu

SEQ ID NO: 25826 - RNA, 25 nt, Homo sapiens
acggagcugucccaacaccaccccu

SEQ ID NO: 25827 - RNA, 20 nt, Homo sapiens
uacugcuuccacagcucccc

SEQ ID NO: 25828 - RNA, 17 nt, Homo sapiens
gggagaggaggaggcga

SEQ ID NO: 25829 - RNA, 21 nt, Homo sapiens
gggcaucugggacgcgcagga

SEQ ID NO: 25830 - RNA, 23 nt, Homo sapiens
ccacccaaugaccuacuccaaga

SEQ ID NO: 25831 - RNA, 23 nt, Homo sapiens
acccucuauagggaagcgcguuc

SEQ ID NO: 25832 - RNA, 19 nt, Homo sapiens
guugggaucacaggcgccc

SEQ ID NO: 25833 - RNA, 20 nt, Homo sapiens
agagaugagagaaacacccu

SEQ ID NO: 25834 - RNA, 21 nt, Homo sapiens
cacaacccuaguggcgccauu

SEQ ID NO: 25835 - RNA, 21 nt, Homo sapiens
caacugaugccuuuccaagua

SEQ ID NO: 25836 - RNA, 17 nt, Homo sapiens
gggagaggaggaggcga

SEQ ID NO: 25837 - RNA, 18 nt, Homo sapiens
aucacauucaccucccug

SEQ ID NO: 25838 - RNA, 18 nt, Homo sapiens
aucacauucaccucccug

SEQ ID NO: 25839 - RNA, 22 nt, Homo sapiens
cagaagugggccgggcacaggg

SEQ ID NO: 25840 - RNA, 22 nt, Homo sapiens
agccacaaucaccuucugaucu

SEQ ID NO: 25841 - RNA, 21 nt, Homo sapiens
aguucucccaacguaaaccca

SEQ ID NO: 25842 - RNA, 21 nt, Homo sapiens
caucaccuuccuucuccucca

SEQ ID NO: 25843 - RNA, 21 nt, Homo sapiens
cugaggagagaggaggugggg

SEQ ID NO: 25844 - RNA, 20 nt, Homo sapiens
cugcgggaggacagggcuca

SEQ ID NO: 25845 - RNA, 24 nt, Homo sapiens
ucacagguuaaagggucucaggga

SEQ ID NO: 25846 - RNA, 22 nt, Homo sapiens
ucacaaguuagggucucaggga

SEQ ID NO: 25847 - RNA, 18 nt, Homo sapiens
ugguggcagaggugggau

SEQ ID NO: 25848 - RNA, 23 nt, Homo sapiens
agcccuguucuacagcccugagg

SEQ ID NO: 25849 - RNA, 23 nt, Homo sapiens
gggagugaagacacggagccaga

SEQ ID NO: 25850 - RNA, 18 nt, Homo sapiens
auucaaucuacugccuca

SEQ ID NO: 25851 - RNA, 23 nt, Homo sapiens
cuaucugcacuagaugcaccuua

SEQ ID NO: 25852 - RNA, 23 nt, Homo sapiens
cuaacugcacuagaugcaccuua

SEQ ID NO: 25853 - RNA, 22 nt, Homo sapiens
uggcagcagcggagggggcaga

SEQ ID NO: 25854 - RNA, 22 nt, Homo sapiens
cuguuccugcugaacugagcca

SEQ ID NO: 25855 - RNA, 22 nt, Homo sapiens
agcugaguguaggauguuuaca

SEQ ID NO: 25856 - RNA, 20 nt, Homo sapiens
ccagcagcaccuggggcagu

SEQ ID NO: 25857 - RNA, 21 nt, Homo sapiens
auccuguacugagcugccccg

SEQ ID NO: 25858 - RNA, 22 nt, Homo sapiens
ugcaagccuugggugugggagg

SEQ ID NO: 25859 - RNA, 23 nt, Homo sapiens
gggcucuuacucccucaggcacu

SEQ ID NO: 25860 - RNA, 22 nt, Homo sapiens
caagacacauuuggagagggac

SEQ ID NO: 25861 - RNA, 23 nt, Homo sapiens
cccagcuagauuguaagcuccuu

SEQ ID NO: 25862 - RNA, 20 nt, Homo sapiens
uacugcuuccacagcucccc

SEQ ID NO: 25863 - RNA, 21 nt, Homo sapiens
ggggagcgggggcccugccuu

SEQ ID NO: 25864 - RNA, 21 nt, Homo sapiens
ccccucccagccucccugcca

SEQ ID NO: 25865 - RNA, 18 nt, Homo sapiens
ugguggcagaggugggau

SEQ ID NO: 25866 - RNA, 22 nt, Homo sapiens
ccaguagcacggcucaguccag

SEQ ID NO: 25867 - RNA, 17 nt, Homo sapiens
ggguggcagcgguggga

SEQ ID NO: 25868 - RNA, 21 nt, Homo sapiens
ucuccagaucagggcagucca

SEQ ID NO: 25869 - RNA, 23 nt, Homo sapiens
gggagugaagacacggagccaga

SEQ ID NO: 25870 - RNA, 22 nt, Homo sapiens
agcugaguguaggauguuuaca

SEQ ID NO: 25871 - RNA, 22 nt, Homo sapiens
auggcaguggaguuagugauug

SEQ ID NO: 25872 - RNA, 21 nt, Homo sapiens
guguauaugcccauggacugc

SEQ ID NO: 25873 - RNA, 23 nt, Homo sapiens
caugagugacgcccucuggagua

SEQ ID NO: 25874 - RNA, 22 nt, Homo sapiens
ugcaagccuugggugugggagg

SEQ ID NO: 25875 - RNA, 22 nt, Homo sapiens
caagacacauuuggagagggac

SEQ ID NO: 25876 - RNA, 21 nt, Homo sapiens
ggggagcgggggcccugccuu

SEQ ID NO: 25877 - RNA, 22 nt, Homo sapiens
acugccugucugugccugcugu

SEQ ID NO: 25878 - RNA, 22 nt, Homo sapiens
accagguuccaccccagcaggc

SEQ ID NO: 25879 - RNA, 22 nt, Homo sapiens
gggagaggucucccugcgcaca

SEQ ID NO: 25880 - RNA, 23 nt, Homo sapiens
acaccaaugcccuaggggaugcg

SEQ ID NO: 25881 - RNA, 23 nt, Homo sapiens
uguaggcuggggauaaaugaaua

SEQ ID NO: 25882 - RNA, 22 nt, Homo sapiens
cuagggaacacagggcugguga

SEQ ID NO: 25883 - RNA, 23 nt, Homo sapiens
cugugggagggcaguggugagag

SEQ ID NO: 25884 - RNA, 17 nt, Homo sapiens
gggagaggaggaggcga

SEQ ID NO: 25885 - RNA, 22 nt, Homo sapiens
ucccucacacagaauuccagaa

SEQ ID NO: 25886 - RNA, 22 nt, Homo sapiens
augcuuuuugggguaagggcuu

SEQ ID NO: 25887 - RNA, 23 nt, Homo sapiens
cggccugauucacaacaccagcu

SEQ ID NO: 25888 - RNA, 23 nt, Homo sapiens
aaaucagaaucacaccuggggga

SEQ ID NO: 25889 - RNA, 22 nt, Homo sapiens
auauuaggaacacaucgcaaaa

SEQ ID NO: 25890 - RNA, 21 nt, Homo sapiens
cugaaaccaaguaugggucgc

SEQ ID NO: 25891 - RNA, 19 nt, Homo sapiens
guugggaucacaggcgccc

SEQ ID NO: 25892 - RNA, 24 nt, Homo sapiens
acgcagagcccgaaagcccccagu

SEQ ID NO: 25893 - RNA, 23 nt, Homo sapiens
caugcucagacaaccauggugca

SEQ ID NO: 25894 - RNA, 21 nt, Homo sapiens
ccccucccagccucccugcca

SEQ ID NO: 25895 - RNA, 22 nt, Homo sapiens
cuggagagacaaggggaagagg

SEQ ID NO: 25896 - RNA, 22 nt, Homo sapiens
aacaacacuugaccacauccug

SEQ ID NO: 25897 - RNA, 25 nt, Homo sapiens
aagaaagagucuugcuuugucgccc

SEQ ID NO: 25898 - RNA, 20 nt, Homo sapiens
ugucuccacagggcucuuua

SEQ ID NO: 25899 - RNA, 22 nt, Homo sapiens
augcccuuucaucauugcacug

SEQ ID NO: 25900 - RNA, 23 nt, Homo sapiens
gggagugaagacacggagccaga

SEQ ID NO: 25901 - RNA, 20 nt, Homo sapiens
cuggaggaagggcccagagg

SEQ ID NO: 25902 - RNA, 22 nt, Homo sapiens
gccuaagacacaggcccagaga

SEQ ID NO: 25903 - RNA, 22 nt, Homo sapiens
gcugccguauaugugaugucac

SEQ ID NO: 25904 - RNA, 22 nt, Homo sapiens
uuucaguuaucaaucugucaca

SEQ ID NO: 25905 - RNA, 21 nt, Homo sapiens
cugaaaccaaguaugggucgc

SEQ ID NO: 25906 - RNA, 20 nt, Homo sapiens
uccccacagacccagagccg

SEQ ID NO: 25907 - RNA, 21 nt, Homo sapiens
aggagacucacaaguuccugc

SEQ ID NO: 25908 - RNA, 21 nt, Homo sapiens
cuagggaagaacagugagcaa

SEQ ID NO: 25909 - RNA, 18 nt, Homo sapiens
ugguggcagaggugggau

SEQ ID NO: 25910 - RNA, 24 nt, Homo sapiens
acugcuggucuucagucagggcca

SEQ ID NO: 25911 - RNA, 22 nt, Homo sapiens
cggugagcacccggccccugcg

SEQ ID NO: 25912 - RNA, 22 nt, Homo sapiens
acugggacuuuguaggccaguu

SEQ ID NO: 25913 - RNA, 22 nt, Homo sapiens
agcgggacuuugagggccaguu

SEQ ID NO: 25914 - RNA, 22 nt, Homo sapiens
uccacauggaguugcuguuaca

SEQ ID NO: 25915 - RNA, 22 nt, Homo sapiens
acggaagggcagagagggccag

SEQ ID NO: 25916 - RNA, 21 nt, Homo sapiens
uucuaggauaggcccaggggc

SEQ ID NO: 25917 - RNA, 21 nt, Homo sapiens
auccuguacugagcugccccg

SEQ ID NO: 25918 - RNA, 22 nt, Homo sapiens
aggaaaccagcaaguguugacg

SEQ ID NO: 25919 - RNA, 25 nt, Homo sapiens
acggagcugucccaacaccaccccu

SEQ ID NO: 25920 - RNA, 23 nt, Homo sapiens
agaaaccaugggguaugagcaga

SEQ ID NO: 25921 - RNA, 20 nt, Homo sapiens
cucaaagcaaacccugcaga

SEQ ID NO: 25922 - RNA, 22 nt, Homo sapiens
cggugagcacccggccccugcg

SEQ ID NO: 25923 - RNA, 22 nt, Homo sapiens
uggcagcagcggagggggcaga

SEQ ID NO: 25924 - RNA, 20 nt, Homo sapiens
ccagcagcaccuggggcagu

SEQ ID NO: 25925 - RNA, 21 nt, Homo sapiens
auccuguacugagcugccccg

SEQ ID NO: 25926 - RNA, 19 nt, Homo sapiens
agaaaccccagcagagaca

SEQ ID NO: 25927 - RNA, 19 nt, Homo sapiens
guccugaauuccgcagccu

SEQ ID NO: 25928 - RNA, 22 nt, Homo sapiens
gggagaggucucccugcgcaca

SEQ ID NO: 25929 - RNA, 22 nt, Homo sapiens
gggagaggucucccugcgcaca

SEQ ID NO: 25930 - RNA, 23 nt, Homo sapiens
cuaccugcacuguaagcacuuuu

SEQ ID NO: 25931 - RNA, 21 nt, Homo sapiens
aucugcacugucagcacuuua

SEQ ID NO: 25932 - RNA, 18 nt, Homo sapiens
gaaaugagggccagcuga

SEQ ID NO: 25933 - RNA, 24 nt, Homo sapiens
gaagucacucccaggcagcugcaa

SEQ ID NO: 25934 - RNA, 24 nt, Homo sapiens
gaagucacucccaggcagcugcaa

SEQ ID NO: 25935 - RNA, 23 nt, Homo sapiens
cuaccugcacuguaagcacuuug

SEQ ID NO: 25936 - RNA, 22 nt, Homo sapiens
agcccaaaaggagaauucuuug

SEQ ID NO: 25937 - RNA, 22 nt, Homo sapiens
cccaacaacaugaaacuaccua

SEQ ID NO: 25938 - RNA, 23 nt, Homo sapiens
cuaccugcacuauaagcacuuua

SEQ ID NO: 25939 - RNA, 23 nt, Homo sapiens
cuaccugcacuaugagcacuuug

SEQ ID NO: 25940 - RNA, 22 nt, Homo sapiens
acugccugucugugccugcugu

SEQ ID NO: 25941 - RNA, 23 nt, Homo sapiens
acaccaaugcccuaggggaugcg

SEQ ID NO: 25942 - RNA, 22 nt, Homo sapiens
ucaccauugcuaaagugcaauu

SEQ ID NO: 25943 - RNA, 22 nt, Homo sapiens
accagguuccaccccagcaggc

SEQ ID NO: 25944 - RNA, 22 nt, Homo sapiens
acacucuaaaaggaugcacuuu

SEQ ID NO: 25945 - RNA, 22 nt, Homo sapiens
aaccucuaaaaggaugcacuuu

SEQ ID NO: 25946 - RNA, 22 nt, Homo sapiens
auccucuaaaaagaugcacuuu

SEQ ID NO: 25947 - RNA, 22 nt, Homo sapiens
cacucuaaagggaggcacuuug

SEQ ID NO: 25948 - RNA, 23 nt, Homo sapiens
acagaaagugcuucccucaagag

SEQ ID NO: 25949 - RNA, 22 nt, Homo sapiens
guccaaaguuggggugcugguu

SEQ ID NO: 25950 - RNA, 22 nt, Homo sapiens
ugcuguuagcccuagccccgca

SEQ ID NO: 25951 - RNA, 20 nt, Homo sapiens
uccccacagacccagagccg

SEQ ID NO: 25952 - RNA, 23 nt, Homo sapiens
cuaccugcacgaacagcacuuug

SEQ ID NO: 25953 - RNA, 18 nt, Homo sapiens
cccccaccaccacgcccg

SEQ ID NO: 25954 - RNA, 20 nt, Homo sapiens
gcagaagcauuuccacacac

SEQ ID NO: 25955 - RNA, 20 nt, Homo sapiens
cccgccgcgucgcccugggg

SEQ ID NO: 25956 - RNA, 22 nt, Homo sapiens
agcugaguguaggauguuuaca

SEQ ID NO: 25957 - RNA, 21 nt, Homo sapiens
uucuaggauaggcccaggggc

SEQ ID NO: 25958 - RNA, 22 nt, Homo sapiens
gagcccuggacuaggagucagc

SEQ ID NO: 25959 - RNA, 21 nt, Homo sapiens
gcuccaaccucagcagacugu

SEQ ID NO: 25960 - RNA, 23 nt, Homo sapiens
gacguaguccuauucucugcugc

SEQ ID NO: 25961 - RNA, 22 nt, Homo sapiens
caaacaccauugucacacucca

SEQ ID NO: 25962 - RNA, 22 nt, Homo sapiens
gugggguggguggucaggccga

SEQ ID NO: 25963 - RNA, 22 nt, Homo sapiens
acaccuggcuccacacgcgggc

SEQ ID NO: 25964 - RNA, 22 nt, Homo sapiens
aggcauaggaugacaaagggaa

SEQ ID NO: 25965 - RNA, 22 nt, Homo sapiens
aggcgaaggaugacaaagggaa

SEQ ID NO: 25966 - RNA, 21 nt, Homo sapiens
gugacagagccaagcacaaau

SEQ ID NO: 25967 - RNA, 23 nt, Homo sapiens
gggccgcagcugucgcccguguc

SEQ ID NO: 25968 - RNA, 24 nt, Homo sapiens
acgcgcaggccagagacccaggca

SEQ ID NO: 25969 - RNA, 22 nt, Homo sapiens
ugcuguuagcccuagccccgca

SEQ ID NO: 25970 - RNA, 23 nt, Homo sapiens
gcacaugugcacacagccgggug

SEQ ID NO: 25971 - RNA, 22 nt, Homo sapiens
cuggagagacaaggggaagagg

SEQ ID NO: 25972 - RNA, 17 nt, Homo sapiens
gggagaggaggaggcga

SEQ ID NO: 25973 - RNA, 22 nt, Homo sapiens
agaaagcgcuuuccuuuguaga

SEQ ID NO: 25974 - RNA, 23 nt, Homo sapiens
aaaaugcagauuccuggacucca

SEQ ID NO: 25975 - RNA, 22 nt, Homo sapiens
ccccucuggucaaccagucaca

SEQ ID NO: 25976 - RNA, 22 nt, Homo sapiens
cagaagugggccgggcacaggg

SEQ ID NO: 25977 - RNA, 21 nt, Homo sapiens
acaugguuagaucaagcacaa

SEQ ID NO: 25978 - RNA, 23 nt, Homo sapiens
cuacuaaaacauggaagcacuua

SEQ ID NO: 25979 - RNA, 23 nt, Homo sapiens
acacucaaacauggaagcacuua

SEQ ID NO: 25980 - RNA, 21 nt, Homo sapiens
ccuucugacuccaaguccagu

SEQ ID NO: 25981 - RNA, 22 nt, Homo sapiens
gccuucugacccuaaguccagu

SEQ ID NO: 25982 - RNA, 22 nt, Homo sapiens
auaaaugacaccuccuugugaa

SEQ ID NO: 25983 - RNA, 20 nt, Homo sapiens
gaaagggcuucccuuuguag

SEQ ID NO: 25984 - RNA, 22 nt, Homo sapiens
gagaaagugcuucccuuuguag

SEQ ID NO: 25985 - RNA, 23 nt, Homo sapiens
ugcgggcgggacgagcaagcaca

SEQ ID NO: 25986 - RNA, 22 nt, Homo sapiens
gguuaguggaccaggucacaaa

SEQ ID NO: 25987 - RNA, 21 nt, Homo sapiens
caucaccuuccuucuccucca

SEQ ID NO: 25988 - RNA, 22 nt, Homo sapiens
gcugaggcuguggggcuggagu

SEQ ID NO: 25989 - RNA, 17 nt, Homo sapiens
gacagccucucccccac

SEQ ID NO: 25990 - RNA, 21 nt, Homo sapiens
gaccaaucgccguccccgccg

SEQ ID NO: 25991 - RNA, 22 nt, Homo sapiens
cuuccagucgaggauguuuaca

SEQ ID NO: 25992 - RNA, 22 nt, Homo sapiens
cuuccagucggggauguuuaca

SEQ ID NO: 25993 - RNA, 22 nt, Homo sapiens
cuuccagucaaggauguuuaca

SEQ ID NO: 25994 - RNA, 22 nt, Homo sapiens
gcggucccgcggcgccccgccu

SEQ ID NO: 25995 - RNA, 22 nt, Homo sapiens
ugcuguuagcccuagccccgca

SEQ ID NO: 25996 - RNA, 20 nt, Homo sapiens
cuggggaaaaggguggcacg

SEQ ID NO: 25997 - RNA, 22 nt, Homo sapiens
cuggagagacaaggggaagagg

SEQ ID NO: 25998 - RNA, 22 nt, Homo sapiens
cacgaccgacgccacgccgagu

SEQ ID NO: 25999 - RNA, 21 nt, Homo sapiens
gaccaaucgccguccccgccg

SEQ ID NO: 26000 - RNA, 20 nt, Homo sapiens
cccgccgcgucgcccugggg

SEQ ID NO: 26001 - RNA, 20 nt, Homo sapiens
acagcaaggagggcaggagg

SEQ ID NO: 26002 - RNA, 22 nt, Homo sapiens
ucagaccgagacaagugcaaug

SEQ ID NO: 26003 - RNA, 21 nt, Homo sapiens
uucuaggauaggcccaggggc

SEQ ID NO: 26004 - RNA, 22 nt, Homo sapiens
aggaaaccagcaaguguugacg

SEQ ID NO: 26005 - RNA, 20 nt, Homo sapiens
ggcauucaccgcgugccuua

SEQ ID NO: 26006 - RNA, 20 nt, Homo sapiens
ggcauucaccgcgugccuua

SEQ ID NO: 26007 - RNA, 22 nt, Homo sapiens
cagaaagugcuucccucuagag

SEQ ID NO: 26008 - RNA, 22 nt, Homo sapiens
cagaaagugcuucccucuagag

SEQ ID NO: 26009 - RNA, 21 nt, Homo sapiens
cacucugaagggaagcgcuuu

SEQ ID NO: 26010 - RNA, 21 nt, Homo sapiens
cacucugaagggaagcgcuuu

SEQ ID NO: 26011 - RNA, 21 nt, Homo sapiens
ccucuaaagagaagcgcuuuc

SEQ ID NO: 26012 - RNA, 21 nt, Homo sapiens
ccucuaaagagaagcgcuuuc

SEQ ID NO: 26013 - RNA, 22 nt, Homo sapiens
acacucuaaaaggaugcacuuu

SEQ ID NO: 26014 - RNA, 22 nt, Homo sapiens
acacucuaaaaggaugcacuuu

SEQ ID NO: 26015 - RNA, 22 nt, Homo sapiens
cagaaagcgcuucccucuagag

SEQ ID NO: 26016 - RNA, 22 nt, Homo sapiens
cagaaagcgcuucccucuagag

SEQ ID NO: 26017 - RNA, 22 nt, Homo sapiens
cagaaagcgcuucccucuagag

SEQ ID NO: 26018 - RNA, 22 nt, Homo sapiens
cagaaagcgcuucccucuagag

SEQ ID NO: 26019 - RNA, 22 nt, Homo sapiens
cagaaagugcuucccucuagag

SEQ ID NO: 26020 - RNA, 22 nt, Homo sapiens
cagaaagugcuucccucuagag

SEQ ID NO: 26021 - RNA, 22 nt, Homo sapiens
acacucuaaagggaaccauuuu

SEQ ID NO: 26022 - RNA, 22 nt, Homo sapiens
acacucuaaagggaaccauuuu

SEQ ID NO: 26023 - RNA, 23 nt, Homo sapiens
acccucuauagggaagcgcguuc

SEQ ID NO: 26024 - RNA, 23 nt, Homo sapiens
acccucuauagggaagcgcguuc

SEQ ID NO: 26025 - RNA, 22 nt, Homo sapiens
cagaaagugcuucccucuagag

SEQ ID NO: 26026 - RNA, 22 nt, Homo sapiens
cagaaagugcuucccucuagag

SEQ ID NO: 26027 - RNA, 21 nt, Homo sapiens
ggacuauagaacuuucccccu

SEQ ID NO: 26028 - RNA, 19 nt, Homo sapiens
gcucuaagaaagccacacu

SEQ ID NO: 26029 - RNA, 22 nt, Homo sapiens
gcggucccgcggcgccccgccu

SEQ ID NO: 26030 - RNA, 20 nt, Homo sapiens
cccugcgccaucuccucuac

SEQ ID NO: 26031 - RNA, 22 nt, Homo sapiens
caaacaccauugucacacucca

SEQ ID NO: 26032 - RNA, 18 nt, Homo sapiens
cccccaccaccacgcccg

SEQ ID NO: 26033 - RNA, 21 nt, Homo sapiens
gaccaaucgccguccccgccg

SEQ ID NO: 26034 - RNA, 21 nt, Homo sapiens
ccuucugacuccaaguccagu

SEQ ID NO: 26035 - RNA, 22 nt, Homo sapiens
gcggucccgcggcgccccgccu

SEQ ID NO: 26036 - RNA, 22 nt, Homo sapiens
ugcuguuagcccuagccccgca

SEQ ID NO: 26037 - RNA, 23 nt, Homo sapiens
accacaggagucugagcauuuga

SEQ ID NO: 26038 - RNA, 23 nt, Homo sapiens
ggaagccaucaagucgcugcagg

SEQ ID NO: 26039 - RNA, 20 nt, Homo sapiens
cucaaagcaaacccugcaga

SEQ ID NO: 26040 - RNA, 24 nt, Homo sapiens
gaagucacucccaggcagcugcaa

SEQ ID NO: 26041 - RNA, 22 nt, Homo sapiens
uccacauggaguugcuguuaca

SEQ ID NO: 26042 - RNA, 22 nt, Homo sapiens
cgaauccaccacgaacaacuuc

SEQ ID NO: 26043 - RNA, 23 nt, Homo sapiens
gggcucuuacucccucaggcacu

SEQ ID NO: 26044 - RNA, 23 nt, Homo sapiens
gucagaccccgagggguccucgc

SEQ ID NO: 26045 - RNA, 22 nt, Homo sapiens
gugggguggguggucaggccga

SEQ ID NO: 26046 - RNA, 22 nt, Homo sapiens
auccuucuacaaauucacccau

SEQ ID NO: 26047 - RNA, 21 nt, Homo sapiens
gaccaaucgccguccccgccg

SEQ ID NO: 26048 - RNA, 22 nt, Homo sapiens
ucagaccgagacaagugcaaug

SEQ ID NO: 26049 - RNA, 22 nt, Homo sapiens
gcggucccgcggcgccccgccu

SEQ ID NO: 26050 - RNA, 22 nt, Homo sapiens
ugcuguuagcccuagccccgca

SEQ ID NO: 26051 - RNA, 21 nt, Homo sapiens
caucaccuuccuucuccucca

SEQ ID NO: 26052 - RNA, 21 nt, Homo sapiens
gagcugcauccuggcuccggg

SEQ ID NO: 26053 - RNA, 21 nt, Homo sapiens
cugaggagagaggaggugggg

SEQ ID NO: 26054 - RNA, 22 nt, Homo sapiens
agacaacaaugccaaccucaca

SEQ ID NO: 26055 - RNA, 23 nt, Homo sapiens
gggagugaagacacggagccaga

SEQ ID NO: 26056 - RNA, 23 nt, Homo sapiens
aggaacagcagcagcccgggccg

SEQ ID NO: 26057 - RNA, 21 nt, Homo sapiens
uucuaggauaggcccaggggc

SEQ ID NO: 26058 - RNA, 22 nt, Homo sapiens
uacagauggauaccgugcaauu

SEQ ID NO: 26059 - RNA, 23 nt, Homo sapiens
aaagucucgcucucugccccuca

SEQ ID NO: 26060 - RNA, 22 nt, Homo sapiens
aguccagauucugugcccacca

SEQ ID NO: 26061 - RNA, 21 nt, Homo sapiens
aucagagguucagcuuacccu

SEQ ID NO: 26062 - RNA, 22 nt, Homo sapiens
gauccgagcaccggggaccccc

SEQ ID NO: 26063 - RNA, 22 nt, Homo sapiens
gcacauguucugcggcccacca

SEQ ID NO: 26064 - RNA, 21 nt, Homo sapiens
aaagagaccgguucacuguga

SEQ ID NO: 26065 - RNA, 24 nt, Homo sapiens
gaagucacucccaggcagcugcaa

SEQ ID NO: 26066 - RNA, 21 nt, Homo sapiens
gggcaucugggacgcgcagga

SEQ ID NO: 26067 - RNA, 23 nt, Homo sapiens
cccaacagacauggcgguacuca

SEQ ID NO: 26068 - RNA, 25 nt, Homo sapiens
agcuagucaagcgcgguuguggggg

SEQ ID NO: 26069 - RNA, 22 nt, Homo sapiens
cuguuccugcugaacugagcca

SEQ ID NO: 26070 - RNA, 21 nt, Homo sapiens
cccgaggagccgggcaggcuu

SEQ ID NO: 26071 - RNA, 19 nt, Homo sapiens
guccugaauuccgcagccu

SEQ ID NO: 26072 - RNA, 22 nt, Homo sapiens
ugcuguuagcccuagccccgca

SEQ ID NO: 26073 - RNA, 23 nt, Homo sapiens
aacaggugcucaaauaagacuug

SEQ ID NO: 26074 - RNA, 23 nt, Homo sapiens
cacugugggcccucuccgcacca

SEQ ID NO: 26075 - RNA, 23 nt, Homo sapiens
gucacaucccucccaagacccuc

SEQ ID NO: 26076 - RNA, 21 nt, Homo sapiens
auguaggccuuuagaucacuu

SEQ ID NO: 26077 - RNA, 21 nt, Homo sapiens
cggggugcacgggcggagggc

SEQ ID NO: 26078 - RNA, 23 nt, Homo sapiens
gggagugaagacacggagccaga

SEQ ID NO: 26079 - RNA, 21 nt, Homo sapiens
cccuccaccaugcaagggaug

SEQ ID NO: 26080 - RNA, 23 nt, Homo sapiens
cuaucugcacuagaugcaccuua

SEQ ID NO: 26081 - RNA, 20 nt, Homo sapiens
cccgccgcgucgcccugggg

SEQ ID NO: 26082 - RNA, 22 nt, Homo sapiens
ucaucucgcccgcaaagaccca

SEQ ID NO: 26083 - RNA, 21 nt, Homo sapiens
acaugguuagaucaagcacaa

SEQ ID NO: 26084 - RNA, 22 nt, Homo sapiens
ucagaccgagacaagugcaaug

SEQ ID NO: 26085 - RNA, 22 nt, Homo sapiens
aaucagucucauugcuuuauaa

SEQ ID NO: 26086 - RNA, 22 nt, Homo sapiens
aaucagucucauugcuuuauaa

SEQ ID NO: 26087 - RNA, 22 nt, Homo sapiens
acuucaaggaucuuaaacuuug

SEQ ID NO: 26088 - RNA, 23 nt, Homo sapiens
aggagaaggcaccaugggauuua

SEQ ID NO: 26089 - RNA, 25 nt, Homo sapiens
accaacggaccuacuucccuccgcc

SEQ ID NO: 26090 - RNA, 20 nt, Homo sapiens
uccccacagacccagagccg

SEQ ID NO: 26091 - RNA, 22 nt, Homo sapiens
ucggucccucgggccagggcag

SEQ ID NO: 26092 - RNA, 22 nt, Homo sapiens
uggugauucacaaagaaaucca

SEQ ID NO: 26093 - RNA, 24 nt, Homo sapiens
acugcaggcuccagcuuccaggcu

SEQ ID NO: 26094 - RNA, 22 nt, Homo sapiens
gccaccuucaaaugggaagucu

SEQ ID NO: 26095 - RNA, 21 nt, Homo sapiens
ccccucccagccucccugcca

SEQ ID NO: 26096 - RNA, 22 nt, Homo sapiens
acaccuggcuccacacgcgggc

SEQ ID NO: 26097 - RNA, 23 nt, Homo sapiens
cuaucugcacuagaugcaccuua

SEQ ID NO: 26098 - RNA, 22 nt, Homo sapiens
aggcauaggaugacaaagggaa

SEQ ID NO: 26099 - RNA, 22 nt, Homo sapiens
aggcgaaggaugacaaagggaa

SEQ ID NO: 26100 - RNA, 17 nt, Homo sapiens
aaacauggaagcaauua

SEQ ID NO: 26101 - RNA, 22 nt, Homo sapiens
auaaacgacaccuccuugagaa

SEQ ID NO: 26102 - RNA, 22 nt, Homo sapiens
ugcuguuagcccuagccccgca

SEQ ID NO: 26103 - RNA, 22 nt, Homo sapiens
ucggucccucgggccagggcag

SEQ ID NO: 26104 - RNA, 24 nt, Homo sapiens
gaaagugcauagaauucugucugg

SEQ ID NO: 26105 - RNA, 18 nt, Homo sapiens
auucaaucuacugccuca

SEQ ID NO: 26106 - RNA, 22 nt, Homo sapiens
ucaggaacugccuuucucucca

SEQ ID NO: 26107 - RNA, 22 nt, Homo sapiens
ccggcugcaacacaagacacga

SEQ ID NO: 26108 - RNA, 21 nt, Homo sapiens
gaccaaucgccguccccgccg

SEQ ID NO: 26109 - RNA, 22 nt, Homo sapiens
ucagaccgagacaagugcaaug

SEQ ID NO: 26110 - RNA, 24 nt, Homo sapiens
ugggagaaccucccugcuucugcu

SEQ ID NO: 26111 - RNA, 23 nt, Homo sapiens
agaggcaggcaugcgggcagaca

SEQ ID NO: 26112 - RNA, 21 nt, Homo sapiens
gcuccaaccucagcagacugu

SEQ ID NO: 26113 - RNA, 21 nt, Homo sapiens
ggacuauagaacuuucccccu

SEQ ID NO: 26114 - RNA, 19 nt, Homo sapiens
ucccacaggaagcagacac

SEQ ID NO: 26115 - RNA, 22 nt, Homo sapiens
caagacacauuuggagagggac

SEQ ID NO: 26116 - RNA, 25 nt, Homo sapiens
accaacggaccuacuucccuccgcc

SEQ ID NO: 26117 - RNA, 22 nt, Homo sapiens
gcggucccgcggcgccccgccu

SEQ ID NO: 26118 - RNA, 21 nt, Homo sapiens
ugacugacagcuuuuugagua

SEQ ID NO: 26119 - RNA, 24 nt, Homo sapiens
cacccccagagccucagcucccca

SEQ ID NO: 26120 - RNA, 22 nt, Homo sapiens
gaggcucagaauggcucaggag

SEQ ID NO: 26121 - RNA, 22 nt, Homo sapiens
cuagggaacacagggcugguga

SEQ ID NO: 26122 - RNA, 23 nt, Homo sapiens
cggccugauucacaacaccagcu

SEQ ID NO: 26123 - RNA, 22 nt, Homo sapiens
ucaucucgcccgcaaagaccca

SEQ ID NO: 26124 - RNA, 22 nt, Homo sapiens
agcgggacuuugagggccaguu

SEQ ID NO: 26125 - RNA, 22 nt, Homo sapiens
uaaccgauuucagauggugcua

SEQ ID NO: 26126 - RNA, 23 nt, Homo sapiens
aacacugauuucaaauggugcua

SEQ ID NO: 26127 - RNA, 22 nt, Homo sapiens
uaaccgauuucaaauggugcua

SEQ ID NO: 26128 - RNA, 23 nt, Homo sapiens
acauuuuucguuauugcucuuga

SEQ ID NO: 26129 - RNA, 23 nt, Homo sapiens
acaccccaaaaucgaagcacuuc

SEQ ID NO: 26130 - RNA, 22 nt, Homo sapiens
cacuuaucagguuguauuauaa

SEQ ID NO: 26131 - RNA, 22 nt, Homo sapiens
gagauuggccauguaauacuca

SEQ ID NO: 26132 - RNA, 23 nt, Homo sapiens
ucucacccagguagcaaggauua

SEQ ID NO: 26133 - RNA, 22 nt, Homo sapiens
ucucacccagggacaaaggauu

SEQ ID NO: 26134 - RNA, 22 nt, Homo sapiens
gugauugccacucuccugagua

SEQ ID NO: 26135 - RNA, 22 nt, Homo sapiens
aguccagauucugugcccacca

SEQ ID NO: 26136 - RNA, 22 nt, Homo sapiens
cugcucaaacccuccaaugacu

SEQ ID NO: 26137 - RNA, 22 nt, Homo sapiens
uccucuuuucuuagagacucac

SEQ ID NO: 26138 - RNA, 21 nt, Homo sapiens
ugacugacagcuuuuugagua

SEQ ID NO: 26139 - RNA, 22 nt, Homo sapiens
cacaaguucggaucuacggguu

SEQ ID NO: 26140 - RNA, 18 nt, Homo sapiens
acccucugaaaggaagca

SEQ ID NO: 26141 - RNA, 22 nt, Homo sapiens
aaagugcuucuuaccuccagau

SEQ ID NO: 26142 - RNA, 19 nt, Homo sapiens
ucccugauccaaaaaucca

SEQ ID NO: 26143 - RNA, 22 nt, Homo sapiens
agcccaaaaggagaauucuuug

SEQ ID NO: 26144 - RNA, 22 nt, Homo sapiens
gcaaaaguaauugagauuuuug

SEQ ID NO: 26145 - RNA, 21 nt, Homo sapiens
gugacucaucaccuauggaaa

SEQ ID NO: 26146 - RNA, 22 nt, Homo sapiens
ucaaugacucagguaaguugca

SEQ ID NO: 26147 - RNA, 23 nt, Homo sapiens
ggaagccaucaagucgcugcagg

SEQ ID NO: 26148 - RNA, 18 nt, Homo sapiens
uggcgccugaacagggac

SEQ ID NO: 26149 - RNA, 18 nt, Homo sapiens
aucacauucaccucccug

SEQ ID NO: 26150 - RNA, 23 nt, Homo sapiens
gggagugaagacacggagccaga

SEQ ID NO: 26151 - RNA, 23 nt, Homo sapiens
cuaccugcacuguaagcacuuug

SEQ ID NO: 26152 - RNA, 22 nt, Homo sapiens
cagaagugggccgggcacaggg

SEQ ID NO: 26153 - RNA, 20 nt, Homo sapiens
acagcaaggagggcaggagg

SEQ ID NO: 26154 - RNA, 22 nt, Homo sapiens
acugccugucugugccugcugu

SEQ ID NO: 26155 - RNA, 22 nt, Homo sapiens
agucuucacaacagcccugugu

SEQ ID NO: 26156 - RNA, 23 nt, Homo sapiens
ucucugcaggccgugugcuuugc

SEQ ID NO: 26157 - RNA, 22 nt, Homo sapiens
accagguuccaccccagcaggc

SEQ ID NO: 26158 - RNA, 22 nt, Homo sapiens
gcugccguauaugugaugucac

SEQ ID NO: 26159 - RNA, 20 nt, Homo sapiens
gaaagggcuucccuuugcag

SEQ ID NO: 26160 - RNA, 20 nt, Homo sapiens
gaaagggcuucccuuugcag

SEQ ID NO: 26161 - RNA, 19 nt, Homo sapiens
gccucagaggcagcugcuu

SEQ ID NO: 26162 - RNA, 21 nt, Homo sapiens
gaaggaagugagugcagccac

SEQ ID NO: 26163 - RNA, 23 nt, Homo sapiens
acaacaaaaucacuagucuucca

SEQ ID NO: 26164 - RNA, 21 nt, Homo sapiens
caucaccuuccuucuccucca

SEQ ID NO: 26165 - RNA, 23 nt, Homo sapiens
agaaaccaugggguaugagcaga

SEQ ID NO: 26166 - RNA, 21 nt, Homo sapiens
cuggaggacggcaacagucag

SEQ ID NO: 26167 - RNA, 22 nt, Homo sapiens
gugauugccacucuccugagua

SEQ ID NO: 26168 - RNA, 21 nt, Homo sapiens
agcgccuuuggcagcuagagu

SEQ ID NO: 26169 - RNA, 22 nt, Homo sapiens
aacccauggaauucaguucuca

SEQ ID NO: 26170 - RNA, 22 nt, Homo sapiens
agccuauggaauucaguucuca

SEQ ID NO: 26171 - RNA, 22 nt, Homo sapiens
aucgggaggggacugagccuga

SEQ ID NO: 26172 - RNA, 22 nt, Homo sapiens
gagguuucccguguauguuuca

SEQ ID NO: 26173 - RNA, 21 nt, Homo sapiens
cccgaggagccgggcaggcuu

SEQ ID NO: 26174 - RNA, 21 nt, Homo sapiens
aguucucccaacguaaaccca

SEQ ID NO: 26175 - RNA, 20 nt, Homo sapiens
aggggccucagccuccuggu

SEQ ID NO: 26176 - RNA, 26 nt, Homo sapiens
uuucagaauuugcugccaucaucauc

SEQ ID NO: 26177 - RNA, 22 nt, Homo sapiens
caaacaccauugucacacucca

SEQ ID NO: 26178 - RNA, 22 nt, Homo sapiens
ugagugcuugcuaggugccaag

SEQ ID NO: 26179 - RNA, 22 nt, Homo sapiens
auagaugauaugcacaguacua

SEQ ID NO: 26180 - RNA, 22 nt, Homo sapiens
aggucucacuuuguugcccaga

SEQ ID NO: 26181 - RNA, 21 nt, Homo sapiens
agcuaugccagcaucuugccu

SEQ ID NO: 26182 - RNA, 22 nt, Homo sapiens
aagaagugcaccauguuuguuu

SEQ ID NO: 26183 - RNA, 25 nt, Homo sapiens
aaggagcucagaagcccugcccagc

SEQ ID NO: 26184 - RNA, 23 nt, Homo sapiens
uggcccugacacgugguacugga

SEQ ID NO: 26185 - RNA, 23 nt, Homo sapiens
agcaaaaaugugcuagugccaaa

SEQ ID NO: 26186 - RNA, 20 nt, Homo sapiens
aggggccucagccuccuggu

SEQ ID NO: 26187 - RNA, 18 nt, Homo sapiens
aucacauucaccucccug

SEQ ID NO: 26188 - RNA, 22 nt, Homo sapiens
uacagauggauaccgugcaauu

SEQ ID NO: 26189 - RNA, 25 nt, Homo sapiens
acggagcugucccaacaccaccccu

SEQ ID NO: 26190 - RNA, 22 nt, Homo sapiens
gguucaguuguucaaccaguua

SEQ ID NO: 26191 - RNA, 21 nt, Homo sapiens
ccgugguucuacccuguggua

SEQ ID NO: 26192 - RNA, 22 nt, Homo sapiens
agcccaaaaggagaauucuuug

SEQ ID NO: 26193 - RNA, 22 nt, Homo sapiens
cugcgauuccucccucuacugu

SEQ ID NO: 26194 - RNA, 22 nt, Homo sapiens
uccacauggaguugcuguuaca

SEQ ID NO: 26195 - RNA, 25 nt, Homo sapiens
aggccgccacccgcccgcgaucccu

SEQ ID NO: 26196 - RNA, 17 nt, Homo sapiens
gggagaggaggaggcga

SEQ ID NO: 26197 - RNA, 22 nt, Homo sapiens
cacugguacaaggguugggaga

SEQ ID NO: 26198 - RNA, 22 nt, Homo sapiens
cacucagcggccguuuccccaa

SEQ ID NO: 26199 - RNA, 21 nt, Homo sapiens
ccccucccagccucccugcca

SEQ ID NO: 26200 - RNA, 20 nt, Homo sapiens
aggggccucagccuccuggu

SEQ ID NO: 26201 - RNA, 22 nt, Homo sapiens
aggucucacuuuguugcccaga

SEQ ID NO: 26202 - RNA, 23 nt, Homo sapiens
gggagugaagacacggagccaga

SEQ ID NO: 26203 - RNA, 25 nt, Homo sapiens
aaggagcucagaagcccugcccagc

SEQ ID NO: 26204 - RNA, 23 nt, Homo sapiens
cacaaauucggaucuacagggua

SEQ ID NO: 26205 - RNA, 23 nt, Homo sapiens
cacaaauucgguucuacagggua

SEQ ID NO: 26206 - RNA, 22 nt, Homo sapiens
cuagggaacacagggcugguga

SEQ ID NO: 26207 - RNA, 21 nt, Homo sapiens
aaagagaccgguucacuguga

SEQ ID NO: 26208 - RNA, 23 nt, Homo sapiens
cggccugauucacaacaccagcu

SEQ ID NO: 26209 - RNA, 22 nt, Homo sapiens
uccagcaaagggaagcgcuuuc

SEQ ID NO: 26210 - RNA, 22 nt, Homo sapiens
accucuaaaggggagcgcuuug

SEQ ID NO: 26211 - RNA, 23 nt, Homo sapiens
acacucuaaagagaagcgcuuug

SEQ ID NO: 26212 - RNA, 21 nt, Homo sapiens
gcuccaaagggaagcgcuuug

SEQ ID NO: 26213 - RNA, 21 nt, Homo sapiens
ccucuaaagagaagcgcuuuc

SEQ ID NO: 26214 - RNA, 21 nt, Homo sapiens
ggggagcgggggcccugccuu

SEQ ID NO: 26215 - RNA, 23 nt, Homo sapiens
ucauacagcuagauaaccaaaga

SEQ ID NO: 26216 - RNA, 23 nt, Homo sapiens
cacugugggcccucuccgcacca

SEQ ID NO: 26217 - RNA, 22 nt, Homo sapiens
aaaguaacugcaguuuuugcua

SEQ ID NO: 26218 - RNA, 18 nt, Homo sapiens
aucacauucaccucccug

SEQ ID NO: 26219 - RNA, 22 nt, Homo sapiens
acuccaacagggccgcgucucc

SEQ ID NO: 26220 - RNA, 23 nt, Homo sapiens
gggagugaagacacggagccaga

SEQ ID NO: 26221 - RNA, 21 nt, Homo sapiens
gggcaucugggacgcgcagga

SEQ ID NO: 26222 - RNA, 22 nt, Homo sapiens
cacaaaccauuaugugcugcua

SEQ ID NO: 26223 - RNA, 22 nt, Homo sapiens
uguaaaccaugaugugcugcua

SEQ ID NO: 26224 - RNA, 22 nt, Homo sapiens
cgccaauauuuacgugcugcua

SEQ ID NO: 26225 - RNA, 22 nt, Homo sapiens
cagaagugggccgggcacaggg

SEQ ID NO: 26226 - RNA, 22 nt, Homo sapiens
ucaacaucagucugauaagcua

SEQ ID NO: 26227 - RNA, 21 nt, Homo sapiens
acaaaccacagugugcugcug

SEQ ID NO: 26228 - RNA, 22 nt, Homo sapiens
auccuucuacaaauucacccau

SEQ ID NO: 26229 - RNA, 18 nt, Homo sapiens
uggcgccugaacagggac

SEQ ID NO: 26230 - RNA, 17 nt, Homo sapiens
uggcgcccgaacaggga

SEQ ID NO: 26231 - RNA, 21 nt, Homo sapiens
gaccaaucgccguccccgccg

SEQ ID NO: 26232 - RNA, 22 nt, Homo sapiens
agcgggacuuugagggccaguu

SEQ ID NO: 26233 - RNA, 22 nt, Homo sapiens
agcugaguguaggauguuuaca

SEQ ID NO: 26234 - RNA, 22 nt, Homo sapiens
ucaccauugcuaaagugcaauu

SEQ ID NO: 26235 - RNA, 22 nt, Homo sapiens
gaauucaucacggccagccucu

SEQ ID NO: 26236 - RNA, 22 nt, Homo sapiens
gcugccguauaugugaugucac

SEQ ID NO: 26237 - RNA, 22 nt, Homo sapiens
agcacagacuugcugugauguu

SEQ ID NO: 26238 - RNA, 23 nt, Homo sapiens
ucucacccagguagcaaggauua

SEQ ID NO: 26239 - RNA, 22 nt, Homo sapiens
aguccagauucugugcccacca

SEQ ID NO: 26240 - RNA, 22 nt, Homo sapiens
gcggucccgcggcgccccgccu

SEQ ID NO: 26241 - RNA, 21 nt, Homo sapiens
caucaccuuccuucuccucca

SEQ ID NO: 26242 - RNA, 22 nt, Homo sapiens
cacucuaaagggaggcacuuug

SEQ ID NO: 26243 - RNA, 20 nt, Homo sapiens
gcagaagcauuuccacacac

SEQ ID NO: 26244 - RNA, 19 nt, Homo sapiens
agaaaccccagcagagaca

SEQ ID NO: 26245 - RNA, 17 nt, Homo sapiens
ggguggcagcgguggga

SEQ ID NO: 26246 - RNA, 22 nt, Homo sapiens
cagacuccgguggaaugaagga

SEQ ID NO: 26247 - RNA, 23 nt, Homo sapiens
cuccagccccuccagggcuuccu

SEQ ID NO: 26248 - RNA, 22 nt, Homo sapiens
agcccaaaaggagaauucuuug

SEQ ID NO: 26249 - RNA, 21 nt, Homo sapiens
cucccccacugcagcuggcac

SEQ ID NO: 26250 - RNA, 22 nt, Homo sapiens
cugggggcggcacaggggcuca

SEQ ID NO: 26251 - RNA, 22 nt, Homo sapiens
agagcaagaccccgucucuaaa

SEQ ID NO: 26252 - RNA, 23 nt, Homo sapiens
cagcugcuuuugggauuccguug

SEQ ID NO: 26253 - RNA, 22 nt, Homo sapiens
uacagauggauaccgugcaauu

SEQ ID NO: 26254 - RNA, 21 nt, Homo sapiens
acuccaaagggaagcgccuuc

SEQ ID NO: 26255 - RNA, 22 nt, Homo sapiens
cgcucuaaagggaagcgccuuc

SEQ ID NO: 26256 - RNA, 21 nt, Homo sapiens
gguggagcccugagaaccgga

SEQ ID NO: 26257 - RNA, 22 nt, Homo sapiens
gggagaggucucccugcgcaca

SEQ ID NO: 26258 - RNA, 23 nt, Homo sapiens
gcacaugugcacacagccgggug

SEQ ID NO: 26259 - RNA, 23 nt, Homo sapiens
ggaagccaucaagucgcugcagg

SEQ ID NO: 26260 - RNA, 20 nt, Homo sapiens
cucaaagcaaacccugcaga

SEQ ID NO: 26261 - RNA, 21 nt, Homo sapiens
aaagagaccgguucacuguga

SEQ ID NO: 26262 - RNA, 17 nt, Homo sapiens
gggagaggaggaggcga

SEQ ID NO: 26263 - RNA, 24 nt, Homo sapiens
gaagucacucccaggcagcugcaa

SEQ ID NO: 26264 - RNA, 20 nt, Homo sapiens
acagcaaggagggcaggagg

SEQ ID NO: 26265 - RNA, 22 nt, Homo sapiens
aagcgguuuaccaucccacaua

SEQ ID NO: 26266 - RNA, 22 nt, Homo sapiens
agcugaguguaggauguuuaca

SEQ ID NO: 26267 - RNA, 22 nt, Homo sapiens
ucaccauugcuaaagugcaauu

SEQ ID NO: 26268 - RNA, 21 nt, Homo sapiens
uugucuaaccagucaccuguu

SEQ ID NO: 26269 - RNA, 19 nt, Homo sapiens
ucccacaggaagcagacac

SEQ ID NO: 26270 - RNA, 22 nt, Homo sapiens
gacucuugaacaacacagguuu

SEQ ID NO: 26271 - RNA, 22 nt, Homo sapiens
auacauacuucuuuacauucca

SEQ ID NO: 26272 - RNA, 21 nt, Homo sapiens
cugggggacggagcagaagga

SEQ ID NO: 26273 - RNA, 18 nt, Homo sapiens
uggcgccugaacagggac

SEQ ID NO: 26274 - RNA, 17 nt, Homo sapiens
uggcgcccgaacaggga

SEQ ID NO: 26275 - RNA, 22 nt, Homo sapiens
agagcaagaccccgucucuaaa

SEQ ID NO: 26276 - RNA, 22 nt, Homo sapiens
ccacacacuuccuuacauucca

SEQ ID NO: 26277 - RNA, 22 nt, Homo sapiens
ggagagccuccacccaacccuc

SEQ ID NO: 26278 - RNA, 24 nt, Homo sapiens
ugggagaaccucccugcuucugcu

SEQ ID NO: 26279 - RNA, 22 nt, Homo sapiens
uacagauggauaccgugcaauu

SEQ ID NO: 26280 - RNA, 23 nt, Homo sapiens
ccacccaaugaccuacuccaaga

SEQ ID NO: 26281 - RNA, 22 nt, Homo sapiens
gccagcuaacaauacacugccu

SEQ ID NO: 26282 - RNA, 20 nt, Homo sapiens
ggcaaagaaggaacauuccu

SEQ ID NO: 26283 - RNA, 23 nt, Homo sapiens
cacaaauucggaucuacagggua

SEQ ID NO: 26284 - RNA, 23 nt, Homo sapiens
cacaaauucgguucuacagggua

SEQ ID NO: 26285 - RNA, 23 nt, Homo sapiens
ggaagccaucaagucgcugcagg

SEQ ID NO: 26286 - RNA, 21 nt, Homo sapiens
uggggauuacacuucaacagg

SEQ ID NO: 26287 - RNA, 25 nt, Homo sapiens
cagcgucugccggaacccguuccca

SEQ ID NO: 26288 - RNA, 22 nt, Homo sapiens
acaaaguucugugaugcacuga

SEQ ID NO: 26289 - RNA, 23 nt, Homo sapiens
cuaccugcacuguaagcacuuug

SEQ ID NO: 26290 - RNA, 22 nt, Homo sapiens
cagaagugggccgggcacaggg

SEQ ID NO: 26291 - RNA, 22 nt, Homo sapiens
ucacaguugccagcugagauua

SEQ ID NO: 26292 - RNA, 22 nt, Homo sapiens
agucuucacaacagcccugugu

SEQ ID NO: 26293 - RNA, 23 nt, Homo sapiens
gcgcccaauuaaugucuguugau

SEQ ID NO: 26294 - RNA, 22 nt, Homo sapiens
auauuaggaacacaucgcaaaa

SEQ ID NO: 26295 - RNA, 22 nt, Homo sapiens
caugauugccacgucugcagua

SEQ ID NO: 26296 - RNA, 21 nt, Homo sapiens
ugauugccacugucugcagua

SEQ ID NO: 26297 - RNA, 21 nt, Homo sapiens
ugacugcagagcaaaagacac

SEQ ID NO: 26298 - RNA, 19 nt, Homo sapiens
ucccacaggaagcagacac

SEQ ID NO: 26299 - RNA, 23 nt, Homo sapiens
acagcgcucgcaaccgcagcgau

SEQ ID NO: 26300 - RNA, 22 nt, Homo sapiens
ugaauuacuuuguaaaccacca

SEQ ID NO: 26301 - RNA, 26 nt, Homo sapiens
aaccaucucauacaaaccaacuacuu

SEQ ID NO: 26302 - RNA, 21 nt, Homo sapiens
uuccacgaccuaauccuaacu

SEQ ID NO: 26303 - RNA, 19 nt, Homo sapiens
aagccaaagccuuauccau

SEQ ID NO: 26304 - RNA, 19 nt, Homo sapiens
ucccugauccaaaaaucca

SEQ ID NO: 26305 - RNA, 23 nt, Homo sapiens
ucaguuuugcauagauuugcaca

SEQ ID NO: 26306 - RNA, 23 nt, Homo sapiens
ucaguuuugcauggauuugcaca

SEQ ID NO: 26307 - RNA, 22 nt, Homo sapiens
aagaagugcaccauguuuguuu

SEQ ID NO: 26308 - RNA, 21 nt, Homo sapiens
uucacuccaaaaggugcaaaa

SEQ ID NO: 26309 - RNA, 23 nt, Homo sapiens
ucucgugacaugaugauccccga

SEQ ID NO: 26310 - RNA, 22 nt, Homo sapiens
gcaaaaguaauugagauuuuug

SEQ ID NO: 26311 - RNA, 23 nt, Homo sapiens
agacaaggcccacccgugcaaac

SEQ ID NO: 26312 - RNA, 23 nt, Homo sapiens
aggagaaggcaccaugggauuua

SEQ ID NO: 26313 - RNA, 22 nt, Homo sapiens
ggcagagagucagagcgcggau

SEQ ID NO: 26314 - RNA, 22 nt, Homo sapiens
gaggcucagaauggcucaggag

SEQ ID NO: 26315 - RNA, 22 nt, Homo sapiens
cgaccauggcuguagacuguua

SEQ ID NO: 26316 - RNA, 21 nt, Homo sapiens
auguaggccuuuagaucacuu

SEQ ID NO: 26317 - RNA, 21 nt, Homo sapiens
ggccgugacuggagacuguua

SEQ ID NO: 26318 - RNA, 20 nt, Homo sapiens
cuggaggaagggcccagagg

SEQ ID NO: 26319 - RNA, 22 nt, Homo sapiens
gccuaagacacaggcccagaga

SEQ ID NO: 26320 - RNA, 21 nt, Homo sapiens
ugcaaugcaacuacaaugcac

SEQ ID NO: 26321 - RNA, 22 nt, Homo sapiens
ucaguuuccucugcaaacaguu

SEQ ID NO: 26322 - RNA, 22 nt, Homo sapiens
auaaacgacaccuccuugagaa

SEQ ID NO: 26323 - RNA, 23 nt, Homo sapiens
acagaaagugcuucccucaagag

SEQ ID NO: 26324 - RNA, 22 nt, Homo sapiens
acacaccaaggauaauuucucc

SEQ ID NO: 26325 - RNA, 23 nt, Homo sapiens
cacaaauucggaucuacagggua

SEQ ID NO: 26326 - RNA, 23 nt, Homo sapiens
cacaaauucgguucuacagggua

SEQ ID NO: 26327 - RNA, 18 nt, Homo sapiens
gaaaugagggccagcuga

SEQ ID NO: 26328 - RNA, 19 nt, Homo sapiens
ccaccucccgaguccucac

SEQ ID NO: 26329 - RNA, 23 nt, Homo sapiens
aaucuacuuucuuugcucauccu

SEQ ID NO: 26330 - RNA, 22 nt, Homo sapiens
aaccacuuucuuugcucauccg

SEQ ID NO: 26331 - RNA, 21 nt, Homo sapiens
ccgugguucuacccuguggua

SEQ ID NO: 26332 - RNA, 23 nt, Homo sapiens
gggagugaagacacggagccaga

SEQ ID NO: 26333 - RNA, 22 nt, Homo sapiens
cagaaagugcuucccucuagag

SEQ ID NO: 26334 - RNA, 21 nt, Homo sapiens
ugcaaacccugcaugugggag

SEQ ID NO: 26335 - RNA, 21 nt, Homo sapiens
gaccaaucgccguccccgccg

SEQ ID NO: 26336 - RNA, 22 nt, Homo sapiens
uggcagcagcggagggggcaga

SEQ ID NO: 26337 - RNA, 22 nt, Homo sapiens
uccacauggaguugcuguuaca

SEQ ID NO: 26338 - RNA, 21 nt, Homo sapiens
gugacagagccaagcacaaau

SEQ ID NO: 26339 - RNA, 22 nt, Homo sapiens
agcugaguguaggauguuuaca

SEQ ID NO: 26340 - RNA, 20 nt, Homo sapiens
ccagcagcaccuggggcagu

SEQ ID NO: 26341 - RNA, 23 nt, Homo sapiens
cgugagcuccuggaggacaggga

SEQ ID NO: 26342 - RNA, 23 nt, Homo sapiens
aaaucagaaucacaccuggggga

SEQ ID NO: 26343 - RNA, 21 nt, Homo sapiens
auccuguacugagcugccccg

SEQ ID NO: 26344 - RNA, 22 nt, Homo sapiens
ccucauggaaggguuccccacu

SEQ ID NO: 26345 - RNA, 23 nt, Homo sapiens
aagaaucuugucccgcagguccu

SEQ ID NO: 26346 - RNA, 18 nt, Homo sapiens
augacaccucccugugaa

SEQ ID NO: 26347 - RNA, 22 nt, Homo sapiens
ugcaagccuugggugugggagg

SEQ ID NO: 26348 - RNA, 23 nt, Homo sapiens
ugcgggcgggacgagcaagcaca

SEQ ID NO: 26349 - RNA, 24 nt, Homo sapiens
acgcagagcccgaaagcccccagu

SEQ ID NO: 26350 - RNA, 22 nt, Homo sapiens
gcggucccgcggcgccccgccu

SEQ ID NO: 26351 - RNA, 22 nt, Homo sapiens
ugcuguuagcccuagccccgca

SEQ ID NO: 26352 - RNA, 21 nt, Homo sapiens
ugacugacagcuuuuugagua

SEQ ID NO: 26353 - RNA, 24 nt, Homo sapiens
cacccccagagccucagcucccca

SEQ ID NO: 26354 - RNA, 21 nt, Homo sapiens
ucuccagaucagggcagucca

SEQ ID NO: 26355 - RNA, 22 nt, Homo sapiens
uggcagcagcggagggggcaga

SEQ ID NO: 26356 - RNA, 22 nt, Homo sapiens
ucagccgcugucacacgcacag

SEQ ID NO: 26357 - RNA, 21 nt, Homo sapiens
aacggaaccacuagugacuug

SEQ ID NO: 26358 - RNA, 21 nt, Homo sapiens
caugcacaugcacacauacau

SEQ ID NO: 26359 - RNA, 20 nt, Homo sapiens
ccagcagcaccuggggcagu

SEQ ID NO: 26360 - RNA, 22 nt, Homo sapiens
auggcaguggaguuagugauug

SEQ ID NO: 26361 - RNA, 23 nt, Homo sapiens
aaagucucgcucucugccccuca

SEQ ID NO: 26362 - RNA, 21 nt, Homo sapiens
auccuguacugagcugccccg

SEQ ID NO: 26363 - RNA, 18 nt, Homo sapiens
aucacauucaccucccug

SEQ ID NO: 26364 - RNA, 22 nt, Homo sapiens
acuccaacagggccgcgucucc

SEQ ID NO: 26365 - RNA, 23 nt, Homo sapiens
gggagugaagacacggagccaga

SEQ ID NO: 26366 - RNA, 22 nt, Homo sapiens
ucaggaacugccuuucucucca

SEQ ID NO: 26367 - RNA, 22 nt, Homo sapiens
cagaagugggccgggcacaggg

SEQ ID NO: 26368 - RNA, 22 nt, Homo sapiens
aggcauaggaugacaaagggaa

SEQ ID NO: 26369 - RNA, 22 nt, Homo sapiens
aggcgaaggaugacaaagggaa

SEQ ID NO: 26370 - RNA, 22 nt, Homo sapiens
cagcauggaguccuccagguug

SEQ ID NO: 26371 - RNA, 24 nt, Homo sapiens
acugggcacaaacauguccagguc

SEQ ID NO: 26372 - RNA, 22 nt, Homo sapiens
agcucagaacccagaggucuca

SEQ ID NO: 26373 - RNA, 22 nt, Homo sapiens
ucggucccucgggccagggcag

SEQ ID NO: 26374 - RNA, 23 nt, Homo sapiens
aacaggugcucaaauaagacuug

SEQ ID NO: 26375 - RNA, 21 nt, Homo sapiens
gcaagcccagaccgcaaaaag

SEQ ID NO: 26376 - RNA, 22 nt, Homo sapiens
ucaguuuccucugcaaacaguu

SEQ ID NO: 26377 - RNA, 24 nt, Homo sapiens
agugugaguucuaccauugccaaa

SEQ ID NO: 26378 - RNA, 21 nt, Homo sapiens
gccaauauuucugugcugcua

SEQ ID NO: 26379 - RNA, 22 nt, Homo sapiens
ugggguauuugacaaacugaca

SEQ ID NO: 26380 - RNA, 23 nt, Homo sapiens
ucucugcaggccgugugcuuugc

SEQ ID NO: 26381 - RNA, 22 nt, Homo sapiens
cacucagcaccaggauauuguu

SEQ ID NO: 26382 - RNA, 22 nt, Homo sapiens
gccagcuaacaauacacugccu

SEQ ID NO: 26383 - RNA, 21 nt, Homo sapiens
cugaaaccaaguaugggucgc

SEQ ID NO: 26384 - RNA, 19 nt, Homo sapiens
ucagcaguaccagccuaga

SEQ ID NO: 26385 - RNA, 26 nt, Homo sapiens
uuucagaauuugcugccaucaucauc

SEQ ID NO: 26386 - RNA, 21 nt, Homo sapiens
aaagagaccgguucacuguga

SEQ ID NO: 26387 - RNA, 21 nt, Homo sapiens
gcaagcccagaccgcaaaaag

SEQ ID NO: 26388 - RNA, 21 nt, Homo sapiens
ccgugguucuacccuguggua

SEQ ID NO: 26389 - RNA, 22 nt, Homo sapiens
ccaucuuuaccagacaguguua

SEQ ID NO: 26390 - RNA, 21 nt, Homo sapiens
aggcggcaggcacaggacugg

SEQ ID NO: 26391 - RNA, 23 nt, Homo sapiens
cccaacagacauggcgguacuca

SEQ ID NO: 26392 - RNA, 22 nt, Homo sapiens
acaucguuaccagacaguguua

SEQ ID NO: 26393 - RNA, 21 nt, Homo sapiens
accuauccugaauuacuugaa

SEQ ID NO: 26394 - RNA, 21 nt, Homo sapiens
gcggaacuuagccacugugaa

SEQ ID NO: 26395 - RNA, 21 nt, Homo sapiens
gcagaacuuagccacugugaa

SEQ ID NO: 26396 - RNA, 23 nt, Homo sapiens
ucucugcaggccgugugcuuugc

SEQ ID NO: 26397 - RNA, 21 nt, Homo sapiens
acaaaccacagugugcugcug

SEQ ID NO: 26398 - RNA, 20 nt, Homo sapiens
gaaagggcuucccuuugcag

SEQ ID NO: 26399 - RNA, 20 nt, Homo sapiens
gaaagggcuucccuuugcag

SEQ ID NO: 26400 - RNA, 22 nt, Homo sapiens
gcaaaagaaacugugguuuuug

SEQ ID NO: 26401 - RNA, 22 nt, Homo sapiens
aaaguaacugcaguuuuugcua

SEQ ID NO: 26402 - RNA, 19 nt, Homo sapiens
auuuugguacagcagcuca

SEQ ID NO: 26403 - RNA, 20 nt, Homo sapiens
ugggccaccgccgagcggac

SEQ ID NO: 26404 - RNA, 21 nt, Homo sapiens
acaauccuagagcacaagaag

SEQ ID NO: 26405 - RNA, 22 nt, Homo sapiens
cucagagcagacgugguucuca

SEQ ID NO: 26406 - RNA, 21 nt, Homo sapiens
agguaauaccaauaccuugug

SEQ ID NO: 26407 - RNA, 19 nt, Homo sapiens
gccucagaggcagcugcuu

SEQ ID NO: 26408 - RNA, 22 nt, Homo sapiens
cgggacguccagacucaacucu

SEQ ID NO: 26409 - RNA, 22 nt, Homo sapiens
cagaaagugcuucccucuagag

SEQ ID NO: 26410 - RNA, 22 nt, Homo sapiens
gagcccuggacuaggagucagc

SEQ ID NO: 26411 - RNA, 22 nt, Homo sapiens
ugugggugugugcaugagcgug

SEQ ID NO: 26412 - RNA, 23 nt, Homo sapiens
ggaagccaucaagucgcugcagg

SEQ ID NO: 26413 - RNA, 20 nt, Homo sapiens
cucaaagcaaacccugcaga

SEQ ID NO: 26414 - RNA, 21 nt, Homo sapiens
ggucagaacccaucauucacu

SEQ ID NO: 26415 - RNA, 22 nt, Homo sapiens
ggcucccaagaaccucaccugu

SEQ ID NO: 26416 - RNA, 23 nt, Homo sapiens
aggaacagcagcagcccgggccg

SEQ ID NO: 26417 - RNA, 21 nt, Homo sapiens
aggcggcaggcacaggacugg

SEQ ID NO: 26418 - RNA, 21 nt, Homo sapiens
acccaguagccagauguagcu

SEQ ID NO: 26419 - RNA, 22 nt, Homo sapiens
uacagauggauaccgugcaauu

SEQ ID NO: 26420 - RNA, 23 nt, Homo sapiens
acggcuaguggaccaggugaagu

SEQ ID NO: 26421 - RNA, 20 nt, Homo sapiens
gaaagggcuucccuuugcag

SEQ ID NO: 26422 - RNA, 20 nt, Homo sapiens
gaaagggcuucccuuugcag

SEQ ID NO: 26423 - RNA, 22 nt, Homo sapiens
guccaaaguuggggugcugguu

SEQ ID NO: 26424 - RNA, 22 nt, Homo sapiens
ccucaggcacggccgggccacc

SEQ ID NO: 26425 - RNA, 22 nt, Homo sapiens
cuuccagucgaggauguuuaca

SEQ ID NO: 26426 - RNA, 22 nt, Homo sapiens
cuuccagucggggauguuuaca

SEQ ID NO: 26427 - RNA, 22 nt, Homo sapiens
cuuccagucaaggauguuuaca

SEQ ID NO: 26428 - RNA, 20 nt, Homo sapiens
cugcgggaggacagggcuca

SEQ ID NO: 26429 - RNA, 25 nt, Homo sapiens
cagcgucugccggaacccguuccca

SEQ ID NO: 26430 - RNA, 22 nt, Homo sapiens
cacugguacaaggguugggaga

SEQ ID NO: 26431 - RNA, 22 nt, Homo sapiens
ucagaccgagacaagugcaaug

SEQ ID NO: 26432 - RNA, 21 nt, Homo sapiens
acaggauugagggggggcccu

SEQ ID NO: 26433 - RNA, 22 nt, Homo sapiens
agcugaguguaggauguuuaca

SEQ ID NO: 26434 - RNA, 23 nt, Homo sapiens
cggcucugucgucgaggcgcuca

SEQ ID NO: 26435 - RNA, 23 nt, Homo sapiens
cugcagaacuguucccgcugcua

SEQ ID NO: 26436 - RNA, 22 nt, Homo sapiens
aggaaaccagcaaguguugacg

SEQ ID NO: 26437 - RNA, 21 nt, Homo sapiens
guucuaacccauuguggccaa

SEQ ID NO: 26438 - RNA, 23 nt, Homo sapiens
acagcgcucgcaaccgcagcgau

SEQ ID NO: 26439 - RNA, 19 nt, Homo sapiens
gcucuaagaaagccacacu

SEQ ID NO: 26440 - RNA, 22 nt, Homo sapiens
ugcuguuagcccuagccccgca

SEQ ID NO: 26441 - RNA, 21 nt, Homo sapiens
caucaccuuccuucuccucca

SEQ ID NO: 26442 - RNA, 22 nt, Homo sapiens
cugggggcggcacaggggcuca

SEQ ID NO: 26443 - RNA, 22 nt, Homo sapiens
agacaacaaugccaaccucaca

SEQ ID NO: 26444 - RNA, 19 nt, Homo sapiens
cagcaucagcagcaucauc

SEQ ID NO: 26445 - RNA, 22 nt, Homo sapiens
cggugagcacccggccccugcg

SEQ ID NO: 26446 - RNA, 22 nt, Homo sapiens
ugagccacugugccuggccuga

SEQ ID NO: 26447 - RNA, 22 nt, Homo sapiens
ugagccacugugccuggccuga

SEQ ID NO: 26448 - RNA, 22 nt, Homo sapiens
acugccugucugugccugcugu

SEQ ID NO: 26449 - RNA, 22 nt, Homo sapiens
acaaccagcuaagacacugcca

SEQ ID NO: 26450 - RNA, 23 nt, Homo sapiens
aaaucagaaucacaccuggggga

SEQ ID NO: 26451 - RNA, 22 nt, Homo sapiens
accagguuccaccccagcaggc

SEQ ID NO: 26452 - RNA, 25 nt, Homo sapiens
acggagcugucccaacaccaccccu

SEQ ID NO: 26453 - RNA, 24 nt, Homo sapiens
acgcagagcccgaaagcccccagu

SEQ ID NO: 26454 - RNA, 19 nt, Homo sapiens
ucagcaguaccagccuaga

SEQ ID NO: 26455 - RNA, 21 nt, Homo sapiens
gaaggaagugagugcagccac

SEQ ID NO: 26456 - RNA, 20 nt, Homo sapiens
uacugcuuccacagcucccc

SEQ ID NO: 26457 - RNA, 22 nt, Homo sapiens
gggagaggucucccugcgcaca

SEQ ID NO: 26458 - RNA, 20 nt, Homo sapiens
cuggaggaagggcccagagg

SEQ ID NO: 26459 - RNA, 22 nt, Homo sapiens
gccuaagacacaggcccagaga

SEQ ID NO: 26460 - RNA, 22 nt, Homo sapiens
gcugccguauaugugaugucac

SEQ ID NO: 26461 - RNA, 22 nt, Homo sapiens
auggcaguggaguuagugauug

SEQ ID NO: 26462 - RNA, 22 nt, Homo sapiens
ucaggaacugccuuucucucca

SEQ ID NO: 26463 - RNA, 22 nt, Homo sapiens
gggagaggucucccugcgcaca

SEQ ID NO: 26464 - RNA, 22 nt, Homo sapiens
ucaggaacugccuuucucucca

SEQ ID NO: 26465 - RNA, 23 nt, Homo sapiens
aagaaucuugucccgcagguccu

SEQ ID NO: 26466 - RNA, 22 nt, Homo sapiens
cagaagugggccgggcacaggg

SEQ ID NO: 26467 - RNA, 23 nt, Homo sapiens
ugcgggcgggacgagcaagcaca

SEQ ID NO: 26468 - RNA, 21 nt, Homo sapiens
acuagacugugagcuccucga

SEQ ID NO: 26469 - RNA, 23 nt, Homo sapiens
acacagcucuuccauaucuccag

SEQ ID NO: 26470 - RNA, 20 nt, Homo sapiens
auuucuauaucuaucuccau

SEQ ID NO: 26471 - RNA, 22 nt, Homo sapiens
cugggggcggcacaggggcuca

SEQ ID NO: 26472 - RNA, 20 nt, Homo sapiens
uccccacagacccagagccg

SEQ ID NO: 26473 - RNA, 20 nt, Homo sapiens
ggcauucaccgcgugccuua

SEQ ID NO: 26474 - RNA, 21 nt, Homo sapiens
ucuacucagaagggugccuua

SEQ ID NO: 26475 - RNA, 17 nt, Homo sapiens
gacagccucucccccac

SEQ ID NO: 26476 - RNA, 21 nt, Homo sapiens
cggggugcacgggcggagggc

SEQ ID NO: 26477 - RNA, 23 nt, Homo sapiens
gggagugaagacacggagccaga

SEQ ID NO: 26478 - RNA, 23 nt, Homo sapiens
gggagugaagacacggagccaga

SEQ ID NO: 26479 - RNA, 21 nt, Homo sapiens
gaccaaucgccguccccgccg

SEQ ID NO: 26480 - RNA, 21 nt, Homo sapiens
gaccaaucgccguccccgccg

SEQ ID NO: 26481 - RNA, 21 nt, Homo sapiens
uucuaggauaggcccaggggc

SEQ ID NO: 26482 - RNA, 23 nt, Homo sapiens
aaagucucgcucucugccccuca

SEQ ID NO: 26483 - RNA, 19 nt, Homo sapiens
uagcauacagauacgccca

SEQ ID NO: 26484 - RNA, 25 nt, Homo sapiens
acggagcugucccaacaccaccccu

SEQ ID NO: 26485 - RNA, 22 nt, Homo sapiens
gcggucccgcggcgccccgccu

SEQ ID NO: 26486 - RNA, 22 nt, Homo sapiens
gcggucccgcggcgccccgccu

SEQ ID NO: 26487 - RNA, 22 nt, Homo sapiens
ugcuguuagcccuagccccgca

SEQ ID NO: 26488 - RNA, 20 nt, Homo sapiens
uacugcuuccacagcucccc

SEQ ID NO: 26489 - RNA, 24 nt, Homo sapiens
acugggcacaaacauguccagguc

SEQ ID NO: 26490 - RNA, 22 nt, Homo sapiens
ucgcccucucaacccagcuuuu

SEQ ID NO: 26491 - RNA, 22 nt, Homo sapiens
uugcccucucaacccagcuuuu

SEQ ID NO: 26492 - RNA, 20 nt, Homo sapiens
acccucucaacccagcuuuu

SEQ ID NO: 26493 - RNA, 19 nt, Homo sapiens
uccucucaacccagcuuuu

SEQ ID NO: 26494 - RNA, 22 nt, Homo sapiens
ugcaagccuugggugugggagg

SEQ ID NO: 26495 - RNA, 22 nt, Homo sapiens
acaaaguucuguagugcacuga

SEQ ID NO: 26496 - RNA, 22 nt, Homo sapiens
acaaaguucugugaugcacuga

SEQ ID NO: 26497 - RNA, 21 nt, Homo sapiens
ccaaguucugucaugcacuga

SEQ ID NO: 26498 - RNA, 22 nt, Homo sapiens
caacuccgauaugcaaugggua

SEQ ID NO: 26499 - RNA, 20 nt, Homo sapiens
uaugaacaauuucuaggaau

SEQ ID NO: 26500 - RNA, 22 nt, Homo sapiens
acuccaacagggccgcgucucc

SEQ ID NO: 26501 - RNA, 18 nt, Homo sapiens
acccucugaaaggaagca

SEQ ID NO: 26502 - RNA, 22 nt, Homo sapiens
aaagugcuucuuaccuccagau

SEQ ID NO: 26503 - RNA, 23 nt, Homo sapiens
cuccagccccuccagggcuuccu

SEQ ID NO: 26504 - RNA, 22 nt, Homo sapiens
cagaagugggccgggcacaggg

SEQ ID NO: 26505 - RNA, 17 nt, Homo sapiens
uggcgcccgaacaggga

SEQ ID NO: 26506 - RNA, 23 nt, Homo sapiens
ucaacgggagugaucgugucauu

SEQ ID NO: 26507 - RNA, 20 nt, Homo sapiens
cccgccgcgucgcccugggg

SEQ ID NO: 26508 - RNA, 21 nt, Homo sapiens
aucugcacugucagcacuuua

SEQ ID NO: 26509 - RNA, 23 nt, Homo sapiens
aggaacagcagcagcccgggccg

SEQ ID NO: 26510 - RNA, 21 nt, Homo sapiens
acaggauugagggggggcccu

SEQ ID NO: 26511 - RNA, 21 nt, Homo sapiens
gaccaaucgccguccccgccg

SEQ ID NO: 26512 - RNA, 22 nt, Homo sapiens
gcggucccgcggcgccccgccu

SEQ ID NO: 26513 - RNA, 21 nt, Homo sapiens
aucugcacugucagcacuuua

SEQ ID NO: 26514 - RNA, 21 nt, Homo sapiens
gagcugcauccuggcuccggg

SEQ ID NO: 26515 - RNA, 22 nt, Homo sapiens
aggucucacuuuguugcccaga

SEQ ID NO: 26516 - RNA, 23 nt, Homo sapiens
aggaacagcagcagcccgggccg

SEQ ID NO: 26517 - RNA, 22 nt, Homo sapiens
cacaaaccauuaugugcugcua

SEQ ID NO: 26518 - RNA, 22 nt, Homo sapiens
uguaaaccaugaugugcugcua

SEQ ID NO: 26519 - RNA, 22 nt, Homo sapiens
cgccaauauuuacgugcugcua

SEQ ID NO: 26520 - RNA, 20 nt, Homo sapiens
cccgccgcgucgcccugggg

SEQ ID NO: 26521 - RNA, 21 nt, Homo sapiens
gccaauauuucugugcugcua

SEQ ID NO: 26522 - RNA, 22 nt, Homo sapiens
acaguucuucaacuggcagcuu

SEQ ID NO: 26523 - RNA, 21 nt, Homo sapiens
acaggauugagggggggcccu

SEQ ID NO: 26524 - RNA, 21 nt, Homo sapiens
uucuaggauaggcccaggggc

SEQ ID NO: 26525 - RNA, 22 nt, Homo sapiens
acaaccagcuaagacacugcca

SEQ ID NO: 26526 - RNA, 23 nt, Homo sapiens
gcaaucagcuaacuacacugccu

SEQ ID NO: 26527 - RNA, 22 nt, Homo sapiens
uucaaaacaugaauugcugcug

SEQ ID NO: 26528 - RNA, 21 nt, Homo sapiens
ugcaugacggccugcaagaca

SEQ ID NO: 26529 - RNA, 22 nt, Homo sapiens
accagcuaacaauacacugcca

SEQ ID NO: 26530 - RNA, 22 nt, Homo sapiens
gccagcuaacaauacacugccu

SEQ ID NO: 26531 - RNA, 21 nt, Homo sapiens
acaaaccacagugugcugcug

SEQ ID NO: 26532 - RNA, 25 nt, Homo sapiens
aaggagcucagaagcccugcccagc

SEQ ID NO: 26533 - RNA, 19 nt, Homo sapiens
gccucagaggcagcugcuu

SEQ ID NO: 26534 - RNA, 22 nt, Homo sapiens
ugcuguuagcccuagccccgca

SEQ ID NO: 26535 - RNA, 22 nt, Homo sapiens
gggagaggucucccugcgcaca

SEQ ID NO: 26536 - RNA, 21 nt, Homo sapiens
ccucaaggagcuucagucuag

SEQ ID NO: 26537 - RNA, 22 nt, Homo sapiens
uggcagcagcggagggggcaga

SEQ ID NO: 26538 - RNA, 21 nt, Homo sapiens
acaggauugagggggggcccu

SEQ ID NO: 26539 - RNA, 20 nt, Homo sapiens
ccagcagcaccuggggcagu

SEQ ID NO: 26540 - RNA, 23 nt, Homo sapiens
aaaucagaaucacaccuggggga

SEQ ID NO: 26541 - RNA, 21 nt, Homo sapiens
auccuguacugagcugccccg

SEQ ID NO: 26542 - RNA, 23 nt, Homo sapiens
caugagugacgcccucuggagua

SEQ ID NO: 26543 - RNA, 23 nt, Homo sapiens
gggcucuuacucccucaggcacu

SEQ ID NO: 26544 - RNA, 22 nt, Homo sapiens
gauccgagcaccggggaccccc

SEQ ID NO: 26545 - RNA, 24 nt, Homo sapiens
acgcagagcccgaaagcccccagu

SEQ ID NO: 26546 - RNA, 24 nt, Homo sapiens
acgcgcaggccagagacccaggca

SEQ ID NO: 26547 - RNA, 22 nt, Homo sapiens
ugcuguuagcccuagccccgca

SEQ ID NO: 26548 - RNA, 21 nt, Homo sapiens
ccccucccagccucccugcca

SEQ ID NO: 26549 - RNA, 18 nt, Homo sapiens
aucacauucaccucccug

SEQ ID NO: 26550 - RNA, 21 nt, Homo sapiens
gcggaacuuagccacugugaa

SEQ ID NO: 26551 - RNA, 21 nt, Homo sapiens
gcagaacuuagccacugugaa

SEQ ID NO: 26552 - RNA, 22 nt, Homo sapiens
caagacacauuuggagagggac

SEQ ID NO: 26553 - RNA, 24 nt, Homo sapiens
cagaaagugcuuucuuuuggagaa

SEQ ID NO: 26554 - RNA, 22 nt, Homo sapiens
aacacucuaaaaggaggcacuu

SEQ ID NO: 26555 - RNA, 22 nt, Homo sapiens
uggcagcagcggagggggcaga

SEQ ID NO: 26556 - RNA, 20 nt, Homo sapiens
ccagcagcaccuggggcagu

SEQ ID NO: 26557 - RNA, 21 nt, Homo sapiens
auccuguacugagcugccccg

SEQ ID NO: 26558 - RNA, 21 nt, Homo sapiens
cggcucggguggcggcgacgg

SEQ ID NO: 26559 - RNA, 22 nt, Homo sapiens
ucaucucgcccgcaaagaccca

SEQ ID NO: 26560 - RNA, 22 nt, Homo sapiens
acacacccacgcgagccggaaa

SEQ ID NO: 26561 - RNA, 18 nt, Homo sapiens
cccccaccaccacgcccg

SEQ ID NO: 26562 - RNA, 18 nt, Homo sapiens
ggagaggagggcacugga

SEQ ID NO: 26563 - RNA, 22 nt, Homo sapiens
agcgggacuuugagggccaguu

SEQ ID NO: 26564 - RNA, 22 nt, Homo sapiens
ucagccgcugucacacgcacag

SEQ ID NO: 26565 - RNA, 21 nt, Homo sapiens
agaauugcguuuggacaauca

SEQ ID NO: 26566 - RNA, 25 nt, Homo sapiens
acggagcugucccaacaccaccccu

SEQ ID NO: 26567 - RNA, 20 nt, Homo sapiens
uacugcuuccacagcucccc

SEQ ID NO: 26568 - RNA, 23 nt, Homo sapiens
aaucgcgguuuauaccaaaugaa

SEQ ID NO: 26569 - RNA, 19 nt, Homo sapiens
gcuccuguccaacuggcuc

SEQ ID NO: 26570 - RNA, 22 nt, Homo sapiens
ucuacccagaaaggagccagug

SEQ ID NO: 26571 - RNA, 21 nt, Homo sapiens
gggcaucugggacgcgcagga

SEQ ID NO: 26572 - RNA, 21 nt, Homo sapiens
gaccaaucgccguccccgccg

SEQ ID NO: 26573 - RNA, 21 nt, Homo sapiens
cccgaggagccgggcaggcuu

SEQ ID NO: 26574 - RNA, 22 nt, Homo sapiens
gcggucccgcggcgccccgccu

SEQ ID NO: 26575 - RNA, 22 nt, Homo sapiens
aguccagauucugugcccacca

SEQ ID NO: 26576 - RNA, 22 nt, Homo sapiens
gcacauguucugcggcccacca

SEQ ID NO: 26577 - RNA, 22 nt, Homo sapiens
uaaccgauuucagauggugcua

SEQ ID NO: 26578 - RNA, 22 nt, Homo sapiens
cugggggcggcacaggggcuca

SEQ ID NO: 26579 - RNA, 21 nt, Homo sapiens
cuggaggacggcaacagucag

SEQ ID NO: 26580 - RNA, 22 nt, Homo sapiens
gcugaggcuguggggcuggagu

SEQ ID NO: 26581 - RNA, 19 nt, Homo sapiens
guccugaauuccgcagccu

SEQ ID NO: 26582 - RNA, 24 nt, Homo sapiens
cacccccagagccucagcucccca

SEQ ID NO: 26583 - RNA, 21 nt, Homo sapiens
cugaggagagaggaggugggg

SEQ ID NO: 26584 - RNA, 23 nt, Homo sapiens
cuaccugcacuaugagcacuuug

SEQ ID NO: 26585 - RNA, 22 nt, Homo sapiens
cucaauagacugugagcuccuu

SEQ ID NO: 26586 - RNA, 22 nt, Homo sapiens
aagagggagacccaggcucgga

SEQ ID NO: 26587 - RNA, 23 nt, Homo sapiens
cccagcuagauuguaagcuccuu

SEQ ID NO: 26588 - RNA, 22 nt, Homo sapiens
aacccauggaauucaguucuca

SEQ ID NO: 26589 - RNA, 21 nt, Homo sapiens
aggcggcaggcacaggacugg

SEQ ID NO: 26590 - RNA, 22 nt, Homo sapiens
agugaauucuaccagugccaua

SEQ ID NO: 26591 - RNA, 22 nt, Homo sapiens
ggaggccgggacgagugcaaua

SEQ ID NO: 26592 - RNA, 23 nt, Homo sapiens
cuaucugcacuagaugcaccuua

SEQ ID NO: 26593 - RNA, 21 nt, Homo sapiens
uagaaaggcuaggaccaaacc

SEQ ID NO: 26594 - RNA, 21 nt, Homo sapiens
gcggaacuuagccacugugaa

SEQ ID NO: 26595 - RNA, 21 nt, Homo sapiens
gcagaacuuagccacugugaa

SEQ ID NO: 26596 - RNA, 23 nt, Homo sapiens
acaccccaaaaucgaagcacuuc

SEQ ID NO: 26597 - RNA, 22 nt, Homo sapiens
gccagcuaacaauacacugccu

SEQ ID NO: 26598 - RNA, 22 nt, Homo sapiens
aggaaaccagcaaguguugacg

SEQ ID NO: 26599 - RNA, 18 nt, Homo sapiens
acccucugaaaggaagca

SEQ ID NO: 26600 - RNA, 22 nt, Homo sapiens
aaagugcuucuuaccuccagau

SEQ ID NO: 26601 - RNA, 22 nt, Homo sapiens
acuucaaggaucuuaaacuuug

SEQ ID NO: 26602 - RNA, 23 nt, Homo sapiens
acacacucacacacacacacuca

SEQ ID NO: 26603 - RNA, 22 nt, Homo sapiens
cugcucaaacccuccaaugacu

SEQ ID NO: 26604 - RNA, 19 nt, Homo sapiens
gcucuaagaaagccacacu

SEQ ID NO: 26605 - RNA, 23 nt, Homo sapiens
ccuagagagggugagaaccugcc

SEQ ID NO: 26606 - RNA, 21 nt, Homo sapiens
caucaccuuccuucuccucca

SEQ ID NO: 26607 - RNA, 21 nt, Homo sapiens
cacaaccucaguguuuccagg

SEQ ID NO: 26608 - RNA, 18 nt, Homo sapiens
cccccaccaccacgcccg

SEQ ID NO: 26609 - RNA, 21 nt, Homo sapiens
cugggggacggagcagaagga

SEQ ID NO: 26610 - RNA, 22 nt, Homo sapiens
agcgggacuuugagggccaguu

SEQ ID NO: 26611 - RNA, 23 nt, Homo sapiens
gggcucuuacucccucaggcacu

SEQ ID NO: 26612 - RNA, 23 nt, Homo sapiens
cccaacagacauggcgguacuca

SEQ ID NO: 26613 - RNA, 22 nt, Homo sapiens
ccucaggcacggccgggccacc

SEQ ID NO: 26614 - RNA, 23 nt, Homo sapiens
guagugggccgagccgagugaca

SEQ ID NO: 26615 - RNA, 20 nt, Homo sapiens
ugucuccacagggcucuuua

SEQ ID NO: 26616 - RNA, 20 nt, Homo sapiens
cccugcgccaucuccucuac

SEQ ID NO: 26617 - RNA, 22 nt, Homo sapiens
acaacuguaacuagacgguuuu

SEQ ID NO: 26618 - RNA, 23 nt, Homo sapiens
accccuaucacgauuagcauuaa

SEQ ID NO: 26619 - RNA, 22 nt, Homo sapiens
cugggggcggcacaggggcuca

SEQ ID NO: 26620 - RNA, 21 nt, Homo sapiens
uucuaggauaggcccaggggc

SEQ ID NO: 26621 - RNA, 22 nt, Homo sapiens
gcuggguggagaagguggugaa

SEQ ID NO: 26622 - RNA, 23 nt, Homo sapiens
ggacauuguuucagugcccaagu

SEQ ID NO: 26623 - RNA, 22 nt, Homo sapiens
ugagccacugugccuggccuga

SEQ ID NO: 26624 - RNA, 19 nt, Homo sapiens
uagcauacagauacgccca

SEQ ID NO: 26625 - RNA, 18 nt, Homo sapiens
aucacauucaccucccug

SEQ ID NO: 26626 - RNA, 22 nt, Homo sapiens
aggcauaggaugacaaagggaa

SEQ ID NO: 26627 - RNA, 22 nt, Homo sapiens
aggcgaaggaugacaaagggaa

SEQ ID NO: 26628 - RNA, 23 nt, Homo sapiens
cuacuaaaacauggaagcacuua

SEQ ID NO: 26629 - RNA, 23 nt, Homo sapiens
acacucaaacauggaagcacuua

SEQ ID NO: 26630 - RNA, 23 nt, Homo sapiens
cgugagcuccuggaggacaggga

SEQ ID NO: 26631 - RNA, 21 nt, Homo sapiens
gagcugcauccuggcuccggg

SEQ ID NO: 26632 - RNA, 23 nt, Homo sapiens
cuccagccccuccagggcuuccu

SEQ ID NO: 26633 - RNA, 22 nt, Homo sapiens
cugggggcggcacaggggcuca

SEQ ID NO: 26634 - RNA, 20 nt, Homo sapiens
cucaaagcaaacccugcaga

SEQ ID NO: 26635 - RNA, 17 nt, Homo sapiens
ggguggcagcgguggga

SEQ ID NO: 26636 - RNA, 21 nt, Homo sapiens
gggcaucugggacgcgcagga

SEQ ID NO: 26637 - RNA, 22 nt, Homo sapiens
aggaaaccagcaaguguugacg

SEQ ID NO: 26638 - RNA, 21 nt, Homo sapiens
gaccaaucgccguccccgccg

SEQ ID NO: 26639 - RNA, 22 nt, Homo sapiens
gcggucccgcggcgccccgccu

SEQ ID NO: 26640 - RNA, 23 nt, Homo sapiens
aaagucucgcucucugccccuca

SEQ ID NO: 26641 - RNA, 21 nt, Homo sapiens
aaagagaccgguucacuguga

SEQ ID NO: 26642 - RNA, 23 nt, Homo sapiens
agaggcaggcaugcgggcagaca

SEQ ID NO: 26643 - RNA, 22 nt, Homo sapiens
cacaaaccauuaugugcugcua

SEQ ID NO: 26644 - RNA, 22 nt, Homo sapiens
accagcuaacaauacacugcca

SEQ ID NO: 26645 - RNA, 23 nt, Homo sapiens
augcaaaguugcucggguaaccu

SEQ ID NO: 26646 - RNA, 22 nt, Homo sapiens
uucacacugcaugcucugggua

SEQ ID NO: 26647 - RNA, 21 nt, Homo sapiens
aagggucaguaagcacccgcg

SEQ ID NO: 26648 - RNA, 22 nt, Homo sapiens
acaaaaguugccuuugugugau

SEQ ID NO: 26649 - RNA, 23 nt, Homo sapiens
acgggugcgauuucugugugaga

SEQ ID NO: 26650 - RNA, 22 nt, Homo sapiens
ccucauggaaggguuccccacu

SEQ ID NO: 26651 - RNA, 22 nt, Homo sapiens
caaacaccauugucacacucca

SEQ ID NO: 26652 - RNA, 21 nt, Homo sapiens
gagcugcauccuggcuccggg

SEQ ID NO: 26653 - RNA, 17 nt, Homo sapiens
gggagaggaggaggcga

SEQ ID NO: 26654 - RNA, 21 nt, Homo sapiens
agagcucauccauaguuguca

SEQ ID NO: 26655 - RNA, 22 nt, Homo sapiens
caaacaccauugucacacucca

SEQ ID NO: 26656 - RNA, 24 nt, Homo sapiens
ucacagguuaaagggucucaggga

SEQ ID NO: 26657 - RNA, 22 nt, Homo sapiens
ucacaaguuagggucucaggga

SEQ ID NO: 26658 - RNA, 23 nt, Homo sapiens
agcccuguucuacagcccugagg

SEQ ID NO: 26659 - RNA, 22 nt, Homo sapiens
cacgaccgacgccacgccgagu

SEQ ID NO: 26660 - RNA, 23 nt, Homo sapiens
gggagugaagacacggagccaga

SEQ ID NO: 26661 - RNA, 21 nt, Homo sapiens
acuagacugugagcuccucga

SEQ ID NO: 26662 - RNA, 22 nt, Homo sapiens
agcgggacuuugagggccaguu

SEQ ID NO: 26663 - RNA, 21 nt, Homo sapiens
ucaaucacagauagcaccccu

SEQ ID NO: 26664 - RNA, 20 nt, Homo sapiens
uacugcuuccacagcucccc

SEQ ID NO: 26665 - RNA, 22 nt, Homo sapiens
cucaauagacugugagcuccuu

SEQ ID NO: 26666 - RNA, 22 nt, Homo sapiens
acuucaaggaucuuaaacuuug

SEQ ID NO: 26667 - RNA, 23 nt, Homo sapiens
cccagcuagauuguaagcuccuu

SEQ ID NO: 26668 - RNA, 21 nt, Homo sapiens
ugcaaacccugcaugugggag

SEQ ID NO: 26669 - RNA, 22 nt, Homo sapiens
accagcuaacaauacacugcca

SEQ ID NO: 26670 - RNA, 22 nt, Homo sapiens
ugcaagccuugggugugggagg

SEQ ID NO: 26671 - RNA, 22 nt, Homo sapiens
auaaggauuuuuaggggcauua

SEQ ID NO: 26672 - RNA, 21 nt, Homo sapiens
guuauagaucuggauuugaac

SEQ ID NO: 26673 - RNA, 27 nt, Homo sapiens
auugcguucgaagugucgaugaucaau

SEQ ID NO: 26674 - RNA, 27 nt, Homo sapiens
auugcguucgaagugucgaugaucaau

SEQ ID NO: 26675 - RNA, 22 nt, Homo sapiens
acuucaaggaucuuaaacuuug

SEQ ID NO: 26676 - RNA, 18 nt, Homo sapiens
auucaaucuacugccuca

SEQ ID NO: 26677 - RNA, 21 nt, Homo sapiens
cggggugcacgggcggagggc

SEQ ID NO: 26678 - RNA, 25 nt, Homo sapiens
accaacggaccuacuucccuccgcc

SEQ ID NO: 26679 - RNA, 20 nt, Homo sapiens
gcagaagcauuuccacacac

SEQ ID NO: 26680 - RNA, 21 nt, Homo sapiens
gcggaacuuagccacugugaa

SEQ ID NO: 26681 - RNA, 22 nt, Homo sapiens
cacuccuauaauugauccaguu

SEQ ID NO: 26682 - RNA, 18 nt, Homo sapiens
aucacauucaccucccug

SEQ ID NO: 26683 - RNA, 21 nt, Homo sapiens
caucaccuuccuucuccucca

SEQ ID NO: 26684 - RNA, 20 nt, Homo sapiens
cccugcgccaucuccucuac

SEQ ID NO: 26685 - RNA, 20 nt, Homo sapiens
cugcgggaggacagggcuca

SEQ ID NO: 26686 - RNA, 22 nt, Homo sapiens
ucccucacacagaauuccagaa

SEQ ID NO: 26687 - RNA, 22 nt, Homo sapiens
augcuuuuugggguaagggcuu

SEQ ID NO: 26688 - RNA, 22 nt, Homo sapiens
gugauugccacucuccugagua

SEQ ID NO: 26689 - RNA, 18 nt, Homo sapiens
aucacauucaccucccug

SEQ ID NO: 26690 - RNA, 22 nt, Homo sapiens
caagacacauuuggagagggac

SEQ ID NO: 26691 - RNA, 21 nt, Homo sapiens
ugcaggcugaucuucuucucu

SEQ ID NO: 26692 - RNA, 22 nt, Homo sapiens
cacauggccaaaacagagaaga

SEQ ID NO: 26693 - RNA, 22 nt, Homo sapiens
caaacaccauugucacacucca

SEQ ID NO: 26694 - RNA, 23 nt, Homo sapiens
gggagugaagacacggagccaga

SEQ ID NO: 26695 - RNA, 22 nt, Homo sapiens
ucaacaucagucugauaagcua

SEQ ID NO: 26696 - RNA, 21 nt, Homo sapiens
ucccagcacacauuuagcuca

SEQ ID NO: 26697 - RNA, 23 nt, Homo sapiens
gggagugaagacacggagccaga

SEQ ID NO: 26698 - RNA, 22 nt, Homo sapiens
gaauucaucacggccagccucu

SEQ ID NO: 26699 - RNA, 23 nt, Homo sapiens
gggagugaagacacggagccaga

SEQ ID NO: 26700 - RNA, 21 nt, Homo sapiens
gaccaaucgccguccccgccg

SEQ ID NO: 26701 - RNA, 23 nt, Homo sapiens
aaagucucgcucucugccccuca

SEQ ID NO: 26702 - RNA, 22 nt, Homo sapiens
gcggucccgcggcgccccgccu

SEQ ID NO: 26703 - RNA, 22 nt, Homo sapiens
ugcuguuagcccuagccccgca

SEQ ID NO: 26704 - RNA, 23 nt, Homo sapiens
gagcaaggcucuugucuguaagu

SEQ ID NO: 26705 - RNA, 22 nt, Homo sapiens
acaguucuucaacuggcagcuu

SEQ ID NO: 26706 - RNA, 23 nt, Homo sapiens
acccucuauagggaagcgcguuc

SEQ ID NO: 26707 - RNA, 19 nt, Homo sapiens
guccugaauuccgcagccu

SEQ ID NO: 26708 - RNA, 21 nt, Homo sapiens
gcggaacuuagccacugugaa

SEQ ID NO: 26709 - RNA, 21 nt, Homo sapiens
gcagaacuuagccacugugaa

SEQ ID NO: 26710 - RNA, 22 nt, Homo sapiens
auccuucuacaaauucacccau

SEQ ID NO: 26711 - RNA, 18 nt, Homo sapiens
aucacauucaccucccug

SEQ ID NO: 26712 - RNA, 22 nt, Homo sapiens
agagaggagagccguguaugac

SEQ ID NO: 26713 - RNA, 21 nt, Homo sapiens
agaaguagaccauguguccua

SEQ ID NO: 26714 - RNA, 27 nt, Homo sapiens
uuuagcacagugcuuauacaagaaggu

SEQ ID NO: 26715 - RNA, 21 nt, Homo sapiens
cggggugcacgggcggagggc

SEQ ID NO: 26716 - RNA, 19 nt, Homo sapiens
guccugaauuccgcagccu

SEQ ID NO: 26717 - RNA, 20 nt, Homo sapiens
uacugcuuccacagcucccc

SEQ ID NO: 26718 - RNA, 27 nt, Homo sapiens
uuuagcacagugcuuauacaagaaggu

SEQ ID NO: 26719 - RNA, 22 nt, Homo sapiens
aacaacacuugaccacauccug

SEQ ID NO: 26720 - RNA, 22 nt, Homo sapiens
cgggacguccagacucaacucu

SEQ ID NO: 26721 - RNA, 21 nt, Homo sapiens
aaagaucaaccauguauuauu

SEQ ID NO: 26722 - RNA, 21 nt, Homo sapiens
gagcugcauccuggcuccggg

SEQ ID NO: 26723 - RNA, 22 nt, Homo sapiens
cuagggaacacagggcugguga

SEQ ID NO: 26724 - RNA, 20 nt, Homo sapiens
ggggcagacagacgaggaag

SEQ ID NO: 26725 - RNA, 22 nt, Homo sapiens
agccaagcucagacggauccga

SEQ ID NO: 26726 - RNA, 23 nt, Homo sapiens
cggccugauucacaacaccagcu

SEQ ID NO: 26727 - RNA, 23 nt, Homo sapiens
gggagugaagacacggagccaga

SEQ ID NO: 26728 - RNA, 22 nt, Homo sapiens
uauggaugcaaaaugaucccaa

SEQ ID NO: 26729 - RNA, 19 nt, Homo sapiens
gcuccuguccaacuggcuc

SEQ ID NO: 26730 - RNA, 23 nt, Homo sapiens
ggacauuguuucagugcccaagu

SEQ ID NO: 26731 - RNA, 23 nt, Homo sapiens
cuccagccccuccagggcuuccu

SEQ ID NO: 26732 - RNA, 21 nt, Homo sapiens
caucaccuuccuucuccucca

SEQ ID NO: 26733 - RNA, 23 nt, Homo sapiens
aaccaagaccccggagaucccag

SEQ ID NO: 26734 - RNA, 22 nt, Homo sapiens
ucuacccagaaaggagccagug

SEQ ID NO: 26735 - RNA, 22 nt, Homo sapiens
cacucuaaagggaggcacuuug

SEQ ID NO: 26736 - RNA, 21 nt, Homo sapiens
aagugucagacacgguggugg

SEQ ID NO: 26737 - RNA, 22 nt, Homo sapiens
aggucucacuuuguugcccaga

SEQ ID NO: 26738 - RNA, 21 nt, Homo sapiens
ggcugucaauucauaggucag

SEQ ID NO: 26739 - RNA, 21 nt, Homo sapiens
gucugucaauucauaggucau

SEQ ID NO: 26740 - RNA, 25 nt, Homo sapiens
aaggagcucagaagcccugcccagc

SEQ ID NO: 26741 - RNA, 24 nt, Homo sapiens
cagaaagugcuuucuuuuggagaa

SEQ ID NO: 26742 - RNA, 22 nt, Homo sapiens
aacacucuaaaaggaggcacuu

SEQ ID NO: 26743 - RNA, 24 nt, Homo sapiens
acugcuggucuucagucagggcca

SEQ ID NO: 26744 - RNA, 22 nt, Homo sapiens
gcgaacgcgccacggaccaccu

SEQ ID NO: 26745 - RNA, 22 nt, Homo sapiens
acaaccagcuaagacacugcca

SEQ ID NO: 26746 - RNA, 22 nt, Homo sapiens
ugcuguuagcccuagccccgca

SEQ ID NO: 26747 - RNA, 22 nt, Homo sapiens
ucaaugacucagguaaguugca

SEQ ID NO: 26748 - RNA, 22 nt, Homo sapiens
cagaaagugcuucccucuagag

SEQ ID NO: 26749 - RNA, 23 nt, Homo sapiens
cgugagcuccuggaggacaggga

SEQ ID NO: 26750 - RNA, 22 nt, Homo sapiens
cuaccauaggguaaaaccacug

SEQ ID NO: 26751 - RNA, 20 nt, Homo sapiens
gcagaagcauuuccacacac

SEQ ID NO: 26752 - RNA, 21 nt, Homo sapiens
acugaucuagagaacacaaga

SEQ ID NO: 26753 - RNA, 24 nt, Homo sapiens
acgcgcaggccagagacccaggca

SEQ ID NO: 26754 - RNA, 21 nt, Homo sapiens
aucugcacugucagcacuuua

SEQ ID NO: 26755 - RNA, 23 nt, Homo sapiens
gcuuugacaauaucauugcacug

SEQ ID NO: 26756 - RNA, 22 nt, Homo sapiens
gccagcuaacaauacacugccu

SEQ ID NO: 26757 - RNA, 18 nt, Homo sapiens
ugguggcagaggugggau

SEQ ID NO: 26758 - RNA, 22 nt, Homo sapiens
ugcaagccuugggugugggagg

SEQ ID NO: 26759 - RNA, 23 nt, Homo sapiens
guagugggccgagccgagugaca

SEQ ID NO: 26760 - RNA, 21 nt, Homo sapiens
aucugcacugucagcacuuua

SEQ ID NO: 26761 - RNA, 23 nt, Homo sapiens
gcuuugacaauaucauugcacug

SEQ ID NO: 26762 - RNA, 18 nt, Homo sapiens
uggcgccugaacagggac

SEQ ID NO: 26763 - RNA, 20 nt, Homo sapiens
cccgccgcgucgcccugggg

SEQ ID NO: 26764 - RNA, 17 nt, Homo sapiens
gacagccucucccccac

SEQ ID NO: 26765 - RNA, 22 nt, Homo sapiens
cccaacaacaggaaacuaccua

SEQ ID NO: 26766 - RNA, 21 nt, Homo sapiens
agguaauaccaauaccuugug

SEQ ID NO: 26767 - RNA, 22 nt, Homo sapiens
aacuguacaaacuacuaccuca

SEQ ID NO: 26768 - RNA, 17 nt, Homo sapiens
gggagaggaggaggcga

SEQ ID NO: 26769 - RNA, 22 nt, Homo sapiens
ugacgaugacaacgaugacgua

SEQ ID NO: 26770 - RNA, 21 nt, Homo sapiens
gggcaucugggacgcgcagga

SEQ ID NO: 26771 - RNA, 21 nt, Homo sapiens
acuccaaagggaagcgccuuc

SEQ ID NO: 26772 - RNA, 22 nt, Homo sapiens
cgcucuaaagggaagcgccuuc

SEQ ID NO: 26773 - RNA, 20 nt, Homo sapiens
gcagcuguccgcccagacac

SEQ ID NO: 26774 - RNA, 22 nt, Homo sapiens
gugggguggguggucaggccga

SEQ ID NO: 26775 - RNA, 23 nt, Homo sapiens
uccaucaucaaaacaaauggagu

SEQ ID NO: 26776 - RNA, 23 nt, Homo sapiens
gaaacccagcagacaauguagcu

SEQ ID NO: 26777 - RNA, 19 nt, Homo sapiens
guccugaauuccgcagccu

SEQ ID NO: 26778 - RNA, 22 nt, Homo sapiens
ucgcccucucaacccagcuuuu

SEQ ID NO: 26779 - RNA, 22 nt, Homo sapiens
uugcccucucaacccagcuuuu

SEQ ID NO: 26780 - RNA, 20 nt, Homo sapiens
acccucucaacccagcuuuu

SEQ ID NO: 26781 - RNA, 19 nt, Homo sapiens
uccucucaacccagcuuuu

SEQ ID NO: 26782 - RNA, 20 nt, Homo sapiens
uacugcuuccacagcucccc

SEQ ID NO: 26783 - RNA, 23 nt, Homo sapiens
cacugugggcccucuccgcacca

SEQ ID NO: 26784 - RNA, 22 nt, Homo sapiens
aagauguggaccauauuacaua

SEQ ID NO: 26785 - RNA, 21 nt, Homo sapiens
aguucucccaacguaaaccca

SEQ ID NO: 26786 - RNA, 21 nt, Homo sapiens
ugcaaacccugcaugugggag

SEQ ID NO: 26787 - RNA, 20 nt, Homo sapiens
cuggaggaagggcccagagg

SEQ ID NO: 26788 - RNA, 22 nt, Homo sapiens
gccuaagacacaggcccagaga

SEQ ID NO: 26789 - RNA, 23 nt, Homo sapiens
gaaacccagcagacaauguagcu

SEQ ID NO: 26790 - RNA, 21 nt, Homo sapiens
aucugcacugucagcacuuua

SEQ ID NO: 26791 - RNA, 23 nt, Homo sapiens
gcuuugacaauaucauugcacug

SEQ ID NO: 26792 - RNA, 18 nt, Homo sapiens
aucacauucaccucccug

SEQ ID NO: 26793 - RNA, 20 nt, Homo sapiens
cugcgggaggacagggcuca

SEQ ID NO: 26794 - RNA, 21 nt, Homo sapiens
acuccaaagggaagcgccuuc

SEQ ID NO: 26795 - RNA, 22 nt, Homo sapiens
cgcucuaaagggaagcgccuuc

SEQ ID NO: 26796 - RNA, 22 nt, Homo sapiens
ucaggaacugccuuucucucca

SEQ ID NO: 26797 - RNA, 21 nt, Homo sapiens
gcaagcccagaccgcaaaaag

SEQ ID NO: 26798 - RNA, 22 nt, Homo sapiens
uccacauggaguugcuguuaca

SEQ ID NO: 26799 - RNA, 23 nt, Homo sapiens
cagcugcuuuugggauuccguug

SEQ ID NO: 26800 - RNA, 22 nt, Homo sapiens
ggcagagagucagagcgcggau

SEQ ID NO: 26801 - RNA, 24 nt, Homo sapiens
agugugaguucuaccauugccaaa

SEQ ID NO: 26802 - RNA, 21 nt, Homo sapiens
ggggagcgggggcccugccuu

SEQ ID NO: 26803 - RNA, 21 nt, Homo sapiens
auaauggagaccaggccacga

SEQ ID NO: 26804 - RNA, 21 nt, Homo sapiens
auaauggagaccaggccacga

SEQ ID NO: 26805 - RNA, 18 nt, Homo sapiens
cccccaccaccacgcccg

SEQ ID NO: 26806 - RNA, 21 nt, Homo sapiens
gaccaaucgccguccccgccg

SEQ ID NO: 26807 - RNA, 22 nt, Homo sapiens
gcggucccgcggcgccccgccu

SEQ ID NO: 26808 - RNA, 22 nt, Homo sapiens
ugcuguuagcccuagccccgca

SEQ ID NO: 26809 - RNA, 17 nt, Homo sapiens
gggagaggaggaggcga

SEQ ID NO: 26810 - RNA, 22 nt, Homo sapiens
cucauauuacaaugagcucauc

SEQ ID NO: 26811 - RNA, 20 nt, Homo sapiens
aggggccucagccuccuggu

SEQ ID NO: 26812 - RNA, 21 nt, Homo sapiens
caucaccuuccuucuccucca

SEQ ID NO: 26813 - RNA, 22 nt, Homo sapiens
agcugaguguaggauguuuaca

SEQ ID NO: 26814 - RNA, 18 nt, Homo sapiens
aucacauucaccucccug

SEQ ID NO: 26815 - RNA, 20 nt, Homo sapiens
cucaaagcaaacccugcaga

SEQ ID NO: 26816 - RNA, 22 nt, Homo sapiens
ucacauuugccugcagagauuu

SEQ ID NO: 26817 - RNA, 17 nt, Homo sapiens
gacagccucucccccac

SEQ ID NO: 26818 - RNA, 22 nt, Homo sapiens
ggagauggagccagggcccuaa

SEQ ID NO: 26819 - RNA, 18 nt, Homo sapiens
aucacauucaccucccug

SEQ ID NO: 26820 - RNA, 23 nt, Homo sapiens
gggagugaagacacggagccaga

SEQ ID NO: 26821 - RNA, 23 nt, Homo sapiens
aggaacagcagcagcccgggccg

SEQ ID NO: 26822 - RNA, 22 nt, Homo sapiens
ucaggaacugccuuucucucca

SEQ ID NO: 26823 - RNA, 21 nt, Homo sapiens
acaggauugagggggggcccu

SEQ ID NO: 26824 - RNA, 23 nt, Homo sapiens
aaagucucgcucucugccccuca

SEQ ID NO: 26825 - RNA, 20 nt, Homo sapiens
ugggccaccgccgagcggac

SEQ ID NO: 26826 - RNA, 21 nt, Homo sapiens
caucaccuuccuucuccucca

SEQ ID NO: 26827 - RNA, 22 nt, Homo sapiens
ucaucucgcccgcaaagaccca

SEQ ID NO: 26828 - RNA, 21 nt, Homo sapiens
ugcaugacggccugcaagaca

SEQ ID NO: 26829 - RNA, 22 nt, Homo sapiens
gcacacaauaaauguuugcuga

SEQ ID NO: 26830 - RNA, 22 nt, Homo sapiens
auggcaguggaguuagugauug

SEQ ID NO: 26831 - RNA, 23 nt, Homo sapiens
aaucuacuuucuuugcucauccu

SEQ ID NO: 26832 - RNA, 22 nt, Homo sapiens
aaccacuuucuuugcucauccg

SEQ ID NO: 26833 - RNA, 17 nt, Homo sapiens
uggaggccccagcgaga

SEQ ID NO: 26834 - RNA, 21 nt, Homo sapiens
ccccucccagccucccugcca

SEQ ID NO: 26835 - RNA, 22 nt, Homo sapiens
uacagauggauaccgugcaauu

SEQ ID NO: 26836 - RNA, 21 nt, Homo sapiens
ggacuauagaacuuucccccu

SEQ ID NO: 26837 - RNA, 22 nt, Homo sapiens
cugggggcggcacaggggcuca

SEQ ID NO: 26838 - RNA, 20 nt, Homo sapiens
cugcgggaggacagggcuca

SEQ ID NO: 26839 - RNA, 22 nt, Homo sapiens
ucccucacacagaauuccagaa

SEQ ID NO: 26840 - RNA, 22 nt, Homo sapiens
augcuuuuugggguaagggcuu

SEQ ID NO: 26841 - RNA, 23 nt, Homo sapiens
gggagugaagacacggagccaga

SEQ ID NO: 26842 - RNA, 22 nt, Homo sapiens
ucgcccucucaacccagcuuuu

SEQ ID NO: 26843 - RNA, 22 nt, Homo sapiens
uugcccucucaacccagcuuuu

SEQ ID NO: 26844 - RNA, 20 nt, Homo sapiens
acccucucaacccagcuuuu

SEQ ID NO: 26845 - RNA, 19 nt, Homo sapiens
uccucucaacccagcuuuu

SEQ ID NO: 26846 - RNA, 23 nt, Homo sapiens
aaagucucgcucucugccccuca

SEQ ID NO: 26847 - RNA, 23 nt, Homo sapiens
ccacccaaugaccuacuccaaga

SEQ ID NO: 26848 - RNA, 18 nt, Homo sapiens
acccucugaaaggaagca

SEQ ID NO: 26849 - RNA, 22 nt, Homo sapiens
aaagugcuucuuaccuccagau

SEQ ID NO: 26850 - RNA, 22 nt, Homo sapiens
aaagugcuucuuaccuccagau

SEQ ID NO: 26851 - RNA, 23 nt, Homo sapiens
acaacaaaaucacuagucuucca

SEQ ID NO: 26852 - RNA, 22 nt, Homo sapiens
gguuaguggaccaggucacaaa

SEQ ID NO: 26853 - RNA, 21 nt, Homo sapiens
aucagagguucagcuuacccu

SEQ ID NO: 26854 - RNA, 23 nt, Homo sapiens
cggcucugucgucgaggcgcuca

SEQ ID NO: 26855 - RNA, 23 nt, Homo sapiens
gggagugaagacacggagccaga

SEQ ID NO: 26856 - RNA, 23 nt, Homo sapiens
aggaacagcagcagcccgggccg

SEQ ID NO: 26857 - RNA, 20 nt, Homo sapiens
cccugcgccaucuccucuac

SEQ ID NO: 26858 - RNA, 21 nt, Homo sapiens
ggcugucaauucauaggucag

SEQ ID NO: 26859 - RNA, 22 nt, Homo sapiens
cuagugguccuaaacauuucac

SEQ ID NO: 26860 - RNA, 21 nt, Homo sapiens
gucugucaauucauaggucau

SEQ ID NO: 26861 - RNA, 21 nt, Homo sapiens
cagguaccaauauuuuaucua

SEQ ID NO: 26862 - RNA, 21 nt, Homo sapiens
ccccucccagccucccugcca

SEQ ID NO: 26863 - RNA, 22 nt, Homo sapiens
aaucagucucauugcuuuauaa

SEQ ID NO: 26864 - RNA, 22 nt, Homo sapiens
cucccuucuuuccucccgucuu

SEQ ID NO: 26865 - RNA, 22 nt, Homo sapiens
cgaauccaccacgaacaacuuc

SEQ ID NO: 26866 - RNA, 22 nt, Homo sapiens
ugcaagccuugggugugggagg

SEQ ID NO: 26867 - RNA, 18 nt, Homo sapiens
acccucugaaaggaagca

SEQ ID NO: 26868 - RNA, 22 nt, Homo sapiens
aaagugcuucuuaccuccagau

SEQ ID NO: 26869 - RNA, 22 nt, Homo sapiens
aaagagguuaaccauguauuau

SEQ ID NO: 26870 - RNA, 22 nt, Homo sapiens
auaaaugacaccuccuugugaa

SEQ ID NO: 26871 - RNA, 22 nt, Homo sapiens
agcuagugagaagucaaugccu

SEQ ID NO: 26872 - RNA, 24 nt, Homo sapiens
gaggugacucuauccuaugucuuu

SEQ ID NO: 26873 - RNA, 21 nt, Homo sapiens
aaaagcuaagucaucauauau

SEQ ID NO: 26874 - RNA, 25 nt, Homo sapiens
agcuagucaagcgcgguuguggggg

SEQ ID NO: 26875 - RNA, 22 nt, Homo sapiens
acuccaacagggccgcgucucc

SEQ ID NO: 26876 - RNA, 22 nt, Homo sapiens
uauucaggaacauauugcaaaa

SEQ ID NO: 26877 - RNA, 20 nt, Homo sapiens
gaaagggcuucccuuugcag

SEQ ID NO: 26878 - RNA, 20 nt, Homo sapiens
gaaagggcuucccuuugcag

SEQ ID NO: 26879 - RNA, 20 nt, Homo sapiens
gaaagggcuucccuuugcag

SEQ ID NO: 26880 - RNA, 20 nt, Homo sapiens
gaaagggcuucccuuugcag

SEQ ID NO: 26881 - RNA, 23 nt, Homo sapiens
gggagugaagacacggagccaga

SEQ ID NO: 26882 - RNA, 22 nt, Homo sapiens
agcccaaaaggagaauucuuug

SEQ ID NO: 26883 - RNA, 23 nt, Homo sapiens
gcuuugacaauaucauugcacug

SEQ ID NO: 26884 - RNA, 21 nt, Homo sapiens
ucgacugccacucuuacuaga

SEQ ID NO: 26885 - RNA, 23 nt, Homo sapiens
ggaagccaucaagucgcugcagg

SEQ ID NO: 26886 - RNA, 23 nt, Homo sapiens
aaagucucgcucucugccccuca

SEQ ID NO: 26887 - RNA, 25 nt, Homo sapiens
accaacggaccuacuucccuccgcc

SEQ ID NO: 26888 - RNA, 21 nt, Homo sapiens
caucaccuuccuucuccucca

SEQ ID NO: 26889 - RNA, 22 nt, Homo sapiens
uaaaugaauucaauuuccuucu

SEQ ID NO: 26890 - RNA, 18 nt, Homo sapiens
acccucugaaaggaagca

SEQ ID NO: 26891 - RNA, 22 nt, Homo sapiens
aaagugcuucuuaccuccagau

SEQ ID NO: 26892 - RNA, 23 nt, Homo sapiens
acauuuuucguuauugcucuuga

SEQ ID NO: 26893 - RNA, 23 nt, Homo sapiens
acacacucacacacacacacuca

SEQ ID NO: 26894 - RNA, 25 nt, Homo sapiens
acggagcugucccaacaccaccccu

SEQ ID NO: 26895 - RNA, 22 nt, Homo sapiens
cugggggcggcacaggggcuca

SEQ ID NO: 26896 - RNA, 23 nt, Homo sapiens
gggagugaagacacggagccaga

SEQ ID NO: 26897 - RNA, 22 nt, Homo sapiens
cagaagugggccgggcacaggg

SEQ ID NO: 26898 - RNA, 20 nt, Homo sapiens
cuggaggaagggcccagagg

SEQ ID NO: 26899 - RNA, 22 nt, Homo sapiens
gccuaagacacaggcccagaga

SEQ ID NO: 26900 - RNA, 21 nt, Homo sapiens
gaccaagaaauagccuuucaa

SEQ ID NO: 26901 - RNA, 22 nt, Homo sapiens
cagacuccgguggaaugaagga

SEQ ID NO: 26902 - RNA, 24 nt, Homo sapiens
ucagagcauguguuuaaucaggcu

SEQ ID NO: 26903 - RNA, 21 nt, Homo sapiens
gaccaaucgccguccccgccg

SEQ ID NO: 26904 - RNA, 22 nt, Homo sapiens
gcggucccgcggcgccccgccu

SEQ ID NO: 26905 - RNA, 22 nt, Homo sapiens
ugcuguuagcccuagccccgca

SEQ ID NO: 26906 - RNA, 22 nt, Homo sapiens
gcugaggcuguggggcuggagu

SEQ ID NO: 26907 - RNA, 21 nt, Homo sapiens
cggcucggguggcggcgacgg

SEQ ID NO: 26908 - RNA, 22 nt, Homo sapiens
gcacaaaucuccagaccaccca

SEQ ID NO: 26909 - RNA, 22 nt, Homo sapiens
auggcaguggaguuagugauug

SEQ ID NO: 26910 - RNA, 24 nt, Homo sapiens
acugcaggcuccagcuuccaggcu

SEQ ID NO: 26911 - RNA, 22 nt, Homo sapiens
ucaggaacugccuuucucucca

SEQ ID NO: 26912 - RNA, 21 nt, Homo sapiens
ccccucccagccucccugcca

SEQ ID NO: 26913 - RNA, 22 nt, Homo sapiens
acugccugucugugccugcugu

SEQ ID NO: 26914 - RNA, 22 nt, Homo sapiens
accagguuccaccccagcaggc

SEQ ID NO: 26915 - RNA, 23 nt, Homo sapiens
cuaccugcacuguaagcacuuug

SEQ ID NO: 26916 - RNA, 23 nt, Homo sapiens
gaacagguagucugaacacuggg

SEQ ID NO: 26917 - RNA, 23 nt, Homo sapiens
gaacagauagucuaaacacuggg

SEQ ID NO: 26918 - RNA, 23 nt, Homo sapiens
gggagugaagacacggagccaga

SEQ ID NO: 26919 - RNA, 21 nt, Homo sapiens
gagcuacagugcuucaucuca

SEQ ID NO: 26920 - RNA, 23 nt, Homo sapiens
ccgcuugagcuaacuccgacccg

SEQ ID NO: 26921 - RNA, 22 nt, Homo sapiens
auggcaguggaguuagugauug

SEQ ID NO: 26922 - RNA, 23 nt, Homo sapiens
aggaacagcagcagcccgggccg

SEQ ID NO: 26923 - RNA, 20 nt, Homo sapiens
uacugcuuccacagcucccc

SEQ ID NO: 26924 - RNA, 17 nt, Homo sapiens
agaaagaagcaauauga

SEQ ID NO: 26925 - RNA, 20 nt, Homo sapiens
uacugcuuccacagcucccc

SEQ ID NO: 26926 - RNA, 21 nt, Homo sapiens
cggggugcacgggcggagggc

SEQ ID NO: 26927 - RNA, 21 nt, Homo sapiens
aaaacaaaaucucaccguuuu

SEQ ID NO: 26928 - RNA, 23 nt, Homo sapiens
aaaucagaaucacaccuggggga

SEQ ID NO: 26929 - RNA, 24 nt, Homo sapiens
acgcagagcccgaaagcccccagu

SEQ ID NO: 26930 - RNA, 22 nt, Homo sapiens
ucagaccgagacaagugcaaug

SEQ ID NO: 26931 - RNA, 20 nt, Homo sapiens
uccccacagacccagagccg

SEQ ID NO: 26932 - RNA, 22 nt, Homo sapiens
aggucucacuuuguugcccaga

SEQ ID NO: 26933 - RNA, 25 nt, Homo sapiens
aaggagcucagaagcccugcccagc

SEQ ID NO: 26934 - RNA, 23 nt, Homo sapiens
cccagcuagauuguaagcuccuu

SEQ ID NO: 26935 - RNA, 23 nt, Homo sapiens
acagaaagugcuucccucaagag

SEQ ID NO: 26936 - RNA, 23 nt, Homo sapiens
gggagugaagacacggagccaga

SEQ ID NO: 26937 - RNA, 21 nt, Homo sapiens
gggcaucugggacgcgcagga

SEQ ID NO: 26938 - RNA, 21 nt, Homo sapiens
gaccaaucgccguccccgccg

SEQ ID NO: 26939 - RNA, 23 nt, Homo sapiens
aagaaucuugucccgcagguccu

SEQ ID NO: 26940 - RNA, 22 nt, Homo sapiens
gcggucccgcggcgccccgccu

SEQ ID NO: 26941 - RNA, 24 nt, Homo sapiens
cacccccagagccucagcucccca

SEQ ID NO: 26942 - RNA, 21 nt, Homo sapiens
gaaggaagugagugcagccac

SEQ ID NO: 26943 - RNA, 21 nt, Homo sapiens
cggggugcacgggcggagggc

SEQ ID NO: 26944 - RNA, 20 nt, Homo sapiens
uacugcuuccacagcucccc

SEQ ID NO: 26945 - RNA, 21 nt, Homo sapiens
cggggugcacgggcggagggc

SEQ ID NO: 26946 - RNA, 22 nt, Homo sapiens
ucaccauugcuaaagugcaauu

SEQ ID NO: 26947 - RNA, 22 nt, Homo sapiens
uaaccgauuucagauggugcua

SEQ ID NO: 26948 - RNA, 23 nt, Homo sapiens
aacacugauuucaaauggugcua

SEQ ID NO: 26949 - RNA, 22 nt, Homo sapiens
uaaccgauuucaaauggugcua

SEQ ID NO: 26950 - RNA, 22 nt, Homo sapiens
agggguucaccgagcaacauuc

SEQ ID NO: 26951 - RNA, 18 nt, Homo sapiens
gaaaugagggccagcuga

SEQ ID NO: 26952 - RNA, 25 nt, Homo sapiens
agcuagucaagcgcgguuguggggg

SEQ ID NO: 26953 - RNA, 22 nt, Homo sapiens
acaucaucgcauauugacacaa

SEQ ID NO: 26954 - RNA, 22 nt, Homo sapiens
acaguggucaucgagugacaca

SEQ ID NO: 26955 - RNA, 21 nt, Homo sapiens
ccccucccagccucccugcca

SEQ ID NO: 26956 - RNA, 21 nt, Homo sapiens
gaccaaucgccguccccgccg

SEQ ID NO: 26957 - RNA, 23 nt, Homo sapiens
aaagucucgcucucugccccuca

SEQ ID NO: 26958 - RNA, 22 nt, Homo sapiens
gcggucccgcggcgccccgccu

SEQ ID NO: 26959 - RNA, 22 nt, Homo sapiens
ugcuguuagcccuagccccgca

SEQ ID NO: 26960 - RNA, 24 nt, Homo sapiens
acugcaggcuccagcuuccaggcu

SEQ ID NO: 26961 - RNA, 22 nt, Homo sapiens
cagaagugggccgggcacaggg

SEQ ID NO: 26962 - RNA, 22 nt, Homo sapiens
cugggggcggcacaggggcuca

SEQ ID NO: 26963 - RNA, 22 nt, Homo sapiens
cacugguacaaggguugggaga

SEQ ID NO: 26964 - RNA, 21 nt, Homo sapiens
gaccaaucgccguccccgccg

SEQ ID NO: 26965 - RNA, 21 nt, Homo sapiens
gcggaacuuagccacugugaa

SEQ ID NO: 26966 - RNA, 21 nt, Homo sapiens
gcagaacuuagccacugugaa

SEQ ID NO: 26967 - RNA, 21 nt, Homo sapiens
ucaaucacagauagcaccccu

SEQ ID NO: 26968 - RNA, 22 nt, Homo sapiens
gcggucccgcggcgccccgccu

SEQ ID NO: 26969 - RNA, 21 nt, Homo sapiens
ugcaaugcaacuacaaugcac

SEQ ID NO: 26970 - RNA, 20 nt, Homo sapiens
gcaaugcaacagcaaugcac

SEQ ID NO: 26971 - RNA, 21 nt, Homo sapiens
cugggggacggagcagaagga

SEQ ID NO: 26972 - RNA, 22 nt, Homo sapiens
ucagaccgagacaagugcaaug

SEQ ID NO: 26973 - RNA, 21 nt, Homo sapiens
ccccucccagccucccugcca

SEQ ID NO: 26974 - RNA, 22 nt, Homo sapiens
gauagagugcagaccagggucu

SEQ ID NO: 26975 - RNA, 22 nt, Homo sapiens
uccggggacgaacgggacgggu

SEQ ID NO: 26976 - RNA, 21 nt, Homo sapiens
ccgugguucuacccuguggua

SEQ ID NO: 26977 - RNA, 21 nt, Homo sapiens
acaggauugagggggggcccu

SEQ ID NO: 26978 - RNA, 20 nt, Homo sapiens
gcagcuguccgcccagacac

SEQ ID NO: 26979 - RNA, 23 nt, Homo sapiens
aggaacagcagcagcccgggccg

SEQ ID NO: 26980 - RNA, 23 nt, Homo sapiens
aggaacagcagcagcccgggccg

SEQ ID NO: 26981 - RNA, 21 nt, Homo sapiens
acaggauugagggggggcccu

SEQ ID NO: 26982 - RNA, 22 nt, Homo sapiens
cugggggcggcacaggggcuca

SEQ ID NO: 26983 - RNA, 23 nt, Homo sapiens
cuaacugcacuagaugcaccuua

SEQ ID NO: 26984 - RNA, 24 nt, Homo sapiens
gaaagugcauagaauucugucugg

SEQ ID NO: 26985 - RNA, 23 nt, Homo sapiens
gggagugaagacacggagccaga

SEQ ID NO: 26986 - RNA, 21 nt, Homo sapiens
ggcugucaauucauaggucag

SEQ ID NO: 26987 - RNA, 21 nt, Homo sapiens
gucugucaauucauaggucau

SEQ ID NO: 26988 - RNA, 21 nt, Homo sapiens
acaggauugagggggggcccu

SEQ ID NO: 26989 - RNA, 22 nt, Homo sapiens
uaaccgauuucagauggugcua

SEQ ID NO: 26990 - RNA, 22 nt, Homo sapiens
uaaccgauuucagauggugcua

SEQ ID NO: 26991 - RNA, 23 nt, Homo sapiens
aacacugauuucaaauggugcua

SEQ ID NO: 26992 - RNA, 22 nt, Homo sapiens
uaaccgauuucaaauggugcua

SEQ ID NO: 26993 - RNA, 21 nt, Homo sapiens
agguaagcgcuguugcuagcc

SEQ ID NO: 26994 - RNA, 19 nt, Homo sapiens
ucccacaggaagcagacac

SEQ ID NO: 26995 - RNA, 24 nt, Homo sapiens
acgcgcaggccagagacccaggca

SEQ ID NO: 26996 - RNA, 22 nt, Homo sapiens
ugcuguuagcccuagccccgca

SEQ ID NO: 26997 - RNA, 21 nt, Homo sapiens
aggagacucacaaguuccugc

SEQ ID NO: 26998 - RNA, 21 nt, Homo sapiens
caacugaugccuuuccaagua

SEQ ID NO: 26999 - RNA, 22 nt, Homo sapiens
cucauccgauguacaauaauuu

SEQ ID NO: 27000 - RNA, 24 nt, Homo sapiens
acgcgcaggccagagacccaggca

SEQ ID NO: 27001 - RNA, 17 nt, Homo sapiens
gacagccucucccccac

SEQ ID NO: 27002 - RNA, 23 nt, Homo sapiens
ucucugcaggccgugugcuuugc

SEQ ID NO: 27003 - RNA, 17 nt, Homo sapiens
gggagaggaggaggcga

SEQ ID NO: 27004 - RNA, 23 nt, Homo sapiens
aggaacagcagcagcccgggccg

SEQ ID NO: 27005 - RNA, 22 nt, Homo sapiens
augcccuuucaucauugcacug

SEQ ID NO: 27006 - RNA, 22 nt, Homo sapiens
ucgcccucucaacccagcuuuu

SEQ ID NO: 27007 - RNA, 22 nt, Homo sapiens
uugcccucucaacccagcuuuu

SEQ ID NO: 27008 - RNA, 20 nt, Homo sapiens
acccucucaacccagcuuuu

SEQ ID NO: 27009 - RNA, 19 nt, Homo sapiens
uccucucaacccagcuuuu

SEQ ID NO: 27010 - RNA, 18 nt, Homo sapiens
aucacauucaccucccug

SEQ ID NO: 27011 - RNA, 22 nt, Homo sapiens
cucaauagacugugagcuccuu

SEQ ID NO: 27012 - RNA, 23 nt, Homo sapiens
cccagcuagauuguaagcuccuu

SEQ ID NO: 27013 - RNA, 22 nt, Homo sapiens
aaagagguuaaccagguguguu

SEQ ID NO: 27014 - RNA, 22 nt, Homo sapiens
ugaauccuugaauagguguguu

SEQ ID NO: 27015 - RNA, 22 nt, Homo sapiens
aggaaaccagcaaguguugacg

SEQ ID NO: 27016 - RNA, 22 nt, Homo sapiens
agcuagugagaagucaaugccu

SEQ ID NO: 27017 - RNA, 22 nt, Homo sapiens
ucaggaacugccuuucucucca

SEQ ID NO: 27018 - RNA, 21 nt, Homo sapiens
aaagagaccgguucacuguga

SEQ ID NO: 27019 - RNA, 23 nt, Homo sapiens
acccaacagccccugcaagggau

SEQ ID NO: 27020 - RNA, 22 nt, Homo sapiens
cugggggcggcacaggggcuca

SEQ ID NO: 27021 - RNA, 23 nt, Homo sapiens
aggaacagcagcagcccgggccg

SEQ ID NO: 27022 - RNA, 20 nt, Homo sapiens
acaaugagaacccauggucu

SEQ ID NO: 27023 - RNA, 20 nt, Homo sapiens
aggggccucagccuccuggu

SEQ ID NO: 27024 - RNA, 22 nt, Homo sapiens
ugaauuacuuuguaaaccacca

SEQ ID NO: 27025 - RNA, 26 nt, Homo sapiens
aaccaucucauacaaaccaacuacuu

SEQ ID NO: 27026 - RNA, 21 nt, Homo sapiens
aucuuugauuuucaguaguuu

SEQ ID NO: 27027 - RNA, 22 nt, Homo sapiens
uccagcaaagggaagcgcuuuc

SEQ ID NO: 27028 - RNA, 22 nt, Homo sapiens
accucuaaaggggagcgcuuug

SEQ ID NO: 27029 - RNA, 23 nt, Homo sapiens
acacucuaaagagaagcgcuuug

SEQ ID NO: 27030 - RNA, 21 nt, Homo sapiens
gcuccaaagggaagcgcuuug

SEQ ID NO: 27031 - RNA, 21 nt, Homo sapiens
ccucuaaagagaagcgcuuuc

SEQ ID NO: 27032 - RNA, 22 nt, Homo sapiens
cacucuaaagggaggcacuuug

SEQ ID NO: 27033 - RNA, 22 nt, Homo sapiens
cacucagcggccguuuccccaa

SEQ ID NO: 27034 - RNA, 22 nt, Homo sapiens
ucaacaucagucugauaagcua

SEQ ID NO: 27035 - RNA, 22 nt, Homo sapiens
cugcacuuuuaugaauaagcuc

SEQ ID NO: 27036 - RNA, 23 nt, Homo sapiens
gaaacccagcagacaauguagcu

SEQ ID NO: 27037 - RNA, 23 nt, Homo sapiens
gggagugaagacacggagccaga

SEQ ID NO: 27038 - RNA, 21 nt, Homo sapiens
gaccaaucgccguccccgccg

SEQ ID NO: 27039 - RNA, 25 nt, Homo sapiens
acggagcugucccaacaccaccccu

SEQ ID NO: 27040 - RNA, 22 nt, Homo sapiens
gcggucccgcggcgccccgccu

SEQ ID NO: 27041 - RNA, 21 nt, Homo sapiens
gcagaacuuagccacugugaa

SEQ ID NO: 27042 - RNA, 20 nt, Homo sapiens
uucccaugcccuauaccucu

SEQ ID NO: 27043 - RNA, 22 nt, Homo sapiens
caccugauaaaacugagguaua

SEQ ID NO: 27044 - RNA, 22 nt, Homo sapiens
uccggggacgaacgggacgggu

SEQ ID NO: 27045 - RNA, 23 nt, Homo sapiens
gggagugaagacacggagccaga

SEQ ID NO: 27046 - RNA, 25 nt, Homo sapiens
agcuagucaagcgcgguuguggggg

SEQ ID NO: 27047 - RNA, 23 nt, Homo sapiens
cggcucugucgucgaggcgcuca

SEQ ID NO: 27048 - RNA, 21 nt, Homo sapiens
cacucugaagggaagcgcuuu

SEQ ID NO: 27049 - RNA, 21 nt, Homo sapiens
caucaccuuccuucuccucca

SEQ ID NO: 27050 - RNA, 22 nt, Homo sapiens
gaggcucagaauggcucaggag

SEQ ID NO: 27051 - RNA, 19 nt, Homo sapiens
ccaccucccgaguccucac

SEQ ID NO: 27052 - RNA, 22 nt, Homo sapiens
ucaggaacugccuuucucucca

SEQ ID NO: 27053 - RNA, 22 nt, Homo sapiens
cuguuccugcugaacugagcca

SEQ ID NO: 27054 - RNA, 22 nt, Homo sapiens
acaaccagcuaagacacugcca

SEQ ID NO: 27055 - RNA, 23 nt, Homo sapiens
gcaaucagcuaacuacacugccu

SEQ ID NO: 27056 - RNA, 22 nt, Homo sapiens
accagcuaacaauacacugcca

SEQ ID NO: 27057 - RNA, 22 nt, Homo sapiens
gccagcuaacaauacacugccu

SEQ ID NO: 27058 - RNA, 22 nt, Homo sapiens
aucgggaggggacugagccuga

SEQ ID NO: 27059 - RNA, 19 nt, Homo sapiens
ucagcaguaccagccuaga

SEQ ID NO: 27060 - RNA, 20 nt, Homo sapiens
gcagcuguccgcccagacac

SEQ ID NO: 27061 - RNA, 22 nt, Homo sapiens
acaccuggcuccacacgcgggc

SEQ ID NO: 27062 - RNA, 21 nt, Homo sapiens
agagcucauccauaguuguca

SEQ ID NO: 27063 - RNA, 21 nt, Homo sapiens
acaggauugagggggggcccu

SEQ ID NO: 27064 - RNA, 23 nt, Homo sapiens
acugaggggccucagaccgagcu

SEQ ID NO: 27065 - RNA, 20 nt, Homo sapiens
uccccacagacccagagccg

SEQ ID NO: 27066 - RNA, 21 nt, Homo sapiens
ccccucccagccucccugcca

SEQ ID NO: 27067 - RNA, 24 nt, Homo sapiens
ucacagguuaaagggucucaggga

SEQ ID NO: 27068 - RNA, 22 nt, Homo sapiens
ucacaaguuagggucucaggga

SEQ ID NO: 27069 - RNA, 23 nt, Homo sapiens
agcccuguucuacagcccugagg

SEQ ID NO: 27070 - RNA, 25 nt, Homo sapiens
aagaaagagucuugcuuugucgccc

SEQ ID NO: 27071 - RNA, 22 nt, Homo sapiens
acccuuaucaguucuccgucca

SEQ ID NO: 27072 - RNA, 22 nt, Homo sapiens
cccaacaacaggaaacuaccua

SEQ ID NO: 27073 - RNA, 22 nt, Homo sapiens
cgggacguccagacucaacucu

SEQ ID NO: 27074 - RNA, 23 nt, Homo sapiens
ucaccaaaacauggaagcacuua

SEQ ID NO: 27075 - RNA, 23 nt, Homo sapiens
cuacuaaaacauggaagcacuua

SEQ ID NO: 27076 - RNA, 23 nt, Homo sapiens
ccacugaaacauggaagcacuua

SEQ ID NO: 27077 - RNA, 23 nt, Homo sapiens
acacucaaacauggaagcacuua

SEQ ID NO: 27078 - RNA, 17 nt, Homo sapiens
aagcauggaagcacuua

SEQ ID NO: 27079 - RNA, 23 nt, Homo sapiens
acgcucaaaugucgcagcacuuu

SEQ ID NO: 27080 - RNA, 23 nt, Homo sapiens
acaccccaaaaucgaagcacuuc

SEQ ID NO: 27081 - RNA, 22 nt, Homo sapiens
gugauugccacucuccugagua

SEQ ID NO: 27082 - RNA, 22 nt, Homo sapiens
gaccucagcuaugacagcacuu

SEQ ID NO: 27083 - RNA, 22 nt, Homo sapiens
acaguccaaagggaagcacuuu

SEQ ID NO: 27084 - RNA, 21 nt, Homo sapiens
cccucuaaaaggaagcacuuu

SEQ ID NO: 27085 - RNA, 22 nt, Homo sapiens
acccucuaaaaggaagcacuuu

SEQ ID NO: 27086 - RNA, 22 nt, Homo sapiens
acccaccaaagagaagcacuuu

SEQ ID NO: 27087 - RNA, 21 nt, Homo sapiens
cccucaaaaaggaagcacuuu

SEQ ID NO: 27088 - RNA, 21 nt, Homo sapiens
ggacuauagaacuuucccccu

SEQ ID NO: 27089 - RNA, 22 nt, Homo sapiens
caaacaccauugucacacucca

SEQ ID NO: 27090 - RNA, 22 nt, Homo sapiens
uccggggacgaacgggacgggu

SEQ ID NO: 27091 - RNA, 17 nt, Homo sapiens
ggguggcagcgguggga

SEQ ID NO: 27092 - RNA, 22 nt, Homo sapiens
cccaacaacaggaaacuaccua

SEQ ID NO: 27093 - RNA, 22 nt, Homo sapiens
aggcauaggaugacaaagggaa

SEQ ID NO: 27094 - RNA, 22 nt, Homo sapiens
aggcgaaggaugacaaagggaa

SEQ ID NO: 27095 - RNA, 22 nt, Homo sapiens
cucaauagacugugagcuccuu

SEQ ID NO: 27096 - RNA, 22 nt, Homo sapiens
aguccagauucugugcccacca

SEQ ID NO: 27097 - RNA, 21 nt, Homo sapiens
guuauagaucuggauuugaac

SEQ ID NO: 27098 - RNA, 19 nt, Homo sapiens
ucagcaguaccagccuaga

SEQ ID NO: 27099 - RNA, 22 nt, Homo sapiens
gcacauguucugcggcccacca

SEQ ID NO: 27100 - RNA, 20 nt, Homo sapiens
aggggccucagccuccuggu

SEQ ID NO: 27101 - RNA, 23 nt, Homo sapiens
cccagcuagauuguaagcuccuu

SEQ ID NO: 27102 - RNA, 21 nt, Homo sapiens
cacaaccucaguguuuccagg

SEQ ID NO: 27103 - RNA, 22 nt, Homo sapiens
ggaggccgggacgagugcaaua

SEQ ID NO: 27104 - RNA, 21 nt, Homo sapiens
aaaagcuaagucaucauauau

SEQ ID NO: 27105 - RNA, 22 nt, Homo sapiens
ccaucuuuaccagacaguguua

SEQ ID NO: 27106 - RNA, 22 nt, Homo sapiens
ucagaccgagacaagugcaaug

SEQ ID NO: 27107 - RNA, 21 nt, Homo sapiens
aacuccuguaugaagccguuc

SEQ ID NO: 27108 - RNA, 21 nt, Homo sapiens
gaaggaagugagugcagccac

SEQ ID NO: 27109 - RNA, 22 nt, Homo sapiens
aaggugauggucagcagacaua

SEQ ID NO: 27110 - RNA, 20 nt, Homo sapiens
aggggccucagccuccuggu

SEQ ID NO: 27111 - RNA, 23 nt, Homo sapiens
acucagaaggacaaguagaguuu

SEQ ID NO: 27112 - RNA, 21 nt, Homo sapiens
auaauggagaccaggccacga

SEQ ID NO: 27113 - RNA, 22 nt, Homo sapiens
ucccucacacagaauuccagaa

SEQ ID NO: 27114 - RNA, 18 nt, Homo sapiens
aucacauucaccucccug

SEQ ID NO: 27115 - RNA, 22 nt, Homo sapiens
acaccuggcuccacacgcgggc

SEQ ID NO: 27116 - RNA, 23 nt, Homo sapiens
gggagugaagacacggagccaga

SEQ ID NO: 27117 - RNA, 21 nt, Homo sapiens
gaccaaucgccguccccgccg

SEQ ID NO: 27118 - RNA, 22 nt, Homo sapiens
cagaagugggccgggcacaggg

SEQ ID NO: 27119 - RNA, 22 nt, Homo sapiens
uccacauggaguugcuguuaca

SEQ ID NO: 27120 - RNA, 23 nt, Homo sapiens
gaaacccagcagacaauguagcu

SEQ ID NO: 27121 - RNA, 22 nt, Homo sapiens
augggacauccuacauaugcaa

SEQ ID NO: 27122 - RNA, 21 nt, Homo sapiens
guucuaacccauuguggccaa

SEQ ID NO: 27123 - RNA, 22 nt, Homo sapiens
gauccgagcaccggggaccccc

SEQ ID NO: 27124 - RNA, 24 nt, Homo sapiens
acgcgcaggccagagacccaggca

SEQ ID NO: 27125 - RNA, 22 nt, Homo sapiens
gcggucccgcggcgccccgccu

SEQ ID NO: 27126 - RNA, 20 nt, Homo sapiens
aggggccucagccuccuggu

SEQ ID NO: 27127 - RNA, 22 nt, Homo sapiens
ugcuguuagcccuagccccgca

SEQ ID NO: 27128 - RNA, 20 nt, Homo sapiens
acagcaaggagggcaggagg

SEQ ID NO: 27129 - RNA, 24 nt, Homo sapiens
acacucuaaagggaagcacuuugu

SEQ ID NO: 27130 - RNA, 22 nt, Homo sapiens
acucuaaagggaagcacuuugu

SEQ ID NO: 27131 - RNA, 22 nt, Homo sapiens
augcccuuucaucauugcacug

SEQ ID NO: 27132 - RNA, 23 nt, Homo sapiens
cccagcuagauuguaagcuccuu

SEQ ID NO: 27133 - RNA, 20 nt, Homo sapiens
uucccaugcccuauaccucu

SEQ ID NO: 27134 - RNA, 22 nt, Homo sapiens
acucaguaugccaggguaccau

SEQ ID NO: 27135 - RNA, 23 nt, Homo sapiens
cuaucugcacuagaugcaccuua

SEQ ID NO: 27136 - RNA, 22 nt, Homo sapiens
ucggucccucgggccagggcag

SEQ ID NO: 27137 - RNA, 19 nt, Homo sapiens
guccugaauuccgcagccu

SEQ ID NO: 27138 - RNA, 23 nt, Homo sapiens
aaagucucgcucucugccccuca

SEQ ID NO: 27139 - RNA, 20 nt, Homo sapiens
uacugcuuccacagcucccc

SEQ ID NO: 27140 - RNA, 22 nt, Homo sapiens
cgaauccaccacgaacaacuuc

SEQ ID NO: 27141 - RNA, 22 nt, Homo sapiens
uuucaguuaucaaucugucaca

SEQ ID NO: 27142 - RNA, 23 nt, Homo sapiens
guagugggccgagccgagugaca

SEQ ID NO: 27143 - RNA, 22 nt, Homo sapiens
uggcagcagcggagggggcaga

SEQ ID NO: 27144 - RNA, 20 nt, Homo sapiens
ccagcagcaccuggggcagu

SEQ ID NO: 27145 - RNA, 21 nt, Homo sapiens
auccuguacugagcugccccg

SEQ ID NO: 27146 - RNA, 22 nt, Homo sapiens
cagaagugggccgggcacaggg

SEQ ID NO: 27147 - RNA, 21 nt, Homo sapiens
cucccccacugcagcuggcac

SEQ ID NO: 27148 - RNA, 23 nt, Homo sapiens
acacagcucuuccauaucuccag

SEQ ID NO: 27149 - RNA, 22 nt, Homo sapiens
ucccucacacagaauuccagaa

SEQ ID NO: 27150 - RNA, 22 nt, Homo sapiens
augcuuuuugggguaagggcuu

SEQ ID NO: 27151 - RNA, 21 nt, Homo sapiens
gagcuacagugcuucaucuca

SEQ ID NO: 27152 - RNA, 22 nt, Homo sapiens
ccggcugcaacacaagacacga

SEQ ID NO: 27153 - RNA, 22 nt, Homo sapiens
ucagaccgagacaagugcaaug

SEQ ID NO: 27154 - RNA, 20 nt, Homo sapiens
auuucuauaucuaucuccau

SEQ ID NO: 27155 - RNA, 22 nt, Homo sapiens
ccucaggcacggccgggccacc

SEQ ID NO: 27156 - RNA, 22 nt, Homo sapiens
gcugaggcuguggggcuggagu

SEQ ID NO: 27157 - RNA, 22 nt, Homo sapiens
gugggguggguggucaggccga

SEQ ID NO: 27158 - RNA, 22 nt, Homo sapiens
cacgaccgacgccacgccgagu

SEQ ID NO: 27159 - RNA, 19 nt, Homo sapiens
cagcaucagcagcaucauc

SEQ ID NO: 27160 - RNA, 22 nt, Homo sapiens
acuccaacagggccgcgucucc

SEQ ID NO: 27161 - RNA, 22 nt, Homo sapiens
ggagcccgcgccccgcgccgag

SEQ ID NO: 27162 - RNA, 23 nt, Homo sapiens
gggagugaagacacggagccaga

SEQ ID NO: 27163 - RNA, 23 nt, Homo sapiens
cuaucugcacuagaugcaccuua

SEQ ID NO: 27164 - RNA, 23 nt, Homo sapiens
acccucuauagggaagcgcguuc

SEQ ID NO: 27165 - RNA, 22 nt, Homo sapiens
uauccacuacaccccgcugccu

SEQ ID NO: 27166 - RNA, 26 nt, Homo sapiens
uuucagaauuugcugccaucaucauc

SEQ ID NO: 27167 - RNA, 21 nt, Homo sapiens
gagcugcauccuggcuccggg

SEQ ID NO: 27168 - RNA, 23 nt, Homo sapiens
gggagugaagacacggagccaga

SEQ ID NO: 27169 - RNA, 23 nt, Homo sapiens
cagcugcuuuugggauuccguug

SEQ ID NO: 27170 - RNA, 21 nt, Homo sapiens
ugcaaugcaacuacaaugcac

SEQ ID NO: 27171 - RNA, 22 nt, Homo sapiens
ucagaccgagacaagugcaaug

SEQ ID NO: 27172 - RNA, 24 nt, Homo sapiens
acgcgcaggccagagacccaggca

SEQ ID NO: 27173 - RNA, 17 nt, Homo sapiens
gacagccucucccccac

SEQ ID NO: 27174 - RNA, 22 nt, Homo sapiens
cuaccauaggguaaaaccacug

SEQ ID NO: 27175 - RNA, 22 nt, Homo sapiens
cagaaagugcuucccucuagag

SEQ ID NO: 27176 - RNA, 21 nt, Homo sapiens
gaccaaucgccguccccgccg

SEQ ID NO: 27177 - RNA, 22 nt, Homo sapiens
cagaagugggccgggcacaggg

SEQ ID NO: 27178 - RNA, 22 nt, Homo sapiens
aggcauaggaugacaaagggaa

SEQ ID NO: 27179 - RNA, 22 nt, Homo sapiens
aggcgaaggaugacaaagggaa

SEQ ID NO: 27180 - RNA, 21 nt, Homo sapiens
agagcucauccauaguuguca

SEQ ID NO: 27181 - RNA, 22 nt, Homo sapiens
agccacaaucaccuucugaucu

SEQ ID NO: 27182 - RNA, 22 nt, Homo sapiens
aaucagucucauugcuuuauaa

SEQ ID NO: 27183 - RNA, 21 nt, Homo sapiens
acaaaccacagugugcugcug

SEQ ID NO: 27184 - RNA, 21 nt, Homo sapiens
guucuaacccauuguggccaa

SEQ ID NO: 27185 - RNA, 24 nt, Homo sapiens
acgcgcaggccagagacccaggca

SEQ ID NO: 27186 - RNA, 22 nt, Homo sapiens
gcggucccgcggcgccccgccu

SEQ ID NO: 27187 - RNA, 22 nt, Homo sapiens
ugcuguuagcccuagccccgca

SEQ ID NO: 27188 - RNA, 21 nt, Homo sapiens
aggagacucacaaguuccugc

SEQ ID NO: 27189 - RNA, 20 nt, Homo sapiens
uacugcuuccacagcucccc

SEQ ID NO: 27190 - RNA, 24 nt, Homo sapiens
cacccccagagccucagcucccca

SEQ ID NO: 27191 - RNA, 21 nt, Homo sapiens
gcuccaaccucagcagacugu

SEQ ID NO: 27192 - RNA, 17 nt, Homo sapiens
gggagaggaggaggcga

SEQ ID NO: 27193 - RNA, 19 nt, Homo sapiens
guugggaucacaggcgccc

SEQ ID NO: 27194 - RNA, 24 nt, Homo sapiens
acugcuggucuucagucagggcca

SEQ ID NO: 27195 - RNA, 22 nt, Homo sapiens
ccucaggcacggccgggccacc

SEQ ID NO: 27196 - RNA, 18 nt, Homo sapiens
uggcgccugaacagggac

SEQ ID NO: 27197 - RNA, 23 nt, Homo sapiens
cgugagcuccuggaggacaggga

SEQ ID NO: 27198 - RNA, 22 nt, Homo sapiens
ggcucccaagaaccucaccugu

SEQ ID NO: 27199 - RNA, 18 nt, Homo sapiens
uggcgccugaacagggac

SEQ ID NO: 27200 - RNA, 22 nt, Homo sapiens
uuucaguuaucaaucugucaca

SEQ ID NO: 27201 - RNA, 21 nt, Homo sapiens
agagguugacuguauaauauu

SEQ ID NO: 27202 - RNA, 21 nt, Homo sapiens
agaggcagguuccuggaucau

SEQ ID NO: 27203 - RNA, 21 nt, Homo sapiens
cuagggaagaacagugagcaa

SEQ ID NO: 27204 - RNA, 21 nt, Homo sapiens
caucaccuuccuucuccucca

SEQ ID NO: 27205 - RNA, 23 nt, Homo sapiens
agaaaccaugggguaugagcaga

SEQ ID NO: 27206 - RNA, 21 nt, Homo sapiens
cucccccacugcagcuggcac

SEQ ID NO: 27207 - RNA, 22 nt, Homo sapiens
cucccuucuuuccucccgucuu

SEQ ID NO: 27208 - RNA, 22 nt, Homo sapiens
ucaaugacucagguaaguugca

SEQ ID NO: 27209 - RNA, 21 nt, Homo sapiens
ccccucccagccucccugcca

SEQ ID NO: 27210 - RNA, 22 nt, Homo sapiens
cugggggcggcacaggggcuca

SEQ ID NO: 27211 - RNA, 22 nt, Homo sapiens
caaacaccauugucacacucca

SEQ ID NO: 27212 - RNA, 18 nt, Homo sapiens
aucacauucaccucccug

SEQ ID NO: 27213 - RNA, 23 nt, Homo sapiens
gggagugaagacacggagccaga

SEQ ID NO: 27214 - RNA, 27 nt, Homo sapiens
uuuagcacagugcuuauacaagaaggu

SEQ ID NO: 27215 - RNA, 21 nt, Homo sapiens
ugcaggcugaucuucuucucu

SEQ ID NO: 27216 - RNA, 21 nt, Homo sapiens
ggucagaacccaucauucacu

SEQ ID NO: 27217 - RNA, 22 nt, Homo sapiens
aucagagcccucugagcuucag

SEQ ID NO: 27218 - RNA, 21 nt, Homo sapiens
acuagacugugagcuccucga

SEQ ID NO: 27219 - RNA, 21 nt, Homo sapiens
aagacgggaggagaggaguga

SEQ ID NO: 27220 - RNA, 22 nt, Homo sapiens
aucgggaggggacugagccuga

SEQ ID NO: 27221 - RNA, 23 nt, Homo sapiens
gaaagugcccucaaggcugagug

SEQ ID NO: 27222 - RNA, 18 nt, Homo sapiens
augacaccucccugugaa

SEQ ID NO: 27223 - RNA, 22 nt, Homo sapiens
uccagcaaagggaagcgcuuuc

SEQ ID NO: 27224 - RNA, 22 nt, Homo sapiens
accucuaaaggggagcgcuuug

SEQ ID NO: 27225 - RNA, 23 nt, Homo sapiens
acacucuaaagagaagcgcuuug

SEQ ID NO: 27226 - RNA, 21 nt, Homo sapiens
gcuccaaagggaagcgcuuug

SEQ ID NO: 27227 - RNA, 21 nt, Homo sapiens
cacucugaagggaagcgcuuu

SEQ ID NO: 27228 - RNA, 21 nt, Homo sapiens
ccucuaaagagaagcgcuuuc

SEQ ID NO: 27229 - RNA, 22 nt, Homo sapiens
uccucuuuucuuagagacucac

SEQ ID NO: 27230 - RNA, 17 nt, Homo sapiens
uggaggccccagcgaga

SEQ ID NO: 27231 - RNA, 20 nt, Homo sapiens
uccccacagacccagagccg

SEQ ID NO: 27232 - RNA, 21 nt, Homo sapiens
caucaccuuccuucuccucca

SEQ ID NO: 27233 - RNA, 22 nt, Homo sapiens
aggcauaggaugacaaagggaa

SEQ ID NO: 27234 - RNA, 22 nt, Homo sapiens
aggcgaaggaugacaaagggaa

SEQ ID NO: 27235 - RNA, 22 nt, Homo sapiens
ucaggaacugccuuucucucca

SEQ ID NO: 27236 - RNA, 23 nt, Homo sapiens
cggcucugucgucgaggcgcuca

SEQ ID NO: 27237 - RNA, 22 nt, Homo sapiens
gagguuucccguguauguuuca

SEQ ID NO: 27238 - RNA, 23 nt, Homo sapiens
acucagaaggacaaguagaguuu

SEQ ID NO: 27239 - RNA, 23 nt, Homo sapiens
ugcgaacucaccacggacaaccu

SEQ ID NO: 27240 - RNA, 22 nt, Homo sapiens
uucacacugcaugcucugggua

SEQ ID NO: 27241 - RNA, 20 nt, Homo sapiens
cuggaggaagggcccagagg

SEQ ID NO: 27242 - RNA, 22 nt, Homo sapiens
gccuaagacacaggcccagaga

SEQ ID NO: 27243 - RNA, 22 nt, Homo sapiens
gcugaggcuguggggcuggagu

SEQ ID NO: 27244 - RNA, 22 nt, Homo sapiens
gauuccaauuuuuccacaucuu

SEQ ID NO: 27245 - RNA, 21 nt, Homo sapiens
caucaccuuccuucuccucca

SEQ ID NO: 27246 - RNA, 21 nt, Homo sapiens
gaccaaucgccguccccgccg

SEQ ID NO: 27247 - RNA, 22 nt, Homo sapiens
gcggucccgcggcgccccgccu

SEQ ID NO: 27248 - RNA, 23 nt, Homo sapiens
cacugugggcccucuccgcacca

SEQ ID NO: 27249 - RNA, 21 nt, Homo sapiens
gaccaaucgccguccccgccg

SEQ ID NO: 27250 - RNA, 22 nt, Homo sapiens
gcggucccgcggcgccccgccu

SEQ ID NO: 27251 - RNA, 23 nt, Homo sapiens
cacugugggcccucuccgcacca

SEQ ID NO: 27252 - RNA, 22 nt, Homo sapiens
cacauggccaaaacagagaaga

SEQ ID NO: 27253 - RNA, 21 nt, Homo sapiens
aaagagaccgguucacuguga

SEQ ID NO: 27254 - RNA, 22 nt, Homo sapiens
uagucaagugaagcagugggag

SEQ ID NO: 27255 - RNA, 22 nt, Homo sapiens
ucagccgcugucacacgcacag

SEQ ID NO: 27256 - RNA, 22 nt, Homo sapiens
cuguuccugcugaacugagcca

SEQ ID NO: 27257 - RNA, 22 nt, Homo sapiens
gaacuugcuaaaaaugcagaau

SEQ ID NO: 27258 - RNA, 22 nt, Homo sapiens
cucagagcagacgugguucuca

SEQ ID NO: 27259 - RNA, 25 nt, Homo sapiens
agcuagucaagcgcgguuguggggg

SEQ ID NO: 27260 - RNA, 25 nt, Homo sapiens
accaacggaccuacuucccuccgcc

SEQ ID NO: 27261 - RNA, 22 nt, Homo sapiens
uacagauggauaccgugcaauu

SEQ ID NO: 27262 - RNA, 25 nt, Homo sapiens
acggagcugucccaacaccaccccu

SEQ ID NO: 27263 - RNA, 22 nt, Homo sapiens
uccacauggaguugcuguuaca

SEQ ID NO: 27264 - RNA, 23 nt, Homo sapiens
acacacucacacacacacacuca

SEQ ID NO: 27265 - RNA, 22 nt, Homo sapiens
uauccacuacaccccgcugccu

SEQ ID NO: 27266 - RNA, 20 nt, Homo sapiens
cccgccgcgucgcccugggg

SEQ ID NO: 27267 - RNA, 25 nt, Homo sapiens
gaauccugguucugucccucacuag

SEQ ID NO: 27268 - RNA, 22 nt, Homo sapiens
cacgaccgacgccacgccgagu

SEQ ID NO: 27269 - RNA, 23 nt, Homo sapiens
cccaacagacauggcgguacuca

SEQ ID NO: 27270 - RNA, 21 nt, Homo sapiens
acaggauugagggggggcccu

SEQ ID NO: 27271 - RNA, 22 nt, Homo sapiens
caacaaaaucacugaugcugga

SEQ ID NO: 27272 - RNA, 23 nt, Homo sapiens
cggcucugucgucgaggcgcuca

SEQ ID NO: 27273 - RNA, 25 nt, Homo sapiens
acggagcugucccaacaccaccccu

SEQ ID NO: 27274 - RNA, 20 nt, Homo sapiens
uacugcuuccacagcucccc

SEQ ID NO: 27275 - RNA, 20 nt, Homo sapiens
ugucuccacagggcucuuua

SEQ ID NO: 27276 - RNA, 22 nt, Homo sapiens
acuccaacagggccgcgucucc

SEQ ID NO: 27277 - RNA, 21 nt, Homo sapiens
gaccaaucgccguccccgccg

SEQ ID NO: 27278 - RNA, 22 nt, Homo sapiens
gcggucccgcggcgccccgccu

SEQ ID NO: 27279 - RNA, 22 nt, Homo sapiens
acaaaguucuguagugcacuga

SEQ ID NO: 27280 - RNA, 22 nt, Homo sapiens
cuagugguccuaaacauuucac

SEQ ID NO: 27281 - RNA, 23 nt, Homo sapiens
aaaucagaaucacaccuggggga

SEQ ID NO: 27282 - RNA, 21 nt, Homo sapiens
acguggaauuuccucuauguu

SEQ ID NO: 27283 - RNA, 22 nt, Homo sapiens
gccagcuaacaauacacugccu

SEQ ID NO: 27284 - RNA, 24 nt, Homo sapiens
acgcagagcccgaaagcccccagu

SEQ ID NO: 27285 - RNA, 20 nt, Homo sapiens
uccccacagacccagagccg

SEQ ID NO: 27286 - RNA, 23 nt, Homo sapiens
aauaaauuaaauuuauauuacag

SEQ ID NO: 27287 - RNA, 23 nt, Homo sapiens
aaagucucgcucucugccccuca

SEQ ID NO: 27288 - RNA, 18 nt, Homo sapiens
gaaaugagggccagcuga

SEQ ID NO: 27289 - RNA, 23 nt, Homo sapiens
acgggugcgauuucugugugaga

SEQ ID NO: 27290 - RNA, 22 nt, Homo sapiens
aggcauaggaugacaaagggaa

SEQ ID NO: 27291 - RNA, 22 nt, Homo sapiens
aggcgaaggaugacaaagggaa

SEQ ID NO: 27292 - RNA, 22 nt, Homo sapiens
aggucucacuuuguugcccaga

SEQ ID NO: 27293 - RNA, 25 nt, Homo sapiens
aaggagcucagaagcccugcccagc

SEQ ID NO: 27294 - RNA, 19 nt, Homo sapiens
ccaccucccgaguccucac

SEQ ID NO: 27295 - RNA, 21 nt, Homo sapiens
ggucagaacccaucauucacu

SEQ ID NO: 27296 - RNA, 23 nt, Homo sapiens
aggaacagcagcagcccgggccg

SEQ ID NO: 27297 - RNA, 22 nt, Homo sapiens
accagguuccaccccagcaggc

SEQ ID NO: 27298 - RNA, 23 nt, Homo sapiens
guucuguccuggaagaacauacu

SEQ ID NO: 27299 - RNA, 22 nt, Homo sapiens
cucccuucuuuccucccgucuu

SEQ ID NO: 27300 - RNA, 23 nt, Homo sapiens
uccaucaucaaaacaaauggagu

SEQ ID NO: 27301 - RNA, 23 nt, Homo sapiens
acucaccgacagcguugaauguu

SEQ ID NO: 27302 - RNA, 23 nt, Homo sapiens
acccaccgacagcaaugaauguu

SEQ ID NO: 27303 - RNA, 22 nt, Homo sapiens
acucaccgacagguugaauguu

SEQ ID NO: 27304 - RNA, 23 nt, Homo sapiens
acccaccgacaacaaugaauguu

SEQ ID NO: 27305 - RNA, 22 nt, Homo sapiens
aagaagugcaccgcgaauguuu

SEQ ID NO: 27306 - RNA, 21 nt, Homo sapiens
gaccaaucgccguccccgccg

SEQ ID NO: 27307 - RNA, 22 nt, Homo sapiens
gcggucccgcggcgccccgccu

SEQ ID NO: 27308 - RNA, 22 nt, Homo sapiens
ugcuguuagcccuagccccgca

SEQ ID NO: 27309 - RNA, 22 nt, Homo sapiens
cugggggcggcacaggggcuca

SEQ ID NO: 27310 - RNA, 22 nt, Homo sapiens
cagaagugggccgggcacaggg

SEQ ID NO: 27311 - RNA, 20 nt, Homo sapiens
uccgccugucugaacaguga

SEQ ID NO: 27312 - RNA, 21 nt, Homo sapiens
uggggauuacacuucaacagg

SEQ ID NO: 27313 - RNA, 22 nt, Homo sapiens
augcccuuuuaacauugcacug

SEQ ID NO: 27314 - RNA, 22 nt, Homo sapiens
augcccuuucaucauugcacug

SEQ ID NO: 27315 - RNA, 22 nt, Homo sapiens
acaaaguucuguagugcacuga

SEQ ID NO: 27316 - RNA, 22 nt, Homo sapiens
acaaaguucugugaugcacuga

SEQ ID NO: 27317 - RNA, 21 nt, Homo sapiens
ccaaguucugucaugcacuga

SEQ ID NO: 27318 - RNA, 22 nt, Homo sapiens
uccacauggaguugcuguuaca

SEQ ID NO: 27319 - RNA, 22 nt, Homo sapiens
uagucaagugaagcagugggag

SEQ ID NO: 27320 - RNA, 23 nt, Homo sapiens
ucaguuuugcauagauuugcaca

SEQ ID NO: 27321 - RNA, 23 nt, Homo sapiens
ucaguuuugcauggauuugcaca

SEQ ID NO: 27322 - RNA, 23 nt, Homo sapiens
gcuuugacaauacuauugcacug

SEQ ID NO: 27323 - RNA, 23 nt, Homo sapiens
gcuuugacaauaucauugcacug

SEQ ID NO: 27324 - RNA, 23 nt, Homo sapiens
gcgcccaauuaaugucuguugau

SEQ ID NO: 27325 - RNA, 23 nt, Homo sapiens
ugcgaacucaccacggacaaccu

SEQ ID NO: 27326 - RNA, 23 nt, Homo sapiens
acccuauaagcaauauugcacua

SEQ ID NO: 27327 - RNA, 21 nt, Homo sapiens
aaacaucacugcaagucuuaa

SEQ ID NO: 27328 - RNA, 21 nt, Homo sapiens
uucacuccaaaaggugcaaaa

SEQ ID NO: 27329 - RNA, 21 nt, Homo sapiens
cugaaaccaaguaugggucgc

SEQ ID NO: 27330 - RNA, 23 nt, Homo sapiens
agacaaggcccacccgugcaaac

SEQ ID NO: 27331 - RNA, 22 nt, Homo sapiens
uggggacccucccugaaccaag

SEQ ID NO: 27332 - RNA, 21 nt, Homo sapiens
cugcugggccacaacguggga

SEQ ID NO: 27333 - RNA, 20 nt, Homo sapiens
gcaagacaucacaagacucu

SEQ ID NO: 27334 - RNA, 22 nt, Homo sapiens
caaacaccauugucacacucca

SEQ ID NO: 27335 - RNA, 22 nt, Homo sapiens
ucccucacacagaauuccagaa

SEQ ID NO: 27336 - RNA, 23 nt, Homo sapiens
cccaacagacauggcgguacuca

SEQ ID NO: 27337 - RNA, 23 nt, Homo sapiens
acacucuaaagagaagcgcuuug

SEQ ID NO: 27338 - RNA, 23 nt, Homo sapiens
ucucgugacaugaugauccccga

SEQ ID NO: 27339 - RNA, 21 nt, Homo sapiens
acuggcugagucaggacuagc

SEQ ID NO: 27340 - RNA, 19 nt, Homo sapiens
guccugaauuccgcagccu

SEQ ID NO: 27341 - RNA, 25 nt, Homo sapiens
acggagcugucccaacaccaccccu

SEQ ID NO: 27342 - RNA, 23 nt, Homo sapiens
cuccagccccuccagggcuuccu

SEQ ID NO: 27343 - RNA, 24 nt, Homo sapiens
cacccccagagccucagcucccca

SEQ ID NO: 27344 - RNA, 22 nt, Homo sapiens
caaacaccauugucacacucca

SEQ ID NO: 27345 - RNA, 23 nt, Homo sapiens
cacugugggcccucuccgcacca

SEQ ID NO: 27346 - RNA, 21 nt, Homo sapiens
gaccaaucgccguccccgccg

SEQ ID NO: 27347 - RNA, 22 nt, Homo sapiens
gcggucccgcggcgccccgccu

SEQ ID NO: 27348 - RNA, 22 nt, Homo sapiens
gcacaaaucuccagaccaccca

SEQ ID NO: 27349 - RNA, 18 nt, Homo sapiens
aucacauucaccucccug

SEQ ID NO: 27350 - RNA, 22 nt, Homo sapiens
gaggcucagaauggcucaggag

SEQ ID NO: 27351 - RNA, 21 nt, Homo sapiens
acaggauugagggggggcccu

SEQ ID NO: 27352 - RNA, 22 nt, Homo sapiens
ugcuguuagcccuagccccgca

SEQ ID NO: 27353 - RNA, 22 nt, Homo sapiens
cggugagcacccggccccugcg

SEQ ID NO: 27354 - RNA, 22 nt, Homo sapiens
aagagggagacccaggcucgga

SEQ ID NO: 27355 - RNA, 22 nt, Homo sapiens
cagcugguugaaggggaccaaa

SEQ ID NO: 27356 - RNA, 21 nt, Homo sapiens
cuggaggacggcaacagucag

SEQ ID NO: 27357 - RNA, 20 nt, Homo sapiens
cccugcgccaucuccucuac

SEQ ID NO: 27358 - RNA, 21 nt, Homo sapiens
gcagaacuuagccacugugaa

SEQ ID NO: 27359 - RNA, 23 nt, Homo sapiens
gggagugaagacacggagccaga

SEQ ID NO: 27360 - RNA, 22 nt, Homo sapiens
aacccauggaauucaguucuca

SEQ ID NO: 27361 - RNA, 22 nt, Homo sapiens
agugaauucuaccagugccaua

SEQ ID NO: 27362 - RNA, 21 nt, Homo sapiens
aggcggcaggcacaggacugg

SEQ ID NO: 27363 - RNA, 22 nt, Homo sapiens
uagucaagugaagcagugggag

SEQ ID NO: 27364 - RNA, 22 nt, Homo sapiens
ucagccgcugucacacgcacag

SEQ ID NO: 27365 - RNA, 22 nt, Homo sapiens
agcugaguguaggauguuuaca

SEQ ID NO: 27366 - RNA, 22 nt, Homo sapiens
ugcaagccuugggugugggagg

SEQ ID NO: 27367 - RNA, 22 nt, Homo sapiens
gguucaguuguucaaccaguua

SEQ ID NO: 27368 - RNA, 21 nt, Homo sapiens
guaaugggaccuuccucuuug

SEQ ID NO: 27369 - RNA, 23 nt, Homo sapiens
uguaggcuggggauaaaugaaua

SEQ ID NO: 27370 - RNA, 22 nt, Homo sapiens
cacauggccaaaacagagaaga

SEQ ID NO: 27371 - RNA, 22 nt, Homo sapiens
cucauccgauguacaauaauuu

SEQ ID NO: 27372 - RNA, 23 nt, Homo sapiens
cacaaauucgguucuacagggua

SEQ ID NO: 27373 - RNA, 18 nt, Homo sapiens
gaaaugagggccagcuga

SEQ ID NO: 27374 - RNA, 23 nt, Homo sapiens
ucucacccagguagcaaggauua

SEQ ID NO: 27375 - RNA, 22 nt, Homo sapiens
aguccagauucugugcccacca

SEQ ID NO: 27376 - RNA, 22 nt, Homo sapiens
cuggagagacaaggggaagagg

SEQ ID NO: 27377 - RNA, 22 nt, Homo sapiens
gcacaaaucuccagaccaccca

SEQ ID NO: 27378 - RNA, 22 nt, Homo sapiens
ugaauuacuuuguaaaccacca

SEQ ID NO: 27379 - RNA, 21 nt, Homo sapiens
uggaaaccaagagugggucgc

SEQ ID NO: 27380 - RNA, 21 nt, Homo sapiens
cugaaaccaaguaugggucgc

SEQ ID NO: 27381 - RNA, 22 nt, Homo sapiens
cuggagagacaaggggaagagg

SEQ ID NO: 27382 - RNA, 20 nt, Homo sapiens
cccugcgccaucuccucuac

SEQ ID NO: 27383 - RNA, 21 nt, Homo sapiens
gaccaaucgccguccccgccg

SEQ ID NO: 27384 - RNA, 23 nt, Homo sapiens
aaagucucgcucucugccccuca

SEQ ID NO: 27385 - RNA, 22 nt, Homo sapiens
gcggucccgcggcgccccgccu

SEQ ID NO: 27386 - RNA, 22 nt, Homo sapiens
ugcuguuagcccuagccccgca

SEQ ID NO: 27387 - RNA, 22 nt, Homo sapiens
ggcagagagucagagcgcggau

SEQ ID NO: 27388 - RNA, 22 nt, Homo sapiens
augcccuuucaucauugcacug

SEQ ID NO: 27389 - RNA, 22 nt, Homo sapiens
uaaaugaauucaauuuccuucu

SEQ ID NO: 27390 - RNA, 23 nt, Homo sapiens
acacucuaaagagaagcgcuuug

SEQ ID NO: 27391 - RNA, 21 nt, Homo sapiens
agaaaguacuucccucuggag

SEQ ID NO: 27392 - RNA, 21 nt, Homo sapiens
agaaagugcaucccucuggag

SEQ ID NO: 27393 - RNA, 22 nt, Homo sapiens
caacaaaaucacugaugcugga

SEQ ID NO: 27394 - RNA, 22 nt, Homo sapiens
ugcuguuagcccuagccccgca

SEQ ID NO: 27395 - RNA, 22 nt, Homo sapiens
ugaauuacuuuguaaaccacca

SEQ ID NO: 27396 - RNA, 23 nt, Homo sapiens
aaagucucgcucucugccccuca

SEQ ID NO: 27397 - RNA, 22 nt, Homo sapiens
aggaaaccagcaaguguugacg

SEQ ID NO: 27398 - RNA, 18 nt, Homo sapiens
acccucugaaaggaagca

SEQ ID NO: 27399 - RNA, 22 nt, Homo sapiens
aaagugcuucuuaccuccagau

SEQ ID NO: 27400 - RNA, 22 nt, Homo sapiens
cuggagagacaaggggaagagg

SEQ ID NO: 27401 - RNA, 22 nt, Homo sapiens
aaagugcuucuuaccuccagau

SEQ ID NO: 27402 - RNA, 24 nt, Homo sapiens
gaagucacucccaggcagcugcaa

SEQ ID NO: 27403 - RNA, 18 nt, Homo sapiens
aucacauucaccucccug

SEQ ID NO: 27404 - RNA, 22 nt, Homo sapiens
guacaaaaguaauuacaguuuu

SEQ ID NO: 27405 - RNA, 21 nt, Homo sapiens
ggcugucaauucauaggucag

SEQ ID NO: 27406 - RNA, 21 nt, Homo sapiens
gucugucaauucauaggucau

SEQ ID NO: 27407 - RNA, 23 nt, Homo sapiens
uguaggcuggggauaaaugaaua

SEQ ID NO: 27408 - RNA, 21 nt, Homo sapiens
agcuaugccagcaucuugccu

SEQ ID NO: 27409 - RNA, 23 nt, Homo sapiens
ucucacccagguagcaaggauua

SEQ ID NO: 27410 - RNA, 23 nt, Homo sapiens
aaaaugcagauuccuggacucca

SEQ ID NO: 27411 - RNA, 23 nt, Homo sapiens
cagcugcuuuugggauuccguug

SEQ ID NO: 27412 - RNA, 20 nt, Homo sapiens
acagcaaggagggcaggagg

SEQ ID NO: 27413 - RNA, 23 nt, Homo sapiens
cuccagccccuccagggcuuccu

SEQ ID NO: 27414 - RNA, 21 nt, Homo sapiens
ccgugguucuacccuguggua

SEQ ID NO: 27415 - RNA, 22 nt, Homo sapiens
gcuggguggagaagguggugaa

SEQ ID NO: 27416 - RNA, 22 nt, Homo sapiens
cacgaccgacgccacgccgagu

SEQ ID NO: 27417 - RNA, 22 nt, Homo sapiens
aaaguaacugcaguuuuugcua

SEQ ID NO: 27418 - RNA, 22 nt, Homo sapiens
acuucaaggaucuuaaacuuug

SEQ ID NO: 27419 - RNA, 22 nt, Homo sapiens
cagacuccgguggaaugaagga

SEQ ID NO: 27420 - RNA, 22 nt, Homo sapiens
ccucaggcacggccgggccacc

SEQ ID NO: 27421 - RNA, 24 nt, Homo sapiens
gaaagugcauagaauucugucugg

SEQ ID NO: 27422 - RNA, 22 nt, Homo sapiens
cagcugguugaaggggaccaaa

SEQ ID NO: 27423 - RNA, 22 nt, Homo sapiens
uagcugguugaaggggaccaaa

SEQ ID NO: 27424 - RNA, 22 nt, Homo sapiens
ugagccacugugccuggccuga

SEQ ID NO: 27425 - RNA, 21 nt, Homo sapiens
acccaguagccagauguagcu

SEQ ID NO: 27426 - RNA, 21 nt, Homo sapiens
gagcugcauccuggcuccggg

SEQ ID NO: 27427 - RNA, 22 nt, Homo sapiens
cuggagagacaaggggaagagg

SEQ ID NO: 27428 - RNA, 23 nt, Homo sapiens
aggaacagcagcagcccgggccg

SEQ ID NO: 27429 - RNA, 21 nt, Homo sapiens
acaggauugagggggggcccu

SEQ ID NO: 27430 - RNA, 22 nt, Homo sapiens
ccucauggaaggguuccccacu

SEQ ID NO: 27431 - RNA, 24 nt, Homo sapiens
cagaaagugcuuucuuuuggagaa

SEQ ID NO: 27432 - RNA, 22 nt, Homo sapiens
uccagcaaagggaagcgcuuuc

SEQ ID NO: 27433 - RNA, 22 nt, Homo sapiens
accucuaaaggggagcgcuuug

SEQ ID NO: 27434 - RNA, 23 nt, Homo sapiens
acacucuaaagagaagcgcuuug

SEQ ID NO: 27435 - RNA, 21 nt, Homo sapiens
gcuccaaagggaagcgcuuug

SEQ ID NO: 27436 - RNA, 21 nt, Homo sapiens
cacucugaagggaagcgcuuu

SEQ ID NO: 27437 - RNA, 21 nt, Homo sapiens
ccucuaaagagaagcgcuuuc

SEQ ID NO: 27438 - RNA, 22 nt, Homo sapiens
aacacucuaaaaggaggcacuu

SEQ ID NO: 27439 - RNA, 25 nt, Homo sapiens
acggagcugucccaacaccaccccu

SEQ ID NO: 27440 - RNA, 22 nt, Homo sapiens
gcggucccgcggcgccccgccu

SEQ ID NO: 27441 - RNA, 23 nt, Homo sapiens
cuccagccccuccagggcuuccu

SEQ ID NO: 27442 - RNA, 22 nt, Homo sapiens
ugcuguuagcccuagccccgca

SEQ ID NO: 27443 - RNA, 21 nt, Homo sapiens
caucaccuuccuucuccucca

SEQ ID NO: 27444 - RNA, 20 nt, Homo sapiens
uacugcuuccacagcucccc

SEQ ID NO: 27445 - RNA, 24 nt, Homo sapiens
cacccccagagccucagcucccca

SEQ ID NO: 27446 - RNA, 22 nt, Homo sapiens
cacauggccaaaacagagaaga

SEQ ID NO: 27447 - RNA, 23 nt, Homo sapiens
ucacauaggaaugaaaagccaua

SEQ ID NO: 27448 - RNA, 23 nt, Homo sapiens
ggaagccaucaagucgcugcagg

SEQ ID NO: 27449 - RNA, 23 nt, Homo sapiens
ggaagccaucaagucgcugcagg

SEQ ID NO: 27450 - RNA, 22 nt, Homo sapiens
ugaagaagggggggaagggcgu

SEQ ID NO: 27451 - RNA, 17 nt, Homo sapiens
gacagccucucccccac

SEQ ID NO: 27452 - RNA, 23 nt, Homo sapiens
aaaaugcagauuccuggacucca

SEQ ID NO: 27453 - RNA, 23 nt, Homo sapiens
gggagugaagacacggagccaga

SEQ ID NO: 27454 - RNA, 21 nt, Homo sapiens
acuagacugugagcuccucga

SEQ ID NO: 27455 - RNA, 25 nt, Homo sapiens
agcuagucaagcgcgguuguggggg

SEQ ID NO: 27456 - RNA, 23 nt, Homo sapiens
cggcucugucgucgaggcgcuca

SEQ ID NO: 27457 - RNA, 23 nt, Homo sapiens
aaaucagaaucacaccuggggga

SEQ ID NO: 27458 - RNA, 22 nt, Homo sapiens
uacagauggauaccgugcaauu

SEQ ID NO: 27459 - RNA, 25 nt, Homo sapiens
acggagcugucccaacaccaccccu

SEQ ID NO: 27460 - RNA, 23 nt, Homo sapiens
gucagaccccgagggguccucgc

SEQ ID NO: 27461 - RNA, 24 nt, Homo sapiens
acgcagagcccgaaagcccccagu

SEQ ID NO: 27462 - RNA, 21 nt, Homo sapiens
caucaccuuccuucuccucca

SEQ ID NO: 27463 - RNA, 24 nt, Homo sapiens
acugcaggcuccagcuuccaggcu

SEQ ID NO: 27464 - RNA, 24 nt, Homo sapiens
acugcuggucuucagucagggcca

SEQ ID NO: 27465 - RNA, 22 nt, Homo sapiens
cacugguacaaggguugggaga

SEQ ID NO: 27466 - RNA, 21 nt, Homo sapiens
ugcaaacccugcaugugggag

SEQ ID NO: 27467 - RNA, 23 nt, Homo sapiens
cccaacagacauggcgguacuca

SEQ ID NO: 27468 - RNA, 22 nt, Homo sapiens
ugagccacugugccuggccuga

SEQ ID NO: 27469 - RNA, 22 nt, Homo sapiens
uaaccgauuucagauggugcua

SEQ ID NO: 27470 - RNA, 23 nt, Homo sapiens
aacacugauuucaaauggugcua

SEQ ID NO: 27471 - RNA, 22 nt, Homo sapiens
uaaccgauuucaaauggugcua

SEQ ID NO: 27472 - RNA, 22 nt, Homo sapiens
agcugaguguaggauguuuaca

SEQ ID NO: 27473 - RNA, 21 nt, Homo sapiens
aucugcacugucagcacuuua

SEQ ID NO: 27474 - RNA, 23 nt, Homo sapiens
gcuuugacaauaucauugcacug

SEQ ID NO: 27475 - RNA, 22 nt, Homo sapiens
acggaagggcagagagggccag

SEQ ID NO: 27476 - RNA, 21 nt, Homo sapiens
uucuaggauaggcccaggggc

SEQ ID NO: 27477 - RNA, 23 nt, Homo sapiens
aaaucagaaucacaccuggggga

SEQ ID NO: 27478 - RNA, 23 nt, Homo sapiens
caugagugacgcccucuggagua

SEQ ID NO: 27479 - RNA, 24 nt, Homo sapiens
acacucuaaagggaagcacuuugu

SEQ ID NO: 27480 - RNA, 22 nt, Homo sapiens
acucuaaagggaagcacuuugu

SEQ ID NO: 27481 - RNA, 24 nt, Homo sapiens
gaggugacucuauccuaugucuuu

SEQ ID NO: 27482 - RNA, 23 nt, Homo sapiens
aaccaagaccccggagaucccag

SEQ ID NO: 27483 - RNA, 22 nt, Homo sapiens
ucaguuuccucugcaaacaguu

SEQ ID NO: 27484 - RNA, 21 nt, Homo sapiens
gccaauauuucugugcugcua

SEQ ID NO: 27485 - RNA, 22 nt, Homo sapiens
cacucagcaccaggauauuguu

SEQ ID NO: 27486 - RNA, 22 nt, Homo sapiens
ucaguuuccucugcaaacaguu

SEQ ID NO: 27487 - RNA, 21 nt, Homo sapiens
acaugguuagaucaagcacaa

SEQ ID NO: 27488 - RNA, 22 nt, Homo sapiens
aaagugcuucuuaccuccagau

SEQ ID NO: 27489 - RNA, 21 nt, Homo sapiens
acaaaccacagugugcugcug

SEQ ID NO: 27490 - RNA, 23 nt, Homo sapiens
cccagcuagauuguaagcuccuu

SEQ ID NO: 27491 - RNA, 22 nt, Homo sapiens
guaccccuggagauucugauaa

SEQ ID NO: 27492 - RNA, 21 nt, Homo sapiens
ugacugacagcuuuuugagua

SEQ ID NO: 27493 - RNA, 22 nt, Homo sapiens
ucaguuuccucugcaaacaguu

SEQ ID NO: 27494 - RNA, 22 nt, Homo sapiens
aaagugcuucuuaccuccagau

SEQ ID NO: 27495 - RNA, 24 nt, Homo sapiens
ugggagaaccucccugcuucugcu

SEQ ID NO: 27496 - RNA, 22 nt, Homo sapiens
aagaagugcaccauguuuguuu

SEQ ID NO: 27497 - RNA, 20 nt, Homo sapiens
uccccacagacccagagccg

SEQ ID NO: 27498 - RNA, 21 nt, Homo sapiens
cacaaccucaguguuuccagg

SEQ ID NO: 27499 - RNA, 20 nt, Homo sapiens
cccugcgccaucuccucuac

SEQ ID NO: 27500 - RNA, 21 nt, Homo sapiens
acuccaaagggaagcgccuuc

SEQ ID NO: 27501 - RNA, 22 nt, Homo sapiens
cgcucuaaagggaagcgccuuc

SEQ ID NO: 27502 - RNA, 19 nt, Homo sapiens
guugggaucacaggcgccc

SEQ ID NO: 27503 - RNA, 23 nt, Homo sapiens
aaucuacuuucuuugcucauccu

SEQ ID NO: 27504 - RNA, 22 nt, Homo sapiens
aaccacuuucuuugcucauccg

SEQ ID NO: 27505 - RNA, 22 nt, Homo sapiens
agcgggacuuugagggccaguu

SEQ ID NO: 27506 - RNA, 21 nt, Homo sapiens
ccaaccaaugaaagaaugcuu

SEQ ID NO: 27507 - RNA, 20 nt, Homo sapiens
cuggggaaaaggguggcacg

SEQ ID NO: 27508 - RNA, 22 nt, Homo sapiens
cagcugguugaaggggaccaaa

SEQ ID NO: 27509 - RNA, 23 nt, Homo sapiens
uccauaaaguaggaaacacuaca

SEQ ID NO: 27510 - RNA, 25 nt, Homo sapiens
agcuagucaagcgcgguuguggggg

SEQ ID NO: 27511 - RNA, 22 nt, Homo sapiens
acaaccagcuaagacacugcca

SEQ ID NO: 27512 - RNA, 23 nt, Homo sapiens
gcaaucagcuaacuacacugccu

SEQ ID NO: 27513 - RNA, 23 nt, Homo sapiens
aaaucagaaucacaccuggggga

SEQ ID NO: 27514 - RNA, 22 nt, Homo sapiens
accagcuaacaauacacugcca

SEQ ID NO: 27515 - RNA, 22 nt, Homo sapiens
gccagcuaacaauacacugccu

SEQ ID NO: 27516 - RNA, 21 nt, Homo sapiens
gaccaagaaauagccuuucaa

SEQ ID NO: 27517 - RNA, 20 nt, Homo sapiens
gcaaaugguacagcuacuuu

SEQ ID NO: 27518 - RNA, 21 nt, Homo sapiens
acugaucuagagaacacaaga

SEQ ID NO: 27519 - RNA, 22 nt, Homo sapiens
cucagagcagacgugguucuca

SEQ ID NO: 27520 - RNA, 20 nt, Homo sapiens
agagaugagagaaacacccu

SEQ ID NO: 27521 - RNA, 24 nt, Homo sapiens
acgcagagcccgaaagcccccagu

SEQ ID NO: 27522 - RNA, 19 nt, Homo sapiens
accagugcccugcacacuu

SEQ ID NO: 27523 - RNA, 23 nt, Homo sapiens
acccuauaagcaauauugcacua

SEQ ID NO: 27524 - RNA, 22 nt, Homo sapiens
ucaggaacugccuuucucucca

SEQ ID NO: 27525 - RNA, 21 nt, Homo sapiens
ugcaaugcaacuacaaugcac

SEQ ID NO: 27526 - RNA, 23 nt, Homo sapiens
uggcccugacacgugguacugga

SEQ ID NO: 27527 - RNA, 22 nt, Homo sapiens
aggucucacuuuguugcccaga

SEQ ID NO: 27528 - RNA, 25 nt, Homo sapiens
aaggagcucagaagcccugcccagc

SEQ ID NO: 27529 - RNA, 22 nt, Homo sapiens
acacacccacgcgagccggaaa

SEQ ID NO: 27530 - RNA, 27 nt, Homo sapiens
auugcguucgaagugucgaugaucaau

SEQ ID NO: 27531 - RNA, 20 nt, Homo sapiens
acagcaaggagggcaggagg

SEQ ID NO: 27532 - RNA, 23 nt, Homo sapiens
aaagucucgcucucugccccuca

SEQ ID NO: 27533 - RNA, 21 nt, Homo sapiens
cucccccacugcagcuggcac

SEQ ID NO: 27534 - RNA, 21 nt, Homo sapiens
ccccucccagccucccugcca

SEQ ID NO: 27535 - RNA, 17 nt, Homo sapiens
gacagccucucccccac

SEQ ID NO: 27536 - RNA, 23 nt, Homo sapiens
gggagugaagacacggagccaga

SEQ ID NO: 27537 - RNA, 22 nt, Homo sapiens
ucaggaacugccuuucucucca

SEQ ID NO: 27538 - RNA, 22 nt, Homo sapiens
cggugagcacccggccccugcg

SEQ ID NO: 27539 - RNA, 22 nt, Homo sapiens
gaaccuaucuccccucuggacc

SEQ ID NO: 27540 - RNA, 22 nt, Homo sapiens
agcugaguguaggauguuuaca

SEQ ID NO: 27541 - RNA, 22 nt, Homo sapiens
auggcaguggaguuagugauug

SEQ ID NO: 27542 - RNA, 23 nt, Homo sapiens
aaaucagaaucacaccuggggga

SEQ ID NO: 27543 - RNA, 22 nt, Homo sapiens
gaauucaucacggccagccucu

SEQ ID NO: 27544 - RNA, 21 nt, Homo sapiens
ggacuauagaacuuucccccu

SEQ ID NO: 27545 - RNA, 24 nt, Homo sapiens
acgcagagcccgaaagcccccagu

SEQ ID NO: 27546 - RNA, 22 nt, Homo sapiens
aaagugcuucuuaccuccagau

SEQ ID NO: 27547 - RNA, 22 nt, Homo sapiens
caaacaccauugucacacucca

SEQ ID NO: 27548 - RNA, 23 nt, Homo sapiens
gggagugaagacacggagccaga

SEQ ID NO: 27549 - RNA, 23 nt, Homo sapiens
gggagugaagacacggagccaga

SEQ ID NO: 27550 - RNA, 23 nt, Homo sapiens
cuaucugcacuagaugcaccuua

SEQ ID NO: 27551 - RNA, 21 nt, Homo sapiens
gaccaaucgccguccccgccg

SEQ ID NO: 27552 - RNA, 23 nt, Homo sapiens
cccaacagacauggcgguacuca

SEQ ID NO: 27553 - RNA, 22 nt, Homo sapiens
cagaagugggccgggcacaggg

SEQ ID NO: 27554 - RNA, 22 nt, Homo sapiens
cagaagugggccgggcacaggg

SEQ ID NO: 27555 - RNA, 22 nt, Homo sapiens
ugagccacugugccuggccuga

SEQ ID NO: 27556 - RNA, 22 nt, Homo sapiens
aggaaaccagcaaguguugacg

SEQ ID NO: 27557 - RNA, 22 nt, Homo sapiens
gcggucccgcggcgccccgccu

SEQ ID NO: 27558 - RNA, 22 nt, Homo sapiens
ucggucccucgggccagggcag

SEQ ID NO: 27559 - RNA, 21 nt, Homo sapiens
ggggagcgggggcccugccuu

SEQ ID NO: 27560 - RNA, 23 nt, Homo sapiens
aaaaugcagauuccuggacucca

SEQ ID NO: 27561 - RNA, 23 nt, Homo sapiens
caugagugacgcccucuggagua

SEQ ID NO: 27562 - RNA, 22 nt, Homo sapiens
ucagaccgagacaagugcaaug

SEQ ID NO: 27563 - RNA, 21 nt, Homo sapiens
aguagugcuuucuacuuuaug

SEQ ID NO: 27564 - RNA, 22 nt, Homo sapiens
cagacuccgguggaaugaagga

SEQ ID NO: 27565 - RNA, 21 nt, Homo sapiens
gaccaaucgccguccccgccg

SEQ ID NO: 27566 - RNA, 23 nt, Homo sapiens
gaaacccagcagacaauguagcu

SEQ ID NO: 27567 - RNA, 23 nt, Homo sapiens
acugaggggccucagaccgagcu

SEQ ID NO: 27568 - RNA, 19 nt, Homo sapiens
auuuugguacagcagcuca

SEQ ID NO: 27569 - RNA, 22 nt, Homo sapiens
acaguggucaucgagugacaca

SEQ ID NO: 27570 - RNA, 19 nt, Homo sapiens
gccucagaggcagcugcuu

SEQ ID NO: 27571 - RNA, 22 nt, Homo sapiens
gcggucccgcggcgccccgccu

SEQ ID NO: 27572 - RNA, 22 nt, Homo sapiens
uauccacuacaccccgcugccu

SEQ ID NO: 27573 - RNA, 19 nt, Homo sapiens
auuuugguacagcagcuca

SEQ ID NO: 27574 - RNA, 22 nt, Homo sapiens
auccuucuacaaauucacccau

SEQ ID NO: 27575 - RNA, 22 nt, Homo sapiens
aagauguggaccauauuacaua

SEQ ID NO: 27576 - RNA, 21 nt, Homo sapiens
auccuguacugagcugccccg

SEQ ID NO: 27577 - RNA, 19 nt, Homo sapiens
gggaaacguaugucaaccu

SEQ ID NO: 27578 - RNA, 22 nt, Homo sapiens
ugugggugugugcaugagcgug

SEQ ID NO: 27579 - RNA, 21 nt, Homo sapiens
cugaggagagaggaggugggg

SEQ ID NO: 27580 - RNA, 22 nt, Homo sapiens
gcaaaaguaauugccaguuuug

SEQ ID NO: 27581 - RNA, 22 nt, Homo sapiens
ugcaaaaguagucucaguuuuu

SEQ ID NO: 27582 - RNA, 19 nt, Homo sapiens
aaaaguaauuacaguuuuu

SEQ ID NO: 27583 - RNA, 18 nt, Homo sapiens
cccccaccaccacgcccg

SEQ ID NO: 27584 - RNA, 22 nt, Homo sapiens
cacaucucacuguagccucaaa

SEQ ID NO: 27585 - RNA, 22 nt, Homo sapiens
aacccauggaauucaguucuca

SEQ ID NO: 27586 - RNA, 22 nt, Homo sapiens
agccuauggaauucaguucuca

SEQ ID NO: 27587 - RNA, 22 nt, Homo sapiens
gaaccuaucuccccucuggacc

SEQ ID NO: 27588 - RNA, 23 nt, Homo sapiens
guaaauagagguuuaauuaacac

SEQ ID NO: 27589 - RNA, 22 nt, Homo sapiens
cgggacguccagacucaacucu

SEQ ID NO: 27590 - RNA, 22 nt, Homo sapiens
ggaucccugggaccauaccuag

SEQ ID NO: 27591 - RNA, 23 nt, Homo sapiens
ucaacgggagugaucgugucauu

SEQ ID NO: 27592 - RNA, 22 nt, Homo sapiens
gaauucaucacggccagccucu

SEQ ID NO: 27593 - RNA, 23 nt, Homo sapiens
acacucuaaagagaagcgcuuug

SEQ ID NO: 27594 - RNA, 21 nt, Homo sapiens
agaaaguacuucccucuggag

SEQ ID NO: 27595 - RNA, 21 nt, Homo sapiens
agaaagugcaucccucuggag

SEQ ID NO: 27596 - RNA, 21 nt, Homo sapiens
acuuuccaggauucauuaacu

SEQ ID NO: 27597 - RNA, 22 nt, Homo sapiens
acaucaucgcauauugacacaa

SEQ ID NO: 27598 - RNA, 19 nt, Homo sapiens
ucccacaggaagcagacac

SEQ ID NO: 27599 - RNA, 24 nt, Homo sapiens
acugcaggcuccagcuuccaggcu

SEQ ID NO: 27600 - RNA, 22 nt, Homo sapiens
ggcagagagucagagcgcggau

SEQ ID NO: 27601 - RNA, 21 nt, Homo sapiens
ccccucccagccucccugcca

SEQ ID NO: 27602 - RNA, 21 nt, Homo sapiens
acaggauugagggggggcccu

SEQ ID NO: 27603 - RNA, 21 nt, Homo sapiens
gcggaacuuagccacugugaa

SEQ ID NO: 27604 - RNA, 22 nt, Homo sapiens
uucacacugcaugcucugggua

SEQ ID NO: 27605 - RNA, 19 nt, Homo sapiens
guccugaauuccgcagccu

SEQ ID NO: 27606 - RNA, 22 nt, Homo sapiens
acaaaauccacaauuacuuuug

SEQ ID NO: 27607 - RNA, 22 nt, Homo sapiens
aacagcacaaacuacuaccuca

SEQ ID NO: 27608 - RNA, 21 nt, Homo sapiens
cugaggagagaggaggugggg

SEQ ID NO: 27609 - RNA, 22 nt, Homo sapiens
aggucucacuuuguugcccaga

SEQ ID NO: 27610 - RNA, 20 nt, Homo sapiens
cccgccgcgucgcccugggg

SEQ ID NO: 27611 - RNA, 22 nt, Homo sapiens
uccacauggaguugcuguuaca

SEQ ID NO: 27612 - RNA, 22 nt, Homo sapiens
aaagagguuaaccagguguguu

SEQ ID NO: 27613 - RNA, 22 nt, Homo sapiens
ugaauccuugaauagguguguu

SEQ ID NO: 27614 - RNA, 22 nt, Homo sapiens
aguccagauucugugcccacca

SEQ ID NO: 27615 - RNA, 22 nt, Homo sapiens
gcacacaauaaauguuugcuga

SEQ ID NO: 27616 - RNA, 19 nt, Homo sapiens
gccugcugacaccgugccu

SEQ ID NO: 27617 - RNA, 25 nt, Homo sapiens
aaggagcucagaagcccugcccagc

SEQ ID NO: 27618 - RNA, 22 nt, Homo sapiens
gcacauguucugcggcccacca

SEQ ID NO: 27619 - RNA, 22 nt, Homo sapiens
cugcucaaacccuccaaugacu

SEQ ID NO: 27620 - RNA, 22 nt, Homo sapiens
uuucaguuaucaaucugucaca

SEQ ID NO: 27621 - RNA, 18 nt, Homo sapiens
auucaaucuacugccuca

SEQ ID NO: 27622 - RNA, 22 nt, Homo sapiens
ugcuguuagcccuagccccgca

SEQ ID NO: 27623 - RNA, 21 nt, Homo sapiens
cugaggagagaggaggugggg

SEQ ID NO: 27624 - RNA, 20 nt, Homo sapiens
cucaaagcaaacccugcaga

SEQ ID NO: 27625 - RNA, 20 nt, Homo sapiens
cucaaagcaaacccugcaga

SEQ ID NO: 27626 - RNA, 23 nt, Homo sapiens
gggagugaagacacggagccaga

SEQ ID NO: 27627 - RNA, 22 nt, Homo sapiens
agcugaguguaggauguuuaca

SEQ ID NO: 27628 - RNA, 18 nt, Homo sapiens
aucacauucaccucccug

SEQ ID NO: 27629 - RNA, 19 nt, Homo sapiens
accagugcccugcacacuu

SEQ ID NO: 27630 - RNA, 23 nt, Homo sapiens
caugagugacgcccucuggagua

SEQ ID NO: 27631 - RNA, 22 nt, Homo sapiens
ucaggaacugccuuucucucca

SEQ ID NO: 27632 - RNA, 23 nt, Homo sapiens
aggaacagcagcagcccgggccg

SEQ ID NO: 27633 - RNA, 22 nt, Homo sapiens
caaacaccauugucacacucca

SEQ ID NO: 27634 - RNA, 22 nt, Homo sapiens
uaaaugaauucaauuuccuucu

SEQ ID NO: 27635 - RNA, 20 nt, Homo sapiens
aagcagaaaaaggcaaacga

SEQ ID NO: 27636 - RNA, 22 nt, Homo sapiens
agaaagcgcuuuccuuuguaga

SEQ ID NO: 27637 - RNA, 18 nt, Homo sapiens
cagcagccuccuucucaa

SEQ ID NO: 27638 - RNA, 23 nt, Homo sapiens
ucacauaggaaugaaaagccaua

SEQ ID NO: 27639 - RNA, 23 nt, Homo sapiens
ucucugcaggccgugugcuuugc

SEQ ID NO: 27640 - RNA, 22 nt, Homo sapiens
aaucagucucauugcuuuauaa

SEQ ID NO: 27641 - RNA, 23 nt, Homo sapiens
acgggugcgauuucugugugaga

SEQ ID NO: 27642 - RNA, 22 nt, Homo sapiens
cucccuucuuuccucccgucuu

SEQ ID NO: 27643 - RNA, 23 nt, Homo sapiens
gaaagugcccucaaggcugagug

SEQ ID NO: 27644 - RNA, 20 nt, Homo sapiens
gaaagggcuucccuuuguag

SEQ ID NO: 27645 - RNA, 22 nt, Homo sapiens
gagaaagugcuucccuuuguag

SEQ ID NO: 27646 - RNA, 21 nt, Homo sapiens
acuuuccaggauucauuaacu

SEQ ID NO: 27647 - RNA, 23 nt, Homo sapiens
aggagaaggcaccaugggauuua

SEQ ID NO: 27648 - RNA, 22 nt, Homo sapiens
uggugauucacaaagaaaucca

SEQ ID NO: 27649 - RNA, 22 nt, Homo sapiens
uucacacugcaugcucugggua

SEQ ID NO: 27650 - RNA, 23 nt, Homo sapiens
cacugugggcccucuccgcacca

SEQ ID NO: 27651 - RNA, 23 nt, Homo sapiens
agcagcauuguacagggcuauga

SEQ ID NO: 27652 - RNA, 22 nt, Homo sapiens
cagaaagugcuucccucuagag

SEQ ID NO: 27653 - RNA, 22 nt, Homo sapiens
cccaacaacaugaaacuaccua

SEQ ID NO: 27654 - RNA, 23 nt, Homo sapiens
gaaacccagcagacaauguagcu

SEQ ID NO: 27655 - RNA, 21 nt, Homo sapiens
agcuaugccagcaucuugccu

SEQ ID NO: 27656 - RNA, 21 nt, Homo sapiens
uucuaggauaggcccaggggc

SEQ ID NO: 27657 - RNA, 19 nt, Homo sapiens
guccugaauuccgcagccu

SEQ ID NO: 27658 - RNA, 25 nt, Homo sapiens
acggagcugucccaacaccaccccu

SEQ ID NO: 27659 - RNA, 20 nt, Homo sapiens
agagaugagagaaacacccu

SEQ ID NO: 27660 - RNA, 22 nt, Homo sapiens
ugcuguuagcccuagccccgca

SEQ ID NO: 27661 - RNA, 20 nt, Homo sapiens
uacugcuuccacagcucccc

SEQ ID NO: 27662 - RNA, 20 nt, Homo sapiens
uacugcuuccacagcucccc

SEQ ID NO: 27663 - RNA, 24 nt, Homo sapiens
cacccccagagccucagcucccca

SEQ ID NO: 27664 - RNA, 21 nt, Homo sapiens
uucuaggauaggcccaggggc

SEQ ID NO: 27665 - RNA, 23 nt, Homo sapiens
cgugagcuccuggaggacaggga

SEQ ID NO: 27666 - RNA, 22 nt, Homo sapiens
uacagauggauaccgugcaauu

SEQ ID NO: 27667 - RNA, 18 nt, Homo sapiens
ugguggcagaggugggau

SEQ ID NO: 27668 - RNA, 17 nt, Homo sapiens
ggguggcagcgguggga

SEQ ID NO: 27669 - RNA, 22 nt, Homo sapiens
acugccugucugugccugcugu

SEQ ID NO: 27670 - RNA, 21 nt, Homo sapiens
ucaaucacagauagcaccccu

SEQ ID NO: 27671 - RNA, 22 nt, Homo sapiens
accagguuccaccccagcaggc

SEQ ID NO: 27672 - RNA, 23 nt, Homo sapiens
aagaaucuugucccgcagguccu

SEQ ID NO: 27673 - RNA, 21 nt, Homo sapiens
acuccaaagggaagcgccuuc

SEQ ID NO: 27674 - RNA, 22 nt, Homo sapiens
cgcucuaaagggaagcgccuuc

SEQ ID NO: 27675 - RNA, 21 nt, Homo sapiens
gcugaggucugggccaggucu

SEQ ID NO: 27676 - RNA, 25 nt, Homo sapiens
accaacggaccuacuucccuccgcc

SEQ ID NO: 27677 - RNA, 23 nt, Homo sapiens
cacugugggcccucuccgcacca

SEQ ID NO: 27678 - RNA, 21 nt, Homo sapiens
caucaccuuccuucuccucca

SEQ ID NO: 27679 - RNA, 22 nt, Homo sapiens
agcuagugagaagucaaugccu

SEQ ID NO: 27680 - RNA, 21 nt, Homo sapiens
aguagugcuuucuacuuuaug

SEQ ID NO: 27681 - RNA, 22 nt, Homo sapiens
agcccaaaaggagaauucuuug

SEQ ID NO: 27682 - RNA, 22 nt, Homo sapiens
uccacauggaguugcuguuaca

SEQ ID NO: 27683 - RNA, 22 nt, Homo sapiens
cagacuccgguggaaugaagga

SEQ ID NO: 27684 - RNA, 22 nt, Homo sapiens
gguaaaacucgcaauuacuuuu

SEQ ID NO: 27685 - RNA, 22 nt, Homo sapiens
ggccaaaaccacaauuacuuuu

SEQ ID NO: 27686 - RNA, 22 nt, Homo sapiens
ggcaaaaaccgcaauuacuuuu

SEQ ID NO: 27687 - RNA, 22 nt, Homo sapiens
ggcaaaaaccacaauuacuuuu

SEQ ID NO: 27688 - RNA, 22 nt, Homo sapiens
gacaaaaaccgcgauuacuuuu

SEQ ID NO: 27689 - RNA, 22 nt, Homo sapiens
ggcaaaauccgcaauuacuuuu

SEQ ID NO: 27690 - RNA, 22 nt, Homo sapiens
accaaagaccgcaauuacuuuu

SEQ ID NO: 27691 - RNA, 21 nt, Homo sapiens
uuuuggugcauauuuacuuua

SEQ ID NO: 27692 - RNA, 21 nt, Homo sapiens
ucgacugccacucuuacuaga

SEQ ID NO: 27693 - RNA, 23 nt, Homo sapiens
acaaggaugaaucuuuguuacug

SEQ ID NO: 27694 - RNA, 23 nt, Homo sapiens
acgggugcgauuucugugugaga

SEQ ID NO: 27695 - RNA, 22 nt, Homo sapiens
agcucagaacccagaggucuca

SEQ ID NO: 27696 - RNA, 20 nt, Homo sapiens
agagaugagagaaacacccu

SEQ ID NO: 27697 - RNA, 23 nt, Homo sapiens
cugcagaacuguucccgcugcua

SEQ ID NO: 27698 - RNA, 25 nt, Homo sapiens
acggagcugucccaacaccaccccu

SEQ ID NO: 27699 - RNA, 22 nt, Homo sapiens
ugcuguuagcccuagccccgca

SEQ ID NO: 27700 - RNA, 21 nt, Homo sapiens
agacacaccacggcacacuuc

SEQ ID NO: 27701 - RNA, 23 nt, Homo sapiens
cccaacagacauggcgguacuca

SEQ ID NO: 27702 - RNA, 22 nt, Homo sapiens
uccucuuuucuuagagacucac

SEQ ID NO: 27703 - RNA, 22 nt, Homo sapiens
uccggggacgaacgggacgggu

SEQ ID NO: 27704 - RNA, 17 nt, Homo sapiens
gggagaggaggaggcga

SEQ ID NO: 27705 - RNA, 21 nt, Homo sapiens
gaccaaucgccguccccgccg

SEQ ID NO: 27706 - RNA, 22 nt, Homo sapiens
ucagaccgagacaagugcaaug

SEQ ID NO: 27707 - RNA, 25 nt, Homo sapiens
accaacggaccuacuucccuccgcc

SEQ ID NO: 27708 - RNA, 25 nt, Homo sapiens
accaacggaccuacuucccuccgcc

SEQ ID NO: 27709 - RNA, 22 nt, Homo sapiens
gcggucccgcggcgccccgccu

SEQ ID NO: 27710 - RNA, 22 nt, Homo sapiens
ugcuguuagcccuagccccgca

SEQ ID NO: 27711 - RNA, 22 nt, Homo sapiens
ggaggccgggacgagugcaaua

SEQ ID NO: 27712 - RNA, 24 nt, Homo sapiens
acucacaccuagguuccaaggauu

SEQ ID NO: 27713 - RNA, 23 nt, Homo sapiens
caugagugacgcccucuggagua

SEQ ID NO: 27714 - RNA, 21 nt, Homo sapiens
uggaaaccaagagugggucgc

SEQ ID NO: 27715 - RNA, 21 nt, Homo sapiens
cugaaaccaaguaugggucgc

SEQ ID NO: 27716 - RNA, 22 nt, Homo sapiens
ggcagagagucagagcgcggau

SEQ ID NO: 27717 - RNA, 23 nt, Homo sapiens
ucacauaggaauaaaaagccaua

SEQ ID NO: 27718 - RNA, 22 nt, Homo sapiens
caaacaccauugucacacucca

SEQ ID NO: 27719 - RNA, 21 nt, Homo sapiens
aaaggccacauccagcaccgu

SEQ ID NO: 27720 - RNA, 18 nt, Homo sapiens
aucacauucaccucccug

SEQ ID NO: 27721 - RNA, 21 nt, Homo sapiens
gaccaaucgccguccccgccg

SEQ ID NO: 27722 - RNA, 22 nt, Homo sapiens
aggcauaggaugacaaagggaa

SEQ ID NO: 27723 - RNA, 22 nt, Homo sapiens
aggcgaaggaugacaaagggaa

SEQ ID NO: 27724 - RNA, 22 nt, Homo sapiens
acaaaaguugccuuugugugau

SEQ ID NO: 27725 - RNA, 19 nt, Homo sapiens
auuuugguacagcagcuca

SEQ ID NO: 27726 - RNA, 22 nt, Homo sapiens
gauccgagcaccggggaccccc

SEQ ID NO: 27727 - RNA, 22 nt, Homo sapiens
gcggucccgcggcgccccgccu

SEQ ID NO: 27728 - RNA, 22 nt, Homo sapiens
cacucuaaagggaggcacuuug

SEQ ID NO: 27729 - RNA, 22 nt, Homo sapiens
ggcagagagucagagcgcggau

SEQ ID NO: 27730 - RNA, 22 nt, Homo sapiens
auccuucuacaaauucacccau

SEQ ID NO: 27731 - RNA, 21 nt, Homo sapiens
aaaggccacauccagcaccgu

SEQ ID NO: 27732 - RNA, 23 nt, Homo sapiens
ggacauuguuucagugcccaagu

SEQ ID NO: 27733 - RNA, 27 nt, Homo sapiens
ugcccacucucaccaucaccuacagug

SEQ ID NO: 27734 - RNA, 22 nt, Homo sapiens
cuggagacacgugcacuguaga

SEQ ID NO: 27735 - RNA, 19 nt, Homo sapiens
cagcaucagcagcaucauc

SEQ ID NO: 27736 - RNA, 23 nt, Homo sapiens
gggagugaagacacggagccaga

SEQ ID NO: 27737 - RNA, 22 nt, Homo sapiens
ucaggaacugccuuucucucca

SEQ ID NO: 27738 - RNA, 21 nt, Homo sapiens
uagcacccagauagcaaggau

SEQ ID NO: 27739 - RNA, 21 nt, Homo sapiens
cccgaggagccgggcaggcuu

SEQ ID NO: 27740 - RNA, 24 nt, Homo sapiens
cacccccagagccucagcucccca

SEQ ID NO: 27741 - RNA, 22 nt, Homo sapiens
aggcauaggaugacaaagggaa

SEQ ID NO: 27742 - RNA, 22 nt, Homo sapiens
aggcgaaggaugacaaagggaa

SEQ ID NO: 27743 - RNA, 23 nt, Homo sapiens
acaccaaugcccuaggggaugcg

SEQ ID NO: 27744 - RNA, 23 nt, Homo sapiens
acaccaaugcccuaggggaugcg

SEQ ID NO: 27745 - RNA, 22 nt, Homo sapiens
gcaaagguaauugcuguuuucg

SEQ ID NO: 27746 - RNA, 27 nt, Homo sapiens
uuuagcacagugcuuauacaagaaggu

SEQ ID NO: 27747 - RNA, 21 nt, Homo sapiens
ggggagcgggggcccugccuu

SEQ ID NO: 27748 - RNA, 22 nt, Homo sapiens
cuagggaacacagggcugguga

SEQ ID NO: 27749 - RNA, 23 nt, Homo sapiens
cggccugauucacaacaccagcu

SEQ ID NO: 27750 - RNA, 21 nt, Homo sapiens
acaaaccacagugugcugcug

SEQ ID NO: 27751 - RNA, 22 nt, Homo sapiens
ugcaagccuugggugugggagg

SEQ ID NO: 27752 - RNA, 22 nt, Homo sapiens
agugaauucuaccagugccaua

SEQ ID NO: 27753 - RNA, 21 nt, Homo sapiens
acaggauugagggggggcccu

SEQ ID NO: 27754 - RNA, 21 nt, Homo sapiens
acaggauugagggggggcccu

SEQ ID NO: 27755 - RNA, 23 nt, Homo sapiens
aaagucucgcucucugccccuca

SEQ ID NO: 27756 - RNA, 21 nt, Homo sapiens
aagugucagacacgguggugg

SEQ ID NO: 27757 - RNA, 22 nt, Homo sapiens
ucaggaacugccuuucucucca

SEQ ID NO: 27758 - RNA, 23 nt, Homo sapiens
cccaacagacauggcgguacuca

SEQ ID NO: 27759 - RNA, 20 nt, Homo sapiens
cuggaggaagggcccagagg

SEQ ID NO: 27760 - RNA, 22 nt, Homo sapiens
gccuaagacacaggcccagaga

SEQ ID NO: 27761 - RNA, 22 nt, Homo sapiens
gaagaaaggcaucauauaggag

SEQ ID NO: 27762 - RNA, 23 nt, Homo sapiens
aagaaucuugucccgcagguccu

SEQ ID NO: 27763 - RNA, 22 nt, Homo sapiens
ccuggcacacaguagaccuuca

SEQ ID NO: 27764 - RNA, 22 nt, Homo sapiens
aagaagugcaccauguuuguuu

SEQ ID NO: 27765 - RNA, 23 nt, Homo sapiens
gggcucuuacucccucaggcacu

SEQ ID NO: 27766 - RNA, 22 nt, Homo sapiens
guccaaaguuggggugcugguu

SEQ ID NO: 27767 - RNA, 22 nt, Homo sapiens
ggcaaaauccgcaauuacuuuu

SEQ ID NO: 27768 - RNA, 22 nt, Homo sapiens
uccggggacgaacgggacgggu

SEQ ID NO: 27769 - RNA, 22 nt, Homo sapiens
cagaagugggccgggcacaggg

SEQ ID NO: 27770 - RNA, 21 nt, Homo sapiens
caugcacaugcacacauacau

SEQ ID NO: 27771 - RNA, 22 nt, Homo sapiens
acaucaucgcauauugacacaa

SEQ ID NO: 27772 - RNA, 22 nt, Homo sapiens
acaguggucaucgagugacaca

SEQ ID NO: 27773 - RNA, 21 nt, Homo sapiens
cacaacccuaguggcgccauu

SEQ ID NO: 27774 - RNA, 20 nt, Homo sapiens
uacugcuuccacagcucccc

SEQ ID NO: 27775 - RNA, 22 nt, Homo sapiens
ggaggccgggacgagugcaaua

SEQ ID NO: 27776 - RNA, 17 nt, Homo sapiens
gggagaggaggaggcga

SEQ ID NO: 27777 - RNA, 21 nt, Homo sapiens
acuagacugugagcuccucga

SEQ ID NO: 27778 - RNA, 21 nt, Homo sapiens
aacggaaccacuagugacuug

SEQ ID NO: 27779 - RNA, 19 nt, Homo sapiens
guccugaauuccgcagccu

SEQ ID NO: 27780 - RNA, 20 nt, Homo sapiens
aggggccucagccuccuggu

SEQ ID NO: 27781 - RNA, 20 nt, Homo sapiens
guuugauaaacugacacaac

SEQ ID NO: 27782 - RNA, 21 nt, Homo sapiens
gaaggaagugagugcagccac

SEQ ID NO: 27783 - RNA, 21 nt, Homo sapiens
ucuccagaucagggcagucca

SEQ ID NO: 27784 - RNA, 19 nt, Homo sapiens
guugggaucacaggcgccc

SEQ ID NO: 27785 - RNA, 17 nt, Homo sapiens
gggagaggaggaggcga

SEQ ID NO: 27786 - RNA, 21 nt, Homo sapiens
gagcugcauccuggcuccggg

SEQ ID NO: 27787 - RNA, 22 nt, Homo sapiens
caaacaccauugucacacucca

SEQ ID NO: 27788 - RNA, 21 nt, Homo sapiens
gaccaaucgccguccccgccg

SEQ ID NO: 27789 - RNA, 22 nt, Homo sapiens
acugccugucugugccugcugu

SEQ ID NO: 27790 - RNA, 22 nt, Homo sapiens
accagguuccaccccagcaggc

SEQ ID NO: 27791 - RNA, 22 nt, Homo sapiens
ccucuaguaaauaugucagcau

SEQ ID NO: 27792 - RNA, 22 nt, Homo sapiens
gcggucccgcggcgccccgccu

SEQ ID NO: 27793 - RNA, 22 nt, Homo sapiens
ugcuguuagcccuagccccgca

SEQ ID NO: 27794 - RNA, 22 nt, Homo sapiens
gggagaggucucccugcgcaca

SEQ ID NO: 27795 - RNA, 21 nt, Homo sapiens
gaccaaucgccguccccgccg

SEQ ID NO: 27796 - RNA, 21 nt, Homo sapiens
gaccaaucgccguccccgccg

SEQ ID NO: 27797 - RNA, 22 nt, Homo sapiens
cggugagcacccggccccugcg

SEQ ID NO: 27798 - RNA, 22 nt, Homo sapiens
gcggucccgcggcgccccgccu

SEQ ID NO: 27799 - RNA, 22 nt, Homo sapiens
gcggucccgcggcgccccgccu

SEQ ID NO: 27800 - RNA, 22 nt, Homo sapiens
ugcuguuagcccuagccccgca

SEQ ID NO: 27801 - RNA, 22 nt, Homo sapiens
ugcuguuagcccuagccccgca

SEQ ID NO: 27802 - RNA, 21 nt, Homo sapiens
ccccucccagccucccugcca

SEQ ID NO: 27803 - RNA, 18 nt, Homo sapiens
auucaaucuacugccuca

SEQ ID NO: 27804 - RNA, 23 nt, Homo sapiens
aaaucagaaucacaccuggggga

SEQ ID NO: 27805 - RNA, 24 nt, Homo sapiens
acgcagagcccgaaagcccccagu

SEQ ID NO: 27806 - RNA, 22 nt, Homo sapiens
ggcucccaagaaccucaccugu

SEQ ID NO: 27807 - RNA, 21 nt, Homo sapiens
aacggaaccacuagugacuug

SEQ ID NO: 27808 - RNA, 20 nt, Homo sapiens
guguguauacauuuauacau

SEQ ID NO: 27809 - RNA, 22 nt, Homo sapiens
caaacaccauugucacacucca

SEQ ID NO: 27810 - RNA, 24 nt, Homo sapiens
gaaagugcauagaauucugucugg

SEQ ID NO: 27811 - RNA, 19 nt, Homo sapiens
ucccacaggaagcagacac

SEQ ID NO: 27812 - RNA, 24 nt, Homo sapiens
acucacaccuagguuccaaggauu

SEQ ID NO: 27813 - RNA, 19 nt, Homo sapiens
auuuugguacagcagcuca

SEQ ID NO: 27814 - RNA, 22 nt, Homo sapiens
gaggcucagaauggcucaggag

SEQ ID NO: 27815 - RNA, 22 nt, Homo sapiens
caaacaccauugucacacucca

SEQ ID NO: 27816 - RNA, 20 nt, Homo sapiens
ggggcagacagacgaggaag

SEQ ID NO: 27817 - RNA, 20 nt, Homo sapiens
cccgccgcgucgcccugggg

SEQ ID NO: 27818 - RNA, 21 nt, Homo sapiens
agcuaugccagcaucuugccu

SEQ ID NO: 27819 - RNA, 20 nt, Homo sapiens
aggggccucagccuccuggu

SEQ ID NO: 27820 - RNA, 21 nt, Homo sapiens
caucaccuuccuucuccucca

SEQ ID NO: 27821 - RNA, 23 nt, Homo sapiens
gacguaguccuauucucugcugc

SEQ ID NO: 27822 - RNA, 22 nt, Homo sapiens
ggaggccgggacgagugcaaua

SEQ ID NO: 27823 - RNA, 21 nt, Homo sapiens
gaccaaucgccguccccgccg

SEQ ID NO: 27824 - RNA, 22 nt, Homo sapiens
gcggucccgcggcgccccgccu

SEQ ID NO: 27825 - RNA, 20 nt, Homo sapiens
uacugcuuccacagcucccc

SEQ ID NO: 27826 - RNA, 19 nt, Homo sapiens
gccucagaggcagcugcuu

SEQ ID NO: 27827 - RNA, 23 nt, Homo sapiens
acaaggaugaaucuuuguuacug

SEQ ID NO: 27828 - RNA, 23 nt, Homo sapiens
cgugagcuccuggaggacaggga

SEQ ID NO: 27829 - RNA, 21 nt, Homo sapiens
gaccaaucgccguccccgccg

SEQ ID NO: 27830 - RNA, 22 nt, Homo sapiens
gcggucccgcggcgccccgccu

SEQ ID NO: 27831 - RNA, 22 nt, Homo sapiens
caaacaccauugucacacucca

SEQ ID NO: 27832 - RNA, 21 nt, Homo sapiens
gaccaaucgccguccccgccg

SEQ ID NO: 27833 - RNA, 22 nt, Homo sapiens
ucagaccgagacaagugcaaug

SEQ ID NO: 27834 - RNA, 23 nt, Homo sapiens
aaagucucgcucucugccccuca

SEQ ID NO: 27835 - RNA, 22 nt, Homo sapiens
cuacccacagacguaccaauca

SEQ ID NO: 27836 - RNA, 22 nt, Homo sapiens
gcggucccgcggcgccccgccu

SEQ ID NO: 27837 - RNA, 23 nt, Homo sapiens
cuccagccccuccagggcuuccu

SEQ ID NO: 27838 - RNA, 22 nt, Homo sapiens
ggcagagagucagagcgcggau

SEQ ID NO: 27839 - RNA, 22 nt, Homo sapiens
ugcaagccuugggugugggagg

SEQ ID NO: 27840 - RNA, 23 nt, Homo sapiens
ucucgugacaugaugauccccga

SEQ ID NO: 27841 - RNA, 19 nt, Homo sapiens
ucccacaggaagcagacac

SEQ ID NO: 27842 - RNA, 22 nt, Homo sapiens
aaggugauggucagcagacaua

SEQ ID NO: 27843 - RNA, 22 nt, Homo sapiens
cggugagcacccggccccugcg

SEQ ID NO: 27844 - RNA, 23 nt, Homo sapiens
cggcucugucgucgaggcgcuca

SEQ ID NO: 27845 - RNA, 23 nt, Homo sapiens
aaaucagaaucacaccuggggga

SEQ ID NO: 27846 - RNA, 23 nt, Homo sapiens
acugaggggccucagaccgagcu

SEQ ID NO: 27847 - RNA, 22 nt, Homo sapiens
gaauucaucacggccagccucu

SEQ ID NO: 27848 - RNA, 24 nt, Homo sapiens
acgcagagcccgaaagcccccagu

SEQ ID NO: 27849 - RNA, 21 nt, Homo sapiens
caucaccuuccuucuccucca

SEQ ID NO: 27850 - RNA, 22 nt, Homo sapiens
gggagaggucucccugcgcaca

SEQ ID NO: 27851 - RNA, 21 nt, Homo sapiens
gagcugcauccuggcuccggg

SEQ ID NO: 27852 - RNA, 18 nt, Homo sapiens
auucaaucuacugccuca

SEQ ID NO: 27853 - RNA, 22 nt, Homo sapiens
ccuggcacacaguagaccuuca

SEQ ID NO: 27854 - RNA, 22 nt, Homo sapiens
gaauucaucacggccagccucu

SEQ ID NO: 27855 - RNA, 18 nt, Homo sapiens
gaaaugagggccagcuga

SEQ ID NO: 27856 - RNA, 22 nt, Homo sapiens
gcaaagguaauugcuguuuucg

SEQ ID NO: 27857 - RNA, 20 nt, Homo sapiens
aagcagaaaaaggcaaacga

SEQ ID NO: 27858 - RNA, 23 nt, Homo sapiens
cacugugggcccucuccgcacca

SEQ ID NO: 27859 - RNA, 20 nt, Homo sapiens
uacugcuuccacagcucccc

SEQ ID NO: 27860 - RNA, 22 nt, Homo sapiens
caaacaccauugucacacucca

SEQ ID NO: 27861 - RNA, 22 nt, Homo sapiens
ugcuguuagcccuagccccgca

SEQ ID NO: 27862 - RNA, 22 nt, Homo sapiens
ccuggcacacaguagaccuuca

SEQ ID NO: 27863 - RNA, 18 nt, Homo sapiens
cccccaccaccacgcccg

SEQ ID NO: 27864 - RNA, 23 nt, Homo sapiens
aaaaugcagauuccuggacucca

SEQ ID NO: 27865 - RNA, 18 nt, Homo sapiens
aucacauucaccucccug

SEQ ID NO: 27866 - RNA, 23 nt, Homo sapiens
gggagugaagacacggagccaga

SEQ ID NO: 27867 - RNA, 24 nt, Homo sapiens
agugugaguucuaccauugccaaa

SEQ ID NO: 27868 - RNA, 20 nt, Homo sapiens
cccgccgcgucgcccugggg

SEQ ID NO: 27869 - RNA, 22 nt, Homo sapiens
aggcauaggaugacaaagggaa

SEQ ID NO: 27870 - RNA, 22 nt, Homo sapiens
aggcgaaggaugacaaagggaa

SEQ ID NO: 27871 - RNA, 22 nt, Homo sapiens
ccucauggaaggguuccccacu

SEQ ID NO: 27872 - RNA, 23 nt, Homo sapiens
acagcgcucgcaaccgcagcgau

SEQ ID NO: 27873 - RNA, 17 nt, Homo sapiens
uggaggccccagcgaga

SEQ ID NO: 27874 - RNA, 21 nt, Homo sapiens
caucaccuuccuucuccucca

SEQ ID NO: 27875 - RNA, 22 nt, Homo sapiens
uauccacuacaccccgcugccu

SEQ ID NO: 27876 - RNA, 22 nt, Homo sapiens
gcugaggcuguggggcuggagu

SEQ ID NO: 27877 - RNA, 21 nt, Homo sapiens
gaccaaucgccguccccgccg

SEQ ID NO: 27878 - RNA, 22 nt, Homo sapiens
gcggucccgcggcgccccgccu

SEQ ID NO: 27879 - RNA, 22 nt, Homo sapiens
ugcuguuagcccuagccccgca

SEQ ID NO: 27880 - RNA, 21 nt, Homo sapiens
ccccucccagccucccugcca

SEQ ID NO: 27881 - RNA, 22 nt, Homo sapiens
acaaaaguugccuuugugugau

SEQ ID NO: 27882 - RNA, 21 nt, Homo sapiens
aagugucagacacgguggugg

SEQ ID NO: 27883 - RNA, 24 nt, Homo sapiens
acugcaggcuccagcuuccaggcu

SEQ ID NO: 27884 - RNA, 23 nt, Homo sapiens
guaaauagagguuuaauuaacac

SEQ ID NO: 27885 - RNA, 18 nt, Homo sapiens
ugguggcagaggugggau

SEQ ID NO: 27886 - RNA, 23 nt, Homo sapiens
agcccuguucuacagcccugagg

SEQ ID NO: 27887 - RNA, 21 nt, Homo sapiens
aggcggcaggcacaggacugg

SEQ ID NO: 27888 - RNA, 23 nt, Homo sapiens
cuaccugcacuauaagcacuuua

SEQ ID NO: 27889 - RNA, 22 nt, Homo sapiens
agccacaaucaccuucugaucu

SEQ ID NO: 27890 - RNA, 21 nt, Homo sapiens
ugcaaugcaacuacaaugcac

SEQ ID NO: 27891 - RNA, 20 nt, Homo sapiens
gcaaugcaacagcaaugcac

SEQ ID NO: 27892 - RNA, 20 nt, Homo sapiens
cugcgggaggacagggcuca

SEQ ID NO: 27893 - RNA, 17 nt, Homo sapiens
gacagccucucccccac

SEQ ID NO: 27894 - RNA, 21 nt, Homo sapiens
gggcaucugggacgcgcagga

SEQ ID NO: 27895 - RNA, 21 nt, Homo sapiens
gaccaaucgccguccccgccg

SEQ ID NO: 27896 - RNA, 21 nt, Homo sapiens
ucaaucacagauagcaccccu

SEQ ID NO: 27897 - RNA, 19 nt, Homo sapiens
guccugaauuccgcagccu

SEQ ID NO: 27898 - RNA, 22 nt, Homo sapiens
gcggucccgcggcgccccgccu

SEQ ID NO: 27899 - RNA, 22 nt, Homo sapiens
ugcuguuagcccuagccccgca

SEQ ID NO: 27900 - RNA, 22 nt, Homo sapiens
ggcucccaagaaccucaccugu

SEQ ID NO: 27901 - RNA, 22 nt, Homo sapiens
agacaacaaugccaaccucaca

SEQ ID NO: 27902 - RNA, 21 nt, Homo sapiens
ugcaaugcaacuacaaugcac

SEQ ID NO: 27903 - RNA, 20 nt, Homo sapiens
gcaaugcaacagcaaugcac

SEQ ID NO: 27904 - RNA, 22 nt, Homo sapiens
cacugguacaaggguugggaga

SEQ ID NO: 27905 - RNA, 23 nt, Homo sapiens
acccaacagccccugcaagggau

SEQ ID NO: 27906 - RNA, 21 nt, Homo sapiens
ugcaaacccugcaugugggag

SEQ ID NO: 27907 - RNA, 23 nt, Homo sapiens
gaaagugcccucaaggcugagug

SEQ ID NO: 27908 - RNA, 21 nt, Homo sapiens
uucuaggauaggcccaggggc

SEQ ID NO: 27909 - RNA, 22 nt, Homo sapiens
ccaucuuuaccagacaguguua

SEQ ID NO: 27910 - RNA, 22 nt, Homo sapiens
acaucguuaccagacaguguua

SEQ ID NO: 27911 - RNA, 21 nt, Homo sapiens
gaccaaucgccguccccgccg

SEQ ID NO: 27912 - RNA, 22 nt, Homo sapiens
gcggucccgcggcgccccgccu

SEQ ID NO: 27913 - RNA, 22 nt, Homo sapiens
ugcuguuagcccuagccccgca

SEQ ID NO: 27914 - RNA, 22 nt, Homo sapiens
cacucagcggccguuuccccaa

SEQ ID NO: 27915 - RNA, 21 nt, Homo sapiens
gcugaggucugggccaggucu

SEQ ID NO: 27916 - RNA, 22 nt, Homo sapiens
ucccucacacagaauuccagaa

SEQ ID NO: 27917 - RNA, 22 nt, Homo sapiens
augcuuuuugggguaagggcuu

SEQ ID NO: 27918 - RNA, 22 nt, Homo sapiens
ccccucuggucaaccagucaca

SEQ ID NO: 27919 - RNA, 22 nt, Homo sapiens
caaacaccauugucacacucca

SEQ ID NO: 27920 - RNA, 22 nt, Homo sapiens
ucaacaucagucugauaagcua

SEQ ID NO: 27921 - RNA, 22 nt, Homo sapiens
acuucaaggaucuuaaacuuug

SEQ ID NO: 27922 - RNA, 22 nt, Homo sapiens
cagcugguugaaggggaccaaa

SEQ ID NO: 27923 - RNA, 20 nt, Homo sapiens
aggggccucagccuccuggu

SEQ ID NO: 27924 - RNA, 17 nt, Homo sapiens
gacagccucucccccac

SEQ ID NO: 27925 - RNA, 23 nt, Homo sapiens
gggagugaagacacggagccaga

SEQ ID NO: 27926 - RNA, 21 nt, Homo sapiens
ccaaccaaugaaagaaugcuu

SEQ ID NO: 27927 - RNA, 22 nt, Homo sapiens
acccuuaucaguucuccgucca

SEQ ID NO: 27928 - RNA, 22 nt, Homo sapiens
ucaggaacugccuuucucucca

SEQ ID NO: 27929 - RNA, 23 nt, Homo sapiens
gaaacccagcagacaauguagcu

SEQ ID NO: 27930 - RNA, 21 nt, Homo sapiens
acccaguagccagauguagcu

SEQ ID NO: 27931 - RNA, 22 nt, Homo sapiens
ggagagccuccacccaacccuc

SEQ ID NO: 27932 - RNA, 23 nt, Homo sapiens
aaagucucgcucucugccccuca

SEQ ID NO: 27933 - RNA, 23 nt, Homo sapiens
aaagucucgcucucugccccuca

SEQ ID NO: 27934 - RNA, 19 nt, Homo sapiens
guccugaauuccgcagccu

SEQ ID NO: 27935 - RNA, 22 nt, Homo sapiens
aaucagucucauugcuuuauaa

SEQ ID NO: 27936 - RNA, 23 nt, Homo sapiens
gggagugaagacacggagccaga

SEQ ID NO: 27937 - RNA, 21 nt, Homo sapiens
gagcuacagugcuucaucuca

SEQ ID NO: 27938 - RNA, 20 nt, Homo sapiens
cuggaggaagggcccagagg

SEQ ID NO: 27939 - RNA, 22 nt, Homo sapiens
gccuaagacacaggcccagaga

SEQ ID NO: 27940 - RNA, 22 nt, Homo sapiens
agcccaaaaggagaauucuuug

SEQ ID NO: 27941 - RNA, 22 nt, Homo sapiens
uauccacuacaccccgcugccu

SEQ ID NO: 27942 - RNA, 22 nt, Homo sapiens
accagguuccaccccagcaggc

SEQ ID NO: 27943 - RNA, 22 nt, Homo sapiens
gggagaggucucccugcgcaca

SEQ ID NO: 27944 - RNA, 22 nt, Homo sapiens
acugggacuuuguaggccaguu

SEQ ID NO: 27945 - RNA, 22 nt, Homo sapiens
agcgggacuuugagggccaguu

SEQ ID NO: 27946 - RNA, 20 nt, Homo sapiens
cucaaagcaaacccugcaga

SEQ ID NO: 27947 - RNA, 21 nt, Homo sapiens
ggcugucaauucauaggucag

SEQ ID NO: 27948 - RNA, 22 nt, Homo sapiens
agcugaguguaggauguuuaca

SEQ ID NO: 27949 - RNA, 23 nt, Homo sapiens
gucagaccccgagggguccucgc

SEQ ID NO: 27950 - RNA, 21 nt, Homo sapiens
caucaccuuccuucuccucca

SEQ ID NO: 27951 - RNA, 21 nt, Homo sapiens
gcugaggucugggccaggucu

SEQ ID NO: 27952 - RNA, 22 nt, Homo sapiens
agcccaaaaggagaauucuuug

SEQ ID NO: 27953 - RNA, 22 nt, Homo sapiens
cggugagcacccggccccugcg

SEQ ID NO: 27954 - RNA, 22 nt, Homo sapiens
cuagggaacacagggcugguga

SEQ ID NO: 27955 - RNA, 23 nt, Homo sapiens
cggccugauucacaacaccagcu

SEQ ID NO: 27956 - RNA, 22 nt, Homo sapiens
ucaggaacugccuuucucucca

SEQ ID NO: 27957 - RNA, 21 nt, Homo sapiens
gaccaaucgccguccccgccg

SEQ ID NO: 27958 - RNA, 22 nt, Homo sapiens
ucagaccgagacaagugcaaug

SEQ ID NO: 27959 - RNA, 22 nt, Homo sapiens
gcggucccgcggcgccccgccu

SEQ ID NO: 27960 - RNA, 23 nt, Homo sapiens
cacugugggcccucuccgcacca

SEQ ID NO: 27961 - RNA, 23 nt, Homo sapiens
uauucucgcacggacuacaacca

SEQ ID NO: 27962 - RNA, 21 nt, Homo sapiens
guucuaacccauuguggccaa

SEQ ID NO: 27963 - RNA, 22 nt, Homo sapiens
uacagauggauaccgugcaauu

SEQ ID NO: 27964 - RNA, 24 nt, Homo sapiens
agugugaguucuaccauugccaaa

SEQ ID NO: 27965 - RNA, 23 nt, Homo sapiens
acccuauaagcaauauugcacua

SEQ ID NO: 27966 - RNA, 21 nt, Homo sapiens
aggagacucacaaguuccugc

SEQ ID NO: 27967 - RNA, 18 nt, Homo sapiens
cagcagccuccuucucaa

SEQ ID NO: 27968 - RNA, 22 nt, Homo sapiens
ccaguagcacggcucaguccag

SEQ ID NO: 27969 - RNA, 22 nt, Homo sapiens
cacaaaccauuaugugcugcua

SEQ ID NO: 27970 - RNA, 22 nt, Homo sapiens
uguaaaccaugaugugcugcua

SEQ ID NO: 27971 - RNA, 22 nt, Homo sapiens
cgccaauauuuacgugcugcua

SEQ ID NO: 27972 - RNA, 22 nt, Homo sapiens
ucaggaacugccuuucucucca

SEQ ID NO: 27973 - RNA, 23 nt, Homo sapiens
cuaucugcacuagaugcaccuua

SEQ ID NO: 27974 - RNA, 21 nt, Homo sapiens
gccaauauuucugugcugcua

SEQ ID NO: 27975 - RNA, 21 nt, Homo sapiens
acaugguuagaucaagcacaa

SEQ ID NO: 27976 - RNA, 21 nt, Homo sapiens
ccuucugacuccaaguccagu

SEQ ID NO: 27977 - RNA, 22 nt, Homo sapiens
gccuucugacccuaaguccagu

SEQ ID NO: 27978 - RNA, 22 nt, Homo sapiens
uucaaaacaugaauugcugcug

SEQ ID NO: 27979 - RNA, 21 nt, Homo sapiens
guguauaugcccauggacugc

SEQ ID NO: 27980 - RNA, 21 nt, Homo sapiens
acaaaccacagugugcugcug

SEQ ID NO: 27981 - RNA, 21 nt, Homo sapiens
uagcacccagauagcaaggau

SEQ ID NO: 27982 - RNA, 22 nt, Homo sapiens
gcacacaauaaauguuugcuga

SEQ ID NO: 27983 - RNA, 22 nt, Homo sapiens
cucauauuacaaugagcucauc

SEQ ID NO: 27984 - RNA, 19 nt, Homo sapiens
auuuugguacagcagcuca

SEQ ID NO: 27985 - RNA, 23 nt, Homo sapiens
ugcgggcgggacgagcaagcaca

SEQ ID NO: 27986 - RNA, 19 nt, Homo sapiens
gccucagaggcagcugcuu

SEQ ID NO: 27987 - RNA, 20 nt, Homo sapiens
uacugcuuccacagcucccc

SEQ ID NO: 27988 - RNA, 22 nt, Homo sapiens
acuggguucaccuuuaagggca

SEQ ID NO: 27989 - RNA, 24 nt, Homo sapiens
cacccccagagccucagcucccca

SEQ ID NO: 27990 - RNA, 21 nt, Homo sapiens
ugcaaugcaacuacaaugcac

SEQ ID NO: 27991 - RNA, 20 nt, Homo sapiens
gcaaugcaacagcaaugcac

SEQ ID NO: 27992 - RNA, 21 nt, Homo sapiens
gaaggaagugagugcagccac

SEQ ID NO: 27993 - RNA, 23 nt, Homo sapiens
aaagucucgcucucugccccuca

SEQ ID NO: 27994 - RNA, 22 nt, Homo sapiens
ugcuguuagcccuagccccgca

SEQ ID NO: 27995 - RNA, 22 nt, Homo sapiens
ggaggccgggacgagugcaaua

SEQ ID NO: 27996 - RNA, 21 nt, Homo sapiens
ccccucccagccucccugcca

SEQ ID NO: 27997 - RNA, 22 nt, Homo sapiens
cugggggcggcacaggggcuca

SEQ ID NO: 27998 - RNA, 24 nt, Homo sapiens
acugcuggucuucagucagggcca

SEQ ID NO: 27999 - RNA, 25 nt, Homo sapiens
acggagcugucccaacaccaccccu

SEQ ID NO: 28000 - RNA, 23 nt, Homo sapiens
guagugggccgagccgagugaca

SEQ ID NO: 28001 - RNA, 23 nt, Homo sapiens
cacugugggcccucuccgcacca

SEQ ID NO: 28002 - RNA, 22 nt, Homo sapiens
ugcuguuagcccuagccccgca

SEQ ID NO: 28003 - RNA, 22 nt, Homo sapiens
gcugaggcuguggggcuggagu

SEQ ID NO: 28004 - RNA, 20 nt, Homo sapiens
uacugcuuccacagcucccc

SEQ ID NO: 28005 - RNA, 22 nt, Homo sapiens
ggcagagagucagagcgcggau

SEQ ID NO: 28006 - RNA, 24 nt, Homo sapiens
cacccccagagccucagcucccca

SEQ ID NO: 28007 - RNA, 20 nt, Homo sapiens
aguacaucaucuauacugua

SEQ ID NO: 28008 - RNA, 23 nt, Homo sapiens
aggaacagcagcagcccgggccg

SEQ ID NO: 28009 - RNA, 19 nt, Homo sapiens
guccugaauuccgcagccu

SEQ ID NO: 28010 - RNA, 23 nt, Homo sapiens
acacagcucuuccauaucuccag

SEQ ID NO: 28011 - RNA, 17 nt, Homo sapiens
ggguggcagcgguggga

SEQ ID NO: 28012 - RNA, 17 nt, Homo sapiens
gggagaggaggaggcga

SEQ ID NO: 28013 - RNA, 22 nt, Homo sapiens
accuaauauaucaaacauauca

SEQ ID NO: 28014 - RNA, 23 nt, Homo sapiens
gaaacccagcagacaauguagcu

SEQ ID NO: 28015 - RNA, 23 nt, Homo sapiens
ucucugcaggccgugugcuuugc

SEQ ID NO: 28016 - RNA, 20 nt, Homo sapiens
gcaaugcaacagcaaugcac

SEQ ID NO: 28017 - RNA, 22 nt, Homo sapiens
guaccccuggagauucugauaa

SEQ ID NO: 28018 - RNA, 22 nt, Homo sapiens
aacgcuccaaaagaaggcacuc

SEQ ID NO: 28019 - RNA, 22 nt, Homo sapiens
aacacucuaaaaggaggcacuu

SEQ ID NO: 28020 - RNA, 22 nt, Homo sapiens
aguccagauucugugcccacca

SEQ ID NO: 28021 - RNA, 20 nt, Homo sapiens
auuucuauaucuaucuccau

SEQ ID NO: 28022 - RNA, 22 nt, Homo sapiens
gcacauguucugcggcccacca

SEQ ID NO: 28023 - RNA, 22 nt, Homo sapiens
agcucagaacccagaggucuca

SEQ ID NO: 28024 - RNA, 23 nt, Homo sapiens
cacaaauucgguucuacagggua

SEQ ID NO: 28025 - RNA, 25 nt, Homo sapiens
acggagcugucccaacaccaccccu

SEQ ID NO: 28026 - RNA, 22 nt, Homo sapiens
gccagcuaacaauacacugccu

SEQ ID NO: 28027 - RNA, 21 nt, Homo sapiens
ccgugguucuacccuguggua

SEQ ID NO: 28028 - RNA, 22 nt, Homo sapiens
uggggacccucccugaaccaag

SEQ ID NO: 28029 - RNA, 22 nt, Homo sapiens
auacauacuucuuuacauucca

SEQ ID NO: 28030 - RNA, 21 nt, Homo sapiens
cugggggacggagcagaagga

SEQ ID NO: 28031 - RNA, 21 nt, Homo sapiens
gaccaaucgccguccccgccg

SEQ ID NO: 28032 - RNA, 22 nt, Homo sapiens
ccacacacuuccuuacauucca

SEQ ID NO: 28033 - RNA, 22 nt, Homo sapiens
aagcgguuuaccaucccacaua

SEQ ID NO: 28034 - RNA, 22 nt, Homo sapiens
uacagauggauaccgugcaauu

SEQ ID NO: 28035 - RNA, 24 nt, Homo sapiens
cagaaagugcuuucuuuuggagaa

SEQ ID NO: 28036 - RNA, 22 nt, Homo sapiens
aacacucuaaaaggaggcacuu

SEQ ID NO: 28037 - RNA, 21 nt, Homo sapiens
ucccagcacacauuuagcuca

SEQ ID NO: 28038 - RNA, 20 nt, Homo sapiens
ggcaaagaaggaacauuccu

SEQ ID NO: 28039 - RNA, 22 nt, Homo sapiens
gcggucccgcggcgccccgccu

SEQ ID NO: 28040 - RNA, 23 nt, Homo sapiens
ccgcuugagcuaacuccgacccg

SEQ ID NO: 28041 - RNA, 23 nt, Homo sapiens
uccaaucaguuccugaugcagua

SEQ ID NO: 28042 - RNA, 23 nt, Homo sapiens
agggauuccugggaaaacuggac

SEQ ID NO: 28043 - RNA, 22 nt, Homo sapiens
aagagggagacccaggcucgga

SEQ ID NO: 28044 - RNA, 22 nt, Homo sapiens
cagcugguugaaggggaccaaa

SEQ ID NO: 28045 - RNA, 22 nt, Homo sapiens
uagcugguugaaggggaccaaa

SEQ ID NO: 28046 - RNA, 22 nt, Homo sapiens
cuacccacagacguaccaauca

SEQ ID NO: 28047 - RNA, 22 nt, Homo sapiens
cugggggcggcacaggggcuca

SEQ ID NO: 28048 - RNA, 22 nt, Homo sapiens
ggagcccgcgccccgcgccgag

SEQ ID NO: 28049 - RNA, 22 nt, Homo sapiens
ucaacaucagucugauaagcua

SEQ ID NO: 28050 - RNA, 22 nt, Homo sapiens
ucagaccgagacaagugcaaug

SEQ ID NO: 28051 - RNA, 20 nt, Homo sapiens
agagaugagagaaacacccu

SEQ ID NO: 28052 - RNA, 25 nt, Homo sapiens
accaacggaccuacuucccuccgcc

SEQ ID NO: 28053 - RNA, 22 nt, Homo sapiens
ugcuguuagcccuagccccgca

SEQ ID NO: 28054 - RNA, 20 nt, Homo sapiens
cuggaggaagggcccagagg

SEQ ID NO: 28055 - RNA, 22 nt, Homo sapiens
gccuaagacacaggcccagaga

SEQ ID NO: 28056 - RNA, 20 nt, Homo sapiens
uccccacagacccagagccg

SEQ ID NO: 28057 - RNA, 17 nt, Homo sapiens
ggguggcagcgguggga

SEQ ID NO: 28058 - RNA, 21 nt, Homo sapiens
cacucugaagggaagcgcuuu

SEQ ID NO: 28059 - RNA, 22 nt, Homo sapiens
cacaaaccauuaugugcugcua

SEQ ID NO: 28060 - RNA, 22 nt, Homo sapiens
uguaaaccaugaugugcugcua

SEQ ID NO: 28061 - RNA, 22 nt, Homo sapiens
cgccaauauuuacgugcugcua

SEQ ID NO: 28062 - RNA, 21 nt, Homo sapiens
gccaauauuucugugcugcua

SEQ ID NO: 28063 - RNA, 22 nt, Homo sapiens
uucaaaacaugaauugcugcug

SEQ ID NO: 28064 - RNA, 21 nt, Homo sapiens
acaaaccacagugugcugcug

SEQ ID NO: 28065 - RNA, 22 nt, Homo sapiens
acaguggucaucgagugacaca

SEQ ID NO: 28066 - RNA, 22 nt, Homo sapiens
ucaggaacugccuuucucucca

SEQ ID NO: 28067 - RNA, 22 nt, Homo sapiens
ucagaccgagacaagugcaaug

SEQ ID NO: 28068 - RNA, 20 nt, Homo sapiens
gcaaugcaacagcaaugcac

SEQ ID NO: 28069 - RNA, 22 nt, Homo sapiens
aacgcuccaaaagaaggcacuc

SEQ ID NO: 28070 - RNA, 22 nt, Homo sapiens
aacacucuaaaaggaggcacuu

SEQ ID NO: 28071 - RNA, 22 nt, Homo sapiens
gcugccguauaugugaugucac

SEQ ID NO: 28072 - RNA, 22 nt, Homo sapiens
caaacaccauugucacacucca

SEQ ID NO: 28073 - RNA, 22 nt, Homo sapiens
acggaagggcagagagggccag

SEQ ID NO: 28074 - RNA, 23 nt, Homo sapiens
ggaagccaucaagucgcugcagg

SEQ ID NO: 28075 - RNA, 22 nt, Homo sapiens
cucccuucuuuccucccgucuu

SEQ ID NO: 28076 - RNA, 21 nt, Homo sapiens
gaaggaagugagugcagccac

SEQ ID NO: 28077 - RNA, 21 nt, Homo sapiens
agguaagcgcuguugcuagcc

SEQ ID NO: 28078 - RNA, 24 nt, Homo sapiens
cacccccagagccucagcucccca

SEQ ID NO: 28079 - RNA, 22 nt, Homo sapiens
ucaggaacugccuuucucucca

SEQ ID NO: 28080 - RNA, 22 nt, Homo sapiens
gcugaggcuguggggcuggagu

SEQ ID NO: 28081 - RNA, 20 nt, Homo sapiens
cuggggaaaaggguggcacg

SEQ ID NO: 28082 - RNA, 22 nt, Homo sapiens
gauuccaauuuuuccacaucuu

SEQ ID NO: 28083 - RNA, 21 nt, Homo sapiens
ccuucugacuccaaguccagu

SEQ ID NO: 28084 - RNA, 21 nt, Homo sapiens
agguaauaccaauaccuugug

SEQ ID NO: 28085 - RNA, 22 nt, Homo sapiens
aacuguacaaacuacuaccuca

SEQ ID NO: 28086 - RNA, 22 nt, Homo sapiens
uaaaugaauucaauuuccuucu

SEQ ID NO: 28087 - RNA, 22 nt, Homo sapiens
cuggagagacaaggggaagagg

SEQ ID NO: 28088 - RNA, 20 nt, Homo sapiens
gcagaagcauuuccacacac

SEQ ID NO: 28089 - RNA, 22 nt, Homo sapiens
acccuuaucaguucuccgucca

SEQ ID NO: 28090 - RNA, 20 nt, Homo sapiens
cuggaggaagggcccagagg

SEQ ID NO: 28091 - RNA, 22 nt, Homo sapiens
gccuaagacacaggcccagaga

SEQ ID NO: 28092 - RNA, 21 nt, Homo sapiens
caucaccuuccuucuccucca

SEQ ID NO: 28093 - RNA, 22 nt, Homo sapiens
caaacaccauugucacacucca

SEQ ID NO: 28094 - RNA, 22 nt, Homo sapiens
cucaauagacugugagcuccuu

SEQ ID NO: 28095 - RNA, 23 nt, Homo sapiens
cccagcuagauuguaagcuccuu

SEQ ID NO: 28096 - RNA, 22 nt, Homo sapiens
gccagcuaacaauacacugccu

SEQ ID NO: 28097 - RNA, 23 nt, Homo sapiens
caugagugacgcccucuggagua

SEQ ID NO: 28098 - RNA, 23 nt, Homo sapiens
ucucacccagguagcaaggauua

SEQ ID NO: 28099 - RNA, 19 nt, Homo sapiens
gcucuaagaaagccacacu

SEQ ID NO: 28100 - RNA, 22 nt, Homo sapiens
caaacaccauugucacacucca

SEQ ID NO: 28101 - RNA, 22 nt, Homo sapiens
ucccucacacagaauuccagaa

SEQ ID NO: 28102 - RNA, 21 nt, Homo sapiens
cggggugcacgggcggagggc

SEQ ID NO: 28103 - RNA, 22 nt, Homo sapiens
acccuuaucaguucuccgucca

SEQ ID NO: 28104 - RNA, 21 nt, Homo sapiens
gaccaaucgccguccccgccg

SEQ ID NO: 28105 - RNA, 21 nt, Homo sapiens
gaccaaucgccguccccgccg

SEQ ID NO: 28106 - RNA, 22 nt, Homo sapiens
ucaucucgcccgcaaagaccca

SEQ ID NO: 28107 - RNA, 23 nt, Homo sapiens
aaagucucgcucucugccccuca

SEQ ID NO: 28108 - RNA, 23 nt, Homo sapiens
ugcgaacucaccacggacaaccu

SEQ ID NO: 28109 - RNA, 22 nt, Homo sapiens
gcggucccgcggcgccccgccu

SEQ ID NO: 28110 - RNA, 22 nt, Homo sapiens
gcggucccgcggcgccccgccu

SEQ ID NO: 28111 - RNA, 22 nt, Homo sapiens
ugcuguuagcccuagccccgca

SEQ ID NO: 28112 - RNA, 22 nt, Homo sapiens
ugcuguuagcccuagccccgca

SEQ ID NO: 28113 - RNA, 22 nt, Homo sapiens
gguuaguggaccaggucacaaa

SEQ ID NO: 28114 - RNA, 23 nt, Homo sapiens
aaagucucgcucucugccccuca

SEQ ID NO: 28115 - RNA, 22 nt, Homo sapiens
aucgggaggggacugagccuga

SEQ ID NO: 28116 - RNA, 22 nt, Homo sapiens
gcugaggcuguggggcuggagu

SEQ ID NO: 28117 - RNA, 22 nt, Homo sapiens
aacuauacaaccuacuaccuca

SEQ ID NO: 28118 - RNA, 22 nt, Homo sapiens
aaccacacaaccuacuaccuca

SEQ ID NO: 28119 - RNA, 22 nt, Homo sapiens
aaccauacaaccuacuaccuca

SEQ ID NO: 28120 - RNA, 22 nt, Homo sapiens
aacuaugcaaccuacuaccucu

SEQ ID NO: 28121 - RNA, 22 nt, Homo sapiens
aacuauacaaccuccuaccuca

SEQ ID NO: 28122 - RNA, 22 nt, Homo sapiens
aacuauacaaucuacuaccuca

SEQ ID NO: 28123 - RNA, 22 nt, Homo sapiens
aacuguacaaacuacuaccuca

SEQ ID NO: 28124 - RNA, 22 nt, Homo sapiens
aacagcacaaacuacuaccuca

SEQ ID NO: 28125 - RNA, 22 nt, Homo sapiens
aacaauacaacuuacuaccuca

SEQ ID NO: 28126 - RNA, 22 nt, Homo sapiens
aggcauaggaugacaaagggaa

SEQ ID NO: 28127 - RNA, 22 nt, Homo sapiens
aggcgaaggaugacaaagggaa

SEQ ID NO: 28128 - RNA, 22 nt, Homo sapiens
acacucuaaaaggaugcacuuu

SEQ ID NO: 28129 - RNA, 22 nt, Homo sapiens
aaccucuaaaaggaugcacuuu

SEQ ID NO: 28130 - RNA, 22 nt, Homo sapiens
auccucuaaaaagaugcacuuu

SEQ ID NO: 28131 - RNA, 22 nt, Homo sapiens
agaaaaugccccucaguuuuga

SEQ ID NO: 28132 - RNA, 22 nt, Homo sapiens
gcaaaaguaacugcaguuuugg

SEQ ID NO: 28133 - RNA, 21 nt, Homo sapiens
gaccaaucgccguccccgccg

SEQ ID NO: 28134 - RNA, 22 nt, Homo sapiens
gcggucccgcggcgccccgccu

SEQ ID NO: 28135 - RNA, 23 nt, Homo sapiens
gggcucuuacucccucaggcacu

SEQ ID NO: 28136 - RNA, 22 nt, Homo sapiens
gugggguggguggucaggccga

SEQ ID NO: 28137 - RNA, 17 nt, Homo sapiens
gggagaggaggaggcga

SEQ ID NO: 28138 - RNA, 22 nt, Homo sapiens
cacgaccgacgccacgccgagu

SEQ ID NO: 28139 - RNA, 22 nt, Homo sapiens
ggagcccgcgccccgcgccgag

SEQ ID NO: 28140 - RNA, 23 nt, Homo sapiens
gggagugaagacacggagccaga

SEQ ID NO: 28141 - RNA, 22 nt, Homo sapiens
cuguuccugcugaacugagcca

SEQ ID NO: 28142 - RNA, 22 nt, Homo sapiens
ucagaccgagacaagugcaaug

SEQ ID NO: 28143 - RNA, 22 nt, Homo sapiens
uacagauggauaccgugcaauu

SEQ ID NO: 28144 - RNA, 22 nt, Homo sapiens
aggaaaccagcaaguguugacg

SEQ ID NO: 28145 - RNA, 25 nt, Homo sapiens
acggagcugucccaacaccaccccu

SEQ ID NO: 28146 - RNA, 22 nt, Homo sapiens
ugcuguuagcccuagccccgca

SEQ ID NO: 28147 - RNA, 23 nt, Homo sapiens
aggagaaggcaccaugggauuua

SEQ ID NO: 28148 - RNA, 21 nt, Homo sapiens
ucccagcacacauuuagcuca

SEQ ID NO: 28149 - RNA, 21 nt, Homo sapiens
cggggugcacgggcggagggc

SEQ ID NO: 28150 - RNA, 22 nt, Homo sapiens
aaucagucucauugcuuuauaa

SEQ ID NO: 28151 - RNA, 25 nt, Homo sapiens
accaacggaccuacuucccuccgcc

SEQ ID NO: 28152 - RNA, 23 nt, Homo sapiens
cuaucugcacuagaugcaccuua

SEQ ID NO: 28153 - RNA, 23 nt, Homo sapiens
aggaacagcagcagcccgggccg

SEQ ID NO: 28154 - RNA, 24 nt, Homo sapiens
acgcgcaggccagagacccaggca

SEQ ID NO: 28155 - RNA, 22 nt, Homo sapiens
ugcuguuagcccuagccccgca

SEQ ID NO: 28156 - RNA, 22 nt, Homo sapiens
ucaggaacugccuuucucucca

SEQ ID NO: 28157 - RNA, 20 nt, Homo sapiens
uacugcuuccacagcucccc

SEQ ID NO: 28158 - RNA, 22 nt, Homo sapiens
cuagggaacacagggcugguga

SEQ ID NO: 28159 - RNA, 23 nt, Homo sapiens
cggccugauucacaacaccagcu

SEQ ID NO: 28160 - RNA, 24 nt, Homo sapiens
ucacagguuaaagggucucaggga

SEQ ID NO: 28161 - RNA, 22 nt, Homo sapiens
ucacaaguuagggucucaggga

SEQ ID NO: 28162 - RNA, 23 nt, Homo sapiens
agcccuguucuacagcccugagg

SEQ ID NO: 28163 - RNA, 21 nt, Homo sapiens
ccgugguucuacccuguggua

SEQ ID NO: 28164 - RNA, 21 nt, Homo sapiens
aagggucaguaagcacccgcg

SEQ ID NO: 28165 - RNA, 21 nt, Homo sapiens
cccuccaccaugcaagggaug

SEQ ID NO: 28166 - RNA, 18 nt, Homo sapiens
ugguggcagaggugggau

SEQ ID NO: 28167 - RNA, 23 nt, Homo sapiens
uccauaaaguaggaaacacuaca

SEQ ID NO: 28168 - RNA, 22 nt, Homo sapiens
aaagugcuucuuaccuccagau

SEQ ID NO: 28169 - RNA, 23 nt, Homo sapiens
acacucuaaagagaagcgcuuug

SEQ ID NO: 28170 - RNA, 21 nt, Homo sapiens
agaaaguacuucccucuggag

SEQ ID NO: 28171 - RNA, 21 nt, Homo sapiens
agaaagugcaucccucuggag

SEQ ID NO: 28172 - RNA, 22 nt, Homo sapiens
gauuccaauuuuuccacaucuu

SEQ ID NO: 28173 - RNA, 23 nt, Homo sapiens
cuccagccccuccagggcuuccu

SEQ ID NO: 28174 - RNA, 22 nt, Homo sapiens
acaguucuucaacuggcagcuu

SEQ ID NO: 28175 - RNA, 23 nt, Homo sapiens
gcacaugugcacacagccgggug

SEQ ID NO: 28176 - RNA, 24 nt, Homo sapiens
cacccccagagccucagcucccca

SEQ ID NO: 28177 - RNA, 21 nt, Homo sapiens
guaaugggaccuuccucuuug

SEQ ID NO: 28178 - RNA, 21 nt, Homo sapiens
aagacgggaggagaggaguga

SEQ ID NO: 28179 - RNA, 22 nt, Homo sapiens
ugagccacugugccuggccuga

SEQ ID NO: 28180 - RNA, 23 nt, Homo sapiens
acucaccgacagcguugaauguu

SEQ ID NO: 28181 - RNA, 22 nt, Homo sapiens
cuguuccugcugaacugagcca

SEQ ID NO: 28182 - RNA, 22 nt, Homo sapiens
ugaagaagggggggaagggcgu

SEQ ID NO: 28183 - RNA, 22 nt, Homo sapiens
ccccucuggucaaccagucaca

SEQ ID NO: 28184 - RNA, 22 nt, Homo sapiens
cacaaaccauuaugugcugcua

SEQ ID NO: 28185 - RNA, 22 nt, Homo sapiens
uguaaaccaugaugugcugcua

SEQ ID NO: 28186 - RNA, 22 nt, Homo sapiens
cgccaauauuuacgugcugcua

SEQ ID NO: 28187 - RNA, 21 nt, Homo sapiens
gccaauauuucugugcugcua

SEQ ID NO: 28188 - RNA, 22 nt, Homo sapiens
cacucagcggccguuuccccaa

SEQ ID NO: 28189 - RNA, 22 nt, Homo sapiens
ggagagccuccacccaacccuc

SEQ ID NO: 28190 - RNA, 21 nt, Homo sapiens
ucaaucacagauagcaccccu

SEQ ID NO: 28191 - RNA, 22 nt, Homo sapiens
uucaaaacaugaauugcugcug

SEQ ID NO: 28192 - RNA, 21 nt, Homo sapiens
acaaaccacagugugcugcug

SEQ ID NO: 28193 - RNA, 19 nt, Homo sapiens
agaaaccccagcagagaca

SEQ ID NO: 28194 - RNA, 22 nt, Homo sapiens
gccaccuucaaaugggaagucu

SEQ ID NO: 28195 - RNA, 23 nt, Homo sapiens
acagcgcucgcaaccgcagcgau

SEQ ID NO: 28196 - RNA, 17 nt, Homo sapiens
uggaggccccagcgaga

SEQ ID NO: 28197 - RNA, 22 nt, Homo sapiens
uauccacuacaccccgcugccu

SEQ ID NO: 28198 - RNA, 22 nt, Homo sapiens
cacucuaaagggaggcacuuug

SEQ ID NO: 28199 - RNA, 22 nt, Homo sapiens
cacucuaaagggaggcacuuug

SEQ ID NO: 28200 - RNA, 22 nt, Homo sapiens
gggagaggucucccugcgcaca

SEQ ID NO: 28201 - RNA, 24 nt, Homo sapiens
acugcaggcuccagcuuccaggcu

SEQ ID NO: 28202 - RNA, 17 nt, Homo sapiens
gggagaggaggaggcga

SEQ ID NO: 28203 - RNA, 21 nt, Homo sapiens
acccaguagccagauguagcu

SEQ ID NO: 28204 - RNA, 21 nt, Homo sapiens
cguacgcuauacggucuacua

SEQ ID NO: 28205 - RNA, 22 nt, Homo sapiens
gcaaaagaaacugugguuuuug

SEQ ID NO: 28206 - RNA, 25 nt, Homo sapiens
acggagcugucccaacaccaccccu

SEQ ID NO: 28207 - RNA, 25 nt, Homo sapiens
accaacggaccuacuucccuccgcc

SEQ ID NO: 28208 - RNA, 21 nt, Homo sapiens
caucaccuuccuucuccucca

SEQ ID NO: 28209 - RNA, 20 nt, Homo sapiens
uacugcuuccacagcucccc

SEQ ID NO: 28210 - RNA, 22 nt, Homo sapiens
ccagugucuccaguaguagaca

SEQ ID NO: 28211 - RNA, 21 nt, Homo sapiens
gagcugcauccuggcuccggg

SEQ ID NO: 28212 - RNA, 20 nt, Homo sapiens
cugcgggaggacagggcuca

SEQ ID NO: 28213 - RNA, 22 nt, Homo sapiens
cuggagagacaaggggaagagg

SEQ ID NO: 28214 - RNA, 24 nt, Homo sapiens
gaaagugcauagaauucugucugg

SEQ ID NO: 28215 - RNA, 23 nt, Homo sapiens
ucacauaggaaugaaaagccaua

SEQ ID NO: 28216 - RNA, 21 nt, Homo sapiens
gggcaucugggacgcgcagga

SEQ ID NO: 28217 - RNA, 23 nt, Homo sapiens
agaggcaggcaugcgggcagaca

SEQ ID NO: 28218 - RNA, 23 nt, Homo sapiens
gaaagugcccucaaggcugagug

SEQ ID NO: 28219 - RNA, 19 nt, Homo sapiens
aagacauuuucagacagcu

SEQ ID NO: 28220 - RNA, 19 nt, Homo sapiens
ucccacaggaagcagacac

SEQ ID NO: 28221 - RNA, 20 nt, Homo sapiens
cccugcgccaucuccucuac

SEQ ID NO: 28222 - RNA, 22 nt, Homo sapiens
agacaacaaugccaaccucaca

SEQ ID NO: 28223 - RNA, 22 nt, Homo sapiens
acaaaaguugccuuugugugau

SEQ ID NO: 28224 - RNA, 23 nt, Homo sapiens
ucacauaggaaugaaaagccaua

SEQ ID NO: 28225 - RNA, 19 nt, Homo sapiens
accagugcccugcacacuu

SEQ ID NO: 28226 - RNA, 23 nt, Homo sapiens
cugugggagggcaguggugagag

SEQ ID NO: 28227 - RNA, 22 nt, Homo sapiens
ucaggaacugccuuucucucca

SEQ ID NO: 28228 - RNA, 20 nt, Homo sapiens
cccgccgcgucgcccugggg

SEQ ID NO: 28229 - RNA, 22 nt, Homo sapiens
ucgcccucucaacccagcuuuu

SEQ ID NO: 28230 - RNA, 22 nt, Homo sapiens
uugcccucucaacccagcuuuu

SEQ ID NO: 28231 - RNA, 20 nt, Homo sapiens
acccucucaacccagcuuuu

SEQ ID NO: 28232 - RNA, 19 nt, Homo sapiens
uccucucaacccagcuuuu

SEQ ID NO: 28233 - RNA, 21 nt, Homo sapiens
aguucucccaacguaaaccca

SEQ ID NO: 28234 - RNA, 23 nt, Homo sapiens
ggaagccaucaagucgcugcagg

SEQ ID NO: 28235 - RNA, 21 nt, Homo sapiens
cugaggagagaggaggugggg

SEQ ID NO: 28236 - RNA, 20 nt, Homo sapiens
uacugcuuccacagcucccc

SEQ ID NO: 28237 - RNA, 26 nt, Homo sapiens
uuucagaauuugcugccaucaucauc

SEQ ID NO: 28238 - RNA, 18 nt, Homo sapiens
aucacauucaccucccug

SEQ ID NO: 28239 - RNA, 23 nt, Homo sapiens
gggagugaagacacggagccaga

SEQ ID NO: 28240 - RNA, 21 nt, Homo sapiens
gaccaaucgccguccccgccg

SEQ ID NO: 28241 - RNA, 22 nt, Homo sapiens
cuacccacagacguaccaauca

SEQ ID NO: 28242 - RNA, 22 nt, Homo sapiens
gcggucccgcggcgccccgccu

SEQ ID NO: 28243 - RNA, 24 nt, Homo sapiens
cacccccagagccucagcucccca

SEQ ID NO: 28244 - RNA, 22 nt, Homo sapiens
cacaaguucggaucuacggguu

SEQ ID NO: 28245 - RNA, 21 nt, Homo sapiens
gagcugcauccuggcuccggg

SEQ ID NO: 28246 - RNA, 22 nt, Homo sapiens
gcacaaaucuccagaccaccca

SEQ ID NO: 28247 - RNA, 22 nt, Homo sapiens
ggagcccgcgccccgcgccgag

SEQ ID NO: 28248 - RNA, 21 nt, Homo sapiens
cccuccaccaugcaagggaug

SEQ ID NO: 28249 - RNA, 22 nt, Homo sapiens
agcugaguguaggauguuuaca

SEQ ID NO: 28250 - RNA, 23 nt, Homo sapiens
acaccaaugcccuaggggaugcg

SEQ ID NO: 28251 - RNA, 21 nt, Homo sapiens
uucuaggauaggcccaggggc

SEQ ID NO: 28252 - RNA, 23 nt, Homo sapiens
ucucacccagguagcaaggauua

SEQ ID NO: 28253 - RNA, 21 nt, Homo sapiens
acuccaaagggaagcgccuuc

SEQ ID NO: 28254 - RNA, 22 nt, Homo sapiens
cgcucuaaagggaagcgccuuc

SEQ ID NO: 28255 - RNA, 22 nt, Homo sapiens
ugcaagccuugggugugggagg

SEQ ID NO: 28256 - RNA, 22 nt, Homo sapiens
aguccagauucugugcccacca

SEQ ID NO: 28257 - RNA, 22 nt, Homo sapiens
acaguucuucaacuggcagcuu

SEQ ID NO: 28258 - RNA, 22 nt, Homo sapiens
ucgcccucucaacccagcuuuu

SEQ ID NO: 28259 - RNA, 22 nt, Homo sapiens
uugcccucucaacccagcuuuu

SEQ ID NO: 28260 - RNA, 20 nt, Homo sapiens
acccucucaacccagcuuuu

SEQ ID NO: 28261 - RNA, 19 nt, Homo sapiens
uccucucaacccagcuuuu

SEQ ID NO: 28262 - RNA, 23 nt, Homo sapiens
gaaagugcccucaaggcugagug

SEQ ID NO: 28263 - RNA, 22 nt, Homo sapiens
aacccucuaaaaggaagcacuu

SEQ ID NO: 28264 - RNA, 22 nt, Homo sapiens
aggucucacuuuguugcccaga

SEQ ID NO: 28265 - RNA, 25 nt, Homo sapiens
aaggagcucagaagcccugcccagc

SEQ ID NO: 28266 - RNA, 23 nt, Homo sapiens
cuaccugcacuauaagcacuuua

SEQ ID NO: 28267 - RNA, 17 nt, Homo sapiens
gacagccucucccccac

SEQ ID NO: 28268 - RNA, 23 nt, Homo sapiens
gaaagugcccucaaggcugagug

SEQ ID NO: 28269 - RNA, 24 nt, Homo sapiens
gaaagugcauagaauucugucugg

SEQ ID NO: 28270 - RNA, 19 nt, Homo sapiens
aagacauuuucagacagcu

SEQ ID NO: 28271 - RNA, 23 nt, Homo sapiens
aaaaugcagauuccuggacucca

SEQ ID NO: 28272 - RNA, 22 nt, Homo sapiens
gauccgagcaccggggaccccc

SEQ ID NO: 28273 - RNA, 19 nt, Homo sapiens
ucagcaguaccagccuaga

SEQ ID NO: 28274 - RNA, 20 nt, Homo sapiens
cucaaagcaaacccugcaga

SEQ ID NO: 28275 - RNA, 19 nt, Homo sapiens
cagcaucagcagcaucauc

SEQ ID NO: 28276 - RNA, 23 nt, Homo sapiens
aaaucagaaucacaccuggggga

SEQ ID NO: 28277 - RNA, 24 nt, Homo sapiens
acgcagagcccgaaagcccccagu

SEQ ID NO: 28278 - RNA, 22 nt, Homo sapiens
cuaccauaggguaaaaccacug

SEQ ID NO: 28279 - RNA, 23 nt, Homo sapiens
aaagucucgcucucugccccuca

SEQ ID NO: 28280 - RNA, 22 nt, Homo sapiens
cggugagcacccggccccugcg

SEQ ID NO: 28281 - RNA, 23 nt, Homo sapiens
agggauuccugggaaaacuggac

SEQ ID NO: 28282 - RNA, 20 nt, Homo sapiens
uaugaacaauuucuaggaau

SEQ ID NO: 28283 - RNA, 22 nt, Homo sapiens
cuagugguccuaaacauuucac

SEQ ID NO: 28284 - RNA, 21 nt, Homo sapiens
gcggaacuuagccacugugaa

SEQ ID NO: 28285 - RNA, 23 nt, Homo sapiens
caugagugacgcccucuggagua

SEQ ID NO: 28286 - RNA, 26 nt, Homo sapiens
uuucagaauuugcugccaucaucauc

SEQ ID NO: 28287 - RNA, 24 nt, Homo sapiens
cacccccagagccucagcucccca

SEQ ID NO: 28288 - RNA, 21 nt, Homo sapiens
acuccaaagggaagcgccuuc

SEQ ID NO: 28289 - RNA, 22 nt, Homo sapiens
cgcucuaaagggaagcgccuuc

SEQ ID NO: 28290 - RNA, 22 nt, Homo sapiens
uggcagcagcggagggggcaga

SEQ ID NO: 28291 - RNA, 20 nt, Homo sapiens
ccagcagcaccuggggcagu

SEQ ID NO: 28292 - RNA, 21 nt, Homo sapiens
auccuguacugagcugccccg

SEQ ID NO: 28293 - RNA, 25 nt, Homo sapiens
cagcgucugccggaacccguuccca

SEQ ID NO: 28294 - RNA, 22 nt, Homo sapiens
auggcaguggaguuagugauug

SEQ ID NO: 28295 - RNA, 21 nt, Homo sapiens
guccugagagcgcugccuccu

SEQ ID NO: 28296 - RNA, 25 nt, Homo sapiens
agcuagucaagcgcgguuguggggg

SEQ ID NO: 28297 - RNA, 22 nt, Homo sapiens
aacagcacaaacuacuaccuca

SEQ ID NO: 28298 - RNA, 22 nt, Homo sapiens
uagucaagugaagcagugggag

SEQ ID NO: 28299 - RNA, 23 nt, Homo sapiens
gaaagugcccucaaggcugagug

SEQ ID NO: 28300 - RNA, 22 nt, Homo sapiens
ugacgaugacaacgaugacgua

SEQ ID NO: 28301 - RNA, 20 nt, Homo sapiens
agagaugagagaaacacccu

SEQ ID NO: 28302 - RNA, 21 nt, Homo sapiens
ucacccagaucugcggccuaa

SEQ ID NO: 28303 - RNA, 22 nt, Homo sapiens
cuacccacagacguaccaauca

SEQ ID NO: 28304 - RNA, 22 nt, Homo sapiens
ugcaagccuugggugugggagg

SEQ ID NO: 28305 - RNA, 23 nt, Homo sapiens
cuaccugcacuauaagcacuuua

SEQ ID NO: 28306 - RNA, 21 nt, Homo sapiens
ugcaggcugaucuucuucucu

SEQ ID NO: 28307 - RNA, 21 nt, Homo sapiens
aacggaaccacuagugacuug

SEQ ID NO: 28308 - RNA, 22 nt, Homo sapiens
agccacaaucaccuucugaucu

SEQ ID NO: 28309 - RNA, 23 nt, Homo sapiens
cggcucugucgucgaggcgcuca

SEQ ID NO: 28310 - RNA, 17 nt, Homo sapiens
gacagccucucccccac

SEQ ID NO: 28311 - RNA, 22 nt, Homo sapiens
uccacauggaguugcuguuaca

SEQ ID NO: 28312 - RNA, 20 nt, Homo sapiens
uacugcuuccacagcucccc

SEQ ID NO: 28313 - RNA, 22 nt, Homo sapiens
cggugagcacccggccccugcg

SEQ ID NO: 28314 - RNA, 22 nt, Homo sapiens
gugggguggguggucaggccga

SEQ ID NO: 28315 - RNA, 22 nt, Homo sapiens
ucccucacacagaauuccagaa

SEQ ID NO: 28316 - RNA, 19 nt, Homo sapiens
aagacauuuucagacagcu

SEQ ID NO: 28317 - RNA, 22 nt, Homo sapiens
uccggggacgaacgggacgggu

SEQ ID NO: 28318 - RNA, 22 nt, Homo sapiens
agcccaaaaggagaauucuuug

SEQ ID NO: 28319 - RNA, 23 nt, Homo sapiens
caugagugacgcccucuggagua

SEQ ID NO: 28320 - RNA, 22 nt, Homo sapiens
gcugaggcuguggggcuggagu

SEQ ID NO: 28321 - RNA, 22 nt, Homo sapiens
acgguccuacacucaaggcaug

SEQ ID NO: 28322 - RNA, 23 nt, Homo sapiens
aggaacagcagcagcccgggccg

SEQ ID NO: 28323 - RNA, 18 nt, Homo sapiens
cccccaccaccacgcccg

SEQ ID NO: 28324 - RNA, 23 nt, Homo sapiens
gggagugaagacacggagccaga

SEQ ID NO: 28325 - RNA, 21 nt, Homo sapiens
acuccaaagggaagcgccuuc

SEQ ID NO: 28326 - RNA, 22 nt, Homo sapiens
cgcucuaaagggaagcgccuuc

SEQ ID NO: 28327 - RNA, 22 nt, Homo sapiens
ccucaggcacggccgggccacc

SEQ ID NO: 28328 - RNA, 20 nt, Homo sapiens
acaaugagaacccauggucu

SEQ ID NO: 28329 - RNA, 21 nt, Homo sapiens
gaccaagaaauagccuuucaa

SEQ ID NO: 28330 - RNA, 23 nt, Homo sapiens
caugagugacgcccucuggagua

SEQ ID NO: 28331 - RNA, 22 nt, Homo sapiens
gcaaaaguaauugcagugugug

SEQ ID NO: 28332 - RNA, 24 nt, Homo sapiens
cagaaagugcuuucuuuuggagaa

SEQ ID NO: 28333 - RNA, 22 nt, Homo sapiens
aacacucuaaaaggaggcacuu

SEQ ID NO: 28334 - RNA, 22 nt, Homo sapiens
agccacaaucaccuucugaucu

SEQ ID NO: 28335 - RNA, 21 nt, Homo sapiens
uucuaggauaggcccaggggc

SEQ ID NO: 28336 - RNA, 23 nt, Homo sapiens
gaaacccagcagacaauguagcu

SEQ ID NO: 28337 - RNA, 21 nt, Homo sapiens
gaccaagaaauagccuuucaa

SEQ ID NO: 28338 - RNA, 23 nt, Homo sapiens
gaaacccagcagacaauguagcu

SEQ ID NO: 28339 - RNA, 23 nt, Homo sapiens
gucagaccccgagggguccucgc

SEQ ID NO: 28340 - RNA, 22 nt, Homo sapiens
gugggguggguggucaggccga

SEQ ID NO: 28341 - RNA, 23 nt, Homo sapiens
cccaacagacauggcgguacuca

SEQ ID NO: 28342 - RNA, 22 nt, Homo sapiens
uagcagaagcauuuccgcacac

SEQ ID NO: 28343 - RNA, 22 nt, Homo sapiens
ugacgaugacaacgaugacgua

SEQ ID NO: 28344 - RNA, 22 nt, Homo sapiens
gcgaauauaacacggucgaucu

SEQ ID NO: 28345 - RNA, 21 nt, Homo sapiens
aagggucaguaagcacccgcg

SEQ ID NO: 28346 - RNA, 21 nt, Homo sapiens
gagcugcauccuggcuccggg

SEQ ID NO: 28347 - RNA, 23 nt, Homo sapiens
gggagugaagacacggagccaga

SEQ ID NO: 28348 - RNA, 21 nt, Homo sapiens
gaccaaucgccguccccgccg

SEQ ID NO: 28349 - RNA, 23 nt, Homo sapiens
aaagucucgcucucugccccuca

SEQ ID NO: 28350 - RNA, 22 nt, Homo sapiens
gcggucccgcggcgccccgccu

SEQ ID NO: 28351 - RNA, 17 nt, Homo sapiens
gggagaggaggaggcga

SEQ ID NO: 28352 - RNA, 21 nt, Homo sapiens
gaccaaucgccguccccgccg

SEQ ID NO: 28353 - RNA, 23 nt, Homo sapiens
aaagucucgcucucugccccuca

SEQ ID NO: 28354 - RNA, 22 nt, Homo sapiens
cucccuucuuuccucccgucuu

SEQ ID NO: 28355 - RNA, 22 nt, Homo sapiens
gugauugccacucuccugagua

SEQ ID NO: 28356 - RNA, 24 nt, Homo sapiens
cagaaagugcuuucuuuuggagaa

SEQ ID NO: 28357 - RNA, 22 nt, Homo sapiens
aacacucuaaaaggaggcacuu

SEQ ID NO: 28358 - RNA, 22 nt, Homo sapiens
gcggucccgcggcgccccgccu

SEQ ID NO: 28359 - RNA, 22 nt, Homo sapiens
ugcuguuagcccuagccccgca

SEQ ID NO: 28360 - RNA, 23 nt, Homo sapiens
ggaagccaucaagucgcugcagg

SEQ ID NO: 28361 - RNA, 21 nt, Homo sapiens
cucccccacugcagcuggcac

SEQ ID NO: 28362 - RNA, 18 nt, Homo sapiens
aucacauucaccucccug

SEQ ID NO: 28363 - RNA, 22 nt, Homo sapiens
acaccuggcuccacacgcgggc

SEQ ID NO: 28364 - RNA, 23 nt, Homo sapiens
gggagugaagacacggagccaga

SEQ ID NO: 28365 - RNA, 23 nt, Homo sapiens
cgugagcuccuggaggacaggga

SEQ ID NO: 28366 - RNA, 23 nt, Homo sapiens
aaagucucgcucucugccccuca

SEQ ID NO: 28367 - RNA, 21 nt, Homo sapiens
ugcaugacggccugcaagaca

SEQ ID NO: 28368 - RNA, 22 nt, Homo sapiens
ugugggugugugcaugagcgug

SEQ ID NO: 28369 - RNA, 22 nt, Homo sapiens
gauccgagcaccggggaccccc

SEQ ID NO: 28370 - RNA, 22 nt, Homo sapiens
caagacacauuuggagagggac

SEQ ID NO: 28371 - RNA, 20 nt, Homo sapiens
ugggccaccgccgagcggac

SEQ ID NO: 28372 - RNA, 23 nt, Homo sapiens
aaucgcgguuuauaccaaaugaa

SEQ ID NO: 28373 - RNA, 22 nt, Homo sapiens
gguuaguggaccaggucacaaa

SEQ ID NO: 28374 - RNA, 22 nt, Homo sapiens
caacaaaaucacugaugcugga

SEQ ID NO: 28375 - RNA, 20 nt, Homo sapiens
cccugcgccaucuccucuac

SEQ ID NO: 28376 - RNA, 23 nt, Homo sapiens
gaaacccagcagacaauguagcu

SEQ ID NO: 28377 - RNA, 23 nt, Homo sapiens
uguaggcuggggauaaaugaaua

SEQ ID NO: 28378 - RNA, 18 nt, Homo sapiens
acccucugaaaggaagca

SEQ ID NO: 28379 - RNA, 22 nt, Homo sapiens
aaagugcuucuuaccuccagau

SEQ ID NO: 28380 - RNA, 25 nt, Homo sapiens
accaacggaccuacuucccuccgcc

SEQ ID NO: 28381 - RNA, 22 nt, Homo sapiens
acacucuaaagggaagugcguu

SEQ ID NO: 28382 - RNA, 21 nt, Homo sapiens
agagcucauccauaguuguca

SEQ ID NO: 28383 - RNA, 22 nt, Homo sapiens
ucccucacacagaauuccagaa

SEQ ID NO: 28384 - RNA, 22 nt, Homo sapiens
augcuuuuugggguaagggcuu

SEQ ID NO: 28385 - RNA, 22 nt, Homo sapiens
uccacauggaguugcuguuaca

SEQ ID NO: 28386 - RNA, 23 nt, Homo sapiens
aaaucagaaucacaccuggggga

SEQ ID NO: 28387 - RNA, 24 nt, Homo sapiens
acgcagagcccgaaagcccccagu

SEQ ID NO: 28388 - RNA, 23 nt, Homo sapiens
cuccagccccuccagggcuuccu

SEQ ID NO: 28389 - RNA, 22 nt, Homo sapiens
gcaaaagaaacugugguuuuug

SEQ ID NO: 28390 - RNA, 22 nt, Homo sapiens
auccuucuacaaauucacccau

SEQ ID NO: 28391 - RNA, 21 nt, Homo sapiens
ugacugacagcuuuuugagua

SEQ ID NO: 28392 - RNA, 20 nt, Homo sapiens
uucccaugcccuauaccucu

SEQ ID NO: 28393 - RNA, 23 nt, Homo sapiens
acacagcucuuccauaucuccag

SEQ ID NO: 28394 - RNA, 20 nt, Homo sapiens
auuucuauaucuaucuccau

SEQ ID NO: 28395 - RNA, 19 nt, Homo sapiens
gccucagaggcagcugcuu

SEQ ID NO: 28396 - RNA, 22 nt, Homo sapiens
aggucucacuuuguugcccaga

SEQ ID NO: 28397 - RNA, 25 nt, Homo sapiens
aaggagcucagaagcccugcccagc

SEQ ID NO: 28398 - RNA, 24 nt, Homo sapiens
agugugaguucuaccauugccaaa

SEQ ID NO: 28399 - RNA, 22 nt, Homo sapiens
gauagagugcagaccagggucu

SEQ ID NO: 28400 - RNA, 26 nt, Homo sapiens
uuucagaauuugcugccaucaucauc

SEQ ID NO: 28401 - RNA, 20 nt, Homo sapiens
cuggaggaagggcccagagg

SEQ ID NO: 28402 - RNA, 22 nt, Homo sapiens
gccuaagacacaggcccagaga

SEQ ID NO: 28403 - RNA, 22 nt, Homo sapiens
cuggagagacaaggggaagagg

SEQ ID NO: 28404 - RNA, 21 nt, Homo sapiens
acaggauugagggggggcccu

SEQ ID NO: 28405 - RNA, 21 nt, Homo sapiens
acaggauugagggggggcccu

SEQ ID NO: 28406 - RNA, 21 nt, Homo sapiens
uucuaggauaggcccaggggc

SEQ ID NO: 28407 - RNA, 17 nt, Homo sapiens
gacagccucucccccac

SEQ ID NO: 28408 - RNA, 20 nt, Homo sapiens
uccccacagacccagagccg

SEQ ID NO: 28409 - RNA, 21 nt, Homo sapiens
gaccaaucgccguccccgccg

SEQ ID NO: 28410 - RNA, 22 nt, Homo sapiens
gcggucccgcggcgccccgccu

SEQ ID NO: 28411 - RNA, 22 nt, Homo sapiens
cucaauagacugugagcuccuu

SEQ ID NO: 28412 - RNA, 23 nt, Homo sapiens
cccagcuagauuguaagcuccuu

SEQ ID NO: 28413 - RNA, 18 nt, Homo sapiens
ggagaggagggcacugga

SEQ ID NO: 28414 - RNA, 24 nt, Homo sapiens
acacucuaaagggaagcacuuugu

SEQ ID NO: 28415 - RNA, 22 nt, Homo sapiens
acucuaaagggaagcacuuugu

SEQ ID NO: 28416 - RNA, 22 nt, Homo sapiens
cacugguacaaggguugggaga

SEQ ID NO: 28417 - RNA, 17 nt, Homo sapiens
gggagaggaggaggcga

SEQ ID NO: 28418 - RNA, 23 nt, Homo sapiens
gggagugaagacacggagccaga

SEQ ID NO: 28419 - RNA, 23 nt, Homo sapiens
gaaagugcccucaaggcugagug

SEQ ID NO: 28420 - RNA, 18 nt, Homo sapiens
ggagaggagggcacugga

SEQ ID NO: 28421 - RNA, 21 nt, Homo sapiens
acugaucuagagaacacaaga

SEQ ID NO: 28422 - RNA, 20 nt, Homo sapiens
guuugauaaacugacacaac

SEQ ID NO: 28423 - RNA, 22 nt, Homo sapiens
acaccuggcuccacacgcgggc

SEQ ID NO: 28424 - RNA, 22 nt, Homo sapiens
ugcuguuagcccuagccccgca

SEQ ID NO: 28425 - RNA, 21 nt, Homo sapiens
uucacuccaaaaggugcaaaa

SEQ ID NO: 28426 - RNA, 22 nt, Homo sapiens
gaacuugcuaaaaaugcagaau

SEQ ID NO: 28427 - RNA, 23 nt, Homo sapiens
agacaaggcccacccgugcaaac

SEQ ID NO: 28428 - RNA, 24 nt, Homo sapiens
acacucuaaagggaagcacuuugu

SEQ ID NO: 28429 - RNA, 22 nt, Homo sapiens
acucuaaagggaagcacuuugu

SEQ ID NO: 28430 - RNA, 21 nt, Homo sapiens
agaaguagaccauguguccua

SEQ ID NO: 28431 - RNA, 23 nt, Homo sapiens
gggagugaagacacggagccaga

SEQ ID NO: 28432 - RNA, 21 nt, Homo sapiens
gaccaaucgccguccccgccg

SEQ ID NO: 28433 - RNA, 22 nt, Homo sapiens
gcggucccgcggcgccccgccu

SEQ ID NO: 28434 - RNA, 21 nt, Homo sapiens
agggcucaucuugguccugca

SEQ ID NO: 28435 - RNA, 21 nt, Homo sapiens
gcugaggucugggccaggucu

SEQ ID NO: 28436 - RNA, 25 nt, Homo sapiens
accaacggaccuacuucccuccgcc

SEQ ID NO: 28437 - RNA, 22 nt, Homo sapiens
cuagugguccuaaacauuucac

SEQ ID NO: 28438 - RNA, 23 nt, Homo sapiens
agcaaaaaugugcuagugccaaa

SEQ ID NO: 28439 - RNA, 23 nt, Homo sapiens
ggaagccaucaagucgcugcagg

SEQ ID NO: 28440 - RNA, 22 nt, Homo sapiens
guccaaaguuggggugcugguu

SEQ ID NO: 28441 - RNA, 22 nt, Homo sapiens
cccaacaacaggaaacuaccua

SEQ ID NO: 28442 - RNA, 22 nt, Homo sapiens
ugugggugugugcaugagcgug

SEQ ID NO: 28443 - RNA, 22 nt, Homo sapiens
gaauucaucacggccagccucu

SEQ ID NO: 28444 - RNA, 24 nt, Homo sapiens
acgcgcaggccagagacccaggca

SEQ ID NO: 28445 - RNA, 22 nt, Homo sapiens
ucggucccucgggccagggcag

SEQ ID NO: 28446 - RNA, 21 nt, Homo sapiens
aucagagguucagcuuacccu

SEQ ID NO: 28447 - RNA, 19 nt, Homo sapiens
guugggaucacaggcgccc

SEQ ID NO: 28448 - RNA, 20 nt, Homo sapiens
ggggcagacagacgaggaag

SEQ ID NO: 28449 - RNA, 22 nt, Homo sapiens
aacccauggaauucaguucuca

SEQ ID NO: 28450 - RNA, 21 nt, Homo sapiens
gcagaacuuagccacugugaa

SEQ ID NO: 28451 - RNA, 25 nt, Homo sapiens
accaacggaccuacuucccuccgcc

SEQ ID NO: 28452 - RNA, 17 nt, Homo sapiens
gggagaggaggaggcga

SEQ ID NO: 28453 - RNA, 22 nt, Homo sapiens
uauccacuacaccccgcugccu

SEQ ID NO: 28454 - RNA, 21 nt, Homo sapiens
acuagcuuauacauaaaauua

SEQ ID NO: 28455 - RNA, 23 nt, Homo sapiens
aaagucucgcucucugccccuca

SEQ ID NO: 28456 - RNA, 21 nt, Homo sapiens
ggcugucaauucauaggucag

SEQ ID NO: 28457 - RNA, 24 nt, Homo sapiens
acugcaggcuccagcuuccaggcu

SEQ ID NO: 28458 - RNA, 23 nt, Homo sapiens
ucucacccagguagcaaggauua

SEQ ID NO: 28459 - RNA, 22 nt, Homo sapiens
ucaacaucagucugauaagcua

SEQ ID NO: 28460 - RNA, 20 nt, Homo sapiens
uacugcuuccacagcucccc

SEQ ID NO: 28461 - RNA, 19 nt, Homo sapiens
guccugaauuccgcagccu

SEQ ID NO: 28462 - RNA, 22 nt, Homo sapiens
uggcagcagcggagggggcaga

SEQ ID NO: 28463 - RNA, 20 nt, Homo sapiens
ccagcagcaccuggggcagu

SEQ ID NO: 28464 - RNA, 22 nt, Homo sapiens
aguccagauucugugcccacca

SEQ ID NO: 28465 - RNA, 22 nt, Homo sapiens
gcacauguucugcggcccacca

SEQ ID NO: 28466 - RNA, 23 nt, Homo sapiens
acacucaaaagauggcggcacuu

SEQ ID NO: 28467 - RNA, 22 nt, Homo sapiens
uccacauggaguugcuguuaca

SEQ ID NO: 28468 - RNA, 23 nt, Homo sapiens
acgggugcgauuucugugugaga

SEQ ID NO: 28469 - RNA, 22 nt, Homo sapiens
gcugaggcuguggggcuggagu

SEQ ID NO: 28470 - RNA, 18 nt, Homo sapiens
gaaaugagggccagcuga

SEQ ID NO: 28471 - RNA, 24 nt, Homo sapiens
cacccccagagccucagcucccca

SEQ ID NO: 28472 - RNA, 22 nt, Homo sapiens
acucaguaugccaggguaccau

SEQ ID NO: 28473 - RNA, 21 nt, Homo sapiens
gaccaaucgccguccccgccg

SEQ ID NO: 28474 - RNA, 22 nt, Homo sapiens
gcggucccgcggcgccccgccu

SEQ ID NO: 28475 - RNA, 22 nt, Homo sapiens
ugcuguuagcccuagccccgca

SEQ ID NO: 28476 - RNA, 20 nt, Homo sapiens
acaaugagaacccauggucu

SEQ ID NO: 28477 - RNA, 22 nt, Homo sapiens
caaacaccauugucacacucca

SEQ ID NO: 28478 - RNA, 23 nt, Homo sapiens
acccucuauagggaagcgcguuc

SEQ ID NO: 28479 - RNA, 22 nt, Homo sapiens
gcugccguauaugugaugucac

SEQ ID NO: 28480 - RNA, 21 nt, Homo sapiens
cugggggacggagcagaagga

SEQ ID NO: 28481 - RNA, 22 nt, Homo sapiens
ugagugcuugcuaggugccaag

SEQ ID NO: 28482 - RNA, 22 nt, Homo sapiens
agcccaaaaggagaauucuuug

SEQ ID NO: 28483 - RNA, 23 nt, Homo sapiens
agcaaaaaugugcuagugccaaa

SEQ ID NO: 28484 - RNA, 22 nt, Homo sapiens
agcuagugagaagucaaugccu

SEQ ID NO: 28485 - RNA, 22 nt, Homo sapiens
auaaggauuuuuaggggcauua

SEQ ID NO: 28486 - RNA, 23 nt, Homo sapiens
cggcucugucgucgaggcgcuca

SEQ ID NO: 28487 - RNA, 22 nt, Homo sapiens
uccggggacgaacgggacgggu

SEQ ID NO: 28488 - RNA, 25 nt, Homo sapiens
acggagcugucccaacaccaccccu

SEQ ID NO: 28489 - RNA, 22 nt, Homo sapiens
ugcuguuagcccuagccccgca

SEQ ID NO: 28490 - RNA, 20 nt, Homo sapiens
uacugcuuccacagcucccc

SEQ ID NO: 28491 - RNA, 22 nt, Homo sapiens
ggaggccgggacgagugcaaua

SEQ ID NO: 28492 - RNA, 23 nt, Homo sapiens
aagaaucuugucccgcagguccu

SEQ ID NO: 28493 - RNA, 21 nt, Homo sapiens
ggaaaucccuggcaaugugau

SEQ ID NO: 28494 - RNA, 21 nt, Homo sapiens
gguaaucccuggcaaugugau

SEQ ID NO: 28495 - RNA, 26 nt, Homo sapiens
uuucagaauuugcugccaucaucauc

SEQ ID NO: 28496 - RNA, 22 nt, Homo sapiens
aaggugauggucagcagacaua

SEQ ID NO: 28497 - RNA, 22 nt, Homo sapiens
ucaggaacugccuuucucucca

SEQ ID NO: 28498 - RNA, 22 nt, Homo sapiens
ggagcccgcgccccgcgccgag

SEQ ID NO: 28499 - RNA, 22 nt, Homo sapiens
uucacacugcaugcucugggua

SEQ ID NO: 28500 - RNA, 20 nt, Homo sapiens
acccaccuggagauccaugg

SEQ ID NO: 28501 - RNA, 19 nt, Homo sapiens
gcucuaagaaagccacacu

SEQ ID NO: 28502 - RNA, 20 nt, Homo sapiens
uccgccugucugaacaguga

SEQ ID NO: 28503 - RNA, 22 nt, Homo sapiens
agcugaguguaggauguuuaca

SEQ ID NO: 28504 - RNA, 24 nt, Homo sapiens
acgcgcaggccagagacccaggca

SEQ ID NO: 28505 - RNA, 20 nt, Homo sapiens
guuugauaaacugacacaac

SEQ ID NO: 28506 - RNA, 22 nt, Homo sapiens
cugggggcggcacaggggcuca

SEQ ID NO: 28507 - RNA, 21 nt, Homo sapiens
auaauggagaccaggccacga

SEQ ID NO: 28508 - RNA, 25 nt, Homo sapiens
acggagcugucccaacaccaccccu

SEQ ID NO: 28509 - RNA, 23 nt, Homo sapiens
cuaucugcacuagaugcaccuua

SEQ ID NO: 28510 - RNA, 22 nt, Homo sapiens
acacucuaaaaggaugcacuuu

SEQ ID NO: 28511 - RNA, 22 nt, Homo sapiens
aaccucuaaaaggaugcacuuu

SEQ ID NO: 28512 - RNA, 22 nt, Homo sapiens
auccucuaaaaagaugcacuuu

SEQ ID NO: 28513 - RNA, 22 nt, Homo sapiens
cuggagagacaaggggaagagg

SEQ ID NO: 28514 - RNA, 20 nt, Homo sapiens
cccugcgccaucuccucuac

SEQ ID NO: 28515 - RNA, 23 nt, Homo sapiens
agcagcauuguacagggcuauga

SEQ ID NO: 28516 - RNA, 18 nt, Homo sapiens
ugguggcagaggugggau

SEQ ID NO: 28517 - RNA, 24 nt, Homo sapiens
gaagucacucccaggcagcugcaa

SEQ ID NO: 28518 - RNA, 22 nt, Homo sapiens
ggcagagagucagagcgcggau

SEQ ID NO: 28519 - RNA, 21 nt, Homo sapiens
cugaggagagaggaggugggg

SEQ ID NO: 28520 - RNA, 22 nt, Homo sapiens
uggcagcagcggagggggcaga

SEQ ID NO: 28521 - RNA, 20 nt, Homo sapiens
cugcgggaggacagggcuca

SEQ ID NO: 28522 - RNA, 22 nt, Homo sapiens
ccucauggaaggguuccccacu

SEQ ID NO: 28523 - RNA, 22 nt, Homo sapiens
gugggguggguggucaggccga

SEQ ID NO: 28524 - RNA, 22 nt, Homo sapiens
cacucagcggccguuuccccaa

SEQ ID NO: 28525 - RNA, 22 nt, Homo sapiens
acugccugucugugccugcugu

SEQ ID NO: 28526 - RNA, 19 nt, Homo sapiens
uaugcuaccuuugcacggu

SEQ ID NO: 28527 - RNA, 21 nt, Homo sapiens
ggcugucaauucauaggucag

SEQ ID NO: 28528 - RNA, 22 nt, Homo sapiens
augcccuuuuaacauugcacug

SEQ ID NO: 28529 - RNA, 21 nt, Homo sapiens
ggaaaucccuggcaaugugau

SEQ ID NO: 28530 - RNA, 21 nt, Homo sapiens
gguaaucccuggcaaugugau

SEQ ID NO: 28531 - RNA, 21 nt, Homo sapiens
ccccucccagccucccugcca

SEQ ID NO: 28532 - RNA, 22 nt, Homo sapiens
agcugaguguaggauguuuaca

SEQ ID NO: 28533 - RNA, 21 nt, Homo sapiens
acaggauugagggggggcccu

SEQ ID NO: 28534 - RNA, 18 nt, Homo sapiens
gaaaugagggccagcuga

SEQ ID NO: 28535 - RNA, 21 nt, Homo sapiens
cccgaggagccgggcaggcuu

SEQ ID NO: 28536 - RNA, 22 nt, Homo sapiens
acaaaauccacaauuacuuuug

SEQ ID NO: 28537 - RNA, 23 nt, Homo sapiens
ucacauaggaauaaaaagccaua

SEQ ID NO: 28538 - RNA, 23 nt, Homo sapiens
ucacauaggaaugaaaagccaua

SEQ ID NO: 28539 - RNA, 23 nt, Homo sapiens
gggagugaagacacggagccaga

SEQ ID NO: 28540 - RNA, 23 nt, Homo sapiens
cuaacugcacuagaugcaccuua

SEQ ID NO: 28541 - RNA, 23 nt, Homo sapiens
uccaucauuacccggcaguauua

SEQ ID NO: 28542 - RNA, 22 nt, Homo sapiens
acaagcuuuuugcucgucuuau

SEQ ID NO: 28543 - RNA, 22 nt, Homo sapiens
acaaaccuuuuguucgucuuau

SEQ ID NO: 28544 - RNA, 22 nt, Homo sapiens
acggaagggcagagagggccag

SEQ ID NO: 28545 - RNA, 23 nt, Homo sapiens
ucucacccagguagcaaggauua

SEQ ID NO: 28546 - RNA, 22 nt, Homo sapiens
aguccagauucugugcccacca

SEQ ID NO: 28547 - RNA, 23 nt, Homo sapiens
gggcucuuacucccucaggcacu

SEQ ID NO: 28548 - RNA, 25 nt, Homo sapiens
aggccgccacccgcccgcgaucccu

SEQ ID NO: 28549 - RNA, 23 nt, Homo sapiens
cugugggagggcaguggugagag

SEQ ID NO: 28550 - RNA, 21 nt, Homo sapiens
gaccaagaaauagccuuucaa

SEQ ID NO: 28551 - RNA, 21 nt, Homo sapiens
aucugcacugucagcacuuua

SEQ ID NO: 28552 - RNA, 23 nt, Homo sapiens
gcuuugacaauaucauugcacug

SEQ ID NO: 28553 - RNA, 22 nt, Homo sapiens
aucgggaggggacugagccuga

SEQ ID NO: 28554 - RNA, 22 nt, Homo sapiens
acaaaaguugccuuugugugau

SEQ ID NO: 28555 - RNA, 19 nt, Homo sapiens
agaaaccccagcagagaca

SEQ ID NO: 28556 - RNA, 24 nt, Homo sapiens
ucacagguuaaagggucucaggga

SEQ ID NO: 28557 - RNA, 22 nt, Homo sapiens
ucacaaguuagggucucaggga

SEQ ID NO: 28558 - RNA, 23 nt, Homo sapiens
agcccuguucuacagcccugagg

SEQ ID NO: 28559 - RNA, 25 nt, Homo sapiens
acggagcugucccaacaccaccccu

SEQ ID NO: 28560 - RNA, 20 nt, Homo sapiens
uacugcuuccacagcucccc

SEQ ID NO: 28561 - RNA, 22 nt, Homo sapiens
aagcgguuuaccaucccacaua

SEQ ID NO: 28562 - RNA, 20 nt, Homo sapiens
uacugcuuccacagcucccc

SEQ ID NO: 28563 - RNA, 21 nt, Homo sapiens
ccuucugacuccaaguccagu

SEQ ID NO: 28564 - RNA, 22 nt, Homo sapiens
gccuucugacccuaaguccagu

SEQ ID NO: 28565 - RNA, 22 nt, Homo sapiens
ggagauggagccagggcccuaa

SEQ ID NO: 28566 - RNA, 23 nt, Homo sapiens
ucucgugacaugaugauccccga

SEQ ID NO: 28567 - RNA, 22 nt, Homo sapiens
caaacaccauugucacacucca

SEQ ID NO: 28568 - RNA, 23 nt, Homo sapiens
ucacauaggaaugaaaagccaua

SEQ ID NO: 28569 - RNA, 22 nt, Homo sapiens
acaaaaguugccuuugugugau

SEQ ID NO: 28570 - RNA, 21 nt, Homo sapiens
aggcggcaggcacaggacugg

SEQ ID NO: 28571 - RNA, 22 nt, Homo sapiens
accagcuaacaauacacugcca

SEQ ID NO: 28572 - RNA, 22 nt, Homo sapiens
aggaaaccagcaaguguugacg

SEQ ID NO: 28573 - RNA, 20 nt, Homo sapiens
cuggaggaagggcccagagg

SEQ ID NO: 28574 - RNA, 22 nt, Homo sapiens
gccuaagacacaggcccagaga

SEQ ID NO: 28575 - RNA, 22 nt, Homo sapiens
ugcaagccuugggugugggagg

SEQ ID NO: 28576 - RNA, 22 nt, Homo sapiens
gagcccuggacuaggagucagc

SEQ ID NO: 28577 - RNA, 22 nt, Homo sapiens
ugaagaagggggggaagggcgu

SEQ ID NO: 28578 - RNA, 19 nt, Homo sapiens
guccugaauuccgcagccu

SEQ ID NO: 28579 - RNA, 21 nt, Homo sapiens
agagcucauccauaguuguca

SEQ ID NO: 28580 - RNA, 22 nt, Homo sapiens
cacaaaccauuaugugcugcua

SEQ ID NO: 28581 - RNA, 23 nt, Homo sapiens
gggagugaagacacggagccaga

SEQ ID NO: 28582 - RNA, 23 nt, Homo sapiens
aggaacagcagcagcccgggccg

SEQ ID NO: 28583 - RNA, 21 nt, Homo sapiens
acaggauugagggggggcccu

SEQ ID NO: 28584 - RNA, 23 nt, Homo sapiens
aaagucucgcucucugccccuca

SEQ ID NO: 28585 - RNA, 22 nt, Homo sapiens
ugcuguuagcccuagccccgca

SEQ ID NO: 28586 - RNA, 22 nt, Homo sapiens
guagaagggaaucuugcauaag

SEQ ID NO: 28587 - RNA, 22 nt, Homo sapiens
aguccagauucugugcccacca

SEQ ID NO: 28588 - RNA, 22 nt, Homo sapiens
gcacauguucugcggcccacca

SEQ ID NO: 28589 - RNA, 21 nt, Homo sapiens
uggaaaccaagagugggucgc

SEQ ID NO: 28590 - RNA, 21 nt, Homo sapiens
cugaaaccaaguaugggucgc

SEQ ID NO: 28591 - RNA, 24 nt, Homo sapiens
acugggcacaaacauguccagguc

SEQ ID NO: 28592 - RNA, 22 nt, Homo sapiens
cucaauagacugugagcuccuu

SEQ ID NO: 28593 - RNA, 23 nt, Homo sapiens
cccagcuagauuguaagcuccuu

SEQ ID NO: 28594 - RNA, 20 nt, Homo sapiens
ggcauucaccgcgugccuua

SEQ ID NO: 28595 - RNA, 22 nt, Homo sapiens
cagaaagugcuucccucuagag

SEQ ID NO: 28596 - RNA, 21 nt, Homo sapiens
cacucugaagggaagcgcuuu

SEQ ID NO: 28597 - RNA, 21 nt, Homo sapiens
ccucuaaagagaagcgcuuuc

SEQ ID NO: 28598 - RNA, 22 nt, Homo sapiens
acacucuaaaaggaugcacuuu

SEQ ID NO: 28599 - RNA, 22 nt, Homo sapiens
cagaaagcgcuucccucuagag

SEQ ID NO: 28600 - RNA, 22 nt, Homo sapiens
cagaaagcgcuucccucuagag

SEQ ID NO: 28601 - RNA, 22 nt, Homo sapiens
cagaaagugcuucccucuagag

SEQ ID NO: 28602 - RNA, 22 nt, Homo sapiens
acacucuaaagggaaccauuuu

SEQ ID NO: 28603 - RNA, 23 nt, Homo sapiens
acccucuauagggaagcgcguuc

SEQ ID NO: 28604 - RNA, 22 nt, Homo sapiens
cagaaagugcuucccucuagag

SEQ ID NO: 28605 - RNA, 22 nt, Homo sapiens
cagacuccgguggaaugaagga

SEQ ID NO: 28606 - RNA, 21 nt, Homo sapiens
acaggauugagggggggcccu

SEQ ID NO: 28607 - RNA, 22 nt, Homo sapiens
gcugaggcuguggggcuggagu

SEQ ID NO: 28608 - RNA, 18 nt, Homo sapiens
ugguggcagaggugggau

SEQ ID NO: 28609 - RNA, 22 nt, Homo sapiens
ugcaagccuugggugugggagg

SEQ ID NO: 28610 - RNA, 21 nt, Homo sapiens
ugcaaugcaacuacaaugcac

SEQ ID NO: 28611 - RNA, 21 nt, Homo sapiens
gaccaaucgccguccccgccg

SEQ ID NO: 28612 - RNA, 22 nt, Homo sapiens
gcggucccgcggcgccccgccu

SEQ ID NO: 28613 - RNA, 24 nt, Homo sapiens
acgcgcaggccagagacccaggca

SEQ ID NO: 28614 - RNA, 22 nt, Homo sapiens
gaauucaucacggccagccucu

SEQ ID NO: 28615 - RNA, 21 nt, Homo sapiens
ccccucccagccucccugcca

SEQ ID NO: 28616 - RNA, 22 nt, Homo sapiens
gugggguggguggucaggccga

SEQ ID NO: 28617 - RNA, 18 nt, Homo sapiens
ugguggcagaggugggau

SEQ ID NO: 28618 - RNA, 24 nt, Homo sapiens
acugcuggucuucagucagggcca

SEQ ID NO: 28619 - RNA, 24 nt, Homo sapiens
acugcuggucuucagucagggcca

SEQ ID NO: 28620 - RNA, 23 nt, Homo sapiens
aggaacagcagcagcccgggccg

SEQ ID NO: 28621 - RNA, 21 nt, Homo sapiens
gaccaaucgccguccccgccg

SEQ ID NO: 28622 - RNA, 22 nt, Homo sapiens
uggcagcagcggagggggcaga

SEQ ID NO: 28623 - RNA, 20 nt, Homo sapiens
ccagcagcaccuggggcagu

SEQ ID NO: 28624 - RNA, 22 nt, Homo sapiens
gcggucccgcggcgccccgccu

SEQ ID NO: 28625 - RNA, 22 nt, Homo sapiens
cacucuaaagggaggcacuuug

SEQ ID NO: 28626 - RNA, 20 nt, Homo sapiens
uacugcuuccacagcucccc

SEQ ID NO: 28627 - RNA, 22 nt, Homo sapiens
ggaggccgggacgagugcaaua

SEQ ID NO: 28628 - RNA, 20 nt, Homo sapiens
acagcaaggagggcaggagg

SEQ ID NO: 28629 - RNA, 22 nt, Homo sapiens
acugccugucugugccugcugu

SEQ ID NO: 28630 - RNA, 21 nt, Homo sapiens
aaagaucaaccauguauuauu

SEQ ID NO: 28631 - RNA, 22 nt, Homo sapiens
accagguuccaccccagcaggc

SEQ ID NO: 28632 - RNA, 22 nt, Homo sapiens
aaagagguuaaccauguauuau

SEQ ID NO: 28633 - RNA, 20 nt, Homo sapiens
uacugcuuccacagcucccc

SEQ ID NO: 28634 - RNA, 22 nt, Homo sapiens
acacacccacgcgagccggaaa

SEQ ID NO: 28635 - RNA, 19 nt, Homo sapiens
ccaccucccgaguccucac

SEQ ID NO: 28636 - RNA, 22 nt, Homo sapiens
aggucucacuuuguugcccaga

SEQ ID NO: 28637 - RNA, 18 nt, Homo sapiens
aucacauucaccucccug

SEQ ID NO: 28638 - RNA, 23 nt, Homo sapiens
gggagugaagacacggagccaga

SEQ ID NO: 28639 - RNA, 21 nt, Homo sapiens
acuagacugugagcuccucga

SEQ ID NO: 28640 - RNA, 21 nt, Homo sapiens
gaccaaucgccguccccgccg

SEQ ID NO: 28641 - RNA, 19 nt, Homo sapiens
auuuugguacagcagcuca

SEQ ID NO: 28642 - RNA, 19 nt, Homo sapiens
gccugcugacaccgugccu

SEQ ID NO: 28643 - RNA, 19 nt, Homo sapiens
guccugaauuccgcagccu

SEQ ID NO: 28644 - RNA, 25 nt, Homo sapiens
aaggagcucagaagcccugcccagc

SEQ ID NO: 28645 - RNA, 19 nt, Homo sapiens
gccucagaggcagcugcuu

SEQ ID NO: 28646 - RNA, 22 nt, Homo sapiens
gcggucccgcggcgccccgccu

SEQ ID NO: 28647 - RNA, 22 nt, Homo sapiens
gaggcucagaauggcucaggag

SEQ ID NO: 28648 - RNA, 22 nt, Homo sapiens
cuagggaacacagggcugguga

SEQ ID NO: 28649 - RNA, 22 nt, Homo sapiens
cuggagagacaaggggaagagg

SEQ ID NO: 28650 - RNA, 23 nt, Homo sapiens
gaaacccagcagacaauguagcu

SEQ ID NO: 28651 - RNA, 22 nt, Homo sapiens
uacagauggauaccgugcaauu

SEQ ID NO: 28652 - RNA, 23 nt, Homo sapiens
ccacccaaugaccuacuccaaga

SEQ ID NO: 28653 - RNA, 25 nt, Homo sapiens
acggagcugucccaacaccaccccu

SEQ ID NO: 28654 - RNA, 21 nt, Homo sapiens
aggagacucacaaguuccugc

SEQ ID NO: 28655 - RNA, 21 nt, Homo sapiens
aggagacucacaaguuccugc

SEQ ID NO: 28656 - RNA, 24 nt, Homo sapiens
acugcuggucuucagucagggcca

SEQ ID NO: 28657 - RNA, 21 nt, Homo sapiens
ccccucccagccucccugcca

SEQ ID NO: 28658 - RNA, 21 nt, Homo sapiens
aaagagaccgguucacuguga

SEQ ID NO: 28659 - RNA, 20 nt, Homo sapiens
cucaaagcaaacccugcaga

SEQ ID NO: 28660 - RNA, 22 nt, Homo sapiens
cagaaagugcuucccucuagag

SEQ ID NO: 28661 - RNA, 20 nt, Homo sapiens
guuugauaaacugacacaac

SEQ ID NO: 28662 - RNA, 22 nt, Homo sapiens
gcaaaagaaacugugguuuuug

SEQ ID NO: 28663 - RNA, 23 nt, Homo sapiens
gggagugaagacacggagccaga

SEQ ID NO: 28664 - RNA, 22 nt, Homo sapiens
ucaggaacugccuuucucucca

SEQ ID NO: 28665 - RNA, 22 nt, Homo sapiens
gagcccuggacuaggagucagc

SEQ ID NO: 28666 - RNA, 22 nt, Homo sapiens
agcugaguguaggauguuuaca

SEQ ID NO: 28667 - RNA, 21 nt, Homo sapiens
ccccucccagccucccugcca

SEQ ID NO: 28668 - RNA, 22 nt, Homo sapiens
cuagggaacacagggcugguga

SEQ ID NO: 28669 - RNA, 23 nt, Homo sapiens
cggccugauucacaacaccagcu

SEQ ID NO: 28670 - RNA, 20 nt, Homo sapiens
cccgccgcgucgcccugggg

SEQ ID NO: 28671 - RNA, 22 nt, Homo sapiens
agcgggacuuugagggccaguu

SEQ ID NO: 28672 - RNA, 20 nt, Homo sapiens
acagcaaggagggcaggagg

SEQ ID NO: 28673 - RNA, 22 nt, Homo sapiens
gaaccuaucuccccucuggacc

SEQ ID NO: 28674 - RNA, 21 nt, Homo sapiens
aucugcacugucagcacuuua

SEQ ID NO: 28675 - RNA, 23 nt, Homo sapiens
gcuuugacaauaucauugcacug

SEQ ID NO: 28676 - RNA, 21 nt, Homo sapiens
uucuaggauaggcccaggggc

SEQ ID NO: 28677 - RNA, 23 nt, Homo sapiens
cugcagaacuguucccgcugcua

SEQ ID NO: 28678 - RNA, 19 nt, Homo sapiens
agaaaccccagcagagaca

SEQ ID NO: 28679 - RNA, 22 nt, Homo sapiens
uggggacccucccugaaccaag

SEQ ID NO: 28680 - RNA, 21 nt, Homo sapiens
caucaccuuccuucuccucca

SEQ ID NO: 28681 - RNA, 21 nt, Homo sapiens
ggggagcgggggcccugccuu

SEQ ID NO: 28682 - RNA, 23 nt, Homo sapiens
cugugggagggcaguggugagag

SEQ ID NO: 28683 - RNA, 22 nt, Homo sapiens
auccuucuacaaauucacccau

SEQ ID NO: 28684 - RNA, 22 nt, Homo sapiens
gaaccuaucuccccucuggacc

SEQ ID NO: 28685 - RNA, 22 nt, Homo sapiens
ucacauuugccugcagagauuu

SEQ ID NO: 28686 - RNA, 21 nt, Homo sapiens
ccuucugacuccaaguccagu

SEQ ID NO: 28687 - RNA, 22 nt, Homo sapiens
gccuucugacccuaaguccagu

SEQ ID NO: 28688 - RNA, 22 nt, Homo sapiens
cucagagcagacgugguucuca

SEQ ID NO: 28689 - RNA, 22 nt, Homo sapiens
cacauggccaaaacagagaaga

SEQ ID NO: 28690 - RNA, 21 nt, Homo sapiens
ccccucccagccucccugcca

SEQ ID NO: 28691 - RNA, 21 nt, Homo sapiens
cugaggagagaggaggugggg

SEQ ID NO: 28692 - RNA, 22 nt, Homo sapiens
caaacaccauugucacacucca

SEQ ID NO: 28693 - RNA, 22 nt, Homo sapiens
gugggguggguggucaggccga

SEQ ID NO: 28694 - RNA, 23 nt, Homo sapiens
ucacauaggaaugaaaagccaua

SEQ ID NO: 28695 - RNA, 22 nt, Homo sapiens
uucacacugcaugcucugggua

SEQ ID NO: 28696 - RNA, 22 nt, Homo sapiens
cccaacaacaggaaacuaccua

SEQ ID NO: 28697 - RNA, 22 nt, Homo sapiens
cacucagcggccguuuccccaa

SEQ ID NO: 28698 - RNA, 22 nt, Homo sapiens
agcugaguguaggauguuuaca

SEQ ID NO: 28699 - RNA, 22 nt, Homo sapiens
ccucauggaaggguuccccacu

SEQ ID NO: 28700 - RNA, 22 nt, Homo sapiens
aguccagauucugugcccacca

SEQ ID NO: 28701 - RNA, 25 nt, Homo sapiens
acggagcugucccaacaccaccccu

SEQ ID NO: 28702 - RNA, 22 nt, Homo sapiens
gcacauguucugcggcccacca

SEQ ID NO: 28703 - RNA, 24 nt, Homo sapiens
acgcgcaggccagagacccaggca

SEQ ID NO: 28704 - RNA, 20 nt, Homo sapiens
aggggccucagccuccuggu

SEQ ID NO: 28705 - RNA, 20 nt, Homo sapiens
uacugcuuccacagcucccc

SEQ ID NO: 28706 - RNA, 21 nt, Homo sapiens
ggggagcgggggcccugccuu

SEQ ID NO: 28707 - RNA, 23 nt, Homo sapiens
cacaaauucggaucuacagggua

SEQ ID NO: 28708 - RNA, 23 nt, Homo sapiens
cacaaauucgguucuacagggua

SEQ ID NO: 28709 - RNA, 22 nt, Homo sapiens
ggcucccaagaaccucaccugu

SEQ ID NO: 28710 - RNA, 23 nt, Homo sapiens
ccuucucagaaaggugaaauuua

SEQ ID NO: 28711 - RNA, 23 nt, Homo sapiens
ccuucucagaaaggugaaauuua

SEQ ID NO: 28712 - RNA, 22 nt, Homo sapiens
uuucaguuaucaaucugucaca

SEQ ID NO: 28713 - RNA, 21 nt, Homo sapiens
aucagagguucagcuuacccu

SEQ ID NO: 28714 - RNA, 18 nt, Homo sapiens
cccccaccaccacgcccg

SEQ ID NO: 28715 - RNA, 23 nt, Homo sapiens
aggaacagcagcagcccgggccg

SEQ ID NO: 28716 - RNA, 22 nt, Homo sapiens
ucaggaacugccuuucucucca

SEQ ID NO: 28717 - RNA, 21 nt, Homo sapiens
gaccaaucgccguccccgccg

SEQ ID NO: 28718 - RNA, 22 nt, Homo sapiens
gcggucccgcggcgccccgccu

SEQ ID NO: 28719 - RNA, 22 nt, Homo sapiens
ugcuguuagcccuagccccgca

SEQ ID NO: 28720 - RNA, 24 nt, Homo sapiens
cacccccagagccucagcucccca

SEQ ID NO: 28721 - RNA, 21 nt, Homo sapiens
gagcugcauccuggcuccggg

SEQ ID NO: 28722 - RNA, 20 nt, Homo sapiens
cucaaagcaaacccugcaga

SEQ ID NO: 28723 - RNA, 20 nt, Homo sapiens
ggggggcgaggcagguguga

SEQ ID NO: 28724 - RNA, 23 nt, Homo sapiens
aaaaugcagauuccuggacucca

SEQ ID NO: 28725 - RNA, 23 nt, Homo sapiens
cuaccugcacuguaagcacuuug

SEQ ID NO: 28726 - RNA, 20 nt, Homo sapiens
acagcaaggagggcaggagg

SEQ ID NO: 28727 - RNA, 22 nt, Homo sapiens
caugauugccacgucugcagua

SEQ ID NO: 28728 - RNA, 21 nt, Homo sapiens
ugauugccacugucugcagua

SEQ ID NO: 28729 - RNA, 22 nt, Homo sapiens
gauccgagcaccggggaccccc

SEQ ID NO: 28730 - RNA, 25 nt, Homo sapiens
aggccgccacccgcccgcgaucccu

SEQ ID NO: 28731 - RNA, 24 nt, Homo sapiens
acgcgcaggccagagacccaggca

SEQ ID NO: 28732 - RNA, 24 nt, Homo sapiens
acgcgcaggccagagacccaggca

SEQ ID NO: 28733 - RNA, 22 nt, Homo sapiens
cugggggcggcacaggggcuca

SEQ ID NO: 28734 - RNA, 22 nt, Homo sapiens
cuggagagacaaggggaagagg

SEQ ID NO: 28735 - RNA, 22 nt, Homo sapiens
uaaaugaauucaauuuccuucu

SEQ ID NO: 28736 - RNA, 17 nt, Homo sapiens
gggagaggaggaggcga

SEQ ID NO: 28737 - RNA, 18 nt, Homo sapiens
aucacauucaccucccug

SEQ ID NO: 28738 - RNA, 23 nt, Homo sapiens
gggagugaagacacggagccaga

SEQ ID NO: 28739 - RNA, 22 nt, Homo sapiens
aggcauaggaugacaaagggaa

SEQ ID NO: 28740 - RNA, 22 nt, Homo sapiens
aggcgaaggaugacaaagggaa

SEQ ID NO: 28741 - RNA, 23 nt, Homo sapiens
aaagucucgcucucugccccuca

SEQ ID NO: 28742 - RNA, 20 nt, Homo sapiens
cccugcgccaucuccucuac

SEQ ID NO: 28743 - RNA, 23 nt, Homo sapiens
cacaaauucgguucuacagggua

SEQ ID NO: 28744 - RNA, 22 nt, Homo sapiens
ugaagaagggggggaagggcgu

SEQ ID NO: 28745 - RNA, 22 nt, Homo sapiens
agccaagcucagacggauccga

SEQ ID NO: 28746 - RNA, 24 nt, Homo sapiens
agugugaguucuaccauugccaaa

SEQ ID NO: 28747 - RNA, 22 nt, Homo sapiens
cuguuccugcugaacugagcca

SEQ ID NO: 28748 - RNA, 22 nt, Homo sapiens
aaagugcuucuuaccuccagau

SEQ ID NO: 28749 - RNA, 20 nt, Homo sapiens
uccccacagacccagagccg

SEQ ID NO: 28750 - RNA, 22 nt, Homo sapiens
gaggcucagaauggcucaggag

SEQ ID NO: 28751 - RNA, 20 nt, Homo sapiens
ggcauucaccgcgugccuua

SEQ ID NO: 28752 - RNA, 17 nt, Homo sapiens
gggagaggaggaggcga

SEQ ID NO: 28753 - RNA, 22 nt, Homo sapiens
acuccaacagggccgcgucucc

SEQ ID NO: 28754 - RNA, 21 nt, Homo sapiens
gagcuacagugcuucaucuca

SEQ ID NO: 28755 - RNA, 22 nt, Homo sapiens
ccggcugcaacacaagacacga

SEQ ID NO: 28756 - RNA, 21 nt, Homo sapiens
agagcucauccauaguuguca

SEQ ID NO: 28757 - RNA, 23 nt, Homo sapiens
cugcagaacuguucccgcugcua

SEQ ID NO: 28758 - RNA, 21 nt, Homo sapiens
ucuacucagaagggugccuua

SEQ ID NO: 28759 - RNA, 23 nt, Homo sapiens
acagcgcucgcaaccgcagcgau

SEQ ID NO: 28760 - RNA, 19 nt, Homo sapiens
accagugcccugcacacuu

SEQ ID NO: 28761 - RNA, 22 nt, Homo sapiens
uggggacccucccugaaccaag

SEQ ID NO: 28762 - RNA, 21 nt, Homo sapiens
aggagacucacaaguuccugc

SEQ ID NO: 28763 - RNA, 23 nt, Homo sapiens
gucacaucccucccaagacccuc

SEQ ID NO: 28764 - RNA, 24 nt, Homo sapiens
acugcuggucuucagucagggcca

SEQ ID NO: 28765 - RNA, 21 nt, Homo sapiens
aggcggcaggcacaggacugg

SEQ ID NO: 28766 - RNA, 20 nt, Homo sapiens
cccgccgcgucgcccugggg

SEQ ID NO: 28767 - RNA, 22 nt, Homo sapiens
ucaucucgcccgcaaagaccca

SEQ ID NO: 28768 - RNA, 19 nt, Homo sapiens
uaugcuaccuuugcacggu

SEQ ID NO: 28769 - RNA, 22 nt, Homo sapiens
acggaagggcagagagggccag

SEQ ID NO: 28770 - RNA, 23 nt, Homo sapiens
aaaucagaaucacaccuggggga

SEQ ID NO: 28771 - RNA, 21 nt, Homo sapiens
ccuucugacuccaaguccagu

SEQ ID NO: 28772 - RNA, 22 nt, Homo sapiens
gccagcuaacaauacacugccu

SEQ ID NO: 28773 - RNA, 21 nt, Homo sapiens
auccuguacugagcugccccg

SEQ ID NO: 28774 - RNA, 24 nt, Homo sapiens
acgcagagcccgaaagcccccagu

SEQ ID NO: 28775 - RNA, 22 nt, Homo sapiens
ccucaggcacggccgggccacc

SEQ ID NO: 28776 - RNA, 21 nt, Homo sapiens
ccccucccagccucccugcca

SEQ ID NO: 28777 - RNA, 22 nt, Homo sapiens
cuagggaacacagggcugguga

SEQ ID NO: 28778 - RNA, 22 nt, Homo sapiens
ucaggaacugccuuucucucca

SEQ ID NO: 28779 - RNA, 22 nt, Homo sapiens
cggugagcacccggccccugcg

SEQ ID NO: 28780 - RNA, 21 nt, Homo sapiens
ggaaaucccuggcaaugugau

SEQ ID NO: 28781 - RNA, 21 nt, Homo sapiens
gguaaucccuggcaaugugau

SEQ ID NO: 28782 - RNA, 22 nt, Homo sapiens
ccucauggaaggguuccccacu

SEQ ID NO: 28783 - RNA, 19 nt, Homo sapiens
uagcauacagauacgccca

SEQ ID NO: 28784 - RNA, 19 nt, Homo sapiens
guccugaauuccgcagccu

SEQ ID NO: 28785 - RNA, 20 nt, Homo sapiens
uacugcuuccacagcucccc

SEQ ID NO: 28786 - RNA, 22 nt, Homo sapiens
aacuauacaaccuacuaccuca

SEQ ID NO: 28787 - RNA, 22 nt, Homo sapiens
aaccacacaaccuacuaccuca

SEQ ID NO: 28788 - RNA, 22 nt, Homo sapiens
aaccauacaaccuacuaccuca

SEQ ID NO: 28789 - RNA, 22 nt, Homo sapiens
aacuaugcaaccuacuaccucu

SEQ ID NO: 28790 - RNA, 22 nt, Homo sapiens
aacuauacaaccuccuaccuca

SEQ ID NO: 28791 - RNA, 22 nt, Homo sapiens
aacuauacaaucuacuaccuca

SEQ ID NO: 28792 - RNA, 22 nt, Homo sapiens
aacuguacaaacuacuaccuca

SEQ ID NO: 28793 - RNA, 22 nt, Homo sapiens
aacagcacaaacuacuaccuca

SEQ ID NO: 28794 - RNA, 21 nt, Homo sapiens
cugaggagagaggaggugggg

SEQ ID NO: 28795 - RNA, 22 nt, Homo sapiens
agacaacaaugccaaccucaca

SEQ ID NO: 28796 - RNA, 22 nt, Homo sapiens
cacucagcggccguuuccccaa

SEQ ID NO: 28797 - RNA, 22 nt, Homo sapiens
ccucauggaaggguuccccacu

SEQ ID NO: 28798 - RNA, 20 nt, Homo sapiens
uacugcuuccacagcucccc

SEQ ID NO: 28799 - RNA, 22 nt, Homo sapiens
aacaauacaacuuacuaccuca

SEQ ID NO: 28800 - RNA, 22 nt, Homo sapiens
acaaaguucuguagugcacuga

SEQ ID NO: 28801 - RNA, 20 nt, Homo sapiens
cccgccgcgucgcccugggg

SEQ ID NO: 28802 - RNA, 21 nt, Homo sapiens
aucugcacugucagcacuuua

SEQ ID NO: 28803 - RNA, 23 nt, Homo sapiens
gcuuugacaauaucauugcacug

SEQ ID NO: 28804 - RNA, 23 nt, Homo sapiens
augcaaaguugcucggguaaccu

SEQ ID NO: 28805 - RNA, 21 nt, Homo sapiens
aguucucccaacguaaaccca

SEQ ID NO: 28806 - RNA, 23 nt, Homo sapiens
uguaggcuggggauaaaugaaua

SEQ ID NO: 28807 - RNA, 23 nt, Homo sapiens
ggaagccaucaagucgcugcagg

SEQ ID NO: 28808 - RNA, 20 nt, Homo sapiens
ggcauucaccgcgugccuua

SEQ ID NO: 28809 - RNA, 21 nt, Homo sapiens
aagacgggaggagaggaguga

SEQ ID NO: 28810 - RNA, 22 nt, Homo sapiens
cucccuucuuuccucccgucuu

SEQ ID NO: 28811 - RNA, 21 nt, Homo sapiens
ucuacucagaagggugccuua

SEQ ID NO: 28812 - RNA, 19 nt, Homo sapiens
gccugcugacaccgugccu

SEQ ID NO: 28813 - RNA, 20 nt, Homo sapiens
aggggccucagccuccuggu

SEQ ID NO: 28814 - RNA, 22 nt, Homo sapiens
agcucagaacccagaggucuca

SEQ ID NO: 28815 - RNA, 20 nt, Homo sapiens
uacugcuuccacagcucccc

SEQ ID NO: 28816 - RNA, 23 nt, Homo sapiens
ucacauaggaaugaaaagccaua

SEQ ID NO: 28817 - RNA, 23 nt, Homo sapiens
gggagugaagacacggagccaga

SEQ ID NO: 28818 - RNA, 21 nt, Homo sapiens
ugcaaacccugcaugugggag

SEQ ID NO: 28819 - RNA, 21 nt, Homo sapiens
aucugcacugucagcacuuua

SEQ ID NO: 28820 - RNA, 23 nt, Homo sapiens
gcuuugacaauaucauugcacug

SEQ ID NO: 28821 - RNA, 22 nt, Homo sapiens
ugcaagccuugggugugggagg

SEQ ID NO: 28822 - RNA, 20 nt, Homo sapiens
agagaugagagaaacacccu

SEQ ID NO: 28823 - RNA, 21 nt, Homo sapiens
caucaccuuccuucuccucca

SEQ ID NO: 28824 - RNA, 22 nt, Homo sapiens
agcuagugagaagucaaugccu

SEQ ID NO: 28825 - RNA, 22 nt, Homo sapiens
ucccucacacagaauuccagaa

SEQ ID NO: 28826 - RNA, 22 nt, Homo sapiens
cagaagugggccgggcacaggg

SEQ ID NO: 28827 - RNA, 22 nt, Homo sapiens
aaagagguuaaccagguguguu

SEQ ID NO: 28828 - RNA, 22 nt, Homo sapiens
gagcccuggacuaggagucagc

SEQ ID NO: 28829 - RNA, 22 nt, Homo sapiens
auggcaguggaguuagugauug

SEQ ID NO: 28830 - RNA, 22 nt, Homo sapiens
ugaauccuugaauagguguguu

SEQ ID NO: 28831 - RNA, 22 nt, Homo sapiens
aggaaaccagcaaguguugacg

SEQ ID NO: 28832 - RNA, 23 nt, Homo sapiens
acacucuaaagagaagcgcuuug

SEQ ID NO: 28833 - RNA, 21 nt, Homo sapiens
agaaaguacuucccucuggag

SEQ ID NO: 28834 - RNA, 21 nt, Homo sapiens
agaaagugcaucccucuggag

SEQ ID NO: 28835 - RNA, 20 nt, Homo sapiens
guguguauacauuuauacau

SEQ ID NO: 28836 - RNA, 20 nt, Homo sapiens
agagaugagagaaacacccu

SEQ ID NO: 28837 - RNA, 22 nt, Homo sapiens
ccucuaguaaauaugucagcau

SEQ ID NO: 28838 - RNA, 23 nt, Homo sapiens
uguaggcuggggauaaaugaaua

SEQ ID NO: 28839 - RNA, 21 nt, Homo sapiens
caucaccuuccuucuccucca

SEQ ID NO: 28840 - RNA, 21 nt, Homo sapiens
cacaaccucaguguuuccagg

SEQ ID NO: 28841 - RNA, 20 nt, Homo sapiens
uacugcuuccacagcucccc

SEQ ID NO: 28842 - RNA, 22 nt, Homo sapiens
uccggggacgaacgggacgggu

SEQ ID NO: 28843 - RNA, 22 nt, Homo sapiens
ccacacacuuccuuacauucca

SEQ ID NO: 28844 - RNA, 23 nt, Homo sapiens
aaaucagaaucacaccuggggga

SEQ ID NO: 28845 - RNA, 22 nt, Homo sapiens
aggaaaccagcaaguguugacg

SEQ ID NO: 28846 - RNA, 24 nt, Homo sapiens
acgcagagcccgaaagcccccagu

SEQ ID NO: 28847 - RNA, 24 nt, Homo sapiens
acgcgcaggccagagacccaggca

SEQ ID NO: 28848 - RNA, 22 nt, Homo sapiens
ggaggccgggacgagugcaaua

SEQ ID NO: 28849 - RNA, 22 nt, Homo sapiens
ggcagagagucagagcgcggau

SEQ ID NO: 28850 - RNA, 21 nt, Homo sapiens
cugaggagagaggaggugggg

SEQ ID NO: 28851 - RNA, 19 nt, Homo sapiens
aagccaaagccuuauccau

SEQ ID NO: 28852 - RNA, 20 nt, Homo sapiens
gcagaagcauuuccacacac

SEQ ID NO: 28853 - RNA, 22 nt, Homo sapiens
cagaaagugcuucccucuagag

SEQ ID NO: 28854 - RNA, 21 nt, Homo sapiens
ugcaaacccugcaugugggag

SEQ ID NO: 28855 - RNA, 22 nt, Homo sapiens
cucaauagacugugagcuccuu

SEQ ID NO: 28856 - RNA, 22 nt, Homo sapiens
agcugaguguaggauguuuaca

SEQ ID NO: 28857 - RNA, 22 nt, Homo sapiens
ugcaacuuaguaaugugcaaua

SEQ ID NO: 28858 - RNA, 21 nt, Homo sapiens
uucuaggauaggcccaggggc

SEQ ID NO: 28859 - RNA, 22 nt, Homo sapiens
caacaaaaucacugaugcugga

SEQ ID NO: 28860 - RNA, 22 nt, Homo sapiens
uauggaugcaaaaugaucccaa

SEQ ID NO: 28861 - RNA, 22 nt, Homo sapiens
guagaagggaaucuugcauaag

SEQ ID NO: 28862 - RNA, 22 nt, Homo sapiens
ccuggcacacaguagaccuuca

SEQ ID NO: 28863 - RNA, 22 nt, Homo sapiens
ugcaagccuugggugugggagg

SEQ ID NO: 28864 - RNA, 21 nt, Homo sapiens
uugucuaaccagucaccuguu

SEQ ID NO: 28865 - RNA, 22 nt, Homo sapiens
ccucaggcacggccgggccacc

SEQ ID NO: 28866 - RNA, 23 nt, Homo sapiens
cccagcuagauuguaagcuccuu

SEQ ID NO: 28867 - RNA, 21 nt, Homo sapiens
caucaccuuccuucuccucca

SEQ ID NO: 28868 - RNA, 23 nt, Homo sapiens
aaccaagaccccggagaucccag

SEQ ID NO: 28869 - RNA, 20 nt, Homo sapiens
uacugcuuccacagcucccc

SEQ ID NO: 28870 - RNA, 22 nt, Homo sapiens
ccccucuggucaaccagucaca

SEQ ID NO: 28871 - RNA, 22 nt, Homo sapiens
ucacaguugccagcugagauua

SEQ ID NO: 28872 - RNA, 22 nt, Homo sapiens
cucaauagacugugagcuccuu

SEQ ID NO: 28873 - RNA, 22 nt, Homo sapiens
agcugaguguaggauguuuaca

SEQ ID NO: 28874 - RNA, 23 nt, Homo sapiens
aaagucucgcucucugccccuca

SEQ ID NO: 28875 - RNA, 22 nt, Homo sapiens
cucagagcagacgugguucuca

SEQ ID NO: 28876 - RNA, 24 nt, Homo sapiens
acgcgcaggccagagacccaggca

SEQ ID NO: 28877 - RNA, 23 nt, Homo sapiens
cccagcuagauuguaagcuccuu

SEQ ID NO: 28878 - RNA, 21 nt, Homo sapiens
caucaccuuccuucuccucca

SEQ ID NO: 28879 - RNA, 22 nt, Homo sapiens
caaacaccauugucacacucca

SEQ ID NO: 28880 - RNA, 22 nt, Homo sapiens
gugggguggguggucaggccga

SEQ ID NO: 28881 - RNA, 21 nt, Homo sapiens
uuuagcauaaguaugucccaa

SEQ ID NO: 28882 - RNA, 22 nt, Homo sapiens
ucaggaacugccuuucucucca

SEQ ID NO: 28883 - RNA, 21 nt, Homo sapiens
gaccaaucgccguccccgccg

SEQ ID NO: 28884 - RNA, 22 nt, Homo sapiens
uggcagcagcggagggggcaga

SEQ ID NO: 28885 - RNA, 20 nt, Homo sapiens
acagcaaggagggcaggagg

SEQ ID NO: 28886 - RNA, 21 nt, Homo sapiens
acaggauugagggggggcccu

SEQ ID NO: 28887 - RNA, 20 nt, Homo sapiens
ccagcagcaccuggggcagu

SEQ ID NO: 28888 - RNA, 21 nt, Homo sapiens
auccuguacugagcugccccg

SEQ ID NO: 28889 - RNA, 23 nt, Homo sapiens
cugcagaacuguucccgcugcua

SEQ ID NO: 28890 - RNA, 19 nt, Homo sapiens
guccugaauuccgcagccu

SEQ ID NO: 28891 - RNA, 23 nt, Homo sapiens
acagcgcucgcaaccgcagcgau

SEQ ID NO: 28892 - RNA, 22 nt, Homo sapiens
gcggucccgcggcgccccgccu

SEQ ID NO: 28893 - RNA, 22 nt, Homo sapiens
gcggucccgcggcgccccgccu

SEQ ID NO: 28894 - RNA, 22 nt, Homo sapiens
ugcuguuagcccuagccccgca

SEQ ID NO: 28895 - RNA, 22 nt, Homo sapiens
ugcuguuagcccuagccccgca

SEQ ID NO: 28896 - RNA, 22 nt, Homo sapiens
acuggguucaccuuuaagggca

SEQ ID NO: 28897 - RNA, 24 nt, Homo sapiens
ucagagcauguguuuaaucaggcu

SEQ ID NO: 28898 - RNA, 23 nt, Homo sapiens
aggaacagcagcagcccgggccg

SEQ ID NO: 28899 - RNA, 22 nt, Homo sapiens
ucaucucgcccgcaaagaccca

SEQ ID NO: 28900 - RNA, 22 nt, Homo sapiens
acaaaaguugccuuugugugau

SEQ ID NO: 28901 - RNA, 22 nt, Homo sapiens
cacucuaaagggaggcacuuug

SEQ ID NO: 28902 - RNA, 24 nt, Homo sapiens
acugcuggucuucagucagggcca

SEQ ID NO: 28903 - RNA, 23 nt, Homo sapiens
gggagugaagacacggagccaga

SEQ ID NO: 28904 - RNA, 23 nt, Homo sapiens
aggaacagcagcagcccgggccg

SEQ ID NO: 28905 - RNA, 22 nt, Homo sapiens
uagucaagugaagcagugggag

SEQ ID NO: 28906 - RNA, 21 nt, Homo sapiens
acaggauugagggggggcccu

SEQ ID NO: 28907 - RNA, 22 nt, Homo sapiens
agcugaguguaggauguuuaca

SEQ ID NO: 28908 - RNA, 23 nt, Homo sapiens
aaagucucgcucucugccccuca

SEQ ID NO: 28909 - RNA, 22 nt, Homo sapiens
ugcaagccuugggugugggagg

SEQ ID NO: 28910 - RNA, 25 nt, Homo sapiens
aggccgccacccgcccgcgaucccu

SEQ ID NO: 28911 - RNA, 20 nt, Homo sapiens
aggggccucagccuccuggu

SEQ ID NO: 28912 - RNA, 18 nt, Homo sapiens
gaaaugagggccagcuga

SEQ ID NO: 28913 - RNA, 23 nt, Homo sapiens
gggagugaagacacggagccaga

SEQ ID NO: 28914 - RNA, 22 nt, Homo sapiens
ucaggaacugccuuucucucca

SEQ ID NO: 28915 - RNA, 22 nt, Homo sapiens
uccacauggaguugcuguuaca

SEQ ID NO: 28916 - RNA, 22 nt, Homo sapiens
uagucaagugaagcagugggag

SEQ ID NO: 28917 - RNA, 22 nt, Homo sapiens
agcugaguguaggauguuuaca

SEQ ID NO: 28918 - RNA, 21 nt, Homo sapiens
aguucucccaacguaaaccca

SEQ ID NO: 28919 - RNA, 24 nt, Homo sapiens
acgcgcaggccagagacccaggca

SEQ ID NO: 28920 - RNA, 21 nt, Homo sapiens
gguggagcccugagaaccgga

SEQ ID NO: 28921 - RNA, 23 nt, Homo sapiens
cacugugggcccucuccgcacca

SEQ ID NO: 28922 - RNA, 21 nt, Homo sapiens
caucaccuuccuucuccucca

SEQ ID NO: 28923 - RNA, 27 nt, Homo sapiens
ugcccacucucaccaucaccuacagug

SEQ ID NO: 28924 - RNA, 22 nt, Homo sapiens
cugggggcggcacaggggcuca

SEQ ID NO: 28925 - RNA, 21 nt, Homo sapiens
uggggauuacacuucaacagg

SEQ ID NO: 28926 - RNA, 22 nt, Homo sapiens
cuggagacacgugcacuguaga

SEQ ID NO: 28927 - RNA, 23 nt, Homo sapiens
gcgcccaauuaaugucuguugau

SEQ ID NO: 28928 - RNA, 21 nt, Homo sapiens
gcuccaaccucagcagacugu

SEQ ID NO: 28929 - RNA, 22 nt, Homo sapiens
ccucuaguaaauaugucagcau

SEQ ID NO: 28930 - RNA, 19 nt, Homo sapiens
gccucagaggcagcugcuu

SEQ ID NO: 28931 - RNA, 22 nt, Homo sapiens
gggagaggucucccugcgcaca

SEQ ID NO: 28932 - RNA, 22 nt, Homo sapiens
cugggggcggcacaggggcuca

SEQ ID NO: 28933 - RNA, 22 nt, Homo sapiens
caaacaccauugucacacucca

SEQ ID NO: 28934 - RNA, 22 nt, Homo sapiens
agccaagcucagacggauccga

SEQ ID NO: 28935 - RNA, 17 nt, Homo sapiens
gggagaggaggaggcga

SEQ ID NO: 28936 - RNA, 22 nt, Homo sapiens
ucaggaacugccuuucucucca

SEQ ID NO: 28937 - RNA, 21 nt, Homo sapiens
ugcaaacccugcaugugggag

SEQ ID NO: 28938 - RNA, 22 nt, Homo sapiens
uauggaugcaaaaugaucccaa

SEQ ID NO: 28939 - RNA, 19 nt, Homo sapiens
guugggaucacaggcgccc

SEQ ID NO: 28940 - RNA, 22 nt, Homo sapiens
aagagggagacccaggcucgga

SEQ ID NO: 28941 - RNA, 23 nt, Homo sapiens
aaccaagaccccggagaucccag

SEQ ID NO: 28942 - RNA, 20 nt, Homo sapiens
uacugcuuccacagcucccc

SEQ ID NO: 28943 - RNA, 17 nt, Homo sapiens
gggagaggaggaggcga

SEQ ID NO: 28944 - RNA, 23 nt, Homo sapiens
gggagugaagacacggagccaga

SEQ ID NO: 28945 - RNA, 21 nt, Homo sapiens
gaccaaucgccguccccgccg

SEQ ID NO: 28946 - RNA, 21 nt, Homo sapiens
cucacucagauggccaacuca

SEQ ID NO: 28947 - RNA, 25 nt, Homo sapiens
acggagcugucccaacaccaccccu

SEQ ID NO: 28948 - RNA, 22 nt, Homo sapiens
gcggucccgcggcgccccgccu

SEQ ID NO: 28949 - RNA, 22 nt, Homo sapiens
gcugaggcuguggggcuggagu

SEQ ID NO: 28950 - RNA, 24 nt, Homo sapiens
ucagagcauguguuuaaucaggcu

SEQ ID NO: 28951 - RNA, 22 nt, Homo sapiens
cuggagagacaaggggaagagg

SEQ ID NO: 28952 - RNA, 22 nt, Homo sapiens
gcacaaaucuccagaccaccca

SEQ ID NO: 28953 - RNA, 22 nt, Homo sapiens
aacccauggaauucaguucuca

SEQ ID NO: 28954 - RNA, 22 nt, Homo sapiens
gcuggguggagaagguggugaa

SEQ ID NO: 28955 - RNA, 22 nt, Homo sapiens
acaguucuucaacuggcagcuu

SEQ ID NO: 28956 - RNA, 21 nt, Homo sapiens
aagugucagacacgguggugg

SEQ ID NO: 28957 - RNA, 23 nt, Homo sapiens
aaaucagaaucacaccuggggga

SEQ ID NO: 28958 - RNA, 22 nt, Homo sapiens
uacagauggauaccgugcaauu

SEQ ID NO: 28959 - RNA, 23 nt, Homo sapiens
caugagugacgcccucuggagua

SEQ ID NO: 28960 - RNA, 19 nt, Homo sapiens
auuuugguacagcagcuca

SEQ ID NO: 28961 - RNA, 25 nt, Homo sapiens
acggagcugucccaacaccaccccu

SEQ ID NO: 28962 - RNA, 24 nt, Homo sapiens
acgcagagcccgaaagcccccagu

SEQ ID NO: 28963 - RNA, 22 nt, Homo sapiens
cacauggccaaaacagagaaga

SEQ ID NO: 28964 - RNA, 22 nt, Homo sapiens
caaacaccauugucacacucca

SEQ ID NO: 28965 - RNA, 20 nt, Homo sapiens
ggggcagacagacgaggaag

SEQ ID NO: 28966 - RNA, 21 nt, Homo sapiens
gggcaucugggacgcgcagga

SEQ ID NO: 28967 - RNA, 23 nt, Homo sapiens
acccucuauagggaagcgcguuc

SEQ ID NO: 28968 - RNA, 26 nt, Homo sapiens
aaccaucucauacaaaccaacuacuu

SEQ ID NO: 28969 - RNA, 22 nt, Homo sapiens
acaguucuucaacuggcagcuu

SEQ ID NO: 28970 - RNA, 22 nt, Homo sapiens
auaaggauuuuuaggggcauua

SEQ ID NO: 28971 - RNA, 19 nt, Homo sapiens
auuuugguacagcagcuca

SEQ ID NO: 28972 - RNA, 21 nt, Homo sapiens
aucuuugauuuucaguaguuu

SEQ ID NO: 28973 - RNA, 21 nt, Homo sapiens
aguucucccaacguaaaccca

SEQ ID NO: 28974 - RNA, 23 nt, Homo sapiens
cacugugggcccucuccgcacca

SEQ ID NO: 28975 - RNA, 22 nt, Homo sapiens
ugcuguuagcccuagccccgca

SEQ ID NO: 28976 - RNA, 20 nt, Homo sapiens
cucaaagcaaacccugcaga

SEQ ID NO: 28977 - RNA, 21 nt, Homo sapiens
cugaggagagaggaggugggg

SEQ ID NO: 28978 - RNA, 23 nt, Homo sapiens
gggagugaagacacggagccaga

SEQ ID NO: 28979 - RNA, 23 nt, Homo sapiens
cuaccugcacuguaagcacuuug

SEQ ID NO: 28980 - RNA, 21 nt, Homo sapiens
gaccaaucgccguccccgccg

SEQ ID NO: 28981 - RNA, 21 nt, Homo sapiens
aggcggcaggcacaggacugg

SEQ ID NO: 28982 - RNA, 23 nt, Homo sapiens
gaaacccagcagacaauguagcu

SEQ ID NO: 28983 - RNA, 22 nt, Homo sapiens
agcugaguguaggauguuuaca

SEQ ID NO: 28984 - RNA, 23 nt, Homo sapiens
aaagucucgcucucugccccuca

SEQ ID NO: 28985 - RNA, 22 nt, Homo sapiens
caugauugccacgucugcagua

SEQ ID NO: 28986 - RNA, 21 nt, Homo sapiens
ugauugccacugucugcagua

SEQ ID NO: 28987 - RNA, 22 nt, Homo sapiens
aguccagauucugugcccacca

SEQ ID NO: 28988 - RNA, 21 nt, Homo sapiens
cucacucagauggccaacuca

SEQ ID NO: 28989 - RNA, 19 nt, Homo sapiens
uagcauacagauacgccca

SEQ ID NO: 28990 - RNA, 23 nt, Homo sapiens
aggagaaggcaccaugggauuua

SEQ ID NO: 28991 - RNA, 22 nt, Homo sapiens
aagagggagacccaggcucgga

SEQ ID NO: 28992 - RNA, 22 nt, Homo sapiens
gcacauguucugcggcccacca

SEQ ID NO: 28993 - RNA, 22 nt, Homo sapiens
gcggucccgcggcgccccgccu

SEQ ID NO: 28994 - RNA, 22 nt, Homo sapiens
uggugauucacaaagaaaucca

SEQ ID NO: 28995 - RNA, 20 nt, Homo sapiens
uacugcuuccacagcucccc

SEQ ID NO: 28996 - RNA, 24 nt, Homo sapiens
cacccccagagccucagcucccca

SEQ ID NO: 28997 - RNA, 24 nt, Homo sapiens
cacccccagagccucagcucccca

SEQ ID NO: 28998 - RNA, 22 nt, Homo sapiens
uccggggacgaacgggacgggu

SEQ ID NO: 28999 - RNA, 22 nt, Homo sapiens
cuaccauaggguaaaaccacug

SEQ ID NO: 29000 - RNA, 21 nt, Homo sapiens
gaccaaucgccguccccgccg

SEQ ID NO: 29001 - RNA, 21 nt, Homo sapiens
agagcucauccauaguuguca

SEQ ID NO: 29002 - RNA, 22 nt, Homo sapiens
gcggucccgcggcgccccgccu

SEQ ID NO: 29003 - RNA, 22 nt, Homo sapiens
ugcuguuagcccuagccccgca

SEQ ID NO: 29004 - RNA, 22 nt, Homo sapiens
ugcuguuagcccuagccccgca

SEQ ID NO: 29005 - RNA, 21 nt, Homo sapiens
aacauacaaaggguauccucu

SEQ ID NO: 29006 - RNA, 27 nt, Homo sapiens
uuuagcacagugcuuauacaagaaggu

SEQ ID NO: 29007 - RNA, 20 nt, Homo sapiens
ugucuccacagggcucuuua

SEQ ID NO: 29008 - RNA, 22 nt, Homo sapiens
augcccuuucaucauugcacug

SEQ ID NO: 29009 - RNA, 18 nt, Homo sapiens
aucacauucaccucccug

SEQ ID NO: 29010 - RNA, 22 nt, Homo sapiens
accuaauauaucaaacauauca

SEQ ID NO: 29011 - RNA, 22 nt, Homo sapiens
cccaacaacaggaaacuaccua

SEQ ID NO: 29012 - RNA, 23 nt, Homo sapiens
acacucaaaagauggcggcacuu

SEQ ID NO: 29013 - RNA, 21 nt, Homo sapiens
aagacgggaggagaggaguga

SEQ ID NO: 29014 - RNA, 22 nt, Homo sapiens
aucgggaggggacugagccuga

SEQ ID NO: 29015 - RNA, 22 nt, Homo sapiens
gccaccuucaaaugggaagucu

SEQ ID NO: 29016 - RNA, 23 nt, Homo sapiens
ggacauuguuucagugcccaagu

SEQ ID NO: 29017 - RNA, 21 nt, Homo sapiens
caucaccuuccuucuccucca

SEQ ID NO: 29018 - RNA, 21 nt, Homo sapiens
aucugcacugucagcacuuua

SEQ ID NO: 29019 - RNA, 22 nt, Homo sapiens
ugaagaagggggggaagggcgu

SEQ ID NO: 29020 - RNA, 18 nt, Homo sapiens
ggagaggagggcacugga

SEQ ID NO: 29021 - RNA, 22 nt, Homo sapiens
caacaaaaucacugaugcugga

SEQ ID NO: 29022 - RNA, 22 nt, Homo sapiens
ugugggugugugcaugagcgug

SEQ ID NO: 29023 - RNA, 22 nt, Homo sapiens
gggagaggucucccugcgcaca

SEQ ID NO: 29024 - RNA, 23 nt, Homo sapiens
gcacaugugcacacagccgggug

SEQ ID NO: 29025 - RNA, 23 nt, Homo sapiens
ucauagcccuguacaaugcugcu

SEQ ID NO: 29026 - RNA, 23 nt, Homo sapiens
ugauagcccuguacaaugcugcu

SEQ ID NO: 29027 - RNA, 21 nt, Homo sapiens
ccaaccaaugaaagaaugcuu

SEQ ID NO: 29028 - RNA, 22 nt, Homo sapiens
cugggggcggcacaggggcuca

SEQ ID NO: 29029 - RNA, 22 nt, Homo sapiens
agcccaaaaggagaauucuuug

SEQ ID NO: 29030 - RNA, 22 nt, Homo sapiens
cuguuccugcugaacugagcca

SEQ ID NO: 29031 - RNA, 22 nt, Homo sapiens
uccagcaaagggaagcgcuuuc

SEQ ID NO: 29032 - RNA, 22 nt, Homo sapiens
accucuaaaggggagcgcuuug

SEQ ID NO: 29033 - RNA, 23 nt, Homo sapiens
acacucuaaagagaagcgcuuug

SEQ ID NO: 29034 - RNA, 21 nt, Homo sapiens
gcuccaaagggaagcgcuuug

SEQ ID NO: 29035 - RNA, 21 nt, Homo sapiens
cacucugaagggaagcgcuuu

SEQ ID NO: 29036 - RNA, 21 nt, Homo sapiens
cacucugaagggaagcgcuuu

SEQ ID NO: 29037 - RNA, 21 nt, Homo sapiens
ccucuaaagagaagcgcuuuc

SEQ ID NO: 29038 - RNA, 19 nt, Homo sapiens
auuuugguacagcagcuca

SEQ ID NO: 29039 - RNA, 21 nt, Homo sapiens
acaauccuagagcacaagaag

SEQ ID NO: 29040 - RNA, 19 nt, Homo sapiens
gccucagaggcagcugcuu

SEQ ID NO: 29041 - RNA, 21 nt, Homo sapiens
ugacugacagcuuuuugagua

SEQ ID NO: 29042 - RNA, 20 nt, Homo sapiens
cugcgggaggacagggcuca

SEQ ID NO: 29043 - RNA, 18 nt, Homo sapiens
ugguggcagaggugggau

SEQ ID NO: 29044 - RNA, 22 nt, Homo sapiens
aggucucacuuuguugcccaga

SEQ ID NO: 29045 - RNA, 22 nt, Homo sapiens
agcugaguguaggauguuuaca

SEQ ID NO: 29046 - RNA, 21 nt, Homo sapiens
ccuucugacuccaaguccagu

SEQ ID NO: 29047 - RNA, 22 nt, Homo sapiens
gccuucugacccuaaguccagu

SEQ ID NO: 29048 - RNA, 22 nt, Homo sapiens
ugcaagccuugggugugggagg

SEQ ID NO: 29049 - RNA, 23 nt, Homo sapiens
gggccgcagcugucgcccguguc

SEQ ID NO: 29050 - RNA, 25 nt, Homo sapiens
aaggagcucagaagcccugcccagc

SEQ ID NO: 29051 - RNA, 22 nt, Homo sapiens
gccaccuucaaaugggaagucu

SEQ ID NO: 29052 - RNA, 20 nt, Homo sapiens
uacugcuuccacagcucccc

SEQ ID NO: 29053 - RNA, 21 nt, Homo sapiens
aguagugcuuucuacuuuaug

SEQ ID NO: 29054 - RNA, 23 nt, Homo sapiens
cuaucugcacuagaugcaccuua

SEQ ID NO: 29055 - RNA, 23 nt, Homo sapiens
aauaaauuaaauuuauauuacag

SEQ ID NO: 29056 - RNA, 23 nt, Homo sapiens
acccuauaagcaauauugcacua

SEQ ID NO: 29057 - RNA, 21 nt, Homo sapiens
ugacugcagagcaaaagacac

SEQ ID NO: 29058 - RNA, 22 nt, Homo sapiens
gacaaaacccgcaaauacuuuu

SEQ ID NO: 29059 - RNA, 22 nt, Homo sapiens
cugcgauuccucccucuacugu

SEQ ID NO: 29060 - RNA, 23 nt, Homo sapiens
aggaacagcagcagcccgggccg

SEQ ID NO: 29061 - RNA, 22 nt, Homo sapiens
cucagagcagacgugguucuca

SEQ ID NO: 29062 - RNA, 21 nt, Homo sapiens
cggcucggguggcggcgacgg

SEQ ID NO: 29063 - RNA, 21 nt, Homo sapiens
gagcugcauccuggcuccggg

SEQ ID NO: 29064 - RNA, 17 nt, Homo sapiens
gggagaggaggaggcga

SEQ ID NO: 29065 - RNA, 21 nt, Homo sapiens
gaccaaucgccguccccgccg

SEQ ID NO: 29066 - RNA, 21 nt, Homo sapiens
uucuaggauaggcccaggggc

SEQ ID NO: 29067 - RNA, 23 nt, Homo sapiens
aaagucucgcucucugccccuca

SEQ ID NO: 29068 - RNA, 22 nt, Homo sapiens
aagagggagacccaggcucgga

SEQ ID NO: 29069 - RNA, 22 nt, Homo sapiens
gcggucccgcggcgccccgccu

SEQ ID NO: 29070 - RNA, 17 nt, Homo sapiens
uggaggccccagcgaga

SEQ ID NO: 29071 - RNA, 22 nt, Homo sapiens
ugcuguuagcccuagccccgca

SEQ ID NO: 29072 - RNA, 23 nt, Homo sapiens
aaaaugcagauuccuggacucca

SEQ ID NO: 29073 - RNA, 18 nt, Homo sapiens
auucaaucuacugccuca

SEQ ID NO: 29074 - RNA, 22 nt, Homo sapiens
cagaagugggccgggcacaggg

SEQ ID NO: 29075 - RNA, 20 nt, Homo sapiens
acagcaaggagggcaggagg

SEQ ID NO: 29076 - RNA, 21 nt, Homo sapiens
ucaaucacagauagcaccccu

SEQ ID NO: 29077 - RNA, 22 nt, Homo sapiens
acaaccagcuaagacacugcca

SEQ ID NO: 29078 - RNA, 22 nt, Homo sapiens
auggcaguggaguuagugauug

SEQ ID NO: 29079 - RNA, 23 nt, Homo sapiens
gcaaucagcuaacuacacugccu

SEQ ID NO: 29080 - RNA, 22 nt, Homo sapiens
accagcuaacaauacacugcca

SEQ ID NO: 29081 - RNA, 22 nt, Homo sapiens
gccagcuaacaauacacugccu

SEQ ID NO: 29082 - RNA, 21 nt, Homo sapiens
guccugagagcgcugccuccu

SEQ ID NO: 29083 - RNA, 20 nt, Homo sapiens
cucaaagcaaacccugcaga

SEQ ID NO: 29084 - RNA, 22 nt, Homo sapiens
agccaagcucagacggauccga

SEQ ID NO: 29085 - RNA, 18 nt, Homo sapiens
aucacauucaccucccug

SEQ ID NO: 29086 - RNA, 23 nt, Homo sapiens
gggagugaagacacggagccaga

SEQ ID NO: 29087 - RNA, 21 nt, Homo sapiens
gaccaaucgccguccccgccg

SEQ ID NO: 29088 - RNA, 23 nt, Homo sapiens
ucucugcaggccgugugcuuugc

SEQ ID NO: 29089 - RNA, 22 nt, Homo sapiens
aaucagucucauugcuuuauaa

SEQ ID NO: 29090 - RNA, 22 nt, Homo sapiens
cucccuucuuuccucccgucuu

SEQ ID NO: 29091 - RNA, 22 nt, Homo sapiens
ccucauggaaggguuccccacu

SEQ ID NO: 29092 - RNA, 19 nt, Homo sapiens
guccugaauuccgcagccu

SEQ ID NO: 29093 - RNA, 19 nt, Homo sapiens
ucagcaguaccagccuaga

SEQ ID NO: 29094 - RNA, 22 nt, Homo sapiens
gcggucccgcggcgccccgccu

SEQ ID NO: 29095 - RNA, 21 nt, Homo sapiens
caucaccuuccuucuccucca

SEQ ID NO: 29096 - RNA, 22 nt, Homo sapiens
ugaauuacuuuguaaaccacca

SEQ ID NO: 29097 - RNA, 22 nt, Homo sapiens
cacaaguucggaucuacggguu

SEQ ID NO: 29098 - RNA, 22 nt, Homo sapiens
caaacaccauugucacacucca

SEQ ID NO: 29099 - RNA, 23 nt, Homo sapiens
gggagugaagacacggagccaga

SEQ ID NO: 29100 - RNA, 21 nt, Homo sapiens
gaccaaucgccguccccgccg

SEQ ID NO: 29101 - RNA, 21 nt, Homo sapiens
aggcggcaggcacaggacugg

SEQ ID NO: 29102 - RNA, 25 nt, Homo sapiens
agcuagucaagcgcgguuguggggg

SEQ ID NO: 29103 - RNA, 21 nt, Homo sapiens
uucuaggauaggcccaggggc

SEQ ID NO: 29104 - RNA, 22 nt, Homo sapiens
ccucauggaaggguuccccacu

SEQ ID NO: 29105 - RNA, 22 nt, Homo sapiens
gcggucccgcggcgccccgccu

SEQ ID NO: 29106 - RNA, 22 nt, Homo sapiens
cuggagagacaaggggaagagg

SEQ ID NO: 29107 - RNA, 22 nt, Homo sapiens
auccuucuacaaauucacccau

SEQ ID NO: 29108 - RNA, 17 nt, Homo sapiens
gacagccucucccccac

SEQ ID NO: 29109 - RNA, 18 nt, Homo sapiens
auucaaucuacugccuca

SEQ ID NO: 29110 - RNA, 23 nt, Homo sapiens
cuaucugcacuagaugcaccuua

SEQ ID NO: 29111 - RNA, 23 nt, Homo sapiens
cuaacugcacuagaugcaccuua

SEQ ID NO: 29112 - RNA, 23 nt, Homo sapiens
agaggcaggcaugcgggcagaca

SEQ ID NO: 29113 - RNA, 22 nt, Homo sapiens
auggcaguggaguuagugauug

SEQ ID NO: 29114 - RNA, 22 nt, Homo sapiens
augggacauccuacauaugcaa

SEQ ID NO: 29115 - RNA, 23 nt, Homo sapiens
ucucacccagguagcaaggauua

SEQ ID NO: 29116 - RNA, 22 nt, Homo sapiens
agaauccuugcccgggugcauu

SEQ ID NO: 29117 - RNA, 22 nt, Homo sapiens
ugaauccuugcccaggugcauu

SEQ ID NO: 29118 - RNA, 24 nt, Homo sapiens
acugggcacaaacauguccagguc

SEQ ID NO: 29119 - RNA, 21 nt, Homo sapiens
gcugaggucugggccaggucu

SEQ ID NO: 29120 - RNA, 21 nt, Homo sapiens
cacaaccucaguguuuccagg

SEQ ID NO: 29121 - RNA, 21 nt, Homo sapiens
aacauacaaaggguauccucu

SEQ ID NO: 29122 - RNA, 21 nt, Homo sapiens
ccccucccagccucccugcca

SEQ ID NO: 29123 - RNA, 22 nt, Homo sapiens
ggcucccaagaaccucaccugu

SEQ ID NO: 29124 - RNA, 24 nt, Homo sapiens
gaaagugcauagaauucugucugg

SEQ ID NO: 29125 - RNA, 22 nt, Homo sapiens
uggcagcagcggagggggcaga

SEQ ID NO: 29126 - RNA, 22 nt, Homo sapiens
uccacauggaguugcuguuaca

SEQ ID NO: 29127 - RNA, 22 nt, Homo sapiens
cuuccagucgaggauguuuaca

SEQ ID NO: 29128 - RNA, 22 nt, Homo sapiens
agcugaguguaggauguuuaca

SEQ ID NO: 29129 - RNA, 23 nt, Homo sapiens
gcugagaguguaggauguuuaca

SEQ ID NO: 29130 - RNA, 22 nt, Homo sapiens
cuuccagucggggauguuuaca

SEQ ID NO: 29131 - RNA, 22 nt, Homo sapiens
cuuccagucaaggauguuuaca

SEQ ID NO: 29132 - RNA, 20 nt, Homo sapiens
ccagcagcaccuggggcagu

SEQ ID NO: 29133 - RNA, 23 nt, Homo sapiens
cgugagcuccuggaggacaggga

SEQ ID NO: 29134 - RNA, 23 nt, Homo sapiens
ccacccaaugaccuacuccaaga

SEQ ID NO: 29135 - RNA, 21 nt, Homo sapiens
auccuguacugagcugccccg

SEQ ID NO: 29136 - RNA, 25 nt, Homo sapiens
acggagcugucccaacaccaccccu

SEQ ID NO: 29137 - RNA, 22 nt, Homo sapiens
gcugaggcuguggggcuggagu

SEQ ID NO: 29138 - RNA, 18 nt, Homo sapiens
ugguggcagaggugggau

SEQ ID NO: 29139 - RNA, 22 nt, Homo sapiens
aacccauggaauucaguucuca

SEQ ID NO: 29140 - RNA, 22 nt, Homo sapiens
agccuauggaauucaguucuca

SEQ ID NO: 29141 - RNA, 22 nt, Homo sapiens
uagcagaagcauuuccgcacac

SEQ ID NO: 29142 - RNA, 23 nt, Homo sapiens
aaaucagaaucacaccuggggga

SEQ ID NO: 29143 - RNA, 25 nt, Homo sapiens
acggagcugucccaacaccaccccu

SEQ ID NO: 29144 - RNA, 24 nt, Homo sapiens
acgcagagcccgaaagcccccagu

SEQ ID NO: 29145 - RNA, 21 nt, Homo sapiens
auaauggagaccaggccacga

SEQ ID NO: 29146 - RNA, 20 nt, Homo sapiens
cucaaagcaaacccugcaga

SEQ ID NO: 29147 - RNA, 20 nt, Homo sapiens
cucaaagcaaacccugcaga

SEQ ID NO: 29148 - RNA, 23 nt, Homo sapiens
cccaacagacauggcgguacuca

SEQ ID NO: 29149 - RNA, 22 nt, Homo sapiens
acugggacuuuguaggccaguu

SEQ ID NO: 29150 - RNA, 22 nt, Homo sapiens
agcgggacuuugagggccaguu

SEQ ID NO: 29151 - RNA, 22 nt, Homo sapiens
ccucaggcacggccgggccacc

SEQ ID NO: 29152 - RNA, 20 nt, Homo sapiens
aggggccucagccuccuggu

SEQ ID NO: 29153 - RNA, 22 nt, Homo sapiens
cacaaaccauuaugugcugcua

SEQ ID NO: 29154 - RNA, 22 nt, Homo sapiens
uguaaaccaugaugugcugcua

SEQ ID NO: 29155 - RNA, 22 nt, Homo sapiens
cgccaauauuuacgugcugcua

SEQ ID NO: 29156 - RNA, 23 nt, Homo sapiens
cuaucugcacuagaugcaccuua

SEQ ID NO: 29157 - RNA, 21 nt, Homo sapiens
gccaauauuucugugcugcua

SEQ ID NO: 29158 - RNA, 20 nt, Homo sapiens
acagcaaggagggcaggagg

SEQ ID NO: 29159 - RNA, 22 nt, Homo sapiens
acugccugucugugccugcugu

SEQ ID NO: 29160 - RNA, 22 nt, Homo sapiens
ucagaccgagacaagugcaaug

SEQ ID NO: 29161 - RNA, 22 nt, Homo sapiens
accagguuccaccccagcaggc

SEQ ID NO: 29162 - RNA, 22 nt, Homo sapiens
uucaaaacaugaauugcugcug

SEQ ID NO: 29163 - RNA, 21 nt, Homo sapiens
acaaaccacagugugcugcug

SEQ ID NO: 29164 - RNA, 23 nt, Homo sapiens
acagcgcucgcaaccgcagcgau

SEQ ID NO: 29165 - RNA, 25 nt, Homo sapiens
accaacggaccuacuucccuccgcc

SEQ ID NO: 29166 - RNA, 21 nt, Homo sapiens
caucaccuuccuucuccucca

SEQ ID NO: 29167 - RNA, 22 nt, Homo sapiens
uauccacuacaccccgcugccu

SEQ ID NO: 29168 - RNA, 22 nt, Homo sapiens
ggcagagagucagagcgcggau

SEQ ID NO: 29169 - RNA, 23 nt, Homo sapiens
cuaccugcacuguaagcacuuuu

SEQ ID NO: 29170 - RNA, 22 nt, Homo sapiens
gaggcucagaauggcucaggag

SEQ ID NO: 29171 - RNA, 18 nt, Homo sapiens
cccccaccaccacgcccg

SEQ ID NO: 29172 - RNA, 23 nt, Homo sapiens
cuacgcguauucuuaagcaauaa

SEQ ID NO: 29173 - RNA, 23 nt, Homo sapiens
cuaacugcacuagaugcaccuua

SEQ ID NO: 29174 - RNA, 23 nt, Homo sapiens
ucaguuuugcauagauuugcaca

SEQ ID NO: 29175 - RNA, 22 nt, Homo sapiens
cacucagcaccaggauauuguu

SEQ ID NO: 29176 - RNA, 22 nt, Homo sapiens
aacuaugcaaccuacuaccucu

SEQ ID NO: 29177 - RNA, 21 nt, Homo sapiens
gcugaggucugggccaggucu

SEQ ID NO: 29178 - RNA, 22 nt, Homo sapiens
ucaggaacugccuuucucucca

SEQ ID NO: 29179 - RNA, 21 nt, Homo sapiens
gaccaaucgccguccccgccg

SEQ ID NO: 29180 - RNA, 21 nt, Homo sapiens
gaccaaucgccguccccgccg

SEQ ID NO: 29181 - RNA, 22 nt, Homo sapiens
cggugagcacccggccccugcg

SEQ ID NO: 29182 - RNA, 21 nt, Homo sapiens
aaagugucagauacggugugg

SEQ ID NO: 29183 - RNA, 23 nt, Homo sapiens
gcgcccaauuaaugucuguugau

SEQ ID NO: 29184 - RNA, 22 nt, Homo sapiens
ucagaccgagacaagugcaaug

SEQ ID NO: 29185 - RNA, 23 nt, Homo sapiens
acaccaaugcccuaggggaugcg

SEQ ID NO: 29186 - RNA, 23 nt, Homo sapiens
aaaucagaaucacaccuggggga

SEQ ID NO: 29187 - RNA, 22 nt, Homo sapiens
gaauucaucacggccagccucu

SEQ ID NO: 29188 - RNA, 22 nt, Homo sapiens
aggaaaccagcaaguguugacg

SEQ ID NO: 29189 - RNA, 24 nt, Homo sapiens
acgcagagcccgaaagcccccagu

SEQ ID NO: 29190 - RNA, 22 nt, Homo sapiens
gcggucccgcggcgccccgccu

SEQ ID NO: 29191 - RNA, 22 nt, Homo sapiens
gcggucccgcggcgccccgccu

SEQ ID NO: 29192 - RNA, 22 nt, Homo sapiens
gggagaggucucccugcgcaca

SEQ ID NO: 29193 - RNA, 21 nt, Homo sapiens
gcggaacuuagccacugugaa

SEQ ID NO: 29194 - RNA, 22 nt, Homo sapiens
cucaauagacugugagcuccuu

SEQ ID NO: 29195 - RNA, 21 nt, Homo sapiens
acaaaccacagugugcugcug

SEQ ID NO: 29196 - RNA, 22 nt, Homo sapiens
gcacacaauaaauguuugcuga

SEQ ID NO: 29197 - RNA, 21 nt, Homo sapiens
ucccagcacacauuuagcuca

SEQ ID NO: 29198 - RNA, 23 nt, Homo sapiens
cccagcuagauuguaagcuccuu

SEQ ID NO: 29199 - RNA, 21 nt, Homo sapiens
caucaccuuccuucuccucca

SEQ ID NO: 29200 - RNA, 22 nt, Homo sapiens
ugaauuacuuuguaaaccacca

SEQ ID NO: 29201 - RNA, 21 nt, Homo sapiens
cugaggagagaggaggugggg

SEQ ID NO: 29202 - RNA, 22 nt, Homo sapiens
caaacaccauugucacacucca

SEQ ID NO: 29203 - RNA, 22 nt, Homo sapiens
uccggggacgaacgggacgggu

SEQ ID NO: 29204 - RNA, 18 nt, Homo sapiens
ugguggcagaggugggau

SEQ ID NO: 29205 - RNA, 23 nt, Homo sapiens
gggagugaagacacggagccaga

SEQ ID NO: 29206 - RNA, 23 nt, Homo sapiens
cuaucugcacuagaugcaccuua

SEQ ID NO: 29207 - RNA, 21 nt, Homo sapiens
gaccaaucgccguccccgccg

SEQ ID NO: 29208 - RNA, 22 nt, Homo sapiens
ucagaccgagacaagugcaaug

SEQ ID NO: 29209 - RNA, 21 nt, Homo sapiens
acaggauugagggggggcccu

SEQ ID NO: 29210 - RNA, 21 nt, Homo sapiens
acaggauugagggggggcccu

SEQ ID NO: 29211 - RNA, 22 nt, Homo sapiens
agcugaguguaggauguuuaca

SEQ ID NO: 29212 - RNA, 23 nt, Homo sapiens
aaaucagaaucacaccuggggga

SEQ ID NO: 29213 - RNA, 23 nt, Homo sapiens
aaagucucgcucucugccccuca

SEQ ID NO: 29214 - RNA, 23 nt, Homo sapiens
aaagucucgcucucugccccuca

SEQ ID NO: 29215 - RNA, 22 nt, Homo sapiens
ugcaagccuugggugugggagg

SEQ ID NO: 29216 - RNA, 24 nt, Homo sapiens
acgcagagcccgaaagcccccagu

SEQ ID NO: 29217 - RNA, 25 nt, Homo sapiens
accaacggaccuacuucccuccgcc

SEQ ID NO: 29218 - RNA, 24 nt, Homo sapiens
acgcgcaggccagagacccaggca

SEQ ID NO: 29219 - RNA, 22 nt, Homo sapiens
gcggucccgcggcgccccgccu

SEQ ID NO: 29220 - RNA, 22 nt, Homo sapiens
ugcuguuagcccuagccccgca

SEQ ID NO: 29221 - RNA, 21 nt, Homo sapiens
caucaccuuccuucuccucca

SEQ ID NO: 29222 - RNA, 21 nt, Homo sapiens
aacauacaaaggguauccucu

SEQ ID NO: 29223 - RNA, 22 nt, Homo sapiens
cgcauuauuacucacgguacga

SEQ ID NO: 29224 - RNA, 22 nt, Homo sapiens
uagucaagugaagcagugggag

SEQ ID NO: 29225 - RNA, 23 nt, Homo sapiens
acaccccaaaaucgaagcacuuc

SEQ ID NO: 29226 - RNA, 22 nt, Homo sapiens
cugcucaaacccuccaaugacu

SEQ ID NO: 29227 - RNA, 23 nt, Homo sapiens
cccagcuagauuguaagcuccuu

SEQ ID NO: 29228 - RNA, 22 nt, Homo sapiens
ccccccacugggccguacccac

SEQ ID NO: 29229 - RNA, 17 nt, Homo sapiens
agaaagaagcaauauga

SEQ ID NO: 29230 - RNA, 22 nt, Homo sapiens
aacccauggaauucaguucuca

SEQ ID NO: 29231 - RNA, 22 nt, Homo sapiens
uguaaaccaugaugugcugcua

SEQ ID NO: 29232 - RNA, 22 nt, Homo sapiens
ugagccacugugccuggccuga

SEQ ID NO: 29233 - RNA, 23 nt, Homo sapiens
cuaccugcacuauaagcacuuua

SEQ ID NO: 29234 - RNA, 19 nt, Homo sapiens
ucccacaggaagcagacac

SEQ ID NO: 29235 - RNA, 24 nt, Homo sapiens
acgcgcaggccagagacccaggca

SEQ ID NO: 29236 - RNA, 23 nt, Homo sapiens
ucauacagcuagauaaccaaaga

SEQ ID NO: 29237 - RNA, 22 nt, Homo sapiens
cuagggaacacagggcugguga

SEQ ID NO: 29238 - RNA, 23 nt, Homo sapiens
cggccugauucacaacaccagcu

SEQ ID NO: 29239 - RNA, 21 nt, Homo sapiens
aggcggcaggcacaggacugg

SEQ ID NO: 29240 - RNA, 22 nt, Homo sapiens
uucacacugcaugcucugggua

SEQ ID NO: 29241 - RNA, 20 nt, Homo sapiens
uaugaacaauuucuaggaau

SEQ ID NO: 29242 - RNA, 22 nt, Homo sapiens
ccuggcacacaguagaccuuca

SEQ ID NO: 29243 - RNA, 22 nt, Homo sapiens
aguccagauucugugcccacca

SEQ ID NO: 29244 - RNA, 22 nt, Homo sapiens
aguccagauucugugcccacca

SEQ ID NO: 29245 - RNA, 19 nt, Homo sapiens
guccugaauuccgcagccu

SEQ ID NO: 29246 - RNA, 22 nt, Homo sapiens
gcacauguucugcggcccacca

SEQ ID NO: 29247 - RNA, 22 nt, Homo sapiens
gcacauguucugcggcccacca

SEQ ID NO: 29248 - RNA, 21 nt, Homo sapiens
ucuccagaucagggcagucca

SEQ ID NO: 29249 - RNA, 22 nt, Homo sapiens
gcacaaaucuccagaccaccca

SEQ ID NO: 29250 - RNA, 22 nt, Homo sapiens
cacgaccgacgccacgccgagu

SEQ ID NO: 29251 - RNA, 19 nt, Homo sapiens
cagcaucagcagcaucauc

SEQ ID NO: 29252 - RNA, 22 nt, Homo sapiens
ggagcccgcgccccgcgccgag

SEQ ID NO: 29253 - RNA, 21 nt, Homo sapiens
aggcggcaggcacaggacugg

SEQ ID NO: 29254 - RNA, 22 nt, Homo sapiens
ugagccacugugccuggccuga

SEQ ID NO: 29255 - RNA, 21 nt, Homo sapiens
aagugucagacacgguggugg

SEQ ID NO: 29256 - RNA, 22 nt, Homo sapiens
cuguuccugcugaacugagcca

SEQ ID NO: 29257 - RNA, 22 nt, Homo sapiens
uaaccgauuucagauggugcua

SEQ ID NO: 29258 - RNA, 23 nt, Homo sapiens
aacacugauuucaaauggugcua

SEQ ID NO: 29259 - RNA, 22 nt, Homo sapiens
uaaccgauuucaaauggugcua

SEQ ID NO: 29260 - RNA, 22 nt, Homo sapiens
acaaccagcuaagacacugcca

SEQ ID NO: 29261 - RNA, 22 nt, Homo sapiens
auggcaguggaguuagugauug

SEQ ID NO: 29262 - RNA, 22 nt, Homo sapiens
aucgggaggggacugagccuga

SEQ ID NO: 29263 - RNA, 25 nt, Homo sapiens
acggagcugucccaacaccaccccu

SEQ ID NO: 29264 - RNA, 21 nt, Homo sapiens
gaaggaagugagugcagccac

SEQ ID NO: 29265 - RNA, 21 nt, Homo sapiens
ggggagcgggggcccugccuu

SEQ ID NO: 29266 - RNA, 22 nt, Homo sapiens
caaacaccauugucacacucca

SEQ ID NO: 29267 - RNA, 23 nt, Homo sapiens
cugugggagggcaguggugagag

SEQ ID NO: 29268 - RNA, 17 nt, Homo sapiens
gggagaggaggaggcga

SEQ ID NO: 29269 - RNA, 21 nt, Homo sapiens
acuagacugugagcuccucga

SEQ ID NO: 29270 - RNA, 21 nt, Homo sapiens
gaccaaucgccguccccgccg

SEQ ID NO: 29271 - RNA, 22 nt, Homo sapiens
cagaagugggccgggcacaggg

SEQ ID NO: 29272 - RNA, 22 nt, Homo sapiens
aguccagauucugugcccacca

SEQ ID NO: 29273 - RNA, 25 nt, Homo sapiens
acggagcugucccaacaccaccccu

SEQ ID NO: 29274 - RNA, 22 nt, Homo sapiens
gcacauguucugcggcccacca

SEQ ID NO: 29275 - RNA, 22 nt, Homo sapiens
gcggucccgcggcgccccgccu

SEQ ID NO: 29276 - RNA, 21 nt, Homo sapiens
caucaccuuccuucuccucca

SEQ ID NO: 29277 - RNA, 20 nt, Homo sapiens
uacugcuuccacagcucccc

SEQ ID NO: 29278 - RNA, 17 nt, Homo sapiens
ggguggcagcgguggga

SEQ ID NO: 29279 - RNA, 23 nt, Homo sapiens
gggagugaagacacggagccaga

SEQ ID NO: 29280 - RNA, 22 nt, Homo sapiens
ucaggaacugccuuucucucca

SEQ ID NO: 29281 - RNA, 21 nt, Homo sapiens
gaccaaucgccguccccgccg

SEQ ID NO: 29282 - RNA, 21 nt, Homo sapiens
gaccaaucgccguccccgccg

SEQ ID NO: 29283 - RNA, 22 nt, Homo sapiens
cagaagugggccgggcacaggg

SEQ ID NO: 29284 - RNA, 22 nt, Homo sapiens
ggcaaaauccgcaauuacuuuu

SEQ ID NO: 29285 - RNA, 22 nt, Homo sapiens
ucagaccgagacaagugcaaug

SEQ ID NO: 29286 - RNA, 21 nt, Homo sapiens
ucaaucacagauagcaccccu

SEQ ID NO: 29287 - RNA, 22 nt, Homo sapiens
ccucauggaaggguuccccacu

SEQ ID NO: 29288 - RNA, 22 nt, Homo sapiens
gcggucccgcggcgccccgccu

SEQ ID NO: 29289 - RNA, 22 nt, Homo sapiens
gcggucccgcggcgccccgccu

SEQ ID NO: 29290 - RNA, 23 nt, Homo sapiens
cacugugggcccucuccgcacca

SEQ ID NO: 29291 - RNA, 22 nt, Homo sapiens
ugcuguuagcccuagccccgca

SEQ ID NO: 29292 - RNA, 22 nt, Homo sapiens
ugcuguuagcccuagccccgca

SEQ ID NO: 29293 - RNA, 20 nt, Homo sapiens
uacugcuuccacagcucccc

SEQ ID NO: 29294 - RNA, 22 nt, Homo sapiens
ucacauuugccugcagagauuu

SEQ ID NO: 29295 - RNA, 21 nt, Homo sapiens
agagcucauccauaguuguca

SEQ ID NO: 29296 - RNA, 21 nt, Homo sapiens
gaccaagaaauagccuuucaa

SEQ ID NO: 29297 - RNA, 21 nt, Homo sapiens
ucccagcacacauuuagcuca

SEQ ID NO: 29298 - RNA, 22 nt, Homo sapiens
caagacacauuuggagagggac

SEQ ID NO: 29299 - RNA, 21 nt, Homo sapiens
caucaccuuccuucuccucca

SEQ ID NO: 29300 - RNA, 24 nt, Homo sapiens
cacccccagagccucagcucccca

SEQ ID NO: 29301 - RNA, 22 nt, Homo sapiens
caaacaccauugucacacucca

SEQ ID NO: 29302 - RNA, 22 nt, Homo sapiens
ccagaacugaguccacagggca

SEQ ID NO: 29303 - RNA, 21 nt, Homo sapiens
gaccaaucgccguccccgccg

SEQ ID NO: 29304 - RNA, 22 nt, Homo sapiens
cagaagugggccgggcacaggg

SEQ ID NO: 29305 - RNA, 22 nt, Homo sapiens
ugagccacugugccuggccuga

SEQ ID NO: 29306 - RNA, 22 nt, Homo sapiens
agcugaguguaggauguuuaca

SEQ ID NO: 29307 - RNA, 22 nt, Homo sapiens
gcaaaaguaauugccaguuuug

SEQ ID NO: 29308 - RNA, 22 nt, Homo sapiens
ugcaaaaguagucucaguuuuu

SEQ ID NO: 29309 - RNA, 19 nt, Homo sapiens
aaaaguaauuacaguuuuu

SEQ ID NO: 29310 - RNA, 25 nt, Homo sapiens
acggagcugucccaacaccaccccu

SEQ ID NO: 29311 - RNA, 22 nt, Homo sapiens
gcggucccgcggcgccccgccu

SEQ ID NO: 29312 - RNA, 22 nt, Homo sapiens
ugcuguuagcccuagccccgca

SEQ ID NO: 29313 - RNA, 23 nt, Homo sapiens
gcacaugugcacacagccgggug

SEQ ID NO: 29314 - RNA, 23 nt, Homo sapiens
aaaaugcagauuccuggacucca

SEQ ID NO: 29315 - RNA, 24 nt, Homo sapiens
cugaucaguuacacaucacuucag

SEQ ID NO: 29316 - RNA, 23 nt, Homo sapiens
acaaggaugaaucuuuguuacug

SEQ ID NO: 29317 - RNA, 21 nt, Homo sapiens
ucuccagaucagggcagucca

SEQ ID NO: 29318 - RNA, 18 nt, Homo sapiens
ccacugaaccacccaugc

SEQ ID NO: 29319 - RNA, 22 nt, Homo sapiens
accuaauauaucaaacauauca

SEQ ID NO: 29320 - RNA, 21 nt, Homo sapiens
ggaaaucccuggcaaugugau

SEQ ID NO: 29321 - RNA, 21 nt, Homo sapiens
gguaaucccuggcaaugugau

SEQ ID NO: 29322 - RNA, 20 nt, Homo sapiens
cuggaggaagggcccagagg

SEQ ID NO: 29323 - RNA, 22 nt, Homo sapiens
gccuaagacacaggcccagaga

SEQ ID NO: 29324 - RNA, 22 nt, Homo sapiens
auggcaguggaguuagugauug

SEQ ID NO: 29325 - RNA, 23 nt, Homo sapiens
aaaucagaaucacaccuggggga

SEQ ID NO: 29326 - RNA, 24 nt, Homo sapiens
acgcagagcccgaaagcccccagu

SEQ ID NO: 29327 - RNA, 18 nt, Homo sapiens
ugguggcagaggugggau

SEQ ID NO: 29328 - RNA, 19 nt, Homo sapiens
cagcaucagcagcaucauc

SEQ ID NO: 29329 - RNA, 22 nt, Homo sapiens
cagaagugggccgggcacaggg

SEQ ID NO: 29330 - RNA, 23 nt, Homo sapiens
cagcugcuuuugggauuccguug

SEQ ID NO: 29331 - RNA, 25 nt, Homo sapiens
acggagcugucccaacaccaccccu

SEQ ID NO: 29332 - RNA, 21 nt, Homo sapiens
ggacuauagaacuuucccccu

SEQ ID NO: 29333 - RNA, 22 nt, Homo sapiens
cacucuaaagggaggcacuuug

SEQ ID NO: 29334 - RNA, 20 nt, Homo sapiens
ggggggcgaggcagguguga

SEQ ID NO: 29335 - RNA, 22 nt, Homo sapiens
cuaccauaggguaaaaccacug

SEQ ID NO: 29336 - RNA, 21 nt, Homo sapiens
acaugguuagaucaagcacaa

SEQ ID NO: 29337 - RNA, 20 nt, Homo sapiens
gcaaugcaacagcaaugcac

SEQ ID NO: 29338 - RNA, 23 nt, Homo sapiens
gaaagugcccucaaggcugagug

SEQ ID NO: 29339 - RNA, 22 nt, Homo sapiens
aacgcuccaaaagaaggcacuc

SEQ ID NO: 29340 - RNA, 22 nt, Homo sapiens
aacacucuaaaaggaggcacuu

SEQ ID NO: 29341 - RNA, 23 nt, Homo sapiens
acacacucacacacacacacuca

SEQ ID NO: 29342 - RNA, 22 nt, Homo sapiens
gcaaaaguaauugcagugugug

SEQ ID NO: 29343 - RNA, 25 nt, Homo sapiens
acggagcugucccaacaccaccccu

SEQ ID NO: 29344 - RNA, 22 nt, Homo sapiens
gggagaggucucccugcgcaca

SEQ ID NO: 29345 - RNA, 23 nt, Homo sapiens
gggagugaagacacggagccaga

SEQ ID NO: 29346 - RNA, 22 nt, Homo sapiens
ucagaccgagacaagugcaaug

SEQ ID NO: 29347 - RNA, 23 nt, Homo sapiens
aaaucagaaucacaccuggggga

SEQ ID NO: 29348 - RNA, 22 nt, Homo sapiens
aggaaaccagcaaguguugacg

SEQ ID NO: 29349 - RNA, 23 nt, Homo sapiens
aaucgcgguuuauaccaaaugaa

SEQ ID NO: 29350 - RNA, 24 nt, Homo sapiens
acgcagagcccgaaagcccccagu

SEQ ID NO: 29351 - RNA, 22 nt, Homo sapiens
uggggacccucccugaaccaag

SEQ ID NO: 29352 - RNA, 24 nt, Homo sapiens
acgcgcaggccagagacccaggca

SEQ ID NO: 29353 - RNA, 20 nt, Homo sapiens
uccccacagacccagagccg

SEQ ID NO: 29354 - RNA, 21 nt, Homo sapiens
caucaccuuccuucuccucca

SEQ ID NO: 29355 - RNA, 22 nt, Homo sapiens
gcacaaaucuccagaccaccca

SEQ ID NO: 29356 - RNA, 25 nt, Homo sapiens
acggagcugucccaacaccaccccu

SEQ ID NO: 29357 - RNA, 23 nt, Homo sapiens
uguaggcuggggauaaaugaaua

SEQ ID NO: 29358 - RNA, 22 nt, Homo sapiens
ggcagagagucagagcgcggau

SEQ ID NO: 29359 - RNA, 21 nt, Homo sapiens
auaauggagaccaggccacga

SEQ ID NO: 29360 - RNA, 19 nt, Homo sapiens
cagcaucagcagcaucauc

SEQ ID NO: 29361 - RNA, 18 nt, Homo sapiens
aucacauucaccucccug

SEQ ID NO: 29362 - RNA, 23 nt, Homo sapiens
gggagugaagacacggagccaga

SEQ ID NO: 29363 - RNA, 23 nt, Homo sapiens
cuaucugcacuagaugcaccuua

SEQ ID NO: 29364 - RNA, 22 nt, Homo sapiens
cagaagugggccgggcacaggg

SEQ ID NO: 29365 - RNA, 20 nt, Homo sapiens
cccgccgcgucgcccugggg

SEQ ID NO: 29366 - RNA, 22 nt, Homo sapiens
acaguucuucaacuggcagcuu

SEQ ID NO: 29367 - RNA, 22 nt, Homo sapiens
agcugaguguaggauguuuaca

SEQ ID NO: 29368 - RNA, 22 nt, Homo sapiens
acggaagggcagagagggccag

SEQ ID NO: 29369 - RNA, 23 nt, Homo sapiens
ugcgaacucaccacggacaaccu

SEQ ID NO: 29370 - RNA, 22 nt, Homo sapiens
aaagugcuucuuaccuccagau

SEQ ID NO: 29371 - RNA, 19 nt, Homo sapiens
ucagcaguaccagccuaga

SEQ ID NO: 29372 - RNA, 21 nt, Homo sapiens
caucaccuuccuucuccucca

SEQ ID NO: 29373 - RNA, 21 nt, Homo sapiens
gagcugcauccuggcuccggg

SEQ ID NO: 29374 - RNA, 21 nt, Homo sapiens
gagcugcauccuggcuccggg

SEQ ID NO: 29375 - RNA, 21 nt, Homo sapiens
ccccucccagccucccugcca

SEQ ID NO: 29376 - RNA, 22 nt, Homo sapiens
cugggggcggcacaggggcuca

SEQ ID NO: 29377 - RNA, 17 nt, Homo sapiens
gggagaggaggaggcga

SEQ ID NO: 29378 - RNA, 22 nt, Homo sapiens
aggucucacuuuguugcccaga

SEQ ID NO: 29379 - RNA, 22 nt, Homo sapiens
uacaucuggacagccgaaugaa

SEQ ID NO: 29380 - RNA, 21 nt, Homo sapiens
gaccaaucgccguccccgccg

SEQ ID NO: 29381 - RNA, 23 nt, Homo sapiens
cccaacagacauggcgguacuca

SEQ ID NO: 29382 - RNA, 23 nt, Homo sapiens
gaacagguagucugaacacuggg

SEQ ID NO: 29383 - RNA, 23 nt, Homo sapiens
gaacagauagucuaaacacuggg

SEQ ID NO: 29384 - RNA, 23 nt, Homo sapiens
ucaacgggagugaucgugucauu

SEQ ID NO: 29385 - RNA, 22 nt, Homo sapiens
aggaaaccagcaaguguugacg

SEQ ID NO: 29386 - RNA, 23 nt, Homo sapiens
gaaagugcccucaaggcugagug

SEQ ID NO: 29387 - RNA, 19 nt, Homo sapiens
gccugcugacaccgugccu

SEQ ID NO: 29388 - RNA, 25 nt, Homo sapiens
aaggagcucagaagcccugcccagc

SEQ ID NO: 29389 - RNA, 22 nt, Homo sapiens
gcggucccgcggcgccccgccu

SEQ ID NO: 29390 - RNA, 22 nt, Homo sapiens
ugcuguuagcccuagccccgca

SEQ ID NO: 29391 - RNA, 21 nt, Homo sapiens
cugaggagagaggaggugggg

SEQ ID NO: 29392 - RNA, 21 nt, Homo sapiens
aaaggccacauccagcaccgu

SEQ ID NO: 29393 - RNA, 22 nt, Homo sapiens
ucccucacacagaauuccagaa

SEQ ID NO: 29394 - RNA, 19 nt, Homo sapiens
cagcaucagcagcaucauc

SEQ ID NO: 29395 - RNA, 23 nt, Homo sapiens
gggagugaagacacggagccaga

SEQ ID NO: 29396 - RNA, 22 nt, Homo sapiens
ucaggaacugccuuucucucca

SEQ ID NO: 29397 - RNA, 22 nt, Homo sapiens
gcuggguggagaagguggugaa

SEQ ID NO: 29398 - RNA, 23 nt, Homo sapiens
aaaucagaaucacaccuggggga

SEQ ID NO: 29399 - RNA, 24 nt, Homo sapiens
acgcagagcccgaaagcccccagu

SEQ ID NO: 29400 - RNA, 20 nt, Homo sapiens
aggggccucagccuccuggu

SEQ ID NO: 29401 - RNA, 23 nt, Homo sapiens
cuccagccccuccagggcuuccu

SEQ ID NO: 29402 - RNA, 20 nt, Homo sapiens
uacugcuuccacagcucccc

SEQ ID NO: 29403 - RNA, 24 nt, Homo sapiens
cacccccagagccucagcucccca

SEQ ID NO: 29404 - RNA, 22 nt, Homo sapiens
cacgaccgacgccacgccgagu

SEQ ID NO: 29405 - RNA, 18 nt, Homo sapiens
aucacauucaccucccug

SEQ ID NO: 29406 - RNA, 21 nt, Homo sapiens
caucaccuuccuucuccucca

SEQ ID NO: 29407 - RNA, 22 nt, Homo sapiens
cacauggccaaaacagagaaga

SEQ ID NO: 29408 - RNA, 22 nt, Homo sapiens
cacaucucacuguagccucaaa

SEQ ID NO: 29409 - RNA, 23 nt, Homo sapiens
gggagugaagacacggagccaga

SEQ ID NO: 29410 - RNA, 22 nt, Homo sapiens
uggcagcagcggagggggcaga

SEQ ID NO: 29411 - RNA, 20 nt, Homo sapiens
ccagcagcaccuggggcagu

SEQ ID NO: 29412 - RNA, 21 nt, Homo sapiens
auccuguacugagcugccccg

SEQ ID NO: 29413 - RNA, 19 nt, Homo sapiens
guugggaucacaggcgccc

SEQ ID NO: 29414 - RNA, 20 nt, Homo sapiens
acaaugagaacccauggucu

SEQ ID NO: 29415 - RNA, 22 nt, Homo sapiens
caaacaccauugucacacucca

SEQ ID NO: 29416 - RNA, 22 nt, Homo sapiens
agcucagaacccagaggucuca

SEQ ID NO: 29417 - RNA, 22 nt, Homo sapiens
uauccacuacaccccgcugccu

SEQ ID NO: 29418 - RNA, 20 nt, Homo sapiens
uacugcuuccacagcucccc

SEQ ID NO: 29419 - RNA, 24 nt, Homo sapiens
cacccccagagccucagcucccca

SEQ ID NO: 29420 - RNA, 22 nt, Homo sapiens
cacaucucacuguagccucaaa

SEQ ID NO: 29421 - RNA, 22 nt, Homo sapiens
uggcagcagcggagggggcaga

SEQ ID NO: 29422 - RNA, 20 nt, Homo sapiens
ccagcagcaccuggggcagu

SEQ ID NO: 29423 - RNA, 21 nt, Homo sapiens
auccuguacugagcugccccg

SEQ ID NO: 29424 - RNA, 22 nt, Homo sapiens
gauagagugcagaccagggucu

SEQ ID NO: 29425 - RNA, 21 nt, Homo sapiens
aucagagguucagcuuacccu

SEQ ID NO: 29426 - RNA, 19 nt, Homo sapiens
guugggaucacaggcgccc

SEQ ID NO: 29427 - RNA, 20 nt, Homo sapiens
acaaugagaacccauggucu

SEQ ID NO: 29428 - RNA, 22 nt, Homo sapiens
caaacaccauugucacacucca

SEQ ID NO: 29429 - RNA, 22 nt, Homo sapiens
uauccacuacaccccgcugccu

SEQ ID NO: 29430 - RNA, 23 nt, Homo sapiens
cacaaauucggaucuacagggua

SEQ ID NO: 29431 - RNA, 23 nt, Homo sapiens
cacaaauucgguucuacagggua

SEQ ID NO: 29432 - RNA, 21 nt, Homo sapiens
ccccucccagccucccugcca

SEQ ID NO: 29433 - RNA, 21 nt, Homo sapiens
cugaggagagaggaggugggg

SEQ ID NO: 29434 - RNA, 22 nt, Homo sapiens
aggucucacuuuguugcccaga

SEQ ID NO: 29435 - RNA, 21 nt, Homo sapiens
gaccaaucgccguccccgccg

SEQ ID NO: 29436 - RNA, 22 nt, Homo sapiens
ucagaccgagacaagugcaaug

SEQ ID NO: 29437 - RNA, 22 nt, Homo sapiens
ucgcccucucaacccagcuuuu

SEQ ID NO: 29438 - RNA, 22 nt, Homo sapiens
uugcccucucaacccagcuuuu

SEQ ID NO: 29439 - RNA, 20 nt, Homo sapiens
acccucucaacccagcuuuu

SEQ ID NO: 29440 - RNA, 19 nt, Homo sapiens
uccucucaacccagcuuuu

SEQ ID NO: 29441 - RNA, 22 nt, Homo sapiens
cucggggcagcucaguacagga

SEQ ID NO: 29442 - RNA, 24 nt, Homo sapiens
cugaucaguuacacaucacuucag

SEQ ID NO: 29443 - RNA, 25 nt, Homo sapiens
aaggagcucagaagcccugcccagc

SEQ ID NO: 29444 - RNA, 22 nt, Homo sapiens
ugcuguuagcccuagccccgca

SEQ ID NO: 29445 - RNA, 20 nt, Homo sapiens
uacugcuuccacagcucccc

SEQ ID NO: 29446 - RNA, 22 nt, Homo sapiens
ggcagagagucagagcgcggau

SEQ ID NO: 29447 - RNA, 21 nt, Homo sapiens
cugaggagagaggaggugggg

SEQ ID NO: 29448 - RNA, 23 nt, Homo sapiens
gggagugaagacacggagccaga

SEQ ID NO: 29449 - RNA, 22 nt, Homo sapiens
acccuuaucaguucuccgucca

SEQ ID NO: 29450 - RNA, 21 nt, Homo sapiens
gaccaaucgccguccccgccg

SEQ ID NO: 29451 - RNA, 23 nt, Homo sapiens
acaccaaugcccuaggggaugcg

SEQ ID NO: 29452 - RNA, 23 nt, Homo sapiens
acggcuaguggaccaggugaagu

SEQ ID NO: 29453 - RNA, 23 nt, Homo sapiens
aaagucucgcucucugccccuca

SEQ ID NO: 29454 - RNA, 23 nt, Homo sapiens
ugcgaacucaccacggacaaccu

SEQ ID NO: 29455 - RNA, 22 nt, Homo sapiens
ccucauggaaggguuccccacu

SEQ ID NO: 29456 - RNA, 22 nt, Homo sapiens
gcggucccgcggcgccccgccu

SEQ ID NO: 29457 - RNA, 23 nt, Homo sapiens
cuccagccccuccagggcuuccu

SEQ ID NO: 29458 - RNA, 22 nt, Homo sapiens
ugcuguuagcccuagccccgca

SEQ ID NO: 29459 - RNA, 21 nt, Homo sapiens
ugacugacagcuuuuugagua

SEQ ID NO: 29460 - RNA, 20 nt, Homo sapiens
uacugcuuccacagcucccc

SEQ ID NO: 29461 - RNA, 21 nt, Homo sapiens
ccccucccagccucccugcca

SEQ ID NO: 29462 - RNA, 22 nt, Homo sapiens
cugggggcggcacaggggcuca

SEQ ID NO: 29463 - RNA, 18 nt, Homo sapiens
cagcagccuccuucucaa

SEQ ID NO: 29464 - RNA, 23 nt, Homo sapiens
aggaacagcagcagcccgggccg

SEQ ID NO: 29465 - RNA, 22 nt, Homo sapiens
ucaggaacugccuuucucucca

SEQ ID NO: 29466 - RNA, 22 nt, Homo sapiens
agcccaaaaggagaauucuuug

SEQ ID NO: 29467 - RNA, 21 nt, Homo sapiens
gaccaaucgccguccccgccg

SEQ ID NO: 29468 - RNA, 22 nt, Homo sapiens
cuguuccugcugaacugagcca

SEQ ID NO: 29469 - RNA, 22 nt, Homo sapiens
uacagauggauaccgugcaauu

SEQ ID NO: 29470 - RNA, 23 nt, Homo sapiens
aaagucucgcucucugccccuca

SEQ ID NO: 29471 - RNA, 21 nt, Homo sapiens
gaaggaagugagugcagccac

SEQ ID NO: 29472 - RNA, 22 nt, Homo sapiens
gcggucccgcggcgccccgccu

SEQ ID NO: 29473 - RNA, 22 nt, Homo sapiens
ugcuguuagcccuagccccgca

SEQ ID NO: 29474 - RNA, 22 nt, Homo sapiens
gcugaggcuguggggcuggagu

SEQ ID NO: 29475 - RNA, 21 nt, Homo sapiens
ggucagaacccaucauucacu

SEQ ID NO: 29476 - RNA, 22 nt, Homo sapiens
ccaucuuuaccagacaguguua

SEQ ID NO: 29477 - RNA, 23 nt, Homo sapiens
acucaccgacagcguugaauguu

SEQ ID NO: 29478 - RNA, 23 nt, Homo sapiens
acccaccgacagcaaugaauguu

SEQ ID NO: 29479 - RNA, 22 nt, Homo sapiens
acucaccgacagguugaauguu

SEQ ID NO: 29480 - RNA, 23 nt, Homo sapiens
acccaccgacaacaaugaauguu

SEQ ID NO: 29481 - RNA, 22 nt, Homo sapiens
cuacccacagacguaccaauca

SEQ ID NO: 29482 - RNA, 22 nt, Homo sapiens
gguaaaacucgcaauuacuuuu

SEQ ID NO: 29483 - RNA, 22 nt, Homo sapiens
ggccaaaaccacaauuacuuuu

SEQ ID NO: 29484 - RNA, 22 nt, Homo sapiens
ggcaaaaaccgcaauuacuuuu

SEQ ID NO: 29485 - RNA, 22 nt, Homo sapiens
ggcaaaaaccacaauuacuuuu

SEQ ID NO: 29486 - RNA, 22 nt, Homo sapiens
gacaaaaaccgcgauuacuuuu

SEQ ID NO: 29487 - RNA, 22 nt, Homo sapiens
ggcaaaauccgcaauuacuuuu

SEQ ID NO: 29488 - RNA, 22 nt, Homo sapiens
accaaagaccgcaauuacuuuu

SEQ ID NO: 29489 - RNA, 22 nt, Homo sapiens
gacaaaacccgcaaauacuuuu

SEQ ID NO: 29490 - RNA, 22 nt, Homo sapiens
acaaaauccacaauuacuuuug

SEQ ID NO: 29491 - RNA, 21 nt, Homo sapiens
uuuuggugcauauuuacuuua

SEQ ID NO: 29492 - RNA, 22 nt, Homo sapiens
auacauacuucuuuacauucca

SEQ ID NO: 29493 - RNA, 21 nt, Homo sapiens
gagcugcauccuggcuccggg

SEQ ID NO: 29494 - RNA, 21 nt, Homo sapiens
cugaggagagaggaggugggg

SEQ ID NO: 29495 - RNA, 20 nt, Homo sapiens
ggggcagacagacgaggaag

SEQ ID NO: 29496 - RNA, 18 nt, Homo sapiens
uggcgccugaacagggac

SEQ ID NO: 29497 - RNA, 23 nt, Homo sapiens
aaaaugcagauuccuggacucca

SEQ ID NO: 29498 - RNA, 23 nt, Homo sapiens
uccaucaucaaaacaaauggagu

SEQ ID NO: 29499 - RNA, 23 nt, Homo sapiens
accccuaucacgauuagcauuaa

SEQ ID NO: 29500 - RNA, 22 nt, Homo sapiens
ccacacacuuccuuacauucca

SEQ ID NO: 29501 - RNA, 22 nt, Homo sapiens
cucauauuacaaugagcucauc

SEQ ID NO: 29502 - RNA, 20 nt, Homo sapiens
ggcaaagaaggaacauuccu

SEQ ID NO: 29503 - RNA, 18 nt, Homo sapiens
gaaaugagggccagcuga

SEQ ID NO: 29504 - RNA, 21 nt, Homo sapiens
ugcaggcugaucuucuucucu

SEQ ID NO: 29505 - RNA, 22 nt, Homo sapiens
cacugguacaaggguugggaga

SEQ ID NO: 29506 - RNA, 22 nt, Homo sapiens
ucaggaacugccuuucucucca

SEQ ID NO: 29507 - RNA, 22 nt, Homo sapiens
ucaucucgcccgcaaagaccca

SEQ ID NO: 29508 - RNA, 22 nt, Homo sapiens
ugagccacugugccuggccuga

SEQ ID NO: 29509 - RNA, 22 nt, Homo sapiens
acaaaaguugccuuugugugau

SEQ ID NO: 29510 - RNA, 23 nt, Homo sapiens
gaaagugcccucaaggcugagug

SEQ ID NO: 29511 - RNA, 22 nt, Homo sapiens
ugcaagccuugggugugggagg

SEQ ID NO: 29512 - RNA, 21 nt, Homo sapiens
ucccagcacacauuuagcuca

SEQ ID NO: 29513 - RNA, 23 nt, Homo sapiens
ucauacagcuagauaaccaaaga

SEQ ID NO: 29514 - RNA, 20 nt, Homo sapiens
uacugcuuccacagcucccc

SEQ ID NO: 29515 - RNA, 22 nt, Homo sapiens
cacucuaaagggaggcacuuug

SEQ ID NO: 29516 - RNA, 21 nt, Homo sapiens
aaaggccacauccagcaccgu

SEQ ID NO: 29517 - RNA, 23 nt, Homo sapiens
gggagugaagacacggagccaga

SEQ ID NO: 29518 - RNA, 22 nt, Homo sapiens
gcgaacgcgccacggaccaccu

SEQ ID NO: 29519 - RNA, 25 nt, Homo sapiens
acggagcugucccaacaccaccccu

SEQ ID NO: 29520 - RNA, 20 nt, Homo sapiens
uacugcuuccacagcucccc

SEQ ID NO: 29521 - RNA, 22 nt, Homo sapiens
caaacaccauugucacacucca

SEQ ID NO: 29522 - RNA, 22 nt, Homo sapiens
gcacaaaucuccagaccaccca

SEQ ID NO: 29523 - RNA, 22 nt, Homo sapiens
cacgaccgacgccacgccgagu

SEQ ID NO: 29524 - RNA, 22 nt, Homo sapiens
ggagcccgcgccccgcgccgag

SEQ ID NO: 29525 - RNA, 21 nt, Homo sapiens
gaccaaucgccguccccgccg

SEQ ID NO: 29526 - RNA, 22 nt, Homo sapiens
ugagccacugugccuggccuga

SEQ ID NO: 29527 - RNA, 21 nt, Homo sapiens
aagugucagacacgguggugg

SEQ ID NO: 29528 - RNA, 22 nt, Homo sapiens
ucagaccgagacaagugcaaug

SEQ ID NO: 29529 - RNA, 23 nt, Homo sapiens
aguaacugguugaacaacuguaa

SEQ ID NO: 29530 - RNA, 22 nt, Homo sapiens
gcggucccgcggcgccccgccu

SEQ ID NO: 29531 - RNA, 22 nt, Homo sapiens
ugcuguuagcccuagccccgca

SEQ ID NO: 29532 - RNA, 22 nt, Homo sapiens
uaaaugaauucaauuuccuucu

SEQ ID NO: 29533 - RNA, 24 nt, Homo sapiens
ucacagguuaaagggucucaggga

SEQ ID NO: 29534 - RNA, 22 nt, Homo sapiens
ucacaaguuagggucucaggga

SEQ ID NO: 29535 - RNA, 23 nt, Homo sapiens
agcccuguucuacagcccugagg

SEQ ID NO: 29536 - RNA, 24 nt, Homo sapiens
acugcuggucuucagucagggcca

SEQ ID NO: 29537 - RNA, 20 nt, Homo sapiens
acagcaaggagggcaggagg

SEQ ID NO: 29538 - RNA, 21 nt, Homo sapiens
gcggaacuuagccacugugaa

SEQ ID NO: 29539 - RNA, 21 nt, Homo sapiens
gcagaacuuagccacugugaa

SEQ ID NO: 29540 - RNA, 23 nt, Homo sapiens
cgugagcuccuggaggacaggga

SEQ ID NO: 29541 - RNA, 22 nt, Homo sapiens
ccucauggaaggguuccccacu

SEQ ID NO: 29542 - RNA, 22 nt, Homo sapiens
ccuaaugauucaucauucucaa

SEQ ID NO: 29543 - RNA, 25 nt, Homo sapiens
acggagcugucccaacaccaccccu

SEQ ID NO: 29544 - RNA, 21 nt, Homo sapiens
caucaccuuccuucuccucca

SEQ ID NO: 29545 - RNA, 20 nt, Homo sapiens
uacugcuuccacagcucccc

SEQ ID NO: 29546 - RNA, 18 nt, Homo sapiens
gaaaugagggccagcuga

SEQ ID NO: 29547 - RNA, 22 nt, Homo sapiens
caaacaccauugucacacucca

SEQ ID NO: 29548 - RNA, 21 nt, Homo sapiens
gaccaaucgccguccccgccg

SEQ ID NO: 29549 - RNA, 23 nt, Homo sapiens
cccaacagacauggcgguacuca

SEQ ID NO: 29550 - RNA, 22 nt, Homo sapiens
uucacacugcaugcucugggua

SEQ ID NO: 29551 - RNA, 22 nt, Homo sapiens
cuuccagucgaggauguuuaca

SEQ ID NO: 29552 - RNA, 22 nt, Homo sapiens
agcugaguguaggauguuuaca

SEQ ID NO: 29553 - RNA, 23 nt, Homo sapiens
gcugagaguguaggauguuuaca

SEQ ID NO: 29554 - RNA, 22 nt, Homo sapiens
cuuccagucggggauguuuaca

SEQ ID NO: 29555 - RNA, 22 nt, Homo sapiens
cuuccagucaaggauguuuaca

SEQ ID NO: 29556 - RNA, 22 nt, Homo sapiens
agccacaaucaccuucugaucu

SEQ ID NO: 29557 - RNA, 22 nt, Homo sapiens
gcacacaauaaauguuugcuga

SEQ ID NO: 29558 - RNA, 19 nt, Homo sapiens
guccugaauuccgcagccu

SEQ ID NO: 29559 - RNA, 21 nt, Homo sapiens
gaaggaagugagugcagccac

SEQ ID NO: 29560 - RNA, 22 nt, Homo sapiens
gcggucccgcggcgccccgccu

SEQ ID NO: 29561 - RNA, 21 nt, Homo sapiens
cuggaggacggcaacagucag

SEQ ID NO: 29562 - RNA, 22 nt, Homo sapiens
caaacaccauugucacacucca

SEQ ID NO: 29563 - RNA, 21 nt, Homo sapiens
gaccaaucgccguccccgccg

SEQ ID NO: 29564 - RNA, 20 nt, Homo sapiens
acauuacuguuaucaaaaca

SEQ ID NO: 29565 - RNA, 22 nt, Homo sapiens
ucaacaucagucugauaagcua

SEQ ID NO: 29566 - RNA, 22 nt, Homo sapiens
aguccagauucugugcccacca

SEQ ID NO: 29567 - RNA, 22 nt, Homo sapiens
aagagggagacccaggcucgga

SEQ ID NO: 29568 - RNA, 22 nt, Homo sapiens
gcacauguucugcggcccacca

SEQ ID NO: 29569 - RNA, 22 nt, Homo sapiens
gcggucccgcggcgccccgccu

SEQ ID NO: 29570 - RNA, 24 nt, Homo sapiens
cacccccagagccucagcucccca

SEQ ID NO: 29571 - RNA, 22 nt, Homo sapiens
cugggggcggcacaggggcuca

SEQ ID NO: 29572 - RNA, 21 nt, Homo sapiens
gagcuacagugcuucaucuca

SEQ ID NO: 29573 - RNA, 22 nt, Homo sapiens
ccagaacugaguccacagggca

SEQ ID NO: 29574 - RNA, 22 nt, Homo sapiens
acaaaguucuguagugcacuga

SEQ ID NO: 29575 - RNA, 22 nt, Homo sapiens
acaaaguucugugaugcacuga

SEQ ID NO: 29576 - RNA, 21 nt, Homo sapiens
ccaaguucugucaugcacuga

SEQ ID NO: 29577 - RNA, 23 nt, Homo sapiens
aggaacagcagcagcccgggccg

SEQ ID NO: 29578 - RNA, 22 nt, Homo sapiens
cagaagugggccgggcacaggg

SEQ ID NO: 29579 - RNA, 23 nt, Homo sapiens
cgugagcuccuggaggacaggga

SEQ ID NO: 29580 - RNA, 22 nt, Homo sapiens
acaaccagcuaagacacugcca

SEQ ID NO: 29581 - RNA, 23 nt, Homo sapiens
gcaaucagcuaacuacacugccu

SEQ ID NO: 29582 - RNA, 23 nt, Homo sapiens
acacucaaaagauggcggcacuu

SEQ ID NO: 29583 - RNA, 22 nt, Homo sapiens
accagcuaacaauacacugcca

SEQ ID NO: 29584 - RNA, 22 nt, Homo sapiens
gccagcuaacaauacacugccu

SEQ ID NO: 29585 - RNA, 19 nt, Homo sapiens
gccugcugacaccgugccu

SEQ ID NO: 29586 - RNA, 19 nt, Homo sapiens
agaaaccccagcagagaca

SEQ ID NO: 29587 - RNA, 25 nt, Homo sapiens
acggagcugucccaacaccaccccu

SEQ ID NO: 29588 - RNA, 22 nt, Homo sapiens
aagagggagacccaggcucgga

SEQ ID NO: 29589 - RNA, 24 nt, Homo sapiens
acgcgcaggccagagacccaggca

SEQ ID NO: 29590 - RNA, 22 nt, Homo sapiens
agcucagaacccagaggucuca

SEQ ID NO: 29591 - RNA, 22 nt, Homo sapiens
ucggucccucgggccagggcag

SEQ ID NO: 29592 - RNA, 20 nt, Homo sapiens
uacugcuuccacagcucccc

SEQ ID NO: 29593 - RNA, 22 nt, Homo sapiens
cuagugguccuaaacauuucac

SEQ ID NO: 29594 - RNA, 22 nt, Homo sapiens
cacucagcggccguuuccccaa

SEQ ID NO: 29595 - RNA, 22 nt, Homo sapiens
cacucagcaccaggauauuguu

SEQ ID NO: 29596 - RNA, 22 nt, Homo sapiens
uacagauggauaccgugcaauu

SEQ ID NO: 29597 - RNA, 22 nt, Homo sapiens
ccucauggaaggguuccccacu

SEQ ID NO: 29598 - RNA, 20 nt, Homo sapiens
gcaaaugguacagcuacuuu

SEQ ID NO: 29599 - RNA, 25 nt, Homo sapiens
acggagcugucccaacaccaccccu

SEQ ID NO: 29600 - RNA, 20 nt, Homo sapiens
uacugcuuccacagcucccc

SEQ ID NO: 29601 - RNA, 17 nt, Homo sapiens
gggagaggaggaggcga

SEQ ID NO: 29602 - RNA, 21 nt, Homo sapiens
agggcucaucuugguccugca

SEQ ID NO: 29603 - RNA, 24 nt, Homo sapiens
gaagucacucccaggcagcugcaa

SEQ ID NO: 29604 - RNA, 23 nt, Homo sapiens
gggagugaagacacggagccaga

SEQ ID NO: 29605 - RNA, 22 nt, Homo sapiens
ucaggaacugccuuucucucca

SEQ ID NO: 29606 - RNA, 21 nt, Homo sapiens
gaccaaucgccguccccgccg

SEQ ID NO: 29607 - RNA, 23 nt, Homo sapiens
gaaacccagcagacaauguagcu

SEQ ID NO: 29608 - RNA, 21 nt, Homo sapiens
acaggauugagggggggcccu

SEQ ID NO: 29609 - RNA, 23 nt, Homo sapiens
aaaucagaaucacaccuggggga

SEQ ID NO: 29610 - RNA, 23 nt, Homo sapiens
acacucaaaagauggcggcacuu

SEQ ID NO: 29611 - RNA, 21 nt, Homo sapiens
ccuucugacuccaaguccagu

SEQ ID NO: 29612 - RNA, 22 nt, Homo sapiens
gcugccguauaugugaugucac

SEQ ID NO: 29613 - RNA, 24 nt, Homo sapiens
acgcagagcccgaaagcccccagu

SEQ ID NO: 29614 - RNA, 22 nt, Homo sapiens
gcggucccgcggcgccccgccu

SEQ ID NO: 29615 - RNA, 17 nt, Homo sapiens
gggagaggaggaggcga

SEQ ID NO: 29616 - RNA, 18 nt, Homo sapiens
aucacauucaccucccug

SEQ ID NO: 29617 - RNA, 23 nt, Homo sapiens
gggagugaagacacggagccaga

SEQ ID NO: 29618 - RNA, 21 nt, Homo sapiens
gaccaaucgccguccccgccg

SEQ ID NO: 29619 - RNA, 22 nt, Homo sapiens
ucagaccgagacaagugcaaug

SEQ ID NO: 29620 - RNA, 22 nt, Homo sapiens
gcggucccgcggcgccccgccu

SEQ ID NO: 29621 - RNA, 20 nt, Homo sapiens
aggggccucagccuccuggu

SEQ ID NO: 29622 - RNA, 22 nt, Homo sapiens
ugcuguuagcccuagccccgca

SEQ ID NO: 29623 - RNA, 21 nt, Homo sapiens
caucaccuuccuucuccucca

SEQ ID NO: 29624 - RNA, 22 nt, Homo sapiens
uauccacuacaccccgcugccu

SEQ ID NO: 29625 - RNA, 22 nt, Homo sapiens
ggcagagagucagagcgcggau

SEQ ID NO: 29626 - RNA, 22 nt, Homo sapiens
cacaagaucggaucuacggguu

SEQ ID NO: 29627 - RNA, 22 nt, Homo sapiens
cgcaaggucgguucuacgggug

SEQ ID NO: 29628 - RNA, 22 nt, Homo sapiens
acaacuguaacuagacgguuuu

SEQ ID NO: 29629 - RNA, 22 nt, Homo sapiens
cacaaaccauuaugugcugcua

SEQ ID NO: 29630 - RNA, 22 nt, Homo sapiens
uguaaaccaugaugugcugcua

SEQ ID NO: 29631 - RNA, 22 nt, Homo sapiens
cgccaauauuuacgugcugcua

SEQ ID NO: 29632 - RNA, 21 nt, Homo sapiens
cccuccaccaugcaagggaug

SEQ ID NO: 29633 - RNA, 21 nt, Homo sapiens
gccaauauuucugugcugcua

SEQ ID NO: 29634 - RNA, 22 nt, Homo sapiens
cagacuccgguggaaugaagga

SEQ ID NO: 29635 - RNA, 22 nt, Homo sapiens
auguaugugggacgguaaacca

SEQ ID NO: 29636 - RNA, 22 nt, Homo sapiens
uucaaaacaugaauugcugcug

SEQ ID NO: 29637 - RNA, 22 nt, Homo sapiens
augggacauccuacauaugcaa

SEQ ID NO: 29638 - RNA, 21 nt, Homo sapiens
acaaaccacagugugcugcug

SEQ ID NO: 29639 - RNA, 18 nt, Homo sapiens
acccucugaaaggaagca

SEQ ID NO: 29640 - RNA, 22 nt, Homo sapiens
aaagugcuucuuaccuccagau

SEQ ID NO: 29641 - RNA, 22 nt, Homo sapiens
cucagucccaggcaaaccauaa

SEQ ID NO: 29642 - RNA, 22 nt, Homo sapiens
ccucuaguaaauaugucagcau

SEQ ID NO: 29643 - RNA, 19 nt, Homo sapiens
gccucagaggcagcugcuu

SEQ ID NO: 29644 - RNA, 23 nt, Homo sapiens
uguaggcuggggauaaaugaaua

SEQ ID NO: 29645 - RNA, 22 nt, Homo sapiens
uggugauucacaaagaaaucca

SEQ ID NO: 29646 - RNA, 22 nt, Homo sapiens
gggagaggucucccugcgcaca

SEQ ID NO: 29647 - RNA, 23 nt, Homo sapiens
aggaacagcagcagcccgggccg

SEQ ID NO: 29648 - RNA, 23 nt, Homo sapiens
aggaacagcagcagcccgggccg

SEQ ID NO: 29649 - RNA, 21 nt, Homo sapiens
acaggauugagggggggcccu

SEQ ID NO: 29650 - RNA, 23 nt, Homo sapiens
cuccagccccuccagggcuuccu

SEQ ID NO: 29651 - RNA, 20 nt, Homo sapiens
gcagcuguccgcccagacac

SEQ ID NO: 29652 - RNA, 21 nt, Homo sapiens
aguagugcuuucuacuuuaug

SEQ ID NO: 29653 - RNA, 22 nt, Homo sapiens
ucaggaacugccuuucucucca

SEQ ID NO: 29654 - RNA, 22 nt, Homo sapiens
auggcaguggaguuagugauug

SEQ ID NO: 29655 - RNA, 21 nt, Homo sapiens
ugcaggcugaucuucuucucu

SEQ ID NO: 29656 - RNA, 24 nt, Homo sapiens
acugcuggucuucagucagggcca

SEQ ID NO: 29657 - RNA, 22 nt, Homo sapiens
gcacaaaucuccagaccaccca

SEQ ID NO: 29658 - RNA, 23 nt, Homo sapiens
agggauuccugggaaaacuggac

SEQ ID NO: 29659 - RNA, 23 nt, Homo sapiens
gggagugaagacacggagccaga

SEQ ID NO: 29660 - RNA, 22 nt, Homo sapiens
agccacaaucaccuucugaucu

SEQ ID NO: 29661 - RNA, 21 nt, Homo sapiens
acaaaccacagugugcugcug

SEQ ID NO: 29662 - RNA, 22 nt, Homo sapiens
caagacacauuuggagagggac

SEQ ID NO: 29663 - RNA, 23 nt, Homo sapiens
acaacaaaaucacuagucuucca

SEQ ID NO: 29664 - RNA, 20 nt, Homo sapiens
uccccacagacccagagccg

SEQ ID NO: 29665 - RNA, 22 nt, Homo sapiens
aagcgguuuaccaucccacaua

SEQ ID NO: 29666 - RNA, 22 nt, Homo sapiens
ucgcccucucaacccagcuuuu

SEQ ID NO: 29667 - RNA, 22 nt, Homo sapiens
uugcccucucaacccagcuuuu

SEQ ID NO: 29668 - RNA, 20 nt, Homo sapiens
acccucucaacccagcuuuu

SEQ ID NO: 29669 - RNA, 19 nt, Homo sapiens
uccucucaacccagcuuuu

SEQ ID NO: 29670 - RNA, 22 nt, Homo sapiens
uauucaggaacauauugcaaaa

SEQ ID NO: 29671 - RNA, 22 nt, Homo sapiens
uauucaggaacauauugcaaaa

SEQ ID NO: 29672 - RNA, 22 nt, Homo sapiens
aucgggaggggacugagccuga

SEQ ID NO: 29673 - RNA, 23 nt, Homo sapiens
gaaagugcccucaaggcugagug

SEQ ID NO: 29674 - RNA, 22 nt, Homo sapiens
acaguggucaucgagugacaca

SEQ ID NO: 29675 - RNA, 23 nt, Homo sapiens
ucauacagcuagauaaccaaaga

SEQ ID NO: 29676 - RNA, 23 nt, Homo sapiens
gucacaucccucccaagacccuc

SEQ ID NO: 29677 - RNA, 22 nt, Homo sapiens
agccaagcucagacggauccga

SEQ ID NO: 29678 - RNA, 22 nt, Homo sapiens
agccaagcucagacggauccga

SEQ ID NO: 29679 - RNA, 17 nt, Homo sapiens
gggagaggaggaggcga

SEQ ID NO: 29680 - RNA, 22 nt, Homo sapiens
ucccucacacagaauuccagaa

SEQ ID NO: 29681 - RNA, 22 nt, Homo sapiens
uauggaugcaaaaugaucccaa

SEQ ID NO: 29682 - RNA, 19 nt, Homo sapiens
gccugcugacaccgugccu

SEQ ID NO: 29683 - RNA, 21 nt, Homo sapiens
guuauagaucuggauuugaac

SEQ ID NO: 29684 - RNA, 23 nt, Homo sapiens
aaccaagaccccggagaucccag

SEQ ID NO: 29685 - RNA, 21 nt, Homo sapiens
gagcugcauccuggcuccggg

SEQ ID NO: 29686 - RNA, 24 nt, Homo sapiens
acugcuggucuucagucagggcca

SEQ ID NO: 29687 - RNA, 23 nt, Homo sapiens
gggagugaagacacggagccaga

SEQ ID NO: 29688 - RNA, 22 nt, Homo sapiens
cacugguacaaggguugggaga

SEQ ID NO: 29689 - RNA, 23 nt, Homo sapiens
aggaacagcagcagcccgggccg

SEQ ID NO: 29690 - RNA, 22 nt, Homo sapiens
ucaggaacugccuuucucucca

SEQ ID NO: 29691 - RNA, 22 nt, Homo sapiens
agcugaguguaggauguuuaca

SEQ ID NO: 29692 - RNA, 22 nt, Homo sapiens
acaaccagcuaagacacugcca

SEQ ID NO: 29693 - RNA, 23 nt, Homo sapiens
gcaaucagcuaacuacacugccu

SEQ ID NO: 29694 - RNA, 22 nt, Homo sapiens
accagcuaacaauacacugcca

SEQ ID NO: 29695 - RNA, 22 nt, Homo sapiens
gccagcuaacaauacacugccu

SEQ ID NO: 29696 - RNA, 22 nt, Homo sapiens
aggaaaccagcaaguguugacg

SEQ ID NO: 29697 - RNA, 22 nt, Homo sapiens
ccucaggcacggccgggccacc

SEQ ID NO: 29698 - RNA, 23 nt, Homo sapiens
cuccagccccuccagggcuuccu

SEQ ID NO: 29699 - RNA, 22 nt, Homo sapiens
gaggcucagaauggcucaggag

SEQ ID NO: 29700 - RNA, 21 nt, Homo sapiens
cugggggacggagcagaagga

SEQ ID NO: 29701 - RNA, 17 nt, Homo sapiens
gggagaggaggaggcga

SEQ ID NO: 29702 - RNA, 22 nt, Homo sapiens
cgggacguccagacucaacucu

SEQ ID NO: 29703 - RNA, 24 nt, Homo sapiens
ugggagaaccucccugcuucugcu

SEQ ID NO: 29704 - RNA, 18 nt, Homo sapiens
acccucugaaaggaagca

SEQ ID NO: 29705 - RNA, 22 nt, Homo sapiens
aaagugcuucuuaccuccagau

SEQ ID NO: 29706 - RNA, 22 nt, Homo sapiens
cugcucaaacccuccaaugacu

SEQ ID NO: 29707 - RNA, 22 nt, Homo sapiens
uggggacccucccugaaccaag

SEQ ID NO: 29708 - RNA, 22 nt, Homo sapiens
ggcagagagucagagcgcggau

SEQ ID NO: 29709 - RNA, 21 nt, Homo sapiens
ccccucccagccucccugcca

SEQ ID NO: 29710 - RNA, 22 nt, Homo sapiens
cagcugguugaaggggaccaaa

SEQ ID NO: 29711 - RNA, 22 nt, Homo sapiens
cacaaaccauuaugugcugcua

SEQ ID NO: 29712 - RNA, 22 nt, Homo sapiens
uguaaaccaugaugugcugcua

SEQ ID NO: 29713 - RNA, 22 nt, Homo sapiens
cgccaauauuuacgugcugcua

SEQ ID NO: 29714 - RNA, 24 nt, Homo sapiens
agugugaguucuaccauugccaaa

SEQ ID NO: 29715 - RNA, 21 nt, Homo sapiens
gccaauauuucugugcugcua

SEQ ID NO: 29716 - RNA, 21 nt, Homo sapiens
agcuaugccagcaucuugccu

SEQ ID NO: 29717 - RNA, 22 nt, Homo sapiens
ucgcccucucaacccagcuuuu

SEQ ID NO: 29718 - RNA, 22 nt, Homo sapiens
uugcccucucaacccagcuuuu

SEQ ID NO: 29719 - RNA, 20 nt, Homo sapiens
acccucucaacccagcuuuu

SEQ ID NO: 29720 - RNA, 19 nt, Homo sapiens
uccucucaacccagcuuuu

SEQ ID NO: 29721 - RNA, 22 nt, Homo sapiens
aaucagucucauugcuuuauaa

SEQ ID NO: 29722 - RNA, 22 nt, Homo sapiens
cacuuagcagguuguauuauau

SEQ ID NO: 29723 - RNA, 22 nt, Homo sapiens
uucaaaacaugaauugcugcug

SEQ ID NO: 29724 - RNA, 21 nt, Homo sapiens
acaaaccacagugugcugcug

SEQ ID NO: 29725 - RNA, 22 nt, Homo sapiens
auaaaugacaccuccuugugaa

SEQ ID NO: 29726 - RNA, 22 nt, Homo sapiens
gcacacaauaaauguuugcuga

SEQ ID NO: 29727 - RNA, 21 nt, Homo sapiens
guaaugggaccuuccucuuug

SEQ ID NO: 29728 - RNA, 21 nt, Homo sapiens
ggggagcgggggcccugccuu

SEQ ID NO: 29729 - RNA, 21 nt, Homo sapiens
cuggaggacggcaacagucag

SEQ ID NO: 29730 - RNA, 21 nt, Homo sapiens
cggggugcacgggcggagggc

SEQ ID NO: 29731 - RNA, 23 nt, Homo sapiens
gggagugaagacacggagccaga

SEQ ID NO: 29732 - RNA, 21 nt, Homo sapiens
gaccaaucgccguccccgccg

SEQ ID NO: 29733 - RNA, 23 nt, Homo sapiens
aaaucagaaucacaccuggggga

SEQ ID NO: 29734 - RNA, 23 nt, Homo sapiens
aaagucucgcucucugccccuca

SEQ ID NO: 29735 - RNA, 22 nt, Homo sapiens
uccagcaaagggaagcgcuuuc

SEQ ID NO: 29736 - RNA, 22 nt, Homo sapiens
accucuaaaggggagcgcuuug

SEQ ID NO: 29737 - RNA, 23 nt, Homo sapiens
acacucuaaagagaagcgcuuug

SEQ ID NO: 29738 - RNA, 21 nt, Homo sapiens
gcuccaaagggaagcgcuuug

SEQ ID NO: 29739 - RNA, 21 nt, Homo sapiens
cacucugaagggaagcgcuuu

SEQ ID NO: 29740 - RNA, 21 nt, Homo sapiens
ccucuaaagagaagcgcuuuc

SEQ ID NO: 29741 - RNA, 24 nt, Homo sapiens
acgcagagcccgaaagcccccagu

SEQ ID NO: 29742 - RNA, 24 nt, Homo sapiens
acgcgcaggccagagacccaggca

SEQ ID NO: 29743 - RNA, 22 nt, Homo sapiens
gcggucccgcggcgccccgccu

SEQ ID NO: 29744 - RNA, 23 nt, Homo sapiens
cacugugggcccucuccgcacca

SEQ ID NO: 29745 - RNA, 22 nt, Homo sapiens
ugcuguuagcccuagccccgca

SEQ ID NO: 29746 - RNA, 22 nt, Homo sapiens
ugcuguuagcccuagccccgca

SEQ ID NO: 29747 - RNA, 21 nt, Homo sapiens
cacaaccucaguguuuccagg

SEQ ID NO: 29748 - RNA, 22 nt, Homo sapiens
caaacaccauugucacacucca

SEQ ID NO: 29749 - RNA, 17 nt, Homo sapiens
ggguggcagcgguggga

SEQ ID NO: 29750 - RNA, 21 nt, Homo sapiens
gaccaaucgccguccccgccg

SEQ ID NO: 29751 - RNA, 22 nt, Homo sapiens
aguccagauucugugcccacca

SEQ ID NO: 29752 - RNA, 22 nt, Homo sapiens
gcacauguucugcggcccacca

SEQ ID NO: 29753 - RNA, 22 nt, Homo sapiens
gcggucccgcggcgccccgccu

SEQ ID NO: 29754 - RNA, 21 nt, Homo sapiens
caucaccuuccuucuccucca

SEQ ID NO: 29755 - RNA, 21 nt, Homo sapiens
gaccaaucgccguccccgccg

SEQ ID NO: 29756 - RNA, 23 nt, Homo sapiens
aaagucucgcucucugccccuca

SEQ ID NO: 29757 - RNA, 22 nt, Homo sapiens
gcggucccgcggcgccccgccu

SEQ ID NO: 29758 - RNA, 24 nt, Homo sapiens
cacccccagagccucagcucccca

SEQ ID NO: 29759 - RNA, 22 nt, Homo sapiens
aacuauacaaccuacuaccuca

SEQ ID NO: 29760 - RNA, 22 nt, Homo sapiens
aaccacacaaccuacuaccuca

SEQ ID NO: 29761 - RNA, 19 nt, Homo sapiens
agaaaccccagcagagaca

SEQ ID NO: 29762 - RNA, 22 nt, Homo sapiens
gaaaagccagggucuguauaga

SEQ ID NO: 29763 - RNA, 22 nt, Homo sapiens
agagagagucugcccuuguaua

SEQ ID NO: 29764 - RNA, 22 nt, Homo sapiens
acagagagcuugcccuuguaua

SEQ ID NO: 29765 - RNA, 19 nt, Homo sapiens
gcuccuguccaacuggcuc

SEQ ID NO: 29766 - RNA, 22 nt, Homo sapiens
caagacacauuuggagagggac

SEQ ID NO: 29767 - RNA, 22 nt, Homo sapiens
cuaccugagcuagcauacaagu

SEQ ID NO: 29768 - RNA, 17 nt, Homo sapiens
uggaggccccagcgaga

SEQ ID NO: 29769 - RNA, 22 nt, Homo sapiens
ucuacccagaaaggagccagug

SEQ ID NO: 29770 - RNA, 20 nt, Homo sapiens
uacugcuuccacagcucccc

SEQ ID NO: 29771 - RNA, 22 nt, Homo sapiens
ccccccacugggccguacccac

SEQ ID NO: 29772 - RNA, 18 nt, Homo sapiens
aucacauucaccucccug

SEQ ID NO: 29773 - RNA, 22 nt, Homo sapiens
acugccugucugugccugcugu

SEQ ID NO: 29774 - RNA, 22 nt, Homo sapiens
acggaagggcagagagggccag

SEQ ID NO: 29775 - RNA, 22 nt, Homo sapiens
accagguuccaccccagcaggc

SEQ ID NO: 29776 - RNA, 22 nt, Homo sapiens
aucgggaggggacugagccuga

SEQ ID NO: 29777 - RNA, 22 nt, Homo sapiens
aggaaaccagcaaguguugacg

SEQ ID NO: 29778 - RNA, 21 nt, Homo sapiens
cccgaggagccgggcaggcuu

SEQ ID NO: 29779 - RNA, 21 nt, Homo sapiens
caucaccuuccuucuccucca

SEQ ID NO: 29780 - RNA, 22 nt, Homo sapiens
ccaucuuuaccagacaguguua

SEQ ID NO: 29781 - RNA, 21 nt, Homo sapiens
cagcgaaacaggcaaacggag

SEQ ID NO: 29782 - RNA, 22 nt, Homo sapiens
acaucguuaccagacaguguua

SEQ ID NO: 29783 - RNA, 22 nt, Homo sapiens
cuuccagucgaggauguuuaca

SEQ ID NO: 29784 - RNA, 22 nt, Homo sapiens
agcugaguguaggauguuuaca

SEQ ID NO: 29785 - RNA, 23 nt, Homo sapiens
gcugagaguguaggauguuuaca

SEQ ID NO: 29786 - RNA, 22 nt, Homo sapiens
cuuccagucggggauguuuaca

SEQ ID NO: 29787 - RNA, 22 nt, Homo sapiens
cuuccagucaaggauguuuaca

SEQ ID NO: 29788 - RNA, 23 nt, Homo sapiens
cggcucugucgucgaggcgcuca

SEQ ID NO: 29789 - RNA, 21 nt, Homo sapiens
aagggucaguaagcacccgcg

SEQ ID NO: 29790 - RNA, 23 nt, Homo sapiens
gggagugaagacacggagccaga

SEQ ID NO: 29791 - RNA, 22 nt, Homo sapiens
ucaggaacugccuuucucucca

SEQ ID NO: 29792 - RNA, 21 nt, Homo sapiens
gcggaacuuagccacugugaa

SEQ ID NO: 29793 - RNA, 23 nt, Homo sapiens
cggcucugucgucgaggcgcuca

SEQ ID NO: 29794 - RNA, 23 nt, Homo sapiens
aaagucucgcucucugccccuca

SEQ ID NO: 29795 - RNA, 22 nt, Homo sapiens
aaagugcuucuuaccuccagau

SEQ ID NO: 29796 - RNA, 23 nt, Homo sapiens
acacucuaaagagaagcgcuuug

SEQ ID NO: 29797 - RNA, 21 nt, Homo sapiens
agaaaguacuucccucuggag

SEQ ID NO: 29798 - RNA, 21 nt, Homo sapiens
agaaagugcaucccucuggag

SEQ ID NO: 29799 - RNA, 21 nt, Homo sapiens
caucaccuuccuucuccucca

SEQ ID NO: 29800 - RNA, 22 nt, Homo sapiens
ggaggccgggacgagugcaaua

SEQ ID NO: 29801 - RNA, 26 nt, Homo sapiens
uuucagaauuugcugccaucaucauc

SEQ ID NO: 29802 - RNA, 18 nt, Homo sapiens
gaaaugagggccagcuga

SEQ ID NO: 29803 - RNA, 22 nt, Homo sapiens
cagaagugggccgggcacaggg

SEQ ID NO: 29804 - RNA, 23 nt, Homo sapiens
ucaguuuugcauagauuugcaca

SEQ ID NO: 29805 - RNA, 22 nt, Homo sapiens
cacucagcaccaggauauuguu

SEQ ID NO: 29806 - RNA, 22 nt, Homo sapiens
aacuaugcaaccuacuaccucu

SEQ ID NO: 29807 - RNA, 21 nt, Homo sapiens
caugcacaugcacacauacau

SEQ ID NO: 29808 - RNA, 22 nt, Homo sapiens
uaaccgauuucagauggugcua

SEQ ID NO: 29809 - RNA, 22 nt, Homo sapiens
accagcuaacaauacacugcca

SEQ ID NO: 29810 - RNA, 22 nt, Homo sapiens
gcacacaauaaauguuugcuga

SEQ ID NO: 29811 - RNA, 22 nt, Homo sapiens
gcaaaaguaauugagauuuuug

SEQ ID NO: 29812 - RNA, 22 nt, Homo sapiens
aaaguaacugcaguuuuugcua

SEQ ID NO: 29813 - RNA, 23 nt, Homo sapiens
guucuguccuggaagaacauacu

SEQ ID NO: 29814 - RNA, 22 nt, Homo sapiens
gccaccuucaaaugggaagucu

SEQ ID NO: 29815 - RNA, 21 nt, Homo sapiens
caucaccuuccuucuccucca

SEQ ID NO: 29816 - RNA, 17 nt, Homo sapiens
gggagaggaggaggcga

SEQ ID NO: 29817 - RNA, 22 nt, Homo sapiens
cacaucucacuguagccucaaa

SEQ ID NO: 29818 - RNA, 21 nt, Homo sapiens
gaccaaucgccguccccgccg

SEQ ID NO: 29819 - RNA, 22 nt, Homo sapiens
cuguuccugcugaacugagcca

SEQ ID NO: 29820 - RNA, 22 nt, Homo sapiens
aucgggaggggacugagccuga

SEQ ID NO: 29821 - RNA, 23 nt, Homo sapiens
acagaaagugcuucccucaagag

SEQ ID NO: 29822 - RNA, 19 nt, Homo sapiens
gcuccuguccaacuggcuc

SEQ ID NO: 29823 - RNA, 22 nt, Homo sapiens
gauccgagcaccggggaccccc

SEQ ID NO: 29824 - RNA, 23 nt, Homo sapiens
ggacauuguuucagugcccaagu

SEQ ID NO: 29825 - RNA, 22 nt, Homo sapiens
gcggucccgcggcgccccgccu

SEQ ID NO: 29826 - RNA, 22 nt, Homo sapiens
ucuacccagaaaggagccagug

SEQ ID NO: 29827 - RNA, 22 nt, Homo sapiens
ugaagaagggggggaagggcgu

SEQ ID NO: 29828 - RNA, 22 nt, Homo sapiens
ggagauggagccagggcccuaa

SEQ ID NO: 29829 - RNA, 21 nt, Homo sapiens
ugcaaacccugcaugugggag

SEQ ID NO: 29830 - RNA, 22 nt, Homo sapiens
ugagccacugugccuggccuga

SEQ ID NO: 29831 - RNA, 22 nt, Homo sapiens
ugcaagccuugggugugggagg

SEQ ID NO: 29832 - RNA, 22 nt, Homo sapiens
aagagggagacccaggcucgga

SEQ ID NO: 29833 - RNA, 21 nt, Homo sapiens
aucugcacugucagcacuuua

SEQ ID NO: 29834 - RNA, 24 nt, Homo sapiens
ugggagaaccucccugcuucugcu

SEQ ID NO: 29835 - RNA, 22 nt, Homo sapiens
cacucagcaccaggauauuguu

SEQ ID NO: 29836 - RNA, 21 nt, Homo sapiens
acuccaaagggaagcgccuuc

SEQ ID NO: 29837 - RNA, 22 nt, Homo sapiens
cgcucuaaagggaagcgccuuc

SEQ ID NO: 29838 - RNA, 22 nt, Homo sapiens
gaacuugcuaaaaaugcagaau

SEQ ID NO: 29839 - RNA, 22 nt, Homo sapiens
gcugaggcuguggggcuggagu

SEQ ID NO: 29840 - RNA, 21 nt, Homo sapiens
acaaugguuguccgauauuaa

SEQ ID NO: 29841 - RNA, 22 nt, Homo sapiens
ggcucccaagaaccucaccugu

SEQ ID NO: 29842 - RNA, 22 nt, Homo sapiens
cagaaagugcuucccucuagag

SEQ ID NO: 29843 - RNA, 23 nt, Homo sapiens
cugcagaacuguucccgcugcua

SEQ ID NO: 29844 - RNA, 21 nt, Homo sapiens
uugucuaaccagucaccuguu

SEQ ID NO: 29845 - RNA, 23 nt, Homo sapiens
acagcgcucgcaaccgcagcgau

SEQ ID NO: 29846 - RNA, 24 nt, Homo sapiens
acgcgcaggccagagacccaggca

SEQ ID NO: 29847 - RNA, 22 nt, Homo sapiens
ccucaggcacggccgggccacc

SEQ ID NO: 29848 - RNA, 17 nt, Homo sapiens
uggaggccccagcgaga

SEQ ID NO: 29849 - RNA, 22 nt, Homo sapiens
cacauggccaaaacagagaaga

SEQ ID NO: 29850 - RNA, 22 nt, Homo sapiens
cacgaccgacgccacgccgagu

SEQ ID NO: 29851 - RNA, 23 nt, Homo sapiens
gggagugaagacacggagccaga

SEQ ID NO: 29852 - RNA, 18 nt, Homo sapiens
auucaaucuacugccuca

SEQ ID NO: 29853 - RNA, 21 nt, Homo sapiens
gaccaaucgccguccccgccg

SEQ ID NO: 29854 - RNA, 22 nt, Homo sapiens
aaagagguuaaccagguguguu

SEQ ID NO: 29855 - RNA, 22 nt, Homo sapiens
ugaauccuugaauagguguguu

SEQ ID NO: 29856 - RNA, 22 nt, Homo sapiens
aagagggagacccaggcucgga

SEQ ID NO: 29857 - RNA, 22 nt, Homo sapiens
gcggucccgcggcgccccgccu

SEQ ID NO: 29858 - RNA, 24 nt, Homo sapiens
cacccccagagccucagcucccca

SEQ ID NO: 29859 - RNA, 21 nt, Homo sapiens
ccccucccagccucccugcca

SEQ ID NO: 29860 - RNA, 22 nt, Homo sapiens
cggugagcacccggccccugcg

SEQ ID NO: 29861 - RNA, 22 nt, Homo sapiens
agcgggacuuugagggccaguu

SEQ ID NO: 29862 - RNA, 22 nt, Homo sapiens
gcuggguggagaagguggugaa

SEQ ID NO: 29863 - RNA, 21 nt, Homo sapiens
acaggauugagggggggcccu

SEQ ID NO: 29864 - RNA, 22 nt, Homo sapiens
gaauucaucacggccagccucu

SEQ ID NO: 29865 - RNA, 19 nt, Homo sapiens
guccugaauuccgcagccu

SEQ ID NO: 29866 - RNA, 22 nt, Homo sapiens
cggugagcacccggccccugcg

SEQ ID NO: 29867 - RNA, 23 nt, Homo sapiens
cagcugcuuuugggauuccguug

SEQ ID NO: 29868 - RNA, 22 nt, Homo sapiens
gaauucaucacggccagccucu

SEQ ID NO: 29869 - RNA, 23 nt, Homo sapiens
cugcagaacuguucccgcugcua

SEQ ID NO: 29870 - RNA, 23 nt, Homo sapiens
gaaagugcuucuuuccucgagaa

SEQ ID NO: 29871 - RNA, 24 nt, Homo sapiens
acgcgcaggccagagacccaggca

SEQ ID NO: 29872 - RNA, 22 nt, Homo sapiens
uggugauucacaaagaaaucca

SEQ ID NO: 29873 - RNA, 23 nt, Homo sapiens
cuaccugcacuguaagcacuuuu

SEQ ID NO: 29874 - RNA, 21 nt, Homo sapiens
aucugcacugucagcacuuua

SEQ ID NO: 29875 - RNA, 22 nt, Homo sapiens
aggucucacuuuguugcccaga

SEQ ID NO: 29876 - RNA, 23 nt, Homo sapiens
cuaccugcacuguaagcacuuug

SEQ ID NO: 29877 - RNA, 18 nt, Homo sapiens
auucaaucuacugccuca

SEQ ID NO: 29878 - RNA, 23 nt, Homo sapiens
cuaccugcacuauaagcacuuua

SEQ ID NO: 29879 - RNA, 23 nt, Homo sapiens
cuaccugcacuaugagcacuuug

SEQ ID NO: 29880 - RNA, 22 nt, Homo sapiens
agucuucacaacagcccugugu

SEQ ID NO: 29881 - RNA, 22 nt, Homo sapiens
agcugaguguaggauguuuaca

SEQ ID NO: 29882 - RNA, 23 nt, Homo sapiens
aagaaucuugucccgcagguccu

SEQ ID NO: 29883 - RNA, 22 nt, Homo sapiens
aggaaaccagcaaguguugacg

SEQ ID NO: 29884 - RNA, 22 nt, Homo sapiens
cacucuaaagggaggcacuuug

SEQ ID NO: 29885 - RNA, 24 nt, Homo sapiens
acacucuaaagggaagcacuuugu

SEQ ID NO: 29886 - RNA, 22 nt, Homo sapiens
acucuaaagggaagcacuuugu

SEQ ID NO: 29887 - RNA, 23 nt, Homo sapiens
acagaaagugcuucccucaagag

SEQ ID NO: 29888 - RNA, 22 nt, Homo sapiens
ugcaagccuugggugugggagg

SEQ ID NO: 29889 - RNA, 21 nt, Homo sapiens
guaaugggaccuuccucuuug

SEQ ID NO: 29890 - RNA, 25 nt, Homo sapiens
aaggagcucagaagcccugcccagc

SEQ ID NO: 29891 - RNA, 21 nt, Homo sapiens
guccugagagcgcugccuccu

SEQ ID NO: 29892 - RNA, 21 nt, Homo sapiens
cugcugggccacaacguggga

SEQ ID NO: 29893 - RNA, 23 nt, Homo sapiens
cuaccugcacgaacagcacuuug

SEQ ID NO: 29894 - RNA, 23 nt, Homo sapiens
aggaacagcagcagcccgggccg

SEQ ID NO: 29895 - RNA, 21 nt, Homo sapiens
gaccaaucgccguccccgccg

SEQ ID NO: 29896 - RNA, 21 nt, Homo sapiens
acaggauugagggggggcccu

SEQ ID NO: 29897 - RNA, 20 nt, Homo sapiens
cuggaggaagggcccagagg

SEQ ID NO: 29898 - RNA, 22 nt, Homo sapiens
gccuaagacacaggcccagaga

SEQ ID NO: 29899 - RNA, 21 nt, Homo sapiens
cacucugaagggaagcgcuuu

SEQ ID NO: 29900 - RNA, 22 nt, Homo sapiens
gccaccuucaaaugggaagucu

SEQ ID NO: 29901 - RNA, 21 nt, Homo sapiens
ggacuauagaacuuucccccu

SEQ ID NO: 29902 - RNA, 22 nt, Homo sapiens
gcggucccgcggcgccccgccu

SEQ ID NO: 29903 - RNA, 22 nt, Homo sapiens
ugcuguuagcccuagccccgca

SEQ ID NO: 29904 - RNA, 21 nt, Homo sapiens
caucaccuuccuucuccucca

SEQ ID NO: 29905 - RNA, 20 nt, Homo sapiens
cucaaagcaaacccugcaga

SEQ ID NO: 29906 - RNA, 18 nt, Homo sapiens
ugguggcagaggugggau

SEQ ID NO: 29907 - RNA, 22 nt, Homo sapiens
gacucgaaccacugauccagca

SEQ ID NO: 29908 - RNA, 22 nt, Homo sapiens
acugccugucugugccugcugu

SEQ ID NO: 29909 - RNA, 21 nt, Homo sapiens
ggaaaucccuggcaaugugau

SEQ ID NO: 29910 - RNA, 21 nt, Homo sapiens
gguaaucccuggcaaugugau

SEQ ID NO: 29911 - RNA, 22 nt, Homo sapiens
gcgaacgcgccacggaccaccu

SEQ ID NO: 29912 - RNA, 23 nt, Homo sapiens
aaaucagaaucacaccuggggga

SEQ ID NO: 29913 - RNA, 22 nt, Homo sapiens
accagguuccaccccagcaggc

SEQ ID NO: 29914 - RNA, 23 nt, Homo sapiens
ccacccaaugaccuacuccaaga

SEQ ID NO: 29915 - RNA, 23 nt, Homo sapiens
ccacccaaugaccuacuccaaga

SEQ ID NO: 29916 - RNA, 25 nt, Homo sapiens
acggagcugucccaacaccaccccu

SEQ ID NO: 29917 - RNA, 24 nt, Homo sapiens
acgcagagcccgaaagcccccagu

SEQ ID NO: 29918 - RNA, 22 nt, Homo sapiens
augcccuuuuaacauugcacug

SEQ ID NO: 29919 - RNA, 22 nt, Homo sapiens
augcccuuucaucauugcacug

SEQ ID NO: 29920 - RNA, 24 nt, Homo sapiens
gaaagugcauagaauucugucugg

SEQ ID NO: 29921 - RNA, 22 nt, Homo sapiens
cacucagcggccguuuccccaa

SEQ ID NO: 29922 - RNA, 22 nt, Homo sapiens
cucaauagacugugagcuccuu

SEQ ID NO: 29923 - RNA, 23 nt, Homo sapiens
gcuuugacaauacuauugcacug

SEQ ID NO: 29924 - RNA, 23 nt, Homo sapiens
gcuuugacaauaucauugcacug

SEQ ID NO: 29925 - RNA, 23 nt, Homo sapiens
acgggugcgauuucugugugaga

SEQ ID NO: 29926 - RNA, 22 nt, Homo sapiens
acaaaaguugccuuugugugau

SEQ ID NO: 29927 - RNA, 21 nt, Homo sapiens
ccuucugacuccaaguccagu

SEQ ID NO: 29928 - RNA, 23 nt, Homo sapiens
acccuauaagcaauauugcacua

SEQ ID NO: 29929 - RNA, 21 nt, Homo sapiens
aagacgggaggagaggaguga

SEQ ID NO: 29930 - RNA, 22 nt, Homo sapiens
ccucauggaaggguuccccacu

SEQ ID NO: 29931 - RNA, 22 nt, Homo sapiens
acacucuaaaaggaugcacuuu

SEQ ID NO: 29932 - RNA, 22 nt, Homo sapiens
aaccucuaaaaggaugcacuuu

SEQ ID NO: 29933 - RNA, 22 nt, Homo sapiens
auccucuaaaaagaugcacuuu

SEQ ID NO: 29934 - RNA, 19 nt, Homo sapiens
auuuugguacagcagcuca

SEQ ID NO: 29935 - RNA, 19 nt, Homo sapiens
guccugaauuccgcagccu

SEQ ID NO: 29936 - RNA, 19 nt, Homo sapiens
aagacauuuucagacagcu

SEQ ID NO: 29937 - RNA, 19 nt, Homo sapiens
ucccacaggaagcagacac

SEQ ID NO: 29938 - RNA, 19 nt, Homo sapiens
gccucagaggcagcugcuu

SEQ ID NO: 29939 - RNA, 23 nt, Homo sapiens
cccagcuagauuguaagcuccuu

SEQ ID NO: 29940 - RNA, 20 nt, Homo sapiens
cucaaagcaaacccugcaga

SEQ ID NO: 29941 - RNA, 17 nt, Homo sapiens
gggagaggaggaggcga

SEQ ID NO: 29942 - RNA, 23 nt, Homo sapiens
cuaccugcacuguaagcacuuug

SEQ ID NO: 29943 - RNA, 22 nt, Homo sapiens
cggugagcacccggccccugcg

SEQ ID NO: 29944 - RNA, 22 nt, Homo sapiens
uccacauggaguugcuguuaca

SEQ ID NO: 29945 - RNA, 22 nt, Homo sapiens
cuguuccugcugaacugagcca

SEQ ID NO: 29946 - RNA, 23 nt, Homo sapiens
aaaucagaaucacaccuggggga

SEQ ID NO: 29947 - RNA, 22 nt, Homo sapiens
caugauugccacgucugcagua

SEQ ID NO: 29948 - RNA, 21 nt, Homo sapiens
ugauugccacugucugcagua

SEQ ID NO: 29949 - RNA, 19 nt, Homo sapiens
guccugaauuccgcagccu

SEQ ID NO: 29950 - RNA, 24 nt, Homo sapiens
acgcagagcccgaaagcccccagu

SEQ ID NO: 29951 - RNA, 21 nt, Homo sapiens
cacaacccuaguggcgccauu

SEQ ID NO: 29952 - RNA, 20 nt, Homo sapiens
aggggccucagccuccuggu

SEQ ID NO: 29953 - RNA, 17 nt, Homo sapiens
gggagaggaggaggcga

SEQ ID NO: 29954 - RNA, 21 nt, Homo sapiens
gaccaaucgccguccccgccg

SEQ ID NO: 29955 - RNA, 22 nt, Homo sapiens
ucagaccgagacaagugcaaug

SEQ ID NO: 29956 - RNA, 22 nt, Homo sapiens
caacaaaaucacugaugcugga

SEQ ID NO: 29957 - RNA, 21 nt, Homo sapiens
acuccaaagggaagcgccuuc

SEQ ID NO: 29958 - RNA, 22 nt, Homo sapiens
cgcucuaaagggaagcgccuuc

SEQ ID NO: 29959 - RNA, 19 nt, Homo sapiens
guugggaucacaggcgccc

SEQ ID NO: 29960 - RNA, 21 nt, Homo sapiens
cccgaggagccgggcaggcuu

SEQ ID NO: 29961 - RNA, 25 nt, Homo sapiens
accaacggaccuacuucccuccgcc

SEQ ID NO: 29962 - RNA, 22 nt, Homo sapiens
gcggucccgcggcgccccgccu

SEQ ID NO: 29963 - RNA, 22 nt, Homo sapiens
ccucaggcacggccgggccacc

SEQ ID NO: 29964 - RNA, 22 nt, Homo sapiens
ugcuguuagcccuagccccgca

SEQ ID NO: 29965 - RNA, 23 nt, Homo sapiens
gaacagguagucugaacacuggg

SEQ ID NO: 29966 - RNA, 23 nt, Homo sapiens
gaacagauagucuaaacacuggg

SEQ ID NO: 29967 - RNA, 22 nt, Homo sapiens
ucagaccgagacaagugcaaug

SEQ ID NO: 29968 - RNA, 22 nt, Homo sapiens
uacagauggauaccgugcaauu

SEQ ID NO: 29969 - RNA, 22 nt, Homo sapiens
auaaggauuuuuaggggcauua

SEQ ID NO: 29970 - RNA, 22 nt, Homo sapiens
cagcauggaguccuccagguug

SEQ ID NO: 29971 - RNA, 22 nt, Homo sapiens
acaaaagcaacugagguucuug

SEQ ID NO: 29972 - RNA, 19 nt, Homo sapiens
gcuccuguccaacuggcuc

SEQ ID NO: 29973 - RNA, 24 nt, Homo sapiens
acugggcacaaacauguccagguc

SEQ ID NO: 29974 - RNA, 21 nt, Homo sapiens
gaaggaagugagugcagccac

SEQ ID NO: 29975 - RNA, 22 nt, Homo sapiens
ucuacccagaaaggagccagug

SEQ ID NO: 29976 - RNA, 23 nt, Homo sapiens
cacaaauucgguucuacagggua

SEQ ID NO: 29977 - RNA, 21 nt, Homo sapiens
ggucagaacccaucauucacu

SEQ ID NO: 29978 - RNA, 20 nt, Homo sapiens
ugucuccacagggcucuuua

SEQ ID NO: 29979 - RNA, 22 nt, Homo sapiens
augcccuuucaucauugcacug

SEQ ID NO: 29980 - RNA, 23 nt, Homo sapiens
acucaccgacagcguugaauguu

SEQ ID NO: 29981 - RNA, 23 nt, Homo sapiens
acccaccgacagcaaugaauguu

SEQ ID NO: 29982 - RNA, 22 nt, Homo sapiens
acucaccgacagguugaauguu

SEQ ID NO: 29983 - RNA, 23 nt, Homo sapiens
acccaccgacaacaaugaauguu

SEQ ID NO: 29984 - RNA, 22 nt, Homo sapiens
cggugagcacccggccccugcg

SEQ ID NO: 29985 - RNA, 22 nt, Homo sapiens
acugccugucugugccugcugu

SEQ ID NO: 29986 - RNA, 22 nt, Homo sapiens
ucaccauugcuaaagugcaauu

SEQ ID NO: 29987 - RNA, 22 nt, Homo sapiens
accagguuccaccccagcaggc

SEQ ID NO: 29988 - RNA, 21 nt, Homo sapiens
guaaugggaccuuccucuuug

SEQ ID NO: 29989 - RNA, 22 nt, Homo sapiens
caagacacauuuggagagggac

SEQ ID NO: 29990 - RNA, 19 nt, Homo sapiens
cagcaucagcagcaucauc

SEQ ID NO: 29991 - RNA, 22 nt, Homo sapiens
agaaaaugccccucaguuuuga

SEQ ID NO: 29992 - RNA, 23 nt, Homo sapiens
ucaguuuugcauagauuugcaca

SEQ ID NO: 29993 - RNA, 22 nt, Homo sapiens
cacucagcaccaggauauuguu

SEQ ID NO: 29994 - RNA, 22 nt, Homo sapiens
aacuaugcaaccuacuaccucu

SEQ ID NO: 29995 - RNA, 22 nt, Homo sapiens
cacucagcggccguuuccccaa

SEQ ID NO: 29996 - RNA, 23 nt, Homo sapiens
ugcgaacucaccacggacaaccu

SEQ ID NO: 29997 - RNA, 22 nt, Homo sapiens
cuacccacagacguaccaauca

SEQ ID NO: 29998 - RNA, 22 nt, Homo sapiens
gacaaaacccgcaaauacuuuu

SEQ ID NO: 29999 - RNA, 22 nt, Homo sapiens
gcaaaaguaacugcaguuuugg

SEQ ID NO: 30000 - RNA, 23 nt, Homo sapiens
cuccagccccuccagggcuuccu

SEQ ID NO: 30001 - RNA, 23 nt, Homo sapiens
uggcccugacacgugguacugga

SEQ ID NO: 30002 - RNA, 21 nt, Homo sapiens
aucugcacugucagcacuuua

SEQ ID NO: 30003 - RNA, 26 nt, Homo sapiens
aaccaucucauacaaaccaacuacuu

SEQ ID NO: 30004 - RNA, 22 nt, Homo sapiens
agcuagugagaagucaaugccu

SEQ ID NO: 30005 - RNA, 22 nt, Homo sapiens
agacaacaaugccaaccucaca

SEQ ID NO: 30006 - RNA, 22 nt, Homo sapiens
ccccucuggucaaccagucaca

SEQ ID NO: 30007 - RNA, 21 nt, Homo sapiens
aguagugcuuucuacuuuaug

SEQ ID NO: 30008 - RNA, 23 nt, Homo sapiens
gggagugaagacacggagccaga

SEQ ID NO: 30009 - RNA, 21 nt, Homo sapiens
gugacagagccaagcacaaau

SEQ ID NO: 30010 - RNA, 21 nt, Homo sapiens
gcggaacuuagccacugugaa

SEQ ID NO: 30011 - RNA, 21 nt, Homo sapiens
gcagaacuuagccacugugaa

SEQ ID NO: 30012 - RNA, 22 nt, Homo sapiens
auaaggauuuuuaggggcauua

SEQ ID NO: 30013 - RNA, 23 nt, Homo sapiens
aaagucucgcucucugccccuca

SEQ ID NO: 30014 - RNA, 22 nt, Homo sapiens
aggaaaccagcaaguguugacg

SEQ ID NO: 30015 - RNA, 22 nt, Homo sapiens
acacucuaaagggaagugcguu

SEQ ID NO: 30016 - RNA, 22 nt, Homo sapiens
acuucaaggaucuuaaacuuug

SEQ ID NO: 30017 - RNA, 20 nt, Homo sapiens
aggggccucagccuccuggu

SEQ ID NO: 30018 - RNA, 23 nt, Homo sapiens
acaaggaugaaucuuuguuacug

SEQ ID NO: 30019 - RNA, 25 nt, Homo sapiens
gaauccugguucugucccucacuag

SEQ ID NO: 30020 - RNA, 22 nt, Homo sapiens
cugggggcggcacaggggcuca

SEQ ID NO: 30021 - RNA, 20 nt, Homo sapiens
aagcagaaaaaggcaaacga

SEQ ID NO: 30022 - RNA, 20 nt, Homo sapiens
uucccaugcccuauaccucu

SEQ ID NO: 30023 - RNA, 22 nt, Homo sapiens
agcugaguguaggauguuuaca

SEQ ID NO: 30024 - RNA, 21 nt, Homo sapiens
ccuucugacuccaaguccagu

SEQ ID NO: 30025 - RNA, 21 nt, Homo sapiens
cucacucagauggccaacuca

SEQ ID NO: 30026 - RNA, 19 nt, Homo sapiens
aagacauuuucagacagcu

SEQ ID NO: 30027 - RNA, 20 nt, Homo sapiens
uccccacagacccagagccg

SEQ ID NO: 30028 - RNA, 22 nt, Homo sapiens
caccugauaaaacugagguaua

SEQ ID NO: 30029 - RNA, 20 nt, Homo sapiens
ggcauucaccgcgugccuua

SEQ ID NO: 30030 - RNA, 23 nt, Homo sapiens
gggagugaagacacggagccaga

SEQ ID NO: 30031 - RNA, 22 nt, Homo sapiens
cggugagcacccggccccugcg

SEQ ID NO: 30032 - RNA, 23 nt, Homo sapiens
gaacagguagucugaacacuggg

SEQ ID NO: 30033 - RNA, 23 nt, Homo sapiens
gaacagauagucuaaacacuggg

SEQ ID NO: 30034 - RNA, 22 nt, Homo sapiens
accagcuaacaauacacugcca

SEQ ID NO: 30035 - RNA, 23 nt, Homo sapiens
aaagucucgcucucugccccuca

SEQ ID NO: 30036 - RNA, 22 nt, Homo sapiens
ccucauggaaggguuccccacu

SEQ ID NO: 30037 - RNA, 21 nt, Homo sapiens
ucuacucagaagggugccuua

SEQ ID NO: 30038 - RNA, 22 nt, Homo sapiens
acacucuaaaaggaugcacuuu

SEQ ID NO: 30039 - RNA, 22 nt, Homo sapiens
aaccucuaaaaggaugcacuuu

SEQ ID NO: 30040 - RNA, 22 nt, Homo sapiens
auccucuaaaaagaugcacuuu

SEQ ID NO: 30041 - RNA, 24 nt, Homo sapiens
cugaucaguuacacaucacuucag

SEQ ID NO: 30042 - RNA, 25 nt, Homo sapiens
acggagcugucccaacaccaccccu

SEQ ID NO: 30043 - RNA, 19 nt, Homo sapiens
accagugcccugcacacuu

SEQ ID NO: 30044 - RNA, 23 nt, Homo sapiens
cacugugggcccucuccgcacca

SEQ ID NO: 30045 - RNA, 20 nt, Homo sapiens
uacugcuuccacagcucccc

SEQ ID NO: 30046 - RNA, 23 nt, Homo sapiens
cacaaauucggaucuacagggua

SEQ ID NO: 30047 - RNA, 23 nt, Homo sapiens
cacaaauucgguucuacagggua

SEQ ID NO: 30048 - RNA, 20 nt, Homo sapiens
gcagcuguccgcccagacac

SEQ ID NO: 30049 - RNA, 17 nt, Homo sapiens
uggcgcccgaacaggga

SEQ ID NO: 30050 - RNA, 23 nt, Homo sapiens
gggagugaagacacggagccaga

SEQ ID NO: 30051 - RNA, 22 nt, Homo sapiens
uagucaagugaagcagugggag

SEQ ID NO: 30052 - RNA, 22 nt, Homo sapiens
cuuccagucgaggauguuuaca

SEQ ID NO: 30053 - RNA, 22 nt, Homo sapiens
agcugaguguaggauguuuaca

SEQ ID NO: 30054 - RNA, 22 nt, Homo sapiens
cuuccagucggggauguuuaca

SEQ ID NO: 30055 - RNA, 22 nt, Homo sapiens
cuuccagucaaggauguuuaca

SEQ ID NO: 30056 - RNA, 21 nt, Homo sapiens
aagacgggaggagaggaguga

SEQ ID NO: 30057 - RNA, 22 nt, Homo sapiens
ucucacccagggacaaaggauu

SEQ ID NO: 30058 - RNA, 22 nt, Homo sapiens
aaagugcuucuuaccuccagau

SEQ ID NO: 30059 - RNA, 22 nt, Homo sapiens
acacucuaaagggaagugcguu

SEQ ID NO: 30060 - RNA, 22 nt, Homo sapiens
cucauauuacaaugagcucauc

SEQ ID NO: 30061 - RNA, 22 nt, Homo sapiens
aaggugauggucagcagacaua

SEQ ID NO: 30062 - RNA, 21 nt, Homo sapiens
gagcuacagugcuucaucuca

SEQ ID NO: 30063 - RNA, 23 nt, Homo sapiens
cuaucugcacuagaugcaccuua

SEQ ID NO: 30064 - RNA, 23 nt, Homo sapiens
cuaacugcacuagaugcaccuua

SEQ ID NO: 30065 - RNA, 23 nt, Homo sapiens
cagcugcuuuugggauuccguug

SEQ ID NO: 30066 - RNA, 22 nt, Homo sapiens
uccacauggaguugcuguuaca

SEQ ID NO: 30067 - RNA, 22 nt, Homo sapiens
uagucaagugaagcagugggag

SEQ ID NO: 30068 - RNA, 21 nt, Homo sapiens
acaugguuagaucaagcacaa

SEQ ID NO: 30069 - RNA, 24 nt, Homo sapiens
ugggagaaccucccugcuucugcu

SEQ ID NO: 30070 - RNA, 22 nt, Homo sapiens
agcugaguguaggauguuuaca

SEQ ID NO: 30071 - RNA, 23 nt, Homo sapiens
acaccaaugcccuaggggaugcg

SEQ ID NO: 30072 - RNA, 22 nt, Homo sapiens
acggaagggcagagagggccag

SEQ ID NO: 30073 - RNA, 22 nt, Homo sapiens
uacagauggauaccgugcaauu

SEQ ID NO: 30074 - RNA, 22 nt, Homo sapiens
ugcaagccuugggugugggagg

SEQ ID NO: 30075 - RNA, 22 nt, Homo sapiens
gaacuugcuaaaaaugcagaau

SEQ ID NO: 30076 - RNA, 24 nt, Homo sapiens
acgcgcaggccagagacccaggca

SEQ ID NO: 30077 - RNA, 23 nt, Homo sapiens
aauaaauuaaauuuauauuacag

SEQ ID NO: 30078 - RNA, 23 nt, Homo sapiens
acauuuuucguuauugcucuuga

SEQ ID NO: 30079 - RNA, 22 nt, Homo sapiens
ccuggcacacaguagaccuuca

SEQ ID NO: 30080 - RNA, 21 nt, Homo sapiens
acaaaccacagugugcugcug

SEQ ID NO: 30081 - RNA, 21 nt, Homo sapiens
uggggauuacacuucaacagg

SEQ ID NO: 30082 - RNA, 22 nt, Homo sapiens
aacccauggaauucaguucuca

SEQ ID NO: 30083 - RNA, 21 nt, Homo sapiens
gugacagagccaagcacaaau

SEQ ID NO: 30084 - RNA, 22 nt, Homo sapiens
ucacaguugccagcugagauua

SEQ ID NO: 30085 - RNA, 22 nt, Homo sapiens
acaaaaguugccuuugugugau

SEQ ID NO: 30086 - RNA, 23 nt, Homo sapiens
gcgcccaauuaaugucuguugau

SEQ ID NO: 30087 - RNA, 22 nt, Homo sapiens
gauagagugcagaccagggucu

SEQ ID NO: 30088 - RNA, 21 nt, Homo sapiens
agguaauaccaauaccuugug

SEQ ID NO: 30089 - RNA, 23 nt, Homo sapiens
ggacauuguuucagugcccaagu

SEQ ID NO: 30090 - RNA, 22 nt, Homo sapiens
cacauggccaaaacagagaaga

SEQ ID NO: 30091 - RNA, 21 nt, Homo sapiens
ccaaccaaugaaagaaugcuu

SEQ ID NO: 30092 - RNA, 23 nt, Homo sapiens
aacaggugcucaaauaagacuug

SEQ ID NO: 30093 - RNA, 23 nt, Homo sapiens
ucacauaggaauaaaaagccaua

SEQ ID NO: 30094 - RNA, 22 nt, Homo sapiens
aacccauggaauucaguucuca

SEQ ID NO: 30095 - RNA, 22 nt, Homo sapiens
cagcauggaguccuccagguug

SEQ ID NO: 30096 - RNA, 19 nt, Homo sapiens
agaaaccccagcagagaca

SEQ ID NO: 30097 - RNA, 20 nt, Homo sapiens
acaaugagaacccauggucu

SEQ ID NO: 30098 - RNA, 22 nt, Homo sapiens
caaacaccauugucacacucca

SEQ ID NO: 30099 - RNA, 23 nt, Homo sapiens
ucauacagcuagauaaccaaaga

SEQ ID NO: 30100 - RNA, 23 nt, Homo sapiens
aacaggugcucaaauaagacuug

SEQ ID NO: 30101 - RNA, 22 nt, Homo sapiens
gaucacuuuugugacuaugcaa

SEQ ID NO: 30102 - RNA, 22 nt, Homo sapiens
auaaggauuuuuaggggcauua

SEQ ID NO: 30103 - RNA, 22 nt, Homo sapiens
gguaaaacucgcaauuacuuuu

SEQ ID NO: 30104 - RNA, 22 nt, Homo sapiens
ggccaaaaccacaauuacuuuu

SEQ ID NO: 30105 - RNA, 22 nt, Homo sapiens
ggcaaaaaccgcaauuacuuuu

SEQ ID NO: 30106 - RNA, 22 nt, Homo sapiens
ggcaaaaaccacaauuacuuuu

SEQ ID NO: 30107 - RNA, 22 nt, Homo sapiens
gacaaaaaccgcgauuacuuuu

SEQ ID NO: 30108 - RNA, 22 nt, Homo sapiens
ggcaaaauccgcaauuacuuuu

SEQ ID NO: 30109 - RNA, 22 nt, Homo sapiens
accaaagaccgcaauuacuuuu

SEQ ID NO: 30110 - RNA, 21 nt, Homo sapiens
uuuuggugcauauuuacuuua

SEQ ID NO: 30111 - RNA, 23 nt, Homo sapiens
guucuguccuggaagaacauacu

SEQ ID NO: 30112 - RNA, 22 nt, Homo sapiens
gaucacuuuugugacuaugcaa

SEQ ID NO: 30113 - RNA, 23 nt, Homo sapiens
uauucucgcacggacuacaacca

SEQ ID NO: 30114 - RNA, 23 nt, Homo sapiens
guucuguccuggaagaacauacu

SEQ ID NO: 30115 - RNA, 23 nt, Homo sapiens
aacaggugcucaaauaagacuug

SEQ ID NO: 30116 - RNA, 23 nt, Homo sapiens
acacagcucuuccauaucuccag

SEQ ID NO: 30117 - RNA, 23 nt, Homo sapiens
cuacgcguauucuuaagcaauaa

SEQ ID NO: 30118 - RNA, 22 nt, Homo sapiens
gaucacuuuugugacuaugcaa

SEQ ID NO: 30119 - RNA, 22 nt, Homo sapiens
ucaguuuccucugcaaacaguu

SEQ ID NO: 30120 - RNA, 21 nt, Homo sapiens
gccaauauuucugugcugcua

SEQ ID NO: 30121 - RNA, 22 nt, Homo sapiens
uauucaggaacauauugcaaaa

SEQ ID NO: 30122 - RNA, 20 nt, Homo sapiens
auuucuauaucuaucuccau

SEQ ID NO: 30123 - RNA, 19 nt, Homo sapiens
ucagcaguaccagccuaga

SEQ ID NO: 30124 - RNA, 23 nt, Homo sapiens
aacaggugcucaaauaagacuug

SEQ ID NO: 30125 - RNA, 22 nt, Homo sapiens
ucagccgcugucacacgcacag

SEQ ID NO: 30126 - RNA, 22 nt, Homo sapiens
auaaggauuuuuaggggcauua

SEQ ID NO: 30127 - RNA, 22 nt, Homo sapiens
gguaaaacucgcaauuacuuuu

SEQ ID NO: 30128 - RNA, 22 nt, Homo sapiens
ggccaaaaccacaauuacuuuu

SEQ ID NO: 30129 - RNA, 22 nt, Homo sapiens
ggcaaaaaccgcaauuacuuuu

SEQ ID NO: 30130 - RNA, 22 nt, Homo sapiens
ggcaaaaaccacaauuacuuuu

SEQ ID NO: 30131 - RNA, 22 nt, Homo sapiens
gacaaaaaccgcgauuacuuuu

SEQ ID NO: 30132 - RNA, 22 nt, Homo sapiens
ggcaaaauccgcaauuacuuuu

SEQ ID NO: 30133 - RNA, 22 nt, Homo sapiens
accaaagaccgcaauuacuuuu

SEQ ID NO: 30134 - RNA, 21 nt, Homo sapiens
uuuuggugcauauuuacuuua

SEQ ID NO: 30135 - RNA, 23 nt, Homo sapiens
guucuguccuggaagaacauacu

SEQ ID NO: 30136 - RNA, 27 nt, Homo sapiens
uuuagcacagugcuuauacaagaaggu

SEQ ID NO: 30137 - RNA, 22 nt, Homo sapiens
ucccucacacagaauuccagaa

SEQ ID NO: 30138 - RNA, 21 nt, Homo sapiens
ccgugguucuacccuguggua

SEQ ID NO: 30139 - RNA, 22 nt, Homo sapiens
aaucagucucauugcuuuauaa

SEQ ID NO: 30140 - RNA, 22 nt, Homo sapiens
gcacacaauaaauguuugcuga

SEQ ID NO: 30141 - RNA, 22 nt, Homo sapiens
gccaccuucaaaugggaagucu

SEQ ID NO: 30142 - RNA, 23 nt, Homo sapiens
acccaacagccccugcaagggau

SEQ ID NO: 30143 - RNA, 22 nt, Homo sapiens
gcuggguggagaagguggugaa

SEQ ID NO: 30144 - RNA, 22 nt, Homo sapiens
acaguucuucaacuggcagcuu

SEQ ID NO: 30145 - RNA, 22 nt, Homo sapiens
agccacaaucaccuucugaucu

SEQ ID NO: 30146 - RNA, 22 nt, Homo sapiens
ucgcccucucaacccagcuuuu

SEQ ID NO: 30147 - RNA, 22 nt, Homo sapiens
uugcccucucaacccagcuuuu

SEQ ID NO: 30148 - RNA, 20 nt, Homo sapiens
acccucucaacccagcuuuu

SEQ ID NO: 30149 - RNA, 19 nt, Homo sapiens
uccucucaacccagcuuuu

SEQ ID NO: 30150 - RNA, 20 nt, Homo sapiens
gcaaugcaacagcaaugcac

SEQ ID NO: 30151 - RNA, 22 nt, Homo sapiens
aacgcuccaaaagaaggcacuc

SEQ ID NO: 30152 - RNA, 22 nt, Homo sapiens
aacacucuaaaaggaggcacuu

SEQ ID NO: 30153 - RNA, 23 nt, Homo sapiens
gggcucuuacucccucaggcacu

SEQ ID NO: 30154 - RNA, 22 nt, Homo sapiens
gauuccaauuuuuccacaucuu

SEQ ID NO: 30155 - RNA, 19 nt, Homo sapiens
agaaaccccagcagagaca

SEQ ID NO: 30156 - RNA, 23 nt, Homo sapiens
ggacauuguuucagugcccaagu

SEQ ID NO: 30157 - RNA, 21 nt, Homo sapiens
cugggggacggagcagaagga

SEQ ID NO: 30158 - RNA, 21 nt, Homo sapiens
ccgugguucuacccuguggua

SEQ ID NO: 30159 - RNA, 22 nt, Homo sapiens
uccacauggaguugcuguuaca

SEQ ID NO: 30160 - RNA, 23 nt, Homo sapiens
gaaacccagcagacaauguagcu

SEQ ID NO: 30161 - RNA, 21 nt, Homo sapiens
acccaguagccagauguagcu

SEQ ID NO: 30162 - RNA, 21 nt, Homo sapiens
ccccucccagccucccugcca

SEQ ID NO: 30163 - RNA, 22 nt, Homo sapiens
agcuagugagaagucaaugccu

SEQ ID NO: 30164 - RNA, 18 nt, Homo sapiens
cccccaccaccacgcccg

SEQ ID NO: 30165 - RNA, 19 nt, Homo sapiens
cagcaucagcagcaucauc

SEQ ID NO: 30166 - RNA, 22 nt, Homo sapiens
cggugagcacccggccccugcg

SEQ ID NO: 30167 - RNA, 25 nt, Homo sapiens
agcuagucaagcgcgguuguggggg

SEQ ID NO: 30168 - RNA, 22 nt, Homo sapiens
uagucaagugaagcagugggag

SEQ ID NO: 30169 - RNA, 21 nt, Homo sapiens
aucugcacugucagcacuuua

SEQ ID NO: 30170 - RNA, 23 nt, Homo sapiens
gcuuugacaauaucauugcacug

SEQ ID NO: 30171 - RNA, 22 nt, Homo sapiens
aaggugauggucagcagacaua

SEQ ID NO: 30172 - RNA, 22 nt, Homo sapiens
agcucagaacccagaggucuca

SEQ ID NO: 30173 - RNA, 23 nt, Homo sapiens
cuaucugcacuagaugcaccuua

SEQ ID NO: 30174 - RNA, 21 nt, Homo sapiens
gaccaaucgccguccccgccg

SEQ ID NO: 30175 - RNA, 22 nt, Homo sapiens
cacucagcggccguuuccccaa

SEQ ID NO: 30176 - RNA, 23 nt, Homo sapiens
acugaggggccucagaccgagcu

SEQ ID NO: 30177 - RNA, 19 nt, Homo sapiens
guccugaauuccgcagccu

SEQ ID NO: 30178 - RNA, 22 nt, Homo sapiens
gcggucccgcggcgccccgccu

SEQ ID NO: 30179 - RNA, 22 nt, Homo sapiens
ugcuguuagcccuagccccgca

SEQ ID NO: 30180 - RNA, 22 nt, Homo sapiens
ucggucccucgggccagggcag

SEQ ID NO: 30181 - RNA, 22 nt, Homo sapiens
uauccacuacaccccgcugccu

SEQ ID NO: 30182 - RNA, 24 nt, Homo sapiens
acugcaggcuccagcuuccaggcu

SEQ ID NO: 30183 - RNA, 21 nt, Homo sapiens
acaggauugagggggggcccu

SEQ ID NO: 30184 - RNA, 20 nt, Homo sapiens
uacugcuuccacagcucccc

SEQ ID NO: 30185 - RNA, 20 nt, Homo sapiens
uacugcuuccacagcucccc

SEQ ID NO: 30186 - RNA, 24 nt, Homo sapiens
cacccccagagccucagcucccca

SEQ ID NO: 30187 - RNA, 22 nt, Homo sapiens
cacgaccgacgccacgccgagu

SEQ ID NO: 30188 - RNA, 22 nt, Homo sapiens
ggagcccgcgccccgcgccgag

SEQ ID NO: 30189 - RNA, 21 nt, Homo sapiens
cggggugcacgggcggagggc

SEQ ID NO: 30190 - RNA, 22 nt, Homo sapiens
uggcagcagcggagggggcaga

SEQ ID NO: 30191 - RNA, 22 nt, Homo sapiens
ucagaccgagacaagugcaaug

SEQ ID NO: 30192 - RNA, 20 nt, Homo sapiens
ccagcagcaccuggggcagu

SEQ ID NO: 30193 - RNA, 21 nt, Homo sapiens
uucuaggauaggcccaggggc

SEQ ID NO: 30194 - RNA, 21 nt, Homo sapiens
auccuguacugagcugccccg

SEQ ID NO: 30195 - RNA, 23 nt, Homo sapiens
acacacucacacacacacacuca

SEQ ID NO: 30196 - RNA, 23 nt, Homo sapiens
ggacauuguuucagugcccaagu

SEQ ID NO: 30197 - RNA, 19 nt, Homo sapiens
accagugcccugcacacuu

SEQ ID NO: 30198 - RNA, 25 nt, Homo sapiens
accaacggaccuacuucccuccgcc

SEQ ID NO: 30199 - RNA, 21 nt, Homo sapiens
gagcugcauccuggcuccggg

SEQ ID NO: 30200 - RNA, 18 nt, Homo sapiens
aucacauucaccucccug

SEQ ID NO: 30201 - RNA, 23 nt, Homo sapiens
gggagugaagacacggagccaga

SEQ ID NO: 30202 - RNA, 21 nt, Homo sapiens
gggcaucugggacgcgcagga

SEQ ID NO: 30203 - RNA, 21 nt, Homo sapiens
gaccaaucgccguccccgccg

SEQ ID NO: 30204 - RNA, 23 nt, Homo sapiens
cccaacagacauggcgguacuca

SEQ ID NO: 30205 - RNA, 20 nt, Homo sapiens
acagcaaggagggcaggagg

SEQ ID NO: 30206 - RNA, 23 nt, Homo sapiens
gggcucuuacucccucaggcacu

SEQ ID NO: 30207 - RNA, 19 nt, Homo sapiens
guccugaauuccgcagccu

SEQ ID NO: 30208 - RNA, 21 nt, Homo sapiens
aagggucaguaagcacccgcg

SEQ ID NO: 30209 - RNA, 21 nt, Homo sapiens
gagcugcauccuggcuccggg

SEQ ID NO: 30210 - RNA, 21 nt, Homo sapiens
ucacccagaucugcggccuaa

SEQ ID NO: 30211 - RNA, 20 nt, Homo sapiens
cccgccgcgucgcccugggg

SEQ ID NO: 30212 - RNA, 22 nt, Homo sapiens
gaauucaucacggccagccucu

SEQ ID NO: 30213 - RNA, 20 nt, Homo sapiens
gcaaaugguacagcuacuuu

SEQ ID NO: 30214 - RNA, 19 nt, Homo sapiens
guugggaucacaggcgccc

SEQ ID NO: 30215 - RNA, 19 nt, Homo sapiens
guccugaauuccgcagccu

SEQ ID NO: 30216 - RNA, 21 nt, Homo sapiens
caacugaugccuuuccaagua

SEQ ID NO: 30217 - RNA, 20 nt, Homo sapiens
uacugcuuccacagcucccc

SEQ ID NO: 30218 - RNA, 21 nt, Homo sapiens
cugaggagagaggaggugggg

SEQ ID NO: 30219 - RNA, 22 nt, Homo sapiens
cugggggcggcacaggggcuca

SEQ ID NO: 30220 - RNA, 20 nt, Homo sapiens
cugcgggaggacagggcuca

SEQ ID NO: 30221 - RNA, 24 nt, Homo sapiens
ucacagguuaaagggucucaggga

SEQ ID NO: 30222 - RNA, 22 nt, Homo sapiens
ucacaaguuagggucucaggga

SEQ ID NO: 30223 - RNA, 23 nt, Homo sapiens
agcccuguucuacagcccugagg

SEQ ID NO: 30224 - RNA, 21 nt, Homo sapiens
acuagacugugagcuccucga

SEQ ID NO: 30225 - RNA, 22 nt, Homo sapiens
aagagggagacccaggcucgga

SEQ ID NO: 30226 - RNA, 21 nt, Homo sapiens
caucaccuuccuucuccucca

SEQ ID NO: 30227 - RNA, 20 nt, Homo sapiens
uacugcuuccacagcucccc

SEQ ID NO: 30228 - RNA, 23 nt, Homo sapiens
ggaagccaucaagucgcugcagg

SEQ ID NO: 30229 - RNA, 20 nt, Homo sapiens
cucaaagcaaacccugcaga

SEQ ID NO: 30230 - RNA, 20 nt, Homo sapiens
gcagaagcauuuccacacac

SEQ ID NO: 30231 - RNA, 21 nt, Homo sapiens
gaccaaucgccguccccgccg

SEQ ID NO: 30232 - RNA, 23 nt, Homo sapiens
aggagaaggcaccaugggauuua

SEQ ID NO: 30233 - RNA, 22 nt, Homo sapiens
gccaccuucaaaugggaagucu

SEQ ID NO: 30234 - RNA, 22 nt, Homo sapiens
gcggucccgcggcgccccgccu

SEQ ID NO: 30235 - RNA, 22 nt, Homo sapiens
ccucaggcacggccgggccacc

SEQ ID NO: 30236 - RNA, 21 nt, Homo sapiens
ugcaggcugaucuucuucucu

SEQ ID NO: 30237 - RNA, 24 nt, Homo sapiens
ucacagguuaaagggucucaggga

SEQ ID NO: 30238 - RNA, 22 nt, Homo sapiens
ucacaaguuagggucucaggga

SEQ ID NO: 30239 - RNA, 23 nt, Homo sapiens
agcccuguucuacagcccugagg

SEQ ID NO: 30240 - RNA, 20 nt, Homo sapiens
cuggaggaagggcccagagg

SEQ ID NO: 30241 - RNA, 22 nt, Homo sapiens
gccuaagacacaggcccagaga

SEQ ID NO: 30242 - RNA, 22 nt, Homo sapiens
uacagauggauaccgugcaauu

SEQ ID NO: 30243 - RNA, 22 nt, Homo sapiens
cacauggccaaaacagagaaga

SEQ ID NO: 30244 - RNA, 18 nt, Homo sapiens
cccccaccaccacgcccg

SEQ ID NO: 30245 - RNA, 17 nt, Homo sapiens
gacagccucucccccac

SEQ ID NO: 30246 - RNA, 22 nt, Homo sapiens
acuccaacagggccgcgucucc

SEQ ID NO: 30247 - RNA, 20 nt, Homo sapiens
cccgccgcgucgcccugggg

SEQ ID NO: 30248 - RNA, 22 nt, Homo sapiens
ucagaccgagacaagugcaaug

SEQ ID NO: 30249 - RNA, 21 nt, Homo sapiens
uucuaggauaggcccaggggc

SEQ ID NO: 30250 - RNA, 23 nt, Homo sapiens
aaaucagaaucacaccuggggga

SEQ ID NO: 30251 - RNA, 22 nt, Homo sapiens
ucacgcgagccgaacgaacaaa

SEQ ID NO: 30252 - RNA, 23 nt, Homo sapiens
aaagucucgcucucugccccuca

SEQ ID NO: 30253 - RNA, 22 nt, Homo sapiens
aguccagauucugugcccacca

SEQ ID NO: 30254 - RNA, 24 nt, Homo sapiens
acgcagagcccgaaagcccccagu

SEQ ID NO: 30255 - RNA, 22 nt, Homo sapiens
gcacauguucugcggcccacca

SEQ ID NO: 30256 - RNA, 22 nt, Homo sapiens
agcucagaacccagaggucuca

SEQ ID NO: 30257 - RNA, 22 nt, Homo sapiens
ucuacccagaaaggagccagug

SEQ ID NO: 30258 - RNA, 21 nt, Homo sapiens
cucccccacugcagcuggcac

SEQ ID NO: 30259 - RNA, 21 nt, Homo sapiens
ccccucccagccucccugcca

SEQ ID NO: 30260 - RNA, 22 nt, Homo sapiens
cugggggcggcacaggggcuca

SEQ ID NO: 30261 - RNA, 17 nt, Homo sapiens
uggcgcccgaacaggga

SEQ ID NO: 30262 - RNA, 22 nt, Homo sapiens
ucccucacacagaauuccagaa

SEQ ID NO: 30263 - RNA, 22 nt, Homo sapiens
augcuuuuugggguaagggcuu

SEQ ID NO: 30264 - RNA, 18 nt, Homo sapiens
aucacauucaccucccug

SEQ ID NO: 30265 - RNA, 23 nt, Homo sapiens
cuaucugcacuagaugcaccuua

SEQ ID NO: 30266 - RNA, 22 nt, Homo sapiens
cggugagcacccggccccugcg

SEQ ID NO: 30267 - RNA, 22 nt, Homo sapiens
uucacacugcaugcucugggua

SEQ ID NO: 30268 - RNA, 20 nt, Homo sapiens
cccgccgcgucgcccugggg

SEQ ID NO: 30269 - RNA, 22 nt, Homo sapiens
acugccugucugugccugcugu

SEQ ID NO: 30270 - RNA, 22 nt, Homo sapiens
ucaccauugcuaaagugcaauu

SEQ ID NO: 30271 - RNA, 22 nt, Homo sapiens
accagguuccaccccagcaggc

SEQ ID NO: 30272 - RNA, 25 nt, Homo sapiens
acggagcugucccaacaccaccccu

SEQ ID NO: 30273 - RNA, 22 nt, Homo sapiens
ugcuguuagcccuagccccgca

SEQ ID NO: 30274 - RNA, 20 nt, Homo sapiens
uccccacagacccagagccg

SEQ ID NO: 30275 - RNA, 22 nt, Homo sapiens
ucggucccucgggccagggcag

SEQ ID NO: 30276 - RNA, 20 nt, Homo sapiens
uacugcuuccacagcucccc

SEQ ID NO: 30277 - RNA, 22 nt, Homo sapiens
acuggguucaccuuuaagggca

SEQ ID NO: 30278 - RNA, 24 nt, Homo sapiens
agugugaguucuaccauugccaaa

SEQ ID NO: 30279 - RNA, 21 nt, Homo sapiens
gaccaaucgccguccccgccg

SEQ ID NO: 30280 - RNA, 22 nt, Homo sapiens
cccaacaacaggaaacuaccua

SEQ ID NO: 30281 - RNA, 20 nt, Homo sapiens
uaugaacaauuucuaggaau

SEQ ID NO: 30282 - RNA, 21 nt, Homo sapiens
uggaaaccaagagugggucgc

SEQ ID NO: 30283 - RNA, 21 nt, Homo sapiens
cugaaaccaaguaugggucgc

SEQ ID NO: 30284 - RNA, 24 nt, Homo sapiens
acgcgcaggccagagacccaggca

SEQ ID NO: 30285 - RNA, 22 nt, Homo sapiens
gcggucccgcggcgccccgccu

SEQ ID NO: 30286 - RNA, 22 nt, Homo sapiens
ugcuguuagcccuagccccgca

SEQ ID NO: 30287 - RNA, 23 nt, Homo sapiens
ccgcuugagcuaacuccgacccg

SEQ ID NO: 30288 - RNA, 20 nt, Homo sapiens
aguacaucaucuauacugua

SEQ ID NO: 30289 - RNA, 23 nt, Homo sapiens
cuaccugcacuguaagcacuuug

SEQ ID NO: 30290 - RNA, 22 nt, Homo sapiens
uccacauggaguugcuguuaca

SEQ ID NO: 30291 - RNA, 22 nt, Homo sapiens
uagucaagugaagcagugggag

SEQ ID NO: 30292 - RNA, 21 nt, Homo sapiens
agaggucgaccguguaaugug

SEQ ID NO: 30293 - RNA, 22 nt, Homo sapiens
aagauguggaccauauuacaua

SEQ ID NO: 30294 - RNA, 22 nt, Homo sapiens
gccagcuaacaauacacugccu

SEQ ID NO: 30295 - RNA, 22 nt, Homo sapiens
caugauugccacgucugcagua

SEQ ID NO: 30296 - RNA, 21 nt, Homo sapiens
ugauugccacugucugcagua

SEQ ID NO: 30297 - RNA, 21 nt, Homo sapiens
ugacugcagagcaaaagacac

SEQ ID NO: 30298 - RNA, 24 nt, Homo sapiens
gaggugacucuauccuaugucuuu

SEQ ID NO: 30299 - RNA, 22 nt, Homo sapiens
cugggggcggcacaggggcuca

SEQ ID NO: 30300 - RNA, 26 nt, Homo sapiens
uuucagaauuugcugccaucaucauc

SEQ ID NO: 30301 - RNA, 22 nt, Homo sapiens
gcacaaaucuccagaccaccca

SEQ ID NO: 30302 - RNA, 22 nt, Homo sapiens
ucaggaacugccuuucucucca

SEQ ID NO: 30303 - RNA, 21 nt, Homo sapiens
aagugucagacacgguggugg

SEQ ID NO: 30304 - RNA, 20 nt, Homo sapiens
cuggaggaagggcccagagg

SEQ ID NO: 30305 - RNA, 22 nt, Homo sapiens
gccuaagacacaggcccagaga

SEQ ID NO: 30306 - RNA, 22 nt, Homo sapiens
acaccgaggagcccaucaugau

SEQ ID NO: 30307 - RNA, 18 nt, Homo sapiens
acccucugaaaggaagca

SEQ ID NO: 30308 - RNA, 22 nt, Homo sapiens
aaagugcuucuuaccuccagau

SEQ ID NO: 30309 - RNA, 19 nt, Homo sapiens
gccucagaggcagcugcuu

SEQ ID NO: 30310 - RNA, 22 nt, Homo sapiens
agcuagugagaagucaaugccu

SEQ ID NO: 30311 - RNA, 22 nt, Homo sapiens
agcccaaaaggagaauucuuug

SEQ ID NO: 30312 - RNA, 22 nt, Homo sapiens
uggcagcagcggagggggcaga

SEQ ID NO: 30313 - RNA, 22 nt, Homo sapiens
ucaacaucagucugauaagcua

SEQ ID NO: 30314 - RNA, 22 nt, Homo sapiens
cucaauagacugugagcuccuu

SEQ ID NO: 30315 - RNA, 20 nt, Homo sapiens
ccagcagcaccuggggcagu

SEQ ID NO: 30316 - RNA, 23 nt, Homo sapiens
ucucugcaggccgugugcuuugc

SEQ ID NO: 30317 - RNA, 22 nt, Homo sapiens
auaaggauuuuuaggggcauua

SEQ ID NO: 30318 - RNA, 21 nt, Homo sapiens
auccuguacugagcugccccg

SEQ ID NO: 30319 - RNA, 24 nt, Homo sapiens
acacucuaaagggaagcacuuugu

SEQ ID NO: 30320 - RNA, 22 nt, Homo sapiens
acucuaaagggaagcacuuugu

SEQ ID NO: 30321 - RNA, 21 nt, Homo sapiens
aucagagguucagcuuacccu

SEQ ID NO: 30322 - RNA, 19 nt, Homo sapiens
auuuugguacagcagcuca

SEQ ID NO: 30323 - RNA, 19 nt, Homo sapiens
gccucagaggcagcugcuu

SEQ ID NO: 30324 - RNA, 23 nt, Homo sapiens
cccagcuagauuguaagcuccuu

SEQ ID NO: 30325 - RNA, 22 nt, Homo sapiens
cacauggccaaaacagagaaga

SEQ ID NO: 30326 - RNA, 20 nt, Homo sapiens
cccgccgcgucgcccugggg

SEQ ID NO: 30327 - RNA, 22 nt, Homo sapiens
cacucagcggccguuuccccaa

SEQ ID NO: 30328 - RNA, 21 nt, Homo sapiens
gcggaacuuagccacugugaa

SEQ ID NO: 30329 - RNA, 21 nt, Homo sapiens
ucaaucacagauagcaccccu

SEQ ID NO: 30330 - RNA, 23 nt, Homo sapiens
cacugugggcccucuccgcacca

SEQ ID NO: 30331 - RNA, 21 nt, Homo sapiens
caucaccuuccuucuccucca

SEQ ID NO: 30332 - RNA, 22 nt, Homo sapiens
cugggggcggcacaggggcuca

SEQ ID NO: 30333 - RNA, 22 nt, Homo sapiens
cuggagagacaaggggaagagg

SEQ ID NO: 30334 - RNA, 24 nt, Homo sapiens
ucacagguuaaagggucucaggga

SEQ ID NO: 30335 - RNA, 22 nt, Homo sapiens
ucacaaguuagggucucaggga

SEQ ID NO: 30336 - RNA, 22 nt, Homo sapiens
acucaguaugccaggguaccau

SEQ ID NO: 30337 - RNA, 22 nt, Homo sapiens
acucaguaugccaggguaccau

SEQ ID NO: 30338 - RNA, 23 nt, Homo sapiens
agcccuguucuacagcccugagg

SEQ ID NO: 30339 - RNA, 23 nt, Homo sapiens
ucacauaggaaugaaaagccaua

SEQ ID NO: 30340 - RNA, 20 nt, Homo sapiens
uaugaacaauuucuaggaau

SEQ ID NO: 30341 - RNA, 22 nt, Homo sapiens
gaacuugcuaaaaaugcagaau

SEQ ID NO: 30342 - RNA, 21 nt, Homo sapiens
cugaggagagaggaggugggg

SEQ ID NO: 30343 - RNA, 22 nt, Homo sapiens
acuccaacagggccgcgucucc

SEQ ID NO: 30344 - RNA, 21 nt, Homo sapiens
gaccaaucgccguccccgccg

SEQ ID NO: 30345 - RNA, 21 nt, Homo sapiens
ucaaucacagauagcaccccu

SEQ ID NO: 30346 - RNA, 22 nt, Homo sapiens
gcggucccgcggcgccccgccu

SEQ ID NO: 30347 - RNA, 17 nt, Homo sapiens
uggaggccccagcgaga

SEQ ID NO: 30348 - RNA, 22 nt, Homo sapiens
ugcuguuagcccuagccccgca

SEQ ID NO: 30349 - RNA, 21 nt, Homo sapiens
uuccacgaccuaauccuaacu

SEQ ID NO: 30350 - RNA, 23 nt, Homo sapiens
aacaggugcucaaauaagacuug

SEQ ID NO: 30351 - RNA, 21 nt, Homo sapiens
aguagugcuuucuacuuuaug

SEQ ID NO: 30352 - RNA, 23 nt, Homo sapiens
uauucucgcacggacuacaacca

SEQ ID NO: 30353 - RNA, 21 nt, Homo sapiens
ggaaaucccuggcaaugugau

SEQ ID NO: 30354 - RNA, 21 nt, Homo sapiens
gguaaucccuggcaaugugau

SEQ ID NO: 30355 - RNA, 22 nt, Homo sapiens
aaucagucucauugcuuuauaa

SEQ ID NO: 30356 - RNA, 21 nt, Homo sapiens
acguggauuuuccucuaugau

SEQ ID NO: 30357 - RNA, 22 nt, Homo sapiens
aacauggauuuuccucuaugau

SEQ ID NO: 30358 - RNA, 22 nt, Homo sapiens
acaaaaguugccuuugugugau

SEQ ID NO: 30359 - RNA, 21 nt, Homo sapiens
aaacaucacugcaagucuuaa

SEQ ID NO: 30360 - RNA, 22 nt, Homo sapiens
gguaaaacucgcaauuacuuuu

SEQ ID NO: 30361 - RNA, 22 nt, Homo sapiens
ggccaaaaccacaauuacuuuu

SEQ ID NO: 30362 - RNA, 22 nt, Homo sapiens
ggcaaaaaccgcaauuacuuuu

SEQ ID NO: 30363 - RNA, 22 nt, Homo sapiens
ggcaaaaaccacaauuacuuuu

SEQ ID NO: 30364 - RNA, 22 nt, Homo sapiens
gacaaaaaccgcgauuacuuuu

SEQ ID NO: 30365 - RNA, 22 nt, Homo sapiens
ggcaaaauccgcaauuacuuuu

SEQ ID NO: 30366 - RNA, 22 nt, Homo sapiens
accaaagaccgcaauuacuuuu

SEQ ID NO: 30367 - RNA, 21 nt, Homo sapiens
uuuuggugcauauuuacuuua

SEQ ID NO: 30368 - RNA, 22 nt, Homo sapiens
ccaguagcacggcucaguccag

SEQ ID NO: 30369 - RNA, 19 nt, Homo sapiens
cagcaucagcagcaucauc

SEQ ID NO: 30370 - RNA, 20 nt, Homo sapiens
uucccaugcccuauaccucu

SEQ ID NO: 30371 - RNA, 21 nt, Homo sapiens
ccuucugacuccaaguccagu

SEQ ID NO: 30372 - RNA, 22 nt, Homo sapiens
cgaauccaccacgaacaacuuc

SEQ ID NO: 30373 - RNA, 22 nt, Homo sapiens
gccuucugacccuaaguccagu

SEQ ID NO: 30374 - RNA, 21 nt, Homo sapiens
guguauaugcccauggacugc

SEQ ID NO: 30375 - RNA, 23 nt, Homo sapiens
ucucacccagguagcaaggauua

SEQ ID NO: 30376 - RNA, 22 nt, Homo sapiens
agaauccuugcccgggugcauu

SEQ ID NO: 30377 - RNA, 22 nt, Homo sapiens
ugaauccuugcccaggugcauu

SEQ ID NO: 30378 - RNA, 22 nt, Homo sapiens
uaaaugaauucaauuuccuucu

SEQ ID NO: 30379 - RNA, 22 nt, Homo sapiens
agcuagugagaagucaaugccu

SEQ ID NO: 30380 - RNA, 22 nt, Homo sapiens
aggucucacuuuguugcccaga

SEQ ID NO: 30381 - RNA, 22 nt, Homo sapiens
augcccuuucaucauugcacug

SEQ ID NO: 30382 - RNA, 20 nt, Homo sapiens
gcagaagcauuuccacacac

SEQ ID NO: 30383 - RNA, 20 nt, Homo sapiens
cccgccgcgucgcccugggg

SEQ ID NO: 30384 - RNA, 21 nt, Homo sapiens
guaaugggaccuuccucuuug

SEQ ID NO: 30385 - RNA, 22 nt, Homo sapiens
ggaccuaaaaauacaaugcaua

SEQ ID NO: 30386 - RNA, 25 nt, Homo sapiens
aaggagcucagaagcccugcccagc

SEQ ID NO: 30387 - RNA, 22 nt, Homo sapiens
cugcucaaacccuccaaugacu

SEQ ID NO: 30388 - RNA, 19 nt, Homo sapiens
gcucuaagaaagccacacu

SEQ ID NO: 30389 - RNA, 24 nt, Homo sapiens
acugcuggucuucagucagggcca

SEQ ID NO: 30390 - RNA, 25 nt, Homo sapiens
cagcgucugccggaacccguuccca

SEQ ID NO: 30391 - RNA, 21 nt, Homo sapiens
cggggugcacgggcggagggc

SEQ ID NO: 30392 - RNA, 21 nt, Homo sapiens
gggcaucugggacgcgcagga

SEQ ID NO: 30393 - RNA, 21 nt, Homo sapiens
gaccaaucgccguccccgccg

SEQ ID NO: 30394 - RNA, 23 nt, Homo sapiens
aaagucucgcucucugccccuca

SEQ ID NO: 30395 - RNA, 19 nt, Homo sapiens
auuuugguacagcagcuca

SEQ ID NO: 30396 - RNA, 19 nt, Homo sapiens
gccugcugacaccgugccu

SEQ ID NO: 30397 - RNA, 20 nt, Homo sapiens
ugggccaccgccgagcggac

SEQ ID NO: 30398 - RNA, 25 nt, Homo sapiens
accaacggaccuacuucccuccgcc

SEQ ID NO: 30399 - RNA, 22 nt, Homo sapiens
gcggucccgcggcgccccgccu

SEQ ID NO: 30400 - RNA, 22 nt, Homo sapiens
ugcuguuagcccuagccccgca

SEQ ID NO: 30401 - RNA, 21 nt, Homo sapiens
ccccucccagccucccugcca

SEQ ID NO: 30402 - RNA, 20 nt, Homo sapiens
gcagcuguccgcccagacac

SEQ ID NO: 30403 - RNA, 22 nt, Homo sapiens
uccggggacgaacgggacgggu

SEQ ID NO: 30404 - RNA, 18 nt, Homo sapiens
uggcgccugaacagggac

SEQ ID NO: 30405 - RNA, 18 nt, Homo sapiens
aucacauucaccucccug

SEQ ID NO: 30406 - RNA, 21 nt, Homo sapiens
acuagacugugagcuccucga

SEQ ID NO: 30407 - RNA, 22 nt, Homo sapiens
ccggcugcaacacaagacacga

SEQ ID NO: 30408 - RNA, 23 nt, Homo sapiens
cuaucugcacuagaugcaccuua

SEQ ID NO: 30409 - RNA, 22 nt, Homo sapiens
uggcagcagcggagggggcaga

SEQ ID NO: 30410 - RNA, 22 nt, Homo sapiens
agucuucacaacagcccugugu

SEQ ID NO: 30411 - RNA, 22 nt, Homo sapiens
cucaauagacugugagcuccuu

SEQ ID NO: 30412 - RNA, 20 nt, Homo sapiens
ccagcagcaccuggggcagu

SEQ ID NO: 30413 - RNA, 23 nt, Homo sapiens
aaaucagaaucacaccuggggga

SEQ ID NO: 30414 - RNA, 23 nt, Homo sapiens
aaagucucgcucucugccccuca

SEQ ID NO: 30415 - RNA, 21 nt, Homo sapiens
auccuguacugagcugccccg

SEQ ID NO: 30416 - RNA, 24 nt, Homo sapiens
acgcagagcccgaaagcccccagu

SEQ ID NO: 30417 - RNA, 22 nt, Homo sapiens
caagacacauuuggagagggac

SEQ ID NO: 30418 - RNA, 23 nt, Homo sapiens
cccagcuagauuguaagcuccuu

SEQ ID NO: 30419 - RNA, 21 nt, Homo sapiens
caucaccuuccuucuccucca

SEQ ID NO: 30420 - RNA, 22 nt, Homo sapiens
ggaggccgggacgagugcaaua

SEQ ID NO: 30421 - RNA, 21 nt, Homo sapiens
gagcugcauccuggcuccggg

SEQ ID NO: 30422 - RNA, 20 nt, Homo sapiens
cugcgggaggacagggcuca

SEQ ID NO: 30423 - RNA, 22 nt, Homo sapiens
uagcagaagcauuuccgcacac

SEQ ID NO: 30424 - RNA, 23 nt, Homo sapiens
aggaacagcagcagcccgggccg

SEQ ID NO: 30425 - RNA, 21 nt, Homo sapiens
gugacagagccaagcacaaau

SEQ ID NO: 30426 - RNA, 22 nt, Homo sapiens
aagagggagacccaggcucgga

SEQ ID NO: 30427 - RNA, 21 nt, Homo sapiens
gaaggaagugagugcagccac

SEQ ID NO: 30428 - RNA, 22 nt, Homo sapiens
acuccaacagggccgcgucucc

SEQ ID NO: 30429 - RNA, 21 nt, Homo sapiens
acuagacugugagcuccucga

SEQ ID NO: 30430 - RNA, 21 nt, Homo sapiens
gaccaaucgccguccccgccg

SEQ ID NO: 30431 - RNA, 22 nt, Homo sapiens
uggcagcagcggagggggcaga

SEQ ID NO: 30432 - RNA, 22 nt, Homo sapiens
ucagaccgagacaagugcaaug

SEQ ID NO: 30433 - RNA, 20 nt, Homo sapiens
ccagcagcaccuggggcagu

SEQ ID NO: 30434 - RNA, 20 nt, Homo sapiens
cuggaggaagggcccagagg

SEQ ID NO: 30435 - RNA, 22 nt, Homo sapiens
gccuaagacacaggcccagaga

SEQ ID NO: 30436 - RNA, 23 nt, Homo sapiens
aaaucagaaucacaccuggggga

SEQ ID NO: 30437 - RNA, 21 nt, Homo sapiens
auccuguacugagcugccccg

SEQ ID NO: 30438 - RNA, 24 nt, Homo sapiens
acgcagagcccgaaagcccccagu

SEQ ID NO: 30439 - RNA, 22 nt, Homo sapiens
gcggucccgcggcgccccgccu

SEQ ID NO: 30440 - RNA, 23 nt, Homo sapiens
cacugugggcccucuccgcacca

SEQ ID NO: 30441 - RNA, 22 nt, Homo sapiens
ugcuguuagcccuagccccgca

SEQ ID NO: 30442 - RNA, 22 nt, Homo sapiens
cuagggaacacagggcugguga

SEQ ID NO: 30443 - RNA, 20 nt, Homo sapiens
gcagcuguccgcccagacac

SEQ ID NO: 30444 - RNA, 21 nt, Homo sapiens
agcgccuuuggcagcuagagu

SEQ ID NO: 30445 - RNA, 24 nt, Homo sapiens
gaagucacucccaggcagcugcaa

SEQ ID NO: 30446 - RNA, 24 nt, Homo sapiens
gaaagugcauagaauucugucugg

SEQ ID NO: 30447 - RNA, 23 nt, Homo sapiens
cggccugauucacaacaccagcu

SEQ ID NO: 30448 - RNA, 23 nt, Homo sapiens
gggagugaagacacggagccaga

SEQ ID NO: 30449 - RNA, 22 nt, Homo sapiens
ccggcugcaacacaagacacga

SEQ ID NO: 30450 - RNA, 22 nt, Homo sapiens
aggcauaggaugacaaagggaa

SEQ ID NO: 30451 - RNA, 22 nt, Homo sapiens
aggcgaaggaugacaaagggaa

SEQ ID NO: 30452 - RNA, 22 nt, Homo sapiens
aaagugcuucuuaccuccagau

SEQ ID NO: 30453 - RNA, 21 nt, Homo sapiens
gcuccaaccucagcagacugu

SEQ ID NO: 30454 - RNA, 21 nt, Homo sapiens
gaccaaucgccguccccgccg

SEQ ID NO: 30455 - RNA, 22 nt, Homo sapiens
ucagaccgagacaagugcaaug

SEQ ID NO: 30456 - RNA, 23 nt, Homo sapiens
aagaaucuugucccgcagguccu

SEQ ID NO: 30457 - RNA, 20 nt, Homo sapiens
ggcauucaccgcgugccuua

SEQ ID NO: 30458 - RNA, 22 nt, Homo sapiens
cagaaagugcuucccucuagag

SEQ ID NO: 30459 - RNA, 21 nt, Homo sapiens
cacucugaagggaagcgcuuu

SEQ ID NO: 30460 - RNA, 21 nt, Homo sapiens
ccucuaaagagaagcgcuuuc

SEQ ID NO: 30461 - RNA, 22 nt, Homo sapiens
acacucuaaaaggaugcacuuu

SEQ ID NO: 30462 - RNA, 22 nt, Homo sapiens
cagaaagcgcuucccucuagag

SEQ ID NO: 30463 - RNA, 22 nt, Homo sapiens
cagaaagcgcuucccucuagag

SEQ ID NO: 30464 - RNA, 22 nt, Homo sapiens
cagaaagugcuucccucuagag

SEQ ID NO: 30465 - RNA, 22 nt, Homo sapiens
acacucuaaagggaaccauuuu

SEQ ID NO: 30466 - RNA, 23 nt, Homo sapiens
acccucuauagggaagcgcguuc

SEQ ID NO: 30467 - RNA, 22 nt, Homo sapiens
cagaaagugcuucccucuagag

SEQ ID NO: 30468 - RNA, 23 nt, Homo sapiens
ucucgugacaugaugauccccga

SEQ ID NO: 30469 - RNA, 22 nt, Homo sapiens
cuccuccaacaauccuagacca

SEQ ID NO: 30470 - RNA, 23 nt, Homo sapiens
gucagaccccgagggguccucgc

SEQ ID NO: 30471 - RNA, 22 nt, Homo sapiens
gcggucccgcggcgccccgccu

SEQ ID NO: 30472 - RNA, 22 nt, Homo sapiens
ugcuguuagcccuagccccgca

SEQ ID NO: 30473 - RNA, 20 nt, Homo sapiens
cucaaagcaaacccugcaga

SEQ ID NO: 30474 - RNA, 22 nt, Homo sapiens
gugggguggguggucaggccga

SEQ ID NO: 30475 - RNA, 22 nt, Homo sapiens
uagcagaagcauuuccgcacac

SEQ ID NO: 30476 - RNA, 23 nt, Homo sapiens
aggaacagcagcagcccgggccg

SEQ ID NO: 30477 - RNA, 23 nt, Homo sapiens
cuaccugcacuguaagcacuuug

SEQ ID NO: 30478 - RNA, 22 nt, Homo sapiens
aaagagguuaaccagguguguu

SEQ ID NO: 30479 - RNA, 21 nt, Homo sapiens
ucaaucacagauagcaccccu

SEQ ID NO: 30480 - RNA, 22 nt, Homo sapiens
ugaauccuugaauagguguguu

SEQ ID NO: 30481 - RNA, 23 nt, Homo sapiens
cugcagaacuguucccgcugcua

SEQ ID NO: 30482 - RNA, 22 nt, Homo sapiens
caugauugccacgucugcagua

SEQ ID NO: 30483 - RNA, 21 nt, Homo sapiens
ugauugccacugucugcagua

SEQ ID NO: 30484 - RNA, 19 nt, Homo sapiens
guccugaauuccgcagccu

SEQ ID NO: 30485 - RNA, 23 nt, Homo sapiens
acagcgcucgcaaccgcagcgau

SEQ ID NO: 30486 - RNA, 21 nt, Homo sapiens
uuccacgaccuaauccuaacu

SEQ ID NO: 30487 - RNA, 22 nt, Homo sapiens
cacaaaccauuaugugcugcua

SEQ ID NO: 30488 - RNA, 23 nt, Homo sapiens
ucuacuccaaaaggcuacaauca

SEQ ID NO: 30489 - RNA, 23 nt, Homo sapiens
cccagcuagauuguaagcuccuu

SEQ ID NO: 30490 - RNA, 23 nt, Homo sapiens
cugugggagggcaguggugagag

SEQ ID NO: 30491 - RNA, 24 nt, Homo sapiens
acugcaggcuccagcuuccaggcu

SEQ ID NO: 30492 - RNA, 24 nt, Homo sapiens
gaagucacucccaggcagcugcaa

SEQ ID NO: 30493 - RNA, 22 nt, Homo sapiens
ucgcccucucaacccagcuuuu

SEQ ID NO: 30494 - RNA, 22 nt, Homo sapiens
uugcccucucaacccagcuuuu

SEQ ID NO: 30495 - RNA, 20 nt, Homo sapiens
acccucucaacccagcuuuu

SEQ ID NO: 30496 - RNA, 19 nt, Homo sapiens
uccucucaacccagcuuuu

SEQ ID NO: 30497 - RNA, 22 nt, Homo sapiens
acuucaaggaucuuaaacuuug

SEQ ID NO: 30498 - RNA, 17 nt, Homo sapiens
gggagaggaggaggcga

SEQ ID NO: 30499 - RNA, 23 nt, Homo sapiens
aggaacagcagcagcccgggccg

SEQ ID NO: 30500 - RNA, 23 nt, Homo sapiens
cagcugcuuuugggauuccguug

SEQ ID NO: 30501 - RNA, 23 nt, Homo sapiens
cuccagccccuccagggcuuccu

SEQ ID NO: 30502 - RNA, 22 nt, Homo sapiens
ggcagagagucagagcgcggau

SEQ ID NO: 30503 - RNA, 21 nt, Homo sapiens
uucaguuaucacaguacugua

SEQ ID NO: 30504 - RNA, 21 nt, Homo sapiens
ucacccagaucugcggccuaa

SEQ ID NO: 30505 - RNA, 22 nt, Homo sapiens
ucucucccauuagaguugaaaa

SEQ ID NO: 30506 - RNA, 21 nt, Homo sapiens
acaugguuagaucaagcacaa

SEQ ID NO: 30507 - RNA, 22 nt, Homo sapiens
ggagagccuccacccaacccuc

SEQ ID NO: 30508 - RNA, 23 nt, Homo sapiens
acggcuaguggaccaggugaagu

SEQ ID NO: 30509 - RNA, 21 nt, Homo sapiens
caguagagauuguuucaacac

SEQ ID NO: 30510 - RNA, 22 nt, Homo sapiens
cacauggccaaaacagagaaga

SEQ ID NO: 30511 - RNA, 17 nt, Homo sapiens
gacagccucucccccac

SEQ ID NO: 30512 - RNA, 17 nt, Homo sapiens
ggguggcagcgguggga

SEQ ID NO: 30513 - RNA, 21 nt, Homo sapiens
ucuccagaucagggcagucca

SEQ ID NO: 30514 - RNA, 25 nt, Homo sapiens
cagcgucugccggaacccguuccca

SEQ ID NO: 30515 - RNA, 22 nt, Homo sapiens
auggcaguggaguuagugauug

SEQ ID NO: 30516 - RNA, 22 nt, Homo sapiens
auaaggauuuuuaggggcauua

SEQ ID NO: 30517 - RNA, 19 nt, Homo sapiens
auuuugguacagcagcuca

SEQ ID NO: 30518 - RNA, 22 nt, Homo sapiens
gauccgagcaccggggaccccc

SEQ ID NO: 30519 - RNA, 20 nt, Homo sapiens
uacugcuuccacagcucccc

SEQ ID NO: 30520 - RNA, 21 nt, Homo sapiens
gagcugcauccuggcuccggg

SEQ ID NO: 30521 - RNA, 18 nt, Homo sapiens
gaaaugagggccagcuga

SEQ ID NO: 30522 - RNA, 17 nt, Homo sapiens
gacagccucucccccac

SEQ ID NO: 30523 - RNA, 23 nt, Homo sapiens
aaaaugcagauuccuggacucca

SEQ ID NO: 30524 - RNA, 22 nt, Homo sapiens
ccaucuuuaccagacaguguua

SEQ ID NO: 30525 - RNA, 23 nt, Homo sapiens
gggagugaagacacggagccaga

SEQ ID NO: 30526 - RNA, 21 nt, Homo sapiens
gaccaaucgccguccccgccg

SEQ ID NO: 30527 - RNA, 22 nt, Homo sapiens
acaucguuaccagacaguguua

SEQ ID NO: 30528 - RNA, 22 nt, Homo sapiens
acaguucuucaacuggcagcuu

SEQ ID NO: 30529 - RNA, 23 nt, Homo sapiens
aaaucagaaucacaccuggggga

SEQ ID NO: 30530 - RNA, 19 nt, Homo sapiens
guugggaucacaggcgccc

SEQ ID NO: 30531 - RNA, 24 nt, Homo sapiens
acgcagagcccgaaagcccccagu

SEQ ID NO: 30532 - RNA, 24 nt, Homo sapiens
acgcgcaggccagagacccaggca

SEQ ID NO: 30533 - RNA, 22 nt, Homo sapiens
gcggucccgcggcgccccgccu

SEQ ID NO: 30534 - RNA, 22 nt, Homo sapiens
gaggcucagaauggcucaggag

SEQ ID NO: 30535 - RNA, 21 nt, Homo sapiens
gagcugcauccuggcuccggg

SEQ ID NO: 30536 - RNA, 22 nt, Homo sapiens
cacgaccgacgccacgccgagu

SEQ ID NO: 30537 - RNA, 22 nt, Homo sapiens
ggagcccgcgccccgcgccgag

SEQ ID NO: 30538 - RNA, 23 nt, Homo sapiens
cggcucugucgucgaggcgcuca

SEQ ID NO: 30539 - RNA, 23 nt, Homo sapiens
acgggugcgauuucugugugaga

SEQ ID NO: 30540 - RNA, 22 nt, Homo sapiens
acaaaaguugccuuugugugau

SEQ ID NO: 30541 - RNA, 23 nt, Homo sapiens
aaagucucgcucucugccccuca

SEQ ID NO: 30542 - RNA, 19 nt, Homo sapiens
auuuugguacagcagcuca

SEQ ID NO: 30543 - RNA, 19 nt, Homo sapiens
gccucagaggcagcugcuu

SEQ ID NO: 30544 - RNA, 21 nt, Homo sapiens
caucaccuuccuucuccucca

SEQ ID NO: 30545 - RNA, 22 nt, Homo sapiens
aaccauacaaccuacuaccuca

SEQ ID NO: 30546 - RNA, 21 nt, Homo sapiens
gagcugcauccuggcuccggg

SEQ ID NO: 30547 - RNA, 22 nt, Homo sapiens
aacccauggaauucaguucuca

SEQ ID NO: 30548 - RNA, 20 nt, Homo sapiens
gcagaagcauuuccacacac

SEQ ID NO: 30549 - RNA, 23 nt, Homo sapiens
cggcucugucgucgaggcgcuca

SEQ ID NO: 30550 - RNA, 23 nt, Homo sapiens
aagaaucuugucccgcagguccu

SEQ ID NO: 30551 - RNA, 22 nt, Homo sapiens
aggaaaccagcaaguguugacg

SEQ ID NO: 30552 - RNA, 23 nt, Homo sapiens
acacacucacacacacacacuca

SEQ ID NO: 30553 - RNA, 22 nt, Homo sapiens
gcaaaaguaauugcagugugug

SEQ ID NO: 30554 - RNA, 21 nt, Homo sapiens
gcugaggucugggccaggucu

SEQ ID NO: 30555 - RNA, 22 nt, Homo sapiens
caaacaccauugucacacucca

SEQ ID NO: 30556 - RNA, 22 nt, Homo sapiens
agucuucacaacagcccugugu

SEQ ID NO: 30557 - RNA, 23 nt, Homo sapiens
aaaucagaaucacaccuggggga

SEQ ID NO: 30558 - RNA, 22 nt, Homo sapiens
gaauucaucacggccagccucu

SEQ ID NO: 30559 - RNA, 23 nt, Homo sapiens
gaaagugcccucaaggcugagug

SEQ ID NO: 30560 - RNA, 18 nt, Homo sapiens
augacaccucccugugaa

SEQ ID NO: 30561 - RNA, 23 nt, Homo sapiens
acacucuaaagagaagcgcuuug

SEQ ID NO: 30562 - RNA, 21 nt, Homo sapiens
agaaaguacuucccucuggag

SEQ ID NO: 30563 - RNA, 21 nt, Homo sapiens
agaaagugcaucccucuggag

SEQ ID NO: 30564 - RNA, 24 nt, Homo sapiens
acgcagagcccgaaagcccccagu

SEQ ID NO: 30565 - RNA, 20 nt, Homo sapiens
cccugcgccaucuccucuac

SEQ ID NO: 30566 - RNA, 22 nt, Homo sapiens
acacacccacgcgagccggaaa

SEQ ID NO: 30567 - RNA, 22 nt, Homo sapiens
cuagggaacacagggcugguga

SEQ ID NO: 30568 - RNA, 21 nt, Homo sapiens
aaaggccacauccagcaccgu

SEQ ID NO: 30569 - RNA, 23 nt, Homo sapiens
cggccugauucacaacaccagcu

SEQ ID NO: 30570 - RNA, 22 nt, Homo sapiens
acuccaacagggccgcgucucc

SEQ ID NO: 30571 - RNA, 22 nt, Homo sapiens
accagcuaacaauacacugcca

SEQ ID NO: 30572 - RNA, 20 nt, Homo sapiens
agugcccccacaguuugagu

SEQ ID NO: 30573 - RNA, 22 nt, Homo sapiens
uaaccgauuucagauggugcua

SEQ ID NO: 30574 - RNA, 21 nt, Homo sapiens
agcuaugccagcaucuugccu

SEQ ID NO: 30575 - RNA, 22 nt, Homo sapiens
gaagaaaggcaucauauaggag

SEQ ID NO: 30576 - RNA, 22 nt, Homo sapiens
guagaagggaaucuugcauaag

SEQ ID NO: 30577 - RNA, 23 nt, Homo sapiens
ucucacccagguagcaaggauua

SEQ ID NO: 30578 - RNA, 22 nt, Homo sapiens
cugggggcggcacaggggcuca

SEQ ID NO: 30579 - RNA, 23 nt, Homo sapiens
gaaacccagcagacaauguagcu

SEQ ID NO: 30580 - RNA, 22 nt, Homo sapiens
gaauucaucacggccagccucu

SEQ ID NO: 30581 - RNA, 19 nt, Homo sapiens
aagacauuuucagacagcu

SEQ ID NO: 30582 - RNA, 20 nt, Homo sapiens
aggggccucagccuccuggu

SEQ ID NO: 30583 - RNA, 22 nt, Homo sapiens
ugcuguuagcccuagccccgca

SEQ ID NO: 30584 - RNA, 20 nt, Homo sapiens
uccccacagacccagagccg

SEQ ID NO: 30585 - RNA, 23 nt, Homo sapiens
ggaagccaucaagucgcugcagg

SEQ ID NO: 30586 - RNA, 27 nt, Homo sapiens
uuuagcacagugcuuauacaagaaggu

SEQ ID NO: 30587 - RNA, 24 nt, Homo sapiens
gaagucacucccaggcagcugcaa

SEQ ID NO: 30588 - RNA, 24 nt, Homo sapiens
gaagucacucccaggcagcugcaa

SEQ ID NO: 30589 - RNA, 22 nt, Homo sapiens
cgaccauggcuguagacuguua

SEQ ID NO: 30590 - RNA, 23 nt, Homo sapiens
agggauuccugggaaaacuggac

SEQ ID NO: 30591 - RNA, 22 nt, Homo sapiens
ccagaacugaguccacagggca

SEQ ID NO: 30592 - RNA, 22 nt, Homo sapiens
agcccaaaaggagaauucuuug

SEQ ID NO: 30593 - RNA, 21 nt, Homo sapiens
cccuccaccaugcaagggaug

SEQ ID NO: 30594 - RNA, 21 nt, Homo sapiens
gaccaaucgccguccccgccg

SEQ ID NO: 30595 - RNA, 21 nt, Homo sapiens
ggccgugacuggagacuguua

SEQ ID NO: 30596 - RNA, 22 nt, Homo sapiens
agucuucacaacagcccugugu

SEQ ID NO: 30597 - RNA, 21 nt, Homo sapiens
acaggauugagggggggcccu

SEQ ID NO: 30598 - RNA, 22 nt, Homo sapiens
aaucagucucauugcuuuauaa

SEQ ID NO: 30599 - RNA, 22 nt, Homo sapiens
aucgggaggggacugagccuga

SEQ ID NO: 30600 - RNA, 21 nt, Homo sapiens
acaaaccacagugugcugcug

SEQ ID NO: 30601 - RNA, 18 nt, Homo sapiens
augacaccucccugugaa

SEQ ID NO: 30602 - RNA, 22 nt, Homo sapiens
gcggucccgcggcgccccgccu

SEQ ID NO: 30603 - RNA, 22 nt, Homo sapiens
ugcuguuagcccuagccccgca

SEQ ID NO: 30604 - RNA, 22 nt, Homo sapiens
acacacccacgcgagccggaaa

SEQ ID NO: 30605 - RNA, 22 nt, Homo sapiens
cugggggcggcacaggggcuca

SEQ ID NO: 30606 - RNA, 22 nt, Homo sapiens
cacgaccgacgccacgccgagu

SEQ ID NO: 30607 - RNA, 22 nt, Homo sapiens
ggagcccgcgccccgcgccgag

SEQ ID NO: 30608 - RNA, 22 nt, Homo sapiens
ucaggaacugccuuucucucca

SEQ ID NO: 30609 - RNA, 21 nt, Homo sapiens
gaccaaucgccguccccgccg

SEQ ID NO: 30610 - RNA, 21 nt, Homo sapiens
ucaaucacagauagcaccccu

SEQ ID NO: 30611 - RNA, 22 nt, Homo sapiens
uccagcaaagggaagcgcuuuc

SEQ ID NO: 30612 - RNA, 22 nt, Homo sapiens
accucuaaaggggagcgcuuug

SEQ ID NO: 30613 - RNA, 23 nt, Homo sapiens
acacucuaaagagaagcgcuuug

SEQ ID NO: 30614 - RNA, 21 nt, Homo sapiens
gcuccaaagggaagcgcuuug

SEQ ID NO: 30615 - RNA, 21 nt, Homo sapiens
ccucuaaagagaagcgcuuuc

SEQ ID NO: 30616 - RNA, 22 nt, Homo sapiens
aagagggagacccaggcucgga

SEQ ID NO: 30617 - RNA, 22 nt, Homo sapiens
gcggucccgcggcgccccgccu

SEQ ID NO: 30618 - RNA, 22 nt, Homo sapiens
ccucaggcacggccgggccacc

SEQ ID NO: 30619 - RNA, 22 nt, Homo sapiens
ugcuguuagcccuagccccgca

SEQ ID NO: 30620 - RNA, 21 nt, Homo sapiens
gagcugcauccuggcuccggg

SEQ ID NO: 30621 - RNA, 23 nt, Homo sapiens
gggagugaagacacggagccaga

SEQ ID NO: 30622 - RNA, 21 nt, Homo sapiens
gaccaaucgccguccccgccg

SEQ ID NO: 30623 - RNA, 22 nt, Homo sapiens
uucacacugcaugcucugggua

SEQ ID NO: 30624 - RNA, 22 nt, Homo sapiens
cagaagugggccgggcacaggg

SEQ ID NO: 30625 - RNA, 22 nt, Homo sapiens
ucagaccgagacaagugcaaug

SEQ ID NO: 30626 - RNA, 22 nt, Homo sapiens
agcugaguguaggauguuuaca

SEQ ID NO: 30627 - RNA, 22 nt, Homo sapiens
gcggucccgcggcgccccgccu

SEQ ID NO: 30628 - RNA, 22 nt, Homo sapiens
ugcuguuagcccuagccccgca

SEQ ID NO: 30629 - RNA, 20 nt, Homo sapiens
uacugcuuccacagcucccc

SEQ ID NO: 30630 - RNA, 24 nt, Homo sapiens
cacccccagagccucagcucccca

SEQ ID NO: 30631 - RNA, 24 nt, Homo sapiens
cacccccagagccucagcucccca

SEQ ID NO: 30632 - RNA, 22 nt, Homo sapiens
cuuccagucgaggauguuuaca

SEQ ID NO: 30633 - RNA, 22 nt, Homo sapiens
cuuccagucggggauguuuaca

SEQ ID NO: 30634 - RNA, 22 nt, Homo sapiens
cuuccagucaaggauguuuaca

SEQ ID NO: 30635 - RNA, 19 nt, Homo sapiens
accagugcccugcacacuu

SEQ ID NO: 30636 - RNA, 22 nt, Homo sapiens
uauccacuacaccccgcugccu

SEQ ID NO: 30637 - RNA, 20 nt, Homo sapiens
uacugcuuccacagcucccc

SEQ ID NO: 30638 - RNA, 20 nt, Homo sapiens
uacugcuuccacagcucccc

SEQ ID NO: 30639 - RNA, 21 nt, Homo sapiens
agggcucaucuugguccugca

SEQ ID NO: 30640 - RNA, 25 nt, Homo sapiens
cagcgucugccggaacccguuccca

SEQ ID NO: 30641 - RNA, 22 nt, Homo sapiens
cagcugguugaaggggaccaaa

SEQ ID NO: 30642 - RNA, 22 nt, Homo sapiens
uagcugguugaaggggaccaaa

SEQ ID NO: 30643 - RNA, 23 nt, Homo sapiens
cuaucugcacuagaugcaccuua

SEQ ID NO: 30644 - RNA, 23 nt, Homo sapiens
cuaacugcacuagaugcaccuua

SEQ ID NO: 30645 - RNA, 22 nt, Homo sapiens
uggcagcagcggagggggcaga

SEQ ID NO: 30646 - RNA, 20 nt, Homo sapiens
ccagcagcaccuggggcagu

SEQ ID NO: 30647 - RNA, 21 nt, Homo sapiens
auccuguacugagcugccccg

SEQ ID NO: 30648 - RNA, 17 nt, Homo sapiens
gggagaggaggaggcga

SEQ ID NO: 30649 - RNA, 23 nt, Homo sapiens
gggagugaagacacggagccaga

SEQ ID NO: 30650 - RNA, 21 nt, Homo sapiens
gaccaaucgccguccccgccg

SEQ ID NO: 30651 - RNA, 21 nt, Homo sapiens
gaccaaucgccguccccgccg

SEQ ID NO: 30652 - RNA, 23 nt, Homo sapiens
aaagucucgcucucugccccuca

SEQ ID NO: 30653 - RNA, 22 nt, Homo sapiens
gcggucccgcggcgccccgccu

SEQ ID NO: 30654 - RNA, 22 nt, Homo sapiens
gcggucccgcggcgccccgccu

SEQ ID NO: 30655 - RNA, 20 nt, Homo sapiens
cucaaagcaaacccugcaga

SEQ ID NO: 30656 - RNA, 18 nt, Homo sapiens
gaaaugagggccagcuga

SEQ ID NO: 30657 - RNA, 17 nt, Homo sapiens
gacagccucucccccac

SEQ ID NO: 30658 - RNA, 22 nt, Homo sapiens
agcccaaaaggagaauucuuug

SEQ ID NO: 30659 - RNA, 21 nt, Homo sapiens
aucugcacugucagcacuuua

SEQ ID NO: 30660 - RNA, 23 nt, Homo sapiens
gcuuugacaauaucauugcacug

SEQ ID NO: 30661 - RNA, 23 nt, Homo sapiens
acgggugcgauuucugugugaga

SEQ ID NO: 30662 - RNA, 24 nt, Homo sapiens
acacucuaaagggaagcacuuugu

SEQ ID NO: 30663 - RNA, 22 nt, Homo sapiens
acucuaaagggaagcacuuugu

SEQ ID NO: 30664 - RNA, 21 nt, Homo sapiens
ggacuauagaacuuucccccu

SEQ ID NO: 30665 - RNA, 21 nt, Homo sapiens
aguucucccaacguaaaccca

SEQ ID NO: 30666 - RNA, 23 nt, Homo sapiens
cuccagccccuccagggcuuccu

SEQ ID NO: 30667 - RNA, 17 nt, Homo sapiens
gggagaggaggaggcga

SEQ ID NO: 30668 - RNA, 21 nt, Homo sapiens
agggcucaucuugguccugca

SEQ ID NO: 30669 - RNA, 21 nt, Homo sapiens
acuagacugugagcuccucga

SEQ ID NO: 30670 - RNA, 23 nt, Homo sapiens
aggaacagcagcagcccgggccg

SEQ ID NO: 30671 - RNA, 21 nt, Homo sapiens
gggcaucugggacgcgcagga

SEQ ID NO: 30672 - RNA, 22 nt, Homo sapiens
acccuuaucaguucuccgucca

SEQ ID NO: 30673 - RNA, 21 nt, Homo sapiens
gaccaaucgccguccccgccg

SEQ ID NO: 30674 - RNA, 22 nt, Homo sapiens
gauagagugcagaccagggucu

SEQ ID NO: 30675 - RNA, 21 nt, Homo sapiens
acuccaaagggaagcgccuuc

SEQ ID NO: 30676 - RNA, 22 nt, Homo sapiens
cgcucuaaagggaagcgccuuc

SEQ ID NO: 30677 - RNA, 19 nt, Homo sapiens
guugggaucacaggcgccc

SEQ ID NO: 30678 - RNA, 22 nt, Homo sapiens
gcggucccgcggcgccccgccu

SEQ ID NO: 30679 - RNA, 22 nt, Homo sapiens
ugcuguuagcccuagccccgca

SEQ ID NO: 30680 - RNA, 17 nt, Homo sapiens
gggagaggaggaggcga

SEQ ID NO: 30681 - RNA, 22 nt, Homo sapiens
acaccuggcuccacacgcgggc

SEQ ID NO: 30682 - RNA, 23 nt, Homo sapiens
gggagugaagacacggagccaga

SEQ ID NO: 30683 - RNA, 21 nt, Homo sapiens
acuagacugugagcuccucga

SEQ ID NO: 30684 - RNA, 21 nt, Homo sapiens
gggcaucugggacgcgcagga

SEQ ID NO: 30685 - RNA, 21 nt, Homo sapiens
gaccaaucgccguccccgccg

SEQ ID NO: 30686 - RNA, 22 nt, Homo sapiens
cucaauagacugugagcuccuu

SEQ ID NO: 30687 - RNA, 23 nt, Homo sapiens
gggcucuuacucccucaggcacu

SEQ ID NO: 30688 - RNA, 22 nt, Homo sapiens
gcggucccgcggcgccccgccu

SEQ ID NO: 30689 - RNA, 23 nt, Homo sapiens
cccagcuagauuguaagcuccuu

SEQ ID NO: 30690 - RNA, 20 nt, Homo sapiens
uccccacagacccagagccg

SEQ ID NO: 30691 - RNA, 21 nt, Homo sapiens
caucaccuuccuucuccucca

SEQ ID NO: 30692 - RNA, 18 nt, Homo sapiens
cccccaccaccacgcccg

SEQ ID NO: 30693 - RNA, 22 nt, Homo sapiens
ggagcccgcgccccgcgccgag

SEQ ID NO: 30694 - RNA, 22 nt, Homo sapiens
uacagauggauaccgugcaauu

SEQ ID NO: 30695 - RNA, 22 nt, Homo sapiens
gccagcuaacaauacacugccu

SEQ ID NO: 30696 - RNA, 22 nt, Homo sapiens
aggaaaccagcaaguguugacg

SEQ ID NO: 30697 - RNA, 25 nt, Homo sapiens
acggagcugucccaacaccaccccu

SEQ ID NO: 30698 - RNA, 22 nt, Homo sapiens
cuagugguccuaaacauuucac

SEQ ID NO: 30699 - RNA, 22 nt, Homo sapiens
uaaccgauuucagauggugcua

SEQ ID NO: 30700 - RNA, 23 nt, Homo sapiens
cggcucugucgucgaggcgcuca

SEQ ID NO: 30701 - RNA, 18 nt, Homo sapiens
augacaccucccugugaa

SEQ ID NO: 30702 - RNA, 21 nt, Homo sapiens
guaaugggaccuuccucuuug

SEQ ID NO: 30703 - RNA, 22 nt, Homo sapiens
caacuccgauaugcaaugggua

SEQ ID NO: 30704 - RNA, 20 nt, Homo sapiens
ugucuccacagggcucuuua

SEQ ID NO: 30705 - RNA, 17 nt, Homo sapiens
gggagaggaggaggcga

SEQ ID NO: 30706 - RNA, 21 nt, Homo sapiens
gcaagcccagaccgcaaaaag

SEQ ID NO: 30707 - RNA, 19 nt, Homo sapiens
cagcaucagcagcaucauc

SEQ ID NO: 30708 - RNA, 23 nt, Homo sapiens
uccaucaucaaaacaaauggagu

SEQ ID NO: 30709 - RNA, 23 nt, Homo sapiens
cuacgcguauucuuaagcaauaa

SEQ ID NO: 30710 - RNA, 22 nt, Homo sapiens
gagcccuggacuaggagucagc

SEQ ID NO: 30711 - RNA, 22 nt, Homo sapiens
cacuuaucagguuguauuauaa

SEQ ID NO: 30712 - RNA, 23 nt, Homo sapiens
cugcagaacuguucccgcugcua

SEQ ID NO: 30713 - RNA, 22 nt, Homo sapiens
aaaguaacugcaguuuuugcua

SEQ ID NO: 30714 - RNA, 23 nt, Homo sapiens
aaucgcgguuuauaccaaaugaa

SEQ ID NO: 30715 - RNA, 25 nt, Homo sapiens
accaacggaccuacuucccuccgcc

SEQ ID NO: 30716 - RNA, 23 nt, Homo sapiens
cacaaauucgguucuacagggua

SEQ ID NO: 30717 - RNA, 21 nt, Homo sapiens
agaaguagaccauguguccua

SEQ ID NO: 30718 - RNA, 18 nt, Homo sapiens
ugguggcagaggugggau

SEQ ID NO: 30719 - RNA, 17 nt, Homo sapiens
ggguggcagcgguggga

SEQ ID NO: 30720 - RNA, 22 nt, Homo sapiens
aacccauggaauucaguucuca

SEQ ID NO: 30721 - RNA, 22 nt, Homo sapiens
ugcaacuuaguaaugugcaaua

SEQ ID NO: 30722 - RNA, 23 nt, Homo sapiens
acccucuauagggaagcgcguuc

SEQ ID NO: 30723 - RNA, 23 nt, Homo sapiens
ccuagagagggugagaaccugcc

SEQ ID NO: 30724 - RNA, 20 nt, Homo sapiens
cucaaagcaaacccugcaga

SEQ ID NO: 30725 - RNA, 24 nt, Homo sapiens
ucacagguuaaagggucucaggga

SEQ ID NO: 30726 - RNA, 22 nt, Homo sapiens
ucacaaguuagggucucaggga

SEQ ID NO: 30727 - RNA, 23 nt, Homo sapiens
agcccuguucuacagcccugagg

SEQ ID NO: 30728 - RNA, 22 nt, Homo sapiens
ggagcccgcgccccgcgccgag

SEQ ID NO: 30729 - RNA, 22 nt, Homo sapiens
ucaggaacugccuuucucucca

SEQ ID NO: 30730 - RNA, 23 nt, Homo sapiens
cuaucugcacuagaugcaccuua

SEQ ID NO: 30731 - RNA, 22 nt, Homo sapiens
ccucauggaaggguuccccacu

SEQ ID NO: 30732 - RNA, 21 nt, Homo sapiens
acuccaaagggaagcgccuuc

SEQ ID NO: 30733 - RNA, 22 nt, Homo sapiens
cgcucuaaagggaagcgccuuc

SEQ ID NO: 30734 - RNA, 19 nt, Homo sapiens
guugggaucacaggcgccc

SEQ ID NO: 30735 - RNA, 23 nt, Homo sapiens
gggccgcagcugucgcccguguc

SEQ ID NO: 30736 - RNA, 25 nt, Homo sapiens
acggagcugucccaacaccaccccu

SEQ ID NO: 30737 - RNA, 22 nt, Homo sapiens
gcggucccgcggcgccccgccu

SEQ ID NO: 30738 - RNA, 22 nt, Homo sapiens
ugcuguuagcccuagccccgca

SEQ ID NO: 30739 - RNA, 22 nt, Homo sapiens
ucggucccucgggccagggcag

SEQ ID NO: 30740 - RNA, 20 nt, Homo sapiens
uacugcuuccacagcucccc

SEQ ID NO: 30741 - RNA, 22 nt, Homo sapiens
gcacaaaucuccagaccaccca

SEQ ID NO: 30742 - RNA, 21 nt, Homo sapiens
ccgugguucuacccuguggua

SEQ ID NO: 30743 - RNA, 23 nt, Homo sapiens
accccuaucacgauuagcauuaa

SEQ ID NO: 30744 - RNA, 23 nt, Homo sapiens
cuaccugcacuguaagcacuuug

SEQ ID NO: 30745 - RNA, 22 nt, Homo sapiens
auguaugugggacgguaaacca

SEQ ID NO: 30746 - RNA, 22 nt, Homo sapiens
caacaaaaucacugaugcugga

SEQ ID NO: 30747 - RNA, 22 nt, Homo sapiens
agccacaaucaccuucugaucu

SEQ ID NO: 30748 - RNA, 21 nt, Homo sapiens
acaaaccacagugugcugcug

SEQ ID NO: 30749 - RNA, 21 nt, Homo sapiens
uagcacccagauagcaaggau

SEQ ID NO: 30750 - RNA, 22 nt, Homo sapiens
caugauugccacgucugcagua

SEQ ID NO: 30751 - RNA, 21 nt, Homo sapiens
ugauugccacugucugcagua

SEQ ID NO: 30752 - RNA, 22 nt, Homo sapiens
caacuccgauaugcaaugggua

SEQ ID NO: 30753 - RNA, 22 nt, Homo sapiens
gcugaggcuguggggcuggagu

SEQ ID NO: 30754 - RNA, 18 nt, Homo sapiens
aucacauucaccucccug

SEQ ID NO: 30755 - RNA, 22 nt, Homo sapiens
gcugccguauaugugaugucac

SEQ ID NO: 30756 - RNA, 21 nt, Homo sapiens
aaacaucacugcaagucuuaa

SEQ ID NO: 30757 - RNA, 22 nt, Homo sapiens
cuacccacagacguaccaauca

SEQ ID NO: 30758 - RNA, 21 nt, Homo sapiens
caucaccuuccuucuccucca

SEQ ID NO: 30759 - RNA, 24 nt, Homo sapiens
agugugaguucuaccauugccaaa

SEQ ID NO: 30760 - RNA, 22 nt, Homo sapiens
uggcagcagcggagggggcaga

SEQ ID NO: 30761 - RNA, 20 nt, Homo sapiens
cuggaggaagggcccagagg

SEQ ID NO: 30762 - RNA, 22 nt, Homo sapiens
gccuaagacacaggcccagaga

SEQ ID NO: 30763 - RNA, 23 nt, Homo sapiens
aaaucagaaucacaccuggggga

SEQ ID NO: 30764 - RNA, 21 nt, Homo sapiens
ugacugcagagcaaaagacac

SEQ ID NO: 30765 - RNA, 19 nt, Homo sapiens
auuuugguacagcagcuca

SEQ ID NO: 30766 - RNA, 24 nt, Homo sapiens
acgcagagcccgaaagcccccagu

SEQ ID NO: 30767 - RNA, 21 nt, Homo sapiens
caucaccuuccuucuccucca

SEQ ID NO: 30768 - RNA, 18 nt, Homo sapiens
gaaaugagggccagcuga

SEQ ID NO: 30769 - RNA, 25 nt, Homo sapiens
agcuagucaagcgcgguuguggggg

SEQ ID NO: 30770 - RNA, 22 nt, Homo sapiens
cacucagcggccguuuccccaa

SEQ ID NO: 30771 - RNA, 22 nt, Homo sapiens
acaaccagcuaagacacugcca

SEQ ID NO: 30772 - RNA, 23 nt, Homo sapiens
gcaaucagcuaacuacacugccu

SEQ ID NO: 30773 - RNA, 22 nt, Homo sapiens
accagcuaacaauacacugcca

SEQ ID NO: 30774 - RNA, 22 nt, Homo sapiens
gccagcuaacaauacacugccu

SEQ ID NO: 30775 - RNA, 19 nt, Homo sapiens
agaaaccccagcagagaca

SEQ ID NO: 30776 - RNA, 23 nt, Homo sapiens
uguaggcuggggauaaaugaaua

SEQ ID NO: 30777 - RNA, 21 nt, Homo sapiens
cggggugcacgggcggagggc

SEQ ID NO: 30778 - RNA, 21 nt, Homo sapiens
gaccaaucgccguccccgccg

SEQ ID NO: 30779 - RNA, 22 nt, Homo sapiens
uggcagcagcggagggggcaga

SEQ ID NO: 30780 - RNA, 22 nt, Homo sapiens
ucagaccgagacaagugcaaug

SEQ ID NO: 30781 - RNA, 20 nt, Homo sapiens
ccagcagcaccuggggcagu

SEQ ID NO: 30782 - RNA, 20 nt, Homo sapiens
cuggaggaagggcccagagg

SEQ ID NO: 30783 - RNA, 22 nt, Homo sapiens
gccuaagacacaggcccagaga

SEQ ID NO: 30784 - RNA, 21 nt, Homo sapiens
auccuguacugagcugccccg

SEQ ID NO: 30785 - RNA, 19 nt, Homo sapiens
guccugaauuccgcagccu

SEQ ID NO: 30786 - RNA, 22 nt, Homo sapiens
gcggucccgcggcgccccgccu

SEQ ID NO: 30787 - RNA, 22 nt, Homo sapiens
ugcuguuagcccuagccccgca

SEQ ID NO: 30788 - RNA, 20 nt, Homo sapiens
uacugcuuccacagcucccc

SEQ ID NO: 30789 - RNA, 22 nt, Homo sapiens
caaacaccauugucacacucca

SEQ ID NO: 30790 - RNA, 21 nt, Homo sapiens
agcgccuuuggcagcuagagu

SEQ ID NO: 30791 - RNA, 21 nt, Homo sapiens
gaccaaucgccguccccgccg

SEQ ID NO: 30792 - RNA, 23 nt, Homo sapiens
aaagucucgcucucugccccuca

SEQ ID NO: 30793 - RNA, 22 nt, Homo sapiens
gcggucccgcggcgccccgccu

SEQ ID NO: 30794 - RNA, 22 nt, Homo sapiens
gguuaguggaccaggucacaaa

SEQ ID NO: 30795 - RNA, 21 nt, Homo sapiens
aucugcacugucagcacuuua

SEQ ID NO: 30796 - RNA, 18 nt, Homo sapiens
ggagaggagggcacugga

SEQ ID NO: 30797 - RNA, 19 nt, Homo sapiens
auuuugguacagcagcuca

SEQ ID NO: 30798 - RNA, 21 nt, Homo sapiens
aguucucccaacguaaaccca

SEQ ID NO: 30799 - RNA, 22 nt, Homo sapiens
ggcagagagucagagcgcggau

SEQ ID NO: 30800 - RNA, 24 nt, Homo sapiens
cacccccagagccucagcucccca

SEQ ID NO: 30801 - RNA, 22 nt, Homo sapiens
caaacaccauugucacacucca

SEQ ID NO: 30802 - RNA, 23 nt, Homo sapiens
gggagugaagacacggagccaga

SEQ ID NO: 30803 - RNA, 23 nt, Homo sapiens
aggaacagcagcagcccgggccg

SEQ ID NO: 30804 - RNA, 21 nt, Homo sapiens
gaccaaucgccguccccgccg

SEQ ID NO: 30805 - RNA, 21 nt, Homo sapiens
acaggauugagggggggcccu

SEQ ID NO: 30806 - RNA, 22 nt, Homo sapiens
auaaggauuuuuaggggcauua

SEQ ID NO: 30807 - RNA, 22 nt, Homo sapiens
gcggucccgcggcgccccgccu

SEQ ID NO: 30808 - RNA, 22 nt, Homo sapiens
ugcuguuagcccuagccccgca

SEQ ID NO: 30809 - RNA, 21 nt, Homo sapiens
ccccucccagccucccugcca

SEQ ID NO: 30810 - RNA, 19 nt, Homo sapiens
ccaccucccgaguccucac

SEQ ID NO: 30811 - RNA, 17 nt, Homo sapiens
gggagaggaggaggcga

SEQ ID NO: 30812 - RNA, 22 nt, Homo sapiens
ucaggaacugccuuucucucca

SEQ ID NO: 30813 - RNA, 21 nt, Homo sapiens
gaccaaucgccguccccgccg

SEQ ID NO: 30814 - RNA, 22 nt, Homo sapiens
cggugagcacccggccccugcg

SEQ ID NO: 30815 - RNA, 21 nt, Homo sapiens
acaggauugagggggggcccu

SEQ ID NO: 30816 - RNA, 20 nt, Homo sapiens
cuggaggaagggcccagagg

SEQ ID NO: 30817 - RNA, 22 nt, Homo sapiens
gccuaagacacaggcccagaga

SEQ ID NO: 30818 - RNA, 22 nt, Homo sapiens
aaucagucucauugcuuuauaa

SEQ ID NO: 30819 - RNA, 23 nt, Homo sapiens
aaaucagaaucacaccuggggga

SEQ ID NO: 30820 - RNA, 22 nt, Homo sapiens
gaauucaucacggccagccucu

SEQ ID NO: 30821 - RNA, 24 nt, Homo sapiens
acgcagagcccgaaagcccccagu

SEQ ID NO: 30822 - RNA, 22 nt, Homo sapiens
gcggucccgcggcgccccgccu

SEQ ID NO: 30823 - RNA, 22 nt, Homo sapiens
caaacaccauugucacacucca

SEQ ID NO: 30824 - RNA, 21 nt, Homo sapiens
cggggugcacgggcggagggc

SEQ ID NO: 30825 - RNA, 21 nt, Homo sapiens
gaccaaucgccguccccgccg

SEQ ID NO: 30826 - RNA, 22 nt, Homo sapiens
aguccagauucugugcccacca

SEQ ID NO: 30827 - RNA, 22 nt, Homo sapiens
gcacauguucugcggcccacca

SEQ ID NO: 30828 - RNA, 25 nt, Homo sapiens
accaacggaccuacuucccuccgcc

SEQ ID NO: 30829 - RNA, 23 nt, Homo sapiens
cacugugggcccucuccgcacca

SEQ ID NO: 30830 - RNA, 22 nt, Homo sapiens
ugcuguuagcccuagccccgca

SEQ ID NO: 30831 - RNA, 23 nt, Homo sapiens
gcacaugugcacacagccgggug

SEQ ID NO: 30832 - RNA, 21 nt, Homo sapiens
cucccccacugcagcuggcac

SEQ ID NO: 30833 - RNA, 22 nt, Homo sapiens
cugggggcggcacaggggcuca

SEQ ID NO: 30834 - RNA, 22 nt, Homo sapiens
caaacaccauugucacacucca

SEQ ID NO: 30835 - RNA, 22 nt, Homo sapiens
ugagugcuugcuaggugccaag

SEQ ID NO: 30836 - RNA, 17 nt, Homo sapiens
gggagaggaggaggcga

SEQ ID NO: 30837 - RNA, 18 nt, Homo sapiens
aucacauucaccucccug

SEQ ID NO: 30838 - RNA, 23 nt, Homo sapiens
gggagugaagacacggagccaga

SEQ ID NO: 30839 - RNA, 23 nt, Homo sapiens
aggaacagcagcagcccgggccg

SEQ ID NO: 30840 - RNA, 22 nt, Homo sapiens
ucaggaacugccuuucucucca

SEQ ID NO: 30841 - RNA, 21 nt, Homo sapiens
gaccaaucgccguccccgccg

SEQ ID NO: 30842 - RNA, 22 nt, Homo sapiens
ucagaccgagacaagugcaaug

SEQ ID NO: 30843 - RNA, 23 nt, Homo sapiens
aaucgcgguuuauaccaaaugaa

SEQ ID NO: 30844 - RNA, 24 nt, Homo sapiens
acgcgcaggccagagacccaggca

SEQ ID NO: 30845 - RNA, 22 nt, Homo sapiens
gcggucccgcggcgccccgccu

SEQ ID NO: 30846 - RNA, 22 nt, Homo sapiens
ugcuguuagcccuagccccgca

SEQ ID NO: 30847 - RNA, 23 nt, Homo sapiens
agcaaaaaugugcuagugccaaa

SEQ ID NO: 30848 - RNA, 22 nt, Homo sapiens
cugggggcggcacaggggcuca

SEQ ID NO: 30849 - RNA, 17 nt, Homo sapiens
gacagccucucccccac

SEQ ID NO: 30850 - RNA, 17 nt, Homo sapiens
gggagaggaggaggcga

SEQ ID NO: 30851 - RNA, 21 nt, Homo sapiens
ugcaaacccugcaugugggag

SEQ ID NO: 30852 - RNA, 21 nt, Homo sapiens
gaccaaucgccguccccgccg

SEQ ID NO: 30853 - RNA, 22 nt, Homo sapiens
agcgggacuuugagggccaguu

SEQ ID NO: 30854 - RNA, 22 nt, Homo sapiens
cuagugguccuaaacauuucac

SEQ ID NO: 30855 - RNA, 22 nt, Homo sapiens
cagacuccgguggaaugaagga

SEQ ID NO: 30856 - RNA, 22 nt, Homo sapiens
acugccugucugugccugcugu

SEQ ID NO: 30857 - RNA, 23 nt, Homo sapiens
gaaacccagcagacaauguagcu

SEQ ID NO: 30858 - RNA, 23 nt, Homo sapiens
cggcucugucgucgaggcgcuca

SEQ ID NO: 30859 - RNA, 22 nt, Homo sapiens
accagguuccaccccagcaggc

SEQ ID NO: 30860 - RNA, 21 nt, Homo sapiens
acuccaaagggaagcgccuuc

SEQ ID NO: 30861 - RNA, 22 nt, Homo sapiens
cgcucuaaagggaagcgccuuc

SEQ ID NO: 30862 - RNA, 22 nt, Homo sapiens
ugcaagccuugggugugggagg

SEQ ID NO: 30863 - RNA, 23 nt, Homo sapiens
ccaccuggcaagaacaggcguuc

SEQ ID NO: 30864 - RNA, 22 nt, Homo sapiens
gcggucccgcggcgccccgccu

SEQ ID NO: 30865 - RNA, 22 nt, Homo sapiens
cacucuaaagggaggcacuuug

SEQ ID NO: 30866 - RNA, 22 nt, Homo sapiens
gggagaggucucccugcgcaca

SEQ ID NO: 30867 - RNA, 23 nt, Homo sapiens
aggaacagcagcagcccgggccg

SEQ ID NO: 30868 - RNA, 18 nt, Homo sapiens
ggagaggagggcacugga

SEQ ID NO: 30869 - RNA, 23 nt, Homo sapiens
acacucaaaagauggcggcacuu

SEQ ID NO: 30870 - RNA, 22 nt, Homo sapiens
aagagggagacccaggcucgga

SEQ ID NO: 30871 - RNA, 21 nt, Homo sapiens
caucaccuuccuucuccucca

SEQ ID NO: 30872 - RNA, 23 nt, Homo sapiens
gggagugaagacacggagccaga

SEQ ID NO: 30873 - RNA, 22 nt, Homo sapiens
aggaaaccagcaaguguugacg

SEQ ID NO: 30874 - RNA, 20 nt, Homo sapiens
ggggcagacagacgaggaag

SEQ ID NO: 30875 - RNA, 22 nt, Homo sapiens
cacgaccgacgccacgccgagu

SEQ ID NO: 30876 - RNA, 22 nt, Homo sapiens
ggagcccgcgccccgcgccgag

SEQ ID NO: 30877 - RNA, 21 nt, Homo sapiens
acuagacugugagcuccucga

SEQ ID NO: 30878 - RNA, 21 nt, Homo sapiens
gaccaaucgccguccccgccg

SEQ ID NO: 30879 - RNA, 21 nt, Homo sapiens
agagcucauccauaguuguca

SEQ ID NO: 30880 - RNA, 23 nt, Homo sapiens
aaaucagaaucacaccuggggga

SEQ ID NO: 30881 - RNA, 22 nt, Homo sapiens
cuacccacagacguaccaauca

SEQ ID NO: 30882 - RNA, 21 nt, Homo sapiens
agacacaccacggcacacuuc

SEQ ID NO: 30883 - RNA, 24 nt, Homo sapiens
acgcagagcccgaaagcccccagu

SEQ ID NO: 30884 - RNA, 19 nt, Homo sapiens
accagugcccugcacacuu

SEQ ID NO: 30885 - RNA, 22 nt, Homo sapiens
uggggacccucccugaaccaag

SEQ ID NO: 30886 - RNA, 22 nt, Homo sapiens
gcggucccgcggcgccccgccu

SEQ ID NO: 30887 - RNA, 22 nt, Homo sapiens
ugcuguuagcccuagccccgca

SEQ ID NO: 30888 - RNA, 26 nt, Homo sapiens
uuucagaauuugcugccaucaucauc

SEQ ID NO: 30889 - RNA, 24 nt, Homo sapiens
gaagucacucccaggcagcugcaa

SEQ ID NO: 30890 - RNA, 23 nt, Homo sapiens
ucacauaggaauaaaaagccaua

SEQ ID NO: 30891 - RNA, 23 nt, Homo sapiens
ucacauaggaaugaaaagccaua

SEQ ID NO: 30892 - RNA, 23 nt, Homo sapiens
ccacugaaacauggaagcacuua

SEQ ID NO: 30893 - RNA, 22 nt, Homo sapiens
ucaguuuccucugcaaacaguu

SEQ ID NO: 30894 - RNA, 21 nt, Homo sapiens
acuagcuuauacauaaaauua

SEQ ID NO: 30895 - RNA, 22 nt, Homo sapiens
cacgaccgacgccacgccgagu

SEQ ID NO: 30896 - RNA, 22 nt, Homo sapiens
uagucaagugaagcagugggag

SEQ ID NO: 30897 - RNA, 22 nt, Homo sapiens
ucagaccgagacaagugcaaug

SEQ ID NO: 30898 - RNA, 23 nt, Homo sapiens
acaccaaugcccuaggggaugcg

SEQ ID NO: 30899 - RNA, 22 nt, Homo sapiens
ucaguuuccucugcaaacaguu

SEQ ID NO: 30900 - RNA, 23 nt, Homo sapiens
ugcgaacucaccacggacaaccu

SEQ ID NO: 30901 - RNA, 22 nt, Homo sapiens
uccagcaaagggaagcgcuuuc

SEQ ID NO: 30902 - RNA, 22 nt, Homo sapiens
accucuaaaggggagcgcuuug

SEQ ID NO: 30903 - RNA, 23 nt, Homo sapiens
acacucuaaagagaagcgcuuug

SEQ ID NO: 30904 - RNA, 21 nt, Homo sapiens
gcuccaaagggaagcgcuuug

SEQ ID NO: 30905 - RNA, 21 nt, Homo sapiens
ccucuaaagagaagcgcuuuc

SEQ ID NO: 30906 - RNA, 19 nt, Homo sapiens
ucccacaggaagcagacac

SEQ ID NO: 30907 - RNA, 22 nt, Homo sapiens
gugggguggguggucaggccga

SEQ ID NO: 30908 - RNA, 22 nt, Homo sapiens
agacaacaaugccaaccucaca

SEQ ID NO: 30909 - RNA, 22 nt, Homo sapiens
ucaggaacugccuuucucucca

SEQ ID NO: 30910 - RNA, 22 nt, Homo sapiens
ugagccacugugccuggccuga

SEQ ID NO: 30911 - RNA, 23 nt, Homo sapiens
gaaacccagcagacaauguagcu

SEQ ID NO: 30912 - RNA, 21 nt, Homo sapiens
uucuaggauaggcccaggggc

SEQ ID NO: 30913 - RNA, 22 nt, Homo sapiens
cugcucaaacccuccaaugacu

SEQ ID NO: 30914 - RNA, 23 nt, Homo sapiens
agcaaaaaugugcuagugccaaa

SEQ ID NO: 30915 - RNA, 23 nt, Homo sapiens
ggaagccaucaagucgcugcagg

SEQ ID NO: 30916 - RNA, 20 nt, Homo sapiens
cucaaagcaaacccugcaga

SEQ ID NO: 30917 - RNA, 24 nt, Homo sapiens
gaagucacucccaggcagcugcaa

SEQ ID NO: 30918 - RNA, 23 nt, Homo sapiens
uccauaaaguaggaaacacuaca

SEQ ID NO: 30919 - RNA, 22 nt, Homo sapiens
aacccauggaauucaguucuca

SEQ ID NO: 30920 - RNA, 22 nt, Homo sapiens
gaucacuuuugugacuaugcaa

SEQ ID NO: 30921 - RNA, 21 nt, Homo sapiens
caugcacaugcacacauacau

SEQ ID NO: 30922 - RNA, 21 nt, Homo sapiens
gaccaagaaauagccuuucaa

SEQ ID NO: 30923 - RNA, 19 nt, Homo sapiens
auuuugguacagcagcuca

SEQ ID NO: 30924 - RNA, 23 nt, Homo sapiens
gggccgcagcugucgcccguguc

SEQ ID NO: 30925 - RNA, 23 nt, Homo sapiens
cuaacugcacuagaugcaccuua

SEQ ID NO: 30926 - RNA, 22 nt, Homo sapiens
uuaacagcuaagcacccuaauc

SEQ ID NO: 30927 - RNA, 22 nt, Homo sapiens
aagauguggaccauauuacaua

SEQ ID NO: 30928 - RNA, 23 nt, Homo sapiens
aaucgcgguuuauaccaaaugaa

SEQ ID NO: 30929 - RNA, 21 nt, Homo sapiens
cugggggacggagcagaagga

SEQ ID NO: 30930 - RNA, 21 nt, Homo sapiens
aaaggccacauccagcaccgu

SEQ ID NO: 30931 - RNA, 22 nt, Homo sapiens
cagcugguugaaggggaccaaa

SEQ ID NO: 30932 - RNA, 22 nt, Homo sapiens
uagcugguugaaggggaccaaa

SEQ ID NO: 30933 - RNA, 23 nt, Homo sapiens
gaaacccagcagacaauguagcu

SEQ ID NO: 30934 - RNA, 22 nt, Homo sapiens
ucagaccgagacaagugcaaug

SEQ ID NO: 30935 - RNA, 24 nt, Homo sapiens
ugggagaaccucccugcuucugcu

SEQ ID NO: 30936 - RNA, 23 nt, Homo sapiens
ucaccaaaacauggaagcacuua

SEQ ID NO: 30937 - RNA, 23 nt, Homo sapiens
cuacuaaaacauggaagcacuua

SEQ ID NO: 30938 - RNA, 23 nt, Homo sapiens
ccacugaaacauggaagcacuua

SEQ ID NO: 30939 - RNA, 23 nt, Homo sapiens
acacucaaacauggaagcacuua

SEQ ID NO: 30940 - RNA, 17 nt, Homo sapiens
aagcauggaagcacuua

SEQ ID NO: 30941 - RNA, 21 nt, Homo sapiens
uucuaggauaggcccaggggc

SEQ ID NO: 30942 - RNA, 22 nt, Homo sapiens
acaaccagcuaagacacugcca

SEQ ID NO: 30943 - RNA, 23 nt, Homo sapiens
acgcucaaaugucgcagcacuuu

SEQ ID NO: 30944 - RNA, 23 nt, Homo sapiens
acaccccaaaaucgaagcacuuc

SEQ ID NO: 30945 - RNA, 22 nt, Homo sapiens
cuacccacagacguaccaauca

SEQ ID NO: 30946 - RNA, 22 nt, Homo sapiens
acaguccaaagggaagcacuuu

SEQ ID NO: 30947 - RNA, 21 nt, Homo sapiens
cccucuaaaaggaagcacuuu

SEQ ID NO: 30948 - RNA, 22 nt, Homo sapiens
acccucuaaaaggaagcacuuu

SEQ ID NO: 30949 - RNA, 22 nt, Homo sapiens
acccaccaaagagaagcacuuu

SEQ ID NO: 30950 - RNA, 21 nt, Homo sapiens
cccucaaaaaggaagcacuuu

SEQ ID NO: 30951 - RNA, 22 nt, Homo sapiens
aacccucuaaaaggaagcacuu

SEQ ID NO: 30952 - RNA, 23 nt, Homo sapiens
ugcgggcgggacgagcaagcaca

SEQ ID NO: 30953 - RNA, 22 nt, Homo sapiens
ccucaggcacggccgggccacc

SEQ ID NO: 30954 - RNA, 21 nt, Homo sapiens
caucaccuuccuucuccucca

SEQ ID NO: 30955 - RNA, 22 nt, Homo sapiens
gaggcucagaauggcucaggag

SEQ ID NO: 30956 - RNA, 20 nt, Homo sapiens
cuggggaaaaggguggcacg

SEQ ID NO: 30957 - RNA, 22 nt, Homo sapiens
cuggagagacaaggggaagagg

SEQ ID NO: 30958 - RNA, 22 nt, Homo sapiens
uccggggacgaacgggacgggu

SEQ ID NO: 30959 - RNA, 22 nt, Homo sapiens
agcuagugagaagucaaugccu

SEQ ID NO: 30960 - RNA, 21 nt, Homo sapiens
ugcaaacccugcaugugggag

SEQ ID NO: 30961 - RNA, 22 nt, Homo sapiens
cuguuccugcugaacugagcca

SEQ ID NO: 30962 - RNA, 22 nt, Homo sapiens
ucagaccgagacaagugcaaug

SEQ ID NO: 30963 - RNA, 22 nt, Homo sapiens
ugcaacuuaguaaugugcaaua

SEQ ID NO: 30964 - RNA, 22 nt, Homo sapiens
uacagauggauaccgugcaauu

SEQ ID NO: 30965 - RNA, 22 nt, Homo sapiens
ucaccauugcuaaagugcaauu

SEQ ID NO: 30966 - RNA, 22 nt, Homo sapiens
ccucauggaaggguuccccacu

SEQ ID NO: 30967 - RNA, 25 nt, Homo sapiens
acggagcugucccaacaccaccccu

SEQ ID NO: 30968 - RNA, 22 nt, Homo sapiens
acaggccgggacaagugcaaua

SEQ ID NO: 30969 - RNA, 20 nt, Homo sapiens
uacugcuuccacagcucccc

SEQ ID NO: 30970 - RNA, 22 nt, Homo sapiens
ggaggccgggacgagugcaaua

SEQ ID NO: 30971 - RNA, 22 nt, Homo sapiens
ggaggccgggacgagugcaaua

SEQ ID NO: 30972 - RNA, 22 nt, Homo sapiens
cacauggccaaaacagagaaga

SEQ ID NO: 30973 - RNA, 21 nt, Homo sapiens
cucccccacugcagcuggcac

SEQ ID NO: 30974 - RNA, 23 nt, Homo sapiens
cugugggagggcaguggugagag

SEQ ID NO: 30975 - RNA, 20 nt, Homo sapiens
ggcauucaccgcgugccuua

SEQ ID NO: 30976 - RNA, 22 nt, Homo sapiens
uaaaugaauucaauuuccuucu

SEQ ID NO: 30977 - RNA, 22 nt, Homo sapiens
aggucucacuuuguugcccaga

SEQ ID NO: 30978 - RNA, 24 nt, Homo sapiens
acugcuggucuucagucagggcca

SEQ ID NO: 30979 - RNA, 22 nt, Homo sapiens
agacaacaaugccaaccucaca

SEQ ID NO: 30980 - RNA, 18 nt, Homo sapiens
cagcagccuccuucucaa

SEQ ID NO: 30981 - RNA, 22 nt, Homo sapiens
cucaauagacugugagcuccuu

SEQ ID NO: 30982 - RNA, 21 nt, Homo sapiens
acaggauugagggggggcccu

SEQ ID NO: 30983 - RNA, 21 nt, Homo sapiens
ucuacucagaagggugccuua

SEQ ID NO: 30984 - RNA, 23 nt, Homo sapiens
caugagugacgcccucuggagua

SEQ ID NO: 30985 - RNA, 25 nt, Homo sapiens
aaggagcucagaagcccugcccagc

SEQ ID NO: 30986 - RNA, 19 nt, Homo sapiens
gccucagaggcagcugcuu

SEQ ID NO: 30987 - RNA, 23 nt, Homo sapiens
cccagcuagauuguaagcuccuu

SEQ ID NO: 30988 - RNA, 22 nt, Homo sapiens
gcugaggcuguggggcuggagu

SEQ ID NO: 30989 - RNA, 22 nt, Homo sapiens
cacauggccaaaacagagaaga

SEQ ID NO: 30990 - RNA, 23 nt, Homo sapiens
cuaccugcacuguaagcacuuuu

SEQ ID NO: 30991 - RNA, 22 nt, Homo sapiens
agcuagugagaagucaaugccu

SEQ ID NO: 30992 - RNA, 17 nt, Homo sapiens
caccugaauuacuugaa

SEQ ID NO: 30993 - RNA, 22 nt, Homo sapiens
agugaauucuaccagugccaua

SEQ ID NO: 30994 - RNA, 21 nt, Homo sapiens
acccaguagccagauguagcu

SEQ ID NO: 30995 - RNA, 22 nt, Homo sapiens
ucagaccgagacaagugcaaug

SEQ ID NO: 30996 - RNA, 21 nt, Homo sapiens
accuauccugaauuacuugaa

SEQ ID NO: 30997 - RNA, 22 nt, Homo sapiens
ugcaacuuaguaaugugcaaua

SEQ ID NO: 30998 - RNA, 22 nt, Homo sapiens
uacagauggauaccgugcaauu

SEQ ID NO: 30999 - RNA, 22 nt, Homo sapiens
ucaccauugcuaaagugcaauu

SEQ ID NO: 31000 - RNA, 20 nt, Homo sapiens
gaaagggcuucccuuugcag

SEQ ID NO: 31001 - RNA, 20 nt, Homo sapiens
gaaagggcuucccuuugcag

SEQ ID NO: 31002 - RNA, 21 nt, Homo sapiens
guaaugggaccuuccucuuug

SEQ ID NO: 31003 - RNA, 22 nt, Homo sapiens
gccaccuucaaaugggaagucu

SEQ ID NO: 31004 - RNA, 22 nt, Homo sapiens
acaggccgggacaagugcaaua

SEQ ID NO: 31005 - RNA, 22 nt, Homo sapiens
ggaggccgggacgagugcaaua

SEQ ID NO: 31006 - RNA, 22 nt, Homo sapiens
cugcgauuccucccucuacugu

SEQ ID NO: 31007 - RNA, 21 nt, Homo sapiens
cugaggagagaggaggugggg

SEQ ID NO: 31008 - RNA, 20 nt, Homo sapiens
cuggggaaaaggguggcacg

SEQ ID NO: 31009 - RNA, 24 nt, Homo sapiens
acugcaggcuccagcuuccaggcu

SEQ ID NO: 31010 - RNA, 18 nt, Homo sapiens
ugguggcagaggugggau

SEQ ID NO: 31011 - RNA, 23 nt, Homo sapiens
cggccugauucacaacaccagcu

SEQ ID NO: 31012 - RNA, 22 nt, Homo sapiens
cacugguacaaggguugggaga

SEQ ID NO: 31013 - RNA, 22 nt, Homo sapiens
accuaauauaucaaacauauca

SEQ ID NO: 31014 - RNA, 24 nt, Homo sapiens
ugggagaaccucccugcuucugcu

SEQ ID NO: 31015 - RNA, 22 nt, Homo sapiens
agcugaguguaggauguuuaca

SEQ ID NO: 31016 - RNA, 23 nt, Homo sapiens
ucaacgggagugaucgugucauu

SEQ ID NO: 31017 - RNA, 22 nt, Homo sapiens
aucgggaggggacugagccuga

SEQ ID NO: 31018 - RNA, 21 nt, Homo sapiens
guucuaacccauuguggccaa

SEQ ID NO: 31019 - RNA, 22 nt, Homo sapiens
gccaccuucaaaugggaagucu

SEQ ID NO: 31020 - RNA, 23 nt, Homo sapiens
uguaggcuggggauaaaugaaua

SEQ ID NO: 31021 - RNA, 21 nt, Homo sapiens
gggcaucugggacgcgcagga

SEQ ID NO: 31022 - RNA, 22 nt, Homo sapiens
cggugagcacccggccccugcg

SEQ ID NO: 31023 - RNA, 22 nt, Homo sapiens
cagaagugggccgggcacaggg

SEQ ID NO: 31024 - RNA, 22 nt, Homo sapiens
agucuucacaacagcccugugu

SEQ ID NO: 31025 - RNA, 22 nt, Homo sapiens
ugcuguuagcccuagccccgca

SEQ ID NO: 31026 - RNA, 22 nt, Homo sapiens
gggagaggucucccugcgcaca

SEQ ID NO: 31027 - RNA, 22 nt, Homo sapiens
cacaagaucggaucuacggguu

SEQ ID NO: 31028 - RNA, 22 nt, Homo sapiens
cgcaaggucgguucuacgggug

SEQ ID NO: 31029 - RNA, 22 nt, Homo sapiens
cuggagagacaaggggaagagg

SEQ ID NO: 31030 - RNA, 25 nt, Homo sapiens
cagcgucugccggaacccguuccca

SEQ ID NO: 31031 - RNA, 23 nt, Homo sapiens
augcaaaguugcucggguaaccu

SEQ ID NO: 31032 - RNA, 22 nt, Homo sapiens
cuacccacagacguaccaauca

SEQ ID NO: 31033 - RNA, 22 nt, Homo sapiens
gguaaaacucgcaauuacuuuu

SEQ ID NO: 31034 - RNA, 22 nt, Homo sapiens
ggccaaaaccacaauuacuuuu

SEQ ID NO: 31035 - RNA, 22 nt, Homo sapiens
ggcaaaaaccgcaauuacuuuu

SEQ ID NO: 31036 - RNA, 22 nt, Homo sapiens
ggcaaaaaccacaauuacuuuu

SEQ ID NO: 31037 - RNA, 22 nt, Homo sapiens
gacaaaaaccgcgauuacuuuu

SEQ ID NO: 31038 - RNA, 22 nt, Homo sapiens
ggcaaaauccgcaauuacuuuu

SEQ ID NO: 31039 - RNA, 22 nt, Homo sapiens
accaaagaccgcaauuacuuuu

SEQ ID NO: 31040 - RNA, 21 nt, Homo sapiens
uuuuggugcauauuuacuuua

SEQ ID NO: 31041 - RNA, 21 nt, Homo sapiens
guucuaacccauuguggccaa

SEQ ID NO: 31042 - RNA, 20 nt, Homo sapiens
cccugcgccaucuccucuac

SEQ ID NO: 31043 - RNA, 23 nt, Homo sapiens
gucacaucccucccaagacccuc

SEQ ID NO: 31044 - RNA, 23 nt, Homo sapiens
aaucuacuuucuuugcucauccu

SEQ ID NO: 31045 - RNA, 22 nt, Homo sapiens
aaccacuuucuuugcucauccg

SEQ ID NO: 31046 - RNA, 18 nt, Homo sapiens
ugguggcagaggugggau

SEQ ID NO: 31047 - RNA, 24 nt, Homo sapiens
acugcuggucuucagucagggcca

SEQ ID NO: 31048 - RNA, 25 nt, Homo sapiens
cagcgucugccggaacccguuccca

SEQ ID NO: 31049 - RNA, 21 nt, Homo sapiens
cggggugcacgggcggagggc

SEQ ID NO: 31050 - RNA, 22 nt, Homo sapiens
cggugagcacccggccccugcg

SEQ ID NO: 31051 - RNA, 22 nt, Homo sapiens
acugggacuuuguaggccaguu

SEQ ID NO: 31052 - RNA, 22 nt, Homo sapiens
agcgggacuuugagggccaguu

SEQ ID NO: 31053 - RNA, 22 nt, Homo sapiens
acugccugucugugccugcugu

SEQ ID NO: 31054 - RNA, 21 nt, Homo sapiens
acaggauugagggggggcccu

SEQ ID NO: 31055 - RNA, 22 nt, Homo sapiens
ucgcccucucaacccagcuuuu

SEQ ID NO: 31056 - RNA, 22 nt, Homo sapiens
uugcccucucaacccagcuuuu

SEQ ID NO: 31057 - RNA, 20 nt, Homo sapiens
acccucucaacccagcuuuu

SEQ ID NO: 31058 - RNA, 19 nt, Homo sapiens
uccucucaacccagcuuuu

SEQ ID NO: 31059 - RNA, 22 nt, Homo sapiens
accagguuccaccccagcaggc

SEQ ID NO: 31060 - RNA, 22 nt, Homo sapiens
auaaacgacaccuccuugagaa

SEQ ID NO: 31061 - RNA, 23 nt, Homo sapiens
acagaaagugcuucccucaagag

SEQ ID NO: 31062 - RNA, 21 nt, Homo sapiens
ggacuauagaacuuucccccu

SEQ ID NO: 31063 - RNA, 20 nt, Homo sapiens
uacugcuuccacagcucccc

SEQ ID NO: 31064 - RNA, 21 nt, Homo sapiens
ccgugguucuacccuguggua

SEQ ID NO: 31065 - RNA, 23 nt, Homo sapiens
gaacagguagucugaacacuggg

SEQ ID NO: 31066 - RNA, 23 nt, Homo sapiens
gaacagauagucuaaacacuggg

SEQ ID NO: 31067 - RNA, 22 nt, Homo sapiens
uccggggacgaacgggacgggu

SEQ ID NO: 31068 - RNA, 22 nt, Homo sapiens
auccuucuacaaauucacccau

SEQ ID NO: 31069 - RNA, 22 nt, Homo sapiens
ggagauggagccagggcccuaa

SEQ ID NO: 31070 - RNA, 21 nt, Homo sapiens
gaccaaucgccguccccgccg

SEQ ID NO: 31071 - RNA, 22 nt, Homo sapiens
ucagaccgagacaagugcaaug

SEQ ID NO: 31072 - RNA, 25 nt, Homo sapiens
accaacggaccuacuucccuccgcc

SEQ ID NO: 31073 - RNA, 22 nt, Homo sapiens
gcggucccgcggcgccccgccu

SEQ ID NO: 31074 - RNA, 21 nt, Homo sapiens
caucaccuuccuucuccucca

SEQ ID NO: 31075 - RNA, 21 nt, Homo sapiens
aagggucaguaagcacccgcg

SEQ ID NO: 31076 - RNA, 21 nt, Homo sapiens
aagggucaguaagcacccgcg

SEQ ID NO: 31077 - RNA, 22 nt, Homo sapiens
ggaggccgggacgagugcaaua

SEQ ID NO: 31078 - RNA, 24 nt, Homo sapiens
cacccccagagccucagcucccca

SEQ ID NO: 31079 - RNA, 19 nt, Homo sapiens
ucccacaggaagcagacac

SEQ ID NO: 31080 - RNA, 22 nt, Homo sapiens
gcggucccgcggcgccccgccu

SEQ ID NO: 31081 - RNA, 24 nt, Homo sapiens
ucacagguuaaagggucucaggga

SEQ ID NO: 31082 - RNA, 22 nt, Homo sapiens
ucacaaguuagggucucaggga

SEQ ID NO: 31083 - RNA, 18 nt, Homo sapiens
ugguggcagaggugggau

SEQ ID NO: 31084 - RNA, 23 nt, Homo sapiens
agcccuguucuacagcccugagg

SEQ ID NO: 31085 - RNA, 23 nt, Homo sapiens
acacagcucuuccauaucuccag

SEQ ID NO: 31086 - RNA, 22 nt, Homo sapiens
cagcugguugaaggggaccaaa

SEQ ID NO: 31087 - RNA, 22 nt, Homo sapiens
uagcugguugaaggggaccaaa

SEQ ID NO: 31088 - RNA, 23 nt, Homo sapiens
uccaucaucaaaacaaauggagu

SEQ ID NO: 31089 - RNA, 23 nt, Homo sapiens
gggagugaagacacggagccaga

SEQ ID NO: 31090 - RNA, 21 nt, Homo sapiens
gggcaucugggacgcgcagga

SEQ ID NO: 31091 - RNA, 21 nt, Homo sapiens
gaccaaucgccguccccgccg

SEQ ID NO: 31092 - RNA, 22 nt, Homo sapiens
cccaacaacaggaaacuaccua

SEQ ID NO: 31093 - RNA, 22 nt, Homo sapiens
gaaccuaucuccccucuggacc

SEQ ID NO: 31094 - RNA, 22 nt, Homo sapiens
agcugaguguaggauguuuaca

SEQ ID NO: 31095 - RNA, 23 nt, Homo sapiens
acacucuaaagagaagcgcuuug

SEQ ID NO: 31096 - RNA, 21 nt, Homo sapiens
agaaaguacuucccucuggag

SEQ ID NO: 31097 - RNA, 21 nt, Homo sapiens
agaaagugcaucccucuggag

SEQ ID NO: 31098 - RNA, 22 nt, Homo sapiens
ugcaagccuugggugugggagg

SEQ ID NO: 31099 - RNA, 20 nt, Homo sapiens
auuucuauaucuaucuccau

SEQ ID NO: 31100 - RNA, 22 nt, Homo sapiens
gcggucccgcggcgccccgccu

SEQ ID NO: 31101 - RNA, 22 nt, Homo sapiens
ugcuguuagcccuagccccgca

SEQ ID NO: 31102 - RNA, 22 nt, Homo sapiens
ccaguagcacggcucaguccag

SEQ ID NO: 31103 - RNA, 23 nt, Homo sapiens
gggagugaagacacggagccaga

SEQ ID NO: 31104 - RNA, 21 nt, Homo sapiens
gaccaaucgccguccccgccg

SEQ ID NO: 31105 - RNA, 22 nt, Homo sapiens
cagaagugggccgggcacaggg

SEQ ID NO: 31106 - RNA, 21 nt, Homo sapiens
agcuaugccagcaucuugccu

SEQ ID NO: 31107 - RNA, 23 nt, Homo sapiens
aaaucagaaucacaccuggggga

SEQ ID NO: 31108 - RNA, 21 nt, Homo sapiens
guguauaugcccauggacugc

SEQ ID NO: 31109 - RNA, 22 nt, Homo sapiens
acaaaagcaacugagguucuug

SEQ ID NO: 31110 - RNA, 25 nt, Homo sapiens
acggagcugucccaacaccaccccu

SEQ ID NO: 31111 - RNA, 22 nt, Homo sapiens
gauccgagcaccggggaccccc

SEQ ID NO: 31112 - RNA, 24 nt, Homo sapiens
acgcagagcccgaaagcccccagu

SEQ ID NO: 31113 - RNA, 22 nt, Homo sapiens
gcggucccgcggcgccccgccu

SEQ ID NO: 31114 - RNA, 20 nt, Homo sapiens
uacugcuuccacagcucccc

SEQ ID NO: 31115 - RNA, 22 nt, Homo sapiens
caaacaccauugucacacucca

SEQ ID NO: 31116 - RNA, 18 nt, Homo sapiens
aucacauucaccucccug

SEQ ID NO: 31117 - RNA, 23 nt, Homo sapiens
gggagugaagacacggagccaga

SEQ ID NO: 31118 - RNA, 21 nt, Homo sapiens
gaccaaucgccguccccgccg

SEQ ID NO: 31119 - RNA, 19 nt, Homo sapiens
uaugcuaccuuugcacggu

SEQ ID NO: 31120 - RNA, 23 nt, Homo sapiens
aaaucagaaucacaccuggggga

SEQ ID NO: 31121 - RNA, 20 nt, Homo sapiens
ugggccaccgccgagcggac

SEQ ID NO: 31122 - RNA, 22 nt, Homo sapiens
gcggucccgcggcgccccgccu

SEQ ID NO: 31123 - RNA, 20 nt, Homo sapiens
aggggccucagccuccuggu

SEQ ID NO: 31124 - RNA, 21 nt, Homo sapiens
ccccucccagccucccugcca

SEQ ID NO: 31125 - RNA, 24 nt, Homo sapiens
acugcuggucuucagucagggcca

SEQ ID NO: 31126 - RNA, 22 nt, Homo sapiens
gcacaaaucuccagaccaccca

SEQ ID NO: 31127 - RNA, 22 nt, Homo sapiens
acggaagggcagagagggccag

SEQ ID NO: 31128 - RNA, 21 nt, Homo sapiens
ugacugcagagcaaaagacac

SEQ ID NO: 31129 - RNA, 18 nt, Homo sapiens
acccucugaaaggaagca

SEQ ID NO: 31130 - RNA, 22 nt, Homo sapiens
aaagugcuucuuaccuccagau

SEQ ID NO: 31131 - RNA, 22 nt, Homo sapiens
uuucaguuaucaaucugucaca

SEQ ID NO: 31132 - RNA, 22 nt, Homo sapiens
gguuaguggaccaggucacaaa

SEQ ID NO: 31133 - RNA, 23 nt, Homo sapiens
ucauacagcuagauaaccaaaga

SEQ ID NO: 31134 - RNA, 21 nt, Homo sapiens
ggggagcgggggcccugccuu

SEQ ID NO: 31135 - RNA, 18 nt, Homo sapiens
cccccaccaccacgcccg

SEQ ID NO: 31136 - RNA, 17 nt, Homo sapiens
gggagaggaggaggcga

SEQ ID NO: 31137 - RNA, 23 nt, Homo sapiens
aggaacagcagcagcccgggccg

SEQ ID NO: 31138 - RNA, 21 nt, Homo sapiens
gaccaaucgccguccccgccg

SEQ ID NO: 31139 - RNA, 21 nt, Homo sapiens
ccuucugacuccaaguccagu

SEQ ID NO: 31140 - RNA, 23 nt, Homo sapiens
aaagucucgcucucugccccuca

SEQ ID NO: 31141 - RNA, 21 nt, Homo sapiens
aucagagguucagcuuacccu

SEQ ID NO: 31142 - RNA, 22 nt, Homo sapiens
gcggucccgcggcgccccgccu

SEQ ID NO: 31143 - RNA, 20 nt, Homo sapiens
uccccacagacccagagccg

SEQ ID NO: 31144 - RNA, 21 nt, Homo sapiens
ccccucccagccucccugcca

SEQ ID NO: 31145 - RNA, 22 nt, Homo sapiens
cuagggaacacagggcugguga

SEQ ID NO: 31146 - RNA, 21 nt, Homo sapiens
cugggggacggagcagaagga

SEQ ID NO: 31147 - RNA, 22 nt, Homo sapiens
aggucucacuuuguugcccaga

SEQ ID NO: 31148 - RNA, 21 nt, Homo sapiens
agggcucaucuugguccugca

SEQ ID NO: 31149 - RNA, 18 nt, Homo sapiens
aucacauucaccucccug

SEQ ID NO: 31150 - RNA, 23 nt, Homo sapiens
cggccugauucacaacaccagcu

SEQ ID NO: 31151 - RNA, 21 nt, Homo sapiens
ccgugguucuacccuguggua

SEQ ID NO: 31152 - RNA, 23 nt, Homo sapiens
gggagugaagacacggagccaga

SEQ ID NO: 31153 - RNA, 22 nt, Homo sapiens
ucaggaacugccuuucucucca

SEQ ID NO: 31154 - RNA, 22 nt, Homo sapiens
agcccaaaaggagaauucuuug

SEQ ID NO: 31155 - RNA, 22 nt, Homo sapiens
cagaagugggccgggcacaggg

SEQ ID NO: 31156 - RNA, 22 nt, Homo sapiens
ugagccacugugccuggccuga

SEQ ID NO: 31157 - RNA, 22 nt, Homo sapiens
cucaauagacugugagcuccuu

SEQ ID NO: 31158 - RNA, 20 nt, Homo sapiens
cuggaggaagggcccagagg

SEQ ID NO: 31159 - RNA, 22 nt, Homo sapiens
gccuaagacacaggcccagaga

SEQ ID NO: 31160 - RNA, 23 nt, Homo sapiens
aaagucucgcucucugccccuca

SEQ ID NO: 31161 - RNA, 21 nt, Homo sapiens
ugacugcagagcaaaagacac

SEQ ID NO: 31162 - RNA, 22 nt, Homo sapiens
gaacuugcuaaaaaugcagaau

SEQ ID NO: 31163 - RNA, 25 nt, Homo sapiens
aaggagcucagaagcccugcccagc

SEQ ID NO: 31164 - RNA, 22 nt, Homo sapiens
gauccgagcaccggggaccccc

SEQ ID NO: 31165 - RNA, 19 nt, Homo sapiens
aagacauuuucagacagcu

SEQ ID NO: 31166 - RNA, 23 nt, Homo sapiens
cccagcuagauuguaagcuccuu

SEQ ID NO: 31167 - RNA, 22 nt, Homo sapiens
cacucuaaagggaggcacuuug

SEQ ID NO: 31168 - RNA, 20 nt, Homo sapiens
uacugcuuccacagcucccc

SEQ ID NO: 31169 - RNA, 22 nt, Homo sapiens
gugggguggguggucaggccga

SEQ ID NO: 31170 - RNA, 17 nt, Homo sapiens
gggagaggaggaggcga

SEQ ID NO: 31171 - RNA, 22 nt, Homo sapiens
cacgaccgacgccacgccgagu

SEQ ID NO: 31172 - RNA, 22 nt, Homo sapiens
uaaccgauuucagauggugcua

SEQ ID NO: 31173 - RNA, 23 nt, Homo sapiens
aacacugauuucaaauggugcua

SEQ ID NO: 31174 - RNA, 22 nt, Homo sapiens
uaaccgauuucaaauggugcua

SEQ ID NO: 31175 - RNA, 22 nt, Homo sapiens
cuacccacagacguaccaauca

SEQ ID NO: 31176 - RNA, 19 nt, Homo sapiens
auuuugguacagcagcuca

SEQ ID NO: 31177 - RNA, 19 nt, Homo sapiens
guccugaauuccgcagccu

SEQ ID NO: 31178 - RNA, 21 nt, Homo sapiens
cucccccacugcagcuggcac

SEQ ID NO: 31179 - RNA, 22 nt, Homo sapiens
ggagcccgcgccccgcgccgag

SEQ ID NO: 31180 - RNA, 23 nt, Homo sapiens
cuaucugcacuagaugcaccuua

SEQ ID NO: 31181 - RNA, 22 nt, Homo sapiens
ucacauuugccugcagagauuu

SEQ ID NO: 31182 - RNA, 23 nt, Homo sapiens
cggcucugucgucgaggcgcuca

SEQ ID NO: 31183 - RNA, 23 nt, Homo sapiens
agaggcaggcaugcgggcagaca

SEQ ID NO: 31184 - RNA, 19 nt, Homo sapiens
agaaaccccagcagagaca

SEQ ID NO: 31185 - RNA, 21 nt, Homo sapiens
gaaggaagugagugcagccac

SEQ ID NO: 31186 - RNA, 20 nt, Homo sapiens
uccccacagacccagagccg

SEQ ID NO: 31187 - RNA, 22 nt, Homo sapiens
ucggucccucgggccagggcag

SEQ ID NO: 31188 - RNA, 22 nt, Homo sapiens
caaacaccauugucacacucca

SEQ ID NO: 31189 - RNA, 21 nt, Homo sapiens
agcgccuuuggcagcuagagu

SEQ ID NO: 31190 - RNA, 21 nt, Homo sapiens
aacggaaccacuagugacuug

SEQ ID NO: 31191 - RNA, 22 nt, Homo sapiens
auaaggauuuuuaggggcauua

SEQ ID NO: 31192 - RNA, 23 nt, Homo sapiens
aaagucucgcucucugccccuca

SEQ ID NO: 31193 - RNA, 22 nt, Homo sapiens
ccuggcacacaguagaccuuca

SEQ ID NO: 31194 - RNA, 23 nt, Homo sapiens
acagcgcucgcaaccgcagcgau

SEQ ID NO: 31195 - RNA, 20 nt, Homo sapiens
aggggccucagccuccuggu

SEQ ID NO: 31196 - RNA, 21 nt, Homo sapiens
gguggagcccugagaaccgga

SEQ ID NO: 31197 - RNA, 18 nt, Homo sapiens
auucaaucuacugccuca

SEQ ID NO: 31198 - RNA, 22 nt, Homo sapiens
acaaccagcuaagacacugcca

SEQ ID NO: 31199 - RNA, 23 nt, Homo sapiens
cugcagaacuguucccgcugcua

SEQ ID NO: 31200 - RNA, 21 nt, Homo sapiens
guaaugggaccuuccucuuug

SEQ ID NO: 31201 - RNA, 21 nt, Homo sapiens
caucaccuuccuucuccucca

SEQ ID NO: 31202 - RNA, 21 nt, Homo sapiens
ggggagcgggggcccugccuu

SEQ ID NO: 31203 - RNA, 21 nt, Homo sapiens
cucccccacugcagcuggcac

SEQ ID NO: 31204 - RNA, 22 nt, Homo sapiens
caaacaccauugucacacucca

SEQ ID NO: 31205 - RNA, 17 nt, Homo sapiens
gggagaggaggaggcga

SEQ ID NO: 31206 - RNA, 23 nt, Homo sapiens
gggagugaagacacggagccaga

SEQ ID NO: 31207 - RNA, 22 nt, Homo sapiens
ucaggaacugccuuucucucca

SEQ ID NO: 31208 - RNA, 21 nt, Homo sapiens
gaccaaucgccguccccgccg

SEQ ID NO: 31209 - RNA, 21 nt, Homo sapiens
gugacagagccaagcacaaau

SEQ ID NO: 31210 - RNA, 23 nt, Homo sapiens
aaagucucgcucucugccccuca

SEQ ID NO: 31211 - RNA, 22 nt, Homo sapiens
gaauucaucacggccagccucu

SEQ ID NO: 31212 - RNA, 24 nt, Homo sapiens
acgcgcaggccagagacccaggca

SEQ ID NO: 31213 - RNA, 22 nt, Homo sapiens
gcggucccgcggcgccccgccu

SEQ ID NO: 31214 - RNA, 23 nt, Homo sapiens
cuccagccccuccagggcuuccu

SEQ ID NO: 31215 - RNA, 22 nt, Homo sapiens
ugcuguuagcccuagccccgca

SEQ ID NO: 31216 - RNA, 21 nt, Homo sapiens
caucaccuuccuucuccucca

SEQ ID NO: 31217 - RNA, 21 nt, Homo sapiens
aucagagguucagcuuacccu

SEQ ID NO: 31218 - RNA, 21 nt, Homo sapiens
caucaccuuccuucuccucca

SEQ ID NO: 31219 - RNA, 22 nt, Homo sapiens
cuggagagacaaggggaagagg

SEQ ID NO: 31220 - RNA, 20 nt, Homo sapiens
ugucuccacagggcucuuua

SEQ ID NO: 31221 - RNA, 22 nt, Homo sapiens
uacaucuggacagccgaaugaa

SEQ ID NO: 31222 - RNA, 23 nt, Homo sapiens
aaagucucgcucucugccccuca

SEQ ID NO: 31223 - RNA, 22 nt, Homo sapiens
uuucaguuaucaaucugucaca

SEQ ID NO: 31224 - RNA, 21 nt, Homo sapiens
ggacuauagaacuuucccccu

SEQ ID NO: 31225 - RNA, 22 nt, Homo sapiens
gcugaggcuguggggcuggagu

SEQ ID NO: 31226 - RNA, 20 nt, Homo sapiens
cccugcgccaucuccucuac

SEQ ID NO: 31227 - RNA, 20 nt, Homo sapiens
cccugcgccaucuccucuac

SEQ ID NO: 31228 - RNA, 24 nt, Homo sapiens
acugcuggucuucagucagggcca

SEQ ID NO: 31229 - RNA, 24 nt, Homo sapiens
acugcuggucuucagucagggcca

SEQ ID NO: 31230 - RNA, 22 nt, Homo sapiens
ccagaacugaguccacagggca

SEQ ID NO: 31231 - RNA, 23 nt, Homo sapiens
gggagugaagacacggagccaga

SEQ ID NO: 31232 - RNA, 22 nt, Homo sapiens
uggcagcagcggagggggcaga

SEQ ID NO: 31233 - RNA, 21 nt, Homo sapiens
acaggauugagggggggcccu

SEQ ID NO: 31234 - RNA, 20 nt, Homo sapiens
ccagcagcaccuggggcagu

SEQ ID NO: 31235 - RNA, 23 nt, Homo sapiens
cgugagcuccuggaggacaggga

SEQ ID NO: 31236 - RNA, 22 nt, Homo sapiens
uacagauggauaccgugcaauu

SEQ ID NO: 31237 - RNA, 21 nt, Homo sapiens
auccuguacugagcugccccg

SEQ ID NO: 31238 - RNA, 22 nt, Homo sapiens
aggaaaccagcaaguguugacg

SEQ ID NO: 31239 - RNA, 22 nt, Homo sapiens
ugcaagccuugggugugggagg

SEQ ID NO: 31240 - RNA, 25 nt, Homo sapiens
acggagcugucccaacaccaccccu

SEQ ID NO: 31241 - RNA, 21 nt, Homo sapiens
aagggucaguaagcacccgcg

SEQ ID NO: 31242 - RNA, 20 nt, Homo sapiens
uacugcuuccacagcucccc

SEQ ID NO: 31243 - RNA, 22 nt, Homo sapiens
acacacccacgcgagccggaaa

SEQ ID NO: 31244 - RNA, 21 nt, Homo sapiens
auguaggccuuuagaucacuu

SEQ ID NO: 31245 - RNA, 22 nt, Homo sapiens
acacucuaaaaggaugcacgau

SEQ ID NO: 31246 - RNA, 22 nt, Homo sapiens
cagaagugggccgggcacaggg

SEQ ID NO: 31247 - RNA, 22 nt, Homo sapiens
ucaucauuaccaggcaguauua

SEQ ID NO: 31248 - RNA, 23 nt, Homo sapiens
uccaucauuacccggcaguauua

SEQ ID NO: 31249 - RNA, 22 nt, Homo sapiens
agucuucacaacagcccugugu

SEQ ID NO: 31250 - RNA, 22 nt, Homo sapiens
acgguuuuaccagacaguauua

SEQ ID NO: 31251 - RNA, 21 nt, Homo sapiens
acuccaaagggaagcgccuuc

SEQ ID NO: 31252 - RNA, 22 nt, Homo sapiens
cgcucuaaagggaagcgccuuc

SEQ ID NO: 31253 - RNA, 22 nt, Homo sapiens
ucaaugacucagguaaguugca

SEQ ID NO: 31254 - RNA, 22 nt, Homo sapiens
cacaagaucggaucuacggguu

SEQ ID NO: 31255 - RNA, 22 nt, Homo sapiens
cgcaaggucgguucuacgggug

SEQ ID NO: 31256 - RNA, 21 nt, Homo sapiens
agcgccuuuggcagcuagagu

SEQ ID NO: 31257 - RNA, 22 nt, Homo sapiens
gcacaaaucuccagaccaccca

SEQ ID NO: 31258 - RNA, 22 nt, Homo sapiens
acuccaacagggccgcgucucc

SEQ ID NO: 31259 - RNA, 22 nt, Homo sapiens
ugagccacugugccuggccuga

SEQ ID NO: 31260 - RNA, 23 nt, Homo sapiens
aagaaucuugucccgcagguccu

SEQ ID NO: 31261 - RNA, 22 nt, Homo sapiens
cucauauuacaaugagcucauc

SEQ ID NO: 31262 - RNA, 22 nt, Homo sapiens
ugaauuacuuuguaaaccacca

SEQ ID NO: 31263 - RNA, 22 nt, Homo sapiens
agugaauucuaccagugccaua

SEQ ID NO: 31264 - RNA, 22 nt, Homo sapiens
agugaauucuaccagugccaua

SEQ ID NO: 31265 - RNA, 22 nt, Homo sapiens
ucaggaacugccuuucucucca

SEQ ID NO: 31266 - RNA, 22 nt, Homo sapiens
uucacacugcaugcucugggua

SEQ ID NO: 31267 - RNA, 22 nt, Homo sapiens
guagaagggaaucuugcauaag

SEQ ID NO: 31268 - RNA, 22 nt, Homo sapiens
aggucucacuuuguugcccaga

SEQ ID NO: 31269 - RNA, 22 nt, Homo sapiens
agcgggacuuugagggccaguu

SEQ ID NO: 31270 - RNA, 21 nt, Homo sapiens
uagaaaggcuaggaccaaacc

SEQ ID NO: 31271 - RNA, 23 nt, Homo sapiens
ccacccaaugaccuacuccaaga

SEQ ID NO: 31272 - RNA, 24 nt, Homo sapiens
cagaaagugcuuucuuuuggagaa

SEQ ID NO: 31273 - RNA, 22 nt, Homo sapiens
aacacucuaaaaggaggcacuu

SEQ ID NO: 31274 - RNA, 25 nt, Homo sapiens
aaggagcucagaagcccugcccagc

SEQ ID NO: 31275 - RNA, 23 nt, Homo sapiens
ggacauuguuucagugcccaagu

SEQ ID NO: 31276 - RNA, 22 nt, Homo sapiens
caagacacauuuggagagggac

SEQ ID NO: 31277 - RNA, 22 nt, Homo sapiens
ccggcugcaacacaagacacga

SEQ ID NO: 31278 - RNA, 25 nt, Homo sapiens
agcuagucaagcgcgguuguggggg

SEQ ID NO: 31279 - RNA, 22 nt, Homo sapiens
agcugaguguaggauguuuaca

SEQ ID NO: 31280 - RNA, 23 nt, Homo sapiens
acauuuuucguuauugcucuuga

SEQ ID NO: 31281 - RNA, 23 nt, Homo sapiens
gaaaaacgcccccuggcuugaaa

SEQ ID NO: 31282 - RNA, 21 nt, Homo sapiens
ugacugcagagcaaaagacac

SEQ ID NO: 31283 - RNA, 21 nt, Homo sapiens
acuccaaagggaagcgccuuc

SEQ ID NO: 31284 - RNA, 22 nt, Homo sapiens
cgcucuaaagggaagcgccuuc

SEQ ID NO: 31285 - RNA, 25 nt, Homo sapiens
aggccgccacccgcccgcgaucccu

SEQ ID NO: 31286 - RNA, 21 nt, Homo sapiens
ccccucccagccucccugcca

SEQ ID NO: 31287 - RNA, 21 nt, Homo sapiens
gaccaaucgccguccccgccg

SEQ ID NO: 31288 - RNA, 22 nt, Homo sapiens
cggugagcacccggccccugcg

SEQ ID NO: 31289 - RNA, 22 nt, Homo sapiens
uggcagcagcggagggggcaga

SEQ ID NO: 31290 - RNA, 20 nt, Homo sapiens
ccagcagcaccuggggcagu

SEQ ID NO: 31291 - RNA, 21 nt, Homo sapiens
auccuguacugagcugccccg

SEQ ID NO: 31292 - RNA, 22 nt, Homo sapiens
caagacacauuuggagagggac

SEQ ID NO: 31293 - RNA, 22 nt, Homo sapiens
gcggucccgcggcgccccgccu

SEQ ID NO: 31294 - RNA, 22 nt, Homo sapiens
ugcuguuagcccuagccccgca

SEQ ID NO: 31295 - RNA, 23 nt, Homo sapiens
ggaagccaucaagucgcugcagg

SEQ ID NO: 31296 - RNA, 23 nt, Homo sapiens
ggaagccaucaagucgcugcagg

SEQ ID NO: 31297 - RNA, 22 nt, Homo sapiens
ugaagaagggggggaagggcgu

SEQ ID NO: 31298 - RNA, 21 nt, Homo sapiens
gaccaaucgccguccccgccg

SEQ ID NO: 31299 - RNA, 23 nt, Homo sapiens
cagcugcuuuugggauuccguug

SEQ ID NO: 31300 - RNA, 23 nt, Homo sapiens
aaagucucgcucucugccccuca

SEQ ID NO: 31301 - RNA, 21 nt, Homo sapiens
uagcacccagauagcaaggau

SEQ ID NO: 31302 - RNA, 21 nt, Homo sapiens
agguaagcgcuguugcuagcc

SEQ ID NO: 31303 - RNA, 24 nt, Homo sapiens
acgcgcaggccagagacccaggca

SEQ ID NO: 31304 - RNA, 22 nt, Homo sapiens
gcggucccgcggcgccccgccu

SEQ ID NO: 31305 - RNA, 22 nt, Homo sapiens
ugcuguuagcccuagccccgca

SEQ ID NO: 31306 - RNA, 21 nt, Homo sapiens
ccccucccagccucccugcca

SEQ ID NO: 31307 - RNA, 17 nt, Homo sapiens
gggagaggaggaggcga

SEQ ID NO: 31308 - RNA, 18 nt, Homo sapiens
caccaccagagccaacgu

SEQ ID NO: 31309 - RNA, 21 nt, Homo sapiens
gaccaaucgccguccccgccg

SEQ ID NO: 31310 - RNA, 22 nt, Homo sapiens
uggcagcagcggagggggcaga

SEQ ID NO: 31311 - RNA, 22 nt, Homo sapiens
uaaccgauuucagauggugcua

SEQ ID NO: 31312 - RNA, 23 nt, Homo sapiens
aacacugauuucaaauggugcua

SEQ ID NO: 31313 - RNA, 22 nt, Homo sapiens
uaaccgauuucaaauggugcua

SEQ ID NO: 31314 - RNA, 20 nt, Homo sapiens
ccagcagcaccuggggcagu

SEQ ID NO: 31315 - RNA, 22 nt, Homo sapiens
uacagauggauaccgugcaauu

SEQ ID NO: 31316 - RNA, 23 nt, Homo sapiens
aaagucucgcucucugccccuca

SEQ ID NO: 31317 - RNA, 21 nt, Homo sapiens
auccuguacugagcugccccg

SEQ ID NO: 31318 - RNA, 22 nt, Homo sapiens
gcggucccgcggcgccccgccu

SEQ ID NO: 31319 - RNA, 22 nt, Homo sapiens
ugcuguuagcccuagccccgca

SEQ ID NO: 31320 - RNA, 21 nt, Homo sapiens
cugaggagagaggaggugggg

SEQ ID NO: 31321 - RNA, 22 nt, Homo sapiens
caaacaccauugucacacucca

SEQ ID NO: 31322 - RNA, 17 nt, Homo sapiens
ggguggcagcgguggga

SEQ ID NO: 31323 - RNA, 21 nt, Homo sapiens
uuuagcauaaguaugucccaa

SEQ ID NO: 31324 - RNA, 22 nt, Homo sapiens
ucagaccgagacaagugcaaug

SEQ ID NO: 31325 - RNA, 22 nt, Homo sapiens
auaaggauuuuuaggggcauua

SEQ ID NO: 31326 - RNA, 23 nt, Homo sapiens
ccacccaaugaccuacuccaaga

SEQ ID NO: 31327 - RNA, 25 nt, Homo sapiens
accaacggaccuacuucccuccgcc

SEQ ID NO: 31328 - RNA, 20 nt, Homo sapiens
uacugcuuccacagcucccc

SEQ ID NO: 31329 - RNA, 22 nt, Homo sapiens
agacaacaaugccaaccucaca

SEQ ID NO: 31330 - RNA, 18 nt, Homo sapiens
cagcagccuccuucucaa

SEQ ID NO: 31331 - RNA, 22 nt, Homo sapiens
acaaaguucugugaugcacuga

SEQ ID NO: 31332 - RNA, 22 nt, Homo sapiens
cacaaaccauuaugugcugcua

SEQ ID NO: 31333 - RNA, 23 nt, Homo sapiens
cuaucugcacuagaugcaccuua

SEQ ID NO: 31334 - RNA, 22 nt, Homo sapiens
uagucaagugaagcagugggag

SEQ ID NO: 31335 - RNA, 21 nt, Homo sapiens
uucuaggauaggcccaggggc

SEQ ID NO: 31336 - RNA, 23 nt, Homo sapiens
acccucuauagggaagcgcguuc

SEQ ID NO: 31337 - RNA, 22 nt, Homo sapiens
ugcaagccuugggugugggagg

SEQ ID NO: 31338 - RNA, 17 nt, Homo sapiens
uggaggccccagcgaga

SEQ ID NO: 31339 - RNA, 23 nt, Homo sapiens
accacaggagucugagcauuuga

SEQ ID NO: 31340 - RNA, 22 nt, Homo sapiens
caaacaccauugucacacucca

SEQ ID NO: 31341 - RNA, 17 nt, Homo sapiens
ggguggcagcgguggga

SEQ ID NO: 31342 - RNA, 21 nt, Homo sapiens
gggcaucugggacgcgcagga

SEQ ID NO: 31343 - RNA, 21 nt, Homo sapiens
gaccaaucgccguccccgccg

SEQ ID NO: 31344 - RNA, 22 nt, Homo sapiens
cacuuagcagguuguauuauau

SEQ ID NO: 31345 - RNA, 22 nt, Homo sapiens
aguccagauucugugcccacca

SEQ ID NO: 31346 - RNA, 22 nt, Homo sapiens
gcacauguucugcggcccacca

SEQ ID NO: 31347 - RNA, 22 nt, Homo sapiens
gcggucccgcggcgccccgccu

SEQ ID NO: 31348 - RNA, 22 nt, Homo sapiens
ugcuguuagcccuagccccgca

SEQ ID NO: 31349 - RNA, 22 nt, Homo sapiens
agccaagcucagacggauccga

SEQ ID NO: 31350 - RNA, 23 nt, Homo sapiens
gggagugaagacacggagccaga

SEQ ID NO: 31351 - RNA, 20 nt, Homo sapiens
cccgccgcgucgcccugggg

SEQ ID NO: 31352 - RNA, 22 nt, Homo sapiens
cacucagcggccguuuccccaa

SEQ ID NO: 31353 - RNA, 23 nt, Homo sapiens
gaaacccagcagacaauguagcu

SEQ ID NO: 31354 - RNA, 24 nt, Homo sapiens
acucacaccuagguuccaaggauu

SEQ ID NO: 31355 - RNA, 21 nt, Homo sapiens
gaccaagaaauagccuuucaa

SEQ ID NO: 31356 - RNA, 22 nt, Homo sapiens
uccagcaaagggaagcgcuuuc

SEQ ID NO: 31357 - RNA, 22 nt, Homo sapiens
accucuaaaggggagcgcuuug

SEQ ID NO: 31358 - RNA, 23 nt, Homo sapiens
acacucuaaagagaagcgcuuug

SEQ ID NO: 31359 - RNA, 21 nt, Homo sapiens
gcuccaaagggaagcgcuuug

SEQ ID NO: 31360 - RNA, 21 nt, Homo sapiens
cacucugaagggaagcgcuuu

SEQ ID NO: 31361 - RNA, 21 nt, Homo sapiens
ccucuaaagagaagcgcuuuc

SEQ ID NO: 31362 - RNA, 22 nt, Homo sapiens
gcacacaauaaauguuugcuga

SEQ ID NO: 31363 - RNA, 21 nt, Homo sapiens
cagguaccaauauuuuaucua

SEQ ID NO: 31364 - RNA, 20 nt, Homo sapiens
ugucuccacagggcucuuua

SEQ ID NO: 31365 - RNA, 22 nt, Homo sapiens
aggcauaggaugacaaagggaa

SEQ ID NO: 31366 - RNA, 22 nt, Homo sapiens
aggcgaaggaugacaaagggaa

SEQ ID NO: 31367 - RNA, 17 nt, Homo sapiens
aaacauggaagcaauua

SEQ ID NO: 31368 - RNA, 22 nt, Homo sapiens
acuucaaggaucuuaaacuuug

SEQ ID NO: 31369 - RNA, 22 nt, Homo sapiens
caagacacauuuggagagggac

SEQ ID NO: 31370 - RNA, 21 nt, Homo sapiens
cacaaccucaguguuuccagg

SEQ ID NO: 31371 - RNA, 22 nt, Homo sapiens
uaaaugaauucaauuuccuucu

SEQ ID NO: 31372 - RNA, 18 nt, Homo sapiens
cagcagccuccuucucaa

SEQ ID NO: 31373 - RNA, 21 nt, Homo sapiens
gaccaaucgccguccccgccg

SEQ ID NO: 31374 - RNA, 23 nt, Homo sapiens
cggcucugucgucgaggcgcuca

SEQ ID NO: 31375 - RNA, 23 nt, Homo sapiens
aaaucagaaucacaccuggggga

SEQ ID NO: 31376 - RNA, 21 nt, Homo sapiens
acuccaaagggaagcgccuuc

SEQ ID NO: 31377 - RNA, 22 nt, Homo sapiens
cgcucuaaagggaagcgccuuc

SEQ ID NO: 31378 - RNA, 19 nt, Homo sapiens
guugggaucacaggcgccc

SEQ ID NO: 31379 - RNA, 19 nt, Homo sapiens
gcuccuguccaacuggcuc

SEQ ID NO: 31380 - RNA, 25 nt, Homo sapiens
accaacggaccuacuucccuccgcc

SEQ ID NO: 31381 - RNA, 24 nt, Homo sapiens
acgcgcaggccagagacccaggca

SEQ ID NO: 31382 - RNA, 22 nt, Homo sapiens
gcggucccgcggcgccccgccu

SEQ ID NO: 31383 - RNA, 22 nt, Homo sapiens
ugcuguuagcccuagccccgca

SEQ ID NO: 31384 - RNA, 21 nt, Homo sapiens
caucaccuuccuucuccucca

SEQ ID NO: 31385 - RNA, 20 nt, Homo sapiens
cugcgggaggacagggcuca

SEQ ID NO: 31386 - RNA, 22 nt, Homo sapiens
gcacaaaucuccagaccaccca

SEQ ID NO: 31387 - RNA, 22 nt, Homo sapiens
acaacuguaacuagacgguuuu

SEQ ID NO: 31388 - RNA, 21 nt, Homo sapiens
ugcaaacccugcaugugggag

SEQ ID NO: 31389 - RNA, 22 nt, Homo sapiens
gcuggguggagaagguggugaa

SEQ ID NO: 31390 - RNA, 21 nt, Homo sapiens
aagugucagacacgguggugg

SEQ ID NO: 31391 - RNA, 21 nt, Homo sapiens
acaggauugagggggggcccu

SEQ ID NO: 31392 - RNA, 22 nt, Homo sapiens
cacuuaucagguuguauuauaa

SEQ ID NO: 31393 - RNA, 22 nt, Homo sapiens
aacucaguaaugguaacgguuu

SEQ ID NO: 31394 - RNA, 25 nt, Homo sapiens
acggagcugucccaacaccaccccu

SEQ ID NO: 31395 - RNA, 22 nt, Homo sapiens
uggggacccucccugaaccaag

SEQ ID NO: 31396 - RNA, 20 nt, Homo sapiens
uacugcuuccacagcucccc

SEQ ID NO: 31397 - RNA, 23 nt, Homo sapiens
cuaccugcacuguaagcacuuuu

SEQ ID NO: 31398 - RNA, 21 nt, Homo sapiens
aucugcacugucagcacuuua

SEQ ID NO: 31399 - RNA, 19 nt, Homo sapiens
ccaccucccgaguccucac

SEQ ID NO: 31400 - RNA, 22 nt, Homo sapiens
uaaaugaauucaauuuccuucu

SEQ ID NO: 31401 - RNA, 18 nt, Homo sapiens
ugguggcagaggugggau

SEQ ID NO: 31402 - RNA, 22 nt, Homo sapiens
ugagugcuugcuaggugccaag

SEQ ID NO: 31403 - RNA, 18 nt, Homo sapiens
caccaccagagccaacgu

SEQ ID NO: 31404 - RNA, 23 nt, Homo sapiens
cuaccugcacuguaagcacuuug

SEQ ID NO: 31405 - RNA, 18 nt, Homo sapiens
auucaaucuacugccuca

SEQ ID NO: 31406 - RNA, 23 nt, Homo sapiens
cuaccugcacuauaagcacuuua

SEQ ID NO: 31407 - RNA, 23 nt, Homo sapiens
cuaccugcacuaugagcacuuug

SEQ ID NO: 31408 - RNA, 22 nt, Homo sapiens
acaguucuucaacuggcagcuu

SEQ ID NO: 31409 - RNA, 21 nt, Homo sapiens
uucuaggauaggcccaggggc

SEQ ID NO: 31410 - RNA, 22 nt, Homo sapiens
acaaccagcuaagacacugcca

SEQ ID NO: 31411 - RNA, 22 nt, Homo sapiens
auggcaguggaguuagugauug

SEQ ID NO: 31412 - RNA, 23 nt, Homo sapiens
gcaaucagcuaacuacacugccu

SEQ ID NO: 31413 - RNA, 23 nt, Homo sapiens
aaaucagaaucacaccuggggga

SEQ ID NO: 31414 - RNA, 22 nt, Homo sapiens
accagcuaacaauacacugcca

SEQ ID NO: 31415 - RNA, 22 nt, Homo sapiens
gccagcuaacaauacacugccu

SEQ ID NO: 31416 - RNA, 23 nt, Homo sapiens
aagaaucuugucccgcagguccu

SEQ ID NO: 31417 - RNA, 22 nt, Homo sapiens
cacucuaaagggaggcacuuug

SEQ ID NO: 31418 - RNA, 23 nt, Homo sapiens
acagaaagugcuucccucaagag

SEQ ID NO: 31419 - RNA, 19 nt, Homo sapiens
auuuugguacagcagcuca

SEQ ID NO: 31420 - RNA, 25 nt, Homo sapiens
acggagcugucccaacaccaccccu

SEQ ID NO: 31421 - RNA, 21 nt, Homo sapiens
gcugaggucugggccaggucu

SEQ ID NO: 31422 - RNA, 24 nt, Homo sapiens
acgcagagcccgaaagcccccagu

SEQ ID NO: 31423 - RNA, 20 nt, Homo sapiens
uacugcuuccacagcucccc

SEQ ID NO: 31424 - RNA, 23 nt, Homo sapiens
cuaccugcacgaacagcacuuug

SEQ ID NO: 31425 - RNA, 23 nt, Homo sapiens
agcaaaaaugugcuagugccaaa

SEQ ID NO: 31426 - RNA, 21 nt, Homo sapiens
gagcugcauccuggcuccggg

SEQ ID NO: 31427 - RNA, 22 nt, Homo sapiens
uaaaugaauucaauuuccuucu

SEQ ID NO: 31428 - RNA, 19 nt, Homo sapiens
gcuccuguccaacuggcuc

SEQ ID NO: 31429 - RNA, 22 nt, Homo sapiens
ucuacccagaaaggagccagug

SEQ ID NO: 31430 - RNA, 22 nt, Homo sapiens
cacauggccaaaacagagaaga

SEQ ID NO: 31431 - RNA, 22 nt, Homo sapiens
caaacaccauugucacacucca

SEQ ID NO: 31432 - RNA, 23 nt, Homo sapiens
agggauuccugggaaaacuggac

SEQ ID NO: 31433 - RNA, 22 nt, Homo sapiens
ucagaccgagacaagugcaaug

SEQ ID NO: 31434 - RNA, 23 nt, Homo sapiens
cggcucugucgucgaggcgcuca

SEQ ID NO: 31435 - RNA, 22 nt, Homo sapiens
uccagcaaagggaagcgcuuuc

SEQ ID NO: 31436 - RNA, 22 nt, Homo sapiens
accucuaaaggggagcgcuuug

SEQ ID NO: 31437 - RNA, 23 nt, Homo sapiens
acacucuaaagagaagcgcuuug

SEQ ID NO: 31438 - RNA, 21 nt, Homo sapiens
gcuccaaagggaagcgcuuug

SEQ ID NO: 31439 - RNA, 21 nt, Homo sapiens
ccucuaaagagaagcgcuuuc

SEQ ID NO: 31440 - RNA, 21 nt, Homo sapiens
gcuccaaccucagcagacugu

SEQ ID NO: 31441 - RNA, 25 nt, Homo sapiens
accaacggaccuacuucccuccgcc

SEQ ID NO: 31442 - RNA, 21 nt, Homo sapiens
caucaccuuccuucuccucca

SEQ ID NO: 31443 - RNA, 20 nt, Homo sapiens
uacugcuuccacagcucccc

SEQ ID NO: 31444 - RNA, 21 nt, Homo sapiens
acuagacugugagcuccucga

SEQ ID NO: 31445 - RNA, 21 nt, Homo sapiens
gaccaaucgccguccccgccg

SEQ ID NO: 31446 - RNA, 21 nt, Homo sapiens
uucuaggauaggcccaggggc

SEQ ID NO: 31447 - RNA, 22 nt, Homo sapiens
aagauguggaccauauuacaua

SEQ ID NO: 31448 - RNA, 23 nt, Homo sapiens
acccucuauagggaagcgcguuc

SEQ ID NO: 31449 - RNA, 22 nt, Homo sapiens
gcggucccgcggcgccccgccu

SEQ ID NO: 31450 - RNA, 22 nt, Homo sapiens
ugcuguuagcccuagccccgca

SEQ ID NO: 31451 - RNA, 22 nt, Homo sapiens
gugggguggguggucaggccga

SEQ ID NO: 31452 - RNA, 21 nt, Homo sapiens
cugggggacggagcagaagga

SEQ ID NO: 31453 - RNA, 22 nt, Homo sapiens
aggcauaggaugacaaagggaa

SEQ ID NO: 31454 - RNA, 22 nt, Homo sapiens
aggcgaaggaugacaaagggaa

SEQ ID NO: 31455 - RNA, 21 nt, Homo sapiens
ucaaucacagauagcaccccu

SEQ ID NO: 31456 - RNA, 20 nt, Homo sapiens
uaugaacaauuucuaggaau

SEQ ID NO: 31457 - RNA, 22 nt, Homo sapiens
aaaguaacugcaguuuuugcua

SEQ ID NO: 31458 - RNA, 21 nt, Homo sapiens
acuggcugagucaggacuagc

SEQ ID NO: 31459 - RNA, 23 nt, Homo sapiens
cacugugggcccucuccgcacca

SEQ ID NO: 31460 - RNA, 22 nt, Homo sapiens
ggcagagagucagagcgcggau

SEQ ID NO: 31461 - RNA, 22 nt, Homo sapiens
cacaagaucggaucuacggguu

SEQ ID NO: 31462 - RNA, 22 nt, Homo sapiens
cgcaaggucgguucuacgggug

SEQ ID NO: 31463 - RNA, 21 nt, Homo sapiens
cggcucggguggcggcgacgg

SEQ ID NO: 31464 - RNA, 22 nt, Homo sapiens
augcccuuucaucauugcacug

SEQ ID NO: 31465 - RNA, 21 nt, Homo sapiens
gggcaucugggacgcgcagga

SEQ ID NO: 31466 - RNA, 18 nt, Homo sapiens
auucaaucuacugccuca

SEQ ID NO: 31467 - RNA, 22 nt, Homo sapiens
ggagagccuccacccaacccuc

SEQ ID NO: 31468 - RNA, 21 nt, Homo sapiens
guaaugggaccuuccucuuug

SEQ ID NO: 31469 - RNA, 17 nt, Homo sapiens
uggaggccccagcgaga

SEQ ID NO: 31470 - RNA, 22 nt, Homo sapiens
cuggagagacaaggggaagagg

SEQ ID NO: 31471 - RNA, 17 nt, Homo sapiens
gggagaggaggaggcga

SEQ ID NO: 31472 - RNA, 21 nt, Homo sapiens
gaccaaucgccguccccgccg

SEQ ID NO: 31473 - RNA, 22 nt, Homo sapiens
cggugagcacccggccccugcg

SEQ ID NO: 31474 - RNA, 22 nt, Homo sapiens
agcugaguguaggauguuuaca

SEQ ID NO: 31475 - RNA, 22 nt, Homo sapiens
auaaggauuuuuaggggcauua

SEQ ID NO: 31476 - RNA, 24 nt, Homo sapiens
cagaaagugcuuucuuuuggagaa

SEQ ID NO: 31477 - RNA, 22 nt, Homo sapiens
uccagcaaagggaagcgcuuuc

SEQ ID NO: 31478 - RNA, 22 nt, Homo sapiens
accucuaaaggggagcgcuuug

SEQ ID NO: 31479 - RNA, 23 nt, Homo sapiens
acacucuaaagagaagcgcuuug

SEQ ID NO: 31480 - RNA, 21 nt, Homo sapiens
gcuccaaagggaagcgcuuug

SEQ ID NO: 31481 - RNA, 21 nt, Homo sapiens
cacucugaagggaagcgcuuu

SEQ ID NO: 31482 - RNA, 21 nt, Homo sapiens
ccucuaaagagaagcgcuuuc

SEQ ID NO: 31483 - RNA, 22 nt, Homo sapiens
aacacucuaaaaggaggcacuu

SEQ ID NO: 31484 - RNA, 19 nt, Homo sapiens
guugggaucacaggcgccc

SEQ ID NO: 31485 - RNA, 22 nt, Homo sapiens
gcggucccgcggcgccccgccu

SEQ ID NO: 31486 - RNA, 21 nt, Homo sapiens
caucaccuuccuucuccucca

SEQ ID NO: 31487 - RNA, 20 nt, Homo sapiens
cccugcgccaucuccucuac

SEQ ID NO: 31488 - RNA, 21 nt, Homo sapiens
cugaggagagaggaggugggg

SEQ ID NO: 31489 - RNA, 18 nt, Homo sapiens
cagcagccuccuucucaa

SEQ ID NO: 31490 - RNA, 22 nt, Homo sapiens
ccaucuuuaccagacaguguua

SEQ ID NO: 31491 - RNA, 22 nt, Homo sapiens
acaucguuaccagacaguguua

SEQ ID NO: 31492 - RNA, 20 nt, Homo sapiens
acauuacuguuaucaaaaca

SEQ ID NO: 31493 - RNA, 22 nt, Homo sapiens
agucuucacaacagcccugugu

SEQ ID NO: 31494 - RNA, 23 nt, Homo sapiens
acaccccaaaaucgaagcacuuc

SEQ ID NO: 31495 - RNA, 18 nt, Homo sapiens
augacaccucccugugaa

SEQ ID NO: 31496 - RNA, 22 nt, Homo sapiens
aguccagauucugugcccacca

SEQ ID NO: 31497 - RNA, 22 nt, Homo sapiens
cugcucaaacccuccaaugacu

SEQ ID NO: 31498 - RNA, 22 nt, Homo sapiens
gcacauguucugcggcccacca

SEQ ID NO: 31499 - RNA, 21 nt, Homo sapiens
cacaaccucaguguuuccagg

SEQ ID NO: 31500 - RNA, 19 nt, Homo sapiens
ucccugauccaaaaaucca

SEQ ID NO: 31501 - RNA, 18 nt, Homo sapiens
aucacauucaccucccug

SEQ ID NO: 31502 - RNA, 23 nt, Homo sapiens
gggagugaagacacggagccaga

SEQ ID NO: 31503 - RNA, 18 nt, Homo sapiens
auucaaucuacugccuca

SEQ ID NO: 31504 - RNA, 22 nt, Homo sapiens
agcccaaaaggagaauucuuug

SEQ ID NO: 31505 - RNA, 23 nt, Homo sapiens
ucucugcaggccgugugcuuugc

SEQ ID NO: 31506 - RNA, 21 nt, Homo sapiens
ccuucugacuccaaguccagu

SEQ ID NO: 31507 - RNA, 22 nt, Homo sapiens
gcaaaaguaauugagauuuuug

SEQ ID NO: 31508 - RNA, 19 nt, Homo sapiens
agaaaccccagcagagaca

SEQ ID NO: 31509 - RNA, 25 nt, Homo sapiens
acggagcugucccaacaccaccccu

SEQ ID NO: 31510 - RNA, 23 nt, Homo sapiens
acccaacagccccugcaagggau

SEQ ID NO: 31511 - RNA, 22 nt, Homo sapiens
agcucagaacccagaggucuca

SEQ ID NO: 31512 - RNA, 20 nt, Homo sapiens
uacugcuuccacagcucccc

SEQ ID NO: 31513 - RNA, 23 nt, Homo sapiens
gucacaucccucccaagacccuc

SEQ ID NO: 31514 - RNA, 22 nt, Homo sapiens
auccuucuacaaauucacccau

SEQ ID NO: 31515 - RNA, 22 nt, Homo sapiens
aacaacacuugaccacauccug

SEQ ID NO: 31516 - RNA, 24 nt, Homo sapiens
acugcuggucuucagucagggcca

SEQ ID NO: 31517 - RNA, 24 nt, Homo sapiens
acugcuggucuucagucagggcca

SEQ ID NO: 31518 - RNA, 23 nt, Homo sapiens
gggagugaagacacggagccaga

SEQ ID NO: 31519 - RNA, 23 nt, Homo sapiens
cuaucugcacuagaugcaccuua

SEQ ID NO: 31520 - RNA, 20 nt, Homo sapiens
cccgccgcgucgcccugggg

SEQ ID NO: 31521 - RNA, 25 nt, Homo sapiens
agcuagucaagcgcgguuguggggg

SEQ ID NO: 31522 - RNA, 21 nt, Homo sapiens
aucugcacugucagcacuuua

SEQ ID NO: 31523 - RNA, 23 nt, Homo sapiens
gcuuugacaauaucauugcacug

SEQ ID NO: 31524 - RNA, 22 nt, Homo sapiens
gauagagugcagaccagggucu

SEQ ID NO: 31525 - RNA, 19 nt, Homo sapiens
aagacauuuucagacagcu

SEQ ID NO: 31526 - RNA, 22 nt, Homo sapiens
ccucuaguaaauaugucagcau

SEQ ID NO: 31527 - RNA, 23 nt, Homo sapiens
gacguaguccuauucucugcugc

SEQ ID NO: 31528 - RNA, 22 nt, Homo sapiens
gggagaggucucccugcgcaca

SEQ ID NO: 31529 - RNA, 22 nt, Homo sapiens
acuggguucaccuuuaagggca

SEQ ID NO: 31530 - RNA, 21 nt, Homo sapiens
ggggagcgggggcccugccuu

SEQ ID NO: 31531 - RNA, 22 nt, Homo sapiens
aucagagcccucugagcuucag

SEQ ID NO: 31532 - RNA, 22 nt, Homo sapiens
ucaggaacugccuuucucucca

SEQ ID NO: 31533 - RNA, 21 nt, Homo sapiens
gaccaaucgccguccccgccg

SEQ ID NO: 31534 - RNA, 22 nt, Homo sapiens
aggcauaggaugacaaagggaa

SEQ ID NO: 31535 - RNA, 22 nt, Homo sapiens
aggcgaaggaugacaaagggaa

SEQ ID NO: 31536 - RNA, 22 nt, Homo sapiens
aaucagucucauugcuuuauaa

SEQ ID NO: 31537 - RNA, 23 nt, Homo sapiens
cugcagaacuguucccgcugcua

SEQ ID NO: 31538 - RNA, 23 nt, Homo sapiens
acagcgcucgcaaccgcagcgau

SEQ ID NO: 31539 - RNA, 19 nt, Homo sapiens
gcucuaagaaagccacacu

SEQ ID NO: 31540 - RNA, 25 nt, Homo sapiens
accaacggaccuacuucccuccgcc

SEQ ID NO: 31541 - RNA, 22 nt, Homo sapiens
gcggucccgcggcgccccgccu

SEQ ID NO: 31542 - RNA, 17 nt, Homo sapiens
uggaggccccagcgaga

SEQ ID NO: 31543 - RNA, 20 nt, Homo sapiens
gcaagacaucacaagacucu

SEQ ID NO: 31544 - RNA, 22 nt, Homo sapiens
ggcagagagucagagcgcggau

SEQ ID NO: 31545 - RNA, 18 nt, Homo sapiens
cccccaccaccacgcccg

SEQ ID NO: 31546 - RNA, 19 nt, Homo sapiens
ucccugauccaaaaaucca

SEQ ID NO: 31547 - RNA, 21 nt, Homo sapiens
gcaagcccagaccgcaaaaag

SEQ ID NO: 31548 - RNA, 22 nt, Homo sapiens
cacgaccgacgccacgccgagu

SEQ ID NO: 31549 - RNA, 22 nt, Homo sapiens
acuccaacagggccgcgucucc

SEQ ID NO: 31550 - RNA, 22 nt, Homo sapiens
acaguucuucaacuggcagcuu

SEQ ID NO: 31551 - RNA, 21 nt, Homo sapiens
accuauccugaauuacuugaa

SEQ ID NO: 31552 - RNA, 22 nt, Homo sapiens
agcugaguguaggauguuuaca

SEQ ID NO: 31553 - RNA, 22 nt, Homo sapiens
gcaaaaguaauugagauuuuug

SEQ ID NO: 31554 - RNA, 21 nt, Homo sapiens
aguucucccaacguaaaccca

SEQ ID NO: 31555 - RNA, 19 nt, Homo sapiens
gccucagaggcagcugcuu

SEQ ID NO: 31556 - RNA, 22 nt, Homo sapiens
acaaaguucuguagugcacuga

SEQ ID NO: 31557 - RNA, 22 nt, Homo sapiens
acaaaguucugugaugcacuga

SEQ ID NO: 31558 - RNA, 21 nt, Homo sapiens
ccaaguucugucaugcacuga

SEQ ID NO: 31559 - RNA, 21 nt, Homo sapiens
acccaguagccagauguagcu

SEQ ID NO: 31560 - RNA, 23 nt, Homo sapiens
gaaacccagcagacaauguagcu

SEQ ID NO: 31561 - RNA, 23 nt, Homo sapiens
ucuacuccaaaaggcuacaauca

SEQ ID NO: 31562 - RNA, 22 nt, Homo sapiens
cugcucaaacccuccaaugacu

SEQ ID NO: 31563 - RNA, 17 nt, Homo sapiens
ggguggcagcgguggga

SEQ ID NO: 31564 - RNA, 21 nt, Homo sapiens
gcaagcccagaccgcaaaaag

SEQ ID NO: 31565 - RNA, 22 nt, Homo sapiens
ccccucuggucaaccagucaca

SEQ ID NO: 31566 - RNA, 21 nt, Homo sapiens
gaccaaucgccguccccgccg

SEQ ID NO: 31567 - RNA, 21 nt, Homo sapiens
ggaaaucccuggcaaugugau

SEQ ID NO: 31568 - RNA, 21 nt, Homo sapiens
gguaaucccuggcaaugugau

SEQ ID NO: 31569 - RNA, 20 nt, Homo sapiens
cuggaggaagggcccagagg

SEQ ID NO: 31570 - RNA, 22 nt, Homo sapiens
gccuaagacacaggcccagaga

SEQ ID NO: 31571 - RNA, 22 nt, Homo sapiens
ccucauggaaggguuccccacu

SEQ ID NO: 31572 - RNA, 22 nt, Homo sapiens
gcaaaagaaacugugguuuuug

SEQ ID NO: 31573 - RNA, 22 nt, Homo sapiens
caagacacauuuggagagggac

SEQ ID NO: 31574 - RNA, 21 nt, Homo sapiens
cugcugggccacaacguggga

SEQ ID NO: 31575 - RNA, 22 nt, Homo sapiens
gcggucccgcggcgccccgccu

SEQ ID NO: 31576 - RNA, 22 nt, Homo sapiens
ugcuguuagcccuagccccgca

SEQ ID NO: 31577 - RNA, 20 nt, Homo sapiens
uacugcuuccacagcucccc

SEQ ID NO: 31578 - RNA, 22 nt, Homo sapiens
cacgaccgacgccacgccgagu

SEQ ID NO: 31579 - RNA, 23 nt, Homo sapiens
cccaacagacauggcgguacuca

SEQ ID NO: 31580 - RNA, 21 nt, Homo sapiens
aagacgggaggagaggaguga

SEQ ID NO: 31581 - RNA, 22 nt, Homo sapiens
gaauucaucacggccagccucu

SEQ ID NO: 31582 - RNA, 19 nt, Homo sapiens
auuuugguacagcagcuca

SEQ ID NO: 31583 - RNA, 21 nt, Homo sapiens
gcugaggucugggccaggucu

SEQ ID NO: 31584 - RNA, 22 nt, Homo sapiens
uauccacuacaccccgcugccu

SEQ ID NO: 31585 - RNA, 24 nt, Homo sapiens
cacccccagagccucagcucccca

SEQ ID NO: 31586 - RNA, 17 nt, Homo sapiens
gggagaggaggaggcga

SEQ ID NO: 31587 - RNA, 23 nt, Homo sapiens
gggagugaagacacggagccaga

SEQ ID NO: 31588 - RNA, 21 nt, Homo sapiens
acuagacugugagcuccucga

SEQ ID NO: 31589 - RNA, 21 nt, Homo sapiens
gaccaaucgccguccccgccg

SEQ ID NO: 31590 - RNA, 22 nt, Homo sapiens
uggcagcagcggagggggcaga

SEQ ID NO: 31591 - RNA, 21 nt, Homo sapiens
acaggauugagggggggcccu

SEQ ID NO: 31592 - RNA, 20 nt, Homo sapiens
ccagcagcaccuggggcagu

SEQ ID NO: 31593 - RNA, 21 nt, Homo sapiens
auccuguacugagcugccccg

SEQ ID NO: 31594 - RNA, 19 nt, Homo sapiens
gccugcugacaccgugccu

SEQ ID NO: 31595 - RNA, 19 nt, Homo sapiens
guugggaucacaggcgccc

SEQ ID NO: 31596 - RNA, 23 nt, Homo sapiens
ggacauuguuucagugcccaagu

SEQ ID NO: 31597 - RNA, 22 nt, Homo sapiens
gcggucccgcggcgccccgccu

SEQ ID NO: 31598 - RNA, 22 nt, Homo sapiens
ugcuguuagcccuagccccgca

SEQ ID NO: 31599 - RNA, 21 nt, Homo sapiens
uuccacgaccuaauccuaacu

SEQ ID NO: 31600 - RNA, 22 nt, Homo sapiens
cacgaccgacgccacgccgagu

SEQ ID NO: 31601 - RNA, 22 nt, Homo sapiens
augcccuuucaucauugcacug

SEQ ID NO: 31602 - RNA, 23 nt, Homo sapiens
gggagugaagacacggagccaga

SEQ ID NO: 31603 - RNA, 21 nt, Homo sapiens
gaccaaucgccguccccgccg

SEQ ID NO: 31604 - RNA, 21 nt, Homo sapiens
aggcggcaggcacaggacugg

SEQ ID NO: 31605 - RNA, 22 nt, Homo sapiens
uccacauggaguugcuguuaca

SEQ ID NO: 31606 - RNA, 22 nt, Homo sapiens
uagucaagugaagcagugggag

SEQ ID NO: 31607 - RNA, 22 nt, Homo sapiens
agcugaguguaggauguuuaca

SEQ ID NO: 31608 - RNA, 22 nt, Homo sapiens
acaaccagcuaagacacugcca

SEQ ID NO: 31609 - RNA, 23 nt, Homo sapiens
gcaaucagcuaacuacacugccu

SEQ ID NO: 31610 - RNA, 22 nt, Homo sapiens
accagcuaacaauacacugcca

SEQ ID NO: 31611 - RNA, 22 nt, Homo sapiens
gccagcuaacaauacacugccu

SEQ ID NO: 31612 - RNA, 22 nt, Homo sapiens
ugcaagccuugggugugggagg

SEQ ID NO: 31613 - RNA, 21 nt, Homo sapiens
guaaugggaccuuccucuuug

SEQ ID NO: 31614 - RNA, 22 nt, Homo sapiens
gauccgagcaccggggaccccc

SEQ ID NO: 31615 - RNA, 22 nt, Homo sapiens
gcggucccgcggcgccccgccu

SEQ ID NO: 31616 - RNA, 23 nt, Homo sapiens
cuaccugcacuguaagcacuuuu

SEQ ID NO: 31617 - RNA, 21 nt, Homo sapiens
aucugcacugucagcacuuua

SEQ ID NO: 31618 - RNA, 22 nt, Homo sapiens
aacccauggaauucaguucuca

SEQ ID NO: 31619 - RNA, 23 nt, Homo sapiens
cuaccugcacuguaagcacuuug

SEQ ID NO: 31620 - RNA, 21 nt, Homo sapiens
aggcggcaggcacaggacugg

SEQ ID NO: 31621 - RNA, 23 nt, Homo sapiens
cuaccugcacuauaagcacuuua

SEQ ID NO: 31622 - RNA, 23 nt, Homo sapiens
cuaccugcacuaugagcacuuug

SEQ ID NO: 31623 - RNA, 21 nt, Homo sapiens
gcggaacuuagccacugugaa

SEQ ID NO: 31624 - RNA, 21 nt, Homo sapiens
gcagaacuuagccacugugaa

SEQ ID NO: 31625 - RNA, 23 nt, Homo sapiens
ucaccaaaacauggaagcacuua

SEQ ID NO: 31626 - RNA, 23 nt, Homo sapiens
cuacuaaaacauggaagcacuua

SEQ ID NO: 31627 - RNA, 23 nt, Homo sapiens
ccacugaaacauggaagcacuua

SEQ ID NO: 31628 - RNA, 23 nt, Homo sapiens
acacucaaacauggaagcacuua

SEQ ID NO: 31629 - RNA, 17 nt, Homo sapiens
aagcauggaagcacuua

SEQ ID NO: 31630 - RNA, 23 nt, Homo sapiens
acgcucaaaugucgcagcacuuu

SEQ ID NO: 31631 - RNA, 23 nt, Homo sapiens
acaccccaaaaucgaagcacuuc

SEQ ID NO: 31632 - RNA, 22 nt, Homo sapiens
cacucuaaagggaggcacuuug

SEQ ID NO: 31633 - RNA, 22 nt, Homo sapiens
acaguccaaagggaagcacuuu

SEQ ID NO: 31634 - RNA, 21 nt, Homo sapiens
cccucuaaaaggaagcacuuu

SEQ ID NO: 31635 - RNA, 22 nt, Homo sapiens
acccucuaaaaggaagcacuuu

SEQ ID NO: 31636 - RNA, 22 nt, Homo sapiens
acccaccaaagagaagcacuuu

SEQ ID NO: 31637 - RNA, 21 nt, Homo sapiens
cccucaaaaaggaagcacuuu

SEQ ID NO: 31638 - RNA, 24 nt, Homo sapiens
acacucuaaagggaagcacuuugu

SEQ ID NO: 31639 - RNA, 22 nt, Homo sapiens
acucuaaagggaagcacuuugu

SEQ ID NO: 31640 - RNA, 23 nt, Homo sapiens
acagaaagugcuucccucaagag

SEQ ID NO: 31641 - RNA, 22 nt, Homo sapiens
guccaaaguuggggugcugguu

SEQ ID NO: 31642 - RNA, 23 nt, Homo sapiens
cuaccugcacgaacagcacuuug

SEQ ID NO: 31643 - RNA, 20 nt, Homo sapiens
cucaaagcaaacccugcaga

SEQ ID NO: 31644 - RNA, 23 nt, Homo sapiens
cuaccugcacuguaagcacuuug

SEQ ID NO: 31645 - RNA, 22 nt, Homo sapiens
uggcagcagcggagggggcaga

SEQ ID NO: 31646 - RNA, 22 nt, Homo sapiens
uccacauggaguugcuguuaca

SEQ ID NO: 31647 - RNA, 20 nt, Homo sapiens
ccagcagcaccuggggcagu

SEQ ID NO: 31648 - RNA, 22 nt, Homo sapiens
uacagauggauaccgugcaauu

SEQ ID NO: 31649 - RNA, 21 nt, Homo sapiens
ugcaugacggccugcaagaca

SEQ ID NO: 31650 - RNA, 21 nt, Homo sapiens
auccuguacugagcugccccg

SEQ ID NO: 31651 - RNA, 22 nt, Homo sapiens
caugauugccacgucugcagua

SEQ ID NO: 31652 - RNA, 21 nt, Homo sapiens
ugauugccacugucugcagua

SEQ ID NO: 31653 - RNA, 22 nt, Homo sapiens
uccagcaaagggaagcgcuuuc

SEQ ID NO: 31654 - RNA, 22 nt, Homo sapiens
accucuaaaggggagcgcuuug

SEQ ID NO: 31655 - RNA, 23 nt, Homo sapiens
acacucuaaagagaagcgcuuug

SEQ ID NO: 31656 - RNA, 21 nt, Homo sapiens
gcuccaaagggaagcgcuuug

SEQ ID NO: 31657 - RNA, 21 nt, Homo sapiens
cacucugaagggaagcgcuuu

SEQ ID NO: 31658 - RNA, 21 nt, Homo sapiens
ccucuaaagagaagcgcuuuc

SEQ ID NO: 31659 - RNA, 25 nt, Homo sapiens
acggagcugucccaacaccaccccu

SEQ ID NO: 31660 - RNA, 20 nt, Homo sapiens
acaaugagaacccauggucu

SEQ ID NO: 31661 - RNA, 22 nt, Homo sapiens
caaacaccauugucacacucca

SEQ ID NO: 31662 - RNA, 22 nt, Homo sapiens
cugggggcggcacaggggcuca

SEQ ID NO: 31663 - RNA, 23 nt, Homo sapiens
acacagcucuuccauaucuccag

SEQ ID NO: 31664 - RNA, 17 nt, Homo sapiens
gggagaggaggaggcga

SEQ ID NO: 31665 - RNA, 23 nt, Homo sapiens
uccaucaucaaaacaaauggagu

SEQ ID NO: 31666 - RNA, 22 nt, Homo sapiens
cggugagcacccggccccugcg

SEQ ID NO: 31667 - RNA, 22 nt, Homo sapiens
acugccugucugugccugcugu

SEQ ID NO: 31668 - RNA, 22 nt, Homo sapiens
cuguuccugcugaacugagcca

SEQ ID NO: 31669 - RNA, 22 nt, Homo sapiens
accagguuccaccccagcaggc

SEQ ID NO: 31670 - RNA, 23 nt, Homo sapiens
aaagucucgcucucugccccuca

SEQ ID NO: 31671 - RNA, 22 nt, Homo sapiens
ccucauggaaggguuccccacu

SEQ ID NO: 31672 - RNA, 21 nt, Homo sapiens
uagcacccagauagcaaggau

SEQ ID NO: 31673 - RNA, 25 nt, Homo sapiens
acggagcugucccaacaccaccccu

SEQ ID NO: 31674 - RNA, 20 nt, Homo sapiens
auuucuauaucuaucuccau

SEQ ID NO: 31675 - RNA, 21 nt, Homo sapiens
caucaccuuccuucuccucca

SEQ ID NO: 31676 - RNA, 21 nt, Homo sapiens
ugacugacagcuuuuugagua

SEQ ID NO: 31677 - RNA, 20 nt, Homo sapiens
uacugcuuccacagcucccc

SEQ ID NO: 31678 - RNA, 22 nt, Homo sapiens
gggagaggucucccugcgcaca

SEQ ID NO: 31679 - RNA, 22 nt, Homo sapiens
aaaauacauauauaucuacgua

SEQ ID NO: 31680 - RNA, 21 nt, Homo sapiens
cggggugcacgggcggagggc

SEQ ID NO: 31681 - RNA, 21 nt, Homo sapiens
accuauccugaauuacuugaa

SEQ ID NO: 31682 - RNA, 23 nt, Homo sapiens
aaagucucgcucucugccccuca

SEQ ID NO: 31683 - RNA, 22 nt, Homo sapiens
gcacacaauaaauguuugcuga

SEQ ID NO: 31684 - RNA, 22 nt, Homo sapiens
aaaguaacugcaguuuuugcua

SEQ ID NO: 31685 - RNA, 21 nt, Homo sapiens
cccgaggagccgggcaggcuu

SEQ ID NO: 31686 - RNA, 23 nt, Homo sapiens
ccaccuggcaagaacaggcguuc

SEQ ID NO: 31687 - RNA, 21 nt, Homo sapiens
gguggagcccugagaaccgga

SEQ ID NO: 31688 - RNA, 20 nt, Homo sapiens
uacugcuuccacagcucccc

SEQ ID NO: 31689 - RNA, 22 nt, Homo sapiens
ugaagaagggggggaagggcgu

SEQ ID NO: 31690 - RNA, 21 nt, Homo sapiens
gggcaucugggacgcgcagga

SEQ ID NO: 31691 - RNA, 21 nt, Homo sapiens
aaagugucagauacggugugg

SEQ ID NO: 31692 - RNA, 23 nt, Homo sapiens
ucaccaaaacauggaagcacuua

SEQ ID NO: 31693 - RNA, 22 nt, Homo sapiens
aagauguggaccauauuacaua

SEQ ID NO: 31694 - RNA, 22 nt, Homo sapiens
aagaagugcaccauguuuguuu

SEQ ID NO: 31695 - RNA, 22 nt, Homo sapiens
aggaaaccagcaaguguugacg

SEQ ID NO: 31696 - RNA, 22 nt, Homo sapiens
cuacccacagacguaccaauca

SEQ ID NO: 31697 - RNA, 22 nt, Homo sapiens
acaaaagcaacugagguucuug

SEQ ID NO: 31698 - RNA, 19 nt, Homo sapiens
gggaaacguaugucaaccu

SEQ ID NO: 31699 - RNA, 22 nt, Homo sapiens
acuggguucaccuuuaagggca

SEQ ID NO: 31700 - RNA, 22 nt, Homo sapiens
caaacaccauugucacacucca

SEQ ID NO: 31701 - RNA, 17 nt, Homo sapiens
gacagccucucccccac

SEQ ID NO: 31702 - RNA, 18 nt, Homo sapiens
aucacauucaccucccug

SEQ ID NO: 31703 - RNA, 23 nt, Homo sapiens
gggagugaagacacggagccaga

SEQ ID NO: 31704 - RNA, 22 nt, Homo sapiens
ucaggaacugccuuucucucca

SEQ ID NO: 31705 - RNA, 21 nt, Homo sapiens
gaccaaucgccguccccgccg

SEQ ID NO: 31706 - RNA, 20 nt, Homo sapiens
acagcaaggagggcaggagg

SEQ ID NO: 31707 - RNA, 22 nt, Homo sapiens
ggagagccuccacccaacccuc

SEQ ID NO: 31708 - RNA, 23 nt, Homo sapiens
agaggcaggcaugcgggcagaca

SEQ ID NO: 31709 - RNA, 21 nt, Homo sapiens
ccuacguuccauagucuacca

SEQ ID NO: 31710 - RNA, 22 nt, Homo sapiens
gaauucaucacggccagccucu

SEQ ID NO: 31711 - RNA, 19 nt, Homo sapiens
aagacauuuucagacagcu

SEQ ID NO: 31712 - RNA, 22 nt, Homo sapiens
gcggucccgcggcgccccgccu

SEQ ID NO: 31713 - RNA, 22 nt, Homo sapiens
cacucuaaagggaggcacuuug

SEQ ID NO: 31714 - RNA, 21 nt, Homo sapiens
ggggagcgggggcccugccuu

SEQ ID NO: 31715 - RNA, 24 nt, Homo sapiens
cacccccagagccucagcucccca

SEQ ID NO: 31716 - RNA, 23 nt, Homo sapiens
gcacaugugcacacagccgggug

SEQ ID NO: 31717 - RNA, 22 nt, Homo sapiens
cugggggcggcacaggggcuca

SEQ ID NO: 31718 - RNA, 21 nt, Homo sapiens
aguagugcuuucuacuuuaug

SEQ ID NO: 31719 - RNA, 23 nt, Homo sapiens
gggagugaagacacggagccaga

SEQ ID NO: 31720 - RNA, 22 nt, Homo sapiens
uggcagcagcggagggggcaga

SEQ ID NO: 31721 - RNA, 25 nt, Homo sapiens
agcuagucaagcgcgguuguggggg

SEQ ID NO: 31722 - RNA, 22 nt, Homo sapiens
acaguucuucaacuggcagcuu

SEQ ID NO: 31723 - RNA, 22 nt, Homo sapiens
agcugaguguaggauguuuaca

SEQ ID NO: 31724 - RNA, 20 nt, Homo sapiens
ccagcagcaccuggggcagu

SEQ ID NO: 31725 - RNA, 22 nt, Homo sapiens
ccucauggaaggguuccccacu

SEQ ID NO: 31726 - RNA, 22 nt, Homo sapiens
gcaaagguaauugcuguuuucg

SEQ ID NO: 31727 - RNA, 21 nt, Homo sapiens
caucaccuuccuucuccucca

SEQ ID NO: 31728 - RNA, 20 nt, Homo sapiens
uacugcuuccacagcucccc

SEQ ID NO: 31729 - RNA, 23 nt, Homo sapiens
cacaaauucgguucuacagggua

SEQ ID NO: 31730 - RNA, 18 nt, Homo sapiens
gaaaugagggccagcuga

SEQ ID NO: 31731 - RNA, 22 nt, Homo sapiens
cuagggaacacagggcugguga

SEQ ID NO: 31732 - RNA, 17 nt, Homo sapiens
ggguggcagcgguggga

SEQ ID NO: 31733 - RNA, 23 nt, Homo sapiens
cggccugauucacaacaccagcu

SEQ ID NO: 31734 - RNA, 21 nt, Homo sapiens
cggggugcacgggcggagggc

SEQ ID NO: 31735 - RNA, 22 nt, Homo sapiens
cggugagcacccggccccugcg

SEQ ID NO: 31736 - RNA, 23 nt, Homo sapiens
cagcugcuuuugggauuccguug

SEQ ID NO: 31737 - RNA, 22 nt, Homo sapiens
acaguucuucaacuggcagcuu

SEQ ID NO: 31738 - RNA, 22 nt, Homo sapiens
ucagaccgagacaagugcaaug

SEQ ID NO: 31739 - RNA, 23 nt, Homo sapiens
gucagaccccgagggguccucgc

SEQ ID NO: 31740 - RNA, 22 nt, Homo sapiens
gauccgagcaccggggaccccc

SEQ ID NO: 31741 - RNA, 21 nt, Homo sapiens
gaaggaagugagugcagccac

SEQ ID NO: 31742 - RNA, 25 nt, Homo sapiens
accaacggaccuacuucccuccgcc

SEQ ID NO: 31743 - RNA, 20 nt, Homo sapiens
aggggccucagccuccuggu

SEQ ID NO: 31744 - RNA, 22 nt, Homo sapiens
ugcuguuagcccuagccccgca

SEQ ID NO: 31745 - RNA, 21 nt, Homo sapiens
cggggugcacgggcggagggc

SEQ ID NO: 31746 - RNA, 22 nt, Homo sapiens
cacugguacaaggguugggaga

SEQ ID NO: 31747 - RNA, 22 nt, Homo sapiens
cagaaagugcuucccucuagag

SEQ ID NO: 31748 - RNA, 22 nt, Homo sapiens
cacucagcggccguuuccccaa

SEQ ID NO: 31749 - RNA, 22 nt, Homo sapiens
ucagaccgagacaagugcaaug

SEQ ID NO: 31750 - RNA, 22 nt, Homo sapiens
agcugaguguaggauguuuaca

SEQ ID NO: 31751 - RNA, 22 nt, Homo sapiens
uacagauggauaccgugcaauu

SEQ ID NO: 31752 - RNA, 23 nt, Homo sapiens
ccacccaaugaccuacuccaaga

SEQ ID NO: 31753 - RNA, 19 nt, Homo sapiens
gccugcugacaccgugccu

SEQ ID NO: 31754 - RNA, 21 nt, Homo sapiens
cccgaggagccgggcaggcuu

SEQ ID NO: 31755 - RNA, 25 nt, Homo sapiens
accaacggaccuacuucccuccgcc

SEQ ID NO: 31756 - RNA, 20 nt, Homo sapiens
uccccacagacccagagccg

SEQ ID NO: 31757 - RNA, 21 nt, Homo sapiens
cggcucggguggcggcgacgg

SEQ ID NO: 31758 - RNA, 21 nt, Homo sapiens
ccccucccagccucccugcca

SEQ ID NO: 31759 - RNA, 22 nt, Homo sapiens
ggagcccgcgccccgcgccgag

SEQ ID NO: 31760 - RNA, 21 nt, Homo sapiens
gggcaucugggacgcgcagga

SEQ ID NO: 31761 - RNA, 22 nt, Homo sapiens
ucaggaacugccuuucucucca

SEQ ID NO: 31762 - RNA, 22 nt, Homo sapiens
cggugagcacccggccccugcg

SEQ ID NO: 31763 - RNA, 19 nt, Homo sapiens
auuuugguacagcagcuca

SEQ ID NO: 31764 - RNA, 22 nt, Homo sapiens
aagagggagacccaggcucgga

SEQ ID NO: 31765 - RNA, 22 nt, Homo sapiens
ugcuguuagcccuagccccgca

SEQ ID NO: 31766 - RNA, 21 nt, Homo sapiens
aaagagaccgguucacuguga

SEQ ID NO: 31767 - RNA, 22 nt, Homo sapiens
cacgaccgacgccacgccgagu

SEQ ID NO: 31768 - RNA, 22 nt, Homo sapiens
ccccucuggucaaccagucaca

SEQ ID NO: 31769 - RNA, 23 nt, Homo sapiens
ucaguuuugcauagauuugcaca

SEQ ID NO: 31770 - RNA, 22 nt, Homo sapiens
cacucagcaccaggauauuguu

SEQ ID NO: 31771 - RNA, 22 nt, Homo sapiens
aacuaugcaaccuacuaccucu

SEQ ID NO: 31772 - RNA, 23 nt, Homo sapiens
gggcucuuacucccucaggcacu

SEQ ID NO: 31773 - RNA, 23 nt, Homo sapiens
guagugggccgagccgagugaca

SEQ ID NO: 31774 - RNA, 23 nt, Homo sapiens
acaaggaugaaucuuuguuacug

SEQ ID NO: 31775 - RNA, 20 nt, Homo sapiens
cugcgggaggacagggcuca

SEQ ID NO: 31776 - RNA, 22 nt, Homo sapiens
gugggguggguggucaggccga

SEQ ID NO: 31777 - RNA, 20 nt, Homo sapiens
ggggcagacagacgaggaag

SEQ ID NO: 31778 - RNA, 22 nt, Homo sapiens
cacgaccgacgccacgccgagu

SEQ ID NO: 31779 - RNA, 22 nt, Homo sapiens
cacgaccgacgccacgccgagu

SEQ ID NO: 31780 - RNA, 21 nt, Homo sapiens
cggggugcacgggcggagggc

SEQ ID NO: 31781 - RNA, 22 nt, Homo sapiens
ucagaccgagacaagugcaaug

SEQ ID NO: 31782 - RNA, 19 nt, Homo sapiens
gccugcugacaccgugccu

SEQ ID NO: 31783 - RNA, 22 nt, Homo sapiens
aagagggagacccaggcucgga

SEQ ID NO: 31784 - RNA, 22 nt, Homo sapiens
gccaccuucaaaugggaagucu

SEQ ID NO: 31785 - RNA, 25 nt, Homo sapiens
accaacggaccuacuucccuccgcc

SEQ ID NO: 31786 - RNA, 22 nt, Homo sapiens
ucggucccucgggccagggcag

SEQ ID NO: 31787 - RNA, 18 nt, Homo sapiens
gaaaugagggccagcuga

SEQ ID NO: 31788 - RNA, 21 nt, Homo sapiens
ccgugguucuacccuguggua

SEQ ID NO: 31789 - RNA, 21 nt, Homo sapiens
gaccaaucgccguccccgccg

SEQ ID NO: 31790 - RNA, 23 nt, Homo sapiens
cccaacagacauggcgguacuca

SEQ ID NO: 31791 - RNA, 22 nt, Homo sapiens
cuguuccugcugaacugagcca

SEQ ID NO: 31792 - RNA, 18 nt, Homo sapiens
acccucugaaaggaagca

SEQ ID NO: 31793 - RNA, 22 nt, Homo sapiens
aaagugcuucuuaccuccagau

SEQ ID NO: 31794 - RNA, 22 nt, Homo sapiens
gcggucccgcggcgccccgccu

SEQ ID NO: 31795 - RNA, 22 nt, Homo sapiens
ugcuguuagcccuagccccgca

SEQ ID NO: 31796 - RNA, 22 nt, Homo sapiens
gugggguggguggucaggccga

SEQ ID NO: 31797 - RNA, 23 nt, Homo sapiens
gggagugaagacacggagccaga

SEQ ID NO: 31798 - RNA, 22 nt, Homo sapiens
cacugguacaaggguugggaga

SEQ ID NO: 31799 - RNA, 21 nt, Homo sapiens
acuagacugugagcuccucga

SEQ ID NO: 31800 - RNA, 21 nt, Homo sapiens
gaccaaucgccguccccgccg

SEQ ID NO: 31801 - RNA, 22 nt, Homo sapiens
agcugaguguaggauguuuaca

SEQ ID NO: 31802 - RNA, 23 nt, Homo sapiens
aaaucagaaucacaccuggggga

SEQ ID NO: 31803 - RNA, 23 nt, Homo sapiens
acccucuauagggaagcgcguuc

SEQ ID NO: 31804 - RNA, 25 nt, Homo sapiens
acggagcugucccaacaccaccccu

SEQ ID NO: 31805 - RNA, 21 nt, Homo sapiens
ggacuauagaacuuucccccu

SEQ ID NO: 31806 - RNA, 24 nt, Homo sapiens
acgcagagcccgaaagcccccagu

SEQ ID NO: 31807 - RNA, 24 nt, Homo sapiens
acgcgcaggccagagacccaggca

SEQ ID NO: 31808 - RNA, 22 nt, Homo sapiens
gcggucccgcggcgccccgccu

SEQ ID NO: 31809 - RNA, 22 nt, Homo sapiens
cacucuaaagggaggcacuuug

SEQ ID NO: 31810 - RNA, 22 nt, Homo sapiens
caaacaccauugucacacucca

SEQ ID NO: 31811 - RNA, 22 nt, Homo sapiens
cacugguacaaggguugggaga

SEQ ID NO: 31812 - RNA, 22 nt, Homo sapiens
cagaaagugcuucccucuagag

SEQ ID NO: 31813 - RNA, 18 nt, Homo sapiens
ggagaggagggcacugga

SEQ ID NO: 31814 - RNA, 20 nt, Homo sapiens
acagcaaggagggcaggagg

SEQ ID NO: 31815 - RNA, 22 nt, Homo sapiens
ggagagccuccacccaacccuc

SEQ ID NO: 31816 - RNA, 22 nt, Homo sapiens
agcugaguguaggauguuuaca

SEQ ID NO: 31817 - RNA, 23 nt, Homo sapiens
ucucugcaggccgugugcuuugc

SEQ ID NO: 31818 - RNA, 22 nt, Homo sapiens
aggaaaccagcaaguguugacg

SEQ ID NO: 31819 - RNA, 22 nt, Homo sapiens
aacccucuaaaaggaagcacuu

SEQ ID NO: 31820 - RNA, 20 nt, Homo sapiens
agagaugagagaaacacccu

SEQ ID NO: 31821 - RNA, 21 nt, Homo sapiens
caucaccuuccuucuccucca

SEQ ID NO: 31822 - RNA, 21 nt, Homo sapiens
aagggucaguaagcacccgcg

SEQ ID NO: 31823 - RNA, 22 nt, Homo sapiens
cacucuaaagggaggcacuuug

SEQ ID NO: 31824 - RNA, 21 nt, Homo sapiens
ggggagcgggggcccugccuu

SEQ ID NO: 31825 - RNA, 23 nt, Homo sapiens
cacaaauucggaucuacagggua

SEQ ID NO: 31826 - RNA, 23 nt, Homo sapiens
cacaaauucgguucuacagggua

SEQ ID NO: 31827 - RNA, 17 nt, Homo sapiens
uggcgcccgaacaggga

SEQ ID NO: 31828 - RNA, 23 nt, Homo sapiens
gggagugaagacacggagccaga

SEQ ID NO: 31829 - RNA, 23 nt, Homo sapiens
cuaucugcacuagaugcaccuua

SEQ ID NO: 31830 - RNA, 22 nt, Homo sapiens
acugccugucugugccugcugu

SEQ ID NO: 31831 - RNA, 22 nt, Homo sapiens
auaaggauuuuuaggggcauua

SEQ ID NO: 31832 - RNA, 23 nt, Homo sapiens
ucaacgggagugaucgugucauu

SEQ ID NO: 31833 - RNA, 22 nt, Homo sapiens
ccucauggaaggguuccccacu

SEQ ID NO: 31834 - RNA, 22 nt, Homo sapiens
gauagagugcagaccagggucu

SEQ ID NO: 31835 - RNA, 22 nt, Homo sapiens
aaagugcuucuuaccuccagau

SEQ ID NO: 31836 - RNA, 21 nt, Homo sapiens
gaaggaagugagugcagccac

SEQ ID NO: 31837 - RNA, 21 nt, Homo sapiens
caucaccuuccuucuccucca

SEQ ID NO: 31838 - RNA, 21 nt, Homo sapiens
aggagacucacaaguuccugc

SEQ ID NO: 31839 - RNA, 22 nt, Homo sapiens
ucggucccucgggccagggcag

SEQ ID NO: 31840 - RNA, 20 nt, Homo sapiens
uacugcuuccacagcucccc

SEQ ID NO: 31841 - RNA, 20 nt, Homo sapiens
cuggaggaagggcccagagg

SEQ ID NO: 31842 - RNA, 22 nt, Homo sapiens
gccuaagacacaggcccagaga

SEQ ID NO: 31843 - RNA, 22 nt, Homo sapiens
uucaaaacaugaauugcugcug

SEQ ID NO: 31844 - RNA, 22 nt, Homo sapiens
gguuaguggaccaggucacaaa

SEQ ID NO: 31845 - RNA, 21 nt, Homo sapiens
uuuagcauaaguaugucccaa

SEQ ID NO: 31846 - RNA, 21 nt, Homo sapiens
aagugucagacacgguggugg

SEQ ID NO: 31847 - RNA, 22 nt, Homo sapiens
agagagagucugcccuuguaua

SEQ ID NO: 31848 - RNA, 22 nt, Homo sapiens
acagagagcuugcccuuguaua

SEQ ID NO: 31849 - RNA, 21 nt, Homo sapiens
ggacuauagaacuuucccccu

SEQ ID NO: 31850 - RNA, 22 nt, Homo sapiens
cuaccugagcuagcauacaagu

SEQ ID NO: 31851 - RNA, 21 nt, Homo sapiens
ccccucccagccucccugcca

SEQ ID NO: 31852 - RNA, 24 nt, Homo sapiens
acugcuggucuucagucagggcca

SEQ ID NO: 31853 - RNA, 22 nt, Homo sapiens
agagcaagaccccgucucuaaa

SEQ ID NO: 31854 - RNA, 23 nt, Homo sapiens
gaaacccagcagacaauguagcu

SEQ ID NO: 31855 - RNA, 21 nt, Homo sapiens
acaggauugagggggggcccu

SEQ ID NO: 31856 - RNA, 22 nt, Homo sapiens
acggaagggcagagagggccag

SEQ ID NO: 31857 - RNA, 20 nt, Homo sapiens
agugcccccacaguuugagu

SEQ ID NO: 31858 - RNA, 23 nt, Homo sapiens
cuccagccccuccagggcuuccu

SEQ ID NO: 31859 - RNA, 21 nt, Homo sapiens
ugacugacagcuuuuugagua

SEQ ID NO: 31860 - RNA, 21 nt, Homo sapiens
ccgugguucuacccuguggua

SEQ ID NO: 31861 - RNA, 22 nt, Homo sapiens
uucacacugcaugcucugggua

SEQ ID NO: 31862 - RNA, 22 nt, Homo sapiens
ucaacaucagucugauaagcua

SEQ ID NO: 31863 - RNA, 22 nt, Homo sapiens
aagaagugcaccauguuuguuu

SEQ ID NO: 31864 - RNA, 21 nt, Homo sapiens
acaaaccacagugugcugcug

SEQ ID NO: 31865 - RNA, 23 nt, Homo sapiens
gggcucuuacucccucaggcacu

SEQ ID NO: 31866 - RNA, 19 nt, Homo sapiens
guccugaauuccgcagccu

SEQ ID NO: 31867 - RNA, 22 nt, Homo sapiens
ggcagagagucagagcgcggau

SEQ ID NO: 31868 - RNA, 22 nt, Homo sapiens
ugaagaagggggggaagggcgu

SEQ ID NO: 31869 - RNA, 22 nt, Homo sapiens
uaaaugaauucaauuuccuucu

SEQ ID NO: 31870 - RNA, 21 nt, Homo sapiens
gaccaaucgccguccccgccg

SEQ ID NO: 31871 - RNA, 23 nt, Homo sapiens
cagcugcuuuugggauuccguug

SEQ ID NO: 31872 - RNA, 21 nt, Homo sapiens
ucaaucacagauagcaccccu

SEQ ID NO: 31873 - RNA, 22 nt, Homo sapiens
gcggucccgcggcgccccgccu

SEQ ID NO: 31874 - RNA, 22 nt, Homo sapiens
ucggucccucgggccagggcag

SEQ ID NO: 31875 - RNA, 22 nt, Homo sapiens
gaggcucagaauggcucaggag

SEQ ID NO: 31876 - RNA, 21 nt, Homo sapiens
cggggugcacgggcggagggc

SEQ ID NO: 31877 - RNA, 22 nt, Homo sapiens
ucaggaacugccuuucucucca

SEQ ID NO: 31878 - RNA, 22 nt, Homo sapiens
ucagaccgagacaagugcaaug

SEQ ID NO: 31879 - RNA, 23 nt, Homo sapiens
acaccccaaaaucgaagcacuuc

SEQ ID NO: 31880 - RNA, 21 nt, Homo sapiens
guaaugggaccuuccucuuug

SEQ ID NO: 31881 - RNA, 22 nt, Homo sapiens
ugacgaugacaacgaugacgua

SEQ ID NO: 31882 - RNA, 22 nt, Homo sapiens
cugcucaaacccuccaaugacu

SEQ ID NO: 31883 - RNA, 22 nt, Homo sapiens
gaggcucagaauggcucaggag

SEQ ID NO: 31884 - RNA, 22 nt, Homo sapiens
ucaggaacugccuuucucucca

SEQ ID NO: 31885 - RNA, 21 nt, Homo sapiens
ugcaaacccugcaugugggag

SEQ ID NO: 31886 - RNA, 22 nt, Homo sapiens
cggugagcacccggccccugcg

SEQ ID NO: 31887 - RNA, 22 nt, Homo sapiens
uggcagcagcggagggggcaga

SEQ ID NO: 31888 - RNA, 20 nt, Homo sapiens
cccgccgcgucgcccugggg

SEQ ID NO: 31889 - RNA, 20 nt, Homo sapiens
ccagcagcaccuggggcagu

SEQ ID NO: 31890 - RNA, 20 nt, Homo sapiens
cuggaggaagggcccagagg

SEQ ID NO: 31891 - RNA, 22 nt, Homo sapiens
gccuaagacacaggcccagaga

SEQ ID NO: 31892 - RNA, 21 nt, Homo sapiens
uucuaggauaggcccaggggc

SEQ ID NO: 31893 - RNA, 22 nt, Homo sapiens
auaaggauuuuuaggggcauua

SEQ ID NO: 31894 - RNA, 22 nt, Homo sapiens
gccagcuaacaauacacugccu

SEQ ID NO: 31895 - RNA, 21 nt, Homo sapiens
auccuguacugagcugccccg

SEQ ID NO: 31896 - RNA, 22 nt, Homo sapiens
gauuccaauuuuuccacaucuu

SEQ ID NO: 31897 - RNA, 22 nt, Homo sapiens
aagagggagacccaggcucgga

SEQ ID NO: 31898 - RNA, 22 nt, Homo sapiens
gccaccuucaaaugggaagucu

SEQ ID NO: 31899 - RNA, 22 nt, Homo sapiens
agcucagaacccagaggucuca

SEQ ID NO: 31900 - RNA, 22 nt, Homo sapiens
cacauggccaaaacagagaaga

SEQ ID NO: 31901 - RNA, 26 nt, Homo sapiens
aaccaucucauacaaaccaacuacuu

SEQ ID NO: 31902 - RNA, 21 nt, Homo sapiens
gcaagcccagaccgcaaaaag

SEQ ID NO: 31903 - RNA, 23 nt, Homo sapiens
agggauuccugggaaaacuggac

SEQ ID NO: 31904 - RNA, 22 nt, Homo sapiens
ccagaacugaguccacagggca

SEQ ID NO: 31905 - RNA, 22 nt, Homo sapiens
ucgcccucucaacccagcuuuu

SEQ ID NO: 31906 - RNA, 22 nt, Homo sapiens
uugcccucucaacccagcuuuu

SEQ ID NO: 31907 - RNA, 20 nt, Homo sapiens
acccucucaacccagcuuuu

SEQ ID NO: 31908 - RNA, 19 nt, Homo sapiens
uccucucaacccagcuuuu

SEQ ID NO: 31909 - RNA, 22 nt, Homo sapiens
caacaaaaucacugaugcugga

SEQ ID NO: 31910 - RNA, 22 nt, Homo sapiens
cucauauuacaaugagcucauc

SEQ ID NO: 31911 - RNA, 23 nt, Homo sapiens
aaucgcgguuuauaccaaaugaa

SEQ ID NO: 31912 - RNA, 22 nt, Homo sapiens
guccaaaguuggggugcugguu

SEQ ID NO: 31913 - RNA, 22 nt, Homo sapiens
agaggcaggguaguguaaugga

SEQ ID NO: 31914 - RNA, 21 nt, Homo sapiens
ccccucccagccucccugcca

SEQ ID NO: 31915 - RNA, 20 nt, Homo sapiens
ggggcagacagacgaggaag

SEQ ID NO: 31916 - RNA, 18 nt, Homo sapiens
ugguggcagaggugggau

SEQ ID NO: 31917 - RNA, 17 nt, Homo sapiens
gggagaggaggaggcga

SEQ ID NO: 31918 - RNA, 18 nt, Homo sapiens
aucacauucaccucccug

SEQ ID NO: 31919 - RNA, 22 nt, Homo sapiens
cggugagcacccggccccugcg

SEQ ID NO: 31920 - RNA, 23 nt, Homo sapiens
cccaacagacauggcgguacuca

SEQ ID NO: 31921 - RNA, 22 nt, Homo sapiens
cagaagugggccgggcacaggg

SEQ ID NO: 31922 - RNA, 22 nt, Homo sapiens
agcugaguguaggauguuuaca

SEQ ID NO: 31923 - RNA, 20 nt, Homo sapiens
cuggaggaagggcccagagg

SEQ ID NO: 31924 - RNA, 22 nt, Homo sapiens
gccuaagacacaggcccagaga

SEQ ID NO: 31925 - RNA, 21 nt, Homo sapiens
ugcaugacggccugcaagaca

SEQ ID NO: 31926 - RNA, 22 nt, Homo sapiens
uauucaggaacauauugcaaaa

SEQ ID NO: 31927 - RNA, 22 nt, Homo sapiens
acuucaaggaucuuaaacuuug

SEQ ID NO: 31928 - RNA, 19 nt, Homo sapiens
agaaaccccagcagagaca

SEQ ID NO: 31929 - RNA, 25 nt, Homo sapiens
acggagcugucccaacaccaccccu

SEQ ID NO: 31930 - RNA, 20 nt, Homo sapiens
uccccacagacccagagccg

SEQ ID NO: 31931 - RNA, 23 nt, Homo sapiens
acacagcucuuccauaucuccag

SEQ ID NO: 31932 - RNA, 22 nt, Homo sapiens
acaaaguucuguagugcacuga

SEQ ID NO: 31933 - RNA, 22 nt, Homo sapiens
acaaaguucugugaugcacuga

SEQ ID NO: 31934 - RNA, 21 nt, Homo sapiens
ccaaguucugucaugcacuga

SEQ ID NO: 31935 - RNA, 21 nt, Homo sapiens
aaagugucagauacggugugg

SEQ ID NO: 31936 - RNA, 23 nt, Homo sapiens
gcgcccaauuaaugucuguugau

SEQ ID NO: 31937 - RNA, 21 nt, Homo sapiens
ccuucugacuccaaguccagu

SEQ ID NO: 31938 - RNA, 22 nt, Homo sapiens
gccuucugacccuaaguccagu

SEQ ID NO: 31939 - RNA, 23 nt, Homo sapiens
ccacccaaugaccuacuccaaga

SEQ ID NO: 31940 - RNA, 23 nt, Homo sapiens
caugagugacgcccucuggagua

SEQ ID NO: 31941 - RNA, 24 nt, Homo sapiens
cagaaagugcuuucuuuuggagaa

SEQ ID NO: 31942 - RNA, 22 nt, Homo sapiens
aacacucuaaaaggaggcacuu

SEQ ID NO: 31943 - RNA, 22 nt, Homo sapiens
acgguccuacacucaaggcaug

SEQ ID NO: 31944 - RNA, 22 nt, Homo sapiens
gaacuugcuaaaaaugcagaau

SEQ ID NO: 31945 - RNA, 20 nt, Homo sapiens
auuucuauaucuaucuccau

SEQ ID NO: 31946 - RNA, 22 nt, Homo sapiens
gcugaggcuguggggcuggagu

SEQ ID NO: 31947 - RNA, 21 nt, Homo sapiens
ugacugacagcuuuuugagua

SEQ ID NO: 31948 - RNA, 21 nt, Homo sapiens
caacugaugccuuuccaagua

SEQ ID NO: 31949 - RNA, 21 nt, Homo sapiens
cugggggacggagcagaagga

SEQ ID NO: 31950 - RNA, 22 nt, Homo sapiens
aggucucacuuuguugcccaga

SEQ ID NO: 31951 - RNA, 24 nt, Homo sapiens
ugggagaaccucccugcuucugcu

SEQ ID NO: 31952 - RNA, 22 nt, Homo sapiens
acggaagggcagagagggccag

SEQ ID NO: 31953 - RNA, 21 nt, Homo sapiens
acguggauuuuccucuaugau

SEQ ID NO: 31954 - RNA, 22 nt, Homo sapiens
aacauggauuuuccucuaugau

SEQ ID NO: 31955 - RNA, 22 nt, Homo sapiens
ucucacccagggacaaaggauu

SEQ ID NO: 31956 - RNA, 20 nt, Homo sapiens
acaaugagaacccauggucu

SEQ ID NO: 31957 - RNA, 25 nt, Homo sapiens
aaggagcucagaagcccugcccagc

SEQ ID NO: 31958 - RNA, 21 nt, Homo sapiens
agaggcagguuccuggaucau

SEQ ID NO: 31959 - RNA, 22 nt, Homo sapiens
ccucaggcacggccgggccacc

SEQ ID NO: 31960 - RNA, 22 nt, Homo sapiens
gcugaggcuguggggcuggagu

SEQ ID NO: 31961 - RNA, 23 nt, Homo sapiens
gacguaguccuauucucugcugc

SEQ ID NO: 31962 - RNA, 18 nt, Homo sapiens
gaaaugagggccagcuga

SEQ ID NO: 31963 - RNA, 22 nt, Homo sapiens
caaacaccauugucacacucca

SEQ ID NO: 31964 - RNA, 23 nt, Homo sapiens
cugcagaacuguucccgcugcua

SEQ ID NO: 31965 - RNA, 21 nt, Homo sapiens
caucaccuuccuucuccucca

SEQ ID NO: 31966 - RNA, 21 nt, Homo sapiens
cacaaccucaguguuuccagg

SEQ ID NO: 31967 - RNA, 24 nt, Homo sapiens
cacccccagagccucagcucccca

SEQ ID NO: 31968 - RNA, 21 nt, Homo sapiens
cccuccaccaugcaagggaug

SEQ ID NO: 31969 - RNA, 22 nt, Homo sapiens
accagcuaacaauacacugcca

SEQ ID NO: 31970 - RNA, 21 nt, Homo sapiens
agaggucgaccguguaaugug

SEQ ID NO: 31971 - RNA, 21 nt, Homo sapiens
ccuacguuccauagucuacca

SEQ ID NO: 31972 - RNA, 21 nt, Homo sapiens
cguacgcuauacggucuacua

SEQ ID NO: 31973 - RNA, 22 nt, Homo sapiens
gccagcuaacaauacacugccu

SEQ ID NO: 31974 - RNA, 22 nt, Homo sapiens
aggaaaccagcaaguguugacg

SEQ ID NO: 31975 - RNA, 21 nt, Homo sapiens
ucuacucacagaagugucaau

SEQ ID NO: 31976 - RNA, 22 nt, Homo sapiens
gcaaaagaaacugugguuuuug

SEQ ID NO: 31977 - RNA, 22 nt, Homo sapiens
acaucaucgcauauugacacaa

SEQ ID NO: 31978 - RNA, 23 nt, Homo sapiens
acccaacagccccugcaagggau

SEQ ID NO: 31979 - RNA, 20 nt, Homo sapiens
uccccacagacccagagccg

SEQ ID NO: 31980 - RNA, 21 nt, Homo sapiens
auaauggagaccaggccacga

SEQ ID NO: 31981 - RNA, 22 nt, Homo sapiens
ucagaccgagacaagugcaaug

SEQ ID NO: 31982 - RNA, 22 nt, Homo sapiens
gaauucaucacggccagccucu

SEQ ID NO: 31983 - RNA, 22 nt, Homo sapiens
ccucaggcacggccgggccacc

SEQ ID NO: 31984 - RNA, 27 nt, Homo sapiens
uuuagcacagugcuuauacaagaaggu

SEQ ID NO: 31985 - RNA, 23 nt, Homo sapiens
agggauuccugggaaaacuggac

SEQ ID NO: 31986 - RNA, 21 nt, Homo sapiens
gaccaaucgccguccccgccg

SEQ ID NO: 31987 - RNA, 21 nt, Homo sapiens
agaggucgaccguguaaugug

SEQ ID NO: 31988 - RNA, 21 nt, Homo sapiens
ugcaaugcaacuacaaugcac

SEQ ID NO: 31989 - RNA, 21 nt, Homo sapiens
acaauccuagagcacaagaag

SEQ ID NO: 31990 - RNA, 22 nt, Homo sapiens
gcggucccgcggcgccccgccu

SEQ ID NO: 31991 - RNA, 22 nt, Homo sapiens
ugcuguuagcccuagccccgca

SEQ ID NO: 31992 - RNA, 20 nt, Homo sapiens
ugucuccacagggcucuuua

SEQ ID NO: 31993 - RNA, 23 nt, Homo sapiens
cuacgcguauucuuaagcaauaa

SEQ ID NO: 31994 - RNA, 21 nt, Homo sapiens
ccucaaggagcuucagucuag

SEQ ID NO: 31995 - RNA, 23 nt, Homo sapiens
acucaccgacagcguugaauguu

SEQ ID NO: 31996 - RNA, 23 nt, Homo sapiens
acccaccgacagcaaugaauguu

SEQ ID NO: 31997 - RNA, 22 nt, Homo sapiens
acucaccgacagguugaauguu

SEQ ID NO: 31998 - RNA, 23 nt, Homo sapiens
acccaccgacaacaaugaauguu

SEQ ID NO: 31999 - RNA, 21 nt, Homo sapiens
uagaaaggcuaggaccaaacc

SEQ ID NO: 32000 - RNA, 23 nt, Homo sapiens
gaacagguagucugaacacuggg

SEQ ID NO: 32001 - RNA, 23 nt, Homo sapiens
gaacagauagucuaaacacuggg

SEQ ID NO: 32002 - RNA, 22 nt, Homo sapiens
acugccugucugugccugcugu

SEQ ID NO: 32003 - RNA, 22 nt, Homo sapiens
ggagagccuccacccaacccuc

SEQ ID NO: 32004 - RNA, 21 nt, Homo sapiens
ugcaaugcaacuacaaugcac

SEQ ID NO: 32005 - RNA, 22 nt, Homo sapiens
auggcaguggaguuagugauug

SEQ ID NO: 32006 - RNA, 22 nt, Homo sapiens
accagguuccaccccagcaggc

SEQ ID NO: 32007 - RNA, 21 nt, Homo sapiens
cguacgcuauacggucuacua

SEQ ID NO: 32008 - RNA, 22 nt, Homo sapiens
aggaaaccagcaaguguugacg

SEQ ID NO: 32009 - RNA, 22 nt, Homo sapiens
aagaagugcaccgcgaauguuu

SEQ ID NO: 32010 - RNA, 19 nt, Homo sapiens
accagugcccugcacacuu

SEQ ID NO: 32011 - RNA, 22 nt, Homo sapiens
ccagugucuccaguaguagaca

SEQ ID NO: 32012 - RNA, 21 nt, Homo sapiens
ggggagcgggggcccugccuu

SEQ ID NO: 32013 - RNA, 21 nt, Homo sapiens
gagcugcauccuggcuccggg

SEQ ID NO: 32014 - RNA, 18 nt, Homo sapiens
gaaaugagggccagcuga

SEQ ID NO: 32015 - RNA, 20 nt, Homo sapiens
cugcgggaggacagggcuca

SEQ ID NO: 32016 - RNA, 17 nt, Homo sapiens
gggagaggaggaggcga

SEQ ID NO: 32017 - RNA, 23 nt, Homo sapiens
cccaacagacauggcgguacuca

SEQ ID NO: 32018 - RNA, 19 nt, Homo sapiens
guugggaucacaggcgccc

SEQ ID NO: 32019 - RNA, 20 nt, Homo sapiens
aggggccucagccuccuggu

SEQ ID NO: 32020 - RNA, 17 nt, Homo sapiens
uggaggccccagcgaga

SEQ ID NO: 32021 - RNA, 21 nt, Homo sapiens
uuuagcauaaguaugucccaa

SEQ ID NO: 32022 - RNA, 21 nt, Homo sapiens
cggggugcacgggcggagggc

SEQ ID NO: 32023 - RNA, 21 nt, Homo sapiens
gaccaaucgccguccccgccg

SEQ ID NO: 32024 - RNA, 20 nt, Homo sapiens
cccgccgcgucgcccugggg

SEQ ID NO: 32025 - RNA, 21 nt, Homo sapiens
ucaaucacagauagcaccccu

SEQ ID NO: 32026 - RNA, 23 nt, Homo sapiens
aagaaucuugucccgcagguccu

SEQ ID NO: 32027 - RNA, 23 nt, Homo sapiens
aggagaaggcaccaugggauuua

SEQ ID NO: 32028 - RNA, 21 nt, Homo sapiens
agguaauaccaauaccuugug

SEQ ID NO: 32029 - RNA, 21 nt, Homo sapiens
gcugaggucugggccaggucu

SEQ ID NO: 32030 - RNA, 25 nt, Homo sapiens
accaacggaccuacuucccuccgcc

SEQ ID NO: 32031 - RNA, 22 nt, Homo sapiens
gcggucccgcggcgccccgccu

SEQ ID NO: 32032 - RNA, 23 nt, Homo sapiens
cacugugggcccucuccgcacca

SEQ ID NO: 32033 - RNA, 22 nt, Homo sapiens
cuggagagacaaggggaagagg

SEQ ID NO: 32034 - RNA, 22 nt, Homo sapiens
agcuagugagaagucaaugccu

SEQ ID NO: 32035 - RNA, 22 nt, Homo sapiens
cacugguacaaggguugggaga

SEQ ID NO: 32036 - RNA, 23 nt, Homo sapiens
cuaacugcacuagaugcaccuua

SEQ ID NO: 32037 - RNA, 22 nt, Homo sapiens
cacucagcggccguuuccccaa

SEQ ID NO: 32038 - RNA, 23 nt, Homo sapiens
acauuuuucguuauugcucuuga

SEQ ID NO: 32039 - RNA, 22 nt, Homo sapiens
auaaggauuuuuaggggcauua

SEQ ID NO: 32040 - RNA, 23 nt, Homo sapiens
gaaagugcccucaaggcugagug

SEQ ID NO: 32041 - RNA, 20 nt, Homo sapiens
cccugcgccaucuccucuac

SEQ ID NO: 32042 - RNA, 23 nt, Homo sapiens
gacguaguccuauucucugcugc

SEQ ID NO: 32043 - RNA, 22 nt, Homo sapiens
aggucucacuuuguugcccaga

SEQ ID NO: 32044 - RNA, 22 nt, Homo sapiens
agagcaagaccccgucucuaaa

SEQ ID NO: 32045 - RNA, 23 nt, Homo sapiens
gaaacccagcagacaauguagcu

SEQ ID NO: 32046 - RNA, 22 nt, Homo sapiens
cuuccagucgaggauguuuaca

SEQ ID NO: 32047 - RNA, 22 nt, Homo sapiens
cuuccagucggggauguuuaca

SEQ ID NO: 32048 - RNA, 22 nt, Homo sapiens
cuuccagucaaggauguuuaca

SEQ ID NO: 32049 - RNA, 22 nt, Homo sapiens
auaaggauuuuuaggggcauua

SEQ ID NO: 32050 - RNA, 23 nt, Homo sapiens
ccacccaaugaccuacuccaaga

SEQ ID NO: 32051 - RNA, 22 nt, Homo sapiens
cagcauggaguccuccagguug

SEQ ID NO: 32052 - RNA, 24 nt, Homo sapiens
cagaaagugcuuucuuuuggagaa

SEQ ID NO: 32053 - RNA, 22 nt, Homo sapiens
aacacucuaaaaggaggcacuu

SEQ ID NO: 32054 - RNA, 21 nt, Homo sapiens
uugucuaaccagucaccuguu

SEQ ID NO: 32055 - RNA, 25 nt, Homo sapiens
aaggagcucagaagcccugcccagc

SEQ ID NO: 32056 - RNA, 22 nt, Homo sapiens
caagacacauuuggagagggac

SEQ ID NO: 32057 - RNA, 18 nt, Homo sapiens
gaaaugagggccagcuga

SEQ ID NO: 32058 - RNA, 18 nt, Homo sapiens
gaaaugagggccagcuga

SEQ ID NO: 32059 - RNA, 22 nt, Homo sapiens
caaacaccauugucacacucca

SEQ ID NO: 32060 - RNA, 17 nt, Homo sapiens
gggagaggaggaggcga

SEQ ID NO: 32061 - RNA, 23 nt, Homo sapiens
aggaacagcagcagcccgggccg

SEQ ID NO: 32062 - RNA, 21 nt, Homo sapiens
gaccaaucgccguccccgccg

SEQ ID NO: 32063 - RNA, 21 nt, Homo sapiens
gaccaaucgccguccccgccg

SEQ ID NO: 32064 - RNA, 22 nt, Homo sapiens
ucagaccgagacaagugcaaug

SEQ ID NO: 32065 - RNA, 25 nt, Homo sapiens
acggagcugucccaacaccaccccu

SEQ ID NO: 32066 - RNA, 25 nt, Homo sapiens
accaacggaccuacuucccuccgcc

SEQ ID NO: 32067 - RNA, 22 nt, Homo sapiens
gcggucccgcggcgccccgccu

SEQ ID NO: 32068 - RNA, 22 nt, Homo sapiens
gcggucccgcggcgccccgccu

SEQ ID NO: 32069 - RNA, 22 nt, Homo sapiens
ugcuguuagcccuagccccgca

SEQ ID NO: 32070 - RNA, 22 nt, Homo sapiens
cgcauuauuacucacgguacga

SEQ ID NO: 32071 - RNA, 22 nt, Homo sapiens
uguaaaccaugaugugcugcua

SEQ ID NO: 32072 - RNA, 23 nt, Homo sapiens
acauuuuucguuauugcucuuga

SEQ ID NO: 32073 - RNA, 23 nt, Homo sapiens
ucaacgggagugaucgugucauu

SEQ ID NO: 32074 - RNA, 22 nt, Homo sapiens
acaccgaggagcccaucaugau

SEQ ID NO: 32075 - RNA, 23 nt, Homo sapiens
ccuucucagaaaggugaaauuua

SEQ ID NO: 32076 - RNA, 23 nt, Homo sapiens
agaaaccaugggguaugagcaga

SEQ ID NO: 32077 - RNA, 22 nt, Homo sapiens
cucauccgauguacaauaauuu

SEQ ID NO: 32078 - RNA, 22 nt, Homo sapiens
cacgaccgacgccacgccgagu

SEQ ID NO: 32079 - RNA, 21 nt, Homo sapiens
gaccaaucgccguccccgccg

SEQ ID NO: 32080 - RNA, 22 nt, Homo sapiens
gaauucaucacggccagccucu

SEQ ID NO: 32081 - RNA, 21 nt, Homo sapiens
ucuacucacagaagugucaau

SEQ ID NO: 32082 - RNA, 22 nt, Homo sapiens
gcggucccgcggcgccccgccu

SEQ ID NO: 32083 - RNA, 22 nt, Homo sapiens
ugcuguuagcccuagccccgca

SEQ ID NO: 32084 - RNA, 21 nt, Homo sapiens
caucaccuuccuucuccucca

SEQ ID NO: 32085 - RNA, 22 nt, Homo sapiens
acacacccacgcgagccggaaa

SEQ ID NO: 32086 - RNA, 22 nt, Homo sapiens
ucccucacacagaauuccagaa

SEQ ID NO: 32087 - RNA, 22 nt, Homo sapiens
augcuuuuugggguaagggcuu

SEQ ID NO: 32088 - RNA, 22 nt, Homo sapiens
cagcugguugaaggggaccaaa

SEQ ID NO: 32089 - RNA, 22 nt, Homo sapiens
uagcugguugaaggggaccaaa

SEQ ID NO: 32090 - RNA, 23 nt, Homo sapiens
aggaacagcagcagcccgggccg

SEQ ID NO: 32091 - RNA, 23 nt, Homo sapiens
aggaacagcagcagcccgggccg

SEQ ID NO: 32092 - RNA, 21 nt, Homo sapiens
ggaaaucccuggcaaugugau

SEQ ID NO: 32093 - RNA, 21 nt, Homo sapiens
gguaaucccuggcaaugugau

SEQ ID NO: 32094 - RNA, 23 nt, Homo sapiens
aaagucucgcucucugccccuca

SEQ ID NO: 32095 - RNA, 22 nt, Homo sapiens
auaaacgacaccuccuugagaa

SEQ ID NO: 32096 - RNA, 21 nt, Homo sapiens
gugacucaucaccuauggaaa

SEQ ID NO: 32097 - RNA, 22 nt, Homo sapiens
aagagggagacccaggcucgga

SEQ ID NO: 32098 - RNA, 23 nt, Homo sapiens
acccaacagccccugcaagggau

SEQ ID NO: 32099 - RNA, 22 nt, Homo sapiens
ugcuguuagcccuagccccgca

SEQ ID NO: 32100 - RNA, 22 nt, Homo sapiens
gguuaguggaccaggucacaaa

SEQ ID NO: 32101 - RNA, 21 nt, Homo sapiens
auaauggagaccaggccacga

SEQ ID NO: 32102 - RNA, 22 nt, Homo sapiens
caaacaccauugucacacucca

SEQ ID NO: 32103 - RNA, 21 nt, Homo sapiens
ucacccagaucugcggccuaa

SEQ ID NO: 32104 - RNA, 22 nt, Homo sapiens
ggagcccgcgccccgcgccgag

SEQ ID NO: 32105 - RNA, 22 nt, Homo sapiens
ugagccacugugccuggccuga

SEQ ID NO: 32106 - RNA, 23 nt, Homo sapiens
ucucgugacaugaugauccccga

SEQ ID NO: 32107 - RNA, 19 nt, Homo sapiens
guccugaauuccgcagccu

SEQ ID NO: 32108 - RNA, 22 nt, Homo sapiens
caagacacauuuggagagggac

SEQ ID NO: 32109 - RNA, 21 nt, Homo sapiens
gaaggaagugagugcagccac

SEQ ID NO: 32110 - RNA, 24 nt, Homo sapiens
acgcgcaggccagagacccaggca

SEQ ID NO: 32111 - RNA, 22 nt, Homo sapiens
gacucgaaccacugauccagca

SEQ ID NO: 32112 - RNA, 21 nt, Homo sapiens
gggcaucugggacgcgcagga

SEQ ID NO: 32113 - RNA, 21 nt, Homo sapiens
gaccaaucgccguccccgccg

SEQ ID NO: 32114 - RNA, 22 nt, Homo sapiens
cggugagcacccggccccugcg

SEQ ID NO: 32115 - RNA, 23 nt, Homo sapiens
cagcugcuuuugggauuccguug

SEQ ID NO: 32116 - RNA, 23 nt, Homo sapiens
cccaacagacauggcgguacuca

SEQ ID NO: 32117 - RNA, 19 nt, Homo sapiens
uaugcuaccuuugcacggu

SEQ ID NO: 32118 - RNA, 22 nt, Homo sapiens
ggagagccuccacccaacccuc

SEQ ID NO: 32119 - RNA, 22 nt, Homo sapiens
cagcauggaguccuccagguug

SEQ ID NO: 32120 - RNA, 22 nt, Homo sapiens
gaacuugcuaaaaaugcagaau

SEQ ID NO: 32121 - RNA, 24 nt, Homo sapiens
acugggcacaaacauguccagguc

SEQ ID NO: 32122 - RNA, 22 nt, Homo sapiens
gcggucccgcggcgccccgccu

SEQ ID NO: 32123 - RNA, 22 nt, Homo sapiens
ugcuguuagcccuagccccgca

SEQ ID NO: 32124 - RNA, 22 nt, Homo sapiens
ucaaugacucagguaaguugca

SEQ ID NO: 32125 - RNA, 21 nt, Homo sapiens
gagcugcauccuggcuccggg

SEQ ID NO: 32126 - RNA, 22 nt, Homo sapiens
ugaagaagggggggaagggcgu

SEQ ID NO: 32127 - RNA, 21 nt, Homo sapiens
gggcaucugggacgcgcagga

SEQ ID NO: 32128 - RNA, 22 nt, Homo sapiens
cggugagcacccggccccugcg

SEQ ID NO: 32129 - RNA, 23 nt, Homo sapiens
cccaacagacauggcgguacuca

SEQ ID NO: 32130 - RNA, 22 nt, Homo sapiens
agcgggacuuugagggccaguu

SEQ ID NO: 32131 - RNA, 22 nt, Homo sapiens
uacagauggauaccgugcaauu

SEQ ID NO: 32132 - RNA, 25 nt, Homo sapiens
acggagcugucccaacaccaccccu

SEQ ID NO: 32133 - RNA, 22 nt, Homo sapiens
acuggguucaccuuuaagggca

SEQ ID NO: 32134 - RNA, 19 nt, Homo sapiens
ccaccucccgaguccucac

SEQ ID NO: 32135 - RNA, 22 nt, Homo sapiens
agcccaaaaggagaauucuuug

SEQ ID NO: 32136 - RNA, 22 nt, Homo sapiens
ucaucucgcccgcaaagaccca

SEQ ID NO: 32137 - RNA, 23 nt, Homo sapiens
gaacagguagucugaacacuggg

SEQ ID NO: 32138 - RNA, 23 nt, Homo sapiens
gaacagauagucuaaacacuggg

SEQ ID NO: 32139 - RNA, 23 nt, Homo sapiens
ucaguuuugcauagauuugcaca

SEQ ID NO: 32140 - RNA, 22 nt, Homo sapiens
cacucagcaccaggauauuguu

SEQ ID NO: 32141 - RNA, 22 nt, Homo sapiens
aacuaugcaaccuacuaccucu

SEQ ID NO: 32142 - RNA, 22 nt, Homo sapiens
ugcaacuuaguaaugugcaaua

SEQ ID NO: 32143 - RNA, 23 nt, Homo sapiens
acggcuaguggaccaggugaagu

SEQ ID NO: 32144 - RNA, 22 nt, Homo sapiens
uucaaaacaugaauugcugcug

SEQ ID NO: 32145 - RNA, 23 nt, Homo sapiens
ccuucucagaaaggugaaauuua

SEQ ID NO: 32146 - RNA, 24 nt, Homo sapiens
cugaucaguuacacaucacuucag

SEQ ID NO: 32147 - RNA, 21 nt, Homo sapiens
guccugagagcgcugccuccu

SEQ ID NO: 32148 - RNA, 21 nt, Homo sapiens
uucaguuaucacaguacugua

SEQ ID NO: 32149 - RNA, 18 nt, Homo sapiens
gaaaugagggccagcuga

SEQ ID NO: 32150 - RNA, 19 nt, Homo sapiens
ccaccucccgaguccucac

SEQ ID NO: 32151 - RNA, 17 nt, Homo sapiens
gggagaggaggaggcga

SEQ ID NO: 32152 - RNA, 18 nt, Homo sapiens
aucacauucaccucccug

SEQ ID NO: 32153 - RNA, 23 nt, Homo sapiens
gggagugaagacacggagccaga

SEQ ID NO: 32154 - RNA, 21 nt, Homo sapiens
gggcaucugggacgcgcagga

SEQ ID NO: 32155 - RNA, 21 nt, Homo sapiens
gaccaaucgccguccccgccg

SEQ ID NO: 32156 - RNA, 22 nt, Homo sapiens
cucaauagacugugagcuccuu

SEQ ID NO: 32157 - RNA, 22 nt, Homo sapiens
gcggucccgcggcgccccgccu

SEQ ID NO: 32158 - RNA, 23 nt, Homo sapiens
cccagcuagauuguaagcuccuu

SEQ ID NO: 32159 - RNA, 24 nt, Homo sapiens
cacccccagagccucagcucccca

SEQ ID NO: 32160 - RNA, 22 nt, Homo sapiens
ccccucuggucaaccagucaca

SEQ ID NO: 32161 - RNA, 23 nt, Homo sapiens
gggagugaagacacggagccaga

SEQ ID NO: 32162 - RNA, 23 nt, Homo sapiens
gggagugaagacacggagccaga

SEQ ID NO: 32163 - RNA, 21 nt, Homo sapiens
acuagacugugagcuccucga

SEQ ID NO: 32164 - RNA, 23 nt, Homo sapiens
cccaacagacauggcgguacuca

SEQ ID NO: 32165 - RNA, 22 nt, Homo sapiens
cuguuccugcugaacugagcca

SEQ ID NO: 32166 - RNA, 22 nt, Homo sapiens
agcugaguguaggauguuuaca

SEQ ID NO: 32167 - RNA, 20 nt, Homo sapiens
cuggaggaagggcccagagg

SEQ ID NO: 32168 - RNA, 22 nt, Homo sapiens
gccuaagacacaggcccagaga

SEQ ID NO: 32169 - RNA, 23 nt, Homo sapiens
acugaggggccucagaccgagcu

SEQ ID NO: 32170 - RNA, 22 nt, Homo sapiens
aucgggaggggacugagccuga

SEQ ID NO: 32171 - RNA, 22 nt, Homo sapiens
gaauucaucacggccagccucu

SEQ ID NO: 32172 - RNA, 22 nt, Homo sapiens
aggaaaccagcaaguguugacg

SEQ ID NO: 32173 - RNA, 20 nt, Homo sapiens
uccccacagacccagagccg

SEQ ID NO: 32174 - RNA, 21 nt, Homo sapiens
caucaccuuccuucuccucca

SEQ ID NO: 32175 - RNA, 20 nt, Homo sapiens
acagcaaggagggcaggagg

SEQ ID NO: 32176 - RNA, 22 nt, Homo sapiens
acugccugucugugccugcugu

SEQ ID NO: 32177 - RNA, 21 nt, Homo sapiens
gcggaacuuagccacugugaa

SEQ ID NO: 32178 - RNA, 22 nt, Homo sapiens
cucaauagacugugagcuccuu

SEQ ID NO: 32179 - RNA, 22 nt, Homo sapiens
aaucagucucauugcuuuauaa

SEQ ID NO: 32180 - RNA, 22 nt, Homo sapiens
acaaccagcuaagacacugcca

SEQ ID NO: 32181 - RNA, 22 nt, Homo sapiens
accagguuccaccccagcaggc

SEQ ID NO: 32182 - RNA, 22 nt, Homo sapiens
auaaacgacaccuccuugagaa

SEQ ID NO: 32183 - RNA, 23 nt, Homo sapiens
acagaaagugcuucccucaagag

SEQ ID NO: 32184 - RNA, 23 nt, Homo sapiens
cccagcuagauuguaagcuccuu

SEQ ID NO: 32185 - RNA, 22 nt, Homo sapiens
gggagaggucucccugcgcaca

SEQ ID NO: 32186 - RNA, 22 nt, Homo sapiens
cgcauuauuacucacgguacga

SEQ ID NO: 32187 - RNA, 22 nt, Homo sapiens
ucaggaacugccuuucucucca

SEQ ID NO: 32188 - RNA, 22 nt, Homo sapiens
agcccaaaaggagaauucuuug

SEQ ID NO: 32189 - RNA, 23 nt, Homo sapiens
ucaguuuugcauagauuugcaca

SEQ ID NO: 32190 - RNA, 22 nt, Homo sapiens
cacucagcaccaggauauuguu

SEQ ID NO: 32191 - RNA, 22 nt, Homo sapiens
aacuaugcaaccuacuaccucu

SEQ ID NO: 32192 - RNA, 21 nt, Homo sapiens
ugcaaugcaacuacaaugcac

SEQ ID NO: 32193 - RNA, 22 nt, Homo sapiens
uauucaggaacauauugcaaaa

SEQ ID NO: 32194 - RNA, 22 nt, Homo sapiens
uauucaggaacauauugcaaaa

SEQ ID NO: 32195 - RNA, 22 nt, Homo sapiens
ucaguuuccucugcaaacaguu

SEQ ID NO: 32196 - RNA, 20 nt, Homo sapiens
acaaugagaacccauggucu

SEQ ID NO: 32197 - RNA, 22 nt, Homo sapiens
caaacaccauugucacacucca

SEQ ID NO: 32198 - RNA, 22 nt, Homo sapiens
ucaaugacucagguaaguugca

SEQ ID NO: 32199 - RNA, 22 nt, Homo sapiens
cucauccgauguacaauaauuu

SEQ ID NO: 32200 - RNA, 22 nt, Homo sapiens
gaggcucagaauggcucaggag

SEQ ID NO: 32201 - RNA, 22 nt, Homo sapiens
gacucgaaccacugauccagca

SEQ ID NO: 32202 - RNA, 23 nt, Homo sapiens
acucaccgacagcguugaauguu

SEQ ID NO: 32203 - RNA, 22 nt, Homo sapiens
uggcagcagcggagggggcaga

SEQ ID NO: 32204 - RNA, 22 nt, Homo sapiens
agucuucacaacagcccugugu

SEQ ID NO: 32205 - RNA, 21 nt, Homo sapiens
ggaaaucccuggcaaugugau

SEQ ID NO: 32206 - RNA, 21 nt, Homo sapiens
gguaaucccuggcaaugugau

SEQ ID NO: 32207 - RNA, 20 nt, Homo sapiens
ccagcagcaccuggggcagu

SEQ ID NO: 32208 - RNA, 23 nt, Homo sapiens
aaaucagaaucacaccuggggga

SEQ ID NO: 32209 - RNA, 23 nt, Homo sapiens
ccacccaaugaccuacuccaaga

SEQ ID NO: 32210 - RNA, 22 nt, Homo sapiens
gaauucaucacggccagccucu

SEQ ID NO: 32211 - RNA, 21 nt, Homo sapiens
auccuguacugagcugccccg

SEQ ID NO: 32212 - RNA, 23 nt, Homo sapiens
aagaaucuugucccgcagguccu

SEQ ID NO: 32213 - RNA, 21 nt, Homo sapiens
gcugaggucugggccaggucu

SEQ ID NO: 32214 - RNA, 24 nt, Homo sapiens
acgcagagcccgaaagcccccagu

SEQ ID NO: 32215 - RNA, 21 nt, Homo sapiens
guccugagagcgcugccuccu

SEQ ID NO: 32216 - RNA, 21 nt, Homo sapiens
aggagacucacaaguuccugc

SEQ ID NO: 32217 - RNA, 22 nt, Homo sapiens
cacaaaccauuaugugcugcua

SEQ ID NO: 32218 - RNA, 22 nt, Homo sapiens
uucacacugcaugcucugggua

SEQ ID NO: 32219 - RNA, 22 nt, Homo sapiens
ugagccacugugccuggccuga

SEQ ID NO: 32220 - RNA, 20 nt, Homo sapiens
cuggaggaagggcccagagg

SEQ ID NO: 32221 - RNA, 22 nt, Homo sapiens
gccuaagacacaggcccagaga

SEQ ID NO: 32222 - RNA, 22 nt, Homo sapiens
gagcccuggacuaggagucagc

SEQ ID NO: 32223 - RNA, 20 nt, Homo sapiens
agugcccccacaguuugagu

SEQ ID NO: 32224 - RNA, 22 nt, Homo sapiens
gauccgagcaccggggaccccc

SEQ ID NO: 32225 - RNA, 19 nt, Homo sapiens
ucagcaguaccagccuaga

SEQ ID NO: 32226 - RNA, 22 nt, Homo sapiens
gcggucccgcggcgccccgccu

SEQ ID NO: 32227 - RNA, 22 nt, Homo sapiens
ccucaggcacggccgggccacc

SEQ ID NO: 32228 - RNA, 24 nt, Homo sapiens
cacccccagagccucagcucccca

SEQ ID NO: 32229 - RNA, 26 nt, Homo sapiens
uuucagaauuugcugccaucaucauc

SEQ ID NO: 32230 - RNA, 20 nt, Homo sapiens
cucaaagcaaacccugcaga

SEQ ID NO: 32231 - RNA, 23 nt, Homo sapiens
cuaucugcacuagaugcaccuua

SEQ ID NO: 32232 - RNA, 23 nt, Homo sapiens
gaacagguagucugaacacuggg

SEQ ID NO: 32233 - RNA, 23 nt, Homo sapiens
gaacagauagucuaaacacuggg

SEQ ID NO: 32234 - RNA, 21 nt, Homo sapiens
acaugguuagaucaagcacaa

SEQ ID NO: 32235 - RNA, 22 nt, Homo sapiens
ugggguauuugacaaacugaca

SEQ ID NO: 32236 - RNA, 24 nt, Homo sapiens
ugggagaaccucccugcuucugcu

SEQ ID NO: 32237 - RNA, 23 nt, Homo sapiens
acaccccaaaaucgaagcacuuc

SEQ ID NO: 32238 - RNA, 22 nt, Homo sapiens
cagcauggaguccuccagguug

SEQ ID NO: 32239 - RNA, 22 nt, Homo sapiens
cucauauuacaaugagcucauc

SEQ ID NO: 32240 - RNA, 22 nt, Homo sapiens
cugcucaaacccuccaaugacu

SEQ ID NO: 32241 - RNA, 21 nt, Homo sapiens
aguucucccaacguaaaccca

SEQ ID NO: 32242 - RNA, 22 nt, Homo sapiens
accuucccugguacagaauacu

SEQ ID NO: 32243 - RNA, 19 nt, Homo sapiens
ucagcaguaccagccuaga

SEQ ID NO: 32244 - RNA, 22 nt, Homo sapiens
gguuaguggaccaggucacaaa

SEQ ID NO: 32245 - RNA, 21 nt, Homo sapiens
ugacugacagcuuuuugagua

SEQ ID NO: 32246 - RNA, 24 nt, Homo sapiens
ucacagguuaaagggucucaggga

SEQ ID NO: 32247 - RNA, 22 nt, Homo sapiens
ucacaaguuagggucucaggga

SEQ ID NO: 32248 - RNA, 23 nt, Homo sapiens
agcccuguucuacagcccugagg

SEQ ID NO: 32249 - RNA, 24 nt, Homo sapiens
acugcuggucuucagucagggcca

SEQ ID NO: 32250 - RNA, 21 nt, Homo sapiens
aguagugcuuucuacuuuaug

SEQ ID NO: 32251 - RNA, 21 nt, Homo sapiens
acaggauugagggggggcccu

SEQ ID NO: 32252 - RNA, 22 nt, Homo sapiens
ggaucccugggaccauaccuag

SEQ ID NO: 32253 - RNA, 21 nt, Homo sapiens
gaccaagaaauagccuuucaa

SEQ ID NO: 32254 - RNA, 22 nt, Homo sapiens
gugauugccacucuccugagua

SEQ ID NO: 32255 - RNA, 23 nt, Homo sapiens
aaucgcgguuuauaccaaaugaa

SEQ ID NO: 32256 - RNA, 20 nt, Homo sapiens
acaaugagaacccauggucu

SEQ ID NO: 32257 - RNA, 22 nt, Homo sapiens
caaacaccauugucacacucca

SEQ ID NO: 32258 - RNA, 17 nt, Homo sapiens
ggguggcagcgguggga

SEQ ID NO: 32259 - RNA, 21 nt, Homo sapiens
cggggugcacgggcggagggc

SEQ ID NO: 32260 - RNA, 23 nt, Homo sapiens
aggaacagcagcagcccgggccg

SEQ ID NO: 32261 - RNA, 22 nt, Homo sapiens
ucagaccgagacaagugcaaug

SEQ ID NO: 32262 - RNA, 19 nt, Homo sapiens
guugggaucacaggcgccc

SEQ ID NO: 32263 - RNA, 25 nt, Homo sapiens
accaacggaccuacuucccuccgcc

SEQ ID NO: 32264 - RNA, 20 nt, Homo sapiens
uacugcuuccacagcucccc

SEQ ID NO: 32265 - RNA, 20 nt, Homo sapiens
cugcgggaggacagggcuca

SEQ ID NO: 32266 - RNA, 22 nt, Homo sapiens
aucagagcccucugagcuucag

SEQ ID NO: 32267 - RNA, 22 nt, Homo sapiens
ucccucacacagaauuccagaa

SEQ ID NO: 32268 - RNA, 22 nt, Homo sapiens
augcuuuuugggguaagggcuu

SEQ ID NO: 32269 - RNA, 22 nt, Homo sapiens
ucaguuuccucugcaaacaguu

SEQ ID NO: 32270 - RNA, 21 nt, Homo sapiens
gccaauauuucugugcugcua

SEQ ID NO: 32271 - RNA, 22 nt, Homo sapiens
cucaauagacugugagcuccuu

SEQ ID NO: 32272 - RNA, 23 nt, Homo sapiens
acauuuuucguuauugcucuuga

SEQ ID NO: 32273 - RNA, 22 nt, Homo sapiens
cacucagcaccaggauauuguu

SEQ ID NO: 32274 - RNA, 22 nt, Homo sapiens
gacaaaacccgcaaauacuuuu

SEQ ID NO: 32275 - RNA, 22 nt, Homo sapiens
gcaaagguaauugcuguuuucg

SEQ ID NO: 32276 - RNA, 19 nt, Homo sapiens
ucccacaggaagcagacac

SEQ ID NO: 32277 - RNA, 23 nt, Homo sapiens
cccagcuagauuguaagcuccuu

SEQ ID NO: 32278 - RNA, 22 nt, Homo sapiens
ucaaugacucagguaaguugca

SEQ ID NO: 32279 - RNA, 22 nt, Homo sapiens
acuggguucaccuuuaagggca

SEQ ID NO: 32280 - RNA, 21 nt, Homo sapiens
cuagggaagaacagugagcaa

SEQ ID NO: 32281 - RNA, 26 nt, Homo sapiens
aaccaucucauacaaaccaacuacuu

SEQ ID NO: 32282 - RNA, 22 nt, Homo sapiens
agaaaaugccccucaguuuuga

SEQ ID NO: 32283 - RNA, 22 nt, Homo sapiens
ucaguuuccucugcaaacaguu

SEQ ID NO: 32284 - RNA, 21 nt, Homo sapiens
gccaauauuucugugcugcua

SEQ ID NO: 32285 - RNA, 23 nt, Homo sapiens
ccacugaaacauggaagcacuua

SEQ ID NO: 32286 - RNA, 21 nt, Homo sapiens
aaagaucaaccauguauuauu

SEQ ID NO: 32287 - RNA, 21 nt, Homo sapiens
ugacugcagagcaaaagacac

SEQ ID NO: 32288 - RNA, 22 nt, Homo sapiens
gcaaaaguaacugcaguuuugg

SEQ ID NO: 32289 - RNA, 21 nt, Homo sapiens
ugcaggcugaucuucuucucu

SEQ ID NO: 32290 - RNA, 20 nt, Homo sapiens
ugucuccacagggcucuuua

SEQ ID NO: 32291 - RNA, 18 nt, Homo sapiens
cagcagccuccuucucaa

SEQ ID NO: 32292 - RNA, 22 nt, Homo sapiens
uccacauggaguugcuguuaca

SEQ ID NO: 32293 - RNA, 20 nt, Homo sapiens
acauuacuguuaucaaaaca

SEQ ID NO: 32294 - RNA, 22 nt, Homo sapiens
auaaggauuuuuaggggcauua

SEQ ID NO: 32295 - RNA, 22 nt, Homo sapiens
gcugccguauaugugaugucac

SEQ ID NO: 32296 - RNA, 21 nt, Homo sapiens
cugaaaccaaguaugggucgc

SEQ ID NO: 32297 - RNA, 21 nt, Homo sapiens
cggggugcacgggcggagggc

SEQ ID NO: 32298 - RNA, 22 nt, Homo sapiens
ucagaccgagacaagugcaaug

SEQ ID NO: 32299 - RNA, 23 nt, Homo sapiens
cugcagaacuguucccgcugcua

SEQ ID NO: 32300 - RNA, 21 nt, Homo sapiens
gguggagcccugagaaccgga

SEQ ID NO: 32301 - RNA, 20 nt, Homo sapiens
uccccacagacccagagccg

SEQ ID NO: 32302 - RNA, 23 nt, Homo sapiens
cacaaauucgguucuacagggua

SEQ ID NO: 32303 - RNA, 21 nt, Homo sapiens
cggcucggguggcggcgacgg

SEQ ID NO: 32304 - RNA, 21 nt, Homo sapiens
guuauagaucuggauuugaac

SEQ ID NO: 32305 - RNA, 22 nt, Homo sapiens
cacaagaucggaucuacggguu

SEQ ID NO: 32306 - RNA, 22 nt, Homo sapiens
cgcaaggucgguucuacgggug

SEQ ID NO: 32307 - RNA, 23 nt, Homo sapiens
gggagugaagacacggagccaga

SEQ ID NO: 32308 - RNA, 21 nt, Homo sapiens
gggcaucugggacgcgcagga

SEQ ID NO: 32309 - RNA, 21 nt, Homo sapiens
gaccaaucgccguccccgccg

SEQ ID NO: 32310 - RNA, 21 nt, Homo sapiens
ggaaaucccuggcaaugugau

SEQ ID NO: 32311 - RNA, 21 nt, Homo sapiens
gguaaucccuggcaaugugau

SEQ ID NO: 32312 - RNA, 23 nt, Homo sapiens
aaagucucgcucucugccccuca

SEQ ID NO: 32313 - RNA, 22 nt, Homo sapiens
gcggucccgcggcgccccgccu

SEQ ID NO: 32314 - RNA, 22 nt, Homo sapiens
ugcuguuagcccuagccccgca

SEQ ID NO: 32315 - RNA, 26 nt, Homo sapiens
uuucagaauuugcugccaucaucauc

SEQ ID NO: 32316 - RNA, 17 nt, Homo sapiens
gggagaggaggaggcga

SEQ ID NO: 32317 - RNA, 22 nt, Homo sapiens
uccacauggaguugcuguuaca

SEQ ID NO: 32318 - RNA, 22 nt, Homo sapiens
ucagaccgagacaagugcaaug

SEQ ID NO: 32319 - RNA, 23 nt, Homo sapiens
cggcucugucgucgaggcgcuca

SEQ ID NO: 32320 - RNA, 22 nt, Homo sapiens
uacagauggauaccgugcaauu

SEQ ID NO: 32321 - RNA, 25 nt, Homo sapiens
acggagcugucccaacaccaccccu

SEQ ID NO: 32322 - RNA, 21 nt, Homo sapiens
agguaagcgcuguugcuagcc

SEQ ID NO: 32323 - RNA, 22 nt, Homo sapiens
caagacacauuuggagagggac

SEQ ID NO: 32324 - RNA, 22 nt, Homo sapiens
gcugaggcuguggggcuggagu

SEQ ID NO: 32325 - RNA, 20 nt, Homo sapiens
uacugcuuccacagcucccc

SEQ ID NO: 32326 - RNA, 21 nt, Homo sapiens
cggggugcacgggcggagggc

SEQ ID NO: 32327 - RNA, 23 nt, Homo sapiens
cccaacagacauggcgguacuca

SEQ ID NO: 32328 - RNA, 22 nt, Homo sapiens
ucagaccgagacaagugcaaug

SEQ ID NO: 32329 - RNA, 19 nt, Homo sapiens
guccugaauuccgcagccu

SEQ ID NO: 32330 - RNA, 25 nt, Homo sapiens
accaacggaccuacuucccuccgcc

SEQ ID NO: 32331 - RNA, 21 nt, Homo sapiens
cugcugggccacaacguggga

SEQ ID NO: 32332 - RNA, 20 nt, Homo sapiens
aggggccucagccuccuggu

SEQ ID NO: 32333 - RNA, 23 nt, Homo sapiens
ccgcuugagcuaacuccgacccg

SEQ ID NO: 32334 - RNA, 22 nt, Homo sapiens
ggcagagagucagagcgcggau

SEQ ID NO: 32335 - RNA, 21 nt, Homo sapiens
ccccucccagccucccugcca

SEQ ID NO: 32336 - RNA, 22 nt, Homo sapiens
caaacaccauugucacacucca

SEQ ID NO: 32337 - RNA, 21 nt, Homo sapiens
gggcaucugggacgcgcagga

SEQ ID NO: 32338 - RNA, 18 nt, Homo sapiens
ggagaggagggcacugga

SEQ ID NO: 32339 - RNA, 23 nt, Homo sapiens
cccaacagacauggcgguacuca

SEQ ID NO: 32340 - RNA, 22 nt, Homo sapiens
ucagaccgagacaagugcaaug

SEQ ID NO: 32341 - RNA, 22 nt, Homo sapiens
ucagaccgagacaagugcaaug

SEQ ID NO: 32342 - RNA, 23 nt, Homo sapiens
aaaucagaaucacaccuggggga

SEQ ID NO: 32343 - RNA, 25 nt, Homo sapiens
accaacggaccuacuucccuccgcc

SEQ ID NO: 32344 - RNA, 25 nt, Homo sapiens
accaacggaccuacuucccuccgcc

SEQ ID NO: 32345 - RNA, 23 nt, Homo sapiens
cuccagccccuccagggcuuccu

SEQ ID NO: 32346 - RNA, 21 nt, Homo sapiens
ggggagcgggggcccugccuu

SEQ ID NO: 32347 - RNA, 18 nt, Homo sapiens
cagcagccuccuucucaa

SEQ ID NO: 32348 - RNA, 21 nt, Homo sapiens
ccgugguucuacccuguggua

SEQ ID NO: 32349 - RNA, 21 nt, Homo sapiens
agagcucauccauaguuguca

SEQ ID NO: 32350 - RNA, 22 nt, Homo sapiens
auggcaguggaguuagugauug

SEQ ID NO: 32351 - RNA, 21 nt, Homo sapiens
acuagcuuauacauaaaauua

SEQ ID NO: 32352 - RNA, 21 nt, Homo sapiens
acuagcuuauacauaaaauua

SEQ ID NO: 32353 - RNA, 17 nt, Homo sapiens
uggaggccccagcgaga

SEQ ID NO: 32354 - RNA, 23 nt, Homo sapiens
accacaggagucugagcauuuga

SEQ ID NO: 32355 - RNA, 20 nt, Homo sapiens
cugcgggaggacagggcuca

SEQ ID NO: 32356 - RNA, 18 nt, Homo sapiens
aucacauucaccucccug

SEQ ID NO: 32357 - RNA, 21 nt, Homo sapiens
cggggugcacgggcggagggc

SEQ ID NO: 32358 - RNA, 22 nt, Homo sapiens
acccuuaucaguucuccgucca

SEQ ID NO: 32359 - RNA, 21 nt, Homo sapiens
acccaguagccagauguagcu

SEQ ID NO: 32360 - RNA, 23 nt, Homo sapiens
agaggcaggcaugcgggcagaca

SEQ ID NO: 32361 - RNA, 19 nt, Homo sapiens
agaaaccccagcagagaca

SEQ ID NO: 32362 - RNA, 20 nt, Homo sapiens
cucaaagcaaacccugcaga

SEQ ID NO: 32363 - RNA, 17 nt, Homo sapiens
caccugaauuacuugaa

SEQ ID NO: 32364 - RNA, 22 nt, Homo sapiens
agccuauccuggauuacuugaa

SEQ ID NO: 32365 - RNA, 21 nt, Homo sapiens
accuauccugaauuacuugaa

SEQ ID NO: 32366 - RNA, 22 nt, Homo sapiens
cuacccacagacguaccaauca

SEQ ID NO: 32367 - RNA, 23 nt, Homo sapiens
aggagaaggcaccaugggauuua

SEQ ID NO: 32368 - RNA, 22 nt, Homo sapiens
aaggugauggucagcagacaua

SEQ ID NO: 32369 - RNA, 23 nt, Homo sapiens
uguaggcuggggauaaaugaaua

SEQ ID NO: 32370 - RNA, 20 nt, Homo sapiens
acaaugagaacccauggucu

SEQ ID NO: 32371 - RNA, 22 nt, Homo sapiens
caaacaccauugucacacucca

SEQ ID NO: 32372 - RNA, 22 nt, Homo sapiens
cucauccgauguacaauaauuu

SEQ ID NO: 32373 - RNA, 23 nt, Homo sapiens
ggaagccaucaagucgcugcagg

SEQ ID NO: 32374 - RNA, 20 nt, Homo sapiens
cucaaagcaaacccugcaga

SEQ ID NO: 32375 - RNA, 21 nt, Homo sapiens
cugggggacggagcagaagga

SEQ ID NO: 32376 - RNA, 17 nt, Homo sapiens
gggagaggaggaggcga

SEQ ID NO: 32377 - RNA, 20 nt, Homo sapiens
acagcaaggagggcaggagg

SEQ ID NO: 32378 - RNA, 22 nt, Homo sapiens
ucagaccgagacaagugcaaug

SEQ ID NO: 32379 - RNA, 21 nt, Homo sapiens
ccuucugacuccaaguccagu

SEQ ID NO: 32380 - RNA, 22 nt, Homo sapiens
gccuucugacccuaaguccagu

SEQ ID NO: 32381 - RNA, 22 nt, Homo sapiens
gccagcuaacaauacacugccu

SEQ ID NO: 32382 - RNA, 23 nt, Homo sapiens
ccuagagagggugagaaccugcc

SEQ ID NO: 32383 - RNA, 21 nt, Homo sapiens
caucaccuuccuucuccucca

SEQ ID NO: 32384 - RNA, 23 nt, Homo sapiens
gacguaguccuauucucugcugc

SEQ ID NO: 32385 - RNA, 22 nt, Homo sapiens
caaacaccauugucacacucca

SEQ ID NO: 32386 - RNA, 22 nt, Homo sapiens
ucccucacacagaauuccagaa

SEQ ID NO: 32387 - RNA, 22 nt, Homo sapiens
augcuuuuugggguaagggcuu

SEQ ID NO: 32388 - RNA, 23 nt, Homo sapiens
gggagugaagacacggagccaga

SEQ ID NO: 32389 - RNA, 21 nt, Homo sapiens
gaccaaucgccguccccgccg

SEQ ID NO: 32390 - RNA, 23 nt, Homo sapiens
cccaacagacauggcgguacuca

SEQ ID NO: 32391 - RNA, 22 nt, Homo sapiens
uagucaagugaagcagugggag

SEQ ID NO: 32392 - RNA, 22 nt, Homo sapiens
ucagaccgagacaagugcaaug

SEQ ID NO: 32393 - RNA, 23 nt, Homo sapiens
aaaucagaaucacaccuggggga

SEQ ID NO: 32394 - RNA, 21 nt, Homo sapiens
aagacgggaggagaggaguga

SEQ ID NO: 32395 - RNA, 22 nt, Homo sapiens
aggaaaccagcaaguguugacg

SEQ ID NO: 32396 - RNA, 24 nt, Homo sapiens
acgcagagcccgaaagcccccagu

SEQ ID NO: 32397 - RNA, 22 nt, Homo sapiens
gcggucccgcggcgccccgccu

SEQ ID NO: 32398 - RNA, 22 nt, Homo sapiens
ugcuguuagcccuagccccgca

SEQ ID NO: 32399 - RNA, 21 nt, Homo sapiens
caucaccuuccuucuccucca

SEQ ID NO: 32400 - RNA, 20 nt, Homo sapiens
uacugcuuccacagcucccc

SEQ ID NO: 32401 - RNA, 18 nt, Homo sapiens
cccccaccaccacgcccg

SEQ ID NO: 32402 - RNA, 21 nt, Homo sapiens
auguaggccuuuagaucacuu

SEQ ID NO: 32403 - RNA, 25 nt, Homo sapiens
agcuagucaagcgcgguuguggggg

SEQ ID NO: 32404 - RNA, 22 nt, Homo sapiens
ccucauggaaggguuccccacu

SEQ ID NO: 32405 - RNA, 22 nt, Homo sapiens
acaguggucaucgagugacaca

SEQ ID NO: 32406 - RNA, 25 nt, Homo sapiens
acggagcugucccaacaccaccccu

SEQ ID NO: 32407 - RNA, 23 nt, Homo sapiens
agaaaccaugggguaugagcaga

SEQ ID NO: 32408 - RNA, 20 nt, Homo sapiens
uacugcuuccacagcucccc

SEQ ID NO: 32409 - RNA, 23 nt, Homo sapiens
aggaacagcagcagcccgggccg

SEQ ID NO: 32410 - RNA, 22 nt, Homo sapiens
gaaccuaucuccccucuggacc

SEQ ID NO: 32411 - RNA, 22 nt, Homo sapiens
aagauguggaccauauuacaua

SEQ ID NO: 32412 - RNA, 23 nt, Homo sapiens
acacucuaaagagaagcgcuuug

SEQ ID NO: 32413 - RNA, 21 nt, Homo sapiens
agaaaguacuucccucuggag

SEQ ID NO: 32414 - RNA, 21 nt, Homo sapiens
agaaagugcaucccucuggag

SEQ ID NO: 32415 - RNA, 19 nt, Homo sapiens
gggaaacguaugucaaccu

SEQ ID NO: 32416 - RNA, 21 nt, Homo sapiens
gcugaggucugggccaggucu

SEQ ID NO: 32417 - RNA, 23 nt, Homo sapiens
ggacauuguuucagugcccaagu

SEQ ID NO: 32418 - RNA, 22 nt, Homo sapiens
gcggucccgcggcgccccgccu

SEQ ID NO: 32419 - RNA, 23 nt, Homo sapiens
guagugggccgagccgagugaca

SEQ ID NO: 32420 - RNA, 23 nt, Homo sapiens
gcacaugugcacacagccgggug

SEQ ID NO: 32421 - RNA, 21 nt, Homo sapiens
auaauggagaccaggccacga

SEQ ID NO: 32422 - RNA, 22 nt, Homo sapiens
cugggggcggcacaggggcuca

SEQ ID NO: 32423 - RNA, 18 nt, Homo sapiens
auucaaucuacugccuca

SEQ ID NO: 32424 - RNA, 22 nt, Homo sapiens
uggcagcagcggagggggcaga

SEQ ID NO: 32425 - RNA, 20 nt, Homo sapiens
ccagcagcaccuggggcagu

SEQ ID NO: 32426 - RNA, 21 nt, Homo sapiens
auccuguacugagcugccccg

SEQ ID NO: 32427 - RNA, 23 nt, Homo sapiens
cacugugggcccucuccgcacca

SEQ ID NO: 32428 - RNA, 22 nt, Homo sapiens
ugcuguuagcccuagccccgca

SEQ ID NO: 32429 - RNA, 22 nt, Homo sapiens
uauccacuacaccccgcugccu

SEQ ID NO: 32430 - RNA, 21 nt, Homo sapiens
ggggagcgggggcccugccuu

SEQ ID NO: 32431 - RNA, 23 nt, Homo sapiens
gcacaugugcacacagccgggug

SEQ ID NO: 32432 - RNA, 24 nt, Homo sapiens
acugcaggcuccagcuuccaggcu

SEQ ID NO: 32433 - RNA, 23 nt, Homo sapiens
gggagugaagacacggagccaga

SEQ ID NO: 32434 - RNA, 22 nt, Homo sapiens
ugagccacugugccuggccuga

SEQ ID NO: 32435 - RNA, 21 nt, Homo sapiens
ccuucugacuccaaguccagu

SEQ ID NO: 32436 - RNA, 23 nt, Homo sapiens
caugagugacgcccucuggagua

SEQ ID NO: 32437 - RNA, 25 nt, Homo sapiens
acggagcugucccaacaccaccccu

SEQ ID NO: 32438 - RNA, 22 nt, Homo sapiens
ccucaggcacggccgggccacc

SEQ ID NO: 32439 - RNA, 22 nt, Homo sapiens
aacccauggaauucaguucuca

SEQ ID NO: 32440 - RNA, 22 nt, Homo sapiens
accagcuaacaauacacugcca

SEQ ID NO: 32441 - RNA, 22 nt, Homo sapiens
cacuuagcagguuguauuauau

SEQ ID NO: 32442 - RNA, 21 nt, Homo sapiens
cccgaggagccgggcaggcuu

SEQ ID NO: 32443 - RNA, 22 nt, Homo sapiens
uauccacuacaccccgcugccu

SEQ ID NO: 32444 - RNA, 21 nt, Homo sapiens
ccccucccagccucccugcca

SEQ ID NO: 32445 - RNA, 22 nt, Homo sapiens
ucccucacacagaauuccagaa

SEQ ID NO: 32446 - RNA, 22 nt, Homo sapiens
augcuuuuugggguaagggcuu

SEQ ID NO: 32447 - RNA, 22 nt, Homo sapiens
cggugagcacccggccccugcg

SEQ ID NO: 32448 - RNA, 22 nt, Homo sapiens
cugcucaaacccuccaaugacu

SEQ ID NO: 32449 - RNA, 21 nt, Homo sapiens
aagggucaguaagcacccgcg

SEQ ID NO: 32450 - RNA, 21 nt, Homo sapiens
cggggugcacgggcggagggc

SEQ ID NO: 32451 - RNA, 21 nt, Homo sapiens
gaccaaucgccguccccgccg

SEQ ID NO: 32452 - RNA, 22 nt, Homo sapiens
acaguucuucaacuggcagcuu

SEQ ID NO: 32453 - RNA, 22 nt, Homo sapiens
aaucagucucauugcuuuauaa

SEQ ID NO: 32454 - RNA, 23 nt, Homo sapiens
gaaagugcuucuuuccucgagaa

SEQ ID NO: 32455 - RNA, 25 nt, Homo sapiens
accaacggaccuacuucccuccgcc

SEQ ID NO: 32456 - RNA, 22 nt, Homo sapiens
gcggucccgcggcgccccgccu

SEQ ID NO: 32457 - RNA, 22 nt, Homo sapiens
ugcuguuagcccuagccccgca

SEQ ID NO: 32458 - RNA, 21 nt, Homo sapiens
agaaguagaccauguguccua

SEQ ID NO: 32459 - RNA, 18 nt, Homo sapiens
cagcagccuccuucucaa

SEQ ID NO: 32460 - RNA, 18 nt, Homo sapiens
ccacugaaccacccaugc

SEQ ID NO: 32461 - RNA, 23 nt, Homo sapiens
gggagugaagacacggagccaga

SEQ ID NO: 32462 - RNA, 18 nt, Homo sapiens
auucaaucuacugccuca

SEQ ID NO: 32463 - RNA, 23 nt, Homo sapiens
cuaucugcacuagaugcaccuua

SEQ ID NO: 32464 - RNA, 20 nt, Homo sapiens
acagcaaggagggcaggagg

SEQ ID NO: 32465 - RNA, 21 nt, Homo sapiens
cugcugggccacaacguggga

SEQ ID NO: 32466 - RNA, 21 nt, Homo sapiens
cggcucggguggcggcgacgg

SEQ ID NO: 32467 - RNA, 22 nt, Homo sapiens
gugggguggguggucaggccga

SEQ ID NO: 32468 - RNA, 23 nt, Homo sapiens
aggaacagcagcagcccgggccg

SEQ ID NO: 32469 - RNA, 22 nt, Homo sapiens
ucgcccucucaacccagcuuuu

SEQ ID NO: 32470 - RNA, 22 nt, Homo sapiens
uugcccucucaacccagcuuuu

SEQ ID NO: 32471 - RNA, 20 nt, Homo sapiens
acccucucaacccagcuuuu

SEQ ID NO: 32472 - RNA, 19 nt, Homo sapiens
uccucucaacccagcuuuu

SEQ ID NO: 32473 - RNA, 19 nt, Homo sapiens
guccugaauuccgcagccu

SEQ ID NO: 32474 - RNA, 23 nt, Homo sapiens
gcacaugugcacacagccgggug

SEQ ID NO: 32475 - RNA, 23 nt, Homo sapiens
gggagugaagacacggagccaga

SEQ ID NO: 32476 - RNA, 22 nt, Homo sapiens
ucagaccgagacaagugcaaug

SEQ ID NO: 32477 - RNA, 21 nt, Homo sapiens
acaggauugagggggggcccu

SEQ ID NO: 32478 - RNA, 22 nt, Homo sapiens
gaauucaucacggccagccucu

SEQ ID NO: 32479 - RNA, 23 nt, Homo sapiens
cugcagaacuguucccgcugcua

SEQ ID NO: 32480 - RNA, 19 nt, Homo sapiens
guccugaauuccgcagccu

SEQ ID NO: 32481 - RNA, 21 nt, Homo sapiens
ccccucccagccucccugcca

SEQ ID NO: 32482 - RNA, 22 nt, Homo sapiens
ucaggaacugccuuucucucca

SEQ ID NO: 32483 - RNA, 21 nt, Homo sapiens
gaccaaucgccguccccgccg

SEQ ID NO: 32484 - RNA, 23 nt, Homo sapiens
cggcucugucgucgaggcgcuca

SEQ ID NO: 32485 - RNA, 19 nt, Homo sapiens
guccugaauuccgcagccu

SEQ ID NO: 32486 - RNA, 22 nt, Homo sapiens
gcggucccgcggcgccccgccu

SEQ ID NO: 32487 - RNA, 22 nt, Homo sapiens
ugcuguuagcccuagccccgca

SEQ ID NO: 32488 - RNA, 22 nt, Homo sapiens
cacucuaaagggaggcacuuug

SEQ ID NO: 32489 - RNA, 24 nt, Homo sapiens
cacccccagagccucagcucccca

SEQ ID NO: 32490 - RNA, 21 nt, Homo sapiens
cggcucggguggcggcgacgg

SEQ ID NO: 32491 - RNA, 22 nt, Homo sapiens
acccuuaucaguucuccgucca

SEQ ID NO: 32492 - RNA, 21 nt, Homo sapiens
ggaaaucccuggcaaugugau

SEQ ID NO: 32493 - RNA, 21 nt, Homo sapiens
gguaaucccuggcaaugugau

SEQ ID NO: 32494 - RNA, 22 nt, Homo sapiens
ccuggcacacaguagaccuuca

SEQ ID NO: 32495 - RNA, 19 nt, Homo sapiens
auuuugguacagcagcuca

SEQ ID NO: 32496 - RNA, 19 nt, Homo sapiens
gccucagaggcagcugcuu

SEQ ID NO: 32497 - RNA, 22 nt, Homo sapiens
ggaggccgggacgagugcaaua

SEQ ID NO: 32498 - RNA, 17 nt, Homo sapiens
gacagccucucccccac

SEQ ID NO: 32499 - RNA, 18 nt, Homo sapiens
aucacauucaccucccug

SEQ ID NO: 32500 - RNA, 21 nt, Homo sapiens
cggggugcacgggcggagggc

SEQ ID NO: 32501 - RNA, 21 nt, Homo sapiens
gaccaaucgccguccccgccg

SEQ ID NO: 32502 - RNA, 20 nt, Homo sapiens
ugggccaccgccgagcggac

SEQ ID NO: 32503 - RNA, 22 nt, Homo sapiens
caagacacauuuggagagggac

SEQ ID NO: 32504 - RNA, 22 nt, Homo sapiens
gcggucccgcggcgccccgccu

SEQ ID NO: 32505 - RNA, 24 nt, Homo sapiens
cacccccagagccucagcucccca

SEQ ID NO: 32506 - RNA, 18 nt, Homo sapiens
cccccaccaccacgcccg

SEQ ID NO: 32507 - RNA, 21 nt, Homo sapiens
gggcaucugggacgcgcagga

SEQ ID NO: 32508 - RNA, 21 nt, Homo sapiens
gaccaaucgccguccccgccg

SEQ ID NO: 32509 - RNA, 22 nt, Homo sapiens
cggugagcacccggccccugcg

SEQ ID NO: 32510 - RNA, 22 nt, Homo sapiens
ucagaccgagacaagugcaaug

SEQ ID NO: 32511 - RNA, 22 nt, Homo sapiens
gcggucccgcggcgccccgccu

SEQ ID NO: 32512 - RNA, 22 nt, Homo sapiens
ugcuguuagcccuagccccgca

SEQ ID NO: 32513 - RNA, 22 nt, Homo sapiens
uauccacuacaccccgcugccu

SEQ ID NO: 32514 - RNA, 23 nt, Homo sapiens
cuaacugcacuagaugcaccuua

SEQ ID NO: 32515 - RNA, 21 nt, Homo sapiens
gaccaaucgccguccccgccg

SEQ ID NO: 32516 - RNA, 21 nt, Homo sapiens
aacggaaccacuagugacuug

SEQ ID NO: 32517 - RNA, 22 nt, Homo sapiens
gcggucccgcggcgccccgccu

SEQ ID NO: 32518 - RNA, 23 nt, Homo sapiens
cacugugggcccucuccgcacca

SEQ ID NO: 32519 - RNA, 22 nt, Homo sapiens
ugcuguuagcccuagccccgca

SEQ ID NO: 32520 - RNA, 23 nt, Homo sapiens
agaaaccaugggguaugagcaga

SEQ ID NO: 32521 - RNA, 21 nt, Homo sapiens
aagggucaguaagcacccgcg

SEQ ID NO: 32522 - RNA, 21 nt, Homo sapiens
aucugcacugucagcacuuua

SEQ ID NO: 32523 - RNA, 17 nt, Homo sapiens
ggguggcagcgguggga

SEQ ID NO: 32524 - RNA, 22 nt, Homo sapiens
acugccugucugugccugcugu

SEQ ID NO: 32525 - RNA, 22 nt, Homo sapiens
accagguuccaccccagcaggc

SEQ ID NO: 32526 - RNA, 19 nt, Homo sapiens
guccugaauuccgcagccu

SEQ ID NO: 32527 - RNA, 22 nt, Homo sapiens
gggagaggucucccugcgcaca

SEQ ID NO: 32528 - RNA, 22 nt, Homo sapiens
gggagaggucucccugcgcaca

SEQ ID NO: 32529 - RNA, 18 nt, Homo sapiens
gaaaugagggccagcuga

SEQ ID NO: 32530 - RNA, 22 nt, Homo sapiens
caaacaccauugucacacucca

SEQ ID NO: 32531 - RNA, 20 nt, Homo sapiens
cccgccgcgucgcccugggg

SEQ ID NO: 32532 - RNA, 23 nt, Homo sapiens
acgggugcgauuucugugugaga

SEQ ID NO: 32533 - RNA, 22 nt, Homo sapiens
acaaaaguugccuuugugugau

SEQ ID NO: 32534 - RNA, 22 nt, Homo sapiens
acaaaagcaacugagguucuug

SEQ ID NO: 32535 - RNA, 21 nt, Homo sapiens
acaauccuagagcacaagaag

SEQ ID NO: 32536 - RNA, 21 nt, Homo sapiens
ugcaggcugaucuucuucucu

SEQ ID NO: 32537 - RNA, 18 nt, Homo sapiens
cagcagccuccuucucaa

SEQ ID NO: 32538 - RNA, 22 nt, Homo sapiens
cacugguacaaggguugggaga

SEQ ID NO: 32539 - RNA, 22 nt, Homo sapiens
agcccaaaaggagaauucuuug

SEQ ID NO: 32540 - RNA, 21 nt, Homo sapiens
aacggaaccacuagugacuug

SEQ ID NO: 32541 - RNA, 22 nt, Homo sapiens
agcugaguguaggauguuuaca

SEQ ID NO: 32542 - RNA, 21 nt, Homo sapiens
aagacgggaggagaggaguga

SEQ ID NO: 32543 - RNA, 22 nt, Homo sapiens
aagaagugcaccgcgaauguuu

SEQ ID NO: 32544 - RNA, 23 nt, Homo sapiens
cuccagccccuccagggcuuccu

SEQ ID NO: 32545 - RNA, 21 nt, Homo sapiens
caucaccuuccuucuccucca

SEQ ID NO: 32546 - RNA, 20 nt, Homo sapiens
cccugcgccaucuccucuac

SEQ ID NO: 32547 - RNA, 22 nt, Homo sapiens
ccggcugcaacacaagacacga

SEQ ID NO: 32548 - RNA, 21 nt, Homo sapiens
gaccaaucgccguccccgccg

SEQ ID NO: 32549 - RNA, 22 nt, Homo sapiens
gcggucccgcggcgccccgccu

SEQ ID NO: 32550 - RNA, 22 nt, Homo sapiens
caaacaccauugucacacucca

SEQ ID NO: 32551 - RNA, 18 nt, Homo sapiens
cagcagccuccuucucaa

SEQ ID NO: 32552 - RNA, 21 nt, Homo sapiens
caugcacaugcacacauacau

SEQ ID NO: 32553 - RNA, 24 nt, Homo sapiens
acucacaccuagguuccaaggauu

SEQ ID NO: 32554 - RNA, 23 nt, Homo sapiens
aaucgcgguuuauaccaaaugaa

SEQ ID NO: 32555 - RNA, 23 nt, Homo sapiens
acccaacagccccugcaagggau

SEQ ID NO: 32556 - RNA, 23 nt, Homo sapiens
guagugggccgagccgagugaca

SEQ ID NO: 32557 - RNA, 21 nt, Homo sapiens
cugggggacggagcagaagga

SEQ ID NO: 32558 - RNA, 22 nt, Homo sapiens
uaaaugaauucaauuuccuucu

SEQ ID NO: 32559 - RNA, 18 nt, Homo sapiens
ggagaggagggcacugga

SEQ ID NO: 32560 - RNA, 22 nt, Homo sapiens
ucaggaacugccuuucucucca

SEQ ID NO: 32561 - RNA, 23 nt, Homo sapiens
cagcugcuuuugggauuccguug

SEQ ID NO: 32562 - RNA, 22 nt, Homo sapiens
ucaucucgcccgcaaagaccca

SEQ ID NO: 32563 - RNA, 23 nt, Homo sapiens
uccaucauuacccggcaguauua

SEQ ID NO: 32564 - RNA, 21 nt, Homo sapiens
aagugucagacacgguggugg

SEQ ID NO: 32565 - RNA, 22 nt, Homo sapiens
cuuccagucgaggauguuuaca

SEQ ID NO: 32566 - RNA, 22 nt, Homo sapiens
cuuccagucggggauguuuaca

SEQ ID NO: 32567 - RNA, 22 nt, Homo sapiens
cuuccagucaaggauguuuaca

SEQ ID NO: 32568 - RNA, 23 nt, Homo sapiens
acacucaaaagauggcggcacuu

SEQ ID NO: 32569 - RNA, 21 nt, Homo sapiens
uagcacccagauagcaaggau

SEQ ID NO: 32570 - RNA, 23 nt, Homo sapiens
gggcucuuacucccucaggcacu

SEQ ID NO: 32571 - RNA, 21 nt, Homo sapiens
aucagagguucagcuuacccu

SEQ ID NO: 32572 - RNA, 23 nt, Homo sapiens
guucuguccuggaagaacauacu

SEQ ID NO: 32573 - RNA, 21 nt, Homo sapiens
gaaggaagugagugcagccac

SEQ ID NO: 32574 - RNA, 21 nt, Homo sapiens
cacaaccucaguguuuccagg

SEQ ID NO: 32575 - RNA, 22 nt, Homo sapiens
cuggagagacaaggggaagagg

SEQ ID NO: 32576 - RNA, 23 nt, Homo sapiens
acacagcucuuccauaucuccag

SEQ ID NO: 32577 - RNA, 22 nt, Homo sapiens
auggcaguggaguuagugauug

SEQ ID NO: 32578 - RNA, 22 nt, Homo sapiens
ccuggccgugugguuagugauu

SEQ ID NO: 32579 - RNA, 22 nt, Homo sapiens
ucaguuuccucugcaaacaguu

SEQ ID NO: 32580 - RNA, 21 nt, Homo sapiens
gaccaagaaauagccuuucaa

SEQ ID NO: 32581 - RNA, 20 nt, Homo sapiens
auuucuauaucuaucuccau

SEQ ID NO: 32582 - RNA, 22 nt, Homo sapiens
gcugaggcuguggggcuggagu

SEQ ID NO: 32583 - RNA, 20 nt, Homo sapiens
cccugcgccaucuccucuac

SEQ ID NO: 32584 - RNA, 21 nt, Homo sapiens
aacauacaaaggguauccucu

SEQ ID NO: 32585 - RNA, 22 nt, Homo sapiens
cuggagagacaaggggaagagg

SEQ ID NO: 32586 - RNA, 23 nt, Homo sapiens
aacaggugcucaaauaagacuug

SEQ ID NO: 32587 - RNA, 22 nt, Homo sapiens
gcacaaaucuccagaccaccca

SEQ ID NO: 32588 - RNA, 21 nt, Homo sapiens
ggcugucaauucauaggucag

SEQ ID NO: 32589 - RNA, 21 nt, Homo sapiens
gucugucaauucauaggucau

SEQ ID NO: 32590 - RNA, 24 nt, Homo sapiens
acucacaccuagguuccaaggauu

SEQ ID NO: 32591 - RNA, 21 nt, Homo sapiens
ccuucugacuccaaguccagu

SEQ ID NO: 32592 - RNA, 21 nt, Homo sapiens
uagcacccagauagcaaggau

SEQ ID NO: 32593 - RNA, 20 nt, Homo sapiens
cccugcgccaucuccucuac

SEQ ID NO: 32594 - RNA, 22 nt, Homo sapiens
cuggagagacaaggggaagagg

SEQ ID NO: 32595 - RNA, 22 nt, Homo sapiens
cacgaccgacgccacgccgagu

SEQ ID NO: 32596 - RNA, 18 nt, Homo sapiens
aucacauucaccucccug

SEQ ID NO: 32597 - RNA, 22 nt, Homo sapiens
ggagcccgcgccccgcgccgag

SEQ ID NO: 32598 - RNA, 23 nt, Homo sapiens
gggagugaagacacggagccaga

SEQ ID NO: 32599 - RNA, 22 nt, Homo sapiens
cacucagcggccguuuccccaa

SEQ ID NO: 32600 - RNA, 21 nt, Homo sapiens
uucuaggauaggcccaggggc

SEQ ID NO: 32601 - RNA, 22 nt, Homo sapiens
aucgggaggggacugagccuga

SEQ ID NO: 32602 - RNA, 22 nt, Homo sapiens
ccucauggaaggguuccccacu

SEQ ID NO: 32603 - RNA, 25 nt, Homo sapiens
acggagcugucccaacaccaccccu

SEQ ID NO: 32604 - RNA, 22 nt, Homo sapiens
aagagggagacccaggcucgga

SEQ ID NO: 32605 - RNA, 22 nt, Homo sapiens
caagacacauuuggagagggac

SEQ ID NO: 32606 - RNA, 24 nt, Homo sapiens
acgcgcaggccagagacccaggca

SEQ ID NO: 32607 - RNA, 21 nt, Homo sapiens
caucaccuuccuucuccucca

SEQ ID NO: 32608 - RNA, 20 nt, Homo sapiens
uacugcuuccacagcucccc

SEQ ID NO: 32609 - RNA, 21 nt, Homo sapiens
auaauggagaccaggccacga

SEQ ID NO: 32610 - RNA, 22 nt, Homo sapiens
cugggggcggcacaggggcuca

SEQ ID NO: 32611 - RNA, 18 nt, Homo sapiens
cccccaccaccacgcccg

SEQ ID NO: 32612 - RNA, 24 nt, Homo sapiens
agugugaguucuaccauugccaaa

SEQ ID NO: 32613 - RNA, 21 nt, Homo sapiens
gaccaaucgccguccccgccg

SEQ ID NO: 32614 - RNA, 21 nt, Homo sapiens
gaccaaucgccguccccgccg

SEQ ID NO: 32615 - RNA, 19 nt, Homo sapiens
aagacauuuucagacagcu

SEQ ID NO: 32616 - RNA, 22 nt, Homo sapiens
gcggucccgcggcgccccgccu

SEQ ID NO: 32617 - RNA, 22 nt, Homo sapiens
gcggucccgcggcgccccgccu

SEQ ID NO: 32618 - RNA, 20 nt, Homo sapiens
aggggccucagccuccuggu

SEQ ID NO: 32619 - RNA, 22 nt, Homo sapiens
ugcuguuagcccuagccccgca

SEQ ID NO: 32620 - RNA, 22 nt, Homo sapiens
ugcuguuagcccuagccccgca

SEQ ID NO: 32621 - RNA, 22 nt, Homo sapiens
ucaaugacucagguaaguugca

SEQ ID NO: 32622 - RNA, 22 nt, Homo sapiens
cuggagagacaaggggaagagg

SEQ ID NO: 32623 - RNA, 21 nt, Homo sapiens
cggggugcacgggcggagggc

SEQ ID NO: 32624 - RNA, 23 nt, Homo sapiens
gggagugaagacacggagccaga

SEQ ID NO: 32625 - RNA, 21 nt, Homo sapiens
gaccaaucgccguccccgccg

SEQ ID NO: 32626 - RNA, 19 nt, Homo sapiens
uaugcuaccuuugcacggu

SEQ ID NO: 32627 - RNA, 25 nt, Homo sapiens
accaacggaccuacuucccuccgcc

SEQ ID NO: 32628 - RNA, 22 nt, Homo sapiens
gcggucccgcggcgccccgccu

SEQ ID NO: 32629 - RNA, 22 nt, Homo sapiens
ggcagagagucagagcgcggau

SEQ ID NO: 32630 - RNA, 21 nt, Homo sapiens
cuagggaagaacagugagcaa

SEQ ID NO: 32631 - RNA, 22 nt, Homo sapiens
uaaaugaauucaauuuccuucu

SEQ ID NO: 32632 - RNA, 22 nt, Homo sapiens
ucaggaacugccuuucucucca

SEQ ID NO: 32633 - RNA, 21 nt, Homo sapiens
gaccaaucgccguccccgccg

SEQ ID NO: 32634 - RNA, 22 nt, Homo sapiens
cagaagugggccgggcacaggg

SEQ ID NO: 32635 - RNA, 23 nt, Homo sapiens
ucaccaaaacauggaagcacuua

SEQ ID NO: 32636 - RNA, 23 nt, Homo sapiens
cuacuaaaacauggaagcacuua

SEQ ID NO: 32637 - RNA, 23 nt, Homo sapiens
ccacugaaacauggaagcacuua

SEQ ID NO: 32638 - RNA, 23 nt, Homo sapiens
acacucaaacauggaagcacuua

SEQ ID NO: 32639 - RNA, 17 nt, Homo sapiens
aagcauggaagcacuua

SEQ ID NO: 32640 - RNA, 20 nt, Homo sapiens
cuggaggaagggcccagagg

SEQ ID NO: 32641 - RNA, 22 nt, Homo sapiens
gccuaagacacaggcccagaga

SEQ ID NO: 32642 - RNA, 23 nt, Homo sapiens
aaaucagaaucacaccuggggga

SEQ ID NO: 32643 - RNA, 23 nt, Homo sapiens
acgcucaaaugucgcagcacuuu

SEQ ID NO: 32644 - RNA, 23 nt, Homo sapiens
acaccccaaaaucgaagcacuuc

SEQ ID NO: 32645 - RNA, 23 nt, Homo sapiens
cugcagaacuguucccgcugcua

SEQ ID NO: 32646 - RNA, 22 nt, Homo sapiens
gaccucagcuaugacagcacuu

SEQ ID NO: 32647 - RNA, 22 nt, Homo sapiens
acaguccaaagggaagcacuuu

SEQ ID NO: 32648 - RNA, 21 nt, Homo sapiens
cccucuaaaaggaagcacuuu

SEQ ID NO: 32649 - RNA, 22 nt, Homo sapiens
acccucuaaaaggaagcacuuu

SEQ ID NO: 32650 - RNA, 22 nt, Homo sapiens
acccaccaaagagaagcacuuu

SEQ ID NO: 32651 - RNA, 21 nt, Homo sapiens
cccucaaaaaggaagcacuuu

SEQ ID NO: 32652 - RNA, 25 nt, Homo sapiens
acggagcugucccaacaccaccccu

SEQ ID NO: 32653 - RNA, 24 nt, Homo sapiens
acgcagagcccgaaagcccccagu

SEQ ID NO: 32654 - RNA, 22 nt, Homo sapiens
gcggucccgcggcgccccgccu

SEQ ID NO: 32655 - RNA, 23 nt, Homo sapiens
cuccagccccuccagggcuuccu

SEQ ID NO: 32656 - RNA, 23 nt, Homo sapiens
agaaaccaugggguaugagcaga

SEQ ID NO: 32657 - RNA, 20 nt, Homo sapiens
uacugcuuccacagcucccc

SEQ ID NO: 32658 - RNA, 22 nt, Homo sapiens
cacauggccaaaacagagaaga

SEQ ID NO: 32659 - RNA, 22 nt, Homo sapiens
uccggggacgaacgggacgggu

SEQ ID NO: 32660 - RNA, 17 nt, Homo sapiens
ggguggcagcgguggga

SEQ ID NO: 32661 - RNA, 17 nt, Homo sapiens
gggagaggaggaggcga

SEQ ID NO: 32662 - RNA, 22 nt, Homo sapiens
cacgaccgacgccacgccgagu

SEQ ID NO: 32663 - RNA, 23 nt, Homo sapiens
aggaacagcagcagcccgggccg

SEQ ID NO: 32664 - RNA, 22 nt, Homo sapiens
ucaggaacugccuuucucucca

SEQ ID NO: 32665 - RNA, 21 nt, Homo sapiens
gaccaaucgccguccccgccg

SEQ ID NO: 32666 - RNA, 23 nt, Homo sapiens
ucucgugacaugaugauccccga

SEQ ID NO: 32667 - RNA, 19 nt, Homo sapiens
guugggaucacaggcgccc

SEQ ID NO: 32668 - RNA, 22 nt, Homo sapiens
gcggucccgcggcgccccgccu

SEQ ID NO: 32669 - RNA, 22 nt, Homo sapiens
ugcuguuagcccuagccccgca

SEQ ID NO: 32670 - RNA, 21 nt, Homo sapiens
caucaccuuccuucuccucca

SEQ ID NO: 32671 - RNA, 20 nt, Homo sapiens
uacugcuuccacagcucccc

SEQ ID NO: 32672 - RNA, 22 nt, Homo sapiens
ggaggccgggacgagugcaaua

SEQ ID NO: 32673 - RNA, 21 nt, Homo sapiens
cucccccacugcagcuggcac

SEQ ID NO: 32674 - RNA, 22 nt, Homo sapiens
ucaggaacugccuuucucucca

SEQ ID NO: 32675 - RNA, 22 nt, Homo sapiens
cuguuccugcugaacugagcca

SEQ ID NO: 32676 - RNA, 22 nt, Homo sapiens
ucaccauugcuaaagugcaauu

SEQ ID NO: 32677 - RNA, 22 nt, Homo sapiens
cuacccacagacguaccaauca

SEQ ID NO: 32678 - RNA, 20 nt, Homo sapiens
aggggccucagccuccuggu

SEQ ID NO: 32679 - RNA, 22 nt, Homo sapiens
ugcuguuagcccuagccccgca

SEQ ID NO: 32680 - RNA, 22 nt, Homo sapiens
ugcuguuagcccuagccccgca

SEQ ID NO: 32681 - RNA, 22 nt, Homo sapiens
ggcagagagucagagcgcggau

SEQ ID NO: 32682 - RNA, 23 nt, Homo sapiens
accacaggagucugagcauuuga

SEQ ID NO: 32683 - RNA, 21 nt, Homo sapiens
auguaggccuuuagaucacuu

SEQ ID NO: 32684 - RNA, 21 nt, Homo sapiens
acuagacugugagcuccucga

SEQ ID NO: 32685 - RNA, 22 nt, Homo sapiens
auaaggauuuuuaggggcauua

SEQ ID NO: 32686 - RNA, 20 nt, Homo sapiens
ugggccaccgccgagcggac

SEQ ID NO: 32687 - RNA, 23 nt, Homo sapiens
cacaaauucggaucuacagggua

SEQ ID NO: 32688 - RNA, 22 nt, Homo sapiens
cuggagagacaaggggaagagg

SEQ ID NO: 32689 - RNA, 21 nt, Homo sapiens
cggggugcacgggcggagggc

SEQ ID NO: 32690 - RNA, 22 nt, Homo sapiens
ucaggaacugccuuucucucca

SEQ ID NO: 32691 - RNA, 21 nt, Homo sapiens
gaccaaucgccguccccgccg

SEQ ID NO: 32692 - RNA, 23 nt, Homo sapiens
cagcugcuuuugggauuccguug

SEQ ID NO: 32693 - RNA, 23 nt, Homo sapiens
aaagucucgcucucugccccuca

SEQ ID NO: 32694 - RNA, 22 nt, Homo sapiens
gaauucaucacggccagccucu

SEQ ID NO: 32695 - RNA, 22 nt, Homo sapiens
gaauucaucacggccagccucu

SEQ ID NO: 32696 - RNA, 21 nt, Homo sapiens
uagcacccagauagcaaggau

SEQ ID NO: 32697 - RNA, 20 nt, Homo sapiens
acaaugagaacccauggucu

SEQ ID NO: 32698 - RNA, 19 nt, Homo sapiens
guccugaauuccgcagccu

SEQ ID NO: 32699 - RNA, 22 nt, Homo sapiens
gcggucccgcggcgccccgccu

SEQ ID NO: 32700 - RNA, 22 nt, Homo sapiens
ugcuguuagcccuagccccgca

SEQ ID NO: 32701 - RNA, 22 nt, Homo sapiens
gcugaggcuguggggcuggagu

SEQ ID NO: 32702 - RNA, 20 nt, Homo sapiens
uacugcuuccacagcucccc

SEQ ID NO: 32703 - RNA, 22 nt, Homo sapiens
gggagaggucucccugcgcaca

SEQ ID NO: 32704 - RNA, 22 nt, Homo sapiens
gaaccuaucuccccucuggacc

SEQ ID NO: 32705 - RNA, 21 nt, Homo sapiens
aagugucagacacgguggugg

SEQ ID NO: 32706 - RNA, 21 nt, Homo sapiens
acguggauuuuccucuaugau

SEQ ID NO: 32707 - RNA, 22 nt, Homo sapiens
aacauggauuuuccucuaugau

SEQ ID NO: 32708 - RNA, 19 nt, Homo sapiens
guccugaauuccgcagccu

SEQ ID NO: 32709 - RNA, 25 nt, Homo sapiens
acggagcugucccaacaccaccccu

SEQ ID NO: 32710 - RNA, 23 nt, Homo sapiens
acucagaaggacaaguagaguuu

SEQ ID NO: 32711 - RNA, 21 nt, Homo sapiens
gaaggaagugagugcagccac

SEQ ID NO: 32712 - RNA, 20 nt, Homo sapiens
uacugcuuccacagcucccc

SEQ ID NO: 32713 - RNA, 21 nt, Homo sapiens
ucacccagaucugcggccuaa

SEQ ID NO: 32714 - RNA, 23 nt, Homo sapiens
aaagucucgcucucugccccuca

SEQ ID NO: 32715 - RNA, 23 nt, Homo sapiens
acccucuauagggaagcgcguuc

SEQ ID NO: 32716 - RNA, 19 nt, Homo sapiens
guccugaauuccgcagccu

SEQ ID NO: 32717 - RNA, 22 nt, Homo sapiens
ugaauuacuuuguaaaccacca

SEQ ID NO: 32718 - RNA, 22 nt, Homo sapiens
auccuucuacaaauucacccau

SEQ ID NO: 32719 - RNA, 23 nt, Homo sapiens
ucacauaggaauaaaaagccaua

SEQ ID NO: 32720 - RNA, 23 nt, Homo sapiens
cuaccugcacuguaagcacuuug

SEQ ID NO: 32721 - RNA, 22 nt, Homo sapiens
uucacacugcaugcucugggua

SEQ ID NO: 32722 - RNA, 22 nt, Homo sapiens
cacucagcggccguuuccccaa

SEQ ID NO: 32723 - RNA, 21 nt, Homo sapiens
ucaaucacagauagcaccccu

SEQ ID NO: 32724 - RNA, 23 nt, Homo sapiens
aaaucagaaucacaccuggggga

SEQ ID NO: 32725 - RNA, 22 nt, Homo sapiens
caugauugccacgucugcagua

SEQ ID NO: 32726 - RNA, 21 nt, Homo sapiens
ugauugccacugucugcagua

SEQ ID NO: 32727 - RNA, 22 nt, Homo sapiens
gaccucagcuaugacagcacuu

SEQ ID NO: 32728 - RNA, 21 nt, Homo sapiens
guucuaacccauuguggccaa

SEQ ID NO: 32729 - RNA, 24 nt, Homo sapiens
acgcagagcccgaaagcccccagu

SEQ ID NO: 32730 - RNA, 24 nt, Homo sapiens
acgcgcaggccagagacccaggca

SEQ ID NO: 32731 - RNA, 23 nt, Homo sapiens
agcaaaaaugugcuagugccaaa

SEQ ID NO: 32732 - RNA, 21 nt, Homo sapiens
agggcucaucuugguccugca

SEQ ID NO: 32733 - RNA, 21 nt, Homo sapiens
ucuccagaucagggcagucca

SEQ ID NO: 32734 - RNA, 22 nt, Homo sapiens
cggugagcacccggccccugcg

SEQ ID NO: 32735 - RNA, 22 nt, Homo sapiens
uagucaagugaagcagugggag

SEQ ID NO: 32736 - RNA, 23 nt, Homo sapiens
gaaacccagcagacaauguagcu

SEQ ID NO: 32737 - RNA, 21 nt, Homo sapiens
ucaaucacagauagcaccccu

SEQ ID NO: 32738 - RNA, 22 nt, Homo sapiens
uauggaugcaaaaugaucccaa

SEQ ID NO: 32739 - RNA, 22 nt, Homo sapiens
acacaccaaggauaauuucucc

SEQ ID NO: 32740 - RNA, 21 nt, Homo sapiens
agguaauaccaauaccuugug

SEQ ID NO: 32741 - RNA, 23 nt, Homo sapiens
ccuagagagggugagaaccugcc

SEQ ID NO: 32742 - RNA, 20 nt, Homo sapiens
aggggccucagccuccuggu

SEQ ID NO: 32743 - RNA, 23 nt, Homo sapiens
aaccaagaccccggagaucccag

SEQ ID NO: 32744 - RNA, 22 nt, Homo sapiens
agcucagaacccagaggucuca

SEQ ID NO: 32745 - RNA, 21 nt, Homo sapiens
ggggagcgggggcccugccuu

SEQ ID NO: 32746 - RNA, 23 nt, Homo sapiens
accacaggagucugagcauuuga

SEQ ID NO: 32747 - RNA, 22 nt, Homo sapiens
ccaguagcacggcucaguccag

SEQ ID NO: 32748 - RNA, 23 nt, Homo sapiens
ucacauaggaauaaaaagccaua

SEQ ID NO: 32749 - RNA, 23 nt, Homo sapiens
ucacauaggaaugaaaagccaua

SEQ ID NO: 32750 - RNA, 23 nt, Homo sapiens
guaaauagagguuuaauuaacac

SEQ ID NO: 32751 - RNA, 23 nt, Homo sapiens
ccacugaaacauggaagcacuua

SEQ ID NO: 32752 - RNA, 23 nt, Homo sapiens
ucucugcaggccgugugcuuugc

SEQ ID NO: 32753 - RNA, 21 nt, Homo sapiens
guguauaugcccauggacugc

SEQ ID NO: 32754 - RNA, 21 nt, Homo sapiens
acuuuccaggauucauuaacu

SEQ ID NO: 32755 - RNA, 18 nt, Homo sapiens
uggcgccugaacagggac

SEQ ID NO: 32756 - RNA, 22 nt, Homo sapiens
aucagagcccucugagcuucag

SEQ ID NO: 32757 - RNA, 20 nt, Homo sapiens
ugucuccacagggcucuuua

SEQ ID NO: 32758 - RNA, 18 nt, Homo sapiens
aucacauucaccucccug

SEQ ID NO: 32759 - RNA, 23 nt, Homo sapiens
gggagugaagacacggagccaga

SEQ ID NO: 32760 - RNA, 21 nt, Homo sapiens
gaccaaucgccguccccgccg

SEQ ID NO: 32761 - RNA, 22 nt, Homo sapiens
cagaagugggccgggcacaggg

SEQ ID NO: 32762 - RNA, 22 nt, Homo sapiens
acaguucuucaacuggcagcuu

SEQ ID NO: 32763 - RNA, 22 nt, Homo sapiens
agucuucacaacagcccugugu

SEQ ID NO: 32764 - RNA, 21 nt, Homo sapiens
acaggauugagggggggcccu

SEQ ID NO: 32765 - RNA, 23 nt, Homo sapiens
aaagucucgcucucugccccuca

SEQ ID NO: 32766 - RNA, 22 nt, Homo sapiens
ucaguuuccucugcaaacaguu

SEQ ID NO: 32767 - RNA, 23 nt, Homo sapiens
aagaaucuugucccgcagguccu

SEQ ID NO: 32768 - RNA, 22 nt, Homo sapiens
aggaaaccagcaaguguugacg

SEQ ID NO: 32769 - RNA, 22 nt, Homo sapiens
gcggucccgcggcgccccgccu

SEQ ID NO: 32770 - RNA, 22 nt, Homo sapiens
ugcuguuagcccuagccccgca

SEQ ID NO: 32771 - RNA, 24 nt, Homo sapiens
cacccccagagccucagcucccca

SEQ ID NO: 32772 - RNA, 18 nt, Homo sapiens
cagcagccuccuucucaa

SEQ ID NO: 32773 - RNA, 18 nt, Homo sapiens
caccaccagagccaacgu

SEQ ID NO: 32774 - RNA, 23 nt, Homo sapiens
cuaucugcacuagaugcaccuua

SEQ ID NO: 32775 - RNA, 22 nt, Homo sapiens
acaguucuucaacuggcagcuu

SEQ ID NO: 32776 - RNA, 23 nt, Homo sapiens
cggcucugucgucgaggcgcuca

SEQ ID NO: 32777 - RNA, 21 nt, Homo sapiens
ccuucugacuccaaguccagu

SEQ ID NO: 32778 - RNA, 22 nt, Homo sapiens
gccuucugacccuaaguccagu

SEQ ID NO: 32779 - RNA, 22 nt, Homo sapiens
auaaacgacaccuccuugagaa

SEQ ID NO: 32780 - RNA, 19 nt, Homo sapiens
auuuugguacagcagcuca

SEQ ID NO: 32781 - RNA, 22 nt, Homo sapiens
aagagggagacccaggcucgga

SEQ ID NO: 32782 - RNA, 23 nt, Homo sapiens
acccaacagccccugcaagggau

SEQ ID NO: 32783 - RNA, 20 nt, Homo sapiens
uccccacagacccagagccg

SEQ ID NO: 32784 - RNA, 22 nt, Homo sapiens
ucggucccucgggccagggcag

SEQ ID NO: 32785 - RNA, 22 nt, Homo sapiens
cuggagagacaaggggaagagg

SEQ ID NO: 32786 - RNA, 17 nt, Homo sapiens
ggguggcagcgguggga

SEQ ID NO: 32787 - RNA, 23 nt, Homo sapiens
gggagugaagacacggagccaga

SEQ ID NO: 32788 - RNA, 21 nt, Homo sapiens
gaccaaucgccguccccgccg

SEQ ID NO: 32789 - RNA, 22 nt, Homo sapiens
aguccagauucugugcccacca

SEQ ID NO: 32790 - RNA, 22 nt, Homo sapiens
gcacauguucugcggcccacca

SEQ ID NO: 32791 - RNA, 22 nt, Homo sapiens
gcggucccgcggcgccccgccu

SEQ ID NO: 32792 - RNA, 21 nt, Homo sapiens
caucaccuuccuucuccucca

SEQ ID NO: 32793 - RNA, 20 nt, Homo sapiens
cccugcgccaucuccucuac

SEQ ID NO: 32794 - RNA, 23 nt, Homo sapiens
ccgcuugagcuaacuccgacccg

SEQ ID NO: 32795 - RNA, 21 nt, Homo sapiens
gagcugcauccuggcuccggg

SEQ ID NO: 32796 - RNA, 18 nt, Homo sapiens
cccccaccaccacgcccg

SEQ ID NO: 32797 - RNA, 22 nt, Homo sapiens
gacucgaaccacugauccagca

SEQ ID NO: 32798 - RNA, 22 nt, Homo sapiens
cagacuccgguggaaugaagga

SEQ ID NO: 32799 - RNA, 21 nt, Homo sapiens
acaggauugagggggggcccu

SEQ ID NO: 32800 - RNA, 23 nt, Homo sapiens
cggcucugucgucgaggcgcuca

SEQ ID NO: 32801 - RNA, 22 nt, Homo sapiens
cuacccacagacguaccaauca

SEQ ID NO: 32802 - RNA, 19 nt, Homo sapiens
guugggaucacaggcgccc

SEQ ID NO: 32803 - RNA, 24 nt, Homo sapiens
acgcgcaggccagagacccaggca

SEQ ID NO: 32804 - RNA, 22 nt, Homo sapiens
ugcuguuagcccuagccccgca

SEQ ID NO: 32805 - RNA, 22 nt, Homo sapiens
ugcuguuagcccuagccccgca

SEQ ID NO: 32806 - RNA, 22 nt, Homo sapiens
uauccacuacaccccgcugccu

SEQ ID NO: 32807 - RNA, 21 nt, Homo sapiens
ccgugguucuacccuguggua

SEQ ID NO: 32808 - RNA, 22 nt, Homo sapiens
uagcagaagcauuuccgcacac

SEQ ID NO: 32809 - RNA, 22 nt, Homo sapiens
gaaccuaucuccccucuggacc

SEQ ID NO: 32810 - RNA, 21 nt, Homo sapiens
aaagugucagauacggugugg

SEQ ID NO: 32811 - RNA, 23 nt, Homo sapiens
gcgcccaauuaaugucuguugau

SEQ ID NO: 32812 - RNA, 22 nt, Homo sapiens
accagcuaacaauacacugcca

SEQ ID NO: 32813 - RNA, 22 nt, Homo sapiens
aaagagguuaaccagguguguu

SEQ ID NO: 32814 - RNA, 23 nt, Homo sapiens
acauuuuucguuauugcucuuga

SEQ ID NO: 32815 - RNA, 22 nt, Homo sapiens
ugaauccuugaauagguguguu

SEQ ID NO: 32816 - RNA, 23 nt, Homo sapiens
aaagucucgcucucugccccuca

SEQ ID NO: 32817 - RNA, 23 nt, Homo sapiens
ucaacgggagugaucgugucauu

SEQ ID NO: 32818 - RNA, 23 nt, Homo sapiens
acacucuaaagagaagcgcuuug

SEQ ID NO: 32819 - RNA, 21 nt, Homo sapiens
agaaaguacuucccucuggag

SEQ ID NO: 32820 - RNA, 21 nt, Homo sapiens
agaaagugcaucccucuggag

SEQ ID NO: 32821 - RNA, 21 nt, Homo sapiens
guaaugggaccuuccucuuug

SEQ ID NO: 32822 - RNA, 22 nt, Homo sapiens
acaucaucgcauauugacacaa

SEQ ID NO: 32823 - RNA, 22 nt, Homo sapiens
caaaagucaagcuuauccuaaa

SEQ ID NO: 32824 - RNA, 21 nt, Homo sapiens
ugcaggcugaucuucuucucu

SEQ ID NO: 32825 - RNA, 17 nt, Homo sapiens
gggagaggaggaggcga

SEQ ID NO: 32826 - RNA, 22 nt, Homo sapiens
acaaaguucuguagugcacuga

SEQ ID NO: 32827 - RNA, 22 nt, Homo sapiens
acaaaguucugugaugcacuga

SEQ ID NO: 32828 - RNA, 21 nt, Homo sapiens
ccaaguucugucaugcacuga

SEQ ID NO: 32829 - RNA, 21 nt, Homo sapiens
gggcaucugggacgcgcagga

SEQ ID NO: 32830 - RNA, 20 nt, Homo sapiens
acagcaaggagggcaggagg

SEQ ID NO: 32831 - RNA, 21 nt, Homo sapiens
acccaguagccagauguagcu

SEQ ID NO: 32832 - RNA, 22 nt, Homo sapiens
uauccacuacaccccgcugccu

SEQ ID NO: 32833 - RNA, 22 nt, Homo sapiens
cacauggccaaaacagagaaga

SEQ ID NO: 32834 - RNA, 21 nt, Homo sapiens
ucuccagaucagggcagucca

SEQ ID NO: 32835 - RNA, 21 nt, Homo sapiens
gggcaucugggacgcgcagga

SEQ ID NO: 32836 - RNA, 21 nt, Homo sapiens
aggcggcaggcacaggacugg

SEQ ID NO: 32837 - RNA, 22 nt, Homo sapiens
ucaucucgcccgcaaagaccca

SEQ ID NO: 32838 - RNA, 21 nt, Homo sapiens
ccuucugacuccaaguccagu

SEQ ID NO: 32839 - RNA, 23 nt, Homo sapiens
ccacccaaugaccuacuccaaga

SEQ ID NO: 32840 - RNA, 21 nt, Homo sapiens
gguggagcccugagaaccgga

SEQ ID NO: 32841 - RNA, 23 nt, Homo sapiens
cuccagccccuccagggcuuccu

SEQ ID NO: 32842 - RNA, 21 nt, Homo sapiens
acuagacugugagcuccucga

SEQ ID NO: 32843 - RNA, 23 nt, Homo sapiens
aggaacagcagcagcccgggccg

SEQ ID NO: 32844 - RNA, 23 nt, Homo sapiens
cccaacagacauggcgguacuca

SEQ ID NO: 32845 - RNA, 23 nt, Homo sapiens
cccaacagacauggcgguacuca

SEQ ID NO: 32846 - RNA, 19 nt, Homo sapiens
guccugaauuccgcagccu

SEQ ID NO: 32847 - RNA, 22 nt, Homo sapiens
aagagggagacccaggcucgga

SEQ ID NO: 32848 - RNA, 21 nt, Homo sapiens
uucaguuaucacaguacugua

SEQ ID NO: 32849 - RNA, 18 nt, Homo sapiens
ugguggcagaggugggau

SEQ ID NO: 32850 - RNA, 22 nt, Homo sapiens
cggugagcacccggccccugcg

SEQ ID NO: 32851 - RNA, 21 nt, Homo sapiens
gcagaacuuagccacugugaa

SEQ ID NO: 32852 - RNA, 23 nt, Homo sapiens
ucucugcaggccgugugcuuugc

SEQ ID NO: 32853 - RNA, 22 nt, Homo sapiens
cacuuagcagguuguauuauau

SEQ ID NO: 32854 - RNA, 22 nt, Homo sapiens
ugcaagccuugggugugggagg

SEQ ID NO: 32855 - RNA, 21 nt, Homo sapiens
acuagcuuauacauaaaauua

SEQ ID NO: 32856 - RNA, 24 nt, Homo sapiens
cacccccagagccucagcucccca

SEQ ID NO: 32857 - RNA, 23 nt, Homo sapiens
accacaggagucugagcauuuga

SEQ ID NO: 32858 - RNA, 24 nt, Homo sapiens
agugugaguucuaccauugccaaa

SEQ ID NO: 32859 - RNA, 22 nt, Homo sapiens
agcgggacuuugagggccaguu

SEQ ID NO: 32860 - RNA, 21 nt, Homo sapiens
ugcaaugcaacuacaaugcac

SEQ ID NO: 32861 - RNA, 22 nt, Homo sapiens
gcaaaagaaacugugguuuuug

SEQ ID NO: 32862 - RNA, 22 nt, Homo sapiens
uaaaugaauucaauuuccuucu

SEQ ID NO: 32863 - RNA, 22 nt, Homo sapiens
ccggcugcaacacaagacacga

SEQ ID NO: 32864 - RNA, 22 nt, Homo sapiens
ugagccacugugccuggccuga

SEQ ID NO: 32865 - RNA, 22 nt, Homo sapiens
acugccugucugugccugcugu

SEQ ID NO: 32866 - RNA, 22 nt, Homo sapiens
accagguuccaccccagcaggc

SEQ ID NO: 32867 - RNA, 21 nt, Homo sapiens
ugacugcagagcaaaagacac

SEQ ID NO: 32868 - RNA, 18 nt, Homo sapiens
acccucugaaaggaagca

SEQ ID NO: 32869 - RNA, 22 nt, Homo sapiens
aaagugcuucuuaccuccagau

SEQ ID NO: 32870 - RNA, 21 nt, Homo sapiens
cccgaggagccgggcaggcuu

SEQ ID NO: 32871 - RNA, 23 nt, Homo sapiens
cuccagccccuccagggcuuccu

SEQ ID NO: 32872 - RNA, 22 nt, Homo sapiens
ucaaugacucagguaaguugca

SEQ ID NO: 32873 - RNA, 22 nt, Homo sapiens
cacaaguucggaucuacggguu

SEQ ID NO: 32874 - RNA, 20 nt, Homo sapiens
cucaaagcaaacccugcaga

SEQ ID NO: 32875 - RNA, 22 nt, Homo sapiens
caaacaccauugucacacucca

SEQ ID NO: 32876 - RNA, 21 nt, Homo sapiens
ucuccagaucagggcagucca

SEQ ID NO: 32877 - RNA, 22 nt, Homo sapiens
uggcagcagcggagggggcaga

SEQ ID NO: 32878 - RNA, 24 nt, Homo sapiens
ugggagaaccucccugcuucugcu

SEQ ID NO: 32879 - RNA, 20 nt, Homo sapiens
ccagcagcaccuggggcagu

SEQ ID NO: 32880 - RNA, 21 nt, Homo sapiens
auccuguacugagcugccccg

SEQ ID NO: 32881 - RNA, 22 nt, Homo sapiens
gaacuugcuaaaaaugcagaau

SEQ ID NO: 32882 - RNA, 25 nt, Homo sapiens
accaacggaccuacuucccuccgcc

SEQ ID NO: 32883 - RNA, 22 nt, Homo sapiens
caaacaccauugucacacucca

SEQ ID NO: 32884 - RNA, 24 nt, Homo sapiens
gaagucacucccaggcagcugcaa

SEQ ID NO: 32885 - RNA, 19 nt, Homo sapiens
cagcaucagcagcaucauc

SEQ ID NO: 32886 - RNA, 21 nt, Homo sapiens
acaggccaucuguguuauauu

SEQ ID NO: 32887 - RNA, 22 nt, Homo sapiens
uauucaggaacauauugcaaaa

SEQ ID NO: 32888 - RNA, 22 nt, Homo sapiens
uauucaggaacauauugcaaaa

SEQ ID NO: 32889 - RNA, 22 nt, Homo sapiens
gaauucaucacggccagccucu

SEQ ID NO: 32890 - RNA, 22 nt, Homo sapiens
gagguuucccguguauguuuca

SEQ ID NO: 32891 - RNA, 20 nt, Homo sapiens
gaaagggcuucccuuugcag

SEQ ID NO: 32892 - RNA, 20 nt, Homo sapiens
gaaagggcuucccuuugcag

SEQ ID NO: 32893 - RNA, 20 nt, Homo sapiens
gcagcuguccgcccagacac

SEQ ID NO: 32894 - RNA, 24 nt, Homo sapiens
gaaagugcauagaauucugucugg

SEQ ID NO: 32895 - RNA, 22 nt, Homo sapiens
acaaaguucugugaugcacuga

SEQ ID NO: 32896 - RNA, 18 nt, Homo sapiens
auucaaucuacugccuca

SEQ ID NO: 32897 - RNA, 22 nt, Homo sapiens
acaguucuucaacuggcagcuu

SEQ ID NO: 32898 - RNA, 21 nt, Homo sapiens
cugggggacggagcagaagga

SEQ ID NO: 32899 - RNA, 17 nt, Homo sapiens
gggagaggaggaggcga

SEQ ID NO: 32900 - RNA, 21 nt, Homo sapiens
gggcaucugggacgcgcagga

SEQ ID NO: 32901 - RNA, 21 nt, Homo sapiens
gaccaaucgccguccccgccg

SEQ ID NO: 32902 - RNA, 22 nt, Homo sapiens
cuguuccugcugaacugagcca

SEQ ID NO: 32903 - RNA, 23 nt, Homo sapiens
agaggcaggcaugcgggcagaca

SEQ ID NO: 32904 - RNA, 22 nt, Homo sapiens
auaaggauuuuuaggggcauua

SEQ ID NO: 32905 - RNA, 22 nt, Homo sapiens
cucccuucuuuccucccgucuu

SEQ ID NO: 32906 - RNA, 22 nt, Homo sapiens
gcggucccgcggcgccccgccu

SEQ ID NO: 32907 - RNA, 22 nt, Homo sapiens
ugcuguuagcccuagccccgca

SEQ ID NO: 32908 - RNA, 22 nt, Homo sapiens
agcucagaacccagaggucuca

SEQ ID NO: 32909 - RNA, 22 nt, Homo sapiens
uccggggacgaacgggacgggu

SEQ ID NO: 32910 - RNA, 23 nt, Homo sapiens
gggagugaagacacggagccaga

SEQ ID NO: 32911 - RNA, 21 nt, Homo sapiens
gaccaaucgccguccccgccg

SEQ ID NO: 32912 - RNA, 20 nt, Homo sapiens
cccgccgcgucgcccugggg

SEQ ID NO: 32913 - RNA, 21 nt, Homo sapiens
uucuaggauaggcccaggggc

SEQ ID NO: 32914 - RNA, 22 nt, Homo sapiens
acaaccagcuaagacacugcca

SEQ ID NO: 32915 - RNA, 21 nt, Homo sapiens
uggaaaccaagagugggucgc

SEQ ID NO: 32916 - RNA, 21 nt, Homo sapiens
cugaaaccaaguaugggucgc

SEQ ID NO: 32917 - RNA, 19 nt, Homo sapiens
guccugaauuccgcagccu

SEQ ID NO: 32918 - RNA, 22 nt, Homo sapiens
gcggucccgcggcgccccgccu

SEQ ID NO: 32919 - RNA, 22 nt, Homo sapiens
ugcuguuagcccuagccccgca

SEQ ID NO: 32920 - RNA, 22 nt, Homo sapiens
gcugaggcuguggggcuggagu

SEQ ID NO: 32921 - RNA, 23 nt, Homo sapiens
ccgcuugagcuaacuccgacccg

SEQ ID NO: 32922 - RNA, 22 nt, Homo sapiens
ggaggccgggacgagugcaaua

SEQ ID NO: 32923 - RNA, 18 nt, Homo sapiens
gaaaugagggccagcuga

SEQ ID NO: 32924 - RNA, 24 nt, Homo sapiens
acugcaggcuccagcuuccaggcu

SEQ ID NO: 32925 - RNA, 20 nt, Homo sapiens
aagcagaaaaaggcaaacga

SEQ ID NO: 32926 - RNA, 21 nt, Homo sapiens
uuuagcauaaguaugucccaa

SEQ ID NO: 32927 - RNA, 22 nt, Homo sapiens
ucaggaacugccuuucucucca

SEQ ID NO: 32928 - RNA, 22 nt, Homo sapiens
uggcagcagcggagggggcaga

SEQ ID NO: 32929 - RNA, 20 nt, Homo sapiens
ccagcagcaccuggggcagu

SEQ ID NO: 32930 - RNA, 23 nt, Homo sapiens
aaaucagaaucacaccuggggga

SEQ ID NO: 32931 - RNA, 21 nt, Homo sapiens
auccuguacugagcugccccg

SEQ ID NO: 32932 - RNA, 25 nt, Homo sapiens
acggagcugucccaacaccaccccu

SEQ ID NO: 32933 - RNA, 24 nt, Homo sapiens
acgcagagcccgaaagcccccagu

SEQ ID NO: 32934 - RNA, 24 nt, Homo sapiens
acgcgcaggccagagacccaggca

SEQ ID NO: 32935 - RNA, 20 nt, Homo sapiens
uacugcuuccacagcucccc

SEQ ID NO: 32936 - RNA, 17 nt, Homo sapiens
gacagccucucccccac

SEQ ID NO: 32937 - RNA, 18 nt, Homo sapiens
aucacauucaccucccug

SEQ ID NO: 32938 - RNA, 18 nt, Homo sapiens
auucaaucuacugccuca

SEQ ID NO: 32939 - RNA, 22 nt, Homo sapiens
cagaagugggccgggcacaggg

SEQ ID NO: 32940 - RNA, 22 nt, Homo sapiens
acaaccagcuaagacacugcca

SEQ ID NO: 32941 - RNA, 23 nt, Homo sapiens
gcaaucagcuaacuacacugccu

SEQ ID NO: 32942 - RNA, 23 nt, Homo sapiens
aaaucagaaucacaccuggggga

SEQ ID NO: 32943 - RNA, 22 nt, Homo sapiens
accagcuaacaauacacugcca

SEQ ID NO: 32944 - RNA, 22 nt, Homo sapiens
gccagcuaacaauacacugccu

SEQ ID NO: 32945 - RNA, 22 nt, Homo sapiens
gaccucagcuaugacagcacuu

SEQ ID NO: 32946 - RNA, 22 nt, Homo sapiens
uuucaguuaucaaucugucaca

SEQ ID NO: 32947 - RNA, 24 nt, Homo sapiens
acgcagagcccgaaagcccccagu

SEQ ID NO: 32948 - RNA, 21 nt, Homo sapiens
cugcugggccacaacguggga

SEQ ID NO: 32949 - RNA, 21 nt, Homo sapiens
caucaccuuccuucuccucca

SEQ ID NO: 32950 - RNA, 20 nt, Homo sapiens
cccugcgccaucuccucuac

SEQ ID NO: 32951 - RNA, 21 nt, Homo sapiens
gaccaaucgccguccccgccg

SEQ ID NO: 32952 - RNA, 21 nt, Homo sapiens
gaccaaucgccguccccgccg

SEQ ID NO: 32953 - RNA, 21 nt, Homo sapiens
aaagugucagauacggugugg

SEQ ID NO: 32954 - RNA, 23 nt, Homo sapiens
gcgcccaauuaaugucuguugau

SEQ ID NO: 32955 - RNA, 22 nt, Homo sapiens
gcaaaaguaauugagauuuuug

SEQ ID NO: 32956 - RNA, 22 nt, Homo sapiens
gcggucccgcggcgccccgccu

SEQ ID NO: 32957 - RNA, 22 nt, Homo sapiens
gcggucccgcggcgccccgccu

SEQ ID NO: 32958 - RNA, 22 nt, Homo sapiens
ugcuguuagcccuagccccgca

SEQ ID NO: 32959 - RNA, 22 nt, Homo sapiens
ugcuguuagcccuagccccgca

SEQ ID NO: 32960 - RNA, 21 nt, Homo sapiens
caucaccuuccuucuccucca

SEQ ID NO: 32961 - RNA, 23 nt, Homo sapiens
gggagugaagacacggagccaga

SEQ ID NO: 32962 - RNA, 23 nt, Homo sapiens
aggaacagcagcagcccgggccg

SEQ ID NO: 32963 - RNA, 22 nt, Homo sapiens
agcugaguguaggauguuuaca

SEQ ID NO: 32964 - RNA, 23 nt, Homo sapiens
aaaucagaaucacaccuggggga

SEQ ID NO: 32965 - RNA, 22 nt, Homo sapiens
aagagggagacccaggcucgga

SEQ ID NO: 32966 - RNA, 24 nt, Homo sapiens
acgcagagcccgaaagcccccagu

SEQ ID NO: 32967 - RNA, 20 nt, Homo sapiens
uacugcuuccacagcucccc

SEQ ID NO: 32968 - RNA, 21 nt, Homo sapiens
cggcucggguggcggcgacgg

SEQ ID NO: 32969 - RNA, 22 nt, Homo sapiens
ucaggaacugccuuucucucca

SEQ ID NO: 32970 - RNA, 23 nt, Homo sapiens
cuaacugcacuagaugcaccuua

SEQ ID NO: 32971 - RNA, 21 nt, Homo sapiens
gaccaaucgccguccccgccg

SEQ ID NO: 32972 - RNA, 23 nt, Homo sapiens
aaaucagaaucacaccuggggga

SEQ ID NO: 32973 - RNA, 24 nt, Homo sapiens
acgcagagcccgaaagcccccagu

SEQ ID NO: 32974 - RNA, 24 nt, Homo sapiens
acgcgcaggccagagacccaggca

SEQ ID NO: 32975 - RNA, 23 nt, Homo sapiens
cuccagccccuccagggcuuccu

SEQ ID NO: 32976 - RNA, 22 nt, Homo sapiens
ugcuguuagcccuagccccgca

SEQ ID NO: 32977 - RNA, 23 nt, Homo sapiens
gcacaugugcacacagccgggug

SEQ ID NO: 32978 - RNA, 17 nt, Homo sapiens
gggagaggaggaggcga

SEQ ID NO: 32979 - RNA, 22 nt, Homo sapiens
cacgaccgacgccacgccgagu

SEQ ID NO: 32980 - RNA, 22 nt, Homo sapiens
ggagcccgcgccccgcgccgag

SEQ ID NO: 32981 - RNA, 22 nt, Homo sapiens
cacugguacaaggguugggaga

SEQ ID NO: 32982 - RNA, 22 nt, Homo sapiens
ucaggaacugccuuucucucca

SEQ ID NO: 32983 - RNA, 22 nt, Homo sapiens
agcccaaaaggagaauucuuug

SEQ ID NO: 32984 - RNA, 22 nt, Homo sapiens
agcccaaaaggagaauucuuug

SEQ ID NO: 32985 - RNA, 22 nt, Homo sapiens
aaucagucucauugcuuuauaa

SEQ ID NO: 32986 - RNA, 23 nt, Homo sapiens
agaggcaggcaugcgggcagaca

SEQ ID NO: 32987 - RNA, 22 nt, Homo sapiens
gguaaaacucgcaauuacuuuu

SEQ ID NO: 32988 - RNA, 22 nt, Homo sapiens
ggccaaaaccacaauuacuuuu

SEQ ID NO: 32989 - RNA, 22 nt, Homo sapiens
ggcaaaaaccgcaauuacuuuu

SEQ ID NO: 32990 - RNA, 22 nt, Homo sapiens
ggcaaaaaccacaauuacuuuu

SEQ ID NO: 32991 - RNA, 22 nt, Homo sapiens
gacaaaaaccgcgauuacuuuu

SEQ ID NO: 32992 - RNA, 22 nt, Homo sapiens
ggcaaaauccgcaauuacuuuu

SEQ ID NO: 32993 - RNA, 22 nt, Homo sapiens
accaaagaccgcaauuacuuuu

SEQ ID NO: 32994 - RNA, 21 nt, Homo sapiens
uuuuggugcauauuuacuuua

SEQ ID NO: 32995 - RNA, 19 nt, Homo sapiens
guccugaauuccgcagccu

SEQ ID NO: 32996 - RNA, 21 nt, Homo sapiens
cugaggagagaggaggugggg

SEQ ID NO: 32997 - RNA, 21 nt, Homo sapiens
gaccaaucgccguccccgccg

SEQ ID NO: 32998 - RNA, 22 nt, Homo sapiens
ucacgcgagccgaacgaacaaa

SEQ ID NO: 32999 - RNA, 22 nt, Homo sapiens
aguccagauucugugcccacca

SEQ ID NO: 33000 - RNA, 21 nt, Homo sapiens
ggacuauagaacuuucccccu

SEQ ID NO: 33001 - RNA, 22 nt, Homo sapiens
gcacauguucugcggcccacca

SEQ ID NO: 33002 - RNA, 22 nt, Homo sapiens
gcggucccgcggcgccccgccu

SEQ ID NO: 33003 - RNA, 23 nt, Homo sapiens
cuccagccccuccagggcuuccu

SEQ ID NO: 33004 - RNA, 23 nt, Homo sapiens
cacugugggcccucuccgcacca

SEQ ID NO: 33005 - RNA, 22 nt, Homo sapiens
ugcuguuagcccuagccccgca

SEQ ID NO: 33006 - RNA, 23 nt, Homo sapiens
ggaagccaucaagucgcugcagg

SEQ ID NO: 33007 - RNA, 20 nt, Homo sapiens
ggggggcgaggcagguguga

SEQ ID NO: 33008 - RNA, 21 nt, Homo sapiens
ucuccagaucagggcagucca

SEQ ID NO: 33009 - RNA, 24 nt, Homo sapiens
gaagucacucccaggcagcugcaa

SEQ ID NO: 33010 - RNA, 23 nt, Homo sapiens
cuaccugcacuguaagcacuuug

SEQ ID NO: 33011 - RNA, 22 nt, Homo sapiens
ucaggaacugccuuucucucca

SEQ ID NO: 33012 - RNA, 21 nt, Homo sapiens
aggcggcaggcacaggacugg

SEQ ID NO: 33013 - RNA, 22 nt, Homo sapiens
ucaacaucagucugauaagcua

SEQ ID NO: 33014 - RNA, 22 nt, Homo sapiens
aaagagguuaaccagguguguu

SEQ ID NO: 33015 - RNA, 22 nt, Homo sapiens
ugaauccuugaauagguguguu

SEQ ID NO: 33016 - RNA, 21 nt, Homo sapiens
gaccaagaaauagccuuucaa

SEQ ID NO: 33017 - RNA, 22 nt, Homo sapiens
caugauugccacgucugcagua

SEQ ID NO: 33018 - RNA, 21 nt, Homo sapiens
ugauugccacugucugcagua

SEQ ID NO: 33019 - RNA, 19 nt, Homo sapiens
gccucagaggcagcugcuu

SEQ ID NO: 33020 - RNA, 20 nt, Homo sapiens
aggggccucagccuccuggu

SEQ ID NO: 33021 - RNA, 22 nt, Homo sapiens
cuggagagacaaggggaagagg

SEQ ID NO: 33022 - RNA, 18 nt, Homo sapiens
cagcagccuccuucucaa

SEQ ID NO: 33023 - RNA, 22 nt, Homo sapiens
cacgaccgacgccacgccgagu

SEQ ID NO: 33024 - RNA, 22 nt, Homo sapiens
ggagcccgcgccccgcgccgag

SEQ ID NO: 33025 - RNA, 23 nt, Homo sapiens
gggagugaagacacggagccaga

SEQ ID NO: 33026 - RNA, 21 nt, Homo sapiens
acuagacugugagcuccucga

SEQ ID NO: 33027 - RNA, 22 nt, Homo sapiens
cucaauagacugugagcuccuu

SEQ ID NO: 33028 - RNA, 22 nt, Homo sapiens
uacagauggauaccgugcaauu

SEQ ID NO: 33029 - RNA, 22 nt, Homo sapiens
aagagggagacccaggcucgga

SEQ ID NO: 33030 - RNA, 22 nt, Homo sapiens
caagacacauuuggagagggac

SEQ ID NO: 33031 - RNA, 23 nt, Homo sapiens
cccagcuagauuguaagcuccuu

SEQ ID NO: 33032 - RNA, 21 nt, Homo sapiens
aagggucaguaagcacccgcg

SEQ ID NO: 33033 - RNA, 23 nt, Homo sapiens
gacguaguccuauucucugcugc

SEQ ID NO: 33034 - RNA, 22 nt, Homo sapiens
cacauggccaaaacagagaaga

SEQ ID NO: 33035 - RNA, 22 nt, Homo sapiens
cacaaguucggaucuacggguu

SEQ ID NO: 33036 - RNA, 22 nt, Homo sapiens
cacaaguucggaucuacggguu

SEQ ID NO: 33037 - RNA, 22 nt, Homo sapiens
acacacccacgcgagccggaaa

SEQ ID NO: 33038 - RNA, 21 nt, Homo sapiens
acccaguagccagauguagcu

SEQ ID NO: 33039 - RNA, 18 nt, Homo sapiens
acccucugaaaggaagca

SEQ ID NO: 33040 - RNA, 22 nt, Homo sapiens
aaagugcuucuuaccuccagau

SEQ ID NO: 33041 - RNA, 22 nt, Homo sapiens
uccagcaaagggaagcgcuuuc

SEQ ID NO: 33042 - RNA, 22 nt, Homo sapiens
accucuaaaggggagcgcuuug

SEQ ID NO: 33043 - RNA, 23 nt, Homo sapiens
acacucuaaagagaagcgcuuug

SEQ ID NO: 33044 - RNA, 21 nt, Homo sapiens
gcuccaaagggaagcgcuuug

SEQ ID NO: 33045 - RNA, 21 nt, Homo sapiens
ccucuaaagagaagcgcuuuc

SEQ ID NO: 33046 - RNA, 23 nt, Homo sapiens
cuccagccccuccagggcuuccu

SEQ ID NO: 33047 - RNA, 23 nt, Homo sapiens
ucauacagcuagauaaccaaaga

SEQ ID NO: 33048 - RNA, 24 nt, Homo sapiens
cacccccagagccucagcucccca

SEQ ID NO: 33049 - RNA, 17 nt, Homo sapiens
gacagccucucccccac

SEQ ID NO: 33050 - RNA, 22 nt, Homo sapiens
cacgaccgacgccacgccgagu

SEQ ID NO: 33051 - RNA, 21 nt, Homo sapiens
gaccaaucgccguccccgccg

SEQ ID NO: 33052 - RNA, 21 nt, Homo sapiens
acaggauugagggggggcccu

SEQ ID NO: 33053 - RNA, 23 nt, Homo sapiens
aaaucagaaucacaccuggggga

SEQ ID NO: 33054 - RNA, 22 nt, Homo sapiens
aucgggaggggacugagccuga

SEQ ID NO: 33055 - RNA, 20 nt, Homo sapiens
gaaagggcuucccuuuguag

SEQ ID NO: 33056 - RNA, 22 nt, Homo sapiens
gagaaagugcuucccuuuguag

SEQ ID NO: 33057 - RNA, 21 nt, Homo sapiens
agagcucauccauaguuguca

SEQ ID NO: 33058 - RNA, 21 nt, Homo sapiens
ggacuauagaacuuucccccu

SEQ ID NO: 33059 - RNA, 24 nt, Homo sapiens
acgcagagcccgaaagcccccagu

SEQ ID NO: 33060 - RNA, 24 nt, Homo sapiens
acgcgcaggccagagacccaggca

SEQ ID NO: 33061 - RNA, 22 nt, Homo sapiens
gcggucccgcggcgccccgccu

SEQ ID NO: 33062 - RNA, 21 nt, Homo sapiens
aggagacucacaaguuccugc

SEQ ID NO: 33063 - RNA, 21 nt, Homo sapiens
gagcugcauccuggcuccggg

SEQ ID NO: 33064 - RNA, 23 nt, Homo sapiens
acacagcucuuccauaucuccag

SEQ ID NO: 33065 - RNA, 21 nt, Homo sapiens
acuagacugugagcuccucga

SEQ ID NO: 33066 - RNA, 21 nt, Homo sapiens
gaccaaucgccguccccgccg

SEQ ID NO: 33067 - RNA, 22 nt, Homo sapiens
acaucaucgcauauugacacaa

SEQ ID NO: 33068 - RNA, 22 nt, Homo sapiens
acaguggucaucgagugacaca

SEQ ID NO: 33069 - RNA, 25 nt, Homo sapiens
acggagcugucccaacaccaccccu

SEQ ID NO: 33070 - RNA, 22 nt, Homo sapiens
gauccgagcaccggggaccccc

SEQ ID NO: 33071 - RNA, 20 nt, Homo sapiens
auuucuauaucuaucuccau

SEQ ID NO: 33072 - RNA, 22 nt, Homo sapiens
gcggucccgcggcgccccgccu

SEQ ID NO: 33073 - RNA, 20 nt, Homo sapiens
cuggggaaaaggguggcacg

SEQ ID NO: 33074 - RNA, 18 nt, Homo sapiens
cccccaccaccacgcccg

SEQ ID NO: 33075 - RNA, 21 nt, Homo sapiens
aaagagaccgguucacuguga

SEQ ID NO: 33076 - RNA, 22 nt, Homo sapiens
ccaucuuuaccagacaguguua

SEQ ID NO: 33077 - RNA, 21 nt, Homo sapiens
cggggugcacgggcggagggc

SEQ ID NO: 33078 - RNA, 23 nt, Homo sapiens
gggagugaagacacggagccaga

SEQ ID NO: 33079 - RNA, 22 nt, Homo sapiens
acaucguuaccagacaguguua

SEQ ID NO: 33080 - RNA, 22 nt, Homo sapiens
cucaauagacugugagcuccuu

SEQ ID NO: 33081 - RNA, 22 nt, Homo sapiens
agcugaguguaggauguuuaca

SEQ ID NO: 33082 - RNA, 23 nt, Homo sapiens
aaagucucgcucucugccccuca

SEQ ID NO: 33083 - RNA, 22 nt, Homo sapiens
aggaaaccagcaaguguugacg

SEQ ID NO: 33084 - RNA, 22 nt, Homo sapiens
gcaaaagaaacugugguuuuug

SEQ ID NO: 33085 - RNA, 23 nt, Homo sapiens
cccagcuagauuguaagcuccuu

SEQ ID NO: 33086 - RNA, 21 nt, Homo sapiens
caucaccuuccuucuccucca

SEQ ID NO: 33087 - RNA, 22 nt, Homo sapiens
ccaucuuuaccagacaguguua

SEQ ID NO: 33088 - RNA, 22 nt, Homo sapiens
acaucguuaccagacaguguua

SEQ ID NO: 33089 - RNA, 22 nt, Homo sapiens
ggcaaaauccgcaauuacuuuu

SEQ ID NO: 33090 - RNA, 21 nt, Homo sapiens
aacggaaccacuagugacuug

SEQ ID NO: 33091 - RNA, 21 nt, Homo sapiens
aacggaaccacuagugacuug

SEQ ID NO: 33092 - RNA, 20 nt, Homo sapiens
uaugaacaauuucuaggaau

SEQ ID NO: 33093 - RNA, 23 nt, Homo sapiens
augcaaaguugcucggguaaccu

SEQ ID NO: 33094 - RNA, 22 nt, Homo sapiens
acacucuaaagggaaccauuuu

SEQ ID NO: 33095 - RNA, 22 nt, Homo sapiens
acacucuaaagggaaccauuuu

SEQ ID NO: 33096 - RNA, 21 nt, Homo sapiens
caaaaaccacaaauaccuuug

SEQ ID NO: 33097 - RNA, 22 nt, Homo sapiens
uggggacccucccugaaccaag

SEQ ID NO: 33098 - RNA, 22 nt, Homo sapiens
acacacccacgcgagccggaaa

SEQ ID NO: 33099 - RNA, 22 nt, Homo sapiens
cagaagugggccgggcacaggg

SEQ ID NO: 33100 - RNA, 21 nt, Homo sapiens
ggaaaucccuggcaaugugau

SEQ ID NO: 33101 - RNA, 21 nt, Homo sapiens
gguaaucccuggcaaugugau

SEQ ID NO: 33102 - RNA, 22 nt, Homo sapiens
cuguuccugcugaacugagcca

SEQ ID NO: 33103 - RNA, 21 nt, Homo sapiens
aucugcacugucagcacuuua

SEQ ID NO: 33104 - RNA, 23 nt, Homo sapiens
gcuuugacaauaucauugcacug

SEQ ID NO: 33105 - RNA, 23 nt, Homo sapiens
acugaggggccucagaccgagcu

SEQ ID NO: 33106 - RNA, 22 nt, Homo sapiens
aagagggagacccaggcucgga

SEQ ID NO: 33107 - RNA, 21 nt, Homo sapiens
ccccucccagccucccugcca

SEQ ID NO: 33108 - RNA, 22 nt, Homo sapiens
cugggggcggcacaggggcuca

SEQ ID NO: 33109 - RNA, 23 nt, Homo sapiens
ucacauaggaauaaaaagccaua

SEQ ID NO: 33110 - RNA, 23 nt, Homo sapiens
gggagugaagacacggagccaga

SEQ ID NO: 33111 - RNA, 22 nt, Homo sapiens
cggugagcacccggccccugcg

SEQ ID NO: 33112 - RNA, 22 nt, Homo sapiens
uggcagcagcggagggggcaga

SEQ ID NO: 33113 - RNA, 20 nt, Homo sapiens
ccagcagcaccuggggcagu

SEQ ID NO: 33114 - RNA, 23 nt, Homo sapiens
aaaucagaaucacaccuggggga

SEQ ID NO: 33115 - RNA, 23 nt, Homo sapiens
aaagucucgcucucugccccuca

SEQ ID NO: 33116 - RNA, 21 nt, Homo sapiens
auccuguacugagcugccccg

SEQ ID NO: 33117 - RNA, 20 nt, Homo sapiens
acaaugagaacccauggucu

SEQ ID NO: 33118 - RNA, 24 nt, Homo sapiens
acgcagagcccgaaagcccccagu

SEQ ID NO: 33119 - RNA, 23 nt, Homo sapiens
acaacaaaaucacuagucuucca

SEQ ID NO: 33120 - RNA, 20 nt, Homo sapiens
uacugcuuccacagcucccc

SEQ ID NO: 33121 - RNA, 17 nt, Homo sapiens
gggagaggaggaggcga

SEQ ID NO: 33122 - RNA, 22 nt, Homo sapiens
ucagaccgagacaagugcaaug

SEQ ID NO: 33123 - RNA, 21 nt, Homo sapiens
cccgaggagccgggcaggcuu

SEQ ID NO: 33124 - RNA, 21 nt, Homo sapiens
auaauggagaccaggccacga

SEQ ID NO: 33125 - RNA, 22 nt, Homo sapiens
caaacaccauugucacacucca

SEQ ID NO: 33126 - RNA, 18 nt, Homo sapiens
cccccaccaccacgcccg

SEQ ID NO: 33127 - RNA, 18 nt, Homo sapiens
cccccaccaccacgcccg

SEQ ID NO: 33128 - RNA, 23 nt, Homo sapiens
gggagugaagacacggagccaga

SEQ ID NO: 33129 - RNA, 21 nt, Homo sapiens
gaccaaucgccguccccgccg

SEQ ID NO: 33130 - RNA, 21 nt, Homo sapiens
aggcggcaggcacaggacugg

SEQ ID NO: 33131 - RNA, 22 nt, Homo sapiens
ugagccacugugccuggccuga

SEQ ID NO: 33132 - RNA, 21 nt, Homo sapiens
agcuaugccagcaucuugccu

SEQ ID NO: 33133 - RNA, 23 nt, Homo sapiens
cggcucugucgucgaggcgcuca

SEQ ID NO: 33134 - RNA, 21 nt, Homo sapiens
ugcaugacggccugcaagaca

SEQ ID NO: 33135 - RNA, 22 nt, Homo sapiens
gcggucccgcggcgccccgccu

SEQ ID NO: 33136 - RNA, 22 nt, Homo sapiens
ugcuguuagcccuagccccgca

SEQ ID NO: 33137 - RNA, 18 nt, Homo sapiens
auucaaucuacugccuca

SEQ ID NO: 33138 - RNA, 22 nt, Homo sapiens
aaucagucucauugcuuuauaa

SEQ ID NO: 33139 - RNA, 21 nt, Homo sapiens
guccugagagcgcugccuccu

SEQ ID NO: 33140 - RNA, 21 nt, Homo sapiens
caucaccuuccuucuccucca

SEQ ID NO: 33141 - RNA, 20 nt, Homo sapiens
cccugcgccaucuccucuac

SEQ ID NO: 33142 - RNA, 22 nt, Homo sapiens
cacaaguucggaucuacggguu

SEQ ID NO: 33143 - RNA, 23 nt, Homo sapiens
ggaagccaucaagucgcugcagg

SEQ ID NO: 33144 - RNA, 17 nt, Homo sapiens
gggagaggaggaggcga

SEQ ID NO: 33145 - RNA, 21 nt, Homo sapiens
gaccaaucgccguccccgccg

SEQ ID NO: 33146 - RNA, 22 nt, Homo sapiens
cggugagcacccggccccugcg

SEQ ID NO: 33147 - RNA, 22 nt, Homo sapiens
auaaggauuuuuaggggcauua

SEQ ID NO: 33148 - RNA, 22 nt, Homo sapiens
gccaccuucaaaugggaagucu

SEQ ID NO: 33149 - RNA, 22 nt, Homo sapiens
ccucaggcacggccgggccacc

SEQ ID NO: 33150 - RNA, 22 nt, Homo sapiens
cacaagaucggaucuacggguu

SEQ ID NO: 33151 - RNA, 22 nt, Homo sapiens
cgcaaggucgguucuacgggug

SEQ ID NO: 33152 - RNA, 23 nt, Homo sapiens
cacaaauucggaucuacagggua

SEQ ID NO: 33153 - RNA, 23 nt, Homo sapiens
cacaaauucgguucuacagggua

SEQ ID NO: 33154 - RNA, 22 nt, Homo sapiens
agaaagcgcuuuccuuuguaga

SEQ ID NO: 33155 - RNA, 23 nt, Homo sapiens
gaaacccagcagacaauguagcu

SEQ ID NO: 33156 - RNA, 23 nt, Homo sapiens
cgugagcuccuggaggacaggga

SEQ ID NO: 33157 - RNA, 22 nt, Homo sapiens
acaaaaguugccuuugugugau

SEQ ID NO: 33158 - RNA, 22 nt, Homo sapiens
gccagcuaacaauacacugccu

SEQ ID NO: 33159 - RNA, 21 nt, Homo sapiens
cucacucagauggccaacuca

SEQ ID NO: 33160 - RNA, 20 nt, Homo sapiens
agagaugagagaaacacccu

SEQ ID NO: 33161 - RNA, 20 nt, Homo sapiens
aggggccucagccuccuggu

SEQ ID NO: 33162 - RNA, 23 nt, Homo sapiens
cccagcuagauuguaagcuccuu

SEQ ID NO: 33163 - RNA, 23 nt, Homo sapiens
gacguaguccuauucucugcugc

SEQ ID NO: 33164 - RNA, 21 nt, Homo sapiens
agaaguagaccauguguccua

SEQ ID NO: 33165 - RNA, 22 nt, Homo sapiens
gaggcucagaauggcucaggag

SEQ ID NO: 33166 - RNA, 22 nt, Homo sapiens
ugaagaagggggggaagggcgu

SEQ ID NO: 33167 - RNA, 23 nt, Homo sapiens
gggagugaagacacggagccaga

SEQ ID NO: 33168 - RNA, 22 nt, Homo sapiens
cuguuccugcugaacugagcca

SEQ ID NO: 33169 - RNA, 23 nt, Homo sapiens
aaagucucgcucucugccccuca

SEQ ID NO: 33170 - RNA, 22 nt, Homo sapiens
acuucaaggaucuuaaacuuug

SEQ ID NO: 33171 - RNA, 22 nt, Homo sapiens
acuggguucaccuuuaagggca

SEQ ID NO: 33172 - RNA, 22 nt, Homo sapiens
caaacaccauugucacacucca

SEQ ID NO: 33173 - RNA, 18 nt, Homo sapiens
ugguggcagaggugggau

SEQ ID NO: 33174 - RNA, 18 nt, Homo sapiens
ugguggcagaggugggau

SEQ ID NO: 33175 - RNA, 21 nt, Homo sapiens
uuuagcauaaguaugucccaa

SEQ ID NO: 33176 - RNA, 22 nt, Homo sapiens
uucacacugcaugcucugggua

SEQ ID NO: 33177 - RNA, 22 nt, Homo sapiens
uggcagcagcggagggggcaga

SEQ ID NO: 33178 - RNA, 20 nt, Homo sapiens
ccagcagcaccuggggcagu

SEQ ID NO: 33179 - RNA, 21 nt, Homo sapiens
acaggccaucuguguuauauu

SEQ ID NO: 33180 - RNA, 23 nt, Homo sapiens
ucaacgggagugaucgugucauu

SEQ ID NO: 33181 - RNA, 21 nt, Homo sapiens
auccuguacugagcugccccg

SEQ ID NO: 33182 - RNA, 22 nt, Homo sapiens
ugcaagccuugggugugggagg

SEQ ID NO: 33183 - RNA, 25 nt, Homo sapiens
acggagcugucccaacaccaccccu

SEQ ID NO: 33184 - RNA, 25 nt, Homo sapiens
acggagcugucccaacaccaccccu

SEQ ID NO: 33185 - RNA, 21 nt, Homo sapiens
auguaggccuuuagaucacuu

SEQ ID NO: 33186 - RNA, 22 nt, Homo sapiens
ucaucucgcccgcaaagaccca

SEQ ID NO: 33187 - RNA, 21 nt, Homo sapiens
gagcuacagugcuucaucuca

SEQ ID NO: 33188 - RNA, 21 nt, Homo sapiens
cguacgcuauacggucuacua

SEQ ID NO: 33189 - RNA, 22 nt, Homo sapiens
acaaaauccacaauuacuuuug

SEQ ID NO: 33190 - RNA, 22 nt, Homo sapiens
cacauggccaaaacagagaaga

SEQ ID NO: 33191 - RNA, 22 nt, Homo sapiens
gacucgaaccacugauccagca

SEQ ID NO: 33192 - RNA, 22 nt, Homo sapiens
ccccucuggucaaccagucaca

SEQ ID NO: 33193 - RNA, 22 nt, Homo sapiens
agugaauucuaccagugccaua

SEQ ID NO: 33194 - RNA, 21 nt, Homo sapiens
uucuaggauaggcccaggggc

SEQ ID NO: 33195 - RNA, 23 nt, Homo sapiens
ucaacgggagugaucgugucauu

SEQ ID NO: 33196 - RNA, 22 nt, Homo sapiens
cgauguaguccaaaggcacaua

SEQ ID NO: 33197 - RNA, 22 nt, Homo sapiens
aaagacguggagaaauuagaau

SEQ ID NO: 33198 - RNA, 23 nt, Homo sapiens
aaucgcgguuuauaccaaaugaa

SEQ ID NO: 33199 - RNA, 22 nt, Homo sapiens
ccucuaguaaauaugucagcau

SEQ ID NO: 33200 - RNA, 21 nt, Homo sapiens
gaaggaagugagugcagccac

SEQ ID NO: 33201 - RNA, 23 nt, Homo sapiens
agaaaccaugggguaugagcaga

SEQ ID NO: 33202 - RNA, 22 nt, Homo sapiens
ucggucccucgggccagggcag

SEQ ID NO: 33203 - RNA, 22 nt, Homo sapiens
gggagaggucucccugcgcaca

SEQ ID NO: 33204 - RNA, 21 nt, Homo sapiens
cuggaggacggcaacagucag

SEQ ID NO: 33205 - RNA, 20 nt, Homo sapiens
cucaaagcaaacccugcaga

SEQ ID NO: 33206 - RNA, 24 nt, Homo sapiens
acugcaggcuccagcuuccaggcu

SEQ ID NO: 33207 - RNA, 24 nt, Homo sapiens
acugcaggcuccagcuuccaggcu

SEQ ID NO: 33208 - RNA, 17 nt, Homo sapiens
gacagccucucccccac

SEQ ID NO: 33209 - RNA, 21 nt, Homo sapiens
ccgugguucuacccuguggua

SEQ ID NO: 33210 - RNA, 22 nt, Homo sapiens
aacccauggaauucaguucuca

SEQ ID NO: 33211 - RNA, 22 nt, Homo sapiens
agccuauggaauucaguucuca

SEQ ID NO: 33212 - RNA, 23 nt, Homo sapiens
cuaccugcacuguaagcacuuug

SEQ ID NO: 33213 - RNA, 20 nt, Homo sapiens
cccgccgcgucgcccugggg

SEQ ID NO: 33214 - RNA, 21 nt, Homo sapiens
uucuaggauaggcccaggggc

SEQ ID NO: 33215 - RNA, 23 nt, Homo sapiens
aaaucagaaucacaccuggggga

SEQ ID NO: 33216 - RNA, 21 nt, Homo sapiens
ccuucugacuccaaguccagu

SEQ ID NO: 33217 - RNA, 22 nt, Homo sapiens
gccuucugacccuaaguccagu

SEQ ID NO: 33218 - RNA, 22 nt, Homo sapiens
caugauugccacgucugcagua

SEQ ID NO: 33219 - RNA, 21 nt, Homo sapiens
ugauugccacugucugcagua

SEQ ID NO: 33220 - RNA, 24 nt, Homo sapiens
acgcagagcccgaaagcccccagu

SEQ ID NO: 33221 - RNA, 23 nt, Homo sapiens
uguaggcuggggauaaaugaaua

SEQ ID NO: 33222 - RNA, 20 nt, Homo sapiens
ugucuccacagggcucuuua

SEQ ID NO: 33223 - RNA, 21 nt, Homo sapiens
gcaagcccagaccgcaaaaag

SEQ ID NO: 33224 - RNA, 22 nt, Homo sapiens
cacgaccgacgccacgccgagu

SEQ ID NO: 33225 - RNA, 22 nt, Homo sapiens
augcccuuucaucauugcacug

SEQ ID NO: 33226 - RNA, 22 nt, Homo sapiens
uggcagcagcggagggggcaga

SEQ ID NO: 33227 - RNA, 23 nt, Homo sapiens
cuacuaaaacauggaagcacuua

SEQ ID NO: 33228 - RNA, 23 nt, Homo sapiens
acacucaaacauggaagcacuua

SEQ ID NO: 33229 - RNA, 20 nt, Homo sapiens
ccagcagcaccuggggcagu

SEQ ID NO: 33230 - RNA, 23 nt, Homo sapiens
cggcucugucgucgaggcgcuca

SEQ ID NO: 33231 - RNA, 21 nt, Homo sapiens
auccuguacugagcugccccg

SEQ ID NO: 33232 - RNA, 22 nt, Homo sapiens
ucucacccagggacaaaggauu

SEQ ID NO: 33233 - RNA, 23 nt, Homo sapiens
acccucuauagggaagcgcguuc

SEQ ID NO: 33234 - RNA, 21 nt, Homo sapiens
gaaggaagugagugcagccac

SEQ ID NO: 33235 - RNA, 22 nt, Homo sapiens
cagaagugggccgggcacaggg

SEQ ID NO: 33236 - RNA, 25 nt, Homo sapiens
acggagcugucccaacaccaccccu

SEQ ID NO: 33237 - RNA, 21 nt, Homo sapiens
gaaggaagugagugcagccac

SEQ ID NO: 33238 - RNA, 24 nt, Homo sapiens
gaagucacucccaggcagcugcaa

SEQ ID NO: 33239 - RNA, 21 nt, Homo sapiens
gggcaucugggacgcgcagga

SEQ ID NO: 33240 - RNA, 22 nt, Homo sapiens
uggcagcagcggagggggcaga

SEQ ID NO: 33241 - RNA, 22 nt, Homo sapiens
gcgaacgcgccacggaccaccu

SEQ ID NO: 33242 - RNA, 20 nt, Homo sapiens
ccagcagcaccuggggcagu

SEQ ID NO: 33243 - RNA, 21 nt, Homo sapiens
auccuguacugagcugccccg

SEQ ID NO: 33244 - RNA, 19 nt, Homo sapiens
auuuugguacagcagcuca

SEQ ID NO: 33245 - RNA, 20 nt, Homo sapiens
ugggccaccgccgagcggac

SEQ ID NO: 33246 - RNA, 22 nt, Homo sapiens
uauccacuacaccccgcugccu

SEQ ID NO: 33247 - RNA, 22 nt, Homo sapiens
ggcagagagucagagcgcggau

SEQ ID NO: 33248 - RNA, 20 nt, Homo sapiens
gcagcuguccgcccagacac

SEQ ID NO: 33249 - RNA, 21 nt, Homo sapiens
aagggucaguaagcacccgcg

SEQ ID NO: 33250 - RNA, 22 nt, Homo sapiens
caaacaccauugucacacucca

SEQ ID NO: 33251 - RNA, 22 nt, Homo sapiens
ccagaacugaguccacagggca

SEQ ID NO: 33252 - RNA, 23 nt, Homo sapiens
gggagugaagacacggagccaga

SEQ ID NO: 33253 - RNA, 22 nt, Homo sapiens
acccuuaucaguucuccgucca

SEQ ID NO: 33254 - RNA, 20 nt, Homo sapiens
cccgccgcgucgcccugggg

SEQ ID NO: 33255 - RNA, 23 nt, Homo sapiens
cggcucugucgucgaggcgcuca

SEQ ID NO: 33256 - RNA, 23 nt, Homo sapiens
cgugagcuccuggaggacaggga

SEQ ID NO: 33257 - RNA, 18 nt, Homo sapiens
acccucugaaaggaagca

SEQ ID NO: 33258 - RNA, 22 nt, Homo sapiens
aaagugcuucuuaccuccagau

SEQ ID NO: 33259 - RNA, 17 nt, Homo sapiens
gacagccucucccccac

SEQ ID NO: 33260 - RNA, 17 nt, Homo sapiens
ggguggcagcgguggga

SEQ ID NO: 33261 - RNA, 18 nt, Homo sapiens
auucaaucuacugccuca

SEQ ID NO: 33262 - RNA, 22 nt, Homo sapiens
agcgggacuuugagggccaguu

SEQ ID NO: 33263 - RNA, 22 nt, Homo sapiens
auggcaguggaguuagugauug

SEQ ID NO: 33264 - RNA, 21 nt, Homo sapiens
ggacuauagaacuuucccccu

SEQ ID NO: 33265 - RNA, 20 nt, Homo sapiens
aggggccucagccuccuggu

SEQ ID NO: 33266 - RNA, 23 nt, Homo sapiens
cuccagccccuccagggcuuccu

SEQ ID NO: 33267 - RNA, 20 nt, Homo sapiens
uacugcuuccacagcucccc

SEQ ID NO: 33268 - RNA, 23 nt, Homo sapiens
gcacaugugcacacagccgggug

SEQ ID NO: 33269 - RNA, 22 nt, Homo sapiens
auccuucuacaaauucacccau

SEQ ID NO: 33270 - RNA, 22 nt, Homo sapiens
uagcagaagcauuuccgcacac

SEQ ID NO: 33271 - RNA, 22 nt, Homo sapiens
ccggcugcaacacaagacacga

SEQ ID NO: 33272 - RNA, 21 nt, Homo sapiens
gaccaaucgccguccccgccg

SEQ ID NO: 33273 - RNA, 22 nt, Homo sapiens
cucaauagacugugagcuccuu

SEQ ID NO: 33274 - RNA, 22 nt, Homo sapiens
cucggggcagcucaguacagga

SEQ ID NO: 33275 - RNA, 22 nt, Homo sapiens
gcggucccgcggcgccccgccu

SEQ ID NO: 33276 - RNA, 23 nt, Homo sapiens
cccagcuagauuguaagcuccuu

SEQ ID NO: 33277 - RNA, 23 nt, Homo sapiens
gcacaugugcacacagccgggug

SEQ ID NO: 33278 - RNA, 19 nt, Homo sapiens
ccaccucccgaguccucac

SEQ ID NO: 33279 - RNA, 22 nt, Homo sapiens
cugggggcggcacaggggcuca

SEQ ID NO: 33280 - RNA, 21 nt, Homo sapiens
auguaggccuuuagaucacuu

SEQ ID NO: 33281 - RNA, 22 nt, Homo sapiens
ccagaacugaguccacagggca

SEQ ID NO: 33282 - RNA, 20 nt, Homo sapiens
gcagaagcauuuccacacac

SEQ ID NO: 33283 - RNA, 23 nt, Homo sapiens
gggagugaagacacggagccaga

SEQ ID NO: 33284 - RNA, 22 nt, Homo sapiens
ugagccacugugccuggccuga

SEQ ID NO: 33285 - RNA, 21 nt, Homo sapiens
ggaaaucccuggcaaugugau

SEQ ID NO: 33286 - RNA, 21 nt, Homo sapiens
gguaaucccuggcaaugugau

SEQ ID NO: 33287 - RNA, 21 nt, Homo sapiens
acaggauugagggggggcccu

SEQ ID NO: 33288 - RNA, 21 nt, Homo sapiens
acaggauugagggggggcccu

SEQ ID NO: 33289 - RNA, 23 nt, Homo sapiens
aaagucucgcucucugccccuca

SEQ ID NO: 33290 - RNA, 22 nt, Homo sapiens
uauggaugcaaaaugaucccaa

SEQ ID NO: 33291 - RNA, 22 nt, Homo sapiens
cagcauggaguccuccagguug

SEQ ID NO: 33292 - RNA, 22 nt, Homo sapiens
aggaaaccagcaaguguugacg

SEQ ID NO: 33293 - RNA, 20 nt, Homo sapiens
aggggccucagccuccuggu

SEQ ID NO: 33294 - RNA, 23 nt, Homo sapiens
aaccaagaccccggagaucccag

SEQ ID NO: 33295 - RNA, 22 nt, Homo sapiens
ugaagaagggggggaagggcgu

SEQ ID NO: 33296 - RNA, 22 nt, Homo sapiens
aacaacacuugaccacauccug

SEQ ID NO: 33297 - RNA, 18 nt, Homo sapiens
aucacauucaccucccug

SEQ ID NO: 33298 - RNA, 21 nt, Homo sapiens
gaccaaucgccguccccgccg

SEQ ID NO: 33299 - RNA, 19 nt, Homo sapiens
guccugaauuccgcagccu

SEQ ID NO: 33300 - RNA, 21 nt, Homo sapiens
gaaggaagugagugcagccac

SEQ ID NO: 33301 - RNA, 22 nt, Homo sapiens
gcggucccgcggcgccccgccu

SEQ ID NO: 33302 - RNA, 22 nt, Homo sapiens
agcucagaacccagaggucuca

SEQ ID NO: 33303 - RNA, 22 nt, Homo sapiens
agacaacaaugccaaccucaca

SEQ ID NO: 33304 - RNA, 18 nt, Homo sapiens
auucaaucuacugccuca

SEQ ID NO: 33305 - RNA, 21 nt, Homo sapiens
gaccaaucgccguccccgccg

SEQ ID NO: 33306 - RNA, 22 nt, Homo sapiens
uggcagcagcggagggggcaga

SEQ ID NO: 33307 - RNA, 20 nt, Homo sapiens
cccgccgcgucgcccugggg

SEQ ID NO: 33308 - RNA, 23 nt, Homo sapiens
cagcugcuuuugggauuccguug

SEQ ID NO: 33309 - RNA, 20 nt, Homo sapiens
ccagcagcaccuggggcagu

SEQ ID NO: 33310 - RNA, 22 nt, Homo sapiens
acaaccagcuaagacacugcca

SEQ ID NO: 33311 - RNA, 22 nt, Homo sapiens
auggcaguggaguuagugauug

SEQ ID NO: 33312 - RNA, 23 nt, Homo sapiens
gcaaucagcuaacuacacugccu

SEQ ID NO: 33313 - RNA, 22 nt, Homo sapiens
accagcuaacaauacacugcca

SEQ ID NO: 33314 - RNA, 22 nt, Homo sapiens
gccagcuaacaauacacugccu

SEQ ID NO: 33315 - RNA, 21 nt, Homo sapiens
auccuguacugagcugccccg

SEQ ID NO: 33316 - RNA, 22 nt, Homo sapiens
ccucauggaaggguuccccacu

SEQ ID NO: 33317 - RNA, 21 nt, Homo sapiens
guccugagagcgcugccuccu

SEQ ID NO: 33318 - RNA, 22 nt, Homo sapiens
gcggucccgcggcgccccgccu

SEQ ID NO: 33319 - RNA, 22 nt, Homo sapiens
ugcuguuagcccuagccccgca

SEQ ID NO: 33320 - RNA, 21 nt, Homo sapiens
ggggagcgggggcccugccuu

SEQ ID NO: 33321 - RNA, 21 nt, Homo sapiens
ccaaccaaugaaagaaugcuu

SEQ ID NO: 33322 - RNA, 20 nt, Homo sapiens
ggcauucaccgcgugccuua

SEQ ID NO: 33323 - RNA, 18 nt, Homo sapiens
cagcagccuccuucucaa

SEQ ID NO: 33324 - RNA, 21 nt, Homo sapiens
acaugguuagaucaagcacaa

SEQ ID NO: 33325 - RNA, 22 nt, Homo sapiens
cuuccagucgaggauguuuaca

SEQ ID NO: 33326 - RNA, 22 nt, Homo sapiens
cuuccagucggggauguuuaca

SEQ ID NO: 33327 - RNA, 22 nt, Homo sapiens
cuuccagucaaggauguuuaca

SEQ ID NO: 33328 - RNA, 22 nt, Homo sapiens
ggaucccugggaccauaccuag

SEQ ID NO: 33329 - RNA, 20 nt, Homo sapiens
gcaaugcaacagcaaugcac

SEQ ID NO: 33330 - RNA, 22 nt, Homo sapiens
agggguucaccgagcaacauuc

SEQ ID NO: 33331 - RNA, 21 nt, Homo sapiens
ucuacucagaagggugccuua

SEQ ID NO: 33332 - RNA, 22 nt, Homo sapiens
aacgcuccaaaagaaggcacuc

SEQ ID NO: 33333 - RNA, 20 nt, Homo sapiens
gaaagggcuucccuuugcag

SEQ ID NO: 33334 - RNA, 22 nt, Homo sapiens
aacacucuaaaaggaggcacuu

SEQ ID NO: 33335 - RNA, 20 nt, Homo sapiens
gaaagggcuucccuuugcag

SEQ ID NO: 33336 - RNA, 22 nt, Homo sapiens
gaacuugcuaaaaaugcagaau

SEQ ID NO: 33337 - RNA, 21 nt, Homo sapiens
agguaagcgcuguugcuagcc

SEQ ID NO: 33338 - RNA, 21 nt, Homo sapiens
cuagggaagaacagugagcaa

SEQ ID NO: 33339 - RNA, 18 nt, Homo sapiens
cccccaccaccacgcccg

SEQ ID NO: 33340 - RNA, 21 nt, Homo sapiens
aaagagaccgguucacuguga

SEQ ID NO: 33341 - RNA, 20 nt, Homo sapiens
gcagaagcauuuccacacac

SEQ ID NO: 33342 - RNA, 23 nt, Homo sapiens
gggagugaagacacggagccaga

SEQ ID NO: 33343 - RNA, 22 nt, Homo sapiens
uguaaaccaugaugugcugcua

SEQ ID NO: 33344 - RNA, 20 nt, Homo sapiens
cccgccgcgucgcccugggg

SEQ ID NO: 33345 - RNA, 22 nt, Homo sapiens
uccacauggaguugcuguuaca

SEQ ID NO: 33346 - RNA, 22 nt, Homo sapiens
acugccugucugugccugcugu

SEQ ID NO: 33347 - RNA, 22 nt, Homo sapiens
agcugaguguaggauguuuaca

SEQ ID NO: 33348 - RNA, 21 nt, Homo sapiens
uucuaggauaggcccaggggc

SEQ ID NO: 33349 - RNA, 22 nt, Homo sapiens
accagguuccaccccagcaggc

SEQ ID NO: 33350 - RNA, 23 nt, Homo sapiens
aaagucucgcucucugccccuca

SEQ ID NO: 33351 - RNA, 22 nt, Homo sapiens
cacaaguucggaucuacggguu

SEQ ID NO: 33352 - RNA, 21 nt, Homo sapiens
ccccucccagccucccugcca

SEQ ID NO: 33353 - RNA, 20 nt, Homo sapiens
cugcgggaggacagggcuca

SEQ ID NO: 33354 - RNA, 21 nt, Homo sapiens
agcgccuuuggcagcuagagu

SEQ ID NO: 33355 - RNA, 21 nt, Homo sapiens
cggggugcacgggcggagggc

SEQ ID NO: 33356 - RNA, 23 nt, Homo sapiens
aggaacagcagcagcccgggccg

SEQ ID NO: 33357 - RNA, 22 nt, Homo sapiens
cggugagcacccggccccugcg

SEQ ID NO: 33358 - RNA, 22 nt, Homo sapiens
ggagagccuccacccaacccuc

SEQ ID NO: 33359 - RNA, 21 nt, Homo sapiens
acaggauugagggggggcccu

SEQ ID NO: 33360 - RNA, 18 nt, Homo sapiens
acccucugaaaggaagca

SEQ ID NO: 33361 - RNA, 22 nt, Homo sapiens
aaagugcuucuuaccuccagau

SEQ ID NO: 33362 - RNA, 19 nt, Homo sapiens
guccugaauuccgcagccu

SEQ ID NO: 33363 - RNA, 21 nt, Homo sapiens
gaaggaagugagugcagccac

SEQ ID NO: 33364 - RNA, 21 nt, Homo sapiens
guccugagagcgcugccuccu

SEQ ID NO: 33365 - RNA, 21 nt, Homo sapiens
caucaccuuccuucuccucca

SEQ ID NO: 33366 - RNA, 22 nt, Homo sapiens
cacucuaaagggaggcacuuug

SEQ ID NO: 33367 - RNA, 21 nt, Homo sapiens
ugcaggcugaucuucuucucu

SEQ ID NO: 33368 - RNA, 22 nt, Homo sapiens
ggagauggagccagggcccuaa

SEQ ID NO: 33369 - RNA, 18 nt, Homo sapiens
cagcagccuccuucucaa

SEQ ID NO: 33370 - RNA, 21 nt, Homo sapiens
acaggauugagggggggcccu

SEQ ID NO: 33371 - RNA, 22 nt, Homo sapiens
ugcaacuuaguaaugugcaaua

SEQ ID NO: 33372 - RNA, 23 nt, Homo sapiens
acaccaaugcccuaggggaugcg

SEQ ID NO: 33373 - RNA, 21 nt, Homo sapiens
ugcaaugcaacuacaaugcac

SEQ ID NO: 33374 - RNA, 23 nt, Homo sapiens
aaagucucgcucucugccccuca

SEQ ID NO: 33375 - RNA, 22 nt, Homo sapiens
gagguuucccguguauguuuca

SEQ ID NO: 33376 - RNA, 22 nt, Homo sapiens
acaucaucgcauauugacacaa

SEQ ID NO: 33377 - RNA, 20 nt, Homo sapiens
guuugauaaacugacacaac

SEQ ID NO: 33378 - RNA, 25 nt, Homo sapiens
acggagcugucccaacaccaccccu

SEQ ID NO: 33379 - RNA, 20 nt, Homo sapiens
uacugcuuccacagcucccc

SEQ ID NO: 33380 - RNA, 21 nt, Homo sapiens
ccccucccagccucccugcca

SEQ ID NO: 33381 - RNA, 21 nt, Homo sapiens
cugggggacggagcagaagga

SEQ ID NO: 33382 - RNA, 22 nt, Homo sapiens
ugaagaagggggggaagggcgu

SEQ ID NO: 33383 - RNA, 23 nt, Homo sapiens
gggagugaagacacggagccaga

SEQ ID NO: 33384 - RNA, 23 nt, Homo sapiens
cuaucugcacuagaugcaccuua

SEQ ID NO: 33385 - RNA, 22 nt, Homo sapiens
cggugagcacccggccccugcg

SEQ ID NO: 33386 - RNA, 23 nt, Homo sapiens
acaccaaugcccuaggggaugcg

SEQ ID NO: 33387 - RNA, 17 nt, Homo sapiens
uggaggccccagcgaga

SEQ ID NO: 33388 - RNA, 18 nt, Homo sapiens
gaaaugagggccagcuga

SEQ ID NO: 33389 - RNA, 22 nt, Homo sapiens
cuagggaacacagggcugguga

SEQ ID NO: 33390 - RNA, 21 nt, Homo sapiens
ugcaggcugaucuucuucucu

SEQ ID NO: 33391 - RNA, 18 nt, Homo sapiens
uggcgccugaacagggac

SEQ ID NO: 33392 - RNA, 17 nt, Homo sapiens
uggcgcccgaacaggga

SEQ ID NO: 33393 - RNA, 24 nt, Homo sapiens
gaagucacucccaggcagcugcaa

SEQ ID NO: 33394 - RNA, 18 nt, Homo sapiens
aucacauucaccucccug

SEQ ID NO: 33395 - RNA, 23 nt, Homo sapiens
cggccugauucacaacaccagcu

SEQ ID NO: 33396 - RNA, 23 nt, Homo sapiens
gggagugaagacacggagccaga

SEQ ID NO: 33397 - RNA, 22 nt, Homo sapiens
ucaggaacugccuuucucucca

SEQ ID NO: 33398 - RNA, 23 nt, Homo sapiens
cagcugcuuuugggauuccguug

SEQ ID NO: 33399 - RNA, 22 nt, Homo sapiens
gcgaacgcgccacggaccaccu

SEQ ID NO: 33400 - RNA, 23 nt, Homo sapiens
aaaucagaaucacaccuggggga

SEQ ID NO: 33401 - RNA, 23 nt, Homo sapiens
ucucacccagguagcaaggauua

SEQ ID NO: 33402 - RNA, 22 nt, Homo sapiens
aaagugcuucuuaccuccagau

SEQ ID NO: 33403 - RNA, 22 nt, Homo sapiens
gcaaagguaauugcuguuuucg

SEQ ID NO: 33404 - RNA, 24 nt, Homo sapiens
acgcagagcccgaaagcccccagu

SEQ ID NO: 33405 - RNA, 22 nt, Homo sapiens
cacauggccaaaacagagaaga

SEQ ID NO: 33406 - RNA, 24 nt, Homo sapiens
ucagagcauguguuuaaucaggcu

SEQ ID NO: 33407 - RNA, 22 nt, Homo sapiens
cuacccacagacguaccaauca

SEQ ID NO: 33408 - RNA, 22 nt, Homo sapiens
acaaaagcaacugagguucuug

SEQ ID NO: 33409 - RNA, 23 nt, Homo sapiens
uguaggcuggggauaaaugaaua

SEQ ID NO: 33410 - RNA, 21 nt, Homo sapiens
ccccucccagccucccugcca

SEQ ID NO: 33411 - RNA, 22 nt, Homo sapiens
ccacacacuuccuuacauucca

SEQ ID NO: 33412 - RNA, 17 nt, Homo sapiens
gggagaggaggaggcga

SEQ ID NO: 33413 - RNA, 23 nt, Homo sapiens
gggagugaagacacggagccaga

SEQ ID NO: 33414 - RNA, 21 nt, Homo sapiens
gaccaaucgccguccccgccg

SEQ ID NO: 33415 - RNA, 21 nt, Homo sapiens
acaggccaucuguguuauauu

SEQ ID NO: 33416 - RNA, 21 nt, Homo sapiens
guccugagagcgcugccuccu

SEQ ID NO: 33417 - RNA, 22 nt, Homo sapiens
gcggucccgcggcgccccgccu

SEQ ID NO: 33418 - RNA, 21 nt, Homo sapiens
aagggucaguaagcacccgcg

SEQ ID NO: 33419 - RNA, 21 nt, Homo sapiens
ggggagcgggggcccugccuu

SEQ ID NO: 33420 - RNA, 23 nt, Homo sapiens
aggaacagcagcagcccgggccg

SEQ ID NO: 33421 - RNA, 23 nt, Homo sapiens
aggaacagcagcagcccgggccg

SEQ ID NO: 33422 - RNA, 21 nt, Homo sapiens
gaccaaucgccguccccgccg

SEQ ID NO: 33423 - RNA, 21 nt, Homo sapiens
acaggauugagggggggcccu

SEQ ID NO: 33424 - RNA, 23 nt, Homo sapiens
cggcucugucgucgaggcgcuca

SEQ ID NO: 33425 - RNA, 22 nt, Homo sapiens
gcggucccgcggcgccccgccu

SEQ ID NO: 33426 - RNA, 22 nt, Homo sapiens
ugcuguuagcccuagccccgca

SEQ ID NO: 33427 - RNA, 21 nt, Homo sapiens
caucaccuuccuucuccucca

SEQ ID NO: 33428 - RNA, 22 nt, Homo sapiens
caaacaccauugucacacucca

SEQ ID NO: 33429 - RNA, 22 nt, Homo sapiens
ugaagaagggggggaagggcgu

SEQ ID NO: 33430 - RNA, 23 nt, Homo sapiens
aggaacagcagcagcccgggccg

SEQ ID NO: 33431 - RNA, 21 nt, Homo sapiens
gaccaaucgccguccccgccg

SEQ ID NO: 33432 - RNA, 22 nt, Homo sapiens
ucagaccgagacaagugcaaug

SEQ ID NO: 33433 - RNA, 19 nt, Homo sapiens
gcuccuguccaacuggcuc

SEQ ID NO: 33434 - RNA, 22 nt, Homo sapiens
gcggucccgcggcgccccgccu

SEQ ID NO: 33435 - RNA, 22 nt, Homo sapiens
ccucaggcacggccgggccacc

SEQ ID NO: 33436 - RNA, 21 nt, Homo sapiens
caucaccuuccuucuccucca

SEQ ID NO: 33437 - RNA, 22 nt, Homo sapiens
gcugaggcuguggggcuggagu

SEQ ID NO: 33438 - RNA, 22 nt, Homo sapiens
ucggucccucgggccagggcag

SEQ ID NO: 33439 - RNA, 22 nt, Homo sapiens
ucuacccagaaaggagccagug

SEQ ID NO: 33440 - RNA, 23 nt, Homo sapiens
ggaagccaucaagucgcugcagg

SEQ ID NO: 33441 - RNA, 20 nt, Homo sapiens
cucaaagcaaacccugcaga

SEQ ID NO: 33442 - RNA, 22 nt, Homo sapiens
cgcauuauuacucacgguacga

SEQ ID NO: 33443 - RNA, 23 nt, Homo sapiens
aggaacagcagcagcccgggccg

SEQ ID NO: 33444 - RNA, 18 nt, Homo sapiens
ggagaggagggcacugga

SEQ ID NO: 33445 - RNA, 22 nt, Homo sapiens
cuguuccugcugaacugagcca

SEQ ID NO: 33446 - RNA, 22 nt, Homo sapiens
gauagagugcagaccagggucu

SEQ ID NO: 33447 - RNA, 22 nt, Homo sapiens
aagagggagacccaggcucgga

SEQ ID NO: 33448 - RNA, 22 nt, Homo sapiens
cugggggcggcacaggggcuca

SEQ ID NO: 33449 - RNA, 18 nt, Homo sapiens
ugguggcagaggugggau

SEQ ID NO: 33450 - RNA, 22 nt, Homo sapiens
cacgaccgacgccacgccgagu

SEQ ID NO: 33451 - RNA, 22 nt, Homo sapiens
ggagcccgcgccccgcgccgag

SEQ ID NO: 33452 - RNA, 21 nt, Homo sapiens
cggggugcacgggcggagggc

SEQ ID NO: 33453 - RNA, 21 nt, Homo sapiens
gaccaaucgccguccccgccg

SEQ ID NO: 33454 - RNA, 22 nt, Homo sapiens
ucagaccgagacaagugcaaug

SEQ ID NO: 33455 - RNA, 22 nt, Homo sapiens
agcugaguguaggauguuuaca

SEQ ID NO: 33456 - RNA, 23 nt, Homo sapiens
aaaucagaaucacaccuggggga

SEQ ID NO: 33457 - RNA, 23 nt, Homo sapiens
aaagucucgcucucugccccuca

SEQ ID NO: 33458 - RNA, 22 nt, Homo sapiens
ugcaagccuugggugugggagg

SEQ ID NO: 33459 - RNA, 25 nt, Homo sapiens
acggagcugucccaacaccaccccu

SEQ ID NO: 33460 - RNA, 22 nt, Homo sapiens
aagagggagacccaggcucgga

SEQ ID NO: 33461 - RNA, 24 nt, Homo sapiens
acgcagagcccgaaagcccccagu

SEQ ID NO: 33462 - RNA, 25 nt, Homo sapiens
accaacggaccuacuucccuccgcc

SEQ ID NO: 33463 - RNA, 22 nt, Homo sapiens
gcggucccgcggcgccccgccu

SEQ ID NO: 33464 - RNA, 22 nt, Homo sapiens
ugcuguuagcccuagccccgca

SEQ ID NO: 33465 - RNA, 21 nt, Homo sapiens
caucaccuuccuucuccucca

SEQ ID NO: 33466 - RNA, 23 nt, Homo sapiens
cuaccugcacuguaagcacuuuu

SEQ ID NO: 33467 - RNA, 21 nt, Homo sapiens
aucugcacugucagcacuuua

SEQ ID NO: 33468 - RNA, 22 nt, Homo sapiens
cacgaccgacgccacgccgagu

SEQ ID NO: 33469 - RNA, 22 nt, Homo sapiens
cuaccauaggguaaaaccacug

SEQ ID NO: 33470 - RNA, 23 nt, Homo sapiens
gggagugaagacacggagccaga

SEQ ID NO: 33471 - RNA, 23 nt, Homo sapiens
cuaccugcacuguaagcacuuug

SEQ ID NO: 33472 - RNA, 23 nt, Homo sapiens
cuaccugcacuauaagcacuuua

SEQ ID NO: 33473 - RNA, 23 nt, Homo sapiens
cuaccugcacuaugagcacuuug

SEQ ID NO: 33474 - RNA, 22 nt, Homo sapiens
agccacaaucaccuucugaucu

SEQ ID NO: 33475 - RNA, 21 nt, Homo sapiens
acaaaccacagugugcugcug

SEQ ID NO: 33476 - RNA, 22 nt, Homo sapiens
gauagagugcagaccagggucu

SEQ ID NO: 33477 - RNA, 23 nt, Homo sapiens
ccuucucagaaaggugaaauuua

SEQ ID NO: 33478 - RNA, 22 nt, Homo sapiens
acacucuaaaaggaugcacuuu

SEQ ID NO: 33479 - RNA, 22 nt, Homo sapiens
aaccucuaaaaggaugcacuuu

SEQ ID NO: 33480 - RNA, 22 nt, Homo sapiens
auccucuaaaaagaugcacuuu

SEQ ID NO: 33481 - RNA, 22 nt, Homo sapiens
cacucuaaagggaggcacuuug

SEQ ID NO: 33482 - RNA, 23 nt, Homo sapiens
acagaaagugcuucccucaagag

SEQ ID NO: 33483 - RNA, 23 nt, Homo sapiens
cuaccugcacgaacagcacuuug

SEQ ID NO: 33484 - RNA, 18 nt, Homo sapiens
ugguggcagaggugggau

SEQ ID NO: 33485 - RNA, 17 nt, Homo sapiens
gggagaggaggaggcga

SEQ ID NO: 33486 - RNA, 21 nt, Homo sapiens
gaccaaucgccguccccgccg

SEQ ID NO: 33487 - RNA, 20 nt, Homo sapiens
ugggccaccgccgagcggac

SEQ ID NO: 33488 - RNA, 25 nt, Homo sapiens
acggagcugucccaacaccaccccu

SEQ ID NO: 33489 - RNA, 22 nt, Homo sapiens
gcggucccgcggcgccccgccu

SEQ ID NO: 33490 - RNA, 22 nt, Homo sapiens
uauccacuacaccccgcugccu

SEQ ID NO: 33491 - RNA, 24 nt, Homo sapiens
cacccccagagccucagcucccca

SEQ ID NO: 33492 - RNA, 22 nt, Homo sapiens
ccccucuggucaaccagucaca

SEQ ID NO: 33493 - RNA, 22 nt, Homo sapiens
ucaguuuccucugcaaacaguu

SEQ ID NO: 33494 - RNA, 21 nt, Homo sapiens
gccaauauuucugugcugcua

SEQ ID NO: 33495 - RNA, 22 nt, Homo sapiens
cuagugguccuaaacauuucac

SEQ ID NO: 33496 - RNA, 22 nt, Homo sapiens
cacucagcaccaggauauuguu

SEQ ID NO: 33497 - RNA, 21 nt, Homo sapiens
ccuucugacuccaaguccagu

SEQ ID NO: 33498 - RNA, 23 nt, Homo sapiens
caugagugacgcccucuggagua

SEQ ID NO: 33499 - RNA, 22 nt, Homo sapiens
aaagugcuucuuaccuccagau

SEQ ID NO: 33500 - RNA, 22 nt, Homo sapiens
uuucaguuaucaaucugucaca

SEQ ID NO: 33501 - RNA, 21 nt, Homo sapiens
cugaaaccaaguaugggucgc

SEQ ID NO: 33502 - RNA, 23 nt, Homo sapiens
guagugggccgagccgagugaca

SEQ ID NO: 33503 - RNA, 23 nt, Homo sapiens
guagugggccgagccgagugaca

SEQ ID NO: 33504 - RNA, 21 nt, Homo sapiens
cuggaggacggcaacagucag

SEQ ID NO: 33505 - RNA, 23 nt, Homo sapiens
gggagugaagacacggagccaga

SEQ ID NO: 33506 - RNA, 20 nt, Homo sapiens
acauuacuguuaucaaaaca

SEQ ID NO: 33507 - RNA, 22 nt, Homo sapiens
accagcuaacaauacacugcca

SEQ ID NO: 33508 - RNA, 23 nt, Homo sapiens
acaccccaaaaucgaagcacuuc

SEQ ID NO: 33509 - RNA, 22 nt, Homo sapiens
agagaggagagccguguaugac

SEQ ID NO: 33510 - RNA, 22 nt, Homo sapiens
cugcucaaacccuccaaugacu

SEQ ID NO: 33511 - RNA, 21 nt, Homo sapiens
aguucucccaacguaaaccca

SEQ ID NO: 33512 - RNA, 21 nt, Homo sapiens
ugacugacagcuuuuugagua

SEQ ID NO: 33513 - RNA, 22 nt, Homo sapiens
cacauggccaaaacagagaaga

SEQ ID NO: 33514 - RNA, 22 nt, Homo sapiens
uccggggacgaacgggacgggu

SEQ ID NO: 33515 - RNA, 18 nt, Homo sapiens
ugguggcagaggugggau

SEQ ID NO: 33516 - RNA, 18 nt, Homo sapiens
uggcgccugaacagggac

SEQ ID NO: 33517 - RNA, 22 nt, Homo sapiens
agcccaaaaggagaauucuuug

SEQ ID NO: 33518 - RNA, 23 nt, Homo sapiens
gaaacccagcagacaauguagcu

SEQ ID NO: 33519 - RNA, 23 nt, Homo sapiens
cgugagcuccuggaggacaggga

SEQ ID NO: 33520 - RNA, 22 nt, Homo sapiens
acaaccagcuaagacacugcca

SEQ ID NO: 33521 - RNA, 22 nt, Homo sapiens
auggcaguggaguuagugauug

SEQ ID NO: 33522 - RNA, 23 nt, Homo sapiens
gcaaucagcuaacuacacugccu

SEQ ID NO: 33523 - RNA, 22 nt, Homo sapiens
accagcuaacaauacacugcca

SEQ ID NO: 33524 - RNA, 22 nt, Homo sapiens
gccagcuaacaauacacugccu

SEQ ID NO: 33525 - RNA, 22 nt, Homo sapiens
uauggaugcaaaaugaucccaa

SEQ ID NO: 33526 - RNA, 22 nt, Homo sapiens
uauggaugcaaaaugaucccaa

SEQ ID NO: 33527 - RNA, 22 nt, Homo sapiens
gaauucaucacggccagccucu

SEQ ID NO: 33528 - RNA, 23 nt, Homo sapiens
cugcagaacuguucccgcugcua

SEQ ID NO: 33529 - RNA, 23 nt, Homo sapiens
caugagugacgcccucuggagua

SEQ ID NO: 33530 - RNA, 21 nt, Homo sapiens
agguaagcgcuguugcuagcc

SEQ ID NO: 33531 - RNA, 23 nt, Homo sapiens
acagcgcucgcaaccgcagcgau

SEQ ID NO: 33532 - RNA, 23 nt, Homo sapiens
aaccaagaccccggagaucccag

SEQ ID NO: 33533 - RNA, 23 nt, Homo sapiens
aaccaagaccccggagaucccag

SEQ ID NO: 33534 - RNA, 22 nt, Homo sapiens
ggaggccgggacgagugcaaua

SEQ ID NO: 33535 - RNA, 22 nt, Homo sapiens
ccucauggaaggguuccccacu

SEQ ID NO: 33536 - RNA, 22 nt, Homo sapiens
ggcagagagucagagcgcggau

SEQ ID NO: 33537 - RNA, 21 nt, Homo sapiens
auaauggagaccaggccacga

SEQ ID NO: 33538 - RNA, 22 nt, Homo sapiens
caaacaccauugucacacucca

SEQ ID NO: 33539 - RNA, 22 nt, Homo sapiens
uccggggacgaacgggacgggu

SEQ ID NO: 33540 - RNA, 18 nt, Homo sapiens
cccccaccaccacgcccg

SEQ ID NO: 33541 - RNA, 17 nt, Homo sapiens
ggguggcagcgguggga

SEQ ID NO: 33542 - RNA, 21 nt, Homo sapiens
ucacccagaucugcggccuaa

SEQ ID NO: 33543 - RNA, 21 nt, Homo sapiens
gaccaaucgccguccccgccg

SEQ ID NO: 33544 - RNA, 20 nt, Homo sapiens
cccgccgcgucgcccugggg

SEQ ID NO: 33545 - RNA, 22 nt, Homo sapiens
ugagccacugugccuggccuga

SEQ ID NO: 33546 - RNA, 21 nt, Homo sapiens
uucuaggauaggcccaggggc

SEQ ID NO: 33547 - RNA, 22 nt, Homo sapiens
aucgggaggggacugagccuga

SEQ ID NO: 33548 - RNA, 21 nt, Homo sapiens
cccgaggagccgggcaggcuu

SEQ ID NO: 33549 - RNA, 22 nt, Homo sapiens
gcggucccgcggcgccccgccu

SEQ ID NO: 33550 - RNA, 22 nt, Homo sapiens
ugcuguuagcccuagccccgca

SEQ ID NO: 33551 - RNA, 17 nt, Homo sapiens
uggcgcccgaacaggga

SEQ ID NO: 33552 - RNA, 22 nt, Homo sapiens
aacccauggaauucaguucuca

SEQ ID NO: 33553 - RNA, 22 nt, Homo sapiens
ccagaacugaguccacagggca

SEQ ID NO: 33554 - RNA, 23 nt, Homo sapiens
gggagugaagacacggagccaga

SEQ ID NO: 33555 - RNA, 21 nt, Homo sapiens
acuagacugugagcuccucga

SEQ ID NO: 33556 - RNA, 23 nt, Homo sapiens
aggaacagcagcagcccgggccg

SEQ ID NO: 33557 - RNA, 22 nt, Homo sapiens
agcgggacuuugagggccaguu

SEQ ID NO: 33558 - RNA, 22 nt, Homo sapiens
cagacuccgguggaaugaagga

SEQ ID NO: 33559 - RNA, 22 nt, Homo sapiens
ucagaccgagacaagugcaaug

SEQ ID NO: 33560 - RNA, 22 nt, Homo sapiens
cgauguaguccaaaggcacaua

SEQ ID NO: 33561 - RNA, 21 nt, Homo sapiens
guccugagagcgcugccuccu

SEQ ID NO: 33562 - RNA, 25 nt, Homo sapiens
accaacggaccuacuucccuccgcc

SEQ ID NO: 33563 - RNA, 22 nt, Homo sapiens
gcugaggcuguggggcuggagu

SEQ ID NO: 33564 - RNA, 22 nt, Homo sapiens
uggugauucacaaagaaaucca

SEQ ID NO: 33565 - RNA, 23 nt, Homo sapiens
gacguaguccuauucucugcugc

SEQ ID NO: 33566 - RNA, 20 nt, Homo sapiens
uacugcuuccacagcucccc

SEQ ID NO: 33567 - RNA, 18 nt, Homo sapiens
aucacauucaccucccug

SEQ ID NO: 33568 - RNA, 22 nt, Homo sapiens
accuaauauaucaaacauauca

SEQ ID NO: 33569 - RNA, 20 nt, Homo sapiens
acagcaaggagggcaggagg

SEQ ID NO: 33570 - RNA, 22 nt, Homo sapiens
aaucagucucauugcuuuauaa

SEQ ID NO: 33571 - RNA, 22 nt, Homo sapiens
gagcccuggacuaggagucagc

SEQ ID NO: 33572 - RNA, 22 nt, Homo sapiens
cagcauggaguccuccagguug

SEQ ID NO: 33573 - RNA, 22 nt, Homo sapiens
gaccucagcuaugacagcacuu

SEQ ID NO: 33574 - RNA, 22 nt, Homo sapiens
gacucuugaacaacacagguuu

SEQ ID NO: 33575 - RNA, 23 nt, Homo sapiens
agaaaccaugggguaugagcaga

SEQ ID NO: 33576 - RNA, 22 nt, Homo sapiens
ucggucccucgggccagggcag

SEQ ID NO: 33577 - RNA, 23 nt, Homo sapiens
ucauacagcuagauaaccaaaga

SEQ ID NO: 33578 - RNA, 22 nt, Homo sapiens
uccggggacgaacgggacgggu

SEQ ID NO: 33579 - RNA, 21 nt, Homo sapiens
agggcucaucuugguccugca

SEQ ID NO: 33580 - RNA, 23 nt, Homo sapiens
gggagugaagacacggagccaga

SEQ ID NO: 33581 - RNA, 21 nt, Homo sapiens
gaccaaucgccguccccgccg

SEQ ID NO: 33582 - RNA, 22 nt, Homo sapiens
uucacacugcaugcucugggua

SEQ ID NO: 33583 - RNA, 22 nt, Homo sapiens
cagaagugggccgggcacaggg

SEQ ID NO: 33584 - RNA, 22 nt, Homo sapiens
aaagagguuaaccagguguguu

SEQ ID NO: 33585 - RNA, 22 nt, Homo sapiens
ugaauccuugaauagguguguu

SEQ ID NO: 33586 - RNA, 23 nt, Homo sapiens
aaagucucgcucucugccccuca

SEQ ID NO: 33587 - RNA, 19 nt, Homo sapiens
guccugaauuccgcagccu

SEQ ID NO: 33588 - RNA, 22 nt, Homo sapiens
gcggucccgcggcgccccgccu

SEQ ID NO: 33589 - RNA, 20 nt, Homo sapiens
aggggccucagccuccuggu

SEQ ID NO: 33590 - RNA, 22 nt, Homo sapiens
ugcuguuagcccuagccccgca

SEQ ID NO: 33591 - RNA, 22 nt, Homo sapiens
gcugaggcuguggggcuggagu

SEQ ID NO: 33592 - RNA, 22 nt, Homo sapiens
ggaggccgggacgagugcaaua

SEQ ID NO: 33593 - RNA, 21 nt, Homo sapiens
ccccucccagccucccugcca

SEQ ID NO: 33594 - RNA, 22 nt, Homo sapiens
cugggggcggcacaggggcuca

SEQ ID NO: 33595 - RNA, 20 nt, Homo sapiens
cugcgggaggacagggcuca

SEQ ID NO: 33596 - RNA, 21 nt, Homo sapiens
gaccaaucgccguccccgccg

SEQ ID NO: 33597 - RNA, 22 nt, Homo sapiens
ucagaccgagacaagugcaaug

SEQ ID NO: 33598 - RNA, 23 nt, Homo sapiens
cggcucugucgucgaggcgcuca

SEQ ID NO: 33599 - RNA, 22 nt, Homo sapiens
aagagggagacccaggcucgga

SEQ ID NO: 33600 - RNA, 22 nt, Homo sapiens
gcggucccgcggcgccccgccu

SEQ ID NO: 33601 - RNA, 22 nt, Homo sapiens
ugcuguuagcccuagccccgca

SEQ ID NO: 33602 - RNA, 22 nt, Homo sapiens
cugggggcggcacaggggcuca

SEQ ID NO: 33603 - RNA, 17 nt, Homo sapiens
uggcgcccgaacaggga

SEQ ID NO: 33604 - RNA, 18 nt, Homo sapiens
aucacauucaccucccug

SEQ ID NO: 33605 - RNA, 22 nt, Homo sapiens
ccagaacugaguccacagggca

SEQ ID NO: 33606 - RNA, 23 nt, Homo sapiens
gggagugaagacacggagccaga

SEQ ID NO: 33607 - RNA, 23 nt, Homo sapiens
cagcugcuuuugggauuccguug

SEQ ID NO: 33608 - RNA, 21 nt, Homo sapiens
ggcugucaauucauaggucag

SEQ ID NO: 33609 - RNA, 23 nt, Homo sapiens
cggcucugucgucgaggcgcuca

SEQ ID NO: 33610 - RNA, 22 nt, Homo sapiens
acaaccagcuaagacacugcca

SEQ ID NO: 33611 - RNA, 23 nt, Homo sapiens
aaagucucgcucucugccccuca

SEQ ID NO: 33612 - RNA, 19 nt, Homo sapiens
guccugaauuccgcagccu

SEQ ID NO: 33613 - RNA, 22 nt, Homo sapiens
gauccgagcaccggggaccccc

SEQ ID NO: 33614 - RNA, 21 nt, Homo sapiens
gaaggaagugagugcagccac

SEQ ID NO: 33615 - RNA, 17 nt, Homo sapiens
uggaggccccagcgaga

SEQ ID NO: 33616 - RNA, 20 nt, Homo sapiens
uccccacagacccagagccg

SEQ ID NO: 33617 - RNA, 22 nt, Homo sapiens
ggcagagagucagagcgcggau

SEQ ID NO: 33618 - RNA, 21 nt, Homo sapiens
ucuccagaucagggcagucca

SEQ ID NO: 33619 - RNA, 18 nt, Homo sapiens
aucacauucaccucccug

SEQ ID NO: 33620 - RNA, 22 nt, Homo sapiens
uggcagcagcggagggggcaga

SEQ ID NO: 33621 - RNA, 22 nt, Homo sapiens
ucagaccgagacaagugcaaug

SEQ ID NO: 33622 - RNA, 20 nt, Homo sapiens
ccagcagcaccuggggcagu

SEQ ID NO: 33623 - RNA, 23 nt, Homo sapiens
aaagucucgcucucugccccuca

SEQ ID NO: 33624 - RNA, 21 nt, Homo sapiens
auccuguacugagcugccccg

SEQ ID NO: 33625 - RNA, 25 nt, Homo sapiens
acggagcugucccaacaccaccccu

SEQ ID NO: 33626 - RNA, 21 nt, Homo sapiens
ggacuauagaacuuucccccu

SEQ ID NO: 33627 - RNA, 19 nt, Homo sapiens
gcucuaagaaagccacacu

SEQ ID NO: 33628 - RNA, 22 nt, Homo sapiens
ccucaggcacggccgggccacc

SEQ ID NO: 33629 - RNA, 21 nt, Homo sapiens
caucaccuuccuucuccucca

SEQ ID NO: 33630 - RNA, 20 nt, Homo sapiens
uacugcuuccacagcucccc

SEQ ID NO: 33631 - RNA, 23 nt, Homo sapiens
cuaccugcacuguaagcacuuuu

SEQ ID NO: 33632 - RNA, 18 nt, Homo sapiens
gaaaugagggccagcuga

SEQ ID NO: 33633 - RNA, 22 nt, Homo sapiens
cuagggaacacagggcugguga

SEQ ID NO: 33634 - RNA, 22 nt, Homo sapiens
cgaccauggcuguagacuguua

SEQ ID NO: 33635 - RNA, 23 nt, Homo sapiens
cggccugauucacaacaccagcu

SEQ ID NO: 33636 - RNA, 21 nt, Homo sapiens
ggccgugacuggagacuguua

SEQ ID NO: 33637 - RNA, 22 nt, Homo sapiens
cacuuagcagguuguauuauau

SEQ ID NO: 33638 - RNA, 22 nt, Homo sapiens
ucaguuuccucugcaaacaguu

SEQ ID NO: 33639 - RNA, 22 nt, Homo sapiens
aucgggaggggacugagccuga

SEQ ID NO: 33640 - RNA, 19 nt, Homo sapiens
auuuugguacagcagcuca

SEQ ID NO: 33641 - RNA, 22 nt, Homo sapiens
acaucaucgcauauugacacaa

SEQ ID NO: 33642 - RNA, 22 nt, Homo sapiens
ccucuaguaaauaugucagcau

SEQ ID NO: 33643 - RNA, 19 nt, Homo sapiens
ucccacaggaagcagacac

SEQ ID NO: 33644 - RNA, 19 nt, Homo sapiens
gccucagaggcagcugcuu

SEQ ID NO: 33645 - RNA, 21 nt, Homo sapiens
gaaggaagugagugcagccac

SEQ ID NO: 33646 - RNA, 22 nt, Homo sapiens
gggagaggucucccugcgcaca

SEQ ID NO: 33647 - RNA, 22 nt, Homo sapiens
ggagcccgcgccccgcgccgag

SEQ ID NO: 33648 - RNA, 26 nt, Homo sapiens
uuucagaauuugcugccaucaucauc

SEQ ID NO: 33649 - RNA, 18 nt, Homo sapiens
cagcagccuccuucucaa

SEQ ID NO: 33650 - RNA, 22 nt, Homo sapiens
cacugguacaaggguugggaga

SEQ ID NO: 33651 - RNA, 22 nt, Homo sapiens
acaguucuucaacuggcagcuu

SEQ ID NO: 33652 - RNA, 23 nt, Homo sapiens
gaaacccagcagacaauguagcu

SEQ ID NO: 33653 - RNA, 21 nt, Homo sapiens
acccaguagccagauguagcu

SEQ ID NO: 33654 - RNA, 22 nt, Homo sapiens
acaaccagcuaagacacugcca

SEQ ID NO: 33655 - RNA, 21 nt, Homo sapiens
acaauccuagagcacaagaag

SEQ ID NO: 33656 - RNA, 18 nt, Homo sapiens
auucaaucuacugccuca

SEQ ID NO: 33657 - RNA, 22 nt, Homo sapiens
caagacacauuuggagagggac

SEQ ID NO: 33658 - RNA, 21 nt, Homo sapiens
guccugagagcgcugccuccu

SEQ ID NO: 33659 - RNA, 22 nt, Homo sapiens
ucaguggcucagguucguugca

SEQ ID NO: 33660 - RNA, 24 nt, Homo sapiens
agugugaguucuaccauugccaaa

SEQ ID NO: 33661 - RNA, 21 nt, Homo sapiens
ggcugucaauucauaggucag

SEQ ID NO: 33662 - RNA, 22 nt, Homo sapiens
cuacccacagacguaccaauca

SEQ ID NO: 33663 - RNA, 18 nt, Homo sapiens
acccucugaaaggaagca

SEQ ID NO: 33664 - RNA, 22 nt, Homo sapiens
aaagugcuucuuaccuccagau

SEQ ID NO: 33665 - RNA, 21 nt, Homo sapiens
guucuaacccauuguggccaa

SEQ ID NO: 33666 - RNA, 21 nt, Homo sapiens
gaccaaucgccguccccgccg

SEQ ID NO: 33667 - RNA, 22 nt, Homo sapiens
gauccgagcaccggggaccccc

SEQ ID NO: 33668 - RNA, 22 nt, Homo sapiens
gcggucccgcggcgccccgccu

SEQ ID NO: 33669 - RNA, 20 nt, Homo sapiens
uccccacagacccagagccg

SEQ ID NO: 33670 - RNA, 22 nt, Homo sapiens
cacaagaucggaucuacggguu

SEQ ID NO: 33671 - RNA, 22 nt, Homo sapiens
cgcaaggucgguucuacgggug

SEQ ID NO: 33672 - RNA, 21 nt, Homo sapiens
gagcugcauccuggcuccggg

SEQ ID NO: 33673 - RNA, 22 nt, Homo sapiens
cacgaccgacgccacgccgagu

SEQ ID NO: 33674 - RNA, 22 nt, Homo sapiens
ggagcccgcgccccgcgccgag

SEQ ID NO: 33675 - RNA, 23 nt, Homo sapiens
aggaacagcagcagcccgggccg

SEQ ID NO: 33676 - RNA, 22 nt, Homo sapiens
gaaccuaucuccccucuggacc

SEQ ID NO: 33677 - RNA, 23 nt, Homo sapiens
cggcucugucgucgaggcgcuca

SEQ ID NO: 33678 - RNA, 22 nt, Homo sapiens
accagguuccaccccagcaggc

SEQ ID NO: 33679 - RNA, 23 nt, Homo sapiens
acacucuaaagagaagcgcuuug

SEQ ID NO: 33680 - RNA, 21 nt, Homo sapiens
agaaaguacuucccucuggag

SEQ ID NO: 33681 - RNA, 21 nt, Homo sapiens
agaaagugcaucccucuggag

SEQ ID NO: 33682 - RNA, 21 nt, Homo sapiens
guucuaacccauuguggccaa

SEQ ID NO: 33683 - RNA, 22 nt, Homo sapiens
ugcuguuagcccuagccccgca

SEQ ID NO: 33684 - RNA, 21 nt, Homo sapiens
cugggggacggagcagaagga

SEQ ID NO: 33685 - RNA, 21 nt, Homo sapiens
cggggugcacgggcggagggc

SEQ ID NO: 33686 - RNA, 22 nt, Homo sapiens
cuguuccugcugaacugagcca

SEQ ID NO: 33687 - RNA, 22 nt, Homo sapiens
guagaagggaaucuugcauaag

SEQ ID NO: 33688 - RNA, 21 nt, Homo sapiens
gagcuacagugcuucaucuca

SEQ ID NO: 33689 - RNA, 22 nt, Homo sapiens
acaguucuucaacuggcagcuu

SEQ ID NO: 33690 - RNA, 21 nt, Homo sapiens
aucugcacugucagcacuuua

SEQ ID NO: 33691 - RNA, 23 nt, Homo sapiens
gcuuugacaauaucauugcacug

SEQ ID NO: 33692 - RNA, 21 nt, Homo sapiens
acuccaaagggaagcgccuuc

SEQ ID NO: 33693 - RNA, 22 nt, Homo sapiens
cgcucuaaagggaagcgccuuc

SEQ ID NO: 33694 - RNA, 19 nt, Homo sapiens
guugggaucacaggcgccc

SEQ ID NO: 33695 - RNA, 25 nt, Homo sapiens
accaacggaccuacuucccuccgcc

SEQ ID NO: 33696 - RNA, 22 nt, Homo sapiens
ccucaggcacggccgggccacc

SEQ ID NO: 33697 - RNA, 22 nt, Homo sapiens
ugcuguuagcccuagccccgca

SEQ ID NO: 33698 - RNA, 22 nt, Homo sapiens
uauccacuacaccccgcugccu

SEQ ID NO: 33699 - RNA, 22 nt, Homo sapiens
ggcagagagucagagcgcggau

SEQ ID NO: 33700 - RNA, 21 nt, Homo sapiens
uucaguuaucacaguacugua

SEQ ID NO: 33701 - RNA, 22 nt, Homo sapiens
gugggguggguggucaggccga

SEQ ID NO: 33702 - RNA, 17 nt, Homo sapiens
gggagaggaggaggcga

SEQ ID NO: 33703 - RNA, 22 nt, Homo sapiens
agacaacaaugccaaccucaca

SEQ ID NO: 33704 - RNA, 23 nt, Homo sapiens
gggagugaagacacggagccaga

SEQ ID NO: 33705 - RNA, 23 nt, Homo sapiens
cgugagcuccuggaggacaggga

SEQ ID NO: 33706 - RNA, 21 nt, Homo sapiens
aagggucaguaagcacccgcg

SEQ ID NO: 33707 - RNA, 23 nt, Homo sapiens
ggaagccaucaagucgcugcagg

SEQ ID NO: 33708 - RNA, 23 nt, Homo sapiens
gggagugaagacacggagccaga

SEQ ID NO: 33709 - RNA, 23 nt, Homo sapiens
aggaacagcagcagcccgggccg

SEQ ID NO: 33710 - RNA, 23 nt, Homo sapiens
cccaacagacauggcgguacuca

SEQ ID NO: 33711 - RNA, 20 nt, Homo sapiens
acagcaaggagggcaggagg

SEQ ID NO: 33712 - RNA, 21 nt, Homo sapiens
ucaaucacagauagcaccccu

SEQ ID NO: 33713 - RNA, 22 nt, Homo sapiens
gaauucaucacggccagccucu

SEQ ID NO: 33714 - RNA, 21 nt, Homo sapiens
gguggagcccugagaaccgga

SEQ ID NO: 33715 - RNA, 24 nt, Homo sapiens
cacccccagagccucagcucccca

SEQ ID NO: 33716 - RNA, 23 nt, Homo sapiens
gggagugaagacacggagccaga

SEQ ID NO: 33717 - RNA, 21 nt, Homo sapiens
gaccaaucgccguccccgccg

SEQ ID NO: 33718 - RNA, 22 nt, Homo sapiens
agucuucacaacagcccugugu

SEQ ID NO: 33719 - RNA, 21 nt, Homo sapiens
ugcaugacggccugcaagaca

SEQ ID NO: 33720 - RNA, 23 nt, Homo sapiens
gaaagugcccucaaggcugagug

SEQ ID NO: 33721 - RNA, 22 nt, Homo sapiens
gcggucccgcggcgccccgccu

SEQ ID NO: 33722 - RNA, 22 nt, Homo sapiens
ugcuguuagcccuagccccgca

SEQ ID NO: 33723 - RNA, 22 nt, Homo sapiens
gggagaggucucccugcgcaca

SEQ ID NO: 33724 - RNA, 22 nt, Homo sapiens
acacacccacgcgagccggaaa

SEQ ID NO: 33725 - RNA, 21 nt, Homo sapiens
ccccucccagccucccugcca

SEQ ID NO: 33726 - RNA, 18 nt, Homo sapiens
ugguggcagaggugggau

SEQ ID NO: 33727 - RNA, 17 nt, Homo sapiens
ggguggcagcgguggga

SEQ ID NO: 33728 - RNA, 21 nt, Homo sapiens
ucuccagaucagggcagucca

SEQ ID NO: 33729 - RNA, 22 nt, Homo sapiens
cacgaccgacgccacgccgagu

SEQ ID NO: 33730 - RNA, 22 nt, Homo sapiens
acuccaacagggccgcgucucc

SEQ ID NO: 33731 - RNA, 22 nt, Homo sapiens
acagauguccagccacaauucu

SEQ ID NO: 33732 - RNA, 21 nt, Homo sapiens
aucugcacugucagcacuuua

SEQ ID NO: 33733 - RNA, 23 nt, Homo sapiens
gcuuugacaauaucauugcacug

SEQ ID NO: 33734 - RNA, 20 nt, Homo sapiens
cuggaggaagggcccagagg

SEQ ID NO: 33735 - RNA, 22 nt, Homo sapiens
gccuaagacacaggcccagaga

SEQ ID NO: 33736 - RNA, 22 nt, Homo sapiens
ugcuguuagcccuagccccgca

SEQ ID NO: 33737 - RNA, 21 nt, Homo sapiens
ggggagcgggggcccugccuu

SEQ ID NO: 33738 - RNA, 22 nt, Homo sapiens
caaacaccauugucacacucca

SEQ ID NO: 33739 - RNA, 23 nt, Homo sapiens
cuaucugcacuagaugcaccuua

SEQ ID NO: 33740 - RNA, 21 nt, Homo sapiens
ccuucugacuccaaguccagu

SEQ ID NO: 33741 - RNA, 21 nt, Homo sapiens
acaggccaucuguguuauauu

SEQ ID NO: 33742 - RNA, 24 nt, Homo sapiens
acgcgcaggccagagacccaggca

SEQ ID NO: 33743 - RNA, 22 nt, Homo sapiens
uauccacuacaccccgcugccu

SEQ ID NO: 33744 - RNA, 20 nt, Homo sapiens
uacugcuuccacagcucccc

SEQ ID NO: 33745 - RNA, 22 nt, Homo sapiens
acuccaacagggccgcgucucc

SEQ ID NO: 33746 - RNA, 21 nt, Homo sapiens
gaccaaucgccguccccgccg

SEQ ID NO: 33747 - RNA, 22 nt, Homo sapiens
gcggucccgcggcgccccgccu

SEQ ID NO: 33748 - RNA, 23 nt, Homo sapiens
cacugugggcccucuccgcacca

SEQ ID NO: 33749 - RNA, 24 nt, Homo sapiens
cacccccagagccucagcucccca

SEQ ID NO: 33750 - RNA, 23 nt, Homo sapiens
gcacaugugcacacagccgggug

SEQ ID NO: 33751 - RNA, 18 nt, Homo sapiens
aucacauucaccucccug

SEQ ID NO: 33752 - RNA, 23 nt, Homo sapiens
gggagugaagacacggagccaga

SEQ ID NO: 33753 - RNA, 22 nt, Homo sapiens
ucaggaacugccuuucucucca

SEQ ID NO: 33754 - RNA, 22 nt, Homo sapiens
ucagaccgagacaagugcaaug

SEQ ID NO: 33755 - RNA, 21 nt, Homo sapiens
caucaccuuccuucuccucca

SEQ ID NO: 33756 - RNA, 21 nt, Homo sapiens
cggggugcacgggcggagggc

SEQ ID NO: 33757 - RNA, 21 nt, Homo sapiens
ucaaucacagauagcaccccu

SEQ ID NO: 33758 - RNA, 25 nt, Homo sapiens
acggagcugucccaacaccaccccu

SEQ ID NO: 33759 - RNA, 22 nt, Homo sapiens
gccaccuucaaaugggaagucu

SEQ ID NO: 33760 - RNA, 23 nt, Homo sapiens
cacugugggcccucuccgcacca

SEQ ID NO: 33761 - RNA, 20 nt, Homo sapiens
uacugcuuccacagcucccc

SEQ ID NO: 33762 - RNA, 21 nt, Homo sapiens
cuagggaagaacagugagcaa

SEQ ID NO: 33763 - RNA, 23 nt, Homo sapiens
gggagugaagacacggagccaga

SEQ ID NO: 33764 - RNA, 22 nt, Homo sapiens
cggugagcacccggccccugcg

SEQ ID NO: 33765 - RNA, 22 nt, Homo sapiens
acaaccagcuaagacacugcca

SEQ ID NO: 33766 - RNA, 22 nt, Homo sapiens
auggcaguggaguuagugauug

SEQ ID NO: 33767 - RNA, 23 nt, Homo sapiens
gcaaucagcuaacuacacugccu

SEQ ID NO: 33768 - RNA, 22 nt, Homo sapiens
accagcuaacaauacacugcca

SEQ ID NO: 33769 - RNA, 22 nt, Homo sapiens
gccagcuaacaauacacugccu

SEQ ID NO: 33770 - RNA, 22 nt, Homo sapiens
ccucuaguaaauaugucagcau

SEQ ID NO: 33771 - RNA, 20 nt, Homo sapiens
uacugcuuccacagcucccc

SEQ ID NO: 33772 - RNA, 23 nt, Homo sapiens
gacguaguccuauucucugcugc

SEQ ID NO: 33773 - RNA, 22 nt, Homo sapiens
ggaggccgggacgagugcaaua

SEQ ID NO: 33774 - RNA, 22 nt, Homo sapiens
ugaagaagggggggaagggcgu

SEQ ID NO: 33775 - RNA, 22 nt, Homo sapiens
ugagugcuugcuaggugccaag

SEQ ID NO: 33776 - RNA, 23 nt, Homo sapiens
aggaacagcagcagcccgggccg

SEQ ID NO: 33777 - RNA, 23 nt, Homo sapiens
cuaucugcacuagaugcaccuua

SEQ ID NO: 33778 - RNA, 23 nt, Homo sapiens
cuaacugcacuagaugcaccuua

SEQ ID NO: 33779 - RNA, 21 nt, Homo sapiens
gaccaaucgccguccccgccg

SEQ ID NO: 33780 - RNA, 22 nt, Homo sapiens
cuacccacagacguaccaauca

SEQ ID NO: 33781 - RNA, 21 nt, Homo sapiens
cacucugaagggaagcgcuuu

SEQ ID NO: 33782 - RNA, 22 nt, Homo sapiens
gcggucccgcggcgccccgccu

SEQ ID NO: 33783 - RNA, 24 nt, Homo sapiens
cacccccagagccucagcucccca

SEQ ID NO: 33784 - RNA, 23 nt, Homo sapiens
agcaaaaaugugcuagugccaaa

SEQ ID NO: 33785 - RNA, 22 nt, Homo sapiens
acacacccacgcgagccggaaa

SEQ ID NO: 33786 - RNA, 22 nt, Homo sapiens
agaaaaugccccucaguuuuga

SEQ ID NO: 33787 - RNA, 21 nt, Homo sapiens
gaccaaucgccguccccgccg

SEQ ID NO: 33788 - RNA, 22 nt, Homo sapiens
gcaaaaguaacugcaguuuugg

SEQ ID NO: 33789 - RNA, 22 nt, Homo sapiens
gccaccuucaaaugggaagucu

SEQ ID NO: 33790 - RNA, 22 nt, Homo sapiens
gcggucccgcggcgccccgccu

SEQ ID NO: 33791 - RNA, 22 nt, Homo sapiens
ugcuguuagcccuagccccgca

SEQ ID NO: 33792 - RNA, 22 nt, Homo sapiens
cuggagagacaaggggaagagg

SEQ ID NO: 33793 - RNA, 23 nt, Homo sapiens
aaagucucgcucucugccccuca

SEQ ID NO: 33794 - RNA, 23 nt, Homo sapiens
ccaccuggcaagaacaggcguuc

SEQ ID NO: 33795 - RNA, 21 nt, Homo sapiens
aguucucccaacguaaaccca

SEQ ID NO: 33796 - RNA, 20 nt, Homo sapiens
cccugcgccaucuccucuac

SEQ ID NO: 33797 - RNA, 18 nt, Homo sapiens
gaaaugagggccagcuga

SEQ ID NO: 33798 - RNA, 21 nt, Homo sapiens
cugggggacggagcagaagga

SEQ ID NO: 33799 - RNA, 22 nt, Homo sapiens
uaaaugaauucaauuuccuucu

SEQ ID NO: 33800 - RNA, 20 nt, Homo sapiens
gcagaagcauuuccacacac

SEQ ID NO: 33801 - RNA, 22 nt, Homo sapiens
ucaggaacugccuuucucucca

SEQ ID NO: 33802 - RNA, 22 nt, Homo sapiens
ucaggaacugccuuucucucca

SEQ ID NO: 33803 - RNA, 22 nt, Homo sapiens
uaaccgauuucagauggugcua

SEQ ID NO: 33804 - RNA, 22 nt, Homo sapiens
acaaccagcuaagacacugcca

SEQ ID NO: 33805 - RNA, 18 nt, Homo sapiens
acccucugaaaggaagca

SEQ ID NO: 33806 - RNA, 22 nt, Homo sapiens
aaagugcuucuuaccuccagau

SEQ ID NO: 33807 - RNA, 22 nt, Homo sapiens
gcaaaaguaauugagauuuuug

SEQ ID NO: 33808 - RNA, 19 nt, Homo sapiens
guugggaucacaggcgccc

SEQ ID NO: 33809 - RNA, 19 nt, Homo sapiens
gccucagaggcagcugcuu

SEQ ID NO: 33810 - RNA, 21 nt, Homo sapiens
caucaccuuccuucuccucca

SEQ ID NO: 33811 - RNA, 22 nt, Homo sapiens
gggagaggucucccugcgcaca

SEQ ID NO: 33812 - RNA, 21 nt, Homo sapiens
ucaaucacagauagcaccccu

SEQ ID NO: 33813 - RNA, 21 nt, Homo sapiens
gaaggaagugagugcagccac

SEQ ID NO: 33814 - RNA, 22 nt, Homo sapiens
gggagaggucucccugcgcaca

SEQ ID NO: 33815 - RNA, 21 nt, Homo sapiens
aucugcacugucagcacuuua

SEQ ID NO: 33816 - RNA, 21 nt, Homo sapiens
cucccccacugcagcuggcac

SEQ ID NO: 33817 - RNA, 18 nt, Homo sapiens
ugguggcagaggugggau

SEQ ID NO: 33818 - RNA, 18 nt, Homo sapiens
cccccaccaccacgcccg

SEQ ID NO: 33819 - RNA, 22 nt, Homo sapiens
acaccuggcuccacacgcgggc

SEQ ID NO: 33820 - RNA, 22 nt, Homo sapiens
acaaccagcuaagacacugcca

SEQ ID NO: 33821 - RNA, 23 nt, Homo sapiens
gcaaucagcuaacuacacugccu

SEQ ID NO: 33822 - RNA, 22 nt, Homo sapiens
accagcuaacaauacacugcca

SEQ ID NO: 33823 - RNA, 22 nt, Homo sapiens
gccagcuaacaauacacugccu

SEQ ID NO: 33824 - RNA, 22 nt, Homo sapiens
acacucuaaagggaugcacgau

SEQ ID NO: 33825 - RNA, 22 nt, Homo sapiens
acacucuaaaaggaugcacgau

SEQ ID NO: 33826 - RNA, 22 nt, Homo sapiens
ugcaagccuugggugugggagg

SEQ ID NO: 33827 - RNA, 21 nt, Homo sapiens
uggaaaccaagagugggucgc

SEQ ID NO: 33828 - RNA, 21 nt, Homo sapiens
cugaaaccaaguaugggucgc

SEQ ID NO: 33829 - RNA, 25 nt, Homo sapiens
acggagcugucccaacaccaccccu

SEQ ID NO: 33830 - RNA, 18 nt, Homo sapiens
ugguggcagaggugggau

SEQ ID NO: 33831 - RNA, 21 nt, Homo sapiens
agggcucaucuugguccugca

SEQ ID NO: 33832 - RNA, 21 nt, Homo sapiens
uuuagcauaaguaugucccaa

SEQ ID NO: 33833 - RNA, 22 nt, Homo sapiens
acaaaguucugugaugcacuga

SEQ ID NO: 33834 - RNA, 23 nt, Homo sapiens
acucaccgacagcguugaauguu

SEQ ID NO: 33835 - RNA, 23 nt, Homo sapiens
acccaccgacagcaaugaauguu

SEQ ID NO: 33836 - RNA, 22 nt, Homo sapiens
acucaccgacagguugaauguu

SEQ ID NO: 33837 - RNA, 23 nt, Homo sapiens
acccaccgacaacaaugaauguu

SEQ ID NO: 33838 - RNA, 22 nt, Homo sapiens
uccacauggaguugcuguuaca

SEQ ID NO: 33839 - RNA, 22 nt, Homo sapiens
cuagugguccuaaacauuucac

SEQ ID NO: 33840 - RNA, 23 nt, Homo sapiens
aaagucucgcucucugccccuca

SEQ ID NO: 33841 - RNA, 21 nt, Homo sapiens
ucuacucacagaagugucaau

SEQ ID NO: 33842 - RNA, 22 nt, Homo sapiens
ggaccuaaaaauacaaugcaua

SEQ ID NO: 33843 - RNA, 22 nt, Homo sapiens
acaucaucgcauauugacacaa

SEQ ID NO: 33844 - RNA, 22 nt, Homo sapiens
gccaccuucaaaugggaagucu

SEQ ID NO: 33845 - RNA, 22 nt, Homo sapiens
cacucuaaagggaggcacuuug

SEQ ID NO: 33846 - RNA, 22 nt, Homo sapiens
cugggggcggcacaggggcuca

SEQ ID NO: 33847 - RNA, 22 nt, Homo sapiens
caaacaccauugucacacucca

SEQ ID NO: 33848 - RNA, 17 nt, Homo sapiens
ggguggcagcgguggga

SEQ ID NO: 33849 - RNA, 23 nt, Homo sapiens
aggaacagcagcagcccgggccg

SEQ ID NO: 33850 - RNA, 22 nt, Homo sapiens
uuaacagcuaagcacccuaauc

SEQ ID NO: 33851 - RNA, 21 nt, Homo sapiens
uucuaggauaggcccaggggc

SEQ ID NO: 33852 - RNA, 22 nt, Homo sapiens
uacagauggauaccgugcaauu

SEQ ID NO: 33853 - RNA, 22 nt, Homo sapiens
aguccagauucugugcccacca

SEQ ID NO: 33854 - RNA, 19 nt, Homo sapiens
guccugaauuccgcagccu

SEQ ID NO: 33855 - RNA, 22 nt, Homo sapiens
gauccgagcaccggggaccccc

SEQ ID NO: 33856 - RNA, 21 nt, Homo sapiens
gaaggaagugagugcagccac

SEQ ID NO: 33857 - RNA, 22 nt, Homo sapiens
gcacauguucugcggcccacca

SEQ ID NO: 33858 - RNA, 20 nt, Homo sapiens
uccccacagacccagagccg

SEQ ID NO: 33859 - RNA, 21 nt, Homo sapiens
aagggucaguaagcacccgcg

SEQ ID NO: 33860 - RNA, 23 nt, Homo sapiens
gucacaucccucccaagacccuc

SEQ ID NO: 33861 - RNA, 23 nt, Homo sapiens
agcccuguucuacagcccugagg

SEQ ID NO: 33862 - RNA, 23 nt, Homo sapiens
agggauuccugggaaaacuggac

SEQ ID NO: 33863 - RNA, 22 nt, Homo sapiens
gauagagugcagaccagggucu

SEQ ID NO: 33864 - RNA, 21 nt, Homo sapiens
agaggcagguuccuggaucau

SEQ ID NO: 33865 - RNA, 21 nt, Homo sapiens
aagggucaguaagcacccgcg

SEQ ID NO: 33866 - RNA, 20 nt, Homo sapiens
uacugcuuccacagcucccc

SEQ ID NO: 33867 - RNA, 21 nt, Homo sapiens
cugaggagagaggaggugggg

SEQ ID NO: 33868 - RNA, 27 nt, Homo sapiens
uuuagcacagugcuuauacaagaaggu

SEQ ID NO: 33869 - RNA, 22 nt, Homo sapiens
ggagauggagccagggcccuaa

SEQ ID NO: 33870 - RNA, 18 nt, Homo sapiens
aucacauucaccucccug

SEQ ID NO: 33871 - RNA, 23 nt, Homo sapiens
ucacauaggaaugaaaagccaua

SEQ ID NO: 33872 - RNA, 23 nt, Homo sapiens
gggagugaagacacggagccaga

SEQ ID NO: 33873 - RNA, 21 nt, Homo sapiens
acaggauugagggggggcccu

SEQ ID NO: 33874 - RNA, 20 nt, Homo sapiens
uacugcuuccacagcucccc

SEQ ID NO: 33875 - RNA, 22 nt, Homo sapiens
aacuauacaaccuacuaccuca

SEQ ID NO: 33876 - RNA, 22 nt, Homo sapiens
aaccacacaaccuacuaccuca

SEQ ID NO: 33877 - RNA, 22 nt, Homo sapiens
aaccauacaaccuacuaccuca

SEQ ID NO: 33878 - RNA, 22 nt, Homo sapiens
aacuaugcaaccuacuaccucu

SEQ ID NO: 33879 - RNA, 22 nt, Homo sapiens
aacuauacaaccuccuaccuca

SEQ ID NO: 33880 - RNA, 22 nt, Homo sapiens
aacuauacaaucuacuaccuca

SEQ ID NO: 33881 - RNA, 22 nt, Homo sapiens
aacuguacaaacuacuaccuca

SEQ ID NO: 33882 - RNA, 22 nt, Homo sapiens
aacagcacaaacuacuaccuca

SEQ ID NO: 33883 - RNA, 22 nt, Homo sapiens
cccaacaacaugaaacuaccua

SEQ ID NO: 33884 - RNA, 22 nt, Homo sapiens
cccaacaacaggaaacuaccua

SEQ ID NO: 33885 - RNA, 20 nt, Homo sapiens
cuggaggaagggcccagagg

SEQ ID NO: 33886 - RNA, 22 nt, Homo sapiens
gccuaagacacaggcccagaga

SEQ ID NO: 33887 - RNA, 22 nt, Homo sapiens
gaagaaaggcaucauauaggag

SEQ ID NO: 33888 - RNA, 22 nt, Homo sapiens
aaucagucucauugcuuuauaa

SEQ ID NO: 33889 - RNA, 22 nt, Homo sapiens
ucaguuuccucugcaaacaguu

SEQ ID NO: 33890 - RNA, 22 nt, Homo sapiens
guagaagggaaucuugcauaag

SEQ ID NO: 33891 - RNA, 22 nt, Homo sapiens
cuacccacagacguaccaauca

SEQ ID NO: 33892 - RNA, 22 nt, Homo sapiens
gacaaaacccgcaaauacuuuu

SEQ ID NO: 33893 - RNA, 22 nt, Homo sapiens
acaaaauccacaauuacuuuug

SEQ ID NO: 33894 - RNA, 20 nt, Homo sapiens
uccccacagacccagagccg

SEQ ID NO: 33895 - RNA, 22 nt, Homo sapiens
aacaauacaacuuacuaccuca

SEQ ID NO: 33896 - RNA, 21 nt, Homo sapiens
ggucagaacccaucauucacu

SEQ ID NO: 33897 - RNA, 18 nt, Homo sapiens
cccccaccaccacgcccg

SEQ ID NO: 33898 - RNA, 19 nt, Homo sapiens
cagcaucagcagcaucauc

SEQ ID NO: 33899 - RNA, 23 nt, Homo sapiens
gggagugaagacacggagccaga

SEQ ID NO: 33900 - RNA, 22 nt, Homo sapiens
ccucauggaaggguuccccacu

SEQ ID NO: 33901 - RNA, 23 nt, Homo sapiens
caugagugacgcccucuggagua

SEQ ID NO: 33902 - RNA, 25 nt, Homo sapiens
acggagcugucccaacaccaccccu

SEQ ID NO: 33903 - RNA, 21 nt, Homo sapiens
aguucucccaacguaaaccca

SEQ ID NO: 33904 - RNA, 21 nt, Homo sapiens
gagcugcauccuggcuccggg

SEQ ID NO: 33905 - RNA, 23 nt, Homo sapiens
gggagugaagacacggagccaga

SEQ ID NO: 33906 - RNA, 22 nt, Homo sapiens
uucacacugcaugcucugggua

SEQ ID NO: 33907 - RNA, 23 nt, Homo sapiens
uauucucgcacggacuacaacca

SEQ ID NO: 33908 - RNA, 22 nt, Homo sapiens
gcugccguauaugugaugucac

SEQ ID NO: 33909 - RNA, 22 nt, Homo sapiens
aggaaaccagcaaguguugacg

SEQ ID NO: 33910 - RNA, 19 nt, Homo sapiens
guccugaauuccgcagccu

SEQ ID NO: 33911 - RNA, 21 nt, Homo sapiens
ccccucccagccucccugcca

SEQ ID NO: 33912 - RNA, 22 nt, Homo sapiens
uaaaugaauucaauuuccuucu

SEQ ID NO: 33913 - RNA, 22 nt, Homo sapiens
aggucucacuuuguugcccaga

SEQ ID NO: 33914 - RNA, 22 nt, Homo sapiens
cggugagcacccggccccugcg

SEQ ID NO: 33915 - RNA, 22 nt, Homo sapiens
ucagaccgagacaagugcaaug

SEQ ID NO: 33916 - RNA, 22 nt, Homo sapiens
uacagauggauaccgugcaauu

SEQ ID NO: 33917 - RNA, 19 nt, Homo sapiens
gcuccuguccaacuggcuc

SEQ ID NO: 33918 - RNA, 25 nt, Homo sapiens
acggagcugucccaacaccaccccu

SEQ ID NO: 33919 - RNA, 25 nt, Homo sapiens
aaggagcucagaagcccugcccagc

SEQ ID NO: 33920 - RNA, 20 nt, Homo sapiens
cccugcgccaucuccucuac

SEQ ID NO: 33921 - RNA, 22 nt, Homo sapiens
ucuacccagaaaggagccagug

SEQ ID NO: 33922 - RNA, 22 nt, Homo sapiens
cugggggcggcacaggggcuca

SEQ ID NO: 33923 - RNA, 22 nt, Homo sapiens
ugaagaagggggggaagggcgu

SEQ ID NO: 33924 - RNA, 17 nt, Homo sapiens
gggagaggaggaggcga

SEQ ID NO: 33925 - RNA, 19 nt, Homo sapiens
guugggaucacaggcgccc

SEQ ID NO: 33926 - RNA, 21 nt, Homo sapiens
guucuaacccauuguggccaa

SEQ ID NO: 33927 - RNA, 22 nt, Homo sapiens
ugcuguuagcccuagccccgca

SEQ ID NO: 33928 - RNA, 20 nt, Homo sapiens
uccccacagacccagagccg

SEQ ID NO: 33929 - RNA, 21 nt, Homo sapiens
aagggucaguaagcacccgcg

SEQ ID NO: 33930 - RNA, 21 nt, Homo sapiens
aaaagcuaagucaucauauau

SEQ ID NO: 33931 - RNA, 22 nt, Homo sapiens
cagcugguugaaggggaccaaa

SEQ ID NO: 33932 - RNA, 22 nt, Homo sapiens
uagcugguugaaggggaccaaa

SEQ ID NO: 33933 - RNA, 23 nt, Homo sapiens
gggagugaagacacggagccaga

SEQ ID NO: 33934 - RNA, 21 nt, Homo sapiens
gaccaaucgccguccccgccg

SEQ ID NO: 33935 - RNA, 22 nt, Homo sapiens
ucagaccgagacaagugcaaug

SEQ ID NO: 33936 - RNA, 25 nt, Homo sapiens
acggagcugucccaacaccaccccu

SEQ ID NO: 33937 - RNA, 22 nt, Homo sapiens
gcggucccgcggcgccccgccu

SEQ ID NO: 33938 - RNA, 22 nt, Homo sapiens
ugcuguuagcccuagccccgca

SEQ ID NO: 33939 - RNA, 20 nt, Homo sapiens
uacugcuuccacagcucccc

SEQ ID NO: 33940 - RNA, 22 nt, Homo sapiens
cuggagagacaaggggaagagg

SEQ ID NO: 33941 - RNA, 22 nt, Homo sapiens
uagucaagugaagcagugggag

SEQ ID NO: 33942 - RNA, 22 nt, Homo sapiens
cacucagcggccguuuccccaa

SEQ ID NO: 33943 - RNA, 22 nt, Homo sapiens
aaucagucucauugcuuuauaa

SEQ ID NO: 33944 - RNA, 20 nt, Homo sapiens
cccugcgccaucuccucuac

SEQ ID NO: 33945 - RNA, 17 nt, Homo sapiens
gggagaggaggaggcga

SEQ ID NO: 33946 - RNA, 22 nt, Homo sapiens
cagaagugggccgggcacaggg

SEQ ID NO: 33947 - RNA, 22 nt, Homo sapiens
agcgggacuuugagggccaguu

SEQ ID NO: 33948 - RNA, 22 nt, Homo sapiens
auguaugugggacgguaaacca

SEQ ID NO: 33949 - RNA, 21 nt, Homo sapiens
aguucucccaacguaaaccca

SEQ ID NO: 33950 - RNA, 25 nt, Homo sapiens
accaacggaccuacuucccuccgcc

SEQ ID NO: 33951 - RNA, 20 nt, Homo sapiens
aguacaucaucuauacugua

SEQ ID NO: 33952 - RNA, 22 nt, Homo sapiens
agcccaaaaggagaauucuuug

SEQ ID NO: 33953 - RNA, 21 nt, Homo sapiens
gcggaacuuagccacugugaa

SEQ ID NO: 33954 - RNA, 22 nt, Homo sapiens
cucauccgauguacaauaauuu

SEQ ID NO: 33955 - RNA, 23 nt, Homo sapiens
agcaaaaaugugcuagugccaaa

SEQ ID NO: 33956 - RNA, 21 nt, Homo sapiens
auaauggagaccaggccacga

SEQ ID NO: 33957 - RNA, 20 nt, Homo sapiens
ggggggcgaggcagguguga

SEQ ID NO: 33958 - RNA, 18 nt, Homo sapiens
cccccaccaccacgcccg

SEQ ID NO: 33959 - RNA, 17 nt, Homo sapiens
gggagaggaggaggcga

SEQ ID NO: 33960 - RNA, 22 nt, Homo sapiens
agcugaguguaggauguuuaca

SEQ ID NO: 33961 - RNA, 21 nt, Homo sapiens
guucuaacccauuguggccaa

SEQ ID NO: 33962 - RNA, 19 nt, Homo sapiens
guccugaauuccgcagccu

SEQ ID NO: 33963 - RNA, 19 nt, Homo sapiens
gcucuaagaaagccacacu

SEQ ID NO: 33964 - RNA, 22 nt, Homo sapiens
agccaagcucagacggauccga

SEQ ID NO: 33965 - RNA, 21 nt, Homo sapiens
gcaagcccagaccgcaaaaag

SEQ ID NO: 33966 - RNA, 22 nt, Homo sapiens
aggcauaggaugacaaagggaa

SEQ ID NO: 33967 - RNA, 22 nt, Homo sapiens
aggcgaaggaugacaaagggaa

SEQ ID NO: 33968 - RNA, 23 nt, Homo sapiens
uccaaucaguuccugaugcagua

SEQ ID NO: 33969 - RNA, 21 nt, Homo sapiens
gcagaacuuagccacugugaa

SEQ ID NO: 33970 - RNA, 22 nt, Homo sapiens
uccaggagcucacaaucuagug

SEQ ID NO: 33971 - RNA, 22 nt, Homo sapiens
cucaauagacugugagcuccuu

SEQ ID NO: 33972 - RNA, 22 nt, Homo sapiens
uauggaugcaaaaugaucccaa

SEQ ID NO: 33973 - RNA, 22 nt, Homo sapiens
gcaaaaguaauugccaguuuug

SEQ ID NO: 33974 - RNA, 22 nt, Homo sapiens
ugcaaaaguagucucaguuuuu

SEQ ID NO: 33975 - RNA, 19 nt, Homo sapiens
aaaaguaauuacaguuuuu

SEQ ID NO: 33976 - RNA, 22 nt, Homo sapiens
ggaccuaaaaauacaaugcaua

SEQ ID NO: 33977 - RNA, 23 nt, Homo sapiens
cccagcuagauuguaagcuccuu

SEQ ID NO: 33978 - RNA, 23 nt, Homo sapiens
cccagcuagauuguaagcuccuu

SEQ ID NO: 33979 - RNA, 23 nt, Homo sapiens
aaccaagaccccggagaucccag

SEQ ID NO: 33980 - RNA, 22 nt, Homo sapiens
ucggucccucgggccagggcag

SEQ ID NO: 33981 - RNA, 21 nt, Homo sapiens
ccaaccaaugaaagaaugcuu

SEQ ID NO: 33982 - RNA, 21 nt, Homo sapiens
ccaaccaaugaaagaaugcuu

SEQ ID NO: 33983 - RNA, 27 nt, Homo sapiens
ugcccacucucaccaucaccuacagug

SEQ ID NO: 33984 - RNA, 22 nt, Homo sapiens
cuggagagacaaggggaagagg

SEQ ID NO: 33985 - RNA, 23 nt, Homo sapiens
aacaggugcucaaauaagacuug

SEQ ID NO: 33986 - RNA, 20 nt, Homo sapiens
ugucuccacagggcucuuua

SEQ ID NO: 33987 - RNA, 18 nt, Homo sapiens
aucacauucaccucccug

SEQ ID NO: 33988 - RNA, 22 nt, Homo sapiens
cuggagacacgugcacuguaga

SEQ ID NO: 33989 - RNA, 21 nt, Homo sapiens
ccgugguucuacccuguggua

SEQ ID NO: 33990 - RNA, 23 nt, Homo sapiens
gggagugaagacacggagccaga

SEQ ID NO: 33991 - RNA, 23 nt, Homo sapiens
accccuaucacgauuagcauuaa

SEQ ID NO: 33992 - RNA, 22 nt, Homo sapiens
uccacauggaguugcuguuaca

SEQ ID NO: 33993 - RNA, 22 nt, Homo sapiens
gcuggguggagaagguggugaa

SEQ ID NO: 33994 - RNA, 22 nt, Homo sapiens
uagucaagugaagcagugggag

SEQ ID NO: 33995 - RNA, 23 nt, Homo sapiens
uccaucauuacccggcaguauua

SEQ ID NO: 33996 - RNA, 22 nt, Homo sapiens
aggcauaggaugacaaagggaa

SEQ ID NO: 33997 - RNA, 22 nt, Homo sapiens
aggcgaaggaugacaaagggaa

SEQ ID NO: 33998 - RNA, 22 nt, Homo sapiens
ugcaacuuaguaaugugcaaua

SEQ ID NO: 33999 - RNA, 21 nt, Homo sapiens
gaccaagaaauagccuuucaa

SEQ ID NO: 34000 - RNA, 21 nt, Homo sapiens
aaacaucacugcaagucuuaa

SEQ ID NO: 34001 - RNA, 23 nt, Homo sapiens
gggcucuuacucccucaggcacu

SEQ ID NO: 34002 - RNA, 24 nt, Homo sapiens
acugggcacaaacauguccagguc

SEQ ID NO: 34003 - RNA, 21 nt, Homo sapiens
caucaccuuccuucuccucca

SEQ ID NO: 34004 - RNA, 19 nt, Homo sapiens
ccaccucccgaguccucac

SEQ ID NO: 34005 - RNA, 22 nt, Homo sapiens
cacgaccgacgccacgccgagu

SEQ ID NO: 34006 - RNA, 22 nt, Homo sapiens
ccagaacugaguccacagggca

SEQ ID NO: 34007 - RNA, 22 nt, Homo sapiens
agucuucacaacagcccugugu

SEQ ID NO: 34008 - RNA, 21 nt, Homo sapiens
ucaaucacagauagcaccccu

SEQ ID NO: 34009 - RNA, 22 nt, Homo sapiens
aguccagauucugugcccacca

SEQ ID NO: 34010 - RNA, 23 nt, Homo sapiens
gucagaccccgagggguccucgc

SEQ ID NO: 34011 - RNA, 22 nt, Homo sapiens
aagagggagacccaggcucgga

SEQ ID NO: 34012 - RNA, 22 nt, Homo sapiens
gcacauguucugcggcccacca

SEQ ID NO: 34013 - RNA, 24 nt, Homo sapiens
acgcgcaggccagagacccaggca

SEQ ID NO: 34014 - RNA, 21 nt, Homo sapiens
agguaauaccaauaccuugug

SEQ ID NO: 34015 - RNA, 22 nt, Homo sapiens
aacuguacaaacuacuaccuca

SEQ ID NO: 34016 - RNA, 22 nt, Homo sapiens
aacaacacuugaccacauccug

SEQ ID NO: 34017 - RNA, 23 nt, Homo sapiens
acggcuaguggaccaggugaagu

SEQ ID NO: 34018 - RNA, 22 nt, Homo sapiens
cgauguaguccaaaggcacaua

SEQ ID NO: 34019 - RNA, 23 nt, Homo sapiens
ucuacuccaaaaggcuacaauca

SEQ ID NO: 34020 - RNA, 20 nt, Homo sapiens
gaaagggcuucccuuugcag

SEQ ID NO: 34021 - RNA, 20 nt, Homo sapiens
gaaagggcuucccuuugcag

SEQ ID NO: 34022 - RNA, 21 nt, Homo sapiens
agaaguagaccauguguccua

SEQ ID NO: 34023 - RNA, 22 nt, Homo sapiens
ccccucuggucaaccagucaca

SEQ ID NO: 34024 - RNA, 22 nt, Homo sapiens
acuccaacagggccgcgucucc

SEQ ID NO: 34025 - RNA, 23 nt, Homo sapiens
gggagugaagacacggagccaga

SEQ ID NO: 34026 - RNA, 21 nt, Homo sapiens
gaccaaucgccguccccgccg

SEQ ID NO: 34027 - RNA, 21 nt, Homo sapiens
agagcucauccauaguuguca

SEQ ID NO: 34028 - RNA, 22 nt, Homo sapiens
acaguucuucaacuggcagcuu

SEQ ID NO: 34029 - RNA, 22 nt, Homo sapiens
cucauauuacaaugagcucauc

SEQ ID NO: 34030 - RNA, 19 nt, Homo sapiens
auuuugguacagcagcuca

SEQ ID NO: 34031 - RNA, 21 nt, Homo sapiens
cucacucagauggccaacuca

SEQ ID NO: 34032 - RNA, 22 nt, Homo sapiens
uggggacccucccugaaccaag

SEQ ID NO: 34033 - RNA, 22 nt, Homo sapiens
gcggucccgcggcgccccgccu

SEQ ID NO: 34034 - RNA, 21 nt, Homo sapiens
ggucagaacccaucauucacu

SEQ ID NO: 34035 - RNA, 20 nt, Homo sapiens
ugucuccacagggcucuuua

SEQ ID NO: 34036 - RNA, 18 nt, Homo sapiens
aucacauucaccucccug

SEQ ID NO: 34037 - RNA, 19 nt, Homo sapiens
cagcaucagcagcaucauc

SEQ ID NO: 34038 - RNA, 22 nt, Homo sapiens
acaguucuucaacuggcagcuu

SEQ ID NO: 34039 - RNA, 22 nt, Homo sapiens
uaaccgauuucagauggugcua

SEQ ID NO: 34040 - RNA, 23 nt, Homo sapiens
aacacugauuucaaauggugcua

SEQ ID NO: 34041 - RNA, 22 nt, Homo sapiens
uaaccgauuucaaauggugcua

SEQ ID NO: 34042 - RNA, 22 nt, Homo sapiens
aggaaaccagcaaguguugacg

SEQ ID NO: 34043 - RNA, 21 nt, Homo sapiens
uugucuaaccagucaccuguu

SEQ ID NO: 34044 - RNA, 19 nt, Homo sapiens
auuuugguacagcagcuca

SEQ ID NO: 34045 - RNA, 22 nt, Homo sapiens
ggaccuaaaaauacaaugcaua

SEQ ID NO: 34046 - RNA, 21 nt, Homo sapiens
guccugagagcgcugccuccu

SEQ ID NO: 34047 - RNA, 22 nt, Homo sapiens
gcacaaaucuccagaccaccca

SEQ ID NO: 34048 - RNA, 21 nt, Homo sapiens
gaccaaucgccguccccgccg

SEQ ID NO: 34049 - RNA, 21 nt, Homo sapiens
aagugucagacacgguggugg

SEQ ID NO: 34050 - RNA, 23 nt, Homo sapiens
aaaucagaaucacaccuggggga

SEQ ID NO: 34051 - RNA, 23 nt, Homo sapiens
aaaucagaaucacaccuggggga

SEQ ID NO: 34052 - RNA, 25 nt, Homo sapiens
acggagcugucccaacaccaccccu

SEQ ID NO: 34053 - RNA, 22 nt, Homo sapiens
gauccgagcaccggggaccccc

SEQ ID NO: 34054 - RNA, 21 nt, Homo sapiens
aguucucccaacguaaaccca

SEQ ID NO: 34055 - RNA, 24 nt, Homo sapiens
acgcagagcccgaaagcccccagu

SEQ ID NO: 34056 - RNA, 24 nt, Homo sapiens
acgcagagcccgaaagcccccagu

SEQ ID NO: 34057 - RNA, 22 nt, Homo sapiens
gcggucccgcggcgccccgccu

SEQ ID NO: 34058 - RNA, 22 nt, Homo sapiens
cacucuaaagggaggcacuuug

SEQ ID NO: 34059 - RNA, 21 nt, Homo sapiens
ccaaccaaugaaagaaugcuu

SEQ ID NO: 34060 - RNA, 17 nt, Homo sapiens
gggagaggaggaggcga

SEQ ID NO: 34061 - RNA, 23 nt, Homo sapiens
gggagugaagacacggagccaga

SEQ ID NO: 34062 - RNA, 22 nt, Homo sapiens
cggugagcacccggccccugcg

SEQ ID NO: 34063 - RNA, 22 nt, Homo sapiens
cccaacaacaggaaacuaccua

SEQ ID NO: 34064 - RNA, 22 nt, Homo sapiens
acugccugucugugccugcugu

SEQ ID NO: 34065 - RNA, 21 nt, Homo sapiens
acaggauugagggggggcccu

SEQ ID NO: 34066 - RNA, 21 nt, Homo sapiens
acaggauugagggggggcccu

SEQ ID NO: 34067 - RNA, 22 nt, Homo sapiens
ucgcccucucaacccagcuuuu

SEQ ID NO: 34068 - RNA, 22 nt, Homo sapiens
uugcccucucaacccagcuuuu

SEQ ID NO: 34069 - RNA, 20 nt, Homo sapiens
acccucucaacccagcuuuu

SEQ ID NO: 34070 - RNA, 19 nt, Homo sapiens
uccucucaacccagcuuuu

SEQ ID NO: 34071 - RNA, 21 nt, Homo sapiens
ccuacguuccauagucuacca

SEQ ID NO: 34072 - RNA, 22 nt, Homo sapiens
aaaguaacugcaguuuuugcua

SEQ ID NO: 34073 - RNA, 25 nt, Homo sapiens
aggccgccacccgcccgcgaucccu

SEQ ID NO: 34074 - RNA, 23 nt, Homo sapiens
ggaagccaucaagucgcugcagg

SEQ ID NO: 34075 - RNA, 21 nt, Homo sapiens
ccccucccagccucccugcca

SEQ ID NO: 34076 - RNA, 24 nt, Homo sapiens
gaagucacucccaggcagcugcaa

SEQ ID NO: 34077 - RNA, 18 nt, Homo sapiens
aucacauucaccucccug

SEQ ID NO: 34078 - RNA, 23 nt, Homo sapiens
gggagugaagacacggagccaga

SEQ ID NO: 34079 - RNA, 22 nt, Homo sapiens
ucaggaacugccuuucucucca

SEQ ID NO: 34080 - RNA, 22 nt, Homo sapiens
ggagagccuccacccaacccuc

SEQ ID NO: 34081 - RNA, 22 nt, Homo sapiens
aaucagucucauugcuuuauaa

SEQ ID NO: 34082 - RNA, 19 nt, Homo sapiens
auuuugguacagcagcuca

SEQ ID NO: 34083 - RNA, 23 nt, Homo sapiens
acccaacagccccugcaagggau

SEQ ID NO: 34084 - RNA, 21 nt, Homo sapiens
caucaccuuccuucuccucca

SEQ ID NO: 34085 - RNA, 23 nt, Homo sapiens
ccgcuugagcuaacuccgacccg

SEQ ID NO: 34086 - RNA, 22 nt, Homo sapiens
ggaggccgggacgagugcaaua

SEQ ID NO: 34087 - RNA, 18 nt, Homo sapiens
cccccaccaccacgcccg

SEQ ID NO: 34088 - RNA, 17 nt, Homo sapiens
gggagaggaggaggcga

SEQ ID NO: 34089 - RNA, 23 nt, Homo sapiens
gggagugaagacacggagccaga

SEQ ID NO: 34090 - RNA, 23 nt, Homo sapiens
aggaacagcagcagcccgggccg

SEQ ID NO: 34091 - RNA, 22 nt, Homo sapiens
ccucauggaaggguuccccacu

SEQ ID NO: 34092 - RNA, 23 nt, Homo sapiens
cugcagaacuguucccgcugcua

SEQ ID NO: 34093 - RNA, 17 nt, Homo sapiens
uggaggccccagcgaga

SEQ ID NO: 34094 - RNA, 22 nt, Homo sapiens
ugcuguuagcccuagccccgca

SEQ ID NO: 34095 - RNA, 21 nt, Homo sapiens
ccccucccagccucccugcca

SEQ ID NO: 34096 - RNA, 22 nt, Homo sapiens
auccuucuacaaauucacccau

SEQ ID NO: 34097 - RNA, 22 nt, Homo sapiens
agacaacaaugccaaccucaca

SEQ ID NO: 34098 - RNA, 23 nt, Homo sapiens
gaaacccagcagacaauguagcu

SEQ ID NO: 34099 - RNA, 24 nt, Homo sapiens
ucagagcauguguuuaaucaggcu

SEQ ID NO: 34100 - RNA, 24 nt, Homo sapiens
ucacagguuaaagggucucaggga

SEQ ID NO: 34101 - RNA, 22 nt, Homo sapiens
ucacaaguuagggucucaggga

SEQ ID NO: 34102 - RNA, 23 nt, Homo sapiens
agcccuguucuacagcccugagg

SEQ ID NO: 34103 - RNA, 23 nt, Homo sapiens
gggagugaagacacggagccaga

SEQ ID NO: 34104 - RNA, 22 nt, Homo sapiens
acugggacuuuguaggccaguu

SEQ ID NO: 34105 - RNA, 22 nt, Homo sapiens
agcgggacuuugagggccaguu

SEQ ID NO: 34106 - RNA, 22 nt, Homo sapiens
ugagccacugugccuggccuga

SEQ ID NO: 34107 - RNA, 23 nt, Homo sapiens
uauucucgcacggacuacaacca

SEQ ID NO: 34108 - RNA, 22 nt, Homo sapiens
uagucaagugaagcagugggag

SEQ ID NO: 34109 - RNA, 22 nt, Homo sapiens
acaguucuucaacuggcagcuu

SEQ ID NO: 34110 - RNA, 22 nt, Homo sapiens
cucaauagacugugagcuccuu

SEQ ID NO: 34111 - RNA, 23 nt, Homo sapiens
acaccaaugcccuaggggaugcg

SEQ ID NO: 34112 - RNA, 22 nt, Homo sapiens
aaucagucucauugcuuuauaa

SEQ ID NO: 34113 - RNA, 22 nt, Homo sapiens
ugcaagccuugggugugggagg

SEQ ID NO: 34114 - RNA, 19 nt, Homo sapiens
auuuugguacagcagcuca

SEQ ID NO: 34115 - RNA, 19 nt, Homo sapiens
gccugcugacaccgugccu

SEQ ID NO: 34116 - RNA, 23 nt, Homo sapiens
cccagcuagauuguaagcuccuu

SEQ ID NO: 34117 - RNA, 21 nt, Homo sapiens
caucaccuuccuucuccucca

SEQ ID NO: 34118 - RNA, 22 nt, Homo sapiens
gcugaggcuguggggcuggagu

SEQ ID NO: 34119 - RNA, 18 nt, Homo sapiens
cccccaccaccacgcccg

SEQ ID NO: 34120 - RNA, 17 nt, Homo sapiens
ggguggcagcgguggga

SEQ ID NO: 34121 - RNA, 24 nt, Homo sapiens
acugcuggucuucagucagggcca

SEQ ID NO: 34122 - RNA, 19 nt, Homo sapiens
cagcaucagcagcaucauc

SEQ ID NO: 34123 - RNA, 22 nt, Homo sapiens
ucagaccgagacaagugcaaug

SEQ ID NO: 34124 - RNA, 22 nt, Homo sapiens
aggaaaccagcaaguguugacg

SEQ ID NO: 34125 - RNA, 22 nt, Homo sapiens
uccucuuuucuuagagacucac

SEQ ID NO: 34126 - RNA, 22 nt, Homo sapiens
ugcuguuagcccuagccccgca

SEQ ID NO: 34127 - RNA, 20 nt, Homo sapiens
gcaagacaucacaagacucu

SEQ ID NO: 34128 - RNA, 20 nt, Homo sapiens
uacugcuuccacagcucccc

SEQ ID NO: 34129 - RNA, 21 nt, Homo sapiens
gagcugcauccuggcuccggg

SEQ ID NO: 34130 - RNA, 18 nt, Homo sapiens
gaaaugagggccagcuga

SEQ ID NO: 34131 - RNA, 21 nt, Homo sapiens
cugaggagagaggaggugggg

SEQ ID NO: 34132 - RNA, 22 nt, Homo sapiens
gugggguggguggucaggccga

SEQ ID NO: 34133 - RNA, 17 nt, Homo sapiens
gggagaggaggaggcga

SEQ ID NO: 34134 - RNA, 23 nt, Homo sapiens
cggcucugucgucgaggcgcuca

SEQ ID NO: 34135 - RNA, 23 nt, Homo sapiens
ucucacccagguagcaaggauua

SEQ ID NO: 34136 - RNA, 21 nt, Homo sapiens
caucaccuuccuucuccucca

SEQ ID NO: 34137 - RNA, 22 nt, Homo sapiens
gcugaggcuguggggcuggagu

SEQ ID NO: 34138 - RNA, 21 nt, Homo sapiens
cggcucggguggcggcgacgg

SEQ ID NO: 34139 - RNA, 21 nt, Homo sapiens
cucccccacugcagcuggcac

SEQ ID NO: 34140 - RNA, 21 nt, Homo sapiens
ccccucccagccucccugcca

SEQ ID NO: 34141 - RNA, 17 nt, Homo sapiens
gggagaggaggaggcga

SEQ ID NO: 34142 - RNA, 21 nt, Homo sapiens
gaccaaucgccguccccgccg

SEQ ID NO: 34143 - RNA, 22 nt, Homo sapiens
uggcagcagcggagggggcaga

SEQ ID NO: 34144 - RNA, 22 nt, Homo sapiens
ucagaccgagacaagugcaaug

SEQ ID NO: 34145 - RNA, 20 nt, Homo sapiens
ccagcagcaccuggggcagu

SEQ ID NO: 34146 - RNA, 21 nt, Homo sapiens
auccuguacugagcugccccg

SEQ ID NO: 34147 - RNA, 22 nt, Homo sapiens
gauagagugcagaccagggucu

SEQ ID NO: 34148 - RNA, 24 nt, Homo sapiens
acgcagagcccgaaagcccccagu

SEQ ID NO: 34149 - RNA, 24 nt, Homo sapiens
acgcgcaggccagagacccaggca

SEQ ID NO: 34150 - RNA, 22 nt, Homo sapiens
gcggucccgcggcgccccgccu

SEQ ID NO: 34151 - RNA, 17 nt, Homo sapiens
uggaggccccagcgaga

SEQ ID NO: 34152 - RNA, 23 nt, Homo sapiens
ccgcuugagcuaacuccgacccg

SEQ ID NO: 34153 - RNA, 20 nt, Homo sapiens
cucaaagcaaacccugcaga

SEQ ID NO: 34154 - RNA, 20 nt, Homo sapiens
cucaaagcaaacccugcaga

SEQ ID NO: 34155 - RNA, 24 nt, Homo sapiens
acugcuggucuucagucagggcca

SEQ ID NO: 34156 - RNA, 23 nt, Homo sapiens
gggagugaagacacggagccaga

SEQ ID NO: 34157 - RNA, 22 nt, Homo sapiens
cagaaagugcuucccucuagag

SEQ ID NO: 34158 - RNA, 20 nt, Homo sapiens
acagcaaggagggcaggagg

SEQ ID NO: 34159 - RNA, 21 nt, Homo sapiens
ugcaaugcaacuacaaugcac

SEQ ID NO: 34160 - RNA, 20 nt, Homo sapiens
gcaaugcaacagcaaugcac

SEQ ID NO: 34161 - RNA, 23 nt, Homo sapiens
acggcuaguggaccaggugaagu

SEQ ID NO: 34162 - RNA, 22 nt, Homo sapiens
aucgggaggggacugagccuga

SEQ ID NO: 34163 - RNA, 22 nt, Homo sapiens
aggaaaccagcaaguguugacg

SEQ ID NO: 34164 - RNA, 22 nt, Homo sapiens
acgguccuacacucaaggcaug

SEQ ID NO: 34165 - RNA, 21 nt, Homo sapiens
cccgaggagccgggcaggcuu

SEQ ID NO: 34166 - RNA, 25 nt, Homo sapiens
acggagcugucccaacaccaccccu

SEQ ID NO: 34167 - RNA, 21 nt, Homo sapiens
gaaggaagugagugcagccac

SEQ ID NO: 34168 - RNA, 24 nt, Homo sapiens
acgcgcaggccagagacccaggca

SEQ ID NO: 34169 - RNA, 20 nt, Homo sapiens
uacugcuuccacagcucccc

SEQ ID NO: 34170 - RNA, 23 nt, Homo sapiens
uccaucaucaaaacaaauggagu

SEQ ID NO: 34171 - RNA, 22 nt, Homo sapiens
acaaaguucugugaugcacuga

SEQ ID NO: 34172 - RNA, 21 nt, Homo sapiens
gggcaucugggacgcgcagga

SEQ ID NO: 34173 - RNA, 21 nt, Homo sapiens
gaccaaucgccguccccgccg

SEQ ID NO: 34174 - RNA, 23 nt, Homo sapiens
gaaacccagcagacaauguagcu

SEQ ID NO: 34175 - RNA, 21 nt, Homo sapiens
acccaguagccagauguagcu

SEQ ID NO: 34176 - RNA, 21 nt, Homo sapiens
aaagugucagauacggugugg

SEQ ID NO: 34177 - RNA, 23 nt, Homo sapiens
gcgcccaauuaaugucuguugau

SEQ ID NO: 34178 - RNA, 22 nt, Homo sapiens
auaaggauuuuuaggggcauua

SEQ ID NO: 34179 - RNA, 22 nt, Homo sapiens
gcggucccgcggcgccccgccu

SEQ ID NO: 34180 - RNA, 22 nt, Homo sapiens
ugcuguuagcccuagccccgca

SEQ ID NO: 34181 - RNA, 22 nt, Homo sapiens
ccucgggauggcgcccguucac

SEQ ID NO: 34182 - RNA, 22 nt, Homo sapiens
acacacccacgcgagccggaaa

SEQ ID NO: 34183 - RNA, 21 nt, Homo sapiens
guccugagagcgcugccuccu

SEQ ID NO: 34184 - RNA, 17 nt, Homo sapiens
uggaggccccagcgaga

SEQ ID NO: 34185 - RNA, 22 nt, Homo sapiens
agacaacaaugccaaccucaca

SEQ ID NO: 34186 - RNA, 18 nt, Homo sapiens
aucacauucaccucccug

SEQ ID NO: 34187 - RNA, 21 nt, Homo sapiens
cggggugcacgggcggagggc

SEQ ID NO: 34188 - RNA, 23 nt, Homo sapiens
gggagugaagacacggagccaga

SEQ ID NO: 34189 - RNA, 21 nt, Homo sapiens
gggcaucugggacgcgcagga

SEQ ID NO: 34190 - RNA, 23 nt, Homo sapiens
cccaacagacauggcgguacuca

SEQ ID NO: 34191 - RNA, 23 nt, Homo sapiens
aagaaucuugucccgcagguccu

SEQ ID NO: 34192 - RNA, 22 nt, Homo sapiens
uccagcaaagggaagcgcuuuc

SEQ ID NO: 34193 - RNA, 22 nt, Homo sapiens
accucuaaaggggagcgcuuug

SEQ ID NO: 34194 - RNA, 23 nt, Homo sapiens
acacucuaaagagaagcgcuuug

SEQ ID NO: 34195 - RNA, 21 nt, Homo sapiens
gcuccaaagggaagcgcuuug

SEQ ID NO: 34196 - RNA, 21 nt, Homo sapiens
ccucuaaagagaagcgcuuuc

SEQ ID NO: 34197 - RNA, 21 nt, Homo sapiens
cccgaggagccgggcaggcuu

SEQ ID NO: 34198 - RNA, 19 nt, Homo sapiens
gcucuaagaaagccacacu

SEQ ID NO: 34199 - RNA, 21 nt, Homo sapiens
gaaggaagugagugcagccac

SEQ ID NO: 34200 - RNA, 22 nt, Homo sapiens
uauccacuacaccccgcugccu

SEQ ID NO: 34201 - RNA, 22 nt, Homo sapiens
aaccauacaaccuacuaccuca

SEQ ID NO: 34202 - RNA, 21 nt, Homo sapiens
ugcaggcugaucuucuucucu

SEQ ID NO: 34203 - RNA, 18 nt, Homo sapiens
cccccaccaccacgcccg

SEQ ID NO: 34204 - RNA, 23 nt, Homo sapiens
uccaucaucaaaacaaauggagu

SEQ ID NO: 34205 - RNA, 21 nt, Homo sapiens
gaccaaucgccguccccgccg

SEQ ID NO: 34206 - RNA, 22 nt, Homo sapiens
cggugagcacccggccccugcg

SEQ ID NO: 34207 - RNA, 22 nt, Homo sapiens
ucacaguugccagcugagauua

SEQ ID NO: 34208 - RNA, 23 nt, Homo sapiens
acaccccaaaaucgaagcacuuc

SEQ ID NO: 34209 - RNA, 23 nt, Homo sapiens
ucaacgggagugaucgugucauu

SEQ ID NO: 34210 - RNA, 23 nt, Homo sapiens
cugcagaacuguucccgcugcua

SEQ ID NO: 34211 - RNA, 24 nt, Homo sapiens
cagaaagugcuuucuuuuggagaa

SEQ ID NO: 34212 - RNA, 22 nt, Homo sapiens
aacacucuaaaaggaggcacuu

SEQ ID NO: 34213 - RNA, 22 nt, Homo sapiens
cugcucaaacccuccaaugacu

SEQ ID NO: 34214 - RNA, 22 nt, Homo sapiens
gcggucccgcggcgccccgccu

SEQ ID NO: 34215 - RNA, 21 nt, Homo sapiens
ugacugacagcuuuuugagua

SEQ ID NO: 34216 - RNA, 21 nt, Homo sapiens
cggggugcacgggcggagggc

SEQ ID NO: 34217 - RNA, 22 nt, Homo sapiens
ucagaccgagacaagugcaaug

SEQ ID NO: 34218 - RNA, 22 nt, Homo sapiens
aagagggagacccaggcucgga

SEQ ID NO: 34219 - RNA, 25 nt, Homo sapiens
aggccgccacccgcccgcgaucccu

SEQ ID NO: 34220 - RNA, 23 nt, Homo sapiens
acagcgcucgcaaccgcagcgau

SEQ ID NO: 34221 - RNA, 25 nt, Homo sapiens
accaacggaccuacuucccuccgcc

SEQ ID NO: 34222 - RNA, 21 nt, Homo sapiens
aagggucaguaagcacccgcg

SEQ ID NO: 34223 - RNA, 24 nt, Homo sapiens
cacccccagagccucagcucccca

SEQ ID NO: 34224 - RNA, 22 nt, Homo sapiens
ucaggaacugccuuucucucca

SEQ ID NO: 34225 - RNA, 22 nt, Homo sapiens
uggcagcagcggagggggcaga

SEQ ID NO: 34226 - RNA, 20 nt, Homo sapiens
cccgccgcgucgcccugggg

SEQ ID NO: 34227 - RNA, 20 nt, Homo sapiens
ccagcagcaccuggggcagu

SEQ ID NO: 34228 - RNA, 23 nt, Homo sapiens
aaagucucgcucucugccccuca

SEQ ID NO: 34229 - RNA, 21 nt, Homo sapiens
auccuguacugagcugccccg

SEQ ID NO: 34230 - RNA, 18 nt, Homo sapiens
acccucugaaaggaagca

SEQ ID NO: 34231 - RNA, 22 nt, Homo sapiens
aaagugcuucuuaccuccagau

SEQ ID NO: 34232 - RNA, 19 nt, Homo sapiens
gccucagaggcagcugcuu

SEQ ID NO: 34233 - RNA, 21 nt, Homo sapiens
ggggagcgggggcccugccuu

SEQ ID NO: 34234 - RNA, 21 nt, Homo sapiens
aucugcacugucagcacuuua

SEQ ID NO: 34235 - RNA, 21 nt, Homo sapiens
cucccccacugcagcuggcac

SEQ ID NO: 34236 - RNA, 18 nt, Homo sapiens
gaaaugagggccagcuga

SEQ ID NO: 34237 - RNA, 22 nt, Homo sapiens
uccggggacgaacgggacgggu

SEQ ID NO: 34238 - RNA, 23 nt, Homo sapiens
gggagugaagacacggagccaga

SEQ ID NO: 34239 - RNA, 22 nt, Homo sapiens
acaguucuucaacuggcagcuu

SEQ ID NO: 34240 - RNA, 23 nt, Homo sapiens
aaagucucgcucucugccccuca

SEQ ID NO: 34241 - RNA, 21 nt, Homo sapiens
acuccaaagggaagcgccuuc

SEQ ID NO: 34242 - RNA, 22 nt, Homo sapiens
cgcucuaaagggaagcgccuuc

SEQ ID NO: 34243 - RNA, 20 nt, Homo sapiens
uacugcuuccacagcucccc

SEQ ID NO: 34244 - RNA, 22 nt, Homo sapiens
gggagaggucucccugcgcaca

SEQ ID NO: 34245 - RNA, 22 nt, Homo sapiens
ggagauggagccagggcccuaa

SEQ ID NO: 34246 - RNA, 18 nt, Homo sapiens
auucaaucuacugccuca

SEQ ID NO: 34247 - RNA, 21 nt, Homo sapiens
aacuccuguaugaagccguuc

SEQ ID NO: 34248 - RNA, 21 nt, Homo sapiens
guccugagagcgcugccuccu

SEQ ID NO: 34249 - RNA, 21 nt, Homo sapiens
ggggagcgggggcccugccuu

SEQ ID NO: 34250 - RNA, 22 nt, Homo sapiens
gaggcucagaauggcucaggag

SEQ ID NO: 34251 - RNA, 21 nt, Homo sapiens
uggggauuacacuucaacagg

SEQ ID NO: 34252 - RNA, 22 nt, Homo sapiens
ucucucccauuagaguugaaaa

SEQ ID NO: 34253 - RNA, 22 nt, Homo sapiens
aggcauaggaugacaaagggaa

SEQ ID NO: 34254 - RNA, 22 nt, Homo sapiens
aggcgaaggaugacaaagggaa

SEQ ID NO: 34255 - RNA, 23 nt, Homo sapiens
gcgcccaauuaaugucuguugau

SEQ ID NO: 34256 - RNA, 22 nt, Homo sapiens
uauucaggaacauauugcaaaa

SEQ ID NO: 34257 - RNA, 22 nt, Homo sapiens
uauucaggaacauauugcaaaa

SEQ ID NO: 34258 - RNA, 22 nt, Homo sapiens
acuucaaggaucuuaaacuuug

SEQ ID NO: 34259 - RNA, 24 nt, Homo sapiens
acugggcacaaacauguccagguc

SEQ ID NO: 34260 - RNA, 21 nt, Homo sapiens
caguagagauuguuucaacac

SEQ ID NO: 34261 - RNA, 23 nt, Homo sapiens
uauucucgcacggacuacaacca

SEQ ID NO: 34262 - RNA, 22 nt, Homo sapiens
acaguucuucaacuggcagcuu

SEQ ID NO: 34263 - RNA, 22 nt, Homo sapiens
cucaauagacugugagcuccuu

SEQ ID NO: 34264 - RNA, 23 nt, Homo sapiens
acccuauaagcaauauugcacua

SEQ ID NO: 34265 - RNA, 22 nt, Homo sapiens
acacucuaaagggaugcacgau

SEQ ID NO: 34266 - RNA, 22 nt, Homo sapiens
acacucuaaaaggaugcacgau

SEQ ID NO: 34267 - RNA, 23 nt, Homo sapiens
cccagcuagauuguaagcuccuu

SEQ ID NO: 34268 - RNA, 21 nt, Homo sapiens
caucaccuuccuucuccucca

SEQ ID NO: 34269 - RNA, 21 nt, Homo sapiens
aucugcacugucagcacuuua

SEQ ID NO: 34270 - RNA, 22 nt, Homo sapiens
agacaacaaugccaaccucaca

SEQ ID NO: 34271 - RNA, 22 nt, Homo sapiens
acucaccgacagguugaauguu

SEQ ID NO: 34272 - RNA, 18 nt, Homo sapiens
ggagaggagggcacugga

SEQ ID NO: 34273 - RNA, 22 nt, Homo sapiens
uggcagcagcggagggggcaga

SEQ ID NO: 34274 - RNA, 22 nt, Homo sapiens
acugggacuuuguaggccaguu

SEQ ID NO: 34275 - RNA, 22 nt, Homo sapiens
agcgggacuuugagggccaguu

SEQ ID NO: 34276 - RNA, 21 nt, Homo sapiens
acaugguuagaucaagcacaa

SEQ ID NO: 34277 - RNA, 21 nt, Homo sapiens
aagugucagacacgguggugg

SEQ ID NO: 34278 - RNA, 20 nt, Homo sapiens
ccagcagcaccuggggcagu

SEQ ID NO: 34279 - RNA, 22 nt, Homo sapiens
aucgggaggggacugagccuga

SEQ ID NO: 34280 - RNA, 21 nt, Homo sapiens
auccuguacugagcugccccg

SEQ ID NO: 34281 - RNA, 21 nt, Homo sapiens
guucuaacccauuguggccaa

SEQ ID NO: 34282 - RNA, 21 nt, Homo sapiens
cccgaggagccgggcaggcuu

SEQ ID NO: 34283 - RNA, 23 nt, Homo sapiens
ugcgggcgggacgagcaagcaca

SEQ ID NO: 34284 - RNA, 22 nt, Homo sapiens
gcugaggcuguggggcuggagu

SEQ ID NO: 34285 - RNA, 20 nt, Homo sapiens
uacugcuuccacagcucccc

SEQ ID NO: 34286 - RNA, 21 nt, Homo sapiens
gagcugcauccuggcuccggg

SEQ ID NO: 34287 - RNA, 23 nt, Homo sapiens
gggagugaagacacggagccaga

SEQ ID NO: 34288 - RNA, 23 nt, Homo sapiens
aggaacagcagcagcccgggccg

SEQ ID NO: 34289 - RNA, 23 nt, Homo sapiens
aggaacagcagcagcccgggccg

SEQ ID NO: 34290 - RNA, 22 nt, Homo sapiens
ucaggaacugccuuucucucca

SEQ ID NO: 34291 - RNA, 22 nt, Homo sapiens
ucaggaacugccuuucucucca

SEQ ID NO: 34292 - RNA, 21 nt, Homo sapiens
gaccaaucgccguccccgccg

SEQ ID NO: 34293 - RNA, 21 nt, Homo sapiens
gaccaaucgccguccccgccg

SEQ ID NO: 34294 - RNA, 21 nt, Homo sapiens
acaggauugagggggggcccu

SEQ ID NO: 34295 - RNA, 23 nt, Homo sapiens
cggcucugucgucgaggcgcuca

SEQ ID NO: 34296 - RNA, 23 nt, Homo sapiens
aaaucagaaucacaccuggggga

SEQ ID NO: 34297 - RNA, 22 nt, Homo sapiens
gaauucaucacggccagccucu

SEQ ID NO: 34298 - RNA, 19 nt, Homo sapiens
auuuugguacagcagcuca

SEQ ID NO: 34299 - RNA, 24 nt, Homo sapiens
acgcagagcccgaaagcccccagu

SEQ ID NO: 34300 - RNA, 19 nt, Homo sapiens
gccucagaggcagcugcuu

SEQ ID NO: 34301 - RNA, 22 nt, Homo sapiens
gcggucccgcggcgccccgccu

SEQ ID NO: 34302 - RNA, 22 nt, Homo sapiens
gcggucccgcggcgccccgccu

SEQ ID NO: 34303 - RNA, 22 nt, Homo sapiens
ugcuguuagcccuagccccgca

SEQ ID NO: 34304 - RNA, 22 nt, Homo sapiens
cgaccauggcuguagacuguua

SEQ ID NO: 34305 - RNA, 22 nt, Homo sapiens
acuccaacagggccgcgucucc

SEQ ID NO: 34306 - RNA, 21 nt, Homo sapiens
uagaaaggcuaggaccaaacc

SEQ ID NO: 34307 - RNA, 23 nt, Homo sapiens
cuaccugcacuauaagcacuuua

SEQ ID NO: 34308 - RNA, 21 nt, Homo sapiens
ggccgugacuggagacuguua

SEQ ID NO: 34309 - RNA, 21 nt, Homo sapiens
aaagugucagauacggugugg

SEQ ID NO: 34310 - RNA, 21 nt, Homo sapiens
guucuaacccauuguggccaa

SEQ ID NO: 34311 - RNA, 19 nt, Homo sapiens
gcucuaagaaagccacacu

SEQ ID NO: 34312 - RNA, 22 nt, Homo sapiens
cuagugguccuaaacauuucac

SEQ ID NO: 34313 - RNA, 22 nt, Homo sapiens
ggcaaaauccgcaauuacuuuu

SEQ ID NO: 34314 - RNA, 21 nt, Homo sapiens
aacggaaccacuagugacuug

SEQ ID NO: 34315 - RNA, 21 nt, Homo sapiens
gcggaacuuagccacugugaa

SEQ ID NO: 34316 - RNA, 22 nt, Homo sapiens
accagcuaacaauacacugcca

SEQ ID NO: 34317 - RNA, 22 nt, Homo sapiens
agccacaaucaccuucugaucu

SEQ ID NO: 34318 - RNA, 23 nt, Homo sapiens
ucucugcaggccgugugcuuugc

SEQ ID NO: 34319 - RNA, 24 nt, Homo sapiens
acucacaccuagguuccaaggauu

SEQ ID NO: 34320 - RNA, 22 nt, Homo sapiens
cgaauccaccacgaacaacuuc

SEQ ID NO: 34321 - RNA, 23 nt, Homo sapiens
acccuauaagcaauauugcacua

SEQ ID NO: 34322 - RNA, 21 nt, Homo sapiens
gaccaagaaauagccuuucaa

SEQ ID NO: 34323 - RNA, 22 nt, Homo sapiens
acacucuaaagggaaccauuuu

SEQ ID NO: 34324 - RNA, 22 nt, Homo sapiens
uuucaguuaucaaucugucaca

SEQ ID NO: 34325 - RNA, 23 nt, Homo sapiens
gagcaaggcucuugucuguaagu

SEQ ID NO: 34326 - RNA, 23 nt, Homo sapiens
ggacauuguuucagugcccaagu

SEQ ID NO: 34327 - RNA, 19 nt, Homo sapiens
gccucagaggcagcugcuu

SEQ ID NO: 34328 - RNA, 21 nt, Homo sapiens
cggcucggguggcggcgacgg

SEQ ID NO: 34329 - RNA, 18 nt, Homo sapiens
gaaaugagggccagcuga

SEQ ID NO: 34330 - RNA, 18 nt, Homo sapiens
gaaaugagggccagcuga

SEQ ID NO: 34331 - RNA, 23 nt, Homo sapiens
gggagugaagacacggagccaga

SEQ ID NO: 34332 - RNA, 23 nt, Homo sapiens
gggagugaagacacggagccaga

SEQ ID NO: 34333 - RNA, 22 nt, Homo sapiens
cacugguacaaggguugggaga

SEQ ID NO: 34334 - RNA, 23 nt, Homo sapiens
uccaucauuacccggcaguauua

SEQ ID NO: 34335 - RNA, 22 nt, Homo sapiens
acugccugucugugccugcugu

SEQ ID NO: 34336 - RNA, 22 nt, Homo sapiens
agcugaguguaggauguuuaca

SEQ ID NO: 34337 - RNA, 22 nt, Homo sapiens
accagguuccaccccagcaggc

SEQ ID NO: 34338 - RNA, 23 nt, Homo sapiens
gggcucuuacucccucaggcacu

SEQ ID NO: 34339 - RNA, 21 nt, Homo sapiens
gugacucaucaccuauggaaa

SEQ ID NO: 34340 - RNA, 23 nt, Homo sapiens
aggagaaggcaccaugggauuua

SEQ ID NO: 34341 - RNA, 22 nt, Homo sapiens
cugcgauuccucccucuacugu

SEQ ID NO: 34342 - RNA, 22 nt, Homo sapiens
ggcagagagucagagcgcggau

SEQ ID NO: 34343 - RNA, 20 nt, Homo sapiens
cucaaagcaaacccugcaga

SEQ ID NO: 34344 - RNA, 20 nt, Homo sapiens
cucaaagcaaacccugcaga

SEQ ID NO: 34345 - RNA, 23 nt, Homo sapiens
uccaucaucaaaacaaauggagu

SEQ ID NO: 34346 - RNA, 22 nt, Homo sapiens
ucaggaacugccuuucucucca

SEQ ID NO: 34347 - RNA, 22 nt, Homo sapiens
gcuggguggagaagguggugaa

SEQ ID NO: 34348 - RNA, 22 nt, Homo sapiens
uuucaguuaucaaucugucaca

SEQ ID NO: 34349 - RNA, 20 nt, Homo sapiens
ugggccaccgccgagcggac

SEQ ID NO: 34350 - RNA, 20 nt, Homo sapiens
uacugcuuccacagcucccc

SEQ ID NO: 34351 - RNA, 21 nt, Homo sapiens
gagcugcauccuggcuccggg

SEQ ID NO: 34352 - RNA, 17 nt, Homo sapiens
gggagaggaggaggcga

SEQ ID NO: 34353 - RNA, 17 nt, Homo sapiens
gggagaggaggaggcga

SEQ ID NO: 34354 - RNA, 21 nt, Homo sapiens
cggggugcacgggcggagggc

SEQ ID NO: 34355 - RNA, 23 nt, Homo sapiens
aggaacagcagcagcccgggccg

SEQ ID NO: 34356 - RNA, 18 nt, Homo sapiens
auucaaucuacugccuca

SEQ ID NO: 34357 - RNA, 22 nt, Homo sapiens
ucagaccgagacaagugcaaug

SEQ ID NO: 34358 - RNA, 23 nt, Homo sapiens
aaagucucgcucucugccccuca

SEQ ID NO: 34359 - RNA, 21 nt, Homo sapiens
guccugagagcgcugccuccu

SEQ ID NO: 34360 - RNA, 22 nt, Homo sapiens
ccucaggcacggccgggccacc

SEQ ID NO: 34361 - RNA, 22 nt, Homo sapiens
uauccacuacaccccgcugccu

SEQ ID NO: 34362 - RNA, 24 nt, Homo sapiens
ucacagguuaaagggucucaggga

SEQ ID NO: 34363 - RNA, 22 nt, Homo sapiens
ucacaaguuagggucucaggga

SEQ ID NO: 34364 - RNA, 23 nt, Homo sapiens
agcccuguucuacagcccugagg

SEQ ID NO: 34365 - RNA, 22 nt, Homo sapiens
accuaauauaucaaacauauca

SEQ ID NO: 34366 - RNA, 22 nt, Homo sapiens
acugccugucugugccugcugu

SEQ ID NO: 34367 - RNA, 22 nt, Homo sapiens
accagguuccaccccagcaggc

SEQ ID NO: 34368 - RNA, 23 nt, Homo sapiens
acacucaaaagauggcggcacuu

SEQ ID NO: 34369 - RNA, 20 nt, Homo sapiens
agagaugagagaaacacccu

SEQ ID NO: 34370 - RNA, 22 nt, Homo sapiens
gggagaggucucccugcgcaca

SEQ ID NO: 34371 - RNA, 22 nt, Homo sapiens
cugggggcggcacaggggcuca

SEQ ID NO: 34372 - RNA, 21 nt, Homo sapiens
aaaggccacauccagcaccgu

SEQ ID NO: 34373 - RNA, 21 nt, Homo sapiens
cggggugcacgggcggagggc

SEQ ID NO: 34374 - RNA, 23 nt, Homo sapiens
aggaacagcagcagcccgggccg

SEQ ID NO: 34375 - RNA, 21 nt, Homo sapiens
gaccaaucgccguccccgccg

SEQ ID NO: 34376 - RNA, 22 nt, Homo sapiens
ucaucucgcccgcaaagaccca

SEQ ID NO: 34377 - RNA, 22 nt, Homo sapiens
cuguuccugcugaacugagcca

SEQ ID NO: 34378 - RNA, 19 nt, Homo sapiens
gccucagaggcagcugcuu

SEQ ID NO: 34379 - RNA, 25 nt, Homo sapiens
accaacggaccuacuucccuccgcc

SEQ ID NO: 34380 - RNA, 22 nt, Homo sapiens
gcggucccgcggcgccccgccu

SEQ ID NO: 34381 - RNA, 23 nt, Homo sapiens
cacugugggcccucuccgcacca

SEQ ID NO: 34382 - RNA, 22 nt, Homo sapiens
ugcuguuagcccuagccccgca

SEQ ID NO: 34383 - RNA, 22 nt, Homo sapiens
aacuauacaaccuacuaccuca

SEQ ID NO: 34384 - RNA, 22 nt, Homo sapiens
aaccacacaaccuacuaccuca

SEQ ID NO: 34385 - RNA, 19 nt, Homo sapiens
agaaaccccagcagagaca

SEQ ID NO: 34386 - RNA, 21 nt, Homo sapiens
ugcaggcugaucuucuucucu

SEQ ID NO: 34387 - RNA, 18 nt, Homo sapiens
cagcagccuccuucucaa

SEQ ID NO: 34388 - RNA, 23 nt, Homo sapiens
gggagugaagacacggagccaga

SEQ ID NO: 34389 - RNA, 22 nt, Homo sapiens
ugggguauuugacaaacugaca

SEQ ID NO: 34390 - RNA, 22 nt, Homo sapiens
cacucagcaccaggauauuguu

SEQ ID NO: 34391 - RNA, 22 nt, Homo sapiens
aggaaaccagcaaguguugacg

SEQ ID NO: 34392 - RNA, 21 nt, Homo sapiens
cagguaccaauauuuuaucua

SEQ ID NO: 34393 - RNA, 22 nt, Homo sapiens
cuggagagacaaggggaagagg

SEQ ID NO: 34394 - RNA, 23 nt, Homo sapiens
aaagucucgcucucugccccuca

SEQ ID NO: 34395 - RNA, 24 nt, Homo sapiens
acgcgcaggccagagacccaggca

SEQ ID NO: 34396 - RNA, 21 nt, Homo sapiens
cuagggaagaacagugagcaa

SEQ ID NO: 34397 - RNA, 21 nt, Homo sapiens
aacauacaaaggguauccucu

SEQ ID NO: 34398 - RNA, 22 nt, Homo sapiens
augggacauccuacauaugcaa

SEQ ID NO: 34399 - RNA, 22 nt, Homo sapiens
acacaccaaggauaauuucucc

SEQ ID NO: 34400 - RNA, 21 nt, Homo sapiens
gagcugcauccuggcuccggg

SEQ ID NO: 34401 - RNA, 21 nt, Homo sapiens
auaauggagaccaggccacga

SEQ ID NO: 34402 - RNA, 22 nt, Homo sapiens
cugggggcggcacaggggcuca

SEQ ID NO: 34403 - RNA, 22 nt, Homo sapiens
uccggggacgaacgggacgggu

SEQ ID NO: 34404 - RNA, 18 nt, Homo sapiens
cccccaccaccacgcccg

SEQ ID NO: 34405 - RNA, 17 nt, Homo sapiens
gggagaggaggaggcga

SEQ ID NO: 34406 - RNA, 23 nt, Homo sapiens
gggagugaagacacggagccaga

SEQ ID NO: 34407 - RNA, 21 nt, Homo sapiens
gaccaaucgccguccccgccg

SEQ ID NO: 34408 - RNA, 22 nt, Homo sapiens
cuguuccugcugaacugagcca

SEQ ID NO: 34409 - RNA, 23 nt, Homo sapiens
acacucaaaagauggcggcacuu

SEQ ID NO: 34410 - RNA, 22 nt, Homo sapiens
gcggucccgcggcgccccgccu

SEQ ID NO: 34411 - RNA, 20 nt, Homo sapiens
cugcgggaggacagggcuca

SEQ ID NO: 34412 - RNA, 22 nt, Homo sapiens
uccggggacgaacgggacgggu

SEQ ID NO: 34413 - RNA, 18 nt, Homo sapiens
caccaccagagccaacgu

SEQ ID NO: 34414 - RNA, 22 nt, Homo sapiens
cacgaccgacgccacgccgagu

SEQ ID NO: 34415 - RNA, 18 nt, Homo sapiens
aucacauucaccucccug

SEQ ID NO: 34416 - RNA, 22 nt, Homo sapiens
ggagcccgcgccccgcgccgag

SEQ ID NO: 34417 - RNA, 23 nt, Homo sapiens
gggagugaagacacggagccaga

SEQ ID NO: 34418 - RNA, 21 nt, Homo sapiens
gggcaucugggacgcgcagga

SEQ ID NO: 34419 - RNA, 22 nt, Homo sapiens
uggcagcagcggagggggcaga

SEQ ID NO: 34420 - RNA, 23 nt, Homo sapiens
cuaccugcacuaugagcacuuug

SEQ ID NO: 34421 - RNA, 21 nt, Homo sapiens
aaagugucagauacggugugg

SEQ ID NO: 34422 - RNA, 23 nt, Homo sapiens
gcgcccaauuaaugucuguugau

SEQ ID NO: 34423 - RNA, 20 nt, Homo sapiens
ccagcagcaccuggggcagu

SEQ ID NO: 34424 - RNA, 23 nt, Homo sapiens
aaagucucgcucucugccccuca

SEQ ID NO: 34425 - RNA, 22 nt, Homo sapiens
aacucaguaaugguaacgguuu

SEQ ID NO: 34426 - RNA, 21 nt, Homo sapiens
auccuguacugagcugccccg

SEQ ID NO: 34427 - RNA, 22 nt, Homo sapiens
uauccacuacaccccgcugccu

SEQ ID NO: 34428 - RNA, 22 nt, Homo sapiens
ggaggccgggacgagugcaaua

SEQ ID NO: 34429 - RNA, 18 nt, Homo sapiens
gaaaugagggccagcuga

SEQ ID NO: 34430 - RNA, 23 nt, Homo sapiens
gggagugaagacacggagccaga

SEQ ID NO: 34431 - RNA, 22 nt, Homo sapiens
cacugguacaaggguugggaga

SEQ ID NO: 34432 - RNA, 22 nt, Homo sapiens
ucaggaacugccuuucucucca

SEQ ID NO: 34433 - RNA, 21 nt, Homo sapiens
gaccaaucgccguccccgccg

SEQ ID NO: 34434 - RNA, 21 nt, Homo sapiens
aggcggcaggcacaggacugg

SEQ ID NO: 34435 - RNA, 22 nt, Homo sapiens
agcugaguguaggauguuuaca

SEQ ID NO: 34436 - RNA, 22 nt, Homo sapiens
acggaagggcagagagggccag

SEQ ID NO: 34437 - RNA, 21 nt, Homo sapiens
uucuaggauaggcccaggggc

SEQ ID NO: 34438 - RNA, 21 nt, Homo sapiens
ucaaucacagauagcaccccu

SEQ ID NO: 34439 - RNA, 23 nt, Homo sapiens
ucaacgggagugaucgugucauu

SEQ ID NO: 34440 - RNA, 22 nt, Homo sapiens
gcaaaagaaacugugguuuuug

SEQ ID NO: 34441 - RNA, 25 nt, Homo sapiens
accaacggaccuacuucccuccgcc

SEQ ID NO: 34442 - RNA, 22 nt, Homo sapiens
gcggucccgcggcgccccgccu

SEQ ID NO: 34443 - RNA, 22 nt, Homo sapiens
cacucuaaagggaggcacuuug

SEQ ID NO: 34444 - RNA, 24 nt, Homo sapiens
ucagagcauguguuuaaucaggcu

SEQ ID NO: 34445 - RNA, 22 nt, Homo sapiens
cugggggcggcacaggggcuca

SEQ ID NO: 34446 - RNA, 23 nt, Homo sapiens
aaucuacuuucuuugcucauccu

SEQ ID NO: 34447 - RNA, 22 nt, Homo sapiens
aaccacuuucuuugcucauccg

SEQ ID NO: 34448 - RNA, 20 nt, Homo sapiens
aagcagaaaaaggcaaacga

SEQ ID NO: 34449 - RNA, 21 nt, Homo sapiens
ccuacguuccauagucuacca

SEQ ID NO: 34450 - RNA, 22 nt, Homo sapiens
uauggaugcaaaaugaucccaa

SEQ ID NO: 34451 - RNA, 22 nt, Homo sapiens
auaaaugacaccuccuugugaa

SEQ ID NO: 34452 - RNA, 23 nt, Homo sapiens
gucagaccccgagggguccucgc

SEQ ID NO: 34453 - RNA, 21 nt, Homo sapiens
agguaauaccaauaccuugug

SEQ ID NO: 34454 - RNA, 19 nt, Homo sapiens
aagacauuuucagacagcu

SEQ ID NO: 34455 - RNA, 25 nt, Homo sapiens
aggccgccacccgcccgcgaucccu

SEQ ID NO: 34456 - RNA, 23 nt, Homo sapiens
aaccaagaccccggagaucccag

SEQ ID NO: 34457 - RNA, 17 nt, Homo sapiens
gggagaggaggaggcga

SEQ ID NO: 34458 - RNA, 22 nt, Homo sapiens
cacugguacaaggguugggaga

SEQ ID NO: 34459 - RNA, 22 nt, Homo sapiens
acaaccagcuaagacacugcca

SEQ ID NO: 34460 - RNA, 22 nt, Homo sapiens
uacagauggauaccgugcaauu

SEQ ID NO: 34461 - RNA, 22 nt, Homo sapiens
gccaccuucaaaugggaagucu

SEQ ID NO: 34462 - RNA, 23 nt, Homo sapiens
acagcgcucgcaaccgcagcgau

SEQ ID NO: 34463 - RNA, 23 nt, Homo sapiens
gacguaguccuauucucugcugc

SEQ ID NO: 34464 - RNA, 22 nt, Homo sapiens
gggagaggucucccugcgcaca

SEQ ID NO: 34465 - RNA, 22 nt, Homo sapiens
ggcagagagucagagcgcggau

SEQ ID NO: 34466 - RNA, 21 nt, Homo sapiens
ugcaggcugaucuucuucucu

SEQ ID NO: 34467 - RNA, 23 nt, Homo sapiens
aaagucucgcucucugccccuca

SEQ ID NO: 34468 - RNA, 22 nt, Homo sapiens
aaagugcuucuuaccuccagau

SEQ ID NO: 34469 - RNA, 19 nt, Homo sapiens
agaaaccccagcagagaca

SEQ ID NO: 34470 - RNA, 23 nt, Homo sapiens
aggagaaggcaccaugggauuua

SEQ ID NO: 34471 - RNA, 23 nt, Homo sapiens
acacagcucuuccauaucuccag

SEQ ID NO: 34472 - RNA, 23 nt, Homo sapiens
gaaacccagcagacaauguagcu

SEQ ID NO: 34473 - RNA, 21 nt, Homo sapiens
acccaguagccagauguagcu

SEQ ID NO: 34474 - RNA, 22 nt, Homo sapiens
ugggguauuugacaaacugaca

SEQ ID NO: 34475 - RNA, 22 nt, Homo sapiens
cuuccagucgaggauguuuaca

SEQ ID NO: 34476 - RNA, 22 nt, Homo sapiens
agcugaguguaggauguuuaca

SEQ ID NO: 34477 - RNA, 23 nt, Homo sapiens
gcugagaguguaggauguuuaca

SEQ ID NO: 34478 - RNA, 22 nt, Homo sapiens
cuuccagucggggauguuuaca

SEQ ID NO: 34479 - RNA, 22 nt, Homo sapiens
cuuccagucaaggauguuuaca

SEQ ID NO: 34480 - RNA, 21 nt, Homo sapiens
aaagaucaaccauguauuauu

SEQ ID NO: 34481 - RNA, 22 nt, Homo sapiens
agcacagacuugcugugauguu

SEQ ID NO: 34482 - RNA, 22 nt, Homo sapiens
gguaaaacucgcaauuacuuuu

SEQ ID NO: 34483 - RNA, 22 nt, Homo sapiens
ggccaaaaccacaauuacuuuu

SEQ ID NO: 34484 - RNA, 22 nt, Homo sapiens
ggcaaaaaccgcaauuacuuuu

SEQ ID NO: 34485 - RNA, 22 nt, Homo sapiens
ggcaaaaaccacaauuacuuuu

SEQ ID NO: 34486 - RNA, 22 nt, Homo sapiens
gacaaaaaccgcgauuacuuuu

SEQ ID NO: 34487 - RNA, 22 nt, Homo sapiens
ggcaaaauccgcaauuacuuuu

SEQ ID NO: 34488 - RNA, 22 nt, Homo sapiens
accaaagaccgcaauuacuuuu

SEQ ID NO: 34489 - RNA, 22 nt, Homo sapiens
acaaaauccacaauuacuuuug

SEQ ID NO: 34490 - RNA, 21 nt, Homo sapiens
uuuuggugcauauuuacuuua

SEQ ID NO: 34491 - RNA, 20 nt, Homo sapiens
auuucuauaucuaucuccau

SEQ ID NO: 34492 - RNA, 22 nt, Homo sapiens
aaagagguuaaccauguauuau

SEQ ID NO: 34493 - RNA, 23 nt, Homo sapiens
uguaggcuggggauaaaugaaua

SEQ ID NO: 34494 - RNA, 21 nt, Homo sapiens
cuacgcagaaaggacacagug

SEQ ID NO: 34495 - RNA, 23 nt, Homo sapiens
ccgcuugagcuaacuccgacccg

SEQ ID NO: 34496 - RNA, 17 nt, Homo sapiens
gggagaggaggaggcga

SEQ ID NO: 34497 - RNA, 23 nt, Homo sapiens
gggagugaagacacggagccaga

SEQ ID NO: 34498 - RNA, 23 nt, Homo sapiens
cugcagaacuguucccgcugcua

SEQ ID NO: 34499 - RNA, 22 nt, Homo sapiens
uccagcaaagggaagcgcuuuc

SEQ ID NO: 34500 - RNA, 22 nt, Homo sapiens
accucuaaaggggagcgcuuug

SEQ ID NO: 34501 - RNA, 23 nt, Homo sapiens
acacucuaaagagaagcgcuuug

SEQ ID NO: 34502 - RNA, 21 nt, Homo sapiens
gcuccaaagggaagcgcuuug

SEQ ID NO: 34503 - RNA, 21 nt, Homo sapiens
ccucuaaagagaagcgcuuuc

SEQ ID NO: 34504 - RNA, 19 nt, Homo sapiens
guugggaucacaggcgccc

SEQ ID NO: 34505 - RNA, 22 nt, Homo sapiens
ugcuguuagcccuagccccgca

SEQ ID NO: 34506 - RNA, 21 nt, Homo sapiens
gagcugcauccuggcuccggg

SEQ ID NO: 34507 - RNA, 22 nt, Homo sapiens
uggcagcagcggagggggcaga

SEQ ID NO: 34508 - RNA, 20 nt, Homo sapiens
ccagcagcaccuggggcagu

SEQ ID NO: 34509 - RNA, 21 nt, Homo sapiens
auccuguacugagcugccccg

SEQ ID NO: 34510 - RNA, 21 nt, Homo sapiens
ccccucccagccucccugcca

SEQ ID NO: 34511 - RNA, 22 nt, Homo sapiens
cuggagagacaaggggaagagg

SEQ ID NO: 34512 - RNA, 22 nt, Homo sapiens
auccuucuacaaauucacccau

SEQ ID NO: 34513 - RNA, 21 nt, Homo sapiens
agggcucaucuugguccugca

SEQ ID NO: 34514 - RNA, 21 nt, Homo sapiens
gggcaucugggacgcgcagga

SEQ ID NO: 34515 - RNA, 22 nt, Homo sapiens
cggugagcacccggccccugcg

SEQ ID NO: 34516 - RNA, 22 nt, Homo sapiens
uccacauggaguugcuguuaca

SEQ ID NO: 34517 - RNA, 22 nt, Homo sapiens
auguaugugggacgguaaacca

SEQ ID NO: 34518 - RNA, 23 nt, Homo sapiens
acaccccaaaaucgaagcacuuc

SEQ ID NO: 34519 - RNA, 22 nt, Homo sapiens
cugcucaaacccuccaaugacu

SEQ ID NO: 34520 - RNA, 23 nt, Homo sapiens
gucacaucccucccaagacccuc

SEQ ID NO: 34521 - RNA, 22 nt, Homo sapiens
cuagggaacacagggcugguga

SEQ ID NO: 34522 - RNA, 24 nt, Homo sapiens
ucacagguuaaagggucucaggga

SEQ ID NO: 34523 - RNA, 22 nt, Homo sapiens
ucacaaguuagggucucaggga

SEQ ID NO: 34524 - RNA, 23 nt, Homo sapiens
agcccuguucuacagcccugagg

SEQ ID NO: 34525 - RNA, 17 nt, Homo sapiens
gggagaggaggaggcga

SEQ ID NO: 34526 - RNA, 22 nt, Homo sapiens
gcacaaaucuccagaccaccca

SEQ ID NO: 34527 - RNA, 23 nt, Homo sapiens
cggccugauucacaacaccagcu

SEQ ID NO: 34528 - RNA, 21 nt, Homo sapiens
gaccaaucgccguccccgccg

SEQ ID NO: 34529 - RNA, 21 nt, Homo sapiens
gaccaaucgccguccccgccg

SEQ ID NO: 34530 - RNA, 22 nt, Homo sapiens
gcuggguggagaagguggugaa

SEQ ID NO: 34531 - RNA, 22 nt, Homo sapiens
aggcauaggaugacaaagggaa

SEQ ID NO: 34532 - RNA, 22 nt, Homo sapiens
aggcgaaggaugacaaagggaa

SEQ ID NO: 34533 - RNA, 21 nt, Homo sapiens
aagugucagacacgguggugg

SEQ ID NO: 34534 - RNA, 22 nt, Homo sapiens
gauagagugcagaccagggucu

SEQ ID NO: 34535 - RNA, 22 nt, Homo sapiens
aggaaaccagcaaguguugacg

SEQ ID NO: 34536 - RNA, 25 nt, Homo sapiens
acggagcugucccaacaccaccccu

SEQ ID NO: 34537 - RNA, 21 nt, Homo sapiens
aguucucccaacguaaaccca

SEQ ID NO: 34538 - RNA, 22 nt, Homo sapiens
guccaaaguuggggugcugguu

SEQ ID NO: 34539 - RNA, 22 nt, Homo sapiens
gcggucccgcggcgccccgccu

SEQ ID NO: 34540 - RNA, 22 nt, Homo sapiens
gcggucccgcggcgccccgccu

SEQ ID NO: 34541 - RNA, 20 nt, Homo sapiens
aggggccucagccuccuggu

SEQ ID NO: 34542 - RNA, 22 nt, Homo sapiens
ugcuguuagcccuagccccgca

SEQ ID NO: 34543 - RNA, 21 nt, Homo sapiens
caucaccuuccuucuccucca

SEQ ID NO: 34544 - RNA, 23 nt, Homo sapiens
gacguaguccuauucucugcugc

SEQ ID NO: 34545 - RNA, 20 nt, Homo sapiens
uacugcuuccacagcucccc

SEQ ID NO: 34546 - RNA, 22 nt, Homo sapiens
ccccucuggucaaccagucaca

SEQ ID NO: 34547 - RNA, 23 nt, Homo sapiens
acauuuuucguuauugcucuuga

SEQ ID NO: 34548 - RNA, 22 nt, Homo sapiens
caagacacauuuggagagggac

SEQ ID NO: 34549 - RNA, 18 nt, Homo sapiens
gaaaugagggccagcuga

SEQ ID NO: 34550 - RNA, 21 nt, Homo sapiens
gaccaaucgccguccccgccg

SEQ ID NO: 34551 - RNA, 23 nt, Homo sapiens
cgugagcuccuggaggacaggga

SEQ ID NO: 34552 - RNA, 22 nt, Homo sapiens
gauagagugcagaccagggucu

SEQ ID NO: 34553 - RNA, 22 nt, Homo sapiens
gcggucccgcggcgccccgccu

SEQ ID NO: 34554 - RNA, 23 nt, Homo sapiens
gcacaugugcacacagccgggug

SEQ ID NO: 34555 - RNA, 22 nt, Homo sapiens
aggucucacuuuguugcccaga

SEQ ID NO: 34556 - RNA, 24 nt, Homo sapiens
acugcuggucuucagucagggcca

SEQ ID NO: 34557 - RNA, 18 nt, Homo sapiens
aucacauucaccucccug

SEQ ID NO: 34558 - RNA, 22 nt, Homo sapiens
cagcugguugaaggggaccaaa

SEQ ID NO: 34559 - RNA, 22 nt, Homo sapiens
uagcugguugaaggggaccaaa

SEQ ID NO: 34560 - RNA, 23 nt, Homo sapiens
gggagugaagacacggagccaga

SEQ ID NO: 34561 - RNA, 22 nt, Homo sapiens
ucaggaacugccuuucucucca

SEQ ID NO: 34562 - RNA, 20 nt, Homo sapiens
cccgccgcgucgcccugggg

SEQ ID NO: 34563 - RNA, 20 nt, Homo sapiens
acagcaaggagggcaggagg

SEQ ID NO: 34564 - RNA, 23 nt, Homo sapiens
gaaacccagcagacaauguagcu

SEQ ID NO: 34565 - RNA, 21 nt, Homo sapiens
acaggauugagggggggcccu

SEQ ID NO: 34566 - RNA, 20 nt, Homo sapiens
cuggaggaagggcccagagg

SEQ ID NO: 34567 - RNA, 22 nt, Homo sapiens
gccuaagacacaggcccagaga

SEQ ID NO: 34568 - RNA, 20 nt, Homo sapiens
gcaaaugguacagcuacuuu

SEQ ID NO: 34569 - RNA, 25 nt, Homo sapiens
aaggagcucagaagcccugcccagc

SEQ ID NO: 34570 - RNA, 21 nt, Homo sapiens
gaaggaagugagugcagccac

SEQ ID NO: 34571 - RNA, 23 nt, Homo sapiens
uguaggcuggggauaaaugaaua

SEQ ID NO: 34572 - RNA, 21 nt, Homo sapiens
gagcugcauccuggcuccggg

SEQ ID NO: 34573 - RNA, 21 nt, Homo sapiens
ccccucccagccucccugcca

SEQ ID NO: 34574 - RNA, 22 nt, Homo sapiens
cugggggcggcacaggggcuca

SEQ ID NO: 34575 - RNA, 27 nt, Homo sapiens
uuuagcacagugcuuauacaagaaggu

SEQ ID NO: 34576 - RNA, 22 nt, Homo sapiens
ugaagaagggggggaagggcgu

SEQ ID NO: 34577 - RNA, 22 nt, Homo sapiens
ucaggaacugccuuucucucca

SEQ ID NO: 34578 - RNA, 21 nt, Homo sapiens
gaccaaucgccguccccgccg

SEQ ID NO: 34579 - RNA, 21 nt, Homo sapiens
gcggaacuuagccacugugaa

SEQ ID NO: 34580 - RNA, 21 nt, Homo sapiens
cucacucagauggccaacuca

SEQ ID NO: 34581 - RNA, 21 nt, Homo sapiens
ggacuauagaacuuucccccu

SEQ ID NO: 34582 - RNA, 22 nt, Homo sapiens
gcggucccgcggcgccccgccu

SEQ ID NO: 34583 - RNA, 21 nt, Homo sapiens
ccgugguucuacccuguggua

SEQ ID NO: 34584 - RNA, 21 nt, Homo sapiens
aggcggcaggcacaggacugg

SEQ ID NO: 34585 - RNA, 21 nt, Homo sapiens
agagcucauccauaguuguca

SEQ ID NO: 34586 - RNA, 23 nt, Homo sapiens
gaaacccagcagacaauguagcu

SEQ ID NO: 34587 - RNA, 23 nt, Homo sapiens
acauuuuucguuauugcucuuga

SEQ ID NO: 34588 - RNA, 22 nt, Homo sapiens
acacaccaaggauaauuucucc

SEQ ID NO: 34589 - RNA, 22 nt, Homo sapiens
uggggacccucccugaaccaag

SEQ ID NO: 34590 - RNA, 21 nt, Homo sapiens
ugacugacagcuuuuugagua

SEQ ID NO: 34591 - RNA, 27 nt, Homo sapiens
uuuagcacagugcuuauacaagaaggu

SEQ ID NO: 34592 - RNA, 21 nt, Homo sapiens
gcaagcccagaccgcaaaaag

SEQ ID NO: 34593 - RNA, 23 nt, Homo sapiens
ucacauaggaauaaaaagccaua

SEQ ID NO: 34594 - RNA, 23 nt, Homo sapiens
accccuaucacgauuagcauuaa

SEQ ID NO: 34595 - RNA, 22 nt, Homo sapiens
gaaccuaucuccccucuggacc

SEQ ID NO: 34596 - RNA, 22 nt, Homo sapiens
uaaccgauuucagauggugcua

SEQ ID NO: 34597 - RNA, 18 nt, Homo sapiens
acccucugaaaggaagca

SEQ ID NO: 34598 - RNA, 22 nt, Homo sapiens
aaagugcuucuuaccuccagau

SEQ ID NO: 34599 - RNA, 22 nt, Homo sapiens
acgguccuacacucaaggcaug

SEQ ID NO: 34600 - RNA, 22 nt, Homo sapiens
aaaguaacugcaguuuuugcua

SEQ ID NO: 34601 - RNA, 23 nt, Homo sapiens
guucuguccuggaagaacauacu

SEQ ID NO: 34602 - RNA, 21 nt, Homo sapiens
agaaguagaccauguguccua

SEQ ID NO: 34603 - RNA, 21 nt, Homo sapiens
cugggggacggagcagaagga

SEQ ID NO: 34604 - RNA, 21 nt, Homo sapiens
agggcucaucuugguccugca

SEQ ID NO: 34605 - RNA, 22 nt, Homo sapiens
agagcaagaccccgucucuaaa

SEQ ID NO: 34606 - RNA, 18 nt, Homo sapiens
auucaaucuacugccuca

SEQ ID NO: 34607 - RNA, 21 nt, Homo sapiens
guccugagagcgcugccuccu

SEQ ID NO: 34608 - RNA, 21 nt, Homo sapiens
ggggagcgggggcccugccuu

SEQ ID NO: 34609 - RNA, 22 nt, Homo sapiens
ucaggaacugccuuucucucca

SEQ ID NO: 34610 - RNA, 21 nt, Homo sapiens
gaccaaucgccguccccgccg

SEQ ID NO: 34611 - RNA, 22 nt, Homo sapiens
uccacauggaguugcuguuaca

SEQ ID NO: 34612 - RNA, 19 nt, Homo sapiens
uaugcuaccuuugcacggu

SEQ ID NO: 34613 - RNA, 22 nt, Homo sapiens
ucagaccgagacaagugcaaug

SEQ ID NO: 34614 - RNA, 22 nt, Homo sapiens
ugcaacuuaguaaugugcaaua

SEQ ID NO: 34615 - RNA, 22 nt, Homo sapiens
uacagauggauaccgugcaauu

SEQ ID NO: 34616 - RNA, 22 nt, Homo sapiens
ucaccauugcuaaagugcaauu

SEQ ID NO: 34617 - RNA, 22 nt, Homo sapiens
gcggucccgcggcgccccgccu

SEQ ID NO: 34618 - RNA, 22 nt, Homo sapiens
ugcuguuagcccuagccccgca

SEQ ID NO: 34619 - RNA, 22 nt, Homo sapiens
acaggccgggacaagugcaaua

SEQ ID NO: 34620 - RNA, 22 nt, Homo sapiens
ggaggccgggacgagugcaaua

SEQ ID NO: 34621 - RNA, 21 nt, Homo sapiens
cucccccacugcagcuggcac

SEQ ID NO: 34622 - RNA, 22 nt, Homo sapiens
cagaagugggccgggcacaggg

SEQ ID NO: 34623 - RNA, 23 nt, Homo sapiens
cagcugcuuuugggauuccguug

SEQ ID NO: 34624 - RNA, 22 nt, Homo sapiens
ucgcccucucaacccagcuuuu

SEQ ID NO: 34625 - RNA, 22 nt, Homo sapiens
uugcccucucaacccagcuuuu

SEQ ID NO: 34626 - RNA, 20 nt, Homo sapiens
acccucucaacccagcuuuu

SEQ ID NO: 34627 - RNA, 19 nt, Homo sapiens
uccucucaacccagcuuuu

SEQ ID NO: 34628 - RNA, 23 nt, Homo sapiens
acauuuuucguuauugcucuuga

SEQ ID NO: 34629 - RNA, 22 nt, Homo sapiens
uacagauggauaccgugcaauu

SEQ ID NO: 34630 - RNA, 25 nt, Homo sapiens
acggagcugucccaacaccaccccu

SEQ ID NO: 34631 - RNA, 22 nt, Homo sapiens
acacacccacgcgagccggaaa

SEQ ID NO: 34632 - RNA, 22 nt, Homo sapiens
cuggagagacaaggggaagagg

SEQ ID NO: 34633 - RNA, 22 nt, Homo sapiens
cacgaccgacgccacgccgagu

SEQ ID NO: 34634 - RNA, 21 nt, Homo sapiens
acuagacugugagcuccucga

SEQ ID NO: 34635 - RNA, 23 nt, Homo sapiens
cccaacagacauggcgguacuca

SEQ ID NO: 34636 - RNA, 21 nt, Homo sapiens
uucuaggauaggcccaggggc

SEQ ID NO: 34637 - RNA, 22 nt, Homo sapiens
gaauucaucacggccagccucu

SEQ ID NO: 34638 - RNA, 19 nt, Homo sapiens
guccugaauuccgcagccu

SEQ ID NO: 34639 - RNA, 22 nt, Homo sapiens
gcugaggcuguggggcuggagu

SEQ ID NO: 34640 - RNA, 18 nt, Homo sapiens
auucaaucuacugccuca

SEQ ID NO: 34641 - RNA, 23 nt, Homo sapiens
cccaacagacauggcgguacuca

SEQ ID NO: 34642 - RNA, 23 nt, Homo sapiens
acccuauaagcaauauugcacua

SEQ ID NO: 34643 - RNA, 23 nt, Homo sapiens
gaaagugcccucaaggcugagug

SEQ ID NO: 34644 - RNA, 19 nt, Homo sapiens
gccugcugacaccgugccu

SEQ ID NO: 34645 - RNA, 23 nt, Homo sapiens
cacugugggcccucuccgcacca

SEQ ID NO: 34646 - RNA, 22 nt, Homo sapiens
uauccacuacaccccgcugccu

SEQ ID NO: 34647 - RNA, 22 nt, Homo sapiens
caaacaccauugucacacucca

SEQ ID NO: 34648 - RNA, 24 nt, Homo sapiens
acugcuggucuucagucagggcca

SEQ ID NO: 34649 - RNA, 21 nt, Homo sapiens
gaccaaucgccguccccgccg

SEQ ID NO: 34650 - RNA, 22 nt, Homo sapiens
uggcagcagcggagggggcaga

SEQ ID NO: 34651 - RNA, 20 nt, Homo sapiens
cccgccgcgucgcccugggg

SEQ ID NO: 34652 - RNA, 20 nt, Homo sapiens
ccagcagcaccuggggcagu

SEQ ID NO: 34653 - RNA, 22 nt, Homo sapiens
acggaagggcagagagggccag

SEQ ID NO: 34654 - RNA, 22 nt, Homo sapiens
acaaccagcuaagacacugcca

SEQ ID NO: 34655 - RNA, 23 nt, Homo sapiens
gcaaucagcuaacuacacugccu

SEQ ID NO: 34656 - RNA, 22 nt, Homo sapiens
auaaggauuuuuaggggcauua

SEQ ID NO: 34657 - RNA, 22 nt, Homo sapiens
accagcuaacaauacacugcca

SEQ ID NO: 34658 - RNA, 22 nt, Homo sapiens
gccagcuaacaauacacugccu

SEQ ID NO: 34659 - RNA, 22 nt, Homo sapiens
gccagcuaacaauacacugccu

SEQ ID NO: 34660 - RNA, 21 nt, Homo sapiens
auccuguacugagcugccccg

SEQ ID NO: 34661 - RNA, 22 nt, Homo sapiens
gugauugccacucuccugagua

SEQ ID NO: 34662 - RNA, 19 nt, Homo sapiens
gcucuaagaaagccacacu

SEQ ID NO: 34663 - RNA, 21 nt, Homo sapiens
gaaggaagugagugcagccac

SEQ ID NO: 34664 - RNA, 22 nt, Homo sapiens
gcggucccgcggcgccccgccu

SEQ ID NO: 34665 - RNA, 20 nt, Homo sapiens
uacugcuuccacagcucccc

SEQ ID NO: 34666 - RNA, 22 nt, Homo sapiens
acacacccacgcgagccggaaa

SEQ ID NO: 34667 - RNA, 22 nt, Homo sapiens
cacaucucacuguagccucaaa

SEQ ID NO: 34668 - RNA, 22 nt, Homo sapiens
cccaacaacaugaaacuaccua

SEQ ID NO: 34669 - RNA, 22 nt, Homo sapiens
cccaacaacaggaaacuaccua

SEQ ID NO: 34670 - RNA, 22 nt, Homo sapiens
acugccugucugugccugcugu

SEQ ID NO: 34671 - RNA, 22 nt, Homo sapiens
uaaccgauuucagauggugcua

SEQ ID NO: 34672 - RNA, 23 nt, Homo sapiens
aacacugauuucaaauggugcua

SEQ ID NO: 34673 - RNA, 22 nt, Homo sapiens
uaaccgauuucaaauggugcua

SEQ ID NO: 34674 - RNA, 22 nt, Homo sapiens
uacagauggauaccgugcaauu

SEQ ID NO: 34675 - RNA, 22 nt, Homo sapiens
accagguuccaccccagcaggc

SEQ ID NO: 34676 - RNA, 22 nt, Homo sapiens
gguucaguuguucaaccaguua

SEQ ID NO: 34677 - RNA, 24 nt, Homo sapiens
cacccccagagccucagcucccca

SEQ ID NO: 34678 - RNA, 22 nt, Homo sapiens
cugggggcggcacaggggcuca

SEQ ID NO: 34679 - RNA, 18 nt, Homo sapiens
caccaccagagccaacgu

SEQ ID NO: 34680 - RNA, 22 nt, Homo sapiens
acaccuggcuccacacgcgggc

SEQ ID NO: 34681 - RNA, 21 nt, Homo sapiens
gaccaaucgccguccccgccg

SEQ ID NO: 34682 - RNA, 19 nt, Homo sapiens
guccugaauuccgcagccu

SEQ ID NO: 34683 - RNA, 23 nt, Homo sapiens
ccuagagagggugagaaccugcc

SEQ ID NO: 34684 - RNA, 22 nt, Homo sapiens
gcggucccgcggcgccccgccu

SEQ ID NO: 34685 - RNA, 22 nt, Homo sapiens
ugcuguuagcccuagccccgca

SEQ ID NO: 34686 - RNA, 22 nt, Homo sapiens
acacacccacgcgagccggaaa

SEQ ID NO: 34687 - RNA, 23 nt, Homo sapiens
ggaagccaucaagucgcugcagg

SEQ ID NO: 34688 - RNA, 21 nt, Homo sapiens
cugaggagagaggaggugggg

SEQ ID NO: 34689 - RNA, 22 nt, Homo sapiens
gcacaaaucuccagaccaccca

SEQ ID NO: 34690 - RNA, 22 nt, Homo sapiens
uagucaagugaagcagugggag

SEQ ID NO: 34691 - RNA, 22 nt, Homo sapiens
ucagaccgagacaagugcaaug

SEQ ID NO: 34692 - RNA, 21 nt, Homo sapiens
ccuacguuccauagucuacca

SEQ ID NO: 34693 - RNA, 21 nt, Homo sapiens
ugcaugacggccugcaagaca

SEQ ID NO: 34694 - RNA, 23 nt, Homo sapiens
aagaaucuugucccgcagguccu

SEQ ID NO: 34695 - RNA, 23 nt, Homo sapiens
acccucuauagggaagcgcguuc

SEQ ID NO: 34696 - RNA, 22 nt, Homo sapiens
ugcaagccuugggugugggagg

SEQ ID NO: 34697 - RNA, 22 nt, Homo sapiens
aguccagauucugugcccacca

SEQ ID NO: 34698 - RNA, 25 nt, Homo sapiens
acggagcugucccaacaccaccccu

SEQ ID NO: 34699 - RNA, 22 nt, Homo sapiens
gcacauguucugcggcccacca

SEQ ID NO: 34700 - RNA, 25 nt, Homo sapiens
accaacggaccuacuucccuccgcc

SEQ ID NO: 34701 - RNA, 22 nt, Homo sapiens
caaacaccauugucacacucca

SEQ ID NO: 34702 - RNA, 20 nt, Homo sapiens
aagcagaaaaaggcaaacga

SEQ ID NO: 34703 - RNA, 22 nt, Homo sapiens
aggucucacuuuguugcccaga

SEQ ID NO: 34704 - RNA, 22 nt, Homo sapiens
cucagagcagacgugguucuca

SEQ ID NO: 34705 - RNA, 25 nt, Homo sapiens
aaggagcucagaagcccugcccagc

SEQ ID NO: 34706 - RNA, 22 nt, Homo sapiens
gcugaggcuguggggcuggagu

SEQ ID NO: 34707 - RNA, 22 nt, Homo sapiens
caaacaccauugucacacucca

SEQ ID NO: 34708 - RNA, 21 nt, Homo sapiens
uuccacgaccuaauccuaacu

SEQ ID NO: 34709 - RNA, 21 nt, Homo sapiens
gaccaaucgccguccccgccg

SEQ ID NO: 34710 - RNA, 22 nt, Homo sapiens
gcggucccgcggcgccccgccu

SEQ ID NO: 34711 - RNA, 22 nt, Homo sapiens
cugggggcggcacaggggcuca

SEQ ID NO: 34712 - RNA, 22 nt, Homo sapiens
caaacaccauugucacacucca

SEQ ID NO: 34713 - RNA, 21 nt, Homo sapiens
cugcugggccacaacguggga

SEQ ID NO: 34714 - RNA, 22 nt, Homo sapiens
ggcagagagucagagcgcggau

SEQ ID NO: 34715 - RNA, 22 nt, Homo sapiens
aaccauacaaccuacuaccuca

SEQ ID NO: 34716 - RNA, 22 nt, Homo sapiens
ucucucccauuagaguugaaaa

SEQ ID NO: 34717 - RNA, 21 nt, Homo sapiens
gcggaacuuagccacugugaa

SEQ ID NO: 34718 - RNA, 21 nt, Homo sapiens
gcagaacuuagccacugugaa

SEQ ID NO: 34719 - RNA, 22 nt, Homo sapiens
accagcuaacaauacacugcca

SEQ ID NO: 34720 - RNA, 22 nt, Homo sapiens
agccacaaucaccuucugaucu

SEQ ID NO: 34721 - RNA, 24 nt, Homo sapiens
cagaaagugcuuucuuuuggagaa

SEQ ID NO: 34722 - RNA, 22 nt, Homo sapiens
aacacucuaaaaggaggcacuu

SEQ ID NO: 34723 - RNA, 22 nt, Homo sapiens
ccucuaguaaauaugucagcau

SEQ ID NO: 34724 - RNA, 22 nt, Homo sapiens
augcccuuucaucauugcacug

SEQ ID NO: 34725 - RNA, 22 nt, Homo sapiens
uagucaagugaagcagugggag

SEQ ID NO: 34726 - RNA, 22 nt, Homo sapiens
uauggaugcaaaaugaucccaa

SEQ ID NO: 34727 - RNA, 22 nt, Homo sapiens
ugcaagccuugggugugggagg

SEQ ID NO: 34728 - RNA, 22 nt, Homo sapiens
acaaaauccacaauuacuuuug

SEQ ID NO: 34729 - RNA, 20 nt, Homo sapiens
ugggccaccgccgagcggac

SEQ ID NO: 34730 - RNA, 23 nt, Homo sapiens
aaccaagaccccggagaucccag

SEQ ID NO: 34731 - RNA, 22 nt, Homo sapiens
uggcagcagcggagggggcaga

SEQ ID NO: 34732 - RNA, 20 nt, Homo sapiens
ccagcagcaccuggggcagu

SEQ ID NO: 34733 - RNA, 22 nt, Homo sapiens
auaaggauuuuuaggggcauua

SEQ ID NO: 34734 - RNA, 21 nt, Homo sapiens
auccuguacugagcugccccg

SEQ ID NO: 34735 - RNA, 22 nt, Homo sapiens
caaacaccauugucacacucca

SEQ ID NO: 34736 - RNA, 22 nt, Homo sapiens
acaaaguucugugaugcacuga

SEQ ID NO: 34737 - RNA, 21 nt, Homo sapiens
gaccaaucgccguccccgccg

SEQ ID NO: 34738 - RNA, 22 nt, Homo sapiens
uggcagcagcggagggggcaga

SEQ ID NO: 34739 - RNA, 22 nt, Homo sapiens
ucaacaucagucugauaagcua

SEQ ID NO: 34740 - RNA, 20 nt, Homo sapiens
ccagcagcaccuggggcagu

SEQ ID NO: 34741 - RNA, 20 nt, Homo sapiens
agugcccccacaguuugagu

SEQ ID NO: 34742 - RNA, 23 nt, Homo sapiens
aaagucucgcucucugccccuca

SEQ ID NO: 34743 - RNA, 21 nt, Homo sapiens
auccuguacugagcugccccg

SEQ ID NO: 34744 - RNA, 21 nt, Homo sapiens
cucacucagauggccaacuca

SEQ ID NO: 34745 - RNA, 22 nt, Homo sapiens
gcggucccgcggcgccccgccu

SEQ ID NO: 34746 - RNA, 22 nt, Homo sapiens
ugcuguuagcccuagccccgca

SEQ ID NO: 34747 - RNA, 21 nt, Homo sapiens
ugacugacagcuuuuugagua

SEQ ID NO: 34748 - RNA, 21 nt, Homo sapiens
ugcaggcugaucuucuucucu

SEQ ID NO: 34749 - RNA, 22 nt, Homo sapiens
ccaguagcacggcucaguccag

SEQ ID NO: 34750 - RNA, 22 nt, Homo sapiens
acaguucuucaacuggcagcuu

SEQ ID NO: 34751 - RNA, 22 nt, Homo sapiens
cuuccagucgaggauguuuaca

SEQ ID NO: 34752 - RNA, 22 nt, Homo sapiens
cuuccagucggggauguuuaca

SEQ ID NO: 34753 - RNA, 22 nt, Homo sapiens
cuuccagucaaggauguuuaca

SEQ ID NO: 34754 - RNA, 22 nt, Homo sapiens
ucgcccucucaacccagcuuuu

SEQ ID NO: 34755 - RNA, 22 nt, Homo sapiens
uugcccucucaacccagcuuuu

SEQ ID NO: 34756 - RNA, 20 nt, Homo sapiens
acccucucaacccagcuuuu

SEQ ID NO: 34757 - RNA, 19 nt, Homo sapiens
uccucucaacccagcuuuu

SEQ ID NO: 34758 - RNA, 20 nt, Homo sapiens
cuggaggaagggcccagagg

SEQ ID NO: 34759 - RNA, 22 nt, Homo sapiens
gccuaagacacaggcccagaga

SEQ ID NO: 34760 - RNA, 22 nt, Homo sapiens
auaaggauuuuuaggggcauua

SEQ ID NO: 34761 - RNA, 20 nt, Homo sapiens
agugcccccacaguuugagu

SEQ ID NO: 34762 - RNA, 21 nt, Homo sapiens
guguauaugcccauggacugc

SEQ ID NO: 34763 - RNA, 22 nt, Homo sapiens
cacauggccaaaacagagaaga

SEQ ID NO: 34764 - RNA, 21 nt, Homo sapiens
gagcugcauccuggcuccggg

SEQ ID NO: 34765 - RNA, 21 nt, Homo sapiens
gagcuacagugcuucaucuca

SEQ ID NO: 34766 - RNA, 23 nt, Homo sapiens
gggagugaagacacggagccaga

SEQ ID NO: 34767 - RNA, 22 nt, Homo sapiens
uccacauggaguugcuguuaca

SEQ ID NO: 34768 - RNA, 20 nt, Homo sapiens
cuggaggaagggcccagagg

SEQ ID NO: 34769 - RNA, 22 nt, Homo sapiens
gccuaagacacaggcccagaga

SEQ ID NO: 34770 - RNA, 19 nt, Homo sapiens
gccugcugacaccgugccu

SEQ ID NO: 34771 - RNA, 23 nt, Homo sapiens
cuaccugcacuguaagcacuuuu

SEQ ID NO: 34772 - RNA, 22 nt, Homo sapiens
gugggguggguggucaggccga

SEQ ID NO: 34773 - RNA, 18 nt, Homo sapiens
uggcgccugaacagggac

SEQ ID NO: 34774 - RNA, 24 nt, Homo sapiens
gaaagugcauagaauucugucugg

SEQ ID NO: 34775 - RNA, 22 nt, Homo sapiens
ccaucuuuaccagacaguguua

SEQ ID NO: 34776 - RNA, 21 nt, Homo sapiens
gggcaucugggacgcgcagga

SEQ ID NO: 34777 - RNA, 22 nt, Homo sapiens
acaucguuaccagacaguguua

SEQ ID NO: 34778 - RNA, 21 nt, Homo sapiens
gugacagagccaagcacaaau

SEQ ID NO: 34779 - RNA, 22 nt, Homo sapiens
ucagaccgagacaagugcaaug

SEQ ID NO: 34780 - RNA, 22 nt, Homo sapiens
ugcaacuuaguaaugugcaaua

SEQ ID NO: 34781 - RNA, 23 nt, Homo sapiens
cgugagcuccuggaggacaggga

SEQ ID NO: 34782 - RNA, 22 nt, Homo sapiens
uacagauggauaccgugcaauu

SEQ ID NO: 34783 - RNA, 22 nt, Homo sapiens
ucaccauugcuaaagugcaauu

SEQ ID NO: 34784 - RNA, 22 nt, Homo sapiens
gauagagugcagaccagggucu

SEQ ID NO: 34785 - RNA, 25 nt, Homo sapiens
accaacggaccuacuucccuccgcc

SEQ ID NO: 34786 - RNA, 22 nt, Homo sapiens
acaggccgggacaagugcaaua

SEQ ID NO: 34787 - RNA, 22 nt, Homo sapiens
ggaggccgggacgagugcaaua

SEQ ID NO: 34788 - RNA, 22 nt, Homo sapiens
acacacccacgcgagccggaaa

SEQ ID NO: 34789 - RNA, 21 nt, Homo sapiens
cggcucggguggcggcgacgg

SEQ ID NO: 34790 - RNA, 21 nt, Homo sapiens
cugaggagagaggaggugggg

SEQ ID NO: 34791 - RNA, 18 nt, Homo sapiens
ugguggcagaggugggau

SEQ ID NO: 34792 - RNA, 23 nt, Homo sapiens
cccaacagacauggcgguacuca

SEQ ID NO: 34793 - RNA, 22 nt, Homo sapiens
cgggacguccagacucaacucu

SEQ ID NO: 34794 - RNA, 20 nt, Homo sapiens
gcaaugcaacagcaaugcac

SEQ ID NO: 34795 - RNA, 22 nt, Homo sapiens
aacgcuccaaaagaaggcacuc

SEQ ID NO: 34796 - RNA, 22 nt, Homo sapiens
aacacucuaaaaggaggcacuu

SEQ ID NO: 34797 - RNA, 20 nt, Homo sapiens
cccugcgccaucuccucuac

SEQ ID NO: 34798 - RNA, 17 nt, Homo sapiens
ggguggcagcgguggga

SEQ ID NO: 34799 - RNA, 23 nt, Homo sapiens
gggagugaagacacggagccaga

SEQ ID NO: 34800 - RNA, 22 nt, Homo sapiens
aguccagauucugugcccacca

SEQ ID NO: 34801 - RNA, 22 nt, Homo sapiens
gcacauguucugcggcccacca

SEQ ID NO: 34802 - RNA, 22 nt, Homo sapiens
gcggucccgcggcgccccgccu

SEQ ID NO: 34803 - RNA, 22 nt, Homo sapiens
ugcuguuagcccuagccccgca

SEQ ID NO: 34804 - RNA, 22 nt, Homo sapiens
ugaagaagggggggaagggcgu

SEQ ID NO: 34805 - RNA, 22 nt, Homo sapiens
aggucucacuuuguugcccaga

SEQ ID NO: 34806 - RNA, 23 nt, Homo sapiens
acaccaaugcccuaggggaugcg

SEQ ID NO: 34807 - RNA, 22 nt, Homo sapiens
caacaaaaucacugaugcugga

SEQ ID NO: 34808 - RNA, 22 nt, Homo sapiens
ucaccauugcuaaagugcaauu

SEQ ID NO: 34809 - RNA, 25 nt, Homo sapiens
aaggagcucagaagcccugcccagc

SEQ ID NO: 34810 - RNA, 22 nt, Homo sapiens
uauccacuacaccccgcugccu

SEQ ID NO: 34811 - RNA, 22 nt, Homo sapiens
acuggguucaccuuuaagggca

SEQ ID NO: 34812 - RNA, 24 nt, Homo sapiens
acugcaggcuccagcuuccaggcu

SEQ ID NO: 34813 - RNA, 17 nt, Homo sapiens
gacagccucucccccac

SEQ ID NO: 34814 - RNA, 17 nt, Homo sapiens
gggagaggaggaggcga

SEQ ID NO: 34815 - RNA, 19 nt, Homo sapiens
uaugcuaccuuugcacggu

SEQ ID NO: 34816 - RNA, 22 nt, Homo sapiens
ucagaccgagacaagugcaaug

SEQ ID NO: 34817 - RNA, 22 nt, Homo sapiens
aacacucuaaagggaugcacga

SEQ ID NO: 34818 - RNA, 21 nt, Homo sapiens
acuccaaagggaagcgccuuc

SEQ ID NO: 34819 - RNA, 22 nt, Homo sapiens
cgcucuaaagggaagcgccuuc

SEQ ID NO: 34820 - RNA, 23 nt, Homo sapiens
ggacauuguuucagugcccaagu

SEQ ID NO: 34821 - RNA, 22 nt, Homo sapiens
uccggggacgaacgggacgggu

SEQ ID NO: 34822 - RNA, 23 nt, Homo sapiens
gggagugaagacacggagccaga

SEQ ID NO: 34823 - RNA, 23 nt, Homo sapiens
cuaucugcacuagaugcaccuua

SEQ ID NO: 34824 - RNA, 22 nt, Homo sapiens
gauagagugcagaccagggucu

SEQ ID NO: 34825 - RNA, 19 nt, Homo sapiens
gccugcugacaccgugccu

SEQ ID NO: 34826 - RNA, 20 nt, Homo sapiens
uccccacagacccagagccg

SEQ ID NO: 34827 - RNA, 23 nt, Homo sapiens
agaaaccaugggguaugagcaga

SEQ ID NO: 34828 - RNA, 22 nt, Homo sapiens
ggaggccgggacgagugcaaua

SEQ ID NO: 34829 - RNA, 20 nt, Homo sapiens
cugcgggaggacagggcuca

SEQ ID NO: 34830 - RNA, 22 nt, Homo sapiens
ucccucacacagaauuccagaa

SEQ ID NO: 34831 - RNA, 21 nt, Homo sapiens
acaggauugagggggggcccu

SEQ ID NO: 34832 - RNA, 23 nt, Homo sapiens
aaagucucgcucucugccccuca

SEQ ID NO: 34833 - RNA, 23 nt, Homo sapiens
aagaaucuugucccgcagguccu

SEQ ID NO: 34834 - RNA, 23 nt, Homo sapiens
acacucuaaagagaagcgcuuug

SEQ ID NO: 34835 - RNA, 21 nt, Homo sapiens
agaaaguacuucccucuggag

SEQ ID NO: 34836 - RNA, 21 nt, Homo sapiens
agaaagugcaucccucuggag

SEQ ID NO: 34837 - RNA, 22 nt, Homo sapiens
gccaccuucaaaugggaagucu

SEQ ID NO: 34838 - RNA, 24 nt, Homo sapiens
acugggcacaaacauguccagguc

SEQ ID NO: 34839 - RNA, 20 nt, Homo sapiens
uccccacagacccagagccg

SEQ ID NO: 34840 - RNA, 22 nt, Homo sapiens
ucggucccucgggccagggcag

SEQ ID NO: 34841 - RNA, 22 nt, Homo sapiens
cugggggcggcacaggggcuca

SEQ ID NO: 34842 - RNA, 22 nt, Homo sapiens
acuccaacagggccgcgucucc

SEQ ID NO: 34843 - RNA, 23 nt, Homo sapiens
gggagugaagacacggagccaga

SEQ ID NO: 34844 - RNA, 22 nt, Homo sapiens
uggcagcagcggagggggcaga

SEQ ID NO: 34845 - RNA, 22 nt, Homo sapiens
agcugaguguaggauguuuaca

SEQ ID NO: 34846 - RNA, 20 nt, Homo sapiens
ccagcagcaccuggggcagu

SEQ ID NO: 34847 - RNA, 23 nt, Homo sapiens
agaggcaggcaugcgggcagaca

SEQ ID NO: 34848 - RNA, 22 nt, Homo sapiens
gaauucaucacggccagccucu

SEQ ID NO: 34849 - RNA, 23 nt, Homo sapiens
acacucuaaagagaagcgcuuug

SEQ ID NO: 34850 - RNA, 21 nt, Homo sapiens
agaaaguacuucccucuggag

SEQ ID NO: 34851 - RNA, 21 nt, Homo sapiens
agaaagugcaucccucuggag

SEQ ID NO: 34852 - RNA, 21 nt, Homo sapiens
cugaaaccaaguaugggucgc

SEQ ID NO: 34853 - RNA, 21 nt, Homo sapiens
guucuaacccauuguggccaa

SEQ ID NO: 34854 - RNA, 21 nt, Homo sapiens
gcuccaaccucagcagacugu

SEQ ID NO: 34855 - RNA, 22 nt, Homo sapiens
accuucccugguacagaauacu

SEQ ID NO: 34856 - RNA, 20 nt, Homo sapiens
uccccacagacccagagccg

SEQ ID NO: 34857 - RNA, 23 nt, Homo sapiens
gggagugaagacacggagccaga

SEQ ID NO: 34858 - RNA, 22 nt, Homo sapiens
agcccaaaaggagaauucuuug

SEQ ID NO: 34859 - RNA, 20 nt, Homo sapiens
cccgccgcgucgcccugggg

SEQ ID NO: 34860 - RNA, 21 nt, Homo sapiens
aucugcacugucagcacuuua

SEQ ID NO: 34861 - RNA, 23 nt, Homo sapiens
gcuuugacaauaucauugcacug

SEQ ID NO: 34862 - RNA, 22 nt, Homo sapiens
ugcaagccuugggugugggagg

SEQ ID NO: 34863 - RNA, 23 nt, Homo sapiens
ccaccuggcaagaacaggcguuc

SEQ ID NO: 34864 - RNA, 23 nt, Homo sapiens
uggcccugacacgugguacugga

SEQ ID NO: 34865 - RNA, 22 nt, Homo sapiens
uggugauucacaaagaaaucca

SEQ ID NO: 34866 - RNA, 23 nt, Homo sapiens
ggaagccaucaagucgcugcagg

SEQ ID NO: 34867 - RNA, 20 nt, Homo sapiens
cucaaagcaaacccugcaga

SEQ ID NO: 34868 - RNA, 20 nt, Homo sapiens
cucaaagcaaacccugcaga

SEQ ID NO: 34869 - RNA, 20 nt, Homo sapiens
cuggggaaaaggguggcacg

SEQ ID NO: 34870 - RNA, 18 nt, Homo sapiens
cccccaccaccacgcccg

SEQ ID NO: 34871 - RNA, 23 nt, Homo sapiens
gggagugaagacacggagccaga

SEQ ID NO: 34872 - RNA, 22 nt, Homo sapiens
acucaccgacagguugaauguu

SEQ ID NO: 34873 - RNA, 18 nt, Homo sapiens
ggagaggagggcacugga

SEQ ID NO: 34874 - RNA, 22 nt, Homo sapiens
accuaauauaucaaacauauca

SEQ ID NO: 34875 - RNA, 23 nt, Homo sapiens
ccacccaaugaccuacuccaaga

SEQ ID NO: 34876 - RNA, 21 nt, Homo sapiens
caucaccuuccuucuccucca

SEQ ID NO: 34877 - RNA, 22 nt, Homo sapiens
agaaagcgcuuuccuuuguaga

SEQ ID NO: 34878 - RNA, 23 nt, Homo sapiens
ucacauaggaaugaaaagccaua

SEQ ID NO: 34879 - RNA, 22 nt, Homo sapiens
ugagccacugugccuggccuga

SEQ ID NO: 34880 - RNA, 21 nt, Homo sapiens
uucuaggauaggcccaggggc

SEQ ID NO: 34881 - RNA, 23 nt, Homo sapiens
cugcagaacuguucccgcugcua

SEQ ID NO: 34882 - RNA, 24 nt, Homo sapiens
acgcgcaggccagagacccaggca

SEQ ID NO: 34883 - RNA, 21 nt, Homo sapiens
cacaaccucaguguuuccagg

SEQ ID NO: 34884 - RNA, 20 nt, Homo sapiens
uacugcuuccacagcucccc

SEQ ID NO: 34885 - RNA, 26 nt, Homo sapiens
uuucagaauuugcugccaucaucauc

SEQ ID NO: 34886 - RNA, 22 nt, Homo sapiens
ccaucuuuaccagacaguguua

SEQ ID NO: 34887 - RNA, 22 nt, Homo sapiens
uucacacugcaugcucugggua

SEQ ID NO: 34888 - RNA, 22 nt, Homo sapiens
cagacuccgguggaaugaagga

SEQ ID NO: 34889 - RNA, 23 nt, Homo sapiens
ucucugcaggccgugugcuuugc

SEQ ID NO: 34890 - RNA, 23 nt, Homo sapiens
acccuauaagcaauauugcacua

SEQ ID NO: 34891 - RNA, 23 nt, Homo sapiens
ccuucucagaaaggugaaauuua

SEQ ID NO: 34892 - RNA, 23 nt, Homo sapiens
gggccgcagcugucgcccguguc

SEQ ID NO: 34893 - RNA, 20 nt, Homo sapiens
acaaugagaacccauggucu

SEQ ID NO: 34894 - RNA, 22 nt, Homo sapiens
caaacaccauugucacacucca

SEQ ID NO: 34895 - RNA, 22 nt, Homo sapiens
cacauggccaaaacagagaaga

SEQ ID NO: 34896 - RNA, 20 nt, Homo sapiens
cugcgggaggacagggcuca

SEQ ID NO: 34897 - RNA, 22 nt, Homo sapiens
ucccucacacagaauuccagaa

SEQ ID NO: 34898 - RNA, 22 nt, Homo sapiens
augcuuuuugggguaagggcuu

SEQ ID NO: 34899 - RNA, 21 nt, Homo sapiens
cggggugcacgggcggagggc

SEQ ID NO: 34900 - RNA, 23 nt, Homo sapiens
aggaacagcagcagcccgggccg

SEQ ID NO: 34901 - RNA, 22 nt, Homo sapiens
ucagaccgagacaagugcaaug

SEQ ID NO: 34902 - RNA, 23 nt, Homo sapiens
aaagucucgcucucugccccuca

SEQ ID NO: 34903 - RNA, 25 nt, Homo sapiens
accaacggaccuacuucccuccgcc

SEQ ID NO: 34904 - RNA, 20 nt, Homo sapiens
ggggggcgaggcagguguga

SEQ ID NO: 34905 - RNA, 23 nt, Homo sapiens
gggagugaagacacggagccaga

SEQ ID NO: 34906 - RNA, 20 nt, Homo sapiens
uucccaugcccuauaccucu

SEQ ID NO: 34907 - RNA, 22 nt, Homo sapiens
ucaacaucagucugauaagcua

SEQ ID NO: 34908 - RNA, 22 nt, Homo sapiens
aaagagguuaaccagguguguu

SEQ ID NO: 34909 - RNA, 21 nt, Homo sapiens
ugcaaugcaacuacaaugcac

SEQ ID NO: 34910 - RNA, 21 nt, Homo sapiens
ugacugcagagcaaaagacac

SEQ ID NO: 34911 - RNA, 22 nt, Homo sapiens
acaaaauccacaauuacuuuug

SEQ ID NO: 34912 - RNA, 19 nt, Homo sapiens
gcuccuguccaacuggcuc

SEQ ID NO: 34913 - RNA, 21 nt, Homo sapiens
aguucucccaacguaaaccca

SEQ ID NO: 34914 - RNA, 22 nt, Homo sapiens
caccugauaaaacugagguaua

SEQ ID NO: 34915 - RNA, 22 nt, Homo sapiens
ucuacccagaaaggagccagug

SEQ ID NO: 34916 - RNA, 20 nt, Homo sapiens
ggcauucaccgcgugccuua

SEQ ID NO: 34917 - RNA, 17 nt, Homo sapiens
ggguggcagcgguggga

SEQ ID NO: 34918 - RNA, 20 nt, Homo sapiens
cccgccgcgucgcccugggg

SEQ ID NO: 34919 - RNA, 22 nt, Homo sapiens
gaaccuaucuccccucuggacc

SEQ ID NO: 34920 - RNA, 22 nt, Homo sapiens
ucaacaucagucugauaagcua

SEQ ID NO: 34921 - RNA, 21 nt, Homo sapiens
aucugcacugucagcacuuua

SEQ ID NO: 34922 - RNA, 23 nt, Homo sapiens
gcuuugacaauaucauugcacug

SEQ ID NO: 34923 - RNA, 23 nt, Homo sapiens
gaaaaacgcccccuggcuugaaa

SEQ ID NO: 34924 - RNA, 21 nt, Homo sapiens
ucuacucagaagggugccuua

SEQ ID NO: 34925 - RNA, 23 nt, Homo sapiens
acacucuaaagagaagcgcuuug

SEQ ID NO: 34926 - RNA, 21 nt, Homo sapiens
agaaaguacuucccucuggag

SEQ ID NO: 34927 - RNA, 21 nt, Homo sapiens
agaaagugcaucccucuggag

SEQ ID NO: 34928 - RNA, 21 nt, Homo sapiens
guccugagagcgcugccuccu

SEQ ID NO: 34929 - RNA, 20 nt, Homo sapiens
aggggccucagccuccuggu

SEQ ID NO: 34930 - RNA, 21 nt, Homo sapiens
cacaaccucaguguuuccagg

SEQ ID NO: 34931 - RNA, 23 nt, Homo sapiens
ucacauaggaauaaaaagccaua

SEQ ID NO: 34932 - RNA, 22 nt, Homo sapiens
aacccauggaauucaguucuca

SEQ ID NO: 34933 - RNA, 22 nt, Homo sapiens
agccuauggaauucaguucuca

SEQ ID NO: 34934 - RNA, 22 nt, Homo sapiens
acaaaguucuguagugcacuga

SEQ ID NO: 34935 - RNA, 22 nt, Homo sapiens
cacugguacaaggguugggaga

SEQ ID NO: 34936 - RNA, 22 nt, Homo sapiens
cacaaaccauuaugugcugcua

SEQ ID NO: 34937 - RNA, 23 nt, Homo sapiens
gaaacccagcagacaauguagcu

SEQ ID NO: 34938 - RNA, 21 nt, Homo sapiens
aucugcacugucagcacuuua

SEQ ID NO: 34939 - RNA, 23 nt, Homo sapiens
gcuuugacaauaucauugcacug

SEQ ID NO: 34940 - RNA, 23 nt, Homo sapiens
acccuauaagcaauauugcacua

SEQ ID NO: 34941 - RNA, 22 nt, Homo sapiens
gcaaaaguaauugagauuuuug

SEQ ID NO: 34942 - RNA, 21 nt, Homo sapiens
cugaaaccaaguaugggucgc

SEQ ID NO: 34943 - RNA, 23 nt, Homo sapiens
gggagugaagacacggagccaga

SEQ ID NO: 34944 - RNA, 22 nt, Homo sapiens
acccuuaucaguucuccgucca

SEQ ID NO: 34945 - RNA, 22 nt, Homo sapiens
agcccaaaaggagaauucuuug

SEQ ID NO: 34946 - RNA, 21 nt, Homo sapiens
auccuguacugagcugccccg

SEQ ID NO: 34947 - RNA, 18 nt, Homo sapiens
acccucugaaaggaagca

SEQ ID NO: 34948 - RNA, 22 nt, Homo sapiens
aaagugcuucuuaccuccagau

SEQ ID NO: 34949 - RNA, 23 nt, Homo sapiens
ggacauuguuucagugcccaagu

SEQ ID NO: 34950 - RNA, 21 nt, Homo sapiens
ggggagcgggggcccugccuu

SEQ ID NO: 34951 - RNA, 20 nt, Homo sapiens
aagcagaaaaaggcaaacga

SEQ ID NO: 34952 - RNA, 22 nt, Homo sapiens
agaaagcgcuuuccuuuguaga

SEQ ID NO: 34953 - RNA, 22 nt, Homo sapiens
augcccuuuuaacauugcacug

SEQ ID NO: 34954 - RNA, 22 nt, Homo sapiens
augcccuuucaucauugcacug

SEQ ID NO: 34955 - RNA, 22 nt, Homo sapiens
acaaaguucuguagugcacuga

SEQ ID NO: 34956 - RNA, 22 nt, Homo sapiens
acaaaguucugugaugcacuga

SEQ ID NO: 34957 - RNA, 21 nt, Homo sapiens
ccaaguucugucaugcacuga

SEQ ID NO: 34958 - RNA, 23 nt, Homo sapiens
ucaguuuugcauagauuugcaca

SEQ ID NO: 34959 - RNA, 23 nt, Homo sapiens
ucaguuuugcauggauuugcaca

SEQ ID NO: 34960 - RNA, 22 nt, Homo sapiens
ucagaccgagacaagugcaaug

SEQ ID NO: 34961 - RNA, 21 nt, Homo sapiens
accuauccugaauuacuugaa

SEQ ID NO: 34962 - RNA, 23 nt, Homo sapiens
gcuuugacaauacuauugcacug

SEQ ID NO: 34963 - RNA, 23 nt, Homo sapiens
gcuuugacaauaucauugcacug

SEQ ID NO: 34964 - RNA, 23 nt, Homo sapiens
acccuauaagcaauauugcacua

SEQ ID NO: 34965 - RNA, 21 nt, Homo sapiens
uucacuccaaaaggugcaaaa

SEQ ID NO: 34966 - RNA, 23 nt, Homo sapiens
agacaaggcccacccgugcaaac

SEQ ID NO: 34967 - RNA, 21 nt, Homo sapiens
aagggucaguaagcacccgcg

SEQ ID NO: 34968 - RNA, 23 nt, Homo sapiens
cacaaauucggaucuacagggua

SEQ ID NO: 34969 - RNA, 23 nt, Homo sapiens
cacaaauucgguucuacagggua

SEQ ID NO: 34970 - RNA, 21 nt, Homo sapiens
cugaggagagaggaggugggg

SEQ ID NO: 34971 - RNA, 22 nt, Homo sapiens
caaacaccauugucacacucca

SEQ ID NO: 34972 - RNA, 22 nt, Homo sapiens
aggucucacuuuguugcccaga

SEQ ID NO: 34973 - RNA, 22 nt, Homo sapiens
cacgaccgacgccacgccgagu

SEQ ID NO: 34974 - RNA, 22 nt, Homo sapiens
ucaggaacugccuuucucucca

SEQ ID NO: 34975 - RNA, 22 nt, Homo sapiens
ucagaccgagacaagugcaaug

SEQ ID NO: 34976 - RNA, 21 nt, Homo sapiens
gcggaacuuagccacugugaa

SEQ ID NO: 34977 - RNA, 23 nt, Homo sapiens
cgugagcuccuggaggacaggga

SEQ ID NO: 34978 - RNA, 23 nt, Homo sapiens
aaagucucgcucucugccccuca

SEQ ID NO: 34979 - RNA, 22 nt, Homo sapiens
aguccagauucugugcccacca

SEQ ID NO: 34980 - RNA, 21 nt, Homo sapiens
aucagagguucagcuuacccu

SEQ ID NO: 34981 - RNA, 20 nt, Homo sapiens
ugggccaccgccgagcggac

SEQ ID NO: 34982 - RNA, 25 nt, Homo sapiens
aaggagcucagaagcccugcccagc

SEQ ID NO: 34983 - RNA, 22 nt, Homo sapiens
gcacauguucugcggcccacca

SEQ ID NO: 34984 - RNA, 17 nt, Homo sapiens
uggaggccccagcgaga

SEQ ID NO: 34985 - RNA, 23 nt, Homo sapiens
accacaggagucugagcauuuga

SEQ ID NO: 34986 - RNA, 21 nt, Homo sapiens
ccaaccaaugaaagaaugcuu

SEQ ID NO: 34987 - RNA, 22 nt, Homo sapiens
aacccauggaauucaguucuca

SEQ ID NO: 34988 - RNA, 22 nt, Homo sapiens
agccuauggaauucaguucuca

SEQ ID NO: 34989 - RNA, 22 nt, Homo sapiens
acaaaguucuguagugcacuga

SEQ ID NO: 34990 - RNA, 22 nt, Homo sapiens
acaaaguucuguagugcacuga

SEQ ID NO: 34991 - RNA, 22 nt, Homo sapiens
acaaaguucugugaugcacuga

SEQ ID NO: 34992 - RNA, 21 nt, Homo sapiens
uucuaggauaggcccaggggc

SEQ ID NO: 34993 - RNA, 22 nt, Homo sapiens
gaagaaaggcaucauauaggag

SEQ ID NO: 34994 - RNA, 22 nt, Homo sapiens
augggacauccuacauaugcaa

SEQ ID NO: 34995 - RNA, 22 nt, Homo sapiens
acacaccaaggauaauuucucc

SEQ ID NO: 34996 - RNA, 22 nt, Homo sapiens
ggaccuaaaaauacaaugcaua

SEQ ID NO: 34997 - RNA, 23 nt, Homo sapiens
uguaggcuggggauaaaugaaua

SEQ ID NO: 34998 - RNA, 21 nt, Homo sapiens
cacaaccucaguguuuccagg

SEQ ID NO: 34999 - RNA, 22 nt, Homo sapiens
uggugauucacaaagaaaucca

SEQ ID NO: 35000 - RNA, 23 nt, Homo sapiens
accacaggagucugagcauuuga

SEQ ID NO: 35001 - RNA, 23 nt, Homo sapiens
ggaagccaucaagucgcugcagg

SEQ ID NO: 35002 - RNA, 21 nt, Homo sapiens
agggcucaucuugguccugca

SEQ ID NO: 35003 - RNA, 23 nt, Homo sapiens
aaaaugcagauuccuggacucca

SEQ ID NO: 35004 - RNA, 18 nt, Homo sapiens
caccaccagagccaacgu

SEQ ID NO: 35005 - RNA, 19 nt, Homo sapiens
cagcaucagcagcaucauc

SEQ ID NO: 35006 - RNA, 21 nt, Homo sapiens
acuagacugugagcuccucga

SEQ ID NO: 35007 - RNA, 23 nt, Homo sapiens
aaaucagaaucacaccuggggga

SEQ ID NO: 35008 - RNA, 22 nt, Homo sapiens
gaacuugcuaaaaaugcagaau

SEQ ID NO: 35009 - RNA, 24 nt, Homo sapiens
acgcagagcccgaaagcccccagu

SEQ ID NO: 35010 - RNA, 23 nt, Homo sapiens
cacugugggcccucuccgcacca

SEQ ID NO: 35011 - RNA, 21 nt, Homo sapiens
aagacgggaggagaggaguga

SEQ ID NO: 35012 - RNA, 23 nt, Homo sapiens
cuaccugcacuguaagcacuuuu

SEQ ID NO: 35013 - RNA, 17 nt, Homo sapiens
gacagccucucccccac

SEQ ID NO: 35014 - RNA, 17 nt, Homo sapiens
gacagccucucccccac

SEQ ID NO: 35015 - RNA, 23 nt, Homo sapiens
gggagugaagacacggagccaga

SEQ ID NO: 35016 - RNA, 21 nt, Homo sapiens
gggcaucugggacgcgcagga

SEQ ID NO: 35017 - RNA, 22 nt, Homo sapiens
uggcagcagcggagggggcaga

SEQ ID NO: 35018 - RNA, 22 nt, Homo sapiens
uccacauggaguugcuguuaca

SEQ ID NO: 35019 - RNA, 22 nt, Homo sapiens
uccacauggaguugcuguuaca

SEQ ID NO: 35020 - RNA, 22 nt, Homo sapiens
acaguucuucaacuggcagcuu

SEQ ID NO: 35021 - RNA, 20 nt, Homo sapiens
ccagcagcaccuggggcagu

SEQ ID NO: 35022 - RNA, 20 nt, Homo sapiens
cuggaggaagggcccagagg

SEQ ID NO: 35023 - RNA, 22 nt, Homo sapiens
gccuaagacacaggcccagaga

SEQ ID NO: 35024 - RNA, 22 nt, Homo sapiens
gagcccuggacuaggagucagc

SEQ ID NO: 35025 - RNA, 22 nt, Homo sapiens
acaaccagcuaagacacugcca

SEQ ID NO: 35026 - RNA, 22 nt, Homo sapiens
auggcaguggaguuagugauug

SEQ ID NO: 35027 - RNA, 23 nt, Homo sapiens
gcaaucagcuaacuacacugccu

SEQ ID NO: 35028 - RNA, 21 nt, Homo sapiens
ccuucugacuccaaguccagu

SEQ ID NO: 35029 - RNA, 23 nt, Homo sapiens
aaagucucgcucucugccccuca

SEQ ID NO: 35030 - RNA, 22 nt, Homo sapiens
accagcuaacaauacacugcca

SEQ ID NO: 35031 - RNA, 22 nt, Homo sapiens
gccagcuaacaauacacugccu

SEQ ID NO: 35032 - RNA, 21 nt, Homo sapiens
auccuguacugagcugccccg

SEQ ID NO: 35033 - RNA, 19 nt, Homo sapiens
ucagcaguaccagccuaga

SEQ ID NO: 35034 - RNA, 22 nt, Homo sapiens
gggagaggucucccugcgcaca

SEQ ID NO: 35035 - RNA, 24 nt, Homo sapiens
cacccccagagccucagcucccca

SEQ ID NO: 35036 - RNA, 18 nt, Homo sapiens
gaaaugagggccagcuga

SEQ ID NO: 35037 - RNA, 22 nt, Homo sapiens
cugggggcggcacaggggcuca

SEQ ID NO: 35038 - RNA, 22 nt, Homo sapiens
ccacacacuuccuuacauucca

SEQ ID NO: 35039 - RNA, 17 nt, Homo sapiens
ggguggcagcgguggga

SEQ ID NO: 35040 - RNA, 23 nt, Homo sapiens
cgugagcuccuggaggacaggga

SEQ ID NO: 35041 - RNA, 22 nt, Homo sapiens
acaaccagcuaagacacugcca

SEQ ID NO: 35042 - RNA, 23 nt, Homo sapiens
acaacaaaaucacuagucuucca

SEQ ID NO: 35043 - RNA, 20 nt, Homo sapiens
uacugcuuccacagcucccc

SEQ ID NO: 35044 - RNA, 22 nt, Homo sapiens
ccaucuuuaccagacaguguua

SEQ ID NO: 35045 - RNA, 23 nt, Homo sapiens
agggauuccugggaaaacuggac

SEQ ID NO: 35046 - RNA, 23 nt, Homo sapiens
cuaccugcacuauaagcacuuua

SEQ ID NO: 35047 - RNA, 24 nt, Homo sapiens
ugggagaaccucccugcuucugcu

SEQ ID NO: 35048 - RNA, 22 nt, Homo sapiens
caacaaaaucacugaugcugga

SEQ ID NO: 35049 - RNA, 22 nt, Homo sapiens
gcgaauauaacacggucgaucu

SEQ ID NO: 35050 - RNA, 22 nt, Homo sapiens
cucccuucuuuccucccgucuu

SEQ ID NO: 35051 - RNA, 22 nt, Homo sapiens
gaacuugcuaaaaaugcagaau

SEQ ID NO: 35052 - RNA, 21 nt, Homo sapiens
gcuccaaccucagcagacugu

SEQ ID NO: 35053 - RNA, 22 nt, Homo sapiens
aacccucuaaaaggaagcacuu

SEQ ID NO: 35054 - RNA, 22 nt, Homo sapiens
caaacaccauugucacacucca

SEQ ID NO: 35055 - RNA, 22 nt, Homo sapiens
cacgaccgacgccacgccgagu

SEQ ID NO: 35056 - RNA, 22 nt, Homo sapiens
ggagcccgcgccccgcgccgag

SEQ ID NO: 35057 - RNA, 22 nt, Homo sapiens
ucaggaacugccuuucucucca

SEQ ID NO: 35058 - RNA, 22 nt, Homo sapiens
ucagaccgagacaagugcaaug

SEQ ID NO: 35059 - RNA, 19 nt, Homo sapiens
guccugaauuccgcagccu

SEQ ID NO: 35060 - RNA, 25 nt, Homo sapiens
accaacggaccuacuucccuccgcc

SEQ ID NO: 35061 - RNA, 22 nt, Homo sapiens
gcggucccgcggcgccccgccu

SEQ ID NO: 35062 - RNA, 21 nt, Homo sapiens
cucccccacugcagcuggcac

SEQ ID NO: 35063 - RNA, 21 nt, Homo sapiens
gagcugcauccuggcuccggg

SEQ ID NO: 35064 - RNA, 22 nt, Homo sapiens
acaaccagcuaagacacugcca

SEQ ID NO: 35065 - RNA, 22 nt, Homo sapiens
aggaaaccagcaaguguugacg

SEQ ID NO: 35066 - RNA, 22 nt, Homo sapiens
cacgaccgacgccacgccgagu

SEQ ID NO: 35067 - RNA, 21 nt, Homo sapiens
gggcaucugggacgcgcagga

SEQ ID NO: 35068 - RNA, 22 nt, Homo sapiens
ugagccacugugccuggccuga

SEQ ID NO: 35069 - RNA, 23 nt, Homo sapiens
acaccaaugcccuaggggaugcg

SEQ ID NO: 35070 - RNA, 23 nt, Homo sapiens
acauuuuucguuauugcucuuga

SEQ ID NO: 35071 - RNA, 22 nt, Homo sapiens
uauucaggaacauauugcaaaa

SEQ ID NO: 35072 - RNA, 21 nt, Homo sapiens
acaaaccacagugugcugcug

SEQ ID NO: 35073 - RNA, 22 nt, Homo sapiens
gcaaagguaauugcuguuuucg

SEQ ID NO: 35074 - RNA, 25 nt, Homo sapiens
aggccgccacccgcccgcgaucccu

SEQ ID NO: 35075 - RNA, 19 nt, Homo sapiens
gcucuaagaaagccacacu

SEQ ID NO: 35076 - RNA, 22 nt, Homo sapiens
ugaauuacuuuguaaaccacca

SEQ ID NO: 35077 - RNA, 22 nt, Homo sapiens
gggagaggucucccugcgcaca

SEQ ID NO: 35078 - RNA, 23 nt, Homo sapiens
gggagugaagacacggagccaga

SEQ ID NO: 35079 - RNA, 21 nt, Homo sapiens
gaccaaucgccguccccgccg

SEQ ID NO: 35080 - RNA, 23 nt, Homo sapiens
cuaccugcacuaugagcacuuug

SEQ ID NO: 35081 - RNA, 22 nt, Homo sapiens
cucaauagacugugagcuccuu

SEQ ID NO: 35082 - RNA, 23 nt, Homo sapiens
aaaucagaaucacaccuggggga

SEQ ID NO: 35083 - RNA, 19 nt, Homo sapiens
guccugaauuccgcagccu

SEQ ID NO: 35084 - RNA, 20 nt, Homo sapiens
aggggccucagccuccuggu

SEQ ID NO: 35085 - RNA, 23 nt, Homo sapiens
cccagcuagauuguaagcuccuu

SEQ ID NO: 35086 - RNA, 22 nt, Homo sapiens
ugcuguuagcccuagccccgca

SEQ ID NO: 35087 - RNA, 17 nt, Homo sapiens
gacagccucucccccac

SEQ ID NO: 35088 - RNA, 23 nt, Homo sapiens
aaaaugcagauuccuggacucca

SEQ ID NO: 35089 - RNA, 18 nt, Homo sapiens
cagcagccuccuucucaa

SEQ ID NO: 35090 - RNA, 23 nt, Homo sapiens
gggagugaagacacggagccaga

SEQ ID NO: 35091 - RNA, 22 nt, Homo sapiens
cacaaaccauuaugugcugcua

SEQ ID NO: 35092 - RNA, 22 nt, Homo sapiens
ucaggaacugccuuucucucca

SEQ ID NO: 35093 - RNA, 21 nt, Homo sapiens
gaccaaucgccguccccgccg

SEQ ID NO: 35094 - RNA, 23 nt, Homo sapiens
aaagucucgcucucugccccuca

SEQ ID NO: 35095 - RNA, 22 nt, Homo sapiens
gcggucccgcggcgccccgccu

SEQ ID NO: 35096 - RNA, 24 nt, Homo sapiens
cacccccagagccucagcucccca

SEQ ID NO: 35097 - RNA, 23 nt, Homo sapiens
ccacccaaugaccuacuccaaga

SEQ ID NO: 35098 - RNA, 22 nt, Homo sapiens
uccagcaaagggaagcgcuuuc

SEQ ID NO: 35099 - RNA, 22 nt, Homo sapiens
accucuaaaggggagcgcuuug

SEQ ID NO: 35100 - RNA, 23 nt, Homo sapiens
acacucuaaagagaagcgcuuug

SEQ ID NO: 35101 - RNA, 21 nt, Homo sapiens
gcuccaaagggaagcgcuuug

SEQ ID NO: 35102 - RNA, 21 nt, Homo sapiens
ccucuaaagagaagcgcuuuc

SEQ ID NO: 35103 - RNA, 22 nt, Homo sapiens
cucagagcagacgugguucuca

SEQ ID NO: 35104 - RNA, 21 nt, Homo sapiens
aagggucaguaagcacccgcg

SEQ ID NO: 35105 - RNA, 20 nt, Homo sapiens
uacugcuuccacagcucccc

SEQ ID NO: 35106 - RNA, 21 nt, Homo sapiens
agaaguagaccauguguccua

SEQ ID NO: 35107 - RNA, 21 nt, Homo sapiens
cucccccacugcagcuggcac

SEQ ID NO: 35108 - RNA, 21 nt, Homo sapiens
ugcaggcugaucuucuucucu

SEQ ID NO: 35109 - RNA, 24 nt, Homo sapiens
ucacagguuaaagggucucaggga

SEQ ID NO: 35110 - RNA, 22 nt, Homo sapiens
ucacaaguuagggucucaggga

SEQ ID NO: 35111 - RNA, 23 nt, Homo sapiens
agcccuguucuacagcccugagg

SEQ ID NO: 35112 - RNA, 18 nt, Homo sapiens
caccaccagagccaacgu

SEQ ID NO: 35113 - RNA, 22 nt, Homo sapiens
accuaauauaucaaacauauca

SEQ ID NO: 35114 - RNA, 22 nt, Homo sapiens
cuguuccugcugaacugagcca

SEQ ID NO: 35115 - RNA, 22 nt, Homo sapiens
agcugaguguaggauguuuaca

SEQ ID NO: 35116 - RNA, 20 nt, Homo sapiens
cuggaggaagggcccagagg

SEQ ID NO: 35117 - RNA, 22 nt, Homo sapiens
gccuaagacacaggcccagaga

SEQ ID NO: 35118 - RNA, 20 nt, Homo sapiens
ggcauucaccgcgugccuua

SEQ ID NO: 35119 - RNA, 22 nt, Homo sapiens
cagaaagugcuucccucuagag

SEQ ID NO: 35120 - RNA, 21 nt, Homo sapiens
cacucugaagggaagcgcuuu

SEQ ID NO: 35121 - RNA, 21 nt, Homo sapiens
ccucuaaagagaagcgcuuuc

SEQ ID NO: 35122 - RNA, 22 nt, Homo sapiens
acacucuaaaaggaugcacuuu

SEQ ID NO: 35123 - RNA, 22 nt, Homo sapiens
cagaaagcgcuucccucuagag

SEQ ID NO: 35124 - RNA, 22 nt, Homo sapiens
cagaaagcgcuucccucuagag

SEQ ID NO: 35125 - RNA, 22 nt, Homo sapiens
cagaaagugcuucccucuagag

SEQ ID NO: 35126 - RNA, 22 nt, Homo sapiens
acacucuaaagggaaccauuuu

SEQ ID NO: 35127 - RNA, 23 nt, Homo sapiens
acccucuauagggaagcgcguuc

SEQ ID NO: 35128 - RNA, 22 nt, Homo sapiens
cagaaagugcuucccucuagag

SEQ ID NO: 35129 - RNA, 21 nt, Homo sapiens
cugcugggccacaacguggga

SEQ ID NO: 35130 - RNA, 22 nt, Homo sapiens
cacauggccaaaacagagaaga

SEQ ID NO: 35131 - RNA, 21 nt, Homo sapiens
cugggggacggagcagaagga

SEQ ID NO: 35132 - RNA, 21 nt, Homo sapiens
cucccccacugcagcuggcac

SEQ ID NO: 35133 - RNA, 22 nt, Homo sapiens
aggucucacuuuguugcccaga

SEQ ID NO: 35134 - RNA, 21 nt, Homo sapiens
ucuccagaucagggcagucca

SEQ ID NO: 35135 - RNA, 18 nt, Homo sapiens
aucacauucaccucccug

SEQ ID NO: 35136 - RNA, 23 nt, Homo sapiens
gggagugaagacacggagccaga

SEQ ID NO: 35137 - RNA, 22 nt, Homo sapiens
ucaggaacugccuuucucucca

SEQ ID NO: 35138 - RNA, 22 nt, Homo sapiens
uggcagcagcggagggggcaga

SEQ ID NO: 35139 - RNA, 23 nt, Homo sapiens
cagcugcuuuugggauuccguug

SEQ ID NO: 35140 - RNA, 22 nt, Homo sapiens
aggcauaggaugacaaagggaa

SEQ ID NO: 35141 - RNA, 22 nt, Homo sapiens
aggcgaaggaugacaaagggaa

SEQ ID NO: 35142 - RNA, 22 nt, Homo sapiens
agcugaguguaggauguuuaca

SEQ ID NO: 35143 - RNA, 20 nt, Homo sapiens
ccagcagcaccuggggcagu

SEQ ID NO: 35144 - RNA, 22 nt, Homo sapiens
caacaaaaucacugaugcugga

SEQ ID NO: 35145 - RNA, 21 nt, Homo sapiens
ucaaucacagauagcaccccu

SEQ ID NO: 35146 - RNA, 22 nt, Homo sapiens
guaccccuggagauucugauaa

SEQ ID NO: 35147 - RNA, 21 nt, Homo sapiens
auccuguacugagcugccccg

SEQ ID NO: 35148 - RNA, 22 nt, Homo sapiens
agaauccuugcccgggugcauu

SEQ ID NO: 35149 - RNA, 22 nt, Homo sapiens
ugaauccuugcccaggugcauu

SEQ ID NO: 35150 - RNA, 21 nt, Homo sapiens
cccgaggagccgggcaggcuu

SEQ ID NO: 35151 - RNA, 25 nt, Homo sapiens
aaggagcucagaagcccugcccagc

SEQ ID NO: 35152 - RNA, 20 nt, Homo sapiens
uacugcuuccacagcucccc

SEQ ID NO: 35153 - RNA, 22 nt, Homo sapiens
auaaaugacaccuccuugugaa

SEQ ID NO: 35154 - RNA, 20 nt, Homo sapiens
uacugcuuccacagcucccc

SEQ ID NO: 35155 - RNA, 21 nt, Homo sapiens
cucccccacugcagcuggcac

SEQ ID NO: 35156 - RNA, 22 nt, Homo sapiens
ugaagaagggggggaagggcgu

SEQ ID NO: 35157 - RNA, 18 nt, Homo sapiens
cccccaccaccacgcccg

SEQ ID NO: 35158 - RNA, 24 nt, Homo sapiens
acugcuggucuucagucagggcca

SEQ ID NO: 35159 - RNA, 22 nt, Homo sapiens
ccggcugcaacacaagacacga

SEQ ID NO: 35160 - RNA, 22 nt, Homo sapiens
ucagaccgagacaagugcaaug

SEQ ID NO: 35161 - RNA, 21 nt, Homo sapiens
accuauccugaauuacuugaa

SEQ ID NO: 35162 - RNA, 22 nt, Homo sapiens
acggaagggcagagagggccag

SEQ ID NO: 35163 - RNA, 22 nt, Homo sapiens
aucgggaggggacugagccuga

SEQ ID NO: 35164 - RNA, 22 nt, Homo sapiens
gaauucaucacggccagccucu

SEQ ID NO: 35165 - RNA, 22 nt, Homo sapiens
aaagugcuucuuaccuccagau

SEQ ID NO: 35166 - RNA, 23 nt, Homo sapiens
uguaggcuggggauaaaugaaua

SEQ ID NO: 35167 - RNA, 22 nt, Homo sapiens
uauccacuacaccccgcugccu

SEQ ID NO: 35168 - RNA, 23 nt, Homo sapiens
ccgcuugagcuaacuccgacccg

SEQ ID NO: 35169 - RNA, 18 nt, Homo sapiens
aucacauucaccucccug

SEQ ID NO: 35170 - RNA, 21 nt, Homo sapiens
cggggugcacgggcggagggc

SEQ ID NO: 35171 - RNA, 23 nt, Homo sapiens
gggagugaagacacggagccaga

SEQ ID NO: 35172 - RNA, 22 nt, Homo sapiens
uacagauggauaccgugcaauu

SEQ ID NO: 35173 - RNA, 20 nt, Homo sapiens
ugggccaccgccgagcggac

SEQ ID NO: 35174 - RNA, 21 nt, Homo sapiens
ggacuauagaacuuucccccu

SEQ ID NO: 35175 - RNA, 22 nt, Homo sapiens
caagacacauuuggagagggac

SEQ ID NO: 35176 - RNA, 21 nt, Homo sapiens
caucaccuuccuucuccucca

SEQ ID NO: 35177 - RNA, 21 nt, Homo sapiens
aagggucaguaagcacccgcg

SEQ ID NO: 35178 - RNA, 22 nt, Homo sapiens
aacagcacaaacuacuaccuca

SEQ ID NO: 35179 - RNA, 24 nt, Homo sapiens
acugcuggucuucagucagggcca

SEQ ID NO: 35180 - RNA, 22 nt, Homo sapiens
ccggcugcaacacaagacacga

SEQ ID NO: 35181 - RNA, 20 nt, Homo sapiens
cccgccgcgucgcccugggg

SEQ ID NO: 35182 - RNA, 22 nt, Homo sapiens
acugggacuuuguaggccaguu

SEQ ID NO: 35183 - RNA, 22 nt, Homo sapiens
agcgggacuuugagggccaguu

SEQ ID NO: 35184 - RNA, 22 nt, Homo sapiens
acggaagggcagagagggccag

SEQ ID NO: 35185 - RNA, 21 nt, Homo sapiens
aacuccuguaugaagccguuc

SEQ ID NO: 35186 - RNA, 19 nt, Homo sapiens
accagugcccugcacacuu

SEQ ID NO: 35187 - RNA, 22 nt, Homo sapiens
gggagaggucucccugcgcaca

SEQ ID NO: 35188 - RNA, 21 nt, Homo sapiens
cucccccacugcagcuggcac

SEQ ID NO: 35189 - RNA, 21 nt, Homo sapiens
gagcugcauccuggcuccggg

SEQ ID NO: 35190 - RNA, 20 nt, Homo sapiens
cccgccgcgucgcccugggg

SEQ ID NO: 35191 - RNA, 21 nt, Homo sapiens
agagcucauccauaguuguca

SEQ ID NO: 35192 - RNA, 18 nt, Homo sapiens
acccucugaaaggaagca

SEQ ID NO: 35193 - RNA, 22 nt, Homo sapiens
aaagugcuucuuaccuccagau

SEQ ID NO: 35194 - RNA, 25 nt, Homo sapiens
accaacggaccuacuucccuccgcc

SEQ ID NO: 35195 - RNA, 22 nt, Homo sapiens
ugcuguuagcccuagccccgca

SEQ ID NO: 35196 - RNA, 22 nt, Homo sapiens
ggcagagagucagagcgcggau

SEQ ID NO: 35197 - RNA, 22 nt, Homo sapiens
caaacaccauugucacacucca

SEQ ID NO: 35198 - RNA, 20 nt, Homo sapiens
ggcauucaccgcgugccuua

SEQ ID NO: 35199 - RNA, 22 nt, Homo sapiens
cgaccauggcuguagacuguua

SEQ ID NO: 35200 - RNA, 22 nt, Homo sapiens
ccggcugcaacacaagacacga

SEQ ID NO: 35201 - RNA, 21 nt, Homo sapiens
ggccgugacuggagacuguua

SEQ ID NO: 35202 - RNA, 23 nt, Homo sapiens
acaccccaaaaucgaagcacuuc

SEQ ID NO: 35203 - RNA, 22 nt, Homo sapiens
ucaguuuccucugcaaacaguu

SEQ ID NO: 35204 - RNA, 21 nt, Homo sapiens
ucuacucagaagggugccuua

SEQ ID NO: 35205 - RNA, 21 nt, Homo sapiens
ugacugcagagcaaaagacac

SEQ ID NO: 35206 - RNA, 24 nt, Homo sapiens
cagaaagugcuuucuuuuggagaa

SEQ ID NO: 35207 - RNA, 22 nt, Homo sapiens
aacacucuaaaaggaggcacuu

SEQ ID NO: 35208 - RNA, 22 nt, Homo sapiens
acaaaauccacaauuacuuuug

SEQ ID NO: 35209 - RNA, 22 nt, Homo sapiens
cugcucaaacccuccaaugacu

SEQ ID NO: 35210 - RNA, 22 nt, Homo sapiens
cuggagagacaaggggaagagg

SEQ ID NO: 35211 - RNA, 23 nt, Homo sapiens
gggagugaagacacggagccaga

SEQ ID NO: 35212 - RNA, 23 nt, Homo sapiens
acaccccaaaaucgaagcacuuc

SEQ ID NO: 35213 - RNA, 22 nt, Homo sapiens
cucggggcagcucaguacagga

SEQ ID NO: 35214 - RNA, 24 nt, Homo sapiens
cagaaagugcuuucuuuuggagaa

SEQ ID NO: 35215 - RNA, 22 nt, Homo sapiens
aacacucuaaaaggaggcacuu

SEQ ID NO: 35216 - RNA, 22 nt, Homo sapiens
cugcucaaacccuccaaugacu

SEQ ID NO: 35217 - RNA, 22 nt, Homo sapiens
caagacacauuuggagagggac

SEQ ID NO: 35218 - RNA, 21 nt, Homo sapiens
ggggagcgggggcccugccuu

SEQ ID NO: 35219 - RNA, 22 nt, Homo sapiens
cacaaaccauuaugugcugcua

SEQ ID NO: 35220 - RNA, 22 nt, Homo sapiens
uguaaaccaugaugugcugcua

SEQ ID NO: 35221 - RNA, 22 nt, Homo sapiens
cgccaauauuuacgugcugcua

SEQ ID NO: 35222 - RNA, 21 nt, Homo sapiens
gccaauauuucugugcugcua

SEQ ID NO: 35223 - RNA, 22 nt, Homo sapiens
auguaugugggacgguaaacca

SEQ ID NO: 35224 - RNA, 22 nt, Homo sapiens
uucaaaacaugaauugcugcug

SEQ ID NO: 35225 - RNA, 21 nt, Homo sapiens
acaaaccacagugugcugcug

SEQ ID NO: 35226 - RNA, 23 nt, Homo sapiens
cugcagaacuguucccgcugcua

SEQ ID NO: 35227 - RNA, 22 nt, Homo sapiens
uauccacuacaccccgcugccu

SEQ ID NO: 35228 - RNA, 22 nt, Homo sapiens
acacacccacgcgagccggaaa

SEQ ID NO: 35229 - RNA, 17 nt, Homo sapiens
gacagccucucccccac

SEQ ID NO: 35230 - RNA, 21 nt, Homo sapiens
acuagacugugagcuccucga

SEQ ID NO: 35231 - RNA, 21 nt, Homo sapiens
ugcaaacccugcaugugggag

SEQ ID NO: 35232 - RNA, 23 nt, Homo sapiens
gaaacccagcagacaauguagcu

SEQ ID NO: 35233 - RNA, 23 nt, Homo sapiens
aaaucagaaucacaccuggggga

SEQ ID NO: 35234 - RNA, 23 nt, Homo sapiens
ucucacccagguagcaaggauua

SEQ ID NO: 35235 - RNA, 23 nt, Homo sapiens
ucucacccagguagcaaggauua

SEQ ID NO: 35236 - RNA, 22 nt, Homo sapiens
agaauccuugcccgggugcauu

SEQ ID NO: 35237 - RNA, 22 nt, Homo sapiens
ugaauccuugcccaggugcauu

SEQ ID NO: 35238 - RNA, 21 nt, Homo sapiens
uugucuaaccagucaccuguu

SEQ ID NO: 35239 - RNA, 21 nt, Homo sapiens
ggacuauagaacuuucccccu

SEQ ID NO: 35240 - RNA, 24 nt, Homo sapiens
acgcagagcccgaaagcccccagu

SEQ ID NO: 35241 - RNA, 19 nt, Homo sapiens
gcucuaagaaagccacacu

SEQ ID NO: 35242 - RNA, 22 nt, Homo sapiens
ugaagaagggggggaagggcgu

SEQ ID NO: 35243 - RNA, 17 nt, Homo sapiens
gggagaggaggaggcga

SEQ ID NO: 35244 - RNA, 23 nt, Homo sapiens
aaaaugcagauuccuggacucca

SEQ ID NO: 35245 - RNA, 22 nt, Homo sapiens
aacccauggaauucaguucuca

SEQ ID NO: 35246 - RNA, 22 nt, Homo sapiens
agccuauggaauucaguucuca

SEQ ID NO: 35247 - RNA, 21 nt, Homo sapiens
gggcaucugggacgcgcagga

SEQ ID NO: 35248 - RNA, 22 nt, Homo sapiens
ucaggaacugccuuucucucca

SEQ ID NO: 35249 - RNA, 21 nt, Homo sapiens
gaccaaucgccguccccgccg

SEQ ID NO: 35250 - RNA, 20 nt, Homo sapiens
acagcaaggagggcaggagg

SEQ ID NO: 35251 - RNA, 20 nt, Homo sapiens
cuggaggaagggcccagagg

SEQ ID NO: 35252 - RNA, 22 nt, Homo sapiens
gccuaagacacaggcccagaga

SEQ ID NO: 35253 - RNA, 25 nt, Homo sapiens
acggagcugucccaacaccaccccu

SEQ ID NO: 35254 - RNA, 22 nt, Homo sapiens
gcggucccgcggcgccccgccu

SEQ ID NO: 35255 - RNA, 22 nt, Homo sapiens
ugcuguuagcccuagccccgca

SEQ ID NO: 35256 - RNA, 20 nt, Homo sapiens
uccccacagacccagagccg

SEQ ID NO: 35257 - RNA, 20 nt, Homo sapiens
uacugcuuccacagcucccc

SEQ ID NO: 35258 - RNA, 23 nt, Homo sapiens
cacaaauucggaucuacagggua

SEQ ID NO: 35259 - RNA, 23 nt, Homo sapiens
cacaaauucgguucuacagggua

SEQ ID NO: 35260 - RNA, 23 nt, Homo sapiens
gucacaucccucccaagacccuc

SEQ ID NO: 35261 - RNA, 22 nt, Homo sapiens
aggucucacuuuguugcccaga

SEQ ID NO: 35262 - RNA, 22 nt, Homo sapiens
agagcaagaccccgucucuaaa

SEQ ID NO: 35263 - RNA, 22 nt, Homo sapiens
augcccuuucaucauugcacug

SEQ ID NO: 35264 - RNA, 24 nt, Homo sapiens
gaaagugcauagaauucugucugg

SEQ ID NO: 35265 - RNA, 22 nt, Homo sapiens
cccaacaacaugaaacuaccua

SEQ ID NO: 35266 - RNA, 23 nt, Homo sapiens
cgugagcuccuggaggacaggga

SEQ ID NO: 35267 - RNA, 22 nt, Homo sapiens
ucaccauugcuaaagugcaauu

SEQ ID NO: 35268 - RNA, 22 nt, Homo sapiens
gauagagugcagaccagggucu

SEQ ID NO: 35269 - RNA, 22 nt, Homo sapiens
acacaccaaggauaauuucucc

SEQ ID NO: 35270 - RNA, 22 nt, Homo sapiens
gguaaaacucgcaauuacuuuu

SEQ ID NO: 35271 - RNA, 22 nt, Homo sapiens
ggccaaaaccacaauuacuuuu

SEQ ID NO: 35272 - RNA, 22 nt, Homo sapiens
ggcaaaaaccgcaauuacuuuu

SEQ ID NO: 35273 - RNA, 22 nt, Homo sapiens
ggcaaaaaccacaauuacuuuu

SEQ ID NO: 35274 - RNA, 22 nt, Homo sapiens
gacaaaaaccgcgauuacuuuu

SEQ ID NO: 35275 - RNA, 22 nt, Homo sapiens
ggcaaaauccgcaauuacuuuu

SEQ ID NO: 35276 - RNA, 22 nt, Homo sapiens
accaaagaccgcaauuacuuuu

SEQ ID NO: 35277 - RNA, 22 nt, Homo sapiens
acaaaauccacaauuacuuuug

SEQ ID NO: 35278 - RNA, 21 nt, Homo sapiens
uuuuggugcauauuuacuuua

SEQ ID NO: 35279 - RNA, 25 nt, Homo sapiens
aaggagcucagaagcccugcccagc

SEQ ID NO: 35280 - RNA, 19 nt, Homo sapiens
ucccacaggaagcagacac

SEQ ID NO: 35281 - RNA, 22 nt, Homo sapiens
ugcuguuagcccuagccccgca

SEQ ID NO: 35282 - RNA, 22 nt, Homo sapiens
gugggguggguggucaggccga

SEQ ID NO: 35283 - RNA, 20 nt, Homo sapiens
ggcauucaccgcgugccuua

SEQ ID NO: 35284 - RNA, 23 nt, Homo sapiens
cagcugcuuuugggauuccguug

SEQ ID NO: 35285 - RNA, 22 nt, Homo sapiens
gcuggguggagaagguggugaa

SEQ ID NO: 35286 - RNA, 23 nt, Homo sapiens
ucaguuuugcauagauuugcaca

SEQ ID NO: 35287 - RNA, 22 nt, Homo sapiens
cacucagcaccaggauauuguu

SEQ ID NO: 35288 - RNA, 22 nt, Homo sapiens
aacuaugcaaccuacuaccucu

SEQ ID NO: 35289 - RNA, 21 nt, Homo sapiens
aagugucagacacgguggugg

SEQ ID NO: 35290 - RNA, 22 nt, Homo sapiens
ugggguauuugacaaacugaca

SEQ ID NO: 35291 - RNA, 21 nt, Homo sapiens
gaccaagaaauagccuuucaa

SEQ ID NO: 35292 - RNA, 21 nt, Homo sapiens
ucuacucagaagggugccuua

SEQ ID NO: 35293 - RNA, 23 nt, Homo sapiens
aaucgcgguuuauaccaaaugaa

SEQ ID NO: 35294 - RNA, 22 nt, Homo sapiens
caaacaccauugucacacucca

SEQ ID NO: 35295 - RNA, 22 nt, Homo sapiens
auccuucuacaaauucacccau

SEQ ID NO: 35296 - RNA, 22 nt, Homo sapiens
cagcugguugaaggggaccaaa

SEQ ID NO: 35297 - RNA, 22 nt, Homo sapiens
uagcugguugaaggggaccaaa

SEQ ID NO: 35298 - RNA, 23 nt, Homo sapiens
aggaacagcagcagcccgggccg

SEQ ID NO: 35299 - RNA, 21 nt, Homo sapiens
gaccaaucgccguccccgccg

SEQ ID NO: 35300 - RNA, 22 nt, Homo sapiens
uucacacugcaugcucugggua

SEQ ID NO: 35301 - RNA, 21 nt, Homo sapiens
acaggauugagggggggcccu

SEQ ID NO: 35302 - RNA, 22 nt, Homo sapiens
aguccagauucugugcccacca

SEQ ID NO: 35303 - RNA, 25 nt, Homo sapiens
acggagcugucccaacaccaccccu

SEQ ID NO: 35304 - RNA, 22 nt, Homo sapiens
gcacauguucugcggcccacca

SEQ ID NO: 35305 - RNA, 22 nt, Homo sapiens
gcggucccgcggcgccccgccu

SEQ ID NO: 35306 - RNA, 23 nt, Homo sapiens
cacugugggcccucuccgcacca

SEQ ID NO: 35307 - RNA, 23 nt, Homo sapiens
ggaagccaucaagucgcugcagg

SEQ ID NO: 35308 - RNA, 20 nt, Homo sapiens
cucaaagcaaacccugcaga

SEQ ID NO: 35309 - RNA, 21 nt, Homo sapiens
ggucagaacccaucauucacu

SEQ ID NO: 35310 - RNA, 24 nt, Homo sapiens
acugcuggucuucagucagggcca

SEQ ID NO: 35311 - RNA, 18 nt, Homo sapiens
caccaccagagccaacgu

SEQ ID NO: 35312 - RNA, 24 nt, Homo sapiens
agugugaguucuaccauugccaaa

SEQ ID NO: 35313 - RNA, 20 nt, Homo sapiens
cccgccgcgucgcccugggg

SEQ ID NO: 35314 - RNA, 20 nt, Homo sapiens
cccgccgcgucgcccugggg

SEQ ID NO: 35315 - RNA, 20 nt, Homo sapiens
acagcaaggagggcaggagg

SEQ ID NO: 35316 - RNA, 21 nt, Homo sapiens
uucuaggauaggcccaggggc

SEQ ID NO: 35317 - RNA, 22 nt, Homo sapiens
aggaaaccagcaaguguugacg

SEQ ID NO: 35318 - RNA, 23 nt, Homo sapiens
cacugugggcccucuccgcacca

SEQ ID NO: 35319 - RNA, 22 nt, Homo sapiens
ugcuguuagcccuagccccgca

SEQ ID NO: 35320 - RNA, 21 nt, Homo sapiens
gagcugcauccuggcuccggg

SEQ ID NO: 35321 - RNA, 21 nt, Homo sapiens
gagcugcauccuggcuccggg

SEQ ID NO: 35322 - RNA, 21 nt, Homo sapiens
auaauggagaccaggccacga

SEQ ID NO: 35323 - RNA, 18 nt, Homo sapiens
gaaaugagggccagcuga

SEQ ID NO: 35324 - RNA, 18 nt, Homo sapiens
cccccaccaccacgcccg

SEQ ID NO: 35325 - RNA, 21 nt, Homo sapiens
cggggugcacgggcggagggc

SEQ ID NO: 35326 - RNA, 25 nt, Homo sapiens
agcuagucaagcgcgguuguggggg

SEQ ID NO: 35327 - RNA, 20 nt, Homo sapiens
acagcaaggagggcaggagg

SEQ ID NO: 35328 - RNA, 22 nt, Homo sapiens
ucagaccgagacaagugcaaug

SEQ ID NO: 35329 - RNA, 25 nt, Homo sapiens
accaacggaccuacuucccuccgcc

SEQ ID NO: 35330 - RNA, 22 nt, Homo sapiens
uccggggacgaacgggacgggu

SEQ ID NO: 35331 - RNA, 27 nt, Homo sapiens
uuuagcacagugcuuauacaagaaggu

SEQ ID NO: 35332 - RNA, 21 nt, Homo sapiens
ugcaggcugaucuucuucucu

SEQ ID NO: 35333 - RNA, 21 nt, Homo sapiens
ggucagaacccaucauucacu

SEQ ID NO: 35334 - RNA, 22 nt, Homo sapiens
augcccuuucaucauugcacug

SEQ ID NO: 35335 - RNA, 22 nt, Homo sapiens
ucaggaacugccuuucucucca

SEQ ID NO: 35336 - RNA, 22 nt, Homo sapiens
cacauggccaaaacagagaaga

SEQ ID NO: 35337 - RNA, 20 nt, Homo sapiens
cugcgggaggacagggcuca

SEQ ID NO: 35338 - RNA, 18 nt, Homo sapiens
uggcgccugaacagggac

SEQ ID NO: 35339 - RNA, 21 nt, Homo sapiens
gcaagcccagaccgcaaaaag

SEQ ID NO: 35340 - RNA, 22 nt, Homo sapiens
accagguuccaccccagcaggc

SEQ ID NO: 35341 - RNA, 23 nt, Homo sapiens
aagaaucuugucccgcagguccu

SEQ ID NO: 35342 - RNA, 22 nt, Homo sapiens
uuucaguuaucaaucugucaca

SEQ ID NO: 35343 - RNA, 22 nt, Homo sapiens
gcaaaagaaacugugguuuuug

SEQ ID NO: 35344 - RNA, 22 nt, Homo sapiens
aagagggagacccaggcucgga

SEQ ID NO: 35345 - RNA, 23 nt, Homo sapiens
guagugggccgagccgagugaca

SEQ ID NO: 35346 - RNA, 22 nt, Homo sapiens
uauccacuacaccccgcugccu

SEQ ID NO: 35347 - RNA, 23 nt, Homo sapiens
gcgguagcggaagcgguaacugg

SEQ ID NO: 35348 - RNA, 21 nt, Homo sapiens
cugaggagagaggaggugggg

SEQ ID NO: 35349 - RNA, 18 nt, Homo sapiens
ugguggcagaggugggau

SEQ ID NO: 35350 - RNA, 23 nt, Homo sapiens
gggagugaagacacggagccaga

SEQ ID NO: 35351 - RNA, 22 nt, Homo sapiens
ucaggaacugccuuucucucca

SEQ ID NO: 35352 - RNA, 22 nt, Homo sapiens
aggcauaggaugacaaagggaa

SEQ ID NO: 35353 - RNA, 22 nt, Homo sapiens
aggcgaaggaugacaaagggaa

SEQ ID NO: 35354 - RNA, 22 nt, Homo sapiens
acaguucuucaacuggcagcuu

SEQ ID NO: 35355 - RNA, 21 nt, Homo sapiens
aucugcacugucagcacuuua

SEQ ID NO: 35356 - RNA, 23 nt, Homo sapiens
gcuuugacaauaucauugcacug

SEQ ID NO: 35357 - RNA, 22 nt, Homo sapiens
aggaaaccagcaaguguugacg

SEQ ID NO: 35358 - RNA, 22 nt, Homo sapiens
ugcaagccuugggugugggagg

SEQ ID NO: 35359 - RNA, 19 nt, Homo sapiens
gcuccuguccaacuggcuc

SEQ ID NO: 35360 - RNA, 21 nt, Homo sapiens
cugcugggccacaacguggga

SEQ ID NO: 35361 - RNA, 21 nt, Homo sapiens
caucaccuuccuucuccucca

SEQ ID NO: 35362 - RNA, 22 nt, Homo sapiens
ucuacccagaaaggagccagug

SEQ ID NO: 35363 - RNA, 22 nt, Homo sapiens
acacacccacgcgagccggaaa

SEQ ID NO: 35364 - RNA, 18 nt, Homo sapiens
gaaaugagggccagcuga

SEQ ID NO: 35365 - RNA, 20 nt, Homo sapiens
cugcgggaggacagggcuca

SEQ ID NO: 35366 - RNA, 24 nt, Homo sapiens
acugcaggcuccagcuuccaggcu

SEQ ID NO: 35367 - RNA, 18 nt, Homo sapiens
cccccaccaccacgcccg

SEQ ID NO: 35368 - RNA, 23 nt, Homo sapiens
acacagcucuuccauaucuccag

SEQ ID NO: 35369 - RNA, 22 nt, Homo sapiens
augcccuuucaucauugcacug

SEQ ID NO: 35370 - RNA, 21 nt, Homo sapiens
gggcaucugggacgcgcagga

SEQ ID NO: 35371 - RNA, 21 nt, Homo sapiens
gaccaaucgccguccccgccg

SEQ ID NO: 35372 - RNA, 19 nt, Homo sapiens
guugggaucacaggcgccc

SEQ ID NO: 35373 - RNA, 19 nt, Homo sapiens
guugggaucacaggcgccc

SEQ ID NO: 35374 - RNA, 20 nt, Homo sapiens
auuucuauaucuaucuccau

SEQ ID NO: 35375 - RNA, 22 nt, Homo sapiens
gcggucccgcggcgccccgccu

SEQ ID NO: 35376 - RNA, 22 nt, Homo sapiens
ugcuguuagcccuagccccgca

SEQ ID NO: 35377 - RNA, 21 nt, Homo sapiens
cuagggaagaacagugagcaa

SEQ ID NO: 35378 - RNA, 20 nt, Homo sapiens
cugcgggaggacagggcuca

SEQ ID NO: 35379 - RNA, 21 nt, Homo sapiens
uuuagcauaaguaugucccaa

SEQ ID NO: 35380 - RNA, 22 nt, Homo sapiens
ucaggaacugccuuucucucca

SEQ ID NO: 35381 - RNA, 20 nt, Homo sapiens
cccgccgcgucgcccugggg

SEQ ID NO: 35382 - RNA, 20 nt, Homo sapiens
acagcaaggagggcaggagg

SEQ ID NO: 35383 - RNA, 23 nt, Homo sapiens
gaacagguagucugaacacuggg

SEQ ID NO: 35384 - RNA, 23 nt, Homo sapiens
gaacagauagucuaaacacuggg

SEQ ID NO: 35385 - RNA, 23 nt, Homo sapiens
ucaguuuugcauagauuugcaca

SEQ ID NO: 35386 - RNA, 23 nt, Homo sapiens
ucaguuuugcauggauuugcaca

SEQ ID NO: 35387 - RNA, 21 nt, Homo sapiens
acaggauugagggggggcccu

SEQ ID NO: 35388 - RNA, 21 nt, Homo sapiens
uucuaggauaggcccaggggc

SEQ ID NO: 35389 - RNA, 23 nt, Homo sapiens
acgggugcgauuucugugugaga

SEQ ID NO: 35390 - RNA, 22 nt, Homo sapiens
acaaaaguugccuuugugugau

SEQ ID NO: 35391 - RNA, 21 nt, Homo sapiens
uucacuccaaaaggugcaaaa

SEQ ID NO: 35392 - RNA, 23 nt, Homo sapiens
agacaaggcccacccgugcaaac

SEQ ID NO: 35393 - RNA, 20 nt, Homo sapiens
cccugcgccaucuccucuac

SEQ ID NO: 35394 - RNA, 20 nt, Homo sapiens
uacugcuuccacagcucccc

SEQ ID NO: 35395 - RNA, 22 nt, Homo sapiens
acuggguucaccuuuaagggca

SEQ ID NO: 35396 - RNA, 22 nt, Homo sapiens
uccggggacgaacgggacgggu

SEQ ID NO: 35397 - RNA, 24 nt, Homo sapiens
ucacagguuaaagggucucaggga

SEQ ID NO: 35398 - RNA, 22 nt, Homo sapiens
ucacaaguuagggucucaggga

SEQ ID NO: 35399 - RNA, 18 nt, Homo sapiens
ugguggcagaggugggau

SEQ ID NO: 35400 - RNA, 23 nt, Homo sapiens
agcccuguucuacagcccugagg

SEQ ID NO: 35401 - RNA, 17 nt, Homo sapiens
uggcgcccgaacaggga

SEQ ID NO: 35402 - RNA, 18 nt, Homo sapiens
ccacugaaccacccaugc

SEQ ID NO: 35403 - RNA, 23 nt, Homo sapiens
gggagugaagacacggagccaga

SEQ ID NO: 35404 - RNA, 22 nt, Homo sapiens
uggcagcagcggagggggcaga

SEQ ID NO: 35405 - RNA, 22 nt, Homo sapiens
cagaagugggccgggcacaggg

SEQ ID NO: 35406 - RNA, 23 nt, Homo sapiens
ucaguuuugcauagauuugcaca

SEQ ID NO: 35407 - RNA, 22 nt, Homo sapiens
cacucagcaccaggauauuguu

SEQ ID NO: 35408 - RNA, 22 nt, Homo sapiens
aacuaugcaaccuacuaccucu

SEQ ID NO: 35409 - RNA, 20 nt, Homo sapiens
ccagcagcaccuggggcagu

SEQ ID NO: 35410 - RNA, 22 nt, Homo sapiens
auggcaguggaguuagugauug

SEQ ID NO: 35411 - RNA, 22 nt, Homo sapiens
accagcuaacaauacacugcca

SEQ ID NO: 35412 - RNA, 22 nt, Homo sapiens
gccagcuaacaauacacugccu

SEQ ID NO: 35413 - RNA, 21 nt, Homo sapiens
acaaaccacagugugcugcug

SEQ ID NO: 35414 - RNA, 25 nt, Homo sapiens
acggagcugucccaacaccaccccu

SEQ ID NO: 35415 - RNA, 20 nt, Homo sapiens
aggggccucagccuccuggu

SEQ ID NO: 35416 - RNA, 22 nt, Homo sapiens
ugaauuacuuuguaaaccacca

SEQ ID NO: 35417 - RNA, 22 nt, Homo sapiens
ggaggccgggacgagugcaaua

SEQ ID NO: 35418 - RNA, 24 nt, Homo sapiens
cacccccagagccucagcucccca

SEQ ID NO: 35419 - RNA, 22 nt, Homo sapiens
caaacaccauugucacacucca

SEQ ID NO: 35420 - RNA, 22 nt, Homo sapiens
uccggggacgaacgggacgggu

SEQ ID NO: 35421 - RNA, 20 nt, Homo sapiens
aguacaucaucuauacugua

SEQ ID NO: 35422 - RNA, 22 nt, Homo sapiens
acaaaguucuguagugcacuga

SEQ ID NO: 35423 - RNA, 22 nt, Homo sapiens
acaaaguucugugaugcacuga

SEQ ID NO: 35424 - RNA, 21 nt, Homo sapiens
ccaaguucugucaugcacuga

SEQ ID NO: 35425 - RNA, 22 nt, Homo sapiens
acacucuaaaaggaugcacgau

SEQ ID NO: 35426 - RNA, 23 nt, Homo sapiens
ucaguuuugcauagauuugcaca

SEQ ID NO: 35427 - RNA, 23 nt, Homo sapiens
ucaguuuugcauggauuugcaca

SEQ ID NO: 35428 - RNA, 22 nt, Homo sapiens
ucaucauuaccaggcaguauua

SEQ ID NO: 35429 - RNA, 23 nt, Homo sapiens
uccaucauuacccggcaguauua

SEQ ID NO: 35430 - RNA, 22 nt, Homo sapiens
acgguuuuaccagacaguauua

SEQ ID NO: 35431 - RNA, 21 nt, Homo sapiens
uucacuccaaaaggugcaaaa

SEQ ID NO: 35432 - RNA, 23 nt, Homo sapiens
agacaaggcccacccgugcaaac

SEQ ID NO: 35433 - RNA, 23 nt, Homo sapiens
aggagaaggcaccaugggauuua

SEQ ID NO: 35434 - RNA, 25 nt, Homo sapiens
accaacggaccuacuucccuccgcc

SEQ ID NO: 35435 - RNA, 22 nt, Homo sapiens
ugcuguuagcccuagccccgca

SEQ ID NO: 35436 - RNA, 22 nt, Homo sapiens
ggaggccgggacgagugcaaua

SEQ ID NO: 35437 - RNA, 22 nt, Homo sapiens
gggagaggucucccugcgcaca

SEQ ID NO: 35438 - RNA, 20 nt, Homo sapiens
gcagcuguccgcccagacac

SEQ ID NO: 35439 - RNA, 24 nt, Homo sapiens
acugcaggcuccagcuuccaggcu

SEQ ID NO: 35440 - RNA, 24 nt, Homo sapiens
gaaagugcauagaauucugucugg

SEQ ID NO: 35441 - RNA, 19 nt, Homo sapiens
gcuccuguccaacuggcuc

SEQ ID NO: 35442 - RNA, 19 nt, Homo sapiens
aagacauuuucagacagcu

SEQ ID NO: 35443 - RNA, 21 nt, Homo sapiens
aagggucaguaagcacccgcg

SEQ ID NO: 35444 - RNA, 22 nt, Homo sapiens
ucuacccagaaaggagccagug

SEQ ID NO: 35445 - RNA, 21 nt, Homo sapiens
cuagggaagaacagugagcaa

SEQ ID NO: 35446 - RNA, 22 nt, Homo sapiens
gaggcucagaauggcucaggag

SEQ ID NO: 35447 - RNA, 22 nt, Homo sapiens
caaacaccauugucacacucca

SEQ ID NO: 35448 - RNA, 22 nt, Homo sapiens
cacugguacaaggguugggaga

SEQ ID NO: 35449 - RNA, 21 nt, Homo sapiens
gaccaaucgccguccccgccg

SEQ ID NO: 35450 - RNA, 22 nt, Homo sapiens
agucuucacaacagcccugugu

SEQ ID NO: 35451 - RNA, 22 nt, Homo sapiens
gugauugccacucuccugagua

SEQ ID NO: 35452 - RNA, 18 nt, Homo sapiens
augacaccucccugugaa

SEQ ID NO: 35453 - RNA, 22 nt, Homo sapiens
gcggucccgcggcgccccgccu

SEQ ID NO: 35454 - RNA, 22 nt, Homo sapiens
ugcuguuagcccuagccccgca

SEQ ID NO: 35455 - RNA, 23 nt, Homo sapiens
agaaaccaugggguaugagcaga

SEQ ID NO: 35456 - RNA, 22 nt, Homo sapiens
ucaaugacucagguaaguugca

SEQ ID NO: 35457 - RNA, 17 nt, Homo sapiens
gggagaggaggaggcga

SEQ ID NO: 35458 - RNA, 19 nt, Homo sapiens
agaaaccccagcagagaca

SEQ ID NO: 35459 - RNA, 25 nt, Homo sapiens
accaacggaccuacuucccuccgcc

SEQ ID NO: 35460 - RNA, 22 nt, Homo sapiens
gggagaggucucccugcgcaca

SEQ ID NO: 35461 - RNA, 22 nt, Homo sapiens
caaacaccauugucacacucca

SEQ ID NO: 35462 - RNA, 22 nt, Homo sapiens
caaacaccauugucacacucca

SEQ ID NO: 35463 - RNA, 21 nt, Homo sapiens
ucuccagaucagggcagucca

SEQ ID NO: 35464 - RNA, 22 nt, Homo sapiens
cacgaccgacgccacgccgagu

SEQ ID NO: 35465 - RNA, 21 nt, Homo sapiens
gaccaaucgccguccccgccg

SEQ ID NO: 35466 - RNA, 22 nt, Homo sapiens
cucaauagacugugagcuccuu

SEQ ID NO: 35467 - RNA, 22 nt, Homo sapiens
acggaagggcagagagggccag

SEQ ID NO: 35468 - RNA, 22 nt, Homo sapiens
aucgggaggggacugagccuga

SEQ ID NO: 35469 - RNA, 19 nt, Homo sapiens
guccugaauuccgcagccu

SEQ ID NO: 35470 - RNA, 22 nt, Homo sapiens
gcggucccgcggcgccccgccu

SEQ ID NO: 35471 - RNA, 23 nt, Homo sapiens
cccagcuagauuguaagcuccuu

SEQ ID NO: 35472 - RNA, 22 nt, Homo sapiens
ugcuguuagcccuagccccgca

SEQ ID NO: 35473 - RNA, 27 nt, Homo sapiens
uuuagcacagugcuuauacaagaaggu

SEQ ID NO: 35474 - RNA, 22 nt, Homo sapiens
cagaaagugcuucccucuagag

SEQ ID NO: 35475 - RNA, 18 nt, Homo sapiens
auucaaucuacugccuca

SEQ ID NO: 35476 - RNA, 22 nt, Homo sapiens
ucaggaacugccuuucucucca

SEQ ID NO: 35477 - RNA, 22 nt, Homo sapiens
agcgggacuuugagggccaguu

SEQ ID NO: 35478 - RNA, 22 nt, Homo sapiens
ggagagccuccacccaacccuc

SEQ ID NO: 35479 - RNA, 22 nt, Homo sapiens
agcugaguguaggauguuuaca

SEQ ID NO: 35480 - RNA, 23 nt, Homo sapiens
acauuuuucguuauugcucuuga

SEQ ID NO: 35481 - RNA, 22 nt, Homo sapiens
gcacacaauaaauguuugcuga

SEQ ID NO: 35482 - RNA, 21 nt, Homo sapiens
guccugagagcgcugccuccu

SEQ ID NO: 35483 - RNA, 22 nt, Homo sapiens
cacucuaaagggaggcacuuug

SEQ ID NO: 35484 - RNA, 21 nt, Homo sapiens
ggggagcgggggcccugccuu

SEQ ID NO: 35485 - RNA, 21 nt, Homo sapiens
gagcugcauccuggcuccggg

SEQ ID NO: 35486 - RNA, 18 nt, Homo sapiens
gaaaugagggccagcuga

SEQ ID NO: 35487 - RNA, 17 nt, Homo sapiens
gggagaggaggaggcga

SEQ ID NO: 35488 - RNA, 23 nt, Homo sapiens
aaaaugcagauuccuggacucca

SEQ ID NO: 35489 - RNA, 23 nt, Homo sapiens
gggagugaagacacggagccaga

SEQ ID NO: 35490 - RNA, 22 nt, Homo sapiens
ucaggaacugccuuucucucca

SEQ ID NO: 35491 - RNA, 22 nt, Homo sapiens
aagagggagacccaggcucgga

SEQ ID NO: 35492 - RNA, 21 nt, Homo sapiens
gcugaggucugggccaggucu

SEQ ID NO: 35493 - RNA, 25 nt, Homo sapiens
accaacggaccuacuucccuccgcc

SEQ ID NO: 35494 - RNA, 23 nt, Homo sapiens
gucacaucccucccaagacccuc

SEQ ID NO: 35495 - RNA, 22 nt, Homo sapiens
auagaugauaugcacaguacua

SEQ ID NO: 35496 - RNA, 22 nt, Homo sapiens
ucccucacacagaauuccagaa

SEQ ID NO: 35497 - RNA, 19 nt, Homo sapiens
ucccugauccaaaaaucca

SEQ ID NO: 35498 - RNA, 22 nt, Homo sapiens
augcuuuuugggguaagggcuu

SEQ ID NO: 35499 - RNA, 22 nt, Homo sapiens
uguaaaccaugaugugcugcua

SEQ ID NO: 35500 - RNA, 22 nt, Homo sapiens
agcaaaauccgcaaguacuuuu

SEQ ID NO: 35501 - RNA, 21 nt, Homo sapiens
caacugaugccuuuccaagua

SEQ ID NO: 35502 - RNA, 20 nt, Homo sapiens
cccgccgcgucgcccugggg

SEQ ID NO: 35503 - RNA, 23 nt, Homo sapiens
acaccccaaaaucgaagcacuuc

SEQ ID NO: 35504 - RNA, 21 nt, Homo sapiens
aaaacaaaaucucaccguuuu

SEQ ID NO: 35505 - RNA, 20 nt, Homo sapiens
ugggccaccgccgagcggac

SEQ ID NO: 35506 - RNA, 22 nt, Homo sapiens
cugcucaaacccuccaaugacu

SEQ ID NO: 35507 - RNA, 25 nt, Homo sapiens
accaacggaccuacuucccuccgcc

SEQ ID NO: 35508 - RNA, 21 nt, Homo sapiens
caucaccuuccuucuccucca

SEQ ID NO: 35509 - RNA, 22 nt, Homo sapiens
uauccacuacaccccgcugccu

SEQ ID NO: 35510 - RNA, 18 nt, Homo sapiens
gaaaugagggccagcuga

SEQ ID NO: 35511 - RNA, 17 nt, Homo sapiens
gacagccucucccccac

SEQ ID NO: 35512 - RNA, 22 nt, Homo sapiens
cacgaccgacgccacgccgagu

SEQ ID NO: 35513 - RNA, 17 nt, Homo sapiens
aaacauggaagcaauua

SEQ ID NO: 35514 - RNA, 23 nt, Homo sapiens
aaaucagaaucacaccuggggga

SEQ ID NO: 35515 - RNA, 22 nt, Homo sapiens
ucaccauugcuaaagugcaauu

SEQ ID NO: 35516 - RNA, 22 nt, Homo sapiens
aguccagauucugugcccacca

SEQ ID NO: 35517 - RNA, 24 nt, Homo sapiens
acgcagagcccgaaagcccccagu

SEQ ID NO: 35518 - RNA, 22 nt, Homo sapiens
gcacauguucugcggcccacca

SEQ ID NO: 35519 - RNA, 22 nt, Homo sapiens
agcccaaaaggagaauucuuug

SEQ ID NO: 35520 - RNA, 21 nt, Homo sapiens
caugcacaugcacacauacau

SEQ ID NO: 35521 - RNA, 21 nt, Homo sapiens
ugcaaugcaacuacaaugcac

SEQ ID NO: 35522 - RNA, 23 nt, Homo sapiens
guucuguccuggaagaacauacu

SEQ ID NO: 35523 - RNA, 21 nt, Homo sapiens
ggacuauagaacuuucccccu

SEQ ID NO: 35524 - RNA, 21 nt, Homo sapiens
cugaggagagaggaggugggg

SEQ ID NO: 35525 - RNA, 24 nt, Homo sapiens
ucacagguuaaagggucucaggga

SEQ ID NO: 35526 - RNA, 22 nt, Homo sapiens
ucacaaguuagggucucaggga

SEQ ID NO: 35527 - RNA, 18 nt, Homo sapiens
ugguggcagaggugggau

SEQ ID NO: 35528 - RNA, 23 nt, Homo sapiens
agcccuguucuacagcccugagg

SEQ ID NO: 35529 - RNA, 17 nt, Homo sapiens
gggagaggaggaggcga

SEQ ID NO: 35530 - RNA, 22 nt, Homo sapiens
uccacauggaguugcuguuaca

SEQ ID NO: 35531 - RNA, 22 nt, Homo sapiens
cuguuccugcugaacugagcca

SEQ ID NO: 35532 - RNA, 22 nt, Homo sapiens
auaaaugacaccuccuugugaa

SEQ ID NO: 35533 - RNA, 19 nt, Homo sapiens
uagcauacagauacgccca

SEQ ID NO: 35534 - RNA, 21 nt, Homo sapiens
caucaccuuccuucuccucca

SEQ ID NO: 35535 - RNA, 22 nt, Homo sapiens
gcugaggcuguggggcuggagu

SEQ ID NO: 35536 - RNA, 22 nt, Homo sapiens
cagcugguugaaggggaccaaa

SEQ ID NO: 35537 - RNA, 19 nt, Homo sapiens
aagccaaagccuuauccau

SEQ ID NO: 35538 - RNA, 19 nt, Homo sapiens
ucccugauccaaaaaucca

SEQ ID NO: 35539 - RNA, 23 nt, Homo sapiens
aggagaaggcaccaugggauuua

SEQ ID NO: 35540 - RNA, 20 nt, Homo sapiens
acaaugagaacccauggucu

SEQ ID NO: 35541 - RNA, 22 nt, Homo sapiens
caaacaccauugucacacucca

SEQ ID NO: 35542 - RNA, 21 nt, Homo sapiens
gagcugcauccuggcuccggg

SEQ ID NO: 35543 - RNA, 22 nt, Homo sapiens
caaacaccauugucacacucca

SEQ ID NO: 35544 - RNA, 22 nt, Homo sapiens
gcacaaaucuccagaccaccca

SEQ ID NO: 35545 - RNA, 22 nt, Homo sapiens
gcgaacgcgccacggaccaccu

SEQ ID NO: 35546 - RNA, 25 nt, Homo sapiens
accaacggaccuacuucccuccgcc

SEQ ID NO: 35547 - RNA, 24 nt, Homo sapiens
acgcgcaggccagagacccaggca

SEQ ID NO: 35548 - RNA, 22 nt, Homo sapiens
gcggucccgcggcgccccgccu

SEQ ID NO: 35549 - RNA, 24 nt, Homo sapiens
ucacagguuaaagggucucaggga

SEQ ID NO: 35550 - RNA, 22 nt, Homo sapiens
ucacaaguuagggucucaggga

SEQ ID NO: 35551 - RNA, 22 nt, Homo sapiens
ccacacacuuccuuacauucca

SEQ ID NO: 35552 - RNA, 23 nt, Homo sapiens
agcccuguucuacagcccugagg

SEQ ID NO: 35553 - RNA, 18 nt, Homo sapiens
uggcgccugaacagggac

SEQ ID NO: 35554 - RNA, 22 nt, Homo sapiens
aggucucacuuuguugcccaga

SEQ ID NO: 35555 - RNA, 22 nt, Homo sapiens
accuaauauaucaaacauauca

SEQ ID NO: 35556 - RNA, 23 nt, Homo sapiens
cgugagcuccuggaggacaggga

SEQ ID NO: 35557 - RNA, 22 nt, Homo sapiens
agccacaaucaccuucugaucu

SEQ ID NO: 35558 - RNA, 23 nt, Homo sapiens
aagaaucuugucccgcagguccu

SEQ ID NO: 35559 - RNA, 21 nt, Homo sapiens
acuuuccaggauucauuaacu

SEQ ID NO: 35560 - RNA, 25 nt, Homo sapiens
aaggagcucagaagcccugcccagc

SEQ ID NO: 35561 - RNA, 22 nt, Homo sapiens
ccucaggcacggccgggccacc

SEQ ID NO: 35562 - RNA, 22 nt, Homo sapiens
ucaguggcucagguucguugca

SEQ ID NO: 35563 - RNA, 22 nt, Homo sapiens
aaccauacaaccuacuaccuca

SEQ ID NO: 35564 - RNA, 22 nt, Homo sapiens
aggucucacuuuguugcccaga

SEQ ID NO: 35565 - RNA, 22 nt, Homo sapiens
cggugagcacccggccccugcg

SEQ ID NO: 35566 - RNA, 22 nt, Homo sapiens
uggcagcagcggagggggcaga

SEQ ID NO: 35567 - RNA, 22 nt, Homo sapiens
ugagccacugugccuggccuga

SEQ ID NO: 35568 - RNA, 22 nt, Homo sapiens
acugccugucugugccugcugu

SEQ ID NO: 35569 - RNA, 22 nt, Homo sapiens
acaguucuucaacuggcagcuu

SEQ ID NO: 35570 - RNA, 20 nt, Homo sapiens
ccagcagcaccuggggcagu

SEQ ID NO: 35571 - RNA, 22 nt, Homo sapiens
accagguuccaccccagcaggc

SEQ ID NO: 35572 - RNA, 22 nt, Homo sapiens
aucgggaggggacugagccuga

SEQ ID NO: 35573 - RNA, 25 nt, Homo sapiens
aaggagcucagaagcccugcccagc

SEQ ID NO: 35574 - RNA, 24 nt, Homo sapiens
acgcgcaggccagagacccaggca

SEQ ID NO: 35575 - RNA, 22 nt, Homo sapiens
gcugaggcuguggggcuggagu

SEQ ID NO: 35576 - RNA, 20 nt, Homo sapiens
cucaaagcaaacccugcaga

SEQ ID NO: 35577 - RNA, 22 nt, Homo sapiens
cuagggaacacagggcugguga

SEQ ID NO: 35578 - RNA, 22 nt, Homo sapiens
caaacaccauugucacacucca

SEQ ID NO: 35579 - RNA, 21 nt, Homo sapiens
cugggggacggagcagaagga

SEQ ID NO: 35580 - RNA, 23 nt, Homo sapiens
cggccugauucacaacaccagcu

SEQ ID NO: 35581 - RNA, 23 nt, Homo sapiens
cuaccugcacuguaagcacuuug

SEQ ID NO: 35582 - RNA, 22 nt, Homo sapiens
acccuuaucaguucuccgucca

SEQ ID NO: 35583 - RNA, 21 nt, Homo sapiens
gaccaaucgccguccccgccg

SEQ ID NO: 35584 - RNA, 21 nt, Homo sapiens
aagugucagacacgguggugg

SEQ ID NO: 35585 - RNA, 22 nt, Homo sapiens
ucagaccgagacaagugcaaug

SEQ ID NO: 35586 - RNA, 24 nt, Homo sapiens
ugggagaaccucccugcuucugcu

SEQ ID NO: 35587 - RNA, 22 nt, Homo sapiens
caugauugccacgucugcagua

SEQ ID NO: 35588 - RNA, 21 nt, Homo sapiens
ugauugccacugucugcagua

SEQ ID NO: 35589 - RNA, 21 nt, Homo sapiens
cacucugaagggaagcgcuuu

SEQ ID NO: 35590 - RNA, 22 nt, Homo sapiens
aguccagauucugugcccacca

SEQ ID NO: 35591 - RNA, 22 nt, Homo sapiens
gaacuugcuaaaaaugcagaau

SEQ ID NO: 35592 - RNA, 22 nt, Homo sapiens
gcacauguucugcggcccacca

SEQ ID NO: 35593 - RNA, 22 nt, Homo sapiens
gcggucccgcggcgccccgccu

SEQ ID NO: 35594 - RNA, 22 nt, Homo sapiens
ugcuguuagcccuagccccgca

SEQ ID NO: 35595 - RNA, 21 nt, Homo sapiens
ggggagcgggggcccugccuu

SEQ ID NO: 35596 - RNA, 19 nt, Homo sapiens
ccugcuccaaaaauccauu

SEQ ID NO: 35597 - RNA, 21 nt, Homo sapiens
auguaggccuuuagaucacuu

SEQ ID NO: 35598 - RNA, 22 nt, Homo sapiens
augggacauccuacauaugcaa

SEQ ID NO: 35599 - RNA, 23 nt, Homo sapiens
gggcucuuacucccucaggcacu

SEQ ID NO: 35600 - RNA, 17 nt, Homo sapiens
gggagaggaggaggcga

SEQ ID NO: 35601 - RNA, 21 nt, Homo sapiens
cggggugcacgggcggagggc

SEQ ID NO: 35602 - RNA, 22 nt, Homo sapiens
acaccuggcuccacacgcgggc

SEQ ID NO: 35603 - RNA, 22 nt, Homo sapiens
ucaggaacugccuuucucucca

SEQ ID NO: 35604 - RNA, 21 nt, Homo sapiens
gaccaaucgccguccccgccg

SEQ ID NO: 35605 - RNA, 23 nt, Homo sapiens
aaagucucgcucucugccccuca

SEQ ID NO: 35606 - RNA, 19 nt, Homo sapiens
gccugcugacaccgugccu

SEQ ID NO: 35607 - RNA, 25 nt, Homo sapiens
accaacggaccuacuucccuccgcc

SEQ ID NO: 35608 - RNA, 22 nt, Homo sapiens
gcggucccgcggcgccccgccu

SEQ ID NO: 35609 - RNA, 22 nt, Homo sapiens
ugcuguuagcccuagccccgca

SEQ ID NO: 35610 - RNA, 21 nt, Homo sapiens
agcgccuuuggcagcuagagu

SEQ ID NO: 35611 - RNA, 23 nt, Homo sapiens
gggagugaagacacggagccaga

SEQ ID NO: 35612 - RNA, 21 nt, Homo sapiens
gggcaucugggacgcgcagga

SEQ ID NO: 35613 - RNA, 22 nt, Homo sapiens
cggugagcacccggccccugcg

SEQ ID NO: 35614 - RNA, 23 nt, Homo sapiens
cccaacagacauggcgguacuca

SEQ ID NO: 35615 - RNA, 22 nt, Homo sapiens
ccuggcacacaguagaccuuca

SEQ ID NO: 35616 - RNA, 22 nt, Homo sapiens
agcucagaacccagaggucuca

SEQ ID NO: 35617 - RNA, 17 nt, Homo sapiens
gggagaggaggaggcga

SEQ ID NO: 35618 - RNA, 23 nt, Homo sapiens
aaaaugcagauuccuggacucca

SEQ ID NO: 35619 - RNA, 20 nt, Homo sapiens
acagcaaggagggcaggagg

SEQ ID NO: 35620 - RNA, 22 nt, Homo sapiens
acugccugucugugccugcugu

SEQ ID NO: 35621 - RNA, 22 nt, Homo sapiens
accagguuccaccccagcaggc

SEQ ID NO: 35622 - RNA, 22 nt, Homo sapiens
aggaaaccagcaaguguugacg

SEQ ID NO: 35623 - RNA, 21 nt, Homo sapiens
caaaaaccacaaauaccuuug

SEQ ID NO: 35624 - RNA, 22 nt, Homo sapiens
gcugaggcuguggggcuggagu

SEQ ID NO: 35625 - RNA, 22 nt, Homo sapiens
caaacaccauugucacacucca

SEQ ID NO: 35626 - RNA, 22 nt, Homo sapiens
ugaagaagggggggaagggcgu

SEQ ID NO: 35627 - RNA, 22 nt, Homo sapiens
ccaguagcacggcucaguccag

SEQ ID NO: 35628 - RNA, 22 nt, Homo sapiens
augcccuuuuaacauugcacug

SEQ ID NO: 35629 - RNA, 22 nt, Homo sapiens
augcccuuucaucauugcacug

SEQ ID NO: 35630 - RNA, 20 nt, Homo sapiens
uacugcuuccacagcucccc

SEQ ID NO: 35631 - RNA, 23 nt, Homo sapiens
agggauuccugggaaaacuggac

SEQ ID NO: 35632 - RNA, 22 nt, Homo sapiens
acaaaguucuguagugcacuga

SEQ ID NO: 35633 - RNA, 22 nt, Homo sapiens
acaaaguucugugaugcacuga

SEQ ID NO: 35634 - RNA, 21 nt, Homo sapiens
ccaaguucugucaugcacuga

SEQ ID NO: 35635 - RNA, 18 nt, Homo sapiens
ggagaggagggcacugga

SEQ ID NO: 35636 - RNA, 23 nt, Homo sapiens
cagcugcuuuugggauuccguug

SEQ ID NO: 35637 - RNA, 21 nt, Homo sapiens
ggcugucaauucauaggucag

SEQ ID NO: 35638 - RNA, 21 nt, Homo sapiens
gucugucaauucauaggucau

SEQ ID NO: 35639 - RNA, 22 nt, Homo sapiens
ucagaccgagacaagugcaaug

SEQ ID NO: 35640 - RNA, 23 nt, Homo sapiens
gcuuugacaauacuauugcacug

SEQ ID NO: 35641 - RNA, 23 nt, Homo sapiens
gcuuugacaauaucauugcacug

SEQ ID NO: 35642 - RNA, 22 nt, Homo sapiens
ugcaacuuaguaaugugcaaua

SEQ ID NO: 35643 - RNA, 22 nt, Homo sapiens
uacagauggauaccgugcaauu

SEQ ID NO: 35644 - RNA, 22 nt, Homo sapiens
ucaccauugcuaaagugcaauu

SEQ ID NO: 35645 - RNA, 21 nt, Homo sapiens
ccuucugacuccaaguccagu

SEQ ID NO: 35646 - RNA, 22 nt, Homo sapiens
gccuucugacccuaaguccagu

SEQ ID NO: 35647 - RNA, 23 nt, Homo sapiens
acccuauaagcaauauugcacua

SEQ ID NO: 35648 - RNA, 21 nt, Homo sapiens
guguauaugcccauggacugc

SEQ ID NO: 35649 - RNA, 21 nt, Homo sapiens
agacacaccacggcacacuuc

SEQ ID NO: 35650 - RNA, 20 nt, Homo sapiens
agagaugagagaaacacccu

SEQ ID NO: 35651 - RNA, 25 nt, Homo sapiens
accaacggaccuacuucccuccgcc

SEQ ID NO: 35652 - RNA, 22 nt, Homo sapiens
acaggccgggacaagugcaaua

SEQ ID NO: 35653 - RNA, 22 nt, Homo sapiens
ggaggccgggacgagugcaaua

SEQ ID NO: 35654 - RNA, 21 nt, Homo sapiens
gcugaggucugggccaggucu

SEQ ID NO: 35655 - RNA, 22 nt, Homo sapiens
gugggguggguggucaggccga

SEQ ID NO: 35656 - RNA, 22 nt, Homo sapiens
ucccucacacagaauuccagaa

SEQ ID NO: 35657 - RNA, 23 nt, Homo sapiens
cuaccugcacuaugagcacuuug

SEQ ID NO: 35658 - RNA, 22 nt, Homo sapiens
ucagaccgagacaagugcaaug

SEQ ID NO: 35659 - RNA, 22 nt, Homo sapiens
auguaugugggacgguaaacca

SEQ ID NO: 35660 - RNA, 23 nt, Homo sapiens
aaagucucgcucucugccccuca

SEQ ID NO: 35661 - RNA, 22 nt, Homo sapiens
aggaaaccagcaaguguugacg

SEQ ID NO: 35662 - RNA, 18 nt, Homo sapiens
acccucugaaaggaagca

SEQ ID NO: 35663 - RNA, 22 nt, Homo sapiens
aaagugcuucuuaccuccagau

SEQ ID NO: 35664 - RNA, 23 nt, Homo sapiens
acacucuaaagagaagcgcuuug

SEQ ID NO: 35665 - RNA, 21 nt, Homo sapiens
cacucugaagggaagcgcuuu

SEQ ID NO: 35666 - RNA, 21 nt, Homo sapiens
agaaaguacuucccucuggag

SEQ ID NO: 35667 - RNA, 21 nt, Homo sapiens
agaaagugcaucccucuggag

SEQ ID NO: 35668 - RNA, 21 nt, Homo sapiens
acuagacugugagcuccucga

SEQ ID NO: 35669 - RNA, 22 nt, Homo sapiens
acaguucuucaacuggcagcuu

SEQ ID NO: 35670 - RNA, 21 nt, Homo sapiens
aagugucagacacgguggugg

SEQ ID NO: 35671 - RNA, 21 nt, Homo sapiens
aagacgggaggagaggaguga

SEQ ID NO: 35672 - RNA, 23 nt, Homo sapiens
agcaaaaaugugcuagugccaaa

SEQ ID NO: 35673 - RNA, 17 nt, Homo sapiens
gggagaggaggaggcga

SEQ ID NO: 35674 - RNA, 21 nt, Homo sapiens
gaccaaucgccguccccgccg

SEQ ID NO: 35675 - RNA, 23 nt, Homo sapiens
acgggugcgauuucugugugaga

SEQ ID NO: 35676 - RNA, 22 nt, Homo sapiens
gagcccuggacuaggagucagc

SEQ ID NO: 35677 - RNA, 22 nt, Homo sapiens
gcgaauauaacacggucgaucu

SEQ ID NO: 35678 - RNA, 23 nt, Homo sapiens
gggccgcagcugucgcccguguc

SEQ ID NO: 35679 - RNA, 25 nt, Homo sapiens
aggccgccacccgcccgcgaucccu

SEQ ID NO: 35680 - RNA, 22 nt, Homo sapiens
gcggucccgcggcgccccgccu

SEQ ID NO: 35681 - RNA, 23 nt, Homo sapiens
cuccagccccuccagggcuuccu

SEQ ID NO: 35682 - RNA, 22 nt, Homo sapiens
ugcuguuagcccuagccccgca

SEQ ID NO: 35683 - RNA, 22 nt, Homo sapiens
ggcagagagucagagcgcggau

SEQ ID NO: 35684 - RNA, 22 nt, Homo sapiens
gaccucagcuaugacagcacuu

SEQ ID NO: 35685 - RNA, 22 nt, Homo sapiens
ucaggaacugccuuucucucca

SEQ ID NO: 35686 - RNA, 21 nt, Homo sapiens
gagcugcauccuggcuccggg

SEQ ID NO: 35687 - RNA, 22 nt, Homo sapiens
caaacaccauugucacacucca

SEQ ID NO: 35688 - RNA, 22 nt, Homo sapiens
caaacaccauugucacacucca

SEQ ID NO: 35689 - RNA, 21 nt, Homo sapiens
gaccaaucgccguccccgccg

SEQ ID NO: 35690 - RNA, 21 nt, Homo sapiens
gaccaaucgccguccccgccg

SEQ ID NO: 35691 - RNA, 23 nt, Homo sapiens
aggagaaggcaccaugggauuua

SEQ ID NO: 35692 - RNA, 21 nt, Homo sapiens
cugcugggccacaacguggga

SEQ ID NO: 35693 - RNA, 22 nt, Homo sapiens
gcggucccgcggcgccccgccu

SEQ ID NO: 35694 - RNA, 22 nt, Homo sapiens
gcggucccgcggcgccccgccu

SEQ ID NO: 35695 - RNA, 22 nt, Homo sapiens
ugcuguuagcccuagccccgca

SEQ ID NO: 35696 - RNA, 23 nt, Homo sapiens
ggaagccaucaagucgcugcagg

SEQ ID NO: 35697 - RNA, 23 nt, Homo sapiens
ggaagccaucaagucgcugcagg

SEQ ID NO: 35698 - RNA, 24 nt, Homo sapiens
gaagucacucccaggcagcugcaa

SEQ ID NO: 35699 - RNA, 21 nt, Homo sapiens
gggcaucugggacgcgcagga

SEQ ID NO: 35700 - RNA, 21 nt, Homo sapiens
gaccaaucgccguccccgccg

SEQ ID NO: 35701 - RNA, 22 nt, Homo sapiens
uggcagcagcggagggggcaga

SEQ ID NO: 35702 - RNA, 22 nt, Homo sapiens
acaguucuucaacuggcagcuu

SEQ ID NO: 35703 - RNA, 22 nt, Homo sapiens
agcugaguguaggauguuuaca

SEQ ID NO: 35704 - RNA, 20 nt, Homo sapiens
ccagcagcaccuggggcagu

SEQ ID NO: 35705 - RNA, 23 nt, Homo sapiens
cggcucugucgucgaggcgcuca

SEQ ID NO: 35706 - RNA, 21 nt, Homo sapiens
auccuguacugagcugccccg

SEQ ID NO: 35707 - RNA, 21 nt, Homo sapiens
cccgaggagccgggcaggcuu

SEQ ID NO: 35708 - RNA, 22 nt, Homo sapiens
gcggucccgcggcgccccgccu

SEQ ID NO: 35709 - RNA, 22 nt, Homo sapiens
ugcuguuagcccuagccccgca

SEQ ID NO: 35710 - RNA, 21 nt, Homo sapiens
caucaccuuccuucuccucca

SEQ ID NO: 35711 - RNA, 22 nt, Homo sapiens
ggaggccgggacgagugcaaua

SEQ ID NO: 35712 - RNA, 17 nt, Homo sapiens
gggagaggaggaggcga

SEQ ID NO: 35713 - RNA, 18 nt, Homo sapiens
aucacauucaccucccug

SEQ ID NO: 35714 - RNA, 22 nt, Homo sapiens
ucaggaacugccuuucucucca

SEQ ID NO: 35715 - RNA, 22 nt, Homo sapiens
ucaggaacugccuuucucucca

SEQ ID NO: 35716 - RNA, 20 nt, Homo sapiens
acagcaaggagggcaggagg

SEQ ID NO: 35717 - RNA, 22 nt, Homo sapiens
ucagaccgagacaagugcaaug

SEQ ID NO: 35718 - RNA, 22 nt, Homo sapiens
ucgcccucucaacccagcuuuu

SEQ ID NO: 35719 - RNA, 22 nt, Homo sapiens
uugcccucucaacccagcuuuu

SEQ ID NO: 35720 - RNA, 20 nt, Homo sapiens
acccucucaacccagcuuuu

SEQ ID NO: 35721 - RNA, 19 nt, Homo sapiens
uccucucaacccagcuuuu

SEQ ID NO: 35722 - RNA, 22 nt, Homo sapiens
gaauucaucacggccagccucu

SEQ ID NO: 35723 - RNA, 22 nt, Homo sapiens
aggaaaccagcaaguguugacg

SEQ ID NO: 35724 - RNA, 25 nt, Homo sapiens
accaacggaccuacuucccuccgcc

SEQ ID NO: 35725 - RNA, 22 nt, Homo sapiens
ugcuguuagcccuagccccgca

SEQ ID NO: 35726 - RNA, 21 nt, Homo sapiens
caucaccuuccuucuccucca

SEQ ID NO: 35727 - RNA, 22 nt, Homo sapiens
caaacaccauugucacacucca

SEQ ID NO: 35728 - RNA, 21 nt, Homo sapiens
gaccaaucgccguccccgccg

SEQ ID NO: 35729 - RNA, 22 nt, Homo sapiens
uccacauggaguugcuguuaca

SEQ ID NO: 35730 - RNA, 23 nt, Homo sapiens
uauucucgcacggacuacaacca

SEQ ID NO: 35731 - RNA, 22 nt, Homo sapiens
ccuggcacacaguagaccuuca

SEQ ID NO: 35732 - RNA, 22 nt, Homo sapiens
acacaccaaggauaauuucucc

SEQ ID NO: 35733 - RNA, 21 nt, Homo sapiens
cugaaaccaaguaugggucgc

SEQ ID NO: 35734 - RNA, 22 nt, Homo sapiens
gcggucccgcggcgccccgccu

SEQ ID NO: 35735 - RNA, 20 nt, Homo sapiens
uacugcuuccacagcucccc

SEQ ID NO: 35736 - RNA, 24 nt, Homo sapiens
cacccccagagccucagcucccca

SEQ ID NO: 35737 - RNA, 23 nt, Homo sapiens
cacaaauucgguucuacagggua

SEQ ID NO: 35738 - RNA, 21 nt, Homo sapiens
ccaaccaaugaaagaaugcuu

SEQ ID NO: 35739 - RNA, 22 nt, Homo sapiens
acaaaguucuguagugcacuga

SEQ ID NO: 35740 - RNA, 22 nt, Homo sapiens
acaaaguucugugaugcacuga

SEQ ID NO: 35741 - RNA, 21 nt, Homo sapiens
ccaaguucugucaugcacuga

SEQ ID NO: 35742 - RNA, 22 nt, Homo sapiens
ucaggaacugccuuucucucca

SEQ ID NO: 35743 - RNA, 21 nt, Homo sapiens
gaccaaucgccguccccgccg

SEQ ID NO: 35744 - RNA, 19 nt, Homo sapiens
guccugaauuccgcagccu

SEQ ID NO: 35745 - RNA, 22 nt, Homo sapiens
gcggucccgcggcgccccgccu

SEQ ID NO: 35746 - RNA, 22 nt, Homo sapiens
ugcuguuagcccuagccccgca

SEQ ID NO: 35747 - RNA, 21 nt, Homo sapiens
ccccucccagccucccugcca

SEQ ID NO: 35748 - RNA, 23 nt, Homo sapiens
gucagaccccgagggguccucgc

SEQ ID NO: 35749 - RNA, 18 nt, Homo sapiens
ugguggcagaggugggau

SEQ ID NO: 35750 - RNA, 19 nt, Homo sapiens
ucccugauccaaaaaucca

SEQ ID NO: 35751 - RNA, 23 nt, Homo sapiens
gggagugaagacacggagccaga

SEQ ID NO: 35752 - RNA, 22 nt, Homo sapiens
gcaaaaguaauugagauuuuug

SEQ ID NO: 35753 - RNA, 21 nt, Homo sapiens
aucagagguucagcuuacccu

SEQ ID NO: 35754 - RNA, 25 nt, Homo sapiens
acggagcugucccaacaccaccccu

SEQ ID NO: 35755 - RNA, 21 nt, Homo sapiens
ggggagcgggggcccugccuu

SEQ ID NO: 35756 - RNA, 22 nt, Homo sapiens
acacacccacgcgagccggaaa

SEQ ID NO: 35757 - RNA, 21 nt, Homo sapiens
cggcucggguggcggcgacgg

SEQ ID NO: 35758 - RNA, 21 nt, Homo sapiens
auaauggagaccaggccacga

SEQ ID NO: 35759 - RNA, 19 nt, Homo sapiens
ccaccucccgaguccucac

SEQ ID NO: 35760 - RNA, 18 nt, Homo sapiens
cccccaccaccacgcccg

SEQ ID NO: 35761 - RNA, 24 nt, Homo sapiens
acugcuggucuucagucagggcca

SEQ ID NO: 35762 - RNA, 21 nt, Homo sapiens
uucuaggauaggcccaggggc

SEQ ID NO: 35763 - RNA, 23 nt, Homo sapiens
ggacauuguuucagugcccaagu

SEQ ID NO: 35764 - RNA, 22 nt, Homo sapiens
ccucaggcacggccgggccacc

SEQ ID NO: 35765 - RNA, 23 nt, Homo sapiens
cuccagccccuccagggcuuccu

SEQ ID NO: 35766 - RNA, 21 nt, Homo sapiens
aucugcacugucagcacuuua

SEQ ID NO: 35767 - RNA, 21 nt, Homo sapiens
gagcugcauccuggcuccggg

SEQ ID NO: 35768 - RNA, 22 nt, Homo sapiens
aggucucacuuuguugcccaga

SEQ ID NO: 35769 - RNA, 21 nt, Homo sapiens
gggcaucugggacgcgcagga

SEQ ID NO: 35770 - RNA, 23 nt, Homo sapiens
ucucacccagguagcaaggauua

SEQ ID NO: 35771 - RNA, 22 nt, Homo sapiens
aggaaaccagcaaguguugacg

SEQ ID NO: 35772 - RNA, 22 nt, Homo sapiens
gaacuugcuaaaaaugcagaau

SEQ ID NO: 35773 - RNA, 22 nt, Homo sapiens
gcaaagguaauugcuguuuucg

SEQ ID NO: 35774 - RNA, 25 nt, Homo sapiens
aaggagcucagaagcccugcccagc

SEQ ID NO: 35775 - RNA, 23 nt, Homo sapiens
ggacauuguuucagugcccaagu

SEQ ID NO: 35776 - RNA, 23 nt, Homo sapiens
cuccagccccuccagggcuuccu

SEQ ID NO: 35777 - RNA, 22 nt, Homo sapiens
gggagaggucucccugcgcaca

SEQ ID NO: 35778 - RNA, 17 nt, Homo sapiens
gggagaggaggaggcga

SEQ ID NO: 35779 - RNA, 21 nt, Homo sapiens
agggcucaucuugguccugca

SEQ ID NO: 35780 - RNA, 25 nt, Homo sapiens
cagcgucugccggaacccguuccca

SEQ ID NO: 35781 - RNA, 21 nt, Homo sapiens
gaccaaucgccguccccgccg

SEQ ID NO: 35782 - RNA, 25 nt, Homo sapiens
accaacggaccuacuucccuccgcc

SEQ ID NO: 35783 - RNA, 22 nt, Homo sapiens
gcggucccgcggcgccccgccu

SEQ ID NO: 35784 - RNA, 20 nt, Homo sapiens
uccccacagacccagagccg

SEQ ID NO: 35785 - RNA, 21 nt, Homo sapiens
caucaccuuccuucuccucca

SEQ ID NO: 35786 - RNA, 21 nt, Homo sapiens
auaauggagaccaggccacga

SEQ ID NO: 35787 - RNA, 21 nt, Homo sapiens
cggggugcacgggcggagggc

SEQ ID NO: 35788 - RNA, 20 nt, Homo sapiens
acagcaaggagggcaggagg

SEQ ID NO: 35789 - RNA, 23 nt, Homo sapiens
gaaacccagcagacaauguagcu

SEQ ID NO: 35790 - RNA, 21 nt, Homo sapiens
ggaaaucccuggcaaugugau

SEQ ID NO: 35791 - RNA, 21 nt, Homo sapiens
gguaaucccuggcaaugugau

SEQ ID NO: 35792 - RNA, 22 nt, Homo sapiens
uacagauggauaccgugcaauu

SEQ ID NO: 35793 - RNA, 23 nt, Homo sapiens
aagaaucuugucccgcagguccu

SEQ ID NO: 35794 - RNA, 21 nt, Homo sapiens
guucuaacccauuguggccaa

SEQ ID NO: 35795 - RNA, 21 nt, Homo sapiens
guucuaacccauuguggccaa

SEQ ID NO: 35796 - RNA, 25 nt, Homo sapiens
acggagcugucccaacaccaccccu

SEQ ID NO: 35797 - RNA, 21 nt, Homo sapiens
gcugaggucugggccaggucu

SEQ ID NO: 35798 - RNA, 20 nt, Homo sapiens
cccugcgccaucuccucuac

SEQ ID NO: 35799 - RNA, 21 nt, Homo sapiens
cuacgcagaaaggacacagug

SEQ ID NO: 35800 - RNA, 23 nt, Homo sapiens
gcacaugugcacacagccgggug

SEQ ID NO: 35801 - RNA, 20 nt, Homo sapiens
cucaaagcaaacccugcaga

SEQ ID NO: 35802 - RNA, 20 nt, Homo sapiens
cucaaagcaaacccugcaga

SEQ ID NO: 35803 - RNA, 20 nt, Homo sapiens
ggggcagacagacgaggaag

SEQ ID NO: 35804 - RNA, 20 nt, Homo sapiens
ggcauucaccgcgugccuua

SEQ ID NO: 35805 - RNA, 22 nt, Homo sapiens
gcuggguggagaagguggugaa

SEQ ID NO: 35806 - RNA, 21 nt, Homo sapiens
agcuaugccagcaucuugccu

SEQ ID NO: 35807 - RNA, 22 nt, Homo sapiens
cgauguaguccaaaggcacaua

SEQ ID NO: 35808 - RNA, 21 nt, Homo sapiens
ucuacucagaagggugccuua

SEQ ID NO: 35809 - RNA, 18 nt, Homo sapiens
acccucugaaaggaagca

SEQ ID NO: 35810 - RNA, 23 nt, Homo sapiens
gaaagugcuucuuuccucgagaa

SEQ ID NO: 35811 - RNA, 22 nt, Homo sapiens
aaagugcuucuuaccuccagau

SEQ ID NO: 35812 - RNA, 19 nt, Homo sapiens
auuuugguacagcagcuca

SEQ ID NO: 35813 - RNA, 21 nt, Homo sapiens
gcugaggucugggccaggucu

SEQ ID NO: 35814 - RNA, 19 nt, Homo sapiens
gccucagaggcagcugcuu

SEQ ID NO: 35815 - RNA, 21 nt, Homo sapiens
ugacugacagcuuuuugagua

SEQ ID NO: 35816 - RNA, 21 nt, Homo sapiens
cacaaccucaguguuuccagg

SEQ ID NO: 35817 - RNA, 18 nt, Homo sapiens
ccacugaaccacccaugc

SEQ ID NO: 35818 - RNA, 22 nt, Homo sapiens
cacugguacaaggguugggaga

SEQ ID NO: 35819 - RNA, 22 nt, Homo sapiens
ucaggaacugccuuucucucca

SEQ ID NO: 35820 - RNA, 21 nt, Homo sapiens
aggcggcaggcacaggacugg

SEQ ID NO: 35821 - RNA, 22 nt, Homo sapiens
uccacauggaguugcuguuaca

SEQ ID NO: 35822 - RNA, 22 nt, Homo sapiens
ugggguauuugacaaacugaca

SEQ ID NO: 35823 - RNA, 21 nt, Homo sapiens
aucugcacugucagcacuuua

SEQ ID NO: 35824 - RNA, 23 nt, Homo sapiens
gcuuugacaauaucauugcacug

SEQ ID NO: 35825 - RNA, 23 nt, Homo sapiens
gaaaaacgcccccuggcuugaaa

SEQ ID NO: 35826 - RNA, 24 nt, Homo sapiens
gaggugacucuauccuaugucuuu

SEQ ID NO: 35827 - RNA, 23 nt, Homo sapiens
gucacaucccucccaagacccuc

SEQ ID NO: 35828 - RNA, 21 nt, Homo sapiens
agcgccuuuggcagcuagagu

SEQ ID NO: 35829 - RNA, 23 nt, Homo sapiens
gggagugaagacacggagccaga

SEQ ID NO: 35830 - RNA, 23 nt, Homo sapiens
cuaucugcacuagaugcaccuua

SEQ ID NO: 35831 - RNA, 22 nt, Homo sapiens
agcgggacuuugagggccaguu

SEQ ID NO: 35832 - RNA, 22 nt, Homo sapiens
gaaccuaucuccccucuggacc

SEQ ID NO: 35833 - RNA, 21 nt, Homo sapiens
gcggaacuuagccacugugaa

SEQ ID NO: 35834 - RNA, 21 nt, Homo sapiens
gcagaacuuagccacugugaa

SEQ ID NO: 35835 - RNA, 22 nt, Homo sapiens
ucgcccucucaacccagcuuuu

SEQ ID NO: 35836 - RNA, 22 nt, Homo sapiens
uugcccucucaacccagcuuuu

SEQ ID NO: 35837 - RNA, 20 nt, Homo sapiens
acccucucaacccagcuuuu

SEQ ID NO: 35838 - RNA, 19 nt, Homo sapiens
uccucucaacccagcuuuu

SEQ ID NO: 35839 - RNA, 22 nt, Homo sapiens
uauucaggaacauauugcaaaa

SEQ ID NO: 35840 - RNA, 22 nt, Homo sapiens
guacaaaaguaauuacaguuuu

SEQ ID NO: 35841 - RNA, 21 nt, Homo sapiens
cugaaaccaaguaugggucgc

SEQ ID NO: 35842 - RNA, 19 nt, Homo sapiens
gccucagaggcagcugcuu

SEQ ID NO: 35843 - RNA, 23 nt, Homo sapiens
uguaggcuggggauaaaugaaua

SEQ ID NO: 35844 - RNA, 20 nt, Homo sapiens
cccugcgccaucuccucuac

SEQ ID NO: 35845 - RNA, 21 nt, Homo sapiens
agaaguagaccauguguccua

SEQ ID NO: 35846 - RNA, 22 nt, Homo sapiens
gugggguggguggucaggccga

SEQ ID NO: 35847 - RNA, 17 nt, Homo sapiens
gacagccucucccccac

SEQ ID NO: 35848 - RNA, 21 nt, Homo sapiens
acuagacugugagcuccucga

SEQ ID NO: 35849 - RNA, 22 nt, Homo sapiens
uggcagcagcggagggggcaga

SEQ ID NO: 35850 - RNA, 20 nt, Homo sapiens
acagcaaggagggcaggagg

SEQ ID NO: 35851 - RNA, 20 nt, Homo sapiens
ccagcagcaccuggggcagu

SEQ ID NO: 35852 - RNA, 23 nt, Homo sapiens
aaaucagaaucacaccuggggga

SEQ ID NO: 35853 - RNA, 22 nt, Homo sapiens
acaaaaguugccuuugugugau

SEQ ID NO: 35854 - RNA, 21 nt, Homo sapiens
auccuguacugagcugccccg

SEQ ID NO: 35855 - RNA, 23 nt, Homo sapiens
cugcagaacuguucccgcugcua

SEQ ID NO: 35856 - RNA, 23 nt, Homo sapiens
aaucgcgguuuauaccaaaugaa

SEQ ID NO: 35857 - RNA, 21 nt, Homo sapiens
aguucucccaacguaaaccca

SEQ ID NO: 35858 - RNA, 24 nt, Homo sapiens
acgcagagcccgaaagcccccagu

SEQ ID NO: 35859 - RNA, 24 nt, Homo sapiens
acgcgcaggccagagacccaggca

SEQ ID NO: 35860 - RNA, 21 nt, Homo sapiens
caucaccuuccuucuccucca

SEQ ID NO: 35861 - RNA, 22 nt, Homo sapiens
gcugaggcuguggggcuggagu

SEQ ID NO: 35862 - RNA, 22 nt, Homo sapiens
uauggaugcaaaaugaucccaa

SEQ ID NO: 35863 - RNA, 23 nt, Homo sapiens
aaccaagaccccggagaucccag

SEQ ID NO: 35864 - RNA, 21 nt, Homo sapiens
cggcucggguggcggcgacgg

SEQ ID NO: 35865 - RNA, 17 nt, Homo sapiens
gggagaggaggaggcga

SEQ ID NO: 35866 - RNA, 22 nt, Homo sapiens
cacgaccgacgccacgccgagu

SEQ ID NO: 35867 - RNA, 20 nt, Homo sapiens
acagcaaggagggcaggagg

SEQ ID NO: 35868 - RNA, 22 nt, Homo sapiens
aagagggagacccaggcucgga

SEQ ID NO: 35869 - RNA, 23 nt, Homo sapiens
guagugggccgagccgagugaca

SEQ ID NO: 35870 - RNA, 20 nt, Homo sapiens
ggggggcgaggcagguguga

SEQ ID NO: 35871 - RNA, 23 nt, Homo sapiens
aaaaugcagauuccuggacucca

SEQ ID NO: 35872 - RNA, 23 nt, Homo sapiens
aggaacagcagcagcccgggccg

SEQ ID NO: 35873 - RNA, 22 nt, Homo sapiens
uggcagcagcggagggggcaga

SEQ ID NO: 35874 - RNA, 22 nt, Homo sapiens
acugccugucugugccugcugu

SEQ ID NO: 35875 - RNA, 21 nt, Homo sapiens
acaggauugagggggggcccu

SEQ ID NO: 35876 - RNA, 20 nt, Homo sapiens
ccagcagcaccuggggcagu

SEQ ID NO: 35877 - RNA, 22 nt, Homo sapiens
accagguuccaccccagcaggc

SEQ ID NO: 35878 - RNA, 21 nt, Homo sapiens
auccuguacugagcugccccg

SEQ ID NO: 35879 - RNA, 18 nt, Homo sapiens
augacaccucccugugaa

SEQ ID NO: 35880 - RNA, 19 nt, Homo sapiens
gcucuaagaaagccacacu

SEQ ID NO: 35881 - RNA, 22 nt, Homo sapiens
gcggucccgcggcgccccgccu

SEQ ID NO: 35882 - RNA, 22 nt, Homo sapiens
ugcuguuagcccuagccccgca

SEQ ID NO: 35883 - RNA, 22 nt, Homo sapiens
agccaagcucagacggauccga

SEQ ID NO: 35884 - RNA, 21 nt, Homo sapiens
ucacccagaucugcggccuaa

SEQ ID NO: 35885 - RNA, 18 nt, Homo sapiens
aucacauucaccucccug

SEQ ID NO: 35886 - RNA, 23 nt, Homo sapiens
gggagugaagacacggagccaga

SEQ ID NO: 35887 - RNA, 21 nt, Homo sapiens
gaccaaucgccguccccgccg

SEQ ID NO: 35888 - RNA, 22 nt, Homo sapiens
acaguucuucaacuggcagcuu

SEQ ID NO: 35889 - RNA, 23 nt, Homo sapiens
ucaacgggagugaucgugucauu

SEQ ID NO: 35890 - RNA, 23 nt, Homo sapiens
ucucgugacaugaugauccccga

SEQ ID NO: 35891 - RNA, 22 nt, Homo sapiens
acaguggucaucgagugacaca

SEQ ID NO: 35892 - RNA, 25 nt, Homo sapiens
acggagcugucccaacaccaccccu

SEQ ID NO: 35893 - RNA, 22 nt, Homo sapiens
gcggucccgcggcgccccgccu

SEQ ID NO: 35894 - RNA, 21 nt, Homo sapiens
uucaguuaucacaguacugua

SEQ ID NO: 35895 - RNA, 23 nt, Homo sapiens
cugugggagggcaguggugagag

SEQ ID NO: 35896 - RNA, 22 nt, Homo sapiens
gcaaagguaauugcuguuuucg

SEQ ID NO: 35897 - RNA, 20 nt, Homo sapiens
acaaugagaacccauggucu

SEQ ID NO: 35898 - RNA, 22 nt, Homo sapiens
caaacaccauugucacacucca

SEQ ID NO: 35899 - RNA, 21 nt, Homo sapiens
auaauggagaccaggccacga

SEQ ID NO: 35900 - RNA, 19 nt, Homo sapiens
ccaccucccgaguccucac

SEQ ID NO: 35901 - RNA, 21 nt, Homo sapiens
ggucagaacccaucauucacu

SEQ ID NO: 35902 - RNA, 18 nt, Homo sapiens
aucacauucaccucccug

SEQ ID NO: 35903 - RNA, 23 nt, Homo sapiens
gggagugaagacacggagccaga

SEQ ID NO: 35904 - RNA, 22 nt, Homo sapiens
uccacauggaguugcuguuaca

SEQ ID NO: 35905 - RNA, 21 nt, Homo sapiens
ugcaugacggccugcaagaca

SEQ ID NO: 35906 - RNA, 22 nt, Homo sapiens
cagcauggaguccuccagguug

SEQ ID NO: 35907 - RNA, 23 nt, Homo sapiens
cuccagccccuccagggcuuccu

SEQ ID NO: 35908 - RNA, 22 nt, Homo sapiens
gguuaguggaccaggucacaaa

SEQ ID NO: 35909 - RNA, 22 nt, Homo sapiens
aggucucacuuuguugcccaga

SEQ ID NO: 35910 - RNA, 22 nt, Homo sapiens
cacaaaccauuaugugcugcua

SEQ ID NO: 35911 - RNA, 22 nt, Homo sapiens
uguaaaccaugaugugcugcua

SEQ ID NO: 35912 - RNA, 22 nt, Homo sapiens
cgccaauauuuacgugcugcua

SEQ ID NO: 35913 - RNA, 22 nt, Homo sapiens
ucaggaacugccuuucucucca

SEQ ID NO: 35914 - RNA, 21 nt, Homo sapiens
gccaauauuucugugcugcua

SEQ ID NO: 35915 - RNA, 22 nt, Homo sapiens
cccaacaacaggaaacuaccua

SEQ ID NO: 35916 - RNA, 23 nt, Homo sapiens
gaaacccagcagacaauguagcu

SEQ ID NO: 35917 - RNA, 23 nt, Homo sapiens
ucucugcaggccgugugcuuugc

SEQ ID NO: 35918 - RNA, 22 nt, Homo sapiens
uucaaaacaugaauugcugcug

SEQ ID NO: 35919 - RNA, 21 nt, Homo sapiens
acaaaccacagugugcugcug

SEQ ID NO: 35920 - RNA, 18 nt, Homo sapiens
acccucugaaaggaagca

SEQ ID NO: 35921 - RNA, 22 nt, Homo sapiens
aaagugcuucuuaccuccagau

SEQ ID NO: 35922 - RNA, 22 nt, Homo sapiens
gcacacaauaaauguuugcuga

SEQ ID NO: 35923 - RNA, 23 nt, Homo sapiens
gagcaaggcucuugucuguaagu

SEQ ID NO: 35924 - RNA, 25 nt, Homo sapiens
aaggagcucagaagcccugcccagc

SEQ ID NO: 35925 - RNA, 21 nt, Homo sapiens
gcugaggucugggccaggucu

SEQ ID NO: 35926 - RNA, 19 nt, Homo sapiens
gccucagaggcagcugcuu

SEQ ID NO: 35927 - RNA, 22 nt, Homo sapiens
ucaguggcucagguucguugca

SEQ ID NO: 35928 - RNA, 21 nt, Homo sapiens
aucugcacugucagcacuuua

SEQ ID NO: 35929 - RNA, 17 nt, Homo sapiens
gggagaggaggaggcga

SEQ ID NO: 35930 - RNA, 21 nt, Homo sapiens
gggcaucugggacgcgcagga

SEQ ID NO: 35931 - RNA, 22 nt, Homo sapiens
cagaagugggccgggcacaggg

SEQ ID NO: 35932 - RNA, 23 nt, Homo sapiens
cuaccugcacuaugagcacuuug

SEQ ID NO: 35933 - RNA, 20 nt, Homo sapiens
uacugcuuccacagcucccc

SEQ ID NO: 35934 - RNA, 18 nt, Homo sapiens
caccaccagagccaacgu

SEQ ID NO: 35935 - RNA, 22 nt, Homo sapiens
uagcagaagcauuuccgcacac

SEQ ID NO: 35936 - RNA, 21 nt, Homo sapiens
gggcaucugggacgcgcagga

SEQ ID NO: 35937 - RNA, 22 nt, Homo sapiens
uggcagcagcggagggggcaga

SEQ ID NO: 35938 - RNA, 22 nt, Homo sapiens
cagaagugggccgggcacaggg

SEQ ID NO: 35939 - RNA, 22 nt, Homo sapiens
acaagcuuuuugcucgucuuau

SEQ ID NO: 35940 - RNA, 22 nt, Homo sapiens
acaaaccuuuuguucgucuuau

SEQ ID NO: 35941 - RNA, 22 nt, Homo sapiens
acugccugucugugccugcugu

SEQ ID NO: 35942 - RNA, 22 nt, Homo sapiens
ucagaccgagacaagugcaaug

SEQ ID NO: 35943 - RNA, 24 nt, Homo sapiens
ugggagaaccucccugcuucugcu

SEQ ID NO: 35944 - RNA, 20 nt, Homo sapiens
ccagcagcaccuggggcagu

SEQ ID NO: 35945 - RNA, 22 nt, Homo sapiens
accagguuccaccccagcaggc

SEQ ID NO: 35946 - RNA, 21 nt, Homo sapiens
auccuguacugagcugccccg

SEQ ID NO: 35947 - RNA, 23 nt, Homo sapiens
aagaaucuugucccgcagguccu

SEQ ID NO: 35948 - RNA, 21 nt, Homo sapiens
gguggagcccugagaaccgga

SEQ ID NO: 35949 - RNA, 21 nt, Homo sapiens
aggagacucacaaguuccugc

SEQ ID NO: 35950 - RNA, 22 nt, Homo sapiens
uucacacugcaugcucugggua

SEQ ID NO: 35951 - RNA, 22 nt, Homo sapiens
cuguuccugcugaacugagcca

SEQ ID NO: 35952 - RNA, 20 nt, Homo sapiens
cuggaggaagggcccagagg

SEQ ID NO: 35953 - RNA, 22 nt, Homo sapiens
gccuaagacacaggcccagaga

SEQ ID NO: 35954 - RNA, 23 nt, Homo sapiens
aaagucucgcucucugccccuca

SEQ ID NO: 35955 - RNA, 21 nt, Homo sapiens
auaauggagaccaggccacga

SEQ ID NO: 35956 - RNA, 22 nt, Homo sapiens
cugggggcggcacaggggcuca

SEQ ID NO: 35957 - RNA, 22 nt, Homo sapiens
cacgaccgacgccacgccgagu

SEQ ID NO: 35958 - RNA, 22 nt, Homo sapiens
acaaaaguugccuuugugugau

SEQ ID NO: 35959 - RNA, 22 nt, Homo sapiens
aagauguggaccauauuacaua

SEQ ID NO: 35960 - RNA, 19 nt, Homo sapiens
gggaaacguaugucaaccu

SEQ ID NO: 35961 - RNA, 22 nt, Homo sapiens
aagagggagacccaggcucgga

SEQ ID NO: 35962 - RNA, 22 nt, Homo sapiens
cugcucaaacccuccaaugacu

SEQ ID NO: 35963 - RNA, 22 nt, Homo sapiens
uaaaugaauucaauuuccuucu

SEQ ID NO: 35964 - RNA, 21 nt, Homo sapiens
ugcaggcugaucuucuucucu

SEQ ID NO: 35965 - RNA, 22 nt, Homo sapiens
cacaaaccauuaugugcugcua

SEQ ID NO: 35966 - RNA, 22 nt, Homo sapiens
uguaaaccaugaugugcugcua

SEQ ID NO: 35967 - RNA, 22 nt, Homo sapiens
cgccaauauuuacgugcugcua

SEQ ID NO: 35968 - RNA, 22 nt, Homo sapiens
uccacauggaguugcuguuaca

SEQ ID NO: 35969 - RNA, 21 nt, Homo sapiens
gccaauauuucugugcugcua

SEQ ID NO: 35970 - RNA, 22 nt, Homo sapiens
uagucaagugaagcagugggag

SEQ ID NO: 35971 - RNA, 21 nt, Homo sapiens
aucugcacugucagcacuuua

SEQ ID NO: 35972 - RNA, 23 nt, Homo sapiens
gcuuugacaauaucauugcacug

SEQ ID NO: 35973 - RNA, 22 nt, Homo sapiens
uucaaaacaugaauugcugcug

SEQ ID NO: 35974 - RNA, 21 nt, Homo sapiens
acaaaccacagugugcugcug

SEQ ID NO: 35975 - RNA, 23 nt, Homo sapiens
caugagugacgcccucuggagua

SEQ ID NO: 35976 - RNA, 22 nt, Homo sapiens
gaccucagcuaugacagcacuu

SEQ ID NO: 35977 - RNA, 18 nt, Homo sapiens
acccucugaaaggaagca

SEQ ID NO: 35978 - RNA, 22 nt, Homo sapiens
aaagugcuucuuaccuccagau

SEQ ID NO: 35979 - RNA, 22 nt, Homo sapiens
aaagugcuucuuaccuccagau

SEQ ID NO: 35980 - RNA, 23 nt, Homo sapiens
acacucuaaagagaagcgcuuug

SEQ ID NO: 35981 - RNA, 21 nt, Homo sapiens
agaaaguacuucccucuggag

SEQ ID NO: 35982 - RNA, 21 nt, Homo sapiens
agaaagugcaucccucuggag

SEQ ID NO: 35983 - RNA, 22 nt, Homo sapiens
ugcaagccuugggugugggagg

SEQ ID NO: 35984 - RNA, 19 nt, Homo sapiens
gcuccuguccaacuggcuc

SEQ ID NO: 35985 - RNA, 23 nt, Homo sapiens
agaaaccaugggguaugagcaga

SEQ ID NO: 35986 - RNA, 22 nt, Homo sapiens
ucuacccagaaaggagccagug

SEQ ID NO: 35987 - RNA, 22 nt, Homo sapiens
cacauggccaaaacagagaaga

SEQ ID NO: 35988 - RNA, 21 nt, Homo sapiens
aucugcacugucagcacuuua

SEQ ID NO: 35989 - RNA, 22 nt, Homo sapiens
gaaccuaucuccccucuggacc

SEQ ID NO: 35990 - RNA, 22 nt, Homo sapiens
ucagaccgagacaagugcaaug

SEQ ID NO: 35991 - RNA, 23 nt, Homo sapiens
acacucuaaagagaagcgcuuug

SEQ ID NO: 35992 - RNA, 21 nt, Homo sapiens
agaaaguacuucccucuggag

SEQ ID NO: 35993 - RNA, 21 nt, Homo sapiens
agaaagugcaucccucuggag

SEQ ID NO: 35994 - RNA, 22 nt, Homo sapiens
ucggucccucgggccagggcag

SEQ ID NO: 35995 - RNA, 21 nt, Homo sapiens
cacaaccucaguguuuccagg

SEQ ID NO: 35996 - RNA, 20 nt, Homo sapiens
uacugcuuccacagcucccc

SEQ ID NO: 35997 - RNA, 22 nt, Homo sapiens
acacacccacgcgagccggaaa

SEQ ID NO: 35998 - RNA, 21 nt, Homo sapiens
agcgccuuuggcagcuagagu

SEQ ID NO: 35999 - RNA, 22 nt, Homo sapiens
uaaaugaauucaauuuccuucu

SEQ ID NO: 36000 - RNA, 22 nt, Homo sapiens
augcccuuucaucauugcacug

SEQ ID NO: 36001 - RNA, 22 nt, Homo sapiens
gagauuggccauguaauacuca

SEQ ID NO: 36002 - RNA, 21 nt, Homo sapiens
guaaugggaccuuccucuuug

SEQ ID NO: 36003 - RNA, 25 nt, Homo sapiens
accaacggaccuacuucccuccgcc

SEQ ID NO: 36004 - RNA, 22 nt, Homo sapiens
ggaggccgggacgagugcaaua

SEQ ID NO: 36005 - RNA, 22 nt, Homo sapiens
ggcagagagucagagcgcggau

SEQ ID NO: 36006 - RNA, 22 nt, Homo sapiens
cugggggcggcacaggggcuca

SEQ ID NO: 36007 - RNA, 22 nt, Homo sapiens
ugggguauuugacaaacugaca

SEQ ID NO: 36008 - RNA, 22 nt, Homo sapiens
acaaccagcuaagacacugcca

SEQ ID NO: 36009 - RNA, 23 nt, Homo sapiens
gcaaucagcuaacuacacugccu

SEQ ID NO: 36010 - RNA, 22 nt, Homo sapiens
guaccccuggagauucugauaa

SEQ ID NO: 36011 - RNA, 22 nt, Homo sapiens
cacuuaucagguuguauuauaa

SEQ ID NO: 36012 - RNA, 22 nt, Homo sapiens
accagcuaacaauacacugcca

SEQ ID NO: 36013 - RNA, 22 nt, Homo sapiens
gccagcuaacaauacacugccu

SEQ ID NO: 36014 - RNA, 23 nt, Homo sapiens
acacacucacacacacacacuca

SEQ ID NO: 36015 - RNA, 22 nt, Homo sapiens
gcaaaaguaauugcagugugug

SEQ ID NO: 36016 - RNA, 20 nt, Homo sapiens
uccccacagacccagagccg

SEQ ID NO: 36017 - RNA, 23 nt, Homo sapiens
gacguaguccuauucucugcugc

SEQ ID NO: 36018 - RNA, 22 nt, Homo sapiens
gggagaggucucccugcgcaca

SEQ ID NO: 36019 - RNA, 22 nt, Homo sapiens
gugggguggguggucaggccga

SEQ ID NO: 36020 - RNA, 17 nt, Homo sapiens
gggagaggaggaggcga

SEQ ID NO: 36021 - RNA, 21 nt, Homo sapiens
agggcucaucuugguccugca

SEQ ID NO: 36022 - RNA, 18 nt, Homo sapiens
auucaaucuacugccuca

SEQ ID NO: 36023 - RNA, 22 nt, Homo sapiens
uggcagcagcggagggggcaga

SEQ ID NO: 36024 - RNA, 20 nt, Homo sapiens
acagcaaggagggcaggagg

SEQ ID NO: 36025 - RNA, 20 nt, Homo sapiens
ccagcagcaccuggggcagu

SEQ ID NO: 36026 - RNA, 23 nt, Homo sapiens
aaaucagaaucacaccuggggga

SEQ ID NO: 36027 - RNA, 21 nt, Homo sapiens
auccuguacugagcugccccg

SEQ ID NO: 36028 - RNA, 24 nt, Homo sapiens
acgcagagcccgaaagcccccagu

SEQ ID NO: 36029 - RNA, 21 nt, Homo sapiens
guccugagagcgcugccuccu

SEQ ID NO: 36030 - RNA, 22 nt, Homo sapiens
gcggucccgcggcgccccgccu

SEQ ID NO: 36031 - RNA, 21 nt, Homo sapiens
ggggagcgggggcccugccuu

SEQ ID NO: 36032 - RNA, 21 nt, Homo sapiens
cugggggacggagcagaagga

SEQ ID NO: 36033 - RNA, 22 nt, Homo sapiens
ccaguagcacggcucaguccag

SEQ ID NO: 36034 - RNA, 21 nt, Homo sapiens
ccuucugacuccaaguccagu

SEQ ID NO: 36035 - RNA, 22 nt, Homo sapiens
gccuucugacccuaaguccagu

SEQ ID NO: 36036 - RNA, 22 nt, Homo sapiens
acacucuaaaaggaugcacuuu

SEQ ID NO: 36037 - RNA, 22 nt, Homo sapiens
acacucuaaaaggaugcacuuu

SEQ ID NO: 36038 - RNA, 22 nt, Homo sapiens
aaccucuaaaaggaugcacuuu

SEQ ID NO: 36039 - RNA, 22 nt, Homo sapiens
aaccucuaaaaggaugcacuuu

SEQ ID NO: 36040 - RNA, 22 nt, Homo sapiens
auccucuaaaaagaugcacuuu

SEQ ID NO: 36041 - RNA, 22 nt, Homo sapiens
auccucuaaaaagaugcacuuu

SEQ ID NO: 36042 - RNA, 22 nt, Homo sapiens
acaguggucaucgagugacaca

SEQ ID NO: 36043 - RNA, 20 nt, Homo sapiens
gcagcuguccgcccagacac

SEQ ID NO: 36044 - RNA, 22 nt, Homo sapiens
ucaggaacugccuuucucucca

SEQ ID NO: 36045 - RNA, 21 nt, Homo sapiens
gaccaaucgccguccccgccg

SEQ ID NO: 36046 - RNA, 20 nt, Homo sapiens
cccgccgcgucgcccugggg

SEQ ID NO: 36047 - RNA, 22 nt, Homo sapiens
cccaacaacaggaaacuaccua

SEQ ID NO: 36048 - RNA, 21 nt, Homo sapiens
uucuaggauaggcccaggggc

SEQ ID NO: 36049 - RNA, 23 nt, Homo sapiens
cggcucugucgucgaggcgcuca

SEQ ID NO: 36050 - RNA, 22 nt, Homo sapiens
ucaccauugcuaaagugcaauu

SEQ ID NO: 36051 - RNA, 23 nt, Homo sapiens
acugaggggccucagaccgagcu

SEQ ID NO: 36052 - RNA, 22 nt, Homo sapiens
gauccgagcaccggggaccccc

SEQ ID NO: 36053 - RNA, 19 nt, Homo sapiens
aagacauuuucagacagcu

SEQ ID NO: 36054 - RNA, 22 nt, Homo sapiens
gcggucccgcggcgccccgccu

SEQ ID NO: 36055 - RNA, 24 nt, Homo sapiens
ucacagguuaaagggucucaggga

SEQ ID NO: 36056 - RNA, 22 nt, Homo sapiens
ucacaaguuagggucucaggga

SEQ ID NO: 36057 - RNA, 23 nt, Homo sapiens
agcccuguucuacagcccugagg

SEQ ID NO: 36058 - RNA, 22 nt, Homo sapiens
cacgaccgacgccacgccgagu

SEQ ID NO: 36059 - RNA, 21 nt, Homo sapiens
aaagugucagauacggugugg

SEQ ID NO: 36060 - RNA, 23 nt, Homo sapiens
gcgcccaauuaaugucuguugau

SEQ ID NO: 36061 - RNA, 22 nt, Homo sapiens
gugauugccacucuccugagua

SEQ ID NO: 36062 - RNA, 23 nt, Homo sapiens
gucagaccccgagggguccucgc

SEQ ID NO: 36063 - RNA, 23 nt, Homo sapiens
accacaggagucugagcauuuga

SEQ ID NO: 36064 - RNA, 22 nt, Homo sapiens
cagcugguugaaggggaccaaa

SEQ ID NO: 36065 - RNA, 22 nt, Homo sapiens
uagcugguugaaggggaccaaa

SEQ ID NO: 36066 - RNA, 23 nt, Homo sapiens
aggaacagcagcagcccgggccg

SEQ ID NO: 36067 - RNA, 21 nt, Homo sapiens
gaccaaucgccguccccgccg

SEQ ID NO: 36068 - RNA, 20 nt, Homo sapiens
cuggaggaagggcccagagg

SEQ ID NO: 36069 - RNA, 22 nt, Homo sapiens
gccuaagacacaggcccagaga

SEQ ID NO: 36070 - RNA, 21 nt, Homo sapiens
ccuucugacuccaaguccagu

SEQ ID NO: 36071 - RNA, 23 nt, Homo sapiens
acugaggggccucagaccgagcu

SEQ ID NO: 36072 - RNA, 21 nt, Homo sapiens
agacacaccacggcacacuuc

SEQ ID NO: 36073 - RNA, 19 nt, Homo sapiens
accagugcccugcacacuu

SEQ ID NO: 36074 - RNA, 22 nt, Homo sapiens
gcggucccgcggcgccccgccu

SEQ ID NO: 36075 - RNA, 22 nt, Homo sapiens
ugcuguuagcccuagccccgca

SEQ ID NO: 36076 - RNA, 23 nt, Homo sapiens
agcagcauuguacagggcuauga

SEQ ID NO: 36077 - RNA, 22 nt, Homo sapiens
gcacaaaucuccagaccaccca

SEQ ID NO: 36078 - RNA, 22 nt, Homo sapiens
cacugguacaaggguugggaga

SEQ ID NO: 36079 - RNA, 20 nt, Homo sapiens
acagcaaggagggcaggagg

SEQ ID NO: 36080 - RNA, 25 nt, Homo sapiens
acggagcugucccaacaccaccccu

SEQ ID NO: 36081 - RNA, 25 nt, Homo sapiens
acggagcugucccaacaccaccccu

SEQ ID NO: 36082 - RNA, 21 nt, Homo sapiens
caucaccuuccuucuccucca

SEQ ID NO: 36083 - RNA, 23 nt, Homo sapiens
cggcucugucgucgaggcgcuca

SEQ ID NO: 36084 - RNA, 21 nt, Homo sapiens
cggcucggguggcggcgacgg

SEQ ID NO: 36085 - RNA, 21 nt, Homo sapiens
ccccucccagccucccugcca

SEQ ID NO: 36086 - RNA, 17 nt, Homo sapiens
gggagaggaggaggcga

SEQ ID NO: 36087 - RNA, 18 nt, Homo sapiens
aucacauucaccucccug

SEQ ID NO: 36088 - RNA, 21 nt, Homo sapiens
acuagacugugagcuccucga

SEQ ID NO: 36089 - RNA, 22 nt, Homo sapiens
gaaccuaucuccccucuggacc

SEQ ID NO: 36090 - RNA, 18 nt, Homo sapiens
acccucugaaaggaagca

SEQ ID NO: 36091 - RNA, 22 nt, Homo sapiens
aaagugcuucuuaccuccagau

SEQ ID NO: 36092 - RNA, 23 nt, Homo sapiens
acacucuaaagagaagcgcuuug

SEQ ID NO: 36093 - RNA, 21 nt, Homo sapiens
agaaaguacuucccucuggag

SEQ ID NO: 36094 - RNA, 21 nt, Homo sapiens
agaaagugcaucccucuggag

SEQ ID NO: 36095 - RNA, 19 nt, Homo sapiens
auuuugguacagcagcuca

SEQ ID NO: 36096 - RNA, 19 nt, Homo sapiens
guccugaauuccgcagccu

SEQ ID NO: 36097 - RNA, 19 nt, Homo sapiens
gccucagaggcagcugcuu

SEQ ID NO: 36098 - RNA, 21 nt, Homo sapiens
aagggucaguaagcacccgcg

SEQ ID NO: 36099 - RNA, 22 nt, Homo sapiens
ggcagagagucagagcgcggau

SEQ ID NO: 36100 - RNA, 18 nt, Homo sapiens
cccccaccaccacgcccg

SEQ ID NO: 36101 - RNA, 22 nt, Homo sapiens
cagcugguugaaggggaccaaa

SEQ ID NO: 36102 - RNA, 22 nt, Homo sapiens
uagcugguugaaggggaccaaa

SEQ ID NO: 36103 - RNA, 22 nt, Homo sapiens
cccaacaacaugaaacuaccua

SEQ ID NO: 36104 - RNA, 22 nt, Homo sapiens
cucaauagacugugagcuccuu

SEQ ID NO: 36105 - RNA, 22 nt, Homo sapiens
agcugaguguaggauguuuaca

SEQ ID NO: 36106 - RNA, 22 nt, Homo sapiens
ugacgaugacaacgaugacgua

SEQ ID NO: 36107 - RNA, 21 nt, Homo sapiens
cacaacccuaguggcgccauu

SEQ ID NO: 36108 - RNA, 23 nt, Homo sapiens
cccagcuagauuguaagcuccuu

SEQ ID NO: 36109 - RNA, 21 nt, Homo sapiens
caucaccuuccuucuccucca

SEQ ID NO: 36110 - RNA, 22 nt, Homo sapiens
acacacccacgcgagccggaaa

SEQ ID NO: 36111 - RNA, 21 nt, Homo sapiens
aaaggccacauccagcaccgu

SEQ ID NO: 36112 - RNA, 21 nt, Homo sapiens
ggucagaacccaucauucacu

SEQ ID NO: 36113 - RNA, 23 nt, Homo sapiens
ucacauaggaauaaaaagccaua

SEQ ID NO: 36114 - RNA, 23 nt, Homo sapiens
ucacauaggaaugaaaagccaua

SEQ ID NO: 36115 - RNA, 23 nt, Homo sapiens
cccaacagacauggcgguacuca

SEQ ID NO: 36116 - RNA, 22 nt, Homo sapiens
ucaguuuccucugcaaacaguu

SEQ ID NO: 36117 - RNA, 22 nt, Homo sapiens
ccucauggaaggguuccccacu

SEQ ID NO: 36118 - RNA, 23 nt, Homo sapiens
gaaagugcuucuuuccucgagaa

SEQ ID NO: 36119 - RNA, 22 nt, Homo sapiens
uggggacccucccugaaccaag

SEQ ID NO: 36120 - RNA, 22 nt, Homo sapiens
ggaggccgggacgagugcaaua

SEQ ID NO: 36121 - RNA, 22 nt, Homo sapiens
caaacaccauugucacacucca

SEQ ID NO: 36122 - RNA, 22 nt, Homo sapiens
uggcagcagcggagggggcaga

SEQ ID NO: 36123 - RNA, 23 nt, Homo sapiens
cuacuaaaacauggaagcacuua

SEQ ID NO: 36124 - RNA, 23 nt, Homo sapiens
acacucaaacauggaagcacuua

SEQ ID NO: 36125 - RNA, 20 nt, Homo sapiens
ccagcagcaccuggggcagu

SEQ ID NO: 36126 - RNA, 23 nt, Homo sapiens
cggcucugucgucgaggcgcuca

SEQ ID NO: 36127 - RNA, 21 nt, Homo sapiens
auccuguacugagcugccccg

SEQ ID NO: 36128 - RNA, 22 nt, Homo sapiens
uauccacuacaccccgcugccu

SEQ ID NO: 36129 - RNA, 18 nt, Homo sapiens
caccaccagagccaacgu

SEQ ID NO: 36130 - RNA, 21 nt, Homo sapiens
gggcaucugggacgcgcagga

SEQ ID NO: 36131 - RNA, 21 nt, Homo sapiens
gaccaaucgccguccccgccg

SEQ ID NO: 36132 - RNA, 23 nt, Homo sapiens
cggcucugucgucgaggcgcuca

SEQ ID NO: 36133 - RNA, 23 nt, Homo sapiens
ucaacgggagugaucgugucauu

SEQ ID NO: 36134 - RNA, 23 nt, Homo sapiens
cugcagaacuguucccgcugcua

SEQ ID NO: 36135 - RNA, 23 nt, Homo sapiens
acccucuauagggaagcgcguuc

SEQ ID NO: 36136 - RNA, 22 nt, Homo sapiens
gcaaaaguaauugccaguuuug

SEQ ID NO: 36137 - RNA, 22 nt, Homo sapiens
ugcaaaaguagucucaguuuuu

SEQ ID NO: 36138 - RNA, 19 nt, Homo sapiens
aaaaguaauuacaguuuuu

SEQ ID NO: 36139 - RNA, 19 nt, Homo sapiens
guugggaucacaggcgccc

SEQ ID NO: 36140 - RNA, 19 nt, Homo sapiens
guugggaucacaggcgccc

SEQ ID NO: 36141 - RNA, 22 nt, Homo sapiens
gguucaguuguucaaccaguua

SEQ ID NO: 36142 - RNA, 22 nt, Homo sapiens
acaucaucgcauauugacacaa

SEQ ID NO: 36143 - RNA, 21 nt, Homo sapiens
cacaacccuaguggcgccauu

SEQ ID NO: 36144 - RNA, 22 nt, Homo sapiens
gcggucccgcggcgccccgccu

SEQ ID NO: 36145 - RNA, 20 nt, Homo sapiens
uccccacagacccagagccg

SEQ ID NO: 36146 - RNA, 21 nt, Homo sapiens
ugcaggcugaucuucuucucu

SEQ ID NO: 36147 - RNA, 18 nt, Homo sapiens
aucacauucaccucccug

SEQ ID NO: 36148 - RNA, 21 nt, Homo sapiens
ggcugucaauucauaggucag

SEQ ID NO: 36149 - RNA, 21 nt, Homo sapiens
gucugucaauucauaggucau

SEQ ID NO: 36150 - RNA, 23 nt, Homo sapiens
ggaagccaucaagucgcugcagg

SEQ ID NO: 36151 - RNA, 20 nt, Homo sapiens
cucaaagcaaacccugcaga

SEQ ID NO: 36152 - RNA, 18 nt, Homo sapiens
caccaccagagccaacgu

SEQ ID NO: 36153 - RNA, 21 nt, Homo sapiens
gaccaaucgccguccccgccg

SEQ ID NO: 36154 - RNA, 22 nt, Homo sapiens
acaguucuucaacuggcagcuu

SEQ ID NO: 36155 - RNA, 23 nt, Homo sapiens
acccucuauagggaagcgcguuc

SEQ ID NO: 36156 - RNA, 19 nt, Homo sapiens
auuuugguacagcagcuca

SEQ ID NO: 36157 - RNA, 24 nt, Homo sapiens
acgcgcaggccagagacccaggca

SEQ ID NO: 36158 - RNA, 22 nt, Homo sapiens
gcggucccgcggcgccccgccu

SEQ ID NO: 36159 - RNA, 22 nt, Homo sapiens
acacacccacgcgagccggaaa

SEQ ID NO: 36160 - RNA, 21 nt, Homo sapiens
cggcucggguggcggcgacgg

SEQ ID NO: 36161 - RNA, 21 nt, Homo sapiens
ugcaggcugaucuucuucucu

SEQ ID NO: 36162 - RNA, 17 nt, Homo sapiens
gggagaggaggaggcga

SEQ ID NO: 36163 - RNA, 21 nt, Homo sapiens
agggcucaucuugguccugca

SEQ ID NO: 36164 - RNA, 21 nt, Homo sapiens
gggcaucugggacgcgcagga

SEQ ID NO: 36165 - RNA, 22 nt, Homo sapiens
uggcagcagcggagggggcaga

SEQ ID NO: 36166 - RNA, 25 nt, Homo sapiens
agcuagucaagcgcgguuguggggg

SEQ ID NO: 36167 - RNA, 20 nt, Homo sapiens
ccagcagcaccuggggcagu

SEQ ID NO: 36168 - RNA, 21 nt, Homo sapiens
auccuguacugagcugccccg

SEQ ID NO: 36169 - RNA, 22 nt, Homo sapiens
aggucucacuuuguugcccaga

SEQ ID NO: 36170 - RNA, 22 nt, Homo sapiens
ucagaccgagacaagugcaaug

SEQ ID NO: 36171 - RNA, 22 nt, Homo sapiens
aucgggaggggacugagccuga

SEQ ID NO: 36172 - RNA, 25 nt, Homo sapiens
aaggagcucagaagcccugcccagc

SEQ ID NO: 36173 - RNA, 21 nt, Homo sapiens
gcuccaaccucagcagacugu

SEQ ID NO: 36174 - RNA, 21 nt, Homo sapiens
gaaggaagugagugcagccac

SEQ ID NO: 36175 - RNA, 24 nt, Homo sapiens
acgcgcaggccagagacccaggca

SEQ ID NO: 36176 - RNA, 22 nt, Homo sapiens
acacacccacgcgagccggaaa

SEQ ID NO: 36177 - RNA, 22 nt, Homo sapiens
acacacccacgcgagccggaaa

SEQ ID NO: 36178 - RNA, 22 nt, Homo sapiens
cagaaagugcuucccucuagag

SEQ ID NO: 36179 - RNA, 22 nt, Homo sapiens
ucaacaucagucugauaagcua

SEQ ID NO: 36180 - RNA, 22 nt, Homo sapiens
acaaccagcuaagacacugcca

SEQ ID NO: 36181 - RNA, 22 nt, Homo sapiens
gcaaaaguaauugccaguuuug

SEQ ID NO: 36182 - RNA, 22 nt, Homo sapiens
ugcaaaaguagucucaguuuuu

SEQ ID NO: 36183 - RNA, 19 nt, Homo sapiens
aaaaguaauuacaguuuuu

SEQ ID NO: 36184 - RNA, 19 nt, Homo sapiens
guugggaucacaggcgccc

SEQ ID NO: 36185 - RNA, 19 nt, Homo sapiens
guccugaauuccgcagccu

SEQ ID NO: 36186 - RNA, 22 nt, Homo sapiens
aagagggagacccaggcucgga

SEQ ID NO: 36187 - RNA, 22 nt, Homo sapiens
gccaccuucaaaugggaagucu

SEQ ID NO: 36188 - RNA, 20 nt, Homo sapiens
ggcauucaccgcgugccuua

SEQ ID NO: 36189 - RNA, 22 nt, Homo sapiens
uccggggacgaacgggacgggu

SEQ ID NO: 36190 - RNA, 22 nt, Homo sapiens
ucaggaacugccuuucucucca

SEQ ID NO: 36191 - RNA, 21 nt, Homo sapiens
gaccaaucgccguccccgccg

SEQ ID NO: 36192 - RNA, 22 nt, Homo sapiens
uccacauggaguugcuguuaca

SEQ ID NO: 36193 - RNA, 22 nt, Homo sapiens
cuguuccugcugaacugagcca

SEQ ID NO: 36194 - RNA, 23 nt, Homo sapiens
aaaucagaaucacaccuggggga

SEQ ID NO: 36195 - RNA, 21 nt, Homo sapiens
ucuacucagaagggugccuua

SEQ ID NO: 36196 - RNA, 19 nt, Homo sapiens
gccugcugacaccgugccu

SEQ ID NO: 36197 - RNA, 19 nt, Homo sapiens
guugggaucacaggcgccc

SEQ ID NO: 36198 - RNA, 22 nt, Homo sapiens
aagagggagacccaggcucgga

SEQ ID NO: 36199 - RNA, 24 nt, Homo sapiens
acgcagagcccgaaagcccccagu

SEQ ID NO: 36200 - RNA, 24 nt, Homo sapiens
acgcgcaggccagagacccaggca

SEQ ID NO: 36201 - RNA, 22 nt, Homo sapiens
gcggucccgcggcgccccgccu

SEQ ID NO: 36202 - RNA, 22 nt, Homo sapiens
ugcuguuagcccuagccccgca

SEQ ID NO: 36203 - RNA, 22 nt, Homo sapiens
ggaggccgggacgagugcaaua

SEQ ID NO: 36204 - RNA, 22 nt, Homo sapiens
auacauacuucuuuacauucca

SEQ ID NO: 36205 - RNA, 22 nt, Homo sapiens
cugggggcggcacaggggcuca

SEQ ID NO: 36206 - RNA, 22 nt, Homo sapiens
cugggggcggcacaggggcuca

SEQ ID NO: 36207 - RNA, 20 nt, Homo sapiens
ggggggcgaggcagguguga

SEQ ID NO: 36208 - RNA, 20 nt, Homo sapiens
cccgccgcgucgcccugggg

SEQ ID NO: 36209 - RNA, 22 nt, Homo sapiens
ccacacacuuccuuacauucca

SEQ ID NO: 36210 - RNA, 22 nt, Homo sapiens
acugccugucugugccugcugu

SEQ ID NO: 36211 - RNA, 21 nt, Homo sapiens
acaggauugagggggggcccu

SEQ ID NO: 36212 - RNA, 20 nt, Homo sapiens
cuggaggaagggcccagagg

SEQ ID NO: 36213 - RNA, 22 nt, Homo sapiens
aaagagguuaaccagguguguu

SEQ ID NO: 36214 - RNA, 22 nt, Homo sapiens
gccuaagacacaggcccagaga

SEQ ID NO: 36215 - RNA, 21 nt, Homo sapiens
uucuaggauaggcccaggggc

SEQ ID NO: 36216 - RNA, 22 nt, Homo sapiens
ugaauccuugaauagguguguu

SEQ ID NO: 36217 - RNA, 22 nt, Homo sapiens
accagguuccaccccagcaggc

SEQ ID NO: 36218 - RNA, 20 nt, Homo sapiens
ggcaaagaaggaacauuccu

SEQ ID NO: 36219 - RNA, 20 nt, Homo sapiens
uccccacagacccagagccg

SEQ ID NO: 36220 - RNA, 22 nt, Homo sapiens
augcccuuucaucauugcacug

SEQ ID NO: 36221 - RNA, 22 nt, Homo sapiens
acaacuguaacuagacgguuuu

SEQ ID NO: 36222 - RNA, 24 nt, Homo sapiens
agugugaguucuaccauugccaaa

SEQ ID NO: 36223 - RNA, 23 nt, Homo sapiens
ucaguuuugcauagauuugcaca

SEQ ID NO: 36224 - RNA, 22 nt, Homo sapiens
cacucagcaccaggauauuguu

SEQ ID NO: 36225 - RNA, 22 nt, Homo sapiens
aacuaugcaaccuacuaccucu

SEQ ID NO: 36226 - RNA, 22 nt, Homo sapiens
gaacuugcuaaaaaugcagaau

SEQ ID NO: 36227 - RNA, 21 nt, Homo sapiens
guaaugggaccuuccucuuug

SEQ ID NO: 36228 - RNA, 21 nt, Homo sapiens
gaaggaagugagugcagccac

SEQ ID NO: 36229 - RNA, 22 nt, Homo sapiens
caaacaccauugucacacucca

SEQ ID NO: 36230 - RNA, 17 nt, Homo sapiens
gacagccucucccccac

SEQ ID NO: 36231 - RNA, 22 nt, Homo sapiens
aaucagucucauugcuuuauaa

SEQ ID NO: 36232 - RNA, 22 nt, Homo sapiens
cucccuucuuuccucccgucuu

SEQ ID NO: 36233 - RNA, 22 nt, Homo sapiens
gaauucaucacggccagccucu

SEQ ID NO: 36234 - RNA, 22 nt, Homo sapiens
uccagcaaagggaagcgcuuuc

SEQ ID NO: 36235 - RNA, 22 nt, Homo sapiens
accucuaaaggggagcgcuuug

SEQ ID NO: 36236 - RNA, 23 nt, Homo sapiens
acacucuaaagagaagcgcuuug

SEQ ID NO: 36237 - RNA, 21 nt, Homo sapiens
gcuccaaagggaagcgcuuug

SEQ ID NO: 36238 - RNA, 21 nt, Homo sapiens
cacucugaagggaagcgcuuu

SEQ ID NO: 36239 - RNA, 21 nt, Homo sapiens
ccucuaaagagaagcgcuuuc

SEQ ID NO: 36240 - RNA, 21 nt, Homo sapiens
caucaccuuccuucuccucca

SEQ ID NO: 36241 - RNA, 21 nt, Homo sapiens
aagggucaguaagcacccgcg

SEQ ID NO: 36242 - RNA, 20 nt, Homo sapiens
uacugcuuccacagcucccc

SEQ ID NO: 36243 - RNA, 21 nt, Homo sapiens
cuagggaagaacagugagcaa

SEQ ID NO: 36244 - RNA, 19 nt, Homo sapiens
ccaccucccgaguccucac

SEQ ID NO: 36245 - RNA, 24 nt, Homo sapiens
acugcuggucuucagucagggcca

SEQ ID NO: 36246 - RNA, 18 nt, Homo sapiens
aucacauucaccucccug

SEQ ID NO: 36247 - RNA, 22 nt, Homo sapiens
acuccaacagggccgcgucucc

SEQ ID NO: 36248 - RNA, 23 nt, Homo sapiens
gggagugaagacacggagccaga

SEQ ID NO: 36249 - RNA, 21 nt, Homo sapiens
acaggauugagggggggcccu

SEQ ID NO: 36250 - RNA, 22 nt, Homo sapiens
uaaccgauuucagauggugcua

SEQ ID NO: 36251 - RNA, 23 nt, Homo sapiens
aaagucucgcucucugccccuca

SEQ ID NO: 36252 - RNA, 19 nt, Homo sapiens
guccugaauuccgcagccu

SEQ ID NO: 36253 - RNA, 22 nt, Homo sapiens
auacauacuucuuuacauucca

SEQ ID NO: 36254 - RNA, 23 nt, Homo sapiens
gucacaucccucccaagacccuc

SEQ ID NO: 36255 - RNA, 22 nt, Homo sapiens
uaaaugaauucaauuuccuucu

SEQ ID NO: 36256 - RNA, 21 nt, Homo sapiens
cggggugcacgggcggagggc

SEQ ID NO: 36257 - RNA, 23 nt, Homo sapiens
gggagugaagacacggagccaga

SEQ ID NO: 36258 - RNA, 22 nt, Homo sapiens
ucaucucgcccgcaaagaccca

SEQ ID NO: 36259 - RNA, 22 nt, Homo sapiens
ccacacacuuccuuacauucca

SEQ ID NO: 36260 - RNA, 21 nt, Homo sapiens
ugcaaugcaacuacaaugcac

SEQ ID NO: 36261 - RNA, 22 nt, Homo sapiens
uacagauggauaccgugcaauu

SEQ ID NO: 36262 - RNA, 22 nt, Homo sapiens
gauagagugcagaccagggucu

SEQ ID NO: 36263 - RNA, 22 nt, Homo sapiens
aagaagugcaccgcgaauguuu

SEQ ID NO: 36264 - RNA, 22 nt, Homo sapiens
aaagaugagcuaaugguaauau

SEQ ID NO: 36265 - RNA, 22 nt, Homo sapiens
gcaaagguaauugcuguuuucg

SEQ ID NO: 36266 - RNA, 21 nt, Homo sapiens
guucuaacccauuguggccaa

SEQ ID NO: 36267 - RNA, 25 nt, Homo sapiens
acggagcugucccaacaccaccccu

SEQ ID NO: 36268 - RNA, 20 nt, Homo sapiens
ggcaaagaaggaacauuccu

SEQ ID NO: 36269 - RNA, 22 nt, Homo sapiens
aagagggagacccaggcucgga

SEQ ID NO: 36270 - RNA, 19 nt, Homo sapiens
gcucuaagaaagccacacu

SEQ ID NO: 36271 - RNA, 23 nt, Homo sapiens
accacaggagucugagcauuuga

SEQ ID NO: 36272 - RNA, 21 nt, Homo sapiens
ccccucccagccucccugcca

SEQ ID NO: 36273 - RNA, 22 nt, Homo sapiens
gugggguggguggucaggccga

SEQ ID NO: 36274 - RNA, 24 nt, Homo sapiens
acugcuggucuucagucagggcca

SEQ ID NO: 36275 - RNA, 21 nt, Homo sapiens
gaccaaucgccguccccgccg

SEQ ID NO: 36276 - RNA, 22 nt, Homo sapiens
cagaagugggccgggcacaggg

SEQ ID NO: 36277 - RNA, 22 nt, Homo sapiens
ggagagccuccacccaacccuc

SEQ ID NO: 36278 - RNA, 21 nt, Homo sapiens
acaggauugagggggggcccu

SEQ ID NO: 36279 - RNA, 23 nt, Homo sapiens
aaaucagaaucacaccuggggga

SEQ ID NO: 36280 - RNA, 23 nt, Homo sapiens
aaaucagaaucacaccuggggga

SEQ ID NO: 36281 - RNA, 22 nt, Homo sapiens
aguccagauucugugcccacca

SEQ ID NO: 36282 - RNA, 21 nt, Homo sapiens
uugucuaaccagucaccuguu

SEQ ID NO: 36283 - RNA, 24 nt, Homo sapiens
acgcagagcccgaaagcccccagu

SEQ ID NO: 36284 - RNA, 24 nt, Homo sapiens
acgcagagcccgaaagcccccagu

SEQ ID NO: 36285 - RNA, 22 nt, Homo sapiens
gcacauguucugcggcccacca

SEQ ID NO: 36286 - RNA, 22 nt, Homo sapiens
gcggucccgcggcgccccgccu

SEQ ID NO: 36287 - RNA, 22 nt, Homo sapiens
ugcuguuagcccuagccccgca

SEQ ID NO: 36288 - RNA, 22 nt, Homo sapiens
cacucuaaagggaggcacuuug

SEQ ID NO: 36289 - RNA, 22 nt, Homo sapiens
gggagaggucucccugcgcaca

SEQ ID NO: 36290 - RNA, 22 nt, Homo sapiens
cacgaccgacgccacgccgagu

SEQ ID NO: 36291 - RNA, 21 nt, Homo sapiens
gaccaaucgccguccccgccg

SEQ ID NO: 36292 - RNA, 22 nt, Homo sapiens
acaaccagcuaagacacugcca

SEQ ID NO: 36293 - RNA, 19 nt, Homo sapiens
uagcauacagauacgccca

SEQ ID NO: 36294 - RNA, 21 nt, Homo sapiens
guucuaacccauuguggccaa

SEQ ID NO: 36295 - RNA, 22 nt, Homo sapiens
gcggucccgcggcgccccgccu

SEQ ID NO: 36296 - RNA, 22 nt, Homo sapiens
ugcuguuagcccuagccccgca

SEQ ID NO: 36297 - RNA, 22 nt, Homo sapiens
ggcagagagucagagcgcggau

SEQ ID NO: 36298 - RNA, 22 nt, Homo sapiens
caaacaccauugucacacucca

SEQ ID NO: 36299 - RNA, 23 nt, Homo sapiens
aggaacagcagcagcccgggccg

SEQ ID NO: 36300 - RNA, 21 nt, Homo sapiens
gaccaaucgccguccccgccg

SEQ ID NO: 36301 - RNA, 25 nt, Homo sapiens
acggagcugucccaacaccaccccu

SEQ ID NO: 36302 - RNA, 22 nt, Homo sapiens
gcggucccgcggcgccccgccu

SEQ ID NO: 36303 - RNA, 22 nt, Homo sapiens
ugcuguuagcccuagccccgca

SEQ ID NO: 36304 - RNA, 21 nt, Homo sapiens
aaaggccacauccagcaccgu

SEQ ID NO: 36305 - RNA, 21 nt, Homo sapiens
gggcaucugggacgcgcagga

SEQ ID NO: 36306 - RNA, 22 nt, Homo sapiens
ucagaccgagacaagugcaaug

SEQ ID NO: 36307 - RNA, 21 nt, Homo sapiens
cguacgcuauacggucuacua

SEQ ID NO: 36308 - RNA, 23 nt, Homo sapiens
ccacccaaugaccuacuccaaga

SEQ ID NO: 36309 - RNA, 21 nt, Homo sapiens
caacugaugccuuuccaagua

SEQ ID NO: 36310 - RNA, 22 nt, Homo sapiens
ccagugucuccaguaguagaca

SEQ ID NO: 36311 - RNA, 23 nt, Homo sapiens
gucacaucccucccaagacccuc

SEQ ID NO: 36312 - RNA, 22 nt, Homo sapiens
caaacaccauugucacacucca

SEQ ID NO: 36313 - RNA, 22 nt, Homo sapiens
uacaucuggacagccgaaugaa

SEQ ID NO: 36314 - RNA, 21 nt, Homo sapiens
ugcaaacccugcaugugggag

SEQ ID NO: 36315 - RNA, 22 nt, Homo sapiens
ucaucucgcccgcaaagaccca

SEQ ID NO: 36316 - RNA, 18 nt, Homo sapiens
augacaccucccugugaa

SEQ ID NO: 36317 - RNA, 23 nt, Homo sapiens
acaacaaaaucacuagucuucca

SEQ ID NO: 36318 - RNA, 21 nt, Homo sapiens
aggagacucacaaguuccugc

SEQ ID NO: 36319 - RNA, 22 nt, Homo sapiens
ggaggccgggacgagugcaaua

SEQ ID NO: 36320 - RNA, 21 nt, Homo sapiens
gagcugcauccuggcuccggg

SEQ ID NO: 36321 - RNA, 21 nt, Homo sapiens
ccccucccagccucccugcca

SEQ ID NO: 36322 - RNA, 23 nt, Homo sapiens
aaaaugcagauuccuggacucca

SEQ ID NO: 36323 - RNA, 21 nt, Homo sapiens
cggggugcacgggcggagggc

SEQ ID NO: 36324 - RNA, 21 nt, Homo sapiens
gaccaaucgccguccccgccg

SEQ ID NO: 36325 - RNA, 22 nt, Homo sapiens
cggugagcacccggccccugcg

SEQ ID NO: 36326 - RNA, 22 nt, Homo sapiens
uggcagcagcggagggggcaga

SEQ ID NO: 36327 - RNA, 22 nt, Homo sapiens
ucagaccgagacaagugcaaug

SEQ ID NO: 36328 - RNA, 20 nt, Homo sapiens
ccagcagcaccuggggcagu

SEQ ID NO: 36329 - RNA, 21 nt, Homo sapiens
auccuguacugagcugccccg

SEQ ID NO: 36330 - RNA, 20 nt, Homo sapiens
ugggccaccgccgagcggac

SEQ ID NO: 36331 - RNA, 21 nt, Homo sapiens
gcugaggucugggccaggucu

SEQ ID NO: 36332 - RNA, 25 nt, Homo sapiens
accaacggaccuacuucccuccgcc

SEQ ID NO: 36333 - RNA, 22 nt, Homo sapiens
gcggucccgcggcgccccgccu

SEQ ID NO: 36334 - RNA, 22 nt, Homo sapiens
ugcuguuagcccuagccccgca

SEQ ID NO: 36335 - RNA, 24 nt, Homo sapiens
cacccccagagccucagcucccca

SEQ ID NO: 36336 - RNA, 22 nt, Homo sapiens
cacaaguucggaucuacggguu

SEQ ID NO: 36337 - RNA, 22 nt, Homo sapiens
cuagggaacacagggcugguga

SEQ ID NO: 36338 - RNA, 22 nt, Homo sapiens
aucagagcccucugagcuucag

SEQ ID NO: 36339 - RNA, 22 nt, Homo sapiens
augcccuuuuaacauugcacug

SEQ ID NO: 36340 - RNA, 23 nt, Homo sapiens
cggccugauucacaacaccagcu

SEQ ID NO: 36341 - RNA, 22 nt, Homo sapiens
cccaacaacaggaaacuaccua

SEQ ID NO: 36342 - RNA, 22 nt, Homo sapiens
ucaacaucagucugauaagcua

SEQ ID NO: 36343 - RNA, 21 nt, Homo sapiens
ggaaaucccuggcaaugugau

SEQ ID NO: 36344 - RNA, 21 nt, Homo sapiens
gguaaucccuggcaaugugau

SEQ ID NO: 36345 - RNA, 20 nt, Homo sapiens
uacugcuuccacagcucccc

SEQ ID NO: 36346 - RNA, 22 nt, Homo sapiens
cuggagagacaaggggaagagg

SEQ ID NO: 36347 - RNA, 19 nt, Homo sapiens
gcuccuguccaacuggcuc

SEQ ID NO: 36348 - RNA, 22 nt, Homo sapiens
gauuccaauuuuuccacaucuu

SEQ ID NO: 36349 - RNA, 20 nt, Homo sapiens
cccugcgccaucuccucuac

SEQ ID NO: 36350 - RNA, 22 nt, Homo sapiens
ucuacccagaaaggagccagug

SEQ ID NO: 36351 - RNA, 24 nt, Homo sapiens
cacccccagagccucagcucccca

SEQ ID NO: 36352 - RNA, 23 nt, Homo sapiens
acacuuacuggacaccuacuagg

SEQ ID NO: 36353 - RNA, 22 nt, Homo sapiens
acuucaaggaucuuaaacuuug

SEQ ID NO: 36354 - RNA, 22 nt, Homo sapiens
cucagucccaggcaaaccauaa

SEQ ID NO: 36355 - RNA, 21 nt, Homo sapiens
aguucucccaacguaaaccca

SEQ ID NO: 36356 - RNA, 17 nt, Homo sapiens
gggagaggaggaggcga

SEQ ID NO: 36357 - RNA, 17 nt, Homo sapiens
gggagaggaggaggcga

SEQ ID NO: 36358 - RNA, 20 nt, Homo sapiens
aagcagaaaaaggcaaacga

SEQ ID NO: 36359 - RNA, 23 nt, Homo sapiens
gggagugaagacacggagccaga

SEQ ID NO: 36360 - RNA, 21 nt, Homo sapiens
gaccaaucgccguccccgccg

SEQ ID NO: 36361 - RNA, 23 nt, Homo sapiens
cagcugcuuuugggauuccguug

SEQ ID NO: 36362 - RNA, 22 nt, Homo sapiens
ucagaccgagacaagugcaaug

SEQ ID NO: 36363 - RNA, 22 nt, Homo sapiens
aggaaaccagcaaguguugacg

SEQ ID NO: 36364 - RNA, 19 nt, Homo sapiens
gcuccuguccaacuggcuc

SEQ ID NO: 36365 - RNA, 21 nt, Homo sapiens
ggacuauagaacuuucccccu

SEQ ID NO: 36366 - RNA, 25 nt, Homo sapiens
accaacggaccuacuucccuccgcc

SEQ ID NO: 36367 - RNA, 22 nt, Homo sapiens
gcggucccgcggcgccccgccu

SEQ ID NO: 36368 - RNA, 21 nt, Homo sapiens
aagggucaguaagcacccgcg

SEQ ID NO: 36369 - RNA, 22 nt, Homo sapiens
ucuacccagaaaggagccagug

SEQ ID NO: 36370 - RNA, 22 nt, Homo sapiens
cggugagcacccggccccugcg

SEQ ID NO: 36371 - RNA, 22 nt, Homo sapiens
ucaucucgcccgcaaagaccca

SEQ ID NO: 36372 - RNA, 22 nt, Homo sapiens
gauccgagcaccggggaccccc

SEQ ID NO: 36373 - RNA, 22 nt, Homo sapiens
cugggggcggcacaggggcuca

SEQ ID NO: 36374 - RNA, 21 nt, Homo sapiens
cggggugcacgggcggagggc

SEQ ID NO: 36375 - RNA, 23 nt, Homo sapiens
gggagugaagacacggagccaga

SEQ ID NO: 36376 - RNA, 22 nt, Homo sapiens
uggcagcagcggagggggcaga

SEQ ID NO: 36377 - RNA, 22 nt, Homo sapiens
acugccugucugugccugcugu

SEQ ID NO: 36378 - RNA, 22 nt, Homo sapiens
agcugaguguaggauguuuaca

SEQ ID NO: 36379 - RNA, 20 nt, Homo sapiens
ccagcagcaccuggggcagu

SEQ ID NO: 36380 - RNA, 22 nt, Homo sapiens
accagguuccaccccagcaggc

SEQ ID NO: 36381 - RNA, 21 nt, Homo sapiens
auccuguacugagcugccccg

SEQ ID NO: 36382 - RNA, 22 nt, Homo sapiens
aagagggagacccaggcucgga

SEQ ID NO: 36383 - RNA, 22 nt, Homo sapiens
caacuccgauaugcaaugggua

SEQ ID NO: 36384 - RNA, 24 nt, Homo sapiens
acgcgcaggccagagacccaggca

SEQ ID NO: 36385 - RNA, 23 nt, Homo sapiens
ccgcuugagcuaacuccgacccg

SEQ ID NO: 36386 - RNA, 21 nt, Homo sapiens
aacauacaaaggguauccucu

SEQ ID NO: 36387 - RNA, 22 nt, Homo sapiens
caaacaccauugucacacucca

SEQ ID NO: 36388 - RNA, 22 nt, Homo sapiens
ccaguagcacggcucaguccag

SEQ ID NO: 36389 - RNA, 22 nt, Homo sapiens
cgaaggcaacacggauaaccua

SEQ ID NO: 36390 - RNA, 23 nt, Homo sapiens
gaaacccagcagacaauguagcu

SEQ ID NO: 36391 - RNA, 21 nt, Homo sapiens
acccaguagccagauguagcu

SEQ ID NO: 36392 - RNA, 21 nt, Homo sapiens
guguauaugcccauggacugc

SEQ ID NO: 36393 - RNA, 23 nt, Homo sapiens
aguaacugguugaacaacuguaa

SEQ ID NO: 36394 - RNA, 23 nt, Homo sapiens
ggacauuguuucagugcccaagu

SEQ ID NO: 36395 - RNA, 22 nt, Homo sapiens
gugggguggguggucaggccga

SEQ ID NO: 36396 - RNA, 17 nt, Homo sapiens
gggagaggaggaggcga

SEQ ID NO: 36397 - RNA, 22 nt, Homo sapiens
gacucgaaccacugauccagca

SEQ ID NO: 36398 - RNA, 23 nt, Homo sapiens
gaaacccagcagacaauguagcu

SEQ ID NO: 36399 - RNA, 23 nt, Homo sapiens
cggcucugucgucgaggcgcuca

SEQ ID NO: 36400 - RNA, 22 nt, Homo sapiens
gagcccuggacuaggagucagc

SEQ ID NO: 36401 - RNA, 22 nt, Homo sapiens
gaauucaucacggccagccucu

SEQ ID NO: 36402 - RNA, 20 nt, Homo sapiens
aggggccucagccuccuggu

SEQ ID NO: 36403 - RNA, 22 nt, Homo sapiens
gcugaggcuguggggcuggagu

SEQ ID NO: 36404 - RNA, 21 nt, Homo sapiens
auaauggagaccaggccacga

SEQ ID NO: 36405 - RNA, 22 nt, Homo sapiens
gugggguggguggucaggccga

SEQ ID NO: 36406 - RNA, 18 nt, Homo sapiens
cccccaccaccacgcccg

SEQ ID NO: 36407 - RNA, 21 nt, Homo sapiens
gaccaaucgccguccccgccg

SEQ ID NO: 36408 - RNA, 21 nt, Homo sapiens
gaccaaucgccguccccgccg

SEQ ID NO: 36409 - RNA, 22 nt, Homo sapiens
cggugagcacccggccccugcg

SEQ ID NO: 36410 - RNA, 23 nt, Homo sapiens
aaagucucgcucucugccccuca

SEQ ID NO: 36411 - RNA, 22 nt, Homo sapiens
acacaccaaggauaauuucucc

SEQ ID NO: 36412 - RNA, 22 nt, Homo sapiens
gcggucccgcggcgccccgccu

SEQ ID NO: 36413 - RNA, 22 nt, Homo sapiens
gcggucccgcggcgccccgccu

SEQ ID NO: 36414 - RNA, 23 nt, Homo sapiens
ccgcuugagcuaacuccgacccg

SEQ ID NO: 36415 - RNA, 22 nt, Homo sapiens
cuggagagacaaggggaagagg

SEQ ID NO: 36416 - RNA, 22 nt, Homo sapiens
aacccauggaauucaguucuca

SEQ ID NO: 36417 - RNA, 21 nt, Homo sapiens
aagugucagacacgguggugg

SEQ ID NO: 36418 - RNA, 22 nt, Homo sapiens
gagcccuggacuaggagucagc

SEQ ID NO: 36419 - RNA, 22 nt, Homo sapiens
gccagcuaacaauacacugccu

SEQ ID NO: 36420 - RNA, 22 nt, Homo sapiens
aggaaaccagcaaguguugacg

SEQ ID NO: 36421 - RNA, 25 nt, Homo sapiens
acggagcugucccaacaccaccccu

SEQ ID NO: 36422 - RNA, 19 nt, Homo sapiens
ucagcaguaccagccuaga

SEQ ID NO: 36423 - RNA, 21 nt, Homo sapiens
caucaccuuccuucuccucca

SEQ ID NO: 36424 - RNA, 20 nt, Homo sapiens
cccugcgccaucuccucuac

SEQ ID NO: 36425 - RNA, 22 nt, Homo sapiens
cacucuaaagggaggcacuuug

SEQ ID NO: 36426 - RNA, 20 nt, Homo sapiens
aagcagaaaaaggcaaacga

SEQ ID NO: 36427 - RNA, 23 nt, Homo sapiens
agggauuccugggaaaacuggac

SEQ ID NO: 36428 - RNA, 21 nt, Homo sapiens
gaccaaucgccguccccgccg

SEQ ID NO: 36429 - RNA, 22 nt, Homo sapiens
ucagaccgagacaagugcaaug

SEQ ID NO: 36430 - RNA, 22 nt, Homo sapiens
gcggucccgcggcgccccgccu

SEQ ID NO: 36431 - RNA, 22 nt, Homo sapiens
ugcuguuagcccuagccccgca

SEQ ID NO: 36432 - RNA, 22 nt, Homo sapiens
cacucuaaagggaggcacuuug

SEQ ID NO: 36433 - RNA, 22 nt, Homo sapiens
auacauacuucuuuacauucca

SEQ ID NO: 36434 - RNA, 21 nt, Homo sapiens
aaaggccacauccagcaccgu

SEQ ID NO: 36435 - RNA, 23 nt, Homo sapiens
agggauuccugggaaaacuggac

SEQ ID NO: 36436 - RNA, 22 nt, Homo sapiens
ccacacacuuccuuacauucca

SEQ ID NO: 36437 - RNA, 21 nt, Homo sapiens
ggaaaucccuggcaaugugau

SEQ ID NO: 36438 - RNA, 21 nt, Homo sapiens
gguaaucccuggcaaugugau

SEQ ID NO: 36439 - RNA, 21 nt, Homo sapiens
gagcuacagugcuucaucuca

SEQ ID NO: 36440 - RNA, 21 nt, Homo sapiens
cguacgcuauacggucuacua

SEQ ID NO: 36441 - RNA, 22 nt, Homo sapiens
agccacaaucaccuucugaucu

SEQ ID NO: 36442 - RNA, 22 nt, Homo sapiens
agggguucaccgagcaacauuc

SEQ ID NO: 36443 - RNA, 22 nt, Homo sapiens
auaaacgacaccuccuugagaa

SEQ ID NO: 36444 - RNA, 23 nt, Homo sapiens
acagaaagugcuucccucaagag

SEQ ID NO: 36445 - RNA, 22 nt, Homo sapiens
aagaagugcaccgcgaauguuu

SEQ ID NO: 36446 - RNA, 20 nt, Homo sapiens
ggcaaagaaggaacauuccu

SEQ ID NO: 36447 - RNA, 21 nt, Homo sapiens
aggagacucacaaguuccugc

SEQ ID NO: 36448 - RNA, 23 nt, Homo sapiens
gucacaucccucccaagacccuc

SEQ ID NO: 36449 - RNA, 22 nt, Homo sapiens
ccaucuuuaccagacaguguua

SEQ ID NO: 36450 - RNA, 24 nt, Homo sapiens
agugugaguucuaccauugccaaa

SEQ ID NO: 36451 - RNA, 18 nt, Homo sapiens
auucaaucuacugccuca

SEQ ID NO: 36452 - RNA, 21 nt, Homo sapiens
ugcaaacccugcaugugggag

SEQ ID NO: 36453 - RNA, 22 nt, Homo sapiens
acaucguuaccagacaguguua

SEQ ID NO: 36454 - RNA, 22 nt, Homo sapiens
aggcauaggaugacaaagggaa

SEQ ID NO: 36455 - RNA, 23 nt, Homo sapiens
cuaccugcacuaugagcacuuug

SEQ ID NO: 36456 - RNA, 22 nt, Homo sapiens
aggcgaaggaugacaaagggaa

SEQ ID NO: 36457 - RNA, 22 nt, Homo sapiens
acaguucuucaacuggcagcuu

SEQ ID NO: 36458 - RNA, 20 nt, Homo sapiens
gcaaugcaacagcaaugcac

SEQ ID NO: 36459 - RNA, 22 nt, Homo sapiens
gaauucaucacggccagccucu

SEQ ID NO: 36460 - RNA, 22 nt, Homo sapiens
ccucauggaaggguuccccacu

SEQ ID NO: 36461 - RNA, 22 nt, Homo sapiens
ucucacccagggacaaaggauu

SEQ ID NO: 36462 - RNA, 22 nt, Homo sapiens
gauagagugcagaccagggucu

SEQ ID NO: 36463 - RNA, 22 nt, Homo sapiens
aacgcuccaaaagaaggcacuc

SEQ ID NO: 36464 - RNA, 22 nt, Homo sapiens
aacacucuaaaaggaggcacuu

SEQ ID NO: 36465 - RNA, 19 nt, Homo sapiens
auuuugguacagcagcuca

SEQ ID NO: 36466 - RNA, 19 nt, Homo sapiens
agaaaccccagcagagaca

SEQ ID NO: 36467 - RNA, 22 nt, Homo sapiens
cuccuccaacaauccuagacca

SEQ ID NO: 36468 - RNA, 25 nt, Homo sapiens
acggagcugucccaacaccaccccu

SEQ ID NO: 36469 - RNA, 20 nt, Homo sapiens
uacugcuuccacagcucccc

SEQ ID NO: 36470 - RNA, 22 nt, Homo sapiens
cuggagagacaaggggaagagg

SEQ ID NO: 36471 - RNA, 22 nt, Homo sapiens
uaaaugaauucaauuuccuucu

SEQ ID NO: 36472 - RNA, 22 nt, Homo sapiens
agaaaaugccccucaguuuuga

SEQ ID NO: 36473 - RNA, 20 nt, Homo sapiens
gcagaagcauuuccacacac

SEQ ID NO: 36474 - RNA, 23 nt, Homo sapiens
gggagugaagacacggagccaga

SEQ ID NO: 36475 - RNA, 23 nt, Homo sapiens
gaacagguagucugaacacuggg

SEQ ID NO: 36476 - RNA, 23 nt, Homo sapiens
gaacagauagucuaaacacuggg

SEQ ID NO: 36477 - RNA, 23 nt, Homo sapiens
ucaguuuugcauagauuugcaca

SEQ ID NO: 36478 - RNA, 22 nt, Homo sapiens
cacucagcaccaggauauuguu

SEQ ID NO: 36479 - RNA, 22 nt, Homo sapiens
aacuaugcaaccuacuaccucu

SEQ ID NO: 36480 - RNA, 23 nt, Homo sapiens
aaaucagaaucacaccuggggga

SEQ ID NO: 36481 - RNA, 22 nt, Homo sapiens
gcaaaaguaacugcaguuuugg

SEQ ID NO: 36482 - RNA, 24 nt, Homo sapiens
acgcagagcccgaaagcccccagu

SEQ ID NO: 36483 - RNA, 22 nt, Homo sapiens
gacucuugaacaacacagguuu

SEQ ID NO: 36484 - RNA, 22 nt, Homo sapiens
cacauggccaaaacagagaaga

SEQ ID NO: 36485 - RNA, 21 nt, Homo sapiens
ugcaggcugaucuucuucucu

SEQ ID NO: 36486 - RNA, 18 nt, Homo sapiens
aucacauucaccucccug

SEQ ID NO: 36487 - RNA, 23 nt, Homo sapiens
ucacauaggaauaaaaagccaua

SEQ ID NO: 36488 - RNA, 25 nt, Homo sapiens
agcuagucaagcgcgguuguggggg

SEQ ID NO: 36489 - RNA, 21 nt, Homo sapiens
acaggauugagggggggcccu

SEQ ID NO: 36490 - RNA, 21 nt, Homo sapiens
acaggauugagggggggcccu

SEQ ID NO: 36491 - RNA, 22 nt, Homo sapiens
cucccuucuuuccucccgucuu

SEQ ID NO: 36492 - RNA, 18 nt, Homo sapiens
acccucugaaaggaagca

SEQ ID NO: 36493 - RNA, 22 nt, Homo sapiens
aaagugcuucuuaccuccagau

SEQ ID NO: 36494 - RNA, 21 nt, Homo sapiens
agguaauaccaauaccuugug

SEQ ID NO: 36495 - RNA, 23 nt, Homo sapiens
acaacaaaaucacuagucuucca

SEQ ID NO: 36496 - RNA, 20 nt, Homo sapiens
cccugcgccaucuccucuac

SEQ ID NO: 36497 - RNA, 22 nt, Homo sapiens
ucucucccauuagaguugaaaa

SEQ ID NO: 36498 - RNA, 22 nt, Homo sapiens
cacgaccgacgccacgccgagu

SEQ ID NO: 36499 - RNA, 18 nt, Homo sapiens
aucacauucaccucccug

SEQ ID NO: 36500 - RNA, 23 nt, Homo sapiens
gggagugaagacacggagccaga

SEQ ID NO: 36501 - RNA, 23 nt, Homo sapiens
gggagugaagacacggagccaga

SEQ ID NO: 36502 - RNA, 21 nt, Homo sapiens
ugcaaacccugcaugugggag

SEQ ID NO: 36503 - RNA, 22 nt, Homo sapiens
ucagccgcugucacacgcacag

SEQ ID NO: 36504 - RNA, 22 nt, Homo sapiens
cgggacguccagacucaacucu

SEQ ID NO: 36505 - RNA, 22 nt, Homo sapiens
ucagaccgagacaagugcaaug

SEQ ID NO: 36506 - RNA, 22 nt, Homo sapiens
cucaauagacugugagcuccuu

SEQ ID NO: 36507 - RNA, 22 nt, Homo sapiens
aagcgguuuaccaucccacaua

SEQ ID NO: 36508 - RNA, 22 nt, Homo sapiens
gauuccaauuuuuccacaucuu

SEQ ID NO: 36509 - RNA, 21 nt, Homo sapiens
acugaucuagagaacacaaga

SEQ ID NO: 36510 - RNA, 20 nt, Homo sapiens
aggggccucagccuccuggu

SEQ ID NO: 36511 - RNA, 23 nt, Homo sapiens
cccagcuagauuguaagcuccuu

SEQ ID NO: 36512 - RNA, 20 nt, Homo sapiens
uccccacagacccagagccg

SEQ ID NO: 36513 - RNA, 22 nt, Homo sapiens
ucagaccgagacaagugcaaug

SEQ ID NO: 36514 - RNA, 23 nt, Homo sapiens
acauuuuucguuauugcucuuga

SEQ ID NO: 36515 - RNA, 23 nt, Homo sapiens
aaaucagaaucacaccuggggga

SEQ ID NO: 36516 - RNA, 21 nt, Homo sapiens
aagacgggaggagaggaguga

SEQ ID NO: 36517 - RNA, 24 nt, Homo sapiens
cagaaagugcuuucuuuuggagaa

SEQ ID NO: 36518 - RNA, 18 nt, Homo sapiens
acccucugaaaggaagca

SEQ ID NO: 36519 - RNA, 22 nt, Homo sapiens
aaagugcuucuuaccuccagau

SEQ ID NO: 36520 - RNA, 22 nt, Homo sapiens
aacacucuaaaaggaggcacuu

SEQ ID NO: 36521 - RNA, 21 nt, Homo sapiens
gcugaggucugggccaggucu

SEQ ID NO: 36522 - RNA, 24 nt, Homo sapiens
acgcagagcccgaaagcccccagu

SEQ ID NO: 36523 - RNA, 23 nt, Homo sapiens
guagugggccgagccgagugaca

SEQ ID NO: 36524 - RNA, 21 nt, Homo sapiens
caucaccuuccuucuccucca

SEQ ID NO: 36525 - RNA, 19 nt, Homo sapiens
aagccaaagccuuauccau

SEQ ID NO: 36526 - RNA, 18 nt, Homo sapiens
uggcgccugaacagggac

SEQ ID NO: 36527 - RNA, 17 nt, Homo sapiens
uggcgcccgaacaggga

SEQ ID NO: 36528 - RNA, 22 nt, Homo sapiens
agaaaaugccccucaguuuuga

SEQ ID NO: 36529 - RNA, 22 nt, Homo sapiens
uccacauggaguugcuguuaca

SEQ ID NO: 36530 - RNA, 22 nt, Homo sapiens
aaucagucucauugcuuuauaa

SEQ ID NO: 36531 - RNA, 22 nt, Homo sapiens
uuucaguuaucaaucugucaca

SEQ ID NO: 36532 - RNA, 22 nt, Homo sapiens
gcaaaaguaauugccaguuuug

SEQ ID NO: 36533 - RNA, 22 nt, Homo sapiens
ugcaaaaguagucucaguuuuu

SEQ ID NO: 36534 - RNA, 19 nt, Homo sapiens
aaaaguaauuacaguuuuu

SEQ ID NO: 36535 - RNA, 22 nt, Homo sapiens
guacaaaaguaauuacaguuuu

SEQ ID NO: 36536 - RNA, 22 nt, Homo sapiens
gcaaaaguaacugcaguuuugg

SEQ ID NO: 36537 - RNA, 21 nt, Homo sapiens
agacacaccacggcacacuuc

SEQ ID NO: 36538 - RNA, 20 nt, Homo sapiens
agagaugagagaaacacccu

SEQ ID NO: 36539 - RNA, 22 nt, Homo sapiens
ccccccacugggccguacccac

SEQ ID NO: 36540 - RNA, 22 nt, Homo sapiens
acucaguaugccaggguaccau

SEQ ID NO: 36541 - RNA, 18 nt, Homo sapiens
cccccaccaccacgcccg

SEQ ID NO: 36542 - RNA, 17 nt, Homo sapiens
uggcgcccgaacaggga

SEQ ID NO: 36543 - RNA, 24 nt, Homo sapiens
acugcuggucuucagucagggcca

SEQ ID NO: 36544 - RNA, 22 nt, Homo sapiens
ccagaacugaguccacagggca

SEQ ID NO: 36545 - RNA, 21 nt, Homo sapiens
gaccaaucgccguccccgccg

SEQ ID NO: 36546 - RNA, 22 nt, Homo sapiens
cccaacaacaugaaacuaccua

SEQ ID NO: 36547 - RNA, 22 nt, Homo sapiens
ucaacaucagucugauaagcua

SEQ ID NO: 36548 - RNA, 23 nt, Homo sapiens
aaaucagaaucacaccuggggga

SEQ ID NO: 36549 - RNA, 22 nt, Homo sapiens
ucaccauugcuaaagugcaauu

SEQ ID NO: 36550 - RNA, 21 nt, Homo sapiens
aaaacaaaaucucaccguuuu

SEQ ID NO: 36551 - RNA, 21 nt, Homo sapiens
cagguaccaauauuuuaucua

SEQ ID NO: 36552 - RNA, 24 nt, Homo sapiens
acgcagagcccgaaagcccccagu

SEQ ID NO: 36553 - RNA, 22 nt, Homo sapiens
gcggucccgcggcgccccgccu

SEQ ID NO: 36554 - RNA, 22 nt, Homo sapiens
ugcuguuagcccuagccccgca

SEQ ID NO: 36555 - RNA, 21 nt, Homo sapiens
ggggagcgggggcccugccuu

SEQ ID NO: 36556 - RNA, 21 nt, Homo sapiens
cggcucggguggcggcgacgg

SEQ ID NO: 36557 - RNA, 21 nt, Homo sapiens
cugaggagagaggaggugggg

SEQ ID NO: 36558 - RNA, 22 nt, Homo sapiens
cugggggcggcacaggggcuca

SEQ ID NO: 36559 - RNA, 22 nt, Homo sapiens
gugggguggguggucaggccga

SEQ ID NO: 36560 - RNA, 22 nt, Homo sapiens
ugaagaagggggggaagggcgu

SEQ ID NO: 36561 - RNA, 22 nt, Homo sapiens
acaaccagcuaagacacugcca

SEQ ID NO: 36562 - RNA, 23 nt, Homo sapiens
gcaaucagcuaacuacacugccu

SEQ ID NO: 36563 - RNA, 22 nt, Homo sapiens
accagcuaacaauacacugcca

SEQ ID NO: 36564 - RNA, 22 nt, Homo sapiens
gccagcuaacaauacacugccu

SEQ ID NO: 36565 - RNA, 19 nt, Homo sapiens
uagcauacagauacgccca

SEQ ID NO: 36566 - RNA, 25 nt, Homo sapiens
acggagcugucccaacaccaccccu

SEQ ID NO: 36567 - RNA, 20 nt, Homo sapiens
uccccacagacccagagccg

SEQ ID NO: 36568 - RNA, 23 nt, Homo sapiens
agaaaccaugggguaugagcaga

SEQ ID NO: 36569 - RNA, 20 nt, Homo sapiens
uacugcuuccacagcucccc

SEQ ID NO: 36570 - RNA, 20 nt, Homo sapiens
uacugcuuccacagcucccc

SEQ ID NO: 36571 - RNA, 22 nt, Homo sapiens
ggcucccaagaaccucaccugu

SEQ ID NO: 36572 - RNA, 22 nt, Homo sapiens
auaaggauuuuuaggggcauua

SEQ ID NO: 36573 - RNA, 22 nt, Homo sapiens
cacuuagcagguuguauuauau

SEQ ID NO: 36574 - RNA, 21 nt, Homo sapiens
gaccaagaaauagccuuucaa

SEQ ID NO: 36575 - RNA, 22 nt, Homo sapiens
cagcauggaguccuccagguug

SEQ ID NO: 36576 - RNA, 22 nt, Homo sapiens
gcaaagguaauugcuguuuucg

SEQ ID NO: 36577 - RNA, 22 nt, Homo sapiens
gccaccuucaaaugggaagucu

SEQ ID NO: 36578 - RNA, 24 nt, Homo sapiens
acugggcacaaacauguccagguc

SEQ ID NO: 36579 - RNA, 23 nt, Homo sapiens
acccaacagccccugcaagggau

SEQ ID NO: 36580 - RNA, 21 nt, Homo sapiens
agguaauaccaauaccuugug

SEQ ID NO: 36581 - RNA, 20 nt, Homo sapiens
uacugcuuccacagcucccc

SEQ ID NO: 36582 - RNA, 20 nt, Homo sapiens
cucaaagcaaacccugcaga

SEQ ID NO: 36583 - RNA, 22 nt, Homo sapiens
ccaucuuuaccagacaguguua

SEQ ID NO: 36584 - RNA, 22 nt, Homo sapiens
ccagaacugaguccacagggca

SEQ ID NO: 36585 - RNA, 22 nt, Homo sapiens
cggugagcacccggccccugcg

SEQ ID NO: 36586 - RNA, 22 nt, Homo sapiens
acugggacuuuguaggccaguu

SEQ ID NO: 36587 - RNA, 22 nt, Homo sapiens
agcgggacuuugagggccaguu

SEQ ID NO: 36588 - RNA, 22 nt, Homo sapiens
cccaacaacaugaaacuaccua

SEQ ID NO: 36589 - RNA, 22 nt, Homo sapiens
acaucguuaccagacaguguua

SEQ ID NO: 36590 - RNA, 22 nt, Homo sapiens
agucuucacaacagcccugugu

SEQ ID NO: 36591 - RNA, 22 nt, Homo sapiens
cuuccagucgaggauguuuaca

SEQ ID NO: 36592 - RNA, 22 nt, Homo sapiens
cuuccagucggggauguuuaca

SEQ ID NO: 36593 - RNA, 22 nt, Homo sapiens
cuuccagucaaggauguuuaca

SEQ ID NO: 36594 - RNA, 18 nt, Homo sapiens
augacaccucccugugaa

SEQ ID NO: 36595 - RNA, 21 nt, Homo sapiens
cccgaggagccgggcaggcuu

SEQ ID NO: 36596 - RNA, 23 nt, Homo sapiens
ggacauuguuucagugcccaagu

SEQ ID NO: 36597 - RNA, 22 nt, Homo sapiens
ugcuguuagcccuagccccgca

SEQ ID NO: 36598 - RNA, 20 nt, Homo sapiens
uccccacagacccagagccg

SEQ ID NO: 36599 - RNA, 22 nt, Homo sapiens
ucggucccucgggccagggcag

SEQ ID NO: 36600 - RNA, 21 nt, Homo sapiens
cugaggagagaggaggugggg

SEQ ID NO: 36601 - RNA, 18 nt, Homo sapiens
ugguggcagaggugggau

SEQ ID NO: 36602 - RNA, 21 nt, Homo sapiens
cggggugcacgggcggagggc

SEQ ID NO: 36603 - RNA, 22 nt, Homo sapiens
acaaaguucuguagugcacuga

SEQ ID NO: 36604 - RNA, 22 nt, Homo sapiens
acaaaguucugugaugcacuga

SEQ ID NO: 36605 - RNA, 23 nt, Homo sapiens
gggagugaagacacggagccaga

SEQ ID NO: 36606 - RNA, 21 nt, Homo sapiens
ccaaguucugucaugcacuga

SEQ ID NO: 36607 - RNA, 22 nt, Homo sapiens
ucaggaacugccuuucucucca

SEQ ID NO: 36608 - RNA, 22 nt, Homo sapiens
cuagugguccuaaacauuucac

SEQ ID NO: 36609 - RNA, 22 nt, Homo sapiens
cagacuccgguggaaugaagga

SEQ ID NO: 36610 - RNA, 22 nt, Homo sapiens
cuuccagucgaggauguuuaca

SEQ ID NO: 36611 - RNA, 22 nt, Homo sapiens
cuuccagucggggauguuuaca

SEQ ID NO: 36612 - RNA, 22 nt, Homo sapiens
cuuccagucaaggauguuuaca

SEQ ID NO: 36613 - RNA, 22 nt, Homo sapiens
auaaggauuuuuaggggcauua

SEQ ID NO: 36614 - RNA, 23 nt, Homo sapiens
ccacccaaugaccuacuccaaga

SEQ ID NO: 36615 - RNA, 20 nt, Homo sapiens
gaaagggcuucccuuugcag

SEQ ID NO: 36616 - RNA, 20 nt, Homo sapiens
gaaagggcuucccuuugcag

SEQ ID NO: 36617 - RNA, 22 nt, Homo sapiens
ugcaagccuugggugugggagg

SEQ ID NO: 36618 - RNA, 20 nt, Homo sapiens
uccccacagacccagagccg

SEQ ID NO: 36619 - RNA, 21 nt, Homo sapiens
cggcucggguggcggcgacgg

SEQ ID NO: 36620 - RNA, 23 nt, Homo sapiens
ggaagccaucaagucgcugcagg

SEQ ID NO: 36621 - RNA, 20 nt, Homo sapiens
cucaaagcaaacccugcaga

SEQ ID NO: 36622 - RNA, 18 nt, Homo sapiens
gaaaugagggccagcuga

SEQ ID NO: 36623 - RNA, 21 nt, Homo sapiens
gaccaaucgccguccccgccg

SEQ ID NO: 36624 - RNA, 23 nt, Homo sapiens
ucaacgggagugaucgugucauu

SEQ ID NO: 36625 - RNA, 23 nt, Homo sapiens
ugcgggcgggacgagcaagcaca

SEQ ID NO: 36626 - RNA, 24 nt, Homo sapiens
acgcgcaggccagagacccaggca

SEQ ID NO: 36627 - RNA, 22 nt, Homo sapiens
gcggucccgcggcgccccgccu

SEQ ID NO: 36628 - RNA, 22 nt, Homo sapiens
ugcuguuagcccuagccccgca

SEQ ID NO: 36629 - RNA, 22 nt, Homo sapiens
uauccacuacaccccgcugccu

SEQ ID NO: 36630 - RNA, 20 nt, Homo sapiens
ggcauucaccgcgugccuua

SEQ ID NO: 36631 - RNA, 22 nt, Homo sapiens
uaaaugaauucaauuuccuucu

SEQ ID NO: 36632 - RNA, 22 nt, Homo sapiens
uacaucuggacagccgaaugaa

SEQ ID NO: 36633 - RNA, 20 nt, Homo sapiens
acagcaaggagggcaggagg

SEQ ID NO: 36634 - RNA, 22 nt, Homo sapiens
cagacuccgguggaaugaagga

SEQ ID NO: 36635 - RNA, 20 nt, Homo sapiens
acauuacuguuaucaaaaca

SEQ ID NO: 36636 - RNA, 22 nt, Homo sapiens
acugccugucugugccugcugu

SEQ ID NO: 36637 - RNA, 21 nt, Homo sapiens
gcggaacuuagccacugugaa

SEQ ID NO: 36638 - RNA, 21 nt, Homo sapiens
gcagaacuuagccacugugaa

SEQ ID NO: 36639 - RNA, 22 nt, Homo sapiens
aaucagucucauugcuuuauaa

SEQ ID NO: 36640 - RNA, 22 nt, Homo sapiens
accagguuccaccccagcaggc

SEQ ID NO: 36641 - RNA, 23 nt, Homo sapiens
acaccccaaaaucgaagcacuuc

SEQ ID NO: 36642 - RNA, 22 nt, Homo sapiens
cgauguaguccaaaggcacaua

SEQ ID NO: 36643 - RNA, 21 nt, Homo sapiens
ucuacucagaagggugccuua

SEQ ID NO: 36644 - RNA, 22 nt, Homo sapiens
cugcucaaacccuccaaugacu

SEQ ID NO: 36645 - RNA, 21 nt, Homo sapiens
caucaccuuccuucuccucca

SEQ ID NO: 36646 - RNA, 21 nt, Homo sapiens
ugacugacagcuuuuugagua

SEQ ID NO: 36647 - RNA, 22 nt, Homo sapiens
gggagaggucucccugcgcaca

SEQ ID NO: 36648 - RNA, 21 nt, Homo sapiens
cugaggagagaggaggugggg

SEQ ID NO: 36649 - RNA, 22 nt, Homo sapiens
ggcucccaagaaccucaccugu

SEQ ID NO: 36650 - RNA, 23 nt, Homo sapiens
gggagugaagacacggagccaga

SEQ ID NO: 36651 - RNA, 21 nt, Homo sapiens
uugucuaaccagucaccuguu

SEQ ID NO: 36652 - RNA, 20 nt, Homo sapiens
ugucuccacagggcucuuua

SEQ ID NO: 36653 - RNA, 22 nt, Homo sapiens
agugaauucuaccagugccaua

SEQ ID NO: 36654 - RNA, 23 nt, Homo sapiens
aagaaucuugucccgcagguccu

SEQ ID NO: 36655 - RNA, 22 nt, Homo sapiens
cuacccacagacguaccaauca

SEQ ID NO: 36656 - RNA, 19 nt, Homo sapiens
gccugcugacaccgugccu

SEQ ID NO: 36657 - RNA, 20 nt, Homo sapiens
uccccacagacccagagccg

SEQ ID NO: 36658 - RNA, 21 nt, Homo sapiens
caucaccuuccuucuccucca

SEQ ID NO: 36659 - RNA, 17 nt, Homo sapiens
gggagaggaggaggcga

SEQ ID NO: 36660 - RNA, 21 nt, Homo sapiens
agggcucaucuugguccugca

SEQ ID NO: 36661 - RNA, 22 nt, Homo sapiens
cacgaccgacgccacgccgagu

SEQ ID NO: 36662 - RNA, 22 nt, Homo sapiens
ggagcccgcgccccgcgccgag

SEQ ID NO: 36663 - RNA, 21 nt, Homo sapiens
cggggugcacgggcggagggc

SEQ ID NO: 36664 - RNA, 23 nt, Homo sapiens
gggagugaagacacggagccaga

SEQ ID NO: 36665 - RNA, 21 nt, Homo sapiens
gaccaaucgccguccccgccg

SEQ ID NO: 36666 - RNA, 22 nt, Homo sapiens
cagaagugggccgggcacaggg

SEQ ID NO: 36667 - RNA, 22 nt, Homo sapiens
ucagaccgagacaagugcaaug

SEQ ID NO: 36668 - RNA, 22 nt, Homo sapiens
gauccgagcaccggggaccccc

SEQ ID NO: 36669 - RNA, 25 nt, Homo sapiens
accaacggaccuacuucccuccgcc

SEQ ID NO: 36670 - RNA, 22 nt, Homo sapiens
gcggucccgcggcgccccgccu

SEQ ID NO: 36671 - RNA, 22 nt, Homo sapiens
ugcuguuagcccuagccccgca

SEQ ID NO: 36672 - RNA, 21 nt, Homo sapiens
aagggucaguaagcacccgcg

SEQ ID NO: 36673 - RNA, 23 nt, Homo sapiens
agggauuccugggaaaacuggac

SEQ ID NO: 36674 - RNA, 23 nt, Homo sapiens
gggagugaagacacggagccaga

SEQ ID NO: 36675 - RNA, 22 nt, Homo sapiens
agcugaguguaggauguuuaca

SEQ ID NO: 36676 - RNA, 23 nt, Homo sapiens
aaagucucgcucucugccccuca

SEQ ID NO: 36677 - RNA, 22 nt, Homo sapiens
ugcaagccuugggugugggagg

SEQ ID NO: 36678 - RNA, 21 nt, Homo sapiens
cugcugggccacaacguggga

SEQ ID NO: 36679 - RNA, 23 nt, Homo sapiens
ccgcuugagcuaacuccgacccg

SEQ ID NO: 36680 - RNA, 22 nt, Homo sapiens
cacucuaaagggaggcacuuug

SEQ ID NO: 36681 - RNA, 27 nt, Homo sapiens
uuuagcacagugcuuauacaagaaggu

SEQ ID NO: 36682 - RNA, 23 nt, Homo sapiens
aaaaugcagauuccuggacucca

SEQ ID NO: 36683 - RNA, 22 nt, Homo sapiens
ucccucacacagaauuccagaa

SEQ ID NO: 36684 - RNA, 22 nt, Homo sapiens
augcuuuuugggguaagggcuu

SEQ ID NO: 36685 - RNA, 23 nt, Homo sapiens
gggagugaagacacggagccaga

SEQ ID NO: 36686 - RNA, 22 nt, Homo sapiens
uauucaggaacauauugcaaaa

SEQ ID NO: 36687 - RNA, 21 nt, Homo sapiens
acaauccuagagcacaagaag

SEQ ID NO: 36688 - RNA, 22 nt, Homo sapiens
caagacacauuuggagagggac

SEQ ID NO: 36689 - RNA, 22 nt, Homo sapiens
ugcuguuagcccuagccccgca

SEQ ID NO: 36690 - RNA, 18 nt, Homo sapiens
gaaaugagggccagcuga

SEQ ID NO: 36691 - RNA, 23 nt, Homo sapiens
cuaucugcacuagaugcaccuua

SEQ ID NO: 36692 - RNA, 21 nt, Homo sapiens
gaccaaucgccguccccgccg

SEQ ID NO: 36693 - RNA, 22 nt, Homo sapiens
acaguucuucaacuggcagcuu

SEQ ID NO: 36694 - RNA, 21 nt, Homo sapiens
ucaaucacagauagcaccccu

SEQ ID NO: 36695 - RNA, 22 nt, Homo sapiens
cucagagcagacgugguucuca

SEQ ID NO: 36696 - RNA, 22 nt, Homo sapiens
gcggucccgcggcgccccgccu

SEQ ID NO: 36697 - RNA, 23 nt, Homo sapiens
cacugugggcccucuccgcacca

SEQ ID NO: 36698 - RNA, 22 nt, Homo sapiens
aucagagcccucugagcuucag

SEQ ID NO: 36699 - RNA, 23 nt, Homo sapiens
cuacgcguauucuuaagcaauaa

SEQ ID NO: 36700 - RNA, 22 nt, Homo sapiens
acaaaguucuguagugcacuga

SEQ ID NO: 36701 - RNA, 22 nt, Homo sapiens
agagagagucugcccuuguaua

SEQ ID NO: 36702 - RNA, 21 nt, Homo sapiens
acguggauuuuccucuaugau

SEQ ID NO: 36703 - RNA, 22 nt, Homo sapiens
acagagagcuugcccuuguaua

SEQ ID NO: 36704 - RNA, 20 nt, Homo sapiens
uaugaacaauuucuaggaau

SEQ ID NO: 36705 - RNA, 23 nt, Homo sapiens
acacucuaaagagaagcgcuuug

SEQ ID NO: 36706 - RNA, 21 nt, Homo sapiens
agaaaguacuucccucuggag

SEQ ID NO: 36707 - RNA, 21 nt, Homo sapiens
agaaagugcaucccucuggag

SEQ ID NO: 36708 - RNA, 22 nt, Homo sapiens
cuaccugagcuagcauacaagu

SEQ ID NO: 36709 - RNA, 22 nt, Homo sapiens
cucauccgauguacaauaauuu

SEQ ID NO: 36710 - RNA, 22 nt, Homo sapiens
caaacaccauugucacacucca

SEQ ID NO: 36711 - RNA, 17 nt, Homo sapiens
gggagaggaggaggcga

SEQ ID NO: 36712 - RNA, 20 nt, Homo sapiens
aagcagaaaaaggcaaacga

SEQ ID NO: 36713 - RNA, 21 nt, Homo sapiens
gaccaaucgccguccccgccg

SEQ ID NO: 36714 - RNA, 22 nt, Homo sapiens
ucagaccgagacaagugcaaug

SEQ ID NO: 36715 - RNA, 22 nt, Homo sapiens
aagagggagacccaggcucgga

SEQ ID NO: 36716 - RNA, 22 nt, Homo sapiens
gauccgagcaccggggaccccc

SEQ ID NO: 36717 - RNA, 25 nt, Homo sapiens
accaacggaccuacuucccuccgcc

SEQ ID NO: 36718 - RNA, 22 nt, Homo sapiens
gcggucccgcggcgccccgccu

SEQ ID NO: 36719 - RNA, 20 nt, Homo sapiens
aggggccucagccuccuggu

SEQ ID NO: 36720 - RNA, 22 nt, Homo sapiens
ugcuguuagcccuagccccgca

SEQ ID NO: 36721 - RNA, 23 nt, Homo sapiens
ccgcuugagcuaacuccgacccg

SEQ ID NO: 36722 - RNA, 17 nt, Homo sapiens
ggguggcagcgguggga

SEQ ID NO: 36723 - RNA, 21 nt, Homo sapiens
ucaaucacagauagcaccccu

SEQ ID NO: 36724 - RNA, 23 nt, Homo sapiens
cugcagaacuguucccgcugcua

SEQ ID NO: 36725 - RNA, 23 nt, Homo sapiens
acagcgcucgcaaccgcagcgau

SEQ ID NO: 36726 - RNA, 23 nt, Homo sapiens
cacugugggcccucuccgcacca

SEQ ID NO: 36727 - RNA, 17 nt, Homo sapiens
uggaggccccagcgaga

SEQ ID NO: 36728 - RNA, 22 nt, Homo sapiens
ugcuguuagcccuagccccgca

SEQ ID NO: 36729 - RNA, 21 nt, Homo sapiens
caucaccuuccuucuccucca

SEQ ID NO: 36730 - RNA, 20 nt, Homo sapiens
uacugcuuccacagcucccc

SEQ ID NO: 36731 - RNA, 21 nt, Homo sapiens
uucaguuaucacaguacugua

SEQ ID NO: 36732 - RNA, 23 nt, Homo sapiens
ggaagccaucaagucgcugcagg

SEQ ID NO: 36733 - RNA, 21 nt, Homo sapiens
cucccccacugcagcuggcac

SEQ ID NO: 36734 - RNA, 20 nt, Homo sapiens
cucaaagcaaacccugcaga

SEQ ID NO: 36735 - RNA, 18 nt, Homo sapiens
gaaaugagggccagcuga

SEQ ID NO: 36736 - RNA, 18 nt, Homo sapiens
gaaaugagggccagcuga

SEQ ID NO: 36737 - RNA, 20 nt, Homo sapiens
cugcgggaggacagggcuca

SEQ ID NO: 36738 - RNA, 22 nt, Homo sapiens
ucaggaacugccuuucucucca

SEQ ID NO: 36739 - RNA, 23 nt, Homo sapiens
cagcugcuuuugggauuccguug

SEQ ID NO: 36740 - RNA, 23 nt, Homo sapiens
uccaucauuacccggcaguauua

SEQ ID NO: 36741 - RNA, 24 nt, Homo sapiens
acucacaccuagguuccaaggauu

SEQ ID NO: 36742 - RNA, 21 nt, Homo sapiens
uagcacccagauagcaaggau

SEQ ID NO: 36743 - RNA, 23 nt, Homo sapiens
gggcucuuacucccucaggcacu

SEQ ID NO: 36744 - RNA, 17 nt, Homo sapiens
uggaggccccagcgaga

SEQ ID NO: 36745 - RNA, 22 nt, Homo sapiens
gcugaggcuguggggcuggagu

SEQ ID NO: 36746 - RNA, 20 nt, Homo sapiens
ugucuccacagggcucuuua

SEQ ID NO: 36747 - RNA, 22 nt, Homo sapiens
cacaucucacuguagccucaaa

SEQ ID NO: 36748 - RNA, 22 nt, Homo sapiens
augcccuuucaucauugcacug

SEQ ID NO: 36749 - RNA, 21 nt, Homo sapiens
cggggugcacgggcggagggc

SEQ ID NO: 36750 - RNA, 21 nt, Homo sapiens
ugcaaacccugcaugugggag

SEQ ID NO: 36751 - RNA, 20 nt, Homo sapiens
cccgccgcgucgcccugggg

SEQ ID NO: 36752 - RNA, 22 nt, Homo sapiens
ggagagccuccacccaacccuc

SEQ ID NO: 36753 - RNA, 21 nt, Homo sapiens
acaggauugagggggggcccu

SEQ ID NO: 36754 - RNA, 22 nt, Homo sapiens
aagcgguuuaccaucccacaua

SEQ ID NO: 36755 - RNA, 22 nt, Homo sapiens
auaaggauuuuuaggggcauua

SEQ ID NO: 36756 - RNA, 18 nt, Homo sapiens
acccucugaaaggaagca

SEQ ID NO: 36757 - RNA, 22 nt, Homo sapiens
aaagugcuucuuaccuccagau

SEQ ID NO: 36758 - RNA, 19 nt, Homo sapiens
auuuugguacagcagcuca

SEQ ID NO: 36759 - RNA, 25 nt, Homo sapiens
acggagcugucccaacaccaccccu

SEQ ID NO: 36760 - RNA, 23 nt, Homo sapiens
cuccagccccuccagggcuuccu

SEQ ID NO: 36761 - RNA, 22 nt, Homo sapiens
cacucuaaagggaggcacuuug

SEQ ID NO: 36762 - RNA, 20 nt, Homo sapiens
uacugcuuccacagcucccc

SEQ ID NO: 36763 - RNA, 21 nt, Homo sapiens
cucccccacugcagcuggcac

SEQ ID NO: 36764 - RNA, 20 nt, Homo sapiens
cucaaagcaaacccugcaga

SEQ ID NO: 36765 - RNA, 20 nt, Homo sapiens
cucaaagcaaacccugcaga

SEQ ID NO: 36766 - RNA, 21 nt, Homo sapiens
cugaggagagaggaggugggg

SEQ ID NO: 36767 - RNA, 20 nt, Homo sapiens
cugcgggaggacagggcuca

SEQ ID NO: 36768 - RNA, 21 nt, Homo sapiens
cugggggacggagcagaagga

SEQ ID NO: 36769 - RNA, 21 nt, Homo sapiens
aguagugcuuucuacuuuaug

SEQ ID NO: 36770 - RNA, 23 nt, Homo sapiens
gggagugaagacacggagccaga

SEQ ID NO: 36771 - RNA, 23 nt, Homo sapiens
cuaucugcacuagaugcaccuua

SEQ ID NO: 36772 - RNA, 22 nt, Homo sapiens
ccucauggaaggguuccccacu

SEQ ID NO: 36773 - RNA, 21 nt, Homo sapiens
cccgaggagccgggcaggcuu

SEQ ID NO: 36774 - RNA, 21 nt, Homo sapiens
gaaggaagugagugcagccac

SEQ ID NO: 36775 - RNA, 20 nt, Homo sapiens
uacugcuuccacagcucccc

SEQ ID NO: 36776 - RNA, 21 nt, Homo sapiens
gagcugcauccuggcuccggg

SEQ ID NO: 36777 - RNA, 18 nt, Homo sapiens
ugguggcagaggugggau

SEQ ID NO: 36778 - RNA, 22 nt, Homo sapiens
cacgaccgacgccacgccgagu

SEQ ID NO: 36779 - RNA, 22 nt, Homo sapiens
ggagcccgcgccccgcgccgag

SEQ ID NO: 36780 - RNA, 23 nt, Homo sapiens
aggaacagcagcagcccgggccg

SEQ ID NO: 36781 - RNA, 21 nt, Homo sapiens
gggcaucugggacgcgcagga

SEQ ID NO: 36782 - RNA, 22 nt, Homo sapiens
cggugagcacccggccccugcg

SEQ ID NO: 36783 - RNA, 22 nt, Homo sapiens
ucagaccgagacaagugcaaug

SEQ ID NO: 36784 - RNA, 19 nt, Homo sapiens
auuuugguacagcagcuca

SEQ ID NO: 36785 - RNA, 25 nt, Homo sapiens
acggagcugucccaacaccaccccu

SEQ ID NO: 36786 - RNA, 23 nt, Homo sapiens
cugugggagggcaguggugagag

SEQ ID NO: 36787 - RNA, 22 nt, Homo sapiens
cuggagagacaaggggaagagg

SEQ ID NO: 36788 - RNA, 22 nt, Homo sapiens
ucccucacacagaauuccagaa

SEQ ID NO: 36789 - RNA, 22 nt, Homo sapiens
augcuuuuugggguaagggcuu

SEQ ID NO: 36790 - RNA, 18 nt, Homo sapiens
cagcagccuccuucucaa

SEQ ID NO: 36791 - RNA, 22 nt, Homo sapiens
aagauguggaccauauuacaua

SEQ ID NO: 36792 - RNA, 23 nt, Homo sapiens
ucucacccagguagcaaggauua

SEQ ID NO: 36793 - RNA, 21 nt, Homo sapiens
uagcacccagauagcaaggau

SEQ ID NO: 36794 - RNA, 22 nt, Homo sapiens
aguccagauucugugcccacca

SEQ ID NO: 36795 - RNA, 19 nt, Homo sapiens
gggaaacguaugucaaccu

SEQ ID NO: 36796 - RNA, 22 nt, Homo sapiens
ucggucccucgggccagggcag

SEQ ID NO: 36797 - RNA, 22 nt, Homo sapiens
ugaauuacuuuguaaaccacca

SEQ ID NO: 36798 - RNA, 17 nt, Homo sapiens
gggagaggaggaggcga

SEQ ID NO: 36799 - RNA, 21 nt, Homo sapiens
gaccaaucgccguccccgccg

SEQ ID NO: 36800 - RNA, 21 nt, Homo sapiens
uucuaggauaggcccaggggc

SEQ ID NO: 36801 - RNA, 22 nt, Homo sapiens
aguccagauucugugcccacca

SEQ ID NO: 36802 - RNA, 19 nt, Homo sapiens
guccugaauuccgcagccu

SEQ ID NO: 36803 - RNA, 25 nt, Homo sapiens
acggagcugucccaacaccaccccu

SEQ ID NO: 36804 - RNA, 22 nt, Homo sapiens
gcacauguucugcggcccacca

SEQ ID NO: 36805 - RNA, 22 nt, Homo sapiens
gcggucccgcggcgccccgccu

SEQ ID NO: 36806 - RNA, 23 nt, Homo sapiens
cacugugggcccucuccgcacca

SEQ ID NO: 36807 - RNA, 22 nt, Homo sapiens
ugcuguuagcccuagccccgca

SEQ ID NO: 36808 - RNA, 21 nt, Homo sapiens
caucaccuuccuucuccucca

SEQ ID NO: 36809 - RNA, 21 nt, Homo sapiens
aagggucaguaagcacccgcg

SEQ ID NO: 36810 - RNA, 19 nt, Homo sapiens
guugggaucacaggcgccc

SEQ ID NO: 36811 - RNA, 23 nt, Homo sapiens
acagcgcucgcaaccgcagcgau

SEQ ID NO: 36812 - RNA, 22 nt, Homo sapiens
ugcuguuagcccuagccccgca

SEQ ID NO: 36813 - RNA, 20 nt, Homo sapiens
uccccacagacccagagccg

SEQ ID NO: 36814 - RNA, 21 nt, Homo sapiens
aucugcacugucagcacuuua

SEQ ID NO: 36815 - RNA, 21 nt, Homo sapiens
cuagggaagaacagugagcaa

SEQ ID NO: 36816 - RNA, 18 nt, Homo sapiens
cccccaccaccacgcccg

SEQ ID NO: 36817 - RNA, 22 nt, Homo sapiens
acaccuggcuccacacgcgggc

SEQ ID NO: 36818 - RNA, 18 nt, Homo sapiens
ggagaggagggcacugga

SEQ ID NO: 36819 - RNA, 21 nt, Homo sapiens
gaccaaucgccguccccgccg

SEQ ID NO: 36820 - RNA, 22 nt, Homo sapiens
cggugagcacccggccccugcg

SEQ ID NO: 36821 - RNA, 19 nt, Homo sapiens
gcuccuguccaacuggcuc

SEQ ID NO: 36822 - RNA, 21 nt, Homo sapiens
gaaggaagugagugcagccac

SEQ ID NO: 36823 - RNA, 22 nt, Homo sapiens
gcggucccgcggcgccccgccu

SEQ ID NO: 36824 - RNA, 22 nt, Homo sapiens
ugcuguuagcccuagccccgca

SEQ ID NO: 36825 - RNA, 22 nt, Homo sapiens
ugcuguuagcccuagccccgca

SEQ ID NO: 36826 - RNA, 23 nt, Homo sapiens
agaaaccaugggguaugagcaga

SEQ ID NO: 36827 - RNA, 22 nt, Homo sapiens
ucuacccagaaaggagccagug

SEQ ID NO: 36828 - RNA, 22 nt, Homo sapiens
augcccuuuuaacauugcacug

SEQ ID NO: 36829 - RNA, 22 nt, Homo sapiens
acaaaguucuguagugcacuga

SEQ ID NO: 36830 - RNA, 22 nt, Homo sapiens
acaaaguucugugaugcacuga

SEQ ID NO: 36831 - RNA, 21 nt, Homo sapiens
ccaaguucugucaugcacuga

SEQ ID NO: 36832 - RNA, 23 nt, Homo sapiens
acucaccgacagcguugaauguu

SEQ ID NO: 36833 - RNA, 23 nt, Homo sapiens
acccaccgacagcaaugaauguu

SEQ ID NO: 36834 - RNA, 22 nt, Homo sapiens
acucaccgacagguugaauguu

SEQ ID NO: 36835 - RNA, 23 nt, Homo sapiens
acccaccgacaacaaugaauguu

SEQ ID NO: 36836 - RNA, 21 nt, Homo sapiens
ggaaaucccuggcaaugugau

SEQ ID NO: 36837 - RNA, 21 nt, Homo sapiens
gguaaucccuggcaaugugau

SEQ ID NO: 36838 - RNA, 22 nt, Homo sapiens
acggaagggcagagagggccag

SEQ ID NO: 36839 - RNA, 21 nt, Homo sapiens
ugcaaugcaacuacaaugcac

SEQ ID NO: 36840 - RNA, 20 nt, Homo sapiens
gcaaugcaacagcaaugcac

SEQ ID NO: 36841 - RNA, 21 nt, Homo sapiens
guuauagaucuggauuugaac

SEQ ID NO: 36842 - RNA, 21 nt, Homo sapiens
caucaccuuccuucuccucca

SEQ ID NO: 36843 - RNA, 20 nt, Homo sapiens
uacugcuuccacagcucccc

SEQ ID NO: 36844 - RNA, 22 nt, Homo sapiens
cacgaccgacgccacgccgagu

SEQ ID NO: 36845 - RNA, 19 nt, Homo sapiens
cagcaucagcagcaucauc

SEQ ID NO: 36846 - RNA, 22 nt, Homo sapiens
ucagaccgagacaagugcaaug

SEQ ID NO: 36847 - RNA, 22 nt, Homo sapiens
acaaccagcuaagacacugcca

SEQ ID NO: 36848 - RNA, 22 nt, Homo sapiens
caacuccgauaugcaaugggua

SEQ ID NO: 36849 - RNA, 22 nt, Homo sapiens
ccucaggcacggccgggccacc

SEQ ID NO: 36850 - RNA, 20 nt, Homo sapiens
aggggccucagccuccuggu

SEQ ID NO: 36851 - RNA, 20 nt, Homo sapiens
ugggccaccgccgagcggac

SEQ ID NO: 36852 - RNA, 26 nt, Homo sapiens
aaccaucucauacaaaccaacuacuu

SEQ ID NO: 36853 - RNA, 22 nt, Homo sapiens
cuaccauaggguaaaaccacug

SEQ ID NO: 36854 - RNA, 21 nt, Homo sapiens
ugcaaugcaacuacaaugcac

SEQ ID NO: 36855 - RNA, 20 nt, Homo sapiens
gcaaugcaacagcaaugcac

SEQ ID NO: 36856 - RNA, 22 nt, Homo sapiens
gagguuucccguguauguuuca

SEQ ID NO: 36857 - RNA, 22 nt, Homo sapiens
aacgcuccaaaagaaggcacuc

SEQ ID NO: 36858 - RNA, 22 nt, Homo sapiens
aacacucuaaaaggaggcacuu

SEQ ID NO: 36859 - RNA, 22 nt, Homo sapiens
cucagagcagacgugguucuca

SEQ ID NO: 36860 - RNA, 21 nt, Homo sapiens
aucuuugauuuucaguaguuu

SEQ ID NO: 36861 - RNA, 23 nt, Homo sapiens
ucauacagcuagauaaccaaaga

SEQ ID NO: 36862 - RNA, 21 nt, Homo sapiens
auaauggagaccaggccacga

SEQ ID NO: 36863 - RNA, 22 nt, Homo sapiens
augcccuuucaucauugcacug

SEQ ID NO: 36864 - RNA, 22 nt, Homo sapiens
ucaggaacugccuuucucucca

SEQ ID NO: 36865 - RNA, 21 nt, Homo sapiens
gaccaaucgccguccccgccg

SEQ ID NO: 36866 - RNA, 21 nt, Homo sapiens
uagaaaggcuaggaccaaacc

SEQ ID NO: 36867 - RNA, 22 nt, Homo sapiens
caacaaaaucacugaugcugga

SEQ ID NO: 36868 - RNA, 23 nt, Homo sapiens
augcaaaguugcucggguaaccu

SEQ ID NO: 36869 - RNA, 23 nt, Homo sapiens
acagcgcucgcaaccgcagcgau

SEQ ID NO: 36870 - RNA, 22 nt, Homo sapiens
gcggucccgcggcgccccgccu

SEQ ID NO: 36871 - RNA, 23 nt, Homo sapiens
ccgcuugagcuaacuccgacccg

SEQ ID NO: 36872 - RNA, 22 nt, Homo sapiens
cugggggcggcacaggggcuca

SEQ ID NO: 36873 - RNA, 18 nt, Homo sapiens
uggcgccugaacagggac

SEQ ID NO: 36874 - RNA, 25 nt, Homo sapiens
agcuagucaagcgcgguuguggggg

SEQ ID NO: 36875 - RNA, 22 nt, Homo sapiens
ucacauuugccugcagagauuu

SEQ ID NO: 36876 - RNA, 22 nt, Homo sapiens
ugggguauuugacaaacugaca

SEQ ID NO: 36877 - RNA, 22 nt, Homo sapiens
cuguuccugcugaacugagcca

SEQ ID NO: 36878 - RNA, 21 nt, Homo sapiens
gcggaacuuagccacugugaa

SEQ ID NO: 36879 - RNA, 23 nt, Homo sapiens
cgugagcuccuggaggacaggga

SEQ ID NO: 36880 - RNA, 22 nt, Homo sapiens
gcacacaauaaauguuugcuga

SEQ ID NO: 36881 - RNA, 21 nt, Homo sapiens
ugacugacagcuuuuugagua

SEQ ID NO: 36882 - RNA, 18 nt, Homo sapiens
aucacauucaccucccug

SEQ ID NO: 36883 - RNA, 23 nt, Homo sapiens
gggagugaagacacggagccaga

SEQ ID NO: 36884 - RNA, 22 nt, Homo sapiens
aagauguggaccauauuacaua

SEQ ID NO: 36885 - RNA, 22 nt, Homo sapiens
gaauucaucacggccagccucu

SEQ ID NO: 36886 - RNA, 19 nt, Homo sapiens
gggaaacguaugucaaccu

SEQ ID NO: 36887 - RNA, 19 nt, Homo sapiens
guccugaauuccgcagccu

SEQ ID NO: 36888 - RNA, 23 nt, Homo sapiens
gucagaccccgagggguccucgc

SEQ ID NO: 36889 - RNA, 22 nt, Homo sapiens
gauccgagcaccggggaccccc

SEQ ID NO: 36890 - RNA, 21 nt, Homo sapiens
gaaggaagugagugcagccac

SEQ ID NO: 36891 - RNA, 21 nt, Homo sapiens
cugaggagagaggaggugggg

SEQ ID NO: 36892 - RNA, 22 nt, Homo sapiens
caaacaccauugucacacucca

SEQ ID NO: 36893 - RNA, 22 nt, Homo sapiens
agugaauucuaccagugccaua

SEQ ID NO: 36894 - RNA, 22 nt, Homo sapiens
uccacauggaguugcuguuaca

SEQ ID NO: 36895 - RNA, 22 nt, Homo sapiens
acaaaaguugccuuugugugau

SEQ ID NO: 36896 - RNA, 23 nt, Homo sapiens
ccacccaaugaccuacuccaaga

SEQ ID NO: 36897 - RNA, 22 nt, Homo sapiens
cgauguaguccaaaggcacaua

SEQ ID NO: 36898 - RNA, 22 nt, Homo sapiens
ccucauggaaggguuccccacu

SEQ ID NO: 36899 - RNA, 23 nt, Homo sapiens
gggccgcagcugucgcccguguc

SEQ ID NO: 36900 - RNA, 20 nt, Homo sapiens
uacugcuuccacagcucccc

SEQ ID NO: 36901 - RNA, 22 nt, Homo sapiens
cuagggaacacagggcugguga

SEQ ID NO: 36902 - RNA, 22 nt, Homo sapiens
ugaagaagggggggaagggcgu

SEQ ID NO: 36903 - RNA, 18 nt, Homo sapiens
cccccaccaccacgcccg

SEQ ID NO: 36904 - RNA, 23 nt, Homo sapiens
cggccugauucacaacaccagcu

SEQ ID NO: 36905 - RNA, 21 nt, Homo sapiens
gaccaaucgccguccccgccg

SEQ ID NO: 36906 - RNA, 25 nt, Homo sapiens
agcuagucaagcgcgguuguggggg

SEQ ID NO: 36907 - RNA, 22 nt, Homo sapiens
gaauucaucacggccagccucu

SEQ ID NO: 36908 - RNA, 23 nt, Homo sapiens
gggcucuuacucccucaggcacu

SEQ ID NO: 36909 - RNA, 24 nt, Homo sapiens
acgcgcaggccagagacccaggca

SEQ ID NO: 36910 - RNA, 22 nt, Homo sapiens
gcggucccgcggcgccccgccu

SEQ ID NO: 36911 - RNA, 22 nt, Homo sapiens
ugcuguuagcccuagccccgca

SEQ ID NO: 36912 - RNA, 22 nt, Homo sapiens
gcugaggcuguggggcuggagu

SEQ ID NO: 36913 - RNA, 21 nt, Homo sapiens
cugaggagagaggaggugggg

SEQ ID NO: 36914 - RNA, 19 nt, Homo sapiens
aagccaaagccuuauccau

SEQ ID NO: 36915 - RNA, 20 nt, Homo sapiens
gcagaagcauuuccacacac

SEQ ID NO: 36916 - RNA, 22 nt, Homo sapiens
cagaaagugcuucccucuagag

SEQ ID NO: 36917 - RNA, 21 nt, Homo sapiens
ugcaaacccugcaugugggag

SEQ ID NO: 36918 - RNA, 22 nt, Homo sapiens
cucaauagacugugagcuccuu

SEQ ID NO: 36919 - RNA, 22 nt, Homo sapiens
agcugaguguaggauguuuaca

SEQ ID NO: 36920 - RNA, 22 nt, Homo sapiens
caacaaaaucacugaugcugga

SEQ ID NO: 36921 - RNA, 22 nt, Homo sapiens
uauggaugcaaaaugaucccaa

SEQ ID NO: 36922 - RNA, 22 nt, Homo sapiens
guagaagggaaucuugcauaag

SEQ ID NO: 36923 - RNA, 22 nt, Homo sapiens
ccuggcacacaguagaccuuca

SEQ ID NO: 36924 - RNA, 22 nt, Homo sapiens
ugcaagccuugggugugggagg

SEQ ID NO: 36925 - RNA, 21 nt, Homo sapiens
uugucuaaccagucaccuguu

SEQ ID NO: 36926 - RNA, 22 nt, Homo sapiens
ccucaggcacggccgggccacc

SEQ ID NO: 36927 - RNA, 23 nt, Homo sapiens
cccagcuagauuguaagcuccuu

SEQ ID NO: 36928 - RNA, 21 nt, Homo sapiens
caucaccuuccuucuccucca

SEQ ID NO: 36929 - RNA, 23 nt, Homo sapiens
aaccaagaccccggagaucccag

SEQ ID NO: 36930 - RNA, 20 nt, Homo sapiens
uacugcuuccacagcucccc

SEQ ID NO: 36931 - RNA, 22 nt, Homo sapiens
auccuucuacaaauucacccau

SEQ ID NO: 36932 - RNA, 23 nt, Homo sapiens
ucacauaggaauaaaaagccaua

SEQ ID NO: 36933 - RNA, 22 nt, Homo sapiens
aacccauggaauucaguucuca

SEQ ID NO: 36934 - RNA, 22 nt, Homo sapiens
cucagagcagacgugguucuca

SEQ ID NO: 36935 - RNA, 23 nt, Homo sapiens
cccaacagacauggcgguacuca

SEQ ID NO: 36936 - RNA, 22 nt, Homo sapiens
ucaacaucagucugauaagcua

SEQ ID NO: 36937 - RNA, 22 nt, Homo sapiens
aucgggaggggacugagccuga

SEQ ID NO: 36938 - RNA, 24 nt, Homo sapiens
cagaaagugcuuucuuuuggagaa

SEQ ID NO: 36939 - RNA, 22 nt, Homo sapiens
aacacucuaaaaggaggcacuu

SEQ ID NO: 36940 - RNA, 21 nt, Homo sapiens
acuagcuuauacauaaaauua

SEQ ID NO: 36941 - RNA, 22 nt, Homo sapiens
cugcacuuuuaugaauaagcuc

SEQ ID NO: 36942 - RNA, 22 nt, Homo sapiens
cucauccgauguacaauaauuu

SEQ ID NO: 36943 - RNA, 17 nt, Homo sapiens
gggagaggaggaggcga

SEQ ID NO: 36944 - RNA, 18 nt, Homo sapiens
aucacauucaccucccug

SEQ ID NO: 36945 - RNA, 23 nt, Homo sapiens
gggagugaagacacggagccaga

SEQ ID NO: 36946 - RNA, 22 nt, Homo sapiens
cagaagugggccgggcacaggg

SEQ ID NO: 36947 - RNA, 22 nt, Homo sapiens
accagcuaacaauacacugcca

SEQ ID NO: 36948 - RNA, 22 nt, Homo sapiens
acggaagggcagagagggccag

SEQ ID NO: 36949 - RNA, 21 nt, Homo sapiens
aguucucccaacguaaaccca

SEQ ID NO: 36950 - RNA, 17 nt, Homo sapiens
uggaggccccagcgaga

SEQ ID NO: 36951 - RNA, 21 nt, Homo sapiens
auaauggagaccaggccacga

SEQ ID NO: 36952 - RNA, 19 nt, Homo sapiens
cagcaucagcagcaucauc

SEQ ID NO: 36953 - RNA, 22 nt, Homo sapiens
gaucacuuuugugacuaugcaa

SEQ ID NO: 36954 - RNA, 22 nt, Homo sapiens
auaaggauuuuuaggggcauua

SEQ ID NO: 36955 - RNA, 22 nt, Homo sapiens
aaagugcuucuuaccuccagau

SEQ ID NO: 36956 - RNA, 23 nt, Homo sapiens
guucuguccuggaagaacauacu

SEQ ID NO: 36957 - RNA, 23 nt, Homo sapiens
aacaggugcucaaauaagacuug

SEQ ID NO: 36958 - RNA, 21 nt, Homo sapiens
gcaagcccagaccgcaaaaag

SEQ ID NO: 36959 - RNA, 22 nt, Homo sapiens
gaucacuuuugugacuaugcaa

SEQ ID NO: 36960 - RNA, 22 nt, Homo sapiens
guagaagggaaucuugcauaag

SEQ ID NO: 36961 - RNA, 22 nt, Homo sapiens
agcaaaauccgcaaguacuuuu

SEQ ID NO: 36962 - RNA, 22 nt, Homo sapiens
aaaguaacugcaguuuuugcua

SEQ ID NO: 36963 - RNA, 23 nt, Homo sapiens
guucuguccuggaagaacauacu

SEQ ID NO: 36964 - RNA, 20 nt, Homo sapiens
cucaaagcaaacccugcaga

SEQ ID NO: 36965 - RNA, 20 nt, Homo sapiens
cuggggaaaaggguggcacg

SEQ ID NO: 36966 - RNA, 22 nt, Homo sapiens
cacaaaccauuaugugcugcua

SEQ ID NO: 36967 - RNA, 20 nt, Homo sapiens
cccgccgcgucgcccugggg

SEQ ID NO: 36968 - RNA, 22 nt, Homo sapiens
acugggacuuuguaggccaguu

SEQ ID NO: 36969 - RNA, 22 nt, Homo sapiens
agcgggacuuugagggccaguu

SEQ ID NO: 36970 - RNA, 23 nt, Homo sapiens
acggcuaguggaccaggugaagu

SEQ ID NO: 36971 - RNA, 22 nt, Homo sapiens
gccagcuaacaauacacugccu

SEQ ID NO: 36972 - RNA, 22 nt, Homo sapiens
ccuggcacacaguagaccuuca

SEQ ID NO: 36973 - RNA, 22 nt, Homo sapiens
uuucaguuaucaaucugucaca

SEQ ID NO: 36974 - RNA, 25 nt, Homo sapiens
acggagcugucccaacaccaccccu

SEQ ID NO: 36975 - RNA, 23 nt, Homo sapiens
guagugggccgagccgagugaca

SEQ ID NO: 36976 - RNA, 18 nt, Homo sapiens
gaaaugagggccagcuga

SEQ ID NO: 36977 - RNA, 23 nt, Homo sapiens
aaaaugcagauuccuggacucca

SEQ ID NO: 36978 - RNA, 23 nt, Homo sapiens
agggauuccugggaaaacuggac

SEQ ID NO: 36979 - RNA, 21 nt, Homo sapiens
cacaaccucaguguuuccagg

SEQ ID NO: 36980 - RNA, 23 nt, Homo sapiens
aggaacagcagcagcccgggccg

SEQ ID NO: 36981 - RNA, 23 nt, Homo sapiens
aaagucucgcucucugccccuca

SEQ ID NO: 36982 - RNA, 19 nt, Homo sapiens
guugggaucacaggcgccc

SEQ ID NO: 36983 - RNA, 22 nt, Homo sapiens
ugcuguuagcccuagccccgca

SEQ ID NO: 36984 - RNA, 22 nt, Homo sapiens
ccccccacugggccguacccac

SEQ ID NO: 36985 - RNA, 19 nt, Homo sapiens
cagcaucagcagcaucauc

SEQ ID NO: 36986 - RNA, 22 nt, Homo sapiens
ucaggaacugccuuucucucca

SEQ ID NO: 36987 - RNA, 22 nt, Homo sapiens
cccaacaacaugaaacuaccua

SEQ ID NO: 36988 - RNA, 22 nt, Homo sapiens
cccaacaacaggaaacuaccua

SEQ ID NO: 36989 - RNA, 23 nt, Homo sapiens
ucaccaaaacauggaagcacuua

SEQ ID NO: 36990 - RNA, 23 nt, Homo sapiens
cuacuaaaacauggaagcacuua

SEQ ID NO: 36991 - RNA, 23 nt, Homo sapiens
ccacugaaacauggaagcacuua

SEQ ID NO: 36992 - RNA, 23 nt, Homo sapiens
acacucaaacauggaagcacuua

SEQ ID NO: 36993 - RNA, 17 nt, Homo sapiens
aagcauggaagcacuua

SEQ ID NO: 36994 - RNA, 22 nt, Homo sapiens
gagcccuggacuaggagucagc

SEQ ID NO: 36995 - RNA, 23 nt, Homo sapiens
acgcucaaaugucgcagcacuuu

SEQ ID NO: 36996 - RNA, 23 nt, Homo sapiens
acaccccaaaaucgaagcacuuc

SEQ ID NO: 36997 - RNA, 21 nt, Homo sapiens
ccuucugacuccaaguccagu

SEQ ID NO: 36998 - RNA, 22 nt, Homo sapiens
aucgggaggggacugagccuga

SEQ ID NO: 36999 - RNA, 22 nt, Homo sapiens
acaguccaaagggaagcacuuu

SEQ ID NO: 37000 - RNA, 21 nt, Homo sapiens
cccucuaaaaggaagcacuuu

SEQ ID NO: 37001 - RNA, 22 nt, Homo sapiens
acccucuaaaaggaagcacuuu

SEQ ID NO: 37002 - RNA, 22 nt, Homo sapiens
acccaccaaagagaagcacuuu

SEQ ID NO: 37003 - RNA, 21 nt, Homo sapiens
cccucaaaaaggaagcacuuu

SEQ ID NO: 37004 - RNA, 22 nt, Homo sapiens
aacccucuaaaaggaagcacuu

SEQ ID NO: 37005 - RNA, 22 nt, Homo sapiens
ugacgaugacaacgaugacgua

SEQ ID NO: 37006 - RNA, 23 nt, Homo sapiens
gagcaaggcucuugucuguaagu

SEQ ID NO: 37007 - RNA, 20 nt, Homo sapiens
uccccacagacccagagccg

SEQ ID NO: 37008 - RNA, 22 nt, Homo sapiens
uauccacuacaccccgcugccu

SEQ ID NO: 37009 - RNA, 22 nt, Homo sapiens
acacacccacgcgagccggaaa

SEQ ID NO: 37010 - RNA, 24 nt, Homo sapiens
ucacagguuaaagggucucaggga

SEQ ID NO: 37011 - RNA, 22 nt, Homo sapiens
ucacaaguuagggucucaggga

SEQ ID NO: 37012 - RNA, 23 nt, Homo sapiens
agcccuguucuacagcccugagg

SEQ ID NO: 37013 - RNA, 17 nt, Homo sapiens
gggagaggaggaggcga

SEQ ID NO: 37014 - RNA, 22 nt, Homo sapiens
cuaccauaggguaaaaccacug

SEQ ID NO: 37015 - RNA, 21 nt, Homo sapiens
gggcaucugggacgcgcagga

SEQ ID NO: 37016 - RNA, 22 nt, Homo sapiens
cuguuccugcugaacugagcca

SEQ ID NO: 37017 - RNA, 20 nt, Homo sapiens
cuggaggaagggcccagagg

SEQ ID NO: 37018 - RNA, 22 nt, Homo sapiens
gccuaagacacaggcccagaga

SEQ ID NO: 37019 - RNA, 25 nt, Homo sapiens
accaacggaccuacuucccuccgcc

SEQ ID NO: 37020 - RNA, 22 nt, Homo sapiens
gcugaggcuguggggcuggagu

SEQ ID NO: 37021 - RNA, 22 nt, Homo sapiens
uauccacuacaccccgcugccu

SEQ ID NO: 37022 - RNA, 24 nt, Homo sapiens
cacccccagagccucagcucccca

SEQ ID NO: 37023 - RNA, 22 nt, Homo sapiens
ucaggaacugccuuucucucca

SEQ ID NO: 37024 - RNA, 21 nt, Homo sapiens
gaccaaucgccguccccgccg

SEQ ID NO: 37025 - RNA, 22 nt, Homo sapiens
agcgggacuuugagggccaguu

SEQ ID NO: 37026 - RNA, 25 nt, Homo sapiens
agcuagucaagcgcgguuguggggg

SEQ ID NO: 37027 - RNA, 22 nt, Homo sapiens
cacucagcggccguuuccccaa

SEQ ID NO: 37028 - RNA, 21 nt, Homo sapiens
aacggaaccacuagugacuug

SEQ ID NO: 37029 - RNA, 23 nt, Homo sapiens
cggcucugucgucgaggcgcuca

SEQ ID NO: 37030 - RNA, 22 nt, Homo sapiens
acacucuaaagggaaccauuuu

SEQ ID NO: 37031 - RNA, 22 nt, Homo sapiens
gcggucccgcggcgccccgccu

SEQ ID NO: 37032 - RNA, 22 nt, Homo sapiens
gugggguggguggucaggccga

SEQ ID NO: 37033 - RNA, 24 nt, Homo sapiens
acugcuggucuucagucagggcca

SEQ ID NO: 37034 - RNA, 22 nt, Homo sapiens
ucaggaacugccuuucucucca

SEQ ID NO: 37035 - RNA, 21 nt, Homo sapiens
gaccaaucgccguccccgccg

SEQ ID NO: 37036 - RNA, 21 nt, Homo sapiens
ggcugucaauucauaggucag

SEQ ID NO: 37037 - RNA, 21 nt, Homo sapiens
acaggauugagggggggcccu

SEQ ID NO: 37038 - RNA, 23 nt, Homo sapiens
aaagucucgcucucugccccuca

SEQ ID NO: 37039 - RNA, 22 nt, Homo sapiens
gcggucccgcggcgccccgccu

SEQ ID NO: 37040 - RNA, 22 nt, Homo sapiens
ugcuguuagcccuagccccgca

SEQ ID NO: 37041 - RNA, 21 nt, Homo sapiens
caucaccuuccuucuccucca

SEQ ID NO: 37042 - RNA, 20 nt, Homo sapiens
uacugcuuccacagcucccc

SEQ ID NO: 37043 - RNA, 22 nt, Homo sapiens
auccuucuacaaauucacccau

SEQ ID NO: 37044 - RNA, 22 nt, Homo sapiens
aaaauacauauauaucuacgua

SEQ ID NO: 37045 - RNA, 17 nt, Homo sapiens
ggguggcagcgguggga

SEQ ID NO: 37046 - RNA, 22 nt, Homo sapiens
aggucucacuuuguugcccaga

SEQ ID NO: 37047 - RNA, 22 nt, Homo sapiens
uggcagcagcggagggggcaga

SEQ ID NO: 37048 - RNA, 23 nt, Homo sapiens
cagcugcuuuugggauuccguug

SEQ ID NO: 37049 - RNA, 22 nt, Homo sapiens
aggcauaggaugacaaagggaa

SEQ ID NO: 37050 - RNA, 22 nt, Homo sapiens
aggcgaaggaugacaaagggaa

SEQ ID NO: 37051 - RNA, 22 nt, Homo sapiens
ucaacaucagucugauaagcua

SEQ ID NO: 37052 - RNA, 20 nt, Homo sapiens
ccagcagcaccuggggcagu

SEQ ID NO: 37053 - RNA, 20 nt, Homo sapiens
cuggaggaagggcccagagg

SEQ ID NO: 37054 - RNA, 22 nt, Homo sapiens
gccuaagacacaggcccagaga

SEQ ID NO: 37055 - RNA, 23 nt, Homo sapiens
acggcuaguggaccaggugaagu

SEQ ID NO: 37056 - RNA, 21 nt, Homo sapiens
auccuguacugagcugccccg

SEQ ID NO: 37057 - RNA, 22 nt, Homo sapiens
gcugccguauaugugaugucac

SEQ ID NO: 37058 - RNA, 22 nt, Homo sapiens
agcacagacuugcugugauguu

SEQ ID NO: 37059 - RNA, 21 nt, Homo sapiens
uagcacccagauagcaaggau

SEQ ID NO: 37060 - RNA, 19 nt, Homo sapiens
guccugaauuccgcagccu

SEQ ID NO: 37061 - RNA, 25 nt, Homo sapiens
aaggagcucagaagcccugcccagc

SEQ ID NO: 37062 - RNA, 22 nt, Homo sapiens
ccucuaguaaauaugucagcau

SEQ ID NO: 37063 - RNA, 23 nt, Homo sapiens
aacaggugcucaaauaagacuug

SEQ ID NO: 37064 - RNA, 22 nt, Homo sapiens
gaucacuuuugugacuaugcaa

SEQ ID NO: 37065 - RNA, 22 nt, Homo sapiens
auaaggauuuuuaggggcauua

SEQ ID NO: 37066 - RNA, 22 nt, Homo sapiens
gguaaaacucgcaauuacuuuu

SEQ ID NO: 37067 - RNA, 22 nt, Homo sapiens
ggccaaaaccacaauuacuuuu

SEQ ID NO: 37068 - RNA, 22 nt, Homo sapiens
ggcaaaaaccgcaauuacuuuu

SEQ ID NO: 37069 - RNA, 22 nt, Homo sapiens
ggcaaaaaccacaauuacuuuu

SEQ ID NO: 37070 - RNA, 22 nt, Homo sapiens
gacaaaaaccgcgauuacuuuu

SEQ ID NO: 37071 - RNA, 22 nt, Homo sapiens
ggcaaaauccgcaauuacuuuu

SEQ ID NO: 37072 - RNA, 22 nt, Homo sapiens
accaaagaccgcaauuacuuuu

SEQ ID NO: 37073 - RNA, 21 nt, Homo sapiens
uuuuggugcauauuuacuuua

SEQ ID NO: 37074 - RNA, 23 nt, Homo sapiens
guucuguccuggaagaacauacu

SEQ ID NO: 37075 - RNA, 22 nt, Homo sapiens
aaggugauggucagcagacaua

SEQ ID NO: 37076 - RNA, 23 nt, Homo sapiens
gucacaucccucccaagacccuc

SEQ ID NO: 37077 - RNA, 21 nt, Homo sapiens
gaccaaucgccguccccgccg

SEQ ID NO: 37078 - RNA, 24 nt, Homo sapiens
ugggagaaccucccugcuucugcu

SEQ ID NO: 37079 - RNA, 18 nt, Homo sapiens
acccucugaaaggaagca

SEQ ID NO: 37080 - RNA, 22 nt, Homo sapiens
aaagugcuucuuaccuccagau

SEQ ID NO: 37081 - RNA, 19 nt, Homo sapiens
guccugaauuccgcagccu

SEQ ID NO: 37082 - RNA, 22 nt, Homo sapiens
gcggucccgcggcgccccgccu

SEQ ID NO: 37083 - RNA, 20 nt, Homo sapiens
cuggggaaaaggguggcacg

SEQ ID NO: 37084 - RNA, 24 nt, Homo sapiens
acugcaggcuccagcuuccaggcu

SEQ ID NO: 37085 - RNA, 17 nt, Homo sapiens
gacagccucucccccac

SEQ ID NO: 37086 - RNA, 18 nt, Homo sapiens
aucacauucaccucccug

SEQ ID NO: 37087 - RNA, 21 nt, Homo sapiens
gagcuacagugcuucaucuca

SEQ ID NO: 37088 - RNA, 22 nt, Homo sapiens
aacccauggaauucaguucuca

SEQ ID NO: 37089 - RNA, 23 nt, Homo sapiens
gggagugaagacacggagccaga

SEQ ID NO: 37090 - RNA, 22 nt, Homo sapiens
ucaggaacugccuuucucucca

SEQ ID NO: 37091 - RNA, 25 nt, Homo sapiens
agcuagucaagcgcgguuguggggg

SEQ ID NO: 37092 - RNA, 22 nt, Homo sapiens
cagacuccgguggaaugaagga

SEQ ID NO: 37093 - RNA, 22 nt, Homo sapiens
ucaacaucagucugauaagcua

SEQ ID NO: 37094 - RNA, 24 nt, Homo sapiens
ugggagaaccucccugcuucugcu

SEQ ID NO: 37095 - RNA, 22 nt, Homo sapiens
cacuuagcagguuguauuauau

SEQ ID NO: 37096 - RNA, 21 nt, Homo sapiens
aagacgggaggagaggaguga

SEQ ID NO: 37097 - RNA, 23 nt, Homo sapiens
caugagugacgcccucuggagua

SEQ ID NO: 37098 - RNA, 21 nt, Homo sapiens
gaaggaagugagugcagccac

SEQ ID NO: 37099 - RNA, 21 nt, Homo sapiens
gggcaucugggacgcgcagga

SEQ ID NO: 37100 - RNA, 21 nt, Homo sapiens
gaccaaucgccguccccgccg

SEQ ID NO: 37101 - RNA, 22 nt, Homo sapiens
uggcagcagcggagggggcaga

SEQ ID NO: 37102 - RNA, 20 nt, Homo sapiens
ccagcagcaccuggggcagu

SEQ ID NO: 37103 - RNA, 21 nt, Homo sapiens
auccuguacugagcugccccg

SEQ ID NO: 37104 - RNA, 22 nt, Homo sapiens
gcggucccgcggcgccccgccu

SEQ ID NO: 37105 - RNA, 22 nt, Homo sapiens
ggcagagagucagagcgcggau

SEQ ID NO: 37106 - RNA, 18 nt, Homo sapiens
ugguggcagaggugggau

SEQ ID NO: 37107 - RNA, 17 nt, Homo sapiens
gacagccucucccccac

SEQ ID NO: 37108 - RNA, 17 nt, Homo sapiens
gggagaggaggaggcga

SEQ ID NO: 37109 - RNA, 21 nt, Homo sapiens
acuagacugugagcuccucga

SEQ ID NO: 37110 - RNA, 21 nt, Homo sapiens
gaccaaucgccguccccgccg

SEQ ID NO: 37111 - RNA, 20 nt, Homo sapiens
acagcaaggagggcaggagg

SEQ ID NO: 37112 - RNA, 22 nt, Homo sapiens
ucagaccgagacaagugcaaug

SEQ ID NO: 37113 - RNA, 22 nt, Homo sapiens
agcugaguguaggauguuuaca

SEQ ID NO: 37114 - RNA, 22 nt, Homo sapiens
ugcaagccuugggugugggagg

SEQ ID NO: 37115 - RNA, 25 nt, Homo sapiens
accaacggaccuacuucccuccgcc

SEQ ID NO: 37116 - RNA, 21 nt, Homo sapiens
caucaccuuccuucuccucca

SEQ ID NO: 37117 - RNA, 24 nt, Homo sapiens
cacccccagagccucagcucccca

SEQ ID NO: 37118 - RNA, 21 nt, Homo sapiens
agaaguagaccauguguccua

SEQ ID NO: 37119 - RNA, 19 nt, Homo sapiens
ccaccucccgaguccucac

SEQ ID NO: 37120 - RNA, 20 nt, Homo sapiens
cuggggaaaaggguggcacg

SEQ ID NO: 37121 - RNA, 22 nt, Homo sapiens
cuaccauaggguaaaaccacug

SEQ ID NO: 37122 - RNA, 22 nt, Homo sapiens
accuaauauaucaaacauauca

SEQ ID NO: 37123 - RNA, 22 nt, Homo sapiens
cagacuccgguggaaugaagga

SEQ ID NO: 37124 - RNA, 22 nt, Homo sapiens
ucacauuugccugcagagauuu

SEQ ID NO: 37125 - RNA, 21 nt, Homo sapiens
caugcacaugcacacauacau

SEQ ID NO: 37126 - RNA, 22 nt, Homo sapiens
agagaggagagccguguaugac

SEQ ID NO: 37127 - RNA, 23 nt, Homo sapiens
ccuucucagaaaggugaaauuua

SEQ ID NO: 37128 - RNA, 18 nt, Homo sapiens
uggcgccugaacagggac

SEQ ID NO: 37129 - RNA, 18 nt, Homo sapiens
aucacauucaccucccug

SEQ ID NO: 37130 - RNA, 23 nt, Homo sapiens
aggaacagcagcagcccgggccg

SEQ ID NO: 37131 - RNA, 22 nt, Homo sapiens
ucaggaacugccuuucucucca

SEQ ID NO: 37132 - RNA, 23 nt, Homo sapiens
aaaucagaaucacaccuggggga

SEQ ID NO: 37133 - RNA, 23 nt, Homo sapiens
acugaggggccucagaccgagcu

SEQ ID NO: 37134 - RNA, 22 nt, Homo sapiens
ccucauggaaggguuccccacu

SEQ ID NO: 37135 - RNA, 22 nt, Homo sapiens
acacaccaaggauaauuucucc

SEQ ID NO: 37136 - RNA, 22 nt, Homo sapiens
aagagggagacccaggcucgga

SEQ ID NO: 37137 - RNA, 24 nt, Homo sapiens
acgcagagcccgaaagcccccagu

SEQ ID NO: 37138 - RNA, 24 nt, Homo sapiens
acgcgcaggccagagacccaggca

SEQ ID NO: 37139 - RNA, 21 nt, Homo sapiens
cugcugggccacaacguggga

SEQ ID NO: 37140 - RNA, 22 nt, Homo sapiens
caaacaccauugucacacucca

SEQ ID NO: 37141 - RNA, 22 nt, Homo sapiens
uccggggacgaacgggacgggu

SEQ ID NO: 37142 - RNA, 18 nt, Homo sapiens
cccccaccaccacgcccg

SEQ ID NO: 37143 - RNA, 21 nt, Homo sapiens
cggggugcacgggcggagggc

SEQ ID NO: 37144 - RNA, 23 nt, Homo sapiens
gggagugaagacacggagccaga

SEQ ID NO: 37145 - RNA, 21 nt, Homo sapiens
gaccaaucgccguccccgccg

SEQ ID NO: 37146 - RNA, 23 nt, Homo sapiens
gaaacccagcagacaauguagcu

SEQ ID NO: 37147 - RNA, 22 nt, Homo sapiens
ucagaccgagacaagugcaaug

SEQ ID NO: 37148 - RNA, 22 nt, Homo sapiens
gaauucaucacggccagccucu

SEQ ID NO: 37149 - RNA, 22 nt, Homo sapiens
acacaccaaggauaauuucucc

SEQ ID NO: 37150 - RNA, 22 nt, Homo sapiens
aguccagauucugugcccacca

SEQ ID NO: 37151 - RNA, 21 nt, Homo sapiens
guaaugggaccuuccucuuug

SEQ ID NO: 37152 - RNA, 25 nt, Homo sapiens
acggagcugucccaacaccaccccu

SEQ ID NO: 37153 - RNA, 22 nt, Homo sapiens
gcacauguucugcggcccacca

SEQ ID NO: 37154 - RNA, 25 nt, Homo sapiens
accaacggaccuacuucccuccgcc

SEQ ID NO: 37155 - RNA, 22 nt, Homo sapiens
gcggucccgcggcgccccgccu

SEQ ID NO: 37156 - RNA, 20 nt, Homo sapiens
aggggccucagccuccuggu

SEQ ID NO: 37157 - RNA, 21 nt, Homo sapiens
caucaccuuccuucuccucca

SEQ ID NO: 37158 - RNA, 21 nt, Homo sapiens
cggcucggguggcggcgacgg

SEQ ID NO: 37159 - RNA, 22 nt, Homo sapiens
ggagauggagccagggcccuaa

SEQ ID NO: 37160 - RNA, 19 nt, Homo sapiens
cagcaucagcagcaucauc

SEQ ID NO: 37161 - RNA, 21 nt, Homo sapiens
gaccaaucgccguccccgccg

SEQ ID NO: 37162 - RNA, 23 nt, Homo sapiens
acauuuuucguuauugcucuuga

SEQ ID NO: 37163 - RNA, 23 nt, Homo sapiens
aaaucagaaucacaccuggggga

SEQ ID NO: 37164 - RNA, 22 nt, Homo sapiens
cucccuucuuuccucccgucuu

SEQ ID NO: 37165 - RNA, 25 nt, Homo sapiens
acggagcugucccaacaccaccccu

SEQ ID NO: 37166 - RNA, 24 nt, Homo sapiens
acgcagagcccgaaagcccccagu

SEQ ID NO: 37167 - RNA, 24 nt, Homo sapiens
acgcgcaggccagagacccaggca

SEQ ID NO: 37168 - RNA, 22 nt, Homo sapiens
gcggucccgcggcgccccgccu

SEQ ID NO: 37169 - RNA, 23 nt, Homo sapiens
acaacaaaaucacuagucuucca

SEQ ID NO: 37170 - RNA, 20 nt, Homo sapiens
uacugcuuccacagcucccc

SEQ ID NO: 37171 - RNA, 21 nt, Homo sapiens
auaauggagaccaggccacga

SEQ ID NO: 37172 - RNA, 24 nt, Homo sapiens
acugcuggucuucagucagggcca

SEQ ID NO: 37173 - RNA, 19 nt, Homo sapiens
cagcaucagcagcaucauc

SEQ ID NO: 37174 - RNA, 23 nt, Homo sapiens
aggaacagcagcagcccgggccg

SEQ ID NO: 37175 - RNA, 21 nt, Homo sapiens
acaggauugagggggggcccu

SEQ ID NO: 37176 - RNA, 23 nt, Homo sapiens
aaaucagaaucacaccuggggga

SEQ ID NO: 37177 - RNA, 25 nt, Homo sapiens
aggccgccacccgcccgcgaucccu

SEQ ID NO: 37178 - RNA, 22 nt, Homo sapiens
ggaggccgggacgagugcaaua

SEQ ID NO: 37179 - RNA, 22 nt, Homo sapiens
gacucgaaccacugauccagca

SEQ ID NO: 37180 - RNA, 22 nt, Homo sapiens
ucagccgcugucacacgcacag

SEQ ID NO: 37181 - RNA, 21 nt, Homo sapiens
acccaguagccagauguagcu

SEQ ID NO: 37182 - RNA, 22 nt, Homo sapiens
uaaccgauuucagauggugcua

SEQ ID NO: 37183 - RNA, 22 nt, Homo sapiens
aucgggaggggacugagccuga

SEQ ID NO: 37184 - RNA, 18 nt, Homo sapiens
augacaccucccugugaa

SEQ ID NO: 37185 - RNA, 22 nt, Homo sapiens
acacaccaaggauaauuucucc

SEQ ID NO: 37186 - RNA, 21 nt, Homo sapiens
caucaccuuccuucuccucca

SEQ ID NO: 37187 - RNA, 22 nt, Homo sapiens
uggugauucacaaagaaaucca

SEQ ID NO: 37188 - RNA, 21 nt, Homo sapiens
ccccucccagccucccugcca

SEQ ID NO: 37189 - RNA, 21 nt, Homo sapiens
uggggauuacacuucaacagg

SEQ ID NO: 37190 - RNA, 22 nt, Homo sapiens
ucccucacacagaauuccagaa

SEQ ID NO: 37191 - RNA, 22 nt, Homo sapiens
augcuuuuugggguaagggcuu

SEQ ID NO: 37192 - RNA, 23 nt, Homo sapiens
ucaccaaaacauggaagcacuua

SEQ ID NO: 37193 - RNA, 23 nt, Homo sapiens
cuacuaaaacauggaagcacuua

SEQ ID NO: 37194 - RNA, 23 nt, Homo sapiens
ccacugaaacauggaagcacuua

SEQ ID NO: 37195 - RNA, 23 nt, Homo sapiens
acacucaaacauggaagcacuua

SEQ ID NO: 37196 - RNA, 17 nt, Homo sapiens
aagcauggaagcacuua

SEQ ID NO: 37197 - RNA, 23 nt, Homo sapiens
acgcucaaaugucgcagcacuuu

SEQ ID NO: 37198 - RNA, 23 nt, Homo sapiens
acaccccaaaaucgaagcacuuc

SEQ ID NO: 37199 - RNA, 23 nt, Homo sapiens
gcgcccaauuaaugucuguugau

SEQ ID NO: 37200 - RNA, 22 nt, Homo sapiens
aggaaaccagcaaguguugacg

SEQ ID NO: 37201 - RNA, 23 nt, Homo sapiens
acacucuaaagagaagcgcuuug

SEQ ID NO: 37202 - RNA, 22 nt, Homo sapiens
acaguccaaagggaagcacuuu

SEQ ID NO: 37203 - RNA, 21 nt, Homo sapiens
agaaaguacuucccucuggag

SEQ ID NO: 37204 - RNA, 21 nt, Homo sapiens
cccucuaaaaggaagcacuuu

SEQ ID NO: 37205 - RNA, 22 nt, Homo sapiens
acccucuaaaaggaagcacuuu

SEQ ID NO: 37206 - RNA, 22 nt, Homo sapiens
acccaccaaagagaagcacuuu

SEQ ID NO: 37207 - RNA, 21 nt, Homo sapiens
cccucaaaaaggaagcacuuu

SEQ ID NO: 37208 - RNA, 22 nt, Homo sapiens
aacccucuaaaaggaagcacuu

SEQ ID NO: 37209 - RNA, 21 nt, Homo sapiens
agaaagugcaucccucuggag

SEQ ID NO: 37210 - RNA, 22 nt, Homo sapiens
ucggucccucgggccagggcag

SEQ ID NO: 37211 - RNA, 21 nt, Homo sapiens
ggggagcgggggcccugccuu

SEQ ID NO: 37212 - RNA, 22 nt, Homo sapiens
gugggguggguggucaggccga

SEQ ID NO: 37213 - RNA, 17 nt, Homo sapiens
gggagaggaggaggcga

SEQ ID NO: 37214 - RNA, 22 nt, Homo sapiens
cacgaccgacgccacgccgagu

SEQ ID NO: 37215 - RNA, 22 nt, Homo sapiens
ggagcccgcgccccgcgccgag

SEQ ID NO: 37216 - RNA, 21 nt, Homo sapiens
acuagacugugagcuccucga

SEQ ID NO: 37217 - RNA, 22 nt, Homo sapiens
cucccuucuuuccucccgucuu

SEQ ID NO: 37218 - RNA, 22 nt, Homo sapiens
aguccagauucugugcccacca

SEQ ID NO: 37219 - RNA, 22 nt, Homo sapiens
gccaccuucaaaugggaagucu

SEQ ID NO: 37220 - RNA, 22 nt, Homo sapiens
gcacauguucugcggcccacca

SEQ ID NO: 37221 - RNA, 23 nt, Homo sapiens
cccagcuagauuguaagcuccuu

SEQ ID NO: 37222 - RNA, 21 nt, Homo sapiens
caucaccuuccuucuccucca

SEQ ID NO: 37223 - RNA, 18 nt, Homo sapiens
gaaaugagggccagcuga

SEQ ID NO: 37224 - RNA, 21 nt, Homo sapiens
ccccucccagccucccugcca

SEQ ID NO: 37225 - RNA, 22 nt, Homo sapiens
agccaagcucagacggauccga

SEQ ID NO: 37226 - RNA, 23 nt, Homo sapiens
cuaucugcacuagaugcaccuua

SEQ ID NO: 37227 - RNA, 21 nt, Homo sapiens
gaccaaucgccguccccgccg

SEQ ID NO: 37228 - RNA, 21 nt, Homo sapiens
ucaaucacagauagcaccccu

SEQ ID NO: 37229 - RNA, 22 nt, Homo sapiens
gauagagugcagaccagggucu

SEQ ID NO: 37230 - RNA, 25 nt, Homo sapiens
acggagcugucccaacaccaccccu

SEQ ID NO: 37231 - RNA, 22 nt, Homo sapiens
gcggucccgcggcgccccgccu

SEQ ID NO: 37232 - RNA, 22 nt, Homo sapiens
ugcuguuagcccuagccccgca

SEQ ID NO: 37233 - RNA, 22 nt, Homo sapiens
ugcuguuagcccuagccccgca

SEQ ID NO: 37234 - RNA, 20 nt, Homo sapiens
uacugcuuccacagcucccc

SEQ ID NO: 37235 - RNA, 23 nt, Homo sapiens
agggauuccugggaaaacuggac

SEQ ID NO: 37236 - RNA, 22 nt, Homo sapiens
ccagaacugaguccacagggca

SEQ ID NO: 37237 - RNA, 21 nt, Homo sapiens
ugcaaacccugcaugugggag

SEQ ID NO: 37238 - RNA, 21 nt, Homo sapiens
aggcggcaggcacaggacugg

SEQ ID NO: 37239 - RNA, 21 nt, Homo sapiens
aggcggcaggcacaggacugg

SEQ ID NO: 37240 - RNA, 23 nt, Homo sapiens
ccacccaaugaccuacuccaaga

SEQ ID NO: 37241 - RNA, 22 nt, Homo sapiens
uauggaugcaaaaugaucccaa

SEQ ID NO: 37242 - RNA, 23 nt, Homo sapiens
aaccaagaccccggagaucccag

SEQ ID NO: 37243 - RNA, 20 nt, Homo sapiens
uacugcuuccacagcucccc

SEQ ID NO: 37244 - RNA, 20 nt, Homo sapiens
cucaaagcaaacccugcaga

SEQ ID NO: 37245 - RNA, 17 nt, Homo sapiens
gggagaggaggaggcga

SEQ ID NO: 37246 - RNA, 22 nt, Homo sapiens
aggucucacuuuguugcccaga

SEQ ID NO: 37247 - RNA, 22 nt, Homo sapiens
agcugaguguaggauguuuaca

SEQ ID NO: 37248 - RNA, 22 nt, Homo sapiens
cagcauggaguccuccagguug

SEQ ID NO: 37249 - RNA, 22 nt, Homo sapiens
aggaaaccagcaaguguugacg

SEQ ID NO: 37250 - RNA, 25 nt, Homo sapiens
acggagcugucccaacaccaccccu

SEQ ID NO: 37251 - RNA, 25 nt, Homo sapiens
aaggagcucagaagcccugcccagc

SEQ ID NO: 37252 - RNA, 21 nt, Homo sapiens
cucccccacugcagcuggcac

SEQ ID NO: 37253 - RNA, 20 nt, Homo sapiens
cugcgggaggacagggcuca

SEQ ID NO: 37254 - RNA, 23 nt, Homo sapiens
cccaacagacauggcgguacuca

SEQ ID NO: 37255 - RNA, 20 nt, Homo sapiens
gcaaugcaacagcaaugcac

SEQ ID NO: 37256 - RNA, 22 nt, Homo sapiens
guaccccuggagauucugauaa

SEQ ID NO: 37257 - RNA, 20 nt, Homo sapiens
uaugaacaauuucuaggaau

SEQ ID NO: 37258 - RNA, 22 nt, Homo sapiens
ccuggcacacaguagaccuuca

SEQ ID NO: 37259 - RNA, 22 nt, Homo sapiens
aacgcuccaaaagaaggcacuc

SEQ ID NO: 37260 - RNA, 22 nt, Homo sapiens
aaagugcuucuuaccuccagau

SEQ ID NO: 37261 - RNA, 23 nt, Homo sapiens
acacucuaaagagaagcgcuuug

SEQ ID NO: 37262 - RNA, 22 nt, Homo sapiens
aacacucuaaaaggaggcacuu

SEQ ID NO: 37263 - RNA, 21 nt, Homo sapiens
agaaaguacuucccucuggag

SEQ ID NO: 37264 - RNA, 21 nt, Homo sapiens
agaaagugcaucccucuggag

SEQ ID NO: 37265 - RNA, 19 nt, Homo sapiens
guugggaucacaggcgccc

SEQ ID NO: 37266 - RNA, 19 nt, Homo sapiens
aagacauuuucagacagcu

SEQ ID NO: 37267 - RNA, 19 nt, Homo sapiens
ucccacaggaagcagacac

SEQ ID NO: 37268 - RNA, 21 nt, Homo sapiens
caguagagauuguuucaacac

SEQ ID NO: 37269 - RNA, 20 nt, Homo sapiens
uccccacagacccagagccg

SEQ ID NO: 37270 - RNA, 22 nt, Homo sapiens
cacauggccaaaacagagaaga

SEQ ID NO: 37271 - RNA, 22 nt, Homo sapiens
ucccucacacagaauuccagaa

SEQ ID NO: 37272 - RNA, 22 nt, Homo sapiens
acaaaguucugugaugcacuga

SEQ ID NO: 37273 - RNA, 22 nt, Homo sapiens
acugccugucugugccugcugu

SEQ ID NO: 37274 - RNA, 23 nt, Homo sapiens
cgugagcuccuggaggacaggga

SEQ ID NO: 37275 - RNA, 22 nt, Homo sapiens
accagguuccaccccagcaggc

SEQ ID NO: 37276 - RNA, 22 nt, Homo sapiens
cugcucaaacccuccaaugacu

SEQ ID NO: 37277 - RNA, 20 nt, Homo sapiens
aggggccucagccuccuggu

SEQ ID NO: 37278 - RNA, 21 nt, Homo sapiens
cacaaccucaguguuuccagg

SEQ ID NO: 37279 - RNA, 24 nt, Homo sapiens
acugcaggcuccagcuuccaggcu

SEQ ID NO: 37280 - RNA, 23 nt, Homo sapiens
acacagcucuuccauaucuccag

SEQ ID NO: 37281 - RNA, 22 nt, Homo sapiens
cgggacguccagacucaacucu

SEQ ID NO: 37282 - RNA, 21 nt, Homo sapiens
ggaaaucccuggcaaugugau

SEQ ID NO: 37283 - RNA, 21 nt, Homo sapiens
gguaaucccuggcaaugugau

SEQ ID NO: 37284 - RNA, 23 nt, Homo sapiens
acauuuuucguuauugcucuuga

SEQ ID NO: 37285 - RNA, 22 nt, Homo sapiens
aucgggaggggacugagccuga

SEQ ID NO: 37286 - RNA, 22 nt, Homo sapiens
gaacuugcuaaaaaugcagaau

SEQ ID NO: 37287 - RNA, 23 nt, Homo sapiens
acacacucacacacacacacuca

SEQ ID NO: 37288 - RNA, 22 nt, Homo sapiens
gcaaaaguaauugcagugugug

SEQ ID NO: 37289 - RNA, 20 nt, Homo sapiens
auuucuauaucuaucuccau

SEQ ID NO: 37290 - RNA, 24 nt, Homo sapiens
acgcgcaggccagagacccaggca

SEQ ID NO: 37291 - RNA, 17 nt, Homo sapiens
gggagaggaggaggcga

SEQ ID NO: 37292 - RNA, 21 nt, Homo sapiens
cggggugcacgggcggagggc

SEQ ID NO: 37293 - RNA, 23 nt, Homo sapiens
acccucuauagggaagcgcguuc

SEQ ID NO: 37294 - RNA, 23 nt, Homo sapiens
ucucgugacaugaugauccccga

SEQ ID NO: 37295 - RNA, 21 nt, Homo sapiens
cucacucagauggccaacuca

SEQ ID NO: 37296 - RNA, 25 nt, Homo sapiens
accaacggaccuacuucccuccgcc

SEQ ID NO: 37297 - RNA, 20 nt, Homo sapiens
uccccacagacccagagccg

SEQ ID NO: 37298 - RNA, 21 nt, Homo sapiens
caucaccuuccuucuccucca

SEQ ID NO: 37299 - RNA, 22 nt, Homo sapiens
ggcagagagucagagcgcggau

SEQ ID NO: 37300 - RNA, 24 nt, Homo sapiens
cacccccagagccucagcucccca

SEQ ID NO: 37301 - RNA, 21 nt, Homo sapiens
aacauacaaaggguauccucu

SEQ ID NO: 37302 - RNA, 22 nt, Homo sapiens
auccuucuacaaauucacccau

SEQ ID NO: 37303 - RNA, 22 nt, Homo sapiens
agacaacaaugccaaccucaca

SEQ ID NO: 37304 - RNA, 23 nt, Homo sapiens
ucacauaggaauaaaaagccaua

SEQ ID NO: 37305 - RNA, 23 nt, Homo sapiens
ucacauaggaaugaaaagccaua

SEQ ID NO: 37306 - RNA, 23 nt, Homo sapiens
gggagugaagacacggagccaga

SEQ ID NO: 37307 - RNA, 22 nt, Homo sapiens
agcccaaaaggagaauucuuug

SEQ ID NO: 37308 - RNA, 22 nt, Homo sapiens
cggugagcacccggccccugcg

SEQ ID NO: 37309 - RNA, 22 nt, Homo sapiens
gcaaaaguaauugcagugugug

SEQ ID NO: 37310 - RNA, 20 nt, Homo sapiens
aggggccucagccuccuggu

SEQ ID NO: 37311 - RNA, 22 nt, Homo sapiens
acacacccacgcgagccggaaa

SEQ ID NO: 37312 - RNA, 22 nt, Homo sapiens
acacacccacgcgagccggaaa

SEQ ID NO: 37313 - RNA, 21 nt, Homo sapiens
ccccucccagccucccugcca

SEQ ID NO: 37314 - RNA, 21 nt, Homo sapiens
ccccucccagccucccugcca

SEQ ID NO: 37315 - RNA, 22 nt, Homo sapiens
uccggggacgaacgggacgggu

SEQ ID NO: 37316 - RNA, 18 nt, Homo sapiens
cccccaccaccacgcccg

SEQ ID NO: 37317 - RNA, 21 nt, Homo sapiens
gaccaaucgccguccccgccg

SEQ ID NO: 37318 - RNA, 22 nt, Homo sapiens
cggugagcacccggccccugcg

SEQ ID NO: 37319 - RNA, 22 nt, Homo sapiens
acacucuaaagggaagugcguu

SEQ ID NO: 37320 - RNA, 22 nt, Homo sapiens
gcggucccgcggcgccccgccu

SEQ ID NO: 37321 - RNA, 22 nt, Homo sapiens
ggaggccgggacgagugcaaua

SEQ ID NO: 37322 - RNA, 21 nt, Homo sapiens
ggggagcgggggcccugccuu

SEQ ID NO: 37323 - RNA, 23 nt, Homo sapiens
gggagugaagacacggagccaga

SEQ ID NO: 37324 - RNA, 22 nt, Homo sapiens
cccaacaacaggaaacuaccua

SEQ ID NO: 37325 - RNA, 21 nt, Homo sapiens
acaggauugagggggggcccu

SEQ ID NO: 37326 - RNA, 23 nt, Homo sapiens
aaagucucgcucucugccccuca

SEQ ID NO: 37327 - RNA, 22 nt, Homo sapiens
ccucauggaaggguuccccacu

SEQ ID NO: 37328 - RNA, 20 nt, Homo sapiens
aggggccucagccuccuggu

SEQ ID NO: 37329 - RNA, 20 nt, Homo sapiens
uacugcuuccacagcucccc

SEQ ID NO: 37330 - RNA, 20 nt, Homo sapiens
uacugcuuccacagcucccc

SEQ ID NO: 37331 - RNA, 22 nt, Homo sapiens
aaccauacaaccuacuaccuca

SEQ ID NO: 37332 - RNA, 21 nt, Homo sapiens
cccuccaccaugcaagggaug

SEQ ID NO: 37333 - RNA, 21 nt, Homo sapiens
aggcggcaggcacaggacugg

SEQ ID NO: 37334 - RNA, 22 nt, Homo sapiens
aggcauaggaugacaaagggaa

SEQ ID NO: 37335 - RNA, 22 nt, Homo sapiens
aggcgaaggaugacaaagggaa

SEQ ID NO: 37336 - RNA, 23 nt, Homo sapiens
ucucugcaggccgugugcuuugc

SEQ ID NO: 37337 - RNA, 21 nt, Homo sapiens
ccuucugacuccaaguccagu

SEQ ID NO: 37338 - RNA, 22 nt, Homo sapiens
gcacacaauaaauguuugcuga

SEQ ID NO: 37339 - RNA, 22 nt, Homo sapiens
gguaaaacucgcaauuacuuuu

SEQ ID NO: 37340 - RNA, 22 nt, Homo sapiens
ggccaaaaccacaauuacuuuu

SEQ ID NO: 37341 - RNA, 22 nt, Homo sapiens
ggcaaaaaccgcaauuacuuuu

SEQ ID NO: 37342 - RNA, 22 nt, Homo sapiens
ggcaaaaaccacaauuacuuuu

SEQ ID NO: 37343 - RNA, 22 nt, Homo sapiens
gacaaaaaccgcgauuacuuuu

SEQ ID NO: 37344 - RNA, 22 nt, Homo sapiens
ggcaaaauccgcaauuacuuuu

SEQ ID NO: 37345 - RNA, 22 nt, Homo sapiens
accaaagaccgcaauuacuuuu

SEQ ID NO: 37346 - RNA, 22 nt, Homo sapiens
acaaaauccacaauuacuuuug

SEQ ID NO: 37347 - RNA, 21 nt, Homo sapiens
uuuuggugcauauuuacuuua

SEQ ID NO: 37348 - RNA, 21 nt, Homo sapiens
caucaccuuccuucuccucca

SEQ ID NO: 37349 - RNA, 21 nt, Homo sapiens
cuacgcagaaaggacacagug

SEQ ID NO: 37350 - RNA, 26 nt, Homo sapiens
uuucagaauuugcugccaucaucauc

SEQ ID NO: 37351 - RNA, 22 nt, Homo sapiens
cgaccauggcuguagacuguua

SEQ ID NO: 37352 - RNA, 21 nt, Homo sapiens
ggccgugacuggagacuguua

SEQ ID NO: 37353 - RNA, 22 nt, Homo sapiens
gagguuucccguguauguuuca

SEQ ID NO: 37354 - RNA, 22 nt, Homo sapiens
gacaaaacccgcaaauacuuuu

SEQ ID NO: 37355 - RNA, 21 nt, Homo sapiens
aucagagguucagcuuacccu

SEQ ID NO: 37356 - RNA, 21 nt, Homo sapiens
acaauccuagagcacaagaag

SEQ ID NO: 37357 - RNA, 21 nt, Homo sapiens
cuggaggacggcaacagucag

SEQ ID NO: 37358 - RNA, 22 nt, Homo sapiens
aacccauggaauucaguucuca

SEQ ID NO: 37359 - RNA, 23 nt, Homo sapiens
cccaacagacauggcgguacuca

SEQ ID NO: 37360 - RNA, 22 nt, Homo sapiens
cgaauccaccacgaacaacuuc

SEQ ID NO: 37361 - RNA, 22 nt, Homo sapiens
gagauuggccauguaauacuca

SEQ ID NO: 37362 - RNA, 22 nt, Homo sapiens
gacaaaacccgcaaauacuuuu

SEQ ID NO: 37363 - RNA, 21 nt, Homo sapiens
ccccucccagccucccugcca

SEQ ID NO: 37364 - RNA, 22 nt, Homo sapiens
ggcucccaagaaccucaccugu

SEQ ID NO: 37365 - RNA, 17 nt, Homo sapiens
ggguggcagcgguggga

SEQ ID NO: 37366 - RNA, 18 nt, Homo sapiens
aucacauucaccucccug

SEQ ID NO: 37367 - RNA, 22 nt, Homo sapiens
cacugguacaaggguugggaga

SEQ ID NO: 37368 - RNA, 22 nt, Homo sapiens
cggugagcacccggccccugcg

SEQ ID NO: 37369 - RNA, 22 nt, Homo sapiens
caaacaccauugucacacucca

SEQ ID NO: 37370 - RNA, 24 nt, Homo sapiens
acugcuggucuucagucagggcca

SEQ ID NO: 37371 - RNA, 22 nt, Homo sapiens
augcccuuucaucauugcacug

SEQ ID NO: 37372 - RNA, 21 nt, Homo sapiens
gaccaaucgccguccccgccg

SEQ ID NO: 37373 - RNA, 20 nt, Homo sapiens
cccgccgcgucgcccugggg

SEQ ID NO: 37374 - RNA, 23 nt, Homo sapiens
guaaauagagguuuaauuaacac

SEQ ID NO: 37375 - RNA, 21 nt, Homo sapiens
acaggauugagggggggcccu

SEQ ID NO: 37376 - RNA, 22 nt, Homo sapiens
agcaaaauccgcaaguacuuuu

SEQ ID NO: 37377 - RNA, 21 nt, Homo sapiens
guaaugggaccuuccucuuug

SEQ ID NO: 37378 - RNA, 22 nt, Homo sapiens
gcggucccgcggcgccccgccu

SEQ ID NO: 37379 - RNA, 22 nt, Homo sapiens
ugcuguuagcccuagccccgca

SEQ ID NO: 37380 - RNA, 20 nt, Homo sapiens
uacugcuuccacagcucccc

SEQ ID NO: 37381 - RNA, 22 nt, Homo sapiens
cugggggcggcacaggggcuca

SEQ ID NO: 37382 - RNA, 22 nt, Homo sapiens
cacgaccgacgccacgccgagu

SEQ ID NO: 37383 - RNA, 22 nt, Homo sapiens
ucaggaacugccuuucucucca

SEQ ID NO: 37384 - RNA, 23 nt, Homo sapiens
acccucuauagggaagcgcguuc

SEQ ID NO: 37385 - RNA, 19 nt, Homo sapiens
guccugaauuccgcagccu

SEQ ID NO: 37386 - RNA, 22 nt, Homo sapiens
aagagggagacccaggcucgga

SEQ ID NO: 37387 - RNA, 23 nt, Homo sapiens
acagcgcucgcaaccgcagcgau

SEQ ID NO: 37388 - RNA, 22 nt, Homo sapiens
cugggggcggcacaggggcuca

SEQ ID NO: 37389 - RNA, 17 nt, Homo sapiens
gacagccucucccccac

SEQ ID NO: 37390 - RNA, 17 nt, Homo sapiens
ggguggcagcgguggga

SEQ ID NO: 37391 - RNA, 18 nt, Homo sapiens
aucacauucaccucccug

SEQ ID NO: 37392 - RNA, 23 nt, Homo sapiens
gggagugaagacacggagccaga

SEQ ID NO: 37393 - RNA, 22 nt, Homo sapiens
uacagauggauaccgugcaauu

SEQ ID NO: 37394 - RNA, 21 nt, Homo sapiens
ggacuauagaacuuucccccu

SEQ ID NO: 37395 - RNA, 22 nt, Homo sapiens
caagacacauuuggagagggac

SEQ ID NO: 37396 - RNA, 21 nt, Homo sapiens
gcaagcccagaccgcaaaaag

SEQ ID NO: 37397 - RNA, 22 nt, Homo sapiens
ucaggaacugccuuucucucca

SEQ ID NO: 37398 - RNA, 23 nt, Homo sapiens
aaagucucgcucucugccccuca

SEQ ID NO: 37399 - RNA, 18 nt, Homo sapiens
augacaccucccugugaa

SEQ ID NO: 37400 - RNA, 22 nt, Homo sapiens
gcaaaaguaauugagauuuuug

SEQ ID NO: 37401 - RNA, 22 nt, Homo sapiens
aaaguaacugcaguuuuugcua

SEQ ID NO: 37402 - RNA, 22 nt, Homo sapiens
gcugaggcuguggggcuggagu

SEQ ID NO: 37403 - RNA, 23 nt, Homo sapiens
accacaggagucugagcauuuga

SEQ ID NO: 37404 - RNA, 21 nt, Homo sapiens
gcaagcccagaccgcaaaaag

SEQ ID NO: 37405 - RNA, 23 nt, Homo sapiens
ucacauaggaauaaaaagccaua

SEQ ID NO: 37406 - RNA, 23 nt, Homo sapiens
accccuaucacgauuagcauuaa

SEQ ID NO: 37407 - RNA, 22 nt, Homo sapiens
cagacuccgguggaaugaagga

SEQ ID NO: 37408 - RNA, 18 nt, Homo sapiens
acccucugaaaggaagca

SEQ ID NO: 37409 - RNA, 22 nt, Homo sapiens
aaagugcuucuuaccuccagau

SEQ ID NO: 37410 - RNA, 22 nt, Homo sapiens
acgguccuacacucaaggcaug

SEQ ID NO: 37411 - RNA, 22 nt, Homo sapiens
aaaguaacugcaguuuuugcua

SEQ ID NO: 37412 - RNA, 23 nt, Homo sapiens
guucuguccuggaagaacauacu

SEQ ID NO: 37413 - RNA, 22 nt, Homo sapiens
cgcauuauuacucacgguacga

SEQ ID NO: 37414 - RNA, 18 nt, Homo sapiens
aucacauucaccucccug

SEQ ID NO: 37415 - RNA, 21 nt, Homo sapiens
acuagacugugagcuccucga

SEQ ID NO: 37416 - RNA, 21 nt, Homo sapiens
gggcaucugggacgcgcagga

SEQ ID NO: 37417 - RNA, 21 nt, Homo sapiens
gaccaaucgccguccccgccg

SEQ ID NO: 37418 - RNA, 22 nt, Homo sapiens
cggugagcacccggccccugcg

SEQ ID NO: 37419 - RNA, 22 nt, Homo sapiens
agcgggacuuugagggccaguu

SEQ ID NO: 37420 - RNA, 22 nt, Homo sapiens
ucagaccgagacaagugcaaug

SEQ ID NO: 37421 - RNA, 21 nt, Homo sapiens
agcuaugccagcaucuugccu

SEQ ID NO: 37422 - RNA, 22 nt, Homo sapiens
uccagcaaagggaagcgcuuuc

SEQ ID NO: 37423 - RNA, 22 nt, Homo sapiens
accucuaaaggggagcgcuuug

SEQ ID NO: 37424 - RNA, 23 nt, Homo sapiens
acacucuaaagagaagcgcuuug

SEQ ID NO: 37425 - RNA, 21 nt, Homo sapiens
gcuccaaagggaagcgcuuug

SEQ ID NO: 37426 - RNA, 21 nt, Homo sapiens
ccucuaaagagaagcgcuuuc

SEQ ID NO: 37427 - RNA, 25 nt, Homo sapiens
accaacggaccuacuucccuccgcc

SEQ ID NO: 37428 - RNA, 22 nt, Homo sapiens
gcggucccgcggcgccccgccu

SEQ ID NO: 37429 - RNA, 20 nt, Homo sapiens
aggggccucagccuccuggu

SEQ ID NO: 37430 - RNA, 20 nt, Homo sapiens
uccccacagacccagagccg

SEQ ID NO: 37431 - RNA, 22 nt, Homo sapiens
acaaaaguugccuuugugugau

SEQ ID NO: 37432 - RNA, 22 nt, Homo sapiens
cuggagagacaaggggaagagg

SEQ ID NO: 37433 - RNA, 22 nt, Homo sapiens
ucccucacacagaauuccagaa

SEQ ID NO: 37434 - RNA, 22 nt, Homo sapiens
augcuuuuugggguaagggcuu

SEQ ID NO: 37435 - RNA, 22 nt, Homo sapiens
acaaaguucugugaugcacuga

SEQ ID NO: 37436 - RNA, 22 nt, Homo sapiens
cagaagugggccgggcacaggg

SEQ ID NO: 37437 - RNA, 22 nt, Homo sapiens
cacucagcggccguuuccccaa

SEQ ID NO: 37438 - RNA, 23 nt, Homo sapiens
cgugagcuccuggaggacaggga

SEQ ID NO: 37439 - RNA, 22 nt, Homo sapiens
aggaaaccagcaaguguugacg

SEQ ID NO: 37440 - RNA, 19 nt, Homo sapiens
agaaaccccagcagagaca

SEQ ID NO: 37441 - RNA, 21 nt, Homo sapiens
ggacuauagaacuuucccccu

SEQ ID NO: 37442 - RNA, 20 nt, Homo sapiens
cccugcgccaucuccucuac

SEQ ID NO: 37443 - RNA, 17 nt, Homo sapiens
ggguggcagcgguggga

SEQ ID NO: 37444 - RNA, 18 nt, Homo sapiens
acccucugaaaggaagca

SEQ ID NO: 37445 - RNA, 22 nt, Homo sapiens
aaagugcuucuuaccuccagau

SEQ ID NO: 37446 - RNA, 20 nt, Homo sapiens
uacugcuuccacagcucccc

SEQ ID NO: 37447 - RNA, 21 nt, Homo sapiens
cggcucggguggcggcgacgg

SEQ ID NO: 37448 - RNA, 22 nt, Homo sapiens
acuccaacagggccgcgucucc

SEQ ID NO: 37449 - RNA, 21 nt, Homo sapiens
gaccaaucgccguccccgccg

SEQ ID NO: 37450 - RNA, 22 nt, Homo sapiens
cccaacaacaggaaacuaccua

SEQ ID NO: 37451 - RNA, 22 nt, Homo sapiens
gcggucccgcggcgccccgccu

SEQ ID NO: 37452 - RNA, 22 nt, Homo sapiens
ucccucacacagaauuccagaa

SEQ ID NO: 37453 - RNA, 22 nt, Homo sapiens
augcuuuuugggguaagggcuu

SEQ ID NO: 37454 - RNA, 23 nt, Homo sapiens
ucacauaggaauaaaaagccaua

SEQ ID NO: 37455 - RNA, 22 nt, Homo sapiens
aacccauggaauucaguucuca

SEQ ID NO: 37456 - RNA, 22 nt, Homo sapiens
agccuauggaauucaguucuca

SEQ ID NO: 37457 - RNA, 23 nt, Homo sapiens
gggagugaagacacggagccaga

SEQ ID NO: 37458 - RNA, 22 nt, Homo sapiens
ucaggaacugccuuucucucca

SEQ ID NO: 37459 - RNA, 22 nt, Homo sapiens
ucaggaacugccuuucucucca

SEQ ID NO: 37460 - RNA, 20 nt, Homo sapiens
acauuacuguuaucaaaaca

SEQ ID NO: 37461 - RNA, 22 nt, Homo sapiens
ucagaccgagacaagugcaaug

SEQ ID NO: 37462 - RNA, 23 nt, Homo sapiens
gaaagugcccucaaggcugagug

SEQ ID NO: 37463 - RNA, 17 nt, Homo sapiens
uggaggccccagcgaga

SEQ ID NO: 37464 - RNA, 23 nt, Homo sapiens
uggcccugacacgugguacugga

SEQ ID NO: 37465 - RNA, 22 nt, Homo sapiens
gugggguggguggucaggccga

SEQ ID NO: 37466 - RNA, 22 nt, Homo sapiens
acucaguaugccaggguaccau

SEQ ID NO: 37467 - RNA, 22 nt, Homo sapiens
gcacaaaucuccagaccaccca

SEQ ID NO: 37468 - RNA, 21 nt, Homo sapiens
gaccaaucgccguccccgccg

SEQ ID NO: 37469 - RNA, 22 nt, Homo sapiens
ucaacaucagucugauaagcua

SEQ ID NO: 37470 - RNA, 22 nt, Homo sapiens
ucagaccgagacaagugcaaug

SEQ ID NO: 37471 - RNA, 23 nt, Homo sapiens
aaaucagaaucacaccuggggga

SEQ ID NO: 37472 - RNA, 19 nt, Homo sapiens
guugggaucacaggcgccc

SEQ ID NO: 37473 - RNA, 25 nt, Homo sapiens
acggagcugucccaacaccaccccu

SEQ ID NO: 37474 - RNA, 24 nt, Homo sapiens
acgcagagcccgaaagcccccagu

SEQ ID NO: 37475 - RNA, 22 nt, Homo sapiens
gcggucccgcggcgccccgccu

SEQ ID NO: 37476 - RNA, 25 nt, Homo sapiens
aagaaagagucuugcuuugucgccc

SEQ ID NO: 37477 - RNA, 23 nt, Homo sapiens
acaccccaaaaucgaagcacuuc

SEQ ID NO: 37478 - RNA, 22 nt, Homo sapiens
acaaaaguugccuuugugugau

SEQ ID NO: 37479 - RNA, 22 nt, Homo sapiens
cugcucaaacccuccaaugacu

SEQ ID NO: 37480 - RNA, 24 nt, Homo sapiens
acgcgcaggccagagacccaggca

SEQ ID NO: 37481 - RNA, 21 nt, Homo sapiens
ccccucccagccucccugcca

SEQ ID NO: 37482 - RNA, 22 nt, Homo sapiens
caaacaccauugucacacucca

SEQ ID NO: 37483 - RNA, 17 nt, Homo sapiens
gggagaggaggaggcga

SEQ ID NO: 37484 - RNA, 21 nt, Homo sapiens
gggcaucugggacgcgcagga

SEQ ID NO: 37485 - RNA, 21 nt, Homo sapiens
gaccaaucgccguccccgccg

SEQ ID NO: 37486 - RNA, 22 nt, Homo sapiens
cggugagcacccggccccugcg

SEQ ID NO: 37487 - RNA, 23 nt, Homo sapiens
cggcucugucgucgaggcgcuca

SEQ ID NO: 37488 - RNA, 19 nt, Homo sapiens
agaaaccccagcagagaca

SEQ ID NO: 37489 - RNA, 21 nt, Homo sapiens
cugcugggccacaacguggga

SEQ ID NO: 37490 - RNA, 22 nt, Homo sapiens
gcggucccgcggcgccccgccu

SEQ ID NO: 37491 - RNA, 23 nt, Homo sapiens
cuccagccccuccagggcuuccu

SEQ ID NO: 37492 - RNA, 22 nt, Homo sapiens
ugcuguuagcccuagccccgca

SEQ ID NO: 37493 - RNA, 22 nt, Homo sapiens
uccggggacgaacgggacgggu

SEQ ID NO: 37494 - RNA, 22 nt, Homo sapiens
agugaauucuaccagugccaua

SEQ ID NO: 37495 - RNA, 19 nt, Homo sapiens
uaugcuaccuuugcacggu

SEQ ID NO: 37496 - RNA, 22 nt, Homo sapiens
ucagaccgagacaagugcaaug

SEQ ID NO: 37497 - RNA, 23 nt, Homo sapiens
aaagucucgcucucugccccuca

SEQ ID NO: 37498 - RNA, 22 nt, Homo sapiens
aacacucuaaagggaugcacga

SEQ ID NO: 37499 - RNA, 22 nt, Homo sapiens
gcggucccgcggcgccccgccu

SEQ ID NO: 37500 - RNA, 22 nt, Homo sapiens
ugcuguuagcccuagccccgca

SEQ ID NO: 37501 - RNA, 21 nt, Homo sapiens
caucaccuuccuucuccucca

SEQ ID NO: 37502 - RNA, 21 nt, Homo sapiens
cacaaccucaguguuuccagg

SEQ ID NO: 37503 - RNA, 21 nt, Homo sapiens
ccccucccagccucccugcca

SEQ ID NO: 37504 - RNA, 22 nt, Homo sapiens
caaacaccauugucacacucca

SEQ ID NO: 37505 - RNA, 22 nt, Homo sapiens
uccggggacgaacgggacgggu

SEQ ID NO: 37506 - RNA, 21 nt, Homo sapiens
agcgccuuuggcagcuagagu

SEQ ID NO: 37507 - RNA, 24 nt, Homo sapiens
acugcuggucuucagucagggcca

SEQ ID NO: 37508 - RNA, 23 nt, Homo sapiens
gggagugaagacacggagccaga

SEQ ID NO: 37509 - RNA, 18 nt, Homo sapiens
auucaaucuacugccuca

SEQ ID NO: 37510 - RNA, 20 nt, Homo sapiens
cccgccgcgucgcccugggg

SEQ ID NO: 37511 - RNA, 22 nt, Homo sapiens
acaguucuucaacuggcagcuu

SEQ ID NO: 37512 - RNA, 22 nt, Homo sapiens
acggaagggcagagagggccag

SEQ ID NO: 37513 - RNA, 22 nt, Homo sapiens
uacagauggauaccgugcaauu

SEQ ID NO: 37514 - RNA, 23 nt, Homo sapiens
aaagucucgcucucugccccuca

SEQ ID NO: 37515 - RNA, 21 nt, Homo sapiens
cucacucagauggccaacuca

SEQ ID NO: 37516 - RNA, 21 nt, Homo sapiens
guccugagagcgcugccuccu

SEQ ID NO: 37517 - RNA, 22 nt, Homo sapiens
ggaggccgggacgagugcaaua

SEQ ID NO: 37518 - RNA, 22 nt, Homo sapiens
gggagaggucucccugcgcaca

SEQ ID NO: 37519 - RNA, 21 nt, Homo sapiens
ggggagcgggggcccugccuu

SEQ ID NO: 37520 - RNA, 22 nt, Homo sapiens
cacauggccaaaacagagaaga

SEQ ID NO: 37521 - RNA, 22 nt, Homo sapiens
acacacccacgcgagccggaaa

SEQ ID NO: 37522 - RNA, 22 nt, Homo sapiens
cuggagagacaaggggaagagg

SEQ ID NO: 37523 - RNA, 22 nt, Homo sapiens
acaccuggcuccacacgcgggc

SEQ ID NO: 37524 - RNA, 21 nt, Homo sapiens
aguucucccaacguaaaccca

SEQ ID NO: 37525 - RNA, 22 nt, Homo sapiens
caagacacauuuggagagggac

SEQ ID NO: 37526 - RNA, 20 nt, Homo sapiens
uccccacagacccagagccg

SEQ ID NO: 37527 - RNA, 20 nt, Homo sapiens
cccugcgccaucuccucuac

SEQ ID NO: 37528 - RNA, 25 nt, Homo sapiens
gaauccugguucugucccucacuag

SEQ ID NO: 37529 - RNA, 23 nt, Homo sapiens
gcacaugugcacacagccgggug

SEQ ID NO: 37530 - RNA, 22 nt, Homo sapiens
gaggcucagaauggcucaggag

SEQ ID NO: 37531 - RNA, 21 nt, Homo sapiens
agagcucauccauaguuguca

SEQ ID NO: 37532 - RNA, 22 nt, Homo sapiens
ggcaaaauccgcaauuacuuuu

SEQ ID NO: 37533 - RNA, 23 nt, Homo sapiens
acauuuuucguuauugcucuuga

SEQ ID NO: 37534 - RNA, 22 nt, Homo sapiens
ucaguuuccucugcaaacaguu

SEQ ID NO: 37535 - RNA, 22 nt, Homo sapiens
gagguuucccguguauguuuca

SEQ ID NO: 37536 - RNA, 20 nt, Homo sapiens
guuugauaaacugacacaac

SEQ ID NO: 37537 - RNA, 21 nt, Homo sapiens
aggagacucacaaguuccugc

SEQ ID NO: 37538 - RNA, 21 nt, Homo sapiens
acccaguagccagauguagcu

SEQ ID NO: 37539 - RNA, 22 nt, Homo sapiens
gugggguggguggucaggccga

SEQ ID NO: 37540 - RNA, 23 nt, Homo sapiens
aggaacagcagcagcccgggccg

SEQ ID NO: 37541 - RNA, 22 nt, Homo sapiens
cagaaagugcuucccucuagag

SEQ ID NO: 37542 - RNA, 22 nt, Homo sapiens
cuguuccugcugaacugagcca

SEQ ID NO: 37543 - RNA, 23 nt, Homo sapiens
ccuagagagggugagaaccugcc

SEQ ID NO: 37544 - RNA, 24 nt, Homo sapiens
acgcgcaggccagagacccaggca

SEQ ID NO: 37545 - RNA, 20 nt, Homo sapiens
uacugcuuccacagcucccc

SEQ ID NO: 37546 - RNA, 24 nt, Homo sapiens
cacccccagagccucagcucccca

SEQ ID NO: 37547 - RNA, 23 nt, Homo sapiens
gaaaaacgcccccuggcuugaaa

SEQ ID NO: 37548 - RNA, 17 nt, Homo sapiens
gggagaggaggaggcga

SEQ ID NO: 37549 - RNA, 18 nt, Homo sapiens
aucacauucaccucccug

SEQ ID NO: 37550 - RNA, 21 nt, Homo sapiens
cggggugcacgggcggagggc

SEQ ID NO: 37551 - RNA, 21 nt, Homo sapiens
gaccaaucgccguccccgccg

SEQ ID NO: 37552 - RNA, 22 nt, Homo sapiens
cgauguaguccaaaggcacaua

SEQ ID NO: 37553 - RNA, 22 nt, Homo sapiens
gcggucccgcggcgccccgccu

SEQ ID NO: 37554 - RNA, 22 nt, Homo sapiens
ugcuguuagcccuagccccgca

SEQ ID NO: 37555 - RNA, 21 nt, Homo sapiens
ggucagaacccaucauucacu

SEQ ID NO: 37556 - RNA, 22 nt, Homo sapiens
agaaaaugccccucaguuuuga

SEQ ID NO: 37557 - RNA, 22 nt, Homo sapiens
acaaaguucugugaugcacuga

SEQ ID NO: 37558 - RNA, 22 nt, Homo sapiens
acaaaguucugugaugcacuga

SEQ ID NO: 37559 - RNA, 23 nt, Homo sapiens
ucaguuuugcauagauuugcaca

SEQ ID NO: 37560 - RNA, 22 nt, Homo sapiens
cacucagcaccaggauauuguu

SEQ ID NO: 37561 - RNA, 22 nt, Homo sapiens
aacuaugcaaccuacuaccucu

SEQ ID NO: 37562 - RNA, 22 nt, Homo sapiens
ugggguauuugacaaacugaca

SEQ ID NO: 37563 - RNA, 22 nt, Homo sapiens
accagcuaacaauacacugcca

SEQ ID NO: 37564 - RNA, 22 nt, Homo sapiens
cacuuagcagguuguauuauau

SEQ ID NO: 37565 - RNA, 22 nt, Homo sapiens
gcaaaaguaacugcaguuuugg

SEQ ID NO: 37566 - RNA, 22 nt, Homo sapiens
aaaguaacugcaguuuuugcua

SEQ ID NO: 37567 - RNA, 22 nt, Homo sapiens
acuucaaggaucuuaaacuuug

SEQ ID NO: 37568 - RNA, 21 nt, Homo sapiens
ccccucccagccucccugcca

SEQ ID NO: 37569 - RNA, 24 nt, Homo sapiens
acugcaggcuccagcuuccaggcu

SEQ ID NO: 37570 - RNA, 22 nt, Homo sapiens
acaccuggcuccacacgcgggc

SEQ ID NO: 37571 - RNA, 21 nt, Homo sapiens
agagcucauccauaguuguca

SEQ ID NO: 37572 - RNA, 22 nt, Homo sapiens
auaaggauuuuuaggggcauua

SEQ ID NO: 37573 - RNA, 22 nt, Homo sapiens
cagcauggaguccuccagguug

SEQ ID NO: 37574 - RNA, 22 nt, Homo sapiens
ccuggcacacaguagaccuuca

SEQ ID NO: 37575 - RNA, 22 nt, Homo sapiens
agcaaaauccgcaaguacuuuu

SEQ ID NO: 37576 - RNA, 22 nt, Homo sapiens
acaaaauccacaauuacuuuug

SEQ ID NO: 37577 - RNA, 21 nt, Homo sapiens
cccgaggagccgggcaggcuu

SEQ ID NO: 37578 - RNA, 22 nt, Homo sapiens
gccaccuucaaaugggaagucu

SEQ ID NO: 37579 - RNA, 21 nt, Homo sapiens
ggggagcgggggcccugccuu

SEQ ID NO: 37580 - RNA, 21 nt, Homo sapiens
cugaggagagaggaggugggg

SEQ ID NO: 37581 - RNA, 24 nt, Homo sapiens
acugcaggcuccagcuuccaggcu

SEQ ID NO: 37582 - RNA, 23 nt, Homo sapiens
gggagugaagacacggagccaga

SEQ ID NO: 37583 - RNA, 23 nt, Homo sapiens
gggagugaagacacggagccaga

SEQ ID NO: 37584 - RNA, 23 nt, Homo sapiens
cuaucugcacuagaugcaccuua

SEQ ID NO: 37585 - RNA, 22 nt, Homo sapiens
cagaagugggccgggcacaggg

SEQ ID NO: 37586 - RNA, 20 nt, Homo sapiens
acagcaaggagggcaggagg

SEQ ID NO: 37587 - RNA, 22 nt, Homo sapiens
agucuucacaacagcccugugu

SEQ ID NO: 37588 - RNA, 22 nt, Homo sapiens
aucgggaggggacugagccuga

SEQ ID NO: 37589 - RNA, 22 nt, Homo sapiens
gaauucaucacggccagccucu

SEQ ID NO: 37590 - RNA, 21 nt, Homo sapiens
cccgaggagccgggcaggcuu

SEQ ID NO: 37591 - RNA, 23 nt, Homo sapiens
uguaggcuggggauaaaugaaua

SEQ ID NO: 37592 - RNA, 20 nt, Homo sapiens
uacugcuuccacagcucccc

SEQ ID NO: 37593 - RNA, 20 nt, Homo sapiens
ugucuccacagggcucuuua

SEQ ID NO: 37594 - RNA, 21 nt, Homo sapiens
gcaagcccagaccgcaaaaag

SEQ ID NO: 37595 - RNA, 22 nt, Homo sapiens
agagcaagaccccgucucuaaa

SEQ ID NO: 37596 - RNA, 22 nt, Homo sapiens
augcccuuucaucauugcacug

SEQ ID NO: 37597 - RNA, 22 nt, Homo sapiens
cuuccagucgaggauguuuaca

SEQ ID NO: 37598 - RNA, 22 nt, Homo sapiens
cuuccagucggggauguuuaca

SEQ ID NO: 37599 - RNA, 22 nt, Homo sapiens
cuuccagucaaggauguuuaca

SEQ ID NO: 37600 - RNA, 21 nt, Homo sapiens
ccuucugacuccaaguccagu

SEQ ID NO: 37601 - RNA, 22 nt, Homo sapiens
gugauugccacucuccugagua

SEQ ID NO: 37602 - RNA, 22 nt, Homo sapiens
uuucaguuaucaaucugucaca

SEQ ID NO: 37603 - RNA, 19 nt, Homo sapiens
agaaaccccagcagagaca

SEQ ID NO: 37604 - RNA, 22 nt, Homo sapiens
uccucuuuucuuagagacucac

SEQ ID NO: 37605 - RNA, 21 nt, Homo sapiens
caacugaugccuuuccaagua

SEQ ID NO: 37606 - RNA, 19 nt, Homo sapiens
ccaccucccgaguccucac

SEQ ID NO: 37607 - RNA, 22 nt, Homo sapiens
ucaggaacugccuuucucucca

SEQ ID NO: 37608 - RNA, 21 nt, Homo sapiens
aggcggcaggcacaggacugg

SEQ ID NO: 37609 - RNA, 22 nt, Homo sapiens
ucaacaucagucugauaagcua

SEQ ID NO: 37610 - RNA, 21 nt, Homo sapiens
aucugcacugucagcacuuua

SEQ ID NO: 37611 - RNA, 23 nt, Homo sapiens
gcuuugacaauaucauugcacug

SEQ ID NO: 37612 - RNA, 22 nt, Homo sapiens
cacuuaucagguuguauuauaa

SEQ ID NO: 37613 - RNA, 22 nt, Homo sapiens
cacuuagcagguuguauuauau

SEQ ID NO: 37614 - RNA, 22 nt, Homo sapiens
gcaaaaguaauugagauuuuug

SEQ ID NO: 37615 - RNA, 21 nt, Homo sapiens
acuagcuuauacauaaaauua

SEQ ID NO: 37616 - RNA, 22 nt, Homo sapiens
cugcacuuuuaugaauaagcuc

SEQ ID NO: 37617 - RNA, 22 nt, Homo sapiens
gacucuugaacaacacagguuu

SEQ ID NO: 37618 - RNA, 21 nt, Homo sapiens
agagguugacuguauaauauu

SEQ ID NO: 37619 - RNA, 21 nt, Homo sapiens
cugaggagagaggaggugggg

SEQ ID NO: 37620 - RNA, 22 nt, Homo sapiens
ccaguagcacggcucaguccag

SEQ ID NO: 37621 - RNA, 21 nt, Homo sapiens
ucuccagaucagggcagucca

SEQ ID NO: 37622 - RNA, 22 nt, Homo sapiens
augcccuuucaucauugcacug

SEQ ID NO: 37623 - RNA, 22 nt, Homo sapiens
cacaaaccauuaugugcugcua

SEQ ID NO: 37624 - RNA, 22 nt, Homo sapiens
uguaaaccaugaugugcugcua

SEQ ID NO: 37625 - RNA, 22 nt, Homo sapiens
cgccaauauuuacgugcugcua

SEQ ID NO: 37626 - RNA, 23 nt, Homo sapiens
cuaccugcacuguaagcacuuug

SEQ ID NO: 37627 - RNA, 22 nt, Homo sapiens
ucaggaacugccuuucucucca

SEQ ID NO: 37628 - RNA, 23 nt, Homo sapiens
cccaacagacauggcgguacuca

SEQ ID NO: 37629 - RNA, 21 nt, Homo sapiens
gccaauauuucugugcugcua

SEQ ID NO: 37630 - RNA, 23 nt, Homo sapiens
gaaacccagcagacaauguagcu

SEQ ID NO: 37631 - RNA, 21 nt, Homo sapiens
ccuucugacuccaaguccagu

SEQ ID NO: 37632 - RNA, 22 nt, Homo sapiens
gccuucugacccuaaguccagu

SEQ ID NO: 37633 - RNA, 22 nt, Homo sapiens
uucaaaacaugaauugcugcug

SEQ ID NO: 37634 - RNA, 21 nt, Homo sapiens
guguauaugcccauggacugc

SEQ ID NO: 37635 - RNA, 21 nt, Homo sapiens
acaaaccacagugugcugcug

SEQ ID NO: 37636 - RNA, 21 nt, Homo sapiens
uagcacccagauagcaaggau

SEQ ID NO: 37637 - RNA, 24 nt, Homo sapiens
acugggcacaaacauguccagguc

SEQ ID NO: 37638 - RNA, 21 nt, Homo sapiens
gcugaggucugggccaggucu

SEQ ID NO: 37639 - RNA, 22 nt, Homo sapiens
agcucagaacccagaggucuca

SEQ ID NO: 37640 - RNA, 20 nt, Homo sapiens
cccugcgccaucuccucuac

SEQ ID NO: 37641 - RNA, 20 nt, Homo sapiens
uacugcuuccacagcucccc

SEQ ID NO: 37642 - RNA, 21 nt, Homo sapiens
ggggagcgggggcccugccuu

SEQ ID NO: 37643 - RNA, 18 nt, Homo sapiens
aucacauucaccucccug

SEQ ID NO: 37644 - RNA, 21 nt, Homo sapiens
cggggugcacgggcggagggc

SEQ ID NO: 37645 - RNA, 23 nt, Homo sapiens
gggagugaagacacggagccaga

SEQ ID NO: 37646 - RNA, 21 nt, Homo sapiens
gaccaaucgccguccccgccg

SEQ ID NO: 37647 - RNA, 22 nt, Homo sapiens
aggcauaggaugacaaagggaa

SEQ ID NO: 37648 - RNA, 22 nt, Homo sapiens
aggcgaaggaugacaaagggaa

SEQ ID NO: 37649 - RNA, 22 nt, Homo sapiens
ucagaccgagacaagugcaaug

SEQ ID NO: 37650 - RNA, 21 nt, Homo sapiens
gcagaacuuagccacugugaa

SEQ ID NO: 37651 - RNA, 21 nt, Homo sapiens
cacucugaagggaagcgcuuu

SEQ ID NO: 37652 - RNA, 25 nt, Homo sapiens
accaacggaccuacuucccuccgcc

SEQ ID NO: 37653 - RNA, 22 nt, Homo sapiens
gcggucccgcggcgccccgccu

SEQ ID NO: 37654 - RNA, 24 nt, Homo sapiens
cacccccagagccucagcucccca

SEQ ID NO: 37655 - RNA, 21 nt, Homo sapiens
cggcucggguggcggcgacgg

SEQ ID NO: 37656 - RNA, 22 nt, Homo sapiens
cuggagagacaaggggaagagg

SEQ ID NO: 37657 - RNA, 22 nt, Homo sapiens
uagcagaagcauuuccgcacac

SEQ ID NO: 37658 - RNA, 22 nt, Homo sapiens
cagaagugggccgggcacaggg

SEQ ID NO: 37659 - RNA, 23 nt, Homo sapiens
acauuuuucguuauugcucuuga

SEQ ID NO: 37660 - RNA, 25 nt, Homo sapiens
aggccgccacccgcccgcgaucccu

SEQ ID NO: 37661 - RNA, 25 nt, Homo sapiens
accaacggaccuacuucccuccgcc

SEQ ID NO: 37662 - RNA, 18 nt, Homo sapiens
gaaaugagggccagcuga

SEQ ID NO: 37663 - RNA, 21 nt, Homo sapiens
cugaggagagaggaggugggg

SEQ ID NO: 37664 - RNA, 19 nt, Homo sapiens
ccaccucccgaguccucac

SEQ ID NO: 37665 - RNA, 18 nt, Homo sapiens
ugguggcagaggugggau

SEQ ID NO: 37666 - RNA, 21 nt, Homo sapiens
gaccaaucgccguccccgccg

SEQ ID NO: 37667 - RNA, 20 nt, Homo sapiens
cccgccgcgucgcccugggg

SEQ ID NO: 37668 - RNA, 22 nt, Homo sapiens
uccacauggaguugcuguuaca

SEQ ID NO: 37669 - RNA, 22 nt, Homo sapiens
ucaacaucagucugauaagcua

SEQ ID NO: 37670 - RNA, 21 nt, Homo sapiens
acaggauugagggggggcccu

SEQ ID NO: 37671 - RNA, 22 nt, Homo sapiens
acaaccagcuaagacacugcca

SEQ ID NO: 37672 - RNA, 22 nt, Homo sapiens
auggcaguggaguuagugauug

SEQ ID NO: 37673 - RNA, 23 nt, Homo sapiens
gcaaucagcuaacuacacugccu

SEQ ID NO: 37674 - RNA, 22 nt, Homo sapiens
accagcuaacaauacacugcca

SEQ ID NO: 37675 - RNA, 22 nt, Homo sapiens
gccagcuaacaauacacugccu

SEQ ID NO: 37676 - RNA, 22 nt, Homo sapiens
gcggucccgcggcgccccgccu

SEQ ID NO: 37677 - RNA, 22 nt, Homo sapiens
ugcuguuagcccuagccccgca

SEQ ID NO: 37678 - RNA, 20 nt, Homo sapiens
uacugcuuccacagcucccc

SEQ ID NO: 37679 - RNA, 21 nt, Homo sapiens
cucccccacugcagcuggcac

SEQ ID NO: 37680 - RNA, 20 nt, Homo sapiens
uccgccugucugaacaguga

SEQ ID NO: 37681 - RNA, 24 nt, Homo sapiens
acugcaggcuccagcuuccaggcu

SEQ ID NO: 37682 - RNA, 24 nt, Homo sapiens
acugcuggucuucagucagggcca

SEQ ID NO: 37683 - RNA, 22 nt, Homo sapiens
augcccuuuuaacauugcacug

SEQ ID NO: 37684 - RNA, 22 nt, Homo sapiens
augcccuuucaucauugcacug

SEQ ID NO: 37685 - RNA, 22 nt, Homo sapiens
ccagaacugaguccacagggca

SEQ ID NO: 37686 - RNA, 22 nt, Homo sapiens
cagaagugggccgggcacaggg

SEQ ID NO: 37687 - RNA, 22 nt, Homo sapiens
agucuucacaacagcccugugu

SEQ ID NO: 37688 - RNA, 23 nt, Homo sapiens
gcuuugacaauacuauugcacug

SEQ ID NO: 37689 - RNA, 23 nt, Homo sapiens
gcuuugacaauaucauugcacug

SEQ ID NO: 37690 - RNA, 22 nt, Homo sapiens
acggaagggcagagagggccag

SEQ ID NO: 37691 - RNA, 22 nt, Homo sapiens
caacaaaaucacugaugcugga

SEQ ID NO: 37692 - RNA, 20 nt, Homo sapiens
uaugaacaauuucuaggaau

SEQ ID NO: 37693 - RNA, 22 nt, Homo sapiens
ucaguuuccucugcaaacaguu

SEQ ID NO: 37694 - RNA, 23 nt, Homo sapiens
acccuauaagcaauauugcacua

SEQ ID NO: 37695 - RNA, 22 nt, Homo sapiens
gaauucaucacggccagccucu

SEQ ID NO: 37696 - RNA, 20 nt, Homo sapiens
acaaugagaacccauggucu

SEQ ID NO: 37697 - RNA, 21 nt, Homo sapiens
cccgaggagccgggcaggcuu

SEQ ID NO: 37698 - RNA, 23 nt, Homo sapiens
accacaggagucugagcauuuga

SEQ ID NO: 37699 - RNA, 20 nt, Homo sapiens
cucaaagcaaacccugcaga

SEQ ID NO: 37700 - RNA, 21 nt, Homo sapiens
cugaggagagaggaggugggg

SEQ ID NO: 37701 - RNA, 20 nt, Homo sapiens
gcagcuguccgcccagacac

SEQ ID NO: 37702 - RNA, 24 nt, Homo sapiens
acugcaggcuccagcuuccaggcu

SEQ ID NO: 37703 - RNA, 23 nt, Homo sapiens
aaucuacuuucuuugcucauccu

SEQ ID NO: 37704 - RNA, 22 nt, Homo sapiens
aaccacuuucuuugcucauccg

SEQ ID NO: 37705 - RNA, 22 nt, Homo sapiens
ccaguagcacggcucaguccag

SEQ ID NO: 37706 - RNA, 21 nt, Homo sapiens
ucuccagaucagggcagucca

SEQ ID NO: 37707 - RNA, 22 nt, Homo sapiens
cacaaaccauuaugugcugcua

SEQ ID NO: 37708 - RNA, 22 nt, Homo sapiens
uguaaaccaugaugugcugcua

SEQ ID NO: 37709 - RNA, 22 nt, Homo sapiens
cgccaauauuuacgugcugcua

SEQ ID NO: 37710 - RNA, 23 nt, Homo sapiens
cuaccugcacuguaagcacuuug

SEQ ID NO: 37711 - RNA, 18 nt, Homo sapiens
auucaaucuacugccuca

SEQ ID NO: 37712 - RNA, 21 nt, Homo sapiens
gccaauauuucugugcugcua

SEQ ID NO: 37713 - RNA, 21 nt, Homo sapiens
ccuucugacuccaaguccagu

SEQ ID NO: 37714 - RNA, 22 nt, Homo sapiens
gccuucugacccuaaguccagu

SEQ ID NO: 37715 - RNA, 22 nt, Homo sapiens
uucaaaacaugaauugcugcug

SEQ ID NO: 37716 - RNA, 21 nt, Homo sapiens
guguauaugcccauggacugc

SEQ ID NO: 37717 - RNA, 22 nt, Homo sapiens
gaauucaucacggccagccucu

SEQ ID NO: 37718 - RNA, 21 nt, Homo sapiens
acaaaccacagugugcugcug

SEQ ID NO: 37719 - RNA, 21 nt, Homo sapiens
uagcacccagauagcaaggau

SEQ ID NO: 37720 - RNA, 22 nt, Homo sapiens
caugauugccacgucugcagua

SEQ ID NO: 37721 - RNA, 21 nt, Homo sapiens
ugauugccacugucugcagua

SEQ ID NO: 37722 - RNA, 22 nt, Homo sapiens
acacucuaaaaggaugcacuuu

SEQ ID NO: 37723 - RNA, 22 nt, Homo sapiens
aaccucuaaaaggaugcacuuu

SEQ ID NO: 37724 - RNA, 22 nt, Homo sapiens
auccucuaaaaagaugcacuuu

SEQ ID NO: 37725 - RNA, 22 nt, Homo sapiens
caagacacauuuggagagggac

SEQ ID NO: 37726 - RNA, 22 nt, Homo sapiens
aaggugauggucagcagacaua

SEQ ID NO: 37727 - RNA, 20 nt, Homo sapiens
cccugcgccaucuccucuac

SEQ ID NO: 37728 - RNA, 21 nt, Homo sapiens
ggggagcgggggcccugccuu

SEQ ID NO: 37729 - RNA, 21 nt, Homo sapiens
cugaggagagaggaggugggg

SEQ ID NO: 37730 - RNA, 21 nt, Homo sapiens
gaccaaucgccguccccgccg

SEQ ID NO: 37731 - RNA, 23 nt, Homo sapiens
cccaacagacauggcgguacuca

SEQ ID NO: 37732 - RNA, 22 nt, Homo sapiens
uggcagcagcggagggggcaga

SEQ ID NO: 37733 - RNA, 20 nt, Homo sapiens
ccagcagcaccuggggcagu

SEQ ID NO: 37734 - RNA, 21 nt, Homo sapiens
auccuguacugagcugccccg

SEQ ID NO: 37735 - RNA, 22 nt, Homo sapiens
aguccagauucugugcccacca

SEQ ID NO: 37736 - RNA, 19 nt, Homo sapiens
guugggaucacaggcgccc

SEQ ID NO: 37737 - RNA, 22 nt, Homo sapiens
gcacauguucugcggcccacca

SEQ ID NO: 37738 - RNA, 22 nt, Homo sapiens
gcggucccgcggcgccccgccu

SEQ ID NO: 37739 - RNA, 21 nt, Homo sapiens
caucaccuuccuucuccucca

SEQ ID NO: 37740 - RNA, 21 nt, Homo sapiens
aagggucaguaagcacccgcg

SEQ ID NO: 37741 - RNA, 20 nt, Homo sapiens
uacugcuuccacagcucccc

SEQ ID NO: 37742 - RNA, 17 nt, Homo sapiens
caccugaauuacuugaa

SEQ ID NO: 37743 - RNA, 22 nt, Homo sapiens
agagcaagaccccgucucuaaa

SEQ ID NO: 37744 - RNA, 24 nt, Homo sapiens
gaaagugcauagaauucugucugg

SEQ ID NO: 37745 - RNA, 22 nt, Homo sapiens
uguaaaccaugaugugcugcua

SEQ ID NO: 37746 - RNA, 22 nt, Homo sapiens
agccuauccuggauuacuugaa

SEQ ID NO: 37747 - RNA, 21 nt, Homo sapiens
accuauccugaauuacuugaa

SEQ ID NO: 37748 - RNA, 21 nt, Homo sapiens
caugcacaugcacacauacau

SEQ ID NO: 37749 - RNA, 22 nt, Homo sapiens
cacuuagcagguuguauuauau

SEQ ID NO: 37750 - RNA, 22 nt, Homo sapiens
guacaaaaguaauuacaguuuu

SEQ ID NO: 37751 - RNA, 23 nt, Homo sapiens
guucuguccuggaagaacauacu

SEQ ID NO: 37752 - RNA, 22 nt, Homo sapiens
aaggugauggucagcagacaua

SEQ ID NO: 37753 - RNA, 23 nt, Homo sapiens
agcaaaaaugugcuagugccaaa

SEQ ID NO: 37754 - RNA, 22 nt, Homo sapiens
ucaggaacugccuuucucucca

SEQ ID NO: 37755 - RNA, 22 nt, Homo sapiens
agcugaguguaggauguuuaca

SEQ ID NO: 37756 - RNA, 22 nt, Homo sapiens
ucaguggcucagguucguugca

SEQ ID NO: 37757 - RNA, 22 nt, Homo sapiens
ggaggccgggacgagugcaaua

SEQ ID NO: 37758 - RNA, 21 nt, Homo sapiens
cugaggagagaggaggugggg

SEQ ID NO: 37759 - RNA, 18 nt, Homo sapiens
ugguggcagaggugggau

SEQ ID NO: 37760 - RNA, 22 nt, Homo sapiens
ucaggaacugccuuucucucca

SEQ ID NO: 37761 - RNA, 22 nt, Homo sapiens
cggugagcacccggccccugcg

SEQ ID NO: 37762 - RNA, 22 nt, Homo sapiens
ucaucucgcccgcaaagaccca

SEQ ID NO: 37763 - RNA, 21 nt, Homo sapiens
aagugucagacacgguggugg

SEQ ID NO: 37764 - RNA, 21 nt, Homo sapiens
aucugcacugucagcacuuua

SEQ ID NO: 37765 - RNA, 23 nt, Homo sapiens
gcuuugacaauaucauugcacug

SEQ ID NO: 37766 - RNA, 21 nt, Homo sapiens
ucaaucacagauagcaccccu

SEQ ID NO: 37767 - RNA, 22 nt, Homo sapiens
uacagauggauaccgugcaauu

SEQ ID NO: 37768 - RNA, 22 nt, Homo sapiens
acacucuaaagggaugcacgau

SEQ ID NO: 37769 - RNA, 22 nt, Homo sapiens
acacucuaaaaggaugcacgau

SEQ ID NO: 37770 - RNA, 22 nt, Homo sapiens
uuucaguuaucaaucugucaca

SEQ ID NO: 37771 - RNA, 25 nt, Homo sapiens
acggagcugucccaacaccaccccu

SEQ ID NO: 37772 - RNA, 18 nt, Homo sapiens
gaaaugagggccagcuga

SEQ ID NO: 37773 - RNA, 22 nt, Homo sapiens
cgcauuauuacucacgguacga

SEQ ID NO: 37774 - RNA, 18 nt, Homo sapiens
uggcgccugaacagggac

SEQ ID NO: 37775 - RNA, 24 nt, Homo sapiens
acugcuggucuucagucagggcca

SEQ ID NO: 37776 - RNA, 24 nt, Homo sapiens
agugugaguucuaccauugccaaa

SEQ ID NO: 37777 - RNA, 21 nt, Homo sapiens
ggcugucaauucauaggucag

SEQ ID NO: 37778 - RNA, 21 nt, Homo sapiens
aucugcacugucagcacuuua

SEQ ID NO: 37779 - RNA, 23 nt, Homo sapiens
gcuuugacaauaucauugcacug

SEQ ID NO: 37780 - RNA, 22 nt, Homo sapiens
auaaggauuuuuaggggcauua

SEQ ID NO: 37781 - RNA, 22 nt, Homo sapiens
cucagagcagacgugguucuca

SEQ ID NO: 37782 - RNA, 23 nt, Homo sapiens
gagcaaggcucuugucuguaagu

SEQ ID NO: 37783 - RNA, 23 nt, Homo sapiens
gggccgcagcugucgcccguguc

SEQ ID NO: 37784 - RNA, 22 nt, Homo sapiens
cucauccgauguacaauaauuu

SEQ ID NO: 37785 - RNA, 21 nt, Homo sapiens
ccccucccagccucccugcca

SEQ ID NO: 37786 - RNA, 23 nt, Homo sapiens
cuaucugcacuagaugcaccuua

SEQ ID NO: 37787 - RNA, 22 nt, Homo sapiens
cggugagcacccggccccugcg

SEQ ID NO: 37788 - RNA, 22 nt, Homo sapiens
ucaucucgcccgcaaagaccca

SEQ ID NO: 37789 - RNA, 23 nt, Homo sapiens
uccaucauuacccggcaguauua

SEQ ID NO: 37790 - RNA, 22 nt, Homo sapiens
cuguuccugcugaacugagcca

SEQ ID NO: 37791 - RNA, 21 nt, Homo sapiens
aucugcacugucagcacuuua

SEQ ID NO: 37792 - RNA, 23 nt, Homo sapiens
gcuuugacaauaucauugcacug

SEQ ID NO: 37793 - RNA, 18 nt, Homo sapiens
acccucugaaaggaagca

SEQ ID NO: 37794 - RNA, 22 nt, Homo sapiens
aaagugcuucuuaccuccagau

SEQ ID NO: 37795 - RNA, 23 nt, Homo sapiens
gggcucuuacucccucaggcacu

SEQ ID NO: 37796 - RNA, 22 nt, Homo sapiens
ucggucccucgggccagggcag

SEQ ID NO: 37797 - RNA, 23 nt, Homo sapiens
gggagugaagacacggagccaga

SEQ ID NO: 37798 - RNA, 23 nt, Homo sapiens
aggaacagcagcagcccgggccg

SEQ ID NO: 37799 - RNA, 21 nt, Homo sapiens
gaccaaucgccguccccgccg

SEQ ID NO: 37800 - RNA, 22 nt, Homo sapiens
cggugagcacccggccccugcg

SEQ ID NO: 37801 - RNA, 23 nt, Homo sapiens
cccaacagacauggcgguacuca

SEQ ID NO: 37802 - RNA, 22 nt, Homo sapiens
aggaaaccagcaaguguugacg

SEQ ID NO: 37803 - RNA, 22 nt, Homo sapiens
aacccucuaaaaggaagcacuu

SEQ ID NO: 37804 - RNA, 22 nt, Homo sapiens
gcggucccgcggcgccccgccu

SEQ ID NO: 37805 - RNA, 17 nt, Homo sapiens
gggagaggaggaggcga

SEQ ID NO: 37806 - RNA, 24 nt, Homo sapiens
acugcuggucuucagucagggcca

SEQ ID NO: 37807 - RNA, 23 nt, Homo sapiens
cggcucugucgucgaggcgcuca

SEQ ID NO: 37808 - RNA, 22 nt, Homo sapiens
ugcuguuagcccuagccccgca

SEQ ID NO: 37809 - RNA, 21 nt, Homo sapiens
gaccaaucgccguccccgccg

SEQ ID NO: 37810 - RNA, 22 nt, Homo sapiens
gcggucccgcggcgccccgccu

SEQ ID NO: 37811 - RNA, 18 nt, Homo sapiens
gaaaugagggccagcuga

SEQ ID NO: 37812 - RNA, 21 nt, Homo sapiens
ccccucccagccucccugcca

SEQ ID NO: 37813 - RNA, 24 nt, Homo sapiens
acugcuggucuucagucagggcca

SEQ ID NO: 37814 - RNA, 18 nt, Homo sapiens
aucacauucaccucccug

SEQ ID NO: 37815 - RNA, 23 nt, Homo sapiens
gggagugaagacacggagccaga

SEQ ID NO: 37816 - RNA, 21 nt, Homo sapiens
aggcggcaggcacaggacugg

SEQ ID NO: 37817 - RNA, 22 nt, Homo sapiens
ggagagccuccacccaacccuc

SEQ ID NO: 37818 - RNA, 23 nt, Homo sapiens
ccacccaaugaccuacuccaaga

SEQ ID NO: 37819 - RNA, 19 nt, Homo sapiens
uagcauacagauacgccca

SEQ ID NO: 37820 - RNA, 22 nt, Homo sapiens
gauccgagcaccggggaccccc

SEQ ID NO: 37821 - RNA, 22 nt, Homo sapiens
caagacacauuuggagagggac

SEQ ID NO: 37822 - RNA, 22 nt, Homo sapiens
caaacaccauugucacacucca

SEQ ID NO: 37823 - RNA, 21 nt, Homo sapiens
caucaccuuccuucuccucca

SEQ ID NO: 37824 - RNA, 22 nt, Homo sapiens
uauccacuacaccccgcugccu

SEQ ID NO: 37825 - RNA, 22 nt, Homo sapiens
uccggggacgaacgggacgggu

SEQ ID NO: 37826 - RNA, 21 nt, Homo sapiens
ucuccagaucagggcagucca

SEQ ID NO: 37827 - RNA, 23 nt, Homo sapiens
aggaacagcagcagcccgggccg

SEQ ID NO: 37828 - RNA, 22 nt, Homo sapiens
cggugagcacccggccccugcg

SEQ ID NO: 37829 - RNA, 23 nt, Homo sapiens
aaagucucgcucucugccccuca

SEQ ID NO: 37830 - RNA, 21 nt, Homo sapiens
auccuguacugagcugccccg

SEQ ID NO: 37831 - RNA, 24 nt, Homo sapiens
acgcgcaggccagagacccaggca

SEQ ID NO: 37832 - RNA, 20 nt, Homo sapiens
uccccacagacccagagccg

SEQ ID NO: 37833 - RNA, 21 nt, Homo sapiens
auaauggagaccaggccacga

SEQ ID NO: 37834 - RNA, 22 nt, Homo sapiens
caaacaccauugucacacucca

SEQ ID NO: 37835 - RNA, 22 nt, Homo sapiens
ugaagaagggggggaagggcgu

SEQ ID NO: 37836 - RNA, 21 nt, Homo sapiens
gaccaaucgccguccccgccg

SEQ ID NO: 37837 - RNA, 22 nt, Homo sapiens
cacucagcggccguuuccccaa

SEQ ID NO: 37838 - RNA, 23 nt, Homo sapiens
cgugagcuccuggaggacaggga

SEQ ID NO: 37839 - RNA, 19 nt, Homo sapiens
agaaaccccagcagagaca

SEQ ID NO: 37840 - RNA, 25 nt, Homo sapiens
acggagcugucccaacaccaccccu

SEQ ID NO: 37841 - RNA, 21 nt, Homo sapiens
agguaagcgcuguugcuagcc

SEQ ID NO: 37842 - RNA, 22 nt, Homo sapiens
gcggucccgcggcgccccgccu

SEQ ID NO: 37843 - RNA, 22 nt, Homo sapiens
ugcuguuagcccuagccccgca

SEQ ID NO: 37844 - RNA, 20 nt, Homo sapiens
uacugcuuccacagcucccc

SEQ ID NO: 37845 - RNA, 22 nt, Homo sapiens
cugggggcggcacaggggcuca

SEQ ID NO: 37846 - RNA, 20 nt, Homo sapiens
gcagcuguccgcccagacac

SEQ ID NO: 37847 - RNA, 21 nt, Homo sapiens
agggcucaucuugguccugca

SEQ ID NO: 37848 - RNA, 21 nt, Homo sapiens
uuuagcauaaguaugucccaa

SEQ ID NO: 37849 - RNA, 21 nt, Homo sapiens
ccgugguucuacccuguggua

SEQ ID NO: 37850 - RNA, 21 nt, Homo sapiens
gaccaaucgccguccccgccg

SEQ ID NO: 37851 - RNA, 21 nt, Homo sapiens
uucuaggauaggcccaggggc

SEQ ID NO: 37852 - RNA, 21 nt, Homo sapiens
ugcaugacggccugcaagaca

SEQ ID NO: 37853 - RNA, 23 nt, Homo sapiens
aagaaucuugucccgcagguccu

SEQ ID NO: 37854 - RNA, 21 nt, Homo sapiens
ugacugcagagcaaaagacac

SEQ ID NO: 37855 - RNA, 22 nt, Homo sapiens
aagagggagacccaggcucgga

SEQ ID NO: 37856 - RNA, 19 nt, Homo sapiens
aagacauuuucagacagcu

SEQ ID NO: 37857 - RNA, 21 nt, Homo sapiens
cacaacccuaguggcgccauu

SEQ ID NO: 37858 - RNA, 22 nt, Homo sapiens
aaggugauggucagcagacaua

SEQ ID NO: 37859 - RNA, 22 nt, Homo sapiens
gcggucccgcggcgccccgccu

SEQ ID NO: 37860 - RNA, 22 nt, Homo sapiens
ccucaggcacggccgggccacc

SEQ ID NO: 37861 - RNA, 21 nt, Homo sapiens
cacaaccucaguguuuccagg

SEQ ID NO: 37862 - RNA, 22 nt, Homo sapiens
gaggcucagaauggcucaggag

SEQ ID NO: 37863 - RNA, 25 nt, Homo sapiens
aagaaagagucuugcuuugucgccc

SEQ ID NO: 37864 - RNA, 23 nt, Homo sapiens
ucacauaggaauaaaaagccaua

SEQ ID NO: 37865 - RNA, 23 nt, Homo sapiens
ucacauaggaaugaaaagccaua

SEQ ID NO: 37866 - RNA, 20 nt, Homo sapiens
acagcaaggagggcaggagg

SEQ ID NO: 37867 - RNA, 21 nt, Homo sapiens
aucugcacugucagcacuuua

SEQ ID NO: 37868 - RNA, 23 nt, Homo sapiens
gcuuugacaauaucauugcacug

SEQ ID NO: 37869 - RNA, 22 nt, Homo sapiens
aaucagucucauugcuuuauaa

SEQ ID NO: 37870 - RNA, 22 nt, Homo sapiens
gaauucaucacggccagccucu

SEQ ID NO: 37871 - RNA, 22 nt, Homo sapiens
cagcauggaguccuccagguug

SEQ ID NO: 37872 - RNA, 23 nt, Homo sapiens
gaaaaacgcccccuggcuugaaa

SEQ ID NO: 37873 - RNA, 22 nt, Homo sapiens
gugauugccacucuccugagua

SEQ ID NO: 37874 - RNA, 24 nt, Homo sapiens
acgcgcaggccagagacccaggca

SEQ ID NO: 37875 - RNA, 22 nt, Homo sapiens
gcugaggcuguggggcuggagu

SEQ ID NO: 37876 - RNA, 22 nt, Homo sapiens
caaacaccauugucacacucca

SEQ ID NO: 37877 - RNA, 22 nt, Homo sapiens
aacaacacuugaccacauccug

SEQ ID NO: 37878 - RNA, 24 nt, Homo sapiens
agugugaguucuaccauugccaaa

SEQ ID NO: 37879 - RNA, 22 nt, Homo sapiens
ccggcugcaacacaagacacga

SEQ ID NO: 37880 - RNA, 23 nt, Homo sapiens
ucaguuuugcauagauuugcaca

SEQ ID NO: 37881 - RNA, 22 nt, Homo sapiens
cacucagcaccaggauauuguu

SEQ ID NO: 37882 - RNA, 22 nt, Homo sapiens
aacuaugcaaccuacuaccucu

SEQ ID NO: 37883 - RNA, 21 nt, Homo sapiens
uucuaggauaggcccaggggc

SEQ ID NO: 37884 - RNA, 22 nt, Homo sapiens
gagguuucccguguauguuuca

SEQ ID NO: 37885 - RNA, 22 nt, Homo sapiens
gcacacaauaaauguuugcuga

SEQ ID NO: 37886 - RNA, 23 nt, Homo sapiens
aaucgcgguuuauaccaaaugaa

SEQ ID NO: 37887 - RNA, 21 nt, Homo sapiens
gaaggaagugagugcagccac

SEQ ID NO: 37888 - RNA, 20 nt, Homo sapiens
uacugcuuccacagcucccc

SEQ ID NO: 37889 - RNA, 21 nt, Homo sapiens
ucacccagaucugcggccuaa

SEQ ID NO: 37890 - RNA, 21 nt, Homo sapiens
gaccaaucgccguccccgccg

SEQ ID NO: 37891 - RNA, 23 nt, Homo sapiens
aaagucucgcucucugccccuca

SEQ ID NO: 37892 - RNA, 23 nt, Homo sapiens
ccaccuggcaagaacaggcguuc

SEQ ID NO: 37893 - RNA, 22 nt, Homo sapiens
gcggucccgcggcgccccgccu

SEQ ID NO: 37894 - RNA, 22 nt, Homo sapiens
ccucaggcacggccgggccacc

SEQ ID NO: 37895 - RNA, 22 nt, Homo sapiens
ugcuguuagcccuagccccgca

SEQ ID NO: 37896 - RNA, 21 nt, Homo sapiens
auaauggagaccaggccacga

SEQ ID NO: 37897 - RNA, 17 nt, Homo sapiens
gggagaggaggaggcga

SEQ ID NO: 37898 - RNA, 19 nt, Homo sapiens
cagcaucagcagcaucauc

SEQ ID NO: 37899 - RNA, 21 nt, Homo sapiens
gaccaaucgccguccccgccg

SEQ ID NO: 37900 - RNA, 21 nt, Homo sapiens
gaccaaucgccguccccgccg

SEQ ID NO: 37901 - RNA, 23 nt, Homo sapiens
aaagucucgcucucugccccuca

SEQ ID NO: 37902 - RNA, 23 nt, Homo sapiens
ccacccaaugaccuacuccaaga

SEQ ID NO: 37903 - RNA, 19 nt, Homo sapiens
guccugaauuccgcagccu

SEQ ID NO: 37904 - RNA, 22 nt, Homo sapiens
gauccgagcaccggggaccccc

SEQ ID NO: 37905 - RNA, 25 nt, Homo sapiens
aggccgccacccgcccgcgaucccu

SEQ ID NO: 37906 - RNA, 22 nt, Homo sapiens
gcggucccgcggcgccccgccu

SEQ ID NO: 37907 - RNA, 22 nt, Homo sapiens
gcggucccgcggcgccccgccu

SEQ ID NO: 37908 - RNA, 22 nt, Homo sapiens
ugcuguuagcccuagccccgca

SEQ ID NO: 37909 - RNA, 22 nt, Homo sapiens
cgcauuauuacucacgguacga

SEQ ID NO: 37910 - RNA, 20 nt, Homo sapiens
uacugcuuccacagcucccc

SEQ ID NO: 37911 - RNA, 23 nt, Homo sapiens
agggauuccugggaaaacuggac

SEQ ID NO: 37912 - RNA, 21 nt, Homo sapiens
uagaaaggcuaggaccaaacc

SEQ ID NO: 37913 - RNA, 23 nt, Homo sapiens
ucaguuuugcauagauuugcaca

SEQ ID NO: 37914 - RNA, 23 nt, Homo sapiens
ucaguuuugcauagauuugcaca

SEQ ID NO: 37915 - RNA, 23 nt, Homo sapiens
ucaguuuugcauggauuugcaca

SEQ ID NO: 37916 - RNA, 22 nt, Homo sapiens
cacucagcaccaggauauuguu

SEQ ID NO: 37917 - RNA, 22 nt, Homo sapiens
aacuaugcaaccuacuaccucu

SEQ ID NO: 37918 - RNA, 21 nt, Homo sapiens
uucacuccaaaaggugcaaaa

SEQ ID NO: 37919 - RNA, 23 nt, Homo sapiens
agacaaggcccacccgugcaaac

SEQ ID NO: 37920 - RNA, 20 nt, Homo sapiens
gcaaaugguacagcuacuuu

SEQ ID NO: 37921 - RNA, 21 nt, Homo sapiens
cacaaccucaguguuuccagg

SEQ ID NO: 37922 - RNA, 20 nt, Homo sapiens
ugucuccacagggcucuuua

SEQ ID NO: 37923 - RNA, 22 nt, Homo sapiens
agaaagcgcuuuccuuuguaga

SEQ ID NO: 37924 - RNA, 22 nt, Homo sapiens
acaaaguucuguagugcacuga

SEQ ID NO: 37925 - RNA, 21 nt, Homo sapiens
agaaguagaccauguguccua

SEQ ID NO: 37926 - RNA, 18 nt, Homo sapiens
gaaaugagggccagcuga

SEQ ID NO: 37927 - RNA, 18 nt, Homo sapiens
cagcagccuccuucucaa

SEQ ID NO: 37928 - RNA, 24 nt, Homo sapiens
gaaagugcauagaauucugucugg

SEQ ID NO: 37929 - RNA, 21 nt, Homo sapiens
caugcacaugcacacauacau

SEQ ID NO: 37930 - RNA, 21 nt, Homo sapiens
cacucugaagggaagcgcuuu

SEQ ID NO: 37931 - RNA, 22 nt, Homo sapiens
acaucaucgcauauugacacaa

SEQ ID NO: 37932 - RNA, 22 nt, Homo sapiens
acaguggucaucgagugacaca

SEQ ID NO: 37933 - RNA, 21 nt, Homo sapiens
gcuccaaccucagcagacugu

SEQ ID NO: 37934 - RNA, 22 nt, Homo sapiens
gguuaguggaccaggucacaaa

SEQ ID NO: 37935 - RNA, 22 nt, Homo sapiens
gcugaggcuguggggcuggagu

SEQ ID NO: 37936 - RNA, 22 nt, Homo sapiens
gaggcucagaauggcucaggag

SEQ ID NO: 37937 - RNA, 23 nt, Homo sapiens
gggagugaagacacggagccaga

SEQ ID NO: 37938 - RNA, 23 nt, Homo sapiens
gaacagguagucugaacacuggg

SEQ ID NO: 37939 - RNA, 23 nt, Homo sapiens
gaacagauagucuaaacacuggg

SEQ ID NO: 37940 - RNA, 19 nt, Homo sapiens
gcuccuguccaacuggcuc

SEQ ID NO: 37941 - RNA, 20 nt, Homo sapiens
aggggccucagccuccuggu

SEQ ID NO: 37942 - RNA, 22 nt, Homo sapiens
ucaguggcucagguucguugca

SEQ ID NO: 37943 - RNA, 22 nt, Homo sapiens
ucuacccagaaaggagccagug

SEQ ID NO: 37944 - RNA, 22 nt, Homo sapiens
cccaacaacaggaaacuaccua

SEQ ID NO: 37945 - RNA, 21 nt, Homo sapiens
acaggauugagggggggcccu

SEQ ID NO: 37946 - RNA, 19 nt, Homo sapiens
guccugaauuccgcagccu

SEQ ID NO: 37947 - RNA, 25 nt, Homo sapiens
accaacggaccuacuucccuccgcc

SEQ ID NO: 37948 - RNA, 22 nt, Homo sapiens
gcggucccgcggcgccccgccu

SEQ ID NO: 37949 - RNA, 23 nt, Homo sapiens
ccgcuugagcuaacuccgacccg

SEQ ID NO: 37950 - RNA, 22 nt, Homo sapiens
ggcagagagucagagcgcggau

SEQ ID NO: 37951 - RNA, 22 nt, Homo sapiens
cuagggaacacagggcugguga

SEQ ID NO: 37952 - RNA, 23 nt, Homo sapiens
cggccugauucacaacaccagcu

SEQ ID NO: 37953 - RNA, 23 nt, Homo sapiens
aggaacagcagcagcccgggccg

SEQ ID NO: 37954 - RNA, 21 nt, Homo sapiens
gggcaucugggacgcgcagga

SEQ ID NO: 37955 - RNA, 22 nt, Homo sapiens
ccucuaguaaauaugucagcau

SEQ ID NO: 37956 - RNA, 22 nt, Homo sapiens
gggagaggucucccugcgcaca

SEQ ID NO: 37957 - RNA, 22 nt, Homo sapiens
gggagaggucucccugcgcaca

SEQ ID NO: 37958 - RNA, 21 nt, Homo sapiens
cggcucggguggcggcgacgg

SEQ ID NO: 37959 - RNA, 20 nt, Homo sapiens
ggggggcgaggcagguguga

SEQ ID NO: 37960 - RNA, 22 nt, Homo sapiens
cuggagagacaaggggaagagg

SEQ ID NO: 37961 - RNA, 22 nt, Homo sapiens
cuggagagacaaggggaagagg

SEQ ID NO: 37962 - RNA, 21 nt, Homo sapiens
gaccaaucgccguccccgccg

SEQ ID NO: 37963 - RNA, 22 nt, Homo sapiens
ugacgaugacaacgaugacgua

SEQ ID NO: 37964 - RNA, 19 nt, Homo sapiens
gcucuaagaaagccacacu

SEQ ID NO: 37965 - RNA, 22 nt, Homo sapiens
gcggucccgcggcgccccgccu

SEQ ID NO: 37966 - RNA, 20 nt, Homo sapiens
uacugcuuccacagcucccc

SEQ ID NO: 37967 - RNA, 24 nt, Homo sapiens
cacccccagagccucagcucccca

SEQ ID NO: 37968 - RNA, 18 nt, Homo sapiens
gaaaugagggccagcuga

SEQ ID NO: 37969 - RNA, 22 nt, Homo sapiens
gcacaaaucuccagaccaccca

SEQ ID NO: 37970 - RNA, 22 nt, Homo sapiens
uggcagcagcggagggggcaga

SEQ ID NO: 37971 - RNA, 22 nt, Homo sapiens
gcgaacgcgccacggaccaccu

SEQ ID NO: 37972 - RNA, 20 nt, Homo sapiens
ccagcagcaccuggggcagu

SEQ ID NO: 37973 - RNA, 22 nt, Homo sapiens
acaaccagcuaagacacugcca

SEQ ID NO: 37974 - RNA, 23 nt, Homo sapiens
gcaaucagcuaacuacacugccu

SEQ ID NO: 37975 - RNA, 23 nt, Homo sapiens
aaaucagaaucacaccuggggga

SEQ ID NO: 37976 - RNA, 22 nt, Homo sapiens
accagcuaacaauacacugcca

SEQ ID NO: 37977 - RNA, 22 nt, Homo sapiens
gccagcuaacaauacacugccu

SEQ ID NO: 37978 - RNA, 21 nt, Homo sapiens
auccuguacugagcugccccg

SEQ ID NO: 37979 - RNA, 22 nt, Homo sapiens
gaccucagcuaugacagcacuu

SEQ ID NO: 37980 - RNA, 22 nt, Homo sapiens
gcaaaaguaauugcagugugug

SEQ ID NO: 37981 - RNA, 24 nt, Homo sapiens
acgcagagcccgaaagcccccagu

SEQ ID NO: 37982 - RNA, 23 nt, Homo sapiens
gucacaucccucccaagacccuc

SEQ ID NO: 37983 - RNA, 21 nt, Homo sapiens
cucccccacugcagcuggcac

SEQ ID NO: 37984 - RNA, 21 nt, Homo sapiens
ccccucccagccucccugcca

SEQ ID NO: 37985 - RNA, 21 nt, Homo sapiens
ccccucccagccucccugcca

SEQ ID NO: 37986 - RNA, 21 nt, Homo sapiens
cggggugcacgggcggagggc

SEQ ID NO: 37987 - RNA, 23 nt, Homo sapiens
cuaucugcacuagaugcaccuua

SEQ ID NO: 37988 - RNA, 22 nt, Homo sapiens
cggugagcacccggccccugcg

SEQ ID NO: 37989 - RNA, 22 nt, Homo sapiens
ucagaccgagacaagugcaaug

SEQ ID NO: 37990 - RNA, 23 nt, Homo sapiens
cggcucugucgucgaggcgcuca

SEQ ID NO: 37991 - RNA, 22 nt, Homo sapiens
ccucauggaaggguuccccacu

SEQ ID NO: 37992 - RNA, 25 nt, Homo sapiens
accaacggaccuacuucccuccgcc

SEQ ID NO: 37993 - RNA, 23 nt, Homo sapiens
ggaagccaucaagucgcugcagg

SEQ ID NO: 37994 - RNA, 21 nt, Homo sapiens
cugaggagagaggaggugggg

SEQ ID NO: 37995 - RNA, 24 nt, Homo sapiens
gaagucacucccaggcagcugcaa

SEQ ID NO: 37996 - RNA, 22 nt, Homo sapiens
acgguccuacacucaaggcaug

SEQ ID NO: 37997 - RNA, 19 nt, Homo sapiens
auuuugguacagcagcuca

SEQ ID NO: 37998 - RNA, 21 nt, Homo sapiens
cucacucagauggccaacuca

SEQ ID NO: 37999 - RNA, 23 nt, Homo sapiens
ggacauuguuucagugcccaagu

SEQ ID NO: 38000 - RNA, 20 nt, Homo sapiens
uacugcuuccacagcucccc

SEQ ID NO: 38001 - RNA, 24 nt, Homo sapiens
ugggagaaccucccugcuucugcu

SEQ ID NO: 38002 - RNA, 17 nt, Homo sapiens
ggguggcagcgguggga

SEQ ID NO: 38003 - RNA, 18 nt, Homo sapiens
aucacauucaccucccug

SEQ ID NO: 38004 - RNA, 21 nt, Homo sapiens
agagcucauccauaguuguca

SEQ ID NO: 38005 - RNA, 21 nt, Homo sapiens
ccuucugacuccaaguccagu

SEQ ID NO: 38006 - RNA, 22 nt, Homo sapiens
gaauucaucacggccagccucu

SEQ ID NO: 38007 - RNA, 21 nt, Homo sapiens
aaaacaaaaucucaccguuuu

SEQ ID NO: 38008 - RNA, 17 nt, Homo sapiens
uggaggccccagcgaga

SEQ ID NO: 38009 - RNA, 21 nt, Homo sapiens
caucaccuuccuucuccucca

SEQ ID NO: 38010 - RNA, 22 nt, Homo sapiens
cacaucucacuguagccucaaa

SEQ ID NO: 38011 - RNA, 22 nt, Homo sapiens
acugccugucugugccugcugu

SEQ ID NO: 38012 - RNA, 22 nt, Homo sapiens
gagcccuggacuaggagucagc

SEQ ID NO: 38013 - RNA, 22 nt, Homo sapiens
accagguuccaccccagcaggc

SEQ ID NO: 38014 - RNA, 23 nt, Homo sapiens
acaccccaaaaucgaagcacuuc

SEQ ID NO: 38015 - RNA, 21 nt, Homo sapiens
ugcaugacggccugcaagaca

SEQ ID NO: 38016 - RNA, 23 nt, Homo sapiens
caugagugacgcccucuggagua

SEQ ID NO: 38017 - RNA, 22 nt, Homo sapiens
gugauugccacucuccugagua

SEQ ID NO: 38018 - RNA, 22 nt, Homo sapiens
aaagugcuucuuaccuccagau

SEQ ID NO: 38019 - RNA, 23 nt, Homo sapiens
acacucuaaagagaagcgcuuug

SEQ ID NO: 38020 - RNA, 21 nt, Homo sapiens
agaaaguacuucccucuggag

SEQ ID NO: 38021 - RNA, 21 nt, Homo sapiens
agaaagugcaucccucuggag

SEQ ID NO: 38022 - RNA, 22 nt, Homo sapiens
aagagggagacccaggcucgga

SEQ ID NO: 38023 - RNA, 22 nt, Homo sapiens
cugcucaaacccuccaaugacu

SEQ ID NO: 38024 - RNA, 23 nt, Homo sapiens
agaaaccaugggguaugagcaga

SEQ ID NO: 38025 - RNA, 23 nt, Homo sapiens
cuaccugcacuguaagcacuuuu

SEQ ID NO: 38026 - RNA, 21 nt, Homo sapiens
aucugcacugucagcacuuua

SEQ ID NO: 38027 - RNA, 23 nt, Homo sapiens
cuaccugcacuguaagcacuuug

SEQ ID NO: 38028 - RNA, 22 nt, Homo sapiens
cagaagugggccgggcacaggg

SEQ ID NO: 38029 - RNA, 23 nt, Homo sapiens
cuaccugcacuauaagcacuuua

SEQ ID NO: 38030 - RNA, 23 nt, Homo sapiens
cuaccugcacuaugagcacuuug

SEQ ID NO: 38031 - RNA, 23 nt, Homo sapiens
cuaccugcacuaugagcacuuug

SEQ ID NO: 38032 - RNA, 21 nt, Homo sapiens
gugacagagccaagcacaaau

SEQ ID NO: 38033 - RNA, 22 nt, Homo sapiens
agucuucacaacagcccugugu

SEQ ID NO: 38034 - RNA, 21 nt, Homo sapiens
ggaaaucccuggcaaugugau

SEQ ID NO: 38035 - RNA, 21 nt, Homo sapiens
gguaaucccuggcaaugugau

SEQ ID NO: 38036 - RNA, 22 nt, Homo sapiens
aagaagugcaccauguuuguuu

SEQ ID NO: 38037 - RNA, 22 nt, Homo sapiens
acacucuaaaaggaugcacuuu

SEQ ID NO: 38038 - RNA, 22 nt, Homo sapiens
aaccucuaaaaggaugcacuuu

SEQ ID NO: 38039 - RNA, 22 nt, Homo sapiens
auccucuaaaaagaugcacuuu

SEQ ID NO: 38040 - RNA, 22 nt, Homo sapiens
cacucuaaagggaggcacuuug

SEQ ID NO: 38041 - RNA, 24 nt, Homo sapiens
acacucuaaagggaagcacuuugu

SEQ ID NO: 38042 - RNA, 22 nt, Homo sapiens
acucuaaagggaagcacuuugu

SEQ ID NO: 38043 - RNA, 23 nt, Homo sapiens
acagaaagugcuucccucaagag

SEQ ID NO: 38044 - RNA, 22 nt, Homo sapiens
acaaaagcaacugagguucuug

SEQ ID NO: 38045 - RNA, 22 nt, Homo sapiens
gacucuugaacaacacagguuu

SEQ ID NO: 38046 - RNA, 22 nt, Homo sapiens
ucggucccucgggccagggcag

SEQ ID NO: 38047 - RNA, 25 nt, Homo sapiens
gaauccugguucugucccucacuag

SEQ ID NO: 38048 - RNA, 23 nt, Homo sapiens
cuaccugcacgaacagcacuuug

SEQ ID NO: 38049 - RNA, 25 nt, Homo sapiens
cagcgucugccggaacccguuccca

SEQ ID NO: 38050 - RNA, 22 nt, Homo sapiens
acaaccagcuaagacacugcca

SEQ ID NO: 38051 - RNA, 22 nt, Homo sapiens
agccacaaucaccuucugaucu

SEQ ID NO: 38052 - RNA, 18 nt, Homo sapiens
augacaccucccugugaa

SEQ ID NO: 38053 - RNA, 22 nt, Homo sapiens
gcacacaauaaauguuugcuga

SEQ ID NO: 38054 - RNA, 23 nt, Homo sapiens
agcaaaaaugugcuagugccaaa

SEQ ID NO: 38055 - RNA, 21 nt, Homo sapiens
gcuuaaacaucuacaugaaca

SEQ ID NO: 38056 - RNA, 17 nt, Homo sapiens
gggagaggaggaggcga

SEQ ID NO: 38057 - RNA, 20 nt, Homo sapiens
acagcaaggagggcaggagg

SEQ ID NO: 38058 - RNA, 22 nt, Homo sapiens
agcugaguguaggauguuuaca

SEQ ID NO: 38059 - RNA, 22 nt, Homo sapiens
gauccgagcaccggggaccccc

SEQ ID NO: 38060 - RNA, 25 nt, Homo sapiens
accaacggaccuacuucccuccgcc

SEQ ID NO: 38061 - RNA, 23 nt, Homo sapiens
cacugugggcccucuccgcacca

SEQ ID NO: 38062 - RNA, 22 nt, Homo sapiens
ugcuguuagcccuagccccgca

SEQ ID NO: 38063 - RNA, 23 nt, Homo sapiens
gucacaucccucccaagacccuc

SEQ ID NO: 38064 - RNA, 22 nt, Homo sapiens
aggucucacuuuguugcccaga

SEQ ID NO: 38065 - RNA, 25 nt, Homo sapiens
aaggagcucagaagcccugcccagc

SEQ ID NO: 38066 - RNA, 21 nt, Homo sapiens
auaauggagaccaggccacga

SEQ ID NO: 38067 - RNA, 22 nt, Homo sapiens
cugggggcggcacaggggcuca

SEQ ID NO: 38068 - RNA, 20 nt, Homo sapiens
ggggggcgaggcagguguga

SEQ ID NO: 38069 - RNA, 22 nt, Homo sapiens
uccggggacgaacgggacgggu

SEQ ID NO: 38070 - RNA, 23 nt, Homo sapiens
aagaaucuugucccgcagguccu

SEQ ID NO: 38071 - RNA, 21 nt, Homo sapiens
gcugaggucugggccaggucu

SEQ ID NO: 38072 - RNA, 22 nt, Homo sapiens
caagacacauuuggagagggac

SEQ ID NO: 38073 - RNA, 21 nt, Homo sapiens
auaauggagaccaggccacga

SEQ ID NO: 38074 - RNA, 21 nt, Homo sapiens
ccccucccagccucccugcca

SEQ ID NO: 38075 - RNA, 19 nt, Homo sapiens
cagcaucagcagcaucauc

SEQ ID NO: 38076 - RNA, 21 nt, Homo sapiens
gggcaucugggacgcgcagga

SEQ ID NO: 38077 - RNA, 23 nt, Homo sapiens
cccaacagacauggcgguacuca

SEQ ID NO: 38078 - RNA, 22 nt, Homo sapiens
uggcagcagcggagggggcaga

SEQ ID NO: 38079 - RNA, 22 nt, Homo sapiens
ugagccacugugccuggccuga

SEQ ID NO: 38080 - RNA, 20 nt, Homo sapiens
ccagcagcaccuggggcagu

SEQ ID NO: 38081 - RNA, 20 nt, Homo sapiens
cuggaggaagggcccagagg

SEQ ID NO: 38082 - RNA, 22 nt, Homo sapiens
gccuaagacacaggcccagaga

SEQ ID NO: 38083 - RNA, 21 nt, Homo sapiens
ccuucugacuccaaguccagu

SEQ ID NO: 38084 - RNA, 21 nt, Homo sapiens
auccuguacugagcugccccg

SEQ ID NO: 38085 - RNA, 21 nt, Homo sapiens
acuccaaagggaagcgccuuc

SEQ ID NO: 38086 - RNA, 22 nt, Homo sapiens
cgcucuaaagggaagcgccuuc

SEQ ID NO: 38087 - RNA, 21 nt, Homo sapiens
aaaacaaaaucucaccguuuu

SEQ ID NO: 38088 - RNA, 19 nt, Homo sapiens
auuuugguacagcagcuca

SEQ ID NO: 38089 - RNA, 19 nt, Homo sapiens
gcuccuguccaacuggcuc

SEQ ID NO: 38090 - RNA, 19 nt, Homo sapiens
guccugaauuccgcagccu

SEQ ID NO: 38091 - RNA, 19 nt, Homo sapiens
gccucagaggcagcugcuu

SEQ ID NO: 38092 - RNA, 21 nt, Homo sapiens
gaaggaagugagugcagccac

SEQ ID NO: 38093 - RNA, 22 nt, Homo sapiens
ucuacccagaaaggagccagug

SEQ ID NO: 38094 - RNA, 23 nt, Homo sapiens
gaacagguagucugaacacuggg

SEQ ID NO: 38095 - RNA, 23 nt, Homo sapiens
gaacagauagucuaaacacuggg

SEQ ID NO: 38096 - RNA, 22 nt, Homo sapiens
ucagccgcugucacacgcacag

SEQ ID NO: 38097 - RNA, 23 nt, Homo sapiens
gggccgcagcugucgcccguguc

SEQ ID NO: 38098 - RNA, 19 nt, Homo sapiens
accagugcccugcacacuu

SEQ ID NO: 38099 - RNA, 20 nt, Homo sapiens
uacugcuuccacagcucccc

SEQ ID NO: 38100 - RNA, 22 nt, Homo sapiens
ggcagagagucagagcgcggau

SEQ ID NO: 38101 - RNA, 21 nt, Homo sapiens
cugaggagagaggaggugggg

SEQ ID NO: 38102 - RNA, 21 nt, Homo sapiens
gaccaaucgccguccccgccg

SEQ ID NO: 38103 - RNA, 22 nt, Homo sapiens
caaaagucaagcuuauccuaaa

SEQ ID NO: 38104 - RNA, 22 nt, Homo sapiens
gcggucccgcggcgccccgccu

SEQ ID NO: 38105 - RNA, 20 nt, Homo sapiens
uacugcuuccacagcucccc

SEQ ID NO: 38106 - RNA, 21 nt, Homo sapiens
cagcgaaacaggcaaacggag

SEQ ID NO: 38107 - RNA, 23 nt, Homo sapiens
cagcugcuuuugggauuccguug

SEQ ID NO: 38108 - RNA, 22 nt, Homo sapiens
cacuuaucagguuguauuauaa

SEQ ID NO: 38109 - RNA, 22 nt, Homo sapiens
cacuuagcagguuguauuauau

SEQ ID NO: 38110 - RNA, 22 nt, Homo sapiens
gccagcuaacaauacacugccu

SEQ ID NO: 38111 - RNA, 22 nt, Homo sapiens
aagaagugcaccauguuuguuu

SEQ ID NO: 38112 - RNA, 23 nt, Homo sapiens
aaucgcgguuuauaccaaaugaa

SEQ ID NO: 38113 - RNA, 22 nt, Homo sapiens
cucagucccaggcaaaccauaa

SEQ ID NO: 38114 - RNA, 21 nt, Homo sapiens
agagguugacuguauaauauu

SEQ ID NO: 38115 - RNA, 25 nt, Homo sapiens
gaauccugguucugucccucacuag

SEQ ID NO: 38116 - RNA, 18 nt, Homo sapiens
ugguggcagaggugggau

SEQ ID NO: 38117 - RNA, 22 nt, Homo sapiens
aggucucacuuuguugcccaga

SEQ ID NO: 38118 - RNA, 22 nt, Homo sapiens
ccaucuuuaccagacaguguua

SEQ ID NO: 38119 - RNA, 18 nt, Homo sapiens
ggagaggagggcacugga

SEQ ID NO: 38120 - RNA, 22 nt, Homo sapiens
cagaagugggccgggcacaggg

SEQ ID NO: 38121 - RNA, 22 nt, Homo sapiens
acaucguuaccagacaguguua

SEQ ID NO: 38122 - RNA, 23 nt, Homo sapiens
caugagugacgcccucuggagua

SEQ ID NO: 38123 - RNA, 21 nt, Homo sapiens
acuggcugagucaggacuagc

SEQ ID NO: 38124 - RNA, 19 nt, Homo sapiens
gcuccuguccaacuggcuc

SEQ ID NO: 38125 - RNA, 25 nt, Homo sapiens
acggagcugucccaacaccaccccu

SEQ ID NO: 38126 - RNA, 25 nt, Homo sapiens
aaggagcucagaagcccugcccagc

SEQ ID NO: 38127 - RNA, 19 nt, Homo sapiens
ucagcaguaccagccuaga

SEQ ID NO: 38128 - RNA, 22 nt, Homo sapiens
gcugaggcuguggggcuggagu

SEQ ID NO: 38129 - RNA, 23 nt, Homo sapiens
acaaggaugaaucuuuguuacug

SEQ ID NO: 38130 - RNA, 22 nt, Homo sapiens
ucuacccagaaaggagccagug

SEQ ID NO: 38131 - RNA, 22 nt, Homo sapiens
cacucuaaagggaggcacuuug

SEQ ID NO: 38132 - RNA, 22 nt, Homo sapiens
cacaaguucggaucuacggguu

SEQ ID NO: 38133 - RNA, 22 nt, Homo sapiens
cacaaguucggaucuacggguu

SEQ ID NO: 38134 - RNA, 19 nt, Homo sapiens
cagcaucagcagcaucauc

SEQ ID NO: 38135 - RNA, 22 nt, Homo sapiens
acaaaguucugugaugcacuga

SEQ ID NO: 38136 - RNA, 24 nt, Homo sapiens
acucacaccuagguuccaaggauu

SEQ ID NO: 38137 - RNA, 21 nt, Homo sapiens
acguggauuuuccucuaugau

SEQ ID NO: 38138 - RNA, 22 nt, Homo sapiens
aacauggauuuuccucuaugau

SEQ ID NO: 38139 - RNA, 23 nt, Homo sapiens
ucucacccagguagcaaggauua

SEQ ID NO: 38140 - RNA, 23 nt, Homo sapiens
caugagugacgcccucuggagua

SEQ ID NO: 38141 - RNA, 22 nt, Homo sapiens
aaagugcuucuuaccuccagau

SEQ ID NO: 38142 - RNA, 23 nt, Homo sapiens
acacucuaaagagaagcgcuuug

SEQ ID NO: 38143 - RNA, 21 nt, Homo sapiens
agaaaguacuucccucuggag

SEQ ID NO: 38144 - RNA, 21 nt, Homo sapiens
agaaagugcaucccucuggag

SEQ ID NO: 38145 - RNA, 22 nt, Homo sapiens
aguccagauucugugcccacca

SEQ ID NO: 38146 - RNA, 22 nt, Homo sapiens
acaaaagcaacugagguucuug

SEQ ID NO: 38147 - RNA, 21 nt, Homo sapiens
acaauccuagagcacaagaag

SEQ ID NO: 38148 - RNA, 20 nt, Homo sapiens
guuugauaaacugacacaac

SEQ ID NO: 38149 - RNA, 21 nt, Homo sapiens
agguaauaccaauaccuugug

SEQ ID NO: 38150 - RNA, 22 nt, Homo sapiens
auccuucuacaaauucacccau

SEQ ID NO: 38151 - RNA, 25 nt, Homo sapiens
cagcgucugccggaacccguuccca

SEQ ID NO: 38152 - RNA, 22 nt, Homo sapiens
cucaauagacugugagcuccuu

SEQ ID NO: 38153 - RNA, 22 nt, Homo sapiens
aacucaguaaugguaacgguuu

SEQ ID NO: 38154 - RNA, 20 nt, Homo sapiens
ugggccaccgccgagcggac

SEQ ID NO: 38155 - RNA, 25 nt, Homo sapiens
acggagcugucccaacaccaccccu

SEQ ID NO: 38156 - RNA, 22 nt, Homo sapiens
caacuccgauaugcaaugggua

SEQ ID NO: 38157 - RNA, 23 nt, Homo sapiens
cccagcuagauuguaagcuccuu

SEQ ID NO: 38158 - RNA, 22 nt, Homo sapiens
agaggcaggguaguguaaugga

SEQ ID NO: 38159 - RNA, 24 nt, Homo sapiens
cacccccagagccucagcucccca

SEQ ID NO: 38160 - RNA, 22 nt, Homo sapiens
aacagcacaaacuacuaccuca

SEQ ID NO: 38161 - RNA, 22 nt, Homo sapiens
caaacaccauugucacacucca

SEQ ID NO: 38162 - RNA, 22 nt, Homo sapiens
uccggggacgaacgggacgggu

SEQ ID NO: 38163 - RNA, 23 nt, Homo sapiens
acucaccgacagcguugaauguu

SEQ ID NO: 38164 - RNA, 21 nt, Homo sapiens
gaccaaucgccguccccgccg

SEQ ID NO: 38165 - RNA, 23 nt, Homo sapiens
cccaacagacauggcgguacuca

SEQ ID NO: 38166 - RNA, 19 nt, Homo sapiens
guccugaauuccgcagccu

SEQ ID NO: 38167 - RNA, 21 nt, Homo sapiens
aguucucccaacguaaaccca

SEQ ID NO: 38168 - RNA, 22 nt, Homo sapiens
gcggucccgcggcgccccgccu

SEQ ID NO: 38169 - RNA, 22 nt, Homo sapiens
gggagaggucucccugcgcaca

SEQ ID NO: 38170 - RNA, 25 nt, Homo sapiens
cagcgucugccggaacccguuccca

SEQ ID NO: 38171 - RNA, 22 nt, Homo sapiens
cacaaaccauuaugugcugcua

SEQ ID NO: 38172 - RNA, 23 nt, Homo sapiens
uccaaucaguuccugaugcagua

SEQ ID NO: 38173 - RNA, 23 nt, Homo sapiens
gagcaaggcucuugucuguaagu

SEQ ID NO: 38174 - RNA, 23 nt, Homo sapiens
uguaggcuggggauaaaugaaua

SEQ ID NO: 38175 - RNA, 21 nt, Homo sapiens
gagcugcauccuggcuccggg

SEQ ID NO: 38176 - RNA, 22 nt, Homo sapiens
cugggggcggcacaggggcuca

SEQ ID NO: 38177 - RNA, 24 nt, Homo sapiens
acugcuggucuucagucagggcca

SEQ ID NO: 38178 - RNA, 19 nt, Homo sapiens
guccugaauuccgcagccu

SEQ ID NO: 38179 - RNA, 22 nt, Homo sapiens
gcggucccgcggcgccccgccu

SEQ ID NO: 38180 - RNA, 22 nt, Homo sapiens
ugcuguuagcccuagccccgca

SEQ ID NO: 38181 - RNA, 22 nt, Homo sapiens
uauccacuacaccccgcugccu

SEQ ID NO: 38182 - RNA, 22 nt, Homo sapiens
aaagugcuucuuaccuccagau

SEQ ID NO: 38183 - RNA, 17 nt, Homo sapiens
uggcgcccgaacaggga

SEQ ID NO: 38184 - RNA, 23 nt, Homo sapiens
cccaacagacauggcgguacuca

SEQ ID NO: 38185 - RNA, 22 nt, Homo sapiens
aagauguggaccauauuacaua

SEQ ID NO: 38186 - RNA, 22 nt, Homo sapiens
cgaauccaccacgaacaacuuc

SEQ ID NO: 38187 - RNA, 21 nt, Homo sapiens
ugacugcagagcaaaagacac

SEQ ID NO: 38188 - RNA, 19 nt, Homo sapiens
gggaaacguaugucaaccu

SEQ ID NO: 38189 - RNA, 23 nt, Homo sapiens
cuaccugcacuguaagcacuuuu

SEQ ID NO: 38190 - RNA, 23 nt, Homo sapiens
cuaccugcacuguaagcacuuuu

SEQ ID NO: 38191 - RNA, 21 nt, Homo sapiens
aucugcacugucagcacuuua

SEQ ID NO: 38192 - RNA, 21 nt, Homo sapiens
aucugcacugucagcacuuua

SEQ ID NO: 38193 - RNA, 19 nt, Homo sapiens
ucccugauccaaaaaucca

SEQ ID NO: 38194 - RNA, 22 nt, Homo sapiens
cgaccauggcuguagacuguua

SEQ ID NO: 38195 - RNA, 23 nt, Homo sapiens
cuaccugcacuguaagcacuuug

SEQ ID NO: 38196 - RNA, 23 nt, Homo sapiens
cuaccugcacuguaagcacuuug

SEQ ID NO: 38197 - RNA, 25 nt, Homo sapiens
agcuagucaagcgcgguuguggggg

SEQ ID NO: 38198 - RNA, 23 nt, Homo sapiens
cuaccugcacuauaagcacuuua

SEQ ID NO: 38199 - RNA, 23 nt, Homo sapiens
cuaccugcacuauaagcacuuua

SEQ ID NO: 38200 - RNA, 23 nt, Homo sapiens
cuaccugcacuaugagcacuuug

SEQ ID NO: 38201 - RNA, 23 nt, Homo sapiens
cuaccugcacuaugagcacuuug

SEQ ID NO: 38202 - RNA, 21 nt, Homo sapiens
ggccgugacuggagacuguua

SEQ ID NO: 38203 - RNA, 21 nt, Homo sapiens
agagcucauccauaguuguca

SEQ ID NO: 38204 - RNA, 22 nt, Homo sapiens
cgggacguccagacucaacucu

SEQ ID NO: 38205 - RNA, 22 nt, Homo sapiens
cucaauagacugugagcuccuu

SEQ ID NO: 38206 - RNA, 23 nt, Homo sapiens
ucaccaaaacauggaagcacuua

SEQ ID NO: 38207 - RNA, 23 nt, Homo sapiens
cuacuaaaacauggaagcacuua

SEQ ID NO: 38208 - RNA, 23 nt, Homo sapiens
ccacugaaacauggaagcacuua

SEQ ID NO: 38209 - RNA, 23 nt, Homo sapiens
acacucaaacauggaagcacuua

SEQ ID NO: 38210 - RNA, 17 nt, Homo sapiens
aagcauggaagcacuua

SEQ ID NO: 38211 - RNA, 23 nt, Homo sapiens
acgcucaaaugucgcagcacuuu

SEQ ID NO: 38212 - RNA, 23 nt, Homo sapiens
acaccccaaaaucgaagcacuuc

SEQ ID NO: 38213 - RNA, 22 nt, Homo sapiens
ccucauggaaggguuccccacu

SEQ ID NO: 38214 - RNA, 23 nt, Homo sapiens
gaaaaacgcccccuggcuugaaa

SEQ ID NO: 38215 - RNA, 22 nt, Homo sapiens
acacucuaaaaggaugcacuuu

SEQ ID NO: 38216 - RNA, 22 nt, Homo sapiens
aaccucuaaaaggaugcacuuu

SEQ ID NO: 38217 - RNA, 22 nt, Homo sapiens
auccucuaaaaagaugcacuuu

SEQ ID NO: 38218 - RNA, 22 nt, Homo sapiens
cacucuaaagggaggcacuuug

SEQ ID NO: 38219 - RNA, 22 nt, Homo sapiens
cacucuaaagggaggcacuuug

SEQ ID NO: 38220 - RNA, 22 nt, Homo sapiens
acaguccaaagggaagcacuuu

SEQ ID NO: 38221 - RNA, 21 nt, Homo sapiens
cccucuaaaaggaagcacuuu

SEQ ID NO: 38222 - RNA, 22 nt, Homo sapiens
acccucuaaaaggaagcacuuu

SEQ ID NO: 38223 - RNA, 22 nt, Homo sapiens
acccaccaaagagaagcacuuu

SEQ ID NO: 38224 - RNA, 21 nt, Homo sapiens
cccucaaaaaggaagcacuuu

SEQ ID NO: 38225 - RNA, 23 nt, Homo sapiens
acagaaagugcuucccucaagag

SEQ ID NO: 38226 - RNA, 23 nt, Homo sapiens
acagaaagugcuucccucaagag

SEQ ID NO: 38227 - RNA, 23 nt, Homo sapiens
aggagaaggcaccaugggauuua

SEQ ID NO: 38228 - RNA, 22 nt, Homo sapiens
guccaaaguuggggugcugguu

SEQ ID NO: 38229 - RNA, 23 nt, Homo sapiens
cccagcuagauuguaagcuccuu

SEQ ID NO: 38230 - RNA, 23 nt, Homo sapiens
cuaccugcacgaacagcacuuug

SEQ ID NO: 38231 - RNA, 23 nt, Homo sapiens
cuaccugcacgaacagcacuuug

SEQ ID NO: 38232 - RNA, 21 nt, Homo sapiens
cuggaggacggcaacagucag

SEQ ID NO: 38233 - RNA, 22 nt, Homo sapiens
aacaacacuugaccacauccug

SEQ ID NO: 38234 - RNA, 22 nt, Homo sapiens
cagcugguugaaggggaccaaa

SEQ ID NO: 38235 - RNA, 22 nt, Homo sapiens
uagcugguugaaggggaccaaa

SEQ ID NO: 38236 - RNA, 20 nt, Homo sapiens
uacugcuuccacagcucccc

SEQ ID NO: 38237 - RNA, 22 nt, Homo sapiens
aagcgguuuaccaucccacaua

SEQ ID NO: 38238 - RNA, 20 nt, Homo sapiens
gcaaaugguacagcuacuuu

SEQ ID NO: 38239 - RNA, 23 nt, Homo sapiens
uguaggcuggggauaaaugaaua

SEQ ID NO: 38240 - RNA, 20 nt, Homo sapiens
uacugcuuccacagcucccc

SEQ ID NO: 38241 - RNA, 22 nt, Homo sapiens
gggagaggucucccugcgcaca

SEQ ID NO: 38242 - RNA, 22 nt, Homo sapiens
cacauggccaaaacagagaaga

SEQ ID NO: 38243 - RNA, 21 nt, Homo sapiens
gagcugcauccuggcuccggg

SEQ ID NO: 38244 - RNA, 18 nt, Homo sapiens
ugguggcagaggugggau

SEQ ID NO: 38245 - RNA, 23 nt, Homo sapiens
cuaucugcacuagaugcaccuua

SEQ ID NO: 38246 - RNA, 21 nt, Homo sapiens
gaccaaucgccguccccgccg

SEQ ID NO: 38247 - RNA, 21 nt, Homo sapiens
gaccaaucgccguccccgccg

SEQ ID NO: 38248 - RNA, 22 nt, Homo sapiens
uggcagcagcggagggggcaga

SEQ ID NO: 38249 - RNA, 22 nt, Homo sapiens
acugccugucugugccugcugu

SEQ ID NO: 38250 - RNA, 21 nt, Homo sapiens
acaggauugagggggggcccu

SEQ ID NO: 38251 - RNA, 21 nt, Homo sapiens
acaggauugagggggggcccu

SEQ ID NO: 38252 - RNA, 20 nt, Homo sapiens
ccagcagcaccuggggcagu

SEQ ID NO: 38253 - RNA, 22 nt, Homo sapiens
accagguuccaccccagcaggc

SEQ ID NO: 38254 - RNA, 23 nt, Homo sapiens
acugaggggccucagaccgagcu

SEQ ID NO: 38255 - RNA, 21 nt, Homo sapiens
auccuguacugagcugccccg

SEQ ID NO: 38256 - RNA, 18 nt, Homo sapiens
acccucugaaaggaagca

SEQ ID NO: 38257 - RNA, 22 nt, Homo sapiens
aaagugcuucuuaccuccagau

SEQ ID NO: 38258 - RNA, 24 nt, Homo sapiens
acgcgcaggccagagacccaggca

SEQ ID NO: 38259 - RNA, 22 nt, Homo sapiens
gcggucccgcggcgccccgccu

SEQ ID NO: 38260 - RNA, 22 nt, Homo sapiens
gcggucccgcggcgccccgccu

SEQ ID NO: 38261 - RNA, 22 nt, Homo sapiens
ugcuguuagcccuagccccgca

SEQ ID NO: 38262 - RNA, 22 nt, Homo sapiens
ucggucccucgggccagggcag

SEQ ID NO: 38263 - RNA, 24 nt, Homo sapiens
cacccccagagccucagcucccca

SEQ ID NO: 38264 - RNA, 22 nt, Homo sapiens
ccccucuggucaaccagucaca

SEQ ID NO: 38265 - RNA, 23 nt, Homo sapiens
acacuuacuggacaccuacuagg

SEQ ID NO: 38266 - RNA, 22 nt, Homo sapiens
aaguggaugacccuguacgauu

SEQ ID NO: 38267 - RNA, 23 nt, Homo sapiens
acagaaagugcuucccucaagag

SEQ ID NO: 38268 - RNA, 22 nt, Homo sapiens
agcucagaacccagaggucuca

SEQ ID NO: 38269 - RNA, 23 nt, Homo sapiens
uggcccugacacgugguacugga

SEQ ID NO: 38270 - RNA, 21 nt, Homo sapiens
cuggaggacggcaacagucag

SEQ ID NO: 38271 - RNA, 22 nt, Homo sapiens
uccggggacgaacgggacgggu

SEQ ID NO: 38272 - RNA, 23 nt, Homo sapiens
agggauuccugggaaaacuggac

SEQ ID NO: 38273 - RNA, 22 nt, Homo sapiens
aacccauggaauucaguucuca

SEQ ID NO: 38274 - RNA, 22 nt, Homo sapiens
agccuauggaauucaguucuca

SEQ ID NO: 38275 - RNA, 21 nt, Homo sapiens
gaccaaucgccguccccgccg

SEQ ID NO: 38276 - RNA, 22 nt, Homo sapiens
cggugagcacccggccccugcg

SEQ ID NO: 38277 - RNA, 23 nt, Homo sapiens
aaagucucgcucucugccccuca

SEQ ID NO: 38278 - RNA, 22 nt, Homo sapiens
gcggucccgcggcgccccgccu

SEQ ID NO: 38279 - RNA, 22 nt, Homo sapiens
ugcuguuagcccuagccccgca

SEQ ID NO: 38280 - RNA, 22 nt, Homo sapiens
ccacacacuuccuuacauucca

SEQ ID NO: 38281 - RNA, 23 nt, Homo sapiens
augcaaaguugcucggguaaccu

SEQ ID NO: 38282 - RNA, 23 nt, Homo sapiens
gaaagugcuucuuuccucgagaa

SEQ ID NO: 38283 - RNA, 23 nt, Homo sapiens
aguaacugguugaacaacuguaa

SEQ ID NO: 38284 - RNA, 22 nt, Homo sapiens
cucagagcagacgugguucuca

SEQ ID NO: 38285 - RNA, 21 nt, Homo sapiens
ccccucccagccucccugcca

SEQ ID NO: 38286 - RNA, 22 nt, Homo sapiens
aggucucacuuuguugcccaga

SEQ ID NO: 38287 - RNA, 21 nt, Homo sapiens
gaccaaucgccguccccgccg

SEQ ID NO: 38288 - RNA, 25 nt, Homo sapiens
aaggagcucagaagcccugcccagc

SEQ ID NO: 38289 - RNA, 22 nt, Homo sapiens
gcggucccgcggcgccccgccu

SEQ ID NO: 38290 - RNA, 21 nt, Homo sapiens
gguggagcccugagaaccgga

SEQ ID NO: 38291 - RNA, 22 nt, Homo sapiens
ugcuguuagcccuagccccgca

SEQ ID NO: 38292 - RNA, 24 nt, Homo sapiens
cacccccagagccucagcucccca

SEQ ID NO: 38293 - RNA, 22 nt, Homo sapiens
agcuagugagaagucaaugccu

SEQ ID NO: 38294 - RNA, 23 nt, Homo sapiens
cuacgcguauucuuaagcaauaa

SEQ ID NO: 38295 - RNA, 21 nt, Homo sapiens
auguaggccuuuagaucacuu

SEQ ID NO: 38296 - RNA, 21 nt, Homo sapiens
ugcaaacccugcaugugggag

SEQ ID NO: 38297 - RNA, 21 nt, Homo sapiens
gagcuacagugcuucaucuca

SEQ ID NO: 38298 - RNA, 21 nt, Homo sapiens
cguacgcuauacggucuacua

SEQ ID NO: 38299 - RNA, 22 nt, Homo sapiens
uauggaugcaaaaugaucccaa

SEQ ID NO: 38300 - RNA, 22 nt, Homo sapiens
agcacagacuugcugugauguu

SEQ ID NO: 38301 - RNA, 22 nt, Homo sapiens
acacaccaaggauaauuucucc

SEQ ID NO: 38302 - RNA, 22 nt, Homo sapiens
ccucuaguaaauaugucagcau

SEQ ID NO: 38303 - RNA, 23 nt, Homo sapiens
aaccaagaccccggagaucccag

SEQ ID NO: 38304 - RNA, 21 nt, Homo sapiens
gaccaaucgccguccccgccg

SEQ ID NO: 38305 - RNA, 21 nt, Homo sapiens
ugcaaugcaacuacaaugcac

SEQ ID NO: 38306 - RNA, 22 nt, Homo sapiens
uccagcaaagggaagcgcuuuc

SEQ ID NO: 38307 - RNA, 20 nt, Homo sapiens
gaaagggcuucccuuugcag

SEQ ID NO: 38308 - RNA, 22 nt, Homo sapiens
accucuaaaggggagcgcuuug

SEQ ID NO: 38309 - RNA, 23 nt, Homo sapiens
acacucuaaagagaagcgcuuug

SEQ ID NO: 38310 - RNA, 21 nt, Homo sapiens
gcuccaaagggaagcgcuuug

SEQ ID NO: 38311 - RNA, 21 nt, Homo sapiens
ccucuaaagagaagcgcuuuc

SEQ ID NO: 38312 - RNA, 21 nt, Homo sapiens
acuccaaagggaagcgccuuc

SEQ ID NO: 38313 - RNA, 22 nt, Homo sapiens
cgcucuaaagggaagcgccuuc

SEQ ID NO: 38314 - RNA, 20 nt, Homo sapiens
gaaagggcuucccuuugcag

SEQ ID NO: 38315 - RNA, 22 nt, Homo sapiens
gcggucccgcggcgccccgccu

SEQ ID NO: 38316 - RNA, 23 nt, Homo sapiens
gggagugaagacacggagccaga

SEQ ID NO: 38317 - RNA, 21 nt, Homo sapiens
gggcaucugggacgcgcagga

SEQ ID NO: 38318 - RNA, 21 nt, Homo sapiens
gaccaaucgccguccccgccg

SEQ ID NO: 38319 - RNA, 22 nt, Homo sapiens
cggugagcacccggccccugcg

SEQ ID NO: 38320 - RNA, 22 nt, Homo sapiens
gcggucccgcggcgccccgccu

SEQ ID NO: 38321 - RNA, 21 nt, Homo sapiens
gccaauauuucugugcugcua

SEQ ID NO: 38322 - RNA, 22 nt, Homo sapiens
acaaccagcuaagacacugcca

SEQ ID NO: 38323 - RNA, 22 nt, Homo sapiens
auggcaguggaguuagugauug

SEQ ID NO: 38324 - RNA, 23 nt, Homo sapiens
gcaaucagcuaacuacacugccu

SEQ ID NO: 38325 - RNA, 22 nt, Homo sapiens
accagcuaacaauacacugcca

SEQ ID NO: 38326 - RNA, 22 nt, Homo sapiens
gccagcuaacaauacacugccu

SEQ ID NO: 38327 - RNA, 22 nt, Homo sapiens
cagcauggaguccuccagguug

SEQ ID NO: 38328 - RNA, 19 nt, Homo sapiens
accagugcccugcacacuu

SEQ ID NO: 38329 - RNA, 22 nt, Homo sapiens
cugcgauuccucccucuacugu

SEQ ID NO: 38330 - RNA, 18 nt, Homo sapiens
cccccaccaccacgcccg

SEQ ID NO: 38331 - RNA, 18 nt, Homo sapiens
uggcgccugaacagggac

SEQ ID NO: 38332 - RNA, 22 nt, Homo sapiens
aggucucacuuuguugcccaga

SEQ ID NO: 38333 - RNA, 23 nt, Homo sapiens
cagcugcuuuugggauuccguug

SEQ ID NO: 38334 - RNA, 21 nt, Homo sapiens
acaggauugagggggggcccu

SEQ ID NO: 38335 - RNA, 23 nt, Homo sapiens
cgugagcuccuggaggacaggga

SEQ ID NO: 38336 - RNA, 23 nt, Homo sapiens
cugcagaacuguucccgcugcua

SEQ ID NO: 38337 - RNA, 25 nt, Homo sapiens
aaggagcucagaagcccugcccagc

SEQ ID NO: 38338 - RNA, 23 nt, Homo sapiens
ccgcuugagcuaacuccgacccg

SEQ ID NO: 38339 - RNA, 21 nt, Homo sapiens
cugaggagagaggaggugggg

SEQ ID NO: 38340 - RNA, 21 nt, Homo sapiens
uuccacgaccuaauccuaacu

SEQ ID NO: 38341 - RNA, 18 nt, Homo sapiens
ugguggcagaggugggau

SEQ ID NO: 38342 - RNA, 21 nt, Homo sapiens
cggggugcacgggcggagggc

SEQ ID NO: 38343 - RNA, 18 nt, Homo sapiens
auucaaucuacugccuca

SEQ ID NO: 38344 - RNA, 20 nt, Homo sapiens
cuggaggaagggcccagagg

SEQ ID NO: 38345 - RNA, 22 nt, Homo sapiens
gccuaagacacaggcccagaga

SEQ ID NO: 38346 - RNA, 22 nt, Homo sapiens
ccucauggaaggguuccccacu

SEQ ID NO: 38347 - RNA, 18 nt, Homo sapiens
acccucugaaaggaagca

SEQ ID NO: 38348 - RNA, 22 nt, Homo sapiens
aaagugcuucuuaccuccagau

SEQ ID NO: 38349 - RNA, 21 nt, Homo sapiens
gaaggaagugagugcagccac

SEQ ID NO: 38350 - RNA, 25 nt, Homo sapiens
accaacggaccuacuucccuccgcc

SEQ ID NO: 38351 - RNA, 23 nt, Homo sapiens
ucauagcccuguacaaugcugcu

SEQ ID NO: 38352 - RNA, 23 nt, Homo sapiens
ugauagcccuguacaaugcugcu

SEQ ID NO: 38353 - RNA, 23 nt, Homo sapiens
ggaagccaucaagucgcugcagg

SEQ ID NO: 38354 - RNA, 22 nt, Homo sapiens
ccccucuggucaaccagucaca

SEQ ID NO: 38355 - RNA, 22 nt, Homo sapiens
acaaaguucuguagugcacuga

SEQ ID NO: 38356 - RNA, 22 nt, Homo sapiens
acaaaguucugugaugcacuga

SEQ ID NO: 38357 - RNA, 21 nt, Homo sapiens
ccaaguucugucaugcacuga

SEQ ID NO: 38358 - RNA, 23 nt, Homo sapiens
acucaccgacagcguugaauguu

SEQ ID NO: 38359 - RNA, 23 nt, Homo sapiens
acccaccgacagcaaugaauguu

SEQ ID NO: 38360 - RNA, 22 nt, Homo sapiens
acucaccgacagguugaauguu

SEQ ID NO: 38361 - RNA, 23 nt, Homo sapiens
acccaccgacaacaaugaauguu

SEQ ID NO: 38362 - RNA, 23 nt, Homo sapiens
gaaacccagcagacaauguagcu

SEQ ID NO: 38363 - RNA, 21 nt, Homo sapiens
acccaguagccagauguagcu

SEQ ID NO: 38364 - RNA, 21 nt, Homo sapiens
ugcaaugcaacuacaaugcac

SEQ ID NO: 38365 - RNA, 22 nt, Homo sapiens
gagguuucccguguauguuuca

SEQ ID NO: 38366 - RNA, 22 nt, Homo sapiens
aagaagugcaccgcgaauguuu

SEQ ID NO: 38367 - RNA, 19 nt, Homo sapiens
ucccacaggaagcagacac

SEQ ID NO: 38368 - RNA, 23 nt, Homo sapiens
guagugggccgagccgagugaca

SEQ ID NO: 38369 - RNA, 22 nt, Homo sapiens
aacuauacaaccuacuaccuca

SEQ ID NO: 38370 - RNA, 22 nt, Homo sapiens
aaccacacaaccuacuaccuca

SEQ ID NO: 38371 - RNA, 19 nt, Homo sapiens
agaaaccccagcagagaca

SEQ ID NO: 38372 - RNA, 24 nt, Homo sapiens
acugcuggucuucagucagggcca

SEQ ID NO: 38373 - RNA, 23 nt, Homo sapiens
uauucucgcacggacuacaacca

SEQ ID NO: 38374 - RNA, 19 nt, Homo sapiens
auuuugguacagcagcuca

SEQ ID NO: 38375 - RNA, 21 nt, Homo sapiens
gagcuacagugcuucaucuca

SEQ ID NO: 38376 - RNA, 18 nt, Homo sapiens
auucaaucuacugccuca

SEQ ID NO: 38377 - RNA, 22 nt, Homo sapiens
ccggcugcaacacaagacacga

SEQ ID NO: 38378 - RNA, 22 nt, Homo sapiens
auggcaguggaguuagugauug

SEQ ID NO: 38379 - RNA, 22 nt, Homo sapiens
uuucaguuaucaaucugucaca

SEQ ID NO: 38380 - RNA, 22 nt, Homo sapiens
gcacacaauaaauguuugcuga

SEQ ID NO: 38381 - RNA, 19 nt, Homo sapiens
gccucagaggcagcugcuu

SEQ ID NO: 38382 - RNA, 19 nt, Homo sapiens
accagugcccugcacacuu

SEQ ID NO: 38383 - RNA, 21 nt, Homo sapiens
guccugagagcgcugccuccu

SEQ ID NO: 38384 - RNA, 21 nt, Homo sapiens
aggagacucacaaguuccugc

SEQ ID NO: 38385 - RNA, 21 nt, Homo sapiens
ggggagcgggggcccugccuu

SEQ ID NO: 38386 - RNA, 23 nt, Homo sapiens
ggaagccaucaagucgcugcagg

SEQ ID NO: 38387 - RNA, 20 nt, Homo sapiens
cucaaagcaaacccugcaga

SEQ ID NO: 38388 - RNA, 20 nt, Homo sapiens
cucaaagcaaacccugcaga

SEQ ID NO: 38389 - RNA, 21 nt, Homo sapiens
cugaggagagaggaggugggg

SEQ ID NO: 38390 - RNA, 22 nt, Homo sapiens
caaacaccauugucacacucca

SEQ ID NO: 38391 - RNA, 23 nt, Homo sapiens
cuaccugcacuguaagcacuuug

SEQ ID NO: 38392 - RNA, 22 nt, Homo sapiens
ucaggaacugccuuucucucca

SEQ ID NO: 38393 - RNA, 21 nt, Homo sapiens
gaccaaucgccguccccgccg

SEQ ID NO: 38394 - RNA, 21 nt, Homo sapiens
ccuucugacuccaaguccagu

SEQ ID NO: 38395 - RNA, 22 nt, Homo sapiens
gccuucugacccuaaguccagu

SEQ ID NO: 38396 - RNA, 22 nt, Homo sapiens
caugauugccacgucugcagua

SEQ ID NO: 38397 - RNA, 21 nt, Homo sapiens
ugauugccacugucugcagua

SEQ ID NO: 38398 - RNA, 21 nt, Homo sapiens
uugucuaaccagucaccuguu

SEQ ID NO: 38399 - RNA, 23 nt, Homo sapiens
uuuauugugguagauacuauuag

SEQ ID NO: 38400 - RNA, 22 nt, Homo sapiens
gcggucccgcggcgccccgccu

SEQ ID NO: 38401 - RNA, 21 nt, Homo sapiens
auaauggagaccaggccacga

SEQ ID NO: 38402 - RNA, 22 nt, Homo sapiens
caaacaccauugucacacucca

SEQ ID NO: 38403 - RNA, 22 nt, Homo sapiens
cuggagagacaaggggaagagg

SEQ ID NO: 38404 - RNA, 17 nt, Homo sapiens
gggagaggaggaggcga

SEQ ID NO: 38405 - RNA, 20 nt, Homo sapiens
cccgccgcgucgcccugggg

SEQ ID NO: 38406 - RNA, 22 nt, Homo sapiens
cucccuucuuuccucccgucuu

SEQ ID NO: 38407 - RNA, 25 nt, Homo sapiens
accaacggaccuacuucccuccgcc

SEQ ID NO: 38408 - RNA, 22 nt, Homo sapiens
ccucaggcacggccgggccacc

SEQ ID NO: 38409 - RNA, 23 nt, Homo sapiens
cacugugggcccucuccgcacca

SEQ ID NO: 38410 - RNA, 22 nt, Homo sapiens
uauccacuacaccccgcugccu

SEQ ID NO: 38411 - RNA, 20 nt, Homo sapiens
cucaaagcaaacccugcaga

SEQ ID NO: 38412 - RNA, 24 nt, Homo sapiens
ucacagguuaaagggucucaggga

SEQ ID NO: 38413 - RNA, 22 nt, Homo sapiens
ucacaaguuagggucucaggga

SEQ ID NO: 38414 - RNA, 23 nt, Homo sapiens
agcccuguucuacagcccugagg

SEQ ID NO: 38415 - RNA, 24 nt, Homo sapiens
acugcuggucuucagucagggcca

SEQ ID NO: 38416 - RNA, 23 nt, Homo sapiens
gggagugaagacacggagccaga

SEQ ID NO: 38417 - RNA, 23 nt, Homo sapiens
cuaucugcacuagaugcaccuua

SEQ ID NO: 38418 - RNA, 22 nt, Homo sapiens
cagaagugggccgggcacaggg

SEQ ID NO: 38419 - RNA, 20 nt, Homo sapiens
cccgccgcgucgcccugggg

SEQ ID NO: 38420 - RNA, 22 nt, Homo sapiens
ugagccacugugccuggccuga

SEQ ID NO: 38421 - RNA, 22 nt, Homo sapiens
acaguucuucaacuggcagcuu

SEQ ID NO: 38422 - RNA, 23 nt, Homo sapiens
gaaacccagcagacaauguagcu

SEQ ID NO: 38423 - RNA, 21 nt, Homo sapiens
ucaaucacagauagcaccccu

SEQ ID NO: 38424 - RNA, 20 nt, Homo sapiens
aggggccucagccuccuggu

SEQ ID NO: 38425 - RNA, 22 nt, Homo sapiens
ucggucccucgggccagggcag

SEQ ID NO: 38426 - RNA, 23 nt, Homo sapiens
gcacaugugcacacagccgggug

SEQ ID NO: 38427 - RNA, 22 nt, Homo sapiens
cacugguacaaggguugggaga

SEQ ID NO: 38428 - RNA, 22 nt, Homo sapiens
acuccaacagggccgcgucucc

SEQ ID NO: 38429 - RNA, 22 nt, Homo sapiens
cccaacaacaggaaacuaccua

SEQ ID NO: 38430 - RNA, 23 nt, Homo sapiens
uccaucauuacccggcaguauua

SEQ ID NO: 38431 - RNA, 22 nt, Homo sapiens
acaagcuuuuugcucgucuuau

SEQ ID NO: 38432 - RNA, 22 nt, Homo sapiens
acaaaccuuuuguucgucuuau

SEQ ID NO: 38433 - RNA, 22 nt, Homo sapiens
ucaacaucagucugauaagcua

SEQ ID NO: 38434 - RNA, 21 nt, Homo sapiens
acaggauugagggggggcccu

SEQ ID NO: 38435 - RNA, 23 nt, Homo sapiens
gggcucuuacucccucaggcacu

SEQ ID NO: 38436 - RNA, 19 nt, Homo sapiens
agaaaccccagcagagaca

SEQ ID NO: 38437 - RNA, 23 nt, Homo sapiens
ccgcuugagcuaacuccgacccg

SEQ ID NO: 38438 - RNA, 23 nt, Homo sapiens
gcacaugugcacacagccgggug

SEQ ID NO: 38439 - RNA, 22 nt, Homo sapiens
aacuauacaaccuacuaccuca

SEQ ID NO: 38440 - RNA, 22 nt, Homo sapiens
aaccacacaaccuacuaccuca

SEQ ID NO: 38441 - RNA, 19 nt, Homo sapiens
agaaaccccagcagagaca

SEQ ID NO: 38442 - RNA, 24 nt, Homo sapiens
ucacagguuaaagggucucaggga

SEQ ID NO: 38443 - RNA, 22 nt, Homo sapiens
ucacaaguuagggucucaggga

SEQ ID NO: 38444 - RNA, 23 nt, Homo sapiens
agcccuguucuacagcccugagg

SEQ ID NO: 38445 - RNA, 22 nt, Homo sapiens
cccaacaacaugaaacuaccua

SEQ ID NO: 38446 - RNA, 21 nt, Homo sapiens
caaaaaccacaaauaccuuug

SEQ ID NO: 38447 - RNA, 23 nt, Homo sapiens
aggagaaggcaccaugggauuua

SEQ ID NO: 38448 - RNA, 19 nt, Homo sapiens
ucagcaguaccagccuaga

SEQ ID NO: 38449 - RNA, 22 nt, Homo sapiens
ugcuguuagcccuagccccgca

SEQ ID NO: 38450 - RNA, 23 nt, Homo sapiens
agaaaccaugggguaugagcaga

SEQ ID NO: 38451 - RNA, 17 nt, Homo sapiens
gacagccucucccccac

SEQ ID NO: 38452 - RNA, 18 nt, Homo sapiens
auucaaucuacugccuca

SEQ ID NO: 38453 - RNA, 22 nt, Homo sapiens
acccuuaucaguucuccgucca

SEQ ID NO: 38454 - RNA, 22 nt, Homo sapiens
acugggacuuuguaggccaguu

SEQ ID NO: 38455 - RNA, 22 nt, Homo sapiens
agcgggacuuugagggccaguu

SEQ ID NO: 38456 - RNA, 25 nt, Homo sapiens
agcuagucaagcgcgguuguggggg

SEQ ID NO: 38457 - RNA, 23 nt, Homo sapiens
gaacagguagucugaacacuggg

SEQ ID NO: 38458 - RNA, 23 nt, Homo sapiens
gaacagauagucuaaacacuggg

SEQ ID NO: 38459 - RNA, 23 nt, Homo sapiens
ucucugcaggccgugugcuuugc

SEQ ID NO: 38460 - RNA, 22 nt, Homo sapiens
aggaaaccagcaaguguugacg

SEQ ID NO: 38461 - RNA, 23 nt, Homo sapiens
acacacucacacacacacacuca

SEQ ID NO: 38462 - RNA, 19 nt, Homo sapiens
agaaaccccagcagagaca

SEQ ID NO: 38463 - RNA, 23 nt, Homo sapiens
gacguaguccuauucucugcugc

SEQ ID NO: 38464 - RNA, 24 nt, Homo sapiens
cacccccagagccucagcucccca

SEQ ID NO: 38465 - RNA, 22 nt, Homo sapiens
caaacaccauugucacacucca

SEQ ID NO: 38466 - RNA, 18 nt, Homo sapiens
cccccaccaccacgcccg

SEQ ID NO: 38467 - RNA, 22 nt, Homo sapiens
ggagcccgcgccccgcgccgag

SEQ ID NO: 38468 - RNA, 21 nt, Homo sapiens
gggcaucugggacgcgcagga

SEQ ID NO: 38469 - RNA, 22 nt, Homo sapiens
cagaaagugcuucccucuagag

SEQ ID NO: 38470 - RNA, 22 nt, Homo sapiens
gcuggguggagaagguggugaa

SEQ ID NO: 38471 - RNA, 22 nt, Homo sapiens
ucagaccgagacaagugcaaug

SEQ ID NO: 38472 - RNA, 23 nt, Homo sapiens
acauuuuucguuauugcucuuga

SEQ ID NO: 38473 - RNA, 23 nt, Homo sapiens
acugaggggccucagaccgagcu

SEQ ID NO: 38474 - RNA, 19 nt, Homo sapiens
auuuugguacagcagcuca

SEQ ID NO: 38475 - RNA, 22 nt, Homo sapiens
aagagggagacccaggcucgga

SEQ ID NO: 38476 - RNA, 19 nt, Homo sapiens
gccucagaggcagcugcuu

SEQ ID NO: 38477 - RNA, 25 nt, Homo sapiens
accaacggaccuacuucccuccgcc

SEQ ID NO: 38478 - RNA, 23 nt, Homo sapiens
ccgcuugagcuaacuccgacccg

SEQ ID NO: 38479 - RNA, 21 nt, Homo sapiens
aucugcacugucagcacuuua

SEQ ID NO: 38480 - RNA, 22 nt, Homo sapiens
uagcagaagcauuuccgcacac

SEQ ID NO: 38481 - RNA, 23 nt, Homo sapiens
gggagugaagacacggagccaga

SEQ ID NO: 38482 - RNA, 18 nt, Homo sapiens
ggagaggagggcacugga

SEQ ID NO: 38483 - RNA, 22 nt, Homo sapiens
ucaggaacugccuuucucucca

SEQ ID NO: 38484 - RNA, 21 nt, Homo sapiens
gaccaaucgccguccccgccg

SEQ ID NO: 38485 - RNA, 17 nt, Homo sapiens
aaacauggaagcaauua

SEQ ID NO: 38486 - RNA, 23 nt, Homo sapiens
aaaucagaaucacaccuggggga

SEQ ID NO: 38487 - RNA, 23 nt, Homo sapiens
aaagucucgcucucugccccuca

SEQ ID NO: 38488 - RNA, 22 nt, Homo sapiens
ccucuaguaaauaugucagcau

SEQ ID NO: 38489 - RNA, 24 nt, Homo sapiens
acgcagagcccgaaagcccccagu

SEQ ID NO: 38490 - RNA, 22 nt, Homo sapiens
gcggucccgcggcgccccgccu

SEQ ID NO: 38491 - RNA, 22 nt, Homo sapiens
gggagaggucucccugcgcaca

SEQ ID NO: 38492 - RNA, 23 nt, Homo sapiens
ggaagccaucaagucgcugcagg

SEQ ID NO: 38493 - RNA, 23 nt, Homo sapiens
ggaagccaucaagucgcugcagg

SEQ ID NO: 38494 - RNA, 21 nt, Homo sapiens
ccccucccagccucccugcca

SEQ ID NO: 38495 - RNA, 21 nt, Homo sapiens
gaccaaucgccguccccgccg

SEQ ID NO: 38496 - RNA, 22 nt, Homo sapiens
cggugagcacccggccccugcg

SEQ ID NO: 38497 - RNA, 22 nt, Homo sapiens
agcugaguguaggauguuuaca

SEQ ID NO: 38498 - RNA, 22 nt, Homo sapiens
gcggucccgcggcgccccgccu

SEQ ID NO: 38499 - RNA, 21 nt, Homo sapiens
aagggucaguaagcacccgcg

SEQ ID NO: 38500 - RNA, 21 nt, Homo sapiens
cucccccacugcagcuggcac

SEQ ID NO: 38501 - RNA, 21 nt, Homo sapiens
ccccucccagccucccugcca

SEQ ID NO: 38502 - RNA, 24 nt, Homo sapiens
acugcaggcuccagcuuccaggcu

SEQ ID NO: 38503 - RNA, 18 nt, Homo sapiens
cccccaccaccacgcccg

SEQ ID NO: 38504 - RNA, 23 nt, Homo sapiens
acacagcucuuccauaucuccag

SEQ ID NO: 38505 - RNA, 23 nt, Homo sapiens
gggagugaagacacggagccaga

SEQ ID NO: 38506 - RNA, 22 nt, Homo sapiens
cggugagcacccggccccugcg

SEQ ID NO: 38507 - RNA, 22 nt, Homo sapiens
uaaccgauuucagauggugcua

SEQ ID NO: 38508 - RNA, 23 nt, Homo sapiens
aacacugauuucaaauggugcua

SEQ ID NO: 38509 - RNA, 22 nt, Homo sapiens
accagcuaacaauacacugcca

SEQ ID NO: 38510 - RNA, 22 nt, Homo sapiens
uaaccgauuucaaauggugcua

SEQ ID NO: 38511 - RNA, 23 nt, Homo sapiens
ccacccaaugaccuacuccaaga

SEQ ID NO: 38512 - RNA, 22 nt, Homo sapiens
gaauucaucacggccagccucu

SEQ ID NO: 38513 - RNA, 22 nt, Homo sapiens
aggaaaccagcaaguguugacg

SEQ ID NO: 38514 - RNA, 24 nt, Homo sapiens
cagaaagugcuuucuuuuggagaa

SEQ ID NO: 38515 - RNA, 22 nt, Homo sapiens
aacacucuaaaaggaggcacuu

SEQ ID NO: 38516 - RNA, 20 nt, Homo sapiens
auuucuauaucuaucuccau

SEQ ID NO: 38517 - RNA, 22 nt, Homo sapiens
gcugaggcuguggggcuggagu

SEQ ID NO: 38518 - RNA, 21 nt, Homo sapiens
ggggagcgggggcccugccuu

SEQ ID NO: 38519 - RNA, 21 nt, Homo sapiens
cugggggacggagcagaagga

SEQ ID NO: 38520 - RNA, 21 nt, Homo sapiens
ccccucccagccucccugcca

SEQ ID NO: 38521 - RNA, 24 nt, Homo sapiens
acugcaggcuccagcuuccaggcu

SEQ ID NO: 38522 - RNA, 21 nt, Homo sapiens
uuuagcauaaguaugucccaa

SEQ ID NO: 38523 - RNA, 21 nt, Homo sapiens
auguaggccuuuagaucacuu

SEQ ID NO: 38524 - RNA, 22 nt, Homo sapiens
cggugagcacccggccccugcg

SEQ ID NO: 38525 - RNA, 22 nt, Homo sapiens
uggcagcagcggagggggcaga

SEQ ID NO: 38526 - RNA, 22 nt, Homo sapiens
cuguuccugcugaacugagcca

SEQ ID NO: 38527 - RNA, 20 nt, Homo sapiens
ccagcagcaccuggggcagu

SEQ ID NO: 38528 - RNA, 22 nt, Homo sapiens
auaaggauuuuuaggggcauua

SEQ ID NO: 38529 - RNA, 22 nt, Homo sapiens
aucgggaggggacugagccuga

SEQ ID NO: 38530 - RNA, 21 nt, Homo sapiens
auccuguacugagcugccccg

SEQ ID NO: 38531 - RNA, 22 nt, Homo sapiens
aguccagauucugugcccacca

SEQ ID NO: 38532 - RNA, 25 nt, Homo sapiens
acggagcugucccaacaccaccccu

SEQ ID NO: 38533 - RNA, 22 nt, Homo sapiens
gcacauguucugcggcccacca

SEQ ID NO: 38534 - RNA, 22 nt, Homo sapiens
ugcuguuagcccuagccccgca

SEQ ID NO: 38535 - RNA, 21 nt, Homo sapiens
gcaagcccagaccgcaaaaag

SEQ ID NO: 38536 - RNA, 21 nt, Homo sapiens
acaggccaucuguguuauauu

SEQ ID NO: 38537 - RNA, 27 nt, Homo sapiens
ugcccacucucaccaucaccuacagug

SEQ ID NO: 38538 - RNA, 22 nt, Homo sapiens
cuagggaacacagggcugguga

SEQ ID NO: 38539 - RNA, 23 nt, Homo sapiens
cggccugauucacaacaccagcu

SEQ ID NO: 38540 - RNA, 22 nt, Homo sapiens
cuggagacacgugcacuguaga

SEQ ID NO: 38541 - RNA, 22 nt, Homo sapiens
cacaaaccauuaugugcugcua

SEQ ID NO: 38542 - RNA, 22 nt, Homo sapiens
uguaaaccaugaugugcugcua

SEQ ID NO: 38543 - RNA, 22 nt, Homo sapiens
cgccaauauuuacgugcugcua

SEQ ID NO: 38544 - RNA, 21 nt, Homo sapiens
gccaauauuucugugcugcua

SEQ ID NO: 38545 - RNA, 21 nt, Homo sapiens
ccuucugacuccaaguccagu

SEQ ID NO: 38546 - RNA, 22 nt, Homo sapiens
uucaaaacaugaauugcugcug

SEQ ID NO: 38547 - RNA, 22 nt, Homo sapiens
gagauuggccauguaauacuca

SEQ ID NO: 38548 - RNA, 21 nt, Homo sapiens
acaaaccacagugugcugcug

SEQ ID NO: 38549 - RNA, 23 nt, Homo sapiens
gaaaaacgcccccuggcuugaaa

SEQ ID NO: 38550 - RNA, 22 nt, Homo sapiens
gcacacaauaaauguuugcuga

SEQ ID NO: 38551 - RNA, 23 nt, Homo sapiens
aguaacugguugaacaacuguaa

SEQ ID NO: 38552 - RNA, 21 nt, Homo sapiens
acuagcuuauacauaaaauua

SEQ ID NO: 38553 - RNA, 25 nt, Homo sapiens
acggagcugucccaacaccaccccu

SEQ ID NO: 38554 - RNA, 22 nt, Homo sapiens
guccaaaguuggggugcugguu

SEQ ID NO: 38555 - RNA, 23 nt, Homo sapiens
gacguaguccuauucucugcugc

SEQ ID NO: 38556 - RNA, 23 nt, Homo sapiens
gcgguagcggaagcgguaacugg

SEQ ID NO: 38557 - RNA, 24 nt, Homo sapiens
acugcuggucuucagucagggcca

SEQ ID NO: 38558 - RNA, 22 nt, Homo sapiens
ccagaacugaguccacagggca

SEQ ID NO: 38559 - RNA, 21 nt, Homo sapiens
gggcaucugggacgcgcagga

SEQ ID NO: 38560 - RNA, 18 nt, Homo sapiens
auucaaucuacugccuca

SEQ ID NO: 38561 - RNA, 22 nt, Homo sapiens
cggugagcacccggccccugcg

SEQ ID NO: 38562 - RNA, 23 nt, Homo sapiens
cccaacagacauggcgguacuca

SEQ ID NO: 38563 - RNA, 22 nt, Homo sapiens
cagaagugggccgggcacaggg

SEQ ID NO: 38564 - RNA, 21 nt, Homo sapiens
aagugucagacacgguggugg

SEQ ID NO: 38565 - RNA, 23 nt, Homo sapiens
acaccaaugcccuaggggaugcg

SEQ ID NO: 38566 - RNA, 21 nt, Homo sapiens
guccugagagcgcugccuccu

SEQ ID NO: 38567 - RNA, 22 nt, Homo sapiens
uauccacuacaccccgcugccu

SEQ ID NO: 38568 - RNA, 23 nt, Homo sapiens
aggaacagcagcagcccgggccg

SEQ ID NO: 38569 - RNA, 22 nt, Homo sapiens
ucaguuuccucugcaaacaguu

SEQ ID NO: 38570 - RNA, 21 nt, Homo sapiens
gccaauauuucugugcugcua

SEQ ID NO: 38571 - RNA, 23 nt, Homo sapiens
ucaguuuugcauagauuugcaca

SEQ ID NO: 38572 - RNA, 23 nt, Homo sapiens
ucaguuuugcauggauuugcaca

SEQ ID NO: 38573 - RNA, 21 nt, Homo sapiens
uucacuccaaaaggugcaaaa

SEQ ID NO: 38574 - RNA, 23 nt, Homo sapiens
agacaaggcccacccgugcaaac

SEQ ID NO: 38575 - RNA, 23 nt, Homo sapiens
aaucgcgguuuauaccaaaugaa

SEQ ID NO: 38576 - RNA, 22 nt, Homo sapiens
cucagagcagacgugguucuca

SEQ ID NO: 38577 - RNA, 21 nt, Homo sapiens
gcuccaaccucagcagacugu

SEQ ID NO: 38578 - RNA, 20 nt, Homo sapiens
acaaugagaacccauggucu

SEQ ID NO: 38579 - RNA, 22 nt, Homo sapiens
caaacaccauugucacacucca

SEQ ID NO: 38580 - RNA, 22 nt, Homo sapiens
ucacauuugccugcagagauuu

SEQ ID NO: 38581 - RNA, 22 nt, Homo sapiens
acaaccagcuaagacacugcca

SEQ ID NO: 38582 - RNA, 22 nt, Homo sapiens
auggcaguggaguuagugauug

SEQ ID NO: 38583 - RNA, 23 nt, Homo sapiens
gcaaucagcuaacuacacugccu

SEQ ID NO: 38584 - RNA, 22 nt, Homo sapiens
cacuuaucagguuguauuauaa

SEQ ID NO: 38585 - RNA, 22 nt, Homo sapiens
cacuuagcagguuguauuauau

SEQ ID NO: 38586 - RNA, 20 nt, Homo sapiens
uaugaacaauuucuaggaau

SEQ ID NO: 38587 - RNA, 22 nt, Homo sapiens
accagcuaacaauacacugcca

SEQ ID NO: 38588 - RNA, 22 nt, Homo sapiens
gccagcuaacaauacacugccu

SEQ ID NO: 38589 - RNA, 21 nt, Homo sapiens
cagguaccaauauuuuaucua

SEQ ID NO: 38590 - RNA, 20 nt, Homo sapiens
acaaugagaacccauggucu

SEQ ID NO: 38591 - RNA, 22 nt, Homo sapiens
caaacaccauugucacacucca

SEQ ID NO: 38592 - RNA, 23 nt, Homo sapiens
cacaaauucgguucuacagggua

SEQ ID NO: 38593 - RNA, 21 nt, Homo sapiens
cggcucggguggcggcgacgg

SEQ ID NO: 38594 - RNA, 21 nt, Homo sapiens
ugcaggcugaucuucuucucu

SEQ ID NO: 38595 - RNA, 22 nt, Homo sapiens
cacgaccgacgccacgccgagu

SEQ ID NO: 38596 - RNA, 22 nt, Homo sapiens
ggagcccgcgccccgcgccgag

SEQ ID NO: 38597 - RNA, 18 nt, Homo sapiens
ggagaggagggcacugga

SEQ ID NO: 38598 - RNA, 23 nt, Homo sapiens
acauuuuucguuauugcucuuga

SEQ ID NO: 38599 - RNA, 22 nt, Homo sapiens
uccagcaaagggaagcgcuuuc

SEQ ID NO: 38600 - RNA, 22 nt, Homo sapiens
uccagcaaagggaagcgcuuuc

SEQ ID NO: 38601 - RNA, 22 nt, Homo sapiens
accucuaaaggggagcgcuuug

SEQ ID NO: 38602 - RNA, 22 nt, Homo sapiens
accucuaaaggggagcgcuuug

SEQ ID NO: 38603 - RNA, 23 nt, Homo sapiens
acacucuaaagagaagcgcuuug

SEQ ID NO: 38604 - RNA, 23 nt, Homo sapiens
acacucuaaagagaagcgcuuug

SEQ ID NO: 38605 - RNA, 21 nt, Homo sapiens
gcuccaaagggaagcgcuuug

SEQ ID NO: 38606 - RNA, 21 nt, Homo sapiens
gcuccaaagggaagcgcuuug

SEQ ID NO: 38607 - RNA, 21 nt, Homo sapiens
cacucugaagggaagcgcuuu

SEQ ID NO: 38608 - RNA, 21 nt, Homo sapiens
ccucuaaagagaagcgcuuuc

SEQ ID NO: 38609 - RNA, 21 nt, Homo sapiens
ccucuaaagagaagcgcuuuc

SEQ ID NO: 38610 - RNA, 23 nt, Homo sapiens
acagaaagugcuucccucaagag

SEQ ID NO: 38611 - RNA, 21 nt, Homo sapiens
aguucucccaacguaaaccca

SEQ ID NO: 38612 - RNA, 22 nt, Homo sapiens
acaaaguucuguagugcacuga

SEQ ID NO: 38613 - RNA, 22 nt, Homo sapiens
accuaauauaucaaacauauca

SEQ ID NO: 38614 - RNA, 22 nt, Homo sapiens
acggaagggcagagagggccag

SEQ ID NO: 38615 - RNA, 20 nt, Homo sapiens
guguguauacauuuauacau

SEQ ID NO: 38616 - RNA, 25 nt, Homo sapiens
acggagcugucccaacaccaccccu

SEQ ID NO: 38617 - RNA, 22 nt, Homo sapiens
cacucuaaagggaggcacuuug

SEQ ID NO: 38618 - RNA, 20 nt, Homo sapiens
uacugcuuccacagcucccc

SEQ ID NO: 38619 - RNA, 22 nt, Homo sapiens
caaacaccauugucacacucca

SEQ ID NO: 38620 - RNA, 18 nt, Homo sapiens
uggcgccugaacagggac

SEQ ID NO: 38621 - RNA, 18 nt, Homo sapiens
aucacauucaccucccug

SEQ ID NO: 38622 - RNA, 23 nt, Homo sapiens
gggagugaagacacggagccaga

SEQ ID NO: 38623 - RNA, 23 nt, Homo sapiens
cgugagcuccuggaggacaggga

SEQ ID NO: 38624 - RNA, 23 nt, Homo sapiens
cugcagaacuguucccgcugcua

SEQ ID NO: 38625 - RNA, 21 nt, Homo sapiens
ggacuauagaacuuucccccu

SEQ ID NO: 38626 - RNA, 23 nt, Homo sapiens
gacguaguccuauucucugcugc

SEQ ID NO: 38627 - RNA, 22 nt, Homo sapiens
cacucuaaagggaggcacuuug

SEQ ID NO: 38628 - RNA, 22 nt, Homo sapiens
cacauggccaaaacagagaaga

SEQ ID NO: 38629 - RNA, 22 nt, Homo sapiens
gugggguggguggucaggccga

SEQ ID NO: 38630 - RNA, 22 nt, Homo sapiens
cggugagcacccggccccugcg

SEQ ID NO: 38631 - RNA, 22 nt, Homo sapiens
uaaccgauuucagauggugcua

SEQ ID NO: 38632 - RNA, 23 nt, Homo sapiens
aacacugauuucaaauggugcua

SEQ ID NO: 38633 - RNA, 22 nt, Homo sapiens
uaaccgauuucaaauggugcua

SEQ ID NO: 38634 - RNA, 21 nt, Homo sapiens
acuggcugagucaggacuagc

SEQ ID NO: 38635 - RNA, 19 nt, Homo sapiens
guugggaucacaggcgccc

SEQ ID NO: 38636 - RNA, 22 nt, Homo sapiens
uggggacccucccugaaccaag

SEQ ID NO: 38637 - RNA, 21 nt, Homo sapiens
cugcugggccacaacguggga

SEQ ID NO: 38638 - RNA, 22 nt, Homo sapiens
ucggucccucgggccagggcag

SEQ ID NO: 38639 - RNA, 24 nt, Homo sapiens
agugugaguucuaccauugccaaa

SEQ ID NO: 38640 - RNA, 22 nt, Homo sapiens
ugcaacuuaguaaugugcaaua

SEQ ID NO: 38641 - RNA, 22 nt, Homo sapiens
ucaguuuccucugcaaacaguu

SEQ ID NO: 38642 - RNA, 24 nt, Homo sapiens
acgcgcaggccagagacccaggca

SEQ ID NO: 38643 - RNA, 22 nt, Homo sapiens
auacauacuucuuuacauucca

SEQ ID NO: 38644 - RNA, 18 nt, Homo sapiens
gaaaugagggccagcuga

SEQ ID NO: 38645 - RNA, 21 nt, Homo sapiens
ccccucccagccucccugcca

SEQ ID NO: 38646 - RNA, 24 nt, Homo sapiens
acugcuggucuucagucagggcca

SEQ ID NO: 38647 - RNA, 20 nt, Homo sapiens
gcagaagcauuuccacacac

SEQ ID NO: 38648 - RNA, 22 nt, Homo sapiens
cagacuccgguggaaugaagga

SEQ ID NO: 38649 - RNA, 22 nt, Homo sapiens
ccacacacuuccuuacauucca

SEQ ID NO: 38650 - RNA, 21 nt, Homo sapiens
aagugucagacacgguggugg

SEQ ID NO: 38651 - RNA, 23 nt, Homo sapiens
gaaagugcccucaaggcugagug

SEQ ID NO: 38652 - RNA, 22 nt, Homo sapiens
cucagagcagacgugguucuca

SEQ ID NO: 38653 - RNA, 22 nt, Homo sapiens
gcaaaaguaauugcagugugug

SEQ ID NO: 38654 - RNA, 20 nt, Homo sapiens
ggcaaagaaggaacauuccu

SEQ ID NO: 38655 - RNA, 18 nt, Homo sapiens
auucaaucuacugccuca

SEQ ID NO: 38656 - RNA, 20 nt, Homo sapiens
acagcaaggagggcaggagg

SEQ ID NO: 38657 - RNA, 22 nt, Homo sapiens
ucacaguugccagcugagauua

SEQ ID NO: 38658 - RNA, 23 nt, Homo sapiens
ucucugcaggccgugugcuuugc

SEQ ID NO: 38659 - RNA, 21 nt, Homo sapiens
aagacgggaggagaggaguga

SEQ ID NO: 38660 - RNA, 23 nt, Homo sapiens
aagaaucuugucccgcagguccu

SEQ ID NO: 38661 - RNA, 20 nt, Homo sapiens
aggggccucagccuccuggu

SEQ ID NO: 38662 - RNA, 21 nt, Homo sapiens
caucaccuuccuucuccucca

SEQ ID NO: 38663 - RNA, 23 nt, Homo sapiens
gacguaguccuauucucugcugc

SEQ ID NO: 38664 - RNA, 21 nt, Homo sapiens
cuagggaagaacagugagcaa

SEQ ID NO: 38665 - RNA, 22 nt, Homo sapiens
gaggcucagaauggcucaggag

SEQ ID NO: 38666 - RNA, 23 nt, Homo sapiens
gggagugaagacacggagccaga

SEQ ID NO: 38667 - RNA, 23 nt, Homo sapiens
gaacagguagucugaacacuggg

SEQ ID NO: 38668 - RNA, 23 nt, Homo sapiens
gaacagauagucuaaacacuggg

SEQ ID NO: 38669 - RNA, 23 nt, Homo sapiens
gaaacccagcagacaauguagcu

SEQ ID NO: 38670 - RNA, 22 nt, Homo sapiens
aggaaaccagcaaguguugacg

SEQ ID NO: 38671 - RNA, 22 nt, Homo sapiens
aguccagauucugugcccacca

SEQ ID NO: 38672 - RNA, 19 nt, Homo sapiens
gcuccuguccaacuggcuc

SEQ ID NO: 38673 - RNA, 22 nt, Homo sapiens
gcacauguucugcggcccacca

SEQ ID NO: 38674 - RNA, 23 nt, Homo sapiens
agaaaccaugggguaugagcaga

SEQ ID NO: 38675 - RNA, 22 nt, Homo sapiens
ucaguggcucagguucguugca

SEQ ID NO: 38676 - RNA, 22 nt, Homo sapiens
ucuacccagaaaggagccagug

SEQ ID NO: 38677 - RNA, 21 nt, Homo sapiens
gaccaaucgccguccccgccg

SEQ ID NO: 38678 - RNA, 22 nt, Homo sapiens
ucagaccgagacaagugcaaug

SEQ ID NO: 38679 - RNA, 23 nt, Homo sapiens
aaaucagaaucacaccuggggga

SEQ ID NO: 38680 - RNA, 22 nt, Homo sapiens
auaaggauuuuuaggggcauua

SEQ ID NO: 38681 - RNA, 22 nt, Homo sapiens
gauccgagcaccggggaccccc

SEQ ID NO: 38682 - RNA, 24 nt, Homo sapiens
acgcagagcccgaaagcccccagu

SEQ ID NO: 38683 - RNA, 22 nt, Homo sapiens
gcggucccgcggcgccccgccu

SEQ ID NO: 38684 - RNA, 22 nt, Homo sapiens
ggcagagagucagagcgcggau

SEQ ID NO: 38685 - RNA, 21 nt, Homo sapiens
gcaagcccagaccgcaaaaag

SEQ ID NO: 38686 - RNA, 22 nt, Homo sapiens
agugaauucuaccagugccaua

SEQ ID NO: 38687 - RNA, 23 nt, Homo sapiens
acauuuuucguuauugcucuuga

SEQ ID NO: 38688 - RNA, 22 nt, Homo sapiens
caacaaaaucacugaugcugga

SEQ ID NO: 38689 - RNA, 22 nt, Homo sapiens
auggcaguggaguuagugauug

SEQ ID NO: 38690 - RNA, 22 nt, Homo sapiens
auaaggauuuuuaggggcauua

SEQ ID NO: 38691 - RNA, 22 nt, Homo sapiens
uauucaggaacauauugcaaaa

SEQ ID NO: 38692 - RNA, 21 nt, Homo sapiens
ugacugcagagcaaaagacac

SEQ ID NO: 38693 - RNA, 22 nt, Homo sapiens
gcacacaauaaauguuugcuga

SEQ ID NO: 38694 - RNA, 22 nt, Homo sapiens
aaaguaacugcaguuuuugcua

SEQ ID NO: 38695 - RNA, 20 nt, Homo sapiens
acaaugagaacccauggucu

SEQ ID NO: 38696 - RNA, 22 nt, Homo sapiens
guccaaaguuggggugcugguu

SEQ ID NO: 38697 - RNA, 23 nt, Homo sapiens
gggagugaagacacggagccaga

SEQ ID NO: 38698 - RNA, 22 nt, Homo sapiens
cacugguacaaggguugggaga

SEQ ID NO: 38699 - RNA, 23 nt, Homo sapiens
aggaacagcagcagcccgggccg

SEQ ID NO: 38700 - RNA, 21 nt, Homo sapiens
gaccaaucgccguccccgccg

SEQ ID NO: 38701 - RNA, 22 nt, Homo sapiens
uccacauggaguugcuguuaca

SEQ ID NO: 38702 - RNA, 22 nt, Homo sapiens
ucagaccgagacaagugcaaug

SEQ ID NO: 38703 - RNA, 22 nt, Homo sapiens
agcugaguguaggauguuuaca

SEQ ID NO: 38704 - RNA, 23 nt, Homo sapiens
aaagucucgcucucugccccuca

SEQ ID NO: 38705 - RNA, 22 nt, Homo sapiens
ugcuguuagcccuagccccgca

SEQ ID NO: 38706 - RNA, 21 nt, Homo sapiens
cugaggagagaggaggugggg

SEQ ID NO: 38707 - RNA, 22 nt, Homo sapiens
cugggggcggcacaggggcuca

SEQ ID NO: 38708 - RNA, 23 nt, Homo sapiens
cugugggagggcaguggugagag

SEQ ID NO: 38709 - RNA, 22 nt, Homo sapiens
ccacacacuuccuuacauucca

SEQ ID NO: 38710 - RNA, 22 nt, Homo sapiens
ggagauggagccagggcccuaa

SEQ ID NO: 38711 - RNA, 23 nt, Homo sapiens
aggaacagcagcagcccgggccg

SEQ ID NO: 38712 - RNA, 22 nt, Homo sapiens
ucaggaacugccuuucucucca

SEQ ID NO: 38713 - RNA, 22 nt, Homo sapiens
ucaggaacugccuuucucucca

SEQ ID NO: 38714 - RNA, 21 nt, Homo sapiens
acaggauugagggggggcccu

SEQ ID NO: 38715 - RNA, 23 nt, Homo sapiens
augcaaaguugcucggguaaccu

SEQ ID NO: 38716 - RNA, 22 nt, Homo sapiens
aagagggagacccaggcucgga

SEQ ID NO: 38717 - RNA, 23 nt, Homo sapiens
uguaggcuggggauaaaugaaua

SEQ ID NO: 38718 - RNA, 21 nt, Homo sapiens
aagggucaguaagcacccgcg

SEQ ID NO: 38719 - RNA, 20 nt, Homo sapiens
uacugcuuccacagcucccc

SEQ ID NO: 38720 - RNA, 23 nt, Homo sapiens
gcacaugugcacacagccgggug

SEQ ID NO: 38721 - RNA, 22 nt, Homo sapiens
acacacccacgcgagccggaaa

SEQ ID NO: 38722 - RNA, 24 nt, Homo sapiens
ucagagcauguguuuaaucaggcu

SEQ ID NO: 38723 - RNA, 22 nt, Homo sapiens
gugggguggguggucaggccga

SEQ ID NO: 38724 - RNA, 18 nt, Homo sapiens
aucacauucaccucccug

SEQ ID NO: 38725 - RNA, 21 nt, Homo sapiens
gaccaaucgccguccccgccg

SEQ ID NO: 38726 - RNA, 22 nt, Homo sapiens
ugacgaugacaacgaugacgua

SEQ ID NO: 38727 - RNA, 22 nt, Homo sapiens
gcggucccgcggcgccccgccu

SEQ ID NO: 38728 - RNA, 22 nt, Homo sapiens
ugcuguuagcccuagccccgca

SEQ ID NO: 38729 - RNA, 22 nt, Homo sapiens
gcugaggcuguggggcuggagu

SEQ ID NO: 38730 - RNA, 17 nt, Homo sapiens
ggguggcagcgguggga

SEQ ID NO: 38731 - RNA, 22 nt, Homo sapiens
ccaucuuuaccagacaguguua

SEQ ID NO: 38732 - RNA, 21 nt, Homo sapiens
acuagacugugagcuccucga

SEQ ID NO: 38733 - RNA, 23 nt, Homo sapiens
aggaacagcagcagcccgggccg

SEQ ID NO: 38734 - RNA, 22 nt, Homo sapiens
acaucguuaccagacaguguua

SEQ ID NO: 38735 - RNA, 21 nt, Homo sapiens
aagugucagacacgguggugg

SEQ ID NO: 38736 - RNA, 22 nt, Homo sapiens
cuguuccugcugaacugagcca

SEQ ID NO: 38737 - RNA, 21 nt, Homo sapiens
ucaaucacagauagcaccccu

SEQ ID NO: 38738 - RNA, 23 nt, Homo sapiens
cacugugggcccucuccgcacca

SEQ ID NO: 38739 - RNA, 20 nt, Homo sapiens
uacugcuuccacagcucccc

SEQ ID NO: 38740 - RNA, 22 nt, Homo sapiens
aacagcacaaacuacuaccuca

SEQ ID NO: 38741 - RNA, 18 nt, Homo sapiens
aucacauucaccucccug

SEQ ID NO: 38742 - RNA, 22 nt, Homo sapiens
ucgcccucucaacccagcuuuu

SEQ ID NO: 38743 - RNA, 22 nt, Homo sapiens
uugcccucucaacccagcuuuu

SEQ ID NO: 38744 - RNA, 20 nt, Homo sapiens
acccucucaacccagcuuuu

SEQ ID NO: 38745 - RNA, 19 nt, Homo sapiens
uccucucaacccagcuuuu

SEQ ID NO: 38746 - RNA, 19 nt, Homo sapiens
guccugaauuccgcagccu

SEQ ID NO: 38747 - RNA, 22 nt, Homo sapiens
gauccgagcaccggggaccccc

SEQ ID NO: 38748 - RNA, 19 nt, Homo sapiens
gcucuaagaaagccacacu

SEQ ID NO: 38749 - RNA, 21 nt, Homo sapiens
gaaggaagugagugcagccac

SEQ ID NO: 38750 - RNA, 21 nt, Homo sapiens
guccugagagcgcugccuccu

SEQ ID NO: 38751 - RNA, 22 nt, Homo sapiens
ugcuguuagcccuagccccgca

SEQ ID NO: 38752 - RNA, 23 nt, Homo sapiens
gcacaugugcacacagccgggug

SEQ ID NO: 38753 - RNA, 22 nt, Homo sapiens
ucccucacacagaauuccagaa

SEQ ID NO: 38754 - RNA, 22 nt, Homo sapiens
augcuuuuugggguaagggcuu

SEQ ID NO: 38755 - RNA, 23 nt, Homo sapiens
aggaacagcagcagcccgggccg

SEQ ID NO: 38756 - RNA, 21 nt, Homo sapiens
gaccaaucgccguccccgccg

SEQ ID NO: 38757 - RNA, 23 nt, Homo sapiens
ggacauuguuucagugcccaagu

SEQ ID NO: 38758 - RNA, 22 nt, Homo sapiens
gcggucccgcggcgccccgccu

SEQ ID NO: 38759 - RNA, 23 nt, Homo sapiens
cuccagccccuccagggcuuccu

SEQ ID NO: 38760 - RNA, 22 nt, Homo sapiens
ugcuguuagcccuagccccgca

SEQ ID NO: 38761 - RNA, 22 nt, Homo sapiens
gcugaggcuguggggcuggagu

SEQ ID NO: 38762 - RNA, 20 nt, Homo sapiens
cccugcgccaucuccucuac

SEQ ID NO: 38763 - RNA, 20 nt, Homo sapiens
gcaagacaucacaagacucu

SEQ ID NO: 38764 - RNA, 22 nt, Homo sapiens
ggcagagagucagagcgcggau

SEQ ID NO: 38765 - RNA, 22 nt, Homo sapiens
aacccauggaauucaguucuca

SEQ ID NO: 38766 - RNA, 23 nt, Homo sapiens
gggagugaagacacggagccaga

SEQ ID NO: 38767 - RNA, 23 nt, Homo sapiens
cuaucugcacuagaugcaccuua

SEQ ID NO: 38768 - RNA, 22 nt, Homo sapiens
cggugagcacccggccccugcg

SEQ ID NO: 38769 - RNA, 20 nt, Homo sapiens
uucccaugcccuauaccucu

SEQ ID NO: 38770 - RNA, 22 nt, Homo sapiens
caccugauaaaacugagguaua

SEQ ID NO: 38771 - RNA, 20 nt, Homo sapiens
uacugcuuccacagcucccc

SEQ ID NO: 38772 - RNA, 18 nt, Homo sapiens
gaaaugagggccagcuga

SEQ ID NO: 38773 - RNA, 21 nt, Homo sapiens
cugggggacggagcagaagga

SEQ ID NO: 38774 - RNA, 23 nt, Homo sapiens
gggagugaagacacggagccaga

SEQ ID NO: 38775 - RNA, 23 nt, Homo sapiens
gggagugaagacacggagccaga

SEQ ID NO: 38776 - RNA, 22 nt, Homo sapiens
ucagaccgagacaagugcaaug

SEQ ID NO: 38777 - RNA, 22 nt, Homo sapiens
aggaaaccagcaaguguugacg

SEQ ID NO: 38778 - RNA, 22 nt, Homo sapiens
gugauugccacucuccugagua

SEQ ID NO: 38779 - RNA, 21 nt, Homo sapiens
cucacucagauggccaacuca

SEQ ID NO: 38780 - RNA, 21 nt, Homo sapiens
caucaccuuccuucuccucca

SEQ ID NO: 38781 - RNA, 22 nt, Homo sapiens
gcugaggcuguggggcuggagu

SEQ ID NO: 38782 - RNA, 23 nt, Homo sapiens
accacaggagucugagcauuuga

SEQ ID NO: 38783 - RNA, 22 nt, Homo sapiens
cuggagagacaaggggaagagg

SEQ ID NO: 38784 - RNA, 22 nt, Homo sapiens
aggcauaggaugacaaagggaa

SEQ ID NO: 38785 - RNA, 22 nt, Homo sapiens
aggcgaaggaugacaaagggaa

SEQ ID NO: 38786 - RNA, 22 nt, Homo sapiens
ggaccuaaaaauacaaugcaua

SEQ ID NO: 38787 - RNA, 22 nt, Homo sapiens
caagacacauuuggagagggac

SEQ ID NO: 38788 - RNA, 21 nt, Homo sapiens
gaaggaagugagugcagccac

SEQ ID NO: 38789 - RNA, 22 nt, Homo sapiens
ggagauggagccagggcccuaa

SEQ ID NO: 38790 - RNA, 18 nt, Homo sapiens
auucaaucuacugccuca

SEQ ID NO: 38791 - RNA, 23 nt, Homo sapiens
cuaacugcacuagaugcaccuua

SEQ ID NO: 38792 - RNA, 21 nt, Homo sapiens
aggcggcaggcacaggacugg

SEQ ID NO: 38793 - RNA, 22 nt, Homo sapiens
uggcagcagcggagggggcaga

SEQ ID NO: 38794 - RNA, 20 nt, Homo sapiens
cccgccgcgucgcccugggg

SEQ ID NO: 38795 - RNA, 22 nt, Homo sapiens
uuaacagcuaagcacccuaauc

SEQ ID NO: 38796 - RNA, 22 nt, Homo sapiens
uuaacagcuaagcacccuaauc

SEQ ID NO: 38797 - RNA, 20 nt, Homo sapiens
ccagcagcaccuggggcagu

SEQ ID NO: 38798 - RNA, 22 nt, Homo sapiens
acggaagggcagagagggccag

SEQ ID NO: 38799 - RNA, 21 nt, Homo sapiens
auccuguacugagcugccccg

SEQ ID NO: 38800 - RNA, 19 nt, Homo sapiens
ucagcaguaccagccuaga

SEQ ID NO: 38801 - RNA, 20 nt, Homo sapiens
uccccacagacccagagccg

SEQ ID NO: 38802 - RNA, 21 nt, Homo sapiens
ggggagcgggggcccugccuu

SEQ ID NO: 38803 - RNA, 21 nt, Homo sapiens
ccccucccagccucccugcca

SEQ ID NO: 38804 - RNA, 27 nt, Homo sapiens
uuuagcacagugcuuauacaagaaggu

SEQ ID NO: 38805 - RNA, 17 nt, Homo sapiens
gggagaggaggaggcga

SEQ ID NO: 38806 - RNA, 18 nt, Homo sapiens
cagcagccuccuucucaa

SEQ ID NO: 38807 - RNA, 18 nt, Homo sapiens
aucacauucaccucccug

SEQ ID NO: 38808 - RNA, 23 nt, Homo sapiens
gggagugaagacacggagccaga

SEQ ID NO: 38809 - RNA, 22 nt, Homo sapiens
uggcagcagcggagggggcaga

SEQ ID NO: 38810 - RNA, 20 nt, Homo sapiens
ccagcagcaccuggggcagu

SEQ ID NO: 38811 - RNA, 22 nt, Homo sapiens
auaaggauuuuuaggggcauua

SEQ ID NO: 38812 - RNA, 23 nt, Homo sapiens
aaagucucgcucucugccccuca

SEQ ID NO: 38813 - RNA, 21 nt, Homo sapiens
auccuguacugagcugccccg

SEQ ID NO: 38814 - RNA, 20 nt, Homo sapiens
aggggccucagccuccuggu

SEQ ID NO: 38815 - RNA, 21 nt, Homo sapiens
ccccucccagccucccugcca

SEQ ID NO: 38816 - RNA, 22 nt, Homo sapiens
cacgaccgacgccacgccgagu

SEQ ID NO: 38817 - RNA, 22 nt, Homo sapiens
ggagcccgcgccccgcgccgag

SEQ ID NO: 38818 - RNA, 21 nt, Homo sapiens
gaccaaucgccguccccgccg

SEQ ID NO: 38819 - RNA, 21 nt, Homo sapiens
gaccaaucgccguccccgccg

SEQ ID NO: 38820 - RNA, 22 nt, Homo sapiens
gcggucccgcggcgccccgccu

SEQ ID NO: 38821 - RNA, 22 nt, Homo sapiens
gcggucccgcggcgccccgccu

SEQ ID NO: 38822 - RNA, 22 nt, Homo sapiens
ugcuguuagcccuagccccgca

SEQ ID NO: 38823 - RNA, 22 nt, Homo sapiens
ugcuguuagcccuagccccgca

SEQ ID NO: 38824 - RNA, 21 nt, Homo sapiens
caucaccuuccuucuccucca

SEQ ID NO: 38825 - RNA, 21 nt, Homo sapiens
cucccccacugcagcuggcac

SEQ ID NO: 38826 - RNA, 18 nt, Homo sapiens
aucacauucaccucccug

SEQ ID NO: 38827 - RNA, 23 nt, Homo sapiens
gggagugaagacacggagccaga

SEQ ID NO: 38828 - RNA, 21 nt, Homo sapiens
gaccaaucgccguccccgccg

SEQ ID NO: 38829 - RNA, 23 nt, Homo sapiens
cagcugcuuuugggauuccguug

SEQ ID NO: 38830 - RNA, 22 nt, Homo sapiens
uccacauggaguugcuguuaca

SEQ ID NO: 38831 - RNA, 22 nt, Homo sapiens
uagucaagugaagcagugggag

SEQ ID NO: 38832 - RNA, 23 nt, Homo sapiens
uccaaucaguuccugaugcagua

SEQ ID NO: 38833 - RNA, 22 nt, Homo sapiens
acaguucuucaacuggcagcuu

SEQ ID NO: 38834 - RNA, 22 nt, Homo sapiens
agcugaguguaggauguuuaca

SEQ ID NO: 38835 - RNA, 22 nt, Homo sapiens
caacaaaaucacugaugcugga

SEQ ID NO: 38836 - RNA, 22 nt, Homo sapiens
acaaccagcuaagacacugcca

SEQ ID NO: 38837 - RNA, 23 nt, Homo sapiens
gcaaucagcuaacuacacugccu

SEQ ID NO: 38838 - RNA, 22 nt, Homo sapiens
accagcuaacaauacacugcca

SEQ ID NO: 38839 - RNA, 22 nt, Homo sapiens
gccagcuaacaauacacugccu

SEQ ID NO: 38840 - RNA, 22 nt, Homo sapiens
ugcaagccuugggugugggagg

SEQ ID NO: 38841 - RNA, 19 nt, Homo sapiens
auuuugguacagcagcuca

SEQ ID NO: 38842 - RNA, 25 nt, Homo sapiens
acggagcugucccaacaccaccccu

SEQ ID NO: 38843 - RNA, 21 nt, Homo sapiens
gcuccaaccucagcagacugu

SEQ ID NO: 38844 - RNA, 22 nt, Homo sapiens
gcggucccgcggcgccccgccu

SEQ ID NO: 38845 - RNA, 22 nt, Homo sapiens
uauccacuacaccccgcugccu

SEQ ID NO: 38846 - RNA, 20 nt, Homo sapiens
uacugcuuccacagcucccc

SEQ ID NO: 38847 - RNA, 22 nt, Homo sapiens
cugggggcggcacaggggcuca

SEQ ID NO: 38848 - RNA, 22 nt, Homo sapiens
uccggggacgaacgggacgggu

SEQ ID NO: 38849 - RNA, 25 nt, Homo sapiens
cagcgucugccggaacccguuccca

SEQ ID NO: 38850 - RNA, 22 nt, Homo sapiens
cagaaagugcuucccucuagag

SEQ ID NO: 38851 - RNA, 25 nt, Homo sapiens
agcuagucaagcgcgguuguggggg

SEQ ID NO: 38852 - RNA, 22 nt, Homo sapiens
aagcgguuuaccaucccacaua

SEQ ID NO: 38853 - RNA, 22 nt, Homo sapiens
aaagugcuucuuaccuccagau

SEQ ID NO: 38854 - RNA, 23 nt, Homo sapiens
acagaaagugcuucccucaagag

SEQ ID NO: 38855 - RNA, 21 nt, Homo sapiens
ggacuauagaacuuucccccu

SEQ ID NO: 38856 - RNA, 21 nt, Homo sapiens
acuccaaagggaagcgccuuc

SEQ ID NO: 38857 - RNA, 21 nt, Homo sapiens
ggcugucaauucauaggucag

SEQ ID NO: 38858 - RNA, 22 nt, Homo sapiens
uccacauggaguugcuguuaca

SEQ ID NO: 38859 - RNA, 21 nt, Homo sapiens
acaggccaucuguguuauauu

SEQ ID NO: 38860 - RNA, 22 nt, Homo sapiens
gcugccguauaugugaugucac

SEQ ID NO: 38861 - RNA, 20 nt, Homo sapiens
guguguauacauuuauacau

SEQ ID NO: 38862 - RNA, 23 nt, Homo sapiens
aaucgcgguuuauaccaaaugaa

SEQ ID NO: 38863 - RNA, 21 nt, Homo sapiens
acuagcuuauacauaaaauua

SEQ ID NO: 38864 - RNA, 23 nt, Homo sapiens
acaaggaugaaucuuuguuacug

SEQ ID NO: 38865 - RNA, 21 nt, Homo sapiens
agggcucaucuugguccugca

SEQ ID NO: 38866 - RNA, 22 nt, Homo sapiens
acccuuaucaguucuccgucca

SEQ ID NO: 38867 - RNA, 22 nt, Homo sapiens
ucaggaacugccuuucucucca

SEQ ID NO: 38868 - RNA, 22 nt, Homo sapiens
ucaucucgcccgcaaagaccca

SEQ ID NO: 38869 - RNA, 22 nt, Homo sapiens
ucgcccucucaacccagcuuuu

SEQ ID NO: 38870 - RNA, 22 nt, Homo sapiens
uugcccucucaacccagcuuuu

SEQ ID NO: 38871 - RNA, 20 nt, Homo sapiens
acccucucaacccagcuuuu

SEQ ID NO: 38872 - RNA, 19 nt, Homo sapiens
uccucucaacccagcuuuu

SEQ ID NO: 38873 - RNA, 23 nt, Homo sapiens
aaaucagaaucacaccuggggga

SEQ ID NO: 38874 - RNA, 22 nt, Homo sapiens
agcaaaauccgcaaguacuuuu

SEQ ID NO: 38875 - RNA, 24 nt, Homo sapiens
acgcagagcccgaaagcccccagu

SEQ ID NO: 38876 - RNA, 22 nt, Homo sapiens
caagacacauuuggagagggac

SEQ ID NO: 38877 - RNA, 20 nt, Homo sapiens
aggggccucagccuccuggu

SEQ ID NO: 38878 - RNA, 23 nt, Homo sapiens
cccaacagacauggcgguacuca

SEQ ID NO: 38879 - RNA, 21 nt, Homo sapiens
aaagugucagauacggugugg

SEQ ID NO: 38880 - RNA, 23 nt, Homo sapiens
gcgcccaauuaaugucuguugau

SEQ ID NO: 38881 - RNA, 22 nt, Homo sapiens
ucaguuuccucugcaaacaguu

SEQ ID NO: 38882 - RNA, 23 nt, Homo sapiens
ccuucucagaaaggugaaauuua

SEQ ID NO: 38883 - RNA, 19 nt, Homo sapiens
agaaaccccagcagagaca

SEQ ID NO: 38884 - RNA, 21 nt, Homo sapiens
ccccucccagccucccugcca

SEQ ID NO: 38885 - RNA, 18 nt, Homo sapiens
aucacauucaccucccug

SEQ ID NO: 38886 - RNA, 21 nt, Homo sapiens
acuagacugugagcuccucga

SEQ ID NO: 38887 - RNA, 22 nt, Homo sapiens
cacaaaccauuaugugcugcua

SEQ ID NO: 38888 - RNA, 22 nt, Homo sapiens
uguaaaccaugaugugcugcua

SEQ ID NO: 38889 - RNA, 22 nt, Homo sapiens
cgccaauauuuacgugcugcua

SEQ ID NO: 38890 - RNA, 21 nt, Homo sapiens
gccaauauuucugugcugcua

SEQ ID NO: 38891 - RNA, 22 nt, Homo sapiens
ucaacaucagucugauaagcua

SEQ ID NO: 38892 - RNA, 22 nt, Homo sapiens
acggaagggcagagagggccag

SEQ ID NO: 38893 - RNA, 22 nt, Homo sapiens
uucaaaacaugaauugcugcug

SEQ ID NO: 38894 - RNA, 21 nt, Homo sapiens
acaaaccacagugugcugcug

SEQ ID NO: 38895 - RNA, 18 nt, Homo sapiens
acccucugaaaggaagca

SEQ ID NO: 38896 - RNA, 22 nt, Homo sapiens
aaagugcuucuuaccuccagau

SEQ ID NO: 38897 - RNA, 21 nt, Homo sapiens
aguucucccaacguaaaccca

SEQ ID NO: 38898 - RNA, 21 nt, Homo sapiens
caucaccuuccuucuccucca

SEQ ID NO: 38899 - RNA, 23 nt, Homo sapiens
uggcccugacacgugguacugga

SEQ ID NO: 38900 - RNA, 21 nt, Homo sapiens
ggggagcgggggcccugccuu

SEQ ID NO: 38901 - RNA, 22 nt, Homo sapiens
cacuccuauaauugauccaguu

SEQ ID NO: 38902 - RNA, 18 nt, Homo sapiens
uggcgccugaacagggac

SEQ ID NO: 38903 - RNA, 18 nt, Homo sapiens
aucacauucaccucccug

SEQ ID NO: 38904 - RNA, 22 nt, Homo sapiens
gaaccuaucuccccucuggacc

SEQ ID NO: 38905 - RNA, 22 nt, Homo sapiens
acaaccagcuaagacacugcca

SEQ ID NO: 38906 - RNA, 22 nt, Homo sapiens
cucauauuacaaugagcucauc

SEQ ID NO: 38907 - RNA, 22 nt, Homo sapiens
gcaaaaguaauugcagugugug

SEQ ID NO: 38908 - RNA, 21 nt, Homo sapiens
guccugagagcgcugccuccu

SEQ ID NO: 38909 - RNA, 23 nt, Homo sapiens
uggcccugacacgugguacugga

SEQ ID NO: 38910 - RNA, 20 nt, Homo sapiens
cccugcgccaucuccucuac

SEQ ID NO: 38911 - RNA, 19 nt, Homo sapiens
ccaccucccgaguccucac

SEQ ID NO: 38912 - RNA, 25 nt, Homo sapiens
cagcgucugccggaacccguuccca

SEQ ID NO: 38913 - RNA, 23 nt, Homo sapiens
gggagugaagacacggagccaga

SEQ ID NO: 38914 - RNA, 22 nt, Homo sapiens
agcccaaaaggagaauucuuug

SEQ ID NO: 38915 - RNA, 25 nt, Homo sapiens
agcuagucaagcgcgguuguggggg

SEQ ID NO: 38916 - RNA, 22 nt, Homo sapiens
cacucagcggccguuuccccaa

SEQ ID NO: 38917 - RNA, 23 nt, Homo sapiens
cggcucugucgucgaggcgcuca

SEQ ID NO: 38918 - RNA, 25 nt, Homo sapiens
acggagcugucccaacaccaccccu

SEQ ID NO: 38919 - RNA, 20 nt, Homo sapiens
uacugcuuccacagcucccc

SEQ ID NO: 38920 - RNA, 23 nt, Homo sapiens
cacaaauucggaucuacagggua

SEQ ID NO: 38921 - RNA, 23 nt, Homo sapiens
cacaaauucgguucuacagggua

SEQ ID NO: 38922 - RNA, 22 nt, Homo sapiens
acuccaacagggccgcgucucc

SEQ ID NO: 38923 - RNA, 22 nt, Homo sapiens
agucuucacaacagcccugugu

SEQ ID NO: 38924 - RNA, 23 nt, Homo sapiens
aaaucagaaucacaccuggggga

SEQ ID NO: 38925 - RNA, 21 nt, Homo sapiens
ggacuauagaacuuucccccu

SEQ ID NO: 38926 - RNA, 24 nt, Homo sapiens
acgcagagcccgaaagcccccagu

SEQ ID NO: 38927 - RNA, 20 nt, Homo sapiens
aggggccucagccuccuggu

SEQ ID NO: 38928 - RNA, 21 nt, Homo sapiens
cacaaccucaguguuuccagg

SEQ ID NO: 38929 - RNA, 20 nt, Homo sapiens
uacugcuuccacagcucccc

SEQ ID NO: 38930 - RNA, 22 nt, Homo sapiens
cuggagagacaaggggaagagg

SEQ ID NO: 38931 - RNA, 22 nt, Homo sapiens
ucagaccgagacaagugcaaug

SEQ ID NO: 38932 - RNA, 18 nt, Homo sapiens
acccucugaaaggaagca

SEQ ID NO: 38933 - RNA, 22 nt, Homo sapiens
aaagugcuucuuaccuccagau

SEQ ID NO: 38934 - RNA, 23 nt, Homo sapiens
gucagaccccgagggguccucgc

SEQ ID NO: 38935 - RNA, 22 nt, Homo sapiens
gccaccuucaaaugggaagucu

SEQ ID NO: 38936 - RNA, 20 nt, Homo sapiens
cccugcgccaucuccucuac

SEQ ID NO: 38937 - RNA, 20 nt, Homo sapiens
gcaagacaucacaagacucu

SEQ ID NO: 38938 - RNA, 17 nt, Homo sapiens
gggagaggaggaggcga

SEQ ID NO: 38939 - RNA, 18 nt, Homo sapiens
aucacauucaccucccug

SEQ ID NO: 38940 - RNA, 23 nt, Homo sapiens
aggaacagcagcagcccgggccg

SEQ ID NO: 38941 - RNA, 23 nt, Homo sapiens
aggaacagcagcagcccgggccg

SEQ ID NO: 38942 - RNA, 21 nt, Homo sapiens
gaccaaucgccguccccgccg

SEQ ID NO: 38943 - RNA, 21 nt, Homo sapiens
acaggauugagggggggcccu

SEQ ID NO: 38944 - RNA, 23 nt, Homo sapiens
aaaucagaaucacaccuggggga

SEQ ID NO: 38945 - RNA, 23 nt, Homo sapiens
aaagucucgcucucugccccuca

SEQ ID NO: 38946 - RNA, 22 nt, Homo sapiens
aggaaaccagcaaguguugacg

SEQ ID NO: 38947 - RNA, 22 nt, Homo sapiens
cucagagcagacgugguucuca

SEQ ID NO: 38948 - RNA, 24 nt, Homo sapiens
acgcagagcccgaaagcccccagu

SEQ ID NO: 38949 - RNA, 23 nt, Homo sapiens
ccuagagagggugagaaccugcc

SEQ ID NO: 38950 - RNA, 22 nt, Homo sapiens
ugcuguuagcccuagccccgca

SEQ ID NO: 38951 - RNA, 23 nt, Homo sapiens
cuaccugcacuguaagcacuuuu

SEQ ID NO: 38952 - RNA, 26 nt, Homo sapiens
aaccaucucauacaaaccaacuacuu

SEQ ID NO: 38953 - RNA, 25 nt, Homo sapiens
aagaaagagucuugcuuugucgccc

SEQ ID NO: 38954 - RNA, 22 nt, Homo sapiens
cgaaggcaacacggauaaccua

SEQ ID NO: 38955 - RNA, 22 nt, Homo sapiens
uagucaagugaagcagugggag

SEQ ID NO: 38956 - RNA, 22 nt, Homo sapiens
uaaccaaugugcagacuacugu

SEQ ID NO: 38957 - RNA, 22 nt, Homo sapiens
uaaccaaugugcagacuacugu

SEQ ID NO: 38958 - RNA, 21 nt, Homo sapiens
acccaguagccagauguagcu

SEQ ID NO: 38959 - RNA, 22 nt, Homo sapiens
agccacaaucaccuucugaucu

SEQ ID NO: 38960 - RNA, 22 nt, Homo sapiens
agagaggagagccguguaugac

SEQ ID NO: 38961 - RNA, 22 nt, Homo sapiens
aacuggaugucccuguaugauu

SEQ ID NO: 38962 - RNA, 21 nt, Homo sapiens
aucuuugauuuucaguaguuu

SEQ ID NO: 38963 - RNA, 27 nt, Homo sapiens
uuuagcacagugcuuauacaagaaggu

SEQ ID NO: 38964 - RNA, 23 nt, Homo sapiens
gggagugaagacacggagccaga

SEQ ID NO: 38965 - RNA, 22 nt, Homo sapiens
ucaggaacugccuuucucucca

SEQ ID NO: 38966 - RNA, 23 nt, Homo sapiens
gaacagguagucugaacacuggg

SEQ ID NO: 38967 - RNA, 23 nt, Homo sapiens
gaacagauagucuaaacacuggg

SEQ ID NO: 38968 - RNA, 21 nt, Homo sapiens
aucugcacugucagcacuuua

SEQ ID NO: 38969 - RNA, 23 nt, Homo sapiens
gcuuugacaauaucauugcacug

SEQ ID NO: 38970 - RNA, 23 nt, Homo sapiens
acgggugcgauuucugugugaga

SEQ ID NO: 38971 - RNA, 22 nt, Homo sapiens
acacaccaaggauaauuucucc

SEQ ID NO: 38972 - RNA, 22 nt, Homo sapiens
caagacacauuuggagagggac

SEQ ID NO: 38973 - RNA, 20 nt, Homo sapiens
cccugcgccaucuccucuac

SEQ ID NO: 38974 - RNA, 22 nt, Homo sapiens
cacauggccaaaacagagaaga

SEQ ID NO: 38975 - RNA, 21 nt, Homo sapiens
agcgccuuuggcagcuagagu

SEQ ID NO: 38976 - RNA, 23 nt, Homo sapiens
aaucuacuuucuuugcucauccu

SEQ ID NO: 38977 - RNA, 22 nt, Homo sapiens
aaccacuuucuuugcucauccg

SEQ ID NO: 38978 - RNA, 22 nt, Homo sapiens
agaaaaugccccucaguuuuga

SEQ ID NO: 38979 - RNA, 23 nt, Homo sapiens
cagcugcuuuugggauuccguug

SEQ ID NO: 38980 - RNA, 22 nt, Homo sapiens
acaguucuucaacuggcagcuu

SEQ ID NO: 38981 - RNA, 21 nt, Homo sapiens
ugcaaugcaacuacaaugcac

SEQ ID NO: 38982 - RNA, 22 nt, Homo sapiens
gagguuucccguguauguuuca

SEQ ID NO: 38983 - RNA, 22 nt, Homo sapiens
gcaaaaguaacugcaguuuugg

SEQ ID NO: 38984 - RNA, 21 nt, Homo sapiens
acaauccuagagcacaagaag

SEQ ID NO: 38985 - RNA, 24 nt, Homo sapiens
acgcgcaggccagagacccaggca

SEQ ID NO: 38986 - RNA, 23 nt, Homo sapiens
cuccagccccuccagggcuuccu

SEQ ID NO: 38987 - RNA, 22 nt, Homo sapiens
ugcucaauaaauacccguugaa

SEQ ID NO: 38988 - RNA, 23 nt, Homo sapiens
ucauagcccuguacaaugcugcu

SEQ ID NO: 38989 - RNA, 23 nt, Homo sapiens
ugauagcccuguacaaugcugcu

SEQ ID NO: 38990 - RNA, 21 nt, Homo sapiens
cugaggagagaggaggugggg

SEQ ID NO: 38991 - RNA, 17 nt, Homo sapiens
gggagaggaggaggcga

SEQ ID NO: 38992 - RNA, 22 nt, Homo sapiens
ucagaccgagacaagugcaaug

SEQ ID NO: 38993 - RNA, 23 nt, Homo sapiens
cuacuaaaacauggaagcacuua

SEQ ID NO: 38994 - RNA, 23 nt, Homo sapiens
acacucaaacauggaagcacuua

SEQ ID NO: 38995 - RNA, 22 nt, Homo sapiens
agcugaguguaggauguuuaca

SEQ ID NO: 38996 - RNA, 22 nt, Homo sapiens
uccagcaaagggaagcgcuuuc

SEQ ID NO: 38997 - RNA, 22 nt, Homo sapiens
accucuaaaggggagcgcuuug

SEQ ID NO: 38998 - RNA, 23 nt, Homo sapiens
acacucuaaagagaagcgcuuug

SEQ ID NO: 38999 - RNA, 21 nt, Homo sapiens
gcuccaaagggaagcgcuuug

SEQ ID NO: 39000 - RNA, 21 nt, Homo sapiens
cacucugaagggaagcgcuuu

SEQ ID NO: 39001 - RNA, 21 nt, Homo sapiens
ccucuaaagagaagcgcuuuc

SEQ ID NO: 39002 - RNA, 22 nt, Homo sapiens
uccucuuuucuuagagacucac

SEQ ID NO: 39003 - RNA, 22 nt, Homo sapiens
cacauggccaaaacagagaaga

SEQ ID NO: 39004 - RNA, 24 nt, Homo sapiens
acugcuggucuucagucagggcca

SEQ ID NO: 39005 - RNA, 22 nt, Homo sapiens
cacgaccgacgccacgccgagu

SEQ ID NO: 39006 - RNA, 17 nt, Homo sapiens
uggcgcccgaacaggga

SEQ ID NO: 39007 - RNA, 22 nt, Homo sapiens
acaguucuucaacuggcagcuu

SEQ ID NO: 39008 - RNA, 21 nt, Homo sapiens
ugcaaugcaacuacaaugcac

SEQ ID NO: 39009 - RNA, 22 nt, Homo sapiens
gauagagugcagaccagggucu

SEQ ID NO: 39010 - RNA, 22 nt, Homo sapiens
acaucaucgcauauugacacaa

SEQ ID NO: 39011 - RNA, 22 nt, Homo sapiens
acaguggucaucgagugacaca

SEQ ID NO: 39012 - RNA, 17 nt, Homo sapiens
gggagaggaggaggcga

SEQ ID NO: 39013 - RNA, 21 nt, Homo sapiens
cggggugcacgggcggagggc

SEQ ID NO: 39014 - RNA, 23 nt, Homo sapiens
aggaacagcagcagcccgggccg

SEQ ID NO: 39015 - RNA, 21 nt, Homo sapiens
gaccaaucgccguccccgccg

SEQ ID NO: 39016 - RNA, 22 nt, Homo sapiens
ucagaccgagacaagugcaaug

SEQ ID NO: 39017 - RNA, 23 nt, Homo sapiens
cggcucugucgucgaggcgcuca

SEQ ID NO: 39018 - RNA, 25 nt, Homo sapiens
accaacggaccuacuucccuccgcc

SEQ ID NO: 39019 - RNA, 22 nt, Homo sapiens
gcggucccgcggcgccccgccu

SEQ ID NO: 39020 - RNA, 18 nt, Homo sapiens
aucacauucaccucccug

SEQ ID NO: 39021 - RNA, 22 nt, Homo sapiens
aacccauggaauucaguucuca

SEQ ID NO: 39022 - RNA, 23 nt, Homo sapiens
gggagugaagacacggagccaga

SEQ ID NO: 39023 - RNA, 22 nt, Homo sapiens
aggcauaggaugacaaagggaa

SEQ ID NO: 39024 - RNA, 22 nt, Homo sapiens
aggcgaaggaugacaaagggaa

SEQ ID NO: 39025 - RNA, 22 nt, Homo sapiens
ucacauuugccugcagagauuu

SEQ ID NO: 39026 - RNA, 23 nt, Homo sapiens
gaaacccagcagacaauguagcu

SEQ ID NO: 39027 - RNA, 21 nt, Homo sapiens
gcagaacuuagccacugugaa

SEQ ID NO: 39028 - RNA, 23 nt, Homo sapiens
caugagugacgcccucuggagua

SEQ ID NO: 39029 - RNA, 21 nt, Homo sapiens
aguucucccaacguaaaccca

SEQ ID NO: 39030 - RNA, 21 nt, Homo sapiens
aguucucccaacguaaaccca

SEQ ID NO: 39031 - RNA, 21 nt, Homo sapiens
caucaccuuccuucuccucca

SEQ ID NO: 39032 - RNA, 22 nt, Homo sapiens
cacaaguucggaucuacggguu

SEQ ID NO: 39033 - RNA, 21 nt, Homo sapiens
ccccucccagccucccugcca

SEQ ID NO: 39034 - RNA, 21 nt, Homo sapiens
cagcgaaacaggcaaacggag

SEQ ID NO: 39035 - RNA, 22 nt, Homo sapiens
ggagcccgcgccccgcgccgag

SEQ ID NO: 39036 - RNA, 21 nt, Homo sapiens
gggcaucugggacgcgcagga

SEQ ID NO: 39037 - RNA, 18 nt, Homo sapiens
auucaaucuacugccuca

SEQ ID NO: 39038 - RNA, 23 nt, Homo sapiens
gaaacccagcagacaauguagcu

SEQ ID NO: 39039 - RNA, 22 nt, Homo sapiens
ccuggcacacaguagaccuuca

SEQ ID NO: 39040 - RNA, 19 nt, Homo sapiens
guugggaucacaggcgccc

SEQ ID NO: 39041 - RNA, 21 nt, Homo sapiens
guccugagagcgcugccuccu

SEQ ID NO: 39042 - RNA, 22 nt, Homo sapiens
ucaguggcucagguucguugca

SEQ ID NO: 39043 - RNA, 20 nt, Homo sapiens
uacugcuuccacagcucccc

SEQ ID NO: 39044 - RNA, 21 nt, Homo sapiens
ggggagcgggggcccugccuu

SEQ ID NO: 39045 - RNA, 22 nt, Homo sapiens
cacaagaucggaucuacggguu

SEQ ID NO: 39046 - RNA, 22 nt, Homo sapiens
cgcaaggucgguucuacgggug

SEQ ID NO: 39047 - RNA, 18 nt, Homo sapiens
aucacauucaccucccug

SEQ ID NO: 39048 - RNA, 18 nt, Homo sapiens
aucacauucaccucccug

SEQ ID NO: 39049 - RNA, 23 nt, Homo sapiens
gggagugaagacacggagccaga

SEQ ID NO: 39050 - RNA, 22 nt, Homo sapiens
ucaggaacugccuuucucucca

SEQ ID NO: 39051 - RNA, 22 nt, Homo sapiens
acugccugucugugccugcugu

SEQ ID NO: 39052 - RNA, 22 nt, Homo sapiens
agcugaguguaggauguuuaca

SEQ ID NO: 39053 - RNA, 22 nt, Homo sapiens
accagguuccaccccagcaggc

SEQ ID NO: 39054 - RNA, 22 nt, Homo sapiens
cugggggcggcacaggggcuca

SEQ ID NO: 39055 - RNA, 20 nt, Homo sapiens
cuggggaaaaggguggcacg

SEQ ID NO: 39056 - RNA, 22 nt, Homo sapiens
cucaauagacugugagcuccuu

SEQ ID NO: 39057 - RNA, 22 nt, Homo sapiens
ccucauggaaggguuccccacu

SEQ ID NO: 39058 - RNA, 23 nt, Homo sapiens
cccagcuagauuguaagcuccuu

SEQ ID NO: 39059 - RNA, 21 nt, Homo sapiens
caucaccuuccuucuccucca

SEQ ID NO: 39060 - RNA, 22 nt, Homo sapiens
caaacaccauugucacacucca

SEQ ID NO: 39061 - RNA, 17 nt, Homo sapiens
gacagccucucccccac

SEQ ID NO: 39062 - RNA, 22 nt, Homo sapiens
agacaacaaugccaaccucaca

SEQ ID NO: 39063 - RNA, 22 nt, Homo sapiens
ucccucacacagaauuccagaa

SEQ ID NO: 39064 - RNA, 21 nt, Homo sapiens
acaggauugagggggggcccu

SEQ ID NO: 39065 - RNA, 22 nt, Homo sapiens
caacaaaaucacugaugcugga

SEQ ID NO: 39066 - RNA, 23 nt, Homo sapiens
aaaucagaaucacaccuggggga

SEQ ID NO: 39067 - RNA, 23 nt, Homo sapiens
acacucuaaagagaagcgcuuug

SEQ ID NO: 39068 - RNA, 21 nt, Homo sapiens
agaaaguacuucccucuggag

SEQ ID NO: 39069 - RNA, 21 nt, Homo sapiens
agaaagugcaucccucuggag

SEQ ID NO: 39070 - RNA, 21 nt, Homo sapiens
acugaucuagagaacacaaga

SEQ ID NO: 39071 - RNA, 20 nt, Homo sapiens
guuugauaaacugacacaac

SEQ ID NO: 39072 - RNA, 21 nt, Homo sapiens
ggacuauagaacuuucccccu

SEQ ID NO: 39073 - RNA, 24 nt, Homo sapiens
acgcagagcccgaaagcccccagu

SEQ ID NO: 39074 - RNA, 24 nt, Homo sapiens
gaggugacucuauccuaugucuuu

SEQ ID NO: 39075 - RNA, 23 nt, Homo sapiens
cuccagccccuccagggcuuccu

SEQ ID NO: 39076 - RNA, 20 nt, Homo sapiens
uccccacagacccagagccg

SEQ ID NO: 39077 - RNA, 21 nt, Homo sapiens
acuccaaagggaagcgccuuc

SEQ ID NO: 39078 - RNA, 22 nt, Homo sapiens
aggucucacuuuguugcccaga

SEQ ID NO: 39079 - RNA, 24 nt, Homo sapiens
acugcuggucuucagucagggcca

SEQ ID NO: 39080 - RNA, 22 nt, Homo sapiens
gcacaaaucuccagaccaccca

SEQ ID NO: 39081 - RNA, 22 nt, Homo sapiens
uucacacugcaugcucugggua

SEQ ID NO: 39082 - RNA, 20 nt, Homo sapiens
cccgccgcgucgcccugggg

SEQ ID NO: 39083 - RNA, 22 nt, Homo sapiens
gaaccuaucuccccucuggacc

SEQ ID NO: 39084 - RNA, 21 nt, Homo sapiens
aagugucagacacgguggugg

SEQ ID NO: 39085 - RNA, 24 nt, Homo sapiens
acucacaccuagguuccaaggauu

SEQ ID NO: 39086 - RNA, 21 nt, Homo sapiens
ccuucugacuccaaguccagu

SEQ ID NO: 39087 - RNA, 22 nt, Homo sapiens
gccuucugacccuaaguccagu

SEQ ID NO: 39088 - RNA, 21 nt, Homo sapiens
gaccaagaaauagccuuucaa

SEQ ID NO: 39089 - RNA, 25 nt, Homo sapiens
aaggagcucagaagcccugcccagc

SEQ ID NO: 39090 - RNA, 24 nt, Homo sapiens
acgcgcaggccagagacccaggca

SEQ ID NO: 39091 - RNA, 22 nt, Homo sapiens
ccucaggcacggccgggccacc

SEQ ID NO: 39092 - RNA, 22 nt, Homo sapiens
cugggggcggcacaggggcuca

SEQ ID NO: 39093 - RNA, 22 nt, Homo sapiens
caaacaccauugucacacucca

SEQ ID NO: 39094 - RNA, 22 nt, Homo sapiens
ucaggaacugccuuucucucca

SEQ ID NO: 39095 - RNA, 21 nt, Homo sapiens
gaccaaucgccguccccgccg

SEQ ID NO: 39096 - RNA, 22 nt, Homo sapiens
cagaagugggccgggcacaggg

SEQ ID NO: 39097 - RNA, 22 nt, Homo sapiens
acugggacuuuguaggccaguu

SEQ ID NO: 39098 - RNA, 22 nt, Homo sapiens
agcgggacuuugagggccaguu

SEQ ID NO: 39099 - RNA, 22 nt, Homo sapiens
accagcuaacaauacacugcca

SEQ ID NO: 39100 - RNA, 22 nt, Homo sapiens
agccacaaucaccuucugaucu

SEQ ID NO: 39101 - RNA, 23 nt, Homo sapiens
ucaccaaaacauggaagcacuua

SEQ ID NO: 39102 - RNA, 22 nt, Homo sapiens
acggaagggcagagagggccag

SEQ ID NO: 39103 - RNA, 22 nt, Homo sapiens
aguccagauucugugcccacca

SEQ ID NO: 39104 - RNA, 19 nt, Homo sapiens
auuuugguacagcagcuca

SEQ ID NO: 39105 - RNA, 22 nt, Homo sapiens
gguucaguuguucaaccaguua

SEQ ID NO: 39106 - RNA, 25 nt, Homo sapiens
acggagcugucccaacaccaccccu

SEQ ID NO: 39107 - RNA, 22 nt, Homo sapiens
gcacauguucugcggcccacca

SEQ ID NO: 39108 - RNA, 22 nt, Homo sapiens
gcggucccgcggcgccccgccu

SEQ ID NO: 39109 - RNA, 22 nt, Homo sapiens
ugcuguuagcccuagccccgca

SEQ ID NO: 39110 - RNA, 20 nt, Homo sapiens
uccccacagacccagagccg

SEQ ID NO: 39111 - RNA, 21 nt, Homo sapiens
uuuagcauaaguaugucccaa

SEQ ID NO: 39112 - RNA, 22 nt, Homo sapiens
ucaggaacugccuuucucucca

SEQ ID NO: 39113 - RNA, 23 nt, Homo sapiens
aagaaucuugucccgcagguccu

SEQ ID NO: 39114 - RNA, 22 nt, Homo sapiens
gccaccuucaaaugggaagucu

SEQ ID NO: 39115 - RNA, 23 nt, Homo sapiens
cacaaauucgguucuacagggua

SEQ ID NO: 39116 - RNA, 21 nt, Homo sapiens
uggggauuacacuucaacagg

SEQ ID NO: 39117 - RNA, 23 nt, Homo sapiens
cuacgcguauucuuaagcaauaa

SEQ ID NO: 39118 - RNA, 27 nt, Homo sapiens
auugcguucgaagugucgaugaucaau

SEQ ID NO: 39119 - RNA, 23 nt, Homo sapiens
gcgcccaauuaaugucuguugau

SEQ ID NO: 39120 - RNA, 22 nt, Homo sapiens
acaccgaggagcccaucaugau

SEQ ID NO: 39121 - RNA, 21 nt, Homo sapiens
ucgacugccacucuuacuaga

SEQ ID NO: 39122 - RNA, 21 nt, Homo sapiens
acaaugguuguccgauauuaa

SEQ ID NO: 39123 - RNA, 20 nt, Homo sapiens
cuggggaaaaggguggcacg

SEQ ID NO: 39124 - RNA, 22 nt, Homo sapiens
agagcaagaccccgucucuaaa

SEQ ID NO: 39125 - RNA, 22 nt, Homo sapiens
acccuuaucaguucuccgucca

SEQ ID NO: 39126 - RNA, 20 nt, Homo sapiens
cccgccgcgucgcccugggg

SEQ ID NO: 39127 - RNA, 22 nt, Homo sapiens
gaaccuaucuccccucuggacc

SEQ ID NO: 39128 - RNA, 22 nt, Homo sapiens
uaaccaaugugcagacuacugu

SEQ ID NO: 39129 - RNA, 22 nt, Homo sapiens
uaaccaaugugcagacuacugu

SEQ ID NO: 39130 - RNA, 21 nt, Homo sapiens
acccaguagccagauguagcu

SEQ ID NO: 39131 - RNA, 24 nt, Homo sapiens
cagaaagugcuuucuuuuggagaa

SEQ ID NO: 39132 - RNA, 22 nt, Homo sapiens
aacacucuaaaaggaggcacuu

SEQ ID NO: 39133 - RNA, 22 nt, Homo sapiens
gcaaaaguaauugccaguuuug

SEQ ID NO: 39134 - RNA, 22 nt, Homo sapiens
ugcaaaaguagucucaguuuuu

SEQ ID NO: 39135 - RNA, 19 nt, Homo sapiens
aaaaguaauuacaguuuuu

SEQ ID NO: 39136 - RNA, 20 nt, Homo sapiens
ugggccaccgccgagcggac

SEQ ID NO: 39137 - RNA, 17 nt, Homo sapiens
ggguggcagcgguggga

SEQ ID NO: 39138 - RNA, 17 nt, Homo sapiens
gggagaggaggaggcga

SEQ ID NO: 39139 - RNA, 18 nt, Homo sapiens
aucacauucaccucccug

SEQ ID NO: 39140 - RNA, 22 nt, Homo sapiens
agaaaaugccccucaguuuuga

SEQ ID NO: 39141 - RNA, 23 nt, Homo sapiens
gggagugaagacacggagccaga

SEQ ID NO: 39142 - RNA, 22 nt, Homo sapiens
cacugguacaaggguugggaga

SEQ ID NO: 39143 - RNA, 22 nt, Homo sapiens
ucaggaacugccuuucucucca

SEQ ID NO: 39144 - RNA, 22 nt, Homo sapiens
ucagaccgagacaagugcaaug

SEQ ID NO: 39145 - RNA, 22 nt, Homo sapiens
ccucauggaaggguuccccacu

SEQ ID NO: 39146 - RNA, 22 nt, Homo sapiens
gcaaaaguaacugcaguuuugg

SEQ ID NO: 39147 - RNA, 22 nt, Homo sapiens
caagacacauuuggagagggac

SEQ ID NO: 39148 - RNA, 21 nt, Homo sapiens
caucaccuuccuucuccucca

SEQ ID NO: 39149 - RNA, 20 nt, Homo sapiens
uacugcuuccacagcucccc

SEQ ID NO: 39150 - RNA, 21 nt, Homo sapiens
cuagggaagaacagugagcaa

SEQ ID NO: 39151 - RNA, 22 nt, Homo sapiens
cuggagagacaaggggaagagg

SEQ ID NO: 39152 - RNA, 22 nt, Homo sapiens
aggucucacuuuguugcccaga

SEQ ID NO: 39153 - RNA, 20 nt, Homo sapiens
uaugaacaauuucuaggaau

SEQ ID NO: 39154 - RNA, 20 nt, Homo sapiens
cccugcgccaucuccucuac

SEQ ID NO: 39155 - RNA, 21 nt, Homo sapiens
cggggugcacgggcggagggc

SEQ ID NO: 39156 - RNA, 23 nt, Homo sapiens
gggagugaagacacggagccaga

SEQ ID NO: 39157 - RNA, 22 nt, Homo sapiens
cagaaagugcuucccucuagag

SEQ ID NO: 39158 - RNA, 22 nt, Homo sapiens
ucaggaacugccuuucucucca

SEQ ID NO: 39159 - RNA, 22 nt, Homo sapiens
agcugaguguaggauguuuaca

SEQ ID NO: 39160 - RNA, 23 nt, Homo sapiens
aaagucucgcucucugccccuca

SEQ ID NO: 39161 - RNA, 19 nt, Homo sapiens
auuuugguacagcagcuca

SEQ ID NO: 39162 - RNA, 25 nt, Homo sapiens
accaacggaccuacuucccuccgcc

SEQ ID NO: 39163 - RNA, 23 nt, Homo sapiens
cacugugggcccucuccgcacca

SEQ ID NO: 39164 - RNA, 23 nt, Homo sapiens
gucacaucccucccaagacccuc

SEQ ID NO: 39165 - RNA, 21 nt, Homo sapiens
aaagagaccgguucacuguga

SEQ ID NO: 39166 - RNA, 21 nt, Homo sapiens
ccgugguucuacccuguggua

SEQ ID NO: 39167 - RNA, 22 nt, Homo sapiens
uccacauggaguugcuguuaca

SEQ ID NO: 39168 - RNA, 22 nt, Homo sapiens
agccacaaucaccuucugaucu

SEQ ID NO: 39169 - RNA, 21 nt, Homo sapiens
agcuaugccagcaucuugccu

SEQ ID NO: 39170 - RNA, 21 nt, Homo sapiens
aagacgggaggagaggaguga

SEQ ID NO: 39171 - RNA, 21 nt, Homo sapiens
gaccaagaaauagccuuucaa

SEQ ID NO: 39172 - RNA, 21 nt, Homo sapiens
acaaaccacagugugcugcug

SEQ ID NO: 39173 - RNA, 18 nt, Homo sapiens
acccucugaaaggaagca

SEQ ID NO: 39174 - RNA, 22 nt, Homo sapiens
aaagugcuucuuaccuccagau

SEQ ID NO: 39175 - RNA, 21 nt, Homo sapiens
caguagagauuguuucaacac

SEQ ID NO: 39176 - RNA, 21 nt, Homo sapiens
cuacgcagaaaggacacagug

SEQ ID NO: 39177 - RNA, 22 nt, Homo sapiens
cacaaaccauuaugugcugcua

SEQ ID NO: 39178 - RNA, 22 nt, Homo sapiens
uguaaaccaugaugugcugcua

SEQ ID NO: 39179 - RNA, 22 nt, Homo sapiens
cgccaauauuuacgugcugcua

SEQ ID NO: 39180 - RNA, 21 nt, Homo sapiens
gccaauauuucugugcugcua

SEQ ID NO: 39181 - RNA, 22 nt, Homo sapiens
acggaagggcagagagggccag

SEQ ID NO: 39182 - RNA, 21 nt, Homo sapiens
uucuaggauaggcccaggggc

SEQ ID NO: 39183 - RNA, 22 nt, Homo sapiens
uucaaaacaugaauugcugcug

SEQ ID NO: 39184 - RNA, 21 nt, Homo sapiens
acaaaccacagugugcugcug

SEQ ID NO: 39185 - RNA, 19 nt, Homo sapiens
gccugcugacaccgugccu

SEQ ID NO: 39186 - RNA, 19 nt, Homo sapiens
gccucagaggcagcugcuu

SEQ ID NO: 39187 - RNA, 22 nt, Homo sapiens
ccucaggcacggccgggccacc

SEQ ID NO: 39188 - RNA, 20 nt, Homo sapiens
uacugcuuccacagcucccc

SEQ ID NO: 39189 - RNA, 17 nt, Homo sapiens
gggagaggaggaggcga

SEQ ID NO: 39190 - RNA, 18 nt, Homo sapiens
aucacauucaccucccug

SEQ ID NO: 39191 - RNA, 21 nt, Homo sapiens
acuagacugugagcuccucga

SEQ ID NO: 39192 - RNA, 21 nt, Homo sapiens
gaccaaucgccguccccgccg

SEQ ID NO: 39193 - RNA, 21 nt, Homo sapiens
acaggauugagggggggcccu

SEQ ID NO: 39194 - RNA, 23 nt, Homo sapiens
ccaccuggcaagaacaggcguuc

SEQ ID NO: 39195 - RNA, 22 nt, Homo sapiens
gcggucccgcggcgccccgccu

SEQ ID NO: 39196 - RNA, 21 nt, Homo sapiens
caucaccuuccuucuccucca

SEQ ID NO: 39197 - RNA, 21 nt, Homo sapiens
ccccucccagccucccugcca

SEQ ID NO: 39198 - RNA, 22 nt, Homo sapiens
cugggggcggcacaggggcuca

SEQ ID NO: 39199 - RNA, 23 nt, Homo sapiens
cuaucugcacuagaugcaccuua

SEQ ID NO: 39200 - RNA, 22 nt, Homo sapiens
cggugagcacccggccccugcg

SEQ ID NO: 39201 - RNA, 22 nt, Homo sapiens
uggcagcagcggagggggcaga

SEQ ID NO: 39202 - RNA, 21 nt, Homo sapiens
ggaaaucccuggcaaugugau

SEQ ID NO: 39203 - RNA, 21 nt, Homo sapiens
gguaaucccuggcaaugugau

SEQ ID NO: 39204 - RNA, 20 nt, Homo sapiens
ccagcagcaccuggggcagu

SEQ ID NO: 39205 - RNA, 21 nt, Homo sapiens
auccuguacugagcugccccg

SEQ ID NO: 39206 - RNA, 22 nt, Homo sapiens
acuucaaggaucuuaaacuuug

SEQ ID NO: 39207 - RNA, 22 nt, Homo sapiens
aagagggagacccaggcucgga

SEQ ID NO: 39208 - RNA, 22 nt, Homo sapiens
ugcuguuagcccuagccccgca

SEQ ID NO: 39209 - RNA, 23 nt, Homo sapiens
cuaccugcacuguaagcacuuuu

SEQ ID NO: 39210 - RNA, 21 nt, Homo sapiens
aucugcacugucagcacuuua

SEQ ID NO: 39211 - RNA, 21 nt, Homo sapiens
cugggggacggagcagaagga

SEQ ID NO: 39212 - RNA, 26 nt, Homo sapiens
uuucagaauuugcugccaucaucauc

SEQ ID NO: 39213 - RNA, 23 nt, Homo sapiens
cuaccugcacuguaagcacuuug

SEQ ID NO: 39214 - RNA, 23 nt, Homo sapiens
cuaccugcacuauaagcacuuua

SEQ ID NO: 39215 - RNA, 23 nt, Homo sapiens
cuaccugcacuaugagcacuuug

SEQ ID NO: 39216 - RNA, 21 nt, Homo sapiens
acguggauuuuccucuaugau

SEQ ID NO: 39217 - RNA, 22 nt, Homo sapiens
aacauggauuuuccucuaugau

SEQ ID NO: 39218 - RNA, 23 nt, Homo sapiens
gaaagugcccucaaggcugagug

SEQ ID NO: 39219 - RNA, 22 nt, Homo sapiens
acacucuaaaaggaugcacuuu

SEQ ID NO: 39220 - RNA, 22 nt, Homo sapiens
aaccucuaaaaggaugcacuuu

SEQ ID NO: 39221 - RNA, 22 nt, Homo sapiens
auccucuaaaaagaugcacuuu

SEQ ID NO: 39222 - RNA, 22 nt, Homo sapiens
cacucuaaagggaggcacuuug

SEQ ID NO: 39223 - RNA, 23 nt, Homo sapiens
acagaaagugcuucccucaagag

SEQ ID NO: 39224 - RNA, 21 nt, Homo sapiens
caaaaaccacaaauaccuuug

SEQ ID NO: 39225 - RNA, 23 nt, Homo sapiens
cuaccugcacgaacagcacuuug

SEQ ID NO: 39226 - RNA, 22 nt, Homo sapiens
ggcucccaagaaccucaccugu

SEQ ID NO: 39227 - RNA, 22 nt, Homo sapiens
aggucucacuuuguugcccaga

SEQ ID NO: 39228 - RNA, 23 nt, Homo sapiens
cagcugcuuuugggauuccguug

SEQ ID NO: 39229 - RNA, 21 nt, Homo sapiens
gcggaacuuagccacugugaa

SEQ ID NO: 39230 - RNA, 21 nt, Homo sapiens
acaggauugagggggggcccu

SEQ ID NO: 39231 - RNA, 22 nt, Homo sapiens
cacuuagcagguuguauuauau

SEQ ID NO: 39232 - RNA, 22 nt, Homo sapiens
aguccagauucugugcccacca

SEQ ID NO: 39233 - RNA, 22 nt, Homo sapiens
acaguggucaucgagugacaca

SEQ ID NO: 39234 - RNA, 25 nt, Homo sapiens
aaggagcucagaagcccugcccagc

SEQ ID NO: 39235 - RNA, 22 nt, Homo sapiens
gcacauguucugcggcccacca

SEQ ID NO: 39236 - RNA, 21 nt, Homo sapiens
cggcucggguggcggcgacgg

SEQ ID NO: 39237 - RNA, 23 nt, Homo sapiens
cccaacagacauggcgguacuca

SEQ ID NO: 39238 - RNA, 22 nt, Homo sapiens
uucacacugcaugcucugggua

SEQ ID NO: 39239 - RNA, 22 nt, Homo sapiens
acugccugucugugccugcugu

SEQ ID NO: 39240 - RNA, 21 nt, Homo sapiens
gcggaacuuagccacugugaa

SEQ ID NO: 39241 - RNA, 21 nt, Homo sapiens
gcagaacuuagccacugugaa

SEQ ID NO: 39242 - RNA, 22 nt, Homo sapiens
cuuccagucgaggauguuuaca

SEQ ID NO: 39243 - RNA, 22 nt, Homo sapiens
agcugaguguaggauguuuaca

SEQ ID NO: 39244 - RNA, 23 nt, Homo sapiens
gcugagaguguaggauguuuaca

SEQ ID NO: 39245 - RNA, 22 nt, Homo sapiens
cuuccagucggggauguuuaca

SEQ ID NO: 39246 - RNA, 22 nt, Homo sapiens
cuuccagucaaggauguuuaca

SEQ ID NO: 39247 - RNA, 22 nt, Homo sapiens
accagguuccaccccagcaggc

SEQ ID NO: 39248 - RNA, 25 nt, Homo sapiens
acggagcugucccaacaccaccccu

SEQ ID NO: 39249 - RNA, 17 nt, Homo sapiens
uggaggccccagcgaga

SEQ ID NO: 39250 - RNA, 20 nt, Homo sapiens
uacugcuuccacagcucccc

SEQ ID NO: 39251 - RNA, 23 nt, Homo sapiens
ucacauaggaauaaaaagccaua

SEQ ID NO: 39252 - RNA, 23 nt, Homo sapiens
ucacauaggaaugaaaagccaua

SEQ ID NO: 39253 - RNA, 22 nt, Homo sapiens
acaacuguaacuagacgguuuu

SEQ ID NO: 39254 - RNA, 24 nt, Homo sapiens
agugugaguucuaccauugccaaa

SEQ ID NO: 39255 - RNA, 20 nt, Homo sapiens
cugcgggaggacagggcuca

SEQ ID NO: 39256 - RNA, 20 nt, Homo sapiens
ggcauucaccgcgugccuua

SEQ ID NO: 39257 - RNA, 23 nt, Homo sapiens
aaaaugcagauuccuggacucca

SEQ ID NO: 39258 - RNA, 21 nt, Homo sapiens
auguaggccuuuagaucacuu

SEQ ID NO: 39259 - RNA, 18 nt, Homo sapiens
auucaaucuacugccuca

SEQ ID NO: 39260 - RNA, 20 nt, Homo sapiens
uucccaugcccuauaccucu

SEQ ID NO: 39261 - RNA, 21 nt, Homo sapiens
ucuacucagaagggugccuua

SEQ ID NO: 39262 - RNA, 22 nt, Homo sapiens
acacucuaaagggaugcacgau

SEQ ID NO: 39263 - RNA, 22 nt, Homo sapiens
acacucuaaaaggaugcacgau

SEQ ID NO: 39264 - RNA, 25 nt, Homo sapiens
accaacggaccuacuucccuccgcc

SEQ ID NO: 39265 - RNA, 22 nt, Homo sapiens
caccugauaaaacugagguaua

SEQ ID NO: 39266 - RNA, 22 nt, Homo sapiens
uauccacuacaccccgcugccu

SEQ ID NO: 39267 - RNA, 24 nt, Homo sapiens
ucagagcauguguuuaaucaggcu

SEQ ID NO: 39268 - RNA, 21 nt, Homo sapiens
gagcugcauccuggcuccggg

SEQ ID NO: 39269 - RNA, 17 nt, Homo sapiens
uggcgcccgaacaggga

SEQ ID NO: 39270 - RNA, 22 nt, Homo sapiens
ccagaacugaguccacagggca

SEQ ID NO: 39271 - RNA, 21 nt, Homo sapiens
ugcaaacccugcaugugggag

SEQ ID NO: 39272 - RNA, 21 nt, Homo sapiens
aucugcacugucagcacuuua

SEQ ID NO: 39273 - RNA, 23 nt, Homo sapiens
gcuuugacaauaucauugcacug

SEQ ID NO: 39274 - RNA, 19 nt, Homo sapiens
accagugcccugcacacuu

SEQ ID NO: 39275 - RNA, 22 nt, Homo sapiens
cuggagagacaaggggaagagg

SEQ ID NO: 39276 - RNA, 18 nt, Homo sapiens
aucacauucaccucccug

SEQ ID NO: 39277 - RNA, 20 nt, Homo sapiens
cccgccgcgucgcccugggg

SEQ ID NO: 39278 - RNA, 22 nt, Homo sapiens
ucagccgcugucacacgcacag

SEQ ID NO: 39279 - RNA, 22 nt, Homo sapiens
cuguuccugcugaacugagcca

SEQ ID NO: 39280 - RNA, 22 nt, Homo sapiens
aucgggaggggacugagccuga

SEQ ID NO: 39281 - RNA, 22 nt, Homo sapiens
gaauucaucacggccagccucu

SEQ ID NO: 39282 - RNA, 22 nt, Homo sapiens
caagacacauuuggagagggac

SEQ ID NO: 39283 - RNA, 20 nt, Homo sapiens
cccugcgccaucuccucuac

SEQ ID NO: 39284 - RNA, 22 nt, Homo sapiens
gggagaggucucccugcgcaca

SEQ ID NO: 39285 - RNA, 22 nt, Homo sapiens
gggagaggucucccugcgcaca

SEQ ID NO: 39286 - RNA, 21 nt, Homo sapiens
aucugcacugucagcacuuua

SEQ ID NO: 39287 - RNA, 18 nt, Homo sapiens
ugguggcagaggugggau

SEQ ID NO: 39288 - RNA, 17 nt, Homo sapiens
ggguggcagcgguggga

SEQ ID NO: 39289 - RNA, 20 nt, Homo sapiens
uacugcuuccacagcucccc

SEQ ID NO: 39290 - RNA, 23 nt, Homo sapiens
aggaacagcagcagcccgggccg

SEQ ID NO: 39291 - RNA, 21 nt, Homo sapiens
gggcaucugggacgcgcagga

SEQ ID NO: 39292 - RNA, 18 nt, Homo sapiens
ggagaggagggcacugga

SEQ ID NO: 39293 - RNA, 24 nt, Homo sapiens
ugggagaaccucccugcuucugcu

SEQ ID NO: 39294 - RNA, 21 nt, Homo sapiens
aucugcacugucagcacuuua

SEQ ID NO: 39295 - RNA, 23 nt, Homo sapiens
gcuuugacaauaucauugcacug

SEQ ID NO: 39296 - RNA, 21 nt, Homo sapiens
acuccaaagggaagcgccuuc

SEQ ID NO: 39297 - RNA, 22 nt, Homo sapiens
cgcucuaaagggaagcgccuuc

SEQ ID NO: 39298 - RNA, 22 nt, Homo sapiens
ugcaagccuugggugugggagg

SEQ ID NO: 39299 - RNA, 22 nt, Homo sapiens
aguccagauucugugcccacca

SEQ ID NO: 39300 - RNA, 19 nt, Homo sapiens
guccugaauuccgcagccu

SEQ ID NO: 39301 - RNA, 22 nt, Homo sapiens
gcacauguucugcggcccacca

SEQ ID NO: 39302 - RNA, 22 nt, Homo sapiens
gggagaggucucccugcgcaca

SEQ ID NO: 39303 - RNA, 23 nt, Homo sapiens
gcacaugugcacacagccgggug

SEQ ID NO: 39304 - RNA, 21 nt, Homo sapiens
cucccccacugcagcuggcac

SEQ ID NO: 39305 - RNA, 21 nt, Homo sapiens
cugaggagagaggaggugggg

SEQ ID NO: 39306 - RNA, 22 nt, Homo sapiens
agcuagugagaagucaaugccu

SEQ ID NO: 39307 - RNA, 22 nt, Homo sapiens
agcuagugagaagucaaugccu

SEQ ID NO: 39308 - RNA, 21 nt, Homo sapiens
ucaaucacagauagcaccccu

SEQ ID NO: 39309 - RNA, 23 nt, Homo sapiens
aaaucagaaucacaccuggggga

SEQ ID NO: 39310 - RNA, 22 nt, Homo sapiens
auaaggauuuuuaggggcauua

SEQ ID NO: 39311 - RNA, 22 nt, Homo sapiens
uauggaugcaaaaugaucccaa

SEQ ID NO: 39312 - RNA, 22 nt, Homo sapiens
uuucaguuaucaaucugucaca

SEQ ID NO: 39313 - RNA, 21 nt, Homo sapiens
caaaaaccacaaauaccuuug

SEQ ID NO: 39314 - RNA, 24 nt, Homo sapiens
acgcagagcccgaaagcccccagu

SEQ ID NO: 39315 - RNA, 24 nt, Homo sapiens
acgcgcaggccagagacccaggca

SEQ ID NO: 39316 - RNA, 20 nt, Homo sapiens
aggggccucagccuccuggu

SEQ ID NO: 39317 - RNA, 22 nt, Homo sapiens
gguuaguggaccaggucacaaa

SEQ ID NO: 39318 - RNA, 23 nt, Homo sapiens
aaccaagaccccggagaucccag

SEQ ID NO: 39319 - RNA, 20 nt, Homo sapiens
uacugcuuccacagcucccc

SEQ ID NO: 39320 - RNA, 20 nt, Homo sapiens
cuggggaaaaggguggcacg

SEQ ID NO: 39321 - RNA, 22 nt, Homo sapiens
augcccuuuuaacauugcacug

SEQ ID NO: 39322 - RNA, 18 nt, Homo sapiens
aucacauucaccucccug

SEQ ID NO: 39323 - RNA, 22 nt, Homo sapiens
ccccucuggucaaccagucaca

SEQ ID NO: 39324 - RNA, 23 nt, Homo sapiens
acucaccgacagcguugaauguu

SEQ ID NO: 39325 - RNA, 23 nt, Homo sapiens
acccaccgacagcaaugaauguu

SEQ ID NO: 39326 - RNA, 22 nt, Homo sapiens
acucaccgacagguugaauguu

SEQ ID NO: 39327 - RNA, 23 nt, Homo sapiens
acccaccgacaacaaugaauguu

SEQ ID NO: 39328 - RNA, 22 nt, Homo sapiens
ugagccacugugccuggccuga

SEQ ID NO: 39329 - RNA, 21 nt, Homo sapiens
ggaaaucccuggcaaugugau

SEQ ID NO: 39330 - RNA, 21 nt, Homo sapiens
gguaaucccuggcaaugugau

SEQ ID NO: 39331 - RNA, 22 nt, Homo sapiens
aagcgguuuaccaucccacaua

SEQ ID NO: 39332 - RNA, 23 nt, Homo sapiens
acccaacagccccugcaagggau

SEQ ID NO: 39333 - RNA, 21 nt, Homo sapiens
cuggaggacggcaacagucag

SEQ ID NO: 39334 - RNA, 22 nt, Homo sapiens
agcugaguguaggauguuuaca

SEQ ID NO: 39335 - RNA, 22 nt, Homo sapiens
aaucagucucauugcuuuauaa

SEQ ID NO: 39336 - RNA, 21 nt, Homo sapiens
ugcaugacggccugcaagaca

SEQ ID NO: 39337 - RNA, 23 nt, Homo sapiens
ucucgugacaugaugauccccga

SEQ ID NO: 39338 - RNA, 22 nt, Homo sapiens
aaagacguggagaaauuagaau

SEQ ID NO: 39339 - RNA, 21 nt, Homo sapiens
guucuaacccauuguggccaa

SEQ ID NO: 39340 - RNA, 23 nt, Homo sapiens
cacaaauucgguucuacagggua

SEQ ID NO: 39341 - RNA, 22 nt, Homo sapiens
aggucucacuuuguugcccaga

SEQ ID NO: 39342 - RNA, 18 nt, Homo sapiens
aucacauucaccucccug

SEQ ID NO: 39343 - RNA, 23 nt, Homo sapiens
gggagugaagacacggagccaga

SEQ ID NO: 39344 - RNA, 22 nt, Homo sapiens
ucaggaacugccuuucucucca

SEQ ID NO: 39345 - RNA, 22 nt, Homo sapiens
ucaggaacugccuuucucucca

SEQ ID NO: 39346 - RNA, 22 nt, Homo sapiens
uggcagcagcggagggggcaga

SEQ ID NO: 39347 - RNA, 20 nt, Homo sapiens
cccgccgcgucgcccugggg

SEQ ID NO: 39348 - RNA, 20 nt, Homo sapiens
ccagcagcaccuggggcagu

SEQ ID NO: 39349 - RNA, 21 nt, Homo sapiens
uucuaggauaggcccaggggc

SEQ ID NO: 39350 - RNA, 21 nt, Homo sapiens
auccuguacugagcugccccg

SEQ ID NO: 39351 - RNA, 25 nt, Homo sapiens
aaggagcucagaagcccugcccagc

SEQ ID NO: 39352 - RNA, 21 nt, Homo sapiens
ggacuauagaacuuucccccu

SEQ ID NO: 39353 - RNA, 24 nt, Homo sapiens
acgcgcaggccagagacccaggca

SEQ ID NO: 39354 - RNA, 22 nt, Homo sapiens
gcugaggcuguggggcuggagu

SEQ ID NO: 39355 - RNA, 20 nt, Homo sapiens
uacugcuuccacagcucccc

SEQ ID NO: 39356 - RNA, 24 nt, Homo sapiens
ucagagcauguguuuaaucaggcu

SEQ ID NO: 39357 - RNA, 22 nt, Homo sapiens
gugggguggguggucaggccga

SEQ ID NO: 39358 - RNA, 17 nt, Homo sapiens
gggagaggaggaggcga

SEQ ID NO: 39359 - RNA, 21 nt, Homo sapiens
gaccaaucgccguccccgccg

SEQ ID NO: 39360 - RNA, 22 nt, Homo sapiens
cgggacguccagacucaacucu

SEQ ID NO: 39361 - RNA, 21 nt, Homo sapiens
acccaguagccagauguagcu

SEQ ID NO: 39362 - RNA, 23 nt, Homo sapiens
acacuuacuggacaccuacuagg

SEQ ID NO: 39363 - RNA, 22 nt, Homo sapiens
aggaaaccagcaaguguugacg

SEQ ID NO: 39364 - RNA, 22 nt, Homo sapiens
cucagagcagacgugguucuca

SEQ ID NO: 39365 - RNA, 22 nt, Homo sapiens
gcggucccgcggcgccccgccu

SEQ ID NO: 39366 - RNA, 21 nt, Homo sapiens
ccccucccagccucccugcca

SEQ ID NO: 39367 - RNA, 25 nt, Homo sapiens
aagaaagagucuugcuuugucgccc

SEQ ID NO: 39368 - RNA, 24 nt, Homo sapiens
acugcuggucuucagucagggcca

SEQ ID NO: 39369 - RNA, 24 nt, Homo sapiens
acugcuggucuucagucagggcca

SEQ ID NO: 39370 - RNA, 21 nt, Homo sapiens
gaccaaucgccguccccgccg

SEQ ID NO: 39371 - RNA, 20 nt, Homo sapiens
cccgccgcgucgcccugggg

SEQ ID NO: 39372 - RNA, 23 nt, Homo sapiens
caugagugacgcccucuggagua

SEQ ID NO: 39373 - RNA, 22 nt, Homo sapiens
gcggucccgcggcgccccgccu

SEQ ID NO: 39374 - RNA, 20 nt, Homo sapiens
aggggccucagccuccuggu

SEQ ID NO: 39375 - RNA, 22 nt, Homo sapiens
ugcuguuagcccuagccccgca

SEQ ID NO: 39376 - RNA, 22 nt, Homo sapiens
auacauacuucuuuacauucca

SEQ ID NO: 39377 - RNA, 21 nt, Homo sapiens
agggcucaucuugguccugca

SEQ ID NO: 39378 - RNA, 23 nt, Homo sapiens
gggagugaagacacggagccaga

SEQ ID NO: 39379 - RNA, 21 nt, Homo sapiens
gggcaucugggacgcgcagga

SEQ ID NO: 39380 - RNA, 23 nt, Homo sapiens
cccaacagacauggcgguacuca

SEQ ID NO: 39381 - RNA, 25 nt, Homo sapiens
agcuagucaagcgcgguuguggggg

SEQ ID NO: 39382 - RNA, 22 nt, Homo sapiens
ccacacacuuccuuacauucca

SEQ ID NO: 39383 - RNA, 22 nt, Homo sapiens
aagcgguuuaccaucccacaua

SEQ ID NO: 39384 - RNA, 22 nt, Homo sapiens
auaaggauuuuuaggggcauua

SEQ ID NO: 39385 - RNA, 22 nt, Homo sapiens
ccucauggaaggguuccccacu

SEQ ID NO: 39386 - RNA, 22 nt, Homo sapiens
ccuggcacacaguagaccuuca

SEQ ID NO: 39387 - RNA, 20 nt, Homo sapiens
ggcaaagaaggaacauuccu

SEQ ID NO: 39388 - RNA, 22 nt, Homo sapiens
ugcuguuagcccuagccccgca

SEQ ID NO: 39389 - RNA, 22 nt, Homo sapiens
auccuucuacaaauucacccau

SEQ ID NO: 39390 - RNA, 22 nt, Homo sapiens
ucucucccauuagaguugaaaa

SEQ ID NO: 39391 - RNA, 21 nt, Homo sapiens
acuagacugugagcuccucga

SEQ ID NO: 39392 - RNA, 22 nt, Homo sapiens
uggcagcagcggagggggcaga

SEQ ID NO: 39393 - RNA, 22 nt, Homo sapiens
uccacauggaguugcuguuaca

SEQ ID NO: 39394 - RNA, 20 nt, Homo sapiens
ccagcagcaccuggggcagu

SEQ ID NO: 39395 - RNA, 23 nt, Homo sapiens
agaggcaggcaugcgggcagaca

SEQ ID NO: 39396 - RNA, 21 nt, Homo sapiens
auccuguacugagcugccccg

SEQ ID NO: 39397 - RNA, 23 nt, Homo sapiens
guagugggccgagccgagugaca

SEQ ID NO: 39398 - RNA, 21 nt, Homo sapiens
cugaggagagaggaggugggg

SEQ ID NO: 39399 - RNA, 18 nt, Homo sapiens
ugguggcagaggugggau

SEQ ID NO: 39400 - RNA, 17 nt, Homo sapiens
gggagaggaggaggcga

SEQ ID NO: 39401 - RNA, 24 nt, Homo sapiens
acugcuggucuucagucagggcca

SEQ ID NO: 39402 - RNA, 23 nt, Homo sapiens
gggagugaagacacggagccaga

SEQ ID NO: 39403 - RNA, 23 nt, Homo sapiens
aggaacagcagcagcccgggccg

SEQ ID NO: 39404 - RNA, 23 nt, Homo sapiens
aggaacagcagcagcccgggccg

SEQ ID NO: 39405 - RNA, 22 nt, Homo sapiens
acccuuaucaguucuccgucca

SEQ ID NO: 39406 - RNA, 21 nt, Homo sapiens
gaccaaucgccguccccgccg

SEQ ID NO: 39407 - RNA, 22 nt, Homo sapiens
ucagaccgagacaagugcaaug

SEQ ID NO: 39408 - RNA, 21 nt, Homo sapiens
acaggauugagggggggcccu

SEQ ID NO: 39409 - RNA, 22 nt, Homo sapiens
agcugaguguaggauguuuaca

SEQ ID NO: 39410 - RNA, 22 nt, Homo sapiens
cagcauggaguccuccagguug

SEQ ID NO: 39411 - RNA, 22 nt, Homo sapiens
ugcaagccuugggugugggagg

SEQ ID NO: 39412 - RNA, 22 nt, Homo sapiens
gcggucccgcggcgccccgccu

SEQ ID NO: 39413 - RNA, 22 nt, Homo sapiens
ugcuguuagcccuagccccgca

SEQ ID NO: 39414 - RNA, 22 nt, Homo sapiens
cacucuaaagggaggcacuuug

SEQ ID NO: 39415 - RNA, 22 nt, Homo sapiens
ggaggccgggacgagugcaaua

SEQ ID NO: 39416 - RNA, 23 nt, Homo sapiens
ucauagcccuguacaaugcugcu

SEQ ID NO: 39417 - RNA, 23 nt, Homo sapiens
ugauagcccuguacaaugcugcu

SEQ ID NO: 39418 - RNA, 20 nt, Homo sapiens
ggggggcgaggcagguguga

SEQ ID NO: 39419 - RNA, 22 nt, Homo sapiens
aggucucacuuuguugcccaga

SEQ ID NO: 39420 - RNA, 22 nt, Homo sapiens
cacaaaccauuaugugcugcua

SEQ ID NO: 39421 - RNA, 22 nt, Homo sapiens
uguaaaccaugaugugcugcua

SEQ ID NO: 39422 - RNA, 22 nt, Homo sapiens
cgccaauauuuacgugcugcua

SEQ ID NO: 39423 - RNA, 20 nt, Homo sapiens
cccgccgcgucgcccugggg

SEQ ID NO: 39424 - RNA, 21 nt, Homo sapiens
gccaauauuucugugcugcua

SEQ ID NO: 39425 - RNA, 25 nt, Homo sapiens
agcuagucaagcgcgguuguggggg

SEQ ID NO: 39426 - RNA, 23 nt, Homo sapiens
acaccaaugcccuaggggaugcg

SEQ ID NO: 39427 - RNA, 22 nt, Homo sapiens
uucaaaacaugaauugcugcug

SEQ ID NO: 39428 - RNA, 22 nt, Homo sapiens
gcugccguauaugugaugucac

SEQ ID NO: 39429 - RNA, 21 nt, Homo sapiens
acaaaccacagugugcugcug

SEQ ID NO: 39430 - RNA, 22 nt, Homo sapiens
agcacagacuugcugugauguu

SEQ ID NO: 39431 - RNA, 25 nt, Homo sapiens
aaggagcucagaagcccugcccagc

SEQ ID NO: 39432 - RNA, 22 nt, Homo sapiens
gauccgagcaccggggaccccc

SEQ ID NO: 39433 - RNA, 22 nt, Homo sapiens
cugcucaaacccuccaaugacu

SEQ ID NO: 39434 - RNA, 17 nt, Homo sapiens
uggaggccccagcgaga

SEQ ID NO: 39435 - RNA, 22 nt, Homo sapiens
gguuaguggaccaggucacaaa

SEQ ID NO: 39436 - RNA, 23 nt, Homo sapiens
agaaaccaugggguaugagcaga

SEQ ID NO: 39437 - RNA, 22 nt, Homo sapiens
uagcagaagcauuuccgcacac

SEQ ID NO: 39438 - RNA, 21 nt, Homo sapiens
gaccaaucgccguccccgccg

SEQ ID NO: 39439 - RNA, 22 nt, Homo sapiens
agcugaguguaggauguuuaca

SEQ ID NO: 39440 - RNA, 22 nt, Homo sapiens
acaaaaguugccuuugugugau

SEQ ID NO: 39441 - RNA, 21 nt, Homo sapiens
ggacuauagaacuuucccccu

SEQ ID NO: 39442 - RNA, 22 nt, Homo sapiens
gcggucccgcggcgccccgccu

SEQ ID NO: 39443 - RNA, 21 nt, Homo sapiens
caucaccuuccuucuccucca

SEQ ID NO: 39444 - RNA, 22 nt, Homo sapiens
cacucuaaagggaggcacuuug

SEQ ID NO: 39445 - RNA, 22 nt, Homo sapiens
ggcagagagucagagcgcggau

SEQ ID NO: 39446 - RNA, 22 nt, Homo sapiens
uagcagaagcauuuccgcacac

SEQ ID NO: 39447 - RNA, 23 nt, Homo sapiens
gggagugaagacacggagccaga

SEQ ID NO: 39448 - RNA, 21 nt, Homo sapiens
acuagacugugagcuccucga

SEQ ID NO: 39449 - RNA, 21 nt, Homo sapiens
gaccaaucgccguccccgccg

SEQ ID NO: 39450 - RNA, 22 nt, Homo sapiens
ucagaccgagacaagugcaaug

SEQ ID NO: 39451 - RNA, 20 nt, Homo sapiens
cuggaggaagggcccagagg

SEQ ID NO: 39452 - RNA, 22 nt, Homo sapiens
gccuaagacacaggcccagaga

SEQ ID NO: 39453 - RNA, 23 nt, Homo sapiens
cggcucugucgucgaggcgcuca

SEQ ID NO: 39454 - RNA, 22 nt, Homo sapiens
gcggucccgcggcgccccgccu

SEQ ID NO: 39455 - RNA, 22 nt, Homo sapiens
ugcuguuagcccuagccccgca

SEQ ID NO: 39456 - RNA, 17 nt, Homo sapiens
gacagccucucccccac

SEQ ID NO: 39457 - RNA, 23 nt, Homo sapiens
gggagugaagacacggagccaga

SEQ ID NO: 39458 - RNA, 24 nt, Homo sapiens
agugugaguucuaccauugccaaa

SEQ ID NO: 39459 - RNA, 22 nt, Homo sapiens
accagcuaacaauacacugcca

SEQ ID NO: 39460 - RNA, 22 nt, Homo sapiens
ccucauggaaggguuccccacu

SEQ ID NO: 39461 - RNA, 22 nt, Homo sapiens
gcaaaagaaacugugguuuuug

SEQ ID NO: 39462 - RNA, 21 nt, Homo sapiens
ucgacugccacucuuacuaga

SEQ ID NO: 39463 - RNA, 22 nt, Homo sapiens
caagacacauuuggagagggac

SEQ ID NO: 39464 - RNA, 23 nt, Homo sapiens
gacguaguccuauucucugcugc

SEQ ID NO: 39465 - RNA, 20 nt, Homo sapiens
uacugcuuccacagcucccc

SEQ ID NO: 39466 - RNA, 21 nt, Homo sapiens
acuccaaagggaagcgccuuc

SEQ ID NO: 39467 - RNA, 22 nt, Homo sapiens
ggaucccugggaccauaccuag

SEQ ID NO: 39468 - RNA, 23 nt, Homo sapiens
ccuucucagaaaggugaaauuua

SEQ ID NO: 39469 - RNA, 21 nt, Homo sapiens
guaaugggaccuuccucuuug

SEQ ID NO: 39470 - RNA, 21 nt, Homo sapiens
agacacaccacggcacacuuc

SEQ ID NO: 39471 - RNA, 22 nt, Homo sapiens
cacauggccaaaacagagaaga

SEQ ID NO: 39472 - RNA, 21 nt, Homo sapiens
cuggaggacggcaacagucag

SEQ ID NO: 39473 - RNA, 24 nt, Homo sapiens
acugcaggcuccagcuuccaggcu

SEQ ID NO: 39474 - RNA, 22 nt, Homo sapiens
ggcucccaagaaccucaccugu

SEQ ID NO: 39475 - RNA, 18 nt, Homo sapiens
uggcgccugaacagggac

SEQ ID NO: 39476 - RNA, 18 nt, Homo sapiens
aucacauucaccucccug

SEQ ID NO: 39477 - RNA, 22 nt, Homo sapiens
ccccucuggucaaccagucaca

SEQ ID NO: 39478 - RNA, 21 nt, Homo sapiens
cggggugcacgggcggagggc

SEQ ID NO: 39479 - RNA, 22 nt, Homo sapiens
acaaaguucugugaugcacuga

SEQ ID NO: 39480 - RNA, 23 nt, Homo sapiens
gggagugaagacacggagccaga

SEQ ID NO: 39481 - RNA, 22 nt, Homo sapiens
uggcagcagcggagggggcaga

SEQ ID NO: 39482 - RNA, 22 nt, Homo sapiens
cagaagugggccgggcacaggg

SEQ ID NO: 39483 - RNA, 22 nt, Homo sapiens
agucuucacaacagcccugugu

SEQ ID NO: 39484 - RNA, 22 nt, Homo sapiens
ucagaccgagacaagugcaaug

SEQ ID NO: 39485 - RNA, 20 nt, Homo sapiens
ccagcagcaccuggggcagu

SEQ ID NO: 39486 - RNA, 21 nt, Homo sapiens
ucaaucacagauagcaccccu

SEQ ID NO: 39487 - RNA, 23 nt, Homo sapiens
aaagucucgcucucugccccuca

SEQ ID NO: 39488 - RNA, 22 nt, Homo sapiens
aucgggaggggacugagccuga

SEQ ID NO: 39489 - RNA, 21 nt, Homo sapiens
auccuguacugagcugccccg

SEQ ID NO: 39490 - RNA, 22 nt, Homo sapiens
aagagggagacccaggcucgga

SEQ ID NO: 39491 - RNA, 25 nt, Homo sapiens
accaacggaccuacuucccuccgcc

SEQ ID NO: 39492 - RNA, 21 nt, Homo sapiens
cuggaggacggcaacagucag

SEQ ID NO: 39493 - RNA, 20 nt, Homo sapiens
cucaaagcaaacccugcaga

SEQ ID NO: 39494 - RNA, 25 nt, Homo sapiens
aagaaagagucuugcuuugucgccc

SEQ ID NO: 39495 - RNA, 17 nt, Homo sapiens
gggagaggaggaggcga

SEQ ID NO: 39496 - RNA, 21 nt, Homo sapiens
acuagacugugagcuccucga

SEQ ID NO: 39497 - RNA, 21 nt, Homo sapiens
gggcaucugggacgcgcagga

SEQ ID NO: 39498 - RNA, 23 nt, Homo sapiens
cuaccugcacuguaagcacuuug

SEQ ID NO: 39499 - RNA, 22 nt, Homo sapiens
cggugagcacccggccccugcg

SEQ ID NO: 39500 - RNA, 22 nt, Homo sapiens
caugauugccacgucugcagua

SEQ ID NO: 39501 - RNA, 21 nt, Homo sapiens
ugauugccacugucugcagua

SEQ ID NO: 39502 - RNA, 25 nt, Homo sapiens
acggagcugucccaacaccaccccu

SEQ ID NO: 39503 - RNA, 22 nt, Homo sapiens
aggucucacuuuguugcccaga

SEQ ID NO: 39504 - RNA, 23 nt, Homo sapiens
uccaucaucaaaacaaauggagu

SEQ ID NO: 39505 - RNA, 20 nt, Homo sapiens
cuggaggaagggcccagagg

SEQ ID NO: 39506 - RNA, 22 nt, Homo sapiens
gccuaagacacaggcccagaga

SEQ ID NO: 39507 - RNA, 22 nt, Homo sapiens
auaaggauuuuuaggggcauua

SEQ ID NO: 39508 - RNA, 25 nt, Homo sapiens
aaggagcucagaagcccugcccagc

SEQ ID NO: 39509 - RNA, 19 nt, Homo sapiens
gcucuaagaaagccacacu

SEQ ID NO: 39510 - RNA, 20 nt, Homo sapiens
uccccacagacccagagccg

SEQ ID NO: 39511 - RNA, 22 nt, Homo sapiens
caaacaccauugucacacucca

SEQ ID NO: 39512 - RNA, 21 nt, Homo sapiens
cggggugcacgggcggagggc

SEQ ID NO: 39513 - RNA, 23 nt, Homo sapiens
gggagugaagacacggagccaga

SEQ ID NO: 39514 - RNA, 22 nt, Homo sapiens
ucaggaacugccuuucucucca

SEQ ID NO: 39515 - RNA, 21 nt, Homo sapiens
gaccaaucgccguccccgccg

SEQ ID NO: 39516 - RNA, 22 nt, Homo sapiens
agcugaguguaggauguuuaca

SEQ ID NO: 39517 - RNA, 21 nt, Homo sapiens
cccgaggagccgggcaggcuu

SEQ ID NO: 39518 - RNA, 22 nt, Homo sapiens
caagacacauuuggagagggac

SEQ ID NO: 39519 - RNA, 25 nt, Homo sapiens
accaacggaccuacuucccuccgcc

SEQ ID NO: 39520 - RNA, 22 nt, Homo sapiens
gcggucccgcggcgccccgccu

SEQ ID NO: 39521 - RNA, 22 nt, Homo sapiens
ugcuguuagcccuagccccgca

SEQ ID NO: 39522 - RNA, 22 nt, Homo sapiens
ggcagagagucagagcgcggau

SEQ ID NO: 39523 - RNA, 24 nt, Homo sapiens
acugcuggucuucagucagggcca

SEQ ID NO: 39524 - RNA, 22 nt, Homo sapiens
augcccuuucaucauugcacug

SEQ ID NO: 39525 - RNA, 21 nt, Homo sapiens
cggggugcacgggcggagggc

SEQ ID NO: 39526 - RNA, 22 nt, Homo sapiens
acaaaguucuguagugcacuga

SEQ ID NO: 39527 - RNA, 22 nt, Homo sapiens
acaaaguucugugaugcacuga

SEQ ID NO: 39528 - RNA, 21 nt, Homo sapiens
ccaaguucugucaugcacuga

SEQ ID NO: 39529 - RNA, 18 nt, Homo sapiens
ggagaggagggcacugga

SEQ ID NO: 39530 - RNA, 22 nt, Homo sapiens
acugggacuuuguaggccaguu

SEQ ID NO: 39531 - RNA, 22 nt, Homo sapiens
agcgggacuuugagggccaguu

SEQ ID NO: 39532 - RNA, 22 nt, Homo sapiens
acggaagggcagagagggccag

SEQ ID NO: 39533 - RNA, 23 nt, Homo sapiens
ucucacccagguagcaaggauua

SEQ ID NO: 39534 - RNA, 22 nt, Homo sapiens
agaauccuugcccgggugcauu

SEQ ID NO: 39535 - RNA, 22 nt, Homo sapiens
ugaauccuugcccaggugcauu

SEQ ID NO: 39536 - RNA, 19 nt, Homo sapiens
auuuugguacagcagcuca

SEQ ID NO: 39537 - RNA, 20 nt, Homo sapiens
ugggccaccgccgagcggac

SEQ ID NO: 39538 - RNA, 21 nt, Homo sapiens
guaaugggaccuuccucuuug

SEQ ID NO: 39539 - RNA, 25 nt, Homo sapiens
accaacggaccuacuucccuccgcc

SEQ ID NO: 39540 - RNA, 21 nt, Homo sapiens
caucaccuuccuucuccucca

SEQ ID NO: 39541 - RNA, 22 nt, Homo sapiens
ggcagagagucagagcgcggau

SEQ ID NO: 39542 - RNA, 22 nt, Homo sapiens
ggaggccgggacgagugcaaua

SEQ ID NO: 39543 - RNA, 21 nt, Homo sapiens
ccccucccagccucccugcca

SEQ ID NO: 39544 - RNA, 22 nt, Homo sapiens
cuggagagacaaggggaagagg

SEQ ID NO: 39545 - RNA, 24 nt, Homo sapiens
gaaagugcauagaauucugucugg

SEQ ID NO: 39546 - RNA, 23 nt, Homo sapiens
cuaucugcacuagaugcaccuua

SEQ ID NO: 39547 - RNA, 22 nt, Homo sapiens
cggugagcacccggccccugcg

SEQ ID NO: 39548 - RNA, 23 nt, Homo sapiens
acauuuuucguuauugcucuuga

SEQ ID NO: 39549 - RNA, 22 nt, Homo sapiens
ccuggcacacaguagaccuuca

SEQ ID NO: 39550 - RNA, 23 nt, Homo sapiens
acagaaagugcuucccucaagag

SEQ ID NO: 39551 - RNA, 22 nt, Homo sapiens
gcacacaauaaauguuugcuga

SEQ ID NO: 39552 - RNA, 19 nt, Homo sapiens
gcuccuguccaacuggcuc

SEQ ID NO: 39553 - RNA, 22 nt, Homo sapiens
gauccgagcaccggggaccccc

SEQ ID NO: 39554 - RNA, 22 nt, Homo sapiens
gcugaggcuguggggcuggagu

SEQ ID NO: 39555 - RNA, 22 nt, Homo sapiens
ucuacccagaaaggagccagug

SEQ ID NO: 39556 - RNA, 21 nt, Homo sapiens
cuggaggacggcaacagucag

SEQ ID NO: 39557 - RNA, 22 nt, Homo sapiens
acaaaguucuguagugcacuga

SEQ ID NO: 39558 - RNA, 22 nt, Homo sapiens
acaaaguucugugaugcacuga

SEQ ID NO: 39559 - RNA, 22 nt, Homo sapiens
agccacaaucaccuucugaucu

SEQ ID NO: 39560 - RNA, 21 nt, Homo sapiens
acaaaccacagugugcugcug

SEQ ID NO: 39561 - RNA, 24 nt, Homo sapiens
cacccccagagccucagcucccca

SEQ ID NO: 39562 - RNA, 21 nt, Homo sapiens
ccccucccagccucccugcca

SEQ ID NO: 39563 - RNA, 22 nt, Homo sapiens
gugggguggguggucaggccga

SEQ ID NO: 39564 - RNA, 23 nt, Homo sapiens
aggaacagcagcagcccgggccg

SEQ ID NO: 39565 - RNA, 23 nt, Homo sapiens
cuaucugcacuagaugcaccuua

SEQ ID NO: 39566 - RNA, 21 nt, Homo sapiens
ugcaugacggccugcaagaca

SEQ ID NO: 39567 - RNA, 22 nt, Homo sapiens
guccaaaguuggggugcugguu

SEQ ID NO: 39568 - RNA, 20 nt, Homo sapiens
cccugcgccaucuccucuac

SEQ ID NO: 39569 - RNA, 23 nt, Homo sapiens
ucacauaggaauaaaaagccaua

SEQ ID NO: 39570 - RNA, 23 nt, Homo sapiens
ucacauaggaaugaaaagccaua

SEQ ID NO: 39571 - RNA, 21 nt, Homo sapiens
uagaaaggcuaggaccaaacc

SEQ ID NO: 39572 - RNA, 22 nt, Homo sapiens
auaaggauuuuuaggggcauua

SEQ ID NO: 39573 - RNA, 22 nt, Homo sapiens
cucagagcagacgugguucuca

SEQ ID NO: 39574 - RNA, 21 nt, Homo sapiens
agacacaccacggcacacuuc

SEQ ID NO: 39575 - RNA, 22 nt, Homo sapiens
gcaaaaguaauugcagugugug

SEQ ID NO: 39576 - RNA, 23 nt, Homo sapiens
agcagcauuguacagggcuauga

SEQ ID NO: 39577 - RNA, 21 nt, Homo sapiens
cucccccacugcagcuggcac

SEQ ID NO: 39578 - RNA, 22 nt, Homo sapiens
cgcauuauuacucacgguacga

SEQ ID NO: 39579 - RNA, 21 nt, Homo sapiens
ucacccagaucugcggccuaa

SEQ ID NO: 39580 - RNA, 22 nt, Homo sapiens
uuaacagcuaagcacccuaauc

SEQ ID NO: 39581 - RNA, 21 nt, Homo sapiens
aaagugucagauacggugugg

SEQ ID NO: 39582 - RNA, 23 nt, Homo sapiens
gcgcccaauuaaugucuguugau

SEQ ID NO: 39583 - RNA, 22 nt, Homo sapiens
aaucagucucauugcuuuauaa

SEQ ID NO: 39584 - RNA, 23 nt, Homo sapiens
aaucgcgguuuauaccaaaugaa

SEQ ID NO: 39585 - RNA, 20 nt, Homo sapiens
agagaugagagaaacacccu

SEQ ID NO: 39586 - RNA, 22 nt, Homo sapiens
ccucgggauggcgcccguucac

SEQ ID NO: 39587 - RNA, 21 nt, Homo sapiens
ugacugacagcuuuuugagua

SEQ ID NO: 39588 - RNA, 22 nt, Homo sapiens
agaaaaugccccucaguuuuga

SEQ ID NO: 39589 - RNA, 20 nt, Homo sapiens
cccgccgcgucgcccugggg

SEQ ID NO: 39590 - RNA, 20 nt, Homo sapiens
acauuacuguuaucaaaaca

SEQ ID NO: 39591 - RNA, 22 nt, Homo sapiens
acugccugucugugccugcugu

SEQ ID NO: 39592 - RNA, 21 nt, Homo sapiens
accuauccugaauuacuugaa

SEQ ID NO: 39593 - RNA, 22 nt, Homo sapiens
accagguuccaccccagcaggc

SEQ ID NO: 39594 - RNA, 22 nt, Homo sapiens
gauagagugcagaccagggucu

SEQ ID NO: 39595 - RNA, 18 nt, Homo sapiens
augacaccucccugugaa

SEQ ID NO: 39596 - RNA, 22 nt, Homo sapiens
gcaaaaguaauugccaguuuug

SEQ ID NO: 39597 - RNA, 22 nt, Homo sapiens
ugcaaaaguagucucaguuuuu

SEQ ID NO: 39598 - RNA, 19 nt, Homo sapiens
aaaaguaauuacaguuuuu

SEQ ID NO: 39599 - RNA, 22 nt, Homo sapiens
gcaaaaguaacugcaguuuugg

SEQ ID NO: 39600 - RNA, 22 nt, Homo sapiens
aaaguaacugcaguuuuugcua

SEQ ID NO: 39601 - RNA, 21 nt, Homo sapiens
uugucuaaccagucaccuguu

SEQ ID NO: 39602 - RNA, 23 nt, Homo sapiens
ucauagcccuguacaaugcugcu

SEQ ID NO: 39603 - RNA, 23 nt, Homo sapiens
ugauagcccuguacaaugcugcu

SEQ ID NO: 39604 - RNA, 22 nt, Homo sapiens
acccuuaucaguucuccgucca

SEQ ID NO: 39605 - RNA, 22 nt, Homo sapiens
ucaggaacugccuuucucucca

SEQ ID NO: 39606 - RNA, 21 nt, Homo sapiens
gaccaaucgccguccccgccg

SEQ ID NO: 39607 - RNA, 22 nt, Homo sapiens
aggcauaggaugacaaagggaa

SEQ ID NO: 39608 - RNA, 23 nt, Homo sapiens
cuaccugcacuaugagcacuuug

SEQ ID NO: 39609 - RNA, 22 nt, Homo sapiens
aggcgaaggaugacaaagggaa

SEQ ID NO: 39610 - RNA, 22 nt, Homo sapiens
ucaguuuccucugcaaacaguu

SEQ ID NO: 39611 - RNA, 22 nt, Homo sapiens
gcggucccgcggcgccccgccu

SEQ ID NO: 39612 - RNA, 22 nt, Homo sapiens
ugcuguuagcccuagccccgca

SEQ ID NO: 39613 - RNA, 21 nt, Homo sapiens
caucaccuuccuucuccucca

SEQ ID NO: 39614 - RNA, 21 nt, Homo sapiens
caucaccuuccuucuccucca

SEQ ID NO: 39615 - RNA, 21 nt, Homo sapiens
cacaaccucaguguuuccagg

SEQ ID NO: 39616 - RNA, 22 nt, Homo sapiens
uggcagcagcggagggggcaga

SEQ ID NO: 39617 - RNA, 20 nt, Homo sapiens
cccgccgcgucgcccugggg

SEQ ID NO: 39618 - RNA, 22 nt, Homo sapiens
ucagaccgagacaagugcaaug

SEQ ID NO: 39619 - RNA, 20 nt, Homo sapiens
ccagcagcaccuggggcagu

SEQ ID NO: 39620 - RNA, 21 nt, Homo sapiens
uucuaggauaggcccaggggc

SEQ ID NO: 39621 - RNA, 21 nt, Homo sapiens
auccuguacugagcugccccg

SEQ ID NO: 39622 - RNA, 19 nt, Homo sapiens
guugggaucacaggcgccc

SEQ ID NO: 39623 - RNA, 22 nt, Homo sapiens
ugcuguuagcccuagccccgca

SEQ ID NO: 39624 - RNA, 23 nt, Homo sapiens
gcacaugugcacacagccgggug

SEQ ID NO: 39625 - RNA, 22 nt, Homo sapiens
ggcaaaauccgcaauuacuuuu

SEQ ID NO: 39626 - RNA, 21 nt, Homo sapiens
aacggaaccacuagugacuug

SEQ ID NO: 39627 - RNA, 22 nt, Homo sapiens
accagcuaacaauacacugcca

SEQ ID NO: 39628 - RNA, 23 nt, Homo sapiens
gaaaaacgcccccuggcuugaaa

SEQ ID NO: 39629 - RNA, 22 nt, Homo sapiens
aggaaaccagcaaguguugacg

SEQ ID NO: 39630 - RNA, 22 nt, Homo sapiens
acacucuaaagggaaccauuuu

SEQ ID NO: 39631 - RNA, 23 nt, Homo sapiens
gacguaguccuauucucugcugc

SEQ ID NO: 39632 - RNA, 22 nt, Homo sapiens
cuggagagacaaggggaagagg

SEQ ID NO: 39633 - RNA, 21 nt, Homo sapiens
cugggggacggagcagaagga

SEQ ID NO: 39634 - RNA, 22 nt, Homo sapiens
uaaaugaauucaauuuccuucu

SEQ ID NO: 39635 - RNA, 21 nt, Homo sapiens
gagcuacagugcuucaucuca

SEQ ID NO: 39636 - RNA, 22 nt, Homo sapiens
uggcagcagcggagggggcaga

SEQ ID NO: 39637 - RNA, 22 nt, Homo sapiens
uagucaagugaagcagugggag

SEQ ID NO: 39638 - RNA, 22 nt, Homo sapiens
agccacaaucaccuucugaucu

SEQ ID NO: 39639 - RNA, 22 nt, Homo sapiens
agcugaguguaggauguuuaca

SEQ ID NO: 39640 - RNA, 20 nt, Homo sapiens
ccagcagcaccuggggcagu

SEQ ID NO: 39641 - RNA, 21 nt, Homo sapiens
auccuguacugagcugccccg

SEQ ID NO: 39642 - RNA, 21 nt, Homo sapiens
caucaccuuccuucuccucca

SEQ ID NO: 39643 - RNA, 23 nt, Homo sapiens
agaaaccaugggguaugagcaga

SEQ ID NO: 39644 - RNA, 22 nt, Homo sapiens
cacugguacaaggguugggaga

SEQ ID NO: 39645 - RNA, 22 nt, Homo sapiens
augcccuuuuaacauugcacug

SEQ ID NO: 39646 - RNA, 21 nt, Homo sapiens
ggaaaucccuggcaaugugau

SEQ ID NO: 39647 - RNA, 21 nt, Homo sapiens
gguaaucccuggcaaugugau

SEQ ID NO: 39648 - RNA, 20 nt, Homo sapiens
ggcauucaccgcgugccuua

SEQ ID NO: 39649 - RNA, 18 nt, Homo sapiens
ugguggcagaggugggau

SEQ ID NO: 39650 - RNA, 23 nt, Homo sapiens
ucacauaggaaugaaaagccaua

SEQ ID NO: 39651 - RNA, 22 nt, Homo sapiens
cagaagugggccgggcacaggg

SEQ ID NO: 39652 - RNA, 22 nt, Homo sapiens
ugagccacugugccuggccuga

SEQ ID NO: 39653 - RNA, 21 nt, Homo sapiens
acccaguagccagauguagcu

SEQ ID NO: 39654 - RNA, 22 nt, Homo sapiens
uaaccgauuucagauggugcua

SEQ ID NO: 39655 - RNA, 23 nt, Homo sapiens
aacacugauuucaaauggugcua

SEQ ID NO: 39656 - RNA, 22 nt, Homo sapiens
uaaccgauuucaaauggugcua

SEQ ID NO: 39657 - RNA, 21 nt, Homo sapiens
aucugcacugucagcacuuua

SEQ ID NO: 39658 - RNA, 23 nt, Homo sapiens
gcuuugacaauaucauugcacug

SEQ ID NO: 39659 - RNA, 23 nt, Homo sapiens
acgggugcgauuucugugugaga

SEQ ID NO: 39660 - RNA, 22 nt, Homo sapiens
acaaaaguugccuuugugugau

SEQ ID NO: 39661 - RNA, 22 nt, Homo sapiens
cagcauggaguccuccagguug

SEQ ID NO: 39662 - RNA, 21 nt, Homo sapiens
ucuacucagaagggugccuua

SEQ ID NO: 39663 - RNA, 22 nt, Homo sapiens
ugcaagccuugggugugggagg

SEQ ID NO: 39664 - RNA, 22 nt, Homo sapiens
acaaaagcaacugagguucuug

SEQ ID NO: 39665 - RNA, 23 nt, Homo sapiens
gggccgcagcugucgcccguguc

SEQ ID NO: 39666 - RNA, 24 nt, Homo sapiens
acgcgcaggccagagacccaggca

SEQ ID NO: 39667 - RNA, 20 nt, Homo sapiens
gcagaagcauuuccacacac

SEQ ID NO: 39668 - RNA, 22 nt, Homo sapiens
ucaguuuccucugcaaacaguu

SEQ ID NO: 39669 - RNA, 21 nt, Homo sapiens
gccaauauuucugugcugcua

SEQ ID NO: 39670 - RNA, 22 nt, Homo sapiens
cacuuaucagguuguauuauaa

SEQ ID NO: 39671 - RNA, 21 nt, Homo sapiens
ccuacguuccauagucuacca

SEQ ID NO: 39672 - RNA, 21 nt, Homo sapiens
cguacgcuauacggucuacua

SEQ ID NO: 39673 - RNA, 22 nt, Homo sapiens
ccuggcacacaguagaccuuca

SEQ ID NO: 39674 - RNA, 21 nt, Homo sapiens
ucccagcacacauuuagcuca

SEQ ID NO: 39675 - RNA, 21 nt, Homo sapiens
agguaauaccaauaccuugug

SEQ ID NO: 39676 - RNA, 20 nt, Homo sapiens
cccugcgccaucuccucuac

SEQ ID NO: 39677 - RNA, 21 nt, Homo sapiens
cggggugcacgggcggagggc

SEQ ID NO: 39678 - RNA, 21 nt, Homo sapiens
cggggugcacgggcggagggc

SEQ ID NO: 39679 - RNA, 21 nt, Homo sapiens
gaccaaucgccguccccgccg

SEQ ID NO: 39680 - RNA, 23 nt, Homo sapiens
aaagucucgcucucugccccuca

SEQ ID NO: 39681 - RNA, 25 nt, Homo sapiens
accaacggaccuacuucccuccgcc

SEQ ID NO: 39682 - RNA, 22 nt, Homo sapiens
gcggucccgcggcgccccgccu

SEQ ID NO: 39683 - RNA, 22 nt, Homo sapiens
ugcuguuagcccuagccccgca

SEQ ID NO: 39684 - RNA, 22 nt, Homo sapiens
gcugaggcuguggggcuggagu

SEQ ID NO: 39685 - RNA, 23 nt, Homo sapiens
aacaggugcucaaauaagacuug

SEQ ID NO: 39686 - RNA, 22 nt, Homo sapiens
ggagauggagccagggcccuaa

SEQ ID NO: 39687 - RNA, 23 nt, Homo sapiens
cuaacugcacuagaugcaccuua

SEQ ID NO: 39688 - RNA, 22 nt, Homo sapiens
acggaagggcagagagggccag

SEQ ID NO: 39689 - RNA, 23 nt, Homo sapiens
cacugugggcccucuccgcacca

SEQ ID NO: 39690 - RNA, 23 nt, Homo sapiens
acaacaaaaucacuagucuucca

SEQ ID NO: 39691 - RNA, 24 nt, Homo sapiens
cacccccagagccucagcucccca

SEQ ID NO: 39692 - RNA, 21 nt, Homo sapiens
aucugcacugucagcacuuua

SEQ ID NO: 39693 - RNA, 20 nt, Homo sapiens
uccgccugucugaacaguga

SEQ ID NO: 39694 - RNA, 24 nt, Homo sapiens
gaagucacucccaggcagcugcaa

SEQ ID NO: 39695 - RNA, 21 nt, Homo sapiens
gggcaucugggacgcgcagga

SEQ ID NO: 39696 - RNA, 23 nt, Homo sapiens
cccaacagacauggcgguacuca

SEQ ID NO: 39697 - RNA, 20 nt, Homo sapiens
acagcaaggagggcaggagg

SEQ ID NO: 39698 - RNA, 22 nt, Homo sapiens
ucaacaucagucugauaagcua

SEQ ID NO: 39699 - RNA, 22 nt, Homo sapiens
uccaggagcucacaaucuagug

SEQ ID NO: 39700 - RNA, 19 nt, Homo sapiens
gccucagaggcagcugcuu

SEQ ID NO: 39701 - RNA, 21 nt, Homo sapiens
cacaacccuaguggcgccauu

SEQ ID NO: 39702 - RNA, 23 nt, Homo sapiens
cccagcuagauuguaagcuccuu

SEQ ID NO: 39703 - RNA, 23 nt, Homo sapiens
agggauuccugggaaaacuggac

SEQ ID NO: 39704 - RNA, 22 nt, Homo sapiens
gaagaaaggcaucauauaggag

SEQ ID NO: 39705 - RNA, 21 nt, Homo sapiens
gaccaagaaauagccuuucaa

SEQ ID NO: 39706 - RNA, 22 nt, Homo sapiens
gagauuggccauguaauacuca

SEQ ID NO: 39707 - RNA, 23 nt, Homo sapiens
caugagugacgcccucuggagua

SEQ ID NO: 39708 - RNA, 23 nt, Homo sapiens
acacacucacacacacacacuca

SEQ ID NO: 39709 - RNA, 23 nt, Homo sapiens
cuccagccccuccagggcuuccu

SEQ ID NO: 39710 - RNA, 22 nt, Homo sapiens
ucacauuugccugcagagauuu

SEQ ID NO: 39711 - RNA, 22 nt, Homo sapiens
gaauucaucacggccagccucu

SEQ ID NO: 39712 - RNA, 22 nt, Homo sapiens
aagagggagacccaggcucgga

SEQ ID NO: 39713 - RNA, 24 nt, Homo sapiens
acugggcacaaacauguccagguc

SEQ ID NO: 39714 - RNA, 21 nt, Homo sapiens
ucgacugccacucuuacuaga

SEQ ID NO: 39715 - RNA, 20 nt, Homo sapiens
ugucuccacagggcucuuua

SEQ ID NO: 39716 - RNA, 22 nt, Homo sapiens
agaaagcgcuuuccuuuguaga

SEQ ID NO: 39717 - RNA, 21 nt, Homo sapiens
uagaaaggcuaggaccaaacc

SEQ ID NO: 39718 - RNA, 22 nt, Homo sapiens
acuucaaggaucuuaaacuuug

SEQ ID NO: 39719 - RNA, 19 nt, Homo sapiens
gcucuaagaaagccacacu

SEQ ID NO: 39720 - RNA, 23 nt, Homo sapiens
accacaggagucugagcauuuga

SEQ ID NO: 39721 - RNA, 22 nt, Homo sapiens
cagaagugggccgggcacaggg

SEQ ID NO: 39722 - RNA, 23 nt, Homo sapiens
cuaccugcacuauaagcacuuua

SEQ ID NO: 39723 - RNA, 21 nt, Homo sapiens
ucaaucacagauagcaccccu

SEQ ID NO: 39724 - RNA, 25 nt, Homo sapiens
aggccgccacccgcccgcgaucccu

SEQ ID NO: 39725 - RNA, 22 nt, Homo sapiens
cagaagugggccgggcacaggg

SEQ ID NO: 39726 - RNA, 23 nt, Homo sapiens
ucaguuuugcauagauuugcaca

SEQ ID NO: 39727 - RNA, 23 nt, Homo sapiens
ucaguuuugcauggauuugcaca

SEQ ID NO: 39728 - RNA, 20 nt, Homo sapiens
acauuacuguuaucaaaaca

SEQ ID NO: 39729 - RNA, 23 nt, Homo sapiens
cuaccugcacuauaagcacuuua

SEQ ID NO: 39730 - RNA, 21 nt, Homo sapiens
aacggaaccacuagugacuug

SEQ ID NO: 39731 - RNA, 22 nt, Homo sapiens
accagcuaacaauacacugcca

SEQ ID NO: 39732 - RNA, 22 nt, Homo sapiens
cacuuaucagguuguauuauaa

SEQ ID NO: 39733 - RNA, 22 nt, Homo sapiens
cacuuagcagguuguauuauau

SEQ ID NO: 39734 - RNA, 21 nt, Homo sapiens
uucacuccaaaaggugcaaaa

SEQ ID NO: 39735 - RNA, 22 nt, Homo sapiens
agcaaaauccgcaaguacuuuu

SEQ ID NO: 39736 - RNA, 23 nt, Homo sapiens
agacaaggcccacccgugcaaac

SEQ ID NO: 39737 - RNA, 22 nt, Homo sapiens
gauuccaauuuuuccacaucuu

SEQ ID NO: 39738 - RNA, 23 nt, Homo sapiens
gggagugaagacacggagccaga

SEQ ID NO: 39739 - RNA, 23 nt, Homo sapiens
aggaacagcagcagcccgggccg

SEQ ID NO: 39740 - RNA, 22 nt, Homo sapiens
cggugagcacccggccccugcg

SEQ ID NO: 39741 - RNA, 23 nt, Homo sapiens
cccaacagacauggcgguacuca

SEQ ID NO: 39742 - RNA, 23 nt, Homo sapiens
ccacccaaugaccuacuccaaga

SEQ ID NO: 39743 - RNA, 24 nt, Homo sapiens
cagaaagugcuuucuuuuggagaa

SEQ ID NO: 39744 - RNA, 22 nt, Homo sapiens
aacacucuaaaaggaggcacuu

SEQ ID NO: 39745 - RNA, 23 nt, Homo sapiens
cuccagccccuccagggcuuccu

SEQ ID NO: 39746 - RNA, 21 nt, Homo sapiens
caucaccuuccuucuccucca

SEQ ID NO: 39747 - RNA, 21 nt, Homo sapiens
cggcucggguggcggcgacgg

SEQ ID NO: 39748 - RNA, 21 nt, Homo sapiens
cggggugcacgggcggagggc

SEQ ID NO: 39749 - RNA, 21 nt, Homo sapiens
acuagacugugagcuccucga

SEQ ID NO: 39750 - RNA, 22 nt, Homo sapiens
ucagaccgagacaagugcaaug

SEQ ID NO: 39751 - RNA, 19 nt, Homo sapiens
guccugaauuccgcagccu

SEQ ID NO: 39752 - RNA, 25 nt, Homo sapiens
accaacggaccuacuucccuccgcc

SEQ ID NO: 39753 - RNA, 22 nt, Homo sapiens
cacaagaucggaucuacggguu

SEQ ID NO: 39754 - RNA, 22 nt, Homo sapiens
cgcaaggucgguucuacgggug

SEQ ID NO: 39755 - RNA, 22 nt, Homo sapiens
cacaucucacuguagccucaaa

SEQ ID NO: 39756 - RNA, 22 nt, Homo sapiens
acccuuaucaguucuccgucca

SEQ ID NO: 39757 - RNA, 23 nt, Homo sapiens
cccaacagacauggcgguacuca

SEQ ID NO: 39758 - RNA, 21 nt, Homo sapiens
ucaaucacagauagcaccccu

SEQ ID NO: 39759 - RNA, 23 nt, Homo sapiens
acacacucacacacacacacuca

SEQ ID NO: 39760 - RNA, 23 nt, Homo sapiens
agcagcauuguacagggcuauga

SEQ ID NO: 39761 - RNA, 21 nt, Homo sapiens
ccccucccagccucccugcca

SEQ ID NO: 39762 - RNA, 18 nt, Homo sapiens
ugguggcagaggugggau

SEQ ID NO: 39763 - RNA, 22 nt, Homo sapiens
cuaccauaggguaaaaccacug

SEQ ID NO: 39764 - RNA, 22 nt, Homo sapiens
ucaggaacugccuuucucucca

SEQ ID NO: 39765 - RNA, 22 nt, Homo sapiens
cggugagcacccggccccugcg

SEQ ID NO: 39766 - RNA, 22 nt, Homo sapiens
acaguucuucaacuggcagcuu

SEQ ID NO: 39767 - RNA, 21 nt, Homo sapiens
aucugcacugucagcacuuua

SEQ ID NO: 39768 - RNA, 23 nt, Homo sapiens
gcuuugacaauaucauugcacug

SEQ ID NO: 39769 - RNA, 22 nt, Homo sapiens
gagauuggccauguaauacuca

SEQ ID NO: 39770 - RNA, 22 nt, Homo sapiens
ugcaagccuugggugugggagg

SEQ ID NO: 39771 - RNA, 22 nt, Homo sapiens
aguccagauucugugcccacca

SEQ ID NO: 39772 - RNA, 21 nt, Homo sapiens
cagguaccaauauuuuaucua

SEQ ID NO: 39773 - RNA, 19 nt, Homo sapiens
agaaaccccagcagagaca

SEQ ID NO: 39774 - RNA, 19 nt, Homo sapiens
gccucagaggcagcugcuu

SEQ ID NO: 39775 - RNA, 22 nt, Homo sapiens
gcacauguucugcggcccacca

SEQ ID NO: 39776 - RNA, 23 nt, Homo sapiens
uguaggcuggggauaaaugaaua

SEQ ID NO: 39777 - RNA, 21 nt, Homo sapiens
aagggucaguaagcacccgcg

SEQ ID NO: 39778 - RNA, 20 nt, Homo sapiens
uacugcuuccacagcucccc

SEQ ID NO: 39779 - RNA, 21 nt, Homo sapiens
agaaguagaccauguguccua

SEQ ID NO: 39780 - RNA, 21 nt, Homo sapiens
auaauggagaccaggccacga

SEQ ID NO: 39781 - RNA, 17 nt, Homo sapiens
gggagaggaggaggcga

SEQ ID NO: 39782 - RNA, 23 nt, Homo sapiens
gggagugaagacacggagccaga

SEQ ID NO: 39783 - RNA, 22 nt, Homo sapiens
ugagccacugugccuggccuga

SEQ ID NO: 39784 - RNA, 21 nt, Homo sapiens
ucaaucacagauagcaccccu

SEQ ID NO: 39785 - RNA, 23 nt, Homo sapiens
aaagucucgcucucugccccuca

SEQ ID NO: 39786 - RNA, 20 nt, Homo sapiens
guuugauaaacugacacaac

SEQ ID NO: 39787 - RNA, 24 nt, Homo sapiens
acgcgcaggccagagacccaggca

SEQ ID NO: 39788 - RNA, 23 nt, Homo sapiens
cacugugggcccucuccgcacca

SEQ ID NO: 39789 - RNA, 22 nt, Homo sapiens
ugcuguuagcccuagccccgca

SEQ ID NO: 39790 - RNA, 20 nt, Homo sapiens
aguacaucaucuauacugua

SEQ ID NO: 39791 - RNA, 21 nt, Homo sapiens
cggggugcacgggcggagggc

SEQ ID NO: 39792 - RNA, 21 nt, Homo sapiens
acuagacugugagcuccucga

SEQ ID NO: 39793 - RNA, 23 nt, Homo sapiens
aggaacagcagcagcccgggccg

SEQ ID NO: 39794 - RNA, 22 nt, Homo sapiens
ugcuguuagcccuagccccgca

SEQ ID NO: 39795 - RNA, 23 nt, Homo sapiens
ccgcuugagcuaacuccgacccg

SEQ ID NO: 39796 - RNA, 23 nt, Homo sapiens
ggaagccaucaagucgcugcagg

SEQ ID NO: 39797 - RNA, 23 nt, Homo sapiens
cacaaauucgguucuacagggua

SEQ ID NO: 39798 - RNA, 21 nt, Homo sapiens
ccaaccaaugaaagaaugcuu

SEQ ID NO: 39799 - RNA, 22 nt, Homo sapiens
uccacauggaguugcuguuaca

SEQ ID NO: 39800 - RNA, 22 nt, Homo sapiens
uccacauggaguugcuguuaca

SEQ ID NO: 39801 - RNA, 21 nt, Homo sapiens
acaugguuagaucaagcacaa

SEQ ID NO: 39802 - RNA, 21 nt, Homo sapiens
ugcaugacggccugcaagaca

SEQ ID NO: 39803 - RNA, 21 nt, Homo sapiens
uugucuaaccagucaccuguu

SEQ ID NO: 39804 - RNA, 22 nt, Homo sapiens
gguucaguuguucaaccaguua

SEQ ID NO: 39805 - RNA, 22 nt, Homo sapiens
ccaucuuuaccagacaguguua

SEQ ID NO: 39806 - RNA, 22 nt, Homo sapiens
uagucaagugaagcagugggag

SEQ ID NO: 39807 - RNA, 23 nt, Homo sapiens
augcaaaguugcucggguaaccu

SEQ ID NO: 39808 - RNA, 21 nt, Homo sapiens
guccugagagcgcugccuccu

SEQ ID NO: 39809 - RNA, 22 nt, Homo sapiens
ucaguggcucagguucguugca

SEQ ID NO: 39810 - RNA, 21 nt, Homo sapiens
gagcugcauccuggcuccggg

SEQ ID NO: 39811 - RNA, 22 nt, Homo sapiens
uccggggacgaacgggacgggu

SEQ ID NO: 39812 - RNA, 17 nt, Homo sapiens
gggagaggaggaggcga

SEQ ID NO: 39813 - RNA, 22 nt, Homo sapiens
ucaggaacugccuuucucucca

SEQ ID NO: 39814 - RNA, 21 nt, Homo sapiens
gaccaaucgccguccccgccg

SEQ ID NO: 39815 - RNA, 22 nt, Homo sapiens
ucagaccgagacaagugcaaug

SEQ ID NO: 39816 - RNA, 23 nt, Homo sapiens
aaagucucgcucucugccccuca

SEQ ID NO: 39817 - RNA, 19 nt, Homo sapiens
auuuugguacagcagcuca

SEQ ID NO: 39818 - RNA, 22 nt, Homo sapiens
gcggucccgcggcgccccgccu

SEQ ID NO: 39819 - RNA, 22 nt, Homo sapiens
ugcuguuagcccuagccccgca

SEQ ID NO: 39820 - RNA, 22 nt, Homo sapiens
aacuauacaaccuacuaccuca

SEQ ID NO: 39821 - RNA, 22 nt, Homo sapiens
aaccacacaaccuacuaccuca

SEQ ID NO: 39822 - RNA, 22 nt, Homo sapiens
aaccauacaaccuacuaccuca

SEQ ID NO: 39823 - RNA, 22 nt, Homo sapiens
aacuaugcaaccuacuaccucu

SEQ ID NO: 39824 - RNA, 22 nt, Homo sapiens
aacuauacaaccuccuaccuca

SEQ ID NO: 39825 - RNA, 22 nt, Homo sapiens
aacuauacaaucuacuaccuca

SEQ ID NO: 39826 - RNA, 22 nt, Homo sapiens
aacuguacaaacuacuaccuca

SEQ ID NO: 39827 - RNA, 22 nt, Homo sapiens
aacagcacaaacuacuaccuca

SEQ ID NO: 39828 - RNA, 22 nt, Homo sapiens
ccggcugcaacacaagacacga

SEQ ID NO: 39829 - RNA, 22 nt, Homo sapiens
aagcgguuuaccaucccacaua

SEQ ID NO: 39830 - RNA, 21 nt, Homo sapiens
ccuacguuccauagucuacca

SEQ ID NO: 39831 - RNA, 22 nt, Homo sapiens
aguccagauucugugcccacca

SEQ ID NO: 39832 - RNA, 22 nt, Homo sapiens
gcacauguucugcggcccacca

SEQ ID NO: 39833 - RNA, 20 nt, Homo sapiens
uccccacagacccagagccg

SEQ ID NO: 39834 - RNA, 22 nt, Homo sapiens
aacaauacaacuuacuaccuca

SEQ ID NO: 39835 - RNA, 21 nt, Homo sapiens
auaauggagaccaggccacga

SEQ ID NO: 39836 - RNA, 22 nt, Homo sapiens
caaacaccauugucacacucca

SEQ ID NO: 39837 - RNA, 17 nt, Homo sapiens
gggagaggaggaggcga

SEQ ID NO: 39838 - RNA, 21 nt, Homo sapiens
uuuagcauaaguaugucccaa

SEQ ID NO: 39839 - RNA, 22 nt, Homo sapiens
acggaagggcagagagggccag

SEQ ID NO: 39840 - RNA, 21 nt, Homo sapiens
aagacgggaggagaggaguga

SEQ ID NO: 39841 - RNA, 21 nt, Homo sapiens
guaaugggaccuuccucuuug

SEQ ID NO: 39842 - RNA, 21 nt, Homo sapiens
acuagcuuauacauaaaauua

SEQ ID NO: 39843 - RNA, 21 nt, Homo sapiens
gaaggaagugagugcagccac

SEQ ID NO: 39844 - RNA, 22 nt, Homo sapiens
ccucaggcacggccgggccacc

SEQ ID NO: 39845 - RNA, 21 nt, Homo sapiens
ggggagcgggggcccugccuu

SEQ ID NO: 39846 - RNA, 21 nt, Homo sapiens
cugaggagagaggaggugggg

SEQ ID NO: 39847 - RNA, 21 nt, Homo sapiens
agcgccuuuggcagcuagagu

SEQ ID NO: 39848 - RNA, 18 nt, Homo sapiens
ugguggcagaggugggau

SEQ ID NO: 39849 - RNA, 22 nt, Homo sapiens
agcccaaaaggagaauucuuug

SEQ ID NO: 39850 - RNA, 22 nt, Homo sapiens
accagcuaacaauacacugcca

SEQ ID NO: 39851 - RNA, 23 nt, Homo sapiens
ucaccaaaacauggaagcacuua

SEQ ID NO: 39852 - RNA, 22 nt, Homo sapiens
agcugaguguaggauguuuaca

SEQ ID NO: 39853 - RNA, 23 nt, Homo sapiens
ucucugcaggccgugugcuuugc

SEQ ID NO: 39854 - RNA, 21 nt, Homo sapiens
gaccaagaaauagccuuucaa

SEQ ID NO: 39855 - RNA, 22 nt, Homo sapiens
gagauuggccauguaauacuca

SEQ ID NO: 39856 - RNA, 22 nt, Homo sapiens
aacccucuaaaaggaagcacuu

SEQ ID NO: 39857 - RNA, 22 nt, Homo sapiens
ugcaagccuugggugugggagg

SEQ ID NO: 39858 - RNA, 21 nt, Homo sapiens
caucaccuuccuucuccucca

SEQ ID NO: 39859 - RNA, 21 nt, Homo sapiens
cugaggagagaggaggugggg

SEQ ID NO: 39860 - RNA, 22 nt, Homo sapiens
uccggggacgaacgggacgggu

SEQ ID NO: 39861 - RNA, 21 nt, Homo sapiens
gggcaucugggacgcgcagga

SEQ ID NO: 39862 - RNA, 22 nt, Homo sapiens
ucaggaacugccuuucucucca

SEQ ID NO: 39863 - RNA, 22 nt, Homo sapiens
aacacucuaaagggaugcacga

SEQ ID NO: 39864 - RNA, 22 nt, Homo sapiens
cucagagcagacgugguucuca

SEQ ID NO: 39865 - RNA, 24 nt, Homo sapiens
acgcgcaggccagagacccaggca

SEQ ID NO: 39866 - RNA, 22 nt, Homo sapiens
caaacaccauugucacacucca

SEQ ID NO: 39867 - RNA, 22 nt, Homo sapiens
ccaucuuuaccagacaguguua

SEQ ID NO: 39868 - RNA, 22 nt, Homo sapiens
acaucguuaccagacaguguua

SEQ ID NO: 39869 - RNA, 22 nt, Homo sapiens
cagacuccgguggaaugaagga

SEQ ID NO: 39870 - RNA, 21 nt, Homo sapiens
uggaaaccaagagugggucgc

SEQ ID NO: 39871 - RNA, 21 nt, Homo sapiens
cugaaaccaaguaugggucgc

SEQ ID NO: 39872 - RNA, 23 nt, Homo sapiens
aggagaaggcaccaugggauuua

SEQ ID NO: 39873 - RNA, 23 nt, Homo sapiens
ccuagagagggugagaaccugcc

SEQ ID NO: 39874 - RNA, 21 nt, Homo sapiens
ugacugacagcuuuuugagua

SEQ ID NO: 39875 - RNA, 21 nt, Homo sapiens
ugacugacagcuuuuugagua

SEQ ID NO: 39876 - RNA, 23 nt, Homo sapiens
agcagcauuguacagggcuauga

SEQ ID NO: 39877 - RNA, 19 nt, Homo sapiens
cagcaucagcagcaucauc

SEQ ID NO: 39878 - RNA, 22 nt, Homo sapiens
cacaaaccauuaugugcugcua

SEQ ID NO: 39879 - RNA, 23 nt, Homo sapiens
cuaucugcacuagaugcaccuua

SEQ ID NO: 39880 - RNA, 22 nt, Homo sapiens
cagaagugggccgggcacaggg

SEQ ID NO: 39881 - RNA, 22 nt, Homo sapiens
ugagccacugugccuggccuga

SEQ ID NO: 39882 - RNA, 23 nt, Homo sapiens
gaacagguagucugaacacuggg

SEQ ID NO: 39883 - RNA, 23 nt, Homo sapiens
gaacagauagucuaaacacuggg

SEQ ID NO: 39884 - RNA, 23 nt, Homo sapiens
uccaucauuacccggcaguauua

SEQ ID NO: 39885 - RNA, 22 nt, Homo sapiens
cuguuccugcugaacugagcca

SEQ ID NO: 39886 - RNA, 22 nt, Homo sapiens
gaauucaucacggccagccucu

SEQ ID NO: 39887 - RNA, 23 nt, Homo sapiens
gggcucuuacucccucaggcacu

SEQ ID NO: 39888 - RNA, 21 nt, Homo sapiens
gaaggaagugagugcagccac

SEQ ID NO: 39889 - RNA, 21 nt, Homo sapiens
aggagacucacaaguuccugc

SEQ ID NO: 39890 - RNA, 22 nt, Homo sapiens
ucggucccucgggccagggcag

SEQ ID NO: 39891 - RNA, 22 nt, Homo sapiens
aggucucacuuuguugcccaga

SEQ ID NO: 39892 - RNA, 20 nt, Homo sapiens
cccgccgcgucgcccugggg

SEQ ID NO: 39893 - RNA, 23 nt, Homo sapiens
cagcugcuuuugggauuccguug

SEQ ID NO: 39894 - RNA, 23 nt, Homo sapiens
agaggcaggcaugcgggcagaca

SEQ ID NO: 39895 - RNA, 21 nt, Homo sapiens
ugacugcagagcaaaagacac

SEQ ID NO: 39896 - RNA, 25 nt, Homo sapiens
aaggagcucagaagcccugcccagc

SEQ ID NO: 39897 - RNA, 22 nt, Homo sapiens
uccucuuuucuuagagacucac

SEQ ID NO: 39898 - RNA, 21 nt, Homo sapiens
guccugagagcgcugccuccu

SEQ ID NO: 39899 - RNA, 22 nt, Homo sapiens
gcugaggcuguggggcuggagu

SEQ ID NO: 39900 - RNA, 23 nt, Homo sapiens
agcagcauuguacagggcuauga

SEQ ID NO: 39901 - RNA, 20 nt, Homo sapiens
gcagcuguccgcccagacac

SEQ ID NO: 39902 - RNA, 27 nt, Homo sapiens
uuuagcacagugcuuauacaagaaggu

SEQ ID NO: 39903 - RNA, 22 nt, Homo sapiens
gcacaaaucuccagaccaccca

SEQ ID NO: 39904 - RNA, 22 nt, Homo sapiens
gaaccuaucuccccucuggacc

SEQ ID NO: 39905 - RNA, 22 nt, Homo sapiens
ucagccgcugucacacgcacag

SEQ ID NO: 39906 - RNA, 22 nt, Homo sapiens
acaaaaguugccuuugugugau

SEQ ID NO: 39907 - RNA, 21 nt, Homo sapiens
ccuucugacuccaaguccagu

SEQ ID NO: 39908 - RNA, 22 nt, Homo sapiens
gccuucugacccuaaguccagu

SEQ ID NO: 39909 - RNA, 21 nt, Homo sapiens
caucaccuuccuucuccucca

SEQ ID NO: 39910 - RNA, 22 nt, Homo sapiens
ugaauuacuuuguaaaccacca

SEQ ID NO: 39911 - RNA, 22 nt, Homo sapiens
cacucuaaagggaggcacuuug

SEQ ID NO: 39912 - RNA, 20 nt, Homo sapiens
uacugcuuccacagcucccc

SEQ ID NO: 39913 - RNA, 19 nt, Homo sapiens
ccaccucccgaguccucac

SEQ ID NO: 39914 - RNA, 22 nt, Homo sapiens
ccaguagcacggcucaguccag

SEQ ID NO: 39915 - RNA, 22 nt, Homo sapiens
ccccucuggucaaccagucaca

SEQ ID NO: 39916 - RNA, 20 nt, Homo sapiens
gcagaagcauuuccacacac

SEQ ID NO: 39917 - RNA, 25 nt, Homo sapiens
agcuagucaagcgcgguuguggggg

SEQ ID NO: 39918 - RNA, 21 nt, Homo sapiens
gcggaacuuagccacugugaa

SEQ ID NO: 39919 - RNA, 21 nt, Homo sapiens
gcagaacuuagccacugugaa

SEQ ID NO: 39920 - RNA, 22 nt, Homo sapiens
uauucaggaacauauugcaaaa

SEQ ID NO: 39921 - RNA, 22 nt, Homo sapiens
uauucaggaacauauugcaaaa

SEQ ID NO: 39922 - RNA, 21 nt, Homo sapiens
guguauaugcccauggacugc

SEQ ID NO: 39923 - RNA, 20 nt, Homo sapiens
gaaagggcuucccuuugcag

SEQ ID NO: 39924 - RNA, 20 nt, Homo sapiens
gaaagggcuucccuuugcag

SEQ ID NO: 39925 - RNA, 20 nt, Homo sapiens
gaaagggcuucccuuugcag

SEQ ID NO: 39926 - RNA, 20 nt, Homo sapiens
gaaagggcuucccuuugcag

SEQ ID NO: 39927 - RNA, 22 nt, Homo sapiens
gacaaaacccgcaaauacuuuu

SEQ ID NO: 39928 - RNA, 22 nt, Homo sapiens
acaaaauccacaauuacuuuug

SEQ ID NO: 39929 - RNA, 20 nt, Homo sapiens
agagaugagagaaacacccu

SEQ ID NO: 39930 - RNA, 23 nt, Homo sapiens
ucauacagcuagauaaccaaaga

SEQ ID NO: 39931 - RNA, 21 nt, Homo sapiens
cuggaggacggcaacagucag

SEQ ID NO: 39932 - RNA, 23 nt, Homo sapiens
ggaagccaucaagucgcugcagg

SEQ ID NO: 39933 - RNA, 20 nt, Homo sapiens
cucaaagcaaacccugcaga

SEQ ID NO: 39934 - RNA, 18 nt, Homo sapiens
gaaaugagggccagcuga

SEQ ID NO: 39935 - RNA, 18 nt, Homo sapiens
aucacauucaccucccug

SEQ ID NO: 39936 - RNA, 23 nt, Homo sapiens
gggagugaagacacggagccaga

SEQ ID NO: 39937 - RNA, 21 nt, Homo sapiens
gaccaaucgccguccccgccg

SEQ ID NO: 39938 - RNA, 22 nt, Homo sapiens
cggugagcacccggccccugcg

SEQ ID NO: 39939 - RNA, 22 nt, Homo sapiens
ucaucucgcccgcaaagaccca

SEQ ID NO: 39940 - RNA, 22 nt, Homo sapiens
acaguucuucaacuggcagcuu

SEQ ID NO: 39941 - RNA, 22 nt, Homo sapiens
auggcaguggaguuagugauug

SEQ ID NO: 39942 - RNA, 23 nt, Homo sapiens
aaagucucgcucucugccccuca

SEQ ID NO: 39943 - RNA, 22 nt, Homo sapiens
gauagagugcagaccagggucu

SEQ ID NO: 39944 - RNA, 20 nt, Homo sapiens
ugggccaccgccgagcggac

SEQ ID NO: 39945 - RNA, 22 nt, Homo sapiens
gcggucccgcggcgccccgccu

SEQ ID NO: 39946 - RNA, 21 nt, Homo sapiens
acuccaaagggaagcgccuuc

SEQ ID NO: 39947 - RNA, 21 nt, Homo sapiens
gagcugcauccuggcuccggg

SEQ ID NO: 39948 - RNA, 22 nt, Homo sapiens
gaaaagccagggucuguauaga

SEQ ID NO: 39949 - RNA, 22 nt, Homo sapiens
ggagcccgcgccccgcgccgag

SEQ ID NO: 39950 - RNA, 21 nt, Homo sapiens
gggcaucugggacgcgcagga

SEQ ID NO: 39951 - RNA, 22 nt, Homo sapiens
auaaggauuuuuaggggcauua

SEQ ID NO: 39952 - RNA, 23 nt, Homo sapiens
aaagucucgcucucugccccuca

SEQ ID NO: 39953 - RNA, 23 nt, Homo sapiens
ccacccaaugaccuacuccaaga

SEQ ID NO: 39954 - RNA, 20 nt, Homo sapiens
ugggccaccgccgagcggac

SEQ ID NO: 39955 - RNA, 22 nt, Homo sapiens
gccaccuucaaaugggaagucu

SEQ ID NO: 39956 - RNA, 21 nt, Homo sapiens
cacaacccuaguggcgccauu

SEQ ID NO: 39957 - RNA, 24 nt, Homo sapiens
acugcaggcuccagcuuccaggcu

SEQ ID NO: 39958 - RNA, 21 nt, Homo sapiens
cggggugcacgggcggagggc

SEQ ID NO: 39959 - RNA, 22 nt, Homo sapiens
cuguuccugcugaacugagcca

SEQ ID NO: 39960 - RNA, 22 nt, Homo sapiens
ucgcccucucaacccagcuuuu

SEQ ID NO: 39961 - RNA, 22 nt, Homo sapiens
uugcccucucaacccagcuuuu

SEQ ID NO: 39962 - RNA, 20 nt, Homo sapiens
acccucucaacccagcuuuu

SEQ ID NO: 39963 - RNA, 19 nt, Homo sapiens
uccucucaacccagcuuuu

SEQ ID NO: 39964 - RNA, 22 nt, Homo sapiens
uacagauggauaccgugcaauu

SEQ ID NO: 39965 - RNA, 20 nt, Homo sapiens
ugggccaccgccgagcggac

SEQ ID NO: 39966 - RNA, 25 nt, Homo sapiens
accaacggaccuacuucccuccgcc

SEQ ID NO: 39967 - RNA, 22 nt, Homo sapiens
uauccacuacaccccgcugccu

SEQ ID NO: 39968 - RNA, 21 nt, Homo sapiens
cuacgcagaaaggacacagug

SEQ ID NO: 39969 - RNA, 21 nt, Homo sapiens
cucccccacugcagcuggcac

SEQ ID NO: 39970 - RNA, 22 nt, Homo sapiens
cuggagagacaaggggaagagg

SEQ ID NO: 39971 - RNA, 18 nt, Homo sapiens
uggcgccugaacagggac

SEQ ID NO: 39972 - RNA, 21 nt, Homo sapiens
aggcggcaggcacaggacugg

SEQ ID NO: 39973 - RNA, 23 nt, Homo sapiens
cccaacagacauggcgguacuca

SEQ ID NO: 39974 - RNA, 23 nt, Homo sapiens
cgugagcuccuggaggacaggga

SEQ ID NO: 39975 - RNA, 23 nt, Homo sapiens
augcaaaguugcucggguaaccu

SEQ ID NO: 39976 - RNA, 23 nt, Homo sapiens
aaagucucgcucucugccccuca

SEQ ID NO: 39977 - RNA, 22 nt, Homo sapiens
aucgggaggggacugagccuga

SEQ ID NO: 39978 - RNA, 21 nt, Homo sapiens
cacucugaagggaagcgcuuu

SEQ ID NO: 39979 - RNA, 22 nt, Homo sapiens
uauccacuacaccccgcugccu

SEQ ID NO: 39980 - RNA, 22 nt, Homo sapiens
agccaagcucagacggauccga

SEQ ID NO: 39981 - RNA, 23 nt, Homo sapiens
gggagugaagacacggagccaga

SEQ ID NO: 39982 - RNA, 21 nt, Homo sapiens
ggaaaucccuggcaaugugau

SEQ ID NO: 39983 - RNA, 21 nt, Homo sapiens
gguaaucccuggcaaugugau

(The sequence listing continues in the following parts.)

What is claimed is:

1. A method of modulating expression of a target gene in a cell comprising contacting an endogenous miRNA complementary to a portion of a promoter of the target gene with a single-stranded complementary oligonucleotide that hybridizes to the miRNA, thereby modulating expression of the target gene.

2. The method of claim 1, wherein the miRNA targets a non-coding RNA (ncRNA) transcribed from the promoter.

3. The method of claim 1, wherein the single-stranded complementary oligonucleotide comprises at least one locked nucleic acid (LNA) base.

4. The method of claim 1, wherein the single-stranded complementary oligonucleotide comprises at least one 2′-O-methyl (2′-O-me) base.

5. The method of claim 1, wherein the miRNA is 80%, 85%, 90%, 95% or 100% complementary to the portion of the promoter.

6. The method of claim 1, wherein the single-stranded complementary oligonucleotide is the same length as the miRNA.

7. The method of claim 1, wherein the single-stranded complementary oligonucleotide is shorter than the miRNA.

8. The method of claim 1, wherein the target gene is trophinin associated protein (TROAP), proline-rich nuclear receptor coactivator 2 (PNRC2), protein phosphatase 2C, Mg-dependent catalytic subunit (PPM2C), pregnancy specific beta-1-glycoprotein 1 (PSG1), anterior pharynx defective 1 homolog B (C. elegans) (APH1B), U2AF homology motif (UHM) kinase 1 (UHMK1), ring finger protein 165 (RNF165), catechol O-methyltransferase (COMT), tyrosine protein kinse O3 (TYRO3), γ-aminobutyric acid A receptor α2 (GABRA2) or calcium/calmodulin-dependent protein kinase II inhibitor 1 (CAMK2N1).

9. The method of claim 1, wherein the target gene is brain and reproductive organ-expressed (TNFRSF1A modulator) (BRE); caveolin 1 (caveolae protein, 22 kDa, CAV1); inhibin, alpha (INHA); ribonuclease/angiogenin inhibitor 1 (RNH1); Sp1 transcription factor (SP1); DEK oncogene (DNA binding) (DEK); hepatic leukemia factor (HLF); opioid receptor, kappa 1 (OPRK1); or glyceraldehyde-3-phosphate dehydrogenase, spermatogenic (GAPDHS).

10. The method of claim 1, wherein the target gene is a native gene.

11. The method of claim 10, wherein said cell is located in situ in a host, and the contacting step is effected by administering to the host an effective amount of the complementary oligonucleotide.

12. The method of claim 10, wherein the target gene is Caveolin-1 in a metastatic cell, the contacting step is effected by contacting the cell with an effective amount of the complementary oligonucleotide comprising locked nucleic acid (LNA) or 2′-O-methyl (2′-O-me) bases.

13. The method of claim 10, wherein the target gene is MAPKAPK2 in situ in a host, the contacting step is effected by administering to the host an effective amount of the complementary oligonucleotide comprising locked nucleic acid (LNA) or 2′-O-methyl (2′-O-me) bases.

14. The method of claim 1, wherein the expression of the target gene is increased.

15. The method of claim 1, wherein the expression of the target gene is decreased.

16. The method of claim 1, further comprising detecting a change in the expression of the target gene.

17. The method of claim 16, wherein detecting comprises inferring a change in the expression of the target gene from a physiologic change in the cell.

18. The method of claim 16, wherein the cell is located in situ in a host and detecting comprises inferring a change in the expression of the target gene from a physiologic change in the host.

19. The method of claim 1, wherein said portion lies between −200 and −1 relative to a transcriptional start site of the target gene.

20. The method of claim 1, wherein said portion lies between −500 and −201 relative to a transcriptional start site of the target gene.

21. The method of claim 1, wherein said portion lies between −2000 and −501 relative to a transcriptional start site of the target gene.

22. The method of claim 1, further comprising the step of identifying the endogenous miRNA.

23. The method of claim 22, wherein identifying comprises identifying an miRNA seed region is the promoter.

24. The method of claim 23, wherein identifying comprises calculating a minimum free energy for said seed region.

25. The method of claim 16, wherein detecting comprises one or more of Northern blot, PCR, immunohistochemistry, Western blot or ELISA.

26. A method for identifying an endogenous miRNA that modulates expression of a target gene:
(a) identifying an endogenous miRNA exhibiting complementarity to a portion of a promoter of the target gene; and
(b) assessing the ability of the complementary miRNA to modulate expression of the target gene.
